United States Patent Application Publication US 2014/0004565 A1 - sequence listing, part 64

SEQ ID NO: 1542875 - RNA, 19 nt, Artificial Sequence
  Description of Artificial Sequence: Synthetic oligonucleotide
acaacgauugucaggccaa

SEQ ID NO: 1542876 - RNA, 19 nt, Artificial Sequence
  Description of Artificial Sequence: Synthetic oligonucleotide
gcauaugacgaugguggcg

SEQ ID NO: 1542877 - RNA, 19 nt, Artificial Sequence
  Description of Artificial Sequence: Synthetic oligonucleotide
caaccccuggggacaagcc

SEQ ID NO: 1542878 - RNA, 19 nt, Artificial Sequence
  Description of Artificial Sequence: Synthetic oligonucleotide
gguggguggaaaaucuggc

SEQ ID NO: 1542879 - RNA, 19 nt, Artificial Sequence
  Description of Artificial Sequence: Synthetic oligonucleotide
ugccuaccuggucagcauc

SEQ ID NO: 1542880 - RNA, 19 nt, Artificial Sequence
  Description of Artificial Sequence: Synthetic oligonucleotide
uagcugggcgccacacuug

SEQ ID NO: 1542881 - RNA, 19 nt, Artificial Sequence
  Description of Artificial Sequence: Synthetic oligonucleotide
uagggcgguggguacugug

SEQ ID NO: 1542882 - RNA, 19 nt, Artificial Sequence
  Description of Artificial Sequence: Synthetic oligonucleotide
uccauguaggccggauugu

SEQ ID NO: 1542883 - RNA, 19 nt, Artificial Sequence
  Description of Artificial Sequence: Synthetic oligonucleotide
ugaaugcugagugcaugua

SEQ ID NO: 1542884 - RNA, 19 nt, Artificial Sequence
  Description of Artificial Sequence: Synthetic oligonucleotide
uacaggagucagguauucu

SEQ ID NO: 1542885 - RNA, 19 nt, Artificial Sequence
  Description of Artificial Sequence: Synthetic oligonucleotide
cggcacaucuuauacagac

SEQ ID NO: 1542886 - RNA, 19 nt, Artificial Sequence
  Description of Artificial Sequence: Synthetic oligonucleotide
aucucagcgccgaacccag

SEQ ID NO: 1542887 - RNA, 19 nt, Artificial Sequence
  Description of Artificial Sequence: Synthetic oligonucleotide
acaaugggaucagguuguc

SEQ ID NO: 1542888 - RNA, 19 nt, Artificial Sequence
  Description of Artificial Sequence: Synthetic oligonucleotide
caugccacucacucacaca

SEQ ID NO: 1542889 - RNA, 19 nt, Artificial Sequence
  Description of Artificial Sequence: Synthetic oligonucleotide
ugaggguaagggguaugaa

SEQ ID NO: 1542890 - RNA, 19 nt, Artificial Sequence
  Description of Artificial Sequence: Synthetic oligonucleotide
guaaggguuugugccuacc

SEQ ID NO: 1542891 - RNA, 19 nt, Artificial Sequence
  Description of Artificial Sequence: Synthetic oligonucleotide
uccggguggguggaaaauc

SEQ ID NO: 1542892 - RNA, 19 nt, Artificial Sequence
  Description of Artificial Sequence: Synthetic oligonucleotide
auaagccugcacggcucac

SEQ ID NO: 1542893 - RNA, 19 nt, Artificial Sequence
  Description of Artificial Sequence: Synthetic oligonucleotide
gucgcuccaaacccugaca

SEQ ID NO: 1542894 - RNA, 19 nt, Artificial Sequence
  Description of Artificial Sequence: Synthetic oligonucleotide
ggcccugaccagcagcuag

SEQ ID NO: 1542895 - RNA, 19 nt, Artificial Sequence
  Description of Artificial Sequence: Synthetic oligonucleotide
acagucgcuccaaacccug

SEQ ID NO: 1542896 - RNA, 19 nt, Artificial Sequence
  Description of Artificial Sequence: Synthetic oligonucleotide
ucgaaaucucagcgccgaa

SEQ ID NO: 1542897 - RNA, 19 nt, Artificial Sequence
  Description of Artificial Sequence: Synthetic oligonucleotide
ugguaaggguuugugccua

SEQ ID NO: 1542898 - RNA, 19 nt, Artificial Sequence
  Description of Artificial Sequence: Synthetic oligonucleotide
cacggcucacccugggcac

SEQ ID NO: 1542899 - RNA, 19 nt, Artificial Sequence
  Description of Artificial Sequence: Synthetic oligonucleotide
caauggcgacagucgcucc

SEQ ID NO: 1542900 - RNA, 19 nt, Artificial Sequence
  Description of Artificial Sequence: Synthetic oligonucleotide
caacaggguccgcggagag

SEQ ID NO: 1542901 - RNA, 19 nt, Artificial Sequence
  Description of Artificial Sequence: Synthetic oligonucleotide
ccugguauguugguccagg

SEQ ID NO: 1542902 - RNA, 19 nt, Artificial Sequence
  Description of Artificial Sequence: Synthetic oligonucleotide
uggucacuauagggcgugg

SEQ ID NO: 1542903 - RNA, 19 nt, Artificial Sequence
  Description of Artificial Sequence: Synthetic oligonucleotide
ugucggguagggugcugcu

SEQ ID NO: 1542904 - RNA, 19 nt, Artificial Sequence
  Description of Artificial Sequence: Synthetic oligonucleotide
aggcagaaaacaaggcaaa

SEQ ID NO: 1542905 - RNA, 19 nt, Artificial Sequence
  Description of Artificial Sequence: Synthetic oligonucleotide
ggccaauggcgacagucgc

SEQ ID NO: 1542906 - RNA, 19 nt, Artificial Sequence
  Description of Artificial Sequence: Synthetic oligonucleotide
ggugaacugggaaauaccu

SEQ ID NO: 1542907 - RNA, 19 nt, Artificial Sequence
  Description of Artificial Sequence: Synthetic oligonucleotide
ggcacagccauggcgagac

SEQ ID NO: 1542908 - RNA, 19 nt, Artificial Sequence
  Description of Artificial Sequence: Synthetic oligonucleotide
gguaugaaccacgguggug

SEQ ID NO: 1542909 - RNA, 19 nt, Artificial Sequence
  Description of Artificial Sequence: Synthetic oligonucleotide
ugagugcauguagcccucc

SEQ ID NO: 1542910 - RNA, 19 nt, Artificial Sequence
  Description of Artificial Sequence: Synthetic oligonucleotide
agaggccccuugccuagug

SEQ ID NO: 1542911 - RNA, 19 nt, Artificial Sequence
  Description of Artificial Sequence: Synthetic oligonucleotide
gguagacagaggccccuug

SEQ ID NO: 1542912 - RNA, 19 nt, Artificial Sequence
  Description of Artificial Sequence: Synthetic oligonucleotide
auggcgagacaggcagacg

SEQ ID NO: 1542913 - RNA, 19 nt, Artificial Sequence
  Description of Artificial Sequence: Synthetic oligonucleotide
ugccuaguggcaggagcca

SEQ ID NO: 1542914 - RNA, 19 nt, Artificial Sequence
  Description of Artificial Sequence: Synthetic oligonucleotide
uccuaccccaauguuucua

SEQ ID NO: 1542915 - RNA, 19 nt, Artificial Sequence
  Description of Artificial Sequence: Synthetic oligonucleotide
cgccaauaagccugcacgg

SEQ ID NO: 1542916 - RNA, 19 nt, Artificial Sequence
  Description of Artificial Sequence: Synthetic oligonucleotide
gugucggguagggugcugc

SEQ ID NO: 1542917 - RNA, 19 nt, Artificial Sequence
  Description of Artificial Sequence: Synthetic oligonucleotide
ccaagccacacugguaagg

SEQ ID NO: 1542918 - RNA, 19 nt, Artificial Sequence
  Description of Artificial Sequence: Synthetic oligonucleotide
cagguagggcgguggguac

SEQ ID NO: 1542919 - RNA, 19 nt, Artificial Sequence
  Description of Artificial Sequence: Synthetic oligonucleotide
aggguuagacaaggcacau

SEQ ID NO: 1542920 - RNA, 19 nt, Artificial Sequence
  Description of Artificial Sequence: Synthetic oligonucleotide
gccaauaagccugcacggc

SEQ ID NO: 1542921 - RNA, 19 nt, Artificial Sequence
  Description of Artificial Sequence: Synthetic oligonucleotide
gaugaacaccacaacgauu

SEQ ID NO: 1542922 - RNA, 19 nt, Artificial Sequence
  Description of Artificial Sequence: Synthetic oligonucleotide
ugacaggccauggcugguc

SEQ ID NO: 1542923 - RNA, 19 nt, Artificial Sequence
  Description of Artificial Sequence: Synthetic oligonucleotide
cuccggugucuccgggugg

SEQ ID NO: 1542924 - RNA, 19 nt, Artificial Sequence
  Description of Artificial Sequence: Synthetic oligonucleotide
guagcugggcgccacacuu

SEQ ID NO: 1542925 - RNA, 19 nt, Artificial Sequence
  Description of Artificial Sequence: Synthetic oligonucleotide
cucaugguaggcugguggu

SEQ ID NO: 1542926 - RNA, 19 nt, Artificial Sequence
  Description of Artificial Sequence: Synthetic oligonucleotide
gcuggugucaagggaaaca

SEQ ID NO: 1542927 - RNA, 19 nt, Artificial Sequence
  Description of Artificial Sequence: Synthetic oligonucleotide
auguugguccaggguagcu

SEQ ID NO: 1542928 - RNA, 19 nt, Artificial Sequence
  Description of Artificial Sequence: Synthetic oligonucleotide
ggcuggucaccuuggggug

SEQ ID NO: 1542929 - RNA, 19 nt, Artificial Sequence
  Description of Artificial Sequence: Synthetic oligonucleotide
agggcgccggcacagccau

SEQ ID NO: 1542930 - RNA, 19 nt, Artificial Sequence
  Description of Artificial Sequence: Synthetic oligonucleotide
gaaauaccuccuaccccaa

SEQ ID NO: 1542931 - RNA, 19 nt, Artificial Sequence
  Description of Artificial Sequence: Synthetic oligonucleotide
uagggcguggucggcggca

SEQ ID NO: 1542932 - RNA, 19 nt, Artificial Sequence
  Description of Artificial Sequence: Synthetic oligonucleotide
cugcacggcucacccuggg

SEQ ID NO: 1542933 - RNA, 19 nt, Artificial Sequence
  Description of Artificial Sequence: Synthetic oligonucleotide
uggcuggaacaggaaccgc

SEQ ID NO: 1542934 - RNA, 19 nt, Artificial Sequence
  Description of Artificial Sequence: Synthetic oligonucleotide
auaugacgaugguggcgau

SEQ ID NO: 1542935 - RNA, 19 nt, Artificial Sequence
  Description of Artificial Sequence: Synthetic oligonucleotide
ccaauggcgacagucgcuc

SEQ ID NO: 1542936 - RNA, 19 nt, Artificial Sequence
  Description of Artificial Sequence: Synthetic oligonucleotide
ccugaaugcugagugcaug

SEQ ID NO: 1542937 - RNA, 19 nt, Artificial Sequence
  Description of Artificial Sequence: Synthetic oligonucleotide
gguaaggguuugugccuac

SEQ ID NO: 1542938 - RNA, 19 nt, Artificial Sequence
  Description of Artificial Sequence: Synthetic oligonucleotide
gaaaucagggcaggacaau

SEQ ID NO: 1542939 - RNA, 19 nt, Artificial Sequence
  Description of Artificial Sequence: Synthetic oligonucleotide
gacagucgcuccaaacccu

SEQ ID NO: 1542940 - RNA, 19 nt, Artificial Sequence
  Description of Artificial Sequence: Synthetic oligonucleotide
ugugucggguagggugcug

SEQ ID NO: 1542941 - RNA, 19 nt, Artificial Sequence
  Description of Artificial Sequence: Synthetic oligonucleotide
ggcacaucuuauacagaca

SEQ ID NO: 1542942 - RNA, 19 nt, Artificial Sequence
  Description of Artificial Sequence: Synthetic oligonucleotide
cauguaggccggauuguau

SEQ ID NO: 1542943 - RNA, 19 nt, Artificial Sequence
  Description of Artificial Sequence: Synthetic oligonucleotide
auggcgacagucgcuccaa

SEQ ID NO: 1542944 - RNA, 19 nt, Artificial Sequence
  Description of Artificial Sequence: Synthetic oligonucleotide
gucucaugguaggcuggug

SEQ ID NO: 1542945 - RNA, 19 nt, Artificial Sequence
  Description of Artificial Sequence: Synthetic oligonucleotide
ccaaggucucaugguaggc

SEQ ID NO: 1542946 - RNA, 19 nt, Artificial Sequence
  Description of Artificial Sequence: Synthetic oligonucleotide
aggguagcugggcgccaca

SEQ ID NO: 1542947 - RNA, 19 nt, Artificial Sequence
  Description of Artificial Sequence: Synthetic oligonucleotide
cagguugucuucgccaaua

SEQ ID NO: 1542948 - RNA, 19 nt, Artificial Sequence
  Description of Artificial Sequence: Synthetic oligonucleotide
gcucagggaacugccuuug

SEQ ID NO: 1542949 - RNA, 19 nt, Artificial Sequence
  Description of Artificial Sequence: Synthetic oligonucleotide
cgaaaucucagcgccgaac

SEQ ID NO: 1542950 - RNA, 19 nt, Artificial Sequence
  Description of Artificial Sequence: Synthetic oligonucleotide
ccuaccccaauguuucuaa

SEQ ID NO: 1542951 - RNA, 19 nt, Artificial Sequence
  Description of Artificial Sequence: Synthetic oligonucleotide
agguuggucccaagccaca

SEQ ID NO: 1542952 - RNA, 19 nt, Artificial Sequence
  Description of Artificial Sequence: Synthetic oligonucleotide
guagcccugguauguuggu

SEQ ID NO: 1542953 - RNA, 19 nt, Artificial Sequence
  Description of Artificial Sequence: Synthetic oligonucleotide
ugguggcgaugaacaccac

SEQ ID NO: 1542954 - RNA, 19 nt, Artificial Sequence
  Description of Artificial Sequence: Synthetic oligonucleotide
caggguagcugggcgccac

SEQ ID NO: 1542955 - RNA, 19 nt, Artificial Sequence
  Description of Artificial Sequence: Synthetic oligonucleotide
cagccaaccccuggggaca

SEQ ID NO: 1542956 - RNA, 19 nt, Artificial Sequence
  Description of Artificial Sequence: Synthetic oligonucleotide
gccuaguggcaggagccag

SEQ ID NO: 1542957 - RNA, 19 nt, Artificial Sequence
  Description of Artificial Sequence: Synthetic oligonucleotide
ccugcacggcucacccugg

SEQ ID NO: 1542958 - RNA, 19 nt, Artificial Sequence
  Description of Artificial Sequence: Synthetic oligonucleotide
ggauuguauggaggcugac

SEQ ID NO: 1542959 - RNA, 19 nt, Artificial Sequence
  Description of Artificial Sequence: Synthetic oligonucleotide
cccaagccacacugguaag

SEQ ID NO: 1542960 - RNA, 19 nt, Artificial Sequence
  Description of Artificial Sequence: Synthetic oligonucleotide
gacuggcuccagccaaggu

SEQ ID NO: 1542961 - RNA, 19 nt, Artificial Sequence
  Description of Artificial Sequence: Synthetic oligonucleotide
gcgagacaggcagacggac

SEQ ID NO: 1542962 - RNA, 19 nt, Artificial Sequence
  Description of Artificial Sequence: Synthetic oligonucleotide
gggacaagccauggcccug

SEQ ID NO: 1542963 - RNA, 19 nt, Artificial Sequence
  Description of Artificial Sequence: Synthetic oligonucleotide
aggcugaggguaaggggua

SEQ ID NO: 1542964 - RNA, 19 nt, Artificial Sequence
  Description of Artificial Sequence: Synthetic oligonucleotide
ccacaacgauugucaggcc

SEQ ID NO: 1542965 - RNA, 19 nt, Artificial Sequence
  Description of Artificial Sequence: Synthetic oligonucleotide
accuuggggugaacuggga

SEQ ID NO: 1542966 - RNA, 19 nt, Artificial Sequence
  Description of Artificial Sequence: Synthetic oligonucleotide
gaaccacgguggugguugu

SEQ ID NO: 1542967 - RNA, 19 nt, Artificial Sequence
  Description of Artificial Sequence: Synthetic oligonucleotide
ggguaugaaccacgguggu

SEQ ID NO: 1542968 - RNA, 19 nt, Artificial Sequence
  Description of Artificial Sequence: Synthetic oligonucleotide
gugucuccgggugggugga

SEQ ID NO: 1542969 - RNA, 19 nt, Artificial Sequence
  Description of Artificial Sequence: Synthetic oligonucleotide
ggcgagacaggcagacgga

SEQ ID NO: 1542970 - RNA, 19 nt, Artificial Sequence
  Description of Artificial Sequence: Synthetic oligonucleotide
gcccugguauguuggucca

SEQ ID NO: 1542971 - RNA, 19 nt, Artificial Sequence
  Description of Artificial Sequence: Synthetic oligonucleotide
gucccacgggcugggccag

SEQ ID NO: 1542972 - RNA, 19 nt, Artificial Sequence
  Description of Artificial Sequence: Synthetic oligonucleotide
gugccuaccuggucagcau

SEQ ID NO: 1542973 - RNA, 19 nt, Artificial Sequence
  Description of Artificial Sequence: Synthetic oligonucleotide
caaugggaucagguugucu

SEQ ID NO: 1542974 - RNA, 19 nt, Artificial Sequence
  Description of Artificial Sequence: Synthetic oligonucleotide
cgcuccaaacccugacaug

SEQ ID NO: 1542975 - RNA, 19 nt, Artificial Sequence
  Description of Artificial Sequence: Synthetic oligonucleotide
guccgcggagagggcgccg

SEQ ID NO: 1542976 - RNA, 19 nt, Artificial Sequence
  Description of Artificial Sequence: Synthetic oligonucleotide
gcuggucaccuugggguga

SEQ ID NO: 1542977 - RNA, 19 nt, Artificial Sequence
  Description of Artificial Sequence: Synthetic oligonucleotide
agccaaccccuggggacaa

SEQ ID NO: 1542978 - RNA, 19 nt, Artificial Sequence
  Description of Artificial Sequence: Synthetic oligonucleotide
acccugacauggggucacu

SEQ ID NO: 1542979 - RNA, 19 nt, Artificial Sequence
  Description of Artificial Sequence: Synthetic oligonucleotide
ccuccggcucagugcacac

SEQ ID NO: 1542980 - RNA, 19 nt, Artificial Sequence
  Description of Artificial Sequence: Synthetic oligonucleotide
cuccggcucagugcacaca

SEQ ID NO: 1542981 - RNA, 19 nt, Artificial Sequence
  Description of Artificial Sequence: Synthetic oligonucleotide
ccggguggguggaaaaucu

SEQ ID NO: 1542982 - RNA, 19 nt, Artificial Sequence
  Description of Artificial Sequence: Synthetic oligonucleotide
ggucacuauagggcguggu

SEQ ID NO: 1542983 - RNA, 19 nt, Artificial Sequence
  Description of Artificial Sequence: Synthetic oligonucleotide
ccuugccuaguggcaggag

SEQ ID NO: 1542984 - RNA, 19 nt, Artificial Sequence
  Description of Artificial Sequence: Synthetic oligonucleotide
cuucgccaauaagccugca

SEQ ID NO: 1542985 - RNA, 19 nt, Artificial Sequence
  Description of Artificial Sequence: Synthetic oligonucleotide
gguccgcggagagggcgcc

SEQ ID NO: 1542986 - RNA, 19 nt, Artificial Sequence
  Description of Artificial Sequence: Synthetic oligonucleotide
gcgccacacuuggaggcug

SEQ ID NO: 1542987 - RNA, 19 nt, Artificial Sequence
  Description of Artificial Sequence: Synthetic oligonucleotide
cccugacauggggucacug

SEQ ID NO: 1542988 - RNA, 19 nt, Artificial Sequence
  Description of Artificial Sequence: Synthetic oligonucleotide
gccaauggcgacagucgcu

SEQ ID NO: 1542989 - RNA, 19 nt, Artificial Sequence
  Description of Artificial Sequence: Synthetic oligonucleotide
ccauguaggccggauugua

SEQ ID NO: 1542990 - RNA, 19 nt, Artificial Sequence
  Description of Artificial Sequence: Synthetic oligonucleotide
caacgauugucaggccaau

SEQ ID NO: 1542991 - RNA, 19 nt, Artificial Sequence
  Description of Artificial Sequence: Synthetic oligonucleotide
ccauggcgagacaggcaga

SEQ ID NO: 1542992 - RNA, 19 nt, Artificial Sequence
  Description of Artificial Sequence: Synthetic oligonucleotide
cggcggcacaucuuauaca

SEQ ID NO: 1542993 - RNA, 19 nt, Artificial Sequence
  Description of Artificial Sequence: Synthetic oligonucleotide
ggcgccacacuuggaggcu

SEQ ID NO: 1542994 - RNA, 19 nt, Artificial Sequence
  Description of Artificial Sequence: Synthetic oligonucleotide
ggcugaggguaagggguau

SEQ ID NO: 1542995 - RNA, 19 nt, Artificial Sequence
  Description of Artificial Sequence: Synthetic oligonucleotide
ccccaccuaccugccucac

SEQ ID NO: 1542996 - RNA, 19 nt, Artificial Sequence
  Description of Artificial Sequence: Synthetic oligonucleotide
ggucggcggcacaucuuau

SEQ ID NO: 1542997 - RNA, 19 nt, Artificial Sequence
  Description of Artificial Sequence: Synthetic oligonucleotide
cggcacagccauggcgaga

SEQ ID NO: 1542998 - RNA, 19 nt, Artificial Sequence
  Description of Artificial Sequence: Synthetic oligonucleotide
ccggcucagugcacacauu

SEQ ID NO: 1542999 - RNA, 19 nt, Artificial Sequence
  Description of Artificial Sequence: Synthetic oligonucleotide
ccggugucuccgggugggu

SEQ ID NO: 1543000 - RNA, 19 nt, Artificial Sequence
  Description of Artificial Sequence: Synthetic oligonucleotide
gaucauuuccuucugaggg

SEQ ID NO: 1543001 - RNA, 19 nt, Artificial Sequence
  Description of Artificial Sequence: Synthetic oligonucleotide
aaaguuaaguugaaggccc

SEQ ID NO: 1543002 - RNA, 19 nt, Artificial Sequence
  Description of Artificial Sequence: Synthetic oligonucleotide
cugaaaguuaaguugaagg

SEQ ID NO: 1543003 - RNA, 19 nt, Artificial Sequence
  Description of Artificial Sequence: Synthetic oligonucleotide
uagggaaugacuuagguga

SEQ ID NO: 1543004 - RNA, 19 nt, Artificial Sequence
  Description of Artificial Sequence: Synthetic oligonucleotide
ugaaaguuaaguugaaggc

SEQ ID NO: 1543005 - RNA, 19 nt, Artificial Sequence
  Description of Artificial Sequence: Synthetic oligonucleotide
aaagauacugcauucgggu

SEQ ID NO: 1543006 - RNA, 19 nt, Artificial Sequence
  Description of Artificial Sequence: Synthetic oligonucleotide
acaguagagauccagauca

SEQ ID NO: 1543007 - RNA, 19 nt, Artificial Sequence
  Description of Artificial Sequence: Synthetic oligonucleotide
uaaaacacagucugacucg

SEQ ID NO: 1543008 - RNA, 19 nt, Artificial Sequence
  Description of Artificial Sequence: Synthetic oligonucleotide
acguacuugagcuagcuuc

SEQ ID NO: 1543009 - RNA, 19 nt, Artificial Sequence
  Description of Artificial Sequence: Synthetic oligonucleotide
gaugauuuucucuaccagc

SEQ ID NO: 1543010 - RNA, 19 nt, Artificial Sequence
  Description of Artificial Sequence: Synthetic oligonucleotide
uuagucaucgugcuaaagu

SEQ ID NO: 1543011 - RNA, 19 nt, Artificial Sequence
  Description of Artificial Sequence: Synthetic oligonucleotide
uguagaaaacccugguccg

SEQ ID NO: 1543012 - RNA, 19 nt, Artificial Sequence
  Description of Artificial Sequence: Synthetic oligonucleotide
ucugucacgagguugaggu

SEQ ID NO: 1543013 - RNA, 19 nt, Artificial Sequence
  Description of Artificial Sequence: Synthetic oligonucleotide
uugagcuagcuucaggagg

SEQ ID NO: 1543014 - RNA, 19 nt, Artificial Sequence
  Description of Artificial Sequence: Synthetic oligonucleotide
uguggcuuagaacucaucu

SEQ ID NO: 1543015 - RNA, 19 nt, Artificial Sequence
  Description of Artificial Sequence: Synthetic oligonucleotide
gaaaguuaaguugaaggcc

SEQ ID NO: 1543016 - RNA, 19 nt, Artificial Sequence
  Description of Artificial Sequence: Synthetic oligonucleotide
acugucgccauccacauug

SEQ ID NO: 1543017 - RNA, 19 nt, Artificial Sequence
  Description of Artificial Sequence: Synthetic oligonucleotide
aaaacccugguccgugacc

SEQ ID NO: 1543018 - RNA, 19 nt, Artificial Sequence
  Description of Artificial Sequence: Synthetic oligonucleotide
aaagugguuguuucgaaaa

SEQ ID NO: 1543019 - RNA, 19 nt, Artificial Sequence
  Description of Artificial Sequence: Synthetic oligonucleotide
uugcuguaagcucacacag

SEQ ID NO: 1543020 - RNA, 19 nt, Artificial Sequence
  Description of Artificial Sequence: Synthetic oligonucleotide
guaaaacacagucugacuc

SEQ ID NO: 1543021 - RNA, 19 nt, Artificial Sequence
  Description of Artificial Sequence: Synthetic oligonucleotide
uacucaaagucagagacgc

SEQ ID NO: 1543022 - RNA, 19 nt, Artificial Sequence
  Description of Artificial Sequence: Synthetic oligonucleotide
cagagcuagaguaaaacac

SEQ ID NO: 1543023 - RNA, 19 nt, Artificial Sequence
  Description of Artificial Sequence: Synthetic oligonucleotide
ucuuguugaaguugcuggg

SEQ ID NO: 1543024 - RNA, 19 nt, Artificial Sequence
  Description of Artificial Sequence: Synthetic oligonucleotide
aguugcuguaagcucacac

SEQ ID NO: 1543025 - RNA, 19 nt, Artificial Sequence
  Description of Artificial Sequence: Synthetic oligonucleotide
aguuucuacacuacuggcc

SEQ ID NO: 1543026 - RNA, 19 nt, Artificial Sequence
  Description of Artificial Sequence: Synthetic oligonucleotide
uagucaucgugcuaaagug

SEQ ID NO: 1543027 - RNA, 19 nt, Artificial Sequence
  Description of Artificial Sequence: Synthetic oligonucleotide
acuuaggugaaagucagag

SEQ ID NO: 1543028 - RNA, 19 nt, Artificial Sequence
  Description of Artificial Sequence: Synthetic oligonucleotide
aaagucagagucacaaaag

SEQ ID NO: 1543029 - RNA, 19 nt, Artificial Sequence
  Description of Artificial Sequence: Synthetic oligonucleotide
uugugcuuagucaucgugc

SEQ ID NO: 1543030 - RNA, 19 nt, Artificial Sequence
  Description of Artificial Sequence: Synthetic oligonucleotide
guugauacuccucuuguug

SEQ ID NO: 1543031 - RNA, 19 nt, Artificial Sequence
  Description of Artificial Sequence: Synthetic oligonucleotide
uguaugcccagguugaacu

SEQ ID NO: 1543032 - RNA, 19 nt, Artificial Sequence
  Description of Artificial Sequence: Synthetic oligonucleotide
caaagauacugcauucggg

SEQ ID NO: 1543033 - RNA, 19 nt, Artificial Sequence
  Description of Artificial Sequence: Synthetic oligonucleotide
ugagcuagcuucaggagga

SEQ ID NO: 1543034 - RNA, 19 nt, Artificial Sequence
  Description of Artificial Sequence: Synthetic oligonucleotide
gaaucgcacauugacaucc

SEQ ID NO: 1543035 - RNA, 19 nt, Artificial Sequence
  Description of Artificial Sequence: Synthetic oligonucleotide
gaaagucagagucacaaaa

SEQ ID NO: 1543036 - RNA, 19 nt, Artificial Sequence
  Description of Artificial Sequence: Synthetic oligonucleotide
agaucaggcuguugggucc

SEQ ID NO: 1543037 - RNA, 19 nt, Artificial Sequence
  Description of Artificial Sequence: Synthetic oligonucleotide
uuugccuagggaaugacuu

SEQ ID NO: 1543038 - RNA, 19 nt, Artificial Sequence
  Description of Artificial Sequence: Synthetic oligonucleotide
aguucaucuuccuuagcag

SEQ ID NO: 1543039 - RNA, 19 nt, Artificial Sequence
  Description of Artificial Sequence: Synthetic oligonucleotide
uacacuacuggccuuacua

SEQ ID NO: 1543040 - RNA, 19 nt, Artificial Sequence
  Description of Artificial Sequence: Synthetic oligonucleotide
ucagagucacaaaagcaac

SEQ ID NO: 1543041 - RNA, 19 nt, Artificial Sequence
  Description of Artificial Sequence: Synthetic oligonucleotide
cacaaaagcaacugucgcc

SEQ ID NO: 1543042 - RNA, 19 nt, Artificial Sequence
  Description of Artificial Sequence: Synthetic oligonucleotide
agucacaaaagcaacuguc

SEQ ID NO: 1543043 - RNA, 19 nt, Artificial Sequence
  Description of Artificial Sequence: Synthetic oligonucleotide
ugagguuguuccauguuga

SEQ ID NO: 1543044 - RNA, 19 nt, Artificial Sequence
  Description of Artificial Sequence: Synthetic oligonucleotide
acugcauucggguguguac

SEQ ID NO: 1543045 - RNA, 19 nt, Artificial Sequence
  Description of Artificial Sequence: Synthetic oligonucleotide
uucugguccggacagggcc

SEQ ID NO: 1543046 - RNA, 19 nt, Artificial Sequence
  Description of Artificial Sequence: Synthetic oligonucleotide
ugcuaaagugguuguuucg

SEQ ID NO: 1543047 - RNA, 19 nt, Artificial Sequence
  Description of Artificial Sequence: Synthetic oligonucleotide
uccacuugacacaguagag

SEQ ID NO: 1543048 - RNA, 19 nt, Artificial Sequence
  Description of Artificial Sequence: Synthetic oligonucleotide
aagaaagaggauguucaug

SEQ ID NO: 1543049 - RNA, 19 nt, Artificial Sequence
  Description of Artificial Sequence: Synthetic oligonucleotide
gcuagaguaaaacacaguc

SEQ ID NO: 1543050 - RNA, 19 nt, Artificial Sequence
  Description of Artificial Sequence: Synthetic oligonucleotide
gugaucauuuccuucugag

SEQ ID NO: 1543051 - RNA, 19 nt, Artificial Sequence
  Description of Artificial Sequence: Synthetic oligonucleotide
uccauguugagguuagagu

SEQ ID NO: 1543052 - RNA, 19 nt, Artificial Sequence
  Description of Artificial Sequence: Synthetic oligonucleotide
gucgcuaaggcccagcgug

SEQ ID NO: 1543053 - RNA, 19 nt, Artificial Sequence
  Description of Artificial Sequence: Synthetic oligonucleotide
uuuccaagaugugucauga

SEQ ID NO: 1543054 - RNA, 19 nt, Artificial Sequence
  Description of Artificial Sequence: Synthetic oligonucleotide
ucaggugacgucccacacg

SEQ ID NO: 1543055 - RNA, 19 nt, Artificial Sequence
  Description of Artificial Sequence: Synthetic oligonucleotide
aguaaaacacagucugacu

SEQ ID NO: 1543056 - RNA, 19 nt, Artificial Sequence
  Description of Artificial Sequence: Synthetic oligonucleotide
ugguacagagguaugccca

SEQ ID NO: 1543057 - RNA, 19 nt, Artificial Sequence
  Description of Artificial Sequence: Synthetic oligonucleotide
caggggauccacuugacac

SEQ ID NO: 1543058 - RNA, 19 nt, Artificial Sequence
  Description of Artificial Sequence: Synthetic oligonucleotide
uucggguguguacucaaag

SEQ ID NO: 1543059 - RNA, 19 nt, Artificial Sequence
  Description of Artificial Sequence: Synthetic oligonucleotide
cuagggaaugacuuaggug

SEQ ID NO: 1543060 - RNA, 19 nt, Artificial Sequence
  Description of Artificial Sequence: Synthetic oligonucleotide
agauacugcauucgggugu

SEQ ID NO: 1543061 - RNA, 19 nt, Artificial Sequence
  Description of Artificial Sequence: Synthetic oligonucleotide
ugacucuugugcuuaguca

SEQ ID NO: 1543062 - RNA, 19 nt, Artificial Sequence
  Description of Artificial Sequence: Synthetic oligonucleotide
ugugcuuagucaucgugcu

SEQ ID NO: 1543063 - RNA, 19 nt, Artificial Sequence
  Description of Artificial Sequence: Synthetic oligonucleotide
ugcuguaagcucacacagg

SEQ ID NO: 1543064 - RNA, 19 nt, Artificial Sequence
  Description of Artificial Sequence: Synthetic oligonucleotide
uaacucaguuucccaacag

SEQ ID NO: 1543065 - RNA, 19 nt, Artificial Sequence
  Description of Artificial Sequence: Synthetic oligonucleotide
aaggggcccuuguaugccc

SEQ ID NO: 1543066 - RNA, 19 nt, Artificial Sequence
  Description of Artificial Sequence: Synthetic oligonucleotide
cuuagcaguugcuguaagc

SEQ ID NO: 1543067 - RNA, 19 nt, Artificial Sequence
  Description of Artificial Sequence: Synthetic oligonucleotide
ucuaccagcugguuguaac

SEQ ID NO: 1543068 - RNA, 19 nt, Artificial Sequence
  Description of Artificial Sequence: Synthetic oligonucleotide
ucaagauuucccgaaucug

SEQ ID NO: 1543069 - RNA, 19 nt, Artificial Sequence
  Description of Artificial Sequence: Synthetic oligonucleotide
uggaucaacaagccagcca

SEQ ID NO: 1543070 - RNA, 19 nt, Artificial Sequence
  Description of Artificial Sequence: Synthetic oligonucleotide
ugucacgagguugagguca

SEQ ID NO: 1543071 - RNA, 19 nt, Artificial Sequence
  Description of Artificial Sequence: Synthetic oligonucleotide
ucacuggaguguuuacagg

SEQ ID NO: 1543072 - RNA, 19 nt, Artificial Sequence
  Description of Artificial Sequence: Synthetic oligonucleotide
uuuacaggugaugauuuuc

SEQ ID NO: 1543073 - RNA, 19 nt, Artificial Sequence
  Description of Artificial Sequence: Synthetic oligonucleotide
ucaccuuccacugaagaaa

SEQ ID NO: 1543074 - RNA, 19 nt, Artificial Sequence
  Description of Artificial Sequence: Synthetic oligonucleotide
uuguaacucaguuucccaa

SEQ ID NO: 1543075 - RNA, 19 nt, Artificial Sequence
  Description of Artificial Sequence: Synthetic oligonucleotide
uaaagugguuguuucgaaa

SEQ ID NO: 1543076 - RNA, 19 nt, Artificial Sequence
  Description of Artificial Sequence: Synthetic oligonucleotide
cacuacuggccuuacuagg

SEQ ID NO: 1543077 - RNA, 19 nt, Artificial Sequence
  Description of Artificial Sequence: Synthetic oligonucleotide
uuuugccuagggaaugacu

SEQ ID NO: 1543078 - RNA, 19 nt, Artificial Sequence
  Description of Artificial Sequence: Synthetic oligonucleotide
gagcuagaguaaaacacag

SEQ ID NO: 1543079 - RNA, 19 nt, Artificial Sequence
  Description of Artificial Sequence: Synthetic oligonucleotide
ugugaucauuuccuucuga

SEQ ID NO: 1543080 - RNA, 19 nt, Artificial Sequence
  Description of Artificial Sequence: Synthetic oligonucleotide
guugcuguaagcucacaca

SEQ ID NO: 1543081 - RNA, 19 nt, Artificial Sequence
  Description of Artificial Sequence: Synthetic oligonucleotide
ucagauucaacaguuucua

SEQ ID NO: 1543082 - RNA, 19 nt, Artificial Sequence
  Description of Artificial Sequence: Synthetic oligonucleotide
cugagguuguuccauguug

SEQ ID NO: 1543083 - RNA, 19 nt, Artificial Sequence
  Description of Artificial Sequence: Synthetic oligonucleotide
ugacacaguagagauccag

SEQ ID NO: 1543084 - RNA, 19 nt, Artificial Sequence
  Description of Artificial Sequence: Synthetic oligonucleotide
gagaaggggcccuuguaug

SEQ ID NO: 1543085 - RNA, 19 nt, Artificial Sequence
  Description of Artificial Sequence: Synthetic oligonucleotide
cuugagcuagcuucaggag

SEQ ID NO: 1543086 - RNA, 19 nt, Artificial Sequence
  Description of Artificial Sequence: Synthetic oligonucleotide
aaacccugguccgugacca

SEQ ID NO: 1543087 - RNA, 19 nt, Artificial Sequence
  Description of Artificial Sequence: Synthetic oligonucleotide
ugaugugaucauuuccuuc

SEQ ID NO: 1543088 - RNA, 19 nt, Artificial Sequence
  Description of Artificial Sequence: Synthetic oligonucleotide
agagcuagaguaaaacaca

SEQ ID NO: 1543089 - RNA, 19 nt, Artificial Sequence
  Description of Artificial Sequence: Synthetic oligonucleotide
uccuguagaaaacccuggu

SEQ ID NO: 1543090 - RNA, 19 nt, Artificial Sequence
  Description of Artificial Sequence: Synthetic oligonucleotide
caguuucuacacuacuggc

SEQ ID NO: 1543091 - RNA, 19 nt, Artificial Sequence
  Description of Artificial Sequence: Synthetic oligonucleotide
uggggcuugauggauagga

SEQ ID NO: 1543092 - RNA, 19 nt, Artificial Sequence
  Description of Artificial Sequence: Synthetic oligonucleotide
ucgcacauugacauccaga

SEQ ID NO: 1543093 - RNA, 19 nt, Artificial Sequence
  Description of Artificial Sequence: Synthetic oligonucleotide
ucgggcuucgaccucugcc

SEQ ID NO: 1543094 - RNA, 19 nt, Artificial Sequence
  Description of Artificial Sequence: Synthetic oligonucleotide
uugagguuagagucugcug

SEQ ID NO: 1543095 - RNA, 19 nt, Artificial Sequence
  Description of Artificial Sequence: Synthetic oligonucleotide
ucagcugcgcugcaguggu

SEQ ID NO: 1543096 - RNA, 19 nt, Artificial Sequence
  Description of Artificial Sequence: Synthetic oligonucleotide
uguugaaguugcugggcca

SEQ ID NO: 1543097 - RNA, 19 nt, Artificial Sequence
  Description of Artificial Sequence: Synthetic oligonucleotide
auacuccucuuguugaagu

SEQ ID NO: 1543098 - RNA, 19 nt, Artificial Sequence
  Description of Artificial Sequence: Synthetic oligonucleotide
ugcaaucaagccuucuguc

SEQ ID NO: 1543099 - RNA, 19 nt, Artificial Sequence
  Description of Artificial Sequence: Synthetic oligonucleotide
cucuguggaucaacaagcc

SEQ ID NO: 1543100 - RNA, 19 nt, Artificial Sequence
  Description of Artificial Sequence: Synthetic oligonucleotide
ugccuagggaaugacuuag

SEQ ID NO: 1543101 - RNA, 19 nt, Artificial Sequence
  Description of Artificial Sequence: Synthetic oligonucleotide
ugguggcaaagcuuggucu

SEQ ID NO: 1543102 - RNA, 19 nt, Artificial Sequence
  Description of Artificial Sequence: Synthetic oligonucleotide
gauacuccucuuguugaag

SEQ ID NO: 1543103 - RNA, 19 nt, Artificial Sequence
  Description of Artificial Sequence: Synthetic oligonucleotide
uggagagccgccuccaccu

SEQ ID NO: 1543104 - RNA, 19 nt, Artificial Sequence
  Description of Artificial Sequence: Synthetic oligonucleotide
aguugaaggcccucagacu

SEQ ID NO: 1543105 - RNA, 19 nt, Artificial Sequence
  Description of Artificial Sequence: Synthetic oligonucleotide
aguguuuacaggugaugau

SEQ ID NO: 1543106 - RNA, 19 nt, Artificial Sequence
  Description of Artificial Sequence: Synthetic oligonucleotide
caucgugcuaaagugguug

SEQ ID NO: 1543107 - RNA, 19 nt, Artificial Sequence
  Description of Artificial Sequence: Synthetic oligonucleotide
gguuguuccauguugaggu

SEQ ID NO: 1543108 - RNA, 19 nt, Artificial Sequence
  Description of Artificial Sequence: Synthetic oligonucleotide
ucggguguguacucaaagu

SEQ ID NO: 1543109 - RNA, 19 nt, Artificial Sequence
  Description of Artificial Sequence: Synthetic oligonucleotide
guacucaaagucagagacg

SEQ ID NO: 1543110 - RNA, 19 nt, Artificial Sequence
  Description of Artificial Sequence: Synthetic oligonucleotide
gagguuguuccauguugag

SEQ ID NO: 1543111 - RNA, 19 nt, Artificial Sequence
  Description of Artificial Sequence: Synthetic oligonucleotide
agguuguuccauguugagg

SEQ ID NO: 1543112 - RNA, 19 nt, Artificial Sequence
  Description of Artificial Sequence: Synthetic oligonucleotide
gggcuugauggauaggagg

SEQ ID NO: 1543113 - RNA, 19 nt, Artificial Sequence
  Description of Artificial Sequence: Synthetic oligonucleotide
agggcacucaagauuuccc

SEQ ID NO: 1543114 - RNA, 19 nt, Artificial Sequence
  Description of Artificial Sequence: Synthetic oligonucleotide
aagcucacacaggccaugg

SEQ ID NO: 1543115 - RNA, 19 nt, Artificial Sequence
  Description of Artificial Sequence: Synthetic oligonucleotide
aguacugucauugcaucau

SEQ ID NO: 1543116 - RNA, 19 nt, Artificial Sequence
  Description of Artificial Sequence: Synthetic oligonucleotide
agguaugcccagcaaguca

SEQ ID NO: 1543117 - RNA, 19 nt, Artificial Sequence
  Description of Artificial Sequence: Synthetic oligonucleotide
caccuuccacugaagaaag

SEQ ID NO: 1543118 - RNA, 19 nt, Artificial Sequence
  Description of Artificial Sequence: Synthetic oligonucleotide
gucgccauccacauugugc

SEQ ID NO: 1543119 - RNA, 19 nt, Artificial Sequence
  Description of Artificial Sequence: Synthetic oligonucleotide
uaugcccagcaagucaaag

SEQ ID NO: 1543120 - RNA, 19 nt, Artificial Sequence
  Description of Artificial Sequence: Synthetic oligonucleotide
aggacaagggccauuggug

SEQ ID NO: 1543121 - RNA, 19 nt, Artificial Sequence
  Description of Artificial Sequence: Synthetic oligonucleotide
ugguuguaacucaguuucc

SEQ ID NO: 1543122 - RNA, 19 nt, Artificial Sequence
  Description of Artificial Sequence: Synthetic oligonucleotide
uagaaaacccugguccgug

SEQ ID NO: 1543123 - RNA, 19 nt, Artificial Sequence
  Description of Artificial Sequence: Synthetic oligonucleotide
agcaguugcuguaagcuca

SEQ ID NO: 1543124 - RNA, 19 nt, Artificial Sequence
  Description of Artificial Sequence: Synthetic oligonucleotide
gguguguacucaaagucag

SEQ ID NO: 1543125 - RNA, 19 nt, Artificial Sequence
  Description of Artificial Sequence: Synthetic oligonucleotide
aagugacucuugugcuuag

SEQ ID NO: 1543126 - RNA, 19 nt, Artificial Sequence
  Description of Artificial Sequence: Synthetic oligonucleotide
uggccuuacuaggugcugg

SEQ ID NO: 1543127 - RNA, 19 nt, Artificial Sequence
  Description of Artificial Sequence: Synthetic oligonucleotide
aggucgcuaaggcccagcg

SEQ ID NO: 1543128 - RNA, 19 nt, Artificial Sequence
  Description of Artificial Sequence: Synthetic oligonucleotide
gugaaucgcacauugacau

SEQ ID NO: 1543129 - RNA, 19 nt, Artificial Sequence
  Description of Artificial Sequence: Synthetic oligonucleotide
uccggacagggccucaugu

SEQ ID NO: 1543130 - RNA, 19 nt, Artificial Sequence
  Description of Artificial Sequence: Synthetic oligonucleotide
aguuuagggaguacuguca

SEQ ID NO: 1543131 - RNA, 19 nt, Artificial Sequence
  Description of Artificial Sequence: Synthetic oligonucleotide
agagguaugcccagcaagu

SEQ ID NO: 1543132 - RNA, 19 nt, Artificial Sequence
  Description of Artificial Sequence: Synthetic oligonucleotide
augcccagcaagucaaaga

SEQ ID NO: 1543133 - RNA, 19 nt, Artificial Sequence
  Description of Artificial Sequence: Synthetic oligonucleotide
cacaguagagauccagauc

SEQ ID NO: 1543134 - RNA, 19 nt, Artificial Sequence
  Description of Artificial Sequence: Synthetic oligonucleotide
guggcuuagaacucaucuc

SEQ ID NO: 1543135 - RNA, 19 nt, Artificial Sequence
  Description of Artificial Sequence: Synthetic oligonucleotide
caucuuccuuagcaguugc

SEQ ID NO: 1543136 - RNA, 19 nt, Artificial Sequence
  Description of Artificial Sequence: Synthetic oligonucleotide
ugaguucaucuuccuuagc

SEQ ID NO: 1543137 - RNA, 19 nt, Artificial Sequence
  Description of Artificial Sequence: Synthetic oligonucleotide
gggcacucaagauuucccg

SEQ ID NO: 1543138 - RNA, 19 nt, Artificial Sequence
  Description of Artificial Sequence: Synthetic oligonucleotide
gaguacugucauugcauca

SEQ ID NO: 1543139 - RNA, 19 nt, Artificial Sequence
  Description of Artificial Sequence: Synthetic oligonucleotide
cagaucaggcuguuggguc

SEQ ID NO: 1543140 - RNA, 19 nt, Artificial Sequence
  Description of Artificial Sequence: Synthetic oligonucleotide
aguuaaguugaaggcccuc

SEQ ID NO: 1543141 - RNA, 19 nt, Artificial Sequence
  Description of Artificial Sequence: Synthetic oligonucleotide
ggcuugauggauaggaggc

SEQ ID NO: 1543142 - RNA, 19 nt, Artificial Sequence
  Description of Artificial Sequence: Synthetic oligonucleotide
guuaaguugaaggcccuca

SEQ ID NO: 1543143 - RNA, 19 nt, Artificial Sequence
  Description of Artificial Sequence: Synthetic oligonucleotide
uuccuuagcaguugcugua

SEQ ID NO: 1543144 - RNA, 19 nt, Artificial Sequence
  Description of Artificial Sequence: Synthetic oligonucleotide
gaaaacccugguccgugac

SEQ ID NO: 1543145 - RNA, 19 nt, Artificial Sequence
  Description of Artificial Sequence: Synthetic oligonucleotide
guccguucucccuuccagg

SEQ ID NO: 1543146 - RNA, 19 nt, Artificial Sequence
  Description of Artificial Sequence: Synthetic oligonucleotide
gacucuugugcuuagucau

SEQ ID NO: 1543147 - RNA, 19 nt, Artificial Sequence
  Description of Artificial Sequence: Synthetic oligonucleotide
uagggaguacugucauugc

SEQ ID NO: 1543148 - RNA, 19 nt, Artificial Sequence
  Description of Artificial Sequence: Synthetic oligonucleotide
aggcuguuggguccugggg

SEQ ID NO: 1543149 - RNA, 19 nt, Artificial Sequence
  Description of Artificial Sequence: Synthetic oligonucleotide
gacacaguagagauccaga

SEQ ID NO: 1543150 - RNA, 19 nt, Artificial Sequence
  Description of Artificial Sequence: Synthetic oligonucleotide
uguugauacuccucuuguu

SEQ ID NO: 1543151 - RNA, 19 nt, Artificial Sequence
  Description of Artificial Sequence: Synthetic oligonucleotide
cuguaagcucacacaggcc

SEQ ID NO: 1543152 - RNA, 19 nt, Artificial Sequence
  Description of Artificial Sequence: Synthetic oligonucleotide
gugacucuugugcuuaguc

SEQ ID NO: 1543153 - RNA, 19 nt, Artificial Sequence
  Description of Artificial Sequence: Synthetic oligonucleotide
uggaguguuuacaggugau

SEQ ID NO: 1543154 - RNA, 19 nt, Artificial Sequence
  Description of Artificial Sequence: Synthetic oligonucleotide
aggucacuggaguguuuac

SEQ ID NO: 1543155 - RNA, 19 nt, Artificial Sequence
  Description of Artificial Sequence: Synthetic oligonucleotide
uacaggugaugauuuucuc

SEQ ID NO: 1543156 - RNA, 19 nt, Artificial Sequence
  Description of Artificial Sequence: Synthetic oligonucleotide
gugcuaaagugguuguuuc

SEQ ID NO: 1543157 - RNA, 19 nt, Artificial Sequence
  Description of Artificial Sequence: Synthetic oligonucleotide
ugaaucgcacauugacauc

SEQ ID NO: 1543158 - RNA, 19 nt, Artificial Sequence
  Description of Artificial Sequence: Synthetic oligonucleotide
gagggcacucaagauuucc

SEQ ID NO: 1543159 - RNA, 19 nt, Artificial Sequence
  Description of Artificial Sequence: Synthetic oligonucleotide
aucgugcuaaagugguugu

SEQ ID NO: 1543160 - RNA, 19 nt, Artificial Sequence
  Description of Artificial Sequence: Synthetic oligonucleotide
caguuucccaacagcacuc

SEQ ID NO: 1543161 - RNA, 19 nt, Artificial Sequence
  Description of Artificial Sequence: Synthetic oligonucleotide
gcaagucaaagauacugca

SEQ ID NO: 1543162 - RNA, 19 nt, Artificial Sequence
  Description of Artificial Sequence: Synthetic oligonucleotide
guugaaggcccucagacuu

SEQ ID NO: 1543163 - RNA, 19 nt, Artificial Sequence
  Description of Artificial Sequence: Synthetic oligonucleotide
caugauggccaggagagga

SEQ ID NO: 1543164 - RNA, 19 nt, Artificial Sequence
  Description of Artificial Sequence: Synthetic oligonucleotide
acgccugugaaucgcacau

SEQ ID NO: 1543165 - RNA, 19 nt, Artificial Sequence
  Description of Artificial Sequence: Synthetic oligonucleotide
agagccgccuccaccuucc

SEQ ID NO: 1543166 - RNA, 19 nt, Artificial Sequence
  Description of Artificial Sequence: Synthetic oligonucleotide
acaagugacucuugugcuu

SEQ ID NO: 1543167 - RNA, 19 nt, Artificial Sequence
  Description of Artificial Sequence: Synthetic oligonucleotide
cugguccgugaccaggagg

SEQ ID NO: 1543168 - RNA, 19 nt, Artificial Sequence
  Description of Artificial Sequence: Synthetic oligonucleotide
cuagcuucaggaggagggc

SEQ ID NO: 1543169 - RNA, 19 nt, Artificial Sequence
  Description of Artificial Sequence: Synthetic oligonucleotide
aucgcacauugacauccag

SEQ ID NO: 1543170 - RNA, 19 nt, Artificial Sequence
  Description of Artificial Sequence: Synthetic oligonucleotide
ucgcuaaggcccagcgugc

SEQ ID NO: 1543171 - RNA, 19 nt, Artificial Sequence
  Description of Artificial Sequence: Synthetic oligonucleotide
cuuagucaucgugcuaaag

SEQ ID NO: 1543172 - RNA, 19 nt, Artificial Sequence
  Description of Artificial Sequence: Synthetic oligonucleotide
gacuggggaagcuccugug

SEQ ID NO: 1543173 - RNA, 19 nt, Artificial Sequence
  Description of Artificial Sequence: Synthetic oligonucleotide
acgucccacacguacuuga

SEQ ID NO: 1543174 - RNA, 19 nt, Artificial Sequence
  Description of Artificial Sequence: Synthetic oligonucleotide
agaguaaaacacagucuga

SEQ ID NO: 1543175 - RNA, 19 nt, Artificial Sequence
  Description of Artificial Sequence: Synthetic oligonucleotide
gaaggggcccuuguaugcc

SEQ ID NO: 1543176 - RNA, 19 nt, Artificial Sequence
  Description of Artificial Sequence: Synthetic oligonucleotide
gucucugucucaggugacg

SEQ ID NO: 1543177 - RNA, 19 nt, Artificial Sequence
  Description of Artificial Sequence: Synthetic oligonucleotide
gccauuggugcucugggug

SEQ ID NO: 1543178 - RNA, 19 nt, Artificial Sequence
  Description of Artificial Sequence: Synthetic oligonucleotide
ggaucaacaagccagccau

SEQ ID NO: 1543179 - RNA, 19 nt, Artificial Sequence
  Description of Artificial Sequence: Synthetic oligonucleotide
gcaaucaagccuucuguca

SEQ ID NO: 1543180 - RNA, 19 nt, Artificial Sequence
  Description of Artificial Sequence: Synthetic oligonucleotide
uuguaugcccagguugaac

SEQ ID NO: 1543181 - RNA, 19 nt, Artificial Sequence
  Description of Artificial Sequence: Synthetic oligonucleotide
caugguaggucagcugcgc

SEQ ID NO: 1543182 - RNA, 19 nt, Artificial Sequence
  Description of Artificial Sequence: Synthetic oligonucleotide
aagccagccaugguacaga

SEQ ID NO: 1543183 - RNA, 19 nt, Artificial Sequence
  Description of Artificial Sequence: Synthetic oligonucleotide
gcagagcuagaguaaaaca

SEQ ID NO: 1543184 - RNA, 19 nt, Artificial Sequence
  Description of Artificial Sequence: Synthetic oligonucleotide
acuggaguguuuacaggug

SEQ ID NO: 1543185 - RNA, 19 nt, Artificial Sequence
  Description of Artificial Sequence: Synthetic oligonucleotide
uuuagggaguacugucauu

SEQ ID NO: 1543186 - RNA, 19 nt, Artificial Sequence
  Description of Artificial Sequence: Synthetic oligonucleotide
cuggaguguuuacagguga

SEQ ID NO: 1543187 - RNA, 19 nt, Artificial Sequence
  Description of Artificial Sequence: Synthetic oligonucleotide
gucagcugcgcugcagugg

SEQ ID NO: 1543188 - RNA, 19 nt, Artificial Sequence
  Description of Artificial Sequence: Synthetic oligonucleotide
acucaaagucagagacgcc

SEQ ID NO: 1543189 - RNA, 19 nt, Artificial Sequence
  Description of Artificial Sequence: Synthetic oligonucleotide
ugucgccauccacauugug

SEQ ID NO: 1543190 - RNA, 19 nt, Artificial Sequence
  Description of Artificial Sequence: Synthetic oligonucleotide
cuaaagugguuguuucgaa

SEQ ID NO: 1543191 - RNA, 19 nt, Artificial Sequence
  Description of Artificial Sequence: Synthetic oligonucleotide
uucuacacuacuggccuua

SEQ ID NO: 1543192 - RNA, 19 nt, Artificial Sequence
  Description of Artificial Sequence: Synthetic oligonucleotide
ugacgucccacacguacuu

SEQ ID NO: 1543193 - RNA, 19 nt, Artificial Sequence
  Description of Artificial Sequence: Synthetic oligonucleotide
gguugaggucacuggagug

SEQ ID NO: 1543194 - RNA, 19 nt, Artificial Sequence
  Description of Artificial Sequence: Synthetic oligonucleotide
aggagggcacucaagauuu

SEQ ID NO: 1543195 - RNA, 19 nt, Artificial Sequence
  Description of Artificial Sequence: Synthetic oligonucleotide
ggaggcaguuuccaagaug

SEQ ID NO: 1543196 - RNA, 19 nt, Artificial Sequence
  Description of Artificial Sequence: Synthetic oligonucleotide
gguccguucucccuuccag

SEQ ID NO: 1543197 - RNA, 19 nt, Artificial Sequence
  Description of Artificial Sequence: Synthetic oligonucleotide
cugcauccucagcuggugg

SEQ ID NO: 1543198 - RNA, 19 nt, Artificial Sequence
  Description of Artificial Sequence: Synthetic oligonucleotide
ggaguacugucauugcauc

SEQ ID NO: 1543199 - RNA, 19 nt, Artificial Sequence
  Description of Artificial Sequence: Synthetic oligonucleotide
uugccuagggaaugacuua

SEQ ID NO: 1543200 - RNA, 19 nt, Artificial Sequence
  Description of Artificial Sequence: Synthetic oligonucleotide
agcuagcuucaggaggagg

SEQ ID NO: 1543201 - RNA, 19 nt, Artificial Sequence
  Description of Artificial Sequence: Synthetic oligonucleotide
gagucacaaaagcaacugu

SEQ ID NO: 1543202 - RNA, 19 nt, Artificial Sequence
  Description of Artificial Sequence: Synthetic oligonucleotide
cauggcuuuugccuaggga

SEQ ID NO: 1543203 - RNA, 19 nt, Artificial Sequence
  Description of Artificial Sequence: Synthetic oligonucleotide
cacuugacacaguagagau

SEQ ID NO: 1543204 - RNA, 19 nt, Artificial Sequence
  Description of Artificial Sequence: Synthetic oligonucleotide
cacacguacuugagcuagc

SEQ ID NO: 1543205 - RNA, 19 nt, Artificial Sequence
  Description of Artificial Sequence: Synthetic oligonucleotide
ugcauucggguguguacuc

SEQ ID NO: 1543206 - RNA, 19 nt, Artificial Sequence
  Description of Artificial Sequence: Synthetic oligonucleotide
ggcagagcuagaguaaaac

SEQ ID NO: 1543207 - RNA, 19 nt, Artificial Sequence
  Description of Artificial Sequence: Synthetic oligonucleotide
cucuccccuggggagaagg

SEQ ID NO: 1543208 - RNA, 19 nt, Artificial Sequence
  Description of Artificial Sequence: Synthetic oligonucleotide
aaucgcacauugacaucca

SEQ ID NO: 1543209 - RNA, 19 nt, Artificial Sequence
  Description of Artificial Sequence: Synthetic oligonucleotide
guacugucauugcaucauc

SEQ ID NO: 1543210 - RNA, 19 nt, Artificial Sequence
  Description of Artificial Sequence: Synthetic oligonucleotide
gcuaaagugguuguuucga

SEQ ID NO: 1543211 - RNA, 19 nt, Artificial Sequence
  Description of Artificial Sequence: Synthetic oligonucleotide
gucccacacguacuugagc

SEQ ID NO: 1543212 - RNA, 19 nt, Artificial Sequence
  Description of Artificial Sequence: Synthetic oligonucleotide
gaucaacaagccagccaug

SEQ ID NO: 1543213 - RNA, 19 nt, Artificial Sequence
  Description of Artificial Sequence: Synthetic oligonucleotide
gguaggucagcugcgcugc

SEQ ID NO: 1543214 - RNA, 19 nt, Artificial Sequence
  Description of Artificial Sequence: Synthetic oligonucleotide
ggccuuacuaggugcuggg

SEQ ID NO: 1543215 - RNA, 19 nt, Artificial Sequence
  Description of Artificial Sequence: Synthetic oligonucleotide
aacccugguccgugaccag

SEQ ID NO: 1543216 - RNA, 19 nt, Artificial Sequence
  Description of Artificial Sequence: Synthetic oligonucleotide
aucaagccuucugucacga

SEQ ID NO: 1543217 - RNA, 19 nt, Artificial Sequence
  Description of Artificial Sequence: Synthetic oligonucleotide
acagucugacucgggcuuc

SEQ ID NO: 1543218 - RNA, 19 nt, Artificial Sequence
  Description of Artificial Sequence: Synthetic oligonucleotide
aguuuccaagaugugucau

SEQ ID NO: 1543219 - RNA, 19 nt, Artificial Sequence
  Description of Artificial Sequence: Synthetic oligonucleotide
cccuuguaugcccagguug

SEQ ID NO: 1543220 - RNA, 19 nt, Artificial Sequence
  Description of Artificial Sequence: Synthetic oligonucleotide
caacagcacucacagccuc

SEQ ID NO: 1543221 - RNA, 19 nt, Artificial Sequence
  Description of Artificial Sequence: Synthetic oligonucleotide
acaagccagccaugguaca

SEQ ID NO: 1543222 - RNA, 19 nt, Artificial Sequence
  Description of Artificial Sequence: Synthetic oligonucleotide
acacguacuugagcuagcu

SEQ ID NO: 1543223 - RNA, 19 nt, Artificial Sequence
  Description of Artificial Sequence: Synthetic oligonucleotide
cuuuugccuagggaaugac

SEQ ID NO: 1543224 - RNA, 19 nt, Artificial Sequence
  Description of Artificial Sequence: Synthetic oligonucleotide
gaggagggcacucaagauu

SEQ ID NO: 1543225 - RNA, 19 nt, Artificial Sequence
  Description of Artificial Sequence: Synthetic oligonucleotide
agcuagaguaaaacacagu

SEQ ID NO: 1543226 - RNA, 19 nt, Artificial Sequence
  Description of Artificial Sequence: Synthetic oligonucleotide
ucuacacuacuggccuuac

SEQ ID NO: 1543227 - RNA, 19 nt, Artificial Sequence
  Description of Artificial Sequence: Synthetic oligonucleotide
gagguaugcccagcaaguc

SEQ ID NO: 1543228 - RNA, 19 nt, Artificial Sequence
  Description of Artificial Sequence: Synthetic oligonucleotide
guuuagggaguacugucau

SEQ ID NO: 1543229 - RNA, 19 nt, Artificial Sequence
  Description of Artificial Sequence: Synthetic oligonucleotide
ggaguguuuacaggugaug

SEQ ID NO: 1543230 - RNA, 19 nt, Artificial Sequence
  Description of Artificial Sequence: Synthetic oligonucleotide
uaaggcccagcgugccuug

SEQ ID NO: 1543231 - RNA, 19 nt, Artificial Sequence
  Description of Artificial Sequence: Synthetic oligonucleotide
ccuguagaaaacccugguc

SEQ ID NO: 1543232 - RNA, 19 nt, Artificial Sequence
  Description of Artificial Sequence: Synthetic oligonucleotide
guugaggucacuggagugu

SEQ ID NO: 1543233 - RNA, 19 nt, Artificial Sequence
  Description of Artificial Sequence: Synthetic oligonucleotide
agcugcgcugcaguggucu

SEQ ID NO: 1543234 - RNA, 19 nt, Artificial Sequence
  Description of Artificial Sequence: Synthetic oligonucleotide
guugagguuagagucugcu

SEQ ID NO: 1543235 - RNA, 19 nt, Artificial Sequence
  Description of Artificial Sequence: Synthetic oligonucleotide
ggguguguacucaaaguca

SEQ ID NO: 1543236 - RNA, 19 nt, Artificial Sequence
  Description of Artificial Sequence: Synthetic oligonucleotide
ugaaguugcugggccaguu

SEQ ID NO: 1543237 - RNA, 19 nt, Artificial Sequence
  Description of Artificial Sequence: Synthetic oligonucleotide
uugaggucacuggaguguu

SEQ ID NO: 1543238 - RNA, 19 nt, Artificial Sequence
  Description of Artificial Sequence: Synthetic oligonucleotide
uccuggggcuugauggaua

SEQ ID NO: 1543239 - RNA, 19 nt, Artificial Sequence
  Description of Artificial Sequence: Synthetic oligonucleotide
uuucccgaaucugcauccu

SEQ ID NO: 1543240 - RNA, 19 nt, Artificial Sequence
  Description of Artificial Sequence: Synthetic oligonucleotide
ccagcugguuguaacucag

SEQ ID NO: 1543241 - RNA, 19 nt, Artificial Sequence
  Description of Artificial Sequence: Synthetic oligonucleotide
agacgccugugaaucgcac

SEQ ID NO: 1543242 - RNA, 19 nt, Artificial Sequence
  Description of Artificial Sequence: Synthetic oligonucleotide
cuguugauacuccucuugu

SEQ ID NO: 1543243 - RNA, 19 nt, Artificial Sequence
  Description of Artificial Sequence: Synthetic oligonucleotide
ccuuguaugcccagguuga

SEQ ID NO: 1543244 - RNA, 19 nt, Artificial Sequence
  Description of Artificial Sequence: Synthetic oligonucleotide
cucugucucaggugacguc

SEQ ID NO: 1543245 - RNA, 19 nt, Artificial Sequence
  Description of Artificial Sequence: Synthetic oligonucleotide
ggcccagcgugccuugugg

SEQ ID NO: 1543246 - RNA, 19 nt, Artificial Sequence
  Description of Artificial Sequence: Synthetic oligonucleotide
uccgccccauggcuuuugc

SEQ ID NO: 1543247 - RNA, 19 nt, Artificial Sequence
  Description of Artificial Sequence: Synthetic oligonucleotide
gguaugcccagcaagucaa

SEQ ID NO: 1543248 - RNA, 19 nt, Artificial Sequence
  Description of Artificial Sequence: Synthetic oligonucleotide
caggugacgucccacacgu

SEQ ID NO: 1543249 - RNA, 19 nt, Artificial Sequence
  Description of Artificial Sequence: Synthetic oligonucleotide
gacaagggccauuggugcu

SEQ ID NO: 1543250 - RNA, 19 nt, Artificial Sequence
  Description of Artificial Sequence: Synthetic oligonucleotide
cuccuguggcuuagaacuc

SEQ ID NO: 1543251 - RNA, 19 nt, Artificial Sequence
  Description of Artificial Sequence: Synthetic oligonucleotide
ccaugguaggucagcugcg

SEQ ID NO: 1543252 - RNA, 19 nt, Artificial Sequence
  Description of Artificial Sequence: Synthetic oligonucleotide
ccacacguacuugagcuag

SEQ ID NO: 1543253 - RNA, 19 nt, Artificial Sequence
  Description of Artificial Sequence: Synthetic oligonucleotide
cagcgugccuuguggcugc

SEQ ID NO: 1543254 - RNA, 19 nt, Artificial Sequence
  Description of Artificial Sequence: Synthetic oligonucleotide
guacagagguaugcccagc

SEQ ID NO: 1543255 - RNA, 19 nt, Artificial Sequence
  Description of Artificial Sequence: Synthetic oligonucleotide
cauucggguguguacucaa

SEQ ID NO: 1543256 - RNA, 19 nt, Artificial Sequence
  Description of Artificial Sequence: Synthetic oligonucleotide
gagagccgccuccaccuuc

SEQ ID NO: 1543257 - RNA, 19 nt, Artificial Sequence
  Description of Artificial Sequence: Synthetic oligonucleotide
cuuagaacucaucucucuu

SEQ ID NO: 1543258 - RNA, 19 nt, Artificial Sequence
  Description of Artificial Sequence: Synthetic oligonucleotide
aggaggcaguuuccaagau

SEQ ID NO: 1543259 - RNA, 19 nt, Artificial Sequence
  Description of Artificial Sequence: Synthetic oligonucleotide
cagucugacucgggcuucg

SEQ ID NO: 1543260 - RNA, 19 nt, Artificial Sequence
  Description of Artificial Sequence: Synthetic oligonucleotide
cuguggcuuagaacucauc

SEQ ID NO: 1543261 - RNA, 19 nt, Artificial Sequence
  Description of Artificial Sequence: Synthetic oligonucleotide
guguuuacaggugaugauu

SEQ ID NO: 1543262 - RNA, 19 nt, Artificial Sequence
  Description of Artificial Sequence: Synthetic oligonucleotide
aacugucgccauccacauu

SEQ ID NO: 1543263 - RNA, 19 nt, Artificial Sequence
  Description of Artificial Sequence: Synthetic oligonucleotide
ggcuuuugccuagggaaug

SEQ ID NO: 1543264 - RNA, 19 nt, Artificial Sequence
  Description of Artificial Sequence: Synthetic oligonucleotide
cuaccagcugguuguaacu

SEQ ID NO: 1543265 - RNA, 19 nt, Artificial Sequence
  Description of Artificial Sequence: Synthetic oligonucleotide
guccagaugugguuccucu

SEQ ID NO: 1543266 - RNA, 19 nt, Artificial Sequence
  Description of Artificial Sequence: Synthetic oligonucleotide
gcacucaagauuucccgaa

SEQ ID NO: 1543267 - RNA, 19 nt, Artificial Sequence
  Description of Artificial Sequence: Synthetic oligonucleotide
cggguguguacucaaaguc

SEQ ID NO: 1543268 - RNA, 19 nt, Artificial Sequence
  Description of Artificial Sequence: Synthetic oligonucleotide
ugaggucacuggaguguuu

SEQ ID NO: 1543269 - RNA, 19 nt, Artificial Sequence
  Description of Artificial Sequence: Synthetic oligonucleotide
ugcccagguugaacugccu

SEQ ID NO: 1543270 - RNA, 19 nt, Artificial Sequence
  Description of Artificial Sequence: Synthetic oligonucleotide
cugucacgagguugagguc

SEQ ID NO: 1543271 - RNA, 19 nt, Artificial Sequence
  Description of Artificial Sequence: Synthetic oligonucleotide
ggcguccagaugugguucc

SEQ ID NO: 1543272 - RNA, 19 nt, Artificial Sequence
  Description of Artificial Sequence: Synthetic oligonucleotide
gcuuagaacucaucucucu

SEQ ID NO: 1543273 - RNA, 19 nt, Artificial Sequence
  Description of Artificial Sequence: Synthetic oligonucleotide
gauggccaggagaggacaa

SEQ ID NO: 1543274 - RNA, 19 nt, Artificial Sequence
  Description of Artificial Sequence: Synthetic oligonucleotide
gagacgccugugaaucgca

SEQ ID NO: 1543275 - RNA, 19 nt, Artificial Sequence
  Description of Artificial Sequence: Synthetic oligonucleotide
agcugguggcaaagcuugg

SEQ ID NO: 1543276 - RNA, 19 nt, Artificial Sequence
  Description of Artificial Sequence: Synthetic oligonucleotide
cccgaaucugcauccucag

SEQ ID NO: 1543277 - RNA, 19 nt, Artificial Sequence
  Description of Artificial Sequence: Synthetic oligonucleotide
cuucugucacgagguugag

SEQ ID NO: 1543278 - RNA, 19 nt, Artificial Sequence
  Description of Artificial Sequence: Synthetic oligonucleotide
caccaccuuuguccugcgg

SEQ ID NO: 1543279 - RNA, 19 nt, Artificial Sequence
  Description of Artificial Sequence: Synthetic oligonucleotide
gucucaggugacgucccac

SEQ ID NO: 1543280 - RNA, 19 nt, Artificial Sequence
  Description of Artificial Sequence: Synthetic oligonucleotide
gucacgagguugaggucac

SEQ ID NO: 1543281 - RNA, 19 nt, Artificial Sequence
  Description of Artificial Sequence: Synthetic oligonucleotide
agggaaugacuuaggugaa

SEQ ID NO: 1543282 - RNA, 19 nt, Artificial Sequence
  Description of Artificial Sequence: Synthetic oligonucleotide
aggcccagcgugccuugug

SEQ ID NO: 1543283 - RNA, 19 nt, Artificial Sequence
  Description of Artificial Sequence: Synthetic oligonucleotide
ggagaaggggcccuuguau

SEQ ID NO: 1543284 - RNA, 19 nt, Artificial Sequence
  Description of Artificial Sequence: Synthetic oligonucleotide
ucgugcuaaagugguuguu

SEQ ID NO: 1543285 - RNA, 19 nt, Artificial Sequence
  Description of Artificial Sequence: Synthetic oligonucleotide
uucgaccucugccgccgau

SEQ ID NO: 1543286 - RNA, 19 nt, Artificial Sequence
  Description of Artificial Sequence: Synthetic oligonucleotide
guagaaaacccugguccgu

SEQ ID NO: 1543287 - RNA, 19 nt, Artificial Sequence
  Description of Artificial Sequence: Synthetic oligonucleotide
ccuuagcaguugcuguaag

SEQ ID NO: 1543288 - RNA, 19 nt, Artificial Sequence
  Description of Artificial Sequence: Synthetic oligonucleotide
guuuacaggugaugauuuu

SEQ ID NO: 1543289 - RNA, 19 nt, Artificial Sequence
  Description of Artificial Sequence: Synthetic oligonucleotide
cuggccuuacuaggugcug

SEQ ID NO: 1543290 - RNA, 19 nt, Artificial Sequence
  Description of Artificial Sequence: Synthetic oligonucleotide
gccuucugucacgagguug

SEQ ID NO: 1543291 - RNA, 19 nt, Artificial Sequence
  Description of Artificial Sequence: Synthetic oligonucleotide
ggagguacaagugacucuu

SEQ ID NO: 1543292 - RNA, 19 nt, Artificial Sequence
  Description of Artificial Sequence: Synthetic oligonucleotide
guguguacucaaagucaga

SEQ ID NO: 1543293 - RNA, 19 nt, Artificial Sequence
  Description of Artificial Sequence: Synthetic oligonucleotide
gccuagggaaugacuuagg

SEQ ID NO: 1543294 - RNA, 19 nt, Artificial Sequence
  Description of Artificial Sequence: Synthetic oligonucleotide
gcugcuguugauacuccuc

SEQ ID NO: 1543295 - RNA, 19 nt, Artificial Sequence
  Description of Artificial Sequence: Synthetic oligonucleotide
ggcuuagaacucaucucuc

SEQ ID NO: 1543296 - RNA, 19 nt, Artificial Sequence
  Description of Artificial Sequence: Synthetic oligonucleotide
guccggacagggccucaug

SEQ ID NO: 1543297 - RNA, 19 nt, Artificial Sequence
  Description of Artificial Sequence: Synthetic oligonucleotide
ggacucuguggaucaacaa

SEQ ID NO: 1543298 - RNA, 19 nt, Artificial Sequence
  Description of Artificial Sequence: Synthetic oligonucleotide
gagccgccuccaccuuccg

SEQ ID NO: 1543299 - RNA, 19 nt, Artificial Sequence
  Description of Artificial Sequence: Synthetic oligonucleotide
ccacuugacacaguagaga

SEQ ID NO: 1543300 - RNA, 19 nt, Artificial Sequence
  Description of Artificial Sequence: Synthetic oligonucleotide
ccgaaucugcauccucagc

SEQ ID NO: 1543301 - RNA, 19 nt, Artificial Sequence
  Description of Artificial Sequence: Synthetic oligonucleotide
gccuuacuaggugcugggg

SEQ ID NO: 1543302 - RNA, 19 nt, Artificial Sequence
  Description of Artificial Sequence: Synthetic oligonucleotide
ccauuggugcucuggguga

SEQ ID NO: 1543303 - RNA, 19 nt, Artificial Sequence
  Description of Artificial Sequence: Synthetic oligonucleotide
auucggguguguacucaaa

SEQ ID NO: 1543304 - RNA, 19 nt, Artificial Sequence
  Description of Artificial Sequence: Synthetic oligonucleotide
gaccucugccgccgaucac

SEQ ID NO: 1543305 - RNA, 19 nt, Artificial Sequence
  Description of Artificial Sequence: Synthetic oligonucleotide
gcuugauggauaggaggca

SEQ ID NO: 1543306 - RNA, 19 nt, Artificial Sequence
  Description of Artificial Sequence: Synthetic oligonucleotide
gcuuuugccuagggaauga

SEQ ID NO: 1543307 - RNA, 19 nt, Artificial Sequence
  Description of Artificial Sequence: Synthetic oligonucleotide
uggccaguuuagggaguac

SEQ ID NO: 1543308 - RNA, 19 nt, Artificial Sequence
  Description of Artificial Sequence: Synthetic oligonucleotide
cuccaggaacugcucugca

SEQ ID NO: 1543309 - RNA, 19 nt, Artificial Sequence
  Description of Artificial Sequence: Synthetic oligonucleotide
ccauggcuuuugccuaggg

SEQ ID NO: 1543310 - RNA, 19 nt, Artificial Sequence
  Description of Artificial Sequence: Synthetic oligonucleotide
gguggcaaagcuuggucuu

SEQ ID NO: 1543311 - RNA, 19 nt, Artificial Sequence
  Description of Artificial Sequence: Synthetic oligonucleotide
cuuguaugcccagguugaa

SEQ ID NO: 1543312 - RNA, 19 nt, Artificial Sequence
  Description of Artificial Sequence: Synthetic oligonucleotide
gaucaggcuguuggguccu

SEQ ID NO: 1543313 - RNA, 19 nt, Artificial Sequence
  Description of Artificial Sequence: Synthetic oligonucleotide
cacagucugacucgggcuu

SEQ ID NO: 1543314 - RNA, 19 nt, Artificial Sequence
  Description of Artificial Sequence: Synthetic oligonucleotide
agccuucugucacgagguu

SEQ ID NO: 1543315 - RNA, 19 nt, Artificial Sequence
  Description of Artificial Sequence: Synthetic oligonucleotide
gggaguacugucauugcau

SEQ ID NO: 1543316 - RNA, 19 nt, Artificial Sequence
  Description of Artificial Sequence: Synthetic oligonucleotide
cugggcguccagauguggu

SEQ ID NO: 1543317 - RNA, 19 nt, Artificial Sequence
  Description of Artificial Sequence: Synthetic oligonucleotide
ccugugaaucgcacauuga

SEQ ID NO: 1543318 - RNA, 19 nt, Artificial Sequence
  Description of Artificial Sequence: Synthetic oligonucleotide
gcugggcguccagaugugg

SEQ ID NO: 1543319 - RNA, 19 nt, Artificial Sequence
  Description of Artificial Sequence: Synthetic oligonucleotide
gugcuuagucaucgugcua

SEQ ID NO: 1543320 - RNA, 19 nt, Artificial Sequence
  Description of Artificial Sequence: Synthetic oligonucleotide
gugacgucccacacguacu

SEQ ID NO: 1543321 - RNA, 19 nt, Artificial Sequence
  Description of Artificial Sequence: Synthetic oligonucleotide
ccuagggaaugacuuaggu

SEQ ID NO: 1543322 - RNA, 19 nt, Artificial Sequence
  Description of Artificial Sequence: Synthetic oligonucleotide
cacucaagauuucccgaau

SEQ ID NO: 1543323 - RNA, 19 nt, Artificial Sequence
  Description of Artificial Sequence: Synthetic oligonucleotide
gcccagcgugccuuguggc

SEQ ID NO: 1543324 - RNA, 19 nt, Artificial Sequence
  Description of Artificial Sequence: Synthetic oligonucleotide
guaagcucacacaggccau

SEQ ID NO: 1543325 - RNA, 19 nt, Artificial Sequence
  Description of Artificial Sequence: Synthetic oligonucleotide
gccaugguacagagguaug

SEQ ID NO: 1543326 - RNA, 19 nt, Artificial Sequence
  Description of Artificial Sequence: Synthetic oligonucleotide
guggccaguuuagggagua

SEQ ID NO: 1543327 - RNA, 19 nt, Artificial Sequence
  Description of Artificial Sequence: Synthetic oligonucleotide
gcuuagucaucgugcuaaa

SEQ ID NO: 1543328 - RNA, 19 nt, Artificial Sequence
  Description of Artificial Sequence: Synthetic oligonucleotide
cguucucccuuccagggga

SEQ ID NO: 1543329 - RNA, 19 nt, Artificial Sequence
  Description of Artificial Sequence: Synthetic oligonucleotide
agucugacucgggcuucga

SEQ ID NO: 1543330 - RNA, 19 nt, Artificial Sequence
  Description of Artificial Sequence: Synthetic oligonucleotide
guuccauguugagguuaga

SEQ ID NO: 1543331 - RNA, 19 nt, Artificial Sequence
  Description of Artificial Sequence: Synthetic oligonucleotide
ggccaguuuagggaguacu

SEQ ID NO: 1543332 - RNA, 19 nt, Artificial Sequence
  Description of Artificial Sequence: Synthetic oligonucleotide
ggggcccuuguaugcccag

SEQ ID NO: 1543333 - RNA, 19 nt, Artificial Sequence
  Description of Artificial Sequence: Synthetic oligonucleotide
gccagccaugguacagagg

SEQ ID NO: 1543334 - RNA, 19 nt, Artificial Sequence
  Description of Artificial Sequence: Synthetic oligonucleotide
gcauucggguguguacuca

SEQ ID NO: 1543335 - RNA, 19 nt, Artificial Sequence
  Description of Artificial Sequence: Synthetic oligonucleotide
gggcguccagaugugguuc

SEQ ID NO: 1543336 - RNA, 19 nt, Artificial Sequence
  Description of Artificial Sequence: Synthetic oligonucleotide
aggggcccuuguaugccca

SEQ ID NO: 1543337 - RNA, 19 nt, Artificial Sequence
  Description of Artificial Sequence: Synthetic oligonucleotide
ggacuggggaagcuccugu

SEQ ID NO: 1543338 - RNA, 19 nt, Artificial Sequence
  Description of Artificial Sequence: Synthetic oligonucleotide
aucaggcuguuggguccug

SEQ ID NO: 1543339 - RNA, 19 nt, Artificial Sequence
  Description of Artificial Sequence: Synthetic oligonucleotide
cuacacuacuggccuuacu

SEQ ID NO: 1543340 - RNA, 19 nt, Artificial Sequence
  Description of Artificial Sequence: Synthetic oligonucleotide
guaugcccagcaagucaaa

SEQ ID NO: 1543341 - RNA, 19 nt, Artificial Sequence
  Description of Artificial Sequence: Synthetic oligonucleotide
ccugguccgugaccaggag

SEQ ID NO: 1543342 - RNA, 19 nt, Artificial Sequence
  Description of Artificial Sequence: Synthetic oligonucleotide
cacugaguucaucuuccuu

SEQ ID NO: 1543343 - RNA, 19 nt, Artificial Sequence
  Description of Artificial Sequence: Synthetic oligonucleotide
ugguccggacagggccuca

SEQ ID NO: 1543344 - RNA, 19 nt, Artificial Sequence
  Description of Artificial Sequence: Synthetic oligonucleotide
caccuuccgccccauggcu

SEQ ID NO: 1543345 - RNA, 19 nt, Artificial Sequence
  Description of Artificial Sequence: Synthetic oligonucleotide
accuuccgccccauggcuu

SEQ ID NO: 1543346 - RNA, 19 nt, Artificial Sequence
  Description of Artificial Sequence: Synthetic oligonucleotide
cucaucugaugugaucauu

SEQ ID NO: 1543347 - RNA, 19 nt, Artificial Sequence
  Description of Artificial Sequence: Synthetic oligonucleotide
cuaaggcccagcgugccuu

SEQ ID NO: 1543348 - RNA, 19 nt, Artificial Sequence
  Description of Artificial Sequence: Synthetic oligonucleotide
ggguccguucucccuucca

SEQ ID NO: 1543349 - RNA, 19 nt, Artificial Sequence
  Description of Artificial Sequence: Synthetic oligonucleotide
cuccaccuuccgccccaug

SEQ ID NO: 1543350 - RNA, 19 nt, Artificial Sequence
  Description of Artificial Sequence: Synthetic oligonucleotide
gggguccguucucccuucc

SEQ ID NO: 1543351 - RNA, 19 nt, Artificial Sequence
  Description of Artificial Sequence: Synthetic oligonucleotide
ggucgcuaaggcccagcgu

SEQ ID NO: 1543352 - RNA, 19 nt, Artificial Sequence
  Description of Artificial Sequence: Synthetic oligonucleotide
cuucgaccucugccgccga

SEQ ID NO: 1543353 - RNA, 19 nt, Artificial Sequence
  Description of Artificial Sequence: Synthetic oligonucleotide
gcugcgcugcaguggucuc

SEQ ID NO: 1543354 - RNA, 19 nt, Artificial Sequence
  Description of Artificial Sequence: Synthetic oligonucleotide
cugucgccauccacauugu

SEQ ID NO: 1543355 - RNA, 19 nt, Artificial Sequence
  Description of Artificial Sequence: Synthetic oligonucleotide
cacguacuugagcuagcuu

SEQ ID NO: 1543356 - RNA, 19 nt, Artificial Sequence
  Description of Artificial Sequence: Synthetic oligonucleotide
cagcugcgcugcagugguc

SEQ ID NO: 1543357 - RNA, 19 nt, Artificial Sequence
  Description of Artificial Sequence: Synthetic oligonucleotide
gcugguggcaaagcuuggu

SEQ ID NO: 1543358 - RNA, 19 nt, Artificial Sequence
  Description of Artificial Sequence: Synthetic oligonucleotide
ccucugccgccgaucacca

SEQ ID NO: 1543359 - RNA, 19 nt, Artificial Sequence
  Description of Artificial Sequence: Synthetic oligonucleotide
ggagggcacucaagauuuc

SEQ ID NO: 1543360 - RNA, 19 nt, Artificial Sequence
  Description of Artificial Sequence: Synthetic oligonucleotide
cauuggugcucugggugau

SEQ ID NO: 1543361 - RNA, 19 nt, Artificial Sequence
  Description of Artificial Sequence: Synthetic oligonucleotide
ccuuccaggggauccacuu

SEQ ID NO: 1543362 - RNA, 19 nt, Artificial Sequence
  Description of Artificial Sequence: Synthetic oligonucleotide
cgugaccaggagguacaag

SEQ ID NO: 1543363 - RNA, 19 nt, Artificial Sequence
  Description of Artificial Sequence: Synthetic oligonucleotide
gcuaaggcccagcgugccu

SEQ ID NO: 1543364 - RNA, 19 nt, Artificial Sequence
  Description of Artificial Sequence: Synthetic oligonucleotide
cgaccucugccgccgauca

SEQ ID NO: 1543365 - RNA, 19 nt, Artificial Sequence
  Description of Artificial Sequence: Synthetic oligonucleotide
cgcuaaggcccagcgugcc

SEQ ID NO: 1543366 - RNA, 19 nt, Artificial Sequence
  Description of Artificial Sequence: Synthetic oligonucleotide
ccagaucaggcuguugggu

SEQ ID NO: 1543367 - RNA, 19 nt, Artificial Sequence
  Description of Artificial Sequence: Synthetic oligonucleotide
agcgugccuuguggcugcu

SEQ ID NO: 1543368 - RNA, 19 nt, Artificial Sequence
  Description of Artificial Sequence: Synthetic oligonucleotide
gcccagcaagucaaagaua

SEQ ID NO: 1543369 - RNA, 19 nt, Artificial Sequence
  Description of Artificial Sequence: Synthetic oligonucleotide
cguccagaugugguuccuc

SEQ ID NO: 1543370 - RNA, 19 nt, Artificial Sequence
  Description of Artificial Sequence: Synthetic oligonucleotide
aggugacgucccacacgua

SEQ ID NO: 1543371 - RNA, 19 nt, Artificial Sequence
  Description of Artificial Sequence: Synthetic oligonucleotide
gcccuuguaugcccagguu

SEQ ID NO: 1543372 - RNA, 19 nt, Artificial Sequence
  Description of Artificial Sequence: Synthetic oligonucleotide
ggagaggacaagggccauu

SEQ ID NO: 1543373 - RNA, 19 nt, Artificial Sequence
  Description of Artificial Sequence: Synthetic oligonucleotide
gcgugccuuguggcugcug

SEQ ID NO: 1543374 - RNA, 19 nt, Artificial Sequence
  Description of Artificial Sequence: Synthetic oligonucleotide
cggacagggccucauguuu

SEQ ID NO: 1543375 - RNA, 19 nt, Artificial Sequence
  Description of Artificial Sequence: Synthetic oligonucleotide
ccggacagggccucauguu

SEQ ID NO: 1543376 - RNA, 19 nt, Artificial Sequence
  Description of Artificial Sequence: Synthetic oligonucleotide
gguccggacagggccucau

SEQ ID NO: 1543377 - RNA, 19 nt, Artificial Sequence
  Description of Artificial Sequence: Synthetic oligonucleotide
cccuuccaggggauccacu

SEQ ID NO: 1543378 - RNA, 19 nt, Artificial Sequence
  Description of Artificial Sequence: Synthetic oligonucleotide
gcguccagaugugguuccu

SEQ ID NO: 1543379 - RNA, 19 nt, Artificial Sequence
  Description of Artificial Sequence: Synthetic oligonucleotide
gggccaguuccaggucgcu

SEQ ID NO: 1543380 - RNA, 19 nt, Artificial Sequence
  Description of Artificial Sequence: Synthetic oligonucleotide
aaugccauaaauauguuac

SEQ ID NO: 1543381 - RNA, 19 nt, Artificial Sequence
  Description of Artificial Sequence: Synthetic oligonucleotide
aauucuuuaauguauuaca

SEQ ID NO: 1543382 - RNA, 19 nt, Artificial Sequence
  Description of Artificial Sequence: Synthetic oligonucleotide
uuguguuugacccugaggc

SEQ ID NO: 1543383 - RNA, 19 nt, Artificial Sequence
  Description of Artificial Sequence: Synthetic oligonucleotide
ugaaauauugauuccuugg

SEQ ID NO: 1543384 - RNA, 19 nt, Artificial Sequence
  Description of Artificial Sequence: Synthetic oligonucleotide
aaaguagugcaccaguauc

SEQ ID NO: 1543385 - RNA, 19 nt, Artificial Sequence
  Description of Artificial Sequence: Synthetic oligonucleotide
aauauugauuccuuggaga

SEQ ID NO: 1543386 - RNA, 19 nt, Artificial Sequence
  Description of Artificial Sequence: Synthetic oligonucleotide
uuuauugcauuucaugcag

SEQ ID NO: 1543387 - RNA, 19 nt, Artificial Sequence
  Description of Artificial Sequence: Synthetic oligonucleotide
aaauauugauuccuuggag

SEQ ID NO: 1543388 - RNA, 19 nt, Artificial Sequence
  Description of Artificial Sequence: Synthetic oligonucleotide
auauugauuccuuggagac

SEQ ID NO: 1543389 - RNA, 19 nt, Artificial Sequence
  Description of Artificial Sequence: Synthetic oligonucleotide
acaaaucauuuccucaacc

SEQ ID NO: 1543390 - RNA, 19 nt, Artificial Sequence
  Description of Artificial Sequence: Synthetic oligonucleotide
aaauauuguguuggugucc

SEQ ID NO: 1543391 - RNA, 19 nt, Artificial Sequence
  Description of Artificial Sequence: Synthetic oligonucleotide
aauaaaacagugggcagag

SEQ ID NO: 1543392 - RNA, 19 nt, Artificial Sequence
  Description of Artificial Sequence: Synthetic oligonucleotide
aaugaacaugggcugggcg

SEQ ID NO: 1543393 - RNA, 19 nt, Artificial Sequence
  Description of Artificial Sequence: Synthetic oligonucleotide
aucuguugggcauuggugg

SEQ ID NO: 1543394 - RNA, 19 nt, Artificial Sequence
  Description of Artificial Sequence: Synthetic oligonucleotide
gaaaaugccauaaauaugu

SEQ ID NO: 1543395 - RNA, 19 nt, Artificial Sequence
  Description of Artificial Sequence: Synthetic oligonucleotide
aauauugcaucuuucuguu

SEQ ID NO: 1543396 - RNA, 19 nt, Artificial Sequence
  Description of Artificial Sequence: Synthetic oligonucleotide
guagucguggaacuggugg

SEQ ID NO: 1543397 - RNA, 19 nt, Artificial Sequence
  Description of Artificial Sequence: Synthetic oligonucleotide
agcaauggcagugaaugcc

SEQ ID NO: 1543398 - RNA, 19 nt, Artificial Sequence
  Description of Artificial Sequence: Synthetic oligonucleotide
uauugaaauauugauuccu

SEQ ID NO: 1543399 - RNA, 19 nt, Artificial Sequence
  Description of Artificial Sequence: Synthetic oligonucleotide
uugaaguccaugcagcaac

SEQ ID NO: 1543400 - RNA, 19 nt, Artificial Sequence
  Description of Artificial Sequence: Synthetic oligonucleotide
uaagcggauauacugcagc

SEQ ID NO: 1543401 - RNA, 19 nt, Artificial Sequence
  Description of Artificial Sequence: Synthetic oligonucleotide
aaucucaguccccaggugu

SEQ ID NO: 1543402 - RNA, 19 nt, Artificial Sequence
  Description of Artificial Sequence: Synthetic oligonucleotide
agagaagagcacaacgucc

SEQ ID NO: 1543403 - RNA, 19 nt, Artificial Sequence
  Description of Artificial Sequence: Synthetic oligonucleotide
auauacugcagcuggccgg

SEQ ID NO: 1543404 - RNA, 19 nt, Artificial Sequence
  Description of Artificial Sequence: Synthetic oligonucleotide
aauauuguguugguguccu

SEQ ID NO: 1543405 - RNA, 19 nt, Artificial Sequence
  Description of Artificial Sequence: Synthetic oligonucleotide
uauuguguugguguccugg

SEQ ID NO: 1543406 - RNA, 19 nt, Artificial Sequence
  Description of Artificial Sequence: Synthetic oligonucleotide
cuuggaacaaugucgauga

SEQ ID NO: 1543407 - RNA, 19 nt, Artificial Sequence
  Description of Artificial Sequence: Synthetic oligonucleotide
uucuguuguagaaucucag

SEQ ID NO: 1543408 - RNA, 19 nt, Artificial Sequence
  Description of Artificial Sequence: Synthetic oligonucleotide
ucuuggaacaaugucgaug

SEQ ID NO: 1543409 - RNA, 19 nt, Artificial Sequence
  Description of Artificial Sequence: Synthetic oligonucleotide
caagccaggaaacaaauca

SEQ ID NO: 1543410 - RNA, 19 nt, Artificial Sequence
  Description of Artificial Sequence: Synthetic oligonucleotide
ugaccuguucugaaggcag

SEQ ID NO: 1543411 - RNA, 19 nt, Artificial Sequence
  Description of Artificial Sequence: Synthetic oligonucleotide
ugucccuggaccuggacag

SEQ ID NO: 1543412 - RNA, 19 nt, Artificial Sequence
  Description of Artificial Sequence: Synthetic oligonucleotide
ugagcacaauucuuuaaug

SEQ ID NO: 1543413 - RNA, 19 nt, Artificial Sequence
  Description of Artificial Sequence: Synthetic oligonucleotide
uuuauagcauuggacacac

SEQ ID NO: 1543414 - RNA, 19 nt, Artificial Sequence
  Description of Artificial Sequence: Synthetic oligonucleotide
uuuuauagcauuggacaca

SEQ ID NO: 1543415 - RNA, 19 nt, Artificial Sequence
  Description of Artificial Sequence: Synthetic oligonucleotide
aaaugccauaaauauguua

SEQ ID NO: 1543416 - RNA, 19 nt, Artificial Sequence
  Description of Artificial Sequence: Synthetic oligonucleotide
aaugcccaagccaggaaac

SEQ ID NO: 1543417 - RNA, 19 nt, Artificial Sequence
  Description of Artificial Sequence: Synthetic oligonucleotide
ugccccuuagcaauggcag

SEQ ID NO: 1543418 - RNA, 19 nt, Artificial Sequence
  Description of Artificial Sequence: Synthetic oligonucleotide
gaggcauugaagucccggg

SEQ ID NO: 1543419 - RNA, 19 nt, Artificial Sequence
  Description of Artificial Sequence: Synthetic oligonucleotide
uaaccuaaaaggaguauuu

SEQ ID NO: 1543420 - RNA, 19 nt, Artificial Sequence
  Description of Artificial Sequence: Synthetic oligonucleotide
ccacguuucaagaaaaugc

SEQ ID NO: 1543421 - RNA, 19 nt, Artificial Sequence
  Description of Artificial Sequence: Synthetic oligonucleotide
uaucuuagccugcgggagg

SEQ ID NO: 1543422 - RNA, 19 nt, Artificial Sequence
  Description of Artificial Sequence: Synthetic oligonucleotide
aacguccuagucuccuugg

SEQ ID NO: 1543423 - RNA, 19 nt, Artificial Sequence
  Description of Artificial Sequence: Synthetic oligonucleotide
ggcucuauggcaaauauug

SEQ ID NO: 1543424 - RNA, 19 nt, Artificial Sequence
  Description of Artificial Sequence: Synthetic oligonucleotide
uuucaagaaaaugccauaa

SEQ ID NO: 1543425 - RNA, 19 nt, Artificial Sequence
  Description of Artificial Sequence: Synthetic oligonucleotide
ugagccagcgugaaguagu

SEQ ID NO: 1543426 - RNA, 19 nt, Artificial Sequence
  Description of Artificial Sequence: Synthetic oligonucleotide
aguaucuuagccugcggga

SEQ ID NO: 1543427 - RNA, 19 nt, Artificial Sequence
  Description of Artificial Sequence: Synthetic oligonucleotide
aggaaucuggggaaggggc

SEQ ID NO: 1543428 - RNA, 19 nt, Artificial Sequence
  Description of Artificial Sequence: Synthetic oligonucleotide
accccugugaaggaggagc

SEQ ID NO: 1543429 - RNA, 19 nt, Artificial Sequence
  Description of Artificial Sequence: Synthetic oligonucleotide
ugaaugaacaugggcuggg

SEQ ID NO: 1543430 - RNA, 19 nt, Artificial Sequence
  Description of Artificial Sequence: Synthetic oligonucleotide
uugacccugaggcugggcc

SEQ ID NO: 1543431 - RNA, 19 nt, Artificial Sequence
  Description of Artificial Sequence: Synthetic oligonucleotide
gucugugugaucuguuggg

SEQ ID NO: 1543432 - RNA, 19 nt, Artificial Sequence
  Description of Artificial Sequence: Synthetic oligonucleotide
caaauauuguguugguguc

SEQ ID NO: 1543433 - RNA, 19 nt, Artificial Sequence
  Description of Artificial Sequence: Synthetic oligonucleotide
ugaucuguugggcauuggu

SEQ ID NO: 1543434 - RNA, 19 nt, Artificial Sequence
  Description of Artificial Sequence: Synthetic oligonucleotide
caguaucuuagccugcggg

SEQ ID NO: 1543435 - RNA, 19 nt, Artificial Sequence
  Description of Artificial Sequence: Synthetic oligonucleotide
aggcauggugacuugcugg

SEQ ID NO: 1543436 - RNA, 19 nt, Artificial Sequence
  Description of Artificial Sequence: Synthetic oligonucleotide
uccucaacguccuagucuc

SEQ ID NO: 1543437 - RNA, 19 nt, Artificial Sequence
  Description of Artificial Sequence: Synthetic oligonucleotide
aaguccaugcagcaacgga

SEQ ID NO: 1543438 - RNA, 19 nt, Artificial Sequence
  Description of Artificial Sequence: Synthetic oligonucleotide
aaguagugcaccaguaucu

SEQ ID NO: 1543439 - RNA, 19 nt, Artificial Sequence
  Description of Artificial Sequence: Synthetic oligonucleotide
augagcacaauucuuuaau

SEQ ID NO: 1543440 - RNA, 19 nt, Artificial Sequence
  Description of Artificial Sequence: Synthetic oligonucleotide
uuaaccuaaaaggaguauu

SEQ ID NO: 1543441 - RNA, 19 nt, Artificial Sequence
  Description of Artificial Sequence: Synthetic oligonucleotide
ucuccgaccugcauuguca

SEQ ID NO: 1543442 - RNA, 19 nt, Artificial Sequence
  Description of Artificial Sequence: Synthetic oligonucleotide
caguuugaaguccaugcag

SEQ ID NO: 1543443 - RNA, 19 nt, Artificial Sequence
  Description of Artificial Sequence: Synthetic oligonucleotide
uguggaaaguagugcacca

SEQ ID NO: 1543444 - RNA, 19 nt, Artificial Sequence
  Description of Artificial Sequence: Synthetic oligonucleotide
agcacaacguccucaacgu

SEQ ID NO: 1543445 - RNA, 19 nt, Artificial Sequence
  Description of Artificial Sequence: Synthetic oligonucleotide
agguguggaaaguagugca

SEQ ID NO: 1543446 - RNA, 19 nt, Artificial Sequence
  Description of Artificial Sequence: Synthetic oligonucleotide
cagagaggaacgcuggcgg

SEQ ID NO: 1543447 - RNA, 19 nt, Artificial Sequence
  Description of Artificial Sequence: Synthetic oligonucleotide
ggcagagaagagcacaacg

SEQ ID NO: 1543448 - RNA, 19 nt, Artificial Sequence
  Description of Artificial Sequence: Synthetic oligonucleotide
uggagguuucaguucaucu

SEQ ID NO: 1543449 - RNA, 19 nt, Artificial Sequence
  Description of Artificial Sequence: Synthetic oligonucleotide
ggaacugguggucugcugg

SEQ ID NO: 1543450 - RNA, 19 nt, Artificial Sequence
  Description of Artificial Sequence: Synthetic oligonucleotide
gacugaaugaacaugggcu

SEQ ID NO: 1543451 - RNA, 19 nt, Artificial Sequence
  Description of Artificial Sequence: Synthetic oligonucleotide
aacgcuggcgggaaggguc

SEQ ID NO: 1543452 - RNA, 19 nt, Artificial Sequence
  Description of Artificial Sequence: Synthetic oligonucleotide
aacguccucaacguccuag

SEQ ID NO: 1543453 - RNA, 19 nt, Artificial Sequence
  Description of Artificial Sequence: Synthetic oligonucleotide
cuuguuggaccucugucug

SEQ ID NO: 1543454 - RNA, 19 nt, Artificial Sequence
  Description of Artificial Sequence: Synthetic oligonucleotide
gaucuguugggcauuggug

SEQ ID NO: 1543455 - RNA, 19 nt, Artificial Sequence
  Description of Artificial Sequence: Synthetic oligonucleotide
ugugugaucuguugggcau

SEQ ID NO: 1543456 - RNA, 19 nt, Artificial Sequence
  Description of Artificial Sequence: Synthetic oligonucleotide
ugucccugcacgacuuggg

SEQ ID NO: 1543457 - RNA, 19 nt, Artificial Sequence
  Description of Artificial Sequence: Synthetic oligonucleotide
uggaucucucccguguugg

SEQ ID NO: 1543458 - RNA, 19 nt, Artificial Sequence
  Description of Artificial Sequence: Synthetic oligonucleotide
uauugcauuucaugcaguu

SEQ ID NO: 1543459 - RNA, 19 nt, Artificial Sequence
  Description of Artificial Sequence: Synthetic oligonucleotide
cuuguuuuauagcauugga

SEQ ID NO: 1543460 - RNA, 19 nt, Artificial Sequence
  Description of Artificial Sequence: Synthetic oligonucleotide
ucugaccuguucugaaggc

SEQ ID NO: 1543461 - RNA, 19 nt, Artificial Sequence
  Description of Artificial Sequence: Synthetic oligonucleotide
ucucuguggggcaugaguu

SEQ ID NO: 1543462 - RNA, 19 nt, Artificial Sequence
  Description of Artificial Sequence: Synthetic oligonucleotide
ucuguugggcauugguggc

SEQ ID NO: 1543463 - RNA, 19 nt, Artificial Sequence
  Description of Artificial Sequence: Synthetic oligonucleotide
auauguuacuuaauauucu

SEQ ID NO: 1543464 - RNA, 19 nt, Artificial Sequence
  Description of Artificial Sequence: Synthetic oligonucleotide
gguuucuggaugcagagga

SEQ ID NO: 1543465 - RNA, 19 nt, Artificial Sequence
  Description of Artificial Sequence: Synthetic oligonucleotide
aaggaauguuuccacgguu

SEQ ID NO: 1543466 - RNA, 19 nt, Artificial Sequence
  Description of Artificial Sequence: Synthetic oligonucleotide
aucuuagccugcgggaggc

SEQ ID NO: 1543467 - RNA, 19 nt, Artificial Sequence
  Description of Artificial Sequence: Synthetic oligonucleotide
cagaguggaaacccugugc

SEQ ID NO: 1543468 - RNA, 19 nt, Artificial Sequence
  Description of Artificial Sequence: Synthetic oligonucleotide
acgguuucuggaugcagag

SEQ ID NO: 1543469 - RNA, 19 nt, Artificial Sequence
  Description of Artificial Sequence: Synthetic oligonucleotide
uggacacacagcucaauau

SEQ ID NO: 1543470 - RNA, 19 nt, Artificial Sequence
  Description of Artificial Sequence: Synthetic oligonucleotide
ucuggaugcagaggaaucu

SEQ ID NO: 1543471 - RNA, 19 nt, Artificial Sequence
  Description of Artificial Sequence: Synthetic oligonucleotide
accgggaucugcuggaucu

SEQ ID NO: 1543472 - RNA, 19 nt, Artificial Sequence
  Description of Artificial Sequence: Synthetic oligonucleotide
uguguuugacccugaggcu

SEQ ID NO: 1543473 - RNA, 19 nt, Artificial Sequence
  Description of Artificial Sequence: Synthetic oligonucleotide
uucuggaugcagaggaauc

SEQ ID NO: 1543474 - RNA, 19 nt, Artificial Sequence
  Description of Artificial Sequence: Synthetic oligonucleotide
aggagucacagacuggcgu

SEQ ID NO: 1543475 - RNA, 19 nt, Artificial Sequence
  Description of Artificial Sequence: Synthetic oligonucleotide
uggaugguagucguggaac

SEQ ID NO: 1543476 - RNA, 19 nt, Artificial Sequence
  Description of Artificial Sequence: Synthetic oligonucleotide
agaacuggcagaguggaaa

SEQ ID NO: 1543477 - RNA, 19 nt, Artificial Sequence
  Description of Artificial Sequence: Synthetic oligonucleotide
ggaaacaaaucauuuccuc

SEQ ID NO: 1543478 - RNA, 19 nt, Artificial Sequence
  Description of Artificial Sequence: Synthetic oligonucleotide
ucugugugaucuguugggc

SEQ ID NO: 1543479 - RNA, 19 nt, Artificial Sequence
  Description of Artificial Sequence: Synthetic oligonucleotide
ccuccugacgcuuuggagg

SEQ ID NO: 1543480 - RNA, 19 nt, Artificial Sequence
  Description of Artificial Sequence: Synthetic oligonucleotide
uuguagaaucucagucccc

SEQ ID NO: 1543481 - RNA, 19 nt, Artificial Sequence
  Description of Artificial Sequence: Synthetic oligonucleotide
gcaaauauuguguuggugu

SEQ ID NO: 1543482 - RNA, 19 nt, Artificial Sequence
  Description of Artificial Sequence: Synthetic oligonucleotide
ugcaggagucacagacugg

SEQ ID NO: 1543483 - RNA, 19 nt, Artificial Sequence
  Description of Artificial Sequence: Synthetic oligonucleotide
accaguaucuuagccugcg

SEQ ID NO: 1543484 - RNA, 19 nt, Artificial Sequence
  Description of Artificial Sequence: Synthetic oligonucleotide
uggucugcuggccuugcug

SEQ ID NO: 1543485 - RNA, 19 nt, Artificial Sequence
  Description of Artificial Sequence: Synthetic oligonucleotide
uauugauuccuuggagaca

SEQ ID NO: 1543486 - RNA, 19 nt, Artificial Sequence
  Description of Artificial Sequence: Synthetic oligonucleotide
gacgcuuuggagguuucag

SEQ ID NO: 1543487 - RNA, 19 nt, Artificial Sequence
  Description of Artificial Sequence: Synthetic oligonucleotide
guaucuuagccugcgggag

SEQ ID NO: 1543488 - RNA, 19 nt, Artificial Sequence
  Description of Artificial Sequence: Synthetic oligonucleotide
uuuaaccuaaaaggaguau

SEQ ID NO: 1543489 - RNA, 19 nt, Artificial Sequence
  Description of Artificial Sequence: Synthetic oligonucleotide
gaaugcccaagccaggaaa

SEQ ID NO: 1543490 - RNA, 19 nt, Artificial Sequence
  Description of Artificial Sequence: Synthetic oligonucleotide
cugaaugaacaugggcugg

SEQ ID NO: 1543491 - RNA, 19 nt, Artificial Sequence
  Description of Artificial Sequence: Synthetic oligonucleotide
auguuuccacgguuucugg

SEQ ID NO: 1543492 - RNA, 19 nt, Artificial Sequence
  Description of Artificial Sequence: Synthetic oligonucleotide
aucucucccguguugguga

SEQ ID NO: 1543493 - RNA, 19 nt, Artificial Sequence
  Description of Artificial Sequence: Synthetic oligonucleotide
uccuccugacgcuuuggag

SEQ ID NO: 1543494 - RNA, 19 nt, Artificial Sequence
  Description of Artificial Sequence: Synthetic oligonucleotide
cugugaacuggcugaacug

SEQ ID NO: 1543495 - RNA, 19 nt, Artificial Sequence
  Description of Artificial Sequence: Synthetic oligonucleotide
ugugucccaucaccugggg

SEQ ID NO: 1543496 - RNA, 19 nt, Artificial Sequence
  Description of Artificial Sequence: Synthetic oligonucleotide
ggccuguuguguuugaccc

SEQ ID NO: 1543497 - RNA, 19 nt, Artificial Sequence
  Description of Artificial Sequence: Synthetic oligonucleotide
augccauaaauauguuacu

SEQ ID NO: 1543498 - RNA, 19 nt, Artificial Sequence
  Description of Artificial Sequence: Synthetic oligonucleotide
ucucccguguuggugauga

SEQ ID NO: 1543499 - RNA, 19 nt, Artificial Sequence
  Description of Artificial Sequence: Synthetic oligonucleotide
cuaagcggauauacugcag

SEQ ID NO: 1543500 - RNA, 19 nt, Artificial Sequence
  Description of Artificial Sequence: Synthetic oligonucleotide
gggcuaagcggauauacug

SEQ ID NO: 1543501 - RNA, 19 nt, Artificial Sequence
  Description of Artificial Sequence: Synthetic oligonucleotide
cacagcucaauauauugaa

SEQ ID NO: 1543502 - RNA, 19 nt, Artificial Sequence
  Description of Artificial Sequence: Synthetic oligonucleotide
uagucguggaacugguggu

SEQ ID NO: 1543503 - RNA, 19 nt, Artificial Sequence
  Description of Artificial Sequence: Synthetic oligonucleotide
ugccauaaauauguuacuu

SEQ ID NO: 1543504 - RNA, 19 nt, Artificial Sequence
  Description of Artificial Sequence: Synthetic oligonucleotide
uggaccuggacagcaguag

SEQ ID NO: 1543505 - RNA, 19 nt, Artificial Sequence
  Description of Artificial Sequence: Synthetic oligonucleotide
cauggugacuugcuggauc

SEQ ID NO: 1543506 - RNA, 19 nt, Artificial Sequence
  Description of Artificial Sequence: Synthetic oligonucleotide
guagguugcugagccagcg

SEQ ID NO: 1543507 - RNA, 19 nt, Artificial Sequence
  Description of Artificial Sequence: Synthetic oligonucleotide
guguuugacccugaggcug

SEQ ID NO: 1543508 - RNA, 19 nt, Artificial Sequence
  Description of Artificial Sequence: Synthetic oligonucleotide
aacccugugcaccccugug

SEQ ID NO: 1543509 - RNA, 19 nt, Artificial Sequence
  Description of Artificial Sequence: Synthetic oligonucleotide
aucaccugcauggucuguc

SEQ ID NO: 1543510 - RNA, 19 nt, Artificial Sequence
  Description of Artificial Sequence: Synthetic oligonucleotide
uuucuggaugcagaggaau

SEQ ID NO: 1543511 - RNA, 19 nt, Artificial Sequence
  Description of Artificial Sequence: Synthetic oligonucleotide
uccuagucuccuugggucu

SEQ ID NO: 1543512 - RNA, 19 nt, Artificial Sequence
  Description of Artificial Sequence: Synthetic oligonucleotide
caguagguugcugagccag

SEQ ID NO: 1543513 - RNA, 19 nt, Artificial Sequence
  Description of Artificial Sequence: Synthetic oligonucleotide
gaaguccaugcagcaacgg

SEQ ID NO: 1543514 - RNA, 19 nt, Artificial Sequence
  Description of Artificial Sequence: Synthetic oligonucleotide
guguggaaaguagugcacc

SEQ ID NO: 1543515 - RNA, 19 nt, Artificial Sequence
  Description of Artificial Sequence: Synthetic oligonucleotide
aaacccugugcaccccugu

SEQ ID NO: 1543516 - RNA, 19 nt, Artificial Sequence
  Description of Artificial Sequence: Synthetic oligonucleotide
aagccaggaaacaaaucau

SEQ ID NO: 1543517 - RNA, 19 nt, Artificial Sequence
  Description of Artificial Sequence: Synthetic oligonucleotide
aggaaacaaaucauuuccu

SEQ ID NO: 1543518 - RNA, 19 nt, Artificial Sequence
  Description of Artificial Sequence: Synthetic oligonucleotide
ugcuguccaucugugaacu

SEQ ID NO: 1543519 - RNA, 19 nt, Artificial Sequence
  Description of Artificial Sequence: Synthetic oligonucleotide
cugggcuaagcggauauac

SEQ ID NO: 1543520 - RNA, 19 nt, Artificial Sequence
  Description of Artificial Sequence: Synthetic oligonucleotide
agcaacggagaugagcaca

SEQ ID NO: 1543521 - RNA, 19 nt, Artificial Sequence
  Description of Artificial Sequence: Synthetic oligonucleotide
agagcacaacguccucaac

SEQ ID NO: 1543522 - RNA, 19 nt, Artificial Sequence
  Description of Artificial Sequence: Synthetic oligonucleotide
caccgguguggucugaccc

SEQ ID NO: 1543523 - RNA, 19 nt, Artificial Sequence
  Description of Artificial Sequence: Synthetic oligonucleotide
uugguggcaagugucugga

SEQ ID NO: 1543524 - RNA, 19 nt, Artificial Sequence
  Description of Artificial Sequence: Synthetic oligonucleotide
acguccuagucuccuuggg

SEQ ID NO: 1543525 - RNA, 19 nt, Artificial Sequence
  Description of Artificial Sequence: Synthetic oligonucleotide
gaagagcacaacguccuca

SEQ ID NO: 1543526 - RNA, 19 nt, Artificial Sequence
  Description of Artificial Sequence: Synthetic oligonucleotide
ugguagucguggaacuggu

SEQ ID NO: 1543527 - RNA, 19 nt, Artificial Sequence
  Description of Artificial Sequence: Synthetic oligonucleotide
gggucuuggagagaagggg

SEQ ID NO: 1543528 - RNA, 19 nt, Artificial Sequence
  Description of Artificial Sequence: Synthetic oligonucleotide
agucacagacuggcguacc

SEQ ID NO: 1543529 - RNA, 19 nt, Artificial Sequence
  Description of Artificial Sequence: Synthetic oligonucleotide
uuuccucaaccacguuuca

SEQ ID NO: 1543530 - RNA, 19 nt, Artificial Sequence
  Description of Artificial Sequence: Synthetic oligonucleotide
gaaaguagugcaccaguau

SEQ ID NO: 1543531 - RNA, 19 nt, Artificial Sequence
  Description of Artificial Sequence: Synthetic oligonucleotide
ugaaugcccaagccaggaa

SEQ ID NO: 1543532 - RNA, 19 nt, Artificial Sequence
  Description of Artificial Sequence: Synthetic oligonucleotide
ucccugcacgacuugggug

SEQ ID NO: 1543533 - RNA, 19 nt, Artificial Sequence
  Description of Artificial Sequence: Synthetic oligonucleotide
guucauggcccacaggcaa

SEQ ID NO: 1543534 - RNA, 19 nt, Artificial Sequence
  Description of Artificial Sequence: Synthetic oligonucleotide
aggcauugaagucccgggu

SEQ ID NO: 1543535 - RNA, 19 nt, Artificial Sequence
  Description of Artificial Sequence: Synthetic oligonucleotide
aguccccagguguggaaag

SEQ ID NO: 1543536 - RNA, 19 nt, Artificial Sequence
  Description of Artificial Sequence: Synthetic oligonucleotide
gaaugaacaugggcugggc

SEQ ID NO: 1543537 - RNA, 19 nt, Artificial Sequence
  Description of Artificial Sequence: Synthetic oligonucleotide
cugaggcugugcaaugaug

SEQ ID NO: 1543538 - RNA, 19 nt, Artificial Sequence
  Description of Artificial Sequence: Synthetic oligonucleotide
ucucaguccccaggugugg

SEQ ID NO: 1543539 - RNA, 19 nt, Artificial Sequence
  Description of Artificial Sequence: Synthetic oligonucleotide
agucguggaacuggugguc

SEQ ID NO: 1543540 - RNA, 19 nt, Artificial Sequence
  Description of Artificial Sequence: Synthetic oligonucleotide
gaguggaaacccugugcac

SEQ ID NO: 1543541 - RNA, 19 nt, Artificial Sequence
  Description of Artificial Sequence: Synthetic oligonucleotide
uggcaaauauuguguuggu

SEQ ID NO: 1543542 - RNA, 19 nt, Artificial Sequence
  Description of Artificial Sequence: Synthetic oligonucleotide
ggaaaccagcucucugugg

SEQ ID NO: 1543543 - RNA, 19 nt, Artificial Sequence
  Description of Artificial Sequence: Synthetic oligonucleotide
gaucucucccguguuggug

SEQ ID NO: 1543544 - RNA, 19 nt, Artificial Sequence
  Description of Artificial Sequence: Synthetic oligonucleotide
agcuggccggcauucagcu

SEQ ID NO: 1543545 - RNA, 19 nt, Artificial Sequence
  Description of Artificial Sequence: Synthetic oligonucleotide
gccuugucaggucaggccc

SEQ ID NO: 1543546 - RNA, 19 nt, Artificial Sequence
  Description of Artificial Sequence: Synthetic oligonucleotide
uucuccgaccugcauuguc

SEQ ID NO: 1543547 - RNA, 19 nt, Artificial Sequence
  Description of Artificial Sequence: Synthetic oligonucleotide
ggaccuggacagcaguagg

SEQ ID NO: 1543548 - RNA, 19 nt, Artificial Sequence
  Description of Artificial Sequence: Synthetic oligonucleotide
ggauauacugcagcuggcc

SEQ ID NO: 1543549 - RNA, 19 nt, Artificial Sequence
  Description of Artificial Sequence: Synthetic oligonucleotide
caacguccuagucuccuug

SEQ ID NO: 1543550 - RNA, 19 nt, Artificial Sequence
  Description of Artificial Sequence: Synthetic oligonucleotide
caggagucacagacuggcg

SEQ ID NO: 1543551 - RNA, 19 nt, Artificial Sequence
  Description of Artificial Sequence: Synthetic oligonucleotide
cagcgugaaguaguacugg

SEQ ID NO: 1543552 - RNA, 19 nt, Artificial Sequence
  Description of Artificial Sequence: Synthetic oligonucleotide
accuucuccgaccugcauu

SEQ ID NO: 1543553 - RNA, 19 nt, Artificial Sequence
  Description of Artificial Sequence: Synthetic oligonucleotide
auugcaucuuucuguugua

SEQ ID NO: 1543554 - RNA, 19 nt, Artificial Sequence
  Description of Artificial Sequence: Synthetic oligonucleotide
ugaccuucuccgaccugca

SEQ ID NO: 1543555 - RNA, 19 nt, Artificial Sequence
  Description of Artificial Sequence: Synthetic oligonucleotide
gcagugaaugcccaagcca

SEQ ID NO: 1543556 - RNA, 19 nt, Artificial Sequence
  Description of Artificial Sequence: Synthetic oligonucleotide
cacgguuucuggaugcaga

SEQ ID NO: 1543557 - RNA, 19 nt, Artificial Sequence
  Description of Artificial Sequence: Synthetic oligonucleotide
cuugggugccugacacagg

SEQ ID NO: 1543558 - RNA, 19 nt, Artificial Sequence
  Description of Artificial Sequence: Synthetic oligonucleotide
ugcgggaggcauugaaguc

SEQ ID NO: 1543559 - RNA, 19 nt, Artificial Sequence
  Description of Artificial Sequence: Synthetic oligonucleotide
agcauuggacacacagcuc

SEQ ID NO: 1543560 - RNA, 19 nt, Artificial Sequence
  Description of Artificial Sequence: Synthetic oligonucleotide
ccgaccugcauugucaccg

SEQ ID NO: 1543561 - RNA, 19 nt, Artificial Sequence
  Description of Artificial Sequence: Synthetic oligonucleotide
agcggauauacugcagcug

SEQ ID NO: 1543562 - RNA, 19 nt, Artificial Sequence
  Description of Artificial Sequence: Synthetic oligonucleotide
uggcugacugaaugaacau

SEQ ID NO: 1543563 - RNA, 19 nt, Artificial Sequence
  Description of Artificial Sequence: Synthetic oligonucleotide
acguuucaagaaaaugcca

SEQ ID NO: 1543564 - RNA, 19 nt, Artificial Sequence
  Description of Artificial Sequence: Synthetic oligonucleotide
ucaccgguguggucugacc

SEQ ID NO: 1543565 - RNA, 19 nt, Artificial Sequence
  Description of Artificial Sequence: Synthetic oligonucleotide
gcuaagcggauauacugca

SEQ ID NO: 1543566 - RNA, 19 nt, Artificial Sequence
  Description of Artificial Sequence: Synthetic oligonucleotide
acgacuugggugccugaca

SEQ ID NO: 1543567 - RNA, 19 nt, Artificial Sequence
  Description of Artificial Sequence: Synthetic oligonucleotide
uggcguaccuccuccugac

SEQ ID NO: 1543568 - RNA, 19 nt, Artificial Sequence
  Description of Artificial Sequence: Synthetic oligonucleotide
acguccucaacguccuagu

SEQ ID NO: 1543569 - RNA, 19 nt, Artificial Sequence
  Description of Artificial Sequence: Synthetic oligonucleotide
uccaugcagcaacggagau

SEQ ID NO: 1543570 - RNA, 19 nt, Artificial Sequence
  Description of Artificial Sequence: Synthetic oligonucleotide
cucuguggggcaugaguuc

SEQ ID NO: 1543571 - RNA, 19 nt, Artificial Sequence
  Description of Artificial Sequence: Synthetic oligonucleotide
uuuggagguuucaguucau

SEQ ID NO: 1543572 - RNA, 19 nt, Artificial Sequence
  Description of Artificial Sequence: Synthetic oligonucleotide
cugugugaucuguugggca

SEQ ID NO: 1543573 - RNA, 19 nt, Artificial Sequence
  Description of Artificial Sequence: Synthetic oligonucleotide
accgguguggucugacccu

SEQ ID NO: 1543574 - RNA, 19 nt, Artificial Sequence
  Description of Artificial Sequence: Synthetic oligonucleotide
uguccuuguuggaccucug

SEQ ID NO: 1543575 - RNA, 19 nt, Artificial Sequence
  Description of Artificial Sequence: Synthetic oligonucleotide
acaacguccucaacguccu

SEQ ID NO: 1543576 - RNA, 19 nt, Artificial Sequence
  Description of Artificial Sequence: Synthetic oligonucleotide
ugcacgacuugggugccug

SEQ ID NO: 1543577 - RNA, 19 nt, Artificial Sequence
  Description of Artificial Sequence: Synthetic oligonucleotide
caggcaaggaauguuucca

SEQ ID NO: 1543578 - RNA, 19 nt, Artificial Sequence
  Description of Artificial Sequence: Synthetic oligonucleotide
aggaauguuuccacgguuu

SEQ ID NO: 1543579 - RNA, 19 nt, Artificial Sequence
  Description of Artificial Sequence: Synthetic oligonucleotide
caaccacguuucaagaaaa

SEQ ID NO: 1543580 - RNA, 19 nt, Artificial Sequence
  Description of Artificial Sequence: Synthetic oligonucleotide
gugugucccaucaccuggg

SEQ ID NO: 1543581 - RNA, 19 nt, Artificial Sequence
  Description of Artificial Sequence: Synthetic oligonucleotide
ggcauugaagucccggguc

SEQ ID NO: 1543582 - RNA, 19 nt, Artificial Sequence
  Description of Artificial Sequence: Synthetic oligonucleotide
cagcuggccggcauucagc

SEQ ID NO: 1543583 - RNA, 19 nt, Artificial Sequence
  Description of Artificial Sequence: Synthetic oligonucleotide
caggcauggugacuugcug

SEQ ID NO: 1543584 - RNA, 19 nt, Artificial Sequence
  Description of Artificial Sequence: Synthetic oligonucleotide
ggaauguuuccacgguuuc

SEQ ID NO: 1543585 - RNA, 19 nt, Artificial Sequence
  Description of Artificial Sequence: Synthetic oligonucleotide
ugcccaagccaggaaacaa

SEQ ID NO: 1543586 - RNA, 19 nt, Artificial Sequence
  Description of Artificial Sequence: Synthetic oligonucleotide
ggcaaauauuguguuggug

SEQ ID NO: 1543587 - RNA, 19 nt, Artificial Sequence
  Description of Artificial Sequence: Synthetic oligonucleotide
auauuguguugguguccug

SEQ ID NO: 1543588 - RNA, 19 nt, Artificial Sequence
  Description of Artificial Sequence: Synthetic oligonucleotide
ucccguguuggugaugauc

SEQ ID NO: 1543589 - RNA, 19 nt, Artificial Sequence
  Description of Artificial Sequence: Synthetic oligonucleotide
aucucaguccccaggugug

SEQ ID NO: 1543590 - RNA, 19 nt, Artificial Sequence
  Description of Artificial Sequence: Synthetic oligonucleotide
cauugguggcaagugucug

SEQ ID NO: 1543591 - RNA, 19 nt, Artificial Sequence
  Description of Artificial Sequence: Synthetic oligonucleotide
aaccacguuucaagaaaau

SEQ ID NO: 1543592 - RNA, 19 nt, Artificial Sequence
  Description of Artificial Sequence: Synthetic oligonucleotide
ugcugaggcugugcaauga

SEQ ID NO: 1543593 - RNA, 19 nt, Artificial Sequence
  Description of Artificial Sequence: Synthetic oligonucleotide
uccgaccugcauugucacc

SEQ ID NO: 1543594 - RNA, 19 nt, Artificial Sequence
  Description of Artificial Sequence: Synthetic oligonucleotide
ggccuugucaggucaggcc

SEQ ID NO: 1543595 - RNA, 19 nt, Artificial Sequence
  Description of Artificial Sequence: Synthetic oligonucleotide
ccagcgugaaguaguacug

SEQ ID NO: 1543596 - RNA, 19 nt, Artificial Sequence
  Description of Artificial Sequence: Synthetic oligonucleotide
uggucuguccagugccacu

SEQ ID NO: 1543597 - RNA, 19 nt, Artificial Sequence
  Description of Artificial Sequence: Synthetic oligonucleotide
guuuccacgguuucuggau

SEQ ID NO: 1543598 - RNA, 19 nt, Artificial Sequence
  Description of Artificial Sequence: Synthetic oligonucleotide
cuccgaccugcauugucac

SEQ ID NO: 1543599 - RNA, 19 nt, Artificial Sequence
  Description of Artificial Sequence: Synthetic oligonucleotide
gcaguuugaaguccaugca

SEQ ID NO: 1543600 - RNA, 19 nt, Artificial Sequence
  Description of Artificial Sequence: Synthetic oligonucleotide
uuggagguuucaguucauc

SEQ ID NO: 1543601 - RNA, 19 nt, Artificial Sequence
  Description of Artificial Sequence: Synthetic oligonucleotide
cugucccugcacgacuugg

SEQ ID NO: 1543602 - RNA, 19 nt, Artificial Sequence
  Description of Artificial Sequence: Synthetic oligonucleotide
caccaguaucuuagccugc

SEQ ID NO: 1543603 - RNA, 19 nt, Artificial Sequence
  Description of Artificial Sequence: Synthetic oligonucleotide
gagucacagacuggcguac

SEQ ID NO: 1543604 - RNA, 19 nt, Artificial Sequence
  Description of Artificial Sequence: Synthetic oligonucleotide
guccucaacguccuagucu

SEQ ID NO: 1543605 - RNA, 19 nt, Artificial Sequence
  Description of Artificial Sequence: Synthetic oligonucleotide
ucaacguccuagucuccuu

SEQ ID NO: 1543606 - RNA, 19 nt, Artificial Sequence
  Description of Artificial Sequence: Synthetic oligonucleotide
uuccucaaccacguuucaa

SEQ ID NO: 1543607 - RNA, 19 nt, Artificial Sequence
  Description of Artificial Sequence: Synthetic oligonucleotide
uuagccugcgggaggcauu

SEQ ID NO: 1543608 - RNA, 19 nt, Artificial Sequence
  Description of Artificial Sequence: Synthetic oligonucleotide
acagcucaauauauugaaa

SEQ ID NO: 1543609 - RNA, 19 nt, Artificial Sequence
  Description of Artificial Sequence: Synthetic oligonucleotide
gaaacccugugcaccccug

SEQ ID NO: 1543610 - RNA, 19 nt, Artificial Sequence
  Description of Artificial Sequence: Synthetic oligonucleotide
gugaaugcccaagccagga

SEQ ID NO: 1543611 - RNA, 19 nt, Artificial Sequence
  Description of Artificial Sequence: Synthetic oligonucleotide
gaucugucccugcacgacu

SEQ ID NO: 1543612 - RNA, 19 nt, Artificial Sequence
  Description of Artificial Sequence: Synthetic oligonucleotide
ggggucugcccaucggagg

SEQ ID NO: 1543613 - RNA, 19 nt, Artificial Sequence
  Description of Artificial Sequence: Synthetic oligonucleotide
gagaggaacgcuggcggga

SEQ ID NO: 1543614 - RNA, 19 nt, Artificial Sequence
  Description of Artificial Sequence: Synthetic oligonucleotide
cugccccuuagcaauggca

SEQ ID NO: 1543615 - RNA, 19 nt, Artificial Sequence
  Description of Artificial Sequence: Synthetic oligonucleotide
gaacaugggcugggcgagg

SEQ ID NO: 1543616 - RNA, 19 nt, Artificial Sequence
  Description of Artificial Sequence: Synthetic oligonucleotide
ccaucggagggcugguugg

SEQ ID NO: 1543617 - RNA, 19 nt, Artificial Sequence
  Description of Artificial Sequence: Synthetic oligonucleotide
gggcaugaguucauggccc

SEQ ID NO: 1543618 - RNA, 19 nt, Artificial Sequence
  Description of Artificial Sequence: Synthetic oligonucleotide
cugcauggucuguccagug

SEQ ID NO: 1543619 - RNA, 19 nt, Artificial Sequence
  Description of Artificial Sequence: Synthetic oligonucleotide
gaauguuuccacgguuucu

SEQ ID NO: 1543620 - RNA, 19 nt, Artificial Sequence
  Description of Artificial Sequence: Synthetic oligonucleotide
cugagccagcgugaaguag

SEQ ID NO: 1543621 - RNA, 19 nt, Artificial Sequence
  Description of Artificial Sequence: Synthetic oligonucleotide
ggcugacugaaugaacaug

SEQ ID NO: 1543622 - RNA, 19 nt, Artificial Sequence
  Description of Artificial Sequence: Synthetic oligonucleotide
gcgggaggcauugaagucc

SEQ ID NO: 1543623 - RNA, 19 nt, Artificial Sequence
  Description of Artificial Sequence: Synthetic oligonucleotide
agggugugucccaucaccu

SEQ ID NO: 1543624 - RNA, 19 nt, Artificial Sequence
  Description of Artificial Sequence: Synthetic oligonucleotide
ugacgcuuuggagguuuca

SEQ ID NO: 1543625 - RNA, 19 nt, Artificial Sequence
  Description of Artificial Sequence: Synthetic oligonucleotide
agccaggaaacaaaucauu

SEQ ID NO: 1543626 - RNA, 19 nt, Artificial Sequence
  Description of Artificial Sequence: Synthetic oligonucleotide
ggcauugguggcaaguguc

SEQ ID NO: 1543627 - RNA, 19 nt, Artificial Sequence
  Description of Artificial Sequence: Synthetic oligonucleotide
caucaccuggggcucuaug

SEQ ID NO: 1543628 - RNA, 19 nt, Artificial Sequence
  Description of Artificial Sequence: Synthetic oligonucleotide
agggagggugugucccauc

SEQ ID NO: 1543629 - RNA, 19 nt, Artificial Sequence
  Description of Artificial Sequence: Synthetic oligonucleotide
cagacuggcguaccuccuc

SEQ ID NO: 1543630 - RNA, 19 nt, Artificial Sequence
  Description of Artificial Sequence: Synthetic oligonucleotide
gguguggaaaguagugcac

SEQ ID NO: 1543631 - RNA, 19 nt, Artificial Sequence
  Description of Artificial Sequence: Synthetic oligonucleotide
ccugcgggaggcauugaag

SEQ ID NO: 1543632 - RNA, 19 nt, Artificial Sequence
  Description of Artificial Sequence: Synthetic oligonucleotide
cagcaguagguugcugagc

SEQ ID NO: 1543633 - RNA, 19 nt, Artificial Sequence
  Description of Artificial Sequence: Synthetic oligonucleotide
cugcauugucaccggugug

SEQ ID NO: 1543634 - RNA, 19 nt, Artificial Sequence
  Description of Artificial Sequence: Synthetic oligonucleotide
ggcgggaagggucugaccu

SEQ ID NO: 1543635 - RNA, 19 nt, Artificial Sequence
  Description of Artificial Sequence: Synthetic oligonucleotide
cuggccuugucaggucagg

SEQ ID NO: 1543636 - RNA, 19 nt, Artificial Sequence
  Description of Artificial Sequence: Synthetic oligonucleotide
uggcaagugucuggaucug

SEQ ID NO: 1543637 - RNA, 19 nt, Artificial Sequence
  Description of Artificial Sequence: Synthetic oligonucleotide
cugaccuguucugaaggca

SEQ ID NO: 1543638 - RNA, 19 nt, Artificial Sequence
  Description of Artificial Sequence: Synthetic oligonucleotide
gccagcgugaaguaguacu

SEQ ID NO: 1543639 - RNA, 19 nt, Artificial Sequence
  Description of Artificial Sequence: Synthetic oligonucleotide
ucugcccaucggagggcug

SEQ ID NO: 1543640 - RNA, 19 nt, Artificial Sequence
  Description of Artificial Sequence: Synthetic oligonucleotide
agccagcgugaaguaguac

SEQ ID NO: 1543641 - RNA, 19 nt, Artificial Sequence
  Description of Artificial Sequence: Synthetic oligonucleotide
cacgacuugggugccugac

SEQ ID NO: 1543642 - RNA, 19 nt, Artificial Sequence
  Description of Artificial Sequence: Synthetic oligonucleotide
acgggcugccccuuagcaa

SEQ ID NO: 1543643 - RNA, 19 nt, Artificial Sequence
  Description of Artificial Sequence: Synthetic oligonucleotide
uugguguccuggccuuguc

SEQ ID NO: 1543644 - RNA, 19 nt, Artificial Sequence
  Description of Artificial Sequence: Synthetic oligonucleotide
uggcgggaagggucugacc

SEQ ID NO: 1543645 - RNA, 19 nt, Artificial Sequence
  Description of Artificial Sequence: Synthetic oligonucleotide
agggucugaccuguucuga

SEQ ID NO: 1543646 - RNA, 19 nt, Artificial Sequence
  Description of Artificial Sequence: Synthetic oligonucleotide
cucucuguggggcaugagu

SEQ ID NO: 1543647 - RNA, 19 nt, Artificial Sequence
  Description of Artificial Sequence: Synthetic oligonucleotide
cuggcguaccuccuccuga

SEQ ID NO: 1543648 - RNA, 19 nt, Artificial Sequence
  Description of Artificial Sequence: Synthetic oligonucleotide
caucggagggcugguuggc

SEQ ID NO: 1543649 - RNA, 19 nt, Artificial Sequence
  Description of Artificial Sequence: Synthetic oligonucleotide
ggagucacagacuggcgua

SEQ ID NO: 1543650 - RNA, 19 nt, Artificial Sequence
  Description of Artificial Sequence: Synthetic oligonucleotide
gcagcuggccggcauucag

SEQ ID NO: 1543651 - RNA, 19 nt, Artificial Sequence
  Description of Artificial Sequence: Synthetic oligonucleotide
gggugugucccaucaccug

SEQ ID NO: 1543652 - RNA, 19 nt, Artificial Sequence
  Description of Artificial Sequence: Synthetic oligonucleotide
agaggaacgcuggcgggaa

SEQ ID NO: 1543653 - RNA, 19 nt, Artificial Sequence
  Description of Artificial Sequence: Synthetic oligonucleotide
gccggcauucagcugcacc

SEQ ID NO: 1543654 - RNA, 19 nt, Artificial Sequence
  Description of Artificial Sequence: Synthetic oligonucleotide
gugaucuguugggcauugg

SEQ ID NO: 1543655 - RNA, 19 nt, Artificial Sequence
  Description of Artificial Sequence: Synthetic oligonucleotide
ugguggucugcuggccuug

SEQ ID NO: 1543656 - RNA, 19 nt, Artificial Sequence
  Description of Artificial Sequence: Synthetic oligonucleotide
uggggcucuauggcaaaua

SEQ ID NO: 1543657 - RNA, 19 nt, Artificial Sequence
  Description of Artificial Sequence: Synthetic oligonucleotide
cacgggcugccccuuagca

SEQ ID NO: 1543658 - RNA, 19 nt, Artificial Sequence
  Description of Artificial Sequence: Synthetic oligonucleotide
uggccggcauucagcugca

SEQ ID NO: 1543659 - RNA, 19 nt, Artificial Sequence
  Description of Artificial Sequence: Synthetic oligonucleotide
guuugacccugaggcuggg

SEQ ID NO: 1543660 - RNA, 19 nt, Artificial Sequence
  Description of Artificial Sequence: Synthetic oligonucleotide
ccaguaucuuagccugcgg

SEQ ID NO: 1543661 - RNA, 19 nt, Artificial Sequence
  Description of Artificial Sequence: Synthetic oligonucleotide
ggaaaguagugcaccagua

SEQ ID NO: 1543662 - RNA, 19 nt, Artificial Sequence
  Description of Artificial Sequence: Synthetic oligonucleotide
ccucuggugagggagggug

SEQ ID NO: 1543663 - RNA, 19 nt, Artificial Sequence
  Description of Artificial Sequence: Synthetic oligonucleotide
ucucucccguguuggugau

SEQ ID NO: 1543664 - RNA, 19 nt, Artificial Sequence
  Description of Artificial Sequence: Synthetic oligonucleotide
gaccuggacagcaguaggu

SEQ ID NO: 1543665 - RNA, 19 nt, Artificial Sequence
  Description of Artificial Sequence: Synthetic oligonucleotide
ccaagccaggaaacaaauc

SEQ ID NO: 1543666 - RNA, 19 nt, Artificial Sequence
  Description of Artificial Sequence: Synthetic oligonucleotide
gcacaauucuuuaauguau

SEQ ID NO: 1543667 - RNA, 19 nt, Artificial Sequence
  Description of Artificial Sequence: Synthetic oligonucleotide
cugacgcuuuggagguuuc

SEQ ID NO: 1543668 - RNA, 19 nt, Artificial Sequence
  Description of Artificial Sequence: Synthetic oligonucleotide
ggaugguagucguggaacu

SEQ ID NO: 1543669 - RNA, 19 nt, Artificial Sequence
  Description of Artificial Sequence: Synthetic oligonucleotide
acagacuggcguaccuccu

SEQ ID NO: 1543670 - RNA, 19 nt, Artificial Sequence
  Description of Artificial Sequence: Synthetic oligonucleotide
ggcguaccuccuccugacg

SEQ ID NO: 1543671 - RNA, 19 nt, Artificial Sequence
  Description of Artificial Sequence: Synthetic oligonucleotide
cuggcgggaagggucugac

SEQ ID NO: 1543672 - RNA, 19 nt, Artificial Sequence
  Description of Artificial Sequence: Synthetic oligonucleotide
ccccuuagcaauggcagug

SEQ ID NO: 1543673 - RNA, 19 nt, Artificial Sequence
  Description of Artificial Sequence: Synthetic oligonucleotide
ucuuagccugcgggaggca

SEQ ID NO: 1543674 - RNA, 19 nt, Artificial Sequence
  Description of Artificial Sequence: Synthetic oligonucleotide
gcgugaaguaguacuggac

SEQ ID NO: 1543675 - RNA, 19 nt, Artificial Sequence
  Description of Artificial Sequence: Synthetic oligonucleotide
ccucaaccacguuucaaga

SEQ ID NO: 1543676 - RNA, 19 nt, Artificial Sequence
  Description of Artificial Sequence: Synthetic oligonucleotide
aucggagggcugguuggcu

SEQ ID NO: 1543677 - RNA, 19 nt, Artificial Sequence
  Description of Artificial Sequence: Synthetic oligonucleotide
caggcuggaugguagucgu

SEQ ID NO: 1543678 - RNA, 19 nt, Artificial Sequence
  Description of Artificial Sequence: Synthetic oligonucleotide
uugucaggucaggcccuca

SEQ ID NO: 1543679 - RNA, 19 nt, Artificial Sequence
  Description of Artificial Sequence: Synthetic oligonucleotide
agcucucuguggggcauga

SEQ ID NO: 1543680 - RNA, 19 nt, Artificial Sequence
  Description of Artificial Sequence: Synthetic oligonucleotide
gguagucguggaacuggug

SEQ ID NO: 1543681 - RNA, 19 nt, Artificial Sequence
  Description of Artificial Sequence: Synthetic oligonucleotide
ggcugggcgaggucuuggc

SEQ ID NO: 1543682 - RNA, 19 nt, Artificial Sequence
  Description of Artificial Sequence: Synthetic oligonucleotide
uaccuccuccugacgcuuu

SEQ ID NO: 1543683 - RNA, 19 nt, Artificial Sequence
  Description of Artificial Sequence: Synthetic oligonucleotide
ugacccugcugaggcugug

SEQ ID NO: 1543684 - RNA, 19 nt, Artificial Sequence
  Description of Artificial Sequence: Synthetic oligonucleotide
gucaccgguguggucugac

SEQ ID NO: 1543685 - RNA, 19 nt, Artificial Sequence
  Description of Artificial Sequence: Synthetic oligonucleotide
caccgggaucugcuggauc

SEQ ID NO: 1543686 - RNA, 19 nt, Artificial Sequence
  Description of Artificial Sequence: Synthetic oligonucleotide
gcgggaagggucugaccug

SEQ ID NO: 1543687 - RNA, 19 nt, Artificial Sequence
  Description of Artificial Sequence: Synthetic oligonucleotide
cggauauacugcagcuggc

SEQ ID NO: 1543688 - RNA, 19 nt, Artificial Sequence
  Description of Artificial Sequence: Synthetic oligonucleotide
gcaacggagaugagcacaa

SEQ ID NO: 1543689 - RNA, 19 nt, Artificial Sequence
  Description of Artificial Sequence: Synthetic oligonucleotide
gugaacuggcugaacugcu

SEQ ID NO: 1543690 - RNA, 19 nt, Artificial Sequence
  Description of Artificial Sequence: Synthetic oligonucleotide
guccuuguuggaccucugu

SEQ ID NO: 1543691 - RNA, 19 nt, Artificial Sequence
  Description of Artificial Sequence: Synthetic oligonucleotide
ggagggugugucccaucac

SEQ ID NO: 1543692 - RNA, 19 nt, Artificial Sequence
  Description of Artificial Sequence: Synthetic oligonucleotide
uccuugggucuuggagaga

SEQ ID NO: 1543693 - RNA, 19 nt, Artificial Sequence
  Description of Artificial Sequence: Synthetic oligonucleotide
cucaacguccuagucuccu

SEQ ID NO: 1543694 - RNA, 19 nt, Artificial Sequence
  Description of Artificial Sequence: Synthetic oligonucleotide
gucccugcacgacuugggu

SEQ ID NO: 1543695 - RNA, 19 nt, Artificial Sequence
  Description of Artificial Sequence: Synthetic oligonucleotide
ccuggccuugucaggucag

SEQ ID NO: 1543696 - RNA, 19 nt, Artificial Sequence
  Description of Artificial Sequence: Synthetic oligonucleotide
ccugacacaggcugggcua

SEQ ID NO: 1543697 - RNA, 19 nt, Artificial Sequence
  Description of Artificial Sequence: Synthetic oligonucleotide
guccuggccuugucagguc

SEQ ID NO: 1543698 - RNA, 19 nt, Artificial Sequence
  Description of Artificial Sequence: Synthetic oligonucleotide
ggggcucuauggcaaauau

SEQ ID NO: 1543699 - RNA, 19 nt, Artificial Sequence
  Description of Artificial Sequence: Synthetic oligonucleotide
ccugcauugucaccggugu

SEQ ID NO: 1543700 - RNA, 19 nt, Artificial Sequence
  Description of Artificial Sequence: Synthetic oligonucleotide
ugucaccgguguggucuga

SEQ ID NO: 1543701 - RNA, 19 nt, Artificial Sequence
  Description of Artificial Sequence: Synthetic oligonucleotide
ugcccaucggagggcuggu

SEQ ID NO: 1543702 - RNA, 19 nt, Artificial Sequence
  Description of Artificial Sequence: Synthetic oligonucleotide
gcacaacguccucaacguc

SEQ ID NO: 1543703 - RNA, 19 nt, Artificial Sequence
  Description of Artificial Sequence: Synthetic oligonucleotide
ccucaacguccuagucucc

SEQ ID NO: 1543704 - RNA, 19 nt, Artificial Sequence
  Description of Artificial Sequence: Synthetic oligonucleotide
gaccugcauugucaccggu

SEQ ID NO: 1543705 - RNA, 19 nt, Artificial Sequence
  Description of Artificial Sequence: Synthetic oligonucleotide
guuggaccucugucugugu

SEQ ID NO: 1543706 - RNA, 19 nt, Artificial Sequence
  Description of Artificial Sequence: Synthetic oligonucleotide
aggcuggaugguagucgug

SEQ ID NO: 1543707 - RNA, 19 nt, Artificial Sequence
  Description of Artificial Sequence: Synthetic oligonucleotide
cgaccugcauugucaccgg

SEQ ID NO: 1543708 - RNA, 19 nt, Artificial Sequence
  Description of Artificial Sequence: Synthetic oligonucleotide
gcauuucaugcaguuugaa

SEQ ID NO: 1543709 - RNA, 19 nt, Artificial Sequence
  Description of Artificial Sequence: Synthetic oligonucleotide
cguggaacugguggucugc

SEQ ID NO: 1543710 - RNA, 19 nt, Artificial Sequence
  Description of Artificial Sequence: Synthetic oligonucleotide
ggucugcccaucggagggc

SEQ ID NO: 1543711 - RNA, 19 nt, Artificial Sequence
  Description of Artificial Sequence: Synthetic oligonucleotide
gaggcugggccuguacaau

SEQ ID NO: 1543712 - RNA, 19 nt, Artificial Sequence
  Description of Artificial Sequence: Synthetic oligonucleotide
ccacgguuucuggaugcag

SEQ ID NO: 1543713 - RNA, 19 nt, Artificial Sequence
  Description of Artificial Sequence: Synthetic oligonucleotide
caguccccagguguggaaa

SEQ ID NO: 1543714 - RNA, 19 nt, Artificial Sequence
  Description of Artificial Sequence: Synthetic oligonucleotide
gcccaagccaggaaacaaa

SEQ ID NO: 1543715 - RNA, 19 nt, Artificial Sequence
  Description of Artificial Sequence: Synthetic oligonucleotide
gaacgcuggcgggaagggu

SEQ ID NO: 1543716 - RNA, 19 nt, Artificial Sequence
  Description of Artificial Sequence: Synthetic oligonucleotide
gcgaggucuuggccugcag

SEQ ID NO: 1543717 - RNA, 19 nt, Artificial Sequence
  Description of Artificial Sequence: Synthetic oligonucleotide
ccggguccucuggugaggg

SEQ ID NO: 1543718 - RNA, 19 nt, Artificial Sequence
  Description of Artificial Sequence: Synthetic oligonucleotide
cucucccguguuggugaug

SEQ ID NO: 1543719 - RNA, 19 nt, Artificial Sequence
  Description of Artificial Sequence: Synthetic oligonucleotide
ggacagcaguagguugcug

SEQ ID NO: 1543720 - RNA, 19 nt, Artificial Sequence
  Description of Artificial Sequence: Synthetic oligonucleotide
gcaugaguucauggcccac

SEQ ID NO: 1543721 - RNA, 19 nt, Artificial Sequence
  Description of Artificial Sequence: Synthetic oligonucleotide
cuuagccugcgggaggcau

SEQ ID NO: 1543722 - RNA, 19 nt, Artificial Sequence
  Description of Artificial Sequence: Synthetic oligonucleotide
cucuuggaacaaugucgau

SEQ ID NO: 1543723 - RNA, 19 nt, Artificial Sequence
  Description of Artificial Sequence: Synthetic oligonucleotide
gccugcgggaggcauugaa

SEQ ID NO: 1543724 - RNA, 19 nt, Artificial Sequence
  Description of Artificial Sequence: Synthetic oligonucleotide
ggaucucucccguguuggu

SEQ ID NO: 1543725 - RNA, 19 nt, Artificial Sequence
  Description of Artificial Sequence: Synthetic oligonucleotide
gggaggcauugaagucccg

SEQ ID NO: 1543726 - RNA, 19 nt, Artificial Sequence
  Description of Artificial Sequence: Synthetic oligonucleotide
ccacaggcaaggaauguuu

SEQ ID NO: 1543727 - RNA, 19 nt, Artificial Sequence
  Description of Artificial Sequence: Synthetic oligonucleotide
ccugcacgacuugggugcc

SEQ ID NO: 1543728 - RNA, 19 nt, Artificial Sequence
  Description of Artificial Sequence: Synthetic oligonucleotide
ccgguguggucugacccug

SEQ ID NO: 1543729 - RNA, 19 nt, Artificial Sequence
  Description of Artificial Sequence: Synthetic oligonucleotide
uccugacgcuuuggagguu

SEQ ID NO: 1543730 - RNA, 19 nt, Artificial Sequence
  Description of Artificial Sequence: Synthetic oligonucleotide
cccggguccucuggugagg

SEQ ID NO: 1543731 - RNA, 19 nt, Artificial Sequence
  Description of Artificial Sequence: Synthetic oligonucleotide
guggucugcuggccuugcu

SEQ ID NO: 1543732 - RNA, 19 nt, Artificial Sequence
  Description of Artificial Sequence: Synthetic oligonucleotide
gagcacgggcugccccuua

SEQ ID NO: 1543733 - RNA, 19 nt, Artificial Sequence
  Description of Artificial Sequence: Synthetic oligonucleotide
ggcaagugucuggaucugu

SEQ ID NO: 1543734 - RNA, 19 nt, Artificial Sequence
  Description of Artificial Sequence: Synthetic oligonucleotide
gcucucuguggggcaugag

SEQ ID NO: 1543735 - RNA, 19 nt, Artificial Sequence
  Description of Artificial Sequence: Synthetic oligonucleotide
gccccuuagcaauggcagu

SEQ ID NO: 1543736 - RNA, 19 nt, Artificial Sequence
  Description of Artificial Sequence: Synthetic oligonucleotide
cgcuuuggagguuucaguu

SEQ ID NO: 1543737 - RNA, 19 nt, Artificial Sequence
  Description of Artificial Sequence: Synthetic oligonucleotide
cuggugagggagggugugu

SEQ ID NO: 1543738 - RNA, 19 nt, Artificial Sequence
  Description of Artificial Sequence: Synthetic oligonucleotide
gcuguccuuguuggaccuc

SEQ ID NO: 1543739 - RNA, 19 nt, Artificial Sequence
  Description of Artificial Sequence: Synthetic oligonucleotide
ggcgaggucuuggccugca

SEQ ID NO: 1543740 - RNA, 19 nt, Artificial Sequence
  Description of Artificial Sequence: Synthetic oligonucleotide
gcuggcgggaagggucuga

SEQ ID NO: 1543741 - RNA, 19 nt, Artificial Sequence
  Description of Artificial Sequence: Synthetic oligonucleotide
cguccuagucuccuugggu

SEQ ID NO: 1543742 - RNA, 19 nt, Artificial Sequence
  Description of Artificial Sequence: Synthetic oligonucleotide
cguaccuccuccugacgcu

SEQ ID NO: 1543743 - RNA, 19 nt, Artificial Sequence
  Description of Artificial Sequence: Synthetic oligonucleotide
caacguccucaacguccua

SEQ ID NO: 1543744 - RNA, 19 nt, Artificial Sequence
  Description of Artificial Sequence: Synthetic oligonucleotide
gggcucuauggcaaauauu

SEQ ID NO: 1543745 - RNA, 19 nt, Artificial Sequence
  Description of Artificial Sequence: Synthetic oligonucleotide
gcugggcuaagcggauaua

SEQ ID NO: 1543746 - RNA, 19 nt, Artificial Sequence
  Description of Artificial Sequence: Synthetic oligonucleotide
cuucuccgaccugcauugu

SEQ ID NO: 1543747 - RNA, 19 nt, Artificial Sequence
  Description of Artificial Sequence: Synthetic oligonucleotide
gggcgaggucuuggccugc

SEQ ID NO: 1543748 - RNA, 19 nt, Artificial Sequence
  Description of Artificial Sequence: Synthetic oligonucleotide
caacggagaugagcacaau

SEQ ID NO: 1543749 - RNA, 19 nt, Artificial Sequence
  Description of Artificial Sequence: Synthetic oligonucleotide
cuuggccugcaggcauggu

SEQ ID NO: 1543750 - RNA, 19 nt, Artificial Sequence
  Description of Artificial Sequence: Synthetic oligonucleotide
cccacaggcaaggaauguu

SEQ ID NO: 1543751 - RNA, 19 nt, Artificial Sequence
  Description of Artificial Sequence: Synthetic oligonucleotide
ccugacgcuuuggagguuu

SEQ ID NO: 1543752 - RNA, 19 nt, Artificial Sequence
  Description of Artificial Sequence: Synthetic oligonucleotide
cugcacgacuugggugccu

SEQ ID NO: 1543753 - RNA, 19 nt, Artificial Sequence
  Description of Artificial Sequence: Synthetic oligonucleotide
cucccguguuggugaugau

SEQ ID NO: 1543754 - RNA, 19 nt, Artificial Sequence
  Description of Artificial Sequence: Synthetic oligonucleotide
ggccggcauucagcugcac

SEQ ID NO: 1543755 - RNA, 19 nt, Artificial Sequence
  Description of Artificial Sequence: Synthetic oligonucleotide
cgggaagggucugaccugu

SEQ ID NO: 1543756 - RNA, 19 nt, Artificial Sequence
  Description of Artificial Sequence: Synthetic oligonucleotide
ccuagucuccuugggucuu

SEQ ID NO: 1543757 - RNA, 19 nt, Artificial Sequence
  Description of Artificial Sequence: Synthetic oligonucleotide
cgggaucugcuggaucucu

SEQ ID NO: 1543758 - RNA, 19 nt, Artificial Sequence
  Description of Artificial Sequence: Synthetic oligonucleotide
aaaauuaugucacaaguag

SEQ ID NO: 1543759 - RNA, 19 nt, Artificial Sequence
  Description of Artificial Sequence: Synthetic oligonucleotide
aauuaugucacaaguagcc

SEQ ID NO: 1543760 - RNA, 19 nt, Artificial Sequence
  Description of Artificial Sequence: Synthetic oligonucleotide
aaucccaccaaauauauug

SEQ ID NO: 1543761 - RNA, 19 nt, Artificial Sequence
  Description of Artificial Sequence: Synthetic oligonucleotide
aauauauugacgaggaugg

SEQ ID NO: 1543762 - RNA, 19 nt, Artificial Sequence
  Description of Artificial Sequence: Synthetic oligonucleotide
uuuuguuaaaugaacaccu

SEQ ID NO: 1543763 - RNA, 19 nt, Artificial Sequence
  Description of Artificial Sequence: Synthetic oligonucleotide
aauguucccgucuaguccg

SEQ ID NO: 1543764 - RNA, 19 nt, Artificial Sequence
  Description of Artificial Sequence: Synthetic oligonucleotide
accuuguuaacuuuuacac

SEQ ID NO: 1543765 - RNA, 19 nt, Artificial Sequence
  Description of Artificial Sequence: Synthetic oligonucleotide
ugauuugucguccauagca

SEQ ID NO: 1543766 - RNA, 19 nt, Artificial Sequence
  Description of Artificial Sequence: Synthetic oligonucleotide
uuugcauucagucucuuug

SEQ ID NO: 1543767 - RNA, 19 nt, Artificial Sequence
  Description of Artificial Sequence: Synthetic oligonucleotide
aaagaugaguucuggauug

SEQ ID NO: 1543768 - RNA, 19 nt, Artificial Sequence
  Description of Artificial Sequence: Synthetic oligonucleotide
cuuuacaccaccuccaagg

SEQ ID NO: 1543769 - RNA, 19 nt, Artificial Sequence
  Description of Artificial Sequence: Synthetic oligonucleotide
uuucaagccacuaucgaag

SEQ ID NO: 1543770 - RNA, 19 nt, Artificial Sequence
  Description of Artificial Sequence: Synthetic oligonucleotide
auaaccaaucaucuguugg

SEQ ID NO: 1543771 - RNA, 19 nt, Artificial Sequence
  Description of Artificial Sequence: Synthetic oligonucleotide
ugauccuuguguaugaccc

SEQ ID NO: 1543772 - RNA, 19 nt, Artificial Sequence
  Description of Artificial Sequence: Synthetic oligonucleotide
uuguguaugacccuuuccc

SEQ ID NO: 1543773 - RNA, 19 nt, Artificial Sequence
  Description of Artificial Sequence: Synthetic oligonucleotide
uaaccaaucaucuguuggg

SEQ ID NO: 1543774 - RNA, 19 nt, Artificial Sequence
  Description of Artificial Sequence: Synthetic oligonucleotide
ucguccauagcaaauaugu

SEQ ID NO: 1543775 - RNA, 19 nt, Artificial Sequence
  Description of Artificial Sequence: Synthetic oligonucleotide
augugaucaguuugaaugc

SEQ ID NO: 1543776 - RNA, 19 nt, Artificial Sequence
  Description of Artificial Sequence: Synthetic oligonucleotide
aucaacgccgcccugaggg

SEQ ID NO: 1543777 - RNA, 19 nt, Artificial Sequence
  Description of Artificial Sequence: Synthetic oligonucleotide
ucugauuugucguccauag

SEQ ID NO: 1543778 - RNA, 19 nt, Artificial Sequence
  Description of Artificial Sequence: Synthetic oligonucleotide
uuguuaaaugaacaccucc

SEQ ID NO: 1543779 - RNA, 19 nt, Artificial Sequence
  Description of Artificial Sequence: Synthetic oligonucleotide
uugacuacaguguaaaauc

SEQ ID NO: 1543780 - RNA, 19 nt, Artificial Sequence
  Description of Artificial Sequence: Synthetic oligonucleotide
aucacaucacuucuuugcc

SEQ ID NO: 1543781 - RNA, 19 nt, Artificial Sequence
  Description of Artificial Sequence: Synthetic oligonucleotide
uuuuaaaggcccgaggaag

SEQ ID NO: 1543782 - RNA, 19 nt, Artificial Sequence
  Description of Artificial Sequence: Synthetic oligonucleotide
aagccggacuacuaguggc

SEQ ID NO: 1543783 - RNA, 19 nt, Artificial Sequence
  Description of Artificial Sequence: Synthetic oligonucleotide
uuggaguuugcuuuguugc

SEQ ID NO: 1543784 - RNA, 19 nt, Artificial Sequence
  Description of Artificial Sequence: Synthetic oligonucleotide
uuuguugccagauuauaac

SEQ ID NO: 1543785 - RNA, 19 nt, Artificial Sequence
  Description of Artificial Sequence: Synthetic oligonucleotide
ucuucaauaucaacgccgc

SEQ ID NO: 1543786 - RNA, 19 nt, Artificial Sequence
  Description of Artificial Sequence: Synthetic oligonucleotide
ucucuagaaauguccaggg

SEQ ID NO: 1543787 - RNA, 19 nt, Artificial Sequence
  Description of Artificial Sequence: Synthetic oligonucleotide
cuuuuguuaaaugaacacc

SEQ ID NO: 1543788 - RNA, 19 nt, Artificial Sequence
  Description of Artificial Sequence: Synthetic oligonucleotide
uucaauaucaacgccgccc

SEQ ID NO: 1543789 - RNA, 19 nt, Artificial Sequence
  Description of Artificial Sequence: Synthetic oligonucleotide
acuaguggcaccuugaguu

SEQ ID NO: 1543790 - RNA, 19 nt, Artificial Sequence
  Description of Artificial Sequence: Synthetic oligonucleotide
gauagcgcauuugagaaag

SEQ ID NO: 1543791 - RNA, 19 nt, Artificial Sequence
  Description of Artificial Sequence: Synthetic oligonucleotide
uucucuagaaauguccagg

SEQ ID NO: 1543792 - RNA, 19 nt, Artificial Sequence
  Description of Artificial Sequence: Synthetic oligonucleotide
uuuaaaggcccgaggaagc

SEQ ID NO: 1543793 - RNA, 19 nt, Artificial Sequence
  Description of Artificial Sequence: Synthetic oligonucleotide
uugagaucguaccuggcag

SEQ ID NO: 1543794 - RNA, 19 nt, Artificial Sequence
  Description of Artificial Sequence: Synthetic oligonucleotide
gauuauaaccaaucaucug

SEQ ID NO: 1543795 - RNA, 19 nt, Artificial Sequence
  Description of Artificial Sequence: Synthetic oligonucleotide
uccuuucaagccacuaucg

SEQ ID NO: 1543796 - RNA, 19 nt, Artificial Sequence
  Description of Artificial Sequence: Synthetic oligonucleotide
uguugccagauuauaacca

SEQ ID NO: 1543797 - RNA, 19 nt, Artificial Sequence
  Description of Artificial Sequence: Synthetic oligonucleotide
aauguccagggcuucagca

SEQ ID NO: 1543798 - RNA, 19 nt, Artificial Sequence
  Description of Artificial Sequence: Synthetic oligonucleotide
uuuacaccuucuuuuggag

SEQ ID NO: 1543799 - RNA, 19 nt, Artificial Sequence
  Description of Artificial Sequence: Synthetic oligonucleotide
aguucuaacucccggcagg

SEQ ID NO: 1543800 - RNA, 19 nt, Artificial Sequence
  Description of Artificial Sequence: Synthetic oligonucleotide
augauccuuguguaugacc

SEQ ID NO: 1543801 - RNA, 19 nt, Artificial Sequence
  Description of Artificial Sequence: Synthetic oligonucleotide
uaaagaugaguucuggauu

SEQ ID NO: 1543802 - RNA, 19 nt, Artificial Sequence
  Description of Artificial Sequence: Synthetic oligonucleotide
ugucccaccacuuuagggu

SEQ ID NO: 1543803 - RNA, 19 nt, Artificial Sequence
  Description of Artificial Sequence: Synthetic oligonucleotide
ucaauaucaacgccgcccu

SEQ ID NO: 1543804 - RNA, 19 nt, Artificial Sequence
  Description of Artificial Sequence: Synthetic oligonucleotide
aaguuagcuggcuucccuc

SEQ ID NO: 1543805 - RNA, 19 nt, Artificial Sequence
  Description of Artificial Sequence: Synthetic oligonucleotide
acaguugacaaucccacca

SEQ ID NO: 1543806 - RNA, 19 nt, Artificial Sequence
  Description of Artificial Sequence: Synthetic oligonucleotide
aaucuggucggcugccugg

SEQ ID NO: 1543807 - RNA, 19 nt, Artificial Sequence
  Description of Artificial Sequence: Synthetic oligonucleotide
ugcuccuuaaagaugaguu

SEQ ID NO: 1543808 - RNA, 19 nt, Artificial Sequence
  Description of Artificial Sequence: Synthetic oligonucleotide
uaucgaagacaccuuuucc

SEQ ID NO: 1543809 - RNA, 19 nt, Artificial Sequence
  Description of Artificial Sequence: Synthetic oligonucleotide
guuugaaugcuugauagac

SEQ ID NO: 1543810 - RNA, 19 nt, Artificial Sequence
  Description of Artificial Sequence: Synthetic oligonucleotide
aguccgauguacuugagau

SEQ ID NO: 1543811 - RNA, 19 nt, Artificial Sequence
  Description of Artificial Sequence: Synthetic oligonucleotide
uggauagcgcauuugagaa

SEQ ID NO: 1543812 - RNA, 19 nt, Artificial Sequence
  Description of Artificial Sequence: Synthetic oligonucleotide
agacaacuuguccuucugc

SEQ ID NO: 1543813 - RNA, 19 nt, Artificial Sequence
  Description of Artificial Sequence: Synthetic oligonucleotide
ugacuacaguguaaaauca

SEQ ID NO: 1543814 - RNA, 19 nt, Artificial Sequence
  Description of Artificial Sequence: Synthetic oligonucleotide
ucuaguccgauguacuuga

SEQ ID NO: 1543815 - RNA, 19 nt, Artificial Sequence
  Description of Artificial Sequence: Synthetic oligonucleotide
aucgaagacaccuuuuccu

SEQ ID NO: 1543816 - RNA, 19 nt, Artificial Sequence
  Description of Artificial Sequence: Synthetic oligonucleotide
gaagugcccuucuucacgg

SEQ ID NO: 1543817 - RNA, 19 nt, Artificial Sequence
  Description of Artificial Sequence: Synthetic oligonucleotide
agaauggccaaguagguuu

SEQ ID NO: 1543818 - RNA, 19 nt, Artificial Sequence
  Description of Artificial Sequence: Synthetic oligonucleotide
accaaucaucuguugggcc

SEQ ID NO: 1543819 - RNA, 19 nt, Artificial Sequence
  Description of Artificial Sequence: Synthetic oligonucleotide
ugaguucuaacucccggca

SEQ ID NO: 1543820 - RNA, 19 nt, Artificial Sequence
  Description of Artificial Sequence: Synthetic oligonucleotide
cuugaguucuaacucccgg

SEQ ID NO: 1543821 - RNA, 19 nt, Artificial Sequence
  Description of Artificial Sequence: Synthetic oligonucleotide
ucggaacucagcauuguca

SEQ ID NO: 1543822 - RNA, 19 nt, Artificial Sequence
  Description of Artificial Sequence: Synthetic oligonucleotide
gucgcaucaaucuucagga

SEQ ID NO: 1543823 - RNA, 19 nt, Artificial Sequence
  Description of Artificial Sequence: Synthetic oligonucleotide
gaagagaugauacagcuuu

SEQ ID NO: 1543824 - RNA, 19 nt, Artificial Sequence
  Description of Artificial Sequence: Synthetic oligonucleotide
caucagaauggccaaguag

SEQ ID NO: 1543825 - RNA, 19 nt, Artificial Sequence
  Description of Artificial Sequence: Synthetic oligonucleotide
aagccacuaucgaagacac

SEQ ID NO: 1543826 - RNA, 19 nt, Artificial Sequence
  Description of Artificial Sequence: Synthetic oligonucleotide
cagauuuucugccauccgc

SEQ ID NO: 1543827 - RNA, 19 nt, Artificial Sequence
  Description of Artificial Sequence: Synthetic oligonucleotide
aaaguuuaucuuggcauca

SEQ ID NO: 1543828 - RNA, 19 nt, Artificial Sequence
  Description of Artificial Sequence: Synthetic oligonucleotide
aaguucagacuuaagauuu

SEQ ID NO: 1543829 - RNA, 19 nt, Artificial Sequence
  Description of Artificial Sequence: Synthetic oligonucleotide
aauaucaacgccgcccuga

SEQ ID NO: 1543830 - RNA, 19 nt, Artificial Sequence
  Description of Artificial Sequence: Synthetic oligonucleotide
uuacuuaauugacuacagu

SEQ ID NO: 1543831 - RNA, 19 nt, Artificial Sequence
  Description of Artificial Sequence: Synthetic oligonucleotide
caauguucccgucuagucc

SEQ ID NO: 1543832 - RNA, 19 nt, Artificial Sequence
  Description of Artificial Sequence: Synthetic oligonucleotide
uuuguuaaaugaacaccuc

SEQ ID NO: 1543833 - RNA, 19 nt, Artificial Sequence
  Description of Artificial Sequence: Synthetic oligonucleotide
aaugggcucauucucugau

SEQ ID NO: 1543834 - RNA, 19 nt, Artificial Sequence
  Description of Artificial Sequence: Synthetic oligonucleotide
caaaguuuaucuuggcauc

SEQ ID NO: 1543835 - RNA, 19 nt, Artificial Sequence
  Description of Artificial Sequence: Synthetic oligonucleotide
aaugauccuuguguaugac

SEQ ID NO: 1543836 - RNA, 19 nt, Artificial Sequence
  Description of Artificial Sequence: Synthetic oligonucleotide
ucagacaaugauccuugug

SEQ ID NO: 1543837 - RNA, 19 nt, Artificial Sequence
  Description of Artificial Sequence: Synthetic oligonucleotide
uguguaugacccuuuccca

SEQ ID NO: 1543838 - RNA, 19 nt, Artificial Sequence
  Description of Artificial Sequence: Synthetic oligonucleotide
ucaagccggacuacuagug

SEQ ID NO: 1543839 - RNA, 19 nt, Artificial Sequence
  Description of Artificial Sequence: Synthetic oligonucleotide
uuuacaccaccuccaaggu

SEQ ID NO: 1543840 - RNA, 19 nt, Artificial Sequence
  Description of Artificial Sequence: Synthetic oligonucleotide
ugccagauuauaaccaauc

SEQ ID NO: 1543841 - RNA, 19 nt, Artificial Sequence
  Description of Artificial Sequence: Synthetic oligonucleotide
uauaaccaaucaucuguug

SEQ ID NO: 1543842 - RNA, 19 nt, Artificial Sequence
  Description of Artificial Sequence: Synthetic oligonucleotide
ugagucgcaucaaucuuca

SEQ ID NO: 1543843 - RNA, 19 nt, Artificial Sequence
  Description of Artificial Sequence: Synthetic oligonucleotide
acgaggauggcuuccaccu

SEQ ID NO: 1543844 - RNA, 19 nt, Artificial Sequence
  Description of Artificial Sequence: Synthetic oligonucleotide
cuugggaucagaugugauc

SEQ ID NO: 1543845 - RNA, 19 nt, Artificial Sequence
  Description of Artificial Sequence: Synthetic oligonucleotide
uucccgucuaguccgaugu

SEQ ID NO: 1543846 - RNA, 19 nt, Artificial Sequence
  Description of Artificial Sequence: Synthetic oligonucleotide
aaguagguuucucuagaaa

SEQ ID NO: 1543847 - RNA, 19 nt, Artificial Sequence
  Description of Artificial Sequence: Synthetic oligonucleotide
agauaacaauugcuuucac

SEQ ID NO: 1543848 - RNA, 19 nt, Artificial Sequence
  Description of Artificial Sequence: Synthetic oligonucleotide
gcaaugauggcacaguuga

SEQ ID NO: 1543849 - RNA, 19 nt, Artificial Sequence
  Description of Artificial Sequence: Synthetic oligonucleotide
gagauaacaauugcuuuca

SEQ ID NO: 1543850 - RNA, 19 nt, Artificial Sequence
  Description of Artificial Sequence: Synthetic oligonucleotide
uguaugacccuuucccagu

SEQ ID NO: 1543851 - RNA, 19 nt, Artificial Sequence
  Description of Artificial Sequence: Synthetic oligonucleotide
auugacgaggauggcuucc

SEQ ID NO: 1543852 - RNA, 19 nt, Artificial Sequence
  Description of Artificial Sequence: Synthetic oligonucleotide
caccuugaguucuaacucc

SEQ ID NO: 1543853 - RNA, 19 nt, Artificial Sequence
  Description of Artificial Sequence: Synthetic oligonucleotide
cuaucgaagacaccuuuuc

SEQ ID NO: 1543854 - RNA, 19 nt, Artificial Sequence
  Description of Artificial Sequence: Synthetic oligonucleotide
aaugaacaccuccuuucaa

SEQ ID NO: 1543855 - RNA, 19 nt, Artificial Sequence
  Description of Artificial Sequence: Synthetic oligonucleotide
guagguuucucuagaaaug

SEQ ID NO: 1543856 - RNA, 19 nt, Artificial Sequence
  Description of Artificial Sequence: Synthetic oligonucleotide
gaucguaccuggcagcuuc

SEQ ID NO: 1543857 - RNA, 19 nt, Artificial Sequence
  Description of Artificial Sequence: Synthetic oligonucleotide
ugugggaccgguccaucag

SEQ ID NO: 1543858 - RNA, 19 nt, Artificial Sequence
  Description of Artificial Sequence: Synthetic oligonucleotide
acgaagcaggcaauguucc

SEQ ID NO: 1543859 - RNA, 19 nt, Artificial Sequence
  Description of Artificial Sequence: Synthetic oligonucleotide
agucucaccaaagggguuc

SEQ ID NO: 1543860 - RNA, 19 nt, Artificial Sequence
  Description of Artificial Sequence: Synthetic oligonucleotide
guggauagcgcauuugaga

SEQ ID NO: 1543861 - RNA, 19 nt, Artificial Sequence
  Description of Artificial Sequence: Synthetic oligonucleotide
ugagaucguaccuggcagc

SEQ ID NO: 1543862 - RNA, 19 nt, Artificial Sequence
  Description of Artificial Sequence: Synthetic oligonucleotide
ucgaagacaccuuuuccuc

SEQ ID NO: 1543863 - RNA, 19 nt, Artificial Sequence
  Description of Artificial Sequence: Synthetic oligonucleotide
ugcccacuaucacagggcc

SEQ ID NO: 1543864 - RNA, 19 nt, Artificial Sequence
  Description of Artificial Sequence: Synthetic oligonucleotide
ugugauagggaggccacug

SEQ ID NO: 1543865 - RNA, 19 nt, Artificial Sequence
  Description of Artificial Sequence: Synthetic oligonucleotide
cacgaagcaggcaauguuc

SEQ ID NO: 1543866 - RNA, 19 nt, Artificial Sequence
  Description of Artificial Sequence: Synthetic oligonucleotide
aagaugaguucuggauugg

SEQ ID NO: 1543867 - RNA, 19 nt, Artificial Sequence
  Description of Artificial Sequence: Synthetic oligonucleotide
cuuguguaugacccuuucc

SEQ ID NO: 1543868 - RNA, 19 nt, Artificial Sequence
  Description of Artificial Sequence: Synthetic oligonucleotide
agcgcauuugagaaaguuc

SEQ ID NO: 1543869 - RNA, 19 nt, Artificial Sequence
  Description of Artificial Sequence: Synthetic oligonucleotide
uucaagccacuaucgaaga

SEQ ID NO: 1543870 - RNA, 19 nt, Artificial Sequence
  Description of Artificial Sequence: Synthetic oligonucleotide
uuuaaucuggucggcugcc

SEQ ID NO: 1543871 - RNA, 19 nt, Artificial Sequence
  Description of Artificial Sequence: Synthetic oligonucleotide
ucuaacucccggcaggcuu

SEQ ID NO: 1543872 - RNA, 19 nt, Artificial Sequence
  Description of Artificial Sequence: Synthetic oligonucleotide
cuggauuggaagcugccac

SEQ ID NO: 1543873 - RNA, 19 nt, Artificial Sequence
  Description of Artificial Sequence: Synthetic oligonucleotide
auauauugacgaggauggc

SEQ ID NO: 1543874 - RNA, 19 nt, Artificial Sequence
  Description of Artificial Sequence: Synthetic oligonucleotide
aagcaggcaauguucccgu

SEQ ID NO: 1543875 - RNA, 19 nt, Artificial Sequence
  Description of Artificial Sequence: Synthetic oligonucleotide
ucacaucacuucuuugcca

SEQ ID NO: 1543876 - RNA, 19 nt, Artificial Sequence
  Description of Artificial Sequence: Synthetic oligonucleotide
caccaaauauauugacgag

SEQ ID NO: 1543877 - RNA, 19 nt, Artificial Sequence
  Description of Artificial Sequence: Synthetic oligonucleotide
uucaagccggacuacuagu

SEQ ID NO: 1543878 - RNA, 19 nt, Artificial Sequence
  Description of Artificial Sequence: Synthetic oligonucleotide
cugagucgcaucaaucuuc

SEQ ID NO: 1543879 - RNA, 19 nt, Artificial Sequence
  Description of Artificial Sequence: Synthetic oligonucleotide
uccuuuugucggaacucag

SEQ ID NO: 1543880 - RNA, 19 nt, Artificial Sequence
  Description of Artificial Sequence: Synthetic oligonucleotide
cugucccaccacuuuaggg

SEQ ID NO: 1543881 - RNA, 19 nt, Artificial Sequence
  Description of Artificial Sequence: Synthetic oligonucleotide
cagacaaugauccuugugu

SEQ ID NO: 1543882 - RNA, 19 nt, Artificial Sequence
  Description of Artificial Sequence: Synthetic oligonucleotide
auaucaacgccgcccugag

SEQ ID NO: 1543883 - RNA, 19 nt, Artificial Sequence
  Description of Artificial Sequence: Synthetic oligonucleotide
gaguucuaacucccggcag

SEQ ID NO: 1543884 - RNA, 19 nt, Artificial Sequence
  Description of Artificial Sequence: Synthetic oligonucleotide
uuaaaggcccgaggaagcc

SEQ ID NO: 1543885 - RNA, 19 nt, Artificial Sequence
  Description of Artificial Sequence: Synthetic oligonucleotide
uaguccgauguacuugaga

SEQ ID NO: 1543886 - RNA, 19 nt, Artificial Sequence
  Description of Artificial Sequence: Synthetic oligonucleotide
gacuacuaguggcaccuug

SEQ ID NO: 1543887 - RNA, 19 nt, Artificial Sequence
  Description of Artificial Sequence: Synthetic oligonucleotide
gacaugagcuucuugcucu

SEQ ID NO: 1543888 - RNA, 19 nt, Artificial Sequence
  Description of Artificial Sequence: Synthetic oligonucleotide
auuaugucacaaguagcca

SEQ ID NO: 1543889 - RNA, 19 nt, Artificial Sequence
  Description of Artificial Sequence: Synthetic oligonucleotide
cuuucaagccacuaucgaa

SEQ ID NO: 1543890 - RNA, 19 nt, Artificial Sequence
  Description of Artificial Sequence: Synthetic oligonucleotide
caagccggacuacuagugg

SEQ ID NO: 1543891 - RNA, 19 nt, Artificial Sequence
  Description of Artificial Sequence: Synthetic oligonucleotide
cuuuguugccagauuauaa

SEQ ID NO: 1543892 - RNA, 19 nt, Artificial Sequence
  Description of Artificial Sequence: Synthetic oligonucleotide
cuugagaucguaccuggca

SEQ ID NO: 1543893 - RNA, 19 nt, Artificial Sequence
  Description of Artificial Sequence: Synthetic oligonucleotide
gcuuuggugaucccauugg

SEQ ID NO: 1543894 - RNA, 19 nt, Artificial Sequence
  Description of Artificial Sequence: Synthetic oligonucleotide
uacuaguggcaccuugagu

SEQ ID NO: 1543895 - RNA, 19 nt, Artificial Sequence
  Description of Artificial Sequence: Synthetic oligonucleotide
agacaaugauccuugugua

SEQ ID NO: 1543896 - RNA, 19 nt, Artificial Sequence
  Description of Artificial Sequence: Synthetic oligonucleotide
gggcuuuuaaaacaauuuc

SEQ ID NO: 1543897 - RNA, 19 nt, Artificial Sequence
  Description of Artificial Sequence: Synthetic oligonucleotide
ccaaauauauugacgagga

SEQ ID NO: 1543898 - RNA, 19 nt, Artificial Sequence
  Description of Artificial Sequence: Synthetic oligonucleotide
ugucguccauagcaaauau

SEQ ID NO: 1543899 - RNA, 19 nt, Artificial Sequence
  Description of Artificial Sequence: Synthetic oligonucleotide
ugugaucaguuugaaugcu

SEQ ID NO: 1543900 - RNA, 19 nt, Artificial Sequence
  Description of Artificial Sequence: Synthetic oligonucleotide
ccaccaaauauauugacga

SEQ ID NO: 1543901 - RNA, 19 nt, Artificial Sequence
  Description of Artificial Sequence: Synthetic oligonucleotide
aguagccauggcuaaucca

SEQ ID NO: 1543902 - RNA, 19 nt, Artificial Sequence
  Description of Artificial Sequence: Synthetic oligonucleotide
cuacuaguggcaccuugag

SEQ ID NO: 1543903 - RNA, 19 nt, Artificial Sequence
  Description of Artificial Sequence: Synthetic oligonucleotide
cuugggcuuccuuuacacc

SEQ ID NO: 1543904 - RNA, 19 nt, Artificial Sequence
  Description of Artificial Sequence: Synthetic oligonucleotide
ucuggauuggaagcugcca

SEQ ID NO: 1543905 - RNA, 19 nt, Artificial Sequence
  Description of Artificial Sequence: Synthetic oligonucleotide
uuuugucggaacucagcau

SEQ ID NO: 1543906 - RNA, 19 nt, Artificial Sequence
  Description of Artificial Sequence: Synthetic oligonucleotide
uggccaaguagguuucucu

SEQ ID NO: 1543907 - RNA, 19 nt, Artificial Sequence
  Description of Artificial Sequence: Synthetic oligonucleotide
ccuuguuaacuuuuacacc

SEQ ID NO: 1543908 - RNA, 19 nt, Artificial Sequence
  Description of Artificial Sequence: Synthetic oligonucleotide
cuaucacagggccauugug

SEQ ID NO: 1543909 - RNA, 19 nt, Artificial Sequence
  Description of Artificial Sequence: Synthetic oligonucleotide
guacuugagaucguaccug

SEQ ID NO: 1543910 - RNA, 19 nt, Artificial Sequence
  Description of Artificial Sequence: Synthetic oligonucleotide
ucaagccacuaucgaagac

SEQ ID NO: 1543911 - RNA, 19 nt, Artificial Sequence
  Description of Artificial Sequence: Synthetic oligonucleotide
gucacaaguagccauggcu

SEQ ID NO: 1543912 - RNA, 19 nt, Artificial Sequence
  Description of Artificial Sequence: Synthetic oligonucleotide
gaugugauagggaggccac

SEQ ID NO: 1543913 - RNA, 19 nt, Artificial Sequence
  Description of Artificial Sequence: Synthetic oligonucleotide
auauugacgaggauggcuu

SEQ ID NO: 1543914 - RNA, 19 nt, Artificial Sequence
  Description of Artificial Sequence: Synthetic oligonucleotide
ggacauuaguuccuucaag

SEQ ID NO: 1543915 - RNA, 19 nt, Artificial Sequence
  Description of Artificial Sequence: Synthetic oligonucleotide
ugcuuuguugccagauuau

SEQ ID NO: 1543916 - RNA, 19 nt, Artificial Sequence
  Description of Artificial Sequence: Synthetic oligonucleotide
uggcacaguugacaauccc

SEQ ID NO: 1543917 - RNA, 19 nt, Artificial Sequence
  Description of Artificial Sequence: Synthetic oligonucleotide
ugauagggaggccacuguu

SEQ ID NO: 1543918 - RNA, 19 nt, Artificial Sequence
  Description of Artificial Sequence: Synthetic oligonucleotide
guugccagauuauaaccaa

SEQ ID NO: 1543919 - RNA, 19 nt, Artificial Sequence
  Description of Artificial Sequence: Synthetic oligonucleotide
cugcccacuaucacagggc

SEQ ID NO: 1543920 - RNA, 19 nt, Artificial Sequence
  Description of Artificial Sequence: Synthetic oligonucleotide
uaucaacgccgcccugagg

SEQ ID NO: 1543921 - RNA, 19 nt, Artificial Sequence
  Description of Artificial Sequence: Synthetic oligonucleotide
gcuuucacagugaugcggg

SEQ ID NO: 1543922 - RNA, 19 nt, Artificial Sequence
  Description of Artificial Sequence: Synthetic oligonucleotide
caagccacuaucgaagaca

SEQ ID NO: 1543923 - RNA, 19 nt, Artificial Sequence
  Description of Artificial Sequence: Synthetic oligonucleotide
cccagugagauaacaauug

SEQ ID NO: 1543924 - RNA, 19 nt, Artificial Sequence
  Description of Artificial Sequence: Synthetic oligonucleotide
ugggaucagaugugaucag

SEQ ID NO: 1543925 - RNA, 19 nt, Artificial Sequence
  Description of Artificial Sequence: Synthetic oligonucleotide
agaugugaucaguuugaau

SEQ ID NO: 1543926 - RNA, 19 nt, Artificial Sequence
  Description of Artificial Sequence: Synthetic oligonucleotide
uguccuuuugucggaacuc

SEQ ID NO: 1543927 - RNA, 19 nt, Artificial Sequence
  Description of Artificial Sequence: Synthetic oligonucleotide
cuguggauagcgcauuuga

SEQ ID NO: 1543928 - RNA, 19 nt, Artificial Sequence
  Description of Artificial Sequence: Synthetic oligonucleotide
uaaaggcccgaggaagccc

SEQ ID NO: 1543929 - RNA, 19 nt, Artificial Sequence
  Description of Artificial Sequence: Synthetic oligonucleotide
cuaauccagcgccauucac

SEQ ID NO: 1543930 - RNA, 19 nt, Artificial Sequence
  Description of Artificial Sequence: Synthetic oligonucleotide
agugcccuucuucacggga

SEQ ID NO: 1543931 - RNA, 19 nt, Artificial Sequence
  Description of Artificial Sequence: Synthetic oligonucleotide
gucuaguccgauguacuug

SEQ ID NO: 1543932 - RNA, 19 nt, Artificial Sequence
  Description of Artificial Sequence: Synthetic oligonucleotide
ugacccuuucccagugaga

SEQ ID NO: 1543933 - RNA, 19 nt, Artificial Sequence
  Description of Artificial Sequence: Synthetic oligonucleotide
cugauuugucguccauagc

SEQ ID NO: 1543934 - RNA, 19 nt, Artificial Sequence
  Description of Artificial Sequence: Synthetic oligonucleotide
gccauugugggaccggucc

SEQ ID NO: 1543935 - RNA, 19 nt, Artificial Sequence
  Description of Artificial Sequence: Synthetic oligonucleotide
caucaaucuucaggaagag

SEQ ID NO: 1543936 - RNA, 19 nt, Artificial Sequence
  Description of Artificial Sequence: Synthetic oligonucleotide
gcgccauucacgaagcagg

SEQ ID NO: 1543937 - RNA, 19 nt, Artificial Sequence
  Description of Artificial Sequence: Synthetic oligonucleotide
aaguuuaucuuggcaucaa

SEQ ID NO: 1543938 - RNA, 19 nt, Artificial Sequence
  Description of Artificial Sequence: Synthetic oligonucleotide
uuaguuccuucaagccgga

SEQ ID NO: 1543939 - RNA, 19 nt, Artificial Sequence
  Description of Artificial Sequence: Synthetic oligonucleotide
uauugacgaggauggcuuc

SEQ ID NO: 1543940 - RNA, 19 nt, Artificial Sequence
  Description of Artificial Sequence: Synthetic oligonucleotide
uugugggaccgguccauca

SEQ ID NO: 1543941 - RNA, 19 nt, Artificial Sequence
  Description of Artificial Sequence: Synthetic oligonucleotide
ccagugagauaacaauugc

SEQ ID NO: 1543942 - RNA, 19 nt, Artificial Sequence
  Description of Artificial Sequence: Synthetic oligonucleotide
acaauugcuuucacaguga

SEQ ID NO: 1543943 - RNA, 19 nt, Artificial Sequence
  Description of Artificial Sequence: Synthetic oligonucleotide
gauuggaagcugccacuuc

SEQ ID NO: 1543944 - RNA, 19 nt, Artificial Sequence
  Description of Artificial Sequence: Synthetic oligonucleotide
agguuucucuagaaauguc

SEQ ID NO: 1543945 - RNA, 19 nt, Artificial Sequence
  Description of Artificial Sequence: Synthetic oligonucleotide
accgguccaucagaauggc

SEQ ID NO: 1543946 - RNA, 19 nt, Artificial Sequence
  Description of Artificial Sequence: Synthetic oligonucleotide
gcgcauuugagaaaguuca

SEQ ID NO: 1543947 - RNA, 19 nt, Artificial Sequence
  Description of Artificial Sequence: Synthetic oligonucleotide
guaccuggcagcuucauuu

SEQ ID NO: 1543948 - RNA, 19 nt, Artificial Sequence
  Description of Artificial Sequence: Synthetic oligonucleotide
guucuaacucccggcaggc

SEQ ID NO: 1543949 - RNA, 19 nt, Artificial Sequence
  Description of Artificial Sequence: Synthetic oligonucleotide
uggcuaucauuuauuccuu

SEQ ID NO: 1543950 - RNA, 19 nt, Artificial Sequence
  Description of Artificial Sequence: Synthetic oligonucleotide
gaaguuagcuggcuucccu

SEQ ID NO: 1543951 - RNA, 19 nt, Artificial Sequence
  Description of Artificial Sequence: Synthetic oligonucleotide
ccuuuugucggaacucagc

SEQ ID NO: 1543952 - RNA, 19 nt, Artificial Sequence
  Description of Artificial Sequence: Synthetic oligonucleotide
agaaauguccagggcuuca

SEQ ID NO: 1543953 - RNA, 19 nt, Artificial Sequence
  Description of Artificial Sequence: Synthetic oligonucleotide
cuaagaucugggcuuuuaa

SEQ ID NO: 1543954 - RNA, 19 nt, Artificial Sequence
  Description of Artificial Sequence: Synthetic oligonucleotide
gccagauuauaaccaauca

SEQ ID NO: 1543955 - RNA, 19 nt, Artificial Sequence
  Description of Artificial Sequence: Synthetic oligonucleotide
ugggaccgguccaucagaa

SEQ ID NO: 1543956 - RNA, 19 nt, Artificial Sequence
  Description of Artificial Sequence: Synthetic oligonucleotide
gccucaagagccuccguag

SEQ ID NO: 1543957 - RNA, 19 nt, Artificial Sequence
  Description of Artificial Sequence: Synthetic oligonucleotide
ucucugauuugucguccau

SEQ ID NO: 1543958 - RNA, 19 nt, Artificial Sequence
  Description of Artificial Sequence: Synthetic oligonucleotide
caccugagucgcaucaauc

SEQ ID NO: 1543959 - RNA, 19 nt, Artificial Sequence
  Description of Artificial Sequence: Synthetic oligonucleotide
aucaaucuucaggaagaga

SEQ ID NO: 1543960 - RNA, 19 nt, Artificial Sequence
  Description of Artificial Sequence: Synthetic oligonucleotide
ggcaccuugaguucuaacu

SEQ ID NO: 1543961 - RNA, 19 nt, Artificial Sequence
  Description of Artificial Sequence: Synthetic oligonucleotide
ucaacgccgcccugagggc

SEQ ID NO: 1543962 - RNA, 19 nt, Artificial Sequence
  Description of Artificial Sequence: Synthetic oligonucleotide
ccuccauucaggaaaauua

SEQ ID NO: 1543963 - RNA, 19 nt, Artificial Sequence
  Description of Artificial Sequence: Synthetic oligonucleotide
agguccgcagcugauguga

SEQ ID NO: 1543964 - RNA, 19 nt, Artificial Sequence
  Description of Artificial Sequence: Synthetic oligonucleotide
uggugaucccauuggcaau

SEQ ID NO: 1543965 - RNA, 19 nt, Artificial Sequence
  Description of Artificial Sequence: Synthetic oligonucleotide
ggugaucccauuggcaaug

SEQ ID NO: 1543966 - RNA, 19 nt, Artificial Sequence
  Description of Artificial Sequence: Synthetic oligonucleotide
aucuguugggccagcuguc

SEQ ID NO: 1543967 - RNA, 19 nt, Artificial Sequence
  Description of Artificial Sequence: Synthetic oligonucleotide
guucccgucuaguccgaug

SEQ ID NO: 1543968 - RNA, 19 nt, Artificial Sequence
  Description of Artificial Sequence: Synthetic oligonucleotide
cuagaaauguccagggcuu

SEQ ID NO: 1543969 - RNA, 19 nt, Artificial Sequence
  Description of Artificial Sequence: Synthetic oligonucleotide
agcugucccaccacuuuag

SEQ ID NO: 1543970 - RNA, 19 nt, Artificial Sequence
  Description of Artificial Sequence: Synthetic oligonucleotide
gccacuaucgaagacaccu

SEQ ID NO: 1543971 - RNA, 19 nt, Artificial Sequence
  Description of Artificial Sequence: Synthetic oligonucleotide
cuaguccgauguacuugag

SEQ ID NO: 1543972 - RNA, 19 nt, Artificial Sequence
  Description of Artificial Sequence: Synthetic oligonucleotide
guccgauguacuugagauc

SEQ ID NO: 1543973 - RNA, 19 nt, Artificial Sequence
  Description of Artificial Sequence: Synthetic oligonucleotide
cacaaguagccauggcuaa

SEQ ID NO: 1543974 - RNA, 19 nt, Artificial Sequence
  Description of Artificial Sequence: Synthetic oligonucleotide
cuuucccagugagauaaca

SEQ ID NO: 1543975 - RNA, 19 nt, Artificial Sequence
  Description of Artificial Sequence: Synthetic oligonucleotide
ggcuaauccagcgccauuc

SEQ ID NO: 1543976 - RNA, 19 nt, Artificial Sequence
  Description of Artificial Sequence: Synthetic oligonucleotide
acuuccaccugagucgcau

SEQ ID NO: 1543977 - RNA, 19 nt, Artificial Sequence
  Description of Artificial Sequence: Synthetic oligonucleotide
aguuugcuuuguugccaga

SEQ ID NO: 1543978 - RNA, 19 nt, Artificial Sequence
  Description of Artificial Sequence: Synthetic oligonucleotide
ggcaaugauggcacaguug

SEQ ID NO: 1543979 - RNA, 19 nt, Artificial Sequence
  Description of Artificial Sequence: Synthetic oligonucleotide
ucgcaucaaucuucaggaa

SEQ ID NO: 1543980 - RNA, 19 nt, Artificial Sequence
  Description of Artificial Sequence: Synthetic oligonucleotide
uccuuguguaugacccuuu

SEQ ID NO: 1543981 - RNA, 19 nt, Artificial Sequence
  Description of Artificial Sequence: Synthetic oligonucleotide
acuaucgaagacaccuuuu

SEQ ID NO: 1543982 - RNA, 19 nt, Artificial Sequence
  Description of Artificial Sequence: Synthetic oligonucleotide
uaccuggcagcuucauuuu

SEQ ID NO: 1543983 - RNA, 19 nt, Artificial Sequence
  Description of Artificial Sequence: Synthetic oligonucleotide
gagucgcaucaaucuucag

SEQ ID NO: 1543984 - RNA, 19 nt, Artificial Sequence
  Description of Artificial Sequence: Synthetic oligonucleotide
acaaguagccauggcuaau

SEQ ID NO: 1543985 - RNA, 19 nt, Artificial Sequence
  Description of Artificial Sequence: Synthetic oligonucleotide
caauaucaacgccgcccug

SEQ ID NO: 1543986 - RNA, 19 nt, Artificial Sequence
  Description of Artificial Sequence: Synthetic oligonucleotide
auauguccuuuugucggaa

SEQ ID NO: 1543987 - RNA, 19 nt, Artificial Sequence
  Description of Artificial Sequence: Synthetic oligonucleotide
agccacuaucgaagacacc

SEQ ID NO: 1543988 - RNA, 19 nt, Artificial Sequence
  Description of Artificial Sequence: Synthetic oligonucleotide
uccugcagguucagccauc

SEQ ID NO: 1543989 - RNA, 19 nt, Artificial Sequence
  Description of Artificial Sequence: Synthetic oligonucleotide
gcugccucaagagccuccg

SEQ ID NO: 1543990 - RNA, 19 nt, Artificial Sequence
  Description of Artificial Sequence: Synthetic oligonucleotide
ccaaguagguuucucuaga

SEQ ID NO: 1543991 - RNA, 19 nt, Artificial Sequence
  Description of Artificial Sequence: Synthetic oligonucleotide
uggucggcugccugguuuu

SEQ ID NO: 1543992 - RNA, 19 nt, Artificial Sequence
  Description of Artificial Sequence: Synthetic oligonucleotide
auggcuaauccagcgccau

SEQ ID NO: 1543993 - RNA, 19 nt, Artificial Sequence
  Description of Artificial Sequence: Synthetic oligonucleotide
gagaucguaccuggcagcu

SEQ ID NO: 1543994 - RNA, 19 nt, Artificial Sequence
  Description of Artificial Sequence: Synthetic oligonucleotide
uucuaacucccggcaggcu

SEQ ID NO: 1543995 - RNA, 19 nt, Artificial Sequence
  Description of Artificial Sequence: Synthetic oligonucleotide
guagcaguguuggcaacaa

SEQ ID NO: 1543996 - RNA, 19 nt, Artificial Sequence
  Description of Artificial Sequence: Synthetic oligonucleotide
aguucagacuuaagauuuu

SEQ ID NO: 1543997 - RNA, 19 nt, Artificial Sequence
  Description of Artificial Sequence: Synthetic oligonucleotide
ugaugcgggaagugcccuu

SEQ ID NO: 1543998 - RNA, 19 nt, Artificial Sequence
  Description of Artificial Sequence: Synthetic oligonucleotide
caggcaauguucccgucua

SEQ ID NO: 1543999 - RNA, 19 nt, Artificial Sequence
  Description of Artificial Sequence: Synthetic oligonucleotide
agccggacuacuaguggca

SEQ ID NO: 1544000 - RNA, 19 nt, Artificial Sequence
  Description of Artificial Sequence: Synthetic oligonucleotide
uccaccugagucgcaucaa

SEQ ID NO: 1544001 - RNA, 19 nt, Artificial Sequence
  Description of Artificial Sequence: Synthetic oligonucleotide
agucucuuugcugccucaa

SEQ ID NO: 1544002 - RNA, 19 nt, Artificial Sequence
  Description of Artificial Sequence: Synthetic oligonucleotide
uggcuaauccagcgccauu

SEQ ID NO: 1544003 - RNA, 19 nt, Artificial Sequence
  Description of Artificial Sequence: Synthetic oligonucleotide
ugcgggaagugcccuucuu

SEQ ID NO: 1544004 - RNA, 19 nt, Artificial Sequence
  Description of Artificial Sequence: Synthetic oligonucleotide
ccuuuacaccaccuccaag

SEQ ID NO: 1544005 - RNA, 19 nt, Artificial Sequence
  Description of Artificial Sequence: Synthetic oligonucleotide
gagccucuuggacauuagu

SEQ ID NO: 1544006 - RNA, 19 nt, Artificial Sequence
  Description of Artificial Sequence: Synthetic oligonucleotide
gcuaauccagcgccauuca

SEQ ID NO: 1544007 - RNA, 19 nt, Artificial Sequence
  Description of Artificial Sequence: Synthetic oligonucleotide
augugauagggaggccacu

SEQ ID NO: 1544008 - RNA, 19 nt, Artificial Sequence
  Description of Artificial Sequence: Synthetic oligonucleotide
cauuggcaaugauggcaca

SEQ ID NO: 1544009 - RNA, 19 nt, Artificial Sequence
  Description of Artificial Sequence: Synthetic oligonucleotide
uaacucccggcaggcuuug

SEQ ID NO: 1544010 - RNA, 19 nt, Artificial Sequence
  Description of Artificial Sequence: Synthetic oligonucleotide
ccagauuauaaccaaucau

SEQ ID NO: 1544011 - RNA, 19 nt, Artificial Sequence
  Description of Artificial Sequence: Synthetic oligonucleotide
ccuuucaagccacuaucga

SEQ ID NO: 1544012 - RNA, 19 nt, Artificial Sequence
  Description of Artificial Sequence: Synthetic oligonucleotide
ucccgucuaguccgaugua

SEQ ID NO: 1544013 - RNA, 19 nt, Artificial Sequence
  Description of Artificial Sequence: Synthetic oligonucleotide
gcgggaagugcccuucuuc

SEQ ID NO: 1544014 - RNA, 19 nt, Artificial Sequence
  Description of Artificial Sequence: Synthetic oligonucleotide
ccuuguguaugacccuuuc

SEQ ID NO: 1544015 - RNA, 19 nt, Artificial Sequence
  Description of Artificial Sequence: Synthetic oligonucleotide
ggauagcgcauuugagaaa

SEQ ID NO: 1544016 - RNA, 19 nt, Artificial Sequence
  Description of Artificial Sequence: Synthetic oligonucleotide
auagcgcauuugagaaagu

SEQ ID NO: 1544017 - RNA, 19 nt, Artificial Sequence
  Description of Artificial Sequence: Synthetic oligonucleotide
cagaugugaucaguuugaa

SEQ ID NO: 1544018 - RNA, 19 nt, Artificial Sequence
  Description of Artificial Sequence: Synthetic oligonucleotide
cccgucuaguccgauguac

SEQ ID NO: 1544019 - RNA, 19 nt, Artificial Sequence
  Description of Artificial Sequence: Synthetic oligonucleotide
cacuaucgaagacaccuuu

SEQ ID NO: 1544020 - RNA, 19 nt, Artificial Sequence
  Description of Artificial Sequence: Synthetic oligonucleotide
ccggacuacuaguggcacc

SEQ ID NO: 1544021 - RNA, 19 nt, Artificial Sequence
  Description of Artificial Sequence: Synthetic oligonucleotide
cuaacucccggcaggcuuu

SEQ ID NO: 1544022 - RNA, 19 nt, Artificial Sequence
  Description of Artificial Sequence: Synthetic oligonucleotide
cugagccucuuggacauua

SEQ ID NO: 1544023 - RNA, 19 nt, Artificial Sequence
  Description of Artificial Sequence: Synthetic oligonucleotide
gcuuuguugccagauuaua

SEQ ID NO: 1544024 - RNA, 19 nt, Artificial Sequence
  Description of Artificial Sequence: Synthetic oligonucleotide
aucguaccuggcagcuuca

SEQ ID NO: 1544025 - RNA, 19 nt, Artificial Sequence
  Description of Artificial Sequence: Synthetic oligonucleotide
ucguaccuggcagcuucau

SEQ ID NO: 1544026 - RNA, 19 nt, Artificial Sequence
  Description of Artificial Sequence: Synthetic oligonucleotide
gcaggcaauguucccgucu

SEQ ID NO: 1544027 - RNA, 19 nt, Artificial Sequence
  Description of Artificial Sequence: Synthetic oligonucleotide
agaucguaccuggcagcuu

SEQ ID NO: 1544028 - RNA, 19 nt, Artificial Sequence
  Description of Artificial Sequence: Synthetic oligonucleotide
cgaggaagcccagauuuuc

SEQ ID NO: 1544029 - RNA, 19 nt, Artificial Sequence
  Description of Artificial Sequence: Synthetic oligonucleotide
auccagcgccauucacgaa

SEQ ID NO: 1544030 - RNA, 19 nt, Artificial Sequence
  Description of Artificial Sequence: Synthetic oligonucleotide
gugaucaguuugaaugcuu

SEQ ID NO: 1544031 - RNA, 19 nt, Artificial Sequence
  Description of Artificial Sequence: Synthetic oligonucleotide
caccuccaagguccaagaa

SEQ ID NO: 1544032 - RNA, 19 nt, Artificial Sequence
  Description of Artificial Sequence: Synthetic oligonucleotide
gcuaagaucugggcuuuua

SEQ ID NO: 1544033 - RNA, 19 nt, Artificial Sequence
  Description of Artificial Sequence: Synthetic oligonucleotide
gggaucagaugugaucagu

SEQ ID NO: 1544034 - RNA, 19 nt, Artificial Sequence
  Description of Artificial Sequence: Synthetic oligonucleotide
ccuucaagccggacuacua

SEQ ID NO: 1544035 - RNA, 19 nt, Artificial Sequence
  Description of Artificial Sequence: Synthetic oligonucleotide
gccggacuacuaguggcac

SEQ ID NO: 1544036 - RNA, 19 nt, Artificial Sequence
  Description of Artificial Sequence: Synthetic oligonucleotide
auguucccgucuaguccga

SEQ ID NO: 1544037 - RNA, 19 nt, Artificial Sequence
  Description of Artificial Sequence: Synthetic oligonucleotide
ucccuccauucaggaaaau

SEQ ID NO: 1544038 - RNA, 19 nt, Artificial Sequence
  Description of Artificial Sequence: Synthetic oligonucleotide
gugaugcgggaagugcccu

SEQ ID NO: 1544039 - RNA, 19 nt, Artificial Sequence
  Description of Artificial Sequence: Synthetic oligonucleotide
agcuaagaucugggcuuuu

SEQ ID NO: 1544040 - RNA, 19 nt, Artificial Sequence
  Description of Artificial Sequence: Synthetic oligonucleotide
ggauuggaagcugccacuu

SEQ ID NO: 1544041 - RNA, 19 nt, Artificial Sequence
  Description of Artificial Sequence: Synthetic oligonucleotide
ccguagcaguguuggcaac

SEQ ID NO: 1544042 - RNA, 19 nt, Artificial Sequence
  Description of Artificial Sequence: Synthetic oligonucleotide
ccuccuuucaagccacuau

SEQ ID NO: 1544043 - RNA, 19 nt, Artificial Sequence
  Description of Artificial Sequence: Synthetic oligonucleotide
ccgucuaguccgauguacu

SEQ ID NO: 1544044 - RNA, 19 nt, Artificial Sequence
  Description of Artificial Sequence: Synthetic oligonucleotide
caccacuuuagggucuuuu

SEQ ID NO: 1544045 - RNA, 19 nt, Artificial Sequence
  Description of Artificial Sequence: Synthetic oligonucleotide
ccugagucgcaucaaucuu

SEQ ID NO: 1544046 - RNA, 19 nt, Artificial Sequence
  Description of Artificial Sequence: Synthetic oligonucleotide
caacgccgcccugagggcu

SEQ ID NO: 1544047 - RNA, 19 nt, Artificial Sequence
  Description of Artificial Sequence: Synthetic oligonucleotide
gcccacuaucacagggcca

SEQ ID NO: 1544048 - RNA, 19 nt, Artificial Sequence
  Description of Artificial Sequence: Synthetic oligonucleotide
cggacuacuaguggcaccu

SEQ ID NO: 1544049 - RNA, 19 nt, Artificial Sequence
  Description of Artificial Sequence: Synthetic oligonucleotide
gccgcccugagggcugccc

SEQ ID NO: 1544050 - RNA, 19 nt, Artificial Sequence
  Description of Artificial Sequence: Synthetic oligonucleotide
gggaccgguccaucagaau

SEQ ID NO: 1544051 - RNA, 19 nt, Artificial Sequence
  Description of Artificial Sequence: Synthetic oligonucleotide
ccacuaucgaagacaccuu

SEQ ID NO: 1544052 - RNA, 19 nt, Artificial Sequence
  Description of Artificial Sequence: Synthetic oligonucleotide
cugccucaagagccuccgu

SEQ ID NO: 1544053 - RNA, 19 nt, Artificial Sequence
  Description of Artificial Sequence: Synthetic oligonucleotide
ccaccugagucgcaucaau

SEQ ID NO: 1544054 - RNA, 19 nt, Artificial Sequence
  Description of Artificial Sequence: Synthetic oligonucleotide
ccauagcaaauauguccuu

SEQ ID NO: 1544055 - RNA, 19 nt, Artificial Sequence
  Description of Artificial Sequence: Synthetic oligonucleotide
gcacuguggauagcgcauu

SEQ ID NO: 1544056 - RNA, 19 nt, Artificial Sequence
  Description of Artificial Sequence: Synthetic oligonucleotide
cgucuaguccgauguacuu

SEQ ID NO: 1544057 - RNA, 19 nt, Artificial Sequence
  Description of Artificial Sequence: Synthetic oligonucleotide
cccggcaggcuuuggugau

SEQ ID NO: 1544058 - RNA, 19 nt, Artificial Sequence
  Description of Artificial Sequence: Synthetic oligonucleotide
cccugagggcugcccacua

SEQ ID NO: 1544059 - RNA, 19 nt, Artificial Sequence
  Description of Artificial Sequence: Synthetic oligonucleotide
ggacuacuaguggcaccuu

SEQ ID NO: 1544060 - RNA, 19 nt, Artificial Sequence
  Description of Artificial Sequence: Synthetic oligonucleotide
cgccgcccugagggcugcc

SEQ ID NO: 1544061 - RNA, 19 nt, Artificial Sequence
  Description of Artificial Sequence: Synthetic oligonucleotide
ccaccacuuuagggucuuu

SEQ ID NO: 1544062 - RNA, 19 nt, Artificial Sequence
  Description of Artificial Sequence: Synthetic oligonucleotide
aguaguuagguuuugagac

SEQ ID NO: 1544063 - RNA, 19 nt, Artificial Sequence
  Description of Artificial Sequence: Synthetic oligonucleotide
ugaacguuaaccaacaaga

SEQ ID NO: 1544064 - RNA, 19 nt, Artificial Sequence
  Description of Artificial Sequence: Synthetic oligonucleotide
auuaugaacacauaaugag

SEQ ID NO: 1544065 - RNA, 19 nt, Artificial Sequence
  Description of Artificial Sequence: Synthetic oligonucleotide
ugaaagauagcgauaacag

SEQ ID NO: 1544066 - RNA, 19 nt, Artificial Sequence
  Description of Artificial Sequence: Synthetic oligonucleotide
ucauauaccaacuuaguug

SEQ ID NO: 1544067 - RNA, 19 nt, Artificial Sequence
  Description of Artificial Sequence: Synthetic oligonucleotide
uauaagaauaucauauacc

SEQ ID NO: 1544068 - RNA, 19 nt, Artificial Sequence
  Description of Artificial Sequence: Synthetic oligonucleotide
auaagaauaucauauacca

SEQ ID NO: 1544069 - RNA, 19 nt, Artificial Sequence
  Description of Artificial Sequence: Synthetic oligonucleotide
uuaauauacugauagguug

SEQ ID NO: 1544070 - RNA, 19 nt, Artificial Sequence
  Description of Artificial Sequence: Synthetic oligonucleotide
aggaagaugaacguuaacc

SEQ ID NO: 1544071 - RNA, 19 nt, Artificial Sequence
  Description of Artificial Sequence: Synthetic oligonucleotide
uuaaaauggucacacacug

SEQ ID NO: 1544072 - RNA, 19 nt, Artificial Sequence
  Description of Artificial Sequence: Synthetic oligonucleotide
gacaucgcggcuuugaugg

SEQ ID NO: 1544073 - RNA, 19 nt, Artificial Sequence
  Description of Artificial Sequence: Synthetic oligonucleotide
aaaacuaucuuugaaagau

SEQ ID NO: 1544074 - RNA, 19 nt, Artificial Sequence
  Description of Artificial Sequence: Synthetic oligonucleotide
auagacgccaauuaaaaug

SEQ ID NO: 1544075 - RNA, 19 nt, Artificial Sequence
  Description of Artificial Sequence: Synthetic oligonucleotide
gauuccuggaccuauacgc

SEQ ID NO: 1544076 - RNA, 19 nt, Artificial Sequence
  Description of Artificial Sequence: Synthetic oligonucleotide
aaagauagcgauaacagga

SEQ ID NO: 1544077 - RNA, 19 nt, Artificial Sequence
  Description of Artificial Sequence: Synthetic oligonucleotide
ugauagguugaaucgaugg

SEQ ID NO: 1544078 - RNA, 19 nt, Artificial Sequence
  Description of Artificial Sequence: Synthetic oligonucleotide
acauuaugaacacauaaug

SEQ ID NO: 1544079 - RNA, 19 nt, Artificial Sequence
  Description of Artificial Sequence: Synthetic oligonucleotide
auauucgugacaucgcggc

SEQ ID NO: 1544080 - RNA, 19 nt, Artificial Sequence
  Description of Artificial Sequence: Synthetic oligonucleotide
aaaauggucacacacugaa

SEQ ID NO: 1544081 - RNA, 19 nt, Artificial Sequence
  Description of Artificial Sequence: Synthetic oligonucleotide
ucacauauucgugacaucg

SEQ ID NO: 1544082 - RNA, 19 nt, Artificial Sequence
  Description of Artificial Sequence: Synthetic oligonucleotide
auacugauagguugaaucg

SEQ ID NO: 1544083 - RNA, 19 nt, Artificial Sequence
  Description of Artificial Sequence: Synthetic oligonucleotide
aaagguguccagccgauuc

SEQ ID NO: 1544084 - RNA, 19 nt, Artificial Sequence
  Description of Artificial Sequence: Synthetic oligonucleotide
uuaaccaacaagacaaaac

SEQ ID NO: 1544085 - RNA, 19 nt, Artificial Sequence
  Description of Artificial Sequence: Synthetic oligonucleotide
gaaagauagcgauaacagg

SEQ ID NO: 1544086 - RNA, 19 nt, Artificial Sequence
  Description of Artificial Sequence: Synthetic oligonucleotide
uuaugaacacauaaugaga

SEQ ID NO: 1544087 - RNA, 19 nt, Artificial Sequence
  Description of Artificial Sequence: Synthetic oligonucleotide
aagaugaacguuaaccaac

SEQ ID NO: 1544088 - RNA, 19 nt, Artificial Sequence
  Description of Artificial Sequence: Synthetic oligonucleotide
acauaauuaauuuacugaa

SEQ ID NO: 1544089 - RNA, 19 nt, Artificial Sequence
  Description of Artificial Sequence: Synthetic oligonucleotide
uucaugucuacaaugcccc

SEQ ID NO: 1544090 - RNA, 19 nt, Artificial Sequence
  Description of Artificial Sequence: Synthetic oligonucleotide
aacguuaaccaacaagaca

SEQ ID NO: 1544091 - RNA, 19 nt, Artificial Sequence
  Description of Artificial Sequence: Synthetic oligonucleotide
uacaugaacauaauuaauu

SEQ ID NO: 1544092 - RNA, 19 nt, Artificial Sequence
  Description of Artificial Sequence: Synthetic oligonucleotide
uuugugucuucaaaggccc

SEQ ID NO: 1544093 - RNA, 19 nt, Artificial Sequence
  Description of Artificial Sequence: Synthetic oligonucleotide
gucaguuagguccacaucc

SEQ ID NO: 1544094 - RNA, 19 nt, Artificial Sequence
  Description of Artificial Sequence: Synthetic oligonucleotide
uuuauaacuuccugcacca

SEQ ID NO: 1544095 - RNA, 19 nt, Artificial Sequence
  Description of Artificial Sequence: Synthetic oligonucleotide
uuuaauauacugauagguu

SEQ ID NO: 1544096 - RNA, 19 nt, Artificial Sequence
  Description of Artificial Sequence: Synthetic oligonucleotide
aaacucauuggauucuucu

SEQ ID NO: 1544097 - RNA, 19 nt, Artificial Sequence
  Description of Artificial Sequence: Synthetic oligonucleotide
gauagcgauaacaggaagg

SEQ ID NO: 1544098 - RNA, 19 nt, Artificial Sequence
  Description of Artificial Sequence: Synthetic oligonucleotide
ucuacagugaucuuuucuc

SEQ ID NO: 1544099 - RNA, 19 nt, Artificial Sequence
  Description of Artificial Sequence: Synthetic oligonucleotide
gaagauguuccucaaaaga

SEQ ID NO: 1544100 - RNA, 19 nt, Artificial Sequence
  Description of Artificial Sequence: Synthetic oligonucleotide
gaaucgaugggauccaccc

SEQ ID NO: 1544101 - RNA, 19 nt, Artificial Sequence
  Description of Artificial Sequence: Synthetic oligonucleotide
uauaacuuccugcaccagc

SEQ ID NO: 1544102 - RNA, 19 nt, Artificial Sequence
  Description of Artificial Sequence: Synthetic oligonucleotide
uaagccuggaaacuuauuc

SEQ ID NO: 1544103 - RNA, 19 nt, Artificial Sequence
  Description of Artificial Sequence: Synthetic oligonucleotide
augaacguuaaccaacaag

SEQ ID NO: 1544104 - RNA, 19 nt, Artificial Sequence
  Description of Artificial Sequence: Synthetic oligonucleotide
gaugacucccaucaggggc

SEQ ID NO: 1544105 - RNA, 19 nt, Artificial Sequence
  Description of Artificial Sequence: Synthetic oligonucleotide
auaccaacuuaguuguuac

SEQ ID NO: 1544106 - RNA, 19 nt, Artificial Sequence
  Description of Artificial Sequence: Synthetic oligonucleotide
uguuugugucuucaaaggc

SEQ ID NO: 1544107 - RNA, 19 nt, Artificial Sequence
  Description of Artificial Sequence: Synthetic oligonucleotide
accuauacgcaaucagucc

SEQ ID NO: 1544108 - RNA, 19 nt, Artificial Sequence
  Description of Artificial Sequence: Synthetic oligonucleotide
auaucauauaccaacuuag

SEQ ID NO: 1544109 - RNA, 19 nt, Artificial Sequence
  Description of Artificial Sequence: Synthetic oligonucleotide
uuuguaaacucauuggauu

SEQ ID NO: 1544110 - RNA, 19 nt, Artificial Sequence
  Description of Artificial Sequence: Synthetic oligonucleotide
agauguaaaugucaaccag

SEQ ID NO: 1544111 - RNA, 19 nt, Artificial Sequence
  Description of Artificial Sequence: Synthetic oligonucleotide
auagcgauaacaggaaggg

SEQ ID NO: 1544112 - RNA, 19 nt, Artificial Sequence
  Description of Artificial Sequence: Synthetic oligonucleotide
ugugauacagcagcugugg

SEQ ID NO: 1544113 - RNA, 19 nt, Artificial Sequence
  Description of Artificial Sequence: Synthetic oligonucleotide
ugucccuuccaccuuagag

SEQ ID NO: 1544114 - RNA, 19 nt, Artificial Sequence
  Description of Artificial Sequence: Synthetic oligonucleotide
ucauagacgccaauuaaaa

SEQ ID NO: 1544115 - RNA, 19 nt, Artificial Sequence
  Description of Artificial Sequence: Synthetic oligonucleotide
agaguaguuagguuuugag

SEQ ID NO: 1544116 - RNA, 19 nt, Artificial Sequence
  Description of Artificial Sequence: Synthetic oligonucleotide
aguacugucccuuccaccu

SEQ ID NO: 1544117 - RNA, 19 nt, Artificial Sequence
  Description of Artificial Sequence: Synthetic oligonucleotide
aucuuugaaagauagcgau

SEQ ID NO: 1544118 - RNA, 19 nt, Artificial Sequence
  Description of Artificial Sequence: Synthetic oligonucleotide
uuuguucuccaugugauac

SEQ ID NO: 1544119 - RNA, 19 nt, Artificial Sequence
  Description of Artificial Sequence: Synthetic oligonucleotide
cauuaugaacacauaauga

SEQ ID NO: 1544120 - RNA, 19 nt, Artificial Sequence
  Description of Artificial Sequence: Synthetic oligonucleotide
acuucacguuggcagaacc

SEQ ID NO: 1544121 - RNA, 19 nt, Artificial Sequence
  Description of Artificial Sequence: Synthetic oligonucleotide
gagguuuugggugaggcag

SEQ ID NO: 1544122 - RNA, 19 nt, Artificial Sequence
  Description of Artificial Sequence: Synthetic oligonucleotide
acauaaugagaagauguuc

SEQ ID NO: 1544123 - RNA, 19 nt, Artificial Sequence
  Description of Artificial Sequence: Synthetic oligonucleotide
uaucauauaccaacuuagu

SEQ ID NO: 1544124 - RNA, 19 nt, Artificial Sequence
  Description of Artificial Sequence: Synthetic oligonucleotide
auguuagcagccuucucgg

SEQ ID NO: 1544125 - RNA, 19 nt, Artificial Sequence
  Description of Artificial Sequence: Synthetic oligonucleotide
uuguaaacucauuggauuc

SEQ ID NO: 1544126 - RNA, 19 nt, Artificial Sequence
  Description of Artificial Sequence: Synthetic oligonucleotide
uggaccuauacgcaaucag

SEQ ID NO: 1544127 - RNA, 19 nt, Artificial Sequence
  Description of Artificial Sequence: Synthetic oligonucleotide
agcauguugccauuaagga

SEQ ID NO: 1544128 - RNA, 19 nt, Artificial Sequence
  Description of Artificial Sequence: Synthetic oligonucleotide
aaaacuccuugguuggacu

SEQ ID NO: 1544129 - RNA, 19 nt, Artificial Sequence
  Description of Artificial Sequence: Synthetic oligonucleotide
acacauaaugagaagaugu

SEQ ID NO: 1544130 - RNA, 19 nt, Artificial Sequence
  Description of Artificial Sequence: Synthetic oligonucleotide
uaggguuuccugcugccgg

SEQ ID NO: 1544131 - RNA, 19 nt, Artificial Sequence
  Description of Artificial Sequence: Synthetic oligonucleotide
ucaaaagaggaagaugaac

SEQ ID NO: 1544132 - RNA, 19 nt, Artificial Sequence
  Description of Artificial Sequence: Synthetic oligonucleotide
aaugucaaccaggccuugc

SEQ ID NO: 1544133 - RNA, 19 nt, Artificial Sequence
  Description of Artificial Sequence: Synthetic oligonucleotide
acguuaaccaacaagacaa

SEQ ID NO: 1544134 - RNA, 19 nt, Artificial Sequence
  Description of Artificial Sequence: Synthetic oligonucleotide
cugaaauuaacauuaugaa

SEQ ID NO: 1544135 - RNA, 19 nt, Artificial Sequence
  Description of Artificial Sequence: Synthetic oligonucleotide
uaagaauaucauauaccaa

SEQ ID NO: 1544136 - RNA, 19 nt, Artificial Sequence
  Description of Artificial Sequence: Synthetic oligonucleotide
uucccuuuagggauggaga

SEQ ID NO: 1544137 - RNA, 19 nt, Artificial Sequence
  Description of Artificial Sequence: Synthetic oligonucleotide
uacgcaaucaguccucccu

SEQ ID NO: 1544138 - RNA, 19 nt, Artificial Sequence
  Description of Artificial Sequence: Synthetic oligonucleotide
cauauucgugacaucgcgg

SEQ ID NO: 1544139 - RNA, 19 nt, Artificial Sequence
  Description of Artificial Sequence: Synthetic oligonucleotide
accuucacauauucgugac

SEQ ID NO: 1544140 - RNA, 19 nt, Artificial Sequence
  Description of Artificial Sequence: Synthetic oligonucleotide
ugaaaucuguugcaaacuu

SEQ ID NO: 1544141 - RNA, 19 nt, Artificial Sequence
  Description of Artificial Sequence: Synthetic oligonucleotide
uuaagggcgaguugcaguc

SEQ ID NO: 1544142 - RNA, 19 nt, Artificial Sequence
  Description of Artificial Sequence: Synthetic oligonucleotide
gaguaguuagguuuugaga

SEQ ID NO: 1544143 - RNA, 19 nt, Artificial Sequence
  Description of Artificial Sequence: Synthetic oligonucleotide
ccuugcacuacacagaggc

SEQ ID NO: 1544144 - RNA, 19 nt, Artificial Sequence
  Description of Artificial Sequence: Synthetic oligonucleotide
gauccacccaaauucccag

SEQ ID NO: 1544145 - RNA, 19 nt, Artificial Sequence
  Description of Artificial Sequence: Synthetic oligonucleotide
guuagcagccuucucggag

SEQ ID NO: 1544146 - RNA, 19 nt, Artificial Sequence
  Description of Artificial Sequence: Synthetic oligonucleotide
uaaaauggucacacacuga

SEQ ID NO: 1544147 - RNA, 19 nt, Artificial Sequence
  Description of Artificial Sequence: Synthetic oligonucleotide
guuggcagaaccuuuaaua

SEQ ID NO: 1544148 - RNA, 19 nt, Artificial Sequence
  Description of Artificial Sequence: Synthetic oligonucleotide
ugauucgggacuucuugcc

SEQ ID NO: 1544149 - RNA, 19 nt, Artificial Sequence
  Description of Artificial Sequence: Synthetic oligonucleotide
cucauuggauucuucuccc

SEQ ID NO: 1544150 - RNA, 19 nt, Artificial Sequence
  Description of Artificial Sequence: Synthetic oligonucleotide
agcgauaacaggaaggggu

SEQ ID NO: 1544151 - RNA, 19 nt, Artificial Sequence
  Description of Artificial Sequence: Synthetic oligonucleotide
auagguugaaucgauggga

SEQ ID NO: 1544152 - RNA, 19 nt, Artificial Sequence
  Description of Artificial Sequence: Synthetic oligonucleotide
guggacugcaguucuacag

SEQ ID NO: 1544153 - RNA, 19 nt, Artificial Sequence
  Description of Artificial Sequence: Synthetic oligonucleotide
uccugcgggaugcugaucu

SEQ ID NO: 1544154 - RNA, 19 nt, Artificial Sequence
  Description of Artificial Sequence: Synthetic oligonucleotide
uuuccccuaagccuggaaa

SEQ ID NO: 1544155 - RNA, 19 nt, Artificial Sequence
  Description of Artificial Sequence: Synthetic oligonucleotide
ggaagaugaacguuaacca

SEQ ID NO: 1544156 - RNA, 19 nt, Artificial Sequence
  Description of Artificial Sequence: Synthetic oligonucleotide
gugaguuucacuguuguuc

SEQ ID NO: 1544157 - RNA, 19 nt, Artificial Sequence
  Description of Artificial Sequence: Synthetic oligonucleotide
gguugaaucgaugggaucc

SEQ ID NO: 1544158 - RNA, 19 nt, Artificial Sequence
  Description of Artificial Sequence: Synthetic oligonucleotide
cagagauccaccccggaag

SEQ ID NO: 1544159 - RNA, 19 nt, Artificial Sequence
  Description of Artificial Sequence: Synthetic oligonucleotide
agauagcgauaacaggaag

SEQ ID NO: 1544160 - RNA, 19 nt, Artificial Sequence
  Description of Artificial Sequence: Synthetic oligonucleotide
gggucuugaaaucuguugc

SEQ ID NO: 1544161 - RNA, 19 nt, Artificial Sequence
  Description of Artificial Sequence: Synthetic oligonucleotide
aguaguacugucccuucca

SEQ ID NO: 1544162 - RNA, 19 nt, Artificial Sequence
  Description of Artificial Sequence: Synthetic oligonucleotide
ugggauccacccaaauucc

SEQ ID NO: 1544163 - RNA, 19 nt, Artificial Sequence
  Description of Artificial Sequence: Synthetic oligonucleotide
cagaaccuuuaauauacug

SEQ ID NO: 1544164 - RNA, 19 nt, Artificial Sequence
  Description of Artificial Sequence: Synthetic oligonucleotide
uagggauggagaacugcag

SEQ ID NO: 1544165 - RNA, 19 nt, Artificial Sequence
  Description of Artificial Sequence: Synthetic oligonucleotide
aagggcgaguugcagucag

SEQ ID NO: 1544166 - RNA, 19 nt, Artificial Sequence
  Description of Artificial Sequence: Synthetic oligonucleotide
uguaaacucauuggauucu

SEQ ID NO: 1544167 - RNA, 19 nt, Artificial Sequence
  Description of Artificial Sequence: Synthetic oligonucleotide
ucaguuagguccacauccu

SEQ ID NO: 1544168 - RNA, 19 nt, Artificial Sequence
  Description of Artificial Sequence: Synthetic oligonucleotide
uaugugguguccucugaga

SEQ ID NO: 1544169 - RNA, 19 nt, Artificial Sequence
  Description of Artificial Sequence: Synthetic oligonucleotide
aggagucccacuuguaugu

SEQ ID NO: 1544170 - RNA, 19 nt, Artificial Sequence
  Description of Artificial Sequence: Synthetic oligonucleotide
acgccaauuaaaaugguca

SEQ ID NO: 1544171 - RNA, 19 nt, Artificial Sequence
  Description of Artificial Sequence: Synthetic oligonucleotide
ugucuucaaaggcccgagg

SEQ ID NO: 1544172 - RNA, 19 nt, Artificial Sequence
  Description of Artificial Sequence: Synthetic oligonucleotide
ccucaaaagaggaagauga

SEQ ID NO: 1544173 - RNA, 19 nt, Artificial Sequence
  Description of Artificial Sequence: Synthetic oligonucleotide
uaguuagguuuugagacac

SEQ ID NO: 1544174 - RNA, 19 nt, Artificial Sequence
  Description of Artificial Sequence: Synthetic oligonucleotide
cugauucgggacuucuugc

SEQ ID NO: 1544175 - RNA, 19 nt, Artificial Sequence
  Description of Artificial Sequence: Synthetic oligonucleotide
guugccauuaaggacucug

SEQ ID NO: 1544176 - RNA, 19 nt, Artificial Sequence
  Description of Artificial Sequence: Synthetic oligonucleotide
uagguugaaucgaugggau

SEQ ID NO: 1544177 - RNA, 19 nt, Artificial Sequence
  Description of Artificial Sequence: Synthetic oligonucleotide
aaucgaugggauccaccca

SEQ ID NO: 1544178 - RNA, 19 nt, Artificial Sequence
  Description of Artificial Sequence: Synthetic oligonucleotide
aacuccuugguuggacuuc

SEQ ID NO: 1544179 - RNA, 19 nt, Artificial Sequence
  Description of Artificial Sequence: Synthetic oligonucleotide
uuagguuuugagacacaaa

SEQ ID NO: 1544180 - RNA, 19 nt, Artificial Sequence
  Description of Artificial Sequence: Synthetic oligonucleotide
uguugguccccauguaaga

SEQ ID NO: 1544181 - RNA, 19 nt, Artificial Sequence
  Description of Artificial Sequence: Synthetic oligonucleotide
gguucaguucggcuuaagg

SEQ ID NO: 1544182 - RNA, 19 nt, Artificial Sequence
  Description of Artificial Sequence: Synthetic oligonucleotide
ucuguaugucauagacgcc

SEQ ID NO: 1544183 - RNA, 19 nt, Artificial Sequence
  Description of Artificial Sequence: Synthetic oligonucleotide
gaccuauacgcaaucaguc

SEQ ID NO: 1544184 - RNA, 19 nt, Artificial Sequence
  Description of Artificial Sequence: Synthetic oligonucleotide
auuuguaaacucauuggau

SEQ ID NO: 1544185 - RNA, 19 nt, Artificial Sequence
  Description of Artificial Sequence: Synthetic oligonucleotide
uacugauagguugaaucga

SEQ ID NO: 1544186 - RNA, 19 nt, Artificial Sequence
  Description of Artificial Sequence: Synthetic oligonucleotide
gcgaguugcagucagaguc

SEQ ID NO: 1544187 - RNA, 19 nt, Artificial Sequence
  Description of Artificial Sequence: Synthetic oligonucleotide
accaacuuaguuguuacau

SEQ ID NO: 1544188 - RNA, 19 nt, Artificial Sequence
  Description of Artificial Sequence: Synthetic oligonucleotide
aucgaugggauccacccaa

SEQ ID NO: 1544189 - RNA, 19 nt, Artificial Sequence
  Description of Artificial Sequence: Synthetic oligonucleotide
aaauggucacacacugaag

SEQ ID NO: 1544190 - RNA, 19 nt, Artificial Sequence
  Description of Artificial Sequence: Synthetic oligonucleotide
auacgcaaucaguccuccc

SEQ ID NO: 1544191 - RNA, 19 nt, Artificial Sequence
  Description of Artificial Sequence: Synthetic oligonucleotide
aggguuuccugcugccggc

SEQ ID NO: 1544192 - RNA, 19 nt, Artificial Sequence
  Description of Artificial Sequence: Synthetic oligonucleotide
uggucacacacugaagccc

SEQ ID NO: 1544193 - RNA, 19 nt, Artificial Sequence
  Description of Artificial Sequence: Synthetic oligonucleotide
ucagugugaguuucacugu

SEQ ID NO: 1544194 - RNA, 19 nt, Artificial Sequence
  Description of Artificial Sequence: Synthetic oligonucleotide
aagauagcgauaacaggaa

SEQ ID NO: 1544195 - RNA, 19 nt, Artificial Sequence
  Description of Artificial Sequence: Synthetic oligonucleotide
agauccaccccggaagcac

SEQ ID NO: 1544196 - RNA, 19 nt, Artificial Sequence
  Description of Artificial Sequence: Synthetic oligonucleotide
uugugucuucaaaggcccg

SEQ ID NO: 1544197 - RNA, 19 nt, Artificial Sequence
  Description of Artificial Sequence: Synthetic oligonucleotide
uguaugucauagacgccaa

SEQ ID NO: 1544198 - RNA, 19 nt, Artificial Sequence
  Description of Artificial Sequence: Synthetic oligonucleotide
gaacguuaaccaacaagac

SEQ ID NO: 1544199 - RNA, 19 nt, Artificial Sequence
  Description of Artificial Sequence: Synthetic oligonucleotide
ugacaucgcggcuuugaug

SEQ ID NO: 1544200 - RNA, 19 nt, Artificial Sequence
  Description of Artificial Sequence: Synthetic oligonucleotide
uaguacugucccuuccacc

SEQ ID NO: 1544201 - RNA, 19 nt, Artificial Sequence
  Description of Artificial Sequence: Synthetic oligonucleotide
agguugaaucgaugggauc

SEQ ID NO: 1544202 - RNA, 19 nt, Artificial Sequence
  Description of Artificial Sequence: Synthetic oligonucleotide
guaguuagguuuugagaca

SEQ ID NO: 1544203 - RNA, 19 nt, Artificial Sequence
  Description of Artificial Sequence: Synthetic oligonucleotide
ucaaccaggccuugcacua

SEQ ID NO: 1544204 - RNA, 19 nt, Artificial Sequence
  Description of Artificial Sequence: Synthetic oligonucleotide
uauacgcaaucaguccucc

SEQ ID NO: 1544205 - RNA, 19 nt, Artificial Sequence
  Description of Artificial Sequence: Synthetic oligonucleotide
aaacuccuugguuggacuu

SEQ ID NO: 1544206 - RNA, 19 nt, Artificial Sequence
  Description of Artificial Sequence: Synthetic oligonucleotide
cagguccaaguuuucagug

SEQ ID NO: 1544207 - RNA, 19 nt, Artificial Sequence
  Description of Artificial Sequence: Synthetic oligonucleotide
caaugcuucggaugccagc

SEQ ID NO: 1544208 - RNA, 19 nt, Artificial Sequence
  Description of Artificial Sequence: Synthetic oligonucleotide
uccuauguuugugucuuca

SEQ ID NO: 1544209 - RNA, 19 nt, Artificial Sequence
  Description of Artificial Sequence: Synthetic oligonucleotide
cuauacgcaaucaguccuc

SEQ ID NO: 1544210 - RNA, 19 nt, Artificial Sequence
  Description of Artificial Sequence: Synthetic oligonucleotide
agaugaacguuaaccaaca

SEQ ID NO: 1544211 - RNA, 19 nt, Artificial Sequence
  Description of Artificial Sequence: Synthetic oligonucleotide
uauucgugacaucgcggcu

SEQ ID NO: 1544212 - RNA, 19 nt, Artificial Sequence
  Description of Artificial Sequence: Synthetic oligonucleotide
ccuuagaauggcaugagca

SEQ ID NO: 1544213 - RNA, 19 nt, Artificial Sequence
  Description of Artificial Sequence: Synthetic oligonucleotide
gauucgggacuucuugcca

SEQ ID NO: 1544214 - RNA, 19 nt, Artificial Sequence
  Description of Artificial Sequence: Synthetic oligonucleotide
uucucccaaaucauuugua

SEQ ID NO: 1544215 - RNA, 19 nt, Artificial Sequence
  Description of Artificial Sequence: Synthetic oligonucleotide
uguccagccgauuccugga

SEQ ID NO: 1544216 - RNA, 19 nt, Artificial Sequence
  Description of Artificial Sequence: Synthetic oligonucleotide
agucagaguccuauguuug

SEQ ID NO: 1544217 - RNA, 19 nt, Artificial Sequence
  Description of Artificial Sequence: Synthetic oligonucleotide
uagcgauaacaggaagggg

SEQ ID NO: 1544218 - RNA, 19 nt, Artificial Sequence
  Description of Artificial Sequence: Synthetic oligonucleotide
cugauagguugaaucgaug

SEQ ID NO: 1544219 - RNA, 19 nt, Artificial Sequence
  Description of Artificial Sequence: Synthetic oligonucleotide
uggcagaaccuuuaauaua

SEQ ID NO: 1544220 - RNA, 19 nt, Artificial Sequence
  Description of Artificial Sequence: Synthetic oligonucleotide
ucccacuuguauguggugu

SEQ ID NO: 1544221 - RNA, 19 nt, Artificial Sequence
  Description of Artificial Sequence: Synthetic oligonucleotide
uugguccccauguaagaaa

SEQ ID NO: 1544222 - RNA, 19 nt, Artificial Sequence
  Description of Artificial Sequence: Synthetic oligonucleotide
uccagccgauuccuggacc

SEQ ID NO: 1544223 - RNA, 19 nt, Artificial Sequence
  Description of Artificial Sequence: Synthetic oligonucleotide
ucggcuuaagggcgaguug

SEQ ID NO: 1544224 - RNA, 19 nt, Artificial Sequence
  Description of Artificial Sequence: Synthetic oligonucleotide
uuagaguaguuagguuuug

SEQ ID NO: 1544225 - RNA, 19 nt, Artificial Sequence
  Description of Artificial Sequence: Synthetic oligonucleotide
gacgccaauuaaaaugguc

SEQ ID NO: 1544226 - RNA, 19 nt, Artificial Sequence
  Description of Artificial Sequence: Synthetic oligonucleotide
uaccaacuuaguuguuaca

SEQ ID NO: 1544227 - RNA, 19 nt, Artificial Sequence
  Description of Artificial Sequence: Synthetic oligonucleotide
uagaguaguuagguuuuga

SEQ ID NO: 1544228 - RNA, 19 nt, Artificial Sequence
  Description of Artificial Sequence: Synthetic oligonucleotide
cagcacauccgccaggguc

SEQ ID NO: 1544229 - RNA, 19 nt, Artificial Sequence
  Description of Artificial Sequence: Synthetic oligonucleotide
guuagguuuugagacacaa

SEQ ID NO: 1544230 - RNA, 19 nt, Artificial Sequence
  Description of Artificial Sequence: Synthetic oligonucleotide
gcccauggcccuuagaaug

SEQ ID NO: 1544231 - RNA, 19 nt, Artificial Sequence
  Description of Artificial Sequence: Synthetic oligonucleotide
cuauguuugugucuucaaa

SEQ ID NO: 1544232 - RNA, 19 nt, Artificial Sequence
  Description of Artificial Sequence: Synthetic oligonucleotide
aacuuaguuguuacaugaa

SEQ ID NO: 1544233 - RNA, 19 nt, Artificial Sequence
  Description of Artificial Sequence: Synthetic oligonucleotide
uucacguuggcagaaccuu

SEQ ID NO: 1544234 - RNA, 19 nt, Artificial Sequence
  Description of Artificial Sequence: Synthetic oligonucleotide
auucgggacuucuugccaa

SEQ ID NO: 1544235 - RNA, 19 nt, Artificial Sequence
  Description of Artificial Sequence: Synthetic oligonucleotide
cuggugcaccaccuuagcc

SEQ ID NO: 1544236 - RNA, 19 nt, Artificial Sequence
  Description of Artificial Sequence: Synthetic oligonucleotide
caugcccgggcgauguuag

SEQ ID NO: 1544237 - RNA, 19 nt, Artificial Sequence
  Description of Artificial Sequence: Synthetic oligonucleotide
ggccuugcacuacacagag

SEQ ID NO: 1544238 - RNA, 19 nt, Artificial Sequence
  Description of Artificial Sequence: Synthetic oligonucleotide
agaauggcaugagcagcac

SEQ ID NO: 1544239 - RNA, 19 nt, Artificial Sequence
  Description of Artificial Sequence: Synthetic oligonucleotide
cuuuagggauggagaacug

SEQ ID NO: 1544240 - RNA, 19 nt, Artificial Sequence
  Description of Artificial Sequence: Synthetic oligonucleotide
uuccuggaccuauacgcaa

SEQ ID NO: 1544241 - RNA, 19 nt, Artificial Sequence
  Description of Artificial Sequence: Synthetic oligonucleotide
acugauagguugaaucgau

SEQ ID NO: 1544242 - RNA, 19 nt, Artificial Sequence
  Description of Artificial Sequence: Synthetic oligonucleotide
caccuucacauauucguga

SEQ ID NO: 1544243 - RNA, 19 nt, Artificial Sequence
  Description of Artificial Sequence: Synthetic oligonucleotide
uccuggaccuauacgcaau

SEQ ID NO: 1544244 - RNA, 19 nt, Artificial Sequence
  Description of Artificial Sequence: Synthetic oligonucleotide
uguuagcagccuucucgga

SEQ ID NO: 1544245 - RNA, 19 nt, Artificial Sequence
  Description of Artificial Sequence: Synthetic oligonucleotide
aauggauguugguccccau

SEQ ID NO: 1544246 - RNA, 19 nt, Artificial Sequence
  Description of Artificial Sequence: Synthetic oligonucleotide
aucaggggcaugccugucu

SEQ ID NO: 1544247 - RNA, 19 nt, Artificial Sequence
  Description of Artificial Sequence: Synthetic oligonucleotide
guuagguccacauccuggu

SEQ ID NO: 1544248 - RNA, 19 nt, Artificial Sequence
  Description of Artificial Sequence: Synthetic oligonucleotide
ugugaguuucacuguuguu

SEQ ID NO: 1544249 - RNA, 19 nt, Artificial Sequence
  Description of Artificial Sequence: Synthetic oligonucleotide
aaaugucaaccaggccuug

SEQ ID NO: 1544250 - RNA, 19 nt, Artificial Sequence
  Description of Artificial Sequence: Synthetic oligonucleotide
uucggcuuaagggcgaguu

SEQ ID NO: 1544251 - RNA, 19 nt, Artificial Sequence
  Description of Artificial Sequence: Synthetic oligonucleotide
accaccuuagccaaugcuu

SEQ ID NO: 1544252 - RNA, 19 nt, Artificial Sequence
  Description of Artificial Sequence: Synthetic oligonucleotide
ccaacuuaguuguuacaug

SEQ ID NO: 1544253 - RNA, 19 nt, Artificial Sequence
  Description of Artificial Sequence: Synthetic oligonucleotide
gaggcucuuguagccagcc

SEQ ID NO: 1544254 - RNA, 19 nt, Artificial Sequence
  Description of Artificial Sequence: Synthetic oligonucleotide
gaauggauguuggucccca

SEQ ID NO: 1544255 - RNA, 19 nt, Artificial Sequence
  Description of Artificial Sequence: Synthetic oligonucleotide
gucuucaaaggcccgaggu

SEQ ID NO: 1544256 - RNA, 19 nt, Artificial Sequence
  Description of Artificial Sequence: Synthetic oligonucleotide
ucacguuggcagaaccuuu

SEQ ID NO: 1544257 - RNA, 19 nt, Artificial Sequence
  Description of Artificial Sequence: Synthetic oligonucleotide
uccccuaagccuggaaacu

SEQ ID NO: 1544258 - RNA, 19 nt, Artificial Sequence
  Description of Artificial Sequence: Synthetic oligonucleotide
ggucuugaaaucuguugca

SEQ ID NO: 1544259 - RNA, 19 nt, Artificial Sequence
  Description of Artificial Sequence: Synthetic oligonucleotide
augugauacagcagcugug

SEQ ID NO: 1544260 - RNA, 19 nt, Artificial Sequence
  Description of Artificial Sequence: Synthetic oligonucleotide
cucaaaagaggaagaugaa

SEQ ID NO: 1544261 - RNA, 19 nt, Artificial Sequence
  Description of Artificial Sequence: Synthetic oligonucleotide
agucccacuuguauguggu

SEQ ID NO: 1544262 - RNA, 19 nt, Artificial Sequence
  Description of Artificial Sequence: Synthetic oligonucleotide
cuuaagggcgaguugcagu

SEQ ID NO: 1544263 - RNA, 19 nt, Artificial Sequence
  Description of Artificial Sequence: Synthetic oligonucleotide
gaugaacguuaaccaacaa

SEQ ID NO: 1544264 - RNA, 19 nt, Artificial Sequence
  Description of Artificial Sequence: Synthetic oligonucleotide
gcgggagaacuccaggucc

SEQ ID NO: 1544265 - RNA, 19 nt, Artificial Sequence
  Description of Artificial Sequence: Synthetic oligonucleotide
cacggagcaguuccuugag

SEQ ID NO: 1544266 - RNA, 19 nt, Artificial Sequence
  Description of Artificial Sequence: Synthetic oligonucleotide
accuuagaguaguuagguu

SEQ ID NO: 1544267 - RNA, 19 nt, Artificial Sequence
  Description of Artificial Sequence: Synthetic oligonucleotide
ugcccgggcgauguuagca

SEQ ID NO: 1544268 - RNA, 19 nt, Artificial Sequence
  Description of Artificial Sequence: Synthetic oligonucleotide
gaaacuuauucuccauguu

SEQ ID NO: 1544269 - RNA, 19 nt, Artificial Sequence
  Description of Artificial Sequence: Synthetic oligonucleotide
uccagagaggggucaguua

SEQ ID NO: 1544270 - RNA, 19 nt, Artificial Sequence
  Description of Artificial Sequence: Synthetic oligonucleotide
uucgugacaucgcggcuuu

SEQ ID NO: 1544271 - RNA, 19 nt, Artificial Sequence
  Description of Artificial Sequence: Synthetic oligonucleotide
auucgugacaucgcggcuu

SEQ ID NO: 1544272 - RNA, 19 nt, Artificial Sequence
  Description of Artificial Sequence: Synthetic oligonucleotide
auauacugauagguugaau

SEQ ID NO: 1544273 - RNA, 19 nt, Artificial Sequence
  Description of Artificial Sequence: Synthetic oligonucleotide
aaucuguugcaaacuucuu

SEQ ID NO: 1544274 - RNA, 19 nt, Artificial Sequence
  Description of Artificial Sequence: Synthetic oligonucleotide
aaagggcgggagaacucca

SEQ ID NO: 1544275 - RNA, 19 nt, Artificial Sequence
  Description of Artificial Sequence: Synthetic oligonucleotide
ucgaugggauccacccaaa

SEQ ID NO: 1544276 - RNA, 19 nt, Artificial Sequence
  Description of Artificial Sequence: Synthetic oligonucleotide
gucuugaaaucuguugcaa

SEQ ID NO: 1544277 - RNA, 19 nt, Artificial Sequence
  Description of Artificial Sequence: Synthetic oligonucleotide
cugcgggaugcugaucucc

SEQ ID NO: 1544278 - RNA, 19 nt, Artificial Sequence
  Description of Artificial Sequence: Synthetic oligonucleotide
augcccgggcgauguuagc

SEQ ID NO: 1544279 - RNA, 19 nt, Artificial Sequence
  Description of Artificial Sequence: Synthetic oligonucleotide
cacauaaugagaagauguu

SEQ ID NO: 1544280 - RNA, 19 nt, Artificial Sequence
  Description of Artificial Sequence: Synthetic oligonucleotide
acgcaaucaguccucccuu

SEQ ID NO: 1544281 - RNA, 19 nt, Artificial Sequence
  Description of Artificial Sequence: Synthetic oligonucleotide
gggcaugccugucuguaug

SEQ ID NO: 1544282 - RNA, 19 nt, Artificial Sequence
  Description of Artificial Sequence: Synthetic oligonucleotide
gacugcaguucuacaguga

SEQ ID NO: 1544283 - RNA, 19 nt, Artificial Sequence
  Description of Artificial Sequence: Synthetic oligonucleotide
cgaguugcagucagagucc

SEQ ID NO: 1544284 - RNA, 19 nt, Artificial Sequence
  Description of Artificial Sequence: Synthetic oligonucleotide
cauagacgccaauuaaaau

SEQ ID NO: 1544285 - RNA, 19 nt, Artificial Sequence
  Description of Artificial Sequence: Synthetic oligonucleotide
aguucggcuuaagggcgag

SEQ ID NO: 1544286 - RNA, 19 nt, Artificial Sequence
  Description of Artificial Sequence: Synthetic oligonucleotide
acguuggcagaaccuuuaa

SEQ ID NO: 1544287 - RNA, 19 nt, Artificial Sequence
  Description of Artificial Sequence: Synthetic oligonucleotide
caccccggaagcaccuuug

SEQ ID NO: 1544288 - RNA, 19 nt, Artificial Sequence
  Description of Artificial Sequence: Synthetic oligonucleotide
aucgcggcuuugauggucu

SEQ ID NO: 1544289 - RNA, 19 nt, Artificial Sequence
  Description of Artificial Sequence: Synthetic oligonucleotide
gggcgaguugcagucagag

SEQ ID NO: 1544290 - RNA, 19 nt, Artificial Sequence
  Description of Artificial Sequence: Synthetic oligonucleotide
gguuggacuucacguuggc

SEQ ID NO: 1544291 - RNA, 19 nt, Artificial Sequence
  Description of Artificial Sequence: Synthetic oligonucleotide
cgccaauuaaaauggucac

SEQ ID NO: 1544292 - RNA, 19 nt, Artificial Sequence
  Description of Artificial Sequence: Synthetic oligonucleotide
gacuucacguuggcagaac

SEQ ID NO: 1544293 - RNA, 19 nt, Artificial Sequence
  Description of Artificial Sequence: Synthetic oligonucleotide
cuucacguuggcagaaccu

SEQ ID NO: 1544294 - RNA, 19 nt, Artificial Sequence
  Description of Artificial Sequence: Synthetic oligonucleotide
gucccacuuguauguggug

SEQ ID NO: 1544295 - RNA, 19 nt, Artificial Sequence
  Description of Artificial Sequence: Synthetic oligonucleotide
cacguuggcagaaccuuua

SEQ ID NO: 1544296 - RNA, 19 nt, Artificial Sequence
  Description of Artificial Sequence: Synthetic oligonucleotide
caccuuagaguaguuaggu

SEQ ID NO: 1544297 - RNA, 19 nt, Artificial Sequence
  Description of Artificial Sequence: Synthetic oligonucleotide
cagccuucucggagacacg

SEQ ID NO: 1544298 - RNA, 19 nt, Artificial Sequence
  Description of Artificial Sequence: Synthetic oligonucleotide
cgauuccuggaccuauacg

SEQ ID NO: 1544299 - RNA, 19 nt, Artificial Sequence
  Description of Artificial Sequence: Synthetic oligonucleotide
aguuagguuuugagacaca

SEQ ID NO: 1544300 - RNA, 19 nt, Artificial Sequence
  Description of Artificial Sequence: Synthetic oligonucleotide
caucgcggcuuugaugguc

SEQ ID NO: 1544301 - RNA, 19 nt, Artificial Sequence
  Description of Artificial Sequence: Synthetic oligonucleotide
gguguccucugagaagaug

SEQ ID NO: 1544302 - RNA, 19 nt, Artificial Sequence
  Description of Artificial Sequence: Synthetic oligonucleotide
ggaccuauacgcaaucagu

SEQ ID NO: 1544303 - RNA, 19 nt, Artificial Sequence
  Description of Artificial Sequence: Synthetic oligonucleotide
cccacuuguaugugguguc

SEQ ID NO: 1544304 - RNA, 19 nt, Artificial Sequence
  Description of Artificial Sequence: Synthetic oligonucleotide
ggaauggauguuggucccc

SEQ ID NO: 1544305 - RNA, 19 nt, Artificial Sequence
  Description of Artificial Sequence: Synthetic oligonucleotide
agacgccaauuaaaauggu

SEQ ID NO: 1544306 - RNA, 19 nt, Artificial Sequence
  Description of Artificial Sequence: Synthetic oligonucleotide
uccguggacugcaguucua

SEQ ID NO: 1544307 - RNA, 19 nt, Artificial Sequence
  Description of Artificial Sequence: Synthetic oligonucleotide
acaucgcggcuuugauggu

SEQ ID NO: 1544308 - RNA, 19 nt, Artificial Sequence
  Description of Artificial Sequence: Synthetic oligonucleotide
cuggaccuauacgcaauca

SEQ ID NO: 1544309 - RNA, 19 nt, Artificial Sequence
  Description of Artificial Sequence: Synthetic oligonucleotide
agccgauuccuggaccuau

SEQ ID NO: 1544310 - RNA, 19 nt, Artificial Sequence
  Description of Artificial Sequence: Synthetic oligonucleotide
gcccgggcgauguuagcag

SEQ ID NO: 1544311 - RNA, 19 nt, Artificial Sequence
  Description of Artificial Sequence: Synthetic oligonucleotide
caguucggcuuaagggcga

SEQ ID NO: 1544312 - RNA, 19 nt, Artificial Sequence
  Description of Artificial Sequence: Synthetic oligonucleotide
ccgauuccuggaccuauac

SEQ ID NO: 1544313 - RNA, 19 nt, Artificial Sequence
  Description of Artificial Sequence: Synthetic oligonucleotide
cuccuugguuggacuucac

SEQ ID NO: 1544314 - RNA, 19 nt, Artificial Sequence
  Description of Artificial Sequence: Synthetic oligonucleotide
uguugccauuaaggacucu

SEQ ID NO: 1544315 - RNA, 19 nt, Artificial Sequence
  Description of Artificial Sequence: Synthetic oligonucleotide
guaaacucauuggauucuu

SEQ ID NO: 1544316 - RNA, 19 nt, Artificial Sequence
  Description of Artificial Sequence: Synthetic oligonucleotide
ugccggcaugcccgggcga

SEQ ID NO: 1544317 - RNA, 19 nt, Artificial Sequence
  Description of Artificial Sequence: Synthetic oligonucleotide
gaguugcagucagaguccu

SEQ ID NO: 1544318 - RNA, 19 nt, Artificial Sequence
  Description of Artificial Sequence: Synthetic oligonucleotide
ccuggaccuauacgcaauc

SEQ ID NO: 1544319 - RNA, 19 nt, Artificial Sequence
  Description of Artificial Sequence: Synthetic oligonucleotide
ugccagcauguugccauua

SEQ ID NO: 1544320 - RNA, 19 nt, Artificial Sequence
  Description of Artificial Sequence: Synthetic oligonucleotide
agcccugauucgggacuuc

SEQ ID NO: 1544321 - RNA, 19 nt, Artificial Sequence
  Description of Artificial Sequence: Synthetic oligonucleotide
gugacaucgcggcuuugau

SEQ ID NO: 1544322 - RNA, 19 nt, Artificial Sequence
  Description of Artificial Sequence: Synthetic oligonucleotide
caccaccuuagccaaugcu

SEQ ID NO: 1544323 - RNA, 19 nt, Artificial Sequence
  Description of Artificial Sequence: Synthetic oligonucleotide
cccaaaucauuuguaaacu

SEQ ID NO: 1544324 - RNA, 19 nt, Artificial Sequence
  Description of Artificial Sequence: Synthetic oligonucleotide
ccgcccauggcccuuagaa

SEQ ID NO: 1544325 - RNA, 19 nt, Artificial Sequence
  Description of Artificial Sequence: Synthetic oligonucleotide
cagugugaguuucacuguu

SEQ ID NO: 1544326 - RNA, 19 nt, Artificial Sequence
  Description of Artificial Sequence: Synthetic oligonucleotide
guaugucauagacgccaau

SEQ ID NO: 1544327 - RNA, 19 nt, Artificial Sequence
  Description of Artificial Sequence: Synthetic oligonucleotide
cccgggcgauguuagcagc

SEQ ID NO: 1544328 - RNA, 19 nt, Artificial Sequence
  Description of Artificial Sequence: Synthetic oligonucleotide
gagacacggagcaguuccu

SEQ ID NO: 1544329 - RNA, 19 nt, Artificial Sequence
  Description of Artificial Sequence: Synthetic oligonucleotide
cuaagccuggaaacuuauu

SEQ ID NO: 1544330 - RNA, 19 nt, Artificial Sequence
  Description of Artificial Sequence: Synthetic oligonucleotide
ugacucccaucaggggcau

SEQ ID NO: 1544331 - RNA, 19 nt, Artificial Sequence
  Description of Artificial Sequence: Synthetic oligonucleotide
caaucaguccucccuuguu

SEQ ID NO: 1544332 - RNA, 19 nt, Artificial Sequence
  Description of Artificial Sequence: Synthetic oligonucleotide
caucaggggcaugccuguc

SEQ ID NO: 1544333 - RNA, 19 nt, Artificial Sequence
  Description of Artificial Sequence: Synthetic oligonucleotide
ccagagauccaccccggaa

SEQ ID NO: 1544334 - RNA, 19 nt, Artificial Sequence
  Description of Artificial Sequence: Synthetic oligonucleotide
gccagcauguugccauuaa

SEQ ID NO: 1544335 - RNA, 19 nt, Artificial Sequence
  Description of Artificial Sequence: Synthetic oligonucleotide
ucgugacaucgcggcuuug

SEQ ID NO: 1544336 - RNA, 19 nt, Artificial Sequence
  Description of Artificial Sequence: Synthetic oligonucleotide
gcccagagauccaccccgg

SEQ ID NO: 1544337 - RNA, 19 nt, Artificial Sequence
  Description of Artificial Sequence: Synthetic oligonucleotide
ccguggacugcaguucuac

SEQ ID NO: 1544338 - RNA, 19 nt, Artificial Sequence
  Description of Artificial Sequence: Synthetic oligonucleotide
ggcaaguccagcccugauu

SEQ ID NO: 1544339 - RNA, 19 nt, Artificial Sequence
  Description of Artificial Sequence: Synthetic oligonucleotide
ggcaugccugucuguaugu

SEQ ID NO: 1544340 - RNA, 19 nt, Artificial Sequence
  Description of Artificial Sequence: Synthetic oligonucleotide
ucgcggcuuugauggucuc

SEQ ID NO: 1544341 - RNA, 19 nt, Artificial Sequence
  Description of Artificial Sequence: Synthetic oligonucleotide
ccuccguggacugcaguuc

SEQ ID NO: 1544342 - RNA, 19 nt, Artificial Sequence
  Description of Artificial Sequence: Synthetic oligonucleotide
ccgccagggucuugaaauc

SEQ ID NO: 1544343 - RNA, 19 nt, Artificial Sequence
  Description of Artificial Sequence: Synthetic oligonucleotide
ccuuccaccuuagaguagu

SEQ ID NO: 1544344 - RNA, 19 nt, Artificial Sequence
  Description of Artificial Sequence: Synthetic oligonucleotide
gcagggaauggauguuggu

SEQ ID NO: 1544345 - RNA, 19 nt, Artificial Sequence
  Description of Artificial Sequence: Synthetic oligonucleotide
cgagguuuugggugaggca

SEQ ID NO: 1544346 - RNA, 19 nt, Artificial Sequence
  Description of Artificial Sequence: Synthetic oligonucleotide
ggcgaguugcagucagagu

SEQ ID NO: 1544347 - RNA, 19 nt, Artificial Sequence
  Description of Artificial Sequence: Synthetic oligonucleotide
cguuaaccaacaagacaaa

SEQ ID NO: 1544348 - RNA, 19 nt, Artificial Sequence
  Description of Artificial Sequence: Synthetic oligonucleotide
uccaccccggaagcaccuu

SEQ ID NO: 1544349 - RNA, 19 nt, Artificial Sequence
  Description of Artificial Sequence: Synthetic oligonucleotide
ccagccgauuccuggaccu

SEQ ID NO: 1544350 - RNA, 19 nt, Artificial Sequence
  Description of Artificial Sequence: Synthetic oligonucleotide
gcgauaacaggaagggguu

SEQ ID NO: 1544351 - RNA, 19 nt, Artificial Sequence
  Description of Artificial Sequence: Synthetic oligonucleotide
ccugcgggaugcugaucuc

SEQ ID NO: 1544352 - RNA, 19 nt, Artificial Sequence
  Description of Artificial Sequence: Synthetic oligonucleotide
cgugacaucgcggcuuuga

SEQ ID NO: 1544353 - RNA, 19 nt, Artificial Sequence
  Description of Artificial Sequence: Synthetic oligonucleotide
gcagaaccuuuaauauacu

SEQ ID NO: 1544354 - RNA, 19 nt, Artificial Sequence
  Description of Artificial Sequence: Synthetic oligonucleotide
cguggacugcaguucuaca

SEQ ID NO: 1544355 - RNA, 19 nt, Artificial Sequence
  Description of Artificial Sequence: Synthetic oligonucleotide
ccagcccugauucgggacu

SEQ ID NO: 1544356 - RNA, 19 nt, Artificial Sequence
  Description of Artificial Sequence: Synthetic oligonucleotide
cugagcaguucugcuguuu

SEQ ID NO: 1544357 - RNA, 19 nt, Artificial Sequence
  Description of Artificial Sequence: Synthetic oligonucleotide
gcggcuuugauggucucuu

SEQ ID NO: 1544358 - RNA, 19 nt, Artificial Sequence
  Description of Artificial Sequence: Synthetic oligonucleotide
cuucggaugccagcauguu

SEQ ID NO: 1544359 - RNA, 19 nt, Artificial Sequence
  Description of Artificial Sequence: Synthetic oligonucleotide
gcaugcccgggcgauguua

SEQ ID NO: 1544360 - RNA, 19 nt, Artificial Sequence
  Description of Artificial Sequence: Synthetic oligonucleotide
gcccgagguuuugggugag

SEQ ID NO: 1544361 - RNA, 19 nt, Artificial Sequence
  Description of Artificial Sequence: Synthetic oligonucleotide
guucggcuuaagggcgagu

SEQ ID NO: 1544362 - RNA, 19 nt, Artificial Sequence
  Description of Artificial Sequence: Synthetic oligonucleotide
caggggcaugccugucugu

SEQ ID NO: 1544363 - RNA, 19 nt, Artificial Sequence
  Description of Artificial Sequence: Synthetic oligonucleotide
cagccgauuccuggaccua

SEQ ID NO: 1544364 - RNA, 19 nt, Artificial Sequence
  Description of Artificial Sequence: Synthetic oligonucleotide
gccgauuccuggaccuaua

SEQ ID NO: 1544365 - RNA, 19 nt, Artificial Sequence
  Description of Artificial Sequence: Synthetic oligonucleotide
gggcgauguuagcagccuu

SEQ ID NO: 1544366 - RNA, 19 nt, Artificial Sequence
  Description of Artificial Sequence: Synthetic oligonucleotide
cguuggcagaaccuuuaau

SEQ ID NO: 1544367 - RNA, 19 nt, Artificial Sequence
  Description of Artificial Sequence: Synthetic oligonucleotide
cagcccugauucgggacuu

SEQ ID NO: 1544368 - RNA, 19 nt, Artificial Sequence
  Description of Artificial Sequence: Synthetic oligonucleotide
ccggcaugcccgggcgaug

SEQ ID NO: 1544369 - RNA, 19 nt, Artificial Sequence
  Description of Artificial Sequence: Synthetic oligonucleotide
ccccuaagccuggaaacuu

SEQ ID NO: 1544370 - RNA, 19 nt, Artificial Sequence
  Description of Artificial Sequence: Synthetic oligonucleotide
cgaugggauccacccaaau

SEQ ID NO: 1544371 - RNA, 19 nt, Artificial Sequence
  Description of Artificial Sequence: Synthetic oligonucleotide
gccggcaugcccgggcgau

SEQ ID NO: 1544372 - RNA, 19 nt, Artificial Sequence
  Description of Artificial Sequence: Synthetic oligonucleotide
ggcaugcccgggcgauguu

SEQ ID NO: 1544373 - RNA, 19 nt, Artificial Sequence
  Description of Artificial Sequence: Synthetic oligonucleotide
cggcaugcccgggcgaugu

SEQ ID NO: 1544374 - RNA, 19 nt, Artificial Sequence
  Description of Artificial Sequence: Synthetic oligonucleotide
aauauuaggaauuaugucu

SEQ ID NO: 1544375 - RNA, 19 nt, Artificial Sequence
  Description of Artificial Sequence: Synthetic oligonucleotide
uauuauuucgucaagcucu

SEQ ID NO: 1544376 - RNA, 19 nt, Artificial Sequence
  Description of Artificial Sequence: Synthetic oligonucleotide
augauaauuuguuucaugg

SEQ ID NO: 1544377 - RNA, 19 nt, Artificial Sequence
  Description of Artificial Sequence: Synthetic oligonucleotide
uuugcuacacauauuaaug

SEQ ID NO: 1544378 - RNA, 19 nt, Artificial Sequence
  Description of Artificial Sequence: Synthetic oligonucleotide
cucacggugauuuagaagc

SEQ ID NO: 1544379 - RNA, 19 nt, Artificial Sequence
  Description of Artificial Sequence: Synthetic oligonucleotide
aguuaaaaccuccaguuuc

SEQ ID NO: 1544380 - RNA, 19 nt, Artificial Sequence
  Description of Artificial Sequence: Synthetic oligonucleotide
ugcucaaaaucuuugaugc

SEQ ID NO: 1544381 - RNA, 19 nt, Artificial Sequence
  Description of Artificial Sequence: Synthetic oligonucleotide
aaagugaacacuuugcuuu

SEQ ID NO: 1544382 - RNA, 19 nt, Artificial Sequence
  Description of Artificial Sequence: Synthetic oligonucleotide
aacacuuugcuuuagucgu

SEQ ID NO: 1544383 - RNA, 19 nt, Artificial Sequence
  Description of Artificial Sequence: Synthetic oligonucleotide
cauacaucucccuagaggc

SEQ ID NO: 1544384 - RNA, 19 nt, Artificial Sequence
  Description of Artificial Sequence: Synthetic oligonucleotide
auacuuuucacacuccaac

SEQ ID NO: 1544385 - RNA, 19 nt, Artificial Sequence
  Description of Artificial Sequence: Synthetic oligonucleotide
ugcaauauuaggaauuaug

SEQ ID NO: 1544386 - RNA, 19 nt, Artificial Sequence
  Description of Artificial Sequence: Synthetic oligonucleotide
gaacacuuugcuuuagucg

SEQ ID NO: 1544387 - RNA, 19 nt, Artificial Sequence
  Description of Artificial Sequence: Synthetic oligonucleotide
ucuaugagguaucuguagg

SEQ ID NO: 1544388 - RNA, 19 nt, Artificial Sequence
  Description of Artificial Sequence: Synthetic oligonucleotide
auacauaucuucucuaguc

SEQ ID NO: 1544389 - RNA, 19 nt, Artificial Sequence
  Description of Artificial Sequence: Synthetic oligonucleotide
uuuuauaauggucucugga

SEQ ID NO: 1544390 - RNA, 19 nt, Artificial Sequence
  Description of Artificial Sequence: Synthetic oligonucleotide
ggaauuaugucuuuccugg

SEQ ID NO: 1544391 - RNA, 19 nt, Artificial Sequence
  Description of Artificial Sequence: Synthetic oligonucleotide
ucugauacuuuucacacuc

SEQ ID NO: 1544392 - RNA, 19 nt, Artificial Sequence
  Description of Artificial Sequence: Synthetic oligonucleotide
uccuuauuuaaauugcuga

SEQ ID NO: 1544393 - RNA, 19 nt, Artificial Sequence
  Description of Artificial Sequence: Synthetic oligonucleotide
uucuaguucaguaaugcgu

SEQ ID NO: 1544394 - RNA, 19 nt, Artificial Sequence
  Description of Artificial Sequence: Synthetic oligonucleotide
ucguaaaugucuaaccuug

SEQ ID NO: 1544395 - RNA, 19 nt, Artificial Sequence
  Description of Artificial Sequence: Synthetic oligonucleotide
guaaguuguucucagaaug

SEQ ID NO: 1544396 - RNA, 19 nt, Artificial Sequence
  Description of Artificial Sequence: Synthetic oligonucleotide
agugaaucaaucuuggaau

SEQ ID NO: 1544397 - RNA, 19 nt, Artificial Sequence
  Description of Artificial Sequence: Synthetic oligonucleotide
uuaggaauuaugucuuucc

SEQ ID NO: 1544398 - RNA, 19 nt, Artificial Sequence
  Description of Artificial Sequence: Synthetic oligonucleotide
auuuaaauugcugaugucu

SEQ ID NO: 1544399 - RNA, 19 nt, Artificial Sequence
  Description of Artificial Sequence: Synthetic oligonucleotide
uucaauuugauuugcucca

SEQ ID NO: 1544400 - RNA, 19 nt, Artificial Sequence
  Description of Artificial Sequence: Synthetic oligonucleotide
uuuauaauggucucuggau

SEQ ID NO: 1544401 - RNA, 19 nt, Artificial Sequence
  Description of Artificial Sequence: Synthetic oligonucleotide
aacaauguuggcuugggua

SEQ ID NO: 1544402 - RNA, 19 nt, Artificial Sequence
  Description of Artificial Sequence: Synthetic oligonucleotide
aguucugugcuucuaguuc

SEQ ID NO: 1544403 - RNA, 19 nt, Artificial Sequence
  Description of Artificial Sequence: Synthetic oligonucleotide
ucauacauaucuucucuag

SEQ ID NO: 1544404 - RNA, 19 nt, Artificial Sequence
  Description of Artificial Sequence: Synthetic oligonucleotide
uauaauggucucuggauga

SEQ ID NO: 1544405 - RNA, 19 nt, Artificial Sequence
  Description of Artificial Sequence: Synthetic oligonucleotide
agaaauucagccacuuugc

SEQ ID NO: 1544406 - RNA, 19 nt, Artificial Sequence
  Description of Artificial Sequence: Synthetic oligonucleotide
uguuuuauaauggucucug

SEQ ID NO: 1544407 - RNA, 19 nt, Artificial Sequence
  Description of Artificial Sequence: Synthetic oligonucleotide
aacacuaugccuucguuuu

SEQ ID NO: 1544408 - RNA, 19 nt, Artificial Sequence
  Description of Artificial Sequence: Synthetic oligonucleotide
uagccauaggauaagaauc

SEQ ID NO: 1544409 - RNA, 19 nt, Artificial Sequence
  Description of Artificial Sequence: Synthetic oligonucleotide
ugguucaacagugaauugg

SEQ ID NO: 1544410 - RNA, 19 nt, Artificial Sequence
  Description of Artificial Sequence: Synthetic oligonucleotide
ucucguaaaugucuaaccu

SEQ ID NO: 1544411 - RNA, 19 nt, Artificial Sequence
  Description of Artificial Sequence: Synthetic oligonucleotide
ugauaauuuguuucauggc

SEQ ID NO: 1544412 - RNA, 19 nt, Artificial Sequence
  Description of Artificial Sequence: Synthetic oligonucleotide
uguacuaagcuggagcucc

SEQ ID NO: 1544413 - RNA, 19 nt, Artificial Sequence
  Description of Artificial Sequence: Synthetic oligonucleotide
aauuggcucugucaagcuc

SEQ ID NO: 1544414 - RNA, 19 nt, Artificial Sequence
  Description of Artificial Sequence: Synthetic oligonucleotide
ucucccuagaggcacuucg

SEQ ID NO: 1544415 - RNA, 19 nt, Artificial Sequence
  Description of Artificial Sequence: Synthetic oligonucleotide
uauucuguuuuauaauggu

SEQ ID NO: 1544416 - RNA, 19 nt, Artificial Sequence
  Description of Artificial Sequence: Synthetic oligonucleotide
uuauuauuucgucaagcuc

SEQ ID NO: 1544417 - RNA, 19 nt, Artificial Sequence
  Description of Artificial Sequence: Synthetic oligonucleotide
uuagucgucuuuuagccgu

SEQ ID NO: 1544418 - RNA, 19 nt, Artificial Sequence
  Description of Artificial Sequence: Synthetic oligonucleotide
uuuagggcggaguaaguug

SEQ ID NO: 1544419 - RNA, 19 nt, Artificial Sequence
  Description of Artificial Sequence: Synthetic oligonucleotide
uuuaaauugcugaugucuu

SEQ ID NO: 1544420 - RNA, 19 nt, Artificial Sequence
  Description of Artificial Sequence: Synthetic oligonucleotide
ucuguacuaagcuggagcu

SEQ ID NO: 1544421 - RNA, 19 nt, Artificial Sequence
  Description of Artificial Sequence: Synthetic oligonucleotide
auaagaauccuuucagccu

SEQ ID NO: 1544422 - RNA, 19 nt, Artificial Sequence
  Description of Artificial Sequence: Synthetic oligonucleotide
auaggauaagaauccuuuc

SEQ ID NO: 1544423 - RNA, 19 nt, Artificial Sequence
  Description of Artificial Sequence: Synthetic oligonucleotide
uuccuuauuuaaauugcug

SEQ ID NO: 1544424 - RNA, 19 nt, Artificial Sequence
  Description of Artificial Sequence: Synthetic oligonucleotide
uaguuuucaauuugauuug

SEQ ID NO: 1544425 - RNA, 19 nt, Artificial Sequence
  Description of Artificial Sequence: Synthetic oligonucleotide
ucucaaguugaccuguaca

SEQ ID NO: 1544426 - RNA, 19 nt, Artificial Sequence
  Description of Artificial Sequence: Synthetic oligonucleotide
agugaauuggcucugucaa

SEQ ID NO: 1544427 - RNA, 19 nt, Artificial Sequence
  Description of Artificial Sequence: Synthetic oligonucleotide
uuugcauuauuauuucguc

SEQ ID NO: 1544428 - RNA, 19 nt, Artificial Sequence
  Description of Artificial Sequence: Synthetic oligonucleotide
uucucguaaaugucuaacc

SEQ ID NO: 1544429 - RNA, 19 nt, Artificial Sequence
  Description of Artificial Sequence: Synthetic oligonucleotide
cuaugagguaucuguaggg

SEQ ID NO: 1544430 - RNA, 19 nt, Artificial Sequence
  Description of Artificial Sequence: Synthetic oligonucleotide
cucccuguaccuuucaagg

SEQ ID NO: 1544431 - RNA, 19 nt, Artificial Sequence
  Description of Artificial Sequence: Synthetic oligonucleotide
ugauacuuuucacacucca

SEQ ID NO: 1544432 - RNA, 19 nt, Artificial Sequence
  Description of Artificial Sequence: Synthetic oligonucleotide
agccauaggauaagaaucc

SEQ ID NO: 1544433 - RNA, 19 nt, Artificial Sequence
  Description of Artificial Sequence: Synthetic oligonucleotide
uggguauaaauauauuauc

SEQ ID NO: 1544434 - RNA, 19 nt, Artificial Sequence
  Description of Artificial Sequence: Synthetic oligonucleotide
auauucuguuuuauaaugg

SEQ ID NO: 1544435 - RNA, 19 nt, Artificial Sequence
  Description of Artificial Sequence: Synthetic oligonucleotide
ugaauuggcucugucaagc

SEQ ID NO: 1544436 - RNA, 19 nt, Artificial Sequence
  Description of Artificial Sequence: Synthetic oligonucleotide
uugcuacacauauuaauga

SEQ ID NO: 1544437 - RNA, 19 nt, Artificial Sequence
  Description of Artificial Sequence: Synthetic oligonucleotide
aggaauuaugucuuuccug

SEQ ID NO: 1544438 - RNA, 19 nt, Artificial Sequence
  Description of Artificial Sequence: Synthetic oligonucleotide
acacauauuaaugauaauu

SEQ ID NO: 1544439 - RNA, 19 nt, Artificial Sequence
  Description of Artificial Sequence: Synthetic oligonucleotide
ugugcgagguuucuugcag

SEQ ID NO: 1544440 - RNA, 19 nt, Artificial Sequence
  Description of Artificial Sequence: Synthetic oligonucleotide
ucagcgagagcauuauccc

SEQ ID NO: 1544441 - RNA, 19 nt, Artificial Sequence
  Description of Artificial Sequence: Synthetic oligonucleotide
uuagaagcugcuccaaauc

SEQ ID NO: 1544442 - RNA, 19 nt, Artificial Sequence
  Description of Artificial Sequence: Synthetic oligonucleotide
ugcuuuagucgucuuuuag

SEQ ID NO: 1544443 - RNA, 19 nt, Artificial Sequence
  Description of Artificial Sequence: Synthetic oligonucleotide
uuuagaagcugcuccaaau

SEQ ID NO: 1544444 - RNA, 19 nt, Artificial Sequence
  Description of Artificial Sequence: Synthetic oligonucleotide
gaauuaugucuuuccuggg

SEQ ID NO: 1544445 - RNA, 19 nt, Artificial Sequence
  Description of Artificial Sequence: Synthetic oligonucleotide
gucuuuuagccguuguggg

SEQ ID NO: 1544446 - RNA, 19 nt, Artificial Sequence
  Description of Artificial Sequence: Synthetic oligonucleotide
agcuggagcucccuguacc

SEQ ID NO: 1544447 - RNA, 19 nt, Artificial Sequence
  Description of Artificial Sequence: Synthetic oligonucleotide
ccugauuccauuuuagggc

SEQ ID NO: 1544448 - RNA, 19 nt, Artificial Sequence
  Description of Artificial Sequence: Synthetic oligonucleotide
guaccuuucaaggagcugc

SEQ ID NO: 1544449 - RNA, 19 nt, Artificial Sequence
  Description of Artificial Sequence: Synthetic oligonucleotide
uguacacuucaucagugaa

SEQ ID NO: 1544450 - RNA, 19 nt, Artificial Sequence
  Description of Artificial Sequence: Synthetic oligonucleotide
auuaggaauuaugucuuuc

SEQ ID NO: 1544451 - RNA, 19 nt, Artificial Sequence
  Description of Artificial Sequence: Synthetic oligonucleotide
ucucuuggcaugcucaaaa

SEQ ID NO: 1544452 - RNA, 19 nt, Artificial Sequence
  Description of Artificial Sequence: Synthetic oligonucleotide
ugaaucaaucuuggaaucc

SEQ ID NO: 1544453 - RNA, 19 nt, Artificial Sequence
  Description of Artificial Sequence: Synthetic oligonucleotide
uugugggaacauuagcacc

SEQ ID NO: 1544454 - RNA, 19 nt, Artificial Sequence
  Description of Artificial Sequence: Synthetic oligonucleotide
uuagggcggaguaaguugu

SEQ ID NO: 1544455 - RNA, 19 nt, Artificial Sequence
  Description of Artificial Sequence: Synthetic oligonucleotide
uguaggguugcugagucug

SEQ ID NO: 1544456 - RNA, 19 nt, Artificial Sequence
  Description of Artificial Sequence: Synthetic oligonucleotide
guuuuauaauggucucugg

SEQ ID NO: 1544457 - RNA, 19 nt, Artificial Sequence
  Description of Artificial Sequence: Synthetic oligonucleotide
agcaccaaacacuaugccu

SEQ ID NO: 1544458 - RNA, 19 nt, Artificial Sequence
  Description of Artificial Sequence: Synthetic oligonucleotide
guuuuggcgauugagguac

SEQ ID NO: 1544459 - RNA, 19 nt, Artificial Sequence
  Description of Artificial Sequence: Synthetic oligonucleotide
uacuuuucacacuccaacu

SEQ ID NO: 1544460 - RNA, 19 nt, Artificial Sequence
  Description of Artificial Sequence: Synthetic oligonucleotide
gacucuaugagguaucugu

SEQ ID NO: 1544461 - RNA, 19 nt, Artificial Sequence
  Description of Artificial Sequence: Synthetic oligonucleotide
cauuuuagggcggaguaag

SEQ ID NO: 1544462 - RNA, 19 nt, Artificial Sequence
  Description of Artificial Sequence: Synthetic oligonucleotide
cagauuaguuuucaauuug

SEQ ID NO: 1544463 - RNA, 19 nt, Artificial Sequence
  Description of Artificial Sequence: Synthetic oligonucleotide
gaugcucggaguucugugc

SEQ ID NO: 1544464 - RNA, 19 nt, Artificial Sequence
  Description of Artificial Sequence: Synthetic oligonucleotide
gauugagguacucuuuauc

SEQ ID NO: 1544465 - RNA, 19 nt, Artificial Sequence
  Description of Artificial Sequence: Synthetic oligonucleotide
gaauguuugcuacacauau

SEQ ID NO: 1544466 - RNA, 19 nt, Artificial Sequence
  Description of Artificial Sequence: Synthetic oligonucleotide
cucuaugagguaucuguag

SEQ ID NO: 1544467 - RNA, 19 nt, Artificial Sequence
  Description of Artificial Sequence: Synthetic oligonucleotide
acggugauuuagaagcugc

SEQ ID NO: 1544468 - RNA, 19 nt, Artificial Sequence
  Description of Artificial Sequence: Synthetic oligonucleotide
ccuagaggcacuucgaagc

SEQ ID NO: 1544469 - RNA, 19 nt, Artificial Sequence
  Description of Artificial Sequence: Synthetic oligonucleotide
caaucuuggaaucccuuug

SEQ ID NO: 1544470 - RNA, 19 nt, Artificial Sequence
  Description of Artificial Sequence: Synthetic oligonucleotide
auuccuguuuucucguuca

SEQ ID NO: 1544471 - RNA, 19 nt, Artificial Sequence
  Description of Artificial Sequence: Synthetic oligonucleotide
acauuagcaccauagccau

SEQ ID NO: 1544472 - RNA, 19 nt, Artificial Sequence
  Description of Artificial Sequence: Synthetic oligonucleotide
ucgucuuuuagccguugug

SEQ ID NO: 1544473 - RNA, 19 nt, Artificial Sequence
  Description of Artificial Sequence: Synthetic oligonucleotide
aaacaauguuggcuugggu

SEQ ID NO: 1544474 - RNA, 19 nt, Artificial Sequence
  Description of Artificial Sequence: Synthetic oligonucleotide
uauuuaaauugcugauguc

SEQ ID NO: 1544475 - RNA, 19 nt, Artificial Sequence
  Description of Artificial Sequence: Synthetic oligonucleotide
uucacuuucaaaggacuuc

SEQ ID NO: 1544476 - RNA, 19 nt, Artificial Sequence
  Description of Artificial Sequence: Synthetic oligonucleotide
uggagacuauaaaauuccu

SEQ ID NO: 1544477 - RNA, 19 nt, Artificial Sequence
  Description of Artificial Sequence: Synthetic oligonucleotide
uaucuguaggguugcugag

SEQ ID NO: 1544478 - RNA, 19 nt, Artificial Sequence
  Description of Artificial Sequence: Synthetic oligonucleotide
ucaauuugauuugcuccag

SEQ ID NO: 1544479 - RNA, 19 nt, Artificial Sequence
  Description of Artificial Sequence: Synthetic oligonucleotide
ucaaucuuggaaucccuuu

SEQ ID NO: 1544480 - RNA, 19 nt, Artificial Sequence
  Description of Artificial Sequence: Synthetic oligonucleotide
ugaugcucggaguucugug

SEQ ID NO: 1544481 - RNA, 19 nt, Artificial Sequence
  Description of Artificial Sequence: Synthetic oligonucleotide
gucuaaccuugccugaugc

SEQ ID NO: 1544482 - RNA, 19 nt, Artificial Sequence
  Description of Artificial Sequence: Synthetic oligonucleotide
auaauggucucuggaugac

SEQ ID NO: 1544483 - RNA, 19 nt, Artificial Sequence
  Description of Artificial Sequence: Synthetic oligonucleotide
cccugauuccauuuuaggg

SEQ ID NO: 1544484 - RNA, 19 nt, Artificial Sequence
  Description of Artificial Sequence: Synthetic oligonucleotide
cagugaaucaaucuuggaa

SEQ ID NO: 1544485 - RNA, 19 nt, Artificial Sequence
  Description of Artificial Sequence: Synthetic oligonucleotide
agauuaguuuucaauuuga

SEQ ID NO: 1544486 - RNA, 19 nt, Artificial Sequence
  Description of Artificial Sequence: Synthetic oligonucleotide
ggaacauuagcaccauagc

SEQ ID NO: 1544487 - RNA, 19 nt, Artificial Sequence
  Description of Artificial Sequence: Synthetic oligonucleotide
gcucuuuucagcgagagca

SEQ ID NO: 1544488 - RNA, 19 nt, Artificial Sequence
  Description of Artificial Sequence: Synthetic oligonucleotide
acagugaauuggcucuguc

SEQ ID NO: 1544489 - RNA, 19 nt, Artificial Sequence
  Description of Artificial Sequence: Synthetic oligonucleotide
ugucuaaccuugccugaug

SEQ ID NO: 1544490 - RNA, 19 nt, Artificial Sequence
  Description of Artificial Sequence: Synthetic oligonucleotide
aauuucucguaaaugucua

SEQ ID NO: 1544491 - RNA, 19 nt, Artificial Sequence
  Description of Artificial Sequence: Synthetic oligonucleotide
ugccgcacagacucuauga

SEQ ID NO: 1544492 - RNA, 19 nt, Artificial Sequence
  Description of Artificial Sequence: Synthetic oligonucleotide
ggaaagccgccuuacuugg

SEQ ID NO: 1544493 - RNA, 19 nt, Artificial Sequence
  Description of Artificial Sequence: Synthetic oligonucleotide
ggcugcaaauuccucacgg

SEQ ID NO: 1544494 - RNA, 19 nt, Artificial Sequence
  Description of Artificial Sequence: Synthetic oligonucleotide
gugaaucaaucuuggaauc

SEQ ID NO: 1544495 - RNA, 19 nt, Artificial Sequence
  Description of Artificial Sequence: Synthetic oligonucleotide
cuaaccuugccugaugcuc

SEQ ID NO: 1544496 - RNA, 19 nt, Artificial Sequence
  Description of Artificial Sequence: Synthetic oligonucleotide
ucaaguugaccuguacacu

SEQ ID NO: 1544497 - RNA, 19 nt, Artificial Sequence
  Description of Artificial Sequence: Synthetic oligonucleotide
uucugauacuuuucacacu

SEQ ID NO: 1544498 - RNA, 19 nt, Artificial Sequence
  Description of Artificial Sequence: Synthetic oligonucleotide
uuccucacggugauuuaga

SEQ ID NO: 1544499 - RNA, 19 nt, Artificial Sequence
  Description of Artificial Sequence: Synthetic oligonucleotide
auuuagaagcugcuccaaa

SEQ ID NO: 1544500 - RNA, 19 nt, Artificial Sequence
  Description of Artificial Sequence: Synthetic oligonucleotide
aagaaguuuggagacuaua

SEQ ID NO: 1544501 - RNA, 19 nt, Artificial Sequence
  Description of Artificial Sequence: Synthetic oligonucleotide
uggucucuggaugacacgu

SEQ ID NO: 1544502 - RNA, 19 nt, Artificial Sequence
  Description of Artificial Sequence: Synthetic oligonucleotide
aguugaccuguacacuuca

SEQ ID NO: 1544503 - RNA, 19 nt, Artificial Sequence
  Description of Artificial Sequence: Synthetic oligonucleotide
ucagcuuacucuggugcag

SEQ ID NO: 1544504 - RNA, 19 nt, Artificial Sequence
  Description of Artificial Sequence: Synthetic oligonucleotide
uguuuuggcgauugaggua

SEQ ID NO: 1544505 - RNA, 19 nt, Artificial Sequence
  Description of Artificial Sequence: Synthetic oligonucleotide
auuccucacggugauuuag

SEQ ID NO: 1544506 - RNA, 19 nt, Artificial Sequence
  Description of Artificial Sequence: Synthetic oligonucleotide
ucuaaccuugccugaugcu

SEQ ID NO: 1544507 - RNA, 19 nt, Artificial Sequence
  Description of Artificial Sequence: Synthetic oligonucleotide
uucaugggcacagcggaca

SEQ ID NO: 1544508 - RNA, 19 nt, Artificial Sequence
  Description of Artificial Sequence: Synthetic oligonucleotide
acuaagcuggagcucccug

SEQ ID NO: 1544509 - RNA, 19 nt, Artificial Sequence
  Description of Artificial Sequence: Synthetic oligonucleotide
agaagaaguuuggagacua

SEQ ID NO: 1544510 - RNA, 19 nt, Artificial Sequence
  Description of Artificial Sequence: Synthetic oligonucleotide
uuggcaugcucaaaaucuu

SEQ ID NO: 1544511 - RNA, 19 nt, Artificial Sequence
  Description of Artificial Sequence: Synthetic oligonucleotide
uuuuagggcggaguaaguu

SEQ ID NO: 1544512 - RNA, 19 nt, Artificial Sequence
  Description of Artificial Sequence: Synthetic oligonucleotide
cucggcucuuuucagcgag

SEQ ID NO: 1544513 - RNA, 19 nt, Artificial Sequence
  Description of Artificial Sequence: Synthetic oligonucleotide
ucucggagauuccuguuuu

SEQ ID NO: 1544514 - RNA, 19 nt, Artificial Sequence
  Description of Artificial Sequence: Synthetic oligonucleotide
ucacggugauuuagaagcu

SEQ ID NO: 1544515 - RNA, 19 nt, Artificial Sequence
  Description of Artificial Sequence: Synthetic oligonucleotide
cauaggauaagaauccuuu

SEQ ID NO: 1544516 - RNA, 19 nt, Artificial Sequence
  Description of Artificial Sequence: Synthetic oligonucleotide
ucggagauuccuguuuucu

SEQ ID NO: 1544517 - RNA, 19 nt, Artificial Sequence
  Description of Artificial Sequence: Synthetic oligonucleotide
ucccuguaccuuucaagga

SEQ ID NO: 1544518 - RNA, 19 nt, Artificial Sequence
  Description of Artificial Sequence: Synthetic oligonucleotide
agucugguucaacagugaa

SEQ ID NO: 1544519 - RNA, 19 nt, Artificial Sequence
  Description of Artificial Sequence: Synthetic oligonucleotide
uuuucagcgagagcauuau

SEQ ID NO: 1544520 - RNA, 19 nt, Artificial Sequence
  Description of Artificial Sequence: Synthetic oligonucleotide
uuccauuuuagggcggagu

SEQ ID NO: 1544521 - RNA, 19 nt, Artificial Sequence
  Description of Artificial Sequence: Synthetic oligonucleotide
cuuacucuggugcagaaau

SEQ ID NO: 1544522 - RNA, 19 nt, Artificial Sequence
  Description of Artificial Sequence: Synthetic oligonucleotide
acagacucuaugagguauc

SEQ ID NO: 1544523 - RNA, 19 nt, Artificial Sequence
  Description of Artificial Sequence: Synthetic oligonucleotide
ggaccauucuugugcaucc

SEQ ID NO: 1544524 - RNA, 19 nt, Artificial Sequence
  Description of Artificial Sequence: Synthetic oligonucleotide
auuucucguaaaugucuaa

SEQ ID NO: 1544525 - RNA, 19 nt, Artificial Sequence
  Description of Artificial Sequence: Synthetic oligonucleotide
uauuaggaauuaugucuuu

SEQ ID NO: 1544526 - RNA, 19 nt, Artificial Sequence
  Description of Artificial Sequence: Synthetic oligonucleotide
uugccugaugcucggaguu

SEQ ID NO: 1544527 - RNA, 19 nt, Artificial Sequence
  Description of Artificial Sequence: Synthetic oligonucleotide
uacacauauuaaugauaau

SEQ ID NO: 1544528 - RNA, 19 nt, Artificial Sequence
  Description of Artificial Sequence: Synthetic oligonucleotide
gcaauauuaggaauuaugu

SEQ ID NO: 1544529 - RNA, 19 nt, Artificial Sequence
  Description of Artificial Sequence: Synthetic oligonucleotide
cagugaauuggcucuguca

SEQ ID NO: 1544530 - RNA, 19 nt, Artificial Sequence
  Description of Artificial Sequence: Synthetic oligonucleotide
uuggcgauugagguacucu

SEQ ID NO: 1544531 - RNA, 19 nt, Artificial Sequence
  Description of Artificial Sequence: Synthetic oligonucleotide
aauuccucacggugauuua

SEQ ID NO: 1544532 - RNA, 19 nt, Artificial Sequence
  Description of Artificial Sequence: Synthetic oligonucleotide
ucccuagaggcacuucgaa

SEQ ID NO: 1544533 - RNA, 19 nt, Artificial Sequence
  Description of Artificial Sequence: Synthetic oligonucleotide
agcuccauguuuuggcgau

SEQ ID NO: 1544534 - RNA, 19 nt, Artificial Sequence
  Description of Artificial Sequence: Synthetic oligonucleotide
cagaauguuugcuacacau

SEQ ID NO: 1544535 - RNA, 19 nt, Artificial Sequence
  Description of Artificial Sequence: Synthetic oligonucleotide
uaauggucucuggaugaca

SEQ ID NO: 1544536 - RNA, 19 nt, Artificial Sequence
  Description of Artificial Sequence: Synthetic oligonucleotide
cuuuuagccguugugggaa

SEQ ID NO: 1544537 - RNA, 19 nt, Artificial Sequence
  Description of Artificial Sequence: Synthetic oligonucleotide
uggcgauugagguacucuu

SEQ ID NO: 1544538 - RNA, 19 nt, Artificial Sequence
  Description of Artificial Sequence: Synthetic oligonucleotide
augcucggaguucugugcu

SEQ ID NO: 1544539 - RNA, 19 nt, Artificial Sequence
  Description of Artificial Sequence: Synthetic oligonucleotide
gagguaucuguaggguugc

SEQ ID NO: 1544540 - RNA, 19 nt, Artificial Sequence
  Description of Artificial Sequence: Synthetic oligonucleotide
caccauagccauaggauaa

SEQ ID NO: 1544541 - RNA, 19 nt, Artificial Sequence
  Description of Artificial Sequence: Synthetic oligonucleotide
uuuuagccguugugggaac

SEQ ID NO: 1544542 - RNA, 19 nt, Artificial Sequence
  Description of Artificial Sequence: Synthetic oligonucleotide
ccaacuggcacugugcgag

SEQ ID NO: 1544543 - RNA, 19 nt, Artificial Sequence
  Description of Artificial Sequence: Synthetic oligonucleotide
uccucacggugauuuagaa

SEQ ID NO: 1544544 - RNA, 19 nt, Artificial Sequence
  Description of Artificial Sequence: Synthetic oligonucleotide
cacuucaucagugaaucaa

SEQ ID NO: 1544545 - RNA, 19 nt, Artificial Sequence
  Description of Artificial Sequence: Synthetic oligonucleotide
uccaacuggcacugugcga

SEQ ID NO: 1544546 - RNA, 19 nt, Artificial Sequence
  Description of Artificial Sequence: Synthetic oligonucleotide
uggcaugcucaaaaucuuu

SEQ ID NO: 1544547 - RNA, 19 nt, Artificial Sequence
  Description of Artificial Sequence: Synthetic oligonucleotide
cuuuucagcgagagcauua

SEQ ID NO: 1544548 - RNA, 19 nt, Artificial Sequence
  Description of Artificial Sequence: Synthetic oligonucleotide
uuacucuggugcagaaauu

SEQ ID NO: 1544549 - RNA, 19 nt, Artificial Sequence
  Description of Artificial Sequence: Synthetic oligonucleotide
cccuuugccgcacagacuc

SEQ ID NO: 1544550 - RNA, 19 nt, Artificial Sequence
  Description of Artificial Sequence: Synthetic oligonucleotide
cugguucaacagugaauug

SEQ ID NO: 1544551 - RNA, 19 nt, Artificial Sequence
  Description of Artificial Sequence: Synthetic oligonucleotide
cccuguaccuuucaaggag

SEQ ID NO: 1544552 - RNA, 19 nt, Artificial Sequence
  Description of Artificial Sequence: Synthetic oligonucleotide
ugacugucugcugcaauau

SEQ ID NO: 1544553 - RNA, 19 nt, Artificial Sequence
  Description of Artificial Sequence: Synthetic oligonucleotide
ccuguaccuuucaaggagc

SEQ ID NO: 1544554 - RNA, 19 nt, Artificial Sequence
  Description of Artificial Sequence: Synthetic oligonucleotide
cuguacacuucaucaguga

SEQ ID NO: 1544555 - RNA, 19 nt, Artificial Sequence
  Description of Artificial Sequence: Synthetic oligonucleotide
uuuagccguugugggaaca

SEQ ID NO: 1544556 - RNA, 19 nt, Artificial Sequence
  Description of Artificial Sequence: Synthetic oligonucleotide
gugacugucugcugcaaua

SEQ ID NO: 1544557 - RNA, 19 nt, Artificial Sequence
  Description of Artificial Sequence: Synthetic oligonucleotide
ggcaugcucaaaaucuuug

SEQ ID NO: 1544558 - RNA, 19 nt, Artificial Sequence
  Description of Artificial Sequence: Synthetic oligonucleotide
agggcggaguaaguuguuc

SEQ ID NO: 1544559 - RNA, 19 nt, Artificial Sequence
  Description of Artificial Sequence: Synthetic oligonucleotide
guaggguugcugagucugg

SEQ ID NO: 1544560 - RNA, 19 nt, Artificial Sequence
  Description of Artificial Sequence: Synthetic oligonucleotide
aucuguaggguugcugagu

SEQ ID NO: 1544561 - RNA, 19 nt, Artificial Sequence
  Description of Artificial Sequence: Synthetic oligonucleotide
uggagcucccuguaccuuu

SEQ ID NO: 1544562 - RNA, 19 nt, Artificial Sequence
  Description of Artificial Sequence: Synthetic oligonucleotide
agaauguuugcuacacaua

SEQ ID NO: 1544563 - RNA, 19 nt, Artificial Sequence
  Description of Artificial Sequence: Synthetic oligonucleotide
ucuuuucagcgagagcauu

SEQ ID NO: 1544564 - RNA, 19 nt, Artificial Sequence
  Description of Artificial Sequence: Synthetic oligonucleotide
uugcuuuagucgucuuuua

SEQ ID NO: 1544565 - RNA, 19 nt, Artificial Sequence
  Description of Artificial Sequence: Synthetic oligonucleotide
cguugugggaacauuagca

SEQ ID NO: 1544566 - RNA, 19 nt, Artificial Sequence
  Description of Artificial Sequence: Synthetic oligonucleotide
ggugauuuagaagcugcuc

SEQ ID NO: 1544567 - RNA, 19 nt, Artificial Sequence
  Description of Artificial Sequence: Synthetic oligonucleotide
cacggugauuuagaagcug

SEQ ID NO: 1544568 - RNA, 19 nt, Artificial Sequence
  Description of Artificial Sequence: Synthetic oligonucleotide
ucggcucuuuucagcgaga

SEQ ID NO: 1544569 - RNA, 19 nt, Artificial Sequence
  Description of Artificial Sequence: Synthetic oligonucleotide
gaauuggcucugucaagcu

SEQ ID NO: 1544570 - RNA, 19 nt, Artificial Sequence
  Description of Artificial Sequence: Synthetic oligonucleotide
gccgcacagacucuaugag

SEQ ID NO: 1544571 - RNA, 19 nt, Artificial Sequence
  Description of Artificial Sequence: Synthetic oligonucleotide
uuagccguugugggaacau

SEQ ID NO: 1544572 - RNA, 19 nt, Artificial Sequence
  Description of Artificial Sequence: Synthetic oligonucleotide
ccgcacagacucuaugagg

SEQ ID NO: 1544573 - RNA, 19 nt, Artificial Sequence
  Description of Artificial Sequence: Synthetic oligonucleotide
cucaaaaucuuugaugcuu

SEQ ID NO: 1544574 - RNA, 19 nt, Artificial Sequence
  Description of Artificial Sequence: Synthetic oligonucleotide
gcgagagcauuaucccugg

SEQ ID NO: 1544575 - RNA, 19 nt, Artificial Sequence
  Description of Artificial Sequence: Synthetic oligonucleotide
ccccugauuccauuuuagg

SEQ ID NO: 1544576 - RNA, 19 nt, Artificial Sequence
  Description of Artificial Sequence: Synthetic oligonucleotide
auuuuagggcggaguaagu

SEQ ID NO: 1544577 - RNA, 19 nt, Artificial Sequence
  Description of Artificial Sequence: Synthetic oligonucleotide
agacucuaugagguaucug

SEQ ID NO: 1544578 - RNA, 19 nt, Artificial Sequence
  Description of Artificial Sequence: Synthetic oligonucleotide
cucguaaaugucuaaccuu

SEQ ID NO: 1544579 - RNA, 19 nt, Artificial Sequence
  Description of Artificial Sequence: Synthetic oligonucleotide
caugcucaaaaucuuugau

SEQ ID NO: 1544580 - RNA, 19 nt, Artificial Sequence
  Description of Artificial Sequence: Synthetic oligonucleotide
auacaucucccuagaggca

SEQ ID NO: 1544581 - RNA, 19 nt, Artificial Sequence
  Description of Artificial Sequence: Synthetic oligonucleotide
ccucacggugauuuagaag

SEQ ID NO: 1544582 - RNA, 19 nt, Artificial Sequence
  Description of Artificial Sequence: Synthetic oligonucleotide
uuuggcgauugagguacuc

SEQ ID NO: 1544583 - RNA, 19 nt, Artificial Sequence
  Description of Artificial Sequence: Synthetic oligonucleotide
cccuagaggcacuucgaag

SEQ ID NO: 1544584 - RNA, 19 nt, Artificial Sequence
  Description of Artificial Sequence: Synthetic oligonucleotide
agauuccuguuuucucguu

SEQ ID NO: 1544585 - RNA, 19 nt, Artificial Sequence
  Description of Artificial Sequence: Synthetic oligonucleotide
cuguacuaagcuggagcuc

SEQ ID NO: 1544586 - RNA, 19 nt, Artificial Sequence
  Description of Artificial Sequence: Synthetic oligonucleotide
ggcggaguaaguuguucuc

SEQ ID NO: 1544587 - RNA, 19 nt, Artificial Sequence
  Description of Artificial Sequence: Synthetic oligonucleotide
gcuacacauauuaaugaua

SEQ ID NO: 1544588 - RNA, 19 nt, Artificial Sequence
  Description of Artificial Sequence: Synthetic oligonucleotide
cucccuagaggcacuucga

SEQ ID NO: 1544589 - RNA, 19 nt, Artificial Sequence
  Description of Artificial Sequence: Synthetic oligonucleotide
cugugcgagguuucuugca

SEQ ID NO: 1544590 - RNA, 19 nt, Artificial Sequence
  Description of Artificial Sequence: Synthetic oligonucleotide
guacuaagcuggagcuccc

SEQ ID NO: 1544591 - RNA, 19 nt, Artificial Sequence
  Description of Artificial Sequence: Synthetic oligonucleotide
ccguugugggaacauuagc

SEQ ID NO: 1544592 - RNA, 19 nt, Artificial Sequence
  Description of Artificial Sequence: Synthetic oligonucleotide
uagucgucuuuuagccguu

SEQ ID NO: 1544593 - RNA, 19 nt, Artificial Sequence
  Description of Artificial Sequence: Synthetic oligonucleotide
ggcacagcggacacugagc

SEQ ID NO: 1544594 - RNA, 19 nt, Artificial Sequence
  Description of Artificial Sequence: Synthetic oligonucleotide
gccguugugggaacauuag

SEQ ID NO: 1544595 - RNA, 19 nt, Artificial Sequence
  Description of Artificial Sequence: Synthetic oligonucleotide
aucucccuagaggcacuuc

SEQ ID NO: 1544596 - RNA, 19 nt, Artificial Sequence
  Description of Artificial Sequence: Synthetic oligonucleotide
uuggaccauucuugugcau

SEQ ID NO: 1544597 - RNA, 19 nt, Artificial Sequence
  Description of Artificial Sequence: Synthetic oligonucleotide
ggcucuuuucagcgagagc

SEQ ID NO: 1544598 - RNA, 19 nt, Artificial Sequence
  Description of Artificial Sequence: Synthetic oligonucleotide
agccguugugggaacauua

SEQ ID NO: 1544599 - RNA, 19 nt, Artificial Sequence
  Description of Artificial Sequence: Synthetic oligonucleotide
uuucugcuguuugcauuau

SEQ ID NO: 1544600 - RNA, 19 nt, Artificial Sequence
  Description of Artificial Sequence: Synthetic oligonucleotide
cuugccugaugcucggagu

SEQ ID NO: 1544601 - RNA, 19 nt, Artificial Sequence
  Description of Artificial Sequence: Synthetic oligonucleotide
ugccugaugcucggaguuc

SEQ ID NO: 1544602 - RNA, 19 nt, Artificial Sequence
  Description of Artificial Sequence: Synthetic oligonucleotide
gcgauugagguacucuuua

SEQ ID NO: 1544603 - RNA, 19 nt, Artificial Sequence
  Description of Artificial Sequence: Synthetic oligonucleotide
ugcucggaguucugugcuu

SEQ ID NO: 1544604 - RNA, 19 nt, Artificial Sequence
  Description of Artificial Sequence: Synthetic oligonucleotide
uagggcggaguaaguuguu

SEQ ID NO: 1544605 - RNA, 19 nt, Artificial Sequence
  Description of Artificial Sequence: Synthetic oligonucleotide
cuguaccuuucaaggagcu

SEQ ID NO: 1544606 - RNA, 19 nt, Artificial Sequence
  Description of Artificial Sequence: Synthetic oligonucleotide
ucggaguucugugcuucua

SEQ ID NO: 1544607 - RNA, 19 nt, Artificial Sequence
  Description of Artificial Sequence: Synthetic oligonucleotide
agccgccuuacuuggucuu

SEQ ID NO: 1544608 - RNA, 19 nt, Artificial Sequence
  Description of Artificial Sequence: Synthetic oligonucleotide
cacagacucuaugagguau

SEQ ID NO: 1544609 - RNA, 19 nt, Artificial Sequence
  Description of Artificial Sequence: Synthetic oligonucleotide
gcacagcggacacugagcu

SEQ ID NO: 1544610 - RNA, 19 nt, Artificial Sequence
  Description of Artificial Sequence: Synthetic oligonucleotide
gucgucuuuuagccguugu

SEQ ID NO: 1544611 - RNA, 19 nt, Artificial Sequence
  Description of Artificial Sequence: Synthetic oligonucleotide
gcggaguaaguuguucuca

SEQ ID NO: 1544612 - RNA, 19 nt, Artificial Sequence
  Description of Artificial Sequence: Synthetic oligonucleotide
cagcgagagcauuaucccu

SEQ ID NO: 1544613 - RNA, 19 nt, Artificial Sequence
  Description of Artificial Sequence: Synthetic oligonucleotide
uagccguugugggaacauu

SEQ ID NO: 1544614 - RNA, 19 nt, Artificial Sequence
  Description of Artificial Sequence: Synthetic oligonucleotide
cagcuuacucuggugcaga

SEQ ID NO: 1544615 - RNA, 19 nt, Artificial Sequence
  Description of Artificial Sequence: Synthetic oligonucleotide
cgcacagacucuaugaggu

SEQ ID NO: 1544616 - RNA, 19 nt, Artificial Sequence
  Description of Artificial Sequence: Synthetic oligonucleotide
caaacacuaugccuucguu

SEQ ID NO: 1544617 - RNA, 19 nt, Artificial Sequence
  Description of Artificial Sequence: Synthetic oligonucleotide
gggcggaguaaguuguucu

SEQ ID NO: 1544618 - RNA, 19 nt, Artificial Sequence
  Description of Artificial Sequence: Synthetic oligonucleotide
ggagacuauaaaauuccuu

SEQ ID NO: 1544619 - RNA, 19 nt, Artificial Sequence
  Description of Artificial Sequence: Synthetic oligonucleotide
uggcucugucaagcucuug

SEQ ID NO: 1544620 - RNA, 19 nt, Artificial Sequence
  Description of Artificial Sequence: Synthetic oligonucleotide
ccaggcgauccucuucaug

SEQ ID NO: 1544621 - RNA, 19 nt, Artificial Sequence
  Description of Artificial Sequence: Synthetic oligonucleotide
ggaguugaacacguucacu

SEQ ID NO: 1544622 - RNA, 19 nt, Artificial Sequence
  Description of Artificial Sequence: Synthetic oligonucleotide
cagaagaaguuuggagacu

SEQ ID NO: 1544623 - RNA, 19 nt, Artificial Sequence
  Description of Artificial Sequence: Synthetic oligonucleotide
cuaguucaguaaugcguuu

SEQ ID NO: 1544624 - RNA, 19 nt, Artificial Sequence
  Description of Artificial Sequence: Synthetic oligonucleotide
gcucggaguucugugcuuc

SEQ ID NO: 1544625 - RNA, 19 nt, Artificial Sequence
  Description of Artificial Sequence: Synthetic oligonucleotide
gaaagccgccuuacuuggu

SEQ ID NO: 1544626 - RNA, 19 nt, Artificial Sequence
  Description of Artificial Sequence: Synthetic oligonucleotide
cuguaggguugcugagucu

SEQ ID NO: 1544627 - RNA, 19 nt, Artificial Sequence
  Description of Artificial Sequence: Synthetic oligonucleotide
gcuuacucuggugcagaaa

SEQ ID NO: 1544628 - RNA, 19 nt, Artificial Sequence
  Description of Artificial Sequence: Synthetic oligonucleotide
gugcagaaauucagccacu

SEQ ID NO: 1544629 - RNA, 19 nt, Artificial Sequence
  Description of Artificial Sequence: Synthetic oligonucleotide
ccauuuuagggcggaguaa

SEQ ID NO: 1544630 - RNA, 19 nt, Artificial Sequence
  Description of Artificial Sequence: Synthetic oligonucleotide
cggcucuuuucagcgagag

SEQ ID NO: 1544631 - RNA, 19 nt, Artificial Sequence
  Description of Artificial Sequence: Synthetic oligonucleotide
cauguucucuuggcaugcu

SEQ ID NO: 1544632 - RNA, 19 nt, Artificial Sequence
  Description of Artificial Sequence: Synthetic oligonucleotide
ggguuaggcucuggcuuuc

SEQ ID NO: 1544633 - RNA, 19 nt, Artificial Sequence
  Description of Artificial Sequence: Synthetic oligonucleotide
cgagagcauuaucccuggc

SEQ ID NO: 1544634 - RNA, 19 nt, Artificial Sequence
  Description of Artificial Sequence: Synthetic oligonucleotide
ggucucuggaugacacgua

SEQ ID NO: 1544635 - RNA, 19 nt, Artificial Sequence
  Description of Artificial Sequence: Synthetic oligonucleotide
gcugaucaauuuccagauu

SEQ ID NO: 1544636 - RNA, 19 nt, Artificial Sequence
  Description of Artificial Sequence: Synthetic oligonucleotide
gcuuggguauaaauauauu

SEQ ID NO: 1544637 - RNA, 19 nt, Artificial Sequence
  Description of Artificial Sequence: Synthetic oligonucleotide
ggacacugagcuccauguu

SEQ ID NO: 1544638 - RNA, 19 nt, Artificial Sequence
  Description of Artificial Sequence: Synthetic oligonucleotide
ggcgauugagguacucuuu

SEQ ID NO: 1544639 - RNA, 19 nt, Artificial Sequence
  Description of Artificial Sequence: Synthetic oligonucleotide
cuccagcaccaaacacuau

SEQ ID NO: 1544640 - RNA, 19 nt, Artificial Sequence
  Description of Artificial Sequence: Synthetic oligonucleotide
cggugauuuagaagcugcu

SEQ ID NO: 1544641 - RNA, 19 nt, Artificial Sequence
  Description of Artificial Sequence: Synthetic oligonucleotide
cgauugagguacucuuuau

SEQ ID NO: 1544642 - RNA, 19 nt, Artificial Sequence
  Description of Artificial Sequence: Synthetic oligonucleotide
cuggagcucccuguaccuu

SEQ ID NO: 1544643 - RNA, 19 nt, Artificial Sequence
  Description of Artificial Sequence: Synthetic oligonucleotide
caucucccuagaggcacuu

SEQ ID NO: 1544644 - RNA, 19 nt, Artificial Sequence
  Description of Artificial Sequence: Synthetic oligonucleotide
ccuuugccgcacagacucu

SEQ ID NO: 1544645 - RNA, 19 nt, Artificial Sequence
  Description of Artificial Sequence: Synthetic oligonucleotide
cgccuuacuuggucuuuua

SEQ ID NO: 1544646 - RNA, 19 nt, Artificial Sequence
  Description of Artificial Sequence: Synthetic oligonucleotide
gccgccuuacuuggucuuu

SEQ ID NO: 1544647 - RNA, 19 nt, Artificial Sequence
  Description of Artificial Sequence: Synthetic oligonucleotide
ccgccuuacuuggucuuuu

SEQ ID NO: 1544648 - RNA, 19 nt, Artificial Sequence
  Description of Artificial Sequence: Synthetic oligonucleotide
aauaucuaggccuuguccc

SEQ ID NO: 1544649 - RNA, 19 nt, Artificial Sequence
  Description of Artificial Sequence: Synthetic oligonucleotide
aaguguaucaagcaguggc

SEQ ID NO: 1544650 - RNA, 19 nt, Artificial Sequence
  Description of Artificial Sequence: Synthetic oligonucleotide
ucaucgaugaguaagcugg

SEQ ID NO: 1544651 - RNA, 19 nt, Artificial Sequence
  Description of Artificial Sequence: Synthetic oligonucleotide
aauggcaaauauuauuccc

SEQ ID NO: 1544652 - RNA, 19 nt, Artificial Sequence
  Description of Artificial Sequence: Synthetic oligonucleotide
aaauagacauaauuggcag

SEQ ID NO: 1544653 - RNA, 19 nt, Artificial Sequence
  Description of Artificial Sequence: Synthetic oligonucleotide
aaugauaaucuguaguuug

SEQ ID NO: 1544654 - RNA, 19 nt, Artificial Sequence
  Description of Artificial Sequence: Synthetic oligonucleotide
gaugggaucccauagaugc

SEQ ID NO: 1544655 - RNA, 19 nt, Artificial Sequence
  Description of Artificial Sequence: Synthetic oligonucleotide
auuauguagcauuucaguc

SEQ ID NO: 1544656 - RNA, 19 nt, Artificial Sequence
  Description of Artificial Sequence: Synthetic oligonucleotide
uuaaaugcuucacuaaagc

SEQ ID NO: 1544657 - RNA, 19 nt, Artificial Sequence
  Description of Artificial Sequence: Synthetic oligonucleotide
ugaaguaaguaccuauagg

SEQ ID NO: 1544658 - RNA, 19 nt, Artificial Sequence
  Description of Artificial Sequence: Synthetic oligonucleotide
gauaucaucgaugaguaag

SEQ ID NO: 1544659 - RNA, 19 nt, Artificial Sequence
  Description of Artificial Sequence: Synthetic oligonucleotide
ucucuaaucuggaagaaga

SEQ ID NO: 1544660 - RNA, 19 nt, Artificial Sequence
  Description of Artificial Sequence: Synthetic oligonucleotide
auauucuguaccugggugc

SEQ ID NO: 1544661 - RNA, 19 nt, Artificial Sequence
  Description of Artificial Sequence: Synthetic oligonucleotide
cagaauugaugacagaugg

SEQ ID NO: 1544662 - RNA, 19 nt, Artificial Sequence
  Description of Artificial Sequence: Synthetic oligonucleotide
aauaguggggaaugagaac

SEQ ID NO: 1544663 - RNA, 19 nt, Artificial Sequence
  Description of Artificial Sequence: Synthetic oligonucleotide
ucgaguauauucaaaagaa

SEQ ID NO: 1544664 - RNA, 19 nt, Artificial Sequence
  Description of Artificial Sequence: Synthetic oligonucleotide
uggacuuagaugcugauaa

SEQ ID NO: 1544665 - RNA, 19 nt, Artificial Sequence
  Description of Artificial Sequence: Synthetic oligonucleotide
uugaaguaaguaccuauag

SEQ ID NO: 1544666 - RNA, 19 nt, Artificial Sequence
  Description of Artificial Sequence: Synthetic oligonucleotide
uuuaccugguaauugaagu

SEQ ID NO: 1544667 - RNA, 19 nt, Artificial Sequence
  Description of Artificial Sequence: Synthetic oligonucleotide
gaguguaucgaguauauuc

SEQ ID NO: 1544668 - RNA, 19 nt, Artificial Sequence
  Description of Artificial Sequence: Synthetic oligonucleotide
uucuagaccaaggaaauag

SEQ ID NO: 1544669 - RNA, 19 nt, Artificial Sequence
  Description of Artificial Sequence: Synthetic oligonucleotide
agaaccuacauccuccagg

SEQ ID NO: 1544670 - RNA, 19 nt, Artificial Sequence
  Description of Artificial Sequence: Synthetic oligonucleotide
uugaaaagauaaauaaguc

SEQ ID NO: 1544671 - RNA, 19 nt, Artificial Sequence
  Description of Artificial Sequence: Synthetic oligonucleotide
uguaaucagagaacaacug

SEQ ID NO: 1544672 - RNA, 19 nt, Artificial Sequence
  Description of Artificial Sequence: Synthetic oligonucleotide
aaguugucgugugaaaagc

SEQ ID NO: 1544673 - RNA, 19 nt, Artificial Sequence
  Description of Artificial Sequence: Synthetic oligonucleotide
uuuacuugguuuuggagac

SEQ ID NO: 1544674 - RNA, 19 nt, Artificial Sequence
  Description of Artificial Sequence: Synthetic oligonucleotide
ugagucuaaucaagaaugg

SEQ ID NO: 1544675 - RNA, 19 nt, Artificial Sequence
  Description of Artificial Sequence: Synthetic oligonucleotide
aguaaguaccuauagggcu

SEQ ID NO: 1544676 - RNA, 19 nt, Artificial Sequence
  Description of Artificial Sequence: Synthetic oligonucleotide
agauaaauaagucacucuu

SEQ ID NO: 1544677 - RNA, 19 nt, Artificial Sequence
  Description of Artificial Sequence: Synthetic oligonucleotide
guaggcuuuagcuucaagc

SEQ ID NO: 1544678 - RNA, 19 nt, Artificial Sequence
  Description of Artificial Sequence: Synthetic oligonucleotide
ugaauaguggggaaugaga

SEQ ID NO: 1544679 - RNA, 19 nt, Artificial Sequence
  Description of Artificial Sequence: Synthetic oligonucleotide
ucaaugauaaucuguaguu

SEQ ID NO: 1544680 - RNA, 19 nt, Artificial Sequence
  Description of Artificial Sequence: Synthetic oligonucleotide
aucgaguauauucaaaaga

SEQ ID NO: 1544681 - RNA, 19 nt, Artificial Sequence
  Description of Artificial Sequence: Synthetic oligonucleotide
cuuaaaugcuucacuaaag

SEQ ID NO: 1544682 - RNA, 19 nt, Artificial Sequence
  Description of Artificial Sequence: Synthetic oligonucleotide
accacagaaaucuccgccc

SEQ ID NO: 1544683 - RNA, 19 nt, Artificial Sequence
  Description of Artificial Sequence: Synthetic oligonucleotide
uuagaugcugauaaacuuc

SEQ ID NO: 1544684 - RNA, 19 nt, Artificial Sequence
  Description of Artificial Sequence: Synthetic oligonucleotide
ucagacuucaagccgccgg

SEQ ID NO: 1544685 - RNA, 19 nt, Artificial Sequence
  Description of Artificial Sequence: Synthetic oligonucleotide
aaauggcgugaauaguggg

SEQ ID NO: 1544686 - RNA, 19 nt, Artificial Sequence
  Description of Artificial Sequence: Synthetic oligonucleotide
acccacaucaacuucucac

SEQ ID NO: 1544687 - RNA, 19 nt, Artificial Sequence
  Description of Artificial Sequence: Synthetic oligonucleotide
uguagauuggcauaaucau

SEQ ID NO: 1544688 - RNA, 19 nt, Artificial Sequence
  Description of Artificial Sequence: Synthetic oligonucleotide
agaucauuggaacuggacu

SEQ ID NO: 1544689 - RNA, 19 nt, Artificial Sequence
  Description of Artificial Sequence: Synthetic oligonucleotide
uuuguuuguaggcuuuagc

SEQ ID NO: 1544690 - RNA, 19 nt, Artificial Sequence
  Description of Artificial Sequence: Synthetic oligonucleotide
guaaucagagaacaacugc

SEQ ID NO: 1544691 - RNA, 19 nt, Artificial Sequence
  Description of Artificial Sequence: Synthetic oligonucleotide
aguucuaaaaguugucgug

SEQ ID NO: 1544692 - RNA, 19 nt, Artificial Sequence
  Description of Artificial Sequence: Synthetic oligonucleotide
aaagcugaugguuccacga

SEQ ID NO: 1544693 - RNA, 19 nt, Artificial Sequence
  Description of Artificial Sequence: Synthetic oligonucleotide
aacaccauggcuuuauauu

SEQ ID NO: 1544694 - RNA, 19 nt, Artificial Sequence
  Description of Artificial Sequence: Synthetic oligonucleotide
uaucgaguauauucaaaag

SEQ ID NO: 1544695 - RNA, 19 nt, Artificial Sequence
  Description of Artificial Sequence: Synthetic oligonucleotide
aaugagaacuuuccuucug

SEQ ID NO: 1544696 - RNA, 19 nt, Artificial Sequence
  Description of Artificial Sequence: Synthetic oligonucleotide
uguucuuuggcgcaggaua

SEQ ID NO: 1544697 - RNA, 19 nt, Artificial Sequence
  Description of Artificial Sequence: Synthetic oligonucleotide
auaucaucgaugaguaagc

SEQ ID NO: 1544698 - RNA, 19 nt, Artificial Sequence
  Description of Artificial Sequence: Synthetic oligonucleotide
uaggcuuuagcuucaagcu

SEQ ID NO: 1544699 - RNA, 19 nt, Artificial Sequence
  Description of Artificial Sequence: Synthetic oligonucleotide
gaaaguuugguucucaccu

SEQ ID NO: 1544700 - RNA, 19 nt, Artificial Sequence
  Description of Artificial Sequence: Synthetic oligonucleotide
ucacuaaagccacuagugc

SEQ ID NO: 1544701 - RNA, 19 nt, Artificial Sequence
  Description of Artificial Sequence: Synthetic oligonucleotide
uuuucuagaccaaggaaau

SEQ ID NO: 1544702 - RNA, 19 nt, Artificial Sequence
  Description of Artificial Sequence: Synthetic oligonucleotide
ucugugaacaucuuacuua

SEQ ID NO: 1544703 - RNA, 19 nt, Artificial Sequence
  Description of Artificial Sequence: Synthetic oligonucleotide
aguauauucaaaagaaccu

SEQ ID NO: 1544704 - RNA, 19 nt, Artificial Sequence
  Description of Artificial Sequence: Synthetic oligonucleotide
gaccaaauggcgugaauag

SEQ ID NO: 1544705 - RNA, 19 nt, Artificial Sequence
  Description of Artificial Sequence: Synthetic oligonucleotide
auuguccucgauaucaucg

SEQ ID NO: 1544706 - RNA, 19 nt, Artificial Sequence
  Description of Artificial Sequence: Synthetic oligonucleotide
aauuguccucgauaucauc

SEQ ID NO: 1544707 - RNA, 19 nt, Artificial Sequence
  Description of Artificial Sequence: Synthetic oligonucleotide
gaauugaugacagauggga

SEQ ID NO: 1544708 - RNA, 19 nt, Artificial Sequence
  Description of Artificial Sequence: Synthetic oligonucleotide
uaauaucuauauuuucugu

SEQ ID NO: 1544709 - RNA, 19 nt, Artificial Sequence
  Description of Artificial Sequence: Synthetic oligonucleotide
ugcuaguccaaauaaucca

SEQ ID NO: 1544710 - RNA, 19 nt, Artificial Sequence
  Description of Artificial Sequence: Synthetic oligonucleotide
aauggcgugaauagugggg

SEQ ID NO: 1544711 - RNA, 19 nt, Artificial Sequence
  Description of Artificial Sequence: Synthetic oligonucleotide
gagaacaacugcaugagac

SEQ ID NO: 1544712 - RNA, 19 nt, Artificial Sequence
  Description of Artificial Sequence: Synthetic oligonucleotide
uggggaaugagaacuuucc

SEQ ID NO: 1544713 - RNA, 19 nt, Artificial Sequence
  Description of Artificial Sequence: Synthetic oligonucleotide
uaaucuggaagaagagacc

SEQ ID NO: 1544714 - RNA, 19 nt, Artificial Sequence
  Description of Artificial Sequence: Synthetic oligonucleotide
ugaaaguuugguucucacc

SEQ ID NO: 1544715 - RNA, 19 nt, Artificial Sequence
  Description of Artificial Sequence: Synthetic oligonucleotide
accuauagggcucuagaag

SEQ ID NO: 1544716 - RNA, 19 nt, Artificial Sequence
  Description of Artificial Sequence: Synthetic oligonucleotide
cuggccuugaccaaauggc

SEQ ID NO: 1544717 - RNA, 19 nt, Artificial Sequence
  Description of Artificial Sequence: Synthetic oligonucleotide
ucucuagcucuuaaguuug

SEQ ID NO: 1544718 - RNA, 19 nt, Artificial Sequence
  Description of Artificial Sequence: Synthetic oligonucleotide
aauuucaaagcugaugguu

SEQ ID NO: 1544719 - RNA, 19 nt, Artificial Sequence
  Description of Artificial Sequence: Synthetic oligonucleotide
ucuaagaguguaucgagua

SEQ ID NO: 1544720 - RNA, 19 nt, Artificial Sequence
  Description of Artificial Sequence: Synthetic oligonucleotide
acugcuaguccaaauaauc

SEQ ID NO: 1544721 - RNA, 19 nt, Artificial Sequence
  Description of Artificial Sequence: Synthetic oligonucleotide
ugguuuuggagacuaguac

SEQ ID NO: 1544722 - RNA, 19 nt, Artificial Sequence
  Description of Artificial Sequence: Synthetic oligonucleotide
aaaguuugguucucaccug

SEQ ID NO: 1544723 - RNA, 19 nt, Artificial Sequence
  Description of Artificial Sequence: Synthetic oligonucleotide
uuuaguucagaccgcggcu

SEQ ID NO: 1544724 - RNA, 19 nt, Artificial Sequence
  Description of Artificial Sequence: Synthetic oligonucleotide
caaauggcgugaauagugg

SEQ ID NO: 1544725 - RNA, 19 nt, Artificial Sequence
  Description of Artificial Sequence: Synthetic oligonucleotide
aaaaguugucgugugaaaa

SEQ ID NO: 1544726 - RNA, 19 nt, Artificial Sequence
  Description of Artificial Sequence: Synthetic oligonucleotide
uaguuugucuucuggaacu

SEQ ID NO: 1544727 - RNA, 19 nt, Artificial Sequence
  Description of Artificial Sequence: Synthetic oligonucleotide
uguaguuugucuucuggaa

SEQ ID NO: 1544728 - RNA, 19 nt, Artificial Sequence
  Description of Artificial Sequence: Synthetic oligonucleotide
auuggaacuggacuuagau

SEQ ID NO: 1544729 - RNA, 19 nt, Artificial Sequence
  Description of Artificial Sequence: Synthetic oligonucleotide
cagccagugauuaaaugcc

SEQ ID NO: 1544730 - RNA, 19 nt, Artificial Sequence
  Description of Artificial Sequence: Synthetic oligonucleotide
uucucaccuguuuaccugg

SEQ ID NO: 1544731 - RNA, 19 nt, Artificial Sequence
  Description of Artificial Sequence: Synthetic oligonucleotide
cauuagaucauuggaacug

SEQ ID NO: 1544732 - RNA, 19 nt, Artificial Sequence
  Description of Artificial Sequence: Synthetic oligonucleotide
auuagaucauuggaacugg

SEQ ID NO: 1544733 - RNA, 19 nt, Artificial Sequence
  Description of Artificial Sequence: Synthetic oligonucleotide
ucuaaaaguugucguguga

SEQ ID NO: 1544734 - RNA, 19 nt, Artificial Sequence
  Description of Artificial Sequence: Synthetic oligonucleotide
gagaccaaguguaucaagc

SEQ ID NO: 1544735 - RNA, 19 nt, Artificial Sequence
  Description of Artificial Sequence: Synthetic oligonucleotide
agucuaaucaagaauggca

SEQ ID NO: 1544736 - RNA, 19 nt, Artificial Sequence
  Description of Artificial Sequence: Synthetic oligonucleotide
aacucugagucuaaucaag

SEQ ID NO: 1544737 - RNA, 19 nt, Artificial Sequence
  Description of Artificial Sequence: Synthetic oligonucleotide
ucgauaucaucgaugagua

SEQ ID NO: 1544738 - RNA, 19 nt, Artificial Sequence
  Description of Artificial Sequence: Synthetic oligonucleotide
uuaaaugccugugaaaguu

SEQ ID NO: 1544739 - RNA, 19 nt, Artificial Sequence
  Description of Artificial Sequence: Synthetic oligonucleotide
cacuggaaaaccacgucgg

SEQ ID NO: 1544740 - RNA, 19 nt, Artificial Sequence
  Description of Artificial Sequence: Synthetic oligonucleotide
uucucuagcucuuaaguuu

SEQ ID NO: 1544741 - RNA, 19 nt, Artificial Sequence
  Description of Artificial Sequence: Synthetic oligonucleotide
ggcauaaucaucucuaauc

SEQ ID NO: 1544742 - RNA, 19 nt, Artificial Sequence
  Description of Artificial Sequence: Synthetic oligonucleotide
acucggugcaagaaaauac

SEQ ID NO: 1544743 - RNA, 19 nt, Artificial Sequence
  Description of Artificial Sequence: Synthetic oligonucleotide
aauaauccaccugucuucu

SEQ ID NO: 1544744 - RNA, 19 nt, Artificial Sequence
  Description of Artificial Sequence: Synthetic oligonucleotide
cuaguacuugaaaagauaa

SEQ ID NO: 1544745 - RNA, 19 nt, Artificial Sequence
  Description of Artificial Sequence: Synthetic oligonucleotide
guaucgaguauauucaaaa

SEQ ID NO: 1544746 - RNA, 19 nt, Artificial Sequence
  Description of Artificial Sequence: Synthetic oligonucleotide
ugucgugugaaaagcuuca

SEQ ID NO: 1544747 - RNA, 19 nt, Artificial Sequence
  Description of Artificial Sequence: Synthetic oligonucleotide
auuaaaugccugugaaagu

SEQ ID NO: 1544748 - RNA, 19 nt, Artificial Sequence
  Description of Artificial Sequence: Synthetic oligonucleotide
caucuuacuuaaaugcuuc

SEQ ID NO: 1544749 - RNA, 19 nt, Artificial Sequence
  Description of Artificial Sequence: Synthetic oligonucleotide
uucuaaaaguugucgugug

SEQ ID NO: 1544750 - RNA, 19 nt, Artificial Sequence
  Description of Artificial Sequence: Synthetic oligonucleotide
uuuauacaaagggauucug

SEQ ID NO: 1544751 - RNA, 19 nt, Artificial Sequence
  Description of Artificial Sequence: Synthetic oligonucleotide
ugugccacuggaaaaccac

SEQ ID NO: 1544752 - RNA, 19 nt, Artificial Sequence
  Description of Artificial Sequence: Synthetic oligonucleotide
uuugguucucaccuguuua

SEQ ID NO: 1544753 - RNA, 19 nt, Artificial Sequence
  Description of Artificial Sequence: Synthetic oligonucleotide
uguaucgaguauauucaaa

SEQ ID NO: 1544754 - RNA, 19 nt, Artificial Sequence
  Description of Artificial Sequence: Synthetic oligonucleotide
aguguaucgaguauauuca

SEQ ID NO: 1544755 - RNA, 19 nt, Artificial Sequence
  Description of Artificial Sequence: Synthetic oligonucleotide
auuauucccuuucuucugu

SEQ ID NO: 1544756 - RNA, 19 nt, Artificial Sequence
  Description of Artificial Sequence: Synthetic oligonucleotide
gacuuagaugcugauaaac

SEQ ID NO: 1544757 - RNA, 19 nt, Artificial Sequence
  Description of Artificial Sequence: Synthetic oligonucleotide
aagggauucugacaauaaa

SEQ ID NO: 1544758 - RNA, 19 nt, Artificial Sequence
  Description of Artificial Sequence: Synthetic oligonucleotide
auagacauaauuggcagaa

SEQ ID NO: 1544759 - RNA, 19 nt, Artificial Sequence
  Description of Artificial Sequence: Synthetic oligonucleotide
gauaaacuucuaugugggc

SEQ ID NO: 1544760 - RNA, 19 nt, Artificial Sequence
  Description of Artificial Sequence: Synthetic oligonucleotide
aguccaaauaauccaccug

SEQ ID NO: 1544761 - RNA, 19 nt, Artificial Sequence
  Description of Artificial Sequence: Synthetic oligonucleotide
ugggugaucaaguguuaag

SEQ ID NO: 1544762 - RNA, 19 nt, Artificial Sequence
  Description of Artificial Sequence: Synthetic oligonucleotide
uguuuguaggcuuuagcuu

SEQ ID NO: 1544763 - RNA, 19 nt, Artificial Sequence
  Description of Artificial Sequence: Synthetic oligonucleotide
uacuuaaaugcuucacuaa

SEQ ID NO: 1544764 - RNA, 19 nt, Artificial Sequence
  Description of Artificial Sequence: Synthetic oligonucleotide
ucuuacuuaaaugcuucac

SEQ ID NO: 1544765 - RNA, 19 nt, Artificial Sequence
  Description of Artificial Sequence: Synthetic oligonucleotide
cauuucucuagcucuuaag

SEQ ID NO: 1544766 - RNA, 19 nt, Artificial Sequence
  Description of Artificial Sequence: Synthetic oligonucleotide
gagaccuacugcuagucca

SEQ ID NO: 1544767 - RNA, 19 nt, Artificial Sequence
  Description of Artificial Sequence: Synthetic oligonucleotide
cucuaaucuggaagaagag

SEQ ID NO: 1544768 - RNA, 19 nt, Artificial Sequence
  Description of Artificial Sequence: Synthetic oligonucleotide
ggaguucuaaaaguugucg

SEQ ID NO: 1544769 - RNA, 19 nt, Artificial Sequence
  Description of Artificial Sequence: Synthetic oligonucleotide
aaaucuccgcccuccucag

SEQ ID NO: 1544770 - RNA, 19 nt, Artificial Sequence
  Description of Artificial Sequence: Synthetic oligonucleotide
gaauaguggggaaugagaa

SEQ ID NO: 1544771 - RNA, 19 nt, Artificial Sequence
  Description of Artificial Sequence: Synthetic oligonucleotide
agaccaaguguaucaagca

SEQ ID NO: 1544772 - RNA, 19 nt, Artificial Sequence
  Description of Artificial Sequence: Synthetic oligonucleotide
acuuagaugcugauaaacu

SEQ ID NO: 1544773 - RNA, 19 nt, Artificial Sequence
  Description of Artificial Sequence: Synthetic oligonucleotide
aaaaccacgucggagcuuu

SEQ ID NO: 1544774 - RNA, 19 nt, Artificial Sequence
  Description of Artificial Sequence: Synthetic oligonucleotide
gccucaauuuguuuguagg

SEQ ID NO: 1544775 - RNA, 19 nt, Artificial Sequence
  Description of Artificial Sequence: Synthetic oligonucleotide
cuucgcgagaccuccuugg

SEQ ID NO: 1544776 - RNA, 19 nt, Artificial Sequence
  Description of Artificial Sequence: Synthetic oligonucleotide
guguagauuggcauaauca

SEQ ID NO: 1544777 - RNA, 19 nt, Artificial Sequence
  Description of Artificial Sequence: Synthetic oligonucleotide
ugagaccuacugcuagucc

SEQ ID NO: 1544778 - RNA, 19 nt, Artificial Sequence
  Description of Artificial Sequence: Synthetic oligonucleotide
uaaaaguugucgugugaaa

SEQ ID NO: 1544779 - RNA, 19 nt, Artificial Sequence
  Description of Artificial Sequence: Synthetic oligonucleotide
aagaaccuacauccuccag

SEQ ID NO: 1544780 - RNA, 19 nt, Artificial Sequence
  Description of Artificial Sequence: Synthetic oligonucleotide
uguuuaccugguaauugaa

SEQ ID NO: 1544781 - RNA, 19 nt, Artificial Sequence
  Description of Artificial Sequence: Synthetic oligonucleotide
uuagaucauuggaacugga

SEQ ID NO: 1544782 - RNA, 19 nt, Artificial Sequence
  Description of Artificial Sequence: Synthetic oligonucleotide
agacuaguacuugaaaaga

SEQ ID NO: 1544783 - RNA, 19 nt, Artificial Sequence
  Description of Artificial Sequence: Synthetic oligonucleotide
caccacagaaaucuccgcc

SEQ ID NO: 1544784 - RNA, 19 nt, Artificial Sequence
  Description of Artificial Sequence: Synthetic oligonucleotide
cacuaaagccacuagugca

SEQ ID NO: 1544785 - RNA, 19 nt, Artificial Sequence
  Description of Artificial Sequence: Synthetic oligonucleotide
agagaccaaguguaucaag

SEQ ID NO: 1544786 - RNA, 19 nt, Artificial Sequence
  Description of Artificial Sequence: Synthetic oligonucleotide
ugcugugugccacuggaaa

SEQ ID NO: 1544787 - RNA, 19 nt, Artificial Sequence
  Description of Artificial Sequence: Synthetic oligonucleotide
cgugugaaaagcuucacag

SEQ ID NO: 1544788 - RNA, 19 nt, Artificial Sequence
  Description of Artificial Sequence: Synthetic oligonucleotide
caaagcugaugguuccacg

SEQ ID NO: 1544789 - RNA, 19 nt, Artificial Sequence
  Description of Artificial Sequence: Synthetic oligonucleotide
agaauugaugacagauggg

SEQ ID NO: 1544790 - RNA, 19 nt, Artificial Sequence
  Description of Artificial Sequence: Synthetic oligonucleotide
ucuaugugggcaguggaaa

SEQ ID NO: 1544791 - RNA, 19 nt, Artificial Sequence
  Description of Artificial Sequence: Synthetic oligonucleotide
uaaucaagaauggcaaaua

SEQ ID NO: 1544792 - RNA, 19 nt, Artificial Sequence
  Description of Artificial Sequence: Synthetic oligonucleotide
ugaccaaauggcgugaaua

SEQ ID NO: 1544793 - RNA, 19 nt, Artificial Sequence
  Description of Artificial Sequence: Synthetic oligonucleotide
uccaaauaauccaccuguc

SEQ ID NO: 1544794 - RNA, 19 nt, Artificial Sequence
  Description of Artificial Sequence: Synthetic oligonucleotide
guccaaauaauccaccugu

SEQ ID NO: 1544795 - RNA, 19 nt, Artificial Sequence
  Description of Artificial Sequence: Synthetic oligonucleotide
guccgagacaagcaguacc

SEQ ID NO: 1544796 - RNA, 19 nt, Artificial Sequence
  Description of Artificial Sequence: Synthetic oligonucleotide
guucucaccuguuuaccug

SEQ ID NO: 1544797 - RNA, 19 nt, Artificial Sequence
  Description of Artificial Sequence: Synthetic oligonucleotide
ccaaauggcgugaauagug

SEQ ID NO: 1544798 - RNA, 19 nt, Artificial Sequence
  Description of Artificial Sequence: Synthetic oligonucleotide
aaucuccgcccuccucagc

SEQ ID NO: 1544799 - RNA, 19 nt, Artificial Sequence
  Description of Artificial Sequence: Synthetic oligonucleotide
uuguccucgauaucaucga

SEQ ID NO: 1544800 - RNA, 19 nt, Artificial Sequence
  Description of Artificial Sequence: Synthetic oligonucleotide
aguacccacaucaacuucu

SEQ ID NO: 1544801 - RNA, 19 nt, Artificial Sequence
  Description of Artificial Sequence: Synthetic oligonucleotide
uaccuauagggcucuagaa

SEQ ID NO: 1544802 - RNA, 19 nt, Artificial Sequence
  Description of Artificial Sequence: Synthetic oligonucleotide
agccccuuaaccacugagc

SEQ ID NO: 1544803 - RNA, 19 nt, Artificial Sequence
  Description of Artificial Sequence: Synthetic oligonucleotide
auuacucggugcaagaaaa

SEQ ID NO: 1544804 - RNA, 19 nt, Artificial Sequence
  Description of Artificial Sequence: Synthetic oligonucleotide
ccugauggaguucuaaaag

SEQ ID NO: 1544805 - RNA, 19 nt, Artificial Sequence
  Description of Artificial Sequence: Synthetic oligonucleotide
uagggcucuagaagaauuc

SEQ ID NO: 1544806 - RNA, 19 nt, Artificial Sequence
  Description of Artificial Sequence: Synthetic oligonucleotide
gccauuagaucauuggaac

SEQ ID NO: 1544807 - RNA, 19 nt, Artificial Sequence
  Description of Artificial Sequence: Synthetic oligonucleotide
uauucccuuucuucuguga

SEQ ID NO: 1544808 - RNA, 19 nt, Artificial Sequence
  Description of Artificial Sequence: Synthetic oligonucleotide
cagagaacaacugcaugag

SEQ ID NO: 1544809 - RNA, 19 nt, Artificial Sequence
  Description of Artificial Sequence: Synthetic oligonucleotide
cauuauguagcauuucagu

SEQ ID NO: 1544810 - RNA, 19 nt, Artificial Sequence
  Description of Artificial Sequence: Synthetic oligonucleotide
aguaagcuggcauuaugua

SEQ ID NO: 1544811 - RNA, 19 nt, Artificial Sequence
  Description of Artificial Sequence: Synthetic oligonucleotide
uacugcuaguccaaauaau

SEQ ID NO: 1544812 - RNA, 19 nt, Artificial Sequence
  Description of Artificial Sequence: Synthetic oligonucleotide
uucagaccgcggcucuucg

SEQ ID NO: 1544813 - RNA, 19 nt, Artificial Sequence
  Description of Artificial Sequence: Synthetic oligonucleotide
ggugaucaaguguuaagac

SEQ ID NO: 1544814 - RNA, 19 nt, Artificial Sequence
  Description of Artificial Sequence: Synthetic oligonucleotide
gaucauuggaacuggacuu

SEQ ID NO: 1544815 - RNA, 19 nt, Artificial Sequence
  Description of Artificial Sequence: Synthetic oligonucleotide
uggaguguagauuggcaua

SEQ ID NO: 1544816 - RNA, 19 nt, Artificial Sequence
  Description of Artificial Sequence: Synthetic oligonucleotide
aucuuacuuaaaugcuuca

SEQ ID NO: 1544817 - RNA, 19 nt, Artificial Sequence
  Description of Artificial Sequence: Synthetic oligonucleotide
ggagacuaguacuugaaaa

SEQ ID NO: 1544818 - RNA, 19 nt, Artificial Sequence
  Description of Artificial Sequence: Synthetic oligonucleotide
ucauuggaacuggacuuag

SEQ ID NO: 1544819 - RNA, 19 nt, Artificial Sequence
  Description of Artificial Sequence: Synthetic oligonucleotide
cagaccgcggcucuucgcg

SEQ ID NO: 1544820 - RNA, 19 nt, Artificial Sequence
  Description of Artificial Sequence: Synthetic oligonucleotide
agcugaugguuccacgaug

SEQ ID NO: 1544821 - RNA, 19 nt, Artificial Sequence
  Description of Artificial Sequence: Synthetic oligonucleotide
ugggaucccauagaugcug

SEQ ID NO: 1544822 - RNA, 19 nt, Artificial Sequence
  Description of Artificial Sequence: Synthetic oligonucleotide
guaaguaccuauagggcuc

SEQ ID NO: 1544823 - RNA, 19 nt, Artificial Sequence
  Description of Artificial Sequence: Synthetic oligonucleotide
uaaaugccugugaaaguuu

SEQ ID NO: 1544824 - RNA, 19 nt, Artificial Sequence
  Description of Artificial Sequence: Synthetic oligonucleotide
gaaccuacauccuccaggu

SEQ ID NO: 1544825 - RNA, 19 nt, Artificial Sequence
  Description of Artificial Sequence: Synthetic oligonucleotide
gugaauaguggggaaugag

SEQ ID NO: 1544826 - RNA, 19 nt, Artificial Sequence
  Description of Artificial Sequence: Synthetic oligonucleotide
gaguucuaaaaguugucgu

SEQ ID NO: 1544827 - RNA, 19 nt, Artificial Sequence
  Description of Artificial Sequence: Synthetic oligonucleotide
ucuucgcgagaccuccuug

SEQ ID NO: 1544828 - RNA, 19 nt, Artificial Sequence
  Description of Artificial Sequence: Synthetic oligonucleotide
guaccuauagggcucuaga

SEQ ID NO: 1544829 - RNA, 19 nt, Artificial Sequence
  Description of Artificial Sequence: Synthetic oligonucleotide
ucucagacuucaagccgcc

SEQ ID NO: 1544830 - RNA, 19 nt, Artificial Sequence
  Description of Artificial Sequence: Synthetic oligonucleotide
ccucaauuuguuuguaggc

SEQ ID NO: 1544831 - RNA, 19 nt, Artificial Sequence
  Description of Artificial Sequence: Synthetic oligonucleotide
guagauuggcauaaucauc

SEQ ID NO: 1544832 - RNA, 19 nt, Artificial Sequence
  Description of Artificial Sequence: Synthetic oligonucleotide
uguaucaagcaguggcuuu

SEQ ID NO: 1544833 - RNA, 19 nt, Artificial Sequence
  Description of Artificial Sequence: Synthetic oligonucleotide
augagaccuacugcuaguc

SEQ ID NO: 1544834 - RNA, 19 nt, Artificial Sequence
  Description of Artificial Sequence: Synthetic oligonucleotide
uuggcauaaucaucucuaa

SEQ ID NO: 1544835 - RNA, 19 nt, Artificial Sequence
  Description of Artificial Sequence: Synthetic oligonucleotide
uggcauaaucaucucuaau

SEQ ID NO: 1544836 - RNA, 19 nt, Artificial Sequence
  Description of Artificial Sequence: Synthetic oligonucleotide
ucaagcucucuaagagugu

SEQ ID NO: 1544837 - RNA, 19 nt, Artificial Sequence
  Description of Artificial Sequence: Synthetic oligonucleotide
ccacuggaaaaccacgucg

SEQ ID NO: 1544838 - RNA, 19 nt, Artificial Sequence
  Description of Artificial Sequence: Synthetic oligonucleotide
aguguaucaagcaguggcu

SEQ ID NO: 1544839 - RNA, 19 nt, Artificial Sequence
  Description of Artificial Sequence: Synthetic oligonucleotide
cuaaaaguugucgugugaa

SEQ ID NO: 1544840 - RNA, 19 nt, Artificial Sequence
  Description of Artificial Sequence: Synthetic oligonucleotide
caagccgccgguccgagac

SEQ ID NO: 1544841 - RNA, 19 nt, Artificial Sequence
  Description of Artificial Sequence: Synthetic oligonucleotide
cucgauaucaucgaugagu

SEQ ID NO: 1544842 - RNA, 19 nt, Artificial Sequence
  Description of Artificial Sequence: Synthetic oligonucleotide
agagaacaacugcaugaga

SEQ ID NO: 1544843 - RNA, 19 nt, Artificial Sequence
  Description of Artificial Sequence: Synthetic oligonucleotide
augauaaucuguaguuugu

SEQ ID NO: 1544844 - RNA, 19 nt, Artificial Sequence
  Description of Artificial Sequence: Synthetic oligonucleotide
gcucucuaagaguguaucg

SEQ ID NO: 1544845 - RNA, 19 nt, Artificial Sequence
  Description of Artificial Sequence: Synthetic oligonucleotide
ucuuuggcgcaggauauuc

SEQ ID NO: 1544846 - RNA, 19 nt, Artificial Sequence
  Description of Artificial Sequence: Synthetic oligonucleotide
gugaucaaguguuaagacu

SEQ ID NO: 1544847 - RNA, 19 nt, Artificial Sequence
  Description of Artificial Sequence: Synthetic oligonucleotide
aagccacuagugcaggguu

SEQ ID NO: 1544848 - RNA, 19 nt, Artificial Sequence
  Description of Artificial Sequence: Synthetic oligonucleotide
aguggaaauugaaccuggg

SEQ ID NO: 1544849 - RNA, 19 nt, Artificial Sequence
  Description of Artificial Sequence: Synthetic oligonucleotide
ucgcgagaccuccuuggag

SEQ ID NO: 1544850 - RNA, 19 nt, Artificial Sequence
  Description of Artificial Sequence: Synthetic oligonucleotide
gauuggcauaaucaucucu

SEQ ID NO: 1544851 - RNA, 19 nt, Artificial Sequence
  Description of Artificial Sequence: Synthetic oligonucleotide
ugugugccacuggaaaacc

SEQ ID NO: 1544852 - RNA, 19 nt, Artificial Sequence
  Description of Artificial Sequence: Synthetic oligonucleotide
uagugcaggguucccgcca

SEQ ID NO: 1544853 - RNA, 19 nt, Artificial Sequence
  Description of Artificial Sequence: Synthetic oligonucleotide
ccuauagggcucuagaaga

SEQ ID NO: 1544854 - RNA, 19 nt, Artificial Sequence
  Description of Artificial Sequence: Synthetic oligonucleotide
cucucuaagaguguaucga

SEQ ID NO: 1544855 - RNA, 19 nt, Artificial Sequence
  Description of Artificial Sequence: Synthetic oligonucleotide
aacuucuaugugggcagug

SEQ ID NO: 1544856 - RNA, 19 nt, Artificial Sequence
  Description of Artificial Sequence: Synthetic oligonucleotide
acuggaaaaccacgucgga

SEQ ID NO: 1544857 - RNA, 19 nt, Artificial Sequence
  Description of Artificial Sequence: Synthetic oligonucleotide
aagagaccaaguguaucaa

SEQ ID NO: 1544858 - RNA, 19 nt, Artificial Sequence
  Description of Artificial Sequence: Synthetic oligonucleotide
acgucggagcuuugaauug

SEQ ID NO: 1544859 - RNA, 19 nt, Artificial Sequence
  Description of Artificial Sequence: Synthetic oligonucleotide
gaugaguaagcuggcauua

SEQ ID NO: 1544860 - RNA, 19 nt, Artificial Sequence
  Description of Artificial Sequence: Synthetic oligonucleotide
aguaaauaucuaggccuug

SEQ ID NO: 1544861 - RNA, 19 nt, Artificial Sequence
  Description of Artificial Sequence: Synthetic oligonucleotide
auggcgugaauagugggga

SEQ ID NO: 1544862 - RNA, 19 nt, Artificial Sequence
  Description of Artificial Sequence: Synthetic oligonucleotide
aauuuguuuguaggcuuua

SEQ ID NO: 1544863 - RNA, 19 nt, Artificial Sequence
  Description of Artificial Sequence: Synthetic oligonucleotide
caucgaugaguaagcuggc

SEQ ID NO: 1544864 - RNA, 19 nt, Artificial Sequence
  Description of Artificial Sequence: Synthetic oligonucleotide
uuacucggugcaagaaaau

SEQ ID NO: 1544865 - RNA, 19 nt, Artificial Sequence
  Description of Artificial Sequence: Synthetic oligonucleotide
acaucuuacuuaaaugcuu

SEQ ID NO: 1544866 - RNA, 19 nt, Artificial Sequence
  Description of Artificial Sequence: Synthetic oligonucleotide
gcaugagaccuacugcuag

SEQ ID NO: 1544867 - RNA, 19 nt, Artificial Sequence
  Description of Artificial Sequence: Synthetic oligonucleotide
cccuccaguaaauaucuag

SEQ ID NO: 1544868 - RNA, 19 nt, Artificial Sequence
  Description of Artificial Sequence: Synthetic oligonucleotide
uacucggugcaagaaaaua

SEQ ID NO: 1544869 - RNA, 19 nt, Artificial Sequence
  Description of Artificial Sequence: Synthetic oligonucleotide
uucgcgagaccuccuugga

SEQ ID NO: 1544870 - RNA, 19 nt, Artificial Sequence
  Description of Artificial Sequence: Synthetic oligonucleotide
uacuugguuuuggagacua

SEQ ID NO: 1544871 - RNA, 19 nt, Artificial Sequence
  Description of Artificial Sequence: Synthetic oligonucleotide
aagaagagaccaaguguau

SEQ ID NO: 1544872 - RNA, 19 nt, Artificial Sequence
  Description of Artificial Sequence: Synthetic oligonucleotide
gguuuuggagacuaguacu

SEQ ID NO: 1544873 - RNA, 19 nt, Artificial Sequence
  Description of Artificial Sequence: Synthetic oligonucleotide
uaaguaccuauagggcucu

SEQ ID NO: 1544874 - RNA, 19 nt, Artificial Sequence
  Description of Artificial Sequence: Synthetic oligonucleotide
gaacaacugcaugagaccu

SEQ ID NO: 1544875 - RNA, 19 nt, Artificial Sequence
  Description of Artificial Sequence: Synthetic oligonucleotide
cuuagaugcugauaaacuu

SEQ ID NO: 1544876 - RNA, 19 nt, Artificial Sequence
  Description of Artificial Sequence: Synthetic oligonucleotide
cuuucagccagugauuaaa

SEQ ID NO: 1544877 - RNA, 19 nt, Artificial Sequence
  Description of Artificial Sequence: Synthetic oligonucleotide
ccaaguguaucaagcagug

SEQ ID NO: 1544878 - RNA, 19 nt, Artificial Sequence
  Description of Artificial Sequence: Synthetic oligonucleotide
ccaguaaauaucuaggccu

SEQ ID NO: 1544879 - RNA, 19 nt, Artificial Sequence
  Description of Artificial Sequence: Synthetic oligonucleotide
uuucuggccuugaccaaau

SEQ ID NO: 1544880 - RNA, 19 nt, Artificial Sequence
  Description of Artificial Sequence: Synthetic oligonucleotide
uauagggcucuagaagaau

SEQ ID NO: 1544881 - RNA, 19 nt, Artificial Sequence
  Description of Artificial Sequence: Synthetic oligonucleotide
uguccucgauaucaucgau

SEQ ID NO: 1544882 - RNA, 19 nt, Artificial Sequence
  Description of Artificial Sequence: Synthetic oligonucleotide
uucugacaauaaaacuguu

SEQ ID NO: 1544883 - RNA, 19 nt, Artificial Sequence
  Description of Artificial Sequence: Synthetic oligonucleotide
cauuacucggugcaagaaa

SEQ ID NO: 1544884 - RNA, 19 nt, Artificial Sequence
  Description of Artificial Sequence: Synthetic oligonucleotide
ugcuucacuaaagccacua

SEQ ID NO: 1544885 - RNA, 19 nt, Artificial Sequence
  Description of Artificial Sequence: Synthetic oligonucleotide
aguugucgugugaaaagcu

SEQ ID NO: 1544886 - RNA, 19 nt, Artificial Sequence
  Description of Artificial Sequence: Synthetic oligonucleotide
cugguaauugaaguaagua

SEQ ID NO: 1544887 - RNA, 19 nt, Artificial Sequence
  Description of Artificial Sequence: Synthetic oligonucleotide
cacuucaaugauaaucugu

SEQ ID NO: 1544888 - RNA, 19 nt, Artificial Sequence
  Description of Artificial Sequence: Synthetic oligonucleotide
acucugagucuaaucaaga

SEQ ID NO: 1544889 - RNA, 19 nt, Artificial Sequence
  Description of Artificial Sequence: Synthetic oligonucleotide
accaaauggcgugaauagu

SEQ ID NO: 1544890 - RNA, 19 nt, Artificial Sequence
  Description of Artificial Sequence: Synthetic oligonucleotide
auaauccaccugucuucug

SEQ ID NO: 1544891 - RNA, 19 nt, Artificial Sequence
  Description of Artificial Sequence: Synthetic oligonucleotide
agggcucuagaagaauucu

SEQ ID NO: 1544892 - RNA, 19 nt, Artificial Sequence
  Description of Artificial Sequence: Synthetic oligonucleotide
gccuugaccaaauggcgug

SEQ ID NO: 1544893 - RNA, 19 nt, Artificial Sequence
  Description of Artificial Sequence: Synthetic oligonucleotide
cuauagggcucuagaagaa

SEQ ID NO: 1544894 - RNA, 19 nt, Artificial Sequence
  Description of Artificial Sequence: Synthetic oligonucleotide
uucuguaccugggugcuuu

SEQ ID NO: 1544895 - RNA, 19 nt, Artificial Sequence
  Description of Artificial Sequence: Synthetic oligonucleotide
cucaauuuguuuguaggcu

SEQ ID NO: 1544896 - RNA, 19 nt, Artificial Sequence
  Description of Artificial Sequence: Synthetic oligonucleotide
agcuuugaauuguccucga

SEQ ID NO: 1544897 - RNA, 19 nt, Artificial Sequence
  Description of Artificial Sequence: Synthetic oligonucleotide
ucuagcucuuaaguuugua

SEQ ID NO: 1544898 - RNA, 19 nt, Artificial Sequence
  Description of Artificial Sequence: Synthetic oligonucleotide
gcuucacuaaagccacuag

SEQ ID NO: 1544899 - RNA, 19 nt, Artificial Sequence
  Description of Artificial Sequence: Synthetic oligonucleotide
acaaagggauucugacaau

SEQ ID NO: 1544900 - RNA, 19 nt, Artificial Sequence
  Description of Artificial Sequence: Synthetic oligonucleotide
gggugaucaaguguuaaga

SEQ ID NO: 1544901 - RNA, 19 nt, Artificial Sequence
  Description of Artificial Sequence: Synthetic oligonucleotide
guguaucgaguauauucaa

SEQ ID NO: 1544902 - RNA, 19 nt, Artificial Sequence
  Description of Artificial Sequence: Synthetic oligonucleotide
gcaguggaaauugaaccug

SEQ ID NO: 1544903 - RNA, 19 nt, Artificial Sequence
  Description of Artificial Sequence: Synthetic oligonucleotide
agaugggaucccauagaug

SEQ ID NO: 1544904 - RNA, 19 nt, Artificial Sequence
  Description of Artificial Sequence: Synthetic oligonucleotide
acuggacuuagaugcugau

SEQ ID NO: 1544905 - RNA, 19 nt, Artificial Sequence
  Description of Artificial Sequence: Synthetic oligonucleotide
auagggcucuagaagaauu

SEQ ID NO: 1544906 - RNA, 19 nt, Artificial Sequence
  Description of Artificial Sequence: Synthetic oligonucleotide
guaaauaucuaggccuugu

SEQ ID NO: 1544907 - RNA, 19 nt, Artificial Sequence
  Description of Artificial Sequence: Synthetic oligonucleotide
ucagaccgcggcucuucgc

SEQ ID NO: 1544908 - RNA, 19 nt, Artificial Sequence
  Description of Artificial Sequence: Synthetic oligonucleotide
aaccacgucggagcuuuga

SEQ ID NO: 1544909 - RNA, 19 nt, Artificial Sequence
  Description of Artificial Sequence: Synthetic oligonucleotide
cuagcucuuaaguuuguau

SEQ ID NO: 1544910 - RNA, 19 nt, Artificial Sequence
  Description of Artificial Sequence: Synthetic oligonucleotide
gacuaguacuugaaaagau

SEQ ID NO: 1544911 - RNA, 19 nt, Artificial Sequence
  Description of Artificial Sequence: Synthetic oligonucleotide
gcgcaggauauucuguacc

SEQ ID NO: 1544912 - RNA, 19 nt, Artificial Sequence
  Description of Artificial Sequence: Synthetic oligonucleotide
aucauuggaacuggacuua

SEQ ID NO: 1544913 - RNA, 19 nt, Artificial Sequence
  Description of Artificial Sequence: Synthetic oligonucleotide
gaucccauagaugcugugu

SEQ ID NO: 1544914 - RNA, 19 nt, Artificial Sequence
  Description of Artificial Sequence: Synthetic oligonucleotide
agguguaggugucccucca

SEQ ID NO: 1544915 - RNA, 19 nt, Artificial Sequence
  Description of Artificial Sequence: Synthetic oligonucleotide
gaccgcggcucuucgcgag

SEQ ID NO: 1544916 - RNA, 19 nt, Artificial Sequence
  Description of Artificial Sequence: Synthetic oligonucleotide
cacgaugaucucagacuuc

SEQ ID NO: 1544917 - RNA, 19 nt, Artificial Sequence
  Description of Artificial Sequence: Synthetic oligonucleotide
aucgaugaguaagcuggca

SEQ ID NO: 1544918 - RNA, 19 nt, Artificial Sequence
  Description of Artificial Sequence: Synthetic oligonucleotide
uuacuugguuuuggagacu

SEQ ID NO: 1544919 - RNA, 19 nt, Artificial Sequence
  Description of Artificial Sequence: Synthetic oligonucleotide
cgcgagaccuccuuggagc

SEQ ID NO: 1544920 - RNA, 19 nt, Artificial Sequence
  Description of Artificial Sequence: Synthetic oligonucleotide
cccauagaugcugugugcc

SEQ ID NO: 1544921 - RNA, 19 nt, Artificial Sequence
  Description of Artificial Sequence: Synthetic oligonucleotide
agccacuagugcaggguuc

SEQ ID NO: 1544922 - RNA, 19 nt, Artificial Sequence
  Description of Artificial Sequence: Synthetic oligonucleotide
guaucaagcaguggcuuua

SEQ ID NO: 1544923 - RNA, 19 nt, Artificial Sequence
  Description of Artificial Sequence: Synthetic oligonucleotide
guuucacccacaucacccu

SEQ ID NO: 1544924 - RNA, 19 nt, Artificial Sequence
  Description of Artificial Sequence: Synthetic oligonucleotide
cauuggaacuggacuuaga

SEQ ID NO: 1544925 - RNA, 19 nt, Artificial Sequence
  Description of Artificial Sequence: Synthetic oligonucleotide
cuugguuuuggagacuagu

SEQ ID NO: 1544926 - RNA, 19 nt, Artificial Sequence
  Description of Artificial Sequence: Synthetic oligonucleotide
aagcucucuaagaguguau

SEQ ID NO: 1544927 - RNA, 19 nt, Artificial Sequence
  Description of Artificial Sequence: Synthetic oligonucleotide
ggaguguagauuggcauaa

SEQ ID NO: 1544928 - RNA, 19 nt, Artificial Sequence
  Description of Artificial Sequence: Synthetic oligonucleotide
cacagaaaucuccgcccuc

SEQ ID NO: 1544929 - RNA, 19 nt, Artificial Sequence
  Description of Artificial Sequence: Synthetic oligonucleotide
gccgguccgagacaagcag

SEQ ID NO: 1544930 - RNA, 19 nt, Artificial Sequence
  Description of Artificial Sequence: Synthetic oligonucleotide
acuugguuuuggagacuag

SEQ ID NO: 1544931 - RNA, 19 nt, Artificial Sequence
  Description of Artificial Sequence: Synthetic oligonucleotide
uggcgugaauaguggggaa

SEQ ID NO: 1544932 - RNA, 19 nt, Artificial Sequence
  Description of Artificial Sequence: Synthetic oligonucleotide
gcgugaauaguggggaaug

SEQ ID NO: 1544933 - RNA, 19 nt, Artificial Sequence
  Description of Artificial Sequence: Synthetic oligonucleotide
aguuugucuucuggaacuu

SEQ ID NO: 1544934 - RNA, 19 nt, Artificial Sequence
  Description of Artificial Sequence: Synthetic oligonucleotide
cucagacuucaagccgccg

SEQ ID NO: 1544935 - RNA, 19 nt, Artificial Sequence
  Description of Artificial Sequence: Synthetic oligonucleotide
augaguaagcuggcauuau

SEQ ID NO: 1544936 - RNA, 19 nt, Artificial Sequence
  Description of Artificial Sequence: Synthetic oligonucleotide
gucccuccaguaaauaucu

SEQ ID NO: 1544937 - RNA, 19 nt, Artificial Sequence
  Description of Artificial Sequence: Synthetic oligonucleotide
aaccuacauccuccaggua

SEQ ID NO: 1544938 - RNA, 19 nt, Artificial Sequence
  Description of Artificial Sequence: Synthetic oligonucleotide
cuaagaguguaucgaguau

SEQ ID NO: 1544939 - RNA, 19 nt, Artificial Sequence
  Description of Artificial Sequence: Synthetic oligonucleotide
ggcucuucgcgagaccucc

SEQ ID NO: 1544940 - RNA, 19 nt, Artificial Sequence
  Description of Artificial Sequence: Synthetic oligonucleotide
agaccuacugcuaguccaa

SEQ ID NO: 1544941 - RNA, 19 nt, Artificial Sequence
  Description of Artificial Sequence: Synthetic oligonucleotide
caagcucucuaagagugua

SEQ ID NO: 1544942 - RNA, 19 nt, Artificial Sequence
  Description of Artificial Sequence: Synthetic oligonucleotide
caugagaccuacugcuagu

SEQ ID NO: 1544943 - RNA, 19 nt, Artificial Sequence
  Description of Artificial Sequence: Synthetic oligonucleotide
gcgagaccuccuuggagcc

SEQ ID NO: 1544944 - RNA, 19 nt, Artificial Sequence
  Description of Artificial Sequence: Synthetic oligonucleotide
caucugggugaucaagugu

SEQ ID NO: 1544945 - RNA, 19 nt, Artificial Sequence
  Description of Artificial Sequence: Synthetic oligonucleotide
gguucucaccuguuuaccu

SEQ ID NO: 1544946 - RNA, 19 nt, Artificial Sequence
  Description of Artificial Sequence: Synthetic oligonucleotide
cuccgcccuccucagcggc

SEQ ID NO: 1544947 - RNA, 19 nt, Artificial Sequence
  Description of Artificial Sequence: Synthetic oligonucleotide
agaccgcggcucuucgcga

SEQ ID NO: 1544948 - RNA, 19 nt, Artificial Sequence
  Description of Artificial Sequence: Synthetic oligonucleotide
guucagaccgcggcucuuc

SEQ ID NO: 1544949 - RNA, 19 nt, Artificial Sequence
  Description of Artificial Sequence: Synthetic oligonucleotide
guguaggugucccuccagu

SEQ ID NO: 1544950 - RNA, 19 nt, Artificial Sequence
  Description of Artificial Sequence: Synthetic oligonucleotide
caacaccauggcuuuauau

SEQ ID NO: 1544951 - RNA, 19 nt, Artificial Sequence
  Description of Artificial Sequence: Synthetic oligonucleotide
uucuuuggcgcaggauauu

SEQ ID NO: 1544952 - RNA, 19 nt, Artificial Sequence
  Description of Artificial Sequence: Synthetic oligonucleotide
caucucuaaucuggaagaa

SEQ ID NO: 1544953 - RNA, 19 nt, Artificial Sequence
  Description of Artificial Sequence: Synthetic oligonucleotide
ucccuccaguaaauaucua

SEQ ID NO: 1544954 - RNA, 19 nt, Artificial Sequence
  Description of Artificial Sequence: Synthetic oligonucleotide
guucuuuggcgcaggauau

SEQ ID NO: 1544955 - RNA, 19 nt, Artificial Sequence
  Description of Artificial Sequence: Synthetic oligonucleotide
gaacuuucagccagugauu

SEQ ID NO: 1544956 - RNA, 19 nt, Artificial Sequence
  Description of Artificial Sequence: Synthetic oligonucleotide
cuuuggcgcaggauauucu

SEQ ID NO: 1544957 - RNA, 19 nt, Artificial Sequence
  Description of Artificial Sequence: Synthetic oligonucleotide
gucggagcuuugaauuguc

SEQ ID NO: 1544958 - RNA, 19 nt, Artificial Sequence
  Description of Artificial Sequence: Synthetic oligonucleotide
ccaccugucuucugcaaca

SEQ ID NO: 1544959 - RNA, 19 nt, Artificial Sequence
  Description of Artificial Sequence: Synthetic oligonucleotide
ggacuuagaugcugauaaa

SEQ ID NO: 1544960 - RNA, 19 nt, Artificial Sequence
  Description of Artificial Sequence: Synthetic oligonucleotide
cugggugaucaaguguuaa

SEQ ID NO: 1544961 - RNA, 19 nt, Artificial Sequence
  Description of Artificial Sequence: Synthetic oligonucleotide
ggggaaugagaacuuuccu

SEQ ID NO: 1544962 - RNA, 19 nt, Artificial Sequence
  Description of Artificial Sequence: Synthetic oligonucleotide
ccaaauaauccaccugucu

SEQ ID NO: 1544963 - RNA, 19 nt, Artificial Sequence
  Description of Artificial Sequence: Synthetic oligonucleotide
cccugauggaguucuaaaa

SEQ ID NO: 1544964 - RNA, 19 nt, Artificial Sequence
  Description of Artificial Sequence: Synthetic oligonucleotide
agccauuucucuagcucuu

SEQ ID NO: 1544965 - RNA, 19 nt, Artificial Sequence
  Description of Artificial Sequence: Synthetic oligonucleotide
cuggacuuagaugcugaua

SEQ ID NO: 1544966 - RNA, 19 nt, Artificial Sequence
  Description of Artificial Sequence: Synthetic oligonucleotide
ccauuagaucauuggaacu

SEQ ID NO: 1544967 - RNA, 19 nt, Artificial Sequence
  Description of Artificial Sequence: Synthetic oligonucleotide
gccgccgcauuacucggug

SEQ ID NO: 1544968 - RNA, 19 nt, Artificial Sequence
  Description of Artificial Sequence: Synthetic oligonucleotide
ugggugcuuucuggccuug

SEQ ID NO: 1544969 - RNA, 19 nt, Artificial Sequence
  Description of Artificial Sequence: Synthetic oligonucleotide
aaaccacgucggagcuuug

SEQ ID NO: 1544970 - RNA, 19 nt, Artificial Sequence
  Description of Artificial Sequence: Synthetic oligonucleotide
cuucaagccgccgguccga

SEQ ID NO: 1544971 - RNA, 19 nt, Artificial Sequence
  Description of Artificial Sequence: Synthetic oligonucleotide
accgcggcucuucgcgaga

SEQ ID NO: 1544972 - RNA, 19 nt, Artificial Sequence
  Description of Artificial Sequence: Synthetic oligonucleotide
aggugucccuccaguaaau

SEQ ID NO: 1544973 - RNA, 19 nt, Artificial Sequence
  Description of Artificial Sequence: Synthetic oligonucleotide
ccucgauaucaucgaugag

SEQ ID NO: 1544974 - RNA, 19 nt, Artificial Sequence
  Description of Artificial Sequence: Synthetic oligonucleotide
gcauuacucggugcaagaa

SEQ ID NO: 1544975 - RNA, 19 nt, Artificial Sequence
  Description of Artificial Sequence: Synthetic oligonucleotide
ccgcauuacucggugcaag

SEQ ID NO: 1544976 - RNA, 19 nt, Artificial Sequence
  Description of Artificial Sequence: Synthetic oligonucleotide
ccugguaauugaaguaagu

SEQ ID NO: 1544977 - RNA, 19 nt, Artificial Sequence
  Description of Artificial Sequence: Synthetic oligonucleotide
gguccgagacaagcaguac

SEQ ID NO: 1544978 - RNA, 19 nt, Artificial Sequence
  Description of Artificial Sequence: Synthetic oligonucleotide
caguggcuuuaaaucuucu

SEQ ID NO: 1544979 - RNA, 19 nt, Artificial Sequence
  Description of Artificial Sequence: Synthetic oligonucleotide
aaguaccuauagggcucua

SEQ ID NO: 1544980 - RNA, 19 nt, Artificial Sequence
  Description of Artificial Sequence: Synthetic oligonucleotide
auguagcauuucagucacu

SEQ ID NO: 1544981 - RNA, 19 nt, Artificial Sequence
  Description of Artificial Sequence: Synthetic oligonucleotide
ccgccgguccgagacaagc

SEQ ID NO: 1544982 - RNA, 19 nt, Artificial Sequence
  Description of Artificial Sequence: Synthetic oligonucleotide
gaaaaccacgucggagcuu

SEQ ID NO: 1544983 - RNA, 19 nt, Artificial Sequence
  Description of Artificial Sequence: Synthetic oligonucleotide
cgcauuacucggugcaaga

SEQ ID NO: 1544984 - RNA, 19 nt, Artificial Sequence
  Description of Artificial Sequence: Synthetic oligonucleotide
ggugucccuccaguaaaua

SEQ ID NO: 1544985 - RNA, 19 nt, Artificial Sequence
  Description of Artificial Sequence: Synthetic oligonucleotide
gccaccgccgccgcauuac

SEQ ID NO: 1544986 - RNA, 19 nt, Artificial Sequence
  Description of Artificial Sequence: Synthetic oligonucleotide
ggcgugaauaguggggaau

SEQ ID NO: 1544987 - RNA, 19 nt, Artificial Sequence
  Description of Artificial Sequence: Synthetic oligonucleotide
ccgccgcauuacucggugc

SEQ ID NO: 1544988 - RNA, 19 nt, Artificial Sequence
  Description of Artificial Sequence: Synthetic oligonucleotide
cgugaauaguggggaauga

SEQ ID NO: 1544989 - RNA, 19 nt, Artificial Sequence
  Description of Artificial Sequence: Synthetic oligonucleotide
cgccgcauuacucggugca

SEQ ID NO: 1544990 - RNA, 19 nt, Artificial Sequence
  Description of Artificial Sequence: Synthetic oligonucleotide
gcggcucuucgcgagaccu

SEQ ID NO: 1544991 - RNA, 19 nt, Artificial Sequence
  Description of Artificial Sequence: Synthetic oligonucleotide
cucuucgcgagaccuccuu

SEQ ID NO: 1544992 - RNA, 19 nt, Artificial Sequence
  Description of Artificial Sequence: Synthetic oligonucleotide
cugggugcuuucuggccuu

SEQ ID NO: 1544993 - RNA, 19 nt, Artificial Sequence
  Description of Artificial Sequence: Synthetic oligonucleotide
caacugcaugagaccuacu

SEQ ID NO: 1544994 - RNA, 19 nt, Artificial Sequence
  Description of Artificial Sequence: Synthetic oligonucleotide
gggcucuagaagaauucuu

SEQ ID NO: 1544995 - RNA, 19 nt, Artificial Sequence
  Description of Artificial Sequence: Synthetic oligonucleotide
cgguccgagacaagcagua

SEQ ID NO: 1544996 - RNA, 19 nt, Artificial Sequence
  Description of Artificial Sequence: Synthetic oligonucleotide
gccgcauuacucggugcaa

SEQ ID NO: 1544997 - RNA, 19 nt, Artificial Sequence
  Description of Artificial Sequence: Synthetic oligonucleotide
cccgccacaggccucaauu

SEQ ID NO: 1544998 - RNA, 19 nt, Artificial Sequence
  Description of Artificial Sequence: Synthetic oligonucleotide
ccgagacaagcaguaccca

SEQ ID NO: 1544999 - RNA, 19 nt, Artificial Sequence
  Description of Artificial Sequence: Synthetic oligonucleotide
ccacaucaacuucucacuu

SEQ ID NO: 1545000 - RNA, 19 nt, Artificial Sequence
  Description of Artificial Sequence: Synthetic oligonucleotide
cgauaucaucgaugaguaa

SEQ ID NO: 1545001 - RNA, 19 nt, Artificial Sequence
  Description of Artificial Sequence: Synthetic oligonucleotide
cacccucauuuacuugguu

SEQ ID NO: 1545002 - RNA, 19 nt, Artificial Sequence
  Description of Artificial Sequence: Synthetic oligonucleotide
ccgguccgagacaagcagu

SEQ ID NO: 1545003 - RNA, 19 nt, Artificial Sequence
  Description of Artificial Sequence: Synthetic oligonucleotide
cgccgguccgagacaagca

SEQ ID NO: 1545004 - RNA, 19 nt, Artificial Sequence
  Description of Artificial Sequence: Synthetic oligonucleotide
ccgcggcucuucgcgagac

SEQ ID NO: 1545005 - RNA, 19 nt, Artificial Sequence
  Description of Artificial Sequence: Synthetic oligonucleotide
cggcucuucgcgagaccuc

SEQ ID NO: 1545006 - RNA, 19 nt, Artificial Sequence
  Description of Artificial Sequence: Synthetic oligonucleotide
cgucggagcuuugaauugu

SEQ ID NO: 1545007 - RNA, 19 nt, Artificial Sequence
  Description of Artificial Sequence: Synthetic oligonucleotide
gccgccgguccgagacaag

SEQ ID NO: 1545008 - RNA, 19 nt, Artificial Sequence
  Description of Artificial Sequence: Synthetic oligonucleotide
ccgccacaggccucaauuu

SEQ ID NO: 1545009 - RNA, 19 nt, Artificial Sequence
  Description of Artificial Sequence: Synthetic oligonucleotide
gcucuucgcgagaccuccu

SEQ ID NO: 1545010 - RNA, 19 nt, Artificial Sequence
  Description of Artificial Sequence: Synthetic oligonucleotide
cgccgccgcauuacucggu

SEQ ID NO: 1545011 - RNA, 19 nt, Artificial Sequence
  Description of Artificial Sequence: Synthetic oligonucleotide
aauuacgccauuucgaugc

SEQ ID NO: 1545012 - RNA, 19 nt, Artificial Sequence
  Description of Artificial Sequence: Synthetic oligonucleotide
aaaguagaaguucucaaac

SEQ ID NO: 1545013 - RNA, 19 nt, Artificial Sequence
  Description of Artificial Sequence: Synthetic oligonucleotide
auuguuauaagcugugggc

SEQ ID NO: 1545014 - RNA, 19 nt, Artificial Sequence
  Description of Artificial Sequence: Synthetic oligonucleotide
ugauauucuaguaaagucc

SEQ ID NO: 1545015 - RNA, 19 nt, Artificial Sequence
  Description of Artificial Sequence: Synthetic oligonucleotide
ucuaguaaaguccugccag

SEQ ID NO: 1545016 - RNA, 19 nt, Artificial Sequence
  Description of Artificial Sequence: Synthetic oligonucleotide
uucacuauuagucccaaug

SEQ ID NO: 1545017 - RNA, 19 nt, Artificial Sequence
  Description of Artificial Sequence: Synthetic oligonucleotide
augauauucuaguaaaguc

SEQ ID NO: 1545018 - RNA, 19 nt, Artificial Sequence
  Description of Artificial Sequence: Synthetic oligonucleotide
uuuaggaaugcuaauagau

SEQ ID NO: 1545019 - RNA, 19 nt, Artificial Sequence
  Description of Artificial Sequence: Synthetic oligonucleotide
aggaucgucauucauguac

SEQ ID NO: 1545020 - RNA, 19 nt, Artificial Sequence
  Description of Artificial Sequence: Synthetic oligonucleotide
auguggauaauuuuccugg

SEQ ID NO: 1545021 - RNA, 19 nt, Artificial Sequence
  Description of Artificial Sequence: Synthetic oligonucleotide
cuugaagauauauuugccg

SEQ ID NO: 1545022 - RNA, 19 nt, Artificial Sequence
  Description of Artificial Sequence: Synthetic oligonucleotide
uuuacaacgcugcagaauc

SEQ ID NO: 1545023 - RNA, 19 nt, Artificial Sequence
  Description of Artificial Sequence: Synthetic oligonucleotide
augugaauggaauugagcu

SEQ ID NO: 1545024 - RNA, 19 nt, Artificial Sequence
  Description of Artificial Sequence: Synthetic oligonucleotide
ucuaaagguguccauaaga

SEQ ID NO: 1545025 - RNA, 19 nt, Artificial Sequence
  Description of Artificial Sequence: Synthetic oligonucleotide
uaauagauguuuuagucuc

SEQ ID NO: 1545026 - RNA, 19 nt, Artificial Sequence
  Description of Artificial Sequence: Synthetic oligonucleotide
uccuugaagauauauuugc

SEQ ID NO: 1545027 - RNA, 19 nt, Artificial Sequence
  Description of Artificial Sequence: Synthetic oligonucleotide
accaucgauuguuauaagc

SEQ ID NO: 1545028 - RNA, 19 nt, Artificial Sequence
  Description of Artificial Sequence: Synthetic oligonucleotide
aacuaugugcuuguagagc

SEQ ID NO: 1545029 - RNA, 19 nt, Artificial Sequence
  Description of Artificial Sequence: Synthetic oligonucleotide
auucuaguaaaguccugcc

SEQ ID NO: 1545030 - RNA, 19 nt, Artificial Sequence
  Description of Artificial Sequence: Synthetic oligonucleotide
acuuaaaagcaccaacauc

SEQ ID NO: 1545031 - RNA, 19 nt, Artificial Sequence
  Description of Artificial Sequence: Synthetic oligonucleotide
ucuccaaaugauauucuag

SEQ ID NO: 1545032 - RNA, 19 nt, Artificial Sequence
  Description of Artificial Sequence: Synthetic oligonucleotide
ucacuauuagucccaaugc

SEQ ID NO: 1545033 - RNA, 19 nt, Artificial Sequence
  Description of Artificial Sequence: Synthetic oligonucleotide
agcaccaacaucccaauag

SEQ ID NO: 1545034 - RNA, 19 nt, Artificial Sequence
  Description of Artificial Sequence: Synthetic oligonucleotide
uucauauggacuuuggcau

SEQ ID NO: 1545035 - RNA, 19 nt, Artificial Sequence
  Description of Artificial Sequence: Synthetic oligonucleotide
aauugagcuucagggaacc

SEQ ID NO: 1545036 - RNA, 19 nt, Artificial Sequence
  Description of Artificial Sequence: Synthetic oligonucleotide
agauagaaagggaugaggg

SEQ ID NO: 1545037 - RNA, 19 nt, Artificial Sequence
  Description of Artificial Sequence: Synthetic oligonucleotide
ucagaauauuccauggagu

SEQ ID NO: 1545038 - RNA, 19 nt, Artificial Sequence
  Description of Artificial Sequence: Synthetic oligonucleotide
uauucuaguaaaguccugc

SEQ ID NO: 1545039 - RNA, 19 nt, Artificial Sequence
  Description of Artificial Sequence: Synthetic oligonucleotide
acuaugugcuuguagagca

SEQ ID NO: 1545040 - RNA, 19 nt, Artificial Sequence
  Description of Artificial Sequence: Synthetic oligonucleotide
ucuuuaaaauguuccggcc

SEQ ID NO: 1545041 - RNA, 19 nt, Artificial Sequence
  Description of Artificial Sequence: Synthetic oligonucleotide
cuuccuauaauuccgacca

SEQ ID NO: 1545042 - RNA, 19 nt, Artificial Sequence
  Description of Artificial Sequence: Synthetic oligonucleotide
uuuaaaauguuccggccau

SEQ ID NO: 1545043 - RNA, 19 nt, Artificial Sequence
  Description of Artificial Sequence: Synthetic oligonucleotide
auaguuuccgaaacugucc

SEQ ID NO: 1545044 - RNA, 19 nt, Artificial Sequence
  Description of Artificial Sequence: Synthetic oligonucleotide
cuucauguggauaauuuuc

SEQ ID NO: 1545045 - RNA, 19 nt, Artificial Sequence
  Description of Artificial Sequence: Synthetic oligonucleotide
aaauguuccggccaucaaa

SEQ ID NO: 1545046 - RNA, 19 nt, Artificial Sequence
  Description of Artificial Sequence: Synthetic oligonucleotide
aggacuaacagagagggug

SEQ ID NO: 1545047 - RNA, 19 nt, Artificial Sequence
  Description of Artificial Sequence: Synthetic oligonucleotide
ucuuccuauaauuccgacc

SEQ ID NO: 1545048 - RNA, 19 nt, Artificial Sequence
  Description of Artificial Sequence: Synthetic oligonucleotide
ucucaaacuucuuuaaaau

SEQ ID NO: 1545049 - RNA, 19 nt, Artificial Sequence
  Description of Artificial Sequence: Synthetic oligonucleotide
agagauuguaccugccuuc

SEQ ID NO: 1545050 - RNA, 19 nt, Artificial Sequence
  Description of Artificial Sequence: Synthetic oligonucleotide
aauuccucuuuacaacgcu

SEQ ID NO: 1545051 - RNA, 19 nt, Artificial Sequence
  Description of Artificial Sequence: Synthetic oligonucleotide
aaccccacgguccauggag

SEQ ID NO: 1545052 - RNA, 19 nt, Artificial Sequence
  Description of Artificial Sequence: Synthetic oligonucleotide
ugccaggacuaacagagag

SEQ ID NO: 1545053 - RNA, 19 nt, Artificial Sequence
  Description of Artificial Sequence: Synthetic oligonucleotide
aauaguuaggugaagcuuu

SEQ ID NO: 1545054 - RNA, 19 nt, Artificial Sequence
  Description of Artificial Sequence: Synthetic oligonucleotide
aaauuacgccauuucgaug

SEQ ID NO: 1545055 - RNA, 19 nt, Artificial Sequence
  Description of Artificial Sequence: Synthetic oligonucleotide
uauggacuuuggcauaaag

SEQ ID NO: 1545056 - RNA, 19 nt, Artificial Sequence
  Description of Artificial Sequence: Synthetic oligonucleotide
uguuauaagcugugggcgc

SEQ ID NO: 1545057 - RNA, 19 nt, Artificial Sequence
  Description of Artificial Sequence: Synthetic oligonucleotide
uguucgggcugaaauuacg

SEQ ID NO: 1545058 - RNA, 19 nt, Artificial Sequence
  Description of Artificial Sequence: Synthetic oligonucleotide
ucgucauucauguacucga

SEQ ID NO: 1545059 - RNA, 19 nt, Artificial Sequence
  Description of Artificial Sequence: Synthetic oligonucleotide
aguaaaguccugccaggac

SEQ ID NO: 1545060 - RNA, 19 nt, Artificial Sequence
  Description of Artificial Sequence: Synthetic oligonucleotide
uccgaaacuguccacugug

SEQ ID NO: 1545061 - RNA, 19 nt, Artificial Sequence
  Description of Artificial Sequence: Synthetic oligonucleotide
cucaucagaauauuccaug

SEQ ID NO: 1545062 - RNA, 19 nt, Artificial Sequence
  Description of Artificial Sequence: Synthetic oligonucleotide
uccaacuaugugcuuguag

SEQ ID NO: 1545063 - RNA, 19 nt, Artificial Sequence
  Description of Artificial Sequence: Synthetic oligonucleotide
cuauuagucccaaugccug

SEQ ID NO: 1545064 - RNA, 19 nt, Artificial Sequence
  Description of Artificial Sequence: Synthetic oligonucleotide
cauaguuuccgaaacuguc

SEQ ID NO: 1545065 - RNA, 19 nt, Artificial Sequence
  Description of Artificial Sequence: Synthetic oligonucleotide
caucccaauaguuagguga

SEQ ID NO: 1545066 - RNA, 19 nt, Artificial Sequence
  Description of Artificial Sequence: Synthetic oligonucleotide
cauaccaggaucgucauuc

SEQ ID NO: 1545067 - RNA, 19 nt, Artificial Sequence
  Description of Artificial Sequence: Synthetic oligonucleotide
ugguccggaauccuugagg

SEQ ID NO: 1545068 - RNA, 19 nt, Artificial Sequence
  Description of Artificial Sequence: Synthetic oligonucleotide
aacaucaauccguguucgg

SEQ ID NO: 1545069 - RNA, 19 nt, Artificial Sequence
  Description of Artificial Sequence: Synthetic oligonucleotide
ucgauuguuauaagcugug

SEQ ID NO: 1545070 - RNA, 19 nt, Artificial Sequence
  Description of Artificial Sequence: Synthetic oligonucleotide
cacuauuagucccaaugcc

SEQ ID NO: 1545071 - RNA, 19 nt, Artificial Sequence
  Description of Artificial Sequence: Synthetic oligonucleotide
auccaugacacuuucucca

SEQ ID NO: 1545072 - RNA, 19 nt, Artificial Sequence
  Description of Artificial Sequence: Synthetic oligonucleotide
auuaaugaauuccucuuua

SEQ ID NO: 1545073 - RNA, 19 nt, Artificial Sequence
  Description of Artificial Sequence: Synthetic oligonucleotide
cuaguaaaguccugccagg

SEQ ID NO: 1545074 - RNA, 19 nt, Artificial Sequence
  Description of Artificial Sequence: Synthetic oligonucleotide
caccucauaggcaucacag

SEQ ID NO: 1545075 - RNA, 19 nt, Artificial Sequence
  Description of Artificial Sequence: Synthetic oligonucleotide
uguguagagauuguaccug

SEQ ID NO: 1545076 - RNA, 19 nt, Artificial Sequence
  Description of Artificial Sequence: Synthetic oligonucleotide
gcuaauagauguuuuaguc

SEQ ID NO: 1545077 - RNA, 19 nt, Artificial Sequence
  Description of Artificial Sequence: Synthetic oligonucleotide
aaagcgcuccagcacucgg

SEQ ID NO: 1545078 - RNA, 19 nt, Artificial Sequence
  Description of Artificial Sequence: Synthetic oligonucleotide
caucgauuguuauaagcug

SEQ ID NO: 1545079 - RNA, 19 nt, Artificial Sequence
  Description of Artificial Sequence: Synthetic oligonucleotide
uggaauugagcuucaggga

SEQ ID NO: 1545080 - RNA, 19 nt, Artificial Sequence
  Description of Artificial Sequence: Synthetic oligonucleotide
acaucaauccguguucggg

SEQ ID NO: 1545081 - RNA, 19 nt, Artificial Sequence
  Description of Artificial Sequence: Synthetic oligonucleotide
caucaauccguguucgggc

SEQ ID NO: 1545082 - RNA, 19 nt, Artificial Sequence
  Description of Artificial Sequence: Synthetic oligonucleotide
aagauauauuugccgucug

SEQ ID NO: 1545083 - RNA, 19 nt, Artificial Sequence
  Description of Artificial Sequence: Synthetic oligonucleotide
aacaucccaauaguuaggu

SEQ ID NO: 1545084 - RNA, 19 nt, Artificial Sequence
  Description of Artificial Sequence: Synthetic oligonucleotide
cauaagaacaucaauccgu

SEQ ID NO: 1545085 - RNA, 19 nt, Artificial Sequence
  Description of Artificial Sequence: Synthetic oligonucleotide
uaaaauguuccggccauca

SEQ ID NO: 1545086 - RNA, 19 nt, Artificial Sequence
  Description of Artificial Sequence: Synthetic oligonucleotide
uacgccauuucgaugcuga

SEQ ID NO: 1545087 - RNA, 19 nt, Artificial Sequence
  Description of Artificial Sequence: Synthetic oligonucleotide
uucuaaagguguccauaag

SEQ ID NO: 1545088 - RNA, 19 nt, Artificial Sequence
  Description of Artificial Sequence: Synthetic oligonucleotide
cuaaagguguccauaagaa

SEQ ID NO: 1545089 - RNA, 19 nt, Artificial Sequence
  Description of Artificial Sequence: Synthetic oligonucleotide
uaaaagcaccaacauccca

SEQ ID NO: 1545090 - RNA, 19 nt, Artificial Sequence
  Description of Artificial Sequence: Synthetic oligonucleotide
uggagucuugauagaaacc

SEQ ID NO: 1545091 - RNA, 19 nt, Artificial Sequence
  Description of Artificial Sequence: Synthetic oligonucleotide
ucgggcugaaauuacgcca

SEQ ID NO: 1545092 - RNA, 19 nt, Artificial Sequence
  Description of Artificial Sequence: Synthetic oligonucleotide
uuugccgucugcuguguag

SEQ ID NO: 1545093 - RNA, 19 nt, Artificial Sequence
  Description of Artificial Sequence: Synthetic oligonucleotide
uagucccaaugccugaaag

SEQ ID NO: 1545094 - RNA, 19 nt, Artificial Sequence
  Description of Artificial Sequence: Synthetic oligonucleotide
ccuauaauuccgaccaucg

SEQ ID NO: 1545095 - RNA, 19 nt, Artificial Sequence
  Description of Artificial Sequence: Synthetic oligonucleotide
aguguguucaugaccgugg

SEQ ID NO: 1545096 - RNA, 19 nt, Artificial Sequence
  Description of Artificial Sequence: Synthetic oligonucleotide
aauguuccggccaucaaau

SEQ ID NO: 1545097 - RNA, 19 nt, Artificial Sequence
  Description of Artificial Sequence: Synthetic oligonucleotide
cauccaugacacuuucucc

SEQ ID NO: 1545098 - RNA, 19 nt, Artificial Sequence
  Description of Artificial Sequence: Synthetic oligonucleotide
ugggagaugugaauggaau

SEQ ID NO: 1545099 - RNA, 19 nt, Artificial Sequence
  Description of Artificial Sequence: Synthetic oligonucleotide
uaauuccgaccaucgauug

SEQ ID NO: 1545100 - RNA, 19 nt, Artificial Sequence
  Description of Artificial Sequence: Synthetic oligonucleotide
gguccggaauccuugaggg

SEQ ID NO: 1545101 - RNA, 19 nt, Artificial Sequence
  Description of Artificial Sequence: Synthetic oligonucleotide
uucauguacucgaucccug

SEQ ID NO: 1545102 - RNA, 19 nt, Artificial Sequence
  Description of Artificial Sequence: Synthetic oligonucleotide
caacuaugugcuuguagag

SEQ ID NO: 1545103 - RNA, 19 nt, Artificial Sequence
  Description of Artificial Sequence: Synthetic oligonucleotide
acuauuagucccaaugccu

SEQ ID NO: 1545104 - RNA, 19 nt, Artificial Sequence
  Description of Artificial Sequence: Synthetic oligonucleotide
uuuccgaaacuguccacug

SEQ ID NO: 1545105 - RNA, 19 nt, Artificial Sequence
  Description of Artificial Sequence: Synthetic oligonucleotide
uccguguucgggcugaaau

SEQ ID NO: 1545106 - RNA, 19 nt, Artificial Sequence
  Description of Artificial Sequence: Synthetic oligonucleotide
uucgggcugaaauuacgcc

SEQ ID NO: 1545107 - RNA, 19 nt, Artificial Sequence
  Description of Artificial Sequence: Synthetic oligonucleotide
gauauucuaguaaaguccu

SEQ ID NO: 1545108 - RNA, 19 nt, Artificial Sequence
  Description of Artificial Sequence: Synthetic oligonucleotide
ucuugauagaaacccucau

SEQ ID NO: 1545109 - RNA, 19 nt, Artificial Sequence
  Description of Artificial Sequence: Synthetic oligonucleotide
uguaccugccuucagcauu

SEQ ID NO: 1545110 - RNA, 19 nt, Artificial Sequence
  Description of Artificial Sequence: Synthetic oligonucleotide
aauuccgaccaucgauugu

SEQ ID NO: 1545111 - RNA, 19 nt, Artificial Sequence
  Description of Artificial Sequence: Synthetic oligonucleotide
cucuuuacaacgcugcaga

SEQ ID NO: 1545112 - RNA, 19 nt, Artificial Sequence
  Description of Artificial Sequence: Synthetic oligonucleotide
ucauguacucgaucccugc

SEQ ID NO: 1545113 - RNA, 19 nt, Artificial Sequence
  Description of Artificial Sequence: Synthetic oligonucleotide
guggcgugcaguuucacac

SEQ ID NO: 1545114 - RNA, 19 nt, Artificial Sequence
  Description of Artificial Sequence: Synthetic oligonucleotide
gaaauuacgccauuucgau

SEQ ID NO: 1545115 - RNA, 19 nt, Artificial Sequence
  Description of Artificial Sequence: Synthetic oligonucleotide
ugugaauggaauugagcuu

SEQ ID NO: 1545116 - RNA, 19 nt, Artificial Sequence
  Description of Artificial Sequence: Synthetic oligonucleotide
gaugggauucuuccuauaa

SEQ ID NO: 1545117 - RNA, 19 nt, Artificial Sequence
  Description of Artificial Sequence: Synthetic oligonucleotide
aaugccugaaagcgcucca

SEQ ID NO: 1545118 - RNA, 19 nt, Artificial Sequence
  Description of Artificial Sequence: Synthetic oligonucleotide
aaaucucuccugaacuuca

SEQ ID NO: 1545119 - RNA, 19 nt, Artificial Sequence
  Description of Artificial Sequence: Synthetic oligonucleotide
auuggggucuuuccugaag

SEQ ID NO: 1545120 - RNA, 19 nt, Artificial Sequence
  Description of Artificial Sequence: Synthetic oligonucleotide
uauuagucccaaugccuga

SEQ ID NO: 1545121 - RNA, 19 nt, Artificial Sequence
  Description of Artificial Sequence: Synthetic oligonucleotide
cuaauagauguuuuagucu

SEQ ID NO: 1545122 - RNA, 19 nt, Artificial Sequence
  Description of Artificial Sequence: Synthetic oligonucleotide
aguuuccgaaacuguccac

SEQ ID NO: 1545123 - RNA, 19 nt, Artificial Sequence
  Description of Artificial Sequence: Synthetic oligonucleotide
guuuaggaaugcuaauaga

SEQ ID NO: 1545124 - RNA, 19 nt, Artificial Sequence
  Description of Artificial Sequence: Synthetic oligonucleotide
aguuucacacuguuccagu

SEQ ID NO: 1545125 - RNA, 19 nt, Artificial Sequence
  Description of Artificial Sequence: Synthetic oligonucleotide
cagggaaccaaaguagaag

SEQ ID NO: 1545126 - RNA, 19 nt, Artificial Sequence
  Description of Artificial Sequence: Synthetic oligonucleotide
acugugaaccucugggaga

SEQ ID NO: 1545127 - RNA, 19 nt, Artificial Sequence
  Description of Artificial Sequence: Synthetic oligonucleotide
agaaaucucuccugaacuu

SEQ ID NO: 1545128 - RNA, 19 nt, Artificial Sequence
  Description of Artificial Sequence: Synthetic oligonucleotide
aauuuuccuggaugggauu

SEQ ID NO: 1545129 - RNA, 19 nt, Artificial Sequence
  Description of Artificial Sequence: Synthetic oligonucleotide
cugugggcgcagaacaucc

SEQ ID NO: 1545130 - RNA, 19 nt, Artificial Sequence
  Description of Artificial Sequence: Synthetic oligonucleotide
gaaaucucuccugaacuuc

SEQ ID NO: 1545131 - RNA, 19 nt, Artificial Sequence
  Description of Artificial Sequence: Synthetic oligonucleotide
aucgauuguuauaagcugu

SEQ ID NO: 1545132 - RNA, 19 nt, Artificial Sequence
  Description of Artificial Sequence: Synthetic oligonucleotide
uuugaggguaaggagugaa

SEQ ID NO: 1545133 - RNA, 19 nt, Artificial Sequence
  Description of Artificial Sequence: Synthetic oligonucleotide
agaauauuccauggagucu

SEQ ID NO: 1545134 - RNA, 19 nt, Artificial Sequence
  Description of Artificial Sequence: Synthetic oligonucleotide
uguacucgaucccugccau

SEQ ID NO: 1545135 - RNA, 19 nt, Artificial Sequence
  Description of Artificial Sequence: Synthetic oligonucleotide
ugaucacaauuucuccuuc

SEQ ID NO: 1545136 - RNA, 19 nt, Artificial Sequence
  Description of Artificial Sequence: Synthetic oligonucleotide
gccauuucgaugcugacca

SEQ ID NO: 1545137 - RNA, 19 nt, Artificial Sequence
  Description of Artificial Sequence: Synthetic oligonucleotide
auugacagugguccggaau

SEQ ID NO: 1545138 - RNA, 19 nt, Artificial Sequence
  Description of Artificial Sequence: Synthetic oligonucleotide
ugaauggaauugagcuuca

SEQ ID NO: 1545139 - RNA, 19 nt, Artificial Sequence
  Description of Artificial Sequence: Synthetic oligonucleotide
auguacucgaucccugcca

SEQ ID NO: 1545140 - RNA, 19 nt, Artificial Sequence
  Description of Artificial Sequence: Synthetic oligonucleotide
caccauaccaggaucguca

SEQ ID NO: 1545141 - RNA, 19 nt, Artificial Sequence
  Description of Artificial Sequence: Synthetic oligonucleotide
ucccaaugccugaaagcgc

SEQ ID NO: 1545142 - RNA, 19 nt, Artificial Sequence
  Description of Artificial Sequence: Synthetic oligonucleotide
ugccgccacauuuuccagg

SEQ ID NO: 1545143 - RNA, 19 nt, Artificial Sequence
  Description of Artificial Sequence: Synthetic oligonucleotide
uccucuuuacaacgcugca

SEQ ID NO: 1545144 - RNA, 19 nt, Artificial Sequence
  Description of Artificial Sequence: Synthetic oligonucleotide
auuucgaugcugaccagug

SEQ ID NO: 1545145 - RNA, 19 nt, Artificial Sequence
  Description of Artificial Sequence: Synthetic oligonucleotide
caagauagaaagggaugag

SEQ ID NO: 1545146 - RNA, 19 nt, Artificial Sequence
  Description of Artificial Sequence: Synthetic oligonucleotide
gucugcuguguagagauug

SEQ ID NO: 1545147 - RNA, 19 nt, Artificial Sequence
  Description of Artificial Sequence: Synthetic oligonucleotide
agcugucaaccccacgguc

SEQ ID NO: 1545148 - RNA, 19 nt, Artificial Sequence
  Description of Artificial Sequence: Synthetic oligonucleotide
aucaauccguguucgggcu

SEQ ID NO: 1545149 - RNA, 19 nt, Artificial Sequence
  Description of Artificial Sequence: Synthetic oligonucleotide
aaguccugccaggacuaac

SEQ ID NO: 1545150 - RNA, 19 nt, Artificial Sequence
  Description of Artificial Sequence: Synthetic oligonucleotide
ugccugaaagcgcuccagc

SEQ ID NO: 1545151 - RNA, 19 nt, Artificial Sequence
  Description of Artificial Sequence: Synthetic oligonucleotide
gaagauauauuugccgucu

SEQ ID NO: 1545152 - RNA, 19 nt, Artificial Sequence
  Description of Artificial Sequence: Synthetic oligonucleotide
ggaauugagcuucagggaa

SEQ ID NO: 1545153 - RNA, 19 nt, Artificial Sequence
  Description of Artificial Sequence: Synthetic oligonucleotide
agguuugccaccagaaaug

SEQ ID NO: 1545154 - RNA, 19 nt, Artificial Sequence
  Description of Artificial Sequence: Synthetic oligonucleotide
uccuauaauuccgaccauc

SEQ ID NO: 1545155 - RNA, 19 nt, Artificial Sequence
  Description of Artificial Sequence: Synthetic oligonucleotide
uuacaacgcugcagaaucu

SEQ ID NO: 1545156 - RNA, 19 nt, Artificial Sequence
  Description of Artificial Sequence: Synthetic oligonucleotide
gaauugagcuucagggaac

SEQ ID NO: 1545157 - RNA, 19 nt, Artificial Sequence
  Description of Artificial Sequence: Synthetic oligonucleotide
auccaccauaccaggaucg

SEQ ID NO: 1545158 - RNA, 19 nt, Artificial Sequence
  Description of Artificial Sequence: Synthetic oligonucleotide
accaggaucgucauucaug

SEQ ID NO: 1545159 - RNA, 19 nt, Artificial Sequence
  Description of Artificial Sequence: Synthetic oligonucleotide
agaugugaauggaauugag

SEQ ID NO: 1545160 - RNA, 19 nt, Artificial Sequence
  Description of Artificial Sequence: Synthetic oligonucleotide
uaagaacaucaauccgugu

SEQ ID NO: 1545161 - RNA, 19 nt, Artificial Sequence
  Description of Artificial Sequence: Synthetic oligonucleotide
uaguaaaguccugccagga

SEQ ID NO: 1545162 - RNA, 19 nt, Artificial Sequence
  Description of Artificial Sequence: Synthetic oligonucleotide
auaauuccgaccaucgauu

SEQ ID NO: 1545163 - RNA, 19 nt, Artificial Sequence
  Description of Artificial Sequence: Synthetic oligonucleotide
gaggguaaggagugaagaa

SEQ ID NO: 1545164 - RNA, 19 nt, Artificial Sequence
  Description of Artificial Sequence: Synthetic oligonucleotide
gaacaagauagaaagggau

SEQ ID NO: 1545165 - RNA, 19 nt, Artificial Sequence
  Description of Artificial Sequence: Synthetic oligonucleotide
ucuuuacaacgcugcagaa

SEQ ID NO: 1545166 - RNA, 19 nt, Artificial Sequence
  Description of Artificial Sequence: Synthetic oligonucleotide
ucaauccguguucgggcug

SEQ ID NO: 1545167 - RNA, 19 nt, Artificial Sequence
  Description of Artificial Sequence: Synthetic oligonucleotide
uggagcacuucuccagaac

SEQ ID NO: 1545168 - RNA, 19 nt, Artificial Sequence
  Description of Artificial Sequence: Synthetic oligonucleotide
uccaugacacuuucuccaa

SEQ ID NO: 1545169 - RNA, 19 nt, Artificial Sequence
  Description of Artificial Sequence: Synthetic oligonucleotide
gugagugaagggcugcuuc

SEQ ID NO: 1545170 - RNA, 19 nt, Artificial Sequence
  Description of Artificial Sequence: Synthetic oligonucleotide
gaguguguucaugaccgug

SEQ ID NO: 1545171 - RNA, 19 nt, Artificial Sequence
  Description of Artificial Sequence: Synthetic oligonucleotide
auuccgaccaucgauuguu

SEQ ID NO: 1545172 - RNA, 19 nt, Artificial Sequence
  Description of Artificial Sequence: Synthetic oligonucleotide
uccggccaucaaaugauuc

SEQ ID NO: 1545173 - RNA, 19 nt, Artificial Sequence
  Description of Artificial Sequence: Synthetic oligonucleotide
ucgaugcugaccagugauc

SEQ ID NO: 1545174 - RNA, 19 nt, Artificial Sequence
  Description of Artificial Sequence: Synthetic oligonucleotide
agguuuaggaaugcuaaua

SEQ ID NO: 1545175 - RNA, 19 nt, Artificial Sequence
  Description of Artificial Sequence: Synthetic oligonucleotide
ugguauccccucucuuucc

SEQ ID NO: 1545176 - RNA, 19 nt, Artificial Sequence
  Description of Artificial Sequence: Synthetic oligonucleotide
gaaagcgcuccagcacucg

SEQ ID NO: 1545177 - RNA, 19 nt, Artificial Sequence
  Description of Artificial Sequence: Synthetic oligonucleotide
uccauggagucuugauaga

SEQ ID NO: 1545178 - RNA, 19 nt, Artificial Sequence
  Description of Artificial Sequence: Synthetic oligonucleotide
caucagaauauuccaugga

SEQ ID NO: 1545179 - RNA, 19 nt, Artificial Sequence
  Description of Artificial Sequence: Synthetic oligonucleotide
uuagucccaaugccugaaa

SEQ ID NO: 1545180 - RNA, 19 nt, Artificial Sequence
  Description of Artificial Sequence: Synthetic oligonucleotide
aggcauaguuuccgaaacu

SEQ ID NO: 1545181 - RNA, 19 nt, Artificial Sequence
  Description of Artificial Sequence: Synthetic oligonucleotide
acaucccaauaguuaggug

SEQ ID NO: 1545182 - RNA, 19 nt, Artificial Sequence
  Description of Artificial Sequence: Synthetic oligonucleotide
ugacagugguccggaaucc

SEQ ID NO: 1545183 - RNA, 19 nt, Artificial Sequence
  Description of Artificial Sequence: Synthetic oligonucleotide
accaacaucccaauaguua

SEQ ID NO: 1545184 - RNA, 19 nt, Artificial Sequence
  Description of Artificial Sequence: Synthetic oligonucleotide
ugaaagcgcuccagcacuc

SEQ ID NO: 1545185 - RNA, 19 nt, Artificial Sequence
  Description of Artificial Sequence: Synthetic oligonucleotide
cagaaaucucuccugaacu

SEQ ID NO: 1545186 - RNA, 19 nt, Artificial Sequence
  Description of Artificial Sequence: Synthetic oligonucleotide
gggcucaucagaauauucc

SEQ ID NO: 1545187 - RNA, 19 nt, Artificial Sequence
  Description of Artificial Sequence: Synthetic oligonucleotide
caaugccugaaagcgcucc

SEQ ID NO: 1545188 - RNA, 19 nt, Artificial Sequence
  Description of Artificial Sequence: Synthetic oligonucleotide
gagaggguggcaagagacc

SEQ ID NO: 1545189 - RNA, 19 nt, Artificial Sequence
  Description of Artificial Sequence: Synthetic oligonucleotide
uacaacgcugcagaaucuc

SEQ ID NO: 1545190 - RNA, 19 nt, Artificial Sequence
  Description of Artificial Sequence: Synthetic oligonucleotide
cagugguccggaauccuug

SEQ ID NO: 1545191 - RNA, 19 nt, Artificial Sequence
  Description of Artificial Sequence: Synthetic oligonucleotide
agggcucaucagaauauuc

SEQ ID NO: 1545192 - RNA, 19 nt, Artificial Sequence
  Description of Artificial Sequence: Synthetic oligonucleotide
ggcucaucagaauauucca

SEQ ID NO: 1545193 - RNA, 19 nt, Artificial Sequence
  Description of Artificial Sequence: Synthetic oligonucleotide
gagugaagaacaagauaga

SEQ ID NO: 1545194 - RNA, 19 nt, Artificial Sequence
  Description of Artificial Sequence: Synthetic oligonucleotide
gaauggaauugagcuucag

SEQ ID NO: 1545195 - RNA, 19 nt, Artificial Sequence
  Description of Artificial Sequence: Synthetic oligonucleotide
gaccguggcgugcaguuuc

SEQ ID NO: 1545196 - RNA, 19 nt, Artificial Sequence
  Description of Artificial Sequence: Synthetic oligonucleotide
guaccugccuucagcauug

SEQ ID NO: 1545197 - RNA, 19 nt, Artificial Sequence
  Description of Artificial Sequence: Synthetic oligonucleotide
aguccugccaggacuaaca

SEQ ID NO: 1545198 - RNA, 19 nt, Artificial Sequence
  Description of Artificial Sequence: Synthetic oligonucleotide
ucuugguauccccucucuu

SEQ ID NO: 1545199 - RNA, 19 nt, Artificial Sequence
  Description of Artificial Sequence: Synthetic oligonucleotide
gacuaacagagaggguggc

SEQ ID NO: 1545200 - RNA, 19 nt, Artificial Sequence
  Description of Artificial Sequence: Synthetic oligonucleotide
acgccauuucgaugcugac

SEQ ID NO: 1545201 - RNA, 19 nt, Artificial Sequence
  Description of Artificial Sequence: Synthetic oligonucleotide
gaucacaauuucuccuucu

SEQ ID NO: 1545202 - RNA, 19 nt, Artificial Sequence
  Description of Artificial Sequence: Synthetic oligonucleotide
guguucaugaccguggcgu

SEQ ID NO: 1545203 - RNA, 19 nt, Artificial Sequence
  Description of Artificial Sequence: Synthetic oligonucleotide
gaggguggcaagagacccg

SEQ ID NO: 1545204 - RNA, 19 nt, Artificial Sequence
  Description of Artificial Sequence: Synthetic oligonucleotide
guccggaauccuugagggg

SEQ ID NO: 1545205 - RNA, 19 nt, Artificial Sequence
  Description of Artificial Sequence: Synthetic oligonucleotide
auaccaggaucgucauuca

SEQ ID NO: 1545206 - RNA, 19 nt, Artificial Sequence
  Description of Artificial Sequence: Synthetic oligonucleotide
agaacauccaugacacuuu

SEQ ID NO: 1545207 - RNA, 19 nt, Artificial Sequence
  Description of Artificial Sequence: Synthetic oligonucleotide
auuacgccauuucgaugcu

SEQ ID NO: 1545208 - RNA, 19 nt, Artificial Sequence
  Description of Artificial Sequence: Synthetic oligonucleotide
uugccgucugcuguguaga

SEQ ID NO: 1545209 - RNA, 19 nt, Artificial Sequence
  Description of Artificial Sequence: Synthetic oligonucleotide
gaaguccaccuguccgcag

SEQ ID NO: 1545210 - RNA, 19 nt, Artificial Sequence
  Description of Artificial Sequence: Synthetic oligonucleotide
acuaacagagaggguggca

SEQ ID NO: 1545211 - RNA, 19 nt, Artificial Sequence
  Description of Artificial Sequence: Synthetic oligonucleotide
cuguguagagauuguaccu

SEQ ID NO: 1545212 - RNA, 19 nt, Artificial Sequence
  Description of Artificial Sequence: Synthetic oligonucleotide
ggucaacuaguuccugcag

SEQ ID NO: 1545213 - RNA, 19 nt, Artificial Sequence
  Description of Artificial Sequence: Synthetic oligonucleotide
cacuuucuccaaaugauau

SEQ ID NO: 1545214 - RNA, 19 nt, Artificial Sequence
  Description of Artificial Sequence: Synthetic oligonucleotide
gugcuuguagagcaggcua

SEQ ID NO: 1545215 - RNA, 19 nt, Artificial Sequence
  Description of Artificial Sequence: Synthetic oligonucleotide
uggcgugcaguuucacacu

SEQ ID NO: 1545216 - RNA, 19 nt, Artificial Sequence
  Description of Artificial Sequence: Synthetic oligonucleotide
caggagaaguccaccuguc

SEQ ID NO: 1545217 - RNA, 19 nt, Artificial Sequence
  Description of Artificial Sequence: Synthetic oligonucleotide
aggaggcauaguuuccgaa

SEQ ID NO: 1545218 - RNA, 19 nt, Artificial Sequence
  Description of Artificial Sequence: Synthetic oligonucleotide
uccuucuaaagguguccau

SEQ ID NO: 1545219 - RNA, 19 nt, Artificial Sequence
  Description of Artificial Sequence: Synthetic oligonucleotide
ggcauugacagugguccgg

SEQ ID NO: 1545220 - RNA, 19 nt, Artificial Sequence
  Description of Artificial Sequence: Synthetic oligonucleotide
accugccuucagcauuggg

SEQ ID NO: 1545221 - RNA, 19 nt, Artificial Sequence
  Description of Artificial Sequence: Synthetic oligonucleotide
uuccuauaauuccgaccau

SEQ ID NO: 1545222 - RNA, 19 nt, Artificial Sequence
  Description of Artificial Sequence: Synthetic oligonucleotide
ugccgucugcuguguagag

SEQ ID NO: 1545223 - RNA, 19 nt, Artificial Sequence
  Description of Artificial Sequence: Synthetic oligonucleotide
ggaucucuuguucacuuaa

SEQ ID NO: 1545224 - RNA, 19 nt, Artificial Sequence
  Description of Artificial Sequence: Synthetic oligonucleotide
gccgccacauuuuccaggc

SEQ ID NO: 1545225 - RNA, 19 nt, Artificial Sequence
  Description of Artificial Sequence: Synthetic oligonucleotide
uccagagguuugccaccag

SEQ ID NO: 1545226 - RNA, 19 nt, Artificial Sequence
  Description of Artificial Sequence: Synthetic oligonucleotide
agaguguguucaugaccgu

SEQ ID NO: 1545227 - RNA, 19 nt, Artificial Sequence
  Description of Artificial Sequence: Synthetic oligonucleotide
accauaccaggaucgucau

SEQ ID NO: 1545228 - RNA, 19 nt, Artificial Sequence
  Description of Artificial Sequence: Synthetic oligonucleotide
uccaccauaccaggaucgu

SEQ ID NO: 1545229 - RNA, 19 nt, Artificial Sequence
  Description of Artificial Sequence: Synthetic oligonucleotide
guuuccgaaacuguccacu

SEQ ID NO: 1545230 - RNA, 19 nt, Artificial Sequence
  Description of Artificial Sequence: Synthetic oligonucleotide
augccugaaagcgcuccag

SEQ ID NO: 1545231 - RNA, 19 nt, Artificial Sequence
  Description of Artificial Sequence: Synthetic oligonucleotide
ccaucgauuguuauaagcu

SEQ ID NO: 1545232 - RNA, 19 nt, Artificial Sequence
  Description of Artificial Sequence: Synthetic oligonucleotide
auggagcacuucuccagaa

SEQ ID NO: 1545233 - RNA, 19 nt, Artificial Sequence
  Description of Artificial Sequence: Synthetic oligonucleotide
uuguaccugccuucagcau

SEQ ID NO: 1545234 - RNA, 19 nt, Artificial Sequence
  Description of Artificial Sequence: Synthetic oligonucleotide
accccacgguccauggagc

SEQ ID NO: 1545235 - RNA, 19 nt, Artificial Sequence
  Description of Artificial Sequence: Synthetic oligonucleotide
uccccucucuuuccaacua

SEQ ID NO: 1545236 - RNA, 19 nt, Artificial Sequence
  Description of Artificial Sequence: Synthetic oligonucleotide
ccugaaagcgcuccagcac

SEQ ID NO: 1545237 - RNA, 19 nt, Artificial Sequence
  Description of Artificial Sequence: Synthetic oligonucleotide
cugaaagcgcuccagcacu

SEQ ID NO: 1545238 - RNA, 19 nt, Artificial Sequence
  Description of Artificial Sequence: Synthetic oligonucleotide
gccaggacuaacagagagg

SEQ ID NO: 1545239 - RNA, 19 nt, Artificial Sequence
  Description of Artificial Sequence: Synthetic oligonucleotide
uauuugccgucugcugugu

SEQ ID NO: 1545240 - RNA, 19 nt, Artificial Sequence
  Description of Artificial Sequence: Synthetic oligonucleotide
aaucucuccugaacuucaa

SEQ ID NO: 1545241 - RNA, 19 nt, Artificial Sequence
  Description of Artificial Sequence: Synthetic oligonucleotide
uuacgccauuucgaugcug

SEQ ID NO: 1545242 - RNA, 19 nt, Artificial Sequence
  Description of Artificial Sequence: Synthetic oligonucleotide
uagaaacccucaucaucuu

SEQ ID NO: 1545243 - RNA, 19 nt, Artificial Sequence
  Description of Artificial Sequence: Synthetic oligonucleotide
cauauggacuuuggcauaa

SEQ ID NO: 1545244 - RNA, 19 nt, Artificial Sequence
  Description of Artificial Sequence: Synthetic oligonucleotide
gaucucuuguucacuuaaa

SEQ ID NO: 1545245 - RNA, 19 nt, Artificial Sequence
  Description of Artificial Sequence: Synthetic oligonucleotide
gugguccggaauccuugag

SEQ ID NO: 1545246 - RNA, 19 nt, Artificial Sequence
  Description of Artificial Sequence: Synthetic oligonucleotide
ggcgugcaguuucacacug

SEQ ID NO: 1545247 - RNA, 19 nt, Artificial Sequence
  Description of Artificial Sequence: Synthetic oligonucleotide
cuugguauccccucucuuu

SEQ ID NO: 1545248 - RNA, 19 nt, Artificial Sequence
  Description of Artificial Sequence: Synthetic oligonucleotide
cuguccgcaggaggcauag

SEQ ID NO: 1545249 - RNA, 19 nt, Artificial Sequence
  Description of Artificial Sequence: Synthetic oligonucleotide
auaguuaggugaagcuuuu

SEQ ID NO: 1545250 - RNA, 19 nt, Artificial Sequence
  Description of Artificial Sequence: Synthetic oligonucleotide
gucaaccccacgguccaug

SEQ ID NO: 1545251 - RNA, 19 nt, Artificial Sequence
  Description of Artificial Sequence: Synthetic oligonucleotide
ccucuuuacaacgcugcag

SEQ ID NO: 1545252 - RNA, 19 nt, Artificial Sequence
  Description of Artificial Sequence: Synthetic oligonucleotide
gaaugcuaauagauguuuu

SEQ ID NO: 1545253 - RNA, 19 nt, Artificial Sequence
  Description of Artificial Sequence: Synthetic oligonucleotide
aaaguccugccaggacuaa

SEQ ID NO: 1545254 - RNA, 19 nt, Artificial Sequence
  Description of Artificial Sequence: Synthetic oligonucleotide
gguauccccucucuuucca

SEQ ID NO: 1545255 - RNA, 19 nt, Artificial Sequence
  Description of Artificial Sequence: Synthetic oligonucleotide
ggcaagagacccgggagac

SEQ ID NO: 1545256 - RNA, 19 nt, Artificial Sequence
  Description of Artificial Sequence: Synthetic oligonucleotide
gccugaaagcgcuccagca

SEQ ID NO: 1545257 - RNA, 19 nt, Artificial Sequence
  Description of Artificial Sequence: Synthetic oligonucleotide
gagacccgggagacgcucc

SEQ ID NO: 1545258 - RNA, 19 nt, Artificial Sequence
  Description of Artificial Sequence: Synthetic oligonucleotide
guguucgggcugaaauuac

SEQ ID NO: 1545259 - RNA, 19 nt, Artificial Sequence
  Description of Artificial Sequence: Synthetic oligonucleotide
gcagaaucucacacgucug

SEQ ID NO: 1545260 - RNA, 19 nt, Artificial Sequence
  Description of Artificial Sequence: Synthetic oligonucleotide
ccaauaguuaggugaagcu

SEQ ID NO: 1545261 - RNA, 19 nt, Artificial Sequence
  Description of Artificial Sequence: Synthetic oligonucleotide
acacgucugcuggaucucu

SEQ ID NO: 1545262 - RNA, 19 nt, Artificial Sequence
  Description of Artificial Sequence: Synthetic oligonucleotide
cuuuacaacgcugcagaau

SEQ ID NO: 1545263 - RNA, 19 nt, Artificial Sequence
  Description of Artificial Sequence: Synthetic oligonucleotide
cuuucacuauuagucccaa

SEQ ID NO: 1545264 - RNA, 19 nt, Artificial Sequence
  Description of Artificial Sequence: Synthetic oligonucleotide
ccaggaucgucauucaugu

SEQ ID NO: 1545265 - RNA, 19 nt, Artificial Sequence
  Description of Artificial Sequence: Synthetic oligonucleotide
cgauuguuauaagcugugg

SEQ ID NO: 1545266 - RNA, 19 nt, Artificial Sequence
  Description of Artificial Sequence: Synthetic oligonucleotide
gacccgggagacgcucccg

SEQ ID NO: 1545267 - RNA, 19 nt, Artificial Sequence
  Description of Artificial Sequence: Synthetic oligonucleotide
cauuucgaugcugaccagu

SEQ ID NO: 1545268 - RNA, 19 nt, Artificial Sequence
  Description of Artificial Sequence: Synthetic oligonucleotide
caauccguguucgggcuga

SEQ ID NO: 1545269 - RNA, 19 nt, Artificial Sequence
  Description of Artificial Sequence: Synthetic oligonucleotide
cucggucaacuaguuccug

SEQ ID NO: 1545270 - RNA, 19 nt, Artificial Sequence
  Description of Artificial Sequence: Synthetic oligonucleotide
auuugccgucugcugugua

SEQ ID NO: 1545271 - RNA, 19 nt, Artificial Sequence
  Description of Artificial Sequence: Synthetic oligonucleotide
guacucgaucccugccauc

SEQ ID NO: 1545272 - RNA, 19 nt, Artificial Sequence
  Description of Artificial Sequence: Synthetic oligonucleotide
ugccaccagaaaugucauu

SEQ ID NO: 1545273 - RNA, 19 nt, Artificial Sequence
  Description of Artificial Sequence: Synthetic oligonucleotide
ggaaugcuaauagauguuu

SEQ ID NO: 1545274 - RNA, 19 nt, Artificial Sequence
  Description of Artificial Sequence: Synthetic oligonucleotide
acagugguccggaauccuu

SEQ ID NO: 1545275 - RNA, 19 nt, Artificial Sequence
  Description of Artificial Sequence: Synthetic oligonucleotide
ggaucgucauucauguacu

SEQ ID NO: 1545276 - RNA, 19 nt, Artificial Sequence
  Description of Artificial Sequence: Synthetic oligonucleotide
auauggacuuuggcauaaa

SEQ ID NO: 1545277 - RNA, 19 nt, Artificial Sequence
  Description of Artificial Sequence: Synthetic oligonucleotide
ggcgcagaacauccaugac

SEQ ID NO: 1545278 - RNA, 19 nt, Artificial Sequence
  Description of Artificial Sequence: Synthetic oligonucleotide
cacacgucugcuggaucuc

SEQ ID NO: 1545279 - RNA, 19 nt, Artificial Sequence
  Description of Artificial Sequence: Synthetic oligonucleotide
gagugaagggcugcuuccu

SEQ ID NO: 1545280 - RNA, 19 nt, Artificial Sequence
  Description of Artificial Sequence: Synthetic oligonucleotide
caccagaaaugucauuaau

SEQ ID NO: 1545281 - RNA, 19 nt, Artificial Sequence
  Description of Artificial Sequence: Synthetic oligonucleotide
cucgaucccugccaucucu

SEQ ID NO: 1545282 - RNA, 19 nt, Artificial Sequence
  Description of Artificial Sequence: Synthetic oligonucleotide
cagguuuaggaaugcuaau

SEQ ID NO: 1545283 - RNA, 19 nt, Artificial Sequence
  Description of Artificial Sequence: Synthetic oligonucleotide
cccaaugccugaaagcgcu

SEQ ID NO: 1545284 - RNA, 19 nt, Artificial Sequence
  Description of Artificial Sequence: Synthetic oligonucleotide
uuccaacuaugugcuugua

SEQ ID NO: 1545285 - RNA, 19 nt, Artificial Sequence
  Description of Artificial Sequence: Synthetic oligonucleotide
cgaccaucgauuguuauaa

SEQ ID NO: 1545286 - RNA, 19 nt, Artificial Sequence
  Description of Artificial Sequence: Synthetic oligonucleotide
gacagugguccggaauccu

SEQ ID NO: 1545287 - RNA, 19 nt, Artificial Sequence
  Description of Artificial Sequence: Synthetic oligonucleotide
aauccguguucgggcugaa

SEQ ID NO: 1545288 - RNA, 19 nt, Artificial Sequence
  Description of Artificial Sequence: Synthetic oligonucleotide
aucucugcuuccagagguu

SEQ ID NO: 1545289 - RNA, 19 nt, Artificial Sequence
  Description of Artificial Sequence: Synthetic oligonucleotide
cauugacagugguccggaa

SEQ ID NO: 1545290 - RNA, 19 nt, Artificial Sequence
  Description of Artificial Sequence: Synthetic oligonucleotide
gcauaguuuccgaaacugu

SEQ ID NO: 1545291 - RNA, 19 nt, Artificial Sequence
  Description of Artificial Sequence: Synthetic oligonucleotide
gugggcgcagaacauccau

SEQ ID NO: 1545292 - RNA, 19 nt, Artificial Sequence
  Description of Artificial Sequence: Synthetic oligonucleotide
ccauuucgaugcugaccag

SEQ ID NO: 1545293 - RNA, 19 nt, Artificial Sequence
  Description of Artificial Sequence: Synthetic oligonucleotide
accuguccgcaggaggcau

SEQ ID NO: 1545294 - RNA, 19 nt, Artificial Sequence
  Description of Artificial Sequence: Synthetic oligonucleotide
ccgaaacuguccacuguga

SEQ ID NO: 1545295 - RNA, 19 nt, Artificial Sequence
  Description of Artificial Sequence: Synthetic oligonucleotide
ugaccguggcgugcaguuu

SEQ ID NO: 1545296 - RNA, 19 nt, Artificial Sequence
  Description of Artificial Sequence: Synthetic oligonucleotide
ggccggagugccugcugcc

SEQ ID NO: 1545297 - RNA, 19 nt, Artificial Sequence
  Description of Artificial Sequence: Synthetic oligonucleotide
accguggcgugcaguuuca

SEQ ID NO: 1545298 - RNA, 19 nt, Artificial Sequence
  Description of Artificial Sequence: Synthetic oligonucleotide
ccgaccaucgauuguuaua

SEQ ID NO: 1545299 - RNA, 19 nt, Artificial Sequence
  Description of Artificial Sequence: Synthetic oligonucleotide
ccggccaucaaaugauucu

SEQ ID NO: 1545300 - RNA, 19 nt, Artificial Sequence
  Description of Artificial Sequence: Synthetic oligonucleotide
uguccgcaggaggcauagu

SEQ ID NO: 1545301 - RNA, 19 nt, Artificial Sequence
  Description of Artificial Sequence: Synthetic oligonucleotide
ugucaaccccacgguccau

SEQ ID NO: 1545302 - RNA, 19 nt, Artificial Sequence
  Description of Artificial Sequence: Synthetic oligonucleotide
ggaugggauucuuccuaua

SEQ ID NO: 1545303 - RNA, 19 nt, Artificial Sequence
  Description of Artificial Sequence: Synthetic oligonucleotide
caaccccacgguccaugga

SEQ ID NO: 1545304 - RNA, 19 nt, Artificial Sequence
  Description of Artificial Sequence: Synthetic oligonucleotide
ccaaugccugaaagcgcuc

SEQ ID NO: 1545305 - RNA, 19 nt, Artificial Sequence
  Description of Artificial Sequence: Synthetic oligonucleotide
caggacuaacagagagggu

SEQ ID NO: 1545306 - RNA, 19 nt, Artificial Sequence
  Description of Artificial Sequence: Synthetic oligonucleotide
cgggagacgcucccgcacc

SEQ ID NO: 1545307 - RNA, 19 nt, Artificial Sequence
  Description of Artificial Sequence: Synthetic oligonucleotide
ccaccauaccaggaucguc

SEQ ID NO: 1545308 - RNA, 19 nt, Artificial Sequence
  Description of Artificial Sequence: Synthetic oligonucleotide
caggaucgucauucaugua

SEQ ID NO: 1545309 - RNA, 19 nt, Artificial Sequence
  Description of Artificial Sequence: Synthetic oligonucleotide
auccguguucgggcugaaa

SEQ ID NO: 1545310 - RNA, 19 nt, Artificial Sequence
  Description of Artificial Sequence: Synthetic oligonucleotide
cguguucgggcugaaauua

SEQ ID NO: 1545311 - RNA, 19 nt, Artificial Sequence
  Description of Artificial Sequence: Synthetic oligonucleotide
cguggcgugcaguuucaca

SEQ ID NO: 1545312 - RNA, 19 nt, Artificial Sequence
  Description of Artificial Sequence: Synthetic oligonucleotide
ggguggcaagagacccggg

SEQ ID NO: 1545313 - RNA, 19 nt, Artificial Sequence
  Description of Artificial Sequence: Synthetic oligonucleotide
ggcugaaauuacgccauuu

SEQ ID NO: 1545314 - RNA, 19 nt, Artificial Sequence
  Description of Artificial Sequence: Synthetic oligonucleotide
gccugcugccgccacauuu

SEQ ID NO: 1545315 - RNA, 19 nt, Artificial Sequence
  Description of Artificial Sequence: Synthetic oligonucleotide
ggcuaggggcauugacagu

SEQ ID NO: 1545316 - RNA, 19 nt, Artificial Sequence
  Description of Artificial Sequence: Synthetic oligonucleotide
cgggcugaaauuacgccau

SEQ ID NO: 1545317 - RNA, 19 nt, Artificial Sequence
  Description of Artificial Sequence: Synthetic oligonucleotide
ccguguucgggcugaaauu

SEQ ID NO: 1545318 - RNA, 19 nt, Artificial Sequence
  Description of Artificial Sequence: Synthetic oligonucleotide
cccgggagacgcucccgca

SEQ ID NO: 1545319 - RNA, 19 nt, Artificial Sequence
  Description of Artificial Sequence: Synthetic oligonucleotide
cgucauucauguacucgau

SEQ ID NO: 1545320 - RNA, 19 nt, Artificial Sequence
  Description of Artificial Sequence: Synthetic oligonucleotide
ccuguccgcaggaggcaua

SEQ ID NO: 1545321 - RNA, 19 nt, Artificial Sequence
  Description of Artificial Sequence: Synthetic oligonucleotide
gggcugaaauuacgccauu

SEQ ID NO: 1545322 - RNA, 19 nt, Artificial Sequence
  Description of Artificial Sequence: Synthetic oligonucleotide
gcgugcaguuucacacugu

SEQ ID NO: 1545323 - RNA, 19 nt, Artificial Sequence
  Description of Artificial Sequence: Synthetic oligonucleotide
ccguggcgugcaguuucac

SEQ ID NO: 1545324 - RNA, 19 nt, Artificial Sequence
  Description of Artificial Sequence: Synthetic oligonucleotide
ccauaccaggaucgucauu

SEQ ID NO: 1545325 - RNA, 19 nt, Artificial Sequence
  Description of Artificial Sequence: Synthetic oligonucleotide
aagucuuccaccuuuaucc

SEQ ID NO: 1545326 - RNA, 19 nt, Artificial Sequence
  Description of Artificial Sequence: Synthetic oligonucleotide
uuuauuagauaucugagcc

SEQ ID NO: 1545327 - RNA, 19 nt, Artificial Sequence
  Description of Artificial Sequence: Synthetic oligonucleotide
ucuaguaaccacauaaugg

SEQ ID NO: 1545328 - RNA, 19 nt, Artificial Sequence
  Description of Artificial Sequence: Synthetic oligonucleotide
ucacaaaucaacacuaagg

SEQ ID NO: 1545329 - RNA, 19 nt, Artificial Sequence
  Description of Artificial Sequence: Synthetic oligonucleotide
acuaauagaaauucguauc

SEQ ID NO: 1545330 - RNA, 19 nt, Artificial Sequence
  Description of Artificial Sequence: Synthetic oligonucleotide
cuugauguauuccagacgg

SEQ ID NO: 1545331 - RNA, 19 nt, Artificial Sequence
  Description of Artificial Sequence: Synthetic oligonucleotide
aauaccuaccuccuggcuc

SEQ ID NO: 1545332 - RNA, 19 nt, Artificial Sequence
  Description of Artificial Sequence: Synthetic oligonucleotide
gauaugucaucuuaacagg

SEQ ID NO: 1545333 - RNA, 19 nt, Artificial Sequence
  Description of Artificial Sequence: Synthetic oligonucleotide
cacaaaucaacacuaaggg

SEQ ID NO: 1545334 - RNA, 19 nt, Artificial Sequence
  Description of Artificial Sequence: Synthetic oligonucleotide
caaaucguaacucuggacc

SEQ ID NO: 1545335 - RNA, 19 nt, Artificial Sequence
  Description of Artificial Sequence: Synthetic oligonucleotide
acaaaucaacacuaagggc

SEQ ID NO: 1545336 - RNA, 19 nt, Artificial Sequence
  Description of Artificial Sequence: Synthetic oligonucleotide
aacuaauagaaauucguau

SEQ ID NO: 1545337 - RNA, 19 nt, Artificial Sequence
  Description of Artificial Sequence: Synthetic oligonucleotide
gaaacuucaggaaucgucg

SEQ ID NO: 1545338 - RNA, 19 nt, Artificial Sequence
  Description of Artificial Sequence: Synthetic oligonucleotide
ggauaugucaucuuaacag

SEQ ID NO: 1545339 - RNA, 19 nt, Artificial Sequence
  Description of Artificial Sequence: Synthetic oligonucleotide
accuuuguuauuuaaugag

SEQ ID NO: 1545340 - RNA, 19 nt, Artificial Sequence
  Description of Artificial Sequence: Synthetic oligonucleotide
aauucaggcuguccacucc

SEQ ID NO: 1545341 - RNA, 19 nt, Artificial Sequence
  Description of Artificial Sequence: Synthetic oligonucleotide
gaaauucguaucuuucuag

SEQ ID NO: 1545342 - RNA, 19 nt, Artificial Sequence
  Description of Artificial Sequence: Synthetic oligonucleotide
aaugguggcaauaccuacc

SEQ ID NO: 1545343 - RNA, 19 nt, Artificial Sequence
  Description of Artificial Sequence: Synthetic oligonucleotide
aaauucguaucuuucuagu

SEQ ID NO: 1545344 - RNA, 19 nt, Artificial Sequence
  Description of Artificial Sequence: Synthetic oligonucleotide
aaucgucgaucacaugccc

SEQ ID NO: 1545345 - RNA, 19 nt, Artificial Sequence
  Description of Artificial Sequence: Synthetic oligonucleotide
uggggaugucucaagagcg

SEQ ID NO: 1545346 - RNA, 19 nt, Artificial Sequence
  Description of Artificial Sequence: Synthetic oligonucleotide
ugaaacuucaggaaucguc

SEQ ID NO: 1545347 - RNA, 19 nt, Artificial Sequence
  Description of Artificial Sequence: Synthetic oligonucleotide
acuggcaacuccuugaugu

SEQ ID NO: 1545348 - RNA, 19 nt, Artificial Sequence
  Description of Artificial Sequence: Synthetic oligonucleotide
aaaucguaacucuggaccu

SEQ ID NO: 1545349 - RNA, 19 nt, Artificial Sequence
  Description of Artificial Sequence: Synthetic oligonucleotide
auaaacucgggugucaggg

SEQ ID NO: 1545350 - RNA, 19 nt, Artificial Sequence
  Description of Artificial Sequence: Synthetic oligonucleotide
uugauaucuucaaauuuca

SEQ ID NO: 1545351 - RNA, 19 nt, Artificial Sequence
  Description of Artificial Sequence: Synthetic oligonucleotide
aagagcguguuuaugucgc

SEQ ID NO: 1545352 - RNA, 19 nt, Artificial Sequence
  Description of Artificial Sequence: Synthetic oligonucleotide
aguaaccacauaauggugg

SEQ ID NO: 1545353 - RNA, 19 nt, Artificial Sequence
  Description of Artificial Sequence: Synthetic oligonucleotide
ugagaacuggccuccaggg

SEQ ID NO: 1545354 - RNA, 19 nt, Artificial Sequence
  Description of Artificial Sequence: Synthetic oligonucleotide
ucugguuuuagagucuagg

SEQ ID NO: 1545355 - RNA, 19 nt, Artificial Sequence
  Description of Artificial Sequence: Synthetic oligonucleotide
ugaguaagacuuuacugca

SEQ ID NO: 1545356 - RNA, 19 nt, Artificial Sequence
  Description of Artificial Sequence: Synthetic oligonucleotide
gagauugucacaaaucaac

SEQ ID NO: 1545357 - RNA, 19 nt, Artificial Sequence
  Description of Artificial Sequence: Synthetic oligonucleotide
uguggcguuacuaggucgg

SEQ ID NO: 1545358 - RNA, 19 nt, Artificial Sequence
  Description of Artificial Sequence: Synthetic oligonucleotide
ggaaucgucgaucacaugc

SEQ ID NO: 1545359 - RNA, 19 nt, Artificial Sequence
  Description of Artificial Sequence: Synthetic oligonucleotide
ugugaaacuucaggaaucg

SEQ ID NO: 1545360 - RNA, 19 nt, Artificial Sequence
  Description of Artificial Sequence: Synthetic oligonucleotide
ucccauuccagauuguuca

SEQ ID NO: 1545361 - RNA, 19 nt, Artificial Sequence
  Description of Artificial Sequence: Synthetic oligonucleotide
agcguguuuaugucgcugc

SEQ ID NO: 1545362 - RNA, 19 nt, Artificial Sequence
  Description of Artificial Sequence: Synthetic oligonucleotide
aaggccuggacuuaacuau

SEQ ID NO: 1545363 - RNA, 19 nt, Artificial Sequence
  Description of Artificial Sequence: Synthetic oligonucleotide
ugccacauaaacucgggug

SEQ ID NO: 1545364 - RNA, 19 nt, Artificial Sequence
  Description of Artificial Sequence: Synthetic oligonucleotide
aaggccuuaucauagcgaa

SEQ ID NO: 1545365 - RNA, 19 nt, Artificial Sequence
  Description of Artificial Sequence: Synthetic oligonucleotide
agaaacuaauagaaauucg

SEQ ID NO: 1545366 - RNA, 19 nt, Artificial Sequence
  Description of Artificial Sequence: Synthetic oligonucleotide
ugguuuuagagucuagguc

SEQ ID NO: 1545367 - RNA, 19 nt, Artificial Sequence
  Description of Artificial Sequence: Synthetic oligonucleotide
agauuguucacaaugggca

SEQ ID NO: 1545368 - RNA, 19 nt, Artificial Sequence
  Description of Artificial Sequence: Synthetic oligonucleotide
uccuauuaucaccuuggcc

SEQ ID NO: 1545369 - RNA, 19 nt, Artificial Sequence
  Description of Artificial Sequence: Synthetic oligonucleotide
auucguaucuuucuaguaa

SEQ ID NO: 1545370 - RNA, 19 nt, Artificial Sequence
  Description of Artificial Sequence: Synthetic oligonucleotide
uaccuuuguuauuuaauga

SEQ ID NO: 1545371 - RNA, 19 nt, Artificial Sequence
  Description of Artificial Sequence: Synthetic oligonucleotide
auagagaccacaguugucu

SEQ ID NO: 1545372 - RNA, 19 nt, Artificial Sequence
  Description of Artificial Sequence: Synthetic oligonucleotide
uucguaucuuucuaguaac

SEQ ID NO: 1545373 - RNA, 19 nt, Artificial Sequence
  Description of Artificial Sequence: Synthetic oligonucleotide
aggaggaacccucacacug

SEQ ID NO: 1545374 - RNA, 19 nt, Artificial Sequence
  Description of Artificial Sequence: Synthetic oligonucleotide
cuggacuuaacuauuguca

SEQ ID NO: 1545375 - RNA, 19 nt, Artificial Sequence
  Description of Artificial Sequence: Synthetic oligonucleotide
ggugaguaagacuuuacug

SEQ ID NO: 1545376 - RNA, 19 nt, Artificial Sequence
  Description of Artificial Sequence: Synthetic oligonucleotide
aggagcacgcuuccguucc

SEQ ID NO: 1545377 - RNA, 19 nt, Artificial Sequence
  Description of Artificial Sequence: Synthetic oligonucleotide
aucacaugcccagucaugg

SEQ ID NO: 1545378 - RNA, 19 nt, Artificial Sequence
  Description of Artificial Sequence: Synthetic oligonucleotide
uguccggagggaaacacca

SEQ ID NO: 1545379 - RNA, 19 nt, Artificial Sequence
  Description of Artificial Sequence: Synthetic oligonucleotide
uacaacggggaucagcagu

SEQ ID NO: 1545380 - RNA, 19 nt, Artificial Sequence
  Description of Artificial Sequence: Synthetic oligonucleotide
uuccuuguggcguuacuag

SEQ ID NO: 1545381 - RNA, 19 nt, Artificial Sequence
  Description of Artificial Sequence: Synthetic oligonucleotide
uuagauaucugagccugag

SEQ ID NO: 1545382 - RNA, 19 nt, Artificial Sequence
  Description of Artificial Sequence: Synthetic oligonucleotide
gucacaaaucaacacuaag

SEQ ID NO: 1545383 - RNA, 19 nt, Artificial Sequence
  Description of Artificial Sequence: Synthetic oligonucleotide
aauucguaucuuucuagua

SEQ ID NO: 1545384 - RNA, 19 nt, Artificial Sequence
  Description of Artificial Sequence: Synthetic oligonucleotide
ucuggauaugucaucuuaa

SEQ ID NO: 1545385 - RNA, 19 nt, Artificial Sequence
  Description of Artificial Sequence: Synthetic oligonucleotide
gaaacuaauagaaauucgu

SEQ ID NO: 1545386 - RNA, 19 nt, Artificial Sequence
  Description of Artificial Sequence: Synthetic oligonucleotide
caagagcguguuuaugucg

SEQ ID NO: 1545387 - RNA, 19 nt, Artificial Sequence
  Description of Artificial Sequence: Synthetic oligonucleotide
uggugaguaagacuuuacu

SEQ ID NO: 1545388 - RNA, 19 nt, Artificial Sequence
  Description of Artificial Sequence: Synthetic oligonucleotide
uacuaggucggaccaaucu

SEQ ID NO: 1545389 - RNA, 19 nt, Artificial Sequence
  Description of Artificial Sequence: Synthetic oligonucleotide
guaaccacauaaugguggc

SEQ ID NO: 1545390 - RNA, 19 nt, Artificial Sequence
  Description of Artificial Sequence: Synthetic oligonucleotide
ugauguauuccagacggcu

SEQ ID NO: 1545391 - RNA, 19 nt, Artificial Sequence
  Description of Artificial Sequence: Synthetic oligonucleotide
cuauuaucaccuuggccag

SEQ ID NO: 1545392 - RNA, 19 nt, Artificial Sequence
  Description of Artificial Sequence: Synthetic oligonucleotide
uaguaaccacauaauggug

SEQ ID NO: 1545393 - RNA, 19 nt, Artificial Sequence
  Description of Artificial Sequence: Synthetic oligonucleotide
aaguuugggaagccagucu

SEQ ID NO: 1545394 - RNA, 19 nt, Artificial Sequence
  Description of Artificial Sequence: Synthetic oligonucleotide
cuaguaaccacauaauggu

SEQ ID NO: 1545395 - RNA, 19 nt, Artificial Sequence
  Description of Artificial Sequence: Synthetic oligonucleotide
uguuccuucagugguaacu

SEQ ID NO: 1545396 - RNA, 19 nt, Artificial Sequence
  Description of Artificial Sequence: Synthetic oligonucleotide
ucgucgaucacaugcccag

SEQ ID NO: 1545397 - RNA, 19 nt, Artificial Sequence
  Description of Artificial Sequence: Synthetic oligonucleotide
acacuaagggcagugaaug

SEQ ID NO: 1545398 - RNA, 19 nt, Artificial Sequence
  Description of Artificial Sequence: Synthetic oligonucleotide
ugcccgaagcacuuuaggc

SEQ ID NO: 1545399 - RNA, 19 nt, Artificial Sequence
  Description of Artificial Sequence: Synthetic oligonucleotide
cuuaucauagcgaagcccu

SEQ ID NO: 1545400 - RNA, 19 nt, Artificial Sequence
  Description of Artificial Sequence: Synthetic oligonucleotide
aaacuucaggaaucgucga

SEQ ID NO: 1545401 - RNA, 19 nt, Artificial Sequence
  Description of Artificial Sequence: Synthetic oligonucleotide
uguccaguccaaaucguaa

SEQ ID NO: 1545402 - RNA, 19 nt, Artificial Sequence
  Description of Artificial Sequence: Synthetic oligonucleotide
ucguaucuuucuaguaacc

SEQ ID NO: 1545403 - RNA, 19 nt, Artificial Sequence
  Description of Artificial Sequence: Synthetic oligonucleotide
uuguggcguuacuaggucg

SEQ ID NO: 1545404 - RNA, 19 nt, Artificial Sequence
  Description of Artificial Sequence: Synthetic oligonucleotide
uaaugguggcaauaccuac

SEQ ID NO: 1545405 - RNA, 19 nt, Artificial Sequence
  Description of Artificial Sequence: Synthetic oligonucleotide
gucaucuuaacagggucgg

SEQ ID NO: 1545406 - RNA, 19 nt, Artificial Sequence
  Description of Artificial Sequence: Synthetic oligonucleotide
aaucguaacucuggaccuc

SEQ ID NO: 1545407 - RNA, 19 nt, Artificial Sequence
  Description of Artificial Sequence: Synthetic oligonucleotide
auugcagggauuccaggcu

SEQ ID NO: 1545408 - RNA, 19 nt, Artificial Sequence
  Description of Artificial Sequence: Synthetic oligonucleotide
aacggggaucagcagucuc

SEQ ID NO: 1545409 - RNA, 19 nt, Artificial Sequence
  Description of Artificial Sequence: Synthetic oligonucleotide
agugguaacuccucucacu

SEQ ID NO: 1545410 - RNA, 19 nt, Artificial Sequence
  Description of Artificial Sequence: Synthetic oligonucleotide
gaaucgucgaucacaugcc

SEQ ID NO: 1545411 - RNA, 19 nt, Artificial Sequence
  Description of Artificial Sequence: Synthetic oligonucleotide
acacugaggauuucugugu

SEQ ID NO: 1545412 - RNA, 19 nt, Artificial Sequence
  Description of Artificial Sequence: Synthetic oligonucleotide
ugucaugacacugcuuagc

SEQ ID NO: 1545413 - RNA, 19 nt, Artificial Sequence
  Description of Artificial Sequence: Synthetic oligonucleotide
guaagacuuuacugcagcc

SEQ ID NO: 1545414 - RNA, 19 nt, Artificial Sequence
  Description of Artificial Sequence: Synthetic oligonucleotide
cagucuccuaacaucauuc

SEQ ID NO: 1545415 - RNA, 19 nt, Artificial Sequence
  Description of Artificial Sequence: Synthetic oligonucleotide
ucaagagcguguuuauguc

SEQ ID NO: 1545416 - RNA, 19 nt, Artificial Sequence
  Description of Artificial Sequence: Synthetic oligonucleotide
aacuucaggaaucgucgau

SEQ ID NO: 1545417 - RNA, 19 nt, Artificial Sequence
  Description of Artificial Sequence: Synthetic oligonucleotide
uuuagagucuagguccucu

SEQ ID NO: 1545418 - RNA, 19 nt, Artificial Sequence
  Description of Artificial Sequence: Synthetic oligonucleotide
cacauaaugguggcaauac

SEQ ID NO: 1545419 - RNA, 19 nt, Artificial Sequence
  Description of Artificial Sequence: Synthetic oligonucleotide
agguacaacggggaucagc

SEQ ID NO: 1545420 - RNA, 19 nt, Artificial Sequence
  Description of Artificial Sequence: Synthetic oligonucleotide
cauaaacucgggugucagg

SEQ ID NO: 1545421 - RNA, 19 nt, Artificial Sequence
  Description of Artificial Sequence: Synthetic oligonucleotide
uuaucauagcgaagcccug

SEQ ID NO: 1545422 - RNA, 19 nt, Artificial Sequence
  Description of Artificial Sequence: Synthetic oligonucleotide
ggaacccucacacugagga

SEQ ID NO: 1545423 - RNA, 19 nt, Artificial Sequence
  Description of Artificial Sequence: Synthetic oligonucleotide
caccuaucaccacagcugc

SEQ ID NO: 1545424 - RNA, 19 nt, Artificial Sequence
  Description of Artificial Sequence: Synthetic oligonucleotide
ucggaccaaucuuugauau

SEQ ID NO: 1545425 - RNA, 19 nt, Artificial Sequence
  Description of Artificial Sequence: Synthetic oligonucleotide
ucgaucacaugcccaguca

SEQ ID NO: 1545426 - RNA, 19 nt, Artificial Sequence
  Description of Artificial Sequence: Synthetic oligonucleotide
uccggagggaaacaccacu

SEQ ID NO: 1545427 - RNA, 19 nt, Artificial Sequence
  Description of Artificial Sequence: Synthetic oligonucleotide
ugucacaaaucaacacuaa

SEQ ID NO: 1545428 - RNA, 19 nt, Artificial Sequence
  Description of Artificial Sequence: Synthetic oligonucleotide
aaaggccuuaucauagcga

SEQ ID NO: 1545429 - RNA, 19 nt, Artificial Sequence
  Description of Artificial Sequence: Synthetic oligonucleotide
ugucucaagagcguguuua

SEQ ID NO: 1545430 - RNA, 19 nt, Artificial Sequence
  Description of Artificial Sequence: Synthetic oligonucleotide
gagcuuauccacuggcaac

SEQ ID NO: 1545431 - RNA, 19 nt, Artificial Sequence
  Description of Artificial Sequence: Synthetic oligonucleotide
uuauccuuagcugucuuuu

SEQ ID NO: 1545432 - RNA, 19 nt, Artificial Sequence
  Description of Artificial Sequence: Synthetic oligonucleotide
acuaagggcagugaauggu

SEQ ID NO: 1545433 - RNA, 19 nt, Artificial Sequence
  Description of Artificial Sequence: Synthetic oligonucleotide
acggagauugucacaaauc

SEQ ID NO: 1545434 - RNA, 19 nt, Artificial Sequence
  Description of Artificial Sequence: Synthetic oligonucleotide
cuuugagcuuauccacugg

SEQ ID NO: 1545435 - RNA, 19 nt, Artificial Sequence
  Description of Artificial Sequence: Synthetic oligonucleotide
acaacggggaucagcaguc

SEQ ID NO: 1545436 - RNA, 19 nt, Artificial Sequence
  Description of Artificial Sequence: Synthetic oligonucleotide
cuaacaucauuccagugua

SEQ ID NO: 1545437 - RNA, 19 nt, Artificial Sequence
  Description of Artificial Sequence: Synthetic oligonucleotide
aacacuaagggcagugaau

SEQ ID NO: 1545438 - RNA, 19 nt, Artificial Sequence
  Description of Artificial Sequence: Synthetic oligonucleotide
ggccuuaucauagcgaagc

SEQ ID NO: 1545439 - RNA, 19 nt, Artificial Sequence
  Description of Artificial Sequence: Synthetic oligonucleotide
cacuaagggcagugaaugg

SEQ ID NO: 1545440 - RNA, 19 nt, Artificial Sequence
  Description of Artificial Sequence: Synthetic oligonucleotide
guaacucuggaccucaagu

SEQ ID NO: 1545441 - RNA, 19 nt, Artificial Sequence
  Description of Artificial Sequence: Synthetic oligonucleotide
gaauucaggcuguccacuc

SEQ ID NO: 1545442 - RNA, 19 nt, Artificial Sequence
  Description of Artificial Sequence: Synthetic oligonucleotide
uaggucggaccaaucuuug

SEQ ID NO: 1545443 - RNA, 19 nt, Artificial Sequence
  Description of Artificial Sequence: Synthetic oligonucleotide
uucgggacagcuccagccu

SEQ ID NO: 1545444 - RNA, 19 nt, Artificial Sequence
  Description of Artificial Sequence: Synthetic oligonucleotide
gcuccuauuaucaccuugg

SEQ ID NO: 1545445 - RNA, 19 nt, Artificial Sequence
  Description of Artificial Sequence: Synthetic oligonucleotide
agccuuuggugaguaagac

SEQ ID NO: 1545446 - RNA, 19 nt, Artificial Sequence
  Description of Artificial Sequence: Synthetic oligonucleotide
uuggccagucuccuaacau

SEQ ID NO: 1545447 - RNA, 19 nt, Artificial Sequence
  Description of Artificial Sequence: Synthetic oligonucleotide
uccuaacaucauuccagug

SEQ ID NO: 1545448 - RNA, 19 nt, Artificial Sequence
  Description of Artificial Sequence: Synthetic oligonucleotide
uuuaggcucccaggcaucc

SEQ ID NO: 1545449 - RNA, 19 nt, Artificial Sequence
  Description of Artificial Sequence: Synthetic oligonucleotide
aaugggcaccuggaaaugu

SEQ ID NO: 1545450 - RNA, 19 nt, Artificial Sequence
  Description of Artificial Sequence: Synthetic oligonucleotide
acuaggucggaccaaucuu

SEQ ID NO: 1545451 - RNA, 19 nt, Artificial Sequence
  Description of Artificial Sequence: Synthetic oligonucleotide
uccguuccuccacuugucc

SEQ ID NO: 1545452 - RNA, 19 nt, Artificial Sequence
  Description of Artificial Sequence: Synthetic oligonucleotide
ucaugacacugcuuagccu

SEQ ID NO: 1545453 - RNA, 19 nt, Artificial Sequence
  Description of Artificial Sequence: Synthetic oligonucleotide
ugcagaucucagaauuguc

SEQ ID NO: 1545454 - RNA, 19 nt, Artificial Sequence
  Description of Artificial Sequence: Synthetic oligonucleotide
agaaucuucccuugcuuuu

SEQ ID NO: 1545455 - RNA, 19 nt, Artificial Sequence
  Description of Artificial Sequence: Synthetic oligonucleotide
aacccucacacugaggauu

SEQ ID NO: 1545456 - RNA, 19 nt, Artificial Sequence
  Description of Artificial Sequence: Synthetic oligonucleotide
uaucauagcgaagcccugu

SEQ ID NO: 1545457 - RNA, 19 nt, Artificial Sequence
  Description of Artificial Sequence: Synthetic oligonucleotide
uucugguuuuagagucuag

SEQ ID NO: 1545458 - RNA, 19 nt, Artificial Sequence
  Description of Artificial Sequence: Synthetic oligonucleotide
ucaacacuaagggcaguga

SEQ ID NO: 1545459 - RNA, 19 nt, Artificial Sequence
  Description of Artificial Sequence: Synthetic oligonucleotide
cccauuauuccuuguggcg

SEQ ID NO: 1545460 - RNA, 19 nt, Artificial Sequence
  Description of Artificial Sequence: Synthetic oligonucleotide
accuuuauccuuagcuguc

SEQ ID NO: 1545461 - RNA, 19 nt, Artificial Sequence
  Description of Artificial Sequence: Synthetic oligonucleotide
ggcguuacuaggucggacc

SEQ ID NO: 1545462 - RNA, 19 nt, Artificial Sequence
  Description of Artificial Sequence: Synthetic oligonucleotide
uuuucccgaaaaggccugg

SEQ ID NO: 1545463 - RNA, 19 nt, Artificial Sequence
  Description of Artificial Sequence: Synthetic oligonucleotide
aaucagccugcgaccuucc

SEQ ID NO: 1545464 - RNA, 19 nt, Artificial Sequence
  Description of Artificial Sequence: Synthetic oligonucleotide
ucuuaacagggucggguuu

SEQ ID NO: 1545465 - RNA, 19 nt, Artificial Sequence
  Description of Artificial Sequence: Synthetic oligonucleotide
ucaucuuaacagggucggg

SEQ ID NO: 1545466 - RNA, 19 nt, Artificial Sequence
  Description of Artificial Sequence: Synthetic oligonucleotide
gguacaacggggaucagca

SEQ ID NO: 1545467 - RNA, 19 nt, Artificial Sequence
  Description of Artificial Sequence: Synthetic oligonucleotide
uauuccuuguggcguuacu

SEQ ID NO: 1545468 - RNA, 19 nt, Artificial Sequence
  Description of Artificial Sequence: Synthetic oligonucleotide
aguccaaaucguaacucug

SEQ ID NO: 1545469 - RNA, 19 nt, Artificial Sequence
  Description of Artificial Sequence: Synthetic oligonucleotide
gaucacaugcccagucaug

SEQ ID NO: 1545470 - RNA, 19 nt, Artificial Sequence
  Description of Artificial Sequence: Synthetic oligonucleotide
cuccuauuaucaccuuggc

SEQ ID NO: 1545471 - RNA, 19 nt, Artificial Sequence
  Description of Artificial Sequence: Synthetic oligonucleotide
gugauugggcacuguuucc

SEQ ID NO: 1545472 - RNA, 19 nt, Artificial Sequence
  Description of Artificial Sequence: Synthetic oligonucleotide
auaucugagccugagcaua

SEQ ID NO: 1545473 - RNA, 19 nt, Artificial Sequence
  Description of Artificial Sequence: Synthetic oligonucleotide
ugcaaucagccugcgaccu

SEQ ID NO: 1545474 - RNA, 19 nt, Artificial Sequence
  Description of Artificial Sequence: Synthetic oligonucleotide
aauccccauuauuccuugu

SEQ ID NO: 1545475 - RNA, 19 nt, Artificial Sequence
  Description of Artificial Sequence: Synthetic oligonucleotide
caguagaaucuucccuugc

SEQ ID NO: 1545476 - RNA, 19 nt, Artificial Sequence
  Description of Artificial Sequence: Synthetic oligonucleotide
uguuuaugucgcugcugcu

SEQ ID NO: 1545477 - RNA, 19 nt, Artificial Sequence
  Description of Artificial Sequence: Synthetic oligonucleotide
auaaugguggcaauaccua

SEQ ID NO: 1545478 - RNA, 19 nt, Artificial Sequence
  Description of Artificial Sequence: Synthetic oligonucleotide
aggaugcuugcagccaugg

SEQ ID NO: 1545479 - RNA, 19 nt, Artificial Sequence
  Description of Artificial Sequence: Synthetic oligonucleotide
gaccacaguugucugccac

SEQ ID NO: 1545480 - RNA, 19 nt, Artificial Sequence
  Description of Artificial Sequence: Synthetic oligonucleotide
gcgaccuuccaguagaauc

SEQ ID NO: 1545481 - RNA, 19 nt, Artificial Sequence
  Description of Artificial Sequence: Synthetic oligonucleotide
caaguuugggaagccaguc

SEQ ID NO: 1545482 - RNA, 19 nt, Artificial Sequence
  Description of Artificial Sequence: Synthetic oligonucleotide
uuaugucgcugcugcugag

SEQ ID NO: 1545483 - RNA, 19 nt, Artificial Sequence
  Description of Artificial Sequence: Synthetic oligonucleotide
gauugggcacuguuuccca

SEQ ID NO: 1545484 - RNA, 19 nt, Artificial Sequence
  Description of Artificial Sequence: Synthetic oligonucleotide
gucacggagauugucacaa

SEQ ID NO: 1545485 - RNA, 19 nt, Artificial Sequence
  Description of Artificial Sequence: Synthetic oligonucleotide
aagugauugggcacuguuu

SEQ ID NO: 1545486 - RNA, 19 nt, Artificial Sequence
  Description of Artificial Sequence: Synthetic oligonucleotide
uuucccauuccagauuguu

SEQ ID NO: 1545487 - RNA, 19 nt, Artificial Sequence
  Description of Artificial Sequence: Synthetic oligonucleotide
uuugggaagccagucuuuu

SEQ ID NO: 1545488 - RNA, 19 nt, Artificial Sequence
  Description of Artificial Sequence: Synthetic oligonucleotide
cuuguccggagggaaacac

SEQ ID NO: 1545489 - RNA, 19 nt, Artificial Sequence
  Description of Artificial Sequence: Synthetic oligonucleotide
uggcaauaccuaccuccug

SEQ ID NO: 1545490 - RNA, 19 nt, Artificial Sequence
  Description of Artificial Sequence: Synthetic oligonucleotide
ggaaaggccuuaucauagc

SEQ ID NO: 1545491 - RNA, 19 nt, Artificial Sequence
  Description of Artificial Sequence: Synthetic oligonucleotide
agccaauugcagggauucc

SEQ ID NO: 1545492 - RNA, 19 nt, Artificial Sequence
  Description of Artificial Sequence: Synthetic oligonucleotide
cacugcuuagccuccuguc

SEQ ID NO: 1545493 - RNA, 19 nt, Artificial Sequence
  Description of Artificial Sequence: Synthetic oligonucleotide
uuacuaggucggaccaauc

SEQ ID NO: 1545494 - RNA, 19 nt, Artificial Sequence
  Description of Artificial Sequence: Synthetic oligonucleotide
gauguauuccagacggcua

SEQ ID NO: 1545495 - RNA, 19 nt, Artificial Sequence
  Description of Artificial Sequence: Synthetic oligonucleotide
aggucccgagucuggauca

SEQ ID NO: 1545496 - RNA, 19 nt, Artificial Sequence
  Description of Artificial Sequence: Synthetic oligonucleotide
caggcucacuccauguguc

SEQ ID NO: 1545497 - RNA, 19 nt, Artificial Sequence
  Description of Artificial Sequence: Synthetic oligonucleotide
ucucacugcucaagucuuc

SEQ ID NO: 1545498 - RNA, 19 nt, Artificial Sequence
  Description of Artificial Sequence: Synthetic oligonucleotide
cugguuuuagagucuaggu

SEQ ID NO: 1545499 - RNA, 19 nt, Artificial Sequence
  Description of Artificial Sequence: Synthetic oligonucleotide
cuugcgaggcugcuggaca

SEQ ID NO: 1545500 - RNA, 19 nt, Artificial Sequence
  Description of Artificial Sequence: Synthetic oligonucleotide
uaaccacauaaugguggca

SEQ ID NO: 1545501 - RNA, 19 nt, Artificial Sequence
  Description of Artificial Sequence: Synthetic oligonucleotide
caaucagccugcgaccuuc

SEQ ID NO: 1545502 - RNA, 19 nt, Artificial Sequence
  Description of Artificial Sequence: Synthetic oligonucleotide
ccuggacuuaacuauuguc

SEQ ID NO: 1545503 - RNA, 19 nt, Artificial Sequence
  Description of Artificial Sequence: Synthetic oligonucleotide
agccagucuuuucugguuu

SEQ ID NO: 1545504 - RNA, 19 nt, Artificial Sequence
  Description of Artificial Sequence: Synthetic oligonucleotide
agggucacggagauuguca

SEQ ID NO: 1545505 - RNA, 19 nt, Artificial Sequence
  Description of Artificial Sequence: Synthetic oligonucleotide
guacaacggggaucagcag

SEQ ID NO: 1545506 - RNA, 19 nt, Artificial Sequence
  Description of Artificial Sequence: Synthetic oligonucleotide
gagcguguuuaugucgcug

SEQ ID NO: 1545507 - RNA, 19 nt, Artificial Sequence
  Description of Artificial Sequence: Synthetic oligonucleotide
gaaaaggccuggacuuaac

SEQ ID NO: 1545508 - RNA, 19 nt, Artificial Sequence
  Description of Artificial Sequence: Synthetic oligonucleotide
caguacucucagccaauug

SEQ ID NO: 1545509 - RNA, 19 nt, Artificial Sequence
  Description of Artificial Sequence: Synthetic oligonucleotide
uuauuccuuguggcguuac

SEQ ID NO: 1545510 - RNA, 19 nt, Artificial Sequence
  Description of Artificial Sequence: Synthetic oligonucleotide
ccuuaaugaggcugacacc

SEQ ID NO: 1545511 - RNA, 19 nt, Artificial Sequence
  Description of Artificial Sequence: Synthetic oligonucleotide
caccuuuauccuuagcugu

SEQ ID NO: 1545512 - RNA, 19 nt, Artificial Sequence
  Description of Artificial Sequence: Synthetic oligonucleotide
caacacuaagggcagugaa

SEQ ID NO: 1545513 - RNA, 19 nt, Artificial Sequence
  Description of Artificial Sequence: Synthetic oligonucleotide
cacuuguccggagggaaac

SEQ ID NO: 1545514 - RNA, 19 nt, Artificial Sequence
  Description of Artificial Sequence: Synthetic oligonucleotide
agggaccgccuugcgaggc

SEQ ID NO: 1545515 - RNA, 19 nt, Artificial Sequence
  Description of Artificial Sequence: Synthetic oligonucleotide
cacuccaugugucucccca

SEQ ID NO: 1545516 - RNA, 19 nt, Artificial Sequence
  Description of Artificial Sequence: Synthetic oligonucleotide
ccaaaucguaacucuggac

SEQ ID NO: 1545517 - RNA, 19 nt, Artificial Sequence
  Description of Artificial Sequence: Synthetic oligonucleotide
uguauuccagacggcuaaa

SEQ ID NO: 1545518 - RNA, 19 nt, Artificial Sequence
  Description of Artificial Sequence: Synthetic oligonucleotide
agagcguguuuaugucgcu

SEQ ID NO: 1545519 - RNA, 19 nt, Artificial Sequence
  Description of Artificial Sequence: Synthetic oligonucleotide
auuagauaucugagccuga

SEQ ID NO: 1545520 - RNA, 19 nt, Artificial Sequence
  Description of Artificial Sequence: Synthetic oligonucleotide
ugcgccguagcgcccggac

SEQ ID NO: 1545521 - RNA, 19 nt, Artificial Sequence
  Description of Artificial Sequence: Synthetic oligonucleotide
aggucggaccaaucuuuga

SEQ ID NO: 1545522 - RNA, 19 nt, Artificial Sequence
  Description of Artificial Sequence: Synthetic oligonucleotide
gucggaccaaucuuugaua

SEQ ID NO: 1545523 - RNA, 19 nt, Artificial Sequence
  Description of Artificial Sequence: Synthetic oligonucleotide
uuuuagagucuagguccuc

SEQ ID NO: 1545524 - RNA, 19 nt, Artificial Sequence
  Description of Artificial Sequence: Synthetic oligonucleotide
auggcugaauucaggcugu

SEQ ID NO: 1545525 - RNA, 19 nt, Artificial Sequence
  Description of Artificial Sequence: Synthetic oligonucleotide
accgggcugcgccguagcg

SEQ ID NO: 1545526 - RNA, 19 nt, Artificial Sequence
  Description of Artificial Sequence: Synthetic oligonucleotide
gggauuccaggcucacucc

SEQ ID NO: 1545527 - RNA, 19 nt, Artificial Sequence
  Description of Artificial Sequence: Synthetic oligonucleotide
ggggcaagugauugggcac

SEQ ID NO: 1545528 - RNA, 19 nt, Artificial Sequence
  Description of Artificial Sequence: Synthetic oligonucleotide
caguccaaaucguaacucu

SEQ ID NO: 1545529 - RNA, 19 nt, Artificial Sequence
  Description of Artificial Sequence: Synthetic oligonucleotide
aucgucgaucacaugccca

SEQ ID NO: 1545530 - RNA, 19 nt, Artificial Sequence
  Description of Artificial Sequence: Synthetic oligonucleotide
gccacauaaacucgggugu

SEQ ID NO: 1545531 - RNA, 19 nt, Artificial Sequence
  Description of Artificial Sequence: Synthetic oligonucleotide
ugcucaagucuuccaccuu

SEQ ID NO: 1545532 - RNA, 19 nt, Artificial Sequence
  Description of Artificial Sequence: Synthetic oligonucleotide
cuuggccagucuccuaaca

SEQ ID NO: 1545533 - RNA, 19 nt, Artificial Sequence
  Description of Artificial Sequence: Synthetic oligonucleotide
ucacuccaugugucucccc

SEQ ID NO: 1545534 - RNA, 19 nt, Artificial Sequence
  Description of Artificial Sequence: Synthetic oligonucleotide
uggcguuacuaggucggac

SEQ ID NO: 1545535 - RNA, 19 nt, Artificial Sequence
  Description of Artificial Sequence: Synthetic oligonucleotide
cacauaaacucggguguca

SEQ ID NO: 1545536 - RNA, 19 nt, Artificial Sequence
  Description of Artificial Sequence: Synthetic oligonucleotide
ccguuccuccacuuguccg

SEQ ID NO: 1545537 - RNA, 19 nt, Artificial Sequence
  Description of Artificial Sequence: Synthetic oligonucleotide
guuacuaggucggaccaau

SEQ ID NO: 1545538 - RNA, 19 nt, Artificial Sequence
  Description of Artificial Sequence: Synthetic oligonucleotide
gacccagcgccgcgcgccg

SEQ ID NO: 1545539 - RNA, 19 nt, Artificial Sequence
  Description of Artificial Sequence: Synthetic oligonucleotide
ugcuggacaggagcacgcu

SEQ ID NO: 1545540 - RNA, 19 nt, Artificial Sequence
  Description of Artificial Sequence: Synthetic oligonucleotide
caugccugcccgaagcacu

SEQ ID NO: 1545541 - RNA, 19 nt, Artificial Sequence
  Description of Artificial Sequence: Synthetic oligonucleotide
uguccacuccagguacaac

SEQ ID NO: 1545542 - RNA, 19 nt, Artificial Sequence
  Description of Artificial Sequence: Synthetic oligonucleotide
ccugcgaccuuccaguaga

SEQ ID NO: 1545543 - RNA, 19 nt, Artificial Sequence
  Description of Artificial Sequence: Synthetic oligonucleotide
uaacagggucggguuuggc

SEQ ID NO: 1545544 - RNA, 19 nt, Artificial Sequence
  Description of Artificial Sequence: Synthetic oligonucleotide
acuuguccggagggaaaca

SEQ ID NO: 1545545 - RNA, 19 nt, Artificial Sequence
  Description of Artificial Sequence: Synthetic oligonucleotide
gaugucucaagagcguguu

SEQ ID NO: 1545546 - RNA, 19 nt, Artificial Sequence
  Description of Artificial Sequence: Synthetic oligonucleotide
cuguccaguccaaaucgua

SEQ ID NO: 1545547 - RNA, 19 nt, Artificial Sequence
  Description of Artificial Sequence: Synthetic oligonucleotide
aggaacccucacacugagg

SEQ ID NO: 1545548 - RNA, 19 nt, Artificial Sequence
  Description of Artificial Sequence: Synthetic oligonucleotide
guauuccagacggcuaaaa

SEQ ID NO: 1545549 - RNA, 19 nt, Artificial Sequence
  Description of Artificial Sequence: Synthetic oligonucleotide
aucagccugcgaccuucca

SEQ ID NO: 1545550 - RNA, 19 nt, Artificial Sequence
  Description of Artificial Sequence: Synthetic oligonucleotide
guaacuccucucacugcuc

SEQ ID NO: 1545551 - RNA, 19 nt, Artificial Sequence
  Description of Artificial Sequence: Synthetic oligonucleotide
cagccugcgaccuuccagu

SEQ ID NO: 1545552 - RNA, 19 nt, Artificial Sequence
  Description of Artificial Sequence: Synthetic oligonucleotide
uguucacaaugggcaccug

SEQ ID NO: 1545553 - RNA, 19 nt, Artificial Sequence
  Description of Artificial Sequence: Synthetic oligonucleotide
ccaguccaaaucguaacuc

SEQ ID NO: 1545554 - RNA, 19 nt, Artificial Sequence
  Description of Artificial Sequence: Synthetic oligonucleotide
gcguuacuaggucggacca

SEQ ID NO: 1545555 - RNA, 19 nt, Artificial Sequence
  Description of Artificial Sequence: Synthetic oligonucleotide
caagugauugggcacuguu

SEQ ID NO: 1545556 - RNA, 19 nt, Artificial Sequence
  Description of Artificial Sequence: Synthetic oligonucleotide
cacggagauugucacaaau

SEQ ID NO: 1545557 - RNA, 19 nt, Artificial Sequence
  Description of Artificial Sequence: Synthetic oligonucleotide
caugugucuccccaccuau

SEQ ID NO: 1545558 - RNA, 19 nt, Artificial Sequence
  Description of Artificial Sequence: Synthetic oligonucleotide
guggcaauaccuaccuccu

SEQ ID NO: 1545559 - RNA, 19 nt, Artificial Sequence
  Description of Artificial Sequence: Synthetic oligonucleotide
cauuauuccuuguggcguu

SEQ ID NO: 1545560 - RNA, 19 nt, Artificial Sequence
  Description of Artificial Sequence: Synthetic oligonucleotide
cgccuugcgaggcugcugg

SEQ ID NO: 1545561 - RNA, 19 nt, Artificial Sequence
  Description of Artificial Sequence: Synthetic oligonucleotide
ugcgaccuuccaguagaau

SEQ ID NO: 1545562 - RNA, 19 nt, Artificial Sequence
  Description of Artificial Sequence: Synthetic oligonucleotide
ggaggaacccucacacuga

SEQ ID NO: 1545563 - RNA, 19 nt, Artificial Sequence
  Description of Artificial Sequence: Synthetic oligonucleotide
gucucaagagcguguuuau

SEQ ID NO: 1545564 - RNA, 19 nt, Artificial Sequence
  Description of Artificial Sequence: Synthetic oligonucleotide
guguuccuucagugguaac

SEQ ID NO: 1545565 - RNA, 19 nt, Artificial Sequence
  Description of Artificial Sequence: Synthetic oligonucleotide
ggucacggagauugucaca

SEQ ID NO: 1545566 - RNA, 19 nt, Artificial Sequence
  Description of Artificial Sequence: Synthetic oligonucleotide
gaacccucacacugaggau

SEQ ID NO: 1545567 - RNA, 19 nt, Artificial Sequence
  Description of Artificial Sequence: Synthetic oligonucleotide
gccugcgaccuuccaguag

SEQ ID NO: 1545568 - RNA, 19 nt, Artificial Sequence
  Description of Artificial Sequence: Synthetic oligonucleotide
cucucacugcucaagucuu

SEQ ID NO: 1545569 - RNA, 19 nt, Artificial Sequence
  Description of Artificial Sequence: Synthetic oligonucleotide
caauaccuaccuccuggcu

SEQ ID NO: 1545570 - RNA, 19 nt, Artificial Sequence
  Description of Artificial Sequence: Synthetic oligonucleotide
acccucacacugaggauuu

SEQ ID NO: 1545571 - RNA, 19 nt, Artificial Sequence
  Description of Artificial Sequence: Synthetic oligonucleotide
uguccccgggaaaggccuu

SEQ ID NO: 1545572 - RNA, 19 nt, Artificial Sequence
  Description of Artificial Sequence: Synthetic oligonucleotide
aggccuggacuuaacuauu

SEQ ID NO: 1545573 - RNA, 19 nt, Artificial Sequence
  Description of Artificial Sequence: Synthetic oligonucleotide
ccucucacugcucaagucu

SEQ ID NO: 1545574 - RNA, 19 nt, Artificial Sequence
  Description of Artificial Sequence: Synthetic oligonucleotide
accuaucaccacagcugcu

SEQ ID NO: 1545575 - RNA, 19 nt, Artificial Sequence
  Description of Artificial Sequence: Synthetic oligonucleotide
gccuuuggugaguaagacu

SEQ ID NO: 1545576 - RNA, 19 nt, Artificial Sequence
  Description of Artificial Sequence: Synthetic oligonucleotide
gugaggugucugggauggg

SEQ ID NO: 1545577 - RNA, 19 nt, Artificial Sequence
  Description of Artificial Sequence: Synthetic oligonucleotide
gggcacuguuucccauucc

SEQ ID NO: 1545578 - RNA, 19 nt, Artificial Sequence
  Description of Artificial Sequence: Synthetic oligonucleotide
ccacauaaacucggguguc

SEQ ID NO: 1545579 - RNA, 19 nt, Artificial Sequence
  Description of Artificial Sequence: Synthetic oligonucleotide
gcucaagucuuccaccuuu

SEQ ID NO: 1545580 - RNA, 19 nt, Artificial Sequence
  Description of Artificial Sequence: Synthetic oligonucleotide
agccugcgaccuuccagua

SEQ ID NO: 1545581 - RNA, 19 nt, Artificial Sequence
  Description of Artificial Sequence: Synthetic oligonucleotide
cuuuggugaguaagacuuu

SEQ ID NO: 1545582 - RNA, 19 nt, Artificial Sequence
  Description of Artificial Sequence: Synthetic oligonucleotide
cgaccuuccaguagaaucu

SEQ ID NO: 1545583 - RNA, 19 nt, Artificial Sequence
  Description of Artificial Sequence: Synthetic oligonucleotide
agggucggguuuggcaaaa

SEQ ID NO: 1545584 - RNA, 19 nt, Artificial Sequence
  Description of Artificial Sequence: Synthetic oligonucleotide
cuguccacuccagguacaa

SEQ ID NO: 1545585 - RNA, 19 nt, Artificial Sequence
  Description of Artificial Sequence: Synthetic oligonucleotide
cagggucggguuuggcaaa

SEQ ID NO: 1545586 - RNA, 19 nt, Artificial Sequence
  Description of Artificial Sequence: Synthetic oligonucleotide
cacugaggauuucuguguu

SEQ ID NO: 1545587 - RNA, 19 nt, Artificial Sequence
  Description of Artificial Sequence: Synthetic oligonucleotide
guggcguuacuaggucgga

SEQ ID NO: 1545588 - RNA, 19 nt, Artificial Sequence
  Description of Artificial Sequence: Synthetic oligonucleotide
gccgaggucccgagucugg

SEQ ID NO: 1545589 - RNA, 19 nt, Artificial Sequence
  Description of Artificial Sequence: Synthetic oligonucleotide
caggaggaacccucacacu

SEQ ID NO: 1545590 - RNA, 19 nt, Artificial Sequence
  Description of Artificial Sequence: Synthetic oligonucleotide
cccaccuaucaccacagcu

SEQ ID NO: 1545591 - RNA, 19 nt, Artificial Sequence
  Description of Artificial Sequence: Synthetic oligonucleotide
cccgaaaaggccuggacuu

SEQ ID NO: 1545592 - RNA, 19 nt, Artificial Sequence
  Description of Artificial Sequence: Synthetic oligonucleotide
cacucucaccgggcugcgc

SEQ ID NO: 1545593 - RNA, 19 nt, Artificial Sequence
  Description of Artificial Sequence: Synthetic oligonucleotide
ccauuccagauuguucaca

SEQ ID NO: 1545594 - RNA, 19 nt, Artificial Sequence
  Description of Artificial Sequence: Synthetic oligonucleotide
augccugcccgaagcacuu

SEQ ID NO: 1545595 - RNA, 19 nt, Artificial Sequence
  Description of Artificial Sequence: Synthetic oligonucleotide
augcccagucauggucacu

SEQ ID NO: 1545596 - RNA, 19 nt, Artificial Sequence
  Description of Artificial Sequence: Synthetic oligonucleotide
guuugggaagccagucuuu

SEQ ID NO: 1545597 - RNA, 19 nt, Artificial Sequence
  Description of Artificial Sequence: Synthetic oligonucleotide
gcuuauccacuggcaacuc

SEQ ID NO: 1545598 - RNA, 19 nt, Artificial Sequence
  Description of Artificial Sequence: Synthetic oligonucleotide
cugcgaccuuccaguagaa

SEQ ID NO: 1545599 - RNA, 19 nt, Artificial Sequence
  Description of Artificial Sequence: Synthetic oligonucleotide
gccuggacuuaacuauugu

SEQ ID NO: 1545600 - RNA, 19 nt, Artificial Sequence
  Description of Artificial Sequence: Synthetic oligonucleotide
ccuuagcugucuuuucccu

SEQ ID NO: 1545601 - RNA, 19 nt, Artificial Sequence
  Description of Artificial Sequence: Synthetic oligonucleotide
gcaggaugcuugcagccau

SEQ ID NO: 1545602 - RNA, 19 nt, Artificial Sequence
  Description of Artificial Sequence: Synthetic oligonucleotide
uaccuaccuccuggcuccu

SEQ ID NO: 1545603 - RNA, 19 nt, Artificial Sequence
  Description of Artificial Sequence: Synthetic oligonucleotide
cggaccaaucuuugauauc

SEQ ID NO: 1545604 - RNA, 19 nt, Artificial Sequence
  Description of Artificial Sequence: Synthetic oligonucleotide
ggaccgccuugcgaggcug

SEQ ID NO: 1545605 - RNA, 19 nt, Artificial Sequence
  Description of Artificial Sequence: Synthetic oligonucleotide
cacaguugucugccacaua

SEQ ID NO: 1545606 - RNA, 19 nt, Artificial Sequence
  Description of Artificial Sequence: Synthetic oligonucleotide
cgcgccgaggucccgaguc

SEQ ID NO: 1545607 - RNA, 19 nt, Artificial Sequence
  Description of Artificial Sequence: Synthetic oligonucleotide
guuucccauuccagauugu

SEQ ID NO: 1545608 - RNA, 19 nt, Artificial Sequence
  Description of Artificial Sequence: Synthetic oligonucleotide
cagguacaacggggaucag

SEQ ID NO: 1545609 - RNA, 19 nt, Artificial Sequence
  Description of Artificial Sequence: Synthetic oligonucleotide
gcguguuuaugucgcugcu

SEQ ID NO: 1545610 - RNA, 19 nt, Artificial Sequence
  Description of Artificial Sequence: Synthetic oligonucleotide
gcgccgcgcgccgaggucc

SEQ ID NO: 1545611 - RNA, 19 nt, Artificial Sequence
  Description of Artificial Sequence: Synthetic oligonucleotide
cguagcgcccggacccagc

SEQ ID NO: 1545612 - RNA, 19 nt, Artificial Sequence
  Description of Artificial Sequence: Synthetic oligonucleotide
gcugcgccguagcgcccgg

SEQ ID NO: 1545613 - RNA, 19 nt, Artificial Sequence
  Description of Artificial Sequence: Synthetic oligonucleotide
gcccggacccagcgccgcg

SEQ ID NO: 1545614 - RNA, 19 nt, Artificial Sequence
  Description of Artificial Sequence: Synthetic oligonucleotide
ugccugcccgaagcacuuu

SEQ ID NO: 1545615 - RNA, 19 nt, Artificial Sequence
  Description of Artificial Sequence: Synthetic oligonucleotide
cucuugccaccaguacucu

SEQ ID NO: 1545616 - RNA, 19 nt, Artificial Sequence
  Description of Artificial Sequence: Synthetic oligonucleotide
cccaugccugcccgaagca

SEQ ID NO: 1545617 - RNA, 19 nt, Artificial Sequence
  Description of Artificial Sequence: Synthetic oligonucleotide
cgaaaaggccuggacuuaa

SEQ ID NO: 1545618 - RNA, 19 nt, Artificial Sequence
  Description of Artificial Sequence: Synthetic oligonucleotide
caacggggaucagcagucu

SEQ ID NO: 1545619 - RNA, 19 nt, Artificial Sequence
  Description of Artificial Sequence: Synthetic oligonucleotide
cgaucacaugcccagucau

SEQ ID NO: 1545620 - RNA, 19 nt, Artificial Sequence
  Description of Artificial Sequence: Synthetic oligonucleotide
gccuugcgaggcugcugga

SEQ ID NO: 1545621 - RNA, 19 nt, Artificial Sequence
  Description of Artificial Sequence: Synthetic oligonucleotide
cucaccgggcugcgccgua

SEQ ID NO: 1545622 - RNA, 19 nt, Artificial Sequence
  Description of Artificial Sequence: Synthetic oligonucleotide
ccgaaaaggccuggacuua

SEQ ID NO: 1545623 - RNA, 19 nt, Artificial Sequence
  Description of Artificial Sequence: Synthetic oligonucleotide
gggaccgccuugcgaggcu

SEQ ID NO: 1545624 - RNA, 19 nt, Artificial Sequence
  Description of Artificial Sequence: Synthetic oligonucleotide
gcaaucagccugcgaccuu

SEQ ID NO: 1545625 - RNA, 19 nt, Artificial Sequence
  Description of Artificial Sequence: Synthetic oligonucleotide
ccgaggucccgagucugga

SEQ ID NO: 1545626 - RNA, 19 nt, Artificial Sequence
  Description of Artificial Sequence: Synthetic oligonucleotide
ccgccuugcgaggcugcug

SEQ ID NO: 1545627 - RNA, 19 nt, Artificial Sequence
  Description of Artificial Sequence: Synthetic oligonucleotide
cguuacuaggucggaccaa

SEQ ID NO: 1545628 - RNA, 19 nt, Artificial Sequence
  Description of Artificial Sequence: Synthetic oligonucleotide
cgccgaggucccgagucug

SEQ ID NO: 1545629 - RNA, 19 nt, Artificial Sequence
  Description of Artificial Sequence: Synthetic oligonucleotide
gcgccgaggucccgagucu

SEQ ID NO: 1545630 - RNA, 19 nt, Artificial Sequence
  Description of Artificial Sequence: Synthetic oligonucleotide
ggcugacaccuuugagcuu

SEQ ID NO: 1545631 - RNA, 19 nt, Artificial Sequence
  Description of Artificial Sequence: Synthetic oligonucleotide
ccguagcgcccggacccag

SEQ ID NO: 1545632 - RNA, 19 nt, Artificial Sequence
  Description of Artificial Sequence: Synthetic oligonucleotide
cugcgccguagcgcccgga

SEQ ID NO: 1545633 - RNA, 19 nt, Artificial Sequence
  Description of Artificial Sequence: Synthetic oligonucleotide
ccaguacucucagccaauu

SEQ ID NO: 1545634 - RNA, 19 nt, Artificial Sequence
  Description of Artificial Sequence: Synthetic oligonucleotide
cggacccagcgccgcgcgc

SEQ ID NO: 1545635 - RNA, 19 nt, Artificial Sequence
  Description of Artificial Sequence: Synthetic oligonucleotide
cgaggucccgagucuggau

SEQ ID NO: 1545636 - RNA, 19 nt, Artificial Sequence
  Description of Artificial Sequence: Synthetic oligonucleotide
cgucgaucacaugcccagu

SEQ ID NO: 1545637 - RNA, 19 nt, Artificial Sequence
  Description of Artificial Sequence: Synthetic oligonucleotide
gcgcgccgaggucccgagu

SEQ ID NO: 1545638 - RNA, 19 nt, Artificial Sequence
  Description of Artificial Sequence: Synthetic oligonucleotide
uuuuguaaagauuugauca

SEQ ID NO: 1545639 - RNA, 19 nt, Artificial Sequence
  Description of Artificial Sequence: Synthetic oligonucleotide
aaagguucugacuuuauuc

SEQ ID NO: 1545640 - RNA, 19 nt, Artificial Sequence
  Description of Artificial Sequence: Synthetic oligonucleotide
cauaauacaguacacacgg

SEQ ID NO: 1545641 - RNA, 19 nt, Artificial Sequence
  Description of Artificial Sequence: Synthetic oligonucleotide
uuuauucucuacuagauug

SEQ ID NO: 1545642 - RNA, 19 nt, Artificial Sequence
  Description of Artificial Sequence: Synthetic oligonucleotide
agcuaugcaauauuuaagc

SEQ ID NO: 1545643 - RNA, 19 nt, Artificial Sequence
  Description of Artificial Sequence: Synthetic oligonucleotide
uguaugagggauaagaaca

SEQ ID NO: 1545644 - RNA, 19 nt, Artificial Sequence
  Description of Artificial Sequence: Synthetic oligonucleotide
aaagacucgagugucaacc

SEQ ID NO: 1545645 - RNA, 19 nt, Artificial Sequence
  Description of Artificial Sequence: Synthetic oligonucleotide
uauuaaaugaacugcaaug

SEQ ID NO: 1545646 - RNA, 19 nt, Artificial Sequence
  Description of Artificial Sequence: Synthetic oligonucleotide
auauaucccacgcacaugc

SEQ ID NO: 1545647 - RNA, 19 nt, Artificial Sequence
  Description of Artificial Sequence: Synthetic oligonucleotide
uaauacaguacacacggcg

SEQ ID NO: 1545648 - RNA, 19 nt, Artificial Sequence
  Description of Artificial Sequence: Synthetic oligonucleotide
auuucaauuaaauagccca

SEQ ID NO: 1545649 - RNA, 19 nt, Artificial Sequence
  Description of Artificial Sequence: Synthetic oligonucleotide
aaggucaagucauuuaaac

SEQ ID NO: 1545650 - RNA, 19 nt, Artificial Sequence
  Description of Artificial Sequence: Synthetic oligonucleotide
ucaaccauaguucauaccu

SEQ ID NO: 1545651 - RNA, 19 nt, Artificial Sequence
  Description of Artificial Sequence: Synthetic oligonucleotide
uuugaaaugccucucagac

SEQ ID NO: 1545652 - RNA, 19 nt, Artificial Sequence
  Description of Artificial Sequence: Synthetic oligonucleotide
ugaacugcaaugaagguca

SEQ ID NO: 1545653 - RNA, 19 nt, Artificial Sequence
  Description of Artificial Sequence: Synthetic oligonucleotide
uguacacuaauacacacca

SEQ ID NO: 1545654 - RNA, 19 nt, Artificial Sequence
  Description of Artificial Sequence: Synthetic oligonucleotide
uuuacuuguaaacaguuaa

SEQ ID NO: 1545655 - RNA, 19 nt, Artificial Sequence
  Description of Artificial Sequence: Synthetic oligonucleotide
uaugcaauauuuaagcuuc

SEQ ID NO: 1545656 - RNA, 19 nt, Artificial Sequence
  Description of Artificial Sequence: Synthetic oligonucleotide
uaaaugaacugcaaugaag

SEQ ID NO: 1545657 - RNA, 19 nt, Artificial Sequence
  Description of Artificial Sequence: Synthetic oligonucleotide
uauggugcgcacaagaugc

SEQ ID NO: 1545658 - RNA, 19 nt, Artificial Sequence
  Description of Artificial Sequence: Synthetic oligonucleotide
auaccauccacuuaaacug

SEQ ID NO: 1545659 - RNA, 19 nt, Artificial Sequence
  Description of Artificial Sequence: Synthetic oligonucleotide
uuaaguuaccauaccaucc

SEQ ID NO: 1545660 - RNA, 19 nt, Artificial Sequence
  Description of Artificial Sequence: Synthetic oligonucleotide
ucauagguuacacuugagg

SEQ ID NO: 1545661 - RNA, 19 nt, Artificial Sequence
  Description of Artificial Sequence: Synthetic oligonucleotide
  modified_base (18)..(18): a, c, u, g, unknown or other
aaagcgugagaacauucnc

SEQ ID NO: 1545662 - RNA, 19 nt, Artificial Sequence
  Description of Artificial Sequence: Synthetic oligonucleotide
uuuguaaagauuugaucag

SEQ ID NO: 1545663 - RNA, 19 nt, Artificial Sequence
  Description of Artificial Sequence: Synthetic oligonucleotide
uuucuauucagccuggagu

SEQ ID NO: 1545664 - RNA, 19 nt, Artificial Sequence
  Description of Artificial Sequence: Synthetic oligonucleotide
auaaacuuguuuugcauag

SEQ ID NO: 1545665 - RNA, 19 nt, Artificial Sequence
  Description of Artificial Sequence: Synthetic oligonucleotide
ugagggauaagaacaacag

SEQ ID NO: 1545666 - RNA, 19 nt, Artificial Sequence
  Description of Artificial Sequence: Synthetic oligonucleotide
aaacaguuaaagcacacau

SEQ ID NO: 1545667 - RNA, 19 nt, Artificial Sequence
  Description of Artificial Sequence: Synthetic oligonucleotide
  modified_base (11)..(11): a, c, u, g, unknown or other
gagaacauucncuagccag

SEQ ID NO: 1545668 - RNA, 19 nt, Artificial Sequence
  Description of Artificial Sequence: Synthetic oligonucleotide
  modified_base (3)..(3): a, c, u, g, unknown or other
ucncuagccaguauggugc

SEQ ID NO: 1545669 - RNA, 19 nt, Artificial Sequence
  Description of Artificial Sequence: Synthetic oligonucleotide
uuugucauagguuacacuu

SEQ ID NO: 1545670 - RNA, 19 nt, Artificial Sequence
  Description of Artificial Sequence: Synthetic oligonucleotide
aaagcucagguuuugaaau

SEQ ID NO: 1545671 - RNA, 19 nt, Artificial Sequence
  Description of Artificial Sequence: Synthetic oligonucleotide
uucaugaucgacaaccaca

SEQ ID NO: 1545672 - RNA, 19 nt, Artificial Sequence
  Description of Artificial Sequence: Synthetic oligonucleotide
acuauuacuuuaaagguuc

SEQ ID NO: 1545673 - RNA, 19 nt, Artificial Sequence
  Description of Artificial Sequence: Synthetic oligonucleotide
ucaugaucgacaaccacag

SEQ ID NO: 1545674 - RNA, 19 nt, Artificial Sequence
  Description of Artificial Sequence: Synthetic oligonucleotide
aagguucugacuuuauucu

SEQ ID NO: 1545675 - RNA, 19 nt, Artificial Sequence
  Description of Artificial Sequence: Synthetic oligonucleotide
acugauaaacuuguuuugc

SEQ ID NO: 1545676 - RNA, 19 nt, Artificial Sequence
  Description of Artificial Sequence: Synthetic oligonucleotide
agcacuuugugucccaagc

SEQ ID NO: 1545677 - RNA, 19 nt, Artificial Sequence
  Description of Artificial Sequence: Synthetic oligonucleotide
ucgagugucaaccagcacu

SEQ ID NO: 1545678 - RNA, 19 nt, Artificial Sequence
  Description of Artificial Sequence: Synthetic oligonucleotide
uugaggagauccuagcccg

SEQ ID NO: 1545679 - RNA, 19 nt, Artificial Sequence
  Description of Artificial Sequence: Synthetic oligonucleotide
aaauuacaguuuuauacaa

SEQ ID NO: 1545680 - RNA, 19 nt, Artificial Sequence
  Description of Artificial Sequence: Synthetic oligonucleotide
ugacauauaucccacgcac

SEQ ID NO: 1545681 - RNA, 19 nt, Artificial Sequence
  Description of Artificial Sequence: Synthetic oligonucleotide
aaaaugcccuguaugaggg

SEQ ID NO: 1545682 - RNA, 19 nt, Artificial Sequence
  Description of Artificial Sequence: Synthetic oligonucleotide
uuaaacugacaccauauua

SEQ ID NO: 1545683 - RNA, 19 nt, Artificial Sequence
  Description of Artificial Sequence: Synthetic oligonucleotide
agaacaacaguuuaaguua

SEQ ID NO: 1545684 - RNA, 19 nt, Artificial Sequence
  Description of Artificial Sequence: Synthetic oligonucleotide
cauucagacugcauuaccg

SEQ ID NO: 1545685 - RNA, 19 nt, Artificial Sequence
  Description of Artificial Sequence: Synthetic oligonucleotide
auagguuacacuugaggag

SEQ ID NO: 1545686 - RNA, 19 nt, Artificial Sequence
  Description of Artificial Sequence: Synthetic oligonucleotide
uuuaaguuaccauaccauc

SEQ ID NO: 1545687 - RNA, 19 nt, Artificial Sequence
  Description of Artificial Sequence: Synthetic oligonucleotide
aagcgccugagucauuucc

SEQ ID NO: 1545688 - RNA, 19 nt, Artificial Sequence
  Description of Artificial Sequence: Synthetic oligonucleotide
uucucuacuagauuguuuc

SEQ ID NO: 1545689 - RNA, 19 nt, Artificial Sequence
  Description of Artificial Sequence: Synthetic oligonucleotide
augaucgacaaccacagca

SEQ ID NO: 1545690 - RNA, 19 nt, Artificial Sequence
  Description of Artificial Sequence: Synthetic oligonucleotide
acuuuaaagguucugacuu

SEQ ID NO: 1545691 - RNA, 19 nt, Artificial Sequence
  Description of Artificial Sequence: Synthetic oligonucleotide
  modified_base (7)..(7): a, c, u, g, unknown or other
acauucncuagccaguaug

SEQ ID NO: 1545692 - RNA, 19 nt, Artificial Sequence
  Description of Artificial Sequence: Synthetic oligonucleotide
uaauauugaauuuucccau

SEQ ID NO: 1545693 - RNA, 19 nt, Artificial Sequence
  Description of Artificial Sequence: Synthetic oligonucleotide
ucaagucauuuaaacaagc

SEQ ID NO: 1545694 - RNA, 19 nt, Artificial Sequence
  Description of Artificial Sequence: Synthetic oligonucleotide
uuucacugaaaccauccug

SEQ ID NO: 1545695 - RNA, 19 nt, Artificial Sequence
  Description of Artificial Sequence: Synthetic oligonucleotide
aaacugacaccauauuacu

SEQ ID NO: 1545696 - RNA, 19 nt, Artificial Sequence
  Description of Artificial Sequence: Synthetic oligonucleotide
auuaaaugaacugcaauga

SEQ ID NO: 1545697 - RNA, 19 nt, Artificial Sequence
  Description of Artificial Sequence: Synthetic oligonucleotide
ugaucagucuuugucauag

SEQ ID NO: 1545698 - RNA, 19 nt, Artificial Sequence
  Description of Artificial Sequence: Synthetic oligonucleotide
agcaacauucccuucauga

SEQ ID NO: 1545699 - RNA, 19 nt, Artificial Sequence
  Description of Artificial Sequence: Synthetic oligonucleotide
acaguuuaaguuaccauac

SEQ ID NO: 1545700 - RNA, 19 nt, Artificial Sequence
  Description of Artificial Sequence: Synthetic oligonucleotide
ucagacacuuucuauucag

SEQ ID NO: 1545701 - RNA, 19 nt, Artificial Sequence
  Description of Artificial Sequence: Synthetic oligonucleotide
auccacuuaaacugacacc

SEQ ID NO: 1545702 - RNA, 19 nt, Artificial Sequence
  Description of Artificial Sequence: Synthetic oligonucleotide
  modified_base (19)..(19): a, c, u, g, unknown or other
uaaagcgugagaacauucn

SEQ ID NO: 1545703 - RNA, 19 nt, Artificial Sequence
  Description of Artificial Sequence: Synthetic oligonucleotide
agucauuuaaacaagcaga

SEQ ID NO: 1545704 - RNA, 19 nt, Artificial Sequence
  Description of Artificial Sequence: Synthetic oligonucleotide
ugaacugauaaacuuguuu

SEQ ID NO: 1545705 - RNA, 19 nt, Artificial Sequence
  Description of Artificial Sequence: Synthetic oligonucleotide
  modified_base (4)..(4): a, c, u, g, unknown or other
uucncuagccaguauggug

SEQ ID NO: 1545706 - RNA, 19 nt, Artificial Sequence
  Description of Artificial Sequence: Synthetic oligonucleotide
ugacuuuauucucuacuag

SEQ ID NO: 1545707 - RNA, 19 nt, Artificial Sequence
  Description of Artificial Sequence: Synthetic oligonucleotide
  modified_base (6)..(6): a, c, u, g, unknown or other
cauucncuagccaguaugg

SEQ ID NO: 1545708 - RNA, 19 nt, Artificial Sequence
  Description of Artificial Sequence: Synthetic oligonucleotide
agauaauauugaauuuucc

SEQ ID NO: 1545709 - RNA, 19 nt, Artificial Sequence
  Description of Artificial Sequence: Synthetic oligonucleotide
acauucagacugcauuacc

SEQ ID NO: 1545710 - RNA, 19 nt, Artificial Sequence
  Description of Artificial Sequence: Synthetic oligonucleotide
uaaguauagcagcacuuug

SEQ ID NO: 1545711 - RNA, 19 nt, Artificial Sequence
  Description of Artificial Sequence: Synthetic oligonucleotide
accagcacuaaguauagca

SEQ ID NO: 1545712 - RNA, 19 nt, Artificial Sequence
  Description of Artificial Sequence: Synthetic oligonucleotide
ugucauagguuacacuuga

SEQ ID NO: 1545713 - RNA, 19 nt, Artificial Sequence
  Description of Artificial Sequence: Synthetic oligonucleotide
cauuucaauuaaauagccc

SEQ ID NO: 1545714 - RNA, 19 nt, Artificial Sequence
  Description of Artificial Sequence: Synthetic oligonucleotide
uuacuuuaaagguucugac

SEQ ID NO: 1545715 - RNA, 19 nt, Artificial Sequence
  Description of Artificial Sequence: Synthetic oligonucleotide
uucuauucagccuggaguc

SEQ ID NO: 1545716 - RNA, 19 nt, Artificial Sequence
  Description of Artificial Sequence: Synthetic oligonucleotide
cauagguuacacuugagga

SEQ ID NO: 1545717 - RNA, 19 nt, Artificial Sequence
  Description of Artificial Sequence: Synthetic oligonucleotide
agcagauucacucuucaga

SEQ ID NO: 1545718 - RNA, 19 nt, Artificial Sequence
  Description of Artificial Sequence: Synthetic oligonucleotide
ugcauuaccgaacacucuc

SEQ ID NO: 1545719 - RNA, 19 nt, Artificial Sequence
  Description of Artificial Sequence: Synthetic oligonucleotide
uuaccguuauuaaaugaac

SEQ ID NO: 1545720 - RNA, 19 nt, Artificial Sequence
  Description of Artificial Sequence: Synthetic oligonucleotide
gacaccauauuacugauua

SEQ ID NO: 1545721 - RNA, 19 nt, Artificial Sequence
  Description of Artificial Sequence: Synthetic oligonucleotide
ucuacuagauuguuucacu

SEQ ID NO: 1545722 - RNA, 19 nt, Artificial Sequence
  Description of Artificial Sequence: Synthetic oligonucleotide
uuaccgaacacucucuuua

SEQ ID NO: 1545723 - RNA, 19 nt, Artificial Sequence
  Description of Artificial Sequence: Synthetic oligonucleotide
augaacugcaaugaagguc

SEQ ID NO: 1545724 - RNA, 19 nt, Artificial Sequence
  Description of Artificial Sequence: Synthetic oligonucleotide
ugaucgacaaccacagcac

SEQ ID NO: 1545725 - RNA, 19 nt, Artificial Sequence
  Description of Artificial Sequence: Synthetic oligonucleotide
caccauauuacugauuacc

SEQ ID NO: 1545726 - RNA, 19 nt, Artificial Sequence
  Description of Artificial Sequence: Synthetic oligonucleotide
uacuuuaaagguucugacu

SEQ ID NO: 1545727 - RNA, 19 nt, Artificial Sequence
  Description of Artificial Sequence: Synthetic oligonucleotide
uuauucucuacuagauugu

SEQ ID NO: 1545728 - RNA, 19 nt, Artificial Sequence
  Description of Artificial Sequence: Synthetic oligonucleotide
ugauuaccguuauuaaaug

SEQ ID NO: 1545729 - RNA, 19 nt, Artificial Sequence
  Description of Artificial Sequence: Synthetic oligonucleotide
uaaaacaccccauuucaau

SEQ ID NO: 1545730 - RNA, 19 nt, Artificial Sequence
  Description of Artificial Sequence: Synthetic oligonucleotide
accauauuacugauuaccg

SEQ ID NO: 1545731 - RNA, 19 nt, Artificial Sequence
  Description of Artificial Sequence: Synthetic oligonucleotide
cuucgauugcaacugacug

SEQ ID NO: 1545732 - RNA, 19 nt, Artificial Sequence
  Description of Artificial Sequence: Synthetic oligonucleotide
acugcauuaccgaacacuc

SEQ ID NO: 1545733 - RNA, 19 nt, Artificial Sequence
  Description of Artificial Sequence: Synthetic oligonucleotide
ucuuuacuuguaaacaguu

SEQ ID NO: 1545734 - RNA, 19 nt, Artificial Sequence
  Description of Artificial Sequence: Synthetic oligonucleotide
ugauaaacuuguuuugcau

SEQ ID NO: 1545735 - RNA, 19 nt, Artificial Sequence
  Description of Artificial Sequence: Synthetic oligonucleotide
caugcucucuguaguaugg

SEQ ID NO: 1545736 - RNA, 19 nt, Artificial Sequence
  Description of Artificial Sequence: Synthetic oligonucleotide
uaucccacgcacaugcucu

SEQ ID NO: 1545737 - RNA, 19 nt, Artificial Sequence
  Description of Artificial Sequence: Synthetic oligonucleotide
uucacuggcaaggaaaggu

SEQ ID NO: 1545738 - RNA, 19 nt, Artificial Sequence
  Description of Artificial Sequence: Synthetic oligonucleotide
cuguaugagggauaagaac

SEQ ID NO: 1545739 - RNA, 19 nt, Artificial Sequence
  Description of Artificial Sequence: Synthetic oligonucleotide
acugauuaccguuauuaaa

SEQ ID NO: 1545740 - RNA, 19 nt, Artificial Sequence
  Description of Artificial Sequence: Synthetic oligonucleotide
uacuagauuguuucacuga

SEQ ID NO: 1545741 - RNA, 19 nt, Artificial Sequence
  Description of Artificial Sequence: Synthetic oligonucleotide
auuuugggaggagucagac

SEQ ID NO: 1545742 - RNA, 19 nt, Artificial Sequence
  Description of Artificial Sequence: Synthetic oligonucleotide
uugucauagguuacacuug

SEQ ID NO: 1545743 - RNA, 19 nt, Artificial Sequence
  Description of Artificial Sequence: Synthetic oligonucleotide
cuuguaaagcgugagaaca

SEQ ID NO: 1545744 - RNA, 19 nt, Artificial Sequence
  Description of Artificial Sequence: Synthetic oligonucleotide
gauuaccguuauuaaauga

SEQ ID NO: 1545745 - RNA, 19 nt, Artificial Sequence
  Description of Artificial Sequence: Synthetic oligonucleotide
uccaccuucgauugcaacu

SEQ ID NO: 1545746 - RNA, 19 nt, Artificial Sequence
  Description of Artificial Sequence: Synthetic oligonucleotide
ucagacugcauuaccgaac

SEQ ID NO: 1545747 - RNA, 19 nt, Artificial Sequence
  Description of Artificial Sequence: Synthetic oligonucleotide
agugucaaccagcacuaag

SEQ ID NO: 1545748 - RNA, 19 nt, Artificial Sequence
  Description of Artificial Sequence: Synthetic oligonucleotide
uuuaaacaagcagauucac

SEQ ID NO: 1545749 - RNA, 19 nt, Artificial Sequence
  Description of Artificial Sequence: Synthetic oligonucleotide
aggucaagucauuuaaaca

SEQ ID NO: 1545750 - RNA, 19 nt, Artificial Sequence
  Description of Artificial Sequence: Synthetic oligonucleotide
auaucccacgcacaugcuc

SEQ ID NO: 1545751 - RNA, 19 nt, Artificial Sequence
  Description of Artificial Sequence: Synthetic oligonucleotide
auguucaaggccaagccuc

SEQ ID NO: 1545752 - RNA, 19 nt, Artificial Sequence
  Description of Artificial Sequence: Synthetic oligonucleotide
aaacaccccauuucaauua

SEQ ID NO: 1545753 - RNA, 19 nt, Artificial Sequence
  Description of Artificial Sequence: Synthetic oligonucleotide
acauauaucccacgcacau

SEQ ID NO: 1545754 - RNA, 19 nt, Artificial Sequence
  Description of Artificial Sequence: Synthetic oligonucleotide
aaguauagcagcacuuugu

SEQ ID NO: 1545755 - RNA, 19 nt, Artificial Sequence
  Description of Artificial Sequence: Synthetic oligonucleotide
ucacuggcaaggaaaggug

SEQ ID NO: 1545756 - RNA, 19 nt, Artificial Sequence
  Description of Artificial Sequence: Synthetic oligonucleotide
aaccauaguucauaccuuu

SEQ ID NO: 1545757 - RNA, 19 nt, Artificial Sequence
  Description of Artificial Sequence: Synthetic oligonucleotide
  modified_base (16)..(16): a, c, u, g, unknown or other
agcgugagaacauucncua

SEQ ID NO: 1545758 - RNA, 19 nt, Artificial Sequence
  Description of Artificial Sequence: Synthetic oligonucleotide
ucugcaugaccggagaaca

SEQ ID NO: 1545759 - RNA, 19 nt, Artificial Sequence
  Description of Artificial Sequence: Synthetic oligonucleotide
aucagucuuugucauaggu

SEQ ID NO: 1545760 - RNA, 19 nt, Artificial Sequence
  Description of Artificial Sequence: Synthetic oligonucleotide
cuuugugucccaagcagug

SEQ ID NO: 1545761 - RNA, 19 nt, Artificial Sequence
  Description of Artificial Sequence: Synthetic oligonucleotide
auuaccguuauuaaaugaa

SEQ ID NO: 1545762 - RNA, 19 nt, Artificial Sequence
  Description of Artificial Sequence: Synthetic oligonucleotide
aagugucugcuuauuuugg

SEQ ID NO: 1545763 - RNA, 19 nt, Artificial Sequence
  Description of Artificial Sequence: Synthetic oligonucleotide
ucuugaaaugugagucuug

SEQ ID NO: 1545764 - RNA, 19 nt, Artificial Sequence
  Description of Artificial Sequence: Synthetic oligonucleotide
auugcaacugacuguccug

SEQ ID NO: 1545765 - RNA, 19 nt, Artificial Sequence
  Description of Artificial Sequence: Synthetic oligonucleotide
agauccuagcccgucaggg

SEQ ID NO: 1545766 - RNA, 19 nt, Artificial Sequence
  Description of Artificial Sequence: Synthetic oligonucleotide
uagucuccaacagagcuug

SEQ ID NO: 1545767 - RNA, 19 nt, Artificial Sequence
  Description of Artificial Sequence: Synthetic oligonucleotide
uugaaaugccucucagaca

SEQ ID NO: 1545768 - RNA, 19 nt, Artificial Sequence
  Description of Artificial Sequence: Synthetic oligonucleotide
guaguauggcuccacagga

SEQ ID NO: 1545769 - RNA, 19 nt, Artificial Sequence
  Description of Artificial Sequence: Synthetic oligonucleotide
uggauguucaaggccaagc

SEQ ID NO: 1545770 - RNA, 19 nt, Artificial Sequence
  Description of Artificial Sequence: Synthetic oligonucleotide
  modified_base (10)..(10): a, c, u, g, unknown or other
agaacauucncuagccagu

SEQ ID NO: 1545771 - RNA, 19 nt, Artificial Sequence
  Description of Artificial Sequence: Synthetic oligonucleotide
acaacaguuuaaguuacca

SEQ ID NO: 1545772 - RNA, 19 nt, Artificial Sequence
  Description of Artificial Sequence: Synthetic oligonucleotide
ucgauugcaacugacuguc

SEQ ID NO: 1545773 - RNA, 19 nt, Artificial Sequence
  Description of Artificial Sequence: Synthetic oligonucleotide
cuuucuauucagccuggag

SEQ ID NO: 1545774 - RNA, 19 nt, Artificial Sequence
  Description of Artificial Sequence: Synthetic oligonucleotide
  modified_base (12)..(12): a, c, u, g, unknown or other
ugagaacauucncuagcca

SEQ ID NO: 1545775 - RNA, 19 nt, Artificial Sequence
  Description of Artificial Sequence: Synthetic oligonucleotide
aagacucgagugucaacca

SEQ ID NO: 1545776 - RNA, 19 nt, Artificial Sequence
  Description of Artificial Sequence: Synthetic oligonucleotide
auacaguacacacggcgca

SEQ ID NO: 1545777 - RNA, 19 nt, Artificial Sequence
  Description of Artificial Sequence: Synthetic oligonucleotide
ugucaaccauaguucauac

SEQ ID NO: 1545778 - RNA, 19 nt, Artificial Sequence
  Description of Artificial Sequence: Synthetic oligonucleotide
  modified_base (13)..(13): a, c, u, g, unknown or other
gugagaacauucncuagcc

SEQ ID NO: 1545779 - RNA, 19 nt, Artificial Sequence
  Description of Artificial Sequence: Synthetic oligonucleotide
uaaagguucugacuuuauu

SEQ ID NO: 1545780 - RNA, 19 nt, Artificial Sequence
  Description of Artificial Sequence: Synthetic oligonucleotide
aacuuguuuugcauagucu

SEQ ID NO: 1545781 - RNA, 19 nt, Artificial Sequence
  Description of Artificial Sequence: Synthetic oligonucleotide
caucaauaaaacuauuacu

SEQ ID NO: 1545782 - RNA, 19 nt, Artificial Sequence
  Description of Artificial Sequence: Synthetic oligonucleotide
accggagaacaaucacucc

SEQ ID NO: 1545783 - RNA, 19 nt, Artificial Sequence
  Description of Artificial Sequence: Synthetic oligonucleotide
guauggugcgcacaagaug

SEQ ID NO: 1545784 - RNA, 19 nt, Artificial Sequence
  Description of Artificial Sequence: Synthetic oligonucleotide
uauuacugauuaccguuau

SEQ ID NO: 1545785 - RNA, 19 nt, Artificial Sequence
  Description of Artificial Sequence: Synthetic oligonucleotide
ccauuauacacacauucag

SEQ ID NO: 1545786 - RNA, 19 nt, Artificial Sequence
  Description of Artificial Sequence: Synthetic oligonucleotide
aguauggcuccacaggaau

SEQ ID NO: 1545787 - RNA, 19 nt, Artificial Sequence
  Description of Artificial Sequence: Synthetic oligonucleotide
gaucgacaaccacagcacc

SEQ ID NO: 1545788 - RNA, 19 nt, Artificial Sequence
  Description of Artificial Sequence: Synthetic oligonucleotide
uuguaaagauuugaucagu

SEQ ID NO: 1545789 - RNA, 19 nt, Artificial Sequence
  Description of Artificial Sequence: Synthetic oligonucleotide
caccuugugucaaccauag

SEQ ID NO: 1545790 - RNA, 19 nt, Artificial Sequence
  Description of Artificial Sequence: Synthetic oligonucleotide
ugucaaccagcacuaagua

SEQ ID NO: 1545791 - RNA, 19 nt, Artificial Sequence
  Description of Artificial Sequence: Synthetic oligonucleotide
uuacacuugaggagauccu

SEQ ID NO: 1545792 - RNA, 19 nt, Artificial Sequence
  Description of Artificial Sequence: Synthetic oligonucleotide
uuguaaagcgugagaacau

SEQ ID NO: 1545793 - RNA, 19 nt, Artificial Sequence
  Description of Artificial Sequence: Synthetic oligonucleotide
caagcagugcccgagguug

SEQ ID NO: 1545794 - RNA, 19 nt, Artificial Sequence
  Description of Artificial Sequence: Synthetic oligonucleotide
cuucagcuuguaaagcgug

SEQ ID NO: 1545795 - RNA, 19 nt, Artificial Sequence
  Description of Artificial Sequence: Synthetic oligonucleotide
cugauuaccguuauuaaau

SEQ ID NO: 1545796 - RNA, 19 nt, Artificial Sequence
  Description of Artificial Sequence: Synthetic oligonucleotide
auaauacaguacacacggc

SEQ ID NO: 1545797 - RNA, 19 nt, Artificial Sequence
  Description of Artificial Sequence: Synthetic oligonucleotide
aacaccccauuucaauuaa

SEQ ID NO: 1545798 - RNA, 19 nt, Artificial Sequence
  Description of Artificial Sequence: Synthetic oligonucleotide
  modified_base (17)..(17): a, c, u, g, unknown or other
aagcgugagaacauucncu

SEQ ID NO: 1545799 - RNA, 19 nt, Artificial Sequence
  Description of Artificial Sequence: Synthetic oligonucleotide
ccauuucaauuaaauagcc

SEQ ID NO: 1545800 - RNA, 19 nt, Artificial Sequence
  Description of Artificial Sequence: Synthetic oligonucleotide
aaagcgccugagucauuuc

SEQ ID NO: 1545801 - RNA, 19 nt, Artificial Sequence
  Description of Artificial Sequence: Synthetic oligonucleotide
acuuaaacugacaccauau

SEQ ID NO: 1545802 - RNA, 19 nt, Artificial Sequence
  Description of Artificial Sequence: Synthetic oligonucleotide
cagucuuugucauagguua

SEQ ID NO: 1545803 - RNA, 19 nt, Artificial Sequence
  Description of Artificial Sequence: Synthetic oligonucleotide
uucagacugcauuaccgaa

SEQ ID NO: 1545804 - RNA, 19 nt, Artificial Sequence
  Description of Artificial Sequence: Synthetic oligonucleotide
ggauguucaaggccaagcc

SEQ ID NO: 1545805 - RNA, 19 nt, Artificial Sequence
  Description of Artificial Sequence: Synthetic oligonucleotide
aaugcccuguaugagggau

SEQ ID NO: 1545806 - RNA, 19 nt, Artificial Sequence
  Description of Artificial Sequence: Synthetic oligonucleotide
ucucuacuagauuguuuca

SEQ ID NO: 1545807 - RNA, 19 nt, Artificial Sequence
  Description of Artificial Sequence: Synthetic oligonucleotide
caaccagcacuaaguauag

SEQ ID NO: 1545808 - RNA, 19 nt, Artificial Sequence
  Description of Artificial Sequence: Synthetic oligonucleotide
ucuuugucauagguuacac

SEQ ID NO: 1545809 - RNA, 19 nt, Artificial Sequence
  Description of Artificial Sequence: Synthetic oligonucleotide
uagcccgucagggaaaagc

SEQ ID NO: 1545810 - RNA, 19 nt, Artificial Sequence
  Description of Artificial Sequence: Synthetic oligonucleotide
cagacacuuucuauucagc

SEQ ID NO: 1545811 - RNA, 19 nt, Artificial Sequence
  Description of Artificial Sequence: Synthetic oligonucleotide
acucacccaucaaagacuc

SEQ ID NO: 1545812 - RNA, 19 nt, Artificial Sequence
  Description of Artificial Sequence: Synthetic oligonucleotide
  modified_base (14)..(14): a, c, u, g, unknown or other
cgugagaacauucncuagc

SEQ ID NO: 1545813 - RNA, 19 nt, Artificial Sequence
  Description of Artificial Sequence: Synthetic oligonucleotide
uuaaagguucugacuuuau

SEQ ID NO: 1545814 - RNA, 19 nt, Artificial Sequence
  Description of Artificial Sequence: Synthetic oligonucleotide
aucgcagccugcccaacuc

SEQ ID NO: 1545815 - RNA, 19 nt, Artificial Sequence
  Description of Artificial Sequence: Synthetic oligonucleotide
cccuucaugaucgacaacc

SEQ ID NO: 1545816 - RNA, 19 nt, Artificial Sequence
  Description of Artificial Sequence: Synthetic oligonucleotide
cucuacuagauuguuucac

SEQ ID NO: 1545817 - RNA, 19 nt, Artificial Sequence
  Description of Artificial Sequence: Synthetic oligonucleotide
agacucgagugucaaccag

SEQ ID NO: 1545818 - RNA, 19 nt, Artificial Sequence
  Description of Artificial Sequence: Synthetic oligonucleotide
auucacucuucagacaccu

SEQ ID NO: 1545819 - RNA, 19 nt, Artificial Sequence
  Description of Artificial Sequence: Synthetic oligonucleotide
ucgacaaccacagcaccca

SEQ ID NO: 1545820 - RNA, 19 nt, Artificial Sequence
  Description of Artificial Sequence: Synthetic oligonucleotide
aguacagacuucaucaaua

SEQ ID NO: 1545821 - RNA, 19 nt, Artificial Sequence
  Description of Artificial Sequence: Synthetic oligonucleotide
ugcccgagguugcaauagg

SEQ ID NO: 1545822 - RNA, 19 nt, Artificial Sequence
  Description of Artificial Sequence: Synthetic oligonucleotide
aacaguuaaagcacacauu

SEQ ID NO: 1545823 - RNA, 19 nt, Artificial Sequence
  Description of Artificial Sequence: Synthetic oligonucleotide
caacugacuguccugccac

SEQ ID NO: 1545824 - RNA, 19 nt, Artificial Sequence
  Description of Artificial Sequence: Synthetic oligonucleotide
gaccggagaacaaucacuc

SEQ ID NO: 1545825 - RNA, 19 nt, Artificial Sequence
  Description of Artificial Sequence: Synthetic oligonucleotide
aaccagcacuaaguauagc

SEQ ID NO: 1545826 - RNA, 19 nt, Artificial Sequence
  Description of Artificial Sequence: Synthetic oligonucleotide
ucaaagacucgagugucaa

SEQ ID NO: 1545827 - RNA, 19 nt, Artificial Sequence
  Description of Artificial Sequence: Synthetic oligonucleotide
cauauuacugauuaccguu

SEQ ID NO: 1545828 - RNA, 19 nt, Artificial Sequence
  Description of Artificial Sequence: Synthetic oligonucleotide
uuuugggaggagucagacu

SEQ ID NO: 1545829 - RNA, 19 nt, Artificial Sequence
  Description of Artificial Sequence: Synthetic oligonucleotide
cuucaugaucgacaaccac

SEQ ID NO: 1545830 - RNA, 19 nt, Artificial Sequence
  Description of Artificial Sequence: Synthetic oligonucleotide
ugugucaaccauaguucau

SEQ ID NO: 1545831 - RNA, 19 nt, Artificial Sequence
  Description of Artificial Sequence: Synthetic oligonucleotide
gagauccuagcccgucagg

SEQ ID NO: 1545832 - RNA, 19 nt, Artificial Sequence
  Description of Artificial Sequence: Synthetic oligonucleotide
  modified_base (8)..(8): a, c, u, g, unknown or other
aacauucncuagccaguau

SEQ ID NO: 1545833 - RNA, 19 nt, Artificial Sequence
  Description of Artificial Sequence: Synthetic oligonucleotide
cuauucagccuggagucag

SEQ ID NO: 1545834 - RNA, 19 nt, Artificial Sequence
  Description of Artificial Sequence: Synthetic oligonucleotide
aucacuccaccaagcacgc

SEQ ID NO: 1545835 - RNA, 19 nt, Artificial Sequence
  Description of Artificial Sequence: Synthetic oligonucleotide
uaugagggauaagaacaac

SEQ ID NO: 1545836 - RNA, 19 nt, Artificial Sequence
  Description of Artificial Sequence: Synthetic oligonucleotide
acaucugcaugaccggaga

SEQ ID NO: 1545837 - RNA, 19 nt, Artificial Sequence
  Description of Artificial Sequence: Synthetic oligonucleotide
ccguuauuaaaugaacugc

SEQ ID NO: 1545838 - RNA, 19 nt, Artificial Sequence
  Description of Artificial Sequence: Synthetic oligonucleotide
gaacacucucuuuacaaau

SEQ ID NO: 1545839 - RNA, 19 nt, Artificial Sequence
  Description of Artificial Sequence: Synthetic oligonucleotide
uuaccauaccauccacuua

SEQ ID NO: 1545840 - RNA, 19 nt, Artificial Sequence
  Description of Artificial Sequence: Synthetic oligonucleotide
ucccauaaacuuugcuuuc

SEQ ID NO: 1545841 - RNA, 19 nt, Artificial Sequence
  Description of Artificial Sequence: Synthetic oligonucleotide
uaguauggcuccacaggaa

SEQ ID NO: 1545842 - RNA, 19 nt, Artificial Sequence
  Description of Artificial Sequence: Synthetic oligonucleotide
uaaacuuguuuugcauagu

SEQ ID NO: 1545843 - RNA, 19 nt, Artificial Sequence
  Description of Artificial Sequence: Synthetic oligonucleotide
uccacaucgcagccugccc

SEQ ID NO: 1545844 - RNA, 19 nt, Artificial Sequence
  Description of Artificial Sequence: Synthetic oligonucleotide
aacugcaaugaaggucaag

SEQ ID NO: 1545845 - RNA, 19 nt, Artificial Sequence
  Description of Artificial Sequence: Synthetic oligonucleotide
uccaaagcgccugagucau

SEQ ID NO: 1545846 - RNA, 19 nt, Artificial Sequence
  Description of Artificial Sequence: Synthetic oligonucleotide
aaaugcccuguaugaggga

SEQ ID NO: 1545847 - RNA, 19 nt, Artificial Sequence
  Description of Artificial Sequence: Synthetic oligonucleotide
uaccgaacacucucuuuac

SEQ ID NO: 1545848 - RNA, 19 nt, Artificial Sequence
  Description of Artificial Sequence: Synthetic oligonucleotide
cuaugcaauauuuaagcuu

SEQ ID NO: 1545849 - RNA, 19 nt, Artificial Sequence
  Description of Artificial Sequence: Synthetic oligonucleotide
ccagcacuaaguauagcag

SEQ ID NO: 1545850 - RNA, 19 nt, Artificial Sequence
  Description of Artificial Sequence: Synthetic oligonucleotide
  modified_base (2)..(2): a, c, u, g, unknown or other
cncuagccaguauggugcg

SEQ ID NO: 1545851 - RNA, 19 nt, Artificial Sequence
  Description of Artificial Sequence: Synthetic oligonucleotide
auuaccgaacacucucuuu

SEQ ID NO: 1545852 - RNA, 19 nt, Artificial Sequence
  Description of Artificial Sequence: Synthetic oligonucleotide
aacaagaaacaaagauaau

SEQ ID NO: 1545853 - RNA, 19 nt, Artificial Sequence
  Description of Artificial Sequence: Synthetic oligonucleotide
uauaucccacgcacaugcu

SEQ ID NO: 1545854 - RNA, 19 nt, Artificial Sequence
  Description of Artificial Sequence: Synthetic oligonucleotide
cagacugcauuaccgaaca

SEQ ID NO: 1545855 - RNA, 19 nt, Artificial Sequence
  Description of Artificial Sequence: Synthetic oligonucleotide
aagcagugcccgagguugc

SEQ ID NO: 1545856 - RNA, 19 nt, Artificial Sequence
  Description of Artificial Sequence: Synthetic oligonucleotide
ugcaugaccggagaacaau

SEQ ID NO: 1545857 - RNA, 19 nt, Artificial Sequence
  Description of Artificial Sequence: Synthetic oligonucleotide
acuaaguauagcagcacuu

SEQ ID NO: 1545858 - RNA, 19 nt, Artificial Sequence
  Description of Artificial Sequence: Synthetic oligonucleotide
gacauauaucccacgcaca

SEQ ID NO: 1545859 - RNA, 19 nt, Artificial Sequence
  Description of Artificial Sequence: Synthetic oligonucleotide
guaaagcgugagaacauuc

SEQ ID NO: 1545860 - RNA, 19 nt, Artificial Sequence
  Description of Artificial Sequence: Synthetic oligonucleotide
acacggcgcaaagcuaugc

SEQ ID NO: 1545861 - RNA, 19 nt, Artificial Sequence
  Description of Artificial Sequence: Synthetic oligonucleotide
cuuuacuuguaaacaguua

SEQ ID NO: 1545862 - RNA, 19 nt, Artificial Sequence
  Description of Artificial Sequence: Synthetic oligonucleotide
guuaccauaccauccacuu

SEQ ID NO: 1545863 - RNA, 19 nt, Artificial Sequence
  Description of Artificial Sequence: Synthetic oligonucleotide
cugacauauaucccacgca

SEQ ID NO: 1545864 - RNA, 19 nt, Artificial Sequence
  Description of Artificial Sequence: Synthetic oligonucleotide
gauccuagcccgucaggga

SEQ ID NO: 1545865 - RNA, 19 nt, Artificial Sequence
  Description of Artificial Sequence: Synthetic oligonucleotide
accauccacuuaaacugac

SEQ ID NO: 1545866 - RNA, 19 nt, Artificial Sequence
  Description of Artificial Sequence: Synthetic oligonucleotide
auauuacugauuaccguua

SEQ ID NO: 1545867 - RNA, 19 nt, Artificial Sequence
  Description of Artificial Sequence: Synthetic oligonucleotide
aguuaccauaccauccacu

SEQ ID NO: 1545868 - RNA, 19 nt, Artificial Sequence
  Description of Artificial Sequence: Synthetic oligonucleotide
cauauaucccacgcacaug

SEQ ID NO: 1545869 - RNA, 19 nt, Artificial Sequence
  Description of Artificial Sequence: Synthetic oligonucleotide
caguauggugcgcacaaga

SEQ ID NO: 1545870 - RNA, 19 nt, Artificial Sequence
  Description of Artificial Sequence: Synthetic oligonucleotide
accuucgauugcaacugac

SEQ ID NO: 1545871 - RNA, 19 nt, Artificial Sequence
  Description of Artificial Sequence: Synthetic oligonucleotide
  modified_base (5)..(5): a, c, u, g, unknown or other
auucncuagccaguauggu

SEQ ID NO: 1545872 - RNA, 19 nt, Artificial Sequence
  Description of Artificial Sequence: Synthetic oligonucleotide
cguuauuaaaugaacugca

SEQ ID NO: 1545873 - RNA, 19 nt, Artificial Sequence
  Description of Artificial Sequence: Synthetic oligonucleotide
ccacucacccaucaaagac

SEQ ID NO: 1545874 - RNA, 19 nt, Artificial Sequence
  Description of Artificial Sequence: Synthetic oligonucleotide
aguauggugcgcacaagau

SEQ ID NO: 1545875 - RNA, 19 nt, Artificial Sequence
  Description of Artificial Sequence: Synthetic oligonucleotide
agacaccuugugucaacca

SEQ ID NO: 1545876 - RNA, 19 nt, Artificial Sequence
  Description of Artificial Sequence: Synthetic oligonucleotide
ugaggagauccuagcccgu

SEQ ID NO: 1545877 - RNA, 19 nt, Artificial Sequence
  Description of Artificial Sequence: Synthetic oligonucleotide
cagacaccuugugucaacc

SEQ ID NO: 1545878 - RNA, 19 nt, Artificial Sequence
  Description of Artificial Sequence: Synthetic oligonucleotide
acggcgcaaagcuaugcaa

SEQ ID NO: 1545879 - RNA, 19 nt, Artificial Sequence
  Description of Artificial Sequence: Synthetic oligonucleotide
gaaggucaagucauuuaaa

SEQ ID NO: 1545880 - RNA, 19 nt, Artificial Sequence
  Description of Artificial Sequence: Synthetic oligonucleotide
ggagauccuagcccgucag

SEQ ID NO: 1545881 - RNA, 19 nt, Artificial Sequence
  Description of Artificial Sequence: Synthetic oligonucleotide
gaacaucugcaugaccgga

SEQ ID NO: 1545882 - RNA, 19 nt, Artificial Sequence
  Description of Artificial Sequence: Synthetic oligonucleotide
caugaucgacaaccacagc

SEQ ID NO: 1545883 - RNA, 19 nt, Artificial Sequence
  Description of Artificial Sequence: Synthetic oligonucleotide
acaugcucccacucaccca

SEQ ID NO: 1545884 - RNA, 19 nt, Artificial Sequence
  Description of Artificial Sequence: Synthetic oligonucleotide
ugcccuguaugagggauaa

SEQ ID NO: 1545885 - RNA, 19 nt, Artificial Sequence
  Description of Artificial Sequence: Synthetic oligonucleotide
gggagucuugaaaugugag

SEQ ID NO: 1545886 - RNA, 19 nt, Artificial Sequence
  Description of Artificial Sequence: Synthetic oligonucleotide
cuagccaguauggugcgca

SEQ ID NO: 1545887 - RNA, 19 nt, Artificial Sequence
  Description of Artificial Sequence: Synthetic oligonucleotide
cccgucagggaaaagccag

SEQ ID NO: 1545888 - RNA, 19 nt, Artificial Sequence
  Description of Artificial Sequence: Synthetic oligonucleotide
uacaguacacacggcgcaa

SEQ ID NO: 1545889 - RNA, 19 nt, Artificial Sequence
  Description of Artificial Sequence: Synthetic oligonucleotide
cacaggaauuccaccagaa

SEQ ID NO: 1545890 - RNA, 19 nt, Artificial Sequence
  Description of Artificial Sequence: Synthetic oligonucleotide
  modified_base (9)..(9): a, c, u, g, unknown or other
gaacauucncuagccagua

SEQ ID NO: 1545891 - RNA, 19 nt, Artificial Sequence
  Description of Artificial Sequence: Synthetic oligonucleotide
cucacccaucaaagacucg

SEQ ID NO: 1545892 - RNA, 19 nt, Artificial Sequence
  Description of Artificial Sequence: Synthetic oligonucleotide
agggagucuugaaauguga

SEQ ID NO: 1545893 - RNA, 19 nt, Artificial Sequence
  Description of Artificial Sequence: Synthetic oligonucleotide
cacuuaaacugacaccaua

SEQ ID NO: 1545894 - RNA, 19 nt, Artificial Sequence
  Description of Artificial Sequence: Synthetic oligonucleotide
ggcugacauauaucccacg

SEQ ID NO: 1545895 - RNA, 19 nt, Artificial Sequence
  Description of Artificial Sequence: Synthetic oligonucleotide
cucagguuuugaaaugccu

SEQ ID NO: 1545896 - RNA, 19 nt, Artificial Sequence
  Description of Artificial Sequence: Synthetic oligonucleotide
cagcacuuugugucccaag

SEQ ID NO: 1545897 - RNA, 19 nt, Artificial Sequence
  Description of Artificial Sequence: Synthetic oligonucleotide
uccuagcccgucagggaaa

SEQ ID NO: 1545898 - RNA, 19 nt, Artificial Sequence
  Description of Artificial Sequence: Synthetic oligonucleotide
cacuaaguauagcagcacu

SEQ ID NO: 1545899 - RNA, 19 nt, Artificial Sequence
  Description of Artificial Sequence: Synthetic oligonucleotide
accaagcacgccaucuuca

SEQ ID NO: 1545900 - RNA, 19 nt, Artificial Sequence
  Description of Artificial Sequence: Synthetic oligonucleotide
cacucacccaucaaagacu

SEQ ID NO: 1545901 - RNA, 19 nt, Artificial Sequence
  Description of Artificial Sequence: Synthetic oligonucleotide
gugcccgagguugcaauag

SEQ ID NO: 1545902 - RNA, 19 nt, Artificial Sequence
  Description of Artificial Sequence: Synthetic oligonucleotide
gcuaugcaauauuuaagcu

SEQ ID NO: 1545903 - RNA, 19 nt, Artificial Sequence
  Description of Artificial Sequence: Synthetic oligonucleotide
cuuugucauagguuacacu

SEQ ID NO: 1545904 - RNA, 19 nt, Artificial Sequence
  Description of Artificial Sequence: Synthetic oligonucleotide
auuccauuauacacacauu

SEQ ID NO: 1545905 - RNA, 19 nt, Artificial Sequence
  Description of Artificial Sequence: Synthetic oligonucleotide
cccuguaugagggauaaga

SEQ ID NO: 1545906 - RNA, 19 nt, Artificial Sequence
  Description of Artificial Sequence: Synthetic oligonucleotide
caacaguuuaaguuaccau

SEQ ID NO: 1545907 - RNA, 19 nt, Artificial Sequence
  Description of Artificial Sequence: Synthetic oligonucleotide
ucaguucacugggcucucc

SEQ ID NO: 1545908 - RNA, 19 nt, Artificial Sequence
  Description of Artificial Sequence: Synthetic oligonucleotide
caacucucccuggauguuc

SEQ ID NO: 1545909 - RNA, 19 nt, Artificial Sequence
  Description of Artificial Sequence: Synthetic oligonucleotide
  modified_base (15)..(15): a, c, u, g, unknown or other
gcgugagaacauucncuag

SEQ ID NO: 1545910 - RNA, 19 nt, Artificial Sequence
  Description of Artificial Sequence: Synthetic oligonucleotide
agcgccugagucauuuccu

SEQ ID NO: 1545911 - RNA, 19 nt, Artificial Sequence
  Description of Artificial Sequence: Synthetic oligonucleotide
cuuaaacugacaccauauu

SEQ ID NO: 1545912 - RNA, 19 nt, Artificial Sequence
  Description of Artificial Sequence: Synthetic oligonucleotide
agugcccgagguugcaaua

SEQ ID NO: 1545913 - RNA, 19 nt, Artificial Sequence
  Description of Artificial Sequence: Synthetic oligonucleotide
gaggagauccuagcccguc

SEQ ID NO: 1545914 - RNA, 19 nt, Artificial Sequence
  Description of Artificial Sequence: Synthetic oligonucleotide
ggcggcaaacuccaccuuc

SEQ ID NO: 1545915 - RNA, 19 nt, Artificial Sequence
  Description of Artificial Sequence: Synthetic oligonucleotide
cuaaguauagcagcacuuu

SEQ ID NO: 1545916 - RNA, 19 nt, Artificial Sequence
  Description of Artificial Sequence: Synthetic oligonucleotide
gcaacugacuguccugcca

SEQ ID NO: 1545917 - RNA, 19 nt, Artificial Sequence
  Description of Artificial Sequence: Synthetic oligonucleotide
cacggcgcaaagcuaugca

SEQ ID NO: 1545918 - RNA, 19 nt, Artificial Sequence
  Description of Artificial Sequence: Synthetic oligonucleotide
cucgagugucaaccagcac

SEQ ID NO: 1545919 - RNA, 19 nt, Artificial Sequence
  Description of Artificial Sequence: Synthetic oligonucleotide
gcucucuguaguauggcuc

SEQ ID NO: 1545920 - RNA, 19 nt, Artificial Sequence
  Description of Artificial Sequence: Synthetic oligonucleotide
uggugcgcacaagaugcuc

SEQ ID NO: 1545921 - RNA, 19 nt, Artificial Sequence
  Description of Artificial Sequence: Synthetic oligonucleotide
gccuggagucaguucacug

SEQ ID NO: 1545922 - RNA, 19 nt, Artificial Sequence
  Description of Artificial Sequence: Synthetic oligonucleotide
ccaagcacgccaucuucac

SEQ ID NO: 1545923 - RNA, 19 nt, Artificial Sequence
  Description of Artificial Sequence: Synthetic oligonucleotide
agccugcccaacucucccu

SEQ ID NO: 1545924 - RNA, 19 nt, Artificial Sequence
  Description of Artificial Sequence: Synthetic oligonucleotide
acaguacacacggcgcaaa

SEQ ID NO: 1545925 - RNA, 19 nt, Artificial Sequence
  Description of Artificial Sequence: Synthetic oligonucleotide
accauaguucauaccuuuu

SEQ ID NO: 1545926 - RNA, 19 nt, Artificial Sequence
  Description of Artificial Sequence: Synthetic oligonucleotide
ggcgcaaagcuaugcaaua

SEQ ID NO: 1545927 - RNA, 19 nt, Artificial Sequence
  Description of Artificial Sequence: Synthetic oligonucleotide
gcacuaaguauagcagcac

SEQ ID NO: 1545928 - RNA, 19 nt, Artificial Sequence
  Description of Artificial Sequence: Synthetic oligonucleotide
agccaguauggugcgcaca

SEQ ID NO: 1545929 - RNA, 19 nt, Artificial Sequence
  Description of Artificial Sequence: Synthetic oligonucleotide
gcgcacaagaugcucucca

SEQ ID NO: 1545930 - RNA, 19 nt, Artificial Sequence
  Description of Artificial Sequence: Synthetic oligonucleotide
ccaaagcucagguuuugaa

SEQ ID NO: 1545931 - RNA, 19 nt, Artificial Sequence
  Description of Artificial Sequence: Synthetic oligonucleotide
ggagggagucuugaaaugu

SEQ ID NO: 1545932 - RNA, 19 nt, Artificial Sequence
  Description of Artificial Sequence: Synthetic oligonucleotide
cacaucgcagccugcccaa

SEQ ID NO: 1545933 - RNA, 19 nt, Artificial Sequence
  Description of Artificial Sequence: Synthetic oligonucleotide
ccgucagggaaaagccagc

SEQ ID NO: 1545934 - RNA, 19 nt, Artificial Sequence
  Description of Artificial Sequence: Synthetic oligonucleotide
ccauauuacugauuaccgu

SEQ ID NO: 1545935 - RNA, 19 nt, Artificial Sequence
  Description of Artificial Sequence: Synthetic oligonucleotide
ccauccacuuaaacugaca

SEQ ID NO: 1545936 - RNA, 19 nt, Artificial Sequence
  Description of Artificial Sequence: Synthetic oligonucleotide
auggugcgcacaagaugcu

SEQ ID NO: 1545937 - RNA, 19 nt, Artificial Sequence
  Description of Artificial Sequence: Synthetic oligonucleotide
cauuaccgaacacucucuu

SEQ ID NO: 1545938 - RNA, 19 nt, Artificial Sequence
  Description of Artificial Sequence: Synthetic oligonucleotide
gcagccugcccaacucucc

SEQ ID NO: 1545939 - RNA, 19 nt, Artificial Sequence
  Description of Artificial Sequence: Synthetic oligonucleotide
caaagcgccugagucauuu

SEQ ID NO: 1545940 - RNA, 19 nt, Artificial Sequence
  Description of Artificial Sequence: Synthetic oligonucleotide
cacgcacaugcucucugua

SEQ ID NO: 1545941 - RNA, 19 nt, Artificial Sequence
  Description of Artificial Sequence: Synthetic oligonucleotide
cgaacacucucuuuacaaa

SEQ ID NO: 1545942 - RNA, 19 nt, Artificial Sequence
  Description of Artificial Sequence: Synthetic oligonucleotide
cuagcccgucagggaaaag

SEQ ID NO: 1545943 - RNA, 19 nt, Artificial Sequence
  Description of Artificial Sequence: Synthetic oligonucleotide
cccacucacccaucaaaga

SEQ ID NO: 1545944 - RNA, 19 nt, Artificial Sequence
  Description of Artificial Sequence: Synthetic oligonucleotide
ccacaucgcagccugccca

SEQ ID NO: 1545945 - RNA, 19 nt, Artificial Sequence
  Description of Artificial Sequence: Synthetic oligonucleotide
caagcacgccaucuucacu

SEQ ID NO: 1545946 - RNA, 19 nt, Artificial Sequence
  Description of Artificial Sequence: Synthetic oligonucleotide
cccgagguugcaauaggaa

SEQ ID NO: 1545947 - RNA, 19 nt, Artificial Sequence
  Description of Artificial Sequence: Synthetic oligonucleotide
gagugucaaccagcacuaa

SEQ ID NO: 1545948 - RNA, 19 nt, Artificial Sequence
  Description of Artificial Sequence: Synthetic oligonucleotide
cccacgcacaugcucucug

SEQ ID NO: 1545949 - RNA, 19 nt, Artificial Sequence
  Description of Artificial Sequence: Synthetic oligonucleotide
aggcggcaaacuccaccuu

SEQ ID NO: 1545950 - RNA, 19 nt, Artificial Sequence
  Description of Artificial Sequence: Synthetic oligonucleotide
ccgagguugcaauaggaau

SEQ ID NO: 1545951 - RNA, 19 nt, Artificial Sequence
  Description of Artificial Sequence: Synthetic oligonucleotide
gaaaugccucucagacacu

SEQ ID NO: 1545952 - RNA, 19 nt, Artificial Sequence
  Description of Artificial Sequence: Synthetic oligonucleotide
ggcaaacuccaccuucgau

SEQ ID NO: 1545953 - RNA, 19 nt, Artificial Sequence
  Description of Artificial Sequence: Synthetic oligonucleotide
caucgcagccugcccaacu

SEQ ID NO: 1545954 - RNA, 19 nt, Artificial Sequence
  Description of Artificial Sequence: Synthetic oligonucleotide
cgauugcaacugacugucc

SEQ ID NO: 1545955 - RNA, 19 nt, Artificial Sequence
  Description of Artificial Sequence: Synthetic oligonucleotide
augcccuguaugagggaua

SEQ ID NO: 1545956 - RNA, 19 nt, Artificial Sequence
  Description of Artificial Sequence: Synthetic oligonucleotide
guauggcuccacaggaauu

SEQ ID NO: 1545957 - RNA, 19 nt, Artificial Sequence
  Description of Artificial Sequence: Synthetic oligonucleotide
gcauuaccgaacacucucu

SEQ ID NO: 1545958 - RNA, 19 nt, Artificial Sequence
  Description of Artificial Sequence: Synthetic oligonucleotide
gcccgagguugcaauagga

SEQ ID NO: 1545959 - RNA, 19 nt, Artificial Sequence
  Description of Artificial Sequence: Synthetic oligonucleotide
ccucucagacacuuucuau

SEQ ID NO: 1545960 - RNA, 19 nt, Artificial Sequence
  Description of Artificial Sequence: Synthetic oligonucleotide
gcgcaaagcuaugcaauau

SEQ ID NO: 1545961 - RNA, 19 nt, Artificial Sequence
  Description of Artificial Sequence: Synthetic oligonucleotide
gcccuguaugagggauaag

SEQ ID NO: 1545962 - RNA, 19 nt, Artificial Sequence
  Description of Artificial Sequence: Synthetic oligonucleotide
cgcaaagcuaugcaauauu

SEQ ID NO: 1545963 - RNA, 19 nt, Artificial Sequence
  Description of Artificial Sequence: Synthetic oligonucleotide
ccacuuaaacugacaccau

SEQ ID NO: 1545964 - RNA, 19 nt, Artificial Sequence
  Description of Artificial Sequence: Synthetic oligonucleotide
gcgccugagucauuuccuu

SEQ ID NO: 1545965 - RNA, 19 nt, Artificial Sequence
  Description of Artificial Sequence: Synthetic oligonucleotide
ccuagcccgucagggaaaa

SEQ ID NO: 1545966 - RNA, 19 nt, Artificial Sequence
  Description of Artificial Sequence: Synthetic oligonucleotide
cggcgcaaagcuaugcaau

SEQ ID NO: 1545967 - RNA, 19 nt, Artificial Sequence
  Description of Artificial Sequence: Synthetic oligonucleotide
ccaagcagugcccgagguu

SEQ ID NO: 1545968 - RNA, 19 nt, Artificial Sequence
  Description of Artificial Sequence: Synthetic oligonucleotide
ccaacucucccuggauguu

SEQ ID NO: 1545969 - RNA, 19 nt, Artificial Sequence
  Description of Artificial Sequence: Synthetic oligonucleotide
  modified_base (1)..(1): a, c, u, g, unknown or other
ncuagccaguauggugcgc

SEQ ID NO: 1545970 - RNA, 19 nt, Artificial Sequence
  Description of Artificial Sequence: Synthetic oligonucleotide
aauuuuccuauauacaucc

SEQ ID NO: 1545971 - RNA, 19 nt, Artificial Sequence
  Description of Artificial Sequence: Synthetic oligonucleotide
aauccuaugauauaugacg

SEQ ID NO: 1545972 - RNA, 19 nt, Artificial Sequence
  Description of Artificial Sequence: Synthetic oligonucleotide
aacagaauaaccuuuacag

SEQ ID NO: 1545973 - RNA, 19 nt, Artificial Sequence
  Description of Artificial Sequence: Synthetic oligonucleotide
aaacauaaggggcugaggc

SEQ ID NO: 1545974 - RNA, 19 nt, Artificial Sequence
  Description of Artificial Sequence: Synthetic oligonucleotide
uggaauaauaguaugacag

SEQ ID NO: 1545975 - RNA, 19 nt, Artificial Sequence
  Description of Artificial Sequence: Synthetic oligonucleotide
uuaaacuccacaaauaggu

SEQ ID NO: 1545976 - RNA, 19 nt, Artificial Sequence
  Description of Artificial Sequence: Synthetic oligonucleotide
ugaaucugagacuacaggg

SEQ ID NO: 1545977 - RNA, 19 nt, Artificial Sequence
  Description of Artificial Sequence: Synthetic oligonucleotide
aauagguaaggccuuuaac

SEQ ID NO: 1545978 - RNA, 19 nt, Artificial Sequence
  Description of Artificial Sequence: Synthetic oligonucleotide
uaaagaauuuccaacucag

SEQ ID NO: 1545979 - RNA, 19 nt, Artificial Sequence
  Description of Artificial Sequence: Synthetic oligonucleotide
cuauauacauccaaagacc

SEQ ID NO: 1545980 - RNA, 19 nt, Artificial Sequence
  Description of Artificial Sequence: Synthetic oligonucleotide
ugcaauucuucccaggacg

SEQ ID NO: 1545981 - RNA, 19 nt, Artificial Sequence
  Description of Artificial Sequence: Synthetic oligonucleotide
uauagaauucaccagcugu

SEQ ID NO: 1545982 - RNA, 19 nt, Artificial Sequence
  Description of Artificial Sequence: Synthetic oligonucleotide
aaaauccuaugauauauga

SEQ ID NO: 1545983 - RNA, 19 nt, Artificial Sequence
  Description of Artificial Sequence: Synthetic oligonucleotide
acaguagggaaacauaagg

SEQ ID NO: 1545984 - RNA, 19 nt, Artificial Sequence
  Description of Artificial Sequence: Synthetic oligonucleotide
acacuuauaaagaauuucc

SEQ ID NO: 1545985 - RNA, 19 nt, Artificial Sequence
  Description of Artificial Sequence: Synthetic oligonucleotide
uauaugacgagucacacuu

SEQ ID NO: 1545986 - RNA, 19 nt, Artificial Sequence
  Description of Artificial Sequence: Synthetic oligonucleotide
uuggcuauagaauucacca

SEQ ID NO: 1545987 - RNA, 19 nt, Artificial Sequence
  Description of Artificial Sequence: Synthetic oligonucleotide
aaaaugccccguaaaaucc

SEQ ID NO: 1545988 - RNA, 19 nt, Artificial Sequence
  Description of Artificial Sequence: Synthetic oligonucleotide
agcuccaugaaugagauuc

SEQ ID NO: 1545989 - RNA, 19 nt, Artificial Sequence
  Description of Artificial Sequence: Synthetic oligonucleotide
uuuacagcuaaauuuuccc

SEQ ID NO: 1545990 - RNA, 19 nt, Artificial Sequence
  Description of Artificial Sequence: Synthetic oligonucleotide
ugacccuuuacaaugaaca

SEQ ID NO: 1545991 - RNA, 19 nt, Artificial Sequence
  Description of Artificial Sequence: Synthetic oligonucleotide
ugaugaaauguacgaaugg

SEQ ID NO: 1545992 - RNA, 19 nt, Artificial Sequence
  Description of Artificial Sequence: Synthetic oligonucleotide
aaugagauuccuaggcucc

SEQ ID NO: 1545993 - RNA, 19 nt, Artificial Sequence
  Description of Artificial Sequence: Synthetic oligonucleotide
aauccuaucaccaucuuca

SEQ ID NO: 1545994 - RNA, 19 nt, Artificial Sequence
  Description of Artificial Sequence: Synthetic oligonucleotide
uuuaacaacugccacugca

SEQ ID NO: 1545995 - RNA, 19 nt, Artificial Sequence
  Description of Artificial Sequence: Synthetic oligonucleotide
auuacuguggaauaauagu

SEQ ID NO: 1545996 - RNA, 19 nt, Artificial Sequence
  Description of Artificial Sequence: Synthetic oligonucleotide
uuuguuccaacauacgucu

SEQ ID NO: 1545997 - RNA, 19 nt, Artificial Sequence
  Description of Artificial Sequence: Synthetic oligonucleotide
acgagucacacuuauaaag

SEQ ID NO: 1545998 - RNA, 19 nt, Artificial Sequence
  Description of Artificial Sequence: Synthetic oligonucleotide
ucugcaguggcucuauuag

SEQ ID NO: 1545999 - RNA, 19 nt, Artificial Sequence
  Description of Artificial Sequence: Synthetic oligonucleotide
uccacaaauagguaaggcc

SEQ ID NO: 1546000 - RNA, 19 nt, Artificial Sequence
  Description of Artificial Sequence: Synthetic oligonucleotide
uguacaaauugaaauccug

SEQ ID NO: 1546001 - RNA, 19 nt, Artificial Sequence
  Description of Artificial Sequence: Synthetic oligonucleotide
ugagugaugaaauguacga

SEQ ID NO: 1546002 - RNA, 19 nt, Artificial Sequence
  Description of Artificial Sequence: Synthetic oligonucleotide
aucagaguggaucccauac

SEQ ID NO: 1546003 - RNA, 19 nt, Artificial Sequence
  Description of Artificial Sequence: Synthetic oligonucleotide
uguuccguuccccaggagg

SEQ ID NO: 1546004 - RNA, 19 nt, Artificial Sequence
  Description of Artificial Sequence: Synthetic oligonucleotide
uaugauauaugacgaguca

SEQ ID NO: 1546005 - RNA, 19 nt, Artificial Sequence
  Description of Artificial Sequence: Synthetic oligonucleotide
aaauguacgaauggcuccg

SEQ ID NO: 1546006 - RNA, 19 nt, Artificial Sequence
  Description of Artificial Sequence: Synthetic oligonucleotide
uuacaagcauguuggaggg

SEQ ID NO: 1546007 - RNA, 19 nt, Artificial Sequence
  Description of Artificial Sequence: Synthetic oligonucleotide
ugauauaugacgagucaca

SEQ ID NO: 1546008 - RNA, 19 nt, Artificial Sequence
  Description of Artificial Sequence: Synthetic oligonucleotide
auaguaugacagcauugcc

SEQ ID NO: 1546009 - RNA, 19 nt, Artificial Sequence
  Description of Artificial Sequence: Synthetic oligonucleotide
uguaauccuaucaccaucu

SEQ ID NO: 1546010 - RNA, 19 nt, Artificial Sequence
  Description of Artificial Sequence: Synthetic oligonucleotide
ugacgagucacacuuauaa

SEQ ID NO: 1546011 - RNA, 19 nt, Artificial Sequence
  Description of Artificial Sequence: Synthetic oligonucleotide
aaauccuaugauauaugac

SEQ ID NO: 1546012 - RNA, 19 nt, Artificial Sequence
  Description of Artificial Sequence: Synthetic oligonucleotide
ucgaguauucaccuucagg

SEQ ID NO: 1546013 - RNA, 19 nt, Artificial Sequence
  Description of Artificial Sequence: Synthetic oligonucleotide
ucauugaacugcacgauga

SEQ ID NO: 1546014 - RNA, 19 nt, Artificial Sequence
  Description of Artificial Sequence: Synthetic oligonucleotide
gaaauguacgaauggcucc

SEQ ID NO: 1546015 - RNA, 19 nt, Artificial Sequence
  Description of Artificial Sequence: Synthetic oligonucleotide
augcuuuguagacugugcc

SEQ ID NO: 1546016 - RNA, 19 nt, Artificial Sequence
  Description of Artificial Sequence: Synthetic oligonucleotide
cuaaauuuucccacuuggg

SEQ ID NO: 1546017 - RNA, 19 nt, Artificial Sequence
  Description of Artificial Sequence: Synthetic oligonucleotide
auauucaacgcugucgucg

SEQ ID NO: 1546018 - RNA, 19 nt, Artificial Sequence
  Description of Artificial Sequence: Synthetic oligonucleotide
uaacagaauaaccuuuaca

SEQ ID NO: 1546019 - RNA, 19 nt, Artificial Sequence
  Description of Artificial Sequence: Synthetic oligonucleotide
auaaagaauuuccaacuca

SEQ ID NO: 1546020 - RNA, 19 nt, Artificial Sequence
  Description of Artificial Sequence: Synthetic oligonucleotide
uccuauauacauccaaaga

SEQ ID NO: 1546021 - RNA, 19 nt, Artificial Sequence
  Description of Artificial Sequence: Synthetic oligonucleotide
gaugaaauguacgaauggc

SEQ ID NO: 1546022 - RNA, 19 nt, Artificial Sequence
  Description of Artificial Sequence: Synthetic oligonucleotide
aaucugagacuacagggcu

SEQ ID NO: 1546023 - RNA, 19 nt, Artificial Sequence
  Description of Artificial Sequence: Synthetic oligonucleotide
uaauaguaugacagcauug

SEQ ID NO: 1546024 - RNA, 19 nt, Artificial Sequence
  Description of Artificial Sequence: Synthetic oligonucleotide
uuacuguggaauaauagua

SEQ ID NO: 1546025 - RNA, 19 nt, Artificial Sequence
  Description of Artificial Sequence: Synthetic oligonucleotide
uggugaauccucaucaaca

SEQ ID NO: 1546026 - RNA, 19 nt, Artificial Sequence
  Description of Artificial Sequence: Synthetic oligonucleotide
guuuccaucauugaacugc

SEQ ID NO: 1546027 - RNA, 19 nt, Artificial Sequence
  Description of Artificial Sequence: Synthetic oligonucleotide
uccgagaacucuccaagcg

SEQ ID NO: 1546028 - RNA, 19 nt, Artificial Sequence
  Description of Artificial Sequence: Synthetic oligonucleotide
uuccuauauacauccaaag

SEQ ID NO: 1546029 - RNA, 19 nt, Artificial Sequence
  Description of Artificial Sequence: Synthetic oligonucleotide
ugugcuaacgccgaaguca

SEQ ID NO: 1546030 - RNA, 19 nt, Artificial Sequence
  Description of Artificial Sequence: Synthetic oligonucleotide
ugaggauauggaaaccucc

SEQ ID NO: 1546031 - RNA, 19 nt, Artificial Sequence
  Description of Artificial Sequence: Synthetic oligonucleotide
cauuacuguggaauaauag

SEQ ID NO: 1546032 - RNA, 19 nt, Artificial Sequence
  Description of Artificial Sequence: Synthetic oligonucleotide
uaguaugacagcauugccu

SEQ ID NO: 1546033 - RNA, 19 nt, Artificial Sequence
  Description of Artificial Sequence: Synthetic oligonucleotide
uaaaauccuaugauauaug

SEQ ID NO: 1546034 - RNA, 19 nt, Artificial Sequence
  Description of Artificial Sequence: Synthetic oligonucleotide
auuuguuccaacauacguc

SEQ ID NO: 1546035 - RNA, 19 nt, Artificial Sequence
  Description of Artificial Sequence: Synthetic oligonucleotide
cugagugaugaaauguacg

SEQ ID NO: 1546036 - RNA, 19 nt, Artificial Sequence
  Description of Artificial Sequence: Synthetic oligonucleotide
uccguugccaugaccaagg

SEQ ID NO: 1546037 - RNA, 19 nt, Artificial Sequence
  Description of Artificial Sequence: Synthetic oligonucleotide
acacuuuuacucucucacc

SEQ ID NO: 1546038 - RNA, 19 nt, Artificial Sequence
  Description of Artificial Sequence: Synthetic oligonucleotide
uguggaauaauaguaugac

SEQ ID NO: 1546039 - RNA, 19 nt, Artificial Sequence
  Description of Artificial Sequence: Synthetic oligonucleotide
augauauaugacgagucac

SEQ ID NO: 1546040 - RNA, 19 nt, Artificial Sequence
  Description of Artificial Sequence: Synthetic oligonucleotide
ucaacaaugcacugcagaa

SEQ ID NO: 1546041 - RNA, 19 nt, Artificial Sequence
  Description of Artificial Sequence: Synthetic oligonucleotide
gcugagaugguccagcucg

SEQ ID NO: 1546042 - RNA, 19 nt, Artificial Sequence
  Description of Artificial Sequence: Synthetic oligonucleotide
uuuacucucucaccagugc

SEQ ID NO: 1546043 - RNA, 19 nt, Artificial Sequence
  Description of Artificial Sequence: Synthetic oligonucleotide
ugaaugagauuccuaggcu

SEQ ID NO: 1546044 - RNA, 19 nt, Artificial Sequence
  Description of Artificial Sequence: Synthetic oligonucleotide
uacagcuaaauuuucccac

SEQ ID NO: 1546045 - RNA, 19 nt, Artificial Sequence
  Description of Artificial Sequence: Synthetic oligonucleotide
aguguaaugucuaacagaa

SEQ ID NO: 1546046 - RNA, 19 nt, Artificial Sequence
  Description of Artificial Sequence: Synthetic oligonucleotide
uccaacauacgucuuggcu

SEQ ID NO: 1546047 - RNA, 19 nt, Artificial Sequence
  Description of Artificial Sequence: Synthetic oligonucleotide
uacaaugaacaguagggaa

SEQ ID NO: 1546048 - RNA, 19 nt, Artificial Sequence
  Description of Artificial Sequence: Synthetic oligonucleotide
agcucgaguauucaccuuc

SEQ ID NO: 1546049 - RNA, 19 nt, Artificial Sequence
  Description of Artificial Sequence: Synthetic oligonucleotide
uggaaaccucccaagagca

SEQ ID NO: 1546050 - RNA, 19 nt, Artificial Sequence
  Description of Artificial Sequence: Synthetic oligonucleotide
aauugaaauccuguuuucu

SEQ ID NO: 1546051 - RNA, 19 nt, Artificial Sequence
  Description of Artificial Sequence: Synthetic oligonucleotide
uuaacaacugccacugcaa

SEQ ID NO: 1546052 - RNA, 19 nt, Artificial Sequence
  Description of Artificial Sequence: Synthetic oligonucleotide
ucgucguugcuucaggcag

SEQ ID NO: 1546053 - RNA, 19 nt, Artificial Sequence
  Description of Artificial Sequence: Synthetic oligonucleotide
acaugauaugcuuuguaga

SEQ ID NO: 1546054 - RNA, 19 nt, Artificial Sequence
  Description of Artificial Sequence: Synthetic oligonucleotide
cuaugauauaugacgaguc

SEQ ID NO: 1546055 - RNA, 19 nt, Artificial Sequence
  Description of Artificial Sequence: Synthetic oligonucleotide
uagucagugucccacugag

SEQ ID NO: 1546056 - RNA, 19 nt, Artificial Sequence
  Description of Artificial Sequence: Synthetic oligonucleotide
ucuaacagaauaaccuuua

SEQ ID NO: 1546057 - RNA, 19 nt, Artificial Sequence
  Description of Artificial Sequence: Synthetic oligonucleotide
uccagcucgaguauucacc

SEQ ID NO: 1546058 - RNA, 19 nt, Artificial Sequence
  Description of Artificial Sequence: Synthetic oligonucleotide
uauugcuuggaagugaauc

SEQ ID NO: 1546059 - RNA, 19 nt, Artificial Sequence
  Description of Artificial Sequence: Synthetic oligonucleotide
uauuagcuggccauuuuac

SEQ ID NO: 1546060 - RNA, 19 nt, Artificial Sequence
  Description of Artificial Sequence: Synthetic oligonucleotide
cuuguuguguccuugguga

SEQ ID NO: 1546061 - RNA, 19 nt, Artificial Sequence
  Description of Artificial Sequence: Synthetic oligonucleotide
gaaucugagacuacagggc

SEQ ID NO: 1546062 - RNA, 19 nt, Artificial Sequence
  Description of Artificial Sequence: Synthetic oligonucleotide
uuacagcuaaauuuuccca

SEQ ID NO: 1546063 - RNA, 19 nt, Artificial Sequence
  Description of Artificial Sequence: Synthetic oligonucleotide
acuguggaauaauaguaug

SEQ ID NO: 1546064 - RNA, 19 nt, Artificial Sequence
  Description of Artificial Sequence: Synthetic oligonucleotide
aucaacaaugcacugcaga

SEQ ID NO: 1546065 - RNA, 19 nt, Artificial Sequence
  Description of Artificial Sequence: Synthetic oligonucleotide
auaauaguaugacagcauu

SEQ ID NO: 1546066 - RNA, 19 nt, Artificial Sequence
  Description of Artificial Sequence: Synthetic oligonucleotide
gaaugagauuccuaggcuc

SEQ ID NO: 1546067 - RNA, 19 nt, Artificial Sequence
  Description of Artificial Sequence: Synthetic oligonucleotide
uggagaggcauuaaagauc

SEQ ID NO: 1546068 - RNA, 19 nt, Artificial Sequence
  Description of Artificial Sequence: Synthetic oligonucleotide
gauaccguaugucuuguuc

SEQ ID NO: 1546069 - RNA, 19 nt, Artificial Sequence
  Description of Artificial Sequence: Synthetic oligonucleotide
aguaugacagcauugccuu

SEQ ID NO: 1546070 - RNA, 19 nt, Artificial Sequence
  Description of Artificial Sequence: Synthetic oligonucleotide
augucuuguucauucaucu

SEQ ID NO: 1546071 - RNA, 19 nt, Artificial Sequence
  Description of Artificial Sequence: Synthetic oligonucleotide
agguaaggccuuuaacaac

SEQ ID NO: 1546072 - RNA, 19 nt, Artificial Sequence
  Description of Artificial Sequence: Synthetic oligonucleotide
aauaauaguaugacagcau

SEQ ID NO: 1546073 - RNA, 19 nt, Artificial Sequence
  Description of Artificial Sequence: Synthetic oligonucleotide
uagguaaggccuuuaacaa

SEQ ID NO: 1546074 - RNA, 19 nt, Artificial Sequence
  Description of Artificial Sequence: Synthetic oligonucleotide
ucacuguaauccuaucacc

SEQ ID NO: 1546075 - RNA, 19 nt, Artificial Sequence
  Description of Artificial Sequence: Synthetic oligonucleotide
agagcaagcuccaugaaug

SEQ ID NO: 1546076 - RNA, 19 nt, Artificial Sequence
  Description of Artificial Sequence: Synthetic oligonucleotide
aagcuuguuguguccuugg

SEQ ID NO: 1546077 - RNA, 19 nt, Artificial Sequence
  Description of Artificial Sequence: Synthetic oligonucleotide
uccgccuguguuuacaagc

SEQ ID NO: 1546078 - RNA, 19 nt, Artificial Sequence
  Description of Artificial Sequence: Synthetic oligonucleotide
uuuccaucauugaacugca

SEQ ID NO: 1546079 - RNA, 19 nt, Artificial Sequence
  Description of Artificial Sequence: Synthetic oligonucleotide
aucacauccagcacauccc

SEQ ID NO: 1546080 - RNA, 19 nt, Artificial Sequence
  Description of Artificial Sequence: Synthetic oligonucleotide
gacuggugaauccucauca

SEQ ID NO: 1546081 - RNA, 19 nt, Artificial Sequence
  Description of Artificial Sequence: Synthetic oligonucleotide
cgaguauucaccuucaggc

SEQ ID NO: 1546082 - RNA, 19 nt, Artificial Sequence
  Description of Artificial Sequence: Synthetic oligonucleotide
accagcugugugcuaacgc

SEQ ID NO: 1546083 - RNA, 19 nt, Artificial Sequence
  Description of Artificial Sequence: Synthetic oligonucleotide
gauauaugacgagucacac

SEQ ID NO: 1546084 - RNA, 19 nt, Artificial Sequence
  Description of Artificial Sequence: Synthetic oligonucleotide
ggcuauagaauucaccagc

SEQ ID NO: 1546085 - RNA, 19 nt, Artificial Sequence
  Description of Artificial Sequence: Synthetic oligonucleotide
auaccguaugucuuguuca

SEQ ID NO: 1546086 - RNA, 19 nt, Artificial Sequence
  Description of Artificial Sequence: Synthetic oligonucleotide
ugugugcuaacgccgaagu

SEQ ID NO: 1546087 - RNA, 19 nt, Artificial Sequence
  Description of Artificial Sequence: Synthetic oligonucleotide
ugcauacccacauggacac

SEQ ID NO: 1546088 - RNA, 19 nt, Artificial Sequence
  Description of Artificial Sequence: Synthetic oligonucleotide
acagagcuugaccuguccg

SEQ ID NO: 1546089 - RNA, 19 nt, Artificial Sequence
  Description of Artificial Sequence: Synthetic oligonucleotide
ggaauaauaguaugacagc

SEQ ID NO: 1546090 - RNA, 19 nt, Artificial Sequence
  Description of Artificial Sequence: Synthetic oligonucleotide
uacgucuuggcuauagaau

SEQ ID NO: 1546091 - RNA, 19 nt, Artificial Sequence
  Description of Artificial Sequence: Synthetic oligonucleotide
uaugacgagucacacuuau

SEQ ID NO: 1546092 - RNA, 19 nt, Artificial Sequence
  Description of Artificial Sequence: Synthetic oligonucleotide
ucccauacugcucuccuga

SEQ ID NO: 1546093 - RNA, 19 nt, Artificial Sequence
  Description of Artificial Sequence: Synthetic oligonucleotide
ugucuaacagaauaaccuu

SEQ ID NO: 1546094 - RNA, 19 nt, Artificial Sequence
  Description of Artificial Sequence: Synthetic oligonucleotide
uuagcuggccauuuuacuu

SEQ ID NO: 1546095 - RNA, 19 nt, Artificial Sequence
  Description of Artificial Sequence: Synthetic oligonucleotide
auugaaauccuguuuucua

SEQ ID NO: 1546096 - RNA, 19 nt, Artificial Sequence
  Description of Artificial Sequence: Synthetic oligonucleotide
uuacucucucaccagugcu

SEQ ID NO: 1546097 - RNA, 19 nt, Artificial Sequence
  Description of Artificial Sequence: Synthetic oligonucleotide
gaaacauaaggggcugagg

SEQ ID NO: 1546098 - RNA, 19 nt, Artificial Sequence
  Description of Artificial Sequence: Synthetic oligonucleotide
uggcuauagaauucaccag

SEQ ID NO: 1546099 - RNA, 19 nt, Artificial Sequence
  Description of Artificial Sequence: Synthetic oligonucleotide
agagcuugaccuguccgcc

SEQ ID NO: 1546100 - RNA, 19 nt, Artificial Sequence
  Description of Artificial Sequence: Synthetic oligonucleotide
ucucaguucagcugaggac

SEQ ID NO: 1546101 - RNA, 19 nt, Artificial Sequence
  Description of Artificial Sequence: Synthetic oligonucleotide
auagggucugacccuuuac

SEQ ID NO: 1546102 - RNA, 19 nt, Artificial Sequence
  Description of Artificial Sequence: Synthetic oligonucleotide
ugcucuggaauuuuccuau

SEQ ID NO: 1546103 - RNA, 19 nt, Artificial Sequence
  Description of Artificial Sequence: Synthetic oligonucleotide
aacugcacgaugaacgggu

SEQ ID NO: 1546104 - RNA, 19 nt, Artificial Sequence
  Description of Artificial Sequence: Synthetic oligonucleotide
ggagaggcauuaaagaucc

SEQ ID NO: 1546105 - RNA, 19 nt, Artificial Sequence
  Description of Artificial Sequence: Synthetic oligonucleotide
cacacuuauaaagaauuuc

SEQ ID NO: 1546106 - RNA, 19 nt, Artificial Sequence
  Description of Artificial Sequence: Synthetic oligonucleotide
auauaugacgagucacacu

SEQ ID NO: 1546107 - RNA, 19 nt, Artificial Sequence
  Description of Artificial Sequence: Synthetic oligonucleotide
gaggcauuaaagaucccug

SEQ ID NO: 1546108 - RNA, 19 nt, Artificial Sequence
  Description of Artificial Sequence: Synthetic oligonucleotide
auacgucuuggcuauagaa

SEQ ID NO: 1546109 - RNA, 19 nt, Artificial Sequence
  Description of Artificial Sequence: Synthetic oligonucleotide
uauucaacgcugucgucgu

SEQ ID NO: 1546110 - RNA, 19 nt, Artificial Sequence
  Description of Artificial Sequence: Synthetic oligonucleotide
agaugguccagcucgagua

SEQ ID NO: 1546111 - RNA, 19 nt, Artificial Sequence
  Description of Artificial Sequence: Synthetic oligonucleotide
gugaugaaauguacgaaug

SEQ ID NO: 1546112 - RNA, 19 nt, Artificial Sequence
  Description of Artificial Sequence: Synthetic oligonucleotide
guaucuuucucaguucagc

SEQ ID NO: 1546113 - RNA, 19 nt, Artificial Sequence
  Description of Artificial Sequence: Synthetic oligonucleotide
agcuaaauuuucccacuug

SEQ ID NO: 1546114 - RNA, 19 nt, Artificial Sequence
  Description of Artificial Sequence: Synthetic oligonucleotide
augaaauguacgaauggcu

SEQ ID NO: 1546115 - RNA, 19 nt, Artificial Sequence
  Description of Artificial Sequence: Synthetic oligonucleotide
gaacaguagggaaacauaa

SEQ ID NO: 1546116 - RNA, 19 nt, Artificial Sequence
  Description of Artificial Sequence: Synthetic oligonucleotide
cucgauaccguaugucuug

SEQ ID NO: 1546117 - RNA, 19 nt, Artificial Sequence
  Description of Artificial Sequence: Synthetic oligonucleotide
acgaauggcuccgagaacu

SEQ ID NO: 1546118 - RNA, 19 nt, Artificial Sequence
  Description of Artificial Sequence: Synthetic oligonucleotide
guacgaauggcuccgagaa

SEQ ID NO: 1546119 - RNA, 19 nt, Artificial Sequence
  Description of Artificial Sequence: Synthetic oligonucleotide
acgucuuggcuauagaauu

SEQ ID NO: 1546120 - RNA, 19 nt, Artificial Sequence
  Description of Artificial Sequence: Synthetic oligonucleotide
caagcuauugcuuggaagu

SEQ ID NO: 1546121 - RNA, 19 nt, Artificial Sequence
  Description of Artificial Sequence: Synthetic oligonucleotide
cacuguaauccuaucacca

SEQ ID NO: 1546122 - RNA, 19 nt, Artificial Sequence
  Description of Artificial Sequence: Synthetic oligonucleotide
uggccauuuuacuugcugu

SEQ ID NO: 1546123 - RNA, 19 nt, Artificial Sequence
  Description of Artificial Sequence: Synthetic oligonucleotide
cuaacagaauaaccuuuac

SEQ ID NO: 1546124 - RNA, 19 nt, Artificial Sequence
  Description of Artificial Sequence: Synthetic oligonucleotide
agaguggaucccauacugc

SEQ ID NO: 1546125 - RNA, 19 nt, Artificial Sequence
  Description of Artificial Sequence: Synthetic oligonucleotide
acaagcauguuggagggcu

SEQ ID NO: 1546126 - RNA, 19 nt, Artificial Sequence
  Description of Artificial Sequence: Synthetic oligonucleotide
gacuacagggcugguaugc

SEQ ID NO: 1546127 - RNA, 19 nt, Artificial Sequence
  Description of Artificial Sequence: Synthetic oligonucleotide
aguggcucuauuagcuggc

SEQ ID NO: 1546128 - RNA, 19 nt, Artificial Sequence
  Description of Artificial Sequence: Synthetic oligonucleotide
guaaaauccuaugauauau

SEQ ID NO: 1546129 - RNA, 19 nt, Artificial Sequence
  Description of Artificial Sequence: Synthetic oligonucleotide
aagcuauugcuuggaagug

SEQ ID NO: 1546130 - RNA, 19 nt, Artificial Sequence
  Description of Artificial Sequence: Synthetic oligonucleotide
uucaacgcugucgucguug

SEQ ID NO: 1546131 - RNA, 19 nt, Artificial Sequence
  Description of Artificial Sequence: Synthetic oligonucleotide
ugugccuccguugccauga

SEQ ID NO: 1546132 - RNA, 19 nt, Artificial Sequence
  Description of Artificial Sequence: Synthetic oligonucleotide
agggcugguaugcugagau

SEQ ID NO: 1546133 - RNA, 19 nt, Artificial Sequence
  Description of Artificial Sequence: Synthetic oligonucleotide
cagcugugugcuaacgccg

SEQ ID NO: 1546134 - RNA, 19 nt, Artificial Sequence
  Description of Artificial Sequence: Synthetic oligonucleotide
ugaacgggugacccaucag

SEQ ID NO: 1546135 - RNA, 19 nt, Artificial Sequence
  Description of Artificial Sequence: Synthetic oligonucleotide
gauuccuaggcuccacaca

SEQ ID NO: 1546136 - RNA, 19 nt, Artificial Sequence
  Description of Artificial Sequence: Synthetic oligonucleotide
ucaacgcugucgucguugc

SEQ ID NO: 1546137 - RNA, 19 nt, Artificial Sequence
  Description of Artificial Sequence: Synthetic oligonucleotide
uucugaagcuccaguguaa

SEQ ID NO: 1546138 - RNA, 19 nt, Artificial Sequence
  Description of Artificial Sequence: Synthetic oligonucleotide
cugaggauauggaaaccuc

SEQ ID NO: 1546139 - RNA, 19 nt, Artificial Sequence
  Description of Artificial Sequence: Synthetic oligonucleotide
ugucgucguugcuucaggc

SEQ ID NO: 1546140 - RNA, 19 nt, Artificial Sequence
  Description of Artificial Sequence: Synthetic oligonucleotide
cuggugaauccucaucaac

SEQ ID NO: 1546141 - RNA, 19 nt, Artificial Sequence
  Description of Artificial Sequence: Synthetic oligonucleotide
cacgaugaacgggugaccc

SEQ ID NO: 1546142 - RNA, 19 nt, Artificial Sequence
  Description of Artificial Sequence: Synthetic oligonucleotide
acauacgucuuggcuauag

SEQ ID NO: 1546143 - RNA, 19 nt, Artificial Sequence
  Description of Artificial Sequence: Synthetic oligonucleotide
gagacuacagggcugguau

SEQ ID NO: 1546144 - RNA, 19 nt, Artificial Sequence
  Description of Artificial Sequence: Synthetic oligonucleotide
acgggugacccaucaguuc

SEQ ID NO: 1546145 - RNA, 19 nt, Artificial Sequence
  Description of Artificial Sequence: Synthetic oligonucleotide
cugacccuuuacaaugaac

SEQ ID NO: 1546146 - RNA, 19 nt, Artificial Sequence
  Description of Artificial Sequence: Synthetic oligonucleotide
cauuuguuccaacauacgu

SEQ ID NO: 1546147 - RNA, 19 nt, Artificial Sequence
  Description of Artificial Sequence: Synthetic oligonucleotide
ugccccguaaaauccuaug

SEQ ID NO: 1546148 - RNA, 19 nt, Artificial Sequence
  Description of Artificial Sequence: Synthetic oligonucleotide
aaaugccccguaaaauccu

SEQ ID NO: 1546149 - RNA, 19 nt, Artificial Sequence
  Description of Artificial Sequence: Synthetic oligonucleotide
ugaccuguccgccuguguu

SEQ ID NO: 1546150 - RNA, 19 nt, Artificial Sequence
  Description of Artificial Sequence: Synthetic oligonucleotide
aagcggaaggacuggugaa

SEQ ID NO: 1546151 - RNA, 19 nt, Artificial Sequence
  Description of Artificial Sequence: Synthetic oligonucleotide
aacgcugucgucguugcuu

SEQ ID NO: 1546152 - RNA, 19 nt, Artificial Sequence
  Description of Artificial Sequence: Synthetic oligonucleotide
guuccguuccccaggaggc

SEQ ID NO: 1546153 - RNA, 19 nt, Artificial Sequence
  Description of Artificial Sequence: Synthetic oligonucleotide
acgcugucgucguugcuuc

SEQ ID NO: 1546154 - RNA, 19 nt, Artificial Sequence
  Description of Artificial Sequence: Synthetic oligonucleotide
augaacgggugacccauca

SEQ ID NO: 1546155 - RNA, 19 nt, Artificial Sequence
  Description of Artificial Sequence: Synthetic oligonucleotide
gaguggaucccauacugcu

SEQ ID NO: 1546156 - RNA, 19 nt, Artificial Sequence
  Description of Artificial Sequence: Synthetic oligonucleotide
caagcggaaggacugguga

SEQ ID NO: 1546157 - RNA, 19 nt, Artificial Sequence
  Description of Artificial Sequence: Synthetic oligonucleotide
aguaucuuucucaguucag

SEQ ID NO: 1546158 - RNA, 19 nt, Artificial Sequence
  Description of Artificial Sequence: Synthetic oligonucleotide
gcuaacgccgaagucacag

SEQ ID NO: 1546159 - RNA, 19 nt, Artificial Sequence
  Description of Artificial Sequence: Synthetic oligonucleotide
gcuccgagaacucuccaag

SEQ ID NO: 1546160 - RNA, 19 nt, Artificial Sequence
  Description of Artificial Sequence: Synthetic oligonucleotide
gaacgggugacccaucagu

SEQ ID NO: 1546161 - RNA, 19 nt, Artificial Sequence
  Description of Artificial Sequence: Synthetic oligonucleotide
gacgagucacacuuauaaa

SEQ ID NO: 1546162 - RNA, 19 nt, Artificial Sequence
  Description of Artificial Sequence: Synthetic oligonucleotide
uacgaauggcuccgagaac

SEQ ID NO: 1546163 - RNA, 19 nt, Artificial Sequence
  Description of Artificial Sequence: Synthetic oligonucleotide
uuccaacauacgucuuggc

SEQ ID NO: 1546164 - RNA, 19 nt, Artificial Sequence
  Description of Artificial Sequence: Synthetic oligonucleotide
ccaguguaaugucuaacag

SEQ ID NO: 1546165 - RNA, 19 nt, Artificial Sequence
  Description of Artificial Sequence: Synthetic oligonucleotide
uaccguaugucuuguucau

SEQ ID NO: 1546166 - RNA, 19 nt, Artificial Sequence
  Description of Artificial Sequence: Synthetic oligonucleotide
uggucuuucuuugggcugu

SEQ ID NO: 1546167 - RNA, 19 nt, Artificial Sequence
  Description of Artificial Sequence: Synthetic oligonucleotide
ucugaagcuccaguguaau

SEQ ID NO: 1546168 - RNA, 19 nt, Artificial Sequence
  Description of Artificial Sequence: Synthetic oligonucleotide
uggcucuauuagcuggcca

SEQ ID NO: 1546169 - RNA, 19 nt, Artificial Sequence
  Description of Artificial Sequence: Synthetic oligonucleotide
aagggugucucgauaccgu

SEQ ID NO: 1546170 - RNA, 19 nt, Artificial Sequence
  Description of Artificial Sequence: Synthetic oligonucleotide
cauaaggggcugaggcaag

SEQ ID NO: 1546171 - RNA, 19 nt, Artificial Sequence
  Description of Artificial Sequence: Synthetic oligonucleotide
gucucgauaccguaugucu

SEQ ID NO: 1546172 - RNA, 19 nt, Artificial Sequence
  Description of Artificial Sequence: Synthetic oligonucleotide
cuuuaacaacugccacugc

SEQ ID NO: 1546173 - RNA, 19 nt, Artificial Sequence
  Description of Artificial Sequence: Synthetic oligonucleotide
ggaaacauaaggggcugag

SEQ ID NO: 1546174 - RNA, 19 nt, Artificial Sequence
  Description of Artificial Sequence: Synthetic oligonucleotide
agaauaaccuuuacagcua

SEQ ID NO: 1546175 - RNA, 19 nt, Artificial Sequence
  Description of Artificial Sequence: Synthetic oligonucleotide
ugucucgauaccguauguc

SEQ ID NO: 1546176 - RNA, 19 nt, Artificial Sequence
  Description of Artificial Sequence: Synthetic oligonucleotide
uuguuguguccuuggugac

SEQ ID NO: 1546177 - RNA, 19 nt, Artificial Sequence
  Description of Artificial Sequence: Synthetic oligonucleotide
agcuauugcuuggaaguga

SEQ ID NO: 1546178 - RNA, 19 nt, Artificial Sequence
  Description of Artificial Sequence: Synthetic oligonucleotide
gagcaagcuccaugaauga

SEQ ID NO: 1546179 - RNA, 19 nt, Artificial Sequence
  Description of Artificial Sequence: Synthetic oligonucleotide
ggugaauccucaucaacaa

SEQ ID NO: 1546180 - RNA, 19 nt, Artificial Sequence
  Description of Artificial Sequence: Synthetic oligonucleotide
aggccuuuaacaacugcca

SEQ ID NO: 1546181 - RNA, 19 nt, Artificial Sequence
  Description of Artificial Sequence: Synthetic oligonucleotide
cugucgucguugcuucagg

SEQ ID NO: 1546182 - RNA, 19 nt, Artificial Sequence
  Description of Artificial Sequence: Synthetic oligonucleotide
cauauucaacgcugucguc

SEQ ID NO: 1546183 - RNA, 19 nt, Artificial Sequence
  Description of Artificial Sequence: Synthetic oligonucleotide
agacuacagggcugguaug

SEQ ID NO: 1546184 - RNA, 19 nt, Artificial Sequence
  Description of Artificial Sequence: Synthetic oligonucleotide
aauguacgaauggcuccga

SEQ ID NO: 1546185 - RNA, 19 nt, Artificial Sequence
  Description of Artificial Sequence: Synthetic oligonucleotide
ccguaugucuuguucauuc

SEQ ID NO: 1546186 - RNA, 19 nt, Artificial Sequence
  Description of Artificial Sequence: Synthetic oligonucleotide
cacugaggccucacggggc

SEQ ID NO: 1546187 - RNA, 19 nt, Artificial Sequence
  Description of Artificial Sequence: Synthetic oligonucleotide
cucaguucagcugaggacu

SEQ ID NO: 1546188 - RNA, 19 nt, Artificial Sequence
  Description of Artificial Sequence: Synthetic oligonucleotide
ccaagagcaagcuccauga

SEQ ID NO: 1546189 - RNA, 19 nt, Artificial Sequence
  Description of Artificial Sequence: Synthetic oligonucleotide
gcugguugaagcuuguugu

SEQ ID NO: 1546190 - RNA, 19 nt, Artificial Sequence
  Description of Artificial Sequence: Synthetic oligonucleotide
guagucagugucccacuga

SEQ ID NO: 1546191 - RNA, 19 nt, Artificial Sequence
  Description of Artificial Sequence: Synthetic oligonucleotide
cccuuuacaaugaacagua

SEQ ID NO: 1546192 - RNA, 19 nt, Artificial Sequence
  Description of Artificial Sequence: Synthetic oligonucleotide
aauaaccuuuacagcuaaa

SEQ ID NO: 1546193 - RNA, 19 nt, Artificial Sequence
  Description of Artificial Sequence: Synthetic oligonucleotide
gccuaucacauccagcaca

SEQ ID NO: 1546194 - RNA, 19 nt, Artificial Sequence
  Description of Artificial Sequence: Synthetic oligonucleotide
acgaugaacgggugaccca

SEQ ID NO: 1546195 - RNA, 19 nt, Artificial Sequence
  Description of Artificial Sequence: Synthetic oligonucleotide
uguccgccuguguuuacaa

SEQ ID NO: 1546196 - RNA, 19 nt, Artificial Sequence
  Description of Artificial Sequence: Synthetic oligonucleotide
ccgagaacucuccaagcgg

SEQ ID NO: 1546197 - RNA, 19 nt, Artificial Sequence
  Description of Artificial Sequence: Synthetic oligonucleotide
gucgucguugcuucaggca

SEQ ID NO: 1546198 - RNA, 19 nt, Artificial Sequence
  Description of Artificial Sequence: Synthetic oligonucleotide
cucgaguauucaccuucag

SEQ ID NO: 1546199 - RNA, 19 nt, Artificial Sequence
  Description of Artificial Sequence: Synthetic oligonucleotide
ugaccaagggugucucgau

SEQ ID NO: 1546200 - RNA, 19 nt, Artificial Sequence
  Description of Artificial Sequence: Synthetic oligonucleotide
ugagauuccuaggcuccac

SEQ ID NO: 1546201 - RNA, 19 nt, Artificial Sequence
  Description of Artificial Sequence: Synthetic oligonucleotide
aucaguuccucuggcgcug

SEQ ID NO: 1546202 - RNA, 19 nt, Artificial Sequence
  Description of Artificial Sequence: Synthetic oligonucleotide
gugcuaacgccgaagucac

SEQ ID NO: 1546203 - RNA, 19 nt, Artificial Sequence
  Description of Artificial Sequence: Synthetic oligonucleotide
cugugugcuaacgccgaag

SEQ ID NO: 1546204 - RNA, 19 nt, Artificial Sequence
  Description of Artificial Sequence: Synthetic oligonucleotide
ugcaggcucuuggaaauau

SEQ ID NO: 1546205 - RNA, 19 nt, Artificial Sequence
  Description of Artificial Sequence: Synthetic oligonucleotide
gaucccauacugcucuccu

SEQ ID NO: 1546206 - RNA, 19 nt, Artificial Sequence
  Description of Artificial Sequence: Synthetic oligonucleotide
ucgauaccguaugucuugu

SEQ ID NO: 1546207 - RNA, 19 nt, Artificial Sequence
  Description of Artificial Sequence: Synthetic oligonucleotide
ccaacauacgucuuggcua

SEQ ID NO: 1546208 - RNA, 19 nt, Artificial Sequence
  Description of Artificial Sequence: Synthetic oligonucleotide
auacugcucuccugaaauu

SEQ ID NO: 1546209 - RNA, 19 nt, Artificial Sequence
  Description of Artificial Sequence: Synthetic oligonucleotide
uacaagcauguuggagggc

SEQ ID NO: 1546210 - RNA, 19 nt, Artificial Sequence
  Description of Artificial Sequence: Synthetic oligonucleotide
acaaauagguaaggccuuu

SEQ ID NO: 1546211 - RNA, 19 nt, Artificial Sequence
  Description of Artificial Sequence: Synthetic oligonucleotide
guccagcucgaguauucac

SEQ ID NO: 1546212 - RNA, 19 nt, Artificial Sequence
  Description of Artificial Sequence: Synthetic oligonucleotide
aaugccccguaaaauccua

SEQ ID NO: 1546213 - RNA, 19 nt, Artificial Sequence
  Description of Artificial Sequence: Synthetic oligonucleotide
cucaugcacugagugauga

SEQ ID NO: 1546214 - RNA, 19 nt, Artificial Sequence
  Description of Artificial Sequence: Synthetic oligonucleotide
cauacgucuuggcuauaga

SEQ ID NO: 1546215 - RNA, 19 nt, Artificial Sequence
  Description of Artificial Sequence: Synthetic oligonucleotide
caagcuccaugaaugagau

SEQ ID NO: 1546216 - RNA, 19 nt, Artificial Sequence
  Description of Artificial Sequence: Synthetic oligonucleotide
cucuagugcucugcauacc

SEQ ID NO: 1546217 - RNA, 19 nt, Artificial Sequence
  Description of Artificial Sequence: Synthetic oligonucleotide
caauucuucccaggacgug

SEQ ID NO: 1546218 - RNA, 19 nt, Artificial Sequence
  Description of Artificial Sequence: Synthetic oligonucleotide
caacauacgucuuggcuau

SEQ ID NO: 1546219 - RNA, 19 nt, Artificial Sequence
  Description of Artificial Sequence: Synthetic oligonucleotide
gccuguguuuacaagcaug

SEQ ID NO: 1546220 - RNA, 19 nt, Artificial Sequence
  Description of Artificial Sequence: Synthetic oligonucleotide
ugccuccguugccaugacc

SEQ ID NO: 1546221 - RNA, 19 nt, Artificial Sequence
  Description of Artificial Sequence: Synthetic oligonucleotide
gagaugguccagcucgagu

SEQ ID NO: 1546222 - RNA, 19 nt, Artificial Sequence
  Description of Artificial Sequence: Synthetic oligonucleotide
cuaacgccgaagucacaga

SEQ ID NO: 1546223 - RNA, 19 nt, Artificial Sequence
  Description of Artificial Sequence: Synthetic oligonucleotide
guccgccuguguuuacaag

SEQ ID NO: 1546224 - RNA, 19 nt, Artificial Sequence
  Description of Artificial Sequence: Synthetic oligonucleotide
cucuccaagcggaaggacu

SEQ ID NO: 1546225 - RNA, 19 nt, Artificial Sequence
  Description of Artificial Sequence: Synthetic oligonucleotide
ugaggccucacggggcccc

SEQ ID NO: 1546226 - RNA, 19 nt, Artificial Sequence
  Description of Artificial Sequence: Synthetic oligonucleotide
aggccauguauguuccguu

SEQ ID NO: 1546227 - RNA, 19 nt, Artificial Sequence
  Description of Artificial Sequence: Synthetic oligonucleotide
cccaagagcaagcuccaug

SEQ ID NO: 1546228 - RNA, 19 nt, Artificial Sequence
  Description of Artificial Sequence: Synthetic oligonucleotide
gccccguaaaauccuauga

SEQ ID NO: 1546229 - RNA, 19 nt, Artificial Sequence
  Description of Artificial Sequence: Synthetic oligonucleotide
gcgcuggucuuucuuuggg

SEQ ID NO: 1546230 - RNA, 19 nt, Artificial Sequence
  Description of Artificial Sequence: Synthetic oligonucleotide
agggugucucgauaccgua

SEQ ID NO: 1546231 - RNA, 19 nt, Artificial Sequence
  Description of Artificial Sequence: Synthetic oligonucleotide
agcggaaggacuggugaau

SEQ ID NO: 1546232 - RNA, 19 nt, Artificial Sequence
  Description of Artificial Sequence: Synthetic oligonucleotide
gugugcuaacgccgaaguc

SEQ ID NO: 1546233 - RNA, 19 nt, Artificial Sequence
  Description of Artificial Sequence: Synthetic oligonucleotide
gacgugcucuggaauuuuc

SEQ ID NO: 1546234 - RNA, 19 nt, Artificial Sequence
  Description of Artificial Sequence: Synthetic oligonucleotide
ugcuaacgccgaagucaca

SEQ ID NO: 1546235 - RNA, 19 nt, Artificial Sequence
  Description of Artificial Sequence: Synthetic oligonucleotide
gccuccguugccaugacca

SEQ ID NO: 1546236 - RNA, 19 nt, Artificial Sequence
  Description of Artificial Sequence: Synthetic oligonucleotide
gcuguuccauuacugugga

SEQ ID NO: 1546237 - RNA, 19 nt, Artificial Sequence
  Description of Artificial Sequence: Synthetic oligonucleotide
agcuccaguguaaugucua

SEQ ID NO: 1546238 - RNA, 19 nt, Artificial Sequence
  Description of Artificial Sequence: Synthetic oligonucleotide
guggcucuauuagcuggcc

SEQ ID NO: 1546239 - RNA, 19 nt, Artificial Sequence
  Description of Artificial Sequence: Synthetic oligonucleotide
cccguaaaauccuaugaua

SEQ ID NO: 1546240 - RNA, 19 nt, Artificial Sequence
  Description of Artificial Sequence: Synthetic oligonucleotide
ggcucuauuagcuggccau

SEQ ID NO: 1546241 - RNA, 19 nt, Artificial Sequence
  Description of Artificial Sequence: Synthetic oligonucleotide
gcuauugcuuggaagugaa

SEQ ID NO: 1546242 - RNA, 19 nt, Artificial Sequence
  Description of Artificial Sequence: Synthetic oligonucleotide
gcugucgucguugcuucag

SEQ ID NO: 1546243 - RNA, 19 nt, Artificial Sequence
  Description of Artificial Sequence: Synthetic oligonucleotide
gcuauagaauucaccagcu

SEQ ID NO: 1546244 - RNA, 19 nt, Artificial Sequence
  Description of Artificial Sequence: Synthetic oligonucleotide
uggaucccauacugcucuc

SEQ ID NO: 1546245 - RNA, 19 nt, Artificial Sequence
  Description of Artificial Sequence: Synthetic oligonucleotide
cacaaauagguaaggccuu

SEQ ID NO: 1546246 - RNA, 19 nt, Artificial Sequence
  Description of Artificial Sequence: Synthetic oligonucleotide
aggacgugcucuggaauuu

SEQ ID NO: 1546247 - RNA, 19 nt, Artificial Sequence
  Description of Artificial Sequence: Synthetic oligonucleotide
guuguguccuuggugacuu

SEQ ID NO: 1546248 - RNA, 19 nt, Artificial Sequence
  Description of Artificial Sequence: Synthetic oligonucleotide
gaauggcuccgagaacucu

SEQ ID NO: 1546249 - RNA, 19 nt, Artificial Sequence
  Description of Artificial Sequence: Synthetic oligonucleotide
ccuaugauauaugacgagu

SEQ ID NO: 1546250 - RNA, 19 nt, Artificial Sequence
  Description of Artificial Sequence: Synthetic oligonucleotide
gcugauagggucugacccu

SEQ ID NO: 1546251 - RNA, 19 nt, Artificial Sequence
  Description of Artificial Sequence: Synthetic oligonucleotide
caaauagguaaggccuuua

SEQ ID NO: 1546252 - RNA, 19 nt, Artificial Sequence
  Description of Artificial Sequence: Synthetic oligonucleotide
cgucuuggcuauagaauuc

SEQ ID NO: 1546253 - RNA, 19 nt, Artificial Sequence
  Description of Artificial Sequence: Synthetic oligonucleotide
uccguuccccaggaggcuu

SEQ ID NO: 1546254 - RNA, 19 nt, Artificial Sequence
  Description of Artificial Sequence: Synthetic oligonucleotide
ggccuaucacauccagcac

SEQ ID NO: 1546255 - RNA, 19 nt, Artificial Sequence
  Description of Artificial Sequence: Synthetic oligonucleotide
auaugacgagucacacuua

SEQ ID NO: 1546256 - RNA, 19 nt, Artificial Sequence
  Description of Artificial Sequence: Synthetic oligonucleotide
guuuccucaugcacugagu

SEQ ID NO: 1546257 - RNA, 19 nt, Artificial Sequence
  Description of Artificial Sequence: Synthetic oligonucleotide
ccauuacuguggaauaaua

SEQ ID NO: 1546258 - RNA, 19 nt, Artificial Sequence
  Description of Artificial Sequence: Synthetic oligonucleotide
auucaacgcugucgucguu

SEQ ID NO: 1546259 - RNA, 19 nt, Artificial Sequence
  Description of Artificial Sequence: Synthetic oligonucleotide
cguaaaauccuaugauaua

SEQ ID NO: 1546260 - RNA, 19 nt, Artificial Sequence
  Description of Artificial Sequence: Synthetic oligonucleotide
gugcucugcauacccacau

SEQ ID NO: 1546261 - RNA, 19 nt, Artificial Sequence
  Description of Artificial Sequence: Synthetic oligonucleotide
uugcaggcucuuggaaaua

SEQ ID NO: 1546262 - RNA, 19 nt, Artificial Sequence
  Description of Artificial Sequence: Synthetic oligonucleotide
aggacuucuucaagcuauu

SEQ ID NO: 1546263 - RNA, 19 nt, Artificial Sequence
  Description of Artificial Sequence: Synthetic oligonucleotide
gucguugcuucaggcagaa

SEQ ID NO: 1546264 - RNA, 19 nt, Artificial Sequence
  Description of Artificial Sequence: Synthetic oligonucleotide
cauuggccaguaucuuucu

SEQ ID NO: 1546265 - RNA, 19 nt, Artificial Sequence
  Description of Artificial Sequence: Synthetic oligonucleotide
ccacugcaauucuucccag

SEQ ID NO: 1546266 - RNA, 19 nt, Artificial Sequence
  Description of Artificial Sequence: Synthetic oligonucleotide
aacauacgucuuggcuaua

SEQ ID NO: 1546267 - RNA, 19 nt, Artificial Sequence
  Description of Artificial Sequence: Synthetic oligonucleotide
augacgagucacacuuaua

SEQ ID NO: 1546268 - RNA, 19 nt, Artificial Sequence
  Description of Artificial Sequence: Synthetic oligonucleotide
gaccuguccgccuguguuu

SEQ ID NO: 1546269 - RNA, 19 nt, Artificial Sequence
  Description of Artificial Sequence: Synthetic oligonucleotide
caggacgugcucuggaauu

SEQ ID NO: 1546270 - RNA, 19 nt, Artificial Sequence
  Description of Artificial Sequence: Synthetic oligonucleotide
cuguccgccuguguuuaca

SEQ ID NO: 1546271 - RNA, 19 nt, Artificial Sequence
  Description of Artificial Sequence: Synthetic oligonucleotide
gcacgaugaacgggugacc

SEQ ID NO: 1546272 - RNA, 19 nt, Artificial Sequence
  Description of Artificial Sequence: Synthetic oligonucleotide
gcaauucuucccaggacgu

SEQ ID NO: 1546273 - RNA, 19 nt, Artificial Sequence
  Description of Artificial Sequence: Synthetic oligonucleotide
ccuaucacauccagcacau

SEQ ID NO: 1546274 - RNA, 19 nt, Artificial Sequence
  Description of Artificial Sequence: Synthetic oligonucleotide
cguaugucuuguucauuca

SEQ ID NO: 1546275 - RNA, 19 nt, Artificial Sequence
  Description of Artificial Sequence: Synthetic oligonucleotide
gcucgaguauucaccuuca

SEQ ID NO: 1546276 - RNA, 19 nt, Artificial Sequence
  Description of Artificial Sequence: Synthetic oligonucleotide
augccccguaaaauccuau

SEQ ID NO: 1546277 - RNA, 19 nt, Artificial Sequence
  Description of Artificial Sequence: Synthetic oligonucleotide
ccguugccaugaccaaggg

SEQ ID NO: 1546278 - RNA, 19 nt, Artificial Sequence
  Description of Artificial Sequence: Synthetic oligonucleotide
cugaggccucacggggccc

SEQ ID NO: 1546279 - RNA, 19 nt, Artificial Sequence
  Description of Artificial Sequence: Synthetic oligonucleotide
cuggugccauauaagcauu

SEQ ID NO: 1546280 - RNA, 19 nt, Artificial Sequence
  Description of Artificial Sequence: Synthetic oligonucleotide
gguccagcucgaguauuca

SEQ ID NO: 1546281 - RNA, 19 nt, Artificial Sequence
  Description of Artificial Sequence: Synthetic oligonucleotide
cuauugcuuggaagugaau

SEQ ID NO: 1546282 - RNA, 19 nt, Artificial Sequence
  Description of Artificial Sequence: Synthetic oligonucleotide
ucguugcuucaggcagaac

SEQ ID NO: 1546283 - RNA, 19 nt, Artificial Sequence
  Description of Artificial Sequence: Synthetic oligonucleotide
ccaugaccaagggugucuc

SEQ ID NO: 1546284 - RNA, 19 nt, Artificial Sequence
  Description of Artificial Sequence: Synthetic oligonucleotide
guguaaugucuaacagaau

SEQ ID NO: 1546285 - RNA, 19 nt, Artificial Sequence
  Description of Artificial Sequence: Synthetic oligonucleotide
ccccguaaaauccuaugau

SEQ ID NO: 1546286 - RNA, 19 nt, Artificial Sequence
  Description of Artificial Sequence: Synthetic oligonucleotide
ccucacggggccccugcug

SEQ ID NO: 1546287 - RNA, 19 nt, Artificial Sequence
  Description of Artificial Sequence: Synthetic oligonucleotide
cugauagggucugacccuu

SEQ ID NO: 1546288 - RNA, 19 nt, Artificial Sequence
  Description of Artificial Sequence: Synthetic oligonucleotide
gccaugaccaagggugucu

SEQ ID NO: 1546289 - RNA, 19 nt, Artificial Sequence
  Description of Artificial Sequence: Synthetic oligonucleotide
ccguuccccaggaggcuug

SEQ ID NO: 1546290 - RNA, 19 nt, Artificial Sequence
  Description of Artificial Sequence: Synthetic oligonucleotide
cagggcugguaugcugaga

SEQ ID NO: 1546291 - RNA, 19 nt, Artificial Sequence
  Description of Artificial Sequence: Synthetic oligonucleotide
gcugugugcuaacgccgaa

SEQ ID NO: 1546292 - RNA, 19 nt, Artificial Sequence
  Description of Artificial Sequence: Synthetic oligonucleotide
gggacaugauaugcuuugu

SEQ ID NO: 1546293 - RNA, 19 nt, Artificial Sequence
  Description of Artificial Sequence: Synthetic oligonucleotide
cccaggacgugcucuggaa

SEQ ID NO: 1546294 - RNA, 19 nt, Artificial Sequence
  Description of Artificial Sequence: Synthetic oligonucleotide
uggcuccgccucuccucua

SEQ ID NO: 1546295 - RNA, 19 nt, Artificial Sequence
  Description of Artificial Sequence: Synthetic oligonucleotide
ggccaguaucuuucucagu

SEQ ID NO: 1546296 - RNA, 19 nt, Artificial Sequence
  Description of Artificial Sequence: Synthetic oligonucleotide
cgucguugcuucaggcaga

SEQ ID NO: 1546297 - RNA, 19 nt, Artificial Sequence
  Description of Artificial Sequence: Synthetic oligonucleotide
ccuguccgccuguguuuac

SEQ ID NO: 1546298 - RNA, 19 nt, Artificial Sequence
  Description of Artificial Sequence: Synthetic oligonucleotide
ccuccguugccaugaccaa

SEQ ID NO: 1546299 - RNA, 19 nt, Artificial Sequence
  Description of Artificial Sequence: Synthetic oligonucleotide
gggugucucgauaccguau

SEQ ID NO: 1546300 - RNA, 19 nt, Artificial Sequence
  Description of Artificial Sequence: Synthetic oligonucleotide
gugucccacugaggccuca

SEQ ID NO: 1546301 - RNA, 19 nt, Artificial Sequence
  Description of Artificial Sequence: Synthetic oligonucleotide
caacgcugucgucguugcu

SEQ ID NO: 1546302 - RNA, 19 nt, Artificial Sequence
  Description of Artificial Sequence: Synthetic oligonucleotide
cagcucgaguauucaccuu

SEQ ID NO: 1546303 - RNA, 19 nt, Artificial Sequence
  Description of Artificial Sequence: Synthetic oligonucleotide
gcuugaccuguccgccugu

SEQ ID NO: 1546304 - RNA, 19 nt, Artificial Sequence
  Description of Artificial Sequence: Synthetic oligonucleotide
ccaggacgugcucuggaau

SEQ ID NO: 1546305 - RNA, 19 nt, Artificial Sequence
  Description of Artificial Sequence: Synthetic oligonucleotide
cgaugaacgggugacccau

SEQ ID NO: 1546306 - RNA, 19 nt, Artificial Sequence
  Description of Artificial Sequence: Synthetic oligonucleotide
ccccauccaugaauucugu

SEQ ID NO: 1546307 - RNA, 19 nt, Artificial Sequence
  Description of Artificial Sequence: Synthetic oligonucleotide
ggacgugcucuggaauuuu

SEQ ID NO: 1546308 - RNA, 19 nt, Artificial Sequence
  Description of Artificial Sequence: Synthetic oligonucleotide
caguuccucuggcgcuggu

SEQ ID NO: 1546309 - RNA, 19 nt, Artificial Sequence
  Description of Artificial Sequence: Synthetic oligonucleotide
cgcugucgucguugcuuca

SEQ ID NO: 1546310 - RNA, 19 nt, Artificial Sequence
  Description of Artificial Sequence: Synthetic oligonucleotide
cgauaccguaugucuuguu

SEQ ID NO: 1546311 - RNA, 19 nt, Artificial Sequence
  Description of Artificial Sequence: Synthetic oligonucleotide
aacacuaacagccacacug

SEQ ID NO: 1546312 - RNA, 19 nt, Artificial Sequence
  Description of Artificial Sequence: Synthetic oligonucleotide
uauauaaucgguuaacaag

SEQ ID NO: 1546313 - RNA, 19 nt, Artificial Sequence
  Description of Artificial Sequence: Synthetic oligonucleotide
auauaaucgguuaacaagc

SEQ ID NO: 1546314 - RNA, 19 nt, Artificial Sequence
  Description of Artificial Sequence: Synthetic oligonucleotide
auucaagagugccauagcc

SEQ ID NO: 1546315 - RNA, 19 nt, Artificial Sequence
  Description of Artificial Sequence: Synthetic oligonucleotide
uaaucgguuaacaagcuug

SEQ ID NO: 1546316 - RNA, 19 nt, Artificial Sequence
  Description of Artificial Sequence: Synthetic oligonucleotide
ucuaauacaaugauggauu

SEQ ID NO: 1546317 - RNA, 19 nt, Artificial Sequence
  Description of Artificial Sequence: Synthetic oligonucleotide
augcauauccaacugcucc

SEQ ID NO: 1546318 - RNA, 19 nt, Artificial Sequence
  Description of Artificial Sequence: Synthetic oligonucleotide
aaagcagggacucaugaca

SEQ ID NO: 1546319 - RNA, 19 nt, Artificial Sequence
  Description of Artificial Sequence: Synthetic oligonucleotide
aagcuuggaacuuucucac

SEQ ID NO: 1546320 - RNA, 19 nt, Artificial Sequence
  Description of Artificial Sequence: Synthetic oligonucleotide
aaucucguccccuugcagg

SEQ ID NO: 1546321 - RNA, 19 nt, Artificial Sequence
  Description of Artificial Sequence: Synthetic oligonucleotide
ucgugaucaaguaacacug

SEQ ID NO: 1546322 - RNA, 19 nt, Artificial Sequence
  Description of Artificial Sequence: Synthetic oligonucleotide
ucuccagaauucaagagug

SEQ ID NO: 1546323 - RNA, 19 nt, Artificial Sequence
  Description of Artificial Sequence: Synthetic oligonucleotide
acaaugauggauuagugaa

SEQ ID NO: 1546324 - RNA, 19 nt, Artificial Sequence
  Description of Artificial Sequence: Synthetic oligonucleotide
agcaagcuaucacucaucc

SEQ ID NO: 1546325 - RNA, 19 nt, Artificial Sequence
  Description of Artificial Sequence: Synthetic oligonucleotide
acucaugacagccaacuuc

SEQ ID NO: 1546326 - RNA, 19 nt, Artificial Sequence
  Description of Artificial Sequence: Synthetic oligonucleotide
uaucugaagauccucgaca

SEQ ID NO: 1546327 - RNA, 19 nt, Artificial Sequence
  Description of Artificial Sequence: Synthetic oligonucleotide
acagccaacuuccagagug

SEQ ID NO: 1546328 - RNA, 19 nt, Artificial Sequence
  Description of Artificial Sequence: Synthetic oligonucleotide
aauugcaaauccaaguuca

SEQ ID NO: 1546329 - RNA, 19 nt, Artificial Sequence
  Description of Artificial Sequence: Synthetic oligonucleotide
cucaugacagccaacuucc

SEQ ID NO: 1546330 - RNA, 19 nt, Artificial Sequence
  Description of Artificial Sequence: Synthetic oligonucleotide
aaaugcaaagcccucguau

SEQ ID NO: 1546331 - RNA, 19 nt, Artificial Sequence
  Description of Artificial Sequence: Synthetic oligonucleotide
uucaauauauaaucgguua

SEQ ID NO: 1546332 - RNA, 19 nt, Artificial Sequence
  Description of Artificial Sequence: Synthetic oligonucleotide
ucaauauauaaucgguuaa

SEQ ID NO: 1546333 - RNA, 19 nt, Artificial Sequence
  Description of Artificial Sequence: Synthetic oligonucleotide
agugccauagcccucucgg

SEQ ID NO: 1546334 - RNA, 19 nt, Artificial Sequence
  Description of Artificial Sequence: Synthetic oligonucleotide
aucagagcagaaauaaagc

SEQ ID NO: 1546335 - RNA, 19 nt, Artificial Sequence
  Description of Artificial Sequence: Synthetic oligonucleotide
acgacuuccagucuacagg

SEQ ID NO: 1546336 - RNA, 19 nt, Artificial Sequence
  Description of Artificial Sequence: Synthetic oligonucleotide
uucaagagugccauagccc

SEQ ID NO: 1546337 - RNA, 19 nt, Artificial Sequence
  Description of Artificial Sequence: Synthetic oligonucleotide
aaagcccucguaugggacg

SEQ ID NO: 1546338 - RNA, 19 nt, Artificial Sequence
  Description of Artificial Sequence: Synthetic oligonucleotide
uacuggaaaacagcuaugg

SEQ ID NO: 1546339 - RNA, 19 nt, Artificial Sequence
  Description of Artificial Sequence: Synthetic oligonucleotide
uacaaugauggauuaguga

SEQ ID NO: 1546340 - RNA, 19 nt, Artificial Sequence
  Description of Artificial Sequence: Synthetic oligonucleotide
ucaagagugccauagcccu

SEQ ID NO: 1546341 - RNA, 19 nt, Artificial Sequence
  Description of Artificial Sequence: Synthetic oligonucleotide
gaagucgugaucaaguaac

SEQ ID NO: 1546342 - RNA, 19 nt, Artificial Sequence
  Description of Artificial Sequence: Synthetic oligonucleotide
cugucgucaaauaugugcc

SEQ ID NO: 1546343 - RNA, 19 nt, Artificial Sequence
  Description of Artificial Sequence: Synthetic oligonucleotide
gaggaagucaaacacuaac

SEQ ID NO: 1546344 - RNA, 19 nt, Artificial Sequence
  Description of Artificial Sequence: Synthetic oligonucleotide
aguucaagugugcuggguc

SEQ ID NO: 1546345 - RNA, 19 nt, Artificial Sequence
  Description of Artificial Sequence: Synthetic oligonucleotide
uucucguaagggaugacug

SEQ ID NO: 1546346 - RNA, 19 nt, Artificial Sequence
  Description of Artificial Sequence: Synthetic oligonucleotide
ugacugucgucaaauaugu

SEQ ID NO: 1546347 - RNA, 19 nt, Artificial Sequence
  Description of Artificial Sequence: Synthetic oligonucleotide
auauauaaucgguuaacaa

SEQ ID NO: 1546348 - RNA, 19 nt, Artificial Sequence
  Description of Artificial Sequence: Synthetic oligonucleotide
ugaagauccucgacagacg

SEQ ID NO: 1546349 - RNA, 19 nt, Artificial Sequence
  Description of Artificial Sequence: Synthetic oligonucleotide
aaucgguuaacaagcuugg

SEQ ID NO: 1546350 - RNA, 19 nt, Artificial Sequence
  Description of Artificial Sequence: Synthetic oligonucleotide
ugugagcugcucuauguag

SEQ ID NO: 1546351 - RNA, 19 nt, Artificial Sequence
  Description of Artificial Sequence: Synthetic oligonucleotide
ugcucuauguaggacacag

SEQ ID NO: 1546352 - RNA, 19 nt, Artificial Sequence
  Description of Artificial Sequence: Synthetic oligonucleotide
cucugagagguucagagug

SEQ ID NO: 1546353 - RNA, 19 nt, Artificial Sequence
  Description of Artificial Sequence: Synthetic oligonucleotide
cuauguaggacacagaacu

SEQ ID NO: 1546354 - RNA, 19 nt, Artificial Sequence
  Description of Artificial Sequence: Synthetic oligonucleotide
agaacuuucaauauauaau

SEQ ID NO: 1546355 - RNA, 19 nt, Artificial Sequence
  Description of Artificial Sequence: Synthetic oligonucleotide
ucgguuaacaagcuuggaa

SEQ ID NO: 1546356 - RNA, 19 nt, Artificial Sequence
  Description of Artificial Sequence: Synthetic oligonucleotide
uauaaucgguuaacaagcu

SEQ ID NO: 1546357 - RNA, 19 nt, Artificial Sequence
  Description of Artificial Sequence: Synthetic oligonucleotide
ucuauguaggacacagaac

SEQ ID NO: 1546358 - RNA, 19 nt, Artificial Sequence
  Description of Artificial Sequence: Synthetic oligonucleotide
ucguaagggaugacugucg

SEQ ID NO: 1546359 - RNA, 19 nt, Artificial Sequence
  Description of Artificial Sequence: Synthetic oligonucleotide
ucaugcuagaccucuucag

SEQ ID NO: 1546360 - RNA, 19 nt, Artificial Sequence
  Description of Artificial Sequence: Synthetic oligonucleotide
uccagaauucaagagugcc

SEQ ID NO: 1546361 - RNA, 19 nt, Artificial Sequence
  Description of Artificial Sequence: Synthetic oligonucleotide
accuuuacuggaaaacagc

SEQ ID NO: 1546362 - RNA, 19 nt, Artificial Sequence
  Description of Artificial Sequence: Synthetic oligonucleotide
uccgugaugggccgcacgg

SEQ ID NO: 1546363 - RNA, 19 nt, Artificial Sequence
  Description of Artificial Sequence: Synthetic oligonucleotide
gagagguucagagugagca

SEQ ID NO: 1546364 - RNA, 19 nt, Artificial Sequence
  Description of Artificial Sequence: Synthetic oligonucleotide
ucgucaaauaugugccugg

SEQ ID NO: 1546365 - RNA, 19 nt, Artificial Sequence
  Description of Artificial Sequence: Synthetic oligonucleotide
acaccgagagccuuuucac

SEQ ID NO: 1546366 - RNA, 19 nt, Artificial Sequence
  Description of Artificial Sequence: Synthetic oligonucleotide
ugaaucuccugggagagca

SEQ ID NO: 1546367 - RNA, 19 nt, Artificial Sequence
  Description of Artificial Sequence: Synthetic oligonucleotide
cauaauuaucugucagggc

SEQ ID NO: 1546368 - RNA, 19 nt, Artificial Sequence
  Description of Artificial Sequence: Synthetic oligonucleotide
aagcgcuuccacugugagc

SEQ ID NO: 1546369 - RNA, 19 nt, Artificial Sequence
  Description of Artificial Sequence: Synthetic oligonucleotide
uguaggacacagaacuuuc

SEQ ID NO: 1546370 - RNA, 19 nt, Artificial Sequence
  Description of Artificial Sequence: Synthetic oligonucleotide
augcaaagcccucguaugg

SEQ ID NO: 1546371 - RNA, 19 nt, Artificial Sequence
  Description of Artificial Sequence: Synthetic oligonucleotide
aaaucucguccccuugcag

SEQ ID NO: 1546372 - RNA, 19 nt, Artificial Sequence
  Description of Artificial Sequence: Synthetic oligonucleotide
aacuuccagagugacacug

SEQ ID NO: 1546373 - RNA, 19 nt, Artificial Sequence
  Description of Artificial Sequence: Synthetic oligonucleotide
aaugcauauccaacugcuc

SEQ ID NO: 1546374 - RNA, 19 nt, Artificial Sequence
  Description of Artificial Sequence: Synthetic oligonucleotide
ugaagucgugaucaaguaa

SEQ ID NO: 1546375 - RNA, 19 nt, Artificial Sequence
  Description of Artificial Sequence: Synthetic oligonucleotide
gacgacuuccagucuacag

SEQ ID NO: 1546376 - RNA, 19 nt, Artificial Sequence
  Description of Artificial Sequence: Synthetic oligonucleotide
uaauuaucugucagggcau

SEQ ID NO: 1546377 - RNA, 19 nt, Artificial Sequence
  Description of Artificial Sequence: Synthetic oligonucleotide
augacugucgucaaauaug

SEQ ID NO: 1546378 - RNA, 19 nt, Artificial Sequence
  Description of Artificial Sequence: Synthetic oligonucleotide
caccuuuacuggaaaacag

SEQ ID NO: 1546379 - RNA, 19 nt, Artificial Sequence
  Description of Artificial Sequence: Synthetic oligonucleotide
caagcuaucacucaucccu

SEQ ID NO: 1546380 - RNA, 19 nt, Artificial Sequence
  Description of Artificial Sequence: Synthetic oligonucleotide
ugauuccugcaucauuucu

SEQ ID NO: 1546381 - RNA, 19 nt, Artificial Sequence
  Description of Artificial Sequence: Synthetic oligonucleotide
uuacuggaaaacagcuaug

SEQ ID NO: 1546382 - RNA, 19 nt, Artificial Sequence
  Description of Artificial Sequence: Synthetic oligonucleotide
aggaaaucacgccuggagu

SEQ ID NO: 1546383 - RNA, 19 nt, Artificial Sequence
  Description of Artificial Sequence: Synthetic oligonucleotide
agcaaaugcaaagcccucg

SEQ ID NO: 1546384 - RNA, 19 nt, Artificial Sequence
  Description of Artificial Sequence: Synthetic oligonucleotide
ucggugcucuaauacaaug

SEQ ID NO: 1546385 - RNA, 19 nt, Artificial Sequence
  Description of Artificial Sequence: Synthetic oligonucleotide
gacucggcguccuucgagg

SEQ ID NO: 1546386 - RNA, 19 nt, Artificial Sequence
  Description of Artificial Sequence: Synthetic oligonucleotide
uaugugccuggcauguggc

SEQ ID NO: 1546387 - RNA, 19 nt, Artificial Sequence
  Description of Artificial Sequence: Synthetic oligonucleotide
gauucucaccuuuacugga

SEQ ID NO: 1546388 - RNA, 19 nt, Artificial Sequence
  Description of Artificial Sequence: Synthetic oligonucleotide
ucugucagggcauuccaaa

SEQ ID NO: 1546389 - RNA, 19 nt, Artificial Sequence
  Description of Artificial Sequence: Synthetic oligonucleotide
uggauuagugaagucguga

SEQ ID NO: 1546390 - RNA, 19 nt, Artificial Sequence
  Description of Artificial Sequence: Synthetic oligonucleotide
gauuagugaagucgugauc

SEQ ID NO: 1546391 - RNA, 19 nt, Artificial Sequence
  Description of Artificial Sequence: Synthetic oligonucleotide
cucuauguaggacacagaa

SEQ ID NO: 1546392 - RNA, 19 nt, Artificial Sequence
  Description of Artificial Sequence: Synthetic oligonucleotide
uuucucguaagggaugacu

SEQ ID NO: 1546393 - RNA, 19 nt, Artificial Sequence
  Description of Artificial Sequence: Synthetic oligonucleotide
ugcaaagcccucguauggg

SEQ ID NO: 1546394 - RNA, 19 nt, Artificial Sequence
  Description of Artificial Sequence: Synthetic oligonucleotide
gagacgaugauggaaugca

SEQ ID NO: 1546395 - RNA, 19 nt, Artificial Sequence
  Description of Artificial Sequence: Synthetic oligonucleotide
auauccaacugcucccuca

SEQ ID NO: 1546396 - RNA, 19 nt, Artificial Sequence
  Description of Artificial Sequence: Synthetic oligonucleotide
agucgugaucaaguaacac

SEQ ID NO: 1546397 - RNA, 19 nt, Artificial Sequence
  Description of Artificial Sequence: Synthetic oligonucleotide
gucucgaucucuucuagca

SEQ ID NO: 1546398 - RNA, 19 nt, Artificial Sequence
  Description of Artificial Sequence: Synthetic oligonucleotide
augauggauuagugaaguc

SEQ ID NO: 1546399 - RNA, 19 nt, Artificial Sequence
  Description of Artificial Sequence: Synthetic oligonucleotide
ggcauuccaaaucucgucc

SEQ ID NO: 1546400 - RNA, 19 nt, Artificial Sequence
  Description of Artificial Sequence: Synthetic oligonucleotide
ugugcuccgugaugggccg

SEQ ID NO: 1546401 - RNA, 19 nt, Artificial Sequence
  Description of Artificial Sequence: Synthetic oligonucleotide
cucagaguacuccuugaug

SEQ ID NO: 1546402 - RNA, 19 nt, Artificial Sequence
  Description of Artificial Sequence: Synthetic oligonucleotide
uucccauaauuaucuguca

SEQ ID NO: 1546403 - RNA, 19 nt, Artificial Sequence
  Description of Artificial Sequence: Synthetic oligonucleotide
aagagugccauagcccucu

SEQ ID NO: 1546404 - RNA, 19 nt, Artificial Sequence
  Description of Artificial Sequence: Synthetic oligonucleotide
ucguugacacaggagacga

SEQ ID NO: 1546405 - RNA, 19 nt, Artificial Sequence
  Description of Artificial Sequence: Synthetic oligonucleotide
ucucguaagggaugacugu

SEQ ID NO: 1546406 - RNA, 19 nt, Artificial Sequence
  Description of Artificial Sequence: Synthetic oligonucleotide
gugcaguucagauggagga

SEQ ID NO: 1546407 - RNA, 19 nt, Artificial Sequence
  Description of Artificial Sequence: Synthetic oligonucleotide
uccaaaucucguccccuug

SEQ ID NO: 1546408 - RNA, 19 nt, Artificial Sequence
  Description of Artificial Sequence: Synthetic oligonucleotide
gugagcugcucuauguagg

SEQ ID NO: 1546409 - RNA, 19 nt, Artificial Sequence
  Description of Artificial Sequence: Synthetic oligonucleotide
acuuccagucuacaggcau

SEQ ID NO: 1546410 - RNA, 19 nt, Artificial Sequence
  Description of Artificial Sequence: Synthetic oligonucleotide
ugcuagaccucuucagagu

SEQ ID NO: 1546411 - RNA, 19 nt, Artificial Sequence
  Description of Artificial Sequence: Synthetic oligonucleotide
uaacaagcuuggaacuuuc

SEQ ID NO: 1546412 - RNA, 19 nt, Artificial Sequence
  Description of Artificial Sequence: Synthetic oligonucleotide
uuaacaagcuuggaacuuu

SEQ ID NO: 1546413 - RNA, 19 nt, Artificial Sequence
  Description of Artificial Sequence: Synthetic oligonucleotide
uagaccucuucagagucug

SEQ ID NO: 1546414 - RNA, 19 nt, Artificial Sequence
  Description of Artificial Sequence: Synthetic oligonucleotide
aucacucaucccuuucucu

SEQ ID NO: 1546415 - RNA, 19 nt, Artificial Sequence
  Description of Artificial Sequence: Synthetic oligonucleotide
cugaauugcaaauccaagu

SEQ ID NO: 1546416 - RNA, 19 nt, Artificial Sequence
  Description of Artificial Sequence: Synthetic oligonucleotide
cucguaugggacgacuucc

SEQ ID NO: 1546417 - RNA, 19 nt, Artificial Sequence
  Description of Artificial Sequence: Synthetic oligonucleotide
cauagaaauccugccaguc

SEQ ID NO: 1546418 - RNA, 19 nt, Artificial Sequence
  Description of Artificial Sequence: Synthetic oligonucleotide
auccucgacagacgguggg

SEQ ID NO: 1546419 - RNA, 19 nt, Artificial Sequence
  Description of Artificial Sequence: Synthetic oligonucleotide
uauguaggacacagaacuu

SEQ ID NO: 1546420 - RNA, 19 nt, Artificial Sequence
  Description of Artificial Sequence: Synthetic oligonucleotide
ucgcguuacaguucuccug

SEQ ID NO: 1546421 - RNA, 19 nt, Artificial Sequence
  Description of Artificial Sequence: Synthetic oligonucleotide
ucucucguuccucccauuc

SEQ ID NO: 1546422 - RNA, 19 nt, Artificial Sequence
  Description of Artificial Sequence: Synthetic oligonucleotide
ucguaugggacgacuucca

SEQ ID NO: 1546423 - RNA, 19 nt, Artificial Sequence
  Description of Artificial Sequence: Synthetic oligonucleotide
aaccuaucuccagaauuca

SEQ ID NO: 1546424 - RNA, 19 nt, Artificial Sequence
  Description of Artificial Sequence: Synthetic oligonucleotide
gucgugaucaaguaacacu

SEQ ID NO: 1546425 - RNA, 19 nt, Artificial Sequence
  Description of Artificial Sequence: Synthetic oligonucleotide
aggcugugcuccgugaugg

SEQ ID NO: 1546426 - RNA, 19 nt, Artificial Sequence
  Description of Artificial Sequence: Synthetic oligonucleotide
caaaagcagggacucauga

SEQ ID NO: 1546427 - RNA, 19 nt, Artificial Sequence
  Description of Artificial Sequence: Synthetic oligonucleotide
cucccauucugagagcugc

SEQ ID NO: 1546428 - RNA, 19 nt, Artificial Sequence
  Description of Artificial Sequence: Synthetic oligonucleotide
gaugacugucgucaaauau

SEQ ID NO: 1546429 - RNA, 19 nt, Artificial Sequence
  Description of Artificial Sequence: Synthetic oligonucleotide
uagugaagucgugaucaag

SEQ ID NO: 1546430 - RNA, 19 nt, Artificial Sequence
  Description of Artificial Sequence: Synthetic oligonucleotide
cuuccagucuacaggcaug

SEQ ID NO: 1546431 - RNA, 19 nt, Artificial Sequence
  Description of Artificial Sequence: Synthetic oligonucleotide
uccuucgaggggcggaagc

SEQ ID NO: 1546432 - RNA, 19 nt, Artificial Sequence
  Description of Artificial Sequence: Synthetic oligonucleotide
ugucgucaaauaugugccu

SEQ ID NO: 1546433 - RNA, 19 nt, Artificial Sequence
  Description of Artificial Sequence: Synthetic oligonucleotide
auaaucgguuaacaagcuu

SEQ ID NO: 1546434 - RNA, 19 nt, Artificial Sequence
  Description of Artificial Sequence: Synthetic oligonucleotide
ugagagguucagagugagc

SEQ ID NO: 1546435 - RNA, 19 nt, Artificial Sequence
  Description of Artificial Sequence: Synthetic oligonucleotide
ugaugggccgcacggucgc

SEQ ID NO: 1546436 - RNA, 19 nt, Artificial Sequence
  Description of Artificial Sequence: Synthetic oligonucleotide
uucgaggggcggaagcaca

SEQ ID NO: 1546437 - RNA, 19 nt, Artificial Sequence
  Description of Artificial Sequence: Synthetic oligonucleotide
ucgaggggcggaagcacag

SEQ ID NO: 1546438 - RNA, 19 nt, Artificial Sequence
  Description of Artificial Sequence: Synthetic oligonucleotide
uuagugaagucgugaucaa

SEQ ID NO: 1546439 - RNA, 19 nt, Artificial Sequence
  Description of Artificial Sequence: Synthetic oligonucleotide
cuccagaauucaagagugc

SEQ ID NO: 1546440 - RNA, 19 nt, Artificial Sequence
  Description of Artificial Sequence: Synthetic oligonucleotide
agcuaugggugggucuucc

SEQ ID NO: 1546441 - RNA, 19 nt, Artificial Sequence
  Description of Artificial Sequence: Synthetic oligonucleotide
uucucaccuuuacuggaaa

SEQ ID NO: 1546442 - RNA, 19 nt, Artificial Sequence
  Description of Artificial Sequence: Synthetic oligonucleotide
ucuggguccggugauuccu

SEQ ID NO: 1546443 - RNA, 19 nt, Artificial Sequence
  Description of Artificial Sequence: Synthetic oligonucleotide
gucgucaaauaugugccug

SEQ ID NO: 1546444 - RNA, 19 nt, Artificial Sequence
  Description of Artificial Sequence: Synthetic oligonucleotide
cauguggcuucucucguuc

SEQ ID NO: 1546445 - RNA, 19 nt, Artificial Sequence
  Description of Artificial Sequence: Synthetic oligonucleotide
uucuucagugcaguucaga

SEQ ID NO: 1546446 - RNA, 19 nt, Artificial Sequence
  Description of Artificial Sequence: Synthetic oligonucleotide
cgguuaacaagcuuggaac

SEQ ID NO: 1546447 - RNA, 19 nt, Artificial Sequence
  Description of Artificial Sequence: Synthetic oligonucleotide
caaagcccucguaugggac

SEQ ID NO: 1546448 - RNA, 19 nt, Artificial Sequence
  Description of Artificial Sequence: Synthetic oligonucleotide
auaaccuggucugcgguga

SEQ ID NO: 1546449 - RNA, 19 nt, Artificial Sequence
  Description of Artificial Sequence: Synthetic oligonucleotide
cacugauucucaccuuuac

SEQ ID NO: 1546450 - RNA, 19 nt, Artificial Sequence
  Description of Artificial Sequence: Synthetic oligonucleotide
ggaacuuucucacuguccu

SEQ ID NO: 1546451 - RNA, 19 nt, Artificial Sequence
  Description of Artificial Sequence: Synthetic oligonucleotide
aagucgugaucaaguaaca

SEQ ID NO: 1546452 - RNA, 19 nt, Artificial Sequence
  Description of Artificial Sequence: Synthetic oligonucleotide
cucguaagggaugacuguc

SEQ ID NO: 1546453 - RNA, 19 nt, Artificial Sequence
  Description of Artificial Sequence: Synthetic oligonucleotide
ucggcguccuucgaggggc

SEQ ID NO: 1546454 - RNA, 19 nt, Artificial Sequence
  Description of Artificial Sequence: Synthetic oligonucleotide
ucgaucucuucuagcaguu

SEQ ID NO: 1546455 - RNA, 19 nt, Artificial Sequence
  Description of Artificial Sequence: Synthetic oligonucleotide
cugagagguucagagugag

SEQ ID NO: 1546456 - RNA, 19 nt, Artificial Sequence
  Description of Artificial Sequence: Synthetic oligonucleotide
acucggcguccuucgaggg

SEQ ID NO: 1546457 - RNA, 19 nt, Artificial Sequence
  Description of Artificial Sequence: Synthetic oligonucleotide
aauuaucugucagggcauu

SEQ ID NO: 1546458 - RNA, 19 nt, Artificial Sequence
  Description of Artificial Sequence: Synthetic oligonucleotide
auguaggacacagaacuuu

SEQ ID NO: 1546459 - RNA, 19 nt, Artificial Sequence
  Description of Artificial Sequence: Synthetic oligonucleotide
cuuuacuggaaaacagcua

SEQ ID NO: 1546460 - RNA, 19 nt, Artificial Sequence
  Description of Artificial Sequence: Synthetic oligonucleotide
cucucggugcucuaauaca

SEQ ID NO: 1546461 - RNA, 19 nt, Artificial Sequence
  Description of Artificial Sequence: Synthetic oligonucleotide
gugcucuaauacaaugaug

SEQ ID NO: 1546462 - RNA, 19 nt, Artificial Sequence
  Description of Artificial Sequence: Synthetic oligonucleotide
gauccucgacagacggugg

SEQ ID NO: 1546463 - RNA, 19 nt, Artificial Sequence
  Description of Artificial Sequence: Synthetic oligonucleotide
cuccucguugacacaggag

SEQ ID NO: 1546464 - RNA, 19 nt, Artificial Sequence
  Description of Artificial Sequence: Synthetic oligonucleotide
gcuagaccucuucagaguc

SEQ ID NO: 1546465 - RNA, 19 nt, Artificial Sequence
  Description of Artificial Sequence: Synthetic oligonucleotide
agugugcugggucuccaaa

SEQ ID NO: 1546466 - RNA, 19 nt, Artificial Sequence
  Description of Artificial Sequence: Synthetic oligonucleotide
cucaugcuagaccucuuca

SEQ ID NO: 1546467 - RNA, 19 nt, Artificial Sequence
  Description of Artificial Sequence: Synthetic oligonucleotide
agaaagggaagcgcuucca

SEQ ID NO: 1546468 - RNA, 19 nt, Artificial Sequence
  Description of Artificial Sequence: Synthetic oligonucleotide
cgcguuacaguucuccugg

SEQ ID NO: 1546469 - RNA, 19 nt, Artificial Sequence
  Description of Artificial Sequence: Synthetic oligonucleotide
gacgaugauggaaugcaua

SEQ ID NO: 1546470 - RNA, 19 nt, Artificial Sequence
  Description of Artificial Sequence: Synthetic oligonucleotide
agcuuggaacuuucucacu

SEQ ID NO: 1546471 - RNA, 19 nt, Artificial Sequence
  Description of Artificial Sequence: Synthetic oligonucleotide
guccuggacgcuccgggcc

SEQ ID NO: 1546472 - RNA, 19 nt, Artificial Sequence
  Description of Artificial Sequence: Synthetic oligonucleotide
guucaagugugcugggucu

SEQ ID NO: 1546473 - RNA, 19 nt, Artificial Sequence
  Description of Artificial Sequence: Synthetic oligonucleotide
cucuaauacaaugauggau

SEQ ID NO: 1546474 - RNA, 19 nt, Artificial Sequence
  Description of Artificial Sequence: Synthetic oligonucleotide
gguuaacaagcuuggaacu

SEQ ID NO: 1546475 - RNA, 19 nt, Artificial Sequence
  Description of Artificial Sequence: Synthetic oligonucleotide
ccaaaucucguccccuugc

SEQ ID NO: 1546476 - RNA, 19 nt, Artificial Sequence
  Description of Artificial Sequence: Synthetic oligonucleotide
gccauagcccucucggugc

SEQ ID NO: 1546477 - RNA, 19 nt, Artificial Sequence
  Description of Artificial Sequence: Synthetic oligonucleotide
cgacuuccagucuacaggc

SEQ ID NO: 1546478 - RNA, 19 nt, Artificial Sequence
  Description of Artificial Sequence: Synthetic oligonucleotide
caaaucucguccccuugca

SEQ ID NO: 1546479 - RNA, 19 nt, Artificial Sequence
  Description of Artificial Sequence: Synthetic oligonucleotide
ucguccccuugcaggaggc

SEQ ID NO: 1546480 - RNA, 19 nt, Artificial Sequence
  Description of Artificial Sequence: Synthetic oligonucleotide
gugauuccugcaucauuuc

SEQ ID NO: 1546481 - RNA, 19 nt, Artificial Sequence
  Description of Artificial Sequence: Synthetic oligonucleotide
uucaagugugcugggucuc

SEQ ID NO: 1546482 - RNA, 19 nt, Artificial Sequence
  Description of Artificial Sequence: Synthetic oligonucleotide
cucggcguccuucgagggg

SEQ ID NO: 1546483 - RNA, 19 nt, Artificial Sequence
  Description of Artificial Sequence: Synthetic oligonucleotide
cacuaacagccacacuguc

SEQ ID NO: 1546484 - RNA, 19 nt, Artificial Sequence
  Description of Artificial Sequence: Synthetic oligonucleotide
uccugccaguccccauccg

SEQ ID NO: 1546485 - RNA, 19 nt, Artificial Sequence
  Description of Artificial Sequence: Synthetic oligonucleotide
agggaagcgcuuccacugu

SEQ ID NO: 1546486 - RNA, 19 nt, Artificial Sequence
  Description of Artificial Sequence: Synthetic oligonucleotide
ggagacgaugauggaaugc

SEQ ID NO: 1546487 - RNA, 19 nt, Artificial Sequence
  Description of Artificial Sequence: Synthetic oligonucleotide
caggagacgaugauggaau

SEQ ID NO: 1546488 - RNA, 19 nt, Artificial Sequence
  Description of Artificial Sequence: Synthetic oligonucleotide
auggauuagugaagucgug

SEQ ID NO: 1546489 - RNA, 19 nt, Artificial Sequence
  Description of Artificial Sequence: Synthetic oligonucleotide
caagagugccauagcccuc

SEQ ID NO: 1546490 - RNA, 19 nt, Artificial Sequence
  Description of Artificial Sequence: Synthetic oligonucleotide
augggccgcacggucgccc

SEQ ID NO: 1546491 - RNA, 19 nt, Artificial Sequence
  Description of Artificial Sequence: Synthetic oligonucleotide
guaggacacagaacuuuca

SEQ ID NO: 1546492 - RNA, 19 nt, Artificial Sequence
  Description of Artificial Sequence: Synthetic oligonucleotide
ggggacucggcguccuucg

SEQ ID NO: 1546493 - RNA, 19 nt, Artificial Sequence
  Description of Artificial Sequence: Synthetic oligonucleotide
uggguccggugauuccugc

SEQ ID NO: 1546494 - RNA, 19 nt, Artificial Sequence
  Description of Artificial Sequence: Synthetic oligonucleotide
uuuucucguaagggaugac

SEQ ID NO: 1546495 - RNA, 19 nt, Artificial Sequence
  Description of Artificial Sequence: Synthetic oligonucleotide
cauauccaacugcucccuc

SEQ ID NO: 1546496 - RNA, 19 nt, Artificial Sequence
  Description of Artificial Sequence: Synthetic oligonucleotide
ccagaauucaagagugcca

SEQ ID NO: 1546497 - RNA, 19 nt, Artificial Sequence
  Description of Artificial Sequence: Synthetic oligonucleotide
gcaagcuaucacucauccc

SEQ ID NO: 1546498 - RNA, 19 nt, Artificial Sequence
  Description of Artificial Sequence: Synthetic oligonucleotide
gggcauuccaaaucucguc

SEQ ID NO: 1546499 - RNA, 19 nt, Artificial Sequence
  Description of Artificial Sequence: Synthetic oligonucleotide
cuccgugaugggccgcacg

SEQ ID NO: 1546500 - RNA, 19 nt, Artificial Sequence
  Description of Artificial Sequence: Synthetic oligonucleotide
ggugcucuaauacaaugau

SEQ ID NO: 1546501 - RNA, 19 nt, Artificial Sequence
  Description of Artificial Sequence: Synthetic oligonucleotide
gagcaaaugcaaagcccuc

SEQ ID NO: 1546502 - RNA, 19 nt, Artificial Sequence
  Description of Artificial Sequence: Synthetic oligonucleotide
ccucucggugcucuaauac

SEQ ID NO: 1546503 - RNA, 19 nt, Artificial Sequence
  Description of Artificial Sequence: Synthetic oligonucleotide
cagaauucaagagugccau

SEQ ID NO: 1546504 - RNA, 19 nt, Artificial Sequence
  Description of Artificial Sequence: Synthetic oligonucleotide
ucauggcacgcagaauuuu

SEQ ID NO: 1546505 - RNA, 19 nt, Artificial Sequence
  Description of Artificial Sequence: Synthetic oligonucleotide
gcucuaauacaaugaugga

SEQ ID NO: 1546506 - RNA, 19 nt, Artificial Sequence
  Description of Artificial Sequence: Synthetic oligonucleotide
ggacucggcguccuucgag

SEQ ID NO: 1546507 - RNA, 19 nt, Artificial Sequence
  Description of Artificial Sequence: Synthetic oligonucleotide
ucggggcucgcguuacagu

SEQ ID NO: 1546508 - RNA, 19 nt, Artificial Sequence
  Description of Artificial Sequence: Synthetic oligonucleotide
ccucguugacacaggagac

SEQ ID NO: 1546509 - RNA, 19 nt, Artificial Sequence
  Description of Artificial Sequence: Synthetic oligonucleotide
cuggguccggugauuccug

SEQ ID NO: 1546510 - RNA, 19 nt, Artificial Sequence
  Description of Artificial Sequence: Synthetic oligonucleotide
acagacggugggccauucu

SEQ ID NO: 1546511 - RNA, 19 nt, Artificial Sequence
  Description of Artificial Sequence: Synthetic oligonucleotide
ggauuagugaagucgugau

SEQ ID NO: 1546512 - RNA, 19 nt, Artificial Sequence
  Description of Artificial Sequence: Synthetic oligonucleotide
aucgguuaacaagcuugga

SEQ ID NO: 1546513 - RNA, 19 nt, Artificial Sequence
  Description of Artificial Sequence: Synthetic oligonucleotide
cacugucaauuuuccaaaa

SEQ ID NO: 1546514 - RNA, 19 nt, Artificial Sequence
  Description of Artificial Sequence: Synthetic oligonucleotide
uucagacaccgagagccuu

SEQ ID NO: 1546515 - RNA, 19 nt, Artificial Sequence
  Description of Artificial Sequence: Synthetic oligonucleotide
ccagucuacaggcaugaca

SEQ ID NO: 1546516 - RNA, 19 nt, Artificial Sequence
  Description of Artificial Sequence: Synthetic oligonucleotide
ucucguccccuugcaggag

SEQ ID NO: 1546517 - RNA, 19 nt, Artificial Sequence
  Description of Artificial Sequence: Synthetic oligonucleotide
cagagugacacugcaggaa

SEQ ID NO: 1546518 - RNA, 19 nt, Artificial Sequence
  Description of Artificial Sequence: Synthetic oligonucleotide
ucgacagacggugggccau

SEQ ID NO: 1546519 - RNA, 19 nt, Artificial Sequence
  Description of Artificial Sequence: Synthetic oligonucleotide
cucggggcucgcguuacag

SEQ ID NO: 1546520 - RNA, 19 nt, Artificial Sequence
  Description of Artificial Sequence: Synthetic oligonucleotide
augggacgacuuccagucu

SEQ ID NO: 1546521 - RNA, 19 nt, Artificial Sequence
  Description of Artificial Sequence: Synthetic oligonucleotide
ccaaaagcagggacucaug

SEQ ID NO: 1546522 - RNA, 19 nt, Artificial Sequence
  Description of Artificial Sequence: Synthetic oligonucleotide
guuaacaagcuuggaacuu

SEQ ID NO: 1546523 - RNA, 19 nt, Artificial Sequence
  Description of Artificial Sequence: Synthetic oligonucleotide
ugcuccgugaugggccgca

SEQ ID NO: 1546524 - RNA, 19 nt, Artificial Sequence
  Description of Artificial Sequence: Synthetic oligonucleotide
caauaaccuggucugcggu

SEQ ID NO: 1546525 - RNA, 19 nt, Artificial Sequence
  Description of Artificial Sequence: Synthetic oligonucleotide
gggcuccucguugacacag

SEQ ID NO: 1546526 - RNA, 19 nt, Artificial Sequence
  Description of Artificial Sequence: Synthetic oligonucleotide
gcaaagcccucguauggga

SEQ ID NO: 1546527 - RNA, 19 nt, Artificial Sequence
  Description of Artificial Sequence: Synthetic oligonucleotide
gagagccggucagacugug

SEQ ID NO: 1546528 - RNA, 19 nt, Artificial Sequence
  Description of Artificial Sequence: Synthetic oligonucleotide
ggacucaugacagccaacu

SEQ ID NO: 1546529 - RNA, 19 nt, Artificial Sequence
  Description of Artificial Sequence: Synthetic oligonucleotide
cuccuggaacucauagaaa

SEQ ID NO: 1546530 - RNA, 19 nt, Artificial Sequence
  Description of Artificial Sequence: Synthetic oligonucleotide
accuaucuccagaauucaa

SEQ ID NO: 1546531 - RNA, 19 nt, Artificial Sequence
  Description of Artificial Sequence: Synthetic oligonucleotide
caaaugcaaagcccucgua

SEQ ID NO: 1546532 - RNA, 19 nt, Artificial Sequence
  Description of Artificial Sequence: Synthetic oligonucleotide
gggaagcugucgccgcccg

SEQ ID NO: 1546533 - RNA, 19 nt, Artificial Sequence
  Description of Artificial Sequence: Synthetic oligonucleotide
cugugagcugcucuaugua

SEQ ID NO: 1546534 - RNA, 19 nt, Artificial Sequence
  Description of Artificial Sequence: Synthetic oligonucleotide
gacuuccagucuacaggca

SEQ ID NO: 1546535 - RNA, 19 nt, Artificial Sequence
  Description of Artificial Sequence: Synthetic oligonucleotide
cacgccuggaguccacaga

SEQ ID NO: 1546536 - RNA, 19 nt, Artificial Sequence
  Description of Artificial Sequence: Synthetic oligonucleotide
agacggugggccauucuuu

SEQ ID NO: 1546537 - RNA, 19 nt, Artificial Sequence
  Description of Artificial Sequence: Synthetic oligonucleotide
cucgcguuacaguucuccu

SEQ ID NO: 1546538 - RNA, 19 nt, Artificial Sequence
  Description of Artificial Sequence: Synthetic oligonucleotide
ccucguaugggacgacuuc

SEQ ID NO: 1546539 - RNA, 19 nt, Artificial Sequence
  Description of Artificial Sequence: Synthetic oligonucleotide
gccaucgcgcccgcuaccg

SEQ ID NO: 1546540 - RNA, 19 nt, Artificial Sequence
  Description of Artificial Sequence: Synthetic oligonucleotide
uucucucguuccucccauu

SEQ ID NO: 1546541 - RNA, 19 nt, Artificial Sequence
  Description of Artificial Sequence: Synthetic oligonucleotide
ggccgggaagcugucgccg

SEQ ID NO: 1546542 - RNA, 19 nt, Artificial Sequence
  Description of Artificial Sequence: Synthetic oligonucleotide
cugccgguucugcacuuca

SEQ ID NO: 1546543 - RNA, 19 nt, Artificial Sequence
  Description of Artificial Sequence: Synthetic oligonucleotide
cggugcucuaauacaauga

SEQ ID NO: 1546544 - RNA, 19 nt, Artificial Sequence
  Description of Artificial Sequence: Synthetic oligonucleotide
ggaagcgcuuccacuguga

SEQ ID NO: 1546545 - RNA, 19 nt, Artificial Sequence
  Description of Artificial Sequence: Synthetic oligonucleotide
gaugggccgcacggucgcc

SEQ ID NO: 1546546 - RNA, 19 nt, Artificial Sequence
  Description of Artificial Sequence: Synthetic oligonucleotide
ccacagaaagggaagcgcu

SEQ ID NO: 1546547 - RNA, 19 nt, Artificial Sequence
  Description of Artificial Sequence: Synthetic oligonucleotide
ggcuccucguugacacagg

SEQ ID NO: 1546548 - RNA, 19 nt, Artificial Sequence
  Description of Artificial Sequence: Synthetic oligonucleotide
cagacggugggccauucuu

SEQ ID NO: 1546549 - RNA, 19 nt, Artificial Sequence
  Description of Artificial Sequence: Synthetic oligonucleotide
agcccucguaugggacgac

SEQ ID NO: 1546550 - RNA, 19 nt, Artificial Sequence
  Description of Artificial Sequence: Synthetic oligonucleotide
agagccggucagacugugu

SEQ ID NO: 1546551 - RNA, 19 nt, Artificial Sequence
  Description of Artificial Sequence: Synthetic oligonucleotide
ggaagcugucgccgcccgc

SEQ ID NO: 1546552 - RNA, 19 nt, Artificial Sequence
  Description of Artificial Sequence: Synthetic oligonucleotide
gucgcccgcggggacucgg

SEQ ID NO: 1546553 - RNA, 19 nt, Artificial Sequence
  Description of Artificial Sequence: Synthetic oligonucleotide
gccaguccccauccgccgc

SEQ ID NO: 1546554 - RNA, 19 nt, Artificial Sequence
  Description of Artificial Sequence: Synthetic oligonucleotide
cuucucucguuccucccau

SEQ ID NO: 1546555 - RNA, 19 nt, Artificial Sequence
  Description of Artificial Sequence: Synthetic oligonucleotide
cucggugcucuaauacaau

SEQ ID NO: 1546556 - RNA, 19 nt, Artificial Sequence
  Description of Artificial Sequence: Synthetic oligonucleotide
cgugaucaaguaacacuga

SEQ ID NO: 1546557 - RNA, 19 nt, Artificial Sequence
  Description of Artificial Sequence: Synthetic oligonucleotide
cgcacggucgcccgcgggg

SEQ ID NO: 1546558 - RNA, 19 nt, Artificial Sequence
  Description of Artificial Sequence: Synthetic oligonucleotide
gggcucgcguuacaguucu

SEQ ID NO: 1546559 - RNA, 19 nt, Artificial Sequence
  Description of Artificial Sequence: Synthetic oligonucleotide
ggguccggugauuccugca

SEQ ID NO: 1546560 - RNA, 19 nt, Artificial Sequence
  Description of Artificial Sequence: Synthetic oligonucleotide
guacuccuugauggcuguc

SEQ ID NO: 1546561 - RNA, 19 nt, Artificial Sequence
  Description of Artificial Sequence: Synthetic oligonucleotide
cacggucgcccgcggggac

SEQ ID NO: 1546562 - RNA, 19 nt, Artificial Sequence
  Description of Artificial Sequence: Synthetic oligonucleotide
ggccgcacggucgcccgcg

SEQ ID NO: 1546563 - RNA, 19 nt, Artificial Sequence
  Description of Artificial Sequence: Synthetic oligonucleotide
gcucuauguaggacacaga

SEQ ID NO: 1546564 - RNA, 19 nt, Artificial Sequence
  Description of Artificial Sequence: Synthetic oligonucleotide
caacuuccagagugacacu

SEQ ID NO: 1546565 - RNA, 19 nt, Artificial Sequence
  Description of Artificial Sequence: Synthetic oligonucleotide
gcauauccaacugcucccu

SEQ ID NO: 1546566 - RNA, 19 nt, Artificial Sequence
  Description of Artificial Sequence: Synthetic oligonucleotide
cugcucuauguaggacaca

SEQ ID NO: 1546567 - RNA, 19 nt, Artificial Sequence
  Description of Artificial Sequence: Synthetic oligonucleotide
ggucugcggugaagagggg

SEQ ID NO: 1546568 - RNA, 19 nt, Artificial Sequence
  Description of Artificial Sequence: Synthetic oligonucleotide
ggccaaggccgggaagcug

SEQ ID NO: 1546569 - RNA, 19 nt, Artificial Sequence
  Description of Artificial Sequence: Synthetic oligonucleotide
ggggcucgcguuacaguuc

SEQ ID NO: 1546570 - RNA, 19 nt, Artificial Sequence
  Description of Artificial Sequence: Synthetic oligonucleotide
ccaucgcgcccgcuaccgg

SEQ ID NO: 1546571 - RNA, 19 nt, Artificial Sequence
  Description of Artificial Sequence: Synthetic oligonucleotide
gaaucuccugggagagcau

SEQ ID NO: 1546572 - RNA, 19 nt, Artificial Sequence
  Description of Artificial Sequence: Synthetic oligonucleotide
ggacgacuuccagucuaca

SEQ ID NO: 1546573 - RNA, 19 nt, Artificial Sequence
  Description of Artificial Sequence: Synthetic oligonucleotide
ggcguccuucgaggggcgg

SEQ ID NO: 1546574 - RNA, 19 nt, Artificial Sequence
  Description of Artificial Sequence: Synthetic oligonucleotide
gggacucggcguccuucga

SEQ ID NO: 1546575 - RNA, 19 nt, Artificial Sequence
  Description of Artificial Sequence: Synthetic oligonucleotide
gugcuccgugaugggccgc

SEQ ID NO: 1546576 - RNA, 19 nt, Artificial Sequence
  Description of Artificial Sequence: Synthetic oligonucleotide
cguaagggaugacugucgu

SEQ ID NO: 1546577 - RNA, 19 nt, Artificial Sequence
  Description of Artificial Sequence: Synthetic oligonucleotide
gccgcacggucgcccgcgg

SEQ ID NO: 1546578 - RNA, 19 nt, Artificial Sequence
  Description of Artificial Sequence: Synthetic oligonucleotide
gcguccuucgaggggcgga

SEQ ID NO: 1546579 - RNA, 19 nt, Artificial Sequence
  Description of Artificial Sequence: Synthetic oligonucleotide
gcauguggcuucucucguu

SEQ ID NO: 1546580 - RNA, 19 nt, Artificial Sequence
  Description of Artificial Sequence: Synthetic oligonucleotide
cgaucucuucuagcaguuc

SEQ ID NO: 1546581 - RNA, 19 nt, Artificial Sequence
  Description of Artificial Sequence: Synthetic oligonucleotide
ccgggccggcuccuggaac

SEQ ID NO: 1546582 - RNA, 19 nt, Artificial Sequence
  Description of Artificial Sequence: Synthetic oligonucleotide
ccgcacggucgcccgcggg

SEQ ID NO: 1546583 - RNA, 19 nt, Artificial Sequence
  Description of Artificial Sequence: Synthetic oligonucleotide
gcacggucgcccgcgggga

SEQ ID NO: 1546584 - RNA, 19 nt, Artificial Sequence
  Description of Artificial Sequence: Synthetic oligonucleotide
cagacaccgagagccuuuu

SEQ ID NO: 1546585 - RNA, 19 nt, Artificial Sequence
  Description of Artificial Sequence: Synthetic oligonucleotide
ggagagccggucagacugu

SEQ ID NO: 1546586 - RNA, 19 nt, Artificial Sequence
  Description of Artificial Sequence: Synthetic oligonucleotide
gggccgcacggucgcccgc

SEQ ID NO: 1546587 - RNA, 19 nt, Artificial Sequence
  Description of Artificial Sequence: Synthetic oligonucleotide
cccucucggugcucuaaua

SEQ ID NO: 1546588 - RNA, 19 nt, Artificial Sequence
  Description of Artificial Sequence: Synthetic oligonucleotide
ccccuugcaggaggcugug

SEQ ID NO: 1546589 - RNA, 19 nt, Artificial Sequence
  Description of Artificial Sequence: Synthetic oligonucleotide
cggcguccuucgaggggcg

SEQ ID NO: 1546590 - RNA, 19 nt, Artificial Sequence
  Description of Artificial Sequence: Synthetic oligonucleotide
ccccauccgccgccaucgc

SEQ ID NO: 1546591 - RNA, 19 nt, Artificial Sequence
  Description of Artificial Sequence: Synthetic oligonucleotide
gggccggcuccuggaacuc

SEQ ID NO: 1546592 - RNA, 19 nt, Artificial Sequence
  Description of Artificial Sequence: Synthetic oligonucleotide
ggucgcccgcggggacucg

SEQ ID NO: 1546593 - RNA, 19 nt, Artificial Sequence
  Description of Artificial Sequence: Synthetic oligonucleotide
acgcuccgggccggcuccu

SEQ ID NO: 1546594 - RNA, 19 nt, Artificial Sequence
  Description of Artificial Sequence: Synthetic oligonucleotide
gcccucucggugcucuaau

SEQ ID NO: 1546595 - RNA, 19 nt, Artificial Sequence
  Description of Artificial Sequence: Synthetic oligonucleotide
cccucguaugggacgacuu

SEQ ID NO: 1546596 - RNA, 19 nt, Artificial Sequence
  Description of Artificial Sequence: Synthetic oligonucleotide
gcccucguaugggacgacu

SEQ ID NO: 1546597 - RNA, 19 nt, Artificial Sequence
  Description of Artificial Sequence: Synthetic oligonucleotide
cggggcucgcguuacaguu

SEQ ID NO: 1546598 - RNA, 19 nt, Artificial Sequence
  Description of Artificial Sequence: Synthetic oligonucleotide
cagcuccggccucggggcu

SEQ ID NO: 1546599 - RNA, 19 nt, Artificial Sequence
  Description of Artificial Sequence: Synthetic oligonucleotide
cgggccggcuccuggaacu

SEQ ID NO: 1546600 - RNA, 19 nt, Artificial Sequence
  Description of Artificial Sequence: Synthetic oligonucleotide
cguccuucgaggggcggaa

SEQ ID NO: 1546601 - RNA, 19 nt, Artificial Sequence
  Description of Artificial Sequence: Synthetic oligonucleotide
cggugaagaggggcuccuc

SEQ ID NO: 1546602 - RNA, 19 nt, Artificial Sequence
  Description of Artificial Sequence: Synthetic oligonucleotide
ccgcggggacucggcgucc

SEQ ID NO: 1546603 - RNA, 19 nt, Artificial Sequence
  Description of Artificial Sequence: Synthetic oligonucleotide
cuccggccucggggcucgc

SEQ ID NO: 1546604 - RNA, 19 nt, Artificial Sequence
  Description of Artificial Sequence: Synthetic oligonucleotide
cggucgcccgcggggacuc

SEQ ID NO: 1546605 - RNA, 19 nt, Artificial Sequence
  Description of Artificial Sequence: Synthetic oligonucleotide
ccggugauuccugcaucau

SEQ ID NO: 1546606 - RNA, 19 nt, Artificial Sequence
  Description of Artificial Sequence: Synthetic oligonucleotide
ccgugaugggccgcacggu

SEQ ID NO: 1546607 - RNA, 19 nt, Artificial Sequence
  Description of Artificial Sequence: Synthetic oligonucleotide
cgacagacggugggccauu

SEQ ID NO: 1546608 - RNA, 19 nt, Artificial Sequence
  Description of Artificial Sequence: Synthetic oligonucleotide
cgcggggacucggcguccu

SEQ ID NO: 1546609 - RNA, 19 nt, Artificial Sequence
  Description of Artificial Sequence: Synthetic oligonucleotide
aauguuauucauuucccac

SEQ ID NO: 1546610 - RNA, 19 nt, Artificial Sequence
  Description of Artificial Sequence: Synthetic oligonucleotide
uuaaaugugaggaacugcc

SEQ ID NO: 1546611 - RNA, 19 nt, Artificial Sequence
  Description of Artificial Sequence: Synthetic oligonucleotide
gaugaaggacaucugaucg

SEQ ID NO: 1546612 - RNA, 19 nt, Artificial Sequence
  Description of Artificial Sequence: Synthetic oligonucleotide
uacuccuucaacaugaggc

SEQ ID NO: 1546613 - RNA, 19 nt, Artificial Sequence
  Description of Artificial Sequence: Synthetic oligonucleotide
aauuaguaauaacgguugc

SEQ ID NO: 1546614 - RNA, 19 nt, Artificial Sequence
  Description of Artificial Sequence: Synthetic oligonucleotide
aacaucuacagauuuaagu

SEQ ID NO: 1546615 - RNA, 19 nt, Artificial Sequence
  Description of Artificial Sequence: Synthetic oligonucleotide
accaggaucauagagaccc

SEQ ID NO: 1546616 - RNA, 19 nt, Artificial Sequence
  Description of Artificial Sequence: Synthetic oligonucleotide
uguguaaucaugacuuugg

SEQ ID NO: 1546617 - RNA, 19 nt, Artificial Sequence
  Description of Artificial Sequence: Synthetic oligonucleotide
uagauuauugguuuugugc

SEQ ID NO: 1546618 - RNA, 19 nt, Artificial Sequence
  Description of Artificial Sequence: Synthetic oligonucleotide
guaaucaugacuuuggauc

SEQ ID NO: 1546619 - RNA, 19 nt, Artificial Sequence
  Description of Artificial Sequence: Synthetic oligonucleotide
acucauuuagguuacagug

SEQ ID NO: 1546620 - RNA, 19 nt, Artificial Sequence
  Description of Artificial Sequence: Synthetic oligonucleotide
aauaauuuaccaccgcacu

SEQ ID NO: 1546621 - RNA, 19 nt, Artificial Sequence
  Description of Artificial Sequence: Synthetic oligonucleotide
ucuauaaucggcacagugc

SEQ ID NO: 1546622 - RNA, 19 nt, Artificial Sequence
  Description of Artificial Sequence: Synthetic oligonucleotide
uuauuggagucacaguugg

SEQ ID NO: 1546623 - RNA, 19 nt, Artificial Sequence
  Description of Artificial Sequence: Synthetic oligonucleotide
uuuaccaccgcacugccag

SEQ ID NO: 1546624 - RNA, 19 nt, Artificial Sequence
  Description of Artificial Sequence: Synthetic oligonucleotide
aaauaauaauuuaccaccg

SEQ ID NO: 1546625 - RNA, 19 nt, Artificial Sequence
  Description of Artificial Sequence: Synthetic oligonucleotide
ugauuuacuucauugauuc

SEQ ID NO: 1546626 - RNA, 19 nt, Artificial Sequence
  Description of Artificial Sequence: Synthetic oligonucleotide
aucugaucgaucuaagcac

SEQ ID NO: 1546627 - RNA, 19 nt, Artificial Sequence
  Description of Artificial Sequence: Synthetic oligonucleotide
auuuacuucauugauucgg

SEQ ID NO: 1546628 - RNA, 19 nt, Artificial Sequence
  Description of Artificial Sequence: Synthetic oligonucleotide
aguaauaacgguugcagca

SEQ ID NO: 1546629 - RNA, 19 nt, Artificial Sequence
  Description of Artificial Sequence: Synthetic oligonucleotide
auugauucggaaaagcugg

SEQ ID NO: 1546630 - RNA, 19 nt, Artificial Sequence
  Description of Artificial Sequence: Synthetic oligonucleotide
agaacucucucucaauggc

SEQ ID NO: 1546631 - RNA, 19 nt, Artificial Sequence
  Description of Artificial Sequence: Synthetic oligonucleotide
uuaguaauaacgguugcag

SEQ ID NO: 1546632 - RNA, 19 nt, Artificial Sequence
  Description of Artificial Sequence: Synthetic oligonucleotide
aaggacaucugaucgaucu

SEQ ID NO: 1546633 - RNA, 19 nt, Artificial Sequence
  Description of Artificial Sequence: Synthetic oligonucleotide
agauaugggagcuacaagu

SEQ ID NO: 1546634 - RNA, 19 nt, Artificial Sequence
  Description of Artificial Sequence: Synthetic oligonucleotide
uuuaaguaaagcaguuuug

SEQ ID NO: 1546635 - RNA, 19 nt, Artificial Sequence
  Description of Artificial Sequence: Synthetic oligonucleotide
uguacuugucaguagguag

SEQ ID NO: 1546636 - RNA, 19 nt, Artificial Sequence
  Description of Artificial Sequence: Synthetic oligonucleotide
aacaugaggccaugguacc

SEQ ID NO: 1546637 - RNA, 19 nt, Artificial Sequence
  Description of Artificial Sequence: Synthetic oligonucleotide
gagaagacccaacauaaag

SEQ ID NO: 1546638 - RNA, 19 nt, Artificial Sequence
  Description of Artificial Sequence: Synthetic oligonucleotide
uccaacucgagaacaaggg

SEQ ID NO: 1546639 - RNA, 19 nt, Artificial Sequence
  Description of Artificial Sequence: Synthetic oligonucleotide
agaccaggaucauagagac

SEQ ID NO: 1546640 - RNA, 19 nt, Artificial Sequence
  Description of Artificial Sequence: Synthetic oligonucleotide
ucauuuagguuacagugug

SEQ ID NO: 1546641 - RNA, 19 nt, Artificial Sequence
  Description of Artificial Sequence: Synthetic oligonucleotide
aucaugauaggugaaaguc

SEQ ID NO: 1546642 - RNA, 19 nt, Artificial Sequence
  Description of Artificial Sequence: Synthetic oligonucleotide
auaauaauuuaccaccgca

SEQ ID NO: 1546643 - RNA, 19 nt, Artificial Sequence
  Description of Artificial Sequence: Synthetic oligonucleotide
uggcaaauaauccaccagc

SEQ ID NO: 1546644 - RNA, 19 nt, Artificial Sequence
  Description of Artificial Sequence: Synthetic oligonucleotide
uaauaauuuaccaccgcac

SEQ ID NO: 1546645 - RNA, 19 nt, Artificial Sequence
  Description of Artificial Sequence: Synthetic oligonucleotide
aaugguucuguccuuagau

SEQ ID NO: 1546646 - RNA, 19 nt, Artificial Sequence
  Description of Artificial Sequence: Synthetic oligonucleotide
ucuuguaugagauuucaaa

SEQ ID NO: 1546647 - RNA, 19 nt, Artificial Sequence
  Description of Artificial Sequence: Synthetic oligonucleotide
uaaucaugacuuuggaucc

SEQ ID NO: 1546648 - RNA, 19 nt, Artificial Sequence
  Description of Artificial Sequence: Synthetic oligonucleotide
gaauuaguaauaacgguug

SEQ ID NO: 1546649 - RNA, 19 nt, Artificial Sequence
  Description of Artificial Sequence: Synthetic oligonucleotide
uucaacaaacccuccauug

SEQ ID NO: 1546650 - RNA, 19 nt, Artificial Sequence
  Description of Artificial Sequence: Synthetic oligonucleotide
acauuggucauauugcaug

SEQ ID NO: 1546651 - RNA, 19 nt, Artificial Sequence
  Description of Artificial Sequence: Synthetic oligonucleotide
uccucgguuaggcauaggg

SEQ ID NO: 1546652 - RNA, 19 nt, Artificial Sequence
  Description of Artificial Sequence: Synthetic oligonucleotide
uuguaugagauuucaaagu

SEQ ID NO: 1546653 - RNA, 19 nt, Artificial Sequence
  Description of Artificial Sequence: Synthetic oligonucleotide
cuaucaaugcaguaugcag

SEQ ID NO: 1546654 - RNA, 19 nt, Artificial Sequence
  Description of Artificial Sequence: Synthetic oligonucleotide
acaucuacagauuuaagua

SEQ ID NO: 1546655 - RNA, 19 nt, Artificial Sequence
  Description of Artificial Sequence: Synthetic oligonucleotide
gaucuaagcacuuuccuga

SEQ ID NO: 1546656 - RNA, 19 nt, Artificial Sequence
  Description of Artificial Sequence: Synthetic oligonucleotide
uccuaguucaacaaacccu

SEQ ID NO: 1546657 - RNA, 19 nt, Artificial Sequence
  Description of Artificial Sequence: Synthetic oligonucleotide
ucauugauucggaaaagcu

SEQ ID NO: 1546658 - RNA, 19 nt, Artificial Sequence
  Description of Artificial Sequence: Synthetic oligonucleotide
uuaaacacugugaauguua

SEQ ID NO: 1546659 - RNA, 19 nt, Artificial Sequence
  Description of Artificial Sequence: Synthetic oligonucleotide
uaauccauugccuccucgg

SEQ ID NO: 1546660 - RNA, 19 nt, Artificial Sequence
  Description of Artificial Sequence: Synthetic oligonucleotide
uacaaguggagcauaccag

SEQ ID NO: 1546661 - RNA, 19 nt, Artificial Sequence
  Description of Artificial Sequence: Synthetic oligonucleotide
gaagaacucucucucaaug

SEQ ID NO: 1546662 - RNA, 19 nt, Artificial Sequence
  Description of Artificial Sequence: Synthetic oligonucleotide
aggcucuugaaguacugcc

SEQ ID NO: 1546663 - RNA, 19 nt, Artificial Sequence
  Description of Artificial Sequence: Synthetic oligonucleotide
uuaagagucggagaagacc

SEQ ID NO: 1546664 - RNA, 19 nt, Artificial Sequence
  Description of Artificial Sequence: Synthetic oligonucleotide
acaucugaucgaucuaagc

SEQ ID NO: 1546665 - RNA, 19 nt, Artificial Sequence
  Description of Artificial Sequence: Synthetic oligonucleotide
ugagucauuuuauuggagu

SEQ ID NO: 1546666 - RNA, 19 nt, Artificial Sequence
  Description of Artificial Sequence: Synthetic oligonucleotide
gaaucugucauccccagga

SEQ ID NO: 1546667 - RNA, 19 nt, Artificial Sequence
  Description of Artificial Sequence: Synthetic oligonucleotide
ucaugauaggugaaagucu

SEQ ID NO: 1546668 - RNA, 19 nt, Artificial Sequence
  Description of Artificial Sequence: Synthetic oligonucleotide
aacgguugcagcagguucc

SEQ ID NO: 1546669 - RNA, 19 nt, Artificial Sequence
  Description of Artificial Sequence: Synthetic oligonucleotide
caugauaggugaaagucug

SEQ ID NO: 1546670 - RNA, 19 nt, Artificial Sequence
  Description of Artificial Sequence: Synthetic oligonucleotide
acaucuauaaucggcacag

SEQ ID NO: 1546671 - RNA, 19 nt, Artificial Sequence
  Description of Artificial Sequence: Synthetic oligonucleotide
guaacugcagaugauaaug

SEQ ID NO: 1546672 - RNA, 19 nt, Artificial Sequence
  Description of Artificial Sequence: Synthetic oligonucleotide
aaucacaguuuaucaaugu

SEQ ID NO: 1546673 - RNA, 19 nt, Artificial Sequence
  Description of Artificial Sequence: Synthetic oligonucleotide
aauuucauauguguugcca

SEQ ID NO: 1546674 - RNA, 19 nt, Artificial Sequence
  Description of Artificial Sequence: Synthetic oligonucleotide
ugggguauaauuucauaug

SEQ ID NO: 1546675 - RNA, 19 nt, Artificial Sequence
  Description of Artificial Sequence: Synthetic oligonucleotide
gaagacuugaugaaggaca

SEQ ID NO: 1546676 - RNA, 19 nt, Artificial Sequence
  Description of Artificial Sequence: Synthetic oligonucleotide
auaauuuaccaccgcacug

SEQ ID NO: 1546677 - RNA, 19 nt, Artificial Sequence
  Description of Artificial Sequence: Synthetic oligonucleotide
augauaauguuauuguaaa

SEQ ID NO: 1546678 - RNA, 19 nt, Artificial Sequence
  Description of Artificial Sequence: Synthetic oligonucleotide
ucugaucagagguuccagg

SEQ ID NO: 1546679 - RNA, 19 nt, Artificial Sequence
  Description of Artificial Sequence: Synthetic oligonucleotide
guuaacugccaccucacag

SEQ ID NO: 1546680 - RNA, 19 nt, Artificial Sequence
  Description of Artificial Sequence: Synthetic oligonucleotide
gaagggaugugagugaacc

SEQ ID NO: 1546681 - RNA, 19 nt, Artificial Sequence
  Description of Artificial Sequence: Synthetic oligonucleotide
uuaggcauaggguuauuga

SEQ ID NO: 1546682 - RNA, 19 nt, Artificial Sequence
  Description of Artificial Sequence: Synthetic oligonucleotide
aucuauaaucggcacagug

SEQ ID NO: 1546683 - RNA, 19 nt, Artificial Sequence
  Description of Artificial Sequence: Synthetic oligonucleotide
caacaugaggccaugguac

SEQ ID NO: 1546684 - RNA, 19 nt, Artificial Sequence
  Description of Artificial Sequence: Synthetic oligonucleotide
aguuuucgcaccccaaauc

SEQ ID NO: 1546685 - RNA, 19 nt, Artificial Sequence
  Description of Artificial Sequence: Synthetic oligonucleotide
uacuccaaucccaugcucc

SEQ ID NO: 1546686 - RNA, 19 nt, Artificial Sequence
  Description of Artificial Sequence: Synthetic oligonucleotide
cuaauagacucuaagucca

SEQ ID NO: 1546687 - RNA, 19 nt, Artificial Sequence
  Description of Artificial Sequence: Synthetic oligonucleotide
uugggguauaauuucauau

SEQ ID NO: 1546688 - RNA, 19 nt, Artificial Sequence
  Description of Artificial Sequence: Synthetic oligonucleotide
uaauaacgguugcagcagg

SEQ ID NO: 1546689 - RNA, 19 nt, Artificial Sequence
  Description of Artificial Sequence: Synthetic oligonucleotide
caguaugcagucucgaggc

SEQ ID NO: 1546690 - RNA, 19 nt, Artificial Sequence
  Description of Artificial Sequence: Synthetic oligonucleotide
caacucgagaacaagggac

SEQ ID NO: 1546691 - RNA, 19 nt, Artificial Sequence
  Description of Artificial Sequence: Synthetic oligonucleotide
ugugagugaaccugugcag

SEQ ID NO: 1546692 - RNA, 19 nt, Artificial Sequence
  Description of Artificial Sequence: Synthetic oligonucleotide
uuuucaguccucuguaagu

SEQ ID NO: 1546693 - RNA, 19 nt, Artificial Sequence
  Description of Artificial Sequence: Synthetic oligonucleotide
ugauaggugaaagucugag

SEQ ID NO: 1546694 - RNA, 19 nt, Artificial Sequence
  Description of Artificial Sequence: Synthetic oligonucleotide
auagagacccaguucgaag

SEQ ID NO: 1546695 - RNA, 19 nt, Artificial Sequence
  Description of Artificial Sequence: Synthetic oligonucleotide
augugagugaaccugugca

SEQ ID NO: 1546696 - RNA, 19 nt, Artificial Sequence
  Description of Artificial Sequence: Synthetic oligonucleotide
auguguugccauuuaugac

SEQ ID NO: 1546697 - RNA, 19 nt, Artificial Sequence
  Description of Artificial Sequence: Synthetic oligonucleotide
uuagauaugggagcuacaa

SEQ ID NO: 1546698 - RNA, 19 nt, Artificial Sequence
  Description of Artificial Sequence: Synthetic oligonucleotide
auguuauucauuucccacu

SEQ ID NO: 1546699 - RNA, 19 nt, Artificial Sequence
  Description of Artificial Sequence: Synthetic oligonucleotide
ucugaucgaucuaagcacu

SEQ ID NO: 1546700 - RNA, 19 nt, Artificial Sequence
  Description of Artificial Sequence: Synthetic oligonucleotide
uagauaugggagcuacaag

SEQ ID NO: 1546701 - RNA, 19 nt, Artificial Sequence
  Description of Artificial Sequence: Synthetic oligonucleotide
ucaacaugaggccauggua

SEQ ID NO: 1546702 - RNA, 19 nt, Artificial Sequence
  Description of Artificial Sequence: Synthetic oligonucleotide
uuagguuacaguguguaau

SEQ ID NO: 1546703 - RNA, 19 nt, Artificial Sequence
  Description of Artificial Sequence: Synthetic oligonucleotide
auugccuccucgguuaggc

SEQ ID NO: 1546704 - RNA, 19 nt, Artificial Sequence
  Description of Artificial Sequence: Synthetic oligonucleotide
acaagggacaaauaauaau

SEQ ID NO: 1546705 - RNA, 19 nt, Artificial Sequence
  Description of Artificial Sequence: Synthetic oligonucleotide
uaggcauaggguuauugac

SEQ ID NO: 1546706 - RNA, 19 nt, Artificial Sequence
  Description of Artificial Sequence: Synthetic oligonucleotide
augcuaucaaugcaguaug

SEQ ID NO: 1546707 - RNA, 19 nt, Artificial Sequence
  Description of Artificial Sequence: Synthetic oligonucleotide
aauguccuucaaucugauc

SEQ ID NO: 1546708 - RNA, 19 nt, Artificial Sequence
  Description of Artificial Sequence: Synthetic oligonucleotide
uaguaauaacgguugcagc

SEQ ID NO: 1546709 - RNA, 19 nt, Artificial Sequence
  Description of Artificial Sequence: Synthetic oligonucleotide
cuauaaucggcacagugca

SEQ ID NO: 1546710 - RNA, 19 nt, Artificial Sequence
  Description of Artificial Sequence: Synthetic oligonucleotide
gguagauguguccaacucg

SEQ ID NO: 1546711 - RNA, 19 nt, Artificial Sequence
  Description of Artificial Sequence: Synthetic oligonucleotide
agaauuaguaauaacgguu

SEQ ID NO: 1546712 - RNA, 19 nt, Artificial Sequence
  Description of Artificial Sequence: Synthetic oligonucleotide
gauaugggagcuacaagug

SEQ ID NO: 1546713 - RNA, 19 nt, Artificial Sequence
  Description of Artificial Sequence: Synthetic oligonucleotide
ggacaaauaauaauuuacc

SEQ ID NO: 1546714 - RNA, 19 nt, Artificial Sequence
  Description of Artificial Sequence: Synthetic oligonucleotide
uuuccccaugcuaucaaug

SEQ ID NO: 1546715 - RNA, 19 nt, Artificial Sequence
  Description of Artificial Sequence: Synthetic oligonucleotide
caucugaucgaucuaagca

SEQ ID NO: 1546716 - RNA, 19 nt, Artificial Sequence
  Description of Artificial Sequence: Synthetic oligonucleotide
uuuugugcacucuucuuaa

SEQ ID NO: 1546717 - RNA, 19 nt, Artificial Sequence
  Description of Artificial Sequence: Synthetic oligonucleotide
uugugcacucuucuuaaac

SEQ ID NO: 1546718 - RNA, 19 nt, Artificial Sequence
  Description of Artificial Sequence: Synthetic oligonucleotide
gagucauuuuauuggaguc

SEQ ID NO: 1546719 - RNA, 19 nt, Artificial Sequence
  Description of Artificial Sequence: Synthetic oligonucleotide
accgauacgguucaguuuu

SEQ ID NO: 1546720 - RNA, 19 nt, Artificial Sequence
  Description of Artificial Sequence: Synthetic oligonucleotide
uauugcaugagcugauuua

SEQ ID NO: 1546721 - RNA, 19 nt, Artificial Sequence
  Description of Artificial Sequence: Synthetic oligonucleotide
gaauguuauucauuuccca

SEQ ID NO: 1546722 - RNA, 19 nt, Artificial Sequence
  Description of Artificial Sequence: Synthetic oligonucleotide
aagacgguagaugugucca

SEQ ID NO: 1546723 - RNA, 19 nt, Artificial Sequence
  Description of Artificial Sequence: Synthetic oligonucleotide
ucggagaagacccaacaua

SEQ ID NO: 1546724 - RNA, 19 nt, Artificial Sequence
  Description of Artificial Sequence: Synthetic oligonucleotide
agcauaccaguuaacugcc

SEQ ID NO: 1546725 - RNA, 19 nt, Artificial Sequence
  Description of Artificial Sequence: Synthetic oligonucleotide
aauccauugccuccucggu

SEQ ID NO: 1546726 - RNA, 19 nt, Artificial Sequence
  Description of Artificial Sequence: Synthetic oligonucleotide
aaaugguucuguccuuaga

SEQ ID NO: 1546727 - RNA, 19 nt, Artificial Sequence
  Description of Artificial Sequence: Synthetic oligonucleotide
aaucaugacuuuggauccg

SEQ ID NO: 1546728 - RNA, 19 nt, Artificial Sequence
  Description of Artificial Sequence: Synthetic oligonucleotide
ucgaucuaagcacuuuccu

SEQ ID NO: 1546729 - RNA, 19 nt, Artificial Sequence
  Description of Artificial Sequence: Synthetic oligonucleotide
auagcuggagaccgauacg

SEQ ID NO: 1546730 - RNA, 19 nt, Artificial Sequence
  Description of Artificial Sequence: Synthetic oligonucleotide
aaguuuucgcaccccaaau

SEQ ID NO: 1546731 - RNA, 19 nt, Artificial Sequence
  Description of Artificial Sequence: Synthetic oligonucleotide
ugaaucugucauccccagg

SEQ ID NO: 1546732 - RNA, 19 nt, Artificial Sequence
  Description of Artificial Sequence: Synthetic oligonucleotide
ugauaauguuauuguaaaa

SEQ ID NO: 1546733 - RNA, 19 nt, Artificial Sequence
  Description of Artificial Sequence: Synthetic oligonucleotide
aguaugcagucucgaggcc

SEQ ID NO: 1546734 - RNA, 19 nt, Artificial Sequence
  Description of Artificial Sequence: Synthetic oligonucleotide
augcuccucgggcauaccc

SEQ ID NO: 1546735 - RNA, 19 nt, Artificial Sequence
  Description of Artificial Sequence: Synthetic oligonucleotide
guaauaacgguugcagcag

SEQ ID NO: 1546736 - RNA, 19 nt, Artificial Sequence
  Description of Artificial Sequence: Synthetic oligonucleotide
agaugaagacuugaugaag

SEQ ID NO: 1546737 - RNA, 19 nt, Artificial Sequence
  Description of Artificial Sequence: Synthetic oligonucleotide
agacucuaaguccacuucu

SEQ ID NO: 1546738 - RNA, 19 nt, Artificial Sequence
  Description of Artificial Sequence: Synthetic oligonucleotide
gaucgaucuaagcacuuuc

SEQ ID NO: 1546739 - RNA, 19 nt, Artificial Sequence
  Description of Artificial Sequence: Synthetic oligonucleotide
uuuucgcaccccaaaucug

SEQ ID NO: 1546740 - RNA, 19 nt, Artificial Sequence
  Description of Artificial Sequence: Synthetic oligonucleotide
aguucaacaaacccuccau

SEQ ID NO: 1546741 - RNA, 19 nt, Artificial Sequence
  Description of Artificial Sequence: Synthetic oligonucleotide
ucgagaacaagggacaaau

SEQ ID NO: 1546742 - RNA, 19 nt, Artificial Sequence
  Description of Artificial Sequence: Synthetic oligonucleotide
gaaaagcugguucccgccc

SEQ ID NO: 1546743 - RNA, 19 nt, Artificial Sequence
  Description of Artificial Sequence: Synthetic oligonucleotide
cuugaugaaggacaucuga

SEQ ID NO: 1546744 - RNA, 19 nt, Artificial Sequence
  Description of Artificial Sequence: Synthetic oligonucleotide
uggagcauaccaguuaacu

SEQ ID NO: 1546745 - RNA, 19 nt, Artificial Sequence
  Description of Artificial Sequence: Synthetic oligonucleotide
uaggguuauugacaucucu

SEQ ID NO: 1546746 - RNA, 19 nt, Artificial Sequence
  Description of Artificial Sequence: Synthetic oligonucleotide
uaauuucauauguguugcc

SEQ ID NO: 1546747 - RNA, 19 nt, Artificial Sequence
  Description of Artificial Sequence: Synthetic oligonucleotide
ugguuuugugcacucuucu

SEQ ID NO: 1546748 - RNA, 19 nt, Artificial Sequence
  Description of Artificial Sequence: Synthetic oligonucleotide
gaggauuuccuugccagcc

SEQ ID NO: 1546749 - RNA, 19 nt, Artificial Sequence
  Description of Artificial Sequence: Synthetic oligonucleotide
guccuaguucaacaaaccc

SEQ ID NO: 1546750 - RNA, 19 nt, Artificial Sequence
  Description of Artificial Sequence: Synthetic oligonucleotide
aguggagcauaccaguuaa

SEQ ID NO: 1546751 - RNA, 19 nt, Artificial Sequence
  Description of Artificial Sequence: Synthetic oligonucleotide
uggagcuguacagaauuag

SEQ ID NO: 1546752 - RNA, 19 nt, Artificial Sequence
  Description of Artificial Sequence: Synthetic oligonucleotide
ugccauuuaugacaucuau

SEQ ID NO: 1546753 - RNA, 19 nt, Artificial Sequence
  Description of Artificial Sequence: Synthetic oligonucleotide
uaacgguugcagcagguuc

SEQ ID NO: 1546754 - RNA, 19 nt, Artificial Sequence
  Description of Artificial Sequence: Synthetic oligonucleotide
gguauaauuucauaugugu

SEQ ID NO: 1546755 - RNA, 19 nt, Artificial Sequence
  Description of Artificial Sequence: Synthetic oligonucleotide
uugaaucugucauccccag

SEQ ID NO: 1546756 - RNA, 19 nt, Artificial Sequence
  Description of Artificial Sequence: Synthetic oligonucleotide
aacucgagaacaagggaca

SEQ ID NO: 1546757 - RNA, 19 nt, Artificial Sequence
  Description of Artificial Sequence: Synthetic oligonucleotide
agaugauaauguuauugua

SEQ ID NO: 1546758 - RNA, 19 nt, Artificial Sequence
  Description of Artificial Sequence: Synthetic oligonucleotide
cuacaaguggagcauacca

SEQ ID NO: 1546759 - RNA, 19 nt, Artificial Sequence
  Description of Artificial Sequence: Synthetic oligonucleotide
gacaucuauaaucggcaca

SEQ ID NO: 1546760 - RNA, 19 nt, Artificial Sequence
  Description of Artificial Sequence: Synthetic oligonucleotide
gacuugaugaaggacaucu

SEQ ID NO: 1546761 - RNA, 19 nt, Artificial Sequence
  Description of Artificial Sequence: Synthetic oligonucleotide
caggagcuaauccauugcc

SEQ ID NO: 1546762 - RNA, 19 nt, Artificial Sequence
  Description of Artificial Sequence: Synthetic oligonucleotide
gagaugaagacuugaugaa

SEQ ID NO: 1546763 - RNA, 19 nt, Artificial Sequence
  Description of Artificial Sequence: Synthetic oligonucleotide
guuauugacaucucugccu

SEQ ID NO: 1546764 - RNA, 19 nt, Artificial Sequence
  Description of Artificial Sequence: Synthetic oligonucleotide
uuuagguuacaguguguaa

SEQ ID NO: 1546765 - RNA, 19 nt, Artificial Sequence
  Description of Artificial Sequence: Synthetic oligonucleotide
gacccaacauaaagggugg

SEQ ID NO: 1546766 - RNA, 19 nt, Artificial Sequence
  Description of Artificial Sequence: Synthetic oligonucleotide
uacaguguguaaucaugac

SEQ ID NO: 1546767 - RNA, 19 nt, Artificial Sequence
  Description of Artificial Sequence: Synthetic oligonucleotide
caagacgguagaugugucc

SEQ ID NO: 1546768 - RNA, 19 nt, Artificial Sequence
  Description of Artificial Sequence: Synthetic oligonucleotide
ugggcguagcacaggauca

SEQ ID NO: 1546769 - RNA, 19 nt, Artificial Sequence
  Description of Artificial Sequence: Synthetic oligonucleotide
aaauaauccaccagccaua

SEQ ID NO: 1546770 - RNA, 19 nt, Artificial Sequence
  Description of Artificial Sequence: Synthetic oligonucleotide
ucauauugcaugagcugau

SEQ ID NO: 1546771 - RNA, 19 nt, Artificial Sequence
  Description of Artificial Sequence: Synthetic oligonucleotide
ugugaauguuauucauuuc

SEQ ID NO: 1546772 - RNA, 19 nt, Artificial Sequence
  Description of Artificial Sequence: Synthetic oligonucleotide
agucggagaagacccaaca

SEQ ID NO: 1546773 - RNA, 19 nt, Artificial Sequence
  Description of Artificial Sequence: Synthetic oligonucleotide
guucccgcccaucuugugg

SEQ ID NO: 1546774 - RNA, 19 nt, Artificial Sequence
  Description of Artificial Sequence: Synthetic oligonucleotide
gguuauugacaucucugcc

SEQ ID NO: 1546775 - RNA, 19 nt, Artificial Sequence
  Description of Artificial Sequence: Synthetic oligonucleotide
cuuaagagucggagaagac

SEQ ID NO: 1546776 - RNA, 19 nt, Artificial Sequence
  Description of Artificial Sequence: Synthetic oligonucleotide
aagggaugugagugaaccu

SEQ ID NO: 1546777 - RNA, 19 nt, Artificial Sequence
  Description of Artificial Sequence: Synthetic oligonucleotide
ggguuauugacaucucugc

SEQ ID NO: 1546778 - RNA, 19 nt, Artificial Sequence
  Description of Artificial Sequence: Synthetic oligonucleotide
aaguggagcauaccaguua

SEQ ID NO: 1546779 - RNA, 19 nt, Artificial Sequence
  Description of Artificial Sequence: Synthetic oligonucleotide
auagacucuaaguccacuu

SEQ ID NO: 1546780 - RNA, 19 nt, Artificial Sequence
  Description of Artificial Sequence: Synthetic oligonucleotide
ccuaguucaacaaacccuc

SEQ ID NO: 1546781 - RNA, 19 nt, Artificial Sequence
  Description of Artificial Sequence: Synthetic oligonucleotide
augaaggacaucugaucga

SEQ ID NO: 1546782 - RNA, 19 nt, Artificial Sequence
  Description of Artificial Sequence: Synthetic oligonucleotide
gucacaguuggagaugaag

SEQ ID NO: 1546783 - RNA, 19 nt, Artificial Sequence
  Description of Artificial Sequence: Synthetic oligonucleotide
auuuagguuacagugugua

SEQ ID NO: 1546784 - RNA, 19 nt, Artificial Sequence
  Description of Artificial Sequence: Synthetic oligonucleotide
ugacaucuauaaucggcac

SEQ ID NO: 1546785 - RNA, 19 nt, Artificial Sequence
  Description of Artificial Sequence: Synthetic oligonucleotide
guccaacucgagaacaagg

SEQ ID NO: 1546786 - RNA, 19 nt, Artificial Sequence
  Description of Artificial Sequence: Synthetic oligonucleotide
cucgcgagaggucagagga

SEQ ID NO: 1546787 - RNA, 19 nt, Artificial Sequence
  Description of Artificial Sequence: Synthetic oligonucleotide
cuaauccauugccuccucg

SEQ ID NO: 1546788 - RNA, 19 nt, Artificial Sequence
  Description of Artificial Sequence: Synthetic oligonucleotide
ucucgcgagaggucagagg

SEQ ID NO: 1546789 - RNA, 19 nt, Artificial Sequence
  Description of Artificial Sequence: Synthetic oligonucleotide
caucuacagauuuaaguaa

SEQ ID NO: 1546790 - RNA, 19 nt, Artificial Sequence
  Description of Artificial Sequence: Synthetic oligonucleotide
caaucugaucagagguucc

SEQ ID NO: 1546791 - RNA, 19 nt, Artificial Sequence
  Description of Artificial Sequence: Synthetic oligonucleotide
aguagguagauuauugguu

SEQ ID NO: 1546792 - RNA, 19 nt, Artificial Sequence
  Description of Artificial Sequence: Synthetic oligonucleotide
ucggaaaagcugguucccg

SEQ ID NO: 1546793 - RNA, 19 nt, Artificial Sequence
  Description of Artificial Sequence: Synthetic oligonucleotide
guagauguguccaacucga

SEQ ID NO: 1546794 - RNA, 19 nt, Artificial Sequence
  Description of Artificial Sequence: Synthetic oligonucleotide
uguccaacucgagaacaag

SEQ ID NO: 1546795 - RNA, 19 nt, Artificial Sequence
  Description of Artificial Sequence: Synthetic oligonucleotide
cuaguucaacaaacccucc

SEQ ID NO: 1546796 - RNA, 19 nt, Artificial Sequence
  Description of Artificial Sequence: Synthetic oligonucleotide
caacauuggucauauugca

SEQ ID NO: 1546797 - RNA, 19 nt, Artificial Sequence
  Description of Artificial Sequence: Synthetic oligonucleotide
cugaggcuuaaaugugagg

SEQ ID NO: 1546798 - RNA, 19 nt, Artificial Sequence
  Description of Artificial Sequence: Synthetic oligonucleotide
aauaacgguugcagcaggu

SEQ ID NO: 1546799 - RNA, 19 nt, Artificial Sequence
  Description of Artificial Sequence: Synthetic oligonucleotide
cauaggguuauugacaucu

SEQ ID NO: 1546800 - RNA, 19 nt, Artificial Sequence
  Description of Artificial Sequence: Synthetic oligonucleotide
auauugcaugagcugauuu

SEQ ID NO: 1546801 - RNA, 19 nt, Artificial Sequence
  Description of Artificial Sequence: Synthetic oligonucleotide
uccagagcauacuccaauc

SEQ ID NO: 1546802 - RNA, 19 nt, Artificial Sequence
  Description of Artificial Sequence: Synthetic oligonucleotide
guuuucgcaccccaaaucu

SEQ ID NO: 1546803 - RNA, 19 nt, Artificial Sequence
  Description of Artificial Sequence: Synthetic oligonucleotide
aaguacugccauuccuuaa

SEQ ID NO: 1546804 - RNA, 19 nt, Artificial Sequence
  Description of Artificial Sequence: Synthetic oligonucleotide
agagcauacuccaauccca

SEQ ID NO: 1546805 - RNA, 19 nt, Artificial Sequence
  Description of Artificial Sequence: Synthetic oligonucleotide
uagauguguccaacucgag

SEQ ID NO: 1546806 - RNA, 19 nt, Artificial Sequence
  Description of Artificial Sequence: Synthetic oligonucleotide
aaucggcacagugcaaaug

SEQ ID NO: 1546807 - RNA, 19 nt, Artificial Sequence
  Description of Artificial Sequence: Synthetic oligonucleotide
uuugucaacauuggucaua

SEQ ID NO: 1546808 - RNA, 19 nt, Artificial Sequence
  Description of Artificial Sequence: Synthetic oligonucleotide
uugauucggaaaagcuggu

SEQ ID NO: 1546809 - RNA, 19 nt, Artificial Sequence
  Description of Artificial Sequence: Synthetic oligonucleotide
ucauauguguugccauuua

SEQ ID NO: 1546810 - RNA, 19 nt, Artificial Sequence
  Description of Artificial Sequence: Synthetic oligonucleotide
cugggcguagcacaggauc

SEQ ID NO: 1546811 - RNA, 19 nt, Artificial Sequence
  Description of Artificial Sequence: Synthetic oligonucleotide
aacauuggucauauugcau

SEQ ID NO: 1546812 - RNA, 19 nt, Artificial Sequence
  Description of Artificial Sequence: Synthetic oligonucleotide
agaucuuguaugagauuuc

SEQ ID NO: 1546813 - RNA, 19 nt, Artificial Sequence
  Description of Artificial Sequence: Synthetic oligonucleotide
ugugcaggcucuugaagua

SEQ ID NO: 1546814 - RNA, 19 nt, Artificial Sequence
  Description of Artificial Sequence: Synthetic oligonucleotide
cuucaagacgguagaugug

SEQ ID NO: 1546815 - RNA, 19 nt, Artificial Sequence
  Description of Artificial Sequence: Synthetic oligonucleotide
aaaggaauguaaacaucua

SEQ ID NO: 1546816 - RNA, 19 nt, Artificial Sequence
  Description of Artificial Sequence: Synthetic oligonucleotide
uauuggagucacaguugga

SEQ ID NO: 1546817 - RNA, 19 nt, Artificial Sequence
  Description of Artificial Sequence: Synthetic oligonucleotide
agaccgauacgguucaguu

SEQ ID NO: 1546818 - RNA, 19 nt, Artificial Sequence
  Description of Artificial Sequence: Synthetic oligonucleotide
ucgguuaggcauaggguua

SEQ ID NO: 1546819 - RNA, 19 nt, Artificial Sequence
  Description of Artificial Sequence: Synthetic oligonucleotide
gacaucugaucgaucuaag

SEQ ID NO: 1546820 - RNA, 19 nt, Artificial Sequence
  Description of Artificial Sequence: Synthetic oligonucleotide
acuccaaucccaugcuccu

SEQ ID NO: 1546821 - RNA, 19 nt, Artificial Sequence
  Description of Artificial Sequence: Synthetic oligonucleotide
guguguaaucaugacuuug

SEQ ID NO: 1546822 - RNA, 19 nt, Artificial Sequence
  Description of Artificial Sequence: Synthetic oligonucleotide
cauuggucauauugcauga

SEQ ID NO: 1546823 - RNA, 19 nt, Artificial Sequence
  Description of Artificial Sequence: Synthetic oligonucleotide
uauaaucggcacagugcaa

SEQ ID NO: 1546824 - RNA, 19 nt, Artificial Sequence
  Description of Artificial Sequence: Synthetic oligonucleotide
aucuacagauuuaaguaaa

SEQ ID NO: 1546825 - RNA, 19 nt, Artificial Sequence
  Description of Artificial Sequence: Synthetic oligonucleotide
ggaucaugauaggugaaag

SEQ ID NO: 1546826 - RNA, 19 nt, Artificial Sequence
  Description of Artificial Sequence: Synthetic oligonucleotide
acauaaaggguggaggauu

SEQ ID NO: 1546827 - RNA, 19 nt, Artificial Sequence
  Description of Artificial Sequence: Synthetic oligonucleotide
caguguguaaucaugacuu

SEQ ID NO: 1546828 - RNA, 19 nt, Artificial Sequence
  Description of Artificial Sequence: Synthetic oligonucleotide
caguuaacugccaccucac

SEQ ID NO: 1546829 - RNA, 19 nt, Artificial Sequence
  Description of Artificial Sequence: Synthetic oligonucleotide
ucagucucuucucgcgaga

SEQ ID NO: 1546830 - RNA, 19 nt, Artificial Sequence
  Description of Artificial Sequence: Synthetic oligonucleotide
uuacuucauugauucggaa

SEQ ID NO: 1546831 - RNA, 19 nt, Artificial Sequence
  Description of Artificial Sequence: Synthetic oligonucleotide
ugccucuguauuaugucuu

SEQ ID NO: 1546832 - RNA, 19 nt, Artificial Sequence
  Description of Artificial Sequence: Synthetic oligonucleotide
ucaagacgguagauguguc

SEQ ID NO: 1546833 - RNA, 19 nt, Artificial Sequence
  Description of Artificial Sequence: Synthetic oligonucleotide
cuguacagaauuaguaaua

SEQ ID NO: 1546834 - RNA, 19 nt, Artificial Sequence
  Description of Artificial Sequence: Synthetic oligonucleotide
auuggucauauugcaugag

SEQ ID NO: 1546835 - RNA, 19 nt, Artificial Sequence
  Description of Artificial Sequence: Synthetic oligonucleotide
acaaacccuccauugguuu

SEQ ID NO: 1546836 - RNA, 19 nt, Artificial Sequence
  Description of Artificial Sequence: Synthetic oligonucleotide
aacaguaacugcagaugau

SEQ ID NO: 1546837 - RNA, 19 nt, Artificial Sequence
  Description of Artificial Sequence: Synthetic oligonucleotide
guagguagauuauugguuu

SEQ ID NO: 1546838 - RNA, 19 nt, Artificial Sequence
  Description of Artificial Sequence: Synthetic oligonucleotide
ugaagggaugugagugaac

SEQ ID NO: 1546839 - RNA, 19 nt, Artificial Sequence
  Description of Artificial Sequence: Synthetic oligonucleotide
accaguuaacugccaccuc

SEQ ID NO: 1546840 - RNA, 19 nt, Artificial Sequence
  Description of Artificial Sequence: Synthetic oligonucleotide
cccuuugucaacauugguc

SEQ ID NO: 1546841 - RNA, 19 nt, Artificial Sequence
  Description of Artificial Sequence: Synthetic oligonucleotide
cagaauuaguaauaacggu

SEQ ID NO: 1546842 - RNA, 19 nt, Artificial Sequence
  Description of Artificial Sequence: Synthetic oligonucleotide
uaccacagguuugaaucug

SEQ ID NO: 1546843 - RNA, 19 nt, Artificial Sequence
  Description of Artificial Sequence: Synthetic oligonucleotide
uucgcaccccaaaucugga

SEQ ID NO: 1546844 - RNA, 19 nt, Artificial Sequence
  Description of Artificial Sequence: Synthetic oligonucleotide
acgguagauguguccaacu

SEQ ID NO: 1546845 - RNA, 19 nt, Artificial Sequence
  Description of Artificial Sequence: Synthetic oligonucleotide
aguuaacugccaccucaca

SEQ ID NO: 1546846 - RNA, 19 nt, Artificial Sequence
  Description of Artificial Sequence: Synthetic oligonucleotide
gauccgucgggccccuuug

SEQ ID NO: 1546847 - RNA, 19 nt, Artificial Sequence
  Description of Artificial Sequence: Synthetic oligonucleotide
ugugaggaacugccucugu

SEQ ID NO: 1546848 - RNA, 19 nt, Artificial Sequence
  Description of Artificial Sequence: Synthetic oligonucleotide
aggauuuccuugccagccu

SEQ ID NO: 1546849 - RNA, 19 nt, Artificial Sequence
  Description of Artificial Sequence: Synthetic oligonucleotide
uuugugcacucuucuuaaa

SEQ ID NO: 1546850 - RNA, 19 nt, Artificial Sequence
  Description of Artificial Sequence: Synthetic oligonucleotide
uugccauuuaugacaucua

SEQ ID NO: 1546851 - RNA, 19 nt, Artificial Sequence
  Description of Artificial Sequence: Synthetic oligonucleotide
aacaaacccuccauugguu

SEQ ID NO: 1546852 - RNA, 19 nt, Artificial Sequence
  Description of Artificial Sequence: Synthetic oligonucleotide
agcuaauccauugccuccu

SEQ ID NO: 1546853 - RNA, 19 nt, Artificial Sequence
  Description of Artificial Sequence: Synthetic oligonucleotide
ugccuccucgguuaggcau

SEQ ID NO: 1546854 - RNA, 19 nt, Artificial Sequence
  Description of Artificial Sequence: Synthetic oligonucleotide
uaaucggcacagugcaaau

SEQ ID NO: 1546855 - RNA, 19 nt, Artificial Sequence
  Description of Artificial Sequence: Synthetic oligonucleotide
gagacccaguucgaagaag

SEQ ID NO: 1546856 - RNA, 19 nt, Artificial Sequence
  Description of Artificial Sequence: Synthetic oligonucleotide
aggaacugccucuguauua

SEQ ID NO: 1546857 - RNA, 19 nt, Artificial Sequence
  Description of Artificial Sequence: Synthetic oligonucleotide
aaagcugguucccgcccau

SEQ ID NO: 1546858 - RNA, 19 nt, Artificial Sequence
  Description of Artificial Sequence: Synthetic oligonucleotide
aucuaagcacuuuccugaa

SEQ ID NO: 1546859 - RNA, 19 nt, Artificial Sequence
  Description of Artificial Sequence: Synthetic oligonucleotide
ucggcacagugcaaauggu

SEQ ID NO: 1546860 - RNA, 19 nt, Artificial Sequence
  Description of Artificial Sequence: Synthetic oligonucleotide
aguguguaaucaugacuuu

SEQ ID NO: 1546861 - RNA, 19 nt, Artificial Sequence
  Description of Artificial Sequence: Synthetic oligonucleotide
ugcucagcgggcucggguc

SEQ ID NO: 1546862 - RNA, 19 nt, Artificial Sequence
  Description of Artificial Sequence: Synthetic oligonucleotide
ggguauaauuucauaugug

SEQ ID NO: 1546863 - RNA, 19 nt, Artificial Sequence
  Description of Artificial Sequence: Synthetic oligonucleotide
auaggguuauugacaucuc

SEQ ID NO: 1546864 - RNA, 19 nt, Artificial Sequence
  Description of Artificial Sequence: Synthetic oligonucleotide
acccguuuccagagcauac

SEQ ID NO: 1546865 - RNA, 19 nt, Artificial Sequence
  Description of Artificial Sequence: Synthetic oligonucleotide
gggguauaauuucauaugu

SEQ ID NO: 1546866 - RNA, 19 nt, Artificial Sequence
  Description of Artificial Sequence: Synthetic oligonucleotide
gaucagagguuccaggauu

SEQ ID NO: 1546867 - RNA, 19 nt, Artificial Sequence
  Description of Artificial Sequence: Synthetic oligonucleotide
aguguacuugucaguaggu

SEQ ID NO: 1546868 - RNA, 19 nt, Artificial Sequence
  Description of Artificial Sequence: Synthetic oligonucleotide
gcuuaaaugugaggaacug

SEQ ID NO: 1546869 - RNA, 19 nt, Artificial Sequence
  Description of Artificial Sequence: Synthetic oligonucleotide
agagacccaguucgaagaa

SEQ ID NO: 1546870 - RNA, 19 nt, Artificial Sequence
  Description of Artificial Sequence: Synthetic oligonucleotide
guagcacaggaucaugaua

SEQ ID NO: 1546871 - RNA, 19 nt, Artificial Sequence
  Description of Artificial Sequence: Synthetic oligonucleotide
ggucagaggaacccguuuc

SEQ ID NO: 1546872 - RNA, 19 nt, Artificial Sequence
  Description of Artificial Sequence: Synthetic oligonucleotide
cuuagauaugggagcuaca

SEQ ID NO: 1546873 - RNA, 19 nt, Artificial Sequence
  Description of Artificial Sequence: Synthetic oligonucleotide
gguccuaguucaacaaacc

SEQ ID NO: 1546874 - RNA, 19 nt, Artificial Sequence
  Description of Artificial Sequence: Synthetic oligonucleotide
uucucgcgagaggucagag

SEQ ID NO: 1546875 - RNA, 19 nt, Artificial Sequence
  Description of Artificial Sequence: Synthetic oligonucleotide
aggagcuaauccauugccu

SEQ ID NO: 1546876 - RNA, 19 nt, Artificial Sequence
  Description of Artificial Sequence: Synthetic oligonucleotide
aguggggaccccugggcgu

SEQ ID NO: 1546877 - RNA, 19 nt, Artificial Sequence
  Description of Artificial Sequence: Synthetic oligonucleotide
aggguccuaguucaacaaa

SEQ ID NO: 1546878 - RNA, 19 nt, Artificial Sequence
  Description of Artificial Sequence: Synthetic oligonucleotide
ugguuuccccaugcuauca

SEQ ID NO: 1546879 - RNA, 19 nt, Artificial Sequence
  Description of Artificial Sequence: Synthetic oligonucleotide
caaucccaugcuccucggg

SEQ ID NO: 1546880 - RNA, 19 nt, Artificial Sequence
  Description of Artificial Sequence: Synthetic oligonucleotide
caguccucuguaaguguac

SEQ ID NO: 1546881 - RNA, 19 nt, Artificial Sequence
  Description of Artificial Sequence: Synthetic oligonucleotide
cagcaugacgcuccuguuc

SEQ ID NO: 1546882 - RNA, 19 nt, Artificial Sequence
  Description of Artificial Sequence: Synthetic oligonucleotide
ggcacagugcaaaugguuc

SEQ ID NO: 1546883 - RNA, 19 nt, Artificial Sequence
  Description of Artificial Sequence: Synthetic oligonucleotide
ugaucgaucuaagcacuuu

SEQ ID NO: 1546884 - RNA, 19 nt, Artificial Sequence
  Description of Artificial Sequence: Synthetic oligonucleotide
ucgucgggcggcgaggaca

SEQ ID NO: 1546885 - RNA, 19 nt, Artificial Sequence
  Description of Artificial Sequence: Synthetic oligonucleotide
ggaacccguuuccagagca

SEQ ID NO: 1546886 - RNA, 19 nt, Artificial Sequence
  Description of Artificial Sequence: Synthetic oligonucleotide
aacccguuuccagagcaua

SEQ ID NO: 1546887 - RNA, 19 nt, Artificial Sequence
  Description of Artificial Sequence: Synthetic oligonucleotide
ccuuagauaugggagcuac

SEQ ID NO: 1546888 - RNA, 19 nt, Artificial Sequence
  Description of Artificial Sequence: Synthetic oligonucleotide
cucgguuaggcauaggguu

SEQ ID NO: 1546889 - RNA, 19 nt, Artificial Sequence
  Description of Artificial Sequence: Synthetic oligonucleotide
ugcaaaugguucuguccuu

SEQ ID NO: 1546890 - RNA, 19 nt, Artificial Sequence
  Description of Artificial Sequence: Synthetic oligonucleotide
ggauuggagcuguacagaa

SEQ ID NO: 1546891 - RNA, 19 nt, Artificial Sequence
  Description of Artificial Sequence: Synthetic oligonucleotide
ugguucccgcccaucuugu

SEQ ID NO: 1546892 - RNA, 19 nt, Artificial Sequence
  Description of Artificial Sequence: Synthetic oligonucleotide
cgaucuaagcacuuuccug

SEQ ID NO: 1546893 - RNA, 19 nt, Artificial Sequence
  Description of Artificial Sequence: Synthetic oligonucleotide
cauugguuuccccaugcua

SEQ ID NO: 1546894 - RNA, 19 nt, Artificial Sequence
  Description of Artificial Sequence: Synthetic oligonucleotide
aggaucauagagacccagu

SEQ ID NO: 1546895 - RNA, 19 nt, Artificial Sequence
  Description of Artificial Sequence: Synthetic oligonucleotide
cagaucuuguaugagauuu

SEQ ID NO: 1546896 - RNA, 19 nt, Artificial Sequence
  Description of Artificial Sequence: Synthetic oligonucleotide
agaggucagaggaacccgu

SEQ ID NO: 1546897 - RNA, 19 nt, Artificial Sequence
  Description of Artificial Sequence: Synthetic oligonucleotide
ccaguuaacugccaccuca

SEQ ID NO: 1546898 - RNA, 19 nt, Artificial Sequence
  Description of Artificial Sequence: Synthetic oligonucleotide
ggaaucuccuccagcauga

SEQ ID NO: 1546899 - RNA, 19 nt, Artificial Sequence
  Description of Artificial Sequence: Synthetic oligonucleotide
cucuucucgcgagagguca

SEQ ID NO: 1546900 - RNA, 19 nt, Artificial Sequence
  Description of Artificial Sequence: Synthetic oligonucleotide
augaggccaugguaccaca

SEQ ID NO: 1546901 - RNA, 19 nt, Artificial Sequence
  Description of Artificial Sequence: Synthetic oligonucleotide
gguucuguccuuagauaug

SEQ ID NO: 1546902 - RNA, 19 nt, Artificial Sequence
  Description of Artificial Sequence: Synthetic oligonucleotide
aggacaucugaucgaucua

SEQ ID NO: 1546903 - RNA, 19 nt, Artificial Sequence
  Description of Artificial Sequence: Synthetic oligonucleotide
aggucagaggaacccguuu

SEQ ID NO: 1546904 - RNA, 19 nt, Artificial Sequence
  Description of Artificial Sequence: Synthetic oligonucleotide
ucuggagaccaggaucaua

SEQ ID NO: 1546905 - RNA, 19 nt, Artificial Sequence
  Description of Artificial Sequence: Synthetic oligonucleotide
auaacgguugcagcagguu

SEQ ID NO: 1546906 - RNA, 19 nt, Artificial Sequence
  Description of Artificial Sequence: Synthetic oligonucleotide
acaugaggccaugguacca

SEQ ID NO: 1546907 - RNA, 19 nt, Artificial Sequence
  Description of Artificial Sequence: Synthetic oligonucleotide
gcaggguccuaguucaaca

SEQ ID NO: 1546908 - RNA, 19 nt, Artificial Sequence
  Description of Artificial Sequence: Synthetic oligonucleotide
caggcgauuuucaguccuc

SEQ ID NO: 1546909 - RNA, 19 nt, Artificial Sequence
  Description of Artificial Sequence: Synthetic oligonucleotide
gagucggagaagacccaac

SEQ ID NO: 1546910 - RNA, 19 nt, Artificial Sequence
  Description of Artificial Sequence: Synthetic oligonucleotide
augauaggugaaagucuga

SEQ ID NO: 1546911 - RNA, 19 nt, Artificial Sequence
  Description of Artificial Sequence: Synthetic oligonucleotide
uuaccaccgcacugccaga

SEQ ID NO: 1546912 - RNA, 19 nt, Artificial Sequence
  Description of Artificial Sequence: Synthetic oligonucleotide
ucgcgagaggucagaggaa

SEQ ID NO: 1546913 - RNA, 19 nt, Artificial Sequence
  Description of Artificial Sequence: Synthetic oligonucleotide
cagccuucaagacgguaga

SEQ ID NO: 1546914 - RNA, 19 nt, Artificial Sequence
  Description of Artificial Sequence: Synthetic oligonucleotide
gccuucaagacgguagaug

SEQ ID NO: 1546915 - RNA, 19 nt, Artificial Sequence
  Description of Artificial Sequence: Synthetic oligonucleotide
uugccuccucgguuaggca

SEQ ID NO: 1546916 - RNA, 19 nt, Artificial Sequence
  Description of Artificial Sequence: Synthetic oligonucleotide
aggcgauuuucaguccucu

SEQ ID NO: 1546917 - RNA, 19 nt, Artificial Sequence
  Description of Artificial Sequence: Synthetic oligonucleotide
cauagagacccaguucgaa

SEQ ID NO: 1546918 - RNA, 19 nt, Artificial Sequence
  Description of Artificial Sequence: Synthetic oligonucleotide
ggcgauuuucaguccucug

SEQ ID NO: 1546919 - RNA, 19 nt, Artificial Sequence
  Description of Artificial Sequence: Synthetic oligonucleotide
ucgggccccuuugucaaca

SEQ ID NO: 1546920 - RNA, 19 nt, Artificial Sequence
  Description of Artificial Sequence: Synthetic oligonucleotide
cugccucuguauuaugucu

SEQ ID NO: 1546921 - RNA, 19 nt, Artificial Sequence
  Description of Artificial Sequence: Synthetic oligonucleotide
ggacaucugaucgaucuaa

SEQ ID NO: 1546922 - RNA, 19 nt, Artificial Sequence
  Description of Artificial Sequence: Synthetic oligonucleotide
gcuacaaguggagcauacc

SEQ ID NO: 1546923 - RNA, 19 nt, Artificial Sequence
  Description of Artificial Sequence: Synthetic oligonucleotide
cugccagaucuuguaugag

SEQ ID NO: 1546924 - RNA, 19 nt, Artificial Sequence
  Description of Artificial Sequence: Synthetic oligonucleotide
aucuuguaugagauuucaa

SEQ ID NO: 1546925 - RNA, 19 nt, Artificial Sequence
  Description of Artificial Sequence: Synthetic oligonucleotide
gaaggacaucugaucgauc

SEQ ID NO: 1546926 - RNA, 19 nt, Artificial Sequence
  Description of Artificial Sequence: Synthetic oligonucleotide
cauauguguugccauuuau

SEQ ID NO: 1546927 - RNA, 19 nt, Artificial Sequence
  Description of Artificial Sequence: Synthetic oligonucleotide
ccaaaucuggagaccagga

SEQ ID NO: 1546928 - RNA, 19 nt, Artificial Sequence
  Description of Artificial Sequence: Synthetic oligonucleotide
acucgagaacaagggacaa

SEQ ID NO: 1546929 - RNA, 19 nt, Artificial Sequence
  Description of Artificial Sequence: Synthetic oligonucleotide
ccaguucgaagaagaacuc

SEQ ID NO: 1546930 - RNA, 19 nt, Artificial Sequence
  Description of Artificial Sequence: Synthetic oligonucleotide
cccaucuuguggcaggguc

SEQ ID NO: 1546931 - RNA, 19 nt, Artificial Sequence
  Description of Artificial Sequence: Synthetic oligonucleotide
guaugcagucucgaggccu

SEQ ID NO: 1546932 - RNA, 19 nt, Artificial Sequence
  Description of Artificial Sequence: Synthetic oligonucleotide
ggcucuugaaguacugcca

SEQ ID NO: 1546933 - RNA, 19 nt, Artificial Sequence
  Description of Artificial Sequence: Synthetic oligonucleotide
cacugugaauguuauucau

SEQ ID NO: 1546934 - RNA, 19 nt, Artificial Sequence
  Description of Artificial Sequence: Synthetic oligonucleotide
ccaugguaccacagguuug

SEQ ID NO: 1546935 - RNA, 19 nt, Artificial Sequence
  Description of Artificial Sequence: Synthetic oligonucleotide
gguuacaguguguaaucau

SEQ ID NO: 1546936 - RNA, 19 nt, Artificial Sequence
  Description of Artificial Sequence: Synthetic oligonucleotide
uccuuagauaugggagcua

SEQ ID NO: 1546937 - RNA, 19 nt, Artificial Sequence
  Description of Artificial Sequence: Synthetic oligonucleotide
gguagauuauugguuuugu

SEQ ID NO: 1546938 - RNA, 19 nt, Artificial Sequence
  Description of Artificial Sequence: Synthetic oligonucleotide
caggaucaugauaggugaa

SEQ ID NO: 1546939 - RNA, 19 nt, Artificial Sequence
  Description of Artificial Sequence: Synthetic oligonucleotide
gaccgauacgguucaguuu

SEQ ID NO: 1546940 - RNA, 19 nt, Artificial Sequence
  Description of Artificial Sequence: Synthetic oligonucleotide
gacccaguucgaagaagaa

SEQ ID NO: 1546941 - RNA, 19 nt, Artificial Sequence
  Description of Artificial Sequence: Synthetic oligonucleotide
ucgaggccucggaucuuaa

SEQ ID NO: 1546942 - RNA, 19 nt, Artificial Sequence
  Description of Artificial Sequence: Synthetic oligonucleotide
gauuggagcuguacagaau

SEQ ID NO: 1546943 - RNA, 19 nt, Artificial Sequence
  Description of Artificial Sequence: Synthetic oligonucleotide
acgguugcagcagguucca

SEQ ID NO: 1546944 - RNA, 19 nt, Artificial Sequence
  Description of Artificial Sequence: Synthetic oligonucleotide
augcagucucgaggccucg

SEQ ID NO: 1546945 - RNA, 19 nt, Artificial Sequence
  Description of Artificial Sequence: Synthetic oligonucleotide
auccgucgggccccuuugu

SEQ ID NO: 1546946 - RNA, 19 nt, Artificial Sequence
  Description of Artificial Sequence: Synthetic oligonucleotide
guuuccccaugcuaucaau

SEQ ID NO: 1546947 - RNA, 19 nt, Artificial Sequence
  Description of Artificial Sequence: Synthetic oligonucleotide
guggagcauaccaguuaac

SEQ ID NO: 1546948 - RNA, 19 nt, Artificial Sequence
  Description of Artificial Sequence: Synthetic oligonucleotide
gguuuccccaugcuaucaa

SEQ ID NO: 1546949 - RNA, 19 nt, Artificial Sequence
  Description of Artificial Sequence: Synthetic oligonucleotide
gagugaaccugugcaggcu

SEQ ID NO: 1546950 - RNA, 19 nt, Artificial Sequence
  Description of Artificial Sequence: Synthetic oligonucleotide
ggagcuguacagaauuagu

SEQ ID NO: 1546951 - RNA, 19 nt, Artificial Sequence
  Description of Artificial Sequence: Synthetic oligonucleotide
cuccaaucccaugcuccuc

SEQ ID NO: 1546952 - RNA, 19 nt, Artificial Sequence
  Description of Artificial Sequence: Synthetic oligonucleotide
cucgagaacaagggacaaa

SEQ ID NO: 1546953 - RNA, 19 nt, Artificial Sequence
  Description of Artificial Sequence: Synthetic oligonucleotide
gccaugguaccacagguuu

SEQ ID NO: 1546954 - RNA, 19 nt, Artificial Sequence
  Description of Artificial Sequence: Synthetic oligonucleotide
ggaacugccucuguauuau

SEQ ID NO: 1546955 - RNA, 19 nt, Artificial Sequence
  Description of Artificial Sequence: Synthetic oligonucleotide
cgguagauguguccaacuc

SEQ ID NO: 1546956 - RNA, 19 nt, Artificial Sequence
  Description of Artificial Sequence: Synthetic oligonucleotide
ccgcccaucuuguggcagg

SEQ ID NO: 1546957 - RNA, 19 nt, Artificial Sequence
  Description of Artificial Sequence: Synthetic oligonucleotide
ggcguagcacaggaucaug

SEQ ID NO: 1546958 - RNA, 19 nt, Artificial Sequence
  Description of Artificial Sequence: Synthetic oligonucleotide
caucuuguggcaggguccu

SEQ ID NO: 1546959 - RNA, 19 nt, Artificial Sequence
  Description of Artificial Sequence: Synthetic oligonucleotide
gguucccgcccaucuugug

SEQ ID NO: 1546960 - RNA, 19 nt, Artificial Sequence
  Description of Artificial Sequence: Synthetic oligonucleotide
gcagucucgaggccucgga

SEQ ID NO: 1546961 - RNA, 19 nt, Artificial Sequence
  Description of Artificial Sequence: Synthetic oligonucleotide
ggcucgggucgucgggcgg

SEQ ID NO: 1546962 - RNA, 19 nt, Artificial Sequence
  Description of Artificial Sequence: Synthetic oligonucleotide
gcuaauccauugccuccuc

SEQ ID NO: 1546963 - RNA, 19 nt, Artificial Sequence
  Description of Artificial Sequence: Synthetic oligonucleotide
gcgagaggucagaggaacc

SEQ ID NO: 1546964 - RNA, 19 nt, Artificial Sequence
  Description of Artificial Sequence: Synthetic oligonucleotide
gcauaggguuauugacauc

SEQ ID NO: 1546965 - RNA, 19 nt, Artificial Sequence
  Description of Artificial Sequence: Synthetic oligonucleotide
ccuucaacaugaggccaug

SEQ ID NO: 1546966 - RNA, 19 nt, Artificial Sequence
  Description of Artificial Sequence: Synthetic oligonucleotide
cagcgggcucgggucgucg

SEQ ID NO: 1546967 - RNA, 19 nt, Artificial Sequence
  Description of Artificial Sequence: Synthetic oligonucleotide
uuggauccgucgggccccu

SEQ ID NO: 1546968 - RNA, 19 nt, Artificial Sequence
  Description of Artificial Sequence: Synthetic oligonucleotide
ccauugccuccucgguuag

SEQ ID NO: 1546969 - RNA, 19 nt, Artificial Sequence
  Description of Artificial Sequence: Synthetic oligonucleotide
gggucgucgggcggcgagg

SEQ ID NO: 1546970 - RNA, 19 nt, Artificial Sequence
  Description of Artificial Sequence: Synthetic oligonucleotide
cauauugcaugagcugauu

SEQ ID NO: 1546971 - RNA, 19 nt, Artificial Sequence
  Description of Artificial Sequence: Synthetic oligonucleotide
agucacaguuggagaugaa

SEQ ID NO: 1546972 - RNA, 19 nt, Artificial Sequence
  Description of Artificial Sequence: Synthetic oligonucleotide
cgucgggcggcgaggacag

SEQ ID NO: 1546973 - RNA, 19 nt, Artificial Sequence
  Description of Artificial Sequence: Synthetic oligonucleotide
cucgaggccucggaucuua

SEQ ID NO: 1546974 - RNA, 19 nt, Artificial Sequence
  Description of Artificial Sequence: Synthetic oligonucleotide
ccucgguuaggcauagggu

SEQ ID NO: 1546975 - RNA, 19 nt, Artificial Sequence
  Description of Artificial Sequence: Synthetic oligonucleotide
gaacccguuuccagagcau

SEQ ID NO: 1546976 - RNA, 19 nt, Artificial Sequence
  Description of Artificial Sequence: Synthetic oligonucleotide
ccgucgggccccuuuguca

SEQ ID NO: 1546977 - RNA, 19 nt, Artificial Sequence
  Description of Artificial Sequence: Synthetic oligonucleotide
gaggucagaggaacccguu

SEQ ID NO: 1546978 - RNA, 19 nt, Artificial Sequence
  Description of Artificial Sequence: Synthetic oligonucleotide
ccaugcuaucaaugcagua

SEQ ID NO: 1546979 - RNA, 19 nt, Artificial Sequence
  Description of Artificial Sequence: Synthetic oligonucleotide
caucuauaaucggcacagu

SEQ ID NO: 1546980 - RNA, 19 nt, Artificial Sequence
  Description of Artificial Sequence: Synthetic oligonucleotide
gcauaccaguuaacugcca

SEQ ID NO: 1546981 - RNA, 19 nt, Artificial Sequence
  Description of Artificial Sequence: Synthetic oligonucleotide
ccaggcgauuuucaguccu

SEQ ID NO: 1546982 - RNA, 19 nt, Artificial Sequence
  Description of Artificial Sequence: Synthetic oligonucleotide
caugacgcuccuguucauu

SEQ ID NO: 1546983 - RNA, 19 nt, Artificial Sequence
  Description of Artificial Sequence: Synthetic oligonucleotide
ucgggucgucgggcggcga

SEQ ID NO: 1546984 - RNA, 19 nt, Artificial Sequence
  Description of Artificial Sequence: Synthetic oligonucleotide
cccgcccaucuuguggcag

SEQ ID NO: 1546985 - RNA, 19 nt, Artificial Sequence
  Description of Artificial Sequence: Synthetic oligonucleotide
ggauccgucgggccccuuu

SEQ ID NO: 1546986 - RNA, 19 nt, Artificial Sequence
  Description of Artificial Sequence: Synthetic oligonucleotide
cgggucgucgggcggcgag

SEQ ID NO: 1546987 - RNA, 19 nt, Artificial Sequence
  Description of Artificial Sequence: Synthetic oligonucleotide
caccgcacugccagaucuu

SEQ ID NO: 1546988 - RNA, 19 nt, Artificial Sequence
  Description of Artificial Sequence: Synthetic oligonucleotide
ggccaugguaccacagguu

SEQ ID NO: 1546989 - RNA, 19 nt, Artificial Sequence
  Description of Artificial Sequence: Synthetic oligonucleotide
gggcguagcacaggaucau

SEQ ID NO: 1546990 - RNA, 19 nt, Artificial Sequence
  Description of Artificial Sequence: Synthetic oligonucleotide
cucagcgggcucgggucgu

SEQ ID NO: 1546991 - RNA, 19 nt, Artificial Sequence
  Description of Artificial Sequence: Synthetic oligonucleotide
gcaugacgcuccuguucau

SEQ ID NO: 1546992 - RNA, 19 nt, Artificial Sequence
  Description of Artificial Sequence: Synthetic oligonucleotide
ccagcaugacgcuccuguu

SEQ ID NO: 1546993 - RNA, 19 nt, Artificial Sequence
  Description of Artificial Sequence: Synthetic oligonucleotide
uggauccgucgggccccuu

SEQ ID NO: 1546994 - RNA, 19 nt, Artificial Sequence
  Description of Artificial Sequence: Synthetic oligonucleotide
ccgcacugccagaucuugu

SEQ ID NO: 1546995 - RNA, 19 nt, Artificial Sequence
  Description of Artificial Sequence: Synthetic oligonucleotide
gguuaggcauaggguuauu

SEQ ID NO: 1546996 - RNA, 19 nt, Artificial Sequence
  Description of Artificial Sequence: Synthetic oligonucleotide
ccugggcguagcacaggau

SEQ ID NO: 1546997 - RNA, 19 nt, Artificial Sequence
  Description of Artificial Sequence: Synthetic oligonucleotide
cgguuaggcauaggguuau

SEQ ID NO: 1546998 - RNA, 19 nt, Artificial Sequence
  Description of Artificial Sequence: Synthetic oligonucleotide
gcccaucuuguggcagggu

SEQ ID NO: 1546999 - RNA, 19 nt, Artificial Sequence
  Description of Artificial Sequence: Synthetic oligonucleotide
cccaugcuccucgggcaua

SEQ ID NO: 1547000 - RNA, 19 nt, Artificial Sequence
  Description of Artificial Sequence: Synthetic oligonucleotide
aaagcagccgauuuugucg

SEQ ID NO: 1547001 - RNA, 19 nt, Artificial Sequence
  Description of Artificial Sequence: Synthetic oligonucleotide
uuucacagcacaaucgagg

SEQ ID NO: 1547002 - RNA, 19 nt, Artificial Sequence
  Description of Artificial Sequence: Synthetic oligonucleotide
aacaguguguaaccugcgc

SEQ ID NO: 1547003 - RNA, 19 nt, Artificial Sequence
  Description of Artificial Sequence: Synthetic oligonucleotide
cucaugauaacuccagugg

SEQ ID NO: 1547004 - RNA, 19 nt, Artificial Sequence
  Description of Artificial Sequence: Synthetic oligonucleotide
caggaaggcacuaauaccc

SEQ ID NO: 1547005 - RNA, 19 nt, Artificial Sequence
  Description of Artificial Sequence: Synthetic oligonucleotide
uauuucacagcacaaucga

SEQ ID NO: 1547006 - RNA, 19 nt, Artificial Sequence
  Description of Artificial Sequence: Synthetic oligonucleotide
uucacagcacaaucgaggg

SEQ ID NO: 1547007 - RNA, 19 nt, Artificial Sequence
  Description of Artificial Sequence: Synthetic oligonucleotide
gguaguagcgcucagcugg

SEQ ID NO: 1547008 - RNA, 19 nt, Artificial Sequence
  Description of Artificial Sequence: Synthetic oligonucleotide
aaaggggugauccaccgcu

SEQ ID NO: 1547009 - RNA, 19 nt, Artificial Sequence
  Description of Artificial Sequence: Synthetic oligonucleotide
gauccaaacuucaggaugg

SEQ ID NO: 1547010 - RNA, 19 nt, Artificial Sequence
  Description of Artificial Sequence: Synthetic oligonucleotide
ugcccuuugccucaggccg

SEQ ID NO: 1547011 - RNA, 19 nt, Artificial Sequence
  Description of Artificial Sequence: Synthetic oligonucleotide
cuuaucuuccuucuugccc

SEQ ID NO: 1547012 - RNA, 19 nt, Artificial Sequence
  Description of Artificial Sequence: Synthetic oligonucleotide
uggcaugggaaccaggaag

SEQ ID NO: 1547013 - RNA, 19 nt, Artificial Sequence
  Description of Artificial Sequence: Synthetic oligonucleotide
aacucauuucuucucagaa

SEQ ID NO: 1547014 - RNA, 19 nt, Artificial Sequence
  Description of Artificial Sequence: Synthetic oligonucleotide
aagccaugagacucugccc

SEQ ID NO: 1547015 - RNA, 19 nt, Artificial Sequence
  Description of Artificial Sequence: Synthetic oligonucleotide
ucagcaaagucacggcacg

SEQ ID NO: 1547016 - RNA, 19 nt, Artificial Sequence
  Description of Artificial Sequence: Synthetic oligonucleotide
caaguagagagaauuguug

SEQ ID NO: 1547017 - RNA, 19 nt, Artificial Sequence
  Description of Artificial Sequence: Synthetic oligonucleotide
acuaauacccuuguucuuc

SEQ ID NO: 1547018 - RNA, 19 nt, Artificial Sequence
  Description of Artificial Sequence: Synthetic oligonucleotide
auauuucacagcacaaucg

SEQ ID NO: 1547019 - RNA, 19 nt, Artificial Sequence
  Description of Artificial Sequence: Synthetic oligonucleotide
gauaacuccaguggaggcg

SEQ ID NO: 1547020 - RNA, 19 nt, Artificial Sequence
  Description of Artificial Sequence: Synthetic oligonucleotide
auguuuuggagcuugguaa

SEQ ID NO: 1547021 - RNA, 19 nt, Artificial Sequence
  Description of Artificial Sequence: Synthetic oligonucleotide
uugacacucaugauaacuc

SEQ ID NO: 1547022 - RNA, 19 nt, Artificial Sequence
  Description of Artificial Sequence: Synthetic oligonucleotide
ugaaaggggugauccaccg

SEQ ID NO: 1547023 - RNA, 19 nt, Artificial Sequence
  Description of Artificial Sequence: Synthetic oligonucleotide
uagagagaauuguugacac

SEQ ID NO: 1547024 - RNA, 19 nt, Artificial Sequence
  Description of Artificial Sequence: Synthetic oligonucleotide
uccucuagggcaauggagu

SEQ ID NO: 1547025 - RNA, 19 nt, Artificial Sequence
  Description of Artificial Sequence: Synthetic oligonucleotide
auaacuccaguggaggcgc

SEQ ID NO: 1547026 - RNA, 19 nt, Artificial Sequence
  Description of Artificial Sequence: Synthetic oligonucleotide
agugaaaggggugauccac

SEQ ID NO: 1547027 - RNA, 19 nt, Artificial Sequence
  Description of Artificial Sequence: Synthetic oligonucleotide
gagagaauuguugacacuc

SEQ ID NO: 1547028 - RNA, 19 nt, Artificial Sequence
  Description of Artificial Sequence: Synthetic oligonucleotide
aaacgggcacucuccaggg

SEQ ID NO: 1547029 - RNA, 19 nt, Artificial Sequence
  Description of Artificial Sequence: Synthetic oligonucleotide
cucagaugcagccagcuug

SEQ ID NO: 1547030 - RNA, 19 nt, Artificial Sequence
  Description of Artificial Sequence: Synthetic oligonucleotide
ucugacgcaacaucugaug

SEQ ID NO: 1547031 - RNA, 19 nt, Artificial Sequence
  Description of Artificial Sequence: Synthetic oligonucleotide
ugacacucaugauaacucc

SEQ ID NO: 1547032 - RNA, 19 nt, Artificial Sequence
  Description of Artificial Sequence: Synthetic oligonucleotide
caaacgggcacucuccagg

SEQ ID NO: 1547033 - RNA, 19 nt, Artificial Sequence
  Description of Artificial Sequence: Synthetic oligonucleotide
ugucacguaccccaugcca

SEQ ID NO: 1547034 - RNA, 19 nt, Artificial Sequence
  Description of Artificial Sequence: Synthetic oligonucleotide
cagacugguaaacagugug

SEQ ID NO: 1547035 - RNA, 19 nt, Artificial Sequence
  Description of Artificial Sequence: Synthetic oligonucleotide
uuaaggacccacgagucac

SEQ ID NO: 1547036 - RNA, 19 nt, Artificial Sequence
  Description of Artificial Sequence: Synthetic oligonucleotide
cuaucuugaagcccauccc

SEQ ID NO: 1547037 - RNA, 19 nt, Artificial Sequence
  Description of Artificial Sequence: Synthetic oligonucleotide
uuugucgccacuagugaaa

SEQ ID NO: 1547038 - RNA, 19 nt, Artificial Sequence
  Description of Artificial Sequence: Synthetic oligonucleotide
aauucggcccauguccagg

SEQ ID NO: 1547039 - RNA, 19 nt, Artificial Sequence
  Description of Artificial Sequence: Synthetic oligonucleotide
acugguaccuucauagauc

SEQ ID NO: 1547040 - RNA, 19 nt, Artificial Sequence
  Description of Artificial Sequence: Synthetic oligonucleotide
guaaggggugcuccaaagg

SEQ ID NO: 1547041 - RNA, 19 nt, Artificial Sequence
  Description of Artificial Sequence: Synthetic oligonucleotide
cuggcaguuccacagacug

SEQ ID NO: 1547042 - RNA, 19 nt, Artificial Sequence
  Description of Artificial Sequence: Synthetic oligonucleotide
cauuaaggacccacgaguc

SEQ ID NO: 1547043 - RNA, 19 nt, Artificial Sequence
  Description of Artificial Sequence: Synthetic oligonucleotide
gcuaucuugaagcccaucc

SEQ ID NO: 1547044 - RNA, 19 nt, Artificial Sequence
  Description of Artificial Sequence: Synthetic oligonucleotide
ucagcaaacgggcacucuc

SEQ ID NO: 1547045 - RNA, 19 nt, Artificial Sequence
  Description of Artificial Sequence: Synthetic oligonucleotide
agaguuaagccaugagacu

SEQ ID NO: 1547046 - RNA, 19 nt, Artificial Sequence
  Description of Artificial Sequence: Synthetic oligonucleotide
gaguaagccagguaaucca

SEQ ID NO: 1547047 - RNA, 19 nt, Artificial Sequence
  Description of Artificial Sequence: Synthetic oligonucleotide
guagcuccggagcacaugc

SEQ ID NO: 1547048 - RNA, 19 nt, Artificial Sequence
  Description of Artificial Sequence: Synthetic oligonucleotide
ugcgacaguccucaaagau

SEQ ID NO: 1547049 - RNA, 19 nt, Artificial Sequence
  Description of Artificial Sequence: Synthetic oligonucleotide
ggauccaaacuucaggaug

SEQ ID NO: 1547050 - RNA, 19 nt, Artificial Sequence
  Description of Artificial Sequence: Synthetic oligonucleotide
augagguuagcuguggaug

SEQ ID NO: 1547051 - RNA, 19 nt, Artificial Sequence
  Description of Artificial Sequence: Synthetic oligonucleotide
accugcgccagucuugagg

SEQ ID NO: 1547052 - RNA, 19 nt, Artificial Sequence
  Description of Artificial Sequence: Synthetic oligonucleotide
agcacaaucgagggaggcc

SEQ ID NO: 1547053 - RNA, 19 nt, Artificial Sequence
  Description of Artificial Sequence: Synthetic oligonucleotide
agguaauccaggcccgcac

SEQ ID NO: 1547054 - RNA, 19 nt, Artificial Sequence
  Description of Artificial Sequence: Synthetic oligonucleotide
ggcacuaauacccuuguuc

SEQ ID NO: 1547055 - RNA, 19 nt, Artificial Sequence
  Description of Artificial Sequence: Synthetic oligonucleotide
ugacgcaacaucugaugug

SEQ ID NO: 1547056 - RNA, 19 nt, Artificial Sequence
  Description of Artificial Sequence: Synthetic oligonucleotide
aaggacccacgagucaccc

SEQ ID NO: 1547057 - RNA, 19 nt, Artificial Sequence
  Description of Artificial Sequence: Synthetic oligonucleotide
uuuugucgccacuagugaa

SEQ ID NO: 1547058 - RNA, 19 nt, Artificial Sequence
  Description of Artificial Sequence: Synthetic oligonucleotide
aggcgaugccaauucggcc

SEQ ID NO: 1547059 - RNA, 19 nt, Artificial Sequence
  Description of Artificial Sequence: Synthetic oligonucleotide
gccaauucggcccaugucc

SEQ ID NO: 1547060 - RNA, 19 nt, Artificial Sequence
  Description of Artificial Sequence: Synthetic oligonucleotide
ucgccacuagugaaagggg

SEQ ID NO: 1547061 - RNA, 19 nt, Artificial Sequence
  Description of Artificial Sequence: Synthetic oligonucleotide
agucacggcacgucugacg

SEQ ID NO: 1547062 - RNA, 19 nt, Artificial Sequence
  Description of Artificial Sequence: Synthetic oligonucleotide
gucacggcacgucugacgc

SEQ ID NO: 1547063 - RNA, 19 nt, Artificial Sequence
  Description of Artificial Sequence: Synthetic oligonucleotide
guaauccaggcccgcaccg

SEQ ID NO: 1547064 - RNA, 19 nt, Artificial Sequence
  Description of Artificial Sequence: Synthetic oligonucleotide
auuaaggacccacgaguca

SEQ ID NO: 1547065 - RNA, 19 nt, Artificial Sequence
  Description of Artificial Sequence: Synthetic oligonucleotide
aacgggcacucuccagggc

SEQ ID NO: 1547066 - RNA, 19 nt, Artificial Sequence
  Description of Artificial Sequence: Synthetic oligonucleotide
auucggcccauguccaggg

SEQ ID NO: 1547067 - RNA, 19 nt, Artificial Sequence
  Description of Artificial Sequence: Synthetic oligonucleotide
agaucuccgugaugcgggc

SEQ ID NO: 1547068 - RNA, 19 nt, Artificial Sequence
  Description of Artificial Sequence: Synthetic oligonucleotide
acucauuucuucucagaau

SEQ ID NO: 1547069 - RNA, 19 nt, Artificial Sequence
  Description of Artificial Sequence: Synthetic oligonucleotide
ucuaagcugacaacucauu

SEQ ID NO: 1547070 - RNA, 19 nt, Artificial Sequence
  Description of Artificial Sequence: Synthetic oligonucleotide
gcuaauggcgguugcagcc

SEQ ID NO: 1547071 - RNA, 19 nt, Artificial Sequence
  Description of Artificial Sequence: Synthetic oligonucleotide
ggcgaugccaauucggccc

SEQ ID NO: 1547072 - RNA, 19 nt, Artificial Sequence
  Description of Artificial Sequence: Synthetic oligonucleotide
gucugaccagaccucagag

SEQ ID NO: 1547073 - RNA, 19 nt, Artificial Sequence
  Description of Artificial Sequence: Synthetic oligonucleotide
uguaaccugcgccagucuu

SEQ ID NO: 1547074 - RNA, 19 nt, Artificial Sequence
  Description of Artificial Sequence: Synthetic oligonucleotide
agaauuguugacacucaug

SEQ ID NO: 1547075 - RNA, 19 nt, Artificial Sequence
  Description of Artificial Sequence: Synthetic oligonucleotide
uguucuucagggaccgguc

SEQ ID NO: 1547076 - RNA, 19 nt, Artificial Sequence
  Description of Artificial Sequence: Synthetic oligonucleotide
uggcaucucugucacguac

SEQ ID NO: 1547077 - RNA, 19 nt, Artificial Sequence
  Description of Artificial Sequence: Synthetic oligonucleotide
acgagucacccucuucccg

SEQ ID NO: 1547078 - RNA, 19 nt, Artificial Sequence
  Description of Artificial Sequence: Synthetic oligonucleotide
acuagugaaaggggugauc

SEQ ID NO: 1547079 - RNA, 19 nt, Artificial Sequence
  Description of Artificial Sequence: Synthetic oligonucleotide
auggccgacuccuugcuga

SEQ ID NO: 1547080 - RNA, 19 nt, Artificial Sequence
  Description of Artificial Sequence: Synthetic oligonucleotide
uuguucuucagggaccggu

SEQ ID NO: 1547081 - RNA, 19 nt, Artificial Sequence
  Description of Artificial Sequence: Synthetic oligonucleotide
cucagaguuaagccaugag

SEQ ID NO: 1547082 - RNA, 19 nt, Artificial Sequence
  Description of Artificial Sequence: Synthetic oligonucleotide
ggcaaugcgguucucagca

SEQ ID NO: 1547083 - RNA, 19 nt, Artificial Sequence
  Description of Artificial Sequence: Synthetic oligonucleotide
gaggcgaugccaauucggc

SEQ ID NO: 1547084 - RNA, 19 nt, Artificial Sequence
  Description of Artificial Sequence: Synthetic oligonucleotide
uaaggacccacgagucacc

SEQ ID NO: 1547085 - RNA, 19 nt, Artificial Sequence
  Description of Artificial Sequence: Synthetic oligonucleotide
ucacguaccccaugccacc

SEQ ID NO: 1547086 - RNA, 19 nt, Artificial Sequence
  Description of Artificial Sequence: Synthetic oligonucleotide
agagagaauuguugacacu

SEQ ID NO: 1547087 - RNA, 19 nt, Artificial Sequence
  Description of Artificial Sequence: Synthetic oligonucleotide
uguguaaccugcgccaguc

SEQ ID NO: 1547088 - RNA, 19 nt, Artificial Sequence
  Description of Artificial Sequence: Synthetic oligonucleotide
cagcaaacgggcacucucc

SEQ ID NO: 1547089 - RNA, 19 nt, Artificial Sequence
  Description of Artificial Sequence: Synthetic oligonucleotide
gauggcuaauggcgguugc

SEQ ID NO: 1547090 - RNA, 19 nt, Artificial Sequence
  Description of Artificial Sequence: Synthetic oligonucleotide
guuagcuguggaugaggcc

SEQ ID NO: 1547091 - RNA, 19 nt, Artificial Sequence
  Description of Artificial Sequence: Synthetic oligonucleotide
uuaagccaugagacucugc

SEQ ID NO: 1547092 - RNA, 19 nt, Artificial Sequence
  Description of Artificial Sequence: Synthetic oligonucleotide
ugugucucuggcaguucca

SEQ ID NO: 1547093 - RNA, 19 nt, Artificial Sequence
  Description of Artificial Sequence: Synthetic oligonucleotide
ugucugccagcuugaacug

SEQ ID NO: 1547094 - RNA, 19 nt, Artificial Sequence
  Description of Artificial Sequence: Synthetic oligonucleotide
acugguaaacaguguguaa

SEQ ID NO: 1547095 - RNA, 19 nt, Artificial Sequence
  Description of Artificial Sequence: Synthetic oligonucleotide
cuuggggaugcgacagucc

SEQ ID NO: 1547096 - RNA, 19 nt, Artificial Sequence
  Description of Artificial Sequence: Synthetic oligonucleotide
uugucgccacuagugaaag

SEQ ID NO: 1547097 - RNA, 19 nt, Artificial Sequence
  Description of Artificial Sequence: Synthetic oligonucleotide
aaugcgguucucagcauau

SEQ ID NO: 1547098 - RNA, 19 nt, Artificial Sequence
  Description of Artificial Sequence: Synthetic oligonucleotide
gaaaggggugauccaccgc

SEQ ID NO: 1547099 - RNA, 19 nt, Artificial Sequence
  Description of Artificial Sequence: Synthetic oligonucleotide
gguaaggggugcuccaaag

SEQ ID NO: 1547100 - RNA, 19 nt, Artificial Sequence
  Description of Artificial Sequence: Synthetic oligonucleotide
ucacugguaccuucauaga

SEQ ID NO: 1547101 - RNA, 19 nt, Artificial Sequence
  Description of Artificial Sequence: Synthetic oligonucleotide
ucuccuuggggaugcgaca

SEQ ID NO: 1547102 - RNA, 19 nt, Artificial Sequence
  Description of Artificial Sequence: Synthetic oligonucleotide
ugauccaccgcugcuucug

SEQ ID NO: 1547103 - RNA, 19 nt, Artificial Sequence
  Description of Artificial Sequence: Synthetic oligonucleotide
ucacagcacaaucgaggga

SEQ ID NO: 1547104 - RNA, 19 nt, Artificial Sequence
  Description of Artificial Sequence: Synthetic oligonucleotide
ggaguaagccagguaaucc

SEQ ID NO: 1547105 - RNA, 19 nt, Artificial Sequence
  Description of Artificial Sequence: Synthetic oligonucleotide
guuggcaugggaaccagga

SEQ ID NO: 1547106 - RNA, 19 nt, Artificial Sequence
  Description of Artificial Sequence: Synthetic oligonucleotide
acuccaguggaggcgcagc

SEQ ID NO: 1547107 - RNA, 19 nt, Artificial Sequence
  Description of Artificial Sequence: Synthetic oligonucleotide
gacacucaugauaacucca

SEQ ID NO: 1547108 - RNA, 19 nt, Artificial Sequence
  Description of Artificial Sequence: Synthetic oligonucleotide
caggucagcaaacgggcac

SEQ ID NO: 1547109 - RNA, 19 nt, Artificial Sequence
  Description of Artificial Sequence: Synthetic oligonucleotide
acgccaggucagcaaacgg

SEQ ID NO: 1547110 - RNA, 19 nt, Artificial Sequence
  Description of Artificial Sequence: Synthetic oligonucleotide
ugauggcuaauggcgguug

SEQ ID NO: 1547111 - RNA, 19 nt, Artificial Sequence
  Description of Artificial Sequence: Synthetic oligonucleotide
uggaggcgcagccacggcu

SEQ ID NO: 1547112 - RNA, 19 nt, Artificial Sequence
  Description of Artificial Sequence: Synthetic oligonucleotide
gauggccugauggcuaaug

SEQ ID NO: 1547113 - RNA, 19 nt, Artificial Sequence
  Description of Artificial Sequence: Synthetic oligonucleotide
uggaguaagccagguaauc

SEQ ID NO: 1547114 - RNA, 19 nt, Artificial Sequence
  Description of Artificial Sequence: Synthetic oligonucleotide
agaugagguuagcugugga

SEQ ID NO: 1547115 - RNA, 19 nt, Artificial Sequence
  Description of Artificial Sequence: Synthetic oligonucleotide
ugucgccacuagugaaagg

SEQ ID NO: 1547116 - RNA, 19 nt, Artificial Sequence
  Description of Artificial Sequence: Synthetic oligonucleotide
aguuaagccaugagacucu

SEQ ID NO: 1547117 - RNA, 19 nt, Artificial Sequence
  Description of Artificial Sequence: Synthetic oligonucleotide
aagucacggcacgucugac

SEQ ID NO: 1547118 - RNA, 19 nt, Artificial Sequence
  Description of Artificial Sequence: Synthetic oligonucleotide
uucagggaccggucugugc

SEQ ID NO: 1547119 - RNA, 19 nt, Artificial Sequence
  Description of Artificial Sequence: Synthetic oligonucleotide
uggucugaccagaccucag

SEQ ID NO: 1547120 - RNA, 19 nt, Artificial Sequence
  Description of Artificial Sequence: Synthetic oligonucleotide
ccacgagucacccucuucc

SEQ ID NO: 1547121 - RNA, 19 nt, Artificial Sequence
  Description of Artificial Sequence: Synthetic oligonucleotide
ucaggccgcaggcaggcaa

SEQ ID NO: 1547122 - RNA, 19 nt, Artificial Sequence
  Description of Artificial Sequence: Synthetic oligonucleotide
cacgagucacccucuuccc

SEQ ID NO: 1547123 - RNA, 19 nt, Artificial Sequence
  Description of Artificial Sequence: Synthetic oligonucleotide
agcaaacgggcacucucca

SEQ ID NO: 1547124 - RNA, 19 nt, Artificial Sequence
  Description of Artificial Sequence: Synthetic oligonucleotide
ggcaaagcagccgauuuug

SEQ ID NO: 1547125 - RNA, 19 nt, Artificial Sequence
  Description of Artificial Sequence: Synthetic oligonucleotide
cuccggagcacaugcccgg

SEQ ID NO: 1547126 - RNA, 19 nt, Artificial Sequence
  Description of Artificial Sequence: Synthetic oligonucleotide
acaaucgagggaggccugg

SEQ ID NO: 1547127 - RNA, 19 nt, Artificial Sequence
  Description of Artificial Sequence: Synthetic oligonucleotide
gguaggucccuucaugguc

SEQ ID NO: 1547128 - RNA, 19 nt, Artificial Sequence
  Description of Artificial Sequence: Synthetic oligonucleotide
agagaauuguugacacuca

SEQ ID NO: 1547129 - RNA, 19 nt, Artificial Sequence
  Description of Artificial Sequence: Synthetic oligonucleotide
ccugcgccagucuugaggc

SEQ ID NO: 1547130 - RNA, 19 nt, Artificial Sequence
  Description of Artificial Sequence: Synthetic oligonucleotide
cucagggcaaagcagccga

SEQ ID NO: 1547131 - RNA, 19 nt, Artificial Sequence
  Description of Artificial Sequence: Synthetic oligonucleotide
gugaaaggggugauccacc

SEQ ID NO: 1547132 - RNA, 19 nt, Artificial Sequence
  Description of Artificial Sequence: Synthetic oligonucleotide
gucacguaccccaugccac

SEQ ID NO: 1547133 - RNA, 19 nt, Artificial Sequence
  Description of Artificial Sequence: Synthetic oligonucleotide
gaugagguuagcuguggau

SEQ ID NO: 1547134 - RNA, 19 nt, Artificial Sequence
  Description of Artificial Sequence: Synthetic oligonucleotide
guaaccugcgccagucuug

SEQ ID NO: 1547135 - RNA, 19 nt, Artificial Sequence
  Description of Artificial Sequence: Synthetic oligonucleotide
agguaggucccuucauggu

SEQ ID NO: 1547136 - RNA, 19 nt, Artificial Sequence
  Description of Artificial Sequence: Synthetic oligonucleotide
gguuugcauggcuaucuug

SEQ ID NO: 1547137 - RNA, 19 nt, Artificial Sequence
  Description of Artificial Sequence: Synthetic oligonucleotide
cucuggggauccaaacuuc

SEQ ID NO: 1547138 - RNA, 19 nt, Artificial Sequence
  Description of Artificial Sequence: Synthetic oligonucleotide
gacugguaaacagugugua

SEQ ID NO: 1547139 - RNA, 19 nt, Artificial Sequence
  Description of Artificial Sequence: Synthetic oligonucleotide
ugguaaggggugcuccaaa

SEQ ID NO: 1547140 - RNA, 19 nt, Artificial Sequence
  Description of Artificial Sequence: Synthetic oligonucleotide
gauccaccgcugcuucugc

SEQ ID NO: 1547141 - RNA, 19 nt, Artificial Sequence
  Description of Artificial Sequence: Synthetic oligonucleotide
cacgccaggucagcaaacg

SEQ ID NO: 1547142 - RNA, 19 nt, Artificial Sequence
  Description of Artificial Sequence: Synthetic oligonucleotide
gaccagaccucagaguuaa

SEQ ID NO: 1547143 - RNA, 19 nt, Artificial Sequence
  Description of Artificial Sequence: Synthetic oligonucleotide
cuugguaaggggugcucca

SEQ ID NO: 1547144 - RNA, 19 nt, Artificial Sequence
  Description of Artificial Sequence: Synthetic oligonucleotide
ggaggcgaugccaauucgg

SEQ ID NO: 1547145 - RNA, 19 nt, Artificial Sequence
  Description of Artificial Sequence: Synthetic oligonucleotide
ugaugcgggcaucucggua

SEQ ID NO: 1547146 - RNA, 19 nt, Artificial Sequence
  Description of Artificial Sequence: Synthetic oligonucleotide
gcacuaauacccuuguucu

SEQ ID NO: 1547147 - RNA, 19 nt, Artificial Sequence
  Description of Artificial Sequence: Synthetic oligonucleotide
aucuccgugaugcgggcau

SEQ ID NO: 1547148 - RNA, 19 nt, Artificial Sequence
  Description of Artificial Sequence: Synthetic oligonucleotide
caacucauuucuucucaga

SEQ ID NO: 1547149 - RNA, 19 nt, Artificial Sequence
  Description of Artificial Sequence: Synthetic oligonucleotide
cugguaccuucauagaucu

SEQ ID NO: 1547150 - RNA, 19 nt, Artificial Sequence
  Description of Artificial Sequence: Synthetic oligonucleotide
guuaagccaugagacucug

SEQ ID NO: 1547151 - RNA, 19 nt, Artificial Sequence
  Description of Artificial Sequence: Synthetic oligonucleotide
uggauggccugauggcuaa

SEQ ID NO: 1547152 - RNA, 19 nt, Artificial Sequence
  Description of Artificial Sequence: Synthetic oligonucleotide
caauucggcccauguccag

SEQ ID NO: 1547153 - RNA, 19 nt, Artificial Sequence
  Description of Artificial Sequence: Synthetic oligonucleotide
cucgguaguagcgcucagc

SEQ ID NO: 1547154 - RNA, 19 nt, Artificial Sequence
  Description of Artificial Sequence: Synthetic oligonucleotide
cuagggcaauggaguaagc

SEQ ID NO: 1547155 - RNA, 19 nt, Artificial Sequence
  Description of Artificial Sequence: Synthetic oligonucleotide
ggacccacgagucacccuc

SEQ ID NO: 1547156 - RNA, 19 nt, Artificial Sequence
  Description of Artificial Sequence: Synthetic oligonucleotide
uaauggcgguugcagccuc

SEQ ID NO: 1547157 - RNA, 19 nt, Artificial Sequence
  Description of Artificial Sequence: Synthetic oligonucleotide
gagaauuguugacacucau

SEQ ID NO: 1547158 - RNA, 19 nt, Artificial Sequence
  Description of Artificial Sequence: Synthetic oligonucleotide
ccagaccucagaguuaagc

SEQ ID NO: 1547159 - RNA, 19 nt, Artificial Sequence
  Description of Artificial Sequence: Synthetic oligonucleotide
gaugaggcccggaugccca

SEQ ID NO: 1547160 - RNA, 19 nt, Artificial Sequence
  Description of Artificial Sequence: Synthetic oligonucleotide
aggcccgcaccgcugaacu

SEQ ID NO: 1547161 - RNA, 19 nt, Artificial Sequence
  Description of Artificial Sequence: Synthetic oligonucleotide
gccgacuccuugcugaaug

SEQ ID NO: 1547162 - RNA, 19 nt, Artificial Sequence
  Description of Artificial Sequence: Synthetic oligonucleotide
aaccaggaaggcacuaaua

SEQ ID NO: 1547163 - RNA, 19 nt, Artificial Sequence
  Description of Artificial Sequence: Synthetic oligonucleotide
ggcaaucaccagucucugg

SEQ ID NO: 1547164 - RNA, 19 nt, Artificial Sequence
  Description of Artificial Sequence: Synthetic oligonucleotide
augcgacaguccucaaaga

SEQ ID NO: 1547165 - RNA, 19 nt, Artificial Sequence
  Description of Artificial Sequence: Synthetic oligonucleotide
gcucuaagcugacaacuca

SEQ ID NO: 1547166 - RNA, 19 nt, Artificial Sequence
  Description of Artificial Sequence: Synthetic oligonucleotide
ugggcgcagaccuccggac

SEQ ID NO: 1547167 - RNA, 19 nt, Artificial Sequence
  Description of Artificial Sequence: Synthetic oligonucleotide
cacgucugacgcaacaucu

SEQ ID NO: 1547168 - RNA, 19 nt, Artificial Sequence
  Description of Artificial Sequence: Synthetic oligonucleotide
ucggcccauguccaggguu

SEQ ID NO: 1547169 - RNA, 19 nt, Artificial Sequence
  Description of Artificial Sequence: Synthetic oligonucleotide
uugguaaggggugcuccaa

SEQ ID NO: 1547170 - RNA, 19 nt, Artificial Sequence
  Description of Artificial Sequence: Synthetic oligonucleotide
caugggcgcagaccuccgg

SEQ ID NO: 1547171 - RNA, 19 nt, Artificial Sequence
  Description of Artificial Sequence: Synthetic oligonucleotide
aaggggugauccaccgcug

SEQ ID NO: 1547172 - RNA, 19 nt, Artificial Sequence
  Description of Artificial Sequence: Synthetic oligonucleotide
aggaaggcacuaauacccu

SEQ ID NO: 1547173 - RNA, 19 nt, Artificial Sequence
  Description of Artificial Sequence: Synthetic oligonucleotide
gccaggucagcaaacgggc

SEQ ID NO: 1547174 - RNA, 19 nt, Artificial Sequence
  Description of Artificial Sequence: Synthetic oligonucleotide
cuguggggaagagaugcuc

SEQ ID NO: 1547175 - RNA, 19 nt, Artificial Sequence
  Description of Artificial Sequence: Synthetic oligonucleotide
cugacgcaacaucugaugu

SEQ ID NO: 1547176 - RNA, 19 nt, Artificial Sequence
  Description of Artificial Sequence: Synthetic oligonucleotide
auggcuaauggcgguugca

SEQ ID NO: 1547177 - RNA, 19 nt, Artificial Sequence
  Description of Artificial Sequence: Synthetic oligonucleotide
caucucugucacguacccc

SEQ ID NO: 1547178 - RNA, 19 nt, Artificial Sequence
  Description of Artificial Sequence: Synthetic oligonucleotide
cgccaggucagcaaacggg

SEQ ID NO: 1547179 - RNA, 19 nt, Artificial Sequence
  Description of Artificial Sequence: Synthetic oligonucleotide
cagccgauuuugucgccac

SEQ ID NO: 1547180 - RNA, 19 nt, Artificial Sequence
  Description of Artificial Sequence: Synthetic oligonucleotide
cuaagcugacaacucauuu

SEQ ID NO: 1547181 - RNA, 19 nt, Artificial Sequence
  Description of Artificial Sequence: Synthetic oligonucleotide
acgucugacgcaacaucug

SEQ ID NO: 1547182 - RNA, 19 nt, Artificial Sequence
  Description of Artificial Sequence: Synthetic oligonucleotide
ggcaaugcccagcgccugg

SEQ ID NO: 1547183 - RNA, 19 nt, Artificial Sequence
  Description of Artificial Sequence: Synthetic oligonucleotide
ggcaucucugucacguacc

SEQ ID NO: 1547184 - RNA, 19 nt, Artificial Sequence
  Description of Artificial Sequence: Synthetic oligonucleotide
ugcccagugugagcccagg

SEQ ID NO: 1547185 - RNA, 19 nt, Artificial Sequence
  Description of Artificial Sequence: Synthetic oligonucleotide
gcuugguaaggggugcucc

SEQ ID NO: 1547186 - RNA, 19 nt, Artificial Sequence
  Description of Artificial Sequence: Synthetic oligonucleotide
aauggcgguugcagccuca

SEQ ID NO: 1547187 - RNA, 19 nt, Artificial Sequence
  Description of Artificial Sequence: Synthetic oligonucleotide
augaggcccggaugcccag

SEQ ID NO: 1547188 - RNA, 19 nt, Artificial Sequence
  Description of Artificial Sequence: Synthetic oligonucleotide
gcaaacgggcacucuccag

SEQ ID NO: 1547189 - RNA, 19 nt, Artificial Sequence
  Description of Artificial Sequence: Synthetic oligonucleotide
agccucagaugcagccagc

SEQ ID NO: 1547190 - RNA, 19 nt, Artificial Sequence
  Description of Artificial Sequence: Synthetic oligonucleotide
cauggccgacuccuugcug

SEQ ID NO: 1547191 - RNA, 19 nt, Artificial Sequence
  Description of Artificial Sequence: Synthetic oligonucleotide
agcuggcaucucugucacg

SEQ ID NO: 1547192 - RNA, 19 nt, Artificial Sequence
  Description of Artificial Sequence: Synthetic oligonucleotide
guaggucccuucauggucu

SEQ ID NO: 1547193 - RNA, 19 nt, Artificial Sequence
  Description of Artificial Sequence: Synthetic oligonucleotide
ggggaugcgacaguccuca

SEQ ID NO: 1547194 - RNA, 19 nt, Artificial Sequence
  Description of Artificial Sequence: Synthetic oligonucleotide
ucacggcacgucugacgca

SEQ ID NO: 1547195 - RNA, 19 nt, Artificial Sequence
  Description of Artificial Sequence: Synthetic oligonucleotide
ccccaaguagagagaauug

SEQ ID NO: 1547196 - RNA, 19 nt, Artificial Sequence
  Description of Artificial Sequence: Synthetic oligonucleotide
cacguaccccaugccaccc

SEQ ID NO: 1547197 - RNA, 19 nt, Artificial Sequence
  Description of Artificial Sequence: Synthetic oligonucleotide
uucugcucuggggauccaa

SEQ ID NO: 1547198 - RNA, 19 nt, Artificial Sequence
  Description of Artificial Sequence: Synthetic oligonucleotide
uccgguagcuccggagcac

SEQ ID NO: 1547199 - RNA, 19 nt, Artificial Sequence
  Description of Artificial Sequence: Synthetic oligonucleotide
agccgauuuugucgccacu

SEQ ID NO: 1547200 - RNA, 19 nt, Artificial Sequence
  Description of Artificial Sequence: Synthetic oligonucleotide
cacugguaccuucauagau

SEQ ID NO: 1547201 - RNA, 19 nt, Artificial Sequence
  Description of Artificial Sequence: Synthetic oligonucleotide
ugguaccuucauagaucuc

SEQ ID NO: 1547202 - RNA, 19 nt, Artificial Sequence
  Description of Artificial Sequence: Synthetic oligonucleotide
ccgugaugcgggcaucucg

SEQ ID NO: 1547203 - RNA, 19 nt, Artificial Sequence
  Description of Artificial Sequence: Synthetic oligonucleotide
gcuccggagcacaugcccg

SEQ ID NO: 1547204 - RNA, 19 nt, Artificial Sequence
  Description of Artificial Sequence: Synthetic oligonucleotide
ccgacuccuugcugaaugg

SEQ ID NO: 1547205 - RNA, 19 nt, Artificial Sequence
  Description of Artificial Sequence: Synthetic oligonucleotide
gaccggucugugcuggcaa

SEQ ID NO: 1547206 - RNA, 19 nt, Artificial Sequence
  Description of Artificial Sequence: Synthetic oligonucleotide
caugcccggcaaucaccag

SEQ ID NO: 1547207 - RNA, 19 nt, Artificial Sequence
  Description of Artificial Sequence: Synthetic oligonucleotide
cugugcuggcaaacaccac

SEQ ID NO: 1547208 - RNA, 19 nt, Artificial Sequence
  Description of Artificial Sequence: Synthetic oligonucleotide
uucggcccauguccagggu

SEQ ID NO: 1547209 - RNA, 19 nt, Artificial Sequence
  Description of Artificial Sequence: Synthetic oligonucleotide
agcccaucccuggcucccc

SEQ ID NO: 1547210 - RNA, 19 nt, Artificial Sequence
  Description of Artificial Sequence: Synthetic oligonucleotide
aggacccacgagucacccu

SEQ ID NO: 1547211 - RNA, 19 nt, Artificial Sequence
  Description of Artificial Sequence: Synthetic oligonucleotide
gcacgucugacgcaacauc

SEQ ID NO: 1547212 - RNA, 19 nt, Artificial Sequence
  Description of Artificial Sequence: Synthetic oligonucleotide
uccggagcacaugcccggc

SEQ ID NO: 1547213 - RNA, 19 nt, Artificial Sequence
  Description of Artificial Sequence: Synthetic oligonucleotide
caauggaguaagccaggua

SEQ ID NO: 1547214 - RNA, 19 nt, Artificial Sequence
  Description of Artificial Sequence: Synthetic oligonucleotide
acguaccccaugccaccca

SEQ ID NO: 1547215 - RNA, 19 nt, Artificial Sequence
  Description of Artificial Sequence: Synthetic oligonucleotide
ggcucacucagggcaaagc

SEQ ID NO: 1547216 - RNA, 19 nt, Artificial Sequence
  Description of Artificial Sequence: Synthetic oligonucleotide
gagcgggccaccggcccgg

SEQ ID NO: 1547217 - RNA, 19 nt, Artificial Sequence
  Description of Artificial Sequence: Synthetic oligonucleotide
aggcacuaauacccuuguu

SEQ ID NO: 1547218 - RNA, 19 nt, Artificial Sequence
  Description of Artificial Sequence: Synthetic oligonucleotide
gagcucggcggagcgggcc

SEQ ID NO: 1547219 - RNA, 19 nt, Artificial Sequence
  Description of Artificial Sequence: Synthetic oligonucleotide
ggaugcgacaguccucaaa

SEQ ID NO: 1547220 - RNA, 19 nt, Artificial Sequence
  Description of Artificial Sequence: Synthetic oligonucleotide
ccaauucggcccaugucca

SEQ ID NO: 1547221 - RNA, 19 nt, Artificial Sequence
  Description of Artificial Sequence: Synthetic oligonucleotide
gcuggcaucucugucacgu

SEQ ID NO: 1547222 - RNA, 19 nt, Artificial Sequence
  Description of Artificial Sequence: Synthetic oligonucleotide
agcuguggaugaggcccgg

SEQ ID NO: 1547223 - RNA, 19 nt, Artificial Sequence
  Description of Artificial Sequence: Synthetic oligonucleotide
gcgucacugccauucccug

SEQ ID NO: 1547224 - RNA, 19 nt, Artificial Sequence
  Description of Artificial Sequence: Synthetic oligonucleotide
ggccgaagccucccaggag

SEQ ID NO: 1547225 - RNA, 19 nt, Artificial Sequence
  Description of Artificial Sequence: Synthetic oligonucleotide
uaguagcgcucagcuggca

SEQ ID NO: 1547226 - RNA, 19 nt, Artificial Sequence
  Description of Artificial Sequence: Synthetic oligonucleotide
cacggcacgucugacgcaa

SEQ ID NO: 1547227 - RNA, 19 nt, Artificial Sequence
  Description of Artificial Sequence: Synthetic oligonucleotide
gggcgcagaccuccggacc

SEQ ID NO: 1547228 - RNA, 19 nt, Artificial Sequence
  Description of Artificial Sequence: Synthetic oligonucleotide
gccgaagccucccaggagu

SEQ ID NO: 1547229 - RNA, 19 nt, Artificial Sequence
  Description of Artificial Sequence: Synthetic oligonucleotide
gccauucccuggcucacuc

SEQ ID NO: 1547230 - RNA, 19 nt, Artificial Sequence
  Description of Artificial Sequence: Synthetic oligonucleotide
uccgugaugcgggcaucuc

SEQ ID NO: 1547231 - RNA, 19 nt, Artificial Sequence
  Description of Artificial Sequence: Synthetic oligonucleotide
gcacaaucgagggaggccu

SEQ ID NO: 1547232 - RNA, 19 nt, Artificial Sequence
  Description of Artificial Sequence: Synthetic oligonucleotide
cuaauggcgguugcagccu

SEQ ID NO: 1547233 - RNA, 19 nt, Artificial Sequence
  Description of Artificial Sequence: Synthetic oligonucleotide
gcgaugccaauucggccca

SEQ ID NO: 1547234 - RNA, 19 nt, Artificial Sequence
  Description of Artificial Sequence: Synthetic oligonucleotide
cugaacuccuccgggacau

SEQ ID NO: 1547235 - RNA, 19 nt, Artificial Sequence
  Description of Artificial Sequence: Synthetic oligonucleotide
gcggccaugggcgcagacc

SEQ ID NO: 1547236 - RNA, 19 nt, Artificial Sequence
  Description of Artificial Sequence: Synthetic oligonucleotide
ccuucauggucugaccaga

SEQ ID NO: 1547237 - RNA, 19 nt, Artificial Sequence
  Description of Artificial Sequence: Synthetic oligonucleotide
gccgauuuugucgccacua

SEQ ID NO: 1547238 - RNA, 19 nt, Artificial Sequence
  Description of Artificial Sequence: Synthetic oligonucleotide
guguguaaccugcgccagu

SEQ ID NO: 1547239 - RNA, 19 nt, Artificial Sequence
  Description of Artificial Sequence: Synthetic oligonucleotide
gcaucucgguaguagcgcu

SEQ ID NO: 1547240 - RNA, 19 nt, Artificial Sequence
  Description of Artificial Sequence: Synthetic oligonucleotide
cguaccccaugccacccag

SEQ ID NO: 1547241 - RNA, 19 nt, Artificial Sequence
  Description of Artificial Sequence: Synthetic oligonucleotide
acggcacgucugacgcaac

SEQ ID NO: 1547242 - RNA, 19 nt, Artificial Sequence
  Description of Artificial Sequence: Synthetic oligonucleotide
cgggccaccggcccgggcg

SEQ ID NO: 1547243 - RNA, 19 nt, Artificial Sequence
  Description of Artificial Sequence: Synthetic oligonucleotide
acccacgagucacccucuu

SEQ ID NO: 1547244 - RNA, 19 nt, Artificial Sequence
  Description of Artificial Sequence: Synthetic oligonucleotide
ggcgcagaccuccggaccu

SEQ ID NO: 1547245 - RNA, 19 nt, Artificial Sequence
  Description of Artificial Sequence: Synthetic oligonucleotide
cccaaguagagagaauugu

SEQ ID NO: 1547246 - RNA, 19 nt, Artificial Sequence
  Description of Artificial Sequence: Synthetic oligonucleotide
cgucugacgcaacaucuga

SEQ ID NO: 1547247 - RNA, 19 nt, Artificial Sequence
  Description of Artificial Sequence: Synthetic oligonucleotide
guguaaccugcgccagucu

SEQ ID NO: 1547248 - RNA, 19 nt, Artificial Sequence
  Description of Artificial Sequence: Synthetic oligonucleotide
gucugacgcaacaucugau

SEQ ID NO: 1547249 - RNA, 19 nt, Artificial Sequence
  Description of Artificial Sequence: Synthetic oligonucleotide
gcagccgauuuugucgcca

SEQ ID NO: 1547250 - RNA, 19 nt, Artificial Sequence
  Description of Artificial Sequence: Synthetic oligonucleotide
gccccaaguagagagaauu

SEQ ID NO: 1547251 - RNA, 19 nt, Artificial Sequence
  Description of Artificial Sequence: Synthetic oligonucleotide
accagaccucagaguuaag

SEQ ID NO: 1547252 - RNA, 19 nt, Artificial Sequence
  Description of Artificial Sequence: Synthetic oligonucleotide
ggcagcacgccaggucagc

SEQ ID NO: 1547253 - RNA, 19 nt, Artificial Sequence
  Description of Artificial Sequence: Synthetic oligonucleotide
augcgguucucagcauauu

SEQ ID NO: 1547254 - RNA, 19 nt, Artificial Sequence
  Description of Artificial Sequence: Synthetic oligonucleotide
ccgcgucacugccauuccc

SEQ ID NO: 1547255 - RNA, 19 nt, Artificial Sequence
  Description of Artificial Sequence: Synthetic oligonucleotide
ggcgcagccacggcugauc

SEQ ID NO: 1547256 - RNA, 19 nt, Artificial Sequence
  Description of Artificial Sequence: Synthetic oligonucleotide
cucggcggagcgggccacc

SEQ ID NO: 1547257 - RNA, 19 nt, Artificial Sequence
  Description of Artificial Sequence: Synthetic oligonucleotide
uggugccauuaaggaccca

SEQ ID NO: 1547258 - RNA, 19 nt, Artificial Sequence
  Description of Artificial Sequence: Synthetic oligonucleotide
cccgcgucacugccauucc

SEQ ID NO: 1547259 - RNA, 19 nt, Artificial Sequence
  Description of Artificial Sequence: Synthetic oligonucleotide
gggaccggucugugcuggc

SEQ ID NO: 1547260 - RNA, 19 nt, Artificial Sequence
  Description of Artificial Sequence: Synthetic oligonucleotide
gucagcaaacgggcacucu

SEQ ID NO: 1547261 - RNA, 19 nt, Artificial Sequence
  Description of Artificial Sequence: Synthetic oligonucleotide
ccucagaguuaagccauga

SEQ ID NO: 1547262 - RNA, 19 nt, Artificial Sequence
  Description of Artificial Sequence: Synthetic oligonucleotide
uucccgggccgugguggaa

SEQ ID NO: 1547263 - RNA, 19 nt, Artificial Sequence
  Description of Artificial Sequence: Synthetic oligonucleotide
cagugugagcccagguguu

SEQ ID NO: 1547264 - RNA, 19 nt, Artificial Sequence
  Description of Artificial Sequence: Synthetic oligonucleotide
ggaccggucugugcuggca

SEQ ID NO: 1547265 - RNA, 19 nt, Artificial Sequence
  Description of Artificial Sequence: Synthetic oligonucleotide
ccggucugugcuggcaaac

SEQ ID NO: 1547266 - RNA, 19 nt, Artificial Sequence
  Description of Artificial Sequence: Synthetic oligonucleotide
gacccacgagucacccucu

SEQ ID NO: 1547267 - RNA, 19 nt, Artificial Sequence
  Description of Artificial Sequence: Synthetic oligonucleotide
cacuagugaaaggggugau

SEQ ID NO: 1547268 - RNA, 19 nt, Artificial Sequence
  Description of Artificial Sequence: Synthetic oligonucleotide
ccggcccgggcgagcagcg

SEQ ID NO: 1547269 - RNA, 19 nt, Artificial Sequence
  Description of Artificial Sequence: Synthetic oligonucleotide
ccaggguuugcauggcuau

SEQ ID NO: 1547270 - RNA, 19 nt, Artificial Sequence
  Description of Artificial Sequence: Synthetic oligonucleotide
cuggcucacucagggcaaa

SEQ ID NO: 1547271 - RNA, 19 nt, Artificial Sequence
  Description of Artificial Sequence: Synthetic oligonucleotide
cccgggccgugguggaagc

SEQ ID NO: 1547272 - RNA, 19 nt, Artificial Sequence
  Description of Artificial Sequence: Synthetic oligonucleotide
cuccgugaugcgggcaucu

SEQ ID NO: 1547273 - RNA, 19 nt, Artificial Sequence
  Description of Artificial Sequence: Synthetic oligonucleotide
ggcacgucugacgcaacau

SEQ ID NO: 1547274 - RNA, 19 nt, Artificial Sequence
  Description of Artificial Sequence: Synthetic oligonucleotide
agcgggccaccggcccggg

SEQ ID NO: 1547275 - RNA, 19 nt, Artificial Sequence
  Description of Artificial Sequence: Synthetic oligonucleotide
caccggcccgggcgagcag

SEQ ID NO: 1547276 - RNA, 19 nt, Artificial Sequence
  Description of Artificial Sequence: Synthetic oligonucleotide
cggcaaucaccagucucug

SEQ ID NO: 1547277 - RNA, 19 nt, Artificial Sequence
  Description of Artificial Sequence: Synthetic oligonucleotide
gcgcucagcuggcaucucu

SEQ ID NO: 1547278 - RNA, 19 nt, Artificial Sequence
  Description of Artificial Sequence: Synthetic oligonucleotide
cagcgccugggaggcgaug

SEQ ID NO: 1547279 - RNA, 19 nt, Artificial Sequence
  Description of Artificial Sequence: Synthetic oligonucleotide
cgccacuagugaaaggggu

SEQ ID NO: 1547280 - RNA, 19 nt, Artificial Sequence
  Description of Artificial Sequence: Synthetic oligonucleotide
cagggcaaagcagccgauu

SEQ ID NO: 1547281 - RNA, 19 nt, Artificial Sequence
  Description of Artificial Sequence: Synthetic oligonucleotide
gcggagcgggccaccggcc

SEQ ID NO: 1547282 - RNA, 19 nt, Artificial Sequence
  Description of Artificial Sequence: Synthetic oligonucleotide
ccgguagcuccggagcaca

SEQ ID NO: 1547283 - RNA, 19 nt, Artificial Sequence
  Description of Artificial Sequence: Synthetic oligonucleotide
gggaugcgacaguccucaa

SEQ ID NO: 1547284 - RNA, 19 nt, Artificial Sequence
  Description of Artificial Sequence: Synthetic oligonucleotide
ccggagcacaugcccggca

SEQ ID NO: 1547285 - RNA, 19 nt, Artificial Sequence
  Description of Artificial Sequence: Synthetic oligonucleotide
ccauggccgacuccuugcu

SEQ ID NO: 1547286 - RNA, 19 nt, Artificial Sequence
  Description of Artificial Sequence: Synthetic oligonucleotide
cggcacgucugacgcaaca

SEQ ID NO: 1547287 - RNA, 19 nt, Artificial Sequence
  Description of Artificial Sequence: Synthetic oligonucleotide
gcgcagaccuccggaccuc

SEQ ID NO: 1547288 - RNA, 19 nt, Artificial Sequence
  Description of Artificial Sequence: Synthetic oligonucleotide
gcucggcggagcgggccac

SEQ ID NO: 1547289 - RNA, 19 nt, Artificial Sequence
  Description of Artificial Sequence: Synthetic oligonucleotide
cccgcaccgcugaacuccu

SEQ ID NO: 1547290 - RNA, 19 nt, Artificial Sequence
  Description of Artificial Sequence: Synthetic oligonucleotide
ccgaagccucccaggaguu

SEQ ID NO: 1547291 - RNA, 19 nt, Artificial Sequence
  Description of Artificial Sequence: Synthetic oligonucleotide
ggccccaaguagagagaau

SEQ ID NO: 1547292 - RNA, 19 nt, Artificial Sequence
  Description of Artificial Sequence: Synthetic oligonucleotide
ccgcaccgcugaacuccuc

SEQ ID NO: 1547293 - RNA, 19 nt, Artificial Sequence
  Description of Artificial Sequence: Synthetic oligonucleotide
cggcccauguccaggguuu

SEQ ID NO: 1547294 - RNA, 19 nt, Artificial Sequence
  Description of Artificial Sequence: Synthetic oligonucleotide
ggauggccugauggcuaau

SEQ ID NO: 1547295 - RNA, 19 nt, Artificial Sequence
  Description of Artificial Sequence: Synthetic oligonucleotide
ggccgacuccuugcugaau

SEQ ID NO: 1547296 - RNA, 19 nt, Artificial Sequence
  Description of Artificial Sequence: Synthetic oligonucleotide
ccgggccgugguggaagca

SEQ ID NO: 1547297 - RNA, 19 nt, Artificial Sequence
  Description of Artificial Sequence: Synthetic oligonucleotide
cgguagcuccggagcacau

SEQ ID NO: 1547298 - RNA, 19 nt, Artificial Sequence
  Description of Artificial Sequence: Synthetic oligonucleotide
cgaugccaauucggcccau

SEQ ID NO: 1547299 - RNA, 19 nt, Artificial Sequence
  Description of Artificial Sequence: Synthetic oligonucleotide
acggaaaagaaucagacgc

SEQ ID NO: 1547300 - RNA, 19 nt, Artificial Sequence
  Description of Artificial Sequence: Synthetic oligonucleotide
aaaagaaucagacgcuuac

SEQ ID NO: 1547301 - RNA, 19 nt, Artificial Sequence
  Description of Artificial Sequence: Synthetic oligonucleotide
aagacgauaucccacacuc

SEQ ID NO: 1547302 - RNA, 19 nt, Artificial Sequence
  Description of Artificial Sequence: Synthetic oligonucleotide
uuuuguacggaaaagaauc

SEQ ID NO: 1547303 - RNA, 19 nt, Artificial Sequence
  Description of Artificial Sequence: Synthetic oligonucleotide
guuaaagcaaaauagcugc

SEQ ID NO: 1547304 - RNA, 19 nt, Artificial Sequence
  Description of Artificial Sequence: Synthetic oligonucleotide
auugccaugguuuuguacg

SEQ ID NO: 1547305 - RNA, 19 nt, Artificial Sequence
  Description of Artificial Sequence: Synthetic oligonucleotide
agaaggaguagacaucucc

SEQ ID NO: 1547306 - RNA, 19 nt, Artificial Sequence
  Description of Artificial Sequence: Synthetic oligonucleotide
aaagccucgaugcugugcg

SEQ ID NO: 1547307 - RNA, 19 nt, Artificial Sequence
  Description of Artificial Sequence: Synthetic oligonucleotide
aaagucucaagguaccauc

SEQ ID NO: 1547308 - RNA, 19 nt, Artificial Sequence
  Description of Artificial Sequence: Synthetic oligonucleotide
ugugaagacgcagucaucg

SEQ ID NO: 1547309 - RNA, 19 nt, Artificial Sequence
  Description of Artificial Sequence: Synthetic oligonucleotide
aagguggccuuguaaagac

SEQ ID NO: 1547310 - RNA, 19 nt, Artificial Sequence
  Description of Artificial Sequence: Synthetic oligonucleotide
acauccaucaggcuccagc

SEQ ID NO: 1547311 - RNA, 19 nt, Artificial Sequence
  Description of Artificial Sequence: Synthetic oligonucleotide
ugcgaauccucaaagacga

SEQ ID NO: 1547312 - RNA, 19 nt, Artificial Sequence
  Description of Artificial Sequence: Synthetic oligonucleotide
agggucagcaaccaagggc

SEQ ID NO: 1547313 - RNA, 19 nt, Artificial Sequence
  Description of Artificial Sequence: Synthetic oligonucleotide
agaaugcaauccuggaugc

SEQ ID NO: 1547314 - RNA, 19 nt, Artificial Sequence
  Description of Artificial Sequence: Synthetic oligonucleotide
aguccugacacucagacau

SEQ ID NO: 1547315 - RNA, 19 nt, Artificial Sequence
  Description of Artificial Sequence: Synthetic oligonucleotide
uacucccaaagucucaagg

SEQ ID NO: 1547316 - RNA, 19 nt, Artificial Sequence
  Description of Artificial Sequence: Synthetic oligonucleotide
uguacggaaaagaaucaga

SEQ ID NO: 1547317 - RNA, 19 nt, Artificial Sequence
  Description of Artificial Sequence: Synthetic oligonucleotide
uacggaaaagaaucagacg

SEQ ID NO: 1547318 - RNA, 19 nt, Artificial Sequence
  Description of Artificial Sequence: Synthetic oligonucleotide
gaugaagaccacaggaacg

SEQ ID NO: 1547319 - RNA, 19 nt, Artificial Sequence
  Description of Artificial Sequence: Synthetic oligonucleotide
augaagaccacaggaacgc

SEQ ID NO: 1547320 - RNA, 19 nt, Artificial Sequence
  Description of Artificial Sequence: Synthetic oligonucleotide
uucaggaacagccugccac

SEQ ID NO: 1547321 - RNA, 19 nt, Artificial Sequence
  Description of Artificial Sequence: Synthetic oligonucleotide
aagaccugaucuucugagg

SEQ ID NO: 1547322 - RNA, 19 nt, Artificial Sequence
  Description of Artificial Sequence: Synthetic oligonucleotide
uuuuggucuguucugggga

SEQ ID NO: 1547323 - RNA, 19 nt, Artificial Sequence
  Description of Artificial Sequence: Synthetic oligonucleotide
uggucaucaggacucacag

SEQ ID NO: 1547324 - RNA, 19 nt, Artificial Sequence
  Description of Artificial Sequence: Synthetic oligonucleotide
cagaaugcaauccuggaug

SEQ ID NO: 1547325 - RNA, 19 nt, Artificial Sequence
  Description of Artificial Sequence: Synthetic oligonucleotide
aagucucaagguaccaucc

SEQ ID NO: 1547326 - RNA, 19 nt, Artificial Sequence
  Description of Artificial Sequence: Synthetic oligonucleotide
uuuguacggaaaagaauca

SEQ ID NO: 1547327 - RNA, 19 nt, Artificial Sequence
  Description of Artificial Sequence: Synthetic oligonucleotide
cuuguaaagacugcggaag

SEQ ID NO: 1547328 - RNA, 19 nt, Artificial Sequence
  Description of Artificial Sequence: Synthetic oligonucleotide
aguuaaagcaaaauagcug

SEQ ID NO: 1547329 - RNA, 19 nt, Artificial Sequence
  Description of Artificial Sequence: Synthetic oligonucleotide
gaaucagacgcuuacuguc

SEQ ID NO: 1547330 - RNA, 19 nt, Artificial Sequence
  Description of Artificial Sequence: Synthetic oligonucleotide
ggaugaaccaggcaggagg

SEQ ID NO: 1547331 - RNA, 19 nt, Artificial Sequence
  Description of Artificial Sequence: Synthetic oligonucleotide
ucucuuguccccagaaugc

SEQ ID NO: 1547332 - RNA, 19 nt, Artificial Sequence
  Description of Artificial Sequence: Synthetic oligonucleotide
ugaggcugugaaaaccagg

SEQ ID NO: 1547333 - RNA, 19 nt, Artificial Sequence
  Description of Artificial Sequence: Synthetic oligonucleotide
agauuuguccgccaccaag

SEQ ID NO: 1547334 - RNA, 19 nt, Artificial Sequence
  Description of Artificial Sequence: Synthetic oligonucleotide
cugcgaauccucaaagacg

SEQ ID NO: 1547335 - RNA, 19 nt, Artificial Sequence
  Description of Artificial Sequence: Synthetic oligonucleotide
uaguaguggggacugagcu

SEQ ID NO: 1547336 - RNA, 19 nt, Artificial Sequence
  Description of Artificial Sequence: Synthetic oligonucleotide
ugaaaaccagggcagugca

SEQ ID NO: 1547337 - RNA, 19 nt, Artificial Sequence
  Description of Artificial Sequence: Synthetic oligonucleotide
uccuguacucccaaagucu

SEQ ID NO: 1547338 - RNA, 19 nt, Artificial Sequence
  Description of Artificial Sequence: Synthetic oligonucleotide
uuguaaagacugcggaagc

SEQ ID NO: 1547339 - RNA, 19 nt, Artificial Sequence
  Description of Artificial Sequence: Synthetic oligonucleotide
cuguuugcuggcaucaagc

SEQ ID NO: 1547340 - RNA, 19 nt, Artificial Sequence
  Description of Artificial Sequence: Synthetic oligonucleotide
agcguuuggccgcacagcg

SEQ ID NO: 1547341 - RNA, 19 nt, Artificial Sequence
  Description of Artificial Sequence: Synthetic oligonucleotide
cagucguaugugaagacgc

SEQ ID NO: 1547342 - RNA, 19 nt, Artificial Sequence
  Description of Artificial Sequence: Synthetic oligonucleotide
gacgcagucaucgucacug

SEQ ID NO: 1547343 - RNA, 19 nt, Artificial Sequence
  Description of Artificial Sequence: Synthetic oligonucleotide
gaagguggacgccagaauc

SEQ ID NO: 1547344 - RNA, 19 nt, Artificial Sequence
  Description of Artificial Sequence: Synthetic oligonucleotide
cucaaagacgauaucccac

SEQ ID NO: 1547345 - RNA, 19 nt, Artificial Sequence
  Description of Artificial Sequence: Synthetic oligonucleotide
cugacacucagacauugcc

SEQ ID NO: 1547346 - RNA, 19 nt, Artificial Sequence
  Description of Artificial Sequence: Synthetic oligonucleotide
accacgagcguuuggccgc

SEQ ID NO: 1547347 - RNA, 19 nt, Artificial Sequence
  Description of Artificial Sequence: Synthetic oligonucleotide
agcgucacgacaguccugc

SEQ ID NO: 1547348 - RNA, 19 nt, Artificial Sequence
  Description of Artificial Sequence: Synthetic oligonucleotide
uuacugucaucaguuaaag

SEQ ID NO: 1547349 - RNA, 19 nt, Artificial Sequence
  Description of Artificial Sequence: Synthetic oligonucleotide
aagguggacgccagaaucg

SEQ ID NO: 1547350 - RNA, 19 nt, Artificial Sequence
  Description of Artificial Sequence: Synthetic oligonucleotide
ucaucgucacugcuuguag

SEQ ID NO: 1547351 - RNA, 19 nt, Artificial Sequence
  Description of Artificial Sequence: Synthetic oligonucleotide
aagacgcagucaucgucac

SEQ ID NO: 1547352 - RNA, 19 nt, Artificial Sequence
  Description of Artificial Sequence: Synthetic oligonucleotide
aagcucagggucagcaacc

SEQ ID NO: 1547353 - RNA, 19 nt, Artificial Sequence
  Description of Artificial Sequence: Synthetic oligonucleotide
ugcagagucuccuggacac

SEQ ID NO: 1547354 - RNA, 19 nt, Artificial Sequence
  Description of Artificial Sequence: Synthetic oligonucleotide
auuuguccgccaccaagac

SEQ ID NO: 1547355 - RNA, 19 nt, Artificial Sequence
  Description of Artificial Sequence: Synthetic oligonucleotide
ucguaugugaagacgcagu

SEQ ID NO: 1547356 - RNA, 19 nt, Artificial Sequence
  Description of Artificial Sequence: Synthetic oligonucleotide
uguaaagacugcggaagcc

SEQ ID NO: 1547357 - RNA, 19 nt, Artificial Sequence
  Description of Artificial Sequence: Synthetic oligonucleotide
acaaccaagaugcggcuca

SEQ ID NO: 1547358 - RNA, 19 nt, Artificial Sequence
  Description of Artificial Sequence: Synthetic oligonucleotide
cagguaagaggucauguug

SEQ ID NO: 1547359 - RNA, 19 nt, Artificial Sequence
  Description of Artificial Sequence: Synthetic oligonucleotide
aucgucacugcuuguagug

SEQ ID NO: 1547360 - RNA, 19 nt, Artificial Sequence
  Description of Artificial Sequence: Synthetic oligonucleotide
cucacacagaagcacuacg

SEQ ID NO: 1547361 - RNA, 19 nt, Artificial Sequence
  Description of Artificial Sequence: Synthetic oligonucleotide
aaaauagcugccagacuug

SEQ ID NO: 1547362 - RNA, 19 nt, Artificial Sequence
  Description of Artificial Sequence: Synthetic oligonucleotide
guacggaaaagaaucagac

SEQ ID NO: 1547363 - RNA, 19 nt, Artificial Sequence
  Description of Artificial Sequence: Synthetic oligonucleotide
cacucagacauugccaugg

SEQ ID NO: 1547364 - RNA, 19 nt, Artificial Sequence
  Description of Artificial Sequence: Synthetic oligonucleotide
uguagucucucuucuuucu

SEQ ID NO: 1547365 - RNA, 19 nt, Artificial Sequence
  Description of Artificial Sequence: Synthetic oligonucleotide
cuuguaguggagauggcca

SEQ ID NO: 1547366 - RNA, 19 nt, Artificial Sequence
  Description of Artificial Sequence: Synthetic oligonucleotide
aagacugcggaagccauca

SEQ ID NO: 1547367 - RNA, 19 nt, Artificial Sequence
  Description of Artificial Sequence: Synthetic oligonucleotide
uuguacggaaaagaaucag

SEQ ID NO: 1547368 - RNA, 19 nt, Artificial Sequence
  Description of Artificial Sequence: Synthetic oligonucleotide
uugccaugguuuuguacgg

SEQ ID NO: 1547369 - RNA, 19 nt, Artificial Sequence
  Description of Artificial Sequence: Synthetic oligonucleotide
ugaagacgcagucaucguc

SEQ ID NO: 1547370 - RNA, 19 nt, Artificial Sequence
  Description of Artificial Sequence: Synthetic oligonucleotide
uguuugcuggcaucaagcu

SEQ ID NO: 1547371 - RNA, 19 nt, Artificial Sequence
  Description of Artificial Sequence: Synthetic oligonucleotide
accaagggcugacugcucg

SEQ ID NO: 1547372 - RNA, 19 nt, Artificial Sequence
  Description of Artificial Sequence: Synthetic oligonucleotide
caacuugccacauccauca

SEQ ID NO: 1547373 - RNA, 19 nt, Artificial Sequence
  Description of Artificial Sequence: Synthetic oligonucleotide
ugacugggcacaaccaaga

SEQ ID NO: 1547374 - RNA, 19 nt, Artificial Sequence
  Description of Artificial Sequence: Synthetic oligonucleotide
guaguggggacugagcugc

SEQ ID NO: 1547375 - RNA, 19 nt, Artificial Sequence
  Description of Artificial Sequence: Synthetic oligonucleotide
guggagauggccaggaacc

SEQ ID NO: 1547376 - RNA, 19 nt, Artificial Sequence
  Description of Artificial Sequence: Synthetic oligonucleotide
uuuguccgccaccaagacc

SEQ ID NO: 1547377 - RNA, 19 nt, Artificial Sequence
  Description of Artificial Sequence: Synthetic oligonucleotide
uggccuuguaaagacugcg

SEQ ID NO: 1547378 - RNA, 19 nt, Artificial Sequence
  Description of Artificial Sequence: Synthetic oligonucleotide
gggagaguggcccaugagg

SEQ ID NO: 1547379 - RNA, 19 nt, Artificial Sequence
  Description of Artificial Sequence: Synthetic oligonucleotide
aagguaccauccccagagg

SEQ ID NO: 1547380 - RNA, 19 nt, Artificial Sequence
  Description of Artificial Sequence: Synthetic oligonucleotide
ugucccaagcagaaagccu

SEQ ID NO: 1547381 - RNA, 19 nt, Artificial Sequence
  Description of Artificial Sequence: Synthetic oligonucleotide
cuaguaguggggacugagc

SEQ ID NO: 1547382 - RNA, 19 nt, Artificial Sequence
  Description of Artificial Sequence: Synthetic oligonucleotide
cuacgcagcucucuugucc

SEQ ID NO: 1547383 - RNA, 19 nt, Artificial Sequence
  Description of Artificial Sequence: Synthetic oligonucleotide
uucagguaagaggucaugu

SEQ ID NO: 1547384 - RNA, 19 nt, Artificial Sequence
  Description of Artificial Sequence: Synthetic oligonucleotide
cuugucgaugggcuguccg

SEQ ID NO: 1547385 - RNA, 19 nt, Artificial Sequence
  Description of Artificial Sequence: Synthetic oligonucleotide
aucuccagauuuguccgcc

SEQ ID NO: 1547386 - RNA, 19 nt, Artificial Sequence
  Description of Artificial Sequence: Synthetic oligonucleotide
cacaaacuggucaucagga

SEQ ID NO: 1547387 - RNA, 19 nt, Artificial Sequence
  Description of Artificial Sequence: Synthetic oligonucleotide
uccagauuuguccgccacc

SEQ ID NO: 1547388 - RNA, 19 nt, Artificial Sequence
  Description of Artificial Sequence: Synthetic oligonucleotide
gucucaagguaccaucccc

SEQ ID NO: 1547389 - RNA, 19 nt, Artificial Sequence
  Description of Artificial Sequence: Synthetic oligonucleotide
caucaguuaaagcaaaaua

SEQ ID NO: 1547390 - RNA, 19 nt, Artificial Sequence
  Description of Artificial Sequence: Synthetic oligonucleotide
ugcaauccuggaugcagcc

SEQ ID NO: 1547391 - RNA, 19 nt, Artificial Sequence
  Description of Artificial Sequence: Synthetic oligonucleotide
agccacaucuagcagcaug

SEQ ID NO: 1547392 - RNA, 19 nt, Artificial Sequence
  Description of Artificial Sequence: Synthetic oligonucleotide
uuuucuccgcagcacugca

SEQ ID NO: 1547393 - RNA, 19 nt, Artificial Sequence
  Description of Artificial Sequence: Synthetic oligonucleotide
uuuggucuguucuggggac

SEQ ID NO: 1547394 - RNA, 19 nt, Artificial Sequence
  Description of Artificial Sequence: Synthetic oligonucleotide
ugugaaaaccagggcagug

SEQ ID NO: 1547395 - RNA, 19 nt, Artificial Sequence
  Description of Artificial Sequence: Synthetic oligonucleotide
aaucagacgcuuacuguca

SEQ ID NO: 1547396 - RNA, 19 nt, Artificial Sequence
  Description of Artificial Sequence: Synthetic oligonucleotide
uccguccuccccuuuaucu

SEQ ID NO: 1547397 - RNA, 19 nt, Artificial Sequence
  Description of Artificial Sequence: Synthetic oligonucleotide
uacugucaucaguuaaagc

SEQ ID NO: 1547398 - RNA, 19 nt, Artificial Sequence
  Description of Artificial Sequence: Synthetic oligonucleotide
uaaagacugcggaagccau

SEQ ID NO: 1547399 - RNA, 19 nt, Artificial Sequence
  Description of Artificial Sequence: Synthetic oligonucleotide
agcaaccaagggcugacug

SEQ ID NO: 1547400 - RNA, 19 nt, Artificial Sequence
  Description of Artificial Sequence: Synthetic oligonucleotide
acucacagccacaucuagc

SEQ ID NO: 1547401 - RNA, 19 nt, Artificial Sequence
  Description of Artificial Sequence: Synthetic oligonucleotide
aaacucugugugucccaag

SEQ ID NO: 1547402 - RNA, 19 nt, Artificial Sequence
  Description of Artificial Sequence: Synthetic oligonucleotide
gcacaaacuggucaucagg

SEQ ID NO: 1547403 - RNA, 19 nt, Artificial Sequence
  Description of Artificial Sequence: Synthetic oligonucleotide
auaucccacacucgaugag

SEQ ID NO: 1547404 - RNA, 19 nt, Artificial Sequence
  Description of Artificial Sequence: Synthetic oligonucleotide
ugugcggagcagcagccca

SEQ ID NO: 1547405 - RNA, 19 nt, Artificial Sequence
  Description of Artificial Sequence: Synthetic oligonucleotide
ucgaugagggaaagucagc

SEQ ID NO: 1547406 - RNA, 19 nt, Artificial Sequence
  Description of Artificial Sequence: Synthetic oligonucleotide
acuccuguacucccaaagu

SEQ ID NO: 1547407 - RNA, 19 nt, Artificial Sequence
  Description of Artificial Sequence: Synthetic oligonucleotide
uccccuuuaucuccuggca

SEQ ID NO: 1547408 - RNA, 19 nt, Artificial Sequence
  Description of Artificial Sequence: Synthetic oligonucleotide
aagaccacaggaacgcacu

SEQ ID NO: 1547409 - RNA, 19 nt, Artificial Sequence
  Description of Artificial Sequence: Synthetic oligonucleotide
gaugacugggcacaaccaa

SEQ ID NO: 1547410 - RNA, 19 nt, Artificial Sequence
  Description of Artificial Sequence: Synthetic oligonucleotide
gucacgacaguccugcaga

SEQ ID NO: 1547411 - RNA, 19 nt, Artificial Sequence
  Description of Artificial Sequence: Synthetic oligonucleotide
aaagacugcggaagccauc

SEQ ID NO: 1547412 - RNA, 19 nt, Artificial Sequence
  Description of Artificial Sequence: Synthetic oligonucleotide
ucacgaagauggcugcaga

SEQ ID NO: 1547413 - RNA, 19 nt, Artificial Sequence
  Description of Artificial Sequence: Synthetic oligonucleotide
caccacgagcguuuggccg

SEQ ID NO: 1547414 - RNA, 19 nt, Artificial Sequence
  Description of Artificial Sequence: Synthetic oligonucleotide
acuaggggagcgucacgac

SEQ ID NO: 1547415 - RNA, 19 nt, Artificial Sequence
  Description of Artificial Sequence: Synthetic oligonucleotide
ucagguaagaggucauguu

SEQ ID NO: 1547416 - RNA, 19 nt, Artificial Sequence
  Description of Artificial Sequence: Synthetic oligonucleotide
gugaaaaccagggcagugc

SEQ ID NO: 1547417 - RNA, 19 nt, Artificial Sequence
  Description of Artificial Sequence: Synthetic oligonucleotide
uguacucccaaagucucaa

SEQ ID NO: 1547418 - RNA, 19 nt, Artificial Sequence
  Description of Artificial Sequence: Synthetic oligonucleotide
ggcugugaaaaccagggca

SEQ ID NO: 1547419 - RNA, 19 nt, Artificial Sequence
  Description of Artificial Sequence: Synthetic oligonucleotide
agcacuaggggagcgucac

SEQ ID NO: 1547420 - RNA, 19 nt, Artificial Sequence
  Description of Artificial Sequence: Synthetic oligonucleotide
ggcacaaccaagaugcggc

SEQ ID NO: 1547421 - RNA, 19 nt, Artificial Sequence
  Description of Artificial Sequence: Synthetic oligonucleotide
uuggagaagguggacgcca

SEQ ID NO: 1547422 - RNA, 19 nt, Artificial Sequence
  Description of Artificial Sequence: Synthetic oligonucleotide
acucacacagaagcacuac

SEQ ID NO: 1547423 - RNA, 19 nt, Artificial Sequence
  Description of Artificial Sequence: Synthetic oligonucleotide
uuaucuccuggcacugacu

SEQ ID NO: 1547424 - RNA, 19 nt, Artificial Sequence
  Description of Artificial Sequence: Synthetic oligonucleotide
cuugauggucugcaggcuc

SEQ ID NO: 1547425 - RNA, 19 nt, Artificial Sequence
  Description of Artificial Sequence: Synthetic oligonucleotide
ugaccucccucucuccuug

SEQ ID NO: 1547426 - RNA, 19 nt, Artificial Sequence
  Description of Artificial Sequence: Synthetic oligonucleotide
caugguuuuguacggaaaa

SEQ ID NO: 1547427 - RNA, 19 nt, Artificial Sequence
  Description of Artificial Sequence: Synthetic oligonucleotide
cuccuguacucccaaaguc

SEQ ID NO: 1547428 - RNA, 19 nt, Artificial Sequence
  Description of Artificial Sequence: Synthetic oligonucleotide
ggagaggugcccaaguucc

SEQ ID NO: 1547429 - RNA, 19 nt, Artificial Sequence
  Description of Artificial Sequence: Synthetic oligonucleotide
agguaccauccccagagga

SEQ ID NO: 1547430 - RNA, 19 nt, Artificial Sequence
  Description of Artificial Sequence: Synthetic oligonucleotide
uccugacacucagacauug

SEQ ID NO: 1547431 - RNA, 19 nt, Artificial Sequence
  Description of Artificial Sequence: Synthetic oligonucleotide
ugcugccaagcucaggguc

SEQ ID NO: 1547432 - RNA, 19 nt, Artificial Sequence
  Description of Artificial Sequence: Synthetic oligonucleotide
agagcacuaggggagcguc

SEQ ID NO: 1547433 - RNA, 19 nt, Artificial Sequence
  Description of Artificial Sequence: Synthetic oligonucleotide
gaaagccucgaugcugugc

SEQ ID NO: 1547434 - RNA, 19 nt, Artificial Sequence
  Description of Artificial Sequence: Synthetic oligonucleotide
aaggcuagccaggucacaa

SEQ ID NO: 1547435 - RNA, 19 nt, Artificial Sequence
  Description of Artificial Sequence: Synthetic oligonucleotide
agggaaagucagcugcugu

SEQ ID NO: 1547436 - RNA, 19 nt, Artificial Sequence
  Description of Artificial Sequence: Synthetic oligonucleotide
cucucacgaagauggcugc

SEQ ID NO: 1547437 - RNA, 19 nt, Artificial Sequence
  Description of Artificial Sequence: Synthetic oligonucleotide
agaccacaggaacgcacuc

SEQ ID NO: 1547438 - RNA, 19 nt, Artificial Sequence
  Description of Artificial Sequence: Synthetic oligonucleotide
aggcuagccaggucacaac

SEQ ID NO: 1547439 - RNA, 19 nt, Artificial Sequence
  Description of Artificial Sequence: Synthetic oligonucleotide
ugccacugaccacccacag

SEQ ID NO: 1547440 - RNA, 19 nt, Artificial Sequence
  Description of Artificial Sequence: Synthetic oligonucleotide
gacacucagacauugccau

SEQ ID NO: 1547441 - RNA, 19 nt, Artificial Sequence
  Description of Artificial Sequence: Synthetic oligonucleotide
ggagaguggcccaugaggc

SEQ ID NO: 1547442 - RNA, 19 nt, Artificial Sequence
  Description of Artificial Sequence: Synthetic oligonucleotide
ugcagaacccacagccccu

SEQ ID NO: 1547443 - RNA, 19 nt, Artificial Sequence
  Description of Artificial Sequence: Synthetic oligonucleotide
acgcagucaucgucacugc

SEQ ID NO: 1547444 - RNA, 19 nt, Artificial Sequence
  Description of Artificial Sequence: Synthetic oligonucleotide
uccgcagcacugcagucgu

SEQ ID NO: 1547445 - RNA, 19 nt, Artificial Sequence
  Description of Artificial Sequence: Synthetic oligonucleotide
aacuugccacauccaucag

SEQ ID NO: 1547446 - RNA, 19 nt, Artificial Sequence
  Description of Artificial Sequence: Synthetic oligonucleotide
gaauccucaaagacgauau

SEQ ID NO: 1547447 - RNA, 19 nt, Artificial Sequence
  Description of Artificial Sequence: Synthetic oligonucleotide
acuacgcagcucucuuguc

SEQ ID NO: 1547448 - RNA, 19 nt, Artificial Sequence
  Description of Artificial Sequence: Synthetic oligonucleotide
auccccagaggaggaaagc

SEQ ID NO: 1547449 - RNA, 19 nt, Artificial Sequence
  Description of Artificial Sequence: Synthetic oligonucleotide
ccugcgaauccucaaagac

SEQ ID NO: 1547450 - RNA, 19 nt, Artificial Sequence
  Description of Artificial Sequence: Synthetic oligonucleotide
gucguaugugaagacgcag

SEQ ID NO: 1547451 - RNA, 19 nt, Artificial Sequence
  Description of Artificial Sequence: Synthetic oligonucleotide
ggcucacaaacucugugug

SEQ ID NO: 1547452 - RNA, 19 nt, Artificial Sequence
  Description of Artificial Sequence: Synthetic oligonucleotide
agcaccgagaaggaguaga

SEQ ID NO: 1547453 - RNA, 19 nt, Artificial Sequence
  Description of Artificial Sequence: Synthetic oligonucleotide
ugaucuucugaggcuguga

SEQ ID NO: 1547454 - RNA, 19 nt, Artificial Sequence
  Description of Artificial Sequence: Synthetic oligonucleotide
ucagcaaccaagggcugac

SEQ ID NO: 1547455 - RNA, 19 nt, Artificial Sequence
  Description of Artificial Sequence: Synthetic oligonucleotide
aucccacacucgaugaggg

SEQ ID NO: 1547456 - RNA, 19 nt, Artificial Sequence
  Description of Artificial Sequence: Synthetic oligonucleotide
ugcaccuccgcaccacagu

SEQ ID NO: 1547457 - RNA, 19 nt, Artificial Sequence
  Description of Artificial Sequence: Synthetic oligonucleotide
gaacaccagcugcuguuug

SEQ ID NO: 1547458 - RNA, 19 nt, Artificial Sequence
  Description of Artificial Sequence: Synthetic oligonucleotide
aagccucgaugcugugcgg

SEQ ID NO: 1547459 - RNA, 19 nt, Artificial Sequence
  Description of Artificial Sequence: Synthetic oligonucleotide
aggaggaaagcagcagcuc

SEQ ID NO: 1547460 - RNA, 19 nt, Artificial Sequence
  Description of Artificial Sequence: Synthetic oligonucleotide
cacacagaagcacuacgca

SEQ ID NO: 1547461 - RNA, 19 nt, Artificial Sequence
  Description of Artificial Sequence: Synthetic oligonucleotide
cucacgaagauggcugcag

SEQ ID NO: 1547462 - RNA, 19 nt, Artificial Sequence
  Description of Artificial Sequence: Synthetic oligonucleotide
uuccaacuugccacaucca

SEQ ID NO: 1547463 - RNA, 19 nt, Artificial Sequence
  Description of Artificial Sequence: Synthetic oligonucleotide
caucuccagauuuguccgc

SEQ ID NO: 1547464 - RNA, 19 nt, Artificial Sequence
  Description of Artificial Sequence: Synthetic oligonucleotide
acugcuuguaguggagaug

SEQ ID NO: 1547465 - RNA, 19 nt, Artificial Sequence
  Description of Artificial Sequence: Synthetic oligonucleotide
gguggccuuguaaagacug

SEQ ID NO: 1547466 - RNA, 19 nt, Artificial Sequence
  Description of Artificial Sequence: Synthetic oligonucleotide
gugucccaagcagaaagcc

SEQ ID NO: 1547467 - RNA, 19 nt, Artificial Sequence
  Description of Artificial Sequence: Synthetic oligonucleotide
gacgcuuacugucaucagu

SEQ ID NO: 1547468 - RNA, 19 nt, Artificial Sequence
  Description of Artificial Sequence: Synthetic oligonucleotide
acugagcugccaugaccuc

SEQ ID NO: 1547469 - RNA, 19 nt, Artificial Sequence
  Description of Artificial Sequence: Synthetic oligonucleotide
gcagucguaugugaagacg

SEQ ID NO: 1547470 - RNA, 19 nt, Artificial Sequence
  Description of Artificial Sequence: Synthetic oligonucleotide
gcaucaagcuggaagauga

SEQ ID NO: 1547471 - RNA, 19 nt, Artificial Sequence
  Description of Artificial Sequence: Synthetic oligonucleotide
gccagaaucgugucacucc

SEQ ID NO: 1547472 - RNA, 19 nt, Artificial Sequence
  Description of Artificial Sequence: Synthetic oligonucleotide
caaguuccaacuugccaca

SEQ ID NO: 1547473 - RNA, 19 nt, Artificial Sequence
  Description of Artificial Sequence: Synthetic oligonucleotide
cuccgcagcacugcagucg

SEQ ID NO: 1547474 - RNA, 19 nt, Artificial Sequence
  Description of Artificial Sequence: Synthetic oligonucleotide
agacgcuuacugucaucag

SEQ ID NO: 1547475 - RNA, 19 nt, Artificial Sequence
  Description of Artificial Sequence: Synthetic oligonucleotide
ccagaaucgugucacuccc

SEQ ID NO: 1547476 - RNA, 19 nt, Artificial Sequence
  Description of Artificial Sequence: Synthetic oligonucleotide
cagacgcuuacugucauca

SEQ ID NO: 1547477 - RNA, 19 nt, Artificial Sequence
  Description of Artificial Sequence: Synthetic oligonucleotide
uaccauccccagaggagga

SEQ ID NO: 1547478 - RNA, 19 nt, Artificial Sequence
  Description of Artificial Sequence: Synthetic oligonucleotide
gagcuaguaguggggacug

SEQ ID NO: 1547479 - RNA, 19 nt, Artificial Sequence
  Description of Artificial Sequence: Synthetic oligonucleotide
uggagcuaguaguggggac

SEQ ID NO: 1547480 - RNA, 19 nt, Artificial Sequence
  Description of Artificial Sequence: Synthetic oligonucleotide
gaacgcacucacacagaag

SEQ ID NO: 1547481 - RNA, 19 nt, Artificial Sequence
  Description of Artificial Sequence: Synthetic oligonucleotide
agacgauaucccacacucg

SEQ ID NO: 1547482 - RNA, 19 nt, Artificial Sequence
  Description of Artificial Sequence: Synthetic oligonucleotide
uccgccaccaagaccugau

SEQ ID NO: 1547483 - RNA, 19 nt, Artificial Sequence
  Description of Artificial Sequence: Synthetic oligonucleotide
uggaugaaccaggcaggag

SEQ ID NO: 1547484 - RNA, 19 nt, Artificial Sequence
  Description of Artificial Sequence: Synthetic oligonucleotide
gaaaagaaucagacgcuua

SEQ ID NO: 1547485 - RNA, 19 nt, Artificial Sequence
  Description of Artificial Sequence: Synthetic oligonucleotide
cagaaucgugucacucccc

SEQ ID NO: 1547486 - RNA, 19 nt, Artificial Sequence
  Description of Artificial Sequence: Synthetic oligonucleotide
acacucagacauugccaug

SEQ ID NO: 1547487 - RNA, 19 nt, Artificial Sequence
  Description of Artificial Sequence: Synthetic oligonucleotide
gguuuuguacggaaaagaa

SEQ ID NO: 1547488 - RNA, 19 nt, Artificial Sequence
  Description of Artificial Sequence: Synthetic oligonucleotide
gacauugccaugguuuugu

SEQ ID NO: 1547489 - RNA, 19 nt, Artificial Sequence
  Description of Artificial Sequence: Synthetic oligonucleotide
uuuggccgcacagcgccag

SEQ ID NO: 1547490 - RNA, 19 nt, Artificial Sequence
  Description of Artificial Sequence: Synthetic oligonucleotide
aagcacuacgcagcucucu

SEQ ID NO: 1547491 - RNA, 19 nt, Artificial Sequence
  Description of Artificial Sequence: Synthetic oligonucleotide
guaagaggucauguuguca

SEQ ID NO: 1547492 - RNA, 19 nt, Artificial Sequence
  Description of Artificial Sequence: Synthetic oligonucleotide
gcuguuugcuggcaucaag

SEQ ID NO: 1547493 - RNA, 19 nt, Artificial Sequence
  Description of Artificial Sequence: Synthetic oligonucleotide
acucgaugagggaaaguca

SEQ ID NO: 1547494 - RNA, 19 nt, Artificial Sequence
  Description of Artificial Sequence: Synthetic oligonucleotide
gugucacuccccuugucga

SEQ ID NO: 1547495 - RNA, 19 nt, Artificial Sequence
  Description of Artificial Sequence: Synthetic oligonucleotide
cugaccacccacaggccuc

SEQ ID NO: 1547496 - RNA, 19 nt, Artificial Sequence
  Description of Artificial Sequence: Synthetic oligonucleotide
gcucucacgaagauggcug

SEQ ID NO: 1547497 - RNA, 19 nt, Artificial Sequence
  Description of Artificial Sequence: Synthetic oligonucleotide
agcucucuuguccccagaa

SEQ ID NO: 1547498 - RNA, 19 nt, Artificial Sequence
  Description of Artificial Sequence: Synthetic oligonucleotide
cuccagauuuguccgccac

SEQ ID NO: 1547499 - RNA, 19 nt, Artificial Sequence
  Description of Artificial Sequence: Synthetic oligonucleotide
guacucccaaagucucaag

SEQ ID NO: 1547500 - RNA, 19 nt, Artificial Sequence
  Description of Artificial Sequence: Synthetic oligonucleotide
aggucacaacacugcagcu

SEQ ID NO: 1547501 - RNA, 19 nt, Artificial Sequence
  Description of Artificial Sequence: Synthetic oligonucleotide
cuagcagcauggagaggug

SEQ ID NO: 1547502 - RNA, 19 nt, Artificial Sequence
  Description of Artificial Sequence: Synthetic oligonucleotide
aucagacgcuuacugucau

SEQ ID NO: 1547503 - RNA, 19 nt, Artificial Sequence
  Description of Artificial Sequence: Synthetic oligonucleotide
aucgugucacuccccuugu

SEQ ID NO: 1547504 - RNA, 19 nt, Artificial Sequence
  Description of Artificial Sequence: Synthetic oligonucleotide
cauggcccagcucucacga

SEQ ID NO: 1547505 - RNA, 19 nt, Artificial Sequence
  Description of Artificial Sequence: Synthetic oligonucleotide
ugucacuccccuugucgau

SEQ ID NO: 1547506 - RNA, 19 nt, Artificial Sequence
  Description of Artificial Sequence: Synthetic oligonucleotide
acgcuuacugucaucaguu

SEQ ID NO: 1547507 - RNA, 19 nt, Artificial Sequence
  Description of Artificial Sequence: Synthetic oligonucleotide
gguaagaggucauguuguc

SEQ ID NO: 1547508 - RNA, 19 nt, Artificial Sequence
  Description of Artificial Sequence: Synthetic oligonucleotide
cuaggggagcgucacgaca

SEQ ID NO: 1547509 - RNA, 19 nt, Artificial Sequence
  Description of Artificial Sequence: Synthetic oligonucleotide
gcuaguaguggggacugag

SEQ ID NO: 1547510 - RNA, 19 nt, Artificial Sequence
  Description of Artificial Sequence: Synthetic oligonucleotide
guuuuguacggaaaagaau

SEQ ID NO: 1547511 - RNA, 19 nt, Artificial Sequence
  Description of Artificial Sequence: Synthetic oligonucleotide
ugucaaagguggccuugua

SEQ ID NO: 1547512 - RNA, 19 nt, Artificial Sequence
  Description of Artificial Sequence: Synthetic oligonucleotide
gauggucugcaggcucccg

SEQ ID NO: 1547513 - RNA, 19 nt, Artificial Sequence
  Description of Artificial Sequence: Synthetic oligonucleotide
gagcguuuggccgcacagc

SEQ ID NO: 1547514 - RNA, 19 nt, Artificial Sequence
  Description of Artificial Sequence: Synthetic oligonucleotide
ucacgacaguccugcagaa

SEQ ID NO: 1547515 - RNA, 19 nt, Artificial Sequence
  Description of Artificial Sequence: Synthetic oligonucleotide
cucccaaagucucaaggua

SEQ ID NO: 1547516 - RNA, 19 nt, Artificial Sequence
  Description of Artificial Sequence: Synthetic oligonucleotide
guaguggagauggccagga

SEQ ID NO: 1547517 - RNA, 19 nt, Artificial Sequence
  Description of Artificial Sequence: Synthetic oligonucleotide
caucccgguccgcagugag

SEQ ID NO: 1547518 - RNA, 19 nt, Artificial Sequence
  Description of Artificial Sequence: Synthetic oligonucleotide
gccuuguaaagacugcgga

SEQ ID NO: 1547519 - RNA, 19 nt, Artificial Sequence
  Description of Artificial Sequence: Synthetic oligonucleotide
ucucacgaagauggcugca

SEQ ID NO: 1547520 - RNA, 19 nt, Artificial Sequence
  Description of Artificial Sequence: Synthetic oligonucleotide
ccuuguggaugaaccaggc

SEQ ID NO: 1547521 - RNA, 19 nt, Artificial Sequence
  Description of Artificial Sequence: Synthetic oligonucleotide
agacauugccaugguuuug

SEQ ID NO: 1547522 - RNA, 19 nt, Artificial Sequence
  Description of Artificial Sequence: Synthetic oligonucleotide
uggagauggccaggaaccu

SEQ ID NO: 1547523 - RNA, 19 nt, Artificial Sequence
  Description of Artificial Sequence: Synthetic oligonucleotide
agucguaugugaagacgca

SEQ ID NO: 1547524 - RNA, 19 nt, Artificial Sequence
  Description of Artificial Sequence: Synthetic oligonucleotide
agugcaccuccgcaccaca

SEQ ID NO: 1547525 - RNA, 19 nt, Artificial Sequence
  Description of Artificial Sequence: Synthetic oligonucleotide
uggacgccagaaucguguc

SEQ ID NO: 1547526 - RNA, 19 nt, Artificial Sequence
  Description of Artificial Sequence: Synthetic oligonucleotide
uccccuugucgaugggcug

SEQ ID NO: 1547527 - RNA, 19 nt, Artificial Sequence
  Description of Artificial Sequence: Synthetic oligonucleotide
ccuguacucccaaagucuc

SEQ ID NO: 1547528 - RNA, 19 nt, Artificial Sequence
  Description of Artificial Sequence: Synthetic oligonucleotide
cugcagucguaugugaaga

SEQ ID NO: 1547529 - RNA, 19 nt, Artificial Sequence
  Description of Artificial Sequence: Synthetic oligonucleotide
ucucuccuuguggaugaac

SEQ ID NO: 1547530 - RNA, 19 nt, Artificial Sequence
  Description of Artificial Sequence: Synthetic oligonucleotide
uggcagccacuccuguacu

SEQ ID NO: 1547531 - RNA, 19 nt, Artificial Sequence
  Description of Artificial Sequence: Synthetic oligonucleotide
cagccaaccccuugugguc

SEQ ID NO: 1547532 - RNA, 19 nt, Artificial Sequence
  Description of Artificial Sequence: Synthetic oligonucleotide
cguuuggccgcacagcgcc

SEQ ID NO: 1547533 - RNA, 19 nt, Artificial Sequence
  Description of Artificial Sequence: Synthetic oligonucleotide
augcggcucacaaacucug

SEQ ID NO: 1547534 - RNA, 19 nt, Artificial Sequence
  Description of Artificial Sequence: Synthetic oligonucleotide
cacugaccacccacaggcc

SEQ ID NO: 1547535 - RNA, 19 nt, Artificial Sequence
  Description of Artificial Sequence: Synthetic oligonucleotide
ucccacacucgaugaggga

SEQ ID NO: 1547536 - RNA, 19 nt, Artificial Sequence
  Description of Artificial Sequence: Synthetic oligonucleotide
cacacucgaugagggaaag

SEQ ID NO: 1547537 - RNA, 19 nt, Artificial Sequence
  Description of Artificial Sequence: Synthetic oligonucleotide
ggucaucaggacucacagc

SEQ ID NO: 1547538 - RNA, 19 nt, Artificial Sequence
  Description of Artificial Sequence: Synthetic oligonucleotide
gaggaggaaagcagcagcu

SEQ ID NO: 1547539 - RNA, 19 nt, Artificial Sequence
  Description of Artificial Sequence: Synthetic oligonucleotide
gucacuccccuugucgaug

SEQ ID NO: 1547540 - RNA, 19 nt, Artificial Sequence
  Description of Artificial Sequence: Synthetic oligonucleotide
gcggccuccgcacacgugc

SEQ ID NO: 1547541 - RNA, 19 nt, Artificial Sequence
  Description of Artificial Sequence: Synthetic oligonucleotide
gaugcggcucacaaacucu

SEQ ID NO: 1547542 - RNA, 19 nt, Artificial Sequence
  Description of Artificial Sequence: Synthetic oligonucleotide
ggcuagccaggucacaaca

SEQ ID NO: 1547543 - RNA, 19 nt, Artificial Sequence
  Description of Artificial Sequence: Synthetic oligonucleotide
cacuaggggagcgucacga

SEQ ID NO: 1547544 - RNA, 19 nt, Artificial Sequence
  Description of Artificial Sequence: Synthetic oligonucleotide
agcauggagaggugcccaa

SEQ ID NO: 1547545 - RNA, 19 nt, Artificial Sequence
  Description of Artificial Sequence: Synthetic oligonucleotide
ugcuguagucucucuucuu

SEQ ID NO: 1547546 - RNA, 19 nt, Artificial Sequence
  Description of Artificial Sequence: Synthetic oligonucleotide
aaccaagaugcggcucaca

SEQ ID NO: 1547547 - RNA, 19 nt, Artificial Sequence
  Description of Artificial Sequence: Synthetic oligonucleotide
uaguggagauggccaggaa

SEQ ID NO: 1547548 - RNA, 19 nt, Artificial Sequence
  Description of Artificial Sequence: Synthetic oligonucleotide
uucuagcauggcccagcuc

SEQ ID NO: 1547549 - RNA, 19 nt, Artificial Sequence
  Description of Artificial Sequence: Synthetic oligonucleotide
aucccgguccgcagugagc

SEQ ID NO: 1547550 - RNA, 19 nt, Artificial Sequence
  Description of Artificial Sequence: Synthetic oligonucleotide
cgaagauggcugcagaguc

SEQ ID NO: 1547551 - RNA, 19 nt, Artificial Sequence
  Description of Artificial Sequence: Synthetic oligonucleotide
gggagcgucacgacagucc

SEQ ID NO: 1547552 - RNA, 19 nt, Artificial Sequence
  Description of Artificial Sequence: Synthetic oligonucleotide
cccggaucuucucaucccg

SEQ ID NO: 1547553 - RNA, 19 nt, Artificial Sequence
  Description of Artificial Sequence: Synthetic oligonucleotide
cugcggaagccaucaucug

SEQ ID NO: 1547554 - RNA, 19 nt, Artificial Sequence
  Description of Artificial Sequence: Synthetic oligonucleotide
agguggacgccagaaucgu

SEQ ID NO: 1547555 - RNA, 19 nt, Artificial Sequence
  Description of Artificial Sequence: Synthetic oligonucleotide
gcauggcccagcucucacg

SEQ ID NO: 1547556 - RNA, 19 nt, Artificial Sequence
  Description of Artificial Sequence: Synthetic oligonucleotide
agaggugcccaaguuccaa

SEQ ID NO: 1547557 - RNA, 19 nt, Artificial Sequence
  Description of Artificial Sequence: Synthetic oligonucleotide
ugcggagcagcagcccagc

SEQ ID NO: 1547558 - RNA, 19 nt, Artificial Sequence
  Description of Artificial Sequence: Synthetic oligonucleotide
ucaggaugacugggcacaa

SEQ ID NO: 1547559 - RNA, 19 nt, Artificial Sequence
  Description of Artificial Sequence: Synthetic oligonucleotide
uaguggggacugagcugcc

SEQ ID NO: 1547560 - RNA, 19 nt, Artificial Sequence
  Description of Artificial Sequence: Synthetic oligonucleotide
agacgcagucaucgucacu

SEQ ID NO: 1547561 - RNA, 19 nt, Artificial Sequence
  Description of Artificial Sequence: Synthetic oligonucleotide
ucgugucacuccccuuguc

SEQ ID NO: 1547562 - RNA, 19 nt, Artificial Sequence
  Description of Artificial Sequence: Synthetic oligonucleotide
ccucaaagacgauauccca

SEQ ID NO: 1547563 - RNA, 19 nt, Artificial Sequence
  Description of Artificial Sequence: Synthetic oligonucleotide
ggaugcagccaaccccuug

SEQ ID NO: 1547564 - RNA, 19 nt, Artificial Sequence
  Description of Artificial Sequence: Synthetic oligonucleotide
cacaaccaagaugcggcuc

SEQ ID NO: 1547565 - RNA, 19 nt, Artificial Sequence
  Description of Artificial Sequence: Synthetic oligonucleotide
ucccgaaggcuagccaggu

SEQ ID NO: 1547566 - RNA, 19 nt, Artificial Sequence
  Description of Artificial Sequence: Synthetic oligonucleotide
guggacgccagaaucgugu

SEQ ID NO: 1547567 - RNA, 19 nt, Artificial Sequence
  Description of Artificial Sequence: Synthetic oligonucleotide
agccucgaugcugugcgga

SEQ ID NO: 1547568 - RNA, 19 nt, Artificial Sequence
  Description of Artificial Sequence: Synthetic oligonucleotide
uuggccgcacagcgccagc

SEQ ID NO: 1547569 - RNA, 19 nt, Artificial Sequence
  Description of Artificial Sequence: Synthetic oligonucleotide
gggcugacugcucggagca

SEQ ID NO: 1547570 - RNA, 19 nt, Artificial Sequence
  Description of Artificial Sequence: Synthetic oligonucleotide
gcagccaaccccuuguggu

SEQ ID NO: 1547571 - RNA, 19 nt, Artificial Sequence
  Description of Artificial Sequence: Synthetic oligonucleotide
cacucacacagaagcacua

SEQ ID NO: 1547572 - RNA, 19 nt, Artificial Sequence
  Description of Artificial Sequence: Synthetic oligonucleotide
caugggcccgcccgcggcc

SEQ ID NO: 1547573 - RNA, 19 nt, Artificial Sequence
  Description of Artificial Sequence: Synthetic oligonucleotide
ccuuguaaagacugcggaa

SEQ ID NO: 1547574 - RNA, 19 nt, Artificial Sequence
  Description of Artificial Sequence: Synthetic oligonucleotide
cugccaagcucagggucag

SEQ ID NO: 1547575 - RNA, 19 nt, Artificial Sequence
  Description of Artificial Sequence: Synthetic oligonucleotide
cacuacgcagcucucuugu

SEQ ID NO: 1547576 - RNA, 19 nt, Artificial Sequence
  Description of Artificial Sequence: Synthetic oligonucleotide
gaagcacuacgcagcucuc

SEQ ID NO: 1547577 - RNA, 19 nt, Artificial Sequence
  Description of Artificial Sequence: Synthetic oligonucleotide
ccgagaaggaguagacauc

SEQ ID NO: 1547578 - RNA, 19 nt, Artificial Sequence
  Description of Artificial Sequence: Synthetic oligonucleotide
cguccuccccuuuaucucc

SEQ ID NO: 1547579 - RNA, 19 nt, Artificial Sequence
  Description of Artificial Sequence: Synthetic oligonucleotide
ggagauggccaggaaccug

SEQ ID NO: 1547580 - RNA, 19 nt, Artificial Sequence
  Description of Artificial Sequence: Synthetic oligonucleotide
gcugacugcucggagcaug

SEQ ID NO: 1547581 - RNA, 19 nt, Artificial Sequence
  Description of Artificial Sequence: Synthetic oligonucleotide
caaccaagggcugacugcu

SEQ ID NO: 1547582 - RNA, 19 nt, Artificial Sequence
  Description of Artificial Sequence: Synthetic oligonucleotide
caucaagcuggaagaugaa

SEQ ID NO: 1547583 - RNA, 19 nt, Artificial Sequence
  Description of Artificial Sequence: Synthetic oligonucleotide
acgauaucccacacucgau

SEQ ID NO: 1547584 - RNA, 19 nt, Artificial Sequence
  Description of Artificial Sequence: Synthetic oligonucleotide
gaaggcuagccaggucaca

SEQ ID NO: 1547585 - RNA, 19 nt, Artificial Sequence
  Description of Artificial Sequence: Synthetic oligonucleotide
cacgacaguccugcagaac

SEQ ID NO: 1547586 - RNA, 19 nt, Artificial Sequence
  Description of Artificial Sequence: Synthetic oligonucleotide
gcugacccggaucuucuca

SEQ ID NO: 1547587 - RNA, 19 nt, Artificial Sequence
  Description of Artificial Sequence: Synthetic oligonucleotide
uccuccccuuuaucuccug

SEQ ID NO: 1547588 - RNA, 19 nt, Artificial Sequence
  Description of Artificial Sequence: Synthetic oligonucleotide
ccccuuuaucuccuggcac

SEQ ID NO: 1547589 - RNA, 19 nt, Artificial Sequence
  Description of Artificial Sequence: Synthetic oligonucleotide
gcacuacgcagcucucuug

SEQ ID NO: 1547590 - RNA, 19 nt, Artificial Sequence
  Description of Artificial Sequence: Synthetic oligonucleotide
cccaaguuccaacuugcca

SEQ ID NO: 1547591 - RNA, 19 nt, Artificial Sequence
  Description of Artificial Sequence: Synthetic oligonucleotide
cuccccuugucgaugggcu

SEQ ID NO: 1547592 - RNA, 19 nt, Artificial Sequence
  Description of Artificial Sequence: Synthetic oligonucleotide
caucgucacugcuuguagu

SEQ ID NO: 1547593 - RNA, 19 nt, Artificial Sequence
  Description of Artificial Sequence: Synthetic oligonucleotide
aggaacgcacucacacaga

SEQ ID NO: 1547594 - RNA, 19 nt, Artificial Sequence
  Description of Artificial Sequence: Synthetic oligonucleotide
agccugccacugaccaccc

SEQ ID NO: 1547595 - RNA, 19 nt, Artificial Sequence
  Description of Artificial Sequence: Synthetic oligonucleotide
acgccagaaucgugucacu

SEQ ID NO: 1547596 - RNA, 19 nt, Artificial Sequence
  Description of Artificial Sequence: Synthetic oligonucleotide
acacucgaugagggaaagu

SEQ ID NO: 1547597 - RNA, 19 nt, Artificial Sequence
  Description of Artificial Sequence: Synthetic oligonucleotide
cuuuaucuccuggcacuga

SEQ ID NO: 1547598 - RNA, 19 nt, Artificial Sequence
  Description of Artificial Sequence: Synthetic oligonucleotide
ggagcgucacgacaguccu

SEQ ID NO: 1547599 - RNA, 19 nt, Artificial Sequence
  Description of Artificial Sequence: Synthetic oligonucleotide
gugcggagcagcagcccag

SEQ ID NO: 1547600 - RNA, 19 nt, Artificial Sequence
  Description of Artificial Sequence: Synthetic oligonucleotide
ucaucccgguccgcaguga

SEQ ID NO: 1547601 - RNA, 19 nt, Artificial Sequence
  Description of Artificial Sequence: Synthetic oligonucleotide
gcagcacugcagucguaug

SEQ ID NO: 1547602 - RNA, 19 nt, Artificial Sequence
  Description of Artificial Sequence: Synthetic oligonucleotide
cagcacugcagucguaugu

SEQ ID NO: 1547603 - RNA, 19 nt, Artificial Sequence
  Description of Artificial Sequence: Synthetic oligonucleotide
agccccugcgaauccucaa

SEQ ID NO: 1547604 - RNA, 19 nt, Artificial Sequence
  Description of Artificial Sequence: Synthetic oligonucleotide
gagcacuaggggagcguca

SEQ ID NO: 1547605 - RNA, 19 nt, Artificial Sequence
  Description of Artificial Sequence: Synthetic oligonucleotide
ccccugcgaauccucaaag

SEQ ID NO: 1547606 - RNA, 19 nt, Artificial Sequence
  Description of Artificial Sequence: Synthetic oligonucleotide
cgcaccacgagcguuuggc

SEQ ID NO: 1547607 - RNA, 19 nt, Artificial Sequence
  Description of Artificial Sequence: Synthetic oligonucleotide
gcuagccaggucacaacac

SEQ ID NO: 1547608 - RNA, 19 nt, Artificial Sequence
  Description of Artificial Sequence: Synthetic oligonucleotide
gagcgucacgacaguccug

SEQ ID NO: 1547609 - RNA, 19 nt, Artificial Sequence
  Description of Artificial Sequence: Synthetic oligonucleotide
caccgagaaggaguagaca

SEQ ID NO: 1547610 - RNA, 19 nt, Artificial Sequence
  Description of Artificial Sequence: Synthetic oligonucleotide
cgagcguuuggccgcacag

SEQ ID NO: 1547611 - RNA, 19 nt, Artificial Sequence
  Description of Artificial Sequence: Synthetic oligonucleotide
uggaugcagccaaccccuu

SEQ ID NO: 1547612 - RNA, 19 nt, Artificial Sequence
  Description of Artificial Sequence: Synthetic oligonucleotide
cgucacgacaguccugcag

SEQ ID NO: 1547613 - RNA, 19 nt, Artificial Sequence
  Description of Artificial Sequence: Synthetic oligonucleotide
ggaaaagaaucagacgcuu

SEQ ID NO: 1547614 - RNA, 19 nt, Artificial Sequence
  Description of Artificial Sequence: Synthetic oligonucleotide
cacuccccuugucgauggg

SEQ ID NO: 1547615 - RNA, 19 nt, Artificial Sequence
  Description of Artificial Sequence: Synthetic oligonucleotide
cagugcaccuccgcaccac

SEQ ID NO: 1547616 - RNA, 19 nt, Artificial Sequence
  Description of Artificial Sequence: Synthetic oligonucleotide
agguggccuuguaaagacu

SEQ ID NO: 1547617 - RNA, 19 nt, Artificial Sequence
  Description of Artificial Sequence: Synthetic oligonucleotide
caccaagaccugaucuucu

SEQ ID NO: 1547618 - RNA, 19 nt, Artificial Sequence
  Description of Artificial Sequence: Synthetic oligonucleotide
gccgcacagcgccagcccc

SEQ ID NO: 1547619 - RNA, 19 nt, Artificial Sequence
  Description of Artificial Sequence: Synthetic oligonucleotide
gggacugagcugccaugac

SEQ ID NO: 1547620 - RNA, 19 nt, Artificial Sequence
  Description of Artificial Sequence: Synthetic oligonucleotide
gagcucgccaugggcccgc

SEQ ID NO: 1547621 - RNA, 19 nt, Artificial Sequence
  Description of Artificial Sequence: Synthetic oligonucleotide
gcaggcucccgaaggcuag

SEQ ID NO: 1547622 - RNA, 19 nt, Artificial Sequence
  Description of Artificial Sequence: Synthetic oligonucleotide
caggcucccgaaggcuagc

SEQ ID NO: 1547623 - RNA, 19 nt, Artificial Sequence
  Description of Artificial Sequence: Synthetic oligonucleotide
agcuaguaguggggacuga

SEQ ID NO: 1547624 - RNA, 19 nt, Artificial Sequence
  Description of Artificial Sequence: Synthetic oligonucleotide
guccguccuccccuuuauc

SEQ ID NO: 1547625 - RNA, 19 nt, Artificial Sequence
  Description of Artificial Sequence: Synthetic oligonucleotide
cagagccuucuagcauggc

SEQ ID NO: 1547626 - RNA, 19 nt, Artificial Sequence
  Description of Artificial Sequence: Synthetic oligonucleotide
gaaucgugucacuccccuu

SEQ ID NO: 1547627 - RNA, 19 nt, Artificial Sequence
  Description of Artificial Sequence: Synthetic oligonucleotide
gguggacgccagaaucgug

SEQ ID NO: 1547628 - RNA, 19 nt, Artificial Sequence
  Description of Artificial Sequence: Synthetic oligonucleotide
cccucucuccuuguggaug

SEQ ID NO: 1547629 - RNA, 19 nt, Artificial Sequence
  Description of Artificial Sequence: Synthetic oligonucleotide
cccacagccccugcgaauc

SEQ ID NO: 1547630 - RNA, 19 nt, Artificial Sequence
  Description of Artificial Sequence: Synthetic oligonucleotide
cgaaggcuagccaggucac

SEQ ID NO: 1547631 - RNA, 19 nt, Artificial Sequence
  Description of Artificial Sequence: Synthetic oligonucleotide
ccaugguuuuguacggaaa

SEQ ID NO: 1547632 - RNA, 19 nt, Artificial Sequence
  Description of Artificial Sequence: Synthetic oligonucleotide
ggccgcacagcgccagccc

SEQ ID NO: 1547633 - RNA, 19 nt, Artificial Sequence
  Description of Artificial Sequence: Synthetic oligonucleotide
agcucgccaugggcccgcc

SEQ ID NO: 1547634 - RNA, 19 nt, Artificial Sequence
  Description of Artificial Sequence: Synthetic oligonucleotide
cccacacucgaugagggaa

SEQ ID NO: 1547635 - RNA, 19 nt, Artificial Sequence
  Description of Artificial Sequence: Synthetic oligonucleotide
cuguccguccuccccuuua

SEQ ID NO: 1547636 - RNA, 19 nt, Artificial Sequence
  Description of Artificial Sequence: Synthetic oligonucleotide
cggagcucgccaugggccc

SEQ ID NO: 1547637 - RNA, 19 nt, Artificial Sequence
  Description of Artificial Sequence: Synthetic oligonucleotide
cccugcgaauccucaaaga

SEQ ID NO: 1547638 - RNA, 19 nt, Artificial Sequence
  Description of Artificial Sequence: Synthetic oligonucleotide
ccucgaugcugugcggagc

SEQ ID NO: 1547639 - RNA, 19 nt, Artificial Sequence
  Description of Artificial Sequence: Synthetic oligonucleotide
gccaugggcccgcccgcgg

SEQ ID NO: 1547640 - RNA, 19 nt, Artificial Sequence
  Description of Artificial Sequence: Synthetic oligonucleotide
ccagaaugcaauccuggau

SEQ ID NO: 1547641 - RNA, 19 nt, Artificial Sequence
  Description of Artificial Sequence: Synthetic oligonucleotide
cugugaaaaccagggcagu

SEQ ID NO: 1547642 - RNA, 19 nt, Artificial Sequence
  Description of Artificial Sequence: Synthetic oligonucleotide
ggcccagcucucacgaaga

SEQ ID NO: 1547643 - RNA, 19 nt, Artificial Sequence
  Description of Artificial Sequence: Synthetic oligonucleotide
caaccccuuguggucuuga

SEQ ID NO: 1547644 - RNA, 19 nt, Artificial Sequence
  Description of Artificial Sequence: Synthetic oligonucleotide
cgagaaggaguagacaucu

SEQ ID NO: 1547645 - RNA, 19 nt, Artificial Sequence
  Description of Artificial Sequence: Synthetic oligonucleotide
ggacucacagccacaucua

SEQ ID NO: 1547646 - RNA, 19 nt, Artificial Sequence
  Description of Artificial Sequence: Synthetic oligonucleotide
cccgcggagcucgccaugg

SEQ ID NO: 1547647 - RNA, 19 nt, Artificial Sequence
  Description of Artificial Sequence: Synthetic oligonucleotide
gccccugcgaauccucaaa

SEQ ID NO: 1547648 - RNA, 19 nt, Artificial Sequence
  Description of Artificial Sequence: Synthetic oligonucleotide
cucagacauugccaugguu

SEQ ID NO: 1547649 - RNA, 19 nt, Artificial Sequence
  Description of Artificial Sequence: Synthetic oligonucleotide
guuuggccgcacagcgcca

SEQ ID NO: 1547650 - RNA, 19 nt, Artificial Sequence
  Description of Artificial Sequence: Synthetic oligonucleotide
gccacuccuguacucccaa

SEQ ID NO: 1547651 - RNA, 19 nt, Artificial Sequence
  Description of Artificial Sequence: Synthetic oligonucleotide
ccaugggcccgcccgcggc

SEQ ID NO: 1547652 - RNA, 19 nt, Artificial Sequence
  Description of Artificial Sequence: Synthetic oligonucleotide
gcacaaccaagaugcggcu

SEQ ID NO: 1547653 - RNA, 19 nt, Artificial Sequence
  Description of Artificial Sequence: Synthetic oligonucleotide
gcguuuggccgcacagcgc

SEQ ID NO: 1547654 - RNA, 19 nt, Artificial Sequence
  Description of Artificial Sequence: Synthetic oligonucleotide
gccuccgcacacgugcgac

SEQ ID NO: 1547655 - RNA, 19 nt, Artificial Sequence
  Description of Artificial Sequence: Synthetic oligonucleotide
cgaauccucaaagacgaua

SEQ ID NO: 1547656 - RNA, 19 nt, Artificial Sequence
  Description of Artificial Sequence: Synthetic oligonucleotide
ugcuggcaucaagcuggaa

SEQ ID NO: 1547657 - RNA, 19 nt, Artificial Sequence
  Description of Artificial Sequence: Synthetic oligonucleotide
acaggccuccagagcacua

SEQ ID NO: 1547658 - RNA, 19 nt, Artificial Sequence
  Description of Artificial Sequence: Synthetic oligonucleotide
caucaggcuccagcaccga

SEQ ID NO: 1547659 - RNA, 19 nt, Artificial Sequence
  Description of Artificial Sequence: Synthetic oligonucleotide
cgaugagggaaagucagcu

SEQ ID NO: 1547660 - RNA, 19 nt, Artificial Sequence
  Description of Artificial Sequence: Synthetic oligonucleotide
gaccucccucucuccuugu

SEQ ID NO: 1547661 - RNA, 19 nt, Artificial Sequence
  Description of Artificial Sequence: Synthetic oligonucleotide
gcucucuuguccccagaau

SEQ ID NO: 1547662 - RNA, 19 nt, Artificial Sequence
  Description of Artificial Sequence: Synthetic oligonucleotide
cgccagaaucgugucacuc

SEQ ID NO: 1547663 - RNA, 19 nt, Artificial Sequence
  Description of Artificial Sequence: Synthetic oligonucleotide
cagagcacuaggggagcgu

SEQ ID NO: 1547664 - RNA, 19 nt, Artificial Sequence
  Description of Artificial Sequence: Synthetic oligonucleotide
ugggcccgcccgcggccuc

SEQ ID NO: 1547665 - RNA, 19 nt, Artificial Sequence
  Description of Artificial Sequence: Synthetic oligonucleotide
cugcaggcucccgaaggcu

SEQ ID NO: 1547666 - RNA, 19 nt, Artificial Sequence
  Description of Artificial Sequence: Synthetic oligonucleotide
cccgaaggcuagccagguc

SEQ ID NO: 1547667 - RNA, 19 nt, Artificial Sequence
  Description of Artificial Sequence: Synthetic oligonucleotide
ugcugccgccccgcaccac

SEQ ID NO: 1547668 - RNA, 19 nt, Artificial Sequence
  Description of Artificial Sequence: Synthetic oligonucleotide
ccgccaccaagaccugauc

SEQ ID NO: 1547669 - RNA, 19 nt, Artificial Sequence
  Description of Artificial Sequence: Synthetic oligonucleotide
ggccuccgcacacgugcga

SEQ ID NO: 1547670 - RNA, 19 nt, Artificial Sequence
  Description of Artificial Sequence: Synthetic oligonucleotide
ccgguccgcagugagcaca

SEQ ID NO: 1547671 - RNA, 19 nt, Artificial Sequence
  Description of Artificial Sequence: Synthetic oligonucleotide
ccgcaccacgagcguuugg

SEQ ID NO: 1547672 - RNA, 19 nt, Artificial Sequence
  Description of Artificial Sequence: Synthetic oligonucleotide
ccgcccgcggccuccgcac

SEQ ID NO: 1547673 - RNA, 19 nt, Artificial Sequence
  Description of Artificial Sequence: Synthetic oligonucleotide
cacgagcguuuggccgcac

SEQ ID NO: 1547674 - RNA, 19 nt, Artificial Sequence
  Description of Artificial Sequence: Synthetic oligonucleotide
cucucuccuuguggaugaa

SEQ ID NO: 1547675 - RNA, 19 nt, Artificial Sequence
  Description of Artificial Sequence: Synthetic oligonucleotide
cccuugucgaugggcuguc

SEQ ID NO: 1547676 - RNA, 19 nt, Artificial Sequence
  Description of Artificial Sequence: Synthetic oligonucleotide
ccuccgcaccacaguccug

SEQ ID NO: 1547677 - RNA, 19 nt, Artificial Sequence
  Description of Artificial Sequence: Synthetic oligonucleotide
gaccacccacaggccucca

SEQ ID NO: 1547678 - RNA, 19 nt, Artificial Sequence
  Description of Artificial Sequence: Synthetic oligonucleotide
ccaaccccuuguggucuug

SEQ ID NO: 1547679 - RNA, 19 nt, Artificial Sequence
  Description of Artificial Sequence: Synthetic oligonucleotide
guccugacacucagacauu

SEQ ID NO: 1547680 - RNA, 19 nt, Artificial Sequence
  Description of Artificial Sequence: Synthetic oligonucleotide
gcgucacgacaguccugca

SEQ ID NO: 1547681 - RNA, 19 nt, Artificial Sequence
  Description of Artificial Sequence: Synthetic oligonucleotide
ccacuccuguacucccaaa

SEQ ID NO: 1547682 - RNA, 19 nt, Artificial Sequence
  Description of Artificial Sequence: Synthetic oligonucleotide
cccgcaccacgagcguuug

SEQ ID NO: 1547683 - RNA, 19 nt, Artificial Sequence
  Description of Artificial Sequence: Synthetic oligonucleotide
ccccgcggagcucgccaug

SEQ ID NO: 1547684 - RNA, 19 nt, Artificial Sequence
  Description of Artificial Sequence: Synthetic oligonucleotide
cgguccgcagugagcacaa

SEQ ID NO: 1547685 - RNA, 19 nt, Artificial Sequence
  Description of Artificial Sequence: Synthetic oligonucleotide
cgccaugggcccgcccgcg

SEQ ID NO: 1547686 - RNA, 19 nt, Artificial Sequence
  Description of Artificial Sequence: Synthetic oligonucleotide
gcggagcagcagcccagcu

SEQ ID NO: 1547687 - RNA, 19 nt, Artificial Sequence
  Description of Artificial Sequence: Synthetic oligonucleotide
gggcccgcccgcggccucc

SEQ ID NO: 1547688 - RNA, 19 nt, Artificial Sequence
  Description of Artificial Sequence: Synthetic oligonucleotide
cgcggccuccgcacacgug

SEQ ID NO: 1547689 - RNA, 19 nt, Artificial Sequence
  Description of Artificial Sequence: Synthetic oligonucleotide
gggcuccuuugucgcuucu

SEQ ID NO: 1547690 - RNA, 19 nt, Artificial Sequence
  Description of Artificial Sequence: Synthetic oligonucleotide
ccacgagcguuuggccgca

SEQ ID NO: 1547691 - RNA, 19 nt, Artificial Sequence
  Description of Artificial Sequence: Synthetic oligonucleotide
gguccgcagugagcacaaa

SEQ ID NO: 1547692 - RNA, 19 nt, Artificial Sequence
  Description of Artificial Sequence: Synthetic oligonucleotide
gccaaccccuuguggucuu

SEQ ID NO: 1547693 - RNA, 19 nt, Artificial Sequence
  Description of Artificial Sequence: Synthetic oligonucleotide
ccccgcaccacgagcguuu

SEQ ID NO: 1547694 - RNA, 19 nt, Artificial Sequence
  Description of Artificial Sequence: Synthetic oligonucleotide
gcgaauccucaaagacgau

SEQ ID NO: 1547695 - RNA, 19 nt, Artificial Sequence
  Description of Artificial Sequence: Synthetic oligonucleotide
gcuguccguccuccccuuu

SEQ ID NO: 1547696 - RNA, 19 nt, Artificial Sequence
  Description of Artificial Sequence: Synthetic oligonucleotide
ggcugacugcucggagcau

SEQ ID NO: 1547697 - RNA, 19 nt, Artificial Sequence
  Description of Artificial Sequence: Synthetic oligonucleotide
gccccgcaccacgagcguu

SEQ ID NO: 1547698 - RNA, 19 nt, Artificial Sequence
  Description of Artificial Sequence: Synthetic oligonucleotide
ccgcggccuccgcacacgu

SEQ ID NO: 1547699 - RNA, 19 nt, Artificial Sequence
  Description of Artificial Sequence: Synthetic oligonucleotide
gagaaugcgaaauagaaag

SEQ ID NO: 1547700 - RNA, 19 nt, Artificial Sequence
  Description of Artificial Sequence: Synthetic oligonucleotide
uuguauaaaagauuugugg

SEQ ID NO: 1547701 - RNA, 19 nt, Artificial Sequence
  Description of Artificial Sequence: Synthetic oligonucleotide
agaaauuuuggcuuuagag

SEQ ID NO: 1547702 - RNA, 19 nt, Artificial Sequence
  Description of Artificial Sequence: Synthetic oligonucleotide
aaagcagguuuauuggucc

SEQ ID NO: 1547703 - RNA, 19 nt, Artificial Sequence
  Description of Artificial Sequence: Synthetic oligonucleotide
aaaguuugagaagagaaag

SEQ ID NO: 1547704 - RNA, 19 nt, Artificial Sequence
  Description of Artificial Sequence: Synthetic oligonucleotide
uuacacuagggaaagaucc

SEQ ID NO: 1547705 - RNA, 19 nt, Artificial Sequence
  Description of Artificial Sequence: Synthetic oligonucleotide
aacuuaggccccuucagcc

SEQ ID NO: 1547706 - RNA, 19 nt, Artificial Sequence
  Description of Artificial Sequence: Synthetic oligonucleotide
uguauaaaagauuuguggu

SEQ ID NO: 1547707 - RNA, 19 nt, Artificial Sequence
  Description of Artificial Sequence: Synthetic oligonucleotide
cacucuauaguccagacag

SEQ ID NO: 1547708 - RNA, 19 nt, Artificial Sequence
  Description of Artificial Sequence: Synthetic oligonucleotide
aacaacuuuacacuaggga

SEQ ID NO: 1547709 - RNA, 19 nt, Artificial Sequence
  Description of Artificial Sequence: Synthetic oligonucleotide
aaauugaggcuguccaugg

SEQ ID NO: 1547710 - RNA, 19 nt, Artificial Sequence
  Description of Artificial Sequence: Synthetic oligonucleotide
ucaaucauuuggaggaggg

SEQ ID NO: 1547711 - RNA, 19 nt, Artificial Sequence
  Description of Artificial Sequence: Synthetic oligonucleotide
uguuguauaaaagauuugu

SEQ ID NO: 1547712 - RNA, 19 nt, Artificial Sequence
  Description of Artificial Sequence: Synthetic oligonucleotide
gaguaugaagcuguggugg

SEQ ID NO: 1547713 - RNA, 19 nt, Artificial Sequence
  Description of Artificial Sequence: Synthetic oligonucleotide
auuugugguuuccaucccc

SEQ ID NO: 1547714 - RNA, 19 nt, Artificial Sequence
  Description of Artificial Sequence: Synthetic oligonucleotide
acuagggaaagauccacuc

SEQ ID NO: 1547715 - RNA, 19 nt, Artificial Sequence
  Description of Artificial Sequence: Synthetic oligonucleotide
cuugaagucguccacgcgc

SEQ ID NO: 1547716 - RNA, 19 nt, Artificial Sequence
  Description of Artificial Sequence: Synthetic oligonucleotide
cugcccacaacuuaggccc

SEQ ID NO: 1547717 - RNA, 19 nt, Artificial Sequence
  Description of Artificial Sequence: Synthetic oligonucleotide
uuuaggauucccucuuucc

SEQ ID NO: 1547718 - RNA, 19 nt, Artificial Sequence
  Description of Artificial Sequence: Synthetic oligonucleotide
aacuuuacacuagggaaag

SEQ ID NO: 1547719 - RNA, 19 nt, Artificial Sequence
  Description of Artificial Sequence: Synthetic oligonucleotide
gucucacugaauuacucgg

SEQ ID NO: 1547720 - RNA, 19 nt, Artificial Sequence
  Description of Artificial Sequence: Synthetic oligonucleotide
ugggauagcaagcuggcac

SEQ ID NO: 1547721 - RNA, 19 nt, Artificial Sequence
  Description of Artificial Sequence: Synthetic oligonucleotide
uuaggauucccucuuuccu

SEQ ID NO: 1547722 - RNA, 19 nt, Artificial Sequence
  Description of Artificial Sequence: Synthetic oligonucleotide
gacgucuucagcuucucgc

SEQ ID NO: 1547723 - RNA, 19 nt, Artificial Sequence
  Description of Artificial Sequence: Synthetic oligonucleotide
ugacgugaaaggugaaggg

SEQ ID NO: 1547724 - RNA, 19 nt, Artificial Sequence
  Description of Artificial Sequence: Synthetic oligonucleotide
acuaaaaggcugccccugc

SEQ ID NO: 1547725 - RNA, 19 nt, Artificial Sequence
  Description of Artificial Sequence: Synthetic oligonucleotide
ugaggagaaugcgaaauag

SEQ ID NO: 1547726 - RNA, 19 nt, Artificial Sequence
  Description of Artificial Sequence: Synthetic oligonucleotide
cuacuuccuacccagagug

SEQ ID NO: 1547727 - RNA, 19 nt, Artificial Sequence
  Description of Artificial Sequence: Synthetic oligonucleotide
uuuacacuagggaaagauc

SEQ ID NO: 1547728 - RNA, 19 nt, Artificial Sequence
  Description of Artificial Sequence: Synthetic oligonucleotide
ugcgaaauagaaaguuuga

SEQ ID NO: 1547729 - RNA, 19 nt, Artificial Sequence
  Description of Artificial Sequence: Synthetic oligonucleotide
ucuauaguccagacaggcc

SEQ ID NO: 1547730 - RNA, 19 nt, Artificial Sequence
  Description of Artificial Sequence: Synthetic oligonucleotide
acuuaggccccuucagccc

SEQ ID NO: 1547731 - RNA, 19 nt, Artificial Sequence
  Description of Artificial Sequence: Synthetic oligonucleotide
ucugcccacaacuuaggcc

SEQ ID NO: 1547732 - RNA, 19 nt, Artificial Sequence
  Description of Artificial Sequence: Synthetic oligonucleotide
agaaaguuugagaagagaa

SEQ ID NO: 1547733 - RNA, 19 nt, Artificial Sequence
  Description of Artificial Sequence: Synthetic oligonucleotide
aagggcggcaccuuguaga

SEQ ID NO: 1547734 - RNA, 19 nt, Artificial Sequence
  Description of Artificial Sequence: Synthetic oligonucleotide
uuaugugucuucaaucauu

SEQ ID NO: 1547735 - RNA, 19 nt, Artificial Sequence
  Description of Artificial Sequence: Synthetic oligonucleotide
aagcagguuuauugguccg

SEQ ID NO: 1547736 - RNA, 19 nt, Artificial Sequence
  Description of Artificial Sequence: Synthetic oligonucleotide
uuauugguccggcugcuca

SEQ ID NO: 1547737 - RNA, 19 nt, Artificial Sequence
  Description of Artificial Sequence: Synthetic oligonucleotide
cuucguguuguauaaaaga

SEQ ID NO: 1547738 - RNA, 19 nt, Artificial Sequence
  Description of Artificial Sequence: Synthetic oligonucleotide
agcgugugcacgucggggc

SEQ ID NO: 1547739 - RNA, 19 nt, Artificial Sequence
  Description of Artificial Sequence: Synthetic oligonucleotide
agguuuauugguccggcug

SEQ ID NO: 1547740 - RNA, 19 nt, Artificial Sequence
  Description of Artificial Sequence: Synthetic oligonucleotide
gaguguguccaaauugagg

SEQ ID NO: 1547741 - RNA, 19 nt, Artificial Sequence
  Description of Artificial Sequence: Synthetic oligonucleotide
aauuacucgggcuggcuuu

SEQ ID NO: 1547742 - RNA, 19 nt, Artificial Sequence
  Description of Artificial Sequence: Synthetic oligonucleotide
uugaagucguccacgcgcc

SEQ ID NO: 1547743 - RNA, 19 nt, Artificial Sequence
  Description of Artificial Sequence: Synthetic oligonucleotide
ucuugaagucguccacgcg

SEQ ID NO: 1547744 - RNA, 19 nt, Artificial Sequence
  Description of Artificial Sequence: Synthetic oligonucleotide
ugucuuuaggauucccucu

SEQ ID NO: 1547745 - RNA, 19 nt, Artificial Sequence
  Description of Artificial Sequence: Synthetic oligonucleotide
aaagauuccuagaccagga

SEQ ID NO: 1547746 - RNA, 19 nt, Artificial Sequence
  Description of Artificial Sequence: Synthetic oligonucleotide
ucuuccuacuuccuaccca

SEQ ID NO: 1547747 - RNA, 19 nt, Artificial Sequence
  Description of Artificial Sequence: Synthetic oligonucleotide
acgugaaaggugaagggcg

SEQ ID NO: 1547748 - RNA, 19 nt, Artificial Sequence
  Description of Artificial Sequence: Synthetic oligonucleotide
cucacugaauuacucgggc

SEQ ID NO: 1547749 - RNA, 19 nt, Artificial Sequence
  Description of Artificial Sequence: Synthetic oligonucleotide
gaaggacuugcgcagcuug

SEQ ID NO: 1547750 - RNA, 19 nt, Artificial Sequence
  Description of Artificial Sequence: Synthetic oligonucleotide
gcaagcuggcacuaaaagg

SEQ ID NO: 1547751 - RNA, 19 nt, Artificial Sequence
  Description of Artificial Sequence: Synthetic oligonucleotide
cacugaauuacucgggcug

SEQ ID NO: 1547752 - RNA, 19 nt, Artificial Sequence
  Description of Artificial Sequence: Synthetic oligonucleotide
ggcacuaaaaggcugcccc

SEQ ID NO: 1547753 - RNA, 19 nt, Artificial Sequence
  Description of Artificial Sequence: Synthetic oligonucleotide
aggguugucuuuaggauuc

SEQ ID NO: 1547754 - RNA, 19 nt, Artificial Sequence
  Description of Artificial Sequence: Synthetic oligonucleotide
augcgaaauagaaaguuug

SEQ ID NO: 1547755 - RNA, 19 nt, Artificial Sequence
  Description of Artificial Sequence: Synthetic oligonucleotide
aagcucugaacaacuuuac

SEQ ID NO: 1547756 - RNA, 19 nt, Artificial Sequence
  Description of Artificial Sequence: Synthetic oligonucleotide
gcucuuguccaccaggacg

SEQ ID NO: 1547757 - RNA, 19 nt, Artificial Sequence
  Description of Artificial Sequence: Synthetic oligonucleotide
aaugcgaaauagaaaguuu

SEQ ID NO: 1547758 - RNA, 19 nt, Artificial Sequence
  Description of Artificial Sequence: Synthetic oligonucleotide
gauuccuagaccaggacaa

SEQ ID NO: 1547759 - RNA, 19 nt, Artificial Sequence
  Description of Artificial Sequence: Synthetic oligonucleotide
gguaagguaaaagagcuca

SEQ ID NO: 1547760 - RNA, 19 nt, Artificial Sequence
  Description of Artificial Sequence: Synthetic oligonucleotide
uagaaaguuugagaagaga

SEQ ID NO: 1547761 - RNA, 19 nt, Artificial Sequence
  Description of Artificial Sequence: Synthetic oligonucleotide
aucauuuggaggagggagg

SEQ ID NO: 1547762 - RNA, 19 nt, Artificial Sequence
  Description of Artificial Sequence: Synthetic oligonucleotide
aguggugccgcugaguaug

SEQ ID NO: 1547763 - RNA, 19 nt, Artificial Sequence
  Description of Artificial Sequence: Synthetic oligonucleotide
uuuggcuuuagagucuccu

SEQ ID NO: 1547764 - RNA, 19 nt, Artificial Sequence
  Description of Artificial Sequence: Synthetic oligonucleotide
ggcggcaccuuguagacgg

SEQ ID NO: 1547765 - RNA, 19 nt, Artificial Sequence
  Description of Artificial Sequence: Synthetic oligonucleotide
guagacggcggucuuggag

SEQ ID NO: 1547766 - RNA, 19 nt, Artificial Sequence
  Description of Artificial Sequence: Synthetic oligonucleotide
ucucgcgucgcuccacggg

SEQ ID NO: 1547767 - RNA, 19 nt, Artificial Sequence
  Description of Artificial Sequence: Synthetic oligonucleotide
gaaacagggucucacugaa

SEQ ID NO: 1547768 - RNA, 19 nt, Artificial Sequence
  Description of Artificial Sequence: Synthetic oligonucleotide
aaaagagcucagacagcgg

SEQ ID NO: 1547769 - RNA, 19 nt, Artificial Sequence
  Description of Artificial Sequence: Synthetic oligonucleotide
aggagaaugcgaaauagaa

SEQ ID NO: 1547770 - RNA, 19 nt, Artificial Sequence
  Description of Artificial Sequence: Synthetic oligonucleotide
gagagaguccugcucaguc

SEQ ID NO: 1547771 - RNA, 19 nt, Artificial Sequence
  Description of Artificial Sequence: Synthetic oligonucleotide
ucggccuaaggcuugugcu

SEQ ID NO: 1547772 - RNA, 19 nt, Artificial Sequence
  Description of Artificial Sequence: Synthetic oligonucleotide
caacuuaggccccuucagc

SEQ ID NO: 1547773 - RNA, 19 nt, Artificial Sequence
  Description of Artificial Sequence: Synthetic oligonucleotide
aguaugaagcuguggugga

SEQ ID NO: 1547774 - RNA, 19 nt, Artificial Sequence
  Description of Artificial Sequence: Synthetic oligonucleotide
gguuuauugguccggcugc

SEQ ID NO: 1547775 - RNA, 19 nt, Artificial Sequence
  Description of Artificial Sequence: Synthetic oligonucleotide
uaggauucccucuuuccuc

SEQ ID NO: 1547776 - RNA, 19 nt, Artificial Sequence
  Description of Artificial Sequence: Synthetic oligonucleotide
acucgggcuggcuuugaac

SEQ ID NO: 1547777 - RNA, 19 nt, Artificial Sequence
  Description of Artificial Sequence: Synthetic oligonucleotide
gcuuaugugucuucaauca

SEQ ID NO: 1547778 - RNA, 19 nt, Artificial Sequence
  Description of Artificial Sequence: Synthetic oligonucleotide
agcuucguguuguauaaaa

SEQ ID NO: 1547779 - RNA, 19 nt, Artificial Sequence
  Description of Artificial Sequence: Synthetic oligonucleotide
agcaccaagggaccucauc

SEQ ID NO: 1547780 - RNA, 19 nt, Artificial Sequence
  Description of Artificial Sequence: Synthetic oligonucleotide
caacuuuacacuagggaaa

SEQ ID NO: 1547781 - RNA, 19 nt, Artificial Sequence
  Description of Artificial Sequence: Synthetic oligonucleotide
cuugacgugaaaggugaag

SEQ ID NO: 1547782 - RNA, 19 nt, Artificial Sequence
  Description of Artificial Sequence: Synthetic oligonucleotide
ucuuggagcgcgcguacac

SEQ ID NO: 1547783 - RNA, 19 nt, Artificial Sequence
  Description of Artificial Sequence: Synthetic oligonucleotide
uccaacagcgugugcacgu

SEQ ID NO: 1547784 - RNA, 19 nt, Artificial Sequence
  Description of Artificial Sequence: Synthetic oligonucleotide
gcaccaagggaccucaucc

SEQ ID NO: 1547785 - RNA, 19 nt, Artificial Sequence
  Description of Artificial Sequence: Synthetic oligonucleotide
agggcggcaccuuguagac

SEQ ID NO: 1547786 - RNA, 19 nt, Artificial Sequence
  Description of Artificial Sequence: Synthetic oligonucleotide
acguggucgggcgugaagg

SEQ ID NO: 1547787 - RNA, 19 nt, Artificial Sequence
  Description of Artificial Sequence: Synthetic oligonucleotide
uuccuagaccaggacaacc

SEQ ID NO: 1547788 - RNA, 19 nt, Artificial Sequence
  Description of Artificial Sequence: Synthetic oligonucleotide
uccauggugggagaccacc

SEQ ID NO: 1547789 - RNA, 19 nt, Artificial Sequence
  Description of Artificial Sequence: Synthetic oligonucleotide
caagcucugaacaacuuua

SEQ ID NO: 1547790 - RNA, 19 nt, Artificial Sequence
  Description of Artificial Sequence: Synthetic oligonucleotide
ucagacagcgggaguggug

SEQ ID NO: 1547791 - RNA, 19 nt, Artificial Sequence
  Description of Artificial Sequence: Synthetic oligonucleotide
cuuuaggauucccucuuuc

SEQ ID NO: 1547792 - RNA, 19 nt, Artificial Sequence
  Description of Artificial Sequence: Synthetic oligonucleotide
ucaaccagcauggggcuga

SEQ ID NO: 1547793 - RNA, 19 nt, Artificial Sequence
  Description of Artificial Sequence: Synthetic oligonucleotide
uuggagcgcgcguacacca

SEQ ID NO: 1547794 - RNA, 19 nt, Artificial Sequence
  Description of Artificial Sequence: Synthetic oligonucleotide
auagcaagcuggcacuaaa

SEQ ID NO: 1547795 - RNA, 19 nt, Artificial Sequence
  Description of Artificial Sequence: Synthetic oligonucleotide
uuggcaagcucugaacaac

SEQ ID NO: 1547796 - RNA, 19 nt, Artificial Sequence
  Description of Artificial Sequence: Synthetic oligonucleotide
cugaguaugaagcuguggu

SEQ ID NO: 1547797 - RNA, 19 nt, Artificial Sequence
  Description of Artificial Sequence: Synthetic oligonucleotide
agcucugaacaacuuuaca

SEQ ID NO: 1547798 - RNA, 19 nt, Artificial Sequence
  Description of Artificial Sequence: Synthetic oligonucleotide
cagacagcgggaguggugc

SEQ ID NO: 1547799 - RNA, 19 nt, Artificial Sequence
  Description of Artificial Sequence: Synthetic oligonucleotide
ugugccgcgucuucuccag

SEQ ID NO: 1547800 - RNA, 19 nt, Artificial Sequence
  Description of Artificial Sequence: Synthetic oligonucleotide
ugcaucugcccacaacuua

SEQ ID NO: 1547801 - RNA, 19 nt, Artificial Sequence
  Description of Artificial Sequence: Synthetic oligonucleotide
aggacaaccagggcauggg

SEQ ID NO: 1547802 - RNA, 19 nt, Artificial Sequence
  Description of Artificial Sequence: Synthetic oligonucleotide
guaagguaaaagagcucag

SEQ ID NO: 1547803 - RNA, 19 nt, Artificial Sequence
  Description of Artificial Sequence: Synthetic oligonucleotide
gagaccaccuccccucggc

SEQ ID NO: 1547804 - RNA, 19 nt, Artificial Sequence
  Description of Artificial Sequence: Synthetic oligonucleotide
auugguccggcugcucacc

SEQ ID NO: 1547805 - RNA, 19 nt, Artificial Sequence
  Description of Artificial Sequence: Synthetic oligonucleotide
ugaagucguccacgcgccg

SEQ ID NO: 1547806 - RNA, 19 nt, Artificial Sequence
  Description of Artificial Sequence: Synthetic oligonucleotide
caucugcccacaacuuagg

SEQ ID NO: 1547807 - RNA, 19 nt, Artificial Sequence
  Description of Artificial Sequence: Synthetic oligonucleotide
ucgcgcgacgucuucagcu

SEQ ID NO: 1547808 - RNA, 19 nt, Artificial Sequence
  Description of Artificial Sequence: Synthetic oligonucleotide
cucgcgucgcuccacgggg

SEQ ID NO: 1547809 - RNA, 19 nt, Artificial Sequence
  Description of Artificial Sequence: Synthetic oligonucleotide
ugggagaccaccuccccuc

SEQ ID NO: 1547810 - RNA, 19 nt, Artificial Sequence
  Description of Artificial Sequence: Synthetic oligonucleotide
aagucguccacgcgccgca

SEQ ID NO: 1547811 - RNA, 19 nt, Artificial Sequence
  Description of Artificial Sequence: Synthetic oligonucleotide
caaagcuucguguuguaua

SEQ ID NO: 1547812 - RNA, 19 nt, Artificial Sequence
  Description of Artificial Sequence: Synthetic oligonucleotide
gggaccucauccuaccucc

SEQ ID NO: 1547813 - RNA, 19 nt, Artificial Sequence
  Description of Artificial Sequence: Synthetic oligonucleotide
agcagguuuauugguccgg

SEQ ID NO: 1547814 - RNA, 19 nt, Artificial Sequence
  Description of Artificial Sequence: Synthetic oligonucleotide
gcaaggguugucuuuagga

SEQ ID NO: 1547815 - RNA, 19 nt, Artificial Sequence
  Description of Artificial Sequence: Synthetic oligonucleotide
uagcaagcuggcacuaaaa

SEQ ID NO: 1547816 - RNA, 19 nt, Artificial Sequence
  Description of Artificial Sequence: Synthetic oligonucleotide
gcgaaauagaaaguuugag

SEQ ID NO: 1547817 - RNA, 19 nt, Artificial Sequence
  Description of Artificial Sequence: Synthetic oligonucleotide
uauugguccggcugcucac

SEQ ID NO: 1547818 - RNA, 19 nt, Artificial Sequence
  Description of Artificial Sequence: Synthetic oligonucleotide
uccagguucucgcgcgugc

SEQ ID NO: 1547819 - RNA, 19 nt, Artificial Sequence
  Description of Artificial Sequence: Synthetic oligonucleotide
ggggccgagaacuggagag

SEQ ID NO: 1547820 - RNA, 19 nt, Artificial Sequence
  Description of Artificial Sequence: Synthetic oligonucleotide
auuccuagaccaggacaac

SEQ ID NO: 1547821 - RNA, 19 nt, Artificial Sequence
  Description of Artificial Sequence: Synthetic oligonucleotide
gaagggcggcaccuuguag

SEQ ID NO: 1547822 - RNA, 19 nt, Artificial Sequence
  Description of Artificial Sequence: Synthetic oligonucleotide
agaaugcgaaauagaaagu

SEQ ID NO: 1547823 - RNA, 19 nt, Artificial Sequence
  Description of Artificial Sequence: Synthetic oligonucleotide
acgucggggcugcuggcgc

SEQ ID NO: 1547824 - RNA, 19 nt, Artificial Sequence
  Description of Artificial Sequence: Synthetic oligonucleotide
cucggccuaaggcuugugc

SEQ ID NO: 1547825 - RNA, 19 nt, Artificial Sequence
  Description of Artificial Sequence: Synthetic oligonucleotide
ggugccgcugaguaugaag

SEQ ID NO: 1547826 - RNA, 19 nt, Artificial Sequence
  Description of Artificial Sequence: Synthetic oligonucleotide
gaaugcgaaauagaaaguu

SEQ ID NO: 1547827 - RNA, 19 nt, Artificial Sequence
  Description of Artificial Sequence: Synthetic oligonucleotide
ugggccauucuuccuacuu

SEQ ID NO: 1547828 - RNA, 19 nt, Artificial Sequence
  Description of Artificial Sequence: Synthetic oligonucleotide
ggaaacugcaucugcccac

SEQ ID NO: 1547829 - RNA, 19 nt, Artificial Sequence
  Description of Artificial Sequence: Synthetic oligonucleotide
cuucucgcgucgcuccacg

SEQ ID NO: 1547830 - RNA, 19 nt, Artificial Sequence
  Description of Artificial Sequence: Synthetic oligonucleotide
acucuauaguccagacagg

SEQ ID NO: 1547831 - RNA, 19 nt, Artificial Sequence
  Description of Artificial Sequence: Synthetic oligonucleotide
gcguacaccacguggucgg

SEQ ID NO: 1547832 - RNA, 19 nt, Artificial Sequence
  Description of Artificial Sequence: Synthetic oligonucleotide
gacagcgggaguggugccg

SEQ ID NO: 1547833 - RNA, 19 nt, Artificial Sequence
  Description of Artificial Sequence: Synthetic oligonucleotide
gaagucguccacgcgccgc

SEQ ID NO: 1547834 - RNA, 19 nt, Artificial Sequence
  Description of Artificial Sequence: Synthetic oligonucleotide
acggcgucugacuccucgg

SEQ ID NO: 1547835 - RNA, 19 nt, Artificial Sequence
  Description of Artificial Sequence: Synthetic oligonucleotide
uagcugggauagcaagcug

SEQ ID NO: 1547836 - RNA, 19 nt, Artificial Sequence
  Description of Artificial Sequence: Synthetic oligonucleotide
ggcgugaaggacuugcgca

SEQ ID NO: 1547837 - RNA, 19 nt, Artificial Sequence
  Description of Artificial Sequence: Synthetic oligonucleotide
caugggccauucuuccuac

SEQ ID NO: 1547838 - RNA, 19 nt, Artificial Sequence
  Description of Artificial Sequence: Synthetic oligonucleotide
caacagcgugugcacgucg

SEQ ID NO: 1547839 - RNA, 19 nt, Artificial Sequence
  Description of Artificial Sequence: Synthetic oligonucleotide
uacuuccuacccagagugu

SEQ ID NO: 1547840 - RNA, 19 nt, Artificial Sequence
  Description of Artificial Sequence: Synthetic oligonucleotide
guaugaagcugugguggag

SEQ ID NO: 1547841 - RNA, 19 nt, Artificial Sequence
  Description of Artificial Sequence: Synthetic oligonucleotide
gcaucugcccacaacuuag

SEQ ID NO: 1547842 - RNA, 19 nt, Artificial Sequence
  Description of Artificial Sequence: Synthetic oligonucleotide
ugaagggcggcaccuugua

SEQ ID NO: 1547843 - RNA, 19 nt, Artificial Sequence
  Description of Artificial Sequence: Synthetic oligonucleotide
uucucgcgucgcuccacgg

SEQ ID NO: 1547844 - RNA, 19 nt, Artificial Sequence
  Description of Artificial Sequence: Synthetic oligonucleotide
cacuaaaaggcugccccug

SEQ ID NO: 1547845 - RNA, 19 nt, Artificial Sequence
  Description of Artificial Sequence: Synthetic oligonucleotide
ugccgcugaguaugaagcu

SEQ ID NO: 1547846 - RNA, 19 nt, Artificial Sequence
  Description of Artificial Sequence: Synthetic oligonucleotide
ccuagagcccacaggaaac

SEQ ID NO: 1547847 - RNA, 19 nt, Artificial Sequence
  Description of Artificial Sequence: Synthetic oligonucleotide
acggcggucuuggagcgcg

SEQ ID NO: 1547848 - RNA, 19 nt, Artificial Sequence
  Description of Artificial Sequence: Synthetic oligonucleotide
gcuucguguuguauaaaag

SEQ ID NO: 1547849 - RNA, 19 nt, Artificial Sequence
  Description of Artificial Sequence: Synthetic oligonucleotide
cuuggagcgcgcguacacc

SEQ ID NO: 1547850 - RNA, 19 nt, Artificial Sequence
  Description of Artificial Sequence: Synthetic oligonucleotide
ugccgcgucuucuccaggu

SEQ ID NO: 1547851 - RNA, 19 nt, Artificial Sequence
  Description of Artificial Sequence: Synthetic oligonucleotide
auuacucgggcuggcuuug

SEQ ID NO: 1547852 - RNA, 19 nt, Artificial Sequence
  Description of Artificial Sequence: Synthetic oligonucleotide
caggacggcgucugacucc

SEQ ID NO: 1547853 - RNA, 19 nt, Artificial Sequence
  Description of Artificial Sequence: Synthetic oligonucleotide
cuucagcccaccagcacca

SEQ ID NO: 1547854 - RNA, 19 nt, Artificial Sequence
  Description of Artificial Sequence: Synthetic oligonucleotide
gcgugaaggacuugcgcag

SEQ ID NO: 1547855 - RNA, 19 nt, Artificial Sequence
  Description of Artificial Sequence: Synthetic oligonucleotide
cuuaggccccuucagccca

SEQ ID NO: 1547856 - RNA, 19 nt, Artificial Sequence
  Description of Artificial Sequence: Synthetic oligonucleotide
agagccccgagagaguccu

SEQ ID NO: 1547857 - RNA, 19 nt, Artificial Sequence
  Description of Artificial Sequence: Synthetic oligonucleotide
uccuacccagagugugucc

SEQ ID NO: 1547858 - RNA, 19 nt, Artificial Sequence
  Description of Artificial Sequence: Synthetic oligonucleotide
cuuguagacggcggucuug

SEQ ID NO: 1547859 - RNA, 19 nt, Artificial Sequence
  Description of Artificial Sequence: Synthetic oligonucleotide
uucccucuuuccucuugca

SEQ ID NO: 1547860 - RNA, 19 nt, Artificial Sequence
  Description of Artificial Sequence: Synthetic oligonucleotide
ucgucgucggggcccaccu

SEQ ID NO: 1547861 - RNA, 19 nt, Artificial Sequence
  Description of Artificial Sequence: Synthetic oligonucleotide
uggcacuaaaaggcugccc

SEQ ID NO: 1547862 - RNA, 19 nt, Artificial Sequence
  Description of Artificial Sequence: Synthetic oligonucleotide
uugguccggcugcucacca

SEQ ID NO: 1547863 - RNA, 19 nt, Artificial Sequence
  Description of Artificial Sequence: Synthetic oligonucleotide
ggccuugaauuuucaauuc

SEQ ID NO: 1547864 - RNA, 19 nt, Artificial Sequence
  Description of Artificial Sequence: Synthetic oligonucleotide
cuaaaaggcugccccugca

SEQ ID NO: 1547865 - RNA, 19 nt, Artificial Sequence
  Description of Artificial Sequence: Synthetic oligonucleotide
ggcuugugcucugaagggg

SEQ ID NO: 1547866 - RNA, 19 nt, Artificial Sequence
  Description of Artificial Sequence: Synthetic oligonucleotide
uuuauugguccggcugcuc

SEQ ID NO: 1547867 - RNA, 19 nt, Artificial Sequence
  Description of Artificial Sequence: Synthetic oligonucleotide
ggagcgcgcguacaccacg

SEQ ID NO: 1547868 - RNA, 19 nt, Artificial Sequence
  Description of Artificial Sequence: Synthetic oligonucleotide
cagcgugugcacgucgggg

SEQ ID NO: 1547869 - RNA, 19 nt, Artificial Sequence
  Description of Artificial Sequence: Synthetic oligonucleotide
cuggcacuaaaaggcugcc

SEQ ID NO: 1547870 - RNA, 19 nt, Artificial Sequence
  Description of Artificial Sequence: Synthetic oligonucleotide
agcuugucgcgcgacgucu

SEQ ID NO: 1547871 - RNA, 19 nt, Artificial Sequence
  Description of Artificial Sequence: Synthetic oligonucleotide
aaacugcaucugcccacaa

SEQ ID NO: 1547872 - RNA, 19 nt, Artificial Sequence
  Description of Artificial Sequence: Synthetic oligonucleotide
ggagaaugcgaaauagaaa

SEQ ID NO: 1547873 - RNA, 19 nt, Artificial Sequence
  Description of Artificial Sequence: Synthetic oligonucleotide
gugaaaggugaagggcggc

SEQ ID NO: 1547874 - RNA, 19 nt, Artificial Sequence
  Description of Artificial Sequence: Synthetic oligonucleotide
gggcaugggccauucuucc

SEQ ID NO: 1547875 - RNA, 19 nt, Artificial Sequence
  Description of Artificial Sequence: Synthetic oligonucleotide
ugguccggcugcucaccag

SEQ ID NO: 1547876 - RNA, 19 nt, Artificial Sequence
  Description of Artificial Sequence: Synthetic oligonucleotide
aggggccgagaacuggaga

SEQ ID NO: 1547877 - RNA, 19 nt, Artificial Sequence
  Description of Artificial Sequence: Synthetic oligonucleotide
gauagcaagcuggcacuaa

SEQ ID NO: 1547878 - RNA, 19 nt, Artificial Sequence
  Description of Artificial Sequence: Synthetic oligonucleotide
uggagcgcgcguacaccac

SEQ ID NO: 1547879 - RNA, 19 nt, Artificial Sequence
  Description of Artificial Sequence: Synthetic oligonucleotide
gucggggcccaccuccacc

SEQ ID NO: 1547880 - RNA, 19 nt, Artificial Sequence
  Description of Artificial Sequence: Synthetic oligonucleotide
ggaguggugccgcugagua

SEQ ID NO: 1547881 - RNA, 19 nt, Artificial Sequence
  Description of Artificial Sequence: Synthetic oligonucleotide
uuaggccccuucagcccac

SEQ ID NO: 1547882 - RNA, 19 nt, Artificial Sequence
  Description of Artificial Sequence: Synthetic oligonucleotide
cagguucucgcgcgugcgc

SEQ ID NO: 1547883 - RNA, 19 nt, Artificial Sequence
  Description of Artificial Sequence: Synthetic oligonucleotide
uugucgcgcgacgucuuca

SEQ ID NO: 1547884 - RNA, 19 nt, Artificial Sequence
  Description of Artificial Sequence: Synthetic oligonucleotide
gcgcgcguacaccacgugg

SEQ ID NO: 1547885 - RNA, 19 nt, Artificial Sequence
  Description of Artificial Sequence: Synthetic oligonucleotide
cagagccccgagagagucc

SEQ ID NO: 1547886 - RNA, 19 nt, Artificial Sequence
  Description of Artificial Sequence: Synthetic oligonucleotide
cuuaugugucuucaaucau

SEQ ID NO: 1547887 - RNA, 19 nt, Artificial Sequence
  Description of Artificial Sequence: Synthetic oligonucleotide
cacguggucgggcgugaag

SEQ ID NO: 1547888 - RNA, 19 nt, Artificial Sequence
  Description of Artificial Sequence: Synthetic oligonucleotide
gaggggccgagaacuggag

SEQ ID NO: 1547889 - RNA, 19 nt, Artificial Sequence
  Description of Artificial Sequence: Synthetic oligonucleotide
acuuuacacuagggaaaga

SEQ ID NO: 1547890 - RNA, 19 nt, Artificial Sequence
  Description of Artificial Sequence: Synthetic oligonucleotide
gagcggcggggucaggcac

SEQ ID NO: 1547891 - RNA, 19 nt, Artificial Sequence
  Description of Artificial Sequence: Synthetic oligonucleotide
uccgcgccagccucgucgu

SEQ ID NO: 1547892 - RNA, 19 nt, Artificial Sequence
  Description of Artificial Sequence: Synthetic oligonucleotide
gcuuuagagucuccuggga

SEQ ID NO: 1547893 - RNA, 19 nt, Artificial Sequence
  Description of Artificial Sequence: Synthetic oligonucleotide
gcagguuuauugguccggc

SEQ ID NO: 1547894 - RNA, 19 nt, Artificial Sequence
  Description of Artificial Sequence: Synthetic oligonucleotide
ccuuggcaagcucugaaca

SEQ ID NO: 1547895 - RNA, 19 nt, Artificial Sequence
  Description of Artificial Sequence: Synthetic oligonucleotide
cguguuguauaaaagauuu

SEQ ID NO: 1547896 - RNA, 19 nt, Artificial Sequence
  Description of Artificial Sequence: Synthetic oligonucleotide
agcaaagcuucguguugua

SEQ ID NO: 1547897 - RNA, 19 nt, Artificial Sequence
  Description of Artificial Sequence: Synthetic oligonucleotide
cuugucgcgcgacgucuuc

SEQ ID NO: 1547898 - RNA, 19 nt, Artificial Sequence
  Description of Artificial Sequence: Synthetic oligonucleotide
gcuuugaacucacucuaua

SEQ ID NO: 1547899 - RNA, 19 nt, Artificial Sequence
  Description of Artificial Sequence: Synthetic oligonucleotide
ugaaggacuugcgcagcuu

SEQ ID NO: 1547900 - RNA, 19 nt, Artificial Sequence
  Description of Artificial Sequence: Synthetic oligonucleotide
ucgcgucgcuccacgggga

SEQ ID NO: 1547901 - RNA, 19 nt, Artificial Sequence
  Description of Artificial Sequence: Synthetic oligonucleotide
agcuucucgcgucgcucca

SEQ ID NO: 1547902 - RNA, 19 nt, Artificial Sequence
  Description of Artificial Sequence: Synthetic oligonucleotide
ggcgucugacuccucggug

SEQ ID NO: 1547903 - RNA, 19 nt, Artificial Sequence
  Description of Artificial Sequence: Synthetic oligonucleotide
accuccccucggccuaagg

SEQ ID NO: 1547904 - RNA, 19 nt, Artificial Sequence
  Description of Artificial Sequence: Synthetic oligonucleotide
gcgucugacuccucgguga

SEQ ID NO: 1547905 - RNA, 19 nt, Artificial Sequence
  Description of Artificial Sequence: Synthetic oligonucleotide
gacaggccuugaauuuuca

SEQ ID NO: 1547906 - RNA, 19 nt, Artificial Sequence
  Description of Artificial Sequence: Synthetic oligonucleotide
gggagaccaccuccccucg

SEQ ID NO: 1547907 - RNA, 19 nt, Artificial Sequence
  Description of Artificial Sequence: Synthetic oligonucleotide
agggaaagauccacucuua

SEQ ID NO: 1547908 - RNA, 19 nt, Artificial Sequence
  Description of Artificial Sequence: Synthetic oligonucleotide
ucuccagcgugugccgcgu

SEQ ID NO: 1547909 - RNA, 19 nt, Artificial Sequence
  Description of Artificial Sequence: Synthetic oligonucleotide
ucgcuccacggggaccagg

SEQ ID NO: 1547910 - RNA, 19 nt, Artificial Sequence
  Description of Artificial Sequence: Synthetic oligonucleotide
agcgcgcguacaccacgug

SEQ ID NO: 1547911 - RNA, 19 nt, Artificial Sequence
  Description of Artificial Sequence: Synthetic oligonucleotide
ggagaccaccuccccucgg

SEQ ID NO: 1547912 - RNA, 19 nt, Artificial Sequence
  Description of Artificial Sequence: Synthetic oligonucleotide
acaccacguggucgggcgu

SEQ ID NO: 1547913 - RNA, 19 nt, Artificial Sequence
  Description of Artificial Sequence: Synthetic oligonucleotide
gucgcgcgacgucuucagc

SEQ ID NO: 1547914 - RNA, 19 nt, Artificial Sequence
  Description of Artificial Sequence: Synthetic oligonucleotide
cccgagagaguccugcuca

SEQ ID NO: 1547915 - RNA, 19 nt, Artificial Sequence
  Description of Artificial Sequence: Synthetic oligonucleotide
guggucgggcgugaaggac

SEQ ID NO: 1547916 - RNA, 19 nt, Artificial Sequence
  Description of Artificial Sequence: Synthetic oligonucleotide
cagcuugucgcgcgacguc

SEQ ID NO: 1547917 - RNA, 19 nt, Artificial Sequence
  Description of Artificial Sequence: Synthetic oligonucleotide
cucgcccucgcggaucuuc

SEQ ID NO: 1547918 - RNA, 19 nt, Artificial Sequence
  Description of Artificial Sequence: Synthetic oligonucleotide
uuacucgggcuggcuuuga

SEQ ID NO: 1547919 - RNA, 19 nt, Artificial Sequence
  Description of Artificial Sequence: Synthetic oligonucleotide
gugugcacgucggggcugc

SEQ ID NO: 1547920 - RNA, 19 nt, Artificial Sequence
  Description of Artificial Sequence: Synthetic oligonucleotide
ggaucuucuugacgugaaa

SEQ ID NO: 1547921 - RNA, 19 nt, Artificial Sequence
  Description of Artificial Sequence: Synthetic oligonucleotide
caccacguggucgggcgug

SEQ ID NO: 1547922 - RNA, 19 nt, Artificial Sequence
  Description of Artificial Sequence: Synthetic oligonucleotide
cucccagguagcugggaua

SEQ ID NO: 1547923 - RNA, 19 nt, Artificial Sequence
  Description of Artificial Sequence: Synthetic oligonucleotide
agcgggaguggugccgcug

SEQ ID NO: 1547924 - RNA, 19 nt, Artificial Sequence
  Description of Artificial Sequence: Synthetic oligonucleotide
ggguaagguaaaagagcuc

SEQ ID NO: 1547925 - RNA, 19 nt, Artificial Sequence
  Description of Artificial Sequence: Synthetic oligonucleotide
ggaccaggcgcgugcccag

SEQ ID NO: 1547926 - RNA, 19 nt, Artificial Sequence
  Description of Artificial Sequence: Synthetic oligonucleotide
gugggagaccaccuccccu

SEQ ID NO: 1547927 - RNA, 19 nt, Artificial Sequence
  Description of Artificial Sequence: Synthetic oligonucleotide
gucgucgucggggcccacc

SEQ ID NO: 1547928 - RNA, 19 nt, Artificial Sequence
  Description of Artificial Sequence: Synthetic oligonucleotide
gggccgagaacuggagagc

SEQ ID NO: 1547929 - RNA, 19 nt, Artificial Sequence
  Description of Artificial Sequence: Synthetic oligonucleotide
cugggauagcaagcuggca

SEQ ID NO: 1547930 - RNA, 19 nt, Artificial Sequence
  Description of Artificial Sequence: Synthetic oligonucleotide
ggcggucuuggagcgcgcg

SEQ ID NO: 1547931 - RNA, 19 nt, Artificial Sequence
  Description of Artificial Sequence: Synthetic oligonucleotide
cagguuuauugguccggcu

SEQ ID NO: 1547932 - RNA, 19 nt, Artificial Sequence
  Description of Artificial Sequence: Synthetic oligonucleotide
cagcgugugccgcgucuuc

SEQ ID NO: 1547933 - RNA, 19 nt, Artificial Sequence
  Description of Artificial Sequence: Synthetic oligonucleotide
gcacuaaaaggcugccccu

SEQ ID NO: 1547934 - RNA, 19 nt, Artificial Sequence
  Description of Artificial Sequence: Synthetic oligonucleotide
gacggcggucuuggagcgc

SEQ ID NO: 1547935 - RNA, 19 nt, Artificial Sequence
  Description of Artificial Sequence: Synthetic oligonucleotide
gugcacgucggggcugcug

SEQ ID NO: 1547936 - RNA, 19 nt, Artificial Sequence
  Description of Artificial Sequence: Synthetic oligonucleotide
gaguggugccgcugaguau

SEQ ID NO: 1547937 - RNA, 19 nt, Artificial Sequence
  Description of Artificial Sequence: Synthetic oligonucleotide
accacguggucgggcguga

SEQ ID NO: 1547938 - RNA, 19 nt, Artificial Sequence
  Description of Artificial Sequence: Synthetic oligonucleotide
ugccccugcaaggguuguc

SEQ ID NO: 1547939 - RNA, 19 nt, Artificial Sequence
  Description of Artificial Sequence: Synthetic oligonucleotide
gggaccaggcgcgugccca

SEQ ID NO: 1547940 - RNA, 19 nt, Artificial Sequence
  Description of Artificial Sequence: Synthetic oligonucleotide
cgugaaggacuugcgcagc

SEQ ID NO: 1547941 - RNA, 19 nt, Artificial Sequence
  Description of Artificial Sequence: Synthetic oligonucleotide
gcgggaguggugccgcuga

SEQ ID NO: 1547942 - RNA, 19 nt, Artificial Sequence
  Description of Artificial Sequence: Synthetic oligonucleotide
gugaagggcggcaccuugu

SEQ ID NO: 1547943 - RNA, 19 nt, Artificial Sequence
  Description of Artificial Sequence: Synthetic oligonucleotide
cgugugccgcgucuucucc

SEQ ID NO: 1547944 - RNA, 19 nt, Artificial Sequence
  Description of Artificial Sequence: Synthetic oligonucleotide
gcucaaccagcauggggcu

SEQ ID NO: 1547945 - RNA, 19 nt, Artificial Sequence
  Description of Artificial Sequence: Synthetic oligonucleotide
cgcagcuugucgcgcgacg

SEQ ID NO: 1547946 - RNA, 19 nt, Artificial Sequence
  Description of Artificial Sequence: Synthetic oligonucleotide
cgcgccagccucgucgucg

SEQ ID NO: 1547947 - RNA, 19 nt, Artificial Sequence
  Description of Artificial Sequence: Synthetic oligonucleotide
gcgugugccgcgucuucuc

SEQ ID NO: 1547948 - RNA, 19 nt, Artificial Sequence
  Description of Artificial Sequence: Synthetic oligonucleotide
gggcggcaccuuguagacg

SEQ ID NO: 1547949 - RNA, 19 nt, Artificial Sequence
  Description of Artificial Sequence: Synthetic oligonucleotide
cagacaggccuugaauuuu

SEQ ID NO: 1547950 - RNA, 19 nt, Artificial Sequence
  Description of Artificial Sequence: Synthetic oligonucleotide
ccgcugaguaugaagcugu

SEQ ID NO: 1547951 - RNA, 19 nt, Artificial Sequence
  Description of Artificial Sequence: Synthetic oligonucleotide
gcgcguacaccacgugguc

SEQ ID NO: 1547952 - RNA, 19 nt, Artificial Sequence
  Description of Artificial Sequence: Synthetic oligonucleotide
ccccgagagaguccugcuc

SEQ ID NO: 1547953 - RNA, 19 nt, Artificial Sequence
  Description of Artificial Sequence: Synthetic oligonucleotide
ggccgagaacuggagagcu

SEQ ID NO: 1547954 - RNA, 19 nt, Artificial Sequence
  Description of Artificial Sequence: Synthetic oligonucleotide
cacggggaccaggcgcgug

SEQ ID NO: 1547955 - RNA, 19 nt, Artificial Sequence
  Description of Artificial Sequence: Synthetic oligonucleotide
gagcgcgcguacaccacgu

SEQ ID NO: 1547956 - RNA, 19 nt, Artificial Sequence
  Description of Artificial Sequence: Synthetic oligonucleotide
gcgcgugcccagcuuguuc

SEQ ID NO: 1547957 - RNA, 19 nt, Artificial Sequence
  Description of Artificial Sequence: Synthetic oligonucleotide
ccagacaggccuugaauuu

SEQ ID NO: 1547958 - RNA, 19 nt, Artificial Sequence
  Description of Artificial Sequence: Synthetic oligonucleotide
ggggaccaggcgcgugccc

SEQ ID NO: 1547959 - RNA, 19 nt, Artificial Sequence
  Description of Artificial Sequence: Synthetic oligonucleotide
gcggcggggucaggcaccg

SEQ ID NO: 1547960 - RNA, 19 nt, Artificial Sequence
  Description of Artificial Sequence: Synthetic oligonucleotide
cuccagcgugugccgcguc

SEQ ID NO: 1547961 - RNA, 19 nt, Artificial Sequence
  Description of Artificial Sequence: Synthetic oligonucleotide
ggucggcggccucgccgcg

SEQ ID NO: 1547962 - RNA, 19 nt, Artificial Sequence
  Description of Artificial Sequence: Synthetic oligonucleotide
cucagacagcgggaguggu

SEQ ID NO: 1547963 - RNA, 19 nt, Artificial Sequence
  Description of Artificial Sequence: Synthetic oligonucleotide
gcgcgacgucuucagcuuc

SEQ ID NO: 1547964 - RNA, 19 nt, Artificial Sequence
  Description of Artificial Sequence: Synthetic oligonucleotide
gcagcuugucgcgcgacgu

SEQ ID NO: 1547965 - RNA, 19 nt, Artificial Sequence
  Description of Artificial Sequence: Synthetic oligonucleotide
cugcuggcgcgcagcaggu

SEQ ID NO: 1547966 - RNA, 19 nt, Artificial Sequence
  Description of Artificial Sequence: Synthetic oligonucleotide
ccucgccgcgcuccgcgcc

SEQ ID NO: 1547967 - RNA, 19 nt, Artificial Sequence
  Description of Artificial Sequence: Synthetic oligonucleotide
gucgggcgugaaggacuug

SEQ ID NO: 1547968 - RNA, 19 nt, Artificial Sequence
  Description of Artificial Sequence: Synthetic oligonucleotide
gccccugcaaggguugucu

SEQ ID NO: 1547969 - RNA, 19 nt, Artificial Sequence
  Description of Artificial Sequence: Synthetic oligonucleotide
gcgucgcuccacggggacc

SEQ ID NO: 1547970 - RNA, 19 nt, Artificial Sequence
  Description of Artificial Sequence: Synthetic oligonucleotide
gcgugugcacgucggggcu

SEQ ID NO: 1547971 - RNA, 19 nt, Artificial Sequence
  Description of Artificial Sequence: Synthetic oligonucleotide
cgcgugcgcaccuuggucu

SEQ ID NO: 1547972 - RNA, 19 nt, Artificial Sequence
  Description of Artificial Sequence: Synthetic oligonucleotide
cguggucgggcgugaagga

SEQ ID NO: 1547973 - RNA, 19 nt, Artificial Sequence
  Description of Artificial Sequence: Synthetic oligonucleotide
gcgacgucuucagcuucuc

SEQ ID NO: 1547974 - RNA, 19 nt, Artificial Sequence
  Description of Artificial Sequence: Synthetic oligonucleotide
cccagaguguguccaaauu

SEQ ID NO: 1547975 - RNA, 19 nt, Artificial Sequence
  Description of Artificial Sequence: Synthetic oligonucleotide
cgugugcacgucggggcug

SEQ ID NO: 1547976 - RNA, 19 nt, Artificial Sequence
  Description of Artificial Sequence: Synthetic oligonucleotide
ggucaggcaccggccucca

SEQ ID NO: 1547977 - RNA, 19 nt, Artificial Sequence
  Description of Artificial Sequence: Synthetic oligonucleotide
cgcgucgcuccacggggac

SEQ ID NO: 1547978 - RNA, 19 nt, Artificial Sequence
  Description of Artificial Sequence: Synthetic oligonucleotide
cgggaguggugccgcugag

SEQ ID NO: 1547979 - RNA, 19 nt, Artificial Sequence
  Description of Artificial Sequence: Synthetic oligonucleotide
gccccgagagaguccugcu

SEQ ID NO: 1547980 - RNA, 19 nt, Artificial Sequence
  Description of Artificial Sequence: Synthetic oligonucleotide
cguccacgcgccgcaggcc

SEQ ID NO: 1547981 - RNA, 19 nt, Artificial Sequence
  Description of Artificial Sequence: Synthetic oligonucleotide
ggucgggcgugaaggacuu

SEQ ID NO: 1547982 - RNA, 19 nt, Artificial Sequence
  Description of Artificial Sequence: Synthetic oligonucleotide
ccucggccuaaggcuugug

SEQ ID NO: 1547983 - RNA, 19 nt, Artificial Sequence
  Description of Artificial Sequence: Synthetic oligonucleotide
cgucggggcccaccuccac

SEQ ID NO: 1547984 - RNA, 19 nt, Artificial Sequence
  Description of Artificial Sequence: Synthetic oligonucleotide
gcgugcgcaccuuggucuu

SEQ ID NO: 1547985 - RNA, 19 nt, Artificial Sequence
  Description of Artificial Sequence: Synthetic oligonucleotide
cagcgggaguggugccgcu

SEQ ID NO: 1547986 - RNA, 19 nt, Artificial Sequence
  Description of Artificial Sequence: Synthetic oligonucleotide
cggucuuggagcgcgcgua

SEQ ID NO: 1547987 - RNA, 19 nt, Artificial Sequence
  Description of Artificial Sequence: Synthetic oligonucleotide
cgucgucggggcccaccuc

SEQ ID NO: 1547988 - RNA, 19 nt, Artificial Sequence
  Description of Artificial Sequence: Synthetic oligonucleotide
cggcggucuuggagcgcgc

SEQ ID NO: 1547989 - RNA, 19 nt, Artificial Sequence
  Description of Artificial Sequence: Synthetic oligonucleotide
gcuugucgcgcgacgucuu

SEQ ID NO: 1547990 - RNA, 19 nt, Artificial Sequence
  Description of Artificial Sequence: Synthetic oligonucleotide
caccggccuccagggcaga

SEQ ID NO: 1547991 - RNA, 19 nt, Artificial Sequence
  Description of Artificial Sequence: Synthetic oligonucleotide
cgcgcgacgucuucagcuu

SEQ ID NO: 1547992 - RNA, 19 nt, Artificial Sequence
  Description of Artificial Sequence: Synthetic oligonucleotide
cggcgucugacuccucggu

SEQ ID NO: 1547993 - RNA, 19 nt, Artificial Sequence
  Description of Artificial Sequence: Synthetic oligonucleotide
cgcgcgugcgcaccuuggu

SEQ ID NO: 1547994 - RNA, 19 nt, Artificial Sequence
  Description of Artificial Sequence: Synthetic oligonucleotide
ggcgcgugcccagcuuguu

SEQ ID NO: 1547995 - RNA, 19 nt, Artificial Sequence
  Description of Artificial Sequence: Synthetic oligonucleotide
ccagcgugugccgcgucuu

SEQ ID NO: 1547996 - RNA, 19 nt, Artificial Sequence
  Description of Artificial Sequence: Synthetic oligonucleotide
ccacguggucgggcgugaa

SEQ ID NO: 1547997 - RNA, 19 nt, Artificial Sequence
  Description of Artificial Sequence: Synthetic oligonucleotide
cccucggccuaaggcuugu

SEQ ID NO: 1547998 - RNA, 19 nt, Artificial Sequence
  Description of Artificial Sequence: Synthetic oligonucleotide
cgucgucgucggggcccac

SEQ ID NO: 1547999 - RNA, 19 nt, Artificial Sequence
  Description of Artificial Sequence: Synthetic oligonucleotide
ccacggggaccaggcgcgu

SEQ ID NO: 1548000 - RNA, 19 nt, Artificial Sequence
  Description of Artificial Sequence: Synthetic oligonucleotide
cgcccucgcggaucuucuu

SEQ ID NO: 1548001 - RNA, 19 nt, Artificial Sequence
  Description of Artificial Sequence: Synthetic oligonucleotide
ccucgcccucgcggaucuu

SEQ ID NO: 1548002 - RNA, 19 nt, Artificial Sequence
  Description of Artificial Sequence: Synthetic oligonucleotide
gaaugaaugagccugggag

SEQ ID NO: 1548003 - RNA, 19 nt, Artificial Sequence
  Description of Artificial Sequence: Synthetic oligonucleotide
ucgaauacacaauaggagg

SEQ ID NO: 1548004 - RNA, 19 nt, Artificial Sequence
  Description of Artificial Sequence: Synthetic oligonucleotide
aaugaaugagccugggagg

SEQ ID NO: 1548005 - RNA, 19 nt, Artificial Sequence
  Description of Artificial Sequence: Synthetic oligonucleotide
ucuaagugacugcacaugg

SEQ ID NO: 1548006 - RNA, 19 nt, Artificial Sequence
  Description of Artificial Sequence: Synthetic oligonucleotide
ugagggauauaaauaaagc

SEQ ID NO: 1548007 - RNA, 19 nt, Artificial Sequence
  Description of Artificial Sequence: Synthetic oligonucleotide
aagucagugcgcuccaccc

SEQ ID NO: 1548008 - RNA, 19 nt, Artificial Sequence
  Description of Artificial Sequence: Synthetic oligonucleotide
ucaccgauacacaugggcg

SEQ ID NO: 1548009 - RNA, 19 nt, Artificial Sequence
  Description of Artificial Sequence: Synthetic oligonucleotide
gacuauauuggucuugcag

SEQ ID NO: 1548010 - RNA, 19 nt, Artificial Sequence
  Description of Artificial Sequence: Synthetic oligonucleotide
gacuugaacuuccacagag

SEQ ID NO: 1548011 - RNA, 19 nt, Artificial Sequence
  Description of Artificial Sequence: Synthetic oligonucleotide
gaagggugcaguccgaggg

SEQ ID NO: 1548012 - RNA, 19 nt, Artificial Sequence
  Description of Artificial Sequence: Synthetic oligonucleotide
accucaccgauacacaugg

SEQ ID NO: 1548013 - RNA, 19 nt, Artificial Sequence
  Description of Artificial Sequence: Synthetic oligonucleotide
uugguguacagguuucggg

SEQ ID NO: 1548014 - RNA, 19 nt, Artificial Sequence
  Description of Artificial Sequence: Synthetic oligonucleotide
gauuuugucguggaaguug

SEQ ID NO: 1548015 - RNA, 19 nt, Artificial Sequence
  Description of Artificial Sequence: Synthetic oligonucleotide
ucgggaauagggcaaaggu

SEQ ID NO: 1548016 - RNA, 19 nt, Artificial Sequence
  Description of Artificial Sequence: Synthetic oligonucleotide
uggaaauugggguuuuggc

SEQ ID NO: 1548017 - RNA, 19 nt, Artificial Sequence
  Description of Artificial Sequence: Synthetic oligonucleotide
cuugaacuuccacagagug

SEQ ID NO: 1548018 - RNA, 19 nt, Artificial Sequence
  Description of Artificial Sequence: Synthetic oligonucleotide
ucucaguggaaauuggggu

SEQ ID NO: 1548019 - RNA, 19 nt, Artificial Sequence
  Description of Artificial Sequence: Synthetic oligonucleotide
aggggcacauaccacaagg

SEQ ID NO: 1548020 - RNA, 19 nt, Artificial Sequence
  Description of Artificial Sequence: Synthetic oligonucleotide
uuauuaguggugcugguuu

SEQ ID NO: 1548021 - RNA, 19 nt, Artificial Sequence
  Description of Artificial Sequence: Synthetic oligonucleotide
uccauggacuuguugcucg

SEQ ID NO: 1548022 - RNA, 19 nt, Artificial Sequence
  Description of Artificial Sequence: Synthetic oligonucleotide
ugagccaccucaccgauac

SEQ ID NO: 1548023 - RNA, 19 nt, Artificial Sequence
  Description of Artificial Sequence: Synthetic oligonucleotide
cuucauagcguuuccggcc

SEQ ID NO: 1548024 - RNA, 19 nt, Artificial Sequence
  Description of Artificial Sequence: Synthetic oligonucleotide
gaucaagcuggauuggcug

SEQ ID NO: 1548025 - RNA, 19 nt, Artificial Sequence
  Description of Artificial Sequence: Synthetic oligonucleotide
acuucuaagugacugcaca

SEQ ID NO: 1548026 - RNA, 19 nt, Artificial Sequence
  Description of Artificial Sequence: Synthetic oligonucleotide
ugugaggauauucuccgac

SEQ ID NO: 1548027 - RNA, 19 nt, Artificial Sequence
  Description of Artificial Sequence: Synthetic oligonucleotide
uucauacaacaccagcucu

SEQ ID NO: 1548028 - RNA, 19 nt, Artificial Sequence
  Description of Artificial Sequence: Synthetic oligonucleotide
aggauauucuccgacauca

SEQ ID NO: 1548029 - RNA, 19 nt, Artificial Sequence
  Description of Artificial Sequence: Synthetic oligonucleotide
aauggucccuccaugaaca

SEQ ID NO: 1548030 - RNA, 19 nt, Artificial Sequence
  Description of Artificial Sequence: Synthetic oligonucleotide
cuugcaguggcgugcagcc

SEQ ID NO: 1548031 - RNA, 19 nt, Artificial Sequence
  Description of Artificial Sequence: Synthetic oligonucleotide
ucauacaacaccagcucuc

SEQ ID NO: 1548032 - RNA, 19 nt, Artificial Sequence
  Description of Artificial Sequence: Synthetic oligonucleotide
gacgacgcagccuuuccgg

SEQ ID NO: 1548033 - RNA, 19 nt, Artificial Sequence
  Description of Artificial Sequence: Synthetic oligonucleotide
ucagaauggucccuccaug

SEQ ID NO: 1548034 - RNA, 19 nt, Artificial Sequence
  Description of Artificial Sequence: Synthetic oligonucleotide
agguguguugaccccaggg

SEQ ID NO: 1548035 - RNA, 19 nt, Artificial Sequence
  Description of Artificial Sequence: Synthetic oligonucleotide
uauucuccgacaucacgug

SEQ ID NO: 1548036 - RNA, 19 nt, Artificial Sequence
  Description of Artificial Sequence: Synthetic oligonucleotide
uggaccauguccccauucc

SEQ ID NO: 1548037 - RNA, 19 nt, Artificial Sequence
  Description of Artificial Sequence: Synthetic oligonucleotide
guuugcgacaggcuggacc

SEQ ID NO: 1548038 - RNA, 19 nt, Artificial Sequence
  Description of Artificial Sequence: Synthetic oligonucleotide
uauuggucuugcaguggcg

SEQ ID NO: 1548039 - RNA, 19 nt, Artificial Sequence
  Description of Artificial Sequence: Synthetic oligonucleotide
ugaggauauucuccgacau

SEQ ID NO: 1548040 - RNA, 19 nt, Artificial Sequence
  Description of Artificial Sequence: Synthetic oligonucleotide
uccagagauggugacgacg

SEQ ID NO: 1548041 - RNA, 19 nt, Artificial Sequence
  Description of Artificial Sequence: Synthetic oligonucleotide
ccuucaucugcacauagcg

SEQ ID NO: 1548042 - RNA, 19 nt, Artificial Sequence
  Description of Artificial Sequence: Synthetic oligonucleotide
uucauggucacaccuccgu

SEQ ID NO: 1548043 - RNA, 19 nt, Artificial Sequence
  Description of Artificial Sequence: Synthetic oligonucleotide
uucuccgacaucacgugga

SEQ ID NO: 1548044 - RNA, 19 nt, Artificial Sequence
  Description of Artificial Sequence: Synthetic oligonucleotide
cagguuucgggaauagggc

SEQ ID NO: 1548045 - RNA, 19 nt, Artificial Sequence
  Description of Artificial Sequence: Synthetic oligonucleotide
ucugcgacggcggacggcg

SEQ ID NO: 1548046 - RNA, 19 nt, Artificial Sequence
  Description of Artificial Sequence: Synthetic oligonucleotide
cucggucucaggcacaagc

SEQ ID NO: 1548047 - RNA, 19 nt, Artificial Sequence
  Description of Artificial Sequence: Synthetic oligonucleotide
uacacaauaggaggcaccu

SEQ ID NO: 1548048 - RNA, 19 nt, Artificial Sequence
  Description of Artificial Sequence: Synthetic oligonucleotide
ggcacauaccacaaggugg

SEQ ID NO: 1548049 - RNA, 19 nt, Artificial Sequence
  Description of Artificial Sequence: Synthetic oligonucleotide
uccgacaucacguggacuu

SEQ ID NO: 1548050 - RNA, 19 nt, Artificial Sequence
  Description of Artificial Sequence: Synthetic oligonucleotide
auccggcagaucuggaucg

SEQ ID NO: 1548051 - RNA, 19 nt, Artificial Sequence
  Description of Artificial Sequence: Synthetic oligonucleotide
auauucuccgacaucacgu

SEQ ID NO: 1548052 - RNA, 19 nt, Artificial Sequence
  Description of Artificial Sequence: Synthetic oligonucleotide
ggauacauaggugaagaag

SEQ ID NO: 1548053 - RNA, 19 nt, Artificial Sequence
  Description of Artificial Sequence: Synthetic oligonucleotide
uucucugcgacggcggacg

SEQ ID NO: 1548054 - RNA, 19 nt, Artificial Sequence
  Description of Artificial Sequence: Synthetic oligonucleotide
ugacgacgcagccuuuccg

SEQ ID NO: 1548055 - RNA, 19 nt, Artificial Sequence
  Description of Artificial Sequence: Synthetic oligonucleotide
gcaaguugcacgccuaggg

SEQ ID NO: 1548056 - RNA, 19 nt, Artificial Sequence
  Description of Artificial Sequence: Synthetic oligonucleotide
uucgggaauagggcaaagg

SEQ ID NO: 1548057 - RNA, 19 nt, Artificial Sequence
  Description of Artificial Sequence: Synthetic oligonucleotide
cucgugaaggucaugcguc

SEQ ID NO: 1548058 - RNA, 19 nt, Artificial Sequence
  Description of Artificial Sequence: Synthetic oligonucleotide
cuuugccgucuucaaagcg

SEQ ID NO: 1548059 - RNA, 19 nt, Artificial Sequence
  Description of Artificial Sequence: Synthetic oligonucleotide
cacugagggauauaaauaa

SEQ ID NO: 1548060 - RNA, 19 nt, Artificial Sequence
  Description of Artificial Sequence: Synthetic oligonucleotide
uuuccggauuuugucgugg

SEQ ID NO: 1548061 - RNA, 19 nt, Artificial Sequence
  Description of Artificial Sequence: Synthetic oligonucleotide
caaguugcacgccuagggc

SEQ ID NO: 1548062 - RNA, 19 nt, Artificial Sequence
  Description of Artificial Sequence: Synthetic oligonucleotide
uccgugguggccuuuggga

SEQ ID NO: 1548063 - RNA, 19 nt, Artificial Sequence
  Description of Artificial Sequence: Synthetic oligonucleotide
agugacaggggcacauacc

SEQ ID NO: 1548064 - RNA, 19 nt, Artificial Sequence
  Description of Artificial Sequence: Synthetic oligonucleotide
uaucgcuucugugaguugu

SEQ ID NO: 1548065 - RNA, 19 nt, Artificial Sequence
  Description of Artificial Sequence: Synthetic oligonucleotide
aguguaggugaucucugca

SEQ ID NO: 1548066 - RNA, 19 nt, Artificial Sequence
  Description of Artificial Sequence: Synthetic oligonucleotide
ugagaacagguguccagca

SEQ ID NO: 1548067 - RNA, 19 nt, Artificial Sequence
  Description of Artificial Sequence: Synthetic oligonucleotide
uguagcucacuguguucgg

SEQ ID NO: 1548068 - RNA, 19 nt, Artificial Sequence
  Description of Artificial Sequence: Synthetic oligonucleotide
agggauacauaggugaaga

SEQ ID NO: 1548069 - RNA, 19 nt, Artificial Sequence
  Description of Artificial Sequence: Synthetic oligonucleotide
gugacuauauuggucuugc

SEQ ID NO: 1548070 - RNA, 19 nt, Artificial Sequence
  Description of Artificial Sequence: Synthetic oligonucleotide
gccucgaauacacaauagg

SEQ ID NO: 1548071 - RNA, 19 nt, Artificial Sequence
  Description of Artificial Sequence: Synthetic oligonucleotide
agguuucgggaauagggca

SEQ ID NO: 1548072 - RNA, 19 nt, Artificial Sequence
  Description of Artificial Sequence: Synthetic oligonucleotide
ugcaguggcgugcagccac

SEQ ID NO: 1548073 - RNA, 19 nt, Artificial Sequence
  Description of Artificial Sequence: Synthetic oligonucleotide
gucagugcgcuccacccgg

SEQ ID NO: 1548074 - RNA, 19 nt, Artificial Sequence
  Description of Artificial Sequence: Synthetic oligonucleotide
ugcucgugaaggucaugcg

SEQ ID NO: 1548075 - RNA, 19 nt, Artificial Sequence
  Description of Artificial Sequence: Synthetic oligonucleotide
ugacaucuucucugcgacg

SEQ ID NO: 1548076 - RNA, 19 nt, Artificial Sequence
  Description of Artificial Sequence: Synthetic oligonucleotide
ucuggcuguuacagugccg

SEQ ID NO: 1548077 - RNA, 19 nt, Artificial Sequence
  Description of Artificial Sequence: Synthetic oligonucleotide
aacagguguccagcagacc

SEQ ID NO: 1548078 - RNA, 19 nt, Artificial Sequence
  Description of Artificial Sequence: Synthetic oligonucleotide
agguggaucaagcuggauu

SEQ ID NO: 1548079 - RNA, 19 nt, Artificial Sequence
  Description of Artificial Sequence: Synthetic oligonucleotide
aucacguggacuugaacuu

SEQ ID NO: 1548080 - RNA, 19 nt, Artificial Sequence
  Description of Artificial Sequence: Synthetic oligonucleotide
agcguuuccggcccucuuc

SEQ ID NO: 1548081 - RNA, 19 nt, Artificial Sequence
  Description of Artificial Sequence: Synthetic oligonucleotide
uccagguggucuccaugcg

SEQ ID NO: 1548082 - RNA, 19 nt, Artificial Sequence
  Description of Artificial Sequence: Synthetic oligonucleotide
uauuaguggugcugguuuc

SEQ ID NO: 1548083 - RNA, 19 nt, Artificial Sequence
  Description of Artificial Sequence: Synthetic oligonucleotide
ucggucucaggcacaagcu

SEQ ID NO: 1548084 - RNA, 19 nt, Artificial Sequence
  Description of Artificial Sequence: Synthetic oligonucleotide
caucacguggacuugaacu

SEQ ID NO: 1548085 - RNA, 19 nt, Artificial Sequence
  Description of Artificial Sequence: Synthetic oligonucleotide
agcuuuauuaguggugcug

SEQ ID NO: 1548086 - RNA, 19 nt, Artificial Sequence
  Description of Artificial Sequence: Synthetic oligonucleotide
guguguugaccccagggac

SEQ ID NO: 1548087 - RNA, 19 nt, Artificial Sequence
  Description of Artificial Sequence: Synthetic oligonucleotide
uacagguuucgggaauagg

SEQ ID NO: 1548088 - RNA, 19 nt, Artificial Sequence
  Description of Artificial Sequence: Synthetic oligonucleotide
aucaagcuggauuggcugu

SEQ ID NO: 1548089 - RNA, 19 nt, Artificial Sequence
  Description of Artificial Sequence: Synthetic oligonucleotide
cuccguguggcccugucgc

SEQ ID NO: 1548090 - RNA, 19 nt, Artificial Sequence
  Description of Artificial Sequence: Synthetic oligonucleotide
auggugacgacgcagccuu

SEQ ID NO: 1548091 - RNA, 19 nt, Artificial Sequence
  Description of Artificial Sequence: Synthetic oligonucleotide
ccagagauggugacgacgc

SEQ ID NO: 1548092 - RNA, 19 nt, Artificial Sequence
  Description of Artificial Sequence: Synthetic oligonucleotide
cacaccuccgugcacgaag

SEQ ID NO: 1548093 - RNA, 19 nt, Artificial Sequence
  Description of Artificial Sequence: Synthetic oligonucleotide
ucuugcaguggcgugcagc

SEQ ID NO: 1548094 - RNA, 19 nt, Artificial Sequence
  Description of Artificial Sequence: Synthetic oligonucleotide
uuuauuaguggugcugguu

SEQ ID NO: 1548095 - RNA, 19 nt, Artificial Sequence
  Description of Artificial Sequence: Synthetic oligonucleotide
guaggugaucucugcacug

SEQ ID NO: 1548096 - RNA, 19 nt, Artificial Sequence
  Description of Artificial Sequence: Synthetic oligonucleotide
auuuugucguggaaguuga

SEQ ID NO: 1548097 - RNA, 19 nt, Artificial Sequence
  Description of Artificial Sequence: Synthetic oligonucleotide
gaaugagccugggaggcgc

SEQ ID NO: 1548098 - RNA, 19 nt, Artificial Sequence
  Description of Artificial Sequence: Synthetic oligonucleotide
gucaugcguccagagaugg

SEQ ID NO: 1548099 - RNA, 19 nt, Artificial Sequence
  Description of Artificial Sequence: Synthetic oligonucleotide
auaggugaagaaggcacug

SEQ ID NO: 1548100 - RNA, 19 nt, Artificial Sequence
  Description of Artificial Sequence: Synthetic oligonucleotide
gcagcuuuauuaguggugc

SEQ ID NO: 1548101 - RNA, 19 nt, Artificial Sequence
  Description of Artificial Sequence: Synthetic oligonucleotide
aaugagccugggaggcgcc

SEQ ID NO: 1548102 - RNA, 19 nt, Artificial Sequence
  Description of Artificial Sequence: Synthetic oligonucleotide
uggaucaagcuggauuggc

SEQ ID NO: 1548103 - RNA, 19 nt, Artificial Sequence
  Description of Artificial Sequence: Synthetic oligonucleotide
cugcacauggggcuacugc

SEQ ID NO: 1548104 - RNA, 19 nt, Artificial Sequence
  Description of Artificial Sequence: Synthetic oligonucleotide
gccuuuccggauuuugucg

SEQ ID NO: 1548105 - RNA, 19 nt, Artificial Sequence
  Description of Artificial Sequence: Synthetic oligonucleotide
cagguguccagcagacccg

SEQ ID NO: 1548106 - RNA, 19 nt, Artificial Sequence
  Description of Artificial Sequence: Synthetic oligonucleotide
agaccauuccgugugcucu

SEQ ID NO: 1548107 - RNA, 19 nt, Artificial Sequence
  Description of Artificial Sequence: Synthetic oligonucleotide
cuggauuggcuguagcuca

SEQ ID NO: 1548108 - RNA, 19 nt, Artificial Sequence
  Description of Artificial Sequence: Synthetic oligonucleotide
gugaaggucaugcguccag

SEQ ID NO: 1548109 - RNA, 19 nt, Artificial Sequence
  Description of Artificial Sequence: Synthetic oligonucleotide
cugacaugagccaccucac

SEQ ID NO: 1548110 - RNA, 19 nt, Artificial Sequence
  Description of Artificial Sequence: Synthetic oligonucleotide
ugggcgacaagaagucagu

SEQ ID NO: 1548111 - RNA, 19 nt, Artificial Sequence
  Description of Artificial Sequence: Synthetic oligonucleotide
gggaauagggcaaagguaa

SEQ ID NO: 1548112 - RNA, 19 nt, Artificial Sequence
  Description of Artificial Sequence: Synthetic oligonucleotide
gaggauauucuccgacauc

SEQ ID NO: 1548113 - RNA, 19 nt, Artificial Sequence
  Description of Artificial Sequence: Synthetic oligonucleotide
gugaggauauucuccgaca

SEQ ID NO: 1548114 - RNA, 19 nt, Artificial Sequence
  Description of Artificial Sequence: Synthetic oligonucleotide
cauuccuccagguggucuc

SEQ ID NO: 1548115 - RNA, 19 nt, Artificial Sequence
  Description of Artificial Sequence: Synthetic oligonucleotide
acaccuccgugcacgaagc

SEQ ID NO: 1548116 - RNA, 19 nt, Artificial Sequence
  Description of Artificial Sequence: Synthetic oligonucleotide
uuggucuugcaguggcgug

SEQ ID NO: 1548117 - RNA, 19 nt, Artificial Sequence
  Description of Artificial Sequence: Synthetic oligonucleotide
ucuucucugcgacggcgga

SEQ ID NO: 1548118 - RNA, 19 nt, Artificial Sequence
  Description of Artificial Sequence: Synthetic oligonucleotide
auacaacaccagcucucag

SEQ ID NO: 1548119 - RNA, 19 nt, Artificial Sequence
  Description of Artificial Sequence: Synthetic oligonucleotide
gcuucauagcguuuccggc

SEQ ID NO: 1548120 - RNA, 19 nt, Artificial Sequence
  Description of Artificial Sequence: Synthetic oligonucleotide
gauacacaugggcgacaag

SEQ ID NO: 1548121 - RNA, 19 nt, Artificial Sequence
  Description of Artificial Sequence: Synthetic oligonucleotide
ccucgaauacacaauagga

SEQ ID NO: 1548122 - RNA, 19 nt, Artificial Sequence
  Description of Artificial Sequence: Synthetic oligonucleotide
cacauggggcuacugcccc

SEQ ID NO: 1548123 - RNA, 19 nt, Artificial Sequence
  Description of Artificial Sequence: Synthetic oligonucleotide
cuuguugcucgugaagguc

SEQ ID NO: 1548124 - RNA, 19 nt, Artificial Sequence
  Description of Artificial Sequence: Synthetic oligonucleotide
guggccuuugggaugacac

SEQ ID NO: 1548125 - RNA, 19 nt, Artificial Sequence
  Description of Artificial Sequence: Synthetic oligonucleotide
cauugccagccacauuggc

SEQ ID NO: 1548126 - RNA, 19 nt, Artificial Sequence
  Description of Artificial Sequence: Synthetic oligonucleotide
gcuguuacagugccgggug

SEQ ID NO: 1548127 - RNA, 19 nt, Artificial Sequence
  Description of Artificial Sequence: Synthetic oligonucleotide
ugacuauauuggucuugca

SEQ ID NO: 1548128 - RNA, 19 nt, Artificial Sequence
  Description of Artificial Sequence: Synthetic oligonucleotide
aucgcggacggcgugucgg

SEQ ID NO: 1548129 - RNA, 19 nt, Artificial Sequence
  Description of Artificial Sequence: Synthetic oligonucleotide
ugacaggggcacauaccac

SEQ ID NO: 1548130 - RNA, 19 nt, Artificial Sequence
  Description of Artificial Sequence: Synthetic oligonucleotide
gcacauaccacaagguggc

SEQ ID NO: 1548131 - RNA, 19 nt, Artificial Sequence
  Description of Artificial Sequence: Synthetic oligonucleotide
uguccgugguggccuuugg

SEQ ID NO: 1548132 - RNA, 19 nt, Artificial Sequence
  Description of Artificial Sequence: Synthetic oligonucleotide
uugguaccugugaggauau

SEQ ID NO: 1548133 - RNA, 19 nt, Artificial Sequence
  Description of Artificial Sequence: Synthetic oligonucleotide
gggguuacuucuaagugac

SEQ ID NO: 1548134 - RNA, 19 nt, Artificial Sequence
  Description of Artificial Sequence: Synthetic oligonucleotide
gacggcgugucgguggcgg

SEQ ID NO: 1548135 - RNA, 19 nt, Artificial Sequence
  Description of Artificial Sequence: Synthetic oligonucleotide
auuaguggugcugguuucu

SEQ ID NO: 1548136 - RNA, 19 nt, Artificial Sequence
  Description of Artificial Sequence: Synthetic oligonucleotide
gucgcuucgccuucaucug

SEQ ID NO: 1548137 - RNA, 19 nt, Artificial Sequence
  Description of Artificial Sequence: Synthetic oligonucleotide
uuccggauuuugucgugga

SEQ ID NO: 1548138 - RNA, 19 nt, Artificial Sequence
  Description of Artificial Sequence: Synthetic oligonucleotide
cauccacggaggcagugac

SEQ ID NO: 1548139 - RNA, 19 nt, Artificial Sequence
  Description of Artificial Sequence: Synthetic oligonucleotide
cacacagcgcuccccauuc

SEQ ID NO: 1548140 - RNA, 19 nt, Artificial Sequence
  Description of Artificial Sequence: Synthetic oligonucleotide
aggcagugacuauauuggu

SEQ ID NO: 1548141 - RNA, 19 nt, Artificial Sequence
  Description of Artificial Sequence: Synthetic oligonucleotide
gguguguugaccccaggga

SEQ ID NO: 1548142 - RNA, 19 nt, Artificial Sequence
  Description of Artificial Sequence: Synthetic oligonucleotide
cuuuccggauuuugucgug

SEQ ID NO: 1548143 - RNA, 19 nt, Artificial Sequence
  Description of Artificial Sequence: Synthetic oligonucleotide
cagggauacauaggugaag

SEQ ID NO: 1548144 - RNA, 19 nt, Artificial Sequence
  Description of Artificial Sequence: Synthetic oligonucleotide
guccgugguggccuuuggg

SEQ ID NO: 1548145 - RNA, 19 nt, Artificial Sequence
  Description of Artificial Sequence: Synthetic oligonucleotide
uccggauuuugucguggaa

SEQ ID NO: 1548146 - RNA, 19 nt, Artificial Sequence
  Description of Artificial Sequence: Synthetic oligonucleotide
caccgauacacaugggcga

SEQ ID NO: 1548147 - RNA, 19 nt, Artificial Sequence
  Description of Artificial Sequence: Synthetic oligonucleotide
acgaagccaugaagggugc

SEQ ID NO: 1548148 - RNA, 19 nt, Artificial Sequence
  Description of Artificial Sequence: Synthetic oligonucleotide
ucucugcgacggcggacgg

SEQ ID NO: 1548149 - RNA, 19 nt, Artificial Sequence
  Description of Artificial Sequence: Synthetic oligonucleotide
gggcaaagguaacacugcc

SEQ ID NO: 1548150 - RNA, 19 nt, Artificial Sequence
  Description of Artificial Sequence: Synthetic oligonucleotide
uuacagugccgggugcuga

SEQ ID NO: 1548151 - RNA, 19 nt, Artificial Sequence
  Description of Artificial Sequence: Synthetic oligonucleotide
uuucgggaauagggcaaag

SEQ ID NO: 1548152 - RNA, 19 nt, Artificial Sequence
  Description of Artificial Sequence: Synthetic oligonucleotide
gugacgacgcagccuuucc

SEQ ID NO: 1548153 - RNA, 19 nt, Artificial Sequence
  Description of Artificial Sequence: Synthetic oligonucleotide
gguaccugugaggauauuc

SEQ ID NO: 1548154 - RNA, 19 nt, Artificial Sequence
  Description of Artificial Sequence: Synthetic oligonucleotide
ucaugcguccagagauggu

SEQ ID NO: 1548155 - RNA, 19 nt, Artificial Sequence
  Description of Artificial Sequence: Synthetic oligonucleotide
guggaucaagcuggauugg

SEQ ID NO: 1548156 - RNA, 19 nt, Artificial Sequence
  Description of Artificial Sequence: Synthetic oligonucleotide
cuagggcugaggcuccgug

SEQ ID NO: 1548157 - RNA, 19 nt, Artificial Sequence
  Description of Artificial Sequence: Synthetic oligonucleotide
acugagggauauaaauaaa

SEQ ID NO: 1548158 - RNA, 19 nt, Artificial Sequence
  Description of Artificial Sequence: Synthetic oligonucleotide
uggaaguguaggugaucuc

SEQ ID NO: 1548159 - RNA, 19 nt, Artificial Sequence
  Description of Artificial Sequence: Synthetic oligonucleotide
ggcgccgaaugaaugagcc

SEQ ID NO: 1548160 - RNA, 19 nt, Artificial Sequence
  Description of Artificial Sequence: Synthetic oligonucleotide
guacagguuucgggaauag

SEQ ID NO: 1548161 - RNA, 19 nt, Artificial Sequence
  Description of Artificial Sequence: Synthetic oligonucleotide
gucguggaaguugauggca

SEQ ID NO: 1548162 - RNA, 19 nt, Artificial Sequence
  Description of Artificial Sequence: Synthetic oligonucleotide
guagcucacuguguucggc

SEQ ID NO: 1548163 - RNA, 19 nt, Artificial Sequence
  Description of Artificial Sequence: Synthetic oligonucleotide
uguguucggcucuggguuu

SEQ ID NO: 1548164 - RNA, 19 nt, Artificial Sequence
  Description of Artificial Sequence: Synthetic oligonucleotide
cagcgcuccccauucuggc

SEQ ID NO: 1548165 - RNA, 19 nt, Artificial Sequence
  Description of Artificial Sequence: Synthetic oligonucleotide
ugcgacggcggacggcggc

SEQ ID NO: 1548166 - RNA, 19 nt, Artificial Sequence
  Description of Artificial Sequence: Synthetic oligonucleotide
guaccugugaggauauucu

SEQ ID NO: 1548167 - RNA, 19 nt, Artificial Sequence
  Description of Artificial Sequence: Synthetic oligonucleotide
gaucgcggacggcgugucg

SEQ ID NO: 1548168 - RNA, 19 nt, Artificial Sequence
  Description of Artificial Sequence: Synthetic oligonucleotide
guuacagugccgggugcug

SEQ ID NO: 1548169 - RNA, 19 nt, Artificial Sequence
  Description of Artificial Sequence: Synthetic oligonucleotide
cacagaccauuccgugugc

SEQ ID NO: 1548170 - RNA, 19 nt, Artificial Sequence
  Description of Artificial Sequence: Synthetic oligonucleotide
uuggcaucaucuggccgca

SEQ ID NO: 1548171 - RNA, 19 nt, Artificial Sequence
  Description of Artificial Sequence: Synthetic oligonucleotide
cuuggaaguguaggugauc

SEQ ID NO: 1548172 - RNA, 19 nt, Artificial Sequence
  Description of Artificial Sequence: Synthetic oligonucleotide
ggaaguguaggugaucucu

SEQ ID NO: 1548173 - RNA, 19 nt, Artificial Sequence
  Description of Artificial Sequence: Synthetic oligonucleotide
ccacaagguggccuuauug

SEQ ID NO: 1548174 - RNA, 19 nt, Artificial Sequence
  Description of Artificial Sequence: Synthetic oligonucleotide
uggccgcaugauccggcag

SEQ ID NO: 1548175 - RNA, 19 nt, Artificial Sequence
  Description of Artificial Sequence: Synthetic oligonucleotide
acgacgcagccuuuccgga

SEQ ID NO: 1548176 - RNA, 19 nt, Artificial Sequence
  Description of Artificial Sequence: Synthetic oligonucleotide
cauagcggccuuugccguc

SEQ ID NO: 1548177 - RNA, 19 nt, Artificial Sequence
  Description of Artificial Sequence: Synthetic oligonucleotide
aguggaaauugggguuuug

SEQ ID NO: 1548178 - RNA, 19 nt, Artificial Sequence
  Description of Artificial Sequence: Synthetic oligonucleotide
guaucgcuucugugaguug

SEQ ID NO: 1548179 - RNA, 19 nt, Artificial Sequence
  Description of Artificial Sequence: Synthetic oligonucleotide
agcgcuccccauucuggcu

SEQ ID NO: 1548180 - RNA, 19 nt, Artificial Sequence
  Description of Artificial Sequence: Synthetic oligonucleotide
uccgugcacgaagccauga

SEQ ID NO: 1548181 - RNA, 19 nt, Artificial Sequence
  Description of Artificial Sequence: Synthetic oligonucleotide
accuccgugcacgaagcca

SEQ ID NO: 1548182 - RNA, 19 nt, Artificial Sequence
  Description of Artificial Sequence: Synthetic oligonucleotide
gcuggauuggcuguagcuc

SEQ ID NO: 1548183 - RNA, 19 nt, Artificial Sequence
  Description of Artificial Sequence: Synthetic oligonucleotide
ccgguaucgcuucugugag

SEQ ID NO: 1548184 - RNA, 19 nt, Artificial Sequence
  Description of Artificial Sequence: Synthetic oligonucleotide
ugcacgccuagggcugagg

SEQ ID NO: 1548185 - RNA, 19 nt, Artificial Sequence
  Description of Artificial Sequence: Synthetic oligonucleotide
cccgguaucgcuucuguga

SEQ ID NO: 1548186 - RNA, 19 nt, Artificial Sequence
  Description of Artificial Sequence: Synthetic oligonucleotide
ccacacaauacuucauaca

SEQ ID NO: 1548187 - RNA, 19 nt, Artificial Sequence
  Description of Artificial Sequence: Synthetic oligonucleotide
gccgaaugaaugagccugg

SEQ ID NO: 1548188 - RNA, 19 nt, Artificial Sequence
  Description of Artificial Sequence: Synthetic oligonucleotide
uccguguggcccugucgcu

SEQ ID NO: 1548189 - RNA, 19 nt, Artificial Sequence
  Description of Artificial Sequence: Synthetic oligonucleotide
uggaucgcggacggcgugu

SEQ ID NO: 1548190 - RNA, 19 nt, Artificial Sequence
  Description of Artificial Sequence: Synthetic oligonucleotide
cagagugcuuggaagugua

SEQ ID NO: 1548191 - RNA, 19 nt, Artificial Sequence
  Description of Artificial Sequence: Synthetic oligonucleotide
ucugggcuucauagcguuu

SEQ ID NO: 1548192 - RNA, 19 nt, Artificial Sequence
  Description of Artificial Sequence: Synthetic oligonucleotide
cuuuauuaguggugcuggu

SEQ ID NO: 1548193 - RNA, 19 nt, Artificial Sequence
  Description of Artificial Sequence: Synthetic oligonucleotide
gcacgccuagggcugaggc

SEQ ID NO: 1548194 - RNA, 19 nt, Artificial Sequence
  Description of Artificial Sequence: Synthetic oligonucleotide
ggcagaucuggaucgcgga

SEQ ID NO: 1548195 - RNA, 19 nt, Artificial Sequence
  Description of Artificial Sequence: Synthetic oligonucleotide
auagcguuuccggcccucu

SEQ ID NO: 1548196 - RNA, 19 nt, Artificial Sequence
  Description of Artificial Sequence: Synthetic oligonucleotide
ggaauagggcaaagguaac

SEQ ID NO: 1548197 - RNA, 19 nt, Artificial Sequence
  Description of Artificial Sequence: Synthetic oligonucleotide
cagcuccugccucgaauac

SEQ ID NO: 1548198 - RNA, 19 nt, Artificial Sequence
  Description of Artificial Sequence: Synthetic oligonucleotide
acugcacauggggcuacug

SEQ ID NO: 1548199 - RNA, 19 nt, Artificial Sequence
  Description of Artificial Sequence: Synthetic oligonucleotide
ugacugcacauggggcuac

SEQ ID NO: 1548200 - RNA, 19 nt, Artificial Sequence
  Description of Artificial Sequence: Synthetic oligonucleotide
cuguguucggcucuggguu

SEQ ID NO: 1548201 - RNA, 19 nt, Artificial Sequence
  Description of Artificial Sequence: Synthetic oligonucleotide
guggcccugucgcuucgcc

SEQ ID NO: 1548202 - RNA, 19 nt, Artificial Sequence
  Description of Artificial Sequence: Synthetic oligonucleotide
uguucggcucuggguuugc

SEQ ID NO: 1548203 - RNA, 19 nt, Artificial Sequence
  Description of Artificial Sequence: Synthetic oligonucleotide
cugugaggauauucuccga

SEQ ID NO: 1548204 - RNA, 19 nt, Artificial Sequence
  Description of Artificial Sequence: Synthetic oligonucleotide
cuucucugcgacggcggac

SEQ ID NO: 1548205 - RNA, 19 nt, Artificial Sequence
  Description of Artificial Sequence: Synthetic oligonucleotide
aguggcgugcagccacaau

SEQ ID NO: 1548206 - RNA, 19 nt, Artificial Sequence
  Description of Artificial Sequence: Synthetic oligonucleotide
cuggaucgcggacggcgug

SEQ ID NO: 1548207 - RNA, 19 nt, Artificial Sequence
  Description of Artificial Sequence: Synthetic oligonucleotide
ggucaugcguccagagaug

SEQ ID NO: 1548208 - RNA, 19 nt, Artificial Sequence
  Description of Artificial Sequence: Synthetic oligonucleotide
caguccgagggccccacca

SEQ ID NO: 1548209 - RNA, 19 nt, Artificial Sequence
  Description of Artificial Sequence: Synthetic oligonucleotide
agacccggcgccgaaugaa

SEQ ID NO: 1548210 - RNA, 19 nt, Artificial Sequence
  Description of Artificial Sequence: Synthetic oligonucleotide
acggaggcagugacuauau

SEQ ID NO: 1548211 - RNA, 19 nt, Artificial Sequence
  Description of Artificial Sequence: Synthetic oligonucleotide
gcagacccggcgccgaaug

SEQ ID NO: 1548212 - RNA, 19 nt, Artificial Sequence
  Description of Artificial Sequence: Synthetic oligonucleotide
acacagcgcuccccauucu

SEQ ID NO: 1548213 - RNA, 19 nt, Artificial Sequence
  Description of Artificial Sequence: Synthetic oligonucleotide
gguuucgggaauagggcaa

SEQ ID NO: 1548214 - RNA, 19 nt, Artificial Sequence
  Description of Artificial Sequence: Synthetic oligonucleotide
guguucggcucuggguuug

SEQ ID NO: 1548215 - RNA, 19 nt, Artificial Sequence
  Description of Artificial Sequence: Synthetic oligonucleotide
ggccgcaugauccggcaga

SEQ ID NO: 1548216 - RNA, 19 nt, Artificial Sequence
  Description of Artificial Sequence: Synthetic oligonucleotide
gggauacauaggugaagaa

SEQ ID NO: 1548217 - RNA, 19 nt, Artificial Sequence
  Description of Artificial Sequence: Synthetic oligonucleotide
ggauauucuccgacaucac

SEQ ID NO: 1548218 - RNA, 19 nt, Artificial Sequence
  Description of Artificial Sequence: Synthetic oligonucleotide
caccuccgugcacgaagcc

SEQ ID NO: 1548219 - RNA, 19 nt, Artificial Sequence
  Description of Artificial Sequence: Synthetic oligonucleotide
gucacaccuccgugcacga

SEQ ID NO: 1548220 - RNA, 19 nt, Artificial Sequence
  Description of Artificial Sequence: Synthetic oligonucleotide
aggcaccucgaggaccuug

SEQ ID NO: 1548221 - RNA, 19 nt, Artificial Sequence
  Description of Artificial Sequence: Synthetic oligonucleotide
cauagcguuuccggcccuc

SEQ ID NO: 1548222 - RNA, 19 nt, Artificial Sequence
  Description of Artificial Sequence: Synthetic oligonucleotide
gaucuggaucgcggacggc

SEQ ID NO: 1548223 - RNA, 19 nt, Artificial Sequence
  Description of Artificial Sequence: Synthetic oligonucleotide
cuccgugcacgaagccaug

SEQ ID NO: 1548224 - RNA, 19 nt, Artificial Sequence
  Description of Artificial Sequence: Synthetic oligonucleotide
uagcguuuccggcccucuu

SEQ ID NO: 1548225 - RNA, 19 nt, Artificial Sequence
  Description of Artificial Sequence: Synthetic oligonucleotide
uguggcccugucgcuucgc

SEQ ID NO: 1548226 - RNA, 19 nt, Artificial Sequence
  Description of Artificial Sequence: Synthetic oligonucleotide
gcguccagagauggugacg

SEQ ID NO: 1548227 - RNA, 19 nt, Artificial Sequence
  Description of Artificial Sequence: Synthetic oligonucleotide
gacgcagccuuuccggauu

SEQ ID NO: 1548228 - RNA, 19 nt, Artificial Sequence
  Description of Artificial Sequence: Synthetic oligonucleotide
caaucccagccaccucauc

SEQ ID NO: 1548229 - RNA, 19 nt, Artificial Sequence
  Description of Artificial Sequence: Synthetic oligonucleotide
guguccgugguggccuuug

SEQ ID NO: 1548230 - RNA, 19 nt, Artificial Sequence
  Description of Artificial Sequence: Synthetic oligonucleotide
accauuccgugugcucugu

SEQ ID NO: 1548231 - RNA, 19 nt, Artificial Sequence
  Description of Artificial Sequence: Synthetic oligonucleotide
gagggccccaccaggugga

SEQ ID NO: 1548232 - RNA, 19 nt, Artificial Sequence
  Description of Artificial Sequence: Synthetic oligonucleotide
caugggcgacaagaaguca

SEQ ID NO: 1548233 - RNA, 19 nt, Artificial Sequence
  Description of Artificial Sequence: Synthetic oligonucleotide
cuggccgcaugauccggca

SEQ ID NO: 1548234 - RNA, 19 nt, Artificial Sequence
  Description of Artificial Sequence: Synthetic oligonucleotide
cgagggccccaccaggugg

SEQ ID NO: 1548235 - RNA, 19 nt, Artificial Sequence
  Description of Artificial Sequence: Synthetic oligonucleotide
cacuggcggcccgguaucg

SEQ ID NO: 1548236 - RNA, 19 nt, Artificial Sequence
  Description of Artificial Sequence: Synthetic oligonucleotide
cagagauggugacgacgca

SEQ ID NO: 1548237 - RNA, 19 nt, Artificial Sequence
  Description of Artificial Sequence: Synthetic oligonucleotide
ccgaaugaaugagccuggg

SEQ ID NO: 1548238 - RNA, 19 nt, Artificial Sequence
  Description of Artificial Sequence: Synthetic oligonucleotide
gcugaggcuccguguggcc

SEQ ID NO: 1548239 - RNA, 19 nt, Artificial Sequence
  Description of Artificial Sequence: Synthetic oligonucleotide
uugcacgccuagggcugag

SEQ ID NO: 1548240 - RNA, 19 nt, Artificial Sequence
  Description of Artificial Sequence: Synthetic oligonucleotide
guggcggggccugacaucu

SEQ ID NO: 1548241 - RNA, 19 nt, Artificial Sequence
  Description of Artificial Sequence: Synthetic oligonucleotide
cucugcgacggcggacggc

SEQ ID NO: 1548242 - RNA, 19 nt, Artificial Sequence
  Description of Artificial Sequence: Synthetic oligonucleotide
ggaucaagcuggauuggcu

SEQ ID NO: 1548243 - RNA, 19 nt, Artificial Sequence
  Description of Artificial Sequence: Synthetic oligonucleotide
gugucgguggcggggccug

SEQ ID NO: 1548244 - RNA, 19 nt, Artificial Sequence
  Description of Artificial Sequence: Synthetic oligonucleotide
acccggcgccgaaugaaug

SEQ ID NO: 1548245 - RNA, 19 nt, Artificial Sequence
  Description of Artificial Sequence: Synthetic oligonucleotide
acguggacuugaacuucca

SEQ ID NO: 1548246 - RNA, 19 nt, Artificial Sequence
  Description of Artificial Sequence: Synthetic oligonucleotide
ggcggcgggagcugagaac

SEQ ID NO: 1548247 - RNA, 19 nt, Artificial Sequence
  Description of Artificial Sequence: Synthetic oligonucleotide
cugcgacggcggacggcgg

SEQ ID NO: 1548248 - RNA, 19 nt, Artificial Sequence
  Description of Artificial Sequence: Synthetic oligonucleotide
gguaacacugccacacaau

SEQ ID NO: 1548249 - RNA, 19 nt, Artificial Sequence
  Description of Artificial Sequence: Synthetic oligonucleotide
ucacaccuccgugcacgaa

SEQ ID NO: 1548250 - RNA, 19 nt, Artificial Sequence
  Description of Artificial Sequence: Synthetic oligonucleotide
cguggacuugaacuuccac

SEQ ID NO: 1548251 - RNA, 19 nt, Artificial Sequence
  Description of Artificial Sequence: Synthetic oligonucleotide
gguggcggggccugacauc

SEQ ID NO: 1548252 - RNA, 19 nt, Artificial Sequence
  Description of Artificial Sequence: Synthetic oligonucleotide
ccucaccgauacacauggg

SEQ ID NO: 1548253 - RNA, 19 nt, Artificial Sequence
  Description of Artificial Sequence: Synthetic oligonucleotide
cacgccuagggcugaggcu

SEQ ID NO: 1548254 - RNA, 19 nt, Artificial Sequence
  Description of Artificial Sequence: Synthetic oligonucleotide
cagcuuuauuaguggugcu

SEQ ID NO: 1548255 - RNA, 19 nt, Artificial Sequence
  Description of Artificial Sequence: Synthetic oligonucleotide
ggguuugcgacaggcugga

SEQ ID NO: 1548256 - RNA, 19 nt, Artificial Sequence
  Description of Artificial Sequence: Synthetic oligonucleotide
ccaugaacauugccagcca

SEQ ID NO: 1548257 - RNA, 19 nt, Artificial Sequence
  Description of Artificial Sequence: Synthetic oligonucleotide
auaccacaagguggccuua

SEQ ID NO: 1548258 - RNA, 19 nt, Artificial Sequence
  Description of Artificial Sequence: Synthetic oligonucleotide
ggcauccacggaggcagug

SEQ ID NO: 1548259 - RNA, 19 nt, Artificial Sequence
  Description of Artificial Sequence: Synthetic oligonucleotide
uggugacgacgcagccuuu

SEQ ID NO: 1548260 - RNA, 19 nt, Artificial Sequence
  Description of Artificial Sequence: Synthetic oligonucleotide
cgggaauagggcaaaggua

SEQ ID NO: 1548261 - RNA, 19 nt, Artificial Sequence
  Description of Artificial Sequence: Synthetic oligonucleotide
ggcgugucgguggcggggc

SEQ ID NO: 1548262 - RNA, 19 nt, Artificial Sequence
  Description of Artificial Sequence: Synthetic oligonucleotide
cagacccggcgccgaauga

SEQ ID NO: 1548263 - RNA, 19 nt, Artificial Sequence
  Description of Artificial Sequence: Synthetic oligonucleotide
ccggcgccgaaugaaugag

SEQ ID NO: 1548264 - RNA, 19 nt, Artificial Sequence
  Description of Artificial Sequence: Synthetic oligonucleotide
cggauuuugucguggaagu

SEQ ID NO: 1548265 - RNA, 19 nt, Artificial Sequence
  Description of Artificial Sequence: Synthetic oligonucleotide
ggcacuggcggcccgguau

SEQ ID NO: 1548266 - RNA, 19 nt, Artificial Sequence
  Description of Artificial Sequence: Synthetic oligonucleotide
ccggcagaucuggaucgcg

SEQ ID NO: 1548267 - RNA, 19 nt, Artificial Sequence
  Description of Artificial Sequence: Synthetic oligonucleotide
gccaccucaccgauacaca

SEQ ID NO: 1548268 - RNA, 19 nt, Artificial Sequence
  Description of Artificial Sequence: Synthetic oligonucleotide
gcgacggcggacggcggcg

SEQ ID NO: 1548269 - RNA, 19 nt, Artificial Sequence
  Description of Artificial Sequence: Synthetic oligonucleotide
ggggccugacaucuucucu

SEQ ID NO: 1548270 - RNA, 19 nt, Artificial Sequence
  Description of Artificial Sequence: Synthetic oligonucleotide
gcacuggcggcccgguauc

SEQ ID NO: 1548271 - RNA, 19 nt, Artificial Sequence
  Description of Artificial Sequence: Synthetic oligonucleotide
cccggcgccgaaugaauga

SEQ ID NO: 1548272 - RNA, 19 nt, Artificial Sequence
  Description of Artificial Sequence: Synthetic oligonucleotide
gacggcggacggcggcgga

SEQ ID NO: 1548273 - RNA, 19 nt, Artificial Sequence
  Description of Artificial Sequence: Synthetic oligonucleotide
ugucgguggcggggccuga

SEQ ID NO: 1548274 - RNA, 19 nt, Artificial Sequence
  Description of Artificial Sequence: Synthetic oligonucleotide
gcucacuguguucggcucu

SEQ ID NO: 1548275 - RNA, 19 nt, Artificial Sequence
  Description of Artificial Sequence: Synthetic oligonucleotide
ggggcacauaccacaaggu

SEQ ID NO: 1548276 - RNA, 19 nt, Artificial Sequence
  Description of Artificial Sequence: Synthetic oligonucleotide
cggacggcggcggacggcg

SEQ ID NO: 1548277 - RNA, 19 nt, Artificial Sequence
  Description of Artificial Sequence: Synthetic oligonucleotide
ccgacaucacguggacuug

SEQ ID NO: 1548278 - RNA, 19 nt, Artificial Sequence
  Description of Artificial Sequence: Synthetic oligonucleotide
ugguaccugugaggauauu

SEQ ID NO: 1548279 - RNA, 19 nt, Artificial Sequence
  Description of Artificial Sequence: Synthetic oligonucleotide
ccauuccgugugcucugug

SEQ ID NO: 1548280 - RNA, 19 nt, Artificial Sequence
  Description of Artificial Sequence: Synthetic oligonucleotide
ccugccucgaauacacaau

SEQ ID NO: 1548281 - RNA, 19 nt, Artificial Sequence
  Description of Artificial Sequence: Synthetic oligonucleotide
augagccaccucaccgaua

SEQ ID NO: 1548282 - RNA, 19 nt, Artificial Sequence
  Description of Artificial Sequence: Synthetic oligonucleotide
cagugacuauauuggucuu

SEQ ID NO: 1548283 - RNA, 19 nt, Artificial Sequence
  Description of Artificial Sequence: Synthetic oligonucleotide
cguguggcccugucgcuuc

SEQ ID NO: 1548284 - RNA, 19 nt, Artificial Sequence
  Description of Artificial Sequence: Synthetic oligonucleotide
gacccggcgccgaaugaau

SEQ ID NO: 1548285 - RNA, 19 nt, Artificial Sequence
  Description of Artificial Sequence: Synthetic oligonucleotide
cggcgccgaaugaaugagc

SEQ ID NO: 1548286 - RNA, 19 nt, Artificial Sequence
  Description of Artificial Sequence: Synthetic oligonucleotide
gcuacugccccaggugugu

SEQ ID NO: 1548287 - RNA, 19 nt, Artificial Sequence
  Description of Artificial Sequence: Synthetic oligonucleotide
aggcacuggcggcccggua

SEQ ID NO: 1548288 - RNA, 19 nt, Artificial Sequence
  Description of Artificial Sequence: Synthetic oligonucleotide
gcaguccgagggccccacc

SEQ ID NO: 1548289 - RNA, 19 nt, Artificial Sequence
  Description of Artificial Sequence: Synthetic oligonucleotide
gcccuccugguucagggau

SEQ ID NO: 1548290 - RNA, 19 nt, Artificial Sequence
  Description of Artificial Sequence: Synthetic oligonucleotide
ggaucgcggacggcguguc

SEQ ID NO: 1548291 - RNA, 19 nt, Artificial Sequence
  Description of Artificial Sequence: Synthetic oligonucleotide
uggcggggccugacaucuu

SEQ ID NO: 1548292 - RNA, 19 nt, Artificial Sequence
  Description of Artificial Sequence: Synthetic oligonucleotide
ggauuuugucguggaaguu

SEQ ID NO: 1548293 - RNA, 19 nt, Artificial Sequence
  Description of Artificial Sequence: Synthetic oligonucleotide
cggacggcgugucgguggc

SEQ ID NO: 1548294 - RNA, 19 nt, Artificial Sequence
  Description of Artificial Sequence: Synthetic oligonucleotide
ggcccgguaucgcuucugu

SEQ ID NO: 1548295 - RNA, 19 nt, Artificial Sequence
  Description of Artificial Sequence: Synthetic oligonucleotide
cgauacacaugggcgacaa

SEQ ID NO: 1548296 - RNA, 19 nt, Artificial Sequence
  Description of Artificial Sequence: Synthetic oligonucleotide
ggacggcgugucgguggcg

SEQ ID NO: 1548297 - RNA, 19 nt, Artificial Sequence
  Description of Artificial Sequence: Synthetic oligonucleotide
gcgccgaaugaaugagccu

SEQ ID NO: 1548298 - RNA, 19 nt, Artificial Sequence
  Description of Artificial Sequence: Synthetic oligonucleotide
cggggccugacaucuucuc

SEQ ID NO: 1548299 - RNA, 19 nt, Artificial Sequence
  Description of Artificial Sequence: Synthetic oligonucleotide
cuccgacaucacguggacu

SEQ ID NO: 1548300 - RNA, 19 nt, Artificial Sequence
  Description of Artificial Sequence: Synthetic oligonucleotide
ccgugcacgaagccaugaa

SEQ ID NO: 1548301 - RNA, 19 nt, Artificial Sequence
  Description of Artificial Sequence: Synthetic oligonucleotide
gguuugcgacaggcuggac

SEQ ID NO: 1548302 - RNA, 19 nt, Artificial Sequence
  Description of Artificial Sequence: Synthetic oligonucleotide
gcgugucgguggcggggcc

SEQ ID NO: 1548303 - RNA, 19 nt, Artificial Sequence
  Description of Artificial Sequence: Synthetic oligonucleotide
cagcagacccggcgccgaa

SEQ ID NO: 1548304 - RNA, 19 nt, Artificial Sequence
  Description of Artificial Sequence: Synthetic oligonucleotide
gcgacaggcuggaccaugu

SEQ ID NO: 1548305 - RNA, 19 nt, Artificial Sequence
  Description of Artificial Sequence: Synthetic oligonucleotide
cgacaucacguggacuuga

SEQ ID NO: 1548306 - RNA, 19 nt, Artificial Sequence
  Description of Artificial Sequence: Synthetic oligonucleotide
cggcgugucgguggcgggg

SEQ ID NO: 1548307 - RNA, 19 nt, Artificial Sequence
  Description of Artificial Sequence: Synthetic oligonucleotide
caguggcgugcagccacaa

SEQ ID NO: 1548308 - RNA, 19 nt, Artificial Sequence
  Description of Artificial Sequence: Synthetic oligonucleotide
cgugaaggucaugcgucca

SEQ ID NO: 1548309 - RNA, 19 nt, Artificial Sequence
  Description of Artificial Sequence: Synthetic oligonucleotide
cccuccugguucagggaua

SEQ ID NO: 1548310 - RNA, 19 nt, Artificial Sequence
  Description of Artificial Sequence: Synthetic oligonucleotide
caguggaaauugggguuuu

SEQ ID NO: 1548311 - RNA, 19 nt, Artificial Sequence
  Description of Artificial Sequence: Synthetic oligonucleotide
gcggacggcggcggacggc

SEQ ID NO: 1548312 - RNA, 19 nt, Artificial Sequence
  Description of Artificial Sequence: Synthetic oligonucleotide
ccagcagacccggcgccga

SEQ ID NO: 1548313 - RNA, 19 nt, Artificial Sequence
  Description of Artificial Sequence: Synthetic oligonucleotide
aggcuccguguggcccugu

SEQ ID NO: 1548314 - RNA, 19 nt, Artificial Sequence
  Description of Artificial Sequence: Synthetic oligonucleotide
cagguggaucaagcuggau

SEQ ID NO: 1548315 - RNA, 19 nt, Artificial Sequence
  Description of Artificial Sequence: Synthetic oligonucleotide
gcggggccugacaucuucu

SEQ ID NO: 1548316 - RNA, 19 nt, Artificial Sequence
  Description of Artificial Sequence: Synthetic oligonucleotide
cggcccgguaucgcuucug

SEQ ID NO: 1548317 - RNA, 19 nt, Artificial Sequence
  Description of Artificial Sequence: Synthetic oligonucleotide
cgacgcagccuuuccggau

SEQ ID NO: 1548318 - RNA, 19 nt, Artificial Sequence
  Description of Artificial Sequence: Synthetic oligonucleotide
ccugucgcuucgccuucau

SEQ ID NO: 1548319 - RNA, 19 nt, Artificial Sequence
  Description of Artificial Sequence: Synthetic oligonucleotide
ccgugugcucuguguccgu

SEQ ID NO: 1548320 - RNA, 19 nt, Artificial Sequence
  Description of Artificial Sequence: Synthetic oligonucleotide
cgguggcggggccugacau

SEQ ID NO: 1548321 - RNA, 19 nt, Artificial Sequence
  Description of Artificial Sequence: Synthetic oligonucleotide
ccguguggcccugucgcuu

SEQ ID NO: 1548322 - RNA, 19 nt, Artificial Sequence
  Description of Artificial Sequence: Synthetic oligonucleotide
cggaggcagugacuauauu

SEQ ID NO: 1548323 - RNA, 19 nt, Artificial Sequence
  Description of Artificial Sequence: Synthetic oligonucleotide
ucuacuauggcucacaagg

SEQ ID NO: 1548324 - RNA, 19 nt, Artificial Sequence
  Description of Artificial Sequence: Synthetic oligonucleotide
ucuccuucuaaacacaagg

SEQ ID NO: 1548325 - RNA, 19 nt, Artificial Sequence
  Description of Artificial Sequence: Synthetic oligonucleotide
ugagauaccacucugucca

SEQ ID NO: 1548326 - RNA, 19 nt, Artificial Sequence
  Description of Artificial Sequence: Synthetic oligonucleotide
acaaauacaucuugagugc

SEQ ID NO: 1548327 - RNA, 19 nt, Artificial Sequence
  Description of Artificial Sequence: Synthetic oligonucleotide
cacaaauacaucuugagug

SEQ ID NO: 1548328 - RNA, 19 nt, Artificial Sequence
  Description of Artificial Sequence: Synthetic oligonucleotide
ugugauggcgcucagaaca

SEQ ID NO: 1548329 - RNA, 19 nt, Artificial Sequence
  Description of Artificial Sequence: Synthetic oligonucleotide
aaacacuucccgcacauuc

SEQ ID NO: 1548330 - RNA, 19 nt, Artificial Sequence
  Description of Artificial Sequence: Synthetic oligonucleotide
aaacgcuguaugcacaucg

SEQ ID NO: 1548331 - RNA, 19 nt, Artificial Sequence
  Description of Artificial Sequence: Synthetic oligonucleotide
gguacuuucagacaugugg

SEQ ID NO: 1548332 - RNA, 19 nt, Artificial Sequence
  Description of Artificial Sequence: Synthetic oligonucleotide
aaacacaagggccuucuac

SEQ ID NO: 1548333 - RNA, 19 nt, Artificial Sequence
  Description of Artificial Sequence: Synthetic oligonucleotide
uuuacacugaggaagguga

SEQ ID NO: 1548334 - RNA, 19 nt, Artificial Sequence
  Description of Artificial Sequence: Synthetic oligonucleotide
ugucgaaucugccaggccg

SEQ ID NO: 1548335 - RNA, 19 nt, Artificial Sequence
  Description of Artificial Sequence: Synthetic oligonucleotide
uugaacuugcgugugaugg

SEQ ID NO: 1548336 - RNA, 19 nt, Artificial Sequence
  Description of Artificial Sequence: Synthetic oligonucleotide
gagaauagaggucugcacc

SEQ ID NO: 1548337 - RNA, 19 nt, Artificial Sequence
  Description of Artificial Sequence: Synthetic oligonucleotide
acaaacaccagcuugucga

SEQ ID NO: 1548338 - RNA, 19 nt, Artificial Sequence
  Description of Artificial Sequence: Synthetic oligonucleotide
uccgaucacaaauacaucu

SEQ ID NO: 1548339 - RNA, 19 nt, Artificial Sequence
  Description of Artificial Sequence: Synthetic oligonucleotide
aaggucuauagcugucagc

SEQ ID NO: 1548340 - RNA, 19 nt, Artificial Sequence
  Description of Artificial Sequence: Synthetic oligonucleotide
agugcugugaaggccaucc

SEQ ID NO: 1548341 - RNA, 19 nt, Artificial Sequence
  Description of Artificial Sequence: Synthetic oligonucleotide
ucacuaggcucacagaggc

SEQ ID NO: 1548342 - RNA, 19 nt, Artificial Sequence
  Description of Artificial Sequence: Synthetic oligonucleotide
agagaauagaggucugcac

SEQ ID NO: 1548343 - RNA, 19 nt, Artificial Sequence
  Description of Artificial Sequence: Synthetic oligonucleotide
ucacaaauacaucuugagu

SEQ ID NO: 1548344 - RNA, 19 nt, Artificial Sequence
  Description of Artificial Sequence: Synthetic oligonucleotide
uugucauggcgucagagca

SEQ ID NO: 1548345 - RNA, 19 nt, Artificial Sequence
  Description of Artificial Sequence: Synthetic oligonucleotide
acaugguacagguacuuuc

SEQ ID NO: 1548346 - RNA, 19 nt, Artificial Sequence
  Description of Artificial Sequence: Synthetic oligonucleotide
ucccuuuacacugaggaag

SEQ ID NO: 1548347 - RNA, 19 nt, Artificial Sequence
  Description of Artificial Sequence: Synthetic oligonucleotide
uguggggagaugcagacaa

SEQ ID NO: 1548348 - RNA, 19 nt, Artificial Sequence
  Description of Artificial Sequence: Synthetic oligonucleotide
aucaaggaggaggugacgc

SEQ ID NO: 1548349 - RNA, 19 nt, Artificial Sequence
  Description of Artificial Sequence: Synthetic oligonucleotide
acauucuccucacucuggc

SEQ ID NO: 1548350 - RNA, 19 nt, Artificial Sequence
  Description of Artificial Sequence: Synthetic oligonucleotide
auggcgucagagcagagag

SEQ ID NO: 1548351 - RNA, 19 nt, Artificial Sequence
  Description of Artificial Sequence: Synthetic oligonucleotide
ggugacaugguacagguac

SEQ ID NO: 1548352 - RNA, 19 nt, Artificial Sequence
  Description of Artificial Sequence: Synthetic oligonucleotide
cucacucuggcccacauac

SEQ ID NO: 1548353 - RNA, 19 nt, Artificial Sequence
  Description of Artificial Sequence: Synthetic oligonucleotide
aaacuugcgcuggaugcgc

SEQ ID NO: 1548354 - RNA, 19 nt, Artificial Sequence
  Description of Artificial Sequence: Synthetic oligonucleotide
uguaucguagcaacuccug

SEQ ID NO: 1548355 - RNA, 19 nt, Artificial Sequence
  Description of Artificial Sequence: Synthetic oligonucleotide
agaauagaggucugcaccu

SEQ ID NO: 1548356 - RNA, 19 nt, Artificial Sequence
  Description of Artificial Sequence: Synthetic oligonucleotide
cuccuucuaaacacaaggg

SEQ ID NO: 1548357 - RNA, 19 nt, Artificial Sequence
  Description of Artificial Sequence: Synthetic oligonucleotide
uacuuucagacaugugggg

SEQ ID NO: 1548358 - RNA, 19 nt, Artificial Sequence
  Description of Artificial Sequence: Synthetic oligonucleotide
cuuguaucguagcaacucc

SEQ ID NO: 1548359 - RNA, 19 nt, Artificial Sequence
  Description of Artificial Sequence: Synthetic oligonucleotide
ugaaggaucguuggggugc

SEQ ID NO: 1548360 - RNA, 19 nt, Artificial Sequence
  Description of Artificial Sequence: Synthetic oligonucleotide
aggucuauagcugucagca

SEQ ID NO: 1548361 - RNA, 19 nt, Artificial Sequence
  Description of Artificial Sequence: Synthetic oligonucleotide
uaucguagcaacuccugcu

SEQ ID NO: 1548362 - RNA, 19 nt, Artificial Sequence
  Description of Artificial Sequence: Synthetic oligonucleotide
agggcaauugcugacgggg

SEQ ID NO: 1548363 - RNA, 19 nt, Artificial Sequence
  Description of Artificial Sequence: Synthetic oligonucleotide
aguggcuccgaucacaaau

SEQ ID NO: 1548364 - RNA, 19 nt, Artificial Sequence
  Description of Artificial Sequence: Synthetic oligonucleotide
acguucacuaggcucacag

SEQ ID NO: 1548365 - RNA, 19 nt, Artificial Sequence
  Description of Artificial Sequence: Synthetic oligonucleotide
aagagcugagauaccacuc

SEQ ID NO: 1548366 - RNA, 19 nt, Artificial Sequence
  Description of Artificial Sequence: Synthetic oligonucleotide
ugaggaaacgcuguaugca

SEQ ID NO: 1548367 - RNA, 19 nt, Artificial Sequence
  Description of Artificial Sequence: Synthetic oligonucleotide
gucuauagcugucagcaac

SEQ ID NO: 1548368 - RNA, 19 nt, Artificial Sequence
  Description of Artificial Sequence: Synthetic oligonucleotide
aggccugaucgucucaggc

SEQ ID NO: 1548369 - RNA, 19 nt, Artificial Sequence
  Description of Artificial Sequence: Synthetic oligonucleotide
cuacuauggcucacaaggg

SEQ ID NO: 1548370 - RNA, 19 nt, Artificial Sequence
  Description of Artificial Sequence: Synthetic oligonucleotide
gaugaugcauggagcagcg

SEQ ID NO: 1548371 - RNA, 19 nt, Artificial Sequence
  Description of Artificial Sequence: Synthetic oligonucleotide
aagcgcgguccucacuugc

SEQ ID NO: 1548372 - RNA, 19 nt, Artificial Sequence
  Description of Artificial Sequence: Synthetic oligonucleotide
gaggaaacgcuguaugcac

SEQ ID NO: 1548373 - RNA, 19 nt, Artificial Sequence
  Description of Artificial Sequence: Synthetic oligonucleotide
cugcagcccacccacaucg

SEQ ID NO: 1548374 - RNA, 19 nt, Artificial Sequence
  Description of Artificial Sequence: Synthetic oligonucleotide
ugcguuugagggcaguugu

SEQ ID NO: 1548375 - RNA, 19 nt, Artificial Sequence
  Description of Artificial Sequence: Synthetic oligonucleotide
agaacacgcagcugggaag

SEQ ID NO: 1548376 - RNA, 19 nt, Artificial Sequence
  Description of Artificial Sequence: Synthetic oligonucleotide
guugucauggcgucagagc

SEQ ID NO: 1548377 - RNA, 19 nt, Artificial Sequence
  Description of Artificial Sequence: Synthetic oligonucleotide
gaaggucuauagcugucag

SEQ ID NO: 1548378 - RNA, 19 nt, Artificial Sequence
  Description of Artificial Sequence: Synthetic oligonucleotide
uuugagggcaguugucaug

SEQ ID NO: 1548379 - RNA, 19 nt, Artificial Sequence
  Description of Artificial Sequence: Synthetic oligonucleotide
uuacacugaggaaggugag

SEQ ID NO: 1548380 - RNA, 19 nt, Artificial Sequence
  Description of Artificial Sequence: Synthetic oligonucleotide
ugcaccugucagcugaggc

SEQ ID NO: 1548381 - RNA, 19 nt, Artificial Sequence
  Description of Artificial Sequence: Synthetic oligonucleotide
cugagauaccacucugucc

SEQ ID NO: 1548382 - RNA, 19 nt, Artificial Sequence
  Description of Artificial Sequence: Synthetic oligonucleotide
ugaacuugcgugugauggc

SEQ ID NO: 1548383 - RNA, 19 nt, Artificial Sequence
  Description of Artificial Sequence: Synthetic oligonucleotide
uuguaucguagcaacuccu

SEQ ID NO: 1548384 - RNA, 19 nt, Artificial Sequence
  Description of Artificial Sequence: Synthetic oligonucleotide
gacgggguccucaucaagg

SEQ ID NO: 1548385 - RNA, 19 nt, Artificial Sequence
  Description of Artificial Sequence: Synthetic oligonucleotide
aggauguuccagaggaagc

SEQ ID NO: 1548386 - RNA, 19 nt, Artificial Sequence
  Description of Artificial Sequence: Synthetic oligonucleotide
cugccaagcucccagacug

SEQ ID NO: 1548387 - RNA, 19 nt, Artificial Sequence
  Description of Artificial Sequence: Synthetic oligonucleotide
aucguuggggugccggccc

SEQ ID NO: 1548388 - RNA, 19 nt, Artificial Sequence
  Description of Artificial Sequence: Synthetic oligonucleotide
uccucagacagcacuggca

SEQ ID NO: 1548389 - RNA, 19 nt, Artificial Sequence
  Description of Artificial Sequence: Synthetic oligonucleotide
ugucauggcgucagagcag

SEQ ID NO: 1548390 - RNA, 19 nt, Artificial Sequence
  Description of Artificial Sequence: Synthetic oligonucleotide
accagcuugucgaaucugc

SEQ ID NO: 1548391 - RNA, 19 nt, Artificial Sequence
  Description of Artificial Sequence: Synthetic oligonucleotide
cagacauguggggagaugc

SEQ ID NO: 1548392 - RNA, 19 nt, Artificial Sequence
  Description of Artificial Sequence: Synthetic oligonucleotide
gcuggaugcgcuuguaucg

SEQ ID NO: 1548393 - RNA, 19 nt, Artificial Sequence
  Description of Artificial Sequence: Synthetic oligonucleotide
acacugaaggaucguuggg

SEQ ID NO: 1548394 - RNA, 19 nt, Artificial Sequence
  Description of Artificial Sequence: Synthetic oligonucleotide
uggcucuccuucuaaacac

SEQ ID NO: 1548395 - RNA, 19 nt, Artificial Sequence
  Description of Artificial Sequence: Synthetic oligonucleotide
ggucccuuuacacugagga

SEQ ID NO: 1548396 - RNA, 19 nt, Artificial Sequence
  Description of Artificial Sequence: Synthetic oligonucleotide
augcagacaaagauggcag

SEQ ID NO: 1548397 - RNA, 19 nt, Artificial Sequence
  Description of Artificial Sequence: Synthetic oligonucleotide
uguaugcacaucggugggg

SEQ ID NO: 1548398 - RNA, 19 nt, Artificial Sequence
  Description of Artificial Sequence: Synthetic oligonucleotide
agcuuugucuccacagccc

SEQ ID NO: 1548399 - RNA, 19 nt, Artificial Sequence
  Description of Artificial Sequence: Synthetic oligonucleotide
acuaggcucacagaggccu

SEQ ID NO: 1548400 - RNA, 19 nt, Artificial Sequence
  Description of Artificial Sequence: Synthetic oligonucleotide
guaucguagcaacuccugc

SEQ ID NO: 1548401 - RNA, 19 nt, Artificial Sequence
  Description of Artificial Sequence: Synthetic oligonucleotide
cuugccccuacaaacacca

SEQ ID NO: 1548402 - RNA, 19 nt, Artificial Sequence
  Description of Artificial Sequence: Synthetic oligonucleotide
ugguacagguacuuucaga

SEQ ID NO: 1548403 - RNA, 19 nt, Artificial Sequence
  Description of Artificial Sequence: Synthetic oligonucleotide
agaggagggcaauugcuga

SEQ ID NO: 1548404 - RNA, 19 nt, Artificial Sequence
  Description of Artificial Sequence: Synthetic oligonucleotide
ucgaacccugcguuugagg

SEQ ID NO: 1548405 - RNA, 19 nt, Artificial Sequence
  Description of Artificial Sequence: Synthetic oligonucleotide
caugguacagguacuuuca

SEQ ID NO: 1548406 - RNA, 19 nt, Artificial Sequence
  Description of Artificial Sequence: Synthetic oligonucleotide
aggucuggucuguuagugg

SEQ ID NO: 1548407 - RNA, 19 nt, Artificial Sequence
  Description of Artificial Sequence: Synthetic oligonucleotide
aacccugcguuugagggca

SEQ ID NO: 1548408 - RNA, 19 nt, Artificial Sequence
  Description of Artificial Sequence: Synthetic oligonucleotide
gacccagaaggucuauagc

SEQ ID NO: 1548409 - RNA, 19 nt, Artificial Sequence
  Description of Artificial Sequence: Synthetic oligonucleotide
gacauguggggagaugcag

SEQ ID NO: 1548410 - RNA, 19 nt, Artificial Sequence
  Description of Artificial Sequence: Synthetic oligonucleotide
cacgcagcugggaagcgcg

SEQ ID NO: 1548411 - RNA, 19 nt, Artificial Sequence
  Description of Artificial Sequence: Synthetic oligonucleotide
cugcacagaggcuauagca

SEQ ID NO: 1548412 - RNA, 19 nt, Artificial Sequence
  Description of Artificial Sequence: Synthetic oligonucleotide
uggcgcucagaacacgcag

SEQ ID NO: 1548413 - RNA, 19 nt, Artificial Sequence
  Description of Artificial Sequence: Synthetic oligonucleotide
agcuccccaucucuagccc

SEQ ID NO: 1548414 - RNA, 19 nt, Artificial Sequence
  Description of Artificial Sequence: Synthetic oligonucleotide
ucagccaagagcugagaua

SEQ ID NO: 1548415 - RNA, 19 nt, Artificial Sequence
  Description of Artificial Sequence: Synthetic oligonucleotide
ucaaggaggaggugacgca

SEQ ID NO: 1548416 - RNA, 19 nt, Artificial Sequence
  Description of Artificial Sequence: Synthetic oligonucleotide
gugcuaaggagucuaguuc

SEQ ID NO: 1548417 - RNA, 19 nt, Artificial Sequence
  Description of Artificial Sequence: Synthetic oligonucleotide
aacuugcgugugauggcgc

SEQ ID NO: 1548418 - RNA, 19 nt, Artificial Sequence
  Description of Artificial Sequence: Synthetic oligonucleotide
cucagaacacgcagcuggg

SEQ ID NO: 1548419 - RNA, 19 nt, Artificial Sequence
  Description of Artificial Sequence: Synthetic oligonucleotide
cagaggagggcaauugcug

SEQ ID NO: 1548420 - RNA, 19 nt, Artificial Sequence
  Description of Artificial Sequence: Synthetic oligonucleotide
uggaguagaaggccugauc

SEQ ID NO: 1548421 - RNA, 19 nt, Artificial Sequence
  Description of Artificial Sequence: Synthetic oligonucleotide
ggcuuagcagcucaggaug

SEQ ID NO: 1548422 - RNA, 19 nt, Artificial Sequence
  Description of Artificial Sequence: Synthetic oligonucleotide
ucuaggucucgaacccugc

SEQ ID NO: 1548423 - RNA, 19 nt, Artificial Sequence
  Description of Artificial Sequence: Synthetic oligonucleotide
cuguaugcacaucgguggg

SEQ ID NO: 1548424 - RNA, 19 nt, Artificial Sequence
  Description of Artificial Sequence: Synthetic oligonucleotide
uaggucucgaacccugcgu

SEQ ID NO: 1548425 - RNA, 19 nt, Artificial Sequence
  Description of Artificial Sequence: Synthetic oligonucleotide
uggucuguuaguggcuccg

SEQ ID NO: 1548426 - RNA, 19 nt, Artificial Sequence
  Description of Artificial Sequence: Synthetic oligonucleotide
cuaggucucgaacccugcg

SEQ ID NO: 1548427 - RNA, 19 nt, Artificial Sequence
  Description of Artificial Sequence: Synthetic oligonucleotide
ugcucgcugacugagggcu

SEQ ID NO: 1548428 - RNA, 19 nt, Artificial Sequence
  Description of Artificial Sequence: Synthetic oligonucleotide
gagagaauagaggucugca

SEQ ID NO: 1548429 - RNA, 19 nt, Artificial Sequence
  Description of Artificial Sequence: Synthetic oligonucleotide
aacacuucccgcacauucu

SEQ ID NO: 1548430 - RNA, 19 nt, Artificial Sequence
  Description of Artificial Sequence: Synthetic oligonucleotide
aucgguggggccagggucc

SEQ ID NO: 1548431 - RNA, 19 nt, Artificial Sequence
  Description of Artificial Sequence: Synthetic oligonucleotide
gagcuccccaucucuagcc

SEQ ID NO: 1548432 - RNA, 19 nt, Artificial Sequence
  Description of Artificial Sequence: Synthetic oligonucleotide
gaacccugcguuugagggc

SEQ ID NO: 1548433 - RNA, 19 nt, Artificial Sequence
  Description of Artificial Sequence: Synthetic oligonucleotide
cuugucgaaucugccaggc

SEQ ID NO: 1548434 - RNA, 19 nt, Artificial Sequence
  Description of Artificial Sequence: Synthetic oligonucleotide
acgggcauccucauccagc

SEQ ID NO: 1548435 - RNA, 19 nt, Artificial Sequence
  Description of Artificial Sequence: Synthetic oligonucleotide
uccagcucaugaggaaacg

SEQ ID NO: 1548436 - RNA, 19 nt, Artificial Sequence
  Description of Artificial Sequence: Synthetic oligonucleotide
uuggugcuaaggagucuag

SEQ ID NO: 1548437 - RNA, 19 nt, Artificial Sequence
  Description of Artificial Sequence: Synthetic oligonucleotide
augcauggagcagcggccc

SEQ ID NO: 1548438 - RNA, 19 nt, Artificial Sequence
  Description of Artificial Sequence: Synthetic oligonucleotide
cucauccagcccaucgcgg

SEQ ID NO: 1548439 - RNA, 19 nt, Artificial Sequence
  Description of Artificial Sequence: Synthetic oligonucleotide
gaggucuggucuguuagug

SEQ ID NO: 1548440 - RNA, 19 nt, Artificial Sequence
  Description of Artificial Sequence: Synthetic oligonucleotide
cuggcccacauacauguug

SEQ ID NO: 1548441 - RNA, 19 nt, Artificial Sequence
  Description of Artificial Sequence: Synthetic oligonucleotide
acuugccccuacaaacacc

SEQ ID NO: 1548442 - RNA, 19 nt, Artificial Sequence
  Description of Artificial Sequence: Synthetic oligonucleotide
cacauacauguugaugagc

SEQ ID NO: 1548443 - RNA, 19 nt, Artificial Sequence
  Description of Artificial Sequence: Synthetic oligonucleotide
caucuugagugcugugaag

SEQ ID NO: 1548444 - RNA, 19 nt, Artificial Sequence
  Description of Artificial Sequence: Synthetic oligonucleotide
agacugccaggccuggcuc

SEQ ID NO: 1548445 - RNA, 19 nt, Artificial Sequence
  Description of Artificial Sequence: Synthetic oligonucleotide
cucuaggucucgaacccug

SEQ ID NO: 1548446 - RNA, 19 nt, Artificial Sequence
  Description of Artificial Sequence: Synthetic oligonucleotide
gcggucccgacccagaagg

SEQ ID NO: 1548447 - RNA, 19 nt, Artificial Sequence
  Description of Artificial Sequence: Synthetic oligonucleotide
gaagcuggauggucuccag

SEQ ID NO: 1548448 - RNA, 19 nt, Artificial Sequence
  Description of Artificial Sequence: Synthetic oligonucleotide
ugacgggguccucaucaag

SEQ ID NO: 1548449 - RNA, 19 nt, Artificial Sequence
  Description of Artificial Sequence: Synthetic oligonucleotide
guaugcacaucgguggggc

SEQ ID NO: 1548450 - RNA, 19 nt, Artificial Sequence
  Description of Artificial Sequence: Synthetic oligonucleotide
agcugucagcaacaggaca

SEQ ID NO: 1548451 - RNA, 19 nt, Artificial Sequence
  Description of Artificial Sequence: Synthetic oligonucleotide
cagcccacccacaucgugc

SEQ ID NO: 1548452 - RNA, 19 nt, Artificial Sequence
  Description of Artificial Sequence: Synthetic oligonucleotide
ucuagcccuuccucuaggu

SEQ ID NO: 1548453 - RNA, 19 nt, Artificial Sequence
  Description of Artificial Sequence: Synthetic oligonucleotide
cauucuccucacucuggcc

SEQ ID NO: 1548454 - RNA, 19 nt, Artificial Sequence
  Description of Artificial Sequence: Synthetic oligonucleotide
gaggagggcaauugcugac

SEQ ID NO: 1548455 - RNA, 19 nt, Artificial Sequence
  Description of Artificial Sequence: Synthetic oligonucleotide
uggucccuuuacacugagg

SEQ ID NO: 1548456 - RNA, 19 nt, Artificial Sequence
  Description of Artificial Sequence: Synthetic oligonucleotide
aggcuuagcagcucaggau

SEQ ID NO: 1548457 - RNA, 19 nt, Artificial Sequence
  Description of Artificial Sequence: Synthetic oligonucleotide
uggcuccgaucacaaauac

SEQ ID NO: 1548458 - RNA, 19 nt, Artificial Sequence
  Description of Artificial Sequence: Synthetic oligonucleotide
agcgauccagcacguucac

SEQ ID NO: 1548459 - RNA, 19 nt, Artificial Sequence
  Description of Artificial Sequence: Synthetic oligonucleotide
cugagcuccccaucucuag

SEQ ID NO: 1548460 - RNA, 19 nt, Artificial Sequence
  Description of Artificial Sequence: Synthetic oligonucleotide
ugcgcuuguaucguagcaa

SEQ ID NO: 1548461 - RNA, 19 nt, Artificial Sequence
  Description of Artificial Sequence: Synthetic oligonucleotide
cagcacguucacuaggcuc

SEQ ID NO: 1548462 - RNA, 19 nt, Artificial Sequence
  Description of Artificial Sequence: Synthetic oligonucleotide
agcucaugaggaaacgcug

SEQ ID NO: 1548463 - RNA, 19 nt, Artificial Sequence
  Description of Artificial Sequence: Synthetic oligonucleotide
cccuuuacacugaggaagg

SEQ ID NO: 1548464 - RNA, 19 nt, Artificial Sequence
  Description of Artificial Sequence: Synthetic oligonucleotide
auugcugacgggguccuca

SEQ ID NO: 1548465 - RNA, 19 nt, Artificial Sequence
  Description of Artificial Sequence: Synthetic oligonucleotide
cugaaggaucguuggggug

SEQ ID NO: 1548466 - RNA, 19 nt, Artificial Sequence
  Description of Artificial Sequence: Synthetic oligonucleotide
augguaagcagcagugcug

SEQ ID NO: 1548467 - RNA, 19 nt, Artificial Sequence
  Description of Artificial Sequence: Synthetic oligonucleotide
uaugcacaucgguggggcc

SEQ ID NO: 1548468 - RNA, 19 nt, Artificial Sequence
  Description of Artificial Sequence: Synthetic oligonucleotide
ggcccuggcaaacacuucc

SEQ ID NO: 1548469 - RNA, 19 nt, Artificial Sequence
  Description of Artificial Sequence: Synthetic oligonucleotide
cgaacccugcguuugaggg

SEQ ID NO: 1548470 - RNA, 19 nt, Artificial Sequence
  Description of Artificial Sequence: Synthetic oligonucleotide
ucucgaacccugcguuuga

SEQ ID NO: 1548471 - RNA, 19 nt, Artificial Sequence
  Description of Artificial Sequence: Synthetic oligonucleotide
acuugcgugugauggcgcu

SEQ ID NO: 1548472 - RNA, 19 nt, Artificial Sequence
  Description of Artificial Sequence: Synthetic oligonucleotide
ugauggcgcucagaacacg

SEQ ID NO: 1548473 - RNA, 19 nt, Artificial Sequence
  Description of Artificial Sequence: Synthetic oligonucleotide
cuauagcugucagcaacag

SEQ ID NO: 1548474 - RNA, 19 nt, Artificial Sequence
  Description of Artificial Sequence: Synthetic oligonucleotide
augcgcuuguaucguagca

SEQ ID NO: 1548475 - RNA, 19 nt, Artificial Sequence
  Description of Artificial Sequence: Synthetic oligonucleotide
gucugcacagaggcuauag

SEQ ID NO: 1548476 - RNA, 19 nt, Artificial Sequence
  Description of Artificial Sequence: Synthetic oligonucleotide
gccugaucgucucaggccc

SEQ ID NO: 1548477 - RNA, 19 nt, Artificial Sequence
  Description of Artificial Sequence: Synthetic oligonucleotide
aacacgcagcugggaagcg

SEQ ID NO: 1548478 - RNA, 19 nt, Artificial Sequence
  Description of Artificial Sequence: Synthetic oligonucleotide
acacgcagcugggaagcgc

SEQ ID NO: 1548479 - RNA, 19 nt, Artificial Sequence
  Description of Artificial Sequence: Synthetic oligonucleotide
agggcaguugucauggcgu

SEQ ID NO: 1548480 - RNA, 19 nt, Artificial Sequence
  Description of Artificial Sequence: Synthetic oligonucleotide
caucgguggggccaggguc

SEQ ID NO: 1548481 - RNA, 19 nt, Artificial Sequence
  Description of Artificial Sequence: Synthetic oligonucleotide
cucagacagcacuggcacc

SEQ ID NO: 1548482 - RNA, 19 nt, Artificial Sequence
  Description of Artificial Sequence: Synthetic oligonucleotide
aucgucucaggcccaggcu

SEQ ID NO: 1548483 - RNA, 19 nt, Artificial Sequence
  Description of Artificial Sequence: Synthetic oligonucleotide
cacuugccccuacaaacac

SEQ ID NO: 1548484 - RNA, 19 nt, Artificial Sequence
  Description of Artificial Sequence: Synthetic oligonucleotide
cagaaggucuauagcuguc

SEQ ID NO: 1548485 - RNA, 19 nt, Artificial Sequence
  Description of Artificial Sequence: Synthetic oligonucleotide
cucuagcccuuccucuagg

SEQ ID NO: 1548486 - RNA, 19 nt, Artificial Sequence
  Description of Artificial Sequence: Synthetic oligonucleotide
acgggguccucaucaagga

SEQ ID NO: 1548487 - RNA, 19 nt, Artificial Sequence
  Description of Artificial Sequence: Synthetic oligonucleotide
auggcucacaaggggaucu

SEQ ID NO: 1548488 - RNA, 19 nt, Artificial Sequence
  Description of Artificial Sequence: Synthetic oligonucleotide
acgcuguaugcacaucggu

SEQ ID NO: 1548489 - RNA, 19 nt, Artificial Sequence
  Description of Artificial Sequence: Synthetic oligonucleotide
gaucguuggggugccggcc

SEQ ID NO: 1548490 - RNA, 19 nt, Artificial Sequence
  Description of Artificial Sequence: Synthetic oligonucleotide
gcugagauaccacucuguc

SEQ ID NO: 1548491 - RNA, 19 nt, Artificial Sequence
  Description of Artificial Sequence: Synthetic oligonucleotide
aggucucgaacccugcguu

SEQ ID NO: 1548492 - RNA, 19 nt, Artificial Sequence
  Description of Artificial Sequence: Synthetic oligonucleotide
gaaggaucguuggggugcc

SEQ ID NO: 1548493 - RNA, 19 nt, Artificial Sequence
  Description of Artificial Sequence: Synthetic oligonucleotide
acacaagggccuucuacua

SEQ ID NO: 1548494 - RNA, 19 nt, Artificial Sequence
  Description of Artificial Sequence: Synthetic oligonucleotide
ucgugccaggacacugaag

SEQ ID NO: 1548495 - RNA, 19 nt, Artificial Sequence
  Description of Artificial Sequence: Synthetic oligonucleotide
ucagaacacgcagcuggga

SEQ ID NO: 1548496 - RNA, 19 nt, Artificial Sequence
  Description of Artificial Sequence: Synthetic oligonucleotide
cagagagaauagaggucug

SEQ ID NO: 1548497 - RNA, 19 nt, Artificial Sequence
  Description of Artificial Sequence: Synthetic oligonucleotide
caucaaggaggaggugacg

SEQ ID NO: 1548498 - RNA, 19 nt, Artificial Sequence
  Description of Artificial Sequence: Synthetic oligonucleotide
gucgaaucugccaggccgc

SEQ ID NO: 1548499 - RNA, 19 nt, Artificial Sequence
  Description of Artificial Sequence: Synthetic oligonucleotide
gcugacgggguccucauca

SEQ ID NO: 1548500 - RNA, 19 nt, Artificial Sequence
  Description of Artificial Sequence: Synthetic oligonucleotide
ugacaugguacagguacuu

SEQ ID NO: 1548501 - RNA, 19 nt, Artificial Sequence
  Description of Artificial Sequence: Synthetic oligonucleotide
agcgcgguccucacuugcc

SEQ ID NO: 1548502 - RNA, 19 nt, Artificial Sequence
  Description of Artificial Sequence: Synthetic oligonucleotide
ccuggcaaacacuucccgc

SEQ ID NO: 1548503 - RNA, 19 nt, Artificial Sequence
  Description of Artificial Sequence: Synthetic oligonucleotide
cuagcccuuccucuagguc

SEQ ID NO: 1548504 - RNA, 19 nt, Artificial Sequence
  Description of Artificial Sequence: Synthetic oligonucleotide
gucucgaacccugcguuug

SEQ ID NO: 1548505 - RNA, 19 nt, Artificial Sequence
  Description of Artificial Sequence: Synthetic oligonucleotide
caccacacgggcauccuca

SEQ ID NO: 1548506 - RNA, 19 nt, Artificial Sequence
  Description of Artificial Sequence: Synthetic oligonucleotide
gaagcgcgguccucacuug

SEQ ID NO: 1548507 - RNA, 19 nt, Artificial Sequence
  Description of Artificial Sequence: Synthetic oligonucleotide
gcuugucgaaucugccagg

SEQ ID NO: 1548508 - RNA, 19 nt, Artificial Sequence
  Description of Artificial Sequence: Synthetic oligonucleotide
cacuaggcucacagaggcc

SEQ ID NO: 1548509 - RNA, 19 nt, Artificial Sequence
  Description of Artificial Sequence: Synthetic oligonucleotide
aauugcugacgggguccuc

SEQ ID NO: 1548510 - RNA, 19 nt, Artificial Sequence
  Description of Artificial Sequence: Synthetic oligonucleotide
ccgcagaagggcaggaucc

SEQ ID NO: 1548511 - RNA, 19 nt, Artificial Sequence
  Description of Artificial Sequence: Synthetic oligonucleotide
cccagaaggucuauagcug

SEQ ID NO: 1548512 - RNA, 19 nt, Artificial Sequence
  Description of Artificial Sequence: Synthetic oligonucleotide
gcagagagaauagaggucu

SEQ ID NO: 1548513 - RNA, 19 nt, Artificial Sequence
  Description of Artificial Sequence: Synthetic oligonucleotide
acagguacuuucagacaug

SEQ ID NO: 1548514 - RNA, 19 nt, Artificial Sequence
  Description of Artificial Sequence: Synthetic oligonucleotide
cagaacacgcagcugggaa

SEQ ID NO: 1548515 - RNA, 19 nt, Artificial Sequence
  Description of Artificial Sequence: Synthetic oligonucleotide
ucauggcgucagagcagag

SEQ ID NO: 1548516 - RNA, 19 nt, Artificial Sequence
  Description of Artificial Sequence: Synthetic oligonucleotide
uggcgucagagcagagaga

SEQ ID NO: 1548517 - RNA, 19 nt, Artificial Sequence
  Description of Artificial Sequence: Synthetic oligonucleotide
gcagcgauccagcacguuc

SEQ ID NO: 1548518 - RNA, 19 nt, Artificial Sequence
  Description of Artificial Sequence: Synthetic oligonucleotide
aaacaccagcuugucgaau

SEQ ID NO: 1548519 - RNA, 19 nt, Artificial Sequence
  Description of Artificial Sequence: Synthetic oligonucleotide
ccacauacauguugaugag

SEQ ID NO: 1548520 - RNA, 19 nt, Artificial Sequence
  Description of Artificial Sequence: Synthetic oligonucleotide
agcugagauaccacucugu

SEQ ID NO: 1548521 - RNA, 19 nt, Artificial Sequence
  Description of Artificial Sequence: Synthetic oligonucleotide
acggcuugugguggccacc

SEQ ID NO: 1548522 - RNA, 19 nt, Artificial Sequence
  Description of Artificial Sequence: Synthetic oligonucleotide
uugccccuacaaacaccag

SEQ ID NO: 1548523 - RNA, 19 nt, Artificial Sequence
  Description of Artificial Sequence: Synthetic oligonucleotide
cgggcagcgauccagcacg

SEQ ID NO: 1548524 - RNA, 19 nt, Artificial Sequence
  Description of Artificial Sequence: Synthetic oligonucleotide
ugaucgucucaggcccagg

SEQ ID NO: 1548525 - RNA, 19 nt, Artificial Sequence
  Description of Artificial Sequence: Synthetic oligonucleotide
aggaaacgcuguaugcaca

SEQ ID NO: 1548526 - RNA, 19 nt, Artificial Sequence
  Description of Artificial Sequence: Synthetic oligonucleotide
gcuccgaucacaaauacau

SEQ ID NO: 1548527 - RNA, 19 nt, Artificial Sequence
  Description of Artificial Sequence: Synthetic oligonucleotide
gucauggcgucagagcaga

SEQ ID NO: 1548528 - RNA, 19 nt, Artificial Sequence
  Description of Artificial Sequence: Synthetic oligonucleotide
gcgcuuguaucguagcaac

SEQ ID NO: 1548529 - RNA, 19 nt, Artificial Sequence
  Description of Artificial Sequence: Synthetic oligonucleotide
ggcgucagagcagagagaa

SEQ ID NO: 1548530 - RNA, 19 nt, Artificial Sequence
  Description of Artificial Sequence: Synthetic oligonucleotide
cugcguuugagggcaguug

SEQ ID NO: 1548531 - RNA, 19 nt, Artificial Sequence
  Description of Artificial Sequence: Synthetic oligonucleotide
cagcucaugaggaaacgcu

SEQ ID NO: 1548532 - RNA, 19 nt, Artificial Sequence
  Description of Artificial Sequence: Synthetic oligonucleotide
aucgugccaggacacugaa

SEQ ID NO: 1548533 - RNA, 19 nt, Artificial Sequence
  Description of Artificial Sequence: Synthetic oligonucleotide
caggcggcaaacuugcgcu

SEQ ID NO: 1548534 - RNA, 19 nt, Artificial Sequence
  Description of Artificial Sequence: Synthetic oligonucleotide
cuggucccuuuacacugag

SEQ ID NO: 1548535 - RNA, 19 nt, Artificial Sequence
  Description of Artificial Sequence: Synthetic oligonucleotide
ggaugcgcuuguaucguag

SEQ ID NO: 1548536 - RNA, 19 nt, Artificial Sequence
  Description of Artificial Sequence: Synthetic oligonucleotide
cucgcugacugagggcugc

SEQ ID NO: 1548537 - RNA, 19 nt, Artificial Sequence
  Description of Artificial Sequence: Synthetic oligonucleotide
ucccgcacauucuccucac

SEQ ID NO: 1548538 - RNA, 19 nt, Artificial Sequence
  Description of Artificial Sequence: Synthetic oligonucleotide
cuucuacuauggcucacaa

SEQ ID NO: 1548539 - RNA, 19 nt, Artificial Sequence
  Description of Artificial Sequence: Synthetic oligonucleotide
cugcucgcugacugagggc

SEQ ID NO: 1548540 - RNA, 19 nt, Artificial Sequence
  Description of Artificial Sequence: Synthetic oligonucleotide
cuaggcucacagaggccuc

SEQ ID NO: 1548541 - RNA, 19 nt, Artificial Sequence
  Description of Artificial Sequence: Synthetic oligonucleotide
caacagguccuccauggua

SEQ ID NO: 1548542 - RNA, 19 nt, Artificial Sequence
  Description of Artificial Sequence: Synthetic oligonucleotide
gucccuuuacacugaggaa

SEQ ID NO: 1548543 - RNA, 19 nt, Artificial Sequence
  Description of Artificial Sequence: Synthetic oligonucleotide
ugacgcaguguggccacca

SEQ ID NO: 1548544 - RNA, 19 nt, Artificial Sequence
  Description of Artificial Sequence: Synthetic oligonucleotide
gacgcaguguggccaccac

SEQ ID NO: 1548545 - RNA, 19 nt, Artificial Sequence
  Description of Artificial Sequence: Synthetic oligonucleotide
cccaucgcggucccgaccc

SEQ ID NO: 1548546 - RNA, 19 nt, Artificial Sequence
  Description of Artificial Sequence: Synthetic oligonucleotide
cgacccagaaggucuauag

SEQ ID NO: 1548547 - RNA, 19 nt, Artificial Sequence
  Description of Artificial Sequence: Synthetic oligonucleotide
ugcgugugauggcgcucag

SEQ ID NO: 1548548 - RNA, 19 nt, Artificial Sequence
  Description of Artificial Sequence: Synthetic oligonucleotide
cgcuguaugcacaucggug

SEQ ID NO: 1548549 - RNA, 19 nt, Artificial Sequence
  Description of Artificial Sequence: Synthetic oligonucleotide
gugauggcgcucagaacac

SEQ ID NO: 1548550 - RNA, 19 nt, Artificial Sequence
  Description of Artificial Sequence: Synthetic oligonucleotide
cagcugggaagcgcggucc

SEQ ID NO: 1548551 - RNA, 19 nt, Artificial Sequence
  Description of Artificial Sequence: Synthetic oligonucleotide
cuaaacacaagggccuucu

SEQ ID NO: 1548552 - RNA, 19 nt, Artificial Sequence
  Description of Artificial Sequence: Synthetic oligonucleotide
cacaucgguggggccaggg

SEQ ID NO: 1548553 - RNA, 19 nt, Artificial Sequence
  Description of Artificial Sequence: Synthetic oligonucleotide
cagcaggccugcagcggcg

SEQ ID NO: 1548554 - RNA, 19 nt, Artificial Sequence
  Description of Artificial Sequence: Synthetic oligonucleotide
ggcaauugcugacgggguc

SEQ ID NO: 1548555 - RNA, 19 nt, Artificial Sequence
  Description of Artificial Sequence: Synthetic oligonucleotide
cucaugaggaaacgcugua

SEQ ID NO: 1548556 - RNA, 19 nt, Artificial Sequence
  Description of Artificial Sequence: Synthetic oligonucleotide
cucgaacccugcguuugag

SEQ ID NO: 1548557 - RNA, 19 nt, Artificial Sequence
  Description of Artificial Sequence: Synthetic oligonucleotide
ggugcuaaggagucuaguu

SEQ ID NO: 1548558 - RNA, 19 nt, Artificial Sequence
  Description of Artificial Sequence: Synthetic oligonucleotide
cauggcgucagagcagaga

SEQ ID NO: 1548559 - RNA, 19 nt, Artificial Sequence
  Description of Artificial Sequence: Synthetic oligonucleotide
ucgaaucugccaggccgca

SEQ ID NO: 1548560 - RNA, 19 nt, Artificial Sequence
  Description of Artificial Sequence: Synthetic oligonucleotide
ggcggcaaacuugcgcugg

SEQ ID NO: 1548561 - RNA, 19 nt, Artificial Sequence
  Description of Artificial Sequence: Synthetic oligonucleotide
ucguuggggugccggccca

SEQ ID NO: 1548562 - RNA, 19 nt, Artificial Sequence
  Description of Artificial Sequence: Synthetic oligonucleotide
uggaugcgcuuguaucgua

SEQ ID NO: 1548563 - RNA, 19 nt, Artificial Sequence
  Description of Artificial Sequence: Synthetic oligonucleotide
cacggcuugugguggccac

SEQ ID NO: 1548564 - RNA, 19 nt, Artificial Sequence
  Description of Artificial Sequence: Synthetic oligonucleotide
cauggaguagaaggccuga

SEQ ID NO: 1548565 - RNA, 19 nt, Artificial Sequence
  Description of Artificial Sequence: Synthetic oligonucleotide
cacgggcauccucauccag

SEQ ID NO: 1548566 - RNA, 19 nt, Artificial Sequence
  Description of Artificial Sequence: Synthetic oligonucleotide
ggugacgcaguguggccac

SEQ ID NO: 1548567 - RNA, 19 nt, Artificial Sequence
  Description of Artificial Sequence: Synthetic oligonucleotide
cuccuagcaggcggcaaac

SEQ ID NO: 1548568 - RNA, 19 nt, Artificial Sequence
  Description of Artificial Sequence: Synthetic oligonucleotide
uugcugacgggguccucau

SEQ ID NO: 1548569 - RNA, 19 nt, Artificial Sequence
  Description of Artificial Sequence: Synthetic oligonucleotide
caaauacaucuugagugcu

SEQ ID NO: 1548570 - RNA, 19 nt, Artificial Sequence
  Description of Artificial Sequence: Synthetic oligonucleotide
ugcagcccacccacaucgu

SEQ ID NO: 1548571 - RNA, 19 nt, Artificial Sequence
  Description of Artificial Sequence: Synthetic oligonucleotide
agccugcaacagguccucc

SEQ ID NO: 1548572 - RNA, 19 nt, Artificial Sequence
  Description of Artificial Sequence: Synthetic oligonucleotide
ucgcggucccgacccagaa

SEQ ID NO: 1548573 - RNA, 19 nt, Artificial Sequence
  Description of Artificial Sequence: Synthetic oligonucleotide
uccuagcaggcggcaaacu

SEQ ID NO: 1548574 - RNA, 19 nt, Artificial Sequence
  Description of Artificial Sequence: Synthetic oligonucleotide
uugugguggccaccaccau

SEQ ID NO: 1548575 - RNA, 19 nt, Artificial Sequence
  Description of Artificial Sequence: Synthetic oligonucleotide
cccacaucgugccaggaca

SEQ ID NO: 1548576 - RNA, 19 nt, Artificial Sequence
  Description of Artificial Sequence: Synthetic oligonucleotide
guagaaggccugaucgucu

SEQ ID NO: 1548577 - RNA, 19 nt, Artificial Sequence
  Description of Artificial Sequence: Synthetic oligonucleotide
auggaguagaaggccugau

SEQ ID NO: 1548578 - RNA, 19 nt, Artificial Sequence
  Description of Artificial Sequence: Synthetic oligonucleotide
gguaagcagcagugcugag

SEQ ID NO: 1548579 - RNA, 19 nt, Artificial Sequence
  Description of Artificial Sequence: Synthetic oligonucleotide
gccgcagaagggcaggauc

SEQ ID NO: 1548580 - RNA, 19 nt, Artificial Sequence
  Description of Artificial Sequence: Synthetic oligonucleotide
cuauggcucacaaggggau

SEQ ID NO: 1548581 - RNA, 19 nt, Artificial Sequence
  Description of Artificial Sequence: Synthetic oligonucleotide
ggcgcucagaacacgcagc

SEQ ID NO: 1548582 - RNA, 19 nt, Artificial Sequence
  Description of Artificial Sequence: Synthetic oligonucleotide
gcagcucaggauguuccag

SEQ ID NO: 1548583 - RNA, 19 nt, Artificial Sequence
  Description of Artificial Sequence: Synthetic oligonucleotide
ucuggcccacauacauguu

SEQ ID NO: 1548584 - RNA, 19 nt, Artificial Sequence
  Description of Artificial Sequence: Synthetic oligonucleotide
ucccgacccagaaggucua

SEQ ID NO: 1548585 - RNA, 19 nt, Artificial Sequence
  Description of Artificial Sequence: Synthetic oligonucleotide
guggcuccgaucacaaaua

SEQ ID NO: 1548586 - RNA, 19 nt, Artificial Sequence
  Description of Artificial Sequence: Synthetic oligonucleotide
uggcccuggcaaacacuuc

SEQ ID NO: 1548587 - RNA, 19 nt, Artificial Sequence
  Description of Artificial Sequence: Synthetic oligonucleotide
cuugcgugugauggcgcuc

SEQ ID NO: 1548588 - RNA, 19 nt, Artificial Sequence
  Description of Artificial Sequence: Synthetic oligonucleotide
auggcgcucagaacacgca

SEQ ID NO: 1548589 - RNA, 19 nt, Artificial Sequence
  Description of Artificial Sequence: Synthetic oligonucleotide
auguggggagaugcagaca

SEQ ID NO: 1548590 - RNA, 19 nt, Artificial Sequence
  Description of Artificial Sequence: Synthetic oligonucleotide
ccacaucgugccaggacac

SEQ ID NO: 1548591 - RNA, 19 nt, Artificial Sequence
  Description of Artificial Sequence: Synthetic oligonucleotide
ugcugacgggguccucauc

SEQ ID NO: 1548592 - RNA, 19 nt, Artificial Sequence
  Description of Artificial Sequence: Synthetic oligonucleotide
ggggcacggcuuguggugg

SEQ ID NO: 1548593 - RNA, 19 nt, Artificial Sequence
  Description of Artificial Sequence: Synthetic oligonucleotide
ggcaaacacuucccgcaca

SEQ ID NO: 1548594 - RNA, 19 nt, Artificial Sequence
  Description of Artificial Sequence: Synthetic oligonucleotide
ggaaacgcuguaugcacau

SEQ ID NO: 1548595 - RNA, 19 nt, Artificial Sequence
  Description of Artificial Sequence: Synthetic oligonucleotide
cgauccagcacguucacua

SEQ ID NO: 1548596 - RNA, 19 nt, Artificial Sequence
  Description of Artificial Sequence: Synthetic oligonucleotide
caucgcggucccgacccag

SEQ ID NO: 1548597 - RNA, 19 nt, Artificial Sequence
  Description of Artificial Sequence: Synthetic oligonucleotide
gcagcccacccacaucgug

SEQ ID NO: 1548598 - RNA, 19 nt, Artificial Sequence
  Description of Artificial Sequence: Synthetic oligonucleotide
gcaacuccugcucgcugac

SEQ ID NO: 1548599 - RNA, 19 nt, Artificial Sequence
  Description of Artificial Sequence: Synthetic oligonucleotide
ggaagcgcgguccucacuu

SEQ ID NO: 1548600 - RNA, 19 nt, Artificial Sequence
  Description of Artificial Sequence: Synthetic oligonucleotide
gggcaguugucauggcguc

SEQ ID NO: 1548601 - RNA, 19 nt, Artificial Sequence
  Description of Artificial Sequence: Synthetic oligonucleotide
gugacaugguacagguacu

SEQ ID NO: 1548602 - RNA, 19 nt, Artificial Sequence
  Description of Artificial Sequence: Synthetic oligonucleotide
ggucuauagcugucagcaa

SEQ ID NO: 1548603 - RNA, 19 nt, Artificial Sequence
  Description of Artificial Sequence: Synthetic oligonucleotide
accugucagcugaggcggg

SEQ ID NO: 1548604 - RNA, 19 nt, Artificial Sequence
  Description of Artificial Sequence: Synthetic oligonucleotide
caccaucagaggagggcaa

SEQ ID NO: 1548605 - RNA, 19 nt, Artificial Sequence
  Description of Artificial Sequence: Synthetic oligonucleotide
gcuccuagcaggcggcaaa

SEQ ID NO: 1548606 - RNA, 19 nt, Artificial Sequence
  Description of Artificial Sequence: Synthetic oligonucleotide
cgucagagcagagagaaua

SEQ ID NO: 1548607 - RNA, 19 nt, Artificial Sequence
  Description of Artificial Sequence: Synthetic oligonucleotide
ggagugagcugagggccug

SEQ ID NO: 1548608 - RNA, 19 nt, Artificial Sequence
  Description of Artificial Sequence: Synthetic oligonucleotide
gacaugguacagguacuuu

SEQ ID NO: 1548609 - RNA, 19 nt, Artificial Sequence
  Description of Artificial Sequence: Synthetic oligonucleotide
gcgcgguccucacuugccc

SEQ ID NO: 1548610 - RNA, 19 nt, Artificial Sequence
  Description of Artificial Sequence: Synthetic oligonucleotide
ggcuccgaucacaaauaca

SEQ ID NO: 1548611 - RNA, 19 nt, Artificial Sequence
  Description of Artificial Sequence: Synthetic oligonucleotide
ucgcugacugagggcugca

SEQ ID NO: 1548612 - RNA, 19 nt, Artificial Sequence
  Description of Artificial Sequence: Synthetic oligonucleotide
acgcagcugggaagcgcgg

SEQ ID NO: 1548613 - RNA, 19 nt, Artificial Sequence
  Description of Artificial Sequence: Synthetic oligonucleotide
cccacagcuugggagugag

SEQ ID NO: 1548614 - RNA, 19 nt, Artificial Sequence
  Description of Artificial Sequence: Synthetic oligonucleotide
gaugagcucuggucccuuu

SEQ ID NO: 1548615 - RNA, 19 nt, Artificial Sequence
  Description of Artificial Sequence: Synthetic oligonucleotide
ccuucuacuauggcucaca

SEQ ID NO: 1548616 - RNA, 19 nt, Artificial Sequence
  Description of Artificial Sequence: Synthetic oligonucleotide
ugcgcuggaugcgcuugua

SEQ ID NO: 1548617 - RNA, 19 nt, Artificial Sequence
  Description of Artificial Sequence: Synthetic oligonucleotide
gcgggcagcgauccagcac

SEQ ID NO: 1548618 - RNA, 19 nt, Artificial Sequence
  Description of Artificial Sequence: Synthetic oligonucleotide
cguuugagggcaguuguca

SEQ ID NO: 1548619 - RNA, 19 nt, Artificial Sequence
  Description of Artificial Sequence: Synthetic oligonucleotide
agcuccuagcaggcggcaa

SEQ ID NO: 1548620 - RNA, 19 nt, Artificial Sequence
  Description of Artificial Sequence: Synthetic oligonucleotide
ucgguggggccaggguccu

SEQ ID NO: 1548621 - RNA, 19 nt, Artificial Sequence
  Description of Artificial Sequence: Synthetic oligonucleotide
cuggaugcgcuuguaucgu

SEQ ID NO: 1548622 - RNA, 19 nt, Artificial Sequence
  Description of Artificial Sequence: Synthetic oligonucleotide
gcucuccuucuaaacacaa

SEQ ID NO: 1548623 - RNA, 19 nt, Artificial Sequence
  Description of Artificial Sequence: Synthetic oligonucleotide
ccgcuguuccucagacagc

SEQ ID NO: 1548624 - RNA, 19 nt, Artificial Sequence
  Description of Artificial Sequence: Synthetic oligonucleotide
guuggggugccggcccaca

SEQ ID NO: 1548625 - RNA, 19 nt, Artificial Sequence
  Description of Artificial Sequence: Synthetic oligonucleotide
cgcgguccucacuugcccc

SEQ ID NO: 1548626 - RNA, 19 nt, Artificial Sequence
  Description of Artificial Sequence: Synthetic oligonucleotide
gggcacggcuugugguggc

SEQ ID NO: 1548627 - RNA, 19 nt, Artificial Sequence
  Description of Artificial Sequence: Synthetic oligonucleotide
gcuugaacuugcgugugau

SEQ ID NO: 1548628 - RNA, 19 nt, Artificial Sequence
  Description of Artificial Sequence: Synthetic oligonucleotide
gcccaucgcggucccgacc

SEQ ID NO: 1548629 - RNA, 19 nt, Artificial Sequence
  Description of Artificial Sequence: Synthetic oligonucleotide
ggcacggcuugugguggcc

SEQ ID NO: 1548630 - RNA, 19 nt, Artificial Sequence
  Description of Artificial Sequence: Synthetic oligonucleotide
gcuuagcagcucaggaugu

SEQ ID NO: 1548631 - RNA, 19 nt, Artificial Sequence
  Description of Artificial Sequence: Synthetic oligonucleotide
gcguuugagggcaguuguc

SEQ ID NO: 1548632 - RNA, 19 nt, Artificial Sequence
  Description of Artificial Sequence: Synthetic oligonucleotide
gcggcaaacuugcgcugga

SEQ ID NO: 1548633 - RNA, 19 nt, Artificial Sequence
  Description of Artificial Sequence: Synthetic oligonucleotide
gcucacaaggggaucuccu

SEQ ID NO: 1548634 - RNA, 19 nt, Artificial Sequence
  Description of Artificial Sequence: Synthetic oligonucleotide
gccuggcucuccuucuaaa

SEQ ID NO: 1548635 - RNA, 19 nt, Artificial Sequence
  Description of Artificial Sequence: Synthetic oligonucleotide
ccgaucacaaauacaucuu

SEQ ID NO: 1548636 - RNA, 19 nt, Artificial Sequence
  Description of Artificial Sequence: Synthetic oligonucleotide
gccuucuacuauggcucac

SEQ ID NO: 1548637 - RNA, 19 nt, Artificial Sequence
  Description of Artificial Sequence: Synthetic oligonucleotide
cuuagcagcucaggauguu

SEQ ID NO: 1548638 - RNA, 19 nt, Artificial Sequence
  Description of Artificial Sequence: Synthetic oligonucleotide
ccucaucaaggaggaggug

SEQ ID NO: 1548639 - RNA, 19 nt, Artificial Sequence
  Description of Artificial Sequence: Synthetic oligonucleotide
gcugagcuccccaucucua

SEQ ID NO: 1548640 - RNA, 19 nt, Artificial Sequence
  Description of Artificial Sequence: Synthetic oligonucleotide
cacguucacuaggcucaca

SEQ ID NO: 1548641 - RNA, 19 nt, Artificial Sequence
  Description of Artificial Sequence: Synthetic oligonucleotide
gcacguucacuaggcucac

SEQ ID NO: 1548642 - RNA, 19 nt, Artificial Sequence
  Description of Artificial Sequence: Synthetic oligonucleotide
ccuagcaggcggcaaacuu

SEQ ID NO: 1548643 - RNA, 19 nt, Artificial Sequence
  Description of Artificial Sequence: Synthetic oligonucleotide
cacaucgugccaggacacu

SEQ ID NO: 1548644 - RNA, 19 nt, Artificial Sequence
  Description of Artificial Sequence: Synthetic oligonucleotide
cccgguggcccauggagua

SEQ ID NO: 1548645 - RNA, 19 nt, Artificial Sequence
  Description of Artificial Sequence: Synthetic oligonucleotide
gggcaauugcugacggggu

SEQ ID NO: 1548646 - RNA, 19 nt, Artificial Sequence
  Description of Artificial Sequence: Synthetic oligonucleotide
gcgguccucacuugccccu

SEQ ID NO: 1548647 - RNA, 19 nt, Artificial Sequence
  Description of Artificial Sequence: Synthetic oligonucleotide
ggucucgaacccugcguuu

SEQ ID NO: 1548648 - RNA, 19 nt, Artificial Sequence
  Description of Artificial Sequence: Synthetic oligonucleotide
cagcuccuagcaggcggca

SEQ ID NO: 1548649 - RNA, 19 nt, Artificial Sequence
  Description of Artificial Sequence: Synthetic oligonucleotide
cgcggucccgacccagaag

SEQ ID NO: 1548650 - RNA, 19 nt, Artificial Sequence
  Description of Artificial Sequence: Synthetic oligonucleotide
gcgugugauggcgcucaga

SEQ ID NO: 1548651 - RNA, 19 nt, Artificial Sequence
  Description of Artificial Sequence: Synthetic oligonucleotide
gguggcccauggaguagaa

SEQ ID NO: 1548652 - RNA, 19 nt, Artificial Sequence
  Description of Artificial Sequence: Synthetic oligonucleotide
ggcccgggagaaggcugcc

SEQ ID NO: 1548653 - RNA, 19 nt, Artificial Sequence
  Description of Artificial Sequence: Synthetic oligonucleotide
gcacaucgguggggccagg

SEQ ID NO: 1548654 - RNA, 19 nt, Artificial Sequence
  Description of Artificial Sequence: Synthetic oligonucleotide
cgucucaggcccaggcuua

SEQ ID NO: 1548655 - RNA, 19 nt, Artificial Sequence
  Description of Artificial Sequence: Synthetic oligonucleotide
ccagcacguucacuaggcu

SEQ ID NO: 1548656 - RNA, 19 nt, Artificial Sequence
  Description of Artificial Sequence: Synthetic oligonucleotide
gcgcuggaugcgcuuguau

SEQ ID NO: 1548657 - RNA, 19 nt, Artificial Sequence
  Description of Artificial Sequence: Synthetic oligonucleotide
cugcagcggcgggcccggg

SEQ ID NO: 1548658 - RNA, 19 nt, Artificial Sequence
  Description of Artificial Sequence: Synthetic oligonucleotide
cgcuuguaucguagcaacu

SEQ ID NO: 1548659 - RNA, 19 nt, Artificial Sequence
  Description of Artificial Sequence: Synthetic oligonucleotide
cagaggccuccagcuugaa

SEQ ID NO: 1548660 - RNA, 19 nt, Artificial Sequence
  Description of Artificial Sequence: Synthetic oligonucleotide
gcccgguggcccauggagu

SEQ ID NO: 1548661 - RNA, 19 nt, Artificial Sequence
  Description of Artificial Sequence: Synthetic oligonucleotide
gcgauccagcacguucacu

SEQ ID NO: 1548662 - RNA, 19 nt, Artificial Sequence
  Description of Artificial Sequence: Synthetic oligonucleotide
ccucuaggucucgaacccu

SEQ ID NO: 1548663 - RNA, 19 nt, Artificial Sequence
  Description of Artificial Sequence: Synthetic oligonucleotide
cgguggcccauggaguaga

SEQ ID NO: 1548664 - RNA, 19 nt, Artificial Sequence
  Description of Artificial Sequence: Synthetic oligonucleotide
ccgacccagaaggucuaua

SEQ ID NO: 1548665 - RNA, 19 nt, Artificial Sequence
  Description of Artificial Sequence: Synthetic oligonucleotide
ccugcguuugagggcaguu

SEQ ID NO: 1548666 - RNA, 19 nt, Artificial Sequence
  Description of Artificial Sequence: Synthetic oligonucleotide
ggccgcagaagggcaggau

SEQ ID NO: 1548667 - RNA, 19 nt, Artificial Sequence
  Description of Artificial Sequence: Synthetic oligonucleotide
gggcagcgauccagcacgu

SEQ ID NO: 1548668 - RNA, 19 nt, Artificial Sequence
  Description of Artificial Sequence: Synthetic oligonucleotide
gcgucagagcagagagaau

SEQ ID NO: 1548669 - RNA, 19 nt, Artificial Sequence
  Description of Artificial Sequence: Synthetic oligonucleotide
ggcagcgauccagcacguu

SEQ ID NO: 1548670 - RNA, 19 nt, Artificial Sequence
  Description of Artificial Sequence: Synthetic oligonucleotide
cggucccgacccagaaggu

SEQ ID NO: 1548671 - RNA, 19 nt, Artificial Sequence
  Description of Artificial Sequence: Synthetic oligonucleotide
cccgacccagaaggucuau

SEQ ID NO: 1548672 - RNA, 19 nt, Artificial Sequence
  Description of Artificial Sequence: Synthetic oligonucleotide
gggugccggcccacagcuu

SEQ ID NO: 1548673 - RNA, 19 nt, Artificial Sequence
  Description of Artificial Sequence: Synthetic oligonucleotide
aauaguaaucaauagauac

SEQ ID NO: 1548674 - RNA, 19 nt, Artificial Sequence
  Description of Artificial Sequence: Synthetic oligonucleotide
guuacauuaauucugaugc

SEQ ID NO: 1548675 - RNA, 19 nt, Artificial Sequence
  Description of Artificial Sequence: Synthetic oligonucleotide
aauaauucaucuccugagc

SEQ ID NO: 1548676 - RNA, 19 nt, Artificial Sequence
  Description of Artificial Sequence: Synthetic oligonucleotide
uuuaacauggcuaugacuc

SEQ ID NO: 1548677 - RNA, 19 nt, Artificial Sequence
  Description of Artificial Sequence: Synthetic oligonucleotide
ugugauuucauacugaguc

SEQ ID NO: 1548678 - RNA, 19 nt, Artificial Sequence
  Description of Artificial Sequence: Synthetic oligonucleotide
cuggauauaagauaguagg

SEQ ID NO: 1548679 - RNA, 19 nt, Artificial Sequence
  Description of Artificial Sequence: Synthetic oligonucleotide
aauuuuaguagugagaaca

SEQ ID NO: 1548680 - RNA, 19 nt, Artificial Sequence
  Description of Artificial Sequence: Synthetic oligonucleotide
aauaaagcaugcuuucuuc

SEQ ID NO: 1548681 - RNA, 19 nt, Artificial Sequence
  Description of Artificial Sequence: Synthetic oligonucleotide
uuauaaaaccuuacaauag

SEQ ID NO: 1548682 - RNA, 19 nt, Artificial Sequence
  Description of Artificial Sequence: Synthetic oligonucleotide
uuaguugugaacuggaacc

SEQ ID NO: 1548683 - RNA, 19 nt, Artificial Sequence
  Description of Artificial Sequence: Synthetic oligonucleotide
auaacaauuaguugugaac

SEQ ID NO: 1548684 - RNA, 19 nt, Artificial Sequence
  Description of Artificial Sequence: Synthetic oligonucleotide
uuauaucaaagucacaucu

SEQ ID NO: 1548685 - RNA, 19 nt, Artificial Sequence
  Description of Artificial Sequence: Synthetic oligonucleotide
aaaaguuugaaugucugag

SEQ ID NO: 1548686 - RNA, 19 nt, Artificial Sequence
  Description of Artificial Sequence: Synthetic oligonucleotide
aacacgcugccccagagcc

SEQ ID NO: 1548687 - RNA, 19 nt, Artificial Sequence
  Description of Artificial Sequence: Synthetic oligonucleotide
uuugggaaagagaauaaag

SEQ ID NO: 1548688 - RNA, 19 nt, Artificial Sequence
  Description of Artificial Sequence: Synthetic oligonucleotide
ucacuuuaaauccuggugc

SEQ ID NO: 1548689 - RNA, 19 nt, Artificial Sequence
  Description of Artificial Sequence: Synthetic oligonucleotide
guaauauaaaggcacauug

SEQ ID NO: 1548690 - RNA, 19 nt, Artificial Sequence
  Description of Artificial Sequence: Synthetic oligonucleotide
auuaauucugaugccaucc

SEQ ID NO: 1548691 - RNA, 19 nt, Artificial Sequence
  Description of Artificial Sequence: Synthetic oligonucleotide
gauauaagauaguagguac

SEQ ID NO: 1548692 - RNA, 19 nt, Artificial Sequence
  Description of Artificial Sequence: Synthetic oligonucleotide
ucugguuauaucaaaguca

SEQ ID NO: 1548693 - RNA, 19 nt, Artificial Sequence
  Description of Artificial Sequence: Synthetic oligonucleotide
agcaaaggcaccuggaagc

SEQ ID NO: 1548694 - RNA, 19 nt, Artificial Sequence
  Description of Artificial Sequence: Synthetic oligonucleotide
aaucacauccuuuuguuga

SEQ ID NO: 1548695 - RNA, 19 nt, Artificial Sequence
  Description of Artificial Sequence: Synthetic oligonucleotide
auuaguugugaacuggaac

SEQ ID NO: 1548696 - RNA, 19 nt, Artificial Sequence
  Description of Artificial Sequence: Synthetic oligonucleotide
uaauaauucaucuccugag

SEQ ID NO: 1548697 - RNA, 19 nt, Artificial Sequence
  Description of Artificial Sequence: Synthetic oligonucleotide
uuaauaauucaucuccuga

SEQ ID NO: 1548698 - RNA, 19 nt, Artificial Sequence
  Description of Artificial Sequence: Synthetic oligonucleotide
aacuaagauccuuacagug

SEQ ID NO: 1548699 - RNA, 19 nt, Artificial Sequence
  Description of Artificial Sequence: Synthetic oligonucleotide
auuaaauuucccuuaauaa

SEQ ID NO: 1548700 - RNA, 19 nt, Artificial Sequence
  Description of Artificial Sequence: Synthetic oligonucleotide
aauuccuuuguucucauaa

SEQ ID NO: 1548701 - RNA, 19 nt, Artificial Sequence
  Description of Artificial Sequence: Synthetic oligonucleotide
uauaaaaccuuacaauagu

SEQ ID NO: 1548702 - RNA, 19 nt, Artificial Sequence
  Description of Artificial Sequence: Synthetic oligonucleotide
aauucugaugccauccugc

SEQ ID NO: 1548703 - RNA, 19 nt, Artificial Sequence
  Description of Artificial Sequence: Synthetic oligonucleotide
aaacaugaagagcacuggg

SEQ ID NO: 1548704 - RNA, 19 nt, Artificial Sequence
  Description of Artificial Sequence: Synthetic oligonucleotide
aaagcauuucccuccacag

SEQ ID NO: 1548705 - RNA, 19 nt, Artificial Sequence
  Description of Artificial Sequence: Synthetic oligonucleotide
aacuccaaccaccaugacg

SEQ ID NO: 1548706 - RNA, 19 nt, Artificial Sequence
  Description of Artificial Sequence: Synthetic oligonucleotide
ugaauaacaauuaguugug

SEQ ID NO: 1548707 - RNA, 19 nt, Artificial Sequence
  Description of Artificial Sequence: Synthetic oligonucleotide
acaugauacacuuauguga

SEQ ID NO: 1548708 - RNA, 19 nt, Artificial Sequence
  Description of Artificial Sequence: Synthetic oligonucleotide
auaaagcaugcuuucuucc

SEQ ID NO: 1548709 - RNA, 19 nt, Artificial Sequence
  Description of Artificial Sequence: Synthetic oligonucleotide
agguaaagcauuucccucc

SEQ ID NO: 1548710 - RNA, 19 nt, Artificial Sequence
  Description of Artificial Sequence: Synthetic oligonucleotide
uaguaaucaauagauacag

SEQ ID NO: 1548711 - RNA, 19 nt, Artificial Sequence
  Description of Artificial Sequence: Synthetic oligonucleotide
ucauaaacugggcaaagca

SEQ ID NO: 1548712 - RNA, 19 nt, Artificial Sequence
  Description of Artificial Sequence: Synthetic oligonucleotide
auaaacugggcaaagcacc

SEQ ID NO: 1548713 - RNA, 19 nt, Artificial Sequence
  Description of Artificial Sequence: Synthetic oligonucleotide
uuauguuaagaacaaccug

SEQ ID NO: 1548714 - RNA, 19 nt, Artificial Sequence
  Description of Artificial Sequence: Synthetic oligonucleotide
ugggaaagagaauaaagca

SEQ ID NO: 1548715 - RNA, 19 nt, Artificial Sequence
  Description of Artificial Sequence: Synthetic oligonucleotide
cuuguaugaagauggaggc

SEQ ID NO: 1548716 - RNA, 19 nt, Artificial Sequence
  Description of Artificial Sequence: Synthetic oligonucleotide
auagauacaguuucugcag

SEQ ID NO: 1548717 - RNA, 19 nt, Artificial Sequence
  Description of Artificial Sequence: Synthetic oligonucleotide
acuaucaaagucugacagc

SEQ ID NO: 1548718 - RNA, 19 nt, Artificial Sequence
  Description of Artificial Sequence: Synthetic oligonucleotide
aaccuuacaauaguaauca

SEQ ID NO: 1548719 - RNA, 19 nt, Artificial Sequence
  Description of Artificial Sequence: Synthetic oligonucleotide
aagagaauaaagcaugcuu

SEQ ID NO: 1548720 - RNA, 19 nt, Artificial Sequence
  Description of Artificial Sequence: Synthetic oligonucleotide
aguagugagaacaugucac

SEQ ID NO: 1548721 - RNA, 19 nt, Artificial Sequence
  Description of Artificial Sequence: Synthetic oligonucleotide
uauucucugguucuuaacu

SEQ ID NO: 1548722 - RNA, 19 nt, Artificial Sequence
  Description of Artificial Sequence: Synthetic oligonucleotide
uccuguguguaauauaaag

SEQ ID NO: 1548723 - RNA, 19 nt, Artificial Sequence
  Description of Artificial Sequence: Synthetic oligonucleotide
aagggaaaaguuugaaugu

SEQ ID NO: 1548724 - RNA, 19 nt, Artificial Sequence
  Description of Artificial Sequence: Synthetic oligonucleotide
uccugaauaacaauuaguu

SEQ ID NO: 1548725 - RNA, 19 nt, Artificial Sequence
  Description of Artificial Sequence: Synthetic oligonucleotide
uaagauaguagguaccaca

SEQ ID NO: 1548726 - RNA, 19 nt, Artificial Sequence
  Description of Artificial Sequence: Synthetic oligonucleotide
aacaaccuguucuuuugac

SEQ ID NO: 1548727 - RNA, 19 nt, Artificial Sequence
  Description of Artificial Sequence: Synthetic oligonucleotide
uuuagaaaaguugggaaga

SEQ ID NO: 1548728 - RNA, 19 nt, Artificial Sequence
  Description of Artificial Sequence: Synthetic oligonucleotide
uaauauaaaggcacauugu

SEQ ID NO: 1548729 - RNA, 19 nt, Artificial Sequence
  Description of Artificial Sequence: Synthetic oligonucleotide
agacaugauacacuuaugu

SEQ ID NO: 1548730 - RNA, 19 nt, Artificial Sequence
  Description of Artificial Sequence: Synthetic oligonucleotide
aaaguuugaaugucugagu

SEQ ID NO: 1548731 - RNA, 19 nt, Artificial Sequence
  Description of Artificial Sequence: Synthetic oligonucleotide
acaauaguaaucaauagau

SEQ ID NO: 1548732 - RNA, 19 nt, Artificial Sequence
  Description of Artificial Sequence: Synthetic oligonucleotide
cugguuauaucaaagucac

SEQ ID NO: 1548733 - RNA, 19 nt, Artificial Sequence
  Description of Artificial Sequence: Synthetic oligonucleotide
aaugaaguaacgcuuccua

SEQ ID NO: 1548734 - RNA, 19 nt, Artificial Sequence
  Description of Artificial Sequence: Synthetic oligonucleotide
acagggaugacauucauuu

SEQ ID NO: 1548735 - RNA, 19 nt, Artificial Sequence
  Description of Artificial Sequence: Synthetic oligonucleotide
auagguuauguuaagaaca

SEQ ID NO: 1548736 - RNA, 19 nt, Artificial Sequence
  Description of Artificial Sequence: Synthetic oligonucleotide
auauaagauaguagguacc

SEQ ID NO: 1548737 - RNA, 19 nt, Artificial Sequence
  Description of Artificial Sequence: Synthetic oligonucleotide
cuuaugugauuucauacug

SEQ ID NO: 1548738 - RNA, 19 nt, Artificial Sequence
  Description of Artificial Sequence: Synthetic oligonucleotide
ucauagguuauguuaagaa

SEQ ID NO: 1548739 - RNA, 19 nt, Artificial Sequence
  Description of Artificial Sequence: Synthetic oligonucleotide
acuuaugugauuucauacu

SEQ ID NO: 1548740 - RNA, 19 nt, Artificial Sequence
  Description of Artificial Sequence: Synthetic oligonucleotide
uaaauccuggugcagucag

SEQ ID NO: 1548741 - RNA, 19 nt, Artificial Sequence
  Description of Artificial Sequence: Synthetic oligonucleotide
cugguucuuaacuaaaaug

SEQ ID NO: 1548742 - RNA, 19 nt, Artificial Sequence
  Description of Artificial Sequence: Synthetic oligonucleotide
uucucauagguuauguuaa

SEQ ID NO: 1548743 - RNA, 19 nt, Artificial Sequence
  Description of Artificial Sequence: Synthetic oligonucleotide
aaaggcaccuggaagcuac

SEQ ID NO: 1548744 - RNA, 19 nt, Artificial Sequence
  Description of Artificial Sequence: Synthetic oligonucleotide
aagauaguagguaccacag

SEQ ID NO: 1548745 - RNA, 19 nt, Artificial Sequence
  Description of Artificial Sequence: Synthetic oligonucleotide
cacuaucaaagucugacag

SEQ ID NO: 1548746 - RNA, 19 nt, Artificial Sequence
  Description of Artificial Sequence: Synthetic oligonucleotide
ugaaguaacgcuuccuacu

SEQ ID NO: 1548747 - RNA, 19 nt, Artificial Sequence
  Description of Artificial Sequence: Synthetic oligonucleotide
caauagauacaguuucugc

SEQ ID NO: 1548748 - RNA, 19 nt, Artificial Sequence
  Description of Artificial Sequence: Synthetic oligonucleotide
auaauucaucuccugagca

SEQ ID NO: 1548749 - RNA, 19 nt, Artificial Sequence
  Description of Artificial Sequence: Synthetic oligonucleotide
aaaacuccaaccaccauga

SEQ ID NO: 1548750 - RNA, 19 nt, Artificial Sequence
  Description of Artificial Sequence: Synthetic oligonucleotide
uuuucacucuucacuauca

SEQ ID NO: 1548751 - RNA, 19 nt, Artificial Sequence
  Description of Artificial Sequence: Synthetic oligonucleotide
guuaagaacaaccuguucu

SEQ ID NO: 1548752 - RNA, 19 nt, Artificial Sequence
  Description of Artificial Sequence: Synthetic oligonucleotide
ccuuguaugaagauggagg

SEQ ID NO: 1548753 - RNA, 19 nt, Artificial Sequence
  Description of Artificial Sequence: Synthetic oligonucleotide
uguuuugggaaagagaaua

SEQ ID NO: 1548754 - RNA, 19 nt, Artificial Sequence
  Description of Artificial Sequence: Synthetic oligonucleotide
uuucccuuaauaauucauc

SEQ ID NO: 1548755 - RNA, 19 nt, Artificial Sequence
  Description of Artificial Sequence: Synthetic oligonucleotide
uggauauaagauaguaggu

SEQ ID NO: 1548756 - RNA, 19 nt, Artificial Sequence
  Description of Artificial Sequence: Synthetic oligonucleotide
uguccauucucauagguua

SEQ ID NO: 1548757 - RNA, 19 nt, Artificial Sequence
  Description of Artificial Sequence: Synthetic oligonucleotide
gacguucagaaacaugaag

SEQ ID NO: 1548758 - RNA, 19 nt, Artificial Sequence
  Description of Artificial Sequence: Synthetic oligonucleotide
gaaccuucuggauauaaga

SEQ ID NO: 1548759 - RNA, 19 nt, Artificial Sequence
  Description of Artificial Sequence: Synthetic oligonucleotide
uguaugaagauggaggcuc

SEQ ID NO: 1548760 - RNA, 19 nt, Artificial Sequence
  Description of Artificial Sequence: Synthetic oligonucleotide
gguuauguuaagaacaacc

SEQ ID NO: 1548761 - RNA, 19 nt, Artificial Sequence
  Description of Artificial Sequence: Synthetic oligonucleotide
cauaaacugggcaaagcac

SEQ ID NO: 1548762 - RNA, 19 nt, Artificial Sequence
  Description of Artificial Sequence: Synthetic oligonucleotide
auucucauagguuauguua

SEQ ID NO: 1548763 - RNA, 19 nt, Artificial Sequence
  Description of Artificial Sequence: Synthetic oligonucleotide
cuaagauccuuacagugac

SEQ ID NO: 1548764 - RNA, 19 nt, Artificial Sequence
  Description of Artificial Sequence: Synthetic oligonucleotide
acuguuuugggaaagagaa

SEQ ID NO: 1548765 - RNA, 19 nt, Artificial Sequence
  Description of Artificial Sequence: Synthetic oligonucleotide
uaguagugagaacauguca

SEQ ID NO: 1548766 - RNA, 19 nt, Artificial Sequence
  Description of Artificial Sequence: Synthetic oligonucleotide
uuucugguuauaucaaagu

SEQ ID NO: 1548767 - RNA, 19 nt, Artificial Sequence
  Description of Artificial Sequence: Synthetic oligonucleotide
uuaugugauuucauacuga

SEQ ID NO: 1548768 - RNA, 19 nt, Artificial Sequence
  Description of Artificial Sequence: Synthetic oligonucleotide
uacauuaauucugaugcca

SEQ ID NO: 1548769 - RNA, 19 nt, Artificial Sequence
  Description of Artificial Sequence: Synthetic oligonucleotide
cacuuaugugauuucauac

SEQ ID NO: 1548770 - RNA, 19 nt, Artificial Sequence
  Description of Artificial Sequence: Synthetic oligonucleotide
uggucugcaaugaaguaac

SEQ ID NO: 1548771 - RNA, 19 nt, Artificial Sequence
  Description of Artificial Sequence: Synthetic oligonucleotide
gaagaguaaauaaaauguc

SEQ ID NO: 1548772 - RNA, 19 nt, Artificial Sequence
  Description of Artificial Sequence: Synthetic oligonucleotide
uuuacauagaccuguccau

SEQ ID NO: 1548773 - RNA, 19 nt, Artificial Sequence
  Description of Artificial Sequence: Synthetic oligonucleotide
aaguaaagucuucagcuuu

SEQ ID NO: 1548774 - RNA, 19 nt, Artificial Sequence
  Description of Artificial Sequence: Synthetic oligonucleotide
uuuuccauccacuggcaca

SEQ ID NO: 1548775 - RNA, 19 nt, Artificial Sequence
  Description of Artificial Sequence: Synthetic oligonucleotide
uuaguagugagaacauguc

SEQ ID NO: 1548776 - RNA, 19 nt, Artificial Sequence
  Description of Artificial Sequence: Synthetic oligonucleotide
uucauaaagugcuucuuau

SEQ ID NO: 1548777 - RNA, 19 nt, Artificial Sequence
  Description of Artificial Sequence: Synthetic oligonucleotide
ucuuuccaauuaaauuucc

SEQ ID NO: 1548778 - RNA, 19 nt, Artificial Sequence
  Description of Artificial Sequence: Synthetic oligonucleotide
auaaaggcacauuguacug

SEQ ID NO: 1548779 - RNA, 19 nt, Artificial Sequence
  Description of Artificial Sequence: Synthetic oligonucleotide
uccaauuaaauuucccuua

SEQ ID NO: 1548780 - RNA, 19 nt, Artificial Sequence
  Description of Artificial Sequence: Synthetic oligonucleotide
auucugaugccauccugcg

SEQ ID NO: 1548781 - RNA, 19 nt, Artificial Sequence
  Description of Artificial Sequence: Synthetic oligonucleotide
uuaagaacaaccuguucuu

SEQ ID NO: 1548782 - RNA, 19 nt, Artificial Sequence
  Description of Artificial Sequence: Synthetic oligonucleotide
gaaagagaauaaagcaugc

SEQ ID NO: 1548783 - RNA, 19 nt, Artificial Sequence
  Description of Artificial Sequence: Synthetic oligonucleotide
uuacauuaauucugaugcc

SEQ ID NO: 1548784 - RNA, 19 nt, Artificial Sequence
  Description of Artificial Sequence: Synthetic oligonucleotide
agaaacaugaagagcacug

SEQ ID NO: 1548785 - RNA, 19 nt, Artificial Sequence
  Description of Artificial Sequence: Synthetic oligonucleotide
uagguuauguuaagaacaa

SEQ ID NO: 1548786 - RNA, 19 nt, Artificial Sequence
  Description of Artificial Sequence: Synthetic oligonucleotide
gguaguuacauuaauucug

SEQ ID NO: 1548787 - RNA, 19 nt, Artificial Sequence
  Description of Artificial Sequence: Synthetic oligonucleotide
augagguaauggcuggugg

SEQ ID NO: 1548788 - RNA, 19 nt, Artificial Sequence
  Description of Artificial Sequence: Synthetic oligonucleotide
ucugguucuuaacuaaaau

SEQ ID NO: 1548789 - RNA, 19 nt, Artificial Sequence
  Description of Artificial Sequence: Synthetic oligonucleotide
uuuaaauccuggugcaguc

SEQ ID NO: 1548790 - RNA, 19 nt, Artificial Sequence
  Description of Artificial Sequence: Synthetic oligonucleotide
uaugacuccugcugcaccc

SEQ ID NO: 1548791 - RNA, 19 nt, Artificial Sequence
  Description of Artificial Sequence: Synthetic oligonucleotide
uuaacauggcuaugacucc

SEQ ID NO: 1548792 - RNA, 19 nt, Artificial Sequence
  Description of Artificial Sequence: Synthetic oligonucleotide
cccuuaauaauucaucucc

SEQ ID NO: 1548793 - RNA, 19 nt, Artificial Sequence
  Description of Artificial Sequence: Synthetic oligonucleotide
agauuuucacucuucacua

SEQ ID NO: 1548794 - RNA, 19 nt, Artificial Sequence
  Description of Artificial Sequence: Synthetic oligonucleotide
uaauucugaugccauccug

SEQ ID NO: 1548795 - RNA, 19 nt, Artificial Sequence
  Description of Artificial Sequence: Synthetic oligonucleotide
auaguaaucaauagauaca

SEQ ID NO: 1548796 - RNA, 19 nt, Artificial Sequence
  Description of Artificial Sequence: Synthetic oligonucleotide
uuauccaccugaagaauuc

SEQ ID NO: 1548797 - RNA, 19 nt, Artificial Sequence
  Description of Artificial Sequence: Synthetic oligonucleotide
ugcaaugaaguaacgcuuc

SEQ ID NO: 1548798 - RNA, 19 nt, Artificial Sequence
  Description of Artificial Sequence: Synthetic oligonucleotide
cuuccugaauaacaauuag

SEQ ID NO: 1548799 - RNA, 19 nt, Artificial Sequence
  Description of Artificial Sequence: Synthetic oligonucleotide
ucugacagcuuauucgggu

SEQ ID NO: 1548800 - RNA, 19 nt, Artificial Sequence
  Description of Artificial Sequence: Synthetic oligonucleotide
ucaggguaagcaguuuugg

SEQ ID NO: 1548801 - RNA, 19 nt, Artificial Sequence
  Description of Artificial Sequence: Synthetic oligonucleotide
ugauuucauacugaguccu

SEQ ID NO: 1548802 - RNA, 19 nt, Artificial Sequence
  Description of Artificial Sequence: Synthetic oligonucleotide
agauaguagguaccacagg

SEQ ID NO: 1548803 - RNA, 19 nt, Artificial Sequence
  Description of Artificial Sequence: Synthetic oligonucleotide
aagauccuuacagugacaa

SEQ ID NO: 1548804 - RNA, 19 nt, Artificial Sequence
  Description of Artificial Sequence: Synthetic oligonucleotide
agcacugggaacacgcugc

SEQ ID NO: 1548805 - RNA, 19 nt, Artificial Sequence
  Description of Artificial Sequence: Synthetic oligonucleotide
uaucaaagucacaucuuuc

SEQ ID NO: 1548806 - RNA, 19 nt, Artificial Sequence
  Description of Artificial Sequence: Synthetic oligonucleotide
uuucaccugguuauuucug

SEQ ID NO: 1548807 - RNA, 19 nt, Artificial Sequence
  Description of Artificial Sequence: Synthetic oligonucleotide
ugaacuggaaccagauguc

SEQ ID NO: 1548808 - RNA, 19 nt, Artificial Sequence
  Description of Artificial Sequence: Synthetic oligonucleotide
acccaaaacuccaaccacc

SEQ ID NO: 1548809 - RNA, 19 nt, Artificial Sequence
  Description of Artificial Sequence: Synthetic oligonucleotide
cucccgaugagguaauggc

SEQ ID NO: 1548810 - RNA, 19 nt, Artificial Sequence
  Description of Artificial Sequence: Synthetic oligonucleotide
ugauacacuuaugugauuu

SEQ ID NO: 1548811 - RNA, 19 nt, Artificial Sequence
  Description of Artificial Sequence: Synthetic oligonucleotide
uaguagguaccacagggau

SEQ ID NO: 1548812 - RNA, 19 nt, Artificial Sequence
  Description of Artificial Sequence: Synthetic oligonucleotide
aaauaaaaugucacuguuu

SEQ ID NO: 1548813 - RNA, 19 nt, Artificial Sequence
  Description of Artificial Sequence: Synthetic oligonucleotide
acguucagaaacaugaaga

SEQ ID NO: 1548814 - RNA, 19 nt, Artificial Sequence
  Description of Artificial Sequence: Synthetic oligonucleotide
gcuuauucggguuacacca

SEQ ID NO: 1548815 - RNA, 19 nt, Artificial Sequence
  Description of Artificial Sequence: Synthetic oligonucleotide
agggaugacauucauuuua

SEQ ID NO: 1548816 - RNA, 19 nt, Artificial Sequence
  Description of Artificial Sequence: Synthetic oligonucleotide
uauuucugguuauaucaaa

SEQ ID NO: 1548817 - RNA, 19 nt, Artificial Sequence
  Description of Artificial Sequence: Synthetic oligonucleotide
guucuuaacuaaaauguca

SEQ ID NO: 1548818 - RNA, 19 nt, Artificial Sequence
  Description of Artificial Sequence: Synthetic oligonucleotide
uuuuaguagugagaacaug

SEQ ID NO: 1548819 - RNA, 19 nt, Artificial Sequence
  Description of Artificial Sequence: Synthetic oligonucleotide
gugauuucauacugagucc

SEQ ID NO: 1548820 - RNA, 19 nt, Artificial Sequence
  Description of Artificial Sequence: Synthetic oligonucleotide
ucuuuugacaccuccccau

SEQ ID NO: 1548821 - RNA, 19 nt, Artificial Sequence
  Description of Artificial Sequence: Synthetic oligonucleotide
uguaauauaaaggcacauu

SEQ ID NO: 1548822 - RNA, 19 nt, Artificial Sequence
  Description of Artificial Sequence: Synthetic oligonucleotide
auaagauaguagguaccac

SEQ ID NO: 1548823 - RNA, 19 nt, Artificial Sequence
  Description of Artificial Sequence: Synthetic oligonucleotide
ugucacuuuaaauccuggu

SEQ ID NO: 1548824 - RNA, 19 nt, Artificial Sequence
  Description of Artificial Sequence: Synthetic oligonucleotide
agggaaaaguuugaauguc

SEQ ID NO: 1548825 - RNA, 19 nt, Artificial Sequence
  Description of Artificial Sequence: Synthetic oligonucleotide
ugguuagccaccccgcggc

SEQ ID NO: 1548826 - RNA, 19 nt, Artificial Sequence
  Description of Artificial Sequence: Synthetic oligonucleotide
acaaccuguucuuuugaca

SEQ ID NO: 1548827 - RNA, 19 nt, Artificial Sequence
  Description of Artificial Sequence: Synthetic oligonucleotide
uaauuuuaguagugagaac

SEQ ID NO: 1548828 - RNA, 19 nt, Artificial Sequence
  Description of Artificial Sequence: Synthetic oligonucleotide
aggagucucaggcaauuug

SEQ ID NO: 1548829 - RNA, 19 nt, Artificial Sequence
  Description of Artificial Sequence: Synthetic oligonucleotide
uuauucggguuacaccacu

SEQ ID NO: 1548830 - RNA, 19 nt, Artificial Sequence
  Description of Artificial Sequence: Synthetic oligonucleotide
cuggugguuagccaccccg

SEQ ID NO: 1548831 - RNA, 19 nt, Artificial Sequence
  Description of Artificial Sequence: Synthetic oligonucleotide
uacacuuaugugauuucau

SEQ ID NO: 1548832 - RNA, 19 nt, Artificial Sequence
  Description of Artificial Sequence: Synthetic oligonucleotide
uguuucaccugguuauuuc

SEQ ID NO: 1548833 - RNA, 19 nt, Artificial Sequence
  Description of Artificial Sequence: Synthetic oligonucleotide
ccuuuguucucauaaacug

SEQ ID NO: 1548834 - RNA, 19 nt, Artificial Sequence
  Description of Artificial Sequence: Synthetic oligonucleotide
uucuggauauaagauagua

SEQ ID NO: 1548835 - RNA, 19 nt, Artificial Sequence
  Description of Artificial Sequence: Synthetic oligonucleotide
uuuacagguaagucauuua

SEQ ID NO: 1548836 - RNA, 19 nt, Artificial Sequence
  Description of Artificial Sequence: Synthetic oligonucleotide
gauacacuuaugugauuuc

SEQ ID NO: 1548837 - RNA, 19 nt, Artificial Sequence
  Description of Artificial Sequence: Synthetic oligonucleotide
ucuuaacuaaaaugucaau

SEQ ID NO: 1548838 - RNA, 19 nt, Artificial Sequence
  Description of Artificial Sequence: Synthetic oligonucleotide
uuuugggaaagagaauaaa

SEQ ID NO: 1548839 - RNA, 19 nt, Artificial Sequence
  Description of Artificial Sequence: Synthetic oligonucleotide
uucaggguaguuacauuaa

SEQ ID NO: 1548840 - RNA, 19 nt, Artificial Sequence
  Description of Artificial Sequence: Synthetic oligonucleotide
ucauaaagugcuucuuaua

SEQ ID NO: 1548841 - RNA, 19 nt, Artificial Sequence
  Description of Artificial Sequence: Synthetic oligonucleotide
ucacuguuuugggaaagag

SEQ ID NO: 1548842 - RNA, 19 nt, Artificial Sequence
  Description of Artificial Sequence: Synthetic oligonucleotide
augaacuaagauccuuaca

SEQ ID NO: 1548843 - RNA, 19 nt, Artificial Sequence
  Description of Artificial Sequence: Synthetic oligonucleotide
acuaagauccuuacaguga

SEQ ID NO: 1548844 - RNA, 19 nt, Artificial Sequence
  Description of Artificial Sequence: Synthetic oligonucleotide
caugaagagcacugggaac

SEQ ID NO: 1548845 - RNA, 19 nt, Artificial Sequence
  Description of Artificial Sequence: Synthetic oligonucleotide
aguaacgcuuccuacuuuu

SEQ ID NO: 1548846 - RNA, 19 nt, Artificial Sequence
  Description of Artificial Sequence: Synthetic oligonucleotide
uacauagaccuguccauuc

SEQ ID NO: 1548847 - RNA, 19 nt, Artificial Sequence
  Description of Artificial Sequence: Synthetic oligonucleotide
auccuuacagugacaauuc

SEQ ID NO: 1548848 - RNA, 19 nt, Artificial Sequence
  Description of Artificial Sequence: Synthetic oligonucleotide
guaguuacauuaauucuga

SEQ ID NO: 1548849 - RNA, 19 nt, Artificial Sequence
  Description of Artificial Sequence: Synthetic oligonucleotide
uuugccagguaaagcauuu

SEQ ID NO: 1548850 - RNA, 19 nt, Artificial Sequence
  Description of Artificial Sequence: Synthetic oligonucleotide
uggcuaugacuccugcugc

SEQ ID NO: 1548851 - RNA, 19 nt, Artificial Sequence
  Description of Artificial Sequence: Synthetic oligonucleotide
ucccuuaauaauucaucuc

SEQ ID NO: 1548852 - RNA, 19 nt, Artificial Sequence
  Description of Artificial Sequence: Synthetic oligonucleotide
aaacuccaaccaccaugac

SEQ ID NO: 1548853 - RNA, 19 nt, Artificial Sequence
  Description of Artificial Sequence: Synthetic oligonucleotide
aguccuguguguaauauaa

SEQ ID NO: 1548854 - RNA, 19 nt, Artificial Sequence
  Description of Artificial Sequence: Synthetic oligonucleotide
agcuacuggcacuuggugu

SEQ ID NO: 1548855 - RNA, 19 nt, Artificial Sequence
  Description of Artificial Sequence: Synthetic oligonucleotide
caaucacauccuuuuguug

SEQ ID NO: 1548856 - RNA, 19 nt, Artificial Sequence
  Description of Artificial Sequence: Synthetic oligonucleotide
ucuaccacuucuuccugaa

SEQ ID NO: 1548857 - RNA, 19 nt, Artificial Sequence
  Description of Artificial Sequence: Synthetic oligonucleotide
ucccgaugagguaauggcu

SEQ ID NO: 1548858 - RNA, 19 nt, Artificial Sequence
  Description of Artificial Sequence: Synthetic oligonucleotide
aacugggcaaagcaccuuu

SEQ ID NO: 1548859 - RNA, 19 nt, Artificial Sequence
  Description of Artificial Sequence: Synthetic oligonucleotide
uugucuuucaggguaguua

SEQ ID NO: 1548860 - RNA, 19 nt, Artificial Sequence
  Description of Artificial Sequence: Synthetic oligonucleotide
acacuuaugugauuucaua

SEQ ID NO: 1548861 - RNA, 19 nt, Artificial Sequence
  Description of Artificial Sequence: Synthetic oligonucleotide
gaagauggaggcucugcuc

SEQ ID NO: 1548862 - RNA, 19 nt, Artificial Sequence
  Description of Artificial Sequence: Synthetic oligonucleotide
agucucaggcaauuugcca

SEQ ID NO: 1548863 - RNA, 19 nt, Artificial Sequence
  Description of Artificial Sequence: Synthetic oligonucleotide
aauuaguugugaacuggaa

SEQ ID NO: 1548864 - RNA, 19 nt, Artificial Sequence
  Description of Artificial Sequence: Synthetic oligonucleotide
auuuacagguaagucauuu

SEQ ID NO: 1548865 - RNA, 19 nt, Artificial Sequence
  Description of Artificial Sequence: Synthetic oligonucleotide
gaguccaugauuggagaug

SEQ ID NO: 1548866 - RNA, 19 nt, Artificial Sequence
  Description of Artificial Sequence: Synthetic oligonucleotide
accuucuggauauaagaua

SEQ ID NO: 1548867 - RNA, 19 nt, Artificial Sequence
  Description of Artificial Sequence: Synthetic oligonucleotide
uuaaauccuggugcaguca

SEQ ID NO: 1548868 - RNA, 19 nt, Artificial Sequence
  Description of Artificial Sequence: Synthetic oligonucleotide
caauuucauaaagugcuuc

SEQ ID NO: 1548869 - RNA, 19 nt, Artificial Sequence
  Description of Artificial Sequence: Synthetic oligonucleotide
uucucauaaacugggcaaa

SEQ ID NO: 1548870 - RNA, 19 nt, Artificial Sequence
  Description of Artificial Sequence: Synthetic oligonucleotide
uaagauccuuacagugaca

SEQ ID NO: 1548871 - RNA, 19 nt, Artificial Sequence
  Description of Artificial Sequence: Synthetic oligonucleotide
ggaagcuacuggcacuugg

SEQ ID NO: 1548872 - RNA, 19 nt, Artificial Sequence
  Description of Artificial Sequence: Synthetic oligonucleotide
aaguugggaagaguaaaua

SEQ ID NO: 1548873 - RNA, 19 nt, Artificial Sequence
  Description of Artificial Sequence: Synthetic oligonucleotide
guggacggcggccugggcg

SEQ ID NO: 1548874 - RNA, 19 nt, Artificial Sequence
  Description of Artificial Sequence: Synthetic oligonucleotide
cacuauuuacagguaaguc

SEQ ID NO: 1548875 - RNA, 19 nt, Artificial Sequence
  Description of Artificial Sequence: Synthetic oligonucleotide
cuuauucggguuacaccac

SEQ ID NO: 1548876 - RNA, 19 nt, Artificial Sequence
  Description of Artificial Sequence: Synthetic oligonucleotide
cuaugacuccugcugcacc

SEQ ID NO: 1548877 - RNA, 19 nt, Artificial Sequence
  Description of Artificial Sequence: Synthetic oligonucleotide
ugacguucagaaacaugaa

SEQ ID NO: 1548878 - RNA, 19 nt, Artificial Sequence
  Description of Artificial Sequence: Synthetic oligonucleotide
gguuauaucaaagucacau

SEQ ID NO: 1548879 - RNA, 19 nt, Artificial Sequence
  Description of Artificial Sequence: Synthetic oligonucleotide
acucccgaugagguaaugg

SEQ ID NO: 1548880 - RNA, 19 nt, Artificial Sequence
  Description of Artificial Sequence: Synthetic oligonucleotide
ggguaagcaguuuuggcac

SEQ ID NO: 1548881 - RNA, 19 nt, Artificial Sequence
  Description of Artificial Sequence: Synthetic oligonucleotide
caugauacacuuaugugau

SEQ ID NO: 1548882 - RNA, 19 nt, Artificial Sequence
  Description of Artificial Sequence: Synthetic oligonucleotide
agguuauguuaagaacaac

SEQ ID NO: 1548883 - RNA, 19 nt, Artificial Sequence
  Description of Artificial Sequence: Synthetic oligonucleotide
aaauccuggugcagucagg

SEQ ID NO: 1548884 - RNA, 19 nt, Artificial Sequence
  Description of Artificial Sequence: Synthetic oligonucleotide
ugguguucuguuucaccug

SEQ ID NO: 1548885 - RNA, 19 nt, Artificial Sequence
  Description of Artificial Sequence: Synthetic oligonucleotide
gauccuuacagugacaauu

SEQ ID NO: 1548886 - RNA, 19 nt, Artificial Sequence
  Description of Artificial Sequence: Synthetic oligonucleotide
aaggaagggaaaaguuuga

SEQ ID NO: 1548887 - RNA, 19 nt, Artificial Sequence
  Description of Artificial Sequence: Synthetic oligonucleotide
cacuuuaaauccuggugca

SEQ ID NO: 1548888 - RNA, 19 nt, Artificial Sequence
  Description of Artificial Sequence: Synthetic oligonucleotide
uggugguuagccaccccgc

SEQ ID NO: 1548889 - RNA, 19 nt, Artificial Sequence
  Description of Artificial Sequence: Synthetic oligonucleotide
uccugcggggcuguggacg

SEQ ID NO: 1548890 - RNA, 19 nt, Artificial Sequence
  Description of Artificial Sequence: Synthetic oligonucleotide
accugguuauuucugguua

SEQ ID NO: 1548891 - RNA, 19 nt, Artificial Sequence
  Description of Artificial Sequence: Synthetic oligonucleotide
accuuguaugaagauggag

SEQ ID NO: 1548892 - RNA, 19 nt, Artificial Sequence
  Description of Artificial Sequence: Synthetic oligonucleotide
gauuucauacugaguccug

SEQ ID NO: 1548893 - RNA, 19 nt, Artificial Sequence
  Description of Artificial Sequence: Synthetic oligonucleotide
agcaccuuuaacauggcua

SEQ ID NO: 1548894 - RNA, 19 nt, Artificial Sequence
  Description of Artificial Sequence: Synthetic oligonucleotide
aucaauagauacaguuucu

SEQ ID NO: 1548895 - RNA, 19 nt, Artificial Sequence
  Description of Artificial Sequence: Synthetic oligonucleotide
gugcagucaggguaagcag

SEQ ID NO: 1548896 - RNA, 19 nt, Artificial Sequence
  Description of Artificial Sequence: Synthetic oligonucleotide
gugguuagccaccccgcgg

SEQ ID NO: 1548897 - RNA, 19 nt, Artificial Sequence
  Description of Artificial Sequence: Synthetic oligonucleotide
gaauaacaauuaguuguga

SEQ ID NO: 1548898 - RNA, 19 nt, Artificial Sequence
  Description of Artificial Sequence: Synthetic oligonucleotide
gaacaaccuguucuuuuga

SEQ ID NO: 1548899 - RNA, 19 nt, Artificial Sequence
  Description of Artificial Sequence: Synthetic oligonucleotide
uucggguuacaccacuauu

SEQ ID NO: 1548900 - RNA, 19 nt, Artificial Sequence
  Description of Artificial Sequence: Synthetic oligonucleotide
uuguaugaagauggaggcu

SEQ ID NO: 1548901 - RNA, 19 nt, Artificial Sequence
  Description of Artificial Sequence: Synthetic oligonucleotide
ugacagcuuauucggguua

SEQ ID NO: 1548902 - RNA, 19 nt, Artificial Sequence
  Description of Artificial Sequence: Synthetic oligonucleotide
auuucccuuaauaauucau

SEQ ID NO: 1548903 - RNA, 19 nt, Artificial Sequence
  Description of Artificial Sequence: Synthetic oligonucleotide
aguugugaacuggaaccag

SEQ ID NO: 1548904 - RNA, 19 nt, Artificial Sequence
  Description of Artificial Sequence: Synthetic oligonucleotide
ugauuggagaugguguuuu

SEQ ID NO: 1548905 - RNA, 19 nt, Artificial Sequence
  Description of Artificial Sequence: Synthetic oligonucleotide
agucaggguaagcaguuuu

SEQ ID NO: 1548906 - RNA, 19 nt, Artificial Sequence
  Description of Artificial Sequence: Synthetic oligonucleotide
cagugguuuccacacuccc

SEQ ID NO: 1548907 - RNA, 19 nt, Artificial Sequence
  Description of Artificial Sequence: Synthetic oligonucleotide
gcaugcuuucuuccaaagg

SEQ ID NO: 1548908 - RNA, 19 nt, Artificial Sequence
  Description of Artificial Sequence: Synthetic oligonucleotide
cacccaaaacuccaaccac

SEQ ID NO: 1548909 - RNA, 19 nt, Artificial Sequence
  Description of Artificial Sequence: Synthetic oligonucleotide
ugguuauaucaaagucaca

SEQ ID NO: 1548910 - RNA, 19 nt, Artificial Sequence
  Description of Artificial Sequence: Synthetic oligonucleotide
cacuguuuugggaaagaga

SEQ ID NO: 1548911 - RNA, 19 nt, Artificial Sequence
  Description of Artificial Sequence: Synthetic oligonucleotide
agaguccaugauuggagau

SEQ ID NO: 1548912 - RNA, 19 nt, Artificial Sequence
  Description of Artificial Sequence: Synthetic oligonucleotide
uccauucucauagguuaug

SEQ ID NO: 1548913 - RNA, 19 nt, Artificial Sequence
  Description of Artificial Sequence: Synthetic oligonucleotide
cauagaccuguccauucuc

SEQ ID NO: 1548914 - RNA, 19 nt, Artificial Sequence
  Description of Artificial Sequence: Synthetic oligonucleotide
gaacacgcugccccagagc

SEQ ID NO: 1548915 - RNA, 19 nt, Artificial Sequence
  Description of Artificial Sequence: Synthetic oligonucleotide
uauucggguuacaccacua

SEQ ID NO: 1548916 - RNA, 19 nt, Artificial Sequence
  Description of Artificial Sequence: Synthetic oligonucleotide
uuacauagaccuguccauu

SEQ ID NO: 1548917 - RNA, 19 nt, Artificial Sequence
  Description of Artificial Sequence: Synthetic oligonucleotide
aaguaacgcuuccuacuuu

SEQ ID NO: 1548918 - RNA, 19 nt, Artificial Sequence
  Description of Artificial Sequence: Synthetic oligonucleotide
ggauauaagauaguaggua

SEQ ID NO: 1548919 - RNA, 19 nt, Artificial Sequence
  Description of Artificial Sequence: Synthetic oligonucleotide
ggagaugguguuuuaaaua

SEQ ID NO: 1548920 - RNA, 19 nt, Artificial Sequence
  Description of Artificial Sequence: Synthetic oligonucleotide
ugaguccuguguguaauau

SEQ ID NO: 1548921 - RNA, 19 nt, Artificial Sequence
  Description of Artificial Sequence: Synthetic oligonucleotide
auucggguuacaccacuau

SEQ ID NO: 1548922 - RNA, 19 nt, Artificial Sequence
  Description of Artificial Sequence: Synthetic oligonucleotide
ggcaauuugccagguaaag

SEQ ID NO: 1548923 - RNA, 19 nt, Artificial Sequence
  Description of Artificial Sequence: Synthetic oligonucleotide
gagguaauggcuggugguc

SEQ ID NO: 1548924 - RNA, 19 nt, Artificial Sequence
  Description of Artificial Sequence: Synthetic oligonucleotide
aguaaucaauagauacagu

SEQ ID NO: 1548925 - RNA, 19 nt, Artificial Sequence
  Description of Artificial Sequence: Synthetic oligonucleotide
gacagcuuauucggguuac

SEQ ID NO: 1548926 - RNA, 19 nt, Artificial Sequence
  Description of Artificial Sequence: Synthetic oligonucleotide
gguucuuaacuaaaauguc

SEQ ID NO: 1548927 - RNA, 19 nt, Artificial Sequence
  Description of Artificial Sequence: Synthetic oligonucleotide
gaaguaacgcuuccuacuu

SEQ ID NO: 1548928 - RNA, 19 nt, Artificial Sequence
  Description of Artificial Sequence: Synthetic oligonucleotide
auuggagaugguguuuuaa

SEQ ID NO: 1548929 - RNA, 19 nt, Artificial Sequence
  Description of Artificial Sequence: Synthetic oligonucleotide
auagaccuguccauucuca

SEQ ID NO: 1548930 - RNA, 19 nt, Artificial Sequence
  Description of Artificial Sequence: Synthetic oligonucleotide
accuguccauucucauagg

SEQ ID NO: 1548931 - RNA, 19 nt, Artificial Sequence
  Description of Artificial Sequence: Synthetic oligonucleotide
uauuuacagguaagucauu

SEQ ID NO: 1548932 - RNA, 19 nt, Artificial Sequence
  Description of Artificial Sequence: Synthetic oligonucleotide
gcaauuugccagguaaagc

SEQ ID NO: 1548933 - RNA, 19 nt, Artificial Sequence
  Description of Artificial Sequence: Synthetic oligonucleotide
ggugguuagccaccccgcg

SEQ ID NO: 1548934 - RNA, 19 nt, Artificial Sequence
  Description of Artificial Sequence: Synthetic oligonucleotide
gcaaugaaguaacgcuucc

SEQ ID NO: 1548935 - RNA, 19 nt, Artificial Sequence
  Description of Artificial Sequence: Synthetic oligonucleotide
cucagaaccuucuggauau

SEQ ID NO: 1548936 - RNA, 19 nt, Artificial Sequence
  Description of Artificial Sequence: Synthetic oligonucleotide
guagugagaacaugucacu

SEQ ID NO: 1548937 - RNA, 19 nt, Artificial Sequence
  Description of Artificial Sequence: Synthetic oligonucleotide
uaucaaagucugacagcuu

SEQ ID NO: 1548938 - RNA, 19 nt, Artificial Sequence
  Description of Artificial Sequence: Synthetic oligonucleotide
cccgaugagguaauggcug

SEQ ID NO: 1548939 - RNA, 19 nt, Artificial Sequence
  Description of Artificial Sequence: Synthetic oligonucleotide
gcuucuuauaaaaccuuac

SEQ ID NO: 1548940 - RNA, 19 nt, Artificial Sequence
  Description of Artificial Sequence: Synthetic oligonucleotide
cucauagguuauguuaaga

SEQ ID NO: 1548941 - RNA, 19 nt, Artificial Sequence
  Description of Artificial Sequence: Synthetic oligonucleotide
guggucugcaaugaaguaa

SEQ ID NO: 1548942 - RNA, 19 nt, Artificial Sequence
  Description of Artificial Sequence: Synthetic oligonucleotide
cauaggccacucaugaacu

SEQ ID NO: 1548943 - RNA, 19 nt, Artificial Sequence
  Description of Artificial Sequence: Synthetic oligonucleotide
aggaagggaaaaguuugaa

SEQ ID NO: 1548944 - RNA, 19 nt, Artificial Sequence
  Description of Artificial Sequence: Synthetic oligonucleotide
cucugguucuuaacuaaaa

SEQ ID NO: 1548945 - RNA, 19 nt, Artificial Sequence
  Description of Artificial Sequence: Synthetic oligonucleotide
agaccuguccauucucaua

SEQ ID NO: 1548946 - RNA, 19 nt, Artificial Sequence
  Description of Artificial Sequence: Synthetic oligonucleotide
gguaauggcugguggucug

SEQ ID NO: 1548947 - RNA, 19 nt, Artificial Sequence
  Description of Artificial Sequence: Synthetic oligonucleotide
gguaaagcauuucccucca

SEQ ID NO: 1548948 - RNA, 19 nt, Artificial Sequence
  Description of Artificial Sequence: Synthetic oligonucleotide
gccagguaaagcauuuccc

SEQ ID NO: 1548949 - RNA, 19 nt, Artificial Sequence
  Description of Artificial Sequence: Synthetic oligonucleotide
gauuuucacucuucacuau

SEQ ID NO: 1548950 - RNA, 19 nt, Artificial Sequence
  Description of Artificial Sequence: Synthetic oligonucleotide
uaauggcugguggucugca

SEQ ID NO: 1548951 - RNA, 19 nt, Artificial Sequence
  Description of Artificial Sequence: Synthetic oligonucleotide
accuuacaauaguaaucaa

SEQ ID NO: 1548952 - RNA, 19 nt, Artificial Sequence
  Description of Artificial Sequence: Synthetic oligonucleotide
ggguaguuacauuaauucu

SEQ ID NO: 1548953 - RNA, 19 nt, Artificial Sequence
  Description of Artificial Sequence: Synthetic oligonucleotide
guaauggcugguggucugc

SEQ ID NO: 1548954 - RNA, 19 nt, Artificial Sequence
  Description of Artificial Sequence: Synthetic oligonucleotide
augugauuucauacugagu

SEQ ID NO: 1548955 - RNA, 19 nt, Artificial Sequence
  Description of Artificial Sequence: Synthetic oligonucleotide
caccacuauuuacagguaa

SEQ ID NO: 1548956 - RNA, 19 nt, Artificial Sequence
  Description of Artificial Sequence: Synthetic oligonucleotide
cugcacccaaaacuccaac

SEQ ID NO: 1548957 - RNA, 19 nt, Artificial Sequence
  Description of Artificial Sequence: Synthetic oligonucleotide
ccuuuaacauggcuaugac

SEQ ID NO: 1548958 - RNA, 19 nt, Artificial Sequence
  Description of Artificial Sequence: Synthetic oligonucleotide
ccgaugagguaauggcugg

SEQ ID NO: 1548959 - RNA, 19 nt, Artificial Sequence
  Description of Artificial Sequence: Synthetic oligonucleotide
gaagcuacuggcacuuggu

SEQ ID NO: 1548960 - RNA, 19 nt, Artificial Sequence
  Description of Artificial Sequence: Synthetic oligonucleotide
gaguccuguguguaauaua

SEQ ID NO: 1548961 - RNA, 19 nt, Artificial Sequence
  Description of Artificial Sequence: Synthetic oligonucleotide
ggcaaagcaccuuuaacau

SEQ ID NO: 1548962 - RNA, 19 nt, Artificial Sequence
  Description of Artificial Sequence: Synthetic oligonucleotide
gagcuugucuuccaucaau

SEQ ID NO: 1548963 - RNA, 19 nt, Artificial Sequence
  Description of Artificial Sequence: Synthetic oligonucleotide
cauccugcggggcugugga

SEQ ID NO: 1548964 - RNA, 19 nt, Artificial Sequence
  Description of Artificial Sequence: Synthetic oligonucleotide
cucuaccacuucuuccuga

SEQ ID NO: 1548965 - RNA, 19 nt, Artificial Sequence
  Description of Artificial Sequence: Synthetic oligonucleotide
gauuggagaugguguuuua

SEQ ID NO: 1548966 - RNA, 19 nt, Artificial Sequence
  Description of Artificial Sequence: Synthetic oligonucleotide
cagcggcgccgauagggcg

SEQ ID NO: 1548967 - RNA, 19 nt, Artificial Sequence
  Description of Artificial Sequence: Synthetic oligonucleotide
ugacuccugcugcacccaa

SEQ ID NO: 1548968 - RNA, 19 nt, Artificial Sequence
  Description of Artificial Sequence: Synthetic oligonucleotide
cagccggacgggcagcggc

SEQ ID NO: 1548969 - RNA, 19 nt, Artificial Sequence
  Description of Artificial Sequence: Synthetic oligonucleotide
agguaccacagggaugaca

SEQ ID NO: 1548970 - RNA, 19 nt, Artificial Sequence
  Description of Artificial Sequence: Synthetic oligonucleotide
aaacugggcaaagcaccuu

SEQ ID NO: 1548971 - RNA, 19 nt, Artificial Sequence
  Description of Artificial Sequence: Synthetic oligonucleotide
gggaaagagaauaaagcau

SEQ ID NO: 1548972 - RNA, 19 nt, Artificial Sequence
  Description of Artificial Sequence: Synthetic oligonucleotide
gauggaggcucugcucuga

SEQ ID NO: 1548973 - RNA, 19 nt, Artificial Sequence
  Description of Artificial Sequence: Synthetic oligonucleotide
aaccaccaugacguucaga

SEQ ID NO: 1548974 - RNA, 19 nt, Artificial Sequence
  Description of Artificial Sequence: Synthetic oligonucleotide
gguaccacagggaugacau

SEQ ID NO: 1548975 - RNA, 19 nt, Artificial Sequence
  Description of Artificial Sequence: Synthetic oligonucleotide
agaggagucucaggcaauu

SEQ ID NO: 1548976 - RNA, 19 nt, Artificial Sequence
  Description of Artificial Sequence: Synthetic oligonucleotide
acacgcugccccagagccc

SEQ ID NO: 1548977 - RNA, 19 nt, Artificial Sequence
  Description of Artificial Sequence: Synthetic oligonucleotide
cugcaaugaaguaacgcuu

SEQ ID NO: 1548978 - RNA, 19 nt, Artificial Sequence
  Description of Artificial Sequence: Synthetic oligonucleotide
gugacaauuccaaaauauu

SEQ ID NO: 1548979 - RNA, 19 nt, Artificial Sequence
  Description of Artificial Sequence: Synthetic oligonucleotide
gucauaggccacucaugaa

SEQ ID NO: 1548980 - RNA, 19 nt, Artificial Sequence
  Description of Artificial Sequence: Synthetic oligonucleotide
gguaagcaguuuuggcaca

SEQ ID NO: 1548981 - RNA, 19 nt, Artificial Sequence
  Description of Artificial Sequence: Synthetic oligonucleotide
acucaugaacuaagauccu

SEQ ID NO: 1548982 - RNA, 19 nt, Artificial Sequence
  Description of Artificial Sequence: Synthetic oligonucleotide
ggcacauuguacugagaaa

SEQ ID NO: 1548983 - RNA, 19 nt, Artificial Sequence
  Description of Artificial Sequence: Synthetic oligonucleotide
auugucuuucaggguaguu

SEQ ID NO: 1548984 - RNA, 19 nt, Artificial Sequence
  Description of Artificial Sequence: Synthetic oligonucleotide
auccuggugcagucagggu

SEQ ID NO: 1548985 - RNA, 19 nt, Artificial Sequence
  Description of Artificial Sequence: Synthetic oligonucleotide
cagugacaauuccaaaaua

SEQ ID NO: 1548986 - RNA, 19 nt, Artificial Sequence
  Description of Artificial Sequence: Synthetic oligonucleotide
agcagccggacgggcagcg

SEQ ID NO: 1548987 - RNA, 19 nt, Artificial Sequence
  Description of Artificial Sequence: Synthetic oligonucleotide
ggaugacauucauuuuauc

SEQ ID NO: 1548988 - RNA, 19 nt, Artificial Sequence
  Description of Artificial Sequence: Synthetic oligonucleotide
gcaccuuuaacauggcuau

SEQ ID NO: 1548989 - RNA, 19 nt, Artificial Sequence
  Description of Artificial Sequence: Synthetic oligonucleotide
uugccagguaaagcauuuc

SEQ ID NO: 1548990 - RNA, 19 nt, Artificial Sequence
  Description of Artificial Sequence: Synthetic oligonucleotide
cccauugucuuucagggua

SEQ ID NO: 1548991 - RNA, 19 nt, Artificial Sequence
  Description of Artificial Sequence: Synthetic oligonucleotide
uguggacggcggccugggc

SEQ ID NO: 1548992 - RNA, 19 nt, Artificial Sequence
  Description of Artificial Sequence: Synthetic oligonucleotide
cugggcaaagcaccuuuaa

SEQ ID NO: 1548993 - RNA, 19 nt, Artificial Sequence
  Description of Artificial Sequence: Synthetic oligonucleotide
uggugcagucaggguaagc

SEQ ID NO: 1548994 - RNA, 19 nt, Artificial Sequence
  Description of Artificial Sequence: Synthetic oligonucleotide
auccuuuuguugagcuugu

SEQ ID NO: 1548995 - RNA, 19 nt, Artificial Sequence
  Description of Artificial Sequence: Synthetic oligonucleotide
ggucugcaaugaaguaacg

SEQ ID NO: 1548996 - RNA, 19 nt, Artificial Sequence
  Description of Artificial Sequence: Synthetic oligonucleotide
caccuuguaugaagaugga

SEQ ID NO: 1548997 - RNA, 19 nt, Artificial Sequence
  Description of Artificial Sequence: Synthetic oligonucleotide
ggcuaugacuccugcugca

SEQ ID NO: 1548998 - RNA, 19 nt, Artificial Sequence
  Description of Artificial Sequence: Synthetic oligonucleotide
cacgcugccccagagccca

SEQ ID NO: 1548999 - RNA, 19 nt, Artificial Sequence
  Description of Artificial Sequence: Synthetic oligonucleotide
uggaagcuacuggcacuug

SEQ ID NO: 1549000 - RNA, 19 nt, Artificial Sequence
  Description of Artificial Sequence: Synthetic oligonucleotide
gucuuccaucaaucucuac

SEQ ID NO: 1549001 - RNA, 19 nt, Artificial Sequence
  Description of Artificial Sequence: Synthetic oligonucleotide
caccuuuaacauggcuaug

SEQ ID NO: 1549002 - RNA, 19 nt, Artificial Sequence
  Description of Artificial Sequence: Synthetic oligonucleotide
ccuuaauaauucaucuccu

SEQ ID NO: 1549003 - RNA, 19 nt, Artificial Sequence
  Description of Artificial Sequence: Synthetic oligonucleotide
cuucuggauauaagauagu

SEQ ID NO: 1549004 - RNA, 19 nt, Artificial Sequence
  Description of Artificial Sequence: Synthetic oligonucleotide
agccggacgggcagcggcg

SEQ ID NO: 1549005 - RNA, 19 nt, Artificial Sequence
  Description of Artificial Sequence: Synthetic oligonucleotide
cauggcuaugacuccugcu

SEQ ID NO: 1549006 - RNA, 19 nt, Artificial Sequence
  Description of Artificial Sequence: Synthetic oligonucleotide
gcuacuggcacuugguguu

SEQ ID NO: 1549007 - RNA, 19 nt, Artificial Sequence
  Description of Artificial Sequence: Synthetic oligonucleotide
cuguccauucucauagguu

SEQ ID NO: 1549008 - RNA, 19 nt, Artificial Sequence
  Description of Artificial Sequence: Synthetic oligonucleotide
aaggcaccuggaagcuacu

SEQ ID NO: 1549009 - RNA, 19 nt, Artificial Sequence
  Description of Artificial Sequence: Synthetic oligonucleotide
ugggcgcgcuggugguuag

SEQ ID NO: 1549010 - RNA, 19 nt, Artificial Sequence
  Description of Artificial Sequence: Synthetic oligonucleotide
cauucucauagguuauguu

SEQ ID NO: 1549011 - RNA, 19 nt, Artificial Sequence
  Description of Artificial Sequence: Synthetic oligonucleotide
cacugggaacacgcugccc

SEQ ID NO: 1549012 - RNA, 19 nt, Artificial Sequence
  Description of Artificial Sequence: Synthetic oligonucleotide
gcuaugacuccugcugcac

SEQ ID NO: 1549013 - RNA, 19 nt, Artificial Sequence
  Description of Artificial Sequence: Synthetic oligonucleotide
cagaaacaugaagagcacu

SEQ ID NO: 1549014 - RNA, 19 nt, Artificial Sequence
  Description of Artificial Sequence: Synthetic oligonucleotide
guaugaagauggaggcucu

SEQ ID NO: 1549015 - RNA, 19 nt, Artificial Sequence
  Description of Artificial Sequence: Synthetic oligonucleotide
cuacuggcacuugguguuc

SEQ ID NO: 1549016 - RNA, 19 nt, Artificial Sequence
  Description of Artificial Sequence: Synthetic oligonucleotide
gucuuucaggguaguuaca

SEQ ID NO: 1549017 - RNA, 19 nt, Artificial Sequence
  Description of Artificial Sequence: Synthetic oligonucleotide
cacagacaugauacacuua

SEQ ID NO: 1549018 - RNA, 19 nt, Artificial Sequence
  Description of Artificial Sequence: Synthetic oligonucleotide
cugaguccuguguguaaua

SEQ ID NO: 1549019 - RNA, 19 nt, Artificial Sequence
  Description of Artificial Sequence: Synthetic oligonucleotide
cugacagcuuauucggguu

SEQ ID NO: 1549020 - RNA, 19 nt, Artificial Sequence
  Description of Artificial Sequence: Synthetic oligonucleotide
ggcgcgcuggugguuagcc

SEQ ID NO: 1549021 - RNA, 19 nt, Artificial Sequence
  Description of Artificial Sequence: Synthetic oligonucleotide
gcuguggacggcggccugg

SEQ ID NO: 1549022 - RNA, 19 nt, Artificial Sequence
  Description of Artificial Sequence: Synthetic oligonucleotide
acugggcaaagcaccuuua

SEQ ID NO: 1549023 - RNA, 19 nt, Artificial Sequence
  Description of Artificial Sequence: Synthetic oligonucleotide
cucaugaacuaagauccuu

SEQ ID NO: 1549024 - RNA, 19 nt, Artificial Sequence
  Description of Artificial Sequence: Synthetic oligonucleotide
guccuguguguaauauaaa

SEQ ID NO: 1549025 - RNA, 19 nt, Artificial Sequence
  Description of Artificial Sequence: Synthetic oligonucleotide
cuuuugacaccuccccauu

SEQ ID NO: 1549026 - RNA, 19 nt, Artificial Sequence
  Description of Artificial Sequence: Synthetic oligonucleotide
ggggcuguggacggcggcc

SEQ ID NO: 1549027 - RNA, 19 nt, Artificial Sequence
  Description of Artificial Sequence: Synthetic oligonucleotide
gagugcucuccugagcuuu

SEQ ID NO: 1549028 - RNA, 19 nt, Artificial Sequence
  Description of Artificial Sequence: Synthetic oligonucleotide
gggaugacauucauuuuau

SEQ ID NO: 1549029 - RNA, 19 nt, Artificial Sequence
  Description of Artificial Sequence: Synthetic oligonucleotide
gcagcggcgccgauagggc

SEQ ID NO: 1549030 - RNA, 19 nt, Artificial Sequence
  Description of Artificial Sequence: Synthetic oligonucleotide
auagggcgcccuccaucuu

SEQ ID NO: 1549031 - RNA, 19 nt, Artificial Sequence
  Description of Artificial Sequence: Synthetic oligonucleotide
gcuggugguuagccacccc

SEQ ID NO: 1549032 - RNA, 19 nt, Artificial Sequence
  Description of Artificial Sequence: Synthetic oligonucleotide
caccugguuauuucugguu

SEQ ID NO: 1549033 - RNA, 19 nt, Artificial Sequence
  Description of Artificial Sequence: Synthetic oligonucleotide
gccgauagggcgcccucca

SEQ ID NO: 1549034 - RNA, 19 nt, Artificial Sequence
  Description of Artificial Sequence: Synthetic oligonucleotide
caaagucugacagcuuauu

SEQ ID NO: 1549035 - RNA, 19 nt, Artificial Sequence
  Description of Artificial Sequence: Synthetic oligonucleotide
agugcucuccugagcuuuu

SEQ ID NO: 1549036 - RNA, 19 nt, Artificial Sequence
  Description of Artificial Sequence: Synthetic oligonucleotide
uagguaccacagggaugac

SEQ ID NO: 1549037 - RNA, 19 nt, Artificial Sequence
  Description of Artificial Sequence: Synthetic oligonucleotide
cgauagggcgcccuccauc

SEQ ID NO: 1549038 - RNA, 19 nt, Artificial Sequence
  Description of Artificial Sequence: Synthetic oligonucleotide
acacucccgaugagguaau

SEQ ID NO: 1549039 - RNA, 19 nt, Artificial Sequence
  Description of Artificial Sequence: Synthetic oligonucleotide
cacucccgaugagguaaug

SEQ ID NO: 1549040 - RNA, 19 nt, Artificial Sequence
  Description of Artificial Sequence: Synthetic oligonucleotide
gccaccccgcggcuggcag

SEQ ID NO: 1549041 - RNA, 19 nt, Artificial Sequence
  Description of Artificial Sequence: Synthetic oligonucleotide
cagcagccggacgggcagc

SEQ ID NO: 1549042 - RNA, 19 nt, Artificial Sequence
  Description of Artificial Sequence: Synthetic oligonucleotide
cagggaugacauucauuuu

SEQ ID NO: 1549043 - RNA, 19 nt, Artificial Sequence
  Description of Artificial Sequence: Synthetic oligonucleotide
cuggcacaucaccuuguau

SEQ ID NO: 1549044 - RNA, 19 nt, Artificial Sequence
  Description of Artificial Sequence: Synthetic oligonucleotide
cuguuucaccugguuauuu

SEQ ID NO: 1549045 - RNA, 19 nt, Artificial Sequence
  Description of Artificial Sequence: Synthetic oligonucleotide
cucaggcaauuugccaggu

SEQ ID NO: 1549046 - RNA, 19 nt, Artificial Sequence
  Description of Artificial Sequence: Synthetic oligonucleotide
gacggcggccugggcgcgc

SEQ ID NO: 1549047 - RNA, 19 nt, Artificial Sequence
  Description of Artificial Sequence: Synthetic oligonucleotide
cugggcgcgcuggugguua

SEQ ID NO: 1549048 - RNA, 19 nt, Artificial Sequence
  Description of Artificial Sequence: Synthetic oligonucleotide
gcagccggacgggcagcgg

SEQ ID NO: 1549049 - RNA, 19 nt, Artificial Sequence
  Description of Artificial Sequence: Synthetic oligonucleotide
gguuagccaccccgcggcu

SEQ ID NO: 1549050 - RNA, 19 nt, Artificial Sequence
  Description of Artificial Sequence: Synthetic oligonucleotide
gcggcgccgauagggcgcc

SEQ ID NO: 1549051 - RNA, 19 nt, Artificial Sequence
  Description of Artificial Sequence: Synthetic oligonucleotide
guccaugauuggagauggu

SEQ ID NO: 1549052 - RNA, 19 nt, Artificial Sequence
  Description of Artificial Sequence: Synthetic oligonucleotide
gcgccgauagggcgcccuc

SEQ ID NO: 1549053 - RNA, 19 nt, Artificial Sequence
  Description of Artificial Sequence: Synthetic oligonucleotide
gccggacgggcagcggcgc

SEQ ID NO: 1549054 - RNA, 19 nt, Artificial Sequence
  Description of Artificial Sequence: Synthetic oligonucleotide
ccacacucccgaugaggua

SEQ ID NO: 1549055 - RNA, 19 nt, Artificial Sequence
  Description of Artificial Sequence: Synthetic oligonucleotide
ccccauugucuuucagggu

SEQ ID NO: 1549056 - RNA, 19 nt, Artificial Sequence
  Description of Artificial Sequence: Synthetic oligonucleotide
gggcgcgcuggugguuagc

SEQ ID NO: 1549057 - RNA, 19 nt, Artificial Sequence
  Description of Artificial Sequence: Synthetic oligonucleotide
ccacagggaugacauucau

SEQ ID NO: 1549058 - RNA, 19 nt, Artificial Sequence
  Description of Artificial Sequence: Synthetic oligonucleotide
ccacagugguuuccacacu

SEQ ID NO: 1549059 - RNA, 19 nt, Artificial Sequence
  Description of Artificial Sequence: Synthetic oligonucleotide
gggcgcccuccaucuugga

SEQ ID NO: 1549060 - RNA, 19 nt, Artificial Sequence
  Description of Artificial Sequence: Synthetic oligonucleotide
ggcgccgauagggcgcccu

SEQ ID NO: 1549061 - RNA, 19 nt, Artificial Sequence
  Description of Artificial Sequence: Synthetic oligonucleotide
gacgggcagcggcgccgau

SEQ ID NO: 1549062 - RNA, 19 nt, Artificial Sequence
  Description of Artificial Sequence: Synthetic oligonucleotide
cgaugagguaauggcuggu

SEQ ID NO: 1549063 - RNA, 19 nt, Artificial Sequence
  Description of Artificial Sequence: Synthetic oligonucleotide
gcggccugggcgcgcuggu

SEQ ID NO: 1549064 - RNA, 19 nt, Artificial Sequence
  Description of Artificial Sequence: Synthetic oligonucleotide
ccgauagggcgcccuccau

SEQ ID NO: 1549065 - RNA, 19 nt, Artificial Sequence
  Description of Artificial Sequence: Synthetic oligonucleotide
ccugggcgcgcuggugguu

SEQ ID NO: 1549066 - RNA, 19 nt, Artificial Sequence
  Description of Artificial Sequence: Synthetic oligonucleotide
cggcgccgauagggcgccc

SEQ ID NO: 1549067 - RNA, 19 nt, Artificial Sequence
  Description of Artificial Sequence: Synthetic oligonucleotide
aauuauucaauacaaacgg

SEQ ID NO: 1549068 - RNA, 19 nt, Artificial Sequence
  Description of Artificial Sequence: Synthetic oligonucleotide
aaaauauugguuucucucc

SEQ ID NO: 1549069 - RNA, 19 nt, Artificial Sequence
  Description of Artificial Sequence: Synthetic oligonucleotide
uaucaaaugacacaagggg

SEQ ID NO: 1549070 - RNA, 19 nt, Artificial Sequence
  Description of Artificial Sequence: Synthetic oligonucleotide
uuacauuuuacaaauguag

SEQ ID NO: 1549071 - RNA, 19 nt, Artificial Sequence
  Description of Artificial Sequence: Synthetic oligonucleotide
aguaguuccaccucgaagg

SEQ ID NO: 1549072 - RNA, 19 nt, Artificial Sequence
  Description of Artificial Sequence: Synthetic oligonucleotide
uccaaaauauugcacaacg

SEQ ID NO: 1549073 - RNA, 19 nt, Artificial Sequence
  Description of Artificial Sequence: Synthetic oligonucleotide
aaggggucaauccagacac

SEQ ID NO: 1549074 - RNA, 19 nt, Artificial Sequence
  Description of Artificial Sequence: Synthetic oligonucleotide
aaaccagguaaauuagugc

SEQ ID NO: 1549075 - RNA, 19 nt, Artificial Sequence
  Description of Artificial Sequence: Synthetic oligonucleotide
uuuagggccacuuugaucu

SEQ ID NO: 1549076 - RNA, 19 nt, Artificial Sequence
  Description of Artificial Sequence: Synthetic oligonucleotide
gaagaggaggcccagaucg

SEQ ID NO: 1549077 - RNA, 19 nt, Artificial Sequence
  Description of Artificial Sequence: Synthetic oligonucleotide
auucuuagcaagaugaucc

SEQ ID NO: 1549078 - RNA, 19 nt, Artificial Sequence
  Description of Artificial Sequence: Synthetic oligonucleotide
aaaauuacguuucuuacau

SEQ ID NO: 1549079 - RNA, 19 nt, Artificial Sequence
  Description of Artificial Sequence: Synthetic oligonucleotide
acuggaacaauauaaaacu

SEQ ID NO: 1549080 - RNA, 19 nt, Artificial Sequence
  Description of Artificial Sequence: Synthetic oligonucleotide
auucaauacaaacggacac

SEQ ID NO: 1549081 - RNA, 19 nt, Artificial Sequence
  Description of Artificial Sequence: Synthetic oligonucleotide
uuauauaucaugcuuuuaa

SEQ ID NO: 1549082 - RNA, 19 nt, Artificial Sequence
  Description of Artificial Sequence: Synthetic oligonucleotide
uacaaauaggagaugauga

SEQ ID NO: 1549083 - RNA, 19 nt, Artificial Sequence
  Description of Artificial Sequence: Synthetic oligonucleotide
uaugaaaccagguaaauua

SEQ ID NO: 1549084 - RNA, 19 nt, Artificial Sequence
  Description of Artificial Sequence: Synthetic oligonucleotide
agcaagaugauccaccuuc

SEQ ID NO: 1549085 - RNA, 19 nt, Artificial Sequence
  Description of Artificial Sequence: Synthetic oligonucleotide
ucuagauuugcgaugagac

SEQ ID NO: 1549086 - RNA, 19 nt, Artificial Sequence
  Description of Artificial Sequence: Synthetic oligonucleotide
uauaucaugcuuuuaauua

SEQ ID NO: 1549087 - RNA, 19 nt, Artificial Sequence
  Description of Artificial Sequence: Synthetic oligonucleotide
aauuacguuucuuacauua

SEQ ID NO: 1549088 - RNA, 19 nt, Artificial Sequence
  Description of Artificial Sequence: Synthetic oligonucleotide
aagaugauccaccuucagg

SEQ ID NO: 1549089 - RNA, 19 nt, Artificial Sequence
  Description of Artificial Sequence: Synthetic oligonucleotide
auaucaugcuuuuaauuac

SEQ ID NO: 1549090 - RNA, 19 nt, Artificial Sequence
  Description of Artificial Sequence: Synthetic oligonucleotide
aacaagcuggcuugggugc

SEQ ID NO: 1549091 - RNA, 19 nt, Artificial Sequence
  Description of Artificial Sequence: Synthetic oligonucleotide
ucucauuccaaaauauugc

SEQ ID NO: 1549092 - RNA, 19 nt, Artificial Sequence
  Description of Artificial Sequence: Synthetic oligonucleotide
ugaaacuaaaucucuaaac

SEQ ID NO: 1549093 - RNA, 19 nt, Artificial Sequence
  Description of Artificial Sequence: Synthetic oligonucleotide
uacuggaacaauauaaaac

SEQ ID NO: 1549094 - RNA, 19 nt, Artificial Sequence
  Description of Artificial Sequence: Synthetic oligonucleotide
ugcgaugagacacugaacu

SEQ ID NO: 1549095 - RNA, 19 nt, Artificial Sequence
  Description of Artificial Sequence: Synthetic oligonucleotide
uguuuugaaacuaaaucuc

SEQ ID NO: 1549096 - RNA, 19 nt, Artificial Sequence
  Description of Artificial Sequence: Synthetic oligonucleotide
ugugugagaaaacaagcug

SEQ ID NO: 1549097 - RNA, 19 nt, Artificial Sequence
  Description of Artificial Sequence: Synthetic oligonucleotide
uagcaaauuauucaauaca

SEQ ID NO: 1549098 - RNA, 19 nt, Artificial Sequence
  Description of Artificial Sequence: Synthetic oligonucleotide
ucaaaugacacaaggggcu

SEQ ID NO: 1549099 - RNA, 19 nt, Artificial Sequence
  Description of Artificial Sequence: Synthetic oligonucleotide
ucucuaaacacaccaaugu

SEQ ID NO: 1549100 - RNA, 19 nt, Artificial Sequence
  Description of Artificial Sequence: Synthetic oligonucleotide
aaugucuagauuugcgaug

SEQ ID NO: 1549101 - RNA, 19 nt, Artificial Sequence
  Description of Artificial Sequence: Synthetic oligonucleotide
uuaaaagccgcucuaguuc

SEQ ID NO: 1549102 - RNA, 19 nt, Artificial Sequence
  Description of Artificial Sequence: Synthetic oligonucleotide
uuugcgaugagacacugaa

SEQ ID NO: 1549103 - RNA, 19 nt, Artificial Sequence
  Description of Artificial Sequence: Synthetic oligonucleotide
aaauaggagaugaugaagu

SEQ ID NO: 1549104 - RNA, 19 nt, Artificial Sequence
  Description of Artificial Sequence: Synthetic oligonucleotide
acuaaaucucuaaacacac

SEQ ID NO: 1549105 - RNA, 19 nt, Artificial Sequence
  Description of Artificial Sequence: Synthetic oligonucleotide
aucaaaugacacaaggggc

SEQ ID NO: 1549106 - RNA, 19 nt, Artificial Sequence
  Description of Artificial Sequence: Synthetic oligonucleotide
aaauauugguuucucuccu

SEQ ID NO: 1549107 - RNA, 19 nt, Artificial Sequence
  Description of Artificial Sequence: Synthetic oligonucleotide
auuauauauaccucuuaca

SEQ ID NO: 1549108 - RNA, 19 nt, Artificial Sequence
  Description of Artificial Sequence: Synthetic oligonucleotide
gaaguuuagggccacuuug

SEQ ID NO: 1549109 - RNA, 19 nt, Artificial Sequence
  Description of Artificial Sequence: Synthetic oligonucleotide
cuuagcaagaugauccacc

SEQ ID NO: 1549110 - RNA, 19 nt, Artificial Sequence
  Description of Artificial Sequence: Synthetic oligonucleotide
uacaaaaugucuugauugc

SEQ ID NO: 1549111 - RNA, 19 nt, Artificial Sequence
  Description of Artificial Sequence: Synthetic oligonucleotide
aacuaaaucucuaaacaca

SEQ ID NO: 1549112 - RNA, 19 nt, Artificial Sequence
  Description of Artificial Sequence: Synthetic oligonucleotide
gaggcuauugaccagggac

SEQ ID NO: 1549113 - RNA, 19 nt, Artificial Sequence
  Description of Artificial Sequence: Synthetic oligonucleotide
aaucucuaaacacaccaau

SEQ ID NO: 1549114 - RNA, 19 nt, Artificial Sequence
  Description of Artificial Sequence: Synthetic oligonucleotide
uagauuugcgaugagacac

SEQ ID NO: 1549115 - RNA, 19 nt, Artificial Sequence
  Description of Artificial Sequence: Synthetic oligonucleotide
ucccaaacaggucugcccg

SEQ ID NO: 1549116 - RNA, 19 nt, Artificial Sequence
  Description of Artificial Sequence: Synthetic oligonucleotide
ucagguuugcuccugggug

SEQ ID NO: 1549117 - RNA, 19 nt, Artificial Sequence
  Description of Artificial Sequence: Synthetic oligonucleotide
uccuauaucaaaugacaca

SEQ ID NO: 1549118 - RNA, 19 nt, Artificial Sequence
  Description of Artificial Sequence: Synthetic oligonucleotide
aaaacaagcuggcuugggu

SEQ ID NO: 1549119 - RNA, 19 nt, Artificial Sequence
  Description of Artificial Sequence: Synthetic oligonucleotide
uaaaagccgcucuaguucc

SEQ ID NO: 1549120 - RNA, 19 nt, Artificial Sequence
  Description of Artificial Sequence: Synthetic oligonucleotide
cugaauacaaaaugucuug

SEQ ID NO: 1549121 - RNA, 19 nt, Artificial Sequence
  Description of Artificial Sequence: Synthetic oligonucleotide
uguagcaaauuauucaaua

SEQ ID NO: 1549122 - RNA, 19 nt, Artificial Sequence
  Description of Artificial Sequence: Synthetic oligonucleotide
uggacugacggcuacauuc

SEQ ID NO: 1549123 - RNA, 19 nt, Artificial Sequence
  Description of Artificial Sequence: Synthetic oligonucleotide
uauauuauauauaccucuu

SEQ ID NO: 1549124 - RNA, 19 nt, Artificial Sequence
  Description of Artificial Sequence: Synthetic oligonucleotide
uuacguuucuuacauuaga

SEQ ID NO: 1549125 - RNA, 19 nt, Artificial Sequence
  Description of Artificial Sequence: Synthetic oligonucleotide
uaccaucuccccaaugugg

SEQ ID NO: 1549126 - RNA, 19 nt, Artificial Sequence
  Description of Artificial Sequence: Synthetic oligonucleotide
gaaaccagguaaauuagug

SEQ ID NO: 1549127 - RNA, 19 nt, Artificial Sequence
  Description of Artificial Sequence: Synthetic oligonucleotide
aauacuggaacaauauaaa

SEQ ID NO: 1549128 - RNA, 19 nt, Artificial Sequence
  Description of Artificial Sequence: Synthetic oligonucleotide
ugacuugucccagagaggc

SEQ ID NO: 1549129 - RNA, 19 nt, Artificial Sequence
  Description of Artificial Sequence: Synthetic oligonucleotide
uaucaugcuuuuaauuaca

SEQ ID NO: 1549130 - RNA, 19 nt, Artificial Sequence
  Description of Artificial Sequence: Synthetic oligonucleotide
uuucuuacauuagaaauau

SEQ ID NO: 1549131 - RNA, 19 nt, Artificial Sequence
  Description of Artificial Sequence: Synthetic oligonucleotide
guagcaaauuauucaauac

SEQ ID NO: 1549132 - RNA, 19 nt, Artificial Sequence
  Description of Artificial Sequence: Synthetic oligonucleotide
uuccuauaucaaaugacac

SEQ ID NO: 1549133 - RNA, 19 nt, Artificial Sequence
  Description of Artificial Sequence: Synthetic oligonucleotide
uauauaucaugcuuuuaau

SEQ ID NO: 1549134 - RNA, 19 nt, Artificial Sequence
  Description of Artificial Sequence: Synthetic oligonucleotide
agcugcaugauccucucuc

SEQ ID NO: 1549135 - RNA, 19 nt, Artificial Sequence
  Description of Artificial Sequence: Synthetic oligonucleotide
uugcacaacguucugaaua

SEQ ID NO: 1549136 - RNA, 19 nt, Artificial Sequence
  Description of Artificial Sequence: Synthetic oligonucleotide
ucaauacaaacggacacca

SEQ ID NO: 1549137 - RNA, 19 nt, Artificial Sequence
  Description of Artificial Sequence: Synthetic oligonucleotide
uucaauacaaacggacacc

SEQ ID NO: 1549138 - RNA, 19 nt, Artificial Sequence
  Description of Artificial Sequence: Synthetic oligonucleotide
aaugccuauucccacccca

SEQ ID NO: 1549139 - RNA, 19 nt, Artificial Sequence
  Description of Artificial Sequence: Synthetic oligonucleotide
agggagguagagcuagugc

SEQ ID NO: 1549140 - RNA, 19 nt, Artificial Sequence
  Description of Artificial Sequence: Synthetic oligonucleotide
uauugcacaacguucugaa

SEQ ID NO: 1549141 - RNA, 19 nt, Artificial Sequence
  Description of Artificial Sequence: Synthetic oligonucleotide
aacaggucugcccgucgcc

SEQ ID NO: 1549142 - RNA, 19 nt, Artificial Sequence
  Description of Artificial Sequence: Synthetic oligonucleotide
uguacagauuugaucaauc

SEQ ID NO: 1549143 - RNA, 19 nt, Artificial Sequence
  Description of Artificial Sequence: Synthetic oligonucleotide
ucauuccaaaauauugcac

SEQ ID NO: 1549144 - RNA, 19 nt, Artificial Sequence
  Description of Artificial Sequence: Synthetic oligonucleotide
gacggcuacauucuuagca

SEQ ID NO: 1549145 - RNA, 19 nt, Artificial Sequence
  Description of Artificial Sequence: Synthetic oligonucleotide
uuagcaagaugauccaccu

SEQ ID NO: 1549146 - RNA, 19 nt, Artificial Sequence
  Description of Artificial Sequence: Synthetic oligonucleotide
ucaaugccuauucccaccc

SEQ ID NO: 1549147 - RNA, 19 nt, Artificial Sequence
  Description of Artificial Sequence: Synthetic oligonucleotide
ugcuuuuaauuacaaacuu

SEQ ID NO: 1549148 - RNA, 19 nt, Artificial Sequence
  Description of Artificial Sequence: Synthetic oligonucleotide
ugcacaacguucugaauac

SEQ ID NO: 1549149 - RNA, 19 nt, Artificial Sequence
  Description of Artificial Sequence: Synthetic oligonucleotide
aaugacacaaggggcuggg

SEQ ID NO: 1549150 - RNA, 19 nt, Artificial Sequence
  Description of Artificial Sequence: Synthetic oligonucleotide
ugaauacaaaaugucuuga

SEQ ID NO: 1549151 - RNA, 19 nt, Artificial Sequence
  Description of Artificial Sequence: Synthetic oligonucleotide
cagcauucuggacugacgg

SEQ ID NO: 1549152 - RNA, 19 nt, Artificial Sequence
  Description of Artificial Sequence: Synthetic oligonucleotide
augauccucucucaggcag

SEQ ID NO: 1549153 - RNA, 19 nt, Artificial Sequence
  Description of Artificial Sequence: Synthetic oligonucleotide
acaaauaggagaugaugaa

SEQ ID NO: 1549154 - RNA, 19 nt, Artificial Sequence
  Description of Artificial Sequence: Synthetic oligonucleotide
uacagauuugaucaaucuu

SEQ ID NO: 1549155 - RNA, 19 nt, Artificial Sequence
  Description of Artificial Sequence: Synthetic oligonucleotide
accucuuacauuuuacaaa

SEQ ID NO: 1549156 - RNA, 19 nt, Artificial Sequence
  Description of Artificial Sequence: Synthetic oligonucleotide
cugacggcuacauucuuag

SEQ ID NO: 1549157 - RNA, 19 nt, Artificial Sequence
  Description of Artificial Sequence: Synthetic oligonucleotide
agcaaauuauucaauacaa

SEQ ID NO: 1549158 - RNA, 19 nt, Artificial Sequence
  Description of Artificial Sequence: Synthetic oligonucleotide
acugcuagaccacugcgcu

SEQ ID NO: 1549159 - RNA, 19 nt, Artificial Sequence
  Description of Artificial Sequence: Synthetic oligonucleotide
gagaccuacagaaucagga

SEQ ID NO: 1549160 - RNA, 19 nt, Artificial Sequence
  Description of Artificial Sequence: Synthetic oligonucleotide
uagagcuagugcccaaugc

SEQ ID NO: 1549161 - RNA, 19 nt, Artificial Sequence
  Description of Artificial Sequence: Synthetic oligonucleotide
gaacaauauaaaacuguac

SEQ ID NO: 1549162 - RNA, 19 nt, Artificial Sequence
  Description of Artificial Sequence: Synthetic oligonucleotide
uguacaaauaggagaugau

SEQ ID NO: 1549163 - RNA, 19 nt, Artificial Sequence
  Description of Artificial Sequence: Synthetic oligonucleotide
uaccucuuacauuuuacaa

SEQ ID NO: 1549164 - RNA, 19 nt, Artificial Sequence
  Description of Artificial Sequence: Synthetic oligonucleotide
agagaggcuauugaccagg

SEQ ID NO: 1549165 - RNA, 19 nt, Artificial Sequence
  Description of Artificial Sequence: Synthetic oligonucleotide
aagagcccagcccaggagu

SEQ ID NO: 1549166 - RNA, 19 nt, Artificial Sequence
  Description of Artificial Sequence: Synthetic oligonucleotide
ugacacaaggggcugggcu

SEQ ID NO: 1549167 - RNA, 19 nt, Artificial Sequence
  Description of Artificial Sequence: Synthetic oligonucleotide
acugaacugggcccaagag

SEQ ID NO: 1549168 - RNA, 19 nt, Artificial Sequence
  Description of Artificial Sequence: Synthetic oligonucleotide
gaacacucgcuucucuucc

SEQ ID NO: 1549169 - RNA, 19 nt, Artificial Sequence
  Description of Artificial Sequence: Synthetic oligonucleotide
auacuggaacaauauaaaa

SEQ ID NO: 1549170 - RNA, 19 nt, Artificial Sequence
  Description of Artificial Sequence: Synthetic oligonucleotide
aaaugacacaaggggcugg

SEQ ID NO: 1549171 - RNA, 19 nt, Artificial Sequence
  Description of Artificial Sequence: Synthetic oligonucleotide
aaggcaacaccugacuugu

SEQ ID NO: 1549172 - RNA, 19 nt, Artificial Sequence
  Description of Artificial Sequence: Synthetic oligonucleotide
ugaccagggacugaggcug

SEQ ID NO: 1549173 - RNA, 19 nt, Artificial Sequence
  Description of Artificial Sequence: Synthetic oligonucleotide
uagaccacugcgcuuggca

SEQ ID NO: 1549174 - RNA, 19 nt, Artificial Sequence
  Description of Artificial Sequence: Synthetic oligonucleotide
cuaguuccucccaaacagg

SEQ ID NO: 1549175 - RNA, 19 nt, Artificial Sequence
  Description of Artificial Sequence: Synthetic oligonucleotide
cagggacugaggcugaagg

SEQ ID NO: 1549176 - RNA, 19 nt, Artificial Sequence
  Description of Artificial Sequence: Synthetic oligonucleotide
agaucgggcuggcuggagc

SEQ ID NO: 1549177 - RNA, 19 nt, Artificial Sequence
  Description of Artificial Sequence: Synthetic oligonucleotide
uugcuccugggugagaggg

SEQ ID NO: 1549178 - RNA, 19 nt, Artificial Sequence
  Description of Artificial Sequence: Synthetic oligonucleotide
ccugacuugucccagagag

SEQ ID NO: 1549179 - RNA, 19 nt, Artificial Sequence
  Description of Artificial Sequence: Synthetic oligonucleotide
gggugagagggcuagagag

SEQ ID NO: 1549180 - RNA, 19 nt, Artificial Sequence
  Description of Artificial Sequence: Synthetic oligonucleotide
cucaaugccuauucccacc

SEQ ID NO: 1549181 - RNA, 19 nt, Artificial Sequence
  Description of Artificial Sequence: Synthetic oligonucleotide
ggucaauccagacacucag

SEQ ID NO: 1549182 - RNA, 19 nt, Artificial Sequence
  Description of Artificial Sequence: Synthetic oligonucleotide
cuauugaccagggacugag

SEQ ID NO: 1549183 - RNA, 19 nt, Artificial Sequence
  Description of Artificial Sequence: Synthetic oligonucleotide
uuccugaacacucgcuucu

SEQ ID NO: 1549184 - RNA, 19 nt, Artificial Sequence
  Description of Artificial Sequence: Synthetic oligonucleotide
aacguucugaauacaaaau

SEQ ID NO: 1549185 - RNA, 19 nt, Artificial Sequence
  Description of Artificial Sequence: Synthetic oligonucleotide
ugcuagaccacugcgcuug

SEQ ID NO: 1549186 - RNA, 19 nt, Artificial Sequence
  Description of Artificial Sequence: Synthetic oligonucleotide
auauuauauauaccucuua

SEQ ID NO: 1549187 - RNA, 19 nt, Artificial Sequence
  Description of Artificial Sequence: Synthetic oligonucleotide
accaaugucucauuccaaa

SEQ ID NO: 1549188 - RNA, 19 nt, Artificial Sequence
  Description of Artificial Sequence: Synthetic oligonucleotide
aauauugguuucucuccuu

SEQ ID NO: 1549189 - RNA, 19 nt, Artificial Sequence
  Description of Artificial Sequence: Synthetic oligonucleotide
cugggcugagaacucaggg

SEQ ID NO: 1549190 - RNA, 19 nt, Artificial Sequence
  Description of Artificial Sequence: Synthetic oligonucleotide
uauugaccagggacugagg

SEQ ID NO: 1549191 - RNA, 19 nt, Artificial Sequence
  Description of Artificial Sequence: Synthetic oligonucleotide
cucgaaggggucaauccag

SEQ ID NO: 1549192 - RNA, 19 nt, Artificial Sequence
  Description of Artificial Sequence: Synthetic oligonucleotide
agcuuguuguacaaauagg

SEQ ID NO: 1549193 - RNA, 19 nt, Artificial Sequence
  Description of Artificial Sequence: Synthetic oligonucleotide
ugaacacucgcuucucuuc

SEQ ID NO: 1549194 - RNA, 19 nt, Artificial Sequence
  Description of Artificial Sequence: Synthetic oligonucleotide
guaguuccaccucgaaggg

SEQ ID NO: 1549195 - RNA, 19 nt, Artificial Sequence
  Description of Artificial Sequence: Synthetic oligonucleotide
gaaaacaagcuggcuuggg

SEQ ID NO: 1549196 - RNA, 19 nt, Artificial Sequence
  Description of Artificial Sequence: Synthetic oligonucleotide
ugucggucugggcugaacu

SEQ ID NO: 1549197 - RNA, 19 nt, Artificial Sequence
  Description of Artificial Sequence: Synthetic oligonucleotide
uugcauucuuccuucacua

SEQ ID NO: 1549198 - RNA, 19 nt, Artificial Sequence
  Description of Artificial Sequence: Synthetic oligonucleotide
gguaaauuagugcagauuu

SEQ ID NO: 1549199 - RNA, 19 nt, Artificial Sequence
  Description of Artificial Sequence: Synthetic oligonucleotide
aaaaggucaucgcccugcu

SEQ ID NO: 1549200 - RNA, 19 nt, Artificial Sequence
  Description of Artificial Sequence: Synthetic oligonucleotide
ugugcacgugggaggaggg

SEQ ID NO: 1549201 - RNA, 19 nt, Artificial Sequence
  Description of Artificial Sequence: Synthetic oligonucleotide
auuacguuucuuacauuag

SEQ ID NO: 1549202 - RNA, 19 nt, Artificial Sequence
  Description of Artificial Sequence: Synthetic oligonucleotide
auuauucaauacaaacgga

SEQ ID NO: 1549203 - RNA, 19 nt, Artificial Sequence
  Description of Artificial Sequence: Synthetic oligonucleotide
auucccaccccagggagac

SEQ ID NO: 1549204 - RNA, 19 nt, Artificial Sequence
  Description of Artificial Sequence: Synthetic oligonucleotide
ugucuugauugcauucuuc

SEQ ID NO: 1549205 - RNA, 19 nt, Artificial Sequence
  Description of Artificial Sequence: Synthetic oligonucleotide
gauugcauucuuccuucac

SEQ ID NO: 1549206 - RNA, 19 nt, Artificial Sequence
  Description of Artificial Sequence: Synthetic oligonucleotide
augucuagauuugcgauga

SEQ ID NO: 1549207 - RNA, 19 nt, Artificial Sequence
  Description of Artificial Sequence: Synthetic oligonucleotide
gguaccugugugcacgugg

SEQ ID NO: 1549208 - RNA, 19 nt, Artificial Sequence
  Description of Artificial Sequence: Synthetic oligonucleotide
ugccuauucccaccccagg

SEQ ID NO: 1549209 - RNA, 19 nt, Artificial Sequence
  Description of Artificial Sequence: Synthetic oligonucleotide
guuucuuacauuagaaaua

SEQ ID NO: 1549210 - RNA, 19 nt, Artificial Sequence
  Description of Artificial Sequence: Synthetic oligonucleotide
aggagucacguuccugaac

SEQ ID NO: 1549211 - RNA, 19 nt, Artificial Sequence
  Description of Artificial Sequence: Synthetic oligonucleotide
cuauucccaccccagggag

SEQ ID NO: 1549212 - RNA, 19 nt, Artificial Sequence
  Description of Artificial Sequence: Synthetic oligonucleotide
aaaucucuaaacacaccaa

SEQ ID NO: 1549213 - RNA, 19 nt, Artificial Sequence
  Description of Artificial Sequence: Synthetic oligonucleotide
caacguucugaauacaaaa

SEQ ID NO: 1549214 - RNA, 19 nt, Artificial Sequence
  Description of Artificial Sequence: Synthetic oligonucleotide
gagagggcuagagaggaug

SEQ ID NO: 1549215 - RNA, 19 nt, Artificial Sequence
  Description of Artificial Sequence: Synthetic oligonucleotide
acguuucuuacauuagaaa

SEQ ID NO: 1549216 - RNA, 19 nt, Artificial Sequence
  Description of Artificial Sequence: Synthetic oligonucleotide
ugaaguuuagggccacuuu

SEQ ID NO: 1549217 - RNA, 19 nt, Artificial Sequence
  Description of Artificial Sequence: Synthetic oligonucleotide
agaccacugcgcuuggcag

SEQ ID NO: 1549218 - RNA, 19 nt, Artificial Sequence
  Description of Artificial Sequence: Synthetic oligonucleotide
caguaguuccaccucgaag

SEQ ID NO: 1549219 - RNA, 19 nt, Artificial Sequence
  Description of Artificial Sequence: Synthetic oligonucleotide
aacaccugacuugucccag

SEQ ID NO: 1549220 - RNA, 19 nt, Artificial Sequence
  Description of Artificial Sequence: Synthetic oligonucleotide
gacacaaggggcugggcuc

SEQ ID NO: 1549221 - RNA, 19 nt, Artificial Sequence
  Description of Artificial Sequence: Synthetic oligonucleotide
cacugcuagaccacugcgc

SEQ ID NO: 1549222 - RNA, 19 nt, Artificial Sequence
  Description of Artificial Sequence: Synthetic oligonucleotide
ggagucacguuccugaaca

SEQ ID NO: 1549223 - RNA, 19 nt, Artificial Sequence
  Description of Artificial Sequence: Synthetic oligonucleotide
cauucuuagcaagaugauc

SEQ ID NO: 1549224 - RNA, 19 nt, Artificial Sequence
  Description of Artificial Sequence: Synthetic oligonucleotide
gcaugauccucucucaggc

SEQ ID NO: 1549225 - RNA, 19 nt, Artificial Sequence
  Description of Artificial Sequence: Synthetic oligonucleotide
aacucagggccagccuugc

SEQ ID NO: 1549226 - RNA, 19 nt, Artificial Sequence
  Description of Artificial Sequence: Synthetic oligonucleotide
aaaagguuuuauguuccua

SEQ ID NO: 1549227 - RNA, 19 nt, Artificial Sequence
  Description of Artificial Sequence: Synthetic oligonucleotide
uuugcuccugggugagagg

SEQ ID NO: 1549228 - RNA, 19 nt, Artificial Sequence
  Description of Artificial Sequence: Synthetic oligonucleotide
acggcuacauucuuagcaa

SEQ ID NO: 1549229 - RNA, 19 nt, Artificial Sequence
  Description of Artificial Sequence: Synthetic oligonucleotide
accacugcgcuuggcagcc

SEQ ID NO: 1549230 - RNA, 19 nt, Artificial Sequence
  Description of Artificial Sequence: Synthetic oligonucleotide
gcuagugcccaaugcaagg

SEQ ID NO: 1549231 - RNA, 19 nt, Artificial Sequence
  Description of Artificial Sequence: Synthetic oligonucleotide
guuugcuccugggugagag

SEQ ID NO: 1549232 - RNA, 19 nt, Artificial Sequence
  Description of Artificial Sequence: Synthetic oligonucleotide
cugacuugucccagagagg

SEQ ID NO: 1549233 - RNA, 19 nt, Artificial Sequence
  Description of Artificial Sequence: Synthetic oligonucleotide
uccccugugugagaaaaca

SEQ ID NO: 1549234 - RNA, 19 nt, Artificial Sequence
  Description of Artificial Sequence: Synthetic oligonucleotide
aaauuacguuucuuacauu

SEQ ID NO: 1549235 - RNA, 19 nt, Artificial Sequence
  Description of Artificial Sequence: Synthetic oligonucleotide
cuagauuugcgaugagaca

SEQ ID NO: 1549236 - RNA, 19 nt, Artificial Sequence
  Description of Artificial Sequence: Synthetic oligonucleotide
auauaccucuuacauuuua

SEQ ID NO: 1549237 - RNA, 19 nt, Artificial Sequence
  Description of Artificial Sequence: Synthetic oligonucleotide
acacaaggggcugggcucc

SEQ ID NO: 1549238 - RNA, 19 nt, Artificial Sequence
  Description of Artificial Sequence: Synthetic oligonucleotide
gcuggagcagacuagggac

SEQ ID NO: 1549239 - RNA, 19 nt, Artificial Sequence
  Description of Artificial Sequence: Synthetic oligonucleotide
uguggacacagcggaagcc

SEQ ID NO: 1549240 - RNA, 19 nt, Artificial Sequence
  Description of Artificial Sequence: Synthetic oligonucleotide
guuuagggccacuuugauc

SEQ ID NO: 1549241 - RNA, 19 nt, Artificial Sequence
  Description of Artificial Sequence: Synthetic oligonucleotide
gaacucacugccgcaguag

SEQ ID NO: 1549242 - RNA, 19 nt, Artificial Sequence
  Description of Artificial Sequence: Synthetic oligonucleotide
ugggugagagggcuagaga

SEQ ID NO: 1549243 - RNA, 19 nt, Artificial Sequence
  Description of Artificial Sequence: Synthetic oligonucleotide
guaccugugugcacguggg

SEQ ID NO: 1549244 - RNA, 19 nt, Artificial Sequence
  Description of Artificial Sequence: Synthetic oligonucleotide
acgcacauccuccacugcu

SEQ ID NO: 1549245 - RNA, 19 nt, Artificial Sequence
  Description of Artificial Sequence: Synthetic oligonucleotide
gauuugcgaugagacacug

SEQ ID NO: 1549246 - RNA, 19 nt, Artificial Sequence
  Description of Artificial Sequence: Synthetic oligonucleotide
acugccgcaguaguuccac

SEQ ID NO: 1549247 - RNA, 19 nt, Artificial Sequence
  Description of Artificial Sequence: Synthetic oligonucleotide
ugccgcaguaguuccaccu

SEQ ID NO: 1549248 - RNA, 19 nt, Artificial Sequence
  Description of Artificial Sequence: Synthetic oligonucleotide
uggagcagacuagggacag

SEQ ID NO: 1549249 - RNA, 19 nt, Artificial Sequence
  Description of Artificial Sequence: Synthetic oligonucleotide
gccagaaccuuucaauggc

SEQ ID NO: 1549250 - RNA, 19 nt, Artificial Sequence
  Description of Artificial Sequence: Synthetic oligonucleotide
agagggcuagagaggaugg

SEQ ID NO: 1549251 - RNA, 19 nt, Artificial Sequence
  Description of Artificial Sequence: Synthetic oligonucleotide
accugugugcacgugggag

SEQ ID NO: 1549252 - RNA, 19 nt, Artificial Sequence
  Description of Artificial Sequence: Synthetic oligonucleotide
gaccacugcgcuuggcagc

SEQ ID NO: 1549253 - RNA, 19 nt, Artificial Sequence
  Description of Artificial Sequence: Synthetic oligonucleotide
accagguaaauuagugcag

SEQ ID NO: 1549254 - RNA, 19 nt, Artificial Sequence
  Description of Artificial Sequence: Synthetic oligonucleotide
aguuuagggccacuuugau

SEQ ID NO: 1549255 - RNA, 19 nt, Artificial Sequence
  Description of Artificial Sequence: Synthetic oligonucleotide
ugaacucacugccgcagua

SEQ ID NO: 1549256 - RNA, 19 nt, Artificial Sequence
  Description of Artificial Sequence: Synthetic oligonucleotide
guagagcuagugcccaaug

SEQ ID NO: 1549257 - RNA, 19 nt, Artificial Sequence
  Description of Artificial Sequence: Synthetic oligonucleotide
caaacaggucugcccgucg

SEQ ID NO: 1549258 - RNA, 19 nt, Artificial Sequence
  Description of Artificial Sequence: Synthetic oligonucleotide
cucacugccgcaguaguuc

SEQ ID NO: 1549259 - RNA, 19 nt, Artificial Sequence
  Description of Artificial Sequence: Synthetic oligonucleotide
auucuuccuucacuagaga

SEQ ID NO: 1549260 - RNA, 19 nt, Artificial Sequence
  Description of Artificial Sequence: Synthetic oligonucleotide
guuccugaacacucgcuuc

SEQ ID NO: 1549261 - RNA, 19 nt, Artificial Sequence
  Description of Artificial Sequence: Synthetic oligonucleotide
cuucucuuccuauaucaaa

SEQ ID NO: 1549262 - RNA, 19 nt, Artificial Sequence
  Description of Artificial Sequence: Synthetic oligonucleotide
cagacacucagcuccucug

SEQ ID NO: 1549263 - RNA, 19 nt, Artificial Sequence
  Description of Artificial Sequence: Synthetic oligonucleotide
uugcgaugagacacugaac

SEQ ID NO: 1549264 - RNA, 19 nt, Artificial Sequence
  Description of Artificial Sequence: Synthetic oligonucleotide
cagcccaggagucacguuc

SEQ ID NO: 1549265 - RNA, 19 nt, Artificial Sequence
  Description of Artificial Sequence: Synthetic oligonucleotide
gauccucucucaggcagag

SEQ ID NO: 1549266 - RNA, 19 nt, Artificial Sequence
  Description of Artificial Sequence: Synthetic oligonucleotide
agaggaugggaaaggggag

SEQ ID NO: 1549267 - RNA, 19 nt, Artificial Sequence
  Description of Artificial Sequence: Synthetic oligonucleotide
cacaacguucugaauacaa

SEQ ID NO: 1549268 - RNA, 19 nt, Artificial Sequence
  Description of Artificial Sequence: Synthetic oligonucleotide
ugauugcauucuuccuuca

SEQ ID NO: 1549269 - RNA, 19 nt, Artificial Sequence
  Description of Artificial Sequence: Synthetic oligonucleotide
ugucuagauuugcgaugag

SEQ ID NO: 1549270 - RNA, 19 nt, Artificial Sequence
  Description of Artificial Sequence: Synthetic oligonucleotide
caaaugacacaaggggcug

SEQ ID NO: 1549271 - RNA, 19 nt, Artificial Sequence
  Description of Artificial Sequence: Synthetic oligonucleotide
gcuagagaggaugggaaag

SEQ ID NO: 1549272 - RNA, 19 nt, Artificial Sequence
  Description of Artificial Sequence: Synthetic oligonucleotide
ucuccccugugugagaaaa

SEQ ID NO: 1549273 - RNA, 19 nt, Artificial Sequence
  Description of Artificial Sequence: Synthetic oligonucleotide
ccuuucaauggcuucucag

SEQ ID NO: 1549274 - RNA, 19 nt, Artificial Sequence
  Description of Artificial Sequence: Synthetic oligonucleotide
gaucgggcuggcuggagca

SEQ ID NO: 1549275 - RNA, 19 nt, Artificial Sequence
  Description of Artificial Sequence: Synthetic oligonucleotide
gccuauucccaccccaggg

SEQ ID NO: 1549276 - RNA, 19 nt, Artificial Sequence
  Description of Artificial Sequence: Synthetic oligonucleotide
uuccucccaaacaggucug

SEQ ID NO: 1549277 - RNA, 19 nt, Artificial Sequence
  Description of Artificial Sequence: Synthetic oligonucleotide
cccagagaggcuauugacc

SEQ ID NO: 1549278 - RNA, 19 nt, Artificial Sequence
  Description of Artificial Sequence: Synthetic oligonucleotide
aggcuauugaccagggacu

SEQ ID NO: 1549279 - RNA, 19 nt, Artificial Sequence
  Description of Artificial Sequence: Synthetic oligonucleotide
cugcaugauccucucucag

SEQ ID NO: 1549280 - RNA, 19 nt, Artificial Sequence
  Description of Artificial Sequence: Synthetic oligonucleotide
cucuaguuccucccaaaca

SEQ ID NO: 1549281 - RNA, 19 nt, Artificial Sequence
  Description of Artificial Sequence: Synthetic oligonucleotide
gugugcacgugggaggagg

SEQ ID NO: 1549282 - RNA, 19 nt, Artificial Sequence
  Description of Artificial Sequence: Synthetic oligonucleotide
aguuccucccaaacagguc

SEQ ID NO: 1549283 - RNA, 19 nt, Artificial Sequence
  Description of Artificial Sequence: Synthetic oligonucleotide
ggugagagggcuagagagg

SEQ ID NO: 1549284 - RNA, 19 nt, Artificial Sequence
  Description of Artificial Sequence: Synthetic oligonucleotide
agggucuaccaucucccca

SEQ ID NO: 1549285 - RNA, 19 nt, Artificial Sequence
  Description of Artificial Sequence: Synthetic oligonucleotide
cugugugagaaaacaagcu

SEQ ID NO: 1549286 - RNA, 19 nt, Artificial Sequence
  Description of Artificial Sequence: Synthetic oligonucleotide
gacuagggacagguggugc

SEQ ID NO: 1549287 - RNA, 19 nt, Artificial Sequence
  Description of Artificial Sequence: Synthetic oligonucleotide
agguaaauuagugcagauu

SEQ ID NO: 1549288 - RNA, 19 nt, Artificial Sequence
  Description of Artificial Sequence: Synthetic oligonucleotide
auuauauaucaugcuuuua

SEQ ID NO: 1549289 - RNA, 19 nt, Artificial Sequence
  Description of Artificial Sequence: Synthetic oligonucleotide
acaacguucugaauacaaa

SEQ ID NO: 1549290 - RNA, 19 nt, Artificial Sequence
  Description of Artificial Sequence: Synthetic oligonucleotide
gagggcuagagaggauggg

SEQ ID NO: 1549291 - RNA, 19 nt, Artificial Sequence
  Description of Artificial Sequence: Synthetic oligonucleotide
gugagagggcuagagagga

SEQ ID NO: 1549292 - RNA, 19 nt, Artificial Sequence
  Description of Artificial Sequence: Synthetic oligonucleotide
gucuagauuugcgaugaga

SEQ ID NO: 1549293 - RNA, 19 nt, Artificial Sequence
  Description of Artificial Sequence: Synthetic oligonucleotide
gaacucagggccagccuug

SEQ ID NO: 1549294 - RNA, 19 nt, Artificial Sequence
  Description of Artificial Sequence: Synthetic oligonucleotide
agggcuagagaggauggga

SEQ ID NO: 1549295 - RNA, 19 nt, Artificial Sequence
  Description of Artificial Sequence: Synthetic oligonucleotide
auugcacaacguucugaau

SEQ ID NO: 1549296 - RNA, 19 nt, Artificial Sequence
  Description of Artificial Sequence: Synthetic oligonucleotide
accaucuccccaaugugga

SEQ ID NO: 1549297 - RNA, 19 nt, Artificial Sequence
  Description of Artificial Sequence: Synthetic oligonucleotide
caccugacuugucccagag

SEQ ID NO: 1549298 - RNA, 19 nt, Artificial Sequence
  Description of Artificial Sequence: Synthetic oligonucleotide
augacacaaggggcugggc

SEQ ID NO: 1549299 - RNA, 19 nt, Artificial Sequence
  Description of Artificial Sequence: Synthetic oligonucleotide
agauuugcgaugagacacu

SEQ ID NO: 1549300 - RNA, 19 nt, Artificial Sequence
  Description of Artificial Sequence: Synthetic oligonucleotide
cauccuccacugcuagacc

SEQ ID NO: 1549301 - RNA, 19 nt, Artificial Sequence
  Description of Artificial Sequence: Synthetic oligonucleotide
cugccucaaugccuauucc

SEQ ID NO: 1549302 - RNA, 19 nt, Artificial Sequence
  Description of Artificial Sequence: Synthetic oligonucleotide
ugacggcuacauucuuagc

SEQ ID NO: 1549303 - RNA, 19 nt, Artificial Sequence
  Description of Artificial Sequence: Synthetic oligonucleotide
ugaugaaguuuagggccac

SEQ ID NO: 1549304 - RNA, 19 nt, Artificial Sequence
  Description of Artificial Sequence: Synthetic oligonucleotide
cagguuugcuccuggguga

SEQ ID NO: 1549305 - RNA, 19 nt, Artificial Sequence
  Description of Artificial Sequence: Synthetic oligonucleotide
augaaguuuagggccacuu

SEQ ID NO: 1549306 - RNA, 19 nt, Artificial Sequence
  Description of Artificial Sequence: Synthetic oligonucleotide
gcugccucaaugccuauuc

SEQ ID NO: 1549307 - RNA, 19 nt, Artificial Sequence
  Description of Artificial Sequence: Synthetic oligonucleotide
agaggcuauugaccaggga

SEQ ID NO: 1549308 - RNA, 19 nt, Artificial Sequence
  Description of Artificial Sequence: Synthetic oligonucleotide
gagucacguuccugaacac

SEQ ID NO: 1549309 - RNA, 19 nt, Artificial Sequence
  Description of Artificial Sequence: Synthetic oligonucleotide
aucgcccugcuuccagcuc

SEQ ID NO: 1549310 - RNA, 19 nt, Artificial Sequence
  Description of Artificial Sequence: Synthetic oligonucleotide
gguuuuauguuccuauuuu

SEQ ID NO: 1549311 - RNA, 19 nt, Artificial Sequence
  Description of Artificial Sequence: Synthetic oligonucleotide
gucccagagaggcuauuga

SEQ ID NO: 1549312 - RNA, 19 nt, Artificial Sequence
  Description of Artificial Sequence: Synthetic oligonucleotide
auguagcaaauuauucaau

SEQ ID NO: 1549313 - RNA, 19 nt, Artificial Sequence
  Description of Artificial Sequence: Synthetic oligonucleotide
cuggagcagacuagggaca

SEQ ID NO: 1549314 - RNA, 19 nt, Artificial Sequence
  Description of Artificial Sequence: Synthetic oligonucleotide
agacuagggacagguggug

SEQ ID NO: 1549315 - RNA, 19 nt, Artificial Sequence
  Description of Artificial Sequence: Synthetic oligonucleotide
caaugccuauucccacccc

SEQ ID NO: 1549316 - RNA, 19 nt, Artificial Sequence
  Description of Artificial Sequence: Synthetic oligonucleotide
uaccugugugcacguggga

SEQ ID NO: 1549317 - RNA, 19 nt, Artificial Sequence
  Description of Artificial Sequence: Synthetic oligonucleotide
augccuauucccaccccag

SEQ ID NO: 1549318 - RNA, 19 nt, Artificial Sequence
  Description of Artificial Sequence: Synthetic oligonucleotide
ggagaccuacagaaucagg

SEQ ID NO: 1549319 - RNA, 19 nt, Artificial Sequence
  Description of Artificial Sequence: Synthetic oligonucleotide
gcgaugagacacugaacug

SEQ ID NO: 1549320 - RNA, 19 nt, Artificial Sequence
  Description of Artificial Sequence: Synthetic oligonucleotide
caggucugcccgucgccgg

SEQ ID NO: 1549321 - RNA, 19 nt, Artificial Sequence
  Description of Artificial Sequence: Synthetic oligonucleotide
caacaccugacuuguccca

SEQ ID NO: 1549322 - RNA, 19 nt, Artificial Sequence
  Description of Artificial Sequence: Synthetic oligonucleotide
gagcagacuagggacaggu

SEQ ID NO: 1549323 - RNA, 19 nt, Artificial Sequence
  Description of Artificial Sequence: Synthetic oligonucleotide
acaccugacuugucccaga

SEQ ID NO: 1549324 - RNA, 19 nt, Artificial Sequence
  Description of Artificial Sequence: Synthetic oligonucleotide
gcagugucggucugggcug

SEQ ID NO: 1549325 - RNA, 19 nt, Artificial Sequence
  Description of Artificial Sequence: Synthetic oligonucleotide
uagcaagaugauccaccuu

SEQ ID NO: 1549326 - RNA, 19 nt, Artificial Sequence
  Description of Artificial Sequence: Synthetic oligonucleotide
gguaaggcaacaccugacu

SEQ ID NO: 1549327 - RNA, 19 nt, Artificial Sequence
  Description of Artificial Sequence: Synthetic oligonucleotide
cuagugcccaaugcaagga

SEQ ID NO: 1549328 - RNA, 19 nt, Artificial Sequence
  Description of Artificial Sequence: Synthetic oligonucleotide
gcucuaguuccucccaaac

SEQ ID NO: 1549329 - RNA, 19 nt, Artificial Sequence
  Description of Artificial Sequence: Synthetic oligonucleotide
caugauccucucucaggca

SEQ ID NO: 1549330 - RNA, 19 nt, Artificial Sequence
  Description of Artificial Sequence: Synthetic oligonucleotide
uucuggacugacggcuaca

SEQ ID NO: 1549331 - RNA, 19 nt, Artificial Sequence
  Description of Artificial Sequence: Synthetic oligonucleotide
gcaaauuauucaauacaaa

SEQ ID NO: 1549332 - RNA, 19 nt, Artificial Sequence
  Description of Artificial Sequence: Synthetic oligonucleotide
gcacgcacauccuccacug

SEQ ID NO: 1549333 - RNA, 19 nt, Artificial Sequence
  Description of Artificial Sequence: Synthetic oligonucleotide
ccaggagucacguuccuga

SEQ ID NO: 1549334 - RNA, 19 nt, Artificial Sequence
  Description of Artificial Sequence: Synthetic oligonucleotide
agguuugcuccugggugag

SEQ ID NO: 1549335 - RNA, 19 nt, Artificial Sequence
  Description of Artificial Sequence: Synthetic oligonucleotide
gggucuaccaucuccccaa

SEQ ID NO: 1549336 - RNA, 19 nt, Artificial Sequence
  Description of Artificial Sequence: Synthetic oligonucleotide
uccaccucgaaggggucaa

SEQ ID NO: 1549337 - RNA, 19 nt, Artificial Sequence
  Description of Artificial Sequence: Synthetic oligonucleotide
cacugcgcuuggcagccag

SEQ ID NO: 1549338 - RNA, 19 nt, Artificial Sequence
  Description of Artificial Sequence: Synthetic oligonucleotide
cagacuagggacagguggu

SEQ ID NO: 1549339 - RNA, 19 nt, Artificial Sequence
  Description of Artificial Sequence: Synthetic oligonucleotide
uccucccaaacaggucugc

SEQ ID NO: 1549340 - RNA, 19 nt, Artificial Sequence
  Description of Artificial Sequence: Synthetic oligonucleotide
ccacugcuagaccacugcg

SEQ ID NO: 1549341 - RNA, 19 nt, Artificial Sequence
  Description of Artificial Sequence: Synthetic oligonucleotide
accugacuugucccagaga

SEQ ID NO: 1549342 - RNA, 19 nt, Artificial Sequence
  Description of Artificial Sequence: Synthetic oligonucleotide
ugaucuccagcugcaugau

SEQ ID NO: 1549343 - RNA, 19 nt, Artificial Sequence
  Description of Artificial Sequence: Synthetic oligonucleotide
ggcuauugaccagggacug

SEQ ID NO: 1549344 - RNA, 19 nt, Artificial Sequence
  Description of Artificial Sequence: Synthetic oligonucleotide
gcccagaucgggcuggcug

SEQ ID NO: 1549345 - RNA, 19 nt, Artificial Sequence
  Description of Artificial Sequence: Synthetic oligonucleotide
cacugaacugggcccaaga

SEQ ID NO: 1549346 - RNA, 19 nt, Artificial Sequence
  Description of Artificial Sequence: Synthetic oligonucleotide
cuccccugugugagaaaac

SEQ ID NO: 1549347 - RNA, 19 nt, Artificial Sequence
  Description of Artificial Sequence: Synthetic oligonucleotide
agucuccccugugugagaa

SEQ ID NO: 1549348 - RNA, 19 nt, Artificial Sequence
  Description of Artificial Sequence: Synthetic oligonucleotide
caauacaaacggacaccaa

SEQ ID NO: 1549349 - RNA, 19 nt, Artificial Sequence
  Description of Artificial Sequence: Synthetic oligonucleotide
ucgccggggcagcuuguug

SEQ ID NO: 1549350 - RNA, 19 nt, Artificial Sequence
  Description of Artificial Sequence: Synthetic oligonucleotide
uuagggccacuuugaucuc

SEQ ID NO: 1549351 - RNA, 19 nt, Artificial Sequence
  Description of Artificial Sequence: Synthetic oligonucleotide
auuugcgaugagacacuga

SEQ ID NO: 1549352 - RNA, 19 nt, Artificial Sequence
  Description of Artificial Sequence: Synthetic oligonucleotide
gaugauccaccuucagguu

SEQ ID NO: 1549353 - RNA, 19 nt, Artificial Sequence
  Description of Artificial Sequence: Synthetic oligonucleotide
ccucaaugccuauucccac

SEQ ID NO: 1549354 - RNA, 19 nt, Artificial Sequence
  Description of Artificial Sequence: Synthetic oligonucleotide
cguuucuuacauuagaaau

SEQ ID NO: 1549355 - RNA, 19 nt, Artificial Sequence
  Description of Artificial Sequence: Synthetic oligonucleotide
acaagcuggcuugggugca

SEQ ID NO: 1549356 - RNA, 19 nt, Artificial Sequence
  Description of Artificial Sequence: Synthetic oligonucleotide
ccgcaguaguuccaccucg

SEQ ID NO: 1549357 - RNA, 19 nt, Artificial Sequence
  Description of Artificial Sequence: Synthetic oligonucleotide
acugacggcuacauucuua

SEQ ID NO: 1549358 - RNA, 19 nt, Artificial Sequence
  Description of Artificial Sequence: Synthetic oligonucleotide
uggcacgcacauccuccac

SEQ ID NO: 1549359 - RNA, 19 nt, Artificial Sequence
  Description of Artificial Sequence: Synthetic oligonucleotide
caggugguaccugugugca

SEQ ID NO: 1549360 - RNA, 19 nt, Artificial Sequence
  Description of Artificial Sequence: Synthetic oligonucleotide
cacgcacauccuccacugc

SEQ ID NO: 1549361 - RNA, 19 nt, Artificial Sequence
  Description of Artificial Sequence: Synthetic oligonucleotide
gccucaaugccuauuccca

SEQ ID NO: 1549362 - RNA, 19 nt, Artificial Sequence
  Description of Artificial Sequence: Synthetic oligonucleotide
ccucuggcacauuggcacg

SEQ ID NO: 1549363 - RNA, 19 nt, Artificial Sequence
  Description of Artificial Sequence: Synthetic oligonucleotide
cagccuugcccugcugggg

SEQ ID NO: 1549364 - RNA, 19 nt, Artificial Sequence
  Description of Artificial Sequence: Synthetic oligonucleotide
ucugcccgucgccggggca

SEQ ID NO: 1549365 - RNA, 19 nt, Artificial Sequence
  Description of Artificial Sequence: Synthetic oligonucleotide
gugcacgugggaggagggg

SEQ ID NO: 1549366 - RNA, 19 nt, Artificial Sequence
  Description of Artificial Sequence: Synthetic oligonucleotide
guaaauuagugcagauuuu

SEQ ID NO: 1549367 - RNA, 19 nt, Artificial Sequence
  Description of Artificial Sequence: Synthetic oligonucleotide
ccagucuccccugugugag

SEQ ID NO: 1549368 - RNA, 19 nt, Artificial Sequence
  Description of Artificial Sequence: Synthetic oligonucleotide
cugccgcaguaguuccacc

SEQ ID NO: 1549369 - RNA, 19 nt, Artificial Sequence
  Description of Artificial Sequence: Synthetic oligonucleotide
agcagacuagggacaggug

SEQ ID NO: 1549370 - RNA, 19 nt, Artificial Sequence
  Description of Artificial Sequence: Synthetic oligonucleotide
cuagaccacugcgcuuggc

SEQ ID NO: 1549371 - RNA, 19 nt, Artificial Sequence
  Description of Artificial Sequence: Synthetic oligonucleotide
acacugaacugggcccaag

SEQ ID NO: 1549372 - RNA, 19 nt, Artificial Sequence
  Description of Artificial Sequence: Synthetic oligonucleotide
ggcuagagaggaugggaaa

SEQ ID NO: 1549373 - RNA, 19 nt, Artificial Sequence
  Description of Artificial Sequence: Synthetic oligonucleotide
accuucagguuugcuccug

SEQ ID NO: 1549374 - RNA, 19 nt, Artificial Sequence
  Description of Artificial Sequence: Synthetic oligonucleotide
caccucgaaggggucaauc

SEQ ID NO: 1549375 - RNA, 19 nt, Artificial Sequence
  Description of Artificial Sequence: Synthetic oligonucleotide
cugugugcacgugggagga

SEQ ID NO: 1549376 - RNA, 19 nt, Artificial Sequence
  Description of Artificial Sequence: Synthetic oligonucleotide
ccagguaaauuagugcaga

SEQ ID NO: 1549377 - RNA, 19 nt, Artificial Sequence
  Description of Artificial Sequence: Synthetic oligonucleotide
agcggaagccagaaccuuu

SEQ ID NO: 1549378 - RNA, 19 nt, Artificial Sequence
  Description of Artificial Sequence: Synthetic oligonucleotide
ccuauucccaccccaggga

SEQ ID NO: 1549379 - RNA, 19 nt, Artificial Sequence
  Description of Artificial Sequence: Synthetic oligonucleotide
ggcacauuggcacgcacau

SEQ ID NO: 1549380 - RNA, 19 nt, Artificial Sequence
  Description of Artificial Sequence: Synthetic oligonucleotide
cucgcuucucuuccuauau

SEQ ID NO: 1549381 - RNA, 19 nt, Artificial Sequence
  Description of Artificial Sequence: Synthetic oligonucleotide
ugguaccugugugcacgug

SEQ ID NO: 1549382 - RNA, 19 nt, Artificial Sequence
  Description of Artificial Sequence: Synthetic oligonucleotide
gcuagaccacugcgcuugg

SEQ ID NO: 1549383 - RNA, 19 nt, Artificial Sequence
  Description of Artificial Sequence: Synthetic oligonucleotide
gugagaaaacaagcuggcu

SEQ ID NO: 1549384 - RNA, 19 nt, Artificial Sequence
  Description of Artificial Sequence: Synthetic oligonucleotide
cugcccgucgccggggcag

SEQ ID NO: 1549385 - RNA, 19 nt, Artificial Sequence
  Description of Artificial Sequence: Synthetic oligonucleotide
gcuugggugcaggugguac

SEQ ID NO: 1549386 - RNA, 19 nt, Artificial Sequence
  Description of Artificial Sequence: Synthetic oligonucleotide
cugggcuccagucuccccu

SEQ ID NO: 1549387 - RNA, 19 nt, Artificial Sequence
  Description of Artificial Sequence: Synthetic oligonucleotide
cagguaaauuagugcagau

SEQ ID NO: 1549388 - RNA, 19 nt, Artificial Sequence
  Description of Artificial Sequence: Synthetic oligonucleotide
ggugcaggugguaccugug

SEQ ID NO: 1549389 - RNA, 19 nt, Artificial Sequence
  Description of Artificial Sequence: Synthetic oligonucleotide
gaugaaguuuagggccacu

SEQ ID NO: 1549390 - RNA, 19 nt, Artificial Sequence
  Description of Artificial Sequence: Synthetic oligonucleotide
ggagcagacuagggacagg

SEQ ID NO: 1549391 - RNA, 19 nt, Artificial Sequence
  Description of Artificial Sequence: Synthetic oligonucleotide
caggagucacguuccugaa

SEQ ID NO: 1549392 - RNA, 19 nt, Artificial Sequence
  Description of Artificial Sequence: Synthetic oligonucleotide
cugaacacucgcuucucuu

SEQ ID NO: 1549393 - RNA, 19 nt, Artificial Sequence
  Description of Artificial Sequence: Synthetic oligonucleotide
gggucaauccagacacuca

SEQ ID NO: 1549394 - RNA, 19 nt, Artificial Sequence
  Description of Artificial Sequence: Synthetic oligonucleotide
ugcugccucaaugccuauu

SEQ ID NO: 1549395 - RNA, 19 nt, Artificial Sequence
  Description of Artificial Sequence: Synthetic oligonucleotide
gccgcaguaguuccaccuc

SEQ ID NO: 1549396 - RNA, 19 nt, Artificial Sequence
  Description of Artificial Sequence: Synthetic oligonucleotide
acucacugccgcaguaguu

SEQ ID NO: 1549397 - RNA, 19 nt, Artificial Sequence
  Description of Artificial Sequence: Synthetic oligonucleotide
cggcuacauucuuagcaag

SEQ ID NO: 1549398 - RNA, 19 nt, Artificial Sequence
  Description of Artificial Sequence: Synthetic oligonucleotide
gcggaagccagaaccuuuc

SEQ ID NO: 1549399 - RNA, 19 nt, Artificial Sequence
  Description of Artificial Sequence: Synthetic oligonucleotide
cagaucgggcuggcuggag

SEQ ID NO: 1549400 - RNA, 19 nt, Artificial Sequence
  Description of Artificial Sequence: Synthetic oligonucleotide
cacugccgcaguaguucca

SEQ ID NO: 1549401 - RNA, 19 nt, Artificial Sequence
  Description of Artificial Sequence: Synthetic oligonucleotide
cugaacucacugccgcagu

SEQ ID NO: 1549402 - RNA, 19 nt, Artificial Sequence
  Description of Artificial Sequence: Synthetic oligonucleotide
caucgcccugcuuccagcu

SEQ ID NO: 1549403 - RNA, 19 nt, Artificial Sequence
  Description of Artificial Sequence: Synthetic oligonucleotide
ggacugacggcuacauucu

SEQ ID NO: 1549404 - RNA, 19 nt, Artificial Sequence
  Description of Artificial Sequence: Synthetic oligonucleotide
gugucggucugggcugaac

SEQ ID NO: 1549405 - RNA, 19 nt, Artificial Sequence
  Description of Artificial Sequence: Synthetic oligonucleotide
gaccagggacugaggcuga

SEQ ID NO: 1549406 - RNA, 19 nt, Artificial Sequence
  Description of Artificial Sequence: Synthetic oligonucleotide
gcuauugaccagggacuga

SEQ ID NO: 1549407 - RNA, 19 nt, Artificial Sequence
  Description of Artificial Sequence: Synthetic oligonucleotide
ggcugagaacucagggcca

SEQ ID NO: 1549408 - RNA, 19 nt, Artificial Sequence
  Description of Artificial Sequence: Synthetic oligonucleotide
gugguaccugugugcacgu

SEQ ID NO: 1549409 - RNA, 19 nt, Artificial Sequence
  Description of Artificial Sequence: Synthetic oligonucleotide
cagucuccccugugugaga

SEQ ID NO: 1549410 - RNA, 19 nt, Artificial Sequence
  Description of Artificial Sequence: Synthetic oligonucleotide
ggucugcccgucgccgggg

SEQ ID NO: 1549411 - RNA, 19 nt, Artificial Sequence
  Description of Artificial Sequence: Synthetic oligonucleotide
ccagaaccuuucaauggcu

SEQ ID NO: 1549412 - RNA, 19 nt, Artificial Sequence
  Description of Artificial Sequence: Synthetic oligonucleotide
ccccugugugagaaaacaa

SEQ ID NO: 1549413 - RNA, 19 nt, Artificial Sequence
  Description of Artificial Sequence: Synthetic oligonucleotide
gcacaacguucugaauaca

SEQ ID NO: 1549414 - RNA, 19 nt, Artificial Sequence
  Description of Artificial Sequence: Synthetic oligonucleotide
caccuucagguuugcuccu

SEQ ID NO: 1549415 - RNA, 19 nt, Artificial Sequence
  Description of Artificial Sequence: Synthetic oligonucleotide
gguagagcuagugcccaau

SEQ ID NO: 1549416 - RNA, 19 nt, Artificial Sequence
  Description of Artificial Sequence: Synthetic oligonucleotide
ccgucgccggggcagcuug

SEQ ID NO: 1549417 - RNA, 19 nt, Artificial Sequence
  Description of Artificial Sequence: Synthetic oligonucleotide
gcccaagagcccagcccag

SEQ ID NO: 1549418 - RNA, 19 nt, Artificial Sequence
  Description of Artificial Sequence: Synthetic oligonucleotide
cagugucggucugggcuga

SEQ ID NO: 1549419 - RNA, 19 nt, Artificial Sequence
  Description of Artificial Sequence: Synthetic oligonucleotide
agugucggucugggcugaa

SEQ ID NO: 1549420 - RNA, 19 nt, Artificial Sequence
  Description of Artificial Sequence: Synthetic oligonucleotide
cgcaguaguuccaccucga

SEQ ID NO: 1549421 - RNA, 19 nt, Artificial Sequence
  Description of Artificial Sequence: Synthetic oligonucleotide
ccagacacucagcuccucu

SEQ ID NO: 1549422 - RNA, 19 nt, Artificial Sequence
  Description of Artificial Sequence: Synthetic oligonucleotide
ccugaacacucgcuucucu

SEQ ID NO: 1549423 - RNA, 19 nt, Artificial Sequence
  Description of Artificial Sequence: Synthetic oligonucleotide
ggucaucgcccugcuucca

SEQ ID NO: 1549424 - RNA, 19 nt, Artificial Sequence
  Description of Artificial Sequence: Synthetic oligonucleotide
cugcuagaccacugcgcuu

SEQ ID NO: 1549425 - RNA, 19 nt, Artificial Sequence
  Description of Artificial Sequence: Synthetic oligonucleotide
cgggcuggcuggagcagac

SEQ ID NO: 1549426 - RNA, 19 nt, Artificial Sequence
  Description of Artificial Sequence: Synthetic oligonucleotide
gguuugcuccugggugaga

SEQ ID NO: 1549427 - RNA, 19 nt, Artificial Sequence
  Description of Artificial Sequence: Synthetic oligonucleotide
cuggacugacggcuacauu

SEQ ID NO: 1549428 - RNA, 19 nt, Artificial Sequence
  Description of Artificial Sequence: Synthetic oligonucleotide
gccggggcagcuuguugua

SEQ ID NO: 1549429 - RNA, 19 nt, Artificial Sequence
  Description of Artificial Sequence: Synthetic oligonucleotide
cguuccugaacacucgcuu

SEQ ID NO: 1549430 - RNA, 19 nt, Artificial Sequence
  Description of Artificial Sequence: Synthetic oligonucleotide
cgcucuaguuccucccaaa

SEQ ID NO: 1549431 - RNA, 19 nt, Artificial Sequence
  Description of Artificial Sequence: Synthetic oligonucleotide
ggucuaccaucuccccaau

SEQ ID NO: 1549432 - RNA, 19 nt, Artificial Sequence
  Description of Artificial Sequence: Synthetic oligonucleotide
gcacgugggaggaggggcu

SEQ ID NO: 1549433 - RNA, 19 nt, Artificial Sequence
  Description of Artificial Sequence: Synthetic oligonucleotide
ccgcucuaguuccucccaa

SEQ ID NO: 1549434 - RNA, 19 nt, Artificial Sequence
  Description of Artificial Sequence: Synthetic oligonucleotide
cagcggaagccagaaccuu

SEQ ID NO: 1549435 - RNA, 19 nt, Artificial Sequence
  Description of Artificial Sequence: Synthetic oligonucleotide
cccaaacaggucugcccgu

SEQ ID NO: 1549436 - RNA, 19 nt, Artificial Sequence
  Description of Artificial Sequence: Synthetic oligonucleotide
ggcuugggugcagguggua

SEQ ID NO: 1549437 - RNA, 19 nt, Artificial Sequence
  Description of Artificial Sequence: Synthetic oligonucleotide
gcccaggagucacguuccu

SEQ ID NO: 1549438 - RNA, 19 nt, Artificial Sequence
  Description of Artificial Sequence: Synthetic oligonucleotide
ccuccacugcuagaccacu

SEQ ID NO: 1549439 - RNA, 19 nt, Artificial Sequence
  Description of Artificial Sequence: Synthetic oligonucleotide
gucgccggggcagcuuguu

SEQ ID NO: 1549440 - RNA, 19 nt, Artificial Sequence
  Description of Artificial Sequence: Synthetic oligonucleotide
gggcuccagucuccccugu

SEQ ID NO: 1549441 - RNA, 19 nt, Artificial Sequence
  Description of Artificial Sequence: Synthetic oligonucleotide
ccagcccaggagucacguu

SEQ ID NO: 1549442 - RNA, 19 nt, Artificial Sequence
  Description of Artificial Sequence: Synthetic oligonucleotide
ccacugcgcuuggcagcca

SEQ ID NO: 1549443 - RNA, 19 nt, Artificial Sequence
  Description of Artificial Sequence: Synthetic oligonucleotide
ccaccucgaaggggucaau

SEQ ID NO: 1549444 - RNA, 19 nt, Artificial Sequence
  Description of Artificial Sequence: Synthetic oligonucleotide
gcccgucgccggggcagcu

SEQ ID NO: 1549445 - RNA, 19 nt, Artificial Sequence
  Description of Artificial Sequence: Synthetic oligonucleotide
uccaaaauguccuucacgg

SEQ ID NO: 1549446 - RNA, 19 nt, Artificial Sequence
  Description of Artificial Sequence: Synthetic oligonucleotide
aaagugggaggucuggggc

SEQ ID NO: 1549447 - RNA, 19 nt, Artificial Sequence
  Description of Artificial Sequence: Synthetic oligonucleotide
ucaucuaggagcauuaagu

SEQ ID NO: 1549448 - RNA, 19 nt, Artificial Sequence
  Description of Artificial Sequence: Synthetic oligonucleotide
uacuaaaggcacaaagugg

SEQ ID NO: 1549449 - RNA, 19 nt, Artificial Sequence
  Description of Artificial Sequence: Synthetic oligonucleotide
aaaggcacaaagugggagg

SEQ ID NO: 1549450 - RNA, 19 nt, Artificial Sequence
  Description of Artificial Sequence: Synthetic oligonucleotide
accaagugcagccugaagg

SEQ ID NO: 1549451 - RNA, 19 nt, Artificial Sequence
  Description of Artificial Sequence: Synthetic oligonucleotide
guuuacuaaaggcacaaag

SEQ ID NO: 1549452 - RNA, 19 nt, Artificial Sequence
  Description of Artificial Sequence: Synthetic oligonucleotide
aucuaggagcauuaagucc

SEQ ID NO: 1549453 - RNA, 19 nt, Artificial Sequence
  Description of Artificial Sequence: Synthetic oligonucleotide
acuaaaggcacaaaguggg

SEQ ID NO: 1549454 - RNA, 19 nt, Artificial Sequence
  Description of Artificial Sequence: Synthetic oligonucleotide
aaggccguguacccgagcc

SEQ ID NO: 1549455 - RNA, 19 nt, Artificial Sequence
  Description of Artificial Sequence: Synthetic oligonucleotide
auaggucuccgauagguac

SEQ ID NO: 1549456 - RNA, 19 nt, Artificial Sequence
  Description of Artificial Sequence: Synthetic oligonucleotide
cauaaaguagugcugcccg

SEQ ID NO: 1549457 - RNA, 19 nt, Artificial Sequence
  Description of Artificial Sequence: Synthetic oligonucleotide
cagaacaucacccuccucc

SEQ ID NO: 1549458 - RNA, 19 nt, Artificial Sequence
  Description of Artificial Sequence: Synthetic oligonucleotide
gaucaugguagccuguggg

SEQ ID NO: 1549459 - RNA, 19 nt, Artificial Sequence
  Description of Artificial Sequence: Synthetic oligonucleotide
cacaguguuuacuaaaggc

SEQ ID NO: 1549460 - RNA, 19 nt, Artificial Sequence
  Description of Artificial Sequence: Synthetic oligonucleotide
aauuccuugauacggucgu

SEQ ID NO: 1549461 - RNA, 19 nt, Artificial Sequence
  Description of Artificial Sequence: Synthetic oligonucleotide
agcuguuagcaccaaaggg

SEQ ID NO: 1549462 - RNA, 19 nt, Artificial Sequence
  Description of Artificial Sequence: Synthetic oligonucleotide
cagggagucaucuaggagc

SEQ ID NO: 1549463 - RNA, 19 nt, Artificial Sequence
  Description of Artificial Sequence: Synthetic oligonucleotide
uugauguugaaccugcguc

SEQ ID NO: 1549464 - RNA, 19 nt, Artificial Sequence
  Description of Artificial Sequence: Synthetic oligonucleotide
agcgucacagaacaucacc

SEQ ID NO: 1549465 - RNA, 19 nt, Artificial Sequence
  Description of Artificial Sequence: Synthetic oligonucleotide
acaauucauaaaguagugc

SEQ ID NO: 1549466 - RNA, 19 nt, Artificial Sequence
  Description of Artificial Sequence: Synthetic oligonucleotide
ucuagucccaggaaagcag

SEQ ID NO: 1549467 - RNA, 19 nt, Artificial Sequence
  Description of Artificial Sequence: Synthetic oligonucleotide
auaaacuuguucccauagg

SEQ ID NO: 1549468 - RNA, 19 nt, Artificial Sequence
  Description of Artificial Sequence: Synthetic oligonucleotide
uacuuguugggccagcuca

SEQ ID NO: 1549469 - RNA, 19 nt, Artificial Sequence
  Description of Artificial Sequence: Synthetic oligonucleotide
aagugggaggucuggggcc

SEQ ID NO: 1549470 - RNA, 19 nt, Artificial Sequence
  Description of Artificial Sequence: Synthetic oligonucleotide
ucccauaggucuccgauag

SEQ ID NO: 1549471 - RNA, 19 nt, Artificial Sequence
  Description of Artificial Sequence: Synthetic oligonucleotide
gauacggucguugauguug

SEQ ID NO: 1549472 - RNA, 19 nt, Artificial Sequence
  Description of Artificial Sequence: Synthetic oligonucleotide
ucacagaacaucacccucc

SEQ ID NO: 1549473 - RNA, 19 nt, Artificial Sequence
  Description of Artificial Sequence: Synthetic oligonucleotide
auaaaguagugcugcccgc

SEQ ID NO: 1549474 - RNA, 19 nt, Artificial Sequence
  Description of Artificial Sequence: Synthetic oligonucleotide
aaguccaggugauggaaag

SEQ ID NO: 1549475 - RNA, 19 nt, Artificial Sequence
  Description of Artificial Sequence: Synthetic oligonucleotide
ucccaauuccuugauacgg

SEQ ID NO: 1549476 - RNA, 19 nt, Artificial Sequence
  Description of Artificial Sequence: Synthetic oligonucleotide
uuggggaucagcauuccca

SEQ ID NO: 1549477 - RNA, 19 nt, Artificial Sequence
  Description of Artificial Sequence: Synthetic oligonucleotide
aacaucacccuccuccaug

SEQ ID NO: 1549478 - RNA, 19 nt, Artificial Sequence
  Description of Artificial Sequence: Synthetic oligonucleotide
ucuccgauagguacucccg

SEQ ID NO: 1549479 - RNA, 19 nt, Artificial Sequence
  Description of Artificial Sequence: Synthetic oligonucleotide
aaaguagugcugcccgcgg

SEQ ID NO: 1549480 - RNA, 19 nt, Artificial Sequence
  Description of Artificial Sequence: Synthetic oligonucleotide
ucagccauguucacacccg

SEQ ID NO: 1549481 - RNA, 19 nt, Artificial Sequence
  Description of Artificial Sequence: Synthetic oligonucleotide
aaagaggggaucggaggcc

SEQ ID NO: 1549482 - RNA, 19 nt, Artificial Sequence
  Description of Artificial Sequence: Synthetic oligonucleotide
uggaugcgaagccagagcu

SEQ ID NO: 1549483 - RNA, 19 nt, Artificial Sequence
  Description of Artificial Sequence: Synthetic oligonucleotide
accacaauucauaaaguag

SEQ ID NO: 1549484 - RNA, 19 nt, Artificial Sequence
  Description of Artificial Sequence: Synthetic oligonucleotide
gcuguuagcaccaaagggg

SEQ ID NO: 1549485 - RNA, 19 nt, Artificial Sequence
  Description of Artificial Sequence: Synthetic oligonucleotide
aggcacuaaguccaaacag

SEQ ID NO: 1549486 - RNA, 19 nt, Artificial Sequence
  Description of Artificial Sequence: Synthetic oligonucleotide
uucaaucagguugugauaa

SEQ ID NO: 1549487 - RNA, 19 nt, Artificial Sequence
  Description of Artificial Sequence: Synthetic oligonucleotide
aaagcucaagcuguggcug

SEQ ID NO: 1549488 - RNA, 19 nt, Artificial Sequence
  Description of Artificial Sequence: Synthetic oligonucleotide
gagcuguuagcaccaaagg

SEQ ID NO: 1549489 - RNA, 19 nt, Artificial Sequence
  Description of Artificial Sequence: Synthetic oligonucleotide
aucuuucuuggacagguug

SEQ ID NO: 1549490 - RNA, 19 nt, Artificial Sequence
  Description of Artificial Sequence: Synthetic oligonucleotide
uaaaguagugcugcccgcg

SEQ ID NO: 1549491 - RNA, 19 nt, Artificial Sequence
  Description of Artificial Sequence: Synthetic oligonucleotide
ugugauaaacuuguuccca

SEQ ID NO: 1549492 - RNA, 19 nt, Artificial Sequence
  Description of Artificial Sequence: Synthetic oligonucleotide
uauaccuccuucuccaaaa

SEQ ID NO: 1549493 - RNA, 19 nt, Artificial Sequence
  Description of Artificial Sequence: Synthetic oligonucleotide
gaugcgaagccagagcugc

SEQ ID NO: 1549494 - RNA, 19 nt, Artificial Sequence
  Description of Artificial Sequence: Synthetic oligonucleotide
caauuccuugauacggucg

SEQ ID NO: 1549495 - RNA, 19 nt, Artificial Sequence
  Description of Artificial Sequence: Synthetic oligonucleotide
acaguguuuacuaaaggca

SEQ ID NO: 1549496 - RNA, 19 nt, Artificial Sequence
  Description of Artificial Sequence: Synthetic oligonucleotide
cuugcuucacuacuuguug

SEQ ID NO: 1549497 - RNA, 19 nt, Artificial Sequence
  Description of Artificial Sequence: Synthetic oligonucleotide
gauggaaaggggacugugg

SEQ ID NO: 1549498 - RNA, 19 nt, Artificial Sequence
  Description of Artificial Sequence: Synthetic oligonucleotide
cuugauacggucguugaug

SEQ ID NO: 1549499 - RNA, 19 nt, Artificial Sequence
  Description of Artificial Sequence: Synthetic oligonucleotide
caauucauaaaguagugcu

SEQ ID NO: 1549500 - RNA, 19 nt, Artificial Sequence
  Description of Artificial Sequence: Synthetic oligonucleotide
uucccaauuccuugauacg

SEQ ID NO: 1549501 - RNA, 19 nt, Artificial Sequence
  Description of Artificial Sequence: Synthetic oligonucleotide
uuggucaucuccaggcgcc

SEQ ID NO: 1549502 - RNA, 19 nt, Artificial Sequence
  Description of Artificial Sequence: Synthetic oligonucleotide
ucauaaaguagugcugccc

SEQ ID NO: 1549503 - RNA, 19 nt, Artificial Sequence
  Description of Artificial Sequence: Synthetic oligonucleotide
caucuaggagcauuaaguc

SEQ ID NO: 1549504 - RNA, 19 nt, Artificial Sequence
  Description of Artificial Sequence: Synthetic oligonucleotide
agagcuguuagcaccaaag

SEQ ID NO: 1549505 - RNA, 19 nt, Artificial Sequence
  Description of Artificial Sequence: Synthetic oligonucleotide
gguagaaaagaggggaucg

SEQ ID NO: 1549506 - RNA, 19 nt, Artificial Sequence
  Description of Artificial Sequence: Synthetic oligonucleotide
cuagucccaggaaagcagg

SEQ ID NO: 1549507 - RNA, 19 nt, Artificial Sequence
  Description of Artificial Sequence: Synthetic oligonucleotide
ugcgucuccuuucaaucag

SEQ ID NO: 1549508 - RNA, 19 nt, Artificial Sequence
  Description of Artificial Sequence: Synthetic oligonucleotide
caaagugggaggucugggg

SEQ ID NO: 1549509 - RNA, 19 nt, Artificial Sequence
  Description of Artificial Sequence: Synthetic oligonucleotide
uugauacggucguugaugu

SEQ ID NO: 1549510 - RNA, 19 nt, Artificial Sequence
  Description of Artificial Sequence: Synthetic oligonucleotide
ucuucuggccaccccaccc

SEQ ID NO: 1549511 - RNA, 19 nt, Artificial Sequence
  Description of Artificial Sequence: Synthetic oligonucleotide
ucguugccgaaccggaggg

SEQ ID NO: 1549512 - RNA, 19 nt, Artificial Sequence
  Description of Artificial Sequence: Synthetic oligonucleotide
aaaauguccuucacgggga

SEQ ID NO: 1549513 - RNA, 19 nt, Artificial Sequence
  Description of Artificial Sequence: Synthetic oligonucleotide
agagugguucuccagcucu

SEQ ID NO: 1549514 - RNA, 19 nt, Artificial Sequence
  Description of Artificial Sequence: Synthetic oligonucleotide
uguucacacccgaugguga

SEQ ID NO: 1549515 - RNA, 19 nt, Artificial Sequence
  Description of Artificial Sequence: Synthetic oligonucleotide
cauuaaguccagaucuuuc

SEQ ID NO: 1549516 - RNA, 19 nt, Artificial Sequence
  Description of Artificial Sequence: Synthetic oligonucleotide
uguuccagcgcaccauccc

SEQ ID NO: 1549517 - RNA, 19 nt, Artificial Sequence
  Description of Artificial Sequence: Synthetic oligonucleotide
uccuucacggggagguugg

SEQ ID NO: 1549518 - RNA, 19 nt, Artificial Sequence
  Description of Artificial Sequence: Synthetic oligonucleotide
cacuaaguccaaacagggg

SEQ ID NO: 1549519 - RNA, 19 nt, Artificial Sequence
  Description of Artificial Sequence: Synthetic oligonucleotide
gaggccucaggggacaugg

SEQ ID NO: 1549520 - RNA, 19 nt, Artificial Sequence
  Description of Artificial Sequence: Synthetic oligonucleotide
uguucuguccccaggggau

SEQ ID NO: 1549521 - RNA, 19 nt, Artificial Sequence
  Description of Artificial Sequence: Synthetic oligonucleotide
aggagcauuaaguccagau

SEQ ID NO: 1549522 - RNA, 19 nt, Artificial Sequence
  Description of Artificial Sequence: Synthetic oligonucleotide
gugcucuccacccuggacc

SEQ ID NO: 1549523 - RNA, 19 nt, Artificial Sequence
  Description of Artificial Sequence: Synthetic oligonucleotide
auguugaaccugcgucucc

SEQ ID NO: 1549524 - RNA, 19 nt, Artificial Sequence
  Description of Artificial Sequence: Synthetic oligonucleotide
ggcacuaaguccaaacagg

SEQ ID NO: 1549525 - RNA, 19 nt, Artificial Sequence
  Description of Artificial Sequence: Synthetic oligonucleotide
ucuuggacagguuggggaa

SEQ ID NO: 1549526 - RNA, 19 nt, Artificial Sequence
  Description of Artificial Sequence: Synthetic oligonucleotide
guggcugaaguccagguga

SEQ ID NO: 1549527 - RNA, 19 nt, Artificial Sequence
  Description of Artificial Sequence: Synthetic oligonucleotide
accggguagcucuugcuuc

SEQ ID NO: 1549528 - RNA, 19 nt, Artificial Sequence
  Description of Artificial Sequence: Synthetic oligonucleotide
gucguugccgaaccggagg

SEQ ID NO: 1549529 - RNA, 19 nt, Artificial Sequence
  Description of Artificial Sequence: Synthetic oligonucleotide
gaagagagggcuccccuac

SEQ ID NO: 1549530 - RNA, 19 nt, Artificial Sequence
  Description of Artificial Sequence: Synthetic oligonucleotide
agcuaccucacaccaagug

SEQ ID NO: 1549531 - RNA, 19 nt, Artificial Sequence
  Description of Artificial Sequence: Synthetic oligonucleotide
uaggcagcuaccucacacc

SEQ ID NO: 1549532 - RNA, 19 nt, Artificial Sequence
  Description of Artificial Sequence: Synthetic oligonucleotide
uagaaaagaggggaucgga

SEQ ID NO: 1549533 - RNA, 19 nt, Artificial Sequence
  Description of Artificial Sequence: Synthetic oligonucleotide
cucccgaaccuucuggugc

SEQ ID NO: 1549534 - RNA, 19 nt, Artificial Sequence
  Description of Artificial Sequence: Synthetic oligonucleotide
agcacaguguuuacuaaag

SEQ ID NO: 1549535 - RNA, 19 nt, Artificial Sequence
  Description of Artificial Sequence: Synthetic oligonucleotide
uuccccaccacaauucaua

SEQ ID NO: 1549536 - RNA, 19 nt, Artificial Sequence
  Description of Artificial Sequence: Synthetic oligonucleotide
guagaaaagaggggaucgg

SEQ ID NO: 1549537 - RNA, 19 nt, Artificial Sequence
  Description of Artificial Sequence: Synthetic oligonucleotide
ugugggccccucaucaccc

SEQ ID NO: 1549538 - RNA, 19 nt, Artificial Sequence
  Description of Artificial Sequence: Synthetic oligonucleotide
uguugggccagcucagcca

SEQ ID NO: 1549539 - RNA, 19 nt, Artificial Sequence
  Description of Artificial Sequence: Synthetic oligonucleotide
agagggcuccccuaccggg

SEQ ID NO: 1549540 - RNA, 19 nt, Artificial Sequence
  Description of Artificial Sequence: Synthetic oligonucleotide
aauggggagccauguucug

SEQ ID NO: 1549541 - RNA, 19 nt, Artificial Sequence
  Description of Artificial Sequence: Synthetic oligonucleotide
ucacccuuguucuucccca

SEQ ID NO: 1549542 - RNA, 19 nt, Artificial Sequence
  Description of Artificial Sequence: Synthetic oligonucleotide
uuauaccuccuucuccaaa

SEQ ID NO: 1549543 - RNA, 19 nt, Artificial Sequence
  Description of Artificial Sequence: Synthetic oligonucleotide
uguacccgagccugcaucu

SEQ ID NO: 1549544 - RNA, 19 nt, Artificial Sequence
  Description of Artificial Sequence: Synthetic oligonucleotide
uguggggacguaucagucu

SEQ ID NO: 1549545 - RNA, 19 nt, Artificial Sequence
  Description of Artificial Sequence: Synthetic oligonucleotide
ggacaugguagaaaagagg

SEQ ID NO: 1549546 - RNA, 19 nt, Artificial Sequence
  Description of Artificial Sequence: Synthetic oligonucleotide
uaggucuccgauagguacu

SEQ ID NO: 1549547 - RNA, 19 nt, Artificial Sequence
  Description of Artificial Sequence: Synthetic oligonucleotide
cacccucauaccaccaggg

SEQ ID NO: 1549548 - RNA, 19 nt, Artificial Sequence
  Description of Artificial Sequence: Synthetic oligonucleotide
ccucauaccaccaggggag

SEQ ID NO: 1549549 - RNA, 19 nt, Artificial Sequence
  Description of Artificial Sequence: Synthetic oligonucleotide
uagugcugcccgcggaggg

SEQ ID NO: 1549550 - RNA, 19 nt, Artificial Sequence
  Description of Artificial Sequence: Synthetic oligonucleotide
ugaaccugcgucuccuuuc

SEQ ID NO: 1549551 - RNA, 19 nt, Artificial Sequence
  Description of Artificial Sequence: Synthetic oligonucleotide
acaaagugggaggucuggg

SEQ ID NO: 1549552 - RNA, 19 nt, Artificial Sequence
  Description of Artificial Sequence: Synthetic oligonucleotide
guggggacguaucagucug

SEQ ID NO: 1549553 - RNA, 19 nt, Artificial Sequence
  Description of Artificial Sequence: Synthetic oligonucleotide
ccaagugcagccugaaggg

SEQ ID NO: 1549554 - RNA, 19 nt, Artificial Sequence
  Description of Artificial Sequence: Synthetic oligonucleotide
ugauaaacuuguucccaua

SEQ ID NO: 1549555 - RNA, 19 nt, Artificial Sequence
  Description of Artificial Sequence: Synthetic oligonucleotide
gcuaccucacaccaagugc

SEQ ID NO: 1549556 - RNA, 19 nt, Artificial Sequence
  Description of Artificial Sequence: Synthetic oligonucleotide
caaucagguugugauaaac

SEQ ID NO: 1549557 - RNA, 19 nt, Artificial Sequence
  Description of Artificial Sequence: Synthetic oligonucleotide
guucacacccgauggugag

SEQ ID NO: 1549558 - RNA, 19 nt, Artificial Sequence
  Description of Artificial Sequence: Synthetic oligonucleotide
gucuccgauagguacuccc

SEQ ID NO: 1549559 - RNA, 19 nt, Artificial Sequence
  Description of Artificial Sequence: Synthetic oligonucleotide
ugggugccccaucuguggg

SEQ ID NO: 1549560 - RNA, 19 nt, Artificial Sequence
  Description of Artificial Sequence: Synthetic oligonucleotide
uuccagcgcaccaucccag

SEQ ID NO: 1549561 - RNA, 19 nt, Artificial Sequence
  Description of Artificial Sequence: Synthetic oligonucleotide
accaggggagagcuguuag

SEQ ID NO: 1549562 - RNA, 19 nt, Artificial Sequence
  Description of Artificial Sequence: Synthetic oligonucleotide
agcaucagagccuccccug

SEQ ID NO: 1549563 - RNA, 19 nt, Artificial Sequence
  Description of Artificial Sequence: Synthetic oligonucleotide
acccucauaccaccagggg

SEQ ID NO: 1549564 - RNA, 19 nt, Artificial Sequence
  Description of Artificial Sequence: Synthetic oligonucleotide
gcacuaaguccaaacaggg

SEQ ID NO: 1549565 - RNA, 19 nt, Artificial Sequence
  Description of Artificial Sequence: Synthetic oligonucleotide
uaccucacaccaagugcag

SEQ ID NO: 1549566 - RNA, 19 nt, Artificial Sequence
  Description of Artificial Sequence: Synthetic oligonucleotide
caggucguuggccuugggg

SEQ ID NO: 1549567 - RNA, 19 nt, Artificial Sequence
  Description of Artificial Sequence: Synthetic oligonucleotide
accgaggggaaggacgggc

SEQ ID NO: 1549568 - RNA, 19 nt, Artificial Sequence
  Description of Artificial Sequence: Synthetic oligonucleotide
uacccgagccugcaucucc

SEQ ID NO: 1549569 - RNA, 19 nt, Artificial Sequence
  Description of Artificial Sequence: Synthetic oligonucleotide
acggucguugauguugaac

SEQ ID NO: 1549570 - RNA, 19 nt, Artificial Sequence
  Description of Artificial Sequence: Synthetic oligonucleotide
ggaauggggagccauguuc

SEQ ID NO: 1549571 - RNA, 19 nt, Artificial Sequence
  Description of Artificial Sequence: Synthetic oligonucleotide
cagguugugauaaacuugu

SEQ ID NO: 1549572 - RNA, 19 nt, Artificial Sequence
  Description of Artificial Sequence: Synthetic oligonucleotide
gagagggcuccccuaccgg

SEQ ID NO: 1549573 - RNA, 19 nt, Artificial Sequence
  Description of Artificial Sequence: Synthetic oligonucleotide
aagcucaagcuguggcuga

SEQ ID NO: 1549574 - RNA, 19 nt, Artificial Sequence
  Description of Artificial Sequence: Synthetic oligonucleotide
ggagcauuaaguccagauc

SEQ ID NO: 1549575 - RNA, 19 nt, Artificial Sequence
  Description of Artificial Sequence: Synthetic oligonucleotide
cggucguugauguugaacc

SEQ ID NO: 1549576 - RNA, 19 nt, Artificial Sequence
  Description of Artificial Sequence: Synthetic oligonucleotide
gucacagaacaucacccuc

SEQ ID NO: 1549577 - RNA, 19 nt, Artificial Sequence
  Description of Artificial Sequence: Synthetic oligonucleotide
acaaagcacaguguuuacu

SEQ ID NO: 1549578 - RNA, 19 nt, Artificial Sequence
  Description of Artificial Sequence: Synthetic oligonucleotide
uuuauaccuccuucuccaa

SEQ ID NO: 1549579 - RNA, 19 nt, Artificial Sequence
  Description of Artificial Sequence: Synthetic oligonucleotide
aaggacgggcaggguaggc

SEQ ID NO: 1549580 - RNA, 19 nt, Artificial Sequence
  Description of Artificial Sequence: Synthetic oligonucleotide
uacucccgaaccuucuggu

SEQ ID NO: 1549581 - RNA, 19 nt, Artificial Sequence
  Description of Artificial Sequence: Synthetic oligonucleotide
ggagguagcgccggcaucg

SEQ ID NO: 1549582 - RNA, 19 nt, Artificial Sequence
  Description of Artificial Sequence: Synthetic oligonucleotide
gauagguacucccgaaccu

SEQ ID NO: 1549583 - RNA, 19 nt, Artificial Sequence
  Description of Artificial Sequence: Synthetic oligonucleotide
aguguuuacuaaaggcaca

SEQ ID NO: 1549584 - RNA, 19 nt, Artificial Sequence
  Description of Artificial Sequence: Synthetic oligonucleotide
aucuagucccaggaaagca

SEQ ID NO: 1549585 - RNA, 19 nt, Artificial Sequence
  Description of Artificial Sequence: Synthetic oligonucleotide
uggggacguaucagucugg

SEQ ID NO: 1549586 - RNA, 19 nt, Artificial Sequence
  Description of Artificial Sequence: Synthetic oligonucleotide
ucggcacaggggcagccag

SEQ ID NO: 1549587 - RNA, 19 nt, Artificial Sequence
  Description of Artificial Sequence: Synthetic oligonucleotide
uucacacccgauggugagg

SEQ ID NO: 1549588 - RNA, 19 nt, Artificial Sequence
  Description of Artificial Sequence: Synthetic oligonucleotide
uggggagccauguucuguc

SEQ ID NO: 1549589 - RNA, 19 nt, Artificial Sequence
  Description of Artificial Sequence: Synthetic oligonucleotide
gcacaguguuuacuaaagg

SEQ ID NO: 1549590 - RNA, 19 nt, Artificial Sequence
  Description of Artificial Sequence: Synthetic oligonucleotide
gauguugaaccugcgucuc

SEQ ID NO: 1549591 - RNA, 19 nt, Artificial Sequence
  Description of Artificial Sequence: Synthetic oligonucleotide
cuuggggaucagcauuccc

SEQ ID NO: 1549592 - RNA, 19 nt, Artificial Sequence
  Description of Artificial Sequence: Synthetic oligonucleotide
uccuccggauguaauccac

SEQ ID NO: 1549593 - RNA, 19 nt, Artificial Sequence
  Description of Artificial Sequence: Synthetic oligonucleotide
gcaaccgaggggaaggacg

SEQ ID NO: 1549594 - RNA, 19 nt, Artificial Sequence
  Description of Artificial Sequence: Synthetic oligonucleotide
ggugccaucuagucccagg

SEQ ID NO: 1549595 - RNA, 19 nt, Artificial Sequence
  Description of Artificial Sequence: Synthetic oligonucleotide
ucacacccgauggugaggu

SEQ ID NO: 1549596 - RNA, 19 nt, Artificial Sequence
  Description of Artificial Sequence: Synthetic oligonucleotide
aggcagcuaccucacacca

SEQ ID NO: 1549597 - RNA, 19 nt, Artificial Sequence
  Description of Artificial Sequence: Synthetic oligonucleotide
uccgauagguacucccgaa

SEQ ID NO: 1549598 - RNA, 19 nt, Artificial Sequence
  Description of Artificial Sequence: Synthetic oligonucleotide
aagaggggaucggaggcca

SEQ ID NO: 1549599 - RNA, 19 nt, Artificial Sequence
  Description of Artificial Sequence: Synthetic oligonucleotide
ucaaucagguugugauaaa

SEQ ID NO: 1549600 - RNA, 19 nt, Artificial Sequence
  Description of Artificial Sequence: Synthetic oligonucleotide
gucguugauguugaaccug

SEQ ID NO: 1549601 - RNA, 19 nt, Artificial Sequence
  Description of Artificial Sequence: Synthetic oligonucleotide
cuuggaggccucaggggac

SEQ ID NO: 1549602 - RNA, 19 nt, Artificial Sequence
  Description of Artificial Sequence: Synthetic oligonucleotide
gaaccugcgucuccuuuca

SEQ ID NO: 1549603 - RNA, 19 nt, Artificial Sequence
  Description of Artificial Sequence: Synthetic oligonucleotide
ugcccuguccucccagccc

SEQ ID NO: 1549604 - RNA, 19 nt, Artificial Sequence
  Description of Artificial Sequence: Synthetic oligonucleotide
caucggcucagggucaggg

SEQ ID NO: 1549605 - RNA, 19 nt, Artificial Sequence
  Description of Artificial Sequence: Synthetic oligonucleotide
caggcugggugccaucuag

SEQ ID NO: 1549606 - RNA, 19 nt, Artificial Sequence
  Description of Artificial Sequence: Synthetic oligonucleotide
agcucucgggauuucugca

SEQ ID NO: 1549607 - RNA, 19 nt, Artificial Sequence
  Description of Artificial Sequence: Synthetic oligonucleotide
cugugggccccucaucacc

SEQ ID NO: 1549608 - RNA, 19 nt, Artificial Sequence
  Description of Artificial Sequence: Synthetic oligonucleotide
gauggugagguggugggaa

SEQ ID NO: 1549609 - RNA, 19 nt, Artificial Sequence
  Description of Artificial Sequence: Synthetic oligonucleotide
ugaagggugggagggcucu

SEQ ID NO: 1549610 - RNA, 19 nt, Artificial Sequence
  Description of Artificial Sequence: Synthetic oligonucleotide
ucccgaaccuucuggugcu

SEQ ID NO: 1549611 - RNA, 19 nt, Artificial Sequence
  Description of Artificial Sequence: Synthetic oligonucleotide
ucaggggacaugguagaaa

SEQ ID NO: 1549612 - RNA, 19 nt, Artificial Sequence
  Description of Artificial Sequence: Synthetic oligonucleotide
aucuguggggacguaucag

SEQ ID NO: 1549613 - RNA, 19 nt, Artificial Sequence
  Description of Artificial Sequence: Synthetic oligonucleotide
uccccaggggaucauggua

SEQ ID NO: 1549614 - RNA, 19 nt, Artificial Sequence
  Description of Artificial Sequence: Synthetic oligonucleotide
gccauguucacacccgaug

SEQ ID NO: 1549615 - RNA, 19 nt, Artificial Sequence
  Description of Artificial Sequence: Synthetic oligonucleotide
ggaaggacgggcaggguag

SEQ ID NO: 1549616 - RNA, 19 nt, Artificial Sequence
  Description of Artificial Sequence: Synthetic oligonucleotide
ugcuccgucggcugcuggc

SEQ ID NO: 1549617 - RNA, 19 nt, Artificial Sequence
  Description of Artificial Sequence: Synthetic oligonucleotide
ucugcccuguccucccagc

SEQ ID NO: 1549618 - RNA, 19 nt, Artificial Sequence
  Description of Artificial Sequence: Synthetic oligonucleotide
ggaucaugguagccugugg

SEQ ID NO: 1549619 - RNA, 19 nt, Artificial Sequence
  Description of Artificial Sequence: Synthetic oligonucleotide
uucccauaggucuccgaua

SEQ ID NO: 1549620 - RNA, 19 nt, Artificial Sequence
  Description of Artificial Sequence: Synthetic oligonucleotide
aggucuccgauagguacuc

SEQ ID NO: 1549621 - RNA, 19 nt, Artificial Sequence
  Description of Artificial Sequence: Synthetic oligonucleotide
aguccagaucuuucuugga

SEQ ID NO: 1549622 - RNA, 19 nt, Artificial Sequence
  Description of Artificial Sequence: Synthetic oligonucleotide
cuguggggacguaucaguc

SEQ ID NO: 1549623 - RNA, 19 nt, Artificial Sequence
  Description of Artificial Sequence: Synthetic oligonucleotide
cuaaaggcacaaaguggga

SEQ ID NO: 1549624 - RNA, 19 nt, Artificial Sequence
  Description of Artificial Sequence: Synthetic oligonucleotide
uggacagguuggggaaugg

SEQ ID NO: 1549625 - RNA, 19 nt, Artificial Sequence
  Description of Artificial Sequence: Synthetic oligonucleotide
cugccaggcaggcacuaag

SEQ ID NO: 1549626 - RNA, 19 nt, Artificial Sequence
  Description of Artificial Sequence: Synthetic oligonucleotide
ucauaccaccaggggagag

SEQ ID NO: 1549627 - RNA, 19 nt, Artificial Sequence
  Description of Artificial Sequence: Synthetic oligonucleotide
caggcacuaaguccaaaca

SEQ ID NO: 1549628 - RNA, 19 nt, Artificial Sequence
  Description of Artificial Sequence: Synthetic oligonucleotide
uguuuacuaaaggcacaaa

SEQ ID NO: 1549629 - RNA, 19 nt, Artificial Sequence
  Description of Artificial Sequence: Synthetic oligonucleotide
ugagaauggugcccuuguu

SEQ ID NO: 1549630 - RNA, 19 nt, Artificial Sequence
  Description of Artificial Sequence: Synthetic oligonucleotide
uccuggaugcgaagccaga

SEQ ID NO: 1549631 - RNA, 19 nt, Artificial Sequence
  Description of Artificial Sequence: Synthetic oligonucleotide
ggaucagcauucccaauuc

SEQ ID NO: 1549632 - RNA, 19 nt, Artificial Sequence
  Description of Artificial Sequence: Synthetic oligonucleotide
guugauguugaaccugcgu

SEQ ID NO: 1549633 - RNA, 19 nt, Artificial Sequence
  Description of Artificial Sequence: Synthetic oligonucleotide
guguuuacuaaaggcacaa

SEQ ID NO: 1549634 - RNA, 19 nt, Artificial Sequence
  Description of Artificial Sequence: Synthetic oligonucleotide
gcaggcacuaaguccaaac

SEQ ID NO: 1549635 - RNA, 19 nt, Artificial Sequence
  Description of Artificial Sequence: Synthetic oligonucleotide
gaucggaggccagggguag

SEQ ID NO: 1549636 - RNA, 19 nt, Artificial Sequence
  Description of Artificial Sequence: Synthetic oligonucleotide
gaauggggagccauguucu

SEQ ID NO: 1549637 - RNA, 19 nt, Artificial Sequence
  Description of Artificial Sequence: Synthetic oligonucleotide
auagguacucccgaaccuu

SEQ ID NO: 1549638 - RNA, 19 nt, Artificial Sequence
  Description of Artificial Sequence: Synthetic oligonucleotide
acuuguugggccagcucag

SEQ ID NO: 1549639 - RNA, 19 nt, Artificial Sequence
  Description of Artificial Sequence: Synthetic oligonucleotide
guuccagcgcaccauccca

SEQ ID NO: 1549640 - RNA, 19 nt, Artificial Sequence
  Description of Artificial Sequence: Synthetic oligonucleotide
gaggggaucggaggccagg

SEQ ID NO: 1549641 - RNA, 19 nt, Artificial Sequence
  Description of Artificial Sequence: Synthetic oligonucleotide
cuucacggggagguugggg

SEQ ID NO: 1549642 - RNA, 19 nt, Artificial Sequence
  Description of Artificial Sequence: Synthetic oligonucleotide
ccacaauucauaaaguagu

SEQ ID NO: 1549643 - RNA, 19 nt, Artificial Sequence
  Description of Artificial Sequence: Synthetic oligonucleotide
agggguagcagggagucau

SEQ ID NO: 1549644 - RNA, 19 nt, Artificial Sequence
  Description of Artificial Sequence: Synthetic oligonucleotide
agguagcgccggcaucggc

SEQ ID NO: 1549645 - RNA, 19 nt, Artificial Sequence
  Description of Artificial Sequence: Synthetic oligonucleotide
ucaccggguagcucuugcu

SEQ ID NO: 1549646 - RNA, 19 nt, Artificial Sequence
  Description of Artificial Sequence: Synthetic oligonucleotide
uguucccauaggucuccga

SEQ ID NO: 1549647 - RNA, 19 nt, Artificial Sequence
  Description of Artificial Sequence: Synthetic oligonucleotide
aggggaucggaggccaggg

SEQ ID NO: 1549648 - RNA, 19 nt, Artificial Sequence
  Description of Artificial Sequence: Synthetic oligonucleotide
gaaggacgggcaggguagg

SEQ ID NO: 1549649 - RNA, 19 nt, Artificial Sequence
  Description of Artificial Sequence: Synthetic oligonucleotide
auaccuccuucuccaaaau

SEQ ID NO: 1549650 - RNA, 19 nt, Artificial Sequence
  Description of Artificial Sequence: Synthetic oligonucleotide
acuacuuguugggccagcu

SEQ ID NO: 1549651 - RNA, 19 nt, Artificial Sequence
  Description of Artificial Sequence: Synthetic oligonucleotide
ugggccgucuucaccgggu

SEQ ID NO: 1549652 - RNA, 19 nt, Artificial Sequence
  Description of Artificial Sequence: Synthetic oligonucleotide
caccccacccucauaccac

SEQ ID NO: 1549653 - RNA, 19 nt, Artificial Sequence
  Description of Artificial Sequence: Synthetic oligonucleotide
ggacgggcaggguaggcag

SEQ ID NO: 1549654 - RNA, 19 nt, Artificial Sequence
  Description of Artificial Sequence: Synthetic oligonucleotide
auccuccggauguaaucca

SEQ ID NO: 1549655 - RNA, 19 nt, Artificial Sequence
  Description of Artificial Sequence: Synthetic oligonucleotide
gcugggugccaucuagucc

SEQ ID NO: 1549656 - RNA, 19 nt, Artificial Sequence
  Description of Artificial Sequence: Synthetic oligonucleotide
uggcugaaguccaggugau

SEQ ID NO: 1549657 - RNA, 19 nt, Artificial Sequence
  Description of Artificial Sequence: Synthetic oligonucleotide
aggugauggaaaggggacu

SEQ ID NO: 1549658 - RNA, 19 nt, Artificial Sequence
  Description of Artificial Sequence: Synthetic oligonucleotide
gcgucacagaacaucaccc

SEQ ID NO: 1549659 - RNA, 19 nt, Artificial Sequence
  Description of Artificial Sequence: Synthetic oligonucleotide
cgauagguacucccgaacc

SEQ ID NO: 1549660 - RNA, 19 nt, Artificial Sequence
  Description of Artificial Sequence: Synthetic oligonucleotide
guagugcugcccgcggagg

SEQ ID NO: 1549661 - RNA, 19 nt, Artificial Sequence
  Description of Artificial Sequence: Synthetic oligonucleotide
ccugcgucuccuuucaauc

SEQ ID NO: 1549662 - RNA, 19 nt, Artificial Sequence
  Description of Artificial Sequence: Synthetic oligonucleotide
caggggagagcuguuagca

SEQ ID NO: 1549663 - RNA, 19 nt, Artificial Sequence
  Description of Artificial Sequence: Synthetic oligonucleotide
auacggucguugauguuga

SEQ ID NO: 1549664 - RNA, 19 nt, Artificial Sequence
  Description of Artificial Sequence: Synthetic oligonucleotide
gguucuccagcucucggga

SEQ ID NO: 1549665 - RNA, 19 nt, Artificial Sequence
  Description of Artificial Sequence: Synthetic oligonucleotide
gcucucgggauuucugcag

SEQ ID NO: 1549666 - RNA, 19 nt, Artificial Sequence
  Description of Artificial Sequence: Synthetic oligonucleotide
gugauaaacuuguucccau

SEQ ID NO: 1549667 - RNA, 19 nt, Artificial Sequence
  Description of Artificial Sequence: Synthetic oligonucleotide
uaccgggguuucuucuuac

SEQ ID NO: 1549668 - RNA, 19 nt, Artificial Sequence
  Description of Artificial Sequence: Synthetic oligonucleotide
caucuguggggacguauca

SEQ ID NO: 1549669 - RNA, 19 nt, Artificial Sequence
  Description of Artificial Sequence: Synthetic oligonucleotide
agaggccuugagaauggug

SEQ ID NO: 1549670 - RNA, 19 nt, Artificial Sequence
  Description of Artificial Sequence: Synthetic oligonucleotide
ccgagagugguucuccagc

SEQ ID NO: 1549671 - RNA, 19 nt, Artificial Sequence
  Description of Artificial Sequence: Synthetic oligonucleotide
uuggggaauggggagccau

SEQ ID NO: 1549672 - RNA, 19 nt, Artificial Sequence
  Description of Artificial Sequence: Synthetic oligonucleotide
ucguuggccuuggggauca

SEQ ID NO: 1549673 - RNA, 19 nt, Artificial Sequence
  Description of Artificial Sequence: Synthetic oligonucleotide
cugcgucuccuuucaauca

SEQ ID NO: 1549674 - RNA, 19 nt, Artificial Sequence
  Description of Artificial Sequence: Synthetic oligonucleotide
cucagaagagagggcuccc

SEQ ID NO: 1549675 - RNA, 19 nt, Artificial Sequence
  Description of Artificial Sequence: Synthetic oligonucleotide
ucggaggccagggguagca

SEQ ID NO: 1549676 - RNA, 19 nt, Artificial Sequence
  Description of Artificial Sequence: Synthetic oligonucleotide
accgggguuucuucuuacu

SEQ ID NO: 1549677 - RNA, 19 nt, Artificial Sequence
  Description of Artificial Sequence: Synthetic oligonucleotide
uucuguccccaggggauca

SEQ ID NO: 1549678 - RNA, 19 nt, Artificial Sequence
  Description of Artificial Sequence: Synthetic oligonucleotide
ccgauggugaggugguggg

SEQ ID NO: 1549679 - RNA, 19 nt, Artificial Sequence
  Description of Artificial Sequence: Synthetic oligonucleotide
uuggaggccucaggggaca

SEQ ID NO: 1549680 - RNA, 19 nt, Artificial Sequence
  Description of Artificial Sequence: Synthetic oligonucleotide
caccaagugcagccugaag

SEQ ID NO: 1549681 - RNA, 19 nt, Artificial Sequence
  Description of Artificial Sequence: Synthetic oligonucleotide
gaaggccguguacccgagc

SEQ ID NO: 1549682 - RNA, 19 nt, Artificial Sequence
  Description of Artificial Sequence: Synthetic oligonucleotide
gggacguaucagucugggg

SEQ ID NO: 1549683 - RNA, 19 nt, Artificial Sequence
  Description of Artificial Sequence: Synthetic oligonucleotide
cugcccuguccucccagcc

SEQ ID NO: 1549684 - RNA, 19 nt, Artificial Sequence
  Description of Artificial Sequence: Synthetic oligonucleotide
cagcgcaccaucccagguc

SEQ ID NO: 1549685 - RNA, 19 nt, Artificial Sequence
  Description of Artificial Sequence: Synthetic oligonucleotide
auggggagccauguucugu

SEQ ID NO: 1549686 - RNA, 19 nt, Artificial Sequence
  Description of Artificial Sequence: Synthetic oligonucleotide
cauaggucuccgauaggua

SEQ ID NO: 1549687 - RNA, 19 nt, Artificial Sequence
  Description of Artificial Sequence: Synthetic oligonucleotide
ggggacguaucagucuggg

SEQ ID NO: 1549688 - RNA, 19 nt, Artificial Sequence
  Description of Artificial Sequence: Synthetic oligonucleotide
gccgcaaccgaggggaagg

SEQ ID NO: 1549689 - RNA, 19 nt, Artificial Sequence
  Description of Artificial Sequence: Synthetic oligonucleotide
agcauuaaguccagaucuu

SEQ ID NO: 1549690 - RNA, 19 nt, Artificial Sequence
  Description of Artificial Sequence: Synthetic oligonucleotide
ccagcgucacagaacauca

SEQ ID NO: 1549691 - RNA, 19 nt, Artificial Sequence
  Description of Artificial Sequence: Synthetic oligonucleotide
gagagcuguuagcaccaaa

SEQ ID NO: 1549692 - RNA, 19 nt, Artificial Sequence
  Description of Artificial Sequence: Synthetic oligonucleotide
guagcgccggcaucggcuc

SEQ ID NO: 1549693 - RNA, 19 nt, Artificial Sequence
  Description of Artificial Sequence: Synthetic oligonucleotide
cuguggcugggcagcuggg

SEQ ID NO: 1549694 - RNA, 19 nt, Artificial Sequence
  Description of Artificial Sequence: Synthetic oligonucleotide
ggggucguugccgaaccgg

SEQ ID NO: 1549695 - RNA, 19 nt, Artificial Sequence
  Description of Artificial Sequence: Synthetic oligonucleotide
aucggaggccagggguagc

SEQ ID NO: 1549696 - RNA, 19 nt, Artificial Sequence
  Description of Artificial Sequence: Synthetic oligonucleotide
gggagccauguucuguccc

SEQ ID NO: 1549697 - RNA, 19 nt, Artificial Sequence
  Description of Artificial Sequence: Synthetic oligonucleotide
ccggcaucggcucaggguc

SEQ ID NO: 1549698 - RNA, 19 nt, Artificial Sequence
  Description of Artificial Sequence: Synthetic oligonucleotide
cacccuuguucuuccccac

SEQ ID NO: 1549699 - RNA, 19 nt, Artificial Sequence
  Description of Artificial Sequence: Synthetic oligonucleotide
cagcgucacagaacaucac

SEQ ID NO: 1549700 - RNA, 19 nt, Artificial Sequence
  Description of Artificial Sequence: Synthetic oligonucleotide
aggacgggcaggguaggca

SEQ ID NO: 1549701 - RNA, 19 nt, Artificial Sequence
  Description of Artificial Sequence: Synthetic oligonucleotide
ucugcauccuccggaugua

SEQ ID NO: 1549702 - RNA, 19 nt, Artificial Sequence
  Description of Artificial Sequence: Synthetic oligonucleotide
cuccgauagguacucccga

SEQ ID NO: 1549703 - RNA, 19 nt, Artificial Sequence
  Description of Artificial Sequence: Synthetic oligonucleotide
gcuucacuacuuguugggc

SEQ ID NO: 1549704 - RNA, 19 nt, Artificial Sequence
  Description of Artificial Sequence: Synthetic oligonucleotide
gagguagcgccggcaucgg

SEQ ID NO: 1549705 - RNA, 19 nt, Artificial Sequence
  Description of Artificial Sequence: Synthetic oligonucleotide
gggaucaugguagccugug

SEQ ID NO: 1549706 - RNA, 19 nt, Artificial Sequence
  Description of Artificial Sequence: Synthetic oligonucleotide
ugauacggucguugauguu

SEQ ID NO: 1549707 - RNA, 19 nt, Artificial Sequence
  Description of Artificial Sequence: Synthetic oligonucleotide
agucaucuaggagcauuaa

SEQ ID NO: 1549708 - RNA, 19 nt, Artificial Sequence
  Description of Artificial Sequence: Synthetic oligonucleotide
gggaaggccguguacccga

SEQ ID NO: 1549709 - RNA, 19 nt, Artificial Sequence
  Description of Artificial Sequence: Synthetic oligonucleotide
aggccguguacccgagccu

SEQ ID NO: 1549710 - RNA, 19 nt, Artificial Sequence
  Description of Artificial Sequence: Synthetic oligonucleotide
caucccaggucguuggccu

SEQ ID NO: 1549711 - RNA, 19 nt, Artificial Sequence
  Description of Artificial Sequence: Synthetic oligonucleotide
ccaggggagagcuguuagc

SEQ ID NO: 1549712 - RNA, 19 nt, Artificial Sequence
  Description of Artificial Sequence: Synthetic oligonucleotide
gggguuucuucuuacuccu

SEQ ID NO: 1549713 - RNA, 19 nt, Artificial Sequence
  Description of Artificial Sequence: Synthetic oligonucleotide
gagugguucuccagcucuc

SEQ ID NO: 1549714 - RNA, 19 nt, Artificial Sequence
  Description of Artificial Sequence: Synthetic oligonucleotide
agggcuccccuaccggggu

SEQ ID NO: 1549715 - RNA, 19 nt, Artificial Sequence
  Description of Artificial Sequence: Synthetic oligonucleotide
uaggagcauuaaguccaga

SEQ ID NO: 1549716 - RNA, 19 nt, Artificial Sequence
  Description of Artificial Sequence: Synthetic oligonucleotide
caggcgccgagagugguuc

SEQ ID NO: 1549717 - RNA, 19 nt, Artificial Sequence
  Description of Artificial Sequence: Synthetic oligonucleotide
aaccugcgucuccuuucaa

SEQ ID NO: 1549718 - RNA, 19 nt, Artificial Sequence
  Description of Artificial Sequence: Synthetic oligonucleotide
gccgucuucaccggguagc

SEQ ID NO: 1549719 - RNA, 19 nt, Artificial Sequence
  Description of Artificial Sequence: Synthetic oligonucleotide
ccgauagguacucccgaac

SEQ ID NO: 1549720 - RNA, 19 nt, Artificial Sequence
  Description of Artificial Sequence: Synthetic oligonucleotide
ccuggaugcgaagccagag

SEQ ID NO: 1549721 - RNA, 19 nt, Artificial Sequence
  Description of Artificial Sequence: Synthetic oligonucleotide
cauguucacacccgauggu

SEQ ID NO: 1549722 - RNA, 19 nt, Artificial Sequence
  Description of Artificial Sequence: Synthetic oligonucleotide
cccucauaccaccagggga

SEQ ID NO: 1549723 - RNA, 19 nt, Artificial Sequence
  Description of Artificial Sequence: Synthetic oligonucleotide
agagccuccccugggccgu

SEQ ID NO: 1549724 - RNA, 19 nt, Artificial Sequence
  Description of Artificial Sequence: Synthetic oligonucleotide
ggggccgcaaccgagggga

SEQ ID NO: 1549725 - RNA, 19 nt, Artificial Sequence
  Description of Artificial Sequence: Synthetic oligonucleotide
ggggaucggaggccagggg

SEQ ID NO: 1549726 - RNA, 19 nt, Artificial Sequence
  Description of Artificial Sequence: Synthetic oligonucleotide
cccgauggugagguggugg

SEQ ID NO: 1549727 - RNA, 19 nt, Artificial Sequence
  Description of Artificial Sequence: Synthetic oligonucleotide
gggaucagcauucccaauu

SEQ ID NO: 1549728 - RNA, 19 nt, Artificial Sequence
  Description of Artificial Sequence: Synthetic oligonucleotide
cccagcaucagagccuccc

SEQ ID NO: 1549729 - RNA, 19 nt, Artificial Sequence
  Description of Artificial Sequence: Synthetic oligonucleotide
gacgggcaggguaggcagc

SEQ ID NO: 1549730 - RNA, 19 nt, Artificial Sequence
  Description of Artificial Sequence: Synthetic oligonucleotide
ggccguguacccgagccug

SEQ ID NO: 1549731 - RNA, 19 nt, Artificial Sequence
  Description of Artificial Sequence: Synthetic oligonucleotide
cucuugcuucacuacuugu

SEQ ID NO: 1549732 - RNA, 19 nt, Artificial Sequence
  Description of Artificial Sequence: Synthetic oligonucleotide
uccccuaccgggguuucuu

SEQ ID NO: 1549733 - RNA, 19 nt, Artificial Sequence
  Description of Artificial Sequence: Synthetic oligonucleotide
gcgucuccuuucaaucagg

SEQ ID NO: 1549734 - RNA, 19 nt, Artificial Sequence
  Description of Artificial Sequence: Synthetic oligonucleotide
ggccgggugcucuccaccc

SEQ ID NO: 1549735 - RNA, 19 nt, Artificial Sequence
  Description of Artificial Sequence: Synthetic oligonucleotide
cacagaacaucacccuccu

SEQ ID NO: 1549736 - RNA, 19 nt, Artificial Sequence
  Description of Artificial Sequence: Synthetic oligonucleotide
cguugauguugaaccugcg

SEQ ID NO: 1549737 - RNA, 19 nt, Artificial Sequence
  Description of Artificial Sequence: Synthetic oligonucleotide
gggagagcuguuagcacca

SEQ ID NO: 1549738 - RNA, 19 nt, Artificial Sequence
  Description of Artificial Sequence: Synthetic oligonucleotide
caggggaucaugguagccu

SEQ ID NO: 1549739 - RNA, 19 nt, Artificial Sequence
  Description of Artificial Sequence: Synthetic oligonucleotide
acccuggacccagacuccu

SEQ ID NO: 1549740 - RNA, 19 nt, Artificial Sequence
  Description of Artificial Sequence: Synthetic oligonucleotide
ggucguugccgaaccggag

SEQ ID NO: 1549741 - RNA, 19 nt, Artificial Sequence
  Description of Artificial Sequence: Synthetic oligonucleotide
uacggucguugauguugaa

SEQ ID NO: 1549742 - RNA, 19 nt, Artificial Sequence
  Description of Artificial Sequence: Synthetic oligonucleotide
cccaaagcucaagcugugg

SEQ ID NO: 1549743 - RNA, 19 nt, Artificial Sequence
  Description of Artificial Sequence: Synthetic oligonucleotide
gguagcagggagucaucua

SEQ ID NO: 1549744 - RNA, 19 nt, Artificial Sequence
  Description of Artificial Sequence: Synthetic oligonucleotide
cugcuccgucggcugcugg

SEQ ID NO: 1549745 - RNA, 19 nt, Artificial Sequence
  Description of Artificial Sequence: Synthetic oligonucleotide
cuaccgggguuucuucuua

SEQ ID NO: 1549746 - RNA, 19 nt, Artificial Sequence
  Description of Artificial Sequence: Synthetic oligonucleotide
cccacccucauaccaccag

SEQ ID NO: 1549747 - RNA, 19 nt, Artificial Sequence
  Description of Artificial Sequence: Synthetic oligonucleotide
agcucaagcuguggcugaa

SEQ ID NO: 1549748 - RNA, 19 nt, Artificial Sequence
  Description of Artificial Sequence: Synthetic oligonucleotide
uccucggcacaggggcagc

SEQ ID NO: 1549749 - RNA, 19 nt, Artificial Sequence
  Description of Artificial Sequence: Synthetic oligonucleotide
ggauuucugcagguccuuc

SEQ ID NO: 1549750 - RNA, 19 nt, Artificial Sequence
  Description of Artificial Sequence: Synthetic oligonucleotide
ggccgucuucaccggguag

SEQ ID NO: 1549751 - RNA, 19 nt, Artificial Sequence
  Description of Artificial Sequence: Synthetic oligonucleotide
uccgucggcugcuggccuu

SEQ ID NO: 1549752 - RNA, 19 nt, Artificial Sequence
  Description of Artificial Sequence: Synthetic oligonucleotide
gcaccaucccaggucguug

SEQ ID NO: 1549753 - RNA, 19 nt, Artificial Sequence
  Description of Artificial Sequence: Synthetic oligonucleotide
cacacccgauggugaggug

SEQ ID NO: 1549754 - RNA, 19 nt, Artificial Sequence
  Description of Artificial Sequence: Synthetic oligonucleotide
aggcugggugccaucuagu

SEQ ID NO: 1549755 - RNA, 19 nt, Artificial Sequence
  Description of Artificial Sequence: Synthetic oligonucleotide
cucauaccaccaggggaga

SEQ ID NO: 1549756 - RNA, 19 nt, Artificial Sequence
  Description of Artificial Sequence: Synthetic oligonucleotide
cccauaggucuccgauagg

SEQ ID NO: 1549757 - RNA, 19 nt, Artificial Sequence
  Description of Artificial Sequence: Synthetic oligonucleotide
gagguggugggaaggccgu

SEQ ID NO: 1549758 - RNA, 19 nt, Artificial Sequence
  Description of Artificial Sequence: Synthetic oligonucleotide
ccauaggucuccgauaggu

SEQ ID NO: 1549759 - RNA, 19 nt, Artificial Sequence
  Description of Artificial Sequence: Synthetic oligonucleotide
gcuccgucggcugcuggcc

SEQ ID NO: 1549760 - RNA, 19 nt, Artificial Sequence
  Description of Artificial Sequence: Synthetic oligonucleotide
agguggugggaaggccgug

SEQ ID NO: 1549761 - RNA, 19 nt, Artificial Sequence
  Description of Artificial Sequence: Synthetic oligonucleotide
gggucguugccgaaccgga

SEQ ID NO: 1549762 - RNA, 19 nt, Artificial Sequence
  Description of Artificial Sequence: Synthetic oligonucleotide
ggcaucggcucagggucag

SEQ ID NO: 1549763 - RNA, 19 nt, Artificial Sequence
  Description of Artificial Sequence: Synthetic oligonucleotide
ggcucagaagagagggcuc

SEQ ID NO: 1549764 - RNA, 19 nt, Artificial Sequence
  Description of Artificial Sequence: Synthetic oligonucleotide
aggcgccgagagugguucu

SEQ ID NO: 1549765 - RNA, 19 nt, Artificial Sequence
  Description of Artificial Sequence: Synthetic oligonucleotide
cacccgauggugagguggu

SEQ ID NO: 1549766 - RNA, 19 nt, Artificial Sequence
  Description of Artificial Sequence: Synthetic oligonucleotide
cccagacccacugcugccc

SEQ ID NO: 1549767 - RNA, 19 nt, Artificial Sequence
  Description of Artificial Sequence: Synthetic oligonucleotide
ccugggccgucuucaccgg

SEQ ID NO: 1549768 - RNA, 19 nt, Artificial Sequence
  Description of Artificial Sequence: Synthetic oligonucleotide
ccuuucaaucagguuguga

SEQ ID NO: 1549769 - RNA, 19 nt, Artificial Sequence
  Description of Artificial Sequence: Synthetic oligonucleotide
gccaccccacccucauacc

SEQ ID NO: 1549770 - RNA, 19 nt, Artificial Sequence
  Description of Artificial Sequence: Synthetic oligonucleotide
ccaggggaucaugguagcc

SEQ ID NO: 1549771 - RNA, 19 nt, Artificial Sequence
  Description of Artificial Sequence: Synthetic oligonucleotide
agguugugauaaacuuguu

SEQ ID NO: 1549772 - RNA, 19 nt, Artificial Sequence
  Description of Artificial Sequence: Synthetic oligonucleotide
ccuccggauguaauccaca

SEQ ID NO: 1549773 - RNA, 19 nt, Artificial Sequence
  Description of Artificial Sequence: Synthetic oligonucleotide
cccuggggagguagcgccg

SEQ ID NO: 1549774 - RNA, 19 nt, Artificial Sequence
  Description of Artificial Sequence: Synthetic oligonucleotide
cccaauuccuugauacggu

SEQ ID NO: 1549775 - RNA, 19 nt, Artificial Sequence
  Description of Artificial Sequence: Synthetic oligonucleotide
uggccaccccacccucaua

SEQ ID NO: 1549776 - RNA, 19 nt, Artificial Sequence
  Description of Artificial Sequence: Synthetic oligonucleotide
acccgauggugagguggug

SEQ ID NO: 1549777 - RNA, 19 nt, Artificial Sequence
  Description of Artificial Sequence: Synthetic oligonucleotide
ccgggugcucuccacccug

SEQ ID NO: 1549778 - RNA, 19 nt, Artificial Sequence
  Description of Artificial Sequence: Synthetic oligonucleotide
ggucguuggccuuggggau

SEQ ID NO: 1549779 - RNA, 19 nt, Artificial Sequence
  Description of Artificial Sequence: Synthetic oligonucleotide
ccucacccuuguucuuccc

SEQ ID NO: 1549780 - RNA, 19 nt, Artificial Sequence
  Description of Artificial Sequence: Synthetic oligonucleotide
cucggcacaggggcagcca

SEQ ID NO: 1549781 - RNA, 19 nt, Artificial Sequence
  Description of Artificial Sequence: Synthetic oligonucleotide
gcgccgagagugguucucc

SEQ ID NO: 1549782 - RNA, 19 nt, Artificial Sequence
  Description of Artificial Sequence: Synthetic oligonucleotide
ggucuccgauagguacucc

SEQ ID NO: 1549783 - RNA, 19 nt, Artificial Sequence
  Description of Artificial Sequence: Synthetic oligonucleotide
ggccgcaaccgaggggaag

SEQ ID NO: 1549784 - RNA, 19 nt, Artificial Sequence
  Description of Artificial Sequence: Synthetic oligonucleotide
gccggcaucggcucagggu

SEQ ID NO: 1549785 - RNA, 19 nt, Artificial Sequence
  Description of Artificial Sequence: Synthetic oligonucleotide
caccggguagcucuugcuu

SEQ ID NO: 1549786 - RNA, 19 nt, Artificial Sequence
  Description of Artificial Sequence: Synthetic oligonucleotide
ccgaggggaaggacgggca

SEQ ID NO: 1549787 - RNA, 19 nt, Artificial Sequence
  Description of Artificial Sequence: Synthetic oligonucleotide
gccugaagggugggagggc

SEQ ID NO: 1549788 - RNA, 19 nt, Artificial Sequence
  Description of Artificial Sequence: Synthetic oligonucleotide
ggguagcagggagucaucu

SEQ ID NO: 1549789 - RNA, 19 nt, Artificial Sequence
  Description of Artificial Sequence: Synthetic oligonucleotide
cugcauccuccggauguaa

SEQ ID NO: 1549790 - RNA, 19 nt, Artificial Sequence
  Description of Artificial Sequence: Synthetic oligonucleotide
ccccugggccgucuucacc

SEQ ID NO: 1549791 - RNA, 19 nt, Artificial Sequence
  Description of Artificial Sequence: Synthetic oligonucleotide
cagcuaccucacaccaagu

SEQ ID NO: 1549792 - RNA, 19 nt, Artificial Sequence
  Description of Artificial Sequence: Synthetic oligonucleotide
cgucacagaacaucacccu

SEQ ID NO: 1549793 - RNA, 19 nt, Artificial Sequence
  Description of Artificial Sequence: Synthetic oligonucleotide
ggcgccgagagugguucuc

SEQ ID NO: 1549794 - RNA, 19 nt, Artificial Sequence
  Description of Artificial Sequence: Synthetic oligonucleotide
ggcagcuaccucacaccaa

SEQ ID NO: 1549795 - RNA, 19 nt, Artificial Sequence
  Description of Artificial Sequence: Synthetic oligonucleotide
ggucaucuccaggcgccga

SEQ ID NO: 1549796 - RNA, 19 nt, Artificial Sequence
  Description of Artificial Sequence: Synthetic oligonucleotide
gccguguacccgagccugc

SEQ ID NO: 1549797 - RNA, 19 nt, Artificial Sequence
  Description of Artificial Sequence: Synthetic oligonucleotide
ggggccgggugcucuccac

SEQ ID NO: 1549798 - RNA, 19 nt, Artificial Sequence
  Description of Artificial Sequence: Synthetic oligonucleotide
gcaucggcucagggucagg

SEQ ID NO: 1549799 - RNA, 19 nt, Artificial Sequence
  Description of Artificial Sequence: Synthetic oligonucleotide
ccccuaccgggguuucuuc

SEQ ID NO: 1549800 - RNA, 19 nt, Artificial Sequence
  Description of Artificial Sequence: Synthetic oligonucleotide
cagggguagcagggaguca

SEQ ID NO: 1549801 - RNA, 19 nt, Artificial Sequence
  Description of Artificial Sequence: Synthetic oligonucleotide
ggguagcucuugcuucacu

SEQ ID NO: 1549802 - RNA, 19 nt, Artificial Sequence
  Description of Artificial Sequence: Synthetic oligonucleotide
cguugccgaaccggagggg

SEQ ID NO: 1549803 - RNA, 19 nt, Artificial Sequence
  Description of Artificial Sequence: Synthetic oligonucleotide
cgagagugguucuccagcu

SEQ ID NO: 1549804 - RNA, 19 nt, Artificial Sequence
  Description of Artificial Sequence: Synthetic oligonucleotide
gggugccaucuagucccag

SEQ ID NO: 1549805 - RNA, 19 nt, Artificial Sequence
  Description of Artificial Sequence: Synthetic oligonucleotide
gccccugcuccucggcaca

SEQ ID NO: 1549806 - RNA, 19 nt, Artificial Sequence
  Description of Artificial Sequence: Synthetic oligonucleotide
gggguagcagggagucauc

SEQ ID NO: 1549807 - RNA, 19 nt, Artificial Sequence
  Description of Artificial Sequence: Synthetic oligonucleotide
caucacccuccuccaugcu

SEQ ID NO: 1549808 - RNA, 19 nt, Artificial Sequence
  Description of Artificial Sequence: Synthetic oligonucleotide
agccagcgucacagaacau

SEQ ID NO: 1549809 - RNA, 19 nt, Artificial Sequence
  Description of Artificial Sequence: Synthetic oligonucleotide
ccuugauacggucguugau

SEQ ID NO: 1549810 - RNA, 19 nt, Artificial Sequence
  Description of Artificial Sequence: Synthetic oligonucleotide
gggccgucuucaccgggua

SEQ ID NO: 1549811 - RNA, 19 nt, Artificial Sequence
  Description of Artificial Sequence: Synthetic oligonucleotide
ggaccucaggccccagcau

SEQ ID NO: 1549812 - RNA, 19 nt, Artificial Sequence
  Description of Artificial Sequence: Synthetic oligonucleotide
ggcaggcacuaaguccaaa

SEQ ID NO: 1549813 - RNA, 19 nt, Artificial Sequence
  Description of Artificial Sequence: Synthetic oligonucleotide
cuccgucggcugcuggccu

SEQ ID NO: 1549814 - RNA, 19 nt, Artificial Sequence
  Description of Artificial Sequence: Synthetic oligonucleotide
cgcaaccgaggggaaggac

SEQ ID NO: 1549815 - RNA, 19 nt, Artificial Sequence
  Description of Artificial Sequence: Synthetic oligonucleotide
cccuaccgggguuucuucu

SEQ ID NO: 1549816 - RNA, 19 nt, Artificial Sequence
  Description of Artificial Sequence: Synthetic oligonucleotide
gguagccugugggccccuc

SEQ ID NO: 1549817 - RNA, 19 nt, Artificial Sequence
  Description of Artificial Sequence: Synthetic oligonucleotide
ccuaccgggguuucuucuu

SEQ ID NO: 1549818 - RNA, 19 nt, Artificial Sequence
  Description of Artificial Sequence: Synthetic oligonucleotide
ccccacccucauaccacca

SEQ ID NO: 1549819 - RNA, 19 nt, Artificial Sequence
  Description of Artificial Sequence: Synthetic oligonucleotide
ccguguacccgagccugca

SEQ ID NO: 1549820 - RNA, 19 nt, Artificial Sequence
  Description of Artificial Sequence: Synthetic oligonucleotide
gcgccggcaucggcucagg

SEQ ID NO: 1549821 - RNA, 19 nt, Artificial Sequence
  Description of Artificial Sequence: Synthetic oligonucleotide
gcuccccuaccgggguuuc

SEQ ID NO: 1549822 - RNA, 19 nt, Artificial Sequence
  Description of Artificial Sequence: Synthetic oligonucleotide
gccccaucuguggggacgu

SEQ ID NO: 1549823 - RNA, 19 nt, Artificial Sequence
  Description of Artificial Sequence: Synthetic oligonucleotide
cgccgagagugguucucca

SEQ ID NO: 1549824 - RNA, 19 nt, Artificial Sequence
  Description of Artificial Sequence: Synthetic oligonucleotide
gccgggugcucuccacccu

SEQ ID NO: 1549825 - RNA, 19 nt, Artificial Sequence
  Description of Artificial Sequence: Synthetic oligonucleotide
cggguagcucuugcuucac

SEQ ID NO: 1549826 - RNA, 19 nt, Artificial Sequence
  Description of Artificial Sequence: Synthetic oligonucleotide
ggucuggggccgggugcuc

SEQ ID NO: 1549827 - RNA, 19 nt, Artificial Sequence
  Description of Artificial Sequence: Synthetic oligonucleotide
cggcaucggcucaggguca

SEQ ID NO: 1549828 - RNA, 19 nt, Artificial Sequence
  Description of Artificial Sequence: Synthetic oligonucleotide
cuccccuaccgggguuucu

SEQ ID NO: 1549829 - RNA, 19 nt, Artificial Sequence
  Description of Artificial Sequence: Synthetic oligonucleotide
ccgcaaccgaggggaagga

SEQ ID NO: 1549830 - RNA, 19 nt, Artificial Sequence
  Description of Artificial Sequence: Synthetic oligonucleotide
cccaucuguggggacguau

SEQ ID NO: 1549831 - RNA, 19 nt, Artificial Sequence
  Description of Artificial Sequence: Synthetic oligonucleotide
ccaggcgccgagagugguu

SEQ ID NO: 1549832 - RNA, 19 nt, Artificial Sequence
  Description of Artificial Sequence: Synthetic oligonucleotide
gggccgcaaccgaggggaa

SEQ ID NO: 1549833 - RNA, 19 nt, Artificial Sequence
  Description of Artificial Sequence: Synthetic oligonucleotide
gggcuccccuaccgggguu

SEQ ID NO: 1549834 - RNA, 19 nt, Artificial Sequence
  Description of Artificial Sequence: Synthetic oligonucleotide
cguguacccgagccugcau

SEQ ID NO: 1549835 - RNA, 19 nt, Artificial Sequence
  Description of Artificial Sequence: Synthetic oligonucleotide
gcgcaccaucccaggucgu

SEQ ID NO: 1549836 - RNA, 19 nt, Artificial Sequence
  Description of Artificial Sequence: Synthetic oligonucleotide
cgcaccaucccaggucguu

SEQ ID NO: 1549837 - RNA, 19 nt, Artificial Sequence
  Description of Artificial Sequence: Synthetic oligonucleotide
gccuccccugggccgucuu

SEQ ID NO: 1549838 - RNA, 19 nt, Artificial Sequence
  Description of Artificial Sequence: Synthetic oligonucleotide
aauauauagacgcacaauc

SEQ ID NO: 1549839 - RNA, 19 nt, Artificial Sequence
  Description of Artificial Sequence: Synthetic oligonucleotide
aaagaaggaauuuauuuac

SEQ ID NO: 1549840 - RNA, 19 nt, Artificial Sequence
  Description of Artificial Sequence: Synthetic oligonucleotide
uuuuauaggccacauaugg

SEQ ID NO: 1549841 - RNA, 19 nt, Artificial Sequence
  Description of Artificial Sequence: Synthetic oligonucleotide
aauguuaugucacaauauc

SEQ ID NO: 1549842 - RNA, 19 nt, Artificial Sequence
  Description of Artificial Sequence: Synthetic oligonucleotide
uguaaauucagccuaacac

SEQ ID NO: 1549843 - RNA, 19 nt, Artificial Sequence
  Description of Artificial Sequence: Synthetic oligonucleotide
uuaaccaccaacuauauau

SEQ ID NO: 1549844 - RNA, 19 nt, Artificial Sequence
  Description of Artificial Sequence: Synthetic oligonucleotide
aaccauuuuaguucgcccc

SEQ ID NO: 1549845 - RNA, 19 nt, Artificial Sequence
  Description of Artificial Sequence: Synthetic oligonucleotide
auugagaacaucuucuacg

SEQ ID NO: 1549846 - RNA, 19 nt, Artificial Sequence
  Description of Artificial Sequence: Synthetic oligonucleotide
ugcuucucaaucaaggugg

SEQ ID NO: 1549847 - RNA, 19 nt, Artificial Sequence
  Description of Artificial Sequence: Synthetic oligonucleotide
uaaaagaguaauuccuucg

SEQ ID NO: 1549848 - RNA, 19 nt, Artificial Sequence
  Description of Artificial Sequence: Synthetic oligonucleotide
aaaccauuuuaguucgccc

SEQ ID NO: 1549849 - RNA, 19 nt, Artificial Sequence
  Description of Artificial Sequence: Synthetic oligonucleotide
uauauaucuuguauuagca

SEQ ID NO: 1549850 - RNA, 19 nt, Artificial Sequence
  Description of Artificial Sequence: Synthetic oligonucleotide
gauagcuguaaauucagcc

SEQ ID NO: 1549851 - RNA, 19 nt, Artificial Sequence
  Description of Artificial Sequence: Synthetic oligonucleotide
uuuucgagcauugagaaca

SEQ ID NO: 1549852 - RNA, 19 nt, Artificial Sequence
  Description of Artificial Sequence: Synthetic oligonucleotide
agugguagucuucuaaccc

SEQ ID NO: 1549853 - RNA, 19 nt, Artificial Sequence
  Description of Artificial Sequence: Synthetic oligonucleotide
uuugaacauguaaacagag

SEQ ID NO: 1549854 - RNA, 19 nt, Artificial Sequence
  Description of Artificial Sequence: Synthetic oligonucleotide
uuacaguuaucaaggaggg

SEQ ID NO: 1549855 - RNA, 19 nt, Artificial Sequence
  Description of Artificial Sequence: Synthetic oligonucleotide
guagcuguaacagaaauag

SEQ ID NO: 1549856 - RNA, 19 nt, Artificial Sequence
  Description of Artificial Sequence: Synthetic oligonucleotide
auuauuaggucuuaauacu

SEQ ID NO: 1549857 - RNA, 19 nt, Artificial Sequence
  Description of Artificial Sequence: Synthetic oligonucleotide
ugucacaucggcauacugg

SEQ ID NO: 1549858 - RNA, 19 nt, Artificial Sequence
  Description of Artificial Sequence: Synthetic oligonucleotide
aauaggacuggagaguuuc

SEQ ID NO: 1549859 - RNA, 19 nt, Artificial Sequence
  Description of Artificial Sequence: Synthetic oligonucleotide
cauaaguuuguuaaccacc

SEQ ID NO: 1549860 - RNA, 19 nt, Artificial Sequence
  Description of Artificial Sequence: Synthetic oligonucleotide
aauuuucgagcauugagaa

SEQ ID NO: 1549861 - RNA, 19 nt, Artificial Sequence
  Description of Artificial Sequence: Synthetic oligonucleotide
uguuaugucacaauaucaa

SEQ ID NO: 1549862 - RNA, 19 nt, Artificial Sequence
  Description of Artificial Sequence: Synthetic oligonucleotide
ucaaucaaggugguaaugg

SEQ ID NO: 1549863 - RNA, 19 nt, Artificial Sequence
  Description of Artificial Sequence: Synthetic oligonucleotide
uaggucuuaauacucaugu

SEQ ID NO: 1549864 - RNA, 19 nt, Artificial Sequence
  Description of Artificial Sequence: Synthetic oligonucleotide
aacuauauaucuuguauua

SEQ ID NO: 1549865 - RNA, 19 nt, Artificial Sequence
  Description of Artificial Sequence: Synthetic oligonucleotide
uuucauaaguuuguuaacc

SEQ ID NO: 1549866 - RNA, 19 nt, Artificial Sequence
  Description of Artificial Sequence: Synthetic oligonucleotide
uuuugaacauguaaacaga

SEQ ID NO: 1549867 - RNA, 19 nt, Artificial Sequence
  Description of Artificial Sequence: Synthetic oligonucleotide
uuaugucacaauaucaaaa

SEQ ID NO: 1549868 - RNA, 19 nt, Artificial Sequence
  Description of Artificial Sequence: Synthetic oligonucleotide
uuguuagagaaauuguucu

SEQ ID NO: 1549869 - RNA, 19 nt, Artificial Sequence
  Description of Artificial Sequence: Synthetic oligonucleotide
auguaagugccguacacgg

SEQ ID NO: 1549870 - RNA, 19 nt, Artificial Sequence
  Description of Artificial Sequence: Synthetic oligonucleotide
aauuuugggaaaugcauua

SEQ ID NO: 1549871 - RNA, 19 nt, Artificial Sequence
  Description of Artificial Sequence: Synthetic oligonucleotide
uuuguuaaccaccaacuau

SEQ ID NO: 1549872 - RNA, 19 nt, Artificial Sequence
  Description of Artificial Sequence: Synthetic oligonucleotide
ucuacuuugauggugacau

SEQ ID NO: 1549873 - RNA, 19 nt, Artificial Sequence
  Description of Artificial Sequence: Synthetic oligonucleotide
ucauaaacuuacuuuaaaa

SEQ ID NO: 1549874 - RNA, 19 nt, Artificial Sequence
  Description of Artificial Sequence: Synthetic oligonucleotide
ucgaaacagagauuuauca

SEQ ID NO: 1549875 - RNA, 19 nt, Artificial Sequence
  Description of Artificial Sequence: Synthetic oligonucleotide
uauauagacgcacaaucaa

SEQ ID NO: 1549876 - RNA, 19 nt, Artificial Sequence
  Description of Artificial Sequence: Synthetic oligonucleotide
ucgagcauugagaacaucu

SEQ ID NO: 1549877 - RNA, 19 nt, Artificial Sequence
  Description of Artificial Sequence: Synthetic oligonucleotide
uuuuaguucgccccguaca

SEQ ID NO: 1549878 - RNA, 19 nt, Artificial Sequence
  Description of Artificial Sequence: Synthetic oligonucleotide
ucuuaaauauauagacgca

SEQ ID NO: 1549879 - RNA, 19 nt, Artificial Sequence
  Description of Artificial Sequence: Synthetic oligonucleotide
aacagagauuuaucagaac

SEQ ID NO: 1549880 - RNA, 19 nt, Artificial Sequence
  Description of Artificial Sequence: Synthetic oligonucleotide
aaauuguucucuugaggcu

SEQ ID NO: 1549881 - RNA, 19 nt, Artificial Sequence
  Description of Artificial Sequence: Synthetic oligonucleotide
ucaauucacggguggaagg

SEQ ID NO: 1549882 - RNA, 19 nt, Artificial Sequence
  Description of Artificial Sequence: Synthetic oligonucleotide
gagaggauacucugcaggg

SEQ ID NO: 1549883 - RNA, 19 nt, Artificial Sequence
  Description of Artificial Sequence: Synthetic oligonucleotide
uucauaaguuuguuaacca

SEQ ID NO: 1549884 - RNA, 19 nt, Artificial Sequence
  Description of Artificial Sequence: Synthetic oligonucleotide
gaauuauuaggucuuaaua

SEQ ID NO: 1549885 - RNA, 19 nt, Artificial Sequence
  Description of Artificial Sequence: Synthetic oligonucleotide
uuauuaggucuuaauacuc

SEQ ID NO: 1549886 - RNA, 19 nt, Artificial Sequence
  Description of Artificial Sequence: Synthetic oligonucleotide
ucucauuucauaaguuugu

SEQ ID NO: 1549887 - RNA, 19 nt, Artificial Sequence
  Description of Artificial Sequence: Synthetic oligonucleotide
acaaucaauucacgggugg

SEQ ID NO: 1549888 - RNA, 19 nt, Artificial Sequence
  Description of Artificial Sequence: Synthetic oligonucleotide
aaagaguaauuccuucggu

SEQ ID NO: 1549889 - RNA, 19 nt, Artificial Sequence
  Description of Artificial Sequence: Synthetic oligonucleotide
uguuucgaaacagagauuu

SEQ ID NO: 1549890 - RNA, 19 nt, Artificial Sequence
  Description of Artificial Sequence: Synthetic oligonucleotide
auagacgcacaaucaauuc

SEQ ID NO: 1549891 - RNA, 19 nt, Artificial Sequence
  Description of Artificial Sequence: Synthetic oligonucleotide
ugggaaaugcauuagucuc

SEQ ID NO: 1549892 - RNA, 19 nt, Artificial Sequence
  Description of Artificial Sequence: Synthetic oligonucleotide
ucuaaaccaggaauuauua

SEQ ID NO: 1549893 - RNA, 19 nt, Artificial Sequence
  Description of Artificial Sequence: Synthetic oligonucleotide
ugcaguacaagugauugug

SEQ ID NO: 1549894 - RNA, 19 nt, Artificial Sequence
  Description of Artificial Sequence: Synthetic oligonucleotide
caagugauugugauuuucc

SEQ ID NO: 1549895 - RNA, 19 nt, Artificial Sequence
  Description of Artificial Sequence: Synthetic oligonucleotide
cucucauuucauaaguuug

SEQ ID NO: 1549896 - RNA, 19 nt, Artificial Sequence
  Description of Artificial Sequence: Synthetic oligonucleotide
uuuauaggccacauauggu

SEQ ID NO: 1549897 - RNA, 19 nt, Artificial Sequence
  Description of Artificial Sequence: Synthetic oligonucleotide
aagaguaauuccuucgguu

SEQ ID NO: 1549898 - RNA, 19 nt, Artificial Sequence
  Description of Artificial Sequence: Synthetic oligonucleotide
uauagacgcacaaucaauu

SEQ ID NO: 1549899 - RNA, 19 nt, Artificial Sequence
  Description of Artificial Sequence: Synthetic oligonucleotide
cuuaauacucauguugcag

SEQ ID NO: 1549900 - RNA, 19 nt, Artificial Sequence
  Description of Artificial Sequence: Synthetic oligonucleotide
ugaggauagcuguaaauuc

SEQ ID NO: 1549901 - RNA, 19 nt, Artificial Sequence
  Description of Artificial Sequence: Synthetic oligonucleotide
uuuacagcuggauguagcu

SEQ ID NO: 1549902 - RNA, 19 nt, Artificial Sequence
  Description of Artificial Sequence: Synthetic oligonucleotide
auuuuaguucgccccguac

SEQ ID NO: 1549903 - RNA, 19 nt, Artificial Sequence
  Description of Artificial Sequence: Synthetic oligonucleotide
uagacgcacaaucaauuca

SEQ ID NO: 1549904 - RNA, 19 nt, Artificial Sequence
  Description of Artificial Sequence: Synthetic oligonucleotide
cuaaaagaguaauuccuuc

SEQ ID NO: 1549905 - RNA, 19 nt, Artificial Sequence
  Description of Artificial Sequence: Synthetic oligonucleotide
acaguuaucaaggagggaa

SEQ ID NO: 1549906 - RNA, 19 nt, Artificial Sequence
  Description of Artificial Sequence: Synthetic oligonucleotide
cauauggucucaaucauga

SEQ ID NO: 1549907 - RNA, 19 nt, Artificial Sequence
  Description of Artificial Sequence: Synthetic oligonucleotide
accauuuuaguucgccccg

SEQ ID NO: 1549908 - RNA, 19 nt, Artificial Sequence
  Description of Artificial Sequence: Synthetic oligonucleotide
auacucauguugcaggugu

SEQ ID NO: 1549909 - RNA, 19 nt, Artificial Sequence
  Description of Artificial Sequence: Synthetic oligonucleotide
agauuuaucagaacugaug

SEQ ID NO: 1549910 - RNA, 19 nt, Artificial Sequence
  Description of Artificial Sequence: Synthetic oligonucleotide
auuuacagcuggauguagc

SEQ ID NO: 1549911 - RNA, 19 nt, Artificial Sequence
  Description of Artificial Sequence: Synthetic oligonucleotide
uuuucucuaaaagaguaau

SEQ ID NO: 1549912 - RNA, 19 nt, Artificial Sequence
  Description of Artificial Sequence: Synthetic oligonucleotide
augcauuagucucaguucu

SEQ ID NO: 1549913 - RNA, 19 nt, Artificial Sequence
  Description of Artificial Sequence: Synthetic oligonucleotide
gucuuaauacucauguugc

SEQ ID NO: 1549914 - RNA, 19 nt, Artificial Sequence
  Description of Artificial Sequence: Synthetic oligonucleotide
uuuaguucgccccguacaa

SEQ ID NO: 1549915 - RNA, 19 nt, Artificial Sequence
  Description of Artificial Sequence: Synthetic oligonucleotide
caauuuucgagcauugaga

SEQ ID NO: 1549916 - RNA, 19 nt, Artificial Sequence
  Description of Artificial Sequence: Synthetic oligonucleotide
ugaggcuuuugauagcugu

SEQ ID NO: 1549917 - RNA, 19 nt, Artificial Sequence
  Description of Artificial Sequence: Synthetic oligonucleotide
auuuucgagcauugagaac

SEQ ID NO: 1549918 - RNA, 19 nt, Artificial Sequence
  Description of Artificial Sequence: Synthetic oligonucleotide
auaccugcaguacaaguga

SEQ ID NO: 1549919 - RNA, 19 nt, Artificial Sequence
  Description of Artificial Sequence: Synthetic oligonucleotide
caaacuuggccugugagug

SEQ ID NO: 1549920 - RNA, 19 nt, Artificial Sequence
  Description of Artificial Sequence: Synthetic oligonucleotide
aauucugugccugcuucuc

SEQ ID NO: 1549921 - RNA, 19 nt, Artificial Sequence
  Description of Artificial Sequence: Synthetic oligonucleotide
agacgcacaaucaauucac

SEQ ID NO: 1549922 - RNA, 19 nt, Artificial Sequence
  Description of Artificial Sequence: Synthetic oligonucleotide
ugucuacucucucauuuca

SEQ ID NO: 1549923 - RNA, 19 nt, Artificial Sequence
  Description of Artificial Sequence: Synthetic oligonucleotide
uggacauaccugcaguaca

SEQ ID NO: 1549924 - RNA, 19 nt, Artificial Sequence
  Description of Artificial Sequence: Synthetic oligonucleotide
acgcacaaucaauucacgg

SEQ ID NO: 1549925 - RNA, 19 nt, Artificial Sequence
  Description of Artificial Sequence: Synthetic oligonucleotide
uucgaaacagagauuuauc

SEQ ID NO: 1549926 - RNA, 19 nt, Artificial Sequence
  Description of Artificial Sequence: Synthetic oligonucleotide
ugagugguagucuucuaac

SEQ ID NO: 1549927 - RNA, 19 nt, Artificial Sequence
  Description of Artificial Sequence: Synthetic oligonucleotide
acucucucauuucauaagu

SEQ ID NO: 1549928 - RNA, 19 nt, Artificial Sequence
  Description of Artificial Sequence: Synthetic oligonucleotide
caaucaaggugguaauggc

SEQ ID NO: 1549929 - RNA, 19 nt, Artificial Sequence
  Description of Artificial Sequence: Synthetic oligonucleotide
ggagaggauacucugcagg

SEQ ID NO: 1549930 - RNA, 19 nt, Artificial Sequence
  Description of Artificial Sequence: Synthetic oligonucleotide
uacguugguguuucgaaac

SEQ ID NO: 1549931 - RNA, 19 nt, Artificial Sequence
  Description of Artificial Sequence: Synthetic oligonucleotide
uugcccaaagucaaguaaa

SEQ ID NO: 1549932 - RNA, 19 nt, Artificial Sequence
  Description of Artificial Sequence: Synthetic oligonucleotide
agagauuuaucagaacuga

SEQ ID NO: 1549933 - RNA, 19 nt, Artificial Sequence
  Description of Artificial Sequence: Synthetic oligonucleotide
aagucaaguaaagaaggaa

SEQ ID NO: 1549934 - RNA, 19 nt, Artificial Sequence
  Description of Artificial Sequence: Synthetic oligonucleotide
uucugaaaccauccugggc

SEQ ID NO: 1549935 - RNA, 19 nt, Artificial Sequence
  Description of Artificial Sequence: Synthetic oligonucleotide
ucuacguugguguuucgaa

SEQ ID NO: 1549936 - RNA, 19 nt, Artificial Sequence
  Description of Artificial Sequence: Synthetic oligonucleotide
ugcccaaagucaaguaaag

SEQ ID NO: 1549937 - RNA, 19 nt, Artificial Sequence
  Description of Artificial Sequence: Synthetic oligonucleotide
cucgcuccaauuuucgagc

SEQ ID NO: 1549938 - RNA, 19 nt, Artificial Sequence
  Description of Artificial Sequence: Synthetic oligonucleotide
aaacagagauuuaucagaa

SEQ ID NO: 1549939 - RNA, 19 nt, Artificial Sequence
  Description of Artificial Sequence: Synthetic oligonucleotide
agaaauuuugggaaaugca

SEQ ID NO: 1549940 - RNA, 19 nt, Artificial Sequence
  Description of Artificial Sequence: Synthetic oligonucleotide
agaguaauuccuucgguuu

SEQ ID NO: 1549941 - RNA, 19 nt, Artificial Sequence
  Description of Artificial Sequence: Synthetic oligonucleotide
ugaccaucgguccacaauu

SEQ ID NO: 1549942 - RNA, 19 nt, Artificial Sequence
  Description of Artificial Sequence: Synthetic oligonucleotide
aaauuuugggaaaugcauu

SEQ ID NO: 1549943 - RNA, 19 nt, Artificial Sequence
  Description of Artificial Sequence: Synthetic oligonucleotide
gagugguagucuucuaacc

SEQ ID NO: 1549944 - RNA, 19 nt, Artificial Sequence
  Description of Artificial Sequence: Synthetic oligonucleotide
uagcuguaacagaaauagg

SEQ ID NO: 1549945 - RNA, 19 nt, Artificial Sequence
  Description of Artificial Sequence: Synthetic oligonucleotide
auauauagacgcacaauca

SEQ ID NO: 1549946 - RNA, 19 nt, Artificial Sequence
  Description of Artificial Sequence: Synthetic oligonucleotide
agaaauaggacuggagagu

SEQ ID NO: 1549947 - RNA, 19 nt, Artificial Sequence
  Description of Artificial Sequence: Synthetic oligonucleotide
ugguguuucgaaacagaga

SEQ ID NO: 1549948 - RNA, 19 nt, Artificial Sequence
  Description of Artificial Sequence: Synthetic oligonucleotide
acaagugauugugauuuuc

SEQ ID NO: 1549949 - RNA, 19 nt, Artificial Sequence
  Description of Artificial Sequence: Synthetic oligonucleotide
uuuguuguggaggcacccg

SEQ ID NO: 1549950 - RNA, 19 nt, Artificial Sequence
  Description of Artificial Sequence: Synthetic oligonucleotide
uguaagugccguacacggc

SEQ ID NO: 1549951 - RNA, 19 nt, Artificial Sequence
  Description of Artificial Sequence: Synthetic oligonucleotide
auuagucucaguucucuua

SEQ ID NO: 1549952 - RNA, 19 nt, Artificial Sequence
  Description of Artificial Sequence: Synthetic oligonucleotide
ucuaaccccugguauaaaa

SEQ ID NO: 1549953 - RNA, 19 nt, Artificial Sequence
  Description of Artificial Sequence: Synthetic oligonucleotide
aaagcggagaggauacucu

SEQ ID NO: 1549954 - RNA, 19 nt, Artificial Sequence
  Description of Artificial Sequence: Synthetic oligonucleotide
cucuaaaagaguaauuccu

SEQ ID NO: 1549955 - RNA, 19 nt, Artificial Sequence
  Description of Artificial Sequence: Synthetic oligonucleotide
ucuacucucucauuucaua

SEQ ID NO: 1549956 - RNA, 19 nt, Artificial Sequence
  Description of Artificial Sequence: Synthetic oligonucleotide
uuugauagcuguugcccaa

SEQ ID NO: 1549957 - RNA, 19 nt, Artificial Sequence
  Description of Artificial Sequence: Synthetic oligonucleotide
agaggauacucugcagggc

SEQ ID NO: 1549958 - RNA, 19 nt, Artificial Sequence
  Description of Artificial Sequence: Synthetic oligonucleotide
uguuaaccaccaacuauau

SEQ ID NO: 1549959 - RNA, 19 nt, Artificial Sequence
  Description of Artificial Sequence: Synthetic oligonucleotide
agugauugugauuuuccuu

SEQ ID NO: 1549960 - RNA, 19 nt, Artificial Sequence
  Description of Artificial Sequence: Synthetic oligonucleotide
aucaauucacggguggaag

SEQ ID NO: 1549961 - RNA, 19 nt, Artificial Sequence
  Description of Artificial Sequence: Synthetic oligonucleotide
uaaccccugguauaaaaua

SEQ ID NO: 1549962 - RNA, 19 nt, Artificial Sequence
  Description of Artificial Sequence: Synthetic oligonucleotide
uagucuucuaaccccuggu

SEQ ID NO: 1549963 - RNA, 19 nt, Artificial Sequence
  Description of Artificial Sequence: Synthetic oligonucleotide
acauaccugcaguacaagu

SEQ ID NO: 1549964 - RNA, 19 nt, Artificial Sequence
  Description of Artificial Sequence: Synthetic oligonucleotide
gguguuucgaaacagagau

SEQ ID NO: 1549965 - RNA, 19 nt, Artificial Sequence
  Description of Artificial Sequence: Synthetic oligonucleotide
ugauagcuguugcccaaag

SEQ ID NO: 1549966 - RNA, 19 nt, Artificial Sequence
  Description of Artificial Sequence: Synthetic oligonucleotide
uauuuacagcuggauguag

SEQ ID NO: 1549967 - RNA, 19 nt, Artificial Sequence
  Description of Artificial Sequence: Synthetic oligonucleotide
aucaaggugguaauggccu

SEQ ID NO: 1549968 - RNA, 19 nt, Artificial Sequence
  Description of Artificial Sequence: Synthetic oligonucleotide
aaucaauucacggguggaa

SEQ ID NO: 1549969 - RNA, 19 nt, Artificial Sequence
  Description of Artificial Sequence: Synthetic oligonucleotide
aagugccguacacggcucg

SEQ ID NO: 1549970 - RNA, 19 nt, Artificial Sequence
  Description of Artificial Sequence: Synthetic oligonucleotide
aagagagucucgcuccaau

SEQ ID NO: 1549971 - RNA, 19 nt, Artificial Sequence
  Description of Artificial Sequence: Synthetic oligonucleotide
ccaauuuucgagcauugag

SEQ ID NO: 1549972 - RNA, 19 nt, Artificial Sequence
  Description of Artificial Sequence: Synthetic oligonucleotide
auguuaugucacaauauca

SEQ ID NO: 1549973 - RNA, 19 nt, Artificial Sequence
  Description of Artificial Sequence: Synthetic oligonucleotide
ggacucaucccgaagagag

SEQ ID NO: 1549974 - RNA, 19 nt, Artificial Sequence
  Description of Artificial Sequence: Synthetic oligonucleotide
uggauguagcuguaacaga

SEQ ID NO: 1549975 - RNA, 19 nt, Artificial Sequence
  Description of Artificial Sequence: Synthetic oligonucleotide
aguacaagugauugugauu

SEQ ID NO: 1549976 - RNA, 19 nt, Artificial Sequence
  Description of Artificial Sequence: Synthetic oligonucleotide
agggaaucuucuuccagga

SEQ ID NO: 1549977 - RNA, 19 nt, Artificial Sequence
  Description of Artificial Sequence: Synthetic oligonucleotide
accaucgguccacaauuuc

SEQ ID NO: 1549978 - RNA, 19 nt, Artificial Sequence
  Description of Artificial Sequence: Synthetic oligonucleotide
ucucaaucaaggugguaau

SEQ ID NO: 1549979 - RNA, 19 nt, Artificial Sequence
  Description of Artificial Sequence: Synthetic oligonucleotide
uugcguuccccucucugug

SEQ ID NO: 1549980 - RNA, 19 nt, Artificial Sequence
  Description of Artificial Sequence: Synthetic oligonucleotide
uaguucgccccguacaaaa

SEQ ID NO: 1549981 - RNA, 19 nt, Artificial Sequence
  Description of Artificial Sequence: Synthetic oligonucleotide
ucgccuucaccgagcaccg

SEQ ID NO: 1549982 - RNA, 19 nt, Artificial Sequence
  Description of Artificial Sequence: Synthetic oligonucleotide
aggauagcuguaaauucag

SEQ ID NO: 1549983 - RNA, 19 nt, Artificial Sequence
  Description of Artificial Sequence: Synthetic oligonucleotide
aaccccugguauaaaauaa

SEQ ID NO: 1549984 - RNA, 19 nt, Artificial Sequence
  Description of Artificial Sequence: Synthetic oligonucleotide
cuucgucugucacaucggc

SEQ ID NO: 1549985 - RNA, 19 nt, Artificial Sequence
  Description of Artificial Sequence: Synthetic oligonucleotide
cacaaucaauucacgggug

SEQ ID NO: 1549986 - RNA, 19 nt, Artificial Sequence
  Description of Artificial Sequence: Synthetic oligonucleotide
uucaccgagcaccgccgcg

SEQ ID NO: 1549987 - RNA, 19 nt, Artificial Sequence
  Description of Artificial Sequence: Synthetic oligonucleotide
ugccaguuugucuacucuc

SEQ ID NO: 1549988 - RNA, 19 nt, Artificial Sequence
  Description of Artificial Sequence: Synthetic oligonucleotide
accaagaauguaagugccg

SEQ ID NO: 1549989 - RNA, 19 nt, Artificial Sequence
  Description of Artificial Sequence: Synthetic oligonucleotide
gaaagcggagaggauacuc

SEQ ID NO: 1549990 - RNA, 19 nt, Artificial Sequence
  Description of Artificial Sequence: Synthetic oligonucleotide
acggguggaaggaacagag

SEQ ID NO: 1549991 - RNA, 19 nt, Artificial Sequence
  Description of Artificial Sequence: Synthetic oligonucleotide
gacgcacaaucaauucacg

SEQ ID NO: 1549992 - RNA, 19 nt, Artificial Sequence
  Description of Artificial Sequence: Synthetic oligonucleotide
aucuuguuagagaaauugu

SEQ ID NO: 1549993 - RNA, 19 nt, Artificial Sequence
  Description of Artificial Sequence: Synthetic oligonucleotide
uaucuuguauuagcaaaau

SEQ ID NO: 1549994 - RNA, 19 nt, Artificial Sequence
  Description of Artificial Sequence: Synthetic oligonucleotide
auucacggguggaaggaac

SEQ ID NO: 1549995 - RNA, 19 nt, Artificial Sequence
  Description of Artificial Sequence: Synthetic oligonucleotide
uccgaaagccccgccgucg

SEQ ID NO: 1549996 - RNA, 19 nt, Artificial Sequence
  Description of Artificial Sequence: Synthetic oligonucleotide
guugcccaaagucaaguaa

SEQ ID NO: 1549997 - RNA, 19 nt, Artificial Sequence
  Description of Artificial Sequence: Synthetic oligonucleotide
uaaguuuguuaaccaccaa

SEQ ID NO: 1549998 - RNA, 19 nt, Artificial Sequence
  Description of Artificial Sequence: Synthetic oligonucleotide
cuccaauuuucgagcauug

SEQ ID NO: 1549999 - RNA, 19 nt, Artificial Sequence
  Description of Artificial Sequence: Synthetic oligonucleotide
ggagaguuucugcucaccc

SEQ ID NO: 1550000 - RNA, 19 nt, Artificial Sequence
  Description of Artificial Sequence: Synthetic oligonucleotide
guaagugccguacacggcu

SEQ ID NO: 1550001 - RNA, 19 nt, Artificial Sequence
  Description of Artificial Sequence: Synthetic oligonucleotide
uucucuaaaccaggaauua

SEQ ID NO: 1550002 - RNA, 19 nt, Artificial Sequence
  Description of Artificial Sequence: Synthetic oligonucleotide
auauagacgcacaaucaau

SEQ ID NO: 1550003 - RNA, 19 nt, Artificial Sequence
  Description of Artificial Sequence: Synthetic oligonucleotide
guacaagugauugugauuu

SEQ ID NO: 1550004 - RNA, 19 nt, Artificial Sequence
  Description of Artificial Sequence: Synthetic oligonucleotide
uacucauguugcaggugug

SEQ ID NO: 1550005 - RNA, 19 nt, Artificial Sequence
  Description of Artificial Sequence: Synthetic oligonucleotide
uuaucgcuugcguuccccu

SEQ ID NO: 1550006 - RNA, 19 nt, Artificial Sequence
  Description of Artificial Sequence: Synthetic oligonucleotide
cuacucucucauuucauaa

SEQ ID NO: 1550007 - RNA, 19 nt, Artificial Sequence
  Description of Artificial Sequence: Synthetic oligonucleotide
aaaccauccugggcuucac

SEQ ID NO: 1550008 - RNA, 19 nt, Artificial Sequence
  Description of Artificial Sequence: Synthetic oligonucleotide
aggcuuuugauagcuguug

SEQ ID NO: 1550009 - RNA, 19 nt, Artificial Sequence
  Description of Artificial Sequence: Synthetic oligonucleotide
gcucgguccacucccagcg

SEQ ID NO: 1550010 - RNA, 19 nt, Artificial Sequence
  Description of Artificial Sequence: Synthetic oligonucleotide
ccuucgguuucucuaaacc

SEQ ID NO: 1550011 - RNA, 19 nt, Artificial Sequence
  Description of Artificial Sequence: Synthetic oligonucleotide
uucuacguugguguuucga

SEQ ID NO: 1550012 - RNA, 19 nt, Artificial Sequence
  Description of Artificial Sequence: Synthetic oligonucleotide
cgaaacagagauuuaucag

SEQ ID NO: 1550013 - RNA, 19 nt, Artificial Sequence
  Description of Artificial Sequence: Synthetic oligonucleotide
agagucucgcuccaauuuu

SEQ ID NO: 1550014 - RNA, 19 nt, Artificial Sequence
  Description of Artificial Sequence: Synthetic oligonucleotide
ugcgcuccugcuuggcuag

SEQ ID NO: 1550015 - RNA, 19 nt, Artificial Sequence
  Description of Artificial Sequence: Synthetic oligonucleotide
uggaaggaacagaguggcc

SEQ ID NO: 1550016 - RNA, 19 nt, Artificial Sequence
  Description of Artificial Sequence: Synthetic oligonucleotide
ugcauuagucucaguucuc

SEQ ID NO: 1550017 - RNA, 19 nt, Artificial Sequence
  Description of Artificial Sequence: Synthetic oligonucleotide
acacggcucgguccacucc

SEQ ID NO: 1550018 - RNA, 19 nt, Artificial Sequence
  Description of Artificial Sequence: Synthetic oligonucleotide
aggauccgaaagccccgcc

SEQ ID NO: 1550019 - RNA, 19 nt, Artificial Sequence
  Description of Artificial Sequence: Synthetic oligonucleotide
ggauccgaaagccccgccg

SEQ ID NO: 1550020 - RNA, 19 nt, Artificial Sequence
  Description of Artificial Sequence: Synthetic oligonucleotide
ccaucgguccacaauuucc

SEQ ID NO: 1550021 - RNA, 19 nt, Artificial Sequence
  Description of Artificial Sequence: Synthetic oligonucleotide
uuggcuaguuuguccuucu

SEQ ID NO: 1550022 - RNA, 19 nt, Artificial Sequence
  Description of Artificial Sequence: Synthetic oligonucleotide
ucugcucacccuugacucu

SEQ ID NO: 1550023 - RNA, 19 nt, Artificial Sequence
  Description of Artificial Sequence: Synthetic oligonucleotide
acguugguguuucgaaaca

SEQ ID NO: 1550024 - RNA, 19 nt, Artificial Sequence
  Description of Artificial Sequence: Synthetic oligonucleotide
agucucgcuccaauuuucg

SEQ ID NO: 1550025 - RNA, 19 nt, Artificial Sequence
  Description of Artificial Sequence: Synthetic oligonucleotide
acaucggcauacugggcca

SEQ ID NO: 1550026 - RNA, 19 nt, Artificial Sequence
  Description of Artificial Sequence: Synthetic oligonucleotide
uuucgagcauugagaacau

SEQ ID NO: 1550027 - RNA, 19 nt, Artificial Sequence
  Description of Artificial Sequence: Synthetic oligonucleotide
ucacaucggcauacugggc

SEQ ID NO: 1550028 - RNA, 19 nt, Artificial Sequence
  Description of Artificial Sequence: Synthetic oligonucleotide
aguggccgagguuaucgcu

SEQ ID NO: 1550029 - RNA, 19 nt, Artificial Sequence
  Description of Artificial Sequence: Synthetic oligonucleotide
guuuguuguggaggcaccc

SEQ ID NO: 1550030 - RNA, 19 nt, Artificial Sequence
  Description of Artificial Sequence: Synthetic oligonucleotide
aauucacggguggaaggaa

SEQ ID NO: 1550031 - RNA, 19 nt, Artificial Sequence
  Description of Artificial Sequence: Synthetic oligonucleotide
gugagugguagucuucuaa

SEQ ID NO: 1550032 - RNA, 19 nt, Artificial Sequence
  Description of Artificial Sequence: Synthetic oligonucleotide
guugcagguguguccaaca

SEQ ID NO: 1550033 - RNA, 19 nt, Artificial Sequence
  Description of Artificial Sequence: Synthetic oligonucleotide
uccuucgguuucucuaaac

SEQ ID NO: 1550034 - RNA, 19 nt, Artificial Sequence
  Description of Artificial Sequence: Synthetic oligonucleotide
uagcaaaauuucagguguu

SEQ ID NO: 1550035 - RNA, 19 nt, Artificial Sequence
  Description of Artificial Sequence: Synthetic oligonucleotide
cucaaucaaggugguaaug

SEQ ID NO: 1550036 - RNA, 19 nt, Artificial Sequence
  Description of Artificial Sequence: Synthetic oligonucleotide
agagagucucgcuccaauu

SEQ ID NO: 1550037 - RNA, 19 nt, Artificial Sequence
  Description of Artificial Sequence: Synthetic oligonucleotide
guugguguuucgaaacaga

SEQ ID NO: 1550038 - RNA, 19 nt, Artificial Sequence
  Description of Artificial Sequence: Synthetic oligonucleotide
uaagugccguacacggcuc

SEQ ID NO: 1550039 - RNA, 19 nt, Artificial Sequence
  Description of Artificial Sequence: Synthetic oligonucleotide
guuaucgcuugcguucccc

SEQ ID NO: 1550040 - RNA, 19 nt, Artificial Sequence
  Description of Artificial Sequence: Synthetic oligonucleotide
uggccgagguuaucgcuug

SEQ ID NO: 1550041 - RNA, 19 nt, Artificial Sequence
  Description of Artificial Sequence: Synthetic oligonucleotide
gaguggccgagguuaucgc

SEQ ID NO: 1550042 - RNA, 19 nt, Artificial Sequence
  Description of Artificial Sequence: Synthetic oligonucleotide
ucaucccgaagagagucuc

SEQ ID NO: 1550043 - RNA, 19 nt, Artificial Sequence
  Description of Artificial Sequence: Synthetic oligonucleotide
auccgaaagccccgccguc

SEQ ID NO: 1550044 - RNA, 19 nt, Artificial Sequence
  Description of Artificial Sequence: Synthetic oligonucleotide
uggagaguuucugcucacc

SEQ ID NO: 1550045 - RNA, 19 nt, Artificial Sequence
  Description of Artificial Sequence: Synthetic oligonucleotide
gccaaacuuggccugugag

SEQ ID NO: 1550046 - RNA, 19 nt, Artificial Sequence
  Description of Artificial Sequence: Synthetic oligonucleotide
uaccugcaguacaagugau

SEQ ID NO: 1550047 - RNA, 19 nt, Artificial Sequence
  Description of Artificial Sequence: Synthetic oligonucleotide
agccaggauccgaaagccc

SEQ ID NO: 1550048 - RNA, 19 nt, Artificial Sequence
  Description of Artificial Sequence: Synthetic oligonucleotide
gagaguuucugcucacccu

SEQ ID NO: 1550049 - RNA, 19 nt, Artificial Sequence
  Description of Artificial Sequence: Synthetic oligonucleotide
aggucuuaauacucauguu

SEQ ID NO: 1550050 - RNA, 19 nt, Artificial Sequence
  Description of Artificial Sequence: Synthetic oligonucleotide
cagccuaacacaaaaucau

SEQ ID NO: 1550051 - RNA, 19 nt, Artificial Sequence
  Description of Artificial Sequence: Synthetic oligonucleotide
auauggucucaaucaugaa

SEQ ID NO: 1550052 - RNA, 19 nt, Artificial Sequence
  Description of Artificial Sequence: Synthetic oligonucleotide
uugacucugccaguuuguc

SEQ ID NO: 1550053 - RNA, 19 nt, Artificial Sequence
  Description of Artificial Sequence: Synthetic oligonucleotide
uaucgcuugcguuccccuc

SEQ ID NO: 1550054 - RNA, 19 nt, Artificial Sequence
  Description of Artificial Sequence: Synthetic oligonucleotide
gauagcuguugcccaaagu

SEQ ID NO: 1550055 - RNA, 19 nt, Artificial Sequence
  Description of Artificial Sequence: Synthetic oligonucleotide
caaucaugaaugucuuucu

SEQ ID NO: 1550056 - RNA, 19 nt, Artificial Sequence
  Description of Artificial Sequence: Synthetic oligonucleotide
agcaaaauuucagguguuu

SEQ ID NO: 1550057 - RNA, 19 nt, Artificial Sequence
  Description of Artificial Sequence: Synthetic oligonucleotide
cuacguugguguuucgaaa

SEQ ID NO: 1550058 - RNA, 19 nt, Artificial Sequence
  Description of Artificial Sequence: Synthetic oligonucleotide
uugcgcuccugcuuggcua

SEQ ID NO: 1550059 - RNA, 19 nt, Artificial Sequence
  Description of Artificial Sequence: Synthetic oligonucleotide
gccgcggccacuccggugg

SEQ ID NO: 1550060 - RNA, 19 nt, Artificial Sequence
  Description of Artificial Sequence: Synthetic oligonucleotide
ugccguacacggcucgguc

SEQ ID NO: 1550061 - RNA, 19 nt, Artificial Sequence
  Description of Artificial Sequence: Synthetic oligonucleotide
gauccgaaagccccgccgu

SEQ ID NO: 1550062 - RNA, 19 nt, Artificial Sequence
  Description of Artificial Sequence: Synthetic oligonucleotide
caauucacggguggaagga

SEQ ID NO: 1550063 - RNA, 19 nt, Artificial Sequence
  Description of Artificial Sequence: Synthetic oligonucleotide
ugcguuccccucucugugu

SEQ ID NO: 1550064 - RNA, 19 nt, Artificial Sequence
  Description of Artificial Sequence: Synthetic oligonucleotide
uuccuucgguuucucuaaa

SEQ ID NO: 1550065 - RNA, 19 nt, Artificial Sequence
  Description of Artificial Sequence: Synthetic oligonucleotide
uugauagcuguugcccaaa

SEQ ID NO: 1550066 - RNA, 19 nt, Artificial Sequence
  Description of Artificial Sequence: Synthetic oligonucleotide
agugccguacacggcucgg

SEQ ID NO: 1550067 - RNA, 19 nt, Artificial Sequence
  Description of Artificial Sequence: Synthetic oligonucleotide
guccguccagccaggaucc

SEQ ID NO: 1550068 - RNA, 19 nt, Artificial Sequence
  Description of Artificial Sequence: Synthetic oligonucleotide
ucccgaagagagucucgcu

SEQ ID NO: 1550069 - RNA, 19 nt, Artificial Sequence
  Description of Artificial Sequence: Synthetic oligonucleotide
uuaguucgccccguacaaa

SEQ ID NO: 1550070 - RNA, 19 nt, Artificial Sequence
  Description of Artificial Sequence: Synthetic oligonucleotide
caucgguccacaauuuccu

SEQ ID NO: 1550071 - RNA, 19 nt, Artificial Sequence
  Description of Artificial Sequence: Synthetic oligonucleotide
agacugggccaaacuuggc

SEQ ID NO: 1550072 - RNA, 19 nt, Artificial Sequence
  Description of Artificial Sequence: Synthetic oligonucleotide
cuggagaguuucugcucac

SEQ ID NO: 1550073 - RNA, 19 nt, Artificial Sequence
  Description of Artificial Sequence: Synthetic oligonucleotide
ugugagugguagucuucua

SEQ ID NO: 1550074 - RNA, 19 nt, Artificial Sequence
  Description of Artificial Sequence: Synthetic oligonucleotide
aaauaggacuggagaguuu

SEQ ID NO: 1550075 - RNA, 19 nt, Artificial Sequence
  Description of Artificial Sequence: Synthetic oligonucleotide
accaccaacuauauaucuu

SEQ ID NO: 1550076 - RNA, 19 nt, Artificial Sequence
  Description of Artificial Sequence: Synthetic oligonucleotide
ccuugacucugccaguuug

SEQ ID NO: 1550077 - RNA, 19 nt, Artificial Sequence
  Description of Artificial Sequence: Synthetic oligonucleotide
cuucuacguugguguuucg

SEQ ID NO: 1550078 - RNA, 19 nt, Artificial Sequence
  Description of Artificial Sequence: Synthetic oligonucleotide
gggaaaugcauuagucuca

SEQ ID NO: 1550079 - RNA, 19 nt, Artificial Sequence
  Description of Artificial Sequence: Synthetic oligonucleotide
cuucaccgagcaccgccgc

SEQ ID NO: 1550080 - RNA, 19 nt, Artificial Sequence
  Description of Artificial Sequence: Synthetic oligonucleotide
ucugaccaucgguccacaa

SEQ ID NO: 1550081 - RNA, 19 nt, Artificial Sequence
  Description of Artificial Sequence: Synthetic oligonucleotide
ccuucaccgagcaccgccg

SEQ ID NO: 1550082 - RNA, 19 nt, Artificial Sequence
  Description of Artificial Sequence: Synthetic oligonucleotide
ggauagcuguaaauucagc

SEQ ID NO: 1550083 - RNA, 19 nt, Artificial Sequence
  Description of Artificial Sequence: Synthetic oligonucleotide
ccccugguauaaaauaauc

SEQ ID NO: 1550084 - RNA, 19 nt, Artificial Sequence
  Description of Artificial Sequence: Synthetic oligonucleotide
cuaaccccugguauaaaau

SEQ ID NO: 1550085 - RNA, 19 nt, Artificial Sequence
  Description of Artificial Sequence: Synthetic oligonucleotide
uggcuaguuuguccuucuc

SEQ ID NO: 1550086 - RNA, 19 nt, Artificial Sequence
  Description of Artificial Sequence: Synthetic oligonucleotide
agcgccuccagccguccgu

SEQ ID NO: 1550087 - RNA, 19 nt, Artificial Sequence
  Description of Artificial Sequence: Synthetic oligonucleotide
ccaggauccgaaagccccg

SEQ ID NO: 1550088 - RNA, 19 nt, Artificial Sequence
  Description of Artificial Sequence: Synthetic oligonucleotide
cugaggauagcuguaaauu

SEQ ID NO: 1550089 - RNA, 19 nt, Artificial Sequence
  Description of Artificial Sequence: Synthetic oligonucleotide
gccuaacacaaaaucauaa

SEQ ID NO: 1550090 - RNA, 19 nt, Artificial Sequence
  Description of Artificial Sequence: Synthetic oligonucleotide
gagauuuaucagaacugau

SEQ ID NO: 1550091 - RNA, 19 nt, Artificial Sequence
  Description of Artificial Sequence: Synthetic oligonucleotide
caguacaagugauugugau

SEQ ID NO: 1550092 - RNA, 19 nt, Artificial Sequence
  Description of Artificial Sequence: Synthetic oligonucleotide
agccuaacacaaaaucaua

SEQ ID NO: 1550093 - RNA, 19 nt, Artificial Sequence
  Description of Artificial Sequence: Synthetic oligonucleotide
gcggagaggauacucugca

SEQ ID NO: 1550094 - RNA, 19 nt, Artificial Sequence
  Description of Artificial Sequence: Synthetic oligonucleotide
cuugcguuccccucucugu

SEQ ID NO: 1550095 - RNA, 19 nt, Artificial Sequence
  Description of Artificial Sequence: Synthetic oligonucleotide
accccugguauaaaauaau

SEQ ID NO: 1550096 - RNA, 19 nt, Artificial Sequence
  Description of Artificial Sequence: Synthetic oligonucleotide
cuugacucugccaguuugu

SEQ ID NO: 1550097 - RNA, 19 nt, Artificial Sequence
  Description of Artificial Sequence: Synthetic oligonucleotide
aucgguccacaauuuccuu

SEQ ID NO: 1550098 - RNA, 19 nt, Artificial Sequence
  Description of Artificial Sequence: Synthetic oligonucleotide
aaagccccgccgucgccuu

SEQ ID NO: 1550099 - RNA, 19 nt, Artificial Sequence
  Description of Artificial Sequence: Synthetic oligonucleotide
cccgaagagagucucgcuc

SEQ ID NO: 1550100 - RNA, 19 nt, Artificial Sequence
  Description of Artificial Sequence: Synthetic oligonucleotide
caggauccgaaagccccgc

SEQ ID NO: 1550101 - RNA, 19 nt, Artificial Sequence
  Description of Artificial Sequence: Synthetic oligonucleotide
cuaguuuguccuucucccu

SEQ ID NO: 1550102 - RNA, 19 nt, Artificial Sequence
  Description of Artificial Sequence: Synthetic oligonucleotide
gccguacacggcucggucc

SEQ ID NO: 1550103 - RNA, 19 nt, Artificial Sequence
  Description of Artificial Sequence: Synthetic oligonucleotide
gcuugcguuccccucucug

SEQ ID NO: 1550104 - RNA, 19 nt, Artificial Sequence
  Description of Artificial Sequence: Synthetic oligonucleotide
ucgcuugcguuccccucuc

SEQ ID NO: 1550105 - RNA, 19 nt, Artificial Sequence
  Description of Artificial Sequence: Synthetic oligonucleotide
gccgagguuaucgcuugcg

SEQ ID NO: 1550106 - RNA, 19 nt, Artificial Sequence
  Description of Artificial Sequence: Synthetic oligonucleotide
cucgguccacucccagcgc

SEQ ID NO: 1550107 - RNA, 19 nt, Artificial Sequence
  Description of Artificial Sequence: Synthetic oligonucleotide
aagccccgccgucgccuuc

SEQ ID NO: 1550108 - RNA, 19 nt, Artificial Sequence
  Description of Artificial Sequence: Synthetic oligonucleotide
cguccguccagccaggauc

SEQ ID NO: 1550109 - RNA, 19 nt, Artificial Sequence
  Description of Artificial Sequence: Synthetic oligonucleotide
uucgagcauugagaacauc

SEQ ID NO: 1550110 - RNA, 19 nt, Artificial Sequence
  Description of Artificial Sequence: Synthetic oligonucleotide
cccugguauaaaauaaucu

SEQ ID NO: 1550111 - RNA, 19 nt, Artificial Sequence
  Description of Artificial Sequence: Synthetic oligonucleotide
ggacauaccugcaguacaa

SEQ ID NO: 1550112 - RNA, 19 nt, Artificial Sequence
  Description of Artificial Sequence: Synthetic oligonucleotide
uccggugggcgccgccaug

SEQ ID NO: 1550113 - RNA, 19 nt, Artificial Sequence
  Description of Artificial Sequence: Synthetic oligonucleotide
caucggcauacugggccag

SEQ ID NO: 1550114 - RNA, 19 nt, Artificial Sequence
  Description of Artificial Sequence: Synthetic oligonucleotide
caccaacuauauaucuugu

SEQ ID NO: 1550115 - RNA, 19 nt, Artificial Sequence
  Description of Artificial Sequence: Synthetic oligonucleotide
ggcucgguccacucccagc

SEQ ID NO: 1550116 - RNA, 19 nt, Artificial Sequence
  Description of Artificial Sequence: Synthetic oligonucleotide
cacccggaucaucuuucuc

SEQ ID NO: 1550117 - RNA, 19 nt, Artificial Sequence
  Description of Artificial Sequence: Synthetic oligonucleotide
gaaagccccgccgucgccu

SEQ ID NO: 1550118 - RNA, 19 nt, Artificial Sequence
  Description of Artificial Sequence: Synthetic oligonucleotide
gguagucuucuaaccccug

SEQ ID NO: 1550119 - RNA, 19 nt, Artificial Sequence
  Description of Artificial Sequence: Synthetic oligonucleotide
cucucucauuucauaaguu

SEQ ID NO: 1550120 - RNA, 19 nt, Artificial Sequence
  Description of Artificial Sequence: Synthetic oligonucleotide
cugaccaucgguccacaau

SEQ ID NO: 1550121 - RNA, 19 nt, Artificial Sequence
  Description of Artificial Sequence: Synthetic oligonucleotide
gcugaggauagcuguaaau

SEQ ID NO: 1550122 - RNA, 19 nt, Artificial Sequence
  Description of Artificial Sequence: Synthetic oligonucleotide
gguuaucgcuugcguuccc

SEQ ID NO: 1550123 - RNA, 19 nt, Artificial Sequence
  Description of Artificial Sequence: Synthetic oligonucleotide
cacggguggaaggaacaga

SEQ ID NO: 1550124 - RNA, 19 nt, Artificial Sequence
  Description of Artificial Sequence: Synthetic oligonucleotide
cugcaguacaagugauugu

SEQ ID NO: 1550125 - RNA, 19 nt, Artificial Sequence
  Description of Artificial Sequence: Synthetic oligonucleotide
cucauuucauaaguuuguu

SEQ ID NO: 1550126 - RNA, 19 nt, Artificial Sequence
  Description of Artificial Sequence: Synthetic oligonucleotide
cucaucccgaagagagucu

SEQ ID NO: 1550127 - RNA, 19 nt, Artificial Sequence
  Description of Artificial Sequence: Synthetic oligonucleotide
cauuagucucaguucucuu

SEQ ID NO: 1550128 - RNA, 19 nt, Artificial Sequence
  Description of Artificial Sequence: Synthetic oligonucleotide
ccaagaauguaagugccgu

SEQ ID NO: 1550129 - RNA, 19 nt, Artificial Sequence
  Description of Artificial Sequence: Synthetic oligonucleotide
uggaggcacccggaucauc

SEQ ID NO: 1550130 - RNA, 19 nt, Artificial Sequence
  Description of Artificial Sequence: Synthetic oligonucleotide
caggaauuauuaggucuua

SEQ ID NO: 1550131 - RNA, 19 nt, Artificial Sequence
  Description of Artificial Sequence: Synthetic oligonucleotide
ccgaaagccccgccgucgc

SEQ ID NO: 1550132 - RNA, 19 nt, Artificial Sequence
  Description of Artificial Sequence: Synthetic oligonucleotide
cuccagccguccguccagc

SEQ ID NO: 1550133 - RNA, 19 nt, Artificial Sequence
  Description of Artificial Sequence: Synthetic oligonucleotide
cagcgccuccagccguccg

SEQ ID NO: 1550134 - RNA, 19 nt, Artificial Sequence
  Description of Artificial Sequence: Synthetic oligonucleotide
ggcugaggauagcuguaaa

SEQ ID NO: 1550135 - RNA, 19 nt, Artificial Sequence
  Description of Artificial Sequence: Synthetic oligonucleotide
gggacucaucccgaagaga

SEQ ID NO: 1550136 - RNA, 19 nt, Artificial Sequence
  Description of Artificial Sequence: Synthetic oligonucleotide
ggccaaacuuggccuguga

SEQ ID NO: 1550137 - RNA, 19 nt, Artificial Sequence
  Description of Artificial Sequence: Synthetic oligonucleotide
ccuuugggacucaucccga

SEQ ID NO: 1550138 - RNA, 19 nt, Artificial Sequence
  Description of Artificial Sequence: Synthetic oligonucleotide
gucuacucucucauuucau

SEQ ID NO: 1550139 - RNA, 19 nt, Artificial Sequence
  Description of Artificial Sequence: Synthetic oligonucleotide
gcguuccccucucuguguc

SEQ ID NO: 1550140 - RNA, 19 nt, Artificial Sequence
  Description of Artificial Sequence: Synthetic oligonucleotide
caucuucuacguugguguu

SEQ ID NO: 1550141 - RNA, 19 nt, Artificial Sequence
  Description of Artificial Sequence: Synthetic oligonucleotide
agccguccguccagccagg

SEQ ID NO: 1550142 - RNA, 19 nt, Artificial Sequence
  Description of Artificial Sequence: Synthetic oligonucleotide
ccguacacggcucggucca

SEQ ID NO: 1550143 - RNA, 19 nt, Artificial Sequence
  Description of Artificial Sequence: Synthetic oligonucleotide
cuucucaaucaagguggua

SEQ ID NO: 1550144 - RNA, 19 nt, Artificial Sequence
  Description of Artificial Sequence: Synthetic oligonucleotide
ggccgagguuaucgcuugc

SEQ ID NO: 1550145 - RNA, 19 nt, Artificial Sequence
  Description of Artificial Sequence: Synthetic oligonucleotide
ggccacuccggugggcgcc

SEQ ID NO: 1550146 - RNA, 19 nt, Artificial Sequence
  Description of Artificial Sequence: Synthetic oligonucleotide
guggccgagguuaucgcuu

SEQ ID NO: 1550147 - RNA, 19 nt, Artificial Sequence
  Description of Artificial Sequence: Synthetic oligonucleotide
ccggugggcgccgccaugc

SEQ ID NO: 1550148 - RNA, 19 nt, Artificial Sequence
  Description of Artificial Sequence: Synthetic oligonucleotide
gccgucgccuucaccgagc

SEQ ID NO: 1550149 - RNA, 19 nt, Artificial Sequence
  Description of Artificial Sequence: Synthetic oligonucleotide
ccggaucaucuuucucauc

SEQ ID NO: 1550150 - RNA, 19 nt, Artificial Sequence
  Description of Artificial Sequence: Synthetic oligonucleotide
guguuucgaaacagagauu

SEQ ID NO: 1550151 - RNA, 19 nt, Artificial Sequence
  Description of Artificial Sequence: Synthetic oligonucleotide
gccacuccggugggcgccg

SEQ ID NO: 1550152 - RNA, 19 nt, Artificial Sequence
  Description of Artificial Sequence: Synthetic oligonucleotide
gccugugagugguagucuu

SEQ ID NO: 1550153 - RNA, 19 nt, Artificial Sequence
  Description of Artificial Sequence: Synthetic oligonucleotide
guacacggcucgguccacu

SEQ ID NO: 1550154 - RNA, 19 nt, Artificial Sequence
  Description of Artificial Sequence: Synthetic oligonucleotide
ggccacauauggucucaau

SEQ ID NO: 1550155 - RNA, 19 nt, Artificial Sequence
  Description of Artificial Sequence: Synthetic oligonucleotide
gugccguacacggcucggu

SEQ ID NO: 1550156 - RNA, 19 nt, Artificial Sequence
  Description of Artificial Sequence: Synthetic oligonucleotide
ggaaagcggagaggauacu

SEQ ID NO: 1550157 - RNA, 19 nt, Artificial Sequence
  Description of Artificial Sequence: Synthetic oligonucleotide
ccgagguuaucgcuugcgu

SEQ ID NO: 1550158 - RNA, 19 nt, Artificial Sequence
  Description of Artificial Sequence: Synthetic oligonucleotide
cgagguuaucgcuugcguu

SEQ ID NO: 1550159 - RNA, 19 nt, Artificial Sequence
  Description of Artificial Sequence: Synthetic oligonucleotide
ccgucgccuucaccgagca

SEQ ID NO: 1550160 - RNA, 19 nt, Artificial Sequence
  Description of Artificial Sequence: Synthetic oligonucleotide
ccauuuuaguucgccccgu

SEQ ID NO: 1550161 - RNA, 19 nt, Artificial Sequence
  Description of Artificial Sequence: Synthetic oligonucleotide
ccguccagccaggauccga

SEQ ID NO: 1550162 - RNA, 19 nt, Artificial Sequence
  Description of Artificial Sequence: Synthetic oligonucleotide
guggaggcacccggaucau

SEQ ID NO: 1550163 - RNA, 19 nt, Artificial Sequence
  Description of Artificial Sequence: Synthetic oligonucleotide
ccgcggccacuccgguggg

SEQ ID NO: 1550164 - RNA, 19 nt, Artificial Sequence
  Description of Artificial Sequence: Synthetic oligonucleotide
cgucugucacaucggcaua

SEQ ID NO: 1550165 - RNA, 19 nt, Artificial Sequence
  Description of Artificial Sequence: Synthetic oligonucleotide
cgucgccuucaccgagcac

SEQ ID NO: 1550166 - RNA, 19 nt, Artificial Sequence
  Description of Artificial Sequence: Synthetic oligonucleotide
ccacuccggugggcgccgc

SEQ ID NO: 1550167 - RNA, 19 nt, Artificial Sequence
  Description of Artificial Sequence: Synthetic oligonucleotide
ccguccguccagccaggau

SEQ ID NO: 1550168 - RNA, 19 nt, Artificial Sequence
  Description of Artificial Sequence: Synthetic oligonucleotide
cgcuugcguuccccucucu

SEQ ID NO: 1550169 - RNA, 19 nt, Artificial Sequence
  Description of Artificial Sequence: Synthetic oligonucleotide
aaaaccauaacauugacaa

SEQ ID NO: 1550170 - RNA, 19 nt, Artificial Sequence
  Description of Artificial Sequence: Synthetic oligonucleotide
auagauauuaguuucacuc

SEQ ID NO: 1550171 - RNA, 19 nt, Artificial Sequence
  Description of Artificial Sequence: Synthetic oligonucleotide
aauucaaucacaaccaagc

SEQ ID NO: 1550172 - RNA, 19 nt, Artificial Sequence
  Description of Artificial Sequence: Synthetic oligonucleotide
uccucuuuaaaucagaaag

SEQ ID NO: 1550173 - RNA, 19 nt, Artificial Sequence
  Description of Artificial Sequence: Synthetic oligonucleotide
auuuauaucuguuuuauag

SEQ ID NO: 1550174 - RNA, 19 nt, Artificial Sequence
  Description of Artificial Sequence: Synthetic oligonucleotide
uguaagauaguccucagag

SEQ ID NO: 1550175 - RNA, 19 nt, Artificial Sequence
  Description of Artificial Sequence: Synthetic oligonucleotide
uauggauaaaaccauaaca

SEQ ID NO: 1550176 - RNA, 19 nt, Artificial Sequence
  Description of Artificial Sequence: Synthetic oligonucleotide
uuuaccagcaauauuaggu

SEQ ID NO: 1550177 - RNA, 19 nt, Artificial Sequence
  Description of Artificial Sequence: Synthetic oligonucleotide
aauaauuucagucggucca

SEQ ID NO: 1550178 - RNA, 19 nt, Artificial Sequence
  Description of Artificial Sequence: Synthetic oligonucleotide
uauacuacacacuucaaug

SEQ ID NO: 1550179 - RNA, 19 nt, Artificial Sequence
  Description of Artificial Sequence: Synthetic oligonucleotide
uccagaauaauuucagucg

SEQ ID NO: 1550180 - RNA, 19 nt, Artificial Sequence
  Description of Artificial Sequence: Synthetic oligonucleotide
cauuucaugcuuuagagag

SEQ ID NO: 1550181 - RNA, 19 nt, Artificial Sequence
  Description of Artificial Sequence: Synthetic oligonucleotide
ucuuauacuacacacuuca

SEQ ID NO: 1550182 - RNA, 19 nt, Artificial Sequence
  Description of Artificial Sequence: Synthetic oligonucleotide
uguuuuauagauauuaguu

SEQ ID NO: 1550183 - RNA, 19 nt, Artificial Sequence
  Description of Artificial Sequence: Synthetic oligonucleotide
uuuauugucaucuccagaa

SEQ ID NO: 1550184 - RNA, 19 nt, Artificial Sequence
  Description of Artificial Sequence: Synthetic oligonucleotide
uguauuaacaauaaaccuu

SEQ ID NO: 1550185 - RNA, 19 nt, Artificial Sequence
  Description of Artificial Sequence: Synthetic oligonucleotide
acaugcguaauauuucucc

SEQ ID NO: 1550186 - RNA, 19 nt, Artificial Sequence
  Description of Artificial Sequence: Synthetic oligonucleotide
aagguugaaaauauuuacc

SEQ ID NO: 1550187 - RNA, 19 nt, Artificial Sequence
  Description of Artificial Sequence: Synthetic oligonucleotide
aaguuacggaaauaacagc

SEQ ID NO: 1550188 - RNA, 19 nt, Artificial Sequence
  Description of Artificial Sequence: Synthetic oligonucleotide
aaauuccugccuccgaggc

SEQ ID NO: 1550189 - RNA, 19 nt, Artificial Sequence
  Description of Artificial Sequence: Synthetic oligonucleotide
uuaguggggacaaagguug

SEQ ID NO: 1550190 - RNA, 19 nt, Artificial Sequence
  Description of Artificial Sequence: Synthetic oligonucleotide
gaaguuacggaaauaacag

SEQ ID NO: 1550191 - RNA, 19 nt, Artificial Sequence
  Description of Artificial Sequence: Synthetic oligonucleotide
uucaaucacaaccaagcag

SEQ ID NO: 1550192 - RNA, 19 nt, Artificial Sequence
  Description of Artificial Sequence: Synthetic oligonucleotide
ugagcaacaaaacaugcgu

SEQ ID NO: 1550193 - RNA, 19 nt, Artificial Sequence
  Description of Artificial Sequence: Synthetic oligonucleotide
aauauuagcugguuauacu

SEQ ID NO: 1550194 - RNA, 19 nt, Artificial Sequence
  Description of Artificial Sequence: Synthetic oligonucleotide
aguaaaacuacacaggcuu

SEQ ID NO: 1550195 - RNA, 19 nt, Artificial Sequence
  Description of Artificial Sequence: Synthetic oligonucleotide
uuuugauuggugcuaaacu

SEQ ID NO: 1550196 - RNA, 19 nt, Artificial Sequence
  Description of Artificial Sequence: Synthetic oligonucleotide
ucuguuuuauagauauuag

SEQ ID NO: 1550197 - RNA, 19 nt, Artificial Sequence
  Description of Artificial Sequence: Synthetic oligonucleotide
auuagcugguuauacuggc

SEQ ID NO: 1550198 - RNA, 19 nt, Artificial Sequence
  Description of Artificial Sequence: Synthetic oligonucleotide
uaugugccaaaaucgaagg

SEQ ID NO: 1550199 - RNA, 19 nt, Artificial Sequence
  Description of Artificial Sequence: Synthetic oligonucleotide
aauccuuaucaguaucagg

SEQ ID NO: 1550200 - RNA, 19 nt, Artificial Sequence
  Description of Artificial Sequence: Synthetic oligonucleotide
uauuagcugguuauacugg

SEQ ID NO: 1550201 - RNA, 19 nt, Artificial Sequence
  Description of Artificial Sequence: Synthetic oligonucleotide
auauuagcugguuauacug

SEQ ID NO: 1550202 - RNA, 19 nt, Artificial Sequence
  Description of Artificial Sequence: Synthetic oligonucleotide
uuuauagauauuaguuuca

SEQ ID NO: 1550203 - RNA, 19 nt, Artificial Sequence
  Description of Artificial Sequence: Synthetic oligonucleotide
gaugcugucagacauucug

SEQ ID NO: 1550204 - RNA, 19 nt, Artificial Sequence
  Description of Artificial Sequence: Synthetic oligonucleotide
ucugguaugugccaaaauc

SEQ ID NO: 1550205 - RNA, 19 nt, Artificial Sequence
  Description of Artificial Sequence: Synthetic oligonucleotide
uugagcaacaaaacaugcg

SEQ ID NO: 1550206 - RNA, 19 nt, Artificial Sequence
  Description of Artificial Sequence: Synthetic oligonucleotide
uaagauaguccucagaguu

SEQ ID NO: 1550207 - RNA, 19 nt, Artificial Sequence
  Description of Artificial Sequence: Synthetic oligonucleotide
uucaaugauggguagcuag

SEQ ID NO: 1550208 - RNA, 19 nt, Artificial Sequence
  Description of Artificial Sequence: Synthetic oligonucleotide
auucgcaaaguucuugucg

SEQ ID NO: 1550209 - RNA, 19 nt, Artificial Sequence
  Description of Artificial Sequence: Synthetic oligonucleotide
ugagaugugcugcugaucu

SEQ ID NO: 1550210 - RNA, 19 nt, Artificial Sequence
  Description of Artificial Sequence: Synthetic oligonucleotide
aauaacagcuucugccauc

SEQ ID NO: 1550211 - RNA, 19 nt, Artificial Sequence
  Description of Artificial Sequence: Synthetic oligonucleotide
agacacuuaaaucagcugu

SEQ ID NO: 1550212 - RNA, 19 nt, Artificial Sequence
  Description of Artificial Sequence: Synthetic oligonucleotide
aaacaugcguaauauuucu

SEQ ID NO: 1550213 - RNA, 19 nt, Artificial Sequence
  Description of Artificial Sequence: Synthetic oligonucleotide
uuuauggauaaaaccauaa

SEQ ID NO: 1550214 - RNA, 19 nt, Artificial Sequence
  Description of Artificial Sequence: Synthetic oligonucleotide
uauuagguacuccugaauc

SEQ ID NO: 1550215 - RNA, 19 nt, Artificial Sequence
  Description of Artificial Sequence: Synthetic oligonucleotide
uuugauuggugcuaaacuc

SEQ ID NO: 1550216 - RNA, 19 nt, Artificial Sequence
  Description of Artificial Sequence: Synthetic oligonucleotide
ggcaaguaaaacuacacag

SEQ ID NO: 1550217 - RNA, 19 nt, Artificial Sequence
  Description of Artificial Sequence: Synthetic oligonucleotide
agaacaagcuacuuggacu

SEQ ID NO: 1550218 - RNA, 19 nt, Artificial Sequence
  Description of Artificial Sequence: Synthetic oligonucleotide
acuuaggucuggcagguac

SEQ ID NO: 1550219 - RNA, 19 nt, Artificial Sequence
  Description of Artificial Sequence: Synthetic oligonucleotide
uauuuaccagcaauauuag

SEQ ID NO: 1550220 - RNA, 19 nt, Artificial Sequence
  Description of Artificial Sequence: Synthetic oligonucleotide
gacuucuuauacuacacac

SEQ ID NO: 1550221 - RNA, 19 nt, Artificial Sequence
  Description of Artificial Sequence: Synthetic oligonucleotide
uaguuuggaaaauauauuu

SEQ ID NO: 1550222 - RNA, 19 nt, Artificial Sequence
  Description of Artificial Sequence: Synthetic oligonucleotide
aauuacauuuccaacaaua

SEQ ID NO: 1550223 - RNA, 19 nt, Artificial Sequence
  Description of Artificial Sequence: Synthetic oligonucleotide
ucacauuucaugcuuuaga

SEQ ID NO: 1550224 - RNA, 19 nt, Artificial Sequence
  Description of Artificial Sequence: Synthetic oligonucleotide
uuauggauaaaaccauaac

SEQ ID NO: 1550225 - RNA, 19 nt, Artificial Sequence
  Description of Artificial Sequence: Synthetic oligonucleotide
uuauacuacacacuucaau

SEQ ID NO: 1550226 - RNA, 19 nt, Artificial Sequence
  Description of Artificial Sequence: Synthetic oligonucleotide
ucuuuauggauaaaaccau

SEQ ID NO: 1550227 - RNA, 19 nt, Artificial Sequence
  Description of Artificial Sequence: Synthetic oligonucleotide
uaaaucagaaaggaugcug

SEQ ID NO: 1550228 - RNA, 19 nt, Artificial Sequence
  Description of Artificial Sequence: Synthetic oligonucleotide
cuuccuauucaguagcccc

SEQ ID NO: 1550229 - RNA, 19 nt, Artificial Sequence
  Description of Artificial Sequence: Synthetic oligonucleotide
uugauuggugcuaaacucu

SEQ ID NO: 1550230 - RNA, 19 nt, Artificial Sequence
  Description of Artificial Sequence: Synthetic oligonucleotide
ucauuauuauauauaguuu

SEQ ID NO: 1550231 - RNA, 19 nt, Artificial Sequence
  Description of Artificial Sequence: Synthetic oligonucleotide
agaauaauuucagucgguc

SEQ ID NO: 1550232 - RNA, 19 nt, Artificial Sequence
  Description of Artificial Sequence: Synthetic oligonucleotide
uagauauuaguuucacucu

SEQ ID NO: 1550233 - RNA, 19 nt, Artificial Sequence
  Description of Artificial Sequence: Synthetic oligonucleotide
gaacgugaccugcagagag

SEQ ID NO: 1550234 - RNA, 19 nt, Artificial Sequence
  Description of Artificial Sequence: Synthetic oligonucleotide
auaaauaccuuaaauuaca

SEQ ID NO: 1550235 - RNA, 19 nt, Artificial Sequence
  Description of Artificial Sequence: Synthetic oligonucleotide
aaggucugaaguuacggaa

SEQ ID NO: 1550236 - RNA, 19 nt, Artificial Sequence
  Description of Artificial Sequence: Synthetic oligonucleotide
uggugcuaaacucuuaaaa

SEQ ID NO: 1550237 - RNA, 19 nt, Artificial Sequence
  Description of Artificial Sequence: Synthetic oligonucleotide
auaaguucagcguuucacu

SEQ ID NO: 1550238 - RNA, 19 nt, Artificial Sequence
  Description of Artificial Sequence: Synthetic oligonucleotide
uuggcaaguaaaacuacac

SEQ ID NO: 1550239 - RNA, 19 nt, Artificial Sequence
  Description of Artificial Sequence: Synthetic oligonucleotide
uucgcaaaguucuugucga

SEQ ID NO: 1550240 - RNA, 19 nt, Artificial Sequence
  Description of Artificial Sequence: Synthetic oligonucleotide
uucagauaaguucagcguu

SEQ ID NO: 1550241 - RNA, 19 nt, Artificial Sequence
  Description of Artificial Sequence: Synthetic oligonucleotide
cagagaguuuccuuuagag

SEQ ID NO: 1550242 - RNA, 19 nt, Artificial Sequence
  Description of Artificial Sequence: Synthetic oligonucleotide
auuuaccagcaauauuagg

SEQ ID NO: 1550243 - RNA, 19 nt, Artificial Sequence
  Description of Artificial Sequence: Synthetic oligonucleotide
uagcugguuauacuggcag

SEQ ID NO: 1550244 - RNA, 19 nt, Artificial Sequence
  Description of Artificial Sequence: Synthetic oligonucleotide
uaaguucagcguuucacug

SEQ ID NO: 1550245 - RNA, 19 nt, Artificial Sequence
  Description of Artificial Sequence: Synthetic oligonucleotide
aguuacggaaauaacagcu

SEQ ID NO: 1550246 - RNA, 19 nt, Artificial Sequence
  Description of Artificial Sequence: Synthetic oligonucleotide
aaugauggguagcuagaga

SEQ ID NO: 1550247 - RNA, 19 nt, Artificial Sequence
  Description of Artificial Sequence: Synthetic oligonucleotide
ugaaucacaguuuccugga

SEQ ID NO: 1550248 - RNA, 19 nt, Artificial Sequence
  Description of Artificial Sequence: Synthetic oligonucleotide
uuucaugcuuuagagagac

SEQ ID NO: 1550249 - RNA, 19 nt, Artificial Sequence
  Description of Artificial Sequence: Synthetic oligonucleotide
ucaaugauggguagcuaga

SEQ ID NO: 1550250 - RNA, 19 nt, Artificial Sequence
  Description of Artificial Sequence: Synthetic oligonucleotide
aauacccauuaguggggac

SEQ ID NO: 1550251 - RNA, 19 nt, Artificial Sequence
  Description of Artificial Sequence: Synthetic oligonucleotide
aaacuacacaggcuuucag

SEQ ID NO: 1550252 - RNA, 19 nt, Artificial Sequence
  Description of Artificial Sequence: Synthetic oligonucleotide
caagcaguucacaagaaca

SEQ ID NO: 1550253 - RNA, 19 nt, Artificial Sequence
  Description of Artificial Sequence: Synthetic oligonucleotide
aggcuuucaggacagaaca

SEQ ID NO: 1550254 - RNA, 19 nt, Artificial Sequence
  Description of Artificial Sequence: Synthetic oligonucleotide
acuccuuaauccuuaucag

SEQ ID NO: 1550255 - RNA, 19 nt, Artificial Sequence
  Description of Artificial Sequence: Synthetic oligonucleotide
uauagauauuaguuucacu

SEQ ID NO: 1550256 - RNA, 19 nt, Artificial Sequence
  Description of Artificial Sequence: Synthetic oligonucleotide
aacacagguacagcauuac

SEQ ID NO: 1550257 - RNA, 19 nt, Artificial Sequence
  Description of Artificial Sequence: Synthetic oligonucleotide
guaugugccaaaaucgaag

SEQ ID NO: 1550258 - RNA, 19 nt, Artificial Sequence
  Description of Artificial Sequence: Synthetic oligonucleotide
ucaggcucagaauucaauc

SEQ ID NO: 1550259 - RNA, 19 nt, Artificial Sequence
  Description of Artificial Sequence: Synthetic oligonucleotide
uccuuuagaggcaggcucc

SEQ ID NO: 1550260 - RNA, 19 nt, Artificial Sequence
  Description of Artificial Sequence: Synthetic oligonucleotide
uauugucaucuccagaaua

SEQ ID NO: 1550261 - RNA, 19 nt, Artificial Sequence
  Description of Artificial Sequence: Synthetic oligonucleotide
caucuuccuauucaguagc

SEQ ID NO: 1550262 - RNA, 19 nt, Artificial Sequence
  Description of Artificial Sequence: Synthetic oligonucleotide
uuauagauauuaguuucac

SEQ ID NO: 1550263 - RNA, 19 nt, Artificial Sequence
  Description of Artificial Sequence: Synthetic oligonucleotide
uuaccagcaauauuaggua

SEQ ID NO: 1550264 - RNA, 19 nt, Artificial Sequence
  Description of Artificial Sequence: Synthetic oligonucleotide
uucagcguuucacugggga

SEQ ID NO: 1550265 - RNA, 19 nt, Artificial Sequence
  Description of Artificial Sequence: Synthetic oligonucleotide
ugggguagagcccuuccag

SEQ ID NO: 1550266 - RNA, 19 nt, Artificial Sequence
  Description of Artificial Sequence: Synthetic oligonucleotide
uaauccuuaucaguaucag

SEQ ID NO: 1550267 - RNA, 19 nt, Artificial Sequence
  Description of Artificial Sequence: Synthetic oligonucleotide
agcaacaaaacaugcguaa

SEQ ID NO: 1550268 - RNA, 19 nt, Artificial Sequence
  Description of Artificial Sequence: Synthetic oligonucleotide
accgaccucauccaccaac

SEQ ID NO: 1550269 - RNA, 19 nt, Artificial Sequence
  Description of Artificial Sequence: Synthetic oligonucleotide
ugguuauacuggcaggaga

SEQ ID NO: 1550270 - RNA, 19 nt, Artificial Sequence
  Description of Artificial Sequence: Synthetic oligonucleotide
cuacuuggacuucuuauac

SEQ ID NO: 1550271 - RNA, 19 nt, Artificial Sequence
  Description of Artificial Sequence: Synthetic oligonucleotide
auuuauugucaucuccaga

SEQ ID NO: 1550272 - RNA, 19 nt, Artificial Sequence
  Description of Artificial Sequence: Synthetic oligonucleotide
aguuucacucuuuucaaua

SEQ ID NO: 1550273 - RNA, 19 nt, Artificial Sequence
  Description of Artificial Sequence: Synthetic oligonucleotide
cugauauucgcaaaguucu

SEQ ID NO: 1550274 - RNA, 19 nt, Artificial Sequence
  Description of Artificial Sequence: Synthetic oligonucleotide
aguccgaggucucugauau

SEQ ID NO: 1550275 - RNA, 19 nt, Artificial Sequence
  Description of Artificial Sequence: Synthetic oligonucleotide
caauauuagcugguuauac

SEQ ID NO: 1550276 - RNA, 19 nt, Artificial Sequence
  Description of Artificial Sequence: Synthetic oligonucleotide
agauauuaguuucacucuu

SEQ ID NO: 1550277 - RNA, 19 nt, Artificial Sequence
  Description of Artificial Sequence: Synthetic oligonucleotide
acacccggaagcaaauucc

SEQ ID NO: 1550278 - RNA, 19 nt, Artificial Sequence
  Description of Artificial Sequence: Synthetic oligonucleotide
agagagacacuuaaaucag

SEQ ID NO: 1550279 - RNA, 19 nt, Artificial Sequence
  Description of Artificial Sequence: Synthetic oligonucleotide
uuaaaucagcuguaagaua

SEQ ID NO: 1550280 - RNA, 19 nt, Artificial Sequence
  Description of Artificial Sequence: Synthetic oligonucleotide
aacaugcguaauauuucuc

SEQ ID NO: 1550281 - RNA, 19 nt, Artificial Sequence
  Description of Artificial Sequence: Synthetic oligonucleotide
uauuaacaauaaaccuucu

SEQ ID NO: 1550282 - RNA, 19 nt, Artificial Sequence
  Description of Artificial Sequence: Synthetic oligonucleotide
cuuuugauuggugcuaaac

SEQ ID NO: 1550283 - RNA, 19 nt, Artificial Sequence
  Description of Artificial Sequence: Synthetic oligonucleotide
ucgaggugguaucugcuug

SEQ ID NO: 1550284 - RNA, 19 nt, Artificial Sequence
  Description of Artificial Sequence: Synthetic oligonucleotide
uuagcugguuauacuggca

SEQ ID NO: 1550285 - RNA, 19 nt, Artificial Sequence
  Description of Artificial Sequence: Synthetic oligonucleotide
ccagaauaauuucagucgg

SEQ ID NO: 1550286 - RNA, 19 nt, Artificial Sequence
  Description of Artificial Sequence: Synthetic oligonucleotide
ucagauaaguucagcguuu

SEQ ID NO: 1550287 - RNA, 19 nt, Artificial Sequence
  Description of Artificial Sequence: Synthetic oligonucleotide
cagacauucuguuggcaag

SEQ ID NO: 1550288 - RNA, 19 nt, Artificial Sequence
  Description of Artificial Sequence: Synthetic oligonucleotide
gguuauacuggcaggagag

SEQ ID NO: 1550289 - RNA, 19 nt, Artificial Sequence
  Description of Artificial Sequence: Synthetic oligonucleotide
caaagguugaaaauauuua

SEQ ID NO: 1550290 - RNA, 19 nt, Artificial Sequence
  Description of Artificial Sequence: Synthetic oligonucleotide
uuccuauucaguagccccu

SEQ ID NO: 1550291 - RNA, 19 nt, Artificial Sequence
  Description of Artificial Sequence: Synthetic oligonucleotide
gaaggucugaaguuacgga

SEQ ID NO: 1550292 - RNA, 19 nt, Artificial Sequence
  Description of Artificial Sequence: Synthetic oligonucleotide
agcuacuuggacuucuuau

SEQ ID NO: 1550293 - RNA, 19 nt, Artificial Sequence
  Description of Artificial Sequence: Synthetic oligonucleotide
ugacaauauuagcugguua

SEQ ID NO: 1550294 - RNA, 19 nt, Artificial Sequence
  Description of Artificial Sequence: Synthetic oligonucleotide
gggaacgugaccugcagag

SEQ ID NO: 1550295 - RNA, 19 nt, Artificial Sequence
  Description of Artificial Sequence: Synthetic oligonucleotide
auaauuucagucgguccag

SEQ ID NO: 1550296 - RNA, 19 nt, Artificial Sequence
  Description of Artificial Sequence: Synthetic oligonucleotide
agagacacuuaaaucagcu

SEQ ID NO: 1550297 - RNA, 19 nt, Artificial Sequence
  Description of Artificial Sequence: Synthetic oligonucleotide
agcugguuauacuggcagg

SEQ ID NO: 1550298 - RNA, 19 nt, Artificial Sequence
  Description of Artificial Sequence: Synthetic oligonucleotide
uuagaggcaggcuccuccc

SEQ ID NO: 1550299 - RNA, 19 nt, Artificial Sequence
  Description of Artificial Sequence: Synthetic oligonucleotide
uaccagcaauauuagguac

SEQ ID NO: 1550300 - RNA, 19 nt, Artificial Sequence
  Description of Artificial Sequence: Synthetic oligonucleotide
uggggacaaagguugaaaa

SEQ ID NO: 1550301 - RNA, 19 nt, Artificial Sequence
  Description of Artificial Sequence: Synthetic oligonucleotide
gguacagcauuacugggug

SEQ ID NO: 1550302 - RNA, 19 nt, Artificial Sequence
  Description of Artificial Sequence: Synthetic oligonucleotide
auauuagguacuccugaau

SEQ ID NO: 1550303 - RNA, 19 nt, Artificial Sequence
  Description of Artificial Sequence: Synthetic oligonucleotide
cucgacauggcagaagaug

SEQ ID NO: 1550304 - RNA, 19 nt, Artificial Sequence
  Description of Artificial Sequence: Synthetic oligonucleotide
uuaaaucagaaaggaugcu

SEQ ID NO: 1550305 - RNA, 19 nt, Artificial Sequence
  Description of Artificial Sequence: Synthetic oligonucleotide
aggaugcugucagacauuc

SEQ ID NO: 1550306 - RNA, 19 nt, Artificial Sequence
  Description of Artificial Sequence: Synthetic oligonucleotide
guuuccuuuagaggcaggc

SEQ ID NO: 1550307 - RNA, 19 nt, Artificial Sequence
  Description of Artificial Sequence: Synthetic oligonucleotide
aguggcucgacauggcaga

SEQ ID NO: 1550308 - RNA, 19 nt, Artificial Sequence
  Description of Artificial Sequence: Synthetic oligonucleotide
uuuggccugacuucuuuau

SEQ ID NO: 1550309 - RNA, 19 nt, Artificial Sequence
  Description of Artificial Sequence: Synthetic oligonucleotide
acuggggaacgugaccugc

SEQ ID NO: 1550310 - RNA, 19 nt, Artificial Sequence
  Description of Artificial Sequence: Synthetic oligonucleotide
ucuuccuauucaguagccc

SEQ ID NO: 1550311 - RNA, 19 nt, Artificial Sequence
  Description of Artificial Sequence: Synthetic oligonucleotide
uccaguauccggaccucug

SEQ ID NO: 1550312 - RNA, 19 nt, Artificial Sequence
  Description of Artificial Sequence: Synthetic oligonucleotide
ugauuggugcuaaacucuu

SEQ ID NO: 1550313 - RNA, 19 nt, Artificial Sequence
  Description of Artificial Sequence: Synthetic oligonucleotide
auugacaauauuagcuggu

SEQ ID NO: 1550314 - RNA, 19 nt, Artificial Sequence
  Description of Artificial Sequence: Synthetic oligonucleotide
aagaacacguugagcaaca

SEQ ID NO: 1550315 - RNA, 19 nt, Artificial Sequence
  Description of Artificial Sequence: Synthetic oligonucleotide
ucagaguuugggguagagc

SEQ ID NO: 1550316 - RNA, 19 nt, Artificial Sequence
  Description of Artificial Sequence: Synthetic oligonucleotide
guaauauuauguuucugau

SEQ ID NO: 1550317 - RNA, 19 nt, Artificial Sequence
  Description of Artificial Sequence: Synthetic oligonucleotide
uuaucaguaucaggcucag

SEQ ID NO: 1550318 - RNA, 19 nt, Artificial Sequence
  Description of Artificial Sequence: Synthetic oligonucleotide
ucucugauauucgcaaagu

SEQ ID NO: 1550319 - RNA, 19 nt, Artificial Sequence
  Description of Artificial Sequence: Synthetic oligonucleotide
aucgaaggucugaaguuac

SEQ ID NO: 1550320 - RNA, 19 nt, Artificial Sequence
  Description of Artificial Sequence: Synthetic oligonucleotide
aggucucugauauucgcaa

SEQ ID NO: 1550321 - RNA, 19 nt, Artificial Sequence
  Description of Artificial Sequence: Synthetic oligonucleotide
auaguuuggaaaauauauu

SEQ ID NO: 1550322 - RNA, 19 nt, Artificial Sequence
  Description of Artificial Sequence: Synthetic oligonucleotide
aucuuccuauucaguagcc

SEQ ID NO: 1550323 - RNA, 19 nt, Artificial Sequence
  Description of Artificial Sequence: Synthetic oligonucleotide
ggacagaacaagcuacuug

SEQ ID NO: 1550324 - RNA, 19 nt, Artificial Sequence
  Description of Artificial Sequence: Synthetic oligonucleotide
uauucgcaaaguucuuguc

SEQ ID NO: 1550325 - RNA, 19 nt, Artificial Sequence
  Description of Artificial Sequence: Synthetic oligonucleotide
uuggcacacaccacagagu

SEQ ID NO: 1550326 - RNA, 19 nt, Artificial Sequence
  Description of Artificial Sequence: Synthetic oligonucleotide
caugcguaauauuucucca

SEQ ID NO: 1550327 - RNA, 19 nt, Artificial Sequence
  Description of Artificial Sequence: Synthetic oligonucleotide
auuucagucgguccagcua

SEQ ID NO: 1550328 - RNA, 19 nt, Artificial Sequence
  Description of Artificial Sequence: Synthetic oligonucleotide
uacuccugaaucacaguuu

SEQ ID NO: 1550329 - RNA, 19 nt, Artificial Sequence
  Description of Artificial Sequence: Synthetic oligonucleotide
caaugauggguagcuagag

SEQ ID NO: 1550330 - RNA, 19 nt, Artificial Sequence
  Description of Artificial Sequence: Synthetic oligonucleotide
auuaguggggacaaagguu

SEQ ID NO: 1550331 - RNA, 19 nt, Artificial Sequence
  Description of Artificial Sequence: Synthetic oligonucleotide
cuuaaaucagcuguaagau

SEQ ID NO: 1550332 - RNA, 19 nt, Artificial Sequence
  Description of Artificial Sequence: Synthetic oligonucleotide
uggggaacgugaccugcag

SEQ ID NO: 1550333 - RNA, 19 nt, Artificial Sequence
  Description of Artificial Sequence: Synthetic oligonucleotide
auacccauuaguggggaca

SEQ ID NO: 1550334 - RNA, 19 nt, Artificial Sequence
  Description of Artificial Sequence: Synthetic oligonucleotide
augcuuuagagagacacuu

SEQ ID NO: 1550335 - RNA, 19 nt, Artificial Sequence
  Description of Artificial Sequence: Synthetic oligonucleotide
augcguaauauuucuccaa

SEQ ID NO: 1550336 - RNA, 19 nt, Artificial Sequence
  Description of Artificial Sequence: Synthetic oligonucleotide
agcguuucacuggggaacg

SEQ ID NO: 1550337 - RNA, 19 nt, Artificial Sequence
  Description of Artificial Sequence: Synthetic oligonucleotide
gagagacacuuaaaucagc

SEQ ID NO: 1550338 - RNA, 19 nt, Artificial Sequence
  Description of Artificial Sequence: Synthetic oligonucleotide
gaacaagcuacuuggacuu

SEQ ID NO: 1550339 - RNA, 19 nt, Artificial Sequence
  Description of Artificial Sequence: Synthetic oligonucleotide
guacaggagagucugagau

SEQ ID NO: 1550340 - RNA, 19 nt, Artificial Sequence
  Description of Artificial Sequence: Synthetic oligonucleotide
gaguggcucgacauggcag

SEQ ID NO: 1550341 - RNA, 19 nt, Artificial Sequence
  Description of Artificial Sequence: Synthetic oligonucleotide
ccuuaaauuacauuuccaa

SEQ ID NO: 1550342 - RNA, 19 nt, Artificial Sequence
  Description of Artificial Sequence: Synthetic oligonucleotide
auauaguuuggaaaauaua

SEQ ID NO: 1550343 - RNA, 19 nt, Artificial Sequence
  Description of Artificial Sequence: Synthetic oligonucleotide
cacacccggaagcaaauuc

SEQ ID NO: 1550344 - RNA, 19 nt, Artificial Sequence
  Description of Artificial Sequence: Synthetic oligonucleotide
guuggcaaguaaaacuaca

SEQ ID NO: 1550345 - RNA, 19 nt, Artificial Sequence
  Description of Artificial Sequence: Synthetic oligonucleotide
agcgagaguggcucgacau

SEQ ID NO: 1550346 - RNA, 19 nt, Artificial Sequence
  Description of Artificial Sequence: Synthetic oligonucleotide
gauguccuccgacucucug

SEQ ID NO: 1550347 - RNA, 19 nt, Artificial Sequence
  Description of Artificial Sequence: Synthetic oligonucleotide
cuuuauggauaaaaccaua

SEQ ID NO: 1550348 - RNA, 19 nt, Artificial Sequence
  Description of Artificial Sequence: Synthetic oligonucleotide
ugcuuuagagagacacuua

SEQ ID NO: 1550349 - RNA, 19 nt, Artificial Sequence
  Description of Artificial Sequence: Synthetic oligonucleotide
agcauuacugggugucaca

SEQ ID NO: 1550350 - RNA, 19 nt, Artificial Sequence
  Description of Artificial Sequence: Synthetic oligonucleotide
gcuuucaggacagaacaag

SEQ ID NO: 1550351 - RNA, 19 nt, Artificial Sequence
  Description of Artificial Sequence: Synthetic oligonucleotide
ugauauucgcaaaguucuu

SEQ ID NO: 1550352 - RNA, 19 nt, Artificial Sequence
  Description of Artificial Sequence: Synthetic oligonucleotide
ccauuaguggggacaaagg

SEQ ID NO: 1550353 - RNA, 19 nt, Artificial Sequence
  Description of Artificial Sequence: Synthetic oligonucleotide
uauccggaccucugguaug

SEQ ID NO: 1550354 - RNA, 19 nt, Artificial Sequence
  Description of Artificial Sequence: Synthetic oligonucleotide
ggaagcaaauuccugccuc

SEQ ID NO: 1550355 - RNA, 19 nt, Artificial Sequence
  Description of Artificial Sequence: Synthetic oligonucleotide
augugccaaaaucgaaggu

SEQ ID NO: 1550356 - RNA, 19 nt, Artificial Sequence
  Description of Artificial Sequence: Synthetic oligonucleotide
uaucaggcucagaauucaa

SEQ ID NO: 1550357 - RNA, 19 nt, Artificial Sequence
  Description of Artificial Sequence: Synthetic oligonucleotide
ucacaaccaagcaguucac

SEQ ID NO: 1550358 - RNA, 19 nt, Artificial Sequence
  Description of Artificial Sequence: Synthetic oligonucleotide
auguccuccgacucucuga

SEQ ID NO: 1550359 - RNA, 19 nt, Artificial Sequence
  Description of Artificial Sequence: Synthetic oligonucleotide
agacugucagugucucuug

SEQ ID NO: 1550360 - RNA, 19 nt, Artificial Sequence
  Description of Artificial Sequence: Synthetic oligonucleotide
gaacacguugagcaacaaa

SEQ ID NO: 1550361 - RNA, 19 nt, Artificial Sequence
  Description of Artificial Sequence: Synthetic oligonucleotide
gaggugguaucugcuuggg

SEQ ID NO: 1550362 - RNA, 19 nt, Artificial Sequence
  Description of Artificial Sequence: Synthetic oligonucleotide
agacauucuguuggcaagu

SEQ ID NO: 1550363 - RNA, 19 nt, Artificial Sequence
  Description of Artificial Sequence: Synthetic oligonucleotide
gacacuuaaaucagcugua

SEQ ID NO: 1550364 - RNA, 19 nt, Artificial Sequence
  Description of Artificial Sequence: Synthetic oligonucleotide
uuccuuuugauuggugcua

SEQ ID NO: 1550365 - RNA, 19 nt, Artificial Sequence
  Description of Artificial Sequence: Synthetic oligonucleotide
cuuaggucuggcagguaca

SEQ ID NO: 1550366 - RNA, 19 nt, Artificial Sequence
  Description of Artificial Sequence: Synthetic oligonucleotide
aagcuacuuggacuucuua

SEQ ID NO: 1550367 - RNA, 19 nt, Artificial Sequence
  Description of Artificial Sequence: Synthetic oligonucleotide
cagcguuucacuggggaac

SEQ ID NO: 1550368 - RNA, 19 nt, Artificial Sequence
  Description of Artificial Sequence: Synthetic oligonucleotide
gguagcuagagacuuuaaa

SEQ ID NO: 1550369 - RNA, 19 nt, Artificial Sequence
  Description of Artificial Sequence: Synthetic oligonucleotide
guaagauaguccucagagu

SEQ ID NO: 1550370 - RNA, 19 nt, Artificial Sequence
  Description of Artificial Sequence: Synthetic oligonucleotide
aguauccggaccucuggua

SEQ ID NO: 1550371 - RNA, 19 nt, Artificial Sequence
  Description of Artificial Sequence: Synthetic oligonucleotide
guuucacuggggaacguga

SEQ ID NO: 1550372 - RNA, 19 nt, Artificial Sequence
  Description of Artificial Sequence: Synthetic oligonucleotide
gcuugggucaggcccaugc

SEQ ID NO: 1550373 - RNA, 19 nt, Artificial Sequence
  Description of Artificial Sequence: Synthetic oligonucleotide
uccuuuugauuggugcuaa

SEQ ID NO: 1550374 - RNA, 19 nt, Artificial Sequence
  Description of Artificial Sequence: Synthetic oligonucleotide
auuucaugcuuuagagaga

SEQ ID NO: 1550375 - RNA, 19 nt, Artificial Sequence
  Description of Artificial Sequence: Synthetic oligonucleotide
cccgagagaggaaggagcg

SEQ ID NO: 1550376 - RNA, 19 nt, Artificial Sequence
  Description of Artificial Sequence: Synthetic oligonucleotide
cugguuauacuggcaggag

SEQ ID NO: 1550377 - RNA, 19 nt, Artificial Sequence
  Description of Artificial Sequence: Synthetic oligonucleotide
ugcacacccggaagcaaau

SEQ ID NO: 1550378 - RNA, 19 nt, Artificial Sequence
  Description of Artificial Sequence: Synthetic oligonucleotide
gaggucucugauauucgca

SEQ ID NO: 1550379 - RNA, 19 nt, Artificial Sequence
  Description of Artificial Sequence: Synthetic oligonucleotide
uacccauuaguggggacaa

SEQ ID NO: 1550380 - RNA, 19 nt, Artificial Sequence
  Description of Artificial Sequence: Synthetic oligonucleotide
gggacaaagguugaaaaua

SEQ ID NO: 1550381 - RNA, 19 nt, Artificial Sequence
  Description of Artificial Sequence: Synthetic oligonucleotide
gagagggcggaucauaauu

SEQ ID NO: 1550382 - RNA, 19 nt, Artificial Sequence
  Description of Artificial Sequence: Synthetic oligonucleotide
gcauuacugggugucacag

SEQ ID NO: 1550383 - RNA, 19 nt, Artificial Sequence
  Description of Artificial Sequence: Synthetic oligonucleotide
gugccgacccaucucugcc

SEQ ID NO: 1550384 - RNA, 19 nt, Artificial Sequence
  Description of Artificial Sequence: Synthetic oligonucleotide
acuuuggccugacuucuuu

SEQ ID NO: 1550385 - RNA, 19 nt, Artificial Sequence
  Description of Artificial Sequence: Synthetic oligonucleotide
ggcucgacauggcagaaga

SEQ ID NO: 1550386 - RNA, 19 nt, Artificial Sequence
  Description of Artificial Sequence: Synthetic oligonucleotide
acacuuaaaucagcuguaa

SEQ ID NO: 1550387 - RNA, 19 nt, Artificial Sequence
  Description of Artificial Sequence: Synthetic oligonucleotide
cuuauacuacacacuucaa

SEQ ID NO: 1550388 - RNA, 19 nt, Artificial Sequence
  Description of Artificial Sequence: Synthetic oligonucleotide
agugcugugccgacccauc

SEQ ID NO: 1550389 - RNA, 19 nt, Artificial Sequence
  Description of Artificial Sequence: Synthetic oligonucleotide
ugcugugccgacccaucuc

SEQ ID NO: 1550390 - RNA, 19 nt, Artificial Sequence
  Description of Artificial Sequence: Synthetic oligonucleotide
guacuccugaaucacaguu

SEQ ID NO: 1550391 - RNA, 19 nt, Artificial Sequence
  Description of Artificial Sequence: Synthetic oligonucleotide
acaggcuuucaggacagaa

SEQ ID NO: 1550392 - RNA, 19 nt, Artificial Sequence
  Description of Artificial Sequence: Synthetic oligonucleotide
ccggaagcaaauuccugcc

SEQ ID NO: 1550393 - RNA, 19 nt, Artificial Sequence
  Description of Artificial Sequence: Synthetic oligonucleotide
cuguaagauaguccucaga

SEQ ID NO: 1550394 - RNA, 19 nt, Artificial Sequence
  Description of Artificial Sequence: Synthetic oligonucleotide
cagauaaguucagcguuuc

SEQ ID NO: 1550395 - RNA, 19 nt, Artificial Sequence
  Description of Artificial Sequence: Synthetic oligonucleotide
gcuacuuggacuucuuaua

SEQ ID NO: 1550396 - RNA, 19 nt, Artificial Sequence
  Description of Artificial Sequence: Synthetic oligonucleotide
ggugucacagaagacuguc

SEQ ID NO: 1550397 - RNA, 19 nt, Artificial Sequence
  Description of Artificial Sequence: Synthetic oligonucleotide
cagcaauauuagguacucc

SEQ ID NO: 1550398 - RNA, 19 nt, Artificial Sequence
  Description of Artificial Sequence: Synthetic oligonucleotide
aggucugaaguuacggaaa

SEQ ID NO: 1550399 - RNA, 19 nt, Artificial Sequence
  Description of Artificial Sequence: Synthetic oligonucleotide
guccagcuacuccuuaauc

SEQ ID NO: 1550400 - RNA, 19 nt, Artificial Sequence
  Description of Artificial Sequence: Synthetic oligonucleotide
cccauuaguggggacaaag

SEQ ID NO: 1550401 - RNA, 19 nt, Artificial Sequence
  Description of Artificial Sequence: Synthetic oligonucleotide
ccaguauccggaccucugg

SEQ ID NO: 1550402 - RNA, 19 nt, Artificial Sequence
  Description of Artificial Sequence: Synthetic oligonucleotide
agagggcggaucauaauuu

SEQ ID NO: 1550403 - RNA, 19 nt, Artificial Sequence
  Description of Artificial Sequence: Synthetic oligonucleotide
acagcauuacuggguguca

SEQ ID NO: 1550404 - RNA, 19 nt, Artificial Sequence
  Description of Artificial Sequence: Synthetic oligonucleotide
gauauuaguuucacucuuu

SEQ ID NO: 1550405 - RNA, 19 nt, Artificial Sequence
  Description of Artificial Sequence: Synthetic oligonucleotide
cauuacugggugucacaga

SEQ ID NO: 1550406 - RNA, 19 nt, Artificial Sequence
  Description of Artificial Sequence: Synthetic oligonucleotide
caguaucaggcucagaauu

SEQ ID NO: 1550407 - RNA, 19 nt, Artificial Sequence
  Description of Artificial Sequence: Synthetic oligonucleotide
gagaguggcucgacauggc

SEQ ID NO: 1550408 - RNA, 19 nt, Artificial Sequence
  Description of Artificial Sequence: Synthetic oligonucleotide
cugggugucacagaagacu

SEQ ID NO: 1550409 - RNA, 19 nt, Artificial Sequence
  Description of Artificial Sequence: Synthetic oligonucleotide
cgaaggucugaaguuacgg

SEQ ID NO: 1550410 - RNA, 19 nt, Artificial Sequence
  Description of Artificial Sequence: Synthetic oligonucleotide
gcguaauauuucuccaaga

SEQ ID NO: 1550411 - RNA, 19 nt, Artificial Sequence
  Description of Artificial Sequence: Synthetic oligonucleotide
guauccggaccucugguau

SEQ ID NO: 1550412 - RNA, 19 nt, Artificial Sequence
  Description of Artificial Sequence: Synthetic oligonucleotide
cagcauuacugggugucac

SEQ ID NO: 1550413 - RNA, 19 nt, Artificial Sequence
  Description of Artificial Sequence: Synthetic oligonucleotide
uggcucgacauggcagaag

SEQ ID NO: 1550414 - RNA, 19 nt, Artificial Sequence
  Description of Artificial Sequence: Synthetic oligonucleotide
ccuucucacagagaagaac

SEQ ID NO: 1550415 - RNA, 19 nt, Artificial Sequence
  Description of Artificial Sequence: Synthetic oligonucleotide
cagaauaauuucagucggu

SEQ ID NO: 1550416 - RNA, 19 nt, Artificial Sequence
  Description of Artificial Sequence: Synthetic oligonucleotide
ucccaccgaccucauccac

SEQ ID NO: 1550417 - RNA, 19 nt, Artificial Sequence
  Description of Artificial Sequence: Synthetic oligonucleotide
cugagaugugcugcugauc

SEQ ID NO: 1550418 - RNA, 19 nt, Artificial Sequence
  Description of Artificial Sequence: Synthetic oligonucleotide
cggaccucugguaugugcc

SEQ ID NO: 1550419 - RNA, 19 nt, Artificial Sequence
  Description of Artificial Sequence: Synthetic oligonucleotide
uacuuuggccugacuucuu

SEQ ID NO: 1550420 - RNA, 19 nt, Artificial Sequence
  Description of Artificial Sequence: Synthetic oligonucleotide
accucugguaugugccaaa

SEQ ID NO: 1550421 - RNA, 19 nt, Artificial Sequence
  Description of Artificial Sequence: Synthetic oligonucleotide
acgugaccugcagagaguu

SEQ ID NO: 1550422 - RNA, 19 nt, Artificial Sequence
  Description of Artificial Sequence: Synthetic oligonucleotide
gagcgagaguggcucgaca

SEQ ID NO: 1550423 - RNA, 19 nt, Artificial Sequence
  Description of Artificial Sequence: Synthetic oligonucleotide
aggacagaacaagcuacuu

SEQ ID NO: 1550424 - RNA, 19 nt, Artificial Sequence
  Description of Artificial Sequence: Synthetic oligonucleotide
aggagagggcggaucauaa

SEQ ID NO: 1550425 - RNA, 19 nt, Artificial Sequence
  Description of Artificial Sequence: Synthetic oligonucleotide
agcuacuccuuaauccuua

SEQ ID NO: 1550426 - RNA, 19 nt, Artificial Sequence
  Description of Artificial Sequence: Synthetic oligonucleotide
cacaguuuccuggauaaau

SEQ ID NO: 1550427 - RNA, 19 nt, Artificial Sequence
  Description of Artificial Sequence: Synthetic oligonucleotide
ggcucagaauucaaucaca

SEQ ID NO: 1550428 - RNA, 19 nt, Artificial Sequence
  Description of Artificial Sequence: Synthetic oligonucleotide
gccaaaaucgaaggucuga

SEQ ID NO: 1550429 - RNA, 19 nt, Artificial Sequence
  Description of Artificial Sequence: Synthetic oligonucleotide
gauuggugcuaaacucuua

SEQ ID NO: 1550430 - RNA, 19 nt, Artificial Sequence
  Description of Artificial Sequence: Synthetic oligonucleotide
augcacacccggaagcaaa

SEQ ID NO: 1550431 - RNA, 19 nt, Artificial Sequence
  Description of Artificial Sequence: Synthetic oligonucleotide
cccaccgaccucauccacc

SEQ ID NO: 1550432 - RNA, 19 nt, Artificial Sequence
  Description of Artificial Sequence: Synthetic oligonucleotide
guuacggaaauaacagcuu

SEQ ID NO: 1550433 - RNA, 19 nt, Artificial Sequence
  Description of Artificial Sequence: Synthetic oligonucleotide
gugucacagaagacuguca

SEQ ID NO: 1550434 - RNA, 19 nt, Artificial Sequence
  Description of Artificial Sequence: Synthetic oligonucleotide
gcgagaguggcucgacaug

SEQ ID NO: 1550435 - RNA, 19 nt, Artificial Sequence
  Description of Artificial Sequence: Synthetic oligonucleotide
ggucaggcccaugccaugc

SEQ ID NO: 1550436 - RNA, 19 nt, Artificial Sequence
  Description of Artificial Sequence: Synthetic oligonucleotide
ggacaaagguugaaaauau

SEQ ID NO: 1550437 - RNA, 19 nt, Artificial Sequence
  Description of Artificial Sequence: Synthetic oligonucleotide
gaaucacaguuuccuggau

SEQ ID NO: 1550438 - RNA, 19 nt, Artificial Sequence
  Description of Artificial Sequence: Synthetic oligonucleotide
gcggaucauaauuuucuua

SEQ ID NO: 1550439 - RNA, 19 nt, Artificial Sequence
  Description of Artificial Sequence: Synthetic oligonucleotide
cuuuagaggcaggcuccuc

SEQ ID NO: 1550440 - RNA, 19 nt, Artificial Sequence
  Description of Artificial Sequence: Synthetic oligonucleotide
cucugauauucgcaaaguu

SEQ ID NO: 1550441 - RNA, 19 nt, Artificial Sequence
  Description of Artificial Sequence: Synthetic oligonucleotide
gagggcggaucauaauuuu

SEQ ID NO: 1550442 - RNA, 19 nt, Artificial Sequence
  Description of Artificial Sequence: Synthetic oligonucleotide
agaacacguugagcaacaa

SEQ ID NO: 1550443 - RNA, 19 nt, Artificial Sequence
  Description of Artificial Sequence: Synthetic oligonucleotide
ccggaccucugguaugugc

SEQ ID NO: 1550444 - RNA, 19 nt, Artificial Sequence
  Description of Artificial Sequence: Synthetic oligonucleotide
ccagcuacuccuuaauccu

SEQ ID NO: 1550445 - RNA, 19 nt, Artificial Sequence
  Description of Artificial Sequence: Synthetic oligonucleotide
gccgacccaucucugccag

SEQ ID NO: 1550446 - RNA, 19 nt, Artificial Sequence
  Description of Artificial Sequence: Synthetic oligonucleotide
ggggacaaagguugaaaau

SEQ ID NO: 1550447 - RNA, 19 nt, Artificial Sequence
  Description of Artificial Sequence: Synthetic oligonucleotide
ggucucugauauucgcaaa

SEQ ID NO: 1550448 - RNA, 19 nt, Artificial Sequence
  Description of Artificial Sequence: Synthetic oligonucleotide
cacccggaagcaaauuccu

SEQ ID NO: 1550449 - RNA, 19 nt, Artificial Sequence
  Description of Artificial Sequence: Synthetic oligonucleotide
gucaggcccaugccaugca

SEQ ID NO: 1550450 - RNA, 19 nt, Artificial Sequence
  Description of Artificial Sequence: Synthetic oligonucleotide
gcugugccgacccaucucu

SEQ ID NO: 1550451 - RNA, 19 nt, Artificial Sequence
  Description of Artificial Sequence: Synthetic oligonucleotide
ccgaccucauccaccaaca

SEQ ID NO: 1550452 - RNA, 19 nt, Artificial Sequence
  Description of Artificial Sequence: Synthetic oligonucleotide
guccuccgacucucugagc

SEQ ID NO: 1550453 - RNA, 19 nt, Artificial Sequence
  Description of Artificial Sequence: Synthetic oligonucleotide
ggggaacgugaccugcaga

SEQ ID NO: 1550454 - RNA, 19 nt, Artificial Sequence
  Description of Artificial Sequence: Synthetic oligonucleotide
gguacuccugaaucacagu

SEQ ID NO: 1550455 - RNA, 19 nt, Artificial Sequence
  Description of Artificial Sequence: Synthetic oligonucleotide
caguauccggaccucuggu

SEQ ID NO: 1550456 - RNA, 19 nt, Artificial Sequence
  Description of Artificial Sequence: Synthetic oligonucleotide
ggaacgugaccugcagaga

SEQ ID NO: 1550457 - RNA, 19 nt, Artificial Sequence
  Description of Artificial Sequence: Synthetic oligonucleotide
uccggaccucugguaugug

SEQ ID NO: 1550458 - RNA, 19 nt, Artificial Sequence
  Description of Artificial Sequence: Synthetic oligonucleotide
cagacccaccuaugcggca

SEQ ID NO: 1550459 - RNA, 19 nt, Artificial Sequence
  Description of Artificial Sequence: Synthetic oligonucleotide
caugcacacccggaagcaa

SEQ ID NO: 1550460 - RNA, 19 nt, Artificial Sequence
  Description of Artificial Sequence: Synthetic oligonucleotide
gcaacaaaacaugcguaau

SEQ ID NO: 1550461 - RNA, 19 nt, Artificial Sequence
  Description of Artificial Sequence: Synthetic oligonucleotide
cccuuccaguauccggacc

SEQ ID NO: 1550462 - RNA, 19 nt, Artificial Sequence
  Description of Artificial Sequence: Synthetic oligonucleotide
gccccuuuagcuacuauau

SEQ ID NO: 1550463 - RNA, 19 nt, Artificial Sequence
  Description of Artificial Sequence: Synthetic oligonucleotide
ccuuaauccuuaucaguau

SEQ ID NO: 1550464 - RNA, 19 nt, Artificial Sequence
  Description of Artificial Sequence: Synthetic oligonucleotide
gugcugugccgacccaucu

SEQ ID NO: 1550465 - RNA, 19 nt, Artificial Sequence
  Description of Artificial Sequence: Synthetic oligonucleotide
ggcuuucaggacagaacaa

SEQ ID NO: 1550466 - RNA, 19 nt, Artificial Sequence
  Description of Artificial Sequence: Synthetic oligonucleotide
gcucccgagagaggaagga

SEQ ID NO: 1550467 - RNA, 19 nt, Artificial Sequence
  Description of Artificial Sequence: Synthetic oligonucleotide
caagcuacuuggacuucuu

SEQ ID NO: 1550468 - RNA, 19 nt, Artificial Sequence
  Description of Artificial Sequence: Synthetic oligonucleotide
ggagcgagaguggcucgac

SEQ ID NO: 1550469 - RNA, 19 nt, Artificial Sequence
  Description of Artificial Sequence: Synthetic oligonucleotide
cucugguaugugccaaaau

SEQ ID NO: 1550470 - RNA, 19 nt, Artificial Sequence
  Description of Artificial Sequence: Synthetic oligonucleotide
gcccuuccaguauccggac

SEQ ID NO: 1550471 - RNA, 19 nt, Artificial Sequence
  Description of Artificial Sequence: Synthetic oligonucleotide
ggcggaucauaauuuucuu

SEQ ID NO: 1550472 - RNA, 19 nt, Artificial Sequence
  Description of Artificial Sequence: Synthetic oligonucleotide
cuccgacucucugagcagu

SEQ ID NO: 1550473 - RNA, 19 nt, Artificial Sequence
  Description of Artificial Sequence: Synthetic oligonucleotide
cagcuacuccuuaauccuu

SEQ ID NO: 1550474 - RNA, 19 nt, Artificial Sequence
  Description of Artificial Sequence: Synthetic oligonucleotide
acccauuaguggggacaaa

SEQ ID NO: 1550475 - RNA, 19 nt, Artificial Sequence
  Description of Artificial Sequence: Synthetic oligonucleotide
gccugacuucuuuauggau

SEQ ID NO: 1550476 - RNA, 19 nt, Artificial Sequence
  Description of Artificial Sequence: Synthetic oligonucleotide
guagccccuuuagcuacua

SEQ ID NO: 1550477 - RNA, 19 nt, Artificial Sequence
  Description of Artificial Sequence: Synthetic oligonucleotide
ggagagggcggaucauaau

SEQ ID NO: 1550478 - RNA, 19 nt, Artificial Sequence
  Description of Artificial Sequence: Synthetic oligonucleotide
gcggcagaagaggcacuug

SEQ ID NO: 1550479 - RNA, 19 nt, Artificial Sequence
  Description of Artificial Sequence: Synthetic oligonucleotide
ggacacucucugaguccug

SEQ ID NO: 1550480 - RNA, 19 nt, Artificial Sequence
  Description of Artificial Sequence: Synthetic oligonucleotide
cuggcagguacaggagagu

SEQ ID NO: 1550481 - RNA, 19 nt, Artificial Sequence
  Description of Artificial Sequence: Synthetic oligonucleotide
cagugucucuuggcacaca

SEQ ID NO: 1550482 - RNA, 19 nt, Artificial Sequence
  Description of Artificial Sequence: Synthetic oligonucleotide
ggguagcuagagacuuuaa

SEQ ID NO: 1550483 - RNA, 19 nt, Artificial Sequence
  Description of Artificial Sequence: Synthetic oligonucleotide
cacacaccacagaguggau

SEQ ID NO: 1550484 - RNA, 19 nt, Artificial Sequence
  Description of Artificial Sequence: Synthetic oligonucleotide
ccgagagaggaaggagcga

SEQ ID NO: 1550485 - RNA, 19 nt, Artificial Sequence
  Description of Artificial Sequence: Synthetic oligonucleotide
cgguccagcuacuccuuaa

SEQ ID NO: 1550486 - RNA, 19 nt, Artificial Sequence
  Description of Artificial Sequence: Synthetic oligonucleotide
caccgaccucauccaccaa

SEQ ID NO: 1550487 - RNA, 19 nt, Artificial Sequence
  Description of Artificial Sequence: Synthetic oligonucleotide
ccuuuagaggcaggcuccu

SEQ ID NO: 1550488 - RNA, 19 nt, Artificial Sequence
  Description of Artificial Sequence: Synthetic oligonucleotide
ccucagaguuugggguaga

SEQ ID NO: 1550489 - RNA, 19 nt, Artificial Sequence
  Description of Artificial Sequence: Synthetic oligonucleotide
gcucgacauggcagaagau

SEQ ID NO: 1550490 - RNA, 19 nt, Artificial Sequence
  Description of Artificial Sequence: Synthetic oligonucleotide
gcacacccggaagcaaauu

SEQ ID NO: 1550491 - RNA, 19 nt, Artificial Sequence
  Description of Artificial Sequence: Synthetic oligonucleotide
cugcuugggucaggcccau

SEQ ID NO: 1550492 - RNA, 19 nt, Artificial Sequence
  Description of Artificial Sequence: Synthetic oligonucleotide
cgugaccugcagagaguuu

SEQ ID NO: 1550493 - RNA, 19 nt, Artificial Sequence
  Description of Artificial Sequence: Synthetic oligonucleotide
ccgcucccaccgaccucau

SEQ ID NO: 1550494 - RNA, 19 nt, Artificial Sequence
  Description of Artificial Sequence: Synthetic oligonucleotide
aaacuuaacuguuaguggc

SEQ ID NO: 1550495 - RNA, 19 nt, Artificial Sequence
  Description of Artificial Sequence: Synthetic oligonucleotide
acaucaaacuaacagaccc

SEQ ID NO: 1550496 - RNA, 19 nt, Artificial Sequence
  Description of Artificial Sequence: Synthetic oligonucleotide
gaugcaauugccuuaaucc

SEQ ID NO: 1550497 - RNA, 19 nt, Artificial Sequence
  Description of Artificial Sequence: Synthetic oligonucleotide
aaucugauuaaccgcaggc

SEQ ID NO: 1550498 - RNA, 19 nt, Artificial Sequence
  Description of Artificial Sequence: Synthetic oligonucleotide
uuauuugaagcaaagagaa

SEQ ID NO: 1550499 - RNA, 19 nt, Artificial Sequence
  Description of Artificial Sequence: Synthetic oligonucleotide
uuuaaauagccccaacggc

SEQ ID NO: 1550500 - RNA, 19 nt, Artificial Sequence
  Description of Artificial Sequence: Synthetic oligonucleotide
uguacuuggaugcaauugc

SEQ ID NO: 1550501 - RNA, 19 nt, Artificial Sequence
  Description of Artificial Sequence: Synthetic oligonucleotide
gauucucucaaucugaaga

SEQ ID NO: 1550502 - RNA, 19 nt, Artificial Sequence
  Description of Artificial Sequence: Synthetic oligonucleotide
guguuaaacauuuuccagg

SEQ ID NO: 1550503 - RNA, 19 nt, Artificial Sequence
  Description of Artificial Sequence: Synthetic oligonucleotide
uucaaucugauuaaccgca

SEQ ID NO: 1550504 - RNA, 19 nt, Artificial Sequence
  Description of Artificial Sequence: Synthetic oligonucleotide
caggcuuauauuuuaagcc

SEQ ID NO: 1550505 - RNA, 19 nt, Artificial Sequence
  Description of Artificial Sequence: Synthetic oligonucleotide
acuacaucaaacuaacaga

SEQ ID NO: 1550506 - RNA, 19 nt, Artificial Sequence
  Description of Artificial Sequence: Synthetic oligonucleotide
aauccuuguguuuagcaca

SEQ ID NO: 1550507 - RNA, 19 nt, Artificial Sequence
  Description of Artificial Sequence: Synthetic oligonucleotide
uauauuuuaagccggguuu

SEQ ID NO: 1550508 - RNA, 19 nt, Artificial Sequence
  Description of Artificial Sequence: Synthetic oligonucleotide
aggcuuauauuuuaagccg

SEQ ID NO: 1550509 - RNA, 19 nt, Artificial Sequence
  Description of Artificial Sequence: Synthetic oligonucleotide
ugaaacgugcaccacagcu

SEQ ID NO: 1550510 - RNA, 19 nt, Artificial Sequence
  Description of Artificial Sequence: Synthetic oligonucleotide
uacgcggucaccacgaugc

SEQ ID NO: 1550511 - RNA, 19 nt, Artificial Sequence
  Description of Artificial Sequence: Synthetic oligonucleotide
uguauggggaaccggauca

SEQ ID NO: 1550512 - RNA, 19 nt, Artificial Sequence
  Description of Artificial Sequence: Synthetic oligonucleotide
aauccugggauccuccaag

SEQ ID NO: 1550513 - RNA, 19 nt, Artificial Sequence
  Description of Artificial Sequence: Synthetic oligonucleotide
aacuaacagacccucguug

SEQ ID NO: 1550514 - RNA, 19 nt, Artificial Sequence
  Description of Artificial Sequence: Synthetic oligonucleotide
ugacccaaagacuacagcu

SEQ ID NO: 1550515 - RNA, 19 nt, Artificial Sequence
  Description of Artificial Sequence: Synthetic oligonucleotide
uacccaaugucaauggcag

SEQ ID NO: 1550516 - RNA, 19 nt, Artificial Sequence
  Description of Artificial Sequence: Synthetic oligonucleotide
ugggaaguaaucaggcccg

SEQ ID NO: 1550517 - RNA, 19 nt, Artificial Sequence
  Description of Artificial Sequence: Synthetic oligonucleotide
ugauaaugcucucuggaga

SEQ ID NO: 1550518 - RNA, 19 nt, Artificial Sequence
  Description of Artificial Sequence: Synthetic oligonucleotide
guuguagcugaguagagug

SEQ ID NO: 1550519 - RNA, 19 nt, Artificial Sequence
  Description of Artificial Sequence: Synthetic oligonucleotide
gauaaugcucucuggagac

SEQ ID NO: 1550520 - RNA, 19 nt, Artificial Sequence
  Description of Artificial Sequence: Synthetic oligonucleotide
aaacgugcaccacagcuug

SEQ ID NO: 1550521 - RNA, 19 nt, Artificial Sequence
  Description of Artificial Sequence: Synthetic oligonucleotide
gaaguaaucaggcccgggc

SEQ ID NO: 1550522 - RNA, 19 nt, Artificial Sequence
  Description of Artificial Sequence: Synthetic oligonucleotide
aaagagaagacugacccaa

SEQ ID NO: 1550523 - RNA, 19 nt, Artificial Sequence
  Description of Artificial Sequence: Synthetic oligonucleotide
uguuuagcacagcucauca

SEQ ID NO: 1550524 - RNA, 19 nt, Artificial Sequence
  Description of Artificial Sequence: Synthetic oligonucleotide
agugggaaguaaucaggcc

SEQ ID NO: 1550525 - RNA, 19 nt, Artificial Sequence
  Description of Artificial Sequence: Synthetic oligonucleotide
uguuggccagugaauaagg

SEQ ID NO: 1550526 - RNA, 19 nt, Artificial Sequence
  Description of Artificial Sequence: Synthetic oligonucleotide
uuauauuuuaagccggguu

SEQ ID NO: 1550527 - RNA, 19 nt, Artificial Sequence
  Description of Artificial Sequence: Synthetic oligonucleotide
aaaccuguuggccagugaa

SEQ ID NO: 1550528 - RNA, 19 nt, Artificial Sequence
  Description of Artificial Sequence: Synthetic oligonucleotide
cacauuuccugauucgucc

SEQ ID NO: 1550529 - RNA, 19 nt, Artificial Sequence
  Description of Artificial Sequence: Synthetic oligonucleotide
ucaaacuaacagacccucg

SEQ ID NO: 1550530 - RNA, 19 nt, Artificial Sequence
  Description of Artificial Sequence: Synthetic oligonucleotide
agaaaggcugaagaaaauc

SEQ ID NO: 1550531 - RNA, 19 nt, Artificial Sequence
  Description of Artificial Sequence: Synthetic oligonucleotide
aacugugcggcuccggcuc

SEQ ID NO: 1550532 - RNA, 19 nt, Artificial Sequence
  Description of Artificial Sequence: Synthetic oligonucleotide
uaauccuuguguuuagcac

SEQ ID NO: 1550533 - RNA, 19 nt, Artificial Sequence
  Description of Artificial Sequence: Synthetic oligonucleotide
uacaucaaacuaacagacc

SEQ ID NO: 1550534 - RNA, 19 nt, Artificial Sequence
  Description of Artificial Sequence: Synthetic oligonucleotide
uuuggauuggcaguacuca

SEQ ID NO: 1550535 - RNA, 19 nt, Artificial Sequence
  Description of Artificial Sequence: Synthetic oligonucleotide
cugauaaugcucucuggag

SEQ ID NO: 1550536 - RNA, 19 nt, Artificial Sequence
  Description of Artificial Sequence: Synthetic oligonucleotide
uggauuucaccaaaccuuc

SEQ ID NO: 1550537 - RNA, 19 nt, Artificial Sequence
  Description of Artificial Sequence: Synthetic oligonucleotide
aucaaacuaacagacccuc

SEQ ID NO: 1550538 - RNA, 19 nt, Artificial Sequence
  Description of Artificial Sequence: Synthetic oligonucleotide
gguaagaagaaagaucaag

SEQ ID NO: 1550539 - RNA, 19 nt, Artificial Sequence
  Description of Artificial Sequence: Synthetic oligonucleotide
ucugauuaaccgcaggcuu

SEQ ID NO: 1550540 - RNA, 19 nt, Artificial Sequence
  Description of Artificial Sequence: Synthetic oligonucleotide
ucaccaaaccuucauccac

SEQ ID NO: 1550541 - RNA, 19 nt, Artificial Sequence
  Description of Artificial Sequence: Synthetic oligonucleotide
gagacuacaucaaacuaac

SEQ ID NO: 1550542 - RNA, 19 nt, Artificial Sequence
  Description of Artificial Sequence: Synthetic oligonucleotide
cugaguuagguacgggugg

SEQ ID NO: 1550543 - RNA, 19 nt, Artificial Sequence
  Description of Artificial Sequence: Synthetic oligonucleotide
acuaacagacccucguugu

SEQ ID NO: 1550544 - RNA, 19 nt, Artificial Sequence
  Description of Artificial Sequence: Synthetic oligonucleotide
cuuggacuauaaaucuugc

SEQ ID NO: 1550545 - RNA, 19 nt, Artificial Sequence
  Description of Artificial Sequence: Synthetic oligonucleotide
uuuaagccggguuuguuua

SEQ ID NO: 1550546 - RNA, 19 nt, Artificial Sequence
  Description of Artificial Sequence: Synthetic oligonucleotide
aacuguuaguggcacuacu

SEQ ID NO: 1550547 - RNA, 19 nt, Artificial Sequence
  Description of Artificial Sequence: Synthetic oligonucleotide
cuuaauccugggauccucc

SEQ ID NO: 1550548 - RNA, 19 nt, Artificial Sequence
  Description of Artificial Sequence: Synthetic oligonucleotide
ugucgugaaacgugcacca

SEQ ID NO: 1550549 - RNA, 19 nt, Artificial Sequence
  Description of Artificial Sequence: Synthetic oligonucleotide
auuaaccgcaggcuuauau

SEQ ID NO: 1550550 - RNA, 19 nt, Artificial Sequence
  Description of Artificial Sequence: Synthetic oligonucleotide
uuggcguuucaccaccugc

SEQ ID NO: 1550551 - RNA, 19 nt, Artificial Sequence
  Description of Artificial Sequence: Synthetic oligonucleotide
acuuaacuguuaguggcac

SEQ ID NO: 1550552 - RNA, 19 nt, Artificial Sequence
  Description of Artificial Sequence: Synthetic oligonucleotide
gagagcaggcauccgaagc

SEQ ID NO: 1550553 - RNA, 19 nt, Artificial Sequence
  Description of Artificial Sequence: Synthetic oligonucleotide
uuuuaagccggguuuguuu

SEQ ID NO: 1550554 - RNA, 19 nt, Artificial Sequence
  Description of Artificial Sequence: Synthetic oligonucleotide
cuacugauaaugcucucug

SEQ ID NO: 1550555 - RNA, 19 nt, Artificial Sequence
  Description of Artificial Sequence: Synthetic oligonucleotide
ucacugagcgucuucuggc

SEQ ID NO: 1550556 - RNA, 19 nt, Artificial Sequence
  Description of Artificial Sequence: Synthetic oligonucleotide
uuaacuguuaguggcacua

SEQ ID NO: 1550557 - RNA, 19 nt, Artificial Sequence
  Description of Artificial Sequence: Synthetic oligonucleotide
aagaggguugaaguuggag

SEQ ID NO: 1550558 - RNA, 19 nt, Artificial Sequence
  Description of Artificial Sequence: Synthetic oligonucleotide
cuuuguauggggaaccgga

SEQ ID NO: 1550559 - RNA, 19 nt, Artificial Sequence
  Description of Artificial Sequence: Synthetic oligonucleotide
uucucucaaucugaagagg

SEQ ID NO: 1550560 - RNA, 19 nt, Artificial Sequence
  Description of Artificial Sequence: Synthetic oligonucleotide
ucgugaaacgugcaccaca

SEQ ID NO: 1550561 - RNA, 19 nt, Artificial Sequence
  Description of Artificial Sequence: Synthetic oligonucleotide
auauuuuaagccggguuug

SEQ ID NO: 1550562 - RNA, 19 nt, Artificial Sequence
  Description of Artificial Sequence: Synthetic oligonucleotide
ggacuauaaaucuugcuuc

SEQ ID NO: 1550563 - RNA, 19 nt, Artificial Sequence
  Description of Artificial Sequence: Synthetic oligonucleotide
aacagacccucguugucug

SEQ ID NO: 1550564 - RNA, 19 nt, Artificial Sequence
  Description of Artificial Sequence: Synthetic oligonucleotide
uucaccaaaccuucaucca

SEQ ID NO: 1550565 - RNA, 19 nt, Artificial Sequence
  Description of Artificial Sequence: Synthetic oligonucleotide
uuaguggcacuacuuggac

SEQ ID NO: 1550566 - RNA, 19 nt, Artificial Sequence
  Description of Artificial Sequence: Synthetic oligonucleotide
ugagcacucaaaacuuaac

SEQ ID NO: 1550567 - RNA, 19 nt, Artificial Sequence
  Description of Artificial Sequence: Synthetic oligonucleotide
acuguacgcggucaccacg

SEQ ID NO: 1550568 - RNA, 19 nt, Artificial Sequence
  Description of Artificial Sequence: Synthetic oligonucleotide
uccuguuguagcugaguag

SEQ ID NO: 1550569 - RNA, 19 nt, Artificial Sequence
  Description of Artificial Sequence: Synthetic oligonucleotide
uggcaguacucaaucagcu

SEQ ID NO: 1550570 - RNA, 19 nt, Artificial Sequence
  Description of Artificial Sequence: Synthetic oligonucleotide
uugucgugaaacgugcacc

SEQ ID NO: 1550571 - RNA, 19 nt, Artificial Sequence
  Description of Artificial Sequence: Synthetic oligonucleotide
ucguugucugaucuuccag

SEQ ID NO: 1550572 - RNA, 19 nt, Artificial Sequence
  Description of Artificial Sequence: Synthetic oligonucleotide
cuuguguuuagcacagcuc

SEQ ID NO: 1550573 - RNA, 19 nt, Artificial Sequence
  Description of Artificial Sequence: Synthetic oligonucleotide
gcaggcuuauauuuuaagc

SEQ ID NO: 1550574 - RNA, 19 nt, Artificial Sequence
  Description of Artificial Sequence: Synthetic oligonucleotide
uguagcugaguagaguggu

SEQ ID NO: 1550575 - RNA, 19 nt, Artificial Sequence
  Description of Artificial Sequence: Synthetic oligonucleotide
uccagguuccacacagugc

SEQ ID NO: 1550576 - RNA, 19 nt, Artificial Sequence
  Description of Artificial Sequence: Synthetic oligonucleotide
aaacuaacagacccucguu

SEQ ID NO: 1550577 - RNA, 19 nt, Artificial Sequence
  Description of Artificial Sequence: Synthetic oligonucleotide
uuuccugauucguccagug

SEQ ID NO: 1550578 - RNA, 19 nt, Artificial Sequence
  Description of Artificial Sequence: Synthetic oligonucleotide
ucacauuuccugauucguc

SEQ ID NO: 1550579 - RNA, 19 nt, Artificial Sequence
  Description of Artificial Sequence: Synthetic oligonucleotide
ugauucguccagugggaag

SEQ ID NO: 1550580 - RNA, 19 nt, Artificial Sequence
  Description of Artificial Sequence: Synthetic oligonucleotide
accuuuaaauagccccaac

SEQ ID NO: 1550581 - RNA, 19 nt, Artificial Sequence
  Description of Artificial Sequence: Synthetic oligonucleotide
guaauccuuguguuuagca

SEQ ID NO: 1550582 - RNA, 19 nt, Artificial Sequence
  Description of Artificial Sequence: Synthetic oligonucleotide
caugcucuugucgugaaac

SEQ ID NO: 1550583 - RNA, 19 nt, Artificial Sequence
  Description of Artificial Sequence: Synthetic oligonucleotide
aggucuuggcguuucacca

SEQ ID NO: 1550584 - RNA, 19 nt, Artificial Sequence
  Description of Artificial Sequence: Synthetic oligonucleotide
aagggguaauccuuguguu

SEQ ID NO: 1550585 - RNA, 19 nt, Artificial Sequence
  Description of Artificial Sequence: Synthetic oligonucleotide
uuguuuuauuguacuugga

SEQ ID NO: 1550586 - RNA, 19 nt, Artificial Sequence
  Description of Artificial Sequence: Synthetic oligonucleotide
aaagaucaagaaaggcuga

SEQ ID NO: 1550587 - RNA, 19 nt, Artificial Sequence
  Description of Artificial Sequence: Synthetic oligonucleotide
agucucgugggagagagca

SEQ ID NO: 1550588 - RNA, 19 nt, Artificial Sequence
  Description of Artificial Sequence: Synthetic oligonucleotide
acucagcuacugauaaugc

SEQ ID NO: 1550589 - RNA, 19 nt, Artificial Sequence
  Description of Artificial Sequence: Synthetic oligonucleotide
uuaaccgcaggcuuauauu

SEQ ID NO: 1550590 - RNA, 19 nt, Artificial Sequence
  Description of Artificial Sequence: Synthetic oligonucleotide
uuugguuggaaaggguacu

SEQ ID NO: 1550591 - RNA, 19 nt, Artificial Sequence
  Description of Artificial Sequence: Synthetic oligonucleotide
uguggcgguacccaauguc

SEQ ID NO: 1550592 - RNA, 19 nt, Artificial Sequence
  Description of Artificial Sequence: Synthetic oligonucleotide
aacuuaacuguuaguggca

SEQ ID NO: 1550593 - RNA, 19 nt, Artificial Sequence
  Description of Artificial Sequence: Synthetic oligonucleotide
uuuguauggggaaccggau

SEQ ID NO: 1550594 - RNA, 19 nt, Artificial Sequence
  Description of Artificial Sequence: Synthetic oligonucleotide
agcgucuucuggcaagcuc

SEQ ID NO: 1550595 - RNA, 19 nt, Artificial Sequence
  Description of Artificial Sequence: Synthetic oligonucleotide
cuugucgugaaacgugcac

SEQ ID NO: 1550596 - RNA, 19 nt, Artificial Sequence
  Description of Artificial Sequence: Synthetic oligonucleotide
uggcguuucaccaccugcu

SEQ ID NO: 1550597 - RNA, 19 nt, Artificial Sequence
  Description of Artificial Sequence: Synthetic oligonucleotide
cagcucgaagucaaagacc

SEQ ID NO: 1550598 - RNA, 19 nt, Artificial Sequence
  Description of Artificial Sequence: Synthetic oligonucleotide
agaucaagaaaggcugaag

SEQ ID NO: 1550599 - RNA, 19 nt, Artificial Sequence
  Description of Artificial Sequence: Synthetic oligonucleotide
uugaagcaaagagaagacu

SEQ ID NO: 1550600 - RNA, 19 nt, Artificial Sequence
  Description of Artificial Sequence: Synthetic oligonucleotide
uuaauccugggauccucca

SEQ ID NO: 1550601 - RNA, 19 nt, Artificial Sequence
  Description of Artificial Sequence: Synthetic oligonucleotide
caagucucgugggagagag

SEQ ID NO: 1550602 - RNA, 19 nt, Artificial Sequence
  Description of Artificial Sequence: Synthetic oligonucleotide
caucaaggcacacacccuc

SEQ ID NO: 1550603 - RNA, 19 nt, Artificial Sequence
  Description of Artificial Sequence: Synthetic oligonucleotide
uuguauggggaaccggauc

SEQ ID NO: 1550604 - RNA, 19 nt, Artificial Sequence
  Description of Artificial Sequence: Synthetic oligonucleotide
ucaucaaggcacacacccu

SEQ ID NO: 1550605 - RNA, 19 nt, Artificial Sequence
  Description of Artificial Sequence: Synthetic oligonucleotide
caagcuccuuucaccaugc

SEQ ID NO: 1550606 - RNA, 19 nt, Artificial Sequence
  Description of Artificial Sequence: Synthetic oligonucleotide
uguuguagcugaguagagu

SEQ ID NO: 1550607 - RNA, 19 nt, Artificial Sequence
  Description of Artificial Sequence: Synthetic oligonucleotide
ccggguuuguuuaagauuc

SEQ ID NO: 1550608 - RNA, 19 nt, Artificial Sequence
  Description of Artificial Sequence: Synthetic oligonucleotide
aggguacuuguguuaaaca

SEQ ID NO: 1550609 - RNA, 19 nt, Artificial Sequence
  Description of Artificial Sequence: Synthetic oligonucleotide
uuccuuuguauggggaacc

SEQ ID NO: 1550610 - RNA, 19 nt, Artificial Sequence
  Description of Artificial Sequence: Synthetic oligonucleotide
uggauuggcaguacucaau

SEQ ID NO: 1550611 - RNA, 19 nt, Artificial Sequence
  Description of Artificial Sequence: Synthetic oligonucleotide
cagucuacacuacacccac

SEQ ID NO: 1550612 - RNA, 19 nt, Artificial Sequence
  Description of Artificial Sequence: Synthetic oligonucleotide
ggcuuauauuuuaagccgg

SEQ ID NO: 1550613 - RNA, 19 nt, Artificial Sequence
  Description of Artificial Sequence: Synthetic oligonucleotide
agggccugucaggagagcc

SEQ ID NO: 1550614 - RNA, 19 nt, Artificial Sequence
  Description of Artificial Sequence: Synthetic oligonucleotide
uccuuuguauggggaaccg

SEQ ID NO: 1550615 - RNA, 19 nt, Artificial Sequence
  Description of Artificial Sequence: Synthetic oligonucleotide
ugaguuagguacggguggc

SEQ ID NO: 1550616 - RNA, 19 nt, Artificial Sequence
  Description of Artificial Sequence: Synthetic oligonucleotide
gacuauaaaucuugcuucu

SEQ ID NO: 1550617 - RNA, 19 nt, Artificial Sequence
  Description of Artificial Sequence: Synthetic oligonucleotide
uuggauuggcaguacucaa

SEQ ID NO: 1550618 - RNA, 19 nt, Artificial Sequence
  Description of Artificial Sequence: Synthetic oligonucleotide
gauuggcaguacucaauca

SEQ ID NO: 1550619 - RNA, 19 nt, Artificial Sequence
  Description of Artificial Sequence: Synthetic oligonucleotide
aaauagccccaacggccug

SEQ ID NO: 1550620 - RNA, 19 nt, Artificial Sequence
  Description of Artificial Sequence: Synthetic oligonucleotide
ugcaagucucgugggagag

SEQ ID NO: 1550621 - RNA, 19 nt, Artificial Sequence
  Description of Artificial Sequence: Synthetic oligonucleotide
acauuuccugauucgucca

SEQ ID NO: 1550622 - RNA, 19 nt, Artificial Sequence
  Description of Artificial Sequence: Synthetic oligonucleotide
ugcguggaagggguaaucc

SEQ ID NO: 1550623 - RNA, 19 nt, Artificial Sequence
  Description of Artificial Sequence: Synthetic oligonucleotide
ucuugucgugaaacgugca

SEQ ID NO: 1550624 - RNA, 19 nt, Artificial Sequence
  Description of Artificial Sequence: Synthetic oligonucleotide
cagaugaaacaggaagagc

SEQ ID NO: 1550625 - RNA, 19 nt, Artificial Sequence
  Description of Artificial Sequence: Synthetic oligonucleotide
uauuuuaagccggguuugu

SEQ ID NO: 1550626 - RNA, 19 nt, Artificial Sequence
  Description of Artificial Sequence: Synthetic oligonucleotide
agagagcaggcauccgaag

SEQ ID NO: 1550627 - RNA, 19 nt, Artificial Sequence
  Description of Artificial Sequence: Synthetic oligonucleotide
ugcucuugucgugaaacgu

SEQ ID NO: 1550628 - RNA, 19 nt, Artificial Sequence
  Description of Artificial Sequence: Synthetic oligonucleotide
cauuuccugauucguccag

SEQ ID NO: 1550629 - RNA, 19 nt, Artificial Sequence
  Description of Artificial Sequence: Synthetic oligonucleotide
aagccggguuuguuuaaga

SEQ ID NO: 1550630 - RNA, 19 nt, Artificial Sequence
  Description of Artificial Sequence: Synthetic oligonucleotide
guuaguggcacuacuugga

SEQ ID NO: 1550631 - RNA, 19 nt, Artificial Sequence
  Description of Artificial Sequence: Synthetic oligonucleotide
uaagccggguuuguuuaag

SEQ ID NO: 1550632 - RNA, 19 nt, Artificial Sequence
  Description of Artificial Sequence: Synthetic oligonucleotide
gucuacacuacacccacaa

SEQ ID NO: 1550633 - RNA, 19 nt, Artificial Sequence
  Description of Artificial Sequence: Synthetic oligonucleotide
cugagcgucuucuggcaag

SEQ ID NO: 1550634 - RNA, 19 nt, Artificial Sequence
  Description of Artificial Sequence: Synthetic oligonucleotide
uaguggcacuacuuggacu

SEQ ID NO: 1550635 - RNA, 19 nt, Artificial Sequence
  Description of Artificial Sequence: Synthetic oligonucleotide
guacccaaugucaauggca

SEQ ID NO: 1550636 - RNA, 19 nt, Artificial Sequence
  Description of Artificial Sequence: Synthetic oligonucleotide
ucguccagugggaaguaau

SEQ ID NO: 1550637 - RNA, 19 nt, Artificial Sequence
  Description of Artificial Sequence: Synthetic oligonucleotide
gcuuauauuuuaagccggg

SEQ ID NO: 1550638 - RNA, 19 nt, Artificial Sequence
  Description of Artificial Sequence: Synthetic oligonucleotide
guagaguggucacauccuc

SEQ ID NO: 1550639 - RNA, 19 nt, Artificial Sequence
  Description of Artificial Sequence: Synthetic oligonucleotide
uuggcgccguuguugagcu

SEQ ID NO: 1550640 - RNA, 19 nt, Artificial Sequence
  Description of Artificial Sequence: Synthetic oligonucleotide
ugauuaaccgcaggcuuau

SEQ ID NO: 1550641 - RNA, 19 nt, Artificial Sequence
  Description of Artificial Sequence: Synthetic oligonucleotide
agcuacugauaaugcucuc

SEQ ID NO: 1550642 - RNA, 19 nt, Artificial Sequence
  Description of Artificial Sequence: Synthetic oligonucleotide
gauucguccagugggaagu

SEQ ID NO: 1550643 - RNA, 19 nt, Artificial Sequence
  Description of Artificial Sequence: Synthetic oligonucleotide
ggauuggcaguacucaauc

SEQ ID NO: 1550644 - RNA, 19 nt, Artificial Sequence
  Description of Artificial Sequence: Synthetic oligonucleotide
acagucuacacuacaccca

SEQ ID NO: 1550645 - RNA, 19 nt, Artificial Sequence
  Description of Artificial Sequence: Synthetic oligonucleotide
caucuuggcgccguuguug

SEQ ID NO: 1550646 - RNA, 19 nt, Artificial Sequence
  Description of Artificial Sequence: Synthetic oligonucleotide
acugugcggcuccggcucc

SEQ ID NO: 1550647 - RNA, 19 nt, Artificial Sequence
  Description of Artificial Sequence: Synthetic oligonucleotide
ggcgcccaccuuuaaauag

SEQ ID NO: 1550648 - RNA, 19 nt, Artificial Sequence
  Description of Artificial Sequence: Synthetic oligonucleotide
gacggcugcacgcugcgca

SEQ ID NO: 1550649 - RNA, 19 nt, Artificial Sequence
  Description of Artificial Sequence: Synthetic oligonucleotide
acuucugcguggaaggggu

SEQ ID NO: 1550650 - RNA, 19 nt, Artificial Sequence
  Description of Artificial Sequence: Synthetic oligonucleotide
uauggggaaccggaucagc

SEQ ID NO: 1550651 - RNA, 19 nt, Artificial Sequence
  Description of Artificial Sequence: Synthetic oligonucleotide
ugagcgucuucuggcaagc

SEQ ID NO: 1550652 - RNA, 19 nt, Artificial Sequence
  Description of Artificial Sequence: Synthetic oligonucleotide
agguucucagcaauucuug

SEQ ID NO: 1550653 - RNA, 19 nt, Artificial Sequence
  Description of Artificial Sequence: Synthetic oligonucleotide
ggaugcaauugccuuaauc

SEQ ID NO: 1550654 - RNA, 19 nt, Artificial Sequence
  Description of Artificial Sequence: Synthetic oligonucleotide
cuucucauucugguacacc

SEQ ID NO: 1550655 - RNA, 19 nt, Artificial Sequence
  Description of Artificial Sequence: Synthetic oligonucleotide
caaacuaacagacccucgu

SEQ ID NO: 1550656 - RNA, 19 nt, Artificial Sequence
  Description of Artificial Sequence: Synthetic oligonucleotide
uccgaagcuucagacuucu

SEQ ID NO: 1550657 - RNA, 19 nt, Artificial Sequence
  Description of Artificial Sequence: Synthetic oligonucleotide
agacccucguugucugauc

SEQ ID NO: 1550658 - RNA, 19 nt, Artificial Sequence
  Description of Artificial Sequence: Synthetic oligonucleotide
gccguuguugagcugcagg

SEQ ID NO: 1550659 - RNA, 19 nt, Artificial Sequence
  Description of Artificial Sequence: Synthetic oligonucleotide
accaccaaguuccuuugua

SEQ ID NO: 1550660 - RNA, 19 nt, Artificial Sequence
  Description of Artificial Sequence: Synthetic oligonucleotide
ugcacgcugcgcaccagga

SEQ ID NO: 1550661 - RNA, 19 nt, Artificial Sequence
  Description of Artificial Sequence: Synthetic oligonucleotide
agacugacccaaagacuac

SEQ ID NO: 1550662 - RNA, 19 nt, Artificial Sequence
  Description of Artificial Sequence: Synthetic oligonucleotide
uuaagccggguuuguuuaa

SEQ ID NO: 1550663 - RNA, 19 nt, Artificial Sequence
  Description of Artificial Sequence: Synthetic oligonucleotide
guaaucaggcccgggcuug

SEQ ID NO: 1550664 - RNA, 19 nt, Artificial Sequence
  Description of Artificial Sequence: Synthetic oligonucleotide
cugagcacucaaaacuuaa

SEQ ID NO: 1550665 - RNA, 19 nt, Artificial Sequence
  Description of Artificial Sequence: Synthetic oligonucleotide
cucgugggagagagcaggc

SEQ ID NO: 1550666 - RNA, 19 nt, Artificial Sequence
  Description of Artificial Sequence: Synthetic oligonucleotide
agccggguuuguuuaagau

SEQ ID NO: 1550667 - RNA, 19 nt, Artificial Sequence
  Description of Artificial Sequence: Synthetic oligonucleotide
uggcgguacccaaugucaa

SEQ ID NO: 1550668 - RNA, 19 nt, Artificial Sequence
  Description of Artificial Sequence: Synthetic oligonucleotide
uaacuguuaguggcacuac

SEQ ID NO: 1550669 - RNA, 19 nt, Artificial Sequence
  Description of Artificial Sequence: Synthetic oligonucleotide
cugauuaaccgcaggcuua

SEQ ID NO: 1550670 - RNA, 19 nt, Artificial Sequence
  Description of Artificial Sequence: Synthetic oligonucleotide
accgcaggcuuauauuuua

SEQ ID NO: 1550671 - RNA, 19 nt, Artificial Sequence
  Description of Artificial Sequence: Synthetic oligonucleotide
gacuguacgcggucaccac

SEQ ID NO: 1550672 - RNA, 19 nt, Artificial Sequence
  Description of Artificial Sequence: Synthetic oligonucleotide
ggggaaccggaucagcacc

SEQ ID NO: 1550673 - RNA, 19 nt, Artificial Sequence
  Description of Artificial Sequence: Synthetic oligonucleotide
aagucucgugggagagagc

SEQ ID NO: 1550674 - RNA, 19 nt, Artificial Sequence
  Description of Artificial Sequence: Synthetic oligonucleotide
cacgaugccuuuggauugg

SEQ ID NO: 1550675 - RNA, 19 nt, Artificial Sequence
  Description of Artificial Sequence: Synthetic oligonucleotide
cgugaaacgugcaccacag

SEQ ID NO: 1550676 - RNA, 19 nt, Artificial Sequence
  Description of Artificial Sequence: Synthetic oligonucleotide
gcgucuucuggcaagcucc

SEQ ID NO: 1550677 - RNA, 19 nt, Artificial Sequence
  Description of Artificial Sequence: Synthetic oligonucleotide
guguuuagcacagcucauc

SEQ ID NO: 1550678 - RNA, 19 nt, Artificial Sequence
  Description of Artificial Sequence: Synthetic oligonucleotide
guggcgguacccaauguca

SEQ ID NO: 1550679 - RNA, 19 nt, Artificial Sequence
  Description of Artificial Sequence: Synthetic oligonucleotide
aggugcaagucucguggga

SEQ ID NO: 1550680 - RNA, 19 nt, Artificial Sequence
  Description of Artificial Sequence: Synthetic oligonucleotide
ugccuuuggauuggcagua

SEQ ID NO: 1550681 - RNA, 19 nt, Artificial Sequence
  Description of Artificial Sequence: Synthetic oligonucleotide
guuuagcacagcucaucaa

SEQ ID NO: 1550682 - RNA, 19 nt, Artificial Sequence
  Description of Artificial Sequence: Synthetic oligonucleotide
cucguugucugaucuucca

SEQ ID NO: 1550683 - RNA, 19 nt, Artificial Sequence
  Description of Artificial Sequence: Synthetic oligonucleotide
aguuagguacggguggcau

SEQ ID NO: 1550684 - RNA, 19 nt, Artificial Sequence
  Description of Artificial Sequence: Synthetic oligonucleotide
gguacaccugggcacaguc

SEQ ID NO: 1550685 - RNA, 19 nt, Artificial Sequence
  Description of Artificial Sequence: Synthetic oligonucleotide
uucugcguggaagggguaa

SEQ ID NO: 1550686 - RNA, 19 nt, Artificial Sequence
  Description of Artificial Sequence: Synthetic oligonucleotide
gaggggacuuccaggugcc

SEQ ID NO: 1550687 - RNA, 19 nt, Artificial Sequence
  Description of Artificial Sequence: Synthetic oligonucleotide
cuguacgcggucaccacga

SEQ ID NO: 1550688 - RNA, 19 nt, Artificial Sequence
  Description of Artificial Sequence: Synthetic oligonucleotide
ggaagggguaauccuugug

SEQ ID NO: 1550689 - RNA, 19 nt, Artificial Sequence
  Description of Artificial Sequence: Synthetic oligonucleotide
gaaccggaucagcaccuga

SEQ ID NO: 1550690 - RNA, 19 nt, Artificial Sequence
  Description of Artificial Sequence: Synthetic oligonucleotide
cuuggcguuucaccaccug

SEQ ID NO: 1550691 - RNA, 19 nt, Artificial Sequence
  Description of Artificial Sequence: Synthetic oligonucleotide
acgcggucaccacgaugcc

SEQ ID NO: 1550692 - RNA, 19 nt, Artificial Sequence
  Description of Artificial Sequence: Synthetic oligonucleotide
gagagagcaggcauccgaa

SEQ ID NO: 1550693 - RNA, 19 nt, Artificial Sequence
  Description of Artificial Sequence: Synthetic oligonucleotide
gcuguuguuuuauuguacu

SEQ ID NO: 1550694 - RNA, 19 nt, Artificial Sequence
  Description of Artificial Sequence: Synthetic oligonucleotide
gcaacugugcggcuccggc

SEQ ID NO: 1550695 - RNA, 19 nt, Artificial Sequence
  Description of Artificial Sequence: Synthetic oligonucleotide
cauccgaagcuucagacuu

SEQ ID NO: 1550696 - RNA, 19 nt, Artificial Sequence
  Description of Artificial Sequence: Synthetic oligonucleotide
acgaugccuuuggauuggc

SEQ ID NO: 1550697 - RNA, 19 nt, Artificial Sequence
  Description of Artificial Sequence: Synthetic oligonucleotide
guauggggaaccggaucag

SEQ ID NO: 1550698 - RNA, 19 nt, Artificial Sequence
  Description of Artificial Sequence: Synthetic oligonucleotide
acugagcgucuucuggcaa

SEQ ID NO: 1550699 - RNA, 19 nt, Artificial Sequence
  Description of Artificial Sequence: Synthetic oligonucleotide
accggcaacugugcggcuc

SEQ ID NO: 1550700 - RNA, 19 nt, Artificial Sequence
  Description of Artificial Sequence: Synthetic oligonucleotide
auuuuaagccggguuuguu

SEQ ID NO: 1550701 - RNA, 19 nt, Artificial Sequence
  Description of Artificial Sequence: Synthetic oligonucleotide
guacgcggucaccacgaug

SEQ ID NO: 1550702 - RNA, 19 nt, Artificial Sequence
  Description of Artificial Sequence: Synthetic oligonucleotide
ggguaauccuuguguuuag

SEQ ID NO: 1550703 - RNA, 19 nt, Artificial Sequence
  Description of Artificial Sequence: Synthetic oligonucleotide
cucagcuacugauaaugcu

SEQ ID NO: 1550704 - RNA, 19 nt, Artificial Sequence
  Description of Artificial Sequence: Synthetic oligonucleotide
ggaccggcaacugugcggc

SEQ ID NO: 1550705 - RNA, 19 nt, Artificial Sequence
  Description of Artificial Sequence: Synthetic oligonucleotide
gugaaacgugcaccacagc

SEQ ID NO: 1550706 - RNA, 19 nt, Artificial Sequence
  Description of Artificial Sequence: Synthetic oligonucleotide
gguaauccuuguguuuagc

SEQ ID NO: 1550707 - RNA, 19 nt, Artificial Sequence
  Description of Artificial Sequence: Synthetic oligonucleotide
uccggcgcccaccuuuaaa

SEQ ID NO: 1550708 - RNA, 19 nt, Artificial Sequence
  Description of Artificial Sequence: Synthetic oligonucleotide
ggguacuuguguuaaacau

SEQ ID NO: 1550709 - RNA, 19 nt, Artificial Sequence
  Description of Artificial Sequence: Synthetic oligonucleotide
ggcgccguuguugagcugc

SEQ ID NO: 1550710 - RNA, 19 nt, Artificial Sequence
  Description of Artificial Sequence: Synthetic oligonucleotide
ggaaguaaucaggcccggg

SEQ ID NO: 1550711 - RNA, 19 nt, Artificial Sequence
  Description of Artificial Sequence: Synthetic oligonucleotide
ccacgaugccuuuggauug

SEQ ID NO: 1550712 - RNA, 19 nt, Artificial Sequence
  Description of Artificial Sequence: Synthetic oligonucleotide
gacccucguugucugaucu

SEQ ID NO: 1550713 - RNA, 19 nt, Artificial Sequence
  Description of Artificial Sequence: Synthetic oligonucleotide
ugcgcaccaggaccggcaa

SEQ ID NO: 1550714 - RNA, 19 nt, Artificial Sequence
  Description of Artificial Sequence: Synthetic oligonucleotide
cagagggacacagucuaca

SEQ ID NO: 1550715 - RNA, 19 nt, Artificial Sequence
  Description of Artificial Sequence: Synthetic oligonucleotide
caggcauccgaagcuucag

SEQ ID NO: 1550716 - RNA, 19 nt, Artificial Sequence
  Description of Artificial Sequence: Synthetic oligonucleotide
cacugagcgucuucuggca

SEQ ID NO: 1550717 - RNA, 19 nt, Artificial Sequence
  Description of Artificial Sequence: Synthetic oligonucleotide
gaaacgugcaccacagcuu

SEQ ID NO: 1550718 - RNA, 19 nt, Artificial Sequence
  Description of Artificial Sequence: Synthetic oligonucleotide
gcgguacccaaugucaaug

SEQ ID NO: 1550719 - RNA, 19 nt, Artificial Sequence
  Description of Artificial Sequence: Synthetic oligonucleotide
cuuauauuuuaagccgggu

SEQ ID NO: 1550720 - RNA, 19 nt, Artificial Sequence
  Description of Artificial Sequence: Synthetic oligonucleotide
uguacgcggucaccacgau

SEQ ID NO: 1550721 - RNA, 19 nt, Artificial Sequence
  Description of Artificial Sequence: Synthetic oligonucleotide
uaaucaggcccgggcuuga

SEQ ID NO: 1550722 - RNA, 19 nt, Artificial Sequence
  Description of Artificial Sequence: Synthetic oligonucleotide
agacuacaucaaacuaaca

SEQ ID NO: 1550723 - RNA, 19 nt, Artificial Sequence
  Description of Artificial Sequence: Synthetic oligonucleotide
gugggagagagcaggcauc

SEQ ID NO: 1550724 - RNA, 19 nt, Artificial Sequence
  Description of Artificial Sequence: Synthetic oligonucleotide
gggguaauccuuguguuua

SEQ ID NO: 1550725 - RNA, 19 nt, Artificial Sequence
  Description of Artificial Sequence: Synthetic oligonucleotide
acagacccucguugucuga

SEQ ID NO: 1550726 - RNA, 19 nt, Artificial Sequence
  Description of Artificial Sequence: Synthetic oligonucleotide
gaguuagguacggguggca

SEQ ID NO: 1550727 - RNA, 19 nt, Artificial Sequence
  Description of Artificial Sequence: Synthetic oligonucleotide
ccuuuguauggggaaccgg

SEQ ID NO: 1550728 - RNA, 19 nt, Artificial Sequence
  Description of Artificial Sequence: Synthetic oligonucleotide
cgguacccaaugucaaugg

SEQ ID NO: 1550729 - RNA, 19 nt, Artificial Sequence
  Description of Artificial Sequence: Synthetic oligonucleotide
cagguucucagcaauucuu

SEQ ID NO: 1550730 - RNA, 19 nt, Artificial Sequence
  Description of Artificial Sequence: Synthetic oligonucleotide
aggcccgggcuugaaaccu

SEQ ID NO: 1550731 - RNA, 19 nt, Artificial Sequence
  Description of Artificial Sequence: Synthetic oligonucleotide
gguggcugaccaugacggc

SEQ ID NO: 1550732 - RNA, 19 nt, Artificial Sequence
  Description of Artificial Sequence: Synthetic oligonucleotide
ccgggcuugaaaccuguug

SEQ ID NO: 1550733 - RNA, 19 nt, Artificial Sequence
  Description of Artificial Sequence: Synthetic oligonucleotide
gggaaguaaucaggcccgg

SEQ ID NO: 1550734 - RNA, 19 nt, Artificial Sequence
  Description of Artificial Sequence: Synthetic oligonucleotide
gguggguaagaagaaagau

SEQ ID NO: 1550735 - RNA, 19 nt, Artificial Sequence
  Description of Artificial Sequence: Synthetic oligonucleotide
uggccgggaggggacuucc

SEQ ID NO: 1550736 - RNA, 19 nt, Artificial Sequence
  Description of Artificial Sequence: Synthetic oligonucleotide
gucucgugggagagagcag

SEQ ID NO: 1550737 - RNA, 19 nt, Artificial Sequence
  Description of Artificial Sequence: Synthetic oligonucleotide
cugcgcaccaggaccggca

SEQ ID NO: 1550738 - RNA, 19 nt, Artificial Sequence
  Description of Artificial Sequence: Synthetic oligonucleotide
gucgugaaacgugcaccac

SEQ ID NO: 1550739 - RNA, 19 nt, Artificial Sequence
  Description of Artificial Sequence: Synthetic oligonucleotide
ggcacuacuuggacuauaa

SEQ ID NO: 1550740 - RNA, 19 nt, Artificial Sequence
  Description of Artificial Sequence: Synthetic oligonucleotide
aggggacuguacgcgguca

SEQ ID NO: 1550741 - RNA, 19 nt, Artificial Sequence
  Description of Artificial Sequence: Synthetic oligonucleotide
gcgcccaccuuuaaauagc

SEQ ID NO: 1550742 - RNA, 19 nt, Artificial Sequence
  Description of Artificial Sequence: Synthetic oligonucleotide
ugguacaccugggcacagu

SEQ ID NO: 1550743 - RNA, 19 nt, Artificial Sequence
  Description of Artificial Sequence: Synthetic oligonucleotide
ccugauucguccaguggga

SEQ ID NO: 1550744 - RNA, 19 nt, Artificial Sequence
  Description of Artificial Sequence: Synthetic oligonucleotide
guuagguacggguggcauu

SEQ ID NO: 1550745 - RNA, 19 nt, Artificial Sequence
  Description of Artificial Sequence: Synthetic oligonucleotide
cagucucacugggaaucac

SEQ ID NO: 1550746 - RNA, 19 nt, Artificial Sequence
  Description of Artificial Sequence: Synthetic oligonucleotide
guuggccagugaauaaggu

SEQ ID NO: 1550747 - RNA, 19 nt, Artificial Sequence
  Description of Artificial Sequence: Synthetic oligonucleotide
agucuacacuacacccaca

SEQ ID NO: 1550748 - RNA, 19 nt, Artificial Sequence
  Description of Artificial Sequence: Synthetic oligonucleotide
cugcguggaagggguaauc

SEQ ID NO: 1550749 - RNA, 19 nt, Artificial Sequence
  Description of Artificial Sequence: Synthetic oligonucleotide
caccuuuaaauagccccaa

SEQ ID NO: 1550750 - RNA, 19 nt, Artificial Sequence
  Description of Artificial Sequence: Synthetic oligonucleotide
ggcaucuuggcgccguugu

SEQ ID NO: 1550751 - RNA, 19 nt, Artificial Sequence
  Description of Artificial Sequence: Synthetic oligonucleotide
ccggcaacugugcggcucc

SEQ ID NO: 1550752 - RNA, 19 nt, Artificial Sequence
  Description of Artificial Sequence: Synthetic oligonucleotide
acccucguugucugaucuu

SEQ ID NO: 1550753 - RNA, 19 nt, Artificial Sequence
  Description of Artificial Sequence: Synthetic oligonucleotide
ggcacacacccuccaguuc

SEQ ID NO: 1550754 - RNA, 19 nt, Artificial Sequence
  Description of Artificial Sequence: Synthetic oligonucleotide
ggggacuguacgcggucac

SEQ ID NO: 1550755 - RNA, 19 nt, Artificial Sequence
  Description of Artificial Sequence: Synthetic oligonucleotide
ccuuaauccugggauccuc

SEQ ID NO: 1550756 - RNA, 19 nt, Artificial Sequence
  Description of Artificial Sequence: Synthetic oligonucleotide
gggacuguacgcggucacc

SEQ ID NO: 1550757 - RNA, 19 nt, Artificial Sequence
  Description of Artificial Sequence: Synthetic oligonucleotide
cugauucguccagugggaa

SEQ ID NO: 1550758 - RNA, 19 nt, Artificial Sequence
  Description of Artificial Sequence: Synthetic oligonucleotide
cccucguugucugaucuuc

SEQ ID NO: 1550759 - RNA, 19 nt, Artificial Sequence
  Description of Artificial Sequence: Synthetic oligonucleotide
auucguccagugggaagua

SEQ ID NO: 1550760 - RNA, 19 nt, Artificial Sequence
  Description of Artificial Sequence: Synthetic oligonucleotide
caacugugcggcuccggcu

SEQ ID NO: 1550761 - RNA, 19 nt, Artificial Sequence
  Description of Artificial Sequence: Synthetic oligonucleotide
cugugcggcuccggcuccg

SEQ ID NO: 1550762 - RNA, 19 nt, Artificial Sequence
  Description of Artificial Sequence: Synthetic oligonucleotide
ccuguuggccagugaauaa

SEQ ID NO: 1550763 - RNA, 19 nt, Artificial Sequence
  Description of Artificial Sequence: Synthetic oligonucleotide
ccuucucauucugguacac

SEQ ID NO: 1550764 - RNA, 19 nt, Artificial Sequence
  Description of Artificial Sequence: Synthetic oligonucleotide
gcaggcauccgaagcuuca

SEQ ID NO: 1550765 - RNA, 19 nt, Artificial Sequence
  Description of Artificial Sequence: Synthetic oligonucleotide
ccguuguugagcugcaggu

SEQ ID NO: 1550766 - RNA, 19 nt, Artificial Sequence
  Description of Artificial Sequence: Synthetic oligonucleotide
gauuaaccgcaggcuuaua

SEQ ID NO: 1550767 - RNA, 19 nt, Artificial Sequence
  Description of Artificial Sequence: Synthetic oligonucleotide
gccggguuuguuuaagauu

SEQ ID NO: 1550768 - RNA, 19 nt, Artificial Sequence
  Description of Artificial Sequence: Synthetic oligonucleotide
ggcaguacucaaucagcuu

SEQ ID NO: 1550769 - RNA, 19 nt, Artificial Sequence
  Description of Artificial Sequence: Synthetic oligonucleotide
uggcgccguuguugagcug

SEQ ID NO: 1550770 - RNA, 19 nt, Artificial Sequence
  Description of Artificial Sequence: Synthetic oligonucleotide
cuucugcguggaaggggua

SEQ ID NO: 1550771 - RNA, 19 nt, Artificial Sequence
  Description of Artificial Sequence: Synthetic oligonucleotide
cacacacccuccaguuccu

SEQ ID NO: 1550772 - RNA, 19 nt, Artificial Sequence
  Description of Artificial Sequence: Synthetic oligonucleotide
gagcaggcauccgaagcuu

SEQ ID NO: 1550773 - RNA, 19 nt, Artificial Sequence
  Description of Artificial Sequence: Synthetic oligonucleotide
gggcaucuuggcgccguug

SEQ ID NO: 1550774 - RNA, 19 nt, Artificial Sequence
  Description of Artificial Sequence: Synthetic oligonucleotide
ggccguccaaguguccaca

SEQ ID NO: 1550775 - RNA, 19 nt, Artificial Sequence
  Description of Artificial Sequence: Synthetic oligonucleotide
gcaagucucgugggagaga

SEQ ID NO: 1550776 - RNA, 19 nt, Artificial Sequence
  Description of Artificial Sequence: Synthetic oligonucleotide
gccuuuggauuggcaguac

SEQ ID NO: 1550777 - RNA, 19 nt, Artificial Sequence
  Description of Artificial Sequence: Synthetic oligonucleotide
ggcgguacccaaugucaau

SEQ ID NO: 1550778 - RNA, 19 nt, Artificial Sequence
  Description of Artificial Sequence: Synthetic oligonucleotide
ccuuuggauuggcaguacu

SEQ ID NO: 1550779 - RNA, 19 nt, Artificial Sequence
  Description of Artificial Sequence: Synthetic oligonucleotide
cagacccucguugucugau

SEQ ID NO: 1550780 - RNA, 19 nt, Artificial Sequence
  Description of Artificial Sequence: Synthetic oligonucleotide
ccgaagcuucagacuucug

SEQ ID NO: 1550781 - RNA, 19 nt, Artificial Sequence
  Description of Artificial Sequence: Synthetic oligonucleotide
caccaccaaguuccuuugu

SEQ ID NO: 1550782 - RNA, 19 nt, Artificial Sequence
  Description of Artificial Sequence: Synthetic oligonucleotide
gcggucaccacgaugccuu

SEQ ID NO: 1550783 - RNA, 19 nt, Artificial Sequence
  Description of Artificial Sequence: Synthetic oligonucleotide
ccgcaggcuuauauuuuaa

SEQ ID NO: 1550784 - RNA, 19 nt, Artificial Sequence
  Description of Artificial Sequence: Synthetic oligonucleotide
gaccggcaacugugcggcu

SEQ ID NO: 1550785 - RNA, 19 nt, Artificial Sequence
  Description of Artificial Sequence: Synthetic oligonucleotide
guggcacuacuuggacuau

SEQ ID NO: 1550786 - RNA, 19 nt, Artificial Sequence
  Description of Artificial Sequence: Synthetic oligonucleotide
gcaucuuggcgccguuguu

SEQ ID NO: 1550787 - RNA, 19 nt, Artificial Sequence
  Description of Artificial Sequence: Synthetic oligonucleotide
cuccggcgcccaccuuuaa

SEQ ID NO: 1550788 - RNA, 19 nt, Artificial Sequence
  Description of Artificial Sequence: Synthetic oligonucleotide
gcuccggcgcccaccuuua

SEQ ID NO: 1550789 - RNA, 19 nt, Artificial Sequence
  Description of Artificial Sequence: Synthetic oligonucleotide
cggcgcccaccuuuaaaua

SEQ ID NO: 1550790 - RNA, 19 nt, Artificial Sequence
  Description of Artificial Sequence: Synthetic oligonucleotide
aagcucauaauuuaaagac

SEQ ID NO: 1550791 - RNA, 19 nt, Artificial Sequence
  Description of Artificial Sequence: Synthetic oligonucleotide
uuuuggucaaguaaaacag

SEQ ID NO: 1550792 - RNA, 19 nt, Artificial Sequence
  Description of Artificial Sequence: Synthetic oligonucleotide
aaagauugccacaacagcc

SEQ ID NO: 1550793 - RNA, 19 nt, Artificial Sequence
  Description of Artificial Sequence: Synthetic oligonucleotide
auugaaauacucuuccagc

SEQ ID NO: 1550794 - RNA, 19 nt, Artificial Sequence
  Description of Artificial Sequence: Synthetic oligonucleotide
acuagcagacaacagagcc

SEQ ID NO: 1550795 - RNA, 19 nt, Artificial Sequence
  Description of Artificial Sequence: Synthetic oligonucleotide
aaaaggaugccaaagcggc

SEQ ID NO: 1550796 - RNA, 19 nt, Artificial Sequence
  Description of Artificial Sequence: Synthetic oligonucleotide
agugauugaauccuguugg

SEQ ID NO: 1550797 - RNA, 19 nt, Artificial Sequence
  Description of Artificial Sequence: Synthetic oligonucleotide
aauauuaauuccaccaaac

SEQ ID NO: 1550798 - RNA, 19 nt, Artificial Sequence
  Description of Artificial Sequence: Synthetic oligonucleotide
agcaugauacuacagauuc

SEQ ID NO: 1550799 - RNA, 19 nt, Artificial Sequence
  Description of Artificial Sequence: Synthetic oligonucleotide
uaacaauugcacuugaaag

SEQ ID NO: 1550800 - RNA, 19 nt, Artificial Sequence
  Description of Artificial Sequence: Synthetic oligonucleotide
ucacauuuacucuuaaggg

SEQ ID NO: 1550801 - RNA, 19 nt, Artificial Sequence
  Description of Artificial Sequence: Synthetic oligonucleotide
ucuuguaacacagagaaac

SEQ ID NO: 1550802 - RNA, 19 nt, Artificial Sequence
  Description of Artificial Sequence: Synthetic oligonucleotide
uaaacacuagacuagaagu

SEQ ID NO: 1550803 - RNA, 19 nt, Artificial Sequence
  Description of Artificial Sequence: Synthetic oligonucleotide
agaaccacaaaguaaccac

SEQ ID NO: 1550804 - RNA, 19 nt, Artificial Sequence
  Description of Artificial Sequence: Synthetic oligonucleotide
uauuaauuccaccaaacaa

SEQ ID NO: 1550805 - RNA, 19 nt, Artificial Sequence
  Description of Artificial Sequence: Synthetic oligonucleotide
ucuuaaauauauauuucca

SEQ ID NO: 1550806 - RNA, 19 nt, Artificial Sequence
  Description of Artificial Sequence: Synthetic oligonucleotide
gacauguaaacaaacacag

SEQ ID NO: 1550807 - RNA, 19 nt, Artificial Sequence
  Description of Artificial Sequence: Synthetic oligonucleotide
aaauagaagcgaaaacagc

SEQ ID NO: 1550808 - RNA, 19 nt, Artificial Sequence
  Description of Artificial Sequence: Synthetic oligonucleotide
uuaacaauugcacuugaaa

SEQ ID NO: 1550809 - RNA, 19 nt, Artificial Sequence
  Description of Artificial Sequence: Synthetic oligonucleotide
cuuaucuuguaacacagag

SEQ ID NO: 1550810 - RNA, 19 nt, Artificial Sequence
  Description of Artificial Sequence: Synthetic oligonucleotide
aaaggagagcuccauaucu

SEQ ID NO: 1550811 - RNA, 19 nt, Artificial Sequence
  Description of Artificial Sequence: Synthetic oligonucleotide
aaaguaaccacaaguuaac

SEQ ID NO: 1550812 - RNA, 19 nt, Artificial Sequence
  Description of Artificial Sequence: Synthetic oligonucleotide
aagugauugaauccuguug

SEQ ID NO: 1550813 - RNA, 19 nt, Artificial Sequence
  Description of Artificial Sequence: Synthetic oligonucleotide
caguacugcauaaagauug

SEQ ID NO: 1550814 - RNA, 19 nt, Artificial Sequence
  Description of Artificial Sequence: Synthetic oligonucleotide
aaacaucacaauccuagug

SEQ ID NO: 1550815 - RNA, 19 nt, Artificial Sequence
  Description of Artificial Sequence: Synthetic oligonucleotide
aauagagggaaguaagcaa

SEQ ID NO: 1550816 - RNA, 19 nt, Artificial Sequence
  Description of Artificial Sequence: Synthetic oligonucleotide
cugacagaaauauuaauuc

SEQ ID NO: 1550817 - RNA, 19 nt, Artificial Sequence
  Description of Artificial Sequence: Synthetic oligonucleotide
cuucuuaagcaacugauug

SEQ ID NO: 1550818 - RNA, 19 nt, Artificial Sequence
  Description of Artificial Sequence: Synthetic oligonucleotide
acauguaaacauaugcacc

SEQ ID NO: 1550819 - RNA, 19 nt, Artificial Sequence
  Description of Artificial Sequence: Synthetic oligonucleotide
ugauacuacagauucaaau

SEQ ID NO: 1550820 - RNA, 19 nt, Artificial Sequence
  Description of Artificial Sequence: Synthetic oligonucleotide
agccuuagcagacuagacc

SEQ ID NO: 1550821 - RNA, 19 nt, Artificial Sequence
  Description of Artificial Sequence: Synthetic oligonucleotide
accacaaguuaacaauugc

SEQ ID NO: 1550822 - RNA, 19 nt, Artificial Sequence
  Description of Artificial Sequence: Synthetic oligonucleotide
ugggguaugcacaacuccg

SEQ ID NO: 1550823 - RNA, 19 nt, Artificial Sequence
  Description of Artificial Sequence: Synthetic oligonucleotide
acacaugucgcauuauuuc

SEQ ID NO: 1550824 - RNA, 19 nt, Artificial Sequence
  Description of Artificial Sequence: Synthetic oligonucleotide
acauuuacucuuaagggac

SEQ ID NO: 1550825 - RNA, 19 nt, Artificial Sequence
  Description of Artificial Sequence: Synthetic oligonucleotide
gaaaaggaugccaaagcgg

SEQ ID NO: 1550826 - RNA, 19 nt, Artificial Sequence
  Description of Artificial Sequence: Synthetic oligonucleotide
aauaccugcaggcuuucug

SEQ ID NO: 1550827 - RNA, 19 nt, Artificial Sequence
  Description of Artificial Sequence: Synthetic oligonucleotide
cacaaguuaacaauugcac

SEQ ID NO: 1550828 - RNA, 19 nt, Artificial Sequence
  Description of Artificial Sequence: Synthetic oligonucleotide
uuaagcaacugauugccca

SEQ ID NO: 1550829 - RNA, 19 nt, Artificial Sequence
  Description of Artificial Sequence: Synthetic oligonucleotide
uauaucauucuuaaauaua

SEQ ID NO: 1550830 - RNA, 19 nt, Artificial Sequence
  Description of Artificial Sequence: Synthetic oligonucleotide
ucggcuuucucauagacaa

SEQ ID NO: 1550831 - RNA, 19 nt, Artificial Sequence
  Description of Artificial Sequence: Synthetic oligonucleotide
acugauccuguucucaaac

SEQ ID NO: 1550832 - RNA, 19 nt, Artificial Sequence
  Description of Artificial Sequence: Synthetic oligonucleotide
ugaagcaagagccaccggu

SEQ ID NO: 1550833 - RNA, 19 nt, Artificial Sequence
  Description of Artificial Sequence: Synthetic oligonucleotide
ucuaugagcuuccugcgug

SEQ ID NO: 1550834 - RNA, 19 nt, Artificial Sequence
  Description of Artificial Sequence: Synthetic oligonucleotide
uauauugcugcacaaguuu

SEQ ID NO: 1550835 - RNA, 19 nt, Artificial Sequence
  Description of Artificial Sequence: Synthetic oligonucleotide
auaaagauugccacaacag

SEQ ID NO: 1550836 - RNA, 19 nt, Artificial Sequence
  Description of Artificial Sequence: Synthetic oligonucleotide
caacuagcagacaacagag

SEQ ID NO: 1550837 - RNA, 19 nt, Artificial Sequence
  Description of Artificial Sequence: Synthetic oligonucleotide
acaugcgauagcaugauac

SEQ ID NO: 1550838 - RNA, 19 nt, Artificial Sequence
  Description of Artificial Sequence: Synthetic oligonucleotide
uacucuuccagcuggaacu

SEQ ID NO: 1550839 - RNA, 19 nt, Artificial Sequence
  Description of Artificial Sequence: Synthetic oligonucleotide
aaaacagcaguacugcaua

SEQ ID NO: 1550840 - RNA, 19 nt, Artificial Sequence
  Description of Artificial Sequence: Synthetic oligonucleotide
auagagggaaguaagcaac

SEQ ID NO: 1550841 - RNA, 19 nt, Artificial Sequence
  Description of Artificial Sequence: Synthetic oligonucleotide
gacuagaagugauugaauc

SEQ ID NO: 1550842 - RNA, 19 nt, Artificial Sequence
  Description of Artificial Sequence: Synthetic oligonucleotide
uucuuaagcaacugauugc

SEQ ID NO: 1550843 - RNA, 19 nt, Artificial Sequence
  Description of Artificial Sequence: Synthetic oligonucleotide
aaagacaccacaagucauc

SEQ ID NO: 1550844 - RNA, 19 nt, Artificial Sequence
  Description of Artificial Sequence: Synthetic oligonucleotide
uuaauuccaccaaacaaua

SEQ ID NO: 1550845 - RNA, 19 nt, Artificial Sequence
  Description of Artificial Sequence: Synthetic oligonucleotide
guaugcacaacuccgcccg

SEQ ID NO: 1550846 - RNA, 19 nt, Artificial Sequence
  Description of Artificial Sequence: Synthetic oligonucleotide
acaauugcacuugaaagag

SEQ ID NO: 1550847 - RNA, 19 nt, Artificial Sequence
  Description of Artificial Sequence: Synthetic oligonucleotide
auacgcauauauaucauuc

SEQ ID NO: 1550848 - RNA, 19 nt, Artificial Sequence
  Description of Artificial Sequence: Synthetic oligonucleotide
uuaaagacuuuugucaccu

SEQ ID NO: 1550849 - RNA, 19 nt, Artificial Sequence
  Description of Artificial Sequence: Synthetic oligonucleotide
ugcgauagcaugauacuac

SEQ ID NO: 1550850 - RNA, 19 nt, Artificial Sequence
  Description of Artificial Sequence: Synthetic oligonucleotide
aaacacuagacuagaagug

SEQ ID NO: 1550851 - RNA, 19 nt, Artificial Sequence
  Description of Artificial Sequence: Synthetic oligonucleotide
gauucaaauugaaauacuc

SEQ ID NO: 1550852 - RNA, 19 nt, Artificial Sequence
  Description of Artificial Sequence: Synthetic oligonucleotide
agagaaacaucacaauccu

SEQ ID NO: 1550853 - RNA, 19 nt, Artificial Sequence
  Description of Artificial Sequence: Synthetic oligonucleotide
aaugggcagugaccuaggc

SEQ ID NO: 1550854 - RNA, 19 nt, Artificial Sequence
  Description of Artificial Sequence: Synthetic oligonucleotide
auacucuuccagcuggaac

SEQ ID NO: 1550855 - RNA, 19 nt, Artificial Sequence
  Description of Artificial Sequence: Synthetic oligonucleotide
aauccuagugagaagaaau

SEQ ID NO: 1550856 - RNA, 19 nt, Artificial Sequence
  Description of Artificial Sequence: Synthetic oligonucleotide
aacacuagacuagaaguga

SEQ ID NO: 1550857 - RNA, 19 nt, Artificial Sequence
  Description of Artificial Sequence: Synthetic oligonucleotide
ugcucgcccacacaugucg

SEQ ID NO: 1550858 - RNA, 19 nt, Artificial Sequence
  Description of Artificial Sequence: Synthetic oligonucleotide
aaaugggaaauagaagcga

SEQ ID NO: 1550859 - RNA, 19 nt, Artificial Sequence
  Description of Artificial Sequence: Synthetic oligonucleotide
uucuucuuaucuuguaaca

SEQ ID NO: 1550860 - RNA, 19 nt, Artificial Sequence
  Description of Artificial Sequence: Synthetic oligonucleotide
ugucgcauuauuucuccag

SEQ ID NO: 1550861 - RNA, 19 nt, Artificial Sequence
  Description of Artificial Sequence: Synthetic oligonucleotide
acaucacaauccuagugag

SEQ ID NO: 1550862 - RNA, 19 nt, Artificial Sequence
  Description of Artificial Sequence: Synthetic oligonucleotide
auugaauccuguuggaaaa

SEQ ID NO: 1550863 - RNA, 19 nt, Artificial Sequence
  Description of Artificial Sequence: Synthetic oligonucleotide
ccuucuaugagcuuccugc

SEQ ID NO: 1550864 - RNA, 19 nt, Artificial Sequence
  Description of Artificial Sequence: Synthetic oligonucleotide
gucaauagagggaaguaag

SEQ ID NO: 1550865 - RNA, 19 nt, Artificial Sequence
  Description of Artificial Sequence: Synthetic oligonucleotide
cacacuuuuguccaugcug

SEQ ID NO: 1550866 - RNA, 19 nt, Artificial Sequence
  Description of Artificial Sequence: Synthetic oligonucleotide
uaagcaacuagcagacaac

SEQ ID NO: 1550867 - RNA, 19 nt, Artificial Sequence
  Description of Artificial Sequence: Synthetic oligonucleotide
cauaugcaccuuauuuugg

SEQ ID NO: 1550868 - RNA, 19 nt, Artificial Sequence
  Description of Artificial Sequence: Synthetic oligonucleotide
uagacuagaagugauugaa

SEQ ID NO: 1550869 - RNA, 19 nt, Artificial Sequence
  Description of Artificial Sequence: Synthetic oligonucleotide
gaccacaugcgauagcaug

SEQ ID NO: 1550870 - RNA, 19 nt, Artificial Sequence
  Description of Artificial Sequence: Synthetic oligonucleotide
cuagugagaagaaauggga

SEQ ID NO: 1550871 - RNA, 19 nt, Artificial Sequence
  Description of Artificial Sequence: Synthetic oligonucleotide
aagcgaaaacagcaguacu

SEQ ID NO: 1550872 - RNA, 19 nt, Artificial Sequence
  Description of Artificial Sequence: Synthetic oligonucleotide
uucuuacggcuuuugaaca

SEQ ID NO: 1550873 - RNA, 19 nt, Artificial Sequence
  Description of Artificial Sequence: Synthetic oligonucleotide
ugcauaaagauugccacaa

SEQ ID NO: 1550874 - RNA, 19 nt, Artificial Sequence
  Description of Artificial Sequence: Synthetic oligonucleotide
gauacuacagauucaaauu

SEQ ID NO: 1550875 - RNA, 19 nt, Artificial Sequence
  Description of Artificial Sequence: Synthetic oligonucleotide
ucuuacggcuuuugaacag

SEQ ID NO: 1550876 - RNA, 19 nt, Artificial Sequence
  Description of Artificial Sequence: Synthetic oligonucleotide
ucuucuuaucuuguaacac

SEQ ID NO: 1550877 - RNA, 19 nt, Artificial Sequence
  Description of Artificial Sequence: Synthetic oligonucleotide
aacgcaggcccuucuauga

SEQ ID NO: 1550878 - RNA, 19 nt, Artificial Sequence
  Description of Artificial Sequence: Synthetic oligonucleotide
uagaagcgaaaacagcagu

SEQ ID NO: 1550879 - RNA, 19 nt, Artificial Sequence
  Description of Artificial Sequence: Synthetic oligonucleotide
cuucuaugagcuuccugcg

SEQ ID NO: 1550880 - RNA, 19 nt, Artificial Sequence
  Description of Artificial Sequence: Synthetic oligonucleotide
cacauuuacucuuaaggga

SEQ ID NO: 1550881 - RNA, 19 nt, Artificial Sequence
  Description of Artificial Sequence: Synthetic oligonucleotide
uagaccacaugcgauagca

SEQ ID NO: 1550882 - RNA, 19 nt, Artificial Sequence
  Description of Artificial Sequence: Synthetic oligonucleotide
caugucgcauuauuucucc

SEQ ID NO: 1550883 - RNA, 19 nt, Artificial Sequence
  Description of Artificial Sequence: Synthetic oligonucleotide
cacuaggaaugacaaagcc

SEQ ID NO: 1550884 - RNA, 19 nt, Artificial Sequence
  Description of Artificial Sequence: Synthetic oligonucleotide
guaagcaacuagcagacaa

SEQ ID NO: 1550885 - RNA, 19 nt, Artificial Sequence
  Description of Artificial Sequence: Synthetic oligonucleotide
uacgcauauauaucauucu

SEQ ID NO: 1550886 - RNA, 19 nt, Artificial Sequence
  Description of Artificial Sequence: Synthetic oligonucleotide
aguacugcauaaagauugc

SEQ ID NO: 1550887 - RNA, 19 nt, Artificial Sequence
  Description of Artificial Sequence: Synthetic oligonucleotide
acggcuuuugaacagcacu

SEQ ID NO: 1550888 - RNA, 19 nt, Artificial Sequence
  Description of Artificial Sequence: Synthetic oligonucleotide
auaugcaccuuauuuuggu

SEQ ID NO: 1550889 - RNA, 19 nt, Artificial Sequence
  Description of Artificial Sequence: Synthetic oligonucleotide
cacaacagccuuugaaagc

SEQ ID NO: 1550890 - RNA, 19 nt, Artificial Sequence
  Description of Artificial Sequence: Synthetic oligonucleotide
ugggaaauagaagcgaaaa

SEQ ID NO: 1550891 - RNA, 19 nt, Artificial Sequence
  Description of Artificial Sequence: Synthetic oligonucleotide
uaugcguuugacgauccgc

SEQ ID NO: 1550892 - RNA, 19 nt, Artificial Sequence
  Description of Artificial Sequence: Synthetic oligonucleotide
acaaaguaaccacaaguua

SEQ ID NO: 1550893 - RNA, 19 nt, Artificial Sequence
  Description of Artificial Sequence: Synthetic oligonucleotide
agggacuucacaaugagaa

SEQ ID NO: 1550894 - RNA, 19 nt, Artificial Sequence
  Description of Artificial Sequence: Synthetic oligonucleotide
augcguuugacgauccgcc

SEQ ID NO: 1550895 - RNA, 19 nt, Artificial Sequence
  Description of Artificial Sequence: Synthetic oligonucleotide
guacucuccaaaugggcag

SEQ ID NO: 1550896 - RNA, 19 nt, Artificial Sequence
  Description of Artificial Sequence: Synthetic oligonucleotide
uagaagugauugaauccug

SEQ ID NO: 1550897 - RNA, 19 nt, Artificial Sequence
  Description of Artificial Sequence: Synthetic oligonucleotide
augcaccuuauuuugguca

SEQ ID NO: 1550898 - RNA, 19 nt, Artificial Sequence
  Description of Artificial Sequence: Synthetic oligonucleotide
ucagucaauagagggaagu

SEQ ID NO: 1550899 - RNA, 19 nt, Artificial Sequence
  Description of Artificial Sequence: Synthetic oligonucleotide
ugccaguaugcguuugacg

SEQ ID NO: 1550900 - RNA, 19 nt, Artificial Sequence
  Description of Artificial Sequence: Synthetic oligonucleotide
gaagcgaaaacagcaguac

SEQ ID NO: 1550901 - RNA, 19 nt, Artificial Sequence
  Description of Artificial Sequence: Synthetic oligonucleotide
uauuuuggucaaguaaaac

SEQ ID NO: 1550902 - RNA, 19 nt, Artificial Sequence
  Description of Artificial Sequence: Synthetic oligonucleotide
ucucaggcaaagcaacuuc

SEQ ID NO: 1550903 - RNA, 19 nt, Artificial Sequence
  Description of Artificial Sequence: Synthetic oligonucleotide
uauacgcauauauaucauu

SEQ ID NO: 1550904 - RNA, 19 nt, Artificial Sequence
  Description of Artificial Sequence: Synthetic oligonucleotide
aaccacaaguuaacaauug

SEQ ID NO: 1550905 - RNA, 19 nt, Artificial Sequence
  Description of Artificial Sequence: Synthetic oligonucleotide
aggcaaagcaacuucuuaa

SEQ ID NO: 1550906 - RNA, 19 nt, Artificial Sequence
  Description of Artificial Sequence: Synthetic oligonucleotide
uguaaacacuagacuagaa

SEQ ID NO: 1550907 - RNA, 19 nt, Artificial Sequence
  Description of Artificial Sequence: Synthetic oligonucleotide
aggguuguucagucaauag

SEQ ID NO: 1550908 - RNA, 19 nt, Artificial Sequence
  Description of Artificial Sequence: Synthetic oligonucleotide
ucuccagugggguaugcac

SEQ ID NO: 1550909 - RNA, 19 nt, Artificial Sequence
  Description of Artificial Sequence: Synthetic oligonucleotide
guaaccacaaguuaacaau

SEQ ID NO: 1550910 - RNA, 19 nt, Artificial Sequence
  Description of Artificial Sequence: Synthetic oligonucleotide
uugaaagcaauaggguugu

SEQ ID NO: 1550911 - RNA, 19 nt, Artificial Sequence
  Description of Artificial Sequence: Synthetic oligonucleotide
cucgcaacugcacaggcuc

SEQ ID NO: 1550912 - RNA, 19 nt, Artificial Sequence
  Description of Artificial Sequence: Synthetic oligonucleotide
ugccacaacagccuuugaa

SEQ ID NO: 1550913 - RNA, 19 nt, Artificial Sequence
  Description of Artificial Sequence: Synthetic oligonucleotide
aaaggaugccaaagcggcg

SEQ ID NO: 1550914 - RNA, 19 nt, Artificial Sequence
  Description of Artificial Sequence: Synthetic oligonucleotide
uaaacauaugcaccuuauu

SEQ ID NO: 1550915 - RNA, 19 nt, Artificial Sequence
  Description of Artificial Sequence: Synthetic oligonucleotide
caguacucuccaaaugggc

SEQ ID NO: 1550916 - RNA, 19 nt, Artificial Sequence
  Description of Artificial Sequence: Synthetic oligonucleotide
aagcaagagccaccgguca

SEQ ID NO: 1550917 - RNA, 19 nt, Artificial Sequence
  Description of Artificial Sequence: Synthetic oligonucleotide
ucgcauuauuucuccagug

SEQ ID NO: 1550918 - RNA, 19 nt, Artificial Sequence
  Description of Artificial Sequence: Synthetic oligonucleotide
cagccuuugaaagcaauag

SEQ ID NO: 1550919 - RNA, 19 nt, Artificial Sequence
  Description of Artificial Sequence: Synthetic oligonucleotide
cucuuaagggacuucacaa

SEQ ID NO: 1550920 - RNA, 19 nt, Artificial Sequence
  Description of Artificial Sequence: Synthetic oligonucleotide
cuaugagcuuccugcgugg

SEQ ID NO: 1550921 - RNA, 19 nt, Artificial Sequence
  Description of Artificial Sequence: Synthetic oligonucleotide
uuacggcuuuugaacagca

SEQ ID NO: 1550922 - RNA, 19 nt, Artificial Sequence
  Description of Artificial Sequence: Synthetic oligonucleotide
gccaguaugcguuugacga

SEQ ID NO: 1550923 - RNA, 19 nt, Artificial Sequence
  Description of Artificial Sequence: Synthetic oligonucleotide
ugcacaacuccgcccgcgg

SEQ ID NO: 1550924 - RNA, 19 nt, Artificial Sequence
  Description of Artificial Sequence: Synthetic oligonucleotide
uuagcagacuagaccacau

SEQ ID NO: 1550925 - RNA, 19 nt, Artificial Sequence
  Description of Artificial Sequence: Synthetic oligonucleotide
aguacucuccaaaugggca

SEQ ID NO: 1550926 - RNA, 19 nt, Artificial Sequence
  Description of Artificial Sequence: Synthetic oligonucleotide
caacugauugcccaggcga

SEQ ID NO: 1550927 - RNA, 19 nt, Artificial Sequence
  Description of Artificial Sequence: Synthetic oligonucleotide
aguuaacaauugcacuuga

SEQ ID NO: 1550928 - RNA, 19 nt, Artificial Sequence
  Description of Artificial Sequence: Synthetic oligonucleotide
aguaugcguuugacgaucc

SEQ ID NO: 1550929 - RNA, 19 nt, Artificial Sequence
  Description of Artificial Sequence: Synthetic oligonucleotide
gcaacuagcagacaacaga

SEQ ID NO: 1550930 - RNA, 19 nt, Artificial Sequence
  Description of Artificial Sequence: Synthetic oligonucleotide
acuagaccacaugcgauag

SEQ ID NO: 1550931 - RNA, 19 nt, Artificial Sequence
  Description of Artificial Sequence: Synthetic oligonucleotide
caucaagccaaacaggaua

SEQ ID NO: 1550932 - RNA, 19 nt, Artificial Sequence
  Description of Artificial Sequence: Synthetic oligonucleotide
agcaaaauaccugcaggcu

SEQ ID NO: 1550933 - RNA, 19 nt, Artificial Sequence
  Description of Artificial Sequence: Synthetic oligonucleotide
acaugucgcauuauuucuc

SEQ ID NO: 1550934 - RNA, 19 nt, Artificial Sequence
  Description of Artificial Sequence: Synthetic oligonucleotide
agucaauagagggaaguaa

SEQ ID NO: 1550935 - RNA, 19 nt, Artificial Sequence
  Description of Artificial Sequence: Synthetic oligonucleotide
cuuacggcuuuugaacagc

SEQ ID NO: 1550936 - RNA, 19 nt, Artificial Sequence
  Description of Artificial Sequence: Synthetic oligonucleotide
agcucauaauuuaaagacu

SEQ ID NO: 1550937 - RNA, 19 nt, Artificial Sequence
  Description of Artificial Sequence: Synthetic oligonucleotide
uagcagacuagaccacaug

SEQ ID NO: 1550938 - RNA, 19 nt, Artificial Sequence
  Description of Artificial Sequence: Synthetic oligonucleotide
agagccuuagcagacuaga

SEQ ID NO: 1550939 - RNA, 19 nt, Artificial Sequence
  Description of Artificial Sequence: Synthetic oligonucleotide
aaaugggcagugaccuagg

SEQ ID NO: 1550940 - RNA, 19 nt, Artificial Sequence
  Description of Artificial Sequence: Synthetic oligonucleotide
ugauugaauccuguuggaa

SEQ ID NO: 1550941 - RNA, 19 nt, Artificial Sequence
  Description of Artificial Sequence: Synthetic oligonucleotide
caccggucaucagagaagg

SEQ ID NO: 1550942 - RNA, 19 nt, Artificial Sequence
  Description of Artificial Sequence: Synthetic oligonucleotide
agcugacagaaauauuaau

SEQ ID NO: 1550943 - RNA, 19 nt, Artificial Sequence
  Description of Artificial Sequence: Synthetic oligonucleotide
ugauugcccaggcgaagca

SEQ ID NO: 1550944 - RNA, 19 nt, Artificial Sequence
  Description of Artificial Sequence: Synthetic oligonucleotide
ucaacgcaggcccuucuau

SEQ ID NO: 1550945 - RNA, 19 nt, Artificial Sequence
  Description of Artificial Sequence: Synthetic oligonucleotide
uagcaugauacuacagauu

SEQ ID NO: 1550946 - RNA, 19 nt, Artificial Sequence
  Description of Artificial Sequence: Synthetic oligonucleotide
aggcccuucuaugagcuuc

SEQ ID NO: 1550947 - RNA, 19 nt, Artificial Sequence
  Description of Artificial Sequence: Synthetic oligonucleotide
cagacuagaccacaugcga

SEQ ID NO: 1550948 - RNA, 19 nt, Artificial Sequence
  Description of Artificial Sequence: Synthetic oligonucleotide
uccuuauauugcugcacaa

SEQ ID NO: 1550949 - RNA, 19 nt, Artificial Sequence
  Description of Artificial Sequence: Synthetic oligonucleotide
ucucgcaacugcacaggcu

SEQ ID NO: 1550950 - RNA, 19 nt, Artificial Sequence
  Description of Artificial Sequence: Synthetic oligonucleotide
cucccgaagggugcgaagg

SEQ ID NO: 1550951 - RNA, 19 nt, Artificial Sequence
  Description of Artificial Sequence: Synthetic oligonucleotide
gaugccaguaugcguuuga

SEQ ID NO: 1550952 - RNA, 19 nt, Artificial Sequence
  Description of Artificial Sequence: Synthetic oligonucleotide
cuacagauucaaauugaaa

SEQ ID NO: 1550953 - RNA, 19 nt, Artificial Sequence
  Description of Artificial Sequence: Synthetic oligonucleotide
gguaugcacaacuccgccc

SEQ ID NO: 1550954 - RNA, 19 nt, Artificial Sequence
  Description of Artificial Sequence: Synthetic oligonucleotide
uuauuucuccaguggggua

SEQ ID NO: 1550955 - RNA, 19 nt, Artificial Sequence
  Description of Artificial Sequence: Synthetic oligonucleotide
gaaacaucacaauccuagu

SEQ ID NO: 1550956 - RNA, 19 nt, Artificial Sequence
  Description of Artificial Sequence: Synthetic oligonucleotide
ugcgaaggccugcucgccc

SEQ ID NO: 1550957 - RNA, 19 nt, Artificial Sequence
  Description of Artificial Sequence: Synthetic oligonucleotide
uuuacucuuaagggacuuc

SEQ ID NO: 1550958 - RNA, 19 nt, Artificial Sequence
  Description of Artificial Sequence: Synthetic oligonucleotide
gucaucagcugacagaaau

SEQ ID NO: 1550959 - RNA, 19 nt, Artificial Sequence
  Description of Artificial Sequence: Synthetic oligonucleotide
cugauugcccaggcgaagc

SEQ ID NO: 1550960 - RNA, 19 nt, Artificial Sequence
  Description of Artificial Sequence: Synthetic oligonucleotide
agaagugauugaauccugu

SEQ ID NO: 1550961 - RNA, 19 nt, Artificial Sequence
  Description of Artificial Sequence: Synthetic oligonucleotide
acgauccgccaccaccugg

SEQ ID NO: 1550962 - RNA, 19 nt, Artificial Sequence
  Description of Artificial Sequence: Synthetic oligonucleotide
augccaguaugcguuugac

SEQ ID NO: 1550963 - RNA, 19 nt, Artificial Sequence
  Description of Artificial Sequence: Synthetic oligonucleotide
gcagacuagaccacaugcg

SEQ ID NO: 1550964 - RNA, 19 nt, Artificial Sequence
  Description of Artificial Sequence: Synthetic oligonucleotide
ucccgaagggugcgaaggc

SEQ ID NO: 1550965 - RNA, 19 nt, Artificial Sequence
  Description of Artificial Sequence: Synthetic oligonucleotide
gagccaccggucaucagag

SEQ ID NO: 1550966 - RNA, 19 nt, Artificial Sequence
  Description of Artificial Sequence: Synthetic oligonucleotide
ccacaacagccuuugaaag

SEQ ID NO: 1550967 - RNA, 19 nt, Artificial Sequence
  Description of Artificial Sequence: Synthetic oligonucleotide
ugcguuugacgauccgcca

SEQ ID NO: 1550968 - RNA, 19 nt, Artificial Sequence
  Description of Artificial Sequence: Synthetic oligonucleotide
agacaccacaagucaucag

SEQ ID NO: 1550969 - RNA, 19 nt, Artificial Sequence
  Description of Artificial Sequence: Synthetic oligonucleotide
guaugcguuugacgauccg

SEQ ID NO: 1550970 - RNA, 19 nt, Artificial Sequence
  Description of Artificial Sequence: Synthetic oligonucleotide
cacaacuccgcccgcggag

SEQ ID NO: 1550971 - RNA, 19 nt, Artificial Sequence
  Description of Artificial Sequence: Synthetic oligonucleotide
uaugcacaacuccgcccgc

SEQ ID NO: 1550972 - RNA, 19 nt, Artificial Sequence
  Description of Artificial Sequence: Synthetic oligonucleotide
agcaacuagcagacaacag

SEQ ID NO: 1550973 - RNA, 19 nt, Artificial Sequence
  Description of Artificial Sequence: Synthetic oligonucleotide
uacggcuuuugaacagcac

SEQ ID NO: 1550974 - RNA, 19 nt, Artificial Sequence
  Description of Artificial Sequence: Synthetic oligonucleotide
caacgcaggcccuucuaug

SEQ ID NO: 1550975 - RNA, 19 nt, Artificial Sequence
  Description of Artificial Sequence: Synthetic oligonucleotide
uacugauccuguucucaaa

SEQ ID NO: 1550976 - RNA, 19 nt, Artificial Sequence
  Description of Artificial Sequence: Synthetic oligonucleotide
gcgaaaacagcaguacugc

SEQ ID NO: 1550977 - RNA, 19 nt, Artificial Sequence
  Description of Artificial Sequence: Synthetic oligonucleotide
cucucgcaacugcacaggc

SEQ ID NO: 1550978 - RNA, 19 nt, Artificial Sequence
  Description of Artificial Sequence: Synthetic oligonucleotide
agaagcgaaaacagcagua

SEQ ID NO: 1550979 - RNA, 19 nt, Artificial Sequence
  Description of Artificial Sequence: Synthetic oligonucleotide
gggugcgaaggccugcucg

SEQ ID NO: 1550980 - RNA, 19 nt, Artificial Sequence
  Description of Artificial Sequence: Synthetic oligonucleotide
gugauugaauccuguugga

SEQ ID NO: 1550981 - RNA, 19 nt, Artificial Sequence
  Description of Artificial Sequence: Synthetic oligonucleotide
gcaacugauugcccaggcg

SEQ ID NO: 1550982 - RNA, 19 nt, Artificial Sequence
  Description of Artificial Sequence: Synthetic oligonucleotide
ugcaaggcccuguaagguu

SEQ ID NO: 1550983 - RNA, 19 nt, Artificial Sequence
  Description of Artificial Sequence: Synthetic oligonucleotide
aacugauugcccaggcgaa

SEQ ID NO: 1550984 - RNA, 19 nt, Artificial Sequence
  Description of Artificial Sequence: Synthetic oligonucleotide
acaacuccgcccgcggagg

SEQ ID NO: 1550985 - RNA, 19 nt, Artificial Sequence
  Description of Artificial Sequence: Synthetic oligonucleotide
uuugacgauccgccaccac

SEQ ID NO: 1550986 - RNA, 19 nt, Artificial Sequence
  Description of Artificial Sequence: Synthetic oligonucleotide
auauacgcauauauaucau

SEQ ID NO: 1550987 - RNA, 19 nt, Artificial Sequence
  Description of Artificial Sequence: Synthetic oligonucleotide
cuagaccacaugcgauagc

SEQ ID NO: 1550988 - RNA, 19 nt, Artificial Sequence
  Description of Artificial Sequence: Synthetic oligonucleotide
uucaacgcaggcccuucua

SEQ ID NO: 1550989 - RNA, 19 nt, Artificial Sequence
  Description of Artificial Sequence: Synthetic oligonucleotide
gcaauaggguuguucaguc

SEQ ID NO: 1550990 - RNA, 19 nt, Artificial Sequence
  Description of Artificial Sequence: Synthetic oligonucleotide
ccacaaguuaacaauugca

SEQ ID NO: 1550991 - RNA, 19 nt, Artificial Sequence
  Description of Artificial Sequence: Synthetic oligonucleotide
acugauugcccaggcgaag

SEQ ID NO: 1550992 - RNA, 19 nt, Artificial Sequence
  Description of Artificial Sequence: Synthetic oligonucleotide
caguaugcguuugacgauc

SEQ ID NO: 1550993 - RNA, 19 nt, Artificial Sequence
  Description of Artificial Sequence: Synthetic oligonucleotide
cagagccuuagcagacuag

SEQ ID NO: 1550994 - RNA, 19 nt, Artificial Sequence
  Description of Artificial Sequence: Synthetic oligonucleotide
cuuagcagacuagaccaca

SEQ ID NO: 1550995 - RNA, 19 nt, Artificial Sequence
  Description of Artificial Sequence: Synthetic oligonucleotide
cacaugucgcauuauuucu

SEQ ID NO: 1550996 - RNA, 19 nt, Artificial Sequence
  Description of Artificial Sequence: Synthetic oligonucleotide
cuugucacauuuacucuua

SEQ ID NO: 1550997 - RNA, 19 nt, Artificial Sequence
  Description of Artificial Sequence: Synthetic oligonucleotide
uaggguuguucagucaaua

SEQ ID NO: 1550998 - RNA, 19 nt, Artificial Sequence
  Description of Artificial Sequence: Synthetic oligonucleotide
auuuacucuuaagggacuu

SEQ ID NO: 1550999 - RNA, 19 nt, Artificial Sequence
  Description of Artificial Sequence: Synthetic oligonucleotide
acgcaggcccuucuaugag

SEQ ID NO: 1551000 - RNA, 19 nt, Artificial Sequence
  Description of Artificial Sequence: Synthetic oligonucleotide
aggacuuacugauccuguu

SEQ ID NO: 1551001 - RNA, 19 nt, Artificial Sequence
  Description of Artificial Sequence: Synthetic oligonucleotide
gcagacaacagagccuuag

SEQ ID NO: 1551002 - RNA, 19 nt, Artificial Sequence
  Description of Artificial Sequence: Synthetic oligonucleotide
ugcgugggccgcacucccg

SEQ ID NO: 1551003 - RNA, 19 nt, Artificial Sequence
  Description of Artificial Sequence: Synthetic oligonucleotide
caugcgauagcaugauacu

SEQ ID NO: 1551004 - RNA, 19 nt, Artificial Sequence
  Description of Artificial Sequence: Synthetic oligonucleotide
augucgcauuauuucucca

SEQ ID NO: 1551005 - RNA, 19 nt, Artificial Sequence
  Description of Artificial Sequence: Synthetic oligonucleotide
cagcugaaaaggaugccaa

SEQ ID NO: 1551006 - RNA, 19 nt, Artificial Sequence
  Description of Artificial Sequence: Synthetic oligonucleotide
gagccuuagcagacuagac

SEQ ID NO: 1551007 - RNA, 19 nt, Artificial Sequence
  Description of Artificial Sequence: Synthetic oligonucleotide
acucccgaagggugcgaag

SEQ ID NO: 1551008 - RNA, 19 nt, Artificial Sequence
  Description of Artificial Sequence: Synthetic oligonucleotide
augcacaacuccgcccgcg

SEQ ID NO: 1551009 - RNA, 19 nt, Artificial Sequence
  Description of Artificial Sequence: Synthetic oligonucleotide
caauugcacuugaaagaga

SEQ ID NO: 1551010 - RNA, 19 nt, Artificial Sequence
  Description of Artificial Sequence: Synthetic oligonucleotide
gucgcauuauuucuccagu

SEQ ID NO: 1551011 - RNA, 19 nt, Artificial Sequence
  Description of Artificial Sequence: Synthetic oligonucleotide
agacuagaccacaugcgau

SEQ ID NO: 1551012 - RNA, 19 nt, Artificial Sequence
  Description of Artificial Sequence: Synthetic oligonucleotide
acacuagacuagaagugau

SEQ ID NO: 1551013 - RNA, 19 nt, Artificial Sequence
  Description of Artificial Sequence: Synthetic oligonucleotide
augcgauagcaugauacua

SEQ ID NO: 1551014 - RNA, 19 nt, Artificial Sequence
  Description of Artificial Sequence: Synthetic oligonucleotide
agacuagaagugauugaau

SEQ ID NO: 1551015 - RNA, 19 nt, Artificial Sequence
  Description of Artificial Sequence: Synthetic oligonucleotide
gaagggugcgaaggccugc

SEQ ID NO: 1551016 - RNA, 19 nt, Artificial Sequence
  Description of Artificial Sequence: Synthetic oligonucleotide
ugaugccaguaugcguuug

SEQ ID NO: 1551017 - RNA, 19 nt, Artificial Sequence
  Description of Artificial Sequence: Synthetic oligonucleotide
gcgauagcaugauacuaca

SEQ ID NO: 1551018 - RNA, 19 nt, Artificial Sequence
  Description of Artificial Sequence: Synthetic oligonucleotide
gcagcugaaaaggaugcca

SEQ ID NO: 1551019 - RNA, 19 nt, Artificial Sequence
  Description of Artificial Sequence: Synthetic oligonucleotide
acaucaagccaaacaggau

SEQ ID NO: 1551020 - RNA, 19 nt, Artificial Sequence
  Description of Artificial Sequence: Synthetic oligonucleotide
gacgauccgccaccaccug

SEQ ID NO: 1551021 - RNA, 19 nt, Artificial Sequence
  Description of Artificial Sequence: Synthetic oligonucleotide
aguaagcaacuagcagaca

SEQ ID NO: 1551022 - RNA, 19 nt, Artificial Sequence
  Description of Artificial Sequence: Synthetic oligonucleotide
ccacaaaguaaccacaagu

SEQ ID NO: 1551023 - RNA, 19 nt, Artificial Sequence
  Description of Artificial Sequence: Synthetic oligonucleotide
ccaccggucaucagagaag

SEQ ID NO: 1551024 - RNA, 19 nt, Artificial Sequence
  Description of Artificial Sequence: Synthetic oligonucleotide
cuccauaucucucucucau

SEQ ID NO: 1551025 - RNA, 19 nt, Artificial Sequence
  Description of Artificial Sequence: Synthetic oligonucleotide
cacacaugucgcauuauuu

SEQ ID NO: 1551026 - RNA, 19 nt, Artificial Sequence
  Description of Artificial Sequence: Synthetic oligonucleotide
agggugcgaaggccugcuc

SEQ ID NO: 1551027 - RNA, 19 nt, Artificial Sequence
  Description of Artificial Sequence: Synthetic oligonucleotide
cguuugacgauccgccacc

SEQ ID NO: 1551028 - RNA, 19 nt, Artificial Sequence
  Description of Artificial Sequence: Synthetic oligonucleotide
gggguaugcacaacuccgc

SEQ ID NO: 1551029 - RNA, 19 nt, Artificial Sequence
  Description of Artificial Sequence: Synthetic oligonucleotide
gugggccgcacucccgaag

SEQ ID NO: 1551030 - RNA, 19 nt, Artificial Sequence
  Description of Artificial Sequence: Synthetic oligonucleotide
auccgccaccaccuggccu

SEQ ID NO: 1551031 - RNA, 19 nt, Artificial Sequence
  Description of Artificial Sequence: Synthetic oligonucleotide
uugccacaacagccuuuga

SEQ ID NO: 1551032 - RNA, 19 nt, Artificial Sequence
  Description of Artificial Sequence: Synthetic oligonucleotide
gcguuugacgauccgccac

SEQ ID NO: 1551033 - RNA, 19 nt, Artificial Sequence
  Description of Artificial Sequence: Synthetic oligonucleotide
cuuuucccucucgcaacug

SEQ ID NO: 1551034 - RNA, 19 nt, Artificial Sequence
  Description of Artificial Sequence: Synthetic oligonucleotide
auaggguuguucagucaau

SEQ ID NO: 1551035 - RNA, 19 nt, Artificial Sequence
  Description of Artificial Sequence: Synthetic oligonucleotide
gcccaggcgaagcacagca

SEQ ID NO: 1551036 - RNA, 19 nt, Artificial Sequence
  Description of Artificial Sequence: Synthetic oligonucleotide
ucccaccugcggauacacu

SEQ ID NO: 1551037 - RNA, 19 nt, Artificial Sequence
  Description of Artificial Sequence: Synthetic oligonucleotide
gccaccggucaucagagaa

SEQ ID NO: 1551038 - RNA, 19 nt, Artificial Sequence
  Description of Artificial Sequence: Synthetic oligonucleotide
cgauagcaugauacuacag

SEQ ID NO: 1551039 - RNA, 19 nt, Artificial Sequence
  Description of Artificial Sequence: Synthetic oligonucleotide
ccuuagcagacuagaccac

SEQ ID NO: 1551040 - RNA, 19 nt, Artificial Sequence
  Description of Artificial Sequence: Synthetic oligonucleotide
aacuccgcccgcggaggca

SEQ ID NO: 1551041 - RNA, 19 nt, Artificial Sequence
  Description of Artificial Sequence: Synthetic oligonucleotide
caacuccgcccgcggaggc

SEQ ID NO: 1551042 - RNA, 19 nt, Artificial Sequence
  Description of Artificial Sequence: Synthetic oligonucleotide
guuugacgauccgccacca

SEQ ID NO: 1551043 - RNA, 19 nt, Artificial Sequence
  Description of Artificial Sequence: Synthetic oligonucleotide
cucgcccacacaugucgca

SEQ ID NO: 1551044 - RNA, 19 nt, Artificial Sequence
  Description of Artificial Sequence: Synthetic oligonucleotide
cgauccgccaccaccuggc

SEQ ID NO: 1551045 - RNA, 19 nt, Artificial Sequence
  Description of Artificial Sequence: Synthetic oligonucleotide
gcggcggucgcuggggucg

SEQ ID NO: 1551046 - RNA, 19 nt, Artificial Sequence
  Description of Artificial Sequence: Synthetic oligonucleotide
cagugaccuaggccuccag

SEQ ID NO: 1551047 - RNA, 19 nt, Artificial Sequence
  Description of Artificial Sequence: Synthetic oligonucleotide
ccucucgcaacugcacagg

SEQ ID NO: 1551048 - RNA, 19 nt, Artificial Sequence
  Description of Artificial Sequence: Synthetic oligonucleotide
gcaugauacuacagauuca

SEQ ID NO: 1551049 - RNA, 19 nt, Artificial Sequence
  Description of Artificial Sequence: Synthetic oligonucleotide
ggcccuucuaugagcuucc

SEQ ID NO: 1551050 - RNA, 19 nt, Artificial Sequence
  Description of Artificial Sequence: Synthetic oligonucleotide
cugcucgcccacacauguc

SEQ ID NO: 1551051 - RNA, 19 nt, Artificial Sequence
  Description of Artificial Sequence: Synthetic oligonucleotide
cacuagacuagaagugauu

SEQ ID NO: 1551052 - RNA, 19 nt, Artificial Sequence
  Description of Artificial Sequence: Synthetic oligonucleotide
agaccacaugcgauagcau

SEQ ID NO: 1551053 - RNA, 19 nt, Artificial Sequence
  Description of Artificial Sequence: Synthetic oligonucleotide
gcaagagccaccggucauc

SEQ ID NO: 1551054 - RNA, 19 nt, Artificial Sequence
  Description of Artificial Sequence: Synthetic oligonucleotide
agccaccggucaucagaga

SEQ ID NO: 1551055 - RNA, 19 nt, Artificial Sequence
  Description of Artificial Sequence: Synthetic oligonucleotide
gccgcacucccgaagggug

SEQ ID NO: 1551056 - RNA, 19 nt, Artificial Sequence
  Description of Artificial Sequence: Synthetic oligonucleotide
cuuccugcgugggccgcac

SEQ ID NO: 1551057 - RNA, 19 nt, Artificial Sequence
  Description of Artificial Sequence: Synthetic oligonucleotide
gcaccuuauuuuggucaag

SEQ ID NO: 1551058 - RNA, 19 nt, Artificial Sequence
  Description of Artificial Sequence: Synthetic oligonucleotide
ggcccuguaagguugcauu

SEQ ID NO: 1551059 - RNA, 19 nt, Artificial Sequence
  Description of Artificial Sequence: Synthetic oligonucleotide
gggccgcacucccgaaggg

SEQ ID NO: 1551060 - RNA, 19 nt, Artificial Sequence
  Description of Artificial Sequence: Synthetic oligonucleotide
cugcaaggcccuguaaggu

SEQ ID NO: 1551061 - RNA, 19 nt, Artificial Sequence
  Description of Artificial Sequence: Synthetic oligonucleotide
gcucauccccuccuuauau

SEQ ID NO: 1551062 - RNA, 19 nt, Artificial Sequence
  Description of Artificial Sequence: Synthetic oligonucleotide
ccgcacucccgaagggugc

SEQ ID NO: 1551063 - RNA, 19 nt, Artificial Sequence
  Description of Artificial Sequence: Synthetic oligonucleotide
cacaugcgauagcaugaua

SEQ ID NO: 1551064 - RNA, 19 nt, Artificial Sequence
  Description of Artificial Sequence: Synthetic oligonucleotide
ccuugucacauuuacucuu

SEQ ID NO: 1551065 - RNA, 19 nt, Artificial Sequence
  Description of Artificial Sequence: Synthetic oligonucleotide
cuggcucauccccuccuua

SEQ ID NO: 1551066 - RNA, 19 nt, Artificial Sequence
  Description of Artificial Sequence: Synthetic oligonucleotide
cuucaacgcaggcccuucu

SEQ ID NO: 1551067 - RNA, 19 nt, Artificial Sequence
  Description of Artificial Sequence: Synthetic oligonucleotide
cucucaggcaaagcaacuu

SEQ ID NO: 1551068 - RNA, 19 nt, Artificial Sequence
  Description of Artificial Sequence: Synthetic oligonucleotide
ggcucauccccuccuuaua

SEQ ID NO: 1551069 - RNA, 19 nt, Artificial Sequence
  Description of Artificial Sequence: Synthetic oligonucleotide
gcuucaacgcaggcccuuc

SEQ ID NO: 1551070 - RNA, 19 nt, Artificial Sequence
  Description of Artificial Sequence: Synthetic oligonucleotide
gcucgcccacacaugucgc

SEQ ID NO: 1551071 - RNA, 19 nt, Artificial Sequence
  Description of Artificial Sequence: Synthetic oligonucleotide
ccaaaacuugaugccagua

SEQ ID NO: 1551072 - RNA, 19 nt, Artificial Sequence
  Description of Artificial Sequence: Synthetic oligonucleotide
ccugcucgcccacacaugu

SEQ ID NO: 1551073 - RNA, 19 nt, Artificial Sequence
  Description of Artificial Sequence: Synthetic oligonucleotide
ggcaggacuuacugauccu

SEQ ID NO: 1551074 - RNA, 19 nt, Artificial Sequence
  Description of Artificial Sequence: Synthetic oligonucleotide
gcacaacuccgcccgcgga

SEQ ID NO: 1551075 - RNA, 19 nt, Artificial Sequence
  Description of Artificial Sequence: Synthetic oligonucleotide
gcgugggccgcacucccga

SEQ ID NO: 1551076 - RNA, 19 nt, Artificial Sequence
  Description of Artificial Sequence: Synthetic oligonucleotide
ccgaagggugcgaaggccu

SEQ ID NO: 1551077 - RNA, 19 nt, Artificial Sequence
  Description of Artificial Sequence: Synthetic oligonucleotide
ggcuuuugaacagcacuuu

SEQ ID NO: 1551078 - RNA, 19 nt, Artificial Sequence
  Description of Artificial Sequence: Synthetic oligonucleotide
cgcacucccgaagggugcg

SEQ ID NO: 1551079 - RNA, 19 nt, Artificial Sequence
  Description of Artificial Sequence: Synthetic oligonucleotide
gcccuguaagguugcauuu

SEQ ID NO: 1551080 - RNA, 19 nt, Artificial Sequence
  Description of Artificial Sequence: Synthetic oligonucleotide
ccucucaggcaaagcaacu

SEQ ID NO: 1551081 - RNA, 19 nt, Artificial Sequence
  Description of Artificial Sequence: Synthetic oligonucleotide
ccaguaugcguuugacgau

SEQ ID NO: 1551082 - RNA, 19 nt, Artificial Sequence
  Description of Artificial Sequence: Synthetic oligonucleotide
gcuuccugcgugggccgca

SEQ ID NO: 1551083 - RNA, 19 nt, Artificial Sequence
  Description of Artificial Sequence: Synthetic oligonucleotide
ggccgcacucccgaagggu

SEQ ID NO: 1551084 - RNA, 19 nt, Artificial Sequence
  Description of Artificial Sequence: Synthetic oligonucleotide
ccacaugcgauagcaugau

SEQ ID NO: 1551085 - RNA, 19 nt, Artificial Sequence
  Description of Artificial Sequence: Synthetic oligonucleotide
gcacucccgaagggugcga

SEQ ID NO: 1551086 - RNA, 19 nt, Artificial Sequence
  Description of Artificial Sequence: Synthetic oligonucleotide
ggcuucaacgcaggcccuu

SEQ ID NO: 1551087 - RNA, 19 nt, Artificial Sequence
  Description of Artificial Sequence: Synthetic oligonucleotide
cccuguaagguugcauuuu

SEQ ID NO: 1551088 - RNA, 19 nt, Artificial Sequence
  Description of Artificial Sequence: Synthetic oligonucleotide
gggcuucaacgcaggcccu

SEQ ID NO: 1551089 - RNA, 19 nt, Artificial Sequence
  Description of Artificial Sequence: Synthetic oligonucleotide
cgugggccgcacucccgaa

SEQ ID NO: 1551090 - RNA, 19 nt, Artificial Sequence
  Description of Artificial Sequence: Synthetic oligonucleotide
aagagcauuagauggaucc

SEQ ID NO: 1551091 - RNA, 19 nt, Artificial Sequence
  Description of Artificial Sequence: Synthetic oligonucleotide
aaaguuggcagcuggaugc

SEQ ID NO: 1551092 - RNA, 19 nt, Artificial Sequence
  Description of Artificial Sequence: Synthetic oligonucleotide
aaagcgcucgcucaggucc

SEQ ID NO: 1551093 - RNA, 19 nt, Artificial Sequence
  Description of Artificial Sequence: Synthetic oligonucleotide
gauacaagaaaggacaagg

SEQ ID NO: 1551094 - RNA, 19 nt, Artificial Sequence
  Description of Artificial Sequence: Synthetic oligonucleotide
gaugucaacguccagcugg

SEQ ID NO: 1551095 - RNA, 19 nt, Artificial Sequence
  Description of Artificial Sequence: Synthetic oligonucleotide
acaauauccgagcuggccc

SEQ ID NO: 1551096 - RNA, 19 nt, Artificial Sequence
  Description of Artificial Sequence: Synthetic oligonucleotide
cucuauaccaaguucaccc

SEQ ID NO: 1551097 - RNA, 19 nt, Artificial Sequence
  Description of Artificial Sequence: Synthetic oligonucleotide
uuuauuaaccaaagagaag

SEQ ID NO: 1551098 - RNA, 19 nt, Artificial Sequence
  Description of Artificial Sequence: Synthetic oligonucleotide
uuuggaacguugcagacca

SEQ ID NO: 1551099 - RNA, 19 nt, Artificial Sequence
  Description of Artificial Sequence: Synthetic oligonucleotide
acauuuguguuuauuaacc

SEQ ID NO: 1551100 - RNA, 19 nt, Artificial Sequence
  Description of Artificial Sequence: Synthetic oligonucleotide
gagacaauauccgagcugg

SEQ ID NO: 1551101 - RNA, 19 nt, Artificial Sequence
  Description of Artificial Sequence: Synthetic oligonucleotide
auugcgcucuauuacagac

SEQ ID NO: 1551102 - RNA, 19 nt, Artificial Sequence
  Description of Artificial Sequence: Synthetic oligonucleotide
cuauaguuuacccaccuag

SEQ ID NO: 1551103 - RNA, 19 nt, Artificial Sequence
  Description of Artificial Sequence: Synthetic oligonucleotide
uagagagacaauauccgag

SEQ ID NO: 1551104 - RNA, 19 nt, Artificial Sequence
  Description of Artificial Sequence: Synthetic oligonucleotide
gggacuaucacacagguug

SEQ ID NO: 1551105 - RNA, 19 nt, Artificial Sequence
  Description of Artificial Sequence: Synthetic oligonucleotide
acugguaaggaugucaacg

SEQ ID NO: 1551106 - RNA, 19 nt, Artificial Sequence
  Description of Artificial Sequence: Synthetic oligonucleotide
aaacauuuguguuuauuaa

SEQ ID NO: 1551107 - RNA, 19 nt, Artificial Sequence
  Description of Artificial Sequence: Synthetic oligonucleotide
ucagguccgauuuggaacg

SEQ ID NO: 1551108 - RNA, 19 nt, Artificial Sequence
  Description of Artificial Sequence: Synthetic oligonucleotide
cuugguagcagguagcuug

SEQ ID NO: 1551109 - RNA, 19 nt, Artificial Sequence
  Description of Artificial Sequence: Synthetic oligonucleotide
uucgcaggcgaaaagguag

SEQ ID NO: 1551110 - RNA, 19 nt, Artificial Sequence
  Description of Artificial Sequence: Synthetic oligonucleotide
gaggcgaggagacagauac

SEQ ID NO: 1551111 - RNA, 19 nt, Artificial Sequence
  Description of Artificial Sequence: Synthetic oligonucleotide
aguuuacccaccuaggcca

SEQ ID NO: 1551112 - RNA, 19 nt, Artificial Sequence
  Description of Artificial Sequence: Synthetic oligonucleotide
aguuacaugccccgagggc

SEQ ID NO: 1551113 - RNA, 19 nt, Artificial Sequence
  Description of Artificial Sequence: Synthetic oligonucleotide
uaaccagucccuccuauag

SEQ ID NO: 1551114 - RNA, 19 nt, Artificial Sequence
  Description of Artificial Sequence: Synthetic oligonucleotide
acaugaaggcuuuugacgu

SEQ ID NO: 1551115 - RNA, 19 nt, Artificial Sequence
  Description of Artificial Sequence: Synthetic oligonucleotide
guagaaacaaacauuugug

SEQ ID NO: 1551116 - RNA, 19 nt, Artificial Sequence
  Description of Artificial Sequence: Synthetic oligonucleotide
uaguuuacccaccuaggcc

SEQ ID NO: 1551117 - RNA, 19 nt, Artificial Sequence
  Description of Artificial Sequence: Synthetic oligonucleotide
guugaugagacugguaagg

SEQ ID NO: 1551118 - RNA, 19 nt, Artificial Sequence
  Description of Artificial Sequence: Synthetic oligonucleotide
ucuauuacagacaccccgu

SEQ ID NO: 1551119 - RNA, 19 nt, Artificial Sequence
  Description of Artificial Sequence: Synthetic oligonucleotide
uauaccaaguucacccaag

SEQ ID NO: 1551120 - RNA, 19 nt, Artificial Sequence
  Description of Artificial Sequence: Synthetic oligonucleotide
ucaacguccagcuggggcc

SEQ ID NO: 1551121 - RNA, 19 nt, Artificial Sequence
  Description of Artificial Sequence: Synthetic oligonucleotide
gacacagacgaguagguga

SEQ ID NO: 1551122 - RNA, 19 nt, Artificial Sequence
  Description of Artificial Sequence: Synthetic oligonucleotide
uaggccaacugccaaagac

SEQ ID NO: 1551123 - RNA, 19 nt, Artificial Sequence
  Description of Artificial Sequence: Synthetic oligonucleotide
auuuggaacguugcagacc

SEQ ID NO: 1551124 - RNA, 19 nt, Artificial Sequence
  Description of Artificial Sequence: Synthetic oligonucleotide
uucggcuggccucagcugg

SEQ ID NO: 1551125 - RNA, 19 nt, Artificial Sequence
  Description of Artificial Sequence: Synthetic oligonucleotide
ugcgcucuauuacagacac

SEQ ID NO: 1551126 - RNA, 19 nt, Artificial Sequence
  Description of Artificial Sequence: Synthetic oligonucleotide
uguacuaggcgguggacga

SEQ ID NO: 1551127 - RNA, 19 nt, Artificial Sequence
  Description of Artificial Sequence: Synthetic oligonucleotide
auaccaaguucacccaagg

SEQ ID NO: 1551128 - RNA, 19 nt, Artificial Sequence
  Description of Artificial Sequence: Synthetic oligonucleotide
ugaucacacgggcauugcg

SEQ ID NO: 1551129 - RNA, 19 nt, Artificial Sequence
  Description of Artificial Sequence: Synthetic oligonucleotide
acagacgaguaggugaagc

SEQ ID NO: 1551130 - RNA, 19 nt, Artificial Sequence
  Description of Artificial Sequence: Synthetic oligonucleotide
gaacguugcagaccagggg

SEQ ID NO: 1551131 - RNA, 19 nt, Artificial Sequence
  Description of Artificial Sequence: Synthetic oligonucleotide
uuagauggaucccauccuc

SEQ ID NO: 1551132 - RNA, 19 nt, Artificial Sequence
  Description of Artificial Sequence: Synthetic oligonucleotide
aaaagcgcucgcucagguc

SEQ ID NO: 1551133 - RNA, 19 nt, Artificial Sequence
  Description of Artificial Sequence: Synthetic oligonucleotide
agggucacgggccugccgc

SEQ ID NO: 1551134 - RNA, 19 nt, Artificial Sequence
  Description of Artificial Sequence: Synthetic oligonucleotide
acucagcuaaguccuggcc

SEQ ID NO: 1551135 - RNA, 19 nt, Artificial Sequence
  Description of Artificial Sequence: Synthetic oligonucleotide
cauacagccacuugaucac

SEQ ID NO: 1551136 - RNA, 19 nt, Artificial Sequence
  Description of Artificial Sequence: Synthetic oligonucleotide
ugccgcaacccauacagcc

SEQ ID NO: 1551137 - RNA, 19 nt, Artificial Sequence
  Description of Artificial Sequence: Synthetic oligonucleotide
auuagauggaucccauccu

SEQ ID NO: 1551138 - RNA, 19 nt, Artificial Sequence
  Description of Artificial Sequence: Synthetic oligonucleotide
gacgaguaggugaagcagg

SEQ ID NO: 1551139 - RNA, 19 nt, Artificial Sequence
  Description of Artificial Sequence: Synthetic oligonucleotide
aggcgauggacacagacga

SEQ ID NO: 1551140 - RNA, 19 nt, Artificial Sequence
  Description of Artificial Sequence: Synthetic oligonucleotide
acagacaccccguagggga

SEQ ID NO: 1551141 - RNA, 19 nt, Artificial Sequence
  Description of Artificial Sequence: Synthetic oligonucleotide
ucuauaccaaguucaccca

SEQ ID NO: 1551142 - RNA, 19 nt, Artificial Sequence
  Description of Artificial Sequence: Synthetic oligonucleotide
gggacgaacauccacucgg

SEQ ID NO: 1551143 - RNA, 19 nt, Artificial Sequence
  Description of Artificial Sequence: Synthetic oligonucleotide
ucgugcuuccucuggaucc

SEQ ID NO: 1551144 - RNA, 19 nt, Artificial Sequence
  Description of Artificial Sequence: Synthetic oligonucleotide
auggcaguuacaugccccg

SEQ ID NO: 1551145 - RNA, 19 nt, Artificial Sequence
  Description of Artificial Sequence: Synthetic oligonucleotide
agagacaauauccgagcug

SEQ ID NO: 1551146 - RNA, 19 nt, Artificial Sequence
  Description of Artificial Sequence: Synthetic oligonucleotide
uucgguaaggaagaggaaa

SEQ ID NO: 1551147 - RNA, 19 nt, Artificial Sequence
  Description of Artificial Sequence: Synthetic oligonucleotide
agauggaucccauccucuc

SEQ ID NO: 1551148 - RNA, 19 nt, Artificial Sequence
  Description of Artificial Sequence: Synthetic oligonucleotide
gggcauggcaguuacaugc

SEQ ID NO: 1551149 - RNA, 19 nt, Artificial Sequence
  Description of Artificial Sequence: Synthetic oligonucleotide
acacgggacuaucacacag

SEQ ID NO: 1551150 - RNA, 19 nt, Artificial Sequence
  Description of Artificial Sequence: Synthetic oligonucleotide
cauggcaguuacaugcccc

SEQ ID NO: 1551151 - RNA, 19 nt, Artificial Sequence
  Description of Artificial Sequence: Synthetic oligonucleotide
gauuuggaacguugcagac

SEQ ID NO: 1551152 - RNA, 19 nt, Artificial Sequence
  Description of Artificial Sequence: Synthetic oligonucleotide
gacaauauccgagcuggcc

SEQ ID NO: 1551153 - RNA, 19 nt, Artificial Sequence
  Description of Artificial Sequence: Synthetic oligonucleotide
uccuauaguuuacccaccu

SEQ ID NO: 1551154 - RNA, 19 nt, Artificial Sequence
  Description of Artificial Sequence: Synthetic oligonucleotide
gguguuggccacaugaagg

SEQ ID NO: 1551155 - RNA, 19 nt, Artificial Sequence
  Description of Artificial Sequence: Synthetic oligonucleotide
gaucacacgggcauugcgc

SEQ ID NO: 1551156 - RNA, 19 nt, Artificial Sequence
  Description of Artificial Sequence: Synthetic oligonucleotide
agagcugcggugugaacag

SEQ ID NO: 1551157 - RNA, 19 nt, Artificial Sequence
  Description of Artificial Sequence: Synthetic oligonucleotide
uccgauuuggaacguugca

SEQ ID NO: 1551158 - RNA, 19 nt, Artificial Sequence
  Description of Artificial Sequence: Synthetic oligonucleotide
acggcgacuguacuaggcg

SEQ ID NO: 1551159 - RNA, 19 nt, Artificial Sequence
  Description of Artificial Sequence: Synthetic oligonucleotide
ugguucccaacucagcuaa

SEQ ID NO: 1551160 - RNA, 19 nt, Artificial Sequence
  Description of Artificial Sequence: Synthetic oligonucleotide
agguacuugguucccaacu

SEQ ID NO: 1551161 - RNA, 19 nt, Artificial Sequence
  Description of Artificial Sequence: Synthetic oligonucleotide
acucggcccggcuagagag

SEQ ID NO: 1551162 - RNA, 19 nt, Artificial Sequence
  Description of Artificial Sequence: Synthetic oligonucleotide
ugcggugugaacagccgcc

SEQ ID NO: 1551163 - RNA, 19 nt, Artificial Sequence
  Description of Artificial Sequence: Synthetic oligonucleotide
ggcuagagagacaauaucc

SEQ ID NO: 1551164 - RNA, 19 nt, Artificial Sequence
  Description of Artificial Sequence: Synthetic oligonucleotide
guguuggccacaugaaggc

SEQ ID NO: 1551165 - RNA, 19 nt, Artificial Sequence
  Description of Artificial Sequence: Synthetic oligonucleotide
ucagcuaaguccuggccuc

SEQ ID NO: 1551166 - RNA, 19 nt, Artificial Sequence
  Description of Artificial Sequence: Synthetic oligonucleotide
acccaccuaggccaacugc

SEQ ID NO: 1551167 - RNA, 19 nt, Artificial Sequence
  Description of Artificial Sequence: Synthetic oligonucleotide
uagauggaucccauccucu

SEQ ID NO: 1551168 - RNA, 19 nt, Artificial Sequence
  Description of Artificial Sequence: Synthetic oligonucleotide
acuguagcagagcugcggu

SEQ ID NO: 1551169 - RNA, 19 nt, Artificial Sequence
  Description of Artificial Sequence: Synthetic oligonucleotide
gguaaggaugucaacgucc

SEQ ID NO: 1551170 - RNA, 19 nt, Artificial Sequence
  Description of Artificial Sequence: Synthetic oligonucleotide
cauuuguguuuauuaacca

SEQ ID NO: 1551171 - RNA, 19 nt, Artificial Sequence
  Description of Artificial Sequence: Synthetic oligonucleotide
ccaauggauacaagaaagg

SEQ ID NO: 1551172 - RNA, 19 nt, Artificial Sequence
  Description of Artificial Sequence: Synthetic oligonucleotide
uguugccaggcgauggaca

SEQ ID NO: 1551173 - RNA, 19 nt, Artificial Sequence
  Description of Artificial Sequence: Synthetic oligonucleotide
gucaacguccagcuggggc

SEQ ID NO: 1551174 - RNA, 19 nt, Artificial Sequence
  Description of Artificial Sequence: Synthetic oligonucleotide
aaguucacccaagggagcu

SEQ ID NO: 1551175 - RNA, 19 nt, Artificial Sequence
  Description of Artificial Sequence: Synthetic oligonucleotide
caggcuccuaaccaguccc

SEQ ID NO: 1551176 - RNA, 19 nt, Artificial Sequence
  Description of Artificial Sequence: Synthetic oligonucleotide
aaagcgcucgaggucagcu

SEQ ID NO: 1551177 - RNA, 19 nt, Artificial Sequence
  Description of Artificial Sequence: Synthetic oligonucleotide
ccuccuauaguuuacccac

SEQ ID NO: 1551178 - RNA, 19 nt, Artificial Sequence
  Description of Artificial Sequence: Synthetic oligonucleotide
cuagagagacaauauccga

SEQ ID NO: 1551179 - RNA, 19 nt, Artificial Sequence
  Description of Artificial Sequence: Synthetic oligonucleotide
caauggauacaagaaagga

SEQ ID NO: 1551180 - RNA, 19 nt, Artificial Sequence
  Description of Artificial Sequence: Synthetic oligonucleotide
cacgggacuaucacacagg

SEQ ID NO: 1551181 - RNA, 19 nt, Artificial Sequence
  Description of Artificial Sequence: Synthetic oligonucleotide
cucgaggucagcugcugcc

SEQ ID NO: 1551182 - RNA, 19 nt, Artificial Sequence
  Description of Artificial Sequence: Synthetic oligonucleotide
aaccagucccuccuauagu

SEQ ID NO: 1551183 - RNA, 19 nt, Artificial Sequence
  Description of Artificial Sequence: Synthetic oligonucleotide
aggggacgaacauccacuc

SEQ ID NO: 1551184 - RNA, 19 nt, Artificial Sequence
  Description of Artificial Sequence: Synthetic oligonucleotide
aucacacgggcauugcgcu

SEQ ID NO: 1551185 - RNA, 19 nt, Artificial Sequence
  Description of Artificial Sequence: Synthetic oligonucleotide
uacuaggcgguggacgagg

SEQ ID NO: 1551186 - RNA, 19 nt, Artificial Sequence
  Description of Artificial Sequence: Synthetic oligonucleotide
cuguacuaggcgguggacg

SEQ ID NO: 1551187 - RNA, 19 nt, Artificial Sequence
  Description of Artificial Sequence: Synthetic oligonucleotide
ggagccucggggcagacag

SEQ ID NO: 1551188 - RNA, 19 nt, Artificial Sequence
  Description of Artificial Sequence: Synthetic oligonucleotide
aaaagcgcucgaggucagc

SEQ ID NO: 1551189 - RNA, 19 nt, Artificial Sequence
  Description of Artificial Sequence: Synthetic oligonucleotide
ccugccgcaacccauacag

SEQ ID NO: 1551190 - RNA, 19 nt, Artificial Sequence
  Description of Artificial Sequence: Synthetic oligonucleotide
gagacugguaaggauguca

SEQ ID NO: 1551191 - RNA, 19 nt, Artificial Sequence
  Description of Artificial Sequence: Synthetic oligonucleotide
uugcgcucuauuacagaca

SEQ ID NO: 1551192 - RNA, 19 nt, Artificial Sequence
  Description of Artificial Sequence: Synthetic oligonucleotide
acuaucacacagguugaug

SEQ ID NO: 1551193 - RNA, 19 nt, Artificial Sequence
  Description of Artificial Sequence: Synthetic oligonucleotide
cuucacgauguccuuccag

SEQ ID NO: 1551194 - RNA, 19 nt, Artificial Sequence
  Description of Artificial Sequence: Synthetic oligonucleotide
acgggacuaucacacaggu

SEQ ID NO: 1551195 - RNA, 19 nt, Artificial Sequence
  Description of Artificial Sequence: Synthetic oligonucleotide
agauccuucugcccgucca

SEQ ID NO: 1551196 - RNA, 19 nt, Artificial Sequence
  Description of Artificial Sequence: Synthetic oligonucleotide
gaaacggagccucggggca

SEQ ID NO: 1551197 - RNA, 19 nt, Artificial Sequence
  Description of Artificial Sequence: Synthetic oligonucleotide
ucgcucagguccgauuugg

SEQ ID NO: 1551198 - RNA, 19 nt, Artificial Sequence
  Description of Artificial Sequence: Synthetic oligonucleotide
ggcgaggagacagauacag

SEQ ID NO: 1551199 - RNA, 19 nt, Artificial Sequence
  Description of Artificial Sequence: Synthetic oligonucleotide
ucccuccuauaguuuaccc

SEQ ID NO: 1551200 - RNA, 19 nt, Artificial Sequence
  Description of Artificial Sequence: Synthetic oligonucleotide
gggcagauccuucugcccg

SEQ ID NO: 1551201 - RNA, 19 nt, Artificial Sequence
  Description of Artificial Sequence: Synthetic oligonucleotide
aguagccggagggucacgg

SEQ ID NO: 1551202 - RNA, 19 nt, Artificial Sequence
  Description of Artificial Sequence: Synthetic oligonucleotide
aggcgaaaagguagggugg

SEQ ID NO: 1551203 - RNA, 19 nt, Artificial Sequence
  Description of Artificial Sequence: Synthetic oligonucleotide
cgcucuauuacagacaccc

SEQ ID NO: 1551204 - RNA, 19 nt, Artificial Sequence
  Description of Artificial Sequence: Synthetic oligonucleotide
aagcgcucgaggucagcug

SEQ ID NO: 1551205 - RNA, 19 nt, Artificial Sequence
  Description of Artificial Sequence: Synthetic oligonucleotide
cuccuauaguuuacccacc

SEQ ID NO: 1551206 - RNA, 19 nt, Artificial Sequence
  Description of Artificial Sequence: Synthetic oligonucleotide
uggccucuauaccaaguuc

SEQ ID NO: 1551207 - RNA, 19 nt, Artificial Sequence
  Description of Artificial Sequence: Synthetic oligonucleotide
gagcauuagauggauccca

SEQ ID NO: 1551208 - RNA, 19 nt, Artificial Sequence
  Description of Artificial Sequence: Synthetic oligonucleotide
agccacuugaucacacggg

SEQ ID NO: 1551209 - RNA, 19 nt, Artificial Sequence
  Description of Artificial Sequence: Synthetic oligonucleotide
gacuguacuaggcggugga

SEQ ID NO: 1551210 - RNA, 19 nt, Artificial Sequence
  Description of Artificial Sequence: Synthetic oligonucleotide
augagacugguaaggaugu

SEQ ID NO: 1551211 - RNA, 19 nt, Artificial Sequence
  Description of Artificial Sequence: Synthetic oligonucleotide
ggaacguugcagaccaggg

SEQ ID NO: 1551212 - RNA, 19 nt, Artificial Sequence
  Description of Artificial Sequence: Synthetic oligonucleotide
ggggacacgcuccagggcc

SEQ ID NO: 1551213 - RNA, 19 nt, Artificial Sequence
  Description of Artificial Sequence: Synthetic oligonucleotide
cacggcgacuguacuaggc

SEQ ID NO: 1551214 - RNA, 19 nt, Artificial Sequence
  Description of Artificial Sequence: Synthetic oligonucleotide
uccuucugcccguccaggc

SEQ ID NO: 1551215 - RNA, 19 nt, Artificial Sequence
  Description of Artificial Sequence: Synthetic oligonucleotide
aacauccacucggcgcacg

SEQ ID NO: 1551216 - RNA, 19 nt, Artificial Sequence
  Description of Artificial Sequence: Synthetic oligonucleotide
aaacggagccucggggcag

SEQ ID NO: 1551217 - RNA, 19 nt, Artificial Sequence
  Description of Artificial Sequence: Synthetic oligonucleotide
uauccgagcuggcccuugc

SEQ ID NO: 1551218 - RNA, 19 nt, Artificial Sequence
  Description of Artificial Sequence: Synthetic oligonucleotide
augucaacguccagcuggg

SEQ ID NO: 1551219 - RNA, 19 nt, Artificial Sequence
  Description of Artificial Sequence: Synthetic oligonucleotide
acuguacuaggcgguggac

SEQ ID NO: 1551220 - RNA, 19 nt, Artificial Sequence
  Description of Artificial Sequence: Synthetic oligonucleotide
gguacuugguucccaacuc

SEQ ID NO: 1551221 - RNA, 19 nt, Artificial Sequence
  Description of Artificial Sequence: Synthetic oligonucleotide
gacugguaaggaugucaac

SEQ ID NO: 1551222 - RNA, 19 nt, Artificial Sequence
  Description of Artificial Sequence: Synthetic oligonucleotide
uggggacacgggacuauca

SEQ ID NO: 1551223 - RNA, 19 nt, Artificial Sequence
  Description of Artificial Sequence: Synthetic oligonucleotide
agucccuccuauaguuuac

SEQ ID NO: 1551224 - RNA, 19 nt, Artificial Sequence
  Description of Artificial Sequence: Synthetic oligonucleotide
cagacgaguaggugaagca

SEQ ID NO: 1551225 - RNA, 19 nt, Artificial Sequence
  Description of Artificial Sequence: Synthetic oligonucleotide
guucacccaagggagcugc

SEQ ID NO: 1551226 - RNA, 19 nt, Artificial Sequence
  Description of Artificial Sequence: Synthetic oligonucleotide
ggcauugcgcucuauuaca

SEQ ID NO: 1551227 - RNA, 19 nt, Artificial Sequence
  Description of Artificial Sequence: Synthetic oligonucleotide
agacaauauccgagcuggc

SEQ ID NO: 1551228 - RNA, 19 nt, Artificial Sequence
  Description of Artificial Sequence: Synthetic oligonucleotide
acgggcauggcaguuacau

SEQ ID NO: 1551229 - RNA, 19 nt, Artificial Sequence
  Description of Artificial Sequence: Synthetic oligonucleotide
ggacacgggacuaucacac

SEQ ID NO: 1551230 - RNA, 19 nt, Artificial Sequence
  Description of Artificial Sequence: Synthetic oligonucleotide
ugugagcacuggcccacga

SEQ ID NO: 1551231 - RNA, 19 nt, Artificial Sequence
  Description of Artificial Sequence: Synthetic oligonucleotide
uugaucacacgggcauugc

SEQ ID NO: 1551232 - RNA, 19 nt, Artificial Sequence
  Description of Artificial Sequence: Synthetic oligonucleotide
cacagcacucggcuuccgg

SEQ ID NO: 1551233 - RNA, 19 nt, Artificial Sequence
  Description of Artificial Sequence: Synthetic oligonucleotide
guagccggagggucacggg

SEQ ID NO: 1551234 - RNA, 19 nt, Artificial Sequence
  Description of Artificial Sequence: Synthetic oligonucleotide
cugcggugugaacagccgc

SEQ ID NO: 1551235 - RNA, 19 nt, Artificial Sequence
  Description of Artificial Sequence: Synthetic oligonucleotide
acugccgcuucacgauguc

SEQ ID NO: 1551236 - RNA, 19 nt, Artificial Sequence
  Description of Artificial Sequence: Synthetic oligonucleotide
agacugguaaggaugucaa

SEQ ID NO: 1551237 - RNA, 19 nt, Artificial Sequence
  Description of Artificial Sequence: Synthetic oligonucleotide
guccgauuuggaacguugc

SEQ ID NO: 1551238 - RNA, 19 nt, Artificial Sequence
  Description of Artificial Sequence: Synthetic oligonucleotide
uguuggccacaugaaggcu

SEQ ID NO: 1551239 - RNA, 19 nt, Artificial Sequence
  Description of Artificial Sequence: Synthetic oligonucleotide
uccgagcuggcccuugcua

SEQ ID NO: 1551240 - RNA, 19 nt, Artificial Sequence
  Description of Artificial Sequence: Synthetic oligonucleotide
gaagagcauuagauggauc

SEQ ID NO: 1551241 - RNA, 19 nt, Artificial Sequence
  Description of Artificial Sequence: Synthetic oligonucleotide
uccgggcucccgcaacugc

SEQ ID NO: 1551242 - RNA, 19 nt, Artificial Sequence
  Description of Artificial Sequence: Synthetic oligonucleotide
ucaguagccggagggucac

SEQ ID NO: 1551243 - RNA, 19 nt, Artificial Sequence
  Description of Artificial Sequence: Synthetic oligonucleotide
gcccucaguagccggaggg

SEQ ID NO: 1551244 - RNA, 19 nt, Artificial Sequence
  Description of Artificial Sequence: Synthetic oligonucleotide
cacaaaguuggcagcugga

SEQ ID NO: 1551245 - RNA, 19 nt, Artificial Sequence
  Description of Artificial Sequence: Synthetic oligonucleotide
cuauaccaaguucacccaa

SEQ ID NO: 1551246 - RNA, 19 nt, Artificial Sequence
  Description of Artificial Sequence: Synthetic oligonucleotide
acacagacgaguaggugaa

SEQ ID NO: 1551247 - RNA, 19 nt, Artificial Sequence
  Description of Artificial Sequence: Synthetic oligonucleotide
accuaggccaacugccaaa

SEQ ID NO: 1551248 - RNA, 19 nt, Artificial Sequence
  Description of Artificial Sequence: Synthetic oligonucleotide
ggccucuauaccaaguuca

SEQ ID NO: 1551249 - RNA, 19 nt, Artificial Sequence
  Description of Artificial Sequence: Synthetic oligonucleotide
ggugggaccuugugggcag

SEQ ID NO: 1551250 - RNA, 19 nt, Artificial Sequence
  Description of Artificial Sequence: Synthetic oligonucleotide
cucagcuaaguccuggccu

SEQ ID NO: 1551251 - RNA, 19 nt, Artificial Sequence
  Description of Artificial Sequence: Synthetic oligonucleotide
gcggguguuggccacauga

SEQ ID NO: 1551252 - RNA, 19 nt, Artificial Sequence
  Description of Artificial Sequence: Synthetic oligonucleotide
cucgugcuuccucuggauc

SEQ ID NO: 1551253 - RNA, 19 nt, Artificial Sequence
  Description of Artificial Sequence: Synthetic oligonucleotide
ccgauuuggaacguugcag

SEQ ID NO: 1551254 - RNA, 19 nt, Artificial Sequence
  Description of Artificial Sequence: Synthetic oligonucleotide
caccccguaggggacacgc

SEQ ID NO: 1551255 - RNA, 19 nt, Artificial Sequence
  Description of Artificial Sequence: Synthetic oligonucleotide
ggacaaggugccaacugcc

SEQ ID NO: 1551256 - RNA, 19 nt, Artificial Sequence
  Description of Artificial Sequence: Synthetic oligonucleotide
gaagaagggcugucgggcu

SEQ ID NO: 1551257 - RNA, 19 nt, Artificial Sequence
  Description of Artificial Sequence: Synthetic oligonucleotide
gacacgggacuaucacaca

SEQ ID NO: 1551258 - RNA, 19 nt, Artificial Sequence
  Description of Artificial Sequence: Synthetic oligonucleotide
cauugcgcucuauuacaga

SEQ ID NO: 1551259 - RNA, 19 nt, Artificial Sequence
  Description of Artificial Sequence: Synthetic oligonucleotide
ggaggaaacggagccucgg

SEQ ID NO: 1551260 - RNA, 19 nt, Artificial Sequence
  Description of Artificial Sequence: Synthetic oligonucleotide
cuggucugccgaaggcagc

SEQ ID NO: 1551261 - RNA, 19 nt, Artificial Sequence
  Description of Artificial Sequence: Synthetic oligonucleotide
gguccgauuuggaacguug

SEQ ID NO: 1551262 - RNA, 19 nt, Artificial Sequence
  Description of Artificial Sequence: Synthetic oligonucleotide
caggcguucggcuggccuc

SEQ ID NO: 1551263 - RNA, 19 nt, Artificial Sequence
  Description of Artificial Sequence: Synthetic oligonucleotide
uugcuaggugagccacccc

SEQ ID NO: 1551264 - RNA, 19 nt, Artificial Sequence
  Description of Artificial Sequence: Synthetic oligonucleotide
uccuggcggguguuggcca

SEQ ID NO: 1551265 - RNA, 19 nt, Artificial Sequence
  Description of Artificial Sequence: Synthetic oligonucleotide
guucggcuggccucagcug

SEQ ID NO: 1551266 - RNA, 19 nt, Artificial Sequence
  Description of Artificial Sequence: Synthetic oligonucleotide
gcuccuaaccagucccucc

SEQ ID NO: 1551267 - RNA, 19 nt, Artificial Sequence
  Description of Artificial Sequence: Synthetic oligonucleotide
ggggacgaacauccacucg

SEQ ID NO: 1551268 - RNA, 19 nt, Artificial Sequence
  Description of Artificial Sequence: Synthetic oligonucleotide
accuagcccucaguagccg

SEQ ID NO: 1551269 - RNA, 19 nt, Artificial Sequence
  Description of Artificial Sequence: Synthetic oligonucleotide
ugguagcagguagcuuggg

SEQ ID NO: 1551270 - RNA, 19 nt, Artificial Sequence
  Description of Artificial Sequence: Synthetic oligonucleotide
agcauuagauggaucccau

SEQ ID NO: 1551271 - RNA, 19 nt, Artificial Sequence
  Description of Artificial Sequence: Synthetic oligonucleotide
cagacaccccguaggggac

SEQ ID NO: 1551272 - RNA, 19 nt, Artificial Sequence
  Description of Artificial Sequence: Synthetic oligonucleotide
uagcccucaguagccggag

SEQ ID NO: 1551273 - RNA, 19 nt, Artificial Sequence
  Description of Artificial Sequence: Synthetic oligonucleotide
ugucaacguccagcugggg

SEQ ID NO: 1551274 - RNA, 19 nt, Artificial Sequence
  Description of Artificial Sequence: Synthetic oligonucleotide
ggggacacgggacuaucac

SEQ ID NO: 1551275 - RNA, 19 nt, Artificial Sequence
  Description of Artificial Sequence: Synthetic oligonucleotide
gucccuccuauaguuuacc

SEQ ID NO: 1551276 - RNA, 19 nt, Artificial Sequence
  Description of Artificial Sequence: Synthetic oligonucleotide
caggggacgaacauccacu

SEQ ID NO: 1551277 - RNA, 19 nt, Artificial Sequence
  Description of Artificial Sequence: Synthetic oligonucleotide
acgggcauugcgcucuauu

SEQ ID NO: 1551278 - RNA, 19 nt, Artificial Sequence
  Description of Artificial Sequence: Synthetic oligonucleotide
caauauccgagcuggcccu

SEQ ID NO: 1551279 - RNA, 19 nt, Artificial Sequence
  Description of Artificial Sequence: Synthetic oligonucleotide
cacuugaucacacgggcau

SEQ ID NO: 1551280 - RNA, 19 nt, Artificial Sequence
  Description of Artificial Sequence: Synthetic oligonucleotide
cucgcucagguccgauuug

SEQ ID NO: 1551281 - RNA, 19 nt, Artificial Sequence
  Description of Artificial Sequence: Synthetic oligonucleotide
cugccgcaacccauacagc

SEQ ID NO: 1551282 - RNA, 19 nt, Artificial Sequence
  Description of Artificial Sequence: Synthetic oligonucleotide
gccgaaggcagccaaugga

SEQ ID NO: 1551283 - RNA, 19 nt, Artificial Sequence
  Description of Artificial Sequence: Synthetic oligonucleotide
uccuaaccagucccuccua

SEQ ID NO: 1551284 - RNA, 19 nt, Artificial Sequence
  Description of Artificial Sequence: Synthetic oligonucleotide
gcaggggacgaacauccac

SEQ ID NO: 1551285 - RNA, 19 nt, Artificial Sequence
  Description of Artificial Sequence: Synthetic oligonucleotide
cuaaccagucccuccuaua

SEQ ID NO: 1551286 - RNA, 19 nt, Artificial Sequence
  Description of Artificial Sequence: Synthetic oligonucleotide
ccugcguccaggacagggc

SEQ ID NO: 1551287 - RNA, 19 nt, Artificial Sequence
  Description of Artificial Sequence: Synthetic oligonucleotide
cuugguucgcaggcgaaaa

SEQ ID NO: 1551288 - RNA, 19 nt, Artificial Sequence
  Description of Artificial Sequence: Synthetic oligonucleotide
ggaucccauccucucaauc

SEQ ID NO: 1551289 - RNA, 19 nt, Artificial Sequence
  Description of Artificial Sequence: Synthetic oligonucleotide
aauauccgagcuggcccuu

SEQ ID NO: 1551290 - RNA, 19 nt, Artificial Sequence
  Description of Artificial Sequence: Synthetic oligonucleotide
cuauuacagacaccccgua

SEQ ID NO: 1551291 - RNA, 19 nt, Artificial Sequence
  Description of Artificial Sequence: Synthetic oligonucleotide
uccgggagaccuagcccuc

SEQ ID NO: 1551292 - RNA, 19 nt, Artificial Sequence
  Description of Artificial Sequence: Synthetic oligonucleotide
uuuacccaccuaggccaac

SEQ ID NO: 1551293 - RNA, 19 nt, Artificial Sequence
  Description of Artificial Sequence: Synthetic oligonucleotide
gggacacgggacuaucaca

SEQ ID NO: 1551294 - RNA, 19 nt, Artificial Sequence
  Description of Artificial Sequence: Synthetic oligonucleotide
cugcguccaggacagggca

SEQ ID NO: 1551295 - RNA, 19 nt, Artificial Sequence
  Description of Artificial Sequence: Synthetic oligonucleotide
caugaaggcuuuugacgua

SEQ ID NO: 1551296 - RNA, 19 nt, Artificial Sequence
  Description of Artificial Sequence: Synthetic oligonucleotide
aggugccaacugccgcuuc

SEQ ID NO: 1551297 - RNA, 19 nt, Artificial Sequence
  Description of Artificial Sequence: Synthetic oligonucleotide
guacuaggcgguggacgag

SEQ ID NO: 1551298 - RNA, 19 nt, Artificial Sequence
  Description of Artificial Sequence: Synthetic oligonucleotide
uggaucccauccucucaau

SEQ ID NO: 1551299 - RNA, 19 nt, Artificial Sequence
  Description of Artificial Sequence: Synthetic oligonucleotide
aacggagccucggggcaga

SEQ ID NO: 1551300 - RNA, 19 nt, Artificial Sequence
  Description of Artificial Sequence: Synthetic oligonucleotide
gccugcguccaggacaggg

SEQ ID NO: 1551301 - RNA, 19 nt, Artificial Sequence
  Description of Artificial Sequence: Synthetic oligonucleotide
cuugggaccuugguucgca

SEQ ID NO: 1551302 - RNA, 19 nt, Artificial Sequence
  Description of Artificial Sequence: Synthetic oligonucleotide
aggaagccugaguccggga

SEQ ID NO: 1551303 - RNA, 19 nt, Artificial Sequence
  Description of Artificial Sequence: Synthetic oligonucleotide
cccguaggggacacgcucc

SEQ ID NO: 1551304 - RNA, 19 nt, Artificial Sequence
  Description of Artificial Sequence: Synthetic oligonucleotide
ccuaggccaacugccaaag

SEQ ID NO: 1551305 - RNA, 19 nt, Artificial Sequence
  Description of Artificial Sequence: Synthetic oligonucleotide
auccgagcuggcccuugcu

SEQ ID NO: 1551306 - RNA, 19 nt, Artificial Sequence
  Description of Artificial Sequence: Synthetic oligonucleotide
ccucuauaccaaguucacc

SEQ ID NO: 1551307 - RNA, 19 nt, Artificial Sequence
  Description of Artificial Sequence: Synthetic oligonucleotide
uggcaguuacaugccccga

SEQ ID NO: 1551308 - RNA, 19 nt, Artificial Sequence
  Description of Artificial Sequence: Synthetic oligonucleotide
auauccgagcuggcccuug

SEQ ID NO: 1551309 - RNA, 19 nt, Artificial Sequence
  Description of Artificial Sequence: Synthetic oligonucleotide
gcauuagauggaucccauc

SEQ ID NO: 1551310 - RNA, 19 nt, Artificial Sequence
  Description of Artificial Sequence: Synthetic oligonucleotide
ucuccuccccggagugagu

SEQ ID NO: 1551311 - RNA, 19 nt, Artificial Sequence
  Description of Artificial Sequence: Synthetic oligonucleotide
caugccccgagggccgagg

SEQ ID NO: 1551312 - RNA, 19 nt, Artificial Sequence
  Description of Artificial Sequence: Synthetic oligonucleotide
uccacgggcauggcaguua

SEQ ID NO: 1551313 - RNA, 19 nt, Artificial Sequence
  Description of Artificial Sequence: Synthetic oligonucleotide
guucccaacucagcuaagu

SEQ ID NO: 1551314 - RNA, 19 nt, Artificial Sequence
  Description of Artificial Sequence: Synthetic oligonucleotide
cugcaagguccagcacucg

SEQ ID NO: 1551315 - RNA, 19 nt, Artificial Sequence
  Description of Artificial Sequence: Synthetic oligonucleotide
agccugaguccgggagacc

SEQ ID NO: 1551316 - RNA, 19 nt, Artificial Sequence
  Description of Artificial Sequence: Synthetic oligonucleotide
uggcccuugcuaggugagc

SEQ ID NO: 1551317 - RNA, 19 nt, Artificial Sequence
  Description of Artificial Sequence: Synthetic oligonucleotide
cugcccguccaggcguucg

SEQ ID NO: 1551318 - RNA, 19 nt, Artificial Sequence
  Description of Artificial Sequence: Synthetic oligonucleotide
cccuccuauaguuuaccca

SEQ ID NO: 1551319 - RNA, 19 nt, Artificial Sequence
  Description of Artificial Sequence: Synthetic oligonucleotide
guucgcaggcgaaaaggua

SEQ ID NO: 1551320 - RNA, 19 nt, Artificial Sequence
  Description of Artificial Sequence: Synthetic oligonucleotide
gaacauccacucggcgcac

SEQ ID NO: 1551321 - RNA, 19 nt, Artificial Sequence
  Description of Artificial Sequence: Synthetic oligonucleotide
acucggcgcacggcgacug

SEQ ID NO: 1551322 - RNA, 19 nt, Artificial Sequence
  Description of Artificial Sequence: Synthetic oligonucleotide
ccgcaacccauacagccac

SEQ ID NO: 1551323 - RNA, 19 nt, Artificial Sequence
  Description of Artificial Sequence: Synthetic oligonucleotide
uuccgggcucccgcaacug

SEQ ID NO: 1551324 - RNA, 19 nt, Artificial Sequence
  Description of Artificial Sequence: Synthetic oligonucleotide
gacaccccguaggggacac

SEQ ID NO: 1551325 - RNA, 19 nt, Artificial Sequence
  Description of Artificial Sequence: Synthetic oligonucleotide
gguggacgaggaggggugg

SEQ ID NO: 1551326 - RNA, 19 nt, Artificial Sequence
  Description of Artificial Sequence: Synthetic oligonucleotide
cuccccggagugaguuccc

SEQ ID NO: 1551327 - RNA, 19 nt, Artificial Sequence
  Description of Artificial Sequence: Synthetic oligonucleotide
cacagacgaguaggugaag

SEQ ID NO: 1551328 - RNA, 19 nt, Artificial Sequence
  Description of Artificial Sequence: Synthetic oligonucleotide
gccucuauaccaaguucac

SEQ ID NO: 1551329 - RNA, 19 nt, Artificial Sequence
  Description of Artificial Sequence: Synthetic oligonucleotide
gcccauucgguaaggaaga

SEQ ID NO: 1551330 - RNA, 19 nt, Artificial Sequence
  Description of Artificial Sequence: Synthetic oligonucleotide
gcucuauuacagacacccc

SEQ ID NO: 1551331 - RNA, 19 nt, Artificial Sequence
  Description of Artificial Sequence: Synthetic oligonucleotide
cacucggcuuccgggcucc

SEQ ID NO: 1551332 - RNA, 19 nt, Artificial Sequence
  Description of Artificial Sequence: Synthetic oligonucleotide
ggacuaucacacagguuga

SEQ ID NO: 1551333 - RNA, 19 nt, Artificial Sequence
  Description of Artificial Sequence: Synthetic oligonucleotide
acuaggcgguggacgagga

SEQ ID NO: 1551334 - RNA, 19 nt, Artificial Sequence
  Description of Artificial Sequence: Synthetic oligonucleotide
gcucgaggucagcugcugc

SEQ ID NO: 1551335 - RNA, 19 nt, Artificial Sequence
  Description of Artificial Sequence: Synthetic oligonucleotide
gguagcuugggaccuuggu

SEQ ID NO: 1551336 - RNA, 19 nt, Artificial Sequence
  Description of Artificial Sequence: Synthetic oligonucleotide
cuggggacacgggacuauc

SEQ ID NO: 1551337 - RNA, 19 nt, Artificial Sequence
  Description of Artificial Sequence: Synthetic oligonucleotide
cuaggccaacugccaaaga

SEQ ID NO: 1551338 - RNA, 19 nt, Artificial Sequence
  Description of Artificial Sequence: Synthetic oligonucleotide
agacaccccguaggggaca

SEQ ID NO: 1551339 - RNA, 19 nt, Artificial Sequence
  Description of Artificial Sequence: Synthetic oligonucleotide
aggcguucggcuggccuca

SEQ ID NO: 1551340 - RNA, 19 nt, Artificial Sequence
  Description of Artificial Sequence: Synthetic oligonucleotide
cgcacggcgacuguacuag

SEQ ID NO: 1551341 - RNA, 19 nt, Artificial Sequence
  Description of Artificial Sequence: Synthetic oligonucleotide
caccuaggccaacugccaa

SEQ ID NO: 1551342 - RNA, 19 nt, Artificial Sequence
  Description of Artificial Sequence: Synthetic oligonucleotide
cccacgagcagcgcugaag

SEQ ID NO: 1551343 - RNA, 19 nt, Artificial Sequence
  Description of Artificial Sequence: Synthetic oligonucleotide
ccaauccucgugcuuccuc

SEQ ID NO: 1551344 - RNA, 19 nt, Artificial Sequence
  Description of Artificial Sequence: Synthetic oligonucleotide
uacaugccccgagggccga

SEQ ID NO: 1551345 - RNA, 19 nt, Artificial Sequence
  Description of Artificial Sequence: Synthetic oligonucleotide
ggcgauggacacagacgag

SEQ ID NO: 1551346 - RNA, 19 nt, Artificial Sequence
  Description of Artificial Sequence: Synthetic oligonucleotide
cacgggccugccgcaaccc

SEQ ID NO: 1551347 - RNA, 19 nt, Artificial Sequence
  Description of Artificial Sequence: Synthetic oligonucleotide
gacuaucacacagguugau

SEQ ID NO: 1551348 - RNA, 19 nt, Artificial Sequence
  Description of Artificial Sequence: Synthetic oligonucleotide
cagcguguccacgggcaug

SEQ ID NO: 1551349 - RNA, 19 nt, Artificial Sequence
  Description of Artificial Sequence: Synthetic oligonucleotide
ggcccggcuagagagacaa

SEQ ID NO: 1551350 - RNA, 19 nt, Artificial Sequence
  Description of Artificial Sequence: Synthetic oligonucleotide
cuggccucuauaccaaguu

SEQ ID NO: 1551351 - RNA, 19 nt, Artificial Sequence
  Description of Artificial Sequence: Synthetic oligonucleotide
aggcuccuaaccagucccu

SEQ ID NO: 1551352 - RNA, 19 nt, Artificial Sequence
  Description of Artificial Sequence: Synthetic oligonucleotide
ccacuugaucacacgggca

SEQ ID NO: 1551353 - RNA, 19 nt, Artificial Sequence
  Description of Artificial Sequence: Synthetic oligonucleotide
cacacgggcauugcgcucu

SEQ ID NO: 1551354 - RNA, 19 nt, Artificial Sequence
  Description of Artificial Sequence: Synthetic oligonucleotide
gcgauggacacagacgagu

SEQ ID NO: 1551355 - RNA, 19 nt, Artificial Sequence
  Description of Artificial Sequence: Synthetic oligonucleotide
cacucggcccggcuagaga

SEQ ID NO: 1551356 - RNA, 19 nt, Artificial Sequence
  Description of Artificial Sequence: Synthetic oligonucleotide
ccccguaggggacacgcuc

SEQ ID NO: 1551357 - RNA, 19 nt, Artificial Sequence
  Description of Artificial Sequence: Synthetic oligonucleotide
ccguccaggcguucggcug

SEQ ID NO: 1551358 - RNA, 19 nt, Artificial Sequence
  Description of Artificial Sequence: Synthetic oligonucleotide
ucggcgcacggcgacugua

SEQ ID NO: 1551359 - RNA, 19 nt, Artificial Sequence
  Description of Artificial Sequence: Synthetic oligonucleotide
guccuggccucuauaccaa

SEQ ID NO: 1551360 - RNA, 19 nt, Artificial Sequence
  Description of Artificial Sequence: Synthetic oligonucleotide
agacaggcuuggccaggua

SEQ ID NO: 1551361 - RNA, 19 nt, Artificial Sequence
  Description of Artificial Sequence: Synthetic oligonucleotide
cucggcccggcuagagaga

SEQ ID NO: 1551362 - RNA, 19 nt, Artificial Sequence
  Description of Artificial Sequence: Synthetic oligonucleotide
gguccagcacucggcccgg

SEQ ID NO: 1551363 - RNA, 19 nt, Artificial Sequence
  Description of Artificial Sequence: Synthetic oligonucleotide
gccgcaacccauacagcca

SEQ ID NO: 1551364 - RNA, 19 nt, Artificial Sequence
  Description of Artificial Sequence: Synthetic oligonucleotide
ccaccuaggccaacugcca

SEQ ID NO: 1551365 - RNA, 19 nt, Artificial Sequence
  Description of Artificial Sequence: Synthetic oligonucleotide
gggacacgcuccagggccc

SEQ ID NO: 1551366 - RNA, 19 nt, Artificial Sequence
  Description of Artificial Sequence: Synthetic oligonucleotide
accuugguucgcaggcgaa

SEQ ID NO: 1551367 - RNA, 19 nt, Artificial Sequence
  Description of Artificial Sequence: Synthetic oligonucleotide
agguccgauuuggaacguu

SEQ ID NO: 1551368 - RNA, 19 nt, Artificial Sequence
  Description of Artificial Sequence: Synthetic oligonucleotide
cuuccgggcucccgcaacu

SEQ ID NO: 1551369 - RNA, 19 nt, Artificial Sequence
  Description of Artificial Sequence: Synthetic oligonucleotide
uggcggguguuggccacau

SEQ ID NO: 1551370 - RNA, 19 nt, Artificial Sequence
  Description of Artificial Sequence: Synthetic oligonucleotide
ggcuccuaaccagucccuc

SEQ ID NO: 1551371 - RNA, 19 nt, Artificial Sequence
  Description of Artificial Sequence: Synthetic oligonucleotide
acaugccccgagggccgag

SEQ ID NO: 1551372 - RNA, 19 nt, Artificial Sequence
  Description of Artificial Sequence: Synthetic oligonucleotide
ccuauaguuuacccaccua

SEQ ID NO: 1551373 - RNA, 19 nt, Artificial Sequence
  Description of Artificial Sequence: Synthetic oligonucleotide
cccauucgguaaggaagag

SEQ ID NO: 1551374 - RNA, 19 nt, Artificial Sequence
  Description of Artificial Sequence: Synthetic oligonucleotide
uccaggcguucggcuggcc

SEQ ID NO: 1551375 - RNA, 19 nt, Artificial Sequence
  Description of Artificial Sequence: Synthetic oligonucleotide
gcucgcucagguccgauuu

SEQ ID NO: 1551376 - RNA, 19 nt, Artificial Sequence
  Description of Artificial Sequence: Synthetic oligonucleotide
ggcagauccuucugcccgu

SEQ ID NO: 1551377 - RNA, 19 nt, Artificial Sequence
  Description of Artificial Sequence: Synthetic oligonucleotide
cccggcuagagagacaaua

SEQ ID NO: 1551378 - RNA, 19 nt, Artificial Sequence
  Description of Artificial Sequence: Synthetic oligonucleotide
ggccugccgcaacccauac

SEQ ID NO: 1551379 - RNA, 19 nt, Artificial Sequence
  Description of Artificial Sequence: Synthetic oligonucleotide
ggccggccugggcuagagg

SEQ ID NO: 1551380 - RNA, 19 nt, Artificial Sequence
  Description of Artificial Sequence: Synthetic oligonucleotide
ggcuagagguggcaguguu

SEQ ID NO: 1551381 - RNA, 19 nt, Artificial Sequence
  Description of Artificial Sequence: Synthetic oligonucleotide
accccguaggggacacgcu

SEQ ID NO: 1551382 - RNA, 19 nt, Artificial Sequence
  Description of Artificial Sequence: Synthetic oligonucleotide
ggcgacuguacuaggcggu

SEQ ID NO: 1551383 - RNA, 19 nt, Artificial Sequence
  Description of Artificial Sequence: Synthetic oligonucleotide
cgcaggcgaaaagguaggg

SEQ ID NO: 1551384 - RNA, 19 nt, Artificial Sequence
  Description of Artificial Sequence: Synthetic oligonucleotide
gcgaaaagguaggguggga

SEQ ID NO: 1551385 - RNA, 19 nt, Artificial Sequence
  Description of Artificial Sequence: Synthetic oligonucleotide
gcacucggcccggcuagag

SEQ ID NO: 1551386 - RNA, 19 nt, Artificial Sequence
  Description of Artificial Sequence: Synthetic oligonucleotide
acacgggcauugcgcucua

SEQ ID NO: 1551387 - RNA, 19 nt, Artificial Sequence
  Description of Artificial Sequence: Synthetic oligonucleotide
ccggcuagagagacaauau

SEQ ID NO: 1551388 - RNA, 19 nt, Artificial Sequence
  Description of Artificial Sequence: Synthetic oligonucleotide
ggcaguguugccaggcgau

SEQ ID NO: 1551389 - RNA, 19 nt, Artificial Sequence
  Description of Artificial Sequence: Synthetic oligonucleotide
cgggcauugcgcucuauua

SEQ ID NO: 1551390 - RNA, 19 nt, Artificial Sequence
  Description of Artificial Sequence: Synthetic oligonucleotide
gcuaaguccuggccucuau

SEQ ID NO: 1551391 - RNA, 19 nt, Artificial Sequence
  Description of Artificial Sequence: Synthetic oligonucleotide
gccuugguagcagguagcu

SEQ ID NO: 1551392 - RNA, 19 nt, Artificial Sequence
  Description of Artificial Sequence: Synthetic oligonucleotide
cagacaggcuuggccaggu

SEQ ID NO: 1551393 - RNA, 19 nt, Artificial Sequence
  Description of Artificial Sequence: Synthetic oligonucleotide
gcgcucuauuacagacacc

SEQ ID NO: 1551394 - RNA, 19 nt, Artificial Sequence
  Description of Artificial Sequence: Synthetic oligonucleotide
ccggagugaguucccagua

SEQ ID NO: 1551395 - RNA, 19 nt, Artificial Sequence
  Description of Artificial Sequence: Synthetic oligonucleotide
uggccacaugaaggcuuuu

SEQ ID NO: 1551396 - RNA, 19 nt, Artificial Sequence
  Description of Artificial Sequence: Synthetic oligonucleotide
gccugccgcaacccauaca

SEQ ID NO: 1551397 - RNA, 19 nt, Artificial Sequence
  Description of Artificial Sequence: Synthetic oligonucleotide
ccgcuucacgauguccuuc

SEQ ID NO: 1551398 - RNA, 19 nt, Artificial Sequence
  Description of Artificial Sequence: Synthetic oligonucleotide
gcgcacggcgacuguacua

SEQ ID NO: 1551399 - RNA, 19 nt, Artificial Sequence
  Description of Artificial Sequence: Synthetic oligonucleotide
cgggagaccuagcccucag

SEQ ID NO: 1551400 - RNA, 19 nt, Artificial Sequence
  Description of Artificial Sequence: Synthetic oligonucleotide
gggagaccuagcccucagu

SEQ ID NO: 1551401 - RNA, 19 nt, Artificial Sequence
  Description of Artificial Sequence: Synthetic oligonucleotide
ggcggguguuggccacaug

SEQ ID NO: 1551402 - RNA, 19 nt, Artificial Sequence
  Description of Artificial Sequence: Synthetic oligonucleotide
cguucggcuggccucagcu

SEQ ID NO: 1551403 - RNA, 19 nt, Artificial Sequence
  Description of Artificial Sequence: Synthetic oligonucleotide
gcguucggcuggccucagc

SEQ ID NO: 1551404 - RNA, 19 nt, Artificial Sequence
  Description of Artificial Sequence: Synthetic oligonucleotide
gugggaccuugugggcaga

SEQ ID NO: 1551405 - RNA, 19 nt, Artificial Sequence
  Description of Artificial Sequence: Synthetic oligonucleotide
ccuugguucgcaggcgaaa

SEQ ID NO: 1551406 - RNA, 19 nt, Artificial Sequence
  Description of Artificial Sequence: Synthetic oligonucleotide
gggccggccugggcuagag

SEQ ID NO: 1551407 - RNA, 19 nt, Artificial Sequence
  Description of Artificial Sequence: Synthetic oligonucleotide
ggucugccgaaggcagcca

SEQ ID NO: 1551408 - RNA, 19 nt, Artificial Sequence
  Description of Artificial Sequence: Synthetic oligonucleotide
ccguaggggacacgcucca

SEQ ID NO: 1551409 - RNA, 19 nt, Artificial Sequence
  Description of Artificial Sequence: Synthetic oligonucleotide
gcccguccaggcguucggc

SEQ ID NO: 1551410 - RNA, 19 nt, Artificial Sequence
  Description of Artificial Sequence: Synthetic oligonucleotide
ccuaaccagucccuccuau

SEQ ID NO: 1551411 - RNA, 19 nt, Artificial Sequence
  Description of Artificial Sequence: Synthetic oligonucleotide
ggcaggggacgaacaucca

SEQ ID NO: 1551412 - RNA, 19 nt, Artificial Sequence
  Description of Artificial Sequence: Synthetic oligonucleotide
ggcgcacggcgacuguacu

SEQ ID NO: 1551413 - RNA, 19 nt, Artificial Sequence
  Description of Artificial Sequence: Synthetic oligonucleotide
gcggugugaacagccgccu

SEQ ID NO: 1551414 - RNA, 19 nt, Artificial Sequence
  Description of Artificial Sequence: Synthetic oligonucleotide
ccgcaacugcuggccuugg

SEQ ID NO: 1551415 - RNA, 19 nt, Artificial Sequence
  Description of Artificial Sequence: Synthetic oligonucleotide
ggcguucggcuggccucag

SEQ ID NO: 1551416 - RNA, 19 nt, Artificial Sequence
  Description of Artificial Sequence: Synthetic oligonucleotide
ccaggcguucggcuggccu

SEQ ID NO: 1551417 - RNA, 19 nt, Artificial Sequence
  Description of Artificial Sequence: Synthetic oligonucleotide
gggccugccgcaacccaua

SEQ ID NO: 1551418 - RNA, 19 nt, Artificial Sequence
  Description of Artificial Sequence: Synthetic oligonucleotide
cagguccgauuuggaacgu

SEQ ID NO: 1551419 - RNA, 19 nt, Artificial Sequence
  Description of Artificial Sequence: Synthetic oligonucleotide
cgcucgaggucagcugcug

SEQ ID NO: 1551420 - RNA, 19 nt, Artificial Sequence
  Description of Artificial Sequence: Synthetic oligonucleotide
gccgcuucacgauguccuu

SEQ ID NO: 1551421 - RNA, 19 nt, Artificial Sequence
  Description of Artificial Sequence: Synthetic oligonucleotide
cucggcgcacggcgacugu

SEQ ID NO: 1551422 - RNA, 19 nt, Artificial Sequence
  Description of Artificial Sequence: Synthetic oligonucleotide
cacucggcgcacggcgacu

SEQ ID NO: 1551423 - RNA, 19 nt, Artificial Sequence
  Description of Artificial Sequence: Synthetic oligonucleotide
cgaggcgaggagacagaua

SEQ ID NO: 1551424 - RNA, 19 nt, Artificial Sequence
  Description of Artificial Sequence: Synthetic oligonucleotide
cccguccaggcguucggcu

SEQ ID NO: 1551425 - RNA, 19 nt, Artificial Sequence
  Description of Artificial Sequence: Synthetic oligonucleotide
ccgggagaccuagcccuca

SEQ ID NO: 1551426 - RNA, 19 nt, Artificial Sequence
  Description of Artificial Sequence: Synthetic oligonucleotide
gcccacgagcagcgcugaa

SEQ ID NO: 1551427 - RNA, 19 nt, Artificial Sequence
  Description of Artificial Sequence: Synthetic oligonucleotide
gcagguagcuugggaccuu

SEQ ID NO: 1551428 - RNA, 19 nt, Artificial Sequence
  Description of Artificial Sequence: Synthetic oligonucleotide
gccaggcgauggacacaga

SEQ ID NO: 1551429 - RNA, 19 nt, Artificial Sequence
  Description of Artificial Sequence: Synthetic oligonucleotide
ggggccggccugggcuaga

SEQ ID NO: 1551430 - RNA, 19 nt, Artificial Sequence
  Description of Artificial Sequence: Synthetic oligonucleotide
cacgggcauugcgcucuau

SEQ ID NO: 1551431 - RNA, 19 nt, Artificial Sequence
  Description of Artificial Sequence: Synthetic oligonucleotide
cggcccggcuagagagaca

SEQ ID NO: 1551432 - RNA, 19 nt, Artificial Sequence
  Description of Artificial Sequence: Synthetic oligonucleotide
cgcucgcucagguccgauu

SEQ ID NO: 1551433 - RNA, 19 nt, Artificial Sequence
  Description of Artificial Sequence: Synthetic oligonucleotide
cggugugaacagccgccuu

SEQ ID NO: 1551434 - RNA, 19 nt, Artificial Sequence
  Description of Artificial Sequence: Synthetic oligonucleotide
gcgcucgcucagguccgau

SEQ ID NO: 1551435 - RNA, 19 nt, Artificial Sequence
  Description of Artificial Sequence: Synthetic oligonucleotide
gcccggcuagagagacaau

SEQ ID NO: 1551436 - RNA, 19 nt, Artificial Sequence
  Description of Artificial Sequence: Synthetic oligonucleotide
aaaguuagcgaguagagag

SEQ ID NO: 1551437 - RNA, 19 nt, Artificial Sequence
  Description of Artificial Sequence: Synthetic oligonucleotide
aacgggauuauccacaggc

SEQ ID NO: 1551438 - RNA, 19 nt, Artificial Sequence
  Description of Artificial Sequence: Synthetic oligonucleotide
agaaucuuuauucaaaggg

SEQ ID NO: 1551439 - RNA, 19 nt, Artificial Sequence
  Description of Artificial Sequence: Synthetic oligonucleotide
aaugcaaacgggauuaucc

SEQ ID NO: 1551440 - RNA, 19 nt, Artificial Sequence
  Description of Artificial Sequence: Synthetic oligonucleotide
auagaggccaaucaggacc

SEQ ID NO: 1551441 - RNA, 19 nt, Artificial Sequence
  Description of Artificial Sequence: Synthetic oligonucleotide
aauaauuggagaccacguc

SEQ ID NO: 1551442 - RNA, 19 nt, Artificial Sequence
  Description of Artificial Sequence: Synthetic oligonucleotide
gaaguguucaaagacauag

SEQ ID NO: 1551443 - RNA, 19 nt, Artificial Sequence
  Description of Artificial Sequence: Synthetic oligonucleotide
aaaggauaauauucuuccg

SEQ ID NO: 1551444 - RNA, 19 nt, Artificial Sequence
  Description of Artificial Sequence: Synthetic oligonucleotide
agagugaauagaaauagac

SEQ ID NO: 1551445 - RNA, 19 nt, Artificial Sequence
  Description of Artificial Sequence: Synthetic oligonucleotide
aaccagaucauguauuuga

SEQ ID NO: 1551446 - RNA, 19 nt, Artificial Sequence
  Description of Artificial Sequence: Synthetic oligonucleotide
ugaaguuaggugaugucag

SEQ ID NO: 1551447 - RNA, 19 nt, Artificial Sequence
  Description of Artificial Sequence: Synthetic oligonucleotide
uauucaaagggaaccagca

SEQ ID NO: 1551448 - RNA, 19 nt, Artificial Sequence
  Description of Artificial Sequence: Synthetic oligonucleotide
caugacaggaugaaguuag

SEQ ID NO: 1551449 - RNA, 19 nt, Artificial Sequence
  Description of Artificial Sequence: Synthetic oligonucleotide
aaggaagacauaaauagga

SEQ ID NO: 1551450 - RNA, 19 nt, Artificial Sequence
  Description of Artificial Sequence: Synthetic oligonucleotide
aaagugacacgaagaaugc

SEQ ID NO: 1551451 - RNA, 19 nt, Artificial Sequence
  Description of Artificial Sequence: Synthetic oligonucleotide
agaagugccaacccuuagc

SEQ ID NO: 1551452 - RNA, 19 nt, Artificial Sequence
  Description of Artificial Sequence: Synthetic oligonucleotide
uuauucaaagggaaccagc

SEQ ID NO: 1551453 - RNA, 19 nt, Artificial Sequence
  Description of Artificial Sequence: Synthetic oligonucleotide
aaagacauagaggccaauc

SEQ ID NO: 1551454 - RNA, 19 nt, Artificial Sequence
  Description of Artificial Sequence: Synthetic oligonucleotide
acuguauacucuucgauca

SEQ ID NO: 1551455 - RNA, 19 nt, Artificial Sequence
  Description of Artificial Sequence: Synthetic oligonucleotide
gacacgaagaaugcaaacg

SEQ ID NO: 1551456 - RNA, 19 nt, Artificial Sequence
  Description of Artificial Sequence: Synthetic oligonucleotide
cucaguauaucuucugccg

SEQ ID NO: 1551457 - RNA, 19 nt, Artificial Sequence
  Description of Artificial Sequence: Synthetic oligonucleotide
acgccaaucaugcuggugg

SEQ ID NO: 1551458 - RNA, 19 nt, Artificial Sequence
  Description of Artificial Sequence: Synthetic oligonucleotide
uuagcgaguagagaggaag

SEQ ID NO: 1551459 - RNA, 19 nt, Artificial Sequence
  Description of Artificial Sequence: Synthetic oligonucleotide
guacaugaaccacauggcg

SEQ ID NO: 1551460 - RNA, 19 nt, Artificial Sequence
  Description of Artificial Sequence: Synthetic oligonucleotide
uuauccacccuuaucucug

SEQ ID NO: 1551461 - RNA, 19 nt, Artificial Sequence
  Description of Artificial Sequence: Synthetic oligonucleotide
gagugaauagaaauagacc

SEQ ID NO: 1551462 - RNA, 19 nt, Artificial Sequence
  Description of Artificial Sequence: Synthetic oligonucleotide
uagaggccaaucaggaccg

SEQ ID NO: 1551463 - RNA, 19 nt, Artificial Sequence
  Description of Artificial Sequence: Synthetic oligonucleotide
uaaugguucaccaccacua

SEQ ID NO: 1551464 - RNA, 19 nt, Artificial Sequence
  Description of Artificial Sequence: Synthetic oligonucleotide
agaaggccaaaguagacga

SEQ ID NO: 1551465 - RNA, 19 nt, Artificial Sequence
  Description of Artificial Sequence: Synthetic oligonucleotide
uucaaagggaaccagcauu

SEQ ID NO: 1551466 - RNA, 19 nt, Artificial Sequence
  Description of Artificial Sequence: Synthetic oligonucleotide
aaauaauuggagaccacgu

SEQ ID NO: 1551467 - RNA, 19 nt, Artificial Sequence
  Description of Artificial Sequence: Synthetic oligonucleotide
uggggaaguguucaaagac

SEQ ID NO: 1551468 - RNA, 19 nt, Artificial Sequence
  Description of Artificial Sequence: Synthetic oligonucleotide
aaacugccuuuauccaccc

SEQ ID NO: 1551469 - RNA, 19 nt, Artificial Sequence
  Description of Artificial Sequence: Synthetic oligonucleotide
aaaacugaaaugccaggua

SEQ ID NO: 1551470 - RNA, 19 nt, Artificial Sequence
  Description of Artificial Sequence: Synthetic oligonucleotide
gagaaggccaaaguagacg

SEQ ID NO: 1551471 - RNA, 19 nt, Artificial Sequence
  Description of Artificial Sequence: Synthetic oligonucleotide
uuuauccacccuuaucucu

SEQ ID NO: 1551472 - RNA, 19 nt, Artificial Sequence
  Description of Artificial Sequence: Synthetic oligonucleotide
ucaguauaucuucugccga

SEQ ID NO: 1551473 - RNA, 19 nt, Artificial Sequence
  Description of Artificial Sequence: Synthetic oligonucleotide
aaaaggcccacgccaauca

SEQ ID NO: 1551474 - RNA, 19 nt, Artificial Sequence
  Description of Artificial Sequence: Synthetic oligonucleotide
agacauaaauaggauauug

SEQ ID NO: 1551475 - RNA, 19 nt, Artificial Sequence
  Description of Artificial Sequence: Synthetic oligonucleotide
uuggugaaaaggcccacgc

SEQ ID NO: 1551476 - RNA, 19 nt, Artificial Sequence
  Description of Artificial Sequence: Synthetic oligonucleotide
ccuuuggugaaauaauugg

SEQ ID NO: 1551477 - RNA, 19 nt, Artificial Sequence
  Description of Artificial Sequence: Synthetic oligonucleotide
uccucaaaggaagacauaa

SEQ ID NO: 1551478 - RNA, 19 nt, Artificial Sequence
  Description of Artificial Sequence: Synthetic oligonucleotide
aagauggacuccuggggug

SEQ ID NO: 1551479 - RNA, 19 nt, Artificial Sequence
  Description of Artificial Sequence: Synthetic oligonucleotide
agguaguacaguccagccg

SEQ ID NO: 1551480 - RNA, 19 nt, Artificial Sequence
  Description of Artificial Sequence: Synthetic oligonucleotide
aaguuagcgaguagagagg

SEQ ID NO: 1551481 - RNA, 19 nt, Artificial Sequence
  Description of Artificial Sequence: Synthetic oligonucleotide
agucuaggcagaaaguuag

SEQ ID NO: 1551482 - RNA, 19 nt, Artificial Sequence
  Description of Artificial Sequence: Synthetic oligonucleotide
aaaguagacgagguuggug

SEQ ID NO: 1551483 - RNA, 19 nt, Artificial Sequence
  Description of Artificial Sequence: Synthetic oligonucleotide
guguucaaagacauagagg

SEQ ID NO: 1551484 - RNA, 19 nt, Artificial Sequence
  Description of Artificial Sequence: Synthetic oligonucleotide
cuagacuaucagucuaggg

SEQ ID NO: 1551485 - RNA, 19 nt, Artificial Sequence
  Description of Artificial Sequence: Synthetic oligonucleotide
augccuaagcgcuugccuc

SEQ ID NO: 1551486 - RNA, 19 nt, Artificial Sequence
  Description of Artificial Sequence: Synthetic oligonucleotide
uaauuggagaccacgucau

SEQ ID NO: 1551487 - RNA, 19 nt, Artificial Sequence
  Description of Artificial Sequence: Synthetic oligonucleotide
guuaggugaugucagcaug

SEQ ID NO: 1551488 - RNA, 19 nt, Artificial Sequence
  Description of Artificial Sequence: Synthetic oligonucleotide
aaggcuagcccagucuagg

SEQ ID NO: 1551489 - RNA, 19 nt, Artificial Sequence
  Description of Artificial Sequence: Synthetic oligonucleotide
uucgggacggggaaggcug

SEQ ID NO: 1551490 - RNA, 19 nt, Artificial Sequence
  Description of Artificial Sequence: Synthetic oligonucleotide
guauuugaugauucugcug

SEQ ID NO: 1551491 - RNA, 19 nt, Artificial Sequence
  Description of Artificial Sequence: Synthetic oligonucleotide
ucuagacuaucagucuagg

SEQ ID NO: 1551492 - RNA, 19 nt, Artificial Sequence
  Description of Artificial Sequence: Synthetic oligonucleotide
gaaguuaggugaugucagc

SEQ ID NO: 1551493 - RNA, 19 nt, Artificial Sequence
  Description of Artificial Sequence: Synthetic oligonucleotide
cacuguauacucuucgauc

SEQ ID NO: 1551494 - RNA, 19 nt, Artificial Sequence
  Description of Artificial Sequence: Synthetic oligonucleotide
aaguuaggugaugucagca

SEQ ID NO: 1551495 - RNA, 19 nt, Artificial Sequence
  Description of Artificial Sequence: Synthetic oligonucleotide
ugccgacuggguaggaugg

SEQ ID NO: 1551496 - RNA, 19 nt, Artificial Sequence
  Description of Artificial Sequence: Synthetic oligonucleotide
agggauggggcuucagaac

SEQ ID NO: 1551497 - RNA, 19 nt, Artificial Sequence
  Description of Artificial Sequence: Synthetic oligonucleotide
aaucaggaccgcuguggag

SEQ ID NO: 1551498 - RNA, 19 nt, Artificial Sequence
  Description of Artificial Sequence: Synthetic oligonucleotide
ugccuaagcgcuugccucg

SEQ ID NO: 1551499 - RNA, 19 nt, Artificial Sequence
  Description of Artificial Sequence: Synthetic oligonucleotide
gacuccugggguguuaagg

SEQ ID NO: 1551500 - RNA, 19 nt, Artificial Sequence
  Description of Artificial Sequence: Synthetic oligonucleotide
acuaucagucuagggaagg

SEQ ID NO: 1551501 - RNA, 19 nt, Artificial Sequence
  Description of Artificial Sequence: Synthetic oligonucleotide
aagacacccuccaggcucc

SEQ ID NO: 1551502 - RNA, 19 nt, Artificial Sequence
  Description of Artificial Sequence: Synthetic oligonucleotide
agaaaccucuucuuuuccu

SEQ ID NO: 1551503 - RNA, 19 nt, Artificial Sequence
  Description of Artificial Sequence: Synthetic oligonucleotide
gggguguuaaggcaaacag

SEQ ID NO: 1551504 - RNA, 19 nt, Artificial Sequence
  Description of Artificial Sequence: Synthetic oligonucleotide
acugaaaugccagguaaug

SEQ ID NO: 1551505 - RNA, 19 nt, Artificial Sequence
  Description of Artificial Sequence: Synthetic oligonucleotide
aaacgggauuauccacagg

SEQ ID NO: 1551506 - RNA, 19 nt, Artificial Sequence
  Description of Artificial Sequence: Synthetic oligonucleotide
caaacgggauuauccacag

SEQ ID NO: 1551507 - RNA, 19 nt, Artificial Sequence
  Description of Artificial Sequence: Synthetic oligonucleotide
augcaaacgggauuaucca

SEQ ID NO: 1551508 - RNA, 19 nt, Artificial Sequence
  Description of Artificial Sequence: Synthetic oligonucleotide
agauagaauucaccaagaa

SEQ ID NO: 1551509 - RNA, 19 nt, Artificial Sequence
  Description of Artificial Sequence: Synthetic oligonucleotide
aaugugaaguaggccagga

SEQ ID NO: 1551510 - RNA, 19 nt, Artificial Sequence
  Description of Artificial Sequence: Synthetic oligonucleotide
uuaaggcaaacagugccac

SEQ ID NO: 1551511 - RNA, 19 nt, Artificial Sequence
  Description of Artificial Sequence: Synthetic oligonucleotide
agaaccagaucauguauuu

SEQ ID NO: 1551512 - RNA, 19 nt, Artificial Sequence
  Description of Artificial Sequence: Synthetic oligonucleotide
ugcaaacgggauuauccac

SEQ ID NO: 1551513 - RNA, 19 nt, Artificial Sequence
  Description of Artificial Sequence: Synthetic oligonucleotide
agccgaaagugacacgaag

SEQ ID NO: 1551514 - RNA, 19 nt, Artificial Sequence
  Description of Artificial Sequence: Synthetic oligonucleotide
caguauaucuucugccgac

SEQ ID NO: 1551515 - RNA, 19 nt, Artificial Sequence
  Description of Artificial Sequence: Synthetic oligonucleotide
auauuguagauggucuucu

SEQ ID NO: 1551516 - RNA, 19 nt, Artificial Sequence
  Description of Artificial Sequence: Synthetic oligonucleotide
guacaguccagccgcgacg

SEQ ID NO: 1551517 - RNA, 19 nt, Artificial Sequence
  Description of Artificial Sequence: Synthetic oligonucleotide
uagcgaguagagaggaaga

SEQ ID NO: 1551518 - RNA, 19 nt, Artificial Sequence
  Description of Artificial Sequence: Synthetic oligonucleotide
cacaagaauuucuucagaa

SEQ ID NO: 1551519 - RNA, 19 nt, Artificial Sequence
  Description of Artificial Sequence: Synthetic oligonucleotide
uccuauggucaccugccug

SEQ ID NO: 1551520 - RNA, 19 nt, Artificial Sequence
  Description of Artificial Sequence: Synthetic oligonucleotide
aucagucuagggaaggaag

SEQ ID NO: 1551521 - RNA, 19 nt, Artificial Sequence
  Description of Artificial Sequence: Synthetic oligonucleotide
agcauuggacacaacagca

SEQ ID NO: 1551522 - RNA, 19 nt, Artificial Sequence
  Description of Artificial Sequence: Synthetic oligonucleotide
aacccuuagcuccuccuau

SEQ ID NO: 1551523 - RNA, 19 nt, Artificial Sequence
  Description of Artificial Sequence: Synthetic oligonucleotide
agugacacgaagaaugcaa

SEQ ID NO: 1551524 - RNA, 19 nt, Artificial Sequence
  Description of Artificial Sequence: Synthetic oligonucleotide
agggaaccagcauuggaca

SEQ ID NO: 1551525 - RNA, 19 nt, Artificial Sequence
  Description of Artificial Sequence: Synthetic oligonucleotide
uggagaaccagaucaugua

SEQ ID NO: 1551526 - RNA, 19 nt, Artificial Sequence
  Description of Artificial Sequence: Synthetic oligonucleotide
aggcuagcccagucuaggc

SEQ ID NO: 1551527 - RNA, 19 nt, Artificial Sequence
  Description of Artificial Sequence: Synthetic oligonucleotide
augaacagcgacagccagc

SEQ ID NO: 1551528 - RNA, 19 nt, Artificial Sequence
  Description of Artificial Sequence: Synthetic oligonucleotide
uccagaagugccaacccuu

SEQ ID NO: 1551529 - RNA, 19 nt, Artificial Sequence
  Description of Artificial Sequence: Synthetic oligonucleotide
uguggagaaccagaucaug

SEQ ID NO: 1551530 - RNA, 19 nt, Artificial Sequence
  Description of Artificial Sequence: Synthetic oligonucleotide
cugugccccagcuucacag

SEQ ID NO: 1551531 - RNA, 19 nt, Artificial Sequence
  Description of Artificial Sequence: Synthetic oligonucleotide
aacccgggcuggcagaaga

SEQ ID NO: 1551532 - RNA, 19 nt, Artificial Sequence
  Description of Artificial Sequence: Synthetic oligonucleotide
gaaaguuagcgaguagaga

SEQ ID NO: 1551533 - RNA, 19 nt, Artificial Sequence
  Description of Artificial Sequence: Synthetic oligonucleotide
acacccuccaggcuccuag

SEQ ID NO: 1551534 - RNA, 19 nt, Artificial Sequence
  Description of Artificial Sequence: Synthetic oligonucleotide
aguuagcgaguagagagga

SEQ ID NO: 1551535 - RNA, 19 nt, Artificial Sequence
  Description of Artificial Sequence: Synthetic oligonucleotide
agccgcgacggccagagug

SEQ ID NO: 1551536 - RNA, 19 nt, Artificial Sequence
  Description of Artificial Sequence: Synthetic oligonucleotide
ccagagugaauagaaauag

SEQ ID NO: 1551537 - RNA, 19 nt, Artificial Sequence
  Description of Artificial Sequence: Synthetic oligonucleotide
cagaaaguuagcgaguaga

SEQ ID NO: 1551538 - RNA, 19 nt, Artificial Sequence
  Description of Artificial Sequence: Synthetic oligonucleotide
caccaggaugccuaagcgc

SEQ ID NO: 1551539 - RNA, 19 nt, Artificial Sequence
  Description of Artificial Sequence: Synthetic oligonucleotide
acgaagaaugcaaacggga

SEQ ID NO: 1551540 - RNA, 19 nt, Artificial Sequence
  Description of Artificial Sequence: Synthetic oligonucleotide
gaaggucuggagaaggcca

SEQ ID NO: 1551541 - RNA, 19 nt, Artificial Sequence
  Description of Artificial Sequence: Synthetic oligonucleotide
aucuagacuaucagucuag

SEQ ID NO: 1551542 - RNA, 19 nt, Artificial Sequence
  Description of Artificial Sequence: Synthetic oligonucleotide
gacuucgggacggggaagg

SEQ ID NO: 1551543 - RNA, 19 nt, Artificial Sequence
  Description of Artificial Sequence: Synthetic oligonucleotide
gccaaaguagacgagguug

SEQ ID NO: 1551544 - RNA, 19 nt, Artificial Sequence
  Description of Artificial Sequence: Synthetic oligonucleotide
auucaaagggaaccagcau

SEQ ID NO: 1551545 - RNA, 19 nt, Artificial Sequence
  Description of Artificial Sequence: Synthetic oligonucleotide
aaguguucaaagacauaga

SEQ ID NO: 1551546 - RNA, 19 nt, Artificial Sequence
  Description of Artificial Sequence: Synthetic oligonucleotide
gcucaguauaucuucugcc

SEQ ID NO: 1551547 - RNA, 19 nt, Artificial Sequence
  Description of Artificial Sequence: Synthetic oligonucleotide
gagauagaauucaccaaga

SEQ ID NO: 1551548 - RNA, 19 nt, Artificial Sequence
  Description of Artificial Sequence: Synthetic oligonucleotide
ggcuccuaggcacuuagcc

SEQ ID NO: 1551549 - RNA, 19 nt, Artificial Sequence
  Description of Artificial Sequence: Synthetic oligonucleotide
uagacgagguuggugaaaa

SEQ ID NO: 1551550 - RNA, 19 nt, Artificial Sequence
  Description of Artificial Sequence: Synthetic oligonucleotide
aagacauaaauaggauauu

SEQ ID NO: 1551551 - RNA, 19 nt, Artificial Sequence
  Description of Artificial Sequence: Synthetic oligonucleotide
agccagacccgacuucggg

SEQ ID NO: 1551552 - RNA, 19 nt, Artificial Sequence
  Description of Artificial Sequence: Synthetic oligonucleotide
gacuaucagucuagggaag

SEQ ID NO: 1551553 - RNA, 19 nt, Artificial Sequence
  Description of Artificial Sequence: Synthetic oligonucleotide
aagugacacgaagaaugca

SEQ ID NO: 1551554 - RNA, 19 nt, Artificial Sequence
  Description of Artificial Sequence: Synthetic oligonucleotide
ugggguguuaaggcaaaca

SEQ ID NO: 1551555 - RNA, 19 nt, Artificial Sequence
  Description of Artificial Sequence: Synthetic oligonucleotide
agcacguacaugaaccaca

SEQ ID NO: 1551556 - RNA, 19 nt, Artificial Sequence
  Description of Artificial Sequence: Synthetic oligonucleotide
uccacccuuaucucuguuc

SEQ ID NO: 1551557 - RNA, 19 nt, Artificial Sequence
  Description of Artificial Sequence: Synthetic oligonucleotide
ggcucaguauaucuucugc

SEQ ID NO: 1551558 - RNA, 19 nt, Artificial Sequence
  Description of Artificial Sequence: Synthetic oligonucleotide
agcauucagguccccugag

SEQ ID NO: 1551559 - RNA, 19 nt, Artificial Sequence
  Description of Artificial Sequence: Synthetic oligonucleotide
cugccgacuggguaggaug

SEQ ID NO: 1551560 - RNA, 19 nt, Artificial Sequence
  Description of Artificial Sequence: Synthetic oligonucleotide
aggaaaagaccaccaggau

SEQ ID NO: 1551561 - RNA, 19 nt, Artificial Sequence
  Description of Artificial Sequence: Synthetic oligonucleotide
acuuagggccacaagaauu

SEQ ID NO: 1551562 - RNA, 19 nt, Artificial Sequence
  Description of Artificial Sequence: Synthetic oligonucleotide
ggccacuguauacucuucg

SEQ ID NO: 1551563 - RNA, 19 nt, Artificial Sequence
  Description of Artificial Sequence: Synthetic oligonucleotide
cucccucccaucuagacua

SEQ ID NO: 1551564 - RNA, 19 nt, Artificial Sequence
  Description of Artificial Sequence: Synthetic oligonucleotide
cugcuacccucucuggugc

SEQ ID NO: 1551565 - RNA, 19 nt, Artificial Sequence
  Description of Artificial Sequence: Synthetic oligonucleotide
gaaaaggcccacgccaauc

SEQ ID NO: 1551566 - RNA, 19 nt, Artificial Sequence
  Description of Artificial Sequence: Synthetic oligonucleotide
cuccccagccgaaagugac

SEQ ID NO: 1551567 - RNA, 19 nt, Artificial Sequence
  Description of Artificial Sequence: Synthetic oligonucleotide
aaagaccaccaggaugccu

SEQ ID NO: 1551568 - RNA, 19 nt, Artificial Sequence
  Description of Artificial Sequence: Synthetic oligonucleotide
gacuggguaggauggcuuc

SEQ ID NO: 1551569 - RNA, 19 nt, Artificial Sequence
  Description of Artificial Sequence: Synthetic oligonucleotide
gcaucccuaacccagucac

SEQ ID NO: 1551570 - RNA, 19 nt, Artificial Sequence
  Description of Artificial Sequence: Synthetic oligonucleotide
guagggauggggcuucaga

SEQ ID NO: 1551571 - RNA, 19 nt, Artificial Sequence
  Description of Artificial Sequence: Synthetic oligonucleotide
gaugccuaagcgcuugccu

SEQ ID NO: 1551572 - RNA, 19 nt, Artificial Sequence
  Description of Artificial Sequence: Synthetic oligonucleotide
ucccacuuagggccacaag

SEQ ID NO: 1551573 - RNA, 19 nt, Artificial Sequence
  Description of Artificial Sequence: Synthetic oligonucleotide
aggaagacauaaauaggau

SEQ ID NO: 1551574 - RNA, 19 nt, Artificial Sequence
  Description of Artificial Sequence: Synthetic oligonucleotide
gcuccuaggcacuuagccc

SEQ ID NO: 1551575 - RNA, 19 nt, Artificial Sequence
  Description of Artificial Sequence: Synthetic oligonucleotide
acccuuaucucuguucccu

SEQ ID NO: 1551576 - RNA, 19 nt, Artificial Sequence
  Description of Artificial Sequence: Synthetic oligonucleotide
gaaugcaaacgggauuauc

SEQ ID NO: 1551577 - RNA, 19 nt, Artificial Sequence
  Description of Artificial Sequence: Synthetic oligonucleotide
acccuuagcuccuccuaug

SEQ ID NO: 1551578 - RNA, 19 nt, Artificial Sequence
  Description of Artificial Sequence: Synthetic oligonucleotide
caggcuccuaggcacuuag

SEQ ID NO: 1551579 - RNA, 19 nt, Artificial Sequence
  Description of Artificial Sequence: Synthetic oligonucleotide
agacccgacuucgggacgg

SEQ ID NO: 1551580 - RNA, 19 nt, Artificial Sequence
  Description of Artificial Sequence: Synthetic oligonucleotide
cagucuagggaaggaagac

SEQ ID NO: 1551581 - RNA, 19 nt, Artificial Sequence
  Description of Artificial Sequence: Synthetic oligonucleotide
caccuggaugaacagcgac

SEQ ID NO: 1551582 - RNA, 19 nt, Artificial Sequence
  Description of Artificial Sequence: Synthetic oligonucleotide
aguagacgagguuggugaa

SEQ ID NO: 1551583 - RNA, 19 nt, Artificial Sequence
  Description of Artificial Sequence: Synthetic oligonucleotide
gacggggaaggcuggggac

SEQ ID NO: 1551584 - RNA, 19 nt, Artificial Sequence
  Description of Artificial Sequence: Synthetic oligonucleotide
gaccucagagaaaggauaa

SEQ ID NO: 1551585 - RNA, 19 nt, Artificial Sequence
  Description of Artificial Sequence: Synthetic oligonucleotide
cagaagugccaacccuuag

SEQ ID NO: 1551586 - RNA, 19 nt, Artificial Sequence
  Description of Artificial Sequence: Synthetic oligonucleotide
acuagcccgcaugacagga

SEQ ID NO: 1551587 - RNA, 19 nt, Artificial Sequence
  Description of Artificial Sequence: Synthetic oligonucleotide
uccccagccgaaagugaca

SEQ ID NO: 1551588 - RNA, 19 nt, Artificial Sequence
  Description of Artificial Sequence: Synthetic oligonucleotide
caucuagacuaucagucua

SEQ ID NO: 1551589 - RNA, 19 nt, Artificial Sequence
  Description of Artificial Sequence: Synthetic oligonucleotide
ucgggacggggaaggcugg

SEQ ID NO: 1551590 - RNA, 19 nt, Artificial Sequence
  Description of Artificial Sequence: Synthetic oligonucleotide
uccccugaggaggguaggg

SEQ ID NO: 1551591 - RNA, 19 nt, Artificial Sequence
  Description of Artificial Sequence: Synthetic oligonucleotide
uauccacccuuaucucugu

SEQ ID NO: 1551592 - RNA, 19 nt, Artificial Sequence
  Description of Artificial Sequence: Synthetic oligonucleotide
agacgagguuggugaaaag

SEQ ID NO: 1551593 - RNA, 19 nt, Artificial Sequence
  Description of Artificial Sequence: Synthetic oligonucleotide
ccuagaaucuuuauucaaa

SEQ ID NO: 1551594 - RNA, 19 nt, Artificial Sequence
  Description of Artificial Sequence: Synthetic oligonucleotide
ugauucugcugguggccac

SEQ ID NO: 1551595 - RNA, 19 nt, Artificial Sequence
  Description of Artificial Sequence: Synthetic oligonucleotide
cacuuagcccagaagccca

SEQ ID NO: 1551596 - RNA, 19 nt, Artificial Sequence
  Description of Artificial Sequence: Synthetic oligonucleotide
ccuggaugaacagcgacag

SEQ ID NO: 1551597 - RNA, 19 nt, Artificial Sequence
  Description of Artificial Sequence: Synthetic oligonucleotide
agcuccuccuauggucacc

SEQ ID NO: 1551598 - RNA, 19 nt, Artificial Sequence
  Description of Artificial Sequence: Synthetic oligonucleotide
ggaaggucuggagaaggcc

SEQ ID NO: 1551599 - RNA, 19 nt, Artificial Sequence
  Description of Artificial Sequence: Synthetic oligonucleotide
uuccucaaaggaagacaua

SEQ ID NO: 1551600 - RNA, 19 nt, Artificial Sequence
  Description of Artificial Sequence: Synthetic oligonucleotide
cacccuuaucucuguuccc

SEQ ID NO: 1551601 - RNA, 19 nt, Artificial Sequence
  Description of Artificial Sequence: Synthetic oligonucleotide
cuuagggccacaagaauuu

SEQ ID NO: 1551602 - RNA, 19 nt, Artificial Sequence
  Description of Artificial Sequence: Synthetic oligonucleotide
cucuucgaucagcucugcc

SEQ ID NO: 1551603 - RNA, 19 nt, Artificial Sequence
  Description of Artificial Sequence: Synthetic oligonucleotide
acucuucgaucagcucugc

SEQ ID NO: 1551604 - RNA, 19 nt, Artificial Sequence
  Description of Artificial Sequence: Synthetic oligonucleotide
cuucugccgacuggguagg

SEQ ID NO: 1551605 - RNA, 19 nt, Artificial Sequence
  Description of Artificial Sequence: Synthetic oligonucleotide
acuucgggacggggaaggc

SEQ ID NO: 1551606 - RNA, 19 nt, Artificial Sequence
  Description of Artificial Sequence: Synthetic oligonucleotide
gguucaccaccacuagccc

SEQ ID NO: 1551607 - RNA, 19 nt, Artificial Sequence
  Description of Artificial Sequence: Synthetic oligonucleotide
guaguacaguccagccgcg

SEQ ID NO: 1551608 - RNA, 19 nt, Artificial Sequence
  Description of Artificial Sequence: Synthetic oligonucleotide
acggccagagugaauagaa

SEQ ID NO: 1551609 - RNA, 19 nt, Artificial Sequence
  Description of Artificial Sequence: Synthetic oligonucleotide
ccagaucauguauuugaug

SEQ ID NO: 1551610 - RNA, 19 nt, Artificial Sequence
  Description of Artificial Sequence: Synthetic oligonucleotide
cagucuaggcagaaaguua

SEQ ID NO: 1551611 - RNA, 19 nt, Artificial Sequence
  Description of Artificial Sequence: Synthetic oligonucleotide
uugccucgcuugccuuugg

SEQ ID NO: 1551612 - RNA, 19 nt, Artificial Sequence
  Description of Artificial Sequence: Synthetic oligonucleotide
caaucaggaccgcugugga

SEQ ID NO: 1551613 - RNA, 19 nt, Artificial Sequence
  Description of Artificial Sequence: Synthetic oligonucleotide
ggauaauauucuuccgcaa

SEQ ID NO: 1551614 - RNA, 19 nt, Artificial Sequence
  Description of Artificial Sequence: Synthetic oligonucleotide
ggaggggaggacauucucc

SEQ ID NO: 1551615 - RNA, 19 nt, Artificial Sequence
  Description of Artificial Sequence: Synthetic oligonucleotide
aggccaaucaggaccgcug

SEQ ID NO: 1551616 - RNA, 19 nt, Artificial Sequence
  Description of Artificial Sequence: Synthetic oligonucleotide
accagaucauguauuugau

SEQ ID NO: 1551617 - RNA, 19 nt, Artificial Sequence
  Description of Artificial Sequence: Synthetic oligonucleotide
gauggggcuucagaacaga

SEQ ID NO: 1551618 - RNA, 19 nt, Artificial Sequence
  Description of Artificial Sequence: Synthetic oligonucleotide
uuagggccacaagaauuuc

SEQ ID NO: 1551619 - RNA, 19 nt, Artificial Sequence
  Description of Artificial Sequence: Synthetic oligonucleotide
gcaaacgggauuauccaca

SEQ ID NO: 1551620 - RNA, 19 nt, Artificial Sequence
  Description of Artificial Sequence: Synthetic oligonucleotide
gggaaacccgggcuggcag

SEQ ID NO: 1551621 - RNA, 19 nt, Artificial Sequence
  Description of Artificial Sequence: Synthetic oligonucleotide
gcagaaaguuagcgaguag

SEQ ID NO: 1551622 - RNA, 19 nt, Artificial Sequence
  Description of Artificial Sequence: Synthetic oligonucleotide
auaggauauuguagauggu

SEQ ID NO: 1551623 - RNA, 19 nt, Artificial Sequence
  Description of Artificial Sequence: Synthetic oligonucleotide
gucuaggcagaaaguuagc

SEQ ID NO: 1551624 - RNA, 19 nt, Artificial Sequence
  Description of Artificial Sequence: Synthetic oligonucleotide
gucuagggaaggaagacau

SEQ ID NO: 1551625 - RNA, 19 nt, Artificial Sequence
  Description of Artificial Sequence: Synthetic oligonucleotide
cuaucagucuagggaagga

SEQ ID NO: 1551626 - RNA, 19 nt, Artificial Sequence
  Description of Artificial Sequence: Synthetic oligonucleotide
cagacccgacuucgggacg

SEQ ID NO: 1551627 - RNA, 19 nt, Artificial Sequence
  Description of Artificial Sequence: Synthetic oligonucleotide
gggauuauccacaggcaga

SEQ ID NO: 1551628 - RNA, 19 nt, Artificial Sequence
  Description of Artificial Sequence: Synthetic oligonucleotide
acgggauuauccacaggca

SEQ ID NO: 1551629 - RNA, 19 nt, Artificial Sequence
  Description of Artificial Sequence: Synthetic oligonucleotide
cuugccucgcuugccuuug

SEQ ID NO: 1551630 - RNA, 19 nt, Artificial Sequence
  Description of Artificial Sequence: Synthetic oligonucleotide
ugccucgcuugccuuuggu

SEQ ID NO: 1551631 - RNA, 19 nt, Artificial Sequence
  Description of Artificial Sequence: Synthetic oligonucleotide
cagcacguacaugaaccac

SEQ ID NO: 1551632 - RNA, 19 nt, Artificial Sequence
  Description of Artificial Sequence: Synthetic oligonucleotide
cgggauuauccacaggcag

SEQ ID NO: 1551633 - RNA, 19 nt, Artificial Sequence
  Description of Artificial Sequence: Synthetic oligonucleotide
gacggccagagugaauaga

SEQ ID NO: 1551634 - RNA, 19 nt, Artificial Sequence
  Description of Artificial Sequence: Synthetic oligonucleotide
uaguacaguccagccgcga

SEQ ID NO: 1551635 - RNA, 19 nt, Artificial Sequence
  Description of Artificial Sequence: Synthetic oligonucleotide
gaaaugccagguaaugguu

SEQ ID NO: 1551636 - RNA, 19 nt, Artificial Sequence
  Description of Artificial Sequence: Synthetic oligonucleotide
uucugcucccucccaucua

SEQ ID NO: 1551637 - RNA, 19 nt, Artificial Sequence
  Description of Artificial Sequence: Synthetic oligonucleotide
gagaaccagaucauguauu

SEQ ID NO: 1551638 - RNA, 19 nt, Artificial Sequence
  Description of Artificial Sequence: Synthetic oligonucleotide
aaacccgggcuggcagaag

SEQ ID NO: 1551639 - RNA, 19 nt, Artificial Sequence
  Description of Artificial Sequence: Synthetic oligonucleotide
gccgaaagugacacgaaga

SEQ ID NO: 1551640 - RNA, 19 nt, Artificial Sequence
  Description of Artificial Sequence: Synthetic oligonucleotide
ccucgcuugccuuugguga

SEQ ID NO: 1551641 - RNA, 19 nt, Artificial Sequence
  Description of Artificial Sequence: Synthetic oligonucleotide
cucgcuugccuuuggugaa

SEQ ID NO: 1551642 - RNA, 19 nt, Artificial Sequence
  Description of Artificial Sequence: Synthetic oligonucleotide
ggaaccagcauuggacaca

SEQ ID NO: 1551643 - RNA, 19 nt, Artificial Sequence
  Description of Artificial Sequence: Synthetic oligonucleotide
cugagccagacccgacuuc

SEQ ID NO: 1551644 - RNA, 19 nt, Artificial Sequence
  Description of Artificial Sequence: Synthetic oligonucleotide
aggcuccuaggcacuuagc

SEQ ID NO: 1551645 - RNA, 19 nt, Artificial Sequence
  Description of Artificial Sequence: Synthetic oligonucleotide
ucugccgacuggguaggau

SEQ ID NO: 1551646 - RNA, 19 nt, Artificial Sequence
  Description of Artificial Sequence: Synthetic oligonucleotide
cuaggcacuuagcccagaa

SEQ ID NO: 1551647 - RNA, 19 nt, Artificial Sequence
  Description of Artificial Sequence: Synthetic oligonucleotide
cagcauucagguccccuga

SEQ ID NO: 1551648 - RNA, 19 nt, Artificial Sequence
  Description of Artificial Sequence: Synthetic oligonucleotide
ccgaaagugacacgaagaa

SEQ ID NO: 1551649 - RNA, 19 nt, Artificial Sequence
  Description of Artificial Sequence: Synthetic oligonucleotide
aguccagccgcgacggcca

SEQ ID NO: 1551650 - RNA, 19 nt, Artificial Sequence
  Description of Artificial Sequence: Synthetic oligonucleotide
gccacuguauacucuucga

SEQ ID NO: 1551651 - RNA, 19 nt, Artificial Sequence
  Description of Artificial Sequence: Synthetic oligonucleotide
agaaugcaaacgggauuau

SEQ ID NO: 1551652 - RNA, 19 nt, Artificial Sequence
  Description of Artificial Sequence: Synthetic oligonucleotide
ggagaaccagaucauguau

SEQ ID NO: 1551653 - RNA, 19 nt, Artificial Sequence
  Description of Artificial Sequence: Synthetic oligonucleotide
gccgggacgggccugcgcc

SEQ ID NO: 1551654 - RNA, 19 nt, Artificial Sequence
  Description of Artificial Sequence: Synthetic oligonucleotide
ggcuagcccagucuaggca

SEQ ID NO: 1551655 - RNA, 19 nt, Artificial Sequence
  Description of Artificial Sequence: Synthetic oligonucleotide
ccagccgaaagugacacga

SEQ ID NO: 1551656 - RNA, 19 nt, Artificial Sequence
  Description of Artificial Sequence: Synthetic oligonucleotide
ggaugaacagcgacagcca

SEQ ID NO: 1551657 - RNA, 19 nt, Artificial Sequence
  Description of Artificial Sequence: Synthetic oligonucleotide
gaaacccgggcuggcagaa

SEQ ID NO: 1551658 - RNA, 19 nt, Artificial Sequence
  Description of Artificial Sequence: Synthetic oligonucleotide
ccucccaucuagacuauca

SEQ ID NO: 1551659 - RNA, 19 nt, Artificial Sequence
  Description of Artificial Sequence: Synthetic oligonucleotide
gccucgcuugccuuuggug

SEQ ID NO: 1551660 - RNA, 19 nt, Artificial Sequence
  Description of Artificial Sequence: Synthetic oligonucleotide
ggcagaaaguuagcgagua

SEQ ID NO: 1551661 - RNA, 19 nt, Artificial Sequence
  Description of Artificial Sequence: Synthetic oligonucleotide
guagacgagguuggugaaa

SEQ ID NO: 1551662 - RNA, 19 nt, Artificial Sequence
  Description of Artificial Sequence: Synthetic oligonucleotide
ggaggagccucagaaaacu

SEQ ID NO: 1551663 - RNA, 19 nt, Artificial Sequence
  Description of Artificial Sequence: Synthetic oligonucleotide
guccccugaggaggguagg

SEQ ID NO: 1551664 - RNA, 19 nt, Artificial Sequence
  Description of Artificial Sequence: Synthetic oligonucleotide
ggauauuguagauggucuu

SEQ ID NO: 1551665 - RNA, 19 nt, Artificial Sequence
  Description of Artificial Sequence: Synthetic oligonucleotide
agggaaacccgggcuggca

SEQ ID NO: 1551666 - RNA, 19 nt, Artificial Sequence
  Description of Artificial Sequence: Synthetic oligonucleotide
caacccuuagcuccuccua

SEQ ID NO: 1551667 - RNA, 19 nt, Artificial Sequence
  Description of Artificial Sequence: Synthetic oligonucleotide
ggaaacccgggcuggcaga

SEQ ID NO: 1551668 - RNA, 19 nt, Artificial Sequence
  Description of Artificial Sequence: Synthetic oligonucleotide
gacccgacuucgggacggg

SEQ ID NO: 1551669 - RNA, 19 nt, Artificial Sequence
  Description of Artificial Sequence: Synthetic oligonucleotide
gauucugcugguggccacu

SEQ ID NO: 1551670 - RNA, 19 nt, Artificial Sequence
  Description of Artificial Sequence: Synthetic oligonucleotide
gccagacccgacuucggga

SEQ ID NO: 1551671 - RNA, 19 nt, Artificial Sequence
  Description of Artificial Sequence: Synthetic oligonucleotide
ucgcuugccuuuggugaaa

SEQ ID NO: 1551672 - RNA, 19 nt, Artificial Sequence
  Description of Artificial Sequence: Synthetic oligonucleotide
gcgacggccagagugaaua

SEQ ID NO: 1551673 - RNA, 19 nt, Artificial Sequence
  Description of Artificial Sequence: Synthetic oligonucleotide
ccgcaugacaggaugaagu

SEQ ID NO: 1551674 - RNA, 19 nt, Artificial Sequence
  Description of Artificial Sequence: Synthetic oligonucleotide
uggugccccuggcagcauu

SEQ ID NO: 1551675 - RNA, 19 nt, Artificial Sequence
  Description of Artificial Sequence: Synthetic oligonucleotide
guuagcgaguagagaggaa

SEQ ID NO: 1551676 - RNA, 19 nt, Artificial Sequence
  Description of Artificial Sequence: Synthetic oligonucleotide
ccacaagaauuucuucaga

SEQ ID NO: 1551677 - RNA, 19 nt, Artificial Sequence
  Description of Artificial Sequence: Synthetic oligonucleotide
acccgacuucgggacgggg

SEQ ID NO: 1551678 - RNA, 19 nt, Artificial Sequence
  Description of Artificial Sequence: Synthetic oligonucleotide
ucccucccaucuagacuau

SEQ ID NO: 1551679 - RNA, 19 nt, Artificial Sequence
  Description of Artificial Sequence: Synthetic oligonucleotide
ggguguuaaggcaaacagu

SEQ ID NO: 1551680 - RNA, 19 nt, Artificial Sequence
  Description of Artificial Sequence: Synthetic oligonucleotide
auccacccuuaucucuguu

SEQ ID NO: 1551681 - RNA, 19 nt, Artificial Sequence
  Description of Artificial Sequence: Synthetic oligonucleotide
ccucaaaggaagacauaaa

SEQ ID NO: 1551682 - RNA, 19 nt, Artificial Sequence
  Description of Artificial Sequence: Synthetic oligonucleotide
gaggccaaucaggaccgcu

SEQ ID NO: 1551683 - RNA, 19 nt, Artificial Sequence
  Description of Artificial Sequence: Synthetic oligonucleotide
ccaucuagacuaucagucu

SEQ ID NO: 1551684 - RNA, 19 nt, Artificial Sequence
  Description of Artificial Sequence: Synthetic oligonucleotide
gccaacccuuagcuccucc

SEQ ID NO: 1551685 - RNA, 19 nt, Artificial Sequence
  Description of Artificial Sequence: Synthetic oligonucleotide
cagccgaaagugacacgaa

SEQ ID NO: 1551686 - RNA, 19 nt, Artificial Sequence
  Description of Artificial Sequence: Synthetic oligonucleotide
ccccagccgaaagugacac

SEQ ID NO: 1551687 - RNA, 19 nt, Artificial Sequence
  Description of Artificial Sequence: Synthetic oligonucleotide
auucaccaagaaaccucuu

SEQ ID NO: 1551688 - RNA, 19 nt, Artificial Sequence
  Description of Artificial Sequence: Synthetic oligonucleotide
gcaugacaggaugaaguua

SEQ ID NO: 1551689 - RNA, 19 nt, Artificial Sequence
  Description of Artificial Sequence: Synthetic oligonucleotide
gcgccguccggcucccgcg

SEQ ID NO: 1551690 - RNA, 19 nt, Artificial Sequence
  Description of Artificial Sequence: Synthetic oligonucleotide
uucugccgacuggguagga

SEQ ID NO: 1551691 - RNA, 19 nt, Artificial Sequence
  Description of Artificial Sequence: Synthetic oligonucleotide
caaaguagacgagguuggu

SEQ ID NO: 1551692 - RNA, 19 nt, Artificial Sequence
  Description of Artificial Sequence: Synthetic oligonucleotide
cccaaaggcucaguauauc

SEQ ID NO: 1551693 - RNA, 19 nt, Artificial Sequence
  Description of Artificial Sequence: Synthetic oligonucleotide
gugccaccuagaaucuuua

SEQ ID NO: 1551694 - RNA, 19 nt, Artificial Sequence
  Description of Artificial Sequence: Synthetic oligonucleotide
ggccaaucaggaccgcugu

SEQ ID NO: 1551695 - RNA, 19 nt, Artificial Sequence
  Description of Artificial Sequence: Synthetic oligonucleotide
ccaccacuagcccgcauga

SEQ ID NO: 1551696 - RNA, 19 nt, Artificial Sequence
  Description of Artificial Sequence: Synthetic oligonucleotide
ccagaagugccaacccuua

SEQ ID NO: 1551697 - RNA, 19 nt, Artificial Sequence
  Description of Artificial Sequence: Synthetic oligonucleotide
cgaagaaugcaaacgggau

SEQ ID NO: 1551698 - RNA, 19 nt, Artificial Sequence
  Description of Artificial Sequence: Synthetic oligonucleotide
acccucucuggugccccug

SEQ ID NO: 1551699 - RNA, 19 nt, Artificial Sequence
  Description of Artificial Sequence: Synthetic oligonucleotide
cugcucccucccaucuaga

SEQ ID NO: 1551700 - RNA, 19 nt, Artificial Sequence
  Description of Artificial Sequence: Synthetic oligonucleotide
cccgacuucgggacgggga

SEQ ID NO: 1551701 - RNA, 19 nt, Artificial Sequence
  Description of Artificial Sequence: Synthetic oligonucleotide
ggugccccuggcagcauuc

SEQ ID NO: 1551702 - RNA, 19 nt, Artificial Sequence
  Description of Artificial Sequence: Synthetic oligonucleotide
uccagccgcgacggccaga

SEQ ID NO: 1551703 - RNA, 19 nt, Artificial Sequence
  Description of Artificial Sequence: Synthetic oligonucleotide
cuccuauggucaccugccu

SEQ ID NO: 1551704 - RNA, 19 nt, Artificial Sequence
  Description of Artificial Sequence: Synthetic oligonucleotide
cuucgggacggggaaggcu

SEQ ID NO: 1551705 - RNA, 19 nt, Artificial Sequence
  Description of Artificial Sequence: Synthetic oligonucleotide
ugccaacccuuagcuccuc

SEQ ID NO: 1551706 - RNA, 19 nt, Artificial Sequence
  Description of Artificial Sequence: Synthetic oligonucleotide
cuagcccgcaugacaggau

SEQ ID NO: 1551707 - RNA, 19 nt, Artificial Sequence
  Description of Artificial Sequence: Synthetic oligonucleotide
gccgcgacggccagaguga

SEQ ID NO: 1551708 - RNA, 19 nt, Artificial Sequence
  Description of Artificial Sequence: Synthetic oligonucleotide
ccgacuucgggacggggaa

SEQ ID NO: 1551709 - RNA, 19 nt, Artificial Sequence
  Description of Artificial Sequence: Synthetic oligonucleotide
ggccuagcucugcuggucu

SEQ ID NO: 1551710 - RNA, 19 nt, Artificial Sequence
  Description of Artificial Sequence: Synthetic oligonucleotide
gggccuagcucugcugguc

SEQ ID NO: 1551711 - RNA, 19 nt, Artificial Sequence
  Description of Artificial Sequence: Synthetic oligonucleotide
ccagucuaggcagaaaguu

SEQ ID NO: 1551712 - RNA, 19 nt, Artificial Sequence
  Description of Artificial Sequence: Synthetic oligonucleotide
ccacuguauacucuucgau

SEQ ID NO: 1551713 - RNA, 19 nt, Artificial Sequence
  Description of Artificial Sequence: Synthetic oligonucleotide
gccgacuggguaggauggc

SEQ ID NO: 1551714 - RNA, 19 nt, Artificial Sequence
  Description of Artificial Sequence: Synthetic oligonucleotide
gcacguacaugaaccacau

SEQ ID NO: 1551715 - RNA, 19 nt, Artificial Sequence
  Description of Artificial Sequence: Synthetic oligonucleotide
ggacgggccugcgccgucc

SEQ ID NO: 1551716 - RNA, 19 nt, Artificial Sequence
  Description of Artificial Sequence: Synthetic oligonucleotide
ccgggacgggccugcgccg

SEQ ID NO: 1551717 - RNA, 19 nt, Artificial Sequence
  Description of Artificial Sequence: Synthetic oligonucleotide
ccaacccuuagcuccuccu

SEQ ID NO: 1551718 - RNA, 19 nt, Artificial Sequence
  Description of Artificial Sequence: Synthetic oligonucleotide
gauggacuccugggguguu

SEQ ID NO: 1551719 - RNA, 19 nt, Artificial Sequence
  Description of Artificial Sequence: Synthetic oligonucleotide
gucaccugccugagaacuu

SEQ ID NO: 1551720 - RNA, 19 nt, Artificial Sequence
  Description of Artificial Sequence: Synthetic oligonucleotide
gcccgcaugacaggaugaa

SEQ ID NO: 1551721 - RNA, 19 nt, Artificial Sequence
  Description of Artificial Sequence: Synthetic oligonucleotide
ccuuagcuccuccuauggu

SEQ ID NO: 1551722 - RNA, 19 nt, Artificial Sequence
  Description of Artificial Sequence: Synthetic oligonucleotide
ggaccgcuguggagaacca

SEQ ID NO: 1551723 - RNA, 19 nt, Artificial Sequence
  Description of Artificial Sequence: Synthetic oligonucleotide
cccuggcagcauucagguc

SEQ ID NO: 1551724 - RNA, 19 nt, Artificial Sequence
  Description of Artificial Sequence: Synthetic oligonucleotide
cccagcuucacagacccuu

SEQ ID NO: 1551725 - RNA, 19 nt, Artificial Sequence
  Description of Artificial Sequence: Synthetic oligonucleotide
cgacuucgggacggggaag

SEQ ID NO: 1551726 - RNA, 19 nt, Artificial Sequence
  Description of Artificial Sequence: Synthetic oligonucleotide
gggacgggccugcgccguc

SEQ ID NO: 1551727 - RNA, 19 nt, Artificial Sequence
  Description of Artificial Sequence: Synthetic oligonucleotide
ccugcgccguccggcuccc

SEQ ID NO: 1551728 - RNA, 19 nt, Artificial Sequence
  Description of Artificial Sequence: Synthetic oligonucleotide
ccgacuggguaggauggcu

SEQ ID NO: 1551729 - RNA, 19 nt, Artificial Sequence
  Description of Artificial Sequence: Synthetic oligonucleotide
cugcgccguccggcucccg

SEQ ID NO: 1551730 - RNA, 19 nt, Artificial Sequence
  Description of Artificial Sequence: Synthetic oligonucleotide
ccaggggccuagcucugcu

SEQ ID NO: 1551731 - RNA, 19 nt, Artificial Sequence
  Description of Artificial Sequence: Synthetic oligonucleotide
ccuaggcacuuagcccaga

SEQ ID NO: 1551732 - RNA, 19 nt, Artificial Sequence
  Description of Artificial Sequence: Synthetic oligonucleotide
ccaggaugccuaagcgcuu

SEQ ID NO: 1551733 - RNA, 19 nt, Artificial Sequence
  Description of Artificial Sequence: Synthetic oligonucleotide
gcgccgggacgggccugcg

SEQ ID NO: 1551734 - RNA, 19 nt, Artificial Sequence
  Description of Artificial Sequence: Synthetic oligonucleotide
ccgcgacggccagagugaa

SEQ ID NO: 1551735 - RNA, 19 nt, Artificial Sequence
  Description of Artificial Sequence: Synthetic oligonucleotide
cgccguccggcucccgcga

SEQ ID NO: 1551736 - RNA, 19 nt, Artificial Sequence
  Description of Artificial Sequence: Synthetic oligonucleotide
cagccgcgacggccagagu

SEQ ID NO: 1551737 - RNA, 19 nt, Artificial Sequence
  Description of Artificial Sequence: Synthetic oligonucleotide
cgucaucuccuggcugcau

SEQ ID NO: 1551738 - RNA, 19 nt, Artificial Sequence
  Description of Artificial Sequence: Synthetic oligonucleotide
cgggacgggccugcgccgu

SEQ ID NO: 1551739 - RNA, 19 nt, Artificial Sequence
  Description of Artificial Sequence: Synthetic oligonucleotide
aguggcuacacucauaggc

SEQ ID NO: 1551740 - RNA, 19 nt, Artificial Sequence
  Description of Artificial Sequence: Synthetic oligonucleotide
uuauuagagaugcuaagcg

SEQ ID NO: 1551741 - RNA, 19 nt, Artificial Sequence
  Description of Artificial Sequence: Synthetic oligonucleotide
aaagucuugcggcaguggc

SEQ ID NO: 1551742 - RNA, 19 nt, Artificial Sequence
  Description of Artificial Sequence: Synthetic oligonucleotide
ugugagaaaaccuugccgc

SEQ ID NO: 1551743 - RNA, 19 nt, Artificial Sequence
  Description of Artificial Sequence: Synthetic oligonucleotide
aaaaccuugccgcaggcag

SEQ ID NO: 1551744 - RNA, 19 nt, Artificial Sequence
  Description of Artificial Sequence: Synthetic oligonucleotide
aaaacggugugagugaggg

SEQ ID NO: 1551745 - RNA, 19 nt, Artificial Sequence
  Description of Artificial Sequence: Synthetic oligonucleotide
uggagcgugggguagaagg

SEQ ID NO: 1551746 - RNA, 19 nt, Artificial Sequence
  Description of Artificial Sequence: Synthetic oligonucleotide
  modified_base (10)..(10): a, c, u, g, unknown or other
acacgaaaunuccgaaugg

SEQ ID NO: 1551747 - RNA, 19 nt, Artificial Sequence
  Description of Artificial Sequence: Synthetic oligonucleotide
ucaaggugcaggaugagcu

SEQ ID NO: 1551748 - RNA, 19 nt, Artificial Sequence
  Description of Artificial Sequence: Synthetic oligonucleotide
uguguaggagggaaauugg

SEQ ID NO: 1551749 - RNA, 19 nt, Artificial Sequence
  Description of Artificial Sequence: Synthetic oligonucleotide
ugcuaguggaugcaggcgg

SEQ ID NO: 1551750 - RNA, 19 nt, Artificial Sequence
  Description of Artificial Sequence: Synthetic oligonucleotide
augugagaaaaccuugccg

SEQ ID NO: 1551751 - RNA, 19 nt, Artificial Sequence
  Description of Artificial Sequence: Synthetic oligonucleotide
uaaggaaggguccugugca

SEQ ID NO: 1551752 - RNA, 19 nt, Artificial Sequence
  Description of Artificial Sequence: Synthetic oligonucleotide
agugaaccuaguucaaggg

SEQ ID NO: 1551753 - RNA, 19 nt, Artificial Sequence
  Description of Artificial Sequence: Synthetic oligonucleotide
  modified_base (4)..(4): a, c, u, g, unknown or other
aaunuccgaauggccaagc

SEQ ID NO: 1551754 - RNA, 19 nt, Artificial Sequence
  Description of Artificial Sequence: Synthetic oligonucleotide
gaugcuaagcguguguagg

SEQ ID NO: 1551755 - RNA, 19 nt, Artificial Sequence
  Description of Artificial Sequence: Synthetic oligonucleotide
aaucucucccggcaccacc

SEQ ID NO: 1551756 - RNA, 19 nt, Artificial Sequence
  Description of Artificial Sequence: Synthetic oligonucleotide
acugaugcggcuucucccc

SEQ ID NO: 1551757 - RNA, 19 nt, Artificial Sequence
  Description of Artificial Sequence: Synthetic oligonucleotide
  modified_base (2)..(2): a, c, u, g, unknown or other
unuccgaauggccaagcag

SEQ ID NO: 1551758 - RNA, 19 nt, Artificial Sequence
  Description of Artificial Sequence: Synthetic oligonucleotide
gaaauuggguucugggucc

SEQ ID NO: 1551759 - RNA, 19 nt, Artificial Sequence
  Description of Artificial Sequence: Synthetic oligonucleotide
uauuagagaugcuaagcgu

SEQ ID NO: 1551760 - RNA, 19 nt, Artificial Sequence
  Description of Artificial Sequence: Synthetic oligonucleotide
aaagcaucgguacuccgga

SEQ ID NO: 1551761 - RNA, 19 nt, Artificial Sequence
  Description of Artificial Sequence: Synthetic oligonucleotide
cuaagcguguguaggaggg

SEQ ID NO: 1551762 - RNA, 19 nt, Artificial Sequence
  Description of Artificial Sequence: Synthetic oligonucleotide
aaggaaaucucucccggca

SEQ ID NO: 1551763 - RNA, 19 nt, Artificial Sequence
  Description of Artificial Sequence: Synthetic oligonucleotide
gaugcuaguggaugcaggc

SEQ ID NO: 1551764 - RNA, 19 nt, Artificial Sequence
  Description of Artificial Sequence: Synthetic oligonucleotide
acacaccgcgcacugaugc

SEQ ID NO: 1551765 - RNA, 19 nt, Artificial Sequence
  Description of Artificial Sequence: Synthetic oligonucleotide
uguaggagggaaauugggu

SEQ ID NO: 1551766 - RNA, 19 nt, Artificial Sequence
  Description of Artificial Sequence: Synthetic oligonucleotide
gagaacugaaagucuugcg

SEQ ID NO: 1551767 - RNA, 19 nt, Artificial Sequence
  Description of Artificial Sequence: Synthetic oligonucleotide
agcaucgguacuccggagc

SEQ ID NO: 1551768 - RNA, 19 nt, Artificial Sequence
  Description of Artificial Sequence: Synthetic oligonucleotide
ucugguggagugaaccuag

SEQ ID NO: 1551769 - RNA, 19 nt, Artificial Sequence
  Description of Artificial Sequence: Synthetic oligonucleotide
gaaagcaucgguacuccgg

SEQ ID NO: 1551770 - RNA, 19 nt, Artificial Sequence
  Description of Artificial Sequence: Synthetic oligonucleotide
auuagagaugcuaagcgug

SEQ ID NO: 1551771 - RNA, 19 nt, Artificial Sequence
  Description of Artificial Sequence: Synthetic oligonucleotide
uuagagaugcuaagcgugu

SEQ ID NO: 1551772 - RNA, 19 nt, Artificial Sequence
  Description of Artificial Sequence: Synthetic oligonucleotide
agaagggcgagcccgccgc

SEQ ID NO: 1551773 - RNA, 19 nt, Artificial Sequence
  Description of Artificial Sequence: Synthetic oligonucleotide
uggugcacggccucggucg

SEQ ID NO: 1551774 - RNA, 19 nt, Artificial Sequence
  Description of Artificial Sequence: Synthetic oligonucleotide
  modified_base (8)..(8): a, c, u, g, unknown or other
acgaaaunuccgaauggcc

SEQ ID NO: 1551775 - RNA, 19 nt, Artificial Sequence
  Description of Artificial Sequence: Synthetic oligonucleotide
  modified_base (14)..(14): a, c, u, g, unknown or other
uggcacacgaaaunuccga

SEQ ID NO: 1551776 - RNA, 19 nt, Artificial Sequence
  Description of Artificial Sequence: Synthetic oligonucleotide
cauaugcuugagcagguag

SEQ ID NO: 1551777 - RNA, 19 nt, Artificial Sequence
  Description of Artificial Sequence: Synthetic oligonucleotide
augccaagcugacacaaag

SEQ ID NO: 1551778 - RNA, 19 nt, Artificial Sequence
  Description of Artificial Sequence: Synthetic oligonucleotide
  modified_base (11)..(11): a, c, u, g, unknown or other
cacacgaaaunuccgaaug

SEQ ID NO: 1551779 - RNA, 19 nt, Artificial Sequence
  Description of Artificial Sequence: Synthetic oligonucleotide
  modified_base (9)..(9): a, c, u, g, unknown or other
cacgaaaunuccgaauggc

SEQ ID NO: 1551780 - RNA, 19 nt, Artificial Sequence
  Description of Artificial Sequence: Synthetic oligonucleotide
cagguagucgcguagcgag

SEQ ID NO: 1551781 - RNA, 19 nt, Artificial Sequence
  Description of Artificial Sequence: Synthetic oligonucleotide
guucuguaagugaaugugg

SEQ ID NO: 1551782 - RNA, 19 nt, Artificial Sequence
  Description of Artificial Sequence: Synthetic oligonucleotide
aaacggugugagugagggc

SEQ ID NO: 1551783 - RNA, 19 nt, Artificial Sequence
  Description of Artificial Sequence: Synthetic oligonucleotide
aggcggguugcucagcacc

SEQ ID NO: 1551784 - RNA, 19 nt, Artificial Sequence
  Description of Artificial Sequence: Synthetic oligonucleotide
aggaaaucucucccggcac

SEQ ID NO: 1551785 - RNA, 19 nt, Artificial Sequence
  Description of Artificial Sequence: Synthetic oligonucleotide
ucgcguagcgagaaggagc

SEQ ID NO: 1551786 - RNA, 19 nt, Artificial Sequence
  Description of Artificial Sequence: Synthetic oligonucleotide
  modified_base (5)..(5): a, c, u, g, unknown or other
aaaunuccgaauggccaag

SEQ ID NO: 1551787 - RNA, 19 nt, Artificial Sequence
  Description of Artificial Sequence: Synthetic oligonucleotide
acgggagugcccgagaugg

SEQ ID NO: 1551788 - RNA, 19 nt, Artificial Sequence
  Description of Artificial Sequence: Synthetic oligonucleotide
  modified_base (6)..(6): a, c, u, g, unknown or other
gaaaunuccgaauggccaa

SEQ ID NO: 1551789 - RNA, 19 nt, Artificial Sequence
  Description of Artificial Sequence: Synthetic oligonucleotide
guaaggaaggguccugugc

SEQ ID NO: 1551790 - RNA, 19 nt, Artificial Sequence
  Description of Artificial Sequence: Synthetic oligonucleotide
aucaaggugcaggaugagc

SEQ ID NO: 1551791 - RNA, 19 nt, Artificial Sequence
  Description of Artificial Sequence: Synthetic oligonucleotide
aaauuggguucuggguccc

SEQ ID NO: 1551792 - RNA, 19 nt, Artificial Sequence
  Description of Artificial Sequence: Synthetic oligonucleotide
ugugaccauaugcuugagc

SEQ ID NO: 1551793 - RNA, 19 nt, Artificial Sequence
  Description of Artificial Sequence: Synthetic oligonucleotide
uggcuacacucauaggcgg

SEQ ID NO: 1551794 - RNA, 19 nt, Artificial Sequence
  Description of Artificial Sequence: Synthetic oligonucleotide
cacagcuggagcuuccccg

SEQ ID NO: 1551795 - RNA, 19 nt, Artificial Sequence
  Description of Artificial Sequence: Synthetic oligonucleotide
guguguaggagggaaauug

SEQ ID NO: 1551796 - RNA, 19 nt, Artificial Sequence
  Description of Artificial Sequence: Synthetic oligonucleotide
uagucgcguagcgagaagg

SEQ ID NO: 1551797 - RNA, 19 nt, Artificial Sequence
  Description of Artificial Sequence: Synthetic oligonucleotide
aagaagggcgagcccgccg

SEQ ID NO: 1551798 - RNA, 19 nt, Artificial Sequence
  Description of Artificial Sequence: Synthetic oligonucleotide
acagggaaaacggugugag

SEQ ID NO: 1551799 - RNA, 19 nt, Artificial Sequence
  Description of Artificial Sequence: Synthetic oligonucleotide
acuggacaaccuucgggac

SEQ ID NO: 1551800 - RNA, 19 nt, Artificial Sequence
  Description of Artificial Sequence: Synthetic oligonucleotide
guggcuacacucauaggcg

SEQ ID NO: 1551801 - RNA, 19 nt, Artificial Sequence
  Description of Artificial Sequence: Synthetic oligonucleotide
agcaagcgacuucuggugg

SEQ ID NO: 1551802 - RNA, 19 nt, Artificial Sequence
  Description of Artificial Sequence: Synthetic oligonucleotide
ggaaauuggguucuggguc

SEQ ID NO: 1551803 - RNA, 19 nt, Artificial Sequence
  Description of Artificial Sequence: Synthetic oligonucleotide
acacucauaggcggguugc

SEQ ID NO: 1551804 - RNA, 19 nt, Artificial Sequence
  Description of Artificial Sequence: Synthetic oligonucleotide
cuuauccuggaagaagggc

SEQ ID NO: 1551805 - RNA, 19 nt, Artificial Sequence
  Description of Artificial Sequence: Synthetic oligonucleotide
gagcaagcgacuucuggug

SEQ ID NO: 1551806 - RNA, 19 nt, Artificial Sequence
  Description of Artificial Sequence: Synthetic oligonucleotide
uggacaaccuucgggaccc

SEQ ID NO: 1551807 - RNA, 19 nt, Artificial Sequence
  Description of Artificial Sequence: Synthetic oligonucleotide
gggucuuuacgccaguggg

SEQ ID NO: 1551808 - RNA, 19 nt, Artificial Sequence
  Description of Artificial Sequence: Synthetic oligonucleotide
gacgcuccaacagugcccg

SEQ ID NO: 1551809 - RNA, 19 nt, Artificial Sequence
  Description of Artificial Sequence: Synthetic oligonucleotide
gaugaacaugugcuuggug

SEQ ID NO: 1551810 - RNA, 19 nt, Artificial Sequence
  Description of Artificial Sequence: Synthetic oligonucleotide
cugacacaaagcugucugg

SEQ ID NO: 1551811 - RNA, 19 nt, Artificial Sequence
  Description of Artificial Sequence: Synthetic oligonucleotide
ugcccgaugugagaaaacc

SEQ ID NO: 1551812 - RNA, 19 nt, Artificial Sequence
  Description of Artificial Sequence: Synthetic oligonucleotide
ugacgcuccaacagugccc

SEQ ID NO: 1551813 - RNA, 19 nt, Artificial Sequence
  Description of Artificial Sequence: Synthetic oligonucleotide
  modified_base (16)..(16): a, c, u, g, unknown or other
gguggcacacgaaaunucc

SEQ ID NO: 1551814 - RNA, 19 nt, Artificial Sequence
  Description of Artificial Sequence: Synthetic oligonucleotide
acacuggaaggcucgcacg

SEQ ID NO: 1551815 - RNA, 19 nt, Artificial Sequence
  Description of Artificial Sequence: Synthetic oligonucleotide
uccgagaacugaaagucuu

SEQ ID NO: 1551816 - RNA, 19 nt, Artificial Sequence
  Description of Artificial Sequence: Synthetic oligonucleotide
cuuuacgccaguggggcgg

SEQ ID NO: 1551817 - RNA, 19 nt, Artificial Sequence
  Description of Artificial Sequence: Synthetic oligonucleotide
aacagugcccgaugugaga

SEQ ID NO: 1551818 - RNA, 19 nt, Artificial Sequence
  Description of Artificial Sequence: Synthetic oligonucleotide
gguggagugaaccuaguuc

SEQ ID NO: 1551819 - RNA, 19 nt, Artificial Sequence
  Description of Artificial Sequence: Synthetic oligonucleotide
gucuuuacgccaguggggc

SEQ ID NO: 1551820 - RNA, 19 nt, Artificial Sequence
  Description of Artificial Sequence: Synthetic oligonucleotide
agcgagagaaguucuguaa

SEQ ID NO: 1551821 - RNA, 19 nt, Artificial Sequence
  Description of Artificial Sequence: Synthetic oligonucleotide
agcagguagucgcguagcg

SEQ ID NO: 1551822 - RNA, 19 nt, Artificial Sequence
  Description of Artificial Sequence: Synthetic oligonucleotide
agcgacuucugguggagug

SEQ ID NO: 1551823 - RNA, 19 nt, Artificial Sequence
  Description of Artificial Sequence: Synthetic oligonucleotide
uuccgagaacugaaagucu

SEQ ID NO: 1551824 - RNA, 19 nt, Artificial Sequence
  Description of Artificial Sequence: Synthetic oligonucleotide
ucauaggcggguugcucag

SEQ ID NO: 1551825 - RNA, 19 nt, Artificial Sequence
  Description of Artificial Sequence: Synthetic oligonucleotide
agcgccaacacaccgcgca

SEQ ID NO: 1551826 - RNA, 19 nt, Artificial Sequence
  Description of Artificial Sequence: Synthetic oligonucleotide
aaaccuugccgcaggcagg

SEQ ID NO: 1551827 - RNA, 19 nt, Artificial Sequence
  Description of Artificial Sequence: Synthetic oligonucleotide
cacugaugcggcuucuccc

SEQ ID NO: 1551828 - RNA, 19 nt, Artificial Sequence
  Description of Artificial Sequence: Synthetic oligonucleotide
guguaggagggaaauuggg

SEQ ID NO: 1551829 - RNA, 19 nt, Artificial Sequence
  Description of Artificial Sequence: Synthetic oligonucleotide
ucacggaugcgcacaguca

SEQ ID NO: 1551830 - RNA, 19 nt, Artificial Sequence
  Description of Artificial Sequence: Synthetic oligonucleotide
ucuuuacgccaguggggcg

SEQ ID NO: 1551831 - RNA, 19 nt, Artificial Sequence
  Description of Artificial Sequence: Synthetic oligonucleotide
agaaguggccgccuagccu

SEQ ID NO: 1551832 - RNA, 19 nt, Artificial Sequence
  Description of Artificial Sequence: Synthetic oligonucleotide
aggagugagcgagagaagu

SEQ ID NO: 1551833 - RNA, 19 nt, Artificial Sequence
  Description of Artificial Sequence: Synthetic oligonucleotide
accauaaucagggaugcua

SEQ ID NO: 1551834 - RNA, 19 nt, Artificial Sequence
  Description of Artificial Sequence: Synthetic oligonucleotide
uguggugguaaggaagggu

SEQ ID NO: 1551835 - RNA, 19 nt, Artificial Sequence
  Description of Artificial Sequence: Synthetic oligonucleotide
cagggaugcuaguggaugc

SEQ ID NO: 1551836 - RNA, 19 nt, Artificial Sequence
  Description of Artificial Sequence: Synthetic oligonucleotide
gaaaacggugugagugagg

SEQ ID NO: 1551837 - RNA, 19 nt, Artificial Sequence
  Description of Artificial Sequence: Synthetic oligonucleotide
  modified_base (19)..(19): a, c, u, g, unknown or other
acugguggcacacgaaaun

SEQ ID NO: 1551838 - RNA, 19 nt, Artificial Sequence
  Description of Artificial Sequence: Synthetic oligonucleotide
ugagcgagagaaguucugu

SEQ ID NO: 1551839 - RNA, 19 nt, Artificial Sequence
  Description of Artificial Sequence: Synthetic oligonucleotide
ucuggcuggagcguggggu

SEQ ID NO: 1551840 - RNA, 19 nt, Artificial Sequence
  Description of Artificial Sequence: Synthetic oligonucleotide
ugcuaagcguguguaggag

SEQ ID NO: 1551841 - RNA, 19 nt, Artificial Sequence
  Description of Artificial Sequence: Synthetic oligonucleotide
aaaucucucccggcaccac

SEQ ID NO: 1551842 - RNA, 19 nt, Artificial Sequence
  Description of Artificial Sequence: Synthetic oligonucleotide
  modified_base (3)..(3): a, c, u, g, unknown or other
aunuccgaauggccaagca

SEQ ID NO: 1551843 - RNA, 19 nt, Artificial Sequence
  Description of Artificial Sequence: Synthetic oligonucleotide
caacagugcccgaugugag

SEQ ID NO: 1551844 - RNA, 19 nt, Artificial Sequence
  Description of Artificial Sequence: Synthetic oligonucleotide
gagugagcgagagaaguuc

SEQ ID NO: 1551845 - RNA, 19 nt, Artificial Sequence
  Description of Artificial Sequence: Synthetic oligonucleotide
gugugagugagggcaaggg

SEQ ID NO: 1551846 - RNA, 19 nt, Artificial Sequence
  Description of Artificial Sequence: Synthetic oligonucleotide
cugggaaccccauccucgg

SEQ ID NO: 1551847 - RNA, 19 nt, Artificial Sequence
  Description of Artificial Sequence: Synthetic oligonucleotide
uccggagcaagcgacuucu

SEQ ID NO: 1551848 - RNA, 19 nt, Artificial Sequence
  Description of Artificial Sequence: Synthetic oligonucleotide
augcuaagcguguguagga

SEQ ID NO: 1551849 - RNA, 19 nt, Artificial Sequence
  Description of Artificial Sequence: Synthetic oligonucleotide
agcgagaaggagcgccaac

SEQ ID NO: 1551850 - RNA, 19 nt, Artificial Sequence
  Description of Artificial Sequence: Synthetic oligonucleotide
gcuaagcguguguaggagg

SEQ ID NO: 1551851 - RNA, 19 nt, Artificial Sequence
  Description of Artificial Sequence: Synthetic oligonucleotide
uccaggggucuuuacgcca

SEQ ID NO: 1551852 - RNA, 19 nt, Artificial Sequence
  Description of Artificial Sequence: Synthetic oligonucleotide
gcgagagaaguucuguaag

SEQ ID NO: 1551853 - RNA, 19 nt, Artificial Sequence
  Description of Artificial Sequence: Synthetic oligonucleotide
aaggcucgcacgccagugu

SEQ ID NO: 1551854 - RNA, 19 nt, Artificial Sequence
  Description of Artificial Sequence: Synthetic oligonucleotide
auaggcggguugcucagca

SEQ ID NO: 1551855 - RNA, 19 nt, Artificial Sequence
  Description of Artificial Sequence: Synthetic oligonucleotide
aguccgguggagccgaggu

SEQ ID NO: 1551856 - RNA, 19 nt, Artificial Sequence
  Description of Artificial Sequence: Synthetic oligonucleotide
aucgguacuccggagcaag

SEQ ID NO: 1551857 - RNA, 19 nt, Artificial Sequence
  Description of Artificial Sequence: Synthetic oligonucleotide
  modified_base (7)..(7): a, c, u, g, unknown or other
cgaaaunuccgaauggcca

SEQ ID NO: 1551858 - RNA, 19 nt, Artificial Sequence
  Description of Artificial Sequence: Synthetic oligonucleotide
aggagcgccaacacaccgc

SEQ ID NO: 1551859 - RNA, 19 nt, Artificial Sequence
  Description of Artificial Sequence: Synthetic oligonucleotide
augcuaguggaugcaggcg

SEQ ID NO: 1551860 - RNA, 19 nt, Artificial Sequence
  Description of Artificial Sequence: Synthetic oligonucleotide
uuccccgagcugagcaccg

SEQ ID NO: 1551861 - RNA, 19 nt, Artificial Sequence
  Description of Artificial Sequence: Synthetic oligonucleotide
gagccgagguuuccacugg

SEQ ID NO: 1551862 - RNA, 19 nt, Artificial Sequence
  Description of Artificial Sequence: Synthetic oligonucleotide
  modified_base (15)..(15): a, c, u, g, unknown or other
guggcacacgaaaunuccg

SEQ ID NO: 1551863 - RNA, 19 nt, Artificial Sequence
  Description of Artificial Sequence: Synthetic oligonucleotide
gggucccaaguccacaggg

SEQ ID NO: 1551864 - RNA, 19 nt, Artificial Sequence
  Description of Artificial Sequence: Synthetic oligonucleotide
aacuugcucagugucuuua

SEQ ID NO: 1551865 - RNA, 19 nt, Artificial Sequence
  Description of Artificial Sequence: Synthetic oligonucleotide
ggaaaucucucccggcacc

SEQ ID NO: 1551866 - RNA, 19 nt, Artificial Sequence
  Description of Artificial Sequence: Synthetic oligonucleotide
acgccaguggggcggggcc

SEQ ID NO: 1551867 - RNA, 19 nt, Artificial Sequence
  Description of Artificial Sequence: Synthetic oligonucleotide
  modified_base (17)..(17): a, c, u, g, unknown or other
ugguggcacacgaaaunuc

SEQ ID NO: 1551868 - RNA, 19 nt, Artificial Sequence
  Description of Artificial Sequence: Synthetic oligonucleotide
uagagaugcuaagcgugug

SEQ ID NO: 1551869 - RNA, 19 nt, Artificial Sequence
  Description of Artificial Sequence: Synthetic oligonucleotide
aagcguguguaggagggaa

SEQ ID NO: 1551870 - RNA, 19 nt, Artificial Sequence
  Description of Artificial Sequence: Synthetic oligonucleotide
ggggucuuuacgccagugg

SEQ ID NO: 1551871 - RNA, 19 nt, Artificial Sequence
  Description of Artificial Sequence: Synthetic oligonucleotide
aagucuugcggcaguggcu

SEQ ID NO: 1551872 - RNA, 19 nt, Artificial Sequence
  Description of Artificial Sequence: Synthetic oligonucleotide
uuuacgccaguggggcggg

SEQ ID NO: 1551873 - RNA, 19 nt, Artificial Sequence
  Description of Artificial Sequence: Synthetic oligonucleotide
uucacccaugccaccgcca

SEQ ID NO: 1551874 - RNA, 19 nt, Artificial Sequence
  Description of Artificial Sequence: Synthetic oligonucleotide
gaauguggugcacggccuc

SEQ ID NO: 1551875 - RNA, 19 nt, Artificial Sequence
  Description of Artificial Sequence: Synthetic oligonucleotide
uccuccuccuccuccuccc

SEQ ID NO: 1551876 - RNA, 19 nt, Artificial Sequence
  Description of Artificial Sequence: Synthetic oligonucleotide
acaccgcgcacugaugcgg

SEQ ID NO: 1551877 - RNA, 19 nt, Artificial Sequence
  Description of Artificial Sequence: Synthetic oligonucleotide
ucacgcgcgaugucagcug

SEQ ID NO: 1551878 - RNA, 19 nt, Artificial Sequence
  Description of Artificial Sequence: Synthetic oligonucleotide
uggccaagcagcagcuuau

SEQ ID NO: 1551879 - RNA, 19 nt, Artificial Sequence
  Description of Artificial Sequence: Synthetic oligonucleotide
gaaggagcgccaacacacc

SEQ ID NO: 1551880 - RNA, 19 nt, Artificial Sequence
  Description of Artificial Sequence: Synthetic oligonucleotide
guaggagggaaauuggguu

SEQ ID NO: 1551881 - RNA, 19 nt, Artificial Sequence
  Description of Artificial Sequence: Synthetic oligonucleotide
gaugcaggcggguccucac

SEQ ID NO: 1551882 - RNA, 19 nt, Artificial Sequence
  Description of Artificial Sequence: Synthetic oligonucleotide
gaaggcucgcacgccagug

SEQ ID NO: 1551883 - RNA, 19 nt, Artificial Sequence
  Description of Artificial Sequence: Synthetic oligonucleotide
cacaccgcgcacugaugcg

SEQ ID NO: 1551884 - RNA, 19 nt, Artificial Sequence
  Description of Artificial Sequence: Synthetic oligonucleotide
augcaggcggguccucacg

SEQ ID NO: 1551885 - RNA, 19 nt, Artificial Sequence
  Description of Artificial Sequence: Synthetic oligonucleotide
uacuccggagcaagcgacu

SEQ ID NO: 1551886 - RNA, 19 nt, Artificial Sequence
  Description of Artificial Sequence: Synthetic oligonucleotide
ucgguacuccggagcaagc

SEQ ID NO: 1551887 - RNA, 19 nt, Artificial Sequence
  Description of Artificial Sequence: Synthetic oligonucleotide
agugagcgagagaaguucu

SEQ ID NO: 1551888 - RNA, 19 nt, Artificial Sequence
  Description of Artificial Sequence: Synthetic oligonucleotide
guccaggggucuuuacgcc

SEQ ID NO: 1551889 - RNA, 19 nt, Artificial Sequence
  Description of Artificial Sequence: Synthetic oligonucleotide
cccggcaccaccauaauca

SEQ ID NO: 1551890 - RNA, 19 nt, Artificial Sequence
  Description of Artificial Sequence: Synthetic oligonucleotide
ggaaaacggugugagugag

SEQ ID NO: 1551891 - RNA, 19 nt, Artificial Sequence
  Description of Artificial Sequence: Synthetic oligonucleotide
cccaucaaggugcaggaug

SEQ ID NO: 1551892 - RNA, 19 nt, Artificial Sequence
  Description of Artificial Sequence: Synthetic oligonucleotide
aaccuaguucaagggucug

SEQ ID NO: 1551893 - RNA, 19 nt, Artificial Sequence
  Description of Artificial Sequence: Synthetic oligonucleotide
cccguugccuuccucaugc

SEQ ID NO: 1551894 - RNA, 19 nt, Artificial Sequence
  Description of Artificial Sequence: Synthetic oligonucleotide
uucugggucccaaguccac

SEQ ID NO: 1551895 - RNA, 19 nt, Artificial Sequence
  Description of Artificial Sequence: Synthetic oligonucleotide
gugaaccuaguucaagggu

SEQ ID NO: 1551896 - RNA, 19 nt, Artificial Sequence
  Description of Artificial Sequence: Synthetic oligonucleotide
aggcucgcacgccagugug

SEQ ID NO: 1551897 - RNA, 19 nt, Artificial Sequence
  Description of Artificial Sequence: Synthetic oligonucleotide
gaaaaccuugccgcaggca

SEQ ID NO: 1551898 - RNA, 19 nt, Artificial Sequence
  Description of Artificial Sequence: Synthetic oligonucleotide
ggagugaaccuaguucaag

SEQ ID NO: 1551899 - RNA, 19 nt, Artificial Sequence
  Description of Artificial Sequence: Synthetic oligonucleotide
uccuggaagaagggcgagc

SEQ ID NO: 1551900 - RNA, 19 nt, Artificial Sequence
  Description of Artificial Sequence: Synthetic oligonucleotide
cccgaaggaaaucucuccc

SEQ ID NO: 1551901 - RNA, 19 nt, Artificial Sequence
  Description of Artificial Sequence: Synthetic oligonucleotide
ggaugcuaguggaugcagg

SEQ ID NO: 1551902 - RNA, 19 nt, Artificial Sequence
  Description of Artificial Sequence: Synthetic oligonucleotide
guaagugaauguggugcac

SEQ ID NO: 1551903 - RNA, 19 nt, Artificial Sequence
  Description of Artificial Sequence: Synthetic oligonucleotide
gcgcuuggcacacacagca

SEQ ID NO: 1551904 - RNA, 19 nt, Artificial Sequence
  Description of Artificial Sequence: Synthetic oligonucleotide
gucgcguagcgagaaggag

SEQ ID NO: 1551905 - RNA, 19 nt, Artificial Sequence
  Description of Artificial Sequence: Synthetic oligonucleotide
cacgccagugugugugacc

SEQ ID NO: 1551906 - RNA, 19 nt, Artificial Sequence
  Description of Artificial Sequence: Synthetic oligonucleotide
caggagugagcgagagaag

SEQ ID NO: 1551907 - RNA, 19 nt, Artificial Sequence
  Description of Artificial Sequence: Synthetic oligonucleotide
agucuugcggcaguggcua

SEQ ID NO: 1551908 - RNA, 19 nt, Artificial Sequence
  Description of Artificial Sequence: Synthetic oligonucleotide
uccuccuccuccuccuccu

SEQ ID NO: 1551909 - RNA, 19 nt, Artificial Sequence
  Description of Artificial Sequence: Synthetic oligonucleotide
gggaaaacggugugaguga

SEQ ID NO: 1551910 - RNA, 19 nt, Artificial Sequence
  Description of Artificial Sequence: Synthetic oligonucleotide
ggaagccucacggaugcgc

SEQ ID NO: 1551911 - RNA, 19 nt, Artificial Sequence
  Description of Artificial Sequence: Synthetic oligonucleotide
guagucgcguagcgagaag

SEQ ID NO: 1551912 - RNA, 19 nt, Artificial Sequence
  Description of Artificial Sequence: Synthetic oligonucleotide
ucccggcaccaccauaauc

SEQ ID NO: 1551913 - RNA, 19 nt, Artificial Sequence
  Description of Artificial Sequence: Synthetic oligonucleotide
gagcgagagaaguucugua

SEQ ID NO: 1551914 - RNA, 19 nt, Artificial Sequence
  Description of Artificial Sequence: Synthetic oligonucleotide
caguggcuacacucauagg

SEQ ID NO: 1551915 - RNA, 19 nt, Artificial Sequence
  Description of Artificial Sequence: Synthetic oligonucleotide
uaagcguguguaggaggga

SEQ ID NO: 1551916 - RNA, 19 nt, Artificial Sequence
  Description of Artificial Sequence: Synthetic oligonucleotide
accugcgcacugugcacag

SEQ ID NO: 1551917 - RNA, 19 nt, Artificial Sequence
  Description of Artificial Sequence: Synthetic oligonucleotide
ugcccguugagggucucca

SEQ ID NO: 1551918 - RNA, 19 nt, Artificial Sequence
  Description of Artificial Sequence: Synthetic oligonucleotide
cuugcggcaguggcuacac

SEQ ID NO: 1551919 - RNA, 19 nt, Artificial Sequence
  Description of Artificial Sequence: Synthetic oligonucleotide
gguacuccggagcaagcga

SEQ ID NO: 1551920 - RNA, 19 nt, Artificial Sequence
  Description of Artificial Sequence: Synthetic oligonucleotide
cuccuccuccuccuccucc

SEQ ID NO: 1551921 - RNA, 19 nt, Artificial Sequence
  Description of Artificial Sequence: Synthetic oligonucleotide
ggagcaagcgacuucuggu

SEQ ID NO: 1551922 - RNA, 19 nt, Artificial Sequence
  Description of Artificial Sequence: Synthetic oligonucleotide
caggcggguccucacgcgc

SEQ ID NO: 1551923 - RNA, 19 nt, Artificial Sequence
  Description of Artificial Sequence: Synthetic oligonucleotide
acggaugcgcacagucacg

SEQ ID NO: 1551924 - RNA, 19 nt, Artificial Sequence
  Description of Artificial Sequence: Synthetic oligonucleotide
gugagcgagagaaguucug

SEQ ID NO: 1551925 - RNA, 19 nt, Artificial Sequence
  Description of Artificial Sequence: Synthetic oligonucleotide
guggagccgagguuuccac

SEQ ID NO: 1551926 - RNA, 19 nt, Artificial Sequence
  Description of Artificial Sequence: Synthetic oligonucleotide
ggcuacacucauaggcggg

SEQ ID NO: 1551927 - RNA, 19 nt, Artificial Sequence
  Description of Artificial Sequence: Synthetic oligonucleotide
ccccgaaggaaaucucucc

SEQ ID NO: 1551928 - RNA, 19 nt, Artificial Sequence
  Description of Artificial Sequence: Synthetic oligonucleotide
cuuucuucgcaggcaccac

SEQ ID NO: 1551929 - RNA, 19 nt, Artificial Sequence
  Description of Artificial Sequence: Synthetic oligonucleotide
guucugggucccaagucca

SEQ ID NO: 1551930 - RNA, 19 nt, Artificial Sequence
  Description of Artificial Sequence: Synthetic oligonucleotide
caccgcgcacugaugcggc

SEQ ID NO: 1551931 - RNA, 19 nt, Artificial Sequence
  Description of Artificial Sequence: Synthetic oligonucleotide
ugggaaccccauccucggu

SEQ ID NO: 1551932 - RNA, 19 nt, Artificial Sequence
  Description of Artificial Sequence: Synthetic oligonucleotide
caccuucgccuucuucagc

SEQ ID NO: 1551933 - RNA, 19 nt, Artificial Sequence
  Description of Artificial Sequence: Synthetic oligonucleotide
agccgagguuuccacugga

SEQ ID NO: 1551934 - RNA, 19 nt, Artificial Sequence
  Description of Artificial Sequence: Synthetic oligonucleotide
gggaaagcaucgguacucc

SEQ ID NO: 1551935 - RNA, 19 nt, Artificial Sequence
  Description of Artificial Sequence: Synthetic oligonucleotide
agucgcguagcgagaagga

SEQ ID NO: 1551936 - RNA, 19 nt, Artificial Sequence
  Description of Artificial Sequence: Synthetic oligonucleotide
guagcgagaaggagcgcca

SEQ ID NO: 1551937 - RNA, 19 nt, Artificial Sequence
  Description of Artificial Sequence: Synthetic oligonucleotide
ggucugagugcaccugcgc

SEQ ID NO: 1551938 - RNA, 19 nt, Artificial Sequence
  Description of Artificial Sequence: Synthetic oligonucleotide
ccagaguggaugaacaugu

SEQ ID NO: 1551939 - RNA, 19 nt, Artificial Sequence
  Description of Artificial Sequence: Synthetic oligonucleotide
aucucucccggcaccacca

SEQ ID NO: 1551940 - RNA, 19 nt, Artificial Sequence
  Description of Artificial Sequence: Synthetic oligonucleotide
ugcgcacgcagggaagccu

SEQ ID NO: 1551941 - RNA, 19 nt, Artificial Sequence
  Description of Artificial Sequence: Synthetic oligonucleotide
uacgccaguggggcggggc

SEQ ID NO: 1551942 - RNA, 19 nt, Artificial Sequence
  Description of Artificial Sequence: Synthetic oligonucleotide
ugcgcacagucacgucgca

SEQ ID NO: 1551943 - RNA, 19 nt, Artificial Sequence
  Description of Artificial Sequence: Synthetic oligonucleotide
agggcgagcccgccgccag

SEQ ID NO: 1551944 - RNA, 19 nt, Artificial Sequence
  Description of Artificial Sequence: Synthetic oligonucleotide
gccccgcuggaguaggagg

SEQ ID NO: 1551945 - RNA, 19 nt, Artificial Sequence
  Description of Artificial Sequence: Synthetic oligonucleotide
gaagggcgagcccgccgcc

SEQ ID NO: 1551946 - RNA, 19 nt, Artificial Sequence
  Description of Artificial Sequence: Synthetic oligonucleotide
cguagcgagaaggagcgcc

SEQ ID NO: 1551947 - RNA, 19 nt, Artificial Sequence
  Description of Artificial Sequence: Synthetic oligonucleotide
cauaaucagggaugcuagu

SEQ ID NO: 1551948 - RNA, 19 nt, Artificial Sequence
  Description of Artificial Sequence: Synthetic oligonucleotide
ccaggggucuuuacgccag

SEQ ID NO: 1551949 - RNA, 19 nt, Artificial Sequence
  Description of Artificial Sequence: Synthetic oligonucleotide
gccaacacaccgcgcacug

SEQ ID NO: 1551950 - RNA, 19 nt, Artificial Sequence
  Description of Artificial Sequence: Synthetic oligonucleotide
ccauccucggucaccgcag

SEQ ID NO: 1551951 - RNA, 19 nt, Artificial Sequence
  Description of Artificial Sequence: Synthetic oligonucleotide
uaggcggguugcucagcac

SEQ ID NO: 1551952 - RNA, 19 nt, Artificial Sequence
  Description of Artificial Sequence: Synthetic oligonucleotide
ccgagaacugaaagucuug

SEQ ID NO: 1551953 - RNA, 19 nt, Artificial Sequence
  Description of Artificial Sequence: Synthetic oligonucleotide
cacgggagugcccgagaug

SEQ ID NO: 1551954 - RNA, 19 nt, Artificial Sequence
  Description of Artificial Sequence: Synthetic oligonucleotide
uccuccccucuuucuucgc

SEQ ID NO: 1551955 - RNA, 19 nt, Artificial Sequence
  Description of Artificial Sequence: Synthetic oligonucleotide
aggggucuuuacgccagug

SEQ ID NO: 1551956 - RNA, 19 nt, Artificial Sequence
  Description of Artificial Sequence: Synthetic oligonucleotide
gaaccccauccucggucac

SEQ ID NO: 1551957 - RNA, 19 nt, Artificial Sequence
  Description of Artificial Sequence: Synthetic oligonucleotide
ucuccuccuccuccuccuc

SEQ ID NO: 1551958 - RNA, 19 nt, Artificial Sequence
  Description of Artificial Sequence: Synthetic oligonucleotide
cauaggcggguugcucagc

SEQ ID NO: 1551959 - RNA, 19 nt, Artificial Sequence
  Description of Artificial Sequence: Synthetic oligonucleotide
ccaccuucgccuucuucag

SEQ ID NO: 1551960 - RNA, 19 nt, Artificial Sequence
  Description of Artificial Sequence: Synthetic oligonucleotide
ggugacgcuccaacagugc

SEQ ID NO: 1551961 - RNA, 19 nt, Artificial Sequence
  Description of Artificial Sequence: Synthetic oligonucleotide
cacccggggugaaagggga

SEQ ID NO: 1551962 - RNA, 19 nt, Artificial Sequence
  Description of Artificial Sequence: Synthetic oligonucleotide
ucgcagaaguggccgccua

SEQ ID NO: 1551963 - RNA, 19 nt, Artificial Sequence
  Description of Artificial Sequence: Synthetic oligonucleotide
uccccgagcugagcaccgg

SEQ ID NO: 1551964 - RNA, 19 nt, Artificial Sequence
  Description of Artificial Sequence: Synthetic oligonucleotide
guggugcacggccucgguc

SEQ ID NO: 1551965 - RNA, 19 nt, Artificial Sequence
  Description of Artificial Sequence: Synthetic oligonucleotide
ggugcgcacgcagggaagc

SEQ ID NO: 1551966 - RNA, 19 nt, Artificial Sequence
  Description of Artificial Sequence: Synthetic oligonucleotide
gcaagcgacuucuggugga

SEQ ID NO: 1551967 - RNA, 19 nt, Artificial Sequence
  Description of Artificial Sequence: Synthetic oligonucleotide
cggagcaagcgacuucugg

SEQ ID NO: 1551968 - RNA, 19 nt, Artificial Sequence
  Description of Artificial Sequence: Synthetic oligonucleotide
ccagggcgcaguccggugg

SEQ ID NO: 1551969 - RNA, 19 nt, Artificial Sequence
  Description of Artificial Sequence: Synthetic oligonucleotide
cuggccccgcuggaguagg

SEQ ID NO: 1551970 - RNA, 19 nt, Artificial Sequence
  Description of Artificial Sequence: Synthetic oligonucleotide
uagcgagaaggagcgccaa

SEQ ID NO: 1551971 - RNA, 19 nt, Artificial Sequence
  Description of Artificial Sequence: Synthetic oligonucleotide
ggcaagggaaagcaucggu

SEQ ID NO: 1551972 - RNA, 19 nt, Artificial Sequence
  Description of Artificial Sequence: Synthetic oligonucleotide
ccgagauggcuguggcugg

SEQ ID NO: 1551973 - RNA, 19 nt, Artificial Sequence
  Description of Artificial Sequence: Synthetic oligonucleotide
cugcgcacugugcacagcu

SEQ ID NO: 1551974 - RNA, 19 nt, Artificial Sequence
  Description of Artificial Sequence: Synthetic oligonucleotide
cuaguucaagggucugagu

SEQ ID NO: 1551975 - RNA, 19 nt, Artificial Sequence
  Description of Artificial Sequence: Synthetic oligonucleotide
cucuggccggugugugcgc

SEQ ID NO: 1551976 - RNA, 19 nt, Artificial Sequence
  Description of Artificial Sequence: Synthetic oligonucleotide
  modified_base (13)..(13): a, c, u, g, unknown or other
ggcacacgaaaunuccgaa

SEQ ID NO: 1551977 - RNA, 19 nt, Artificial Sequence
  Description of Artificial Sequence: Synthetic oligonucleotide
gagcgugggguagaaggua

SEQ ID NO: 1551978 - RNA, 19 nt, Artificial Sequence
  Description of Artificial Sequence: Synthetic oligonucleotide
caggugacgcuccaacagu

SEQ ID NO: 1551979 - RNA, 19 nt, Artificial Sequence
  Description of Artificial Sequence: Synthetic oligonucleotide
gugugaccauaugcuugag

SEQ ID NO: 1551980 - RNA, 19 nt, Artificial Sequence
  Description of Artificial Sequence: Synthetic oligonucleotide
gcaucuggcuggagcgugg

SEQ ID NO: 1551981 - RNA, 19 nt, Artificial Sequence
  Description of Artificial Sequence: Synthetic oligonucleotide
ccggcaccaccauaaucag

SEQ ID NO: 1551982 - RNA, 19 nt, Artificial Sequence
  Description of Artificial Sequence: Synthetic oligonucleotide
gcucgcacgccagugugug

SEQ ID NO: 1551983 - RNA, 19 nt, Artificial Sequence
  Description of Artificial Sequence: Synthetic oligonucleotide
agguagucgcguagcgaga

SEQ ID NO: 1551984 - RNA, 19 nt, Artificial Sequence
  Description of Artificial Sequence: Synthetic oligonucleotide
gccaggugacgcuccaaca

SEQ ID NO: 1551985 - RNA, 19 nt, Artificial Sequence
  Description of Artificial Sequence: Synthetic oligonucleotide
ccgagguuuccacuggaca

SEQ ID NO: 1551986 - RNA, 19 nt, Artificial Sequence
  Description of Artificial Sequence: Synthetic oligonucleotide
  modified_base (18)..(18): a, c, u, g, unknown or other
cugguggcacacgaaaunu

SEQ ID NO: 1551987 - RNA, 19 nt, Artificial Sequence
  Description of Artificial Sequence: Synthetic oligonucleotide
cuggcuggagcguggggua

SEQ ID NO: 1551988 - RNA, 19 nt, Artificial Sequence
  Description of Artificial Sequence: Synthetic oligonucleotide
caguccgguggagccgagg

SEQ ID NO: 1551989 - RNA, 19 nt, Artificial Sequence
  Description of Artificial Sequence: Synthetic oligonucleotide
ggugcacggccucggucgc

SEQ ID NO: 1551990 - RNA, 19 nt, Artificial Sequence
  Description of Artificial Sequence: Synthetic oligonucleotide
agcguguguaggagggaaa

SEQ ID NO: 1551991 - RNA, 19 nt, Artificial Sequence
  Description of Artificial Sequence: Synthetic oligonucleotide
cugaugcggcuucucccca

SEQ ID NO: 1551992 - RNA, 19 nt, Artificial Sequence
  Description of Artificial Sequence: Synthetic oligonucleotide
uuacgccaguggggcgggg

SEQ ID NO: 1551993 - RNA, 19 nt, Artificial Sequence
  Description of Artificial Sequence: Synthetic oligonucleotide
gucuccuccuccuccuccu

SEQ ID NO: 1551994 - RNA, 19 nt, Artificial Sequence
  Description of Artificial Sequence: Synthetic oligonucleotide
accgcgcacugaugcggcu

SEQ ID NO: 1551995 - RNA, 19 nt, Artificial Sequence
  Description of Artificial Sequence: Synthetic oligonucleotide
gguggagccgagguuucca

SEQ ID NO: 1551996 - RNA, 19 nt, Artificial Sequence
  Description of Artificial Sequence: Synthetic oligonucleotide
gugcgcacgcagggaagcc

SEQ ID NO: 1551997 - RNA, 19 nt, Artificial Sequence
  Description of Artificial Sequence: Synthetic oligonucleotide
gggcacccggggugaaagg

SEQ ID NO: 1551998 - RNA, 19 nt, Artificial Sequence
  Description of Artificial Sequence: Synthetic oligonucleotide
gcgcgcacgggagugcccg

SEQ ID NO: 1551999 - RNA, 19 nt, Artificial Sequence
  Description of Artificial Sequence: Synthetic oligonucleotide
gcaccugcgcacugugcac

SEQ ID NO: 1552000 - RNA, 19 nt, Artificial Sequence
  Description of Artificial Sequence: Synthetic oligonucleotide
caccugcgcacugugcaca

SEQ ID NO: 1552001 - RNA, 19 nt, Artificial Sequence
  Description of Artificial Sequence: Synthetic oligonucleotide
gcgugggguagaagguagg

SEQ ID NO: 1552002 - RNA, 19 nt, Artificial Sequence
  Description of Artificial Sequence: Synthetic oligonucleotide
cgguacuccggagcaagcg

SEQ ID NO: 1552003 - RNA, 19 nt, Artificial Sequence
  Description of Artificial Sequence: Synthetic oligonucleotide
ccacugguggcacacgaaa

SEQ ID NO: 1552004 - RNA, 19 nt, Artificial Sequence
  Description of Artificial Sequence: Synthetic oligonucleotide
  modified_base (12)..(12): a, c, u, g, unknown or other
gcacacgaaaunuccgaau

SEQ ID NO: 1552005 - RNA, 19 nt, Artificial Sequence
  Description of Artificial Sequence: Synthetic oligonucleotide
cagggcgcaguccggugga

SEQ ID NO: 1552006 - RNA, 19 nt, Artificial Sequence
  Description of Artificial Sequence: Synthetic oligonucleotide
gcagguagucgcguagcga

SEQ ID NO: 1552007 - RNA, 19 nt, Artificial Sequence
  Description of Artificial Sequence: Synthetic oligonucleotide
gagcgccaacacaccgcgc

SEQ ID NO: 1552008 - RNA, 19 nt, Artificial Sequence
  Description of Artificial Sequence: Synthetic oligonucleotide
cagggaaaacggugugagu

SEQ ID NO: 1552009 - RNA, 19 nt, Artificial Sequence
  Description of Artificial Sequence: Synthetic oligonucleotide
ccccgagcugagcaccggg

SEQ ID NO: 1552010 - RNA, 19 nt, Artificial Sequence
  Description of Artificial Sequence: Synthetic oligonucleotide
cuggcggcccuggggcacc

SEQ ID NO: 1552011 - RNA, 19 nt, Artificial Sequence
  Description of Artificial Sequence: Synthetic oligonucleotide
gccgagguuuccacuggac

SEQ ID NO: 1552012 - RNA, 19 nt, Artificial Sequence
  Description of Artificial Sequence: Synthetic oligonucleotide
gcgcacagucacgucgcag

SEQ ID NO: 1552013 - RNA, 19 nt, Artificial Sequence
  Description of Artificial Sequence: Synthetic oligonucleotide
gcggugcgcacgcagggaa

SEQ ID NO: 1552014 - RNA, 19 nt, Artificial Sequence
  Description of Artificial Sequence: Synthetic oligonucleotide
ggcgccuggccuucaccca

SEQ ID NO: 1552015 - RNA, 19 nt, Artificial Sequence
  Description of Artificial Sequence: Synthetic oligonucleotide
cagugcccgaugugagaaa

SEQ ID NO: 1552016 - RNA, 19 nt, Artificial Sequence
  Description of Artificial Sequence: Synthetic oligonucleotide
cacgcgcgaugucagcugu

SEQ ID NO: 1552017 - RNA, 19 nt, Artificial Sequence
  Description of Artificial Sequence: Synthetic oligonucleotide
uggggcacccggggugaaa

SEQ ID NO: 1552018 - RNA, 19 nt, Artificial Sequence
  Description of Artificial Sequence: Synthetic oligonucleotide
gcgccaacacaccgcgcac

SEQ ID NO: 1552019 - RNA, 19 nt, Artificial Sequence
  Description of Artificial Sequence: Synthetic oligonucleotide
ccaugccaccgccaccuuc

SEQ ID NO: 1552020 - RNA, 19 nt, Artificial Sequence
  Description of Artificial Sequence: Synthetic oligonucleotide
gccagggcgcaguccggug

SEQ ID NO: 1552021 - RNA, 19 nt, Artificial Sequence
  Description of Artificial Sequence: Synthetic oligonucleotide
gggaagccucacggaugcg

SEQ ID NO: 1552022 - RNA, 19 nt, Artificial Sequence
  Description of Artificial Sequence: Synthetic oligonucleotide
acgcgcgaugucagcugug

SEQ ID NO: 1552023 - RNA, 19 nt, Artificial Sequence
  Description of Artificial Sequence: Synthetic oligonucleotide
caucgguacuccggagcaa

SEQ ID NO: 1552024 - RNA, 19 nt, Artificial Sequence
  Description of Artificial Sequence: Synthetic oligonucleotide
gccggugugugcgcaugug

SEQ ID NO: 1552025 - RNA, 19 nt, Artificial Sequence
  Description of Artificial Sequence: Synthetic oligonucleotide
ccuccuccuccuccucccc

SEQ ID NO: 1552026 - RNA, 19 nt, Artificial Sequence
  Description of Artificial Sequence: Synthetic oligonucleotide
cguugccuuccucaugcca

SEQ ID NO: 1552027 - RNA, 19 nt, Artificial Sequence
  Description of Artificial Sequence: Synthetic oligonucleotide
ggagugagcgagagaaguu

SEQ ID NO: 1552028 - RNA, 19 nt, Artificial Sequence
  Description of Artificial Sequence: Synthetic oligonucleotide
gcccgaugugagaaaaccu

SEQ ID NO: 1552029 - RNA, 19 nt, Artificial Sequence
  Description of Artificial Sequence: Synthetic oligonucleotide
cauccucggucaccgcagu

SEQ ID NO: 1552030 - RNA, 19 nt, Artificial Sequence
  Description of Artificial Sequence: Synthetic oligonucleotide
ggaaggcucgcacgccagu

SEQ ID NO: 1552031 - RNA, 19 nt, Artificial Sequence
  Description of Artificial Sequence: Synthetic oligonucleotide
cgcuuggcacacacagcac

SEQ ID NO: 1552032 - RNA, 19 nt, Artificial Sequence
  Description of Artificial Sequence: Synthetic oligonucleotide
ggcggguccucacgcgcga

SEQ ID NO: 1552033 - RNA, 19 nt, Artificial Sequence
  Description of Artificial Sequence: Synthetic oligonucleotide
gcgcacgcagggaagccuc

SEQ ID NO: 1552034 - RNA, 19 nt, Artificial Sequence
  Description of Artificial Sequence: Synthetic oligonucleotide
ggguccucacgcgcgaugu

SEQ ID NO: 1552035 - RNA, 19 nt, Artificial Sequence
  Description of Artificial Sequence: Synthetic oligonucleotide
gcguguguaggagggaaau

SEQ ID NO: 1552036 - RNA, 19 nt, Artificial Sequence
  Description of Artificial Sequence: Synthetic oligonucleotide
gggcgcgcacgggagugcc

SEQ ID NO: 1552037 - RNA, 19 nt, Artificial Sequence
  Description of Artificial Sequence: Synthetic oligonucleotide
cgcaggcaccacugguggc

SEQ ID NO: 1552038 - RNA, 19 nt, Artificial Sequence
  Description of Artificial Sequence: Synthetic oligonucleotide
gcggguugcucagcaccug

SEQ ID NO: 1552039 - RNA, 19 nt, Artificial Sequence
  Description of Artificial Sequence: Synthetic oligonucleotide
ggcggguugcucagcaccu

SEQ ID NO: 1552040 - RNA, 19 nt, Artificial Sequence
  Description of Artificial Sequence: Synthetic oligonucleotide
ccggagcaagcgacuucug

SEQ ID NO: 1552041 - RNA, 19 nt, Artificial Sequence
  Description of Artificial Sequence: Synthetic oligonucleotide
gguuuccacuggacaaccu

SEQ ID NO: 1552042 - RNA, 19 nt, Artificial Sequence
  Description of Artificial Sequence: Synthetic oligonucleotide
cgcgcacugaugcggcuuc

SEQ ID NO: 1552043 - RNA, 19 nt, Artificial Sequence
  Description of Artificial Sequence: Synthetic oligonucleotide
cgcagggaagccucacgga

SEQ ID NO: 1552044 - RNA, 19 nt, Artificial Sequence
  Description of Artificial Sequence: Synthetic oligonucleotide
guccgguggagccgagguu

SEQ ID NO: 1552045 - RNA, 19 nt, Artificial Sequence
  Description of Artificial Sequence: Synthetic oligonucleotide
ggacaaccuucgggacccc

SEQ ID NO: 1552046 - RNA, 19 nt, Artificial Sequence
  Description of Artificial Sequence: Synthetic oligonucleotide
cggguugcucagcaccuga

SEQ ID NO: 1552047 - RNA, 19 nt, Artificial Sequence
  Description of Artificial Sequence: Synthetic oligonucleotide
ccuccuccuccuccuccuc

SEQ ID NO: 1552048 - RNA, 19 nt, Artificial Sequence
  Description of Artificial Sequence: Synthetic oligonucleotide
caggggucuuuacgccagu

SEQ ID NO: 1552049 - RNA, 19 nt, Artificial Sequence
  Description of Artificial Sequence: Synthetic oligonucleotide
ggcaggggcgccuggccuu

SEQ ID NO: 1552050 - RNA, 19 nt, Artificial Sequence
  Description of Artificial Sequence: Synthetic oligonucleotide
ggccggugugugcgcaugu

SEQ ID NO: 1552051 - RNA, 19 nt, Artificial Sequence
  Description of Artificial Sequence: Synthetic oligonucleotide
gcgcgaugucagcuguggu

SEQ ID NO: 1552052 - RNA, 19 nt, Artificial Sequence
  Description of Artificial Sequence: Synthetic oligonucleotide
gcgccuggccuucacccau

SEQ ID NO: 1552053 - RNA, 19 nt, Artificial Sequence
  Description of Artificial Sequence: Synthetic oligonucleotide
cucccggcaccaccauaau

SEQ ID NO: 1552054 - RNA, 19 nt, Artificial Sequence
  Description of Artificial Sequence: Synthetic oligonucleotide
gcaguccgguggagccgag

SEQ ID NO: 1552055 - RNA, 19 nt, Artificial Sequence
  Description of Artificial Sequence: Synthetic oligonucleotide
cgguggagccgagguuucc

SEQ ID NO: 1552056 - RNA, 19 nt, Artificial Sequence
  Description of Artificial Sequence: Synthetic oligonucleotide
ggcucgcacgccagugugu

SEQ ID NO: 1552057 - RNA, 19 nt, Artificial Sequence
  Description of Artificial Sequence: Synthetic oligonucleotide
cgcaguccgguggagccga

SEQ ID NO: 1552058 - RNA, 19 nt, Artificial Sequence
  Description of Artificial Sequence: Synthetic oligonucleotide
cgcacgcagggaagccuca

SEQ ID NO: 1552059 - RNA, 19 nt, Artificial Sequence
  Description of Artificial Sequence: Synthetic oligonucleotide
cuggggcacccggggugaa

SEQ ID NO: 1552060 - RNA, 19 nt, Artificial Sequence
  Description of Artificial Sequence: Synthetic oligonucleotide
ccgccuagccucugcccgu

SEQ ID NO: 1552061 - RNA, 19 nt, Artificial Sequence
  Description of Artificial Sequence: Synthetic oligonucleotide
gcgggcacagcuggagcuu

SEQ ID NO: 1552062 - RNA, 19 nt, Artificial Sequence
  Description of Artificial Sequence: Synthetic oligonucleotide
cgcgcacgggagugcccga

SEQ ID NO: 1552063 - RNA, 19 nt, Artificial Sequence
  Description of Artificial Sequence: Synthetic oligonucleotide
ccgcgcacugaugcggcuu

SEQ ID NO: 1552064 - RNA, 19 nt, Artificial Sequence
  Description of Artificial Sequence: Synthetic oligonucleotide
gcggguccucacgcgcgau

SEQ ID NO: 1552065 - RNA, 19 nt, Artificial Sequence
  Description of Artificial Sequence: Synthetic oligonucleotide
cgccuagccucugcccguu

SEQ ID NO: 1552066 - RNA, 19 nt, Artificial Sequence
  Description of Artificial Sequence: Synthetic oligonucleotide
  modified_base (1)..(1): a, c, u, g, unknown or other
nuccgaauggccaagcagc

SEQ ID NO: 1552067 - RNA, 19 nt, Artificial Sequence
  Description of Artificial Sequence: Synthetic oligonucleotide
aauauaagcagagucaggc

SEQ ID NO: 1552068 - RNA, 19 nt, Artificial Sequence
  Description of Artificial Sequence: Synthetic oligonucleotide
agagauaucaacuucacug

SEQ ID NO: 1552069 - RNA, 19 nt, Artificial Sequence
  Description of Artificial Sequence: Synthetic oligonucleotide
aaugugcuuaaaucgaagc

SEQ ID NO: 1552070 - RNA, 19 nt, Artificial Sequence
  Description of Artificial Sequence: Synthetic oligonucleotide
uauacaagcacaaagcacu

SEQ ID NO: 1552071 - RNA, 19 nt, Artificial Sequence
  Description of Artificial Sequence: Synthetic oligonucleotide
aacgccauggcuuaagccg

SEQ ID NO: 1552072 - RNA, 19 nt, Artificial Sequence
  Description of Artificial Sequence: Synthetic oligonucleotide
gaggaaugugcuuaaaucg

SEQ ID NO: 1552073 - RNA, 19 nt, Artificial Sequence
  Description of Artificial Sequence: Synthetic oligonucleotide
uguuguagggcuuugcugg

SEQ ID NO: 1552074 - RNA, 19 nt, Artificial Sequence
  Description of Artificial Sequence: Synthetic oligonucleotide
aagaucacaugugucaucc

SEQ ID NO: 1552075 - RNA, 19 nt, Artificial Sequence
  Description of Artificial Sequence: Synthetic oligonucleotide
guugcaagaaugcaaaggg

SEQ ID NO: 1552076 - RNA, 19 nt, Artificial Sequence
  Description of Artificial Sequence: Synthetic oligonucleotide
ucaucuaagagcccuaggc

SEQ ID NO: 1552077 - RNA, 19 nt, Artificial Sequence
  Description of Artificial Sequence: Synthetic oligonucleotide
uucacuuuagcuguuaaag

SEQ ID NO: 1552078 - RNA, 19 nt, Artificial Sequence
  Description of Artificial Sequence: Synthetic oligonucleotide
auuggguucacugucaugg

SEQ ID NO: 1552079 - RNA, 19 nt, Artificial Sequence
  Description of Artificial Sequence: Synthetic oligonucleotide
ucauccauucgaaacagag

SEQ ID NO: 1552080 - RNA, 19 nt, Artificial Sequence
  Description of Artificial Sequence: Synthetic oligonucleotide
aaagcacuacccuacuagg

SEQ ID NO: 1552081 - RNA, 19 nt, Artificial Sequence
  Description of Artificial Sequence: Synthetic oligonucleotide
cucuaauacgccauggugg

SEQ ID NO: 1552082 - RNA, 19 nt, Artificial Sequence
  Description of Artificial Sequence: Synthetic oligonucleotide
ucuucuaucagaucuuuca

SEQ ID NO: 1552083 - RNA, 19 nt, Artificial Sequence
  Description of Artificial Sequence: Synthetic oligonucleotide
agacuauauauacaagcac

SEQ ID NO: 1552084 - RNA, 19 nt, Artificial Sequence
  Description of Artificial Sequence: Synthetic oligonucleotide
agauauuggaucucuuugg

SEQ ID NO: 1552085 - RNA, 19 nt, Artificial Sequence
  Description of Artificial Sequence: Synthetic oligonucleotide
uaauuuauuacagcaaaca

SEQ ID NO: 1552086 - RNA, 19 nt, Artificial Sequence
  Description of Artificial Sequence: Synthetic oligonucleotide
uuagaguaauauaagcaga

SEQ ID NO: 1552087 - RNA, 19 nt, Artificial Sequence
  Description of Artificial Sequence: Synthetic oligonucleotide
aaacgccauggcuuaagcc

SEQ ID NO: 1552088 - RNA, 19 nt, Artificial Sequence
  Description of Artificial Sequence: Synthetic oligonucleotide
ucgaaacagagcaucaaag

SEQ ID NO: 1552089 - RNA, 19 nt, Artificial Sequence
  Description of Artificial Sequence: Synthetic oligonucleotide
aagguuugggucuugguga

SEQ ID NO: 1552090 - RNA, 19 nt, Artificial Sequence
  Description of Artificial Sequence: Synthetic oligonucleotide
uaagguuugggucuuggug

SEQ ID NO: 1552091 - RNA, 19 nt, Artificial Sequence
  Description of Artificial Sequence: Synthetic oligonucleotide
uggccaaaagcucaucugg

SEQ ID NO: 1552092 - RNA, 19 nt, Artificial Sequence
  Description of Artificial Sequence: Synthetic oligonucleotide
agguagucaucuaagagcc

SEQ ID NO: 1552093 - RNA, 19 nt, Artificial Sequence
  Description of Artificial Sequence: Synthetic oligonucleotide
gaaugcauccuccuugccg

SEQ ID NO: 1552094 - RNA, 19 nt, Artificial Sequence
  Description of Artificial Sequence: Synthetic oligonucleotide
acggguaacaacuggagag

SEQ ID NO: 1552095 - RNA, 19 nt, Artificial Sequence
  Description of Artificial Sequence: Synthetic oligonucleotide
aacccaugagguuugaagu

SEQ ID NO: 1552096 - RNA, 19 nt, Artificial Sequence
  Description of Artificial Sequence: Synthetic oligonucleotide
gauuagaguaauauaagca

SEQ ID NO: 1552097 - RNA, 19 nt, Artificial Sequence
  Description of Artificial Sequence: Synthetic oligonucleotide
aaugaucuggaguggaaga

SEQ ID NO: 1552098 - RNA, 19 nt, Artificial Sequence
  Description of Artificial Sequence: Synthetic oligonucleotide
aacacuucgcuguucagga

SEQ ID NO: 1552099 - RNA, 19 nt, Artificial Sequence
  Description of Artificial Sequence: Synthetic oligonucleotide
aagacuauauauacaagca

SEQ ID NO: 1552100 - RNA, 19 nt, Artificial Sequence
  Description of Artificial Sequence: Synthetic oligonucleotide
ucuaauacgccaugguggc

SEQ ID NO: 1552101 - RNA, 19 nt, Artificial Sequence
  Description of Artificial Sequence: Synthetic oligonucleotide
gaacccaugagguuugaag

SEQ ID NO: 1552102 - RNA, 19 nt, Artificial Sequence
  Description of Artificial Sequence: Synthetic oligonucleotide
ugugcuuaaaucgaagcug

SEQ ID NO: 1552103 - RNA, 19 nt, Artificial Sequence
  Description of Artificial Sequence: Synthetic oligonucleotide
acaugugucauccaacgug

SEQ ID NO: 1552104 - RNA, 19 nt, Artificial Sequence
  Description of Artificial Sequence: Synthetic oligonucleotide
gauauuggaucucuuuggc

SEQ ID NO: 1552105 - RNA, 19 nt, Artificial Sequence
  Description of Artificial Sequence: Synthetic oligonucleotide
guuacagcaacgcugcugc

SEQ ID NO: 1552106 - RNA, 19 nt, Artificial Sequence
  Description of Artificial Sequence: Synthetic oligonucleotide
guaauauaagcagagucag

SEQ ID NO: 1552107 - RNA, 19 nt, Artificial Sequence
  Description of Artificial Sequence: Synthetic oligonucleotide
caugugucauccaacgugg

SEQ ID NO: 1552108 - RNA, 19 nt, Artificial Sequence
  Description of Artificial Sequence: Synthetic oligonucleotide
uaauauaagcagagucagg

SEQ ID NO: 1552109 - RNA, 19 nt, Artificial Sequence
  Description of Artificial Sequence: Synthetic oligonucleotide
ucugucgguaucuaguggc

SEQ ID NO: 1552110 - RNA, 19 nt, Artificial Sequence
  Description of Artificial Sequence: Synthetic oligonucleotide
ucuuuuagagcuucauucu

SEQ ID NO: 1552111 - RNA, 19 nt, Artificial Sequence
  Description of Artificial Sequence: Synthetic oligonucleotide
uugcaagaaugcaaagggg

SEQ ID NO: 1552112 - RNA, 19 nt, Artificial Sequence
  Description of Artificial Sequence: Synthetic oligonucleotide
uaauacgccaugguggccg

SEQ ID NO: 1552113 - RNA, 19 nt, Artificial Sequence
  Description of Artificial Sequence: Synthetic oligonucleotide
ugacccacggguaacaacu

SEQ ID NO: 1552114 - RNA, 19 nt, Artificial Sequence
  Description of Artificial Sequence: Synthetic oligonucleotide
uagcuguuaaaguaacucc

SEQ ID NO: 1552115 - RNA, 19 nt, Artificial Sequence
  Description of Artificial Sequence: Synthetic oligonucleotide
uccuucagagauaucaacu

SEQ ID NO: 1552116 - RNA, 19 nt, Artificial Sequence
  Description of Artificial Sequence: Synthetic oligonucleotide
caaagcacuacccuacuag

SEQ ID NO: 1552117 - RNA, 19 nt, Artificial Sequence
  Description of Artificial Sequence: Synthetic oligonucleotide
auaauuuauuacagcaaac

SEQ ID NO: 1552118 - RNA, 19 nt, Artificial Sequence
  Description of Artificial Sequence: Synthetic oligonucleotide
ucuucugucgguaucuagu

SEQ ID NO: 1552119 - RNA, 19 nt, Artificial Sequence
  Description of Artificial Sequence: Synthetic oligonucleotide
cuggaaucgaggaaugugc

SEQ ID NO: 1552120 - RNA, 19 nt, Artificial Sequence
  Description of Artificial Sequence: Synthetic oligonucleotide
ccuaacucuaaacugaagg

SEQ ID NO: 1552121 - RNA, 19 nt, Artificial Sequence
  Description of Artificial Sequence: Synthetic oligonucleotide
guucaggaagcucaucucg

SEQ ID NO: 1552122 - RNA, 19 nt, Artificial Sequence
  Description of Artificial Sequence: Synthetic oligonucleotide
aaacccgacuggucgaagg

SEQ ID NO: 1552123 - RNA, 19 nt, Artificial Sequence
  Description of Artificial Sequence: Synthetic oligonucleotide
ucuuuucuagcucucuaca

SEQ ID NO: 1552124 - RNA, 19 nt, Artificial Sequence
  Description of Artificial Sequence: Synthetic oligonucleotide
gaaaagguugcaagaaugc

SEQ ID NO: 1552125 - RNA, 19 nt, Artificial Sequence
  Description of Artificial Sequence: Synthetic oligonucleotide
uccguuacagcaacgcugc

SEQ ID NO: 1552126 - RNA, 19 nt, Artificial Sequence
  Description of Artificial Sequence: Synthetic oligonucleotide
uauaagcagagucaggcuu

SEQ ID NO: 1552127 - RNA, 19 nt, Artificial Sequence
  Description of Artificial Sequence: Synthetic oligonucleotide
aaauaauuuauuacagcaa

SEQ ID NO: 1552128 - RNA, 19 nt, Artificial Sequence
  Description of Artificial Sequence: Synthetic oligonucleotide
cuaaacugaaggaaugauc

SEQ ID NO: 1552129 - RNA, 19 nt, Artificial Sequence
  Description of Artificial Sequence: Synthetic oligonucleotide
uuuagagcuucauucuucu

SEQ ID NO: 1552130 - RNA, 19 nt, Artificial Sequence
  Description of Artificial Sequence: Synthetic oligonucleotide
ggauuagaguaauauaagc

SEQ ID NO: 1552131 - RNA, 19 nt, Artificial Sequence
  Description of Artificial Sequence: Synthetic oligonucleotide
cacagcuucaucacaagac

SEQ ID NO: 1552132 - RNA, 19 nt, Artificial Sequence
  Description of Artificial Sequence: Synthetic oligonucleotide
ucuggcaugguauccaggu

SEQ ID NO: 1552133 - RNA, 19 nt, Artificial Sequence
  Description of Artificial Sequence: Synthetic oligonucleotide
gaccaacccauccacagcc

SEQ ID NO: 1552134 - RNA, 19 nt, Artificial Sequence
  Description of Artificial Sequence: Synthetic oligonucleotide
ucuuauccaacuuuucaau

SEQ ID NO: 1552135 - RNA, 19 nt, Artificial Sequence
  Description of Artificial Sequence: Synthetic oligonucleotide
uuauccaacuuuucaauuu

SEQ ID NO: 1552136 - RNA, 19 nt, Artificial Sequence
  Description of Artificial Sequence: Synthetic oligonucleotide
ucuacacucgccugucagg

SEQ ID NO: 1552137 - RNA, 19 nt, Artificial Sequence
  Description of Artificial Sequence: Synthetic oligonucleotide
aacccgacuggucgaaggg

SEQ ID NO: 1552138 - RNA, 19 nt, Artificial Sequence
  Description of Artificial Sequence: Synthetic oligonucleotide
uagucucuuggacuagagg

SEQ ID NO: 1552139 - RNA, 19 nt, Artificial Sequence
  Description of Artificial Sequence: Synthetic oligonucleotide
ucaacuucacugccuaacu

SEQ ID NO: 1552140 - RNA, 19 nt, Artificial Sequence
  Description of Artificial Sequence: Synthetic oligonucleotide
uucgaaacagagcaucaaa

SEQ ID NO: 1552141 - RNA, 19 nt, Artificial Sequence
  Description of Artificial Sequence: Synthetic oligonucleotide
aauacgccaugguggccgc

SEQ ID NO: 1552142 - RNA, 19 nt, Artificial Sequence
  Description of Artificial Sequence: Synthetic oligonucleotide
aagcacaaagcacuacccu

SEQ ID NO: 1552143 - RNA, 19 nt, Artificial Sequence
  Description of Artificial Sequence: Synthetic oligonucleotide
cuaacucuaaacugaagga

SEQ ID NO: 1552144 - RNA, 19 nt, Artificial Sequence
  Description of Artificial Sequence: Synthetic oligonucleotide
ucacuuuagcuguuaaagu

SEQ ID NO: 1552145 - RNA, 19 nt, Artificial Sequence
  Description of Artificial Sequence: Synthetic oligonucleotide
auccaacguggccaaaagc

SEQ ID NO: 1552146 - RNA, 19 nt, Artificial Sequence
  Description of Artificial Sequence: Synthetic oligonucleotide
ugugucauccaacguggcc

SEQ ID NO: 1552147 - RNA, 19 nt, Artificial Sequence
  Description of Artificial Sequence: Synthetic oligonucleotide
augugcuuaaaucgaagcu

SEQ ID NO: 1552148 - RNA, 19 nt, Artificial Sequence
  Description of Artificial Sequence: Synthetic oligonucleotide
cuguuaaaguaacuccagg

SEQ ID NO: 1552149 - RNA, 19 nt, Artificial Sequence
  Description of Artificial Sequence: Synthetic oligonucleotide
aaaagaucacaugugucau

SEQ ID NO: 1552150 - RNA, 19 nt, Artificial Sequence
  Description of Artificial Sequence: Synthetic oligonucleotide
cuucuaucagaucuuucag

SEQ ID NO: 1552151 - RNA, 19 nt, Artificial Sequence
  Description of Artificial Sequence: Synthetic oligonucleotide
caggucauccauucgaaac

SEQ ID NO: 1552152 - RNA, 19 nt, Artificial Sequence
  Description of Artificial Sequence: Synthetic oligonucleotide
aaaucgaagcugucuuugu

SEQ ID NO: 1552153 - RNA, 19 nt, Artificial Sequence
  Description of Artificial Sequence: Synthetic oligonucleotide
ucggucauguuguagggcu

SEQ ID NO: 1552154 - RNA, 19 nt, Artificial Sequence
  Description of Artificial Sequence: Synthetic oligonucleotide
uuagucucuuggacuagag

SEQ ID NO: 1552155 - RNA, 19 nt, Artificial Sequence
  Description of Artificial Sequence: Synthetic oligonucleotide
cauggcuuaagccgguggg

SEQ ID NO: 1552156 - RNA, 19 nt, Artificial Sequence
  Description of Artificial Sequence: Synthetic oligonucleotide
uucugucgguaucuagugg

SEQ ID NO: 1552157 - RNA, 19 nt, Artificial Sequence
  Description of Artificial Sequence: Synthetic oligonucleotide
cauccauucgaaacagagc

SEQ ID NO: 1552158 - RNA, 19 nt, Artificial Sequence
  Description of Artificial Sequence: Synthetic oligonucleotide
uaacucuaaacugaaggaa

SEQ ID NO: 1552159 - RNA, 19 nt, Artificial Sequence
  Description of Artificial Sequence: Synthetic oligonucleotide
uaggacucagggcucauac

SEQ ID NO: 1552160 - RNA, 19 nt, Artificial Sequence
  Description of Artificial Sequence: Synthetic oligonucleotide
cuuuucuagcucucuacac

SEQ ID NO: 1552161 - RNA, 19 nt, Artificial Sequence
  Description of Artificial Sequence: Synthetic oligonucleotide
uggccaauuggguucacug

SEQ ID NO: 1552162 - RNA, 19 nt, Artificial Sequence
  Description of Artificial Sequence: Synthetic oligonucleotide
cuggggaacagggaaaagg

SEQ ID NO: 1552163 - RNA, 19 nt, Artificial Sequence
  Description of Artificial Sequence: Synthetic oligonucleotide
cugaccaacccauccacag

SEQ ID NO: 1552164 - RNA, 19 nt, Artificial Sequence
  Description of Artificial Sequence: Synthetic oligonucleotide
uuguugcacuuucugggag

SEQ ID NO: 1552165 - RNA, 19 nt, Artificial Sequence
  Description of Artificial Sequence: Synthetic oligonucleotide
agagcccuaggcuuucuuc

SEQ ID NO: 1552166 - RNA, 19 nt, Artificial Sequence
  Description of Artificial Sequence: Synthetic oligonucleotide
agcacuacccuacuaggga

SEQ ID NO: 1552167 - RNA, 19 nt, Artificial Sequence
  Description of Artificial Sequence: Synthetic oligonucleotide
auuggaucucuuuggcaag

SEQ ID NO: 1552168 - RNA, 19 nt, Artificial Sequence
  Description of Artificial Sequence: Synthetic oligonucleotide
aaggaaugaucuggagugg

SEQ ID NO: 1552169 - RNA, 19 nt, Artificial Sequence
  Description of Artificial Sequence: Synthetic oligonucleotide
ucuuuggcaagagaaucug

SEQ ID NO: 1552170 - RNA, 19 nt, Artificial Sequence
  Description of Artificial Sequence: Synthetic oligonucleotide
gucaugggcuccuuguuag

SEQ ID NO: 1552171 - RNA, 19 nt, Artificial Sequence
  Description of Artificial Sequence: Synthetic oligonucleotide
aagcacuacccuacuaggg

SEQ ID NO: 1552172 - RNA, 19 nt, Artificial Sequence
  Description of Artificial Sequence: Synthetic oligonucleotide
guaacaacuggagagggca

SEQ ID NO: 1552173 - RNA, 19 nt, Artificial Sequence
  Description of Artificial Sequence: Synthetic oligonucleotide
augaucuggaguggaagac

SEQ ID NO: 1552174 - RNA, 19 nt, Artificial Sequence
  Description of Artificial Sequence: Synthetic oligonucleotide
uuuguccguuacagcaacg

SEQ ID NO: 1552175 - RNA, 19 nt, Artificial Sequence
  Description of Artificial Sequence: Synthetic oligonucleotide
aagguugcaagaaugcaaa

SEQ ID NO: 1552176 - RNA, 19 nt, Artificial Sequence
  Description of Artificial Sequence: Synthetic oligonucleotide
auguuguagggcuuugcug

SEQ ID NO: 1552177 - RNA, 19 nt, Artificial Sequence
  Description of Artificial Sequence: Synthetic oligonucleotide
aauuggguucacugucaug

SEQ ID NO: 1552178 - RNA, 19 nt, Artificial Sequence
  Description of Artificial Sequence: Synthetic oligonucleotide
auauuggaucucuuuggca

SEQ ID NO: 1552179 - RNA, 19 nt, Artificial Sequence
  Description of Artificial Sequence: Synthetic oligonucleotide
auauaagcagagucaggcu

SEQ ID NO: 1552180 - RNA, 19 nt, Artificial Sequence
  Description of Artificial Sequence: Synthetic oligonucleotide
uggaaucgaggaaugugcu

SEQ ID NO: 1552181 - RNA, 19 nt, Artificial Sequence
  Description of Artificial Sequence: Synthetic oligonucleotide
uacuagggagcucucuucu

SEQ ID NO: 1552182 - RNA, 19 nt, Artificial Sequence
  Description of Artificial Sequence: Synthetic oligonucleotide
acugucaugggcuccuugu

SEQ ID NO: 1552183 - RNA, 19 nt, Artificial Sequence
  Description of Artificial Sequence: Synthetic oligonucleotide
auaagcagagucaggcuuc

SEQ ID NO: 1552184 - RNA, 19 nt, Artificial Sequence
  Description of Artificial Sequence: Synthetic oligonucleotide
uuccggaccucuucuauca

SEQ ID NO: 1552185 - RNA, 19 nt, Artificial Sequence
  Description of Artificial Sequence: Synthetic oligonucleotide
ucugaggcacugaccaacc

SEQ ID NO: 1552186 - RNA, 19 nt, Artificial Sequence
  Description of Artificial Sequence: Synthetic oligonucleotide
auaucaacuucacugccua

SEQ ID NO: 1552187 - RNA, 19 nt, Artificial Sequence
  Description of Artificial Sequence: Synthetic oligonucleotide
cuucugucgguaucuagug

SEQ ID NO: 1552188 - RNA, 19 nt, Artificial Sequence
  Description of Artificial Sequence: Synthetic oligonucleotide
ucgaggaaugugcuuaaau

SEQ ID NO: 1552189 - RNA, 19 nt, Artificial Sequence
  Description of Artificial Sequence: Synthetic oligonucleotide
ucuaaacugaaggaaugau

SEQ ID NO: 1552190 - RNA, 19 nt, Artificial Sequence
  Description of Artificial Sequence: Synthetic oligonucleotide
uaacaacuggagagggcag

SEQ ID NO: 1552191 - RNA, 19 nt, Artificial Sequence
  Description of Artificial Sequence: Synthetic oligonucleotide
aucacaugugucauccaac

SEQ ID NO: 1552192 - RNA, 19 nt, Artificial Sequence
  Description of Artificial Sequence: Synthetic oligonucleotide
ggaaaagguugcaagaaug

SEQ ID NO: 1552193 - RNA, 19 nt, Artificial Sequence
  Description of Artificial Sequence: Synthetic oligonucleotide
agguuugggucuuggugac

SEQ ID NO: 1552194 - RNA, 19 nt, Artificial Sequence
  Description of Artificial Sequence: Synthetic oligonucleotide
aacagagcaucaaagucaa

SEQ ID NO: 1552195 - RNA, 19 nt, Artificial Sequence
  Description of Artificial Sequence: Synthetic oligonucleotide
agaaugcauccuccuugcc

SEQ ID NO: 1552196 - RNA, 19 nt, Artificial Sequence
  Description of Artificial Sequence: Synthetic oligonucleotide
cacuucgcuguucaggaag

SEQ ID NO: 1552197 - RNA, 19 nt, Artificial Sequence
  Description of Artificial Sequence: Synthetic oligonucleotide
uuggcaagagaaucugccu

SEQ ID NO: 1552198 - RNA, 19 nt, Artificial Sequence
  Description of Artificial Sequence: Synthetic oligonucleotide
uguugcacuuucugggaga

SEQ ID NO: 1552199 - RNA, 19 nt, Artificial Sequence
  Description of Artificial Sequence: Synthetic oligonucleotide
cuacacucgccugucaggg

SEQ ID NO: 1552200 - RNA, 19 nt, Artificial Sequence
  Description of Artificial Sequence: Synthetic oligonucleotide
agcuguuaaaguaacucca

SEQ ID NO: 1552201 - RNA, 19 nt, Artificial Sequence
  Description of Artificial Sequence: Synthetic oligonucleotide
cugggagauggccaauugg

SEQ ID NO: 1552202 - RNA, 19 nt, Artificial Sequence
  Description of Artificial Sequence: Synthetic oligonucleotide
uuauuacagcaaacacagc

SEQ ID NO: 1552203 - RNA, 19 nt, Artificial Sequence
  Description of Artificial Sequence: Synthetic oligonucleotide
uggccgcaaacccugcggg

SEQ ID NO: 1552204 - RNA, 19 nt, Artificial Sequence
  Description of Artificial Sequence: Synthetic oligonucleotide
ugaccaacccauccacagc

SEQ ID NO: 1552205 - RNA, 19 nt, Artificial Sequence
  Description of Artificial Sequence: Synthetic oligonucleotide
uuguccguuacagcaacgc

SEQ ID NO: 1552206 - RNA, 19 nt, Artificial Sequence
  Description of Artificial Sequence: Synthetic oligonucleotide
uacccuacuagggagcucu

SEQ ID NO: 1552207 - RNA, 19 nt, Artificial Sequence
  Description of Artificial Sequence: Synthetic oligonucleotide
guauccaggucauccauuc

SEQ ID NO: 1552208 - RNA, 19 nt, Artificial Sequence
  Description of Artificial Sequence: Synthetic oligonucleotide
cacugcugccucuaauacg

SEQ ID NO: 1552209 - RNA, 19 nt, Artificial Sequence
  Description of Artificial Sequence: Synthetic oligonucleotide
uuaaaucgaagcugucuuu

SEQ ID NO: 1552210 - RNA, 19 nt, Artificial Sequence
  Description of Artificial Sequence: Synthetic oligonucleotide
cacuuuagcuguuaaagua

SEQ ID NO: 1552211 - RNA, 19 nt, Artificial Sequence
  Description of Artificial Sequence: Synthetic oligonucleotide
agcacaaagcacuacccua

SEQ ID NO: 1552212 - RNA, 19 nt, Artificial Sequence
  Description of Artificial Sequence: Synthetic oligonucleotide
ugucuuuguccguuacagc

SEQ ID NO: 1552213 - RNA, 19 nt, Artificial Sequence
  Description of Artificial Sequence: Synthetic oligonucleotide
gaaucgaggaaugugcuua

SEQ ID NO: 1552214 - RNA, 19 nt, Artificial Sequence
  Description of Artificial Sequence: Synthetic oligonucleotide
gucgguaucuaguggcugc

SEQ ID NO: 1552215 - RNA, 19 nt, Artificial Sequence
  Description of Artificial Sequence: Synthetic oligonucleotide
uggcaagagaaucugccuu

SEQ ID NO: 1552216 - RNA, 19 nt, Artificial Sequence
  Description of Artificial Sequence: Synthetic oligonucleotide
caucacaagacuauauaua

SEQ ID NO: 1552217 - RNA, 19 nt, Artificial Sequence
  Description of Artificial Sequence: Synthetic oligonucleotide
cauacagaugccacuguca

SEQ ID NO: 1552218 - RNA, 19 nt, Artificial Sequence
  Description of Artificial Sequence: Synthetic oligonucleotide
aaucgaggaaugugcuuaa

SEQ ID NO: 1552219 - RNA, 19 nt, Artificial Sequence
  Description of Artificial Sequence: Synthetic oligonucleotide
cuuuguccguuacagcaac

SEQ ID NO: 1552220 - RNA, 19 nt, Artificial Sequence
  Description of Artificial Sequence: Synthetic oligonucleotide
acaacuggagagggcagac

SEQ ID NO: 1552221 - RNA, 19 nt, Artificial Sequence
  Description of Artificial Sequence: Synthetic oligonucleotide
uggagaacccaugagguuu

SEQ ID NO: 1552222 - RNA, 19 nt, Artificial Sequence
  Description of Artificial Sequence: Synthetic oligonucleotide
ggggauuagaguaauauaa

SEQ ID NO: 1552223 - RNA, 19 nt, Artificial Sequence
  Description of Artificial Sequence: Synthetic oligonucleotide
cugccuaacucuaaacuga

SEQ ID NO: 1552224 - RNA, 19 nt, Artificial Sequence
  Description of Artificial Sequence: Synthetic oligonucleotide
cauaagguuugggucuugg

SEQ ID NO: 1552225 - RNA, 19 nt, Artificial Sequence
  Description of Artificial Sequence: Synthetic oligonucleotide
aggaaugugcuuaaaucga

SEQ ID NO: 1552226 - RNA, 19 nt, Artificial Sequence
  Description of Artificial Sequence: Synthetic oligonucleotide
aaggccaacgcugccgcag

SEQ ID NO: 1552227 - RNA, 19 nt, Artificial Sequence
  Description of Artificial Sequence: Synthetic oligonucleotide
acaagacuauauauacaag

SEQ ID NO: 1552228 - RNA, 19 nt, Artificial Sequence
  Description of Artificial Sequence: Synthetic oligonucleotide
acuuuagcuguuaaaguaa

SEQ ID NO: 1552229 - RNA, 19 nt, Artificial Sequence
  Description of Artificial Sequence: Synthetic oligonucleotide
cucuacacucgccugucag

SEQ ID NO: 1552230 - RNA, 19 nt, Artificial Sequence
  Description of Artificial Sequence: Synthetic oligonucleotide
auaagguuugggucuuggu

SEQ ID NO: 1552231 - RNA, 19 nt, Artificial Sequence
  Description of Artificial Sequence: Synthetic oligonucleotide
ugccuaacucuaaacugaa

SEQ ID NO: 1552232 - RNA, 19 nt, Artificial Sequence
  Description of Artificial Sequence: Synthetic oligonucleotide
gucaucuaagagcccuagg

SEQ ID NO: 1552233 - RNA, 19 nt, Artificial Sequence
  Description of Artificial Sequence: Synthetic oligonucleotide
cagucugucccggagaaug

SEQ ID NO: 1552234 - RNA, 19 nt, Artificial Sequence
  Description of Artificial Sequence: Synthetic oligonucleotide
guccccagccaacacuucg

SEQ ID NO: 1552235 - RNA, 19 nt, Artificial Sequence
  Description of Artificial Sequence: Synthetic oligonucleotide
gggauuagaguaauauaag

SEQ ID NO: 1552236 - RNA, 19 nt, Artificial Sequence
  Description of Artificial Sequence: Synthetic oligonucleotide
guccguuacagcaacgcug

SEQ ID NO: 1552237 - RNA, 19 nt, Artificial Sequence
  Description of Artificial Sequence: Synthetic oligonucleotide
agaguaauauaagcagagu

SEQ ID NO: 1552238 - RNA, 19 nt, Artificial Sequence
  Description of Artificial Sequence: Synthetic oligonucleotide
acacucgccugucagggcu

SEQ ID NO: 1552239 - RNA, 19 nt, Artificial Sequence
  Description of Artificial Sequence: Synthetic oligonucleotide
ugccucuaauacgccaugg

SEQ ID NO: 1552240 - RNA, 19 nt, Artificial Sequence
  Description of Artificial Sequence: Synthetic oligonucleotide
uguagggcuuugcuggaau

SEQ ID NO: 1552241 - RNA, 19 nt, Artificial Sequence
  Description of Artificial Sequence: Synthetic oligonucleotide
aacagggaaaagguugcaa

SEQ ID NO: 1552242 - RNA, 19 nt, Artificial Sequence
  Description of Artificial Sequence: Synthetic oligonucleotide
gacaucaaguccccagcca

SEQ ID NO: 1552243 - RNA, 19 nt, Artificial Sequence
  Description of Artificial Sequence: Synthetic oligonucleotide
uacagcaacgcugcugcug

SEQ ID NO: 1552244 - RNA, 19 nt, Artificial Sequence
  Description of Artificial Sequence: Synthetic oligonucleotide
gagcccuaggcuuucuuca

SEQ ID NO: 1552245 - RNA, 19 nt, Artificial Sequence
  Description of Artificial Sequence: Synthetic oligonucleotide
cauccaacguggccaaaag

SEQ ID NO: 1552246 - RNA, 19 nt, Artificial Sequence
  Description of Artificial Sequence: Synthetic oligonucleotide
uccccagccaacacuucgc

SEQ ID NO: 1552247 - RNA, 19 nt, Artificial Sequence
  Description of Artificial Sequence: Synthetic oligonucleotide
cauucgaaacagagcauca

SEQ ID NO: 1552248 - RNA, 19 nt, Artificial Sequence
  Description of Artificial Sequence: Synthetic oligonucleotide
auggcuuaagccggugggg

SEQ ID NO: 1552249 - RNA, 19 nt, Artificial Sequence
  Description of Artificial Sequence: Synthetic oligonucleotide
agacugcuuggugaucccc

SEQ ID NO: 1552250 - RNA, 19 nt, Artificial Sequence
  Description of Artificial Sequence: Synthetic oligonucleotide
ucgcuggagaacccaugag

SEQ ID NO: 1552251 - RNA, 19 nt, Artificial Sequence
  Description of Artificial Sequence: Synthetic oligonucleotide
acccacggguaacaacugg

SEQ ID NO: 1552252 - RNA, 19 nt, Artificial Sequence
  Description of Artificial Sequence: Synthetic oligonucleotide
ugucgcuggagaacccaug

SEQ ID NO: 1552253 - RNA, 19 nt, Artificial Sequence
  Description of Artificial Sequence: Synthetic oligonucleotide
cacuacccuacuagggagc

SEQ ID NO: 1552254 - RNA, 19 nt, Artificial Sequence
  Description of Artificial Sequence: Synthetic oligonucleotide
cuacuagggagcucucuuc

SEQ ID NO: 1552255 - RNA, 19 nt, Artificial Sequence
  Description of Artificial Sequence: Synthetic oligonucleotide
gggucauaagguuuggguc

SEQ ID NO: 1552256 - RNA, 19 nt, Artificial Sequence
  Description of Artificial Sequence: Synthetic oligonucleotide
ugguauccaggucauccau

SEQ ID NO: 1552257 - RNA, 19 nt, Artificial Sequence
  Description of Artificial Sequence: Synthetic oligonucleotide
guggccgcaaacccugcgg

SEQ ID NO: 1552258 - RNA, 19 nt, Artificial Sequence
  Description of Artificial Sequence: Synthetic oligonucleotide
agucaucuaagagcccuag

SEQ ID NO: 1552259 - RNA, 19 nt, Artificial Sequence
  Description of Artificial Sequence: Synthetic oligonucleotide
ucauguuguagggcuuugc

SEQ ID NO: 1552260 - RNA, 19 nt, Artificial Sequence
  Description of Artificial Sequence: Synthetic oligonucleotide
ggaacagggaaaagguugc

SEQ ID NO: 1552261 - RNA, 19 nt, Artificial Sequence
  Description of Artificial Sequence: Synthetic oligonucleotide
ggcacugaccaacccaucc

SEQ ID NO: 1552262 - RNA, 19 nt, Artificial Sequence
  Description of Artificial Sequence: Synthetic oligonucleotide
uccauucgaaacagagcau

SEQ ID NO: 1552263 - RNA, 19 nt, Artificial Sequence
  Description of Artificial Sequence: Synthetic oligonucleotide
uaagcagagucaggcuucc

SEQ ID NO: 1552264 - RNA, 19 nt, Artificial Sequence
  Description of Artificial Sequence: Synthetic oligonucleotide
uguuagucucuuggacuag

SEQ ID NO: 1552265 - RNA, 19 nt, Artificial Sequence
  Description of Artificial Sequence: Synthetic oligonucleotide
cuuaaaucgaagcugucuu

SEQ ID NO: 1552266 - RNA, 19 nt, Artificial Sequence
  Description of Artificial Sequence: Synthetic oligonucleotide
caacguggccaaaagcuca

SEQ ID NO: 1552267 - RNA, 19 nt, Artificial Sequence
  Description of Artificial Sequence: Synthetic oligonucleotide
guaucuaguggcugcuguc

SEQ ID NO: 1552268 - RNA, 19 nt, Artificial Sequence
  Description of Artificial Sequence: Synthetic oligonucleotide
caacuucacugccuaacuc

SEQ ID NO: 1552269 - RNA, 19 nt, Artificial Sequence
  Description of Artificial Sequence: Synthetic oligonucleotide
uucagauauuggaucucuu

SEQ ID NO: 1552270 - RNA, 19 nt, Artificial Sequence
  Description of Artificial Sequence: Synthetic oligonucleotide
gaucuuucagauauuggau

SEQ ID NO: 1552271 - RNA, 19 nt, Artificial Sequence
  Description of Artificial Sequence: Synthetic oligonucleotide
ucugucccggagaaugcau

SEQ ID NO: 1552272 - RNA, 19 nt, Artificial Sequence
  Description of Artificial Sequence: Synthetic oligonucleotide
auccacagccagccauucg

SEQ ID NO: 1552273 - RNA, 19 nt, Artificial Sequence
  Description of Artificial Sequence: Synthetic oligonucleotide
ugucgguaucuaguggcug

SEQ ID NO: 1552274 - RNA, 19 nt, Artificial Sequence
  Description of Artificial Sequence: Synthetic oligonucleotide
uucagcccgcuucuucugu

SEQ ID NO: 1552275 - RNA, 19 nt, Artificial Sequence
  Description of Artificial Sequence: Synthetic oligonucleotide
uugccggugucugaggcac

SEQ ID NO: 1552276 - RNA, 19 nt, Artificial Sequence
  Description of Artificial Sequence: Synthetic oligonucleotide
ugcuuaaaucgaagcuguc

SEQ ID NO: 1552277 - RNA, 19 nt, Artificial Sequence
  Description of Artificial Sequence: Synthetic oligonucleotide
uggaucucuuuggcaagag

SEQ ID NO: 1552278 - RNA, 19 nt, Artificial Sequence
  Description of Artificial Sequence: Synthetic oligonucleotide
ccucuaauacgccauggug

SEQ ID NO: 1552279 - RNA, 19 nt, Artificial Sequence
  Description of Artificial Sequence: Synthetic oligonucleotide
guagucaucuaagagcccu

SEQ ID NO: 1552280 - RNA, 19 nt, Artificial Sequence
  Description of Artificial Sequence: Synthetic oligonucleotide
ggucauaagguuugggucu

SEQ ID NO: 1552281 - RNA, 19 nt, Artificial Sequence
  Description of Artificial Sequence: Synthetic oligonucleotide
gucgcuggagaacccauga

SEQ ID NO: 1552282 - RNA, 19 nt, Artificial Sequence
  Description of Artificial Sequence: Synthetic oligonucleotide
uacaagcacaaagcacuac

SEQ ID NO: 1552283 - RNA, 19 nt, Artificial Sequence
  Description of Artificial Sequence: Synthetic oligonucleotide
cuuccggaccucuucuauc

SEQ ID NO: 1552284 - RNA, 19 nt, Artificial Sequence
  Description of Artificial Sequence: Synthetic oligonucleotide
cuguucaggaagcucaucu

SEQ ID NO: 1552285 - RNA, 19 nt, Artificial Sequence
  Description of Artificial Sequence: Synthetic oligonucleotide
agcuucaucacaagacuau

SEQ ID NO: 1552286 - RNA, 19 nt, Artificial Sequence
  Description of Artificial Sequence: Synthetic oligonucleotide
ccuuguuagucucuuggac

SEQ ID NO: 1552287 - RNA, 19 nt, Artificial Sequence
  Description of Artificial Sequence: Synthetic oligonucleotide
aaacccugcgggaggggag

SEQ ID NO: 1552288 - RNA, 19 nt, Artificial Sequence
  Description of Artificial Sequence: Synthetic oligonucleotide
gcacuacccuacuagggag

SEQ ID NO: 1552289 - RNA, 19 nt, Artificial Sequence
  Description of Artificial Sequence: Synthetic oligonucleotide
uccggaccucuucuaucag

SEQ ID NO: 1552290 - RNA, 19 nt, Artificial Sequence
  Description of Artificial Sequence: Synthetic oligonucleotide
accccuggggaacagggaa

SEQ ID NO: 1552291 - RNA, 19 nt, Artificial Sequence
  Description of Artificial Sequence: Synthetic oligonucleotide
ggugauccccuggaggugg

SEQ ID NO: 1552292 - RNA, 19 nt, Artificial Sequence
  Description of Artificial Sequence: Synthetic oligonucleotide
ucucuacacucgccuguca

SEQ ID NO: 1552293 - RNA, 19 nt, Artificial Sequence
  Description of Artificial Sequence: Synthetic oligonucleotide
cccgccuuagccuugucgc

SEQ ID NO: 1552294 - RNA, 19 nt, Artificial Sequence
  Description of Artificial Sequence: Synthetic oligonucleotide
gagagggacaacagcgcac

SEQ ID NO: 1552295 - RNA, 19 nt, Artificial Sequence
  Description of Artificial Sequence: Synthetic oligonucleotide
cacagccagccauucggag

SEQ ID NO: 1552296 - RNA, 19 nt, Artificial Sequence
  Description of Artificial Sequence: Synthetic oligonucleotide
gccaauuggguucacuguc

SEQ ID NO: 1552297 - RNA, 19 nt, Artificial Sequence
  Description of Artificial Sequence: Synthetic oligonucleotide
auucgaaacagagcaucaa

SEQ ID NO: 1552298 - RNA, 19 nt, Artificial Sequence
  Description of Artificial Sequence: Synthetic oligonucleotide
ggcaagagaaucugccuuc

SEQ ID NO: 1552299 - RNA, 19 nt, Artificial Sequence
  Description of Artificial Sequence: Synthetic oligonucleotide
uaucaacuucacugccuaa

SEQ ID NO: 1552300 - RNA, 19 nt, Artificial Sequence
  Description of Artificial Sequence: Synthetic oligonucleotide
augugucauccaacguggc

SEQ ID NO: 1552301 - RNA, 19 nt, Artificial Sequence
  Description of Artificial Sequence: Synthetic oligonucleotide
ggcuuugcuggaaucgagg

SEQ ID NO: 1552302 - RNA, 19 nt, Artificial Sequence
  Description of Artificial Sequence: Synthetic oligonucleotide
acuacccuacuagggagcu

SEQ ID NO: 1552303 - RNA, 19 nt, Artificial Sequence
  Description of Artificial Sequence: Synthetic oligonucleotide
ccccaaacccgacuggucg

SEQ ID NO: 1552304 - RNA, 19 nt, Artificial Sequence
  Description of Artificial Sequence: Synthetic oligonucleotide
agggcucauacagaugcca

SEQ ID NO: 1552305 - RNA, 19 nt, Artificial Sequence
  Description of Artificial Sequence: Synthetic oligonucleotide
aaaggccaacgcugccgca

SEQ ID NO: 1552306 - RNA, 19 nt, Artificial Sequence
  Description of Artificial Sequence: Synthetic oligonucleotide
uucgcuguucaggaagcuc

SEQ ID NO: 1552307 - RNA, 19 nt, Artificial Sequence
  Description of Artificial Sequence: Synthetic oligonucleotide
uugucgcuggagaacccau

SEQ ID NO: 1552308 - RNA, 19 nt, Artificial Sequence
  Description of Artificial Sequence: Synthetic oligonucleotide
aguggaagacaggaccccu

SEQ ID NO: 1552309 - RNA, 19 nt, Artificial Sequence
  Description of Artificial Sequence: Synthetic oligonucleotide
caucuaagagcccuaggcu

SEQ ID NO: 1552310 - RNA, 19 nt, Artificial Sequence
  Description of Artificial Sequence: Synthetic oligonucleotide
uacacucgccugucagggc

SEQ ID NO: 1552311 - RNA, 19 nt, Artificial Sequence
  Description of Artificial Sequence: Synthetic oligonucleotide
auucggaggagcccgccuu

SEQ ID NO: 1552312 - RNA, 19 nt, Artificial Sequence
  Description of Artificial Sequence: Synthetic oligonucleotide
gggucuuggugacccacgg

SEQ ID NO: 1552313 - RNA, 19 nt, Artificial Sequence
  Description of Artificial Sequence: Synthetic oligonucleotide
cccuaggcuuucuucagcc

SEQ ID NO: 1552314 - RNA, 19 nt, Artificial Sequence
  Description of Artificial Sequence: Synthetic oligonucleotide
aagagcccuaggcuuucuu

SEQ ID NO: 1552315 - RNA, 19 nt, Artificial Sequence
  Description of Artificial Sequence: Synthetic oligonucleotide
guagggcuuugcuggaauc

SEQ ID NO: 1552316 - RNA, 19 nt, Artificial Sequence
  Description of Artificial Sequence: Synthetic oligonucleotide
cugaggcacugaccaaccc

SEQ ID NO: 1552317 - RNA, 19 nt, Artificial Sequence
  Description of Artificial Sequence: Synthetic oligonucleotide
guuagucucuuggacuaga

SEQ ID NO: 1552318 - RNA, 19 nt, Artificial Sequence
  Description of Artificial Sequence: Synthetic oligonucleotide
ccagccauucggaggagcc

SEQ ID NO: 1552319 - RNA, 19 nt, Artificial Sequence
  Description of Artificial Sequence: Synthetic oligonucleotide
cauguuguagggcuuugcu

SEQ ID NO: 1552320 - RNA, 19 nt, Artificial Sequence
  Description of Artificial Sequence: Synthetic oligonucleotide
cuaauacgccaugguggcc

SEQ ID NO: 1552321 - RNA, 19 nt, Artificial Sequence
  Description of Artificial Sequence: Synthetic oligonucleotide
cacugccuaacucuaaacu

SEQ ID NO: 1552322 - RNA, 19 nt, Artificial Sequence
  Description of Artificial Sequence: Synthetic oligonucleotide
ucgguaucuaguggcugcu

SEQ ID NO: 1552323 - RNA, 19 nt, Artificial Sequence
  Description of Artificial Sequence: Synthetic oligonucleotide
gugacccacggguaacaac

SEQ ID NO: 1552324 - RNA, 19 nt, Artificial Sequence
  Description of Artificial Sequence: Synthetic oligonucleotide
aacguggccaaaagcucau

SEQ ID NO: 1552325 - RNA, 19 nt, Artificial Sequence
  Description of Artificial Sequence: Synthetic oligonucleotide
cuuggugacccacggguaa

SEQ ID NO: 1552326 - RNA, 19 nt, Artificial Sequence
  Description of Artificial Sequence: Synthetic oligonucleotide
gcacaaagcacuacccuac

SEQ ID NO: 1552327 - RNA, 19 nt, Artificial Sequence
  Description of Artificial Sequence: Synthetic oligonucleotide
cacggguaacaacuggaga

SEQ ID NO: 1552328 - RNA, 19 nt, Artificial Sequence
  Description of Artificial Sequence: Synthetic oligonucleotide
ccauucgaaacagagcauc

SEQ ID NO: 1552329 - RNA, 19 nt, Artificial Sequence
  Description of Artificial Sequence: Synthetic oligonucleotide
uuggugacccacggguaac

SEQ ID NO: 1552330 - RNA, 19 nt, Artificial Sequence
  Description of Artificial Sequence: Synthetic oligonucleotide
ggucuuggugacccacggg

SEQ ID NO: 1552331 - RNA, 19 nt, Artificial Sequence
  Description of Artificial Sequence: Synthetic oligonucleotide
ugcuggaaucgaggaaugu

SEQ ID NO: 1552332 - RNA, 19 nt, Artificial Sequence
  Description of Artificial Sequence: Synthetic oligonucleotide
gugcuuaaaucgaagcugu

SEQ ID NO: 1552333 - RNA, 19 nt, Artificial Sequence
  Description of Artificial Sequence: Synthetic oligonucleotide
cugcgggaggggaggagag

SEQ ID NO: 1552334 - RNA, 19 nt, Artificial Sequence
  Description of Artificial Sequence: Synthetic oligonucleotide
aucuaguggcugcugucuu

SEQ ID NO: 1552335 - RNA, 19 nt, Artificial Sequence
  Description of Artificial Sequence: Synthetic oligonucleotide
ccacggguaacaacuggag

SEQ ID NO: 1552336 - RNA, 19 nt, Artificial Sequence
  Description of Artificial Sequence: Synthetic oligonucleotide
gacucagggcucauacaga

SEQ ID NO: 1552337 - RNA, 19 nt, Artificial Sequence
  Description of Artificial Sequence: Synthetic oligonucleotide
ucauaagguuugggucuug

SEQ ID NO: 1552338 - RNA, 19 nt, Artificial Sequence
  Description of Artificial Sequence: Synthetic oligonucleotide
uucggaggagcccgccuua

SEQ ID NO: 1552339 - RNA, 19 nt, Artificial Sequence
  Description of Artificial Sequence: Synthetic oligonucleotide
ccaacguggccaaaagcuc

SEQ ID NO: 1552340 - RNA, 19 nt, Artificial Sequence
  Description of Artificial Sequence: Synthetic oligonucleotide
ggggucauaagguuugggu

SEQ ID NO: 1552341 - RNA, 19 nt, Artificial Sequence
  Description of Artificial Sequence: Synthetic oligonucleotide
gaacagggaaaagguugca

SEQ ID NO: 1552342 - RNA, 19 nt, Artificial Sequence
  Description of Artificial Sequence: Synthetic oligonucleotide
cugccucuaauacgccaug

SEQ ID NO: 1552343 - RNA, 19 nt, Artificial Sequence
  Description of Artificial Sequence: Synthetic oligonucleotide
gccaacacuucgcuguuca

SEQ ID NO: 1552344 - RNA, 19 nt, Artificial Sequence
  Description of Artificial Sequence: Synthetic oligonucleotide
gcugccgccgcugcaaagg

SEQ ID NO: 1552345 - RNA, 19 nt, Artificial Sequence
  Description of Artificial Sequence: Synthetic oligonucleotide
uggugauccccuggaggug

SEQ ID NO: 1552346 - RNA, 19 nt, Artificial Sequence
  Description of Artificial Sequence: Synthetic oligonucleotide
uggugacccacggguaaca

SEQ ID NO: 1552347 - RNA, 19 nt, Artificial Sequence
  Description of Artificial Sequence: Synthetic oligonucleotide
cagguaggacucagggcuc

SEQ ID NO: 1552348 - RNA, 19 nt, Artificial Sequence
  Description of Artificial Sequence: Synthetic oligonucleotide
cuaagagcccuaggcuuuc

SEQ ID NO: 1552349 - RNA, 19 nt, Artificial Sequence
  Description of Artificial Sequence: Synthetic oligonucleotide
ggagaacccaugagguuug

SEQ ID NO: 1552350 - RNA, 19 nt, Artificial Sequence
  Description of Artificial Sequence: Synthetic oligonucleotide
ugcugccgccgcugcaaag

SEQ ID NO: 1552351 - RNA, 19 nt, Artificial Sequence
  Description of Artificial Sequence: Synthetic oligonucleotide
ucggaggagcccgccuuag

SEQ ID NO: 1552352 - RNA, 19 nt, Artificial Sequence
  Description of Artificial Sequence: Synthetic oligonucleotide
uacgccaugguggccgcaa

SEQ ID NO: 1552353 - RNA, 19 nt, Artificial Sequence
  Description of Artificial Sequence: Synthetic oligonucleotide
gguggccgcaaacccugcg

SEQ ID NO: 1552354 - RNA, 19 nt, Artificial Sequence
  Description of Artificial Sequence: Synthetic oligonucleotide
aaagcucaucuggcauggu

SEQ ID NO: 1552355 - RNA, 19 nt, Artificial Sequence
  Description of Artificial Sequence: Synthetic oligonucleotide
gacccacggguaacaacug

SEQ ID NO: 1552356 - RNA, 19 nt, Artificial Sequence
  Description of Artificial Sequence: Synthetic oligonucleotide
gucauguuguagggcuuug

SEQ ID NO: 1552357 - RNA, 19 nt, Artificial Sequence
  Description of Artificial Sequence: Synthetic oligonucleotide
cuugucgcuggagaaccca

SEQ ID NO: 1552358 - RNA, 19 nt, Artificial Sequence
  Description of Artificial Sequence: Synthetic oligonucleotide
auacaagcacaaagcacua

SEQ ID NO: 1552359 - RNA, 19 nt, Artificial Sequence
  Description of Artificial Sequence: Synthetic oligonucleotide
ggcacugcugccucuaaua

SEQ ID NO: 1552360 - RNA, 19 nt, Artificial Sequence
  Description of Artificial Sequence: Synthetic oligonucleotide
ggaaugugcuuaaaucgaa

SEQ ID NO: 1552361 - RNA, 19 nt, Artificial Sequence
  Description of Artificial Sequence: Synthetic oligonucleotide
ccauggcuuaagccggugg

SEQ ID NO: 1552362 - RNA, 19 nt, Artificial Sequence
  Description of Artificial Sequence: Synthetic oligonucleotide
gguaucuaguggcugcugu

SEQ ID NO: 1552363 - RNA, 19 nt, Artificial Sequence
  Description of Artificial Sequence: Synthetic oligonucleotide
ggugccgcugcagagccug

SEQ ID NO: 1552364 - RNA, 19 nt, Artificial Sequence
  Description of Artificial Sequence: Synthetic oligonucleotide
gaggagcccgccuuagccu

SEQ ID NO: 1552365 - RNA, 19 nt, Artificial Sequence
  Description of Artificial Sequence: Synthetic oligonucleotide
gaagcugucuuuguccguu

SEQ ID NO: 1552366 - RNA, 19 nt, Artificial Sequence
  Description of Artificial Sequence: Synthetic oligonucleotide
gcuuaaaucgaagcugucu

SEQ ID NO: 1552367 - RNA, 19 nt, Artificial Sequence
  Description of Artificial Sequence: Synthetic oligonucleotide
cacugucaugggcuccuug

SEQ ID NO: 1552368 - RNA, 19 nt, Artificial Sequence
  Description of Artificial Sequence: Synthetic oligonucleotide
gcccgccuuagccuugucg

SEQ ID NO: 1552369 - RNA, 19 nt, Artificial Sequence
  Description of Artificial Sequence: Synthetic oligonucleotide
ccuaggcuuucuucagccc

SEQ ID NO: 1552370 - RNA, 19 nt, Artificial Sequence
  Description of Artificial Sequence: Synthetic oligonucleotide
acacuucgcuguucaggaa

SEQ ID NO: 1552371 - RNA, 19 nt, Artificial Sequence
  Description of Artificial Sequence: Synthetic oligonucleotide
ucgccugucagggcuuccu

SEQ ID NO: 1552372 - RNA, 19 nt, Artificial Sequence
  Description of Artificial Sequence: Synthetic oligonucleotide
uuguagggcuuugcuggaa

SEQ ID NO: 1552373 - RNA, 19 nt, Artificial Sequence
  Description of Artificial Sequence: Synthetic oligonucleotide
agccaacacuucgcuguuc

SEQ ID NO: 1552374 - RNA, 19 nt, Artificial Sequence
  Description of Artificial Sequence: Synthetic oligonucleotide
caaacccgacuggucgaag

SEQ ID NO: 1552375 - RNA, 19 nt, Artificial Sequence
  Description of Artificial Sequence: Synthetic oligonucleotide
ccaauuggguucacuguca

SEQ ID NO: 1552376 - RNA, 19 nt, Artificial Sequence
  Description of Artificial Sequence: Synthetic oligonucleotide
agguaggacucagggcuca

SEQ ID NO: 1552377 - RNA, 19 nt, Artificial Sequence
  Description of Artificial Sequence: Synthetic oligonucleotide
uugcacuuucugggagaug

SEQ ID NO: 1552378 - RNA, 19 nt, Artificial Sequence
  Description of Artificial Sequence: Synthetic oligonucleotide
caaacccugcgggagggga

SEQ ID NO: 1552379 - RNA, 19 nt, Artificial Sequence
  Description of Artificial Sequence: Synthetic oligonucleotide
agcaacgcugcugcuggau

SEQ ID NO: 1552380 - RNA, 19 nt, Artificial Sequence
  Description of Artificial Sequence: Synthetic oligonucleotide
gagguggaggggcuaugcu

SEQ ID NO: 1552381 - RNA, 19 nt, Artificial Sequence
  Description of Artificial Sequence: Synthetic oligonucleotide
ccaacgcugccgcaggcac

SEQ ID NO: 1552382 - RNA, 19 nt, Artificial Sequence
  Description of Artificial Sequence: Synthetic oligonucleotide
acguggccaaaagcucauc

SEQ ID NO: 1552383 - RNA, 19 nt, Artificial Sequence
  Description of Artificial Sequence: Synthetic oligonucleotide
gguagucaucuaagagccc

SEQ ID NO: 1552384 - RNA, 19 nt, Artificial Sequence
  Description of Artificial Sequence: Synthetic oligonucleotide
agaacccaugagguuugaa

SEQ ID NO: 1552385 - RNA, 19 nt, Artificial Sequence
  Description of Artificial Sequence: Synthetic oligonucleotide
augcauccuccuugccggu

SEQ ID NO: 1552386 - RNA, 19 nt, Artificial Sequence
  Description of Artificial Sequence: Synthetic oligonucleotide
gggcucauacagaugccac

SEQ ID NO: 1552387 - RNA, 19 nt, Artificial Sequence
  Description of Artificial Sequence: Synthetic oligonucleotide
cugcuggauuccgugaaaa

SEQ ID NO: 1552388 - RNA, 19 nt, Artificial Sequence
  Description of Artificial Sequence: Synthetic oligonucleotide
gucauccauucgaaacaga

SEQ ID NO: 1552389 - RNA, 19 nt, Artificial Sequence
  Description of Artificial Sequence: Synthetic oligonucleotide
cccacggguaacaacugga

SEQ ID NO: 1552390 - RNA, 19 nt, Artificial Sequence
  Description of Artificial Sequence: Synthetic oligonucleotide
gccuaacucuaaacugaag

SEQ ID NO: 1552391 - RNA, 19 nt, Artificial Sequence
  Description of Artificial Sequence: Synthetic oligonucleotide
ccaacacuucgcuguucag

SEQ ID NO: 1552392 - RNA, 19 nt, Artificial Sequence
  Description of Artificial Sequence: Synthetic oligonucleotide
ggcucauacagaugccacu

SEQ ID NO: 1552393 - RNA, 19 nt, Artificial Sequence
  Description of Artificial Sequence: Synthetic oligonucleotide
cugucgguaucuaguggcu

SEQ ID NO: 1552394 - RNA, 19 nt, Artificial Sequence
  Description of Artificial Sequence: Synthetic oligonucleotide
cacaugugucauccaacgu

SEQ ID NO: 1552395 - RNA, 19 nt, Artificial Sequence
  Description of Artificial Sequence: Synthetic oligonucleotide
aucgaggaaugugcuuaaa

SEQ ID NO: 1552396 - RNA, 19 nt, Artificial Sequence
  Description of Artificial Sequence: Synthetic oligonucleotide
cguuacagcaacgcugcug

SEQ ID NO: 1552397 - RNA, 19 nt, Artificial Sequence
  Description of Artificial Sequence: Synthetic oligonucleotide
ggccaauuggguucacugu

SEQ ID NO: 1552398 - RNA, 19 nt, Artificial Sequence
  Description of Artificial Sequence: Synthetic oligonucleotide
cucauacagaugccacugu

SEQ ID NO: 1552399 - RNA, 19 nt, Artificial Sequence
  Description of Artificial Sequence: Synthetic oligonucleotide
guugcacuuucugggagau

SEQ ID NO: 1552400 - RNA, 19 nt, Artificial Sequence
  Description of Artificial Sequence: Synthetic oligonucleotide
cacaaagcacuacccuacu

SEQ ID NO: 1552401 - RNA, 19 nt, Artificial Sequence
  Description of Artificial Sequence: Synthetic oligonucleotide
ugccggugucugaggcacu

SEQ ID NO: 1552402 - RNA, 19 nt, Artificial Sequence
  Description of Artificial Sequence: Synthetic oligonucleotide
ccgcaaacccugcgggagg

SEQ ID NO: 1552403 - RNA, 19 nt, Artificial Sequence
  Description of Artificial Sequence: Synthetic oligonucleotide
gguuugggucuuggugacc

SEQ ID NO: 1552404 - RNA, 19 nt, Artificial Sequence
  Description of Artificial Sequence: Synthetic oligonucleotide
cuacccuacuagggagcuc

SEQ ID NO: 1552405 - RNA, 19 nt, Artificial Sequence
  Description of Artificial Sequence: Synthetic oligonucleotide
gccucuaauacgccauggu

SEQ ID NO: 1552406 - RNA, 19 nt, Artificial Sequence
  Description of Artificial Sequence: Synthetic oligonucleotide
gauggccaauuggguucac

SEQ ID NO: 1552407 - RNA, 19 nt, Artificial Sequence
  Description of Artificial Sequence: Synthetic oligonucleotide
acgccaugguggccgcaaa

SEQ ID NO: 1552408 - RNA, 19 nt, Artificial Sequence
  Description of Artificial Sequence: Synthetic oligonucleotide
cuggagaacccaugagguu

SEQ ID NO: 1552409 - RNA, 19 nt, Artificial Sequence
  Description of Artificial Sequence: Synthetic oligonucleotide
cauucggaggagcccgccu

SEQ ID NO: 1552410 - RNA, 19 nt, Artificial Sequence
  Description of Artificial Sequence: Synthetic oligonucleotide
cucgccugucagggcuucc

SEQ ID NO: 1552411 - RNA, 19 nt, Artificial Sequence
  Description of Artificial Sequence: Synthetic oligonucleotide
gucauaagguuugggucuu

SEQ ID NO: 1552412 - RNA, 19 nt, Artificial Sequence
  Description of Artificial Sequence: Synthetic oligonucleotide
agcccgccuuagccuuguc

SEQ ID NO: 1552413 - RNA, 19 nt, Artificial Sequence
  Description of Artificial Sequence: Synthetic oligonucleotide
caugagguuugaagugcuu

SEQ ID NO: 1552414 - RNA, 19 nt, Artificial Sequence
  Description of Artificial Sequence: Synthetic oligonucleotide
guaggacucagggcucaua

SEQ ID NO: 1552415 - RNA, 19 nt, Artificial Sequence
  Description of Artificial Sequence: Synthetic oligonucleotide
ccggaccucuucuaucaga

SEQ ID NO: 1552416 - RNA, 19 nt, Artificial Sequence
  Description of Artificial Sequence: Synthetic oligonucleotide
gggagauggccaauugggu

SEQ ID NO: 1552417 - RNA, 19 nt, Artificial Sequence
  Description of Artificial Sequence: Synthetic oligonucleotide
ggggcaaccuggucuauuu

SEQ ID NO: 1552418 - RNA, 19 nt, Artificial Sequence
  Description of Artificial Sequence: Synthetic oligonucleotide
ggccgcaaacccugcggga

SEQ ID NO: 1552419 - RNA, 19 nt, Artificial Sequence
  Description of Artificial Sequence: Synthetic oligonucleotide
agccagccauucggaggag

SEQ ID NO: 1552420 - RNA, 19 nt, Artificial Sequence
  Description of Artificial Sequence: Synthetic oligonucleotide
cccaaacccgacuggucga

SEQ ID NO: 1552421 - RNA, 19 nt, Artificial Sequence
  Description of Artificial Sequence: Synthetic oligonucleotide
ucacugucaugggcuccuu

SEQ ID NO: 1552422 - RNA, 19 nt, Artificial Sequence
  Description of Artificial Sequence: Synthetic oligonucleotide
gcaagagaaucugccuucu

SEQ ID NO: 1552423 - RNA, 19 nt, Artificial Sequence
  Description of Artificial Sequence: Synthetic oligonucleotide
ggggugucuucauccuuua

SEQ ID NO: 1552424 - RNA, 19 nt, Artificial Sequence
  Description of Artificial Sequence: Synthetic oligonucleotide
ccgcugcaaaggccaacgc

SEQ ID NO: 1552425 - RNA, 19 nt, Artificial Sequence
  Description of Artificial Sequence: Synthetic oligonucleotide
auacgccaugguggccgca

SEQ ID NO: 1552426 - RNA, 19 nt, Artificial Sequence
  Description of Artificial Sequence: Synthetic oligonucleotide
ccauucggaggagcccgcc

SEQ ID NO: 1552427 - RNA, 19 nt, Artificial Sequence
  Description of Artificial Sequence: Synthetic oligonucleotide
ggugacccacggguaacaa

SEQ ID NO: 1552428 - RNA, 19 nt, Artificial Sequence
  Description of Artificial Sequence: Synthetic oligonucleotide
gucccggagaaugcauccu

SEQ ID NO: 1552429 - RNA, 19 nt, Artificial Sequence
  Description of Artificial Sequence: Synthetic oligonucleotide
gugauccccuggaggugga

SEQ ID NO: 1552430 - RNA, 19 nt, Artificial Sequence
  Description of Artificial Sequence: Synthetic oligonucleotide
cagcaacgcugcugcugga

SEQ ID NO: 1552431 - RNA, 19 nt, Artificial Sequence
  Description of Artificial Sequence: Synthetic oligonucleotide
gccaacgcugccgcaggca

SEQ ID NO: 1552432 - RNA, 19 nt, Artificial Sequence
  Description of Artificial Sequence: Synthetic oligonucleotide
cgccuuagccuugucgcug

SEQ ID NO: 1552433 - RNA, 19 nt, Artificial Sequence
  Description of Artificial Sequence: Synthetic oligonucleotide
ggucauguuguagggcuuu

SEQ ID NO: 1552434 - RNA, 19 nt, Artificial Sequence
  Description of Artificial Sequence: Synthetic oligonucleotide
ggagcccgccuuagccuug

SEQ ID NO: 1552435 - RNA, 19 nt, Artificial Sequence
  Description of Artificial Sequence: Synthetic oligonucleotide
ggcaugguauccaggucau

SEQ ID NO: 1552436 - RNA, 19 nt, Artificial Sequence
  Description of Artificial Sequence: Synthetic oligonucleotide
cggaccucuucuaucagau

SEQ ID NO: 1552437 - RNA, 19 nt, Artificial Sequence
  Description of Artificial Sequence: Synthetic oligonucleotide
ggagcccagguaggacuca

SEQ ID NO: 1552438 - RNA, 19 nt, Artificial Sequence
  Description of Artificial Sequence: Synthetic oligonucleotide
gucauccaacguggccaaa

SEQ ID NO: 1552439 - RNA, 19 nt, Artificial Sequence
  Description of Artificial Sequence: Synthetic oligonucleotide
ccggagaaugcauccuccu

SEQ ID NO: 1552440 - RNA, 19 nt, Artificial Sequence
  Description of Artificial Sequence: Synthetic oligonucleotide
gcaugguauccaggucauc

SEQ ID NO: 1552441 - RNA, 19 nt, Artificial Sequence
  Description of Artificial Sequence: Synthetic oligonucleotide
cggaggagcccgccuuagc

SEQ ID NO: 1552442 - RNA, 19 nt, Artificial Sequence
  Description of Artificial Sequence: Synthetic oligonucleotide
gagcccgccuuagccuugu

SEQ ID NO: 1552443 - RNA, 19 nt, Artificial Sequence
  Description of Artificial Sequence: Synthetic oligonucleotide
cagccaacacuucgcuguu

SEQ ID NO: 1552444 - RNA, 19 nt, Artificial Sequence
  Description of Artificial Sequence: Synthetic oligonucleotide
cgcugcaaaggccaacgcu

SEQ ID NO: 1552445 - RNA, 19 nt, Artificial Sequence
  Description of Artificial Sequence: Synthetic oligonucleotide
cugucuuguuuugcuccau

SEQ ID NO: 1552446 - RNA, 19 nt, Artificial Sequence
  Description of Artificial Sequence: Synthetic oligonucleotide
ccaaacccgacuggucgaa

SEQ ID NO: 1552447 - RNA, 19 nt, Artificial Sequence
  Description of Artificial Sequence: Synthetic oligonucleotide
ccuuccggaccucuucuau

SEQ ID NO: 1552448 - RNA, 19 nt, Artificial Sequence
  Description of Artificial Sequence: Synthetic oligonucleotide
ccccuugccuuccggaccu

SEQ ID NO: 1552449 - RNA, 19 nt, Artificial Sequence
  Description of Artificial Sequence: Synthetic oligonucleotide
gggcaaccuggucuauuuu

SEQ ID NO: 1552450 - RNA, 19 nt, Artificial Sequence
  Description of Artificial Sequence: Synthetic oligonucleotide
cacucgccugucagggcuu

SEQ ID NO: 1552451 - RNA, 19 nt, Artificial Sequence
  Description of Artificial Sequence: Synthetic oligonucleotide
ccccagccaacacuucgcu

SEQ ID NO: 1552452 - RNA, 19 nt, Artificial Sequence
  Description of Artificial Sequence: Synthetic oligonucleotide
ccgccuuagccuugucgcu

SEQ ID NO: 1552453 - RNA, 19 nt, Artificial Sequence
  Description of Artificial Sequence: Synthetic oligonucleotide
gguaggacucagggcucau

SEQ ID NO: 1552454 - RNA, 19 nt, Artificial Sequence
  Description of Artificial Sequence: Synthetic oligonucleotide
cccuacuagggagcucucu

SEQ ID NO: 1552455 - RNA, 19 nt, Artificial Sequence
  Description of Artificial Sequence: Synthetic oligonucleotide
cggagaaugcauccuccuu

SEQ ID NO: 1552456 - RNA, 19 nt, Artificial Sequence
  Description of Artificial Sequence: Synthetic oligonucleotide
cgccgcugcaaaggccaac

SEQ ID NO: 1552457 - RNA, 19 nt, Artificial Sequence
  Description of Artificial Sequence: Synthetic oligonucleotide
ccuugccuuccggaccucu

SEQ ID NO: 1552458 - RNA, 19 nt, Artificial Sequence
  Description of Artificial Sequence: Synthetic oligonucleotide
ccguuacagcaacgcugcu

SEQ ID NO: 1552459 - RNA, 19 nt, Artificial Sequence
  Description of Artificial Sequence: Synthetic oligonucleotide
cccuugccuuccggaccuc

SEQ ID NO: 1552460 - RNA, 19 nt, Artificial Sequence
  Description of Artificial Sequence: Synthetic oligonucleotide
cgccauggcuuaagccggu

SEQ ID NO: 1552461 - RNA, 19 nt, Artificial Sequence
  Description of Artificial Sequence: Synthetic oligonucleotide
uguaagaacaacuugauaa

SEQ ID NO: 1552462 - RNA, 19 nt, Artificial Sequence
  Description of Artificial Sequence: Synthetic oligonucleotide
aagaucauaguguauuuac

SEQ ID NO: 1552463 - RNA, 19 nt, Artificial Sequence
  Description of Artificial Sequence: Synthetic oligonucleotide
aauccauucaccuugaaaa

SEQ ID NO: 1552464 - RNA, 19 nt, Artificial Sequence
  Description of Artificial Sequence: Synthetic oligonucleotide
aaauguguaacuacuaugg

SEQ ID NO: 1552465 - RNA, 19 nt, Artificial Sequence
  Description of Artificial Sequence: Synthetic oligonucleotide
auuuuauggagcuccaccc

SEQ ID NO: 1552466 - RNA, 19 nt, Artificial Sequence
  Description of Artificial Sequence: Synthetic oligonucleotide
uguauuuacccacaucagg

SEQ ID NO: 1552467 - RNA, 19 nt, Artificial Sequence
  Description of Artificial Sequence: Synthetic oligonucleotide
aacacaacaaucguaaucu

SEQ ID NO: 1552468 - RNA, 19 nt, Artificial Sequence
  Description of Artificial Sequence: Synthetic oligonucleotide
aacaaucguaaucuguagg

SEQ ID NO: 1552469 - RNA, 19 nt, Artificial Sequence
  Description of Artificial Sequence: Synthetic oligonucleotide
aaauauuuacuguaucgca

SEQ ID NO: 1552470 - RNA, 19 nt, Artificial Sequence
  Description of Artificial Sequence: Synthetic oligonucleotide
acaaucguaaucuguaggg

SEQ ID NO: 1552471 - RNA, 19 nt, Artificial Sequence
  Description of Artificial Sequence: Synthetic oligonucleotide
aagccaauccuucaaggac

SEQ ID NO: 1552472 - RNA, 19 nt, Artificial Sequence
  Description of Artificial Sequence: Synthetic oligonucleotide
gaucauaguguauuuaccc

SEQ ID NO: 1552473 - RNA, 19 nt, Artificial Sequence
  Description of Artificial Sequence: Synthetic oligonucleotide
acuauggaagucucuaggc

SEQ ID NO: 1552474 - RNA, 19 nt, Artificial Sequence
  Description of Artificial Sequence: Synthetic oligonucleotide
ucuuuaaucucauaggaau

SEQ ID NO: 1552475 - RNA, 19 nt, Artificial Sequence
  Description of Artificial Sequence: Synthetic oligonucleotide
auauuuacuguaucgcaac

SEQ ID NO: 1552476 - RNA, 19 nt, Artificial Sequence
  Description of Artificial Sequence: Synthetic oligonucleotide
ugaucuuuaguccuucaag

SEQ ID NO: 1552477 - RNA, 19 nt, Artificial Sequence
  Description of Artificial Sequence: Synthetic oligonucleotide
uagaaacuagccaugaaga

SEQ ID NO: 1552478 - RNA, 19 nt, Artificial Sequence
  Description of Artificial Sequence: Synthetic oligonucleotide
uucucuaagauacuuggga

SEQ ID NO: 1552479 - RNA, 19 nt, Artificial Sequence
  Description of Artificial Sequence: Synthetic oligonucleotide
auuagcuggaaugaguucg

SEQ ID NO: 1552480 - RNA, 19 nt, Artificial Sequence
  Description of Artificial Sequence: Synthetic oligonucleotide
agagaauccauucaccuug

SEQ ID NO: 1552481 - RNA, 19 nt, Artificial Sequence
  Description of Artificial Sequence: Synthetic oligonucleotide
caugguugcaucauggacc

SEQ ID NO: 1552482 - RNA, 19 nt, Artificial Sequence
  Description of Artificial Sequence: Synthetic oligonucleotide
uacuauggaagucucuagg

SEQ ID NO: 1552483 - RNA, 19 nt, Artificial Sequence
  Description of Artificial Sequence: Synthetic oligonucleotide
aaguaguugcuggugaccc

SEQ ID NO: 1552484 - RNA, 19 nt, Artificial Sequence
  Description of Artificial Sequence: Synthetic oligonucleotide
uguuagagaauccauucac

SEQ ID NO: 1552485 - RNA, 19 nt, Artificial Sequence
  Description of Artificial Sequence: Synthetic oligonucleotide
aguuucaccaccaugauca

SEQ ID NO: 1552486 - RNA, 19 nt, Artificial Sequence
  Description of Artificial Sequence: Synthetic oligonucleotide
uguaucgcaaccuguaccc

SEQ ID NO: 1552487 - RNA, 19 nt, Artificial Sequence
  Description of Artificial Sequence: Synthetic oligonucleotide
uaaccaagagcucugguga

SEQ ID NO: 1552488 - RNA, 19 nt, Artificial Sequence
  Description of Artificial Sequence: Synthetic oligonucleotide
ugcaucauggaccagaguu

SEQ ID NO: 1552489 - RNA, 19 nt, Artificial Sequence
  Description of Artificial Sequence: Synthetic oligonucleotide
aaucguaaucuguagggga

SEQ ID NO: 1552490 - RNA, 19 nt, Artificial Sequence
  Description of Artificial Sequence: Synthetic oligonucleotide
agaguaaucuguaagaaca

SEQ ID NO: 1552491 - RNA, 19 nt, Artificial Sequence
  Description of Artificial Sequence: Synthetic oligonucleotide
cacaucguggaauauaaag

SEQ ID NO: 1552492 - RNA, 19 nt, Artificial Sequence
  Description of Artificial Sequence: Synthetic oligonucleotide
ugaucaaaacaacuaagaa

SEQ ID NO: 1552493 - RNA, 19 nt, Artificial Sequence
  Description of Artificial Sequence: Synthetic oligonucleotide
aaacuagccaugaagaccu

SEQ ID NO: 1552494 - RNA, 19 nt, Artificial Sequence
  Description of Artificial Sequence: Synthetic oligonucleotide
uuagagaauccauucaccu

SEQ ID NO: 1552495 - RNA, 19 nt, Artificial Sequence
  Description of Artificial Sequence: Synthetic oligonucleotide
uaaucuguaggggaggagg

SEQ ID NO: 1552496 - RNA, 19 nt, Artificial Sequence
  Description of Artificial Sequence: Synthetic oligonucleotide
uucgaaauguguaacuacu

SEQ ID NO: 1552497 - RNA, 19 nt, Artificial Sequence
  Description of Artificial Sequence: Synthetic oligonucleotide
aguaugugcauuucaaagu

SEQ ID NO: 1552498 - RNA, 19 nt, Artificial Sequence
  Description of Artificial Sequence: Synthetic oligonucleotide
gaauauaaagcagucccag

SEQ ID NO: 1552499 - RNA, 19 nt, Artificial Sequence
  Description of Artificial Sequence: Synthetic oligonucleotide
aaucucauaggaaugguga

SEQ ID NO: 1552500 - RNA, 19 nt, Artificial Sequence
  Description of Artificial Sequence: Synthetic oligonucleotide
ucucugguauggaagauca

SEQ ID NO: 1552501 - RNA, 19 nt, Artificial Sequence
  Description of Artificial Sequence: Synthetic oligonucleotide
gaaacuagccaugaagacc

SEQ ID NO: 1552502 - RNA, 19 nt, Artificial Sequence
  Description of Artificial Sequence: Synthetic oligonucleotide
cauuuuauggagcuccacc

SEQ ID NO: 1552503 - RNA, 19 nt, Artificial Sequence
  Description of Artificial Sequence: Synthetic oligonucleotide
ugguauauaaaggauugug

SEQ ID NO: 1552504 - RNA, 19 nt, Artificial Sequence
  Description of Artificial Sequence: Synthetic oligonucleotide
ucuuuaguccuucaaguau

SEQ ID NO: 1552505 - RNA, 19 nt, Artificial Sequence
  Description of Artificial Sequence: Synthetic oligonucleotide
aaagcugucuuucuaugau

SEQ ID NO: 1552506 - RNA, 19 nt, Artificial Sequence
  Description of Artificial Sequence: Synthetic oligonucleotide
uggagcuccacccugaguc

SEQ ID NO: 1552507 - RNA, 19 nt, Artificial Sequence
  Description of Artificial Sequence: Synthetic oligonucleotide
aaguuucaccaccaugauc

SEQ ID NO: 1552508 - RNA, 19 nt, Artificial Sequence
  Description of Artificial Sequence: Synthetic oligonucleotide
gaugguucuacauucuaca

SEQ ID NO: 1552509 - RNA, 19 nt, Artificial Sequence
  Description of Artificial Sequence: Synthetic oligonucleotide
aagggcaguuaccaaguuc

SEQ ID NO: 1552510 - RNA, 19 nt, Artificial Sequence
  Description of Artificial Sequence: Synthetic oligonucleotide
ugaccuuguagaaacuagc

SEQ ID NO: 1552511 - RNA, 19 nt, Artificial Sequence
  Description of Artificial Sequence: Synthetic oligonucleotide
cuaugaugguucuacauuc

SEQ ID NO: 1552512 - RNA, 19 nt, Artificial Sequence
  Description of Artificial Sequence: Synthetic oligonucleotide
ucauaguguauuuacccac

SEQ ID NO: 1552513 - RNA, 19 nt, Artificial Sequence
  Description of Artificial Sequence: Synthetic oligonucleotide
aauguguaacuacuaugga

SEQ ID NO: 1552514 - RNA, 19 nt, Artificial Sequence
  Description of Artificial Sequence: Synthetic oligonucleotide
cauucuacauaaccaagag

SEQ ID NO: 1552515 - RNA, 19 nt, Artificial Sequence
  Description of Artificial Sequence: Synthetic oligonucleotide
aagaaagcugucuuucuau

SEQ ID NO: 1552516 - RNA, 19 nt, Artificial Sequence
  Description of Artificial Sequence: Synthetic oligonucleotide
aauauuuacuguaucgcaa

SEQ ID NO: 1552517 - RNA, 19 nt, Artificial Sequence
  Description of Artificial Sequence: Synthetic oligonucleotide
ucuaugaugguucuacauu

SEQ ID NO: 1552518 - RNA, 19 nt, Artificial Sequence
  Description of Artificial Sequence: Synthetic oligonucleotide
guuguuagagaauccauuc

SEQ ID NO: 1552519 - RNA, 19 nt, Artificial Sequence
  Description of Artificial Sequence: Synthetic oligonucleotide
ucguggaauauaaagcagu

SEQ ID NO: 1552520 - RNA, 19 nt, Artificial Sequence
  Description of Artificial Sequence: Synthetic oligonucleotide
cauccaaccacagucaggc

SEQ ID NO: 1552521 - RNA, 19 nt, Artificial Sequence
  Description of Artificial Sequence: Synthetic oligonucleotide
uucaaguaugugcauuuca

SEQ ID NO: 1552522 - RNA, 19 nt, Artificial Sequence
  Description of Artificial Sequence: Synthetic oligonucleotide
aacaacuugauaagccauc

SEQ ID NO: 1552523 - RNA, 19 nt, Artificial Sequence
  Description of Artificial Sequence: Synthetic oligonucleotide
auauaaagcagucccaguu

SEQ ID NO: 1552524 - RNA, 19 nt, Artificial Sequence
  Description of Artificial Sequence: Synthetic oligonucleotide
agaucauaguguauuuacc

SEQ ID NO: 1552525 - RNA, 19 nt, Artificial Sequence
  Description of Artificial Sequence: Synthetic oligonucleotide
gguaugaccuuguagaaac

SEQ ID NO: 1552526 - RNA, 19 nt, Artificial Sequence
  Description of Artificial Sequence: Synthetic oligonucleotide
ugauuagcuggaaugaguu

SEQ ID NO: 1552527 - RNA, 19 nt, Artificial Sequence
  Description of Artificial Sequence: Synthetic oligonucleotide
uacauaaccaagagcucug

SEQ ID NO: 1552528 - RNA, 19 nt, Artificial Sequence
  Description of Artificial Sequence: Synthetic oligonucleotide
aguugcuggugacccaucc

SEQ ID NO: 1552529 - RNA, 19 nt, Artificial Sequence
  Description of Artificial Sequence: Synthetic oligonucleotide
ucucuaagauacuugggaa

SEQ ID NO: 1552530 - RNA, 19 nt, Artificial Sequence
  Description of Artificial Sequence: Synthetic oligonucleotide
caucguggaauauaaagca

SEQ ID NO: 1552531 - RNA, 19 nt, Artificial Sequence
  Description of Artificial Sequence: Synthetic oligonucleotide
gagaguaaucuguaagaac

SEQ ID NO: 1552532 - RNA, 19 nt, Artificial Sequence
  Description of Artificial Sequence: Synthetic oligonucleotide
cagcagauaugucaggugc

SEQ ID NO: 1552533 - RNA, 19 nt, Artificial Sequence
  Description of Artificial Sequence: Synthetic oligonucleotide
acuguaucgcaaccuguac

SEQ ID NO: 1552534 - RNA, 19 nt, Artificial Sequence
  Description of Artificial Sequence: Synthetic oligonucleotide
ugaugauuagcuggaauga

SEQ ID NO: 1552535 - RNA, 19 nt, Artificial Sequence
  Description of Artificial Sequence: Synthetic oligonucleotide
auguguaacuacuauggaa

SEQ ID NO: 1552536 - RNA, 19 nt, Artificial Sequence
  Description of Artificial Sequence: Synthetic oligonucleotide
gaugauuagcuggaaugag

SEQ ID NO: 1552537 - RNA, 19 nt, Artificial Sequence
  Description of Artificial Sequence: Synthetic oligonucleotide
agauaugucaggugcuucu

SEQ ID NO: 1552538 - RNA, 19 nt, Artificial Sequence
  Description of Artificial Sequence: Synthetic oligonucleotide
augaucaaaacaacuaaga

SEQ ID NO: 1552539 - RNA, 19 nt, Artificial Sequence
  Description of Artificial Sequence: Synthetic oligonucleotide
ugggcugaucaccacaugu

SEQ ID NO: 1552540 - RNA, 19 nt, Artificial Sequence
  Description of Artificial Sequence: Synthetic oligonucleotide
guauuuacccacaucagga

SEQ ID NO: 1552541 - RNA, 19 nt, Artificial Sequence
  Description of Artificial Sequence: Synthetic oligonucleotide
uuuaguccuucaaguaugu

SEQ ID NO: 1552542 - RNA, 19 nt, Artificial Sequence
  Description of Artificial Sequence: Synthetic oligonucleotide
agaaagcugucuuucuaug

SEQ ID NO: 1552543 - RNA, 19 nt, Artificial Sequence
  Description of Artificial Sequence: Synthetic oligonucleotide
agcugucuuucuaugaugg

SEQ ID NO: 1552544 - RNA, 19 nt, Artificial Sequence
  Description of Artificial Sequence: Synthetic oligonucleotide
gaucuuuaguccuucaagu

SEQ ID NO: 1552545 - RNA, 19 nt, Artificial Sequence
  Description of Artificial Sequence: Synthetic oligonucleotide
ugguucucuaagauacuug

SEQ ID NO: 1552546 - RNA, 19 nt, Artificial Sequence
  Description of Artificial Sequence: Synthetic oligonucleotide
ugugcauuucaaaguuuca

SEQ ID NO: 1552547 - RNA, 19 nt, Artificial Sequence
  Description of Artificial Sequence: Synthetic oligonucleotide
uuugccuguacuuccucca

SEQ ID NO: 1552548 - RNA, 19 nt, Artificial Sequence
  Description of Artificial Sequence: Synthetic oligonucleotide
uccuccaaagugagguccg

SEQ ID NO: 1552549 - RNA, 19 nt, Artificial Sequence
  Description of Artificial Sequence: Synthetic oligonucleotide
gaagccaauccuucaagga

SEQ ID NO: 1552550 - RNA, 19 nt, Artificial Sequence
  Description of Artificial Sequence: Synthetic oligonucleotide
ggaauggugaagccaaucc

SEQ ID NO: 1552551 - RNA, 19 nt, Artificial Sequence
  Description of Artificial Sequence: Synthetic oligonucleotide
cuuacauuccucaggguga

SEQ ID NO: 1552552 - RNA, 19 nt, Artificial Sequence
  Description of Artificial Sequence: Synthetic oligonucleotide
uaucgcaaccuguacccag

SEQ ID NO: 1552553 - RNA, 19 nt, Artificial Sequence
  Description of Artificial Sequence: Synthetic oligonucleotide
acccacaucaggauugggc

SEQ ID NO: 1552554 - RNA, 19 nt, Artificial Sequence
  Description of Artificial Sequence: Synthetic oligonucleotide
cuguaucgcaaccuguacc

SEQ ID NO: 1552555 - RNA, 19 nt, Artificial Sequence
  Description of Artificial Sequence: Synthetic oligonucleotide
aaccaagagcucuggugag

SEQ ID NO: 1552556 - RNA, 19 nt, Artificial Sequence
  Description of Artificial Sequence: Synthetic oligonucleotide
ucaggauugggccgggaga

SEQ ID NO: 1552557 - RNA, 19 nt, Artificial Sequence
  Description of Artificial Sequence: Synthetic oligonucleotide
agguugaagucauucucag

SEQ ID NO: 1552558 - RNA, 19 nt, Artificial Sequence
  Description of Artificial Sequence: Synthetic oligonucleotide
guucgaaauguguaacuac

SEQ ID NO: 1552559 - RNA, 19 nt, Artificial Sequence
  Description of Artificial Sequence: Synthetic oligonucleotide
agaguuucuuccuucccca

SEQ ID NO: 1552560 - RNA, 19 nt, Artificial Sequence
  Description of Artificial Sequence: Synthetic oligonucleotide
gaccuuguagaaacuagcc

SEQ ID NO: 1552561 - RNA, 19 nt, Artificial Sequence
  Description of Artificial Sequence: Synthetic oligonucleotide
uucuaugaugguucuacau

SEQ ID NO: 1552562 - RNA, 19 nt, Artificial Sequence
  Description of Artificial Sequence: Synthetic oligonucleotide
guuagagaauccauucacc

SEQ ID NO: 1552563 - RNA, 19 nt, Artificial Sequence
  Description of Artificial Sequence: Synthetic oligonucleotide
uccaaagugagguccggcu

SEQ ID NO: 1552564 - RNA, 19 nt, Artificial Sequence
  Description of Artificial Sequence: Synthetic oligonucleotide
ucuacauaaccaagagcuc

SEQ ID NO: 1552565 - RNA, 19 nt, Artificial Sequence
  Description of Artificial Sequence: Synthetic oligonucleotide
uuccucagggugauaccgg

SEQ ID NO: 1552566 - RNA, 19 nt, Artificial Sequence
  Description of Artificial Sequence: Synthetic oligonucleotide
augguugcaucauggacca

SEQ ID NO: 1552567 - RNA, 19 nt, Artificial Sequence
  Description of Artificial Sequence: Synthetic oligonucleotide
gccaaaacuauuauaauca

SEQ ID NO: 1552568 - RNA, 19 nt, Artificial Sequence
  Description of Artificial Sequence: Synthetic oligonucleotide
agucugguggaugauguag

SEQ ID NO: 1552569 - RNA, 19 nt, Artificial Sequence
  Description of Artificial Sequence: Synthetic oligonucleotide
agggcaguuaccaaguucu

SEQ ID NO: 1552570 - RNA, 19 nt, Artificial Sequence
  Description of Artificial Sequence: Synthetic oligonucleotide
ugagucugaggucaucguc

SEQ ID NO: 1552571 - RNA, 19 nt, Artificial Sequence
  Description of Artificial Sequence: Synthetic oligonucleotide
uuagcuggaaugaguucga

SEQ ID NO: 1552572 - RNA, 19 nt, Artificial Sequence
  Description of Artificial Sequence: Synthetic oligonucleotide
caaucguaaucuguagggg

SEQ ID NO: 1552573 - RNA, 19 nt, Artificial Sequence
  Description of Artificial Sequence: Synthetic oligonucleotide
cuacuauggaagucucuag

SEQ ID NO: 1552574 - RNA, 19 nt, Artificial Sequence
  Description of Artificial Sequence: Synthetic oligonucleotide
uaguuguuagagaauccau

SEQ ID NO: 1552575 - RNA, 19 nt, Artificial Sequence
  Description of Artificial Sequence: Synthetic oligonucleotide
cauguguaaagguugaagu

SEQ ID NO: 1552576 - RNA, 19 nt, Artificial Sequence
  Description of Artificial Sequence: Synthetic oligonucleotide
gauaagccaucuguuuucc

SEQ ID NO: 1552577 - RNA, 19 nt, Artificial Sequence
  Description of Artificial Sequence: Synthetic oligonucleotide
uuucuaugaugguucuaca

SEQ ID NO: 1552578 - RNA, 19 nt, Artificial Sequence
  Description of Artificial Sequence: Synthetic oligonucleotide
uugcuggugacccauccaa

SEQ ID NO: 1552579 - RNA, 19 nt, Artificial Sequence
  Description of Artificial Sequence: Synthetic oligonucleotide
uuauggagcuccacccuga

SEQ ID NO: 1552580 - RNA, 19 nt, Artificial Sequence
  Description of Artificial Sequence: Synthetic oligonucleotide
uucuccugaacaucaucca

SEQ ID NO: 1552581 - RNA, 19 nt, Artificial Sequence
  Description of Artificial Sequence: Synthetic oligonucleotide
ggccaaaacuauuauaauc

SEQ ID NO: 1552582 - RNA, 19 nt, Artificial Sequence
  Description of Artificial Sequence: Synthetic oligonucleotide
uaugucaggugcuucucuc

SEQ ID NO: 1552583 - RNA, 19 nt, Artificial Sequence
  Description of Artificial Sequence: Synthetic oligonucleotide
aucaguucuccugaacauc

SEQ ID NO: 1552584 - RNA, 19 nt, Artificial Sequence
  Description of Artificial Sequence: Synthetic oligonucleotide
cugagguuuggagacacag

SEQ ID NO: 1552585 - RNA, 19 nt, Artificial Sequence
  Description of Artificial Sequence: Synthetic oligonucleotide
ucgaaauguguaacuacua

SEQ ID NO: 1552586 - RNA, 19 nt, Artificial Sequence
  Description of Artificial Sequence: Synthetic oligonucleotide
uguaacuacuauggaaguc

SEQ ID NO: 1552587 - RNA, 19 nt, Artificial Sequence
  Description of Artificial Sequence: Synthetic oligonucleotide
aucguaaucuguaggggag

SEQ ID NO: 1552588 - RNA, 19 nt, Artificial Sequence
  Description of Artificial Sequence: Synthetic oligonucleotide
uuugaucuuuaguccuuca

SEQ ID NO: 1552589 - RNA, 19 nt, Artificial Sequence
  Description of Artificial Sequence: Synthetic oligonucleotide
guaguuguuagagaaucca

SEQ ID NO: 1552590 - RNA, 19 nt, Artificial Sequence
  Description of Artificial Sequence: Synthetic oligonucleotide
caugguucuuccaguuugc

SEQ ID NO: 1552591 - RNA, 19 nt, Artificial Sequence
  Description of Artificial Sequence: Synthetic oligonucleotide
acuacuauggaagucucua

SEQ ID NO: 1552592 - RNA, 19 nt, Artificial Sequence
  Description of Artificial Sequence: Synthetic oligonucleotide
guaacuacuauggaagucu

SEQ ID NO: 1552593 - RNA, 19 nt, Artificial Sequence
  Description of Artificial Sequence: Synthetic oligonucleotide
uaacuacuauggaagucuc

SEQ ID NO: 1552594 - RNA, 19 nt, Artificial Sequence
  Description of Artificial Sequence: Synthetic oligonucleotide
ucguaaucuguaggggagg

SEQ ID NO: 1552595 - RNA, 19 nt, Artificial Sequence
  Description of Artificial Sequence: Synthetic oligonucleotide
cuggaaugaguucgaaaug

SEQ ID NO: 1552596 - RNA, 19 nt, Artificial Sequence
  Description of Artificial Sequence: Synthetic oligonucleotide
aucuuuaguccuucaagua

SEQ ID NO: 1552597 - RNA, 19 nt, Artificial Sequence
  Description of Artificial Sequence: Synthetic oligonucleotide
gauuagcuggaaugaguuc

SEQ ID NO: 1552598 - RNA, 19 nt, Artificial Sequence
  Description of Artificial Sequence: Synthetic oligonucleotide
cauaguguauuuacccaca

SEQ ID NO: 1552599 - RNA, 19 nt, Artificial Sequence
  Description of Artificial Sequence: Synthetic oligonucleotide
ggaaugaggacagcaaccc

SEQ ID NO: 1552600 - RNA, 19 nt, Artificial Sequence
  Description of Artificial Sequence: Synthetic oligonucleotide
uaguguauuuacccacauc

SEQ ID NO: 1552601 - RNA, 19 nt, Artificial Sequence
  Description of Artificial Sequence: Synthetic oligonucleotide
uggugacccauccaaccac

SEQ ID NO: 1552602 - RNA, 19 nt, Artificial Sequence
  Description of Artificial Sequence: Synthetic oligonucleotide
uucaaggacaugguucuuc

SEQ ID NO: 1552603 - RNA, 19 nt, Artificial Sequence
  Description of Artificial Sequence: Synthetic oligonucleotide
uagagaauccauucaccuu

SEQ ID NO: 1552604 - RNA, 19 nt, Artificial Sequence
  Description of Artificial Sequence: Synthetic oligonucleotide
uuuaguccccacucuuuaa

SEQ ID NO: 1552605 - RNA, 19 nt, Artificial Sequence
  Description of Artificial Sequence: Synthetic oligonucleotide
aucguggaauauaaagcag

SEQ ID NO: 1552606 - RNA, 19 nt, Artificial Sequence
  Description of Artificial Sequence: Synthetic oligonucleotide
cacaucaggauugggccgg

SEQ ID NO: 1552607 - RNA, 19 nt, Artificial Sequence
  Description of Artificial Sequence: Synthetic oligonucleotide
auaguccaguugcugccuc

SEQ ID NO: 1552608 - RNA, 19 nt, Artificial Sequence
  Description of Artificial Sequence: Synthetic oligonucleotide
acacagaagggcaguuacc

SEQ ID NO: 1552609 - RNA, 19 nt, Artificial Sequence
  Description of Artificial Sequence: Synthetic oligonucleotide
uccucagggugauaccggc

SEQ ID NO: 1552610 - RNA, 19 nt, Artificial Sequence
  Description of Artificial Sequence: Synthetic oligonucleotide
cuucauccgguccacguuc

SEQ ID NO: 1552611 - RNA, 19 nt, Artificial Sequence
  Description of Artificial Sequence: Synthetic oligonucleotide
aucucauaggaauggugaa

SEQ ID NO: 1552612 - RNA, 19 nt, Artificial Sequence
  Description of Artificial Sequence: Synthetic oligonucleotide
accaagagcucuggugagc

SEQ ID NO: 1552613 - RNA, 19 nt, Artificial Sequence
  Description of Artificial Sequence: Synthetic oligonucleotide
agcuuggcucgauuaaacu

SEQ ID NO: 1552614 - RNA, 19 nt, Artificial Sequence
  Description of Artificial Sequence: Synthetic oligonucleotide
ugcuccacagagaguaauc

SEQ ID NO: 1552615 - RNA, 19 nt, Artificial Sequence
  Description of Artificial Sequence: Synthetic oligonucleotide
augauuagcuggaaugagu

SEQ ID NO: 1552616 - RNA, 19 nt, Artificial Sequence
  Description of Artificial Sequence: Synthetic oligonucleotide
cugaucaccacauguguaa

SEQ ID NO: 1552617 - RNA, 19 nt, Artificial Sequence
  Description of Artificial Sequence: Synthetic oligonucleotide
auaaaggauugugcuccac

SEQ ID NO: 1552618 - RNA, 19 nt, Artificial Sequence
  Description of Artificial Sequence: Synthetic oligonucleotide
ccugccaaccaccaggugc

SEQ ID NO: 1552619 - RNA, 19 nt, Artificial Sequence
  Description of Artificial Sequence: Synthetic oligonucleotide
guguauuuacccacaucag

SEQ ID NO: 1552620 - RNA, 19 nt, Artificial Sequence
  Description of Artificial Sequence: Synthetic oligonucleotide
aucacuugaauagggucca

SEQ ID NO: 1552621 - RNA, 19 nt, Artificial Sequence
  Description of Artificial Sequence: Synthetic oligonucleotide
guauggaagaucauagugu

SEQ ID NO: 1552622 - RNA, 19 nt, Artificial Sequence
  Description of Artificial Sequence: Synthetic oligonucleotide
aguucgaaauguguaacua

SEQ ID NO: 1552623 - RNA, 19 nt, Artificial Sequence
  Description of Artificial Sequence: Synthetic oligonucleotide
augguucuacauucuacau

SEQ ID NO: 1552624 - RNA, 19 nt, Artificial Sequence
  Description of Artificial Sequence: Synthetic oligonucleotide
uugguauauaaaggauugu

SEQ ID NO: 1552625 - RNA, 19 nt, Artificial Sequence
  Description of Artificial Sequence: Synthetic oligonucleotide
aguuguuagagaauccauu

SEQ ID NO: 1552626 - RNA, 19 nt, Artificial Sequence
  Description of Artificial Sequence: Synthetic oligonucleotide
agucucuaggccaaaacua

SEQ ID NO: 1552627 - RNA, 19 nt, Artificial Sequence
  Description of Artificial Sequence: Synthetic oligonucleotide
agccaauccuucaaggaca

SEQ ID NO: 1552628 - RNA, 19 nt, Artificial Sequence
  Description of Artificial Sequence: Synthetic oligonucleotide
ggugauaccggccuccaga

SEQ ID NO: 1552629 - RNA, 19 nt, Artificial Sequence
  Description of Artificial Sequence: Synthetic oligonucleotide
caucauggaccagaguuuc

SEQ ID NO: 1552630 - RNA, 19 nt, Artificial Sequence
  Description of Artificial Sequence: Synthetic oligonucleotide
caaagugagguccggcuca

SEQ ID NO: 1552631 - RNA, 19 nt, Artificial Sequence
  Description of Artificial Sequence: Synthetic oligonucleotide
ucucuaggccaaaacuauu

SEQ ID NO: 1552632 - RNA, 19 nt, Artificial Sequence
  Description of Artificial Sequence: Synthetic oligonucleotide
gaccagaguuucuuccuuc

SEQ ID NO: 1552633 - RNA, 19 nt, Artificial Sequence
  Description of Artificial Sequence: Synthetic oligonucleotide
cugcacagccuuacauucc

SEQ ID NO: 1552634 - RNA, 19 nt, Artificial Sequence
  Description of Artificial Sequence: Synthetic oligonucleotide
aaggggugcagguguucca

SEQ ID NO: 1552635 - RNA, 19 nt, Artificial Sequence
  Description of Artificial Sequence: Synthetic oligonucleotide
acguucaccucauugccuu

SEQ ID NO: 1552636 - RNA, 19 nt, Artificial Sequence
  Description of Artificial Sequence: Synthetic oligonucleotide
ucauggaccagaguuucuu

SEQ ID NO: 1552637 - RNA, 19 nt, Artificial Sequence
  Description of Artificial Sequence: Synthetic oligonucleotide
cucuaggccaaaacuauua

SEQ ID NO: 1552638 - RNA, 19 nt, Artificial Sequence
  Description of Artificial Sequence: Synthetic oligonucleotide
gaaugaguucgaaaugugu

SEQ ID NO: 1552639 - RNA, 19 nt, Artificial Sequence
  Description of Artificial Sequence: Synthetic oligonucleotide
cauccccaguaguuguuag

SEQ ID NO: 1552640 - RNA, 19 nt, Artificial Sequence
  Description of Artificial Sequence: Synthetic oligonucleotide
gaagaucauaguguauuua

SEQ ID NO: 1552641 - RNA, 19 nt, Artificial Sequence
  Description of Artificial Sequence: Synthetic oligonucleotide
aguaguugcuggugaccca

SEQ ID NO: 1552642 - RNA, 19 nt, Artificial Sequence
  Description of Artificial Sequence: Synthetic oligonucleotide
auugggccgggagauuuuc

SEQ ID NO: 1552643 - RNA, 19 nt, Artificial Sequence
  Description of Artificial Sequence: Synthetic oligonucleotide
guggguugcagccaugucu

SEQ ID NO: 1552644 - RNA, 19 nt, Artificial Sequence
  Description of Artificial Sequence: Synthetic oligonucleotide
gaguucgaaauguguaacu

SEQ ID NO: 1552645 - RNA, 19 nt, Artificial Sequence
  Description of Artificial Sequence: Synthetic oligonucleotide
caacuugauaagccaucug

SEQ ID NO: 1552646 - RNA, 19 nt, Artificial Sequence
  Description of Artificial Sequence: Synthetic oligonucleotide
cucugcugagggcaguaac

SEQ ID NO: 1552647 - RNA, 19 nt, Artificial Sequence
  Description of Artificial Sequence: Synthetic oligonucleotide
aucgucuucgccuccccau

SEQ ID NO: 1552648 - RNA, 19 nt, Artificial Sequence
  Description of Artificial Sequence: Synthetic oligonucleotide
gagcuuggcucgauuaaac

SEQ ID NO: 1552649 - RNA, 19 nt, Artificial Sequence
  Description of Artificial Sequence: Synthetic oligonucleotide
cuacauaaccaagagcucu

SEQ ID NO: 1552650 - RNA, 19 nt, Artificial Sequence
  Description of Artificial Sequence: Synthetic oligonucleotide
aggagcuuggcucgauuaa

SEQ ID NO: 1552651 - RNA, 19 nt, Artificial Sequence
  Description of Artificial Sequence: Synthetic oligonucleotide
cuuggcucgauuaaacuuu

SEQ ID NO: 1552652 - RNA, 19 nt, Artificial Sequence
  Description of Artificial Sequence: Synthetic oligonucleotide
cuaggccaaaacuauuaua

SEQ ID NO: 1552653 - RNA, 19 nt, Artificial Sequence
  Description of Artificial Sequence: Synthetic oligonucleotide
ucgcaaccuguacccagug

SEQ ID NO: 1552654 - RNA, 19 nt, Artificial Sequence
  Description of Artificial Sequence: Synthetic oligonucleotide
guaaucuguaggggaggag

SEQ ID NO: 1552655 - RNA, 19 nt, Artificial Sequence
  Description of Artificial Sequence: Synthetic oligonucleotide
uccccauccccaguaguug

SEQ ID NO: 1552656 - RNA, 19 nt, Artificial Sequence
  Description of Artificial Sequence: Synthetic oligonucleotide
ugauaccggccuccagaca

SEQ ID NO: 1552657 - RNA, 19 nt, Artificial Sequence
  Description of Artificial Sequence: Synthetic oligonucleotide
ucccaguuuugcuccuuga

SEQ ID NO: 1552658 - RNA, 19 nt, Artificial Sequence
  Description of Artificial Sequence: Synthetic oligonucleotide
ggaauauaaagcaguccca

SEQ ID NO: 1552659 - RNA, 19 nt, Artificial Sequence
  Description of Artificial Sequence: Synthetic oligonucleotide
guuuuccagacccgugaca

SEQ ID NO: 1552660 - RNA, 19 nt, Artificial Sequence
  Description of Artificial Sequence: Synthetic oligonucleotide
ccugagucugaggucaucg

SEQ ID NO: 1552661 - RNA, 19 nt, Artificial Sequence
  Description of Artificial Sequence: Synthetic oligonucleotide
cuugauaagccaucuguuu

SEQ ID NO: 1552662 - RNA, 19 nt, Artificial Sequence
  Description of Artificial Sequence: Synthetic oligonucleotide
cuucauugcauccuuugau

SEQ ID NO: 1552663 - RNA, 19 nt, Artificial Sequence
  Description of Artificial Sequence: Synthetic oligonucleotide
ucgucuucgccuccccauc

SEQ ID NO: 1552664 - RNA, 19 nt, Artificial Sequence
  Description of Artificial Sequence: Synthetic oligonucleotide
agcagauaugucaggugcu

SEQ ID NO: 1552665 - RNA, 19 nt, Artificial Sequence
  Description of Artificial Sequence: Synthetic oligonucleotide
cuggugacccauccaacca

SEQ ID NO: 1552666 - RNA, 19 nt, Artificial Sequence
  Description of Artificial Sequence: Synthetic oligonucleotide
ccaugguugcaucauggac

SEQ ID NO: 1552667 - RNA, 19 nt, Artificial Sequence
  Description of Artificial Sequence: Synthetic oligonucleotide
ggugaagccaauccuucaa

SEQ ID NO: 1552668 - RNA, 19 nt, Artificial Sequence
  Description of Artificial Sequence: Synthetic oligonucleotide
gcaaccuguacccagugcu

SEQ ID NO: 1552669 - RNA, 19 nt, Artificial Sequence
  Description of Artificial Sequence: Synthetic oligonucleotide
acccgugacaucuggugua

SEQ ID NO: 1552670 - RNA, 19 nt, Artificial Sequence
  Description of Artificial Sequence: Synthetic oligonucleotide
ccacaucaggauugggccg

SEQ ID NO: 1552671 - RNA, 19 nt, Artificial Sequence
  Description of Artificial Sequence: Synthetic oligonucleotide
cguggaauauaaagcaguc

SEQ ID NO: 1552672 - RNA, 19 nt, Artificial Sequence
  Description of Artificial Sequence: Synthetic oligonucleotide
gagaauccauucaccuuga

SEQ ID NO: 1552673 - RNA, 19 nt, Artificial Sequence
  Description of Artificial Sequence: Synthetic oligonucleotide
cagauaugucaggugcuuc

SEQ ID NO: 1552674 - RNA, 19 nt, Artificial Sequence
  Description of Artificial Sequence: Synthetic oligonucleotide
ucuuucuaugaugguucua

SEQ ID NO: 1552675 - RNA, 19 nt, Artificial Sequence
  Description of Artificial Sequence: Synthetic oligonucleotide
auggaagucucuaggccaa

SEQ ID NO: 1552676 - RNA, 19 nt, Artificial Sequence
  Description of Artificial Sequence: Synthetic oligonucleotide
gacccgugacaucuggugu

SEQ ID NO: 1552677 - RNA, 19 nt, Artificial Sequence
  Description of Artificial Sequence: Synthetic oligonucleotide
aucgcaaccuguacccagu

SEQ ID NO: 1552678 - RNA, 19 nt, Artificial Sequence
  Description of Artificial Sequence: Synthetic oligonucleotide
agaauccauucaccuugaa

SEQ ID NO: 1552679 - RNA, 19 nt, Artificial Sequence
  Description of Artificial Sequence: Synthetic oligonucleotide
ccagcagauaugucaggug

SEQ ID NO: 1552680 - RNA, 19 nt, Artificial Sequence
  Description of Artificial Sequence: Synthetic oligonucleotide
gaguuucuuccuuccccaa

SEQ ID NO: 1552681 - RNA, 19 nt, Artificial Sequence
  Description of Artificial Sequence: Synthetic oligonucleotide
ccaaaacuauuauaaucaa

SEQ ID NO: 1552682 - RNA, 19 nt, Artificial Sequence
  Description of Artificial Sequence: Synthetic oligonucleotide
gugacccauccaaccacag

SEQ ID NO: 1552683 - RNA, 19 nt, Artificial Sequence
  Description of Artificial Sequence: Synthetic oligonucleotide
acaucaggauugggccggg

SEQ ID NO: 1552684 - RNA, 19 nt, Artificial Sequence
  Description of Artificial Sequence: Synthetic oligonucleotide
gucuuucuaugaugguucu

SEQ ID NO: 1552685 - RNA, 19 nt, Artificial Sequence
  Description of Artificial Sequence: Synthetic oligonucleotide
gucucuaggccaaaacuau

SEQ ID NO: 1552686 - RNA, 19 nt, Artificial Sequence
  Description of Artificial Sequence: Synthetic oligonucleotide
auggaagaucauaguguau

SEQ ID NO: 1552687 - RNA, 19 nt, Artificial Sequence
  Description of Artificial Sequence: Synthetic oligonucleotide
ccagacccgugacaucugg

SEQ ID NO: 1552688 - RNA, 19 nt, Artificial Sequence
  Description of Artificial Sequence: Synthetic oligonucleotide
ucacuugaauaggguccac

SEQ ID NO: 1552689 - RNA, 19 nt, Artificial Sequence
  Description of Artificial Sequence: Synthetic oligonucleotide
aucauggaccagaguuucu

SEQ ID NO: 1552690 - RNA, 19 nt, Artificial Sequence
  Description of Artificial Sequence: Synthetic oligonucleotide
cuucgccuccccaucccca

SEQ ID NO: 1552691 - RNA, 19 nt, Artificial Sequence
  Description of Artificial Sequence: Synthetic oligonucleotide
cauaaccaagagcucuggu

SEQ ID NO: 1552692 - RNA, 19 nt, Artificial Sequence
  Description of Artificial Sequence: Synthetic oligonucleotide
guaucgcaaccuguaccca

SEQ ID NO: 1552693 - RNA, 19 nt, Artificial Sequence
  Description of Artificial Sequence: Synthetic oligonucleotide
guaggguggguugcagcca

SEQ ID NO: 1552694 - RNA, 19 nt, Artificial Sequence
  Description of Artificial Sequence: Synthetic oligonucleotide
uccagacacuuugggguuu

SEQ ID NO: 1552695 - RNA, 19 nt, Artificial Sequence
  Description of Artificial Sequence: Synthetic oligonucleotide
gcuuggcucgauuaaacuu

SEQ ID NO: 1552696 - RNA, 19 nt, Artificial Sequence
  Description of Artificial Sequence: Synthetic oligonucleotide
guaguugcuggugacccau

SEQ ID NO: 1552697 - RNA, 19 nt, Artificial Sequence
  Description of Artificial Sequence: Synthetic oligonucleotide
uucaggagcuuggcucgau

SEQ ID NO: 1552698 - RNA, 19 nt, Artificial Sequence
  Description of Artificial Sequence: Synthetic oligonucleotide
ggugacccauccaaccaca

SEQ ID NO: 1552699 - RNA, 19 nt, Artificial Sequence
  Description of Artificial Sequence: Synthetic oligonucleotide
ggccgggagauuuucauuu

SEQ ID NO: 1552700 - RNA, 19 nt, Artificial Sequence
  Description of Artificial Sequence: Synthetic oligonucleotide
ucgccuccccauccccagu

SEQ ID NO: 1552701 - RNA, 19 nt, Artificial Sequence
  Description of Artificial Sequence: Synthetic oligonucleotide
auaccggccuccagacacu

SEQ ID NO: 1552702 - RNA, 19 nt, Artificial Sequence
  Description of Artificial Sequence: Synthetic oligonucleotide
agcuccacccugagucuga

SEQ ID NO: 1552703 - RNA, 19 nt, Artificial Sequence
  Description of Artificial Sequence: Synthetic oligonucleotide
gguggguugcagccauguc

SEQ ID NO: 1552704 - RNA, 19 nt, Artificial Sequence
  Description of Artificial Sequence: Synthetic oligonucleotide
ugguugcaucauggaccag

SEQ ID NO: 1552705 - RNA, 19 nt, Artificial Sequence
  Description of Artificial Sequence: Synthetic oligonucleotide
cauaguccaguugcugccu

SEQ ID NO: 1552706 - RNA, 19 nt, Artificial Sequence
  Description of Artificial Sequence: Synthetic oligonucleotide
aacuagccaugaagaccuu

SEQ ID NO: 1552707 - RNA, 19 nt, Artificial Sequence
  Description of Artificial Sequence: Synthetic oligonucleotide
guguuccagcagauauguc

SEQ ID NO: 1552708 - RNA, 19 nt, Artificial Sequence
  Description of Artificial Sequence: Synthetic oligonucleotide
cagucugguggaugaugua

SEQ ID NO: 1552709 - RNA, 19 nt, Artificial Sequence
  Description of Artificial Sequence: Synthetic oligonucleotide
cgucuucgccuccccaucc

SEQ ID NO: 1552710 - RNA, 19 nt, Artificial Sequence
  Description of Artificial Sequence: Synthetic oligonucleotide
cgcaaccuguacccagugc

SEQ ID NO: 1552711 - RNA, 19 nt, Artificial Sequence
  Description of Artificial Sequence: Synthetic oligonucleotide
cagacccgugacaucuggu

SEQ ID NO: 1552712 - RNA, 19 nt, Artificial Sequence
  Description of Artificial Sequence: Synthetic oligonucleotide
aacccgcugcacagccuua

SEQ ID NO: 1552713 - RNA, 19 nt, Artificial Sequence
  Description of Artificial Sequence: Synthetic oligonucleotide
aggauugggccgggagauu

SEQ ID NO: 1552714 - RNA, 19 nt, Artificial Sequence
  Description of Artificial Sequence: Synthetic oligonucleotide
cguaaucuguaggggagga

SEQ ID NO: 1552715 - RNA, 19 nt, Artificial Sequence
  Description of Artificial Sequence: Synthetic oligonucleotide
ggauugggccgggagauuu

SEQ ID NO: 1552716 - RNA, 19 nt, Artificial Sequence
  Description of Artificial Sequence: Synthetic oligonucleotide
gauugggccgggagauuuu

SEQ ID NO: 1552717 - RNA, 19 nt, Artificial Sequence
  Description of Artificial Sequence: Synthetic oligonucleotide
gcuucauccgguccacguu

SEQ ID NO: 1552718 - RNA, 19 nt, Artificial Sequence
  Description of Artificial Sequence: Synthetic oligonucleotide
gcagauaugucaggugcuu

SEQ ID NO: 1552719 - RNA, 19 nt, Artificial Sequence
  Description of Artificial Sequence: Synthetic oligonucleotide
caucaggauugggccggga

SEQ ID NO: 1552720 - RNA, 19 nt, Artificial Sequence
  Description of Artificial Sequence: Synthetic oligonucleotide
cccaaagguaugaccuugu

SEQ ID NO: 1552721 - RNA, 19 nt, Artificial Sequence
  Description of Artificial Sequence: Synthetic oligonucleotide
ccuugagagcuuccagaua

SEQ ID NO: 1552722 - RNA, 19 nt, Artificial Sequence
  Description of Artificial Sequence: Synthetic oligonucleotide
gccaauccuucaaggacau

SEQ ID NO: 1552723 - RNA, 19 nt, Artificial Sequence
  Description of Artificial Sequence: Synthetic oligonucleotide
cuguugcgguggggaauga

SEQ ID NO: 1552724 - RNA, 19 nt, Artificial Sequence
  Description of Artificial Sequence: Synthetic oligonucleotide
gggccgggagauuuucauu

SEQ ID NO: 1552725 - RNA, 19 nt, Artificial Sequence
  Description of Artificial Sequence: Synthetic oligonucleotide
gccgggagauuuucauuuu

SEQ ID NO: 1552726 - RNA, 19 nt, Artificial Sequence
  Description of Artificial Sequence: Synthetic oligonucleotide
ccgugacaucugguguaac

SEQ ID NO: 1552727 - RNA, 19 nt, Artificial Sequence
  Description of Artificial Sequence: Synthetic oligonucleotide
cccgugacaucugguguaa

SEQ ID NO: 1552728 - RNA, 19 nt, Artificial Sequence
  Description of Artificial Sequence: Synthetic oligonucleotide
gcaacccgcugcacagccu

SEQ ID NO: 1552729 - RNA, 19 nt, Artificial Sequence
  Description of Artificial Sequence: Synthetic oligonucleotide
uauaaugagaugaugaugg

SEQ ID NO: 1552730 - RNA, 19 nt, Artificial Sequence
  Description of Artificial Sequence: Synthetic oligonucleotide
aauucauuuauuuaguacu

SEQ ID NO: 1552731 - RNA, 19 nt, Artificial Sequence
  Description of Artificial Sequence: Synthetic oligonucleotide
aggacaauuaccaagaugc

SEQ ID NO: 1552732 - RNA, 19 nt, Artificial Sequence
  Description of Artificial Sequence: Synthetic oligonucleotide
aagugucuaaagcagaagc

SEQ ID NO: 1552733 - RNA, 19 nt, Artificial Sequence
  Description of Artificial Sequence: Synthetic oligonucleotide
ugugaaauccuuaugaaca

SEQ ID NO: 1552734 - RNA, 19 nt, Artificial Sequence
  Description of Artificial Sequence: Synthetic oligonucleotide
uucuagagcacaaagaggc

SEQ ID NO: 1552735 - RNA, 19 nt, Artificial Sequence
  Description of Artificial Sequence: Synthetic oligonucleotide
aaugauuuguucauggcac

SEQ ID NO: 1552736 - RNA, 19 nt, Artificial Sequence
  Description of Artificial Sequence: Synthetic oligonucleotide
uauuguucaaaauucaaga

SEQ ID NO: 1552737 - RNA, 19 nt, Artificial Sequence
  Description of Artificial Sequence: Synthetic oligonucleotide
uuugauaccagucauacuu

SEQ ID NO: 1552738 - RNA, 19 nt, Artificial Sequence
  Description of Artificial Sequence: Synthetic oligonucleotide
aagauauuguucaaaauuc

SEQ ID NO: 1552739 - RNA, 19 nt, Artificial Sequence
  Description of Artificial Sequence: Synthetic oligonucleotide
uuuggauugaguucaagag

SEQ ID NO: 1552740 - RNA, 19 nt, Artificial Sequence
  Description of Artificial Sequence: Synthetic oligonucleotide
auaaaugauuuguucaugg

SEQ ID NO: 1552741 - RNA, 19 nt, Artificial Sequence
  Description of Artificial Sequence: Synthetic oligonucleotide
aguaggauuauuuggauug

SEQ ID NO: 1552742 - RNA, 19 nt, Artificial Sequence
  Description of Artificial Sequence: Synthetic oligonucleotide
uaaagcuucggcccgagcg

SEQ ID NO: 1552743 - RNA, 19 nt, Artificial Sequence
  Description of Artificial Sequence: Synthetic oligonucleotide
ucuaucuaguaucaaauga

SEQ ID NO: 1552744 - RNA, 19 nt, Artificial Sequence
  Description of Artificial Sequence: Synthetic oligonucleotide
aacuagacagagcugaucu

SEQ ID NO: 1552745 - RNA, 19 nt, Artificial Sequence
  Description of Artificial Sequence: Synthetic oligonucleotide
agagguuuaaucuuucaag

SEQ ID NO: 1552746 - RNA, 19 nt, Artificial Sequence
  Description of Artificial Sequence: Synthetic oligonucleotide
ugguauaaugagaugauga

SEQ ID NO: 1552747 - RNA, 19 nt, Artificial Sequence
  Description of Artificial Sequence: Synthetic oligonucleotide
ucuuuagaauacuugcagg

SEQ ID NO: 1552748 - RNA, 19 nt, Artificial Sequence
  Description of Artificial Sequence: Synthetic oligonucleotide
uccauaaaugauuuguuca

SEQ ID NO: 1552749 - RNA, 19 nt, Artificial Sequence
  Description of Artificial Sequence: Synthetic oligonucleotide
aaaauuugcaucugcacua

SEQ ID NO: 1552750 - RNA, 19 nt, Artificial Sequence
  Description of Artificial Sequence: Synthetic oligonucleotide
aauaacuuguuuaacgcug

SEQ ID NO: 1552751 - RNA, 19 nt, Artificial Sequence
  Description of Artificial Sequence: Synthetic oligonucleotide
uuuaguacuguuuccauuc

SEQ ID NO: 1552752 - RNA, 19 nt, Artificial Sequence
  Description of Artificial Sequence: Synthetic oligonucleotide
aaauaacuuguuuaacgcu

SEQ ID NO: 1552753 - RNA, 19 nt, Artificial Sequence
  Description of Artificial Sequence: Synthetic oligonucleotide
uggauugaguucaagagac

SEQ ID NO: 1552754 - RNA, 19 nt, Artificial Sequence
  Description of Artificial Sequence: Synthetic oligonucleotide
aguacuuuaaaugugcucu

SEQ ID NO: 1552755 - RNA, 19 nt, Artificial Sequence
  Description of Artificial Sequence: Synthetic oligonucleotide
uuugaucucaccaaccagu

SEQ ID NO: 1552756 - RNA, 19 nt, Artificial Sequence
  Description of Artificial Sequence: Synthetic oligonucleotide
gaaaaucauuucuagagca

SEQ ID NO: 1552757 - RNA, 19 nt, Artificial Sequence
  Description of Artificial Sequence: Synthetic oligonucleotide
uuuacaucugaugugaacu

SEQ ID NO: 1552758 - RNA, 19 nt, Artificial Sequence
  Description of Artificial Sequence: Synthetic oligonucleotide
uuaaagauuucuccacucc

SEQ ID NO: 1552759 - RNA, 19 nt, Artificial Sequence
  Description of Artificial Sequence: Synthetic oligonucleotide
uuagucagcuccucuaacg

SEQ ID NO: 1552760 - RNA, 19 nt, Artificial Sequence
  Description of Artificial Sequence: Synthetic oligonucleotide
auuaaagauuucuccacuc

SEQ ID NO: 1552761 - RNA, 19 nt, Artificial Sequence
  Description of Artificial Sequence: Synthetic oligonucleotide
aucagagcaucugagaagc

SEQ ID NO: 1552762 - RNA, 19 nt, Artificial Sequence
  Description of Artificial Sequence: Synthetic oligonucleotide
uaaagauuucuccacuccc

SEQ ID NO: 1552763 - RNA, 19 nt, Artificial Sequence
  Description of Artificial Sequence: Synthetic oligonucleotide
cuaucuaguaucaaaugac

SEQ ID NO: 1552764 - RNA, 19 nt, Artificial Sequence
  Description of Artificial Sequence: Synthetic oligonucleotide
aagggaguuucaccaaagc

SEQ ID NO: 1552765 - RNA, 19 nt, Artificial Sequence
  Description of Artificial Sequence: Synthetic oligonucleotide
uuuauuuaguacuguuucc

SEQ ID NO: 1552766 - RNA, 19 nt, Artificial Sequence
  Description of Artificial Sequence: Synthetic oligonucleotide
gaaaguacuuuaaaugugc

SEQ ID NO: 1552767 - RNA, 19 nt, Artificial Sequence
  Description of Artificial Sequence: Synthetic oligonucleotide
ugaugguauucacacaucc

SEQ ID NO: 1552768 - RNA, 19 nt, Artificial Sequence
  Description of Artificial Sequence: Synthetic oligonucleotide
ugauaagaugugaucauca

SEQ ID NO: 1552769 - RNA, 19 nt, Artificial Sequence
  Description of Artificial Sequence: Synthetic oligonucleotide
cuguucagggacuauaggg

SEQ ID NO: 1552770 - RNA, 19 nt, Artificial Sequence
  Description of Artificial Sequence: Synthetic oligonucleotide
agcugaucuaucuaguauc

SEQ ID NO: 1552771 - RNA, 19 nt, Artificial Sequence
  Description of Artificial Sequence: Synthetic oligonucleotide
aagugauaagaugugauca

SEQ ID NO: 1552772 - RNA, 19 nt, Artificial Sequence
  Description of Artificial Sequence: Synthetic oligonucleotide
uuuaccuacaucagaccag

SEQ ID NO: 1552773 - RNA, 19 nt, Artificial Sequence
  Description of Artificial Sequence: Synthetic oligonucleotide
uuccauauuuacaucauuc

SEQ ID NO: 1552774 - RNA, 19 nt, Artificial Sequence
  Description of Artificial Sequence: Synthetic oligonucleotide
auggauacagguucuuuac

SEQ ID NO: 1552775 - RNA, 19 nt, Artificial Sequence
  Description of Artificial Sequence: Synthetic oligonucleotide
auuaacagaacacuagcau

SEQ ID NO: 1552776 - RNA, 19 nt, Artificial Sequence
  Description of Artificial Sequence: Synthetic oligonucleotide
gauuauuuggauugaguuc

SEQ ID NO: 1552777 - RNA, 19 nt, Artificial Sequence
  Description of Artificial Sequence: Synthetic oligonucleotide
agccacuaaagcuucggcc

SEQ ID NO: 1552778 - RNA, 19 nt, Artificial Sequence
  Description of Artificial Sequence: Synthetic oligonucleotide
uagcaguaggauuauuugg

SEQ ID NO: 1552779 - RNA, 19 nt, Artificial Sequence
  Description of Artificial Sequence: Synthetic oligonucleotide
augugugaaauccuuauga

SEQ ID NO: 1552780 - RNA, 19 nt, Artificial Sequence
  Description of Artificial Sequence: Synthetic oligonucleotide
aagcaugugacaauaagcu

SEQ ID NO: 1552781 - RNA, 19 nt, Artificial Sequence
  Description of Artificial Sequence: Synthetic oligonucleotide
cauaucaucaggaggguug

SEQ ID NO: 1552782 - RNA, 19 nt, Artificial Sequence
  Description of Artificial Sequence: Synthetic oligonucleotide
auuuggauugaguucaaga

SEQ ID NO: 1552783 - RNA, 19 nt, Artificial Sequence
  Description of Artificial Sequence: Synthetic oligonucleotide
auagcaguaggauuauuug

SEQ ID NO: 1552784 - RNA, 19 nt, Artificial Sequence
  Description of Artificial Sequence: Synthetic oligonucleotide
uuggauugaguucaagaga

SEQ ID NO: 1552785 - RNA, 19 nt, Artificial Sequence
  Description of Artificial Sequence: Synthetic oligonucleotide
uuaaaugugcucuguucag

SEQ ID NO: 1552786 - RNA, 19 nt, Artificial Sequence
  Description of Artificial Sequence: Synthetic oligonucleotide
uguccugcuauaaaagugu

SEQ ID NO: 1552787 - RNA, 19 nt, Artificial Sequence
  Description of Artificial Sequence: Synthetic oligonucleotide
ucagcaauaccaucaaggu

SEQ ID NO: 1552788 - RNA, 19 nt, Artificial Sequence
  Description of Artificial Sequence: Synthetic oligonucleotide
uguuuaacgcugcaucacc

SEQ ID NO: 1552789 - RNA, 19 nt, Artificial Sequence
  Description of Artificial Sequence: Synthetic oligonucleotide
ugaacagaagugauaagau

SEQ ID NO: 1552790 - RNA, 19 nt, Artificial Sequence
  Description of Artificial Sequence: Synthetic oligonucleotide
caguuaguacucaagacug

SEQ ID NO: 1552791 - RNA, 19 nt, Artificial Sequence
  Description of Artificial Sequence: Synthetic oligonucleotide
uuguccugcuauaaaagug

SEQ ID NO: 1552792 - RNA, 19 nt, Artificial Sequence
  Description of Artificial Sequence: Synthetic oligonucleotide
agaggcagagguuuaaucu

SEQ ID NO: 1552793 - RNA, 19 nt, Artificial Sequence
  Description of Artificial Sequence: Synthetic oligonucleotide
caaucuuuguugaaaguac

SEQ ID NO: 1552794 - RNA, 19 nt, Artificial Sequence
  Description of Artificial Sequence: Synthetic oligonucleotide
acucugugauaccaaauuc

SEQ ID NO: 1552795 - RNA, 19 nt, Artificial Sequence
  Description of Artificial Sequence: Synthetic oligonucleotide
gagguuuaaucuuucaaga

SEQ ID NO: 1552796 - RNA, 19 nt, Artificial Sequence
  Description of Artificial Sequence: Synthetic oligonucleotide
ugaucuaucuaguaucaaa

SEQ ID NO: 1552797 - RNA, 19 nt, Artificial Sequence
  Description of Artificial Sequence: Synthetic oligonucleotide
aaagcagaagcguagucuu

SEQ ID NO: 1552798 - RNA, 19 nt, Artificial Sequence
  Description of Artificial Sequence: Synthetic oligonucleotide
gaagauauuguucaaaauu

SEQ ID NO: 1552799 - RNA, 19 nt, Artificial Sequence
  Description of Artificial Sequence: Synthetic oligonucleotide
caaagccuuagucagcucc

SEQ ID NO: 1552800 - RNA, 19 nt, Artificial Sequence
  Description of Artificial Sequence: Synthetic oligonucleotide
aauuauuaacagaacacua

SEQ ID NO: 1552801 - RNA, 19 nt, Artificial Sequence
  Description of Artificial Sequence: Synthetic oligonucleotide
ucuaguaucaaaugacauu

SEQ ID NO: 1552802 - RNA, 19 nt, Artificial Sequence
  Description of Artificial Sequence: Synthetic oligonucleotide
ugcugaaauaacuuguuua

SEQ ID NO: 1552803 - RNA, 19 nt, Artificial Sequence
  Description of Artificial Sequence: Synthetic oligonucleotide
agcucucugacaguaauac

SEQ ID NO: 1552804 - RNA, 19 nt, Artificial Sequence
  Description of Artificial Sequence: Synthetic oligonucleotide
uauagggugaagcaaccuc

SEQ ID NO: 1552805 - RNA, 19 nt, Artificial Sequence
  Description of Artificial Sequence: Synthetic oligonucleotide
ugagauuccguuugauacc

SEQ ID NO: 1552806 - RNA, 19 nt, Artificial Sequence
  Description of Artificial Sequence: Synthetic oligonucleotide
uauucacacaucccuuucc

SEQ ID NO: 1552807 - RNA, 19 nt, Artificial Sequence
  Description of Artificial Sequence: Synthetic oligonucleotide
uucuuuuaccuacaucaga

SEQ ID NO: 1552808 - RNA, 19 nt, Artificial Sequence
  Description of Artificial Sequence: Synthetic oligonucleotide
ugacaauaagcucucugac

SEQ ID NO: 1552809 - RNA, 19 nt, Artificial Sequence
  Description of Artificial Sequence: Synthetic oligonucleotide
uacacaaugggcacucgug

SEQ ID NO: 1552810 - RNA, 19 nt, Artificial Sequence
  Description of Artificial Sequence: Synthetic oligonucleotide
gaagugauaagaugugauc

SEQ ID NO: 1552811 - RNA, 19 nt, Artificial Sequence
  Description of Artificial Sequence: Synthetic oligonucleotide
cuuuagaauacuugcagga

SEQ ID NO: 1552812 - RNA, 19 nt, Artificial Sequence
  Description of Artificial Sequence: Synthetic oligonucleotide
auaacuuguuuaacgcugc

SEQ ID NO: 1552813 - RNA, 19 nt, Artificial Sequence
  Description of Artificial Sequence: Synthetic oligonucleotide
agggacuauagggugaagc

SEQ ID NO: 1552814 - RNA, 19 nt, Artificial Sequence
  Description of Artificial Sequence: Synthetic oligonucleotide
auguuccaaagccuuaguc

SEQ ID NO: 1552815 - RNA, 19 nt, Artificial Sequence
  Description of Artificial Sequence: Synthetic oligonucleotide
agugucuaaagcagaagcg

SEQ ID NO: 1552816 - RNA, 19 nt, Artificial Sequence
  Description of Artificial Sequence: Synthetic oligonucleotide
cacucccauaacuagacag

SEQ ID NO: 1552817 - RNA, 19 nt, Artificial Sequence
  Description of Artificial Sequence: Synthetic oligonucleotide
ugggaaaaccgcugggacg

SEQ ID NO: 1552818 - RNA, 19 nt, Artificial Sequence
  Description of Artificial Sequence: Synthetic oligonucleotide
caaccucaguuucauaugg

SEQ ID NO: 1552819 - RNA, 19 nt, Artificial Sequence
  Description of Artificial Sequence: Synthetic oligonucleotide
gacacuucagacucugaug

SEQ ID NO: 1552820 - RNA, 19 nt, Artificial Sequence
  Description of Artificial Sequence: Synthetic oligonucleotide
uugaguucaagagacuucu

SEQ ID NO: 1552821 - RNA, 19 nt, Artificial Sequence
  Description of Artificial Sequence: Synthetic oligonucleotide
uuccguuugauaccaguca

SEQ ID NO: 1552822 - RNA, 19 nt, Artificial Sequence
  Description of Artificial Sequence: Synthetic oligonucleotide
aaguacacaaugggcacuc

SEQ ID NO: 1552823 - RNA, 19 nt, Artificial Sequence
  Description of Artificial Sequence: Synthetic oligonucleotide
cauuccauaucaucaggag

SEQ ID NO: 1552824 - RNA, 19 nt, Artificial Sequence
  Description of Artificial Sequence: Synthetic oligonucleotide
uuaguacucaagacuguac

SEQ ID NO: 1552825 - RNA, 19 nt, Artificial Sequence
  Description of Artificial Sequence: Synthetic oligonucleotide
agcaugugacaauaagcuc

SEQ ID NO: 1552826 - RNA, 19 nt, Artificial Sequence
  Description of Artificial Sequence: Synthetic oligonucleotide
aaaaccgcugggacguugc

SEQ ID NO: 1552827 - RNA, 19 nt, Artificial Sequence
  Description of Artificial Sequence: Synthetic oligonucleotide
aucuaucuaguaucaaaug

SEQ ID NO: 1552828 - RNA, 19 nt, Artificial Sequence
  Description of Artificial Sequence: Synthetic oligonucleotide
aagacuguaccaccagacu

SEQ ID NO: 1552829 - RNA, 19 nt, Artificial Sequence
  Description of Artificial Sequence: Synthetic oligonucleotide
uugauaccagucauacuug

SEQ ID NO: 1552830 - RNA, 19 nt, Artificial Sequence
  Description of Artificial Sequence: Synthetic oligonucleotide
aauaagcucucugacagua

SEQ ID NO: 1552831 - RNA, 19 nt, Artificial Sequence
  Description of Artificial Sequence: Synthetic oligonucleotide
augauuacuugagauuccg

SEQ ID NO: 1552832 - RNA, 19 nt, Artificial Sequence
  Description of Artificial Sequence: Synthetic oligonucleotide
uccuuaugaacagaaguga

SEQ ID NO: 1552833 - RNA, 19 nt, Artificial Sequence
  Description of Artificial Sequence: Synthetic oligonucleotide
ugaucauaaguguaaugau

SEQ ID NO: 1552834 - RNA, 19 nt, Artificial Sequence
  Description of Artificial Sequence: Synthetic oligonucleotide
aggaggguugauuucaacu

SEQ ID NO: 1552835 - RNA, 19 nt, Artificial Sequence
  Description of Artificial Sequence: Synthetic oligonucleotide
cauaacuagacagagcuga

SEQ ID NO: 1552836 - RNA, 19 nt, Artificial Sequence
  Description of Artificial Sequence: Synthetic oligonucleotide
aaagcuucggcccgagcgu

SEQ ID NO: 1552837 - RNA, 19 nt, Artificial Sequence
  Description of Artificial Sequence: Synthetic oligonucleotide
cacucgugaacaaacguac

SEQ ID NO: 1552838 - RNA, 19 nt, Artificial Sequence
  Description of Artificial Sequence: Synthetic oligonucleotide
gacaauaagcucucugaca

SEQ ID NO: 1552839 - RNA, 19 nt, Artificial Sequence
  Description of Artificial Sequence: Synthetic oligonucleotide
auaaguguaaugauuacuu

SEQ ID NO: 1552840 - RNA, 19 nt, Artificial Sequence
  Description of Artificial Sequence: Synthetic oligonucleotide
uacucugugauaccaaauu

SEQ ID NO: 1552841 - RNA, 19 nt, Artificial Sequence
  Description of Artificial Sequence: Synthetic oligonucleotide
gugacaauaagcucucuga

SEQ ID NO: 1552842 - RNA, 19 nt, Artificial Sequence
  Description of Artificial Sequence: Synthetic oligonucleotide
ggaaaaucauuucuagagc

SEQ ID NO: 1552843 - RNA, 19 nt, Artificial Sequence
  Description of Artificial Sequence: Synthetic oligonucleotide
guauaaugagaugaugaug

SEQ ID NO: 1552844 - RNA, 19 nt, Artificial Sequence
  Description of Artificial Sequence: Synthetic oligonucleotide
cuagcuuuucccaucucac

SEQ ID NO: 1552845 - RNA, 19 nt, Artificial Sequence
  Description of Artificial Sequence: Synthetic oligonucleotide
guucaagagacuucuuuac

SEQ ID NO: 1552846 - RNA, 19 nt, Artificial Sequence
  Description of Artificial Sequence: Synthetic oligonucleotide
aguaauacugugcauccuu

SEQ ID NO: 1552847 - RNA, 19 nt, Artificial Sequence
  Description of Artificial Sequence: Synthetic oligonucleotide
uacucaagacuguaccacc

SEQ ID NO: 1552848 - RNA, 19 nt, Artificial Sequence
  Description of Artificial Sequence: Synthetic oligonucleotide
cuuuacaucugaugugaac

SEQ ID NO: 1552849 - RNA, 19 nt, Artificial Sequence
  Description of Artificial Sequence: Synthetic oligonucleotide
uccagaagggaguuucacc

SEQ ID NO: 1552850 - RNA, 19 nt, Artificial Sequence
  Description of Artificial Sequence: Synthetic oligonucleotide
acaauuaccaagaugccau

SEQ ID NO: 1552851 - RNA, 19 nt, Artificial Sequence
  Description of Artificial Sequence: Synthetic oligonucleotide
gauacagguucuuuacauc

SEQ ID NO: 1552852 - RNA, 19 nt, Artificial Sequence
  Description of Artificial Sequence: Synthetic oligonucleotide
ucaagacuguaccaccaga

SEQ ID NO: 1552853 - RNA, 19 nt, Artificial Sequence
  Description of Artificial Sequence: Synthetic oligonucleotide
ugacccucuagcuuuuccc

SEQ ID NO: 1552854 - RNA, 19 nt, Artificial Sequence
  Description of Artificial Sequence: Synthetic oligonucleotide
auuaccaagaugccauuaa

SEQ ID NO: 1552855 - RNA, 19 nt, Artificial Sequence
  Description of Artificial Sequence: Synthetic oligonucleotide
ugaagcaaccucaguuuca

SEQ ID NO: 1552856 - RNA, 19 nt, Artificial Sequence
  Description of Artificial Sequence: Synthetic oligonucleotide
gacuauagggugaagcaac

SEQ ID NO: 1552857 - RNA, 19 nt, Artificial Sequence
  Description of Artificial Sequence: Synthetic oligonucleotide
ucauaaguguaaugauuac

SEQ ID NO: 1552858 - RNA, 19 nt, Artificial Sequence
  Description of Artificial Sequence: Synthetic oligonucleotide
uuaccaagaugccauuaaa

SEQ ID NO: 1552859 - RNA, 19 nt, Artificial Sequence
  Description of Artificial Sequence: Synthetic oligonucleotide
cuuuuaauccagauggcaa

SEQ ID NO: 1552860 - RNA, 19 nt, Artificial Sequence
  Description of Artificial Sequence: Synthetic oligonucleotide
agaacacuagcaucaaaau

SEQ ID NO: 1552861 - RNA, 19 nt, Artificial Sequence
  Description of Artificial Sequence: Synthetic oligonucleotide
uuuagaauacuugcaggaa

SEQ ID NO: 1552862 - RNA, 19 nt, Artificial Sequence
  Description of Artificial Sequence: Synthetic oligonucleotide
agugauaagaugugaucau

SEQ ID NO: 1552863 - RNA, 19 nt, Artificial Sequence
  Description of Artificial Sequence: Synthetic oligonucleotide
gaccaguuaguacucaaga

SEQ ID NO: 1552864 - RNA, 19 nt, Artificial Sequence
  Description of Artificial Sequence: Synthetic oligonucleotide
auugaguucaagagacuuc

SEQ ID NO: 1552865 - RNA, 19 nt, Artificial Sequence
  Description of Artificial Sequence: Synthetic oligonucleotide
gugugaaauccuuaugaac

SEQ ID NO: 1552866 - RNA, 19 nt, Artificial Sequence
  Description of Artificial Sequence: Synthetic oligonucleotide
auaugguaaucuucuccag

SEQ ID NO: 1552867 - RNA, 19 nt, Artificial Sequence
  Description of Artificial Sequence: Synthetic oligonucleotide
gaauacuugcaggaaaauc

SEQ ID NO: 1552868 - RNA, 19 nt, Artificial Sequence
  Description of Artificial Sequence: Synthetic oligonucleotide
uuuugaugguauucacaca

SEQ ID NO: 1552869 - RNA, 19 nt, Artificial Sequence
  Description of Artificial Sequence: Synthetic oligonucleotide
aacguacucugugauacca

SEQ ID NO: 1552870 - RNA, 19 nt, Artificial Sequence
  Description of Artificial Sequence: Synthetic oligonucleotide
auaccagucauacuugauu

SEQ ID NO: 1552871 - RNA, 19 nt, Artificial Sequence
  Description of Artificial Sequence: Synthetic oligonucleotide
gaacaaacguacucuguga

SEQ ID NO: 1552872 - RNA, 19 nt, Artificial Sequence
  Description of Artificial Sequence: Synthetic oligonucleotide
gaugguauucacacauccc

SEQ ID NO: 1552873 - RNA, 19 nt, Artificial Sequence
  Description of Artificial Sequence: Synthetic oligonucleotide
uaccagucauacuugauuu

SEQ ID NO: 1552874 - RNA, 19 nt, Artificial Sequence
  Description of Artificial Sequence: Synthetic oligonucleotide
aucccuaagagccacuaaa

SEQ ID NO: 1552875 - RNA, 19 nt, Artificial Sequence
  Description of Artificial Sequence: Synthetic oligonucleotide
cucugugauaccaaauuca

SEQ ID NO: 1552876 - RNA, 19 nt, Artificial Sequence
  Description of Artificial Sequence: Synthetic oligonucleotide
ugauaccagucauacuuga

SEQ ID NO: 1552877 - RNA, 19 nt, Artificial Sequence
  Description of Artificial Sequence: Synthetic oligonucleotide
gauauuguucaaaauucaa

SEQ ID NO: 1552878 - RNA, 19 nt, Artificial Sequence
  Description of Artificial Sequence: Synthetic oligonucleotide
uaacgcugcaucacccucc

SEQ ID NO: 1552879 - RNA, 19 nt, Artificial Sequence
  Description of Artificial Sequence: Synthetic oligonucleotide
cuuguuuaacgcugcauca

SEQ ID NO: 1552880 - RNA, 19 nt, Artificial Sequence
  Description of Artificial Sequence: Synthetic oligonucleotide
ucgugaacaaacguacucu

SEQ ID NO: 1552881 - RNA, 19 nt, Artificial Sequence
  Description of Artificial Sequence: Synthetic oligonucleotide
ugggcacucgugaacaaac

SEQ ID NO: 1552882 - RNA, 19 nt, Artificial Sequence
  Description of Artificial Sequence: Synthetic oligonucleotide
auacugugcauccuuugga

SEQ ID NO: 1552883 - RNA, 19 nt, Artificial Sequence
  Description of Artificial Sequence: Synthetic oligonucleotide
ucuccuggcaccuuuuaau

SEQ ID NO: 1552884 - RNA, 19 nt, Artificial Sequence
  Description of Artificial Sequence: Synthetic oligonucleotide
gacaauuaccaagaugcca

SEQ ID NO: 1552885 - RNA, 19 nt, Artificial Sequence
  Description of Artificial Sequence: Synthetic oligonucleotide
uccguuugauaccagucau

SEQ ID NO: 1552886 - RNA, 19 nt, Artificial Sequence
  Description of Artificial Sequence: Synthetic oligonucleotide
ucuuuacaucagcaauacc

SEQ ID NO: 1552887 - RNA, 19 nt, Artificial Sequence
  Description of Artificial Sequence: Synthetic oligonucleotide
ugugaucaucacucuuuag

SEQ ID NO: 1552888 - RNA, 19 nt, Artificial Sequence
  Description of Artificial Sequence: Synthetic oligonucleotide
agcaguaggauuauuugga

SEQ ID NO: 1552889 - RNA, 19 nt, Artificial Sequence
  Description of Artificial Sequence: Synthetic oligonucleotide
aaaguacacaaugggcacu

SEQ ID NO: 1552890 - RNA, 19 nt, Artificial Sequence
  Description of Artificial Sequence: Synthetic oligonucleotide
gguucuuuacaucugaugu

SEQ ID NO: 1552891 - RNA, 19 nt, Artificial Sequence
  Description of Artificial Sequence: Synthetic oligonucleotide
uuaaucuuucaagaagaua

SEQ ID NO: 1552892 - RNA, 19 nt, Artificial Sequence
  Description of Artificial Sequence: Synthetic oligonucleotide
guuucauaugguaaucuuc

SEQ ID NO: 1552893 - RNA, 19 nt, Artificial Sequence
  Description of Artificial Sequence: Synthetic oligonucleotide
uuaccuacaucagaccagu

SEQ ID NO: 1552894 - RNA, 19 nt, Artificial Sequence
  Description of Artificial Sequence: Synthetic oligonucleotide
aguuucauaugguaaucuu

SEQ ID NO: 1552895 - RNA, 19 nt, Artificial Sequence
  Description of Artificial Sequence: Synthetic oligonucleotide
agacagagcugaucuaucu

SEQ ID NO: 1552896 - RNA, 19 nt, Artificial Sequence
  Description of Artificial Sequence: Synthetic oligonucleotide
cauaaaugauuuguucaug

SEQ ID NO: 1552897 - RNA, 19 nt, Artificial Sequence
  Description of Artificial Sequence: Synthetic oligonucleotide
accaccagacuccauaaau

SEQ ID NO: 1552898 - RNA, 19 nt, Artificial Sequence
  Description of Artificial Sequence: Synthetic oligonucleotide
ucgaucagagcaucugaga

SEQ ID NO: 1552899 - RNA, 19 nt, Artificial Sequence
  Description of Artificial Sequence: Synthetic oligonucleotide
uuuaauccagauggcaaaa

SEQ ID NO: 1552900 - RNA, 19 nt, Artificial Sequence
  Description of Artificial Sequence: Synthetic oligonucleotide
gccacuaaagcuucggccc

SEQ ID NO: 1552901 - RNA, 19 nt, Artificial Sequence
  Description of Artificial Sequence: Synthetic oligonucleotide
gaaugugauaaaguacaca

SEQ ID NO: 1552902 - RNA, 19 nt, Artificial Sequence
  Description of Artificial Sequence: Synthetic oligonucleotide
cucgugaacaaacguacuc

SEQ ID NO: 1552903 - RNA, 19 nt, Artificial Sequence
  Description of Artificial Sequence: Synthetic oligonucleotide
gucuaaagcagaagcguag

SEQ ID NO: 1552904 - RNA, 19 nt, Artificial Sequence
  Description of Artificial Sequence: Synthetic oligonucleotide
auaaugagaugaugaugga

SEQ ID NO: 1552905 - RNA, 19 nt, Artificial Sequence
  Description of Artificial Sequence: Synthetic oligonucleotide
aagaugccauuaaagauuu

SEQ ID NO: 1552906 - RNA, 19 nt, Artificial Sequence
  Description of Artificial Sequence: Synthetic oligonucleotide
uaggauuauuuggauugag

SEQ ID NO: 1552907 - RNA, 19 nt, Artificial Sequence
  Description of Artificial Sequence: Synthetic oligonucleotide
guacuuuaaaugugcucug

SEQ ID NO: 1552908 - RNA, 19 nt, Artificial Sequence
  Description of Artificial Sequence: Synthetic oligonucleotide
aaucauuucuagagcacaa

SEQ ID NO: 1552909 - RNA, 19 nt, Artificial Sequence
  Description of Artificial Sequence: Synthetic oligonucleotide
uccuugacccucuagcuuu

SEQ ID NO: 1552910 - RNA, 19 nt, Artificial Sequence
  Description of Artificial Sequence: Synthetic oligonucleotide
uuaucccaguuccugguau

SEQ ID NO: 1552911 - RNA, 19 nt, Artificial Sequence
  Description of Artificial Sequence: Synthetic oligonucleotide
gauuacuugagauuccguu

SEQ ID NO: 1552912 - RNA, 19 nt, Artificial Sequence
  Description of Artificial Sequence: Synthetic oligonucleotide
uccucuaacgccgccuggg

SEQ ID NO: 1552913 - RNA, 19 nt, Artificial Sequence
  Description of Artificial Sequence: Synthetic oligonucleotide
ugauuacuugagauuccgu

SEQ ID NO: 1552914 - RNA, 19 nt, Artificial Sequence
  Description of Artificial Sequence: Synthetic oligonucleotide
gcugggacguugcagaucc

SEQ ID NO: 1552915 - RNA, 19 nt, Artificial Sequence
  Description of Artificial Sequence: Synthetic oligonucleotide
uccugcuauaaaagugucu

SEQ ID NO: 1552916 - RNA, 19 nt, Artificial Sequence
  Description of Artificial Sequence: Synthetic oligonucleotide
gacguugcagauccugcug

SEQ ID NO: 1552917 - RNA, 19 nt, Artificial Sequence
  Description of Artificial Sequence: Synthetic oligonucleotide
ugcauccuuuggauuaugu

SEQ ID NO: 1552918 - RNA, 19 nt, Artificial Sequence
  Description of Artificial Sequence: Synthetic oligonucleotide
ugaaauccuuaugaacaga

SEQ ID NO: 1552919 - RNA, 19 nt, Artificial Sequence
  Description of Artificial Sequence: Synthetic oligonucleotide
auagggugaagcaaccuca

SEQ ID NO: 1552920 - RNA, 19 nt, Artificial Sequence
  Description of Artificial Sequence: Synthetic oligonucleotide
uacugugcauccuuuggau

SEQ ID NO: 1552921 - RNA, 19 nt, Artificial Sequence
  Description of Artificial Sequence: Synthetic oligonucleotide
uaacuuguuuaacgcugca

SEQ ID NO: 1552922 - RNA, 19 nt, Artificial Sequence
  Description of Artificial Sequence: Synthetic oligonucleotide
ucaccaaagcagacaacuc

SEQ ID NO: 1552923 - RNA, 19 nt, Artificial Sequence
  Description of Artificial Sequence: Synthetic oligonucleotide
uuguuuaacgcugcaucac

SEQ ID NO: 1552924 - RNA, 19 nt, Artificial Sequence
  Description of Artificial Sequence: Synthetic oligonucleotide
agaagugauaagaugugau

SEQ ID NO: 1552925 - RNA, 19 nt, Artificial Sequence
  Description of Artificial Sequence: Synthetic oligonucleotide
uauuuacaucauucuucug

SEQ ID NO: 1552926 - RNA, 19 nt, Artificial Sequence
  Description of Artificial Sequence: Synthetic oligonucleotide
agagccacuaaagcuucgg

SEQ ID NO: 1552927 - RNA, 19 nt, Artificial Sequence
  Description of Artificial Sequence: Synthetic oligonucleotide
aaagccuuagucagcuccu

SEQ ID NO: 1552928 - RNA, 19 nt, Artificial Sequence
  Description of Artificial Sequence: Synthetic oligonucleotide
accuuuuaauccagauggc

SEQ ID NO: 1552929 - RNA, 19 nt, Artificial Sequence
  Description of Artificial Sequence: Synthetic oligonucleotide
acuuuaaaugugcucuguu

SEQ ID NO: 1552930 - RNA, 19 nt, Artificial Sequence
  Description of Artificial Sequence: Synthetic oligonucleotide
guuuaacgcugcaucaccc

SEQ ID NO: 1552931 - RNA, 19 nt, Artificial Sequence
  Description of Artificial Sequence: Synthetic oligonucleotide
accuacaucagaccaguua

SEQ ID NO: 1552932 - RNA, 19 nt, Artificial Sequence
  Description of Artificial Sequence: Synthetic oligonucleotide
caccagacuccauaaauga

SEQ ID NO: 1552933 - RNA, 19 nt, Artificial Sequence
  Description of Artificial Sequence: Synthetic oligonucleotide
guacucaagacuguaccac

SEQ ID NO: 1552934 - RNA, 19 nt, Artificial Sequence
  Description of Artificial Sequence: Synthetic oligonucleotide
agcguuuucuaccuugguu

SEQ ID NO: 1552935 - RNA, 19 nt, Artificial Sequence
  Description of Artificial Sequence: Synthetic oligonucleotide
accgcugggacguugcaga

SEQ ID NO: 1552936 - RNA, 19 nt, Artificial Sequence
  Description of Artificial Sequence: Synthetic oligonucleotide
aauuaccaagaugccauua

SEQ ID NO: 1552937 - RNA, 19 nt, Artificial Sequence
  Description of Artificial Sequence: Synthetic oligonucleotide
uugcaucugcacuaucuaa

SEQ ID NO: 1552938 - RNA, 19 nt, Artificial Sequence
  Description of Artificial Sequence: Synthetic oligonucleotide
gaucuaucuaguaucaaau

SEQ ID NO: 1552939 - RNA, 19 nt, Artificial Sequence
  Description of Artificial Sequence: Synthetic oligonucleotide
aacgcugcaucacccucca

SEQ ID NO: 1552940 - RNA, 19 nt, Artificial Sequence
  Description of Artificial Sequence: Synthetic oligonucleotide
uucauaugguaaucuucuc

SEQ ID NO: 1552941 - RNA, 19 nt, Artificial Sequence
  Description of Artificial Sequence: Synthetic oligonucleotide
uacaucugaugugaacugu

SEQ ID NO: 1552942 - RNA, 19 nt, Artificial Sequence
  Description of Artificial Sequence: Synthetic oligonucleotide
ucuuuacaucugaugugaa

SEQ ID NO: 1552943 - RNA, 19 nt, Artificial Sequence
  Description of Artificial Sequence: Synthetic oligonucleotide
uagacagagcugaucuauc

SEQ ID NO: 1552944 - RNA, 19 nt, Artificial Sequence
  Description of Artificial Sequence: Synthetic oligonucleotide
caagaugccauuaaagauu

SEQ ID NO: 1552945 - RNA, 19 nt, Artificial Sequence
  Description of Artificial Sequence: Synthetic oligonucleotide
cuaguaucaaaugacauuu

SEQ ID NO: 1552946 - RNA, 19 nt, Artificial Sequence
  Description of Artificial Sequence: Synthetic oligonucleotide
gucgaucagagcaucugag

SEQ ID NO: 1552947 - RNA, 19 nt, Artificial Sequence
  Description of Artificial Sequence: Synthetic oligonucleotide
aggauuauuuggauugagu

SEQ ID NO: 1552948 - RNA, 19 nt, Artificial Sequence
  Description of Artificial Sequence: Synthetic oligonucleotide
accucaguuucauauggua

SEQ ID NO: 1552949 - RNA, 19 nt, Artificial Sequence
  Description of Artificial Sequence: Synthetic oligonucleotide
cuccuggcaccuuuuaauc

SEQ ID NO: 1552950 - RNA, 19 nt, Artificial Sequence
  Description of Artificial Sequence: Synthetic oligonucleotide
aguacuguuuccauuccau

SEQ ID NO: 1552951 - RNA, 19 nt, Artificial Sequence
  Description of Artificial Sequence: Synthetic oligonucleotide
guauucacacaucccuuuc

SEQ ID NO: 1552952 - RNA, 19 nt, Artificial Sequence
  Description of Artificial Sequence: Synthetic oligonucleotide
aaagaggcagagguuuaau

SEQ ID NO: 1552953 - RNA, 19 nt, Artificial Sequence
  Description of Artificial Sequence: Synthetic oligonucleotide
gggacuauagggugaagca

SEQ ID NO: 1552954 - RNA, 19 nt, Artificial Sequence
  Description of Artificial Sequence: Synthetic oligonucleotide
agaugugaucaucacucuu

SEQ ID NO: 1552955 - RNA, 19 nt, Artificial Sequence
  Description of Artificial Sequence: Synthetic oligonucleotide
ucgucgaucagagcaucug

SEQ ID NO: 1552956 - RNA, 19 nt, Artificial Sequence
  Description of Artificial Sequence: Synthetic oligonucleotide
uuccugguauaaugagaug

SEQ ID NO: 1552957 - RNA, 19 nt, Artificial Sequence
  Description of Artificial Sequence: Synthetic oligonucleotide
aucagaccaguuaguacuc

SEQ ID NO: 1552958 - RNA, 19 nt, Artificial Sequence
  Description of Artificial Sequence: Synthetic oligonucleotide
uuaauccagauggcaaaau

SEQ ID NO: 1552959 - RNA, 19 nt, Artificial Sequence
  Description of Artificial Sequence: Synthetic oligonucleotide
cucugggaaaaccgcuggg

SEQ ID NO: 1552960 - RNA, 19 nt, Artificial Sequence
  Description of Artificial Sequence: Synthetic oligonucleotide
gauuccguuugauaccagu

SEQ ID NO: 1552961 - RNA, 19 nt, Artificial Sequence
  Description of Artificial Sequence: Synthetic oligonucleotide
acaaacguacucugugaua

SEQ ID NO: 1552962 - RNA, 19 nt, Artificial Sequence
  Description of Artificial Sequence: Synthetic oligonucleotide
ugggacguugcagauccug

SEQ ID NO: 1552963 - RNA, 19 nt, Artificial Sequence
  Description of Artificial Sequence: Synthetic oligonucleotide
uaacuagacagagcugauc

SEQ ID NO: 1552964 - RNA, 19 nt, Artificial Sequence
  Description of Artificial Sequence: Synthetic oligonucleotide
gaucauaaguguaaugauu

SEQ ID NO: 1552965 - RNA, 19 nt, Artificial Sequence
  Description of Artificial Sequence: Synthetic oligonucleotide
augugaucaucacucuuua

SEQ ID NO: 1552966 - RNA, 19 nt, Artificial Sequence
  Description of Artificial Sequence: Synthetic oligonucleotide
gugauaagaugugaucauc

SEQ ID NO: 1552967 - RNA, 19 nt, Artificial Sequence
  Description of Artificial Sequence: Synthetic oligonucleotide
ccagaagggaguuucacca

SEQ ID NO: 1552968 - RNA, 19 nt, Artificial Sequence
  Description of Artificial Sequence: Synthetic oligonucleotide
aaccgcugggacguugcag

SEQ ID NO: 1552969 - RNA, 19 nt, Artificial Sequence
  Description of Artificial Sequence: Synthetic oligonucleotide
uccucgucgaucagagcau

SEQ ID NO: 1552970 - RNA, 19 nt, Artificial Sequence
  Description of Artificial Sequence: Synthetic oligonucleotide
agguacuaauaaauuauua

SEQ ID NO: 1552971 - RNA, 19 nt, Artificial Sequence
  Description of Artificial Sequence: Synthetic oligonucleotide
cagagguuuaaucuuucaa

SEQ ID NO: 1552972 - RNA, 19 nt, Artificial Sequence
  Description of Artificial Sequence: Synthetic oligonucleotide
gauugaguucaagagacuu

SEQ ID NO: 1552973 - RNA, 19 nt, Artificial Sequence
  Description of Artificial Sequence: Synthetic oligonucleotide
uaccaucaagguguuuccc

SEQ ID NO: 1552974 - RNA, 19 nt, Artificial Sequence
  Description of Artificial Sequence: Synthetic oligonucleotide
uacuugcaggaaaaucauu

SEQ ID NO: 1552975 - RNA, 19 nt, Artificial Sequence
  Description of Artificial Sequence: Synthetic oligonucleotide
gguauaaugagaugaugau

SEQ ID NO: 1552976 - RNA, 19 nt, Artificial Sequence
  Description of Artificial Sequence: Synthetic oligonucleotide
gcguuuucuaccuugguua

SEQ ID NO: 1552977 - RNA, 19 nt, Artificial Sequence
  Description of Artificial Sequence: Synthetic oligonucleotide
cauaaguguaaugauuacu

SEQ ID NO: 1552978 - RNA, 19 nt, Artificial Sequence
  Description of Artificial Sequence: Synthetic oligonucleotide
cugaauauucuugaucaua

SEQ ID NO: 1552979 - RNA, 19 nt, Artificial Sequence
  Description of Artificial Sequence: Synthetic oligonucleotide
gaaaaccgcugggacguug

SEQ ID NO: 1552980 - RNA, 19 nt, Artificial Sequence
  Description of Artificial Sequence: Synthetic oligonucleotide
aaccucaguuucauauggu

SEQ ID NO: 1552981 - RNA, 19 nt, Artificial Sequence
  Description of Artificial Sequence: Synthetic oligonucleotide
guuccugguauaaugagau

SEQ ID NO: 1552982 - RNA, 19 nt, Artificial Sequence
  Description of Artificial Sequence: Synthetic oligonucleotide
aaaccgcugggacguugca

SEQ ID NO: 1552983 - RNA, 19 nt, Artificial Sequence
  Description of Artificial Sequence: Synthetic oligonucleotide
acucaagacuguaccacca

SEQ ID NO: 1552984 - RNA, 19 nt, Artificial Sequence
  Description of Artificial Sequence: Synthetic oligonucleotide
agaauacuugcaggaaaau

SEQ ID NO: 1552985 - RNA, 19 nt, Artificial Sequence
  Description of Artificial Sequence: Synthetic oligonucleotide
ccaccagacuccauaaaug

SEQ ID NO: 1552986 - RNA, 19 nt, Artificial Sequence
  Description of Artificial Sequence: Synthetic oligonucleotide
ucagaccaguuaguacuca

SEQ ID NO: 1552987 - RNA, 19 nt, Artificial Sequence
  Description of Artificial Sequence: Synthetic oligonucleotide
aguacacaaugggcacucg

SEQ ID NO: 1552988 - RNA, 19 nt, Artificial Sequence
  Description of Artificial Sequence: Synthetic oligonucleotide
aguuaguacucaagacugu

SEQ ID NO: 1552989 - RNA, 19 nt, Artificial Sequence
  Description of Artificial Sequence: Synthetic oligonucleotide
acuagacagagcugaucua

SEQ ID NO: 1552990 - RNA, 19 nt, Artificial Sequence
  Description of Artificial Sequence: Synthetic oligonucleotide
agccuuagucagcuccucu

SEQ ID NO: 1552991 - RNA, 19 nt, Artificial Sequence
  Description of Artificial Sequence: Synthetic oligonucleotide
gaugauggauacagguucu

SEQ ID NO: 1552992 - RNA, 19 nt, Artificial Sequence
  Description of Artificial Sequence: Synthetic oligonucleotide
gugucuaaagcagaagcgu

SEQ ID NO: 1552993 - RNA, 19 nt, Artificial Sequence
  Description of Artificial Sequence: Synthetic oligonucleotide
ugugcauccuuuggauuau

SEQ ID NO: 1552994 - RNA, 19 nt, Artificial Sequence
  Description of Artificial Sequence: Synthetic oligonucleotide
aucucacagccucuggcuu

SEQ ID NO: 1552995 - RNA, 19 nt, Artificial Sequence
  Description of Artificial Sequence: Synthetic oligonucleotide
aucuuuguugaaaguacuu

SEQ ID NO: 1552996 - RNA, 19 nt, Artificial Sequence
  Description of Artificial Sequence: Synthetic oligonucleotide
guaggauuauuuggauuga

SEQ ID NO: 1552997 - RNA, 19 nt, Artificial Sequence
  Description of Artificial Sequence: Synthetic oligonucleotide
acuaaagcuucggcccgag

SEQ ID NO: 1552998 - RNA, 19 nt, Artificial Sequence
  Description of Artificial Sequence: Synthetic oligonucleotide
gugccgccaucccuaagag

SEQ ID NO: 1552999 - RNA, 19 nt, Artificial Sequence
  Description of Artificial Sequence: Synthetic oligonucleotide
gauuuguucauggcacgcu

SEQ ID NO: 1553000 - RNA, 19 nt, Artificial Sequence
  Description of Artificial Sequence: Synthetic oligonucleotide
ggcccgagcguuuucuacc

SEQ ID NO: 1553001 - RNA, 19 nt, Artificial Sequence
  Description of Artificial Sequence: Synthetic oligonucleotide
ggauacagguucuuuacau

SEQ ID NO: 1553002 - RNA, 19 nt, Artificial Sequence
  Description of Artificial Sequence: Synthetic oligonucleotide
auaacuagacagagcugau

SEQ ID NO: 1553003 - RNA, 19 nt, Artificial Sequence
  Description of Artificial Sequence: Synthetic oligonucleotide
ugccgccaucccuaagagc

SEQ ID NO: 1553004 - RNA, 19 nt, Artificial Sequence
  Description of Artificial Sequence: Synthetic oligonucleotide
ggacaauuaccaagaugcc

SEQ ID NO: 1553005 - RNA, 19 nt, Artificial Sequence
  Description of Artificial Sequence: Synthetic oligonucleotide
gaagcaaccucaguuucau

SEQ ID NO: 1553006 - RNA, 19 nt, Artificial Sequence
  Description of Artificial Sequence: Synthetic oligonucleotide
uucggcccgagcguuuucu

SEQ ID NO: 1553007 - RNA, 19 nt, Artificial Sequence
  Description of Artificial Sequence: Synthetic oligonucleotide
ccaguuaguacucaagacu

SEQ ID NO: 1553008 - RNA, 19 nt, Artificial Sequence
  Description of Artificial Sequence: Synthetic oligonucleotide
cagacuccauaaaugauuu

SEQ ID NO: 1553009 - RNA, 19 nt, Artificial Sequence
  Description of Artificial Sequence: Synthetic oligonucleotide
gcugaucuaucuaguauca

SEQ ID NO: 1553010 - RNA, 19 nt, Artificial Sequence
  Description of Artificial Sequence: Synthetic oligonucleotide
acucgugaacaaacguacu

SEQ ID NO: 1553011 - RNA, 19 nt, Artificial Sequence
  Description of Artificial Sequence: Synthetic oligonucleotide
cuagacagagcugaucuau

SEQ ID NO: 1553012 - RNA, 19 nt, Artificial Sequence
  Description of Artificial Sequence: Synthetic oligonucleotide
guuugauaccagucauacu

SEQ ID NO: 1553013 - RNA, 19 nt, Artificial Sequence
  Description of Artificial Sequence: Synthetic oligonucleotide
cacaucccuuuccucagga

SEQ ID NO: 1553014 - RNA, 19 nt, Artificial Sequence
  Description of Artificial Sequence: Synthetic oligonucleotide
guacacaaugggcacucgu

SEQ ID NO: 1553015 - RNA, 19 nt, Artificial Sequence
  Description of Artificial Sequence: Synthetic oligonucleotide
ggguccucgucgaucagag

SEQ ID NO: 1553016 - RNA, 19 nt, Artificial Sequence
  Description of Artificial Sequence: Synthetic oligonucleotide
ccauaacuagacagagcug

SEQ ID NO: 1553017 - RNA, 19 nt, Artificial Sequence
  Description of Artificial Sequence: Synthetic oligonucleotide
ccuuuuaauccagauggca

SEQ ID NO: 1553018 - RNA, 19 nt, Artificial Sequence
  Description of Artificial Sequence: Synthetic oligonucleotide
cgagcguuuucuaccuugg

SEQ ID NO: 1553019 - RNA, 19 nt, Artificial Sequence
  Description of Artificial Sequence: Synthetic oligonucleotide
ccgagcguuuucuaccuug

SEQ ID NO: 1553020 - RNA, 19 nt, Artificial Sequence
  Description of Artificial Sequence: Synthetic oligonucleotide
ccucaguuucauaugguaa

SEQ ID NO: 1553021 - RNA, 19 nt, Artificial Sequence
  Description of Artificial Sequence: Synthetic oligonucleotide
cagguacuaauaaauuauu

SEQ ID NO: 1553022 - RNA, 19 nt, Artificial Sequence
  Description of Artificial Sequence: Synthetic oligonucleotide
gggacguugcagauccugc

SEQ ID NO: 1553023 - RNA, 19 nt, Artificial Sequence
  Description of Artificial Sequence: Synthetic oligonucleotide
gucuccuggcaccuuuuaa

SEQ ID NO: 1553024 - RNA, 19 nt, Artificial Sequence
  Description of Artificial Sequence: Synthetic oligonucleotide
gggcacucgugaacaaacg

SEQ ID NO: 1553025 - RNA, 19 nt, Artificial Sequence
  Description of Artificial Sequence: Synthetic oligonucleotide
aggaugugugaaauccuua

SEQ ID NO: 1553026 - RNA, 19 nt, Artificial Sequence
  Description of Artificial Sequence: Synthetic oligonucleotide
auaagcucucugacaguaa

SEQ ID NO: 1553027 - RNA, 19 nt, Artificial Sequence
  Description of Artificial Sequence: Synthetic oligonucleotide
caggcugagucuccuggca

SEQ ID NO: 1553028 - RNA, 19 nt, Artificial Sequence
  Description of Artificial Sequence: Synthetic oligonucleotide
cagaagggaguuucaccaa

SEQ ID NO: 1553029 - RNA, 19 nt, Artificial Sequence
  Description of Artificial Sequence: Synthetic oligonucleotide
gauaccagucauacuugau

SEQ ID NO: 1553030 - RNA, 19 nt, Artificial Sequence
  Description of Artificial Sequence: Synthetic oligonucleotide
agaugccauuaaagauuuc

SEQ ID NO: 1553031 - RNA, 19 nt, Artificial Sequence
  Description of Artificial Sequence: Synthetic oligonucleotide
ggacuauagggugaagcaa

SEQ ID NO: 1553032 - RNA, 19 nt, Artificial Sequence
  Description of Artificial Sequence: Synthetic oligonucleotide
cuacaucagaccaguuagu

SEQ ID NO: 1553033 - RNA, 19 nt, Artificial Sequence
  Description of Artificial Sequence: Synthetic oligonucleotide
augggcacucgugaacaaa

SEQ ID NO: 1553034 - RNA, 19 nt, Artificial Sequence
  Description of Artificial Sequence: Synthetic oligonucleotide
aagcuucggcccgagcguu

SEQ ID NO: 1553035 - RNA, 19 nt, Artificial Sequence
  Description of Artificial Sequence: Synthetic oligonucleotide
acgcuucacuucaucagaa

SEQ ID NO: 1553036 - RNA, 19 nt, Artificial Sequence
  Description of Artificial Sequence: Synthetic oligonucleotide
cagagcugaucuaucuagu

SEQ ID NO: 1553037 - RNA, 19 nt, Artificial Sequence
  Description of Artificial Sequence: Synthetic oligonucleotide
ccucuaacgccgccugggg

SEQ ID NO: 1553038 - RNA, 19 nt, Artificial Sequence
  Description of Artificial Sequence: Synthetic oligonucleotide
uaccuacaucagaccaguu

SEQ ID NO: 1553039 - RNA, 19 nt, Artificial Sequence
  Description of Artificial Sequence: Synthetic oligonucleotide
ucccaguuccugguauaau

SEQ ID NO: 1553040 - RNA, 19 nt, Artificial Sequence
  Description of Artificial Sequence: Synthetic oligonucleotide
caggaugugugaaauccuu

SEQ ID NO: 1553041 - RNA, 19 nt, Artificial Sequence
  Description of Artificial Sequence: Synthetic oligonucleotide
ggcacucgugaacaaacgu

SEQ ID NO: 1553042 - RNA, 19 nt, Artificial Sequence
  Description of Artificial Sequence: Synthetic oligonucleotide
caguaggauuauuuggauu

SEQ ID NO: 1553043 - RNA, 19 nt, Artificial Sequence
  Description of Artificial Sequence: Synthetic oligonucleotide
gcacucgugaacaaacgua

SEQ ID NO: 1553044 - RNA, 19 nt, Artificial Sequence
  Description of Artificial Sequence: Synthetic oligonucleotide
caucccuaagagccacuaa

SEQ ID NO: 1553045 - RNA, 19 nt, Artificial Sequence
  Description of Artificial Sequence: Synthetic oligonucleotide
gagcguuuucuaccuuggu

SEQ ID NO: 1553046 - RNA, 19 nt, Artificial Sequence
  Description of Artificial Sequence: Synthetic oligonucleotide
acguacucugugauaccaa

SEQ ID NO: 1553047 - RNA, 19 nt, Artificial Sequence
  Description of Artificial Sequence: Synthetic oligonucleotide
ccaucaagguguuucccaa

SEQ ID NO: 1553048 - RNA, 19 nt, Artificial Sequence
  Description of Artificial Sequence: Synthetic oligonucleotide
cugaucuaucuaguaucaa

SEQ ID NO: 1553049 - RNA, 19 nt, Artificial Sequence
  Description of Artificial Sequence: Synthetic oligonucleotide
ccagacuccauaaaugauu

SEQ ID NO: 1553050 - RNA, 19 nt, Artificial Sequence
  Description of Artificial Sequence: Synthetic oligonucleotide
guuuuggugugggcucauc

SEQ ID NO: 1553051 - RNA, 19 nt, Artificial Sequence
  Description of Artificial Sequence: Synthetic oligonucleotide
aggugccgccaucccuaag

SEQ ID NO: 1553052 - RNA, 19 nt, Artificial Sequence
  Description of Artificial Sequence: Synthetic oligonucleotide
ugcucuguucagggacuau

SEQ ID NO: 1553053 - RNA, 19 nt, Artificial Sequence
  Description of Artificial Sequence: Synthetic oligonucleotide
ccuuaugaacagaagugau

SEQ ID NO: 1553054 - RNA, 19 nt, Artificial Sequence
  Description of Artificial Sequence: Synthetic oligonucleotide
ucggcccgagcguuuucua

SEQ ID NO: 1553055 - RNA, 19 nt, Artificial Sequence
  Description of Artificial Sequence: Synthetic oligonucleotide
ggacguugcagauccugcu

SEQ ID NO: 1553056 - RNA, 19 nt, Artificial Sequence
  Description of Artificial Sequence: Synthetic oligonucleotide
cuauagggugaagcaaccu

SEQ ID NO: 1553057 - RNA, 19 nt, Artificial Sequence
  Description of Artificial Sequence: Synthetic oligonucleotide
cugcugaaauaacuuguuu

SEQ ID NO: 1553058 - RNA, 19 nt, Artificial Sequence
  Description of Artificial Sequence: Synthetic oligonucleotide
gcaguaggauuauuuggau

SEQ ID NO: 1553059 - RNA, 19 nt, Artificial Sequence
  Description of Artificial Sequence: Synthetic oligonucleotide
cucugagaugcagacacuu

SEQ ID NO: 1553060 - RNA, 19 nt, Artificial Sequence
  Description of Artificial Sequence: Synthetic oligonucleotide
ccuuagucagcuccucuaa

SEQ ID NO: 1553061 - RNA, 19 nt, Artificial Sequence
  Description of Artificial Sequence: Synthetic oligonucleotide
gguccucgucgaucagagc

SEQ ID NO: 1553062 - RNA, 19 nt, Artificial Sequence
  Description of Artificial Sequence: Synthetic oligonucleotide
caauuaccaagaugccauu

SEQ ID NO: 1553063 - RNA, 19 nt, Artificial Sequence
  Description of Artificial Sequence: Synthetic oligonucleotide
cucgucgaucagagcaucu

SEQ ID NO: 1553064 - RNA, 19 nt, Artificial Sequence
  Description of Artificial Sequence: Synthetic oligonucleotide
cagggacuauagggugaag

SEQ ID NO: 1553065 - RNA, 19 nt, Artificial Sequence
  Description of Artificial Sequence: Synthetic oligonucleotide
acgcugcaucacccuccag

SEQ ID NO: 1553066 - RNA, 19 nt, Artificial Sequence
  Description of Artificial Sequence: Synthetic oligonucleotide
cuucggcccgagcguuuuc

SEQ ID NO: 1553067 - RNA, 19 nt, Artificial Sequence
  Description of Artificial Sequence: Synthetic oligonucleotide
cuccuugacccucuagcuu

SEQ ID NO: 1553068 - RNA, 19 nt, Artificial Sequence
  Description of Artificial Sequence: Synthetic oligonucleotide
cgucgaucagagcaucuga

SEQ ID NO: 1553069 - RNA, 19 nt, Artificial Sequence
  Description of Artificial Sequence: Synthetic oligonucleotide
gggguccucgucgaucaga

SEQ ID NO: 1553070 - RNA, 19 nt, Artificial Sequence
  Description of Artificial Sequence: Synthetic oligonucleotide
ggauugaguucaagagacu

SEQ ID NO: 1553071 - RNA, 19 nt, Artificial Sequence
  Description of Artificial Sequence: Synthetic oligonucleotide
ccguuugauaccagucaua

SEQ ID NO: 1553072 - RNA, 19 nt, Artificial Sequence
  Description of Artificial Sequence: Synthetic oligonucleotide
gugcucuguucagggacua

SEQ ID NO: 1553073 - RNA, 19 nt, Artificial Sequence
  Description of Artificial Sequence: Synthetic oligonucleotide
ccucgucgaucagagcauc

SEQ ID NO: 1553074 - RNA, 19 nt, Artificial Sequence
  Description of Artificial Sequence: Synthetic oligonucleotide
gcccgagcguuuucuaccu

SEQ ID NO: 1553075 - RNA, 19 nt, Artificial Sequence
  Description of Artificial Sequence: Synthetic oligonucleotide
ccaaccaguuuaucccagu

SEQ ID NO: 1553076 - RNA, 19 nt, Artificial Sequence
  Description of Artificial Sequence: Synthetic oligonucleotide
cgccaucccuaagagccac

SEQ ID NO: 1553077 - RNA, 19 nt, Artificial Sequence
  Description of Artificial Sequence: Synthetic oligonucleotide
ggauagcaguaggauuauu

SEQ ID NO: 1553078 - RNA, 19 nt, Artificial Sequence
  Description of Artificial Sequence: Synthetic oligonucleotide
cugggacguugcagauccu

SEQ ID NO: 1553079 - RNA, 19 nt, Artificial Sequence
  Description of Artificial Sequence: Synthetic oligonucleotide
cgcugggacguugcagauc

SEQ ID NO: 1553080 - RNA, 19 nt, Artificial Sequence
  Description of Artificial Sequence: Synthetic oligonucleotide
ccauaucaucaggaggguu

SEQ ID NO: 1553081 - RNA, 19 nt, Artificial Sequence
  Description of Artificial Sequence: Synthetic oligonucleotide
gcuucggcccgagcguuuu

SEQ ID NO: 1553082 - RNA, 19 nt, Artificial Sequence
  Description of Artificial Sequence: Synthetic oligonucleotide
cugagucuccuggcaccuu

SEQ ID NO: 1553083 - RNA, 19 nt, Artificial Sequence
  Description of Artificial Sequence: Synthetic oligonucleotide
ggaaaaccgcugggacguu

SEQ ID NO: 1553084 - RNA, 19 nt, Artificial Sequence
  Description of Artificial Sequence: Synthetic oligonucleotide
cccgagcguuuucuaccuu

SEQ ID NO: 1553085 - RNA, 19 nt, Artificial Sequence
  Description of Artificial Sequence: Synthetic oligonucleotide
acuaguagaaaauuggggc

SEQ ID NO: 1553086 - RNA, 19 nt, Artificial Sequence
  Description of Artificial Sequence: Synthetic oligonucleotide
uagacuaguagaaaauugg

SEQ ID NO: 1553087 - RNA, 19 nt, Artificial Sequence
  Description of Artificial Sequence: Synthetic oligonucleotide
agaaaauuggggcaccugc

SEQ ID NO: 1553088 - RNA, 19 nt, Artificial Sequence
  Description of Artificial Sequence: Synthetic oligonucleotide
agaaccugaacaugcaugc

SEQ ID NO: 1553089 - RNA, 19 nt, Artificial Sequence
  Description of Artificial Sequence: Synthetic oligonucleotide
ugaacaugcaugcacaggc

SEQ ID NO: 1553090 - RNA, 19 nt, Artificial Sequence
  Description of Artificial Sequence: Synthetic oligonucleotide
uuguacaagaguuucauga

SEQ ID NO: 1553091 - RNA, 19 nt, Artificial Sequence
  Description of Artificial Sequence: Synthetic oligonucleotide
uucuaaacuccccagggcg

SEQ ID NO: 1553092 - RNA, 19 nt, Artificial Sequence
  Description of Artificial Sequence: Synthetic oligonucleotide
aaaucaugaagugugacug

SEQ ID NO: 1553093 - RNA, 19 nt, Artificial Sequence
  Description of Artificial Sequence: Synthetic oligonucleotide
aaaguugugcucauaaagg

SEQ ID NO: 1553094 - RNA, 19 nt, Artificial Sequence
  Description of Artificial Sequence: Synthetic oligonucleotide
ugauucugaagcaagugag

SEQ ID NO: 1553095 - RNA, 19 nt, Artificial Sequence
  Description of Artificial Sequence: Synthetic oligonucleotide
cauaaaaggaccuggcggg

SEQ ID NO: 1553096 - RNA, 19 nt, Artificial Sequence
  Description of Artificial Sequence: Synthetic oligonucleotide
ugauccacagagcaggagg

SEQ ID NO: 1553097 - RNA, 19 nt, Artificial Sequence
  Description of Artificial Sequence: Synthetic oligonucleotide
uggguagucacauaugucc

SEQ ID NO: 1553098 - RNA, 19 nt, Artificial Sequence
  Description of Artificial Sequence: Synthetic oligonucleotide
aaucaugaagugugacugc

SEQ ID NO: 1553099 - RNA, 19 nt, Artificial Sequence
  Description of Artificial Sequence: Synthetic oligonucleotide
ucuacagaucucaacagug

SEQ ID NO: 1553100 - RNA, 19 nt, Artificial Sequence
  Description of Artificial Sequence: Synthetic oligonucleotide
uacaagaguuucaugauac

SEQ ID NO: 1553101 - RNA, 19 nt, Artificial Sequence
  Description of Artificial Sequence: Synthetic oligonucleotide
caugauacaguuucugggg

SEQ ID NO: 1553102 - RNA, 19 nt, Artificial Sequence
  Description of Artificial Sequence: Synthetic oligonucleotide
ugcucagcaauaaacagga

SEQ ID NO: 1553103 - RNA, 19 nt, Artificial Sequence
  Description of Artificial Sequence: Synthetic oligonucleotide
ugcauaaaaggaccuggcg

SEQ ID NO: 1553104 - RNA, 19 nt, Artificial Sequence
  Description of Artificial Sequence: Synthetic oligonucleotide
acaacaaucgugugagaac

SEQ ID NO: 1553105 - RNA, 19 nt, Artificial Sequence
  Description of Artificial Sequence: Synthetic oligonucleotide
guuucuaaacuccccaggg

SEQ ID NO: 1553106 - RNA, 19 nt, Artificial Sequence
  Description of Artificial Sequence: Synthetic oligonucleotide
uuuggacugaggaagccag

SEQ ID NO: 1553107 - RNA, 19 nt, Artificial Sequence
  Description of Artificial Sequence: Synthetic oligonucleotide
agaagugcuacugagacca

SEQ ID NO: 1553108 - RNA, 19 nt, Artificial Sequence
  Description of Artificial Sequence: Synthetic oligonucleotide
gagaacagaaaguugagaa

SEQ ID NO: 1553109 - RNA, 19 nt, Artificial Sequence
  Description of Artificial Sequence: Synthetic oligonucleotide
ugagauuccagaucaaguc

SEQ ID NO: 1553110 - RNA, 19 nt, Artificial Sequence
  Description of Artificial Sequence: Synthetic oligonucleotide
agguccugagguuugauuc

SEQ ID NO: 1553111 - RNA, 19 nt, Artificial Sequence
  Description of Artificial Sequence: Synthetic oligonucleotide
gacuaguagaaaauugggg

SEQ ID NO: 1553112 - RNA, 19 nt, Artificial Sequence
  Description of Artificial Sequence: Synthetic oligonucleotide
ucgaaguccaaguguaagg

SEQ ID NO: 1553113 - RNA, 19 nt, Artificial Sequence
  Description of Artificial Sequence: Synthetic oligonucleotide
augaagugugacugcagcc

SEQ ID NO: 1553114 - RNA, 19 nt, Artificial Sequence
  Description of Artificial Sequence: Synthetic oligonucleotide
uaaccagcugccaagaaaa

SEQ ID NO: 1553115 - RNA, 19 nt, Artificial Sequence
  Description of Artificial Sequence: Synthetic oligonucleotide
aaaacaauuggcagggcug

SEQ ID NO: 1553116 - RNA, 19 nt, Artificial Sequence
  Description of Artificial Sequence: Synthetic oligonucleotide
aaaaggaccuggcggggac

SEQ ID NO: 1553117 - RNA, 19 nt, Artificial Sequence
  Description of Artificial Sequence: Synthetic oligonucleotide
ucacauauguccaggcugc

SEQ ID NO: 1553118 - RNA, 19 nt, Artificial Sequence
  Description of Artificial Sequence: Synthetic oligonucleotide
gacaacccaaaucaugaag

SEQ ID NO: 1553119 - RNA, 19 nt, Artificial Sequence
  Description of Artificial Sequence: Synthetic oligonucleotide
cagaucaaguccaaggcag

SEQ ID NO: 1553120 - RNA, 19 nt, Artificial Sequence
  Description of Artificial Sequence: Synthetic oligonucleotide
caggaaguugcaauggagg

SEQ ID NO: 1553121 - RNA, 19 nt, Artificial Sequence
  Description of Artificial Sequence: Synthetic oligonucleotide
gagauuccagaucaagucc

SEQ ID NO: 1553122 - RNA, 19 nt, Artificial Sequence
  Description of Artificial Sequence: Synthetic oligonucleotide
acacaaacaccuuuggacu

SEQ ID NO: 1553123 - RNA, 19 nt, Artificial Sequence
  Description of Artificial Sequence: Synthetic oligonucleotide
guugugcucauaaagguag

SEQ ID NO: 1553124 - RNA, 19 nt, Artificial Sequence
  Description of Artificial Sequence: Synthetic oligonucleotide
cugccaagaaaacaauugg

SEQ ID NO: 1553125 - RNA, 19 nt, Artificial Sequence
  Description of Artificial Sequence: Synthetic oligonucleotide
agcacaacaaucgugugag

SEQ ID NO: 1553126 - RNA, 19 nt, Artificial Sequence
  Description of Artificial Sequence: Synthetic oligonucleotide
cacaagcugauccacagag

SEQ ID NO: 1553127 - RNA, 19 nt, Artificial Sequence
  Description of Artificial Sequence: Synthetic oligonucleotide
ucuagacagaccacccagg

SEQ ID NO: 1553128 - RNA, 19 nt, Artificial Sequence
  Description of Artificial Sequence: Synthetic oligonucleotide
accuugagauuccagauca

SEQ ID NO: 1553129 - RNA, 19 nt, Artificial Sequence
  Description of Artificial Sequence: Synthetic oligonucleotide
gaagaaggcaaaguugugc

SEQ ID NO: 1553130 - RNA, 19 nt, Artificial Sequence
  Description of Artificial Sequence: Synthetic oligonucleotide
gcauaaaaggaccuggcgg

SEQ ID NO: 1553131 - RNA, 19 nt, Artificial Sequence
  Description of Artificial Sequence: Synthetic oligonucleotide
aagaaugcaucuugugacu

SEQ ID NO: 1553132 - RNA, 19 nt, Artificial Sequence
  Description of Artificial Sequence: Synthetic oligonucleotide
uuucuaaacuccccagggc

SEQ ID NO: 1553133 - RNA, 19 nt, Artificial Sequence
  Description of Artificial Sequence: Synthetic oligonucleotide
ccaaguguaaggcagagcc

SEQ ID NO: 1553134 - RNA, 19 nt, Artificial Sequence
  Description of Artificial Sequence: Synthetic oligonucleotide
ugcagcguggaccagguac

SEQ ID NO: 1553135 - RNA, 19 nt, Artificial Sequence
  Description of Artificial Sequence: Synthetic oligonucleotide
acaccagacaacccaaauc

SEQ ID NO: 1553136 - RNA, 19 nt, Artificial Sequence
  Description of Artificial Sequence: Synthetic oligonucleotide
acagagaacagaaaguuga

SEQ ID NO: 1553137 - RNA, 19 nt, Artificial Sequence
  Description of Artificial Sequence: Synthetic oligonucleotide
aucuagacagaccacccag

SEQ ID NO: 1553138 - RNA, 19 nt, Artificial Sequence
  Description of Artificial Sequence: Synthetic oligonucleotide
aagaguuucaugauacagu

SEQ ID NO: 1553139 - RNA, 19 nt, Artificial Sequence
  Description of Artificial Sequence: Synthetic oligonucleotide
ucugcaucccaucuagaca

SEQ ID NO: 1553140 - RNA, 19 nt, Artificial Sequence
  Description of Artificial Sequence: Synthetic oligonucleotide
ugucuacagaucucaacag

SEQ ID NO: 1553141 - RNA, 19 nt, Artificial Sequence
  Description of Artificial Sequence: Synthetic oligonucleotide
gacugaggaagccagggug

SEQ ID NO: 1553142 - RNA, 19 nt, Artificial Sequence
  Description of Artificial Sequence: Synthetic oligonucleotide
caacaaucgugugagaacc

SEQ ID NO: 1553143 - RNA, 19 nt, Artificial Sequence
  Description of Artificial Sequence: Synthetic oligonucleotide
gaaugcaucuugugacugg

SEQ ID NO: 1553144 - RNA, 19 nt, Artificial Sequence
  Description of Artificial Sequence: Synthetic oligonucleotide
uucuucgaaguccaagugu

SEQ ID NO: 1553145 - RNA, 19 nt, Artificial Sequence
  Description of Artificial Sequence: Synthetic oligonucleotide
uggugaucugggaugauga

SEQ ID NO: 1553146 - RNA, 19 nt, Artificial Sequence
  Description of Artificial Sequence: Synthetic oligonucleotide
gaggaguagucccaggagc

SEQ ID NO: 1553147 - RNA, 19 nt, Artificial Sequence
  Description of Artificial Sequence: Synthetic oligonucleotide
ugccugaguucauaguacg

SEQ ID NO: 1553148 - RNA, 19 nt, Artificial Sequence
  Description of Artificial Sequence: Synthetic oligonucleotide
cugaguucauaguacggcc

SEQ ID NO: 1553149 - RNA, 19 nt, Artificial Sequence
  Description of Artificial Sequence: Synthetic oligonucleotide
aaagguagccgugcucagc

SEQ ID NO: 1553150 - RNA, 19 nt, Artificial Sequence
  Description of Artificial Sequence: Synthetic oligonucleotide
gugucuacagaucucaaca

SEQ ID NO: 1553151 - RNA, 19 nt, Artificial Sequence
  Description of Artificial Sequence: Synthetic oligonucleotide
aaauuggggcaccugccug

SEQ ID NO: 1553152 - RNA, 19 nt, Artificial Sequence
  Description of Artificial Sequence: Synthetic oligonucleotide
agacuaguagaaaauuggg

SEQ ID NO: 1553153 - RNA, 19 nt, Artificial Sequence
  Description of Artificial Sequence: Synthetic oligonucleotide
ucagguuucuaaacucccc

SEQ ID NO: 1553154 - RNA, 19 nt, Artificial Sequence
  Description of Artificial Sequence: Synthetic oligonucleotide
ucuaaacuccccagggcgc

SEQ ID NO: 1553155 - RNA, 19 nt, Artificial Sequence
  Description of Artificial Sequence: Synthetic oligonucleotide
ucuagggucuucuuacugu

SEQ ID NO: 1553156 - RNA, 19 nt, Artificial Sequence
  Description of Artificial Sequence: Synthetic oligonucleotide
caggacuucgucccgaggg

SEQ ID NO: 1553157 - RNA, 19 nt, Artificial Sequence
  Description of Artificial Sequence: Synthetic oligonucleotide
gagaccaguaggcaacugc

SEQ ID NO: 1553158 - RNA, 19 nt, Artificial Sequence
  Description of Artificial Sequence: Synthetic oligonucleotide
uguacaagaguuucaugau

SEQ ID NO: 1553159 - RNA, 19 nt, Artificial Sequence
  Description of Artificial Sequence: Synthetic oligonucleotide
ugaagugugacugcagcca

SEQ ID NO: 1553160 - RNA, 19 nt, Artificial Sequence
  Description of Artificial Sequence: Synthetic oligonucleotide
uucaccaccaggucugagc

SEQ ID NO: 1553161 - RNA, 19 nt, Artificial Sequence
  Description of Artificial Sequence: Synthetic oligonucleotide
aguagaaaauuggggcacc

SEQ ID NO: 1553162 - RNA, 19 nt, Artificial Sequence
  Description of Artificial Sequence: Synthetic oligonucleotide
acugagaccaguaggcaac

SEQ ID NO: 1553163 - RNA, 19 nt, Artificial Sequence
  Description of Artificial Sequence: Synthetic oligonucleotide
cuaguagaaaauuggggca

SEQ ID NO: 1553164 - RNA, 19 nt, Artificial Sequence
  Description of Artificial Sequence: Synthetic oligonucleotide
caacagugguucuugauuc

SEQ ID NO: 1553165 - RNA, 19 nt, Artificial Sequence
  Description of Artificial Sequence: Synthetic oligonucleotide
caauuggcagggcugaggc

SEQ ID NO: 1553166 - RNA, 19 nt, Artificial Sequence
  Description of Artificial Sequence: Synthetic oligonucleotide
uucugcaucccaucuagac

SEQ ID NO: 1553167 - RNA, 19 nt, Artificial Sequence
  Description of Artificial Sequence: Synthetic oligonucleotide
auuggcagggcugaggcag

SEQ ID NO: 1553168 - RNA, 19 nt, Artificial Sequence
  Description of Artificial Sequence: Synthetic oligonucleotide
aacugcgcuggcucaagag

SEQ ID NO: 1553169 - RNA, 19 nt, Artificial Sequence
  Description of Artificial Sequence: Synthetic oligonucleotide
aauuggggcaccugccuga

SEQ ID NO: 1553170 - RNA, 19 nt, Artificial Sequence
  Description of Artificial Sequence: Synthetic oligonucleotide
aguucccaucagcagggcc

SEQ ID NO: 1553171 - RNA, 19 nt, Artificial Sequence
  Description of Artificial Sequence: Synthetic oligonucleotide
caggaaguguucugcaucc

SEQ ID NO: 1553172 - RNA, 19 nt, Artificial Sequence
  Description of Artificial Sequence: Synthetic oligonucleotide
uucgaaguccaaguguaag

SEQ ID NO: 1553173 - RNA, 19 nt, Artificial Sequence
  Description of Artificial Sequence: Synthetic oligonucleotide
caauaaacaggaaguguuc

SEQ ID NO: 1553174 - RNA, 19 nt, Artificial Sequence
  Description of Artificial Sequence: Synthetic oligonucleotide
agugccuguagcauuagag

SEQ ID NO: 1553175 - RNA, 19 nt, Artificial Sequence
  Description of Artificial Sequence: Synthetic oligonucleotide
aggaaguugcaauggagga

SEQ ID NO: 1553176 - RNA, 19 nt, Artificial Sequence
  Description of Artificial Sequence: Synthetic oligonucleotide
ugccuguagcauuagaguc

SEQ ID NO: 1553177 - RNA, 19 nt, Artificial Sequence
  Description of Artificial Sequence: Synthetic oligonucleotide
aggaguagucccaggagcc

SEQ ID NO: 1553178 - RNA, 19 nt, Artificial Sequence
  Description of Artificial Sequence: Synthetic oligonucleotide
ugugucuacagaucucaac

SEQ ID NO: 1553179 - RNA, 19 nt, Artificial Sequence
  Description of Artificial Sequence: Synthetic oligonucleotide
gaggccgcaaggaagaggc

SEQ ID NO: 1553180 - RNA, 19 nt, Artificial Sequence
  Description of Artificial Sequence: Synthetic oligonucleotide
gagaaccugaacaugcaug

SEQ ID NO: 1553181 - RNA, 19 nt, Artificial Sequence
  Description of Artificial Sequence: Synthetic oligonucleotide
gaagugugacugcagccag

SEQ ID NO: 1553182 - RNA, 19 nt, Artificial Sequence
  Description of Artificial Sequence: Synthetic oligonucleotide
aguacagccacugguguag

SEQ ID NO: 1553183 - RNA, 19 nt, Artificial Sequence
  Description of Artificial Sequence: Synthetic oligonucleotide
aaacaauuggcagggcuga

SEQ ID NO: 1553184 - RNA, 19 nt, Artificial Sequence
  Description of Artificial Sequence: Synthetic oligonucleotide
aguggaagagcacaacaau

SEQ ID NO: 1553185 - RNA, 19 nt, Artificial Sequence
  Description of Artificial Sequence: Synthetic oligonucleotide
cuugagauuccagaucaag

SEQ ID NO: 1553186 - RNA, 19 nt, Artificial Sequence
  Description of Artificial Sequence: Synthetic oligonucleotide
ugcguggugaucugggaug

SEQ ID NO: 1553187 - RNA, 19 nt, Artificial Sequence
  Description of Artificial Sequence: Synthetic oligonucleotide
agaccaguaggcaacugcg

SEQ ID NO: 1553188 - RNA, 19 nt, Artificial Sequence
  Description of Artificial Sequence: Synthetic oligonucleotide
ugcccacacaaccaguaca

SEQ ID NO: 1553189 - RNA, 19 nt, Artificial Sequence
  Description of Artificial Sequence: Synthetic oligonucleotide
gaaaacaauuggcagggcu

SEQ ID NO: 1553190 - RNA, 19 nt, Artificial Sequence
  Description of Artificial Sequence: Synthetic oligonucleotide
gguuucuaaacuccccagg

SEQ ID NO: 1553191 - RNA, 19 nt, Artificial Sequence
  Description of Artificial Sequence: Synthetic oligonucleotide
caccuuuggacugaggaag

SEQ ID NO: 1553192 - RNA, 19 nt, Artificial Sequence
  Description of Artificial Sequence: Synthetic oligonucleotide
uaguagaaaauuggggcac

SEQ ID NO: 1553193 - RNA, 19 nt, Artificial Sequence
  Description of Artificial Sequence: Synthetic oligonucleotide
guagucacauauguccagg

SEQ ID NO: 1553194 - RNA, 19 nt, Artificial Sequence
  Description of Artificial Sequence: Synthetic oligonucleotide
uguagacuaguagaaaauu

SEQ ID NO: 1553195 - RNA, 19 nt, Artificial Sequence
  Description of Artificial Sequence: Synthetic oligonucleotide
gaugcggcagcucacugca

SEQ ID NO: 1553196 - RNA, 19 nt, Artificial Sequence
  Description of Artificial Sequence: Synthetic oligonucleotide
agguuucuaaacuccccag

SEQ ID NO: 1553197 - RNA, 19 nt, Artificial Sequence
  Description of Artificial Sequence: Synthetic oligonucleotide
cugcauaaaaggaccuggc

SEQ ID NO: 1553198 - RNA, 19 nt, Artificial Sequence
  Description of Artificial Sequence: Synthetic oligonucleotide
augucaggaaggcaaacaa

SEQ ID NO: 1553199 - RNA, 19 nt, Artificial Sequence
  Description of Artificial Sequence: Synthetic oligonucleotide
aacaugcaugcacaggcuu

SEQ ID NO: 1553200 - RNA, 19 nt, Artificial Sequence
  Description of Artificial Sequence: Synthetic oligonucleotide
aguucaguucccaucagca

SEQ ID NO: 1553201 - RNA, 19 nt, Artificial Sequence
  Description of Artificial Sequence: Synthetic oligonucleotide
cagaucucaacagugguuc

SEQ ID NO: 1553202 - RNA, 19 nt, Artificial Sequence
  Description of Artificial Sequence: Synthetic oligonucleotide
cucauaaagguagccgugc

SEQ ID NO: 1553203 - RNA, 19 nt, Artificial Sequence
  Description of Artificial Sequence: Synthetic oligonucleotide
accaccaggucugagcuuc

SEQ ID NO: 1553204 - RNA, 19 nt, Artificial Sequence
  Description of Artificial Sequence: Synthetic oligonucleotide
aucgugugagaaccugaac

SEQ ID NO: 1553205 - RNA, 19 nt, Artificial Sequence
  Description of Artificial Sequence: Synthetic oligonucleotide
uugauucccagcacccaca

SEQ ID NO: 1553206 - RNA, 19 nt, Artificial Sequence
  Description of Artificial Sequence: Synthetic oligonucleotide
uaggcaacugcgcuggcuc

SEQ ID NO: 1553207 - RNA, 19 nt, Artificial Sequence
  Description of Artificial Sequence: Synthetic oligonucleotide
ugugcucauaaagguagcc

SEQ ID NO: 1553208 - RNA, 19 nt, Artificial Sequence
  Description of Artificial Sequence: Synthetic oligonucleotide
gaagcaagugagcugggaa

SEQ ID NO: 1553209 - RNA, 19 nt, Artificial Sequence
  Description of Artificial Sequence: Synthetic oligonucleotide
uagucacauauguccaggc

SEQ ID NO: 1553210 - RNA, 19 nt, Artificial Sequence
  Description of Artificial Sequence: Synthetic oligonucleotide
uccucagguuucuaaacuc

SEQ ID NO: 1553211 - RNA, 19 nt, Artificial Sequence
  Description of Artificial Sequence: Synthetic oligonucleotide
acaaccaguacagccacug

SEQ ID NO: 1553212 - RNA, 19 nt, Artificial Sequence
  Description of Artificial Sequence: Synthetic oligonucleotide
gaaggcaucugcgugguga

SEQ ID NO: 1553213 - RNA, 19 nt, Artificial Sequence
  Description of Artificial Sequence: Synthetic oligonucleotide
acugaggaagccagggugg

SEQ ID NO: 1553214 - RNA, 19 nt, Artificial Sequence
  Description of Artificial Sequence: Synthetic oligonucleotide
aguuguacaagaguuucau

SEQ ID NO: 1553215 - RNA, 19 nt, Artificial Sequence
  Description of Artificial Sequence: Synthetic oligonucleotide
agucacauauguccaggcu

SEQ ID NO: 1553216 - RNA, 19 nt, Artificial Sequence
  Description of Artificial Sequence: Synthetic oligonucleotide
uucugggauggguccaggg

SEQ ID NO: 1553217 - RNA, 19 nt, Artificial Sequence
  Description of Artificial Sequence: Synthetic oligonucleotide
uacugagaccaguaggcaa

SEQ ID NO: 1553218 - RNA, 19 nt, Artificial Sequence
  Description of Artificial Sequence: Synthetic oligonucleotide
aggguggguagucacauau

SEQ ID NO: 1553219 - RNA, 19 nt, Artificial Sequence
  Description of Artificial Sequence: Synthetic oligonucleotide
ugagaaccugaacaugcau

SEQ ID NO: 1553220 - RNA, 19 nt, Artificial Sequence
  Description of Artificial Sequence: Synthetic oligonucleotide
acaccuugagauuccagau

SEQ ID NO: 1553221 - RNA, 19 nt, Artificial Sequence
  Description of Artificial Sequence: Synthetic oligonucleotide
cacaccuugagauuccaga

SEQ ID NO: 1553222 - RNA, 19 nt, Artificial Sequence
  Description of Artificial Sequence: Synthetic oligonucleotide
auaaaaggaccuggcgggg

SEQ ID NO: 1553223 - RNA, 19 nt, Artificial Sequence
  Description of Artificial Sequence: Synthetic oligonucleotide
guuguacaagaguuucaug

SEQ ID NO: 1553224 - RNA, 19 nt, Artificial Sequence
  Description of Artificial Sequence: Synthetic oligonucleotide
gaaguccaaguguaaggca

SEQ ID NO: 1553225 - RNA, 19 nt, Artificial Sequence
  Description of Artificial Sequence: Synthetic oligonucleotide
agucuggauaguuggcuca

SEQ ID NO: 1553226 - RNA, 19 nt, Artificial Sequence
  Description of Artificial Sequence: Synthetic oligonucleotide
acaauuggcagggcugagg

SEQ ID NO: 1553227 - RNA, 19 nt, Artificial Sequence
  Description of Artificial Sequence: Synthetic oligonucleotide
gcugcauaaaaggaccugg

SEQ ID NO: 1553228 - RNA, 19 nt, Artificial Sequence
  Description of Artificial Sequence: Synthetic oligonucleotide
aagugugacugcagccagc

SEQ ID NO: 1553229 - RNA, 19 nt, Artificial Sequence
  Description of Artificial Sequence: Synthetic oligonucleotide
gguguagacuaguagaaaa

SEQ ID NO: 1553230 - RNA, 19 nt, Artificial Sequence
  Description of Artificial Sequence: Synthetic oligonucleotide
agauuccagaucaagucca

SEQ ID NO: 1553231 - RNA, 19 nt, Artificial Sequence
  Description of Artificial Sequence: Synthetic oligonucleotide
cauuagagucaggaugcgg

SEQ ID NO: 1553232 - RNA, 19 nt, Artificial Sequence
  Description of Artificial Sequence: Synthetic oligonucleotide
cacugguguagacuaguag

SEQ ID NO: 1553233 - RNA, 19 nt, Artificial Sequence
  Description of Artificial Sequence: Synthetic oligonucleotide
agaaugcaucuugugacug

SEQ ID NO: 1553234 - RNA, 19 nt, Artificial Sequence
  Description of Artificial Sequence: Synthetic oligonucleotide
gcugccaagaaaacaauug

SEQ ID NO: 1553235 - RNA, 19 nt, Artificial Sequence
  Description of Artificial Sequence: Synthetic oligonucleotide
aucaugaagugugacugca

SEQ ID NO: 1553236 - RNA, 19 nt, Artificial Sequence
  Description of Artificial Sequence: Synthetic oligonucleotide
aauuggcagggcugaggca

SEQ ID NO: 1553237 - RNA, 19 nt, Artificial Sequence
  Description of Artificial Sequence: Synthetic oligonucleotide
agugguucuugauucugaa

SEQ ID NO: 1553238 - RNA, 19 nt, Artificial Sequence
  Description of Artificial Sequence: Synthetic oligonucleotide
guaaccagcugccaagaaa

SEQ ID NO: 1553239 - RNA, 19 nt, Artificial Sequence
  Description of Artificial Sequence: Synthetic oligonucleotide
aaucgugugagaaccugaa

SEQ ID NO: 1553240 - RNA, 19 nt, Artificial Sequence
  Description of Artificial Sequence: Synthetic oligonucleotide
cugccugaguucauaguac

SEQ ID NO: 1553241 - RNA, 19 nt, Artificial Sequence
  Description of Artificial Sequence: Synthetic oligonucleotide
caguaggcaacugcgcugg

SEQ ID NO: 1553242 - RNA, 19 nt, Artificial Sequence
  Description of Artificial Sequence: Synthetic oligonucleotide
aaggucucagcaguucagu

SEQ ID NO: 1553243 - RNA, 19 nt, Artificial Sequence
  Description of Artificial Sequence: Synthetic oligonucleotide
ccacacaaccaguacagcc

SEQ ID NO: 1553244 - RNA, 19 nt, Artificial Sequence
  Description of Artificial Sequence: Synthetic oligonucleotide
guccaaggcaggaaguugc

SEQ ID NO: 1553245 - RNA, 19 nt, Artificial Sequence
  Description of Artificial Sequence: Synthetic oligonucleotide
aagaggcccugcaaagguc

SEQ ID NO: 1553246 - RNA, 19 nt, Artificial Sequence
  Description of Artificial Sequence: Synthetic oligonucleotide
caucuugugacuggagaac

SEQ ID NO: 1553247 - RNA, 19 nt, Artificial Sequence
  Description of Artificial Sequence: Synthetic oligonucleotide
accuuuggacugaggaagc

SEQ ID NO: 1553248 - RNA, 19 nt, Artificial Sequence
  Description of Artificial Sequence: Synthetic oligonucleotide
acaccuuuggacugaggaa

SEQ ID NO: 1553249 - RNA, 19 nt, Artificial Sequence
  Description of Artificial Sequence: Synthetic oligonucleotide
acaaucgugugagaaccug

SEQ ID NO: 1553250 - RNA, 19 nt, Artificial Sequence
  Description of Artificial Sequence: Synthetic oligonucleotide
aaacuccccagggcgccgc

SEQ ID NO: 1553251 - RNA, 19 nt, Artificial Sequence
  Description of Artificial Sequence: Synthetic oligonucleotide
guggaagagcacaacaauc

SEQ ID NO: 1553252 - RNA, 19 nt, Artificial Sequence
  Description of Artificial Sequence: Synthetic oligonucleotide
agagcacaacaaucgugug

SEQ ID NO: 1553253 - RNA, 19 nt, Artificial Sequence
  Description of Artificial Sequence: Synthetic oligonucleotide
agcaccucuuucugggaug

SEQ ID NO: 1553254 - RNA, 19 nt, Artificial Sequence
  Description of Artificial Sequence: Synthetic oligonucleotide
uuccaaagagcagcagccc

SEQ ID NO: 1553255 - RNA, 19 nt, Artificial Sequence
  Description of Artificial Sequence: Synthetic oligonucleotide
aaggcaaaguugugcucau

SEQ ID NO: 1553256 - RNA, 19 nt, Artificial Sequence
  Description of Artificial Sequence: Synthetic oligonucleotide
agugugacugcagccagca

SEQ ID NO: 1553257 - RNA, 19 nt, Artificial Sequence
  Description of Artificial Sequence: Synthetic oligonucleotide
uagagucaggaugcggcag

SEQ ID NO: 1553258 - RNA, 19 nt, Artificial Sequence
  Description of Artificial Sequence: Synthetic oligonucleotide
aacaauuggcagggcugag

SEQ ID NO: 1553259 - RNA, 19 nt, Artificial Sequence
  Description of Artificial Sequence: Synthetic oligonucleotide
acacaacaggaguggaaga

SEQ ID NO: 1553260 - RNA, 19 nt, Artificial Sequence
  Description of Artificial Sequence: Synthetic oligonucleotide
gagggaaccgcagggccgg

SEQ ID NO: 1553261 - RNA, 19 nt, Artificial Sequence
  Description of Artificial Sequence: Synthetic oligonucleotide
cuaaacuccccagggcgcc

SEQ ID NO: 1553262 - RNA, 19 nt, Artificial Sequence
  Description of Artificial Sequence: Synthetic oligonucleotide
ugcggcagcucacugcaaa

SEQ ID NO: 1553263 - RNA, 19 nt, Artificial Sequence
  Description of Artificial Sequence: Synthetic oligonucleotide
ucucaacagugguucuuga

SEQ ID NO: 1553264 - RNA, 19 nt, Artificial Sequence
  Description of Artificial Sequence: Synthetic oligonucleotide
ggaaguugcaauggaggag

SEQ ID NO: 1553265 - RNA, 19 nt, Artificial Sequence
  Description of Artificial Sequence: Synthetic oligonucleotide
cagggccggaagcagacgc

SEQ ID NO: 1553266 - RNA, 19 nt, Artificial Sequence
  Description of Artificial Sequence: Synthetic oligonucleotide
uggcugcauaaaaggaccu

SEQ ID NO: 1553267 - RNA, 19 nt, Artificial Sequence
  Description of Artificial Sequence: Synthetic oligonucleotide
cagguuucuaaacucccca

SEQ ID NO: 1553268 - RNA, 19 nt, Artificial Sequence
  Description of Artificial Sequence: Synthetic oligonucleotide
ugaagcaagugagcuggga

SEQ ID NO: 1553269 - RNA, 19 nt, Artificial Sequence
  Description of Artificial Sequence: Synthetic oligonucleotide
agccaauaagucaggaagu

SEQ ID NO: 1553270 - RNA, 19 nt, Artificial Sequence
  Description of Artificial Sequence: Synthetic oligonucleotide
auaguuggcucagugguua

SEQ ID NO: 1553271 - RNA, 19 nt, Artificial Sequence
  Description of Artificial Sequence: Synthetic oligonucleotide
ggaguggaagagcacaaca

SEQ ID NO: 1553272 - RNA, 19 nt, Artificial Sequence
  Description of Artificial Sequence: Synthetic oligonucleotide
aagugcuacugagaccagu

SEQ ID NO: 1553273 - RNA, 19 nt, Artificial Sequence
  Description of Artificial Sequence: Synthetic oligonucleotide
guacugugucuacagaucu

SEQ ID NO: 1553274 - RNA, 19 nt, Artificial Sequence
  Description of Artificial Sequence: Synthetic oligonucleotide
ucugcguggugaucuggga

SEQ ID NO: 1553275 - RNA, 19 nt, Artificial Sequence
  Description of Artificial Sequence: Synthetic oligonucleotide
aguccaaggcaggaaguug

SEQ ID NO: 1553276 - RNA, 19 nt, Artificial Sequence
  Description of Artificial Sequence: Synthetic oligonucleotide
ggaggaguagucccaggag

SEQ ID NO: 1553277 - RNA, 19 nt, Artificial Sequence
  Description of Artificial Sequence: Synthetic oligonucleotide
cuagacagaccacccagga

SEQ ID NO: 1553278 - RNA, 19 nt, Artificial Sequence
  Description of Artificial Sequence: Synthetic oligonucleotide
cacgcugccccacuggcac

SEQ ID NO: 1553279 - RNA, 19 nt, Artificial Sequence
  Description of Artificial Sequence: Synthetic oligonucleotide
caaccaguacagccacugg

SEQ ID NO: 1553280 - RNA, 19 nt, Artificial Sequence
  Description of Artificial Sequence: Synthetic oligonucleotide
guacaagaguuucaugaua

SEQ ID NO: 1553281 - RNA, 19 nt, Artificial Sequence
  Description of Artificial Sequence: Synthetic oligonucleotide
aagagugccuguagcauua

SEQ ID NO: 1553282 - RNA, 19 nt, Artificial Sequence
  Description of Artificial Sequence: Synthetic oligonucleotide
ccagacaacccaaaucaug

SEQ ID NO: 1553283 - RNA, 19 nt, Artificial Sequence
  Description of Artificial Sequence: Synthetic oligonucleotide
gauggguccagggaccaca

SEQ ID NO: 1553284 - RNA, 19 nt, Artificial Sequence
  Description of Artificial Sequence: Synthetic oligonucleotide
agaucucaacagugguucu

SEQ ID NO: 1553285 - RNA, 19 nt, Artificial Sequence
  Description of Artificial Sequence: Synthetic oligonucleotide
gcacugaaugucaggaagg

SEQ ID NO: 1553286 - RNA, 19 nt, Artificial Sequence
  Description of Artificial Sequence: Synthetic oligonucleotide
ccugaguucauaguacggc

SEQ ID NO: 1553287 - RNA, 19 nt, Artificial Sequence
  Description of Artificial Sequence: Synthetic oligonucleotide
aggacuucgucccgaggga

SEQ ID NO: 1553288 - RNA, 19 nt, Artificial Sequence
  Description of Artificial Sequence: Synthetic oligonucleotide
aacaaucgugugagaaccu

SEQ ID NO: 1553289 - RNA, 19 nt, Artificial Sequence
  Description of Artificial Sequence: Synthetic oligonucleotide
cacaacaaucgugugagaa

SEQ ID NO: 1553290 - RNA, 19 nt, Artificial Sequence
  Description of Artificial Sequence: Synthetic oligonucleotide
aguacacaacaggagugga

SEQ ID NO: 1553291 - RNA, 19 nt, Artificial Sequence
  Description of Artificial Sequence: Synthetic oligonucleotide
uccaaguguaaggcagagc

SEQ ID NO: 1553292 - RNA, 19 nt, Artificial Sequence
  Description of Artificial Sequence: Synthetic oligonucleotide
agcuuccucagguuucuaa

SEQ ID NO: 1553293 - RNA, 19 nt, Artificial Sequence
  Description of Artificial Sequence: Synthetic oligonucleotide
gaacaggcccuccaguugu

SEQ ID NO: 1553294 - RNA, 19 nt, Artificial Sequence
  Description of Artificial Sequence: Synthetic oligonucleotide
acuguccuugcuucuucga

SEQ ID NO: 1553295 - RNA, 19 nt, Artificial Sequence
  Description of Artificial Sequence: Synthetic oligonucleotide
ccaucuagacagaccaccc

SEQ ID NO: 1553296 - RNA, 19 nt, Artificial Sequence
  Description of Artificial Sequence: Synthetic oligonucleotide
aaacaccuuuggacugagg

SEQ ID NO: 1553297 - RNA, 19 nt, Artificial Sequence
  Description of Artificial Sequence: Synthetic oligonucleotide
guggugaucugggaugaug

SEQ ID NO: 1553298 - RNA, 19 nt, Artificial Sequence
  Description of Artificial Sequence: Synthetic oligonucleotide
aggcccuccaguuguacaa

SEQ ID NO: 1553299 - RNA, 19 nt, Artificial Sequence
  Description of Artificial Sequence: Synthetic oligonucleotide
gaccaguaggcaacugcgc

SEQ ID NO: 1553300 - RNA, 19 nt, Artificial Sequence
  Description of Artificial Sequence: Synthetic oligonucleotide
caaguguaaggcagagcca

SEQ ID NO: 1553301 - RNA, 19 nt, Artificial Sequence
  Description of Artificial Sequence: Synthetic oligonucleotide
cugaagcaagugagcuggg

SEQ ID NO: 1553302 - RNA, 19 nt, Artificial Sequence
  Description of Artificial Sequence: Synthetic oligonucleotide
agugcuacugagaccagua

SEQ ID NO: 1553303 - RNA, 19 nt, Artificial Sequence
  Description of Artificial Sequence: Synthetic oligonucleotide
agucaggaaguagccaaga

SEQ ID NO: 1553304 - RNA, 19 nt, Artificial Sequence
  Description of Artificial Sequence: Synthetic oligonucleotide
caagugagcugggaaccag

SEQ ID NO: 1553305 - RNA, 19 nt, Artificial Sequence
  Description of Artificial Sequence: Synthetic oligonucleotide
aguugugcucauaaaggua

SEQ ID NO: 1553306 - RNA, 19 nt, Artificial Sequence
  Description of Artificial Sequence: Synthetic oligonucleotide
gugugagaaccugaacaug

SEQ ID NO: 1553307 - RNA, 19 nt, Artificial Sequence
  Description of Artificial Sequence: Synthetic oligonucleotide
ucccaucuagacagaccac

SEQ ID NO: 1553308 - RNA, 19 nt, Artificial Sequence
  Description of Artificial Sequence: Synthetic oligonucleotide
guccaaguguaaggcagag

SEQ ID NO: 1553309 - RNA, 19 nt, Artificial Sequence
  Description of Artificial Sequence: Synthetic oligonucleotide
cuccaguuguacaagaguu

SEQ ID NO: 1553310 - RNA, 19 nt, Artificial Sequence
  Description of Artificial Sequence: Synthetic oligonucleotide
gucuacagaucucaacagu

SEQ ID NO: 1553311 - RNA, 19 nt, Artificial Sequence
  Description of Artificial Sequence: Synthetic oligonucleotide
ggaaguguucugcauccca

SEQ ID NO: 1553312 - RNA, 19 nt, Artificial Sequence
  Description of Artificial Sequence: Synthetic oligonucleotide
gugccuguagcauuagagu

SEQ ID NO: 1553313 - RNA, 19 nt, Artificial Sequence
  Description of Artificial Sequence: Synthetic oligonucleotide
cccaucuagacagaccacc

SEQ ID NO: 1553314 - RNA, 19 nt, Artificial Sequence
  Description of Artificial Sequence: Synthetic oligonucleotide
cuuuggacugaggaagcca

SEQ ID NO: 1553315 - RNA, 19 nt, Artificial Sequence
  Description of Artificial Sequence: Synthetic oligonucleotide
ggccgcaaggaagaggcgg

SEQ ID NO: 1553316 - RNA, 19 nt, Artificial Sequence
  Description of Artificial Sequence: Synthetic oligonucleotide
ccaauaagucaggaaguag

SEQ ID NO: 1553317 - RNA, 19 nt, Artificial Sequence
  Description of Artificial Sequence: Synthetic oligonucleotide
gaguaaccagcugccaaga

SEQ ID NO: 1553318 - RNA, 19 nt, Artificial Sequence
  Description of Artificial Sequence: Synthetic oligonucleotide
guagcauuagagucaggau

SEQ ID NO: 1553319 - RNA, 19 nt, Artificial Sequence
  Description of Artificial Sequence: Synthetic oligonucleotide
cgaaguccaaguguaaggc

SEQ ID NO: 1553320 - RNA, 19 nt, Artificial Sequence
  Description of Artificial Sequence: Synthetic oligonucleotide
uacagccacugguguagac

SEQ ID NO: 1553321 - RNA, 19 nt, Artificial Sequence
  Description of Artificial Sequence: Synthetic oligonucleotide
acagaccacccaggagagc

SEQ ID NO: 1553322 - RNA, 19 nt, Artificial Sequence
  Description of Artificial Sequence: Synthetic oligonucleotide
guccaggcugcccacacaa

SEQ ID NO: 1553323 - RNA, 19 nt, Artificial Sequence
  Description of Artificial Sequence: Synthetic oligonucleotide
cagugguucuugauucuga

SEQ ID NO: 1553324 - RNA, 19 nt, Artificial Sequence
  Description of Artificial Sequence: Synthetic oligonucleotide
cagagccaaggguggguag

SEQ ID NO: 1553325 - RNA, 19 nt, Artificial Sequence
  Description of Artificial Sequence: Synthetic oligonucleotide
cuccacgcugccccacugg

SEQ ID NO: 1553326 - RNA, 19 nt, Artificial Sequence
  Description of Artificial Sequence: Synthetic oligonucleotide
uucgucccgagggaaccgc

SEQ ID NO: 1553327 - RNA, 19 nt, Artificial Sequence
  Description of Artificial Sequence: Synthetic oligonucleotide
ccuguagcauuagagucag

SEQ ID NO: 1553328 - RNA, 19 nt, Artificial Sequence
  Description of Artificial Sequence: Synthetic oligonucleotide
gcggggacagcccaacacc

SEQ ID NO: 1553329 - RNA, 19 nt, Artificial Sequence
  Description of Artificial Sequence: Synthetic oligonucleotide
gccgugcucagcaauaaac

SEQ ID NO: 1553330 - RNA, 19 nt, Artificial Sequence
  Description of Artificial Sequence: Synthetic oligonucleotide
gcaauaaacaggaaguguu

SEQ ID NO: 1553331 - RNA, 19 nt, Artificial Sequence
  Description of Artificial Sequence: Synthetic oligonucleotide
cugcccacacaaccaguac

SEQ ID NO: 1553332 - RNA, 19 nt, Artificial Sequence
  Description of Artificial Sequence: Synthetic oligonucleotide
gacuucgucccgagggaac

SEQ ID NO: 1553333 - RNA, 19 nt, Artificial Sequence
  Description of Artificial Sequence: Synthetic oligonucleotide
cuucgucccgagggaaccg

SEQ ID NO: 1553334 - RNA, 19 nt, Artificial Sequence
  Description of Artificial Sequence: Synthetic oligonucleotide
gacuucugaguaaccagcu

SEQ ID NO: 1553335 - RNA, 19 nt, Artificial Sequence
  Description of Artificial Sequence: Synthetic oligonucleotide
gugagaaccugaacaugca

SEQ ID NO: 1553336 - RNA, 19 nt, Artificial Sequence
  Description of Artificial Sequence: Synthetic oligonucleotide
uccaggcugcccacacaac

SEQ ID NO: 1553337 - RNA, 19 nt, Artificial Sequence
  Description of Artificial Sequence: Synthetic oligonucleotide
cagccacugguguagacua

SEQ ID NO: 1553338 - RNA, 19 nt, Artificial Sequence
  Description of Artificial Sequence: Synthetic oligonucleotide
agacgcgggccggaggccg

SEQ ID NO: 1553339 - RNA, 19 nt, Artificial Sequence
  Description of Artificial Sequence: Synthetic oligonucleotide
aggagccaauaagucagga

SEQ ID NO: 1553340 - RNA, 19 nt, Artificial Sequence
  Description of Artificial Sequence: Synthetic oligonucleotide
ucgucccgagggaaccgca

SEQ ID NO: 1553341 - RNA, 19 nt, Artificial Sequence
  Description of Artificial Sequence: Synthetic oligonucleotide
guggguagucacauauguc

SEQ ID NO: 1553342 - RNA, 19 nt, Artificial Sequence
  Description of Artificial Sequence: Synthetic oligonucleotide
gcucauaaagguagccgug

SEQ ID NO: 1553343 - RNA, 19 nt, Artificial Sequence
  Description of Artificial Sequence: Synthetic oligonucleotide
ccucuuucugggauggguc

SEQ ID NO: 1553344 - RNA, 19 nt, Artificial Sequence
  Description of Artificial Sequence: Synthetic oligonucleotide
gaaguguucugcaucccau

SEQ ID NO: 1553345 - RNA, 19 nt, Artificial Sequence
  Description of Artificial Sequence: Synthetic oligonucleotide
gagugccuguagcauuaga

SEQ ID NO: 1553346 - RNA, 19 nt, Artificial Sequence
  Description of Artificial Sequence: Synthetic oligonucleotide
ccaaaucaugaagugugac

SEQ ID NO: 1553347 - RNA, 19 nt, Artificial Sequence
  Description of Artificial Sequence: Synthetic oligonucleotide
caagaggcccugcaaaggu

SEQ ID NO: 1553348 - RNA, 19 nt, Artificial Sequence
  Description of Artificial Sequence: Synthetic oligonucleotide
guacacaacaggaguggaa

SEQ ID NO: 1553349 - RNA, 19 nt, Artificial Sequence
  Description of Artificial Sequence: Synthetic oligonucleotide
cuacugagaccaguaggca

SEQ ID NO: 1553350 - RNA, 19 nt, Artificial Sequence
  Description of Artificial Sequence: Synthetic oligonucleotide
gccugaguucauaguacgg

SEQ ID NO: 1553351 - RNA, 19 nt, Artificial Sequence
  Description of Artificial Sequence: Synthetic oligonucleotide
ggccuucuguccugguggg

SEQ ID NO: 1553352 - RNA, 19 nt, Artificial Sequence
  Description of Artificial Sequence: Synthetic oligonucleotide
cacauauguccaggcugcc

SEQ ID NO: 1553353 - RNA, 19 nt, Artificial Sequence
  Description of Artificial Sequence: Synthetic oligonucleotide
ggaccuggcggggacagcc

SEQ ID NO: 1553354 - RNA, 19 nt, Artificial Sequence
  Description of Artificial Sequence: Synthetic oligonucleotide
cuucgaaguccaaguguaa

SEQ ID NO: 1553355 - RNA, 19 nt, Artificial Sequence
  Description of Artificial Sequence: Synthetic oligonucleotide
gcucaagaggcccugcaaa

SEQ ID NO: 1553356 - RNA, 19 nt, Artificial Sequence
  Description of Artificial Sequence: Synthetic oligonucleotide
gaguagucccaggagccaa

SEQ ID NO: 1553357 - RNA, 19 nt, Artificial Sequence
  Description of Artificial Sequence: Synthetic oligonucleotide
agggccggaagcagacgcg

SEQ ID NO: 1553358 - RNA, 19 nt, Artificial Sequence
  Description of Artificial Sequence: Synthetic oligonucleotide
guguagacuaguagaaaau

SEQ ID NO: 1553359 - RNA, 19 nt, Artificial Sequence
  Description of Artificial Sequence: Synthetic oligonucleotide
gaagcuucucagguacugu

SEQ ID NO: 1553360 - RNA, 19 nt, Artificial Sequence
  Description of Artificial Sequence: Synthetic oligonucleotide
cuguagcauuagagucagg

SEQ ID NO: 1553361 - RNA, 19 nt, Artificial Sequence
  Description of Artificial Sequence: Synthetic oligonucleotide
ccagaucaaguccaaggca

SEQ ID NO: 1553362 - RNA, 19 nt, Artificial Sequence
  Description of Artificial Sequence: Synthetic oligonucleotide
ggaggccgcaaggaagagg

SEQ ID NO: 1553363 - RNA, 19 nt, Artificial Sequence
  Description of Artificial Sequence: Synthetic oligonucleotide
gcauuagagucaggaugcg

SEQ ID NO: 1553364 - RNA, 19 nt, Artificial Sequence
  Description of Artificial Sequence: Synthetic oligonucleotide
uagccgugcucagcaauaa

SEQ ID NO: 1553365 - RNA, 19 nt, Artificial Sequence
  Description of Artificial Sequence: Synthetic oligonucleotide
gccuguagcauuagaguca

SEQ ID NO: 1553366 - RNA, 19 nt, Artificial Sequence
  Description of Artificial Sequence: Synthetic oligonucleotide
gaacaugcaugcacaggcu

SEQ ID NO: 1553367 - RNA, 19 nt, Artificial Sequence
  Description of Artificial Sequence: Synthetic oligonucleotide
acagggccggaagcagacg

SEQ ID NO: 1553368 - RNA, 19 nt, Artificial Sequence
  Description of Artificial Sequence: Synthetic oligonucleotide
ggguagucacauaugucca

SEQ ID NO: 1553369 - RNA, 19 nt, Artificial Sequence
  Description of Artificial Sequence: Synthetic oligonucleotide
ccgugcucagcaauaaaca

SEQ ID NO: 1553370 - RNA, 19 nt, Artificial Sequence
  Description of Artificial Sequence: Synthetic oligonucleotide
ggcugcauaaaaggaccug

SEQ ID NO: 1553371 - RNA, 19 nt, Artificial Sequence
  Description of Artificial Sequence: Synthetic oligonucleotide
accagacaacccaaaucau

SEQ ID NO: 1553372 - RNA, 19 nt, Artificial Sequence
  Description of Artificial Sequence: Synthetic oligonucleotide
ccgagggaaccgcagggcc

SEQ ID NO: 1553373 - RNA, 19 nt, Artificial Sequence
  Description of Artificial Sequence: Synthetic oligonucleotide
aaguugcaauggaggagua

SEQ ID NO: 1553374 - RNA, 19 nt, Artificial Sequence
  Description of Artificial Sequence: Synthetic oligonucleotide
gagguccugagguuugauu

SEQ ID NO: 1553375 - RNA, 19 nt, Artificial Sequence
  Description of Artificial Sequence: Synthetic oligonucleotide
guagccgugcucagcaaua

SEQ ID NO: 1553376 - RNA, 19 nt, Artificial Sequence
  Description of Artificial Sequence: Synthetic oligonucleotide
cgagggaaccgcagggccg

SEQ ID NO: 1553377 - RNA, 19 nt, Artificial Sequence
  Description of Artificial Sequence: Synthetic oligonucleotide
gggccggaagcagacgcgg

SEQ ID NO: 1553378 - RNA, 19 nt, Artificial Sequence
  Description of Artificial Sequence: Synthetic oligonucleotide
cucaacagugguucuugau

SEQ ID NO: 1553379 - RNA, 19 nt, Artificial Sequence
  Description of Artificial Sequence: Synthetic oligonucleotide
ccagcacccacaccuugag

SEQ ID NO: 1553380 - RNA, 19 nt, Artificial Sequence
  Description of Artificial Sequence: Synthetic oligonucleotide
caguacagccacuggugua

SEQ ID NO: 1553381 - RNA, 19 nt, Artificial Sequence
  Description of Artificial Sequence: Synthetic oligonucleotide
gagaaggcaucugcguggu

SEQ ID NO: 1553382 - RNA, 19 nt, Artificial Sequence
  Description of Artificial Sequence: Synthetic oligonucleotide
gggagucuggauaguuggc

SEQ ID NO: 1553383 - RNA, 19 nt, Artificial Sequence
  Description of Artificial Sequence: Synthetic oligonucleotide
gccggaggccgcaaggaag

SEQ ID NO: 1553384 - RNA, 19 nt, Artificial Sequence
  Description of Artificial Sequence: Synthetic oligonucleotide
cugugucuacagaucucaa

SEQ ID NO: 1553385 - RNA, 19 nt, Artificial Sequence
  Description of Artificial Sequence: Synthetic oligonucleotide
ggcaucugcguggugaucu

SEQ ID NO: 1553386 - RNA, 19 nt, Artificial Sequence
  Description of Artificial Sequence: Synthetic oligonucleotide
gccgcaaggaagaggcggc

SEQ ID NO: 1553387 - RNA, 19 nt, Artificial Sequence
  Description of Artificial Sequence: Synthetic oligonucleotide
ggagucuggauaguuggcu

SEQ ID NO: 1553388 - RNA, 19 nt, Artificial Sequence
  Description of Artificial Sequence: Synthetic oligonucleotide
agccaaggguggguaguca

SEQ ID NO: 1553389 - RNA, 19 nt, Artificial Sequence
  Description of Artificial Sequence: Synthetic oligonucleotide
agccacugguguagacuag

SEQ ID NO: 1553390 - RNA, 19 nt, Artificial Sequence
  Description of Artificial Sequence: Synthetic oligonucleotide
gaccuggcggggacagccc

SEQ ID NO: 1553391 - RNA, 19 nt, Artificial Sequence
  Description of Artificial Sequence: Synthetic oligonucleotide
ggccaggcaacagggccgg

SEQ ID NO: 1553392 - RNA, 19 nt, Artificial Sequence
  Description of Artificial Sequence: Synthetic oligonucleotide
agcguggaccagguacaca

SEQ ID NO: 1553393 - RNA, 19 nt, Artificial Sequence
  Description of Artificial Sequence: Synthetic oligonucleotide
agagguccugagguuugau

SEQ ID NO: 1553394 - RNA, 19 nt, Artificial Sequence
  Description of Artificial Sequence: Synthetic oligonucleotide
gcaucugcguggugaucug

SEQ ID NO: 1553395 - RNA, 19 nt, Artificial Sequence
  Description of Artificial Sequence: Synthetic oligonucleotide
gcagcguggaccagguaca

SEQ ID NO: 1553396 - RNA, 19 nt, Artificial Sequence
  Description of Artificial Sequence: Synthetic oligonucleotide
cuggcggggacagcccaac

SEQ ID NO: 1553397 - RNA, 19 nt, Artificial Sequence
  Description of Artificial Sequence: Synthetic oligonucleotide
ccacaccuugagauuccag

SEQ ID NO: 1553398 - RNA, 19 nt, Artificial Sequence
  Description of Artificial Sequence: Synthetic oligonucleotide
agguagccgugcucagcaa

SEQ ID NO: 1553399 - RNA, 19 nt, Artificial Sequence
  Description of Artificial Sequence: Synthetic oligonucleotide
ggcucaagaggcccugcaa

SEQ ID NO: 1553400 - RNA, 19 nt, Artificial Sequence
  Description of Artificial Sequence: Synthetic oligonucleotide
caacugcgcuggcucaaga

SEQ ID NO: 1553401 - RNA, 19 nt, Artificial Sequence
  Description of Artificial Sequence: Synthetic oligonucleotide
ccggaagcagacgcgggcc

SEQ ID NO: 1553402 - RNA, 19 nt, Artificial Sequence
  Description of Artificial Sequence: Synthetic oligonucleotide
cagcguggaccagguacac

SEQ ID NO: 1553403 - RNA, 19 nt, Artificial Sequence
  Description of Artificial Sequence: Synthetic oligonucleotide
ccuucuguccuggugggga

SEQ ID NO: 1553404 - RNA, 19 nt, Artificial Sequence
  Description of Artificial Sequence: Synthetic oligonucleotide
gcaacugcgcuggcucaag

SEQ ID NO: 1553405 - RNA, 19 nt, Artificial Sequence
  Description of Artificial Sequence: Synthetic oligonucleotide
ccaggacuucgucccgagg

SEQ ID NO: 1553406 - RNA, 19 nt, Artificial Sequence
  Description of Artificial Sequence: Synthetic oligonucleotide
cuuacuguccuugcuucuu

SEQ ID NO: 1553407 - RNA, 19 nt, Artificial Sequence
  Description of Artificial Sequence: Synthetic oligonucleotide
ggcgccgcggcccaggacu

SEQ ID NO: 1553408 - RNA, 19 nt, Artificial Sequence
  Description of Artificial Sequence: Synthetic oligonucleotide
cagggccgggccaggcaac

SEQ ID NO: 1553409 - RNA, 19 nt, Artificial Sequence
  Description of Artificial Sequence: Synthetic oligonucleotide
ccggccuauggcgggaggg

SEQ ID NO: 1553410 - RNA, 19 nt, Artificial Sequence
  Description of Artificial Sequence: Synthetic oligonucleotide
guacagccacugguguaga

SEQ ID NO: 1553411 - RNA, 19 nt, Artificial Sequence
  Description of Artificial Sequence: Synthetic oligonucleotide
cccaggacuucgucccgag

SEQ ID NO: 1553412 - RNA, 19 nt, Artificial Sequence
  Description of Artificial Sequence: Synthetic oligonucleotide
gguagccgugcucagcaau

SEQ ID NO: 1553413 - RNA, 19 nt, Artificial Sequence
  Description of Artificial Sequence: Synthetic oligonucleotide
acgcugccccacuggcacu

SEQ ID NO: 1553414 - RNA, 19 nt, Artificial Sequence
  Description of Artificial Sequence: Synthetic oligonucleotide
cugcguggugaucugggau

SEQ ID NO: 1553415 - RNA, 19 nt, Artificial Sequence
  Description of Artificial Sequence: Synthetic oligonucleotide
guagucccaggagccaaua

SEQ ID NO: 1553416 - RNA, 19 nt, Artificial Sequence
  Description of Artificial Sequence: Synthetic oligonucleotide
gccgcggcccaggacuucg

SEQ ID NO: 1553417 - RNA, 19 nt, Artificial Sequence
  Description of Artificial Sequence: Synthetic oligonucleotide
ggugaucugggaugaugau

SEQ ID NO: 1553418 - RNA, 19 nt, Artificial Sequence
  Description of Artificial Sequence: Synthetic oligonucleotide
ggacugaggaagccagggu

SEQ ID NO: 1553419 - RNA, 19 nt, Artificial Sequence
  Description of Artificial Sequence: Synthetic oligonucleotide
gggcccggccuauggcggg

SEQ ID NO: 1553420 - RNA, 19 nt, Artificial Sequence
  Description of Artificial Sequence: Synthetic oligonucleotide
agggccgggccaggcaaca

SEQ ID NO: 1553421 - RNA, 19 nt, Artificial Sequence
  Description of Artificial Sequence: Synthetic oligonucleotide
agggaaccgcagggccggg

SEQ ID NO: 1553422 - RNA, 19 nt, Artificial Sequence
  Description of Artificial Sequence: Synthetic oligonucleotide
accgcagggccgggccagg

SEQ ID NO: 1553423 - RNA, 19 nt, Artificial Sequence
  Description of Artificial Sequence: Synthetic oligonucleotide
aggcaaaguugugcucaua

SEQ ID NO: 1553424 - RNA, 19 nt, Artificial Sequence
  Description of Artificial Sequence: Synthetic oligonucleotide
gcguggugaucugggauga

SEQ ID NO: 1553425 - RNA, 19 nt, Artificial Sequence
  Description of Artificial Sequence: Synthetic oligonucleotide
gucugagcuuccucagguu

SEQ ID NO: 1553426 - RNA, 19 nt, Artificial Sequence
  Description of Artificial Sequence: Synthetic oligonucleotide
cugagaccaguaggcaacu

SEQ ID NO: 1553427 - RNA, 19 nt, Artificial Sequence
  Description of Artificial Sequence: Synthetic oligonucleotide
ggacuucgucccgagggaa

SEQ ID NO: 1553428 - RNA, 19 nt, Artificial Sequence
  Description of Artificial Sequence: Synthetic oligonucleotide
cgucccgagggaaccgcag

SEQ ID NO: 1553429 - RNA, 19 nt, Artificial Sequence
  Description of Artificial Sequence: Synthetic oligonucleotide
ccaccaggucugagcuucc

SEQ ID NO: 1553430 - RNA, 19 nt, Artificial Sequence
  Description of Artificial Sequence: Synthetic oligonucleotide
ccaguacagccacuggugu

SEQ ID NO: 1553431 - RNA, 19 nt, Artificial Sequence
  Description of Artificial Sequence: Synthetic oligonucleotide
gcccaacaccagacaaccc

SEQ ID NO: 1553432 - RNA, 19 nt, Artificial Sequence
  Description of Artificial Sequence: Synthetic oligonucleotide
caggaugcggcagcucacu

SEQ ID NO: 1553433 - RNA, 19 nt, Artificial Sequence
  Description of Artificial Sequence: Synthetic oligonucleotide
cggggacagcccaacacca

SEQ ID NO: 1553434 - RNA, 19 nt, Artificial Sequence
  Description of Artificial Sequence: Synthetic oligonucleotide
ggccggaggccgcaaggaa

SEQ ID NO: 1553435 - RNA, 19 nt, Artificial Sequence
  Description of Artificial Sequence: Synthetic oligonucleotide
gccacugguguagacuagu

SEQ ID NO: 1553436 - RNA, 19 nt, Artificial Sequence
  Description of Artificial Sequence: Synthetic oligonucleotide
ggcaacugcgcuggcucaa

SEQ ID NO: 1553437 - RNA, 19 nt, Artificial Sequence
  Description of Artificial Sequence: Synthetic oligonucleotide
ccuccacgcugccccacug

SEQ ID NO: 1553438 - RNA, 19 nt, Artificial Sequence
  Description of Artificial Sequence: Synthetic oligonucleotide
ccaggguggggcuucucua

SEQ ID NO: 1553439 - RNA, 19 nt, Artificial Sequence
  Description of Artificial Sequence: Synthetic oligonucleotide
cggccuauggcgggagggg

SEQ ID NO: 1553440 - RNA, 19 nt, Artificial Sequence
  Description of Artificial Sequence: Synthetic oligonucleotide
cccggccuauggcgggagg

SEQ ID NO: 1553441 - RNA, 19 nt, Artificial Sequence
  Description of Artificial Sequence: Synthetic oligonucleotide
cggcagcucacugcaaauc

SEQ ID NO: 1553442 - RNA, 19 nt, Artificial Sequence
  Description of Artificial Sequence: Synthetic oligonucleotide
ccaggcaacagggccggaa

SEQ ID NO: 1553443 - RNA, 19 nt, Artificial Sequence
  Description of Artificial Sequence: Synthetic oligonucleotide
gcggcagcucacugcaaau

SEQ ID NO: 1553444 - RNA, 19 nt, Artificial Sequence
  Description of Artificial Sequence: Synthetic oligonucleotide
gcccaggacuucgucccga

SEQ ID NO: 1553445 - RNA, 19 nt, Artificial Sequence
  Description of Artificial Sequence: Synthetic oligonucleotide
cguggaccagguacacaaa

SEQ ID NO: 1553446 - RNA, 19 nt, Artificial Sequence
  Description of Artificial Sequence: Synthetic oligonucleotide
gcccggccuauggcgggag

SEQ ID NO: 1553447 - RNA, 19 nt, Artificial Sequence
  Description of Artificial Sequence: Synthetic oligonucleotide
ccuggcggggacagcccaa

SEQ ID NO: 1553448 - RNA, 19 nt, Artificial Sequence
  Description of Artificial Sequence: Synthetic oligonucleotide
cugcagcguggaccaggua

SEQ ID NO: 1553449 - RNA, 19 nt, Artificial Sequence
  Description of Artificial Sequence: Synthetic oligonucleotide
ggcccggccuauggcggga

SEQ ID NO: 1553450 - RNA, 19 nt, Artificial Sequence
  Description of Artificial Sequence: Synthetic oligonucleotide
cccagggcgccgcggccca

SEQ ID NO: 1553451 - RNA, 19 nt, Artificial Sequence
  Description of Artificial Sequence: Synthetic oligonucleotide
ccgcggcccaggacuucgu

SEQ ID NO: 1553452 - RNA, 19 nt, Artificial Sequence
  Description of Artificial Sequence: Synthetic oligonucleotide
cgccgcggcccaggacuuc

SEQ ID NO: 1553453 - RNA, 19 nt, Artificial Sequence
  Description of Artificial Sequence: Synthetic oligonucleotide
gcgccgcggcccaggacuu

SEQ ID NO: 1553454 - RNA, 19 nt, Artificial Sequence
  Description of Artificial Sequence: Synthetic oligonucleotide
uuuauugagauuuauugag

SEQ ID NO: 1553455 - RNA, 19 nt, Artificial Sequence
  Description of Artificial Sequence: Synthetic oligonucleotide
aauuucaacauacuuuguc

SEQ ID NO: 1553456 - RNA, 19 nt, Artificial Sequence
  Description of Artificial Sequence: Synthetic oligonucleotide
auuucaacauacuuugucc

SEQ ID NO: 1553457 - RNA, 19 nt, Artificial Sequence
  Description of Artificial Sequence: Synthetic oligonucleotide
aaggucauaacaaugaggg

SEQ ID NO: 1553458 - RNA, 19 nt, Artificial Sequence
  Description of Artificial Sequence: Synthetic oligonucleotide
uuuauugacacacuugaca

SEQ ID NO: 1553459 - RNA, 19 nt, Artificial Sequence
  Description of Artificial Sequence: Synthetic oligonucleotide
uuauugagcacuuuccaag

SEQ ID NO: 1553460 - RNA, 19 nt, Artificial Sequence
  Description of Artificial Sequence: Synthetic oligonucleotide
aguacaagccuccaucagc

SEQ ID NO: 1553461 - RNA, 19 nt, Artificial Sequence
  Description of Artificial Sequence: Synthetic oligonucleotide
uuugcgaauuucaacauac

SEQ ID NO: 1553462 - RNA, 19 nt, Artificial Sequence
  Description of Artificial Sequence: Synthetic oligonucleotide
uauugagauuuauugagca

SEQ ID NO: 1553463 - RNA, 19 nt, Artificial Sequence
  Description of Artificial Sequence: Synthetic oligonucleotide
uaagugacgccguagguag

SEQ ID NO: 1553464 - RNA, 19 nt, Artificial Sequence
  Description of Artificial Sequence: Synthetic oligonucleotide
uuauugagauuuauugagc

SEQ ID NO: 1553465 - RNA, 19 nt, Artificial Sequence
  Description of Artificial Sequence: Synthetic oligonucleotide
uugacacacuuguagacgg

SEQ ID NO: 1553466 - RNA, 19 nt, Artificial Sequence
  Description of Artificial Sequence: Synthetic oligonucleotide
guagguagcgcucacgagg

SEQ ID NO: 1553467 - RNA, 19 nt, Artificial Sequence
  Description of Artificial Sequence: Synthetic oligonucleotide
auugagauuuauugagcac

SEQ ID NO: 1553468 - RNA, 19 nt, Artificial Sequence
  Description of Artificial Sequence: Synthetic oligonucleotide
aagguguccagcuugggga

SEQ ID NO: 1553469 - RNA, 19 nt, Artificial Sequence
  Description of Artificial Sequence: Synthetic oligonucleotide
acuugacacacuuguagac

SEQ ID NO: 1553470 - RNA, 19 nt, Artificial Sequence
  Description of Artificial Sequence: Synthetic oligonucleotide
auuaaguccuguugaacag

SEQ ID NO: 1553471 - RNA, 19 nt, Artificial Sequence
  Description of Artificial Sequence: Synthetic oligonucleotide
auaacaaugaggggaaguc

SEQ ID NO: 1553472 - RNA, 19 nt, Artificial Sequence
  Description of Artificial Sequence: Synthetic oligonucleotide
uguaguugcccguaugugc

SEQ ID NO: 1553473 - RNA, 19 nt, Artificial Sequence
  Description of Artificial Sequence: Synthetic oligonucleotide
gguaguacuauauuaaguc

SEQ ID NO: 1553474 - RNA, 19 nt, Artificial Sequence
  Description of Artificial Sequence: Synthetic oligonucleotide
uuacauacucaccccacag

SEQ ID NO: 1553475 - RNA, 19 nt, Artificial Sequence
  Description of Artificial Sequence: Synthetic oligonucleotide
uugagauuuauugagcacu

SEQ ID NO: 1553476 - RNA, 19 nt, Artificial Sequence
  Description of Artificial Sequence: Synthetic oligonucleotide
guaguacuauauuaagucc

SEQ ID NO: 1553477 - RNA, 19 nt, Artificial Sequence
  Description of Artificial Sequence: Synthetic oligonucleotide
aaagaggugaagugccuug

SEQ ID NO: 1553478 - RNA, 19 nt, Artificial Sequence
  Description of Artificial Sequence: Synthetic oligonucleotide
aggugaagugccuugcucg

SEQ ID NO: 1553479 - RNA, 19 nt, Artificial Sequence
  Description of Artificial Sequence: Synthetic oligonucleotide
aggaguggaguauuuauug

SEQ ID NO: 1553480 - RNA, 19 nt, Artificial Sequence
  Description of Artificial Sequence: Synthetic oligonucleotide
ugaagugccuugcucgagg

SEQ ID NO: 1553481 - RNA, 19 nt, Artificial Sequence
  Description of Artificial Sequence: Synthetic oligonucleotide
auggguagguaagugacgc

SEQ ID NO: 1553482 - RNA, 19 nt, Artificial Sequence
  Description of Artificial Sequence: Synthetic oligonucleotide
gagguaguacuauauuaag

SEQ ID NO: 1553483 - RNA, 19 nt, Artificial Sequence
  Description of Artificial Sequence: Synthetic oligonucleotide
auuugugucgugagaagcc

SEQ ID NO: 1553484 - RNA, 19 nt, Artificial Sequence
  Description of Artificial Sequence: Synthetic oligonucleotide
acuccaacgaugcugccuc

SEQ ID NO: 1553485 - RNA, 19 nt, Artificial Sequence
  Description of Artificial Sequence: Synthetic oligonucleotide
uguagaccgggacagcaag

SEQ ID NO: 1553486 - RNA, 19 nt, Artificial Sequence
  Description of Artificial Sequence: Synthetic oligonucleotide
uauauuaaguccuguugaa

SEQ ID NO: 1553487 - RNA, 19 nt, Artificial Sequence
  Description of Artificial Sequence: Synthetic oligonucleotide
ucgugagaagcccuuggcg

SEQ ID NO: 1553488 - RNA, 19 nt, Artificial Sequence
  Description of Artificial Sequence: Synthetic oligonucleotide
aacgaugcugccuccacca

SEQ ID NO: 1553489 - RNA, 19 nt, Artificial Sequence
  Description of Artificial Sequence: Synthetic oligonucleotide
uauuugugucgugagaagc

SEQ ID NO: 1553490 - RNA, 19 nt, Artificial Sequence
  Description of Artificial Sequence: Synthetic oligonucleotide
aacuucuuacagaucuggc

SEQ ID NO: 1553491 - RNA, 19 nt, Artificial Sequence
  Description of Artificial Sequence: Synthetic oligonucleotide
aagaggugaagugccuugc

SEQ ID NO: 1553492 - RNA, 19 nt, Artificial Sequence
  Description of Artificial Sequence: Synthetic oligonucleotide
auauuaaguccuguugaac

SEQ ID NO: 1553493 - RNA, 19 nt, Artificial Sequence
  Description of Artificial Sequence: Synthetic oligonucleotide
ucucuuagcacugcuaugu

SEQ ID NO: 1553494 - RNA, 19 nt, Artificial Sequence
  Description of Artificial Sequence: Synthetic oligonucleotide
ugucugaacaugguguucc

SEQ ID NO: 1553495 - RNA, 19 nt, Artificial Sequence
  Description of Artificial Sequence: Synthetic oligonucleotide
uuacagaucuggcaccuga

SEQ ID NO: 1553496 - RNA, 19 nt, Artificial Sequence
  Description of Artificial Sequence: Synthetic oligonucleotide
cugaacaugguguuccaag

SEQ ID NO: 1553497 - RNA, 19 nt, Artificial Sequence
  Description of Artificial Sequence: Synthetic oligonucleotide
uugugcacuccaacgaugc

SEQ ID NO: 1553498 - RNA, 19 nt, Artificial Sequence
  Description of Artificial Sequence: Synthetic oligonucleotide
ucuuagcacugcuaugucc

SEQ ID NO: 1553499 - RNA, 19 nt, Artificial Sequence
  Description of Artificial Sequence: Synthetic oligonucleotide
uuaaguccuguugaacagg

SEQ ID NO: 1553500 - RNA, 19 nt, Artificial Sequence
  Description of Artificial Sequence: Synthetic oligonucleotide
auacuuuguccucaggaca

SEQ ID NO: 1553501 - RNA, 19 nt, Artificial Sequence
  Description of Artificial Sequence: Synthetic oligonucleotide
cacugguaaaucugaagcc

SEQ ID NO: 1553502 - RNA, 19 nt, Artificial Sequence
  Description of Artificial Sequence: Synthetic oligonucleotide
aacauacuuuguccucagg

SEQ ID NO: 1553503 - RNA, 19 nt, Artificial Sequence
  Description of Artificial Sequence: Synthetic oligonucleotide
ugucgugagaagcccuugg

SEQ ID NO: 1553504 - RNA, 19 nt, Artificial Sequence
  Description of Artificial Sequence: Synthetic oligonucleotide
cuugccaggagcagccucg

SEQ ID NO: 1553505 - RNA, 19 nt, Artificial Sequence
  Description of Artificial Sequence: Synthetic oligonucleotide
ucuuacauacucaccccac

SEQ ID NO: 1553506 - RNA, 19 nt, Artificial Sequence
  Description of Artificial Sequence: Synthetic oligonucleotide
uccuugugcacuccaacga

SEQ ID NO: 1553507 - RNA, 19 nt, Artificial Sequence
  Description of Artificial Sequence: Synthetic oligonucleotide
ugaggacgccaucaggaag

SEQ ID NO: 1553508 - RNA, 19 nt, Artificial Sequence
  Description of Artificial Sequence: Synthetic oligonucleotide
ugagguauuugugucguga

SEQ ID NO: 1553509 - RNA, 19 nt, Artificial Sequence
  Description of Artificial Sequence: Synthetic oligonucleotide
cuucguggggcccaggcgg

SEQ ID NO: 1553510 - RNA, 19 nt, Artificial Sequence
  Description of Artificial Sequence: Synthetic oligonucleotide
uuguagacggugcuguccu

SEQ ID NO: 1553511 - RNA, 19 nt, Artificial Sequence
  Description of Artificial Sequence: Synthetic oligonucleotide
ugaaccggccaccacugcc

SEQ ID NO: 1553512 - RNA, 19 nt, Artificial Sequence
  Description of Artificial Sequence: Synthetic oligonucleotide
uuugagguauuugugucgu

SEQ ID NO: 1553513 - RNA, 19 nt, Artificial Sequence
  Description of Artificial Sequence: Synthetic oligonucleotide
uucuuacagaucuggcacc

SEQ ID NO: 1553514 - RNA, 19 nt, Artificial Sequence
  Description of Artificial Sequence: Synthetic oligonucleotide
gaggggaaguccuugcuac

SEQ ID NO: 1553515 - RNA, 19 nt, Artificial Sequence
  Description of Artificial Sequence: Synthetic oligonucleotide
ugcuacagagauggcagcg

SEQ ID NO: 1553516 - RNA, 19 nt, Artificial Sequence
  Description of Artificial Sequence: Synthetic oligonucleotide
gccucuuacauacucaccc

SEQ ID NO: 1553517 - RNA, 19 nt, Artificial Sequence
  Description of Artificial Sequence: Synthetic oligonucleotide
cugaucacagggcauccgg

SEQ ID NO: 1553518 - RNA, 19 nt, Artificial Sequence
  Description of Artificial Sequence: Synthetic oligonucleotide
ggucauaacaaugagggga

SEQ ID NO: 1553519 - RNA, 19 nt, Artificial Sequence
  Description of Artificial Sequence: Synthetic oligonucleotide
cuugcucgaggucacacug

SEQ ID NO: 1553520 - RNA, 19 nt, Artificial Sequence
  Description of Artificial Sequence: Synthetic oligonucleotide
uuuugcgaauuucaacaua

SEQ ID NO: 1553521 - RNA, 19 nt, Artificial Sequence
  Description of Artificial Sequence: Synthetic oligonucleotide
cauggguagguaagugacg

SEQ ID NO: 1553522 - RNA, 19 nt, Artificial Sequence
  Description of Artificial Sequence: Synthetic oligonucleotide
uucaacauacuuuguccuc

SEQ ID NO: 1553523 - RNA, 19 nt, Artificial Sequence
  Description of Artificial Sequence: Synthetic oligonucleotide
cugcaagaacuucuuacag

SEQ ID NO: 1553524 - RNA, 19 nt, Artificial Sequence
  Description of Artificial Sequence: Synthetic oligonucleotide
aaucugaagccaggucugg

SEQ ID NO: 1553525 - RNA, 19 nt, Artificial Sequence
  Description of Artificial Sequence: Synthetic oligonucleotide
ucgaaggguggcuugccag

SEQ ID NO: 1553526 - RNA, 19 nt, Artificial Sequence
  Description of Artificial Sequence: Synthetic oligonucleotide
aggucauaacaaugagggg

SEQ ID NO: 1553527 - RNA, 19 nt, Artificial Sequence
  Description of Artificial Sequence: Synthetic oligonucleotide
uucguuggggcugugcugc

SEQ ID NO: 1553528 - RNA, 19 nt, Artificial Sequence
  Description of Artificial Sequence: Synthetic oligonucleotide
gcagcuacacucuaagccc

SEQ ID NO: 1553529 - RNA, 19 nt, Artificial Sequence
  Description of Artificial Sequence: Synthetic oligonucleotide
ucacagggcauccggaaaa

SEQ ID NO: 1553530 - RNA, 19 nt, Artificial Sequence
  Description of Artificial Sequence: Synthetic oligonucleotide
aggaaguguuaggaggccc

SEQ ID NO: 1553531 - RNA, 19 nt, Artificial Sequence
  Description of Artificial Sequence: Synthetic oligonucleotide
cuacacucuaagcccaggc

SEQ ID NO: 1553532 - RNA, 19 nt, Artificial Sequence
  Description of Artificial Sequence: Synthetic oligonucleotide
agagguaguacuauauuaa

SEQ ID NO: 1553533 - RNA, 19 nt, Artificial Sequence
  Description of Artificial Sequence: Synthetic oligonucleotide
uagacggugcuguccuucg

SEQ ID NO: 1553534 - RNA, 19 nt, Artificial Sequence
  Description of Artificial Sequence: Synthetic oligonucleotide
aggacacucuaagagguag

SEQ ID NO: 1553535 - RNA, 19 nt, Artificial Sequence
  Description of Artificial Sequence: Synthetic oligonucleotide
ccuuuugcgaauuucaaca

SEQ ID NO: 1553536 - RNA, 19 nt, Artificial Sequence
  Description of Artificial Sequence: Synthetic oligonucleotide
acacacuuguagacggugc

SEQ ID NO: 1553537 - RNA, 19 nt, Artificial Sequence
  Description of Artificial Sequence: Synthetic oligonucleotide
cagcggaacuuguaguugc

SEQ ID NO: 1553538 - RNA, 19 nt, Artificial Sequence
  Description of Artificial Sequence: Synthetic oligonucleotide
ugauccuuugagguauuug

SEQ ID NO: 1553539 - RNA, 19 nt, Artificial Sequence
  Description of Artificial Sequence: Synthetic oligonucleotide
cagcacggcgucuugcucg

SEQ ID NO: 1553540 - RNA, 19 nt, Artificial Sequence
  Description of Artificial Sequence: Synthetic oligonucleotide
agugacgccguagguagcg

SEQ ID NO: 1553541 - RNA, 19 nt, Artificial Sequence
  Description of Artificial Sequence: Synthetic oligonucleotide
cuugugcacuccaacgaug

SEQ ID NO: 1553542 - RNA, 19 nt, Artificial Sequence
  Description of Artificial Sequence: Synthetic oligonucleotide
acacucuaagagguaguac

SEQ ID NO: 1553543 - RNA, 19 nt, Artificial Sequence
  Description of Artificial Sequence: Synthetic oligonucleotide
aauccagccuggucauucu

SEQ ID NO: 1553544 - RNA, 19 nt, Artificial Sequence
  Description of Artificial Sequence: Synthetic oligonucleotide
guacuggugcacuuccaag

SEQ ID NO: 1553545 - RNA, 19 nt, Artificial Sequence
  Description of Artificial Sequence: Synthetic oligonucleotide
accugaaccggccaccacu

SEQ ID NO: 1553546 - RNA, 19 nt, Artificial Sequence
  Description of Artificial Sequence: Synthetic oligonucleotide
cucgaggucacacugguaa

SEQ ID NO: 1553547 - RNA, 19 nt, Artificial Sequence
  Description of Artificial Sequence: Synthetic oligonucleotide
gaucuggcaccugaaccgg

SEQ ID NO: 1553548 - RNA, 19 nt, Artificial Sequence
  Description of Artificial Sequence: Synthetic oligonucleotide
uccagccuggucauucuga

SEQ ID NO: 1553549 - RNA, 19 nt, Artificial Sequence
  Description of Artificial Sequence: Synthetic oligonucleotide
aggucacacugguaaaucu

SEQ ID NO: 1553550 - RNA, 19 nt, Artificial Sequence
  Description of Artificial Sequence: Synthetic oligonucleotide
ugaccacgcacuuguacac

SEQ ID NO: 1553551 - RNA, 19 nt, Artificial Sequence
  Description of Artificial Sequence: Synthetic oligonucleotide
cacucuaagagguaguacu

SEQ ID NO: 1553552 - RNA, 19 nt, Artificial Sequence
  Description of Artificial Sequence: Synthetic oligonucleotide
gauguagaccgggacagca

SEQ ID NO: 1553553 - RNA, 19 nt, Artificial Sequence
  Description of Artificial Sequence: Synthetic oligonucleotide
ugugcgcggcccuuuugcg

SEQ ID NO: 1553554 - RNA, 19 nt, Artificial Sequence
  Description of Artificial Sequence: Synthetic oligonucleotide
uuguaguugcccguaugug

SEQ ID NO: 1553555 - RNA, 19 nt, Artificial Sequence
  Description of Artificial Sequence: Synthetic oligonucleotide
agguaguacuauauuaagu

SEQ ID NO: 1553556 - RNA, 19 nt, Artificial Sequence
  Description of Artificial Sequence: Synthetic oligonucleotide
caaguacaagccuccauca

SEQ ID NO: 1553557 - RNA, 19 nt, Artificial Sequence
  Description of Artificial Sequence: Synthetic oligonucleotide
uugcgaauuucaacauacu

SEQ ID NO: 1553558 - RNA, 19 nt, Artificial Sequence
  Description of Artificial Sequence: Synthetic oligonucleotide
cugaccacgcacuuguaca

SEQ ID NO: 1553559 - RNA, 19 nt, Artificial Sequence
  Description of Artificial Sequence: Synthetic oligonucleotide
gacacacuuguagacggug

SEQ ID NO: 1553560 - RNA, 19 nt, Artificial Sequence
  Description of Artificial Sequence: Synthetic oligonucleotide
ggguagguaagugacgccg

SEQ ID NO: 1553561 - RNA, 19 nt, Artificial Sequence
  Description of Artificial Sequence: Synthetic oligonucleotide
uagguaagugacgccguag

SEQ ID NO: 1553562 - RNA, 19 nt, Artificial Sequence
  Description of Artificial Sequence: Synthetic oligonucleotide
ugccucuuacauacucacc

SEQ ID NO: 1553563 - RNA, 19 nt, Artificial Sequence
  Description of Artificial Sequence: Synthetic oligonucleotide
uccuucguggggcccaggc

SEQ ID NO: 1553564 - RNA, 19 nt, Artificial Sequence
  Description of Artificial Sequence: Synthetic oligonucleotide
cacacgcucccucagcccc

SEQ ID NO: 1553565 - RNA, 19 nt, Artificial Sequence
  Description of Artificial Sequence: Synthetic oligonucleotide
agcugaucacagggcaucc

SEQ ID NO: 1553566 - RNA, 19 nt, Artificial Sequence
  Description of Artificial Sequence: Synthetic oligonucleotide
gcagcggugauccuuugag

SEQ ID NO: 1553567 - RNA, 19 nt, Artificial Sequence
  Description of Artificial Sequence: Synthetic oligonucleotide
cacgcacuuguacaccugc

SEQ ID NO: 1553568 - RNA, 19 nt, Artificial Sequence
  Description of Artificial Sequence: Synthetic oligonucleotide
gugccucuuacauacucac

SEQ ID NO: 1553569 - RNA, 19 nt, Artificial Sequence
  Description of Artificial Sequence: Synthetic oligonucleotide
accgggacagcaagcaugg

SEQ ID NO: 1553570 - RNA, 19 nt, Artificial Sequence
  Description of Artificial Sequence: Synthetic oligonucleotide
gaggugaagugccuugcuc

SEQ ID NO: 1553571 - RNA, 19 nt, Artificial Sequence
  Description of Artificial Sequence: Synthetic oligonucleotide
gcauccggaaaauccagcc

SEQ ID NO: 1553572 - RNA, 19 nt, Artificial Sequence
  Description of Artificial Sequence: Synthetic oligonucleotide
gguauuugugucgugagaa

SEQ ID NO: 1553573 - RNA, 19 nt, Artificial Sequence
  Description of Artificial Sequence: Synthetic oligonucleotide
gucgugagaagcccuuggc

SEQ ID NO: 1553574 - RNA, 19 nt, Artificial Sequence
  Description of Artificial Sequence: Synthetic oligonucleotide
acggugcaugccucagacc

SEQ ID NO: 1553575 - RNA, 19 nt, Artificial Sequence
  Description of Artificial Sequence: Synthetic oligonucleotide
uugugucgugagaagcccu

SEQ ID NO: 1553576 - RNA, 19 nt, Artificial Sequence
  Description of Artificial Sequence: Synthetic oligonucleotide
aacuuguaguugcccguau

SEQ ID NO: 1553577 - RNA, 19 nt, Artificial Sequence
  Description of Artificial Sequence: Synthetic oligonucleotide
cuuacauacucaccccaca

SEQ ID NO: 1553578 - RNA, 19 nt, Artificial Sequence
  Description of Artificial Sequence: Synthetic oligonucleotide
ggggaagaccuucuggcag

SEQ ID NO: 1553579 - RNA, 19 nt, Artificial Sequence
  Description of Artificial Sequence: Synthetic oligonucleotide
ugugucgugagaagcccuu

SEQ ID NO: 1553580 - RNA, 19 nt, Artificial Sequence
  Description of Artificial Sequence: Synthetic oligonucleotide
caccccacaguccuuugag

SEQ ID NO: 1553581 - RNA, 19 nt, Artificial Sequence
  Description of Artificial Sequence: Synthetic oligonucleotide
gauggcagcgguagcucag

SEQ ID NO: 1553582 - RNA, 19 nt, Artificial Sequence
  Description of Artificial Sequence: Synthetic oligonucleotide
ugcuguccuucguuggggc

SEQ ID NO: 1553583 - RNA, 19 nt, Artificial Sequence
  Description of Artificial Sequence: Synthetic oligonucleotide
agugggucgggcaccgggc

SEQ ID NO: 1553584 - RNA, 19 nt, Artificial Sequence
  Description of Artificial Sequence: Synthetic oligonucleotide
ggaguacuggugcacuucc

SEQ ID NO: 1553585 - RNA, 19 nt, Artificial Sequence
  Description of Artificial Sequence: Synthetic oligonucleotide
ccauggguagguaagugac

SEQ ID NO: 1553586 - RNA, 19 nt, Artificial Sequence
  Description of Artificial Sequence: Synthetic oligonucleotide
gucauaacaaugaggggaa

SEQ ID NO: 1553587 - RNA, 19 nt, Artificial Sequence
  Description of Artificial Sequence: Synthetic oligonucleotide
cguaugugcacgcuggugc

SEQ ID NO: 1553588 - RNA, 19 nt, Artificial Sequence
  Description of Artificial Sequence: Synthetic oligonucleotide
cugugcgcggcccuuuugc

SEQ ID NO: 1553589 - RNA, 19 nt, Artificial Sequence
  Description of Artificial Sequence: Synthetic oligonucleotide
ugcccguaugugcacgcug

SEQ ID NO: 1553590 - RNA, 19 nt, Artificial Sequence
  Description of Artificial Sequence: Synthetic oligonucleotide
aggggaagaccuucuggca

SEQ ID NO: 1553591 - RNA, 19 nt, Artificial Sequence
  Description of Artificial Sequence: Synthetic oligonucleotide
gaaagguguccagcuuggg

SEQ ID NO: 1553592 - RNA, 19 nt, Artificial Sequence
  Description of Artificial Sequence: Synthetic oligonucleotide
uuuccaagccauggguacu

SEQ ID NO: 1553593 - RNA, 19 nt, Artificial Sequence
  Description of Artificial Sequence: Synthetic oligonucleotide
ugacacacuuguagacggu

SEQ ID NO: 1553594 - RNA, 19 nt, Artificial Sequence
  Description of Artificial Sequence: Synthetic oligonucleotide
caacgaugcugccuccacc

SEQ ID NO: 1553595 - RNA, 19 nt, Artificial Sequence
  Description of Artificial Sequence: Synthetic oligonucleotide
aguugcccguaugugcacg

SEQ ID NO: 1553596 - RNA, 19 nt, Artificial Sequence
  Description of Artificial Sequence: Synthetic oligonucleotide
agcggaacuuguaguugcc

SEQ ID NO: 1553597 - RNA, 19 nt, Artificial Sequence
  Description of Artificial Sequence: Synthetic oligonucleotide
uggcagcuacacucuaagc

SEQ ID NO: 1553598 - RNA, 19 nt, Artificial Sequence
  Description of Artificial Sequence: Synthetic oligonucleotide
cuaagagguaguacuauau

SEQ ID NO: 1553599 - RNA, 19 nt, Artificial Sequence
  Description of Artificial Sequence: Synthetic oligonucleotide
aagugacgccguagguagc

SEQ ID NO: 1553600 - RNA, 19 nt, Artificial Sequence
  Description of Artificial Sequence: Synthetic oligonucleotide
cucuuacauacucacccca

SEQ ID NO: 1553601 - RNA, 19 nt, Artificial Sequence
  Description of Artificial Sequence: Synthetic oligonucleotide
cgugagaagcccuuggcgc

SEQ ID NO: 1553602 - RNA, 19 nt, Artificial Sequence
  Description of Artificial Sequence: Synthetic oligonucleotide
gacagcaagcauggcacac

SEQ ID NO: 1553603 - RNA, 19 nt, Artificial Sequence
  Description of Artificial Sequence: Synthetic oligonucleotide
uccuccgggaaggucuccg

SEQ ID NO: 1553604 - RNA, 19 nt, Artificial Sequence
  Description of Artificial Sequence: Synthetic oligonucleotide
cacuuccaaggucauaaca

SEQ ID NO: 1553605 - RNA, 19 nt, Artificial Sequence
  Description of Artificial Sequence: Synthetic oligonucleotide
cacaguccuuugaggacgc

SEQ ID NO: 1553606 - RNA, 19 nt, Artificial Sequence
  Description of Artificial Sequence: Synthetic oligonucleotide
ugcgcggcccuuuugcgaa

SEQ ID NO: 1553607 - RNA, 19 nt, Artificial Sequence
  Description of Artificial Sequence: Synthetic oligonucleotide
aucacagggcauccggaaa

SEQ ID NO: 1553608 - RNA, 19 nt, Artificial Sequence
  Description of Artificial Sequence: Synthetic oligonucleotide
gaggucacacugguaaauc

SEQ ID NO: 1553609 - RNA, 19 nt, Artificial Sequence
  Description of Artificial Sequence: Synthetic oligonucleotide
cagugggucgggcaccggg

SEQ ID NO: 1553610 - RNA, 19 nt, Artificial Sequence
  Description of Artificial Sequence: Synthetic oligonucleotide
cuuguaguugcccguaugu

SEQ ID NO: 1553611 - RNA, 19 nt, Artificial Sequence
  Description of Artificial Sequence: Synthetic oligonucleotide
uugagguauuugugucgug

SEQ ID NO: 1553612 - RNA, 19 nt, Artificial Sequence
  Description of Artificial Sequence: Synthetic oligonucleotide
cuucugaccacgcacuugu

SEQ ID NO: 1553613 - RNA, 19 nt, Artificial Sequence
  Description of Artificial Sequence: Synthetic oligonucleotide
guugcccguaugugcacgc

SEQ ID NO: 1553614 - RNA, 19 nt, Artificial Sequence
  Description of Artificial Sequence: Synthetic oligonucleotide
ggaguggaguauuuauuga

SEQ ID NO: 1553615 - RNA, 19 nt, Artificial Sequence
  Description of Artificial Sequence: Synthetic oligonucleotide
ggucacacugguaaaucug

SEQ ID NO: 1553616 - RNA, 19 nt, Artificial Sequence
  Description of Artificial Sequence: Synthetic oligonucleotide
ugacgccguagguagcgcu

SEQ ID NO: 1553617 - RNA, 19 nt, Artificial Sequence
  Description of Artificial Sequence: Synthetic oligonucleotide
uucguggggcccaggcggc

SEQ ID NO: 1553618 - RNA, 19 nt, Artificial Sequence
  Description of Artificial Sequence: Synthetic oligonucleotide
uggagcuacggugcaugcc

SEQ ID NO: 1553619 - RNA, 19 nt, Artificial Sequence
  Description of Artificial Sequence: Synthetic oligonucleotide
caugccucagacccuguga

SEQ ID NO: 1553620 - RNA, 19 nt, Artificial Sequence
  Description of Artificial Sequence: Synthetic oligonucleotide
uggcacacgcucccucagc

SEQ ID NO: 1553621 - RNA, 19 nt, Artificial Sequence
  Description of Artificial Sequence: Synthetic oligonucleotide
ugcucgaaggguggcuugc

SEQ ID NO: 1553622 - RNA, 19 nt, Artificial Sequence
  Description of Artificial Sequence: Synthetic oligonucleotide
ucgggcaccgggcucuccu

SEQ ID NO: 1553623 - RNA, 19 nt, Artificial Sequence
  Description of Artificial Sequence: Synthetic oligonucleotide
ccucuuacauacucacccc

SEQ ID NO: 1553624 - RNA, 19 nt, Artificial Sequence
  Description of Artificial Sequence: Synthetic oligonucleotide
gacacucuaagagguagua

SEQ ID NO: 1553625 - RNA, 19 nt, Artificial Sequence
  Description of Artificial Sequence: Synthetic oligonucleotide
aguccuuugaggacgccau

SEQ ID NO: 1553626 - RNA, 19 nt, Artificial Sequence
  Description of Artificial Sequence: Synthetic oligonucleotide
uggacaggggaagcuguga

SEQ ID NO: 1553627 - RNA, 19 nt, Artificial Sequence
  Description of Artificial Sequence: Synthetic oligonucleotide
acgaggggaagaccuucug

SEQ ID NO: 1553628 - RNA, 19 nt, Artificial Sequence
  Description of Artificial Sequence: Synthetic oligonucleotide
gaggacgccaucaggaagu

SEQ ID NO: 1553629 - RNA, 19 nt, Artificial Sequence
  Description of Artificial Sequence: Synthetic oligonucleotide
gaaccggccaccacugcca

SEQ ID NO: 1553630 - RNA, 19 nt, Artificial Sequence
  Description of Artificial Sequence: Synthetic oligonucleotide
cucuuagcacugcuauguc

SEQ ID NO: 1553631 - RNA, 19 nt, Artificial Sequence
  Description of Artificial Sequence: Synthetic oligonucleotide
cacggcgucuugcucgaag

SEQ ID NO: 1553632 - RNA, 19 nt, Artificial Sequence
  Description of Artificial Sequence: Synthetic oligonucleotide
ucacgaggggaagaccuuc

SEQ ID NO: 1553633 - RNA, 19 nt, Artificial Sequence
  Description of Artificial Sequence: Synthetic oligonucleotide
auccagccuggucauucug

SEQ ID NO: 1553634 - RNA, 19 nt, Artificial Sequence
  Description of Artificial Sequence: Synthetic oligonucleotide
ugagugccucuuacauacu

SEQ ID NO: 1553635 - RNA, 19 nt, Artificial Sequence
  Description of Artificial Sequence: Synthetic oligonucleotide
gaccacgcacuuguacacc

SEQ ID NO: 1553636 - RNA, 19 nt, Artificial Sequence
  Description of Artificial Sequence: Synthetic oligonucleotide
guagaccgggacagcaagc

SEQ ID NO: 1553637 - RNA, 19 nt, Artificial Sequence
  Description of Artificial Sequence: Synthetic oligonucleotide
cucgggugcaggcccugcg

SEQ ID NO: 1553638 - RNA, 19 nt, Artificial Sequence
  Description of Artificial Sequence: Synthetic oligonucleotide
cagcuacacucuaagccca

SEQ ID NO: 1553639 - RNA, 19 nt, Artificial Sequence
  Description of Artificial Sequence: Synthetic oligonucleotide
gccucagacccugugagug

SEQ ID NO: 1553640 - RNA, 19 nt, Artificial Sequence
  Description of Artificial Sequence: Synthetic oligonucleotide
cagcugaucacagggcauc

SEQ ID NO: 1553641 - RNA, 19 nt, Artificial Sequence
  Description of Artificial Sequence: Synthetic oligonucleotide
ggagcuacggugcaugccu

SEQ ID NO: 1553642 - RNA, 19 nt, Artificial Sequence
  Description of Artificial Sequence: Synthetic oligonucleotide
aguccuugcuacagagaug

SEQ ID NO: 1553643 - RNA, 19 nt, Artificial Sequence
  Description of Artificial Sequence: Synthetic oligonucleotide
ucguuggggcugugcugcg

SEQ ID NO: 1553644 - RNA, 19 nt, Artificial Sequence
  Description of Artificial Sequence: Synthetic oligonucleotide
guagacggugcuguccuuc

SEQ ID NO: 1553645 - RNA, 19 nt, Artificial Sequence
  Description of Artificial Sequence: Synthetic oligonucleotide
acucuaagcccaggcugag

SEQ ID NO: 1553646 - RNA, 19 nt, Artificial Sequence
  Description of Artificial Sequence: Synthetic oligonucleotide
ggugaagugccuugcucga

SEQ ID NO: 1553647 - RNA, 19 nt, Artificial Sequence
  Description of Artificial Sequence: Synthetic oligonucleotide
gaagugccuugcucgaggu

SEQ ID NO: 1553648 - RNA, 19 nt, Artificial Sequence
  Description of Artificial Sequence: Synthetic oligonucleotide
cuuuugcgaauuucaacau

SEQ ID NO: 1553649 - RNA, 19 nt, Artificial Sequence
  Description of Artificial Sequence: Synthetic oligonucleotide
acugugcgcggcccuuuug

SEQ ID NO: 1553650 - RNA, 19 nt, Artificial Sequence
  Description of Artificial Sequence: Synthetic oligonucleotide
gccauggguagguaaguga

SEQ ID NO: 1553651 - RNA, 19 nt, Artificial Sequence
  Description of Artificial Sequence: Synthetic oligonucleotide
gugaagugccuugcucgag

SEQ ID NO: 1553652 - RNA, 19 nt, Artificial Sequence
  Description of Artificial Sequence: Synthetic oligonucleotide
cucggugugcccgggcacc

SEQ ID NO: 1553653 - RNA, 19 nt, Artificial Sequence
  Description of Artificial Sequence: Synthetic oligonucleotide
ugggaguacuggugcacuu

SEQ ID NO: 1553654 - RNA, 19 nt, Artificial Sequence
  Description of Artificial Sequence: Synthetic oligonucleotide
aaccggccaccacugccau

SEQ ID NO: 1553655 - RNA, 19 nt, Artificial Sequence
  Description of Artificial Sequence: Synthetic oligonucleotide
ggaaguguuaggaggccca

SEQ ID NO: 1553656 - RNA, 19 nt, Artificial Sequence
  Description of Artificial Sequence: Synthetic oligonucleotide
gcccguaugugcacgcugg

SEQ ID NO: 1553657 - RNA, 19 nt, Artificial Sequence
  Description of Artificial Sequence: Synthetic oligonucleotide
gaaguguuaggaggcccaa

SEQ ID NO: 1553658 - RNA, 19 nt, Artificial Sequence
  Description of Artificial Sequence: Synthetic oligonucleotide
guaugugcacgcuggugcu

SEQ ID NO: 1553659 - RNA, 19 nt, Artificial Sequence
  Description of Artificial Sequence: Synthetic oligonucleotide
guagguaagugacgccgua

SEQ ID NO: 1553660 - RNA, 19 nt, Artificial Sequence
  Description of Artificial Sequence: Synthetic oligonucleotide
agaccgggacagcaagcau

SEQ ID NO: 1553661 - RNA, 19 nt, Artificial Sequence
  Description of Artificial Sequence: Synthetic oligonucleotide
agcuucugaccacgcacuu

SEQ ID NO: 1553662 - RNA, 19 nt, Artificial Sequence
  Description of Artificial Sequence: Synthetic oligonucleotide
aaaauccagccuggucauu

SEQ ID NO: 1553663 - RNA, 19 nt, Artificial Sequence
  Description of Artificial Sequence: Synthetic oligonucleotide
agcuacacucuaagcccag

SEQ ID NO: 1553664 - RNA, 19 nt, Artificial Sequence
  Description of Artificial Sequence: Synthetic oligonucleotide
gguaaaucugaagccaggu

SEQ ID NO: 1553665 - RNA, 19 nt, Artificial Sequence
  Description of Artificial Sequence: Synthetic oligonucleotide
gcgucuugcucgaagggug

SEQ ID NO: 1553666 - RNA, 19 nt, Artificial Sequence
  Description of Artificial Sequence: Synthetic oligonucleotide
gcgaauuucaacauacuuu

SEQ ID NO: 1553667 - RNA, 19 nt, Artificial Sequence
  Description of Artificial Sequence: Synthetic oligonucleotide
cgaaggguggcuugccagg

SEQ ID NO: 1553668 - RNA, 19 nt, Artificial Sequence
  Description of Artificial Sequence: Synthetic oligonucleotide
cugaaccggccaccacugc

SEQ ID NO: 1553669 - RNA, 19 nt, Artificial Sequence
  Description of Artificial Sequence: Synthetic oligonucleotide
ggaacuuguaguugcccgu

SEQ ID NO: 1553670 - RNA, 19 nt, Artificial Sequence
  Description of Artificial Sequence: Synthetic oligonucleotide
cuccaacgaugcugccucc

SEQ ID NO: 1553671 - RNA, 19 nt, Artificial Sequence
  Description of Artificial Sequence: Synthetic oligonucleotide
ggcccuuuugcgaauuuca

SEQ ID NO: 1553672 - RNA, 19 nt, Artificial Sequence
  Description of Artificial Sequence: Synthetic oligonucleotide
ggcauccggaaaauccagc

SEQ ID NO: 1553673 - RNA, 19 nt, Artificial Sequence
  Description of Artificial Sequence: Synthetic oligonucleotide
agacggugcuguccuucgu

SEQ ID NO: 1553674 - RNA, 19 nt, Artificial Sequence
  Description of Artificial Sequence: Synthetic oligonucleotide
gcuacacucuaagcccagg

SEQ ID NO: 1553675 - RNA, 19 nt, Artificial Sequence
  Description of Artificial Sequence: Synthetic oligonucleotide
gcagcggaacuuguaguug

SEQ ID NO: 1553676 - RNA, 19 nt, Artificial Sequence
  Description of Artificial Sequence: Synthetic oligonucleotide
uucugaccacgcacuugua

SEQ ID NO: 1553677 - RNA, 19 nt, Artificial Sequence
  Description of Artificial Sequence: Synthetic oligonucleotide
cauccggaaaauccagccu

SEQ ID NO: 1553678 - RNA, 19 nt, Artificial Sequence
  Description of Artificial Sequence: Synthetic oligonucleotide
ccuugcuacagagauggca

SEQ ID NO: 1553679 - RNA, 19 nt, Artificial Sequence
  Description of Artificial Sequence: Synthetic oligonucleotide
agcgcucacgaggggaaga

SEQ ID NO: 1553680 - RNA, 19 nt, Artificial Sequence
  Description of Artificial Sequence: Synthetic oligonucleotide
aucucucuuagcacugcua

SEQ ID NO: 1553681 - RNA, 19 nt, Artificial Sequence
  Description of Artificial Sequence: Synthetic oligonucleotide
ccuucguggggcccaggcg

SEQ ID NO: 1553682 - RNA, 19 nt, Artificial Sequence
  Description of Artificial Sequence: Synthetic oligonucleotide
guacuauauuaaguccugu

SEQ ID NO: 1553683 - RNA, 19 nt, Artificial Sequence
  Description of Artificial Sequence: Synthetic oligonucleotide
uguagacggugcuguccuu

SEQ ID NO: 1553684 - RNA, 19 nt, Artificial Sequence
  Description of Artificial Sequence: Synthetic oligonucleotide
gugucgugagaagcccuug

SEQ ID NO: 1553685 - RNA, 19 nt, Artificial Sequence
  Description of Artificial Sequence: Synthetic oligonucleotide
auguagaccgggacagcaa

SEQ ID NO: 1553686 - RNA, 19 nt, Artificial Sequence
  Description of Artificial Sequence: Synthetic oligonucleotide
gggcauccggaaaauccag

SEQ ID NO: 1553687 - RNA, 19 nt, Artificial Sequence
  Description of Artificial Sequence: Synthetic oligonucleotide
uacugugcgcggcccuuuu

SEQ ID NO: 1553688 - RNA, 19 nt, Artificial Sequence
  Description of Artificial Sequence: Synthetic oligonucleotide
cccugcggccuucagcucc

SEQ ID NO: 1553689 - RNA, 19 nt, Artificial Sequence
  Description of Artificial Sequence: Synthetic oligonucleotide
gggcuugcaaguccuuguc

SEQ ID NO: 1553690 - RNA, 19 nt, Artificial Sequence
  Description of Artificial Sequence: Synthetic oligonucleotide
uugcccguaugugcacgcu

SEQ ID NO: 1553691 - RNA, 19 nt, Artificial Sequence
  Description of Artificial Sequence: Synthetic oligonucleotide
cuacggugcaugccucaga

SEQ ID NO: 1553692 - RNA, 19 nt, Artificial Sequence
  Description of Artificial Sequence: Synthetic oligonucleotide
ggcugagugccucuuacau

SEQ ID NO: 1553693 - RNA, 19 nt, Artificial Sequence
  Description of Artificial Sequence: Synthetic oligonucleotide
gguggcuugccaggagcag

SEQ ID NO: 1553694 - RNA, 19 nt, Artificial Sequence
  Description of Artificial Sequence: Synthetic oligonucleotide
gugcgcggcccuuuugcga

SEQ ID NO: 1553695 - RNA, 19 nt, Artificial Sequence
  Description of Artificial Sequence: Synthetic oligonucleotide
cgcgcagcggaacuuguag

SEQ ID NO: 1553696 - RNA, 19 nt, Artificial Sequence
  Description of Artificial Sequence: Synthetic oligonucleotide
acgcacuuguacaccugcu

SEQ ID NO: 1553697 - RNA, 19 nt, Artificial Sequence
  Description of Artificial Sequence: Synthetic oligonucleotide
ucggugugcccgggcacca

SEQ ID NO: 1553698 - RNA, 19 nt, Artificial Sequence
  Description of Artificial Sequence: Synthetic oligonucleotide
gguuggagcccagacccuc

SEQ ID NO: 1553699 - RNA, 19 nt, Artificial Sequence
  Description of Artificial Sequence: Synthetic oligonucleotide
caccgggcucuccuccuug

SEQ ID NO: 1553700 - RNA, 19 nt, Artificial Sequence
  Description of Artificial Sequence: Synthetic oligonucleotide
cguagguagcgcucacgag

SEQ ID NO: 1553701 - RNA, 19 nt, Artificial Sequence
  Description of Artificial Sequence: Synthetic oligonucleotide
gcacugcuauguccuggag

SEQ ID NO: 1553702 - RNA, 19 nt, Artificial Sequence
  Description of Artificial Sequence: Synthetic oligonucleotide
caucucucuuagcacugcu

SEQ ID NO: 1553703 - RNA, 19 nt, Artificial Sequence
  Description of Artificial Sequence: Synthetic oligonucleotide
caccugaaccggccaccac

SEQ ID NO: 1553704 - RNA, 19 nt, Artificial Sequence
  Description of Artificial Sequence: Synthetic oligonucleotide
gccguagguagcgcucacg

SEQ ID NO: 1553705 - RNA, 19 nt, Artificial Sequence
  Description of Artificial Sequence: Synthetic oligonucleotide
gugacgccguagguagcgc

SEQ ID NO: 1553706 - RNA, 19 nt, Artificial Sequence
  Description of Artificial Sequence: Synthetic oligonucleotide
gacccucggugugcccggg

SEQ ID NO: 1553707 - RNA, 19 nt, Artificial Sequence
  Description of Artificial Sequence: Synthetic oligonucleotide
ccaucucucuuagcacugc

SEQ ID NO: 1553708 - RNA, 19 nt, Artificial Sequence
  Description of Artificial Sequence: Synthetic oligonucleotide
cacgaggggaagaccuucu

SEQ ID NO: 1553709 - RNA, 19 nt, Artificial Sequence
  Description of Artificial Sequence: Synthetic oligonucleotide
gggcaccgggcucuccucc

SEQ ID NO: 1553710 - RNA, 19 nt, Artificial Sequence
  Description of Artificial Sequence: Synthetic oligonucleotide
uccgggcuugcaaguccuu

SEQ ID NO: 1553711 - RNA, 19 nt, Artificial Sequence
  Description of Artificial Sequence: Synthetic oligonucleotide
gcugucugaacaugguguu

SEQ ID NO: 1553712 - RNA, 19 nt, Artificial Sequence
  Description of Artificial Sequence: Synthetic oligonucleotide
ggcagcggugauccuuuga

SEQ ID NO: 1553713 - RNA, 19 nt, Artificial Sequence
  Description of Artificial Sequence: Synthetic oligonucleotide
cggugcuguccuucguugg

SEQ ID NO: 1553714 - RNA, 19 nt, Artificial Sequence
  Description of Artificial Sequence: Synthetic oligonucleotide
agguuggagcccagacccu

SEQ ID NO: 1553715 - RNA, 19 nt, Artificial Sequence
  Description of Artificial Sequence: Synthetic oligonucleotide
cacuccaacgaugcugccu

SEQ ID NO: 1553716 - RNA, 19 nt, Artificial Sequence
  Description of Artificial Sequence: Synthetic oligonucleotide
gcggugauccuuugaggua

SEQ ID NO: 1553717 - RNA, 19 nt, Artificial Sequence
  Description of Artificial Sequence: Synthetic oligonucleotide
acgccaucaggaaguguua

SEQ ID NO: 1553718 - RNA, 19 nt, Artificial Sequence
  Description of Artificial Sequence: Synthetic oligonucleotide
cuccgggcuugcaaguccu

SEQ ID NO: 1553719 - RNA, 19 nt, Artificial Sequence
  Description of Artificial Sequence: Synthetic oligonucleotide
gcucgaaggguggcuugcc

SEQ ID NO: 1553720 - RNA, 19 nt, Artificial Sequence
  Description of Artificial Sequence: Synthetic oligonucleotide
gugugcccgggcaccacca

SEQ ID NO: 1553721 - RNA, 19 nt, Artificial Sequence
  Description of Artificial Sequence: Synthetic oligonucleotide
gugggucgggcaccgggcu

SEQ ID NO: 1553722 - RNA, 19 nt, Artificial Sequence
  Description of Artificial Sequence: Synthetic oligonucleotide
gcgcucacgaggggaagac

SEQ ID NO: 1553723 - RNA, 19 nt, Artificial Sequence
  Description of Artificial Sequence: Synthetic oligonucleotide
ggacacucuaagagguagu

SEQ ID NO: 1553724 - RNA, 19 nt, Artificial Sequence
  Description of Artificial Sequence: Synthetic oligonucleotide
gggcccggcggcugaagga

SEQ ID NO: 1553725 - RNA, 19 nt, Artificial Sequence
  Description of Artificial Sequence: Synthetic oligonucleotide
guccuucguggggcccagg

SEQ ID NO: 1553726 - RNA, 19 nt, Artificial Sequence
  Description of Artificial Sequence: Synthetic oligonucleotide
gcaccugaaccggccacca

SEQ ID NO: 1553727 - RNA, 19 nt, Artificial Sequence
  Description of Artificial Sequence: Synthetic oligonucleotide
ggggaacaucugggcacag

SEQ ID NO: 1553728 - RNA, 19 nt, Artificial Sequence
  Description of Artificial Sequence: Synthetic oligonucleotide
gcgcagcggaacuuguagu

SEQ ID NO: 1553729 - RNA, 19 nt, Artificial Sequence
  Description of Artificial Sequence: Synthetic oligonucleotide
ccuugugcacuccaacgau

SEQ ID NO: 1553730 - RNA, 19 nt, Artificial Sequence
  Description of Artificial Sequence: Synthetic oligonucleotide
gcccgcgcagcggaacuug

SEQ ID NO: 1553731 - RNA, 19 nt, Artificial Sequence
  Description of Artificial Sequence: Synthetic oligonucleotide
cucuaagcccaggcugagu

SEQ ID NO: 1553732 - RNA, 19 nt, Artificial Sequence
  Description of Artificial Sequence: Synthetic oligonucleotide
gucgggcaccgggcucucc

SEQ ID NO: 1553733 - RNA, 19 nt, Artificial Sequence
  Description of Artificial Sequence: Synthetic oligonucleotide
aggcggcagcggugauccu

SEQ ID NO: 1553734 - RNA, 19 nt, Artificial Sequence
  Description of Artificial Sequence: Synthetic oligonucleotide
cccuuggcgcagcccgcgc

SEQ ID NO: 1553735 - RNA, 19 nt, Artificial Sequence
  Description of Artificial Sequence: Synthetic oligonucleotide
cagcccgcgcagcggaacu

SEQ ID NO: 1553736 - RNA, 19 nt, Artificial Sequence
  Description of Artificial Sequence: Synthetic oligonucleotide
ggugcacuuccaaggucau

SEQ ID NO: 1553737 - RNA, 19 nt, Artificial Sequence
  Description of Artificial Sequence: Synthetic oligonucleotide
gguacugugcgcggcccuu

SEQ ID NO: 1553738 - RNA, 19 nt, Artificial Sequence
  Description of Artificial Sequence: Synthetic oligonucleotide
guccuucguuggggcugug

SEQ ID NO: 1553739 - RNA, 19 nt, Artificial Sequence
  Description of Artificial Sequence: Synthetic oligonucleotide
cgcagcggaacuuguaguu

SEQ ID NO: 1553740 - RNA, 19 nt, Artificial Sequence
  Description of Artificial Sequence: Synthetic oligonucleotide
guacugugcgcggcccuuu

SEQ ID NO: 1553741 - RNA, 19 nt, Artificial Sequence
  Description of Artificial Sequence: Synthetic oligonucleotide
ccagugggucgggcaccgg

SEQ ID NO: 1553742 - RNA, 19 nt, Artificial Sequence
  Description of Artificial Sequence: Synthetic oligonucleotide
gcucgaggucacacuggua

SEQ ID NO: 1553743 - RNA, 19 nt, Artificial Sequence
  Description of Artificial Sequence: Synthetic oligonucleotide
cgccguagguagcgcucac

SEQ ID NO: 1553744 - RNA, 19 nt, Artificial Sequence
  Description of Artificial Sequence: Synthetic oligonucleotide
cccguaugugcacgcuggu

SEQ ID NO: 1553745 - RNA, 19 nt, Artificial Sequence
  Description of Artificial Sequence: Synthetic oligonucleotide
ccggaaaauccagccuggu

SEQ ID NO: 1553746 - RNA, 19 nt, Artificial Sequence
  Description of Artificial Sequence: Synthetic oligonucleotide
ccgcgcagcggaacuugua

SEQ ID NO: 1553747 - RNA, 19 nt, Artificial Sequence
  Description of Artificial Sequence: Synthetic oligonucleotide
cccgcgcagcggaacuugu

SEQ ID NO: 1553748 - RNA, 19 nt, Artificial Sequence
  Description of Artificial Sequence: Synthetic oligonucleotide
gcggcccuuuugcgaauuu

SEQ ID NO: 1553749 - RNA, 19 nt, Artificial Sequence
  Description of Artificial Sequence: Synthetic oligonucleotide
gcgcggcccuuuugcgaau

SEQ ID NO: 1553750 - RNA, 19 nt, Artificial Sequence
  Description of Artificial Sequence: Synthetic oligonucleotide
gcacggcgucuugcucgaa

SEQ ID NO: 1553751 - RNA, 19 nt, Artificial Sequence
  Description of Artificial Sequence: Synthetic oligonucleotide
cgcggcccuuuugcgaauu

SEQ ID NO: 1553752 - RNA, 19 nt, Artificial Sequence
  Description of Artificial Sequence: Synthetic oligonucleotide
uuauuguuaagucaaagag

SEQ ID NO: 1553753 - RNA, 19 nt, Artificial Sequence
  Description of Artificial Sequence: Synthetic oligonucleotide
aacauugcuagccauuucc

SEQ ID NO: 1553754 - RNA, 19 nt, Artificial Sequence
  Description of Artificial Sequence: Synthetic oligonucleotide
aaucaaugaacacaggaag

SEQ ID NO: 1553755 - RNA, 19 nt, Artificial Sequence
  Description of Artificial Sequence: Synthetic oligonucleotide
uucguuaacauauugaaca

SEQ ID NO: 1553756 - RNA, 19 nt, Artificial Sequence
  Description of Artificial Sequence: Synthetic oligonucleotide
uauuguuaagucaaagagg

SEQ ID NO: 1553757 - RNA, 19 nt, Artificial Sequence
  Description of Artificial Sequence: Synthetic oligonucleotide
ugaaaauggaacuaggcgc

SEQ ID NO: 1553758 - RNA, 19 nt, Artificial Sequence
  Description of Artificial Sequence: Synthetic oligonucleotide
aauacacgggaauucaugg

SEQ ID NO: 1553759 - RNA, 19 nt, Artificial Sequence
  Description of Artificial Sequence: Synthetic oligonucleotide
aaaacuacuaaggagcauc

SEQ ID NO: 1553760 - RNA, 19 nt, Artificial Sequence
  Description of Artificial Sequence: Synthetic oligonucleotide
auuaauaucuaaaaccugg

SEQ ID NO: 1553761 - RNA, 19 nt, Artificial Sequence
  Description of Artificial Sequence: Synthetic oligonucleotide
uuaacauauugaacaaagg

SEQ ID NO: 1553762 - RNA, 19 nt, Artificial Sequence
  Description of Artificial Sequence: Synthetic oligonucleotide
ugugcugaagauacuaggg

SEQ ID NO: 1553763 - RNA, 19 nt, Artificial Sequence
  Description of Artificial Sequence: Synthetic oligonucleotide
aaggucaucuccuuucaac

SEQ ID NO: 1553764 - RNA, 19 nt, Artificial Sequence
  Description of Artificial Sequence: Synthetic oligonucleotide
aauggaacuaggcgcaagg

SEQ ID NO: 1553765 - RNA, 19 nt, Artificial Sequence
  Description of Artificial Sequence: Synthetic oligonucleotide
aaauacucacaagaguucg

SEQ ID NO: 1553766 - RNA, 19 nt, Artificial Sequence
  Description of Artificial Sequence: Synthetic oligonucleotide
gugaaaauggaacuaggcg

SEQ ID NO: 1553767 - RNA, 19 nt, Artificial Sequence
  Description of Artificial Sequence: Synthetic oligonucleotide
aaugaauacacgggaauuc

SEQ ID NO: 1553768 - RNA, 19 nt, Artificial Sequence
  Description of Artificial Sequence: Synthetic oligonucleotide
uuguugguaacauugcuag

SEQ ID NO: 1553769 - RNA, 19 nt, Artificial Sequence
  Description of Artificial Sequence: Synthetic oligonucleotide
uuuguuuuaucugagucag

SEQ ID NO: 1553770 - RNA, 19 nt, Artificial Sequence
  Description of Artificial Sequence: Synthetic oligonucleotide
aaaugaauaacaggguaag

SEQ ID NO: 1553771 - RNA, 19 nt, Artificial Sequence
  Description of Artificial Sequence: Synthetic oligonucleotide
uaaggagcaucaaaggaag

SEQ ID NO: 1553772 - RNA, 19 nt, Artificial Sequence
  Description of Artificial Sequence: Synthetic oligonucleotide
uccgcuaugugcuuaagag

SEQ ID NO: 1553773 - RNA, 19 nt, Artificial Sequence
  Description of Artificial Sequence: Synthetic oligonucleotide
cuacuaaggagcaucaaag

SEQ ID NO: 1553774 - RNA, 19 nt, Artificial Sequence
  Description of Artificial Sequence: Synthetic oligonucleotide
uacaggguaagacuuaaca

SEQ ID NO: 1553775 - RNA, 19 nt, Artificial Sequence
  Description of Artificial Sequence: Synthetic oligonucleotide
augugcuuaagagucaucc

SEQ ID NO: 1553776 - RNA, 19 nt, Artificial Sequence
  Description of Artificial Sequence: Synthetic oligonucleotide
ucacuuuuggcucugcagc

SEQ ID NO: 1553777 - RNA, 19 nt, Artificial Sequence
  Description of Artificial Sequence: Synthetic oligonucleotide
uagaaggcaccacagcucg

SEQ ID NO: 1553778 - RNA, 19 nt, Artificial Sequence
  Description of Artificial Sequence: Synthetic oligonucleotide
cacgcuggcguuuagaagg

SEQ ID NO: 1553779 - RNA, 19 nt, Artificial Sequence
  Description of Artificial Sequence: Synthetic oligonucleotide
uaauaucuaaaaccuggcc

SEQ ID NO: 1553780 - RNA, 19 nt, Artificial Sequence
  Description of Artificial Sequence: Synthetic oligonucleotide
agauuaauaucuaaaaccu

SEQ ID NO: 1553781 - RNA, 19 nt, Artificial Sequence
  Description of Artificial Sequence: Synthetic oligonucleotide
ucuuucguuaacauauuga

SEQ ID NO: 1553782 - RNA, 19 nt, Artificial Sequence
  Description of Artificial Sequence: Synthetic oligonucleotide
uguuaagucaaagagguau

SEQ ID NO: 1553783 - RNA, 19 nt, Artificial Sequence
  Description of Artificial Sequence: Synthetic oligonucleotide
ucuaaacuccgcuaugugc

SEQ ID NO: 1553784 - RNA, 19 nt, Artificial Sequence
  Description of Artificial Sequence: Synthetic oligonucleotide
uaaguuucuaaacuccgcu

SEQ ID NO: 1553785 - RNA, 19 nt, Artificial Sequence
  Description of Artificial Sequence: Synthetic oligonucleotide
uccaaaucaaaugaggaac

SEQ ID NO: 1553786 - RNA, 19 nt, Artificial Sequence
  Description of Artificial Sequence: Synthetic oligonucleotide
uguacauccugucauagua

SEQ ID NO: 1553787 - RNA, 19 nt, Artificial Sequence
  Description of Artificial Sequence: Synthetic oligonucleotide
agugaaaauggaacuaggc

SEQ ID NO: 1553788 - RNA, 19 nt, Artificial Sequence
  Description of Artificial Sequence: Synthetic oligonucleotide
agagagagagagaagacac

SEQ ID NO: 1553789 - RNA, 19 nt, Artificial Sequence
  Description of Artificial Sequence: Synthetic oligonucleotide
aggguaaguuucuaaacuc

SEQ ID NO: 1553790 - RNA, 19 nt, Artificial Sequence
  Description of Artificial Sequence: Synthetic oligonucleotide
cauccugucauaguaaucc

SEQ ID NO: 1553791 - RNA, 19 nt, Artificial Sequence
  Description of Artificial Sequence: Synthetic oligonucleotide
aguaaucccgcugaaaguc

SEQ ID NO: 1553792 - RNA, 19 nt, Artificial Sequence
  Description of Artificial Sequence: Synthetic oligonucleotide
gagaaugugcugaagauac

SEQ ID NO: 1553793 - RNA, 19 nt, Artificial Sequence
  Description of Artificial Sequence: Synthetic oligonucleotide
ugcuuaagagucauccucc

SEQ ID NO: 1553794 - RNA, 19 nt, Artificial Sequence
  Description of Artificial Sequence: Synthetic oligonucleotide
ugggcgaacagugagaaug

SEQ ID NO: 1553795 - RNA, 19 nt, Artificial Sequence
  Description of Artificial Sequence: Synthetic oligonucleotide
agagguaucaaaauuaaaa

SEQ ID NO: 1553796 - RNA, 19 nt, Artificial Sequence
  Description of Artificial Sequence: Synthetic oligonucleotide
acuaaggagcaucaaagga

SEQ ID NO: 1553797 - RNA, 19 nt, Artificial Sequence
  Description of Artificial Sequence: Synthetic oligonucleotide
aguucggagagagagagag

SEQ ID NO: 1553798 - RNA, 19 nt, Artificial Sequence
  Description of Artificial Sequence: Synthetic oligonucleotide
acaucuccgcugcagaucg

SEQ ID NO: 1553799 - RNA, 19 nt, Artificial Sequence
  Description of Artificial Sequence: Synthetic oligonucleotide
gaugauaagguuucucaca

SEQ ID NO: 1553800 - RNA, 19 nt, Artificial Sequence
  Description of Artificial Sequence: Synthetic oligonucleotide
cuuucaucucucacaagcg

SEQ ID NO: 1553801 - RNA, 19 nt, Artificial Sequence
  Description of Artificial Sequence: Synthetic oligonucleotide
uccugucauaguaaucccg

SEQ ID NO: 1553802 - RNA, 19 nt, Artificial Sequence
  Description of Artificial Sequence: Synthetic oligonucleotide
auaagguuucucacaaagc

SEQ ID NO: 1553803 - RNA, 19 nt, Artificial Sequence
  Description of Artificial Sequence: Synthetic oligonucleotide
ugcugaagauacuagggga

SEQ ID NO: 1553804 - RNA, 19 nt, Artificial Sequence
  Description of Artificial Sequence: Synthetic oligonucleotide
ucgaggaucugucuuguug

SEQ ID NO: 1553805 - RNA, 19 nt, Artificial Sequence
  Description of Artificial Sequence: Synthetic oligonucleotide
aagcaaaacuuacagggua

SEQ ID NO: 1553806 - RNA, 19 nt, Artificial Sequence
  Description of Artificial Sequence: Synthetic oligonucleotide
guagaggggacggagaagg

SEQ ID NO: 1553807 - RNA, 19 nt, Artificial Sequence
  Description of Artificial Sequence: Synthetic oligonucleotide
ugaugauaagguuucucac

SEQ ID NO: 1553808 - RNA, 19 nt, Artificial Sequence
  Description of Artificial Sequence: Synthetic oligonucleotide
uucuuucguuaacauauug

SEQ ID NO: 1553809 - RNA, 19 nt, Artificial Sequence
  Description of Artificial Sequence: Synthetic oligonucleotide
aucaaugaacacaggaagg

SEQ ID NO: 1553810 - RNA, 19 nt, Artificial Sequence
  Description of Artificial Sequence: Synthetic oligonucleotide
agcccuuaugcacagagca

SEQ ID NO: 1553811 - RNA, 19 nt, Artificial Sequence
  Description of Artificial Sequence: Synthetic oligonucleotide
gauuaauaucuaaaaccug

SEQ ID NO: 1553812 - RNA, 19 nt, Artificial Sequence
  Description of Artificial Sequence: Synthetic oligonucleotide
acuacuaaggagcaucaaa

SEQ ID NO: 1553813 - RNA, 19 nt, Artificial Sequence
  Description of Artificial Sequence: Synthetic oligonucleotide
aagauacuaggggagagga

SEQ ID NO: 1553814 - RNA, 19 nt, Artificial Sequence
  Description of Artificial Sequence: Synthetic oligonucleotide
ucauccuccccauuggcgc

SEQ ID NO: 1553815 - RNA, 19 nt, Artificial Sequence
  Description of Artificial Sequence: Synthetic oligonucleotide
aaugugcugaagauacuag

SEQ ID NO: 1553816 - RNA, 19 nt, Artificial Sequence
  Description of Artificial Sequence: Synthetic oligonucleotide
cuucuugaccacaagugug

SEQ ID NO: 1553817 - RNA, 19 nt, Artificial Sequence
  Description of Artificial Sequence: Synthetic oligonucleotide
aauacucacaagaguucgg

SEQ ID NO: 1553818 - RNA, 19 nt, Artificial Sequence
  Description of Artificial Sequence: Synthetic oligonucleotide
gugcugaagauacuagggg

SEQ ID NO: 1553819 - RNA, 19 nt, Artificial Sequence
  Description of Artificial Sequence: Synthetic oligonucleotide
aacugaguagaggggacgg

SEQ ID NO: 1553820 - RNA, 19 nt, Artificial Sequence
  Description of Artificial Sequence: Synthetic oligonucleotide
uggaacuaggcgcaaggca

SEQ ID NO: 1553821 - RNA, 19 nt, Artificial Sequence
  Description of Artificial Sequence: Synthetic oligonucleotide
cacgggaauucauggaucg

SEQ ID NO: 1553822 - RNA, 19 nt, Artificial Sequence
  Description of Artificial Sequence: Synthetic oligonucleotide
uucggagagagagagagaa

SEQ ID NO: 1553823 - RNA, 19 nt, Artificial Sequence
  Description of Artificial Sequence: Synthetic oligonucleotide
gagagguguuuccagaaac

SEQ ID NO: 1553824 - RNA, 19 nt, Artificial Sequence
  Description of Artificial Sequence: Synthetic oligonucleotide
aauaacaggguaaguuucu

SEQ ID NO: 1553825 - RNA, 19 nt, Artificial Sequence
  Description of Artificial Sequence: Synthetic oligonucleotide
guaaaugaauaacagggua

SEQ ID NO: 1553826 - RNA, 19 nt, Artificial Sequence
  Description of Artificial Sequence: Synthetic oligonucleotide
ucgagcaauaggaggagga

SEQ ID NO: 1553827 - RNA, 19 nt, Artificial Sequence
  Description of Artificial Sequence: Synthetic oligonucleotide
cucacaagcgccuagguaa

SEQ ID NO: 1553828 - RNA, 19 nt, Artificial Sequence
  Description of Artificial Sequence: Synthetic oligonucleotide
acgucagacuucuugacca

SEQ ID NO: 1553829 - RNA, 19 nt, Artificial Sequence
  Description of Artificial Sequence: Synthetic oligonucleotide
cuaaggagcaucaaaggaa

SEQ ID NO: 1553830 - RNA, 19 nt, Artificial Sequence
  Description of Artificial Sequence: Synthetic oligonucleotide
caaagagguaucaaaauua

SEQ ID NO: 1553831 - RNA, 19 nt, Artificial Sequence
  Description of Artificial Sequence: Synthetic oligonucleotide
accacaaguguguugagau

SEQ ID NO: 1553832 - RNA, 19 nt, Artificial Sequence
  Description of Artificial Sequence: Synthetic oligonucleotide
gaauacacgggaauucaug

SEQ ID NO: 1553833 - RNA, 19 nt, Artificial Sequence
  Description of Artificial Sequence: Synthetic oligonucleotide
agcaacccacaauuuugcc

SEQ ID NO: 1553834 - RNA, 19 nt, Artificial Sequence
  Description of Artificial Sequence: Synthetic oligonucleotide
gguguucugguacugaccc

SEQ ID NO: 1553835 - RNA, 19 nt, Artificial Sequence
  Description of Artificial Sequence: Synthetic oligonucleotide
uucuaaacuccgcuaugug

SEQ ID NO: 1553836 - RNA, 19 nt, Artificial Sequence
  Description of Artificial Sequence: Synthetic oligonucleotide
acaggguaagacuuaacaa

SEQ ID NO: 1553837 - RNA, 19 nt, Artificial Sequence
  Description of Artificial Sequence: Synthetic oligonucleotide
uuucuaaacuccgcuaugu

SEQ ID NO: 1553838 - RNA, 19 nt, Artificial Sequence
  Description of Artificial Sequence: Synthetic oligonucleotide
acccguacaucuccgcugc

SEQ ID NO: 1553839 - RNA, 19 nt, Artificial Sequence
  Description of Artificial Sequence: Synthetic oligonucleotide
gagaaggguguucugguac

SEQ ID NO: 1553840 - RNA, 19 nt, Artificial Sequence
  Description of Artificial Sequence: Synthetic oligonucleotide
ucuaggcuuuccagaagag

SEQ ID NO: 1553841 - RNA, 19 nt, Artificial Sequence
  Description of Artificial Sequence: Synthetic oligonucleotide
cucuuugaauuaaauccac

SEQ ID NO: 1553842 - RNA, 19 nt, Artificial Sequence
  Description of Artificial Sequence: Synthetic oligonucleotide
ucucuacuggggaugagaa

SEQ ID NO: 1553843 - RNA, 19 nt, Artificial Sequence
  Description of Artificial Sequence: Synthetic oligonucleotide
ugaugauccccgcugucca

SEQ ID NO: 1553844 - RNA, 19 nt, Artificial Sequence
  Description of Artificial Sequence: Synthetic oligonucleotide
gauugcuuccacgucagac

SEQ ID NO: 1553845 - RNA, 19 nt, Artificial Sequence
  Description of Artificial Sequence: Synthetic oligonucleotide
aaugaauaacaggguaagu

SEQ ID NO: 1553846 - RNA, 19 nt, Artificial Sequence
  Description of Artificial Sequence: Synthetic oligonucleotide
guuuagaaggcaccacagc

SEQ ID NO: 1553847 - RNA, 19 nt, Artificial Sequence
  Description of Artificial Sequence: Synthetic oligonucleotide
aaguuucuaaacuccgcua

SEQ ID NO: 1553848 - RNA, 19 nt, Artificial Sequence
  Description of Artificial Sequence: Synthetic oligonucleotide
uccacuuuugccccuucga

SEQ ID NO: 1553849 - RNA, 19 nt, Artificial Sequence
  Description of Artificial Sequence: Synthetic oligonucleotide
uguugagauuuccaaugaa

SEQ ID NO: 1553850 - RNA, 19 nt, Artificial Sequence
  Description of Artificial Sequence: Synthetic oligonucleotide
gguaaguuucuaaacuccg

SEQ ID NO: 1553851 - RNA, 19 nt, Artificial Sequence
  Description of Artificial Sequence: Synthetic oligonucleotide
ucguuaacauauugaacaa

SEQ ID NO: 1553852 - RNA, 19 nt, Artificial Sequence
  Description of Artificial Sequence: Synthetic oligonucleotide
ugcagaucguuugacaccu

SEQ ID NO: 1553853 - RNA, 19 nt, Artificial Sequence
  Description of Artificial Sequence: Synthetic oligonucleotide
agagcaacccacaauuuug

SEQ ID NO: 1553854 - RNA, 19 nt, Artificial Sequence
  Description of Artificial Sequence: Synthetic oligonucleotide
uacugacccguacaucucc

SEQ ID NO: 1553855 - RNA, 19 nt, Artificial Sequence
  Description of Artificial Sequence: Synthetic oligonucleotide
aguccaaaucaaaugagga

SEQ ID NO: 1553856 - RNA, 19 nt, Artificial Sequence
  Description of Artificial Sequence: Synthetic oligonucleotide
ugugcuuaagagucauccu

SEQ ID NO: 1553857 - RNA, 19 nt, Artificial Sequence
  Description of Artificial Sequence: Synthetic oligonucleotide
aagauugcuuccacgucag

SEQ ID NO: 1553858 - RNA, 19 nt, Artificial Sequence
  Description of Artificial Sequence: Synthetic oligonucleotide
uguucugguacugacccgu

SEQ ID NO: 1553859 - RNA, 19 nt, Artificial Sequence
  Description of Artificial Sequence: Synthetic oligonucleotide
gugcuuaagagucauccuc

SEQ ID NO: 1553860 - RNA, 19 nt, Artificial Sequence
  Description of Artificial Sequence: Synthetic oligonucleotide
cacaagaguucggagagag

SEQ ID NO: 1553861 - RNA, 19 nt, Artificial Sequence
  Description of Artificial Sequence: Synthetic oligonucleotide
uacucacaagaguucggag

SEQ ID NO: 1553862 - RNA, 19 nt, Artificial Sequence
  Description of Artificial Sequence: Synthetic oligonucleotide
cuuaagagucauccucccc

SEQ ID NO: 1553863 - RNA, 19 nt, Artificial Sequence
  Description of Artificial Sequence: Synthetic oligonucleotide
aaauggaacuaggcgcaag

SEQ ID NO: 1553864 - RNA, 19 nt, Artificial Sequence
  Description of Artificial Sequence: Synthetic oligonucleotide
cucgguucacuuuuggcuc

SEQ ID NO: 1553865 - RNA, 19 nt, Artificial Sequence
  Description of Artificial Sequence: Synthetic oligonucleotide
aaacuacuaaggagcauca

SEQ ID NO: 1553866 - RNA, 19 nt, Artificial Sequence
  Description of Artificial Sequence: Synthetic oligonucleotide
uucgagagguguuuccaga

SEQ ID NO: 1553867 - RNA, 19 nt, Artificial Sequence
  Description of Artificial Sequence: Synthetic oligonucleotide
uacauccugucauaguaau

SEQ ID NO: 1553868 - RNA, 19 nt, Artificial Sequence
  Description of Artificial Sequence: Synthetic oligonucleotide
ucucucacaagcgccuagg

SEQ ID NO: 1553869 - RNA, 19 nt, Artificial Sequence
  Description of Artificial Sequence: Synthetic oligonucleotide
auggaacuaggcgcaaggc

SEQ ID NO: 1553870 - RNA, 19 nt, Artificial Sequence
  Description of Artificial Sequence: Synthetic oligonucleotide
cuaaacuccgcuaugugcu

SEQ ID NO: 1553871 - RNA, 19 nt, Artificial Sequence
  Description of Artificial Sequence: Synthetic oligonucleotide
guuucuaaacuccgcuaug

SEQ ID NO: 1553872 - RNA, 19 nt, Artificial Sequence
  Description of Artificial Sequence: Synthetic oligonucleotide
guaaguuucuaaacuccgc

SEQ ID NO: 1553873 - RNA, 19 nt, Artificial Sequence
  Description of Artificial Sequence: Synthetic oligonucleotide
aagcccuuaugcacagagc

SEQ ID NO: 1553874 - RNA, 19 nt, Artificial Sequence
  Description of Artificial Sequence: Synthetic oligonucleotide
guaagacuuaacaaaacua

SEQ ID NO: 1553875 - RNA, 19 nt, Artificial Sequence
  Description of Artificial Sequence: Synthetic oligonucleotide
cuggcguuuagaaggcacc

SEQ ID NO: 1553876 - RNA, 19 nt, Artificial Sequence
  Description of Artificial Sequence: Synthetic oligonucleotide
uguugguaacauugcuagc

SEQ ID NO: 1553877 - RNA, 19 nt, Artificial Sequence
  Description of Artificial Sequence: Synthetic oligonucleotide
gagagagagagagaagaca

SEQ ID NO: 1553878 - RNA, 19 nt, Artificial Sequence
  Description of Artificial Sequence: Synthetic oligonucleotide
cuccuuucaacuuuccaga

SEQ ID NO: 1553879 - RNA, 19 nt, Artificial Sequence
  Description of Artificial Sequence: Synthetic oligonucleotide
uuccucgguucacuuuugg

SEQ ID NO: 1553880 - RNA, 19 nt, Artificial Sequence
  Description of Artificial Sequence: Synthetic oligonucleotide
augaauacacgggaauuca

SEQ ID NO: 1553881 - RNA, 19 nt, Artificial Sequence
  Description of Artificial Sequence: Synthetic oligonucleotide
cugcagaucguuugacacc

SEQ ID NO: 1553882 - RNA, 19 nt, Artificial Sequence
  Description of Artificial Sequence: Synthetic oligonucleotide
uuuugccccuucgagaggu

SEQ ID NO: 1553883 - RNA, 19 nt, Artificial Sequence
  Description of Artificial Sequence: Synthetic oligonucleotide
cagaucguuugacaccugc

SEQ ID NO: 1553884 - RNA, 19 nt, Artificial Sequence
  Description of Artificial Sequence: Synthetic oligonucleotide
agacuuaacaaaacuacua

SEQ ID NO: 1553885 - RNA, 19 nt, Artificial Sequence
  Description of Artificial Sequence: Synthetic oligonucleotide
cacgucagacuucuugacc

SEQ ID NO: 1553886 - RNA, 19 nt, Artificial Sequence
  Description of Artificial Sequence: Synthetic oligonucleotide
gaacagugagaaugugcug

SEQ ID NO: 1553887 - RNA, 19 nt, Artificial Sequence
  Description of Artificial Sequence: Synthetic oligonucleotide
aggcaauuaugaaucaaug

SEQ ID NO: 1553888 - RNA, 19 nt, Artificial Sequence
  Description of Artificial Sequence: Synthetic oligonucleotide
uggaucgaggaucugucuu

SEQ ID NO: 1553889 - RNA, 19 nt, Artificial Sequence
  Description of Artificial Sequence: Synthetic oligonucleotide
uccucgguucacuuuuggc

SEQ ID NO: 1553890 - RNA, 19 nt, Artificial Sequence
  Description of Artificial Sequence: Synthetic oligonucleotide
acaaaacuacuaaggagca

SEQ ID NO: 1553891 - RNA, 19 nt, Artificial Sequence
  Description of Artificial Sequence: Synthetic oligonucleotide
acuaggggagaggaucugg

SEQ ID NO: 1553892 - RNA, 19 nt, Artificial Sequence
  Description of Artificial Sequence: Synthetic oligonucleotide
guccaaaucaaaugaggaa

SEQ ID NO: 1553893 - RNA, 19 nt, Artificial Sequence
  Description of Artificial Sequence: Synthetic oligonucleotide
caaaucaaaugaggaacug

SEQ ID NO: 1553894 - RNA, 19 nt, Artificial Sequence
  Description of Artificial Sequence: Synthetic oligonucleotide
gaagcgacugcaggcaggc

SEQ ID NO: 1553895 - RNA, 19 nt, Artificial Sequence
  Description of Artificial Sequence: Synthetic oligonucleotide
gacccguacaucuccgcug

SEQ ID NO: 1553896 - RNA, 19 nt, Artificial Sequence
  Description of Artificial Sequence: Synthetic oligonucleotide
cuuugaauuaaauccacuu

SEQ ID NO: 1553897 - RNA, 19 nt, Artificial Sequence
  Description of Artificial Sequence: Synthetic oligonucleotide
ugacccguacaucuccgcu

SEQ ID NO: 1553898 - RNA, 19 nt, Artificial Sequence
  Description of Artificial Sequence: Synthetic oligonucleotide
auacucacaagaguucgga

SEQ ID NO: 1553899 - RNA, 19 nt, Artificial Sequence
  Description of Artificial Sequence: Synthetic oligonucleotide
ucggagagagagagagaag

SEQ ID NO: 1553900 - RNA, 19 nt, Artificial Sequence
  Description of Artificial Sequence: Synthetic oligonucleotide
uaggcgcaaggcaauuaug

SEQ ID NO: 1553901 - RNA, 19 nt, Artificial Sequence
  Description of Artificial Sequence: Synthetic oligonucleotide
agcucgagcaauaggagga

SEQ ID NO: 1553902 - RNA, 19 nt, Artificial Sequence
  Description of Artificial Sequence: Synthetic oligonucleotide
uuguuuuaucugagucagc

SEQ ID NO: 1553903 - RNA, 19 nt, Artificial Sequence
  Description of Artificial Sequence: Synthetic oligonucleotide
auuggcgcugucucuguca

SEQ ID NO: 1553904 - RNA, 19 nt, Artificial Sequence
  Description of Artificial Sequence: Synthetic oligonucleotide
uuccagaaacacgcuggcg

SEQ ID NO: 1553905 - RNA, 19 nt, Artificial Sequence
  Description of Artificial Sequence: Synthetic oligonucleotide
aggguaagacuuaacaaaa

SEQ ID NO: 1553906 - RNA, 19 nt, Artificial Sequence
  Description of Artificial Sequence: Synthetic oligonucleotide
ucgagagguguuuccagaa

SEQ ID NO: 1553907 - RNA, 19 nt, Artificial Sequence
  Description of Artificial Sequence: Synthetic oligonucleotide
gcugcagaucguuugacac

SEQ ID NO: 1553908 - RNA, 19 nt, Artificial Sequence
  Description of Artificial Sequence: Synthetic oligonucleotide
ggagugggcgaacagugag

SEQ ID NO: 1553909 - RNA, 19 nt, Artificial Sequence
  Description of Artificial Sequence: Synthetic oligonucleotide
uuucuuucguuaacauauu

SEQ ID NO: 1553910 - RNA, 19 nt, Artificial Sequence
  Description of Artificial Sequence: Synthetic oligonucleotide
gguacugacccguacaucu

SEQ ID NO: 1553911 - RNA, 19 nt, Artificial Sequence
  Description of Artificial Sequence: Synthetic oligonucleotide
caagcgccuagguaaauga

SEQ ID NO: 1553912 - RNA, 19 nt, Artificial Sequence
  Description of Artificial Sequence: Synthetic oligonucleotide
acacgcuggcguuuagaag

SEQ ID NO: 1553913 - RNA, 19 nt, Artificial Sequence
  Description of Artificial Sequence: Synthetic oligonucleotide
guuuuaucugagucagcuc

SEQ ID NO: 1553914 - RNA, 19 nt, Artificial Sequence
  Description of Artificial Sequence: Synthetic oligonucleotide
aagagguaucaaaauuaaa

SEQ ID NO: 1553915 - RNA, 19 nt, Artificial Sequence
  Description of Artificial Sequence: Synthetic oligonucleotide
uaaucccgcugaaagucau

SEQ ID NO: 1553916 - RNA, 19 nt, Artificial Sequence
  Description of Artificial Sequence: Synthetic oligonucleotide
ggaucgaggaucugucuug

SEQ ID NO: 1553917 - RNA, 19 nt, Artificial Sequence
  Description of Artificial Sequence: Synthetic oligonucleotide
ucacaagcgccuagguaaa

SEQ ID NO: 1553918 - RNA, 19 nt, Artificial Sequence
  Description of Artificial Sequence: Synthetic oligonucleotide
auucauggaucgaggaucu

SEQ ID NO: 1553919 - RNA, 19 nt, Artificial Sequence
  Description of Artificial Sequence: Synthetic oligonucleotide
uaaauccacuuuugccccu

SEQ ID NO: 1553920 - RNA, 19 nt, Artificial Sequence
  Description of Artificial Sequence: Synthetic oligonucleotide
ggaauucauggaucgagga

SEQ ID NO: 1553921 - RNA, 19 nt, Artificial Sequence
  Description of Artificial Sequence: Synthetic oligonucleotide
aacuccgcuaugugcuuaa

SEQ ID NO: 1553922 - RNA, 19 nt, Artificial Sequence
  Description of Artificial Sequence: Synthetic oligonucleotide
cgcuaugugcuuaagaguc

SEQ ID NO: 1553923 - RNA, 19 nt, Artificial Sequence
  Description of Artificial Sequence: Synthetic oligonucleotide
aucucuacuggggaugaga

SEQ ID NO: 1553924 - RNA, 19 nt, Artificial Sequence
  Description of Artificial Sequence: Synthetic oligonucleotide
ccuacugcggcuccgugcg

SEQ ID NO: 1553925 - RNA, 19 nt, Artificial Sequence
  Description of Artificial Sequence: Synthetic oligonucleotide
cccgcugaaagucauaguc

SEQ ID NO: 1553926 - RNA, 19 nt, Artificial Sequence
  Description of Artificial Sequence: Synthetic oligonucleotide
acacgggaauucauggauc

SEQ ID NO: 1553927 - RNA, 19 nt, Artificial Sequence
  Description of Artificial Sequence: Synthetic oligonucleotide
gggaauucauggaucgagg

SEQ ID NO: 1553928 - RNA, 19 nt, Artificial Sequence
  Description of Artificial Sequence: Synthetic oligonucleotide
acaagcgccuagguaaaug

SEQ ID NO: 1553929 - RNA, 19 nt, Artificial Sequence
  Description of Artificial Sequence: Synthetic oligonucleotide
aggcgcaaggcaauuauga

SEQ ID NO: 1553930 - RNA, 19 nt, Artificial Sequence
  Description of Artificial Sequence: Synthetic oligonucleotide
agagguguuuccagaaaca

SEQ ID NO: 1553931 - RNA, 19 nt, Artificial Sequence
  Description of Artificial Sequence: Synthetic oligonucleotide
acagugagaaugugcugaa

SEQ ID NO: 1553932 - RNA, 19 nt, Artificial Sequence
  Description of Artificial Sequence: Synthetic oligonucleotide
ugguaacauugcuagccau

SEQ ID NO: 1553933 - RNA, 19 nt, Artificial Sequence
  Description of Artificial Sequence: Synthetic oligonucleotide
cacuuuugccccuucgaga

SEQ ID NO: 1553934 - RNA, 19 nt, Artificial Sequence
  Description of Artificial Sequence: Synthetic oligonucleotide
ugcggcuccgugcggagac

SEQ ID NO: 1553935 - RNA, 19 nt, Artificial Sequence
  Description of Artificial Sequence: Synthetic oligonucleotide
acauccugucauaguaauc

SEQ ID NO: 1553936 - RNA, 19 nt, Artificial Sequence
  Description of Artificial Sequence: Synthetic oligonucleotide
ucgguucacuuuuggcucu

SEQ ID NO: 1553937 - RNA, 19 nt, Artificial Sequence
  Description of Artificial Sequence: Synthetic oligonucleotide
uggcguuuagaaggcacca

SEQ ID NO: 1553938 - RNA, 19 nt, Artificial Sequence
  Description of Artificial Sequence: Synthetic oligonucleotide
auggaucgaggaucugucu

SEQ ID NO: 1553939 - RNA, 19 nt, Artificial Sequence
  Description of Artificial Sequence: Synthetic oligonucleotide
uguccacucuuugaauuaa

SEQ ID NO: 1553940 - RNA, 19 nt, Artificial Sequence
  Description of Artificial Sequence: Synthetic oligonucleotide
agcaaaacuuacaggguaa

SEQ ID NO: 1553941 - RNA, 19 nt, Artificial Sequence
  Description of Artificial Sequence: Synthetic oligonucleotide
agugggcgaacagugagaa

SEQ ID NO: 1553942 - RNA, 19 nt, Artificial Sequence
  Description of Artificial Sequence: Synthetic oligonucleotide
auacuaggggagaggaucu

SEQ ID NO: 1553943 - RNA, 19 nt, Artificial Sequence
  Description of Artificial Sequence: Synthetic oligonucleotide
accuggccagcaaucauuc

SEQ ID NO: 1553944 - RNA, 19 nt, Artificial Sequence
  Description of Artificial Sequence: Synthetic oligonucleotide
guguucugguacugacccg

SEQ ID NO: 1553945 - RNA, 19 nt, Artificial Sequence
  Description of Artificial Sequence: Synthetic oligonucleotide
ugcggagacuccgaagcga

SEQ ID NO: 1553946 - RNA, 19 nt, Artificial Sequence
  Description of Artificial Sequence: Synthetic oligonucleotide
cuuuugccccuucgagagg

SEQ ID NO: 1553947 - RNA, 19 nt, Artificial Sequence
  Description of Artificial Sequence: Synthetic oligonucleotide
gaugauccccgcuguccac

SEQ ID NO: 1553948 - RNA, 19 nt, Artificial Sequence
  Description of Artificial Sequence: Synthetic oligonucleotide
agcaaucauucugccaucu

SEQ ID NO: 1553949 - RNA, 19 nt, Artificial Sequence
  Description of Artificial Sequence: Synthetic oligonucleotide
gugcggagacuccgaagcg

SEQ ID NO: 1553950 - RNA, 19 nt, Artificial Sequence
  Description of Artificial Sequence: Synthetic oligonucleotide
acugacccguacaucuccg

SEQ ID NO: 1553951 - RNA, 19 nt, Artificial Sequence
  Description of Artificial Sequence: Synthetic oligonucleotide
ccgcugaaagucauagucc

SEQ ID NO: 1553952 - RNA, 19 nt, Artificial Sequence
  Description of Artificial Sequence: Synthetic oligonucleotide
gaucguuugacaccugcuu

SEQ ID NO: 1553953 - RNA, 19 nt, Artificial Sequence
  Description of Artificial Sequence: Synthetic oligonucleotide
ggaacuaggcgcaaggcaa

SEQ ID NO: 1553954 - RNA, 19 nt, Artificial Sequence
  Description of Artificial Sequence: Synthetic oligonucleotide
aaccuggccagcaaucauu

SEQ ID NO: 1553955 - RNA, 19 nt, Artificial Sequence
  Description of Artificial Sequence: Synthetic oligonucleotide
cgugcggagacuccgaagc

SEQ ID NO: 1553956 - RNA, 19 nt, Artificial Sequence
  Description of Artificial Sequence: Synthetic oligonucleotide
gacggagaaggguguucug

SEQ ID NO: 1553957 - RNA, 19 nt, Artificial Sequence
  Description of Artificial Sequence: Synthetic oligonucleotide
agaucguuugacaccugcu

SEQ ID NO: 1553958 - RNA, 19 nt, Artificial Sequence
  Description of Artificial Sequence: Synthetic oligonucleotide
uaaacuccgcuaugugcuu

SEQ ID NO: 1553959 - RNA, 19 nt, Artificial Sequence
  Description of Artificial Sequence: Synthetic oligonucleotide
uugcucuguuccuuuucaa

SEQ ID NO: 1553960 - RNA, 19 nt, Artificial Sequence
  Description of Artificial Sequence: Synthetic oligonucleotide
cugacccguacaucuccgc

SEQ ID NO: 1553961 - RNA, 19 nt, Artificial Sequence
  Description of Artificial Sequence: Synthetic oligonucleotide
cguuuagaaggcaccacag

SEQ ID NO: 1553962 - RNA, 19 nt, Artificial Sequence
  Description of Artificial Sequence: Synthetic oligonucleotide
aaggacaagucugcuuguu

SEQ ID NO: 1553963 - RNA, 19 nt, Artificial Sequence
  Description of Artificial Sequence: Synthetic oligonucleotide
acgcuggcguuuagaaggc

SEQ ID NO: 1553964 - RNA, 19 nt, Artificial Sequence
  Description of Artificial Sequence: Synthetic oligonucleotide
aaauccacuuuugccccuu

SEQ ID NO: 1553965 - RNA, 19 nt, Artificial Sequence
  Description of Artificial Sequence: Synthetic oligonucleotide
acgugcuggguaacuguac

SEQ ID NO: 1553966 - RNA, 19 nt, Artificial Sequence
  Description of Artificial Sequence: Synthetic oligonucleotide
gcgaacagugagaaugugc

SEQ ID NO: 1553967 - RNA, 19 nt, Artificial Sequence
  Description of Artificial Sequence: Synthetic oligonucleotide
agcgccuagguaaaugaau

SEQ ID NO: 1553968 - RNA, 19 nt, Artificial Sequence
  Description of Artificial Sequence: Synthetic oligonucleotide
cuaggcuuuccagaagaga

SEQ ID NO: 1553969 - RNA, 19 nt, Artificial Sequence
  Description of Artificial Sequence: Synthetic oligonucleotide
ccacuuuugccccuucgag

SEQ ID NO: 1553970 - RNA, 19 nt, Artificial Sequence
  Description of Artificial Sequence: Synthetic oligonucleotide
gcguuuagaaggcaccaca

SEQ ID NO: 1553971 - RNA, 19 nt, Artificial Sequence
  Description of Artificial Sequence: Synthetic oligonucleotide
uuugccccuucgagaggug

SEQ ID NO: 1553972 - RNA, 19 nt, Artificial Sequence
  Description of Artificial Sequence: Synthetic oligonucleotide
guaaucccgcugaaaguca

SEQ ID NO: 1553973 - RNA, 19 nt, Artificial Sequence
  Description of Artificial Sequence: Synthetic oligonucleotide
gguaaaugaauaacagggu

SEQ ID NO: 1553974 - RNA, 19 nt, Artificial Sequence
  Description of Artificial Sequence: Synthetic oligonucleotide
uacuaggggagaggaucug

SEQ ID NO: 1553975 - RNA, 19 nt, Artificial Sequence
  Description of Artificial Sequence: Synthetic oligonucleotide
cccuuaugcacagagcaac

SEQ ID NO: 1553976 - RNA, 19 nt, Artificial Sequence
  Description of Artificial Sequence: Synthetic oligonucleotide
uccgugcggagacuccgaa

SEQ ID NO: 1553977 - RNA, 19 nt, Artificial Sequence
  Description of Artificial Sequence: Synthetic oligonucleotide
ggagagagagagagaagac

SEQ ID NO: 1553978 - RNA, 19 nt, Artificial Sequence
  Description of Artificial Sequence: Synthetic oligonucleotide
uacugcggcuccgugcgga

SEQ ID NO: 1553979 - RNA, 19 nt, Artificial Sequence
  Description of Artificial Sequence: Synthetic oligonucleotide
aaacuccgcuaugugcuua

SEQ ID NO: 1553980 - RNA, 19 nt, Artificial Sequence
  Description of Artificial Sequence: Synthetic oligonucleotide
ucccgcugaaagucauagu

SEQ ID NO: 1553981 - RNA, 19 nt, Artificial Sequence
  Description of Artificial Sequence: Synthetic oligonucleotide
aagcgccuagguaaaugaa

SEQ ID NO: 1553982 - RNA, 19 nt, Artificial Sequence
  Description of Artificial Sequence: Synthetic oligonucleotide
gaucugguguuacuuucau

SEQ ID NO: 1553983 - RNA, 19 nt, Artificial Sequence
  Description of Artificial Sequence: Synthetic oligonucleotide
agaaugugcugaagauacu

SEQ ID NO: 1553984 - RNA, 19 nt, Artificial Sequence
  Description of Artificial Sequence: Synthetic oligonucleotide
guacauccugucauaguaa

SEQ ID NO: 1553985 - RNA, 19 nt, Artificial Sequence
  Description of Artificial Sequence: Synthetic oligonucleotide
guaacauugcuagccauuu

SEQ ID NO: 1553986 - RNA, 19 nt, Artificial Sequence
  Description of Artificial Sequence: Synthetic oligonucleotide
aacuaggcgcaaggcaauu

SEQ ID NO: 1553987 - RNA, 19 nt, Artificial Sequence
  Description of Artificial Sequence: Synthetic oligonucleotide
gagaaggacaagucugcuu

SEQ ID NO: 1553988 - RNA, 19 nt, Artificial Sequence
  Description of Artificial Sequence: Synthetic oligonucleotide
cacaaguguguugagauuu

SEQ ID NO: 1553989 - RNA, 19 nt, Artificial Sequence
  Description of Artificial Sequence: Synthetic oligonucleotide
augauccccgcuguccacu

SEQ ID NO: 1553990 - RNA, 19 nt, Artificial Sequence
  Description of Artificial Sequence: Synthetic oligonucleotide
cuccgcuaugugcuuaaga

SEQ ID NO: 1553991 - RNA, 19 nt, Artificial Sequence
  Description of Artificial Sequence: Synthetic oligonucleotide
ugguacugacccguacauc

SEQ ID NO: 1553992 - RNA, 19 nt, Artificial Sequence
  Description of Artificial Sequence: Synthetic oligonucleotide
ugauccccgcuguccacuc

SEQ ID NO: 1553993 - RNA, 19 nt, Artificial Sequence
  Description of Artificial Sequence: Synthetic oligonucleotide
cagugagaaugugcugaag

SEQ ID NO: 1553994 - RNA, 19 nt, Artificial Sequence
  Description of Artificial Sequence: Synthetic oligonucleotide
agauugcuuccacgucaga

SEQ ID NO: 1553995 - RNA, 19 nt, Artificial Sequence
  Description of Artificial Sequence: Synthetic oligonucleotide
uugccccuucgagaggugu

SEQ ID NO: 1553996 - RNA, 19 nt, Artificial Sequence
  Description of Artificial Sequence: Synthetic oligonucleotide
gagagagagagaagacacu

SEQ ID NO: 1553997 - RNA, 19 nt, Artificial Sequence
  Description of Artificial Sequence: Synthetic oligonucleotide
ccaaaucaaaugaggaacu

SEQ ID NO: 1553998 - RNA, 19 nt, Artificial Sequence
  Description of Artificial Sequence: Synthetic oligonucleotide
cgggaauucauggaucgag

SEQ ID NO: 1553999 - RNA, 19 nt, Artificial Sequence
  Description of Artificial Sequence: Synthetic oligonucleotide
acaagaguucggagagaga

SEQ ID NO: 1554000 - RNA, 19 nt, Artificial Sequence
  Description of Artificial Sequence: Synthetic oligonucleotide
agauacuaggggagaggau

SEQ ID NO: 1554001 - RNA, 19 nt, Artificial Sequence
  Description of Artificial Sequence: Synthetic oligonucleotide
ggcgcaaggcaauuaugaa

SEQ ID NO: 1554002 - RNA, 19 nt, Artificial Sequence
  Description of Artificial Sequence: Synthetic oligonucleotide
cauuggcgcugucucuguc

SEQ ID NO: 1554003 - RNA, 19 nt, Artificial Sequence
  Description of Artificial Sequence: Synthetic oligonucleotide
auccccgcuguccacucuu

SEQ ID NO: 1554004 - RNA, 19 nt, Artificial Sequence
  Description of Artificial Sequence: Synthetic oligonucleotide
cuaggcgcaaggcaauuau

SEQ ID NO: 1554005 - RNA, 19 nt, Artificial Sequence
  Description of Artificial Sequence: Synthetic oligonucleotide
gaucgaggaucugucuugu

SEQ ID NO: 1554006 - RNA, 19 nt, Artificial Sequence
  Description of Artificial Sequence: Synthetic oligonucleotide
acuaggcgcaaggcaauua

SEQ ID NO: 1554007 - RNA, 19 nt, Artificial Sequence
  Description of Artificial Sequence: Synthetic oligonucleotide
ggaucugguguuacuuuca

SEQ ID NO: 1554008 - RNA, 19 nt, Artificial Sequence
  Description of Artificial Sequence: Synthetic oligonucleotide
gcuccgugcggagacuccg

SEQ ID NO: 1554009 - RNA, 19 nt, Artificial Sequence
  Description of Artificial Sequence: Synthetic oligonucleotide
acgggaauucauggaucga

SEQ ID NO: 1554010 - RNA, 19 nt, Artificial Sequence
  Description of Artificial Sequence: Synthetic oligonucleotide
ggcgcugucucugucaucu

SEQ ID NO: 1554011 - RNA, 19 nt, Artificial Sequence
  Description of Artificial Sequence: Synthetic oligonucleotide
cacgugcuggguaacugua

SEQ ID NO: 1554012 - RNA, 19 nt, Artificial Sequence
  Description of Artificial Sequence: Synthetic oligonucleotide
ccacgucagacuucuugac

SEQ ID NO: 1554013 - RNA, 19 nt, Artificial Sequence
  Description of Artificial Sequence: Synthetic oligonucleotide
aggaucugucuuguuggua

SEQ ID NO: 1554014 - RNA, 19 nt, Artificial Sequence
  Description of Artificial Sequence: Synthetic oligonucleotide
aggagugggcgaacaguga

SEQ ID NO: 1554015 - RNA, 19 nt, Artificial Sequence
  Description of Artificial Sequence: Synthetic oligonucleotide
cggagagagagagagaaga

SEQ ID NO: 1554016 - RNA, 19 nt, Artificial Sequence
  Description of Artificial Sequence: Synthetic oligonucleotide
cagagcaacccacaauuuu

SEQ ID NO: 1554017 - RNA, 19 nt, Artificial Sequence
  Description of Artificial Sequence: Synthetic oligonucleotide
guacaucuccgcugcagau

SEQ ID NO: 1554018 - RNA, 19 nt, Artificial Sequence
  Description of Artificial Sequence: Synthetic oligonucleotide
gccagcaaucauucugcca

SEQ ID NO: 1554019 - RNA, 19 nt, Artificial Sequence
  Description of Artificial Sequence: Synthetic oligonucleotide
acuccgcuaugugcuuaag

SEQ ID NO: 1554020 - RNA, 19 nt, Artificial Sequence
  Description of Artificial Sequence: Synthetic oligonucleotide
aucgaggaucugucuuguu

SEQ ID NO: 1554021 - RNA, 19 nt, Artificial Sequence
  Description of Artificial Sequence: Synthetic oligonucleotide
cuaugugcuuaagagucau

SEQ ID NO: 1554022 - RNA, 19 nt, Artificial Sequence
  Description of Artificial Sequence: Synthetic oligonucleotide
gcuaugugcuuaagaguca

SEQ ID NO: 1554023 - RNA, 19 nt, Artificial Sequence
  Description of Artificial Sequence: Synthetic oligonucleotide
ggcguuuagaaggcaccac

SEQ ID NO: 1554024 - RNA, 19 nt, Artificial Sequence
  Description of Artificial Sequence: Synthetic oligonucleotide
guucggagagagagagaga

SEQ ID NO: 1554025 - RNA, 19 nt, Artificial Sequence
  Description of Artificial Sequence: Synthetic oligonucleotide
gaguucggagagagagaga

SEQ ID NO: 1554026 - RNA, 19 nt, Artificial Sequence
  Description of Artificial Sequence: Synthetic oligonucleotide
cuccuacugcggcuccgug

SEQ ID NO: 1554027 - RNA, 19 nt, Artificial Sequence
  Description of Artificial Sequence: Synthetic oligonucleotide
gcgcaaggcaauuaugaau

SEQ ID NO: 1554028 - RNA, 19 nt, Artificial Sequence
  Description of Artificial Sequence: Synthetic oligonucleotide
ggaugaugauccccgcugu

SEQ ID NO: 1554029 - RNA, 19 nt, Artificial Sequence
  Description of Artificial Sequence: Synthetic oligonucleotide
gcuuguuugcucuguuccu

SEQ ID NO: 1554030 - RNA, 19 nt, Artificial Sequence
  Description of Artificial Sequence: Synthetic oligonucleotide
gcgccuagguaaaugaaua

SEQ ID NO: 1554031 - RNA, 19 nt, Artificial Sequence
  Description of Artificial Sequence: Synthetic oligonucleotide
gaacuaggcgcaaggcaau

SEQ ID NO: 1554032 - RNA, 19 nt, Artificial Sequence
  Description of Artificial Sequence: Synthetic oligonucleotide
ggcgaacagugagaaugug

SEQ ID NO: 1554033 - RNA, 19 nt, Artificial Sequence
  Description of Artificial Sequence: Synthetic oligonucleotide
aagcgacugcaggcaggca

SEQ ID NO: 1554034 - RNA, 19 nt, Artificial Sequence
  Description of Artificial Sequence: Synthetic oligonucleotide
ccaaugaauacacgggaau

SEQ ID NO: 1554035 - RNA, 19 nt, Artificial Sequence
  Description of Artificial Sequence: Synthetic oligonucleotide
gguaacauugcuagccauu

SEQ ID NO: 1554036 - RNA, 19 nt, Artificial Sequence
  Description of Artificial Sequence: Synthetic oligonucleotide
uccccgcuguccacucuuu

SEQ ID NO: 1554037 - RNA, 19 nt, Artificial Sequence
  Description of Artificial Sequence: Synthetic oligonucleotide
cuccgugcggagacuccga

SEQ ID NO: 1554038 - RNA, 19 nt, Artificial Sequence
  Description of Artificial Sequence: Synthetic oligonucleotide
caaaacuacuaaggagcau

SEQ ID NO: 1554039 - RNA, 19 nt, Artificial Sequence
  Description of Artificial Sequence: Synthetic oligonucleotide
ggacggagaaggguguucu

SEQ ID NO: 1554040 - RNA, 19 nt, Artificial Sequence
  Description of Artificial Sequence: Synthetic oligonucleotide
uggcgcugucucugucauc

SEQ ID NO: 1554041 - RNA, 19 nt, Artificial Sequence
  Description of Artificial Sequence: Synthetic oligonucleotide
cauccuccccauuggcgcu

SEQ ID NO: 1554042 - RNA, 19 nt, Artificial Sequence
  Description of Artificial Sequence: Synthetic oligonucleotide
ccgugcggagacuccgaag

SEQ ID NO: 1554043 - RNA, 19 nt, Artificial Sequence
  Description of Artificial Sequence: Synthetic oligonucleotide
gcugaaagucauaguccaa

SEQ ID NO: 1554044 - RNA, 19 nt, Artificial Sequence
  Description of Artificial Sequence: Synthetic oligonucleotide
guguuuccagaaacacgcu

SEQ ID NO: 1554045 - RNA, 19 nt, Artificial Sequence
  Description of Artificial Sequence: Synthetic oligonucleotide
gauccccgcuguccacucu

SEQ ID NO: 1554046 - RNA, 19 nt, Artificial Sequence
  Description of Artificial Sequence: Synthetic oligonucleotide
ccgcuguccacucuuugaa

SEQ ID NO: 1554047 - RNA, 19 nt, Artificial Sequence
  Description of Artificial Sequence: Synthetic oligonucleotide
ggguaacuguacauccugu

SEQ ID NO: 1554048 - RNA, 19 nt, Artificial Sequence
  Description of Artificial Sequence: Synthetic oligonucleotide
ccgcuaugugcuuaagagu

SEQ ID NO: 1554049 - RNA, 19 nt, Artificial Sequence
  Description of Artificial Sequence: Synthetic oligonucleotide
gcccuuaugcacagagcaa

SEQ ID NO: 1554050 - RNA, 19 nt, Artificial Sequence
  Description of Artificial Sequence: Synthetic oligonucleotide
cuuuccagacuuggaugau

SEQ ID NO: 1554051 - RNA, 19 nt, Artificial Sequence
  Description of Artificial Sequence: Synthetic oligonucleotide
cgggcauuucuuucguuaa

SEQ ID NO: 1554052 - RNA, 19 nt, Artificial Sequence
  Description of Artificial Sequence: Synthetic oligonucleotide
ggcuccgugcggagacucc

SEQ ID NO: 1554053 - RNA, 19 nt, Artificial Sequence
  Description of Artificial Sequence: Synthetic oligonucleotide
gggcgaacagugagaaugu

SEQ ID NO: 1554054 - RNA, 19 nt, Artificial Sequence
  Description of Artificial Sequence: Synthetic oligonucleotide
cgccuagguaaaugaauaa

SEQ ID NO: 1554055 - RNA, 19 nt, Artificial Sequence
  Description of Artificial Sequence: Synthetic oligonucleotide
cgcugcagaucguuugaca

SEQ ID NO: 1554056 - RNA, 19 nt, Artificial Sequence
  Description of Artificial Sequence: Synthetic oligonucleotide
ccccgcuguccacucuuug

SEQ ID NO: 1554057 - RNA, 19 nt, Artificial Sequence
  Description of Artificial Sequence: Synthetic oligonucleotide
ccgcugcagaucguuugac

SEQ ID NO: 1554058 - RNA, 19 nt, Artificial Sequence
  Description of Artificial Sequence: Synthetic oligonucleotide
gugggcgaacagugagaau

SEQ ID NO: 1554059 - RNA, 19 nt, Artificial Sequence
  Description of Artificial Sequence: Synthetic oligonucleotide
ccccuucgagagguguuuc

SEQ ID NO: 1554060 - RNA, 19 nt, Artificial Sequence
  Description of Artificial Sequence: Synthetic oligonucleotide
caucuccgcugcagaucgu

SEQ ID NO: 1554061 - RNA, 19 nt, Artificial Sequence
  Description of Artificial Sequence: Synthetic oligonucleotide
caccugcuuuuccucgguu

SEQ ID NO: 1554062 - RNA, 19 nt, Artificial Sequence
  Description of Artificial Sequence: Synthetic oligonucleotide
cacaagcgccuagguaaau

SEQ ID NO: 1554063 - RNA, 19 nt, Artificial Sequence
  Description of Artificial Sequence: Synthetic oligonucleotide
ccauuggcgcugucucugu

SEQ ID NO: 1554064 - RNA, 19 nt, Artificial Sequence
  Description of Artificial Sequence: Synthetic oligonucleotide
cccguacaucuccgcugca

SEQ ID NO: 1554065 - RNA, 19 nt, Artificial Sequence
  Description of Artificial Sequence: Synthetic oligonucleotide
cggcuccgugcggagacuc

SEQ ID NO: 1554066 - RNA, 19 nt, Artificial Sequence
  Description of Artificial Sequence: Synthetic oligonucleotide
cgcuggcguuuagaaggca

SEQ ID NO: 1554067 - RNA, 19 nt, Artificial Sequence
  Description of Artificial Sequence: Synthetic oligonucleotide
acugcugucaguuagggcc

SEQ ID NO: 1554068 - RNA, 19 nt, Artificial Sequence
  Description of Artificial Sequence: Synthetic oligonucleotide
uaauaaaagccucugauac

SEQ ID NO: 1554069 - RNA, 19 nt, Artificial Sequence
  Description of Artificial Sequence: Synthetic oligonucleotide
augauagacccacagaggc

SEQ ID NO: 1554070 - RNA, 19 nt, Artificial Sequence
  Description of Artificial Sequence: Synthetic oligonucleotide
uuagcaucugacaacaaag

SEQ ID NO: 1554071 - RNA, 19 nt, Artificial Sequence
  Description of Artificial Sequence: Synthetic oligonucleotide
auuauuagcacaccuguuc

SEQ ID NO: 1554072 - RNA, 19 nt, Artificial Sequence
  Description of Artificial Sequence: Synthetic oligonucleotide
aaugcggucauccuccuuc

SEQ ID NO: 1554073 - RNA, 19 nt, Artificial Sequence
  Description of Artificial Sequence: Synthetic oligonucleotide
acaugauagacccacagag

SEQ ID NO: 1554074 - RNA, 19 nt, Artificial Sequence
  Description of Artificial Sequence: Synthetic oligonucleotide
aaaggauuguauucucugg

SEQ ID NO: 1554075 - RNA, 19 nt, Artificial Sequence
  Description of Artificial Sequence: Synthetic oligonucleotide
cuuagaaggacauuuuagc

SEQ ID NO: 1554076 - RNA, 19 nt, Artificial Sequence
  Description of Artificial Sequence: Synthetic oligonucleotide
ucuugcacaugauagaccc

SEQ ID NO: 1554077 - RNA, 19 nt, Artificial Sequence
  Description of Artificial Sequence: Synthetic oligonucleotide
aacuccucaaugcggaucg

SEQ ID NO: 1554078 - RNA, 19 nt, Artificial Sequence
  Description of Artificial Sequence: Synthetic oligonucleotide
ucugacaacaaagacauga

SEQ ID NO: 1554079 - RNA, 19 nt, Artificial Sequence
  Description of Artificial Sequence: Synthetic oligonucleotide
uguuccuccagucugaccu

SEQ ID NO: 1554080 - RNA, 19 nt, Artificial Sequence
  Description of Artificial Sequence: Synthetic oligonucleotide
ugauuauuagcacaccugu

SEQ ID NO: 1554081 - RNA, 19 nt, Artificial Sequence
  Description of Artificial Sequence: Synthetic oligonucleotide
augaccaucgagcugacag

SEQ ID NO: 1554082 - RNA, 19 nt, Artificial Sequence
  Description of Artificial Sequence: Synthetic oligonucleotide
uaugcagcagcgaaugcgg

SEQ ID NO: 1554083 - RNA, 19 nt, Artificial Sequence
  Description of Artificial Sequence: Synthetic oligonucleotide
uuagaaggggacaaaguca

SEQ ID NO: 1554084 - RNA, 19 nt, Artificial Sequence
  Description of Artificial Sequence: Synthetic oligonucleotide
agcuccauacauuucuugc

SEQ ID NO: 1554085 - RNA, 19 nt, Artificial Sequence
  Description of Artificial Sequence: Synthetic oligonucleotide
guauucaggagcuuucugg

SEQ ID NO: 1554086 - RNA, 19 nt, Artificial Sequence
  Description of Artificial Sequence: Synthetic oligonucleotide
uuagaaggacauuuuagca

SEQ ID NO: 1554087 - RNA, 19 nt, Artificial Sequence
  Description of Artificial Sequence: Synthetic oligonucleotide
aggccaaugagcuccauac

SEQ ID NO: 1554088 - RNA, 19 nt, Artificial Sequence
  Description of Artificial Sequence: Synthetic oligonucleotide
ucaaugaccaucgagcuga

SEQ ID NO: 1554089 - RNA, 19 nt, Artificial Sequence
  Description of Artificial Sequence: Synthetic oligonucleotide
aagucagaagcccuuccac

SEQ ID NO: 1554090 - RNA, 19 nt, Artificial Sequence
  Description of Artificial Sequence: Synthetic oligonucleotide
aaagccucugauacaaggc

SEQ ID NO: 1554091 - RNA, 19 nt, Artificial Sequence
  Description of Artificial Sequence: Synthetic oligonucleotide
ucugaccuaguacagagac

SEQ ID NO: 1554092 - RNA, 19 nt, Artificial Sequence
  Description of Artificial Sequence: Synthetic oligonucleotide
gacaacaaagacaugauga

SEQ ID NO: 1554093 - RNA, 19 nt, Artificial Sequence
  Description of Artificial Sequence: Synthetic oligonucleotide
aauaaaagccucugauaca

SEQ ID NO: 1554094 - RNA, 19 nt, Artificial Sequence
  Description of Artificial Sequence: Synthetic oligonucleotide
ugaccuaguacagagacca

SEQ ID NO: 1554095 - RNA, 19 nt, Artificial Sequence
  Description of Artificial Sequence: Synthetic oligonucleotide
uaaaagacucacauacaug

SEQ ID NO: 1554096 - RNA, 19 nt, Artificial Sequence
  Description of Artificial Sequence: Synthetic oligonucleotide
aaggauuguauucucuggu

SEQ ID NO: 1554097 - RNA, 19 nt, Artificial Sequence
  Description of Artificial Sequence: Synthetic oligonucleotide
uaguacagagaccaacucc

SEQ ID NO: 1554098 - RNA, 19 nt, Artificial Sequence
  Description of Artificial Sequence: Synthetic oligonucleotide
ugagugaggcuccaguucc

SEQ ID NO: 1554099 - RNA, 19 nt, Artificial Sequence
  Description of Artificial Sequence: Synthetic oligonucleotide
aggguuuaaagaugcugcc

SEQ ID NO: 1554100 - RNA, 19 nt, Artificial Sequence
  Description of Artificial Sequence: Synthetic oligonucleotide
uuaauaaaagccucugaua

SEQ ID NO: 1554101 - RNA, 19 nt, Artificial Sequence
  Description of Artificial Sequence: Synthetic oligonucleotide
aagucguaguuucucguag

SEQ ID NO: 1554102 - RNA, 19 nt, Artificial Sequence
  Description of Artificial Sequence: Synthetic oligonucleotide
uagugcaugcacaucaaug

SEQ ID NO: 1554103 - RNA, 19 nt, Artificial Sequence
  Description of Artificial Sequence: Synthetic oligonucleotide
cauucgaccacacugcuug

SEQ ID NO: 1554104 - RNA, 19 nt, Artificial Sequence
  Description of Artificial Sequence: Synthetic oligonucleotide
ugcaguguaugcagcagcg

SEQ ID NO: 1554105 - RNA, 19 nt, Artificial Sequence
  Description of Artificial Sequence: Synthetic oligonucleotide
ugagcuuauuugccaaggg

SEQ ID NO: 1554106 - RNA, 19 nt, Artificial Sequence
  Description of Artificial Sequence: Synthetic oligonucleotide
cucaaugcggaucgaaugg

SEQ ID NO: 1554107 - RNA, 19 nt, Artificial Sequence
  Description of Artificial Sequence: Synthetic oligonucleotide
cugggaauaaacugccugg

SEQ ID NO: 1554108 - RNA, 19 nt, Artificial Sequence
  Description of Artificial Sequence: Synthetic oligonucleotide
ggaauaaacugccuggucc

SEQ ID NO: 1554109 - RNA, 19 nt, Artificial Sequence
  Description of Artificial Sequence: Synthetic oligonucleotide
ugauagacccacagaggcg

SEQ ID NO: 1554110 - RNA, 19 nt, Artificial Sequence
  Description of Artificial Sequence: Synthetic oligonucleotide
cuuaguguguuagaagggg

SEQ ID NO: 1554111 - RNA, 19 nt, Artificial Sequence
  Description of Artificial Sequence: Synthetic oligonucleotide
aauggccuagcuaugccac

SEQ ID NO: 1554112 - RNA, 19 nt, Artificial Sequence
  Description of Artificial Sequence: Synthetic oligonucleotide
caugcaaagucguaguuuc

SEQ ID NO: 1554113 - RNA, 19 nt, Artificial Sequence
  Description of Artificial Sequence: Synthetic oligonucleotide
aaagucagaagcccuucca

SEQ ID NO: 1554114 - RNA, 19 nt, Artificial Sequence
  Description of Artificial Sequence: Synthetic oligonucleotide
caugauagacccacagagg

SEQ ID NO: 1554115 - RNA, 19 nt, Artificial Sequence
  Description of Artificial Sequence: Synthetic oligonucleotide
ugacaacaaagacaugaug

SEQ ID NO: 1554116 - RNA, 19 nt, Artificial Sequence
  Description of Artificial Sequence: Synthetic oligonucleotide
accaugauuauuagcacac

SEQ ID NO: 1554117 - RNA, 19 nt, Artificial Sequence
  Description of Artificial Sequence: Synthetic oligonucleotide
gauuguauucucuggugac

SEQ ID NO: 1554118 - RNA, 19 nt, Artificial Sequence
  Description of Artificial Sequence: Synthetic oligonucleotide
cauuuuagcaucugacaac

SEQ ID NO: 1554119 - RNA, 19 nt, Artificial Sequence
  Description of Artificial Sequence: Synthetic oligonucleotide
agugccgugagugaggcuc

SEQ ID NO: 1554120 - RNA, 19 nt, Artificial Sequence
  Description of Artificial Sequence: Synthetic oligonucleotide
uagaaggacauuuuagcau

SEQ ID NO: 1554121 - RNA, 19 nt, Artificial Sequence
  Description of Artificial Sequence: Synthetic oligonucleotide
uguuagaaggggacaaagu

SEQ ID NO: 1554122 - RNA, 19 nt, Artificial Sequence
  Description of Artificial Sequence: Synthetic oligonucleotide
acuguuaggugacuggcug

SEQ ID NO: 1554123 - RNA, 19 nt, Artificial Sequence
  Description of Artificial Sequence: Synthetic oligonucleotide
ugaugagcaguaagugccg

SEQ ID NO: 1554124 - RNA, 19 nt, Artificial Sequence
  Description of Artificial Sequence: Synthetic oligonucleotide
ugauacaaggccccagugu

SEQ ID NO: 1554125 - RNA, 19 nt, Artificial Sequence
  Description of Artificial Sequence: Synthetic oligonucleotide
gagcuuauuugccaagggc

SEQ ID NO: 1554126 - RNA, 19 nt, Artificial Sequence
  Description of Artificial Sequence: Synthetic oligonucleotide
aauaaaagacucacauaca

SEQ ID NO: 1554127 - RNA, 19 nt, Artificial Sequence
  Description of Artificial Sequence: Synthetic oligonucleotide
acuuagaaggacauuuuag

SEQ ID NO: 1554128 - RNA, 19 nt, Artificial Sequence
  Description of Artificial Sequence: Synthetic oligonucleotide
aguacagagaccaacuccu

SEQ ID NO: 1554129 - RNA, 19 nt, Artificial Sequence
  Description of Artificial Sequence: Synthetic oligonucleotide
uccucaaaaggguuuccag

SEQ ID NO: 1554130 - RNA, 19 nt, Artificial Sequence
  Description of Artificial Sequence: Synthetic oligonucleotide
agcccuuccacagacgagc

SEQ ID NO: 1554131 - RNA, 19 nt, Artificial Sequence
  Description of Artificial Sequence: Synthetic oligonucleotide
ucuccaugcaaagucguag

SEQ ID NO: 1554132 - RNA, 19 nt, Artificial Sequence
  Description of Artificial Sequence: Synthetic oligonucleotide
gugaccucugucuagagga

SEQ ID NO: 1554133 - RNA, 19 nt, Artificial Sequence
  Description of Artificial Sequence: Synthetic oligonucleotide
cugcucaugcuacugaggc

SEQ ID NO: 1554134 - RNA, 19 nt, Artificial Sequence
  Description of Artificial Sequence: Synthetic oligonucleotide
guaugcagcagcgaaugcg

SEQ ID NO: 1554135 - RNA, 19 nt, Artificial Sequence
  Description of Artificial Sequence: Synthetic oligonucleotide
cucagggaguccuugcugg

SEQ ID NO: 1554136 - RNA, 19 nt, Artificial Sequence
  Description of Artificial Sequence: Synthetic oligonucleotide
uguuaggugacuggcuggg

SEQ ID NO: 1554137 - RNA, 19 nt, Artificial Sequence
  Description of Artificial Sequence: Synthetic oligonucleotide
uggcaucaaaagauguaag

SEQ ID NO: 1554138 - RNA, 19 nt, Artificial Sequence
  Description of Artificial Sequence: Synthetic oligonucleotide
acacuguuaggugacuggc

SEQ ID NO: 1554139 - RNA, 19 nt, Artificial Sequence
  Description of Artificial Sequence: Synthetic oligonucleotide
gauacaaggccccagugua

SEQ ID NO: 1554140 - RNA, 19 nt, Artificial Sequence
  Description of Artificial Sequence: Synthetic oligonucleotide
accucaaccucguccauuc

SEQ ID NO: 1554141 - RNA, 19 nt, Artificial Sequence
  Description of Artificial Sequence: Synthetic oligonucleotide
  modified_base (7)..(7): a, c, u, g, unknown or other
agcagcnggggcugguagc

SEQ ID NO: 1554142 - RNA, 19 nt, Artificial Sequence
  Description of Artificial Sequence: Synthetic oligonucleotide
ucaaccucguccauucgac

SEQ ID NO: 1554143 - RNA, 19 nt, Artificial Sequence
  Description of Artificial Sequence: Synthetic oligonucleotide
gaucgaauggccuagcuau

SEQ ID NO: 1554144 - RNA, 19 nt, Artificial Sequence
  Description of Artificial Sequence: Synthetic oligonucleotide
augcuacugaggcugcccc

SEQ ID NO: 1554145 - RNA, 19 nt, Artificial Sequence
  Description of Artificial Sequence: Synthetic oligonucleotide
gaggcgacaguggugacgg

SEQ ID NO: 1554146 - RNA, 19 nt, Artificial Sequence
  Description of Artificial Sequence: Synthetic oligonucleotide
gacuguuugggucagugaa

SEQ ID NO: 1554147 - RNA, 19 nt, Artificial Sequence
  Description of Artificial Sequence: Synthetic oligonucleotide
  modified_base (4)..(4): a, c, u, g, unknown or other
agcnggggcugguagcacc

SEQ ID NO: 1554148 - RNA, 19 nt, Artificial Sequence
  Description of Artificial Sequence: Synthetic oligonucleotide
ugacucaugaugacuuaga

SEQ ID NO: 1554149 - RNA, 19 nt, Artificial Sequence
  Description of Artificial Sequence: Synthetic oligonucleotide
cacuggugagcuuauuugc

SEQ ID NO: 1554150 - RNA, 19 nt, Artificial Sequence
  Description of Artificial Sequence: Synthetic oligonucleotide
uugggugcuggacuguuug

SEQ ID NO: 1554151 - RNA, 19 nt, Artificial Sequence
  Description of Artificial Sequence: Synthetic oligonucleotide
auuagcacaccuguuccuc

SEQ ID NO: 1554152 - RNA, 19 nt, Artificial Sequence
  Description of Artificial Sequence: Synthetic oligonucleotide
aaagucguaguuucucgua

SEQ ID NO: 1554153 - RNA, 19 nt, Artificial Sequence
  Description of Artificial Sequence: Synthetic oligonucleotide
cugcaggguuuaaagaugc

SEQ ID NO: 1554154 - RNA, 19 nt, Artificial Sequence
  Description of Artificial Sequence: Synthetic oligonucleotide
ucucguccaggacugagcu

SEQ ID NO: 1554155 - RNA, 19 nt, Artificial Sequence
  Description of Artificial Sequence: Synthetic oligonucleotide
aggauuguauucucuggug

SEQ ID NO: 1554156 - RNA, 19 nt, Artificial Sequence
  Description of Artificial Sequence: Synthetic oligonucleotide
aguaagugccgugagugag

SEQ ID NO: 1554157 - RNA, 19 nt, Artificial Sequence
  Description of Artificial Sequence: Synthetic oligonucleotide
uagcuaugccacaugacuc

SEQ ID NO: 1554158 - RNA, 19 nt, Artificial Sequence
  Description of Artificial Sequence: Synthetic oligonucleotide
agcuuauuugccaagggca

SEQ ID NO: 1554159 - RNA, 19 nt, Artificial Sequence
  Description of Artificial Sequence: Synthetic oligonucleotide
ucguccaggacugagcuga

SEQ ID NO: 1554160 - RNA, 19 nt, Artificial Sequence
  Description of Artificial Sequence: Synthetic oligonucleotide
cacugcuuggcaucaaaag

SEQ ID NO: 1554161 - RNA, 19 nt, Artificial Sequence
  Description of Artificial Sequence: Synthetic oligonucleotide
ugaugacuuagaaggacau

SEQ ID NO: 1554162 - RNA, 19 nt, Artificial Sequence
  Description of Artificial Sequence: Synthetic oligonucleotide
aggggugugcuccuucucg

SEQ ID NO: 1554163 - RNA, 19 nt, Artificial Sequence
  Description of Artificial Sequence: Synthetic oligonucleotide
gauagacccacagaggcga

SEQ ID NO: 1554164 - RNA, 19 nt, Artificial Sequence
  Description of Artificial Sequence: Synthetic oligonucleotide
cuguuugggucagugaagg

SEQ ID NO: 1554165 - RNA, 19 nt, Artificial Sequence
  Description of Artificial Sequence: Synthetic oligonucleotide
augauuauuagcacaccug

SEQ ID NO: 1554166 - RNA, 19 nt, Artificial Sequence
  Description of Artificial Sequence: Synthetic oligonucleotide
uccucaaugugcuccucag

SEQ ID NO: 1554167 - RNA, 19 nt, Artificial Sequence
  Description of Artificial Sequence: Synthetic oligonucleotide
gauucccugccccugacuc

SEQ ID NO: 1554168 - RNA, 19 nt, Artificial Sequence
  Description of Artificial Sequence: Synthetic oligonucleotide
aaggaugugcuccuuuauu

SEQ ID NO: 1554169 - RNA, 19 nt, Artificial Sequence
  Description of Artificial Sequence: Synthetic oligonucleotide
ugagcaguaagugccguga

SEQ ID NO: 1554170 - RNA, 19 nt, Artificial Sequence
  Description of Artificial Sequence: Synthetic oligonucleotide
aggccugggauggucaucc

SEQ ID NO: 1554171 - RNA, 19 nt, Artificial Sequence
  Description of Artificial Sequence: Synthetic oligonucleotide
uugcacaugauagacccac

SEQ ID NO: 1554172 - RNA, 19 nt, Artificial Sequence
  Description of Artificial Sequence: Synthetic oligonucleotide
uccuucucguccaggacug

SEQ ID NO: 1554173 - RNA, 19 nt, Artificial Sequence
  Description of Artificial Sequence: Synthetic oligonucleotide
agcuaugccacaugacuca

SEQ ID NO: 1554174 - RNA, 19 nt, Artificial Sequence
  Description of Artificial Sequence: Synthetic oligonucleotide
aguggugacggcgaucccg

SEQ ID NO: 1554175 - RNA, 19 nt, Artificial Sequence
  Description of Artificial Sequence: Synthetic oligonucleotide
aggacauuuuagcaucuga

SEQ ID NO: 1554176 - RNA, 19 nt, Artificial Sequence
  Description of Artificial Sequence: Synthetic oligonucleotide
ugguagcacccucugcagg

SEQ ID NO: 1554177 - RNA, 19 nt, Artificial Sequence
  Description of Artificial Sequence: Synthetic oligonucleotide
gaagcccuuccacagacga

SEQ ID NO: 1554178 - RNA, 19 nt, Artificial Sequence
  Description of Artificial Sequence: Synthetic oligonucleotide
agggaguccuugcuggcac

SEQ ID NO: 1554179 - RNA, 19 nt, Artificial Sequence
  Description of Artificial Sequence: Synthetic oligonucleotide
uguccuugcaguguaugca

SEQ ID NO: 1554180 - RNA, 19 nt, Artificial Sequence
  Description of Artificial Sequence: Synthetic oligonucleotide
ugaccaucgagcugacagc

SEQ ID NO: 1554181 - RNA, 19 nt, Artificial Sequence
  Description of Artificial Sequence: Synthetic oligonucleotide
uuagcacaccuguuccucc

SEQ ID NO: 1554182 - RNA, 19 nt, Artificial Sequence
  Description of Artificial Sequence: Synthetic oligonucleotide
agagaccaacuccucaaug

SEQ ID NO: 1554183 - RNA, 19 nt, Artificial Sequence
  Description of Artificial Sequence: Synthetic oligonucleotide
cauccugauguauucagga

SEQ ID NO: 1554184 - RNA, 19 nt, Artificial Sequence
  Description of Artificial Sequence: Synthetic oligonucleotide
caucaaaagauguaagccu

SEQ ID NO: 1554185 - RNA, 19 nt, Artificial Sequence
  Description of Artificial Sequence: Synthetic oligonucleotide
acgagcgugaccucugucu

SEQ ID NO: 1554186 - RNA, 19 nt, Artificial Sequence
  Description of Artificial Sequence: Synthetic oligonucleotide
aucaaugaccaucgagcug

SEQ ID NO: 1554187 - RNA, 19 nt, Artificial Sequence
  Description of Artificial Sequence: Synthetic oligonucleotide
cuuauuugccaagggcagg

SEQ ID NO: 1554188 - RNA, 19 nt, Artificial Sequence
  Description of Artificial Sequence: Synthetic oligonucleotide
gcaaagucguaguuucucg

SEQ ID NO: 1554189 - RNA, 19 nt, Artificial Sequence
  Description of Artificial Sequence: Synthetic oligonucleotide
gucguaguuucucguagag

SEQ ID NO: 1554190 - RNA, 19 nt, Artificial Sequence
  Description of Artificial Sequence: Synthetic oligonucleotide
uuagccagggguacacuuc

SEQ ID NO: 1554191 - RNA, 19 nt, Artificial Sequence
  Description of Artificial Sequence: Synthetic oligonucleotide
ucaaugcggaucgaauggc

SEQ ID NO: 1554192 - RNA, 19 nt, Artificial Sequence
  Description of Artificial Sequence: Synthetic oligonucleotide
agccucugauacaaggccc

SEQ ID NO: 1554193 - RNA, 19 nt, Artificial Sequence
  Description of Artificial Sequence: Synthetic oligonucleotide
ucgaccacacugcuuggca

SEQ ID NO: 1554194 - RNA, 19 nt, Artificial Sequence
  Description of Artificial Sequence: Synthetic oligonucleotide
cagggguacacuucaacuc

SEQ ID NO: 1554195 - RNA, 19 nt, Artificial Sequence
  Description of Artificial Sequence: Synthetic oligonucleotide
gaauggccuagcuaugcca

SEQ ID NO: 1554196 - RNA, 19 nt, Artificial Sequence
  Description of Artificial Sequence: Synthetic oligonucleotide
uguaugcagcagcgaaugc

SEQ ID NO: 1554197 - RNA, 19 nt, Artificial Sequence
  Description of Artificial Sequence: Synthetic oligonucleotide
ugccaacucccugucaagg

SEQ ID NO: 1554198 - RNA, 19 nt, Artificial Sequence
  Description of Artificial Sequence: Synthetic oligonucleotide
aaaggguuuccaggggcag

SEQ ID NO: 1554199 - RNA, 19 nt, Artificial Sequence
  Description of Artificial Sequence: Synthetic oligonucleotide
accucguccauucgaccac

SEQ ID NO: 1554200 - RNA, 19 nt, Artificial Sequence
  Description of Artificial Sequence: Synthetic oligonucleotide
ugucuagaggagcugccaa

SEQ ID NO: 1554201 - RNA, 19 nt, Artificial Sequence
  Description of Artificial Sequence: Synthetic oligonucleotide
aaugcggaucgaauggccu

SEQ ID NO: 1554202 - RNA, 19 nt, Artificial Sequence
  Description of Artificial Sequence: Synthetic oligonucleotide
cuguuaggugacuggcugg

SEQ ID NO: 1554203 - RNA, 19 nt, Artificial Sequence
  Description of Artificial Sequence: Synthetic oligonucleotide
caaugcggaucgaauggcc

SEQ ID NO: 1554204 - RNA, 19 nt, Artificial Sequence
  Description of Artificial Sequence: Synthetic oligonucleotide
gaccaacuccucaaugcgg

SEQ ID NO: 1554205 - RNA, 19 nt, Artificial Sequence
  Description of Artificial Sequence: Synthetic oligonucleotide
gccaccaugauuauuagca

SEQ ID NO: 1554206 - RNA, 19 nt, Artificial Sequence
  Description of Artificial Sequence: Synthetic oligonucleotide
guguuagaaggggacaaag

SEQ ID NO: 1554207 - RNA, 19 nt, Artificial Sequence
  Description of Artificial Sequence: Synthetic oligonucleotide
ugucaaucugcugcaggag

SEQ ID NO: 1554208 - RNA, 19 nt, Artificial Sequence
  Description of Artificial Sequence: Synthetic oligonucleotide
augacucaugaugacuuag

SEQ ID NO: 1554209 - RNA, 19 nt, Artificial Sequence
  Description of Artificial Sequence: Synthetic oligonucleotide
ugacuuagaaggacauuuu

SEQ ID NO: 1554210 - RNA, 19 nt, Artificial Sequence
  Description of Artificial Sequence: Synthetic oligonucleotide
acagccaccaugauuauua

SEQ ID NO: 1554211 - RNA, 19 nt, Artificial Sequence
  Description of Artificial Sequence: Synthetic oligonucleotide
gacucaugaugacuuagaa

SEQ ID NO: 1554212 - RNA, 19 nt, Artificial Sequence
  Description of Artificial Sequence: Synthetic oligonucleotide
aaacugccuggucccugac

SEQ ID NO: 1554213 - RNA, 19 nt, Artificial Sequence
  Description of Artificial Sequence: Synthetic oligonucleotide
cuaguacagagaccaacuc

SEQ ID NO: 1554214 - RNA, 19 nt, Artificial Sequence
  Description of Artificial Sequence: Synthetic oligonucleotide
uccucaaugcggaucgaau

SEQ ID NO: 1554215 - RNA, 19 nt, Artificial Sequence
  Description of Artificial Sequence: Synthetic oligonucleotide
ucgaauggccuagcuaugc

SEQ ID NO: 1554216 - RNA, 19 nt, Artificial Sequence
  Description of Artificial Sequence: Synthetic oligonucleotide
guuugggucagugaaggga

SEQ ID NO: 1554217 - RNA, 19 nt, Artificial Sequence
  Description of Artificial Sequence: Synthetic oligonucleotide
uucugcuuagccaggggua

SEQ ID NO: 1554218 - RNA, 19 nt, Artificial Sequence
  Description of Artificial Sequence: Synthetic oligonucleotide
uggacuguuugggucagug

SEQ ID NO: 1554219 - RNA, 19 nt, Artificial Sequence
  Description of Artificial Sequence: Synthetic oligonucleotide
cuagcuaugccacaugacu

SEQ ID NO: 1554220 - RNA, 19 nt, Artificial Sequence
  Description of Artificial Sequence: Synthetic oligonucleotide
auuguauucucuggugaca

SEQ ID NO: 1554221 - RNA, 19 nt, Artificial Sequence
  Description of Artificial Sequence: Synthetic oligonucleotide
guguaugcagcagcgaaug

SEQ ID NO: 1554222 - RNA, 19 nt, Artificial Sequence
  Description of Artificial Sequence: Synthetic oligonucleotide
gcugggaauaaacugccug

SEQ ID NO: 1554223 - RNA, 19 nt, Artificial Sequence
  Description of Artificial Sequence: Synthetic oligonucleotide
cugaccuaguacagagacc

SEQ ID NO: 1554224 - RNA, 19 nt, Artificial Sequence
  Description of Artificial Sequence: Synthetic oligonucleotide
auuugccaagggcaggcca

SEQ ID NO: 1554225 - RNA, 19 nt, Artificial Sequence
  Description of Artificial Sequence: Synthetic oligonucleotide
aguuccuuaguguguuaga

SEQ ID NO: 1554226 - RNA, 19 nt, Artificial Sequence
  Description of Artificial Sequence: Synthetic oligonucleotide
ugcuacugaggcugccccg

SEQ ID NO: 1554227 - RNA, 19 nt, Artificial Sequence
  Description of Artificial Sequence: Synthetic oligonucleotide
guaagugccgugagugagg

SEQ ID NO: 1554228 - RNA, 19 nt, Artificial Sequence
  Description of Artificial Sequence: Synthetic oligonucleotide
uacauuucuugcacaugau

SEQ ID NO: 1554229 - RNA, 19 nt, Artificial Sequence
  Description of Artificial Sequence: Synthetic oligonucleotide
agucguaguuucucguaga

SEQ ID NO: 1554230 - RNA, 19 nt, Artificial Sequence
  Description of Artificial Sequence: Synthetic oligonucleotide
ucugcuuagccagggguac

SEQ ID NO: 1554231 - RNA, 19 nt, Artificial Sequence
  Description of Artificial Sequence: Synthetic oligonucleotide
ugggaauaaacugccuggu

SEQ ID NO: 1554232 - RNA, 19 nt, Artificial Sequence
  Description of Artificial Sequence: Synthetic oligonucleotide
caccaugauuauuagcaca

SEQ ID NO: 1554233 - RNA, 19 nt, Artificial Sequence
  Description of Artificial Sequence: Synthetic oligonucleotide
aguguguuagaaggggaca

SEQ ID NO: 1554234 - RNA, 19 nt, Artificial Sequence
  Description of Artificial Sequence: Synthetic oligonucleotide
aguguagugcaugcacauc

SEQ ID NO: 1554235 - RNA, 19 nt, Artificial Sequence
  Description of Artificial Sequence: Synthetic oligonucleotide
caacucccugucaaggaug

SEQ ID NO: 1554236 - RNA, 19 nt, Artificial Sequence
  Description of Artificial Sequence: Synthetic oligonucleotide
caugauuauuagcacaccu

SEQ ID NO: 1554237 - RNA, 19 nt, Artificial Sequence
  Description of Artificial Sequence: Synthetic oligonucleotide
acuguuugggucagugaag

SEQ ID NO: 1554238 - RNA, 19 nt, Artificial Sequence
  Description of Artificial Sequence: Synthetic oligonucleotide
acaugacucaugaugacuu

SEQ ID NO: 1554239 - RNA, 19 nt, Artificial Sequence
  Description of Artificial Sequence: Synthetic oligonucleotide
ugcggaucgaauggccuag

SEQ ID NO: 1554240 - RNA, 19 nt, Artificial Sequence
  Description of Artificial Sequence: Synthetic oligonucleotide
augagcaguaagugccgug

SEQ ID NO: 1554241 - RNA, 19 nt, Artificial Sequence
  Description of Artificial Sequence: Synthetic oligonucleotide
aacucccugucaaggaugu

SEQ ID NO: 1554242 - RNA, 19 nt, Artificial Sequence
  Description of Artificial Sequence: Synthetic oligonucleotide
ccuuaguguguuagaaggg

SEQ ID NO: 1554243 - RNA, 19 nt, Artificial Sequence
  Description of Artificial Sequence: Synthetic oligonucleotide
acaccuguuccuccagucu

SEQ ID NO: 1554244 - RNA, 19 nt, Artificial Sequence
  Description of Artificial Sequence: Synthetic oligonucleotide
uacaaggccccaguguagu

SEQ ID NO: 1554245 - RNA, 19 nt, Artificial Sequence
  Description of Artificial Sequence: Synthetic oligonucleotide
uuuuagcaucugacaacaa

SEQ ID NO: 1554246 - RNA, 19 nt, Artificial Sequence
  Description of Artificial Sequence: Synthetic oligonucleotide
cuccagucugaccuaguac

SEQ ID NO: 1554247 - RNA, 19 nt, Artificial Sequence
  Description of Artificial Sequence: Synthetic oligonucleotide
gcggucauccuccuucucg

SEQ ID NO: 1554248 - RNA, 19 nt, Artificial Sequence
  Description of Artificial Sequence: Synthetic oligonucleotide
caugcuacugaggcugccc

SEQ ID NO: 1554249 - RNA, 19 nt, Artificial Sequence
  Description of Artificial Sequence: Synthetic oligonucleotide
gcuuauuugccaagggcag

SEQ ID NO: 1554250 - RNA, 19 nt, Artificial Sequence
  Description of Artificial Sequence: Synthetic oligonucleotide
acugcucaugcuacugagg

SEQ ID NO: 1554251 - RNA, 19 nt, Artificial Sequence
  Description of Artificial Sequence: Synthetic oligonucleotide
ccugucaaggaugugcucc

SEQ ID NO: 1554252 - RNA, 19 nt, Artificial Sequence
  Description of Artificial Sequence: Synthetic oligonucleotide
ucccgaagguucucaguca

SEQ ID NO: 1554253 - RNA, 19 nt, Artificial Sequence
  Description of Artificial Sequence: Synthetic oligonucleotide
gucuagaggagcugccaac

SEQ ID NO: 1554254 - RNA, 19 nt, Artificial Sequence
  Description of Artificial Sequence: Synthetic oligonucleotide
cucacauacauguuguuuu

SEQ ID NO: 1554255 - RNA, 19 nt, Artificial Sequence
  Description of Artificial Sequence: Synthetic oligonucleotide
uguguuagaaggggacaaa

SEQ ID NO: 1554256 - RNA, 19 nt, Artificial Sequence
  Description of Artificial Sequence: Synthetic oligonucleotide
gccacugucacuguccacc

SEQ ID NO: 1554257 - RNA, 19 nt, Artificial Sequence
  Description of Artificial Sequence: Synthetic oligonucleotide
uucuccaugcaaagucgua

SEQ ID NO: 1554258 - RNA, 19 nt, Artificial Sequence
  Description of Artificial Sequence: Synthetic oligonucleotide
cacgaugucaggggugugc

SEQ ID NO: 1554259 - RNA, 19 nt, Artificial Sequence
  Description of Artificial Sequence: Synthetic oligonucleotide
guuccuuaguguguuagaa

SEQ ID NO: 1554260 - RNA, 19 nt, Artificial Sequence
  Description of Artificial Sequence: Synthetic oligonucleotide
cacaugauagacccacaga

SEQ ID NO: 1554261 - RNA, 19 nt, Artificial Sequence
  Description of Artificial Sequence: Synthetic oligonucleotide
ugcaggggcacuccucaaa

SEQ ID NO: 1554262 - RNA, 19 nt, Artificial Sequence
  Description of Artificial Sequence: Synthetic oligonucleotide
caaccucguccauucgacc

SEQ ID NO: 1554263 - RNA, 19 nt, Artificial Sequence
  Description of Artificial Sequence: Synthetic oligonucleotide
gagcgugaccucugucuag

SEQ ID NO: 1554264 - RNA, 19 nt, Artificial Sequence
  Description of Artificial Sequence: Synthetic oligonucleotide
guggugacggcgaucccgg

SEQ ID NO: 1554265 - RNA, 19 nt, Artificial Sequence
  Description of Artificial Sequence: Synthetic oligonucleotide
aaagacucacauacauguu

SEQ ID NO: 1554266 - RNA, 19 nt, Artificial Sequence
  Description of Artificial Sequence: Synthetic oligonucleotide
cacaccuguuccuccaguc

SEQ ID NO: 1554267 - RNA, 19 nt, Artificial Sequence
  Description of Artificial Sequence: Synthetic oligonucleotide
caaaagauguaagccuuga

SEQ ID NO: 1554268 - RNA, 19 nt, Artificial Sequence
  Description of Artificial Sequence: Synthetic oligonucleotide
uaugggugcucagggaguc

SEQ ID NO: 1554269 - RNA, 19 nt, Artificial Sequence
  Description of Artificial Sequence: Synthetic oligonucleotide
ccucaaugcggaucgaaug

SEQ ID NO: 1554270 - RNA, 19 nt, Artificial Sequence
  Description of Artificial Sequence: Synthetic oligonucleotide
ucaggagcuuucuggucaa

SEQ ID NO: 1554271 - RNA, 19 nt, Artificial Sequence
  Description of Artificial Sequence: Synthetic oligonucleotide
cguccauucgaccacacug

SEQ ID NO: 1554272 - RNA, 19 nt, Artificial Sequence
  Description of Artificial Sequence: Synthetic oligonucleotide
uauuugccaagggcaggcc

SEQ ID NO: 1554273 - RNA, 19 nt, Artificial Sequence
  Description of Artificial Sequence: Synthetic oligonucleotide
cucaugcuacugaggcugc

SEQ ID NO: 1554274 - RNA, 19 nt, Artificial Sequence
  Description of Artificial Sequence: Synthetic oligonucleotide
ucguccauucgaccacacu

SEQ ID NO: 1554275 - RNA, 19 nt, Artificial Sequence
  Description of Artificial Sequence: Synthetic oligonucleotide
caucgagcugacagccacc

SEQ ID NO: 1554276 - RNA, 19 nt, Artificial Sequence
  Description of Artificial Sequence: Synthetic oligonucleotide
caguguaugcagcagcgaa

SEQ ID NO: 1554277 - RNA, 19 nt, Artificial Sequence
  Description of Artificial Sequence: Synthetic oligonucleotide
guaagccuugauguuguca

SEQ ID NO: 1554278 - RNA, 19 nt, Artificial Sequence
  Description of Artificial Sequence: Synthetic oligonucleotide
ugcuuagccagggguacac

SEQ ID NO: 1554279 - RNA, 19 nt, Artificial Sequence
  Description of Artificial Sequence: Synthetic oligonucleotide
acagacgagcgugaccucu

SEQ ID NO: 1554280 - RNA, 19 nt, Artificial Sequence
  Description of Artificial Sequence: Synthetic oligonucleotide
cuaugccacaugacucaug

SEQ ID NO: 1554281 - RNA, 19 nt, Artificial Sequence
  Description of Artificial Sequence: Synthetic oligonucleotide
gcagcgaaugcggucaucc

SEQ ID NO: 1554282 - RNA, 19 nt, Artificial Sequence
  Description of Artificial Sequence: Synthetic oligonucleotide
cacugcugucaguuagggc

SEQ ID NO: 1554283 - RNA, 19 nt, Artificial Sequence
  Description of Artificial Sequence: Synthetic oligonucleotide
aucgagcugacagccacca

SEQ ID NO: 1554284 - RNA, 19 nt, Artificial Sequence
  Description of Artificial Sequence: Synthetic oligonucleotide
auacaaggccccaguguag

SEQ ID NO: 1554285 - RNA, 19 nt, Artificial Sequence
  Description of Artificial Sequence: Synthetic oligonucleotide
agcuuguccuugcagugua

SEQ ID NO: 1554286 - RNA, 19 nt, Artificial Sequence
  Description of Artificial Sequence: Synthetic oligonucleotide
accucugucuagaggagcu

SEQ ID NO: 1554287 - RNA, 19 nt, Artificial Sequence
  Description of Artificial Sequence: Synthetic oligonucleotide
cuucucguccaggacugag

SEQ ID NO: 1554288 - RNA, 19 nt, Artificial Sequence
  Description of Artificial Sequence: Synthetic oligonucleotide
aggagcuuucuggucaacu

SEQ ID NO: 1554289 - RNA, 19 nt, Artificial Sequence
  Description of Artificial Sequence: Synthetic oligonucleotide
uuccuccagucugaccuag

SEQ ID NO: 1554290 - RNA, 19 nt, Artificial Sequence
  Description of Artificial Sequence: Synthetic oligonucleotide
gcgaaugcggucauccucc

SEQ ID NO: 1554291 - RNA, 19 nt, Artificial Sequence
  Description of Artificial Sequence: Synthetic oligonucleotide
aagcccuuccacagacgag

SEQ ID NO: 1554292 - RNA, 19 nt, Artificial Sequence
  Description of Artificial Sequence: Synthetic oligonucleotide
cagccaccaugauuauuag

SEQ ID NO: 1554293 - RNA, 19 nt, Artificial Sequence
  Description of Artificial Sequence: Synthetic oligonucleotide
uuggugcaggggcacuccu

SEQ ID NO: 1554294 - RNA, 19 nt, Artificial Sequence
  Description of Artificial Sequence: Synthetic oligonucleotide
cugccaacucccugucaag

SEQ ID NO: 1554295 - RNA, 19 nt, Artificial Sequence
  Description of Artificial Sequence: Synthetic oligonucleotide
caaugagcuccauacauuu

SEQ ID NO: 1554296 - RNA, 19 nt, Artificial Sequence
  Description of Artificial Sequence: Synthetic oligonucleotide
caggggcacuccucaaaag

SEQ ID NO: 1554297 - RNA, 19 nt, Artificial Sequence
  Description of Artificial Sequence: Synthetic oligonucleotide
cagacgagcgugaccucug

SEQ ID NO: 1554298 - RNA, 19 nt, Artificial Sequence
  Description of Artificial Sequence: Synthetic oligonucleotide
agcgugaccucugucuaga

SEQ ID NO: 1554299 - RNA, 19 nt, Artificial Sequence
  Description of Artificial Sequence: Synthetic oligonucleotide
gcuacugaggcugccccgg

SEQ ID NO: 1554300 - RNA, 19 nt, Artificial Sequence
  Description of Artificial Sequence: Synthetic oligonucleotide
guguguuagaaggggacaa

SEQ ID NO: 1554301 - RNA, 19 nt, Artificial Sequence
  Description of Artificial Sequence: Synthetic oligonucleotide
ucaugcuacugaggcugcc

SEQ ID NO: 1554302 - RNA, 19 nt, Artificial Sequence
  Description of Artificial Sequence: Synthetic oligonucleotide
augcggaucgaauggccua

SEQ ID NO: 1554303 - RNA, 19 nt, Artificial Sequence
  Description of Artificial Sequence: Synthetic oligonucleotide
aaugaccaucgagcugaca

SEQ ID NO: 1554304 - RNA, 19 nt, Artificial Sequence
  Description of Artificial Sequence: Synthetic oligonucleotide
caaagucguaguuucucgu

SEQ ID NO: 1554305 - RNA, 19 nt, Artificial Sequence
  Description of Artificial Sequence: Synthetic oligonucleotide
auggccuagcuaugccaca

SEQ ID NO: 1554306 - RNA, 19 nt, Artificial Sequence
  Description of Artificial Sequence: Synthetic oligonucleotide
cccaggaaagccucugcag

SEQ ID NO: 1554307 - RNA, 19 nt, Artificial Sequence
  Description of Artificial Sequence: Synthetic oligonucleotide
ggugcaggggcacuccuca

SEQ ID NO: 1554308 - RNA, 19 nt, Artificial Sequence
  Description of Artificial Sequence: Synthetic oligonucleotide
  modified_base (8)..(8): a, c, u, g, unknown or other
cagcagcnggggcugguag

SEQ ID NO: 1554309 - RNA, 19 nt, Artificial Sequence
  Description of Artificial Sequence: Synthetic oligonucleotide
ccagucugaccuaguacag

SEQ ID NO: 1554310 - RNA, 19 nt, Artificial Sequence
  Description of Artificial Sequence: Synthetic oligonucleotide
ugccuggucccugaccacu

SEQ ID NO: 1554311 - RNA, 19 nt, Artificial Sequence
  Description of Artificial Sequence: Synthetic oligonucleotide
guuggugcaggggcacucc

SEQ ID NO: 1554312 - RNA, 19 nt, Artificial Sequence
  Description of Artificial Sequence: Synthetic oligonucleotide
cgagcugacagccaccaug

SEQ ID NO: 1554313 - RNA, 19 nt, Artificial Sequence
  Description of Artificial Sequence: Synthetic oligonucleotide
cugacaacaaagacaugau

SEQ ID NO: 1554314 - RNA, 19 nt, Artificial Sequence
  Description of Artificial Sequence: Synthetic oligonucleotide
auagacccacagaggcgac

SEQ ID NO: 1554315 - RNA, 19 nt, Artificial Sequence
  Description of Artificial Sequence: Synthetic oligonucleotide
cuugcacaugauagaccca

SEQ ID NO: 1554316 - RNA, 19 nt, Artificial Sequence
  Description of Artificial Sequence: Synthetic oligonucleotide
ccaccaugauuauuagcac

SEQ ID NO: 1554317 - RNA, 19 nt, Artificial Sequence
  Description of Artificial Sequence: Synthetic oligonucleotide
ccaucgagcugacagccac

SEQ ID NO: 1554318 - RNA, 19 nt, Artificial Sequence
  Description of Artificial Sequence: Synthetic oligonucleotide
uagacccacagaggcgaca

SEQ ID NO: 1554319 - RNA, 19 nt, Artificial Sequence
  Description of Artificial Sequence: Synthetic oligonucleotide
uggccuagcuaugccacau

SEQ ID NO: 1554320 - RNA, 19 nt, Artificial Sequence
  Description of Artificial Sequence: Synthetic oligonucleotide
aucgaauggccuagcuaug

SEQ ID NO: 1554321 - RNA, 19 nt, Artificial Sequence
  Description of Artificial Sequence: Synthetic oligonucleotide
agacgagcgugaccucugu

SEQ ID NO: 1554322 - RNA, 19 nt, Artificial Sequence
  Description of Artificial Sequence: Synthetic oligonucleotide
ccuagcuaugccacaugac

SEQ ID NO: 1554323 - RNA, 19 nt, Artificial Sequence
  Description of Artificial Sequence: Synthetic oligonucleotide
ggaugugcuccuuuauuua

SEQ ID NO: 1554324 - RNA, 19 nt, Artificial Sequence
  Description of Artificial Sequence: Synthetic oligonucleotide
cccgaagguucucagucag

SEQ ID NO: 1554325 - RNA, 19 nt, Artificial Sequence
  Description of Artificial Sequence: Synthetic oligonucleotide
gauuauuagcacaccuguu

SEQ ID NO: 1554326 - RNA, 19 nt, Artificial Sequence
  Description of Artificial Sequence: Synthetic oligonucleotide
gccuagcuaugccacauga

SEQ ID NO: 1554327 - RNA, 19 nt, Artificial Sequence
  Description of Artificial Sequence: Synthetic oligonucleotide
uccuccagucugaccuagu

SEQ ID NO: 1554328 - RNA, 19 nt, Artificial Sequence
  Description of Artificial Sequence: Synthetic oligonucleotide
cuacugaggcugccccggc

SEQ ID NO: 1554329 - RNA, 19 nt, Artificial Sequence
  Description of Artificial Sequence: Synthetic oligonucleotide
cucguccaggacugagcug

SEQ ID NO: 1554330 - RNA, 19 nt, Artificial Sequence
  Description of Artificial Sequence: Synthetic oligonucleotide
gacgagcgugaccucuguc

SEQ ID NO: 1554331 - RNA, 19 nt, Artificial Sequence
  Description of Artificial Sequence: Synthetic oligonucleotide
aagugccgugagugaggcu

SEQ ID NO: 1554332 - RNA, 19 nt, Artificial Sequence
  Description of Artificial Sequence: Synthetic oligonucleotide
ggaucgaauggccuagcua

SEQ ID NO: 1554333 - RNA, 19 nt, Artificial Sequence
  Description of Artificial Sequence: Synthetic oligonucleotide
uugggucagugaagggauu

SEQ ID NO: 1554334 - RNA, 19 nt, Artificial Sequence
  Description of Artificial Sequence: Synthetic oligonucleotide
ccugauguauucaggagcu

SEQ ID NO: 1554335 - RNA, 19 nt, Artificial Sequence
  Description of Artificial Sequence: Synthetic oligonucleotide
gcagcagcgaaugcgguca

SEQ ID NO: 1554336 - RNA, 19 nt, Artificial Sequence
  Description of Artificial Sequence: Synthetic oligonucleotide
caugacucaugaugacuua

SEQ ID NO: 1554337 - RNA, 19 nt, Artificial Sequence
  Description of Artificial Sequence: Synthetic oligonucleotide
ggagcugccaacucccugu

SEQ ID NO: 1554338 - RNA, 19 nt, Artificial Sequence
  Description of Artificial Sequence: Synthetic oligonucleotide
ggacacuguuaggugacug

SEQ ID NO: 1554339 - RNA, 19 nt, Artificial Sequence
  Description of Artificial Sequence: Synthetic oligonucleotide
gaaggacauuuuagcaucu

SEQ ID NO: 1554340 - RNA, 19 nt, Artificial Sequence
  Description of Artificial Sequence: Synthetic oligonucleotide
uggacacuguuaggugacu

SEQ ID NO: 1554341 - RNA, 19 nt, Artificial Sequence
  Description of Artificial Sequence: Synthetic oligonucleotide
caaugaccaucgagcugac

SEQ ID NO: 1554342 - RNA, 19 nt, Artificial Sequence
  Description of Artificial Sequence: Synthetic oligonucleotide
cucguccauucgaccacac

SEQ ID NO: 1554343 - RNA, 19 nt, Artificial Sequence
  Description of Artificial Sequence: Synthetic oligonucleotide
gccaaugagcuccauacau

SEQ ID NO: 1554344 - RNA, 19 nt, Artificial Sequence
  Description of Artificial Sequence: Synthetic oligonucleotide
ccuaguacagagaccaacu

SEQ ID NO: 1554345 - RNA, 19 nt, Artificial Sequence
  Description of Artificial Sequence: Synthetic oligonucleotide
gucaggggugugcuccuuc

SEQ ID NO: 1554346 - RNA, 19 nt, Artificial Sequence
  Description of Artificial Sequence: Synthetic oligonucleotide
ugacagccaccaugauuau

SEQ ID NO: 1554347 - RNA, 19 nt, Artificial Sequence
  Description of Artificial Sequence: Synthetic oligonucleotide
cacuucaacucccgaaggu

SEQ ID NO: 1554348 - RNA, 19 nt, Artificial Sequence
  Description of Artificial Sequence: Synthetic oligonucleotide
gacaguggugacggcgauc

SEQ ID NO: 1554349 - RNA, 19 nt, Artificial Sequence
  Description of Artificial Sequence: Synthetic oligonucleotide
ugcugucaguuagggcccc

SEQ ID NO: 1554350 - RNA, 19 nt, Artificial Sequence
  Description of Artificial Sequence: Synthetic oligonucleotide
cacaugacucaugaugacu

SEQ ID NO: 1554351 - RNA, 19 nt, Artificial Sequence
  Description of Artificial Sequence: Synthetic oligonucleotide
ccaugauuauuagcacacc

SEQ ID NO: 1554352 - RNA, 19 nt, Artificial Sequence
  Description of Artificial Sequence: Synthetic oligonucleotide
cuuagccagggguacacuu

SEQ ID NO: 1554353 - RNA, 19 nt, Artificial Sequence
  Description of Artificial Sequence: Synthetic oligonucleotide
gccagggguacacuucaac

SEQ ID NO: 1554354 - RNA, 19 nt, Artificial Sequence
  Description of Artificial Sequence: Synthetic oligonucleotide
guacagagaccaacuccuc

SEQ ID NO: 1554355 - RNA, 19 nt, Artificial Sequence
  Description of Artificial Sequence: Synthetic oligonucleotide
agcagcgaaugcggucauc

SEQ ID NO: 1554356 - RNA, 19 nt, Artificial Sequence
  Description of Artificial Sequence: Synthetic oligonucleotide
gccccaguguagugcaugc

SEQ ID NO: 1554357 - RNA, 19 nt, Artificial Sequence
  Description of Artificial Sequence: Synthetic oligonucleotide
ggacuguuugggucaguga

SEQ ID NO: 1554358 - RNA, 19 nt, Artificial Sequence
  Description of Artificial Sequence: Synthetic oligonucleotide
gaugagcaguaagugccgu

SEQ ID NO: 1554359 - RNA, 19 nt, Artificial Sequence
  Description of Artificial Sequence: Synthetic oligonucleotide
ccacaugacucaugaugac

SEQ ID NO: 1554360 - RNA, 19 nt, Artificial Sequence
  Description of Artificial Sequence: Synthetic oligonucleotide
gucagugaagggauucccu

SEQ ID NO: 1554361 - RNA, 19 nt, Artificial Sequence
  Description of Artificial Sequence: Synthetic oligonucleotide
cagucugaccuaguacaga

SEQ ID NO: 1554362 - RNA, 19 nt, Artificial Sequence
  Description of Artificial Sequence: Synthetic oligonucleotide
ucgagcugacagccaccau

SEQ ID NO: 1554363 - RNA, 19 nt, Artificial Sequence
  Description of Artificial Sequence: Synthetic oligonucleotide
cgaauggccuagcuaugcc

SEQ ID NO: 1554364 - RNA, 19 nt, Artificial Sequence
  Description of Artificial Sequence: Synthetic oligonucleotide
guagugcaugcacaucaau

SEQ ID NO: 1554365 - RNA, 19 nt, Artificial Sequence
  Description of Artificial Sequence: Synthetic oligonucleotide
agaaggggacaaagucaga

SEQ ID NO: 1554366 - RNA, 19 nt, Artificial Sequence
  Description of Artificial Sequence: Synthetic oligonucleotide
cacuguuaggugacuggcu

SEQ ID NO: 1554367 - RNA, 19 nt, Artificial Sequence
  Description of Artificial Sequence: Synthetic oligonucleotide
gucugaccuaguacagaga

SEQ ID NO: 1554368 - RNA, 19 nt, Artificial Sequence
  Description of Artificial Sequence: Synthetic oligonucleotide
ggccaaugagcuccauaca

SEQ ID NO: 1554369 - RNA, 19 nt, Artificial Sequence
  Description of Artificial Sequence: Synthetic oligonucleotide
ggucaacuuucuccaugca

SEQ ID NO: 1554370 - RNA, 19 nt, Artificial Sequence
  Description of Artificial Sequence: Synthetic oligonucleotide
gugccgugagugaggcucc

SEQ ID NO: 1554371 - RNA, 19 nt, Artificial Sequence
  Description of Artificial Sequence: Synthetic oligonucleotide
ggugcuggacuguuugggu

SEQ ID NO: 1554372 - RNA, 19 nt, Artificial Sequence
  Description of Artificial Sequence: Synthetic oligonucleotide
ggagcuuucuggucaacuu

SEQ ID NO: 1554373 - RNA, 19 nt, Artificial Sequence
  Description of Artificial Sequence: Synthetic oligonucleotide
cugccuggucccugaccac

SEQ ID NO: 1554374 - RNA, 19 nt, Artificial Sequence
  Description of Artificial Sequence: Synthetic oligonucleotide
ccgaagguucucagucagc

SEQ ID NO: 1554375 - RNA, 19 nt, Artificial Sequence
  Description of Artificial Sequence: Synthetic oligonucleotide
  modified_base (3)..(3): a, c, u, g, unknown or other
gcnggggcugguagcaccc

SEQ ID NO: 1554376 - RNA, 19 nt, Artificial Sequence
  Description of Artificial Sequence: Synthetic oligonucleotide
aucugacaacaaagacaug

SEQ ID NO: 1554377 - RNA, 19 nt, Artificial Sequence
  Description of Artificial Sequence: Synthetic oligonucleotide
cacagacgagcgugaccuc

SEQ ID NO: 1554378 - RNA, 19 nt, Artificial Sequence
  Description of Artificial Sequence: Synthetic oligonucleotide
ggccuagcuaugccacaug

SEQ ID NO: 1554379 - RNA, 19 nt, Artificial Sequence
  Description of Artificial Sequence: Synthetic oligonucleotide
guaugggugcucagggagu

SEQ ID NO: 1554380 - RNA, 19 nt, Artificial Sequence
  Description of Artificial Sequence: Synthetic oligonucleotide
caaggaugugcuccuuuau

SEQ ID NO: 1554381 - RNA, 19 nt, Artificial Sequence
  Description of Artificial Sequence: Synthetic oligonucleotide
  modified_base (6)..(6): a, c, u, g, unknown or other
gcagcnggggcugguagca

SEQ ID NO: 1554382 - RNA, 19 nt, Artificial Sequence
  Description of Artificial Sequence: Synthetic oligonucleotide
ccacagacgagcgugaccu

SEQ ID NO: 1554383 - RNA, 19 nt, Artificial Sequence
  Description of Artificial Sequence: Synthetic oligonucleotide
ggacugagcugacacugcu

SEQ ID NO: 1554384 - RNA, 19 nt, Artificial Sequence
  Description of Artificial Sequence: Synthetic oligonucleotide
ggcacuggugagcuuauuu

SEQ ID NO: 1554385 - RNA, 19 nt, Artificial Sequence
  Description of Artificial Sequence: Synthetic oligonucleotide
cagaggcgacaguggugac

SEQ ID NO: 1554386 - RNA, 19 nt, Artificial Sequence
  Description of Artificial Sequence: Synthetic oligonucleotide
gcccuuccacagacgagcg

SEQ ID NO: 1554387 - RNA, 19 nt, Artificial Sequence
  Description of Artificial Sequence: Synthetic oligonucleotide
cccggcgggagccauggac

SEQ ID NO: 1554388 - RNA, 19 nt, Artificial Sequence
  Description of Artificial Sequence: Synthetic oligonucleotide
gggcugguagcacccucug

SEQ ID NO: 1554389 - RNA, 19 nt, Artificial Sequence
  Description of Artificial Sequence: Synthetic oligonucleotide
ggccccaguguagugcaug

SEQ ID NO: 1554390 - RNA, 19 nt, Artificial Sequence
  Description of Artificial Sequence: Synthetic oligonucleotide
augcagcagcgaaugcggu

SEQ ID NO: 1554391 - RNA, 19 nt, Artificial Sequence
  Description of Artificial Sequence: Synthetic oligonucleotide
ggcugguaugggugcucag

SEQ ID NO: 1554392 - RNA, 19 nt, Artificial Sequence
  Description of Artificial Sequence: Synthetic oligonucleotide
gaagccuauccuggaacuu

SEQ ID NO: 1554393 - RNA, 19 nt, Artificial Sequence
  Description of Artificial Sequence: Synthetic oligonucleotide
gcuuggcaucaaaagaugu

SEQ ID NO: 1554394 - RNA, 19 nt, Artificial Sequence
  Description of Artificial Sequence: Synthetic oligonucleotide
gcuggacuguuugggucag

SEQ ID NO: 1554395 - RNA, 19 nt, Artificial Sequence
  Description of Artificial Sequence: Synthetic oligonucleotide
ggucccugaccacugcugu

SEQ ID NO: 1554396 - RNA, 19 nt, Artificial Sequence
  Description of Artificial Sequence: Synthetic oligonucleotide
ccucaaccucguccauucg

SEQ ID NO: 1554397 - RNA, 19 nt, Artificial Sequence
  Description of Artificial Sequence: Synthetic oligonucleotide
gguuggugcaggggcacuc

SEQ ID NO: 1554398 - RNA, 19 nt, Artificial Sequence
  Description of Artificial Sequence: Synthetic oligonucleotide
ugccgugagugaggcucca

SEQ ID NO: 1554399 - RNA, 19 nt, Artificial Sequence
  Description of Artificial Sequence: Synthetic oligonucleotide
gggugugcuccuucucguc

SEQ ID NO: 1554400 - RNA, 19 nt, Artificial Sequence
  Description of Artificial Sequence: Synthetic oligonucleotide
gcgacaguggugacggcga

SEQ ID NO: 1554401 - RNA, 19 nt, Artificial Sequence
  Description of Artificial Sequence: Synthetic oligonucleotide
gaccuaguacagagaccaa

SEQ ID NO: 1554402 - RNA, 19 nt, Artificial Sequence
  Description of Artificial Sequence: Synthetic oligonucleotide
gcgugaccucugucuagag

SEQ ID NO: 1554403 - RNA, 19 nt, Artificial Sequence
  Description of Artificial Sequence: Synthetic oligonucleotide
gggauucccugccccugac

SEQ ID NO: 1554404 - RNA, 19 nt, Artificial Sequence
  Description of Artificial Sequence: Synthetic oligonucleotide
ccggcgggagccauggaca

SEQ ID NO: 1554405 - RNA, 19 nt, Artificial Sequence
  Description of Artificial Sequence: Synthetic oligonucleotide
caggagcuuucuggucaac

SEQ ID NO: 1554406 - RNA, 19 nt, Artificial Sequence
  Description of Artificial Sequence: Synthetic oligonucleotide
  modified_base (5)..(5): a, c, u, g, unknown or other
cagcnggggcugguagcac

SEQ ID NO: 1554407 - RNA, 19 nt, Artificial Sequence
  Description of Artificial Sequence: Synthetic oligonucleotide
cugcuuagccagggguaca

SEQ ID NO: 1554408 - RNA, 19 nt, Artificial Sequence
  Description of Artificial Sequence: Synthetic oligonucleotide
gcaguguaugcagcagcga

SEQ ID NO: 1554409 - RNA, 19 nt, Artificial Sequence
  Description of Artificial Sequence: Synthetic oligonucleotide
ugucaggggugugcuccuu

SEQ ID NO: 1554410 - RNA, 19 nt, Artificial Sequence
  Description of Artificial Sequence: Synthetic oligonucleotide
augcugccauccugaugua

SEQ ID NO: 1554411 - RNA, 19 nt, Artificial Sequence
  Description of Artificial Sequence: Synthetic oligonucleotide
cuggucccugaccacugcu

SEQ ID NO: 1554412 - RNA, 19 nt, Artificial Sequence
  Description of Artificial Sequence: Synthetic oligonucleotide
gggguuggugcaggggcac

SEQ ID NO: 1554413 - RNA, 19 nt, Artificial Sequence
  Description of Artificial Sequence: Synthetic oligonucleotide
ccccugacucuccugccuc

SEQ ID NO: 1554414 - RNA, 19 nt, Artificial Sequence
  Description of Artificial Sequence: Synthetic oligonucleotide
gacagccaccaugauuauu

SEQ ID NO: 1554415 - RNA, 19 nt, Artificial Sequence
  Description of Artificial Sequence: Synthetic oligonucleotide
ccaaugagcuccauacauu

SEQ ID NO: 1554416 - RNA, 19 nt, Artificial Sequence
  Description of Artificial Sequence: Synthetic oligonucleotide
gcacaucaaugaccaucga

SEQ ID NO: 1554417 - RNA, 19 nt, Artificial Sequence
  Description of Artificial Sequence: Synthetic oligonucleotide
gaaugcggucauccuccuu

SEQ ID NO: 1554418 - RNA, 19 nt, Artificial Sequence
  Description of Artificial Sequence: Synthetic oligonucleotide
gggcacuccucaaaagggu

SEQ ID NO: 1554419 - RNA, 19 nt, Artificial Sequence
  Description of Artificial Sequence: Synthetic oligonucleotide
gccuggucccugaccacug

SEQ ID NO: 1554420 - RNA, 19 nt, Artificial Sequence
  Description of Artificial Sequence: Synthetic oligonucleotide
ccuccagucugaccuagua

SEQ ID NO: 1554421 - RNA, 19 nt, Artificial Sequence
  Description of Artificial Sequence: Synthetic oligonucleotide
cagcuuguccuugcagugu

SEQ ID NO: 1554422 - RNA, 19 nt, Artificial Sequence
  Description of Artificial Sequence: Synthetic oligonucleotide
gcuuucuggucaacuuucu

SEQ ID NO: 1554423 - RNA, 19 nt, Artificial Sequence
  Description of Artificial Sequence: Synthetic oligonucleotide
gcggaucgaauggccuagc

SEQ ID NO: 1554424 - RNA, 19 nt, Artificial Sequence
  Description of Artificial Sequence: Synthetic oligonucleotide
ccaacucccugucaaggau

SEQ ID NO: 1554425 - RNA, 19 nt, Artificial Sequence
  Description of Artificial Sequence: Synthetic oligonucleotide
gccgugagugaggcuccag

SEQ ID NO: 1554426 - RNA, 19 nt, Artificial Sequence
  Description of Artificial Sequence: Synthetic oligonucleotide
ggggcugguagcacccucu

SEQ ID NO: 1554427 - RNA, 19 nt, Artificial Sequence
  Description of Artificial Sequence: Synthetic oligonucleotide
guugggugcuggacuguuu

SEQ ID NO: 1554428 - RNA, 19 nt, Artificial Sequence
  Description of Artificial Sequence: Synthetic oligonucleotide
cgagcgugaccucugucua

SEQ ID NO: 1554429 - RNA, 19 nt, Artificial Sequence
  Description of Artificial Sequence: Synthetic oligonucleotide
gcuaugccacaugacucau

SEQ ID NO: 1554430 - RNA, 19 nt, Artificial Sequence
  Description of Artificial Sequence: Synthetic oligonucleotide
ccucguccauucgaccaca

SEQ ID NO: 1554431 - RNA, 19 nt, Artificial Sequence
  Description of Artificial Sequence: Synthetic oligonucleotide
caccucaaccucguccauu

SEQ ID NO: 1554432 - RNA, 19 nt, Artificial Sequence
  Description of Artificial Sequence: Synthetic oligonucleotide
cguccaggacugagcugac

SEQ ID NO: 1554433 - RNA, 19 nt, Artificial Sequence
  Description of Artificial Sequence: Synthetic oligonucleotide
  modified_base (9)..(9): a, c, u, g, unknown or other
gcagcagcnggggcuggua

SEQ ID NO: 1554434 - RNA, 19 nt, Artificial Sequence
  Description of Artificial Sequence: Synthetic oligonucleotide
gcacccucugcaggguuua

SEQ ID NO: 1554435 - RNA, 19 nt, Artificial Sequence
  Description of Artificial Sequence: Synthetic oligonucleotide
aggccccaguguagugcau

SEQ ID NO: 1554436 - RNA, 19 nt, Artificial Sequence
  Description of Artificial Sequence: Synthetic oligonucleotide
cacccucugcaggguuuaa

SEQ ID NO: 1554437 - RNA, 19 nt, Artificial Sequence
  Description of Artificial Sequence: Synthetic oligonucleotide
ccccaguguagugcaugca

SEQ ID NO: 1554438 - RNA, 19 nt, Artificial Sequence
  Description of Artificial Sequence: Synthetic oligonucleotide
ccauucgaccacacugcuu

SEQ ID NO: 1554439 - RNA, 19 nt, Artificial Sequence
  Description of Artificial Sequence: Synthetic oligonucleotide
ccaacuccucaaugcggau

SEQ ID NO: 1554440 - RNA, 19 nt, Artificial Sequence
  Description of Artificial Sequence: Synthetic oligonucleotide
cagcagcgaaugcggucau

SEQ ID NO: 1554441 - RNA, 19 nt, Artificial Sequence
  Description of Artificial Sequence: Synthetic oligonucleotide
  modified_base (2)..(2): a, c, u, g, unknown or other
cnggggcugguagcacccu

SEQ ID NO: 1554442 - RNA, 19 nt, Artificial Sequence
  Description of Artificial Sequence: Synthetic oligonucleotide
cgaccacacugcuuggcau

SEQ ID NO: 1554443 - RNA, 19 nt, Artificial Sequence
  Description of Artificial Sequence: Synthetic oligonucleotide
gcuuguccuugcaguguau

SEQ ID NO: 1554444 - RNA, 19 nt, Artificial Sequence
  Description of Artificial Sequence: Synthetic oligonucleotide
cuggacuguuugggucagu

SEQ ID NO: 1554445 - RNA, 19 nt, Artificial Sequence
  Description of Artificial Sequence: Synthetic oligonucleotide
ggguuggugcaggggcacu

SEQ ID NO: 1554446 - RNA, 19 nt, Artificial Sequence
  Description of Artificial Sequence: Synthetic oligonucleotide
cggaucgaauggccuagcu

SEQ ID NO: 1554447 - RNA, 19 nt, Artificial Sequence
  Description of Artificial Sequence: Synthetic oligonucleotide
cgaaugcggucauccuccu

SEQ ID NO: 1554448 - RNA, 19 nt, Artificial Sequence
  Description of Artificial Sequence: Synthetic oligonucleotide
cgacaguggugacggcgau

SEQ ID NO: 1554449 - RNA, 19 nt, Artificial Sequence
  Description of Artificial Sequence: Synthetic oligonucleotide
aaaccaagcaccuucaguc

SEQ ID NO: 1554450 - RNA, 19 nt, Artificial Sequence
  Description of Artificial Sequence: Synthetic oligonucleotide
aaaacuggggucgacaccc

SEQ ID NO: 1554451 - RNA, 19 nt, Artificial Sequence
  Description of Artificial Sequence: Synthetic oligonucleotide
uugacuacaguacaggaag

SEQ ID NO: 1554452 - RNA, 19 nt, Artificial Sequence
  Description of Artificial Sequence: Synthetic oligonucleotide
agauauuuacacaagggcc

SEQ ID NO: 1554453 - RNA, 19 nt, Artificial Sequence
  Description of Artificial Sequence: Synthetic oligonucleotide
aaaacaaaacaaacaaaac

SEQ ID NO: 1554454 - RNA, 19 nt, Artificial Sequence
  Description of Artificial Sequence: Synthetic oligonucleotide
aaagccaaauacugguggc

SEQ ID NO: 1554455 - RNA, 19 nt, Artificial Sequence
  Description of Artificial Sequence: Synthetic oligonucleotide
uagaugacggucuuggugg

SEQ ID NO: 1554456 - RNA, 19 nt, Artificial Sequence
  Description of Artificial Sequence: Synthetic oligonucleotide
uggaacacgagaccgaagg

SEQ ID NO: 1554457 - RNA, 19 nt, Artificial Sequence
  Description of Artificial Sequence: Synthetic oligonucleotide
ucugaaaggauguugggcc

SEQ ID NO: 1554458 - RNA, 19 nt, Artificial Sequence
  Description of Artificial Sequence: Synthetic oligonucleotide
ugcaacuugaagaugacga

SEQ ID NO: 1554459 - RNA, 19 nt, Artificial Sequence
  Description of Artificial Sequence: Synthetic oligonucleotide
aaagcagguauauggggac

SEQ ID NO: 1554460 - RNA, 19 nt, Artificial Sequence
  Description of Artificial Sequence: Synthetic oligonucleotide
gugauaaaagaacaugagg

SEQ ID NO: 1554461 - RNA, 19 nt, Artificial Sequence
  Description of Artificial Sequence: Synthetic oligonucleotide
gauauggaacacgagaccg

SEQ ID NO: 1554462 - RNA, 19 nt, Artificial Sequence
  Description of Artificial Sequence: Synthetic oligonucleotide
agcagauucuugcucaggc

SEQ ID NO: 1554463 - RNA, 19 nt, Artificial Sequence
  Description of Artificial Sequence: Synthetic oligonucleotide
aacgaggcaggguugaaag

SEQ ID NO: 1554464 - RNA, 19 nt, Artificial Sequence
  Description of Artificial Sequence: Synthetic oligonucleotide
augacgauagcuccgggac

SEQ ID NO: 1554465 - RNA, 19 nt, Artificial Sequence
  Description of Artificial Sequence: Synthetic oligonucleotide
aaauacugguggcaggaag

SEQ ID NO: 1554466 - RNA, 19 nt, Artificial Sequence
  Description of Artificial Sequence: Synthetic oligonucleotide
agcuccauucaacaugugc

SEQ ID NO: 1554467 - RNA, 19 nt, Artificial Sequence
  Description of Artificial Sequence: Synthetic oligonucleotide
aauacugguggcaggaagg

SEQ ID NO: 1554468 - RNA, 19 nt, Artificial Sequence
  Description of Artificial Sequence: Synthetic oligonucleotide
ugucccgaggcccagaugc

SEQ ID NO: 1554469 - RNA, 19 nt, Artificial Sequence
  Description of Artificial Sequence: Synthetic oligonucleotide
auguaaggagggcacaccc

SEQ ID NO: 1554470 - RNA, 19 nt, Artificial Sequence
  Description of Artificial Sequence: Synthetic oligonucleotide
aagugauaaaagaacauga

SEQ ID NO: 1554471 - RNA, 19 nt, Artificial Sequence
  Description of Artificial Sequence: Synthetic oligonucleotide
uuaaagcccaccucuaccc

SEQ ID NO: 1554472 - RNA, 19 nt, Artificial Sequence
  Description of Artificial Sequence: Synthetic oligonucleotide
gaagugauaaaagaacaug

SEQ ID NO: 1554473 - RNA, 19 nt, Artificial Sequence
  Description of Artificial Sequence: Synthetic oligonucleotide
cuggauguaguaaaucucc

SEQ ID NO: 1554474 - RNA, 19 nt, Artificial Sequence
  Description of Artificial Sequence: Synthetic oligonucleotide
uggggcaccuacaacaggg

SEQ ID NO: 1554475 - RNA, 19 nt, Artificial Sequence
  Description of Artificial Sequence: Synthetic oligonucleotide
aggaagauaugcaucaugg

SEQ ID NO: 1554476 - RNA, 19 nt, Artificial Sequence
  Description of Artificial Sequence: Synthetic oligonucleotide
guaaaucuccaguucaaag

SEQ ID NO: 1554477 - RNA, 19 nt, Artificial Sequence
  Description of Artificial Sequence: Synthetic oligonucleotide
ggaagcaagagcgauaugg

SEQ ID NO: 1554478 - RNA, 19 nt, Artificial Sequence
  Description of Artificial Sequence: Synthetic oligonucleotide
aaggauguugggccaaguc

SEQ ID NO: 1554479 - RNA, 19 nt, Artificial Sequence
  Description of Artificial Sequence: Synthetic oligonucleotide
guauauggggaccacguag

SEQ ID NO: 1554480 - RNA, 19 nt, Artificial Sequence
  Description of Artificial Sequence: Synthetic oligonucleotide
ugggccaagucucauauac

SEQ ID NO: 1554481 - RNA, 19 nt, Artificial Sequence
  Description of Artificial Sequence: Synthetic oligonucleotide
aagucucauauacacaaaa

SEQ ID NO: 1554482 - RNA, 19 nt, Artificial Sequence
  Description of Artificial Sequence: Synthetic oligonucleotide
agauaugcaucauggugac

SEQ ID NO: 1554483 - RNA, 19 nt, Artificial Sequence
  Description of Artificial Sequence: Synthetic oligonucleotide
agcgauauggaacacgaga

SEQ ID NO: 1554484 - RNA, 19 nt, Artificial Sequence
  Description of Artificial Sequence: Synthetic oligonucleotide
aggacgagucacuaccugc

SEQ ID NO: 1554485 - RNA, 19 nt, Artificial Sequence
  Description of Artificial Sequence: Synthetic oligonucleotide
uucacuucggugaccaggc

SEQ ID NO: 1554486 - RNA, 19 nt, Artificial Sequence
  Description of Artificial Sequence: Synthetic oligonucleotide
ugaagugauaaaagaacau

SEQ ID NO: 1554487 - RNA, 19 nt, Artificial Sequence
  Description of Artificial Sequence: Synthetic oligonucleotide
uguaaggagggcacacccg

SEQ ID NO: 1554488 - RNA, 19 nt, Artificial Sequence
  Description of Artificial Sequence: Synthetic oligonucleotide
agcaagagcgauauggaac

SEQ ID NO: 1554489 - RNA, 19 nt, Artificial Sequence
  Description of Artificial Sequence: Synthetic oligonucleotide
aaauucacuucggugacca

SEQ ID NO: 1554490 - RNA, 19 nt, Artificial Sequence
  Description of Artificial Sequence: Synthetic oligonucleotide
acuuaaagcccaccucuac

SEQ ID NO: 1554491 - RNA, 19 nt, Artificial Sequence
  Description of Artificial Sequence: Synthetic oligonucleotide
agugauaaaagaacaugag

SEQ ID NO: 1554492 - RNA, 19 nt, Artificial Sequence
  Description of Artificial Sequence: Synthetic oligonucleotide
cuuaaagcccaccucuacc

SEQ ID NO: 1554493 - RNA, 19 nt, Artificial Sequence
  Description of Artificial Sequence: Synthetic oligonucleotide
aggaggaagauaugcauca

SEQ ID NO: 1554494 - RNA, 19 nt, Artificial Sequence
  Description of Artificial Sequence: Synthetic oligonucleotide
cuuugguagcuauaccggg

SEQ ID NO: 1554495 - RNA, 19 nt, Artificial Sequence
  Description of Artificial Sequence: Synthetic oligonucleotide
ucuaacuuguccccacggc

SEQ ID NO: 1554496 - RNA, 19 nt, Artificial Sequence
  Description of Artificial Sequence: Synthetic oligonucleotide
uuugccucaggaugugccg

SEQ ID NO: 1554497 - RNA, 19 nt, Artificial Sequence
  Description of Artificial Sequence: Synthetic oligonucleotide
uuugguagcuauaccggga

SEQ ID NO: 1554498 - RNA, 19 nt, Artificial Sequence
  Description of Artificial Sequence: Synthetic oligonucleotide
aaggagggcacacccgcac

SEQ ID NO: 1554499 - RNA, 19 nt, Artificial Sequence
  Description of Artificial Sequence: Synthetic oligonucleotide
guagaugacggucuuggug

SEQ ID NO: 1554500 - RNA, 19 nt, Artificial Sequence
  Description of Artificial Sequence: Synthetic oligonucleotide
uuuacacaagggcccagcc

SEQ ID NO: 1554501 - RNA, 19 nt, Artificial Sequence
  Description of Artificial Sequence: Synthetic oligonucleotide
ugguggcgaacuuaaagcc

SEQ ID NO: 1554502 - RNA, 19 nt, Artificial Sequence
  Description of Artificial Sequence: Synthetic oligonucleotide
aagagcgauauggaacacg

SEQ ID NO: 1554503 - RNA, 19 nt, Artificial Sequence
  Description of Artificial Sequence: Synthetic oligonucleotide
cugaagugauaaaagaaca

SEQ ID NO: 1554504 - RNA, 19 nt, Artificial Sequence
  Description of Artificial Sequence: Synthetic oligonucleotide
uaacuuguccccacggcug

SEQ ID NO: 1554505 - RNA, 19 nt, Artificial Sequence
  Description of Artificial Sequence: Synthetic oligonucleotide
gagaccgaaggguugcccg

SEQ ID NO: 1554506 - RNA, 19 nt, Artificial Sequence
  Description of Artificial Sequence: Synthetic oligonucleotide
cacaggaugacagaaguac

SEQ ID NO: 1554507 - RNA, 19 nt, Artificial Sequence
  Description of Artificial Sequence: Synthetic oligonucleotide
uggaagccggagcaaaucc

SEQ ID NO: 1554508 - RNA, 19 nt, Artificial Sequence
  Description of Artificial Sequence: Synthetic oligonucleotide
auuuacacaagggcccagc

SEQ ID NO: 1554509 - RNA, 19 nt, Artificial Sequence
  Description of Artificial Sequence: Synthetic oligonucleotide
gacgcugaagugauaaaag

SEQ ID NO: 1554510 - RNA, 19 nt, Artificial Sequence
  Description of Artificial Sequence: Synthetic oligonucleotide
auucacuucggugaccagg

SEQ ID NO: 1554511 - RNA, 19 nt, Artificial Sequence
  Description of Artificial Sequence: Synthetic oligonucleotide
cacacuuuccagcagccgc

SEQ ID NO: 1554512 - RNA, 19 nt, Artificial Sequence
  Description of Artificial Sequence: Synthetic oligonucleotide
gguggaacauguaaggagg

SEQ ID NO: 1554513 - RNA, 19 nt, Artificial Sequence
  Description of Artificial Sequence: Synthetic oligonucleotide
gaggaagauaugcaucaug

SEQ ID NO: 1554514 - RNA, 19 nt, Artificial Sequence
  Description of Artificial Sequence: Synthetic oligonucleotide
ugggguauaagcaccuccu

SEQ ID NO: 1554515 - RNA, 19 nt, Artificial Sequence
  Description of Artificial Sequence: Synthetic oligonucleotide
acuuugguagcuauaccgg

SEQ ID NO: 1554516 - RNA, 19 nt, Artificial Sequence
  Description of Artificial Sequence: Synthetic oligonucleotide
auguaugagaacaggauga

SEQ ID NO: 1554517 - RNA, 19 nt, Artificial Sequence
  Description of Artificial Sequence: Synthetic oligonucleotide
uauaccgggacaugaugca

SEQ ID NO: 1554518 - RNA, 19 nt, Artificial Sequence
  Description of Artificial Sequence: Synthetic oligonucleotide
gaacuuaaagcccaccucu

SEQ ID NO: 1554519 - RNA, 19 nt, Artificial Sequence
  Description of Artificial Sequence: Synthetic oligonucleotide
auagcuccgggacauggag

SEQ ID NO: 1554520 - RNA, 19 nt, Artificial Sequence
  Description of Artificial Sequence: Synthetic oligonucleotide
guugaaaggagccguuggc

SEQ ID NO: 1554521 - RNA, 19 nt, Artificial Sequence
  Description of Artificial Sequence: Synthetic oligonucleotide
guaaggagggcacacccgc

SEQ ID NO: 1554522 - RNA, 19 nt, Artificial Sequence
  Description of Artificial Sequence: Synthetic oligonucleotide
uacuaagagcagauucuug

SEQ ID NO: 1554523 - RNA, 19 nt, Artificial Sequence
  Description of Artificial Sequence: Synthetic oligonucleotide
aauccagcagauauuuaca

SEQ ID NO: 1554524 - RNA, 19 nt, Artificial Sequence
  Description of Artificial Sequence: Synthetic oligonucleotide
ggaaggaccucuaagcagg

SEQ ID NO: 1554525 - RNA, 19 nt, Artificial Sequence
  Description of Artificial Sequence: Synthetic oligonucleotide
uugguagcuauaccgggac

SEQ ID NO: 1554526 - RNA, 19 nt, Artificial Sequence
  Description of Artificial Sequence: Synthetic oligonucleotide
auaagcaccuccuuuccaa

SEQ ID NO: 1554527 - RNA, 19 nt, Artificial Sequence
  Description of Artificial Sequence: Synthetic oligonucleotide
ugaacacuggggcaccuac

SEQ ID NO: 1554528 - RNA, 19 nt, Artificial Sequence
  Description of Artificial Sequence: Synthetic oligonucleotide
acuugacuacaguacagga

SEQ ID NO: 1554529 - RNA, 19 nt, Artificial Sequence
  Description of Artificial Sequence: Synthetic oligonucleotide
agaugcgauaccaggggcc

SEQ ID NO: 1554530 - RNA, 19 nt, Artificial Sequence
  Description of Artificial Sequence: Synthetic oligonucleotide
uccguuugccucaggaugu

SEQ ID NO: 1554531 - RNA, 19 nt, Artificial Sequence
  Description of Artificial Sequence: Synthetic oligonucleotide
aaccaagcaccuucagucu

SEQ ID NO: 1554532 - RNA, 19 nt, Artificial Sequence
  Description of Artificial Sequence: Synthetic oligonucleotide
uuacacaagggcccagcca

SEQ ID NO: 1554533 - RNA, 19 nt, Artificial Sequence
  Description of Artificial Sequence: Synthetic oligonucleotide
caaaagccaaauacuggug

SEQ ID NO: 1554534 - RNA, 19 nt, Artificial Sequence
  Description of Artificial Sequence: Synthetic oligonucleotide
uaguaaaucuccaguucaa

SEQ ID NO: 1554535 - RNA, 19 nt, Artificial Sequence
  Description of Artificial Sequence: Synthetic oligonucleotide
gguauaagcaccuccuuuc

SEQ ID NO: 1554536 - RNA, 19 nt, Artificial Sequence
  Description of Artificial Sequence: Synthetic oligonucleotide
ugacuacaguacaggaagc

SEQ ID NO: 1554537 - RNA, 19 nt, Artificial Sequence
  Description of Artificial Sequence: Synthetic oligonucleotide
guauaagcaccuccuuucc

SEQ ID NO: 1554538 - RNA, 19 nt, Artificial Sequence
  Description of Artificial Sequence: Synthetic oligonucleotide
gaacaugaggcccguugag

SEQ ID NO: 1554539 - RNA, 19 nt, Artificial Sequence
  Description of Artificial Sequence: Synthetic oligonucleotide
cuccguuugccucaggaug

SEQ ID NO: 1554540 - RNA, 19 nt, Artificial Sequence
  Description of Artificial Sequence: Synthetic oligonucleotide
gguugaaaggagccguugg

SEQ ID NO: 1554541 - RNA, 19 nt, Artificial Sequence
  Description of Artificial Sequence: Synthetic oligonucleotide
uaaagcccaccucuacccc

SEQ ID NO: 1554542 - RNA, 19 nt, Artificial Sequence
  Description of Artificial Sequence: Synthetic oligonucleotide
uaccaggggccguagaaug

SEQ ID NO: 1554543 - RNA, 19 nt, Artificial Sequence
  Description of Artificial Sequence: Synthetic oligonucleotide
gaagccggagcaaauccag

SEQ ID NO: 1554544 - RNA, 19 nt, Artificial Sequence
  Description of Artificial Sequence: Synthetic oligonucleotide
gaugacgauagcuccggga

SEQ ID NO: 1554545 - RNA, 19 nt, Artificial Sequence
  Description of Artificial Sequence: Synthetic oligonucleotide
cacuugacuacaguacagg

SEQ ID NO: 1554546 - RNA, 19 nt, Artificial Sequence
  Description of Artificial Sequence: Synthetic oligonucleotide
cucuaacuuguccccacgg

SEQ ID NO: 1554547 - RNA, 19 nt, Artificial Sequence
  Description of Artificial Sequence: Synthetic oligonucleotide
agagcgauauggaacacga

SEQ ID NO: 1554548 - RNA, 19 nt, Artificial Sequence
  Description of Artificial Sequence: Synthetic oligonucleotide
caccggaaacugcugaggg

SEQ ID NO: 1554549 - RNA, 19 nt, Artificial Sequence
  Description of Artificial Sequence: Synthetic oligonucleotide
cugggguauaagcaccucc

SEQ ID NO: 1554550 - RNA, 19 nt, Artificial Sequence
  Description of Artificial Sequence: Synthetic oligonucleotide
ggcaggacgagucacuacc

SEQ ID NO: 1554551 - RNA, 19 nt, Artificial Sequence
  Description of Artificial Sequence: Synthetic oligonucleotide
uagcuccgggacauggagg

SEQ ID NO: 1554552 - RNA, 19 nt, Artificial Sequence
  Description of Artificial Sequence: Synthetic oligonucleotide
gguauuuaccacaggaaac

SEQ ID NO: 1554553 - RNA, 19 nt, Artificial Sequence
  Description of Artificial Sequence: Synthetic oligonucleotide
agacuuagagagguggaug

SEQ ID NO: 1554554 - RNA, 19 nt, Artificial Sequence
  Description of Artificial Sequence: Synthetic oligonucleotide
ggcuacuaagagcagauuc

SEQ ID NO: 1554555 - RNA, 19 nt, Artificial Sequence
  Description of Artificial Sequence: Synthetic oligonucleotide
ggcgguggaacauguaagg

SEQ ID NO: 1554556 - RNA, 19 nt, Artificial Sequence
  Description of Artificial Sequence: Synthetic oligonucleotide
ugaccaggugacaaggguu

SEQ ID NO: 1554557 - RNA, 19 nt, Artificial Sequence
  Description of Artificial Sequence: Synthetic oligonucleotide
gagggaaagcuacacgcga

SEQ ID NO: 1554558 - RNA, 19 nt, Artificial Sequence
  Description of Artificial Sequence: Synthetic oligonucleotide
agaccgaaggguugcccgg

SEQ ID NO: 1554559 - RNA, 19 nt, Artificial Sequence
  Description of Artificial Sequence: Synthetic oligonucleotide
cuuggcuggaagccggagc

SEQ ID NO: 1554560 - RNA, 19 nt, Artificial Sequence
  Description of Artificial Sequence: Synthetic oligonucleotide
gacuuagagagguggaugu

SEQ ID NO: 1554561 - RNA, 19 nt, Artificial Sequence
  Description of Artificial Sequence: Synthetic oligonucleotide
aggaugacagaaguacuug

SEQ ID NO: 1554562 - RNA, 19 nt, Artificial Sequence
  Description of Artificial Sequence: Synthetic oligonucleotide
aggugacaaggguugagca

SEQ ID NO: 1554563 - RNA, 19 nt, Artificial Sequence
  Description of Artificial Sequence: Synthetic oligonucleotide
aaaagaacaugaggcccgu

SEQ ID NO: 1554564 - RNA, 19 nt, Artificial Sequence
  Description of Artificial Sequence: Synthetic oligonucleotide
aggagggcacacccgcacc

SEQ ID NO: 1554565 - RNA, 19 nt, Artificial Sequence
  Description of Artificial Sequence: Synthetic oligonucleotide
agagcuccauucaacaugu

SEQ ID NO: 1554566 - RNA, 19 nt, Artificial Sequence
  Description of Artificial Sequence: Synthetic oligonucleotide
gcaagagcgauauggaaca

SEQ ID NO: 1554567 - RNA, 19 nt, Artificial Sequence
  Description of Artificial Sequence: Synthetic oligonucleotide
uauggaacacgagaccgaa

SEQ ID NO: 1554568 - RNA, 19 nt, Artificial Sequence
  Description of Artificial Sequence: Synthetic oligonucleotide
cuaaagcccacaguguauc

SEQ ID NO: 1554569 - RNA, 19 nt, Artificial Sequence
  Description of Artificial Sequence: Synthetic oligonucleotide
agccggagcaaauccagca

SEQ ID NO: 1554570 - RNA, 19 nt, Artificial Sequence
  Description of Artificial Sequence: Synthetic oligonucleotide
ucuggugucccgaggccca

SEQ ID NO: 1554571 - RNA, 19 nt, Artificial Sequence
  Description of Artificial Sequence: Synthetic oligonucleotide
ugacgauagcuccgggaca

SEQ ID NO: 1554572 - RNA, 19 nt, Artificial Sequence
  Description of Artificial Sequence: Synthetic oligonucleotide
cuucccgugggucaugguc

SEQ ID NO: 1554573 - RNA, 19 nt, Artificial Sequence
  Description of Artificial Sequence: Synthetic oligonucleotide
aacacgagaccgaaggguu

SEQ ID NO: 1554574 - RNA, 19 nt, Artificial Sequence
  Description of Artificial Sequence: Synthetic oligonucleotide
uagcuauaccgggacauga

SEQ ID NO: 1554575 - RNA, 19 nt, Artificial Sequence
  Description of Artificial Sequence: Synthetic oligonucleotide
uauggggaccacguagagc

SEQ ID NO: 1554576 - RNA, 19 nt, Artificial Sequence
  Description of Artificial Sequence: Synthetic oligonucleotide
gacuacaguacaggaagca

SEQ ID NO: 1554577 - RNA, 19 nt, Artificial Sequence
  Description of Artificial Sequence: Synthetic oligonucleotide
guaugagaacaggaugacc

SEQ ID NO: 1554578 - RNA, 19 nt, Artificial Sequence
  Description of Artificial Sequence: Synthetic oligonucleotide
accguccuccguuugccuc

SEQ ID NO: 1554579 - RNA, 19 nt, Artificial Sequence
  Description of Artificial Sequence: Synthetic oligonucleotide
cauguaaggagggcacacc

SEQ ID NO: 1554580 - RNA, 19 nt, Artificial Sequence
  Description of Artificial Sequence: Synthetic oligonucleotide
gggaaagcuacacgcgagg

SEQ ID NO: 1554581 - RNA, 19 nt, Artificial Sequence
  Description of Artificial Sequence: Synthetic oligonucleotide
acacuggggcaccuacaac

SEQ ID NO: 1554582 - RNA, 19 nt, Artificial Sequence
  Description of Artificial Sequence: Synthetic oligonucleotide
agguauauggggaccacgu

SEQ ID NO: 1554583 - RNA, 19 nt, Artificial Sequence
  Description of Artificial Sequence: Synthetic oligonucleotide
caaggguugagcagguaga

SEQ ID NO: 1554584 - RNA, 19 nt, Artificial Sequence
  Description of Artificial Sequence: Synthetic oligonucleotide
ggaacacgagaccgaaggg

SEQ ID NO: 1554585 - RNA, 19 nt, Artificial Sequence
  Description of Artificial Sequence: Synthetic oligonucleotide
augugcaucugcaacuuga

SEQ ID NO: 1554586 - RNA, 19 nt, Artificial Sequence
  Description of Artificial Sequence: Synthetic oligonucleotide
ggcacagggcuacuaagag

SEQ ID NO: 1554587 - RNA, 19 nt, Artificial Sequence
  Description of Artificial Sequence: Synthetic oligonucleotide
ccaagucucauauacacaa

SEQ ID NO: 1554588 - RNA, 19 nt, Artificial Sequence
  Description of Artificial Sequence: Synthetic oligonucleotide
aguaaaucuccaguucaaa

SEQ ID NO: 1554589 - RNA, 19 nt, Artificial Sequence
  Description of Artificial Sequence: Synthetic oligonucleotide
ugacaaggguugagcaggu

SEQ ID NO: 1554590 - RNA, 19 nt, Artificial Sequence
  Description of Artificial Sequence: Synthetic oligonucleotide
ggaacauguaaggagggca

SEQ ID NO: 1554591 - RNA, 19 nt, Artificial Sequence
  Description of Artificial Sequence: Synthetic oligonucleotide
acggccaccccuaccgucc

SEQ ID NO: 1554592 - RNA, 19 nt, Artificial Sequence
  Description of Artificial Sequence: Synthetic oligonucleotide
gaccucuaagcaggagugg

SEQ ID NO: 1554593 - RNA, 19 nt, Artificial Sequence
  Description of Artificial Sequence: Synthetic oligonucleotide
cccagaugcgauaccaggg

SEQ ID NO: 1554594 - RNA, 19 nt, Artificial Sequence
  Description of Artificial Sequence: Synthetic oligonucleotide
gaugcaaaguggcuccacu

SEQ ID NO: 1554595 - RNA, 19 nt, Artificial Sequence
  Description of Artificial Sequence: Synthetic oligonucleotide
ugguagcuauaccgggaca

SEQ ID NO: 1554596 - RNA, 19 nt, Artificial Sequence
  Description of Artificial Sequence: Synthetic oligonucleotide
cagguauauggggaccacg

SEQ ID NO: 1554597 - RNA, 19 nt, Artificial Sequence
  Description of Artificial Sequence: Synthetic oligonucleotide
uggcugucggccacggcca

SEQ ID NO: 1554598 - RNA, 19 nt, Artificial Sequence
  Description of Artificial Sequence: Synthetic oligonucleotide
uccgggacauggagggcag

SEQ ID NO: 1554599 - RNA, 19 nt, Artificial Sequence
  Description of Artificial Sequence: Synthetic oligonucleotide
ggagggaaagcuacacgcg

SEQ ID NO: 1554600 - RNA, 19 nt, Artificial Sequence
  Description of Artificial Sequence: Synthetic oligonucleotide
gcgauauggaacacgagac

SEQ ID NO: 1554601 - RNA, 19 nt, Artificial Sequence
  Description of Artificial Sequence: Synthetic oligonucleotide
aaaggauguugggccaagu

SEQ ID NO: 1554602 - RNA, 19 nt, Artificial Sequence
  Description of Artificial Sequence: Synthetic oligonucleotide
ggagcagccggguauuuac

SEQ ID NO: 1554603 - RNA, 19 nt, Artificial Sequence
  Description of Artificial Sequence: Synthetic oligonucleotide
agggaaagcuacacgcgag

SEQ ID NO: 1554604 - RNA, 19 nt, Artificial Sequence
  Description of Artificial Sequence: Synthetic oligonucleotide
gcuauaccgggacaugaug

SEQ ID NO: 1554605 - RNA, 19 nt, Artificial Sequence
  Description of Artificial Sequence: Synthetic oligonucleotide
cuacacgcgaggcccgggg

SEQ ID NO: 1554606 - RNA, 19 nt, Artificial Sequence
  Description of Artificial Sequence: Synthetic oligonucleotide
gagaacaggaugaccagcu

SEQ ID NO: 1554607 - RNA, 19 nt, Artificial Sequence
  Description of Artificial Sequence: Synthetic oligonucleotide
gcccagaugcgauaccagg

SEQ ID NO: 1554608 - RNA, 19 nt, Artificial Sequence
  Description of Artificial Sequence: Synthetic oligonucleotide
gccugcaaaacuggggucg

SEQ ID NO: 1554609 - RNA, 19 nt, Artificial Sequence
  Description of Artificial Sequence: Synthetic oligonucleotide
guggcgaacuuaaagccca

SEQ ID NO: 1554610 - RNA, 19 nt, Artificial Sequence
  Description of Artificial Sequence: Synthetic oligonucleotide
uccauucaacaugugcauc

SEQ ID NO: 1554611 - RNA, 19 nt, Artificial Sequence
  Description of Artificial Sequence: Synthetic oligonucleotide
cacgagaccgaaggguugc

SEQ ID NO: 1554612 - RNA, 19 nt, Artificial Sequence
  Description of Artificial Sequence: Synthetic oligonucleotide
gaacacgagaccgaagggu

SEQ ID NO: 1554613 - RNA, 19 nt, Artificial Sequence
  Description of Artificial Sequence: Synthetic oligonucleotide
cugaaaggauguugggcca

SEQ ID NO: 1554614 - RNA, 19 nt, Artificial Sequence
  Description of Artificial Sequence: Synthetic oligonucleotide
cuaacuuguccccacggcu

SEQ ID NO: 1554615 - RNA, 19 nt, Artificial Sequence
  Description of Artificial Sequence: Synthetic oligonucleotide
caccuccuuuccaaagcag

SEQ ID NO: 1554616 - RNA, 19 nt, Artificial Sequence
  Description of Artificial Sequence: Synthetic oligonucleotide
cuaccguccuccguuugcc

SEQ ID NO: 1554617 - RNA, 19 nt, Artificial Sequence
  Description of Artificial Sequence: Synthetic oligonucleotide
auacugguggcaggaagga

SEQ ID NO: 1554618 - RNA, 19 nt, Artificial Sequence
  Description of Artificial Sequence: Synthetic oligonucleotide
guagcuauaccgggacaug

SEQ ID NO: 1554619 - RNA, 19 nt, Artificial Sequence
  Description of Artificial Sequence: Synthetic oligonucleotide
acgagucacuaccugcaaa

SEQ ID NO: 1554620 - RNA, 19 nt, Artificial Sequence
  Description of Artificial Sequence: Synthetic oligonucleotide
gguggcgaacuuaaagccc

SEQ ID NO: 1554621 - RNA, 19 nt, Artificial Sequence
  Description of Artificial Sequence: Synthetic oligonucleotide
ccggaaacugcugaggggc

SEQ ID NO: 1554622 - RNA, 19 nt, Artificial Sequence
  Description of Artificial Sequence: Synthetic oligonucleotide
uucuuggcuggaagccgga

SEQ ID NO: 1554623 - RNA, 19 nt, Artificial Sequence
  Description of Artificial Sequence: Synthetic oligonucleotide
gugguggcuccuaaagccc

SEQ ID NO: 1554624 - RNA, 19 nt, Artificial Sequence
  Description of Artificial Sequence: Synthetic oligonucleotide
acguagagcaucacaugcu

SEQ ID NO: 1554625 - RNA, 19 nt, Artificial Sequence
  Description of Artificial Sequence: Synthetic oligonucleotide
ggaaagcuacacgcgaggc

SEQ ID NO: 1554626 - RNA, 19 nt, Artificial Sequence
  Description of Artificial Sequence: Synthetic oligonucleotide
ucuuggcuggaagccggag

SEQ ID NO: 1554627 - RNA, 19 nt, Artificial Sequence
  Description of Artificial Sequence: Synthetic oligonucleotide
guugggccaagucucauau

SEQ ID NO: 1554628 - RNA, 19 nt, Artificial Sequence
  Description of Artificial Sequence: Synthetic oligonucleotide
ugaugcaaaguggcuccac

SEQ ID NO: 1554629 - RNA, 19 nt, Artificial Sequence
  Description of Artificial Sequence: Synthetic oligonucleotide
agggcuacuaagagcagau

SEQ ID NO: 1554630 - RNA, 19 nt, Artificial Sequence
  Description of Artificial Sequence: Synthetic oligonucleotide
caggacgagucacuaccug

SEQ ID NO: 1554631 - RNA, 19 nt, Artificial Sequence
  Description of Artificial Sequence: Synthetic oligonucleotide
accccuaccguccuccguu

SEQ ID NO: 1554632 - RNA, 19 nt, Artificial Sequence
  Description of Artificial Sequence: Synthetic oligonucleotide
uacacgcgaggcccggggu

SEQ ID NO: 1554633 - RNA, 19 nt, Artificial Sequence
  Description of Artificial Sequence: Synthetic oligonucleotide
gcucuaacuuguccccacg

SEQ ID NO: 1554634 - RNA, 19 nt, Artificial Sequence
  Description of Artificial Sequence: Synthetic oligonucleotide
gcccguugagagaagagcc

SEQ ID NO: 1554635 - RNA, 19 nt, Artificial Sequence
  Description of Artificial Sequence: Synthetic oligonucleotide
agaacaggaugaccagcuu

SEQ ID NO: 1554636 - RNA, 19 nt, Artificial Sequence
  Description of Artificial Sequence: Synthetic oligonucleotide
cuggggcaccuacaacagg

SEQ ID NO: 1554637 - RNA, 19 nt, Artificial Sequence
  Description of Artificial Sequence: Synthetic oligonucleotide
cccacaguguaucacagga

SEQ ID NO: 1554638 - RNA, 19 nt, Artificial Sequence
  Description of Artificial Sequence: Synthetic oligonucleotide
gagcgauauggaacacgag

SEQ ID NO: 1554639 - RNA, 19 nt, Artificial Sequence
  Description of Artificial Sequence: Synthetic oligonucleotide
acgagaccgaaggguugcc

SEQ ID NO: 1554640 - RNA, 19 nt, Artificial Sequence
  Description of Artificial Sequence: Synthetic oligonucleotide
agcuucccgugggucaugg

SEQ ID NO: 1554641 - RNA, 19 nt, Artificial Sequence
  Description of Artificial Sequence: Synthetic oligonucleotide
cgauauggaacacgagacc

SEQ ID NO: 1554642 - RNA, 19 nt, Artificial Sequence
  Description of Artificial Sequence: Synthetic oligonucleotide
caagucucauauacacaaa

SEQ ID NO: 1554643 - RNA, 19 nt, Artificial Sequence
  Description of Artificial Sequence: Synthetic oligonucleotide
ggugaccaggugacaaggg

SEQ ID NO: 1554644 - RNA, 19 nt, Artificial Sequence
  Description of Artificial Sequence: Synthetic oligonucleotide
ugaggcccguugagagaag

SEQ ID NO: 1554645 - RNA, 19 nt, Artificial Sequence
  Description of Artificial Sequence: Synthetic oligonucleotide
uggcgaacuuaaagcccac

SEQ ID NO: 1554646 - RNA, 19 nt, Artificial Sequence
  Description of Artificial Sequence: Synthetic oligonucleotide
auaccaggggccguagaau

SEQ ID NO: 1554647 - RNA, 19 nt, Artificial Sequence
  Description of Artificial Sequence: Synthetic oligonucleotide
agccggguauuuaccacag

SEQ ID NO: 1554648 - RNA, 19 nt, Artificial Sequence
  Description of Artificial Sequence: Synthetic oligonucleotide
gccggagcaaauccagcag

SEQ ID NO: 1554649 - RNA, 19 nt, Artificial Sequence
  Description of Artificial Sequence: Synthetic oligonucleotide
uggcaggacgagucacuac

SEQ ID NO: 1554650 - RNA, 19 nt, Artificial Sequence
  Description of Artificial Sequence: Synthetic oligonucleotide
ccggguauuuaccacagga

SEQ ID NO: 1554651 - RNA, 19 nt, Artificial Sequence
  Description of Artificial Sequence: Synthetic oligonucleotide
cccguugagagaagagccc

SEQ ID NO: 1554652 - RNA, 19 nt, Artificial Sequence
  Description of Artificial Sequence: Synthetic oligonucleotide
gugaccaggugacaagggu

SEQ ID NO: 1554653 - RNA, 19 nt, Artificial Sequence
  Description of Artificial Sequence: Synthetic oligonucleotide
gaggcccagaugcgauacc

SEQ ID NO: 1554654 - RNA, 19 nt, Artificial Sequence
  Description of Artificial Sequence: Synthetic oligonucleotide
uggcucuaacuugucccca

SEQ ID NO: 1554655 - RNA, 19 nt, Artificial Sequence
  Description of Artificial Sequence: Synthetic oligonucleotide
aggguugcccgggcggugg

SEQ ID NO: 1554656 - RNA, 19 nt, Artificial Sequence
  Description of Artificial Sequence: Synthetic oligonucleotide
aguggcaggacgagucacu

SEQ ID NO: 1554657 - RNA, 19 nt, Artificial Sequence
  Description of Artificial Sequence: Synthetic oligonucleotide
accuacaacaggggaggga

SEQ ID NO: 1554658 - RNA, 19 nt, Artificial Sequence
  Description of Artificial Sequence: Synthetic oligonucleotide
aggacgcugaagugauaaa

SEQ ID NO: 1554659 - RNA, 19 nt, Artificial Sequence
  Description of Artificial Sequence: Synthetic oligonucleotide
aggaagcaagagcgauaug

SEQ ID NO: 1554660 - RNA, 19 nt, Artificial Sequence
  Description of Artificial Sequence: Synthetic oligonucleotide
ggacgcugaagugauaaaa

SEQ ID NO: 1554661 - RNA, 19 nt, Artificial Sequence
  Description of Artificial Sequence: Synthetic oligonucleotide
gacgauagcuccgggacau

SEQ ID NO: 1554662 - RNA, 19 nt, Artificial Sequence
  Description of Artificial Sequence: Synthetic oligonucleotide
uugcccgggcgguggaaca

SEQ ID NO: 1554663 - RNA, 19 nt, Artificial Sequence
  Description of Artificial Sequence: Synthetic oligonucleotide
ugcgauaccaggggccgua

SEQ ID NO: 1554664 - RNA, 19 nt, Artificial Sequence
  Description of Artificial Sequence: Synthetic oligonucleotide
auggaacacgagaccgaag

SEQ ID NO: 1554665 - RNA, 19 nt, Artificial Sequence
  Description of Artificial Sequence: Synthetic oligonucleotide
agcuauaccgggacaugau

SEQ ID NO: 1554666 - RNA, 19 nt, Artificial Sequence
  Description of Artificial Sequence: Synthetic oligonucleotide
cgaacuuaaagcccaccuc

SEQ ID NO: 1554667 - RNA, 19 nt, Artificial Sequence
  Description of Artificial Sequence: Synthetic oligonucleotide
uaccguccuccguuugccu

SEQ ID NO: 1554668 - RNA, 19 nt, Artificial Sequence
  Description of Artificial Sequence: Synthetic oligonucleotide
ggcucuaacuuguccccac

SEQ ID NO: 1554669 - RNA, 19 nt, Artificial Sequence
  Description of Artificial Sequence: Synthetic oligonucleotide
auaccgggacaugaugcaa

SEQ ID NO: 1554670 - RNA, 19 nt, Artificial Sequence
  Description of Artificial Sequence: Synthetic oligonucleotide
gaaggaccucuaagcagga

SEQ ID NO: 1554671 - RNA, 19 nt, Artificial Sequence
  Description of Artificial Sequence: Synthetic oligonucleotide
aaggguugcccgggcggug

SEQ ID NO: 1554672 - RNA, 19 nt, Artificial Sequence
  Description of Artificial Sequence: Synthetic oligonucleotide
acaggaagcaagagcgaua

SEQ ID NO: 1554673 - RNA, 19 nt, Artificial Sequence
  Description of Artificial Sequence: Synthetic oligonucleotide
ccuaccguccuccguuugc

SEQ ID NO: 1554674 - RNA, 19 nt, Artificial Sequence
  Description of Artificial Sequence: Synthetic oligonucleotide
ggacgagucacuaccugca

SEQ ID NO: 1554675 - RNA, 19 nt, Artificial Sequence
  Description of Artificial Sequence: Synthetic oligonucleotide
gcgaacuuaaagcccaccu

SEQ ID NO: 1554676 - RNA, 19 nt, Artificial Sequence
  Description of Artificial Sequence: Synthetic oligonucleotide
cuccauucaacaugugcau

SEQ ID NO: 1554677 - RNA, 19 nt, Artificial Sequence
  Description of Artificial Sequence: Synthetic oligonucleotide
caagagcgauauggaacac

SEQ ID NO: 1554678 - RNA, 19 nt, Artificial Sequence
  Description of Artificial Sequence: Synthetic oligonucleotide
augaugcaaaguggcucca

SEQ ID NO: 1554679 - RNA, 19 nt, Artificial Sequence
  Description of Artificial Sequence: Synthetic oligonucleotide
ggccggacacagcauguug

SEQ ID NO: 1554680 - RNA, 19 nt, Artificial Sequence
  Description of Artificial Sequence: Synthetic oligonucleotide
ucccgaggcccagaugcga

SEQ ID NO: 1554681 - RNA, 19 nt, Artificial Sequence
  Description of Artificial Sequence: Synthetic oligonucleotide
gaggcccguugagagaaga

SEQ ID NO: 1554682 - RNA, 19 nt, Artificial Sequence
  Description of Artificial Sequence: Synthetic oligonucleotide
ccaaauacugguggcagga

SEQ ID NO: 1554683 - RNA, 19 nt, Artificial Sequence
  Description of Artificial Sequence: Synthetic oligonucleotide
cuaccccgaagaucaggca

SEQ ID NO: 1554684 - RNA, 19 nt, Artificial Sequence
  Description of Artificial Sequence: Synthetic oligonucleotide
cagggcuacuaagagcaga

SEQ ID NO: 1554685 - RNA, 19 nt, Artificial Sequence
  Description of Artificial Sequence: Synthetic oligonucleotide
cuccuaaagcccacagugu

SEQ ID NO: 1554686 - RNA, 19 nt, Artificial Sequence
  Description of Artificial Sequence: Synthetic oligonucleotide
caccuacaacaggggaggg

SEQ ID NO: 1554687 - RNA, 19 nt, Artificial Sequence
  Description of Artificial Sequence: Synthetic oligonucleotide
uugggccaagucucauaua

SEQ ID NO: 1554688 - RNA, 19 nt, Artificial Sequence
  Description of Artificial Sequence: Synthetic oligonucleotide
gcagccggguauuuaccac

SEQ ID NO: 1554689 - RNA, 19 nt, Artificial Sequence
  Description of Artificial Sequence: Synthetic oligonucleotide
cagguagaugacggucuug

SEQ ID NO: 1554690 - RNA, 19 nt, Artificial Sequence
  Description of Artificial Sequence: Synthetic oligonucleotide
aggcccguugagagaagag

SEQ ID NO: 1554691 - RNA, 19 nt, Artificial Sequence
  Description of Artificial Sequence: Synthetic oligonucleotide
caggaagcaagagcgauau

SEQ ID NO: 1554692 - RNA, 19 nt, Artificial Sequence
  Description of Artificial Sequence: Synthetic oligonucleotide
gucccgaggcccagaugcg

SEQ ID NO: 1554693 - RNA, 19 nt, Artificial Sequence
  Description of Artificial Sequence: Synthetic oligonucleotide
agagccaguccaggagacu

SEQ ID NO: 1554694 - RNA, 19 nt, Artificial Sequence
  Description of Artificial Sequence: Synthetic oligonucleotide
ggguugaaaggagccguug

SEQ ID NO: 1554695 - RNA, 19 nt, Artificial Sequence
  Description of Artificial Sequence: Synthetic oligonucleotide
gguauauggggaccacgua

SEQ ID NO: 1554696 - RNA, 19 nt, Artificial Sequence
  Description of Artificial Sequence: Synthetic oligonucleotide
ggggcaccuacaacagggg

SEQ ID NO: 1554697 - RNA, 19 nt, Artificial Sequence
  Description of Artificial Sequence: Synthetic oligonucleotide
auggccggacacagcaugu

SEQ ID NO: 1554698 - RNA, 19 nt, Artificial Sequence
  Description of Artificial Sequence: Synthetic oligonucleotide
ccaggggccguagaauggg

SEQ ID NO: 1554699 - RNA, 19 nt, Artificial Sequence
  Description of Artificial Sequence: Synthetic oligonucleotide
guugcccgggcgguggaac

SEQ ID NO: 1554700 - RNA, 19 nt, Artificial Sequence
  Description of Artificial Sequence: Synthetic oligonucleotide
gaccagcuucccguggguc

SEQ ID NO: 1554701 - RNA, 19 nt, Artificial Sequence
  Description of Artificial Sequence: Synthetic oligonucleotide
gguagcuauaccgggacau

SEQ ID NO: 1554702 - RNA, 19 nt, Artificial Sequence
  Description of Artificial Sequence: Synthetic oligonucleotide
ccauguaugagaacaggau

SEQ ID NO: 1554703 - RNA, 19 nt, Artificial Sequence
  Description of Artificial Sequence: Synthetic oligonucleotide
gcaacuugaagaugacgau

SEQ ID NO: 1554704 - RNA, 19 nt, Artificial Sequence
  Description of Artificial Sequence: Synthetic oligonucleotide
ggcgaacuuaaagcccacc

SEQ ID NO: 1554705 - RNA, 19 nt, Artificial Sequence
  Description of Artificial Sequence: Synthetic oligonucleotide
cgagucacuaccugcaaaa

SEQ ID NO: 1554706 - RNA, 19 nt, Artificial Sequence
  Description of Artificial Sequence: Synthetic oligonucleotide
cucugggguauaagcaccu

SEQ ID NO: 1554707 - RNA, 19 nt, Artificial Sequence
  Description of Artificial Sequence: Synthetic oligonucleotide
caagggcccagccauguau

SEQ ID NO: 1554708 - RNA, 19 nt, Artificial Sequence
  Description of Artificial Sequence: Synthetic oligonucleotide
caccuucagucuauuuucu

SEQ ID NO: 1554709 - RNA, 19 nt, Artificial Sequence
  Description of Artificial Sequence: Synthetic oligonucleotide
ccauagagccaguccagga

SEQ ID NO: 1554710 - RNA, 19 nt, Artificial Sequence
  Description of Artificial Sequence: Synthetic oligonucleotide
cacggcugucuggggagcc

SEQ ID NO: 1554711 - RNA, 19 nt, Artificial Sequence
  Description of Artificial Sequence: Synthetic oligonucleotide
cuacuaagagcagauucuu

SEQ ID NO: 1554712 - RNA, 19 nt, Artificial Sequence
  Description of Artificial Sequence: Synthetic oligonucleotide
gggcaccuacaacagggga

SEQ ID NO: 1554713 - RNA, 19 nt, Artificial Sequence
  Description of Artificial Sequence: Synthetic oligonucleotide
gccggguauuuaccacagg

SEQ ID NO: 1554714 - RNA, 19 nt, Artificial Sequence
  Description of Artificial Sequence: Synthetic oligonucleotide
ggaugugccgcagggccac

SEQ ID NO: 1554715 - RNA, 19 nt, Artificial Sequence
  Description of Artificial Sequence: Synthetic oligonucleotide
ccucuaagcaggaguggca

SEQ ID NO: 1554716 - RNA, 19 nt, Artificial Sequence
  Description of Artificial Sequence: Synthetic oligonucleotide
gaaggguugcccgggcggu

SEQ ID NO: 1554717 - RNA, 19 nt, Artificial Sequence
  Description of Artificial Sequence: Synthetic oligonucleotide
caacgaggcaggguugaaa

SEQ ID NO: 1554718 - RNA, 19 nt, Artificial Sequence
  Description of Artificial Sequence: Synthetic oligonucleotide
ccgaaggguugcccgggcg

SEQ ID NO: 1554719 - RNA, 19 nt, Artificial Sequence
  Description of Artificial Sequence: Synthetic oligonucleotide
ugucggccacggccacccc

SEQ ID NO: 1554720 - RNA, 19 nt, Artificial Sequence
  Description of Artificial Sequence: Synthetic oligonucleotide
ccggagcaaauccagcaga

SEQ ID NO: 1554721 - RNA, 19 nt, Artificial Sequence
  Description of Artificial Sequence: Synthetic oligonucleotide
aggguugaaaggagccguu

SEQ ID NO: 1554722 - RNA, 19 nt, Artificial Sequence
  Description of Artificial Sequence: Synthetic oligonucleotide
gcgguggaacauguaagga

SEQ ID NO: 1554723 - RNA, 19 nt, Artificial Sequence
  Description of Artificial Sequence: Synthetic oligonucleotide
gggucugagauggccggac

SEQ ID NO: 1554724 - RNA, 19 nt, Artificial Sequence
  Description of Artificial Sequence: Synthetic oligonucleotide
gggcccagccauguaugag

SEQ ID NO: 1554725 - RNA, 19 nt, Artificial Sequence
  Description of Artificial Sequence: Synthetic oligonucleotide
guggcaggacgagucacua

SEQ ID NO: 1554726 - RNA, 19 nt, Artificial Sequence
  Description of Artificial Sequence: Synthetic oligonucleotide
acgauagcuccgggacaug

SEQ ID NO: 1554727 - RNA, 19 nt, Artificial Sequence
  Description of Artificial Sequence: Synthetic oligonucleotide
uggccggacacagcauguu

SEQ ID NO: 1554728 - RNA, 19 nt, Artificial Sequence
  Description of Artificial Sequence: Synthetic oligonucleotide
cccgcgcuucuccaguggc

SEQ ID NO: 1554729 - RNA, 19 nt, Artificial Sequence
  Description of Artificial Sequence: Synthetic oligonucleotide
gguagaugacggucuuggu

SEQ ID NO: 1554730 - RNA, 19 nt, Artificial Sequence
  Description of Artificial Sequence: Synthetic oligonucleotide
agauggccggacacagcau

SEQ ID NO: 1554731 - RNA, 19 nt, Artificial Sequence
  Description of Artificial Sequence: Synthetic oligonucleotide
ccguugagagaagagccca

SEQ ID NO: 1554732 - RNA, 19 nt, Artificial Sequence
  Description of Artificial Sequence: Synthetic oligonucleotide
gggccaagucucauauaca

SEQ ID NO: 1554733 - RNA, 19 nt, Artificial Sequence
  Description of Artificial Sequence: Synthetic oligonucleotide
ccgcgcuucuccaguggcc

SEQ ID NO: 1554734 - RNA, 19 nt, Artificial Sequence
  Description of Artificial Sequence: Synthetic oligonucleotide
ugcccgggcgguggaacau

SEQ ID NO: 1554735 - RNA, 19 nt, Artificial Sequence
  Description of Artificial Sequence: Synthetic oligonucleotide
ggucuugguggcgaacuua

SEQ ID NO: 1554736 - RNA, 19 nt, Artificial Sequence
  Description of Artificial Sequence: Synthetic oligonucleotide
ggagcaaauccagcagaua

SEQ ID NO: 1554737 - RNA, 19 nt, Artificial Sequence
  Description of Artificial Sequence: Synthetic oligonucleotide
gcuacacgcgaggcccggg

SEQ ID NO: 1554738 - RNA, 19 nt, Artificial Sequence
  Description of Artificial Sequence: Synthetic oligonucleotide
agccaguccaggagacuuu

SEQ ID NO: 1554739 - RNA, 19 nt, Artificial Sequence
  Description of Artificial Sequence: Synthetic oligonucleotide
ccaccaacgaggcaggguu

SEQ ID NO: 1554740 - RNA, 19 nt, Artificial Sequence
  Description of Artificial Sequence: Synthetic oligonucleotide
ccuaaagcccacaguguau

SEQ ID NO: 1554741 - RNA, 19 nt, Artificial Sequence
  Description of Artificial Sequence: Synthetic oligonucleotide
ccuuuccaaagcagguaua

SEQ ID NO: 1554742 - RNA, 19 nt, Artificial Sequence
  Description of Artificial Sequence: Synthetic oligonucleotide
cacgcgaggcccgggguaa

SEQ ID NO: 1554743 - RNA, 19 nt, Artificial Sequence
  Description of Artificial Sequence: Synthetic oligonucleotide
cgaggcccagaugcgauac

SEQ ID NO: 1554744 - RNA, 19 nt, Artificial Sequence
  Description of Artificial Sequence: Synthetic oligonucleotide
ccguccuccguuugccuca

SEQ ID NO: 1554745 - RNA, 19 nt, Artificial Sequence
  Description of Artificial Sequence: Synthetic oligonucleotide
cugaacacuggggcaccua

SEQ ID NO: 1554746 - RNA, 19 nt, Artificial Sequence
  Description of Artificial Sequence: Synthetic oligonucleotide
cgagaccgaaggguugccc

SEQ ID NO: 1554747 - RNA, 19 nt, Artificial Sequence
  Description of Artificial Sequence: Synthetic oligonucleotide
cgggcgguggaacauguaa

SEQ ID NO: 1554748 - RNA, 19 nt, Artificial Sequence
  Description of Artificial Sequence: Synthetic oligonucleotide
cguuugccucaggaugugc

SEQ ID NO: 1554749 - RNA, 19 nt, Artificial Sequence
  Description of Artificial Sequence: Synthetic oligonucleotide
caggggccguagaaugggu

SEQ ID NO: 1554750 - RNA, 19 nt, Artificial Sequence
  Description of Artificial Sequence: Synthetic oligonucleotide
ccaagcaccuucagucuau

SEQ ID NO: 1554751 - RNA, 19 nt, Artificial Sequence
  Description of Artificial Sequence: Synthetic oligonucleotide
gcagguagaugacggucuu

SEQ ID NO: 1554752 - RNA, 19 nt, Artificial Sequence
  Description of Artificial Sequence: Synthetic oligonucleotide
ccguuugccucaggaugug

SEQ ID NO: 1554753 - RNA, 19 nt, Artificial Sequence
  Description of Artificial Sequence: Synthetic oligonucleotide
gcaggacgagucacuaccu

SEQ ID NO: 1554754 - RNA, 19 nt, Artificial Sequence
  Description of Artificial Sequence: Synthetic oligonucleotide
cccuaccguccuccguuug

SEQ ID NO: 1554755 - RNA, 19 nt, Artificial Sequence
  Description of Artificial Sequence: Synthetic oligonucleotide
ccacaguguaucacaggau

SEQ ID NO: 1554756 - RNA, 19 nt, Artificial Sequence
  Description of Artificial Sequence: Synthetic oligonucleotide
ccacggcugucuggggagc

SEQ ID NO: 1554757 - RNA, 19 nt, Artificial Sequence
  Description of Artificial Sequence: Synthetic oligonucleotide
gggagcagccggguauuua

SEQ ID NO: 1554758 - RNA, 19 nt, Artificial Sequence
  Description of Artificial Sequence: Synthetic oligonucleotide
gccaccaacgaggcagggu

SEQ ID NO: 1554759 - RNA, 19 nt, Artificial Sequence
  Description of Artificial Sequence: Synthetic oligonucleotide
caccccuaccguccuccgu

SEQ ID NO: 1554760 - RNA, 19 nt, Artificial Sequence
  Description of Artificial Sequence: Synthetic oligonucleotide
cggagcaaauccagcagau

SEQ ID NO: 1554761 - RNA, 19 nt, Artificial Sequence
  Description of Artificial Sequence: Synthetic oligonucleotide
acgcgaggcccgggguaaa

SEQ ID NO: 1554762 - RNA, 19 nt, Artificial Sequence
  Description of Artificial Sequence: Synthetic oligonucleotide
ccggacacagcauguuguu

SEQ ID NO: 1554763 - RNA, 19 nt, Artificial Sequence
  Description of Artificial Sequence: Synthetic oligonucleotide
cgauaccaggggccguaga

SEQ ID NO: 1554764 - RNA, 19 nt, Artificial Sequence
  Description of Artificial Sequence: Synthetic oligonucleotide
cguccuccguuugccucag

SEQ ID NO: 1554765 - RNA, 19 nt, Artificial Sequence
  Description of Artificial Sequence: Synthetic oligonucleotide
ccgaggcccagaugcgaua

SEQ ID NO: 1554766 - RNA, 19 nt, Artificial Sequence
  Description of Artificial Sequence: Synthetic oligonucleotide
cgcgaggcccgggguaaag

SEQ ID NO: 1554767 - RNA, 19 nt, Artificial Sequence
  Description of Artificial Sequence: Synthetic oligonucleotide
gcgaggcccgggguaaagu

SEQ ID NO: 1554768 - RNA, 19 nt, Artificial Sequence
  Description of Artificial Sequence: Synthetic oligonucleotide
cccgaggcccagaugcgau

SEQ ID NO: 1554769 - RNA, 19 nt, Artificial Sequence
  Description of Artificial Sequence: Synthetic oligonucleotide
gggcuacuaagagcagauu

SEQ ID NO: 1554770 - RNA, 19 nt, Artificial Sequence
  Description of Artificial Sequence: Synthetic oligonucleotide
cccgggcgguggaacaugu

SEQ ID NO: 1554771 - RNA, 19 nt, Artificial Sequence
  Description of Artificial Sequence: Synthetic oligonucleotide
ccgggcgguggaacaugua

SEQ ID NO: 1554772 - RNA, 19 nt, Artificial Sequence
  Description of Artificial Sequence: Synthetic oligonucleotide
ccccuaccguccuccguuu

SEQ ID NO: 1554773 - RNA, 19 nt, Artificial Sequence
  Description of Artificial Sequence: Synthetic oligonucleotide
cggccaccccuaccguccu

SEQ ID NO: 1554774 - RNA, 19 nt, Artificial Sequence
  Description of Artificial Sequence: Synthetic oligonucleotide
aguagugagcacuacaccc

SEQ ID NO: 1554775 - RNA, 19 nt, Artificial Sequence
  Description of Artificial Sequence: Synthetic oligonucleotide
aaggaagcgaaucucgccc

SEQ ID NO: 1554776 - RNA, 19 nt, Artificial Sequence
  Description of Artificial Sequence: Synthetic oligonucleotide
aaucgaacaguccaggcuc

SEQ ID NO: 1554777 - RNA, 19 nt, Artificial Sequence
  Description of Artificial Sequence: Synthetic oligonucleotide
auuagcaguaaguagugag

SEQ ID NO: 1554778 - RNA, 19 nt, Artificial Sequence
  Description of Artificial Sequence: Synthetic oligonucleotide
auagguuggaucaauaggg

SEQ ID NO: 1554779 - RNA, 19 nt, Artificial Sequence
  Description of Artificial Sequence: Synthetic oligonucleotide
aaguagugagcacuacacc

SEQ ID NO: 1554780 - RNA, 19 nt, Artificial Sequence
  Description of Artificial Sequence: Synthetic oligonucleotide
caggaugccacuuaggccc

SEQ ID NO: 1554781 - RNA, 19 nt, Artificial Sequence
  Description of Artificial Sequence: Synthetic oligonucleotide
aagucguuggggaacagcc

SEQ ID NO: 1554782 - RNA, 19 nt, Artificial Sequence
  Description of Artificial Sequence: Synthetic oligonucleotide
guagcugccguacaggugg

SEQ ID NO: 1554783 - RNA, 19 nt, Artificial Sequence
  Description of Artificial Sequence: Synthetic oligonucleotide
ugauuuagggucaggagac

SEQ ID NO: 1554784 - RNA, 19 nt, Artificial Sequence
  Description of Artificial Sequence: Synthetic oligonucleotide
uuagcaguaaguagugagc

SEQ ID NO: 1554785 - RNA, 19 nt, Artificial Sequence
  Description of Artificial Sequence: Synthetic oligonucleotide
ucuuaggucugcuuggagc

SEQ ID NO: 1554786 - RNA, 19 nt, Artificial Sequence
  Description of Artificial Sequence: Synthetic oligonucleotide
ucuguaaggugcaaucccc

SEQ ID NO: 1554787 - RNA, 19 nt, Artificial Sequence
  Description of Artificial Sequence: Synthetic oligonucleotide
guauguauagaacuggcga

SEQ ID NO: 1554788 - RNA, 19 nt, Artificial Sequence
  Description of Artificial Sequence: Synthetic oligonucleotide
uggaaguccaaaauuucca

SEQ ID NO: 1554789 - RNA, 19 nt, Artificial Sequence
  Description of Artificial Sequence: Synthetic oligonucleotide
cuguauacaccacauauuc

SEQ ID NO: 1554790 - RNA, 19 nt, Artificial Sequence
  Description of Artificial Sequence: Synthetic oligonucleotide
accugagucgcccaucagc

SEQ ID NO: 1554791 - RNA, 19 nt, Artificial Sequence
  Description of Artificial Sequence: Synthetic oligonucleotide
uauguauagaacuggcgaa

SEQ ID NO: 1554792 - RNA, 19 nt, Artificial Sequence
  Description of Artificial Sequence: Synthetic oligonucleotide
agacaaaaccucuccagag

SEQ ID NO: 1554793 - RNA, 19 nt, Artificial Sequence
  Description of Artificial Sequence: Synthetic oligonucleotide
acuucuuaggucugcuugg

SEQ ID NO: 1554794 - RNA, 19 nt, Artificial Sequence
  Description of Artificial Sequence: Synthetic oligonucleotide
agcccuauugcacaucuuc

SEQ ID NO: 1554795 - RNA, 19 nt, Artificial Sequence
  Description of Artificial Sequence: Synthetic oligonucleotide
ugucauaugauguggccac

SEQ ID NO: 1554796 - RNA, 19 nt, Artificial Sequence
  Description of Artificial Sequence: Synthetic oligonucleotide
auaugauguggccacaaca

SEQ ID NO: 1554797 - RNA, 19 nt, Artificial Sequence
  Description of Artificial Sequence: Synthetic oligonucleotide
gaugucauaugauguggcc

SEQ ID NO: 1554798 - RNA, 19 nt, Artificial Sequence
  Description of Artificial Sequence: Synthetic oligonucleotide
gcacgaaccagucagaacc

SEQ ID NO: 1554799 - RNA, 19 nt, Artificial Sequence
  Description of Artificial Sequence: Synthetic oligonucleotide
auucauugugggguggucc

SEQ ID NO: 1554800 - RNA, 19 nt, Artificial Sequence
  Description of Artificial Sequence: Synthetic oligonucleotide
ucaucuaccgugaugucau

SEQ ID NO: 1554801 - RNA, 19 nt, Artificial Sequence
  Description of Artificial Sequence: Synthetic oligonucleotide
guacaaacuagagaggggc

SEQ ID NO: 1554802 - RNA, 19 nt, Artificial Sequence
  Description of Artificial Sequence: Synthetic oligonucleotide
uccaaaauuuccaggacuu

SEQ ID NO: 1554803 - RNA, 19 nt, Artificial Sequence
  Description of Artificial Sequence: Synthetic oligonucleotide
cugcgugucagcacgaacc

SEQ ID NO: 1554804 - RNA, 19 nt, Artificial Sequence
  Description of Artificial Sequence: Synthetic oligonucleotide
uguuuguacuggcacuugc

SEQ ID NO: 1554805 - RNA, 19 nt, Artificial Sequence
  Description of Artificial Sequence: Synthetic oligonucleotide
aagcgaaucucgcccagag

SEQ ID NO: 1554806 - RNA, 19 nt, Artificial Sequence
  Description of Artificial Sequence: Synthetic oligonucleotide
accgugaugucauaugaug

SEQ ID NO: 1554807 - RNA, 19 nt, Artificial Sequence
  Description of Artificial Sequence: Synthetic oligonucleotide
acugcgugacuucaguguc

SEQ ID NO: 1554808 - RNA, 19 nt, Artificial Sequence
  Description of Artificial Sequence: Synthetic oligonucleotide
aaagaaggugggucuggag

SEQ ID NO: 1554809 - RNA, 19 nt, Artificial Sequence
  Description of Artificial Sequence: Synthetic oligonucleotide
ucuaccgugaugucauaug

SEQ ID NO: 1554810 - RNA, 19 nt, Artificial Sequence
  Description of Artificial Sequence: Synthetic oligonucleotide
uccgguggaccucugaucu

SEQ ID NO: 1554811 - RNA, 19 nt, Artificial Sequence
  Description of Artificial Sequence: Synthetic oligonucleotide
guauagaacuggcgaagcg

SEQ ID NO: 1554812 - RNA, 19 nt, Artificial Sequence
  Description of Artificial Sequence: Synthetic oligonucleotide
uccugauggcucaaacggg

SEQ ID NO: 1554813 - RNA, 19 nt, Artificial Sequence
  Description of Artificial Sequence: Synthetic oligonucleotide
ucaggaugccacuuaggcc

SEQ ID NO: 1554814 - RNA, 19 nt, Artificial Sequence
  Description of Artificial Sequence: Synthetic oligonucleotide
ucgcccaucagcuuugaca

SEQ ID NO: 1554815 - RNA, 19 nt, Artificial Sequence
  Description of Artificial Sequence: Synthetic oligonucleotide
uagguuggaucaauagggc

SEQ ID NO: 1554816 - RNA, 19 nt, Artificial Sequence
  Description of Artificial Sequence: Synthetic oligonucleotide
agcacuacacccacuauuc

SEQ ID NO: 1554817 - RNA, 19 nt, Artificial Sequence
  Description of Artificial Sequence: Synthetic oligonucleotide
uggagacuugcugaagucg

SEQ ID NO: 1554818 - RNA, 19 nt, Artificial Sequence
  Description of Artificial Sequence: Synthetic oligonucleotide
cuugcagcccagcuuacgg

SEQ ID NO: 1554819 - RNA, 19 nt, Artificial Sequence
  Description of Artificial Sequence: Synthetic oligonucleotide
uuggcggugcuccccaugg

SEQ ID NO: 1554820 - RNA, 19 nt, Artificial Sequence
  Description of Artificial Sequence: Synthetic oligonucleotide
cacgguuucuggcugaggc

SEQ ID NO: 1554821 - RNA, 19 nt, Artificial Sequence
  Description of Artificial Sequence: Synthetic oligonucleotide
acgauguguuuguacuggc

SEQ ID NO: 1554822 - RNA, 19 nt, Artificial Sequence
  Description of Artificial Sequence: Synthetic oligonucleotide
ugccacuuguuuuaaauuu

SEQ ID NO: 1554823 - RNA, 19 nt, Artificial Sequence
  Description of Artificial Sequence: Synthetic oligonucleotide
uguccaggccucaagugca

SEQ ID NO: 1554824 - RNA, 19 nt, Artificial Sequence
  Description of Artificial Sequence: Synthetic oligonucleotide
aaacuagagaggggcagag

SEQ ID NO: 1554825 - RNA, 19 nt, Artificial Sequence
  Description of Artificial Sequence: Synthetic oligonucleotide
acaaggaagcgaaucucgc

SEQ ID NO: 1554826 - RNA, 19 nt, Artificial Sequence
  Description of Artificial Sequence: Synthetic oligonucleotide
uagcaguaaguagugagca

SEQ ID NO: 1554827 - RNA, 19 nt, Artificial Sequence
  Description of Artificial Sequence: Synthetic oligonucleotide
caaacgggcacacugccug

SEQ ID NO: 1554828 - RNA, 19 nt, Artificial Sequence
  Description of Artificial Sequence: Synthetic oligonucleotide
caaggaagcgaaucucgcc

SEQ ID NO: 1554829 - RNA, 19 nt, Artificial Sequence
  Description of Artificial Sequence: Synthetic oligonucleotide
uggaaacucuguuccaugu

SEQ ID NO: 1554830 - RNA, 19 nt, Artificial Sequence
  Description of Artificial Sequence: Synthetic oligonucleotide
agcuuacgguuccaguugg

SEQ ID NO: 1554831 - RNA, 19 nt, Artificial Sequence
  Description of Artificial Sequence: Synthetic oligonucleotide
aaacugcucagcucccugu

SEQ ID NO: 1554832 - RNA, 19 nt, Artificial Sequence
  Description of Artificial Sequence: Synthetic oligonucleotide
uguauucauuguggggugg

SEQ ID NO: 1554833 - RNA, 19 nt, Artificial Sequence
  Description of Artificial Sequence: Synthetic oligonucleotide
aguacaaacuagagagggg

SEQ ID NO: 1554834 - RNA, 19 nt, Artificial Sequence
  Description of Artificial Sequence: Synthetic oligonucleotide
guaaguagugagcacuaca

SEQ ID NO: 1554835 - RNA, 19 nt, Artificial Sequence
  Description of Artificial Sequence: Synthetic oligonucleotide
guuccaguuggugacacgc

SEQ ID NO: 1554836 - RNA, 19 nt, Artificial Sequence
  Description of Artificial Sequence: Synthetic oligonucleotide
aaacgggcacacugccugg

SEQ ID NO: 1554837 - RNA, 19 nt, Artificial Sequence
  Description of Artificial Sequence: Synthetic oligonucleotide
cacuauuccugccugggug

SEQ ID NO: 1554838 - RNA, 19 nt, Artificial Sequence
  Description of Artificial Sequence: Synthetic oligonucleotide
auguauucauuguggggug

SEQ ID NO: 1554839 - RNA, 19 nt, Artificial Sequence
  Description of Artificial Sequence: Synthetic oligonucleotide
cacgauguguuuguacugg

SEQ ID NO: 1554840 - RNA, 19 nt, Artificial Sequence
  Description of Artificial Sequence: Synthetic oligonucleotide
aagcgugggccacgaaggg

SEQ ID NO: 1554841 - RNA, 19 nt, Artificial Sequence
  Description of Artificial Sequence: Synthetic oligonucleotide
cauauuccacaaagcugcg

SEQ ID NO: 1554842 - RNA, 19 nt, Artificial Sequence
  Description of Artificial Sequence: Synthetic oligonucleotide
cacgucauagguguucucc

SEQ ID NO: 1554843 - RNA, 19 nt, Artificial Sequence
  Description of Artificial Sequence: Synthetic oligonucleotide
uggaucaauagggccauca

SEQ ID NO: 1554844 - RNA, 19 nt, Artificial Sequence
  Description of Artificial Sequence: Synthetic oligonucleotide
cucccaguaggccuugagg

SEQ ID NO: 1554845 - RNA, 19 nt, Artificial Sequence
  Description of Artificial Sequence: Synthetic oligonucleotide
acagguggaaguccaaaau

SEQ ID NO: 1554846 - RNA, 19 nt, Artificial Sequence
  Description of Artificial Sequence: Synthetic oligonucleotide
ugagucgcccaucagcuuu

SEQ ID NO: 1554847 - RNA, 19 nt, Artificial Sequence
  Description of Artificial Sequence: Synthetic oligonucleotide
agcaaucgaacaguccagg

SEQ ID NO: 1554848 - RNA, 19 nt, Artificial Sequence
  Description of Artificial Sequence: Synthetic oligonucleotide
caauggcagcacaaggaag

SEQ ID NO: 1554849 - RNA, 19 nt, Artificial Sequence
  Description of Artificial Sequence: Synthetic oligonucleotide
uccugagagguaguuugcg

SEQ ID NO: 1554850 - RNA, 19 nt, Artificial Sequence
  Description of Artificial Sequence: Synthetic oligonucleotide
agagccauuagcaguaagu

SEQ ID NO: 1554851 - RNA, 19 nt, Artificial Sequence
  Description of Artificial Sequence: Synthetic oligonucleotide
aagcaaucgaacaguccag

SEQ ID NO: 1554852 - RNA, 19 nt, Artificial Sequence
  Description of Artificial Sequence: Synthetic oligonucleotide
acuuaggcccuggaaacuc

SEQ ID NO: 1554853 - RNA, 19 nt, Artificial Sequence
  Description of Artificial Sequence: Synthetic oligonucleotide
ugcgugucagcacgaacca

SEQ ID NO: 1554854 - RNA, 19 nt, Artificial Sequence
  Description of Artificial Sequence: Synthetic oligonucleotide
uugcgguugaaggucaaug

SEQ ID NO: 1554855 - RNA, 19 nt, Artificial Sequence
  Description of Artificial Sequence: Synthetic oligonucleotide
cuguguggaagaaggacuc

SEQ ID NO: 1554856 - RNA, 19 nt, Artificial Sequence
  Description of Artificial Sequence: Synthetic oligonucleotide
ucugugugccuccgggcag

SEQ ID NO: 1554857 - RNA, 19 nt, Artificial Sequence
  Description of Artificial Sequence: Synthetic oligonucleotide
ugggagagaagucccucca

SEQ ID NO: 1554858 - RNA, 19 nt, Artificial Sequence
  Description of Artificial Sequence: Synthetic oligonucleotide
aagcgccccucaugguucc

SEQ ID NO: 1554859 - RNA, 19 nt, Artificial Sequence
  Description of Artificial Sequence: Synthetic oligonucleotide
ugauggcucaaacgggcac

SEQ ID NO: 1554860 - RNA, 19 nt, Artificial Sequence
  Description of Artificial Sequence: Synthetic oligonucleotide
acagcccacuucuuagguc

SEQ ID NO: 1554861 - RNA, 19 nt, Artificial Sequence
  Description of Artificial Sequence: Synthetic oligonucleotide
caauagggccaucagccac

SEQ ID NO: 1554862 - RNA, 19 nt, Artificial Sequence
  Description of Artificial Sequence: Synthetic oligonucleotide
uccaguuggugacacgcaa

SEQ ID NO: 1554863 - RNA, 19 nt, Artificial Sequence
  Description of Artificial Sequence: Synthetic oligonucleotide
aacuagagaggggcagagg

SEQ ID NO: 1554864 - RNA, 19 nt, Artificial Sequence
  Description of Artificial Sequence: Synthetic oligonucleotide
ugcugaagucgcaggaagu

SEQ ID NO: 1554865 - RNA, 19 nt, Artificial Sequence
  Description of Artificial Sequence: Synthetic oligonucleotide
uuccugagagguaguuugc

SEQ ID NO: 1554866 - RNA, 19 nt, Artificial Sequence
  Description of Artificial Sequence: Synthetic oligonucleotide
cucuugcagagccauuagc

SEQ ID NO: 1554867 - RNA, 19 nt, Artificial Sequence
  Description of Artificial Sequence: Synthetic oligonucleotide
gacccgugagcucugugug

SEQ ID NO: 1554868 - RNA, 19 nt, Artificial Sequence
  Description of Artificial Sequence: Synthetic oligonucleotide
aacagccacaccaguccac

SEQ ID NO: 1554869 - RNA, 19 nt, Artificial Sequence
  Description of Artificial Sequence: Synthetic oligonucleotide
agguguucucccaguaggc

SEQ ID NO: 1554870 - RNA, 19 nt, Artificial Sequence
  Description of Artificial Sequence: Synthetic oligonucleotide
gacacgcaaguuguugucc

SEQ ID NO: 1554871 - RNA, 19 nt, Artificial Sequence
  Description of Artificial Sequence: Synthetic oligonucleotide
cauaugauguggccacaac

SEQ ID NO: 1554872 - RNA, 19 nt, Artificial Sequence
  Description of Artificial Sequence: Synthetic oligonucleotide
cugcuuggagcccuauugc

SEQ ID NO: 1554873 - RNA, 19 nt, Artificial Sequence
  Description of Artificial Sequence: Synthetic oligonucleotide
uguguuuguacuggcacuu

SEQ ID NO: 1554874 - RNA, 19 nt, Artificial Sequence
  Description of Artificial Sequence: Synthetic oligonucleotide
caacuggucagucugcaga

SEQ ID NO: 1554875 - RNA, 19 nt, Artificial Sequence
  Description of Artificial Sequence: Synthetic oligonucleotide
acacgcaaguuguugucca

SEQ ID NO: 1554876 - RNA, 19 nt, Artificial Sequence
  Description of Artificial Sequence: Synthetic oligonucleotide
cuaccgugaugucauauga

SEQ ID NO: 1554877 - RNA, 19 nt, Artificial Sequence
  Description of Artificial Sequence: Synthetic oligonucleotide
cugaagucgcaggaagucc

SEQ ID NO: 1554878 - RNA, 19 nt, Artificial Sequence
  Description of Artificial Sequence: Synthetic oligonucleotide
cucggcuggaagcagugug

SEQ ID NO: 1554879 - RNA, 19 nt, Artificial Sequence
  Description of Artificial Sequence: Synthetic oligonucleotide
cuuacgguuccaguuggug

SEQ ID NO: 1554880 - RNA, 19 nt, Artificial Sequence
  Description of Artificial Sequence: Synthetic oligonucleotide
ugaucucuugcagagccau

SEQ ID NO: 1554881 - RNA, 19 nt, Artificial Sequence
  Description of Artificial Sequence: Synthetic oligonucleotide
cuggcuggggcccugcuac

SEQ ID NO: 1554882 - RNA, 19 nt, Artificial Sequence
  Description of Artificial Sequence: Synthetic oligonucleotide
aucgaacaguccaggcucc

SEQ ID NO: 1554883 - RNA, 19 nt, Artificial Sequence
  Description of Artificial Sequence: Synthetic oligonucleotide
cagacaaaaccucuccaga

SEQ ID NO: 1554884 - RNA, 19 nt, Artificial Sequence
  Description of Artificial Sequence: Synthetic oligonucleotide
uuccaguuggugacacgca

SEQ ID NO: 1554885 - RNA, 19 nt, Artificial Sequence
  Description of Artificial Sequence: Synthetic oligonucleotide
guggguagcugccguacag

SEQ ID NO: 1554886 - RNA, 19 nt, Artificial Sequence
  Description of Artificial Sequence: Synthetic oligonucleotide
ugacacgcaaguuguuguc

SEQ ID NO: 1554887 - RNA, 19 nt, Artificial Sequence
  Description of Artificial Sequence: Synthetic oligonucleotide
gaagucccuccacugucug

SEQ ID NO: 1554888 - RNA, 19 nt, Artificial Sequence
  Description of Artificial Sequence: Synthetic oligonucleotide
cuacacccacuauuccugc

SEQ ID NO: 1554889 - RNA, 19 nt, Artificial Sequence
  Description of Artificial Sequence: Synthetic oligonucleotide
guacugcgugacuucagug

SEQ ID NO: 1554890 - RNA, 19 nt, Artificial Sequence
  Description of Artificial Sequence: Synthetic oligonucleotide
gaaucucgcccagagguuc

SEQ ID NO: 1554891 - RNA, 19 nt, Artificial Sequence
  Description of Artificial Sequence: Synthetic oligonucleotide
uaccgugaugucauaugau

SEQ ID NO: 1554892 - RNA, 19 nt, Artificial Sequence
  Description of Artificial Sequence: Synthetic oligonucleotide
gaacuggcgaagcgugggc

SEQ ID NO: 1554893 - RNA, 19 nt, Artificial Sequence
  Description of Artificial Sequence: Synthetic oligonucleotide
ucauaugauguggccacaa

SEQ ID NO: 1554894 - RNA, 19 nt, Artificial Sequence
  Description of Artificial Sequence: Synthetic oligonucleotide
gguuggaucaauagggcca

SEQ ID NO: 1554895 - RNA, 19 nt, Artificial Sequence
  Description of Artificial Sequence: Synthetic oligonucleotide
auugugggguggucccgcg

SEQ ID NO: 1554896 - RNA, 19 nt, Artificial Sequence
  Description of Artificial Sequence: Synthetic oligonucleotide
aacgggcacacugccuggg

SEQ ID NO: 1554897 - RNA, 19 nt, Artificial Sequence
  Description of Artificial Sequence: Synthetic oligonucleotide
aggaagcgaaucucgccca

SEQ ID NO: 1554898 - RNA, 19 nt, Artificial Sequence
  Description of Artificial Sequence: Synthetic oligonucleotide
guagugagcacuacaccca

SEQ ID NO: 1554899 - RNA, 19 nt, Artificial Sequence
  Description of Artificial Sequence: Synthetic oligonucleotide
uggucagucugcagaguuc

SEQ ID NO: 1554900 - RNA, 19 nt, Artificial Sequence
  Description of Artificial Sequence: Synthetic oligonucleotide
aacauagguuggaucaaua

SEQ ID NO: 1554901 - RNA, 19 nt, Artificial Sequence
  Description of Artificial Sequence: Synthetic oligonucleotide
acgggcacacugccugggc

SEQ ID NO: 1554902 - RNA, 19 nt, Artificial Sequence
  Description of Artificial Sequence: Synthetic oligonucleotide
ucguuggggaacagccaca

SEQ ID NO: 1554903 - RNA, 19 nt, Artificial Sequence
  Description of Artificial Sequence: Synthetic oligonucleotide
acccacuauuccugccugg

SEQ ID NO: 1554904 - RNA, 19 nt, Artificial Sequence
  Description of Artificial Sequence: Synthetic oligonucleotide
ggucagucugcagaguucc

SEQ ID NO: 1554905 - RNA, 19 nt, Artificial Sequence
  Description of Artificial Sequence: Synthetic oligonucleotide
ggcccugcuaccugagucg

SEQ ID NO: 1554906 - RNA, 19 nt, Artificial Sequence
  Description of Artificial Sequence: Synthetic oligonucleotide
gcaguguguauguauagaa

SEQ ID NO: 1554907 - RNA, 19 nt, Artificial Sequence
  Description of Artificial Sequence: Synthetic oligonucleotide
acgguuucuggcugaggca

SEQ ID NO: 1554908 - RNA, 19 nt, Artificial Sequence
  Description of Artificial Sequence: Synthetic oligonucleotide
augauguggccacaacaua

SEQ ID NO: 1554909 - RNA, 19 nt, Artificial Sequence
  Description of Artificial Sequence: Synthetic oligonucleotide
ugagcacuacacccacuau

SEQ ID NO: 1554910 - RNA, 19 nt, Artificial Sequence
  Description of Artificial Sequence: Synthetic oligonucleotide
gugagcacuacacccacua

SEQ ID NO: 1554911 - RNA, 19 nt, Artificial Sequence
  Description of Artificial Sequence: Synthetic oligonucleotide
acuugcagcccagcuuacg

SEQ ID NO: 1554912 - RNA, 19 nt, Artificial Sequence
  Description of Artificial Sequence: Synthetic oligonucleotide
ggugacacgcaaguuguug

SEQ ID NO: 1554913 - RNA, 19 nt, Artificial Sequence
  Description of Artificial Sequence: Synthetic oligonucleotide
caagugcaggacccgugag

SEQ ID NO: 1554914 - RNA, 19 nt, Artificial Sequence
  Description of Artificial Sequence: Synthetic oligonucleotide
gcaaucgaacaguccaggc

SEQ ID NO: 1554915 - RNA, 19 nt, Artificial Sequence
  Description of Artificial Sequence: Synthetic oligonucleotide
gaagcgccccucaugguuc

SEQ ID NO: 1554916 - RNA, 19 nt, Artificial Sequence
  Description of Artificial Sequence: Synthetic oligonucleotide
cagcacaaggaagcgaauc

SEQ ID NO: 1554917 - RNA, 19 nt, Artificial Sequence
  Description of Artificial Sequence: Synthetic oligonucleotide
ccacuuaggcccuggaaac

SEQ ID NO: 1554918 - RNA, 19 nt, Artificial Sequence
  Description of Artificial Sequence: Synthetic oligonucleotide
caaucgaacaguccaggcu

SEQ ID NO: 1554919 - RNA, 19 nt, Artificial Sequence
  Description of Artificial Sequence: Synthetic oligonucleotide
gaagucgcaggaaguccug

SEQ ID NO: 1554920 - RNA, 19 nt, Artificial Sequence
  Description of Artificial Sequence: Synthetic oligonucleotide
agccacaccaguccacgau

SEQ ID NO: 1554921 - RNA, 19 nt, Artificial Sequence
  Description of Artificial Sequence: Synthetic oligonucleotide
gcgaaucucgcccagaggu

SEQ ID NO: 1554922 - RNA, 19 nt, Artificial Sequence
  Description of Artificial Sequence: Synthetic oligonucleotide
gguuccugauggcucaaac

SEQ ID NO: 1554923 - RNA, 19 nt, Artificial Sequence
  Description of Artificial Sequence: Synthetic oligonucleotide
ggagacagagagcuccaac

SEQ ID NO: 1554924 - RNA, 19 nt, Artificial Sequence
  Description of Artificial Sequence: Synthetic oligonucleotide
auauuccacaaagcugcgu

SEQ ID NO: 1554925 - RNA, 19 nt, Artificial Sequence
  Description of Artificial Sequence: Synthetic oligonucleotide
acaacauagguuggaucaa

SEQ ID NO: 1554926 - RNA, 19 nt, Artificial Sequence
  Description of Artificial Sequence: Synthetic oligonucleotide
aagucgcaggaaguccugu

SEQ ID NO: 1554927 - RNA, 19 nt, Artificial Sequence
  Description of Artificial Sequence: Synthetic oligonucleotide
cauugugggguggucccgc

SEQ ID NO: 1554928 - RNA, 19 nt, Artificial Sequence
  Description of Artificial Sequence: Synthetic oligonucleotide
cucgcccagagguucccag

SEQ ID NO: 1554929 - RNA, 19 nt, Artificial Sequence
  Description of Artificial Sequence: Synthetic oligonucleotide
ugccguacagguggaaguc

SEQ ID NO: 1554930 - RNA, 19 nt, Artificial Sequence
  Description of Artificial Sequence: Synthetic oligonucleotide
gugacacgcaaguuguugu

SEQ ID NO: 1554931 - RNA, 19 nt, Artificial Sequence
  Description of Artificial Sequence: Synthetic oligonucleotide
cagagccauuagcaguaag

SEQ ID NO: 1554932 - RNA, 19 nt, Artificial Sequence
  Description of Artificial Sequence: Synthetic oligonucleotide
gcucuugucugugggagag

SEQ ID NO: 1554933 - RNA, 19 nt, Artificial Sequence
  Description of Artificial Sequence: Synthetic oligonucleotide
ccccucaugguuccggugg

SEQ ID NO: 1554934 - RNA, 19 nt, Artificial Sequence
  Description of Artificial Sequence: Synthetic oligonucleotide
cacgcaaguuguuguccac

SEQ ID NO: 1554935 - RNA, 19 nt, Artificial Sequence
  Description of Artificial Sequence: Synthetic oligonucleotide
gagcacuacacccacuauu

SEQ ID NO: 1554936 - RNA, 19 nt, Artificial Sequence
  Description of Artificial Sequence: Synthetic oligonucleotide
ccuauugcacaucuuccuc

SEQ ID NO: 1554937 - RNA, 19 nt, Artificial Sequence
  Description of Artificial Sequence: Synthetic oligonucleotide
cuagagaggggcagaggaa

SEQ ID NO: 1554938 - RNA, 19 nt, Artificial Sequence
  Description of Artificial Sequence: Synthetic oligonucleotide
aucucgcccagagguuccc

SEQ ID NO: 1554939 - RNA, 19 nt, Artificial Sequence
  Description of Artificial Sequence: Synthetic oligonucleotide
agaaacugcucagcucccu

SEQ ID NO: 1554940 - RNA, 19 nt, Artificial Sequence
  Description of Artificial Sequence: Synthetic oligonucleotide
cacccacuauuccugccug

SEQ ID NO: 1554941 - RNA, 19 nt, Artificial Sequence
  Description of Artificial Sequence: Synthetic oligonucleotide
cacgaaccagucagaacca

SEQ ID NO: 1554942 - RNA, 19 nt, Artificial Sequence
  Description of Artificial Sequence: Synthetic oligonucleotide
ugcuaccugagucgcccau

SEQ ID NO: 1554943 - RNA, 19 nt, Artificial Sequence
  Description of Artificial Sequence: Synthetic oligonucleotide
acgcaaguuguuguccaca

SEQ ID NO: 1554944 - RNA, 19 nt, Artificial Sequence
  Description of Artificial Sequence: Synthetic oligonucleotide
gguuccaguuggugacacg

SEQ ID NO: 1554945 - RNA, 19 nt, Artificial Sequence
  Description of Artificial Sequence: Synthetic oligonucleotide
cugauggcucaaacgggca

SEQ ID NO: 1554946 - RNA, 19 nt, Artificial Sequence
  Description of Artificial Sequence: Synthetic oligonucleotide
aucuaccgugaugucauau

SEQ ID NO: 1554947 - RNA, 19 nt, Artificial Sequence
  Description of Artificial Sequence: Synthetic oligonucleotide
cagagguucccagaacuga

SEQ ID NO: 1554948 - RNA, 19 nt, Artificial Sequence
  Description of Artificial Sequence: Synthetic oligonucleotide
uuugcgguugaaggucaau

SEQ ID NO: 1554949 - RNA, 19 nt, Artificial Sequence
  Description of Artificial Sequence: Synthetic oligonucleotide
ccaguuggugacacgcaag

SEQ ID NO: 1554950 - RNA, 19 nt, Artificial Sequence
  Description of Artificial Sequence: Synthetic oligonucleotide
ggcggugcuccccauggcc

SEQ ID NO: 1554951 - RNA, 19 nt, Artificial Sequence
  Description of Artificial Sequence: Synthetic oligonucleotide
gccacaccaguccacgaug

SEQ ID NO: 1554952 - RNA, 19 nt, Artificial Sequence
  Description of Artificial Sequence: Synthetic oligonucleotide
gguggucccgcgugcagcc

SEQ ID NO: 1554953 - RNA, 19 nt, Artificial Sequence
  Description of Artificial Sequence: Synthetic oligonucleotide
ggaagcgaaucucgcccag

SEQ ID NO: 1554954 - RNA, 19 nt, Artificial Sequence
  Description of Artificial Sequence: Synthetic oligonucleotide
ccugcuaccugagucgccc

SEQ ID NO: 1554955 - RNA, 19 nt, Artificial Sequence
  Description of Artificial Sequence: Synthetic oligonucleotide
gagucgcccaucagcuuug

SEQ ID NO: 1554956 - RNA, 19 nt, Artificial Sequence
  Description of Artificial Sequence: Synthetic oligonucleotide
gcaguaaguagugagcacu

SEQ ID NO: 1554957 - RNA, 19 nt, Artificial Sequence
  Description of Artificial Sequence: Synthetic oligonucleotide
cauuagcaguaaguaguga

SEQ ID NO: 1554958 - RNA, 19 nt, Artificial Sequence
  Description of Artificial Sequence: Synthetic oligonucleotide
gaagcgaaucucgcccaga

SEQ ID NO: 1554959 - RNA, 19 nt, Artificial Sequence
  Description of Artificial Sequence: Synthetic oligonucleotide
cuucuuaggucugcuugga

SEQ ID NO: 1554960 - RNA, 19 nt, Artificial Sequence
  Description of Artificial Sequence: Synthetic oligonucleotide
gcacuacacccacuauucc

SEQ ID NO: 1554961 - RNA, 19 nt, Artificial Sequence
  Description of Artificial Sequence: Synthetic oligonucleotide
uggcggugcuccccauggc

SEQ ID NO: 1554962 - RNA, 19 nt, Artificial Sequence
  Description of Artificial Sequence: Synthetic oligonucleotide
aggccgggcuauucuccag

SEQ ID NO: 1554963 - RNA, 19 nt, Artificial Sequence
  Description of Artificial Sequence: Synthetic oligonucleotide
ccacgauguguuuguacug

SEQ ID NO: 1554964 - RNA, 19 nt, Artificial Sequence
  Description of Artificial Sequence: Synthetic oligonucleotide
gggcuauucuccagcacug

SEQ ID NO: 1554965 - RNA, 19 nt, Artificial Sequence
  Description of Artificial Sequence: Synthetic oligonucleotide
uggcgaagcgugggccacg

SEQ ID NO: 1554966 - RNA, 19 nt, Artificial Sequence
  Description of Artificial Sequence: Synthetic oligonucleotide
ggccucaagugcaggaccc

SEQ ID NO: 1554967 - RNA, 19 nt, Artificial Sequence
  Description of Artificial Sequence: Synthetic oligonucleotide
aggacccgugagcucugug

SEQ ID NO: 1554968 - RNA, 19 nt, Artificial Sequence
  Description of Artificial Sequence: Synthetic oligonucleotide
cuugagggcuggcgugcug

SEQ ID NO: 1554969 - RNA, 19 nt, Artificial Sequence
  Description of Artificial Sequence: Synthetic oligonucleotide
aggaagcgccccucauggu

SEQ ID NO: 1554970 - RNA, 19 nt, Artificial Sequence
  Description of Artificial Sequence: Synthetic oligonucleotide
gggcccugcuaccugaguc

SEQ ID NO: 1554971 - RNA, 19 nt, Artificial Sequence
  Description of Artificial Sequence: Synthetic oligonucleotide
uggugacacgcaaguuguu

SEQ ID NO: 1554972 - RNA, 19 nt, Artificial Sequence
  Description of Artificial Sequence: Synthetic oligonucleotide
uccuccggguugugcuggc

SEQ ID NO: 1554973 - RNA, 19 nt, Artificial Sequence
  Description of Artificial Sequence: Synthetic oligonucleotide
gguagcugccguacaggug

SEQ ID NO: 1554974 - RNA, 19 nt, Artificial Sequence
  Description of Artificial Sequence: Synthetic oligonucleotide
ucccgcgugcagccagcug

SEQ ID NO: 1554975 - RNA, 19 nt, Artificial Sequence
  Description of Artificial Sequence: Synthetic oligonucleotide
ugugugccuccgggcagcc

SEQ ID NO: 1554976 - RNA, 19 nt, Artificial Sequence
  Description of Artificial Sequence: Synthetic oligonucleotide
guuggaucaauagggccau

SEQ ID NO: 1554977 - RNA, 19 nt, Artificial Sequence
  Description of Artificial Sequence: Synthetic oligonucleotide
cuuaggcccuggaaacucu

SEQ ID NO: 1554978 - RNA, 19 nt, Artificial Sequence
  Description of Artificial Sequence: Synthetic oligonucleotide
gucauaugauguggccaca

SEQ ID NO: 1554979 - RNA, 19 nt, Artificial Sequence
  Description of Artificial Sequence: Synthetic oligonucleotide
guauucauugugggguggu

SEQ ID NO: 1554980 - RNA, 19 nt, Artificial Sequence
  Description of Artificial Sequence: Synthetic oligonucleotide
cccgugagcucugugugcc

SEQ ID NO: 1554981 - RNA, 19 nt, Artificial Sequence
  Description of Artificial Sequence: Synthetic oligonucleotide
gcugcgugucagcacgaac

SEQ ID NO: 1554982 - RNA, 19 nt, Artificial Sequence
  Description of Artificial Sequence: Synthetic oligonucleotide
caggccgggcuauucucca

SEQ ID NO: 1554983 - RNA, 19 nt, Artificial Sequence
  Description of Artificial Sequence: Synthetic oligonucleotide
cgguuucuggcugaggcag

SEQ ID NO: 1554984 - RNA, 19 nt, Artificial Sequence
  Description of Artificial Sequence: Synthetic oligonucleotide
ccugagucgcccaucagcu

SEQ ID NO: 1554985 - RNA, 19 nt, Artificial Sequence
  Description of Artificial Sequence: Synthetic oligonucleotide
gcucccugucuguccaggc

SEQ ID NO: 1554986 - RNA, 19 nt, Artificial Sequence
  Description of Artificial Sequence: Synthetic oligonucleotide
gaaggugggucuggagacu

SEQ ID NO: 1554987 - RNA, 19 nt, Artificial Sequence
  Description of Artificial Sequence: Synthetic oligonucleotide
cacagcccacuucuuaggu

SEQ ID NO: 1554988 - RNA, 19 nt, Artificial Sequence
  Description of Artificial Sequence: Synthetic oligonucleotide
gcccaucagcuuugacagg

SEQ ID NO: 1554989 - RNA, 19 nt, Artificial Sequence
  Description of Artificial Sequence: Synthetic oligonucleotide
gccucaagugcaggacccg

SEQ ID NO: 1554990 - RNA, 19 nt, Artificial Sequence
  Description of Artificial Sequence: Synthetic oligonucleotide
cagcacgaaccagucagaa

SEQ ID NO: 1554991 - RNA, 19 nt, Artificial Sequence
  Description of Artificial Sequence: Synthetic oligonucleotide
ccgugaugucauaugaugu

SEQ ID NO: 1554992 - RNA, 19 nt, Artificial Sequence
  Description of Artificial Sequence: Synthetic oligonucleotide
ugguuccgguggaccucug

SEQ ID NO: 1554993 - RNA, 19 nt, Artificial Sequence
  Description of Artificial Sequence: Synthetic oligonucleotide
gucgcccaucagcuuugac

SEQ ID NO: 1554994 - RNA, 19 nt, Artificial Sequence
  Description of Artificial Sequence: Synthetic oligonucleotide
ccguacagguggaagucca

SEQ ID NO: 1554995 - RNA, 19 nt, Artificial Sequence
  Description of Artificial Sequence: Synthetic oligonucleotide
gcagaggaagcgccccuca

SEQ ID NO: 1554996 - RNA, 19 nt, Artificial Sequence
  Description of Artificial Sequence: Synthetic oligonucleotide
ggcucuugucugugggaga

SEQ ID NO: 1554997 - RNA, 19 nt, Artificial Sequence
  Description of Artificial Sequence: Synthetic oligonucleotide
gguuccgguggaccucuga

SEQ ID NO: 1554998 - RNA, 19 nt, Artificial Sequence
  Description of Artificial Sequence: Synthetic oligonucleotide
ggaagcgccccucaugguu

SEQ ID NO: 1554999 - RNA, 19 nt, Artificial Sequence
  Description of Artificial Sequence: Synthetic oligonucleotide
ggguggguagcugccguac

SEQ ID NO: 1555000 - RNA, 19 nt, Artificial Sequence
  Description of Artificial Sequence: Synthetic oligonucleotide
agcccacuucuuaggucug

SEQ ID NO: 1555001 - RNA, 19 nt, Artificial Sequence
  Description of Artificial Sequence: Synthetic oligonucleotide
caacauagguuggaucaau

SEQ ID NO: 1555002 - RNA, 19 nt, Artificial Sequence
  Description of Artificial Sequence: Synthetic oligonucleotide
gugcaggacccgugagcuc

SEQ ID NO: 1555003 - RNA, 19 nt, Artificial Sequence
  Description of Artificial Sequence: Synthetic oligonucleotide
aguccacgauguguuugua

SEQ ID NO: 1555004 - RNA, 19 nt, Artificial Sequence
  Description of Artificial Sequence: Synthetic oligonucleotide
cugcuaccugagucgccca

SEQ ID NO: 1555005 - RNA, 19 nt, Artificial Sequence
  Description of Artificial Sequence: Synthetic oligonucleotide
agcugcgugucagcacgaa

SEQ ID NO: 1555006 - RNA, 19 nt, Artificial Sequence
  Description of Artificial Sequence: Synthetic oligonucleotide
gccgggcuauucuccagca

SEQ ID NO: 1555007 - RNA, 19 nt, Artificial Sequence
  Description of Artificial Sequence: Synthetic oligonucleotide
guuugcgguugaaggucaa

SEQ ID NO: 1555008 - RNA, 19 nt, Artificial Sequence
  Description of Artificial Sequence: Synthetic oligonucleotide
gcuaccugagucgcccauc

SEQ ID NO: 1555009 - RNA, 19 nt, Artificial Sequence
  Description of Artificial Sequence: Synthetic oligonucleotide
gcucucacaggccgggcua

SEQ ID NO: 1555010 - RNA, 19 nt, Artificial Sequence
  Description of Artificial Sequence: Synthetic oligonucleotide
gcccugcuaccugagucgc

SEQ ID NO: 1555011 - RNA, 19 nt, Artificial Sequence
  Description of Artificial Sequence: Synthetic oligonucleotide
agucgcccaucagcuuuga

SEQ ID NO: 1555012 - RNA, 19 nt, Artificial Sequence
  Description of Artificial Sequence: Synthetic oligonucleotide
cacuuaggcccuggaaacu

SEQ ID NO: 1555013 - RNA, 19 nt, Artificial Sequence
  Description of Artificial Sequence: Synthetic oligonucleotide
gccccucaugguuccggug

SEQ ID NO: 1555014 - RNA, 19 nt, Artificial Sequence
  Description of Artificial Sequence: Synthetic oligonucleotide
ccgcgugcagccagcuggc

SEQ ID NO: 1555015 - RNA, 19 nt, Artificial Sequence
  Description of Artificial Sequence: Synthetic oligonucleotide
gcacuguguggaagaagga

SEQ ID NO: 1555016 - RNA, 19 nt, Artificial Sequence
  Description of Artificial Sequence: Synthetic oligonucleotide
gcccacuucuuaggucugc

SEQ ID NO: 1555017 - RNA, 19 nt, Artificial Sequence
  Description of Artificial Sequence: Synthetic oligonucleotide
caucuaccgugaugucaua

SEQ ID NO: 1555018 - RNA, 19 nt, Artificial Sequence
  Description of Artificial Sequence: Synthetic oligonucleotide
gcgccccucaugguuccgg

SEQ ID NO: 1555019 - RNA, 19 nt, Artificial Sequence
  Description of Artificial Sequence: Synthetic oligonucleotide
cccugcuaccugagucgcc

SEQ ID NO: 1555020 - RNA, 19 nt, Artificial Sequence
  Description of Artificial Sequence: Synthetic oligonucleotide
gcccagcuuacgguuccag

SEQ ID NO: 1555021 - RNA, 19 nt, Artificial Sequence
  Description of Artificial Sequence: Synthetic oligonucleotide
cgggcuauucuccagcacu

SEQ ID NO: 1555022 - RNA, 19 nt, Artificial Sequence
  Description of Artificial Sequence: Synthetic oligonucleotide
ccgggcuauucuccagcac

SEQ ID NO: 1555023 - RNA, 19 nt, Artificial Sequence
  Description of Artificial Sequence: Synthetic oligonucleotide
gggcuuggcggugcucccc

SEQ ID NO: 1555024 - RNA, 19 nt, Artificial Sequence
  Description of Artificial Sequence: Synthetic oligonucleotide
ggccgcaguggccggcuca

SEQ ID NO: 1555025 - RNA, 19 nt, Artificial Sequence
  Description of Artificial Sequence: Synthetic oligonucleotide
caguguccucaucuaccgu

SEQ ID NO: 1555026 - RNA, 19 nt, Artificial Sequence
  Description of Artificial Sequence: Synthetic oligonucleotide
cuggcgugcugggugggua

SEQ ID NO: 1555027 - RNA, 19 nt, Artificial Sequence
  Description of Artificial Sequence: Synthetic oligonucleotide
ggcgaagcgugggccacga

SEQ ID NO: 1555028 - RNA, 19 nt, Artificial Sequence
  Description of Artificial Sequence: Synthetic oligonucleotide
cacugucuguaaggugcaa

SEQ ID NO: 1555029 - RNA, 19 nt, Artificial Sequence
  Description of Artificial Sequence: Synthetic oligonucleotide
cagaggaagcgccccucau

SEQ ID NO: 1555030 - RNA, 19 nt, Artificial Sequence
  Description of Artificial Sequence: Synthetic oligonucleotide
ccacaccaguccacgaugu

SEQ ID NO: 1555031 - RNA, 19 nt, Artificial Sequence
  Description of Artificial Sequence: Synthetic oligonucleotide
ggcuauucuccagcacugu

SEQ ID NO: 1555032 - RNA, 19 nt, Artificial Sequence
  Description of Artificial Sequence: Synthetic oligonucleotide
ccgguggaccucugaucuc

SEQ ID NO: 1555033 - RNA, 19 nt, Artificial Sequence
  Description of Artificial Sequence: Synthetic oligonucleotide
ggacucggcuggaagcagu

SEQ ID NO: 1555034 - RNA, 19 nt, Artificial Sequence
  Description of Artificial Sequence: Synthetic oligonucleotide
cugagucgcccaucagcuu

SEQ ID NO: 1555035 - RNA, 19 nt, Artificial Sequence
  Description of Artificial Sequence: Synthetic oligonucleotide
cguacagguggaaguccaa

SEQ ID NO: 1555036 - RNA, 19 nt, Artificial Sequence
  Description of Artificial Sequence: Synthetic oligonucleotide
guggucccgcgugcagcca

SEQ ID NO: 1555037 - RNA, 19 nt, Artificial Sequence
  Description of Artificial Sequence: Synthetic oligonucleotide
aggucugcuuggagcccua

SEQ ID NO: 1555038 - RNA, 19 nt, Artificial Sequence
  Description of Artificial Sequence: Synthetic oligonucleotide
gagcccuauugcacaucuu

SEQ ID NO: 1555039 - RNA, 19 nt, Artificial Sequence
  Description of Artificial Sequence: Synthetic oligonucleotide
gcgugacuucaguguccuc

SEQ ID NO: 1555040 - RNA, 19 nt, Artificial Sequence
  Description of Artificial Sequence: Synthetic oligonucleotide
gcuuacgguuccaguuggu

SEQ ID NO: 1555041 - RNA, 19 nt, Artificial Sequence
  Description of Artificial Sequence: Synthetic oligonucleotide
ggcuggggcccugcuaccu

SEQ ID NO: 1555042 - RNA, 19 nt, Artificial Sequence
  Description of Artificial Sequence: Synthetic oligonucleotide
gucccgcgugcagccagcu

SEQ ID NO: 1555043 - RNA, 19 nt, Artificial Sequence
  Description of Artificial Sequence: Synthetic oligonucleotide
cgaaucucgcccagagguu

SEQ ID NO: 1555044 - RNA, 19 nt, Artificial Sequence
  Description of Artificial Sequence: Synthetic oligonucleotide
gcgugcuggguggguagcu

SEQ ID NO: 1555045 - RNA, 19 nt, Artificial Sequence
  Description of Artificial Sequence: Synthetic oligonucleotide
caggacccgugagcucugu

SEQ ID NO: 1555046 - RNA, 19 nt, Artificial Sequence
  Description of Artificial Sequence: Synthetic oligonucleotide
gguggaccucugaucucuu

SEQ ID NO: 1555047 - RNA, 19 nt, Artificial Sequence
  Description of Artificial Sequence: Synthetic oligonucleotide
ccaggcuccuggccgcagu

SEQ ID NO: 1555048 - RNA, 19 nt, Artificial Sequence
  Description of Artificial Sequence: Synthetic oligonucleotide
gugugccuccgggcagccu

SEQ ID NO: 1555049 - RNA, 19 nt, Artificial Sequence
  Description of Artificial Sequence: Synthetic oligonucleotide
ggucugcuuggagcccuau

SEQ ID NO: 1555050 - RNA, 19 nt, Artificial Sequence
  Description of Artificial Sequence: Synthetic oligonucleotide
ccgggcaaagaaggugggu

SEQ ID NO: 1555051 - RNA, 19 nt, Artificial Sequence
  Description of Artificial Sequence: Synthetic oligonucleotide
ccgugagcucugugugccu

SEQ ID NO: 1555052 - RNA, 19 nt, Artificial Sequence
  Description of Artificial Sequence: Synthetic oligonucleotide
ccggcuccuccggguugug

SEQ ID NO: 1555053 - RNA, 19 nt, Artificial Sequence
  Description of Artificial Sequence: Synthetic oligonucleotide
cgccccucaugguuccggu

SEQ ID NO: 1555054 - RNA, 19 nt, Artificial Sequence
  Description of Artificial Sequence: Synthetic oligonucleotide
cgcgugcagccagcuggca

SEQ ID NO: 1555055 - RNA, 19 nt, Artificial Sequence
  Description of Artificial Sequence: Synthetic oligonucleotide
ucuuacaucauacaaagcg

SEQ ID NO: 1555056 - RNA, 19 nt, Artificial Sequence
  Description of Artificial Sequence: Synthetic oligonucleotide
aaagcaacgaaucugcccc

SEQ ID NO: 1555057 - RNA, 19 nt, Artificial Sequence
  Description of Artificial Sequence: Synthetic oligonucleotide
acaauagaaacccagagcu

SEQ ID NO: 1555058 - RNA, 19 nt, Artificial Sequence
  Description of Artificial Sequence: Synthetic oligonucleotide
aggacaauaaaacaguaag

SEQ ID NO: 1555059 - RNA, 19 nt, Artificial Sequence
  Description of Artificial Sequence: Synthetic oligonucleotide
ucuuuuauuuuccagucag

SEQ ID NO: 1555060 - RNA, 19 nt, Artificial Sequence
  Description of Artificial Sequence: Synthetic oligonucleotide
ucauacaaagcgcagaucu

SEQ ID NO: 1555061 - RNA, 19 nt, Artificial Sequence
  Description of Artificial Sequence: Synthetic oligonucleotide
aaaagaucuuacaucauac

SEQ ID NO: 1555062 - RNA, 19 nt, Artificial Sequence
  Description of Artificial Sequence: Synthetic oligonucleotide
aagccaguaaccauaagcc

SEQ ID NO: 1555063 - RNA, 19 nt, Artificial Sequence
  Description of Artificial Sequence: Synthetic oligonucleotide
ugaaccuuacaauagaaac

SEQ ID NO: 1555064 - RNA, 19 nt, Artificial Sequence
  Description of Artificial Sequence: Synthetic oligonucleotide
auagguaauguucagccgg

SEQ ID NO: 1555065 - RNA, 19 nt, Artificial Sequence
  Description of Artificial Sequence: Synthetic oligonucleotide
uucuaauacugcuuuaggg

SEQ ID NO: 1555066 - RNA, 19 nt, Artificial Sequence
  Description of Artificial Sequence: Synthetic oligonucleotide
uuuugcaccuacaacaagc

SEQ ID NO: 1555067 - RNA, 19 nt, Artificial Sequence
  Description of Artificial Sequence: Synthetic oligonucleotide
aagguugacgcucuccacc

SEQ ID NO: 1555068 - RNA, 19 nt, Artificial Sequence
  Description of Artificial Sequence: Synthetic oligonucleotide
guaaccauaagccaguaug

SEQ ID NO: 1555069 - RNA, 19 nt, Artificial Sequence
  Description of Artificial Sequence: Synthetic oligonucleotide
ucuaauacugcuuuagggu

SEQ ID NO: 1555070 - RNA, 19 nt, Artificial Sequence
  Description of Artificial Sequence: Synthetic oligonucleotide
aauaagaauuauucucaag

SEQ ID NO: 1555071 - RNA, 19 nt, Artificial Sequence
  Description of Artificial Sequence: Synthetic oligonucleotide
guagguagccacuugaagg

SEQ ID NO: 1555072 - RNA, 19 nt, Artificial Sequence
  Description of Artificial Sequence: Synthetic oligonucleotide
uggaacuuagaguagguag

SEQ ID NO: 1555073 - RNA, 19 nt, Artificial Sequence
  Description of Artificial Sequence: Synthetic oligonucleotide
aauaaugaucagcauguca

SEQ ID NO: 1555074 - RNA, 19 nt, Artificial Sequence
  Description of Artificial Sequence: Synthetic oligonucleotide
uuuaaacagcauaggauag

SEQ ID NO: 1555075 - RNA, 19 nt, Artificial Sequence
  Description of Artificial Sequence: Synthetic oligonucleotide
aacaguaagaaaauggggu

SEQ ID NO: 1555076 - RNA, 19 nt, Artificial Sequence
  Description of Artificial Sequence: Synthetic oligonucleotide
uuuaaugucuccaggcuug

SEQ ID NO: 1555077 - RNA, 19 nt, Artificial Sequence
  Description of Artificial Sequence: Synthetic oligonucleotide
ugucauuaggcccugcuag

SEQ ID NO: 1555078 - RNA, 19 nt, Artificial Sequence
  Description of Artificial Sequence: Synthetic oligonucleotide
ugcuuaauauucacgaggc

SEQ ID NO: 1555079 - RNA, 19 nt, Artificial Sequence
  Description of Artificial Sequence: Synthetic oligonucleotide
auauucacgaggcuucagc

SEQ ID NO: 1555080 - RNA, 19 nt, Artificial Sequence
  Description of Artificial Sequence: Synthetic oligonucleotide
uacaauagaaacccagagc

SEQ ID NO: 1555081 - RNA, 19 nt, Artificial Sequence
  Description of Artificial Sequence: Synthetic oligonucleotide
acuuagaguagguagccac

SEQ ID NO: 1555082 - RNA, 19 nt, Artificial Sequence
  Description of Artificial Sequence: Synthetic oligonucleotide
ucuuuguagcccaagggag

SEQ ID NO: 1555083 - RNA, 19 nt, Artificial Sequence
  Description of Artificial Sequence: Synthetic oligonucleotide
uguggcaugcuuaauauuc

SEQ ID NO: 1555084 - RNA, 19 nt, Artificial Sequence
  Description of Artificial Sequence: Synthetic oligonucleotide
aaagugaucuuaccaagcu

SEQ ID NO: 1555085 - RNA, 19 nt, Artificial Sequence
  Description of Artificial Sequence: Synthetic oligonucleotide
aaauucguaguuaggaauc

SEQ ID NO: 1555086 - RNA, 19 nt, Artificial Sequence
  Description of Artificial Sequence: Synthetic oligonucleotide
ucugaguucuuauugguca

SEQ ID NO: 1555087 - RNA, 19 nt, Artificial Sequence
  Description of Artificial Sequence: Synthetic oligonucleotide
uaagaauuauucucaagga

SEQ ID NO: 1555088 - RNA, 19 nt, Artificial Sequence
  Description of Artificial Sequence: Synthetic oligonucleotide
aauucguaguuaggaaucc

SEQ ID NO: 1555089 - RNA, 19 nt, Artificial Sequence
  Description of Artificial Sequence: Synthetic oligonucleotide
aaacaguaagaaaaugggg

SEQ ID NO: 1555090 - RNA, 19 nt, Artificial Sequence
  Description of Artificial Sequence: Synthetic oligonucleotide
uuuaggguuggugauaucc

SEQ ID NO: 1555091 - RNA, 19 nt, Artificial Sequence
  Description of Artificial Sequence: Synthetic oligonucleotide
uucauagaucuuuucauug

SEQ ID NO: 1555092 - RNA, 19 nt, Artificial Sequence
  Description of Artificial Sequence: Synthetic oligonucleotide
gaugaaagugaucuuacca

SEQ ID NO: 1555093 - RNA, 19 nt, Artificial Sequence
  Description of Artificial Sequence: Synthetic oligonucleotide
ugaaagugaucuuaccaag

SEQ ID NO: 1555094 - RNA, 19 nt, Artificial Sequence
  Description of Artificial Sequence: Synthetic oligonucleotide
aaacaugacugacaguacu

SEQ ID NO: 1555095 - RNA, 19 nt, Artificial Sequence
  Description of Artificial Sequence: Synthetic oligonucleotide
ucagguuuggucuccauca

SEQ ID NO: 1555096 - RNA, 19 nt, Artificial Sequence
  Description of Artificial Sequence: Synthetic oligonucleotide
aaagaucuuacaucauaca

SEQ ID NO: 1555097 - RNA, 19 nt, Artificial Sequence
  Description of Artificial Sequence: Synthetic oligonucleotide
uucgugaaccuuacaauag

SEQ ID NO: 1555098 - RNA, 19 nt, Artificial Sequence
  Description of Artificial Sequence: Synthetic oligonucleotide
auagacacggagaagcagc

SEQ ID NO: 1555099 - RNA, 19 nt, Artificial Sequence
  Description of Artificial Sequence: Synthetic oligonucleotide
uaguugauagcaaucacau

SEQ ID NO: 1555100 - RNA, 19 nt, Artificial Sequence
  Description of Artificial Sequence: Synthetic oligonucleotide
uaaauucguaguuaggaau

SEQ ID NO: 1555101 - RNA, 19 nt, Artificial Sequence
  Description of Artificial Sequence: Synthetic oligonucleotide
gauagguaauguucagccg

SEQ ID NO: 1555102 - RNA, 19 nt, Artificial Sequence
  Description of Artificial Sequence: Synthetic oligonucleotide
uauucccagaaccugagaa

SEQ ID NO: 1555103 - RNA, 19 nt, Artificial Sequence
  Description of Artificial Sequence: Synthetic oligonucleotide
guaacagaugccuucauca

SEQ ID NO: 1555104 - RNA, 19 nt, Artificial Sequence
  Description of Artificial Sequence: Synthetic oligonucleotide
acaguaagaaaauggggug

SEQ ID NO: 1555105 - RNA, 19 nt, Artificial Sequence
  Description of Artificial Sequence: Synthetic oligonucleotide
gaaagcaacgaaucugccc

SEQ ID NO: 1555106 - RNA, 19 nt, Artificial Sequence
  Description of Artificial Sequence: Synthetic oligonucleotide
ugagaaagcaacgaaucug

SEQ ID NO: 1555107 - RNA, 19 nt, Artificial Sequence
  Description of Artificial Sequence: Synthetic oligonucleotide
aacggaucuuuuauuuucc

SEQ ID NO: 1555108 - RNA, 19 nt, Artificial Sequence
  Description of Artificial Sequence: Synthetic oligonucleotide
gucacauucaauaauggac

SEQ ID NO: 1555109 - RNA, 19 nt, Artificial Sequence
  Description of Artificial Sequence: Synthetic oligonucleotide
uuaaacagcauaggauagg

SEQ ID NO: 1555110 - RNA, 19 nt, Artificial Sequence
  Description of Artificial Sequence: Synthetic oligonucleotide
ugaucgagggcagagggcg

SEQ ID NO: 1555111 - RNA, 19 nt, Artificial Sequence
  Description of Artificial Sequence: Synthetic oligonucleotide
acaacaagcuugauagucc

SEQ ID NO: 1555112 - RNA, 19 nt, Artificial Sequence
  Description of Artificial Sequence: Synthetic oligonucleotide
ugaagguugacgcucucca

SEQ ID NO: 1555113 - RNA, 19 nt, Artificial Sequence
  Description of Artificial Sequence: Synthetic oligonucleotide
agcgauacugcguagagaa

SEQ ID NO: 1555114 - RNA, 19 nt, Artificial Sequence
  Description of Artificial Sequence: Synthetic oligonucleotide
agcuugauaguccuuaggu

SEQ ID NO: 1555115 - RNA, 19 nt, Artificial Sequence
  Description of Artificial Sequence: Synthetic oligonucleotide
gagaaagcaacgaaucugc

SEQ ID NO: 1555116 - RNA, 19 nt, Artificial Sequence
  Description of Artificial Sequence: Synthetic oligonucleotide
uaaccauaagccaguaugu

SEQ ID NO: 1555117 - RNA, 19 nt, Artificial Sequence
  Description of Artificial Sequence: Synthetic oligonucleotide
uccuaguacuugaaaaucu

SEQ ID NO: 1555118 - RNA, 19 nt, Artificial Sequence
  Description of Artificial Sequence: Synthetic oligonucleotide
guucuuuguagcccaaggg

SEQ ID NO: 1555119 - RNA, 19 nt, Artificial Sequence
  Description of Artificial Sequence: Synthetic oligonucleotide
uuauguggcaugcuuaaua

SEQ ID NO: 1555120 - RNA, 19 nt, Artificial Sequence
  Description of Artificial Sequence: Synthetic oligonucleotide
cucuauugacuccucaugc

SEQ ID NO: 1555121 - RNA, 19 nt, Artificial Sequence
  Description of Artificial Sequence: Synthetic oligonucleotide
cuuaaauucguaguuagga

SEQ ID NO: 1555122 - RNA, 19 nt, Artificial Sequence
  Description of Artificial Sequence: Synthetic oligonucleotide
ucggucugaguucuuauug

SEQ ID NO: 1555123 - RNA, 19 nt, Artificial Sequence
  Description of Artificial Sequence: Synthetic oligonucleotide
accaagcuuaaauucguag

SEQ ID NO: 1555124 - RNA, 19 nt, Artificial Sequence
  Description of Artificial Sequence: Synthetic oligonucleotide
aaaacaugacugacaguac

SEQ ID NO: 1555125 - RNA, 19 nt, Artificial Sequence
  Description of Artificial Sequence: Synthetic oligonucleotide
ucucaaggaacaauuuuaa

SEQ ID NO: 1555126 - RNA, 19 nt, Artificial Sequence
  Description of Artificial Sequence: Synthetic oligonucleotide
uacaucauacaaagcgcag

SEQ ID NO: 1555127 - RNA, 19 nt, Artificial Sequence
  Description of Artificial Sequence: Synthetic oligonucleotide
gauacugcguagagaagcg

SEQ ID NO: 1555128 - RNA, 19 nt, Artificial Sequence
  Description of Artificial Sequence: Synthetic oligonucleotide
uuaccaagcuuaaauucgu

SEQ ID NO: 1555129 - RNA, 19 nt, Artificial Sequence
  Description of Artificial Sequence: Synthetic oligonucleotide
uucguaguuaggaaucccu

SEQ ID NO: 1555130 - RNA, 19 nt, Artificial Sequence
  Description of Artificial Sequence: Synthetic oligonucleotide
uguaguugauagcaaucac

SEQ ID NO: 1555131 - RNA, 19 nt, Artificial Sequence
  Description of Artificial Sequence: Synthetic oligonucleotide
accauaagccaguauguug

SEQ ID NO: 1555132 - RNA, 19 nt, Artificial Sequence
  Description of Artificial Sequence: Synthetic oligonucleotide
uacaacaagcuugauaguc

SEQ ID NO: 1555133 - RNA, 19 nt, Artificial Sequence
  Description of Artificial Sequence: Synthetic oligonucleotide
uauguggcaugcuuaauau

SEQ ID NO: 1555134 - RNA, 19 nt, Artificial Sequence
  Description of Artificial Sequence: Synthetic oligonucleotide
uagguagccacuugaaggu

SEQ ID NO: 1555135 - RNA, 19 nt, Artificial Sequence
  Description of Artificial Sequence: Synthetic oligonucleotide
uauucacgaggcuucagcu

SEQ ID NO: 1555136 - RNA, 19 nt, Artificial Sequence
  Description of Artificial Sequence: Synthetic oligonucleotide
uuaggguuggugauaucca

SEQ ID NO: 1555137 - RNA, 19 nt, Artificial Sequence
  Description of Artificial Sequence: Synthetic oligonucleotide
aaauaaugaucagcauguc

SEQ ID NO: 1555138 - RNA, 19 nt, Artificial Sequence
  Description of Artificial Sequence: Synthetic oligonucleotide
ucugguucuuuguagccca

SEQ ID NO: 1555139 - RNA, 19 nt, Artificial Sequence
  Description of Artificial Sequence: Synthetic oligonucleotide
ucaugucacauucaauaau

SEQ ID NO: 1555140 - RNA, 19 nt, Artificial Sequence
  Description of Artificial Sequence: Synthetic oligonucleotide
gccaguauguugcaaacgg

SEQ ID NO: 1555141 - RNA, 19 nt, Artificial Sequence
  Description of Artificial Sequence: Synthetic oligonucleotide
caugcuuaauauucacgag

SEQ ID NO: 1555142 - RNA, 19 nt, Artificial Sequence
  Description of Artificial Sequence: Synthetic oligonucleotide
aguccuuagguaacuaaac

SEQ ID NO: 1555143 - RNA, 19 nt, Artificial Sequence
  Description of Artificial Sequence: Synthetic oligonucleotide
uugauaguccuuagguaac

SEQ ID NO: 1555144 - RNA, 19 nt, Artificial Sequence
  Description of Artificial Sequence: Synthetic oligonucleotide
ucuucgugaaccuuacaau

SEQ ID NO: 1555145 - RNA, 19 nt, Artificial Sequence
  Description of Artificial Sequence: Synthetic oligonucleotide
agaguagguagccacuuga

SEQ ID NO: 1555146 - RNA, 19 nt, Artificial Sequence
  Description of Artificial Sequence: Synthetic oligonucleotide
caucugaccugucauuagg

SEQ ID NO: 1555147 - RNA, 19 nt, Artificial Sequence
  Description of Artificial Sequence: Synthetic oligonucleotide
uugcaaacggaucuuuuau

SEQ ID NO: 1555148 - RNA, 19 nt, Artificial Sequence
  Description of Artificial Sequence: Synthetic oligonucleotide
uccugagaaagcaacgaau

SEQ ID NO: 1555149 - RNA, 19 nt, Artificial Sequence
  Description of Artificial Sequence: Synthetic oligonucleotide
ucuacauucaugucacauu

SEQ ID NO: 1555150 - RNA, 19 nt, Artificial Sequence
  Description of Artificial Sequence: Synthetic oligonucleotide
ucgugaaccuuacaauaga

SEQ ID NO: 1555151 - RNA, 19 nt, Artificial Sequence
  Description of Artificial Sequence: Synthetic oligonucleotide
gaucuuaccaagcuuaaau

SEQ ID NO: 1555152 - RNA, 19 nt, Artificial Sequence
  Description of Artificial Sequence: Synthetic oligonucleotide
agagcauucucugaacuug

SEQ ID NO: 1555153 - RNA, 19 nt, Artificial Sequence
  Description of Artificial Sequence: Synthetic oligonucleotide
aguugauagcaaucacauc

SEQ ID NO: 1555154 - RNA, 19 nt, Artificial Sequence
  Description of Artificial Sequence: Synthetic oligonucleotide
auaauuaucuucccuccuu

SEQ ID NO: 1555155 - RNA, 19 nt, Artificial Sequence
  Description of Artificial Sequence: Synthetic oligonucleotide
ugcuagcauagacacggag

SEQ ID NO: 1555156 - RNA, 19 nt, Artificial Sequence
  Description of Artificial Sequence: Synthetic oligonucleotide
aguauguugcaaacggauc

SEQ ID NO: 1555157 - RNA, 19 nt, Artificial Sequence
  Description of Artificial Sequence: Synthetic oligonucleotide
uagguaauguucagccggc

SEQ ID NO: 1555158 - RNA, 19 nt, Artificial Sequence
  Description of Artificial Sequence: Synthetic oligonucleotide
uuccagucagccaacaguu

SEQ ID NO: 1555159 - RNA, 19 nt, Artificial Sequence
  Description of Artificial Sequence: Synthetic oligonucleotide
agaucugaggacaauaaaa

SEQ ID NO: 1555160 - RNA, 19 nt, Artificial Sequence
  Description of Artificial Sequence: Synthetic oligonucleotide
caaagcgcagaucugagga

SEQ ID NO: 1555161 - RNA, 19 nt, Artificial Sequence
  Description of Artificial Sequence: Synthetic oligonucleotide
uacugcguagagaagcggu

SEQ ID NO: 1555162 - RNA, 19 nt, Artificial Sequence
  Description of Artificial Sequence: Synthetic oligonucleotide
agagagcauucucugaacu

SEQ ID NO: 1555163 - RNA, 19 nt, Artificial Sequence
  Description of Artificial Sequence: Synthetic oligonucleotide
ucagcuccguccuaguacu

SEQ ID NO: 1555164 - RNA, 19 nt, Artificial Sequence
  Description of Artificial Sequence: Synthetic oligonucleotide
aguuauguggcaugcuuaa

SEQ ID NO: 1555165 - RNA, 19 nt, Artificial Sequence
  Description of Artificial Sequence: Synthetic oligonucleotide
ugcuguuuugcaccuacaa

SEQ ID NO: 1555166 - RNA, 19 nt, Artificial Sequence
  Description of Artificial Sequence: Synthetic oligonucleotide
ccugcuagcauagacacgg

SEQ ID NO: 1555167 - RNA, 19 nt, Artificial Sequence
  Description of Artificial Sequence: Synthetic oligonucleotide
ggacuuagggcuuucuucc

SEQ ID NO: 1555168 - RNA, 19 nt, Artificial Sequence
  Description of Artificial Sequence: Synthetic oligonucleotide
uguucagccggcugaguug

SEQ ID NO: 1555169 - RNA, 19 nt, Artificial Sequence
  Description of Artificial Sequence: Synthetic oligonucleotide
gguucuuuguagcccaagg

SEQ ID NO: 1555170 - RNA, 19 nt, Artificial Sequence
  Description of Artificial Sequence: Synthetic oligonucleotide
uauucucaaggaacaauuu

SEQ ID NO: 1555171 - RNA, 19 nt, Artificial Sequence
  Description of Artificial Sequence: Synthetic oligonucleotide
ggcauaauuaucuucccuc

SEQ ID NO: 1555172 - RNA, 19 nt, Artificial Sequence
  Description of Artificial Sequence: Synthetic oligonucleotide
ucuuccccagguuacgcgc

SEQ ID NO: 1555173 - RNA, 19 nt, Artificial Sequence
  Description of Artificial Sequence: Synthetic oligonucleotide
acccgcaguucauagaucu

SEQ ID NO: 1555174 - RNA, 19 nt, Artificial Sequence
  Description of Artificial Sequence: Synthetic oligonucleotide
agacaggcaaaguuucuca

SEQ ID NO: 1555175 - RNA, 19 nt, Artificial Sequence
  Description of Artificial Sequence: Synthetic oligonucleotide
agaguuauguggcaugcuu

SEQ ID NO: 1555176 - RNA, 19 nt, Artificial Sequence
  Description of Artificial Sequence: Synthetic oligonucleotide
aucuuaccaagcuuaaauu

SEQ ID NO: 1555177 - RNA, 19 nt, Artificial Sequence
  Description of Artificial Sequence: Synthetic oligonucleotide
cuagcauagacacggagaa

SEQ ID NO: 1555178 - RNA, 19 nt, Artificial Sequence
  Description of Artificial Sequence: Synthetic oligonucleotide
gcaugcuuaauauucacga

SEQ ID NO: 1555179 - RNA, 19 nt, Artificial Sequence
  Description of Artificial Sequence: Synthetic oligonucleotide
ucaguggcagaguuaugug

SEQ ID NO: 1555180 - RNA, 19 nt, Artificial Sequence
  Description of Artificial Sequence: Synthetic oligonucleotide
uuuguagcccaagggagca

SEQ ID NO: 1555181 - RNA, 19 nt, Artificial Sequence
  Description of Artificial Sequence: Synthetic oligonucleotide
ucuuccgcagugacugucc

SEQ ID NO: 1555182 - RNA, 19 nt, Artificial Sequence
  Description of Artificial Sequence: Synthetic oligonucleotide
ccuuacaauagaaacccag

SEQ ID NO: 1555183 - RNA, 19 nt, Artificial Sequence
  Description of Artificial Sequence: Synthetic oligonucleotide
guaguugauagcaaucaca

SEQ ID NO: 1555184 - RNA, 19 nt, Artificial Sequence
  Description of Artificial Sequence: Synthetic oligonucleotide
guauguugcaaacggaucu

SEQ ID NO: 1555185 - RNA, 19 nt, Artificial Sequence
  Description of Artificial Sequence: Synthetic oligonucleotide
aauauucacgaggcuucag

SEQ ID NO: 1555186 - RNA, 19 nt, Artificial Sequence
  Description of Artificial Sequence: Synthetic oligonucleotide
ugucauucggucugaguuc

SEQ ID NO: 1555187 - RNA, 19 nt, Artificial Sequence
  Description of Artificial Sequence: Synthetic oligonucleotide
cagccggcugaguugaucg

SEQ ID NO: 1555188 - RNA, 19 nt, Artificial Sequence
  Description of Artificial Sequence: Synthetic oligonucleotide
cacagugugucauucgguc

SEQ ID NO: 1555189 - RNA, 19 nt, Artificial Sequence
  Description of Artificial Sequence: Synthetic oligonucleotide
aaugggcgugaauuucuga

SEQ ID NO: 1555190 - RNA, 19 nt, Artificial Sequence
  Description of Artificial Sequence: Synthetic oligonucleotide
agugaucuuaccaagcuua

SEQ ID NO: 1555191 - RNA, 19 nt, Artificial Sequence
  Description of Artificial Sequence: Synthetic oligonucleotide
aagugaucuuaccaagcuu

SEQ ID NO: 1555192 - RNA, 19 nt, Artificial Sequence
  Description of Artificial Sequence: Synthetic oligonucleotide
agaaagcaacgaaucugcc

SEQ ID NO: 1555193 - RNA, 19 nt, Artificial Sequence
  Description of Artificial Sequence: Synthetic oligonucleotide
ucguaguuaggaaucccuc

SEQ ID NO: 1555194 - RNA, 19 nt, Artificial Sequence
  Description of Artificial Sequence: Synthetic oligonucleotide
ggaacuuagaguagguagc

SEQ ID NO: 1555195 - RNA, 19 nt, Artificial Sequence
  Description of Artificial Sequence: Synthetic oligonucleotide
ugggcgugaauuucugaug

SEQ ID NO: 1555196 - RNA, 19 nt, Artificial Sequence
  Description of Artificial Sequence: Synthetic oligonucleotide
agaaccugagaaggcacgg

SEQ ID NO: 1555197 - RNA, 19 nt, Artificial Sequence
  Description of Artificial Sequence: Synthetic oligonucleotide
acaguacuuggugacgccg

SEQ ID NO: 1555198 - RNA, 19 nt, Artificial Sequence
  Description of Artificial Sequence: Synthetic oligonucleotide
ugcguagagaagcgguucu

SEQ ID NO: 1555199 - RNA, 19 nt, Artificial Sequence
  Description of Artificial Sequence: Synthetic oligonucleotide
uugaucgagggcagagggc

SEQ ID NO: 1555200 - RNA, 19 nt, Artificial Sequence
  Description of Artificial Sequence: Synthetic oligonucleotide
augggcgugaauuucugau

SEQ ID NO: 1555201 - RNA, 19 nt, Artificial Sequence
  Description of Artificial Sequence: Synthetic oligonucleotide
ccagucuauucccagaacc

SEQ ID NO: 1555202 - RNA, 19 nt, Artificial Sequence
  Description of Artificial Sequence: Synthetic oligonucleotide
uagaguagguagccacuug

SEQ ID NO: 1555203 - RNA, 19 nt, Artificial Sequence
  Description of Artificial Sequence: Synthetic oligonucleotide
agccacuugaagguugacg

SEQ ID NO: 1555204 - RNA, 19 nt, Artificial Sequence
  Description of Artificial Sequence: Synthetic oligonucleotide
uacuuggugacgccgcuuc

SEQ ID NO: 1555205 - RNA, 19 nt, Artificial Sequence
  Description of Artificial Sequence: Synthetic oligonucleotide
agguuacgcgcacaagcuc

SEQ ID NO: 1555206 - RNA, 19 nt, Artificial Sequence
  Description of Artificial Sequence: Synthetic oligonucleotide
acaucauacaaagcgcaga

SEQ ID NO: 1555207 - RNA, 19 nt, Artificial Sequence
  Description of Artificial Sequence: Synthetic oligonucleotide
cagugugucauucggucug

SEQ ID NO: 1555208 - RNA, 19 nt, Artificial Sequence
  Description of Artificial Sequence: Synthetic oligonucleotide
aucacaucuccagugguca

SEQ ID NO: 1555209 - RNA, 19 nt, Artificial Sequence
  Description of Artificial Sequence: Synthetic oligonucleotide
aguucuuauuggucaauuu

SEQ ID NO: 1555210 - RNA, 19 nt, Artificial Sequence
  Description of Artificial Sequence: Synthetic oligonucleotide
auaauggacacagccuugu

SEQ ID NO: 1555211 - RNA, 19 nt, Artificial Sequence
  Description of Artificial Sequence: Synthetic oligonucleotide
accuacaacaagcuugaua

SEQ ID NO: 1555212 - RNA, 19 nt, Artificial Sequence
  Description of Artificial Sequence: Synthetic oligonucleotide
gaguugaucgagggcagag

SEQ ID NO: 1555213 - RNA, 19 nt, Artificial Sequence
  Description of Artificial Sequence: Synthetic oligonucleotide
aagcgcagaucugaggaca

SEQ ID NO: 1555214 - RNA, 19 nt, Artificial Sequence
  Description of Artificial Sequence: Synthetic oligonucleotide
aagcuuaaauucguaguua

SEQ ID NO: 1555215 - RNA, 19 nt, Artificial Sequence
  Description of Artificial Sequence: Synthetic oligonucleotide
caagcuugauaguccuuag

SEQ ID NO: 1555216 - RNA, 19 nt, Artificial Sequence
  Description of Artificial Sequence: Synthetic oligonucleotide
agccaguaaccauaagcca

SEQ ID NO: 1555217 - RNA, 19 nt, Artificial Sequence
  Description of Artificial Sequence: Synthetic oligonucleotide
cuucgugaaccuuacaaua

SEQ ID NO: 1555218 - RNA, 19 nt, Artificial Sequence
  Description of Artificial Sequence: Synthetic oligonucleotide
aguugaucgagggcagagg

SEQ ID NO: 1555219 - RNA, 19 nt, Artificial Sequence
  Description of Artificial Sequence: Synthetic oligonucleotide
gucauuaggcccugcuagc

SEQ ID NO: 1555220 - RNA, 19 nt, Artificial Sequence
  Description of Artificial Sequence: Synthetic oligonucleotide
caauagaaacccagagcuc

SEQ ID NO: 1555221 - RNA, 19 nt, Artificial Sequence
  Description of Artificial Sequence: Synthetic oligonucleotide
acaugacugacaguacuug

SEQ ID NO: 1555222 - RNA, 19 nt, Artificial Sequence
  Description of Artificial Sequence: Synthetic oligonucleotide
uuggugacgccgcuucucu

SEQ ID NO: 1555223 - RNA, 19 nt, Artificial Sequence
  Description of Artificial Sequence: Synthetic oligonucleotide
ccugagaaagcaacgaauc

SEQ ID NO: 1555224 - RNA, 19 nt, Artificial Sequence
  Description of Artificial Sequence: Synthetic oligonucleotide
ucucccucuauugacuccu

SEQ ID NO: 1555225 - RNA, 19 nt, Artificial Sequence
  Description of Artificial Sequence: Synthetic oligonucleotide
gaagacccggggaauuggg

SEQ ID NO: 1555226 - RNA, 19 nt, Artificial Sequence
  Description of Artificial Sequence: Synthetic oligonucleotide
ugacuguccuucuccugag

SEQ ID NO: 1555227 - RNA, 19 nt, Artificial Sequence
  Description of Artificial Sequence: Synthetic oligonucleotide
ccagguuacgcgcacaagc

SEQ ID NO: 1555228 - RNA, 19 nt, Artificial Sequence
  Description of Artificial Sequence: Synthetic oligonucleotide
ugcaaacggaucuuuuauu

SEQ ID NO: 1555229 - RNA, 19 nt, Artificial Sequence
  Description of Artificial Sequence: Synthetic oligonucleotide
ucauuaggcccugcuagca

SEQ ID NO: 1555230 - RNA, 19 nt, Artificial Sequence
  Description of Artificial Sequence: Synthetic oligonucleotide
aguuaggaaucccucuuuu

SEQ ID NO: 1555231 - RNA, 19 nt, Artificial Sequence
  Description of Artificial Sequence: Synthetic oligonucleotide
cagucagccaacaguuuug

SEQ ID NO: 1555232 - RNA, 19 nt, Artificial Sequence
  Description of Artificial Sequence: Synthetic oligonucleotide
cucuuccccagguuacgcg

SEQ ID NO: 1555233 - RNA, 19 nt, Artificial Sequence
  Description of Artificial Sequence: Synthetic oligonucleotide
gacuuagggcuuucuuccc

SEQ ID NO: 1555234 - RNA, 19 nt, Artificial Sequence
  Description of Artificial Sequence: Synthetic oligonucleotide
ggaucuuuuauuuuccagu

SEQ ID NO: 1555235 - RNA, 19 nt, Artificial Sequence
  Description of Artificial Sequence: Synthetic oligonucleotide
caucacccgcaguucauag

SEQ ID NO: 1555236 - RNA, 19 nt, Artificial Sequence
  Description of Artificial Sequence: Synthetic oligonucleotide
cugaguugaucgagggcag

SEQ ID NO: 1555237 - RNA, 19 nt, Artificial Sequence
  Description of Artificial Sequence: Synthetic oligonucleotide
guugcaaacggaucuuuua

SEQ ID NO: 1555238 - RNA, 19 nt, Artificial Sequence
  Description of Artificial Sequence: Synthetic oligonucleotide
gaagguugacgcucuccac

SEQ ID NO: 1555239 - RNA, 19 nt, Artificial Sequence
  Description of Artificial Sequence: Synthetic oligonucleotide
cugaggacaauaaaacagu

SEQ ID NO: 1555240 - RNA, 19 nt, Artificial Sequence
  Description of Artificial Sequence: Synthetic oligonucleotide
ucacgaggcuucagcuccg

SEQ ID NO: 1555241 - RNA, 19 nt, Artificial Sequence
  Description of Artificial Sequence: Synthetic oligonucleotide
augacugacaguacuuggu

SEQ ID NO: 1555242 - RNA, 19 nt, Artificial Sequence
  Description of Artificial Sequence: Synthetic oligonucleotide
ggcaugcuuaauauucacg

SEQ ID NO: 1555243 - RNA, 19 nt, Artificial Sequence
  Description of Artificial Sequence: Synthetic oligonucleotide
gaggacaauaaaacaguaa

SEQ ID NO: 1555244 - RNA, 19 nt, Artificial Sequence
  Description of Artificial Sequence: Synthetic oligonucleotide
agugacuguccuucuccug

SEQ ID NO: 1555245 - RNA, 19 nt, Artificial Sequence
  Description of Artificial Sequence: Synthetic oligonucleotide
gguuacgcgcacaagcucc

SEQ ID NO: 1555246 - RNA, 19 nt, Artificial Sequence
  Description of Artificial Sequence: Synthetic oligonucleotide
auuaggcccugcuagcaua

SEQ ID NO: 1555247 - RNA, 19 nt, Artificial Sequence
  Description of Artificial Sequence: Synthetic oligonucleotide
uuagaguagguagccacuu

SEQ ID NO: 1555248 - RNA, 19 nt, Artificial Sequence
  Description of Artificial Sequence: Synthetic oligonucleotide
ucuccaguauagccacugu

SEQ ID NO: 1555249 - RNA, 19 nt, Artificial Sequence
  Description of Artificial Sequence: Synthetic oligonucleotide
gugaaccucaguggcagag

SEQ ID NO: 1555250 - RNA, 19 nt, Artificial Sequence
  Description of Artificial Sequence: Synthetic oligonucleotide
accucaguggcagaguuau

SEQ ID NO: 1555251 - RNA, 19 nt, Artificial Sequence
  Description of Artificial Sequence: Synthetic oligonucleotide
gugucauucggucugaguu

SEQ ID NO: 1555252 - RNA, 19 nt, Artificial Sequence
  Description of Artificial Sequence: Synthetic oligonucleotide
acggaucuuuuauuuucca

SEQ ID NO: 1555253 - RNA, 19 nt, Artificial Sequence
  Description of Artificial Sequence: Synthetic oligonucleotide
uccguccuaguacuugaaa

SEQ ID NO: 1555254 - RNA, 19 nt, Artificial Sequence
  Description of Artificial Sequence: Synthetic oligonucleotide
auguucagccggcugaguu

SEQ ID NO: 1555255 - RNA, 19 nt, Artificial Sequence
  Description of Artificial Sequence: Synthetic oligonucleotide
guccuaguacuugaaaauc

SEQ ID NO: 1555256 - RNA, 19 nt, Artificial Sequence
  Description of Artificial Sequence: Synthetic oligonucleotide
gugacgccgcuucucuucg

SEQ ID NO: 1555257 - RNA, 19 nt, Artificial Sequence
  Description of Artificial Sequence: Synthetic oligonucleotide
auacugcguagagaagcgg

SEQ ID NO: 1555258 - RNA, 19 nt, Artificial Sequence
  Description of Artificial Sequence: Synthetic oligonucleotide
aaauggggugugggugaac

SEQ ID NO: 1555259 - RNA, 19 nt, Artificial Sequence
  Description of Artificial Sequence: Synthetic oligonucleotide
caaugggcgugaauuucug

SEQ ID NO: 1555260 - RNA, 19 nt, Artificial Sequence
  Description of Artificial Sequence: Synthetic oligonucleotide
uauguugcaaacggaucuu

SEQ ID NO: 1555261 - RNA, 19 nt, Artificial Sequence
  Description of Artificial Sequence: Synthetic oligonucleotide
gguaacagaugccuucauc

SEQ ID NO: 1555262 - RNA, 19 nt, Artificial Sequence
  Description of Artificial Sequence: Synthetic oligonucleotide
aagcagcgauacugcguag

SEQ ID NO: 1555263 - RNA, 19 nt, Artificial Sequence
  Description of Artificial Sequence: Synthetic oligonucleotide
uggaagacccggggaauug

SEQ ID NO: 1555264 - RNA, 19 nt, Artificial Sequence
  Description of Artificial Sequence: Synthetic oligonucleotide
ccuuagguaacuaaacaaa

SEQ ID NO: 1555265 - RNA, 19 nt, Artificial Sequence
  Description of Artificial Sequence: Synthetic oligonucleotide
gacgccgcuucucuucgug

SEQ ID NO: 1555266 - RNA, 19 nt, Artificial Sequence
  Description of Artificial Sequence: Synthetic oligonucleotide
uguagcccaagggagcauc

SEQ ID NO: 1555267 - RNA, 19 nt, Artificial Sequence
  Description of Artificial Sequence: Synthetic oligonucleotide
aucucuuccccagguuacg

SEQ ID NO: 1555268 - RNA, 19 nt, Artificial Sequence
  Description of Artificial Sequence: Synthetic oligonucleotide
uaccaagcuuaaauucgua

SEQ ID NO: 1555269 - RNA, 19 nt, Artificial Sequence
  Description of Artificial Sequence: Synthetic oligonucleotide
gacacggagaagcagcgau

SEQ ID NO: 1555270 - RNA, 19 nt, Artificial Sequence
  Description of Artificial Sequence: Synthetic oligonucleotide
aaguccgggcucugaggcu

SEQ ID NO: 1555271 - RNA, 19 nt, Artificial Sequence
  Description of Artificial Sequence: Synthetic oligonucleotide
ugaucuuaccaagcuuaaa

SEQ ID NO: 1555272 - RNA, 19 nt, Artificial Sequence
  Description of Artificial Sequence: Synthetic oligonucleotide
cucaaggaacaauuuuaaa

SEQ ID NO: 1555273 - RNA, 19 nt, Artificial Sequence
  Description of Artificial Sequence: Synthetic oligonucleotide
caaccccuuucuucuuucc

SEQ ID NO: 1555274 - RNA, 19 nt, Artificial Sequence
  Description of Artificial Sequence: Synthetic oligonucleotide
gagggcggcauaauuaucu

SEQ ID NO: 1555275 - RNA, 19 nt, Artificial Sequence
  Description of Artificial Sequence: Synthetic oligonucleotide
gggcgugaauuucugauga

SEQ ID NO: 1555276 - RNA, 19 nt, Artificial Sequence
  Description of Artificial Sequence: Synthetic oligonucleotide
aagggagcaucaaaaucua

SEQ ID NO: 1555277 - RNA, 19 nt, Artificial Sequence
  Description of Artificial Sequence: Synthetic oligonucleotide
uuagggcuuucuucccuuc

SEQ ID NO: 1555278 - RNA, 19 nt, Artificial Sequence
  Description of Artificial Sequence: Synthetic oligonucleotide
gcagcgauacugcguagag

SEQ ID NO: 1555279 - RNA, 19 nt, Artificial Sequence
  Description of Artificial Sequence: Synthetic oligonucleotide
uucuuuccauccagucuau

SEQ ID NO: 1555280 - RNA, 19 nt, Artificial Sequence
  Description of Artificial Sequence: Synthetic oligonucleotide
gaguuauguggcaugcuua

SEQ ID NO: 1555281 - RNA, 19 nt, Artificial Sequence
  Description of Artificial Sequence: Synthetic oligonucleotide
gcuagcauagacacggaga

SEQ ID NO: 1555282 - RNA, 19 nt, Artificial Sequence
  Description of Artificial Sequence: Synthetic oligonucleotide
aguccgggcucugaggcug

SEQ ID NO: 1555283 - RNA, 19 nt, Artificial Sequence
  Description of Artificial Sequence: Synthetic oligonucleotide
acgcgcacaagcuccaguu

SEQ ID NO: 1555284 - RNA, 19 nt, Artificial Sequence
  Description of Artificial Sequence: Synthetic oligonucleotide
gugaaccuuacaauagaaa

SEQ ID NO: 1555285 - RNA, 19 nt, Artificial Sequence
  Description of Artificial Sequence: Synthetic oligonucleotide
caguauguugcaaacggau

SEQ ID NO: 1555286 - RNA, 19 nt, Artificial Sequence
  Description of Artificial Sequence: Synthetic oligonucleotide
aauguucagccggcugagu

SEQ ID NO: 1555287 - RNA, 19 nt, Artificial Sequence
  Description of Artificial Sequence: Synthetic oligonucleotide
ccucuauugacuccucaug

SEQ ID NO: 1555288 - RNA, 19 nt, Artificial Sequence
  Description of Artificial Sequence: Synthetic oligonucleotide
acuugaagguugacgcucu

SEQ ID NO: 1555289 - RNA, 19 nt, Artificial Sequence
  Description of Artificial Sequence: Synthetic oligonucleotide
cuuagaguagguagccacu

SEQ ID NO: 1555290 - RNA, 19 nt, Artificial Sequence
  Description of Artificial Sequence: Synthetic oligonucleotide
agcccaagggagcaucaaa

SEQ ID NO: 1555291 - RNA, 19 nt, Artificial Sequence
  Description of Artificial Sequence: Synthetic oligonucleotide
gcccugcuagcauagacac

SEQ ID NO: 1555292 - RNA, 19 nt, Artificial Sequence
  Description of Artificial Sequence: Synthetic oligonucleotide
ucuggaagacccggggaau

SEQ ID NO: 1555293 - RNA, 19 nt, Artificial Sequence
  Description of Artificial Sequence: Synthetic oligonucleotide
gggaauuggguggucaaac

SEQ ID NO: 1555294 - RNA, 19 nt, Artificial Sequence
  Description of Artificial Sequence: Synthetic oligonucleotide
caucauacaaagcgcagau

SEQ ID NO: 1555295 - RNA, 19 nt, Artificial Sequence
  Description of Artificial Sequence: Synthetic oligonucleotide
aagacccggggaauugggu

SEQ ID NO: 1555296 - RNA, 19 nt, Artificial Sequence
  Description of Artificial Sequence: Synthetic oligonucleotide
ugaguugaucgagggcaga

SEQ ID NO: 1555297 - RNA, 19 nt, Artificial Sequence
  Description of Artificial Sequence: Synthetic oligonucleotide
uugcaccuacaacaagcuu

SEQ ID NO: 1555298 - RNA, 19 nt, Artificial Sequence
  Description of Artificial Sequence: Synthetic oligonucleotide
agcagcgauacugcguaga

SEQ ID NO: 1555299 - RNA, 19 nt, Artificial Sequence
  Description of Artificial Sequence: Synthetic oligonucleotide
cagguuuggucuccaucac

SEQ ID NO: 1555300 - RNA, 19 nt, Artificial Sequence
  Description of Artificial Sequence: Synthetic oligonucleotide
cugagaaagcaacgaaucu

SEQ ID NO: 1555301 - RNA, 19 nt, Artificial Sequence
  Description of Artificial Sequence: Synthetic oligonucleotide
ugacgcucuccaccugaac

SEQ ID NO: 1555302 - RNA, 19 nt, Artificial Sequence
  Description of Artificial Sequence: Synthetic oligonucleotide
cgaggcuucagcuccgucc

SEQ ID NO: 1555303 - RNA, 19 nt, Artificial Sequence
  Description of Artificial Sequence: Synthetic oligonucleotide
cagucuauucccagaaccu

SEQ ID NO: 1555304 - RNA, 19 nt, Artificial Sequence
  Description of Artificial Sequence: Synthetic oligonucleotide
gcagaguuauguggcaugc

SEQ ID NO: 1555305 - RNA, 19 nt, Artificial Sequence
  Description of Artificial Sequence: Synthetic oligonucleotide
cagaucugaggacaauaaa

SEQ ID NO: 1555306 - RNA, 19 nt, Artificial Sequence
  Description of Artificial Sequence: Synthetic oligonucleotide
ggaagacccggggaauugg

SEQ ID NO: 1555307 - RNA, 19 nt, Artificial Sequence
  Description of Artificial Sequence: Synthetic oligonucleotide
guucagccggcugaguuga

SEQ ID NO: 1555308 - RNA, 19 nt, Artificial Sequence
  Description of Artificial Sequence: Synthetic oligonucleotide
ggugacgccgcuucucuuc

SEQ ID NO: 1555309 - RNA, 19 nt, Artificial Sequence
  Description of Artificial Sequence: Synthetic oligonucleotide
cuuggugacgccgcuucuc

SEQ ID NO: 1555310 - RNA, 19 nt, Artificial Sequence
  Description of Artificial Sequence: Synthetic oligonucleotide
gaguagguagccacuugaa

SEQ ID NO: 1555311 - RNA, 19 nt, Artificial Sequence
  Description of Artificial Sequence: Synthetic oligonucleotide
agcgguucuggaagacccg

SEQ ID NO: 1555312 - RNA, 19 nt, Artificial Sequence
  Description of Artificial Sequence: Synthetic oligonucleotide
acuuggugacgccgcuucu

SEQ ID NO: 1555313 - RNA, 19 nt, Artificial Sequence
  Description of Artificial Sequence: Synthetic oligonucleotide
cugcguagagaagcgguuc

SEQ ID NO: 1555314 - RNA, 19 nt, Artificial Sequence
  Description of Artificial Sequence: Synthetic oligonucleotide
auaagccaguauguugcaa

SEQ ID NO: 1555315 - RNA, 19 nt, Artificial Sequence
  Description of Artificial Sequence: Synthetic oligonucleotide
gcuugauaguccuuaggua

SEQ ID NO: 1555316 - RNA, 19 nt, Artificial Sequence
  Description of Artificial Sequence: Synthetic oligonucleotide
acgaggcuucagcuccguc

SEQ ID NO: 1555317 - RNA, 19 nt, Artificial Sequence
  Description of Artificial Sequence: Synthetic oligonucleotide
guggcagaguuauguggca

SEQ ID NO: 1555318 - RNA, 19 nt, Artificial Sequence
  Description of Artificial Sequence: Synthetic oligonucleotide
cagguuacgcgcacaagcu

SEQ ID NO: 1555319 - RNA, 19 nt, Artificial Sequence
  Description of Artificial Sequence: Synthetic oligonucleotide
ccauccagucuauucccag

SEQ ID NO: 1555320 - RNA, 19 nt, Artificial Sequence
  Description of Artificial Sequence: Synthetic oligonucleotide
gaaccucaguggcagaguu

SEQ ID NO: 1555321 - RNA, 19 nt, Artificial Sequence
  Description of Artificial Sequence: Synthetic oligonucleotide
cuugaagguugacgcucuc

SEQ ID NO: 1555322 - RNA, 19 nt, Artificial Sequence
  Description of Artificial Sequence: Synthetic oligonucleotide
gcaaacggaucuuuuauuu

SEQ ID NO: 1555323 - RNA, 19 nt, Artificial Sequence
  Description of Artificial Sequence: Synthetic oligonucleotide
agggcggcauaauuaucuu

SEQ ID NO: 1555324 - RNA, 19 nt, Artificial Sequence
  Description of Artificial Sequence: Synthetic oligonucleotide
gcggcauaauuaucuuccc

SEQ ID NO: 1555325 - RNA, 19 nt, Artificial Sequence
  Description of Artificial Sequence: Synthetic oligonucleotide
uuacgcgcacaagcuccag

SEQ ID NO: 1555326 - RNA, 19 nt, Artificial Sequence
  Description of Artificial Sequence: Synthetic oligonucleotide
ucagccggcugaguugauc

SEQ ID NO: 1555327 - RNA, 19 nt, Artificial Sequence
  Description of Artificial Sequence: Synthetic oligonucleotide
gcccacuucuccaguauag

SEQ ID NO: 1555328 - RNA, 19 nt, Artificial Sequence
  Description of Artificial Sequence: Synthetic oligonucleotide
gcaccuacaacaagcuuga

SEQ ID NO: 1555329 - RNA, 19 nt, Artificial Sequence
  Description of Artificial Sequence: Synthetic oligonucleotide
cugucauuaggcccugcua

SEQ ID NO: 1555330 - RNA, 19 nt, Artificial Sequence
  Description of Artificial Sequence: Synthetic oligonucleotide
auguugcaaacggaucuuu

SEQ ID NO: 1555331 - RNA, 19 nt, Artificial Sequence
  Description of Artificial Sequence: Synthetic oligonucleotide
gugaucuuaccaagcuuaa

SEQ ID NO: 1555332 - RNA, 19 nt, Artificial Sequence
  Description of Artificial Sequence: Synthetic oligonucleotide
caaacggaucuuuuauuuu

SEQ ID NO: 1555333 - RNA, 19 nt, Artificial Sequence
  Description of Artificial Sequence: Synthetic oligonucleotide
acgccgcuucucuucguga

SEQ ID NO: 1555334 - RNA, 19 nt, Artificial Sequence
  Description of Artificial Sequence: Synthetic oligonucleotide
accuuacaauagaaaccca

SEQ ID NO: 1555335 - RNA, 19 nt, Artificial Sequence
  Description of Artificial Sequence: Synthetic oligonucleotide
guuacgcgcacaagcucca

SEQ ID NO: 1555336 - RNA, 19 nt, Artificial Sequence
  Description of Artificial Sequence: Synthetic oligonucleotide
agguaauguucagccggcu

SEQ ID NO: 1555337 - RNA, 19 nt, Artificial Sequence
  Description of Artificial Sequence: Synthetic oligonucleotide
ccguccuaguacuugaaaa

SEQ ID NO: 1555338 - RNA, 19 nt, Artificial Sequence
  Description of Artificial Sequence: Synthetic oligonucleotide
gagcauucucugaacuugu

SEQ ID NO: 1555339 - RNA, 19 nt, Artificial Sequence
  Description of Artificial Sequence: Synthetic oligonucleotide
ggcacggaagcccacuucu

SEQ ID NO: 1555340 - RNA, 19 nt, Artificial Sequence
  Description of Artificial Sequence: Synthetic oligonucleotide
aggcuggaacuuagaguag

SEQ ID NO: 1555341 - RNA, 19 nt, Artificial Sequence
  Description of Artificial Sequence: Synthetic oligonucleotide
agccggcugaguugaucga

SEQ ID NO: 1555342 - RNA, 19 nt, Artificial Sequence
  Description of Artificial Sequence: Synthetic oligonucleotide
gaguucuuauuggucaauu

SEQ ID NO: 1555343 - RNA, 19 nt, Artificial Sequence
  Description of Artificial Sequence: Synthetic oligonucleotide
gcuccguccuaguacuuga

SEQ ID NO: 1555344 - RNA, 19 nt, Artificial Sequence
  Description of Artificial Sequence: Synthetic oligonucleotide
guagcccaagggagcauca

SEQ ID NO: 1555345 - RNA, 19 nt, Artificial Sequence
  Description of Artificial Sequence: Synthetic oligonucleotide
cauucggucugaguucuua

SEQ ID NO: 1555346 - RNA, 19 nt, Artificial Sequence
  Description of Artificial Sequence: Synthetic oligonucleotide
uagcccaagggagcaucaa

SEQ ID NO: 1555347 - RNA, 19 nt, Artificial Sequence
  Description of Artificial Sequence: Synthetic oligonucleotide
cuggaacuuagaguaggua

SEQ ID NO: 1555348 - RNA, 19 nt, Artificial Sequence
  Description of Artificial Sequence: Synthetic oligonucleotide
uuccgcagugacuguccuu

SEQ ID NO: 1555349 - RNA, 19 nt, Artificial Sequence
  Description of Artificial Sequence: Synthetic oligonucleotide
gcgugaauuucugaugaaa

SEQ ID NO: 1555350 - RNA, 19 nt, Artificial Sequence
  Description of Artificial Sequence: Synthetic oligonucleotide
cuacaacaagcuugauagu

SEQ ID NO: 1555351 - RNA, 19 nt, Artificial Sequence
  Description of Artificial Sequence: Synthetic oligonucleotide
cugggcucaaccccuuucu

SEQ ID NO: 1555352 - RNA, 19 nt, Artificial Sequence
  Description of Artificial Sequence: Synthetic oligonucleotide
ucauucggucugaguucuu

SEQ ID NO: 1555353 - RNA, 19 nt, Artificial Sequence
  Description of Artificial Sequence: Synthetic oligonucleotide
cuucagcuccguccuagua

SEQ ID NO: 1555354 - RNA, 19 nt, Artificial Sequence
  Description of Artificial Sequence: Synthetic oligonucleotide
gccggcugaguugaucgag

SEQ ID NO: 1555355 - RNA, 19 nt, Artificial Sequence
  Description of Artificial Sequence: Synthetic oligonucleotide
agcgcagaucugaggacaa

SEQ ID NO: 1555356 - RNA, 19 nt, Artificial Sequence
  Description of Artificial Sequence: Synthetic oligonucleotide
gcccaagggagcaucaaaa

SEQ ID NO: 1555357 - RNA, 19 nt, Artificial Sequence
  Description of Artificial Sequence: Synthetic oligonucleotide
cuuagggcuuucuucccuu

SEQ ID NO: 1555358 - RNA, 19 nt, Artificial Sequence
  Description of Artificial Sequence: Synthetic oligonucleotide
gcuuaauauucacgaggcu

SEQ ID NO: 1555359 - RNA, 19 nt, Artificial Sequence
  Description of Artificial Sequence: Synthetic oligonucleotide
ggucagacaggcaaaguuu

SEQ ID NO: 1555360 - RNA, 19 nt, Artificial Sequence
  Description of Artificial Sequence: Synthetic oligonucleotide
gguugacgcucuccaccug

SEQ ID NO: 1555361 - RNA, 19 nt, Artificial Sequence
  Description of Artificial Sequence: Synthetic oligonucleotide
cgugaaccuuacaauagaa

SEQ ID NO: 1555362 - RNA, 19 nt, Artificial Sequence
  Description of Artificial Sequence: Synthetic oligonucleotide
uagccacuugaagguugac

SEQ ID NO: 1555363 - RNA, 19 nt, Artificial Sequence
  Description of Artificial Sequence: Synthetic oligonucleotide
agguagccacuugaagguu

SEQ ID NO: 1555364 - RNA, 19 nt, Artificial Sequence
  Description of Artificial Sequence: Synthetic oligonucleotide
cugcuagcauagacacgga

SEQ ID NO: 1555365 - RNA, 19 nt, Artificial Sequence
  Description of Artificial Sequence: Synthetic oligonucleotide
guacaccacagugugucau

SEQ ID NO: 1555366 - RNA, 19 nt, Artificial Sequence
  Description of Artificial Sequence: Synthetic oligonucleotide
gcgauacugcguagagaag

SEQ ID NO: 1555367 - RNA, 19 nt, Artificial Sequence
  Description of Artificial Sequence: Synthetic oligonucleotide
cuccguccuaguacuugaa

SEQ ID NO: 1555368 - RNA, 19 nt, Artificial Sequence
  Description of Artificial Sequence: Synthetic oligonucleotide
ccaguauagccacuguggu

SEQ ID NO: 1555369 - RNA, 19 nt, Artificial Sequence
  Description of Artificial Sequence: Synthetic oligonucleotide
ggcgugaauuucugaugaa

SEQ ID NO: 1555370 - RNA, 19 nt, Artificial Sequence
  Description of Artificial Sequence: Synthetic oligonucleotide
gcguagagaagcgguucug

SEQ ID NO: 1555371 - RNA, 19 nt, Artificial Sequence
  Description of Artificial Sequence: Synthetic oligonucleotide
uucagccggcugaguugau

SEQ ID NO: 1555372 - RNA, 19 nt, Artificial Sequence
  Description of Artificial Sequence: Synthetic oligonucleotide
caucuccaguggucagaca

SEQ ID NO: 1555373 - RNA, 19 nt, Artificial Sequence
  Description of Artificial Sequence: Synthetic oligonucleotide
ggugaaccucaguggcaga

SEQ ID NO: 1555374 - RNA, 19 nt, Artificial Sequence
  Description of Artificial Sequence: Synthetic oligonucleotide
guuauguggcaugcuuaau

SEQ ID NO: 1555375 - RNA, 19 nt, Artificial Sequence
  Description of Artificial Sequence: Synthetic oligonucleotide
cguaguuaggaaucccucu

SEQ ID NO: 1555376 - RNA, 19 nt, Artificial Sequence
  Description of Artificial Sequence: Synthetic oligonucleotide
cuuccgcagugacuguccu

SEQ ID NO: 1555377 - RNA, 19 nt, Artificial Sequence
  Description of Artificial Sequence: Synthetic oligonucleotide
cguccuaguacuugaaaau

SEQ ID NO: 1555378 - RNA, 19 nt, Artificial Sequence
  Description of Artificial Sequence: Synthetic oligonucleotide
ggggaauuggguggucaaa

SEQ ID NO: 1555379 - RNA, 19 nt, Artificial Sequence
  Description of Artificial Sequence: Synthetic oligonucleotide
caguaaccauaagccagua

SEQ ID NO: 1555380 - RNA, 19 nt, Artificial Sequence
  Description of Artificial Sequence: Synthetic oligonucleotide
guggucagacaggcaaagu

SEQ ID NO: 1555381 - RNA, 19 nt, Artificial Sequence
  Description of Artificial Sequence: Synthetic oligonucleotide
auacugcuuuaggguuggu

SEQ ID NO: 1555382 - RNA, 19 nt, Artificial Sequence
  Description of Artificial Sequence: Synthetic oligonucleotide
gcuggaacuuagaguaggu

SEQ ID NO: 1555383 - RNA, 19 nt, Artificial Sequence
  Description of Artificial Sequence: Synthetic oligonucleotide
cagaguuauguggcaugcu

SEQ ID NO: 1555384 - RNA, 19 nt, Artificial Sequence
  Description of Artificial Sequence: Synthetic oligonucleotide
ccugucauuaggcccugcu

SEQ ID NO: 1555385 - RNA, 19 nt, Artificial Sequence
  Description of Artificial Sequence: Synthetic oligonucleotide
cccagguuacgcgcacaag

SEQ ID NO: 1555386 - RNA, 19 nt, Artificial Sequence
  Description of Artificial Sequence: Synthetic oligonucleotide
cccucuauugacuccucau

SEQ ID NO: 1555387 - RNA, 19 nt, Artificial Sequence
  Description of Artificial Sequence: Synthetic oligonucleotide
cccaagggagcaucaaaau

SEQ ID NO: 1555388 - RNA, 19 nt, Artificial Sequence
  Description of Artificial Sequence: Synthetic oligonucleotide
gcacggaagcccacuucuc

SEQ ID NO: 1555389 - RNA, 19 nt, Artificial Sequence
  Description of Artificial Sequence: Synthetic oligonucleotide
ccacagugugucauucggu

SEQ ID NO: 1555390 - RNA, 19 nt, Artificial Sequence
  Description of Artificial Sequence: Synthetic oligonucleotide
cuggaagacccggggaauu

SEQ ID NO: 1555391 - RNA, 19 nt, Artificial Sequence
  Description of Artificial Sequence: Synthetic oligonucleotide
cgcgcacaagcuccaguuc

SEQ ID NO: 1555392 - RNA, 19 nt, Artificial Sequence
  Description of Artificial Sequence: Synthetic oligonucleotide
guacuuggugacgccgcuu

SEQ ID NO: 1555393 - RNA, 19 nt, Artificial Sequence
  Description of Artificial Sequence: Synthetic oligonucleotide
ccccagguuacgcgcacaa

SEQ ID NO: 1555394 - RNA, 19 nt, Artificial Sequence
  Description of Artificial Sequence: Synthetic oligonucleotide
cggcauaauuaucuucccu

SEQ ID NO: 1555395 - RNA, 19 nt, Artificial Sequence
  Description of Artificial Sequence: Synthetic oligonucleotide
ccaucacccgcaguucaua

SEQ ID NO: 1555396 - RNA, 19 nt, Artificial Sequence
  Description of Artificial Sequence: Synthetic oligonucleotide
cacgaggcuucagcuccgu

SEQ ID NO: 1555397 - RNA, 19 nt, Artificial Sequence
  Description of Artificial Sequence: Synthetic oligonucleotide
cagcuccguccuaguacuu

SEQ ID NO: 1555398 - RNA, 19 nt, Artificial Sequence
  Description of Artificial Sequence: Synthetic oligonucleotide
caccuacaacaagcuugau

SEQ ID NO: 1555399 - RNA, 19 nt, Artificial Sequence
  Description of Artificial Sequence: Synthetic oligonucleotide
ggacugggcucaaccccuu

SEQ ID NO: 1555400 - RNA, 19 nt, Artificial Sequence
  Description of Artificial Sequence: Synthetic oligonucleotide
aauaaaauugaccagcuuc

SEQ ID NO: 1555401 - RNA, 19 nt, Artificial Sequence
  Description of Artificial Sequence: Synthetic oligonucleotide
  modified_base (18)..(18): a, c, u, g, unknown or other
aaagacaaggcacagaung

SEQ ID NO: 1555402 - RNA, 19 nt, Artificial Sequence
  Description of Artificial Sequence: Synthetic oligonucleotide
agcuaugacaaucuuaugc

SEQ ID NO: 1555403 - RNA, 19 nt, Artificial Sequence
  Description of Artificial Sequence: Synthetic oligonucleotide
uuugcugacaaucaaaucu

SEQ ID NO: 1555404 - RNA, 19 nt, Artificial Sequence
  Description of Artificial Sequence: Synthetic oligonucleotide
aaguuugucuuguucagcc

SEQ ID NO: 1555405 - RNA, 19 nt, Artificial Sequence
  Description of Artificial Sequence: Synthetic oligonucleotide
uagaaauuuaaccugagcu

SEQ ID NO: 1555406 - RNA, 19 nt, Artificial Sequence
  Description of Artificial Sequence: Synthetic oligonucleotide
uaauugaugacauaaaauc

SEQ ID NO: 1555407 - RNA, 19 nt, Artificial Sequence
  Description of Artificial Sequence: Synthetic oligonucleotide
uuaagaacaagcaugauuu

SEQ ID NO: 1555408 - RNA, 19 nt, Artificial Sequence
  Description of Artificial Sequence: Synthetic oligonucleotide
aacagaacggaucuguuuc

SEQ ID NO: 1555409 - RNA, 19 nt, Artificial Sequence
  Description of Artificial Sequence: Synthetic oligonucleotide
ucugacuuuauucugagga

SEQ ID NO: 1555410 - RNA, 19 nt, Artificial Sequence
  Description of Artificial Sequence: Synthetic oligonucleotide
aaucuuaugcucaauaauc

SEQ ID NO: 1555411 - RNA, 19 nt, Artificial Sequence
  Description of Artificial Sequence: Synthetic oligonucleotide
gagagugucauucucauag

SEQ ID NO: 1555412 - RNA, 19 nt, Artificial Sequence
  Description of Artificial Sequence: Synthetic oligonucleotide
aauugaugacauaaaaucg

SEQ ID NO: 1555413 - RNA, 19 nt, Artificial Sequence
  Description of Artificial Sequence: Synthetic oligonucleotide
cauaaaaucggucauaguc

SEQ ID NO: 1555414 - RNA, 19 nt, Artificial Sequence
  Description of Artificial Sequence: Synthetic oligonucleotide
agaaauuuaaccugagcuc

SEQ ID NO: 1555415 - RNA, 19 nt, Artificial Sequence
  Description of Artificial Sequence: Synthetic oligonucleotide
ugacaaucaaaucugagcu

SEQ ID NO: 1555416 - RNA, 19 nt, Artificial Sequence
  Description of Artificial Sequence: Synthetic oligonucleotide
uauaaaauguaccuuugga

SEQ ID NO: 1555417 - RNA, 19 nt, Artificial Sequence
  Description of Artificial Sequence: Synthetic oligonucleotide
uguccuguucuucaaaugg

SEQ ID NO: 1555418 - RNA, 19 nt, Artificial Sequence
  Description of Artificial Sequence: Synthetic oligonucleotide
uguucagugaaccuuuucc

SEQ ID NO: 1555419 - RNA, 19 nt, Artificial Sequence
  Description of Artificial Sequence: Synthetic oligonucleotide
uuaugcucaauaaucaugu

SEQ ID NO: 1555420 - RNA, 19 nt, Artificial Sequence
  Description of Artificial Sequence: Synthetic oligonucleotide
augcucaauaaucaugugc

SEQ ID NO: 1555421 - RNA, 19 nt, Artificial Sequence
  Description of Artificial Sequence: Synthetic oligonucleotide
gaugacauaaaaucgguca

SEQ ID NO: 1555422 - RNA, 19 nt, Artificial Sequence
  Description of Artificial Sequence: Synthetic oligonucleotide
aaaaguuugucuuguucag

SEQ ID NO: 1555423 - RNA, 19 nt, Artificial Sequence
  Description of Artificial Sequence: Synthetic oligonucleotide
uucagugcaguuuacaaug

SEQ ID NO: 1555424 - RNA, 19 nt, Artificial Sequence
  Description of Artificial Sequence: Synthetic oligonucleotide
ugcugauagaaauuuaacc

SEQ ID NO: 1555425 - RNA, 19 nt, Artificial Sequence
  Description of Artificial Sequence: Synthetic oligonucleotide
uuuggauguaucuucacug

SEQ ID NO: 1555426 - RNA, 19 nt, Artificial Sequence
  Description of Artificial Sequence: Synthetic oligonucleotide
auagaaauuuaaccugagc

SEQ ID NO: 1555427 - RNA, 19 nt, Artificial Sequence
  Description of Artificial Sequence: Synthetic oligonucleotide
uucacaucagcuaugacaa

SEQ ID NO: 1555428 - RNA, 19 nt, Artificial Sequence
  Description of Artificial Sequence: Synthetic oligonucleotide
uuuuccuccaauauaaaau

SEQ ID NO: 1555429 - RNA, 19 nt, Artificial Sequence
  Description of Artificial Sequence: Synthetic oligonucleotide
uugucuccgaauaaaauug

SEQ ID NO: 1555430 - RNA, 19 nt, Artificial Sequence
  Description of Artificial Sequence: Synthetic oligonucleotide
auugauucuuaucacacug

SEQ ID NO: 1555431 - RNA, 19 nt, Artificial Sequence
  Description of Artificial Sequence: Synthetic oligonucleotide
ucagcuaugacaaucuuau

SEQ ID NO: 1555432 - RNA, 19 nt, Artificial Sequence
  Description of Artificial Sequence: Synthetic oligonucleotide
ugugcauaggaauucagug

SEQ ID NO: 1555433 - RNA, 19 nt, Artificial Sequence
  Description of Artificial Sequence: Synthetic oligonucleotide
gugucauucucauaggugg

SEQ ID NO: 1555434 - RNA, 19 nt, Artificial Sequence
  Description of Artificial Sequence: Synthetic oligonucleotide
uccuauuugucucauggag

SEQ ID NO: 1555435 - RNA, 19 nt, Artificial Sequence
  Description of Artificial Sequence: Synthetic oligonucleotide
gaaagcucguaucauuucg

SEQ ID NO: 1555436 - RNA, 19 nt, Artificial Sequence
  Description of Artificial Sequence: Synthetic oligonucleotide
aguuccaaguaauugauga

SEQ ID NO: 1555437 - RNA, 19 nt, Artificial Sequence
  Description of Artificial Sequence: Synthetic oligonucleotide
uguaccuuuggaaaucugc

SEQ ID NO: 1555438 - RNA, 19 nt, Artificial Sequence
  Description of Artificial Sequence: Synthetic oligonucleotide
acagacaggguauucuugc

SEQ ID NO: 1555439 - RNA, 19 nt, Artificial Sequence
  Description of Artificial Sequence: Synthetic oligonucleotide
auugaugacauaaaaucgg

SEQ ID NO: 1555440 - RNA, 19 nt, Artificial Sequence
  Description of Artificial Sequence: Synthetic oligonucleotide
uaugacaaucuuaugcuca

SEQ ID NO: 1555441 - RNA, 19 nt, Artificial Sequence
  Description of Artificial Sequence: Synthetic oligonucleotide
ugauagaaauuuaaccuga

SEQ ID NO: 1555442 - RNA, 19 nt, Artificial Sequence
  Description of Artificial Sequence: Synthetic oligonucleotide
ugcauaggaauucagugca

SEQ ID NO: 1555443 - RNA, 19 nt, Artificial Sequence
  Description of Artificial Sequence: Synthetic oligonucleotide
uaacacaucacauaacaaa

SEQ ID NO: 1555444 - RNA, 19 nt, Artificial Sequence
  Description of Artificial Sequence: Synthetic oligonucleotide
guuucauuuaagaacaagc

SEQ ID NO: 1555445 - RNA, 19 nt, Artificial Sequence
  Description of Artificial Sequence: Synthetic oligonucleotide
aaaauguaccuuuggaaau

SEQ ID NO: 1555446 - RNA, 19 nt, Artificial Sequence
  Description of Artificial Sequence: Synthetic oligonucleotide
cugacaaucaaaucugagc

SEQ ID NO: 1555447 - RNA, 19 nt, Artificial Sequence
  Description of Artificial Sequence: Synthetic oligonucleotide
  modified_base (14)..(14): a, c, u, g, unknown or other
acaaggcacagaunggagg

SEQ ID NO: 1555448 - RNA, 19 nt, Artificial Sequence
  Description of Artificial Sequence: Synthetic oligonucleotide
aacggaucuguuuccacgg

SEQ ID NO: 1555449 - RNA, 19 nt, Artificial Sequence
  Description of Artificial Sequence: Synthetic oligonucleotide
caugugguucaacagaacg

SEQ ID NO: 1555450 - RNA, 19 nt, Artificial Sequence
  Description of Artificial Sequence: Synthetic oligonucleotide
caugugaucuuuaagugug

SEQ ID NO: 1555451 - RNA, 19 nt, Artificial Sequence
  Description of Artificial Sequence: Synthetic oligonucleotide
auacacacaccaugaaagc

SEQ ID NO: 1555452 - RNA, 19 nt, Artificial Sequence
  Description of Artificial Sequence: Synthetic oligonucleotide
gauguaucuucacugauga

SEQ ID NO: 1555453 - RNA, 19 nt, Artificial Sequence
  Description of Artificial Sequence: Synthetic oligonucleotide
aaaguuugucuuguucagc

SEQ ID NO: 1555454 - RNA, 19 nt, Artificial Sequence
  Description of Artificial Sequence: Synthetic oligonucleotide
aaauguaccuuuggaaauc

SEQ ID NO: 1555455 - RNA, 19 nt, Artificial Sequence
  Description of Artificial Sequence: Synthetic oligonucleotide
ucuccuaguuuucuaggcg

SEQ ID NO: 1555456 - RNA, 19 nt, Artificial Sequence
  Description of Artificial Sequence: Synthetic oligonucleotide
cugauagaaauuuaaccug

SEQ ID NO: 1555457 - RNA, 19 nt, Artificial Sequence
  Description of Artificial Sequence: Synthetic oligonucleotide
uucacuugcugauagaaau

SEQ ID NO: 1555458 - RNA, 19 nt, Artificial Sequence
  Description of Artificial Sequence: Synthetic oligonucleotide
uuuacaauguugucuggca

SEQ ID NO: 1555459 - RNA, 19 nt, Artificial Sequence
  Description of Artificial Sequence: Synthetic oligonucleotide
gauucuaucuucugguaac

SEQ ID NO: 1555460 - RNA, 19 nt, Artificial Sequence
  Description of Artificial Sequence: Synthetic oligonucleotide
acugcuucguuucaaagca

SEQ ID NO: 1555461 - RNA, 19 nt, Artificial Sequence
  Description of Artificial Sequence: Synthetic oligonucleotide
auggagaaaaccaugcaac

SEQ ID NO: 1555462 - RNA, 19 nt, Artificial Sequence
  Description of Artificial Sequence: Synthetic oligonucleotide
aauugauucuuaucacacu

SEQ ID NO: 1555463 - RNA, 19 nt, Artificial Sequence
  Description of Artificial Sequence: Synthetic oligonucleotide
aaaauugaccagcuucacu

SEQ ID NO: 1555464 - RNA, 19 nt, Artificial Sequence
  Description of Artificial Sequence: Synthetic oligonucleotide
ucuguaaugugcauaggaa

SEQ ID NO: 1555465 - RNA, 19 nt, Artificial Sequence
  Description of Artificial Sequence: Synthetic oligonucleotide
ugauucuuaucacacugca

SEQ ID NO: 1555466 - RNA, 19 nt, Artificial Sequence
  Description of Artificial Sequence: Synthetic oligonucleotide
ucuguuuccacggaauucc

SEQ ID NO: 1555467 - RNA, 19 nt, Artificial Sequence
  Description of Artificial Sequence: Synthetic oligonucleotide
aaagcucguaucauuucgc

SEQ ID NO: 1555468 - RNA, 19 nt, Artificial Sequence
  Description of Artificial Sequence: Synthetic oligonucleotide
aaccguagcaccugcacug

SEQ ID NO: 1555469 - RNA, 19 nt, Artificial Sequence
  Description of Artificial Sequence: Synthetic oligonucleotide
gaacggaucuguuuccacg

SEQ ID NO: 1555470 - RNA, 19 nt, Artificial Sequence
  Description of Artificial Sequence: Synthetic oligonucleotide
ucagugaaccuuuuccucc

SEQ ID NO: 1555471 - RNA, 19 nt, Artificial Sequence
  Description of Artificial Sequence: Synthetic oligonucleotide
auugaccagcuucacuugc

SEQ ID NO: 1555472 - RNA, 19 nt, Artificial Sequence
  Description of Artificial Sequence: Synthetic oligonucleotide
agcgguaggagccaccugg

SEQ ID NO: 1555473 - RNA, 19 nt, Artificial Sequence
  Description of Artificial Sequence: Synthetic oligonucleotide
uuugucuuguucagccacg

SEQ ID NO: 1555474 - RNA, 19 nt, Artificial Sequence
  Description of Artificial Sequence: Synthetic oligonucleotide
auacaauuuaucuauuguu

SEQ ID NO: 1555475 - RNA, 19 nt, Artificial Sequence
  Description of Artificial Sequence: Synthetic oligonucleotide
auuugaacuucacauggca

SEQ ID NO: 1555476 - RNA, 19 nt, Artificial Sequence
  Description of Artificial Sequence: Synthetic oligonucleotide
acauacaauuuaucuauug

SEQ ID NO: 1555477 - RNA, 19 nt, Artificial Sequence
  Description of Artificial Sequence: Synthetic oligonucleotide
  modified_base (2)..(2): a, c, u, g, unknown or other
unggaggcccuucugaagc

SEQ ID NO: 1555478 - RNA, 19 nt, Artificial Sequence
  Description of Artificial Sequence: Synthetic oligonucleotide
ggcaaaccaauauugaaag

SEQ ID NO: 1555479 - RNA, 19 nt, Artificial Sequence
  Description of Artificial Sequence: Synthetic oligonucleotide
uugaaagcauguucucugg

SEQ ID NO: 1555480 - RNA, 19 nt, Artificial Sequence
  Description of Artificial Sequence: Synthetic oligonucleotide
uucaaagcacacaguuugg

SEQ ID NO: 1555481 - RNA, 19 nt, Artificial Sequence
  Description of Artificial Sequence: Synthetic oligonucleotide
uggcaaaccaauauugaaa

SEQ ID NO: 1555482 - RNA, 19 nt, Artificial Sequence
  Description of Artificial Sequence: Synthetic oligonucleotide
uugauucuuaucacacugc

SEQ ID NO: 1555483 - RNA, 19 nt, Artificial Sequence
  Description of Artificial Sequence: Synthetic oligonucleotide
uccaguuggucccaggucu

SEQ ID NO: 1555484 - RNA, 19 nt, Artificial Sequence
  Description of Artificial Sequence: Synthetic oligonucleotide
auaaaaucggucauagucu

SEQ ID NO: 1555485 - RNA, 19 nt, Artificial Sequence
  Description of Artificial Sequence: Synthetic oligonucleotide
uuuggguugauccuacgau

SEQ ID NO: 1555486 - RNA, 19 nt, Artificial Sequence
  Description of Artificial Sequence: Synthetic oligonucleotide
aaaucggucauagucucug

SEQ ID NO: 1555487 - RNA, 19 nt, Artificial Sequence
  Description of Artificial Sequence: Synthetic oligonucleotide
uccgaauaaaauugaccag

SEQ ID NO: 1555488 - RNA, 19 nt, Artificial Sequence
  Description of Artificial Sequence: Synthetic oligonucleotide
aagaacaagcaugauuucu

SEQ ID NO: 1555489 - RNA, 19 nt, Artificial Sequence
  Description of Artificial Sequence: Synthetic oligonucleotide
gaggagaucaaacucaugu

SEQ ID NO: 1555490 - RNA, 19 nt, Artificial Sequence
  Description of Artificial Sequence: Synthetic oligonucleotide
uuccaauugcaccucuucc

SEQ ID NO: 1555491 - RNA, 19 nt, Artificial Sequence
  Description of Artificial Sequence: Synthetic oligonucleotide
ucuggcaaaccaauauuga

SEQ ID NO: 1555492 - RNA, 19 nt, Artificial Sequence
  Description of Artificial Sequence: Synthetic oligonucleotide
uggguugauccuacgaugc

SEQ ID NO: 1555493 - RNA, 19 nt, Artificial Sequence
  Description of Artificial Sequence: Synthetic oligonucleotide
acagaacggaucuguuucc

SEQ ID NO: 1555494 - RNA, 19 nt, Artificial Sequence
  Description of Artificial Sequence: Synthetic oligonucleotide
auaaaauugaccagcuuca

SEQ ID NO: 1555495 - RNA, 19 nt, Artificial Sequence
  Description of Artificial Sequence: Synthetic oligonucleotide
gacaggguauucuugccag

SEQ ID NO: 1555496 - RNA, 19 nt, Artificial Sequence
  Description of Artificial Sequence: Synthetic oligonucleotide
uccaugugagcccuuaagu

SEQ ID NO: 1555497 - RNA, 19 nt, Artificial Sequence
  Description of Artificial Sequence: Synthetic oligonucleotide
ucuauuguuucuucuugcu

SEQ ID NO: 1555498 - RNA, 19 nt, Artificial Sequence
  Description of Artificial Sequence: Synthetic oligonucleotide
gaacaagcaugauuucucc

SEQ ID NO: 1555499 - RNA, 19 nt, Artificial Sequence
  Description of Artificial Sequence: Synthetic oligonucleotide
uagcaguugguucaagaca

SEQ ID NO: 1555500 - RNA, 19 nt, Artificial Sequence
  Description of Artificial Sequence: Synthetic oligonucleotide
ggagcuguggaauugauuc

SEQ ID NO: 1555501 - RNA, 19 nt, Artificial Sequence
  Description of Artificial Sequence: Synthetic oligonucleotide
cuucacauggcaaccguag

SEQ ID NO: 1555502 - RNA, 19 nt, Artificial Sequence
  Description of Artificial Sequence: Synthetic oligonucleotide
uaaaaucggucauagucuc

SEQ ID NO: 1555503 - RNA, 19 nt, Artificial Sequence
  Description of Artificial Sequence: Synthetic oligonucleotide
cuucccaugauuucccgag

SEQ ID NO: 1555504 - RNA, 19 nt, Artificial Sequence
  Description of Artificial Sequence: Synthetic oligonucleotide
uccaaguaauugaugacau

SEQ ID NO: 1555505 - RNA, 19 nt, Artificial Sequence
  Description of Artificial Sequence: Synthetic oligonucleotide
uuccaugugagcccuuaag

SEQ ID NO: 1555506 - RNA, 19 nt, Artificial Sequence
  Description of Artificial Sequence: Synthetic oligonucleotide
aagcaugauuucuccagug

SEQ ID NO: 1555507 - RNA, 19 nt, Artificial Sequence
  Description of Artificial Sequence: Synthetic oligonucleotide
aggugggaaaauaauacuc

SEQ ID NO: 1555508 - RNA, 19 nt, Artificial Sequence
  Description of Artificial Sequence: Synthetic oligonucleotide
uuucugucaggaaguagug

SEQ ID NO: 1555509 - RNA, 19 nt, Artificial Sequence
  Description of Artificial Sequence: Synthetic oligonucleotide
uggagaaaaccaugcaaca

SEQ ID NO: 1555510 - RNA, 19 nt, Artificial Sequence
  Description of Artificial Sequence: Synthetic oligonucleotide
uuggguugauccuacgaug

SEQ ID NO: 1555511 - RNA, 19 nt, Artificial Sequence
  Description of Artificial Sequence: Synthetic oligonucleotide
aauaaucaugugcuucaaa

SEQ ID NO: 1555512 - RNA, 19 nt, Artificial Sequence
  Description of Artificial Sequence: Synthetic oligonucleotide
uccucacugcaaaacauac

SEQ ID NO: 1555513 - RNA, 19 nt, Artificial Sequence
  Description of Artificial Sequence: Synthetic oligonucleotide
aaaucugcaaccagcuuca

SEQ ID NO: 1555514 - RNA, 19 nt, Artificial Sequence
  Description of Artificial Sequence: Synthetic oligonucleotide
acaauguugucuggcaaac

SEQ ID NO: 1555515 - RNA, 19 nt, Artificial Sequence
  Description of Artificial Sequence: Synthetic oligonucleotide
uggaaggcccagcaacucg

SEQ ID NO: 1555516 - RNA, 19 nt, Artificial Sequence
  Description of Artificial Sequence: Synthetic oligonucleotide
uggaauugauucuuaucac

SEQ ID NO: 1555517 - RNA, 19 nt, Artificial Sequence
  Description of Artificial Sequence: Synthetic oligonucleotide
aacaagcaugauuucucca

SEQ ID NO: 1555518 - RNA, 19 nt, Artificial Sequence
  Description of Artificial Sequence: Synthetic oligonucleotide
cauagucucuguucuuugg

SEQ ID NO: 1555519 - RNA, 19 nt, Artificial Sequence
  Description of Artificial Sequence: Synthetic oligonucleotide
gauagaaauuuaaccugag

SEQ ID NO: 1555520 - RNA, 19 nt, Artificial Sequence
  Description of Artificial Sequence: Synthetic oligonucleotide
ugcuucguuucaaagcaca

SEQ ID NO: 1555521 - RNA, 19 nt, Artificial Sequence
  Description of Artificial Sequence: Synthetic oligonucleotide
uugucuggcaaaccaauau

SEQ ID NO: 1555522 - RNA, 19 nt, Artificial Sequence
  Description of Artificial Sequence: Synthetic oligonucleotide
cacacaccaugaaagcucg

SEQ ID NO: 1555523 - RNA, 19 nt, Artificial Sequence
  Description of Artificial Sequence: Synthetic oligonucleotide
ugaaagcauguucucuggc

SEQ ID NO: 1555524 - RNA, 19 nt, Artificial Sequence
  Description of Artificial Sequence: Synthetic oligonucleotide
uuggauguaucuucacuga

SEQ ID NO: 1555525 - RNA, 19 nt, Artificial Sequence
  Description of Artificial Sequence: Synthetic oligonucleotide
acugucagacaguguacac

SEQ ID NO: 1555526 - RNA, 19 nt, Artificial Sequence
  Description of Artificial Sequence: Synthetic oligonucleotide
auuuaaccugagcucugac

SEQ ID NO: 1555527 - RNA, 19 nt, Artificial Sequence
  Description of Artificial Sequence: Synthetic oligonucleotide
uccuccaauauaaaaugua

SEQ ID NO: 1555528 - RNA, 19 nt, Artificial Sequence
  Description of Artificial Sequence: Synthetic oligonucleotide
cacuuucacugucagacag

SEQ ID NO: 1555529 - RNA, 19 nt, Artificial Sequence
  Description of Artificial Sequence: Synthetic oligonucleotide
cugagcucugacuuuauuc

SEQ ID NO: 1555530 - RNA, 19 nt, Artificial Sequence
  Description of Artificial Sequence: Synthetic oligonucleotide
acauggcaaccguagcacc

SEQ ID NO: 1555531 - RNA, 19 nt, Artificial Sequence
  Description of Artificial Sequence: Synthetic oligonucleotide
guagcaguugguucaagac

SEQ ID NO: 1555532 - RNA, 19 nt, Artificial Sequence
  Description of Artificial Sequence: Synthetic oligonucleotide
aguagugagguguguuuag

SEQ ID NO: 1555533 - RNA, 19 nt, Artificial Sequence
  Description of Artificial Sequence: Synthetic oligonucleotide
uguguuuagcuucuuccau

SEQ ID NO: 1555534 - RNA, 19 nt, Artificial Sequence
  Description of Artificial Sequence: Synthetic oligonucleotide
ugaacuugucuccgaauaa

SEQ ID NO: 1555535 - RNA, 19 nt, Artificial Sequence
  Description of Artificial Sequence: Synthetic oligonucleotide
aaaccaauauugaaagcau

SEQ ID NO: 1555536 - RNA, 19 nt, Artificial Sequence
  Description of Artificial Sequence: Synthetic oligonucleotide
guuuccacggaauuccuca

SEQ ID NO: 1555537 - RNA, 19 nt, Artificial Sequence
  Description of Artificial Sequence: Synthetic oligonucleotide
aaccuuuuccuccaauaua

SEQ ID NO: 1555538 - RNA, 19 nt, Artificial Sequence
  Description of Artificial Sequence: Synthetic oligonucleotide
ugucuccgaauaaaauuga

SEQ ID NO: 1555539 - RNA, 19 nt, Artificial Sequence
  Description of Artificial Sequence: Synthetic oligonucleotide
  modified_base (5)..(5): a, c, u, g, unknown or other
agaunggaggcccuucuga

SEQ ID NO: 1555540 - RNA, 19 nt, Artificial Sequence
  Description of Artificial Sequence: Synthetic oligonucleotide
agaacggaucuguuuccac

SEQ ID NO: 1555541 - RNA, 19 nt, Artificial Sequence
  Description of Artificial Sequence: Synthetic oligonucleotide
aacuucacauggcaaccgu

SEQ ID NO: 1555542 - RNA, 19 nt, Artificial Sequence
  Description of Artificial Sequence: Synthetic oligonucleotide
aauguaccuuuggaaaucu

SEQ ID NO: 1555543 - RNA, 19 nt, Artificial Sequence
  Description of Artificial Sequence: Synthetic oligonucleotide
ugaugacauaaaaucgguc

SEQ ID NO: 1555544 - RNA, 19 nt, Artificial Sequence
  Description of Artificial Sequence: Synthetic oligonucleotide
gcugauagaaauuuaaccu

SEQ ID NO: 1555545 - RNA, 19 nt, Artificial Sequence
  Description of Artificial Sequence: Synthetic oligonucleotide
uucagccacgggaaaaugu

SEQ ID NO: 1555546 - RNA, 19 nt, Artificial Sequence
  Description of Artificial Sequence: Synthetic oligonucleotide
aagcucguaucauuucgcu

SEQ ID NO: 1555547 - RNA, 19 nt, Artificial Sequence
  Description of Artificial Sequence: Synthetic oligonucleotide
uguugucuggcaaaccaau

SEQ ID NO: 1555548 - RNA, 19 nt, Artificial Sequence
  Description of Artificial Sequence: Synthetic oligonucleotide
aauuuaaccugagcucuga

SEQ ID NO: 1555549 - RNA, 19 nt, Artificial Sequence
  Description of Artificial Sequence: Synthetic oligonucleotide
agccacgggaaaauguucc

SEQ ID NO: 1555550 - RNA, 19 nt, Artificial Sequence
  Description of Artificial Sequence: Synthetic oligonucleotide
uucacauggcaaccguagc

SEQ ID NO: 1555551 - RNA, 19 nt, Artificial Sequence
  Description of Artificial Sequence: Synthetic oligonucleotide
cucuccuaguuuucuaggc

SEQ ID NO: 1555552 - RNA, 19 nt, Artificial Sequence
  Description of Artificial Sequence: Synthetic oligonucleotide
uuuuggauuugaacuucac

SEQ ID NO: 1555553 - RNA, 19 nt, Artificial Sequence
  Description of Artificial Sequence: Synthetic oligonucleotide
agugcaguuuacaauguug

SEQ ID NO: 1555554 - RNA, 19 nt, Artificial Sequence
  Description of Artificial Sequence: Synthetic oligonucleotide
  modified_base (7)..(7): a, c, u, g, unknown or other
acagaunggaggcccuucu

SEQ ID NO: 1555555 - RNA, 19 nt, Artificial Sequence
  Description of Artificial Sequence: Synthetic oligonucleotide
aaugugcauaggaauucag

SEQ ID NO: 1555556 - RNA, 19 nt, Artificial Sequence
  Description of Artificial Sequence: Synthetic oligonucleotide
cuauuugucucauggagaa

SEQ ID NO: 1555557 - RNA, 19 nt, Artificial Sequence
  Description of Artificial Sequence: Synthetic oligonucleotide
uuucccgaguuccaaguaa

SEQ ID NO: 1555558 - RNA, 19 nt, Artificial Sequence
  Description of Artificial Sequence: Synthetic oligonucleotide
aaauaauacuccaguuggu

SEQ ID NO: 1555559 - RNA, 19 nt, Artificial Sequence
  Description of Artificial Sequence: Synthetic oligonucleotide
gauuugaacuucacauggc

SEQ ID NO: 1555560 - RNA, 19 nt, Artificial Sequence
  Description of Artificial Sequence: Synthetic oligonucleotide
uucuaggcguuccuggagu

SEQ ID NO: 1555561 - RNA, 19 nt, Artificial Sequence
  Description of Artificial Sequence: Synthetic oligonucleotide
acacaguuuggauguaucu

SEQ ID NO: 1555562 - RNA, 19 nt, Artificial Sequence
  Description of Artificial Sequence: Synthetic oligonucleotide
cuucaaauggagcugugga

SEQ ID NO: 1555563 - RNA, 19 nt, Artificial Sequence
  Description of Artificial Sequence: Synthetic oligonucleotide
gacaaucuuaugcucaaua

SEQ ID NO: 1555564 - RNA, 19 nt, Artificial Sequence
  Description of Artificial Sequence: Synthetic oligonucleotide
ugagguguguuuagcuucu

SEQ ID NO: 1555565 - RNA, 19 nt, Artificial Sequence
  Description of Artificial Sequence: Synthetic oligonucleotide
acugaugacagggacauuu

SEQ ID NO: 1555566 - RNA, 19 nt, Artificial Sequence
  Description of Artificial Sequence: Synthetic oligonucleotide
agcucguaucauuucgcuc

SEQ ID NO: 1555567 - RNA, 19 nt, Artificial Sequence
  Description of Artificial Sequence: Synthetic oligonucleotide
gacaaucaaaucugagcuc

SEQ ID NO: 1555568 - RNA, 19 nt, Artificial Sequence
  Description of Artificial Sequence: Synthetic oligonucleotide
gaauuccucacugcaaaac

SEQ ID NO: 1555569 - RNA, 19 nt, Artificial Sequence
  Description of Artificial Sequence: Synthetic oligonucleotide
aaaaucugugaugggcugu

SEQ ID NO: 1555570 - RNA, 19 nt, Artificial Sequence
  Description of Artificial Sequence: Synthetic oligonucleotide
gaacuucacauggcaaccg

SEQ ID NO: 1555571 - RNA, 19 nt, Artificial Sequence
  Description of Artificial Sequence: Synthetic oligonucleotide
ggugggaaaauaauacucc

SEQ ID NO: 1555572 - RNA, 19 nt, Artificial Sequence
  Description of Artificial Sequence: Synthetic oligonucleotide
uucuuaucacacugcaaaa

SEQ ID NO: 1555573 - RNA, 19 nt, Artificial Sequence
  Description of Artificial Sequence: Synthetic oligonucleotide
  modified_base (3)..(3): a, c, u, g, unknown or other
aunggaggcccuucugaag

SEQ ID NO: 1555574 - RNA, 19 nt, Artificial Sequence
  Description of Artificial Sequence: Synthetic oligonucleotide
cuaugacaaucuuaugcuc

SEQ ID NO: 1555575 - RNA, 19 nt, Artificial Sequence
  Description of Artificial Sequence: Synthetic oligonucleotide
ucacugaugacagggacau

SEQ ID NO: 1555576 - RNA, 19 nt, Artificial Sequence
  Description of Artificial Sequence: Synthetic oligonucleotide
aauguuccucacagaaaag

SEQ ID NO: 1555577 - RNA, 19 nt, Artificial Sequence
  Description of Artificial Sequence: Synthetic oligonucleotide
  modified_base (4)..(4): a, c, u, g, unknown or other
gaunggaggcccuucugaa

SEQ ID NO: 1555578 - RNA, 19 nt, Artificial Sequence
  Description of Artificial Sequence: Synthetic oligonucleotide
uaugcucaauaaucaugug

SEQ ID NO: 1555579 - RNA, 19 nt, Artificial Sequence
  Description of Artificial Sequence: Synthetic oligonucleotide
ccuccaauauaaaauguac

SEQ ID NO: 1555580 - RNA, 19 nt, Artificial Sequence
  Description of Artificial Sequence: Synthetic oligonucleotide
accuuuuccuccaauauaa

SEQ ID NO: 1555581 - RNA, 19 nt, Artificial Sequence
  Description of Artificial Sequence: Synthetic oligonucleotide
ugaaagcucguaucauuuc

SEQ ID NO: 1555582 - RNA, 19 nt, Artificial Sequence
  Description of Artificial Sequence: Synthetic oligonucleotide
uugucuuguucagccacgg

SEQ ID NO: 1555583 - RNA, 19 nt, Artificial Sequence
  Description of Artificial Sequence: Synthetic oligonucleotide
ucagugcaguuuacaaugu

SEQ ID NO: 1555584 - RNA, 19 nt, Artificial Sequence
  Description of Artificial Sequence: Synthetic oligonucleotide
caguguacacaggagagug

SEQ ID NO: 1555585 - RNA, 19 nt, Artificial Sequence
  Description of Artificial Sequence: Synthetic oligonucleotide
agguguguuuagcuucuuc

SEQ ID NO: 1555586 - RNA, 19 nt, Artificial Sequence
  Description of Artificial Sequence: Synthetic oligonucleotide
aaguaauugaugacauaaa

SEQ ID NO: 1555587 - RNA, 19 nt, Artificial Sequence
  Description of Artificial Sequence: Synthetic oligonucleotide
agacaggguauucuugcca

SEQ ID NO: 1555588 - RNA, 19 nt, Artificial Sequence
  Description of Artificial Sequence: Synthetic oligonucleotide
uucuuuggguugauccuac

SEQ ID NO: 1555589 - RNA, 19 nt, Artificial Sequence
  Description of Artificial Sequence: Synthetic oligonucleotide
  modified_base (11)..(11): a, c, u, g, unknown or other
aggcacagaunggaggccc

SEQ ID NO: 1555590 - RNA, 19 nt, Artificial Sequence
  Description of Artificial Sequence: Synthetic oligonucleotide
ugauuucuccagugaauaa

SEQ ID NO: 1555591 - RNA, 19 nt, Artificial Sequence
  Description of Artificial Sequence: Synthetic oligonucleotide
ucuuuggguugauccuacg

SEQ ID NO: 1555592 - RNA, 19 nt, Artificial Sequence
  Description of Artificial Sequence: Synthetic oligonucleotide
ucuuucugucaggaaguag

SEQ ID NO: 1555593 - RNA, 19 nt, Artificial Sequence
  Description of Artificial Sequence: Synthetic oligonucleotide
uaagaacaagcaugauuuc

SEQ ID NO: 1555594 - RNA, 19 nt, Artificial Sequence
  Description of Artificial Sequence: Synthetic oligonucleotide
uggauguaucuucacugau

SEQ ID NO: 1555595 - RNA, 19 nt, Artificial Sequence
  Description of Artificial Sequence: Synthetic oligonucleotide
ugguaacacaucacauaac

SEQ ID NO: 1555596 - RNA, 19 nt, Artificial Sequence
  Description of Artificial Sequence: Synthetic oligonucleotide
cuuugcugacaaucaaauc

SEQ ID NO: 1555597 - RNA, 19 nt, Artificial Sequence
  Description of Artificial Sequence: Synthetic oligonucleotide
uccucacagaaaagacaag

SEQ ID NO: 1555598 - RNA, 19 nt, Artificial Sequence
  Description of Artificial Sequence: Synthetic oligonucleotide
uaccuuuggaaaucugcaa

SEQ ID NO: 1555599 - RNA, 19 nt, Artificial Sequence
  Description of Artificial Sequence: Synthetic oligonucleotide
ugagcugucaggucacuuu

SEQ ID NO: 1555600 - RNA, 19 nt, Artificial Sequence
  Description of Artificial Sequence: Synthetic oligonucleotide
uuccucacugcaaaacaua

SEQ ID NO: 1555601 - RNA, 19 nt, Artificial Sequence
  Description of Artificial Sequence: Synthetic oligonucleotide
acuuuauucugaggagauc

SEQ ID NO: 1555602 - RNA, 19 nt, Artificial Sequence
  Description of Artificial Sequence: Synthetic oligonucleotide
acaccaugaaagcucguau

SEQ ID NO: 1555603 - RNA, 19 nt, Artificial Sequence
  Description of Artificial Sequence: Synthetic oligonucleotide
acuuugcugacaaucaaau

SEQ ID NO: 1555604 - RNA, 19 nt, Artificial Sequence
  Description of Artificial Sequence: Synthetic oligonucleotide
gcuucaaaaguuugucuug

SEQ ID NO: 1555605 - RNA, 19 nt, Artificial Sequence
  Description of Artificial Sequence: Synthetic oligonucleotide
auaggaauucagugcaguu

SEQ ID NO: 1555606 - RNA, 19 nt, Artificial Sequence
  Description of Artificial Sequence: Synthetic oligonucleotide
acuccaguuggucccaggu

SEQ ID NO: 1555607 - RNA, 19 nt, Artificial Sequence
  Description of Artificial Sequence: Synthetic oligonucleotide
caccaugaaagcucguauc

SEQ ID NO: 1555608 - RNA, 19 nt, Artificial Sequence
  Description of Artificial Sequence: Synthetic oligonucleotide
gauccuacgaugcuguuuu

SEQ ID NO: 1555609 - RNA, 19 nt, Artificial Sequence
  Description of Artificial Sequence: Synthetic oligonucleotide
guguguuuagcuucuucca

SEQ ID NO: 1555610 - RNA, 19 nt, Artificial Sequence
  Description of Artificial Sequence: Synthetic oligonucleotide
uucccgaguuccaaguaau

SEQ ID NO: 1555611 - RNA, 19 nt, Artificial Sequence
  Description of Artificial Sequence: Synthetic oligonucleotide
cucgcuguugcugauccag

SEQ ID NO: 1555612 - RNA, 19 nt, Artificial Sequence
  Description of Artificial Sequence: Synthetic oligonucleotide
ugaggagaucaaacucaug

SEQ ID NO: 1555613 - RNA, 19 nt, Artificial Sequence
  Description of Artificial Sequence: Synthetic oligonucleotide
uaguuuucuaggcguuccu

SEQ ID NO: 1555614 - RNA, 19 nt, Artificial Sequence
  Description of Artificial Sequence: Synthetic oligonucleotide
cucauaggugggaaaauaa

SEQ ID NO: 1555615 - RNA, 19 nt, Artificial Sequence
  Description of Artificial Sequence: Synthetic oligonucleotide
caauuuaucuauuguuucu

SEQ ID NO: 1555616 - RNA, 19 nt, Artificial Sequence
  Description of Artificial Sequence: Synthetic oligonucleotide
agcaccugcacuggugaac

SEQ ID NO: 1555617 - RNA, 19 nt, Artificial Sequence
  Description of Artificial Sequence: Synthetic oligonucleotide
aaguagugagguguguuua

SEQ ID NO: 1555618 - RNA, 19 nt, Artificial Sequence
  Description of Artificial Sequence: Synthetic oligonucleotide
agcccuuaagucuguuuug

SEQ ID NO: 1555619 - RNA, 19 nt, Artificial Sequence
  Description of Artificial Sequence: Synthetic oligonucleotide
uaucuucugguaacacauc

SEQ ID NO: 1555620 - RNA, 19 nt, Artificial Sequence
  Description of Artificial Sequence: Synthetic oligonucleotide
guaauugaugacauaaaau

SEQ ID NO: 1555621 - RNA, 19 nt, Artificial Sequence
  Description of Artificial Sequence: Synthetic oligonucleotide
ucaacagaacggaucuguu

SEQ ID NO: 1555622 - RNA, 19 nt, Artificial Sequence
  Description of Artificial Sequence: Synthetic oligonucleotide
auugcaccucuucccauga

SEQ ID NO: 1555623 - RNA, 19 nt, Artificial Sequence
  Description of Artificial Sequence: Synthetic oligonucleotide
ugacauaaaaucggucaua

SEQ ID NO: 1555624 - RNA, 19 nt, Artificial Sequence
  Description of Artificial Sequence: Synthetic oligonucleotide
ucguuucaaagcacacagu

SEQ ID NO: 1555625 - RNA, 19 nt, Artificial Sequence
  Description of Artificial Sequence: Synthetic oligonucleotide
ugcaccucuucccaugauu

SEQ ID NO: 1555626 - RNA, 19 nt, Artificial Sequence
  Description of Artificial Sequence: Synthetic oligonucleotide
uaggcguuccuggaguagc

SEQ ID NO: 1555627 - RNA, 19 nt, Artificial Sequence
  Description of Artificial Sequence: Synthetic oligonucleotide
cacauggcaaccguagcac

SEQ ID NO: 1555628 - RNA, 19 nt, Artificial Sequence
  Description of Artificial Sequence: Synthetic oligonucleotide
uucuucuguaaugugcaua

SEQ ID NO: 1555629 - RNA, 19 nt, Artificial Sequence
  Description of Artificial Sequence: Synthetic oligonucleotide
cuggcaaaccaauauugaa

SEQ ID NO: 1555630 - RNA, 19 nt, Artificial Sequence
  Description of Artificial Sequence: Synthetic oligonucleotide
uuccacggaauuccucacu

SEQ ID NO: 1555631 - RNA, 19 nt, Artificial Sequence
  Description of Artificial Sequence: Synthetic oligonucleotide
aaaucugugaugggcuguu

SEQ ID NO: 1555632 - RNA, 19 nt, Artificial Sequence
  Description of Artificial Sequence: Synthetic oligonucleotide
guagcaccugcacugguga

SEQ ID NO: 1555633 - RNA, 19 nt, Artificial Sequence
  Description of Artificial Sequence: Synthetic oligonucleotide
uguucagccacgggaaaau

SEQ ID NO: 1555634 - RNA, 19 nt, Artificial Sequence
  Description of Artificial Sequence: Synthetic oligonucleotide
gauuucccgaguuccaagu

SEQ ID NO: 1555635 - RNA, 19 nt, Artificial Sequence
  Description of Artificial Sequence: Synthetic oligonucleotide
gguucaacagaacggaucu

SEQ ID NO: 1555636 - RNA, 19 nt, Artificial Sequence
  Description of Artificial Sequence: Synthetic oligonucleotide
ucauucucauaggugggaa

SEQ ID NO: 1555637 - RNA, 19 nt, Artificial Sequence
  Description of Artificial Sequence: Synthetic oligonucleotide
cuuuggguugauccuacga

SEQ ID NO: 1555638 - RNA, 19 nt, Artificial Sequence
  Description of Artificial Sequence: Synthetic oligonucleotide
uucuaucuucugguaacac

SEQ ID NO: 1555639 - RNA, 19 nt, Artificial Sequence
  Description of Artificial Sequence: Synthetic oligonucleotide
gaacuugucuccgaauaaa

SEQ ID NO: 1555640 - RNA, 19 nt, Artificial Sequence
  Description of Artificial Sequence: Synthetic oligonucleotide
aggguauucuugccaguca

SEQ ID NO: 1555641 - RNA, 19 nt, Artificial Sequence
  Description of Artificial Sequence: Synthetic oligonucleotide
accaugcaacagaaucugc

SEQ ID NO: 1555642 - RNA, 19 nt, Artificial Sequence
  Description of Artificial Sequence: Synthetic oligonucleotide
cagaaucugcagcagucuc

SEQ ID NO: 1555643 - RNA, 19 nt, Artificial Sequence
  Description of Artificial Sequence: Synthetic oligonucleotide
cacggaauuccucacugca

SEQ ID NO: 1555644 - RNA, 19 nt, Artificial Sequence
  Description of Artificial Sequence: Synthetic oligonucleotide
ggagaucaaacucaugugu

SEQ ID NO: 1555645 - RNA, 19 nt, Artificial Sequence
  Description of Artificial Sequence: Synthetic oligonucleotide
gcacauacaauuuaucuau

SEQ ID NO: 1555646 - RNA, 19 nt, Artificial Sequence
  Description of Artificial Sequence: Synthetic oligonucleotide
augugcauaggaauucagu

SEQ ID NO: 1555647 - RNA, 19 nt, Artificial Sequence
  Description of Artificial Sequence: Synthetic oligonucleotide
gauuucuccagugaauaau

SEQ ID NO: 1555648 - RNA, 19 nt, Artificial Sequence
  Description of Artificial Sequence: Synthetic oligonucleotide
guccuucaugugcacauac

SEQ ID NO: 1555649 - RNA, 19 nt, Artificial Sequence
  Description of Artificial Sequence: Synthetic oligonucleotide
ucccaugauuucccgaguu

SEQ ID NO: 1555650 - RNA, 19 nt, Artificial Sequence
  Description of Artificial Sequence: Synthetic oligonucleotide
gaguuccaaguaauugaug

SEQ ID NO: 1555651 - RNA, 19 nt, Artificial Sequence
  Description of Artificial Sequence: Synthetic oligonucleotide
ccuguucuucaaauggagc

SEQ ID NO: 1555652 - RNA, 19 nt, Artificial Sequence
  Description of Artificial Sequence: Synthetic oligonucleotide
cuugccagucagaccaguc

SEQ ID NO: 1555653 - RNA, 19 nt, Artificial Sequence
  Description of Artificial Sequence: Synthetic oligonucleotide
uccuaguuuucuaggcguu

SEQ ID NO: 1555654 - RNA, 19 nt, Artificial Sequence
  Description of Artificial Sequence: Synthetic oligonucleotide
gcacuggugaacuugucuc

SEQ ID NO: 1555655 - RNA, 19 nt, Artificial Sequence
  Description of Artificial Sequence: Synthetic oligonucleotide
ugugaucuuuaaguguguu

SEQ ID NO: 1555656 - RNA, 19 nt, Artificial Sequence
  Description of Artificial Sequence: Synthetic oligonucleotide
  modified_base (19)..(19): a, c, u, g, unknown or other
aaaagacaaggcacagaun

SEQ ID NO: 1555657 - RNA, 19 nt, Artificial Sequence
  Description of Artificial Sequence: Synthetic oligonucleotide
gcucguaucauuucgcucu

SEQ ID NO: 1555658 - RNA, 19 nt, Artificial Sequence
  Description of Artificial Sequence: Synthetic oligonucleotide
ccaugugagcccuuaaguc

SEQ ID NO: 1555659 - RNA, 19 nt, Artificial Sequence
  Description of Artificial Sequence: Synthetic oligonucleotide
gauucuuaucacacugcaa

SEQ ID NO: 1555660 - RNA, 19 nt, Artificial Sequence
  Description of Artificial Sequence: Synthetic oligonucleotide
aggauucuaucuucuggua

SEQ ID NO: 1555661 - RNA, 19 nt, Artificial Sequence
  Description of Artificial Sequence: Synthetic oligonucleotide
auuccucacugcaaaacau

SEQ ID NO: 1555662 - RNA, 19 nt, Artificial Sequence
  Description of Artificial Sequence: Synthetic oligonucleotide
caauguugucuggcaaacc

SEQ ID NO: 1555663 - RNA, 19 nt, Artificial Sequence
  Description of Artificial Sequence: Synthetic oligonucleotide
aaccugagcucugacuuua

SEQ ID NO: 1555664 - RNA, 19 nt, Artificial Sequence
  Description of Artificial Sequence: Synthetic oligonucleotide
cuucuguaaugugcauagg

SEQ ID NO: 1555665 - RNA, 19 nt, Artificial Sequence
  Description of Artificial Sequence: Synthetic oligonucleotide
gaaggcccagcaacucgcg

SEQ ID NO: 1555666 - RNA, 19 nt, Artificial Sequence
  Description of Artificial Sequence: Synthetic oligonucleotide
guaacacaucacauaacaa

SEQ ID NO: 1555667 - RNA, 19 nt, Artificial Sequence
  Description of Artificial Sequence: Synthetic oligonucleotide
gcucugacuuuauucugag

SEQ ID NO: 1555668 - RNA, 19 nt, Artificial Sequence
  Description of Artificial Sequence: Synthetic oligonucleotide
gaaguagugagguguguuu

SEQ ID NO: 1555669 - RNA, 19 nt, Artificial Sequence
  Description of Artificial Sequence: Synthetic oligonucleotide
gguugauccuacgaugcug

SEQ ID NO: 1555670 - RNA, 19 nt, Artificial Sequence
  Description of Artificial Sequence: Synthetic oligonucleotide
cuucguuucaaagcacaca

SEQ ID NO: 1555671 - RNA, 19 nt, Artificial Sequence
  Description of Artificial Sequence: Synthetic oligonucleotide
ggauucuaucuucugguaa

SEQ ID NO: 1555672 - RNA, 19 nt, Artificial Sequence
  Description of Artificial Sequence: Synthetic oligonucleotide
ucguaucauuucgcucucg

SEQ ID NO: 1555673 - RNA, 19 nt, Artificial Sequence
  Description of Artificial Sequence: Synthetic oligonucleotide
gagcccuuaagucuguuuu

SEQ ID NO: 1555674 - RNA, 19 nt, Artificial Sequence
  Description of Artificial Sequence: Synthetic oligonucleotide
gaaggucuucucacaguac

SEQ ID NO: 1555675 - RNA, 19 nt, Artificial Sequence
  Description of Artificial Sequence: Synthetic oligonucleotide
uggcaaccguagcaccugc

SEQ ID NO: 1555676 - RNA, 19 nt, Artificial Sequence
  Description of Artificial Sequence: Synthetic oligonucleotide
auuucccgaguuccaagua

SEQ ID NO: 1555677 - RNA, 19 nt, Artificial Sequence
  Description of Artificial Sequence: Synthetic oligonucleotide
aucagcuaugacaaucuua

SEQ ID NO: 1555678 - RNA, 19 nt, Artificial Sequence
  Description of Artificial Sequence: Synthetic oligonucleotide
gcugacaaucaaaucugag

SEQ ID NO: 1555679 - RNA, 19 nt, Artificial Sequence
  Description of Artificial Sequence: Synthetic oligonucleotide
gucuccgaauaaaauugac

SEQ ID NO: 1555680 - RNA, 19 nt, Artificial Sequence
  Description of Artificial Sequence: Synthetic oligonucleotide
uugguucaagacacugcuu

SEQ ID NO: 1555681 - RNA, 19 nt, Artificial Sequence
  Description of Artificial Sequence: Synthetic oligonucleotide
ugauccuacgaugcuguuu

SEQ ID NO: 1555682 - RNA, 19 nt, Artificial Sequence
  Description of Artificial Sequence: Synthetic oligonucleotide
cucgcgaucaucuuccaau

SEQ ID NO: 1555683 - RNA, 19 nt, Artificial Sequence
  Description of Artificial Sequence: Synthetic oligonucleotide
ucuaggcguuccuggagua

SEQ ID NO: 1555684 - RNA, 19 nt, Artificial Sequence
  Description of Artificial Sequence: Synthetic oligonucleotide
aacucgcgaucaucuucca

SEQ ID NO: 1555685 - RNA, 19 nt, Artificial Sequence
  Description of Artificial Sequence: Synthetic oligonucleotide
caggguauucuugccaguc

SEQ ID NO: 1555686 - RNA, 19 nt, Artificial Sequence
  Description of Artificial Sequence: Synthetic oligonucleotide
ucgcgaucaucuuccaauu

SEQ ID NO: 1555687 - RNA, 19 nt, Artificial Sequence
  Description of Artificial Sequence: Synthetic oligonucleotide
  modified_base (6)..(6): a, c, u, g, unknown or other
cagaunggaggcccuucug

SEQ ID NO: 1555688 - RNA, 19 nt, Artificial Sequence
  Description of Artificial Sequence: Synthetic oligonucleotide
aagcgguaggagccaccug

SEQ ID NO: 1555689 - RNA, 19 nt, Artificial Sequence
  Description of Artificial Sequence: Synthetic oligonucleotide
acaggguauucuugccagu

SEQ ID NO: 1555690 - RNA, 19 nt, Artificial Sequence
  Description of Artificial Sequence: Synthetic oligonucleotide
ccgaguuccaaguaauuga

SEQ ID NO: 1555691 - RNA, 19 nt, Artificial Sequence
  Description of Artificial Sequence: Synthetic oligonucleotide
cuguucagugaaccuuuuc

SEQ ID NO: 1555692 - RNA, 19 nt, Artificial Sequence
  Description of Artificial Sequence: Synthetic oligonucleotide
gcaugauuucuccagugaa

SEQ ID NO: 1555693 - RNA, 19 nt, Artificial Sequence
  Description of Artificial Sequence: Synthetic oligonucleotide
auggcaaccguagcaccug

SEQ ID NO: 1555694 - RNA, 19 nt, Artificial Sequence
  Description of Artificial Sequence: Synthetic oligonucleotide
guugauccuacgaugcugu

SEQ ID NO: 1555695 - RNA, 19 nt, Artificial Sequence
  Description of Artificial Sequence: Synthetic oligonucleotide
gcaacucgcgaucaucuuc

SEQ ID NO: 1555696 - RNA, 19 nt, Artificial Sequence
  Description of Artificial Sequence: Synthetic oligonucleotide
gacuuuauucugaggagau

SEQ ID NO: 1555697 - RNA, 19 nt, Artificial Sequence
  Description of Artificial Sequence: Synthetic oligonucleotide
cagugaaccuuuuccucca

SEQ ID NO: 1555698 - RNA, 19 nt, Artificial Sequence
  Description of Artificial Sequence: Synthetic oligonucleotide
cuccuaguuuucuaggcgu

SEQ ID NO: 1555699 - RNA, 19 nt, Artificial Sequence
  Description of Artificial Sequence: Synthetic oligonucleotide
cagccacgggaaaauguuc

SEQ ID NO: 1555700 - RNA, 19 nt, Artificial Sequence
  Description of Artificial Sequence: Synthetic oligonucleotide
cagcuucacaucagcuaug

SEQ ID NO: 1555701 - RNA, 19 nt, Artificial Sequence
  Description of Artificial Sequence: Synthetic oligonucleotide
ucuguucuuuggguugauc

SEQ ID NO: 1555702 - RNA, 19 nt, Artificial Sequence
  Description of Artificial Sequence: Synthetic oligonucleotide
cucguaucauuucgcucuc

SEQ ID NO: 1555703 - RNA, 19 nt, Artificial Sequence
  Description of Artificial Sequence: Synthetic oligonucleotide
cagcuaugacaaucuuaug

SEQ ID NO: 1555704 - RNA, 19 nt, Artificial Sequence
  Description of Artificial Sequence: Synthetic oligonucleotide
cauguucucuggccaugug

SEQ ID NO: 1555705 - RNA, 19 nt, Artificial Sequence
  Description of Artificial Sequence: Synthetic oligonucleotide
gcaaccguagcaccugcac

SEQ ID NO: 1555706 - RNA, 19 nt, Artificial Sequence
  Description of Artificial Sequence: Synthetic oligonucleotide
acggaucuguuuccacgga

SEQ ID NO: 1555707 - RNA, 19 nt, Artificial Sequence
  Description of Artificial Sequence: Synthetic oligonucleotide
cguaucauuucgcucucgc

SEQ ID NO: 1555708 - RNA, 19 nt, Artificial Sequence
  Description of Artificial Sequence: Synthetic oligonucleotide
ucccgaguuccaaguaauu

SEQ ID NO: 1555709 - RNA, 19 nt, Artificial Sequence
  Description of Artificial Sequence: Synthetic oligonucleotide
cacugucagacaguguaca

SEQ ID NO: 1555710 - RNA, 19 nt, Artificial Sequence
  Description of Artificial Sequence: Synthetic oligonucleotide
caaagcacacaguuuggau

SEQ ID NO: 1555711 - RNA, 19 nt, Artificial Sequence
  Description of Artificial Sequence: Synthetic oligonucleotide
guucagccacgggaaaaug

SEQ ID NO: 1555712 - RNA, 19 nt, Artificial Sequence
  Description of Artificial Sequence: Synthetic oligonucleotide
ugacaaucuuaugcucaau

SEQ ID NO: 1555713 - RNA, 19 nt, Artificial Sequence
  Description of Artificial Sequence: Synthetic oligonucleotide
gaagcgguaggagccaccu

SEQ ID NO: 1555714 - RNA, 19 nt, Artificial Sequence
  Description of Artificial Sequence: Synthetic oligonucleotide
agcaacucgcgaucaucuu

SEQ ID NO: 1555715 - RNA, 19 nt, Artificial Sequence
  Description of Artificial Sequence: Synthetic oligonucleotide
cauaggaauucagugcagu

SEQ ID NO: 1555716 - RNA, 19 nt, Artificial Sequence
  Description of Artificial Sequence: Synthetic oligonucleotide
augugaucuuuaagugugu

SEQ ID NO: 1555717 - RNA, 19 nt, Artificial Sequence
  Description of Artificial Sequence: Synthetic oligonucleotide
uguccuucaugugcacaua

SEQ ID NO: 1555718 - RNA, 19 nt, Artificial Sequence
  Description of Artificial Sequence: Synthetic oligonucleotide
  modified_base (8)..(8): a, c, u, g, unknown or other
cacagaunggaggcccuuc

SEQ ID NO: 1555719 - RNA, 19 nt, Artificial Sequence
  Description of Artificial Sequence: Synthetic oligonucleotide
acggaauuccucacugcaa

SEQ ID NO: 1555720 - RNA, 19 nt, Artificial Sequence
  Description of Artificial Sequence: Synthetic oligonucleotide
uugagcugucaggucacuu

SEQ ID NO: 1555721 - RNA, 19 nt, Artificial Sequence
  Description of Artificial Sequence: Synthetic oligonucleotide
auguaccuuuggaaaucug

SEQ ID NO: 1555722 - RNA, 19 nt, Artificial Sequence
  Description of Artificial Sequence: Synthetic oligonucleotide
ggaauuccucacugcaaaa

SEQ ID NO: 1555723 - RNA, 19 nt, Artificial Sequence
  Description of Artificial Sequence: Synthetic oligonucleotide
cacaccaugaaagcucgua

SEQ ID NO: 1555724 - RNA, 19 nt, Artificial Sequence
  Description of Artificial Sequence: Synthetic oligonucleotide
caacagaaucugcagcagu

SEQ ID NO: 1555725 - RNA, 19 nt, Artificial Sequence
  Description of Artificial Sequence: Synthetic oligonucleotide
cugaggagaucaaacucau

SEQ ID NO: 1555726 - RNA, 19 nt, Artificial Sequence
  Description of Artificial Sequence: Synthetic oligonucleotide
guugucuggcaaaccaaua

SEQ ID NO: 1555727 - RNA, 19 nt, Artificial Sequence
  Description of Artificial Sequence: Synthetic oligonucleotide
uugauccuacgaugcuguu

SEQ ID NO: 1555728 - RNA, 19 nt, Artificial Sequence
  Description of Artificial Sequence: Synthetic oligonucleotide
acuucacauggcaaccgua

SEQ ID NO: 1555729 - RNA, 19 nt, Artificial Sequence
  Description of Artificial Sequence: Synthetic oligonucleotide
caauaaucaugugcuucaa

SEQ ID NO: 1555730 - RNA, 19 nt, Artificial Sequence
  Description of Artificial Sequence: Synthetic oligonucleotide
gcauaggaauucagugcag

SEQ ID NO: 1555731 - RNA, 19 nt, Artificial Sequence
  Description of Artificial Sequence: Synthetic oligonucleotide
cagaacggaucuguuucca

SEQ ID NO: 1555732 - RNA, 19 nt, Artificial Sequence
  Description of Artificial Sequence: Synthetic oligonucleotide
ggaggcccuucugaagcgg

SEQ ID NO: 1555733 - RNA, 19 nt, Artificial Sequence
  Description of Artificial Sequence: Synthetic oligonucleotide
ggaauucagugcaguuuac

SEQ ID NO: 1555734 - RNA, 19 nt, Artificial Sequence
  Description of Artificial Sequence: Synthetic oligonucleotide
auacuccaguuggucccag

SEQ ID NO: 1555735 - RNA, 19 nt, Artificial Sequence
  Description of Artificial Sequence: Synthetic oligonucleotide
cugcacuggugaacuuguc

SEQ ID NO: 1555736 - RNA, 19 nt, Artificial Sequence
  Description of Artificial Sequence: Synthetic oligonucleotide
gaaaaccaugcaacagaau

SEQ ID NO: 1555737 - RNA, 19 nt, Artificial Sequence
  Description of Artificial Sequence: Synthetic oligonucleotide
cccaugauuucccgaguuc

SEQ ID NO: 1555738 - RNA, 19 nt, Artificial Sequence
  Description of Artificial Sequence: Synthetic oligonucleotide
cacaggagagugucauucu

SEQ ID NO: 1555739 - RNA, 19 nt, Artificial Sequence
  Description of Artificial Sequence: Synthetic oligonucleotide
cacaguuuggauguaucuu

SEQ ID NO: 1555740 - RNA, 19 nt, Artificial Sequence
  Description of Artificial Sequence: Synthetic oligonucleotide
ccuaguuuucuaggcguuc

SEQ ID NO: 1555741 - RNA, 19 nt, Artificial Sequence
  Description of Artificial Sequence: Synthetic oligonucleotide
aggcguuccuggaguagca

SEQ ID NO: 1555742 - RNA, 19 nt, Artificial Sequence
  Description of Artificial Sequence: Synthetic oligonucleotide
caggucuuucugucaggaa

SEQ ID NO: 1555743 - RNA, 19 nt, Artificial Sequence
  Description of Artificial Sequence: Synthetic oligonucleotide
cacauacaauuuaucuauu

SEQ ID NO: 1555744 - RNA, 19 nt, Artificial Sequence
  Description of Artificial Sequence: Synthetic oligonucleotide
ccagcaacucgcgaucauc

SEQ ID NO: 1555745 - RNA, 19 nt, Artificial Sequence
  Description of Artificial Sequence: Synthetic oligonucleotide
ggugaacuugucuccgaau

SEQ ID NO: 1555746 - RNA, 19 nt, Artificial Sequence
  Description of Artificial Sequence: Synthetic oligonucleotide
cggaauuccucacugcaaa

SEQ ID NO: 1555747 - RNA, 19 nt, Artificial Sequence
  Description of Artificial Sequence: Synthetic oligonucleotide
ggaucuguuuccacggaau

SEQ ID NO: 1555748 - RNA, 19 nt, Artificial Sequence
  Description of Artificial Sequence: Synthetic oligonucleotide
ggagagugucauucucaua

SEQ ID NO: 1555749 - RNA, 19 nt, Artificial Sequence
  Description of Artificial Sequence: Synthetic oligonucleotide
cugugaugggcuguucagu

SEQ ID NO: 1555750 - RNA, 19 nt, Artificial Sequence
  Description of Artificial Sequence: Synthetic oligonucleotide
cccuuaagucuguuuugga

SEQ ID NO: 1555751 - RNA, 19 nt, Artificial Sequence
  Description of Artificial Sequence: Synthetic oligonucleotide
ccaaguaauugaugacaua

SEQ ID NO: 1555752 - RNA, 19 nt, Artificial Sequence
  Description of Artificial Sequence: Synthetic oligonucleotide
ggaaguagugagguguguu

SEQ ID NO: 1555753 - RNA, 19 nt, Artificial Sequence
  Description of Artificial Sequence: Synthetic oligonucleotide
cgcgaucaucuuccaauug

SEQ ID NO: 1555754 - RNA, 19 nt, Artificial Sequence
  Description of Artificial Sequence: Synthetic oligonucleotide
ccagucagaccagucaucu

SEQ ID NO: 1555755 - RNA, 19 nt, Artificial Sequence
  Description of Artificial Sequence: Synthetic oligonucleotide
caucagcuaugacaaucuu

SEQ ID NO: 1555756 - RNA, 19 nt, Artificial Sequence
  Description of Artificial Sequence: Synthetic oligonucleotide
gcaccugcacuggugaacu

SEQ ID NO: 1555757 - RNA, 19 nt, Artificial Sequence
  Description of Artificial Sequence: Synthetic oligonucleotide
gcguuccuggaguagcagu

SEQ ID NO: 1555758 - RNA, 19 nt, Artificial Sequence
  Description of Artificial Sequence: Synthetic oligonucleotide
cgaguuccaaguaauugau

SEQ ID NO: 1555759 - RNA, 19 nt, Artificial Sequence
  Description of Artificial Sequence: Synthetic oligonucleotide
  modified_base (10)..(10): a, c, u, g, unknown or other
ggcacagaunggaggcccu

SEQ ID NO: 1555760 - RNA, 19 nt, Artificial Sequence
  Description of Artificial Sequence: Synthetic oligonucleotide
ggcuguucagugaaccuuu

SEQ ID NO: 1555761 - RNA, 19 nt, Artificial Sequence
  Description of Artificial Sequence: Synthetic oligonucleotide
ggcaaccguagcaccugca

SEQ ID NO: 1555762 - RNA, 19 nt, Artificial Sequence
  Description of Artificial Sequence: Synthetic oligonucleotide
cggucauagucucuguucu

SEQ ID NO: 1555763 - RNA, 19 nt, Artificial Sequence
  Description of Artificial Sequence: Synthetic oligonucleotide
cuugagcugucaggucacu

SEQ ID NO: 1555764 - RNA, 19 nt, Artificial Sequence
  Description of Artificial Sequence: Synthetic oligonucleotide
gcgguaggagccaccugga

SEQ ID NO: 1555765 - RNA, 19 nt, Artificial Sequence
  Description of Artificial Sequence: Synthetic oligonucleotide
cggaucuguuuccacggaa

SEQ ID NO: 1555766 - RNA, 19 nt, Artificial Sequence
  Description of Artificial Sequence: Synthetic oligonucleotide
cagucagaccagucaucuu

SEQ ID NO: 1555767 - RNA, 19 nt, Artificial Sequence
  Description of Artificial Sequence: Synthetic oligonucleotide
gcacacaguuuggauguau

SEQ ID NO: 1555768 - RNA, 19 nt, Artificial Sequence
  Description of Artificial Sequence: Synthetic oligonucleotide
cguuccuggaguagcaguu

SEQ ID NO: 1555769 - RNA, 19 nt, Artificial Sequence
  Description of Artificial Sequence: Synthetic oligonucleotide
gagguguguuuagcuucuu

SEQ ID NO: 1555770 - RNA, 19 nt, Artificial Sequence
  Description of Artificial Sequence: Synthetic oligonucleotide
  modified_base (9)..(9): a, c, u, g, unknown or other
gcacagaunggaggcccuu

SEQ ID NO: 1555771 - RNA, 19 nt, Artificial Sequence
  Description of Artificial Sequence: Synthetic oligonucleotide
gcuguucagugaaccuuuu

SEQ ID NO: 1555772 - RNA, 19 nt, Artificial Sequence
  Description of Artificial Sequence: Synthetic oligonucleotide
ccguagcaccugcacuggu

SEQ ID NO: 1555773 - RNA, 19 nt, Artificial Sequence
  Description of Artificial Sequence: Synthetic oligonucleotide
cacugaugacagggacauu

SEQ ID NO: 1555774 - RNA, 19 nt, Artificial Sequence
  Description of Artificial Sequence: Synthetic oligonucleotide
  modified_base (1)..(1): a, c, u, g, unknown or other
nggaggcccuucugaagcg

SEQ ID NO: 1555775 - RNA, 19 nt, Artificial Sequence
  Description of Artificial Sequence: Synthetic oligonucleotide
auuauagggauacagaggg

SEQ ID NO: 1555776 - RNA, 19 nt, Artificial Sequence
  Description of Artificial Sequence: Synthetic oligonucleotide
aagcugagaaacuauggcc

SEQ ID NO: 1555777 - RNA, 19 nt, Artificial Sequence
  Description of Artificial Sequence: Synthetic oligonucleotide
uccaauuucaaucucguug

SEQ ID NO: 1555778 - RNA, 19 nt, Artificial Sequence
  Description of Artificial Sequence: Synthetic oligonucleotide
uuggaugucacaaacagcu

SEQ ID NO: 1555779 - RNA, 19 nt, Artificial Sequence
  Description of Artificial Sequence: Synthetic oligonucleotide
ucauuauagggauacagag

SEQ ID NO: 1555780 - RNA, 19 nt, Artificial Sequence
  Description of Artificial Sequence: Synthetic oligonucleotide
agaaccucaccucacagcg

SEQ ID NO: 1555781 - RNA, 19 nt, Artificial Sequence
  Description of Artificial Sequence: Synthetic oligonucleotide
aaucaugggcacaauauac

SEQ ID NO: 1555782 - RNA, 19 nt, Artificial Sequence
  Description of Artificial Sequence: Synthetic oligonucleotide
augggcacaauauaccgcc

SEQ ID NO: 1555783 - RNA, 19 nt, Artificial Sequence
  Description of Artificial Sequence: Synthetic oligonucleotide
acuaagggcauauuuaaug

SEQ ID NO: 1555784 - RNA, 19 nt, Artificial Sequence
  Description of Artificial Sequence: Synthetic oligonucleotide
ucgugcuugacaaugagca

SEQ ID NO: 1555785 - RNA, 19 nt, Artificial Sequence
  Description of Artificial Sequence: Synthetic oligonucleotide
aguaugggucauuauaggg

SEQ ID NO: 1555786 - RNA, 19 nt, Artificial Sequence
  Description of Artificial Sequence: Synthetic oligonucleotide
ucugaaggauacgagaagg

SEQ ID NO: 1555787 - RNA, 19 nt, Artificial Sequence
  Description of Artificial Sequence: Synthetic oligonucleotide
agucauagcggaugguucc

SEQ ID NO: 1555788 - RNA, 19 nt, Artificial Sequence
  Description of Artificial Sequence: Synthetic oligonucleotide
caaguagagguccagauac

SEQ ID NO: 1555789 - RNA, 19 nt, Artificial Sequence
  Description of Artificial Sequence: Synthetic oligonucleotide
ucaugggcacaauauaccg

SEQ ID NO: 1555790 - RNA, 19 nt, Artificial Sequence
  Description of Artificial Sequence: Synthetic oligonucleotide
uccaccguaaucaugggca

SEQ ID NO: 1555791 - RNA, 19 nt, Artificial Sequence
  Description of Artificial Sequence: Synthetic oligonucleotide
cauuauagggauacagagg

SEQ ID NO: 1555792 - RNA, 19 nt, Artificial Sequence
  Description of Artificial Sequence: Synthetic oligonucleotide
aaggauacgagaaggagug

SEQ ID NO: 1555793 - RNA, 19 nt, Artificial Sequence
  Description of Artificial Sequence: Synthetic oligonucleotide
auacgagaaggagugaugc

SEQ ID NO: 1555794 - RNA, 19 nt, Artificial Sequence
  Description of Artificial Sequence: Synthetic oligonucleotide
gauacagacuacuuuccgc

SEQ ID NO: 1555795 - RNA, 19 nt, Artificial Sequence
  Description of Artificial Sequence: Synthetic oligonucleotide
auugucuccccucucaaag

SEQ ID NO: 1555796 - RNA, 19 nt, Artificial Sequence
  Description of Artificial Sequence: Synthetic oligonucleotide
auuuccuccgggcuaaagg

SEQ ID NO: 1555797 - RNA, 19 nt, Artificial Sequence
  Description of Artificial Sequence: Synthetic oligonucleotide
uuaauggcuuuauugacuc

SEQ ID NO: 1555798 - RNA, 19 nt, Artificial Sequence
  Description of Artificial Sequence: Synthetic oligonucleotide
uauagggauacagagggug

SEQ ID NO: 1555799 - RNA, 19 nt, Artificial Sequence
  Description of Artificial Sequence: Synthetic oligonucleotide
aaucugucgacuguugaag

SEQ ID NO: 1555800 - RNA, 19 nt, Artificial Sequence
  Description of Artificial Sequence: Synthetic oligonucleotide
ucugagcaagaucugagcu

SEQ ID NO: 1555801 - RNA, 19 nt, Artificial Sequence
  Description of Artificial Sequence: Synthetic oligonucleotide
aaccucaccucacagcgag

SEQ ID NO: 1555802 - RNA, 19 nt, Artificial Sequence
  Description of Artificial Sequence: Synthetic oligonucleotide
agaauugagcucugcacuc

SEQ ID NO: 1555803 - RNA, 19 nt, Artificial Sequence
  Description of Artificial Sequence: Synthetic oligonucleotide
auagcggaugguuccaucg

SEQ ID NO: 1555804 - RNA, 19 nt, Artificial Sequence
  Description of Artificial Sequence: Synthetic oligonucleotide
uccagaaucacgcgcagga

SEQ ID NO: 1555805 - RNA, 19 nt, Artificial Sequence
  Description of Artificial Sequence: Synthetic oligonucleotide
aauggauugucuccccucu

SEQ ID NO: 1555806 - RNA, 19 nt, Artificial Sequence
  Description of Artificial Sequence: Synthetic oligonucleotide
gacuacuuuccgcugaacc

SEQ ID NO: 1555807 - RNA, 19 nt, Artificial Sequence
  Description of Artificial Sequence: Synthetic oligonucleotide
auacagacuacuuuccgcu

SEQ ID NO: 1555808 - RNA, 19 nt, Artificial Sequence
  Description of Artificial Sequence: Synthetic oligonucleotide
uaggccucggcuuaagucc

SEQ ID NO: 1555809 - RNA, 19 nt, Artificial Sequence
  Description of Artificial Sequence: Synthetic oligonucleotide
uacacuaagggcauauuua

SEQ ID NO: 1555810 - RNA, 19 nt, Artificial Sequence
  Description of Artificial Sequence: Synthetic oligonucleotide
guauggauggcauuccacc

SEQ ID NO: 1555811 - RNA, 19 nt, Artificial Sequence
  Description of Artificial Sequence: Synthetic oligonucleotide
gcuauaagcagucaccucc

SEQ ID NO: 1555812 - RNA, 19 nt, Artificial Sequence
  Description of Artificial Sequence: Synthetic oligonucleotide
ugggaaauggauugucucc

SEQ ID NO: 1555813 - RNA, 19 nt, Artificial Sequence
  Description of Artificial Sequence: Synthetic oligonucleotide
ugaaggauacgagaaggag

SEQ ID NO: 1555814 - RNA, 19 nt, Artificial Sequence
  Description of Artificial Sequence: Synthetic oligonucleotide
ucauuuugagccagguaug

SEQ ID NO: 1555815 - RNA, 19 nt, Artificial Sequence
  Description of Artificial Sequence: Synthetic oligonucleotide
ugucgacuguugaaguugg

SEQ ID NO: 1555816 - RNA, 19 nt, Artificial Sequence
  Description of Artificial Sequence: Synthetic oligonucleotide
aauauaccgccaauguuug

SEQ ID NO: 1555817 - RNA, 19 nt, Artificial Sequence
  Description of Artificial Sequence: Synthetic oligonucleotide
uggcucaucaggauggcgc

SEQ ID NO: 1555818 - RNA, 19 nt, Artificial Sequence
  Description of Artificial Sequence: Synthetic oligonucleotide
agauacuccagcuggagau

SEQ ID NO: 1555819 - RNA, 19 nt, Artificial Sequence
  Description of Artificial Sequence: Synthetic oligonucleotide
ugcuugacaaugagcaaug

SEQ ID NO: 1555820 - RNA, 19 nt, Artificial Sequence
  Description of Artificial Sequence: Synthetic oligonucleotide
uaugggucauuauagggau

SEQ ID NO: 1555821 - RNA, 19 nt, Artificial Sequence
  Description of Artificial Sequence: Synthetic oligonucleotide
auggcauuccaccugcaag

SEQ ID NO: 1555822 - RNA, 19 nt, Artificial Sequence
  Description of Artificial Sequence: Synthetic oligonucleotide
accaaucagaggcaucuuc

SEQ ID NO: 1555823 - RNA, 19 nt, Artificial Sequence
  Description of Artificial Sequence: Synthetic oligonucleotide
agacaaugugcucagaauu

SEQ ID NO: 1555824 - RNA, 19 nt, Artificial Sequence
  Description of Artificial Sequence: Synthetic oligonucleotide
uuuccuccgggcuaaaggu

SEQ ID NO: 1555825 - RNA, 19 nt, Artificial Sequence
  Description of Artificial Sequence: Synthetic oligonucleotide
aggggcuauaagcagucac

SEQ ID NO: 1555826 - RNA, 19 nt, Artificial Sequence
  Description of Artificial Sequence: Synthetic oligonucleotide
ucggccaugcuucucagcu

SEQ ID NO: 1555827 - RNA, 19 nt, Artificial Sequence
  Description of Artificial Sequence: Synthetic oligonucleotide
cagaaucacgcgcaggacg

SEQ ID NO: 1555828 - RNA, 19 nt, Artificial Sequence
  Description of Artificial Sequence: Synthetic oligonucleotide
gacaaugugcucagaauug

SEQ ID NO: 1555829 - RNA, 19 nt, Artificial Sequence
  Description of Artificial Sequence: Synthetic oligonucleotide
ucaaucugucgacuguuga

SEQ ID NO: 1555830 - RNA, 19 nt, Artificial Sequence
  Description of Artificial Sequence: Synthetic oligonucleotide
aacacuaugcaggcaagca

SEQ ID NO: 1555831 - RNA, 19 nt, Artificial Sequence
  Description of Artificial Sequence: Synthetic oligonucleotide
caaacagcuccucucgagg

SEQ ID NO: 1555832 - RNA, 19 nt, Artificial Sequence
  Description of Artificial Sequence: Synthetic oligonucleotide
uggguugagucauagcgga

SEQ ID NO: 1555833 - RNA, 19 nt, Artificial Sequence
  Description of Artificial Sequence: Synthetic oligonucleotide
aaucacgcgcaggacggcc

SEQ ID NO: 1555834 - RNA, 19 nt, Artificial Sequence
  Description of Artificial Sequence: Synthetic oligonucleotide
auccaccguaaucaugggc

SEQ ID NO: 1555835 - RNA, 19 nt, Artificial Sequence
  Description of Artificial Sequence: Synthetic oligonucleotide
acaaacagcuccucucgag

SEQ ID NO: 1555836 - RNA, 19 nt, Artificial Sequence
  Description of Artificial Sequence: Synthetic oligonucleotide
agaaacuauggccucagua

SEQ ID NO: 1555837 - RNA, 19 nt, Artificial Sequence
  Description of Artificial Sequence: Synthetic oligonucleotide
cuuggaugucacaaacagc

SEQ ID NO: 1555838 - RNA, 19 nt, Artificial Sequence
  Description of Artificial Sequence: Synthetic oligonucleotide
ugucuccccucucaaaggc

SEQ ID NO: 1555839 - RNA, 19 nt, Artificial Sequence
  Description of Artificial Sequence: Synthetic oligonucleotide
acacuaagggcauauuuaa

SEQ ID NO: 1555840 - RNA, 19 nt, Artificial Sequence
  Description of Artificial Sequence: Synthetic oligonucleotide
ggaugucacaaacagcucc

SEQ ID NO: 1555841 - RNA, 19 nt, Artificial Sequence
  Description of Artificial Sequence: Synthetic oligonucleotide
uuggacaagcccaaggcuu

SEQ ID NO: 1555842 - RNA, 19 nt, Artificial Sequence
  Description of Artificial Sequence: Synthetic oligonucleotide
ucuucgaugggucgggguc

SEQ ID NO: 1555843 - RNA, 19 nt, Artificial Sequence
  Description of Artificial Sequence: Synthetic oligonucleotide
caguaugggucauuauagg

SEQ ID NO: 1555844 - RNA, 19 nt, Artificial Sequence
  Description of Artificial Sequence: Synthetic oligonucleotide
ucuaaggguagcaggcaac

SEQ ID NO: 1555845 - RNA, 19 nt, Artificial Sequence
  Description of Artificial Sequence: Synthetic oligonucleotide
auaccgccaauguuuguuc

SEQ ID NO: 1555846 - RNA, 19 nt, Artificial Sequence
  Description of Artificial Sequence: Synthetic oligonucleotide
gagaaccucaccucacagc

SEQ ID NO: 1555847 - RNA, 19 nt, Artificial Sequence
  Description of Artificial Sequence: Synthetic oligonucleotide
agagaaccucaccucacag

SEQ ID NO: 1555848 - RNA, 19 nt, Artificial Sequence
  Description of Artificial Sequence: Synthetic oligonucleotide
cagcgagagucuucgaugg

SEQ ID NO: 1555849 - RNA, 19 nt, Artificial Sequence
  Description of Artificial Sequence: Synthetic oligonucleotide
cucggcuuaaguccgucgg

SEQ ID NO: 1555850 - RNA, 19 nt, Artificial Sequence
  Description of Artificial Sequence: Synthetic oligonucleotide
cauuuugagccagguaugg

SEQ ID NO: 1555851 - RNA, 19 nt, Artificial Sequence
  Description of Artificial Sequence: Synthetic oligonucleotide
agugcaucaaguagagguc

SEQ ID NO: 1555852 - RNA, 19 nt, Artificial Sequence
  Description of Artificial Sequence: Synthetic oligonucleotide
uagcaggcaacacuaugca

SEQ ID NO: 1555853 - RNA, 19 nt, Artificial Sequence
  Description of Artificial Sequence: Synthetic oligonucleotide
cccacauuuuccuucaggg

SEQ ID NO: 1555854 - RNA, 19 nt, Artificial Sequence
  Description of Artificial Sequence: Synthetic oligonucleotide
agaccaaucagaggcaucu

SEQ ID NO: 1555855 - RNA, 19 nt, Artificial Sequence
  Description of Artificial Sequence: Synthetic oligonucleotide
uuaaguccgucggugaaga

SEQ ID NO: 1555856 - RNA, 19 nt, Artificial Sequence
  Description of Artificial Sequence: Synthetic oligonucleotide
uccucaagcaagacuggcu

SEQ ID NO: 1555857 - RNA, 19 nt, Artificial Sequence
  Description of Artificial Sequence: Synthetic oligonucleotide
caucccucuucagagaacc

SEQ ID NO: 1555858 - RNA, 19 nt, Artificial Sequence
  Description of Artificial Sequence: Synthetic oligonucleotide
uuuggggauacagacuacu

SEQ ID NO: 1555859 - RNA, 19 nt, Artificial Sequence
  Description of Artificial Sequence: Synthetic oligonucleotide
ugcuucauuuccuccgggc

SEQ ID NO: 1555860 - RNA, 19 nt, Artificial Sequence
  Description of Artificial Sequence: Synthetic oligonucleotide
gauacgagaaggagugaug

SEQ ID NO: 1555861 - RNA, 19 nt, Artificial Sequence
  Description of Artificial Sequence: Synthetic oligonucleotide
acaauauaccgccaauguu

SEQ ID NO: 1555862 - RNA, 19 nt, Artificial Sequence
  Description of Artificial Sequence: Synthetic oligonucleotide
uucuaaggguagcaggcaa

SEQ ID NO: 1555863 - RNA, 19 nt, Artificial Sequence
  Description of Artificial Sequence: Synthetic oligonucleotide
ggucauuauagggauacag

SEQ ID NO: 1555864 - RNA, 19 nt, Artificial Sequence
  Description of Artificial Sequence: Synthetic oligonucleotide
agaggcaucuucuguccag

SEQ ID NO: 1555865 - RNA, 19 nt, Artificial Sequence
  Description of Artificial Sequence: Synthetic oligonucleotide
agcaagacuggcucaucag

SEQ ID NO: 1555866 - RNA, 19 nt, Artificial Sequence
  Description of Artificial Sequence: Synthetic oligonucleotide
uuuccgcugaaccugccau

SEQ ID NO: 1555867 - RNA, 19 nt, Artificial Sequence
  Description of Artificial Sequence: Synthetic oligonucleotide
cugcacuccaguacugagg

SEQ ID NO: 1555868 - RNA, 19 nt, Artificial Sequence
  Description of Artificial Sequence: Synthetic oligonucleotide
ugcaggcaagcaaaaggga

SEQ ID NO: 1555869 - RNA, 19 nt, Artificial Sequence
  Description of Artificial Sequence: Synthetic oligonucleotide
gauggcgccacgcacgauc

SEQ ID NO: 1555870 - RNA, 19 nt, Artificial Sequence
  Description of Artificial Sequence: Synthetic oligonucleotide
accugcaagacagcugggc

SEQ ID NO: 1555871 - RNA, 19 nt, Artificial Sequence
  Description of Artificial Sequence: Synthetic oligonucleotide
agggacuuugcacaucccu

SEQ ID NO: 1555872 - RNA, 19 nt, Artificial Sequence
  Description of Artificial Sequence: Synthetic oligonucleotide
cugcaagacagcugggcgc

SEQ ID NO: 1555873 - RNA, 19 nt, Artificial Sequence
  Description of Artificial Sequence: Synthetic oligonucleotide
acagacuacuuuccgcuga

SEQ ID NO: 1555874 - RNA, 19 nt, Artificial Sequence
  Description of Artificial Sequence: Synthetic oligonucleotide
uuguucagagcaucuaauu

SEQ ID NO: 1555875 - RNA, 19 nt, Artificial Sequence
  Description of Artificial Sequence: Synthetic oligonucleotide
cucgugcuugacaaugagc

SEQ ID NO: 1555876 - RNA, 19 nt, Artificial Sequence
  Description of Artificial Sequence: Synthetic oligonucleotide
cuuguaguggguugaguca

SEQ ID NO: 1555877 - RNA, 19 nt, Artificial Sequence
  Description of Artificial Sequence: Synthetic oligonucleotide
caggauggcgccacgcacg

SEQ ID NO: 1555878 - RNA, 19 nt, Artificial Sequence
  Description of Artificial Sequence: Synthetic oligonucleotide
caauauaccgccaauguuu

SEQ ID NO: 1555879 - RNA, 19 nt, Artificial Sequence
  Description of Artificial Sequence: Synthetic oligonucleotide
ucaggauggcgccacgcac

SEQ ID NO: 1555880 - RNA, 19 nt, Artificial Sequence
  Description of Artificial Sequence: Synthetic oligonucleotide
ugugcucagaauugagcuc

SEQ ID NO: 1555881 - RNA, 19 nt, Artificial Sequence
  Description of Artificial Sequence: Synthetic oligonucleotide
gaagccccaccccaaggag

SEQ ID NO: 1555882 - RNA, 19 nt, Artificial Sequence
  Description of Artificial Sequence: Synthetic oligonucleotide
aggguuacucuuccauguc

SEQ ID NO: 1555883 - RNA, 19 nt, Artificial Sequence
  Description of Artificial Sequence: Synthetic oligonucleotide
guggguugagucauagcgg

SEQ ID NO: 1555884 - RNA, 19 nt, Artificial Sequence
  Description of Artificial Sequence: Synthetic oligonucleotide
uguggcgguagccuacacu

SEQ ID NO: 1555885 - RNA, 19 nt, Artificial Sequence
  Description of Artificial Sequence: Synthetic oligonucleotide
uuauagggauacagagggu

SEQ ID NO: 1555886 - RNA, 19 nt, Artificial Sequence
  Description of Artificial Sequence: Synthetic oligonucleotide
gucauuauagggauacaga

SEQ ID NO: 1555887 - RNA, 19 nt, Artificial Sequence
  Description of Artificial Sequence: Synthetic oligonucleotide
uggugcuuaguguuccaca

SEQ ID NO: 1555888 - RNA, 19 nt, Artificial Sequence
  Description of Artificial Sequence: Synthetic oligonucleotide
cucaguaugggucauuaua

SEQ ID NO: 1555889 - RNA, 19 nt, Artificial Sequence
  Description of Artificial Sequence: Synthetic oligonucleotide
gacaaugagcaaugagcuc

SEQ ID NO: 1555890 - RNA, 19 nt, Artificial Sequence
  Description of Artificial Sequence: Synthetic oligonucleotide
uccugcgaagucguugagg

SEQ ID NO: 1555891 - RNA, 19 nt, Artificial Sequence
  Description of Artificial Sequence: Synthetic oligonucleotide
ugcaagacagcugggcgca

SEQ ID NO: 1555892 - RNA, 19 nt, Artificial Sequence
  Description of Artificial Sequence: Synthetic oligonucleotide
gaaggauacgagaaggagu

SEQ ID NO: 1555893 - RNA, 19 nt, Artificial Sequence
  Description of Artificial Sequence: Synthetic oligonucleotide
aucugucgacuguugaagu

SEQ ID NO: 1555894 - RNA, 19 nt, Artificial Sequence
  Description of Artificial Sequence: Synthetic oligonucleotide
aguccgucggugaagagga

SEQ ID NO: 1555895 - RNA, 19 nt, Artificial Sequence
  Description of Artificial Sequence: Synthetic oligonucleotide
ucgggguccccaaacugug

SEQ ID NO: 1555896 - RNA, 19 nt, Artificial Sequence
  Description of Artificial Sequence: Synthetic oligonucleotide
caagccucgugcuugacaa

SEQ ID NO: 1555897 - RNA, 19 nt, Artificial Sequence
  Description of Artificial Sequence: Synthetic oligonucleotide
cugucgacuguugaaguug

SEQ ID NO: 1555898 - RNA, 19 nt, Artificial Sequence
  Description of Artificial Sequence: Synthetic oligonucleotide
ucuacauccucaggguggu

SEQ ID NO: 1555899 - RNA, 19 nt, Artificial Sequence
  Description of Artificial Sequence: Synthetic oligonucleotide
cacuaugcaggcaagcaaa

SEQ ID NO: 1555900 - RNA, 19 nt, Artificial Sequence
  Description of Artificial Sequence: Synthetic oligonucleotide
augcgcacaggcgacgugg

SEQ ID NO: 1555901 - RNA, 19 nt, Artificial Sequence
  Description of Artificial Sequence: Synthetic oligonucleotide
uuccuccgggcuaaaggug

SEQ ID NO: 1555902 - RNA, 19 nt, Artificial Sequence
  Description of Artificial Sequence: Synthetic oligonucleotide
uacgagaaggagugaugcu

SEQ ID NO: 1555903 - RNA, 19 nt, Artificial Sequence
  Description of Artificial Sequence: Synthetic oligonucleotide
cucagaauugagcucugca

SEQ ID NO: 1555904 - RNA, 19 nt, Artificial Sequence
  Description of Artificial Sequence: Synthetic oligonucleotide
aacugugcaugcgcacagg

SEQ ID NO: 1555905 - RNA, 19 nt, Artificial Sequence
  Description of Artificial Sequence: Synthetic oligonucleotide
agcaaugagcucauuuuga

SEQ ID NO: 1555906 - RNA, 19 nt, Artificial Sequence
  Description of Artificial Sequence: Synthetic oligonucleotide
uccgucggugaagaggaag

SEQ ID NO: 1555907 - RNA, 19 nt, Artificial Sequence
  Description of Artificial Sequence: Synthetic oligonucleotide
gaaccugccaucugagcaa

SEQ ID NO: 1555908 - RNA, 19 nt, Artificial Sequence
  Description of Artificial Sequence: Synthetic oligonucleotide
agcaagaucugagcuggag

SEQ ID NO: 1555909 - RNA, 19 nt, Artificial Sequence
  Description of Artificial Sequence: Synthetic oligonucleotide
ucaucaggauggcgccacg

SEQ ID NO: 1555910 - RNA, 19 nt, Artificial Sequence
  Description of Artificial Sequence: Synthetic oligonucleotide
uuccucaagcaagacuggc

SEQ ID NO: 1555911 - RNA, 19 nt, Artificial Sequence
  Description of Artificial Sequence: Synthetic oligonucleotide
gugcaucaaguagaggucc

SEQ ID NO: 1555912 - RNA, 19 nt, Artificial Sequence
  Description of Artificial Sequence: Synthetic oligonucleotide
uuguaguggguugagucau

SEQ ID NO: 1555913 - RNA, 19 nt, Artificial Sequence
  Description of Artificial Sequence: Synthetic oligonucleotide
gagucuucgaugggucggg

SEQ ID NO: 1555914 - RNA, 19 nt, Artificial Sequence
  Description of Artificial Sequence: Synthetic oligonucleotide
aucggccaugcuucucagc

SEQ ID NO: 1555915 - RNA, 19 nt, Artificial Sequence
  Description of Artificial Sequence: Synthetic oligonucleotide
uucauuuccuccgggcuaa

SEQ ID NO: 1555916 - RNA, 19 nt, Artificial Sequence
  Description of Artificial Sequence: Synthetic oligonucleotide
cuccucucgaggcacugcc

SEQ ID NO: 1555917 - RNA, 19 nt, Artificial Sequence
  Description of Artificial Sequence: Synthetic oligonucleotide
agcagucaccuccaagccu

SEQ ID NO: 1555918 - RNA, 19 nt, Artificial Sequence
  Description of Artificial Sequence: Synthetic oligonucleotide
auggauugucuccccucuc

SEQ ID NO: 1555919 - RNA, 19 nt, Artificial Sequence
  Description of Artificial Sequence: Synthetic oligonucleotide
guaguggguugagucauag

SEQ ID NO: 1555920 - RNA, 19 nt, Artificial Sequence
  Description of Artificial Sequence: Synthetic oligonucleotide
ucugucgacuguugaaguu

SEQ ID NO: 1555921 - RNA, 19 nt, Artificial Sequence
  Description of Artificial Sequence: Synthetic oligonucleotide
augagcucauuuugagcca

SEQ ID NO: 1555922 - RNA, 19 nt, Artificial Sequence
  Description of Artificial Sequence: Synthetic oligonucleotide
ucggcuuaaguccgucggu

SEQ ID NO: 1555923 - RNA, 19 nt, Artificial Sequence
  Description of Artificial Sequence: Synthetic oligonucleotide
uggacaagcccaaggcuuu

SEQ ID NO: 1555924 - RNA, 19 nt, Artificial Sequence
  Description of Artificial Sequence: Synthetic oligonucleotide
uauaagcagucaccuccaa

SEQ ID NO: 1555925 - RNA, 19 nt, Artificial Sequence
  Description of Artificial Sequence: Synthetic oligonucleotide
uagccuacacuaagggcau

SEQ ID NO: 1555926 - RNA, 19 nt, Artificial Sequence
  Description of Artificial Sequence: Synthetic oligonucleotide
cuaugcaggcaagcaaaag

SEQ ID NO: 1555927 - RNA, 19 nt, Artificial Sequence
  Description of Artificial Sequence: Synthetic oligonucleotide
gagucauagcggaugguuc

SEQ ID NO: 1555928 - RNA, 19 nt, Artificial Sequence
  Description of Artificial Sequence: Synthetic oligonucleotide
agggcauauuuaauggcug

SEQ ID NO: 1555929 - RNA, 19 nt, Artificial Sequence
  Description of Artificial Sequence: Synthetic oligonucleotide
gguuacucuuccauguccc

SEQ ID NO: 1555930 - RNA, 19 nt, Artificial Sequence
  Description of Artificial Sequence: Synthetic oligonucleotide
uagcggaugguuccaucgu

SEQ ID NO: 1555931 - RNA, 19 nt, Artificial Sequence
  Description of Artificial Sequence: Synthetic oligonucleotide
guccccagaccaaucagag

SEQ ID NO: 1555932 - RNA, 19 nt, Artificial Sequence
  Description of Artificial Sequence: Synthetic oligonucleotide
ggcaacacuaugcaggcaa

SEQ ID NO: 1555933 - RNA, 19 nt, Artificial Sequence
  Description of Artificial Sequence: Synthetic oligonucleotide
gugccaagaccacugguuc

SEQ ID NO: 1555934 - RNA, 19 nt, Artificial Sequence
  Description of Artificial Sequence: Synthetic oligonucleotide
agcgagagucuucgauggg

SEQ ID NO: 1555935 - RNA, 19 nt, Artificial Sequence
  Description of Artificial Sequence: Synthetic oligonucleotide
uccccaaacugugcaugcg

SEQ ID NO: 1555936 - RNA, 19 nt, Artificial Sequence
  Description of Artificial Sequence: Synthetic oligonucleotide
agaaggagugaugcuuuug

SEQ ID NO: 1555937 - RNA, 19 nt, Artificial Sequence
  Description of Artificial Sequence: Synthetic oligonucleotide
ucgucauucuugggaaaug

SEQ ID NO: 1555938 - RNA, 19 nt, Artificial Sequence
  Description of Artificial Sequence: Synthetic oligonucleotide
uaccgccaauguuuguuca

SEQ ID NO: 1555939 - RNA, 19 nt, Artificial Sequence
  Description of Artificial Sequence: Synthetic oligonucleotide
acauccucaggguggugcu

SEQ ID NO: 1555940 - RNA, 19 nt, Artificial Sequence
  Description of Artificial Sequence: Synthetic oligonucleotide
uaguggguugagucauagc

SEQ ID NO: 1555941 - RNA, 19 nt, Artificial Sequence
  Description of Artificial Sequence: Synthetic oligonucleotide
auagggauacagagggugu

SEQ ID NO: 1555942 - RNA, 19 nt, Artificial Sequence
  Description of Artificial Sequence: Synthetic oligonucleotide
caaucugucgacuguugaa

SEQ ID NO: 1555943 - RNA, 19 nt, Artificial Sequence
  Description of Artificial Sequence: Synthetic oligonucleotide
cuucgaugggucggggucc

SEQ ID NO: 1555944 - RNA, 19 nt, Artificial Sequence
  Description of Artificial Sequence: Synthetic oligonucleotide
gucggugaagaggaagccc

SEQ ID NO: 1555945 - RNA, 19 nt, Artificial Sequence
  Description of Artificial Sequence: Synthetic oligonucleotide
ggcgguagccuacacuaag

SEQ ID NO: 1555946 - RNA, 19 nt, Artificial Sequence
  Description of Artificial Sequence: Synthetic oligonucleotide
cauccaccguaaucauggg

SEQ ID NO: 1555947 - RNA, 19 nt, Artificial Sequence
  Description of Artificial Sequence: Synthetic oligonucleotide
uuccaccugcaagacagcu

SEQ ID NO: 1555948 - RNA, 19 nt, Artificial Sequence
  Description of Artificial Sequence: Synthetic oligonucleotide
ggggcuauaagcagucacc

SEQ ID NO: 1555949 - RNA, 19 nt, Artificial Sequence
  Description of Artificial Sequence: Synthetic oligonucleotide
aucgucauucuugggaaau

SEQ ID NO: 1555950 - RNA, 19 nt, Artificial Sequence
  Description of Artificial Sequence: Synthetic oligonucleotide
gauugucuccccucucaaa

SEQ ID NO: 1555951 - RNA, 19 nt, Artificial Sequence
  Description of Artificial Sequence: Synthetic oligonucleotide
gauacuccagcuggagauc

SEQ ID NO: 1555952 - RNA, 19 nt, Artificial Sequence
  Description of Artificial Sequence: Synthetic oligonucleotide
agccuuccaggucuccuug

SEQ ID NO: 1555953 - RNA, 19 nt, Artificial Sequence
  Description of Artificial Sequence: Synthetic oligonucleotide
uagggauacagaggguguc

SEQ ID NO: 1555954 - RNA, 19 nt, Artificial Sequence
  Description of Artificial Sequence: Synthetic oligonucleotide
uggcuuuauugacucuuuu

SEQ ID NO: 1555955 - RNA, 19 nt, Artificial Sequence
  Description of Artificial Sequence: Synthetic oligonucleotide
cuaaggguagcaggcaaca

SEQ ID NO: 1555956 - RNA, 19 nt, Artificial Sequence
  Description of Artificial Sequence: Synthetic oligonucleotide
ugggcacaauauaccgcca

SEQ ID NO: 1555957 - RNA, 19 nt, Artificial Sequence
  Description of Artificial Sequence: Synthetic oligonucleotide
uaaguccgucggugaagag

SEQ ID NO: 1555958 - RNA, 19 nt, Artificial Sequence
  Description of Artificial Sequence: Synthetic oligonucleotide
cauagcggaugguuccauc

SEQ ID NO: 1555959 - RNA, 19 nt, Artificial Sequence
  Description of Artificial Sequence: Synthetic oligonucleotide
gaucugagcuggagaucgg

SEQ ID NO: 1555960 - RNA, 19 nt, Artificial Sequence
  Description of Artificial Sequence: Synthetic oligonucleotide
gcacaauauaccgccaaug

SEQ ID NO: 1555961 - RNA, 19 nt, Artificial Sequence
  Description of Artificial Sequence: Synthetic oligonucleotide
aggguagcaggcaacacua

SEQ ID NO: 1555962 - RNA, 19 nt, Artificial Sequence
  Description of Artificial Sequence: Synthetic oligonucleotide
auauaccgccaauguuugu

SEQ ID NO: 1555963 - RNA, 19 nt, Artificial Sequence
  Description of Artificial Sequence: Synthetic oligonucleotide
ccgucggugaagaggaagc

SEQ ID NO: 1555964 - RNA, 19 nt, Artificial Sequence
  Description of Artificial Sequence: Synthetic oligonucleotide
ggauacagaggguguccag

SEQ ID NO: 1555965 - RNA, 19 nt, Artificial Sequence
  Description of Artificial Sequence: Synthetic oligonucleotide
caucaggauggcgccacgc

SEQ ID NO: 1555966 - RNA, 19 nt, Artificial Sequence
  Description of Artificial Sequence: Synthetic oligonucleotide
aggauggcgccacgcacga

SEQ ID NO: 1555967 - RNA, 19 nt, Artificial Sequence
  Description of Artificial Sequence: Synthetic oligonucleotide
acaucccucuucagagaac

SEQ ID NO: 1555968 - RNA, 19 nt, Artificial Sequence
  Description of Artificial Sequence: Synthetic oligonucleotide
ugcgcacaggcgacgugga

SEQ ID NO: 1555969 - RNA, 19 nt, Artificial Sequence
  Description of Artificial Sequence: Synthetic oligonucleotide
agcuuggaugucacaaaca

SEQ ID NO: 1555970 - RNA, 19 nt, Artificial Sequence
  Description of Artificial Sequence: Synthetic oligonucleotide
acgcacgaucugaggagcc

SEQ ID NO: 1555971 - RNA, 19 nt, Artificial Sequence
  Description of Artificial Sequence: Synthetic oligonucleotide
uuccgcugaaccugccauc

SEQ ID NO: 1555972 - RNA, 19 nt, Artificial Sequence
  Description of Artificial Sequence: Synthetic oligonucleotide
uucaccuggccaggguuac

SEQ ID NO: 1555973 - RNA, 19 nt, Artificial Sequence
  Description of Artificial Sequence: Synthetic oligonucleotide
caaaggcauaaggccagug

SEQ ID NO: 1555974 - RNA, 19 nt, Artificial Sequence
  Description of Artificial Sequence: Synthetic oligonucleotide
auguggcgguagccuacac

SEQ ID NO: 1555975 - RNA, 19 nt, Artificial Sequence
  Description of Artificial Sequence: Synthetic oligonucleotide
cagaccaaucagaggcauc

SEQ ID NO: 1555976 - RNA, 19 nt, Artificial Sequence
  Description of Artificial Sequence: Synthetic oligonucleotide
ccagguauggauggcauuc

SEQ ID NO: 1555977 - RNA, 19 nt, Artificial Sequence
  Description of Artificial Sequence: Synthetic oligonucleotide
cagagaaccucaccucaca

SEQ ID NO: 1555978 - RNA, 19 nt, Artificial Sequence
  Description of Artificial Sequence: Synthetic oligonucleotide
uucgaugggucgggguccc

SEQ ID NO: 1555979 - RNA, 19 nt, Artificial Sequence
  Description of Artificial Sequence: Synthetic oligonucleotide
cuacacuaagggcauauuu

SEQ ID NO: 1555980 - RNA, 19 nt, Artificial Sequence
  Description of Artificial Sequence: Synthetic oligonucleotide
cuggcucaucaggauggcg

SEQ ID NO: 1555981 - RNA, 19 nt, Artificial Sequence
  Description of Artificial Sequence: Synthetic oligonucleotide
ggaagccccaccccaagga

SEQ ID NO: 1555982 - RNA, 19 nt, Artificial Sequence
  Description of Artificial Sequence: Synthetic oligonucleotide
gccacgcacgaucugagga

SEQ ID NO: 1555983 - RNA, 19 nt, Artificial Sequence
  Description of Artificial Sequence: Synthetic oligonucleotide
aaggggcuauaagcaguca

SEQ ID NO: 1555984 - RNA, 19 nt, Artificial Sequence
  Description of Artificial Sequence: Synthetic oligonucleotide
agcagggacuuugcacauc

SEQ ID NO: 1555985 - RNA, 19 nt, Artificial Sequence
  Description of Artificial Sequence: Synthetic oligonucleotide
cgucauucuugggaaaugg

SEQ ID NO: 1555986 - RNA, 19 nt, Artificial Sequence
  Description of Artificial Sequence: Synthetic oligonucleotide
cuuuccgcugaaccugcca

SEQ ID NO: 1555987 - RNA, 19 nt, Artificial Sequence
  Description of Artificial Sequence: Synthetic oligonucleotide
gcgguagccuacacuaagg

SEQ ID NO: 1555988 - RNA, 19 nt, Artificial Sequence
  Description of Artificial Sequence: Synthetic oligonucleotide
gcuuccagaaucacgcgca

SEQ ID NO: 1555989 - RNA, 19 nt, Artificial Sequence
  Description of Artificial Sequence: Synthetic oligonucleotide
agugaugcuuuuggggaua

SEQ ID NO: 1555990 - RNA, 19 nt, Artificial Sequence
  Description of Artificial Sequence: Synthetic oligonucleotide
cauaaggccagugcaucaa

SEQ ID NO: 1555991 - RNA, 19 nt, Artificial Sequence
  Description of Artificial Sequence: Synthetic oligonucleotide
caagaccacugguuccuca

SEQ ID NO: 1555992 - RNA, 19 nt, Artificial Sequence
  Description of Artificial Sequence: Synthetic oligonucleotide
gaaucacgcgcaggacggc

SEQ ID NO: 1555993 - RNA, 19 nt, Artificial Sequence
  Description of Artificial Sequence: Synthetic oligonucleotide
uggcgguagccuacacuaa

SEQ ID NO: 1555994 - RNA, 19 nt, Artificial Sequence
  Description of Artificial Sequence: Synthetic oligonucleotide
gggacuuugcacaucccuc

SEQ ID NO: 1555995 - RNA, 19 nt, Artificial Sequence
  Description of Artificial Sequence: Synthetic oligonucleotide
cagcuagugccaagaccac

SEQ ID NO: 1555996 - RNA, 19 nt, Artificial Sequence
  Description of Artificial Sequence: Synthetic oligonucleotide
ggacuuugcacaucccucu

SEQ ID NO: 1555997 - RNA, 19 nt, Artificial Sequence
  Description of Artificial Sequence: Synthetic oligonucleotide
caccugcaagacagcuggg

SEQ ID NO: 1555998 - RNA, 19 nt, Artificial Sequence
  Description of Artificial Sequence: Synthetic oligonucleotide
cgacuguugaaguuggaca

SEQ ID NO: 1555999 - RNA, 19 nt, Artificial Sequence
  Description of Artificial Sequence: Synthetic oligonucleotide
gcauaaggccagugcauca

SEQ ID NO: 1556000 - RNA, 19 nt, Artificial Sequence
  Description of Artificial Sequence: Synthetic oligonucleotide
gaugggucgggguccccaa

SEQ ID NO: 1556001 - RNA, 19 nt, Artificial Sequence
  Description of Artificial Sequence: Synthetic oligonucleotide
cgguagccuacacuaaggg

SEQ ID NO: 1556002 - RNA, 19 nt, Artificial Sequence
  Description of Artificial Sequence: Synthetic oligonucleotide
ggcuauaagcagucaccuc

SEQ ID NO: 1556003 - RNA, 19 nt, Artificial Sequence
  Description of Artificial Sequence: Synthetic oligonucleotide
cuggagaucggccaugcuu

SEQ ID NO: 1556004 - RNA, 19 nt, Artificial Sequence
  Description of Artificial Sequence: Synthetic oligonucleotide
guggugcuuaguguuccac

SEQ ID NO: 1556005 - RNA, 19 nt, Artificial Sequence
  Description of Artificial Sequence: Synthetic oligonucleotide
ucacagcgagagucuucga

SEQ ID NO: 1556006 - RNA, 19 nt, Artificial Sequence
  Description of Artificial Sequence: Synthetic oligonucleotide
ggccacacugaggauauca

SEQ ID NO: 1556007 - RNA, 19 nt, Artificial Sequence
  Description of Artificial Sequence: Synthetic oligonucleotide
gcaggcaagcaaaagggaa

SEQ ID NO: 1556008 - RNA, 19 nt, Artificial Sequence
  Description of Artificial Sequence: Synthetic oligonucleotide
gagcgcaggccguggagaa

SEQ ID NO: 1556009 - RNA, 19 nt, Artificial Sequence
  Description of Artificial Sequence: Synthetic oligonucleotide
gagcuggagaucggccaug

SEQ ID NO: 1556010 - RNA, 19 nt, Artificial Sequence
  Description of Artificial Sequence: Synthetic oligonucleotide
aggcgcuaggccucggcuu

SEQ ID NO: 1556011 - RNA, 19 nt, Artificial Sequence
  Description of Artificial Sequence: Synthetic oligonucleotide
cagacuacuuuccgcugaa

SEQ ID NO: 1556012 - RNA, 19 nt, Artificial Sequence
  Description of Artificial Sequence: Synthetic oligonucleotide
caugcgcacaggcgacgug

SEQ ID NO: 1556013 - RNA, 19 nt, Artificial Sequence
  Description of Artificial Sequence: Synthetic oligonucleotide
gcuucauuuccuccgggcu

SEQ ID NO: 1556014 - RNA, 19 nt, Artificial Sequence
  Description of Artificial Sequence: Synthetic oligonucleotide
guccugcgaagucguugag

SEQ ID NO: 1556015 - RNA, 19 nt, Artificial Sequence
  Description of Artificial Sequence: Synthetic oligonucleotide
ccucgugcuugacaaugag

SEQ ID NO: 1556016 - RNA, 19 nt, Artificial Sequence
  Description of Artificial Sequence: Synthetic oligonucleotide
cugguuccucaagcaagac

SEQ ID NO: 1556017 - RNA, 19 nt, Artificial Sequence
  Description of Artificial Sequence: Synthetic oligonucleotide
aggauacgagaaggaguga

SEQ ID NO: 1556018 - RNA, 19 nt, Artificial Sequence
  Description of Artificial Sequence: Synthetic oligonucleotide
caucgucauucuugggaaa

SEQ ID NO: 1556019 - RNA, 19 nt, Artificial Sequence
  Description of Artificial Sequence: Synthetic oligonucleotide
cagaggcaucuucugucca

SEQ ID NO: 1556020 - RNA, 19 nt, Artificial Sequence
  Description of Artificial Sequence: Synthetic oligonucleotide
acgcgcaggacggccuagg

SEQ ID NO: 1556021 - RNA, 19 nt, Artificial Sequence
  Description of Artificial Sequence: Synthetic oligonucleotide
ggauugucuccccucucaa

SEQ ID NO: 1556022 - RNA, 19 nt, Artificial Sequence
  Description of Artificial Sequence: Synthetic oligonucleotide
ccaccguaaucaugggcac

SEQ ID NO: 1556023 - RNA, 19 nt, Artificial Sequence
  Description of Artificial Sequence: Synthetic oligonucleotide
gccuggucccacauuuucc

SEQ ID NO: 1556024 - RNA, 19 nt, Artificial Sequence
  Description of Artificial Sequence: Synthetic oligonucleotide
aucacgcgcaggacggccu

SEQ ID NO: 1556025 - RNA, 19 nt, Artificial Sequence
  Description of Artificial Sequence: Synthetic oligonucleotide
gggcacaauauaccgccaa

SEQ ID NO: 1556026 - RNA, 19 nt, Artificial Sequence
  Description of Artificial Sequence: Synthetic oligonucleotide
gagaaacuauggccucagu

SEQ ID NO: 1556027 - RNA, 19 nt, Artificial Sequence
  Description of Artificial Sequence: Synthetic oligonucleotide
ggcauuccaccugcaagac

SEQ ID NO: 1556028 - RNA, 19 nt, Artificial Sequence
  Description of Artificial Sequence: Synthetic oligonucleotide
cacuaagggcauauuuaau

SEQ ID NO: 1556029 - RNA, 19 nt, Artificial Sequence
  Description of Artificial Sequence: Synthetic oligonucleotide
gagaucggccaugcuucuc

SEQ ID NO: 1556030 - RNA, 19 nt, Artificial Sequence
  Description of Artificial Sequence: Synthetic oligonucleotide
ggauacgagaaggagugau

SEQ ID NO: 1556031 - RNA, 19 nt, Artificial Sequence
  Description of Artificial Sequence: Synthetic oligonucleotide
ccgggcuaaaggugaaauc

SEQ ID NO: 1556032 - RNA, 19 nt, Artificial Sequence
  Description of Artificial Sequence: Synthetic oligonucleotide
agcgcaggccguggagaag

SEQ ID NO: 1556033 - RNA, 19 nt, Artificial Sequence
  Description of Artificial Sequence: Synthetic oligonucleotide
gggauacagagggugucca

SEQ ID NO: 1556034 - RNA, 19 nt, Artificial Sequence
  Description of Artificial Sequence: Synthetic oligonucleotide
gagaaggagugaugcuuuu

SEQ ID NO: 1556035 - RNA, 19 nt, Artificial Sequence
  Description of Artificial Sequence: Synthetic oligonucleotide
cugggcgcacagaggccac

SEQ ID NO: 1556036 - RNA, 19 nt, Artificial Sequence
  Description of Artificial Sequence: Synthetic oligonucleotide
cacgaucugaggagcccaa

SEQ ID NO: 1556037 - RNA, 19 nt, Artificial Sequence
  Description of Artificial Sequence: Synthetic oligonucleotide
gucgggguccccaaacugu

SEQ ID NO: 1556038 - RNA, 19 nt, Artificial Sequence
  Description of Artificial Sequence: Synthetic oligonucleotide
gacuuugcacaucccucuu

SEQ ID NO: 1556039 - RNA, 19 nt, Artificial Sequence
  Description of Artificial Sequence: Synthetic oligonucleotide
gcauuccaccugcaagaca

SEQ ID NO: 1556040 - RNA, 19 nt, Artificial Sequence
  Description of Artificial Sequence: Synthetic oligonucleotide
gcucauuuugagccaggua

SEQ ID NO: 1556041 - RNA, 19 nt, Artificial Sequence
  Description of Artificial Sequence: Synthetic oligonucleotide
gggcuauaagcagucaccu

SEQ ID NO: 1556042 - RNA, 19 nt, Artificial Sequence
  Description of Artificial Sequence: Synthetic oligonucleotide
gcucagaauugagcucugc

SEQ ID NO: 1556043 - RNA, 19 nt, Artificial Sequence
  Description of Artificial Sequence: Synthetic oligonucleotide
augggucgggguccccaaa

SEQ ID NO: 1556044 - RNA, 19 nt, Artificial Sequence
  Description of Artificial Sequence: Synthetic oligonucleotide
ggcgccacgcacgaucuga

SEQ ID NO: 1556045 - RNA, 19 nt, Artificial Sequence
  Description of Artificial Sequence: Synthetic oligonucleotide
aggcaacacuaugcaggca

SEQ ID NO: 1556046 - RNA, 19 nt, Artificial Sequence
  Description of Artificial Sequence: Synthetic oligonucleotide
ggcacaauauaccgccaau

SEQ ID NO: 1556047 - RNA, 19 nt, Artificial Sequence
  Description of Artificial Sequence: Synthetic oligonucleotide
ccucacagcgagagucuuc

SEQ ID NO: 1556048 - RNA, 19 nt, Artificial Sequence
  Description of Artificial Sequence: Synthetic oligonucleotide
ucauuuccuccgggcuaaa

SEQ ID NO: 1556049 - RNA, 19 nt, Artificial Sequence
  Description of Artificial Sequence: Synthetic oligonucleotide
ggcgcuaggccucggcuua

SEQ ID NO: 1556050 - RNA, 19 nt, Artificial Sequence
  Description of Artificial Sequence: Synthetic oligonucleotide
cguaaucaugggcacaaua

SEQ ID NO: 1556051 - RNA, 19 nt, Artificial Sequence
  Description of Artificial Sequence: Synthetic oligonucleotide
gcuugacaaugagcaauga

SEQ ID NO: 1556052 - RNA, 19 nt, Artificial Sequence
  Description of Artificial Sequence: Synthetic oligonucleotide
augggucauuauagggaua

SEQ ID NO: 1556053 - RNA, 19 nt, Artificial Sequence
  Description of Artificial Sequence: Synthetic oligonucleotide
gcgcaggccguggagaaga

SEQ ID NO: 1556054 - RNA, 19 nt, Artificial Sequence
  Description of Artificial Sequence: Synthetic oligonucleotide
gucgacuguugaaguugga

SEQ ID NO: 1556055 - RNA, 19 nt, Artificial Sequence
  Description of Artificial Sequence: Synthetic oligonucleotide
cacgcgcaggacggccuag

SEQ ID NO: 1556056 - RNA, 19 nt, Artificial Sequence
  Description of Artificial Sequence: Synthetic oligonucleotide
gccucaguaugggucauua

SEQ ID NO: 1556057 - RNA, 19 nt, Artificial Sequence
  Description of Artificial Sequence: Synthetic oligonucleotide
cccgcuguccugcgaaguc

SEQ ID NO: 1556058 - RNA, 19 nt, Artificial Sequence
  Description of Artificial Sequence: Synthetic oligonucleotide
gcgagagucuucgaugggu

SEQ ID NO: 1556059 - RNA, 19 nt, Artificial Sequence
  Description of Artificial Sequence: Synthetic oligonucleotide
gccaagaccacugguuccu

SEQ ID NO: 1556060 - RNA, 19 nt, Artificial Sequence
  Description of Artificial Sequence: Synthetic oligonucleotide
gggucauuauagggauaca

SEQ ID NO: 1556061 - RNA, 19 nt, Artificial Sequence
  Description of Artificial Sequence: Synthetic oligonucleotide
cggcuuaaguccgucggug

SEQ ID NO: 1556062 - RNA, 19 nt, Artificial Sequence
  Description of Artificial Sequence: Synthetic oligonucleotide
cucaccucacagcgagagu

SEQ ID NO: 1556063 - RNA, 19 nt, Artificial Sequence
  Description of Artificial Sequence: Synthetic oligonucleotide
cgcacgaucugaggagccc

SEQ ID NO: 1556064 - RNA, 19 nt, Artificial Sequence
  Description of Artificial Sequence: Synthetic oligonucleotide
gccucgugcuugacaauga

SEQ ID NO: 1556065 - RNA, 19 nt, Artificial Sequence
  Description of Artificial Sequence: Synthetic oligonucleotide
cgccacgcacgaucugagg

SEQ ID NO: 1556066 - RNA, 19 nt, Artificial Sequence
  Description of Artificial Sequence: Synthetic oligonucleotide
gcaggacggccuaggcccc

SEQ ID NO: 1556067 - RNA, 19 nt, Artificial Sequence
  Description of Artificial Sequence: Synthetic oligonucleotide
ccccucucaaaggcauaag

SEQ ID NO: 1556068 - RNA, 19 nt, Artificial Sequence
  Description of Artificial Sequence: Synthetic oligonucleotide
cgugcuugacaaugagcaa

SEQ ID NO: 1556069 - RNA, 19 nt, Artificial Sequence
  Description of Artificial Sequence: Synthetic oligonucleotide
gcuaggccucggcuuaagu

SEQ ID NO: 1556070 - RNA, 19 nt, Artificial Sequence
  Description of Artificial Sequence: Synthetic oligonucleotide
gggucgggguccccaaacu

SEQ ID NO: 1556071 - RNA, 19 nt, Artificial Sequence
  Description of Artificial Sequence: Synthetic oligonucleotide
gccuacacuaagggcauau

SEQ ID NO: 1556072 - RNA, 19 nt, Artificial Sequence
  Description of Artificial Sequence: Synthetic oligonucleotide
ggagcccaaggggcuauaa

SEQ ID NO: 1556073 - RNA, 19 nt, Artificial Sequence
  Description of Artificial Sequence: Synthetic oligonucleotide
agccuacacuaagggcaua

SEQ ID NO: 1556074 - RNA, 19 nt, Artificial Sequence
  Description of Artificial Sequence: Synthetic oligonucleotide
ccaagaccacugguuccuc

SEQ ID NO: 1556075 - RNA, 19 nt, Artificial Sequence
  Description of Artificial Sequence: Synthetic oligonucleotide
gccccggcuuccagaauca

SEQ ID NO: 1556076 - RNA, 19 nt, Artificial Sequence
  Description of Artificial Sequence: Synthetic oligonucleotide
ccgcugaaccugccaucug

SEQ ID NO: 1556077 - RNA, 19 nt, Artificial Sequence
  Description of Artificial Sequence: Synthetic oligonucleotide
gccagguauggauggcauu

SEQ ID NO: 1556078 - RNA, 19 nt, Artificial Sequence
  Description of Artificial Sequence: Synthetic oligonucleotide
gcaagacagcugggcgcac

SEQ ID NO: 1556079 - RNA, 19 nt, Artificial Sequence
  Description of Artificial Sequence: Synthetic oligonucleotide
ggcgcacagaggccacacu

SEQ ID NO: 1556080 - RNA, 19 nt, Artificial Sequence
  Description of Artificial Sequence: Synthetic oligonucleotide
gcaugcgcacaggcgacgu

SEQ ID NO: 1556081 - RNA, 19 nt, Artificial Sequence
  Description of Artificial Sequence: Synthetic oligonucleotide
guccgucggugaagaggaa

SEQ ID NO: 1556082 - RNA, 19 nt, Artificial Sequence
  Description of Artificial Sequence: Synthetic oligonucleotide
cgcaggccguggagaagac

SEQ ID NO: 1556083 - RNA, 19 nt, Artificial Sequence
  Description of Artificial Sequence: Synthetic oligonucleotide
gcuuaguguuccacagcuu

SEQ ID NO: 1556084 - RNA, 19 nt, Artificial Sequence
  Description of Artificial Sequence: Synthetic oligonucleotide
ccucaguaugggucauuau

SEQ ID NO: 1556085 - RNA, 19 nt, Artificial Sequence
  Description of Artificial Sequence: Synthetic oligonucleotide
ggguugagucauagcggau

SEQ ID NO: 1556086 - RNA, 19 nt, Artificial Sequence
  Description of Artificial Sequence: Synthetic oligonucleotide
ccccggcuuccagaaucac

SEQ ID NO: 1556087 - RNA, 19 nt, Artificial Sequence
  Description of Artificial Sequence: Synthetic oligonucleotide
cgcuaggccucggcuuaag

SEQ ID NO: 1556088 - RNA, 19 nt, Artificial Sequence
  Description of Artificial Sequence: Synthetic oligonucleotide
cggaugguuccaucgucau

SEQ ID NO: 1556089 - RNA, 19 nt, Artificial Sequence
  Description of Artificial Sequence: Synthetic oligonucleotide
ccuacacuaagggcauauu

SEQ ID NO: 1556090 - RNA, 19 nt, Artificial Sequence
  Description of Artificial Sequence: Synthetic oligonucleotide
gcgcuaggccucggcuuaa

SEQ ID NO: 1556091 - RNA, 19 nt, Artificial Sequence
  Description of Artificial Sequence: Synthetic oligonucleotide
ggccucaguaugggucauu

SEQ ID NO: 1556092 - RNA, 19 nt, Artificial Sequence
  Description of Artificial Sequence: Synthetic oligonucleotide
ccucaggguggugcuuagu

SEQ ID NO: 1556093 - RNA, 19 nt, Artificial Sequence
  Description of Artificial Sequence: Synthetic oligonucleotide
ccccgcuguccugcgaagu

SEQ ID NO: 1556094 - RNA, 19 nt, Artificial Sequence
  Description of Artificial Sequence: Synthetic oligonucleotide
ggauggcgccacgcacgau

SEQ ID NO: 1556095 - RNA, 19 nt, Artificial Sequence
  Description of Artificial Sequence: Synthetic oligonucleotide
ucuauugaugaucagcugg

SEQ ID NO: 1556096 - RNA, 19 nt, Artificial Sequence
  Description of Artificial Sequence: Synthetic oligonucleotide
aagucuauugaugaucagc

SEQ ID NO: 1556097 - RNA, 19 nt, Artificial Sequence
  Description of Artificial Sequence: Synthetic oligonucleotide
aauuccgcacuguaguccc

SEQ ID NO: 1556098 - RNA, 19 nt, Artificial Sequence
  Description of Artificial Sequence: Synthetic oligonucleotide
acgucugccagauaggugg

SEQ ID NO: 1556099 - RNA, 19 nt, Artificial Sequence
  Description of Artificial Sequence: Synthetic oligonucleotide
uucacucuggggaagagcc

SEQ ID NO: 1556100 - RNA, 19 nt, Artificial Sequence
  Description of Artificial Sequence: Synthetic oligonucleotide
accagugcggugcagaugg

SEQ ID NO: 1556101 - RNA, 19 nt, Artificial Sequence
  Description of Artificial Sequence: Synthetic oligonucleotide
uguagugcggcccaccacc

SEQ ID NO: 1556102 - RNA, 19 nt, Artificial Sequence
  Description of Artificial Sequence: Synthetic oligonucleotide
auaaaggaaacaguucccg

SEQ ID NO: 1556103 - RNA, 19 nt, Artificial Sequence
  Description of Artificial Sequence: Synthetic oligonucleotide
agguaaacucagcaguagc

SEQ ID NO: 1556104 - RNA, 19 nt, Artificial Sequence
  Description of Artificial Sequence: Synthetic oligonucleotide
ugacgaucuuccuucauag

SEQ ID NO: 1556105 - RNA, 19 nt, Artificial Sequence
  Description of Artificial Sequence: Synthetic oligonucleotide
uugaugaucagcugguacu

SEQ ID NO: 1556106 - RNA, 19 nt, Artificial Sequence
  Description of Artificial Sequence: Synthetic oligonucleotide
accgaacgcauuuccaugc

SEQ ID NO: 1556107 - RNA, 19 nt, Artificial Sequence
  Description of Artificial Sequence: Synthetic oligonucleotide
aaacauuaagccacauggg

SEQ ID NO: 1556108 - RNA, 19 nt, Artificial Sequence
  Description of Artificial Sequence: Synthetic oligonucleotide
uaccuuuauucauaaagga

SEQ ID NO: 1556109 - RNA, 19 nt, Artificial Sequence
  Description of Artificial Sequence: Synthetic oligonucleotide
aauggcaguggccccgucg

SEQ ID NO: 1556110 - RNA, 19 nt, Artificial Sequence
  Description of Artificial Sequence: Synthetic oligonucleotide
ugucguugcaggaagccgc

SEQ ID NO: 1556111 - RNA, 19 nt, Artificial Sequence
  Description of Artificial Sequence: Synthetic oligonucleotide
acgaucuuccuucauagcu

SEQ ID NO: 1556112 - RNA, 19 nt, Artificial Sequence
  Description of Artificial Sequence: Synthetic oligonucleotide
aagucuguugaggugcugg

SEQ ID NO: 1556113 - RNA, 19 nt, Artificial Sequence
  Description of Artificial Sequence: Synthetic oligonucleotide
uagaucuugcuccucugag

SEQ ID NO: 1556114 - RNA, 19 nt, Artificial Sequence
  Description of Artificial Sequence: Synthetic oligonucleotide
cuuugcgcaguaccgaacg

SEQ ID NO: 1556115 - RNA, 19 nt, Artificial Sequence
  Description of Artificial Sequence: Synthetic oligonucleotide
acucaagggagaccaaguc

SEQ ID NO: 1556116 - RNA, 19 nt, Artificial Sequence
  Description of Artificial Sequence: Synthetic oligonucleotide
ugguacuguuucuuguggg

SEQ ID NO: 1556117 - RNA, 19 nt, Artificial Sequence
  Description of Artificial Sequence: Synthetic oligonucleotide
agucuauugaugaucagcu

SEQ ID NO: 1556118 - RNA, 19 nt, Artificial Sequence
  Description of Artificial Sequence: Synthetic oligonucleotide
aaagucuauugaugaucag

SEQ ID NO: 1556119 - RNA, 19 nt, Artificial Sequence
  Description of Artificial Sequence: Synthetic oligonucleotide
gagaccaagucuguugagg

SEQ ID NO: 1556120 - RNA, 19 nt, Artificial Sequence
  Description of Artificial Sequence: Synthetic oligonucleotide
ucgcacuuuucaauggcag

SEQ ID NO: 1556121 - RNA, 19 nt, Artificial Sequence
  Description of Artificial Sequence: Synthetic oligonucleotide
gaaggcacuugguugggcc

SEQ ID NO: 1556122 - RNA, 19 nt, Artificial Sequence
  Description of Artificial Sequence: Synthetic oligonucleotide
uccuugacgaucuuccuuc

SEQ ID NO: 1556123 - RNA, 19 nt, Artificial Sequence
  Description of Artificial Sequence: Synthetic oligonucleotide
uaucucugccagcacucgg

SEQ ID NO: 1556124 - RNA, 19 nt, Artificial Sequence
  Description of Artificial Sequence: Synthetic oligonucleotide
gugugaaggcacuugguug

SEQ ID NO: 1556125 - RNA, 19 nt, Artificial Sequence
  Description of Artificial Sequence: Synthetic oligonucleotide
agaccaagucuguugaggu

SEQ ID NO: 1556126 - RNA, 19 nt, Artificial Sequence
  Description of Artificial Sequence: Synthetic oligonucleotide
ugcucgggaacacugcucu

SEQ ID NO: 1556127 - RNA, 19 nt, Artificial Sequence
  Description of Artificial Sequence: Synthetic oligonucleotide
gcacuguagucccagagcg

SEQ ID NO: 1556128 - RNA, 19 nt, Artificial Sequence
  Description of Artificial Sequence: Synthetic oligonucleotide
uugacgaucuuccuucaua

SEQ ID NO: 1556129 - RNA, 19 nt, Artificial Sequence
  Description of Artificial Sequence: Synthetic oligonucleotide
uccucauugggcuggcuug

SEQ ID NO: 1556130 - RNA, 19 nt, Artificial Sequence
  Description of Artificial Sequence: Synthetic oligonucleotide
aacgcauuuccaugcucug

SEQ ID NO: 1556131 - RNA, 19 nt, Artificial Sequence
  Description of Artificial Sequence: Synthetic oligonucleotide
guaagggucgcacuuuuca

SEQ ID NO: 1556132 - RNA, 19 nt, Artificial Sequence
  Description of Artificial Sequence: Synthetic oligonucleotide
agggagaccaagucuguug

SEQ ID NO: 1556133 - RNA, 19 nt, Artificial Sequence
  Description of Artificial Sequence: Synthetic oligonucleotide
aagggucgcacuuuucaau

SEQ ID NO: 1556134 - RNA, 19 nt, Artificial Sequence
  Description of Artificial Sequence: Synthetic oligonucleotide
agggucgcacuuuucaaug

SEQ ID NO: 1556135 - RNA, 19 nt, Artificial Sequence
  Description of Artificial Sequence: Synthetic oligonucleotide
gcucuuuuguccuugacga

SEQ ID NO: 1556136 - RNA, 19 nt, Artificial Sequence
  Description of Artificial Sequence: Synthetic oligonucleotide
uaccgaacgcauuuccaug

SEQ ID NO: 1556137 - RNA, 19 nt, Artificial Sequence
  Description of Artificial Sequence: Synthetic oligonucleotide
ugugucguugcaggaagcc

SEQ ID NO: 1556138 - RNA, 19 nt, Artificial Sequence
  Description of Artificial Sequence: Synthetic oligonucleotide
guugaggcgagcacgccgg

SEQ ID NO: 1556139 - RNA, 19 nt, Artificial Sequence
  Description of Artificial Sequence: Synthetic oligonucleotide
cuucacucaagggagacca

SEQ ID NO: 1556140 - RNA, 19 nt, Artificial Sequence
  Description of Artificial Sequence: Synthetic oligonucleotide
ugcugcaccagugcggugc

SEQ ID NO: 1556141 - RNA, 19 nt, Artificial Sequence
  Description of Artificial Sequence: Synthetic oligonucleotide
aucccacugugcaucagcc

SEQ ID NO: 1556142 - RNA, 19 nt, Artificial Sequence
  Description of Artificial Sequence: Synthetic oligonucleotide
gaagccgcgcaaugcagug

SEQ ID NO: 1556143 - RNA, 19 nt, Artificial Sequence
  Description of Artificial Sequence: Synthetic oligonucleotide
uuugcgcaguaccgaacgc

SEQ ID NO: 1556144 - RNA, 19 nt, Artificial Sequence
  Description of Artificial Sequence: Synthetic oligonucleotide
uugcgcgggacauagcccu

SEQ ID NO: 1556145 - RNA, 19 nt, Artificial Sequence
  Description of Artificial Sequence: Synthetic oligonucleotide
gagaggccgagugacggcg

SEQ ID NO: 1556146 - RNA, 19 nt, Artificial Sequence
  Description of Artificial Sequence: Synthetic oligonucleotide
uucaccgccugcuguacca

SEQ ID NO: 1556147 - RNA, 19 nt, Artificial Sequence
  Description of Artificial Sequence: Synthetic oligonucleotide
gucaggggaguugacauug

SEQ ID NO: 1556148 - RNA, 19 nt, Artificial Sequence
  Description of Artificial Sequence: Synthetic oligonucleotide
agcacgggagccaguagcc

SEQ ID NO: 1556149 - RNA, 19 nt, Artificial Sequence
  Description of Artificial Sequence: Synthetic oligonucleotide
caaugggguaguuggcgcc

SEQ ID NO: 1556150 - RNA, 19 nt, Artificial Sequence
  Description of Artificial Sequence: Synthetic oligonucleotide
uaagggucgcacuuuucaa

SEQ ID NO: 1556151 - RNA, 19 nt, Artificial Sequence
  Description of Artificial Sequence: Synthetic oligonucleotide
auagcccucucgguaaggg

SEQ ID NO: 1556152 - RNA, 19 nt, Artificial Sequence
  Description of Artificial Sequence: Synthetic oligonucleotide
aggaggccuucacucaagg

SEQ ID NO: 1556153 - RNA, 19 nt, Artificial Sequence
  Description of Artificial Sequence: Synthetic oligonucleotide
gagccaguagccccucuag

SEQ ID NO: 1556154 - RNA, 19 nt, Artificial Sequence
  Description of Artificial Sequence: Synthetic oligonucleotide
ugccagauagguggcacag

SEQ ID NO: 1556155 - RNA, 19 nt, Artificial Sequence
  Description of Artificial Sequence: Synthetic oligonucleotide
uggcccgucccuccgaagc

SEQ ID NO: 1556156 - RNA, 19 nt, Artificial Sequence
  Description of Artificial Sequence: Synthetic oligonucleotide
ugguugggcccucuggaga

SEQ ID NO: 1556157 - RNA, 19 nt, Artificial Sequence
  Description of Artificial Sequence: Synthetic oligonucleotide
gacgaucuuccuucauagc

SEQ ID NO: 1556158 - RNA, 19 nt, Artificial Sequence
  Description of Artificial Sequence: Synthetic oligonucleotide
cauuaagccacaugggugu

SEQ ID NO: 1556159 - RNA, 19 nt, Artificial Sequence
  Description of Artificial Sequence: Synthetic oligonucleotide
auagguggcacaguccgca

SEQ ID NO: 1556160 - RNA, 19 nt, Artificial Sequence
  Description of Artificial Sequence: Synthetic oligonucleotide
auguagugcggcccaccac

SEQ ID NO: 1556161 - RNA, 19 nt, Artificial Sequence
  Description of Artificial Sequence: Synthetic oligonucleotide
aucucugccagcacucggg

SEQ ID NO: 1556162 - RNA, 19 nt, Artificial Sequence
  Description of Artificial Sequence: Synthetic oligonucleotide
gucuauugaugaucagcug

SEQ ID NO: 1556163 - RNA, 19 nt, Artificial Sequence
  Description of Artificial Sequence: Synthetic oligonucleotide
aaacaguucccggugucau

SEQ ID NO: 1556164 - RNA, 19 nt, Artificial Sequence
  Description of Artificial Sequence: Synthetic oligonucleotide
gauggccgcaccgugcugc

SEQ ID NO: 1556165 - RNA, 19 nt, Artificial Sequence
  Description of Artificial Sequence: Synthetic oligonucleotide
aaguccacaaugggguagu

SEQ ID NO: 1556166 - RNA, 19 nt, Artificial Sequence
  Description of Artificial Sequence: Synthetic oligonucleotide
aggccuucacucaagggag

SEQ ID NO: 1556167 - RNA, 19 nt, Artificial Sequence
  Description of Artificial Sequence: Synthetic oligonucleotide
gguugaggcgagcacgccg

SEQ ID NO: 1556168 - RNA, 19 nt, Artificial Sequence
  Description of Artificial Sequence: Synthetic oligonucleotide
caguaccgaacgcauuucc

SEQ ID NO: 1556169 - RNA, 19 nt, Artificial Sequence
  Description of Artificial Sequence: Synthetic oligonucleotide
ugcgcaguaccgaacgcau

SEQ ID NO: 1556170 - RNA, 19 nt, Artificial Sequence
  Description of Artificial Sequence: Synthetic oligonucleotide
gcaaacauuaagccacaug

SEQ ID NO: 1556171 - RNA, 19 nt, Artificial Sequence
  Description of Artificial Sequence: Synthetic oligonucleotide
cacggugacggacucgccc

SEQ ID NO: 1556172 - RNA, 19 nt, Artificial Sequence
  Description of Artificial Sequence: Synthetic oligonucleotide
ucauccccgaauuccgcac

SEQ ID NO: 1556173 - RNA, 19 nt, Artificial Sequence
  Description of Artificial Sequence: Synthetic oligonucleotide
cacgggagccaguagcccc

SEQ ID NO: 1556174 - RNA, 19 nt, Artificial Sequence
  Description of Artificial Sequence: Synthetic oligonucleotide
aaguaguugcgcgggacau

SEQ ID NO: 1556175 - RNA, 19 nt, Artificial Sequence
  Description of Artificial Sequence: Synthetic oligonucleotide
ucugcguuugaggggccgg

SEQ ID NO: 1556176 - RNA, 19 nt, Artificial Sequence
  Description of Artificial Sequence: Synthetic oligonucleotide
cagauggcugugucguugc

SEQ ID NO: 1556177 - RNA, 19 nt, Artificial Sequence
  Description of Artificial Sequence: Synthetic oligonucleotide
caccgucugggcuucgggg

SEQ ID NO: 1556178 - RNA, 19 nt, Artificial Sequence
  Description of Artificial Sequence: Synthetic oligonucleotide
aguccgcauagcccucucg

SEQ ID NO: 1556179 - RNA, 19 nt, Artificial Sequence
  Description of Artificial Sequence: Synthetic oligonucleotide
ugacggacucgcccucccg

SEQ ID NO: 1556180 - RNA, 19 nt, Artificial Sequence
  Description of Artificial Sequence: Synthetic oligonucleotide
uugcgcaguaccgaacgca

SEQ ID NO: 1556181 - RNA, 19 nt, Artificial Sequence
  Description of Artificial Sequence: Synthetic oligonucleotide
gaaacaguucccgguguca

SEQ ID NO: 1556182 - RNA, 19 nt, Artificial Sequence
  Description of Artificial Sequence: Synthetic oligonucleotide
guaguuggcgccacagaug

SEQ ID NO: 1556183 - RNA, 19 nt, Artificial Sequence
  Description of Artificial Sequence: Synthetic oligonucleotide
gugucguugcaggaagccg

SEQ ID NO: 1556184 - RNA, 19 nt, Artificial Sequence
  Description of Artificial Sequence: Synthetic oligonucleotide
acuuugcgcaguaccgaac

SEQ ID NO: 1556185 - RNA, 19 nt, Artificial Sequence
  Description of Artificial Sequence: Synthetic oligonucleotide
agccgcgcaaugcaguggu

SEQ ID NO: 1556186 - RNA, 19 nt, Artificial Sequence
  Description of Artificial Sequence: Synthetic oligonucleotide
aguaccgaacgcauuucca

SEQ ID NO: 1556187 - RNA, 19 nt, Artificial Sequence
  Description of Artificial Sequence: Synthetic oligonucleotide
agagcccaaaguaguugcg

SEQ ID NO: 1556188 - RNA, 19 nt, Artificial Sequence
  Description of Artificial Sequence: Synthetic oligonucleotide
agugcggugcagauggcug

SEQ ID NO: 1556189 - RNA, 19 nt, Artificial Sequence
  Description of Artificial Sequence: Synthetic oligonucleotide
gucggucuccucuggcccg

SEQ ID NO: 1556190 - RNA, 19 nt, Artificial Sequence
  Description of Artificial Sequence: Synthetic oligonucleotide
agccguggcugucagggga

SEQ ID NO: 1556191 - RNA, 19 nt, Artificial Sequence
  Description of Artificial Sequence: Synthetic oligonucleotide
ugcaccagugcggugcaga

SEQ ID NO: 1556192 - RNA, 19 nt, Artificial Sequence
  Description of Artificial Sequence: Synthetic oligonucleotide
gaagguccggguggaaggc

SEQ ID NO: 1556193 - RNA, 19 nt, Artificial Sequence
  Description of Artificial Sequence: Synthetic oligonucleotide
aagccgcgcaaugcagugg

SEQ ID NO: 1556194 - RNA, 19 nt, Artificial Sequence
  Description of Artificial Sequence: Synthetic oligonucleotide
ggucgcacuuuucaauggc

SEQ ID NO: 1556195 - RNA, 19 nt, Artificial Sequence
  Description of Artificial Sequence: Synthetic oligonucleotide
aacaguucccggugucauu

SEQ ID NO: 1556196 - RNA, 19 nt, Artificial Sequence
  Description of Artificial Sequence: Synthetic oligonucleotide
agaucccucugugauggug

SEQ ID NO: 1556197 - RNA, 19 nt, Artificial Sequence
  Description of Artificial Sequence: Synthetic oligonucleotide
ccgauggaaaagucuauug

SEQ ID NO: 1556198 - RNA, 19 nt, Artificial Sequence
  Description of Artificial Sequence: Synthetic oligonucleotide
cugugucguugcaggaagc

SEQ ID NO: 1556199 - RNA, 19 nt, Artificial Sequence
  Description of Artificial Sequence: Synthetic oligonucleotide
ggcgcagguaaacucagca

SEQ ID NO: 1556200 - RNA, 19 nt, Artificial Sequence
  Description of Artificial Sequence: Synthetic oligonucleotide
ugccgauggaaaagucuau

SEQ ID NO: 1556201 - RNA, 19 nt, Artificial Sequence
  Description of Artificial Sequence: Synthetic oligonucleotide
ugcguuugaggggccgggg

SEQ ID NO: 1556202 - RNA, 19 nt, Artificial Sequence
  Description of Artificial Sequence: Synthetic oligonucleotide
ggaacacugcucuggggug

SEQ ID NO: 1556203 - RNA, 19 nt, Artificial Sequence
  Description of Artificial Sequence: Synthetic oligonucleotide
ccagauagguggcacaguc

SEQ ID NO: 1556204 - RNA, 19 nt, Artificial Sequence
  Description of Artificial Sequence: Synthetic oligonucleotide
ggaguugacauuggcgccc

SEQ ID NO: 1556205 - RNA, 19 nt, Artificial Sequence
  Description of Artificial Sequence: Synthetic oligonucleotide
gggucgcacuuuucaaugg

SEQ ID NO: 1556206 - RNA, 19 nt, Artificial Sequence
  Description of Artificial Sequence: Synthetic oligonucleotide
ucccuccgaagcacgguga

SEQ ID NO: 1556207 - RNA, 19 nt, Artificial Sequence
  Description of Artificial Sequence: Synthetic oligonucleotide
gucguugcaggaagccgcg

SEQ ID NO: 1556208 - RNA, 19 nt, Artificial Sequence
  Description of Artificial Sequence: Synthetic oligonucleotide
augccgauggaaaagucua

SEQ ID NO: 1556209 - RNA, 19 nt, Artificial Sequence
  Description of Artificial Sequence: Synthetic oligonucleotide
caugccgauggaaaagucu

SEQ ID NO: 1556210 - RNA, 19 nt, Artificial Sequence
  Description of Artificial Sequence: Synthetic oligonucleotide
ugcggcccaccaccagucg

SEQ ID NO: 1556211 - RNA, 19 nt, Artificial Sequence
  Description of Artificial Sequence: Synthetic oligonucleotide
gggaguugacauuggcgcc

SEQ ID NO: 1556212 - RNA, 19 nt, Artificial Sequence
  Description of Artificial Sequence: Synthetic oligonucleotide
cuggcucgggcccuccagg

SEQ ID NO: 1556213 - RNA, 19 nt, Artificial Sequence
  Description of Artificial Sequence: Synthetic oligonucleotide
cacgucugccagauaggug

SEQ ID NO: 1556214 - RNA, 19 nt, Artificial Sequence
  Description of Artificial Sequence: Synthetic oligonucleotide
auuaagccacaugggugug

SEQ ID NO: 1556215 - RNA, 19 nt, Artificial Sequence
  Description of Artificial Sequence: Synthetic oligonucleotide
cucucgguaagggucgcac

SEQ ID NO: 1556216 - RNA, 19 nt, Artificial Sequence
  Description of Artificial Sequence: Synthetic oligonucleotide
gggagaccaagucuguuga

SEQ ID NO: 1556217 - RNA, 19 nt, Artificial Sequence
  Description of Artificial Sequence: Synthetic oligonucleotide
uccggguggaaggcaggcg

SEQ ID NO: 1556218 - RNA, 19 nt, Artificial Sequence
  Description of Artificial Sequence: Synthetic oligonucleotide
cucaagggagaccaagucu

SEQ ID NO: 1556219 - RNA, 19 nt, Artificial Sequence
  Description of Artificial Sequence: Synthetic oligonucleotide
auccccgaauuccgcacug

SEQ ID NO: 1556220 - RNA, 19 nt, Artificial Sequence
  Description of Artificial Sequence: Synthetic oligonucleotide
cauguagugcggcccacca

SEQ ID NO: 1556221 - RNA, 19 nt, Artificial Sequence
  Description of Artificial Sequence: Synthetic oligonucleotide
guugcgcgggacauagccc

SEQ ID NO: 1556222 - RNA, 19 nt, Artificial Sequence
  Description of Artificial Sequence: Synthetic oligonucleotide
uagcccucucgguaagggu

SEQ ID NO: 1556223 - RNA, 19 nt, Artificial Sequence
  Description of Artificial Sequence: Synthetic oligonucleotide
cuucaccgccugcuguacc

SEQ ID NO: 1556224 - RNA, 19 nt, Artificial Sequence
  Description of Artificial Sequence: Synthetic oligonucleotide
gcgcagguaaacucagcag

SEQ ID NO: 1556225 - RNA, 19 nt, Artificial Sequence
  Description of Artificial Sequence: Synthetic oligonucleotide
cccaaaguaguugcgcggg

SEQ ID NO: 1556226 - RNA, 19 nt, Artificial Sequence
  Description of Artificial Sequence: Synthetic oligonucleotide
caccgugcugcaccagugc

SEQ ID NO: 1556227 - RNA, 19 nt, Artificial Sequence
  Description of Artificial Sequence: Synthetic oligonucleotide
gagcacgccgggccuugcg

SEQ ID NO: 1556228 - RNA, 19 nt, Artificial Sequence
  Description of Artificial Sequence: Synthetic oligonucleotide
uagugcggcccaccaccag

SEQ ID NO: 1556229 - RNA, 19 nt, Artificial Sequence
  Description of Artificial Sequence: Synthetic oligonucleotide
ggcgccuucaucggggucc

SEQ ID NO: 1556230 - RNA, 19 nt, Artificial Sequence
  Description of Artificial Sequence: Synthetic oligonucleotide
ccagagcgcauacacaauc

SEQ ID NO: 1556231 - RNA, 19 nt, Artificial Sequence
  Description of Artificial Sequence: Synthetic oligonucleotide
ccuggucgggcugagaggc

SEQ ID NO: 1556232 - RNA, 19 nt, Artificial Sequence
  Description of Artificial Sequence: Synthetic oligonucleotide
guaccgaacgcauuuccau

SEQ ID NO: 1556233 - RNA, 19 nt, Artificial Sequence
  Description of Artificial Sequence: Synthetic oligonucleotide
cucgccagucagugcugcg

SEQ ID NO: 1556234 - RNA, 19 nt, Artificial Sequence
  Description of Artificial Sequence: Synthetic oligonucleotide
uccagcacgggagccagua

SEQ ID NO: 1556235 - RNA, 19 nt, Artificial Sequence
  Description of Artificial Sequence: Synthetic oligonucleotide
gguaaacucagcaguagcu

SEQ ID NO: 1556236 - RNA, 19 nt, Artificial Sequence
  Description of Artificial Sequence: Synthetic oligonucleotide
cccgaauuccgcacuguag

SEQ ID NO: 1556237 - RNA, 19 nt, Artificial Sequence
  Description of Artificial Sequence: Synthetic oligonucleotide
gguaguuggcgccacagau

SEQ ID NO: 1556238 - RNA, 19 nt, Artificial Sequence
  Description of Artificial Sequence: Synthetic oligonucleotide
ggagaccaagucuguugag

SEQ ID NO: 1556239 - RNA, 19 nt, Artificial Sequence
  Description of Artificial Sequence: Synthetic oligonucleotide
gucgcacuuuucaauggca

SEQ ID NO: 1556240 - RNA, 19 nt, Artificial Sequence
  Description of Artificial Sequence: Synthetic oligonucleotide
gccgggguaucucugccag

SEQ ID NO: 1556241 - RNA, 19 nt, Artificial Sequence
  Description of Artificial Sequence: Synthetic oligonucleotide
ucccggugucauugcaaac

SEQ ID NO: 1556242 - RNA, 19 nt, Artificial Sequence
  Description of Artificial Sequence: Synthetic oligonucleotide
caccgccugcuguaccacg

SEQ ID NO: 1556243 - RNA, 19 nt, Artificial Sequence
  Description of Artificial Sequence: Synthetic oligonucleotide
cacucuggggaagagccca

SEQ ID NO: 1556244 - RNA, 19 nt, Artificial Sequence
  Description of Artificial Sequence: Synthetic oligonucleotide
uccgaagcacggugacgga

SEQ ID NO: 1556245 - RNA, 19 nt, Artificial Sequence
  Description of Artificial Sequence: Synthetic oligonucleotide
cacuuugcgcaguaccgaa

SEQ ID NO: 1556246 - RNA, 19 nt, Artificial Sequence
  Description of Artificial Sequence: Synthetic oligonucleotide
acgcauuuccaugcucugu

SEQ ID NO: 1556247 - RNA, 19 nt, Artificial Sequence
  Description of Artificial Sequence: Synthetic oligonucleotide
cugcguuugaggggccggg

SEQ ID NO: 1556248 - RNA, 19 nt, Artificial Sequence
  Description of Artificial Sequence: Synthetic oligonucleotide
ccccacuuugcgcaguacc

SEQ ID NO: 1556249 - RNA, 19 nt, Artificial Sequence
  Description of Artificial Sequence: Synthetic oligonucleotide
ugcgcggggaccccacuuu

SEQ ID NO: 1556250 - RNA, 19 nt, Artificial Sequence
  Description of Artificial Sequence: Synthetic oligonucleotide
cucugcguuugaggggccg

SEQ ID NO: 1556251 - RNA, 19 nt, Artificial Sequence
  Description of Artificial Sequence: Synthetic oligonucleotide
acggacucgcccucccgga

SEQ ID NO: 1556252 - RNA, 19 nt, Artificial Sequence
  Description of Artificial Sequence: Synthetic oligonucleotide
agggcgcagguaaacucag

SEQ ID NO: 1556253 - RNA, 19 nt, Artificial Sequence
  Description of Artificial Sequence: Synthetic oligonucleotide
gcggcgaugaggaagucca

SEQ ID NO: 1556254 - RNA, 19 nt, Artificial Sequence
  Description of Artificial Sequence: Synthetic oligonucleotide
caucgggguccccagccuc

SEQ ID NO: 1556255 - RNA, 19 nt, Artificial Sequence
  Description of Artificial Sequence: Synthetic oligonucleotide
uccgcacuguagucccaga

SEQ ID NO: 1556256 - RNA, 19 nt, Artificial Sequence
  Description of Artificial Sequence: Synthetic oligonucleotide
aggcggguuugcucuuuug

SEQ ID NO: 1556257 - RNA, 19 nt, Artificial Sequence
  Description of Artificial Sequence: Synthetic oligonucleotide
cacucaagggagaccaagu

SEQ ID NO: 1556258 - RNA, 19 nt, Artificial Sequence
  Description of Artificial Sequence: Synthetic oligonucleotide
gcucgggcccuccaggccc

SEQ ID NO: 1556259 - RNA, 19 nt, Artificial Sequence
  Description of Artificial Sequence: Synthetic oligonucleotide
auagcccuccuggccaugu

SEQ ID NO: 1556260 - RNA, 19 nt, Artificial Sequence
  Description of Artificial Sequence: Synthetic oligonucleotide
agugacggcggcgccuuca

SEQ ID NO: 1556261 - RNA, 19 nt, Artificial Sequence
  Description of Artificial Sequence: Synthetic oligonucleotide
ucgguaagggucgcacuuu

SEQ ID NO: 1556262 - RNA, 19 nt, Artificial Sequence
  Description of Artificial Sequence: Synthetic oligonucleotide
ccuucauagcugcuagauc

SEQ ID NO: 1556263 - RNA, 19 nt, Artificial Sequence
  Description of Artificial Sequence: Synthetic oligonucleotide
ggacucgcccucccggaag

SEQ ID NO: 1556264 - RNA, 19 nt, Artificial Sequence
  Description of Artificial Sequence: Synthetic oligonucleotide
cgcacuguagucccagagc

SEQ ID NO: 1556265 - RNA, 19 nt, Artificial Sequence
  Description of Artificial Sequence: Synthetic oligonucleotide
uugcaggaagccgcgcaau

SEQ ID NO: 1556266 - RNA, 19 nt, Artificial Sequence
  Description of Artificial Sequence: Synthetic oligonucleotide
ggccccgucgcugagugug

SEQ ID NO: 1556267 - RNA, 19 nt, Artificial Sequence
  Description of Artificial Sequence: Synthetic oligonucleotide
cgcauacacaaucccacug

SEQ ID NO: 1556268 - RNA, 19 nt, Artificial Sequence
  Description of Artificial Sequence: Synthetic oligonucleotide
cagccguggcugucagggg

SEQ ID NO: 1556269 - RNA, 19 nt, Artificial Sequence
  Description of Artificial Sequence: Synthetic oligonucleotide
uugaggggccgggguaucu

SEQ ID NO: 1556270 - RNA, 19 nt, Artificial Sequence
  Description of Artificial Sequence: Synthetic oligonucleotide
gaugaucagcugguacugu

SEQ ID NO: 1556271 - RNA, 19 nt, Artificial Sequence
  Description of Artificial Sequence: Synthetic oligonucleotide
uugcgcggggaccccacuu

SEQ ID NO: 1556272 - RNA, 19 nt, Artificial Sequence
  Description of Artificial Sequence: Synthetic oligonucleotide
uuugaggggccgggguauc

SEQ ID NO: 1556273 - RNA, 19 nt, Artificial Sequence
  Description of Artificial Sequence: Synthetic oligonucleotide
guccggguggaaggcaggc

SEQ ID NO: 1556274 - RNA, 19 nt, Artificial Sequence
  Description of Artificial Sequence: Synthetic oligonucleotide
gcccucucgguaagggucg

SEQ ID NO: 1556275 - RNA, 19 nt, Artificial Sequence
  Description of Artificial Sequence: Synthetic oligonucleotide
ccucauugggcuggcuugg

SEQ ID NO: 1556276 - RNA, 19 nt, Artificial Sequence
  Description of Artificial Sequence: Synthetic oligonucleotide
accccacuuugcgcaguac

SEQ ID NO: 1556277 - RNA, 19 nt, Artificial Sequence
  Description of Artificial Sequence: Synthetic oligonucleotide
cacaguccgcauagcccuc

SEQ ID NO: 1556278 - RNA, 19 nt, Artificial Sequence
  Description of Artificial Sequence: Synthetic oligonucleotide
ucaccgccugcuguaccac

SEQ ID NO: 1556279 - RNA, 19 nt, Artificial Sequence
  Description of Artificial Sequence: Synthetic oligonucleotide
ggcgaugaggaaguccaca

SEQ ID NO: 1556280 - RNA, 19 nt, Artificial Sequence
  Description of Artificial Sequence: Synthetic oligonucleotide
uccccgaauuccgcacugu

SEQ ID NO: 1556281 - RNA, 19 nt, Artificial Sequence
  Description of Artificial Sequence: Synthetic oligonucleotide
ucguugcaggaagccgcgc

SEQ ID NO: 1556282 - RNA, 19 nt, Artificial Sequence
  Description of Artificial Sequence: Synthetic oligonucleotide
accgccugcuguaccacgu

SEQ ID NO: 1556283 - RNA, 19 nt, Artificial Sequence
  Description of Artificial Sequence: Synthetic oligonucleotide
ccgcacuguagucccagag

SEQ ID NO: 1556284 - RNA, 19 nt, Artificial Sequence
  Description of Artificial Sequence: Synthetic oligonucleotide
caagucuguugaggugcug

SEQ ID NO: 1556285 - RNA, 19 nt, Artificial Sequence
  Description of Artificial Sequence: Synthetic oligonucleotide
ccgaauuccgcacuguagu

SEQ ID NO: 1556286 - RNA, 19 nt, Artificial Sequence
  Description of Artificial Sequence: Synthetic oligonucleotide
cgaauuccgcacuguaguc

SEQ ID NO: 1556287 - RNA, 19 nt, Artificial Sequence
  Description of Artificial Sequence: Synthetic oligonucleotide
ccuucacucaagggagacc

SEQ ID NO: 1556288 - RNA, 19 nt, Artificial Sequence
  Description of Artificial Sequence: Synthetic oligonucleotide
cucgguaagggucgcacuu

SEQ ID NO: 1556289 - RNA, 19 nt, Artificial Sequence
  Description of Artificial Sequence: Synthetic oligonucleotide
cccggugucauugcaaaca

SEQ ID NO: 1556290 - RNA, 19 nt, Artificial Sequence
  Description of Artificial Sequence: Synthetic oligonucleotide
ggggccgggguaucucugc

SEQ ID NO: 1556291 - RNA, 19 nt, Artificial Sequence
  Description of Artificial Sequence: Synthetic oligonucleotide
ccaugcuuugcuccacguc

SEQ ID NO: 1556292 - RNA, 19 nt, Artificial Sequence
  Description of Artificial Sequence: Synthetic oligonucleotide
guagugcggcccaccacca

SEQ ID NO: 1556293 - RNA, 19 nt, Artificial Sequence
  Description of Artificial Sequence: Synthetic oligonucleotide
ugacggcggcgccuucauc

SEQ ID NO: 1556294 - RNA, 19 nt, Artificial Sequence
  Description of Artificial Sequence: Synthetic oligonucleotide
caccagugcggugcagaug

SEQ ID NO: 1556295 - RNA, 19 nt, Artificial Sequence
  Description of Artificial Sequence: Synthetic oligonucleotide
caagggagaccaagucugu

SEQ ID NO: 1556296 - RNA, 19 nt, Artificial Sequence
  Description of Artificial Sequence: Synthetic oligonucleotide
ucggucuccucuggcccgu

SEQ ID NO: 1556297 - RNA, 19 nt, Artificial Sequence
  Description of Artificial Sequence: Synthetic oligonucleotide
ccaugccgauggaaaaguc

SEQ ID NO: 1556298 - RNA, 19 nt, Artificial Sequence
  Description of Artificial Sequence: Synthetic oligonucleotide
gccuucacucaagggagac

SEQ ID NO: 1556299 - RNA, 19 nt, Artificial Sequence
  Description of Artificial Sequence: Synthetic oligonucleotide
ucgggguccccagccucca

SEQ ID NO: 1556300 - RNA, 19 nt, Artificial Sequence
  Description of Artificial Sequence: Synthetic oligonucleotide
gucgggcugagaggccgag

SEQ ID NO: 1556301 - RNA, 19 nt, Artificial Sequence
  Description of Artificial Sequence: Synthetic oligonucleotide
gguccggguggaaggcagg

SEQ ID NO: 1556302 - RNA, 19 nt, Artificial Sequence
  Description of Artificial Sequence: Synthetic oligonucleotide
gguaagggucgcacuuuuc

SEQ ID NO: 1556303 - RNA, 19 nt, Artificial Sequence
  Description of Artificial Sequence: Synthetic oligonucleotide
gcucauccccgaauuccgc

SEQ ID NO: 1556304 - RNA, 19 nt, Artificial Sequence
  Description of Artificial Sequence: Synthetic oligonucleotide
gcccgcggcgaugaggaag

SEQ ID NO: 1556305 - RNA, 19 nt, Artificial Sequence
  Description of Artificial Sequence: Synthetic oligonucleotide
gggccgggguaucucugcc

SEQ ID NO: 1556306 - RNA, 19 nt, Artificial Sequence
  Description of Artificial Sequence: Synthetic oligonucleotide
ucgggcugagaggccgagu

SEQ ID NO: 1556307 - RNA, 19 nt, Artificial Sequence
  Description of Artificial Sequence: Synthetic oligonucleotide
cgcagguaaacucagcagu

SEQ ID NO: 1556308 - RNA, 19 nt, Artificial Sequence
  Description of Artificial Sequence: Synthetic oligonucleotide
gcaguaccgaacgcauuuc

SEQ ID NO: 1556309 - RNA, 19 nt, Artificial Sequence
  Description of Artificial Sequence: Synthetic oligonucleotide
ccauguagugcggcccacc

SEQ ID NO: 1556310 - RNA, 19 nt, Artificial Sequence
  Description of Artificial Sequence: Synthetic oligonucleotide
acgccgggccuugcgcggg

SEQ ID NO: 1556311 - RNA, 19 nt, Artificial Sequence
  Description of Artificial Sequence: Synthetic oligonucleotide
gcaccgugcugcaccagug

SEQ ID NO: 1556312 - RNA, 19 nt, Artificial Sequence
  Description of Artificial Sequence: Synthetic oligonucleotide
gccgccaugccgauggaaa

SEQ ID NO: 1556313 - RNA, 19 nt, Artificial Sequence
  Description of Artificial Sequence: Synthetic oligonucleotide
cauccccgaauuccgcacu

SEQ ID NO: 1556314 - RNA, 19 nt, Artificial Sequence
  Description of Artificial Sequence: Synthetic oligonucleotide
cuugacgaucuuccuucau

SEQ ID NO: 1556315 - RNA, 19 nt, Artificial Sequence
  Description of Artificial Sequence: Synthetic oligonucleotide
ccgaagcacggugacggac

SEQ ID NO: 1556316 - RNA, 19 nt, Artificial Sequence
  Description of Artificial Sequence: Synthetic oligonucleotide
cccuccgaagcacggugac

SEQ ID NO: 1556317 - RNA, 19 nt, Artificial Sequence
  Description of Artificial Sequence: Synthetic oligonucleotide
gccuucaucggggucccca

SEQ ID NO: 1556318 - RNA, 19 nt, Artificial Sequence
  Description of Artificial Sequence: Synthetic oligonucleotide
gcucgccagucagugcugc

SEQ ID NO: 1556319 - RNA, 19 nt, Artificial Sequence
  Description of Artificial Sequence: Synthetic oligonucleotide
ggcccgucccuccgaagca

SEQ ID NO: 1556320 - RNA, 19 nt, Artificial Sequence
  Description of Artificial Sequence: Synthetic oligonucleotide
gugcaucagccccaugcuu

SEQ ID NO: 1556321 - RNA, 19 nt, Artificial Sequence
  Description of Artificial Sequence: Synthetic oligonucleotide
ccaaaguaguugcgcggga

SEQ ID NO: 1556322 - RNA, 19 nt, Artificial Sequence
  Description of Artificial Sequence: Synthetic oligonucleotide
caguggccccgucgcugag

SEQ ID NO: 1556323 - RNA, 19 nt, Artificial Sequence
  Description of Artificial Sequence: Synthetic oligonucleotide
ccuugacgaucuuccuuca

SEQ ID NO: 1556324 - RNA, 19 nt, Artificial Sequence
  Description of Artificial Sequence: Synthetic oligonucleotide
cgccaugccgauggaaaag

SEQ ID NO: 1556325 - RNA, 19 nt, Artificial Sequence
  Description of Artificial Sequence: Synthetic oligonucleotide
gccaugccgauggaaaagu

SEQ ID NO: 1556326 - RNA, 19 nt, Artificial Sequence
  Description of Artificial Sequence: Synthetic oligonucleotide
cguugcaggaagccgcgca

SEQ ID NO: 1556327 - RNA, 19 nt, Artificial Sequence
  Description of Artificial Sequence: Synthetic oligonucleotide
ccacuuugcgcaguaccga

SEQ ID NO: 1556328 - RNA, 19 nt, Artificial Sequence
  Description of Artificial Sequence: Synthetic oligonucleotide
cgcauagcccucucgguaa

SEQ ID NO: 1556329 - RNA, 19 nt, Artificial Sequence
  Description of Artificial Sequence: Synthetic oligonucleotide
ggacagcucauccccgaau

SEQ ID NO: 1556330 - RNA, 19 nt, Artificial Sequence
  Description of Artificial Sequence: Synthetic oligonucleotide
cgggguaucucugccagca

SEQ ID NO: 1556331 - RNA, 19 nt, Artificial Sequence
  Description of Artificial Sequence: Synthetic oligonucleotide
ccuucaccgccugcuguac

SEQ ID NO: 1556332 - RNA, 19 nt, Artificial Sequence
  Description of Artificial Sequence: Synthetic oligonucleotide
gggcgcagguaaacucagc

SEQ ID NO: 1556333 - RNA, 19 nt, Artificial Sequence
  Description of Artificial Sequence: Synthetic oligonucleotide
ccuugcgcggggaccccac

SEQ ID NO: 1556334 - RNA, 19 nt, Artificial Sequence
  Description of Artificial Sequence: Synthetic oligonucleotide
cagugcggugcagauggcu

SEQ ID NO: 1556335 - RNA, 19 nt, Artificial Sequence
  Description of Artificial Sequence: Synthetic oligonucleotide
gcgcgggacauagcccucc

SEQ ID NO: 1556336 - RNA, 19 nt, Artificial Sequence
  Description of Artificial Sequence: Synthetic oligonucleotide
ccgcauagcccucucggua

SEQ ID NO: 1556337 - RNA, 19 nt, Artificial Sequence
  Description of Artificial Sequence: Synthetic oligonucleotide
cccgucgcugaguguggug

SEQ ID NO: 1556338 - RNA, 19 nt, Artificial Sequence
  Description of Artificial Sequence: Synthetic oligonucleotide
ggccuucacucaagggaga

SEQ ID NO: 1556339 - RNA, 19 nt, Artificial Sequence
  Description of Artificial Sequence: Synthetic oligonucleotide
cgaagcacggugacggacu

SEQ ID NO: 1556340 - RNA, 19 nt, Artificial Sequence
  Description of Artificial Sequence: Synthetic oligonucleotide
cgccagucagugcugcguc

SEQ ID NO: 1556341 - RNA, 19 nt, Artificial Sequence
  Description of Artificial Sequence: Synthetic oligonucleotide
gugacggcggcgccuucau

SEQ ID NO: 1556342 - RNA, 19 nt, Artificial Sequence
  Description of Artificial Sequence: Synthetic oligonucleotide
gcguuugaggggccggggu

SEQ ID NO: 1556343 - RNA, 19 nt, Artificial Sequence
  Description of Artificial Sequence: Synthetic oligonucleotide
ccucugcguuugaggggcc

SEQ ID NO: 1556344 - RNA, 19 nt, Artificial Sequence
  Description of Artificial Sequence: Synthetic oligonucleotide
gccgauggaaaagucuauu

SEQ ID NO: 1556345 - RNA, 19 nt, Artificial Sequence
  Description of Artificial Sequence: Synthetic oligonucleotide
gcgccuucaucgggguccc

SEQ ID NO: 1556346 - RNA, 19 nt, Artificial Sequence
  Description of Artificial Sequence: Synthetic oligonucleotide
ccgccaugccgauggaaaa

SEQ ID NO: 1556347 - RNA, 19 nt, Artificial Sequence
  Description of Artificial Sequence: Synthetic oligonucleotide
gggugugaaggcacuuggu

SEQ ID NO: 1556348 - RNA, 19 nt, Artificial Sequence
  Description of Artificial Sequence: Synthetic oligonucleotide
ccaagucuguugaggugcu

SEQ ID NO: 1556349 - RNA, 19 nt, Artificial Sequence
  Description of Artificial Sequence: Synthetic oligonucleotide
cccgcggcgaugaggaagu

SEQ ID NO: 1556350 - RNA, 19 nt, Artificial Sequence
  Description of Artificial Sequence: Synthetic oligonucleotide
gcccgucccuccgaagcac

SEQ ID NO: 1556351 - RNA, 19 nt, Artificial Sequence
  Description of Artificial Sequence: Synthetic oligonucleotide
cuugcgcggggaccccacu

SEQ ID NO: 1556352 - RNA, 19 nt, Artificial Sequence
  Description of Artificial Sequence: Synthetic oligonucleotide
ccggugucauugcaaacau

SEQ ID NO: 1556353 - RNA, 19 nt, Artificial Sequence
  Description of Artificial Sequence: Synthetic oligonucleotide
cgcaguaccgaacgcauuu

SEQ ID NO: 1556354 - RNA, 19 nt, Artificial Sequence
  Description of Artificial Sequence: Synthetic oligonucleotide
gcgagcacgccgggccuug

SEQ ID NO: 1556355 - RNA, 19 nt, Artificial Sequence
  Description of Artificial Sequence: Synthetic oligonucleotide
ccccgaauuccgcacugua

SEQ ID NO: 1556356 - RNA, 19 nt, Artificial Sequence
  Description of Artificial Sequence: Synthetic oligonucleotide
ccgccugcuguaccacguc

SEQ ID NO: 1556357 - RNA, 19 nt, Artificial Sequence
  Description of Artificial Sequence: Synthetic oligonucleotide
gccccaugcuuugcuccac

SEQ ID NO: 1556358 - RNA, 19 nt, Artificial Sequence
  Description of Artificial Sequence: Synthetic oligonucleotide
ggucgggcugagaggccga

SEQ ID NO: 1556359 - RNA, 19 nt, Artificial Sequence
  Description of Artificial Sequence: Synthetic oligonucleotide
cccucucgguaagggucgc

SEQ ID NO: 1556360 - RNA, 19 nt, Artificial Sequence
  Description of Artificial Sequence: Synthetic oligonucleotide
ccgaacgcauuuccaugcu

SEQ ID NO: 1556361 - RNA, 19 nt, Artificial Sequence
  Description of Artificial Sequence: Synthetic oligonucleotide
gccagauagguggcacagu

SEQ ID NO: 1556362 - RNA, 19 nt, Artificial Sequence
  Description of Artificial Sequence: Synthetic oligonucleotide
cacugugcaucagccccau

SEQ ID NO: 1556363 - RNA, 19 nt, Artificial Sequence
  Description of Artificial Sequence: Synthetic oligonucleotide
ggccgccaugccgauggaa

SEQ ID NO: 1556364 - RNA, 19 nt, Artificial Sequence
  Description of Artificial Sequence: Synthetic oligonucleotide
ccgcgcaaugcaguggugu

SEQ ID NO: 1556365 - RNA, 19 nt, Artificial Sequence
  Description of Artificial Sequence: Synthetic oligonucleotide
ggccuugcgcggggacccc

SEQ ID NO: 1556366 - RNA, 19 nt, Artificial Sequence
  Description of Artificial Sequence: Synthetic oligonucleotide
caggcggguuugcucuuuu

SEQ ID NO: 1556367 - RNA, 19 nt, Artificial Sequence
  Description of Artificial Sequence: Synthetic oligonucleotide
cggugacggacucgcccuc

SEQ ID NO: 1556368 - RNA, 19 nt, Artificial Sequence
  Description of Artificial Sequence: Synthetic oligonucleotide
gcggcgccuucaucggggu

SEQ ID NO: 1556369 - RNA, 19 nt, Artificial Sequence
  Description of Artificial Sequence: Synthetic oligonucleotide
gccuugcgcggggacccca

SEQ ID NO: 1556370 - RNA, 19 nt, Artificial Sequence
  Description of Artificial Sequence: Synthetic oligonucleotide
ggaccccacuuugcgcagu

SEQ ID NO: 1556371 - RNA, 19 nt, Artificial Sequence
  Description of Artificial Sequence: Synthetic oligonucleotide
ccucucgguaagggucgca

SEQ ID NO: 1556372 - RNA, 19 nt, Artificial Sequence
  Description of Artificial Sequence: Synthetic oligonucleotide
cgcaccgugcugcaccagu

SEQ ID NO: 1556373 - RNA, 19 nt, Artificial Sequence
  Description of Artificial Sequence: Synthetic oligonucleotide
cgagcacgccgggccuugc

SEQ ID NO: 1556374 - RNA, 19 nt, Artificial Sequence
  Description of Artificial Sequence: Synthetic oligonucleotide
ccgagugacggcggcgccu

SEQ ID NO: 1556375 - RNA, 19 nt, Artificial Sequence
  Description of Artificial Sequence: Synthetic oligonucleotide
cggacucgcccucccggaa

SEQ ID NO: 1556376 - RNA, 19 nt, Artificial Sequence
  Description of Artificial Sequence: Synthetic oligonucleotide
gcgcaguaccgaacgcauu

SEQ ID NO: 1556377 - RNA, 19 nt, Artificial Sequence
  Description of Artificial Sequence: Synthetic oligonucleotide
cggcgccuucaucgggguc

SEQ ID NO: 1556378 - RNA, 19 nt, Artificial Sequence
  Description of Artificial Sequence: Synthetic oligonucleotide
gcaggcggguuugcucuuu

SEQ ID NO: 1556379 - RNA, 19 nt, Artificial Sequence
  Description of Artificial Sequence: Synthetic oligonucleotide
ggcgagcacgccgggccuu

SEQ ID NO: 1556380 - RNA, 19 nt, Artificial Sequence
  Description of Artificial Sequence: Synthetic oligonucleotide
ccgcggcgaugaggaaguc

SEQ ID NO: 1556381 - RNA, 19 nt, Artificial Sequence
  Description of Artificial Sequence: Synthetic oligonucleotide
gcgcuggcugcagccuggu

SEQ ID NO: 1556382 - RNA, 19 nt, Artificial Sequence
  Description of Artificial Sequence: Synthetic oligonucleotide
cgucccuccgaagcacggu

SEQ ID NO: 1556383 - RNA, 19 nt, Artificial Sequence
  Description of Artificial Sequence: Synthetic oligonucleotide
cgcgggacauagcccuccu

SEQ ID NO: 1556384 - RNA, 19 nt, Artificial Sequence
  Description of Artificial Sequence: Synthetic oligonucleotide
cgagugacggcggcgccuu

SEQ ID NO: 1556385 - RNA, 19 nt, Artificial Sequence
  Description of Artificial Sequence: Synthetic oligonucleotide
ccccgucgcugaguguggu

SEQ ID NO: 1556386 - RNA, 19 nt, Artificial Sequence
  Description of Artificial Sequence: Synthetic oligonucleotide
aauagauccaaucacgucc

SEQ ID NO: 1556387 - RNA, 19 nt, Artificial Sequence
  Description of Artificial Sequence: Synthetic oligonucleotide
uuaaauagauccaaucacg

SEQ ID NO: 1556388 - RNA, 19 nt, Artificial Sequence
  Description of Artificial Sequence: Synthetic oligonucleotide
uugacuaaaccaaucaugg

SEQ ID NO: 1556389 - RNA, 19 nt, Artificial Sequence
  Description of Artificial Sequence: Synthetic oligonucleotide
aauaguuagaaccuguggu

SEQ ID NO: 1556390 - RNA, 19 nt, Artificial Sequence
  Description of Artificial Sequence: Synthetic oligonucleotide
aauguagcgguucucacgg

SEQ ID NO: 1556391 - RNA, 19 nt, Artificial Sequence
  Description of Artificial Sequence: Synthetic oligonucleotide
aaaaucagccucuucuggc

SEQ ID NO: 1556392 - RNA, 19 nt, Artificial Sequence
  Description of Artificial Sequence: Synthetic oligonucleotide
uccauagugaccaagccgg

SEQ ID NO: 1556393 - RNA, 19 nt, Artificial Sequence
  Description of Artificial Sequence: Synthetic oligonucleotide
auuaccuucacguugacgu

SEQ ID NO: 1556394 - RNA, 19 nt, Artificial Sequence
  Description of Artificial Sequence: Synthetic oligonucleotide
gacaaaacuagcuuuuggg

SEQ ID NO: 1556395 - RNA, 19 nt, Artificial Sequence
  Description of Artificial Sequence: Synthetic oligonucleotide
aaucuuaucuggccgggcc

SEQ ID NO: 1556396 - RNA, 19 nt, Artificial Sequence
  Description of Artificial Sequence: Synthetic oligonucleotide
gacuaaaccaaucaugggc

SEQ ID NO: 1556397 - RNA, 19 nt, Artificial Sequence
  Description of Artificial Sequence: Synthetic oligonucleotide
aucacguccauuuauugac

SEQ ID NO: 1556398 - RNA, 19 nt, Artificial Sequence
  Description of Artificial Sequence: Synthetic oligonucleotide
ugacguuuuggucaaaucc

SEQ ID NO: 1556399 - RNA, 19 nt, Artificial Sequence
  Description of Artificial Sequence: Synthetic oligonucleotide
ugugguagagcccacaaug

SEQ ID NO: 1556400 - RNA, 19 nt, Artificial Sequence
  Description of Artificial Sequence: Synthetic oligonucleotide
uaauaguuagaaccugugg

SEQ ID NO: 1556401 - RNA, 19 nt, Artificial Sequence
  Description of Artificial Sequence: Synthetic oligonucleotide
aucuuugauauacuccucc

SEQ ID NO: 1556402 - RNA, 19 nt, Artificial Sequence
  Description of Artificial Sequence: Synthetic oligonucleotide
uugaucacggucuuguagg

SEQ ID NO: 1556403 - RNA, 19 nt, Artificial Sequence
  Description of Artificial Sequence: Synthetic oligonucleotide
uuauugacuaaaccaauca

SEQ ID NO: 1556404 - RNA, 19 nt, Artificial Sequence
  Description of Artificial Sequence: Synthetic oligonucleotide
aaauagauccaaucacguc

SEQ ID NO: 1556405 - RNA, 19 nt, Artificial Sequence
  Description of Artificial Sequence: Synthetic oligonucleotide
ugaccaaugaccaauggaa

SEQ ID NO: 1556406 - RNA, 19 nt, Artificial Sequence
  Description of Artificial Sequence: Synthetic oligonucleotide
guuuuggucaaauccaucc

SEQ ID NO: 1556407 - RNA, 19 nt, Artificial Sequence
  Description of Artificial Sequence: Synthetic oligonucleotide
ugaugguagagaaaaucag

SEQ ID NO: 1556408 - RNA, 19 nt, Artificial Sequence
  Description of Artificial Sequence: Synthetic oligonucleotide
uaaauagauccaaucacgu

SEQ ID NO: 1556409 - RNA, 19 nt, Artificial Sequence
  Description of Artificial Sequence: Synthetic oligonucleotide
uuuauugacuaaaccaauc

SEQ ID NO: 1556410 - RNA, 19 nt, Artificial Sequence
  Description of Artificial Sequence: Synthetic oligonucleotide
uguacaaacucugagccca

SEQ ID NO: 1556411 - RNA, 19 nt, Artificial Sequence
  Description of Artificial Sequence: Synthetic oligonucleotide
gcacguaauaguuagaacc

SEQ ID NO: 1556412 - RNA, 19 nt, Artificial Sequence
  Description of Artificial Sequence: Synthetic oligonucleotide
aaucacguccauuuauuga

SEQ ID NO: 1556413 - RNA, 19 nt, Artificial Sequence
  Description of Artificial Sequence: Synthetic oligonucleotide
gaggcauugggcuugagca

SEQ ID NO: 1556414 - RNA, 19 nt, Artificial Sequence
  Description of Artificial Sequence: Synthetic oligonucleotide
aaacgcagcugucguaugg

SEQ ID NO: 1556415 - RNA, 19 nt, Artificial Sequence
  Description of Artificial Sequence: Synthetic oligonucleotide
aguagagcuggauccaagg

SEQ ID NO: 1556416 - RNA, 19 nt, Artificial Sequence
  Description of Artificial Sequence: Synthetic oligonucleotide
caugauuaccuucacguug

SEQ ID NO: 1556417 - RNA, 19 nt, Artificial Sequence
  Description of Artificial Sequence: Synthetic oligonucleotide
gaugguagagaaaaucagc

SEQ ID NO: 1556418 - RNA, 19 nt, Artificial Sequence
  Description of Artificial Sequence: Synthetic oligonucleotide
acaaaacuagcuuuuggga

SEQ ID NO: 1556419 - RNA, 19 nt, Artificial Sequence
  Description of Artificial Sequence: Synthetic oligonucleotide
agcaucaugaugcugcugu

SEQ ID NO: 1556420 - RNA, 19 nt, Artificial Sequence
  Description of Artificial Sequence: Synthetic oligonucleotide
caucaaaucucuugguggc

SEQ ID NO: 1556421 - RNA, 19 nt, Artificial Sequence
  Description of Artificial Sequence: Synthetic oligonucleotide
aaucucuugguggcaaugg

SEQ ID NO: 1556422 - RNA, 19 nt, Artificial Sequence
  Description of Artificial Sequence: Synthetic oligonucleotide
ugugccacagccuuugcca

SEQ ID NO: 1556423 - RNA, 19 nt, Artificial Sequence
  Description of Artificial Sequence: Synthetic oligonucleotide
uauugacuaaaccaaucau

SEQ ID NO: 1556424 - RNA, 19 nt, Artificial Sequence
  Description of Artificial Sequence: Synthetic oligonucleotide
accaaucaugggcaaagac

SEQ ID NO: 1556425 - RNA, 19 nt, Artificial Sequence
  Description of Artificial Sequence: Synthetic oligonucleotide
aaucugcuuguagagcucg

SEQ ID NO: 1556426 - RNA, 19 nt, Artificial Sequence
  Description of Artificial Sequence: Synthetic oligonucleotide
aucuuucuugaucacgguc

SEQ ID NO: 1556427 - RNA, 19 nt, Artificial Sequence
  Description of Artificial Sequence: Synthetic oligonucleotide
ugacuaaaccaaucauggg

SEQ ID NO: 1556428 - RNA, 19 nt, Artificial Sequence
  Description of Artificial Sequence: Synthetic oligonucleotide
agcauugucuucccacagc

SEQ ID NO: 1556429 - RNA, 19 nt, Artificial Sequence
  Description of Artificial Sequence: Synthetic oligonucleotide
auauacuccuccuggaccu

SEQ ID NO: 1556430 - RNA, 19 nt, Artificial Sequence
  Description of Artificial Sequence: Synthetic oligonucleotide
caugccuccgauauccgcg

SEQ ID NO: 1556431 - RNA, 19 nt, Artificial Sequence
  Description of Artificial Sequence: Synthetic oligonucleotide
uuguagagcucgaagugug

SEQ ID NO: 1556432 - RNA, 19 nt, Artificial Sequence
  Description of Artificial Sequence: Synthetic oligonucleotide
accaaugaccaauggaaug

SEQ ID NO: 1556433 - RNA, 19 nt, Artificial Sequence
  Description of Artificial Sequence: Synthetic oligonucleotide
gugagugggagcuccaccg

SEQ ID NO: 1556434 - RNA, 19 nt, Artificial Sequence
  Description of Artificial Sequence: Synthetic oligonucleotide
uguuuugauccacagccuc

SEQ ID NO: 1556435 - RNA, 19 nt, Artificial Sequence
  Description of Artificial Sequence: Synthetic oligonucleotide
uguaaaacucauguuccug

SEQ ID NO: 1556436 - RNA, 19 nt, Artificial Sequence
  Description of Artificial Sequence: Synthetic oligonucleotide
uuuggucaaauccauccau

SEQ ID NO: 1556437 - RNA, 19 nt, Artificial Sequence
  Description of Artificial Sequence: Synthetic oligonucleotide
aaaucuuaucuggccgggc

SEQ ID NO: 1556438 - RNA, 19 nt, Artificial Sequence
  Description of Artificial Sequence: Synthetic oligonucleotide
cuccauagugaccaagccg

SEQ ID NO: 1556439 - RNA, 19 nt, Artificial Sequence
  Description of Artificial Sequence: Synthetic oligonucleotide
guacagguccuccaggucc

SEQ ID NO: 1556440 - RNA, 19 nt, Artificial Sequence
  Description of Artificial Sequence: Synthetic oligonucleotide
uaguuagaaccugugguag

SEQ ID NO: 1556441 - RNA, 19 nt, Artificial Sequence
  Description of Artificial Sequence: Synthetic oligonucleotide
uaggaugcgcacguaauag

SEQ ID NO: 1556442 - RNA, 19 nt, Artificial Sequence
  Description of Artificial Sequence: Synthetic oligonucleotide
cucugaaccucccugucgg

SEQ ID NO: 1556443 - RNA, 19 nt, Artificial Sequence
  Description of Artificial Sequence: Synthetic oligonucleotide
augcgcacguaauaguuag

SEQ ID NO: 1556444 - RNA, 19 nt, Artificial Sequence
  Description of Artificial Sequence: Synthetic oligonucleotide
acuaaaccaaucaugggca

SEQ ID NO: 1556445 - RNA, 19 nt, Artificial Sequence
  Description of Artificial Sequence: Synthetic oligonucleotide
gguagagaaaaucagccuc

SEQ ID NO: 1556446 - RNA, 19 nt, Artificial Sequence
  Description of Artificial Sequence: Synthetic oligonucleotide
auagugaccaagccggccu

SEQ ID NO: 1556447 - RNA, 19 nt, Artificial Sequence
  Description of Artificial Sequence: Synthetic oligonucleotide
agaaaggacaggccggucu

SEQ ID NO: 1556448 - RNA, 19 nt, Artificial Sequence
  Description of Artificial Sequence: Synthetic oligonucleotide
aggaucgaugccaaucugc

SEQ ID NO: 1556449 - RNA, 19 nt, Artificial Sequence
  Description of Artificial Sequence: Synthetic oligonucleotide
uucuggauguccaugccuc

SEQ ID NO: 1556450 - RNA, 19 nt, Artificial Sequence
  Description of Artificial Sequence: Synthetic oligonucleotide
uaaaacucauguuccugcu

SEQ ID NO: 1556451 - RNA, 19 nt, Artificial Sequence
  Description of Artificial Sequence: Synthetic oligonucleotide
cauuugguucagcagcucc

SEQ ID NO: 1556452 - RNA, 19 nt, Artificial Sequence
  Description of Artificial Sequence: Synthetic oligonucleotide
agccccugaaaucuuaucu

SEQ ID NO: 1556453 - RNA, 19 nt, Artificial Sequence
  Description of Artificial Sequence: Synthetic oligonucleotide
auagucuuccaggucuacc

SEQ ID NO: 1556454 - RNA, 19 nt, Artificial Sequence
  Description of Artificial Sequence: Synthetic oligonucleotide
cuguuuguggccaugauua

SEQ ID NO: 1556455 - RNA, 19 nt, Artificial Sequence
  Description of Artificial Sequence: Synthetic oligonucleotide
gaaaucuuaucuggccggg

SEQ ID NO: 1556456 - RNA, 19 nt, Artificial Sequence
  Description of Artificial Sequence: Synthetic oligonucleotide
cucugagcccaccacacgg

SEQ ID NO: 1556457 - RNA, 19 nt, Artificial Sequence
  Description of Artificial Sequence: Synthetic oligonucleotide
ugaugucagccccugaaau

SEQ ID NO: 1556458 - RNA, 19 nt, Artificial Sequence
  Description of Artificial Sequence: Synthetic oligonucleotide
ugaccaauggaaugcucug

SEQ ID NO: 1556459 - RNA, 19 nt, Artificial Sequence
  Description of Artificial Sequence: Synthetic oligonucleotide
cacguugacguuuugguca

SEQ ID NO: 1556460 - RNA, 19 nt, Artificial Sequence
  Description of Artificial Sequence: Synthetic oligonucleotide
gacguuuuggucaaaucca

SEQ ID NO: 1556461 - RNA, 19 nt, Artificial Sequence
  Description of Artificial Sequence: Synthetic oligonucleotide
guuagaaccugugguagag

SEQ ID NO: 1556462 - RNA, 19 nt, Artificial Sequence
  Description of Artificial Sequence: Synthetic oligonucleotide
cucgaagugugugaguggg

SEQ ID NO: 1556463 - RNA, 19 nt, Artificial Sequence
  Description of Artificial Sequence: Synthetic oligonucleotide
ugugagugggagcuccacc

SEQ ID NO: 1556464 - RNA, 19 nt, Artificial Sequence
  Description of Artificial Sequence: Synthetic oligonucleotide
uguagcgguucucacggac

SEQ ID NO: 1556465 - RNA, 19 nt, Artificial Sequence
  Description of Artificial Sequence: Synthetic oligonucleotide
aucacaucuggcuucuggu

SEQ ID NO: 1556466 - RNA, 19 nt, Artificial Sequence
  Description of Artificial Sequence: Synthetic oligonucleotide
caacauuccacucuccuga

SEQ ID NO: 1556467 - RNA, 19 nt, Artificial Sequence
  Description of Artificial Sequence: Synthetic oligonucleotide
ugugcauggaggaauucuu

SEQ ID NO: 1556468 - RNA, 19 nt, Artificial Sequence
  Description of Artificial Sequence: Synthetic oligonucleotide
aaugaccaauggaaugcuc

SEQ ID NO: 1556469 - RNA, 19 nt, Artificial Sequence
  Description of Artificial Sequence: Synthetic oligonucleotide
cuaucuccuccauagugac

SEQ ID NO: 1556470 - RNA, 19 nt, Artificial Sequence
  Description of Artificial Sequence: Synthetic oligonucleotide
aaaucucuugguggcaaug

SEQ ID NO: 1556471 - RNA, 19 nt, Artificial Sequence
  Description of Artificial Sequence: Synthetic oligonucleotide
auccgcguacaucacaucu

SEQ ID NO: 1556472 - RNA, 19 nt, Artificial Sequence
  Description of Artificial Sequence: Synthetic oligonucleotide
uuuugauccacagccucca

SEQ ID NO: 1556473 - RNA, 19 nt, Artificial Sequence
  Description of Artificial Sequence: Synthetic oligonucleotide
gugggaauucaaucuugcg

SEQ ID NO: 1556474 - RNA, 19 nt, Artificial Sequence
  Description of Artificial Sequence: Synthetic oligonucleotide
uugggcuugagcaguuccc

SEQ ID NO: 1556475 - RNA, 19 nt, Artificial Sequence
  Description of Artificial Sequence: Synthetic oligonucleotide
gauuaccuucacguugacg

SEQ ID NO: 1556476 - RNA, 19 nt, Artificial Sequence
  Description of Artificial Sequence: Synthetic oligonucleotide
gugaugguagagaaaauca

SEQ ID NO: 1556477 - RNA, 19 nt, Artificial Sequence
  Description of Artificial Sequence: Synthetic oligonucleotide
ugcauggaggaauucuuuc

SEQ ID NO: 1556478 - RNA, 19 nt, Artificial Sequence
  Description of Artificial Sequence: Synthetic oligonucleotide
caaucacguccauuuauug

SEQ ID NO: 1556479 - RNA, 19 nt, Artificial Sequence
  Description of Artificial Sequence: Synthetic oligonucleotide
gauccaaucacguccauuu

SEQ ID NO: 1556480 - RNA, 19 nt, Artificial Sequence
  Description of Artificial Sequence: Synthetic oligonucleotide
cagguccucagguucaggc

SEQ ID NO: 1556481 - RNA, 19 nt, Artificial Sequence
  Description of Artificial Sequence: Synthetic oligonucleotide
gaaguccuuggccaggaca

SEQ ID NO: 1556482 - RNA, 19 nt, Artificial Sequence
  Description of Artificial Sequence: Synthetic oligonucleotide
gguacuuaggaugcgcacg

SEQ ID NO: 1556483 - RNA, 19 nt, Artificial Sequence
  Description of Artificial Sequence: Synthetic oligonucleotide
gcugcaguuucuuguagcg

SEQ ID NO: 1556484 - RNA, 19 nt, Artificial Sequence
  Description of Artificial Sequence: Synthetic oligonucleotide
cauacaugaggacgccccg

SEQ ID NO: 1556485 - RNA, 19 nt, Artificial Sequence
  Description of Artificial Sequence: Synthetic oligonucleotide
uccgcguacaucacaucug

SEQ ID NO: 1556486 - RNA, 19 nt, Artificial Sequence
  Description of Artificial Sequence: Synthetic oligonucleotide
accaagccggccuccgugc

SEQ ID NO: 1556487 - RNA, 19 nt, Artificial Sequence
  Description of Artificial Sequence: Synthetic oligonucleotide
gaccaauggaaugcucugg

SEQ ID NO: 1556488 - RNA, 19 nt, Artificial Sequence
  Description of Artificial Sequence: Synthetic oligonucleotide
aacacgucccggaccauuc

SEQ ID NO: 1556489 - RNA, 19 nt, Artificial Sequence
  Description of Artificial Sequence: Synthetic oligonucleotide
gacaauguagcgguucuca

SEQ ID NO: 1556490 - RNA, 19 nt, Artificial Sequence
  Description of Artificial Sequence: Synthetic oligonucleotide
aucaugggcaaagacaaaa

SEQ ID NO: 1556491 - RNA, 19 nt, Artificial Sequence
  Description of Artificial Sequence: Synthetic oligonucleotide
ugaucacggucuuguaggc

SEQ ID NO: 1556492 - RNA, 19 nt, Artificial Sequence
  Description of Artificial Sequence: Synthetic oligonucleotide
ccugaaaucuuaucuggcc

SEQ ID NO: 1556493 - RNA, 19 nt, Artificial Sequence
  Description of Artificial Sequence: Synthetic oligonucleotide
ugucguauggugugccaca

SEQ ID NO: 1556494 - RNA, 19 nt, Artificial Sequence
  Description of Artificial Sequence: Synthetic oligonucleotide
auaaacgcagcugucguau

SEQ ID NO: 1556495 - RNA, 19 nt, Artificial Sequence
  Description of Artificial Sequence: Synthetic oligonucleotide
uuggccaggcggaacacgu

SEQ ID NO: 1556496 - RNA, 19 nt, Artificial Sequence
  Description of Artificial Sequence: Synthetic oligonucleotide
gaaccugugguagagccca

SEQ ID NO: 1556497 - RNA, 19 nt, Artificial Sequence
  Description of Artificial Sequence: Synthetic oligonucleotide
aguuagaaccugugguaga

SEQ ID NO: 1556498 - RNA, 19 nt, Artificial Sequence
  Description of Artificial Sequence: Synthetic oligonucleotide
gauauccgcguacaucaca

SEQ ID NO: 1556499 - RNA, 19 nt, Artificial Sequence
  Description of Artificial Sequence: Synthetic oligonucleotide
augauuaccuucacguuga

SEQ ID NO: 1556500 - RNA, 19 nt, Artificial Sequence
  Description of Artificial Sequence: Synthetic oligonucleotide
augaccaauggaaugcucu

SEQ ID NO: 1556501 - RNA, 19 nt, Artificial Sequence
  Description of Artificial Sequence: Synthetic oligonucleotide
cuguguuuugauccacagc

SEQ ID NO: 1556502 - RNA, 19 nt, Artificial Sequence
  Description of Artificial Sequence: Synthetic oligonucleotide
agaaccugugguagagccc

SEQ ID NO: 1556503 - RNA, 19 nt, Artificial Sequence
  Description of Artificial Sequence: Synthetic oligonucleotide
acuuaggaugcgcacguaa

SEQ ID NO: 1556504 - RNA, 19 nt, Artificial Sequence
  Description of Artificial Sequence: Synthetic oligonucleotide
auuuauugacuaaaccaau

SEQ ID NO: 1556505 - RNA, 19 nt, Artificial Sequence
  Description of Artificial Sequence: Synthetic oligonucleotide
aucacggucuuguaggcuu

SEQ ID NO: 1556506 - RNA, 19 nt, Artificial Sequence
  Description of Artificial Sequence: Synthetic oligonucleotide
uggucaaauccauccauuu

SEQ ID NO: 1556507 - RNA, 19 nt, Artificial Sequence
  Description of Artificial Sequence: Synthetic oligonucleotide
uguagagcucgaagugugu

SEQ ID NO: 1556508 - RNA, 19 nt, Artificial Sequence
  Description of Artificial Sequence: Synthetic oligonucleotide
uugacguuuuggucaaauc

SEQ ID NO: 1556509 - RNA, 19 nt, Artificial Sequence
  Description of Artificial Sequence: Synthetic oligonucleotide
ucacguugacguuuugguc

SEQ ID NO: 1556510 - RNA, 19 nt, Artificial Sequence
  Description of Artificial Sequence: Synthetic oligonucleotide
uggcaauggcaucaauuuc

SEQ ID NO: 1556511 - RNA, 19 nt, Artificial Sequence
  Description of Artificial Sequence: Synthetic oligonucleotide
augaggacgccccggggag

SEQ ID NO: 1556512 - RNA, 19 nt, Artificial Sequence
  Description of Artificial Sequence: Synthetic oligonucleotide
auagauccaaucacgucca

SEQ ID NO: 1556513 - RNA, 19 nt, Artificial Sequence
  Description of Artificial Sequence: Synthetic oligonucleotide
uggauguccaugccuccga

SEQ ID NO: 1556514 - RNA, 19 nt, Artificial Sequence
  Description of Artificial Sequence: Synthetic oligonucleotide
ugguacuuaggaugcgcac

SEQ ID NO: 1556515 - RNA, 19 nt, Artificial Sequence
  Description of Artificial Sequence: Synthetic oligonucleotide
ucuucuggcgacggucagg

SEQ ID NO: 1556516 - RNA, 19 nt, Artificial Sequence
  Description of Artificial Sequence: Synthetic oligonucleotide
gauccaaggugucugcucu

SEQ ID NO: 1556517 - RNA, 19 nt, Artificial Sequence
  Description of Artificial Sequence: Synthetic oligonucleotide
uguacagguccuccagguc

SEQ ID NO: 1556518 - RNA, 19 nt, Artificial Sequence
  Description of Artificial Sequence: Synthetic oligonucleotide
cugaccaaugaccaaugga

SEQ ID NO: 1556519 - RNA, 19 nt, Artificial Sequence
  Description of Artificial Sequence: Synthetic oligonucleotide
acucugagcccaccacacg

SEQ ID NO: 1556520 - RNA, 19 nt, Artificial Sequence
  Description of Artificial Sequence: Synthetic oligonucleotide
cuugcuggugaugguagag

SEQ ID NO: 1556521 - RNA, 19 nt, Artificial Sequence
  Description of Artificial Sequence: Synthetic oligonucleotide
ccaaucaugggcaaagaca

SEQ ID NO: 1556522 - RNA, 19 nt, Artificial Sequence
  Description of Artificial Sequence: Synthetic oligonucleotide
ggugaugguagagaaaauc

SEQ ID NO: 1556523 - RNA, 19 nt, Artificial Sequence
  Description of Artificial Sequence: Synthetic oligonucleotide
uuagaaccugugguagagc

SEQ ID NO: 1556524 - RNA, 19 nt, Artificial Sequence
  Description of Artificial Sequence: Synthetic oligonucleotide
agcugucguauggugugcc

SEQ ID NO: 1556525 - RNA, 19 nt, Artificial Sequence
  Description of Artificial Sequence: Synthetic oligonucleotide
auacaugaggacgccccgg

SEQ ID NO: 1556526 - RNA, 19 nt, Artificial Sequence
  Description of Artificial Sequence: Synthetic oligonucleotide
uccaugccuccgauauccg

SEQ ID NO: 1556527 - RNA, 19 nt, Artificial Sequence
  Description of Artificial Sequence: Synthetic oligonucleotide
ugaaccucccugucggcuc

SEQ ID NO: 1556528 - RNA, 19 nt, Artificial Sequence
  Description of Artificial Sequence: Synthetic oligonucleotide
cacguaauaguuagaaccu

SEQ ID NO: 1556529 - RNA, 19 nt, Artificial Sequence
  Description of Artificial Sequence: Synthetic oligonucleotide
aggaugcgcacguaauagu

SEQ ID NO: 1556530 - RNA, 19 nt, Artificial Sequence
  Description of Artificial Sequence: Synthetic oligonucleotide
uaaacgcagcugucguaug

SEQ ID NO: 1556531 - RNA, 19 nt, Artificial Sequence
  Description of Artificial Sequence: Synthetic oligonucleotide
uaaaccaaucaugggcaaa

SEQ ID NO: 1556532 - RNA, 19 nt, Artificial Sequence
  Description of Artificial Sequence: Synthetic oligonucleotide
uugcuguguuugugcaggg

SEQ ID NO: 1556533 - RNA, 19 nt, Artificial Sequence
  Description of Artificial Sequence: Synthetic oligonucleotide
aacgcagcugucguauggu

SEQ ID NO: 1556534 - RNA, 19 nt, Artificial Sequence
  Description of Artificial Sequence: Synthetic oligonucleotide
gaggaucgaugccaaucug

SEQ ID NO: 1556535 - RNA, 19 nt, Artificial Sequence
  Description of Artificial Sequence: Synthetic oligonucleotide
cauagugaccaagccggcc

SEQ ID NO: 1556536 - RNA, 19 nt, Artificial Sequence
  Description of Artificial Sequence: Synthetic oligonucleotide
auggaaugcucuggauucg

SEQ ID NO: 1556537 - RNA, 19 nt, Artificial Sequence
  Description of Artificial Sequence: Synthetic oligonucleotide
gagugggagcuccaccgcc

SEQ ID NO: 1556538 - RNA, 19 nt, Artificial Sequence
  Description of Artificial Sequence: Synthetic oligonucleotide
caccacacggauaaacgca

SEQ ID NO: 1556539 - RNA, 19 nt, Artificial Sequence
  Description of Artificial Sequence: Synthetic oligonucleotide
acacggauaaacgcagcug

SEQ ID NO: 1556540 - RNA, 19 nt, Artificial Sequence
  Description of Artificial Sequence: Synthetic oligonucleotide
guagagcucgaagugugug

SEQ ID NO: 1556541 - RNA, 19 nt, Artificial Sequence
  Description of Artificial Sequence: Synthetic oligonucleotide
acguaauaguuagaaccug

SEQ ID NO: 1556542 - RNA, 19 nt, Artificial Sequence
  Description of Artificial Sequence: Synthetic oligonucleotide
ucccgucugggcaucaaau

SEQ ID NO: 1556543 - RNA, 19 nt, Artificial Sequence
  Description of Artificial Sequence: Synthetic oligonucleotide
cguauggugugccacagcc

SEQ ID NO: 1556544 - RNA, 19 nt, Artificial Sequence
  Description of Artificial Sequence: Synthetic oligonucleotide
uggaaugcucuggauucgc

SEQ ID NO: 1556545 - RNA, 19 nt, Artificial Sequence
  Description of Artificial Sequence: Synthetic oligonucleotide
cccaccacacggauaaacg

SEQ ID NO: 1556546 - RNA, 19 nt, Artificial Sequence
  Description of Artificial Sequence: Synthetic oligonucleotide
caguagagcuggauccaag

SEQ ID NO: 1556547 - RNA, 19 nt, Artificial Sequence
  Description of Artificial Sequence: Synthetic oligonucleotide
gauaaacgcagcugucgua

SEQ ID NO: 1556548 - RNA, 19 nt, Artificial Sequence
  Description of Artificial Sequence: Synthetic oligonucleotide
agugaccaagccggccucc

SEQ ID NO: 1556549 - RNA, 19 nt, Artificial Sequence
  Description of Artificial Sequence: Synthetic oligonucleotide
gccuaucuccuccauagug

SEQ ID NO: 1556550 - RNA, 19 nt, Artificial Sequence
  Description of Artificial Sequence: Synthetic oligonucleotide
ucuuaucuggccgggccac

SEQ ID NO: 1556551 - RNA, 19 nt, Artificial Sequence
  Description of Artificial Sequence: Synthetic oligonucleotide
ugugugagugggagcucca

SEQ ID NO: 1556552 - RNA, 19 nt, Artificial Sequence
  Description of Artificial Sequence: Synthetic oligonucleotide
ucgaugccaaucugcuugu

SEQ ID NO: 1556553 - RNA, 19 nt, Artificial Sequence
  Description of Artificial Sequence: Synthetic oligonucleotide
auauccgcguacaucacau

SEQ ID NO: 1556554 - RNA, 19 nt, Artificial Sequence
  Description of Artificial Sequence: Synthetic oligonucleotide
guccauuuauugacuaaac

SEQ ID NO: 1556555 - RNA, 19 nt, Artificial Sequence
  Description of Artificial Sequence: Synthetic oligonucleotide
gaaccucccugucggcucc

SEQ ID NO: 1556556 - RNA, 19 nt, Artificial Sequence
  Description of Artificial Sequence: Synthetic oligonucleotide
aaccaaucaugggcaaaga

SEQ ID NO: 1556557 - RNA, 19 nt, Artificial Sequence
  Description of Artificial Sequence: Synthetic oligonucleotide
gcagcugucguauggugug

SEQ ID NO: 1556558 - RNA, 19 nt, Artificial Sequence
  Description of Artificial Sequence: Synthetic oligonucleotide
acacgucccggaccauucg

SEQ ID NO: 1556559 - RNA, 19 nt, Artificial Sequence
  Description of Artificial Sequence: Synthetic oligonucleotide
ccccagaaaggacaggccg

SEQ ID NO: 1556560 - RNA, 19 nt, Artificial Sequence
  Description of Artificial Sequence: Synthetic oligonucleotide
ucgaagugugugaguggga

SEQ ID NO: 1556561 - RNA, 19 nt, Artificial Sequence
  Description of Artificial Sequence: Synthetic oligonucleotide
ccgcaguagagcuggaucc

SEQ ID NO: 1556562 - RNA, 19 nt, Artificial Sequence
  Description of Artificial Sequence: Synthetic oligonucleotide
ucugaaccucccugucggc

SEQ ID NO: 1556563 - RNA, 19 nt, Artificial Sequence
  Description of Artificial Sequence: Synthetic oligonucleotide
ucguauggugugccacagc

SEQ ID NO: 1556564 - RNA, 19 nt, Artificial Sequence
  Description of Artificial Sequence: Synthetic oligonucleotide
cacgucccggaccauucgg

SEQ ID NO: 1556565 - RNA, 19 nt, Artificial Sequence
  Description of Artificial Sequence: Synthetic oligonucleotide
ucccugucggcucccgucu

SEQ ID NO: 1556566 - RNA, 19 nt, Artificial Sequence
  Description of Artificial Sequence: Synthetic oligonucleotide
ccaccacacggauaaacgc

SEQ ID NO: 1556567 - RNA, 19 nt, Artificial Sequence
  Description of Artificial Sequence: Synthetic oligonucleotide
cacggauaaacgcagcugu

SEQ ID NO: 1556568 - RNA, 19 nt, Artificial Sequence
  Description of Artificial Sequence: Synthetic oligonucleotide
acggauaaacgcagcuguc

SEQ ID NO: 1556569 - RNA, 19 nt, Artificial Sequence
  Description of Artificial Sequence: Synthetic oligonucleotide
uacaaacucugagcccacc

SEQ ID NO: 1556570 - RNA, 19 nt, Artificial Sequence
  Description of Artificial Sequence: Synthetic oligonucleotide
acguccauuuauugacuaa

SEQ ID NO: 1556571 - RNA, 19 nt, Artificial Sequence
  Description of Artificial Sequence: Synthetic oligonucleotide
ugcgcacguaauaguuaga

SEQ ID NO: 1556572 - RNA, 19 nt, Artificial Sequence
  Description of Artificial Sequence: Synthetic oligonucleotide
caugggcaaagacaaaacu

SEQ ID NO: 1556573 - RNA, 19 nt, Artificial Sequence
  Description of Artificial Sequence: Synthetic oligonucleotide
ugauuaccuucacguugac

SEQ ID NO: 1556574 - RNA, 19 nt, Artificial Sequence
  Description of Artificial Sequence: Synthetic oligonucleotide
uuaccuucacguugacguu

SEQ ID NO: 1556575 - RNA, 19 nt, Artificial Sequence
  Description of Artificial Sequence: Synthetic oligonucleotide
augguacuuaggaugcgca

SEQ ID NO: 1556576 - RNA, 19 nt, Artificial Sequence
  Description of Artificial Sequence: Synthetic oligonucleotide
auuccacucuccugacaga

SEQ ID NO: 1556577 - RNA, 19 nt, Artificial Sequence
  Description of Artificial Sequence: Synthetic oligonucleotide
caaugguacuuaggaugcg

SEQ ID NO: 1556578 - RNA, 19 nt, Artificial Sequence
  Description of Artificial Sequence: Synthetic oligonucleotide
cuggccgggccacauaguc

SEQ ID NO: 1556579 - RNA, 19 nt, Artificial Sequence
  Description of Artificial Sequence: Synthetic oligonucleotide
acguugacguuuuggucaa

SEQ ID NO: 1556580 - RNA, 19 nt, Artificial Sequence
  Description of Artificial Sequence: Synthetic oligonucleotide
guacuuaggaugcgcacgu

SEQ ID NO: 1556581 - RNA, 19 nt, Artificial Sequence
  Description of Artificial Sequence: Synthetic oligonucleotide
gcgacggucagggaguggg

SEQ ID NO: 1556582 - RNA, 19 nt, Artificial Sequence
  Description of Artificial Sequence: Synthetic oligonucleotide
gucguauggugugccacag

SEQ ID NO: 1556583 - RNA, 19 nt, Artificial Sequence
  Description of Artificial Sequence: Synthetic oligonucleotide
gggagugggaauucaaucu

SEQ ID NO: 1556584 - RNA, 19 nt, Artificial Sequence
  Description of Artificial Sequence: Synthetic oligonucleotide
ccaacauuccacucuccug

SEQ ID NO: 1556585 - RNA, 19 nt, Artificial Sequence
  Description of Artificial Sequence: Synthetic oligonucleotide
cuuggccaggcggaacacg

SEQ ID NO: 1556586 - RNA, 19 nt, Artificial Sequence
  Description of Artificial Sequence: Synthetic oligonucleotide
uggccgggccacauagucu

SEQ ID NO: 1556587 - RNA, 19 nt, Artificial Sequence
  Description of Artificial Sequence: Synthetic oligonucleotide
cugucguauggugugccac

SEQ ID NO: 1556588 - RNA, 19 nt, Artificial Sequence
  Description of Artificial Sequence: Synthetic oligonucleotide
ugccuaucuccuccauagu

SEQ ID NO: 1556589 - RNA, 19 nt, Artificial Sequence
  Description of Artificial Sequence: Synthetic oligonucleotide
cccugaaaucuuaucuggc

SEQ ID NO: 1556590 - RNA, 19 nt, Artificial Sequence
  Description of Artificial Sequence: Synthetic oligonucleotide
caggacaauguagcgguuc

SEQ ID NO: 1556591 - RNA, 19 nt, Artificial Sequence
  Description of Artificial Sequence: Synthetic oligonucleotide
cuaaaccaaucaugggcaa

SEQ ID NO: 1556592 - RNA, 19 nt, Artificial Sequence
  Description of Artificial Sequence: Synthetic oligonucleotide
acgcagcugucguauggug

SEQ ID NO: 1556593 - RNA, 19 nt, Artificial Sequence
  Description of Artificial Sequence: Synthetic oligonucleotide
ccgcguacaucacaucugg

SEQ ID NO: 1556594 - RNA, 19 nt, Artificial Sequence
  Description of Artificial Sequence: Synthetic oligonucleotide
gaugcgcacguaauaguua

SEQ ID NO: 1556595 - RNA, 19 nt, Artificial Sequence
  Description of Artificial Sequence: Synthetic oligonucleotide
gcucgaagugugugagugg

SEQ ID NO: 1556596 - RNA, 19 nt, Artificial Sequence
  Description of Artificial Sequence: Synthetic oligonucleotide
gucggcucccgucugggca

SEQ ID NO: 1556597 - RNA, 19 nt, Artificial Sequence
  Description of Artificial Sequence: Synthetic oligonucleotide
uucccggucaaugguacuu

SEQ ID NO: 1556598 - RNA, 19 nt, Artificial Sequence
  Description of Artificial Sequence: Synthetic oligonucleotide
aaucaugggcaaagacaaa

SEQ ID NO: 1556599 - RNA, 19 nt, Artificial Sequence
  Description of Artificial Sequence: Synthetic oligonucleotide
uaccuucacguugacguuu

SEQ ID NO: 1556600 - RNA, 19 nt, Artificial Sequence
  Description of Artificial Sequence: Synthetic oligonucleotide
ugagcccaccacacggaua

SEQ ID NO: 1556601 - RNA, 19 nt, Artificial Sequence
  Description of Artificial Sequence: Synthetic oligonucleotide
agccaacauuccacucucc

SEQ ID NO: 1556602 - RNA, 19 nt, Artificial Sequence
  Description of Artificial Sequence: Synthetic oligonucleotide
cuuaggaugcgcacguaau

SEQ ID NO: 1556603 - RNA, 19 nt, Artificial Sequence
  Description of Artificial Sequence: Synthetic oligonucleotide
agggccaccgaggcauugg

SEQ ID NO: 1556604 - RNA, 19 nt, Artificial Sequence
  Description of Artificial Sequence: Synthetic oligonucleotide
cacaauggcuguguuuuga

SEQ ID NO: 1556605 - RNA, 19 nt, Artificial Sequence
  Description of Artificial Sequence: Synthetic oligonucleotide
gggccauacaugaggacgc

SEQ ID NO: 1556606 - RNA, 19 nt, Artificial Sequence
  Description of Artificial Sequence: Synthetic oligonucleotide
uauccgcguacaucacauc

SEQ ID NO: 1556607 - RNA, 19 nt, Artificial Sequence
  Description of Artificial Sequence: Synthetic oligonucleotide
acgucccggaccauucggg

SEQ ID NO: 1556608 - RNA, 19 nt, Artificial Sequence
  Description of Artificial Sequence: Synthetic oligonucleotide
gaaugcucuggauucgcuu

SEQ ID NO: 1556609 - RNA, 19 nt, Artificial Sequence
  Description of Artificial Sequence: Synthetic oligonucleotide
ggaggaucgaugccaaucu

SEQ ID NO: 1556610 - RNA, 19 nt, Artificial Sequence
  Description of Artificial Sequence: Synthetic oligonucleotide
caauggaaugcucuggauu

SEQ ID NO: 1556611 - RNA, 19 nt, Artificial Sequence
  Description of Artificial Sequence: Synthetic oligonucleotide
ccucugaaccucccugucg

SEQ ID NO: 1556612 - RNA, 19 nt, Artificial Sequence
  Description of Artificial Sequence: Synthetic oligonucleotide
agcgcguugcuguguuugu

SEQ ID NO: 1556613 - RNA, 19 nt, Artificial Sequence
  Description of Artificial Sequence: Synthetic oligonucleotide
auccaaucacguccauuua

SEQ ID NO: 1556614 - RNA, 19 nt, Artificial Sequence
  Description of Artificial Sequence: Synthetic oligonucleotide
acggucagggagugggaau

SEQ ID NO: 1556615 - RNA, 19 nt, Artificial Sequence
  Description of Artificial Sequence: Synthetic oligonucleotide
guagcgguucucacggaca

SEQ ID NO: 1556616 - RNA, 19 nt, Artificial Sequence
  Description of Artificial Sequence: Synthetic oligonucleotide
ggggcccucgcccagguac

SEQ ID NO: 1556617 - RNA, 19 nt, Artificial Sequence
  Description of Artificial Sequence: Synthetic oligonucleotide
cacagacagugcugggauc

SEQ ID NO: 1556618 - RNA, 19 nt, Artificial Sequence
  Description of Artificial Sequence: Synthetic oligonucleotide
gccaggacaauguagcggu

SEQ ID NO: 1556619 - RNA, 19 nt, Artificial Sequence
  Description of Artificial Sequence: Synthetic oligonucleotide
cagcgcguugcuguguuug

SEQ ID NO: 1556620 - RNA, 19 nt, Artificial Sequence
  Description of Artificial Sequence: Synthetic oligonucleotide
gugaccaagccggccuccg

SEQ ID NO: 1556621 - RNA, 19 nt, Artificial Sequence
  Description of Artificial Sequence: Synthetic oligonucleotide
gauguccaugccuccgaua

SEQ ID NO: 1556622 - RNA, 19 nt, Artificial Sequence
  Description of Artificial Sequence: Synthetic oligonucleotide
ggauaaacgcagcugucgu

SEQ ID NO: 1556623 - RNA, 19 nt, Artificial Sequence
  Description of Artificial Sequence: Synthetic oligonucleotide
cucuucuggcgacggucag

SEQ ID NO: 1556624 - RNA, 19 nt, Artificial Sequence
  Description of Artificial Sequence: Synthetic oligonucleotide
gggaggaucgaugccaauc

SEQ ID NO: 1556625 - RNA, 19 nt, Artificial Sequence
  Description of Artificial Sequence: Synthetic oligonucleotide
ucacggucuuguaggcuuu

SEQ ID NO: 1556626 - RNA, 19 nt, Artificial Sequence
  Description of Artificial Sequence: Synthetic oligonucleotide
ugucggcucccgucugggc

SEQ ID NO: 1556627 - RNA, 19 nt, Artificial Sequence
  Description of Artificial Sequence: Synthetic oligonucleotide
cuguacagguccuccaggu

SEQ ID NO: 1556628 - RNA, 19 nt, Artificial Sequence
  Description of Artificial Sequence: Synthetic oligonucleotide
cggauaaacgcagcugucg

SEQ ID NO: 1556629 - RNA, 19 nt, Artificial Sequence
  Description of Artificial Sequence: Synthetic oligonucleotide
ccggucaaugguacuuagg

SEQ ID NO: 1556630 - RNA, 19 nt, Artificial Sequence
  Description of Artificial Sequence: Synthetic oligonucleotide
gccgcaguagagcuggauc

SEQ ID NO: 1556631 - RNA, 19 nt, Artificial Sequence
  Description of Artificial Sequence: Synthetic oligonucleotide
agagcccacaauggcugug

SEQ ID NO: 1556632 - RNA, 19 nt, Artificial Sequence
  Description of Artificial Sequence: Synthetic oligonucleotide
uagauccaaucacguccau

SEQ ID NO: 1556633 - RNA, 19 nt, Artificial Sequence
  Description of Artificial Sequence: Synthetic oligonucleotide
ccaaaaugccuaucuccuc

SEQ ID NO: 1556634 - RNA, 19 nt, Artificial Sequence
  Description of Artificial Sequence: Synthetic oligonucleotide
caggcggaacacgucccgg

SEQ ID NO: 1556635 - RNA, 19 nt, Artificial Sequence
  Description of Artificial Sequence: Synthetic oligonucleotide
caagccggccuccgugcag

SEQ ID NO: 1556636 - RNA, 19 nt, Artificial Sequence
  Description of Artificial Sequence: Synthetic oligonucleotide
cugucggcucccgucuggg

SEQ ID NO: 1556637 - RNA, 19 nt, Artificial Sequence
  Description of Artificial Sequence: Synthetic oligonucleotide
gaccaaugaccaauggaau

SEQ ID NO: 1556638 - RNA, 19 nt, Artificial Sequence
  Description of Artificial Sequence: Synthetic oligonucleotide
cacacggauaaacgcagcu

SEQ ID NO: 1556639 - RNA, 19 nt, Artificial Sequence
  Description of Artificial Sequence: Synthetic oligonucleotide
gggccaccgaggcauuggg

SEQ ID NO: 1556640 - RNA, 19 nt, Artificial Sequence
  Description of Artificial Sequence: Synthetic oligonucleotide
accagcgcguugcuguguu

SEQ ID NO: 1556641 - RNA, 19 nt, Artificial Sequence
  Description of Artificial Sequence: Synthetic oligonucleotide
gacggucagggagugggaa

SEQ ID NO: 1556642 - RNA, 19 nt, Artificial Sequence
  Description of Artificial Sequence: Synthetic oligonucleotide
uagcggcuguacagguccu

SEQ ID NO: 1556643 - RNA, 19 nt, Artificial Sequence
  Description of Artificial Sequence: Synthetic oligonucleotide
ucccggucaaugguacuua

SEQ ID NO: 1556644 - RNA, 19 nt, Artificial Sequence
  Description of Artificial Sequence: Synthetic oligonucleotide
cgcguugcuguguuugugc

SEQ ID NO: 1556645 - RNA, 19 nt, Artificial Sequence
  Description of Artificial Sequence: Synthetic oligonucleotide
caccgccucccgcacuucc

SEQ ID NO: 1556646 - RNA, 19 nt, Artificial Sequence
  Description of Artificial Sequence: Synthetic oligonucleotide
uggccaggcggaacacguc

SEQ ID NO: 1556647 - RNA, 19 nt, Artificial Sequence
  Description of Artificial Sequence: Synthetic oligonucleotide
guacaaacucugagcccac

SEQ ID NO: 1556648 - RNA, 19 nt, Artificial Sequence
  Description of Artificial Sequence: Synthetic oligonucleotide
guugacguuuuggucaaau

SEQ ID NO: 1556649 - RNA, 19 nt, Artificial Sequence
  Description of Artificial Sequence: Synthetic oligonucleotide
cagcugucguauggugugc

SEQ ID NO: 1556650 - RNA, 19 nt, Artificial Sequence
  Description of Artificial Sequence: Synthetic oligonucleotide
ggaucgaugccaaucugcu

SEQ ID NO: 1556651 - RNA, 19 nt, Artificial Sequence
  Description of Artificial Sequence: Synthetic oligonucleotide
ccauagugaccaagccggc

SEQ ID NO: 1556652 - RNA, 19 nt, Artificial Sequence
  Description of Artificial Sequence: Synthetic oligonucleotide
gcccagguacuucuguaca

SEQ ID NO: 1556653 - RNA, 19 nt, Artificial Sequence
  Description of Artificial Sequence: Synthetic oligonucleotide
caaggugucugcucuguuu

SEQ ID NO: 1556654 - RNA, 19 nt, Artificial Sequence
  Description of Artificial Sequence: Synthetic oligonucleotide
cgcacguaauaguuagaac

SEQ ID NO: 1556655 - RNA, 19 nt, Artificial Sequence
  Description of Artificial Sequence: Synthetic oligonucleotide
gcgcacguaauaguuagaa

SEQ ID NO: 1556656 - RNA, 19 nt, Artificial Sequence
  Description of Artificial Sequence: Synthetic oligonucleotide
acaggccggucuggggccg

SEQ ID NO: 1556657 - RNA, 19 nt, Artificial Sequence
  Description of Artificial Sequence: Synthetic oligonucleotide
ggagugggaauucaaucuu

SEQ ID NO: 1556658 - RNA, 19 nt, Artificial Sequence
  Description of Artificial Sequence: Synthetic oligonucleotide
gugugagugggagcuccac

SEQ ID NO: 1556659 - RNA, 19 nt, Artificial Sequence
  Description of Artificial Sequence: Synthetic oligonucleotide
cuggcgacggucagggagu

SEQ ID NO: 1556660 - RNA, 19 nt, Artificial Sequence
  Description of Artificial Sequence: Synthetic oligonucleotide
ccaggcggaacacgucccg

SEQ ID NO: 1556661 - RNA, 19 nt, Artificial Sequence
  Description of Artificial Sequence: Synthetic oligonucleotide
cccgucugggcaucaaauc

SEQ ID NO: 1556662 - RNA, 19 nt, Artificial Sequence
  Description of Artificial Sequence: Synthetic oligonucleotide
gaggacgccccggggagga

SEQ ID NO: 1556663 - RNA, 19 nt, Artificial Sequence
  Description of Artificial Sequence: Synthetic oligonucleotide
gaucgaugccaaucugcuu

SEQ ID NO: 1556664 - RNA, 19 nt, Artificial Sequence
  Description of Artificial Sequence: Synthetic oligonucleotide
gucugggcaucaaaucucu

SEQ ID NO: 1556665 - RNA, 19 nt, Artificial Sequence
  Description of Artificial Sequence: Synthetic oligonucleotide
cauugggcuugagcaguuc

SEQ ID NO: 1556666 - RNA, 19 nt, Artificial Sequence
  Description of Artificial Sequence: Synthetic oligonucleotide
gcguugcuguguuugugca

SEQ ID NO: 1556667 - RNA, 19 nt, Artificial Sequence
  Description of Artificial Sequence: Synthetic oligonucleotide
gccaggugggccauacaug

SEQ ID NO: 1556668 - RNA, 19 nt, Artificial Sequence
  Description of Artificial Sequence: Synthetic oligonucleotide
uacuuaggaugcgcacgua

SEQ ID NO: 1556669 - RNA, 19 nt, Artificial Sequence
  Description of Artificial Sequence: Synthetic oligonucleotide
ccccggggaggaucgaugc

SEQ ID NO: 1556670 - RNA, 19 nt, Artificial Sequence
  Description of Artificial Sequence: Synthetic oligonucleotide
cccggucaaugguacuuag

SEQ ID NO: 1556671 - RNA, 19 nt, Artificial Sequence
  Description of Artificial Sequence: Synthetic oligonucleotide
caaugaccaauggaaugcu

SEQ ID NO: 1556672 - RNA, 19 nt, Artificial Sequence
  Description of Artificial Sequence: Synthetic oligonucleotide
agccucuucuggcgacggu

SEQ ID NO: 1556673 - RNA, 19 nt, Artificial Sequence
  Description of Artificial Sequence: Synthetic oligonucleotide
gccuccgauauccgcguac

SEQ ID NO: 1556674 - RNA, 19 nt, Artificial Sequence
  Description of Artificial Sequence: Synthetic oligonucleotide
guguuuugauccacagccu

SEQ ID NO: 1556675 - RNA, 19 nt, Artificial Sequence
  Description of Artificial Sequence: Synthetic oligonucleotide
cguuuuggucaaauccauc

SEQ ID NO: 1556676 - RNA, 19 nt, Artificial Sequence
  Description of Artificial Sequence: Synthetic oligonucleotide
uucuggcgacggucaggga

SEQ ID NO: 1556677 - RNA, 19 nt, Artificial Sequence
  Description of Artificial Sequence: Synthetic oligonucleotide
accuucacguugacguuuu

SEQ ID NO: 1556678 - RNA, 19 nt, Artificial Sequence
  Description of Artificial Sequence: Synthetic oligonucleotide
gccauacaugaggacgccc

SEQ ID NO: 1556679 - RNA, 19 nt, Artificial Sequence
  Description of Artificial Sequence: Synthetic oligonucleotide
uggcgacggucagggagug

SEQ ID NO: 1556680 - RNA, 19 nt, Artificial Sequence
  Description of Artificial Sequence: Synthetic oligonucleotide
cgucccggaccauucgggg

SEQ ID NO: 1556681 - RNA, 19 nt, Artificial Sequence
  Description of Artificial Sequence: Synthetic oligonucleotide
ccugucggcucccgucugg

SEQ ID NO: 1556682 - RNA, 19 nt, Artificial Sequence
  Description of Artificial Sequence: Synthetic oligonucleotide
agcccacaauggcuguguu

SEQ ID NO: 1556683 - RNA, 19 nt, Artificial Sequence
  Description of Artificial Sequence: Synthetic oligonucleotide
gccucuucuggcgacgguc

SEQ ID NO: 1556684 - RNA, 19 nt, Artificial Sequence
  Description of Artificial Sequence: Synthetic oligonucleotide
gcccaccacacggauaaac

SEQ ID NO: 1556685 - RNA, 19 nt, Artificial Sequence
  Description of Artificial Sequence: Synthetic oligonucleotide
gagcucgaagugugugagu

SEQ ID NO: 1556686 - RNA, 19 nt, Artificial Sequence
  Description of Artificial Sequence: Synthetic oligonucleotide
gccggucuggggccgagac

SEQ ID NO: 1556687 - RNA, 19 nt, Artificial Sequence
  Description of Artificial Sequence: Synthetic oligonucleotide
ugccuccgauauccgcgua

SEQ ID NO: 1556688 - RNA, 19 nt, Artificial Sequence
  Description of Artificial Sequence: Synthetic oligonucleotide
ggucacuuguaaaacucau

SEQ ID NO: 1556689 - RNA, 19 nt, Artificial Sequence
  Description of Artificial Sequence: Synthetic oligonucleotide
ccacaauggcuguguuuug

SEQ ID NO: 1556690 - RNA, 19 nt, Artificial Sequence
  Description of Artificial Sequence: Synthetic oligonucleotide
cuuaucuggccgggccaca

SEQ ID NO: 1556691 - RNA, 19 nt, Artificial Sequence
  Description of Artificial Sequence: Synthetic oligonucleotide
gccccagaaaggacaggcc

SEQ ID NO: 1556692 - RNA, 19 nt, Artificial Sequence
  Description of Artificial Sequence: Synthetic oligonucleotide
gucagccccugaaaucuua

SEQ ID NO: 1556693 - RNA, 19 nt, Artificial Sequence
  Description of Artificial Sequence: Synthetic oligonucleotide
cucccgucugggcaucaaa

SEQ ID NO: 1556694 - RNA, 19 nt, Artificial Sequence
  Description of Artificial Sequence: Synthetic oligonucleotide
ggcguccuggccgcaguag

SEQ ID NO: 1556695 - RNA, 19 nt, Artificial Sequence
  Description of Artificial Sequence: Synthetic oligonucleotide
ccgucugggcaucaaaucu

SEQ ID NO: 1556696 - RNA, 19 nt, Artificial Sequence
  Description of Artificial Sequence: Synthetic oligonucleotide
ggaugcgcacguaauaguu

SEQ ID NO: 1556697 - RNA, 19 nt, Artificial Sequence
  Description of Artificial Sequence: Synthetic oligonucleotide
cugaaccucccugucggcu

SEQ ID NO: 1556698 - RNA, 19 nt, Artificial Sequence
  Description of Artificial Sequence: Synthetic oligonucleotide
ccaaucacguccauuuauu

SEQ ID NO: 1556699 - RNA, 19 nt, Artificial Sequence
  Description of Artificial Sequence: Synthetic oligonucleotide
ccgggccacauagucuucc

SEQ ID NO: 1556700 - RNA, 19 nt, Artificial Sequence
  Description of Artificial Sequence: Synthetic oligonucleotide
ccuggccgcaguagagcug

SEQ ID NO: 1556701 - RNA, 19 nt, Artificial Sequence
  Description of Artificial Sequence: Synthetic oligonucleotide
cgcguacaucacaucuggc

SEQ ID NO: 1556702 - RNA, 19 nt, Artificial Sequence
  Description of Artificial Sequence: Synthetic oligonucleotide
ccgagacacagacagugcu

SEQ ID NO: 1556703 - RNA, 19 nt, Artificial Sequence
  Description of Artificial Sequence: Synthetic oligonucleotide
ggccgggccacauagucuu

SEQ ID NO: 1556704 - RNA, 19 nt, Artificial Sequence
  Description of Artificial Sequence: Synthetic oligonucleotide
cgauauccgcguacaucac

SEQ ID NO: 1556705 - RNA, 19 nt, Artificial Sequence
  Description of Artificial Sequence: Synthetic oligonucleotide
gugcauggaggaauucuuu

SEQ ID NO: 1556706 - RNA, 19 nt, Artificial Sequence
  Description of Artificial Sequence: Synthetic oligonucleotide
caucuggcuucuggucuga

SEQ ID NO: 1556707 - RNA, 19 nt, Artificial Sequence
  Description of Artificial Sequence: Synthetic oligonucleotide
accgaggcauugggcuuga

SEQ ID NO: 1556708 - RNA, 19 nt, Artificial Sequence
  Description of Artificial Sequence: Synthetic oligonucleotide
gcaguagagcuggauccaa

SEQ ID NO: 1556709 - RNA, 19 nt, Artificial Sequence
  Description of Artificial Sequence: Synthetic oligonucleotide
ccaccagcgcguugcugug

SEQ ID NO: 1556710 - RNA, 19 nt, Artificial Sequence
  Description of Artificial Sequence: Synthetic oligonucleotide
ccuccgauauccgcguaca

SEQ ID NO: 1556711 - RNA, 19 nt, Artificial Sequence
  Description of Artificial Sequence: Synthetic oligonucleotide
gcgcguugcuguguuugug

SEQ ID NO: 1556712 - RNA, 19 nt, Artificial Sequence
  Description of Artificial Sequence: Synthetic oligonucleotide
ggaaugcucuggauucgcu

SEQ ID NO: 1556713 - RNA, 19 nt, Artificial Sequence
  Description of Artificial Sequence: Synthetic oligonucleotide
ggcgacggucagggagugg

SEQ ID NO: 1556714 - RNA, 19 nt, Artificial Sequence
  Description of Artificial Sequence: Synthetic oligonucleotide
ccugugcauggaggaauuc

SEQ ID NO: 1556715 - RNA, 19 nt, Artificial Sequence
  Description of Artificial Sequence: Synthetic oligonucleotide
ccaggucuaccuccucaga

SEQ ID NO: 1556716 - RNA, 19 nt, Artificial Sequence
  Description of Artificial Sequence: Synthetic oligonucleotide
cgguccaggcguccuggcc

SEQ ID NO: 1556717 - RNA, 19 nt, Artificial Sequence
  Description of Artificial Sequence: Synthetic oligonucleotide
cagccaggugggccauaca

SEQ ID NO: 1556718 - RNA, 19 nt, Artificial Sequence
  Description of Artificial Sequence: Synthetic oligonucleotide
gcucuggauucgcuucacu

SEQ ID NO: 1556719 - RNA, 19 nt, Artificial Sequence
  Description of Artificial Sequence: Synthetic oligonucleotide
cuccgauauccgcguacau

SEQ ID NO: 1556720 - RNA, 19 nt, Artificial Sequence
  Description of Artificial Sequence: Synthetic oligonucleotide
caggcguccuggccgcagu

SEQ ID NO: 1556721 - RNA, 19 nt, Artificial Sequence
  Description of Artificial Sequence: Synthetic oligonucleotide
cgcagcugucguauggugu

SEQ ID NO: 1556722 - RNA, 19 nt, Artificial Sequence
  Description of Artificial Sequence: Synthetic oligonucleotide
agcccaccacacggauaaa

SEQ ID NO: 1556723 - RNA, 19 nt, Artificial Sequence
  Description of Artificial Sequence: Synthetic oligonucleotide
cccugucggcucccgucug

SEQ ID NO: 1556724 - RNA, 19 nt, Artificial Sequence
  Description of Artificial Sequence: Synthetic oligonucleotide
caggugccuggggaagugu

SEQ ID NO: 1556725 - RNA, 19 nt, Artificial Sequence
  Description of Artificial Sequence: Synthetic oligonucleotide
ggucuggggccgagacaca

SEQ ID NO: 1556726 - RNA, 19 nt, Artificial Sequence
  Description of Artificial Sequence: Synthetic oligonucleotide
cccgcacuuccugcuucug

SEQ ID NO: 1556727 - RNA, 19 nt, Artificial Sequence
  Description of Artificial Sequence: Synthetic oligonucleotide
cggggaggaucgaugccaa

SEQ ID NO: 1556728 - RNA, 19 nt, Artificial Sequence
  Description of Artificial Sequence: Synthetic oligonucleotide
gcccucgcccagguacuuc

SEQ ID NO: 1556729 - RNA, 19 nt, Artificial Sequence
  Description of Artificial Sequence: Synthetic oligonucleotide
ggggaggaucgaugccaau

SEQ ID NO: 1556730 - RNA, 19 nt, Artificial Sequence
  Description of Artificial Sequence: Synthetic oligonucleotide
caccagcgcguugcugugu

SEQ ID NO: 1556731 - RNA, 19 nt, Artificial Sequence
  Description of Artificial Sequence: Synthetic oligonucleotide
acgccccggggaggaucga

SEQ ID NO: 1556732 - RNA, 19 nt, Artificial Sequence
  Description of Artificial Sequence: Synthetic oligonucleotide
gggcccucgcccagguacu

SEQ ID NO: 1556733 - RNA, 19 nt, Artificial Sequence
  Description of Artificial Sequence: Synthetic oligonucleotide
gcucccgucugggcaucaa

SEQ ID NO: 1556734 - RNA, 19 nt, Artificial Sequence
  Description of Artificial Sequence: Synthetic oligonucleotide
ggccuccgugcagcccggc

SEQ ID NO: 1556735 - RNA, 19 nt, Artificial Sequence
  Description of Artificial Sequence: Synthetic oligonucleotide
ggccggucuggggccgaga

SEQ ID NO: 1556736 - RNA, 19 nt, Artificial Sequence
  Description of Artificial Sequence: Synthetic oligonucleotide
ccgaggcauugggcuugag

SEQ ID NO: 1556737 - RNA, 19 nt, Artificial Sequence
  Description of Artificial Sequence: Synthetic oligonucleotide
cggucagggagugggaauu

SEQ ID NO: 1556738 - RNA, 19 nt, Artificial Sequence
  Description of Artificial Sequence: Synthetic oligonucleotide
cgaugccaaucugcuugua

SEQ ID NO: 1556739 - RNA, 19 nt, Artificial Sequence
  Description of Artificial Sequence: Synthetic oligonucleotide
ccagcgcguugcuguguuu

SEQ ID NO: 1556740 - RNA, 19 nt, Artificial Sequence
  Description of Artificial Sequence: Synthetic oligonucleotide
cgccccggggaggaucgau

SEQ ID NO: 1556741 - RNA, 19 nt, Artificial Sequence
  Description of Artificial Sequence: Synthetic oligonucleotide
ugugagaaucccaagguag

SEQ ID NO: 1556742 - RNA, 19 nt, Artificial Sequence
  Description of Artificial Sequence: Synthetic oligonucleotide
uuaauuggcuuuuaucucc

SEQ ID NO: 1556743 - RNA, 19 nt, Artificial Sequence
  Description of Artificial Sequence: Synthetic oligonucleotide
guagugauacaucucagcg

SEQ ID NO: 1556744 - RNA, 19 nt, Artificial Sequence
  Description of Artificial Sequence: Synthetic oligonucleotide
uccaauagggaacaccagg

SEQ ID NO: 1556745 - RNA, 19 nt, Artificial Sequence
  Description of Artificial Sequence: Synthetic oligonucleotide
ucauauaccgugaagucac

SEQ ID NO: 1556746 - RNA, 19 nt, Artificial Sequence
  Description of Artificial Sequence: Synthetic oligonucleotide
cacacaaaacccuugcugg

SEQ ID NO: 1556747 - RNA, 19 nt, Artificial Sequence
  Description of Artificial Sequence: Synthetic oligonucleotide
auccugggcacacaaaacc

SEQ ID NO: 1556748 - RNA, 19 nt, Artificial Sequence
  Description of Artificial Sequence: Synthetic oligonucleotide
uacaucucagcgcugugcg

SEQ ID NO: 1556749 - RNA, 19 nt, Artificial Sequence
  Description of Artificial Sequence: Synthetic oligonucleotide
gaggguucagaccagagac

SEQ ID NO: 1556750 - RNA, 19 nt, Artificial Sequence
  Description of Artificial Sequence: Synthetic oligonucleotide
augagguggagauucuccc

SEQ ID NO: 1556751 - RNA, 19 nt, Artificial Sequence
  Description of Artificial Sequence: Synthetic oligonucleotide
ucuaggaucacuggacugg

SEQ ID NO: 1556752 - RNA, 19 nt, Artificial Sequence
  Description of Artificial Sequence: Synthetic oligonucleotide
agaaucgaucuccucuucc

SEQ ID NO: 1556753 - RNA, 19 nt, Artificial Sequence
  Description of Artificial Sequence: Synthetic oligonucleotide
cuuuaauuggcuuuuaucu

SEQ ID NO: 1556754 - RNA, 19 nt, Artificial Sequence
  Description of Artificial Sequence: Synthetic oligonucleotide
auagucggccuucugaguc

SEQ ID NO: 1556755 - RNA, 19 nt, Artificial Sequence
  Description of Artificial Sequence: Synthetic oligonucleotide
uuuaauuggcuuuuaucuc

SEQ ID NO: 1556756 - RNA, 19 nt, Artificial Sequence
  Description of Artificial Sequence: Synthetic oligonucleotide
ucuguagucuacaccagca

SEQ ID NO: 1556757 - RNA, 19 nt, Artificial Sequence
  Description of Artificial Sequence: Synthetic oligonucleotide
uguagucuacaccagcaga

SEQ ID NO: 1556758 - RNA, 19 nt, Artificial Sequence
  Description of Artificial Sequence: Synthetic oligonucleotide
ucuuggaaggacugaaggc

SEQ ID NO: 1556759 - RNA, 19 nt, Artificial Sequence
  Description of Artificial Sequence: Synthetic oligonucleotide
aagacuggugcauccuggg

SEQ ID NO: 1556760 - RNA, 19 nt, Artificial Sequence
  Description of Artificial Sequence: Synthetic oligonucleotide
agcgcugugcgccagccgc

SEQ ID NO: 1556761 - RNA, 19 nt, Artificial Sequence
  Description of Artificial Sequence: Synthetic oligonucleotide
aagggcggugcuguaagcc

SEQ ID NO: 1556762 - RNA, 19 nt, Artificial Sequence
  Description of Artificial Sequence: Synthetic oligonucleotide
cuucagggcacaauccagg

SEQ ID NO: 1556763 - RNA, 19 nt, Artificial Sequence
  Description of Artificial Sequence: Synthetic oligonucleotide
uucaacgccgccacucggg

SEQ ID NO: 1556764 - RNA, 19 nt, Artificial Sequence
  Description of Artificial Sequence: Synthetic oligonucleotide
aacgccgccacucgggcag

SEQ ID NO: 1556765 - RNA, 19 nt, Artificial Sequence
  Description of Artificial Sequence: Synthetic oligonucleotide
gaggaauggucaaacagug

SEQ ID NO: 1556766 - RNA, 19 nt, Artificial Sequence
  Description of Artificial Sequence: Synthetic oligonucleotide
acgugugugcgccuggugg

SEQ ID NO: 1556767 - RNA, 19 nt, Artificial Sequence
  Description of Artificial Sequence: Synthetic oligonucleotide
uccugggcacacaaaaccc

SEQ ID NO: 1556768 - RNA, 19 nt, Artificial Sequence
  Description of Artificial Sequence: Synthetic oligonucleotide
gaaggcaugguccacacgu

SEQ ID NO: 1556769 - RNA, 19 nt, Artificial Sequence
  Description of Artificial Sequence: Synthetic oligonucleotide
ugggccagagaaucgaucu

SEQ ID NO: 1556770 - RNA, 19 nt, Artificial Sequence
  Description of Artificial Sequence: Synthetic oligonucleotide
ugggcacucauauaccgug

SEQ ID NO: 1556771 - RNA, 19 nt, Artificial Sequence
  Description of Artificial Sequence: Synthetic oligonucleotide
cuaggucucccacaugagg

SEQ ID NO: 1556772 - RNA, 19 nt, Artificial Sequence
  Description of Artificial Sequence: Synthetic oligonucleotide
ucgccaugcuucaacgccg

SEQ ID NO: 1556773 - RNA, 19 nt, Artificial Sequence
  Description of Artificial Sequence: Synthetic oligonucleotide
agcauagucggccuucuga

SEQ ID NO: 1556774 - RNA, 19 nt, Artificial Sequence
  Description of Artificial Sequence: Synthetic oligonucleotide
cacaauccaggcuuccagg

SEQ ID NO: 1556775 - RNA, 19 nt, Artificial Sequence
  Description of Artificial Sequence: Synthetic oligonucleotide
acaagggugaggccauuuc

SEQ ID NO: 1556776 - RNA, 19 nt, Artificial Sequence
  Description of Artificial Sequence: Synthetic oligonucleotide
agaccagagacugugcaag

SEQ ID NO: 1556777 - RNA, 19 nt, Artificial Sequence
  Description of Artificial Sequence: Synthetic oligonucleotide
ugguagugauacaucucag

SEQ ID NO: 1556778 - RNA, 19 nt, Artificial Sequence
  Description of Artificial Sequence: Synthetic oligonucleotide
aucagaggagggugacucc

SEQ ID NO: 1556779 - RNA, 19 nt, Artificial Sequence
  Description of Artificial Sequence: Synthetic oligonucleotide
agacuggugcauccugggc

SEQ ID NO: 1556780 - RNA, 19 nt, Artificial Sequence
  Description of Artificial Sequence: Synthetic oligonucleotide
caagggugaggccauuucc

SEQ ID NO: 1556781 - RNA, 19 nt, Artificial Sequence
  Description of Artificial Sequence: Synthetic oligonucleotide
uauaccgugaagucaccau

SEQ ID NO: 1556782 - RNA, 19 nt, Artificial Sequence
  Description of Artificial Sequence: Synthetic oligonucleotide
ugaagugggcgccuuggcu

SEQ ID NO: 1556783 - RNA, 19 nt, Artificial Sequence
  Description of Artificial Sequence: Synthetic oligonucleotide
uuuccaugcccaccccggg

SEQ ID NO: 1556784 - RNA, 19 nt, Artificial Sequence
  Description of Artificial Sequence: Synthetic oligonucleotide
uucuuuccaauagggaaca

SEQ ID NO: 1556785 - RNA, 19 nt, Artificial Sequence
  Description of Artificial Sequence: Synthetic oligonucleotide
caugcuucaacgccgccac

SEQ ID NO: 1556786 - RNA, 19 nt, Artificial Sequence
  Description of Artificial Sequence: Synthetic oligonucleotide
ugguccacacgugugugcg

SEQ ID NO: 1556787 - RNA, 19 nt, Artificial Sequence
  Description of Artificial Sequence: Synthetic oligonucleotide
gagauucgcgguguugugg

SEQ ID NO: 1556788 - RNA, 19 nt, Artificial Sequence
  Description of Artificial Sequence: Synthetic oligonucleotide
agucaggcggaucucccuc

SEQ ID NO: 1556789 - RNA, 19 nt, Artificial Sequence
  Description of Artificial Sequence: Synthetic oligonucleotide
ucccacaugagguggagau

SEQ ID NO: 1556790 - RNA, 19 nt, Artificial Sequence
  Description of Artificial Sequence: Synthetic oligonucleotide
gacuggucccuccagugug

SEQ ID NO: 1556791 - RNA, 19 nt, Artificial Sequence
  Description of Artificial Sequence: Synthetic oligonucleotide
agauucgcgguguugugga

SEQ ID NO: 1556792 - RNA, 19 nt, Artificial Sequence
  Description of Artificial Sequence: Synthetic oligonucleotide
gagauucucccuggcaagg

SEQ ID NO: 1556793 - RNA, 19 nt, Artificial Sequence
  Description of Artificial Sequence: Synthetic oligonucleotide
uucgcgguguuguggauga

SEQ ID NO: 1556794 - RNA, 19 nt, Artificial Sequence
  Description of Artificial Sequence: Synthetic oligonucleotide
uguggaugaagugggcgcc

SEQ ID NO: 1556795 - RNA, 19 nt, Artificial Sequence
  Description of Artificial Sequence: Synthetic oligonucleotide
ugagucaggcggaucuccc

SEQ ID NO: 1556796 - RNA, 19 nt, Artificial Sequence
  Description of Artificial Sequence: Synthetic oligonucleotide
aaccgugacuggagaagcc

SEQ ID NO: 1556797 - RNA, 19 nt, Artificial Sequence
  Description of Artificial Sequence: Synthetic oligonucleotide
agagaaucgaucuccucuu

SEQ ID NO: 1556798 - RNA, 19 nt, Artificial Sequence
  Description of Artificial Sequence: Synthetic oligonucleotide
cauuuccaugcccaccccg

SEQ ID NO: 1556799 - RNA, 19 nt, Artificial Sequence
  Description of Artificial Sequence: Synthetic oligonucleotide
ggccuucugagucaggcgg

SEQ ID NO: 1556800 - RNA, 19 nt, Artificial Sequence
  Description of Artificial Sequence: Synthetic oligonucleotide
ucccucuguagucuacacc

SEQ ID NO: 1556801 - RNA, 19 nt, Artificial Sequence
  Description of Artificial Sequence: Synthetic oligonucleotide
cucuguagucuacaccagc

SEQ ID NO: 1556802 - RNA, 19 nt, Artificial Sequence
  Description of Artificial Sequence: Synthetic oligonucleotide
cagucuaggagucacugca

SEQ ID NO: 1556803 - RNA, 19 nt, Artificial Sequence
  Description of Artificial Sequence: Synthetic oligonucleotide
gaaccgugacuggagaagc

SEQ ID NO: 1556804 - RNA, 19 nt, Artificial Sequence
  Description of Artificial Sequence: Synthetic oligonucleotide
aaaacccuugcugguucuc

SEQ ID NO: 1556805 - RNA, 19 nt, Artificial Sequence
  Description of Artificial Sequence: Synthetic oligonucleotide
gcgaggaauggucaaacag

SEQ ID NO: 1556806 - RNA, 19 nt, Artificial Sequence
  Description of Artificial Sequence: Synthetic oligonucleotide
ugccaagcagaaagccagg

SEQ ID NO: 1556807 - RNA, 19 nt, Artificial Sequence
  Description of Artificial Sequence: Synthetic oligonucleotide
gugcuguaagccuugcgug

SEQ ID NO: 1556808 - RNA, 19 nt, Artificial Sequence
  Description of Artificial Sequence: Synthetic oligonucleotide
caauagggaacaccaggac

SEQ ID NO: 1556809 - RNA, 19 nt, Artificial Sequence
  Description of Artificial Sequence: Synthetic oligonucleotide
ggugacuccaguuccuuug

SEQ ID NO: 1556810 - RNA, 19 nt, Artificial Sequence
  Description of Artificial Sequence: Synthetic oligonucleotide
ugagaaucccaagguagcu

SEQ ID NO: 1556811 - RNA, 19 nt, Artificial Sequence
  Description of Artificial Sequence: Synthetic oligonucleotide
caucagaggagggugacuc

SEQ ID NO: 1556812 - RNA, 19 nt, Artificial Sequence
  Description of Artificial Sequence: Synthetic oligonucleotide
uccccaggcgagauucgcg

SEQ ID NO: 1556813 - RNA, 19 nt, Artificial Sequence
  Description of Artificial Sequence: Synthetic oligonucleotide
cuguagucuacaccagcag

SEQ ID NO: 1556814 - RNA, 19 nt, Artificial Sequence
  Description of Artificial Sequence: Synthetic oligonucleotide
uggagguuccgugagugga

SEQ ID NO: 1556815 - RNA, 19 nt, Artificial Sequence
  Description of Artificial Sequence: Synthetic oligonucleotide
ucaacgccgccacucgggc

SEQ ID NO: 1556816 - RNA, 19 nt, Artificial Sequence
  Description of Artificial Sequence: Synthetic oligonucleotide
ugggcacacaaaacccuug

SEQ ID NO: 1556817 - RNA, 19 nt, Artificial Sequence
  Description of Artificial Sequence: Synthetic oligonucleotide
agguggagauucucccugg

SEQ ID NO: 1556818 - RNA, 19 nt, Artificial Sequence
  Description of Artificial Sequence: Synthetic oligonucleotide
cuggcaucggugccgacag

SEQ ID NO: 1556819 - RNA, 19 nt, Artificial Sequence
  Description of Artificial Sequence: Synthetic oligonucleotide
ucggccuucugagucaggc

SEQ ID NO: 1556820 - RNA, 19 nt, Artificial Sequence
  Description of Artificial Sequence: Synthetic oligonucleotide
accgugacuggagaagccg

SEQ ID NO: 1556821 - RNA, 19 nt, Artificial Sequence
  Description of Artificial Sequence: Synthetic oligonucleotide
gaauggggcccuggcaucg

SEQ ID NO: 1556822 - RNA, 19 nt, Artificial Sequence
  Description of Artificial Sequence: Synthetic oligonucleotide
uggcuuuuaucuccagaaa

SEQ ID NO: 1556823 - RNA, 19 nt, Artificial Sequence
  Description of Artificial Sequence: Synthetic oligonucleotide
caagcagaggcuaggucuc

SEQ ID NO: 1556824 - RNA, 19 nt, Artificial Sequence
  Description of Artificial Sequence: Synthetic oligonucleotide
gcauagucggccuucugag

SEQ ID NO: 1556825 - RNA, 19 nt, Artificial Sequence
  Description of Artificial Sequence: Synthetic oligonucleotide
ugccugggcucuaggauca

SEQ ID NO: 1556826 - RNA, 19 nt, Artificial Sequence
  Description of Artificial Sequence: Synthetic oligonucleotide
agauucucccuggcaaggg

SEQ ID NO: 1556827 - RNA, 19 nt, Artificial Sequence
  Description of Artificial Sequence: Synthetic oligonucleotide
cauauaccgugaagucacc

SEQ ID NO: 1556828 - RNA, 19 nt, Artificial Sequence
  Description of Artificial Sequence: Synthetic oligonucleotide
gagguuccgugaguggagg

SEQ ID NO: 1556829 - RNA, 19 nt, Artificial Sequence
  Description of Artificial Sequence: Synthetic oligonucleotide
ggagauucucccuggcaag

SEQ ID NO: 1556830 - RNA, 19 nt, Artificial Sequence
  Description of Artificial Sequence: Synthetic oligonucleotide
gauucucccuggcaaggga

SEQ ID NO: 1556831 - RNA, 19 nt, Artificial Sequence
  Description of Artificial Sequence: Synthetic oligonucleotide
aggaauggucaaacagugg

SEQ ID NO: 1556832 - RNA, 19 nt, Artificial Sequence
  Description of Artificial Sequence: Synthetic oligonucleotide
uccaugccugggcucuagg

SEQ ID NO: 1556833 - RNA, 19 nt, Artificial Sequence
  Description of Artificial Sequence: Synthetic oligonucleotide
ugggcguggagguuccgug

SEQ ID NO: 1556834 - RNA, 19 nt, Artificial Sequence
  Description of Artificial Sequence: Synthetic oligonucleotide
cagagaaucgaucuccucu

SEQ ID NO: 1556835 - RNA, 19 nt, Artificial Sequence
  Description of Artificial Sequence: Synthetic oligonucleotide
cuucaacgccgccacucgg

SEQ ID NO: 1556836 - RNA, 19 nt, Artificial Sequence
  Description of Artificial Sequence: Synthetic oligonucleotide
uuccgugaguggaggggag

SEQ ID NO: 1556837 - RNA, 19 nt, Artificial Sequence
  Description of Artificial Sequence: Synthetic oligonucleotide
caucggugccgacagcgag

SEQ ID NO: 1556838 - RNA, 19 nt, Artificial Sequence
  Description of Artificial Sequence: Synthetic oligonucleotide
ggcaucggugccgacagcg

SEQ ID NO: 1556839 - RNA, 19 nt, Artificial Sequence
  Description of Artificial Sequence: Synthetic oligonucleotide
auccccaggcgagauucgc

SEQ ID NO: 1556840 - RNA, 19 nt, Artificial Sequence
  Description of Artificial Sequence: Synthetic oligonucleotide
agcgaggaauggucaaaca

SEQ ID NO: 1556841 - RNA, 19 nt, Artificial Sequence
  Description of Artificial Sequence: Synthetic oligonucleotide
ggaaccgugacuggagaag

SEQ ID NO: 1556842 - RNA, 19 nt, Artificial Sequence
  Description of Artificial Sequence: Synthetic oligonucleotide
guggagguuccgugagugg

SEQ ID NO: 1556843 - RNA, 19 nt, Artificial Sequence
  Description of Artificial Sequence: Synthetic oligonucleotide
uggguugcgcaccuccauc

SEQ ID NO: 1556844 - RNA, 19 nt, Artificial Sequence
  Description of Artificial Sequence: Synthetic oligonucleotide
auauaccgugaagucacca

SEQ ID NO: 1556845 - RNA, 19 nt, Artificial Sequence
  Description of Artificial Sequence: Synthetic oligonucleotide
cacucauauaccgugaagu

SEQ ID NO: 1556846 - RNA, 19 nt, Artificial Sequence
  Description of Artificial Sequence: Synthetic oligonucleotide
uaugccgcuccaggcacag

SEQ ID NO: 1556847 - RNA, 19 nt, Artificial Sequence
  Description of Artificial Sequence: Synthetic oligonucleotide
gaccccacugugagaaucc

SEQ ID NO: 1556848 - RNA, 19 nt, Artificial Sequence
  Description of Artificial Sequence: Synthetic oligonucleotide
agggcggugcuguaagccu

SEQ ID NO: 1556849 - RNA, 19 nt, Artificial Sequence
  Description of Artificial Sequence: Synthetic oligonucleotide
cugagucaggcggaucucc

SEQ ID NO: 1556850 - RNA, 19 nt, Artificial Sequence
  Description of Artificial Sequence: Synthetic oligonucleotide
ggguucagaccagagacug

SEQ ID NO: 1556851 - RNA, 19 nt, Artificial Sequence
  Description of Artificial Sequence: Synthetic oligonucleotide
gagaaucgaucuccucuuc

SEQ ID NO: 1556852 - RNA, 19 nt, Artificial Sequence
  Description of Artificial Sequence: Synthetic oligonucleotide
guagccgcaggugccgugg

SEQ ID NO: 1556853 - RNA, 19 nt, Artificial Sequence
  Description of Artificial Sequence: Synthetic oligonucleotide
ggaucacuggacugguccc

SEQ ID NO: 1556854 - RNA, 19 nt, Artificial Sequence
  Description of Artificial Sequence: Synthetic oligonucleotide
ggugcuguaagccuugcgu

SEQ ID NO: 1556855 - RNA, 19 nt, Artificial Sequence
  Description of Artificial Sequence: Synthetic oligonucleotide
ucucccucuguagucuaca

SEQ ID NO: 1556856 - RNA, 19 nt, Artificial Sequence
  Description of Artificial Sequence: Synthetic oligonucleotide
uuaugccgcuccaggcaca

SEQ ID NO: 1556857 - RNA, 19 nt, Artificial Sequence
  Description of Artificial Sequence: Synthetic oligonucleotide
aacccuugcugguucucuu

SEQ ID NO: 1556858 - RNA, 19 nt, Artificial Sequence
  Description of Artificial Sequence: Synthetic oligonucleotide
auucgcgguguuguggaug

SEQ ID NO: 1556859 - RNA, 19 nt, Artificial Sequence
  Description of Artificial Sequence: Synthetic oligonucleotide
ugucucuggugcugguagu

SEQ ID NO: 1556860 - RNA, 19 nt, Artificial Sequence
  Description of Artificial Sequence: Synthetic oligonucleotide
ccaauagggaacaccagga

SEQ ID NO: 1556861 - RNA, 19 nt, Artificial Sequence
  Description of Artificial Sequence: Synthetic oligonucleotide
uccgggaaccgugacugga

SEQ ID NO: 1556862 - RNA, 19 nt, Artificial Sequence
  Description of Artificial Sequence: Synthetic oligonucleotide
gcggaggugaggaaugggg

SEQ ID NO: 1556863 - RNA, 19 nt, Artificial Sequence
  Description of Artificial Sequence: Synthetic oligonucleotide
gacuugcuucucccaccgg

SEQ ID NO: 1556864 - RNA, 19 nt, Artificial Sequence
  Description of Artificial Sequence: Synthetic oligonucleotide
gacagcgaggaauggucaa

SEQ ID NO: 1556865 - RNA, 19 nt, Artificial Sequence
  Description of Artificial Sequence: Synthetic oligonucleotide
ccagaagacuggugcaucc

SEQ ID NO: 1556866 - RNA, 19 nt, Artificial Sequence
  Description of Artificial Sequence: Synthetic oligonucleotide
guccacacgugugugcgcc

SEQ ID NO: 1556867 - RNA, 19 nt, Artificial Sequence
  Description of Artificial Sequence: Synthetic oligonucleotide
gcaagggcggugcuguaag

SEQ ID NO: 1556868 - RNA, 19 nt, Artificial Sequence
  Description of Artificial Sequence: Synthetic oligonucleotide
ucgguaccggcuccgggaa

SEQ ID NO: 1556869 - RNA, 19 nt, Artificial Sequence
  Description of Artificial Sequence: Synthetic oligonucleotide
ucggugccgacagcgagga

SEQ ID NO: 1556870 - RNA, 19 nt, Artificial Sequence
  Description of Artificial Sequence: Synthetic oligonucleotide
cucgguaccggcuccggga

SEQ ID NO: 1556871 - RNA, 19 nt, Artificial Sequence
  Description of Artificial Sequence: Synthetic oligonucleotide
ggcgccuuggcuguggcag

SEQ ID NO: 1556872 - RNA, 19 nt, Artificial Sequence
  Description of Artificial Sequence: Synthetic oligonucleotide
ucucccaccggugggcugu

SEQ ID NO: 1556873 - RNA, 19 nt, Artificial Sequence
  Description of Artificial Sequence: Synthetic oligonucleotide
guggagauucucccuggca

SEQ ID NO: 1556874 - RNA, 19 nt, Artificial Sequence
  Description of Artificial Sequence: Synthetic oligonucleotide
gaauggucaaacagugggu

SEQ ID NO: 1556875 - RNA, 19 nt, Artificial Sequence
  Description of Artificial Sequence: Synthetic oligonucleotide
cuguaagccuugcgugccc

SEQ ID NO: 1556876 - RNA, 19 nt, Artificial Sequence
  Description of Artificial Sequence: Synthetic oligonucleotide
ucaucagaggagggugacu

SEQ ID NO: 1556877 - RNA, 19 nt, Artificial Sequence
  Description of Artificial Sequence: Synthetic oligonucleotide
gcacucauauaccgugaag

SEQ ID NO: 1556878 - RNA, 19 nt, Artificial Sequence
  Description of Artificial Sequence: Synthetic oligonucleotide
uggucccuccagugugagg

SEQ ID NO: 1556879 - RNA, 19 nt, Artificial Sequence
  Description of Artificial Sequence: Synthetic oligonucleotide
agcggaggugaggaauggg

SEQ ID NO: 1556880 - RNA, 19 nt, Artificial Sequence
  Description of Artificial Sequence: Synthetic oligonucleotide
cagcgaggaauggucaaac

SEQ ID NO: 1556881 - RNA, 19 nt, Artificial Sequence
  Description of Artificial Sequence: Synthetic oligonucleotide
caagggcggugcuguaagc

SEQ ID NO: 1556882 - RNA, 19 nt, Artificial Sequence
  Description of Artificial Sequence: Synthetic oligonucleotide
ucggcgucgccaugcuuca

SEQ ID NO: 1556883 - RNA, 19 nt, Artificial Sequence
  Description of Artificial Sequence: Synthetic oligonucleotide
gugccgacagcgaggaaug

SEQ ID NO: 1556884 - RNA, 19 nt, Artificial Sequence
  Description of Artificial Sequence: Synthetic oligonucleotide
aguagccgcaggugccgug

SEQ ID NO: 1556885 - RNA, 19 nt, Artificial Sequence
  Description of Artificial Sequence: Synthetic oligonucleotide
uggcccgccucuucagggc

SEQ ID NO: 1556886 - RNA, 19 nt, Artificial Sequence
  Description of Artificial Sequence: Synthetic oligonucleotide
ggcggaucucccucuguag

SEQ ID NO: 1556887 - RNA, 19 nt, Artificial Sequence
  Description of Artificial Sequence: Synthetic oligonucleotide
gguaccggcuccgggaacc

SEQ ID NO: 1556888 - RNA, 19 nt, Artificial Sequence
  Description of Artificial Sequence: Synthetic oligonucleotide
ccgacagcgaggaaugguc

SEQ ID NO: 1556889 - RNA, 19 nt, Artificial Sequence
  Description of Artificial Sequence: Synthetic oligonucleotide
gguggagauucucccuggc

SEQ ID NO: 1556890 - RNA, 19 nt, Artificial Sequence
  Description of Artificial Sequence: Synthetic oligonucleotide
ggcguggagguuccgugag

SEQ ID NO: 1556891 - RNA, 19 nt, Artificial Sequence
  Description of Artificial Sequence: Synthetic oligonucleotide
aggcggaucucccucugua

SEQ ID NO: 1556892 - RNA, 19 nt, Artificial Sequence
  Description of Artificial Sequence: Synthetic oligonucleotide
aucucagcgcugugcgcca

SEQ ID NO: 1556893 - RNA, 19 nt, Artificial Sequence
  Description of Artificial Sequence: Synthetic oligonucleotide
agucggccuucugagucag

SEQ ID NO: 1556894 - RNA, 19 nt, Artificial Sequence
  Description of Artificial Sequence: Synthetic oligonucleotide
gcuguaagccuugcgugcc

SEQ ID NO: 1556895 - RNA, 19 nt, Artificial Sequence
  Description of Artificial Sequence: Synthetic oligonucleotide
ccgugacuggagaagccgg

SEQ ID NO: 1556896 - RNA, 19 nt, Artificial Sequence
  Description of Artificial Sequence: Synthetic oligonucleotide
ccccaggcgagauucgcgg

SEQ ID NO: 1556897 - RNA, 19 nt, Artificial Sequence
  Description of Artificial Sequence: Synthetic oligonucleotide
guggggacaugugcacagg

SEQ ID NO: 1556898 - RNA, 19 nt, Artificial Sequence
  Description of Artificial Sequence: Synthetic oligonucleotide
agggcggcugugcuugcca

SEQ ID NO: 1556899 - RNA, 19 nt, Artificial Sequence
  Description of Artificial Sequence: Synthetic oligonucleotide
aggguucagaccagagacu

SEQ ID NO: 1556900 - RNA, 19 nt, Artificial Sequence
  Description of Artificial Sequence: Synthetic oligonucleotide
agggcacaauccaggcuuc

SEQ ID NO: 1556901 - RNA, 19 nt, Artificial Sequence
  Description of Artificial Sequence: Synthetic oligonucleotide
ugccgacagcgaggaaugg

SEQ ID NO: 1556902 - RNA, 19 nt, Artificial Sequence
  Description of Artificial Sequence: Synthetic oligonucleotide
agagccgcuccgaggauga

SEQ ID NO: 1556903 - RNA, 19 nt, Artificial Sequence
  Description of Artificial Sequence: Synthetic oligonucleotide
uucucccaccggugggcug

SEQ ID NO: 1556904 - RNA, 19 nt, Artificial Sequence
  Description of Artificial Sequence: Synthetic oligonucleotide
uccgaggaugaggccggag

SEQ ID NO: 1556905 - RNA, 19 nt, Artificial Sequence
  Description of Artificial Sequence: Synthetic oligonucleotide
ggacagguggcagcauccg

SEQ ID NO: 1556906 - RNA, 19 nt, Artificial Sequence
  Description of Artificial Sequence: Synthetic oligonucleotide
agccuugcgugcccagccu

SEQ ID NO: 1556907 - RNA, 19 nt, Artificial Sequence
  Description of Artificial Sequence: Synthetic oligonucleotide
accggugggcugugggcug

SEQ ID NO: 1556908 - RNA, 19 nt, Artificial Sequence
  Description of Artificial Sequence: Synthetic oligonucleotide
ggugcugguagugauacau

SEQ ID NO: 1556909 - RNA, 19 nt, Artificial Sequence
  Description of Artificial Sequence: Synthetic oligonucleotide
ucagagccgcuccgaggau

SEQ ID NO: 1556910 - RNA, 19 nt, Artificial Sequence
  Description of Artificial Sequence: Synthetic oligonucleotide
uccacacgugugugcgccu

SEQ ID NO: 1556911 - RNA, 19 nt, Artificial Sequence
  Description of Artificial Sequence: Synthetic oligonucleotide
ggugccucccuccugccaa

SEQ ID NO: 1556912 - RNA, 19 nt, Artificial Sequence
  Description of Artificial Sequence: Synthetic oligonucleotide
cucuauccaugccugggcu

SEQ ID NO: 1556913 - RNA, 19 nt, Artificial Sequence
  Description of Artificial Sequence: Synthetic oligonucleotide
gcuccgaggaugaggccgg

SEQ ID NO: 1556914 - RNA, 19 nt, Artificial Sequence
  Description of Artificial Sequence: Synthetic oligonucleotide
gggaucggcgucgccaugc

SEQ ID NO: 1556915 - RNA, 19 nt, Artificial Sequence
  Description of Artificial Sequence: Synthetic oligonucleotide
ccuuaugccgcuccaggca

SEQ ID NO: 1556916 - RNA, 19 nt, Artificial Sequence
  Description of Artificial Sequence: Synthetic oligonucleotide
caugccugggcucuaggau

SEQ ID NO: 1556917 - RNA, 19 nt, Artificial Sequence
  Description of Artificial Sequence: Synthetic oligonucleotide
guggcaccguucagagccg

SEQ ID NO: 1556918 - RNA, 19 nt, Artificial Sequence
  Description of Artificial Sequence: Synthetic oligonucleotide
gguuccuuaugccgcucca

SEQ ID NO: 1556919 - RNA, 19 nt, Artificial Sequence
  Description of Artificial Sequence: Synthetic oligonucleotide
guaccggcuccgggaaccg

SEQ ID NO: 1556920 - RNA, 19 nt, Artificial Sequence
  Description of Artificial Sequence: Synthetic oligonucleotide
ggcacucauauaccgugaa

SEQ ID NO: 1556921 - RNA, 19 nt, Artificial Sequence
  Description of Artificial Sequence: Synthetic oligonucleotide
cacgugugugcgccuggug

SEQ ID NO: 1556922 - RNA, 19 nt, Artificial Sequence
  Description of Artificial Sequence: Synthetic oligonucleotide
ucucagcgcugugcgccag

SEQ ID NO: 1556923 - RNA, 19 nt, Artificial Sequence
  Description of Artificial Sequence: Synthetic oligonucleotide
acuggucccuccaguguga

SEQ ID NO: 1556924 - RNA, 19 nt, Artificial Sequence
  Description of Artificial Sequence: Synthetic oligonucleotide
ccuugcgugcccagccucc

SEQ ID NO: 1556925 - RNA, 19 nt, Artificial Sequence
  Description of Artificial Sequence: Synthetic oligonucleotide
gugugugcgccuggugggc

SEQ ID NO: 1556926 - RNA, 19 nt, Artificial Sequence
  Description of Artificial Sequence: Synthetic oligonucleotide
ugugcgccagccgcugauc

SEQ ID NO: 1556927 - RNA, 19 nt, Artificial Sequence
  Description of Artificial Sequence: Synthetic oligonucleotide
uggcaccguucagagccgc

SEQ ID NO: 1556928 - RNA, 19 nt, Artificial Sequence
  Description of Artificial Sequence: Synthetic oligonucleotide
aggugaggaauggggcccu

SEQ ID NO: 1556929 - RNA, 19 nt, Artificial Sequence
  Description of Artificial Sequence: Synthetic oligonucleotide
gccagggcggcugugcuug

SEQ ID NO: 1556930 - RNA, 19 nt, Artificial Sequence
  Description of Artificial Sequence: Synthetic oligonucleotide
cuucugagucaggcggauc

SEQ ID NO: 1556931 - RNA, 19 nt, Artificial Sequence
  Description of Artificial Sequence: Synthetic oligonucleotide
ccgggaaccgugacuggag

SEQ ID NO: 1556932 - RNA, 19 nt, Artificial Sequence
  Description of Artificial Sequence: Synthetic oligonucleotide
ccuaaggagcguggcgugg

SEQ ID NO: 1556933 - RNA, 19 nt, Artificial Sequence
  Description of Artificial Sequence: Synthetic oligonucleotide
gcucgguaccggcuccggg

SEQ ID NO: 1556934 - RNA, 19 nt, Artificial Sequence
  Description of Artificial Sequence: Synthetic oligonucleotide
cagcauagucggccuucug

SEQ ID NO: 1556935 - RNA, 19 nt, Artificial Sequence
  Description of Artificial Sequence: Synthetic oligonucleotide
cauagucggccuucugagu

SEQ ID NO: 1556936 - RNA, 19 nt, Artificial Sequence
  Description of Artificial Sequence: Synthetic oligonucleotide
ggacaugugcacaggccca

SEQ ID NO: 1556937 - RNA, 19 nt, Artificial Sequence
  Description of Artificial Sequence: Synthetic oligonucleotide
ccgugaagucaccaucuuc

SEQ ID NO: 1556938 - RNA, 19 nt, Artificial Sequence
  Description of Artificial Sequence: Synthetic oligonucleotide
cgaggaauggucaaacagu

SEQ ID NO: 1556939 - RNA, 19 nt, Artificial Sequence
  Description of Artificial Sequence: Synthetic oligonucleotide
ggugccgacagcgaggaau

SEQ ID NO: 1556940 - RNA, 19 nt, Artificial Sequence
  Description of Artificial Sequence: Synthetic oligonucleotide
ccaggcgagauucgcggug

SEQ ID NO: 1556941 - RNA, 19 nt, Artificial Sequence
  Description of Artificial Sequence: Synthetic oligonucleotide
gagaagccgggaagcgaga

SEQ ID NO: 1556942 - RNA, 19 nt, Artificial Sequence
  Description of Artificial Sequence: Synthetic oligonucleotide
cugggcacucauauaccgu

SEQ ID NO: 1556943 - RNA, 19 nt, Artificial Sequence
  Description of Artificial Sequence: Synthetic oligonucleotide
cagcgcugugcgccagccg

SEQ ID NO: 1556944 - RNA, 19 nt, Artificial Sequence
  Description of Artificial Sequence: Synthetic oligonucleotide
agggaucggcgucgccaug

SEQ ID NO: 1556945 - RNA, 19 nt, Artificial Sequence
  Description of Artificial Sequence: Synthetic oligonucleotide
gguccacacgugugugcgc

SEQ ID NO: 1556946 - RNA, 19 nt, Artificial Sequence
  Description of Artificial Sequence: Synthetic oligonucleotide
ccagagaaucgaucuccuc

SEQ ID NO: 1556947 - RNA, 19 nt, Artificial Sequence
  Description of Artificial Sequence: Synthetic oligonucleotide
cgccacucgggcagcaugg

SEQ ID NO: 1556948 - RNA, 19 nt, Artificial Sequence
  Description of Artificial Sequence: Synthetic oligonucleotide
ccgcugauccccaggcgag

SEQ ID NO: 1556949 - RNA, 19 nt, Artificial Sequence
  Description of Artificial Sequence: Synthetic oligonucleotide
ccagccgcugauccccagg

SEQ ID NO: 1556950 - RNA, 19 nt, Artificial Sequence
  Description of Artificial Sequence: Synthetic oligonucleotide
gggaaccgugacuggagaa

SEQ ID NO: 1556951 - RNA, 19 nt, Artificial Sequence
  Description of Artificial Sequence: Synthetic oligonucleotide
caucagucuaggagucacu

SEQ ID NO: 1556952 - RNA, 19 nt, Artificial Sequence
  Description of Artificial Sequence: Synthetic oligonucleotide
ggcgagauucgcgguguug

SEQ ID NO: 1556953 - RNA, 19 nt, Artificial Sequence
  Description of Artificial Sequence: Synthetic oligonucleotide
ggcgguggcaccguucaga

SEQ ID NO: 1556954 - RNA, 19 nt, Artificial Sequence
  Description of Artificial Sequence: Synthetic oligonucleotide
ccgaggaugaggccggaga

SEQ ID NO: 1556955 - RNA, 19 nt, Artificial Sequence
  Description of Artificial Sequence: Synthetic oligonucleotide
gcaugguccacacgugugu

SEQ ID NO: 1556956 - RNA, 19 nt, Artificial Sequence
  Description of Artificial Sequence: Synthetic oligonucleotide
ggggcccuaaggagcgugg

SEQ ID NO: 1556957 - RNA, 19 nt, Artificial Sequence
  Description of Artificial Sequence: Synthetic oligonucleotide
gcugguucucuuggaagga

SEQ ID NO: 1556958 - RNA, 19 nt, Artificial Sequence
  Description of Artificial Sequence: Synthetic oligonucleotide
gagguuccuuaugccgcuc

SEQ ID NO: 1556959 - RNA, 19 nt, Artificial Sequence
  Description of Artificial Sequence: Synthetic oligonucleotide
cccuaaggagcguggcgug

SEQ ID NO: 1556960 - RNA, 19 nt, Artificial Sequence
  Description of Artificial Sequence: Synthetic oligonucleotide
gccugggcacucauauacc

SEQ ID NO: 1556961 - RNA, 19 nt, Artificial Sequence
  Description of Artificial Sequence: Synthetic oligonucleotide
uugcgugcccagccuccuu

SEQ ID NO: 1556962 - RNA, 19 nt, Artificial Sequence
  Description of Artificial Sequence: Synthetic oligonucleotide
gggcaucagucuaggaguc

SEQ ID NO: 1556963 - RNA, 19 nt, Artificial Sequence
  Description of Artificial Sequence: Synthetic oligonucleotide
gcgagauucgcgguguugu

SEQ ID NO: 1556964 - RNA, 19 nt, Artificial Sequence
  Description of Artificial Sequence: Synthetic oligonucleotide
uauccaugccugggcucua

SEQ ID NO: 1556965 - RNA, 19 nt, Artificial Sequence
  Description of Artificial Sequence: Synthetic oligonucleotide
gggcguggagguuccguga

SEQ ID NO: 1556966 - RNA, 19 nt, Artificial Sequence
  Description of Artificial Sequence: Synthetic oligonucleotide
gauucgcgguguuguggau

SEQ ID NO: 1556967 - RNA, 19 nt, Artificial Sequence
  Description of Artificial Sequence: Synthetic oligonucleotide
ccaugcuucaacgccgcca

SEQ ID NO: 1556968 - RNA, 19 nt, Artificial Sequence
  Description of Artificial Sequence: Synthetic oligonucleotide
caacgccgccacucgggca

SEQ ID NO: 1556969 - RNA, 19 nt, Artificial Sequence
  Description of Artificial Sequence: Synthetic oligonucleotide
gcauccgggcggcgggcgg

SEQ ID NO: 1556970 - RNA, 19 nt, Artificial Sequence
  Description of Artificial Sequence: Synthetic oligonucleotide
ugcgccuggugggcaucug

SEQ ID NO: 1556971 - RNA, 19 nt, Artificial Sequence
  Description of Artificial Sequence: Synthetic oligonucleotide
agguagcugcaggcuccag

SEQ ID NO: 1556972 - RNA, 19 nt, Artificial Sequence
  Description of Artificial Sequence: Synthetic oligonucleotide
cgagauucgcgguguugug

SEQ ID NO: 1556973 - RNA, 19 nt, Artificial Sequence
  Description of Artificial Sequence: Synthetic oligonucleotide
ucccaccggugggcugugg

SEQ ID NO: 1556974 - RNA, 19 nt, Artificial Sequence
  Description of Artificial Sequence: Synthetic oligonucleotide
cucccacaugagguggaga

SEQ ID NO: 1556975 - RNA, 19 nt, Artificial Sequence
  Description of Artificial Sequence: Synthetic oligonucleotide
ggacuggucccuccagugu

SEQ ID NO: 1556976 - RNA, 19 nt, Artificial Sequence
  Description of Artificial Sequence: Synthetic oligonucleotide
gucggccuucugagucagg

SEQ ID NO: 1556977 - RNA, 19 nt, Artificial Sequence
  Description of Artificial Sequence: Synthetic oligonucleotide
guggguugcgcaccuccau

SEQ ID NO: 1556978 - RNA, 19 nt, Artificial Sequence
  Description of Artificial Sequence: Synthetic oligonucleotide
gggcacucauauaccguga

SEQ ID NO: 1556979 - RNA, 19 nt, Artificial Sequence
  Description of Artificial Sequence: Synthetic oligonucleotide
cagcauccgggcggcgggc

SEQ ID NO: 1556980 - RNA, 19 nt, Artificial Sequence
  Description of Artificial Sequence: Synthetic oligonucleotide
gggcacaauccaggcuucc

SEQ ID NO: 1556981 - RNA, 19 nt, Artificial Sequence
  Description of Artificial Sequence: Synthetic oligonucleotide
gggcccuaaggagcguggc

SEQ ID NO: 1556982 - RNA, 19 nt, Artificial Sequence
  Description of Artificial Sequence: Synthetic oligonucleotide
ccugggcacacaaaacccu

SEQ ID NO: 1556983 - RNA, 19 nt, Artificial Sequence
  Description of Artificial Sequence: Synthetic oligonucleotide
cgccaugcuucaacgccgc

SEQ ID NO: 1556984 - RNA, 19 nt, Artificial Sequence
  Description of Artificial Sequence: Synthetic oligonucleotide
aggcgagauucgcgguguu

SEQ ID NO: 1556985 - RNA, 19 nt, Artificial Sequence
  Description of Artificial Sequence: Synthetic oligonucleotide
gagccgcuccgaggaugag

SEQ ID NO: 1556986 - RNA, 19 nt, Artificial Sequence
  Description of Artificial Sequence: Synthetic oligonucleotide
gccuugcgugcccagccuc

SEQ ID NO: 1556987 - RNA, 19 nt, Artificial Sequence
  Description of Artificial Sequence: Synthetic oligonucleotide
uggcaccccgcggccccgg

SEQ ID NO: 1556988 - RNA, 19 nt, Artificial Sequence
  Description of Artificial Sequence: Synthetic oligonucleotide
ggcucgguaccggcuccgg

SEQ ID NO: 1556989 - RNA, 19 nt, Artificial Sequence
  Description of Artificial Sequence: Synthetic oligonucleotide
ccuggcaucggugccgaca

SEQ ID NO: 1556990 - RNA, 19 nt, Artificial Sequence
  Description of Artificial Sequence: Synthetic oligonucleotide
gccgcaggugccgugggga

SEQ ID NO: 1556991 - RNA, 19 nt, Artificial Sequence
  Description of Artificial Sequence: Synthetic oligonucleotide
ggugcauccugggcacaca

SEQ ID NO: 1556992 - RNA, 19 nt, Artificial Sequence
  Description of Artificial Sequence: Synthetic oligonucleotide
cgacagcgaggaaugguca

SEQ ID NO: 1556993 - RNA, 19 nt, Artificial Sequence
  Description of Artificial Sequence: Synthetic oligonucleotide
caggcgagauucgcggugu

SEQ ID NO: 1556994 - RNA, 19 nt, Artificial Sequence
  Description of Artificial Sequence: Synthetic oligonucleotide
ggcaagggcggugcuguaa

SEQ ID NO: 1556995 - RNA, 19 nt, Artificial Sequence
  Description of Artificial Sequence: Synthetic oligonucleotide
ggugaggaauggggcccug

SEQ ID NO: 1556996 - RNA, 19 nt, Artificial Sequence
  Description of Artificial Sequence: Synthetic oligonucleotide
ccgcuccaggcacagcauc

SEQ ID NO: 1556997 - RNA, 19 nt, Artificial Sequence
  Description of Artificial Sequence: Synthetic oligonucleotide
ccacacgugugugcgccug

SEQ ID NO: 1556998 - RNA, 19 nt, Artificial Sequence
  Description of Artificial Sequence: Synthetic oligonucleotide
ccgggcucgguaccggcuc

SEQ ID NO: 1556999 - RNA, 19 nt, Artificial Sequence
  Description of Artificial Sequence: Synthetic oligonucleotide
gugggcguggagguuccgu

SEQ ID NO: 1557000 - RNA, 19 nt, Artificial Sequence
  Description of Artificial Sequence: Synthetic oligonucleotide
gggcgguggcaccguucag

SEQ ID NO: 1557001 - RNA, 19 nt, Artificial Sequence
  Description of Artificial Sequence: Synthetic oligonucleotide
ucgcgguguuguggaugaa

SEQ ID NO: 1557002 - RNA, 19 nt, Artificial Sequence
  Description of Artificial Sequence: Synthetic oligonucleotide
cuugcgugcccagccuccu

SEQ ID NO: 1557003 - RNA, 19 nt, Artificial Sequence
  Description of Artificial Sequence: Synthetic oligonucleotide
ggcaccccgcggccccggg

SEQ ID NO: 1557004 - RNA, 19 nt, Artificial Sequence
  Description of Artificial Sequence: Synthetic oligonucleotide
gggcggcugugcuugccaa

SEQ ID NO: 1557005 - RNA, 19 nt, Artificial Sequence
  Description of Artificial Sequence: Synthetic oligonucleotide
cugugcgccagccgcugau

SEQ ID NO: 1557006 - RNA, 19 nt, Artificial Sequence
  Description of Artificial Sequence: Synthetic oligonucleotide
gccgacagcgaggaauggu

SEQ ID NO: 1557007 - RNA, 19 nt, Artificial Sequence
  Description of Artificial Sequence: Synthetic oligonucleotide
ggaucggcgucgccaugcu

SEQ ID NO: 1557008 - RNA, 19 nt, Artificial Sequence
  Description of Artificial Sequence: Synthetic oligonucleotide
gugugcgccuggugggcau

SEQ ID NO: 1557009 - RNA, 19 nt, Artificial Sequence
  Description of Artificial Sequence: Synthetic oligonucleotide
gcugugcgccagccgcuga

SEQ ID NO: 1557010 - RNA, 19 nt, Artificial Sequence
  Description of Artificial Sequence: Synthetic oligonucleotide
caggcggaucucccucugu

SEQ ID NO: 1557011 - RNA, 19 nt, Artificial Sequence
  Description of Artificial Sequence: Synthetic oligonucleotide
cacaagggugaggccauuu

SEQ ID NO: 1557012 - RNA, 19 nt, Artificial Sequence
  Description of Artificial Sequence: Synthetic oligonucleotide
cgggcgguggcaccguuca

SEQ ID NO: 1557013 - RNA, 19 nt, Artificial Sequence
  Description of Artificial Sequence: Synthetic oligonucleotide
ccagggcggcugugcuugc

SEQ ID NO: 1557014 - RNA, 19 nt, Artificial Sequence
  Description of Artificial Sequence: Synthetic oligonucleotide
cgggaaccgugacuggaga

SEQ ID NO: 1557015 - RNA, 19 nt, Artificial Sequence
  Description of Artificial Sequence: Synthetic oligonucleotide
ccggggcuccaguggggac

SEQ ID NO: 1557016 - RNA, 19 nt, Artificial Sequence
  Description of Artificial Sequence: Synthetic oligonucleotide
cugauccccaggcgagauu

SEQ ID NO: 1557017 - RNA, 19 nt, Artificial Sequence
  Description of Artificial Sequence: Synthetic oligonucleotide
ggugggcaucuggcccgcc

SEQ ID NO: 1557018 - RNA, 19 nt, Artificial Sequence
  Description of Artificial Sequence: Synthetic oligonucleotide
gcguggagguuccgugagu

SEQ ID NO: 1557019 - RNA, 19 nt, Artificial Sequence
  Description of Artificial Sequence: Synthetic oligonucleotide
ccguucagagccgcuccga

SEQ ID NO: 1557020 - RNA, 19 nt, Artificial Sequence
  Description of Artificial Sequence: Synthetic oligonucleotide
gcgggcgguggcaccguuc

SEQ ID NO: 1557021 - RNA, 19 nt, Artificial Sequence
  Description of Artificial Sequence: Synthetic oligonucleotide
ccgcaggugccguggggaa

SEQ ID NO: 1557022 - RNA, 19 nt, Artificial Sequence
  Description of Artificial Sequence: Synthetic oligonucleotide
ggcaccguucagagccgcu

SEQ ID NO: 1557023 - RNA, 19 nt, Artificial Sequence
  Description of Artificial Sequence: Synthetic oligonucleotide
cccaggcgagauucgcggu

SEQ ID NO: 1557024 - RNA, 19 nt, Artificial Sequence
  Description of Artificial Sequence: Synthetic oligonucleotide
cgguaccggcuccgggaac

SEQ ID NO: 1557025 - RNA, 19 nt, Artificial Sequence
  Description of Artificial Sequence: Synthetic oligonucleotide
cgcugugcgccagccgcug

SEQ ID NO: 1557026 - RNA, 19 nt, Artificial Sequence
  Description of Artificial Sequence: Synthetic oligonucleotide
ccccagaagacuggugcau

SEQ ID NO: 1557027 - RNA, 19 nt, Artificial Sequence
  Description of Artificial Sequence: Synthetic oligonucleotide
cgugggcguggagguuccg

SEQ ID NO: 1557028 - RNA, 19 nt, Artificial Sequence
  Description of Artificial Sequence: Synthetic oligonucleotide
cccuggcaucggugccgac

SEQ ID NO: 1557029 - RNA, 19 nt, Artificial Sequence
  Description of Artificial Sequence: Synthetic oligonucleotide
ggcgggcgguggcaccguu

SEQ ID NO: 1557030 - RNA, 19 nt, Artificial Sequence
  Description of Artificial Sequence: Synthetic oligonucleotide
ccgccucuucagggcacaa

SEQ ID NO: 1557031 - RNA, 19 nt, Artificial Sequence
  Description of Artificial Sequence: Synthetic oligonucleotide
cgccgccacucgggcagca

SEQ ID NO: 1557032 - RNA, 19 nt, Artificial Sequence
  Description of Artificial Sequence: Synthetic oligonucleotide
cggugccgacagcgaggaa

SEQ ID NO: 1557033 - RNA, 19 nt, Artificial Sequence
  Description of Artificial Sequence: Synthetic oligonucleotide
cggcgucgccaugcuucaa

SEQ ID NO: 1557034 - RNA, 19 nt, Artificial Sequence
  Description of Artificial Sequence: Synthetic oligonucleotide
cggcgggcgguggcaccgu

SEQ ID NO: 1557035 - RNA, 19 nt, Artificial Sequence
  Description of Artificial Sequence: Synthetic oligonucleotide
uguuauauuauucaaagug

SEQ ID NO: 1557036 - RNA, 19 nt, Artificial Sequence
  Description of Artificial Sequence: Synthetic oligonucleotide
aauaaugguugcuucaucc

SEQ ID NO: 1557037 - RNA, 19 nt, Artificial Sequence
  Description of Artificial Sequence: Synthetic oligonucleotide
uauguuauauuauucaaag

SEQ ID NO: 1557038 - RNA, 19 nt, Artificial Sequence
  Description of Artificial Sequence: Synthetic oligonucleotide
uuauauuauucaaaguggg

SEQ ID NO: 1557039 - RNA, 19 nt, Artificial Sequence
  Description of Artificial Sequence: Synthetic oligonucleotide
uaugauguaaaacuuauuc

SEQ ID NO: 1557040 - RNA, 19 nt, Artificial Sequence
  Description of Artificial Sequence: Synthetic oligonucleotide
ugaucaaugccuuauggcg

SEQ ID NO: 1557041 - RNA, 19 nt, Artificial Sequence
  Description of Artificial Sequence: Synthetic oligonucleotide
uugauucacacucaaaucc

SEQ ID NO: 1557042 - RNA, 19 nt, Artificial Sequence
  Description of Artificial Sequence: Synthetic oligonucleotide
aaaacaauuauuucucuau

SEQ ID NO: 1557043 - RNA, 19 nt, Artificial Sequence
  Description of Artificial Sequence: Synthetic oligonucleotide
cuuauagggauuuauaauc

SEQ ID NO: 1557044 - RNA, 19 nt, Artificial Sequence
  Description of Artificial Sequence: Synthetic oligonucleotide
ucuuacuuaagcuugugug

SEQ ID NO: 1557045 - RNA, 19 nt, Artificial Sequence
  Description of Artificial Sequence: Synthetic oligonucleotide
uugguugucaauaaaccag

SEQ ID NO: 1557046 - RNA, 19 nt, Artificial Sequence
  Description of Artificial Sequence: Synthetic oligonucleotide
ugagauuugcuucuaguag

SEQ ID NO: 1557047 - RNA, 19 nt, Artificial Sequence
  Description of Artificial Sequence: Synthetic oligonucleotide
ucugaggauggauugaagg

SEQ ID NO: 1557048 - RNA, 19 nt, Artificial Sequence
  Description of Artificial Sequence: Synthetic oligonucleotide
ucauauguuauauuauuca

SEQ ID NO: 1557049 - RNA, 19 nt, Artificial Sequence
  Description of Artificial Sequence: Synthetic oligonucleotide
gaguaacuugcuuauaggg

SEQ ID NO: 1557050 - RNA, 19 nt, Artificial Sequence
  Description of Artificial Sequence: Synthetic oligonucleotide
uuuccugcaaguaugcugc

SEQ ID NO: 1557051 - RNA, 19 nt, Artificial Sequence
  Description of Artificial Sequence: Synthetic oligonucleotide
uucaaaguggguaauuagc

SEQ ID NO: 1557052 - RNA, 19 nt, Artificial Sequence
  Description of Artificial Sequence: Synthetic oligonucleotide
aaaacuuauucauauguua

SEQ ID NO: 1557053 - RNA, 19 nt, Artificial Sequence
  Description of Artificial Sequence: Synthetic oligonucleotide
ucaugucgauuucagaacg

SEQ ID NO: 1557054 - RNA, 19 nt, Artificial Sequence
  Description of Artificial Sequence: Synthetic oligonucleotide
uuagucuacauaaacuugu

SEQ ID NO: 1557055 - RNA, 19 nt, Artificial Sequence
  Description of Artificial Sequence: Synthetic oligonucleotide
ugaauugaggcucuguaca

SEQ ID NO: 1557056 - RNA, 19 nt, Artificial Sequence
  Description of Artificial Sequence: Synthetic oligonucleotide
ugugauagaggaaagcaac

SEQ ID NO: 1557057 - RNA, 19 nt, Artificial Sequence
  Description of Artificial Sequence: Synthetic oligonucleotide
ugauguaaaacuuauucau

SEQ ID NO: 1557058 - RNA, 19 nt, Artificial Sequence
  Description of Artificial Sequence: Synthetic oligonucleotide
ucuugguugucaauaaacc

SEQ ID NO: 1557059 - RNA, 19 nt, Artificial Sequence
  Description of Artificial Sequence: Synthetic oligonucleotide
gaaagcaacagcuaagaga

SEQ ID NO: 1557060 - RNA, 19 nt, Artificial Sequence
  Description of Artificial Sequence: Synthetic oligonucleotide
cuuguuaucugcuaaagca

SEQ ID NO: 1557061 - RNA, 19 nt, Artificial Sequence
  Description of Artificial Sequence: Synthetic oligonucleotide
auaaacuuguuucucagga

SEQ ID NO: 1557062 - RNA, 19 nt, Artificial Sequence
  Description of Artificial Sequence: Synthetic oligonucleotide
agcggggacaucuaguugc

SEQ ID NO: 1557063 - RNA, 19 nt, Artificial Sequence
  Description of Artificial Sequence: Synthetic oligonucleotide
uuuuagucuacauaaacuu

SEQ ID NO: 1557064 - RNA, 19 nt, Artificial Sequence
  Description of Artificial Sequence: Synthetic oligonucleotide
uuuagucuacauaaacuug

SEQ ID NO: 1557065 - RNA, 19 nt, Artificial Sequence
  Description of Artificial Sequence: Synthetic oligonucleotide
acacauucguaucuguccc

SEQ ID NO: 1557066 - RNA, 19 nt, Artificial Sequence
  Description of Artificial Sequence: Synthetic oligonucleotide
ucaaaguggguaauuagcu

SEQ ID NO: 1557067 - RNA, 19 nt, Artificial Sequence
  Description of Artificial Sequence: Synthetic oligonucleotide
uuaagcuugugugauagag

SEQ ID NO: 1557068 - RNA, 19 nt, Artificial Sequence
  Description of Artificial Sequence: Synthetic oligonucleotide
ugauaccaaaaucucaaug

SEQ ID NO: 1557069 - RNA, 19 nt, Artificial Sequence
  Description of Artificial Sequence: Synthetic oligonucleotide
ugguugucaauaaaccagg

SEQ ID NO: 1557070 - RNA, 19 nt, Artificial Sequence
  Description of Artificial Sequence: Synthetic oligonucleotide
cucaggaaugcuaacagag

SEQ ID NO: 1557071 - RNA, 19 nt, Artificial Sequence
  Description of Artificial Sequence: Synthetic oligonucleotide
agaacgggagaccauaauc

SEQ ID NO: 1557072 - RNA, 19 nt, Artificial Sequence
  Description of Artificial Sequence: Synthetic oligonucleotide
uuauagggauuuauaaucu

SEQ ID NO: 1557073 - RNA, 19 nt, Artificial Sequence
  Description of Artificial Sequence: Synthetic oligonucleotide
uggaugauuuuacagcuug

SEQ ID NO: 1557074 - RNA, 19 nt, Artificial Sequence
  Description of Artificial Sequence: Synthetic oligonucleotide
gaugucacccuucauuucc

SEQ ID NO: 1557075 - RNA, 19 nt, Artificial Sequence
  Description of Artificial Sequence: Synthetic oligonucleotide
ucugaaauacuuugcgaag

SEQ ID NO: 1557076 - RNA, 19 nt, Artificial Sequence
  Description of Artificial Sequence: Synthetic oligonucleotide
uauaaucuggggaaaacau

SEQ ID NO: 1557077 - RNA, 19 nt, Artificial Sequence
  Description of Artificial Sequence: Synthetic oligonucleotide
uaagcuugugugauagagg

SEQ ID NO: 1557078 - RNA, 19 nt, Artificial Sequence
  Description of Artificial Sequence: Synthetic oligonucleotide
uggaacauuucacaagggc

SEQ ID NO: 1557079 - RNA, 19 nt, Artificial Sequence
  Description of Artificial Sequence: Synthetic oligonucleotide
uuuuacagcuugaacauau

SEQ ID NO: 1557080 - RNA, 19 nt, Artificial Sequence
  Description of Artificial Sequence: Synthetic oligonucleotide
uauuucuugauaccaaaau

SEQ ID NO: 1557081 - RNA, 19 nt, Artificial Sequence
  Description of Artificial Sequence: Synthetic oligonucleotide
gaagugaugucuuuggcca

SEQ ID NO: 1557082 - RNA, 19 nt, Artificial Sequence
  Description of Artificial Sequence: Synthetic oligonucleotide
gauggguagggacucacgg

SEQ ID NO: 1557083 - RNA, 19 nt, Artificial Sequence
  Description of Artificial Sequence: Synthetic oligonucleotide
uugauuucauucaugucga

SEQ ID NO: 1557084 - RNA, 19 nt, Artificial Sequence
  Description of Artificial Sequence: Synthetic oligonucleotide
uauauuauucaaagugggu

SEQ ID NO: 1557085 - RNA, 19 nt, Artificial Sequence
  Description of Artificial Sequence: Synthetic oligonucleotide
augauguaaaacuuauuca

SEQ ID NO: 1557086 - RNA, 19 nt, Artificial Sequence
  Description of Artificial Sequence: Synthetic oligonucleotide
uucacaagggcagugaggc

SEQ ID NO: 1557087 - RNA, 19 nt, Artificial Sequence
  Description of Artificial Sequence: Synthetic oligonucleotide
auugaggcucuguacagac

SEQ ID NO: 1557088 - RNA, 19 nt, Artificial Sequence
  Description of Artificial Sequence: Synthetic oligonucleotide
uacuuugcgaagaugagau

SEQ ID NO: 1557089 - RNA, 19 nt, Artificial Sequence
  Description of Artificial Sequence: Synthetic oligonucleotide
agaguaacuugcuuauagg

SEQ ID NO: 1557090 - RNA, 19 nt, Artificial Sequence
  Description of Artificial Sequence: Synthetic oligonucleotide
aauucugauaccaucgcca

SEQ ID NO: 1557091 - RNA, 19 nt, Artificial Sequence
  Description of Artificial Sequence: Synthetic oligonucleotide
acagcuugaacauauuccu

SEQ ID NO: 1557092 - RNA, 19 nt, Artificial Sequence
  Description of Artificial Sequence: Synthetic oligonucleotide
cucuguuauuucuugauac

SEQ ID NO: 1557093 - RNA, 19 nt, Artificial Sequence
  Description of Artificial Sequence: Synthetic oligonucleotide
uggguaauuagcuuguuau

SEQ ID NO: 1557094 - RNA, 19 nt, Artificial Sequence
  Description of Artificial Sequence: Synthetic oligonucleotide
ugugugauagaggaaagca

SEQ ID NO: 1557095 - RNA, 19 nt, Artificial Sequence
  Description of Artificial Sequence: Synthetic oligonucleotide
ucauacaaagcccuggcau

SEQ ID NO: 1557096 - RNA, 19 nt, Artificial Sequence
  Description of Artificial Sequence: Synthetic oligonucleotide
ugucaauaaaccaggccug

SEQ ID NO: 1557097 - RNA, 19 nt, Artificial Sequence
  Description of Artificial Sequence: Synthetic oligonucleotide
aacagaguaacuugcuuau

SEQ ID NO: 1557098 - RNA, 19 nt, Artificial Sequence
  Description of Artificial Sequence: Synthetic oligonucleotide
uacauaaacuuguuucuca

SEQ ID NO: 1557099 - RNA, 19 nt, Artificial Sequence
  Description of Artificial Sequence: Synthetic oligonucleotide
uguuaucugcuaaagcaac

SEQ ID NO: 1557100 - RNA, 19 nt, Artificial Sequence
  Description of Artificial Sequence: Synthetic oligonucleotide
ugcuaacagaguaacuugc

SEQ ID NO: 1557101 - RNA, 19 nt, Artificial Sequence
  Description of Artificial Sequence: Synthetic oligonucleotide
agggacucacggcagaccc

SEQ ID NO: 1557102 - RNA, 19 nt, Artificial Sequence
  Description of Artificial Sequence: Synthetic oligonucleotide
aaagcaacccucuuacuua

SEQ ID NO: 1557103 - RNA, 19 nt, Artificial Sequence
  Description of Artificial Sequence: Synthetic oligonucleotide
ugcuuauagggauuuauaa

SEQ ID NO: 1557104 - RNA, 19 nt, Artificial Sequence
  Description of Artificial Sequence: Synthetic oligonucleotide
ucucuugguaagaauguca

SEQ ID NO: 1557105 - RNA, 19 nt, Artificial Sequence
  Description of Artificial Sequence: Synthetic oligonucleotide
gaugucuuuggccagaucu

SEQ ID NO: 1557106 - RNA, 19 nt, Artificial Sequence
  Description of Artificial Sequence: Synthetic oligonucleotide
acagcuaagagaugcucuc

SEQ ID NO: 1557107 - RNA, 19 nt, Artificial Sequence
  Description of Artificial Sequence: Synthetic oligonucleotide
uuauaaucuggggaaaaca

SEQ ID NO: 1557108 - RNA, 19 nt, Artificial Sequence
  Description of Artificial Sequence: Synthetic oligonucleotide
auagggauuuauaaucugg

SEQ ID NO: 1557109 - RNA, 19 nt, Artificial Sequence
  Description of Artificial Sequence: Synthetic oligonucleotide
gaacgggagaccauaaucc

SEQ ID NO: 1557110 - RNA, 19 nt, Artificial Sequence
  Description of Artificial Sequence: Synthetic oligonucleotide
aaacuuauucauauguuau

SEQ ID NO: 1557111 - RNA, 19 nt, Artificial Sequence
  Description of Artificial Sequence: Synthetic oligonucleotide
agggauuuauaaucugggg

SEQ ID NO: 1557112 - RNA, 19 nt, Artificial Sequence
  Description of Artificial Sequence: Synthetic oligonucleotide
ugauucacacucaaauccu

SEQ ID NO: 1557113 - RNA, 19 nt, Artificial Sequence
  Description of Artificial Sequence: Synthetic oligonucleotide
ugauagaggaaagcaacag

SEQ ID NO: 1557114 - RNA, 19 nt, Artificial Sequence
  Description of Artificial Sequence: Synthetic oligonucleotide
aaaucucaaugagaguguc

SEQ ID NO: 1557115 - RNA, 19 nt, Artificial Sequence
  Description of Artificial Sequence: Synthetic oligonucleotide
cucagcauuucauccaggg

SEQ ID NO: 1557116 - RNA, 19 nt, Artificial Sequence
  Description of Artificial Sequence: Synthetic oligonucleotide
cauaauccugaucaaugcc

SEQ ID NO: 1557117 - RNA, 19 nt, Artificial Sequence
  Description of Artificial Sequence: Synthetic oligonucleotide
aggaauucugauaccaucg

SEQ ID NO: 1557118 - RNA, 19 nt, Artificial Sequence
  Description of Artificial Sequence: Synthetic oligonucleotide
aaugccuuauggcgaguuc

SEQ ID NO: 1557119 - RNA, 19 nt, Artificial Sequence
  Description of Artificial Sequence: Synthetic oligonucleotide
cugaucaaugccuuauggc

SEQ ID NO: 1557120 - RNA, 19 nt, Artificial Sequence
  Description of Artificial Sequence: Synthetic oligonucleotide
auuguacagagguaugaug

SEQ ID NO: 1557121 - RNA, 19 nt, Artificial Sequence
  Description of Artificial Sequence: Synthetic oligonucleotide
uugguaagaaugucaauaa

SEQ ID NO: 1557122 - RNA, 19 nt, Artificial Sequence
  Description of Artificial Sequence: Synthetic oligonucleotide
uuugcuucuaguagucaga

SEQ ID NO: 1557123 - RNA, 19 nt, Artificial Sequence
  Description of Artificial Sequence: Synthetic oligonucleotide
caucuaguugccaucacac

SEQ ID NO: 1557124 - RNA, 19 nt, Artificial Sequence
  Description of Artificial Sequence: Synthetic oligonucleotide
uguuauuucuugauaccaa

SEQ ID NO: 1557125 - RNA, 19 nt, Artificial Sequence
  Description of Artificial Sequence: Synthetic oligonucleotide
ucuauuguacagagguaug

SEQ ID NO: 1557126 - RNA, 19 nt, Artificial Sequence
  Description of Artificial Sequence: Synthetic oligonucleotide
uuguuaucugcuaaagcaa

SEQ ID NO: 1557127 - RNA, 19 nt, Artificial Sequence
  Description of Artificial Sequence: Synthetic oligonucleotide
aauacuuugcgaagaugag

SEQ ID NO: 1557128 - RNA, 19 nt, Artificial Sequence
  Description of Artificial Sequence: Synthetic oligonucleotide
cacacucaaauccucacag

SEQ ID NO: 1557129 - RNA, 19 nt, Artificial Sequence
  Description of Artificial Sequence: Synthetic oligonucleotide
uuagcagagccaaaacaac

SEQ ID NO: 1557130 - RNA, 19 nt, Artificial Sequence
  Description of Artificial Sequence: Synthetic oligonucleotide
gaauugaggcucuguacag

SEQ ID NO: 1557131 - RNA, 19 nt, Artificial Sequence
  Description of Artificial Sequence: Synthetic oligonucleotide
guaauuagcuuguuaucug

SEQ ID NO: 1557132 - RNA, 19 nt, Artificial Sequence
  Description of Artificial Sequence: Synthetic oligonucleotide
uguaaugaacacauucgua

SEQ ID NO: 1557133 - RNA, 19 nt, Artificial Sequence
  Description of Artificial Sequence: Synthetic oligonucleotide
auauuccuguucuugguug

SEQ ID NO: 1557134 - RNA, 19 nt, Artificial Sequence
  Description of Artificial Sequence: Synthetic oligonucleotide
uuauuucuugauaccaaaa

SEQ ID NO: 1557135 - RNA, 19 nt, Artificial Sequence
  Description of Artificial Sequence: Synthetic oligonucleotide
cauaaacuuguuucucagg

SEQ ID NO: 1557136 - RNA, 19 nt, Artificial Sequence
  Description of Artificial Sequence: Synthetic oligonucleotide
aacuuauucauauguuaua

SEQ ID NO: 1557137 - RNA, 19 nt, Artificial Sequence
  Description of Artificial Sequence: Synthetic oligonucleotide
uucaugucgauuucagaac

SEQ ID NO: 1557138 - RNA, 19 nt, Artificial Sequence
  Description of Artificial Sequence: Synthetic oligonucleotide
gaaagcaaggccuuccgga

SEQ ID NO: 1557139 - RNA, 19 nt, Artificial Sequence
  Description of Artificial Sequence: Synthetic oligonucleotide
uuacagcuugaacauauuc

SEQ ID NO: 1557140 - RNA, 19 nt, Artificial Sequence
  Description of Artificial Sequence: Synthetic oligonucleotide
uaaugguugcuucauccac

SEQ ID NO: 1557141 - RNA, 19 nt, Artificial Sequence
  Description of Artificial Sequence: Synthetic oligonucleotide
uaguucugaaauacuuugc

SEQ ID NO: 1557142 - RNA, 19 nt, Artificial Sequence
  Description of Artificial Sequence: Synthetic oligonucleotide
guuuccugcaaguaugcug

SEQ ID NO: 1557143 - RNA, 19 nt, Artificial Sequence
  Description of Artificial Sequence: Synthetic oligonucleotide
uuuuaaagaagugucuuuu

SEQ ID NO: 1557144 - RNA, 19 nt, Artificial Sequence
  Description of Artificial Sequence: Synthetic oligonucleotide
uccagaacuuuguucaugu

SEQ ID NO: 1557145 - RNA, 19 nt, Artificial Sequence
  Description of Artificial Sequence: Synthetic oligonucleotide
auggguagggacucacggc

SEQ ID NO: 1557146 - RNA, 19 nt, Artificial Sequence
  Description of Artificial Sequence: Synthetic oligonucleotide
uuucucuauuguacagagg

SEQ ID NO: 1557147 - RNA, 19 nt, Artificial Sequence
  Description of Artificial Sequence: Synthetic oligonucleotide
ucucugauuucucuguuau

SEQ ID NO: 1557148 - RNA, 19 nt, Artificial Sequence
  Description of Artificial Sequence: Synthetic oligonucleotide
uugaggaauucugauacca

SEQ ID NO: 1557149 - RNA, 19 nt, Artificial Sequence
  Description of Artificial Sequence: Synthetic oligonucleotide
augccuuauggcgaguucc

SEQ ID NO: 1557150 - RNA, 19 nt, Artificial Sequence
  Description of Artificial Sequence: Synthetic oligonucleotide
caugauagcuuuguguaag

SEQ ID NO: 1557151 - RNA, 19 nt, Artificial Sequence
  Description of Artificial Sequence: Synthetic oligonucleotide
gucgauuucagaacgggag

SEQ ID NO: 1557152 - RNA, 19 nt, Artificial Sequence
  Description of Artificial Sequence: Synthetic oligonucleotide
guagucagaauuguaauga

SEQ ID NO: 1557153 - RNA, 19 nt, Artificial Sequence
  Description of Artificial Sequence: Synthetic oligonucleotide
cuaguagucagaauuguaa

SEQ ID NO: 1557154 - RNA, 19 nt, Artificial Sequence
  Description of Artificial Sequence: Synthetic oligonucleotide
ugaaauacuuugcgaagau

SEQ ID NO: 1557155 - RNA, 19 nt, Artificial Sequence
  Description of Artificial Sequence: Synthetic oligonucleotide
ucgauuucagaacgggaga

SEQ ID NO: 1557156 - RNA, 19 nt, Artificial Sequence
  Description of Artificial Sequence: Synthetic oligonucleotide
aaguauccgaagugauguc

SEQ ID NO: 1557157 - RNA, 19 nt, Artificial Sequence
  Description of Artificial Sequence: Synthetic oligonucleotide
aacgggagaccauaauccu

SEQ ID NO: 1557158 - RNA, 19 nt, Artificial Sequence
  Description of Artificial Sequence: Synthetic oligonucleotide
agaucuuuucauagucucc

SEQ ID NO: 1557159 - RNA, 19 nt, Artificial Sequence
  Description of Artificial Sequence: Synthetic oligonucleotide
aaaaucucaaugagagugu

SEQ ID NO: 1557160 - RNA, 19 nt, Artificial Sequence
  Description of Artificial Sequence: Synthetic oligonucleotide
ucuguaguucugaaauacu

SEQ ID NO: 1557161 - RNA, 19 nt, Artificial Sequence
  Description of Artificial Sequence: Synthetic oligonucleotide
acagcggucacccuuggca

SEQ ID NO: 1557162 - RNA, 19 nt, Artificial Sequence
  Description of Artificial Sequence: Synthetic oligonucleotide
uauuucucuauuguacaga

SEQ ID NO: 1557163 - RNA, 19 nt, Artificial Sequence
  Description of Artificial Sequence: Synthetic oligonucleotide
gcuugaggaauucugauac

SEQ ID NO: 1557164 - RNA, 19 nt, Artificial Sequence
  Description of Artificial Sequence: Synthetic oligonucleotide
acuuauucauauguuauau

SEQ ID NO: 1557165 - RNA, 19 nt, Artificial Sequence
  Description of Artificial Sequence: Synthetic oligonucleotide
agucagaauuguaaugaac

SEQ ID NO: 1557166 - RNA, 19 nt, Artificial Sequence
  Description of Artificial Sequence: Synthetic oligonucleotide
caugucauguucacuguac

SEQ ID NO: 1557167 - RNA, 19 nt, Artificial Sequence
  Description of Artificial Sequence: Synthetic oligonucleotide
accuuuaaccaugauagcu

SEQ ID NO: 1557168 - RNA, 19 nt, Artificial Sequence
  Description of Artificial Sequence: Synthetic oligonucleotide
auaaugguugcuucaucca

SEQ ID NO: 1557169 - RNA, 19 nt, Artificial Sequence
  Description of Artificial Sequence: Synthetic oligonucleotide
gaggaauucugauaccauc

SEQ ID NO: 1557170 - RNA, 19 nt, Artificial Sequence
  Description of Artificial Sequence: Synthetic oligonucleotide
agcaaaggaagcuggggug

SEQ ID NO: 1557171 - RNA, 19 nt, Artificial Sequence
  Description of Artificial Sequence: Synthetic oligonucleotide
gauuuuacagcuugaacau

SEQ ID NO: 1557172 - RNA, 19 nt, Artificial Sequence
  Description of Artificial Sequence: Synthetic oligonucleotide
agaaagcaaggccuuccgg

SEQ ID NO: 1557173 - RNA, 19 nt, Artificial Sequence
  Description of Artificial Sequence: Synthetic oligonucleotide
ucaggaaugcuaacagagu

SEQ ID NO: 1557174 - RNA, 19 nt, Artificial Sequence
  Description of Artificial Sequence: Synthetic oligonucleotide
auaauccugaucaaugccu

SEQ ID NO: 1557175 - RNA, 19 nt, Artificial Sequence
  Description of Artificial Sequence: Synthetic oligonucleotide
cauauguuauauuauucaa

SEQ ID NO: 1557176 - RNA, 19 nt, Artificial Sequence
  Description of Artificial Sequence: Synthetic oligonucleotide
cuugguugucaauaaacca

SEQ ID NO: 1557177 - RNA, 19 nt, Artificial Sequence
  Description of Artificial Sequence: Synthetic oligonucleotide
auguuauauuauucaaagu

SEQ ID NO: 1557178 - RNA, 19 nt, Artificial Sequence
  Description of Artificial Sequence: Synthetic oligonucleotide
cauugguucucuugguaag

SEQ ID NO: 1557179 - RNA, 19 nt, Artificial Sequence
  Description of Artificial Sequence: Synthetic oligonucleotide
cugaauugaggcucuguac

SEQ ID NO: 1557180 - RNA, 19 nt, Artificial Sequence
  Description of Artificial Sequence: Synthetic oligonucleotide
ggauuuauaaucuggggaa

SEQ ID NO: 1557181 - RNA, 19 nt, Artificial Sequence
  Description of Artificial Sequence: Synthetic oligonucleotide
aacagcuaagagaugcucu

SEQ ID NO: 1557182 - RNA, 19 nt, Artificial Sequence
  Description of Artificial Sequence: Synthetic oligonucleotide
aagcccuggcaucuguguc

SEQ ID NO: 1557183 - RNA, 19 nt, Artificial Sequence
  Description of Artificial Sequence: Synthetic oligonucleotide
ucuaguagucagaauugua

SEQ ID NO: 1557184 - RNA, 19 nt, Artificial Sequence
  Description of Artificial Sequence: Synthetic oligonucleotide
gaaguauccgaagugaugu

SEQ ID NO: 1557185 - RNA, 19 nt, Artificial Sequence
  Description of Artificial Sequence: Synthetic oligonucleotide
uucauggcuucauaaaguu

SEQ ID NO: 1557186 - RNA, 19 nt, Artificial Sequence
  Description of Artificial Sequence: Synthetic oligonucleotide
uauucaaaguggguaauua

SEQ ID NO: 1557187 - RNA, 19 nt, Artificial Sequence
  Description of Artificial Sequence: Synthetic oligonucleotide
aguaacuugcuuauaggga

SEQ ID NO: 1557188 - RNA, 19 nt, Artificial Sequence
  Description of Artificial Sequence: Synthetic oligonucleotide
gcuaaagcaacccucuuac

SEQ ID NO: 1557189 - RNA, 19 nt, Artificial Sequence
  Description of Artificial Sequence: Synthetic oligonucleotide
caugucgauuucagaacgg

SEQ ID NO: 1557190 - RNA, 19 nt, Artificial Sequence
  Description of Artificial Sequence: Synthetic oligonucleotide
uucacacucaaauccucac

SEQ ID NO: 1557191 - RNA, 19 nt, Artificial Sequence
  Description of Artificial Sequence: Synthetic oligonucleotide
gggauuuauaaucugggga

SEQ ID NO: 1557192 - RNA, 19 nt, Artificial Sequence
  Description of Artificial Sequence: Synthetic oligonucleotide
cagaacuuuguucauguca

SEQ ID NO: 1557193 - RNA, 19 nt, Artificial Sequence
  Description of Artificial Sequence: Synthetic oligonucleotide
uguaagggcuuuucucagc

SEQ ID NO: 1557194 - RNA, 19 nt, Artificial Sequence
  Description of Artificial Sequence: Synthetic oligonucleotide
uguguaaggcagcaacauc

SEQ ID NO: 1557195 - RNA, 19 nt, Artificial Sequence
  Description of Artificial Sequence: Synthetic oligonucleotide
guuauuucuugauaccaaa

SEQ ID NO: 1557196 - RNA, 19 nt, Artificial Sequence
  Description of Artificial Sequence: Synthetic oligonucleotide
aagggcuuuucucagcauu

SEQ ID NO: 1557197 - RNA, 19 nt, Artificial Sequence
  Description of Artificial Sequence: Synthetic oligonucleotide
cuugguaagaaugucaaua

SEQ ID NO: 1557198 - RNA, 19 nt, Artificial Sequence
  Description of Artificial Sequence: Synthetic oligonucleotide
ucgaugucacccuucauuu

SEQ ID NO: 1557199 - RNA, 19 nt, Artificial Sequence
  Description of Artificial Sequence: Synthetic oligonucleotide
ugcuaaagcaacccucuua

SEQ ID NO: 1557200 - RNA, 19 nt, Artificial Sequence
  Description of Artificial Sequence: Synthetic oligonucleotide
gaaauacuuugcgaagaug

SEQ ID NO: 1557201 - RNA, 19 nt, Artificial Sequence
  Description of Artificial Sequence: Synthetic oligonucleotide
gagauuugcuucuaguagu

SEQ ID NO: 1557202 - RNA, 19 nt, Artificial Sequence
  Description of Artificial Sequence: Synthetic oligonucleotide
uuacuuaagcuugugugau

SEQ ID NO: 1557203 - RNA, 19 nt, Artificial Sequence
  Description of Artificial Sequence: Synthetic oligonucleotide
auauguuauauuauucaaa

SEQ ID NO: 1557204 - RNA, 19 nt, Artificial Sequence
  Description of Artificial Sequence: Synthetic oligonucleotide
ucaauaaugguugcuucau

SEQ ID NO: 1557205 - RNA, 19 nt, Artificial Sequence
  Description of Artificial Sequence: Synthetic oligonucleotide
ucucuguuauuucuugaua

SEQ ID NO: 1557206 - RNA, 19 nt, Artificial Sequence
  Description of Artificial Sequence: Synthetic oligonucleotide
cuuccagauggccuguaag

SEQ ID NO: 1557207 - RNA, 19 nt, Artificial Sequence
  Description of Artificial Sequence: Synthetic oligonucleotide
acucaaauccucacagcgg

SEQ ID NO: 1557208 - RNA, 19 nt, Artificial Sequence
  Description of Artificial Sequence: Synthetic oligonucleotide
agauuccauacuucuucag

SEQ ID NO: 1557209 - RNA, 19 nt, Artificial Sequence
  Description of Artificial Sequence: Synthetic oligonucleotide
uccaagccccuucauggcc

SEQ ID NO: 1557210 - RNA, 19 nt, Artificial Sequence
  Description of Artificial Sequence: Synthetic oligonucleotide
agauuugcuucuaguaguc

SEQ ID NO: 1557211 - RNA, 19 nt, Artificial Sequence
  Description of Artificial Sequence: Synthetic oligonucleotide
uucagguaaaaugcuuuga

SEQ ID NO: 1557212 - RNA, 19 nt, Artificial Sequence
  Description of Artificial Sequence: Synthetic oligonucleotide
aucuggggaaaacauaaua

SEQ ID NO: 1557213 - RNA, 19 nt, Artificial Sequence
  Description of Artificial Sequence: Synthetic oligonucleotide
cuugaggaauucugauacc

SEQ ID NO: 1557214 - RNA, 19 nt, Artificial Sequence
  Description of Artificial Sequence: Synthetic oligonucleotide
uauuccuguucuugguugu

SEQ ID NO: 1557215 - RNA, 19 nt, Artificial Sequence
  Description of Artificial Sequence: Synthetic oligonucleotide
ugauagcuuuguguaaggc

SEQ ID NO: 1557216 - RNA, 19 nt, Artificial Sequence
  Description of Artificial Sequence: Synthetic oligonucleotide
uaauccugaucaaugccuu

SEQ ID NO: 1557217 - RNA, 19 nt, Artificial Sequence
  Description of Artificial Sequence: Synthetic oligonucleotide
cuuugauuucauucauguc

SEQ ID NO: 1557218 - RNA, 19 nt, Artificial Sequence
  Description of Artificial Sequence: Synthetic oligonucleotide
guuaucugcuaaagcaacc

SEQ ID NO: 1557219 - RNA, 19 nt, Artificial Sequence
  Description of Artificial Sequence: Synthetic oligonucleotide
aauugaggcucuguacaga

SEQ ID NO: 1557220 - RNA, 19 nt, Artificial Sequence
  Description of Artificial Sequence: Synthetic oligonucleotide
guaacuugcuuauagggau

SEQ ID NO: 1557221 - RNA, 19 nt, Artificial Sequence
  Description of Artificial Sequence: Synthetic oligonucleotide
aagcaacccucuuacuuaa

SEQ ID NO: 1557222 - RNA, 19 nt, Artificial Sequence
  Description of Artificial Sequence: Synthetic oligonucleotide
gaggauggauugaaggaug

SEQ ID NO: 1557223 - RNA, 19 nt, Artificial Sequence
  Description of Artificial Sequence: Synthetic oligonucleotide
uauuguacagagguaugau

SEQ ID NO: 1557224 - RNA, 19 nt, Artificial Sequence
  Description of Artificial Sequence: Synthetic oligonucleotide
gaucaaugccuuauggcga

SEQ ID NO: 1557225 - RNA, 19 nt, Artificial Sequence
  Description of Artificial Sequence: Synthetic oligonucleotide
ugcgaagaugagauuugcu

SEQ ID NO: 1557226 - RNA, 19 nt, Artificial Sequence
  Description of Artificial Sequence: Synthetic oligonucleotide
uccugaucaaugccuuaug

SEQ ID NO: 1557227 - RNA, 19 nt, Artificial Sequence
  Description of Artificial Sequence: Synthetic oligonucleotide
cuugaacauauuccuguuc

SEQ ID NO: 1557228 - RNA, 19 nt, Artificial Sequence
  Description of Artificial Sequence: Synthetic oligonucleotide
aguauccgaagugaugucu

SEQ ID NO: 1557229 - RNA, 19 nt, Artificial Sequence
  Description of Artificial Sequence: Synthetic oligonucleotide
auucugauaccaucgccau

SEQ ID NO: 1557230 - RNA, 19 nt, Artificial Sequence
  Description of Artificial Sequence: Synthetic oligonucleotide
auacuuugcgaagaugaga

SEQ ID NO: 1557231 - RNA, 19 nt, Artificial Sequence
  Description of Artificial Sequence: Synthetic oligonucleotide
ugucuucccaggaacugaa

SEQ ID NO: 1557232 - RNA, 19 nt, Artificial Sequence
  Description of Artificial Sequence: Synthetic oligonucleotide
cuguaagggcuuuucucag

SEQ ID NO: 1557233 - RNA, 19 nt, Artificial Sequence
  Description of Artificial Sequence: Synthetic oligonucleotide
uaaaccaggccugcuugag

SEQ ID NO: 1557234 - RNA, 19 nt, Artificial Sequence
  Description of Artificial Sequence: Synthetic oligonucleotide
agaaguauccgaagugaug

SEQ ID NO: 1557235 - RNA, 19 nt, Artificial Sequence
  Description of Artificial Sequence: Synthetic oligonucleotide
uguacagagguaugaugua

SEQ ID NO: 1557236 - RNA, 19 nt, Artificial Sequence
  Description of Artificial Sequence: Synthetic oligonucleotide
ugcuugaggaauucugaua

SEQ ID NO: 1557237 - RNA, 19 nt, Artificial Sequence
  Description of Artificial Sequence: Synthetic oligonucleotide
ccauaauccugaucaaugc

SEQ ID NO: 1557238 - RNA, 19 nt, Artificial Sequence
  Description of Artificial Sequence: Synthetic oligonucleotide
agcuuguuaucugcuaaag

SEQ ID NO: 1557239 - RNA, 19 nt, Artificial Sequence
  Description of Artificial Sequence: Synthetic oligonucleotide
cuaguugccaucacacaga

SEQ ID NO: 1557240 - RNA, 19 nt, Artificial Sequence
  Description of Artificial Sequence: Synthetic oligonucleotide
gauggauugaaggaugggu

SEQ ID NO: 1557241 - RNA, 19 nt, Artificial Sequence
  Description of Artificial Sequence: Synthetic oligonucleotide
ucaugucauguucacugua

SEQ ID NO: 1557242 - RNA, 19 nt, Artificial Sequence
  Description of Artificial Sequence: Synthetic oligonucleotide
ugccuuauggcgaguucca

SEQ ID NO: 1557243 - RNA, 19 nt, Artificial Sequence
  Description of Artificial Sequence: Synthetic oligonucleotide
auaaaccaggccugcuuga

SEQ ID NO: 1557244 - RNA, 19 nt, Artificial Sequence
  Description of Artificial Sequence: Synthetic oligonucleotide
aaguggguaauuagcuugu

SEQ ID NO: 1557245 - RNA, 19 nt, Artificial Sequence
  Description of Artificial Sequence: Synthetic oligonucleotide
ggaauucugauaccaucgc

SEQ ID NO: 1557246 - RNA, 19 nt, Artificial Sequence
  Description of Artificial Sequence: Synthetic oligonucleotide
cucuugguaagaaugucaa

SEQ ID NO: 1557247 - RNA, 19 nt, Artificial Sequence
  Description of Artificial Sequence: Synthetic oligonucleotide
cagagguaugauguaaaac

SEQ ID NO: 1557248 - RNA, 19 nt, Artificial Sequence
  Description of Artificial Sequence: Synthetic oligonucleotide
uugauaccaaaaucucaau

SEQ ID NO: 1557249 - RNA, 19 nt, Artificial Sequence
  Description of Artificial Sequence: Synthetic oligonucleotide
cuuauggcgaguuccagcu

SEQ ID NO: 1557250 - RNA, 19 nt, Artificial Sequence
  Description of Artificial Sequence: Synthetic oligonucleotide
cagaauuguaaugaacaca

SEQ ID NO: 1557251 - RNA, 19 nt, Artificial Sequence
  Description of Artificial Sequence: Synthetic oligonucleotide
ccugaucaaugccuuaugg

SEQ ID NO: 1557252 - RNA, 19 nt, Artificial Sequence
  Description of Artificial Sequence: Synthetic oligonucleotide
uuggccagaucucucuuua

SEQ ID NO: 1557253 - RNA, 19 nt, Artificial Sequence
  Description of Artificial Sequence: Synthetic oligonucleotide
agcaaggccuuccggaagu

SEQ ID NO: 1557254 - RNA, 19 nt, Artificial Sequence
  Description of Artificial Sequence: Synthetic oligonucleotide
aucuaguugccaucacaca

SEQ ID NO: 1557255 - RNA, 19 nt, Artificial Sequence
  Description of Artificial Sequence: Synthetic oligonucleotide
cuguuauuucuugauacca

SEQ ID NO: 1557256 - RNA, 19 nt, Artificial Sequence
  Description of Artificial Sequence: Synthetic oligonucleotide
agcagagccaaaacaaccu

SEQ ID NO: 1557257 - RNA, 19 nt, Artificial Sequence
  Description of Artificial Sequence: Synthetic oligonucleotide
uucguaucuguccccuuuc

SEQ ID NO: 1557258 - RNA, 19 nt, Artificial Sequence
  Description of Artificial Sequence: Synthetic oligonucleotide
caaguaugcugccuugauc

SEQ ID NO: 1557259 - RNA, 19 nt, Artificial Sequence
  Description of Artificial Sequence: Synthetic oligonucleotide
auacaaagcccuggcaucu

SEQ ID NO: 1557260 - RNA, 19 nt, Artificial Sequence
  Description of Artificial Sequence: Synthetic oligonucleotide
gaacacauucguaucuguc

SEQ ID NO: 1557261 - RNA, 19 nt, Artificial Sequence
  Description of Artificial Sequence: Synthetic oligonucleotide
ucagaacgggagaccauaa

SEQ ID NO: 1557262 - RNA, 19 nt, Artificial Sequence
  Description of Artificial Sequence: Synthetic oligonucleotide
uucagaacgggagaccaua

SEQ ID NO: 1557263 - RNA, 19 nt, Artificial Sequence
  Description of Artificial Sequence: Synthetic oligonucleotide
uugcgaagaugagauuugc

SEQ ID NO: 1557264 - RNA, 19 nt, Artificial Sequence
  Description of Artificial Sequence: Synthetic oligonucleotide
uagcuuguuaucugcuaaa

SEQ ID NO: 1557265 - RNA, 19 nt, Artificial Sequence
  Description of Artificial Sequence: Synthetic oligonucleotide
ggaaugcuaacagaguaac

SEQ ID NO: 1557266 - RNA, 19 nt, Artificial Sequence
  Description of Artificial Sequence: Synthetic oligonucleotide
gucaauaaaccaggccugc

SEQ ID NO: 1557267 - RNA, 19 nt, Artificial Sequence
  Description of Artificial Sequence: Synthetic oligonucleotide
gcuuguuaucugcuaaagc

SEQ ID NO: 1557268 - RNA, 19 nt, Artificial Sequence
  Description of Artificial Sequence: Synthetic oligonucleotide
acucacggcagacccagga

SEQ ID NO: 1557269 - RNA, 19 nt, Artificial Sequence
  Description of Artificial Sequence: Synthetic oligonucleotide
cucacagcggucacccuug

SEQ ID NO: 1557270 - RNA, 19 nt, Artificial Sequence
  Description of Artificial Sequence: Synthetic oligonucleotide
auucguaucuguccccuuu

SEQ ID NO: 1557271 - RNA, 19 nt, Artificial Sequence
  Description of Artificial Sequence: Synthetic oligonucleotide
cacauucguaucugucccc

SEQ ID NO: 1557272 - RNA, 19 nt, Artificial Sequence
  Description of Artificial Sequence: Synthetic oligonucleotide
acccucuuacuuaagcuug

SEQ ID NO: 1557273 - RNA, 19 nt, Artificial Sequence
  Description of Artificial Sequence: Synthetic oligonucleotide
gguaauuagcuuguuaucu

SEQ ID NO: 1557274 - RNA, 19 nt, Artificial Sequence
  Description of Artificial Sequence: Synthetic oligonucleotide
ucguaucuguccccuuucu

SEQ ID NO: 1557275 - RNA, 19 nt, Artificial Sequence
  Description of Artificial Sequence: Synthetic oligonucleotide
cuugucuucccaggaacug

SEQ ID NO: 1557276 - RNA, 19 nt, Artificial Sequence
  Description of Artificial Sequence: Synthetic oligonucleotide
caggaaugcuaacagagua

SEQ ID NO: 1557277 - RNA, 19 nt, Artificial Sequence
  Description of Artificial Sequence: Synthetic oligonucleotide
uacuuucuguaguucugaa

SEQ ID NO: 1557278 - RNA, 19 nt, Artificial Sequence
  Description of Artificial Sequence: Synthetic oligonucleotide
uugcuucuaguagucagaa

SEQ ID NO: 1557279 - RNA, 19 nt, Artificial Sequence
  Description of Artificial Sequence: Synthetic oligonucleotide
gcuucuaguagucagaauu

SEQ ID NO: 1557280 - RNA, 19 nt, Artificial Sequence
  Description of Artificial Sequence: Synthetic oligonucleotide
caccuuuaaccaugauagc

SEQ ID NO: 1557281 - RNA, 19 nt, Artificial Sequence
  Description of Artificial Sequence: Synthetic oligonucleotide
ucuguagacucuguugauu

SEQ ID NO: 1557282 - RNA, 19 nt, Artificial Sequence
  Description of Artificial Sequence: Synthetic oligonucleotide
cucucuuuagcucuucucu

SEQ ID NO: 1557283 - RNA, 19 nt, Artificial Sequence
  Description of Artificial Sequence: Synthetic oligonucleotide
guaugcugccuugaucugc

SEQ ID NO: 1557284 - RNA, 19 nt, Artificial Sequence
  Description of Artificial Sequence: Synthetic oligonucleotide
ugcaaguaugcugccuuga

SEQ ID NO: 1557285 - RNA, 19 nt, Artificial Sequence
  Description of Artificial Sequence: Synthetic oligonucleotide
cgaagugaugucuuuggcc

SEQ ID NO: 1557286 - RNA, 19 nt, Artificial Sequence
  Description of Artificial Sequence: Synthetic oligonucleotide
ucaaauccucacagcgguc

SEQ ID NO: 1557287 - RNA, 19 nt, Artificial Sequence
  Description of Artificial Sequence: Synthetic oligonucleotide
agcccuggcaucuguguca

SEQ ID NO: 1557288 - RNA, 19 nt, Artificial Sequence
  Description of Artificial Sequence: Synthetic oligonucleotide
acauuucacaagggcagug

SEQ ID NO: 1557289 - RNA, 19 nt, Artificial Sequence
  Description of Artificial Sequence: Synthetic oligonucleotide
agcauugguucucuuggua

SEQ ID NO: 1557290 - RNA, 19 nt, Artificial Sequence
  Description of Artificial Sequence: Synthetic oligonucleotide
cucaaauccucacagcggu

SEQ ID NO: 1557291 - RNA, 19 nt, Artificial Sequence
  Description of Artificial Sequence: Synthetic oligonucleotide
guuucucaggaaugcuaac

SEQ ID NO: 1557292 - RNA, 19 nt, Artificial Sequence
  Description of Artificial Sequence: Synthetic oligonucleotide
auaaucuggggaaaacaua

SEQ ID NO: 1557293 - RNA, 19 nt, Artificial Sequence
  Description of Artificial Sequence: Synthetic oligonucleotide
gugauagaggaaagcaaca

SEQ ID NO: 1557294 - RNA, 19 nt, Artificial Sequence
  Description of Artificial Sequence: Synthetic oligonucleotide
acauucguaucuguccccu

SEQ ID NO: 1557295 - RNA, 19 nt, Artificial Sequence
  Description of Artificial Sequence: Synthetic oligonucleotide
ggccagaucucucuuuagc

SEQ ID NO: 1557296 - RNA, 19 nt, Artificial Sequence
  Description of Artificial Sequence: Synthetic oligonucleotide
cgaagaugagauuugcuuc

SEQ ID NO: 1557297 - RNA, 19 nt, Artificial Sequence
  Description of Artificial Sequence: Synthetic oligonucleotide
uugaucugcuggcgcugag

SEQ ID NO: 1557298 - RNA, 19 nt, Artificial Sequence
  Description of Artificial Sequence: Synthetic oligonucleotide
cacggaguucaucugcauc

SEQ ID NO: 1557299 - RNA, 19 nt, Artificial Sequence
  Description of Artificial Sequence: Synthetic oligonucleotide
agagccaccaagaucuuuu

SEQ ID NO: 1557300 - RNA, 19 nt, Artificial Sequence
  Description of Artificial Sequence: Synthetic oligonucleotide
gcuugugugauagaggaaa

SEQ ID NO: 1557301 - RNA, 19 nt, Artificial Sequence
  Description of Artificial Sequence: Synthetic oligonucleotide
ugaggcacuucucgauguc

SEQ ID NO: 1557302 - RNA, 19 nt, Artificial Sequence
  Description of Artificial Sequence: Synthetic oligonucleotide
uggccagaucucucuuuag

SEQ ID NO: 1557303 - RNA, 19 nt, Artificial Sequence
  Description of Artificial Sequence: Synthetic oligonucleotide
auuccuguucuugguuguc

SEQ ID NO: 1557304 - RNA, 19 nt, Artificial Sequence
  Description of Artificial Sequence: Synthetic oligonucleotide
gacaucuaguugccaucac

SEQ ID NO: 1557305 - RNA, 19 nt, Artificial Sequence
  Description of Artificial Sequence: Synthetic oligonucleotide
aggaaugcuaacagaguaa

SEQ ID NO: 1557306 - RNA, 19 nt, Artificial Sequence
  Description of Artificial Sequence: Synthetic oligonucleotide
gagccaaaacaaccucuuc

SEQ ID NO: 1557307 - RNA, 19 nt, Artificial Sequence
  Description of Artificial Sequence: Synthetic oligonucleotide
auccgaagugaugucuuug

SEQ ID NO: 1557308 - RNA, 19 nt, Artificial Sequence
  Description of Artificial Sequence: Synthetic oligonucleotide
gauuugcuucuaguaguca

SEQ ID NO: 1557309 - RNA, 19 nt, Artificial Sequence
  Description of Artificial Sequence: Synthetic oligonucleotide
ccuuauggcgaguuccagc

SEQ ID NO: 1557310 - RNA, 19 nt, Artificial Sequence
  Description of Artificial Sequence: Synthetic oligonucleotide
agcuuuguguaaggcagca

SEQ ID NO: 1557311 - RNA, 19 nt, Artificial Sequence
  Description of Artificial Sequence: Synthetic oligonucleotide
gucacccuuggcaagagaa

SEQ ID NO: 1557312 - RNA, 19 nt, Artificial Sequence
  Description of Artificial Sequence: Synthetic oligonucleotide
uacuuaagcuugugugaua

SEQ ID NO: 1557313 - RNA, 19 nt, Artificial Sequence
  Description of Artificial Sequence: Synthetic oligonucleotide
auugaaggauggguaggga

SEQ ID NO: 1557314 - RNA, 19 nt, Artificial Sequence
  Description of Artificial Sequence: Synthetic oligonucleotide
agccaccaagaucuuuuca

SEQ ID NO: 1557315 - RNA, 19 nt, Artificial Sequence
  Description of Artificial Sequence: Synthetic oligonucleotide
agaccauaauccugaucaa

SEQ ID NO: 1557316 - RNA, 19 nt, Artificial Sequence
  Description of Artificial Sequence: Synthetic oligonucleotide
auccugaucaaugccuuau

SEQ ID NO: 1557317 - RNA, 19 nt, Artificial Sequence
  Description of Artificial Sequence: Synthetic oligonucleotide
cugcaaguaugcugccuug

SEQ ID NO: 1557318 - RNA, 19 nt, Artificial Sequence
  Description of Artificial Sequence: Synthetic oligonucleotide
agguaugauguaaaacuua

SEQ ID NO: 1557319 - RNA, 19 nt, Artificial Sequence
  Description of Artificial Sequence: Synthetic oligonucleotide
uauccgaagugaugucuuu

SEQ ID NO: 1557320 - RNA, 19 nt, Artificial Sequence
  Description of Artificial Sequence: Synthetic oligonucleotide
agcggucacccuuggcaag

SEQ ID NO: 1557321 - RNA, 19 nt, Artificial Sequence
  Description of Artificial Sequence: Synthetic oligonucleotide
ggcaaagagagauuccaua

SEQ ID NO: 1557322 - RNA, 19 nt, Artificial Sequence
  Description of Artificial Sequence: Synthetic oligonucleotide
cucuauuguacagagguau

SEQ ID NO: 1557323 - RNA, 19 nt, Artificial Sequence
  Description of Artificial Sequence: Synthetic oligonucleotide
uuauggcgaguuccagcuc

SEQ ID NO: 1557324 - RNA, 19 nt, Artificial Sequence
  Description of Artificial Sequence: Synthetic oligonucleotide
ugauuucauucaugucgau

SEQ ID NO: 1557325 - RNA, 19 nt, Artificial Sequence
  Description of Artificial Sequence: Synthetic oligonucleotide
cuuugcgaagaugagauuu

SEQ ID NO: 1557326 - RNA, 19 nt, Artificial Sequence
  Description of Artificial Sequence: Synthetic oligonucleotide
ucacaagggcagugaggca

SEQ ID NO: 1557327 - RNA, 19 nt, Artificial Sequence
  Description of Artificial Sequence: Synthetic oligonucleotide
cuguaguucugaaauacuu

SEQ ID NO: 1557328 - RNA, 19 nt, Artificial Sequence
  Description of Artificial Sequence: Synthetic oligonucleotide
uagggacucacggcagacc

SEQ ID NO: 1557329 - RNA, 19 nt, Artificial Sequence
  Description of Artificial Sequence: Synthetic oligonucleotide
uucugauaccaucgccauu

SEQ ID NO: 1557330 - RNA, 19 nt, Artificial Sequence
  Description of Artificial Sequence: Synthetic oligonucleotide
gcaaaggaagcuggggugc

SEQ ID NO: 1557331 - RNA, 19 nt, Artificial Sequence
  Description of Artificial Sequence: Synthetic oligonucleotide
ccaagccccuucauggccg

SEQ ID NO: 1557332 - RNA, 19 nt, Artificial Sequence
  Description of Artificial Sequence: Synthetic oligonucleotide
gcuuauagggauuuauaau

SEQ ID NO: 1557333 - RNA, 19 nt, Artificial Sequence
  Description of Artificial Sequence: Synthetic oligonucleotide
gagccaccaagaucuuuuc

SEQ ID NO: 1557334 - RNA, 19 nt, Artificial Sequence
  Description of Artificial Sequence: Synthetic oligonucleotide
ggauggauugaaggauggg

SEQ ID NO: 1557335 - RNA, 19 nt, Artificial Sequence
  Description of Artificial Sequence: Synthetic oligonucleotide
ccaaaacaaccucuuccag

SEQ ID NO: 1557336 - RNA, 19 nt, Artificial Sequence
  Description of Artificial Sequence: Synthetic oligonucleotide
cagauggccuguaagggcu

SEQ ID NO: 1557337 - RNA, 19 nt, Artificial Sequence
  Description of Artificial Sequence: Synthetic oligonucleotide
ugcuucuaguagucagaau

SEQ ID NO: 1557338 - RNA, 19 nt, Artificial Sequence
  Description of Artificial Sequence: Synthetic oligonucleotide
uuccugcaaguaugcugcc

SEQ ID NO: 1557339 - RNA, 19 nt, Artificial Sequence
  Description of Artificial Sequence: Synthetic oligonucleotide
gccuguaagggcuuuucuc

SEQ ID NO: 1557340 - RNA, 19 nt, Artificial Sequence
  Description of Artificial Sequence: Synthetic oligonucleotide
cuccagccucauacaaagc

SEQ ID NO: 1557341 - RNA, 19 nt, Artificial Sequence
  Description of Artificial Sequence: Synthetic oligonucleotide
uacaaagcccuggcaucug

SEQ ID NO: 1557342 - RNA, 19 nt, Artificial Sequence
  Description of Artificial Sequence: Synthetic oligonucleotide
gguaugauguaaaacuuau

SEQ ID NO: 1557343 - RNA, 19 nt, Artificial Sequence
  Description of Artificial Sequence: Synthetic oligonucleotide
auuuuacagcuugaacaua

SEQ ID NO: 1557344 - RNA, 19 nt, Artificial Sequence
  Description of Artificial Sequence: Synthetic oligonucleotide
uucugagcagcggggacau

SEQ ID NO: 1557345 - RNA, 19 nt, Artificial Sequence
  Description of Artificial Sequence: Synthetic oligonucleotide
aguuuccugcaaguaugcu

SEQ ID NO: 1557346 - RNA, 19 nt, Artificial Sequence
  Description of Artificial Sequence: Synthetic oligonucleotide
guggguaauuagcuuguua

SEQ ID NO: 1557347 - RNA, 19 nt, Artificial Sequence
  Description of Artificial Sequence: Synthetic oligonucleotide
ggacucacggcagacccag

SEQ ID NO: 1557348 - RNA, 19 nt, Artificial Sequence
  Description of Artificial Sequence: Synthetic oligonucleotide
cuuuaaccaugauagcuuu

SEQ ID NO: 1557349 - RNA, 19 nt, Artificial Sequence
  Description of Artificial Sequence: Synthetic oligonucleotide
uaagggcuuuucucagcau

SEQ ID NO: 1557350 - RNA, 19 nt, Artificial Sequence
  Description of Artificial Sequence: Synthetic oligonucleotide
acagugcuucugagcagcg

SEQ ID NO: 1557351 - RNA, 19 nt, Artificial Sequence
  Description of Artificial Sequence: Synthetic oligonucleotide
gcuaagagaugcucucauc

SEQ ID NO: 1557352 - RNA, 19 nt, Artificial Sequence
  Description of Artificial Sequence: Synthetic oligonucleotide
acuuugcgaagaugagauu

SEQ ID NO: 1557353 - RNA, 19 nt, Artificial Sequence
  Description of Artificial Sequence: Synthetic oligonucleotide
gggacaucuaguugccauc

SEQ ID NO: 1557354 - RNA, 19 nt, Artificial Sequence
  Description of Artificial Sequence: Synthetic oligonucleotide
cagcaaaggaagcuggggu

SEQ ID NO: 1557355 - RNA, 19 nt, Artificial Sequence
  Description of Artificial Sequence: Synthetic oligonucleotide
cuugcuuauagggauuuau

SEQ ID NO: 1557356 - RNA, 19 nt, Artificial Sequence
  Description of Artificial Sequence: Synthetic oligonucleotide
ccuucauggccgcacggag

SEQ ID NO: 1557357 - RNA, 19 nt, Artificial Sequence
  Description of Artificial Sequence: Synthetic oligonucleotide
aggccugcuugaggaauuc

SEQ ID NO: 1557358 - RNA, 19 nt, Artificial Sequence
  Description of Artificial Sequence: Synthetic oligonucleotide
cucuuacuuaagcuugugu

SEQ ID NO: 1557359 - RNA, 19 nt, Artificial Sequence
  Description of Artificial Sequence: Synthetic oligonucleotide
gcgaagaugagauuugcuu

SEQ ID NO: 1557360 - RNA, 19 nt, Artificial Sequence
  Description of Artificial Sequence: Synthetic oligonucleotide
ggacaucuaguugccauca

SEQ ID NO: 1557361 - RNA, 19 nt, Artificial Sequence
  Description of Artificial Sequence: Synthetic oligonucleotide
cuaacagaguaacuugcuu

SEQ ID NO: 1557362 - RNA, 19 nt, Artificial Sequence
  Description of Artificial Sequence: Synthetic oligonucleotide
agggcuuuucucagcauuu

SEQ ID NO: 1557363 - RNA, 19 nt, Artificial Sequence
  Description of Artificial Sequence: Synthetic oligonucleotide
cucuguacagacggcuuca

SEQ ID NO: 1557364 - RNA, 19 nt, Artificial Sequence
  Description of Artificial Sequence: Synthetic oligonucleotide
aucuugauucacacucaaa

SEQ ID NO: 1557365 - RNA, 19 nt, Artificial Sequence
  Description of Artificial Sequence: Synthetic oligonucleotide
ggauggguagggacucacg

SEQ ID NO: 1557366 - RNA, 19 nt, Artificial Sequence
  Description of Artificial Sequence: Synthetic oligonucleotide
caggaacugaauugaggcu

SEQ ID NO: 1557367 - RNA, 19 nt, Artificial Sequence
  Description of Artificial Sequence: Synthetic oligonucleotide
cagguaaaaugcuuugauu

SEQ ID NO: 1557368 - RNA, 19 nt, Artificial Sequence
  Description of Artificial Sequence: Synthetic oligonucleotide
caaaguggguaauuagcuu

SEQ ID NO: 1557369 - RNA, 19 nt, Artificial Sequence
  Description of Artificial Sequence: Synthetic oligonucleotide
gcucuguacagacggcuuc

SEQ ID NO: 1557370 - RNA, 19 nt, Artificial Sequence
  Description of Artificial Sequence: Synthetic oligonucleotide
ccagaaguauccgaaguga

SEQ ID NO: 1557371 - RNA, 19 nt, Artificial Sequence
  Description of Artificial Sequence: Synthetic oligonucleotide
gcagugaggcacuucucga

SEQ ID NO: 1557372 - RNA, 19 nt, Artificial Sequence
  Description of Artificial Sequence: Synthetic oligonucleotide
gagagugucuucaucuguu

SEQ ID NO: 1557373 - RNA, 19 nt, Artificial Sequence
  Description of Artificial Sequence: Synthetic oligonucleotide
gccagaucucucuuuagcu

SEQ ID NO: 1557374 - RNA, 19 nt, Artificial Sequence
  Description of Artificial Sequence: Synthetic oligonucleotide
acaagggcagugaggcacu

SEQ ID NO: 1557375 - RNA, 19 nt, Artificial Sequence
  Description of Artificial Sequence: Synthetic oligonucleotide
cagccucauacaaagcccu

SEQ ID NO: 1557376 - RNA, 19 nt, Artificial Sequence
  Description of Artificial Sequence: Synthetic oligonucleotide
gccaccaagaucuuuucau

SEQ ID NO: 1557377 - RNA, 19 nt, Artificial Sequence
  Description of Artificial Sequence: Synthetic oligonucleotide
cagaaguauccgaagugau

SEQ ID NO: 1557378 - RNA, 19 nt, Artificial Sequence
  Description of Artificial Sequence: Synthetic oligonucleotide
caauaaaccaggccugcuu

SEQ ID NO: 1557379 - RNA, 19 nt, Artificial Sequence
  Description of Artificial Sequence: Synthetic oligonucleotide
cauccaggauggcuuggca

SEQ ID NO: 1557380 - RNA, 19 nt, Artificial Sequence
  Description of Artificial Sequence: Synthetic oligonucleotide
ucaaugccuuauggcgagu

SEQ ID NO: 1557381 - RNA, 19 nt, Artificial Sequence
  Description of Artificial Sequence: Synthetic oligonucleotide
cacagcggucacccuuggc

SEQ ID NO: 1557382 - RNA, 19 nt, Artificial Sequence
  Description of Artificial Sequence: Synthetic oligonucleotide
acggcagacccaggaccac

SEQ ID NO: 1557383 - RNA, 19 nt, Artificial Sequence
  Description of Artificial Sequence: Synthetic oligonucleotide
cuaaagcaacccucuuacu

SEQ ID NO: 1557384 - RNA, 19 nt, Artificial Sequence
  Description of Artificial Sequence: Synthetic oligonucleotide
ggaugauuuuacagcuuga

SEQ ID NO: 1557385 - RNA, 19 nt, Artificial Sequence
  Description of Artificial Sequence: Synthetic oligonucleotide
acagaguaacuugcuuaua

SEQ ID NO: 1557386 - RNA, 19 nt, Artificial Sequence
  Description of Artificial Sequence: Synthetic oligonucleotide
agccucauacaaagcccug

SEQ ID NO: 1557387 - RNA, 19 nt, Artificial Sequence
  Description of Artificial Sequence: Synthetic oligonucleotide
gguuucauccaggauggcu

SEQ ID NO: 1557388 - RNA, 19 nt, Artificial Sequence
  Description of Artificial Sequence: Synthetic oligonucleotide
cagcggucacccuuggcaa

SEQ ID NO: 1557389 - RNA, 19 nt, Artificial Sequence
  Description of Artificial Sequence: Synthetic oligonucleotide
gucuuuggccagaucucuc

SEQ ID NO: 1557390 - RNA, 19 nt, Artificial Sequence
  Description of Artificial Sequence: Synthetic oligonucleotide
cuugaucugcuggcgcuga

SEQ ID NO: 1557391 - RNA, 19 nt, Artificial Sequence
  Description of Artificial Sequence: Synthetic oligonucleotide
cuucauggccgcacggagu

SEQ ID NO: 1557392 - RNA, 19 nt, Artificial Sequence
  Description of Artificial Sequence: Synthetic oligonucleotide
agcaacccucuuacuuaag

SEQ ID NO: 1557393 - RNA, 19 nt, Artificial Sequence
  Description of Artificial Sequence: Synthetic oligonucleotide
ugguuucauccaggauggc

SEQ ID NO: 1557394 - RNA, 19 nt, Artificial Sequence
  Description of Artificial Sequence: Synthetic oligonucleotide
cugcuugaggaauucugau

SEQ ID NO: 1557395 - RNA, 19 nt, Artificial Sequence
  Description of Artificial Sequence: Synthetic oligonucleotide
cagcuaagagaugcucuca

SEQ ID NO: 1557396 - RNA, 19 nt, Artificial Sequence
  Description of Artificial Sequence: Synthetic oligonucleotide
ccgcacggaguucaucugc

SEQ ID NO: 1557397 - RNA, 19 nt, Artificial Sequence
  Description of Artificial Sequence: Synthetic oligonucleotide
ccuuuaaccaugauagcuu

SEQ ID NO: 1557398 - RNA, 19 nt, Artificial Sequence
  Description of Artificial Sequence: Synthetic oligonucleotide
cacuguacuuucuguaguu

SEQ ID NO: 1557399 - RNA, 19 nt, Artificial Sequence
  Description of Artificial Sequence: Synthetic oligonucleotide
aguggguaauuagcuuguu

SEQ ID NO: 1557400 - RNA, 19 nt, Artificial Sequence
  Description of Artificial Sequence: Synthetic oligonucleotide
ggccgcacggaguucaucu

SEQ ID NO: 1557401 - RNA, 19 nt, Artificial Sequence
  Description of Artificial Sequence: Synthetic oligonucleotide
gccccuucauggccgcacg

SEQ ID NO: 1557402 - RNA, 19 nt, Artificial Sequence
  Description of Artificial Sequence: Synthetic oligonucleotide
gaauuguaaugaacacauu

SEQ ID NO: 1557403 - RNA, 19 nt, Artificial Sequence
  Description of Artificial Sequence: Synthetic oligonucleotide
guauccgaagugaugucuu

SEQ ID NO: 1557404 - RNA, 19 nt, Artificial Sequence
  Description of Artificial Sequence: Synthetic oligonucleotide
gcuaacagaguaacuugcu

SEQ ID NO: 1557405 - RNA, 19 nt, Artificial Sequence
  Description of Artificial Sequence: Synthetic oligonucleotide
ccaugauagcuuuguguaa

SEQ ID NO: 1557406 - RNA, 19 nt, Artificial Sequence
  Description of Artificial Sequence: Synthetic oligonucleotide
gccuuauggcgaguuccag

SEQ ID NO: 1557407 - RNA, 19 nt, Artificial Sequence
  Description of Artificial Sequence: Synthetic oligonucleotide
gccgcacggaguucaucug

SEQ ID NO: 1557408 - RNA, 19 nt, Artificial Sequence
  Description of Artificial Sequence: Synthetic oligonucleotide
cuguccccuuucuccucuc

SEQ ID NO: 1557409 - RNA, 19 nt, Artificial Sequence
  Description of Artificial Sequence: Synthetic oligonucleotide
gcuugaacauauuccuguu

SEQ ID NO: 1557410 - RNA, 19 nt, Artificial Sequence
  Description of Artificial Sequence: Synthetic oligonucleotide
gcaaguaugcugccuugau

SEQ ID NO: 1557411 - RNA, 19 nt, Artificial Sequence
  Description of Artificial Sequence: Synthetic oligonucleotide
ccaaaaucucaaugagagu

SEQ ID NO: 1557412 - RNA, 19 nt, Artificial Sequence
  Description of Artificial Sequence: Synthetic oligonucleotide
gcagcggggacaucuaguu

SEQ ID NO: 1557413 - RNA, 19 nt, Artificial Sequence
  Description of Artificial Sequence: Synthetic oligonucleotide
cagaacgggagaccauaau

SEQ ID NO: 1557414 - RNA, 19 nt, Artificial Sequence
  Description of Artificial Sequence: Synthetic oligonucleotide
cgaugucacccuucauuuc

SEQ ID NO: 1557415 - RNA, 19 nt, Artificial Sequence
  Description of Artificial Sequence: Synthetic oligonucleotide
ggucacccuuggcaagaga

SEQ ID NO: 1557416 - RNA, 19 nt, Artificial Sequence
  Description of Artificial Sequence: Synthetic oligonucleotide
uggccgcacggaguucauc

SEQ ID NO: 1557417 - RNA, 19 nt, Artificial Sequence
  Description of Artificial Sequence: Synthetic oligonucleotide
gcaacagcuaagagaugcu

SEQ ID NO: 1557418 - RNA, 19 nt, Artificial Sequence
  Description of Artificial Sequence: Synthetic oligonucleotide
gcggucacccuuggcaaga

SEQ ID NO: 1557419 - RNA, 19 nt, Artificial Sequence
  Description of Artificial Sequence: Synthetic oligonucleotide
caggccugcuugaggaauu

SEQ ID NO: 1557420 - RNA, 19 nt, Artificial Sequence
  Description of Artificial Sequence: Synthetic oligonucleotide
acagagccaccaagaucuu

SEQ ID NO: 1557421 - RNA, 19 nt, Artificial Sequence
  Description of Artificial Sequence: Synthetic oligonucleotide
gggacucacggcagaccca

SEQ ID NO: 1557422 - RNA, 19 nt, Artificial Sequence
  Description of Artificial Sequence: Synthetic oligonucleotide
cauucguaucuguccccuu

SEQ ID NO: 1557423 - RNA, 19 nt, Artificial Sequence
  Description of Artificial Sequence: Synthetic oligonucleotide
cugcuaaagcaacccucuu

SEQ ID NO: 1557424 - RNA, 19 nt, Artificial Sequence
  Description of Artificial Sequence: Synthetic oligonucleotide
gcaaggccuuccggaaguc

SEQ ID NO: 1557425 - RNA, 19 nt, Artificial Sequence
  Description of Artificial Sequence: Synthetic oligonucleotide
auggccgcacggaguucau

SEQ ID NO: 1557426 - RNA, 19 nt, Artificial Sequence
  Description of Artificial Sequence: Synthetic oligonucleotide
gcacggaguucaucugcau

SEQ ID NO: 1557427 - RNA, 19 nt, Artificial Sequence
  Description of Artificial Sequence: Synthetic oligonucleotide
caagggcagugaggcacuu

SEQ ID NO: 1557428 - RNA, 19 nt, Artificial Sequence
  Description of Artificial Sequence: Synthetic oligonucleotide
uauggugucccaaugaagg

SEQ ID NO: 1557429 - RNA, 19 nt, Artificial Sequence
  Description of Artificial Sequence: Synthetic oligonucleotide
aauacacccagguuguccg

SEQ ID NO: 1557430 - RNA, 19 nt, Artificial Sequence
  Description of Artificial Sequence: Synthetic oligonucleotide
gaagagaacccugagaggg

SEQ ID NO: 1557431 - RNA, 19 nt, Artificial Sequence
  Description of Artificial Sequence: Synthetic oligonucleotide
uuuccuuuagccgaggagg

SEQ ID NO: 1557432 - RNA, 19 nt, Artificial Sequence
  Description of Artificial Sequence: Synthetic oligonucleotide
gaugcuaugagaguacagg

SEQ ID NO: 1557433 - RNA, 19 nt, Artificial Sequence
  Description of Artificial Sequence: Synthetic oligonucleotide
aagagcaccgaccucgccg

SEQ ID NO: 1557434 - RNA, 19 nt, Artificial Sequence
  Description of Artificial Sequence: Synthetic oligonucleotide
aagauaaggacaugucgug

SEQ ID NO: 1557435 - RNA, 19 nt, Artificial Sequence
  Description of Artificial Sequence: Synthetic oligonucleotide
auuguauccacccuucaug

SEQ ID NO: 1557436 - RNA, 19 nt, Artificial Sequence
  Description of Artificial Sequence: Synthetic oligonucleotide
uuuaguagagggauguguc

SEQ ID NO: 1557437 - RNA, 19 nt, Artificial Sequence
  Description of Artificial Sequence: Synthetic oligonucleotide
ucauuccuggauauagagg

SEQ ID NO: 1557438 - RNA, 19 nt, Artificial Sequence
  Description of Artificial Sequence: Synthetic oligonucleotide
uagagguuggcuaggggcg

SEQ ID NO: 1557439 - RNA, 19 nt, Artificial Sequence
  Description of Artificial Sequence: Synthetic oligonucleotide
agagccguccaucaacacc

SEQ ID NO: 1557440 - RNA, 19 nt, Artificial Sequence
  Description of Artificial Sequence: Synthetic oligonucleotide
uuccgguucaguaugaaaa

SEQ ID NO: 1557441 - RNA, 19 nt, Artificial Sequence
  Description of Artificial Sequence: Synthetic oligonucleotide
auaaggacaugucgugacc

SEQ ID NO: 1557442 - RNA, 19 nt, Artificial Sequence
  Description of Artificial Sequence: Synthetic oligonucleotide
ggaagauaaggacaugucg

SEQ ID NO: 1557443 - RNA, 19 nt, Artificial Sequence
  Description of Artificial Sequence: Synthetic oligonucleotide
agaccauguucuuucuugc

SEQ ID NO: 1557444 - RNA, 19 nt, Artificial Sequence
  Description of Artificial Sequence: Synthetic oligonucleotide
ugaugcaauacacccaggu

SEQ ID NO: 1557445 - RNA, 19 nt, Artificial Sequence
  Description of Artificial Sequence: Synthetic oligonucleotide
uuggagcucagccaguuca

SEQ ID NO: 1557446 - RNA, 19 nt, Artificial Sequence
  Description of Artificial Sequence: Synthetic oligonucleotide
guauccacccuucaugucc

SEQ ID NO: 1557447 - RNA, 19 nt, Artificial Sequence
  Description of Artificial Sequence: Synthetic oligonucleotide
ugucgcuccaaucugggcu

SEQ ID NO: 1557448 - RNA, 19 nt, Artificial Sequence
  Description of Artificial Sequence: Synthetic oligonucleotide
uuaacuugggucaccugca

SEQ ID NO: 1557449 - RNA, 19 nt, Artificial Sequence
  Description of Artificial Sequence: Synthetic oligonucleotide
uggaguuugucuccaacca

SEQ ID NO: 1557450 - RNA, 19 nt, Artificial Sequence
  Description of Artificial Sequence: Synthetic oligonucleotide
cucauuccuggauauagag

SEQ ID NO: 1557451 - RNA, 19 nt, Artificial Sequence
  Description of Artificial Sequence: Synthetic oligonucleotide
agagucauugaugaggaug

SEQ ID NO: 1557452 - RNA, 19 nt, Artificial Sequence
  Description of Artificial Sequence: Synthetic oligonucleotide
uauagagguuggcuagggg

SEQ ID NO: 1557453 - RNA, 19 nt, Artificial Sequence
  Description of Artificial Sequence: Synthetic oligonucleotide
uuaguagagggaugugucc

SEQ ID NO: 1557454 - RNA, 19 nt, Artificial Sequence
  Description of Artificial Sequence: Synthetic oligonucleotide
uguugaugcaauacaccca

SEQ ID NO: 1557455 - RNA, 19 nt, Artificial Sequence
  Description of Artificial Sequence: Synthetic oligonucleotide
gaaaaugccuuccucggca

SEQ ID NO: 1557456 - RNA, 19 nt, Artificial Sequence
  Description of Artificial Sequence: Synthetic oligonucleotide
gucccaaugaaggagaggc

SEQ ID NO: 1557457 - RNA, 19 nt, Artificial Sequence
  Description of Artificial Sequence: Synthetic oligonucleotide
gaugccaagagaccagaug

SEQ ID NO: 1557458 - RNA, 19 nt, Artificial Sequence
  Description of Artificial Sequence: Synthetic oligonucleotide
cuuaguggagaccauguuc

SEQ ID NO: 1557459 - RNA, 19 nt, Artificial Sequence
  Description of Artificial Sequence: Synthetic oligonucleotide
agagcaccgaccucgccgc

SEQ ID NO: 1557460 - RNA, 19 nt, Artificial Sequence
  Description of Artificial Sequence: Synthetic oligonucleotide
uaaguguggggucucucag

SEQ ID NO: 1557461 - RNA, 19 nt, Artificial Sequence
  Description of Artificial Sequence: Synthetic oligonucleotide
aucauuccgguucaguaug

SEQ ID NO: 1557462 - RNA, 19 nt, Artificial Sequence
  Description of Artificial Sequence: Synthetic oligonucleotide
uaugagaguacaggugggg

SEQ ID NO: 1557463 - RNA, 19 nt, Artificial Sequence
  Description of Artificial Sequence: Synthetic oligonucleotide
uggauauagagguuggcua

SEQ ID NO: 1557464 - RNA, 19 nt, Artificial Sequence
  Description of Artificial Sequence: Synthetic oligonucleotide
aagagcaucuccagcgugg

SEQ ID NO: 1557465 - RNA, 19 nt, Artificial Sequence
  Description of Artificial Sequence: Synthetic oligonucleotide
aauuuguucauuggcuggu

SEQ ID NO: 1557466 - RNA, 19 nt, Artificial Sequence
  Description of Artificial Sequence: Synthetic oligonucleotide
cucucggccacacagcagg

SEQ ID NO: 1557467 - RNA, 19 nt, Artificial Sequence
  Description of Artificial Sequence: Synthetic oligonucleotide
uuguauccacccuucaugu

SEQ ID NO: 1557468 - RNA, 19 nt, Artificial Sequence
  Description of Artificial Sequence: Synthetic oligonucleotide
uguucauuggcugguacca

SEQ ID NO: 1557469 - RNA, 19 nt, Artificial Sequence
  Description of Artificial Sequence: Synthetic oligonucleotide
ucacuagcuucagagagcc

SEQ ID NO: 1557470 - RNA, 19 nt, Artificial Sequence
  Description of Artificial Sequence: Synthetic oligonucleotide
ugucacacagcucauugua

SEQ ID NO: 1557471 - RNA, 19 nt, Artificial Sequence
  Description of Artificial Sequence: Synthetic oligonucleotide
gauauagagguuggcuagg

SEQ ID NO: 1557472 - RNA, 19 nt, Artificial Sequence
  Description of Artificial Sequence: Synthetic oligonucleotide
ggucacuagcuucagagag

SEQ ID NO: 1557473 - RNA, 19 nt, Artificial Sequence
  Description of Artificial Sequence: Synthetic oligonucleotide
uagccgaggaggcugguag

SEQ ID NO: 1557474 - RNA, 19 nt, Artificial Sequence
  Description of Artificial Sequence: Synthetic oligonucleotide
aacacuggcagcggcgugg

SEQ ID NO: 1557475 - RNA, 19 nt, Artificial Sequence
  Description of Artificial Sequence: Synthetic oligonucleotide
ucgaacacuggcagcggcg

SEQ ID NO: 1557476 - RNA, 19 nt, Artificial Sequence
  Description of Artificial Sequence: Synthetic oligonucleotide
ugaucauuccgguucagua

SEQ ID NO: 1557477 - RNA, 19 nt, Artificial Sequence
  Description of Artificial Sequence: Synthetic oligonucleotide
acuagcuucagagagccgu

SEQ ID NO: 1557478 - RNA, 19 nt, Artificial Sequence
  Description of Artificial Sequence: Synthetic oligonucleotide
ugggcugagaucccaaagu

SEQ ID NO: 1557479 - RNA, 19 nt, Artificial Sequence
  Description of Artificial Sequence: Synthetic oligonucleotide
ggauauagagguuggcuag

SEQ ID NO: 1557480 - RNA, 19 nt, Artificial Sequence
  Description of Artificial Sequence: Synthetic oligonucleotide
cugaggucguguuuauugg

SEQ ID NO: 1557481 - RNA, 19 nt, Artificial Sequence
  Description of Artificial Sequence: Synthetic oligonucleotide
cauuccuggauauagaggu

SEQ ID NO: 1557482 - RNA, 19 nt, Artificial Sequence
  Description of Artificial Sequence: Synthetic oligonucleotide
ggucauggggaucucaggg

SEQ ID NO: 1557483 - RNA, 19 nt, Artificial Sequence
  Description of Artificial Sequence: Synthetic oligonucleotide
caugucgugaccacuggug

SEQ ID NO: 1557484 - RNA, 19 nt, Artificial Sequence
  Description of Artificial Sequence: Synthetic oligonucleotide
uuggucuuuaguagaggga

SEQ ID NO: 1557485 - RNA, 19 nt, Artificial Sequence
  Description of Artificial Sequence: Synthetic oligonucleotide
gucucaugcccucucagag

SEQ ID NO: 1557486 - RNA, 19 nt, Artificial Sequence
  Description of Artificial Sequence: Synthetic oligonucleotide
uggaagauaaggacauguc

SEQ ID NO: 1557487 - RNA, 19 nt, Artificial Sequence
  Description of Artificial Sequence: Synthetic oligonucleotide
ugcacgucaaagaggggug

SEQ ID NO: 1557488 - RNA, 19 nt, Artificial Sequence
  Description of Artificial Sequence: Synthetic oligonucleotide
agcaauggggcuuccuguc

SEQ ID NO: 1557489 - RNA, 19 nt, Artificial Sequence
  Description of Artificial Sequence: Synthetic oligonucleotide
cuaugagaguacagguggg

SEQ ID NO: 1557490 - RNA, 19 nt, Artificial Sequence
  Description of Artificial Sequence: Synthetic oligonucleotide
cucaggguuucgaagcccg

SEQ ID NO: 1557491 - RNA, 19 nt, Artificial Sequence
  Description of Artificial Sequence: Synthetic oligonucleotide
aacuccgugcuuccagaag

SEQ ID NO: 1557492 - RNA, 19 nt, Artificial Sequence
  Description of Artificial Sequence: Synthetic oligonucleotide
ucggucauggggaucucag

SEQ ID NO: 1557493 - RNA, 19 nt, Artificial Sequence
  Description of Artificial Sequence: Synthetic oligonucleotide
cacacagcucauuguaucc

SEQ ID NO: 1557494 - RNA, 19 nt, Artificial Sequence
  Description of Artificial Sequence: Synthetic oligonucleotide
guuguugaugcaauacacc

SEQ ID NO: 1557495 - RNA, 19 nt, Artificial Sequence
  Description of Artificial Sequence: Synthetic oligonucleotide
uggucuuuaguagagggau

SEQ ID NO: 1557496 - RNA, 19 nt, Artificial Sequence
  Description of Artificial Sequence: Synthetic oligonucleotide
cucacgccgaugcacacgg

SEQ ID NO: 1557497 - RNA, 19 nt, Artificial Sequence
  Description of Artificial Sequence: Synthetic oligonucleotide
ucccaaugaaggagaggcg

SEQ ID NO: 1557498 - RNA, 19 nt, Artificial Sequence
  Description of Artificial Sequence: Synthetic oligonucleotide
gacggaagguaaguguggg

SEQ ID NO: 1557499 - RNA, 19 nt, Artificial Sequence
  Description of Artificial Sequence: Synthetic oligonucleotide
cagcucauuguauccaccc

SEQ ID NO: 1557500 - RNA, 19 nt, Artificial Sequence
  Description of Artificial Sequence: Synthetic oligonucleotide
gguggggucgauccgaggg

SEQ ID NO: 1557501 - RNA, 19 nt, Artificial Sequence
  Description of Artificial Sequence: Synthetic oligonucleotide
uguuggucuuuaguagagg

SEQ ID NO: 1557502 - RNA, 19 nt, Artificial Sequence
  Description of Artificial Sequence: Synthetic oligonucleotide
aguagagggauguguccag

SEQ ID NO: 1557503 - RNA, 19 nt, Artificial Sequence
  Description of Artificial Sequence: Synthetic oligonucleotide
caggacagggcaccgaagc

SEQ ID NO: 1557504 - RNA, 19 nt, Artificial Sequence
  Description of Artificial Sequence: Synthetic oligonucleotide
accacggaagucuccaaug

SEQ ID NO: 1557505 - RNA, 19 nt, Artificial Sequence
  Description of Artificial Sequence: Synthetic oligonucleotide
acggccggcagcucggagc

SEQ ID NO: 1557506 - RNA, 19 nt, Artificial Sequence
  Description of Artificial Sequence: Synthetic oligonucleotide
gacaagcaggaauuuguuc

SEQ ID NO: 1557507 - RNA, 19 nt, Artificial Sequence
  Description of Artificial Sequence: Synthetic oligonucleotide
auauagagguuggcuaggg

SEQ ID NO: 1557508 - RNA, 19 nt, Artificial Sequence
  Description of Artificial Sequence: Synthetic oligonucleotide
uucgaagcccgggagcugg

SEQ ID NO: 1557509 - RNA, 19 nt, Artificial Sequence
  Description of Artificial Sequence: Synthetic oligonucleotide
aggccuaggaugcuaugag

SEQ ID NO: 1557510 - RNA, 19 nt, Artificial Sequence
  Description of Artificial Sequence: Synthetic oligonucleotide
cuugccagaaagcggugag

SEQ ID NO: 1557511 - RNA, 19 nt, Artificial Sequence
  Description of Artificial Sequence: Synthetic oligonucleotide
aagcgcacgguguggaaga

SEQ ID NO: 1557512 - RNA, 19 nt, Artificial Sequence
  Description of Artificial Sequence: Synthetic oligonucleotide
uaguagagggaugugucca

SEQ ID NO: 1557513 - RNA, 19 nt, Artificial Sequence
  Description of Artificial Sequence: Synthetic oligonucleotide
aggucguguuuauuggaag

SEQ ID NO: 1557514 - RNA, 19 nt, Artificial Sequence
  Description of Artificial Sequence: Synthetic oligonucleotide
ugaggucguguuuauugga

SEQ ID NO: 1557515 - RNA, 19 nt, Artificial Sequence
  Description of Artificial Sequence: Synthetic oligonucleotide
uggugucccaaugaaggag

SEQ ID NO: 1557516 - RNA, 19 nt, Artificial Sequence
  Description of Artificial Sequence: Synthetic oligonucleotide
aaagcggugaggacugaug

SEQ ID NO: 1557517 - RNA, 19 nt, Artificial Sequence
  Description of Artificial Sequence: Synthetic oligonucleotide
ugccagaaagcggugagga

SEQ ID NO: 1557518 - RNA, 19 nt, Artificial Sequence
  Description of Artificial Sequence: Synthetic oligonucleotide
cagaaagcggugaggacug

SEQ ID NO: 1557519 - RNA, 19 nt, Artificial Sequence
  Description of Artificial Sequence: Synthetic oligonucleotide
aacuugggucaccugcacu

SEQ ID NO: 1557520 - RNA, 19 nt, Artificial Sequence
  Description of Artificial Sequence: Synthetic oligonucleotide
aggacagggcaccgaagcg

SEQ ID NO: 1557521 - RNA, 19 nt, Artificial Sequence
  Description of Artificial Sequence: Synthetic oligonucleotide
ucguccagccagcaggaca

SEQ ID NO: 1557522 - RNA, 19 nt, Artificial Sequence
  Description of Artificial Sequence: Synthetic oligonucleotide
cuuuagccgaggaggcugg

SEQ ID NO: 1557523 - RNA, 19 nt, Artificial Sequence
  Description of Artificial Sequence: Synthetic oligonucleotide
cagauguuggucuuuagua

SEQ ID NO: 1557524 - RNA, 19 nt, Artificial Sequence
  Description of Artificial Sequence: Synthetic oligonucleotide
cugguagccacucuuuguc

SEQ ID NO: 1557525 - RNA, 19 nt, Artificial Sequence
  Description of Artificial Sequence: Synthetic oligonucleotide
uccggggucacuagcuuca

SEQ ID NO: 1557526 - RNA, 19 nt, Artificial Sequence
  Description of Artificial Sequence: Synthetic oligonucleotide
caauacacccagguugucc

SEQ ID NO: 1557527 - RNA, 19 nt, Artificial Sequence
  Description of Artificial Sequence: Synthetic oligonucleotide
caccgcuucggucaugggg

SEQ ID NO: 1557528 - RNA, 19 nt, Artificial Sequence
  Description of Artificial Sequence: Synthetic oligonucleotide
ucaugaggaagagaacccu

SEQ ID NO: 1557529 - RNA, 19 nt, Artificial Sequence
  Description of Artificial Sequence: Synthetic oligonucleotide
ucauuguauccacccuuca

SEQ ID NO: 1557530 - RNA, 19 nt, Artificial Sequence
  Description of Artificial Sequence: Synthetic oligonucleotide
auuggcugguaccacugca

SEQ ID NO: 1557531 - RNA, 19 nt, Artificial Sequence
  Description of Artificial Sequence: Synthetic oligonucleotide
ggcacucucggccacacag

SEQ ID NO: 1557532 - RNA, 19 nt, Artificial Sequence
  Description of Artificial Sequence: Synthetic oligonucleotide
gagagacaugagaagguug

SEQ ID NO: 1557533 - RNA, 19 nt, Artificial Sequence
  Description of Artificial Sequence: Synthetic oligonucleotide
uggcguccugaucauuccg

SEQ ID NO: 1557534 - RNA, 19 nt, Artificial Sequence
  Description of Artificial Sequence: Synthetic oligonucleotide
uccugaucauuccgguuca

SEQ ID NO: 1557535 - RNA, 19 nt, Artificial Sequence
  Description of Artificial Sequence: Synthetic oligonucleotide
uccaccgcuucggucaugg

SEQ ID NO: 1557536 - RNA, 19 nt, Artificial Sequence
  Description of Artificial Sequence: Synthetic oligonucleotide
ucauggggaucucaggguu

SEQ ID NO: 1557537 - RNA, 19 nt, Artificial Sequence
  Description of Artificial Sequence: Synthetic oligonucleotide
augucgugaccacuggugu

SEQ ID NO: 1557538 - RNA, 19 nt, Artificial Sequence
  Description of Artificial Sequence: Synthetic oligonucleotide
uccgguucaguaugaaaau

SEQ ID NO: 1557539 - RNA, 19 nt, Artificial Sequence
  Description of Artificial Sequence: Synthetic oligonucleotide
cagcuuaaccuccccagag

SEQ ID NO: 1557540 - RNA, 19 nt, Artificial Sequence
  Description of Artificial Sequence: Synthetic oligonucleotide
cagagagccguccaucaac

SEQ ID NO: 1557541 - RNA, 19 nt, Artificial Sequence
  Description of Artificial Sequence: Synthetic oligonucleotide
uccaguauggugucccaau

SEQ ID NO: 1557542 - RNA, 19 nt, Artificial Sequence
  Description of Artificial Sequence: Synthetic oligonucleotide
agcaucuccagcguggcgu

SEQ ID NO: 1557543 - RNA, 19 nt, Artificial Sequence
  Description of Artificial Sequence: Synthetic oligonucleotide
gguucaguaugaaaaugcc

SEQ ID NO: 1557544 - RNA, 19 nt, Artificial Sequence
  Description of Artificial Sequence: Synthetic oligonucleotide
cacggaagucuccaaugcc

SEQ ID NO: 1557545 - RNA, 19 nt, Artificial Sequence
  Description of Artificial Sequence: Synthetic oligonucleotide
guaaguguggggucucuca

SEQ ID NO: 1557546 - RNA, 19 nt, Artificial Sequence
  Description of Artificial Sequence: Synthetic oligonucleotide
cagugucgcuccaaucugg

SEQ ID NO: 1557547 - RNA, 19 nt, Artificial Sequence
  Description of Artificial Sequence: Synthetic oligonucleotide
gaagcgcacgguguggaag

SEQ ID NO: 1557548 - RNA, 19 nt, Artificial Sequence
  Description of Artificial Sequence: Synthetic oligonucleotide
agguuguccggccagggaa

SEQ ID NO: 1557549 - RNA, 19 nt, Artificial Sequence
  Description of Artificial Sequence: Synthetic oligonucleotide
ugucccaaugaaggagagg

SEQ ID NO: 1557550 - RNA, 19 nt, Artificial Sequence
  Description of Artificial Sequence: Synthetic oligonucleotide
gagucauugaugaggaugu

SEQ ID NO: 1557551 - RNA, 19 nt, Artificial Sequence
  Description of Artificial Sequence: Synthetic oligonucleotide
guaccacugcagcaggacc

SEQ ID NO: 1557552 - RNA, 19 nt, Artificial Sequence
  Description of Artificial Sequence: Synthetic oligonucleotide
agcuuaaccuccccagagu

SEQ ID NO: 1557553 - RNA, 19 nt, Artificial Sequence
  Description of Artificial Sequence: Synthetic oligonucleotide
ugccggacaagcaggaauu

SEQ ID NO: 1557554 - RNA, 19 nt, Artificial Sequence
  Description of Artificial Sequence: Synthetic oligonucleotide
ucauuccgguucaguauga

SEQ ID NO: 1557555 - RNA, 19 nt, Artificial Sequence
  Description of Artificial Sequence: Synthetic oligonucleotide
agauaaggacaugucguga

SEQ ID NO: 1557556 - RNA, 19 nt, Artificial Sequence
  Description of Artificial Sequence: Synthetic oligonucleotide
ugucuuccuuaacuugggu

SEQ ID NO: 1557557 - RNA, 19 nt, Artificial Sequence
  Description of Artificial Sequence: Synthetic oligonucleotide
agucuccaaugccccacac

SEQ ID NO: 1557558 - RNA, 19 nt, Artificial Sequence
  Description of Artificial Sequence: Synthetic oligonucleotide
cacagcucauuguauccac

SEQ ID NO: 1557559 - RNA, 19 nt, Artificial Sequence
  Description of Artificial Sequence: Synthetic oligonucleotide
ugagaagguuguugaugca

SEQ ID NO: 1557560 - RNA, 19 nt, Artificial Sequence
  Description of Artificial Sequence: Synthetic oligonucleotide
agccgaggaggcugguagc

SEQ ID NO: 1557561 - RNA, 19 nt, Artificial Sequence
  Description of Artificial Sequence: Synthetic oligonucleotide
ucuuuaguagagggaugug

SEQ ID NO: 1557562 - RNA, 19 nt, Artificial Sequence
  Description of Artificial Sequence: Synthetic oligonucleotide
cacgccgaugcacacggcc

SEQ ID NO: 1557563 - RNA, 19 nt, Artificial Sequence
  Description of Artificial Sequence: Synthetic oligonucleotide
caccacaacaggccugggg

SEQ ID NO: 1557564 - RNA, 19 nt, Artificial Sequence
  Description of Artificial Sequence: Synthetic oligonucleotide
cugagaucccaaagucagc

SEQ ID NO: 1557565 - RNA, 19 nt, Artificial Sequence
  Description of Artificial Sequence: Synthetic oligonucleotide
uccuuaacuugggucaccu

SEQ ID NO: 1557566 - RNA, 19 nt, Artificial Sequence
  Description of Artificial Sequence: Synthetic oligonucleotide
agaggcucauuccuggaua

SEQ ID NO: 1557567 - RNA, 19 nt, Artificial Sequence
  Description of Artificial Sequence: Synthetic oligonucleotide
agcucauuguauccacccu

SEQ ID NO: 1557568 - RNA, 19 nt, Artificial Sequence
  Description of Artificial Sequence: Synthetic oligonucleotide
agaccagaugucacacagc

SEQ ID NO: 1557569 - RNA, 19 nt, Artificial Sequence
  Description of Artificial Sequence: Synthetic oligonucleotide
agacggaagguaagugugg

SEQ ID NO: 1557570 - RNA, 19 nt, Artificial Sequence
  Description of Artificial Sequence: Synthetic oligonucleotide
aucaccgugucuuccuuaa

SEQ ID NO: 1557571 - RNA, 19 nt, Artificial Sequence
  Description of Artificial Sequence: Synthetic oligonucleotide
ccacacuugaacuccgugc

SEQ ID NO: 1557572 - RNA, 19 nt, Artificial Sequence
  Description of Artificial Sequence: Synthetic oligonucleotide
gagcccacacuugaacucc

SEQ ID NO: 1557573 - RNA, 19 nt, Artificial Sequence
  Description of Artificial Sequence: Synthetic oligonucleotide
gucgcuccaaucugggcug

SEQ ID NO: 1557574 - RNA, 19 nt, Artificial Sequence
  Description of Artificial Sequence: Synthetic oligonucleotide
caggguccacgucucaugc

SEQ ID NO: 1557575 - RNA, 19 nt, Artificial Sequence
  Description of Artificial Sequence: Synthetic oligonucleotide
gagaagguuguugaugcaa

SEQ ID NO: 1557576 - RNA, 19 nt, Artificial Sequence
  Description of Artificial Sequence: Synthetic oligonucleotide
auuccgguucaguaugaaa

SEQ ID NO: 1557577 - RNA, 19 nt, Artificial Sequence
  Description of Artificial Sequence: Synthetic oligonucleotide
acaccaucaccgugucuuc

SEQ ID NO: 1557578 - RNA, 19 nt, Artificial Sequence
  Description of Artificial Sequence: Synthetic oligonucleotide
agagaacccugagagggug

SEQ ID NO: 1557579 - RNA, 19 nt, Artificial Sequence
  Description of Artificial Sequence: Synthetic oligonucleotide
aggguuucgaagcccggga

SEQ ID NO: 1557580 - RNA, 19 nt, Artificial Sequence
  Description of Artificial Sequence: Synthetic oligonucleotide
gccuaggaugcuaugagag

SEQ ID NO: 1557581 - RNA, 19 nt, Artificial Sequence
  Description of Artificial Sequence: Synthetic oligonucleotide
cgguucaguaugaaaaugc

SEQ ID NO: 1557582 - RNA, 19 nt, Artificial Sequence
  Description of Artificial Sequence: Synthetic oligonucleotide
caccugccggacaagcagg

SEQ ID NO: 1557583 - RNA, 19 nt, Artificial Sequence
  Description of Artificial Sequence: Synthetic oligonucleotide
ucuugccagaaagcgguga

SEQ ID NO: 1557584 - RNA, 19 nt, Artificial Sequence
  Description of Artificial Sequence: Synthetic oligonucleotide
accaucaccgugucuuccu

SEQ ID NO: 1557585 - RNA, 19 nt, Artificial Sequence
  Description of Artificial Sequence: Synthetic oligonucleotide
gaccuuaguggagaccaug

SEQ ID NO: 1557586 - RNA, 19 nt, Artificial Sequence
  Description of Artificial Sequence: Synthetic oligonucleotide
auggggaucucaggguuuc

SEQ ID NO: 1557587 - RNA, 19 nt, Artificial Sequence
  Description of Artificial Sequence: Synthetic oligonucleotide
gucacuagcuucagagagc

SEQ ID NO: 1557588 - RNA, 19 nt, Artificial Sequence
  Description of Artificial Sequence: Synthetic oligonucleotide
auacacccagguuguccgg

SEQ ID NO: 1557589 - RNA, 19 nt, Artificial Sequence
  Description of Artificial Sequence: Synthetic oligonucleotide
accgcuucggucaugggga

SEQ ID NO: 1557590 - RNA, 19 nt, Artificial Sequence
  Description of Artificial Sequence: Synthetic oligonucleotide
guuugucuccaaccauagc

SEQ ID NO: 1557591 - RNA, 19 nt, Artificial Sequence
  Description of Artificial Sequence: Synthetic oligonucleotide
cuaggaugcuaugagagua

SEQ ID NO: 1557592 - RNA, 19 nt, Artificial Sequence
  Description of Artificial Sequence: Synthetic oligonucleotide
gccacucuuugucaugagg

SEQ ID NO: 1557593 - RNA, 19 nt, Artificial Sequence
  Description of Artificial Sequence: Synthetic oligonucleotide
cuagcuucagagagccguc

SEQ ID NO: 1557594 - RNA, 19 nt, Artificial Sequence
  Description of Artificial Sequence: Synthetic oligonucleotide
acaugucgugaccacuggu

SEQ ID NO: 1557595 - RNA, 19 nt, Artificial Sequence
  Description of Artificial Sequence: Synthetic oligonucleotide
acgucucaugcccucucag

SEQ ID NO: 1557596 - RNA, 19 nt, Artificial Sequence
  Description of Artificial Sequence: Synthetic oligonucleotide
acaugagaagguuguugau

SEQ ID NO: 1557597 - RNA, 19 nt, Artificial Sequence
  Description of Artificial Sequence: Synthetic oligonucleotide
cacuugaacuccgugcuuc

SEQ ID NO: 1557598 - RNA, 19 nt, Artificial Sequence
  Description of Artificial Sequence: Synthetic oligonucleotide
guccaucaacaccaucacc

SEQ ID NO: 1557599 - RNA, 19 nt, Artificial Sequence
  Description of Artificial Sequence: Synthetic oligonucleotide
cucgaacacuggcagcggc

SEQ ID NO: 1557600 - RNA, 19 nt, Artificial Sequence
  Description of Artificial Sequence: Synthetic oligonucleotide
ggauguuggcuccuugaug

SEQ ID NO: 1557601 - RNA, 19 nt, Artificial Sequence
  Description of Artificial Sequence: Synthetic oligonucleotide
gaguuugucuccaaccaua

SEQ ID NO: 1557602 - RNA, 19 nt, Artificial Sequence
  Description of Artificial Sequence: Synthetic oligonucleotide
aagagaacccugagagggu

SEQ ID NO: 1557603 - RNA, 19 nt, Artificial Sequence
  Description of Artificial Sequence: Synthetic oligonucleotide
agagguuggcuaggggcgg

SEQ ID NO: 1557604 - RNA, 19 nt, Artificial Sequence
  Description of Artificial Sequence: Synthetic oligonucleotide
gauccgagggccgugucuc

SEQ ID NO: 1557605 - RNA, 19 nt, Artificial Sequence
  Description of Artificial Sequence: Synthetic oligonucleotide
gguuucgaagcccgggagc

SEQ ID NO: 1557606 - RNA, 19 nt, Artificial Sequence
  Description of Artificial Sequence: Synthetic oligonucleotide
agcaggacagggcaccgaa

SEQ ID NO: 1557607 - RNA, 19 nt, Artificial Sequence
  Description of Artificial Sequence: Synthetic oligonucleotide
gucguucccugagagagac

SEQ ID NO: 1557608 - RNA, 19 nt, Artificial Sequence
  Description of Artificial Sequence: Synthetic oligonucleotide
ggucguguuuauuggaaga

SEQ ID NO: 1557609 - RNA, 19 nt, Artificial Sequence
  Description of Artificial Sequence: Synthetic oligonucleotide
gaggccuaggaugcuauga

SEQ ID NO: 1557610 - RNA, 19 nt, Artificial Sequence
  Description of Artificial Sequence: Synthetic oligonucleotide
gcuuaaccuccccagaguc

SEQ ID NO: 1557611 - RNA, 19 nt, Artificial Sequence
  Description of Artificial Sequence: Synthetic oligonucleotide
gaugcaauacacccagguu

SEQ ID NO: 1557612 - RNA, 19 nt, Artificial Sequence
  Description of Artificial Sequence: Synthetic oligonucleotide
ucguguuuauuggaagaua

SEQ ID NO: 1557613 - RNA, 19 nt, Artificial Sequence
  Description of Artificial Sequence: Synthetic oligonucleotide
accuuaguggagaccaugu

SEQ ID NO: 1557614 - RNA, 19 nt, Artificial Sequence
  Description of Artificial Sequence: Synthetic oligonucleotide
cccaaugaaggagaggcgc

SEQ ID NO: 1557615 - RNA, 19 nt, Artificial Sequence
  Description of Artificial Sequence: Synthetic oligonucleotide
acacagcucauuguaucca

SEQ ID NO: 1557616 - RNA, 19 nt, Artificial Sequence
  Description of Artificial Sequence: Synthetic oligonucleotide
uacacccagguuguccggc

SEQ ID NO: 1557617 - RNA, 19 nt, Artificial Sequence
  Description of Artificial Sequence: Synthetic oligonucleotide
agagagccguccaucaaca

SEQ ID NO: 1557618 - RNA, 19 nt, Artificial Sequence
  Description of Artificial Sequence: Synthetic oligonucleotide
accacuggugucuguuaga

SEQ ID NO: 1557619 - RNA, 19 nt, Artificial Sequence
  Description of Artificial Sequence: Synthetic oligonucleotide
cuuuaguagagggaugugu

SEQ ID NO: 1557620 - RNA, 19 nt, Artificial Sequence
  Description of Artificial Sequence: Synthetic oligonucleotide
guggggucgauccgagggc

SEQ ID NO: 1557621 - RNA, 19 nt, Artificial Sequence
  Description of Artificial Sequence: Synthetic oligonucleotide
cacacggccggcagcucgg

SEQ ID NO: 1557622 - RNA, 19 nt, Artificial Sequence
  Description of Artificial Sequence: Synthetic oligonucleotide
aggacugaugugagcaaug

SEQ ID NO: 1557623 - RNA, 19 nt, Artificial Sequence
  Description of Artificial Sequence: Synthetic oligonucleotide
gaggucguguuuauuggaa

SEQ ID NO: 1557624 - RNA, 19 nt, Artificial Sequence
  Description of Artificial Sequence: Synthetic oligonucleotide
uuccuuaacuugggucacc

SEQ ID NO: 1557625 - RNA, 19 nt, Artificial Sequence
  Description of Artificial Sequence: Synthetic oligonucleotide
aggaugcuaugagaguaca

SEQ ID NO: 1557626 - RNA, 19 nt, Artificial Sequence
  Description of Artificial Sequence: Synthetic oligonucleotide
ucgaagcccgggagcuggg

SEQ ID NO: 1557627 - RNA, 19 nt, Artificial Sequence
  Description of Artificial Sequence: Synthetic oligonucleotide
ggggcgguggggucgaucc

SEQ ID NO: 1557628 - RNA, 19 nt, Artificial Sequence
  Description of Artificial Sequence: Synthetic oligonucleotide
acgccgaugcacacggccg

SEQ ID NO: 1557629 - RNA, 19 nt, Artificial Sequence
  Description of Artificial Sequence: Synthetic oligonucleotide
ugagagggugcacgucaaa

SEQ ID NO: 1557630 - RNA, 19 nt, Artificial Sequence
  Description of Artificial Sequence: Synthetic oligonucleotide
gguguggaagagcaccgac

SEQ ID NO: 1557631 - RNA, 19 nt, Artificial Sequence
  Description of Artificial Sequence: Synthetic oligonucleotide
uguggcccgugcuggaguc

SEQ ID NO: 1557632 - RNA, 19 nt, Artificial Sequence
  Description of Artificial Sequence: Synthetic oligonucleotide
ggcucggcagccuuuggug

SEQ ID NO: 1557633 - RNA, 19 nt, Artificial Sequence
  Description of Artificial Sequence: Synthetic oligonucleotide
ugcuggagucguccagcca

SEQ ID NO: 1557634 - RNA, 19 nt, Artificial Sequence
  Description of Artificial Sequence: Synthetic oligonucleotide
guucaguaugaaaaugccu

SEQ ID NO: 1557635 - RNA, 19 nt, Artificial Sequence
  Description of Artificial Sequence: Synthetic oligonucleotide
aggcucggcagccuuuggu

SEQ ID NO: 1557636 - RNA, 19 nt, Artificial Sequence
  Description of Artificial Sequence: Synthetic oligonucleotide
gagcaauggggcuuccugu

SEQ ID NO: 1557637 - RNA, 19 nt, Artificial Sequence
  Description of Artificial Sequence: Synthetic oligonucleotide
cacccuucauguccacagc

SEQ ID NO: 1557638 - RNA, 19 nt, Artificial Sequence
  Description of Artificial Sequence: Synthetic oligonucleotide
ggcaccgaagcgcacggug

SEQ ID NO: 1557639 - RNA, 19 nt, Artificial Sequence
  Description of Artificial Sequence: Synthetic oligonucleotide
ggcguccugaucauuccgg

SEQ ID NO: 1557640 - RNA, 19 nt, Artificial Sequence
  Description of Artificial Sequence: Synthetic oligonucleotide
ccacggaagucuccaaugc

SEQ ID NO: 1557641 - RNA, 19 nt, Artificial Sequence
  Description of Artificial Sequence: Synthetic oligonucleotide
uucggucauggggaucuca

SEQ ID NO: 1557642 - RNA, 19 nt, Artificial Sequence
  Description of Artificial Sequence: Synthetic oligonucleotide
gucuccaaugccccacaca

SEQ ID NO: 1557643 - RNA, 19 nt, Artificial Sequence
  Description of Artificial Sequence: Synthetic oligonucleotide
ggacagggcaccgaagcgc

SEQ ID NO: 1557644 - RNA, 19 nt, Artificial Sequence
  Description of Artificial Sequence: Synthetic oligonucleotide
gagagccguccaucaacac

SEQ ID NO: 1557645 - RNA, 19 nt, Artificial Sequence
  Description of Artificial Sequence: Synthetic oligonucleotide
ggguuucgaagcccgggag

SEQ ID NO: 1557646 - RNA, 19 nt, Artificial Sequence
  Description of Artificial Sequence: Synthetic oligonucleotide
gagcccggcgccaucagca

SEQ ID NO: 1557647 - RNA, 19 nt, Artificial Sequence
  Description of Artificial Sequence: Synthetic oligonucleotide
gagucugcaggguccacgu

SEQ ID NO: 1557648 - RNA, 19 nt, Artificial Sequence
  Description of Artificial Sequence: Synthetic oligonucleotide
caccgaagcgcacggugug

SEQ ID NO: 1557649 - RNA, 19 nt, Artificial Sequence
  Description of Artificial Sequence: Synthetic oligonucleotide
uccuuuagccgaggaggcu

SEQ ID NO: 1557650 - RNA, 19 nt, Artificial Sequence
  Description of Artificial Sequence: Synthetic oligonucleotide
gaccucgccgcgugcccgg

SEQ ID NO: 1557651 - RNA, 19 nt, Artificial Sequence
  Description of Artificial Sequence: Synthetic oligonucleotide
caggaccacggaagucucc

SEQ ID NO: 1557652 - RNA, 19 nt, Artificial Sequence
  Description of Artificial Sequence: Synthetic oligonucleotide
cuccggggucacuagcuuc

SEQ ID NO: 1557653 - RNA, 19 nt, Artificial Sequence
  Description of Artificial Sequence: Synthetic oligonucleotide
gugcacgucaaagaggggu

SEQ ID NO: 1557654 - RNA, 19 nt, Artificial Sequence
  Description of Artificial Sequence: Synthetic oligonucleotide
uuucgaagcccgggagcug

SEQ ID NO: 1557655 - RNA, 19 nt, Artificial Sequence
  Description of Artificial Sequence: Synthetic oligonucleotide
ccucucagaggcucauucc

SEQ ID NO: 1557656 - RNA, 19 nt, Artificial Sequence
  Description of Artificial Sequence: Synthetic oligonucleotide
ggaugcuaugagaguacag

SEQ ID NO: 1557657 - RNA, 19 nt, Artificial Sequence
  Description of Artificial Sequence: Synthetic oligonucleotide
acccugagagggugcacgu

SEQ ID NO: 1557658 - RNA, 19 nt, Artificial Sequence
  Description of Artificial Sequence: Synthetic oligonucleotide
gugucccaaugaaggagag

SEQ ID NO: 1557659 - RNA, 19 nt, Artificial Sequence
  Description of Artificial Sequence: Synthetic oligonucleotide
cacuagcuucagagagccg

SEQ ID NO: 1557660 - RNA, 19 nt, Artificial Sequence
  Description of Artificial Sequence: Synthetic oligonucleotide
guuucgaagcccgggagcu

SEQ ID NO: 1557661 - RNA, 19 nt, Artificial Sequence
  Description of Artificial Sequence: Synthetic oligonucleotide
guccggaucuccuuccucu

SEQ ID NO: 1557662 - RNA, 19 nt, Artificial Sequence
  Description of Artificial Sequence: Synthetic oligonucleotide
cuggaccuuaguggagacc

SEQ ID NO: 1557663 - RNA, 19 nt, Artificial Sequence
  Description of Artificial Sequence: Synthetic oligonucleotide
uggggaucucaggguuucg

SEQ ID NO: 1557664 - RNA, 19 nt, Artificial Sequence
  Description of Artificial Sequence: Synthetic oligonucleotide
agacugaggucguguuuau

SEQ ID NO: 1557665 - RNA, 19 nt, Artificial Sequence
  Description of Artificial Sequence: Synthetic oligonucleotide
auccacccuucauguccac

SEQ ID NO: 1557666 - RNA, 19 nt, Artificial Sequence
  Description of Artificial Sequence: Synthetic oligonucleotide
ggcugguagccacucuuug

SEQ ID NO: 1557667 - RNA, 19 nt, Artificial Sequence
  Description of Artificial Sequence: Synthetic oligonucleotide
gaggcucauuccuggauau

SEQ ID NO: 1557668 - RNA, 19 nt, Artificial Sequence
  Description of Artificial Sequence: Synthetic oligonucleotide
uuguccggccagggaagag

SEQ ID NO: 1557669 - RNA, 19 nt, Artificial Sequence
  Description of Artificial Sequence: Synthetic oligonucleotide
ccaguauggugucccaaug

SEQ ID NO: 1557670 - RNA, 19 nt, Artificial Sequence
  Description of Artificial Sequence: Synthetic oligonucleotide
ggucuuuaguagagggaug

SEQ ID NO: 1557671 - RNA, 19 nt, Artificial Sequence
  Description of Artificial Sequence: Synthetic oligonucleotide
cucgccgcgugcccggggc

SEQ ID NO: 1557672 - RNA, 19 nt, Artificial Sequence
  Description of Artificial Sequence: Synthetic oligonucleotide
gcaggguccacgucucaug

SEQ ID NO: 1557673 - RNA, 19 nt, Artificial Sequence
  Description of Artificial Sequence: Synthetic oligonucleotide
ggagucguccagccagcag

SEQ ID NO: 1557674 - RNA, 19 nt, Artificial Sequence
  Description of Artificial Sequence: Synthetic oligonucleotide
gguuguccggccagggaag

SEQ ID NO: 1557675 - RNA, 19 nt, Artificial Sequence
  Description of Artificial Sequence: Synthetic oligonucleotide
ggcagcucggagcccggcg

SEQ ID NO: 1557676 - RNA, 19 nt, Artificial Sequence
  Description of Artificial Sequence: Synthetic oligonucleotide
gcagauguuggucuuuagu

SEQ ID NO: 1557677 - RNA, 19 nt, Artificial Sequence
  Description of Artificial Sequence: Synthetic oligonucleotide
agcccacacuugaacuccg

SEQ ID NO: 1557678 - RNA, 19 nt, Artificial Sequence
  Description of Artificial Sequence: Synthetic oligonucleotide
gagccggcacucucggcca

SEQ ID NO: 1557679 - RNA, 19 nt, Artificial Sequence
  Description of Artificial Sequence: Synthetic oligonucleotide
ugguguccuggaccuuagu

SEQ ID NO: 1557680 - RNA, 19 nt, Artificial Sequence
  Description of Artificial Sequence: Synthetic oligonucleotide
uggcuaggggcgguggggu

SEQ ID NO: 1557681 - RNA, 19 nt, Artificial Sequence
  Description of Artificial Sequence: Synthetic oligonucleotide
cauuguauccacccuucau

SEQ ID NO: 1557682 - RNA, 19 nt, Artificial Sequence
  Description of Artificial Sequence: Synthetic oligonucleotide
gcuaggggcgguggggucg

SEQ ID NO: 1557683 - RNA, 19 nt, Artificial Sequence
  Description of Artificial Sequence: Synthetic oligonucleotide
gcagacggaagguaagugu

SEQ ID NO: 1557684 - RNA, 19 nt, Artificial Sequence
  Description of Artificial Sequence: Synthetic oligonucleotide
gaggcugguagccacucuu

SEQ ID NO: 1557685 - RNA, 19 nt, Artificial Sequence
  Description of Artificial Sequence: Synthetic oligonucleotide
uuccuguccggaucuccuu

SEQ ID NO: 1557686 - RNA, 19 nt, Artificial Sequence
  Description of Artificial Sequence: Synthetic oligonucleotide
ucggagcccggcgccauca

SEQ ID NO: 1557687 - RNA, 19 nt, Artificial Sequence
  Description of Artificial Sequence: Synthetic oligonucleotide
ccagugucgcuccaaucug

SEQ ID NO: 1557688 - RNA, 19 nt, Artificial Sequence
  Description of Artificial Sequence: Synthetic oligonucleotide
ccugagagggugcacguca

SEQ ID NO: 1557689 - RNA, 19 nt, Artificial Sequence
  Description of Artificial Sequence: Synthetic oligonucleotide
uggagucguccagccagca

SEQ ID NO: 1557690 - RNA, 19 nt, Artificial Sequence
  Description of Artificial Sequence: Synthetic oligonucleotide
uuagccgaggaggcuggua

SEQ ID NO: 1557691 - RNA, 19 nt, Artificial Sequence
  Description of Artificial Sequence: Synthetic oligonucleotide
ccgugucuuccuuaacuug

SEQ ID NO: 1557692 - RNA, 19 nt, Artificial Sequence
  Description of Artificial Sequence: Synthetic oligonucleotide
gcagcucggagcccggcgc

SEQ ID NO: 1557693 - RNA, 19 nt, Artificial Sequence
  Description of Artificial Sequence: Synthetic oligonucleotide
ggcugagaucccaaaguca

SEQ ID NO: 1557694 - RNA, 19 nt, Artificial Sequence
  Description of Artificial Sequence: Synthetic oligonucleotide
gaccacggaagucuccaau

SEQ ID NO: 1557695 - RNA, 19 nt, Artificial Sequence
  Description of Artificial Sequence: Synthetic oligonucleotide
cccucucagaggcucauuc

SEQ ID NO: 1557696 - RNA, 19 nt, Artificial Sequence
  Description of Artificial Sequence: Synthetic oligonucleotide
ggccuaggaugcuaugaga

SEQ ID NO: 1557697 - RNA, 19 nt, Artificial Sequence
  Description of Artificial Sequence: Synthetic oligonucleotide
gggucacuagcuucagaga

SEQ ID NO: 1557698 - RNA, 19 nt, Artificial Sequence
  Description of Artificial Sequence: Synthetic oligonucleotide
cuuccuguccggaucuccu

SEQ ID NO: 1557699 - RNA, 19 nt, Artificial Sequence
  Description of Artificial Sequence: Synthetic oligonucleotide
gagcagauguuggucuuua

SEQ ID NO: 1557700 - RNA, 19 nt, Artificial Sequence
  Description of Artificial Sequence: Synthetic oligonucleotide
cagcucggagcccggcgcc

SEQ ID NO: 1557701 - RNA, 19 nt, Artificial Sequence
  Description of Artificial Sequence: Synthetic oligonucleotide
gagcaccgaccucgccgcg

SEQ ID NO: 1557702 - RNA, 19 nt, Artificial Sequence
  Description of Artificial Sequence: Synthetic oligonucleotide
uuuagccgaggaggcuggu

SEQ ID NO: 1557703 - RNA, 19 nt, Artificial Sequence
  Description of Artificial Sequence: Synthetic oligonucleotide
agagcaccugccggacaag

SEQ ID NO: 1557704 - RNA, 19 nt, Artificial Sequence
  Description of Artificial Sequence: Synthetic oligonucleotide
auccaguauggugucccaa

SEQ ID NO: 1557705 - RNA, 19 nt, Artificial Sequence
  Description of Artificial Sequence: Synthetic oligonucleotide
uggcccgugcuggagucgu

SEQ ID NO: 1557706 - RNA, 19 nt, Artificial Sequence
  Description of Artificial Sequence: Synthetic oligonucleotide
cguggcguccugaucauuc

SEQ ID NO: 1557707 - RNA, 19 nt, Artificial Sequence
  Description of Artificial Sequence: Synthetic oligonucleotide
cgagcagacggaagguaag

SEQ ID NO: 1557708 - RNA, 19 nt, Artificial Sequence
  Description of Artificial Sequence: Synthetic oligonucleotide
cccugagagagacaugaga

SEQ ID NO: 1557709 - RNA, 19 nt, Artificial Sequence
  Description of Artificial Sequence: Synthetic oligonucleotide
ucgauccgagggccguguc

SEQ ID NO: 1557710 - RNA, 19 nt, Artificial Sequence
  Description of Artificial Sequence: Synthetic oligonucleotide
agcugugcuguggaucuuu

SEQ ID NO: 1557711 - RNA, 19 nt, Artificial Sequence
  Description of Artificial Sequence: Synthetic oligonucleotide
cugagagggugcacgucaa

SEQ ID NO: 1557712 - RNA, 19 nt, Artificial Sequence
  Description of Artificial Sequence: Synthetic oligonucleotide
guccacgucucaugcccuc

SEQ ID NO: 1557713 - RNA, 19 nt, Artificial Sequence
  Description of Artificial Sequence: Synthetic oligonucleotide
agcguggcguccugaucau

SEQ ID NO: 1557714 - RNA, 19 nt, Artificial Sequence
  Description of Artificial Sequence: Synthetic oligonucleotide
acgucaaagaggggugguu

SEQ ID NO: 1557715 - RNA, 19 nt, Artificial Sequence
  Description of Artificial Sequence: Synthetic oligonucleotide
gagcagacggaagguaagu

SEQ ID NO: 1557716 - RNA, 19 nt, Artificial Sequence
  Description of Artificial Sequence: Synthetic oligonucleotide
cacgucucaugcccucuca

SEQ ID NO: 1557717 - RNA, 19 nt, Artificial Sequence
  Description of Artificial Sequence: Synthetic oligonucleotide
ccgguucaguaugaaaaug

SEQ ID NO: 1557718 - RNA, 19 nt, Artificial Sequence
  Description of Artificial Sequence: Synthetic oligonucleotide
cuccaaccauagccacagc

SEQ ID NO: 1557719 - RNA, 19 nt, Artificial Sequence
  Description of Artificial Sequence: Synthetic oligonucleotide
ggagccgagcagacggaag

SEQ ID NO: 1557720 - RNA, 19 nt, Artificial Sequence
  Description of Artificial Sequence: Synthetic oligonucleotide
agcgcacgguguggaagag

SEQ ID NO: 1557721 - RNA, 19 nt, Artificial Sequence
  Description of Artificial Sequence: Synthetic oligonucleotide
uccaggcagcugugcugug

SEQ ID NO: 1557722 - RNA, 19 nt, Artificial Sequence
  Description of Artificial Sequence: Synthetic oligonucleotide
gccagaaagcggugaggac

SEQ ID NO: 1557723 - RNA, 19 nt, Artificial Sequence
  Description of Artificial Sequence: Synthetic oligonucleotide
gcucacgccgaugcacacg

SEQ ID NO: 1557724 - RNA, 19 nt, Artificial Sequence
  Description of Artificial Sequence: Synthetic oligonucleotide
cccacacuugaacuccgug

SEQ ID NO: 1557725 - RNA, 19 nt, Artificial Sequence
  Description of Artificial Sequence: Synthetic oligonucleotide
gcuucggucauggggaucu

SEQ ID NO: 1557726 - RNA, 19 nt, Artificial Sequence
  Description of Artificial Sequence: Synthetic oligonucleotide
gccgaggaggcugguagcc

SEQ ID NO: 1557727 - RNA, 19 nt, Artificial Sequence
  Description of Artificial Sequence: Synthetic oligonucleotide
cugccggacaagcaggaau

SEQ ID NO: 1557728 - RNA, 19 nt, Artificial Sequence
  Description of Artificial Sequence: Synthetic oligonucleotide
caucaccgugucuuccuua

SEQ ID NO: 1557729 - RNA, 19 nt, Artificial Sequence
  Description of Artificial Sequence: Synthetic oligonucleotide
caaugaaggagaggcgccu

SEQ ID NO: 1557730 - RNA, 19 nt, Artificial Sequence
  Description of Artificial Sequence: Synthetic oligonucleotide
ccuuccucggcacccagga

SEQ ID NO: 1557731 - RNA, 19 nt, Artificial Sequence
  Description of Artificial Sequence: Synthetic oligonucleotide
guuguccggccagggaaga

SEQ ID NO: 1557732 - RNA, 19 nt, Artificial Sequence
  Description of Artificial Sequence: Synthetic oligonucleotide
ggaguuugucuccaaccau

SEQ ID NO: 1557733 - RNA, 19 nt, Artificial Sequence
  Description of Artificial Sequence: Synthetic oligonucleotide
ccuuaacuugggucaccug

SEQ ID NO: 1557734 - RNA, 19 nt, Artificial Sequence
  Description of Artificial Sequence: Synthetic oligonucleotide
gaaagcggugaggacugau

SEQ ID NO: 1557735 - RNA, 19 nt, Artificial Sequence
  Description of Artificial Sequence: Synthetic oligonucleotide
ggcgccaucagcagcucga

SEQ ID NO: 1557736 - RNA, 19 nt, Artificial Sequence
  Description of Artificial Sequence: Synthetic oligonucleotide
gcucgaacacuggcagcgg

SEQ ID NO: 1557737 - RNA, 19 nt, Artificial Sequence
  Description of Artificial Sequence: Synthetic oligonucleotide
agcaccgaccucgccgcgu

SEQ ID NO: 1557738 - RNA, 19 nt, Artificial Sequence
  Description of Artificial Sequence: Synthetic oligonucleotide
aggggcgguggggucgauc

SEQ ID NO: 1557739 - RNA, 19 nt, Artificial Sequence
  Description of Artificial Sequence: Synthetic oligonucleotide
guggcccgugcuggagucg

SEQ ID NO: 1557740 - RNA, 19 nt, Artificial Sequence
  Description of Artificial Sequence: Synthetic oligonucleotide
agaaagcggugaggacuga

SEQ ID NO: 1557741 - RNA, 19 nt, Artificial Sequence
  Description of Artificial Sequence: Synthetic oligonucleotide
agguuggcuaggggcggug

SEQ ID NO: 1557742 - RNA, 19 nt, Artificial Sequence
  Description of Artificial Sequence: Synthetic oligonucleotide
ggugucuguuagagucugc

SEQ ID NO: 1557743 - RNA, 19 nt, Artificial Sequence
  Description of Artificial Sequence: Synthetic oligonucleotide
cauuccgguucaguaugaa

SEQ ID NO: 1557744 - RNA, 19 nt, Artificial Sequence
  Description of Artificial Sequence: Synthetic oligonucleotide
cugaucauuccgguucagu

SEQ ID NO: 1557745 - RNA, 19 nt, Artificial Sequence
  Description of Artificial Sequence: Synthetic oligonucleotide
cagcaggaccacggaaguc

SEQ ID NO: 1557746 - RNA, 19 nt, Artificial Sequence
  Description of Artificial Sequence: Synthetic oligonucleotide
gcacucucggccacacagc

SEQ ID NO: 1557747 - RNA, 19 nt, Artificial Sequence
  Description of Artificial Sequence: Synthetic oligonucleotide
gcaccgaccucgccgcgug

SEQ ID NO: 1557748 - RNA, 19 nt, Artificial Sequence
  Description of Artificial Sequence: Synthetic oligonucleotide
ggggaucucaggguuucga

SEQ ID NO: 1557749 - RNA, 19 nt, Artificial Sequence
  Description of Artificial Sequence: Synthetic oligonucleotide
cgugcuggagucguccagc

SEQ ID NO: 1557750 - RNA, 19 nt, Artificial Sequence
  Description of Artificial Sequence: Synthetic oligonucleotide
ccgagcagacggaagguaa

SEQ ID NO: 1557751 - RNA, 19 nt, Artificial Sequence
  Description of Artificial Sequence: Synthetic oligonucleotide
gagaggcgccuggccagug

SEQ ID NO: 1557752 - RNA, 19 nt, Artificial Sequence
  Description of Artificial Sequence: Synthetic oligonucleotide
cggacaagcaggaauuugu

SEQ ID NO: 1557753 - RNA, 19 nt, Artificial Sequence
  Description of Artificial Sequence: Synthetic oligonucleotide
agcggcgugggcagcggga

SEQ ID NO: 1557754 - RNA, 19 nt, Artificial Sequence
  Description of Artificial Sequence: Synthetic oligonucleotide
cacggccggcagcucggag

SEQ ID NO: 1557755 - RNA, 19 nt, Artificial Sequence
  Description of Artificial Sequence: Synthetic oligonucleotide
ggccagugucgcuccaauc

SEQ ID NO: 1557756 - RNA, 19 nt, Artificial Sequence
  Description of Artificial Sequence: Synthetic oligonucleotide
ggggucguucccugagaga

SEQ ID NO: 1557757 - RNA, 19 nt, Artificial Sequence
  Description of Artificial Sequence: Synthetic oligonucleotide
ggggucgauccgagggccg

SEQ ID NO: 1557758 - RNA, 19 nt, Artificial Sequence
  Description of Artificial Sequence: Synthetic oligonucleotide
cagaggcucauuccuggau

SEQ ID NO: 1557759 - RNA, 19 nt, Artificial Sequence
  Description of Artificial Sequence: Synthetic oligonucleotide
cggccacacagcaggcucg

SEQ ID NO: 1557760 - RNA, 19 nt, Artificial Sequence
  Description of Artificial Sequence: Synthetic oligonucleotide
gggcgguggggucgauccg

SEQ ID NO: 1557761 - RNA, 19 nt, Artificial Sequence
  Description of Artificial Sequence: Synthetic oligonucleotide
ccggccagggaagagcauc

SEQ ID NO: 1557762 - RNA, 19 nt, Artificial Sequence
  Description of Artificial Sequence: Synthetic oligonucleotide
cauggggaucucaggguuu

SEQ ID NO: 1557763 - RNA, 19 nt, Artificial Sequence
  Description of Artificial Sequence: Synthetic oligonucleotide
ggcgguggggucgauccga

SEQ ID NO: 1557764 - RNA, 19 nt, Artificial Sequence
  Description of Artificial Sequence: Synthetic oligonucleotide
aggcucauuccuggauaua

SEQ ID NO: 1557765 - RNA, 19 nt, Artificial Sequence
  Description of Artificial Sequence: Synthetic oligonucleotide
caccgaccucgccgcgugc

SEQ ID NO: 1557766 - RNA, 19 nt, Artificial Sequence
  Description of Artificial Sequence: Synthetic oligonucleotide
cggccggcagcucggagcc

SEQ ID NO: 1557767 - RNA, 19 nt, Artificial Sequence
  Description of Artificial Sequence: Synthetic oligonucleotide
cuaggggcgguggggucga

SEQ ID NO: 1557768 - RNA, 19 nt, Artificial Sequence
  Description of Artificial Sequence: Synthetic oligonucleotide
cuucggucauggggaucuc

SEQ ID NO: 1557769 - RNA, 19 nt, Artificial Sequence
  Description of Artificial Sequence: Synthetic oligonucleotide
cacuggcagcggcgugggc

SEQ ID NO: 1557770 - RNA, 19 nt, Artificial Sequence
  Description of Artificial Sequence: Synthetic oligonucleotide
cgucucaugcccucucaga

SEQ ID NO: 1557771 - RNA, 19 nt, Artificial Sequence
  Description of Artificial Sequence: Synthetic oligonucleotide
ggucgauccgagggccgug

SEQ ID NO: 1557772 - RNA, 19 nt, Artificial Sequence
  Description of Artificial Sequence: Synthetic oligonucleotide
ggucguucccugagagaga

SEQ ID NO: 1557773 - RNA, 19 nt, Artificial Sequence
  Description of Artificial Sequence: Synthetic oligonucleotide
gccgugucuccaccacaac

SEQ ID NO: 1557774 - RNA, 19 nt, Artificial Sequence
  Description of Artificial Sequence: Synthetic oligonucleotide
ccugaucauuccgguucag

SEQ ID NO: 1557775 - RNA, 19 nt, Artificial Sequence
  Description of Artificial Sequence: Synthetic oligonucleotide
ggacaagcaggaauuuguu

SEQ ID NO: 1557776 - RNA, 19 nt, Artificial Sequence
  Description of Artificial Sequence: Synthetic oligonucleotide
ccacgucucaugcccucuc

SEQ ID NO: 1557777 - RNA, 19 nt, Artificial Sequence
  Description of Artificial Sequence: Synthetic oligonucleotide
ggaccacggaagucuccaa

SEQ ID NO: 1557778 - RNA, 19 nt, Artificial Sequence
  Description of Artificial Sequence: Synthetic oligonucleotide
gcguccugaucauuccggu

SEQ ID NO: 1557779 - RNA, 19 nt, Artificial Sequence
  Description of Artificial Sequence: Synthetic oligonucleotide
cggaagguaaguguggggu

SEQ ID NO: 1557780 - RNA, 19 nt, Artificial Sequence
  Description of Artificial Sequence: Synthetic oligonucleotide
gucgauccgagggccgugu

SEQ ID NO: 1557781 - RNA, 19 nt, Artificial Sequence
  Description of Artificial Sequence: Synthetic oligonucleotide
ggcuaggggcggugggguc

SEQ ID NO: 1557782 - RNA, 19 nt, Artificial Sequence
  Description of Artificial Sequence: Synthetic oligonucleotide
gugagcaauggggcuuccu

SEQ ID NO: 1557783 - RNA, 19 nt, Artificial Sequence
  Description of Artificial Sequence: Synthetic oligonucleotide
cuguccggaucuccuuccu

SEQ ID NO: 1557784 - RNA, 19 nt, Artificial Sequence
  Description of Artificial Sequence: Synthetic oligonucleotide
gcgguggggucgauccgag

SEQ ID NO: 1557785 - RNA, 19 nt, Artificial Sequence
  Description of Artificial Sequence: Synthetic oligonucleotide
gccgaugcacacggccggc

SEQ ID NO: 1557786 - RNA, 19 nt, Artificial Sequence
  Description of Artificial Sequence: Synthetic oligonucleotide
ccccuccggggucacuagc

SEQ ID NO: 1557787 - RNA, 19 nt, Artificial Sequence
  Description of Artificial Sequence: Synthetic oligonucleotide
cagagucauugaugaggau

SEQ ID NO: 1557788 - RNA, 19 nt, Artificial Sequence
  Description of Artificial Sequence: Synthetic oligonucleotide
acacggccggcagcucgga

SEQ ID NO: 1557789 - RNA, 19 nt, Artificial Sequence
  Description of Artificial Sequence: Synthetic oligonucleotide
ccaccgcuucggucauggg

SEQ ID NO: 1557790 - RNA, 19 nt, Artificial Sequence
  Description of Artificial Sequence: Synthetic oligonucleotide
cgagggccgugucuccacc

SEQ ID NO: 1557791 - RNA, 19 nt, Artificial Sequence
  Description of Artificial Sequence: Synthetic oligonucleotide
gcaccgaagcgcacggugu

SEQ ID NO: 1557792 - RNA, 19 nt, Artificial Sequence
  Description of Artificial Sequence: Synthetic oligonucleotide
gguuggagcucagccaguu

SEQ ID NO: 1557793 - RNA, 19 nt, Artificial Sequence
  Description of Artificial Sequence: Synthetic oligonucleotide
cgugcccggggcucacgcc

SEQ ID NO: 1557794 - RNA, 19 nt, Artificial Sequence
  Description of Artificial Sequence: Synthetic oligonucleotide
cgaccucgccgcgugcccg

SEQ ID NO: 1557795 - RNA, 19 nt, Artificial Sequence
  Description of Artificial Sequence: Synthetic oligonucleotide
ggggagccgagcagacgga

SEQ ID NO: 1557796 - RNA, 19 nt, Artificial Sequence
  Description of Artificial Sequence: Synthetic oligonucleotide
cccuccggggucacuagcu

SEQ ID NO: 1557797 - RNA, 19 nt, Artificial Sequence
  Description of Artificial Sequence: Synthetic oligonucleotide
gguccacgucucaugcccu

SEQ ID NO: 1557798 - RNA, 19 nt, Artificial Sequence
  Description of Artificial Sequence: Synthetic oligonucleotide
ccaccacaacaggccuggg

SEQ ID NO: 1557799 - RNA, 19 nt, Artificial Sequence
  Description of Artificial Sequence: Synthetic oligonucleotide
cagccuccaccgcuucggu

SEQ ID NO: 1557800 - RNA, 19 nt, Artificial Sequence
  Description of Artificial Sequence: Synthetic oligonucleotide
gggucgauccgagggccgu

SEQ ID NO: 1557801 - RNA, 19 nt, Artificial Sequence
  Description of Artificial Sequence: Synthetic oligonucleotide
gcgccaucagcagcucgaa

SEQ ID NO: 1557802 - RNA, 19 nt, Artificial Sequence
  Description of Artificial Sequence: Synthetic oligonucleotide
ggaccuuaguggagaccau

SEQ ID NO: 1557803 - RNA, 19 nt, Artificial Sequence
  Description of Artificial Sequence: Synthetic oligonucleotide
uaggggcgguggggucgau

SEQ ID NO: 1557804 - RNA, 19 nt, Artificial Sequence
  Description of Artificial Sequence: Synthetic oligonucleotide
cgauccgagggccgugucu

SEQ ID NO: 1557805 - RNA, 19 nt, Artificial Sequence
  Description of Artificial Sequence: Synthetic oligonucleotide
ccucggcacccaggagcag

SEQ ID NO: 1557806 - RNA, 19 nt, Artificial Sequence
  Description of Artificial Sequence: Synthetic oligonucleotide
gccgcgugcccggggcuca

SEQ ID NO: 1557807 - RNA, 19 nt, Artificial Sequence
  Description of Artificial Sequence: Synthetic oligonucleotide
gccggacaagcaggaauuu

SEQ ID NO: 1557808 - RNA, 19 nt, Artificial Sequence
  Description of Artificial Sequence: Synthetic oligonucleotide
ccaucaccgugucuuccuu

SEQ ID NO: 1557809 - RNA, 19 nt, Artificial Sequence
  Description of Artificial Sequence: Synthetic oligonucleotide
gcccacacuugaacuccgu

SEQ ID NO: 1557810 - RNA, 19 nt, Artificial Sequence
  Description of Artificial Sequence: Synthetic oligonucleotide
cgcuucggucauggggauc

SEQ ID NO: 1557811 - RNA, 19 nt, Artificial Sequence
  Description of Artificial Sequence: Synthetic oligonucleotide
ggcccgugcuggagucguc

SEQ ID NO: 1557812 - RNA, 19 nt, Artificial Sequence
  Description of Artificial Sequence: Synthetic oligonucleotide
cguccugaucauuccgguu

SEQ ID NO: 1557813 - RNA, 19 nt, Artificial Sequence
  Description of Artificial Sequence: Synthetic oligonucleotide
ccuccggggucacuagcuu

SEQ ID NO: 1557814 - RNA, 19 nt, Artificial Sequence
  Description of Artificial Sequence: Synthetic oligonucleotide
ccuccaccgcuucggucau

SEQ ID NO: 1557815 - RNA, 19 nt, Artificial Sequence
  Description of Artificial Sequence: Synthetic oligonucleotide
ccgcuucggucauggggau

SEQ ID NO: 1557816 - RNA, 19 nt, Artificial Sequence
  Description of Artificial Sequence: Synthetic oligonucleotide
gcccucucagaggcucauu

SEQ ID NO: 1557817 - RNA, 19 nt, Artificial Sequence
  Description of Artificial Sequence: Synthetic oligonucleotide
gcguggcguccugaucauu

SEQ ID NO: 1557818 - RNA, 19 nt, Artificial Sequence
  Description of Artificial Sequence: Synthetic oligonucleotide
acaaauaccaaauacagug

SEQ ID NO: 1557819 - RNA, 19 nt, Artificial Sequence
  Description of Artificial Sequence: Synthetic oligonucleotide
uuuaauaagguuagcacag

SEQ ID NO: 1557820 - RNA, 19 nt, Artificial Sequence
  Description of Artificial Sequence: Synthetic oligonucleotide
aagauuacaauaucuaaug

SEQ ID NO: 1557821 - RNA, 19 nt, Artificial Sequence
  Description of Artificial Sequence: Synthetic oligonucleotide
ucuguaacgaccuucuucg

SEQ ID NO: 1557822 - RNA, 19 nt, Artificial Sequence
  Description of Artificial Sequence: Synthetic oligonucleotide
aaaauggacauuaggagac

SEQ ID NO: 1557823 - RNA, 19 nt, Artificial Sequence
  Description of Artificial Sequence: Synthetic oligonucleotide
auucaguauagccucaacc

SEQ ID NO: 1557824 - RNA, 19 nt, Artificial Sequence
  Description of Artificial Sequence: Synthetic oligonucleotide
aagaugagggcuaaaaugg

SEQ ID NO: 1557825 - RNA, 19 nt, Artificial Sequence
  Description of Artificial Sequence: Synthetic oligonucleotide
aaaggagauacccucugcg

SEQ ID NO: 1557826 - RNA, 19 nt, Artificial Sequence
  Description of Artificial Sequence: Synthetic oligonucleotide
acaaagguaagacaaaaca

SEQ ID NO: 1557827 - RNA, 19 nt, Artificial Sequence
  Description of Artificial Sequence: Synthetic oligonucleotide
agauuacaauaucuaaugc

SEQ ID NO: 1557828 - RNA, 19 nt, Artificial Sequence
  Description of Artificial Sequence: Synthetic oligonucleotide
accugaauucaguauagcc

SEQ ID NO: 1557829 - RNA, 19 nt, Artificial Sequence
  Description of Artificial Sequence: Synthetic oligonucleotide
ucuuagaggccucugaggc

SEQ ID NO: 1557830 - RNA, 19 nt, Artificial Sequence
  Description of Artificial Sequence: Synthetic oligonucleotide
ugagcauauucacagaugu

SEQ ID NO: 1557831 - RNA, 19 nt, Artificial Sequence
  Description of Artificial Sequence: Synthetic oligonucleotide
gauuacaauaucuaaugca

SEQ ID NO: 1557832 - RNA, 19 nt, Artificial Sequence
  Description of Artificial Sequence: Synthetic oligonucleotide
cuuuccgugguucaaaucc

SEQ ID NO: 1557833 - RNA, 19 nt, Artificial Sequence
  Description of Artificial Sequence: Synthetic oligonucleotide
uuugauuucaggacucugc

SEQ ID NO: 1557834 - RNA, 19 nt, Artificial Sequence
  Description of Artificial Sequence: Synthetic oligonucleotide
gaagcgaucgcuuucggcc

SEQ ID NO: 1557835 - RNA, 19 nt, Artificial Sequence
  Description of Artificial Sequence: Synthetic oligonucleotide
uucaguauagccucaaccu

SEQ ID NO: 1557836 - RNA, 19 nt, Artificial Sequence
  Description of Artificial Sequence: Synthetic oligonucleotide
gaucacaaauaccaaauac

SEQ ID NO: 1557837 - RNA, 19 nt, Artificial Sequence
  Description of Artificial Sequence: Synthetic oligonucleotide
auuaggagacuuuucuugg

SEQ ID NO: 1557838 - RNA, 19 nt, Artificial Sequence
  Description of Artificial Sequence: Synthetic oligonucleotide
uuaacaauuagcacugauc

SEQ ID NO: 1557839 - RNA, 19 nt, Artificial Sequence
  Description of Artificial Sequence: Synthetic oligonucleotide
uucggaucuccaaagaugc

SEQ ID NO: 1557840 - RNA, 19 nt, Artificial Sequence
  Description of Artificial Sequence: Synthetic oligonucleotide
uguaucuugcgauuguugc

SEQ ID NO: 1557841 - RNA, 19 nt, Artificial Sequence
  Description of Artificial Sequence: Synthetic oligonucleotide
aauaccaaauacagugccc

SEQ ID NO: 1557842 - RNA, 19 nt, Artificial Sequence
  Description of Artificial Sequence: Synthetic oligonucleotide
aguggaauaaccccuagca

SEQ ID NO: 1557843 - RNA, 19 nt, Artificial Sequence
  Description of Artificial Sequence: Synthetic oligonucleotide
cucaaguccauauuuaaac

SEQ ID NO: 1557844 - RNA, 19 nt, Artificial Sequence
  Description of Artificial Sequence: Synthetic oligonucleotide
uuauaaaggagauacccuc

SEQ ID NO: 1557845 - RNA, 19 nt, Artificial Sequence
  Description of Artificial Sequence: Synthetic oligonucleotide
cucaguuuaacaauuagca

SEQ ID NO: 1557846 - RNA, 19 nt, Artificial Sequence
  Description of Artificial Sequence: Synthetic oligonucleotide
auaagguuagcacagcugu

SEQ ID NO: 1557847 - RNA, 19 nt, Artificial Sequence
  Description of Artificial Sequence: Synthetic oligonucleotide
uacaauaucuaaugcaaac

SEQ ID NO: 1557848 - RNA, 19 nt, Artificial Sequence
  Description of Artificial Sequence: Synthetic oligonucleotide
uuuuaugcuacuugcgcag

SEQ ID NO: 1557849 - RNA, 19 nt, Artificial Sequence
  Description of Artificial Sequence: Synthetic oligonucleotide
ucuauggaguggaauaacc

SEQ ID NO: 1557850 - RNA, 19 nt, Artificial Sequence
  Description of Artificial Sequence: Synthetic oligonucleotide
uggcuuauaaaggagauac

SEQ ID NO: 1557851 - RNA, 19 nt, Artificial Sequence
  Description of Artificial Sequence: Synthetic oligonucleotide
uugugauucuuaaucaaca

SEQ ID NO: 1557852 - RNA, 19 nt, Artificial Sequence
  Description of Artificial Sequence: Synthetic oligonucleotide
ugugauucuuaaucaacag

SEQ ID NO: 1557853 - RNA, 19 nt, Artificial Sequence
  Description of Artificial Sequence: Synthetic oligonucleotide
aauucaguauagccucaac

SEQ ID NO: 1557854 - RNA, 19 nt, Artificial Sequence
  Description of Artificial Sequence: Synthetic oligonucleotide
caauaucuaaugcaaacac

SEQ ID NO: 1557855 - RNA, 19 nt, Artificial Sequence
  Description of Artificial Sequence: Synthetic oligonucleotide
acauccuacaacaugacag

SEQ ID NO: 1557856 - RNA, 19 nt, Artificial Sequence
  Description of Artificial Sequence: Synthetic oligonucleotide
aucgguuccgaacucuugc

SEQ ID NO: 1557857 - RNA, 19 nt, Artificial Sequence
  Description of Artificial Sequence: Synthetic oligonucleotide
auuguugcgauucuccucu

SEQ ID NO: 1557858 - RNA, 19 nt, Artificial Sequence
  Description of Artificial Sequence: Synthetic oligonucleotide
uugauuucaggacucugcc

SEQ ID NO: 1557859 - RNA, 19 nt, Artificial Sequence
  Description of Artificial Sequence: Synthetic oligonucleotide
cauuaggagacuuuucuug

SEQ ID NO: 1557860 - RNA, 19 nt, Artificial Sequence
  Description of Artificial Sequence: Synthetic oligonucleotide
ugcacuagggcagugcucg

SEQ ID NO: 1557861 - RNA, 19 nt, Artificial Sequence
  Description of Artificial Sequence: Synthetic oligonucleotide
cugaauucaguauagccuc

SEQ ID NO: 1557862 - RNA, 19 nt, Artificial Sequence
  Description of Artificial Sequence: Synthetic oligonucleotide
uacaacaugacagaagguc

SEQ ID NO: 1557863 - RNA, 19 nt, Artificial Sequence
  Description of Artificial Sequence: Synthetic oligonucleotide
aacugcuccggguaauggg

SEQ ID NO: 1557864 - RNA, 19 nt, Artificial Sequence
  Description of Artificial Sequence: Synthetic oligonucleotide
uauaaaggagauacccucu

SEQ ID NO: 1557865 - RNA, 19 nt, Artificial Sequence
  Description of Artificial Sequence: Synthetic oligonucleotide
auugugauucuuaaucaac

SEQ ID NO: 1557866 - RNA, 19 nt, Artificial Sequence
  Description of Artificial Sequence: Synthetic oligonucleotide
cuauggaguggaauaaccc

SEQ ID NO: 1557867 - RNA, 19 nt, Artificial Sequence
  Description of Artificial Sequence: Synthetic oligonucleotide
auuacaauaucuaaugcaa

SEQ ID NO: 1557868 - RNA, 19 nt, Artificial Sequence
  Description of Artificial Sequence: Synthetic oligonucleotide
ucuuaaucaacaguguuau

SEQ ID NO: 1557869 - RNA, 19 nt, Artificial Sequence
  Description of Artificial Sequence: Synthetic oligonucleotide
aauaucuaaugcaaacacu

SEQ ID NO: 1557870 - RNA, 19 nt, Artificial Sequence
  Description of Artificial Sequence: Synthetic oligonucleotide
ucuucuguaacgaccuucu

SEQ ID NO: 1557871 - RNA, 19 nt, Artificial Sequence
  Description of Artificial Sequence: Synthetic oligonucleotide
ugcgcagugagcauauuca

SEQ ID NO: 1557872 - RNA, 19 nt, Artificial Sequence
  Description of Artificial Sequence: Synthetic oligonucleotide
aauaagguuagcacagcug

SEQ ID NO: 1557873 - RNA, 19 nt, Artificial Sequence
  Description of Artificial Sequence: Synthetic oligonucleotide
accccuagcaccugaauuc

SEQ ID NO: 1557874 - RNA, 19 nt, Artificial Sequence
  Description of Artificial Sequence: Synthetic oligonucleotide
ucuucucaaguccauauuu

SEQ ID NO: 1557875 - RNA, 19 nt, Artificial Sequence
  Description of Artificial Sequence: Synthetic oligonucleotide
cagacuugcgcaaacaguc

SEQ ID NO: 1557876 - RNA, 19 nt, Artificial Sequence
  Description of Artificial Sequence: Synthetic oligonucleotide
ugggcuuuugcacuagggc

SEQ ID NO: 1557877 - RNA, 19 nt, Artificial Sequence
  Description of Artificial Sequence: Synthetic oligonucleotide
aucacaaauaccaaauaca

SEQ ID NO: 1557878 - RNA, 19 nt, Artificial Sequence
  Description of Artificial Sequence: Synthetic oligonucleotide
aauccuguacauccuacaa

SEQ ID NO: 1557879 - RNA, 19 nt, Artificial Sequence
  Description of Artificial Sequence: Synthetic oligonucleotide
uguacuggguauuccaaac

SEQ ID NO: 1557880 - RNA, 19 nt, Artificial Sequence
  Description of Artificial Sequence: Synthetic oligonucleotide
cugccaagcgcucaaagcc

SEQ ID NO: 1557881 - RNA, 19 nt, Artificial Sequence
  Description of Artificial Sequence: Synthetic oligonucleotide
cuuuccacuccuaaggguc

SEQ ID NO: 1557882 - RNA, 19 nt, Artificial Sequence
  Description of Artificial Sequence: Synthetic oligonucleotide
gacaaaacaagucuguuau

SEQ ID NO: 1557883 - RNA, 19 nt, Artificial Sequence
  Description of Artificial Sequence: Synthetic oligonucleotide
gucauaguuacauggccag

SEQ ID NO: 1557884 - RNA, 19 nt, Artificial Sequence
  Description of Artificial Sequence: Synthetic oligonucleotide
guaucuugcgauuguugcg

SEQ ID NO: 1557885 - RNA, 19 nt, Artificial Sequence
  Description of Artificial Sequence: Synthetic oligonucleotide
uguaacgaccuucuucgga

SEQ ID NO: 1557886 - RNA, 19 nt, Artificial Sequence
  Description of Artificial Sequence: Synthetic oligonucleotide
aaggaagcgaucgcuuucg

SEQ ID NO: 1557887 - RNA, 19 nt, Artificial Sequence
  Description of Artificial Sequence: Synthetic oligonucleotide
cuaucuaaggcagggacag

SEQ ID NO: 1557888 - RNA, 19 nt, Artificial Sequence
  Description of Artificial Sequence: Synthetic oligonucleotide
aaggcuaucugcagcgucg

SEQ ID NO: 1557889 - RNA, 19 nt, Artificial Sequence
  Description of Artificial Sequence: Synthetic oligonucleotide
uuccacgugugcucgaggg

SEQ ID NO: 1557890 - RNA, 19 nt, Artificial Sequence
  Description of Artificial Sequence: Synthetic oligonucleotide
uuacaagacaucagacaca

SEQ ID NO: 1557891 - RNA, 19 nt, Artificial Sequence
  Description of Artificial Sequence: Synthetic oligonucleotide
uuagcacugaucacaaaua

SEQ ID NO: 1557892 - RNA, 19 nt, Artificial Sequence
  Description of Artificial Sequence: Synthetic oligonucleotide
uuugcacuagggcagugcu

SEQ ID NO: 1557893 - RNA, 19 nt, Artificial Sequence
  Description of Artificial Sequence: Synthetic oligonucleotide
ucuguuauuuucccucacu

SEQ ID NO: 1557894 - RNA, 19 nt, Artificial Sequence
  Description of Artificial Sequence: Synthetic oligonucleotide
auaaaggagauacccucug

SEQ ID NO: 1557895 - RNA, 19 nt, Artificial Sequence
  Description of Artificial Sequence: Synthetic oligonucleotide
uaaaggagauacccucugc

SEQ ID NO: 1557896 - RNA, 19 nt, Artificial Sequence
  Description of Artificial Sequence: Synthetic oligonucleotide
auaucuaaugcaaacacua

SEQ ID NO: 1557897 - RNA, 19 nt, Artificial Sequence
  Description of Artificial Sequence: Synthetic oligonucleotide
gcuuauaaaggagauaccc

SEQ ID NO: 1557898 - RNA, 19 nt, Artificial Sequence
  Description of Artificial Sequence: Synthetic oligonucleotide
agcgucgggguacaguggc

SEQ ID NO: 1557899 - RNA, 19 nt, Artificial Sequence
  Description of Artificial Sequence: Synthetic oligonucleotide
aauaaccccuagcaccuga

SEQ ID NO: 1557900 - RNA, 19 nt, Artificial Sequence
  Description of Artificial Sequence: Synthetic oligonucleotide
ucaguauagccucaaccuc

SEQ ID NO: 1557901 - RNA, 19 nt, Artificial Sequence
  Description of Artificial Sequence: Synthetic oligonucleotide
uacaagacaucagacacaa

SEQ ID NO: 1557902 - RNA, 19 nt, Artificial Sequence
  Description of Artificial Sequence: Synthetic oligonucleotide
agcacugaucacaaauacc

SEQ ID NO: 1557903 - RNA, 19 nt, Artificial Sequence
  Description of Artificial Sequence: Synthetic oligonucleotide
ugggaucuaucuauggagu

SEQ ID NO: 1557904 - RNA, 19 nt, Artificial Sequence
  Description of Artificial Sequence: Synthetic oligonucleotide
gcuaaaauggacauuagga

SEQ ID NO: 1557905 - RNA, 19 nt, Artificial Sequence
  Description of Artificial Sequence: Synthetic oligonucleotide
ugcgaacaaacucuucugu

SEQ ID NO: 1557906 - RNA, 19 nt, Artificial Sequence
  Description of Artificial Sequence: Synthetic oligonucleotide
ucuuccguccccuaggcau

SEQ ID NO: 1557907 - RNA, 19 nt, Artificial Sequence
  Description of Artificial Sequence: Synthetic oligonucleotide
uaucuugcgauuguugcga

SEQ ID NO: 1557908 - RNA, 19 nt, Artificial Sequence
  Description of Artificial Sequence: Synthetic oligonucleotide
gacauuaggagacuuuucu

SEQ ID NO: 1557909 - RNA, 19 nt, Artificial Sequence
  Description of Artificial Sequence: Synthetic oligonucleotide
uucucaaguccauauuuaa

SEQ ID NO: 1557910 - RNA, 19 nt, Artificial Sequence
  Description of Artificial Sequence: Synthetic oligonucleotide
uacauccuacaacaugaca

SEQ ID NO: 1557911 - RNA, 19 nt, Artificial Sequence
  Description of Artificial Sequence: Synthetic oligonucleotide
ucuuuguagcaaggaagcg

SEQ ID NO: 1557912 - RNA, 19 nt, Artificial Sequence
  Description of Artificial Sequence: Synthetic oligonucleotide
gucuuuguagcaaggaagc

SEQ ID NO: 1557913 - RNA, 19 nt, Artificial Sequence
  Description of Artificial Sequence: Synthetic oligonucleotide
ucgcuuucggccacaaagc

SEQ ID NO: 1557914 - RNA, 19 nt, Artificial Sequence
  Description of Artificial Sequence: Synthetic oligonucleotide
ggcuaaaauggacauuagg

SEQ ID NO: 1557915 - RNA, 19 nt, Artificial Sequence
  Description of Artificial Sequence: Synthetic oligonucleotide
uguuguagcaaaugucaau

SEQ ID NO: 1557916 - RNA, 19 nt, Artificial Sequence
  Description of Artificial Sequence: Synthetic oligonucleotide
cuucuucggaucuccaaag

SEQ ID NO: 1557917 - RNA, 19 nt, Artificial Sequence
  Description of Artificial Sequence: Synthetic oligonucleotide
cuugcgauuguugcgauuc

SEQ ID NO: 1557918 - RNA, 19 nt, Artificial Sequence
  Description of Artificial Sequence: Synthetic oligonucleotide
acccucugcgaacaaacuc

SEQ ID NO: 1557919 - RNA, 19 nt, Artificial Sequence
  Description of Artificial Sequence: Synthetic oligonucleotide
agccuuugcguuucggcgg

SEQ ID NO: 1557920 - RNA, 19 nt, Artificial Sequence
  Description of Artificial Sequence: Synthetic oligonucleotide
auacccucugcgaacaaac

SEQ ID NO: 1557921 - RNA, 19 nt, Artificial Sequence
  Description of Artificial Sequence: Synthetic oligonucleotide
ugaucacaaauaccaaaua

SEQ ID NO: 1557922 - RNA, 19 nt, Artificial Sequence
  Description of Artificial Sequence: Synthetic oligonucleotide
uuguagcaaaugucaauga

SEQ ID NO: 1557923 - RNA, 19 nt, Artificial Sequence
  Description of Artificial Sequence: Synthetic oligonucleotide
cucgggaccacagaagccg

SEQ ID NO: 1557924 - RNA, 19 nt, Artificial Sequence
  Description of Artificial Sequence: Synthetic oligonucleotide
aacgaccuucuucggaucu

SEQ ID NO: 1557925 - RNA, 19 nt, Artificial Sequence
  Description of Artificial Sequence: Synthetic oligonucleotide
cccagucauaguuacaugg

SEQ ID NO: 1557926 - RNA, 19 nt, Artificial Sequence
  Description of Artificial Sequence: Synthetic oligonucleotide
guacaguggcuaucuaagg

SEQ ID NO: 1557927 - RNA, 19 nt, Artificial Sequence
  Description of Artificial Sequence: Synthetic oligonucleotide
uuaugcuacuugcgcagug

SEQ ID NO: 1557928 - RNA, 19 nt, Artificial Sequence
  Description of Artificial Sequence: Synthetic oligonucleotide
gacuugcgcaaacagucgc

SEQ ID NO: 1557929 - RNA, 19 nt, Artificial Sequence
  Description of Artificial Sequence: Synthetic oligonucleotide
aaacugcuccggguaaugg

SEQ ID NO: 1557930 - RNA, 19 nt, Artificial Sequence
  Description of Artificial Sequence: Synthetic oligonucleotide
ugaauucaguauagccuca

SEQ ID NO: 1557931 - RNA, 19 nt, Artificial Sequence
  Description of Artificial Sequence: Synthetic oligonucleotide
agacaaaacaagucuguua

SEQ ID NO: 1557932 - RNA, 19 nt, Artificial Sequence
  Description of Artificial Sequence: Synthetic oligonucleotide
gauuguugcgauucuccuc

SEQ ID NO: 1557933 - RNA, 19 nt, Artificial Sequence
  Description of Artificial Sequence: Synthetic oligonucleotide
aaccccuagcaccugaauu

SEQ ID NO: 1557934 - RNA, 19 nt, Artificial Sequence
  Description of Artificial Sequence: Synthetic oligonucleotide
aucuacugcacagaguacu

SEQ ID NO: 1557935 - RNA, 19 nt, Artificial Sequence
  Description of Artificial Sequence: Synthetic oligonucleotide
uacuggguauuccaaacuu

SEQ ID NO: 1557936 - RNA, 19 nt, Artificial Sequence
  Description of Artificial Sequence: Synthetic oligonucleotide
acuaugcuuuuauuuuaug

SEQ ID NO: 1557937 - RNA, 19 nt, Artificial Sequence
  Description of Artificial Sequence: Synthetic oligonucleotide
acuagggcagugcucgaag

SEQ ID NO: 1557938 - RNA, 19 nt, Artificial Sequence
  Description of Artificial Sequence: Synthetic oligonucleotide
cagucuucgggugugcucg

SEQ ID NO: 1557939 - RNA, 19 nt, Artificial Sequence
  Description of Artificial Sequence: Synthetic oligonucleotide
aucuauggaguggaauaac

SEQ ID NO: 1557940 - RNA, 19 nt, Artificial Sequence
  Description of Artificial Sequence: Synthetic oligonucleotide
agggcuaaaauggacauua

SEQ ID NO: 1557941 - RNA, 19 nt, Artificial Sequence
  Description of Artificial Sequence: Synthetic oligonucleotide
aaaacugcuccggguaaug

SEQ ID NO: 1557942 - RNA, 19 nt, Artificial Sequence
  Description of Artificial Sequence: Synthetic oligonucleotide
caggacucugccuaucuac

SEQ ID NO: 1557943 - RNA, 19 nt, Artificial Sequence
  Description of Artificial Sequence: Synthetic oligonucleotide
ggggcacuggcuuauaaag

SEQ ID NO: 1557944 - RNA, 19 nt, Artificial Sequence
  Description of Artificial Sequence: Synthetic oligonucleotide
aacucguacuccaccggac

SEQ ID NO: 1557945 - RNA, 19 nt, Artificial Sequence
  Description of Artificial Sequence: Synthetic oligonucleotide
gaguggaauaaccccuagc

SEQ ID NO: 1557946 - RNA, 19 nt, Artificial Sequence
  Description of Artificial Sequence: Synthetic oligonucleotide
ugcgcaaacagucgccgac

SEQ ID NO: 1557947 - RNA, 19 nt, Artificial Sequence
  Description of Artificial Sequence: Synthetic oligonucleotide
uuaggagacuuuucuuggu

SEQ ID NO: 1557948 - RNA, 19 nt, Artificial Sequence
  Description of Artificial Sequence: Synthetic oligonucleotide
uaucuauggaguggaauaa

SEQ ID NO: 1557949 - RNA, 19 nt, Artificial Sequence
  Description of Artificial Sequence: Synthetic oligonucleotide
gaucuaucuauggagugga

SEQ ID NO: 1557950 - RNA, 19 nt, Artificial Sequence
  Description of Artificial Sequence: Synthetic oligonucleotide
ucgauuccacgugugcucg

SEQ ID NO: 1557951 - RNA, 19 nt, Artificial Sequence
  Description of Artificial Sequence: Synthetic oligonucleotide
ugcaugacuuucagcuugc

SEQ ID NO: 1557952 - RNA, 19 nt, Artificial Sequence
  Description of Artificial Sequence: Synthetic oligonucleotide
uugcgauucuccucugcag

SEQ ID NO: 1557953 - RNA, 19 nt, Artificial Sequence
  Description of Artificial Sequence: Synthetic oligonucleotide
caaacucuucuguaacgac

SEQ ID NO: 1557954 - RNA, 19 nt, Artificial Sequence
  Description of Artificial Sequence: Synthetic oligonucleotide
uucuucggaucuccaaaga

SEQ ID NO: 1557955 - RNA, 19 nt, Artificial Sequence
  Description of Artificial Sequence: Synthetic oligonucleotide
acagucgccgaccgcacuc

SEQ ID NO: 1557956 - RNA, 19 nt, Artificial Sequence
  Description of Artificial Sequence: Synthetic oligonucleotide
aagcgaucgcuuucggcca

SEQ ID NO: 1557957 - RNA, 19 nt, Artificial Sequence
  Description of Artificial Sequence: Synthetic oligonucleotide
cuaaggcagggacagccgc

SEQ ID NO: 1557958 - RNA, 19 nt, Artificial Sequence
  Description of Artificial Sequence: Synthetic oligonucleotide
ugauuucaggacucugccu

SEQ ID NO: 1557959 - RNA, 19 nt, Artificial Sequence
  Description of Artificial Sequence: Synthetic oligonucleotide
acuugcgcaaacagucgcc

SEQ ID NO: 1557960 - RNA, 19 nt, Artificial Sequence
  Description of Artificial Sequence: Synthetic oligonucleotide
uuuccacuccuaagggucu

SEQ ID NO: 1557961 - RNA, 19 nt, Artificial Sequence
  Description of Artificial Sequence: Synthetic oligonucleotide
uugcgcagugagcauauuc

SEQ ID NO: 1557962 - RNA, 19 nt, Artificial Sequence
  Description of Artificial Sequence: Synthetic oligonucleotide
cuuauaaaggagauacccu

SEQ ID NO: 1557963 - RNA, 19 nt, Artificial Sequence
  Description of Artificial Sequence: Synthetic oligonucleotide
ggaucuaucuauggagugg

SEQ ID NO: 1557964 - RNA, 19 nt, Artificial Sequence
  Description of Artificial Sequence: Synthetic oligonucleotide
caagauuacaauaucuaau

SEQ ID NO: 1557965 - RNA, 19 nt, Artificial Sequence
  Description of Artificial Sequence: Synthetic oligonucleotide
ugcucgauuccacgugugc

SEQ ID NO: 1557966 - RNA, 19 nt, Artificial Sequence
  Description of Artificial Sequence: Synthetic oligonucleotide
ucugucugggaucuaucua

SEQ ID NO: 1557967 - RNA, 19 nt, Artificial Sequence
  Description of Artificial Sequence: Synthetic oligonucleotide
cuugcgcaaacagucgccg

SEQ ID NO: 1557968 - RNA, 19 nt, Artificial Sequence
  Description of Artificial Sequence: Synthetic oligonucleotide
uguugcgauucuccucugc

SEQ ID NO: 1557969 - RNA, 19 nt, Artificial Sequence
  Description of Artificial Sequence: Synthetic oligonucleotide
agugcucgaagccucugca

SEQ ID NO: 1557970 - RNA, 19 nt, Artificial Sequence
  Description of Artificial Sequence: Synthetic oligonucleotide
uaugcuacuugcgcaguga

SEQ ID NO: 1557971 - RNA, 19 nt, Artificial Sequence
  Description of Artificial Sequence: Synthetic oligonucleotide
cuuuguagcaaggaagcga

SEQ ID NO: 1557972 - RNA, 19 nt, Artificial Sequence
  Description of Artificial Sequence: Synthetic oligonucleotide
guagcaaggaagcgaucgc

SEQ ID NO: 1557973 - RNA, 19 nt, Artificial Sequence
  Description of Artificial Sequence: Synthetic oligonucleotide
guggaauaaccccuagcac

SEQ ID NO: 1557974 - RNA, 19 nt, Artificial Sequence
  Description of Artificial Sequence: Synthetic oligonucleotide
cauccuacaacaugacaga

SEQ ID NO: 1557975 - RNA, 19 nt, Artificial Sequence
  Description of Artificial Sequence: Synthetic oligonucleotide
gugguucaaauccuguaca

SEQ ID NO: 1557976 - RNA, 19 nt, Artificial Sequence
  Description of Artificial Sequence: Synthetic oligonucleotide
cuuucggccacaaagcacu

SEQ ID NO: 1557977 - RNA, 19 nt, Artificial Sequence
  Description of Artificial Sequence: Synthetic oligonucleotide
cacuauuucucaguuuaac

SEQ ID NO: 1557978 - RNA, 19 nt, Artificial Sequence
  Description of Artificial Sequence: Synthetic oligonucleotide
uaguggaggccuucuccgg

SEQ ID NO: 1557979 - RNA, 19 nt, Artificial Sequence
  Description of Artificial Sequence: Synthetic oligonucleotide
ugcuacuugcgcagugagc

SEQ ID NO: 1557980 - RNA, 19 nt, Artificial Sequence
  Description of Artificial Sequence: Synthetic oligonucleotide
ucccucacucacauuguac

SEQ ID NO: 1557981 - RNA, 19 nt, Artificial Sequence
  Description of Artificial Sequence: Synthetic oligonucleotide
cugcgaacaaacucuucug

SEQ ID NO: 1557982 - RNA, 19 nt, Artificial Sequence
  Description of Artificial Sequence: Synthetic oligonucleotide
ucuacugcacagaguacuu

SEQ ID NO: 1557983 - RNA, 19 nt, Artificial Sequence
  Description of Artificial Sequence: Synthetic oligonucleotide
cuuuggagcaucgguuccg

SEQ ID NO: 1557984 - RNA, 19 nt, Artificial Sequence
  Description of Artificial Sequence: Synthetic oligonucleotide
augcuacuugcgcagugag

SEQ ID NO: 1557985 - RNA, 19 nt, Artificial Sequence
  Description of Artificial Sequence: Synthetic oligonucleotide
ucgguuccgaacucuugcc

SEQ ID NO: 1557986 - RNA, 19 nt, Artificial Sequence
  Description of Artificial Sequence: Synthetic oligonucleotide
ugaggccuguaucuugcga

SEQ ID NO: 1557987 - RNA, 19 nt, Artificial Sequence
  Description of Artificial Sequence: Synthetic oligonucleotide
augagggcuaaaauggaca

SEQ ID NO: 1557988 - RNA, 19 nt, Artificial Sequence
  Description of Artificial Sequence: Synthetic oligonucleotide
acugcacagaguacuuugg

SEQ ID NO: 1557989 - RNA, 19 nt, Artificial Sequence
  Description of Artificial Sequence: Synthetic oligonucleotide
cucgauuccacgugugcuc

SEQ ID NO: 1557990 - RNA, 19 nt, Artificial Sequence
  Description of Artificial Sequence: Synthetic oligonucleotide
aacgccaguggagucuuug

SEQ ID NO: 1557991 - RNA, 19 nt, Artificial Sequence
  Description of Artificial Sequence: Synthetic oligonucleotide
uucgggugugcucgggacc

SEQ ID NO: 1557992 - RNA, 19 nt, Artificial Sequence
  Description of Artificial Sequence: Synthetic oligonucleotide
gcuguuguagcaaauguca

SEQ ID NO: 1557993 - RNA, 19 nt, Artificial Sequence
  Description of Artificial Sequence: Synthetic oligonucleotide
aauggacauuaggagacuu

SEQ ID NO: 1557994 - RNA, 19 nt, Artificial Sequence
  Description of Artificial Sequence: Synthetic oligonucleotide
caaacagucgccgaccgca

SEQ ID NO: 1557995 - RNA, 19 nt, Artificial Sequence
  Description of Artificial Sequence: Synthetic oligonucleotide
aaacagucgccgaccgcac

SEQ ID NO: 1557996 - RNA, 19 nt, Artificial Sequence
  Description of Artificial Sequence: Synthetic oligonucleotide
acucguacuccaccggacu

SEQ ID NO: 1557997 - RNA, 19 nt, Artificial Sequence
  Description of Artificial Sequence: Synthetic oligonucleotide
gcuacuugcgcagugagca

SEQ ID NO: 1557998 - RNA, 19 nt, Artificial Sequence
  Description of Artificial Sequence: Synthetic oligonucleotide
aucugcagcgucgggguac

SEQ ID NO: 1557999 - RNA, 19 nt, Artificial Sequence
  Description of Artificial Sequence: Synthetic oligonucleotide
ucuucgggugugcucggga

SEQ ID NO: 1558000 - RNA, 19 nt, Artificial Sequence
  Description of Artificial Sequence: Synthetic oligonucleotide
auuccacgugugcucgagg

SEQ ID NO: 1558001 - RNA, 19 nt, Artificial Sequence
  Description of Artificial Sequence: Synthetic oligonucleotide
gauuccacgugugcucgag

SEQ ID NO: 1558002 - RNA, 19 nt, Artificial Sequence
  Description of Artificial Sequence: Synthetic oligonucleotide
uccacgugugcucgagggc

SEQ ID NO: 1558003 - RNA, 19 nt, Artificial Sequence
  Description of Artificial Sequence: Synthetic oligonucleotide
agcuugcucgauuccacgu

SEQ ID NO: 1558004 - RNA, 19 nt, Artificial Sequence
  Description of Artificial Sequence: Synthetic oligonucleotide
agaagccgccauugggguc

SEQ ID NO: 1558005 - RNA, 19 nt, Artificial Sequence
  Description of Artificial Sequence: Synthetic oligonucleotide
uagcaaggaagcgaucgcu

SEQ ID NO: 1558006 - RNA, 19 nt, Artificial Sequence
  Description of Artificial Sequence: Synthetic oligonucleotide
cacuggcuuauaaaggaga

SEQ ID NO: 1558007 - RNA, 19 nt, Artificial Sequence
  Description of Artificial Sequence: Synthetic oligonucleotide
ucuccggagugcuuguguc

SEQ ID NO: 1558008 - RNA, 19 nt, Artificial Sequence
  Description of Artificial Sequence: Synthetic oligonucleotide
ggguaaugggcuuuugcac

SEQ ID NO: 1558009 - RNA, 19 nt, Artificial Sequence
  Description of Artificial Sequence: Synthetic oligonucleotide
uuuaugcuacuugcgcagu

SEQ ID NO: 1558010 - RNA, 19 nt, Artificial Sequence
  Description of Artificial Sequence: Synthetic oligonucleotide
uggaguggaauaaccccua

SEQ ID NO: 1558011 - RNA, 19 nt, Artificial Sequence
  Description of Artificial Sequence: Synthetic oligonucleotide
uaguuacauggccagucuu

SEQ ID NO: 1558012 - RNA, 19 nt, Artificial Sequence
  Description of Artificial Sequence: Synthetic oligonucleotide
gugagcauauucacagaug

SEQ ID NO: 1558013 - RNA, 19 nt, Artificial Sequence
  Description of Artificial Sequence: Synthetic oligonucleotide
uaagguuagcacagcuguu

SEQ ID NO: 1558014 - RNA, 19 nt, Artificial Sequence
  Description of Artificial Sequence: Synthetic oligonucleotide
cagcuugcucgauuccacg

SEQ ID NO: 1558015 - RNA, 19 nt, Artificial Sequence
  Description of Artificial Sequence: Synthetic oligonucleotide
uagcaccugaauucaguau

SEQ ID NO: 1558016 - RNA, 19 nt, Artificial Sequence
  Description of Artificial Sequence: Synthetic oligonucleotide
ucguacuccaccggacugc

SEQ ID NO: 1558017 - RNA, 19 nt, Artificial Sequence
  Description of Artificial Sequence: Synthetic oligonucleotide
uugcguuucggcggcgccg

SEQ ID NO: 1558018 - RNA, 19 nt, Artificial Sequence
  Description of Artificial Sequence: Synthetic oligonucleotide
aguauagccucaaccucug

SEQ ID NO: 1558019 - RNA, 19 nt, Artificial Sequence
  Description of Artificial Sequence: Synthetic oligonucleotide
guaacgaccuucuucggau

SEQ ID NO: 1558020 - RNA, 19 nt, Artificial Sequence
  Description of Artificial Sequence: Synthetic oligonucleotide
caagcagacuugcgcaaac

SEQ ID NO: 1558021 - RNA, 19 nt, Artificial Sequence
  Description of Artificial Sequence: Synthetic oligonucleotide
gggaucuaucuauggagug

SEQ ID NO: 1558022 - RNA, 19 nt, Artificial Sequence
  Description of Artificial Sequence: Synthetic oligonucleotide
ggagauacccucugcgaac

SEQ ID NO: 1558023 - RNA, 19 nt, Artificial Sequence
  Description of Artificial Sequence: Synthetic oligonucleotide
gcagcgucgggguacagug

SEQ ID NO: 1558024 - RNA, 19 nt, Artificial Sequence
  Description of Artificial Sequence: Synthetic oligonucleotide
aacagucgccgaccgcacu

SEQ ID NO: 1558025 - RNA, 19 nt, Artificial Sequence
  Description of Artificial Sequence: Synthetic oligonucleotide
cacccuccacauuauuuug

SEQ ID NO: 1558026 - RNA, 19 nt, Artificial Sequence
  Description of Artificial Sequence: Synthetic oligonucleotide
aucagacacaaagguaaga

SEQ ID NO: 1558027 - RNA, 19 nt, Artificial Sequence
  Description of Artificial Sequence: Synthetic oligonucleotide
agcgaucgcuuucggccac

SEQ ID NO: 1558028 - RNA, 19 nt, Artificial Sequence
  Description of Artificial Sequence: Synthetic oligonucleotide
ucccuaacuuccccagcac

SEQ ID NO: 1558029 - RNA, 19 nt, Artificial Sequence
  Description of Artificial Sequence: Synthetic oligonucleotide
cuguaacgaccuucuucgg

SEQ ID NO: 1558030 - RNA, 19 nt, Artificial Sequence
  Description of Artificial Sequence: Synthetic oligonucleotide
gccuaucuacugcacagag

SEQ ID NO: 1558031 - RNA, 19 nt, Artificial Sequence
  Description of Artificial Sequence: Synthetic oligonucleotide
acaaaacaagucuguuauu

SEQ ID NO: 1558032 - RNA, 19 nt, Artificial Sequence
  Description of Artificial Sequence: Synthetic oligonucleotide
ucgggaccacagaagccgc

SEQ ID NO: 1558033 - RNA, 19 nt, Artificial Sequence
  Description of Artificial Sequence: Synthetic oligonucleotide
cucguacuccaccggacug

SEQ ID NO: 1558034 - RNA, 19 nt, Artificial Sequence
  Description of Artificial Sequence: Synthetic oligonucleotide
aggaagcgaucgcuuucgg

SEQ ID NO: 1558035 - RNA, 19 nt, Artificial Sequence
  Description of Artificial Sequence: Synthetic oligonucleotide
gguaaugggcuuuugcacu

SEQ ID NO: 1558036 - RNA, 19 nt, Artificial Sequence
  Description of Artificial Sequence: Synthetic oligonucleotide
cuuccguccccuaggcaug

SEQ ID NO: 1558037 - RNA, 19 nt, Artificial Sequence
  Description of Artificial Sequence: Synthetic oligonucleotide
aguuacauggccagucuuu

SEQ ID NO: 1558038 - RNA, 19 nt, Artificial Sequence
  Description of Artificial Sequence: Synthetic oligonucleotide
auuguacuggguauuccaa

SEQ ID NO: 1558039 - RNA, 19 nt, Artificial Sequence
  Description of Artificial Sequence: Synthetic oligonucleotide
caguauagccucaaccucu

SEQ ID NO: 1558040 - RNA, 19 nt, Artificial Sequence
  Description of Artificial Sequence: Synthetic oligonucleotide
cuagcaccugaauucagua

SEQ ID NO: 1558041 - RNA, 19 nt, Artificial Sequence
  Description of Artificial Sequence: Synthetic oligonucleotide
caucgguuccgaacucuug

SEQ ID NO: 1558042 - RNA, 19 nt, Artificial Sequence
  Description of Artificial Sequence: Synthetic oligonucleotide
gcuguugcccaugaugaag

SEQ ID NO: 1558043 - RNA, 19 nt, Artificial Sequence
  Description of Artificial Sequence: Synthetic oligonucleotide
uccccggcaagcagacuug

SEQ ID NO: 1558044 - RNA, 19 nt, Artificial Sequence
  Description of Artificial Sequence: Synthetic oligonucleotide
ccugccaagcgcucaaagc

SEQ ID NO: 1558045 - RNA, 19 nt, Artificial Sequence
  Description of Artificial Sequence: Synthetic oligonucleotide
uugcgauuguugcgauucu

SEQ ID NO: 1558046 - RNA, 19 nt, Artificial Sequence
  Description of Artificial Sequence: Synthetic oligonucleotide
cacaaauaccaaauacagu

SEQ ID NO: 1558047 - RNA, 19 nt, Artificial Sequence
  Description of Artificial Sequence: Synthetic oligonucleotide
cagugcucgaagccucugc

SEQ ID NO: 1558048 - RNA, 19 nt, Artificial Sequence
  Description of Artificial Sequence: Synthetic oligonucleotide
guuccgaacucuugccaca

SEQ ID NO: 1558049 - RNA, 19 nt, Artificial Sequence
  Description of Artificial Sequence: Synthetic oligonucleotide
guaaugggcuuuugcacua

SEQ ID NO: 1558050 - RNA, 19 nt, Artificial Sequence
  Description of Artificial Sequence: Synthetic oligonucleotide
agucgccgaccgcacucgc

SEQ ID NO: 1558051 - RNA, 19 nt, Artificial Sequence
  Description of Artificial Sequence: Synthetic oligonucleotide
ggggaaggcuaucugcagc

SEQ ID NO: 1558052 - RNA, 19 nt, Artificial Sequence
  Description of Artificial Sequence: Synthetic oligonucleotide
ugccuaucuacugcacaga

SEQ ID NO: 1558053 - RNA, 19 nt, Artificial Sequence
  Description of Artificial Sequence: Synthetic oligonucleotide
ggaagcgaucgcuuucggc

SEQ ID NO: 1558054 - RNA, 19 nt, Artificial Sequence
  Description of Artificial Sequence: Synthetic oligonucleotide
uaacgaccuucuucggauc

SEQ ID NO: 1558055 - RNA, 19 nt, Artificial Sequence
  Description of Artificial Sequence: Synthetic oligonucleotide
uugcacuagggcagugcuc

SEQ ID NO: 1558056 - RNA, 19 nt, Artificial Sequence
  Description of Artificial Sequence: Synthetic oligonucleotide
uugcgcaaacagucgccga

SEQ ID NO: 1558057 - RNA, 19 nt, Artificial Sequence
  Description of Artificial Sequence: Synthetic oligonucleotide
ccaaagaugcugugcugcc

SEQ ID NO: 1558058 - RNA, 19 nt, Artificial Sequence
  Description of Artificial Sequence: Synthetic oligonucleotide
ugcgauuguugcgauucuc

SEQ ID NO: 1558059 - RNA, 19 nt, Artificial Sequence
  Description of Artificial Sequence: Synthetic oligonucleotide
gcgauuguugcgauucucc

SEQ ID NO: 1558060 - RNA, 19 nt, Artificial Sequence
  Description of Artificial Sequence: Synthetic oligonucleotide
ggagcaucgguuccgaacu

SEQ ID NO: 1558061 - RNA, 19 nt, Artificial Sequence
  Description of Artificial Sequence: Synthetic oligonucleotide
ccggcaagcagacuugcgc

SEQ ID NO: 1558062 - RNA, 19 nt, Artificial Sequence
  Description of Artificial Sequence: Synthetic oligonucleotide
caccugaauucaguauagc

SEQ ID NO: 1558063 - RNA, 19 nt, Artificial Sequence
  Description of Artificial Sequence: Synthetic oligonucleotide
cgugguucaaauccuguac

SEQ ID NO: 1558064 - RNA, 19 nt, Artificial Sequence
  Description of Artificial Sequence: Synthetic oligonucleotide
uacuugcgcagugagcaua

SEQ ID NO: 1558065 - RNA, 19 nt, Artificial Sequence
  Description of Artificial Sequence: Synthetic oligonucleotide
cacgugugcucgagggccc

SEQ ID NO: 1558066 - RNA, 19 nt, Artificial Sequence
  Description of Artificial Sequence: Synthetic oligonucleotide
uaucuaaggcagggacagc

SEQ ID NO: 1558067 - RNA, 19 nt, Artificial Sequence
  Description of Artificial Sequence: Synthetic oligonucleotide
uuccguccccuaggcaugg

SEQ ID NO: 1558068 - RNA, 19 nt, Artificial Sequence
  Description of Artificial Sequence: Synthetic oligonucleotide
gcgauucuccucugcagcc

SEQ ID NO: 1558069 - RNA, 19 nt, Artificial Sequence
  Description of Artificial Sequence: Synthetic oligonucleotide
ggaguggaauaaccccuag

SEQ ID NO: 1558070 - RNA, 19 nt, Artificial Sequence
  Description of Artificial Sequence: Synthetic oligonucleotide
guacauccuacaacaugac

SEQ ID NO: 1558071 - RNA, 19 nt, Artificial Sequence
  Description of Artificial Sequence: Synthetic oligonucleotide
acgaccuucuucggaucuc

SEQ ID NO: 1558072 - RNA, 19 nt, Artificial Sequence
  Description of Artificial Sequence: Synthetic oligonucleotide
cuuugcguuucggcggcgc

SEQ ID NO: 1558073 - RNA, 19 nt, Artificial Sequence
  Description of Artificial Sequence: Synthetic oligonucleotide
gcaaacacuauuucucagu

SEQ ID NO: 1558074 - RNA, 19 nt, Artificial Sequence
  Description of Artificial Sequence: Synthetic oligonucleotide
gcaccugaauucaguauag

SEQ ID NO: 1558075 - RNA, 19 nt, Artificial Sequence
  Description of Artificial Sequence: Synthetic oligonucleotide
cuaagggucugucugggau

SEQ ID NO: 1558076 - RNA, 19 nt, Artificial Sequence
  Description of Artificial Sequence: Synthetic oligonucleotide
ggacucugccuaucuacug

SEQ ID NO: 1558077 - RNA, 19 nt, Artificial Sequence
  Description of Artificial Sequence: Synthetic oligonucleotide
agcaucgguuccgaacucu

SEQ ID NO: 1558078 - RNA, 19 nt, Artificial Sequence
  Description of Artificial Sequence: Synthetic oligonucleotide
cugcacagaguacuuugga

SEQ ID NO: 1558079 - RNA, 19 nt, Artificial Sequence
  Description of Artificial Sequence: Synthetic oligonucleotide
auccuacaacaugacagaa

SEQ ID NO: 1558080 - RNA, 19 nt, Artificial Sequence
  Description of Artificial Sequence: Synthetic oligonucleotide
uuccgaacucuugccacaa

SEQ ID NO: 1558081 - RNA, 19 nt, Artificial Sequence
  Description of Artificial Sequence: Synthetic oligonucleotide
guacuggguauuccaaacu

SEQ ID NO: 1558082 - RNA, 19 nt, Artificial Sequence
  Description of Artificial Sequence: Synthetic oligonucleotide
acuggguauuccaaacuuu

SEQ ID NO: 1558083 - RNA, 19 nt, Artificial Sequence
  Description of Artificial Sequence: Synthetic oligonucleotide
gaauaaccccuagcaccug

SEQ ID NO: 1558084 - RNA, 19 nt, Artificial Sequence
  Description of Artificial Sequence: Synthetic oligonucleotide
ugcguuucggcggcgccga

SEQ ID NO: 1558085 - RNA, 19 nt, Artificial Sequence
  Description of Artificial Sequence: Synthetic oligonucleotide
cacugaucacaaauaccaa

SEQ ID NO: 1558086 - RNA, 19 nt, Artificial Sequence
  Description of Artificial Sequence: Synthetic oligonucleotide
ugugcucgagggccccaga

SEQ ID NO: 1558087 - RNA, 19 nt, Artificial Sequence
  Description of Artificial Sequence: Synthetic oligonucleotide
ucugcagcgucgggguaca

SEQ ID NO: 1558088 - RNA, 19 nt, Artificial Sequence
  Description of Artificial Sequence: Synthetic oligonucleotide
cucugcgaacaaacucuuc

SEQ ID NO: 1558089 - RNA, 19 nt, Artificial Sequence
  Description of Artificial Sequence: Synthetic oligonucleotide
uugccacaaaaugcaugac

SEQ ID NO: 1558090 - RNA, 19 nt, Artificial Sequence
  Description of Artificial Sequence: Synthetic oligonucleotide
ggcuuauaaaggagauacc

SEQ ID NO: 1558091 - RNA, 19 nt, Artificial Sequence
  Description of Artificial Sequence: Synthetic oligonucleotide
ugcagcgucgggguacagu

SEQ ID NO: 1558092 - RNA, 19 nt, Artificial Sequence
  Description of Artificial Sequence: Synthetic oligonucleotide
ggguacaguggcuaucuaa

SEQ ID NO: 1558093 - RNA, 19 nt, Artificial Sequence
  Description of Artificial Sequence: Synthetic oligonucleotide
cagcgucgggguacagugg

SEQ ID NO: 1558094 - RNA, 19 nt, Artificial Sequence
  Description of Artificial Sequence: Synthetic oligonucleotide
uccggagugcuugugucuu

SEQ ID NO: 1558095 - RNA, 19 nt, Artificial Sequence
  Description of Artificial Sequence: Synthetic oligonucleotide
ucuugcgauuguugcgauu

SEQ ID NO: 1558096 - RNA, 19 nt, Artificial Sequence
  Description of Artificial Sequence: Synthetic oligonucleotide
cagucuuuggagcaucggu

SEQ ID NO: 1558097 - RNA, 19 nt, Artificial Sequence
  Description of Artificial Sequence: Synthetic oligonucleotide
aucuugcgauuguugcgau

SEQ ID NO: 1558098 - RNA, 19 nt, Artificial Sequence
  Description of Artificial Sequence: Synthetic oligonucleotide
gcuaucuaaggcagggaca

SEQ ID NO: 1558099 - RNA, 19 nt, Artificial Sequence
  Description of Artificial Sequence: Synthetic oligonucleotide
uccgaacucuugccacaaa

SEQ ID NO: 1558100 - RNA, 19 nt, Artificial Sequence
  Description of Artificial Sequence: Synthetic oligonucleotide
acgugugcucgagggcccc

SEQ ID NO: 1558101 - RNA, 19 nt, Artificial Sequence
  Description of Artificial Sequence: Synthetic oligonucleotide
ggcgccgacucuuccgucc

SEQ ID NO: 1558102 - RNA, 19 nt, Artificial Sequence
  Description of Artificial Sequence: Synthetic oligonucleotide
gcacuggcuuauaaaggag

SEQ ID NO: 1558103 - RNA, 19 nt, Artificial Sequence
  Description of Artificial Sequence: Synthetic oligonucleotide
cuugcucgauuccacgugu

SEQ ID NO: 1558104 - RNA, 19 nt, Artificial Sequence
  Description of Artificial Sequence: Synthetic oligonucleotide
uaucugcagcgucggggua

SEQ ID NO: 1558105 - RNA, 19 nt, Artificial Sequence
  Description of Artificial Sequence: Synthetic oligonucleotide
ccggguaaugggcuuuugc

SEQ ID NO: 1558106 - RNA, 19 nt, Artificial Sequence
  Description of Artificial Sequence: Synthetic oligonucleotide
auggacauuaggagacuuu

SEQ ID NO: 1558107 - RNA, 19 nt, Artificial Sequence
  Description of Artificial Sequence: Synthetic oligonucleotide
cagugagcauauucacaga

SEQ ID NO: 1558108 - RNA, 19 nt, Artificial Sequence
  Description of Artificial Sequence: Synthetic oligonucleotide
agcaaggaagcgaucgcuu

SEQ ID NO: 1558109 - RNA, 19 nt, Artificial Sequence
  Description of Artificial Sequence: Synthetic oligonucleotide
agcgccaagcgcgcgagaa

SEQ ID NO: 1558110 - RNA, 19 nt, Artificial Sequence
  Description of Artificial Sequence: Synthetic oligonucleotide
cuuaaucaacaguguuaua

SEQ ID NO: 1558111 - RNA, 19 nt, Artificial Sequence
  Description of Artificial Sequence: Synthetic oligonucleotide
uuggggucuuagaggccuc

SEQ ID NO: 1558112 - RNA, 19 nt, Artificial Sequence
  Description of Artificial Sequence: Synthetic oligonucleotide
acuugcgcagugagcauau

SEQ ID NO: 1558113 - RNA, 19 nt, Artificial Sequence
  Description of Artificial Sequence: Synthetic oligonucleotide
caccggacugcugcggggc

SEQ ID NO: 1558114 - RNA, 19 nt, Artificial Sequence
  Description of Artificial Sequence: Synthetic oligonucleotide
gcgcagugagcauauucac

SEQ ID NO: 1558115 - RNA, 19 nt, Artificial Sequence
  Description of Artificial Sequence: Synthetic oligonucleotide
gggucuuagaggccucuga

SEQ ID NO: 1558116 - RNA, 19 nt, Artificial Sequence
  Description of Artificial Sequence: Synthetic oligonucleotide
auaaccccuagcaccugaa

SEQ ID NO: 1558117 - RNA, 19 nt, Artificial Sequence
  Description of Artificial Sequence: Synthetic oligonucleotide
cuacaacaugacagaaggu

SEQ ID NO: 1558118 - RNA, 19 nt, Artificial Sequence
  Description of Artificial Sequence: Synthetic oligonucleotide
gccuuugcguuucggcggc

SEQ ID NO: 1558119 - RNA, 19 nt, Artificial Sequence
  Description of Artificial Sequence: Synthetic oligonucleotide
agauacccucugcgaacaa

SEQ ID NO: 1558120 - RNA, 19 nt, Artificial Sequence
  Description of Artificial Sequence: Synthetic oligonucleotide
ccuucuucggaucuccaaa

SEQ ID NO: 1558121 - RNA, 19 nt, Artificial Sequence
  Description of Artificial Sequence: Synthetic oligonucleotide
cggguaaugggcuuuugca

SEQ ID NO: 1558122 - RNA, 19 nt, Artificial Sequence
  Description of Artificial Sequence: Synthetic oligonucleotide
uccggguaaugggcuuuug

SEQ ID NO: 1558123 - RNA, 19 nt, Artificial Sequence
  Description of Artificial Sequence: Synthetic oligonucleotide
gucuucgggugugcucggg

SEQ ID NO: 1558124 - RNA, 19 nt, Artificial Sequence
  Description of Artificial Sequence: Synthetic oligonucleotide
ggccuguaucuugcgauug

SEQ ID NO: 1558125 - RNA, 19 nt, Artificial Sequence
  Description of Artificial Sequence: Synthetic oligonucleotide
ggacagccgccgaagcagg

SEQ ID NO: 1558126 - RNA, 19 nt, Artificial Sequence
  Description of Artificial Sequence: Synthetic oligonucleotide
gggcuaaaauggacauuag

SEQ ID NO: 1558127 - RNA, 19 nt, Artificial Sequence
  Description of Artificial Sequence: Synthetic oligonucleotide
uucggcggcgccgacucuu

SEQ ID NO: 1558128 - RNA, 19 nt, Artificial Sequence
  Description of Artificial Sequence: Synthetic oligonucleotide
cagaagccgccauuggggu

SEQ ID NO: 1558129 - RNA, 19 nt, Artificial Sequence
  Description of Artificial Sequence: Synthetic oligonucleotide
cgcaaacagucgccgaccg

SEQ ID NO: 1558130 - RNA, 19 nt, Artificial Sequence
  Description of Artificial Sequence: Synthetic oligonucleotide
cuucuccggagugcuugug

SEQ ID NO: 1558131 - RNA, 19 nt, Artificial Sequence
  Description of Artificial Sequence: Synthetic oligonucleotide
ggcaagcagacuugcgcaa

SEQ ID NO: 1558132 - RNA, 19 nt, Artificial Sequence
  Description of Artificial Sequence: Synthetic oligonucleotide
cuggcuuauaaaggagaua

SEQ ID NO: 1558133 - RNA, 19 nt, Artificial Sequence
  Description of Artificial Sequence: Synthetic oligonucleotide
ccagucuuuggagcaucgg

SEQ ID NO: 1558134 - RNA, 19 nt, Artificial Sequence
  Description of Artificial Sequence: Synthetic oligonucleotide
gugugcucgagggccccag

SEQ ID NO: 1558135 - RNA, 19 nt, Artificial Sequence
  Description of Artificial Sequence: Synthetic oligonucleotide
gugcucgagggccccagaa

SEQ ID NO: 1558136 - RNA, 19 nt, Artificial Sequence
  Description of Artificial Sequence: Synthetic oligonucleotide
uuucggcggcgccgacucu

SEQ ID NO: 1558137 - RNA, 19 nt, Artificial Sequence
  Description of Artificial Sequence: Synthetic oligonucleotide
cacuccuaagggucugucu

SEQ ID NO: 1558138 - RNA, 19 nt, Artificial Sequence
  Description of Artificial Sequence: Synthetic oligonucleotide
ccaagcgcucaaagccugc

SEQ ID NO: 1558139 - RNA, 19 nt, Artificial Sequence
  Description of Artificial Sequence: Synthetic oligonucleotide
ccgaacucuugccacaaaa

SEQ ID NO: 1558140 - RNA, 19 nt, Artificial Sequence
  Description of Artificial Sequence: Synthetic oligonucleotide
ccuaggcauggcuccugcc

SEQ ID NO: 1558141 - RNA, 19 nt, Artificial Sequence
  Description of Artificial Sequence: Synthetic oligonucleotide
aucuaucuauggaguggaa

SEQ ID NO: 1558142 - RNA, 19 nt, Artificial Sequence
  Description of Artificial Sequence: Synthetic oligonucleotide
gucgccgaccgcacucgcc

SEQ ID NO: 1558143 - RNA, 19 nt, Artificial Sequence
  Description of Artificial Sequence: Synthetic oligonucleotide
gcgcaaacagucgccgacc

SEQ ID NO: 1558144 - RNA, 19 nt, Artificial Sequence
  Description of Artificial Sequence: Synthetic oligonucleotide
gccaagcgcucaaagccug

SEQ ID NO: 1558145 - RNA, 19 nt, Artificial Sequence
  Description of Artificial Sequence: Synthetic oligonucleotide
cccggcaagcagacuugcg

SEQ ID NO: 1558146 - RNA, 19 nt, Artificial Sequence
  Description of Artificial Sequence: Synthetic oligonucleotide
cccuagcaccugaauucag

SEQ ID NO: 1558147 - RNA, 19 nt, Artificial Sequence
  Description of Artificial Sequence: Synthetic oligonucleotide
gggaccacagaagccgcca

SEQ ID NO: 1558148 - RNA, 19 nt, Artificial Sequence
  Description of Artificial Sequence: Synthetic oligonucleotide
ccuagcaccugaauucagu

SEQ ID NO: 1558149 - RNA, 19 nt, Artificial Sequence
  Description of Artificial Sequence: Synthetic oligonucleotide
ccaccggacugcugcgggg

SEQ ID NO: 1558150 - RNA, 19 nt, Artificial Sequence
  Description of Artificial Sequence: Synthetic oligonucleotide
cgcagugagcauauucaca

SEQ ID NO: 1558151 - RNA, 19 nt, Artificial Sequence
  Description of Artificial Sequence: Synthetic oligonucleotide
cuccggagugcuugugucu

SEQ ID NO: 1558152 - RNA, 19 nt, Artificial Sequence
  Description of Artificial Sequence: Synthetic oligonucleotide
cuaacuuccccagcacuuu

SEQ ID NO: 1558153 - RNA, 19 nt, Artificial Sequence
  Description of Artificial Sequence: Synthetic oligonucleotide
aggcagggacagccgccga

SEQ ID NO: 1558154 - RNA, 19 nt, Artificial Sequence
  Description of Artificial Sequence: Synthetic oligonucleotide
ggucugucugggaucuauc

SEQ ID NO: 1558155 - RNA, 19 nt, Artificial Sequence
  Description of Artificial Sequence: Synthetic oligonucleotide
gcgccgacucuuccguccc

SEQ ID NO: 1558156 - RNA, 19 nt, Artificial Sequence
  Description of Artificial Sequence: Synthetic oligonucleotide
gcaaggaagcgaucgcuuu

SEQ ID NO: 1558157 - RNA, 19 nt, Artificial Sequence
  Description of Artificial Sequence: Synthetic oligonucleotide
ggggucuuagaggccucug

SEQ ID NO: 1558158 - RNA, 19 nt, Artificial Sequence
  Description of Artificial Sequence: Synthetic oligonucleotide
cacuagggcagugcucgaa

SEQ ID NO: 1558159 - RNA, 19 nt, Artificial Sequence
  Description of Artificial Sequence: Synthetic oligonucleotide
gagggcuaaaauggacauu

SEQ ID NO: 1558160 - RNA, 19 nt, Artificial Sequence
  Description of Artificial Sequence: Synthetic oligonucleotide
cgccaagcgcgcgagaaac

SEQ ID NO: 1558161 - RNA, 19 nt, Artificial Sequence
  Description of Artificial Sequence: Synthetic oligonucleotide
ccuaucuacugcacagagu

SEQ ID NO: 1558162 - RNA, 19 nt, Artificial Sequence
  Description of Artificial Sequence: Synthetic oligonucleotide
uccguccccuaggcauggc

SEQ ID NO: 1558163 - RNA, 19 nt, Artificial Sequence
  Description of Artificial Sequence: Synthetic oligonucleotide
gcaagcagacuugcgcaaa

SEQ ID NO: 1558164 - RNA, 19 nt, Artificial Sequence
  Description of Artificial Sequence: Synthetic oligonucleotide
ccaggcugcaucccuaacu

SEQ ID NO: 1558165 - RNA, 19 nt, Artificial Sequence
  Description of Artificial Sequence: Synthetic oligonucleotide
guacuccaccggacugcug

SEQ ID NO: 1558166 - RNA, 19 nt, Artificial Sequence
  Description of Artificial Sequence: Synthetic oligonucleotide
cuacuugcgcagugagcau

SEQ ID NO: 1558167 - RNA, 19 nt, Artificial Sequence
  Description of Artificial Sequence: Synthetic oligonucleotide
gccuguaucuugcgauugu

SEQ ID NO: 1558168 - RNA, 19 nt, Artificial Sequence
  Description of Artificial Sequence: Synthetic oligonucleotide
cgcuuucggccacaaagca

SEQ ID NO: 1558169 - RNA, 19 nt, Artificial Sequence
  Description of Artificial Sequence: Synthetic oligonucleotide
cgaacucuugccacaaaau

SEQ ID NO: 1558170 - RNA, 19 nt, Artificial Sequence
  Description of Artificial Sequence: Synthetic oligonucleotide
ccccuagcaccugaauuca

SEQ ID NO: 1558171 - RNA, 19 nt, Artificial Sequence
  Description of Artificial Sequence: Synthetic oligonucleotide
cugugcugccucccaggcu

SEQ ID NO: 1558172 - RNA, 19 nt, Artificial Sequence
  Description of Artificial Sequence: Synthetic oligonucleotide
ccacuccuaagggucuguc

SEQ ID NO: 1558173 - RNA, 19 nt, Artificial Sequence
  Description of Artificial Sequence: Synthetic oligonucleotide
cccuaacuuccccagcacu

SEQ ID NO: 1558174 - RNA, 19 nt, Artificial Sequence
  Description of Artificial Sequence: Synthetic oligonucleotide
ccggagugcuugugucuuc

SEQ ID NO: 1558175 - RNA, 19 nt, Artificial Sequence
  Description of Artificial Sequence: Synthetic oligonucleotide
ccccggcaagcagacuugc

SEQ ID NO: 1558176 - RNA, 19 nt, Artificial Sequence
  Description of Artificial Sequence: Synthetic oligonucleotide
cccaggcugcaucccuaac

SEQ ID NO: 1558177 - RNA, 19 nt, Artificial Sequence
  Description of Artificial Sequence: Synthetic oligonucleotide
gcggggcacuggcuuauaa

SEQ ID NO: 1558178 - RNA, 19 nt, Artificial Sequence
  Description of Artificial Sequence: Synthetic oligonucleotide
gcacuagggcagugcucga

SEQ ID NO: 1558179 - RNA, 19 nt, Artificial Sequence
  Description of Artificial Sequence: Synthetic oligonucleotide
ggaccacagaagccgccau

SEQ ID NO: 1558180 - RNA, 19 nt, Artificial Sequence
  Description of Artificial Sequence: Synthetic oligonucleotide
ccuuugcguuucggcggcg

SEQ ID NO: 1558181 - RNA, 19 nt, Artificial Sequence
  Description of Artificial Sequence: Synthetic oligonucleotide
aagccgccauuggggucuu

SEQ ID NO: 1558182 - RNA, 19 nt, Artificial Sequence
  Description of Artificial Sequence: Synthetic oligonucleotide
cugcagcgucgggguacag

SEQ ID NO: 1558183 - RNA, 19 nt, Artificial Sequence
  Description of Artificial Sequence: Synthetic oligonucleotide
gcgccaagcgcgcgagaaa

SEQ ID NO: 1558184 - RNA, 19 nt, Artificial Sequence
  Description of Artificial Sequence: Synthetic oligonucleotide
ccggacugcugcggggcac

SEQ ID NO: 1558185 - RNA, 19 nt, Artificial Sequence
  Description of Artificial Sequence: Synthetic oligonucleotide
gggccgcucaggcagucuu

SEQ ID NO: 1558186 - RNA, 19 nt, Artificial Sequence
  Description of Artificial Sequence: Synthetic oligonucleotide
gcaucgguuccgaacucuu

SEQ ID NO: 1558187 - RNA, 19 nt, Artificial Sequence
  Description of Artificial Sequence: Synthetic oligonucleotide
cagcgccaagcgcgcgaga

SEQ ID NO: 1558188 - RNA, 19 nt, Artificial Sequence
  Description of Artificial Sequence: Synthetic oligonucleotide
ccuguaucuugcgauuguu

SEQ ID NO: 1558189 - RNA, 19 nt, Artificial Sequence
  Description of Artificial Sequence: Synthetic oligonucleotide
gcgaucgcuuucggccaca

SEQ ID NO: 1558190 - RNA, 19 nt, Artificial Sequence
  Description of Artificial Sequence: Synthetic oligonucleotide
cugcggggcacuggcuuau

SEQ ID NO: 1558191 - RNA, 19 nt, Artificial Sequence
  Description of Artificial Sequence: Synthetic oligonucleotide
cuccggguaaugggcuuuu

SEQ ID NO: 1558192 - RNA, 19 nt, Artificial Sequence
  Description of Artificial Sequence: Synthetic oligonucleotide
gcguuucggcggcgccgac

SEQ ID NO: 1558193 - RNA, 19 nt, Artificial Sequence
  Description of Artificial Sequence: Synthetic oligonucleotide
gcuccggguaaugggcuuu

SEQ ID NO: 1558194 - RNA, 19 nt, Artificial Sequence
  Description of Artificial Sequence: Synthetic oligonucleotide
cuugcgcagugagcauauu

SEQ ID NO: 1558195 - RNA, 19 nt, Artificial Sequence
  Description of Artificial Sequence: Synthetic oligonucleotide
ccgaagcaggaacgccagu

SEQ ID NO: 1558196 - RNA, 19 nt, Artificial Sequence
  Description of Artificial Sequence: Synthetic oligonucleotide
agccgccauuggggucuua

SEQ ID NO: 1558197 - RNA, 19 nt, Artificial Sequence
  Description of Artificial Sequence: Synthetic oligonucleotide
cgaucgcuuucggccacaa

SEQ ID NO: 1558198 - RNA, 19 nt, Artificial Sequence
  Description of Artificial Sequence: Synthetic oligonucleotide
cgggugugcucgggaccac

SEQ ID NO: 1558199 - RNA, 19 nt, Artificial Sequence
  Description of Artificial Sequence: Synthetic oligonucleotide
cguuucggcggcgccgacu

SEQ ID NO: 1558200 - RNA, 19 nt, Artificial Sequence
  Description of Artificial Sequence: Synthetic oligonucleotide
ccuuggcgcuguugcccau

SEQ ID NO: 1558201 - RNA, 19 nt, Artificial Sequence
  Description of Artificial Sequence: Synthetic oligonucleotide
uuauguagcacccucacag

SEQ ID NO: 1558202 - RNA, 19 nt, Artificial Sequence
  Description of Artificial Sequence: Synthetic oligonucleotide
uccaacauagcauucaagg

SEQ ID NO: 1558203 - RNA, 19 nt, Artificial Sequence
  Description of Artificial Sequence: Synthetic oligonucleotide
gaagcuucgacucagcucc

SEQ ID NO: 1558204 - RNA, 19 nt, Artificial Sequence
  Description of Artificial Sequence: Synthetic oligonucleotide
uuaagcaugauggagacug

SEQ ID NO: 1558205 - RNA, 19 nt, Artificial Sequence
  Description of Artificial Sequence: Synthetic oligonucleotide
gaaaacaucccgaagaggc

SEQ ID NO: 1558206 - RNA, 19 nt, Artificial Sequence
  Description of Artificial Sequence: Synthetic oligonucleotide
aaaugguagagaccacccc

SEQ ID NO: 1558207 - RNA, 19 nt, Artificial Sequence
  Description of Artificial Sequence: Synthetic oligonucleotide
uguggauucucaacgaugc

SEQ ID NO: 1558208 - RNA, 19 nt, Artificial Sequence
  Description of Artificial Sequence: Synthetic oligonucleotide
aacaaucgaguuuaagaug

SEQ ID NO: 1558209 - RNA, 19 nt, Artificial Sequence
  Description of Artificial Sequence: Synthetic oligonucleotide
uuguguggcagaacaaucg

SEQ ID NO: 1558210 - RNA, 19 nt, Artificial Sequence
  Description of Artificial Sequence: Synthetic oligonucleotide
uaagaugagcaccucagca

SEQ ID NO: 1558211 - RNA, 19 nt, Artificial Sequence
  Description of Artificial Sequence: Synthetic oligonucleotide
aaacguuuccucugauucg

SEQ ID NO: 1558212 - RNA, 19 nt, Artificial Sequence
  Description of Artificial Sequence: Synthetic oligonucleotide
aguuggauggauguaaacg

SEQ ID NO: 1558213 - RNA, 19 nt, Artificial Sequence
  Description of Artificial Sequence: Synthetic oligonucleotide
auuucgcuggaaaacaucc

SEQ ID NO: 1558214 - RNA, 19 nt, Artificial Sequence
  Description of Artificial Sequence: Synthetic oligonucleotide
uggagauuccucuaguugc

SEQ ID NO: 1558215 - RNA, 19 nt, Artificial Sequence
  Description of Artificial Sequence: Synthetic oligonucleotide
aaucgaguuuaagaugagc

SEQ ID NO: 1558216 - RNA, 19 nt, Artificial Sequence
  Description of Artificial Sequence: Synthetic oligonucleotide
cugguaucggcccagauag

SEQ ID NO: 1558217 - RNA, 19 nt, Artificial Sequence
  Description of Artificial Sequence: Synthetic oligonucleotide
aaagguagaugccacaguu

SEQ ID NO: 1558218 - RNA, 19 nt, Artificial Sequence
  Description of Artificial Sequence: Synthetic oligonucleotide
aaggccugaagcgaguccc

SEQ ID NO: 1558219 - RNA, 19 nt, Artificial Sequence
  Description of Artificial Sequence: Synthetic oligonucleotide
uucucaacgaugcagccgu

SEQ ID NO: 1558220 - RNA, 19 nt, Artificial Sequence
  Description of Artificial Sequence: Synthetic oligonucleotide
uuagcaguuggauggaugu

SEQ ID NO: 1558221 - RNA, 19 nt, Artificial Sequence
  Description of Artificial Sequence: Synthetic oligonucleotide
agaugagcaccucagcagg

SEQ ID NO: 1558222 - RNA, 19 nt, Artificial Sequence
  Description of Artificial Sequence: Synthetic oligonucleotide
uugagcacgaagaaugccu

SEQ ID NO: 1558223 - RNA, 19 nt, Artificial Sequence
  Description of Artificial Sequence: Synthetic oligonucleotide
uguggcagaacaaucgagu

SEQ ID NO: 1558224 - RNA, 19 nt, Artificial Sequence
  Description of Artificial Sequence: Synthetic oligonucleotide
ugagugaucugguaucggc

SEQ ID NO: 1558225 - RNA, 19 nt, Artificial Sequence
  Description of Artificial Sequence: Synthetic oligonucleotide
cugugagcauccaacauag

SEQ ID NO: 1558226 - RNA, 19 nt, Artificial Sequence
  Description of Artificial Sequence: Synthetic oligonucleotide
uuaagaugagcaccucagc

SEQ ID NO: 1558227 - RNA, 19 nt, Artificial Sequence
  Description of Artificial Sequence: Synthetic oligonucleotide
gaguaagaaagggugacgc

SEQ ID NO: 1558228 - RNA, 19 nt, Artificial Sequence
  Description of Artificial Sequence: Synthetic oligonucleotide
acaaucgaguuuaagauga

SEQ ID NO: 1558229 - RNA, 19 nt, Artificial Sequence
  Description of Artificial Sequence: Synthetic oligonucleotide
ucuacacgggcccagcgcc

SEQ ID NO: 1558230 - RNA, 19 nt, Artificial Sequence
  Description of Artificial Sequence: Synthetic oligonucleotide
uggauucucaacgaugcag

SEQ ID NO: 1558231 - RNA, 19 nt, Artificial Sequence
  Description of Artificial Sequence: Synthetic oligonucleotide
gauuguguccuguuagcug

SEQ ID NO: 1558232 - RNA, 19 nt, Artificial Sequence
  Description of Artificial Sequence: Synthetic oligonucleotide
uauguagcacccucacagg

SEQ ID NO: 1558233 - RNA, 19 nt, Artificial Sequence
  Description of Artificial Sequence: Synthetic oligonucleotide
ucugugagcauccaacaua

SEQ ID NO: 1558234 - RNA, 19 nt, Artificial Sequence
  Description of Artificial Sequence: Synthetic oligonucleotide
ugcuaccuaaaccacuagc

SEQ ID NO: 1558235 - RNA, 19 nt, Artificial Sequence
  Description of Artificial Sequence: Synthetic oligonucleotide
aaaagguagaugccacagu

SEQ ID NO: 1558236 - RNA, 19 nt, Artificial Sequence
  Description of Artificial Sequence: Synthetic oligonucleotide
cucuauauggugcuggauc

SEQ ID NO: 1558237 - RNA, 19 nt, Artificial Sequence
  Description of Artificial Sequence: Synthetic oligonucleotide
aagcgaguccccuuuugag

SEQ ID NO: 1558238 - RNA, 19 nt, Artificial Sequence
  Description of Artificial Sequence: Synthetic oligonucleotide
gaugcagccguaguugagg

SEQ ID NO: 1558239 - RNA, 19 nt, Artificial Sequence
  Description of Artificial Sequence: Synthetic oligonucleotide
gacuggaagguuaaacucc

SEQ ID NO: 1558240 - RNA, 19 nt, Artificial Sequence
  Description of Artificial Sequence: Synthetic oligonucleotide
ucccgaaaaugguagagac

SEQ ID NO: 1558241 - RNA, 19 nt, Artificial Sequence
  Description of Artificial Sequence: Synthetic oligonucleotide
ucgaguuuaagaugagcac

SEQ ID NO: 1558242 - RNA, 19 nt, Artificial Sequence
  Description of Artificial Sequence: Synthetic oligonucleotide
gaacaaucgaguuuaagau

SEQ ID NO: 1558243 - RNA, 19 nt, Artificial Sequence
  Description of Artificial Sequence: Synthetic oligonucleotide
aggaguaagaaagggugac

SEQ ID NO: 1558244 - RNA, 19 nt, Artificial Sequence
  Description of Artificial Sequence: Synthetic oligonucleotide
uguguggcagaacaaucga

SEQ ID NO: 1558245 - RNA, 19 nt, Artificial Sequence
  Description of Artificial Sequence: Synthetic oligonucleotide
agcgaguccccuuuugagg

SEQ ID NO: 1558246 - RNA, 19 nt, Artificial Sequence
  Description of Artificial Sequence: Synthetic oligonucleotide
uugccuauccugcugauuu

SEQ ID NO: 1558247 - RNA, 19 nt, Artificial Sequence
  Description of Artificial Sequence: Synthetic oligonucleotide
auugagcacgaagaaugcc

SEQ ID NO: 1558248 - RNA, 19 nt, Artificial Sequence
  Description of Artificial Sequence: Synthetic oligonucleotide
uuuauguagcacccucaca

SEQ ID NO: 1558249 - RNA, 19 nt, Artificial Sequence
  Description of Artificial Sequence: Synthetic oligonucleotide
ugagccuggagauuccucu

SEQ ID NO: 1558250 - RNA, 19 nt, Artificial Sequence
  Description of Artificial Sequence: Synthetic oligonucleotide
aggaugauuugguugguga

SEQ ID NO: 1558251 - RNA, 19 nt, Artificial Sequence
  Description of Artificial Sequence: Synthetic oligonucleotide
auagcauucaaggggaagu

SEQ ID NO: 1558252 - RNA, 19 nt, Artificial Sequence
  Description of Artificial Sequence: Synthetic oligonucleotide
cauagauuuggcccugccc

SEQ ID NO: 1558253 - RNA, 19 nt, Artificial Sequence
  Description of Artificial Sequence: Synthetic oligonucleotide
cagacgucagcauugagca

SEQ ID NO: 1558254 - RNA, 19 nt, Artificial Sequence
  Description of Artificial Sequence: Synthetic oligonucleotide
agggccuccgaugagaauc

SEQ ID NO: 1558255 - RNA, 19 nt, Artificial Sequence
  Description of Artificial Sequence: Synthetic oligonucleotide
agcuucuaggaacugggug

SEQ ID NO: 1558256 - RNA, 19 nt, Artificial Sequence
  Description of Artificial Sequence: Synthetic oligonucleotide
uccagauaccaucggugag

SEQ ID NO: 1558257 - RNA, 19 nt, Artificial Sequence
  Description of Artificial Sequence: Synthetic oligonucleotide
auagugcaggaccucaugu

SEQ ID NO: 1558258 - RNA, 19 nt, Artificial Sequence
  Description of Artificial Sequence: Synthetic oligonucleotide
cacgaagaaugccucaggc

SEQ ID NO: 1558259 - RNA, 19 nt, Artificial Sequence
  Description of Artificial Sequence: Synthetic oligonucleotide
aacguuuccucugauucgu

SEQ ID NO: 1558260 - RNA, 19 nt, Artificial Sequence
  Description of Artificial Sequence: Synthetic oligonucleotide
cuggcuccagauaccaucg

SEQ ID NO: 1558261 - RNA, 19 nt, Artificial Sequence
  Description of Artificial Sequence: Synthetic oligonucleotide
cauugagcacgaagaaugc

SEQ ID NO: 1558262 - RNA, 19 nt, Artificial Sequence
  Description of Artificial Sequence: Synthetic oligonucleotide
aaaguggcuccguggagga

SEQ ID NO: 1558263 - RNA, 19 nt, Artificial Sequence
  Description of Artificial Sequence: Synthetic oligonucleotide
uuucgcuggaaaacauccc

SEQ ID NO: 1558264 - RNA, 19 nt, Artificial Sequence
  Description of Artificial Sequence: Synthetic oligonucleotide
guagaagccaaugagcaga

SEQ ID NO: 1558265 - RNA, 19 nt, Artificial Sequence
  Description of Artificial Sequence: Synthetic oligonucleotide
uguggugccgaggaguaag

SEQ ID NO: 1558266 - RNA, 19 nt, Artificial Sequence
  Description of Artificial Sequence: Synthetic oligonucleotide
uggauguaaacguuuccuc

SEQ ID NO: 1558267 - RNA, 19 nt, Artificial Sequence
  Description of Artificial Sequence: Synthetic oligonucleotide
auugggauuggggucauug

SEQ ID NO: 1558268 - RNA, 19 nt, Artificial Sequence
  Description of Artificial Sequence: Synthetic oligonucleotide
acaggccucuauauggugc

SEQ ID NO: 1558269 - RNA, 19 nt, Artificial Sequence
  Description of Artificial Sequence: Synthetic oligonucleotide
ucugguaucggcccagaua

SEQ ID NO: 1558270 - RNA, 19 nt, Artificial Sequence
  Description of Artificial Sequence: Synthetic oligonucleotide
ugaagcuucgacucagcuc

SEQ ID NO: 1558271 - RNA, 19 nt, Artificial Sequence
  Description of Artificial Sequence: Synthetic oligonucleotide
aucccgaagaggcuucagg

SEQ ID NO: 1558272 - RNA, 19 nt, Artificial Sequence
  Description of Artificial Sequence: Synthetic oligonucleotide
ggauaguuauggcaggaag

SEQ ID NO: 1558273 - RNA, 19 nt, Artificial Sequence
  Description of Artificial Sequence: Synthetic oligonucleotide
ucaacgaugcagccguagu

SEQ ID NO: 1558274 - RNA, 19 nt, Artificial Sequence
  Description of Artificial Sequence: Synthetic oligonucleotide
gagaauacauccugcucca

SEQ ID NO: 1558275 - RNA, 19 nt, Artificial Sequence
  Description of Artificial Sequence: Synthetic oligonucleotide
aguaagaaagggugacgcu

SEQ ID NO: 1558276 - RNA, 19 nt, Artificial Sequence
  Description of Artificial Sequence: Synthetic oligonucleotide
ugggcguccccucuacacg

SEQ ID NO: 1558277 - RNA, 19 nt, Artificial Sequence
  Description of Artificial Sequence: Synthetic oligonucleotide
ccaacauagcauucaaggg

SEQ ID NO: 1558278 - RNA, 19 nt, Artificial Sequence
  Description of Artificial Sequence: Synthetic oligonucleotide
guuggauggauguaaacgu

SEQ ID NO: 1558279 - RNA, 19 nt, Artificial Sequence
  Description of Artificial Sequence: Synthetic oligonucleotide
cuuuugagggccuccgaug

SEQ ID NO: 1558280 - RNA, 19 nt, Artificial Sequence
  Description of Artificial Sequence: Synthetic oligonucleotide
ugggugagugaucugguau

SEQ ID NO: 1558281 - RNA, 19 nt, Artificial Sequence
  Description of Artificial Sequence: Synthetic oligonucleotide
auucucaacgaugcagccg

SEQ ID NO: 1558282 - RNA, 19 nt, Artificial Sequence
  Description of Artificial Sequence: Synthetic oligonucleotide
gaggugcacauagauuugg

SEQ ID NO: 1558283 - RNA, 19 nt, Artificial Sequence
  Description of Artificial Sequence: Synthetic oligonucleotide
cacugauaaaugugcuggg

SEQ ID NO: 1558284 - RNA, 19 nt, Artificial Sequence
  Description of Artificial Sequence: Synthetic oligonucleotide
ugagcacgaagaaugccuc

SEQ ID NO: 1558285 - RNA, 19 nt, Artificial Sequence
  Description of Artificial Sequence: Synthetic oligonucleotide
agauccuuucuggacagag

SEQ ID NO: 1558286 - RNA, 19 nt, Artificial Sequence
  Description of Artificial Sequence: Synthetic oligonucleotide
ggaaacagugguuugggca

SEQ ID NO: 1558287 - RNA, 19 nt, Artificial Sequence
  Description of Artificial Sequence: Synthetic oligonucleotide
ggcaccucaaaagacaaag

SEQ ID NO: 1558288 - RNA, 19 nt, Artificial Sequence
  Description of Artificial Sequence: Synthetic oligonucleotide
gauggagacugcuaccuaa

SEQ ID NO: 1558289 - RNA, 19 nt, Artificial Sequence
  Description of Artificial Sequence: Synthetic oligonucleotide
ugccgaggaguaagaaagg

SEQ ID NO: 1558290 - RNA, 19 nt, Artificial Sequence
  Description of Artificial Sequence: Synthetic oligonucleotide
ucuaguugccuauccugcu

SEQ ID NO: 1558291 - RNA, 19 nt, Artificial Sequence
  Description of Artificial Sequence: Synthetic oligonucleotide
auuggggucauugggcguc

SEQ ID NO: 1558292 - RNA, 19 nt, Artificial Sequence
  Description of Artificial Sequence: Synthetic oligonucleotide
gaaagggugacgcuggcgu

SEQ ID NO: 1558293 - RNA, 19 nt, Artificial Sequence
  Description of Artificial Sequence: Synthetic oligonucleotide
ugaagcgaguccccuuuug

SEQ ID NO: 1558294 - RNA, 19 nt, Artificial Sequence
  Description of Artificial Sequence: Synthetic oligonucleotide
uggauggauguaaacguuu

SEQ ID NO: 1558295 - RNA, 19 nt, Artificial Sequence
  Description of Artificial Sequence: Synthetic oligonucleotide
ugauuucgcuggaaaacau

SEQ ID NO: 1558296 - RNA, 19 nt, Artificial Sequence
  Description of Artificial Sequence: Synthetic oligonucleotide
uguagcacccucacaggau

SEQ ID NO: 1558297 - RNA, 19 nt, Artificial Sequence
  Description of Artificial Sequence: Synthetic oligonucleotide
gauuuggcccugcccagcc

SEQ ID NO: 1558298 - RNA, 19 nt, Artificial Sequence
  Description of Artificial Sequence: Synthetic oligonucleotide
gugaggugcacauagauuu

SEQ ID NO: 1558299 - RNA, 19 nt, Artificial Sequence
  Description of Artificial Sequence: Synthetic oligonucleotide
uaguuauggcaggaaguag

SEQ ID NO: 1558300 - RNA, 19 nt, Artificial Sequence
  Description of Artificial Sequence: Synthetic oligonucleotide
ucggcccagauagaggcgg

SEQ ID NO: 1558301 - RNA, 19 nt, Artificial Sequence
  Description of Artificial Sequence: Synthetic oligonucleotide
uccucuaguugccuauccu

SEQ ID NO: 1558302 - RNA, 19 nt, Artificial Sequence
  Description of Artificial Sequence: Synthetic oligonucleotide
ggggccuuuauguagcacc

SEQ ID NO: 1558303 - RNA, 19 nt, Artificial Sequence
  Description of Artificial Sequence: Synthetic oligonucleotide
cucagauccuuucuggaca

SEQ ID NO: 1558304 - RNA, 19 nt, Artificial Sequence
  Description of Artificial Sequence: Synthetic oligonucleotide
gaccucaugugucugugga

SEQ ID NO: 1558305 - RNA, 19 nt, Artificial Sequence
  Description of Artificial Sequence: Synthetic oligonucleotide
augugcuggguuucuccac

SEQ ID NO: 1558306 - RNA, 19 nt, Artificial Sequence
  Description of Artificial Sequence: Synthetic oligonucleotide
gaucauagggacgccugcc

SEQ ID NO: 1558307 - RNA, 19 nt, Artificial Sequence
  Description of Artificial Sequence: Synthetic oligonucleotide
uuggauggauguaaacguu

SEQ ID NO: 1558308 - RNA, 19 nt, Artificial Sequence
  Description of Artificial Sequence: Synthetic oligonucleotide
aacaucccgaagaggcuuc

SEQ ID NO: 1558309 - RNA, 19 nt, Artificial Sequence
  Description of Artificial Sequence: Synthetic oligonucleotide
gaagcgaguccccuuuuga

SEQ ID NO: 1558310 - RNA, 19 nt, Artificial Sequence
  Description of Artificial Sequence: Synthetic oligonucleotide
gcgaguccccuuuugaggg

SEQ ID NO: 1558311 - RNA, 19 nt, Artificial Sequence
  Description of Artificial Sequence: Synthetic oligonucleotide
agagcagacgucagcauug

SEQ ID NO: 1558312 - RNA, 19 nt, Artificial Sequence
  Description of Artificial Sequence: Synthetic oligonucleotide
aaacaucccgaagaggcuu

SEQ ID NO: 1558313 - RNA, 19 nt, Artificial Sequence
  Description of Artificial Sequence: Synthetic oligonucleotide
aucauagggacgccugcca

SEQ ID NO: 1558314 - RNA, 19 nt, Artificial Sequence
  Description of Artificial Sequence: Synthetic oligonucleotide
acugauaaaugugcugggu

SEQ ID NO: 1558315 - RNA, 19 nt, Artificial Sequence
  Description of Artificial Sequence: Synthetic oligonucleotide
ggauucucaacgaugcagc

SEQ ID NO: 1558316 - RNA, 19 nt, Artificial Sequence
  Description of Artificial Sequence: Synthetic oligonucleotide
gaaccuccugcaucccagg

SEQ ID NO: 1558317 - RNA, 19 nt, Artificial Sequence
  Description of Artificial Sequence: Synthetic oligonucleotide
cgaggaguaagaaagggug

SEQ ID NO: 1558318 - RNA, 19 nt, Artificial Sequence
  Description of Artificial Sequence: Synthetic oligonucleotide
uguaaacguuuccucugau

SEQ ID NO: 1558319 - RNA, 19 nt, Artificial Sequence
  Description of Artificial Sequence: Synthetic oligonucleotide
cagacgcacacccucgccc

SEQ ID NO: 1558320 - RNA, 19 nt, Artificial Sequence
  Description of Artificial Sequence: Synthetic oligonucleotide
gauuucgcuggaaaacauc

SEQ ID NO: 1558321 - RNA, 19 nt, Artificial Sequence
  Description of Artificial Sequence: Synthetic oligonucleotide
gacgcuggcgucugugagc

SEQ ID NO: 1558322 - RNA, 19 nt, Artificial Sequence
  Description of Artificial Sequence: Synthetic oligonucleotide
uugggcguccccucuacac

SEQ ID NO: 1558323 - RNA, 19 nt, Artificial Sequence
  Description of Artificial Sequence: Synthetic oligonucleotide
aggugcacauagauuuggc

SEQ ID NO: 1558324 - RNA, 19 nt, Artificial Sequence
  Description of Artificial Sequence: Synthetic oligonucleotide
auagggacgccugccacag

SEQ ID NO: 1558325 - RNA, 19 nt, Artificial Sequence
  Description of Artificial Sequence: Synthetic oligonucleotide
auagaggcgggaggcauag

SEQ ID NO: 1558326 - RNA, 19 nt, Artificial Sequence
  Description of Artificial Sequence: Synthetic oligonucleotide
uggcagaacaaucgaguuu

SEQ ID NO: 1558327 - RNA, 19 nt, Artificial Sequence
  Description of Artificial Sequence: Synthetic oligonucleotide
agaaagggugacgcuggcg

SEQ ID NO: 1558328 - RNA, 19 nt, Artificial Sequence
  Description of Artificial Sequence: Synthetic oligonucleotide
agacaaaggccugaagcga

SEQ ID NO: 1558329 - RNA, 19 nt, Artificial Sequence
  Description of Artificial Sequence: Synthetic oligonucleotide
gguaucggcccagauagag

SEQ ID NO: 1558330 - RNA, 19 nt, Artificial Sequence
  Description of Artificial Sequence: Synthetic oligonucleotide
agcaguuggauggauguaa

SEQ ID NO: 1558331 - RNA, 19 nt, Artificial Sequence
  Description of Artificial Sequence: Synthetic oligonucleotide
acuggaagguuaaacuccu

SEQ ID NO: 1558332 - RNA, 19 nt, Artificial Sequence
  Description of Artificial Sequence: Synthetic oligonucleotide
caaucgaguuuaagaugag

SEQ ID NO: 1558333 - RNA, 19 nt, Artificial Sequence
  Description of Artificial Sequence: Synthetic oligonucleotide
uccucugauucgugggccc

SEQ ID NO: 1558334 - RNA, 19 nt, Artificial Sequence
  Description of Artificial Sequence: Synthetic oligonucleotide
ccgaaaaugguagagacca

SEQ ID NO: 1558335 - RNA, 19 nt, Artificial Sequence
  Description of Artificial Sequence: Synthetic oligonucleotide
gucggauggucccugcccc

SEQ ID NO: 1558336 - RNA, 19 nt, Artificial Sequence
  Description of Artificial Sequence: Synthetic oligonucleotide
guaucggcccagauagagg

SEQ ID NO: 1558337 - RNA, 19 nt, Artificial Sequence
  Description of Artificial Sequence: Synthetic oligonucleotide
uuccucugauucgugggcc

SEQ ID NO: 1558338 - RNA, 19 nt, Artificial Sequence
  Description of Artificial Sequence: Synthetic oligonucleotide
gaguuuaagaugagcaccu

SEQ ID NO: 1558339 - RNA, 19 nt, Artificial Sequence
  Description of Artificial Sequence: Synthetic oligonucleotide
agacugcuaccuaaaccac

SEQ ID NO: 1558340 - RNA, 19 nt, Artificial Sequence
  Description of Artificial Sequence: Synthetic oligonucleotide
ggugagugaucugguaucg

SEQ ID NO: 1558341 - RNA, 19 nt, Artificial Sequence
  Description of Artificial Sequence: Synthetic oligonucleotide
auaaaugugcuggguuucu

SEQ ID NO: 1558342 - RNA, 19 nt, Artificial Sequence
  Description of Artificial Sequence: Synthetic oligonucleotide
cugauuucgcuggaaaaca

SEQ ID NO: 1558343 - RNA, 19 nt, Artificial Sequence
  Description of Artificial Sequence: Synthetic oligonucleotide
ggaaaacaucccgaagagg

SEQ ID NO: 1558344 - RNA, 19 nt, Artificial Sequence
  Description of Artificial Sequence: Synthetic oligonucleotide
gaggaguaagaaaggguga

SEQ ID NO: 1558345 - RNA, 19 nt, Artificial Sequence
  Description of Artificial Sequence: Synthetic oligonucleotide
caguuggauggauguaaac

SEQ ID NO: 1558346 - RNA, 19 nt, Artificial Sequence
  Description of Artificial Sequence: Synthetic oligonucleotide
uaccugacuggaagguuaa

SEQ ID NO: 1558347 - RNA, 19 nt, Artificial Sequence
  Description of Artificial Sequence: Synthetic oligonucleotide
ugcucucucgcagacgcac

SEQ ID NO: 1558348 - RNA, 19 nt, Artificial Sequence
  Description of Artificial Sequence: Synthetic oligonucleotide
guagcuuuccauccuugaa

SEQ ID NO: 1558349 - RNA, 19 nt, Artificial Sequence
  Description of Artificial Sequence: Synthetic oligonucleotide
ccucaaaagacaaaggccu

SEQ ID NO: 1558350 - RNA, 19 nt, Artificial Sequence
  Description of Artificial Sequence: Synthetic oligonucleotide
ccagauaccaucggugagg

SEQ ID NO: 1558351 - RNA, 19 nt, Artificial Sequence
  Description of Artificial Sequence: Synthetic oligonucleotide
cgaguuuaagaugagcacc

SEQ ID NO: 1558352 - RNA, 19 nt, Artificial Sequence
  Description of Artificial Sequence: Synthetic oligonucleotide
cacuguccaugcgagcucg

SEQ ID NO: 1558353 - RNA, 19 nt, Artificial Sequence
  Description of Artificial Sequence: Synthetic oligonucleotide
guguggcagaacaaucgag

SEQ ID NO: 1558354 - RNA, 19 nt, Artificial Sequence
  Description of Artificial Sequence: Synthetic oligonucleotide
acugcuaccuaaaccacua

SEQ ID NO: 1558355 - RNA, 19 nt, Artificial Sequence
  Description of Artificial Sequence: Synthetic oligonucleotide
ucacuguccaugcgagcuc

SEQ ID NO: 1558356 - RNA, 19 nt, Artificial Sequence
  Description of Artificial Sequence: Synthetic oligonucleotide
ggcagaacaaucgaguuua

SEQ ID NO: 1558357 - RNA, 19 nt, Artificial Sequence
  Description of Artificial Sequence: Synthetic oligonucleotide
cacagugcuuccccagccc

SEQ ID NO: 1558358 - RNA, 19 nt, Artificial Sequence
  Description of Artificial Sequence: Synthetic oligonucleotide
acccucacaggaugauuug

SEQ ID NO: 1558359 - RNA, 19 nt, Artificial Sequence
  Description of Artificial Sequence: Synthetic oligonucleotide
auccaacauagcauucaag

SEQ ID NO: 1558360 - RNA, 19 nt, Artificial Sequence
  Description of Artificial Sequence: Synthetic oligonucleotide
ugauggagacugcuaccua

SEQ ID NO: 1558361 - RNA, 19 nt, Artificial Sequence
  Description of Artificial Sequence: Synthetic oligonucleotide
agcugauggggccacuuua

SEQ ID NO: 1558362 - RNA, 19 nt, Artificial Sequence
  Description of Artificial Sequence: Synthetic oligonucleotide
ccucuaguugccuauccug

SEQ ID NO: 1558363 - RNA, 19 nt, Artificial Sequence
  Description of Artificial Sequence: Synthetic oligonucleotide
gcuccugcaaaguggcucc

SEQ ID NO: 1558364 - RNA, 19 nt, Artificial Sequence
  Description of Artificial Sequence: Synthetic oligonucleotide
cucaacgaugcagccguag

SEQ ID NO: 1558365 - RNA, 19 nt, Artificial Sequence
  Description of Artificial Sequence: Synthetic oligonucleotide
ucggugaggugcacauaga

SEQ ID NO: 1558366 - RNA, 19 nt, Artificial Sequence
  Description of Artificial Sequence: Synthetic oligonucleotide
cagcccuaaggaguguggg

SEQ ID NO: 1558367 - RNA, 19 nt, Artificial Sequence
  Description of Artificial Sequence: Synthetic oligonucleotide
guccccucuacacgggccc

SEQ ID NO: 1558368 - RNA, 19 nt, Artificial Sequence
  Description of Artificial Sequence: Synthetic oligonucleotide
ggaucauagggacgccugc

SEQ ID NO: 1558369 - RNA, 19 nt, Artificial Sequence
  Description of Artificial Sequence: Synthetic oligonucleotide
gauccggacacggcagccc

SEQ ID NO: 1558370 - RNA, 19 nt, Artificial Sequence
  Description of Artificial Sequence: Synthetic oligonucleotide
gacgccugccacaggaaac

SEQ ID NO: 1558371 - RNA, 19 nt, Artificial Sequence
  Description of Artificial Sequence: Synthetic oligonucleotide
gggauuggggucauugggc

SEQ ID NO: 1558372 - RNA, 19 nt, Artificial Sequence
  Description of Artificial Sequence: Synthetic oligonucleotide
gccgaggaguaagaaaggg

SEQ ID NO: 1558373 - RNA, 19 nt, Artificial Sequence
  Description of Artificial Sequence: Synthetic oligonucleotide
ggaagguuaaacuccugcu

SEQ ID NO: 1558374 - RNA, 19 nt, Artificial Sequence
  Description of Artificial Sequence: Synthetic oligonucleotide
auccggacacggcagccca

SEQ ID NO: 1558375 - RNA, 19 nt, Artificial Sequence
  Description of Artificial Sequence: Synthetic oligonucleotide
ugcagguaccugacuggaa

SEQ ID NO: 1558376 - RNA, 19 nt, Artificial Sequence
  Description of Artificial Sequence: Synthetic oligonucleotide
agcagacgucagcauugag

SEQ ID NO: 1558377 - RNA, 19 nt, Artificial Sequence
  Description of Artificial Sequence: Synthetic oligonucleotide
cauagggacgccugccaca

SEQ ID NO: 1558378 - RNA, 19 nt, Artificial Sequence
  Description of Artificial Sequence: Synthetic oligonucleotide
gcacgaagaaugccucagg

SEQ ID NO: 1558379 - RNA, 19 nt, Artificial Sequence
  Description of Artificial Sequence: Synthetic oligonucleotide
ucucgcagacgcacacccu

SEQ ID NO: 1558380 - RNA, 19 nt, Artificial Sequence
  Description of Artificial Sequence: Synthetic oligonucleotide
gggcguccccucuacacgg

SEQ ID NO: 1558381 - RNA, 19 nt, Artificial Sequence
  Description of Artificial Sequence: Synthetic oligonucleotide
caaugcucucucgcagacg

SEQ ID NO: 1558382 - RNA, 19 nt, Artificial Sequence
  Description of Artificial Sequence: Synthetic oligonucleotide
ucucucgcagacgcacacc

SEQ ID NO: 1558383 - RNA, 19 nt, Artificial Sequence
  Description of Artificial Sequence: Synthetic oligonucleotide
cauugggcguccccucuac

SEQ ID NO: 1558384 - RNA, 19 nt, Artificial Sequence
  Description of Artificial Sequence: Synthetic oligonucleotide
ggccucuauauggugcugg

SEQ ID NO: 1558385 - RNA, 19 nt, Artificial Sequence
  Description of Artificial Sequence: Synthetic oligonucleotide
gccuuaagcaugauggaga

SEQ ID NO: 1558386 - RNA, 19 nt, Artificial Sequence
  Description of Artificial Sequence: Synthetic oligonucleotide
ugccuauccugcugauuuc

SEQ ID NO: 1558387 - RNA, 19 nt, Artificial Sequence
  Description of Artificial Sequence: Synthetic oligonucleotide
ccucagauccuuucuggac

SEQ ID NO: 1558388 - RNA, 19 nt, Artificial Sequence
  Description of Artificial Sequence: Synthetic oligonucleotide
cugcuaccuaaaccacuag

SEQ ID NO: 1558389 - RNA, 19 nt, Artificial Sequence
  Description of Artificial Sequence: Synthetic oligonucleotide
aggauaguuauggcaggaa

SEQ ID NO: 1558390 - RNA, 19 nt, Artificial Sequence
  Description of Artificial Sequence: Synthetic oligonucleotide
gccuuuauguagcacccuc

SEQ ID NO: 1558391 - RNA, 19 nt, Artificial Sequence
  Description of Artificial Sequence: Synthetic oligonucleotide
guugagggauuguguccug

SEQ ID NO: 1558392 - RNA, 19 nt, Artificial Sequence
  Description of Artificial Sequence: Synthetic oligonucleotide
cuacacgggcccagcgccc

SEQ ID NO: 1558393 - RNA, 19 nt, Artificial Sequence
  Description of Artificial Sequence: Synthetic oligonucleotide
agcagcccuaaggagugug

SEQ ID NO: 1558394 - RNA, 19 nt, Artificial Sequence
  Description of Artificial Sequence: Synthetic oligonucleotide
agccguaguugagggauug

SEQ ID NO: 1558395 - RNA, 19 nt, Artificial Sequence
  Description of Artificial Sequence: Synthetic oligonucleotide
cccagauagaggcgggagg

SEQ ID NO: 1558396 - RNA, 19 nt, Artificial Sequence
  Description of Artificial Sequence: Synthetic oligonucleotide
cagccguucugggugagug

SEQ ID NO: 1558397 - RNA, 19 nt, Artificial Sequence
  Description of Artificial Sequence: Synthetic oligonucleotide
acgcuggcgucugugagca

SEQ ID NO: 1558398 - RNA, 19 nt, Artificial Sequence
  Description of Artificial Sequence: Synthetic oligonucleotide
gaaguagcuuuccauccuu

SEQ ID NO: 1558399 - RNA, 19 nt, Artificial Sequence
  Description of Artificial Sequence: Synthetic oligonucleotide
gcugauggggccacuuuag

SEQ ID NO: 1558400 - RNA, 19 nt, Artificial Sequence
  Description of Artificial Sequence: Synthetic oligonucleotide
guaccugacuggaagguua

SEQ ID NO: 1558401 - RNA, 19 nt, Artificial Sequence
  Description of Artificial Sequence: Synthetic oligonucleotide
agcgccccacagugcuucc

SEQ ID NO: 1558402 - RNA, 19 nt, Artificial Sequence
  Description of Artificial Sequence: Synthetic oligonucleotide
acgccugccacaggaaaca

SEQ ID NO: 1558403 - RNA, 19 nt, Artificial Sequence
  Description of Artificial Sequence: Synthetic oligonucleotide
uggcaggaaguagcuuucc

SEQ ID NO: 1558404 - RNA, 19 nt, Artificial Sequence
  Description of Artificial Sequence: Synthetic oligonucleotide
agcacagcugauggggcca

SEQ ID NO: 1558405 - RNA, 19 nt, Artificial Sequence
  Description of Artificial Sequence: Synthetic oligonucleotide
ugguaucggcccagauaga

SEQ ID NO: 1558406 - RNA, 19 nt, Artificial Sequence
  Description of Artificial Sequence: Synthetic oligonucleotide
ucggauggucccugcccca

SEQ ID NO: 1558407 - RNA, 19 nt, Artificial Sequence
  Description of Artificial Sequence: Synthetic oligonucleotide
ggcugagaauacauccugc

SEQ ID NO: 1558408 - RNA, 19 nt, Artificial Sequence
  Description of Artificial Sequence: Synthetic oligonucleotide
auugggcguccccucuaca

SEQ ID NO: 1558409 - RNA, 19 nt, Artificial Sequence
  Description of Artificial Sequence: Synthetic oligonucleotide
cagccuuaagcaugaugga

SEQ ID NO: 1558410 - RNA, 19 nt, Artificial Sequence
  Description of Artificial Sequence: Synthetic oligonucleotide
cagugguuugggcaccuca

SEQ ID NO: 1558411 - RNA, 19 nt, Artificial Sequence
  Description of Artificial Sequence: Synthetic oligonucleotide
aguugccuauccugcugau

SEQ ID NO: 1558412 - RNA, 19 nt, Artificial Sequence
  Description of Artificial Sequence: Synthetic oligonucleotide
guggauucucaacgaugca

SEQ ID NO: 1558413 - RNA, 19 nt, Artificial Sequence
  Description of Artificial Sequence: Synthetic oligonucleotide
gccaugagccuggagauuc

SEQ ID NO: 1558414 - RNA, 19 nt, Artificial Sequence
  Description of Artificial Sequence: Synthetic oligonucleotide
cuauccugcugauuucgcu

SEQ ID NO: 1558415 - RNA, 19 nt, Artificial Sequence
  Description of Artificial Sequence: Synthetic oligonucleotide
agauaccaucggugaggug

SEQ ID NO: 1558416 - RNA, 19 nt, Artificial Sequence
  Description of Artificial Sequence: Synthetic oligonucleotide
agccguucugggugaguga

SEQ ID NO: 1558417 - RNA, 19 nt, Artificial Sequence
  Description of Artificial Sequence: Synthetic oligonucleotide
caggauaguuauggcagga

SEQ ID NO: 1558418 - RNA, 19 nt, Artificial Sequence
  Description of Artificial Sequence: Synthetic oligonucleotide
cagcccacgaugcugugaa

SEQ ID NO: 1558419 - RNA, 19 nt, Artificial Sequence
  Description of Artificial Sequence: Synthetic oligonucleotide
gacugcuaccuaaaccacu

SEQ ID NO: 1558420 - RNA, 19 nt, Artificial Sequence
  Description of Artificial Sequence: Synthetic oligonucleotide
aucugguaucggcccagau

SEQ ID NO: 1558421 - RNA, 19 nt, Artificial Sequence
  Description of Artificial Sequence: Synthetic oligonucleotide
aucggcccagauagaggcg

SEQ ID NO: 1558422 - RNA, 19 nt, Artificial Sequence
  Description of Artificial Sequence: Synthetic oligonucleotide
gggcacaggccucuauaug

SEQ ID NO: 1558423 - RNA, 19 nt, Artificial Sequence
  Description of Artificial Sequence: Synthetic oligonucleotide
gauagaggcgggaggcaua

SEQ ID NO: 1558424 - RNA, 19 nt, Artificial Sequence
  Description of Artificial Sequence: Synthetic oligonucleotide
gcuccguggaggacaaugc

SEQ ID NO: 1558425 - RNA, 19 nt, Artificial Sequence
  Description of Artificial Sequence: Synthetic oligonucleotide
cgacucagcuccuugugug

SEQ ID NO: 1558426 - RNA, 19 nt, Artificial Sequence
  Description of Artificial Sequence: Synthetic oligonucleotide
cagaaccuccugcauccca

SEQ ID NO: 1558427 - RNA, 19 nt, Artificial Sequence
  Description of Artificial Sequence: Synthetic oligonucleotide
uagcaguuggauggaugua

SEQ ID NO: 1558428 - RNA, 19 nt, Artificial Sequence
  Description of Artificial Sequence: Synthetic oligonucleotide
gcagcccuaaggagugugg

SEQ ID NO: 1558429 - RNA, 19 nt, Artificial Sequence
  Description of Artificial Sequence: Synthetic oligonucleotide
agacuugaucuggcuccag

SEQ ID NO: 1558430 - RNA, 19 nt, Artificial Sequence
  Description of Artificial Sequence: Synthetic oligonucleotide
agcccacgaugcugugaag

SEQ ID NO: 1558431 - RNA, 19 nt, Artificial Sequence
  Description of Artificial Sequence: Synthetic oligonucleotide
ccagggcugagaauacauc

SEQ ID NO: 1558432 - RNA, 19 nt, Artificial Sequence
  Description of Artificial Sequence: Synthetic oligonucleotide
acggcagcccaggauaguu

SEQ ID NO: 1558433 - RNA, 19 nt, Artificial Sequence
  Description of Artificial Sequence: Synthetic oligonucleotide
ccguaguugagggauugug

SEQ ID NO: 1558434 - RNA, 19 nt, Artificial Sequence
  Description of Artificial Sequence: Synthetic oligonucleotide
caucccgaagaggcuucag

SEQ ID NO: 1558435 - RNA, 19 nt, Artificial Sequence
  Description of Artificial Sequence: Synthetic oligonucleotide
cuccugcaaaguggcuccg

SEQ ID NO: 1558436 - RNA, 19 nt, Artificial Sequence
  Description of Artificial Sequence: Synthetic oligonucleotide
ucucaacgaugcagccgua

SEQ ID NO: 1558437 - RNA, 19 nt, Artificial Sequence
  Description of Artificial Sequence: Synthetic oligonucleotide
ggucauugggcguccccuc

SEQ ID NO: 1558438 - RNA, 19 nt, Artificial Sequence
  Description of Artificial Sequence: Synthetic oligonucleotide
gccucaucaggcugguaga

SEQ ID NO: 1558439 - RNA, 19 nt, Artificial Sequence
  Description of Artificial Sequence: Synthetic oligonucleotide
cuguuagcuguggugccga

SEQ ID NO: 1558440 - RNA, 19 nt, Artificial Sequence
  Description of Artificial Sequence: Synthetic oligonucleotide
ggagugugcuuggccagcc

SEQ ID NO: 1558441 - RNA, 19 nt, Artificial Sequence
  Description of Artificial Sequence: Synthetic oligonucleotide
agcacccucacaggaugau

SEQ ID NO: 1558442 - RNA, 19 nt, Artificial Sequence
  Description of Artificial Sequence: Synthetic oligonucleotide
agggugacgcuggcgucug

SEQ ID NO: 1558443 - RNA, 19 nt, Artificial Sequence
  Description of Artificial Sequence: Synthetic oligonucleotide
gcccagauagaggcgggag

SEQ ID NO: 1558444 - RNA, 19 nt, Artificial Sequence
  Description of Artificial Sequence: Synthetic oligonucleotide
cccucgcccaaagucaccc

SEQ ID NO: 1558445 - RNA, 19 nt, Artificial Sequence
  Description of Artificial Sequence: Synthetic oligonucleotide
ggggucauugggcgucccc

SEQ ID NO: 1558446 - RNA, 19 nt, Artificial Sequence
  Description of Artificial Sequence: Synthetic oligonucleotide
ggauuguguccuguuagcu

SEQ ID NO: 1558447 - RNA, 19 nt, Artificial Sequence
  Description of Artificial Sequence: Synthetic oligonucleotide
ggauccggacacggcagcc

SEQ ID NO: 1558448 - RNA, 19 nt, Artificial Sequence
  Description of Artificial Sequence: Synthetic oligonucleotide
cacaggugugcuccugcaa

SEQ ID NO: 1558449 - RNA, 19 nt, Artificial Sequence
  Description of Artificial Sequence: Synthetic oligonucleotide
cagcgccccacagugcuuc

SEQ ID NO: 1558450 - RNA, 19 nt, Artificial Sequence
  Description of Artificial Sequence: Synthetic oligonucleotide
uccccucuacacgggccca

SEQ ID NO: 1558451 - RNA, 19 nt, Artificial Sequence
  Description of Artificial Sequence: Synthetic oligonucleotide
acguuuccucugauucgug

SEQ ID NO: 1558452 - RNA, 19 nt, Artificial Sequence
  Description of Artificial Sequence: Synthetic oligonucleotide
cagauagaggcgggaggca

SEQ ID NO: 1558453 - RNA, 19 nt, Artificial Sequence
  Description of Artificial Sequence: Synthetic oligonucleotide
cagauaccaucggugaggu

SEQ ID NO: 1558454 - RNA, 19 nt, Artificial Sequence
  Description of Artificial Sequence: Synthetic oligonucleotide
cagagcagacgucagcauu

SEQ ID NO: 1558455 - RNA, 19 nt, Artificial Sequence
  Description of Artificial Sequence: Synthetic oligonucleotide
caacgaugcagccguaguu

SEQ ID NO: 1558456 - RNA, 19 nt, Artificial Sequence
  Description of Artificial Sequence: Synthetic oligonucleotide
ggacgccugccacaggaaa

SEQ ID NO: 1558457 - RNA, 19 nt, Artificial Sequence
  Description of Artificial Sequence: Synthetic oligonucleotide
cgaaaaugguagagaccac

SEQ ID NO: 1558458 - RNA, 19 nt, Artificial Sequence
  Description of Artificial Sequence: Synthetic oligonucleotide
ccccuuuugagggccuccg

SEQ ID NO: 1558459 - RNA, 19 nt, Artificial Sequence
  Description of Artificial Sequence: Synthetic oligonucleotide
gacgcacacccucgcccaa

SEQ ID NO: 1558460 - RNA, 19 nt, Artificial Sequence
  Description of Artificial Sequence: Synthetic oligonucleotide
ccucugauucgugggcccc

SEQ ID NO: 1558461 - RNA, 19 nt, Artificial Sequence
  Description of Artificial Sequence: Synthetic oligonucleotide
cuuaagcaugauggagacu

SEQ ID NO: 1558462 - RNA, 19 nt, Artificial Sequence
  Description of Artificial Sequence: Synthetic oligonucleotide
ccagucggauggucccugc

SEQ ID NO: 1558463 - RNA, 19 nt, Artificial Sequence
  Description of Artificial Sequence: Synthetic oligonucleotide
cuggaucauagggacgccu

SEQ ID NO: 1558464 - RNA, 19 nt, Artificial Sequence
  Description of Artificial Sequence: Synthetic oligonucleotide
ccgaggaguaagaaagggu

SEQ ID NO: 1558465 - RNA, 19 nt, Artificial Sequence
  Description of Artificial Sequence: Synthetic oligonucleotide
cguaguugagggauugugu

SEQ ID NO: 1558466 - RNA, 19 nt, Artificial Sequence
  Description of Artificial Sequence: Synthetic oligonucleotide
uagaggcgggaggcauaga

SEQ ID NO: 1558467 - RNA, 19 nt, Artificial Sequence
  Description of Artificial Sequence: Synthetic oligonucleotide
uaccaucggugaggugcac

SEQ ID NO: 1558468 - RNA, 19 nt, Artificial Sequence
  Description of Artificial Sequence: Synthetic oligonucleotide
ggcgucugugagcauccaa

SEQ ID NO: 1558469 - RNA, 19 nt, Artificial Sequence
  Description of Artificial Sequence: Synthetic oligonucleotide
ccaaggggagcaaacuccu

SEQ ID NO: 1558470 - RNA, 19 nt, Artificial Sequence
  Description of Artificial Sequence: Synthetic oligonucleotide
aguccccuuuugagggccu

SEQ ID NO: 1558471 - RNA, 19 nt, Artificial Sequence
  Description of Artificial Sequence: Synthetic oligonucleotide
ccggacacggcagcccagg

SEQ ID NO: 1558472 - RNA, 19 nt, Artificial Sequence
  Description of Artificial Sequence: Synthetic oligonucleotide
ccucgcccaaagucacccc

SEQ ID NO: 1558473 - RNA, 19 nt, Artificial Sequence
  Description of Artificial Sequence: Synthetic oligonucleotide
ggugaggugcacauagauu

SEQ ID NO: 1558474 - RNA, 19 nt, Artificial Sequence
  Description of Artificial Sequence: Synthetic oligonucleotide
ggcguccccucuacacggg

SEQ ID NO: 1558475 - RNA, 19 nt, Artificial Sequence
  Description of Artificial Sequence: Synthetic oligonucleotide
gcgggaggcauagagggcu

SEQ ID NO: 1558476 - RNA, 19 nt, Artificial Sequence
  Description of Artificial Sequence: Synthetic oligonucleotide
gggccuccgaugagaauca

SEQ ID NO: 1558477 - RNA, 19 nt, Artificial Sequence
  Description of Artificial Sequence: Synthetic oligonucleotide
cuaaaccacuagcucccuu

SEQ ID NO: 1558478 - RNA, 19 nt, Artificial Sequence
  Description of Artificial Sequence: Synthetic oligonucleotide
cgaguccccuuuugagggc

SEQ ID NO: 1558479 - RNA, 19 nt, Artificial Sequence
  Description of Artificial Sequence: Synthetic oligonucleotide
cuuuagcaguuggauggau

SEQ ID NO: 1558480 - RNA, 19 nt, Artificial Sequence
  Description of Artificial Sequence: Synthetic oligonucleotide
gcagaaccuccugcauccc

SEQ ID NO: 1558481 - RNA, 19 nt, Artificial Sequence
  Description of Artificial Sequence: Synthetic oligonucleotide
acgcacacccucgcccaaa

SEQ ID NO: 1558482 - RNA, 19 nt, Artificial Sequence
  Description of Artificial Sequence: Synthetic oligonucleotide
acgggcccagcgccccaca

SEQ ID NO: 1558483 - RNA, 19 nt, Artificial Sequence
  Description of Artificial Sequence: Synthetic oligonucleotide
ccuuuugagggccuccgau

SEQ ID NO: 1558484 - RNA, 19 nt, Artificial Sequence
  Description of Artificial Sequence: Synthetic oligonucleotide
ccaucggugaggugcacau

SEQ ID NO: 1558485 - RNA, 19 nt, Artificial Sequence
  Description of Artificial Sequence: Synthetic oligonucleotide
ccguucugggugagugauc

SEQ ID NO: 1558486 - RNA, 19 nt, Artificial Sequence
  Description of Artificial Sequence: Synthetic oligonucleotide
gccguucugggugagugau

SEQ ID NO: 1558487 - RNA, 19 nt, Artificial Sequence
  Description of Artificial Sequence: Synthetic oligonucleotide
caucggugaggugcacaua

SEQ ID NO: 1558488 - RNA, 19 nt, Artificial Sequence
  Description of Artificial Sequence: Synthetic oligonucleotide
cggcccagauagaggcggg

SEQ ID NO: 1558489 - RNA, 19 nt, Artificial Sequence
  Description of Artificial Sequence: Synthetic oligonucleotide
ccucaugugucuguggauu

SEQ ID NO: 1558490 - RNA, 19 nt, Artificial Sequence
  Description of Artificial Sequence: Synthetic oligonucleotide
ggcccagauagaggcggga

SEQ ID NO: 1558491 - RNA, 19 nt, Artificial Sequence
  Description of Artificial Sequence: Synthetic oligonucleotide
ccugaagcgaguccccuuu

SEQ ID NO: 1558492 - RNA, 19 nt, Artificial Sequence
  Description of Artificial Sequence: Synthetic oligonucleotide
cuguggugccgaggaguaa

SEQ ID NO: 1558493 - RNA, 19 nt, Artificial Sequence
  Description of Artificial Sequence: Synthetic oligonucleotide
cugaagcgaguccccuuuu

SEQ ID NO: 1558494 - RNA, 19 nt, Artificial Sequence
  Description of Artificial Sequence: Synthetic oligonucleotide
cagcugauggggccacuuu

SEQ ID NO: 1558495 - RNA, 19 nt, Artificial Sequence
  Description of Artificial Sequence: Synthetic oligonucleotide
cuccagucggauggucccu

SEQ ID NO: 1558496 - RNA, 19 nt, Artificial Sequence
  Description of Artificial Sequence: Synthetic oligonucleotide
ggccuuuauguagcacccu

SEQ ID NO: 1558497 - RNA, 19 nt, Artificial Sequence
  Description of Artificial Sequence: Synthetic oligonucleotide
ggccuccgaugagaaucac

SEQ ID NO: 1558498 - RNA, 19 nt, Artificial Sequence
  Description of Artificial Sequence: Synthetic oligonucleotide
ccccugugccaaggggagc

SEQ ID NO: 1558499 - RNA, 19 nt, Artificial Sequence
  Description of Artificial Sequence: Synthetic oligonucleotide
gcgccccacagugcuuccc

SEQ ID NO: 1558500 - RNA, 19 nt, Artificial Sequence
  Description of Artificial Sequence: Synthetic oligonucleotide
cagccguaguugagggauu

SEQ ID NO: 1558501 - RNA, 19 nt, Artificial Sequence
  Description of Artificial Sequence: Synthetic oligonucleotide
gggacgccugccacaggaa

SEQ ID NO: 1558502 - RNA, 19 nt, Artificial Sequence
  Description of Artificial Sequence: Synthetic oligonucleotide
gccugaagcgaguccccuu

SEQ ID NO: 1558503 - RNA, 19 nt, Artificial Sequence
  Description of Artificial Sequence: Synthetic oligonucleotide
gccguaguugagggauugu

SEQ ID NO: 1558504 - RNA, 19 nt, Artificial Sequence
  Description of Artificial Sequence: Synthetic oligonucleotide
ccucuauauggugcuggau

SEQ ID NO: 1558505 - RNA, 19 nt, Artificial Sequence
  Description of Artificial Sequence: Synthetic oligonucleotide
ccuaaaccacuagcucccu

SEQ ID NO: 1558506 - RNA, 19 nt, Artificial Sequence
  Description of Artificial Sequence: Synthetic oligonucleotide
cggcagcccaggauaguua

SEQ ID NO: 1558507 - RNA, 19 nt, Artificial Sequence
  Description of Artificial Sequence: Synthetic oligonucleotide
gggugacgcuggcgucugu

SEQ ID NO: 1558508 - RNA, 19 nt, Artificial Sequence
  Description of Artificial Sequence: Synthetic oligonucleotide
ccagccguucugggugagu

SEQ ID NO: 1558509 - RNA, 19 nt, Artificial Sequence
  Description of Artificial Sequence: Synthetic oligonucleotide
ccagcgccccacagugcuu

SEQ ID NO: 1558510 - RNA, 19 nt, Artificial Sequence
  Description of Artificial Sequence: Synthetic oligonucleotide
ugaaacaucaucuuuaugg

SEQ ID NO: 1558511 - RNA, 19 nt, Artificial Sequence
  Description of Artificial Sequence: Synthetic oligonucleotide
uguacuuuuaaaauccugg

SEQ ID NO: 1558512 - RNA, 19 nt, Artificial Sequence
  Description of Artificial Sequence: Synthetic oligonucleotide
aauguacuaauucuaguuc

SEQ ID NO: 1558513 - RNA, 19 nt, Artificial Sequence
  Description of Artificial Sequence: Synthetic oligonucleotide
aauaacaccaucaaauguc

SEQ ID NO: 1558514 - RNA, 19 nt, Artificial Sequence
  Description of Artificial Sequence: Synthetic oligonucleotide
ucuucaauuauuuucaagu

SEQ ID NO: 1558515 - RNA, 19 nt, Artificial Sequence
  Description of Artificial Sequence: Synthetic oligonucleotide
aaagcagucagauuaucuc

SEQ ID NO: 1558516 - RNA, 19 nt, Artificial Sequence
  Description of Artificial Sequence: Synthetic oligonucleotide
ugaaguuuaaucuuaacuc

SEQ ID NO: 1558517 - RNA, 19 nt, Artificial Sequence
  Description of Artificial Sequence: Synthetic oligonucleotide
uucuaguucacauucgugg

SEQ ID NO: 1558518 - RNA, 19 nt, Artificial Sequence
  Description of Artificial Sequence: Synthetic oligonucleotide
auuagucgaacuuuugccc

SEQ ID NO: 1558519 - RNA, 19 nt, Artificial Sequence
  Description of Artificial Sequence: Synthetic oligonucleotide
aagcagucagauuaucucc

SEQ ID NO: 1558520 - RNA, 19 nt, Artificial Sequence
  Description of Artificial Sequence: Synthetic oligonucleotide
uuugaugacugaaacauca

SEQ ID NO: 1558521 - RNA, 19 nt, Artificial Sequence
  Description of Artificial Sequence: Synthetic oligonucleotide
uuuaugguguuucagugag

SEQ ID NO: 1558522 - RNA, 19 nt, Artificial Sequence
  Description of Artificial Sequence: Synthetic oligonucleotide
acuaaugucaccuaaucca

SEQ ID NO: 1558523 - RNA, 19 nt, Artificial Sequence
  Description of Artificial Sequence: Synthetic oligonucleotide
ucaauaagaugguagauga

SEQ ID NO: 1558524 - RNA, 19 nt, Artificial Sequence
  Description of Artificial Sequence: Synthetic oligonucleotide
cuuuuaaaauccuggaucc

SEQ ID NO: 1558525 - RNA, 19 nt, Artificial Sequence
  Description of Artificial Sequence: Synthetic oligonucleotide
uucguaacaaacaacuuca

SEQ ID NO: 1558526 - RNA, 19 nt, Artificial Sequence
  Description of Artificial Sequence: Synthetic oligonucleotide
gauuuugugaaguuuaauc

SEQ ID NO: 1558527 - RNA, 19 nt, Artificial Sequence
  Description of Artificial Sequence: Synthetic oligonucleotide
uuucggauuaauuuaaacu

SEQ ID NO: 1558528 - RNA, 19 nt, Artificial Sequence
  Description of Artificial Sequence: Synthetic oligonucleotide
acauuagucgaacuuuugc

SEQ ID NO: 1558529 - RNA, 19 nt, Artificial Sequence
  Description of Artificial Sequence: Synthetic oligonucleotide
uucuucguaacaaacaacu

SEQ ID NO: 1558530 - RNA, 19 nt, Artificial Sequence
  Description of Artificial Sequence: Synthetic oligonucleotide
aaauaacaccaucaaaugu

SEQ ID NO: 1558531 - RNA, 19 nt, Artificial Sequence
  Description of Artificial Sequence: Synthetic oligonucleotide
aaauguacuaauucuaguu

SEQ ID NO: 1558532 - RNA, 19 nt, Artificial Sequence
  Description of Artificial Sequence: Synthetic oligonucleotide
uuuaaugauuauagaaagc

SEQ ID NO: 1558533 - RNA, 19 nt, Artificial Sequence
  Description of Artificial Sequence: Synthetic oligonucleotide
uuacagagaagguagcuag

SEQ ID NO: 1558534 - RNA, 19 nt, Artificial Sequence
  Description of Artificial Sequence: Synthetic oligonucleotide
ucuaaaauaagaccacagu

SEQ ID NO: 1558535 - RNA, 19 nt, Artificial Sequence
  Description of Artificial Sequence: Synthetic oligonucleotide
uccaaaauguacuaauucu

SEQ ID NO: 1558536 - RNA, 19 nt, Artificial Sequence
  Description of Artificial Sequence: Synthetic oligonucleotide
uuauuguacuuuuaaaauc

SEQ ID NO: 1558537 - RNA, 19 nt, Artificial Sequence
  Description of Artificial Sequence: Synthetic oligonucleotide
aaaauguacuaauucuagu

SEQ ID NO: 1558538 - RNA, 19 nt, Artificial Sequence
  Description of Artificial Sequence: Synthetic oligonucleotide
ucuucaauaagaugguaga

SEQ ID NO: 1558539 - RNA, 19 nt, Artificial Sequence
  Description of Artificial Sequence: Synthetic oligonucleotide
ucuaguucacauucguggg

SEQ ID NO: 1558540 - RNA, 19 nt, Artificial Sequence
  Description of Artificial Sequence: Synthetic oligonucleotide
aagccucuauuacuguucc

SEQ ID NO: 1558541 - RNA, 19 nt, Artificial Sequence
  Description of Artificial Sequence: Synthetic oligonucleotide
acauuaaagccauaaauaa

SEQ ID NO: 1558542 - RNA, 19 nt, Artificial Sequence
  Description of Artificial Sequence: Synthetic oligonucleotide
aaaucacguguccauuucg

SEQ ID NO: 1558543 - RNA, 19 nt, Artificial Sequence
  Description of Artificial Sequence: Synthetic oligonucleotide
ucaagauacuucauguaug

SEQ ID NO: 1558544 - RNA, 19 nt, Artificial Sequence
  Description of Artificial Sequence: Synthetic oligonucleotide
aauucuaguucacauucgu

SEQ ID NO: 1558545 - RNA, 19 nt, Artificial Sequence
  Description of Artificial Sequence: Synthetic oligonucleotide
auguaugaccucuuccucc

SEQ ID NO: 1558546 - RNA, 19 nt, Artificial Sequence
  Description of Artificial Sequence: Synthetic oligonucleotide
ugucaccuaauccaaaaug

SEQ ID NO: 1558547 - RNA, 19 nt, Artificial Sequence
  Description of Artificial Sequence: Synthetic oligonucleotide
accuauugggaauuccucc

SEQ ID NO: 1558548 - RNA, 19 nt, Artificial Sequence
  Description of Artificial Sequence: Synthetic oligonucleotide
cauuagucgaacuuuugcc

SEQ ID NO: 1558549 - RNA, 19 nt, Artificial Sequence
  Description of Artificial Sequence: Synthetic oligonucleotide
aacaacuucaucucccacu

SEQ ID NO: 1558550 - RNA, 19 nt, Artificial Sequence
  Description of Artificial Sequence: Synthetic oligonucleotide
uucgugggaagcaucauag

SEQ ID NO: 1558551 - RNA, 19 nt, Artificial Sequence
  Description of Artificial Sequence: Synthetic oligonucleotide
acuuuugcccaacucuucc

SEQ ID NO: 1558552 - RNA, 19 nt, Artificial Sequence
  Description of Artificial Sequence: Synthetic oligonucleotide
uuuccgaugugcuucuugg

SEQ ID NO: 1558553 - RNA, 19 nt, Artificial Sequence
  Description of Artificial Sequence: Synthetic oligonucleotide
uguugcuucugccaaagca

SEQ ID NO: 1558554 - RNA, 19 nt, Artificial Sequence
  Description of Artificial Sequence: Synthetic oligonucleotide
uucaagauacuucauguau

SEQ ID NO: 1558555 - RNA, 19 nt, Artificial Sequence
  Description of Artificial Sequence: Synthetic oligonucleotide
uugaacaucgccaccauaa

SEQ ID NO: 1558556 - RNA, 19 nt, Artificial Sequence
  Description of Artificial Sequence: Synthetic oligonucleotide
uaguaugcaagccucaccu

SEQ ID NO: 1558557 - RNA, 19 nt, Artificial Sequence
  Description of Artificial Sequence: Synthetic oligonucleotide
aacaucaucuuuauggugu

SEQ ID NO: 1558558 - RNA, 19 nt, Artificial Sequence
  Description of Artificial Sequence: Synthetic oligonucleotide
ucuacuuuucuucaucuaa

SEQ ID NO: 1558559 - RNA, 19 nt, Artificial Sequence
  Description of Artificial Sequence: Synthetic oligonucleotide
ucagauucuacuucaagaa

SEQ ID NO: 1558560 - RNA, 19 nt, Artificial Sequence
  Description of Artificial Sequence: Synthetic oligonucleotide
ucuuuaugguguuucagug

SEQ ID NO: 1558561 - RNA, 19 nt, Artificial Sequence
  Description of Artificial Sequence: Synthetic oligonucleotide
uuccacagacccaucaacg

SEQ ID NO: 1558562 - RNA, 19 nt, Artificial Sequence
  Description of Artificial Sequence: Synthetic oligonucleotide
uauagcuguuguaacagga

SEQ ID NO: 1558563 - RNA, 19 nt, Artificial Sequence
  Description of Artificial Sequence: Synthetic oligonucleotide
aagugcuggaccucuagag

SEQ ID NO: 1558564 - RNA, 19 nt, Artificial Sequence
  Description of Artificial Sequence: Synthetic oligonucleotide
auuacuguuccuuccacug

SEQ ID NO: 1558565 - RNA, 19 nt, Artificial Sequence
  Description of Artificial Sequence: Synthetic oligonucleotide
uaaauucuacuuuucuuca

SEQ ID NO: 1558566 - RNA, 19 nt, Artificial Sequence
  Description of Artificial Sequence: Synthetic oligonucleotide
auagguauccagaagguuc

SEQ ID NO: 1558567 - RNA, 19 nt, Artificial Sequence
  Description of Artificial Sequence: Synthetic oligonucleotide
aauaagaugguagaugauu

SEQ ID NO: 1558568 - RNA, 19 nt, Artificial Sequence
  Description of Artificial Sequence: Synthetic oligonucleotide
accuuuaaugauuauagaa

SEQ ID NO: 1558569 - RNA, 19 nt, Artificial Sequence
  Description of Artificial Sequence: Synthetic oligonucleotide
gauuaucucccguaagugc

SEQ ID NO: 1558570 - RNA, 19 nt, Artificial Sequence
  Description of Artificial Sequence: Synthetic oligonucleotide
agcaauuguugcuucugcc

SEQ ID NO: 1558571 - RNA, 19 nt, Artificial Sequence
  Description of Artificial Sequence: Synthetic oligonucleotide
uaauucuaguucacauucg

SEQ ID NO: 1558572 - RNA, 19 nt, Artificial Sequence
  Description of Artificial Sequence: Synthetic oligonucleotide
gaauugagccuuuucuuag

SEQ ID NO: 1558573 - RNA, 19 nt, Artificial Sequence
  Description of Artificial Sequence: Synthetic oligonucleotide
ucuuaacucccuuuugugc

SEQ ID NO: 1558574 - RNA, 19 nt, Artificial Sequence
  Description of Artificial Sequence: Synthetic oligonucleotide
uuuaaaauccuggauccca

SEQ ID NO: 1558575 - RNA, 19 nt, Artificial Sequence
  Description of Artificial Sequence: Synthetic oligonucleotide
uuuugaauuauagcuguug

SEQ ID NO: 1558576 - RNA, 19 nt, Artificial Sequence
  Description of Artificial Sequence: Synthetic oligonucleotide
aaugucaccuaauccaaaa

SEQ ID NO: 1558577 - RNA, 19 nt, Artificial Sequence
  Description of Artificial Sequence: Synthetic oligonucleotide
aaacaucaucuuuauggug

SEQ ID NO: 1558578 - RNA, 19 nt, Artificial Sequence
  Description of Artificial Sequence: Synthetic oligonucleotide
aaugcagacugccauacuu

SEQ ID NO: 1558579 - RNA, 19 nt, Artificial Sequence
  Description of Artificial Sequence: Synthetic oligonucleotide
aaacaacuucaucucccac

SEQ ID NO: 1558580 - RNA, 19 nt, Artificial Sequence
  Description of Artificial Sequence: Synthetic oligonucleotide
auuuucacuaaugucaccu

SEQ ID NO: 1558581 - RNA, 19 nt, Artificial Sequence
  Description of Artificial Sequence: Synthetic oligonucleotide
aagaugguagaugauuuug

SEQ ID NO: 1558582 - RNA, 19 nt, Artificial Sequence
  Description of Artificial Sequence: Synthetic oligonucleotide
cucuuuugaauuauagcug

SEQ ID NO: 1558583 - RNA, 19 nt, Artificial Sequence
  Description of Artificial Sequence: Synthetic oligonucleotide
uccucuuuugaauuauagc

SEQ ID NO: 1558584 - RNA, 19 nt, Artificial Sequence
  Description of Artificial Sequence: Synthetic oligonucleotide
auguacuaauucuaguuca

SEQ ID NO: 1558585 - RNA, 19 nt, Artificial Sequence
  Description of Artificial Sequence: Synthetic oligonucleotide
aauaagaccacaguccauu

SEQ ID NO: 1558586 - RNA, 19 nt, Artificial Sequence
  Description of Artificial Sequence: Synthetic oligonucleotide
uuauagcuguuguaacagg

SEQ ID NO: 1558587 - RNA, 19 nt, Artificial Sequence
  Description of Artificial Sequence: Synthetic oligonucleotide
uccauuucggauuaauuua

SEQ ID NO: 1558588 - RNA, 19 nt, Artificial Sequence
  Description of Artificial Sequence: Synthetic oligonucleotide
ucagauuaucucccguaag

SEQ ID NO: 1558589 - RNA, 19 nt, Artificial Sequence
  Description of Artificial Sequence: Synthetic oligonucleotide
aguuccaacauuuccgaga

SEQ ID NO: 1558590 - RNA, 19 nt, Artificial Sequence
  Description of Artificial Sequence: Synthetic oligonucleotide
aagguagcuaguaugcaag

SEQ ID NO: 1558591 - RNA, 19 nt, Artificial Sequence
  Description of Artificial Sequence: Synthetic oligonucleotide
uguacuaauucuaguucac

SEQ ID NO: 1558592 - RNA, 19 nt, Artificial Sequence
  Description of Artificial Sequence: Synthetic oligonucleotide
uuagucgaacuuuugccca

SEQ ID NO: 1558593 - RNA, 19 nt, Artificial Sequence
  Description of Artificial Sequence: Synthetic oligonucleotide
ucggauuaauuuaaacuuc

SEQ ID NO: 1558594 - RNA, 19 nt, Artificial Sequence
  Description of Artificial Sequence: Synthetic oligonucleotide
aucuuuaugguguuucagu

SEQ ID NO: 1558595 - RNA, 19 nt, Artificial Sequence
  Description of Artificial Sequence: Synthetic oligonucleotide
aggaccucuuccuuugucg

SEQ ID NO: 1558596 - RNA, 19 nt, Artificial Sequence
  Description of Artificial Sequence: Synthetic oligonucleotide
cucaacaacuucucggccc

SEQ ID NO: 1558597 - RNA, 19 nt, Artificial Sequence
  Description of Artificial Sequence: Synthetic oligonucleotide
aaucacguguccauuucgg

SEQ ID NO: 1558598 - RNA, 19 nt, Artificial Sequence
  Description of Artificial Sequence: Synthetic oligonucleotide
uacuaauucuaguucacau

SEQ ID NO: 1558599 - RNA, 19 nt, Artificial Sequence
  Description of Artificial Sequence: Synthetic oligonucleotide
ugccauacuucucacgggc

SEQ ID NO: 1558600 - RNA, 19 nt, Artificial Sequence
  Description of Artificial Sequence: Synthetic oligonucleotide
cacucaacaacuucucggc

SEQ ID NO: 1558601 - RNA, 19 nt, Artificial Sequence
  Description of Artificial Sequence: Synthetic oligonucleotide
aacuucucggcccuuggcu

SEQ ID NO: 1558602 - RNA, 19 nt, Artificial Sequence
  Description of Artificial Sequence: Synthetic oligonucleotide
agcugauugcuggauagcc

SEQ ID NO: 1558603 - RNA, 19 nt, Artificial Sequence
  Description of Artificial Sequence: Synthetic oligonucleotide
ucaccuauugggaauuccu

SEQ ID NO: 1558604 - RNA, 19 nt, Artificial Sequence
  Description of Artificial Sequence: Synthetic oligonucleotide
ucacuaaugucaccuaauc

SEQ ID NO: 1558605 - RNA, 19 nt, Artificial Sequence
  Description of Artificial Sequence: Synthetic oligonucleotide
caccuaauccaaaauguac

SEQ ID NO: 1558606 - RNA, 19 nt, Artificial Sequence
  Description of Artificial Sequence: Synthetic oligonucleotide
acucaacaacuucucggcc

SEQ ID NO: 1558607 - RNA, 19 nt, Artificial Sequence
  Description of Artificial Sequence: Synthetic oligonucleotide
uuucuagcugcccuuuuga

SEQ ID NO: 1558608 - RNA, 19 nt, Artificial Sequence
  Description of Artificial Sequence: Synthetic oligonucleotide
aauugagccuuuucuuaga

SEQ ID NO: 1558609 - RNA, 19 nt, Artificial Sequence
  Description of Artificial Sequence: Synthetic oligonucleotide
ugaugacugaaacaucauc

SEQ ID NO: 1558610 - RNA, 19 nt, Artificial Sequence
  Description of Artificial Sequence: Synthetic oligonucleotide
cacuaaugucaccuaaucc

SEQ ID NO: 1558611 - RNA, 19 nt, Artificial Sequence
  Description of Artificial Sequence: Synthetic oligonucleotide
guauccagaagguucaaga

SEQ ID NO: 1558612 - RNA, 19 nt, Artificial Sequence
  Description of Artificial Sequence: Synthetic oligonucleotide
auuauagaaagcacauuug

SEQ ID NO: 1558613 - RNA, 19 nt, Artificial Sequence
  Description of Artificial Sequence: Synthetic oligonucleotide
uuucacuaaugucaccuaa

SEQ ID NO: 1558614 - RNA, 19 nt, Artificial Sequence
  Description of Artificial Sequence: Synthetic oligonucleotide
auaagccagaagcucuuuc

SEQ ID NO: 1558615 - RNA, 19 nt, Artificial Sequence
  Description of Artificial Sequence: Synthetic oligonucleotide
ucaaaugucucagcaaagu

SEQ ID NO: 1558616 - RNA, 19 nt, Artificial Sequence
  Description of Artificial Sequence: Synthetic oligonucleotide
agguagcuaguaugcaagc

SEQ ID NO: 1558617 - RNA, 19 nt, Artificial Sequence
  Description of Artificial Sequence: Synthetic oligonucleotide
auugagccuuuucuuagag

SEQ ID NO: 1558618 - RNA, 19 nt, Artificial Sequence
  Description of Artificial Sequence: Synthetic oligonucleotide
ugcucaaucuuccuccacu

SEQ ID NO: 1558619 - RNA, 19 nt, Artificial Sequence
  Description of Artificial Sequence: Synthetic oligonucleotide
ugguguuucagugagguua

SEQ ID NO: 1558620 - RNA, 19 nt, Artificial Sequence
  Description of Artificial Sequence: Synthetic oligonucleotide
uaagugcagagacaugcac

SEQ ID NO: 1558621 - RNA, 19 nt, Artificial Sequence
  Description of Artificial Sequence: Synthetic oligonucleotide
uucacacaccacaucauaa

SEQ ID NO: 1558622 - RNA, 19 nt, Artificial Sequence
  Description of Artificial Sequence: Synthetic oligonucleotide
ucccaagaagucuuggcug

SEQ ID NO: 1558623 - RNA, 19 nt, Artificial Sequence
  Description of Artificial Sequence: Synthetic oligonucleotide
cuuuugugcagcugauugc

SEQ ID NO: 1558624 - RNA, 19 nt, Artificial Sequence
  Description of Artificial Sequence: Synthetic oligonucleotide
cuuccuuugucggugaaag

SEQ ID NO: 1558625 - RNA, 19 nt, Artificial Sequence
  Description of Artificial Sequence: Synthetic oligonucleotide
caccauaaucuucacacac

SEQ ID NO: 1558626 - RNA, 19 nt, Artificial Sequence
  Description of Artificial Sequence: Synthetic oligonucleotide
gaugauuuugugaaguuua

SEQ ID NO: 1558627 - RNA, 19 nt, Artificial Sequence
  Description of Artificial Sequence: Synthetic oligonucleotide
ucuagcugcccuuuugaac

SEQ ID NO: 1558628 - RNA, 19 nt, Artificial Sequence
  Description of Artificial Sequence: Synthetic oligonucleotide
ugggaagcaucauagguau

SEQ ID NO: 1558629 - RNA, 19 nt, Artificial Sequence
  Description of Artificial Sequence: Synthetic oligonucleotide
agaagucuuggcuggaacu

SEQ ID NO: 1558630 - RNA, 19 nt, Artificial Sequence
  Description of Artificial Sequence: Synthetic oligonucleotide
ucuagagaggcgugcacca

SEQ ID NO: 1558631 - RNA, 19 nt, Artificial Sequence
  Description of Artificial Sequence: Synthetic oligonucleotide
agaauugagccuuuucuua

SEQ ID NO: 1558632 - RNA, 19 nt, Artificial Sequence
  Description of Artificial Sequence: Synthetic oligonucleotide
agcaacuagaauugagccu

SEQ ID NO: 1558633 - RNA, 19 nt, Artificial Sequence
  Description of Artificial Sequence: Synthetic oligonucleotide
acuaauucuaguucacauu

SEQ ID NO: 1558634 - RNA, 19 nt, Artificial Sequence
  Description of Artificial Sequence: Synthetic oligonucleotide
uagaauugagccuuuucuu

SEQ ID NO: 1558635 - RNA, 19 nt, Artificial Sequence
  Description of Artificial Sequence: Synthetic oligonucleotide
guacuuuuaaaauccugga

SEQ ID NO: 1558636 - RNA, 19 nt, Artificial Sequence
  Description of Artificial Sequence: Synthetic oligonucleotide
ucccacuuuaaauucuacu

SEQ ID NO: 1558637 - RNA, 19 nt, Artificial Sequence
  Description of Artificial Sequence: Synthetic oligonucleotide
gugaaagccucuauuacug

SEQ ID NO: 1558638 - RNA, 19 nt, Artificial Sequence
  Description of Artificial Sequence: Synthetic oligonucleotide
gugcuggaccucuagagag

SEQ ID NO: 1558639 - RNA, 19 nt, Artificial Sequence
  Description of Artificial Sequence: Synthetic oligonucleotide
uuaugguguuucagugagg

SEQ ID NO: 1558640 - RNA, 19 nt, Artificial Sequence
  Description of Artificial Sequence: Synthetic oligonucleotide
uuuugaugacugaaacauc

SEQ ID NO: 1558641 - RNA, 19 nt, Artificial Sequence
  Description of Artificial Sequence: Synthetic oligonucleotide
aagauggcuuccacagacc

SEQ ID NO: 1558642 - RNA, 19 nt, Artificial Sequence
  Description of Artificial Sequence: Synthetic oligonucleotide
aagguucaagauggcuucc

SEQ ID NO: 1558643 - RNA, 19 nt, Artificial Sequence
  Description of Artificial Sequence: Synthetic oligonucleotide
uuuuaaaauccuggauccc

SEQ ID NO: 1558644 - RNA, 19 nt, Artificial Sequence
  Description of Artificial Sequence: Synthetic oligonucleotide
uucaagucaucuuugccuu

SEQ ID NO: 1558645 - RNA, 19 nt, Artificial Sequence
  Description of Artificial Sequence: Synthetic oligonucleotide
agguuaaugagcccuucca

SEQ ID NO: 1558646 - RNA, 19 nt, Artificial Sequence
  Description of Artificial Sequence: Synthetic oligonucleotide
uauccagaagguucaagau

SEQ ID NO: 1558647 - RNA, 19 nt, Artificial Sequence
  Description of Artificial Sequence: Synthetic oligonucleotide
ugugaaguuuaaucuuaac

SEQ ID NO: 1558648 - RNA, 19 nt, Artificial Sequence
  Description of Artificial Sequence: Synthetic oligonucleotide
ucaccuaauccaaaaugua

SEQ ID NO: 1558649 - RNA, 19 nt, Artificial Sequence
  Description of Artificial Sequence: Synthetic oligonucleotide
uuucaagauacuucaugua

SEQ ID NO: 1558650 - RNA, 19 nt, Artificial Sequence
  Description of Artificial Sequence: Synthetic oligonucleotide
ucccuucuguuacagagaa

SEQ ID NO: 1558651 - RNA, 19 nt, Artificial Sequence
  Description of Artificial Sequence: Synthetic oligonucleotide
accuaauccaaaauguacu

SEQ ID NO: 1558652 - RNA, 19 nt, Artificial Sequence
  Description of Artificial Sequence: Synthetic oligonucleotide
ugcuggaccucuagagagg

SEQ ID NO: 1558653 - RNA, 19 nt, Artificial Sequence
  Description of Artificial Sequence: Synthetic oligonucleotide
agauuaucucccguaagug

SEQ ID NO: 1558654 - RNA, 19 nt, Artificial Sequence
  Description of Artificial Sequence: Synthetic oligonucleotide
ugcccuuuugaacucugca

SEQ ID NO: 1558655 - RNA, 19 nt, Artificial Sequence
  Description of Artificial Sequence: Synthetic oligonucleotide
auuuccgagagagcaauug

SEQ ID NO: 1558656 - RNA, 19 nt, Artificial Sequence
  Description of Artificial Sequence: Synthetic oligonucleotide
uagagaggcgugcaccacc

SEQ ID NO: 1558657 - RNA, 19 nt, Artificial Sequence
  Description of Artificial Sequence: Synthetic oligonucleotide
cuaguaugcaagccucacc

SEQ ID NO: 1558658 - RNA, 19 nt, Artificial Sequence
  Description of Artificial Sequence: Synthetic oligonucleotide
ucggugaaagccucuauua

SEQ ID NO: 1558659 - RNA, 19 nt, Artificial Sequence
  Description of Artificial Sequence: Synthetic oligonucleotide
uagcuaguaugcaagccuc

SEQ ID NO: 1558660 - RNA, 19 nt, Artificial Sequence
  Description of Artificial Sequence: Synthetic oligonucleotide
caacauuuccgagagagca

SEQ ID NO: 1558661 - RNA, 19 nt, Artificial Sequence
  Description of Artificial Sequence: Synthetic oligonucleotide
ugggcuuuaagggucuuug

SEQ ID NO: 1558662 - RNA, 19 nt, Artificial Sequence
  Description of Artificial Sequence: Synthetic oligonucleotide
uguuacagagaagguagcu

SEQ ID NO: 1558663 - RNA, 19 nt, Artificial Sequence
  Description of Artificial Sequence: Synthetic oligonucleotide
uucuguuacagagaaggua

SEQ ID NO: 1558664 - RNA, 19 nt, Artificial Sequence
  Description of Artificial Sequence: Synthetic oligonucleotide
acuucucacgggcuuuccg

SEQ ID NO: 1558665 - RNA, 19 nt, Artificial Sequence
  Description of Artificial Sequence: Synthetic oligonucleotide
ugcaagccucaccuauugg

SEQ ID NO: 1558666 - RNA, 19 nt, Artificial Sequence
  Description of Artificial Sequence: Synthetic oligonucleotide
agagacaugcacugcuuga

SEQ ID NO: 1558667 - RNA, 19 nt, Artificial Sequence
  Description of Artificial Sequence: Synthetic oligonucleotide
uugugaaguuuaaucuuaa

SEQ ID NO: 1558668 - RNA, 19 nt, Artificial Sequence
  Description of Artificial Sequence: Synthetic oligonucleotide
augaccucuuccuccaaug

SEQ ID NO: 1558669 - RNA, 19 nt, Artificial Sequence
  Description of Artificial Sequence: Synthetic oligonucleotide
agauucuacuucaagaauu

SEQ ID NO: 1558670 - RNA, 19 nt, Artificial Sequence
  Description of Artificial Sequence: Synthetic oligonucleotide
uccacagacccaucaacgu

SEQ ID NO: 1558671 - RNA, 19 nt, Artificial Sequence
  Description of Artificial Sequence: Synthetic oligonucleotide
ggauaggccucauuaagug

SEQ ID NO: 1558672 - RNA, 19 nt, Artificial Sequence
  Description of Artificial Sequence: Synthetic oligonucleotide
uguuguaacaggaccucuu

SEQ ID NO: 1558673 - RNA, 19 nt, Artificial Sequence
  Description of Artificial Sequence: Synthetic oligonucleotide
aacauuagucgaacuuuug

SEQ ID NO: 1558674 - RNA, 19 nt, Artificial Sequence
  Description of Artificial Sequence: Synthetic oligonucleotide
ccagcaacuagaauugagc

SEQ ID NO: 1558675 - RNA, 19 nt, Artificial Sequence
  Description of Artificial Sequence: Synthetic oligonucleotide
agugcuggaccucuagaga

SEQ ID NO: 1558676 - RNA, 19 nt, Artificial Sequence
  Description of Artificial Sequence: Synthetic oligonucleotide
gaacaucgccaccauaauc

SEQ ID NO: 1558677 - RNA, 19 nt, Artificial Sequence
  Description of Artificial Sequence: Synthetic oligonucleotide
auaacaccaucaaaugucu

SEQ ID NO: 1558678 - RNA, 19 nt, Artificial Sequence
  Description of Artificial Sequence: Synthetic oligonucleotide
aucaaacauuagucgaacu

SEQ ID NO: 1558679 - RNA, 19 nt, Artificial Sequence
  Description of Artificial Sequence: Synthetic oligonucleotide
uggcucagauucuacuuca

SEQ ID NO: 1558680 - RNA, 19 nt, Artificial Sequence
  Description of Artificial Sequence: Synthetic oligonucleotide
uccuugggcuuuaaggguc

SEQ ID NO: 1558681 - RNA, 19 nt, Artificial Sequence
  Description of Artificial Sequence: Synthetic oligonucleotide
aaacauuagucgaacuuuu

SEQ ID NO: 1558682 - RNA, 19 nt, Artificial Sequence
  Description of Artificial Sequence: Synthetic oligonucleotide
uuccuugggcuuuaagggu

SEQ ID NO: 1558683 - RNA, 19 nt, Artificial Sequence
  Description of Artificial Sequence: Synthetic oligonucleotide
uguccauuucggauuaauu

SEQ ID NO: 1558684 - RNA, 19 nt, Artificial Sequence
  Description of Artificial Sequence: Synthetic oligonucleotide
cuagcugcccuuuugaacu

SEQ ID NO: 1558685 - RNA, 19 nt, Artificial Sequence
  Description of Artificial Sequence: Synthetic oligonucleotide
ucgaacuuuugcccaacuc

SEQ ID NO: 1558686 - RNA, 19 nt, Artificial Sequence
  Description of Artificial Sequence: Synthetic oligonucleotide
ucacguguccauuucggau

SEQ ID NO: 1558687 - RNA, 19 nt, Artificial Sequence
  Description of Artificial Sequence: Synthetic oligonucleotide
cuauugggaauuccuccag

SEQ ID NO: 1558688 - RNA, 19 nt, Artificial Sequence
  Description of Artificial Sequence: Synthetic oligonucleotide
ucuucguaacaaacaacuu

SEQ ID NO: 1558689 - RNA, 19 nt, Artificial Sequence
  Description of Artificial Sequence: Synthetic oligonucleotide
cuuuaugguguuucaguga

SEQ ID NO: 1558690 - RNA, 19 nt, Artificial Sequence
  Description of Artificial Sequence: Synthetic oligonucleotide
cuaaugucaccuaauccaa

SEQ ID NO: 1558691 - RNA, 19 nt, Artificial Sequence
  Description of Artificial Sequence: Synthetic oligonucleotide
ccuuuaaugauuauagaaa

SEQ ID NO: 1558692 - RNA, 19 nt, Artificial Sequence
  Description of Artificial Sequence: Synthetic oligonucleotide
agaagguucaagauggcuu

SEQ ID NO: 1558693 - RNA, 19 nt, Artificial Sequence
  Description of Artificial Sequence: Synthetic oligonucleotide
gcuuuaagggucuuuguuc

SEQ ID NO: 1558694 - RNA, 19 nt, Artificial Sequence
  Description of Artificial Sequence: Synthetic oligonucleotide
aacgucaccuuuaaugauu

SEQ ID NO: 1558695 - RNA, 19 nt, Artificial Sequence
  Description of Artificial Sequence: Synthetic oligonucleotide
agucagauuaucucccgua

SEQ ID NO: 1558696 - RNA, 19 nt, Artificial Sequence
  Description of Artificial Sequence: Synthetic oligonucleotide
cacugcuugaacaucgcca

SEQ ID NO: 1558697 - RNA, 19 nt, Artificial Sequence
  Description of Artificial Sequence: Synthetic oligonucleotide
uuugugcagcugauugcug

SEQ ID NO: 1558698 - RNA, 19 nt, Artificial Sequence
  Description of Artificial Sequence: Synthetic oligonucleotide
caucaaacauuagucgaac

SEQ ID NO: 1558699 - RNA, 19 nt, Artificial Sequence
  Description of Artificial Sequence: Synthetic oligonucleotide
agcccuuccaaaucacgug

SEQ ID NO: 1558700 - RNA, 19 nt, Artificial Sequence
  Description of Artificial Sequence: Synthetic oligonucleotide
ugcugcuuaguuccuccug

SEQ ID NO: 1558701 - RNA, 19 nt, Artificial Sequence
  Description of Artificial Sequence: Synthetic oligonucleotide
ugaacaucgccaccauaau

SEQ ID NO: 1558702 - RNA, 19 nt, Artificial Sequence
  Description of Artificial Sequence: Synthetic oligonucleotide
aguuuaaucuuaacucccu

SEQ ID NO: 1558703 - RNA, 19 nt, Artificial Sequence
  Description of Artificial Sequence: Synthetic oligonucleotide
ugcccaacucuucccagca

SEQ ID NO: 1558704 - RNA, 19 nt, Artificial Sequence
  Description of Artificial Sequence: Synthetic oligonucleotide
uuuucacuaaugucaccua

SEQ ID NO: 1558705 - RNA, 19 nt, Artificial Sequence
  Description of Artificial Sequence: Synthetic oligonucleotide
cuauuacuguuccuuccac

SEQ ID NO: 1558706 - RNA, 19 nt, Artificial Sequence
  Description of Artificial Sequence: Synthetic oligonucleotide
cauguaugaccucuuccuc

SEQ ID NO: 1558707 - RNA, 19 nt, Artificial Sequence
  Description of Artificial Sequence: Synthetic oligonucleotide
cuuuaagggucuuuguucu

SEQ ID NO: 1558708 - RNA, 19 nt, Artificial Sequence
  Description of Artificial Sequence: Synthetic oligonucleotide
agacugccauacuucucac

SEQ ID NO: 1558709 - RNA, 19 nt, Artificial Sequence
  Description of Artificial Sequence: Synthetic oligonucleotide
accacacccauuuaucauu

SEQ ID NO: 1558710 - RNA, 19 nt, Artificial Sequence
  Description of Artificial Sequence: Synthetic oligonucleotide
gguagaugauuuugugaag

SEQ ID NO: 1558711 - RNA, 19 nt, Artificial Sequence
  Description of Artificial Sequence: Synthetic oligonucleotide
ucucccacuuuaaauucua

SEQ ID NO: 1558712 - RNA, 19 nt, Artificial Sequence
  Description of Artificial Sequence: Synthetic oligonucleotide
ccucuuuugaauuauagcu

SEQ ID NO: 1558713 - RNA, 19 nt, Artificial Sequence
  Description of Artificial Sequence: Synthetic oligonucleotide
agagcaauuguugcuucug

SEQ ID NO: 1558714 - RNA, 19 nt, Artificial Sequence
  Description of Artificial Sequence: Synthetic oligonucleotide
gaaagcacauuugaguccu

SEQ ID NO: 1558715 - RNA, 19 nt, Artificial Sequence
  Description of Artificial Sequence: Synthetic oligonucleotide
uguggggcaaucugcugcu

SEQ ID NO: 1558716 - RNA, 19 nt, Artificial Sequence
  Description of Artificial Sequence: Synthetic oligonucleotide
caaaucacguguccauuuc

SEQ ID NO: 1558717 - RNA, 19 nt, Artificial Sequence
  Description of Artificial Sequence: Synthetic oligonucleotide
uggcaugcugggauaggcc

SEQ ID NO: 1558718 - RNA, 19 nt, Artificial Sequence
  Description of Artificial Sequence: Synthetic oligonucleotide
cuucacucuuucaggauca

SEQ ID NO: 1558719 - RNA, 19 nt, Artificial Sequence
  Description of Artificial Sequence: Synthetic oligonucleotide
uuugucggugaaagccucu

SEQ ID NO: 1558720 - RNA, 19 nt, Artificial Sequence
  Description of Artificial Sequence: Synthetic oligonucleotide
ucugcucaaucuuccucca

SEQ ID NO: 1558721 - RNA, 19 nt, Artificial Sequence
  Description of Artificial Sequence: Synthetic oligonucleotide
ugcacugcuugaacaucgc

SEQ ID NO: 1558722 - RNA, 19 nt, Artificial Sequence
  Description of Artificial Sequence: Synthetic oligonucleotide
agccaaugauucccacugg

SEQ ID NO: 1558723 - RNA, 19 nt, Artificial Sequence
  Description of Artificial Sequence: Synthetic oligonucleotide
aucuccugcagaagggagg

SEQ ID NO: 1558724 - RNA, 19 nt, Artificial Sequence
  Description of Artificial Sequence: Synthetic oligonucleotide
uaugcaagccucaccuauu

SEQ ID NO: 1558725 - RNA, 19 nt, Artificial Sequence
  Description of Artificial Sequence: Synthetic oligonucleotide
ugauuuugugaaguuuaau

SEQ ID NO: 1558726 - RNA, 19 nt, Artificial Sequence
  Description of Artificial Sequence: Synthetic oligonucleotide
uugagccuuuucuuagagu

SEQ ID NO: 1558727 - RNA, 19 nt, Artificial Sequence
  Description of Artificial Sequence: Synthetic oligonucleotide
uugcccaacucuucccagc

SEQ ID NO: 1558728 - RNA, 19 nt, Artificial Sequence
  Description of Artificial Sequence: Synthetic oligonucleotide
cuuugucggugaaagccuc

SEQ ID NO: 1558729 - RNA, 19 nt, Artificial Sequence
  Description of Artificial Sequence: Synthetic oligonucleotide
caccuauugggaauuccuc

SEQ ID NO: 1558730 - RNA, 19 nt, Artificial Sequence
  Description of Artificial Sequence: Synthetic oligonucleotide
aucacguguccauuucgga

SEQ ID NO: 1558731 - RNA, 19 nt, Artificial Sequence
  Description of Artificial Sequence: Synthetic oligonucleotide
auucuaguucacauucgug

SEQ ID NO: 1558732 - RNA, 19 nt, Artificial Sequence
  Description of Artificial Sequence: Synthetic oligonucleotide
gauucccacuggcaugcug

SEQ ID NO: 1558733 - RNA, 19 nt, Artificial Sequence
  Description of Artificial Sequence: Synthetic oligonucleotide
cuucauguaugaccucuuc

SEQ ID NO: 1558734 - RNA, 19 nt, Artificial Sequence
  Description of Artificial Sequence: Synthetic oligonucleotide
cucuccagccaaugauucc

SEQ ID NO: 1558735 - RNA, 19 nt, Artificial Sequence
  Description of Artificial Sequence: Synthetic oligonucleotide
guagaugauuuugugaagu

SEQ ID NO: 1558736 - RNA, 19 nt, Artificial Sequence
  Description of Artificial Sequence: Synthetic oligonucleotide
auucgugggaagcaucaua

SEQ ID NO: 1558737 - RNA, 19 nt, Artificial Sequence
  Description of Artificial Sequence: Synthetic oligonucleotide
ucguaacaaacaacuucau

SEQ ID NO: 1558738 - RNA, 19 nt, Artificial Sequence
  Description of Artificial Sequence: Synthetic oligonucleotide
guccauuucggauuaauuu

SEQ ID NO: 1558739 - RNA, 19 nt, Artificial Sequence
  Description of Artificial Sequence: Synthetic oligonucleotide
gucaccuaauccaaaaugu

SEQ ID NO: 1558740 - RNA, 19 nt, Artificial Sequence
  Description of Artificial Sequence: Synthetic oligonucleotide
augucaccuaauccaaaau

SEQ ID NO: 1558741 - RNA, 19 nt, Artificial Sequence
  Description of Artificial Sequence: Synthetic oligonucleotide
aacucccuuuugugcagcu

SEQ ID NO: 1558742 - RNA, 19 nt, Artificial Sequence
  Description of Artificial Sequence: Synthetic oligonucleotide
uucuagcugcccuuuugaa

SEQ ID NO: 1558743 - RNA, 19 nt, Artificial Sequence
  Description of Artificial Sequence: Synthetic oligonucleotide
cagagacaugcacugcuug

SEQ ID NO: 1558744 - RNA, 19 nt, Artificial Sequence
  Description of Artificial Sequence: Synthetic oligonucleotide
uccaaugcagacugccaua

SEQ ID NO: 1558745 - RNA, 19 nt, Artificial Sequence
  Description of Artificial Sequence: Synthetic oligonucleotide
acauucgugggaagcauca

SEQ ID NO: 1558746 - RNA, 19 nt, Artificial Sequence
  Description of Artificial Sequence: Synthetic oligonucleotide
caauuguugcuucugccaa

SEQ ID NO: 1558747 - RNA, 19 nt, Artificial Sequence
  Description of Artificial Sequence: Synthetic oligonucleotide
ucucccguaagugcagaga

SEQ ID NO: 1558748 - RNA, 19 nt, Artificial Sequence
  Description of Artificial Sequence: Synthetic oligonucleotide
gucagauuaucucccguaa

SEQ ID NO: 1558749 - RNA, 19 nt, Artificial Sequence
  Description of Artificial Sequence: Synthetic oligonucleotide
cuuggcuggaacuucauuu

SEQ ID NO: 1558750 - RNA, 19 nt, Artificial Sequence
  Description of Artificial Sequence: Synthetic oligonucleotide
gauaggccucauuaagugu

SEQ ID NO: 1558751 - RNA, 19 nt, Artificial Sequence
  Description of Artificial Sequence: Synthetic oligonucleotide
uuguugcuucugccaaagc

SEQ ID NO: 1558752 - RNA, 19 nt, Artificial Sequence
  Description of Artificial Sequence: Synthetic oligonucleotide
gccaaugauucccacuggc

SEQ ID NO: 1558753 - RNA, 19 nt, Artificial Sequence
  Description of Artificial Sequence: Synthetic oligonucleotide
ugcagcugauugcuggaua

SEQ ID NO: 1558754 - RNA, 19 nt, Artificial Sequence
  Description of Artificial Sequence: Synthetic oligonucleotide
agucgaacuuuugcccaac

SEQ ID NO: 1558755 - RNA, 19 nt, Artificial Sequence
  Description of Artificial Sequence: Synthetic oligonucleotide
aacucugcagccagccaca

SEQ ID NO: 1558756 - RNA, 19 nt, Artificial Sequence
  Description of Artificial Sequence: Synthetic oligonucleotide
gccugcauccacauuaaag

SEQ ID NO: 1558757 - RNA, 19 nt, Artificial Sequence
  Description of Artificial Sequence: Synthetic oligonucleotide
aucucccguaagugcagag

SEQ ID NO: 1558758 - RNA, 19 nt, Artificial Sequence
  Description of Artificial Sequence: Synthetic oligonucleotide
gucaccuuuaaugauuaua

SEQ ID NO: 1558759 - RNA, 19 nt, Artificial Sequence
  Description of Artificial Sequence: Synthetic oligonucleotide
cagauuaucucccguaagu

SEQ ID NO: 1558760 - RNA, 19 nt, Artificial Sequence
  Description of Artificial Sequence: Synthetic oligonucleotide
ccgaugugcuucuuggugc

SEQ ID NO: 1558761 - RNA, 19 nt, Artificial Sequence
  Description of Artificial Sequence: Synthetic oligonucleotide
caaagcagucagauuaucu

SEQ ID NO: 1558762 - RNA, 19 nt, Artificial Sequence
  Description of Artificial Sequence: Synthetic oligonucleotide
uagucgaacuuuugcccaa

SEQ ID NO: 1558763 - RNA, 19 nt, Artificial Sequence
  Description of Artificial Sequence: Synthetic oligonucleotide
gguagcuaguaugcaagcc

SEQ ID NO: 1558764 - RNA, 19 nt, Artificial Sequence
  Description of Artificial Sequence: Synthetic oligonucleotide
guacuaauucuaguucaca

SEQ ID NO: 1558765 - RNA, 19 nt, Artificial Sequence
  Description of Artificial Sequence: Synthetic oligonucleotide
uugccugcauccacauuaa

SEQ ID NO: 1558766 - RNA, 19 nt, Artificial Sequence
  Description of Artificial Sequence: Synthetic oligonucleotide
guuacagagaagguagcua

SEQ ID NO: 1558767 - RNA, 19 nt, Artificial Sequence
  Description of Artificial Sequence: Synthetic oligonucleotide
cacauucgugggaagcauc

SEQ ID NO: 1558768 - RNA, 19 nt, Artificial Sequence
  Description of Artificial Sequence: Synthetic oligonucleotide
gcagucagauuaucucccg

SEQ ID NO: 1558769 - RNA, 19 nt, Artificial Sequence
  Description of Artificial Sequence: Synthetic oligonucleotide
uucucacgggcuuuccgau

SEQ ID NO: 1558770 - RNA, 19 nt, Artificial Sequence
  Description of Artificial Sequence: Synthetic oligonucleotide
uuuaagggucuuuguucuu

SEQ ID NO: 1558771 - RNA, 19 nt, Artificial Sequence
  Description of Artificial Sequence: Synthetic oligonucleotide
caccuuuaaugauuauaga

SEQ ID NO: 1558772 - RNA, 19 nt, Artificial Sequence
  Description of Artificial Sequence: Synthetic oligonucleotide
uuccgaugugcuucuuggu

SEQ ID NO: 1558773 - RNA, 19 nt, Artificial Sequence
  Description of Artificial Sequence: Synthetic oligonucleotide
gcugggauaggccucauua

SEQ ID NO: 1558774 - RNA, 19 nt, Artificial Sequence
  Description of Artificial Sequence: Synthetic oligonucleotide
gauucuacuucaagaauuu

SEQ ID NO: 1558775 - RNA, 19 nt, Artificial Sequence
  Description of Artificial Sequence: Synthetic oligonucleotide
agcaucugcuuugucacau

SEQ ID NO: 1558776 - RNA, 19 nt, Artificial Sequence
  Description of Artificial Sequence: Synthetic oligonucleotide
cucccacuuuaaauucuac

SEQ ID NO: 1558777 - RNA, 19 nt, Artificial Sequence
  Description of Artificial Sequence: Synthetic oligonucleotide
gcaaucugcugcuuaguuc

SEQ ID NO: 1558778 - RNA, 19 nt, Artificial Sequence
  Description of Artificial Sequence: Synthetic oligonucleotide
aggucucuccagccaauga

SEQ ID NO: 1558779 - RNA, 19 nt, Artificial Sequence
  Description of Artificial Sequence: Synthetic oligonucleotide
cuuccaaaucacgugucca

SEQ ID NO: 1558780 - RNA, 19 nt, Artificial Sequence
  Description of Artificial Sequence: Synthetic oligonucleotide
uucacucuuucaggaucag

SEQ ID NO: 1558781 - RNA, 19 nt, Artificial Sequence
  Description of Artificial Sequence: Synthetic oligonucleotide
augagcccuuccaaaucac

SEQ ID NO: 1558782 - RNA, 19 nt, Artificial Sequence
  Description of Artificial Sequence: Synthetic oligonucleotide
uggggcaaucugcugcuua

SEQ ID NO: 1558783 - RNA, 19 nt, Artificial Sequence
  Description of Artificial Sequence: Synthetic oligonucleotide
ucacauucgugggaagcau

SEQ ID NO: 1558784 - RNA, 19 nt, Artificial Sequence
  Description of Artificial Sequence: Synthetic oligonucleotide
augauuuugugaaguuuaa

SEQ ID NO: 1558785 - RNA, 19 nt, Artificial Sequence
  Description of Artificial Sequence: Synthetic oligonucleotide
caucgccaccauaaucuuc

SEQ ID NO: 1558786 - RNA, 19 nt, Artificial Sequence
  Description of Artificial Sequence: Synthetic oligonucleotide
gaccucuagagaggcgugc

SEQ ID NO: 1558787 - RNA, 19 nt, Artificial Sequence
  Description of Artificial Sequence: Synthetic oligonucleotide
guaugcaagccucaccuau

SEQ ID NO: 1558788 - RNA, 19 nt, Artificial Sequence
  Description of Artificial Sequence: Synthetic oligonucleotide
uaacucccuuuugugcagc

SEQ ID NO: 1558789 - RNA, 19 nt, Artificial Sequence
  Description of Artificial Sequence: Synthetic oligonucleotide
aguaugcaagccucaccua

SEQ ID NO: 1558790 - RNA, 19 nt, Artificial Sequence
  Description of Artificial Sequence: Synthetic oligonucleotide
cuucacacaccacaucaua

SEQ ID NO: 1558791 - RNA, 19 nt, Artificial Sequence
  Description of Artificial Sequence: Synthetic oligonucleotide
cauuucggauuaauuuaaa

SEQ ID NO: 1558792 - RNA, 19 nt, Artificial Sequence
  Description of Artificial Sequence: Synthetic oligonucleotide
caugcacugcuugaacauc

SEQ ID NO: 1558793 - RNA, 19 nt, Artificial Sequence
  Description of Artificial Sequence: Synthetic oligonucleotide
ugcagaagggaggucucuc

SEQ ID NO: 1558794 - RNA, 19 nt, Artificial Sequence
  Description of Artificial Sequence: Synthetic oligonucleotide
ucccuuuugugcagcugau

SEQ ID NO: 1558795 - RNA, 19 nt, Artificial Sequence
  Description of Artificial Sequence: Synthetic oligonucleotide
ccuuccaaaucacgugucc

SEQ ID NO: 1558796 - RNA, 19 nt, Artificial Sequence
  Description of Artificial Sequence: Synthetic oligonucleotide
caaugauucccacuggcau

SEQ ID NO: 1558797 - RNA, 19 nt, Artificial Sequence
  Description of Artificial Sequence: Synthetic oligonucleotide
uccagccaaugauucccac

SEQ ID NO: 1558798 - RNA, 19 nt, Artificial Sequence
  Description of Artificial Sequence: Synthetic oligonucleotide
cuguaggaucugcuuucag

SEQ ID NO: 1558799 - RNA, 19 nt, Artificial Sequence
  Description of Artificial Sequence: Synthetic oligonucleotide
caaacauuagucgaacuuu

SEQ ID NO: 1558800 - RNA, 19 nt, Artificial Sequence
  Description of Artificial Sequence: Synthetic oligonucleotide
uaggccucauuaaguguuu

SEQ ID NO: 1558801 - RNA, 19 nt, Artificial Sequence
  Description of Artificial Sequence: Synthetic oligonucleotide
cugcuugaacaucgccacc

SEQ ID NO: 1558802 - RNA, 19 nt, Artificial Sequence
  Description of Artificial Sequence: Synthetic oligonucleotide
gguauccagaagguucaag

SEQ ID NO: 1558803 - RNA, 19 nt, Artificial Sequence
  Description of Artificial Sequence: Synthetic oligonucleotide
gaggucucuccagccaaug

SEQ ID NO: 1558804 - RNA, 19 nt, Artificial Sequence
  Description of Artificial Sequence: Synthetic oligonucleotide
uaucucccguaagugcaga

SEQ ID NO: 1558805 - RNA, 19 nt, Artificial Sequence
  Description of Artificial Sequence: Synthetic oligonucleotide
ccaacauuuccgagagagc

SEQ ID NO: 1558806 - RNA, 19 nt, Artificial Sequence
  Description of Artificial Sequence: Synthetic oligonucleotide
ccuauugggaauuccucca

SEQ ID NO: 1558807 - RNA, 19 nt, Artificial Sequence
  Description of Artificial Sequence: Synthetic oligonucleotide
gcuggauagccuugccugc

SEQ ID NO: 1558808 - RNA, 19 nt, Artificial Sequence
  Description of Artificial Sequence: Synthetic oligonucleotide
ggaucccaagaagucuugg

SEQ ID NO: 1558809 - RNA, 19 nt, Artificial Sequence
  Description of Artificial Sequence: Synthetic oligonucleotide
cuucaucucccacuuuaaa

SEQ ID NO: 1558810 - RNA, 19 nt, Artificial Sequence
  Description of Artificial Sequence: Synthetic oligonucleotide
cugggauaggccucauuaa

SEQ ID NO: 1558811 - RNA, 19 nt, Artificial Sequence
  Description of Artificial Sequence: Synthetic oligonucleotide
acguguccauuucggauua

SEQ ID NO: 1558812 - RNA, 19 nt, Artificial Sequence
  Description of Artificial Sequence: Synthetic oligonucleotide
cccaacucuucccagcaac

SEQ ID NO: 1558813 - RNA, 19 nt, Artificial Sequence
  Description of Artificial Sequence: Synthetic oligonucleotide
cguaacaaacaacuucauc

SEQ ID NO: 1558814 - RNA, 19 nt, Artificial Sequence
  Description of Artificial Sequence: Synthetic oligonucleotide
uugucggugaaagccucua

SEQ ID NO: 1558815 - RNA, 19 nt, Artificial Sequence
  Description of Artificial Sequence: Synthetic oligonucleotide
gaccuguaggaucugcuuu

SEQ ID NO: 1558816 - RNA, 19 nt, Artificial Sequence
  Description of Artificial Sequence: Synthetic oligonucleotide
guuuaaucuuaacucccuu

SEQ ID NO: 1558817 - RNA, 19 nt, Artificial Sequence
  Description of Artificial Sequence: Synthetic oligonucleotide
gcaacuagaauugagccuu

SEQ ID NO: 1558818 - RNA, 19 nt, Artificial Sequence
  Description of Artificial Sequence: Synthetic oligonucleotide
cagcugauugcuggauagc

SEQ ID NO: 1558819 - RNA, 19 nt, Artificial Sequence
  Description of Artificial Sequence: Synthetic oligonucleotide
ccauuucggauuaauuuaa

SEQ ID NO: 1558820 - RNA, 19 nt, Artificial Sequence
  Description of Artificial Sequence: Synthetic oligonucleotide
ccuaauccaaaauguacua

SEQ ID NO: 1558821 - RNA, 19 nt, Artificial Sequence
  Description of Artificial Sequence: Synthetic oligonucleotide
gcuggaccucuagagaggc

SEQ ID NO: 1558822 - RNA, 19 nt, Artificial Sequence
  Description of Artificial Sequence: Synthetic oligonucleotide
agcuaguaugcaagccuca

SEQ ID NO: 1558823 - RNA, 19 nt, Artificial Sequence
  Description of Artificial Sequence: Synthetic oligonucleotide
gcuaguaugcaagccucac

SEQ ID NO: 1558824 - RNA, 19 nt, Artificial Sequence
  Description of Artificial Sequence: Synthetic oligonucleotide
ccaaugauucccacuggca

SEQ ID NO: 1558825 - RNA, 19 nt, Artificial Sequence
  Description of Artificial Sequence: Synthetic oligonucleotide
agccucuauuacuguuccu

SEQ ID NO: 1558826 - RNA, 19 nt, Artificial Sequence
  Description of Artificial Sequence: Synthetic oligonucleotide
caguccauuccaguuuuga

SEQ ID NO: 1558827 - RNA, 19 nt, Artificial Sequence
  Description of Artificial Sequence: Synthetic oligonucleotide
caugcugggauaggccuca

SEQ ID NO: 1558828 - RNA, 19 nt, Artificial Sequence
  Description of Artificial Sequence: Synthetic oligonucleotide
gcacugcuugaacaucgcc

SEQ ID NO: 1558829 - RNA, 19 nt, Artificial Sequence
  Description of Artificial Sequence: Synthetic oligonucleotide
cuucuguuacagagaaggu

SEQ ID NO: 1558830 - RNA, 19 nt, Artificial Sequence
  Description of Artificial Sequence: Synthetic oligonucleotide
ugccugcauccacauuaaa

SEQ ID NO: 1558831 - RNA, 19 nt, Artificial Sequence
  Description of Artificial Sequence: Synthetic oligonucleotide
ggaacuuuucucuucccuu

SEQ ID NO: 1558832 - RNA, 19 nt, Artificial Sequence
  Description of Artificial Sequence: Synthetic oligonucleotide
cagauucuacuucaagaau

SEQ ID NO: 1558833 - RNA, 19 nt, Artificial Sequence
  Description of Artificial Sequence: Synthetic oligonucleotide
guaacaggaccucuuccuu

SEQ ID NO: 1558834 - RNA, 19 nt, Artificial Sequence
  Description of Artificial Sequence: Synthetic oligonucleotide
gcuguuguaacaggaccuc

SEQ ID NO: 1558835 - RNA, 19 nt, Artificial Sequence
  Description of Artificial Sequence: Synthetic oligonucleotide
gucggugaaagccucuauu

SEQ ID NO: 1558836 - RNA, 19 nt, Artificial Sequence
  Description of Artificial Sequence: Synthetic oligonucleotide
acgggcuuuccgaugugcu

SEQ ID NO: 1558837 - RNA, 19 nt, Artificial Sequence
  Description of Artificial Sequence: Synthetic oligonucleotide
cacguguccauuucggauu

SEQ ID NO: 1558838 - RNA, 19 nt, Artificial Sequence
  Description of Artificial Sequence: Synthetic oligonucleotide
cuugaacaucgccaccaua

SEQ ID NO: 1558839 - RNA, 19 nt, Artificial Sequence
  Description of Artificial Sequence: Synthetic oligonucleotide
cuccaaugcagacugccau

SEQ ID NO: 1558840 - RNA, 19 nt, Artificial Sequence
  Description of Artificial Sequence: Synthetic oligonucleotide
gugcagagacaugcacugc

SEQ ID NO: 1558841 - RNA, 19 nt, Artificial Sequence
  Description of Artificial Sequence: Synthetic oligonucleotide
cgaacuuuugcccaacucu

SEQ ID NO: 1558842 - RNA, 19 nt, Artificial Sequence
  Description of Artificial Sequence: Synthetic oligonucleotide
ucgccaccauaaucuucac

SEQ ID NO: 1558843 - RNA, 19 nt, Artificial Sequence
  Description of Artificial Sequence: Synthetic oligonucleotide
gaccucuuccuuugucggu

SEQ ID NO: 1558844 - RNA, 19 nt, Artificial Sequence
  Description of Artificial Sequence: Synthetic oligonucleotide
cuggauagccuugccugca

SEQ ID NO: 1558845 - RNA, 19 nt, Artificial Sequence
  Description of Artificial Sequence: Synthetic oligonucleotide
cggugaaagccucuauuac

SEQ ID NO: 1558846 - RNA, 19 nt, Artificial Sequence
  Description of Artificial Sequence: Synthetic oligonucleotide
cagacccaucaacgucacc

SEQ ID NO: 1558847 - RNA, 19 nt, Artificial Sequence
  Description of Artificial Sequence: Synthetic oligonucleotide
cagaagguucaagauggcu

SEQ ID NO: 1558848 - RNA, 19 nt, Artificial Sequence
  Description of Artificial Sequence: Synthetic oligonucleotide
gcuuucaguuccaacauuu

SEQ ID NO: 1558849 - RNA, 19 nt, Artificial Sequence
  Description of Artificial Sequence: Synthetic oligonucleotide
cagcaucugcuuugucaca

SEQ ID NO: 1558850 - RNA, 19 nt, Artificial Sequence
  Description of Artificial Sequence: Synthetic oligonucleotide
gggauaggccucauuaagu

SEQ ID NO: 1558851 - RNA, 19 nt, Artificial Sequence
  Description of Artificial Sequence: Synthetic oligonucleotide
caacgucaccuuuaaugau

SEQ ID NO: 1558852 - RNA, 19 nt, Artificial Sequence
  Description of Artificial Sequence: Synthetic oligonucleotide
cacaguccauuccaguuuu

SEQ ID NO: 1558853 - RNA, 19 nt, Artificial Sequence
  Description of Artificial Sequence: Synthetic oligonucleotide
cggauuaauuuaaacuucu

SEQ ID NO: 1558854 - RNA, 19 nt, Artificial Sequence
  Description of Artificial Sequence: Synthetic oligonucleotide
ucggcccuuggcucagauu

SEQ ID NO: 1558855 - RNA, 19 nt, Artificial Sequence
  Description of Artificial Sequence: Synthetic oligonucleotide
gucgaacuuuugcccaacu

SEQ ID NO: 1558856 - RNA, 19 nt, Artificial Sequence
  Description of Artificial Sequence: Synthetic oligonucleotide
cccuuccaaaucacguguc

SEQ ID NO: 1558857 - RNA, 19 nt, Artificial Sequence
  Description of Artificial Sequence: Synthetic oligonucleotide
gcccuuccaaaucacgugu

SEQ ID NO: 1558858 - RNA, 19 nt, Artificial Sequence
  Description of Artificial Sequence: Synthetic oligonucleotide
cagucagauuaucucccgu

SEQ ID NO: 1558859 - RNA, 19 nt, Artificial Sequence
  Description of Artificial Sequence: Synthetic oligonucleotide
guaugaccucuuccuccaa

SEQ ID NO: 1558860 - RNA, 19 nt, Artificial Sequence
  Description of Artificial Sequence: Synthetic oligonucleotide
ccuccaaugcagacugcca

SEQ ID NO: 1558861 - RNA, 19 nt, Artificial Sequence
  Description of Artificial Sequence: Synthetic oligonucleotide
ccaucaacgucaccuuuaa

SEQ ID NO: 1558862 - RNA, 19 nt, Artificial Sequence
  Description of Artificial Sequence: Synthetic oligonucleotide
ggcaaucugcugcuuaguu

SEQ ID NO: 1558863 - RNA, 19 nt, Artificial Sequence
  Description of Artificial Sequence: Synthetic oligonucleotide
ccauuccaguuuugaugac

SEQ ID NO: 1558864 - RNA, 19 nt, Artificial Sequence
  Description of Artificial Sequence: Synthetic oligonucleotide
gccucuauuacuguuccuu

SEQ ID NO: 1558865 - RNA, 19 nt, Artificial Sequence
  Description of Artificial Sequence: Synthetic oligonucleotide
guguccauuucggauuaau

SEQ ID NO: 1558866 - RNA, 19 nt, Artificial Sequence
  Description of Artificial Sequence: Synthetic oligonucleotide
gcugcccuuuugaacucug

SEQ ID NO: 1558867 - RNA, 19 nt, Artificial Sequence
  Description of Artificial Sequence: Synthetic oligonucleotide
cuguuguaacaggaccucu

SEQ ID NO: 1558868 - RNA, 19 nt, Artificial Sequence
  Description of Artificial Sequence: Synthetic oligonucleotide
ccguaagugcagagacaug

SEQ ID NO: 1558869 - RNA, 19 nt, Artificial Sequence
  Description of Artificial Sequence: Synthetic oligonucleotide
ggauuaauuuaaacuucuu

SEQ ID NO: 1558870 - RNA, 19 nt, Artificial Sequence
  Description of Artificial Sequence: Synthetic oligonucleotide
caaugcagacugccauacu

SEQ ID NO: 1558871 - RNA, 19 nt, Artificial Sequence
  Description of Artificial Sequence: Synthetic oligonucleotide
ggaccuguaggaucugcuu

SEQ ID NO: 1558872 - RNA, 19 nt, Artificial Sequence
  Description of Artificial Sequence: Synthetic oligonucleotide
cugcugcuuaguuccuccu

SEQ ID NO: 1558873 - RNA, 19 nt, Artificial Sequence
  Description of Artificial Sequence: Synthetic oligonucleotide
ccaaaucacguguccauuu

SEQ ID NO: 1558874 - RNA, 19 nt, Artificial Sequence
  Description of Artificial Sequence: Synthetic oligonucleotide
ggcuuuccgaugugcuucu

SEQ ID NO: 1558875 - RNA, 19 nt, Artificial Sequence
  Description of Artificial Sequence: Synthetic oligonucleotide
gugagguuaaugagcccuu

SEQ ID NO: 1558876 - RNA, 19 nt, Artificial Sequence
  Description of Artificial Sequence: Synthetic oligonucleotide
cccguaagugcagagacau

SEQ ID NO: 1558877 - RNA, 19 nt, Artificial Sequence
  Description of Artificial Sequence: Synthetic oligonucleotide
ccagccaaugauucccacu

SEQ ID NO: 1558878 - RNA, 19 nt, Artificial Sequence
  Description of Artificial Sequence: Synthetic oligonucleotide
cauuuccgagagagcaauu

SEQ ID NO: 1558879 - RNA, 19 nt, Artificial Sequence
  Description of Artificial Sequence: Synthetic oligonucleotide
ccuguaggaucugcuuuca

SEQ ID NO: 1558880 - RNA, 19 nt, Artificial Sequence
  Description of Artificial Sequence: Synthetic oligonucleotide
caacuagaauugagccuuu

SEQ ID NO: 1558881 - RNA, 19 nt, Artificial Sequence
  Description of Artificial Sequence: Synthetic oligonucleotide
caucaacgucaccuuuaau

SEQ ID NO: 1558882 - RNA, 19 nt, Artificial Sequence
  Description of Artificial Sequence: Synthetic oligonucleotide
ucucggcccuuggcucaga

SEQ ID NO: 1558883 - RNA, 19 nt, Artificial Sequence
  Description of Artificial Sequence: Synthetic oligonucleotide
cauucgugggaagcaucau

SEQ ID NO: 1558884 - RNA, 19 nt, Artificial Sequence
  Description of Artificial Sequence: Synthetic oligonucleotide
ccucaccuauugggaauuc

SEQ ID NO: 1558885 - RNA, 19 nt, Artificial Sequence
  Description of Artificial Sequence: Synthetic oligonucleotide
ccauacuucucacgggcuu

SEQ ID NO: 1558886 - RNA, 19 nt, Artificial Sequence
  Description of Artificial Sequence: Synthetic oligonucleotide
gcccaacucuucccagcaa

SEQ ID NO: 1558887 - RNA, 19 nt, Artificial Sequence
  Description of Artificial Sequence: Synthetic oligonucleotide
gcaucugcuuugucacauu

SEQ ID NO: 1558888 - RNA, 19 nt, Artificial Sequence
  Description of Artificial Sequence: Synthetic oligonucleotide
cucggcccuuggcucagau

SEQ ID NO: 1558889 - RNA, 19 nt, Artificial Sequence
  Description of Artificial Sequence: Synthetic oligonucleotide
gccucaccuauugggaauu

SEQ ID NO: 1558890 - RNA, 19 nt, Artificial Sequence
  Description of Artificial Sequence: Synthetic oligonucleotide
cccaagugcuggaccucua

SEQ ID NO: 1558891 - RNA, 19 nt, Artificial Sequence
  Description of Artificial Sequence: Synthetic oligonucleotide
guggggcaaucugcugcuu

SEQ ID NO: 1558892 - RNA, 19 nt, Artificial Sequence
  Description of Artificial Sequence: Synthetic oligonucleotide
cgggcuuuccgaugugcuu

SEQ ID NO: 1558893 - RNA, 19 nt, Artificial Sequence
  Description of Artificial Sequence: Synthetic oligonucleotide
cccuuuugugcagcugauu

SEQ ID NO: 1558894 - RNA, 19 nt, Artificial Sequence
  Description of Artificial Sequence: Synthetic oligonucleotide
cgucaccuuuaaugauuau

SEQ ID NO: 1558895 - RNA, 19 nt, Artificial Sequence
  Description of Artificial Sequence: Synthetic oligonucleotide
cguguccauuucggauuaa

SEQ ID NO: 1558896 - RNA, 19 nt, Artificial Sequence
  Description of Artificial Sequence: Synthetic oligonucleotide
cuccagccuguggggcaau

SEQ ID NO: 1558897 - RNA, 19 nt, Artificial Sequence
  Description of Artificial Sequence: Synthetic oligonucleotide
uagacuguggaaaugagcc

SEQ ID NO: 1558898 - RNA, 19 nt, Artificial Sequence
  Description of Artificial Sequence: Synthetic oligonucleotide
guaguagacacucaugucc

SEQ ID NO: 1558899 - RNA, 19 nt, Artificial Sequence
  Description of Artificial Sequence: Synthetic oligonucleotide
agucguaucuguccgaaac

SEQ ID NO: 1558900 - RNA, 19 nt, Artificial Sequence
  Description of Artificial Sequence: Synthetic oligonucleotide
ucuguccgaaacuugaugc

SEQ ID NO: 1558901 - RNA, 19 nt, Artificial Sequence
  Description of Artificial Sequence: Synthetic oligonucleotide
ugucugcucaucaaaaucu

SEQ ID NO: 1558902 - RNA, 19 nt, Artificial Sequence
  Description of Artificial Sequence: Synthetic oligonucleotide
ucaaagugcccacuuggcg

SEQ ID NO: 1558903 - RNA, 19 nt, Artificial Sequence
  Description of Artificial Sequence: Synthetic oligonucleotide
aucaccuuccgaccaaugc

SEQ ID NO: 1558904 - RNA, 19 nt, Artificial Sequence
  Description of Artificial Sequence: Synthetic oligonucleotide
cucacaucggucaucgucg

SEQ ID NO: 1558905 - RNA, 19 nt, Artificial Sequence
  Description of Artificial Sequence: Synthetic oligonucleotide
ugagcgucgguguagaaca

SEQ ID NO: 1558906 - RNA, 19 nt, Artificial Sequence
  Description of Artificial Sequence: Synthetic oligonucleotide
gaaacuugaugcugguggg

SEQ ID NO: 1558907 - RNA, 19 nt, Artificial Sequence
  Description of Artificial Sequence: Synthetic oligonucleotide
ugagugaugauucgaggug

SEQ ID NO: 1558908 - RNA, 19 nt, Artificial Sequence
  Description of Artificial Sequence: Synthetic oligonucleotide
agagugagacuccucuucc

SEQ ID NO: 1558909 - RNA, 19 nt, Artificial Sequence
  Description of Artificial Sequence: Synthetic oligonucleotide
caaaagucguaucuguccg

SEQ ID NO: 1558910 - RNA, 19 nt, Artificial Sequence
  Description of Artificial Sequence: Synthetic oligonucleotide
ucuuugucguaguagacac

SEQ ID NO: 1558911 - RNA, 19 nt, Artificial Sequence
  Description of Artificial Sequence: Synthetic oligonucleotide
agcgcaucuggacagaguc

SEQ ID NO: 1558912 - RNA, 19 nt, Artificial Sequence
  Description of Artificial Sequence: Synthetic oligonucleotide
aaagugcccacuuggcguc

SEQ ID NO: 1558913 - RNA, 19 nt, Artificial Sequence
  Description of Artificial Sequence: Synthetic oligonucleotide
uggaaaugagccccaagcc

SEQ ID NO: 1558914 - RNA, 19 nt, Artificial Sequence
  Description of Artificial Sequence: Synthetic oligonucleotide
gaaccccucacaaaagucg

SEQ ID NO: 1558915 - RNA, 19 nt, Artificial Sequence
  Description of Artificial Sequence: Synthetic oligonucleotide
agauccgaagccucggugg

SEQ ID NO: 1558916 - RNA, 19 nt, Artificial Sequence
  Description of Artificial Sequence: Synthetic oligonucleotide
ucuuaggucggcuagggua

SEQ ID NO: 1558917 - RNA, 19 nt, Artificial Sequence
  Description of Artificial Sequence: Synthetic oligonucleotide
ugacacaacgccccggaag

SEQ ID NO: 1558918 - RNA, 19 nt, Artificial Sequence
  Description of Artificial Sequence: Synthetic oligonucleotide
agggaccuagauccgaagc

SEQ ID NO: 1558919 - RNA, 19 nt, Artificial Sequence
  Description of Artificial Sequence: Synthetic oligonucleotide
ucgguguagaacaccaggc

SEQ ID NO: 1558920 - RNA, 19 nt, Artificial Sequence
  Description of Artificial Sequence: Synthetic oligonucleotide
agacuguggaaaugagccc

SEQ ID NO: 1558921 - RNA, 19 nt, Artificial Sequence
  Description of Artificial Sequence: Synthetic oligonucleotide
ucacaaaagucguaucugu

SEQ ID NO: 1558922 - RNA, 19 nt, Artificial Sequence
  Description of Artificial Sequence: Synthetic oligonucleotide
ugaugauucgagguggcag

SEQ ID NO: 1558923 - RNA, 19 nt, Artificial Sequence
  Description of Artificial Sequence: Synthetic oligonucleotide
uuugucguaguagacacuc

SEQ ID NO: 1558924 - RNA, 19 nt, Artificial Sequence
  Description of Artificial Sequence: Synthetic oligonucleotide
gucgguguagaacaccagg

SEQ ID NO: 1558925 - RNA, 19 nt, Artificial Sequence
  Description of Artificial Sequence: Synthetic oligonucleotide
gcuucagagguccacaagg

SEQ ID NO: 1558926 - RNA, 19 nt, Artificial Sequence
  Description of Artificial Sequence: Synthetic oligonucleotide
uccaccaucuuugucguag

SEQ ID NO: 1558927 - RNA, 19 nt, Artificial Sequence
  Description of Artificial Sequence: Synthetic oligonucleotide
gagugaugauucgaggugg

SEQ ID NO: 1558928 - RNA, 19 nt, Artificial Sequence
  Description of Artificial Sequence: Synthetic oligonucleotide
aauccacgcuugcaucugg

SEQ ID NO: 1558929 - RNA, 19 nt, Artificial Sequence
  Description of Artificial Sequence: Synthetic oligonucleotide
gacuguggaaaugagcccc

SEQ ID NO: 1558930 - RNA, 19 nt, Artificial Sequence
  Description of Artificial Sequence: Synthetic oligonucleotide
uccgguagcugucuuaggu

SEQ ID NO: 1558931 - RNA, 19 nt, Artificial Sequence
  Description of Artificial Sequence: Synthetic oligonucleotide
agugacccugaccaaggac

SEQ ID NO: 1558932 - RNA, 19 nt, Artificial Sequence
  Description of Artificial Sequence: Synthetic oligonucleotide
ucaucguagacuguggaaa

SEQ ID NO: 1558933 - RNA, 19 nt, Artificial Sequence
  Description of Artificial Sequence: Synthetic oligonucleotide
gaugauucgagguggcaga

SEQ ID NO: 1558934 - RNA, 19 nt, Artificial Sequence
  Description of Artificial Sequence: Synthetic oligonucleotide
gucuuaaagggaaagggac

SEQ ID NO: 1558935 - RNA, 19 nt, Artificial Sequence
  Description of Artificial Sequence: Synthetic oligonucleotide
cauccaagaggcuggcugg

SEQ ID NO: 1558936 - RNA, 19 nt, Artificial Sequence
  Description of Artificial Sequence: Synthetic oligonucleotide
cugcggaugacacaacgcc

SEQ ID NO: 1558937 - RNA, 19 nt, Artificial Sequence
  Description of Artificial Sequence: Synthetic oligonucleotide
ugucguaguagacacucau

SEQ ID NO: 1558938 - RNA, 19 nt, Artificial Sequence
  Description of Artificial Sequence: Synthetic oligonucleotide
aaaagucguaucuguccga

SEQ ID NO: 1558939 - RNA, 19 nt, Artificial Sequence
  Description of Artificial Sequence: Synthetic oligonucleotide
ggcacauugccauagcgcc

SEQ ID NO: 1558940 - RNA, 19 nt, Artificial Sequence
  Description of Artificial Sequence: Synthetic oligonucleotide
gauccgaagccucgguggg

SEQ ID NO: 1558941 - RNA, 19 nt, Artificial Sequence
  Description of Artificial Sequence: Synthetic oligonucleotide
uacucgaagggcacauugc

SEQ ID NO: 1558942 - RNA, 19 nt, Artificial Sequence
  Description of Artificial Sequence: Synthetic oligonucleotide
uguggaaaugagccccaag

SEQ ID NO: 1558943 - RNA, 19 nt, Artificial Sequence
  Description of Artificial Sequence: Synthetic oligonucleotide
gcaccuacuacccaggccc

SEQ ID NO: 1558944 - RNA, 19 nt, Artificial Sequence
  Description of Artificial Sequence: Synthetic oligonucleotide
uucagagguccacaaggca

SEQ ID NO: 1558945 - RNA, 19 nt, Artificial Sequence
  Description of Artificial Sequence: Synthetic oligonucleotide
ugcggaugacacaacgccc

SEQ ID NO: 1558946 - RNA, 19 nt, Artificial Sequence
  Description of Artificial Sequence: Synthetic oligonucleotide
cuuccgacucuguaauucc

SEQ ID NO: 1558947 - RNA, 19 nt, Artificial Sequence
  Description of Artificial Sequence: Synthetic oligonucleotide
augguaccccaauccacgc

SEQ ID NO: 1558948 - RNA, 19 nt, Artificial Sequence
  Description of Artificial Sequence: Synthetic oligonucleotide
uggaaccccucacaaaagu

SEQ ID NO: 1558949 - RNA, 19 nt, Artificial Sequence
  Description of Artificial Sequence: Synthetic oligonucleotide
gacagagccucacucgggc

SEQ ID NO: 1558950 - RNA, 19 nt, Artificial Sequence
  Description of Artificial Sequence: Synthetic oligonucleotide
cauagcgccgggaggagcc

SEQ ID NO: 1558951 - RNA, 19 nt, Artificial Sequence
  Description of Artificial Sequence: Synthetic oligonucleotide
cucacucgggcuccgaggg

SEQ ID NO: 1558952 - RNA, 19 nt, Artificial Sequence
  Description of Artificial Sequence: Synthetic oligonucleotide
aucuguccgaaacuugaug

SEQ ID NO: 1558953 - RNA, 19 nt, Artificial Sequence
  Description of Artificial Sequence: Synthetic oligonucleotide
caccuuccgaccaaugccc

SEQ ID NO: 1558954 - RNA, 19 nt, Artificial Sequence
  Description of Artificial Sequence: Synthetic oligonucleotide
uagauccgaagccucggug

SEQ ID NO: 1558955 - RNA, 19 nt, Artificial Sequence
  Description of Artificial Sequence: Synthetic oligonucleotide
gcucaaagugcccacuugg

SEQ ID NO: 1558956 - RNA, 19 nt, Artificial Sequence
  Description of Artificial Sequence: Synthetic oligonucleotide
aagggaccuagauccgaag

SEQ ID NO: 1558957 - RNA, 19 nt, Artificial Sequence
  Description of Artificial Sequence: Synthetic oligonucleotide
ucggcuaggguaaaagcuu

SEQ ID NO: 1558958 - RNA, 19 nt, Artificial Sequence
  Description of Artificial Sequence: Synthetic oligonucleotide
uguccgaaacuugaugcug

SEQ ID NO: 1558959 - RNA, 19 nt, Artificial Sequence
  Description of Artificial Sequence: Synthetic oligonucleotide
cacgcuugcaucuggggug

SEQ ID NO: 1558960 - RNA, 19 nt, Artificial Sequence
  Description of Artificial Sequence: Synthetic oligonucleotide
gaugacacaacgccccgga

SEQ ID NO: 1558961 - RNA, 19 nt, Artificial Sequence
  Description of Artificial Sequence: Synthetic oligonucleotide
ggagucucugcuccaagcg

SEQ ID NO: 1558962 - RNA, 19 nt, Artificial Sequence
  Description of Artificial Sequence: Synthetic oligonucleotide
uuccgggucuuaaagggaa

SEQ ID NO: 1558963 - RNA, 19 nt, Artificial Sequence
  Description of Artificial Sequence: Synthetic oligonucleotide
cacauugccauagcgccgg

SEQ ID NO: 1558964 - RNA, 19 nt, Artificial Sequence
  Description of Artificial Sequence: Synthetic oligonucleotide
agcuucauucucugccuuc

SEQ ID NO: 1558965 - RNA, 19 nt, Artificial Sequence
  Description of Artificial Sequence: Synthetic oligonucleotide
gaguacaugcgcagcagcc

SEQ ID NO: 1558966 - RNA, 19 nt, Artificial Sequence
  Description of Artificial Sequence: Synthetic oligonucleotide
uucgagguggcagacggca

SEQ ID NO: 1558967 - RNA, 19 nt, Artificial Sequence
  Description of Artificial Sequence: Synthetic oligonucleotide
acccugaccaaggacagag

SEQ ID NO: 1558968 - RNA, 19 nt, Artificial Sequence
  Description of Artificial Sequence: Synthetic oligonucleotide
cuccugccagaacugagcg

SEQ ID NO: 1558969 - RNA, 19 nt, Artificial Sequence
  Description of Artificial Sequence: Synthetic oligonucleotide
guagacuguggaaaugagc

SEQ ID NO: 1558970 - RNA, 19 nt, Artificial Sequence
  Description of Artificial Sequence: Synthetic oligonucleotide
aaagucguaucuguccgaa

SEQ ID NO: 1558971 - RNA, 19 nt, Artificial Sequence
  Description of Artificial Sequence: Synthetic oligonucleotide
aucuuugucguaguagaca

SEQ ID NO: 1558972 - RNA, 19 nt, Artificial Sequence
  Description of Artificial Sequence: Synthetic oligonucleotide
uccacgcuugcaucugggg

SEQ ID NO: 1558973 - RNA, 19 nt, Artificial Sequence
  Description of Artificial Sequence: Synthetic oligonucleotide
cuguaauuccuuccggguc

SEQ ID NO: 1558974 - RNA, 19 nt, Artificial Sequence
  Description of Artificial Sequence: Synthetic oligonucleotide
agagucacgggcaucuuug

SEQ ID NO: 1558975 - RNA, 19 nt, Artificial Sequence
  Description of Artificial Sequence: Synthetic oligonucleotide
ucuccaccaucuuugucgu

SEQ ID NO: 1558976 - RNA, 19 nt, Artificial Sequence
  Description of Artificial Sequence: Synthetic oligonucleotide
gucacguccucaugcagug

SEQ ID NO: 1558977 - RNA, 19 nt, Artificial Sequence
  Description of Artificial Sequence: Synthetic oligonucleotide
caucuuugucguaguagac

SEQ ID NO: 1558978 - RNA, 19 nt, Artificial Sequence
  Description of Artificial Sequence: Synthetic oligonucleotide
ggggauuuccucucccucg

SEQ ID NO: 1558979 - RNA, 19 nt, Artificial Sequence
  Description of Artificial Sequence: Synthetic oligonucleotide
ugccuuccgacucuguaau

SEQ ID NO: 1558980 - RNA, 19 nt, Artificial Sequence
  Description of Artificial Sequence: Synthetic oligonucleotide
aaugccccuugguguggcg

SEQ ID NO: 1558981 - RNA, 19 nt, Artificial Sequence
  Description of Artificial Sequence: Synthetic oligonucleotide
ucgggagcggagccgaggc

SEQ ID NO: 1558982 - RNA, 19 nt, Artificial Sequence
  Description of Artificial Sequence: Synthetic oligonucleotide
agcugagugaugauucgag

SEQ ID NO: 1558983 - RNA, 19 nt, Artificial Sequence
  Description of Artificial Sequence: Synthetic oligonucleotide
uccgcucccugccugguca

SEQ ID NO: 1558984 - RNA, 19 nt, Artificial Sequence
  Description of Artificial Sequence: Synthetic oligonucleotide
agagccucacucgggcucc

SEQ ID NO: 1558985 - RNA, 19 nt, Artificial Sequence
  Description of Artificial Sequence: Synthetic oligonucleotide
ucaggcaccccggagcacc

SEQ ID NO: 1558986 - RNA, 19 nt, Artificial Sequence
  Description of Artificial Sequence: Synthetic oligonucleotide
gggaccuagauccgaagcc

SEQ ID NO: 1558987 - RNA, 19 nt, Artificial Sequence
  Description of Artificial Sequence: Synthetic oligonucleotide
ugccauagcgccgggagga

SEQ ID NO: 1558988 - RNA, 19 nt, Artificial Sequence
  Description of Artificial Sequence: Synthetic oligonucleotide
cuuaggucggcuaggguaa

SEQ ID NO: 1558989 - RNA, 19 nt, Artificial Sequence
  Description of Artificial Sequence: Synthetic oligonucleotide
uggucacguccucaugcag

SEQ ID NO: 1558990 - RNA, 19 nt, Artificial Sequence
  Description of Artificial Sequence: Synthetic oligonucleotide
augauucgagguggcagac

SEQ ID NO: 1558991 - RNA, 19 nt, Artificial Sequence
  Description of Artificial Sequence: Synthetic oligonucleotide
ucucccucggcaguguaca

SEQ ID NO: 1558992 - RNA, 19 nt, Artificial Sequence
  Description of Artificial Sequence: Synthetic oligonucleotide
ccugaccaaggacagagcc

SEQ ID NO: 1558993 - RNA, 19 nt, Artificial Sequence
  Description of Artificial Sequence: Synthetic oligonucleotide
aaccccucacaaaagucgu

SEQ ID NO: 1558994 - RNA, 19 nt, Artificial Sequence
  Description of Artificial Sequence: Synthetic oligonucleotide
agcgucgguguagaacacc

SEQ ID NO: 1558995 - RNA, 19 nt, Artificial Sequence
  Description of Artificial Sequence: Synthetic oligonucleotide
ucacgggcaucuuugucuc

SEQ ID NO: 1558996 - RNA, 19 nt, Artificial Sequence
  Description of Artificial Sequence: Synthetic oligonucleotide
uugucguaguagacacuca

SEQ ID NO: 1558997 - RNA, 19 nt, Artificial Sequence
  Description of Artificial Sequence: Synthetic oligonucleotide
uccgaggcacagcuggaac

SEQ ID NO: 1558998 - RNA, 19 nt, Artificial Sequence
  Description of Artificial Sequence: Synthetic oligonucleotide
gaaguccgcucccugccug

SEQ ID NO: 1558999 - RNA, 19 nt, Artificial Sequence
  Description of Artificial Sequence: Synthetic oligonucleotide
gaacugagcgucgguguag

SEQ ID NO: 1559000 - RNA, 19 nt, Artificial Sequence
  Description of Artificial Sequence: Synthetic oligonucleotide
ggcguccugucacagagcc

SEQ ID NO: 1559001 - RNA, 19 nt, Artificial Sequence
  Description of Artificial Sequence: Synthetic oligonucleotide
aaagggaccuagauccgaa

SEQ ID NO: 1559002 - RNA, 19 nt, Artificial Sequence
  Description of Artificial Sequence: Synthetic oligonucleotide
aagacccgcaggggcgugc

SEQ ID NO: 1559003 - RNA, 19 nt, Artificial Sequence
  Description of Artificial Sequence: Synthetic oligonucleotide
acgcuugcaucuggggugc

SEQ ID NO: 1559004 - RNA, 19 nt, Artificial Sequence
  Description of Artificial Sequence: Synthetic oligonucleotide
gggauuuccucucccucgg

SEQ ID NO: 1559005 - RNA, 19 nt, Artificial Sequence
  Description of Artificial Sequence: Synthetic oligonucleotide
ucggcaguguacacacgcu

SEQ ID NO: 1559006 - RNA, 19 nt, Artificial Sequence
  Description of Artificial Sequence: Synthetic oligonucleotide
gcuggaaccccucacaaaa

SEQ ID NO: 1559007 - RNA, 19 nt, Artificial Sequence
  Description of Artificial Sequence: Synthetic oligonucleotide
caagacccaggcuguuucc

SEQ ID NO: 1559008 - RNA, 19 nt, Artificial Sequence
  Description of Artificial Sequence: Synthetic oligonucleotide
aacugagcgucgguguaga

SEQ ID NO: 1559009 - RNA, 19 nt, Artificial Sequence
  Description of Artificial Sequence: Synthetic oligonucleotide
accccggagcaccuacuac

SEQ ID NO: 1559010 - RNA, 19 nt, Artificial Sequence
  Description of Artificial Sequence: Synthetic oligonucleotide
accuagauccgaagccucg

SEQ ID NO: 1559011 - RNA, 19 nt, Artificial Sequence
  Description of Artificial Sequence: Synthetic oligonucleotide
ucguaucuguccgaaacuu

SEQ ID NO: 1559012 - RNA, 19 nt, Artificial Sequence
  Description of Artificial Sequence: Synthetic oligonucleotide
cacauugccauugggcauc

SEQ ID NO: 1559013 - RNA, 19 nt, Artificial Sequence
  Description of Artificial Sequence: Synthetic oligonucleotide
aggucggcuaggguaaaag

SEQ ID NO: 1559014 - RNA, 19 nt, Artificial Sequence
  Description of Artificial Sequence: Synthetic oligonucleotide
uacuacccaggcccuggcc

SEQ ID NO: 1559015 - RNA, 19 nt, Artificial Sequence
  Description of Artificial Sequence: Synthetic oligonucleotide
uccugucacagagccaucu

SEQ ID NO: 1559016 - RNA, 19 nt, Artificial Sequence
  Description of Artificial Sequence: Synthetic oligonucleotide
ugguggauucagcuccggu

SEQ ID NO: 1559017 - RNA, 19 nt, Artificial Sequence
  Description of Artificial Sequence: Synthetic oligonucleotide
gaagccucggugggcagcc

SEQ ID NO: 1559018 - RNA, 19 nt, Artificial Sequence
  Description of Artificial Sequence: Synthetic oligonucleotide
uccgaccaaugccccuugg

SEQ ID NO: 1559019 - RNA, 19 nt, Artificial Sequence
  Description of Artificial Sequence: Synthetic oligonucleotide
agaacugagcgucggugua

SEQ ID NO: 1559020 - RNA, 19 nt, Artificial Sequence
  Description of Artificial Sequence: Synthetic oligonucleotide
gaaagggaccuagauccga

SEQ ID NO: 1559021 - RNA, 19 nt, Artificial Sequence
  Description of Artificial Sequence: Synthetic oligonucleotide
uccgagggucucuccgagg

SEQ ID NO: 1559022 - RNA, 19 nt, Artificial Sequence
  Description of Artificial Sequence: Synthetic oligonucleotide
ugcccaaauggcuguaguu

SEQ ID NO: 1559023 - RNA, 19 nt, Artificial Sequence
  Description of Artificial Sequence: Synthetic oligonucleotide
ugcagcugagugacccuga

SEQ ID NO: 1559024 - RNA, 19 nt, Artificial Sequence
  Description of Artificial Sequence: Synthetic oligonucleotide
agacccaggcuguuuccug

SEQ ID NO: 1559025 - RNA, 19 nt, Artificial Sequence
  Description of Artificial Sequence: Synthetic oligonucleotide
cugagcgucgguguagaac

SEQ ID NO: 1559026 - RNA, 19 nt, Artificial Sequence
  Description of Artificial Sequence: Synthetic oligonucleotide
uccgaagccucggugggca

SEQ ID NO: 1559027 - RNA, 19 nt, Artificial Sequence
  Description of Artificial Sequence: Synthetic oligonucleotide
cuggcgucggagcaaggac

SEQ ID NO: 1559028 - RNA, 19 nt, Artificial Sequence
  Description of Artificial Sequence: Synthetic oligonucleotide
uaccccaauccacgcuugc

SEQ ID NO: 1559029 - RNA, 19 nt, Artificial Sequence
  Description of Artificial Sequence: Synthetic oligonucleotide
gucguaguagacacucaug

SEQ ID NO: 1559030 - RNA, 19 nt, Artificial Sequence
  Description of Artificial Sequence: Synthetic oligonucleotide
ggucggcuaggguaaaagc

SEQ ID NO: 1559031 - RNA, 19 nt, Artificial Sequence
  Description of Artificial Sequence: Synthetic oligonucleotide
uuuuguccuggggcagagg

SEQ ID NO: 1559032 - RNA, 19 nt, Artificial Sequence
  Description of Artificial Sequence: Synthetic oligonucleotide
augccccuugguguggcgc

SEQ ID NO: 1559033 - RNA, 19 nt, Artificial Sequence
  Description of Artificial Sequence: Synthetic oligonucleotide
cugucuuaggucggcuagg

SEQ ID NO: 1559034 - RNA, 19 nt, Artificial Sequence
  Description of Artificial Sequence: Synthetic oligonucleotide
aucguagacuguggaaaug

SEQ ID NO: 1559035 - RNA, 19 nt, Artificial Sequence
  Description of Artificial Sequence: Synthetic oligonucleotide
aagucguaucuguccgaaa

SEQ ID NO: 1559036 - RNA, 19 nt, Artificial Sequence
  Description of Artificial Sequence: Synthetic oligonucleotide
gagcaccuacuacccaggc

SEQ ID NO: 1559037 - RNA, 19 nt, Artificial Sequence
  Description of Artificial Sequence: Synthetic oligonucleotide
gagccugcggaugacacaa

SEQ ID NO: 1559038 - RNA, 19 nt, Artificial Sequence
  Description of Artificial Sequence: Synthetic oligonucleotide
agacggcaggcccggauca

SEQ ID NO: 1559039 - RNA, 19 nt, Artificial Sequence
  Description of Artificial Sequence: Synthetic oligonucleotide
guagcugucuuaggucggc

SEQ ID NO: 1559040 - RNA, 19 nt, Artificial Sequence
  Description of Artificial Sequence: Synthetic oligonucleotide
cgguagcugucuuaggucg

SEQ ID NO: 1559041 - RNA, 19 nt, Artificial Sequence
  Description of Artificial Sequence: Synthetic oligonucleotide
gccugcggaugacacaacg

SEQ ID NO: 1559042 - RNA, 19 nt, Artificial Sequence
  Description of Artificial Sequence: Synthetic oligonucleotide
caucacggagucucugcuc

SEQ ID NO: 1559043 - RNA, 19 nt, Artificial Sequence
  Description of Artificial Sequence: Synthetic oligonucleotide
accuuccgaccaaugcccc

SEQ ID NO: 1559044 - RNA, 19 nt, Artificial Sequence
  Description of Artificial Sequence: Synthetic oligonucleotide
cucaucguagacuguggaa

SEQ ID NO: 1559045 - RNA, 19 nt, Artificial Sequence
  Description of Artificial Sequence: Synthetic oligonucleotide
auucgagguggcagacggc

SEQ ID NO: 1559046 - RNA, 19 nt, Artificial Sequence
  Description of Artificial Sequence: Synthetic oligonucleotide
cugccagaacugagcgucg

SEQ ID NO: 1559047 - RNA, 19 nt, Artificial Sequence
  Description of Artificial Sequence: Synthetic oligonucleotide
acugguggauucagcuccg

SEQ ID NO: 1559048 - RNA, 19 nt, Artificial Sequence
  Description of Artificial Sequence: Synthetic oligonucleotide
uuccgaccaaugccccuug

SEQ ID NO: 1559049 - RNA, 19 nt, Artificial Sequence
  Description of Artificial Sequence: Synthetic oligonucleotide
aggggcgugcccacauugc

SEQ ID NO: 1559050 - RNA, 19 nt, Artificial Sequence
  Description of Artificial Sequence: Synthetic oligonucleotide
cuuccgggucuuaaaggga

SEQ ID NO: 1559051 - RNA, 19 nt, Artificial Sequence
  Description of Artificial Sequence: Synthetic oligonucleotide
gucggcuaggguaaaagcu

SEQ ID NO: 1559052 - RNA, 19 nt, Artificial Sequence
  Description of Artificial Sequence: Synthetic oligonucleotide
uugcaucuggggugcuggc

SEQ ID NO: 1559053 - RNA, 19 nt, Artificial Sequence
  Description of Artificial Sequence: Synthetic oligonucleotide
uccgggucuuaaagggaaa

SEQ ID NO: 1559054 - RNA, 19 nt, Artificial Sequence
  Description of Artificial Sequence: Synthetic oligonucleotide
ccugcggaugacacaacgc

SEQ ID NO: 1559055 - RNA, 19 nt, Artificial Sequence
  Description of Artificial Sequence: Synthetic oligonucleotide
ugggcagccggagccugcg

SEQ ID NO: 1559056 - RNA, 19 nt, Artificial Sequence
  Description of Artificial Sequence: Synthetic oligonucleotide
ccccggagcaccuacuacc

SEQ ID NO: 1559057 - RNA, 19 nt, Artificial Sequence
  Description of Artificial Sequence: Synthetic oligonucleotide
ugcagugcuucauggcguu

SEQ ID NO: 1559058 - RNA, 19 nt, Artificial Sequence
  Description of Artificial Sequence: Synthetic oligonucleotide
cuacuacccaggcccuggc

SEQ ID NO: 1559059 - RNA, 19 nt, Artificial Sequence
  Description of Artificial Sequence: Synthetic oligonucleotide
agcuggaaccccucacaaa

SEQ ID NO: 1559060 - RNA, 19 nt, Artificial Sequence
  Description of Artificial Sequence: Synthetic oligonucleotide
ucccucggcaguguacaca

SEQ ID NO: 1559061 - RNA, 19 nt, Artificial Sequence
  Description of Artificial Sequence: Synthetic oligonucleotide
ucguacucgaagggcacau

SEQ ID NO: 1559062 - RNA, 19 nt, Artificial Sequence
  Description of Artificial Sequence: Synthetic oligonucleotide
uggaucuuccaagcggguu

SEQ ID NO: 1559063 - RNA, 19 nt, Artificial Sequence
  Description of Artificial Sequence: Synthetic oligonucleotide
gcggaugacacaacgcccc

SEQ ID NO: 1559064 - RNA, 19 nt, Artificial Sequence
  Description of Artificial Sequence: Synthetic oligonucleotide
gcaagacccaggcuguuuc

SEQ ID NO: 1559065 - RNA, 19 nt, Artificial Sequence
  Description of Artificial Sequence: Synthetic oligonucleotide
auccacgcuugcaucuggg

SEQ ID NO: 1559066 - RNA, 19 nt, Artificial Sequence
  Description of Artificial Sequence: Synthetic oligonucleotide
cacggucuccgaguccucg

SEQ ID NO: 1559067 - RNA, 19 nt, Artificial Sequence
  Description of Artificial Sequence: Synthetic oligonucleotide
cuccgagggucucuccgag

SEQ ID NO: 1559068 - RNA, 19 nt, Artificial Sequence
  Description of Artificial Sequence: Synthetic oligonucleotide
cuggucacguccucaugca

SEQ ID NO: 1559069 - RNA, 19 nt, Artificial Sequence
  Description of Artificial Sequence: Synthetic oligonucleotide
caauccacgcuugcaucug

SEQ ID NO: 1559070 - RNA, 19 nt, Artificial Sequence
  Description of Artificial Sequence: Synthetic oligonucleotide
agccggucgggagcggagc

SEQ ID NO: 1559071 - RNA, 19 nt, Artificial Sequence
  Description of Artificial Sequence: Synthetic oligonucleotide
gagguccacaaggcaagac

SEQ ID NO: 1559072 - RNA, 19 nt, Artificial Sequence
  Description of Artificial Sequence: Synthetic oligonucleotide
ccgagggucucuccgaggc

SEQ ID NO: 1559073 - RNA, 19 nt, Artificial Sequence
  Description of Artificial Sequence: Synthetic oligonucleotide
gucguaucuguccgaaacu

SEQ ID NO: 1559074 - RNA, 19 nt, Artificial Sequence
  Description of Artificial Sequence: Synthetic oligonucleotide
acgucccagucaucggcug

SEQ ID NO: 1559075 - RNA, 19 nt, Artificial Sequence
  Description of Artificial Sequence: Synthetic oligonucleotide
cucggaaguccgcucccug

SEQ ID NO: 1559076 - RNA, 19 nt, Artificial Sequence
  Description of Artificial Sequence: Synthetic oligonucleotide
gcuccgguagcugucuuag

SEQ ID NO: 1559077 - RNA, 19 nt, Artificial Sequence
  Description of Artificial Sequence: Synthetic oligonucleotide
cucggugggcagccggagc

SEQ ID NO: 1559078 - RNA, 19 nt, Artificial Sequence
  Description of Artificial Sequence: Synthetic oligonucleotide
ggaaccccucacaaaaguc

SEQ ID NO: 1559079 - RNA, 19 nt, Artificial Sequence
  Description of Artificial Sequence: Synthetic oligonucleotide
ccacgucccagucaucggc

SEQ ID NO: 1559080 - RNA, 19 nt, Artificial Sequence
  Description of Artificial Sequence: Synthetic oligonucleotide
uggcgcucaaagugcccac

SEQ ID NO: 1559081 - RNA, 19 nt, Artificial Sequence
  Description of Artificial Sequence: Synthetic oligonucleotide
gagugagacuccucuuccu

SEQ ID NO: 1559082 - RNA, 19 nt, Artificial Sequence
  Description of Artificial Sequence: Synthetic oligonucleotide
gucgggagcggagccgagg

SEQ ID NO: 1559083 - RNA, 19 nt, Artificial Sequence
  Description of Artificial Sequence: Synthetic oligonucleotide
gcacauugccauagcgccg

SEQ ID NO: 1559084 - RNA, 19 nt, Artificial Sequence
  Description of Artificial Sequence: Synthetic oligonucleotide
ggggcgugcccacauugcc

SEQ ID NO: 1559085 - RNA, 19 nt, Artificial Sequence
  Description of Artificial Sequence: Synthetic oligonucleotide
cagaacugagcgucggugu

SEQ ID NO: 1559086 - RNA, 19 nt, Artificial Sequence
  Description of Artificial Sequence: Synthetic oligonucleotide
gggagcggagccgaggccc

SEQ ID NO: 1559087 - RNA, 19 nt, Artificial Sequence
  Description of Artificial Sequence: Synthetic oligonucleotide
cccggagcaccuacuaccc

SEQ ID NO: 1559088 - RNA, 19 nt, Artificial Sequence
  Description of Artificial Sequence: Synthetic oligonucleotide
ccuacuacccaggcccugg

SEQ ID NO: 1559089 - RNA, 19 nt, Artificial Sequence
  Description of Artificial Sequence: Synthetic oligonucleotide
caaugccccuugguguggc

SEQ ID NO: 1559090 - RNA, 19 nt, Artificial Sequence
  Description of Artificial Sequence: Synthetic oligonucleotide
cuguccgaaacuugaugcu

SEQ ID NO: 1559091 - RNA, 19 nt, Artificial Sequence
  Description of Artificial Sequence: Synthetic oligonucleotide
cauuuuguccuggggcaga

SEQ ID NO: 1559092 - RNA, 19 nt, Artificial Sequence
  Description of Artificial Sequence: Synthetic oligonucleotide
accccaauccacgcuugca

SEQ ID NO: 1559093 - RNA, 19 nt, Artificial Sequence
  Description of Artificial Sequence: Synthetic oligonucleotide
caucguagacuguggaaau

SEQ ID NO: 1559094 - RNA, 19 nt, Artificial Sequence
  Description of Artificial Sequence: Synthetic oligonucleotide
gugaugauucgagguggca

SEQ ID NO: 1559095 - RNA, 19 nt, Artificial Sequence
  Description of Artificial Sequence: Synthetic oligonucleotide
guaccccaauccacgcuug

SEQ ID NO: 1559096 - RNA, 19 nt, Artificial Sequence
  Description of Artificial Sequence: Synthetic oligonucleotide
cacguccucaugcagugcu

SEQ ID NO: 1559097 - RNA, 19 nt, Artificial Sequence
  Description of Artificial Sequence: Synthetic oligonucleotide
cucgaagagccgcucggaa

SEQ ID NO: 1559098 - RNA, 19 nt, Artificial Sequence
  Description of Artificial Sequence: Synthetic oligonucleotide
cacgggcaucuuugucucc

SEQ ID NO: 1559099 - RNA, 19 nt, Artificial Sequence
  Description of Artificial Sequence: Synthetic oligonucleotide
cugcuucagagguccacaa

SEQ ID NO: 1559100 - RNA, 19 nt, Artificial Sequence
  Description of Artificial Sequence: Synthetic oligonucleotide
ccgguagcugucuuagguc

SEQ ID NO: 1559101 - RNA, 19 nt, Artificial Sequence
  Description of Artificial Sequence: Synthetic oligonucleotide
ggucuccgaguccucguac

SEQ ID NO: 1559102 - RNA, 19 nt, Artificial Sequence
  Description of Artificial Sequence: Synthetic oligonucleotide
gacggcaggcccggaucag

SEQ ID NO: 1559103 - RNA, 19 nt, Artificial Sequence
  Description of Artificial Sequence: Synthetic oligonucleotide
uuaggucggcuaggguaaa

SEQ ID NO: 1559104 - RNA, 19 nt, Artificial Sequence
  Description of Artificial Sequence: Synthetic oligonucleotide
gagccggucgggagcggag

SEQ ID NO: 1559105 - RNA, 19 nt, Artificial Sequence
  Description of Artificial Sequence: Synthetic oligonucleotide
ccucguacucgaagggcac

SEQ ID NO: 1559106 - RNA, 19 nt, Artificial Sequence
  Description of Artificial Sequence: Synthetic oligonucleotide
cuuugucguaguagacacu

SEQ ID NO: 1559107 - RNA, 19 nt, Artificial Sequence
  Description of Artificial Sequence: Synthetic oligonucleotide
acugagcgucgguguagaa

SEQ ID NO: 1559108 - RNA, 19 nt, Artificial Sequence
  Description of Artificial Sequence: Synthetic oligonucleotide
gcuccccgcaccgagacca

SEQ ID NO: 1559109 - RNA, 19 nt, Artificial Sequence
  Description of Artificial Sequence: Synthetic oligonucleotide
cucccucggcaguguacac

SEQ ID NO: 1559110 - RNA, 19 nt, Artificial Sequence
  Description of Artificial Sequence: Synthetic oligonucleotide
ccgggucuuaaagggaaag

SEQ ID NO: 1559111 - RNA, 19 nt, Artificial Sequence
  Description of Artificial Sequence: Synthetic oligonucleotide
cgaguccucguacucgaag

SEQ ID NO: 1559112 - RNA, 19 nt, Artificial Sequence
  Description of Artificial Sequence: Synthetic oligonucleotide
aggcacagcuggaaccccu

SEQ ID NO: 1559113 - RNA, 19 nt, Artificial Sequence
  Description of Artificial Sequence: Synthetic oligonucleotide
accuacuacccaggcccug

SEQ ID NO: 1559114 - RNA, 19 nt, Artificial Sequence
  Description of Artificial Sequence: Synthetic oligonucleotide
uaggucggcuaggguaaaa

SEQ ID NO: 1559115 - RNA, 19 nt, Artificial Sequence
  Description of Artificial Sequence: Synthetic oligonucleotide
gccugucuuggggaacugg

SEQ ID NO: 1559116 - RNA, 19 nt, Artificial Sequence
  Description of Artificial Sequence: Synthetic oligonucleotide
gguaccccaauccacgcuu

SEQ ID NO: 1559117 - RNA, 19 nt, Artificial Sequence
  Description of Artificial Sequence: Synthetic oligonucleotide
ggagccugcggaugacaca

SEQ ID NO: 1559118 - RNA, 19 nt, Artificial Sequence
  Description of Artificial Sequence: Synthetic oligonucleotide
cuagauccgaagccucggu

SEQ ID NO: 1559119 - RNA, 19 nt, Artificial Sequence
  Description of Artificial Sequence: Synthetic oligonucleotide
gccucacucgggcuccgag

SEQ ID NO: 1559120 - RNA, 19 nt, Artificial Sequence
  Description of Artificial Sequence: Synthetic oligonucleotide
gaagacccgcaggggcgug

SEQ ID NO: 1559121 - RNA, 19 nt, Artificial Sequence
  Description of Artificial Sequence: Synthetic oligonucleotide
gagcgucgguguagaacac

SEQ ID NO: 1559122 - RNA, 19 nt, Artificial Sequence
  Description of Artificial Sequence: Synthetic oligonucleotide
cucguacucgaagggcaca

SEQ ID NO: 1559123 - RNA, 19 nt, Artificial Sequence
  Description of Artificial Sequence: Synthetic oligonucleotide
uucaggcaccccggagcac

SEQ ID NO: 1559124 - RNA, 19 nt, Artificial Sequence
  Description of Artificial Sequence: Synthetic oligonucleotide
caccgagaccacgcagcag

SEQ ID NO: 1559125 - RNA, 19 nt, Artificial Sequence
  Description of Artificial Sequence: Synthetic oligonucleotide
agccugcggaugacacaac

SEQ ID NO: 1559126 - RNA, 19 nt, Artificial Sequence
  Description of Artificial Sequence: Synthetic oligonucleotide
ccgcucggaaguccgcucc

SEQ ID NO: 1559127 - RNA, 19 nt, Artificial Sequence
  Description of Artificial Sequence: Synthetic oligonucleotide
ggcgucggagcaaggacuc

SEQ ID NO: 1559128 - RNA, 19 nt, Artificial Sequence
  Description of Artificial Sequence: Synthetic oligonucleotide
uagcgccgggaggagccug

SEQ ID NO: 1559129 - RNA, 19 nt, Artificial Sequence
  Description of Artificial Sequence: Synthetic oligonucleotide
ggcggcccgaguacaugcg

SEQ ID NO: 1559130 - RNA, 19 nt, Artificial Sequence
  Description of Artificial Sequence: Synthetic oligonucleotide
ccgaguacaugcgcagcag

SEQ ID NO: 1559131 - RNA, 19 nt, Artificial Sequence
  Description of Artificial Sequence: Synthetic oligonucleotide
gcggcccgaguacaugcgc

SEQ ID NO: 1559132 - RNA, 19 nt, Artificial Sequence
  Description of Artificial Sequence: Synthetic oligonucleotide
ggucacguccucaugcagu

SEQ ID NO: 1559133 - RNA, 19 nt, Artificial Sequence
  Description of Artificial Sequence: Synthetic oligonucleotide
cccgaguacaugcgcagca

SEQ ID NO: 1559134 - RNA, 19 nt, Artificial Sequence
  Description of Artificial Sequence: Synthetic oligonucleotide
gcuggcgucggagcaagga

SEQ ID NO: 1559135 - RNA, 19 nt, Artificial Sequence
  Description of Artificial Sequence: Synthetic oligonucleotide
cccugaccaaggacagagc

SEQ ID NO: 1559136 - RNA, 19 nt, Artificial Sequence
  Description of Artificial Sequence: Synthetic oligonucleotide
auagcgccgggaggagccu

SEQ ID NO: 1559137 - RNA, 19 nt, Artificial Sequence
  Description of Artificial Sequence: Synthetic oligonucleotide
ggcuaggguaaaagcuuca

SEQ ID NO: 1559138 - RNA, 19 nt, Artificial Sequence
  Description of Artificial Sequence: Synthetic oligonucleotide
gucuuaggucggcuagggu

SEQ ID NO: 1559139 - RNA, 19 nt, Artificial Sequence
  Description of Artificial Sequence: Synthetic oligonucleotide
cauugccauagcgccggga

SEQ ID NO: 1559140 - RNA, 19 nt, Artificial Sequence
  Description of Artificial Sequence: Synthetic oligonucleotide
acgccccggaagccaggug

SEQ ID NO: 1559141 - RNA, 19 nt, Artificial Sequence
  Description of Artificial Sequence: Synthetic oligonucleotide
cagccggagccugcggaug

SEQ ID NO: 1559142 - RNA, 19 nt, Artificial Sequence
  Description of Artificial Sequence: Synthetic oligonucleotide
gccggucgggagcggagcc

SEQ ID NO: 1559143 - RNA, 19 nt, Artificial Sequence
  Description of Artificial Sequence: Synthetic oligonucleotide
cuccccgcaccgagaccac

SEQ ID NO: 1559144 - RNA, 19 nt, Artificial Sequence
  Description of Artificial Sequence: Synthetic oligonucleotide
aguccgcucccugccuggu

SEQ ID NO: 1559145 - RNA, 19 nt, Artificial Sequence
  Description of Artificial Sequence: Synthetic oligonucleotide
ggccaucacggagucucug

SEQ ID NO: 1559146 - RNA, 19 nt, Artificial Sequence
  Description of Artificial Sequence: Synthetic oligonucleotide
cauugccauugggcaucag

SEQ ID NO: 1559147 - RNA, 19 nt, Artificial Sequence
  Description of Artificial Sequence: Synthetic oligonucleotide
cggcaguguacacacgcuc

SEQ ID NO: 1559148 - RNA, 19 nt, Artificial Sequence
  Description of Artificial Sequence: Synthetic oligonucleotide
gcccaaauggcuguaguuu

SEQ ID NO: 1559149 - RNA, 19 nt, Artificial Sequence
  Description of Artificial Sequence: Synthetic oligonucleotide
cacggagucucugcuccaa

SEQ ID NO: 1559150 - RNA, 19 nt, Artificial Sequence
  Description of Artificial Sequence: Synthetic oligonucleotide
caccccggagcaccuacua

SEQ ID NO: 1559151 - RNA, 19 nt, Artificial Sequence
  Description of Artificial Sequence: Synthetic oligonucleotide
cggcggcccgaguacaugc

SEQ ID NO: 1559152 - RNA, 19 nt, Artificial Sequence
  Description of Artificial Sequence: Synthetic oligonucleotide
gccaccggcggcccgagua

SEQ ID NO: 1559153 - RNA, 19 nt, Artificial Sequence
  Description of Artificial Sequence: Synthetic oligonucleotide
gggcgugcccacauugcca

SEQ ID NO: 1559154 - RNA, 19 nt, Artificial Sequence
  Description of Artificial Sequence: Synthetic oligonucleotide
ccauagcgccgggaggagc

SEQ ID NO: 1559155 - RNA, 19 nt, Artificial Sequence
  Description of Artificial Sequence: Synthetic oligonucleotide
guggcuggcgucggagcaa

SEQ ID NO: 1559156 - RNA, 19 nt, Artificial Sequence
  Description of Artificial Sequence: Synthetic oligonucleotide
cuuccgaccaaugccccuu

SEQ ID NO: 1559157 - RNA, 19 nt, Artificial Sequence
  Description of Artificial Sequence: Synthetic oligonucleotide
gcuaggguaaaagcuucau

SEQ ID NO: 1559158 - RNA, 19 nt, Artificial Sequence
  Description of Artificial Sequence: Synthetic oligonucleotide
ccgcaccgagaccacgcag

SEQ ID NO: 1559159 - RNA, 19 nt, Artificial Sequence
  Description of Artificial Sequence: Synthetic oligonucleotide
gccauagcgccgggaggag

SEQ ID NO: 1559160 - RNA, 19 nt, Artificial Sequence
  Description of Artificial Sequence: Synthetic oligonucleotide
ccaccggcggcccgaguac

SEQ ID NO: 1559161 - RNA, 19 nt, Artificial Sequence
  Description of Artificial Sequence: Synthetic oligonucleotide
cuguggaaaugagccccaa

SEQ ID NO: 1559162 - RNA, 19 nt, Artificial Sequence
  Description of Artificial Sequence: Synthetic oligonucleotide
acguccucaugcagugcuu

SEQ ID NO: 1559163 - RNA, 19 nt, Artificial Sequence
  Description of Artificial Sequence: Synthetic oligonucleotide
ggaaguccgcucccugccu

SEQ ID NO: 1559164 - RNA, 19 nt, Artificial Sequence
  Description of Artificial Sequence: Synthetic oligonucleotide
gccagugccacggggccuc

SEQ ID NO: 1559165 - RNA, 19 nt, Artificial Sequence
  Description of Artificial Sequence: Synthetic oligonucleotide
caccuacuacccaggcccu

SEQ ID NO: 1559166 - RNA, 19 nt, Artificial Sequence
  Description of Artificial Sequence: Synthetic oligonucleotide
ccacgcuugcaucuggggu

SEQ ID NO: 1559167 - RNA, 19 nt, Artificial Sequence
  Description of Artificial Sequence: Synthetic oligonucleotide
gccgcucggaaguccgcuc

SEQ ID NO: 1559168 - RNA, 19 nt, Artificial Sequence
  Description of Artificial Sequence: Synthetic oligonucleotide
guggaucuuccaagcgggu

SEQ ID NO: 1559169 - RNA, 19 nt, Artificial Sequence
  Description of Artificial Sequence: Synthetic oligonucleotide
gaggcucaucguagacugu

SEQ ID NO: 1559170 - RNA, 19 nt, Artificial Sequence
  Description of Artificial Sequence: Synthetic oligonucleotide
gggcuccgagggucucucc

SEQ ID NO: 1559171 - RNA, 19 nt, Artificial Sequence
  Description of Artificial Sequence: Synthetic oligonucleotide
agccucacucgggcuccga

SEQ ID NO: 1559172 - RNA, 19 nt, Artificial Sequence
  Description of Artificial Sequence: Synthetic oligonucleotide
gcgucggagcaaggacucc

SEQ ID NO: 1559173 - RNA, 19 nt, Artificial Sequence
  Description of Artificial Sequence: Synthetic oligonucleotide
gucucugcuccaagcgcau

SEQ ID NO: 1559174 - RNA, 19 nt, Artificial Sequence
  Description of Artificial Sequence: Synthetic oligonucleotide
ccacggggccucuucagcu

SEQ ID NO: 1559175 - RNA, 19 nt, Artificial Sequence
  Description of Artificial Sequence: Synthetic oligonucleotide
cgucggagcaaggacucca

SEQ ID NO: 1559176 - RNA, 19 nt, Artificial Sequence
  Description of Artificial Sequence: Synthetic oligonucleotide
cggagcaaggacuccauuu

SEQ ID NO: 1559177 - RNA, 19 nt, Artificial Sequence
  Description of Artificial Sequence: Synthetic oligonucleotide
cuccaccaucuuugucgua

SEQ ID NO: 1559178 - RNA, 19 nt, Artificial Sequence
  Description of Artificial Sequence: Synthetic oligonucleotide
agccaccggcggcccgagu

SEQ ID NO: 1559179 - RNA, 19 nt, Artificial Sequence
  Description of Artificial Sequence: Synthetic oligonucleotide
caccggcggcccgaguaca

SEQ ID NO: 1559180 - RNA, 19 nt, Artificial Sequence
  Description of Artificial Sequence: Synthetic oligonucleotide
ccccucacaaaagucguau

SEQ ID NO: 1559181 - RNA, 19 nt, Artificial Sequence
  Description of Artificial Sequence: Synthetic oligonucleotide
ccgaccaaugccccuuggu

SEQ ID NO: 1559182 - RNA, 19 nt, Artificial Sequence
  Description of Artificial Sequence: Synthetic oligonucleotide
ggcgcucaaagugcccacu

SEQ ID NO: 1559183 - RNA, 19 nt, Artificial Sequence
  Description of Artificial Sequence: Synthetic oligonucleotide
gcgcucaaagugcccacuu

SEQ ID NO: 1559184 - RNA, 19 nt, Artificial Sequence
  Description of Artificial Sequence: Synthetic oligonucleotide
ccggcggcccgaguacaug

SEQ ID NO: 1559185 - RNA, 19 nt, Artificial Sequence
  Description of Artificial Sequence: Synthetic oligonucleotide
ccacggucuccgaguccuc

SEQ ID NO: 1559186 - RNA, 19 nt, Artificial Sequence
  Description of Artificial Sequence: Synthetic oligonucleotide
gccccuugguguggcgcuc

SEQ ID NO: 1559187 - RNA, 19 nt, Artificial Sequence
  Description of Artificial Sequence: Synthetic oligonucleotide
cgcuccccgcaccgagacc

SEQ ID NO: 1559188 - RNA, 19 nt, Artificial Sequence
  Description of Artificial Sequence: Synthetic oligonucleotide
cccugccuggucacguccu

SEQ ID NO: 1559189 - RNA, 19 nt, Artificial Sequence
  Description of Artificial Sequence: Synthetic oligonucleotide
ccggagccugcggaugaca

SEQ ID NO: 1559190 - RNA, 19 nt, Artificial Sequence
  Description of Artificial Sequence: Synthetic oligonucleotide
gccuuccgacucuguaauu

SEQ ID NO: 1559191 - RNA, 19 nt, Artificial Sequence
  Description of Artificial Sequence: Synthetic oligonucleotide
cggcaggcccggaucaggu

SEQ ID NO: 1559192 - RNA, 19 nt, Artificial Sequence
  Description of Artificial Sequence: Synthetic oligonucleotide
cguacucgaagggcacauu

SEQ ID NO: 1559193 - RNA, 19 nt, Artificial Sequence
  Description of Artificial Sequence: Synthetic oligonucleotide
ccgcaggggcgugcccaca

SEQ ID NO: 1559194 - RNA, 19 nt, Artificial Sequence
  Description of Artificial Sequence: Synthetic oligonucleotide
ccagugccacggggccucu

SEQ ID NO: 1559195 - RNA, 19 nt, Artificial Sequence
  Description of Artificial Sequence: Synthetic oligonucleotide
ccgccgagccugggccgcu

SEQ ID NO: 1559196 - RNA, 19 nt, Artificial Sequence
  Description of Artificial Sequence: Synthetic oligonucleotide
aaaacuaagaucucggauc

SEQ ID NO: 1559197 - RNA, 19 nt, Artificial Sequence
  Description of Artificial Sequence: Synthetic oligonucleotide
aaucuguaagcacaaaugc

SEQ ID NO: 1559198 - RNA, 19 nt, Artificial Sequence
  Description of Artificial Sequence: Synthetic oligonucleotide
aauauuaaguguuuuaaca

SEQ ID NO: 1559199 - RNA, 19 nt, Artificial Sequence
  Description of Artificial Sequence: Synthetic oligonucleotide
aaacucaagacuuuguuag

SEQ ID NO: 1559200 - RNA, 19 nt, Artificial Sequence
  Description of Artificial Sequence: Synthetic oligonucleotide
aauaauuaaaccaacauau

SEQ ID NO: 1559201 - RNA, 19 nt, Artificial Sequence
  Description of Artificial Sequence: Synthetic oligonucleotide
aauacauugugauugguug

SEQ ID NO: 1559202 - RNA, 19 nt, Artificial Sequence
  Description of Artificial Sequence: Synthetic oligonucleotide
ucuuguaagaccuugacac

SEQ ID NO: 1559203 - RNA, 19 nt, Artificial Sequence
  Description of Artificial Sequence: Synthetic oligonucleotide
uuuaaccacaagaauaagg

SEQ ID NO: 1559204 - RNA, 19 nt, Artificial Sequence
  Description of Artificial Sequence: Synthetic oligonucleotide
augucauucacccaagugc

SEQ ID NO: 1559205 - RNA, 19 nt, Artificial Sequence
  Description of Artificial Sequence: Synthetic oligonucleotide
aauagagcagcuaaugacc

SEQ ID NO: 1559206 - RNA, 19 nt, Artificial Sequence
  Description of Artificial Sequence: Synthetic oligonucleotide
uuuaauaauacauugugau

SEQ ID NO: 1559207 - RNA, 19 nt, Artificial Sequence
  Description of Artificial Sequence: Synthetic oligonucleotide
uuaaccacaagaauaagga

SEQ ID NO: 1559208 - RNA, 19 nt, Artificial Sequence
  Description of Artificial Sequence: Synthetic oligonucleotide
aacuuuauaauguugucca

SEQ ID NO: 1559209 - RNA, 19 nt, Artificial Sequence
  Description of Artificial Sequence: Synthetic oligonucleotide
uuauuauuuagcuaaagaa

SEQ ID NO: 1559210 - RNA, 19 nt, Artificial Sequence
  Description of Artificial Sequence: Synthetic oligonucleotide
uauacaaccacauuucuga

SEQ ID NO: 1559211 - RNA, 19 nt, Artificial Sequence
  Description of Artificial Sequence: Synthetic oligonucleotide
aauaaaugcuauccuguac

SEQ ID NO: 1559212 - RNA, 19 nt, Artificial Sequence
  Description of Artificial Sequence: Synthetic oligonucleotide
uccuauacaauauuaagug

SEQ ID NO: 1559213 - RNA, 19 nt, Artificial Sequence
  Description of Artificial Sequence: Synthetic oligonucleotide
aauagcucaaggcauguag

SEQ ID NO: 1559214 - RNA, 19 nt, Artificial Sequence
  Description of Artificial Sequence: Synthetic oligonucleotide
aaacaacucagucuaagag

SEQ ID NO: 1559215 - RNA, 19 nt, Artificial Sequence
  Description of Artificial Sequence: Synthetic oligonucleotide
gaugaaucagguuacacug

SEQ ID NO: 1559216 - RNA, 19 nt, Artificial Sequence
  Description of Artificial Sequence: Synthetic oligonucleotide
agaauaaggacauucuuag

SEQ ID NO: 1559217 - RNA, 19 nt, Artificial Sequence
  Description of Artificial Sequence: Synthetic oligonucleotide
uguuacuucauguagugcc

SEQ ID NO: 1559218 - RNA, 19 nt, Artificial Sequence
  Description of Artificial Sequence: Synthetic oligonucleotide
uucaaaacuaagaucucgg

SEQ ID NO: 1559219 - RNA, 19 nt, Artificial Sequence
  Description of Artificial Sequence: Synthetic oligonucleotide
uguguaauaaaugcuaucc

SEQ ID NO: 1559220 - RNA, 19 nt, Artificial Sequence
  Description of Artificial Sequence: Synthetic oligonucleotide
ugaucaaacuuuauaaugu

SEQ ID NO: 1559221 - RNA, 19 nt, Artificial Sequence
  Description of Artificial Sequence: Synthetic oligonucleotide
auaaggacauucuuaguac

SEQ ID NO: 1559222 - RNA, 19 nt, Artificial Sequence
  Description of Artificial Sequence: Synthetic oligonucleotide
ugaguauaaauguagcagc

SEQ ID NO: 1559223 - RNA, 19 nt, Artificial Sequence
  Description of Artificial Sequence: Synthetic oligonucleotide
aacucagucuaagagaccg

SEQ ID NO: 1559224 - RNA, 19 nt, Artificial Sequence
  Description of Artificial Sequence: Synthetic oligonucleotide
uuuguuagaauagagcagc

SEQ ID NO: 1559225 - RNA, 19 nt, Artificial Sequence
  Description of Artificial Sequence: Synthetic oligonucleotide
aaaugguuuacaucccagg

SEQ ID NO: 1559226 - RNA, 19 nt, Artificial Sequence
  Description of Artificial Sequence: Synthetic oligonucleotide
aaaccuucgaaacaacuca

SEQ ID NO: 1559227 - RNA, 19 nt, Artificial Sequence
  Description of Artificial Sequence: Synthetic oligonucleotide
acaaaugcauucuuguuuc

SEQ ID NO: 1559228 - RNA, 19 nt, Artificial Sequence
  Description of Artificial Sequence: Synthetic oligonucleotide
uauccuauacaauauuaag

SEQ ID NO: 1559229 - RNA, 19 nt, Artificial Sequence
  Description of Artificial Sequence: Synthetic oligonucleotide
aauuagcaauauccuauac

SEQ ID NO: 1559230 - RNA, 19 nt, Artificial Sequence
  Description of Artificial Sequence: Synthetic oligonucleotide
ucaagauaucuccauuugg

SEQ ID NO: 1559231 - RNA, 19 nt, Artificial Sequence
  Description of Artificial Sequence: Synthetic oligonucleotide
ugcuaaagguacaugauca

SEQ ID NO: 1559232 - RNA, 19 nt, Artificial Sequence
  Description of Artificial Sequence: Synthetic oligonucleotide
ugccucuacagucauaagg

SEQ ID NO: 1559233 - RNA, 19 nt, Artificial Sequence
  Description of Artificial Sequence: Synthetic oligonucleotide
uuuaagcccaauuuaauuc

SEQ ID NO: 1559234 - RNA, 19 nt, Artificial Sequence
  Description of Artificial Sequence: Synthetic oligonucleotide
augaucaaacuuuauaaug

SEQ ID NO: 1559235 - RNA, 19 nt, Artificial Sequence
  Description of Artificial Sequence: Synthetic oligonucleotide
acacuuauuauuuagcuaa

SEQ ID NO: 1559236 - RNA, 19 nt, Artificial Sequence
  Description of Artificial Sequence: Synthetic oligonucleotide
uguaguaaccacaaucugu

SEQ ID NO: 1559237 - RNA, 19 nt, Artificial Sequence
  Description of Artificial Sequence: Synthetic oligonucleotide
ugacacaagaggaucaugc

SEQ ID NO: 1559238 - RNA, 19 nt, Artificial Sequence
  Description of Artificial Sequence: Synthetic oligonucleotide
uguugcuaaagguacauga

SEQ ID NO: 1559239 - RNA, 19 nt, Artificial Sequence
  Description of Artificial Sequence: Synthetic oligonucleotide
agcccaauuuaauucaggc

SEQ ID NO: 1559240 - RNA, 19 nt, Artificial Sequence
  Description of Artificial Sequence: Synthetic oligonucleotide
ucuuaguacauaauuaaua

SEQ ID NO: 1559241 - RNA, 19 nt, Artificial Sequence
  Description of Artificial Sequence: Synthetic oligonucleotide
agauauuccaaacauugcu

SEQ ID NO: 1559242 - RNA, 19 nt, Artificial Sequence
  Description of Artificial Sequence: Synthetic oligonucleotide
aaugguuuacaucccagga

SEQ ID NO: 1559243 - RNA, 19 nt, Artificial Sequence
  Description of Artificial Sequence: Synthetic oligonucleotide
aaacuaagaucucggauca

SEQ ID NO: 1559244 - RNA, 19 nt, Artificial Sequence
  Description of Artificial Sequence: Synthetic oligonucleotide
aaugucauucacccaagug

SEQ ID NO: 1559245 - RNA, 19 nt, Artificial Sequence
  Description of Artificial Sequence: Synthetic oligonucleotide
auuuaauucaggcagguuu

SEQ ID NO: 1559246 - RNA, 19 nt, Artificial Sequence
  Description of Artificial Sequence: Synthetic oligonucleotide
augguauacauuuuaauaa

SEQ ID NO: 1559247 - RNA, 19 nt, Artificial Sequence
  Description of Artificial Sequence: Synthetic oligonucleotide
gucuaagagaccgagaggg

SEQ ID NO: 1559248 - RNA, 19 nt, Artificial Sequence
  Description of Artificial Sequence: Synthetic oligonucleotide
ucaaauuaagcugacuuca

SEQ ID NO: 1559249 - RNA, 19 nt, Artificial Sequence
  Description of Artificial Sequence: Synthetic oligonucleotide
ucgaacuucaaaacuaaga

SEQ ID NO: 1559250 - RNA, 19 nt, Artificial Sequence
  Description of Artificial Sequence: Synthetic oligonucleotide
gaggccauaauucaccaag

SEQ ID NO: 1559251 - RNA, 19 nt, Artificial Sequence
  Description of Artificial Sequence: Synthetic oligonucleotide
ugguuuacaucccaggaug

SEQ ID NO: 1559252 - RNA, 19 nt, Artificial Sequence
  Description of Artificial Sequence: Synthetic oligonucleotide
aaugcuauccuguaccgau

SEQ ID NO: 1559253 - RNA, 19 nt, Artificial Sequence
  Description of Artificial Sequence: Synthetic oligonucleotide
ugauuuaagcccaauuuaa

SEQ ID NO: 1559254 - RNA, 19 nt, Artificial Sequence
  Description of Artificial Sequence: Synthetic oligonucleotide
aguguguuacuucauguag

SEQ ID NO: 1559255 - RNA, 19 nt, Artificial Sequence
  Description of Artificial Sequence: Synthetic oligonucleotide
aguaaccacaaucuguaag

SEQ ID NO: 1559256 - RNA, 19 nt, Artificial Sequence
  Description of Artificial Sequence: Synthetic oligonucleotide
aucuggauauaucacuugg

SEQ ID NO: 1559257 - RNA, 19 nt, Artificial Sequence
  Description of Artificial Sequence: Synthetic oligonucleotide
uuauacaaccacauuucug

SEQ ID NO: 1559258 - RNA, 19 nt, Artificial Sequence
  Description of Artificial Sequence: Synthetic oligonucleotide
uucauuuggucagauaucc

SEQ ID NO: 1559259 - RNA, 19 nt, Artificial Sequence
  Description of Artificial Sequence: Synthetic oligonucleotide
uuaagcccaauuuaauuca

SEQ ID NO: 1559260 - RNA, 19 nt, Artificial Sequence
  Description of Artificial Sequence: Synthetic oligonucleotide
auuagcaauauccuauaca

SEQ ID NO: 1559261 - RNA, 19 nt, Artificial Sequence
  Description of Artificial Sequence: Synthetic oligonucleotide
ugucauucacccaagugca

SEQ ID NO: 1559262 - RNA, 19 nt, Artificial Sequence
  Description of Artificial Sequence: Synthetic oligonucleotide
auaaauguagcagcuaaag

SEQ ID NO: 1559263 - RNA, 19 nt, Artificial Sequence
  Description of Artificial Sequence: Synthetic oligonucleotide
ucuaaauuucuuguaagac

SEQ ID NO: 1559264 - RNA, 19 nt, Artificial Sequence
  Description of Artificial Sequence: Synthetic oligonucleotide
uaucaagggaccaacuugu

SEQ ID NO: 1559265 - RNA, 19 nt, Artificial Sequence
  Description of Artificial Sequence: Synthetic oligonucleotide
auucuuaguacauaauuaa

SEQ ID NO: 1559266 - RNA, 19 nt, Artificial Sequence
  Description of Artificial Sequence: Synthetic oligonucleotide
agucauaagguguucacca

SEQ ID NO: 1559267 - RNA, 19 nt, Artificial Sequence
  Description of Artificial Sequence: Synthetic oligonucleotide
uuaaauaggguucuucauu

SEQ ID NO: 1559268 - RNA, 19 nt, Artificial Sequence
  Description of Artificial Sequence: Synthetic oligonucleotide
aaugaaacucaagacuuug

SEQ ID NO: 1559269 - RNA, 19 nt, Artificial Sequence
  Description of Artificial Sequence: Synthetic oligonucleotide
gauagagccauaaaaguca

SEQ ID NO: 1559270 - RNA, 19 nt, Artificial Sequence
  Description of Artificial Sequence: Synthetic oligonucleotide
agucaaauuaagcugacuu

SEQ ID NO: 1559271 - RNA, 19 nt, Artificial Sequence
  Description of Artificial Sequence: Synthetic oligonucleotide
acauugcuaagacugagug

SEQ ID NO: 1559272 - RNA, 19 nt, Artificial Sequence
  Description of Artificial Sequence: Synthetic oligonucleotide
uuccuaucuggauauauca

SEQ ID NO: 1559273 - RNA, 19 nt, Artificial Sequence
  Description of Artificial Sequence: Synthetic oligonucleotide
aagagggaacucuuuccac

SEQ ID NO: 1559274 - RNA, 19 nt, Artificial Sequence
  Description of Artificial Sequence: Synthetic oligonucleotide
uuugguguugcuaaaggua

SEQ ID NO: 1559275 - RNA, 19 nt, Artificial Sequence
  Description of Artificial Sequence: Synthetic oligonucleotide
uauuuagcuaaagaaaauc

SEQ ID NO: 1559276 - RNA, 19 nt, Artificial Sequence
  Description of Artificial Sequence: Synthetic oligonucleotide
auacauugugauugguugg

SEQ ID NO: 1559277 - RNA, 19 nt, Artificial Sequence
  Description of Artificial Sequence: Synthetic oligonucleotide
aauccaaauggcucucuug

SEQ ID NO: 1559278 - RNA, 19 nt, Artificial Sequence
  Description of Artificial Sequence: Synthetic oligonucleotide
aagaggaucaugccuagau

SEQ ID NO: 1559279 - RNA, 19 nt, Artificial Sequence
  Description of Artificial Sequence: Synthetic oligonucleotide
auguagugccucuacaguc

SEQ ID NO: 1559280 - RNA, 19 nt, Artificial Sequence
  Description of Artificial Sequence: Synthetic oligonucleotide
agcagcuaaagaaaucugc

SEQ ID NO: 1559281 - RNA, 19 nt, Artificial Sequence
  Description of Artificial Sequence: Synthetic oligonucleotide
cagucuaagagaccgagag

SEQ ID NO: 1559282 - RNA, 19 nt, Artificial Sequence
  Description of Artificial Sequence: Synthetic oligonucleotide
agauagagccauaaaaguc

SEQ ID NO: 1559283 - RNA, 19 nt, Artificial Sequence
  Description of Artificial Sequence: Synthetic oligonucleotide
uaaauaggguucuucauua

SEQ ID NO: 1559284 - RNA, 19 nt, Artificial Sequence
  Description of Artificial Sequence: Synthetic oligonucleotide
aucacuuggucucucagug

SEQ ID NO: 1559285 - RNA, 19 nt, Artificial Sequence
  Description of Artificial Sequence: Synthetic oligonucleotide
aaccuguccaauucuuguc

SEQ ID NO: 1559286 - RNA, 19 nt, Artificial Sequence
  Description of Artificial Sequence: Synthetic oligonucleotide
agguuacacugauuuaagc

SEQ ID NO: 1559287 - RNA, 19 nt, Artificial Sequence
  Description of Artificial Sequence: Synthetic oligonucleotide
cacaagaaaccuucgaaac

SEQ ID NO: 1559288 - RNA, 19 nt, Artificial Sequence
  Description of Artificial Sequence: Synthetic oligonucleotide
uuuaauucaggcagguuuu

SEQ ID NO: 1559289 - RNA, 19 nt, Artificial Sequence
  Description of Artificial Sequence: Synthetic oligonucleotide
uccuucaguacccuuuucc

SEQ ID NO: 1559290 - RNA, 19 nt, Artificial Sequence
  Description of Artificial Sequence: Synthetic oligonucleotide
uaagcugacuucaaauggu

SEQ ID NO: 1559291 - RNA, 19 nt, Artificial Sequence
  Description of Artificial Sequence: Synthetic oligonucleotide
uagauauuccaaacauugc

SEQ ID NO: 1559292 - RNA, 19 nt, Artificial Sequence
  Description of Artificial Sequence: Synthetic oligonucleotide
aacauuucgugcucagugu

SEQ ID NO: 1559293 - RNA, 19 nt, Artificial Sequence
  Description of Artificial Sequence: Synthetic oligonucleotide
cccaauuuaauucaggcag

SEQ ID NO: 1559294 - RNA, 19 nt, Artificial Sequence
  Description of Artificial Sequence: Synthetic oligonucleotide
ugcuauccuguaccgaugg

SEQ ID NO: 1559295 - RNA, 19 nt, Artificial Sequence
  Description of Artificial Sequence: Synthetic oligonucleotide
cuucaaaacuaagaucucg

SEQ ID NO: 1559296 - RNA, 19 nt, Artificial Sequence
  Description of Artificial Sequence: Synthetic oligonucleotide
acagucauaagguguucac

SEQ ID NO: 1559297 - RNA, 19 nt, Artificial Sequence
  Description of Artificial Sequence: Synthetic oligonucleotide
aucuaaauuucuuguaaga

SEQ ID NO: 1559298 - RNA, 19 nt, Artificial Sequence
  Description of Artificial Sequence: Synthetic oligonucleotide
ucaaaugguuuacauccca

SEQ ID NO: 1559299 - RNA, 19 nt, Artificial Sequence
  Description of Artificial Sequence: Synthetic oligonucleotide
augccuagauauuccaaac

SEQ ID NO: 1559300 - RNA, 19 nt, Artificial Sequence
  Description of Artificial Sequence: Synthetic oligonucleotide
auugugcguucauauuugc

SEQ ID NO: 1559301 - RNA, 19 nt, Artificial Sequence
  Description of Artificial Sequence: Synthetic oligonucleotide
aaggacagcaguaacauuu

SEQ ID NO: 1559302 - RNA, 19 nt, Artificial Sequence
  Description of Artificial Sequence: Synthetic oligonucleotide
gacuuuguuagaauagagc

SEQ ID NO: 1559303 - RNA, 19 nt, Artificial Sequence
  Description of Artificial Sequence: Synthetic oligonucleotide
ucaagacuuuguuagaaua

SEQ ID NO: 1559304 - RNA, 19 nt, Artificial Sequence
  Description of Artificial Sequence: Synthetic oligonucleotide
aauguagcagcuaaagaaa

SEQ ID NO: 1559305 - RNA, 19 nt, Artificial Sequence
  Description of Artificial Sequence: Synthetic oligonucleotide
guaucuagucaauuuguug

SEQ ID NO: 1559306 - RNA, 19 nt, Artificial Sequence
  Description of Artificial Sequence: Synthetic oligonucleotide
cauuugguguugcuaaagg

SEQ ID NO: 1559307 - RNA, 19 nt, Artificial Sequence
  Description of Artificial Sequence: Synthetic oligonucleotide
uagaauagagcagcuaaug

SEQ ID NO: 1559308 - RNA, 19 nt, Artificial Sequence
  Description of Artificial Sequence: Synthetic oligonucleotide
cauaauucaccaagaacuc

SEQ ID NO: 1559309 - RNA, 19 nt, Artificial Sequence
  Description of Artificial Sequence: Synthetic oligonucleotide
aucaagauaucuccauuug

SEQ ID NO: 1559310 - RNA, 19 nt, Artificial Sequence
  Description of Artificial Sequence: Synthetic oligonucleotide
auuauacaaccacauuucu

SEQ ID NO: 1559311 - RNA, 19 nt, Artificial Sequence
  Description of Artificial Sequence: Synthetic oligonucleotide
aagacuuuguuagaauaga

SEQ ID NO: 1559312 - RNA, 19 nt, Artificial Sequence
  Description of Artificial Sequence: Synthetic oligonucleotide
ugaaacucaagacuuuguu

SEQ ID NO: 1559313 - RNA, 19 nt, Artificial Sequence
  Description of Artificial Sequence: Synthetic oligonucleotide
aagaauaaggacauucuua

SEQ ID NO: 1559314 - RNA, 19 nt, Artificial Sequence
  Description of Artificial Sequence: Synthetic oligonucleotide
agcuaaagaaaauccaaau

SEQ ID NO: 1559315 - RNA, 19 nt, Artificial Sequence
  Description of Artificial Sequence: Synthetic oligonucleotide
ugguauacauuuuaauaau

SEQ ID NO: 1559316 - RNA, 19 nt, Artificial Sequence
  Description of Artificial Sequence: Synthetic oligonucleotide
uguaagaccuugacacaag

SEQ ID NO: 1559317 - RNA, 19 nt, Artificial Sequence
  Description of Artificial Sequence: Synthetic oligonucleotide
acaagaaaccuucgaaaca

SEQ ID NO: 1559318 - RNA, 19 nt, Artificial Sequence
  Description of Artificial Sequence: Synthetic oligonucleotide
auuuggaccacaaaugaga

SEQ ID NO: 1559319 - RNA, 19 nt, Artificial Sequence
  Description of Artificial Sequence: Synthetic oligonucleotide
agguuuaguaaguuguccu

SEQ ID NO: 1559320 - RNA, 19 nt, Artificial Sequence
  Description of Artificial Sequence: Synthetic oligonucleotide
uaauacauugugauugguu

SEQ ID NO: 1559321 - RNA, 19 nt, Artificial Sequence
  Description of Artificial Sequence: Synthetic oligonucleotide
accaagaacucugaagagg

SEQ ID NO: 1559322 - RNA, 19 nt, Artificial Sequence
  Description of Artificial Sequence: Synthetic oligonucleotide
uucaaaugguuuacauccc

SEQ ID NO: 1559323 - RNA, 19 nt, Artificial Sequence
  Description of Artificial Sequence: Synthetic oligonucleotide
acaauuagcaauauccuau

SEQ ID NO: 1559324 - RNA, 19 nt, Artificial Sequence
  Description of Artificial Sequence: Synthetic oligonucleotide
uucuuaguacauaauuaau

SEQ ID NO: 1559325 - RNA, 19 nt, Artificial Sequence
  Description of Artificial Sequence: Synthetic oligonucleotide
ucaaggcauguagugaagg

SEQ ID NO: 1559326 - RNA, 19 nt, Artificial Sequence
  Description of Artificial Sequence: Synthetic oligonucleotide
ucaguguguuacuucaugu

SEQ ID NO: 1559327 - RNA, 19 nt, Artificial Sequence
  Description of Artificial Sequence: Synthetic oligonucleotide
guugguucccauuaccaug

SEQ ID NO: 1559328 - RNA, 19 nt, Artificial Sequence
  Description of Artificial Sequence: Synthetic oligonucleotide
uugcuaaagguacaugauc

SEQ ID NO: 1559329 - RNA, 19 nt, Artificial Sequence
  Description of Artificial Sequence: Synthetic oligonucleotide
agccauuuggaccacaaau

SEQ ID NO: 1559330 - RNA, 19 nt, Artificial Sequence
  Description of Artificial Sequence: Synthetic oligonucleotide
agagccauaaaagucaaau

SEQ ID NO: 1559331 - RNA, 19 nt, Artificial Sequence
  Description of Artificial Sequence: Synthetic oligonucleotide
ugcucaguguguuacuuca

SEQ ID NO: 1559332 - RNA, 19 nt, Artificial Sequence
  Description of Artificial Sequence: Synthetic oligonucleotide
uuuccuaucuggauauauc

SEQ ID NO: 1559333 - RNA, 19 nt, Artificial Sequence
  Description of Artificial Sequence: Synthetic oligonucleotide
agucaaggacagcaguaac

SEQ ID NO: 1559334 - RNA, 19 nt, Artificial Sequence
  Description of Artificial Sequence: Synthetic oligonucleotide
gaaacaacucagucuaaga

SEQ ID NO: 1559335 - RNA, 19 nt, Artificial Sequence
  Description of Artificial Sequence: Synthetic oligonucleotide
uauccuguaccgaugguau

SEQ ID NO: 1559336 - RNA, 19 nt, Artificial Sequence
  Description of Artificial Sequence: Synthetic oligonucleotide
acuaagaucucggaucaag

SEQ ID NO: 1559337 - RNA, 19 nt, Artificial Sequence
  Description of Artificial Sequence: Synthetic oligonucleotide
guacaggagucagagaccg

SEQ ID NO: 1559338 - RNA, 19 nt, Artificial Sequence
  Description of Artificial Sequence: Synthetic oligonucleotide
cacaagaauaaggacauuc

SEQ ID NO: 1559339 - RNA, 19 nt, Artificial Sequence
  Description of Artificial Sequence: Synthetic oligonucleotide
cauuuggaccacaaaugag

SEQ ID NO: 1559340 - RNA, 19 nt, Artificial Sequence
  Description of Artificial Sequence: Synthetic oligonucleotide
auccuauacaauauuaagu

SEQ ID NO: 1559341 - RNA, 19 nt, Artificial Sequence
  Description of Artificial Sequence: Synthetic oligonucleotide
agucuaagagaccgagagg

SEQ ID NO: 1559342 - RNA, 19 nt, Artificial Sequence
  Description of Artificial Sequence: Synthetic oligonucleotide
ggucauauagggucgcugg

SEQ ID NO: 1559343 - RNA, 19 nt, Artificial Sequence
  Description of Artificial Sequence: Synthetic oligonucleotide
ugaaucagguuacacugau

SEQ ID NO: 1559344 - RNA, 19 nt, Artificial Sequence
  Description of Artificial Sequence: Synthetic oligonucleotide
ugccuagauauuccaaaca

SEQ ID NO: 1559345 - RNA, 19 nt, Artificial Sequence
  Description of Artificial Sequence: Synthetic oligonucleotide
uaagaucucggaucaagau

SEQ ID NO: 1559346 - RNA, 19 nt, Artificial Sequence
  Description of Artificial Sequence: Synthetic oligonucleotide
uacacuuauuauuuagcua

SEQ ID NO: 1559347 - RNA, 19 nt, Artificial Sequence
  Description of Artificial Sequence: Synthetic oligonucleotide
uaguguguaguaaccacaa

SEQ ID NO: 1559348 - RNA, 19 nt, Artificial Sequence
  Description of Artificial Sequence: Synthetic oligonucleotide
aagguacaugaucaaacuu

SEQ ID NO: 1559349 - RNA, 19 nt, Artificial Sequence
  Description of Artificial Sequence: Synthetic oligonucleotide
guuuaguaaguuguccucc

SEQ ID NO: 1559350 - RNA, 19 nt, Artificial Sequence
  Description of Artificial Sequence: Synthetic oligonucleotide
uguaucuagucaauuuguu

SEQ ID NO: 1559351 - RNA, 19 nt, Artificial Sequence
  Description of Artificial Sequence: Synthetic oligonucleotide
gagaggguuacacuuauua

SEQ ID NO: 1559352 - RNA, 19 nt, Artificial Sequence
  Description of Artificial Sequence: Synthetic oligonucleotide
auaucacuuggucucucag

SEQ ID NO: 1559353 - RNA, 19 nt, Artificial Sequence
  Description of Artificial Sequence: Synthetic oligonucleotide
uccuaucuggauauaucac

SEQ ID NO: 1559354 - RNA, 19 nt, Artificial Sequence
  Description of Artificial Sequence: Synthetic oligonucleotide
ggaaaugucauucacccaa

SEQ ID NO: 1559355 - RNA, 19 nt, Artificial Sequence
  Description of Artificial Sequence: Synthetic oligonucleotide
ugccacuguguaauaaaug

SEQ ID NO: 1559356 - RNA, 19 nt, Artificial Sequence
  Description of Artificial Sequence: Synthetic oligonucleotide
aacucaagacuuuguuaga

SEQ ID NO: 1559357 - RNA, 19 nt, Artificial Sequence
  Description of Artificial Sequence: Synthetic oligonucleotide
uuuuaaccacaagaauaag

SEQ ID NO: 1559358 - RNA, 19 nt, Artificial Sequence
  Description of Artificial Sequence: Synthetic oligonucleotide
guuguacaccacaagaaac

SEQ ID NO: 1559359 - RNA, 19 nt, Artificial Sequence
  Description of Artificial Sequence: Synthetic oligonucleotide
uugugcguucauauuugcc

SEQ ID NO: 1559360 - RNA, 19 nt, Artificial Sequence
  Description of Artificial Sequence: Synthetic oligonucleotide
ucagguuuaguaaguuguc

SEQ ID NO: 1559361 - RNA, 19 nt, Artificial Sequence
  Description of Artificial Sequence: Synthetic oligonucleotide
ucagagaccguuccaggaa

SEQ ID NO: 1559362 - RNA, 19 nt, Artificial Sequence
  Description of Artificial Sequence: Synthetic oligonucleotide
aagaaaccuucgaaacaac

SEQ ID NO: 1559363 - RNA, 19 nt, Artificial Sequence
  Description of Artificial Sequence: Synthetic oligonucleotide
augcacuuugcauuaacaa

SEQ ID NO: 1559364 - RNA, 19 nt, Artificial Sequence
  Description of Artificial Sequence: Synthetic oligonucleotide
uaagagaccgagaggguua

SEQ ID NO: 1559365 - RNA, 19 nt, Artificial Sequence
  Description of Artificial Sequence: Synthetic oligonucleotide
uagugaaggaaugaguaua

SEQ ID NO: 1559366 - RNA, 19 nt, Artificial Sequence
  Description of Artificial Sequence: Synthetic oligonucleotide
cauguuucaauuauccugu

SEQ ID NO: 1559367 - RNA, 19 nt, Artificial Sequence
  Description of Artificial Sequence: Synthetic oligonucleotide
aagagaccgagaggguuac

SEQ ID NO: 1559368 - RNA, 19 nt, Artificial Sequence
  Description of Artificial Sequence: Synthetic oligonucleotide
ucugccacuguguaauaaa

SEQ ID NO: 1559369 - RNA, 19 nt, Artificial Sequence
  Description of Artificial Sequence: Synthetic oligonucleotide
uaucacuuggucucucagu

SEQ ID NO: 1559370 - RNA, 19 nt, Artificial Sequence
  Description of Artificial Sequence: Synthetic oligonucleotide
gucauauagggucgcuggg

SEQ ID NO: 1559371 - RNA, 19 nt, Artificial Sequence
  Description of Artificial Sequence: Synthetic oligonucleotide
aggaugaaucagguuacac

SEQ ID NO: 1559372 - RNA, 19 nt, Artificial Sequence
  Description of Artificial Sequence: Synthetic oligonucleotide
ucggaucaagauaucucca

SEQ ID NO: 1559373 - RNA, 19 nt, Artificial Sequence
  Description of Artificial Sequence: Synthetic oligonucleotide
gauugguugguucccauua

SEQ ID NO: 1559374 - RNA, 19 nt, Artificial Sequence
  Description of Artificial Sequence: Synthetic oligonucleotide
aaccuucgaaacaacucag

SEQ ID NO: 1559375 - RNA, 19 nt, Artificial Sequence
  Description of Artificial Sequence: Synthetic oligonucleotide
agaaaagauagagccauaa

SEQ ID NO: 1559376 - RNA, 19 nt, Artificial Sequence
  Description of Artificial Sequence: Synthetic oligonucleotide
ucucucagguuuaguaagu

SEQ ID NO: 1559377 - RNA, 19 nt, Artificial Sequence
  Description of Artificial Sequence: Synthetic oligonucleotide
auauacacaauuagcaaua

SEQ ID NO: 1559378 - RNA, 19 nt, Artificial Sequence
  Description of Artificial Sequence: Synthetic oligonucleotide
aaauccaaauggcucucuu

SEQ ID NO: 1559379 - RNA, 19 nt, Artificial Sequence
  Description of Artificial Sequence: Synthetic oligonucleotide
gaaaugucauucacccaag

SEQ ID NO: 1559380 - RNA, 19 nt, Artificial Sequence
  Description of Artificial Sequence: Synthetic oligonucleotide
cuauacaauauuaaguguu

SEQ ID NO: 1559381 - RNA, 19 nt, Artificial Sequence
  Description of Artificial Sequence: Synthetic oligonucleotide
uccaaacauugcuaagacu

SEQ ID NO: 1559382 - RNA, 19 nt, Artificial Sequence
  Description of Artificial Sequence: Synthetic oligonucleotide
agaggguuacacuuauuau

SEQ ID NO: 1559383 - RNA, 19 nt, Artificial Sequence
  Description of Artificial Sequence: Synthetic oligonucleotide
augguuuacaucccaggau

SEQ ID NO: 1559384 - RNA, 19 nt, Artificial Sequence
  Description of Artificial Sequence: Synthetic oligonucleotide
aagcccaauuuaauucagg

SEQ ID NO: 1559385 - RNA, 19 nt, Artificial Sequence
  Description of Artificial Sequence: Synthetic oligonucleotide
uccuguaucuagucaauuu

SEQ ID NO: 1559386 - RNA, 19 nt, Artificial Sequence
  Description of Artificial Sequence: Synthetic oligonucleotide
accuguccaauucuuguca

SEQ ID NO: 1559387 - RNA, 19 nt, Artificial Sequence
  Description of Artificial Sequence: Synthetic oligonucleotide
ucgcugggaacauaaaaua

SEQ ID NO: 1559388 - RNA, 19 nt, Artificial Sequence
  Description of Artificial Sequence: Synthetic oligonucleotide
agugccucuacagucauaa

SEQ ID NO: 1559389 - RNA, 19 nt, Artificial Sequence
  Description of Artificial Sequence: Synthetic oligonucleotide
ucauauagggucgcuggga

SEQ ID NO: 1559390 - RNA, 19 nt, Artificial Sequence
  Description of Artificial Sequence: Synthetic oligonucleotide
uuuuccuaucuggauauau

SEQ ID NO: 1559391 - RNA, 19 nt, Artificial Sequence
  Description of Artificial Sequence: Synthetic oligonucleotide
ucagucuaagagaccgaga

SEQ ID NO: 1559392 - RNA, 19 nt, Artificial Sequence
  Description of Artificial Sequence: Synthetic oligonucleotide
aguacccuuuuccugcugu

SEQ ID NO: 1559393 - RNA, 19 nt, Artificial Sequence
  Description of Artificial Sequence: Synthetic oligonucleotide
caagauaucuccauuuggu

SEQ ID NO: 1559394 - RNA, 19 nt, Artificial Sequence
  Description of Artificial Sequence: Synthetic oligonucleotide
uccuguaccgaugguauac

SEQ ID NO: 1559395 - RNA, 19 nt, Artificial Sequence
  Description of Artificial Sequence: Synthetic oligonucleotide
uguaccgaugguauacauu

SEQ ID NO: 1559396 - RNA, 19 nt, Artificial Sequence
  Description of Artificial Sequence: Synthetic oligonucleotide
cauauacacaauuagcaau

SEQ ID NO: 1559397 - RNA, 19 nt, Artificial Sequence
  Description of Artificial Sequence: Synthetic oligonucleotide
auauccuauacaauauuaa

SEQ ID NO: 1559398 - RNA, 19 nt, Artificial Sequence
  Description of Artificial Sequence: Synthetic oligonucleotide
cuguguaauaaaugcuauc

SEQ ID NO: 1559399 - RNA, 19 nt, Artificial Sequence
  Description of Artificial Sequence: Synthetic oligonucleotide
acacaauuagcaauauccu

SEQ ID NO: 1559400 - RNA, 19 nt, Artificial Sequence
  Description of Artificial Sequence: Synthetic oligonucleotide
auaauucaccaagaacucu

SEQ ID NO: 1559401 - RNA, 19 nt, Artificial Sequence
  Description of Artificial Sequence: Synthetic oligonucleotide
agguacaugaucaaacuuu

SEQ ID NO: 1559402 - RNA, 19 nt, Artificial Sequence
  Description of Artificial Sequence: Synthetic oligonucleotide
gacugaguguaguguguag

SEQ ID NO: 1559403 - RNA, 19 nt, Artificial Sequence
  Description of Artificial Sequence: Synthetic oligonucleotide
uaaccacaaucuguaagca

SEQ ID NO: 1559404 - RNA, 19 nt, Artificial Sequence
  Description of Artificial Sequence: Synthetic oligonucleotide
cuaagaucucggaucaaga

SEQ ID NO: 1559405 - RNA, 19 nt, Artificial Sequence
  Description of Artificial Sequence: Synthetic oligonucleotide
cucagucuaagagaccgag

SEQ ID NO: 1559406 - RNA, 19 nt, Artificial Sequence
  Description of Artificial Sequence: Synthetic oligonucleotide
auaggguucuucauuaaaa

SEQ ID NO: 1559407 - RNA, 19 nt, Artificial Sequence
  Description of Artificial Sequence: Synthetic oligonucleotide
agaucgaacuucaaaacua

SEQ ID NO: 1559408 - RNA, 19 nt, Artificial Sequence
  Description of Artificial Sequence: Synthetic oligonucleotide
guaguaaccacaaucugua

SEQ ID NO: 1559409 - RNA, 19 nt, Artificial Sequence
  Description of Artificial Sequence: Synthetic oligonucleotide
ucaugccuagauauuccaa

SEQ ID NO: 1559410 - RNA, 19 nt, Artificial Sequence
  Description of Artificial Sequence: Synthetic oligonucleotide
acauuucugaugaaccugu

SEQ ID NO: 1559411 - RNA, 19 nt, Artificial Sequence
  Description of Artificial Sequence: Synthetic oligonucleotide
caagaaaccuucgaaacaa

SEQ ID NO: 1559412 - RNA, 19 nt, Artificial Sequence
  Description of Artificial Sequence: Synthetic oligonucleotide
uucugauccucuuuuccua

SEQ ID NO: 1559413 - RNA, 19 nt, Artificial Sequence
  Description of Artificial Sequence: Synthetic oligonucleotide
gauaucuccauuugguguu

SEQ ID NO: 1559414 - RNA, 19 nt, Artificial Sequence
  Description of Artificial Sequence: Synthetic oligonucleotide
uugcuaagacugaguguag

SEQ ID NO: 1559415 - RNA, 19 nt, Artificial Sequence
  Description of Artificial Sequence: Synthetic oligonucleotide
uauccuguaucuagucaau

SEQ ID NO: 1559416 - RNA, 19 nt, Artificial Sequence
  Description of Artificial Sequence: Synthetic oligonucleotide
gauccucuuuuccuaucug

SEQ ID NO: 1559417 - RNA, 19 nt, Artificial Sequence
  Description of Artificial Sequence: Synthetic oligonucleotide
guaccgaugguauacauuu

SEQ ID NO: 1559418 - RNA, 19 nt, Artificial Sequence
  Description of Artificial Sequence: Synthetic oligonucleotide
caagggaccaacuugugcu

SEQ ID NO: 1559419 - RNA, 19 nt, Artificial Sequence
  Description of Artificial Sequence: Synthetic oligonucleotide
agaaaccuucgaaacaacu

SEQ ID NO: 1559420 - RNA, 19 nt, Artificial Sequence
  Description of Artificial Sequence: Synthetic oligonucleotide
accgaugguauacauuuua

SEQ ID NO: 1559421 - RNA, 19 nt, Artificial Sequence
  Description of Artificial Sequence: Synthetic oligonucleotide
ccuguaucuagucaauuug

SEQ ID NO: 1559422 - RNA, 19 nt, Artificial Sequence
  Description of Artificial Sequence: Synthetic oligonucleotide
acugaguguaguguguagu

SEQ ID NO: 1559423 - RNA, 19 nt, Artificial Sequence
  Description of Artificial Sequence: Synthetic oligonucleotide
gaucaagauaucuccauuu

SEQ ID NO: 1559424 - RNA, 19 nt, Artificial Sequence
  Description of Artificial Sequence: Synthetic oligonucleotide
gagaccgagaggguuacac

SEQ ID NO: 1559425 - RNA, 19 nt, Artificial Sequence
  Description of Artificial Sequence: Synthetic oligonucleotide
aagucaaauuaagcugacu

SEQ ID NO: 1559426 - RNA, 19 nt, Artificial Sequence
  Description of Artificial Sequence: Synthetic oligonucleotide
aggguuacacuuauuauuu

SEQ ID NO: 1559427 - RNA, 19 nt, Artificial Sequence
  Description of Artificial Sequence: Synthetic oligonucleotide
gccauaauucaccaagaac

SEQ ID NO: 1559428 - RNA, 19 nt, Artificial Sequence
  Description of Artificial Sequence: Synthetic oligonucleotide
caccaagaacucugaagag

SEQ ID NO: 1559429 - RNA, 19 nt, Artificial Sequence
  Description of Artificial Sequence: Synthetic oligonucleotide
uucaauuauccuguaucua

SEQ ID NO: 1559430 - RNA, 19 nt, Artificial Sequence
  Description of Artificial Sequence: Synthetic oligonucleotide
ugguguugcuaaagguaca

SEQ ID NO: 1559431 - RNA, 19 nt, Artificial Sequence
  Description of Artificial Sequence: Synthetic oligonucleotide
aauuuaauucaggcagguu

SEQ ID NO: 1559432 - RNA, 19 nt, Artificial Sequence
  Description of Artificial Sequence: Synthetic oligonucleotide
cugggaacauaaaauaacu

SEQ ID NO: 1559433 - RNA, 19 nt, Artificial Sequence
  Description of Artificial Sequence: Synthetic oligonucleotide
cagucauaagguguucacc

SEQ ID NO: 1559434 - RNA, 19 nt, Artificial Sequence
  Description of Artificial Sequence: Synthetic oligonucleotide
gcuaagacugaguguagug

SEQ ID NO: 1559435 - RNA, 19 nt, Artificial Sequence
  Description of Artificial Sequence: Synthetic oligonucleotide
gaaccuguccaauucuugu

SEQ ID NO: 1559436 - RNA, 19 nt, Artificial Sequence
  Description of Artificial Sequence: Synthetic oligonucleotide
ugcguucauauuugccaug

SEQ ID NO: 1559437 - RNA, 19 nt, Artificial Sequence
  Description of Artificial Sequence: Synthetic oligonucleotide
cucaaggcauguagugaag

SEQ ID NO: 1559438 - RNA, 19 nt, Artificial Sequence
  Description of Artificial Sequence: Synthetic oligonucleotide
accauuauacaaccacauu

SEQ ID NO: 1559439 - RNA, 19 nt, Artificial Sequence
  Description of Artificial Sequence: Synthetic oligonucleotide
cacaauuagcaauauccua

SEQ ID NO: 1559440 - RNA, 19 nt, Artificial Sequence
  Description of Artificial Sequence: Synthetic oligonucleotide
gguuuaguaaguuguccuc

SEQ ID NO: 1559441 - RNA, 19 nt, Artificial Sequence
  Description of Artificial Sequence: Synthetic oligonucleotide
accaacauauacacaauua

SEQ ID NO: 1559442 - RNA, 19 nt, Artificial Sequence
  Description of Artificial Sequence: Synthetic oligonucleotide
cacuguuguacaccacaag

SEQ ID NO: 1559443 - RNA, 19 nt, Artificial Sequence
  Description of Artificial Sequence: Synthetic oligonucleotide
agugaaggaaugaguauaa

SEQ ID NO: 1559444 - RNA, 19 nt, Artificial Sequence
  Description of Artificial Sequence: Synthetic oligonucleotide
auauaucacuuggucucuc

SEQ ID NO: 1559445 - RNA, 19 nt, Artificial Sequence
  Description of Artificial Sequence: Synthetic oligonucleotide
gaucaaacuuuauaauguu

SEQ ID NO: 1559446 - RNA, 19 nt, Artificial Sequence
  Description of Artificial Sequence: Synthetic oligonucleotide
auguagugaaggaaugagu

SEQ ID NO: 1559447 - RNA, 19 nt, Artificial Sequence
  Description of Artificial Sequence: Synthetic oligonucleotide
gcugggaacauaaaauaac

SEQ ID NO: 1559448 - RNA, 19 nt, Artificial Sequence
  Description of Artificial Sequence: Synthetic oligonucleotide
auaauacauugugauuggu

SEQ ID NO: 1559449 - RNA, 19 nt, Artificial Sequence
  Description of Artificial Sequence: Synthetic oligonucleotide
cauucacccaagugcauga

SEQ ID NO: 1559450 - RNA, 19 nt, Artificial Sequence
  Description of Artificial Sequence: Synthetic oligonucleotide
aggaaaugucauucaccca

SEQ ID NO: 1559451 - RNA, 19 nt, Artificial Sequence
  Description of Artificial Sequence: Synthetic oligonucleotide
ugcuaagacugaguguagu

SEQ ID NO: 1559452 - RNA, 19 nt, Artificial Sequence
  Description of Artificial Sequence: Synthetic oligonucleotide
gguguucaccauuauacaa

SEQ ID NO: 1559453 - RNA, 19 nt, Artificial Sequence
  Description of Artificial Sequence: Synthetic oligonucleotide
agaccgagaggguuacacu

SEQ ID NO: 1559454 - RNA, 19 nt, Artificial Sequence
  Description of Artificial Sequence: Synthetic oligonucleotide
uggagucaaauagcucaag

SEQ ID NO: 1559455 - RNA, 19 nt, Artificial Sequence
  Description of Artificial Sequence: Synthetic oligonucleotide
gccauuuggaccacaaaug

SEQ ID NO: 1559456 - RNA, 19 nt, Artificial Sequence
  Description of Artificial Sequence: Synthetic oligonucleotide
uucacccaagugcaugaua

SEQ ID NO: 1559457 - RNA, 19 nt, Artificial Sequence
  Description of Artificial Sequence: Synthetic oligonucleotide
aucgaacuucaaaacuaag

SEQ ID NO: 1559458 - RNA, 19 nt, Artificial Sequence
  Description of Artificial Sequence: Synthetic oligonucleotide
uacacugauuuaagcccaa

SEQ ID NO: 1559459 - RNA, 19 nt, Artificial Sequence
  Description of Artificial Sequence: Synthetic oligonucleotide
ucuccauuugguguugcua

SEQ ID NO: 1559460 - RNA, 19 nt, Artificial Sequence
  Description of Artificial Sequence: Synthetic oligonucleotide
uccauuugguguugcuaaa

SEQ ID NO: 1559461 - RNA, 19 nt, Artificial Sequence
  Description of Artificial Sequence: Synthetic oligonucleotide
ucacuuggucucucagugu

SEQ ID NO: 1559462 - RNA, 19 nt, Artificial Sequence
  Description of Artificial Sequence: Synthetic oligonucleotide
gguucccauuaccaugggg

SEQ ID NO: 1559463 - RNA, 19 nt, Artificial Sequence
  Description of Artificial Sequence: Synthetic oligonucleotide
agcucaaggcauguaguga

SEQ ID NO: 1559464 - RNA, 19 nt, Artificial Sequence
  Description of Artificial Sequence: Synthetic oligonucleotide
cuaaagguacaugaucaaa

SEQ ID NO: 1559465 - RNA, 19 nt, Artificial Sequence
  Description of Artificial Sequence: Synthetic oligonucleotide
caauuagcaauauccuaua

SEQ ID NO: 1559466 - RNA, 19 nt, Artificial Sequence
  Description of Artificial Sequence: Synthetic oligonucleotide
acaggagucagagaccguu

SEQ ID NO: 1559467 - RNA, 19 nt, Artificial Sequence
  Description of Artificial Sequence: Synthetic oligonucleotide
cauauagggucgcugggaa

SEQ ID NO: 1559468 - RNA, 19 nt, Artificial Sequence
  Description of Artificial Sequence: Synthetic oligonucleotide
cuguaucuagucaauuugu

SEQ ID NO: 1559469 - RNA, 19 nt, Artificial Sequence
  Description of Artificial Sequence: Synthetic oligonucleotide
aggcauguagugaaggaau

SEQ ID NO: 1559470 - RNA, 19 nt, Artificial Sequence
  Description of Artificial Sequence: Synthetic oligonucleotide
uaguaaccacaaucuguaa

SEQ ID NO: 1559471 - RNA, 19 nt, Artificial Sequence
  Description of Artificial Sequence: Synthetic oligonucleotide
aggucauauagggucgcug

SEQ ID NO: 1559472 - RNA, 19 nt, Artificial Sequence
  Description of Artificial Sequence: Synthetic oligonucleotide
ccuucgaaacaacucaguc

SEQ ID NO: 1559473 - RNA, 19 nt, Artificial Sequence
  Description of Artificial Sequence: Synthetic oligonucleotide
accauugugcguucauauu

SEQ ID NO: 1559474 - RNA, 19 nt, Artificial Sequence
  Description of Artificial Sequence: Synthetic oligonucleotide
uacccuuuuccugcuguga

SEQ ID NO: 1559475 - RNA, 19 nt, Artificial Sequence
  Description of Artificial Sequence: Synthetic oligonucleotide
gagaccguuccaggaaaug

SEQ ID NO: 1559476 - RNA, 19 nt, Artificial Sequence
  Description of Artificial Sequence: Synthetic oligonucleotide
cauuucugaugaaccuguc

SEQ ID NO: 1559477 - RNA, 19 nt, Artificial Sequence
  Description of Artificial Sequence: Synthetic oligonucleotide
aguguguaguaaccacaau

SEQ ID NO: 1559478 - RNA, 19 nt, Artificial Sequence
  Description of Artificial Sequence: Synthetic oligonucleotide
uggucagauaucccuucuu

SEQ ID NO: 1559479 - RNA, 19 nt, Artificial Sequence
  Description of Artificial Sequence: Synthetic oligonucleotide
auguagcagcuaaagaaau

SEQ ID NO: 1559480 - RNA, 19 nt, Artificial Sequence
  Description of Artificial Sequence: Synthetic oligonucleotide
caauuauccuguaucuagu

SEQ ID NO: 1559481 - RNA, 19 nt, Artificial Sequence
  Description of Artificial Sequence: Synthetic oligonucleotide
aaggucauauagggucgcu

SEQ ID NO: 1559482 - RNA, 19 nt, Artificial Sequence
  Description of Artificial Sequence: Synthetic oligonucleotide
guacccuuuuccugcugug

SEQ ID NO: 1559483 - RNA, 19 nt, Artificial Sequence
  Description of Artificial Sequence: Synthetic oligonucleotide
aucuccauuugguguugcu

SEQ ID NO: 1559484 - RNA, 19 nt, Artificial Sequence
  Description of Artificial Sequence: Synthetic oligonucleotide
aaauagcucaaggcaugua

SEQ ID NO: 1559485 - RNA, 19 nt, Artificial Sequence
  Description of Artificial Sequence: Synthetic oligonucleotide
cccagaucgaacuucaaaa

SEQ ID NO: 1559486 - RNA, 19 nt, Artificial Sequence
  Description of Artificial Sequence: Synthetic oligonucleotide
aacuuuccucucucagguu

SEQ ID NO: 1559487 - RNA, 19 nt, Artificial Sequence
  Description of Artificial Sequence: Synthetic oligonucleotide
cugaguguaguguguagua

SEQ ID NO: 1559488 - RNA, 19 nt, Artificial Sequence
  Description of Artificial Sequence: Synthetic oligonucleotide
augaaucagguuacacuga

SEQ ID NO: 1559489 - RNA, 19 nt, Artificial Sequence
  Description of Artificial Sequence: Synthetic oligonucleotide
gauauaucacuuggucucu

SEQ ID NO: 1559490 - RNA, 19 nt, Artificial Sequence
  Description of Artificial Sequence: Synthetic oligonucleotide
auagagccauaaaagucaa

SEQ ID NO: 1559491 - RNA, 19 nt, Artificial Sequence
  Description of Artificial Sequence: Synthetic oligonucleotide
auaucuccauuugguguug

SEQ ID NO: 1559492 - RNA, 19 nt, Artificial Sequence
  Description of Artificial Sequence: Synthetic oligonucleotide
gcucaaggcauguagugaa

SEQ ID NO: 1559493 - RNA, 19 nt, Artificial Sequence
  Description of Artificial Sequence: Synthetic oligonucleotide
auuucgugcucaguguguu

SEQ ID NO: 1559494 - RNA, 19 nt, Artificial Sequence
  Description of Artificial Sequence: Synthetic oligonucleotide
gcccaauuuaauucaggca

SEQ ID NO: 1559495 - RNA, 19 nt, Artificial Sequence
  Description of Artificial Sequence: Synthetic oligonucleotide
cuaagacugaguguagugu

SEQ ID NO: 1559496 - RNA, 19 nt, Artificial Sequence
  Description of Artificial Sequence: Synthetic oligonucleotide
caggagucagagaccguuc

SEQ ID NO: 1559497 - RNA, 19 nt, Artificial Sequence
  Description of Artificial Sequence: Synthetic oligonucleotide
aggacauucuuaguacaua

SEQ ID NO: 1559498 - RNA, 19 nt, Artificial Sequence
  Description of Artificial Sequence: Synthetic oligonucleotide
gaccgagaggguuacacuu

SEQ ID NO: 1559499 - RNA, 19 nt, Artificial Sequence
  Description of Artificial Sequence: Synthetic oligonucleotide
ucccauuaccauggggcac

SEQ ID NO: 1559500 - RNA, 19 nt, Artificial Sequence
  Description of Artificial Sequence: Synthetic oligonucleotide
ggcauguagugaaggaaug

SEQ ID NO: 1559501 - RNA, 19 nt, Artificial Sequence
  Description of Artificial Sequence: Synthetic oligonucleotide
cauguagugccucuacagu

SEQ ID NO: 1559502 - RNA, 19 nt, Artificial Sequence
  Description of Artificial Sequence: Synthetic oligonucleotide
gguacaugaucaaacuuua

SEQ ID NO: 1559503 - RNA, 19 nt, Artificial Sequence
  Description of Artificial Sequence: Synthetic oligonucleotide
agcagcuaaugaccccagu

SEQ ID NO: 1559504 - RNA, 19 nt, Artificial Sequence
  Description of Artificial Sequence: Synthetic oligonucleotide
cauuggccccagaucgaac

SEQ ID NO: 1559505 - RNA, 19 nt, Artificial Sequence
  Description of Artificial Sequence: Synthetic oligonucleotide
caagaacucugaagaggga

SEQ ID NO: 1559506 - RNA, 19 nt, Artificial Sequence
  Description of Artificial Sequence: Synthetic oligonucleotide
caccauuauacaaccacau

SEQ ID NO: 1559507 - RNA, 19 nt, Artificial Sequence
  Description of Artificial Sequence: Synthetic oligonucleotide
uuucgugcucaguguguua

SEQ ID NO: 1559508 - RNA, 19 nt, Artificial Sequence
  Description of Artificial Sequence: Synthetic oligonucleotide
guguugcuaaagguacaug

SEQ ID NO: 1559509 - RNA, 19 nt, Artificial Sequence
  Description of Artificial Sequence: Synthetic oligonucleotide
accuucgaaacaacucagu

SEQ ID NO: 1559510 - RNA, 19 nt, Artificial Sequence
  Description of Artificial Sequence: Synthetic oligonucleotide
aggccauaauucaccaaga

SEQ ID NO: 1559511 - RNA, 19 nt, Artificial Sequence
  Description of Artificial Sequence: Synthetic oligonucleotide
aacuaagaucucggaucaa

SEQ ID NO: 1559512 - RNA, 19 nt, Artificial Sequence
  Description of Artificial Sequence: Synthetic oligonucleotide
gccuagauauuccaaacau

SEQ ID NO: 1559513 - RNA, 19 nt, Artificial Sequence
  Description of Artificial Sequence: Synthetic oligonucleotide
ccuaucuggauauaucacu

SEQ ID NO: 1559514 - RNA, 19 nt, Artificial Sequence
  Description of Artificial Sequence: Synthetic oligonucleotide
gcaguaacauuucgugcuc

SEQ ID NO: 1559515 - RNA, 19 nt, Artificial Sequence
  Description of Artificial Sequence: Synthetic oligonucleotide
agacugaguguagugugua

SEQ ID NO: 1559516 - RNA, 19 nt, Artificial Sequence
  Description of Artificial Sequence: Synthetic oligonucleotide
aucaagggaccaacuugug

SEQ ID NO: 1559517 - RNA, 19 nt, Artificial Sequence
  Description of Artificial Sequence: Synthetic oligonucleotide
gagcagcuaaugaccccag

SEQ ID NO: 1559518 - RNA, 19 nt, Artificial Sequence
  Description of Artificial Sequence: Synthetic oligonucleotide
augcuauccuguaccgaug

SEQ ID NO: 1559519 - RNA, 19 nt, Artificial Sequence
  Description of Artificial Sequence: Synthetic oligonucleotide
agguaucaagggaccaacu

SEQ ID NO: 1559520 - RNA, 19 nt, Artificial Sequence
  Description of Artificial Sequence: Synthetic oligonucleotide
cagagaccguuccaggaaa

SEQ ID NO: 1559521 - RNA, 19 nt, Artificial Sequence
  Description of Artificial Sequence: Synthetic oligonucleotide
ccauuugguguugcuaaag

SEQ ID NO: 1559522 - RNA, 19 nt, Artificial Sequence
  Description of Artificial Sequence: Synthetic oligonucleotide
gccucuacagucauaaggu

SEQ ID NO: 1559523 - RNA, 19 nt, Artificial Sequence
  Description of Artificial Sequence: Synthetic oligonucleotide
ggccauaauucaccaagaa

SEQ ID NO: 1559524 - RNA, 19 nt, Artificial Sequence
  Description of Artificial Sequence: Synthetic oligonucleotide
caccauugugcguucauau

SEQ ID NO: 1559525 - RNA, 19 nt, Artificial Sequence
  Description of Artificial Sequence: Synthetic oligonucleotide
cucaagacuuuguuagaau

SEQ ID NO: 1559526 - RNA, 19 nt, Artificial Sequence
  Description of Artificial Sequence: Synthetic oligonucleotide
cauuucgugcucagugugu

SEQ ID NO: 1559527 - RNA, 19 nt, Artificial Sequence
  Description of Artificial Sequence: Synthetic oligonucleotide
gguuuacaucccaggauga

SEQ ID NO: 1559528 - RNA, 19 nt, Artificial Sequence
  Description of Artificial Sequence: Synthetic oligonucleotide
ccuauacaauauuaagugu

SEQ ID NO: 1559529 - RNA, 19 nt, Artificial Sequence
  Description of Artificial Sequence: Synthetic oligonucleotide
gugcguucauauuugccau

SEQ ID NO: 1559530 - RNA, 19 nt, Artificial Sequence
  Description of Artificial Sequence: Synthetic oligonucleotide
uggccccagaucgaacuuc

SEQ ID NO: 1559531 - RNA, 19 nt, Artificial Sequence
  Description of Artificial Sequence: Synthetic oligonucleotide
aggaucaugccuagauauu

SEQ ID NO: 1559532 - RNA, 19 nt, Artificial Sequence
  Description of Artificial Sequence: Synthetic oligonucleotide
auccuguaccgaugguaua

SEQ ID NO: 1559533 - RNA, 19 nt, Artificial Sequence
  Description of Artificial Sequence: Synthetic oligonucleotide
agcugacuucaaaugguuu

SEQ ID NO: 1559534 - RNA, 19 nt, Artificial Sequence
  Description of Artificial Sequence: Synthetic oligonucleotide
acucagucuaagagaccga

SEQ ID NO: 1559535 - RNA, 19 nt, Artificial Sequence
  Description of Artificial Sequence: Synthetic oligonucleotide
cagcuaaugaccccaguuu

SEQ ID NO: 1559536 - RNA, 19 nt, Artificial Sequence
  Description of Artificial Sequence: Synthetic oligonucleotide
guaacauuucgugcucagu

SEQ ID NO: 1559537 - RNA, 19 nt, Artificial Sequence
  Description of Artificial Sequence: Synthetic oligonucleotide
auucacccaagugcaugau

SEQ ID NO: 1559538 - RNA, 19 nt, Artificial Sequence
  Description of Artificial Sequence: Synthetic oligonucleotide
cugccacuguguaauaaau

SEQ ID NO: 1559539 - RNA, 19 nt, Artificial Sequence
  Description of Artificial Sequence: Synthetic oligonucleotide
uagugccucuacagucaua

SEQ ID NO: 1559540 - RNA, 19 nt, Artificial Sequence
  Description of Artificial Sequence: Synthetic oligonucleotide
gaccuugacacaagaggau

SEQ ID NO: 1559541 - RNA, 19 nt, Artificial Sequence
  Description of Artificial Sequence: Synthetic oligonucleotide
acacugauuuaagcccaau

SEQ ID NO: 1559542 - RNA, 19 nt, Artificial Sequence
  Description of Artificial Sequence: Synthetic oligonucleotide
agagaccguuccaggaaau

SEQ ID NO: 1559543 - RNA, 19 nt, Artificial Sequence
  Description of Artificial Sequence: Synthetic oligonucleotide
accgagaggguuacacuua

SEQ ID NO: 1559544 - RNA, 19 nt, Artificial Sequence
  Description of Artificial Sequence: Synthetic oligonucleotide
ccgaugguauacauuuuaa

SEQ ID NO: 1559545 - RNA, 19 nt, Artificial Sequence
  Description of Artificial Sequence: Synthetic oligonucleotide
gcagcuaaugaccccaguu

SEQ ID NO: 1559546 - RNA, 19 nt, Artificial Sequence
  Description of Artificial Sequence: Synthetic oligonucleotide
cuugacacaagaggaucau

SEQ ID NO: 1559547 - RNA, 19 nt, Artificial Sequence
  Description of Artificial Sequence: Synthetic oligonucleotide
ggguuacacuuauuauuua

SEQ ID NO: 1559548 - RNA, 19 nt, Artificial Sequence
  Description of Artificial Sequence: Synthetic oligonucleotide
guagugccucuacagucau

SEQ ID NO: 1559549 - RNA, 19 nt, Artificial Sequence
  Description of Artificial Sequence: Synthetic oligonucleotide
ggggcacauagaaaugaaa

SEQ ID NO: 1559550 - RNA, 19 nt, Artificial Sequence
  Description of Artificial Sequence: Synthetic oligonucleotide
gguguugcuaaagguacau

SEQ ID NO: 1559551 - RNA, 19 nt, Artificial Sequence
  Description of Artificial Sequence: Synthetic oligonucleotide
caagaggaucaugccuaga

SEQ ID NO: 1559552 - RNA, 19 nt, Artificial Sequence
  Description of Artificial Sequence: Synthetic oligonucleotide
ccuagauauuccaaacauu

SEQ ID NO: 1559553 - RNA, 19 nt, Artificial Sequence
  Description of Artificial Sequence: Synthetic oligonucleotide
gcacaaaugcacacacugu

SEQ ID NO: 1559554 - RNA, 19 nt, Artificial Sequence
  Description of Artificial Sequence: Synthetic oligonucleotide
ccccagaucgaacuucaaa

SEQ ID NO: 1559555 - RNA, 19 nt, Artificial Sequence
  Description of Artificial Sequence: Synthetic oligonucleotide
agagaccgagaggguuaca

SEQ ID NO: 1559556 - RNA, 19 nt, Artificial Sequence
  Description of Artificial Sequence: Synthetic oligonucleotide
ccaagugcaugauaauguu

SEQ ID NO: 1559557 - RNA, 19 nt, Artificial Sequence
  Description of Artificial Sequence: Synthetic oligonucleotide
gccaugauuuaaauccuuu

SEQ ID NO: 1559558 - RNA, 19 nt, Artificial Sequence
  Description of Artificial Sequence: Synthetic oligonucleotide
ccuguaccgaugguauaca

SEQ ID NO: 1559559 - RNA, 19 nt, Artificial Sequence
  Description of Artificial Sequence: Synthetic oligonucleotide
gucauucacccaagugcau

SEQ ID NO: 1559560 - RNA, 19 nt, Artificial Sequence
  Description of Artificial Sequence: Synthetic oligonucleotide
caguguucccaaggucaua

SEQ ID NO: 1559561 - RNA, 19 nt, Artificial Sequence
  Description of Artificial Sequence: Synthetic oligonucleotide
cauuaccauggggcacaua

SEQ ID NO: 1559562 - RNA, 19 nt, Artificial Sequence
  Description of Artificial Sequence: Synthetic oligonucleotide
ccgagaggguuacacuuau

SEQ ID NO: 1559563 - RNA, 19 nt, Artificial Sequence
  Description of Artificial Sequence: Synthetic oligonucleotide
ccacaagaauaaggacauu

SEQ ID NO: 1559564 - RNA, 19 nt, Artificial Sequence
  Description of Artificial Sequence: Synthetic oligonucleotide
aaauacuuuacauccagcc

SEQ ID NO: 1559565 - RNA, 19 nt, Artificial Sequence
  Description of Artificial Sequence: Synthetic oligonucleotide
uuaucuaucacccaagcgg

SEQ ID NO: 1559566 - RNA, 19 nt, Artificial Sequence
  Description of Artificial Sequence: Synthetic oligonucleotide
aaugacuuuaaccacaguc

SEQ ID NO: 1559567 - RNA, 19 nt, Artificial Sequence
  Description of Artificial Sequence: Synthetic oligonucleotide
uuuacuggcauccugagag

SEQ ID NO: 1559568 - RNA, 19 nt, Artificial Sequence
  Description of Artificial Sequence: Synthetic oligonucleotide
uuuauaaugacuucguuug

SEQ ID NO: 1559569 - RNA, 19 nt, Artificial Sequence
  Description of Artificial Sequence: Synthetic oligonucleotide
uguaugaucgguaacauca

SEQ ID NO: 1559570 - RNA, 19 nt, Artificial Sequence
  Description of Artificial Sequence: Synthetic oligonucleotide
acaucuauaggauuuacac

SEQ ID NO: 1559571 - RNA, 19 nt, Artificial Sequence
  Description of Artificial Sequence: Synthetic oligonucleotide
cauauuaacaucuauagga

SEQ ID NO: 1559572 - RNA, 19 nt, Artificial Sequence
  Description of Artificial Sequence: Synthetic oligonucleotide
uagguuuauaaacacauca

SEQ ID NO: 1559573 - RNA, 19 nt, Artificial Sequence
  Description of Artificial Sequence: Synthetic oligonucleotide
cucauauuaacaucuauag

SEQ ID NO: 1559574 - RNA, 19 nt, Artificial Sequence
  Description of Artificial Sequence: Synthetic oligonucleotide
agugauuugggcuuauacg

SEQ ID NO: 1559575 - RNA, 19 nt, Artificial Sequence
  Description of Artificial Sequence: Synthetic oligonucleotide
aaucucucuaauuggccgc

SEQ ID NO: 1559576 - RNA, 19 nt, Artificial Sequence
  Description of Artificial Sequence: Synthetic oligonucleotide
gauuaaagcacguuuuccc

SEQ ID NO: 1559577 - RNA, 19 nt, Artificial Sequence
  Description of Artificial Sequence: Synthetic oligonucleotide
auaggauuuacacuggcag

SEQ ID NO: 1559578 - RNA, 19 nt, Artificial Sequence
  Description of Artificial Sequence: Synthetic oligonucleotide
aaugcuucaauguuuuggu

SEQ ID NO: 1559579 - RNA, 19 nt, Artificial Sequence
  Description of Artificial Sequence: Synthetic oligonucleotide
aaauuuagagcccauguuu

SEQ ID NO: 1559580 - RNA, 19 nt, Artificial Sequence
  Description of Artificial Sequence: Synthetic oligonucleotide
uuuaucuaucacccaagcg

SEQ ID NO: 1559581 - RNA, 19 nt, Artificial Sequence
  Description of Artificial Sequence: Synthetic oligonucleotide
ucuugagaaaauuuagagc

SEQ ID NO: 1559582 - RNA, 19 nt, Artificial Sequence
  Description of Artificial Sequence: Synthetic oligonucleotide
aaccacuucucauauuaac

SEQ ID NO: 1559583 - RNA, 19 nt, Artificial Sequence
  Description of Artificial Sequence: Synthetic oligonucleotide
ucauguucugauugaaucg

SEQ ID NO: 1559584 - RNA, 19 nt, Artificial Sequence
  Description of Artificial Sequence: Synthetic oligonucleotide
uaucuagagggcuagaugu

SEQ ID NO: 1559585 - RNA, 19 nt, Artificial Sequence
  Description of Artificial Sequence: Synthetic oligonucleotide
uuuguucaauaacuggccg

SEQ ID NO: 1559586 - RNA, 19 nt, Artificial Sequence
  Description of Artificial Sequence: Synthetic oligonucleotide
uuaauggcagaccaggcug

SEQ ID NO: 1559587 - RNA, 19 nt, Artificial Sequence
  Description of Artificial Sequence: Synthetic oligonucleotide
aaucaacgacuucaucugc

SEQ ID NO: 1559588 - RNA, 19 nt, Artificial Sequence
  Description of Artificial Sequence: Synthetic oligonucleotide
agcaaugcccaguuggucc

SEQ ID NO: 1559589 - RNA, 19 nt, Artificial Sequence
  Description of Artificial Sequence: Synthetic oligonucleotide
aacgaauucugagagagug

SEQ ID NO: 1559590 - RNA, 19 nt, Artificial Sequence
  Description of Artificial Sequence: Synthetic oligonucleotide
ucuguaucgcaaaaguacc

SEQ ID NO: 1559591 - RNA, 19 nt, Artificial Sequence
  Description of Artificial Sequence: Synthetic oligonucleotide
uuuaaaugacuuuaaccac

SEQ ID NO: 1559592 - RNA, 19 nt, Artificial Sequence
  Description of Artificial Sequence: Synthetic oligonucleotide
uccuccaauauacaaaaga

SEQ ID NO: 1559593 - RNA, 19 nt, Artificial Sequence
  Description of Artificial Sequence: Synthetic oligonucleotide
aauuuagagcccauguuuc

SEQ ID NO: 1559594 - RNA, 19 nt, Artificial Sequence
  Description of Artificial Sequence: Synthetic oligonucleotide
aucuguaucgcaaaaguac

SEQ ID NO: 1559595 - RNA, 19 nt, Artificial Sequence
  Description of Artificial Sequence: Synthetic oligonucleotide
uauacgagaccucauuccc

SEQ ID NO: 1559596 - RNA, 19 nt, Artificial Sequence
  Description of Artificial Sequence: Synthetic oligonucleotide
uaaaugacuuuaaccacag

SEQ ID NO: 1559597 - RNA, 19 nt, Artificial Sequence
  Description of Artificial Sequence: Synthetic oligonucleotide
uucaucuagauauggacca

SEQ ID NO: 1559598 - RNA, 19 nt, Artificial Sequence
  Description of Artificial Sequence: Synthetic oligonucleotide
aaucuuuccuucauccacc

SEQ ID NO: 1559599 - RNA, 19 nt, Artificial Sequence
  Description of Artificial Sequence: Synthetic oligonucleotide
uaaucaacgacuucaucug

SEQ ID NO: 1559600 - RNA, 19 nt, Artificial Sequence
  Description of Artificial Sequence: Synthetic oligonucleotide
uauuuaucuaucacccaag

SEQ ID NO: 1559601 - RNA, 19 nt, Artificial Sequence
  Description of Artificial Sequence: Synthetic oligonucleotide
uugaaucuaacuuggaaaa

SEQ ID NO: 1559602 - RNA, 19 nt, Artificial Sequence
  Description of Artificial Sequence: Synthetic oligonucleotide
uucauuaucuguaucgcaa

SEQ ID NO: 1559603 - RNA, 19 nt, Artificial Sequence
  Description of Artificial Sequence: Synthetic oligonucleotide
ugacguguaaucaacgacu

SEQ ID NO: 1559604 - RNA, 19 nt, Artificial Sequence
  Description of Artificial Sequence: Synthetic oligonucleotide
aaagcacguuuucccaugc

SEQ ID NO: 1559605 - RNA, 19 nt, Artificial Sequence
  Description of Artificial Sequence: Synthetic oligonucleotide
aaaauaucuagagggcuag

SEQ ID NO: 1559606 - RNA, 19 nt, Artificial Sequence
  Description of Artificial Sequence: Synthetic oligonucleotide
cacaucuagguuuauaaac

SEQ ID NO: 1559607 - RNA, 19 nt, Artificial Sequence
  Description of Artificial Sequence: Synthetic oligonucleotide
uuauacgagaccucauucc

SEQ ID NO: 1559608 - RNA, 19 nt, Artificial Sequence
  Description of Artificial Sequence: Synthetic oligonucleotide
ucucauauuaacaucuaua

SEQ ID NO: 1559609 - RNA, 19 nt, Artificial Sequence
  Description of Artificial Sequence: Synthetic oligonucleotide
acaacgaauucugagagag

SEQ ID NO: 1559610 - RNA, 19 nt, Artificial Sequence
  Description of Artificial Sequence: Synthetic oligonucleotide
uaugagugagugauuuggg

SEQ ID NO: 1559611 - RNA, 19 nt, Artificial Sequence
  Description of Artificial Sequence: Synthetic oligonucleotide
ucaauaacuggccgaaucu

SEQ ID NO: 1559612 - RNA, 19 nt, Artificial Sequence
  Description of Artificial Sequence: Synthetic oligonucleotide
ucuauaggauuuacacugg

SEQ ID NO: 1559613 - RNA, 19 nt, Artificial Sequence
  Description of Artificial Sequence: Synthetic oligonucleotide
uuauaaugacuucguuugg

SEQ ID NO: 1559614 - RNA, 19 nt, Artificial Sequence
  Description of Artificial Sequence: Synthetic oligonucleotide
uuguaaguacacaagacuu

SEQ ID NO: 1559615 - RNA, 19 nt, Artificial Sequence
  Description of Artificial Sequence: Synthetic oligonucleotide
ugggacuucagaaaaggga

SEQ ID NO: 1559616 - RNA, 19 nt, Artificial Sequence
  Description of Artificial Sequence: Synthetic oligonucleotide
aaaauuuagagcccauguu

SEQ ID NO: 1559617 - RNA, 19 nt, Artificial Sequence
  Description of Artificial Sequence: Synthetic oligonucleotide
uaucgcaaaaguaccaacu

SEQ ID NO: 1559618 - RNA, 19 nt, Artificial Sequence
  Description of Artificial Sequence: Synthetic oligonucleotide
ucucauaugcaaaggguca

SEQ ID NO: 1559619 - RNA, 19 nt, Artificial Sequence
  Description of Artificial Sequence: Synthetic oligonucleotide
guaugagugagugauuugg

SEQ ID NO: 1559620 - RNA, 19 nt, Artificial Sequence
  Description of Artificial Sequence: Synthetic oligonucleotide
uugaguaugagugagugau

SEQ ID NO: 1559621 - RNA, 19 nt, Artificial Sequence
  Description of Artificial Sequence: Synthetic oligonucleotide
uagauauggaccacuggcc

SEQ ID NO: 1559622 - RNA, 19 nt, Artificial Sequence
  Description of Artificial Sequence: Synthetic oligonucleotide
uuaaggauuucaauugcuc

SEQ ID NO: 1559623 - RNA, 19 nt, Artificial Sequence
  Description of Artificial Sequence: Synthetic oligonucleotide
cacgcuucauauuuaaagc

SEQ ID NO: 1559624 - RNA, 19 nt, Artificial Sequence
  Description of Artificial Sequence: Synthetic oligonucleotide
auaaccacuucucauauua

SEQ ID NO: 1559625 - RNA, 19 nt, Artificial Sequence
  Description of Artificial Sequence: Synthetic oligonucleotide
aaccuuguuaauggcagac

SEQ ID NO: 1559626 - RNA, 19 nt, Artificial Sequence
  Description of Artificial Sequence: Synthetic oligonucleotide
aucgcaaaaguaccaacuc

SEQ ID NO: 1559627 - RNA, 19 nt, Artificial Sequence
  Description of Artificial Sequence: Synthetic oligonucleotide
agcauggacuuuuauaaug

SEQ ID NO: 1559628 - RNA, 19 nt, Artificial Sequence
  Description of Artificial Sequence: Synthetic oligonucleotide
uucaguagauccaccaaca

SEQ ID NO: 1559629 - RNA, 19 nt, Artificial Sequence
  Description of Artificial Sequence: Synthetic oligonucleotide
gaaaggagucaccagaguc

SEQ ID NO: 1559630 - RNA, 19 nt, Artificial Sequence
  Description of Artificial Sequence: Synthetic oligonucleotide
agauccaccaacauuauca

SEQ ID NO: 1559631 - RNA, 19 nt, Artificial Sequence
  Description of Artificial Sequence: Synthetic oligonucleotide
aaagggucacgcuucauau

SEQ ID NO: 1559632 - RNA, 19 nt, Artificial Sequence
  Description of Artificial Sequence: Synthetic oligonucleotide
uugguucucauaugcaaag

SEQ ID NO: 1559633 - RNA, 19 nt, Artificial Sequence
  Description of Artificial Sequence: Synthetic oligonucleotide
uguucugauugaaucgaag

SEQ ID NO: 1559634 - RNA, 19 nt, Artificial Sequence
  Description of Artificial Sequence: Synthetic oligonucleotide
uucaauaacuggccgaauc

SEQ ID NO: 1559635 - RNA, 19 nt, Artificial Sequence
  Description of Artificial Sequence: Synthetic oligonucleotide
acuucuuguaaguacacaa

SEQ ID NO: 1559636 - RNA, 19 nt, Artificial Sequence
  Description of Artificial Sequence: Synthetic oligonucleotide
gugauuugggcuuauacga

SEQ ID NO: 1559637 - RNA, 19 nt, Artificial Sequence
  Description of Artificial Sequence: Synthetic oligonucleotide
uccacaucuagguuuauaa

SEQ ID NO: 1559638 - RNA, 19 nt, Artificial Sequence
  Description of Artificial Sequence: Synthetic oligonucleotide
aacaucauguucugauuga

SEQ ID NO: 1559639 - RNA, 19 nt, Artificial Sequence
  Description of Artificial Sequence: Synthetic oligonucleotide
gugcuaaucucucuaauug

SEQ ID NO: 1559640 - RNA, 19 nt, Artificial Sequence
  Description of Artificial Sequence: Synthetic oligonucleotide
guaaucaacgacuucaucu

SEQ ID NO: 1559641 - RNA, 19 nt, Artificial Sequence
  Description of Artificial Sequence: Synthetic oligonucleotide
aguagauccaccaacauua

SEQ ID NO: 1559642 - RNA, 19 nt, Artificial Sequence
  Description of Artificial Sequence: Synthetic oligonucleotide
uugagaaaauuuagagccc

SEQ ID NO: 1559643 - RNA, 19 nt, Artificial Sequence
  Description of Artificial Sequence: Synthetic oligonucleotide
ugauuugggcuuauacgag

SEQ ID NO: 1559644 - RNA, 19 nt, Artificial Sequence
  Description of Artificial Sequence: Synthetic oligonucleotide
guaauggacuccuugccag

SEQ ID NO: 1559645 - RNA, 19 nt, Artificial Sequence
  Description of Artificial Sequence: Synthetic oligonucleotide
ucgcaaaaguaccaacucc

SEQ ID NO: 1559646 - RNA, 19 nt, Artificial Sequence
  Description of Artificial Sequence: Synthetic oligonucleotide
gguuuauaaacacaucaug

SEQ ID NO: 1559647 - RNA, 19 nt, Artificial Sequence
  Description of Artificial Sequence: Synthetic oligonucleotide
ccacauacggcaaagaggc

SEQ ID NO: 1559648 - RNA, 19 nt, Artificial Sequence
  Description of Artificial Sequence: Synthetic oligonucleotide
cuucuuguaaguacacaag

SEQ ID NO: 1559649 - RNA, 19 nt, Artificial Sequence
  Description of Artificial Sequence: Synthetic oligonucleotide
ugcuucaauguuuugguuc

SEQ ID NO: 1559650 - RNA, 19 nt, Artificial Sequence
  Description of Artificial Sequence: Synthetic oligonucleotide
uuugguucucauaugcaaa

SEQ ID NO: 1559651 - RNA, 19 nt, Artificial Sequence
  Description of Artificial Sequence: Synthetic oligonucleotide
aaggagucaccagagucac

SEQ ID NO: 1559652 - RNA, 19 nt, Artificial Sequence
  Description of Artificial Sequence: Synthetic oligonucleotide
auaucuagagggcuagaug

SEQ ID NO: 1559653 - RNA, 19 nt, Artificial Sequence
  Description of Artificial Sequence: Synthetic oligonucleotide
caugaagaaagcccagcgg

SEQ ID NO: 1559654 - RNA, 19 nt, Artificial Sequence
  Description of Artificial Sequence: Synthetic oligonucleotide
ugugagagccacauacggc

SEQ ID NO: 1559655 - RNA, 19 nt, Artificial Sequence
  Description of Artificial Sequence: Synthetic oligonucleotide
ugagaaaauuuagagccca

SEQ ID NO: 1559656 - RNA, 19 nt, Artificial Sequence
  Description of Artificial Sequence: Synthetic oligonucleotide
acuuccauccuggacaggg

SEQ ID NO: 1559657 - RNA, 19 nt, Artificial Sequence
  Description of Artificial Sequence: Synthetic oligonucleotide
auugaaucgaagaacuuca

SEQ ID NO: 1559658 - RNA, 19 nt, Artificial Sequence
  Description of Artificial Sequence: Synthetic oligonucleotide
agggcuagaugucuggauc

SEQ ID NO: 1559659 - RNA, 19 nt, Artificial Sequence
  Description of Artificial Sequence: Synthetic oligonucleotide
auuuacacuggcagcaugg

SEQ ID NO: 1559660 - RNA, 19 nt, Artificial Sequence
  Description of Artificial Sequence: Synthetic oligonucleotide
accacaacgaauucugaga

SEQ ID NO: 1559661 - RNA, 19 nt, Artificial Sequence
  Description of Artificial Sequence: Synthetic oligonucleotide
aaaggagucaccagaguca

SEQ ID NO: 1559662 - RNA, 19 nt, Artificial Sequence
  Description of Artificial Sequence: Synthetic oligonucleotide
uuggauaguguaugaucgg

SEQ ID NO: 1559663 - RNA, 19 nt, Artificial Sequence
  Description of Artificial Sequence: Synthetic oligonucleotide
aauuucaucuagauaugga

SEQ ID NO: 1559664 - RNA, 19 nt, Artificial Sequence
  Description of Artificial Sequence: Synthetic oligonucleotide
agaggaaagcagcuggcag

SEQ ID NO: 1559665 - RNA, 19 nt, Artificial Sequence
  Description of Artificial Sequence: Synthetic oligonucleotide
guuuggauaguguaugauc

SEQ ID NO: 1559666 - RNA, 19 nt, Artificial Sequence
  Description of Artificial Sequence: Synthetic oligonucleotide
gguucucauaugcaaaggg

SEQ ID NO: 1559667 - RNA, 19 nt, Artificial Sequence
  Description of Artificial Sequence: Synthetic oligonucleotide
uucguuuggauaguguaug

SEQ ID NO: 1559668 - RNA, 19 nt, Artificial Sequence
  Description of Artificial Sequence: Synthetic oligonucleotide
uaggauuuacacuggcagc

SEQ ID NO: 1559669 - RNA, 19 nt, Artificial Sequence
  Description of Artificial Sequence: Synthetic oligonucleotide
uucgcaaauuucaucuaga

SEQ ID NO: 1559670 - RNA, 19 nt, Artificial Sequence
  Description of Artificial Sequence: Synthetic oligonucleotide
guucgcaaauuucaucuag

SEQ ID NO: 1559671 - RNA, 19 nt, Artificial Sequence
  Description of Artificial Sequence: Synthetic oligonucleotide
cuuauacgagaccucauuc

SEQ ID NO: 1559672 - RNA, 19 nt, Artificial Sequence
  Description of Artificial Sequence: Synthetic oligonucleotide
aauaucuagagggcuagau

SEQ ID NO: 1559673 - RNA, 19 nt, Artificial Sequence
  Description of Artificial Sequence: Synthetic oligonucleotide
auaaacacaucaugaaauu

SEQ ID NO: 1559674 - RNA, 19 nt, Artificial Sequence
  Description of Artificial Sequence: Synthetic oligonucleotide
ucauccaccaguucgcaaa

SEQ ID NO: 1559675 - RNA, 19 nt, Artificial Sequence
  Description of Artificial Sequence: Synthetic oligonucleotide
cugugagagccacauacgg

SEQ ID NO: 1559676 - RNA, 19 nt, Artificial Sequence
  Description of Artificial Sequence: Synthetic oligonucleotide
uuguucaauaacuggccga

SEQ ID NO: 1559677 - RNA, 19 nt, Artificial Sequence
  Description of Artificial Sequence: Synthetic oligonucleotide
uccugacguguaaucaacg

SEQ ID NO: 1559678 - RNA, 19 nt, Artificial Sequence
  Description of Artificial Sequence: Synthetic oligonucleotide
aacuccaccugaggcaccc

SEQ ID NO: 1559679 - RNA, 19 nt, Artificial Sequence
  Description of Artificial Sequence: Synthetic oligonucleotide
uaugaucgguaacaucaug

SEQ ID NO: 1559680 - RNA, 19 nt, Artificial Sequence
  Description of Artificial Sequence: Synthetic oligonucleotide
agauauggaccacuggcca

SEQ ID NO: 1559681 - RNA, 19 nt, Artificial Sequence
  Description of Artificial Sequence: Synthetic oligonucleotide
acauacggcaaagaggcag

SEQ ID NO: 1559682 - RNA, 19 nt, Artificial Sequence
  Description of Artificial Sequence: Synthetic oligonucleotide
uaaagcacguuuucccaug

SEQ ID NO: 1559683 - RNA, 19 nt, Artificial Sequence
  Description of Artificial Sequence: Synthetic oligonucleotide
uuuagagcccauguuucag

SEQ ID NO: 1559684 - RNA, 19 nt, Artificial Sequence
  Description of Artificial Sequence: Synthetic oligonucleotide
ugaccauuucuugagaaaa

SEQ ID NO: 1559685 - RNA, 19 nt, Artificial Sequence
  Description of Artificial Sequence: Synthetic oligonucleotide
acaucuagguuuauaaaca

SEQ ID NO: 1559686 - RNA, 19 nt, Artificial Sequence
  Description of Artificial Sequence: Synthetic oligonucleotide
cuuguuaauggcagaccag

SEQ ID NO: 1559687 - RNA, 19 nt, Artificial Sequence
  Description of Artificial Sequence: Synthetic oligonucleotide
caaagaggcagcuugagua

SEQ ID NO: 1559688 - RNA, 19 nt, Artificial Sequence
  Description of Artificial Sequence: Synthetic oligonucleotide
uccaagcuuccuuacaagu

SEQ ID NO: 1559689 - RNA, 19 nt, Artificial Sequence
  Description of Artificial Sequence: Synthetic oligonucleotide
ucucuaauuggccgcuuug

SEQ ID NO: 1559690 - RNA, 19 nt, Artificial Sequence
  Description of Artificial Sequence: Synthetic oligonucleotide
gaagaacuucauucuuucc

SEQ ID NO: 1559691 - RNA, 19 nt, Artificial Sequence
  Description of Artificial Sequence: Synthetic oligonucleotide
uaucuguaucgcaaaagua

SEQ ID NO: 1559692 - RNA, 19 nt, Artificial Sequence
  Description of Artificial Sequence: Synthetic oligonucleotide
gugagagccacauacggca

SEQ ID NO: 1559693 - RNA, 19 nt, Artificial Sequence
  Description of Artificial Sequence: Synthetic oligonucleotide
ucauaugcaaagggucacg

SEQ ID NO: 1559694 - RNA, 19 nt, Artificial Sequence
  Description of Artificial Sequence: Synthetic oligonucleotide
uucucauauuaacaucuau

SEQ ID NO: 1559695 - RNA, 19 nt, Artificial Sequence
  Description of Artificial Sequence: Synthetic oligonucleotide
uguucaauaacuggccgaa

SEQ ID NO: 1559696 - RNA, 19 nt, Artificial Sequence
  Description of Artificial Sequence: Synthetic oligonucleotide
cacaagacuucaaaacuuc

SEQ ID NO: 1559697 - RNA, 19 nt, Artificial Sequence
  Description of Artificial Sequence: Synthetic oligonucleotide
uuuugguucccauggugac

SEQ ID NO: 1559698 - RNA, 19 nt, Artificial Sequence
  Description of Artificial Sequence: Synthetic oligonucleotide
uguugcuccauaaccacuu

SEQ ID NO: 1559699 - RNA, 19 nt, Artificial Sequence
  Description of Artificial Sequence: Synthetic oligonucleotide
cacaucccgacccagaguc

SEQ ID NO: 1559700 - RNA, 19 nt, Artificial Sequence
  Description of Artificial Sequence: Synthetic oligonucleotide
cauacggcaaagaggcagc

SEQ ID NO: 1559701 - RNA, 19 nt, Artificial Sequence
  Description of Artificial Sequence: Synthetic oligonucleotide
acuucguuuggauagugua

SEQ ID NO: 1559702 - RNA, 19 nt, Artificial Sequence
  Description of Artificial Sequence: Synthetic oligonucleotide
aggauuuacacuggcagca

SEQ ID NO: 1559703 - RNA, 19 nt, Artificial Sequence
  Description of Artificial Sequence: Synthetic oligonucleotide
gauuuacacuggcagcaug

SEQ ID NO: 1559704 - RNA, 19 nt, Artificial Sequence
  Description of Artificial Sequence: Synthetic oligonucleotide
ucagcaaugcccaguuggu

SEQ ID NO: 1559705 - RNA, 19 nt, Artificial Sequence
  Description of Artificial Sequence: Synthetic oligonucleotide
caaaacuuccauccuggac

SEQ ID NO: 1559706 - RNA, 19 nt, Artificial Sequence
  Description of Artificial Sequence: Synthetic oligonucleotide
gauuugggcuuauacgaga

SEQ ID NO: 1559707 - RNA, 19 nt, Artificial Sequence
  Description of Artificial Sequence: Synthetic oligonucleotide
gaucgguaacaucauguuc

SEQ ID NO: 1559708 - RNA, 19 nt, Artificial Sequence
  Description of Artificial Sequence: Synthetic oligonucleotide
cugacguguaaucaacgac

SEQ ID NO: 1559709 - RNA, 19 nt, Artificial Sequence
  Description of Artificial Sequence: Synthetic oligonucleotide
auaacuggccgaaucuuuc

SEQ ID NO: 1559710 - RNA, 19 nt, Artificial Sequence
  Description of Artificial Sequence: Synthetic oligonucleotide
uuugggcuuauacgagacc

SEQ ID NO: 1559711 - RNA, 19 nt, Artificial Sequence
  Description of Artificial Sequence: Synthetic oligonucleotide
auuuagagcccauguuuca

SEQ ID NO: 1559712 - RNA, 19 nt, Artificial Sequence
  Description of Artificial Sequence: Synthetic oligonucleotide
ugaaucgaagaacuucauu

SEQ ID NO: 1559713 - RNA, 19 nt, Artificial Sequence
  Description of Artificial Sequence: Synthetic oligonucleotide
caauguuuugguucccaug

SEQ ID NO: 1559714 - RNA, 19 nt, Artificial Sequence
  Description of Artificial Sequence: Synthetic oligonucleotide
agcgguaauggacuccuug

SEQ ID NO: 1559715 - RNA, 19 nt, Artificial Sequence
  Description of Artificial Sequence: Synthetic oligonucleotide
uuccugacguguaaucaac

SEQ ID NO: 1559716 - RNA, 19 nt, Artificial Sequence
  Description of Artificial Sequence: Synthetic oligonucleotide
aauugcucuuccacacuuc

SEQ ID NO: 1559717 - RNA, 19 nt, Artificial Sequence
  Description of Artificial Sequence: Synthetic oligonucleotide
accuuguuaauggcagacc

SEQ ID NO: 1559718 - RNA, 19 nt, Artificial Sequence
  Description of Artificial Sequence: Synthetic oligonucleotide
uguaucgcaaaaguaccaa

SEQ ID NO: 1559719 - RNA, 19 nt, Artificial Sequence
  Description of Artificial Sequence: Synthetic oligonucleotide
augaucgguaacaucaugu

SEQ ID NO: 1559720 - RNA, 19 nt, Artificial Sequence
  Description of Artificial Sequence: Synthetic oligonucleotide
uuagagcccauguuucagu

SEQ ID NO: 1559721 - RNA, 19 nt, Artificial Sequence
  Description of Artificial Sequence: Synthetic oligonucleotide
uggacuccuugccagaaau

SEQ ID NO: 1559722 - RNA, 19 nt, Artificial Sequence
  Description of Artificial Sequence: Synthetic oligonucleotide
cuuguaaguacacaagacu

SEQ ID NO: 1559723 - RNA, 19 nt, Artificial Sequence
  Description of Artificial Sequence: Synthetic oligonucleotide
aggauaaagucaaacaguu

SEQ ID NO: 1559724 - RNA, 19 nt, Artificial Sequence
  Description of Artificial Sequence: Synthetic oligonucleotide
ugcaacaugccaucagcaa

SEQ ID NO: 1559725 - RNA, 19 nt, Artificial Sequence
  Description of Artificial Sequence: Synthetic oligonucleotide
ucuaucacccaagcgggca

SEQ ID NO: 1559726 - RNA, 19 nt, Artificial Sequence
  Description of Artificial Sequence: Synthetic oligonucleotide
ugguucucauaugcaaagg

SEQ ID NO: 1559727 - RNA, 19 nt, Artificial Sequence
  Description of Artificial Sequence: Synthetic oligonucleotide
cuagguuuauaaacacauc

SEQ ID NO: 1559728 - RNA, 19 nt, Artificial Sequence
  Description of Artificial Sequence: Synthetic oligonucleotide
agagucacauagguggcuc

SEQ ID NO: 1559729 - RNA, 19 nt, Artificial Sequence
  Description of Artificial Sequence: Synthetic oligonucleotide
cucaccaguccacaucuag

SEQ ID NO: 1559730 - RNA, 19 nt, Artificial Sequence
  Description of Artificial Sequence: Synthetic oligonucleotide
ucgcaaauuucaucuagau

SEQ ID NO: 1559731 - RNA, 19 nt, Artificial Sequence
  Description of Artificial Sequence: Synthetic oligonucleotide
gcagcauggacuuuuauaa

SEQ ID NO: 1559732 - RNA, 19 nt, Artificial Sequence
  Description of Artificial Sequence: Synthetic oligonucleotide
acgaauucugagagagugc

SEQ ID NO: 1559733 - RNA, 19 nt, Artificial Sequence
  Description of Artificial Sequence: Synthetic oligonucleotide
caaguuuacuggcauccug

SEQ ID NO: 1559734 - RNA, 19 nt, Artificial Sequence
  Description of Artificial Sequence: Synthetic oligonucleotide
uggauaguguaugaucggu

SEQ ID NO: 1559735 - RNA, 19 nt, Artificial Sequence
  Description of Artificial Sequence: Synthetic oligonucleotide
uaaugacuucguuuggaua

SEQ ID NO: 1559736 - RNA, 19 nt, Artificial Sequence
  Description of Artificial Sequence: Synthetic oligonucleotide
ucaaaacuuccauccugga

SEQ ID NO: 1559737 - RNA, 19 nt, Artificial Sequence
  Description of Artificial Sequence: Synthetic oligonucleotide
aauaacuggccgaaucuuu

SEQ ID NO: 1559738 - RNA, 19 nt, Artificial Sequence
  Description of Artificial Sequence: Synthetic oligonucleotide
ucaacgacuucaucugcuc

SEQ ID NO: 1559739 - RNA, 19 nt, Artificial Sequence
  Description of Artificial Sequence: Synthetic oligonucleotide
ccaaccuuguuaauggcag

SEQ ID NO: 1559740 - RNA, 19 nt, Artificial Sequence
  Description of Artificial Sequence: Synthetic oligonucleotide
acguuuucccaugcaauuc

SEQ ID NO: 1559741 - RNA, 19 nt, Artificial Sequence
  Description of Artificial Sequence: Synthetic oligonucleotide
guaccaacuccaccugagg

SEQ ID NO: 1559742 - RNA, 19 nt, Artificial Sequence
  Description of Artificial Sequence: Synthetic oligonucleotide
cauagguggcuccugacca

SEQ ID NO: 1559743 - RNA, 19 nt, Artificial Sequence
  Description of Artificial Sequence: Synthetic oligonucleotide
guaucgcaaaaguaccaac

SEQ ID NO: 1559744 - RNA, 19 nt, Artificial Sequence
  Description of Artificial Sequence: Synthetic oligonucleotide
aaaugacuuuaaccacagu

SEQ ID NO: 1559745 - RNA, 19 nt, Artificial Sequence
  Description of Artificial Sequence: Synthetic oligonucleotide
uucaauguuuugguuccca

SEQ ID NO: 1559746 - RNA, 19 nt, Artificial Sequence
  Description of Artificial Sequence: Synthetic oligonucleotide
ucgguaacaucauguucug

SEQ ID NO: 1559747 - RNA, 19 nt, Artificial Sequence
  Description of Artificial Sequence: Synthetic oligonucleotide
agcacguuuucccaugcaa

SEQ ID NO: 1559748 - RNA, 19 nt, Artificial Sequence
  Description of Artificial Sequence: Synthetic oligonucleotide
caccaguucgcaaauuuca

SEQ ID NO: 1559749 - RNA, 19 nt, Artificial Sequence
  Description of Artificial Sequence: Synthetic oligonucleotide
ucguuuggauaguguauga

SEQ ID NO: 1559750 - RNA, 19 nt, Artificial Sequence
  Description of Artificial Sequence: Synthetic oligonucleotide
caguucgcaaauuucaucu

SEQ ID NO: 1559751 - RNA, 19 nt, Artificial Sequence
  Description of Artificial Sequence: Synthetic oligonucleotide
gcuaaucucucuaauuggc

SEQ ID NO: 1559752 - RNA, 19 nt, Artificial Sequence
  Description of Artificial Sequence: Synthetic oligonucleotide
acccaagcgggcaugacag

SEQ ID NO: 1559753 - RNA, 19 nt, Artificial Sequence
  Description of Artificial Sequence: Synthetic oligonucleotide
acguguaaucaacgacuuc

SEQ ID NO: 1559754 - RNA, 19 nt, Artificial Sequence
  Description of Artificial Sequence: Synthetic oligonucleotide
agguuuauaaacacaucau

SEQ ID NO: 1559755 - RNA, 19 nt, Artificial Sequence
  Description of Artificial Sequence: Synthetic oligonucleotide
ugcaaagggucacgcuuca

SEQ ID NO: 1559756 - RNA, 19 nt, Artificial Sequence
  Description of Artificial Sequence: Synthetic oligonucleotide
augcaaagggucacgcuuc

SEQ ID NO: 1559757 - RNA, 19 nt, Artificial Sequence
  Description of Artificial Sequence: Synthetic oligonucleotide
cauguucugauugaaucga

SEQ ID NO: 1559758 - RNA, 19 nt, Artificial Sequence
  Description of Artificial Sequence: Synthetic oligonucleotide
uuaaagcuguugcuccaua

SEQ ID NO: 1559759 - RNA, 19 nt, Artificial Sequence
  Description of Artificial Sequence: Synthetic oligonucleotide
auauggaccacuggccaug

SEQ ID NO: 1559760 - RNA, 19 nt, Artificial Sequence
  Description of Artificial Sequence: Synthetic oligonucleotide
agucagcggaaacucuucu

SEQ ID NO: 1559761 - RNA, 19 nt, Artificial Sequence
  Description of Artificial Sequence: Synthetic oligonucleotide
uagauccaccaacauuauc

SEQ ID NO: 1559762 - RNA, 19 nt, Artificial Sequence
  Description of Artificial Sequence: Synthetic oligonucleotide
cuuuaaccacagucuuccc

SEQ ID NO: 1559763 - RNA, 19 nt, Artificial Sequence
  Description of Artificial Sequence: Synthetic oligonucleotide
aaauaucuagagggcuaga

SEQ ID NO: 1559764 - RNA, 19 nt, Artificial Sequence
  Description of Artificial Sequence: Synthetic oligonucleotide
aucuagauauggaccacug

SEQ ID NO: 1559765 - RNA, 19 nt, Artificial Sequence
  Description of Artificial Sequence: Synthetic oligonucleotide
uuugguucccauggugacu

SEQ ID NO: 1559766 - RNA, 19 nt, Artificial Sequence
  Description of Artificial Sequence: Synthetic oligonucleotide
accugaggcacccaagauu

SEQ ID NO: 1559767 - RNA, 19 nt, Artificial Sequence
  Description of Artificial Sequence: Synthetic oligonucleotide
agagugccuuguuuccaag

SEQ ID NO: 1559768 - RNA, 19 nt, Artificial Sequence
  Description of Artificial Sequence: Synthetic oligonucleotide
agaaagcccagcgguaaug

SEQ ID NO: 1559769 - RNA, 19 nt, Artificial Sequence
  Description of Artificial Sequence: Synthetic oligonucleotide
gguaauggacuccuugcca

SEQ ID NO: 1559770 - RNA, 19 nt, Artificial Sequence
  Description of Artificial Sequence: Synthetic oligonucleotide
gacuuuaaccacagucuuc

SEQ ID NO: 1559771 - RNA, 19 nt, Artificial Sequence
  Description of Artificial Sequence: Synthetic oligonucleotide
aucuagagggcuagauguc

SEQ ID NO: 1559772 - RNA, 19 nt, Artificial Sequence
  Description of Artificial Sequence: Synthetic oligonucleotide
cuggccgaaucuuuccuuc

SEQ ID NO: 1559773 - RNA, 19 nt, Artificial Sequence
  Description of Artificial Sequence: Synthetic oligonucleotide
acacaagacuucaaaacuu

SEQ ID NO: 1559774 - RNA, 19 nt, Artificial Sequence
  Description of Artificial Sequence: Synthetic oligonucleotide
uucugagagagugccuugu

SEQ ID NO: 1559775 - RNA, 19 nt, Artificial Sequence
  Description of Artificial Sequence: Synthetic oligonucleotide
cuguaucgcaaaaguacca

SEQ ID NO: 1559776 - RNA, 19 nt, Artificial Sequence
  Description of Artificial Sequence: Synthetic oligonucleotide
gcgguaauggacuccuugc

SEQ ID NO: 1559777 - RNA, 19 nt, Artificial Sequence
  Description of Artificial Sequence: Synthetic oligonucleotide
ugggcuuauacgagaccuc

SEQ ID NO: 1559778 - RNA, 19 nt, Artificial Sequence
  Description of Artificial Sequence: Synthetic oligonucleotide
aucuaucacccaagcgggc

SEQ ID NO: 1559779 - RNA, 19 nt, Artificial Sequence
  Description of Artificial Sequence: Synthetic oligonucleotide
ugaguaugagugagugauu

SEQ ID NO: 1559780 - RNA, 19 nt, Artificial Sequence
  Description of Artificial Sequence: Synthetic oligonucleotide
aucaacgacuucaucugcu

SEQ ID NO: 1559781 - RNA, 19 nt, Artificial Sequence
  Description of Artificial Sequence: Synthetic oligonucleotide
guagugcuaaucucucuaa

SEQ ID NO: 1559782 - RNA, 19 nt, Artificial Sequence
  Description of Artificial Sequence: Synthetic oligonucleotide
caccaaccuuguuaauggc

SEQ ID NO: 1559783 - RNA, 19 nt, Artificial Sequence
  Description of Artificial Sequence: Synthetic oligonucleotide
cuugaguaugagugaguga

SEQ ID NO: 1559784 - RNA, 19 nt, Artificial Sequence
  Description of Artificial Sequence: Synthetic oligonucleotide
aauuggccgcuuugggaua

SEQ ID NO: 1559785 - RNA, 19 nt, Artificial Sequence
  Description of Artificial Sequence: Synthetic oligonucleotide
caccagagucacauaggug

SEQ ID NO: 1559786 - RNA, 19 nt, Artificial Sequence
  Description of Artificial Sequence: Synthetic oligonucleotide
caggcguagugcuaaucuc

SEQ ID NO: 1559787 - RNA, 19 nt, Artificial Sequence
  Description of Artificial Sequence: Synthetic oligonucleotide
ugacuucguuuggauagug

SEQ ID NO: 1559788 - RNA, 19 nt, Artificial Sequence
  Description of Artificial Sequence: Synthetic oligonucleotide
guguaugaucgguaacauc

SEQ ID NO: 1559789 - RNA, 19 nt, Artificial Sequence
  Description of Artificial Sequence: Synthetic oligonucleotide
ugucuggaucacaggcacu

SEQ ID NO: 1559790 - RNA, 19 nt, Artificial Sequence
  Description of Artificial Sequence: Synthetic oligonucleotide
aggcguagugcuaaucucu

SEQ ID NO: 1559791 - RNA, 19 nt, Artificial Sequence
  Description of Artificial Sequence: Synthetic oligonucleotide
gggacuucagaaaagggaa

SEQ ID NO: 1559792 - RNA, 19 nt, Artificial Sequence
  Description of Artificial Sequence: Synthetic oligonucleotide
auccugagagcaaacugcu

SEQ ID NO: 1559793 - RNA, 19 nt, Artificial Sequence
  Description of Artificial Sequence: Synthetic oligonucleotide
ucccacugaccacaacgaa

SEQ ID NO: 1559794 - RNA, 19 nt, Artificial Sequence
  Description of Artificial Sequence: Synthetic oligonucleotide
gaagccgcguccuccaaua

SEQ ID NO: 1559795 - RNA, 19 nt, Artificial Sequence
  Description of Artificial Sequence: Synthetic oligonucleotide
uggccgaaucuuuccuuca

SEQ ID NO: 1559796 - RNA, 19 nt, Artificial Sequence
  Description of Artificial Sequence: Synthetic oligonucleotide
auuggccgcuuugggauag

SEQ ID NO: 1559797 - RNA, 19 nt, Artificial Sequence
  Description of Artificial Sequence: Synthetic oligonucleotide
caugacagugcuccuugca

SEQ ID NO: 1559798 - RNA, 19 nt, Artificial Sequence
  Description of Artificial Sequence: Synthetic oligonucleotide
ugaagccgcguccuccaau

SEQ ID NO: 1559799 - RNA, 19 nt, Artificial Sequence
  Description of Artificial Sequence: Synthetic oligonucleotide
gucagcggaaacucuucuc

SEQ ID NO: 1559800 - RNA, 19 nt, Artificial Sequence
  Description of Artificial Sequence: Synthetic oligonucleotide
gagugagugauuugggcuu

SEQ ID NO: 1559801 - RNA, 19 nt, Artificial Sequence
  Description of Artificial Sequence: Synthetic oligonucleotide
acaaguuuacuggcauccu

SEQ ID NO: 1559802 - RNA, 19 nt, Artificial Sequence
  Description of Artificial Sequence: Synthetic oligonucleotide
cugaccauuucuugagaaa

SEQ ID NO: 1559803 - RNA, 19 nt, Artificial Sequence
  Description of Artificial Sequence: Synthetic oligonucleotide
ggacuuuuauaaugacuuc

SEQ ID NO: 1559804 - RNA, 19 nt, Artificial Sequence
  Description of Artificial Sequence: Synthetic oligonucleotide
cacgcacauauucauuuaa

SEQ ID NO: 1559805 - RNA, 19 nt, Artificial Sequence
  Description of Artificial Sequence: Synthetic oligonucleotide
ucuggaucacaggcacuca

SEQ ID NO: 1559806 - RNA, 19 nt, Artificial Sequence
  Description of Artificial Sequence: Synthetic oligonucleotide
auacgagaccucauuccca

SEQ ID NO: 1559807 - RNA, 19 nt, Artificial Sequence
  Description of Artificial Sequence: Synthetic oligonucleotide
gauauggaccacuggccau

SEQ ID NO: 1559808 - RNA, 19 nt, Artificial Sequence
  Description of Artificial Sequence: Synthetic oligonucleotide
agcccagcgguaauggacu

SEQ ID NO: 1559809 - RNA, 19 nt, Artificial Sequence
  Description of Artificial Sequence: Synthetic oligonucleotide
cacaacgaauucugagaga

SEQ ID NO: 1559810 - RNA, 19 nt, Artificial Sequence
  Description of Artificial Sequence: Synthetic oligonucleotide
augcuucaauguuuugguu

SEQ ID NO: 1559811 - RNA, 19 nt, Artificial Sequence
  Description of Artificial Sequence: Synthetic oligonucleotide
augacuucguuuggauagu

SEQ ID NO: 1559812 - RNA, 19 nt, Artificial Sequence
  Description of Artificial Sequence: Synthetic oligonucleotide
cuugcaggcguagugcuaa

SEQ ID NO: 1559813 - RNA, 19 nt, Artificial Sequence
  Description of Artificial Sequence: Synthetic oligonucleotide
gagucagcggaaacucuuc

SEQ ID NO: 1559814 - RNA, 19 nt, Artificial Sequence
  Description of Artificial Sequence: Synthetic oligonucleotide
augcccaguugguccaugu

SEQ ID NO: 1559815 - RNA, 19 nt, Artificial Sequence
  Description of Artificial Sequence: Synthetic oligonucleotide
agcccaaaccucaucucca

SEQ ID NO: 1559816 - RNA, 19 nt, Artificial Sequence
  Description of Artificial Sequence: Synthetic oligonucleotide
ccauguucaggaggaaagg

SEQ ID NO: 1559817 - RNA, 19 nt, Artificial Sequence
  Description of Artificial Sequence: Synthetic oligonucleotide
gggcuagaugucuggauca

SEQ ID NO: 1559818 - RNA, 19 nt, Artificial Sequence
  Description of Artificial Sequence: Synthetic oligonucleotide
cuucguuuggauaguguau

SEQ ID NO: 1559819 - RNA, 19 nt, Artificial Sequence
  Description of Artificial Sequence: Synthetic oligonucleotide
gcuccugaccauuucuuga

SEQ ID NO: 1559820 - RNA, 19 nt, Artificial Sequence
  Description of Artificial Sequence: Synthetic oligonucleotide
ggcguggccucuuuccacc

SEQ ID NO: 1559821 - RNA, 19 nt, Artificial Sequence
  Description of Artificial Sequence: Synthetic oligonucleotide
ccaguucgcaaauuucauc

SEQ ID NO: 1559822 - RNA, 19 nt, Artificial Sequence
  Description of Artificial Sequence: Synthetic oligonucleotide
accaguucgcaaauuucau

SEQ ID NO: 1559823 - RNA, 19 nt, Artificial Sequence
  Description of Artificial Sequence: Synthetic oligonucleotide
uggcacgcacauauucauu

SEQ ID NO: 1559824 - RNA, 19 nt, Artificial Sequence
  Description of Artificial Sequence: Synthetic oligonucleotide
gccgcguccuccaauauac

SEQ ID NO: 1559825 - RNA, 19 nt, Artificial Sequence
  Description of Artificial Sequence: Synthetic oligonucleotide
acgcacauauucauuuaaa

SEQ ID NO: 1559826 - RNA, 19 nt, Artificial Sequence
  Description of Artificial Sequence: Synthetic oligonucleotide
ucccauggugacuccuguc

SEQ ID NO: 1559827 - RNA, 19 nt, Artificial Sequence
  Description of Artificial Sequence: Synthetic oligonucleotide
ugagcaccccaugcuuuca

SEQ ID NO: 1559828 - RNA, 19 nt, Artificial Sequence
  Description of Artificial Sequence: Synthetic oligonucleotide
ccuuacaaguuuacuggca

SEQ ID NO: 1559829 - RNA, 19 nt, Artificial Sequence
  Description of Artificial Sequence: Synthetic oligonucleotide
ggucacgcuucauauuuaa

SEQ ID NO: 1559830 - RNA, 19 nt, Artificial Sequence
  Description of Artificial Sequence: Synthetic oligonucleotide
gaacugcagcccaaaccuc

SEQ ID NO: 1559831 - RNA, 19 nt, Artificial Sequence
  Description of Artificial Sequence: Synthetic oligonucleotide
cacuucuuguaaguacaca

SEQ ID NO: 1559832 - RNA, 19 nt, Artificial Sequence
  Description of Artificial Sequence: Synthetic oligonucleotide
aagccgcguccuccaauau

SEQ ID NO: 1559833 - RNA, 19 nt, Artificial Sequence
  Description of Artificial Sequence: Synthetic oligonucleotide
cuuccauccuggacaggga

SEQ ID NO: 1559834 - RNA, 19 nt, Artificial Sequence
  Description of Artificial Sequence: Synthetic oligonucleotide
auacggcaaagaggcagcu

SEQ ID NO: 1559835 - RNA, 19 nt, Artificial Sequence
  Description of Artificial Sequence: Synthetic oligonucleotide
auggacuccuugccagaaa

SEQ ID NO: 1559836 - RNA, 19 nt, Artificial Sequence
  Description of Artificial Sequence: Synthetic oligonucleotide
ccaccaguucgcaaauuuc

SEQ ID NO: 1559837 - RNA, 19 nt, Artificial Sequence
  Description of Artificial Sequence: Synthetic oligonucleotide
ccugacguguaaucaacga

SEQ ID NO: 1559838 - RNA, 19 nt, Artificial Sequence
  Description of Artificial Sequence: Synthetic oligonucleotide
cacaggcacucagcaagag

SEQ ID NO: 1559839 - RNA, 19 nt, Artificial Sequence
  Description of Artificial Sequence: Synthetic oligonucleotide
ugcaggcguagugcuaauc

SEQ ID NO: 1559840 - RNA, 19 nt, Artificial Sequence
  Description of Artificial Sequence: Synthetic oligonucleotide
gggcuuauacgagaccuca

SEQ ID NO: 1559841 - RNA, 19 nt, Artificial Sequence
  Description of Artificial Sequence: Synthetic oligonucleotide
gacguguaaucaacgacuu

SEQ ID NO: 1559842 - RNA, 19 nt, Artificial Sequence
  Description of Artificial Sequence: Synthetic oligonucleotide
agccgcguccuccaauaua

SEQ ID NO: 1559843 - RNA, 19 nt, Artificial Sequence
  Description of Artificial Sequence: Synthetic oligonucleotide
agucuucccucgggcgugg

SEQ ID NO: 1559844 - RNA, 19 nt, Artificial Sequence
  Description of Artificial Sequence: Synthetic oligonucleotide
cgguaauggacuccuugcc

SEQ ID NO: 1559845 - RNA, 19 nt, Artificial Sequence
  Description of Artificial Sequence: Synthetic oligonucleotide
gagggcuagaugucuggau

SEQ ID NO: 1559846 - RNA, 19 nt, Artificial Sequence
  Description of Artificial Sequence: Synthetic oligonucleotide
cacguuuucccaugcaauu

SEQ ID NO: 1559847 - RNA, 19 nt, Artificial Sequence
  Description of Artificial Sequence: Synthetic oligonucleotide
ccaagauuaaagcacguuu

SEQ ID NO: 1559848 - RNA, 19 nt, Artificial Sequence
  Description of Artificial Sequence: Synthetic oligonucleotide
gaccauuucuugagaaaau

SEQ ID NO: 1559849 - RNA, 19 nt, Artificial Sequence
  Description of Artificial Sequence: Synthetic oligonucleotide
caauugcucuuccacacuu

SEQ ID NO: 1559850 - RNA, 19 nt, Artificial Sequence
  Description of Artificial Sequence: Synthetic oligonucleotide
ggcacgcacauauucauuu

SEQ ID NO: 1559851 - RNA, 19 nt, Artificial Sequence
  Description of Artificial Sequence: Synthetic oligonucleotide
gacuucguuuggauagugu

SEQ ID NO: 1559852 - RNA, 19 nt, Artificial Sequence
  Description of Artificial Sequence: Synthetic oligonucleotide
ccaagcgggcaugacagug

SEQ ID NO: 1559853 - RNA, 19 nt, Artificial Sequence
  Description of Artificial Sequence: Synthetic oligonucleotide
cguccuccaauauacaaaa

SEQ ID NO: 1559854 - RNA, 19 nt, Artificial Sequence
  Description of Artificial Sequence: Synthetic oligonucleotide
caguagauccaccaacauu

SEQ ID NO: 1559855 - RNA, 19 nt, Artificial Sequence
  Description of Artificial Sequence: Synthetic oligonucleotide
caucuagauauggaccacu

SEQ ID NO: 1559856 - RNA, 19 nt, Artificial Sequence
  Description of Artificial Sequence: Synthetic oligonucleotide
gcaugacagugcuccuugc

SEQ ID NO: 1559857 - RNA, 19 nt, Artificial Sequence
  Description of Artificial Sequence: Synthetic oligonucleotide
ggauaguguaugaucggua

SEQ ID NO: 1559858 - RNA, 19 nt, Artificial Sequence
  Description of Artificial Sequence: Synthetic oligonucleotide
uggccgcuuugggauagcu

SEQ ID NO: 1559859 - RNA, 19 nt, Artificial Sequence
  Description of Artificial Sequence: Synthetic oligonucleotide
uacggcaaagaggcagcuu

SEQ ID NO: 1559860 - RNA, 19 nt, Artificial Sequence
  Description of Artificial Sequence: Synthetic oligonucleotide
gcuuauacgagaccucauu

SEQ ID NO: 1559861 - RNA, 19 nt, Artificial Sequence
  Description of Artificial Sequence: Synthetic oligonucleotide
cacauacggcaaagaggca

SEQ ID NO: 1559862 - RNA, 19 nt, Artificial Sequence
  Description of Artificial Sequence: Synthetic oligonucleotide
ggacuccuugccagaaaug

SEQ ID NO: 1559863 - RNA, 19 nt, Artificial Sequence
  Description of Artificial Sequence: Synthetic oligonucleotide
cugcagcccaaaccucauc

SEQ ID NO: 1559864 - RNA, 19 nt, Artificial Sequence
  Description of Artificial Sequence: Synthetic oligonucleotide
ggcuagaugucuggaucac

SEQ ID NO: 1559865 - RNA, 19 nt, Artificial Sequence
  Description of Artificial Sequence: Synthetic oligonucleotide
gcaaagaggcagcuugagu

SEQ ID NO: 1559866 - RNA, 19 nt, Artificial Sequence
  Description of Artificial Sequence: Synthetic oligonucleotide
ccacaucuagguuuauaaa

SEQ ID NO: 1559867 - RNA, 19 nt, Artificial Sequence
  Description of Artificial Sequence: Synthetic oligonucleotide
gccuuguuuccaaggagga

SEQ ID NO: 1559868 - RNA, 19 nt, Artificial Sequence
  Description of Artificial Sequence: Synthetic oligonucleotide
guaugaucgguaacaucau

SEQ ID NO: 1559869 - RNA, 19 nt, Artificial Sequence
  Description of Artificial Sequence: Synthetic oligonucleotide
gagucaccagagucacaua

SEQ ID NO: 1559870 - RNA, 19 nt, Artificial Sequence
  Description of Artificial Sequence: Synthetic oligonucleotide
uugcaggcguagugcuaau

SEQ ID NO: 1559871 - RNA, 19 nt, Artificial Sequence
  Description of Artificial Sequence: Synthetic oligonucleotide
gcaccccaugcuuucauua

SEQ ID NO: 1559872 - RNA, 19 nt, Artificial Sequence
  Description of Artificial Sequence: Synthetic oligonucleotide
gcguccuccaauauacaaa

SEQ ID NO: 1559873 - RNA, 19 nt, Artificial Sequence
  Description of Artificial Sequence: Synthetic oligonucleotide
uucccucgggcguggccuc

SEQ ID NO: 1559874 - RNA, 19 nt, Artificial Sequence
  Description of Artificial Sequence: Synthetic oligonucleotide
cagcggaaacucuucuccu

SEQ ID NO: 1559875 - RNA, 19 nt, Artificial Sequence
  Description of Artificial Sequence: Synthetic oligonucleotide
cauucaggccaccaaccuu

SEQ ID NO: 1559876 - RNA, 19 nt, Artificial Sequence
  Description of Artificial Sequence: Synthetic oligonucleotide
caauaacuggccgaaucuu

SEQ ID NO: 1559877 - RNA, 19 nt, Artificial Sequence
  Description of Artificial Sequence: Synthetic oligonucleotide
cagugcuccuugcaggcgu

SEQ ID NO: 1559878 - RNA, 19 nt, Artificial Sequence
  Description of Artificial Sequence: Synthetic oligonucleotide
cuucccucgggcguggccu

SEQ ID NO: 1559879 - RNA, 19 nt, Artificial Sequence
  Description of Artificial Sequence: Synthetic oligonucleotide
cguagugcuaaucucucua

SEQ ID NO: 1559880 - RNA, 19 nt, Artificial Sequence
  Description of Artificial Sequence: Synthetic oligonucleotide
cucgggcguggccucuuuc

SEQ ID NO: 1559881 - RNA, 19 nt, Artificial Sequence
  Description of Artificial Sequence: Synthetic oligonucleotide
gggcguggccucuuuccac

SEQ ID NO: 1559882 - RNA, 19 nt, Artificial Sequence
  Description of Artificial Sequence: Synthetic oligonucleotide
ccgacccagagucagcgga

SEQ ID NO: 1559883 - RNA, 19 nt, Artificial Sequence
  Description of Artificial Sequence: Synthetic oligonucleotide
cuaucacccaagcgggcau

SEQ ID NO: 1559884 - RNA, 19 nt, Artificial Sequence
  Description of Artificial Sequence: Synthetic oligonucleotide
gcacgcacauauucauuua

SEQ ID NO: 1559885 - RNA, 19 nt, Artificial Sequence
  Description of Artificial Sequence: Synthetic oligonucleotide
gaccaggcugugagagcca

SEQ ID NO: 1559886 - RNA, 19 nt, Artificial Sequence
  Description of Artificial Sequence: Synthetic oligonucleotide
gagcaccccaugcuuucau

SEQ ID NO: 1559887 - RNA, 19 nt, Artificial Sequence
  Description of Artificial Sequence: Synthetic oligonucleotide
gggaugaagccgcguccuc

SEQ ID NO: 1559888 - RNA, 19 nt, Artificial Sequence
  Description of Artificial Sequence: Synthetic oligonucleotide
cauccaccaguucgcaaau

SEQ ID NO: 1559889 - RNA, 19 nt, Artificial Sequence
  Description of Artificial Sequence: Synthetic oligonucleotide
ggcauccugagagcaaacu

SEQ ID NO: 1559890 - RNA, 19 nt, Artificial Sequence
  Description of Artificial Sequence: Synthetic oligonucleotide
gcccacacuccaucaccac

SEQ ID NO: 1559891 - RNA, 19 nt, Artificial Sequence
  Description of Artificial Sequence: Synthetic oligonucleotide
ccaagcuuccuuacaaguu

SEQ ID NO: 1559892 - RNA, 19 nt, Artificial Sequence
  Description of Artificial Sequence: Synthetic oligonucleotide
cccgacccagagucagcgg

SEQ ID NO: 1559893 - RNA, 19 nt, Artificial Sequence
  Description of Artificial Sequence: Synthetic oligonucleotide
cccagcgguaauggacucc

SEQ ID NO: 1559894 - RNA, 19 nt, Artificial Sequence
  Description of Artificial Sequence: Synthetic oligonucleotide
ggauaaagucaaacaguuu

SEQ ID NO: 1559895 - RNA, 19 nt, Artificial Sequence
  Description of Artificial Sequence: Synthetic oligonucleotide
cccacugaccacaacgaau

SEQ ID NO: 1559896 - RNA, 19 nt, Artificial Sequence
  Description of Artificial Sequence: Synthetic oligonucleotide
cagagucacauagguggcu

SEQ ID NO: 1559897 - RNA, 19 nt, Artificial Sequence
  Description of Artificial Sequence: Synthetic oligonucleotide
guucaauaacuggccgaau

SEQ ID NO: 1559898 - RNA, 19 nt, Artificial Sequence
  Description of Artificial Sequence: Synthetic oligonucleotide
aguccacaucuagguuuau

SEQ ID NO: 1559899 - RNA, 19 nt, Artificial Sequence
  Description of Artificial Sequence: Synthetic oligonucleotide
gcacguuuucccaugcaau

SEQ ID NO: 1559900 - RNA, 19 nt, Artificial Sequence
  Description of Artificial Sequence: Synthetic oligonucleotide
gcggaaacucuucuccuuu

SEQ ID NO: 1559901 - RNA, 19 nt, Artificial Sequence
  Description of Artificial Sequence: Synthetic oligonucleotide
caccugaggcacccaagau

SEQ ID NO: 1559902 - RNA, 19 nt, Artificial Sequence
  Description of Artificial Sequence: Synthetic oligonucleotide
gcccagcgguaauggacuc

SEQ ID NO: 1559903 - RNA, 19 nt, Artificial Sequence
  Description of Artificial Sequence: Synthetic oligonucleotide
gucuucccucgggcguggc

SEQ ID NO: 1559904 - RNA, 19 nt, Artificial Sequence
  Description of Artificial Sequence: Synthetic oligonucleotide
ccagcgguaauggacuccu

SEQ ID NO: 1559905 - RNA, 19 nt, Artificial Sequence
  Description of Artificial Sequence: Synthetic oligonucleotide
gcggcagcacacacacuuc

SEQ ID NO: 1559906 - RNA, 19 nt, Artificial Sequence
  Description of Artificial Sequence: Synthetic oligonucleotide
gggucacgcuucauauuua

SEQ ID NO: 1559907 - RNA, 19 nt, Artificial Sequence
  Description of Artificial Sequence: Synthetic oligonucleotide
cccaugcaauucuuggcau

SEQ ID NO: 1559908 - RNA, 19 nt, Artificial Sequence
  Description of Artificial Sequence: Synthetic oligonucleotide
ccuugcaggcguagugcua

SEQ ID NO: 1559909 - RNA, 19 nt, Artificial Sequence
  Description of Artificial Sequence: Synthetic oligonucleotide
ggcuuauacgagaccucau

SEQ ID NO: 1559910 - RNA, 19 nt, Artificial Sequence
  Description of Artificial Sequence: Synthetic oligonucleotide
ccaggcugugagagccaca

SEQ ID NO: 1559911 - RNA, 19 nt, Artificial Sequence
  Description of Artificial Sequence: Synthetic oligonucleotide
ccgcguccuccaauauaca

SEQ ID NO: 1559912 - RNA, 19 nt, Artificial Sequence
  Description of Artificial Sequence: Synthetic oligonucleotide
cguuuggauaguguaugau

SEQ ID NO: 1559913 - RNA, 19 nt, Artificial Sequence
  Description of Artificial Sequence: Synthetic oligonucleotide
cgggcguggccucuuucca

SEQ ID NO: 1559914 - RNA, 19 nt, Artificial Sequence
  Description of Artificial Sequence: Synthetic oligonucleotide
cgguaacaucauguucuga

SEQ ID NO: 1559915 - RNA, 19 nt, Artificial Sequence
  Description of Artificial Sequence: Synthetic oligonucleotide
ggcagcuggcacgcacaua

SEQ ID NO: 1559916 - RNA, 19 nt, Artificial Sequence
  Description of Artificial Sequence: Synthetic oligonucleotide
gcaaagggucacgcuucau

SEQ ID NO: 1559917 - RNA, 19 nt, Artificial Sequence
  Description of Artificial Sequence: Synthetic oligonucleotide
cagcgguaauggacuccuu

SEQ ID NO: 1559918 - RNA, 19 nt, Artificial Sequence
  Description of Artificial Sequence: Synthetic oligonucleotide
cccaagcgggcaugacagu

SEQ ID NO: 1559919 - RNA, 19 nt, Artificial Sequence
  Description of Artificial Sequence: Synthetic oligonucleotide
cccucgggcguggccucuu

SEQ ID NO: 1559920 - RNA, 19 nt, Artificial Sequence
  Description of Artificial Sequence: Synthetic oligonucleotide
uuauaugucgccaugcugg

SEQ ID NO: 1559921 - RNA, 19 nt, Artificial Sequence
  Description of Artificial Sequence: Synthetic oligonucleotide
uguauguagaucaugucgg

SEQ ID NO: 1559922 - RNA, 19 nt, Artificial Sequence
  Description of Artificial Sequence: Synthetic oligonucleotide
aagguaacuguacaaacuc

SEQ ID NO: 1559923 - RNA, 19 nt, Artificial Sequence
  Description of Artificial Sequence: Synthetic oligonucleotide
aaugaaauugccgggcucc

SEQ ID NO: 1559924 - RNA, 19 nt, Artificial Sequence
  Description of Artificial Sequence: Synthetic oligonucleotide
acaagguuaaugcuaaaac

SEQ ID NO: 1559925 - RNA, 19 nt, Artificial Sequence
  Description of Artificial Sequence: Synthetic oligonucleotide
aaacaggucuuccuaagac

SEQ ID NO: 1559926 - RNA, 19 nt, Artificial Sequence
  Description of Artificial Sequence: Synthetic oligonucleotide
gaugguagcggguauaggg

SEQ ID NO: 1559927 - RNA, 19 nt, Artificial Sequence
  Description of Artificial Sequence: Synthetic oligonucleotide
aauacaaggaaaccuuuug

SEQ ID NO: 1559928 - RNA, 19 nt, Artificial Sequence
  Description of Artificial Sequence: Synthetic oligonucleotide
uuguauaaaaucagcuugg

SEQ ID NO: 1559929 - RNA, 19 nt, Artificial Sequence
  Description of Artificial Sequence: Synthetic oligonucleotide
agauauuucccacaaaucu

SEQ ID NO: 1559930 - RNA, 19 nt, Artificial Sequence
  Description of Artificial Sequence: Synthetic oligonucleotide
uguuuagccaaagagaacc

SEQ ID NO: 1559931 - RNA, 19 nt, Artificial Sequence
  Description of Artificial Sequence: Synthetic oligonucleotide
uuaagcauccagcaaauac

SEQ ID NO: 1559932 - RNA, 19 nt, Artificial Sequence
  Description of Artificial Sequence: Synthetic oligonucleotide
aacuuggugaugcaauacg

SEQ ID NO: 1559933 - RNA, 19 nt, Artificial Sequence
  Description of Artificial Sequence: Synthetic oligonucleotide
guguauguagaucaugucg

SEQ ID NO: 1559934 - RNA, 19 nt, Artificial Sequence
  Description of Artificial Sequence: Synthetic oligonucleotide
ugaguguagauguuuagcc

SEQ ID NO: 1559935 - RNA, 19 nt, Artificial Sequence
  Description of Artificial Sequence: Synthetic oligonucleotide
uaagcauccagcaaauaca

SEQ ID NO: 1559936 - RNA, 19 nt, Artificial Sequence
  Description of Artificial Sequence: Synthetic oligonucleotide
ucauuaagcauccagcaaa

SEQ ID NO: 1559937 - RNA, 19 nt, Artificial Sequence
  Description of Artificial Sequence: Synthetic oligonucleotide
agaagguaacuguacaaac

SEQ ID NO: 1559938 - RNA, 19 nt, Artificial Sequence
  Description of Artificial Sequence: Synthetic oligonucleotide
gaccuucacacccagaggg

SEQ ID NO: 1559939 - RNA, 19 nt, Artificial Sequence
  Description of Artificial Sequence: Synthetic oligonucleotide
uuggugaugcaauacggcg

SEQ ID NO: 1559940 - RNA, 19 nt, Artificial Sequence
  Description of Artificial Sequence: Synthetic oligonucleotide
aggaugauccacuuugugg

SEQ ID NO: 1559941 - RNA, 19 nt, Artificial Sequence
  Description of Artificial Sequence: Synthetic oligonucleotide
aaguccgcuggauggaugc

SEQ ID NO: 1559942 - RNA, 19 nt, Artificial Sequence
  Description of Artificial Sequence: Synthetic oligonucleotide
gagggugcaucucauagcg

SEQ ID NO: 1559943 - RNA, 19 nt, Artificial Sequence
  Description of Artificial Sequence: Synthetic oligonucleotide
aacaacucggccuuuggcu

SEQ ID NO: 1559944 - RNA, 19 nt, Artificial Sequence
  Description of Artificial Sequence: Synthetic oligonucleotide
gcagcaaugaaauugccgg

SEQ ID NO: 1559945 - RNA, 19 nt, Artificial Sequence
  Description of Artificial Sequence: Synthetic oligonucleotide
agucggucacucuuuaagc

SEQ ID NO: 1559946 - RNA, 19 nt, Artificial Sequence
  Description of Artificial Sequence: Synthetic oligonucleotide
aguguaaucagaagguaac

SEQ ID NO: 1559947 - RNA, 19 nt, Artificial Sequence
  Description of Artificial Sequence: Synthetic oligonucleotide
ucuaccccaaacuugguga

SEQ ID NO: 1559948 - RNA, 19 nt, Artificial Sequence
  Description of Artificial Sequence: Synthetic oligonucleotide
aaucagaagguaacuguac

SEQ ID NO: 1559949 - RNA, 19 nt, Artificial Sequence
  Description of Artificial Sequence: Synthetic oligonucleotide
ugugugacagcgucgauga

SEQ ID NO: 1559950 - RNA, 19 nt, Artificial Sequence
  Description of Artificial Sequence: Synthetic oligonucleotide
agauagaagcaccauguug

SEQ ID NO: 1559951 - RNA, 19 nt, Artificial Sequence
  Description of Artificial Sequence: Synthetic oligonucleotide
uuugcggacgaccucagga

SEQ ID NO: 1559952 - RNA, 19 nt, Artificial Sequence
  Description of Artificial Sequence: Synthetic oligonucleotide
ugaugcaauacggcgagcg

SEQ ID NO: 1559953 - RNA, 19 nt, Artificial Sequence
  Description of Artificial Sequence: Synthetic oligonucleotide
gauguuaacaacucggccu

SEQ ID NO: 1559954 - RNA, 19 nt, Artificial Sequence
  Description of Artificial Sequence: Synthetic oligonucleotide
aaacuuggugaugcaauac

SEQ ID NO: 1559955 - RNA, 19 nt, Artificial Sequence
  Description of Artificial Sequence: Synthetic oligonucleotide
ucaugaucugcauucgcag

SEQ ID NO: 1559956 - RNA, 19 nt, Artificial Sequence
  Description of Artificial Sequence: Synthetic oligonucleotide
uguaaucagaagguaacug

SEQ ID NO: 1559957 - RNA, 19 nt, Artificial Sequence
  Description of Artificial Sequence: Synthetic oligonucleotide
aaaacaggucuuccuaaga

SEQ ID NO: 1559958 - RNA, 19 nt, Artificial Sequence
  Description of Artificial Sequence: Synthetic oligonucleotide
agcaaugaaauugccgggc

SEQ ID NO: 1559959 - RNA, 19 nt, Artificial Sequence
  Description of Artificial Sequence: Synthetic oligonucleotide
caucauugcagacauugag

SEQ ID NO: 1559960 - RNA, 19 nt, Artificial Sequence
  Description of Artificial Sequence: Synthetic oligonucleotide
aauacggcgagcgggcugg

SEQ ID NO: 1559961 - RNA, 19 nt, Artificial Sequence
  Description of Artificial Sequence: Synthetic oligonucleotide
agagggugcaucucauagc

SEQ ID NO: 1559962 - RNA, 19 nt, Artificial Sequence
  Description of Artificial Sequence: Synthetic oligonucleotide
uccccaaacguugaaaugc

SEQ ID NO: 1559963 - RNA, 19 nt, Artificial Sequence
  Description of Artificial Sequence: Synthetic oligonucleotide
cuucaguguauguagauca

SEQ ID NO: 1559964 - RNA, 19 nt, Artificial Sequence
  Description of Artificial Sequence: Synthetic oligonucleotide
agcaaauacaaggaaaccu

SEQ ID NO: 1559965 - RNA, 19 nt, Artificial Sequence
  Description of Artificial Sequence: Synthetic oligonucleotide
aacccaaauccagagucac

SEQ ID NO: 1559966 - RNA, 19 nt, Artificial Sequence
  Description of Artificial Sequence: Synthetic oligonucleotide
cucuacuacagacacuuag

SEQ ID NO: 1559967 - RNA, 19 nt, Artificial Sequence
  Description of Artificial Sequence: Synthetic oligonucleotide
ucaguaacccuggucacgg

SEQ ID NO: 1559968 - RNA, 19 nt, Artificial Sequence
  Description of Artificial Sequence: Synthetic oligonucleotide
cugauguuaacaacucggc

SEQ ID NO: 1559969 - RNA, 19 nt, Artificial Sequence
  Description of Artificial Sequence: Synthetic oligonucleotide
auaaaaucagcuuggggua

SEQ ID NO: 1559970 - RNA, 19 nt, Artificial Sequence
  Description of Artificial Sequence: Synthetic oligonucleotide
cuacuacagacacuuagag

SEQ ID NO: 1559971 - RNA, 19 nt, Artificial Sequence
  Description of Artificial Sequence: Synthetic oligonucleotide
ucacucuuuaagcugucca

SEQ ID NO: 1559972 - RNA, 19 nt, Artificial Sequence
  Description of Artificial Sequence: Synthetic oligonucleotide
caaacguugaaaugcccgc

SEQ ID NO: 1559973 - RNA, 19 nt, Artificial Sequence
  Description of Artificial Sequence: Synthetic oligonucleotide
uaaucagaagguaacugua

SEQ ID NO: 1559974 - RNA, 19 nt, Artificial Sequence
  Description of Artificial Sequence: Synthetic oligonucleotide
ucaaaguacuucuugccau

SEQ ID NO: 1559975 - RNA, 19 nt, Artificial Sequence
  Description of Artificial Sequence: Synthetic oligonucleotide
gaaauugccgggcuccacc

SEQ ID NO: 1559976 - RNA, 19 nt, Artificial Sequence
  Description of Artificial Sequence: Synthetic oligonucleotide
aguguagauguuuagccaa

SEQ ID NO: 1559977 - RNA, 19 nt, Artificial Sequence
  Description of Artificial Sequence: Synthetic oligonucleotide
uucgcucggggcuauagag

SEQ ID NO: 1559978 - RNA, 19 nt, Artificial Sequence
  Description of Artificial Sequence: Synthetic oligonucleotide
ugaaaugcccgcauuguua

SEQ ID NO: 1559979 - RNA, 19 nt, Artificial Sequence
  Description of Artificial Sequence: Synthetic oligonucleotide
aguaacccuggucacgggg

SEQ ID NO: 1559980 - RNA, 19 nt, Artificial Sequence
  Description of Artificial Sequence: Synthetic oligonucleotide
guaguaguccaugggaugg

SEQ ID NO: 1559981 - RNA, 19 nt, Artificial Sequence
  Description of Artificial Sequence: Synthetic oligonucleotide
uucacguagacaagguuaa

SEQ ID NO: 1559982 - RNA, 19 nt, Artificial Sequence
  Description of Artificial Sequence: Synthetic oligonucleotide
uuugccgcuagccucauuu

SEQ ID NO: 1559983 - RNA, 19 nt, Artificial Sequence
  Description of Artificial Sequence: Synthetic oligonucleotide
uaggcagucggagaaagcc

SEQ ID NO: 1559984 - RNA, 19 nt, Artificial Sequence
  Description of Artificial Sequence: Synthetic oligonucleotide
acaacucggccuuuggcuc

SEQ ID NO: 1559985 - RNA, 19 nt, Artificial Sequence
  Description of Artificial Sequence: Synthetic oligonucleotide
ggaaggauuucguugugcg

SEQ ID NO: 1559986 - RNA, 19 nt, Artificial Sequence
  Description of Artificial Sequence: Synthetic oligonucleotide
agauguuuagccaaagaga

SEQ ID NO: 1559987 - RNA, 19 nt, Artificial Sequence
  Description of Artificial Sequence: Synthetic oligonucleotide
gaugcaauacggcgagcgg

SEQ ID NO: 1559988 - RNA, 19 nt, Artificial Sequence
  Description of Artificial Sequence: Synthetic oligonucleotide
aguaguaguccaugggaug

SEQ ID NO: 1559989 - RNA, 19 nt, Artificial Sequence
  Description of Artificial Sequence: Synthetic oligonucleotide
agguuaaugcuaaaacagg

SEQ ID NO: 1559990 - RNA, 19 nt, Artificial Sequence
  Description of Artificial Sequence: Synthetic oligonucleotide
augguucucagucggucac

SEQ ID NO: 1559991 - RNA, 19 nt, Artificial Sequence
  Description of Artificial Sequence: Synthetic oligonucleotide
gcugauguuaacaacucgg

SEQ ID NO: 1559992 - RNA, 19 nt, Artificial Sequence
  Description of Artificial Sequence: Synthetic oligonucleotide
uaacaacucggccuuuggc

SEQ ID NO: 1559993 - RNA, 19 nt, Artificial Sequence
  Description of Artificial Sequence: Synthetic oligonucleotide
ugcaauacggcgagcgggc

SEQ ID NO: 1559994 - RNA, 19 nt, Artificial Sequence
  Description of Artificial Sequence: Synthetic oligonucleotide
uggugaugcaauacggcga

SEQ ID NO: 1559995 - RNA, 19 nt, Artificial Sequence
  Description of Artificial Sequence: Synthetic oligonucleotide
ugugucuugccccauucuc

SEQ ID NO: 1559996 - RNA, 19 nt, Artificial Sequence
  Description of Artificial Sequence: Synthetic oligonucleotide
uaaaacagugugugucuug

SEQ ID NO: 1559997 - RNA, 19 nt, Artificial Sequence
  Description of Artificial Sequence: Synthetic oligonucleotide
cuuauaugucgccaugcug

SEQ ID NO: 1559998 - RNA, 19 nt, Artificial Sequence
  Description of Artificial Sequence: Synthetic oligonucleotide
gagcggacagucuccaccg

SEQ ID NO: 1559999 - RNA, 19 nt, Artificial Sequence
  Description of Artificial Sequence: Synthetic oligonucleotide
uugccccugaggcuuaggg

SEQ ID NO: 1560000 - RNA, 19 nt, Artificial Sequence
  Description of Artificial Sequence: Synthetic oligonucleotide
acuuggugaugcaauacgg

SEQ ID NO: 1560001 - RNA, 19 nt, Artificial Sequence
  Description of Artificial Sequence: Synthetic oligonucleotide
uacuacagacacuuagagu

SEQ ID NO: 1560002 - RNA, 19 nt, Artificial Sequence
  Description of Artificial Sequence: Synthetic oligonucleotide
uuucguugugcgcacugug

SEQ ID NO: 1560003 - RNA, 19 nt, Artificial Sequence
  Description of Artificial Sequence: Synthetic oligonucleotide
gguagauagaagcaccaug

SEQ ID NO: 1560004 - RNA, 19 nt, Artificial Sequence
  Description of Artificial Sequence: Synthetic oligonucleotide
gguggcagcggucagggcg

SEQ ID NO: 1560005 - RNA, 19 nt, Artificial Sequence
  Description of Artificial Sequence: Synthetic oligonucleotide
ccauucaccauucacguag

SEQ ID NO: 1560006 - RNA, 19 nt, Artificial Sequence
  Description of Artificial Sequence: Synthetic oligonucleotide
uaggaugauccacuuugug

SEQ ID NO: 1560007 - RNA, 19 nt, Artificial Sequence
  Description of Artificial Sequence: Synthetic oligonucleotide
ucggucacucuuuaagcug

SEQ ID NO: 1560008 - RNA, 19 nt, Artificial Sequence
  Description of Artificial Sequence: Synthetic oligonucleotide
gaaggauuucguugugcgc

SEQ ID NO: 1560009 - RNA, 19 nt, Artificial Sequence
  Description of Artificial Sequence: Synthetic oligonucleotide
gacagcgucgaugacggag

SEQ ID NO: 1560010 - RNA, 19 nt, Artificial Sequence
  Description of Artificial Sequence: Synthetic oligonucleotide
uuguuaaccaggccccaca

SEQ ID NO: 1560011 - RNA, 19 nt, Artificial Sequence
  Description of Artificial Sequence: Synthetic oligonucleotide
aaaugcccgcauuguuaac

SEQ ID NO: 1560012 - RNA, 19 nt, Artificial Sequence
  Description of Artificial Sequence: Synthetic oligonucleotide
gcuugggguagauagaagc

SEQ ID NO: 1560013 - RNA, 19 nt, Artificial Sequence
  Description of Artificial Sequence: Synthetic oligonucleotide
uguagauguuuagccaaag

SEQ ID NO: 1560014 - RNA, 19 nt, Artificial Sequence
  Description of Artificial Sequence: Synthetic oligonucleotide
gaaaugcccgcauuguuaa

SEQ ID NO: 1560015 - RNA, 19 nt, Artificial Sequence
  Description of Artificial Sequence: Synthetic oligonucleotide
aggaaggauuucguugugc

SEQ ID NO: 1560016 - RNA, 19 nt, Artificial Sequence
  Description of Artificial Sequence: Synthetic oligonucleotide
ccaaacguugaaaugcccg

SEQ ID NO: 1560017 - RNA, 19 nt, Artificial Sequence
  Description of Artificial Sequence: Synthetic oligonucleotide
uccuaaggcgacccggcag

SEQ ID NO: 1560018 - RNA, 19 nt, Artificial Sequence
  Description of Artificial Sequence: Synthetic oligonucleotide
aacguugaaaugcccgcau

SEQ ID NO: 1560019 - RNA, 19 nt, Artificial Sequence
  Description of Artificial Sequence: Synthetic oligonucleotide
gauuucguugugcgcacug

SEQ ID NO: 1560020 - RNA, 19 nt, Artificial Sequence
  Description of Artificial Sequence: Synthetic oligonucleotide
ugcauucgcagccaccagu

SEQ ID NO: 1560021 - RNA, 19 nt, Artificial Sequence
  Description of Artificial Sequence: Synthetic oligonucleotide
ugaggcuuagggccacccg

SEQ ID NO: 1560022 - RNA, 19 nt, Artificial Sequence
  Description of Artificial Sequence: Synthetic oligonucleotide
gguaacuguacaaacuccc

SEQ ID NO: 1560023 - RNA, 19 nt, Artificial Sequence
  Description of Artificial Sequence: Synthetic oligonucleotide
uucucagucggucacucuu

SEQ ID NO: 1560024 - RNA, 19 nt, Artificial Sequence
  Description of Artificial Sequence: Synthetic oligonucleotide
uccuuauaugucgccaugc

SEQ ID NO: 1560025 - RNA, 19 nt, Artificial Sequence
  Description of Artificial Sequence: Synthetic oligonucleotide
uccacuuuguggcuccuaa

SEQ ID NO: 1560026 - RNA, 19 nt, Artificial Sequence
  Description of Artificial Sequence: Synthetic oligonucleotide
cauacugcugauguuaaca

SEQ ID NO: 1560027 - RNA, 19 nt, Artificial Sequence
  Description of Artificial Sequence: Synthetic oligonucleotide
ugauccacuuuguggcucc

SEQ ID NO: 1560028 - RNA, 19 nt, Artificial Sequence
  Description of Artificial Sequence: Synthetic oligonucleotide
ggugaugcaauacggcgag

SEQ ID NO: 1560029 - RNA, 19 nt, Artificial Sequence
  Description of Artificial Sequence: Synthetic oligonucleotide
auguuaacaacucggccuu

SEQ ID NO: 1560030 - RNA, 19 nt, Artificial Sequence
  Description of Artificial Sequence: Synthetic oligonucleotide
agcaucaccuuuguccuuc

SEQ ID NO: 1560031 - RNA, 19 nt, Artificial Sequence
  Description of Artificial Sequence: Synthetic oligonucleotide
aggaugcuggguaaaacag

SEQ ID NO: 1560032 - RNA, 19 nt, Artificial Sequence
  Description of Artificial Sequence: Synthetic oligonucleotide
aaacguugaaaugcccgca

SEQ ID NO: 1560033 - RNA, 19 nt, Artificial Sequence
  Description of Artificial Sequence: Synthetic oligonucleotide
uauaugucgccaugcuggu

SEQ ID NO: 1560034 - RNA, 19 nt, Artificial Sequence
  Description of Artificial Sequence: Synthetic oligonucleotide
aggaagcucaucccacauc

SEQ ID NO: 1560035 - RNA, 19 nt, Artificial Sequence
  Description of Artificial Sequence: Synthetic oligonucleotide
gaugguucucagucgguca

SEQ ID NO: 1560036 - RNA, 19 nt, Artificial Sequence
  Description of Artificial Sequence: Synthetic oligonucleotide
ugcggacgaccucaggaag

SEQ ID NO: 1560037 - RNA, 19 nt, Artificial Sequence
  Description of Artificial Sequence: Synthetic oligonucleotide
ucuucaguguauguagauc

SEQ ID NO: 1560038 - RNA, 19 nt, Artificial Sequence
  Description of Artificial Sequence: Synthetic oligonucleotide
auucacguagacaagguua

SEQ ID NO: 1560039 - RNA, 19 nt, Artificial Sequence
  Description of Artificial Sequence: Synthetic oligonucleotide
uucccacaaaucuuuguau

SEQ ID NO: 1560040 - RNA, 19 nt, Artificial Sequence
  Description of Artificial Sequence: Synthetic oligonucleotide
augguagcggguauagggg

SEQ ID NO: 1560041 - RNA, 19 nt, Artificial Sequence
  Description of Artificial Sequence: Synthetic oligonucleotide
auuguuaaccaggccccac

SEQ ID NO: 1560042 - RNA, 19 nt, Artificial Sequence
  Description of Artificial Sequence: Synthetic oligonucleotide
aucaguaacccuggucacg

SEQ ID NO: 1560043 - RNA, 19 nt, Artificial Sequence
  Description of Artificial Sequence: Synthetic oligonucleotide
ucuuccuaagacaguggau

SEQ ID NO: 1560044 - RNA, 19 nt, Artificial Sequence
  Description of Artificial Sequence: Synthetic oligonucleotide
cuggguuggccauucggcc

SEQ ID NO: 1560045 - RNA, 19 nt, Artificial Sequence
  Description of Artificial Sequence: Synthetic oligonucleotide
cuugggguagauagaagca

SEQ ID NO: 1560046 - RNA, 19 nt, Artificial Sequence
  Description of Artificial Sequence: Synthetic oligonucleotide
ggagauggccccuggaaag

SEQ ID NO: 1560047 - RNA, 19 nt, Artificial Sequence
  Description of Artificial Sequence: Synthetic oligonucleotide
ugccgcuagccucauuugc

SEQ ID NO: 1560048 - RNA, 19 nt, Artificial Sequence
  Description of Artificial Sequence: Synthetic oligonucleotide
ugcggugaaggaugcuggg

SEQ ID NO: 1560049 - RNA, 19 nt, Artificial Sequence
  Description of Artificial Sequence: Synthetic oligonucleotide
gcagguuguaggaugaucc

SEQ ID NO: 1560050 - RNA, 19 nt, Artificial Sequence
  Description of Artificial Sequence: Synthetic oligonucleotide
cauucggcccagcauacug

SEQ ID NO: 1560051 - RNA, 19 nt, Artificial Sequence
  Description of Artificial Sequence: Synthetic oligonucleotide
uugaaaugcccgcauuguu

SEQ ID NO: 1560052 - RNA, 19 nt, Artificial Sequence
  Description of Artificial Sequence: Synthetic oligonucleotide
auucggcccagcauacugc

SEQ ID NO: 1560053 - RNA, 19 nt, Artificial Sequence
  Description of Artificial Sequence: Synthetic oligonucleotide
gacaagguuaaugcuaaaa

SEQ ID NO: 1560054 - RNA, 19 nt, Artificial Sequence
  Description of Artificial Sequence: Synthetic oligonucleotide
gacuggagcggacagucuc

SEQ ID NO: 1560055 - RNA, 19 nt, Artificial Sequence
  Description of Artificial Sequence: Synthetic oligonucleotide
ucggagauggccccuggaa

SEQ ID NO: 1560056 - RNA, 19 nt, Artificial Sequence
  Description of Artificial Sequence: Synthetic oligonucleotide
cucggggcuauagagacug

SEQ ID NO: 1560057 - RNA, 19 nt, Artificial Sequence
  Description of Artificial Sequence: Synthetic oligonucleotide
guagauguuuagccaaaga

SEQ ID NO: 1560058 - RNA, 19 nt, Artificial Sequence
  Description of Artificial Sequence: Synthetic oligonucleotide
acuggagcggacagucucc

SEQ ID NO: 1560059 - RNA, 19 nt, Artificial Sequence
  Description of Artificial Sequence: Synthetic oligonucleotide
agcguaggcagucggagaa

SEQ ID NO: 1560060 - RNA, 19 nt, Artificial Sequence
  Description of Artificial Sequence: Synthetic oligonucleotide
ucggccuuuggcucuccgg

SEQ ID NO: 1560061 - RNA, 19 nt, Artificial Sequence
  Description of Artificial Sequence: Synthetic oligonucleotide
caggggucuggagagacgg

SEQ ID NO: 1560062 - RNA, 19 nt, Artificial Sequence
  Description of Artificial Sequence: Synthetic oligonucleotide
guagacaagguuaaugcua

SEQ ID NO: 1560063 - RNA, 19 nt, Artificial Sequence
  Description of Artificial Sequence: Synthetic oligonucleotide
aguugugacaggggucugg

SEQ ID NO: 1560064 - RNA, 19 nt, Artificial Sequence
  Description of Artificial Sequence: Synthetic oligonucleotide
cuuccuaagacaguggaua

SEQ ID NO: 1560065 - RNA, 19 nt, Artificial Sequence
  Description of Artificial Sequence: Synthetic oligonucleotide
ggcuauagagacugguggc

SEQ ID NO: 1560066 - RNA, 19 nt, Artificial Sequence
  Description of Artificial Sequence: Synthetic oligonucleotide
agcagguuguaggaugauc

SEQ ID NO: 1560067 - RNA, 19 nt, Artificial Sequence
  Description of Artificial Sequence: Synthetic oligonucleotide
gcgucgaugacggaggacg

SEQ ID NO: 1560068 - RNA, 19 nt, Artificial Sequence
  Description of Artificial Sequence: Synthetic oligonucleotide
caccauguugccccugagg

SEQ ID NO: 1560069 - RNA, 19 nt, Artificial Sequence
  Description of Artificial Sequence: Synthetic oligonucleotide
uggguaaaacagugugugu

SEQ ID NO: 1560070 - RNA, 19 nt, Artificial Sequence
  Description of Artificial Sequence: Synthetic oligonucleotide
ucucauagcguaggcaguc

SEQ ID NO: 1560071 - RNA, 19 nt, Artificial Sequence
  Description of Artificial Sequence: Synthetic oligonucleotide
gaaggaugcuggguaaaac

SEQ ID NO: 1560072 - RNA, 19 nt, Artificial Sequence
  Description of Artificial Sequence: Synthetic oligonucleotide
uagauagaagcaccauguu

SEQ ID NO: 1560073 - RNA, 19 nt, Artificial Sequence
  Description of Artificial Sequence: Synthetic oligonucleotide
ugcgcacugugccccagag

SEQ ID NO: 1560074 - RNA, 19 nt, Artificial Sequence
  Description of Artificial Sequence: Synthetic oligonucleotide
cauucccuucucagggucc

SEQ ID NO: 1560075 - RNA, 19 nt, Artificial Sequence
  Description of Artificial Sequence: Synthetic oligonucleotide
aacccuggucacggggacc

SEQ ID NO: 1560076 - RNA, 19 nt, Artificial Sequence
  Description of Artificial Sequence: Synthetic oligonucleotide
cucuaccccaaacuuggug

SEQ ID NO: 1560077 - RNA, 19 nt, Artificial Sequence
  Description of Artificial Sequence: Synthetic oligonucleotide
ccucccaucaguaacccug

SEQ ID NO: 1560078 - RNA, 19 nt, Artificial Sequence
  Description of Artificial Sequence: Synthetic oligonucleotide
guuuagccaaagagaaccc

SEQ ID NO: 1560079 - RNA, 19 nt, Artificial Sequence
  Description of Artificial Sequence: Synthetic oligonucleotide
augauccacuuuguggcuc

SEQ ID NO: 1560080 - RNA, 19 nt, Artificial Sequence
  Description of Artificial Sequence: Synthetic oligonucleotide
uugcggacgaccucaggaa

SEQ ID NO: 1560081 - RNA, 19 nt, Artificial Sequence
  Description of Artificial Sequence: Synthetic oligonucleotide
gauucgcucggggcuauag

SEQ ID NO: 1560082 - RNA, 19 nt, Artificial Sequence
  Description of Artificial Sequence: Synthetic oligonucleotide
ggagcggacagucuccacc

SEQ ID NO: 1560083 - RNA, 19 nt, Artificial Sequence
  Description of Artificial Sequence: Synthetic oligonucleotide
guauguagaucaugucgga

SEQ ID NO: 1560084 - RNA, 19 nt, Artificial Sequence
  Description of Artificial Sequence: Synthetic oligonucleotide
ucucucuacuacagacacu

SEQ ID NO: 1560085 - RNA, 19 nt, Artificial Sequence
  Description of Artificial Sequence: Synthetic oligonucleotide
ugucggagauggccccugg

SEQ ID NO: 1560086 - RNA, 19 nt, Artificial Sequence
  Description of Artificial Sequence: Synthetic oligonucleotide
caaugaaauugccgggcuc

SEQ ID NO: 1560087 - RNA, 19 nt, Artificial Sequence
  Description of Artificial Sequence: Synthetic oligonucleotide
guugugcgcacugugcccc

SEQ ID NO: 1560088 - RNA, 19 nt, Artificial Sequence
  Description of Artificial Sequence: Synthetic oligonucleotide
augacggaggacgugucug

SEQ ID NO: 1560089 - RNA, 19 nt, Artificial Sequence
  Description of Artificial Sequence: Synthetic oligonucleotide
ugaaggaugcuggguaaaa

SEQ ID NO: 1560090 - RNA, 19 nt, Artificial Sequence
  Description of Artificial Sequence: Synthetic oligonucleotide
gugcaucucauagcguagg

SEQ ID NO: 1560091 - RNA, 19 nt, Artificial Sequence
  Description of Artificial Sequence: Synthetic oligonucleotide
uucggcccagcauacugcu

SEQ ID NO: 1560092 - RNA, 19 nt, Artificial Sequence
  Description of Artificial Sequence: Synthetic oligonucleotide
ucaugucagcagguuguag

SEQ ID NO: 1560093 - RNA, 19 nt, Artificial Sequence
  Description of Artificial Sequence: Synthetic oligonucleotide
ucgcucggggcuauagaga

SEQ ID NO: 1560094 - RNA, 19 nt, Artificial Sequence
  Description of Artificial Sequence: Synthetic oligonucleotide
gugaccaggacagcuuugc

SEQ ID NO: 1560095 - RNA, 19 nt, Artificial Sequence
  Description of Artificial Sequence: Synthetic oligonucleotide
aggacagcuuugccgcuag

SEQ ID NO: 1560096 - RNA, 19 nt, Artificial Sequence
  Description of Artificial Sequence: Synthetic oligonucleotide
auuugccucacuggcauaa

SEQ ID NO: 1560097 - RNA, 19 nt, Artificial Sequence
  Description of Artificial Sequence: Synthetic oligonucleotide
guaguccaugggaugguag

SEQ ID NO: 1560098 - RNA, 19 nt, Artificial Sequence
  Description of Artificial Sequence: Synthetic oligonucleotide
ccuaagacaguggauaauc

SEQ ID NO: 1560099 - RNA, 19 nt, Artificial Sequence
  Description of Artificial Sequence: Synthetic oligonucleotide
gaggaaggauuucguugug

SEQ ID NO: 1560100 - RNA, 19 nt, Artificial Sequence
  Description of Artificial Sequence: Synthetic oligonucleotide
cuugaccccagcaucaccu

SEQ ID NO: 1560101 - RNA, 19 nt, Artificial Sequence
  Description of Artificial Sequence: Synthetic oligonucleotide
ccuaaggcgacccggcagg

SEQ ID NO: 1560102 - RNA, 19 nt, Artificial Sequence
  Description of Artificial Sequence: Synthetic oligonucleotide
gcaucaugucagcagguug

SEQ ID NO: 1560103 - RNA, 19 nt, Artificial Sequence
  Description of Artificial Sequence: Synthetic oligonucleotide
gcuaaaacaggucuuccua

SEQ ID NO: 1560104 - RNA, 19 nt, Artificial Sequence
  Description of Artificial Sequence: Synthetic oligonucleotide
uagcguaggcagucggaga

SEQ ID NO: 1560105 - RNA, 19 nt, Artificial Sequence
  Description of Artificial Sequence: Synthetic oligonucleotide
cucauagcguaggcagucg

SEQ ID NO: 1560106 - RNA, 19 nt, Artificial Sequence
  Description of Artificial Sequence: Synthetic oligonucleotide
auucgcucggggcuauaga

SEQ ID NO: 1560107 - RNA, 19 nt, Artificial Sequence
  Description of Artificial Sequence: Synthetic oligonucleotide
uuugccucacuggcauaag

SEQ ID NO: 1560108 - RNA, 19 nt, Artificial Sequence
  Description of Artificial Sequence: Synthetic oligonucleotide
uugccgcuagccucauuug

SEQ ID NO: 1560109 - RNA, 19 nt, Artificial Sequence
  Description of Artificial Sequence: Synthetic oligonucleotide
guacaaacucccuccccuc

SEQ ID NO: 1560110 - RNA, 19 nt, Artificial Sequence
  Description of Artificial Sequence: Synthetic oligonucleotide
gccauagucuuugcggacg

SEQ ID NO: 1560111 - RNA, 19 nt, Artificial Sequence
  Description of Artificial Sequence: Synthetic oligonucleotide
ggcuggguuggccauucgg

SEQ ID NO: 1560112 - RNA, 19 nt, Artificial Sequence
  Description of Artificial Sequence: Synthetic oligonucleotide
gguuaaugcuaaaacaggu

SEQ ID NO: 1560113 - RNA, 19 nt, Artificial Sequence
  Description of Artificial Sequence: Synthetic oligonucleotide
auuucguugugcgcacugu

SEQ ID NO: 1560114 - RNA, 19 nt, Artificial Sequence
  Description of Artificial Sequence: Synthetic oligonucleotide
cauagcguaggcagucgga

SEQ ID NO: 1560115 - RNA, 19 nt, Artificial Sequence
  Description of Artificial Sequence: Synthetic oligonucleotide
aacucggccuuuggcucuc

SEQ ID NO: 1560116 - RNA, 19 nt, Artificial Sequence
  Description of Artificial Sequence: Synthetic oligonucleotide
agaucaugucggagauggc

SEQ ID NO: 1560117 - RNA, 19 nt, Artificial Sequence
  Description of Artificial Sequence: Synthetic oligonucleotide
cuuugcggacgaccucagg

SEQ ID NO: 1560118 - RNA, 19 nt, Artificial Sequence
  Description of Artificial Sequence: Synthetic oligonucleotide
ggauaauccacaaguguaa

SEQ ID NO: 1560119 - RNA, 19 nt, Artificial Sequence
  Description of Artificial Sequence: Synthetic oligonucleotide
uaaggcgacccggcagggg

SEQ ID NO: 1560120 - RNA, 19 nt, Artificial Sequence
  Description of Artificial Sequence: Synthetic oligonucleotide
ggucuggagagacgggcag

SEQ ID NO: 1560121 - RNA, 19 nt, Artificial Sequence
  Description of Artificial Sequence: Synthetic oligonucleotide
gucggucacucuuuaagcu

SEQ ID NO: 1560122 - RNA, 19 nt, Artificial Sequence
  Description of Artificial Sequence: Synthetic oligonucleotide
uccuaagacaguggauaau

SEQ ID NO: 1560123 - RNA, 19 nt, Artificial Sequence
  Description of Artificial Sequence: Synthetic oligonucleotide
guccgcuggauggaugcgg

SEQ ID NO: 1560124 - RNA, 19 nt, Artificial Sequence
  Description of Artificial Sequence: Synthetic oligonucleotide
uggcuccuaaggcgacccg

SEQ ID NO: 1560125 - RNA, 19 nt, Artificial Sequence
  Description of Artificial Sequence: Synthetic oligonucleotide
ugaaauugccgggcuccac

SEQ ID NO: 1560126 - RNA, 19 nt, Artificial Sequence
  Description of Artificial Sequence: Synthetic oligonucleotide
cauucgcagccaccaguag

SEQ ID NO: 1560127 - RNA, 19 nt, Artificial Sequence
  Description of Artificial Sequence: Synthetic oligonucleotide
uugccgggcuccaccacac

SEQ ID NO: 1560128 - RNA, 19 nt, Artificial Sequence
  Description of Artificial Sequence: Synthetic oligonucleotide
caauacggcgagcgggcug

SEQ ID NO: 1560129 - RNA, 19 nt, Artificial Sequence
  Description of Artificial Sequence: Synthetic oligonucleotide
cagguuguaggaugaucca

SEQ ID NO: 1560130 - RNA, 19 nt, Artificial Sequence
  Description of Artificial Sequence: Synthetic oligonucleotide
ucggggcuauagagacugg

SEQ ID NO: 1560131 - RNA, 19 nt, Artificial Sequence
  Description of Artificial Sequence: Synthetic oligonucleotide
cucucuacuacagacacuu

SEQ ID NO: 1560132 - RNA, 19 nt, Artificial Sequence
  Description of Artificial Sequence: Synthetic oligonucleotide
guaacccuggucacgggga

SEQ ID NO: 1560133 - RNA, 19 nt, Artificial Sequence
  Description of Artificial Sequence: Synthetic oligonucleotide
gauaauccacaaguguaau

SEQ ID NO: 1560134 - RNA, 19 nt, Artificial Sequence
  Description of Artificial Sequence: Synthetic oligonucleotide
agacauugagcuggauggu

SEQ ID NO: 1560135 - RNA, 19 nt, Artificial Sequence
  Description of Artificial Sequence: Synthetic oligonucleotide
gauggaugcggugaaggau

SEQ ID NO: 1560136 - RNA, 19 nt, Artificial Sequence
  Description of Artificial Sequence: Synthetic oligonucleotide
uaguaguccaugggauggu

SEQ ID NO: 1560137 - RNA, 19 nt, Artificial Sequence
  Description of Artificial Sequence: Synthetic oligonucleotide
gcuggguuggccauucggc

SEQ ID NO: 1560138 - RNA, 19 nt, Artificial Sequence
  Description of Artificial Sequence: Synthetic oligonucleotide
guugaaaugcccgcauugu

SEQ ID NO: 1560139 - RNA, 19 nt, Artificial Sequence
  Description of Artificial Sequence: Synthetic oligonucleotide
cauuaagcauccagcaaau

SEQ ID NO: 1560140 - RNA, 19 nt, Artificial Sequence
  Description of Artificial Sequence: Synthetic oligonucleotide
cauaaguccgcuggaugga

SEQ ID NO: 1560141 - RNA, 19 nt, Artificial Sequence
  Description of Artificial Sequence: Synthetic oligonucleotide
cguugaaaugcccgcauug

SEQ ID NO: 1560142 - RNA, 19 nt, Artificial Sequence
  Description of Artificial Sequence: Synthetic oligonucleotide
gaugacggaggacgugucu

SEQ ID NO: 1560143 - RNA, 19 nt, Artificial Sequence
  Description of Artificial Sequence: Synthetic oligonucleotide
uaccccaaacuuggugaug

SEQ ID NO: 1560144 - RNA, 19 nt, Artificial Sequence
  Description of Artificial Sequence: Synthetic oligonucleotide
agauggccccuggaaagug

SEQ ID NO: 1560145 - RNA, 19 nt, Artificial Sequence
  Description of Artificial Sequence: Synthetic oligonucleotide
ucucuacuacagacacuua

SEQ ID NO: 1560146 - RNA, 19 nt, Artificial Sequence
  Description of Artificial Sequence: Synthetic oligonucleotide
gcuauagagacugguggca

SEQ ID NO: 1560147 - RNA, 19 nt, Artificial Sequence
  Description of Artificial Sequence: Synthetic oligonucleotide
ggucuuccuaagacagugg

SEQ ID NO: 1560148 - RNA, 19 nt, Artificial Sequence
  Description of Artificial Sequence: Synthetic oligonucleotide
auaaguccgcuggauggau

SEQ ID NO: 1560149 - RNA, 19 nt, Artificial Sequence
  Description of Artificial Sequence: Synthetic oligonucleotide
acguugaaaugcccgcauu

SEQ ID NO: 1560150 - RNA, 19 nt, Artificial Sequence
  Description of Artificial Sequence: Synthetic oligonucleotide
ggggcuauagagacuggug

SEQ ID NO: 1560151 - RNA, 19 nt, Artificial Sequence
  Description of Artificial Sequence: Synthetic oligonucleotide
augaaauugccgggcucca

SEQ ID NO: 1560152 - RNA, 19 nt, Artificial Sequence
  Description of Artificial Sequence: Synthetic oligonucleotide
uugccccauucucucuacu

SEQ ID NO: 1560153 - RNA, 19 nt, Artificial Sequence
  Description of Artificial Sequence: Synthetic oligonucleotide
aucucauagcguaggcagu

SEQ ID NO: 1560154 - RNA, 19 nt, Artificial Sequence
  Description of Artificial Sequence: Synthetic oligonucleotide
gggaugguagcggguauag

SEQ ID NO: 1560155 - RNA, 19 nt, Artificial Sequence
  Description of Artificial Sequence: Synthetic oligonucleotide
caguaacccuggucacggg

SEQ ID NO: 1560156 - RNA, 19 nt, Artificial Sequence
  Description of Artificial Sequence: Synthetic oligonucleotide
ggcuccuaaggcgacccgg

SEQ ID NO: 1560157 - RNA, 19 nt, Artificial Sequence
  Description of Artificial Sequence: Synthetic oligonucleotide
cuaaggcgacccggcaggg

SEQ ID NO: 1560158 - RNA, 19 nt, Artificial Sequence
  Description of Artificial Sequence: Synthetic oligonucleotide
guaggcagucggagaaagc

SEQ ID NO: 1560159 - RNA, 19 nt, Artificial Sequence
  Description of Artificial Sequence: Synthetic oligonucleotide
gcuagccucauuugccuca

SEQ ID NO: 1560160 - RNA, 19 nt, Artificial Sequence
  Description of Artificial Sequence: Synthetic oligonucleotide
cugaggcuuagggccaccc

SEQ ID NO: 1560161 - RNA, 19 nt, Artificial Sequence
  Description of Artificial Sequence: Synthetic oligonucleotide
aguccgcuggauggaugcg

SEQ ID NO: 1560162 - RNA, 19 nt, Artificial Sequence
  Description of Artificial Sequence: Synthetic oligonucleotide
augggaugguagcggguau

SEQ ID NO: 1560163 - RNA, 19 nt, Artificial Sequence
  Description of Artificial Sequence: Synthetic oligonucleotide
agacaagguuaaugcuaaa

SEQ ID NO: 1560164 - RNA, 19 nt, Artificial Sequence
  Description of Artificial Sequence: Synthetic oligonucleotide
auuaagcauccagcaaaua

SEQ ID NO: 1560165 - RNA, 19 nt, Artificial Sequence
  Description of Artificial Sequence: Synthetic oligonucleotide
aggucuccaucuuggcgau

SEQ ID NO: 1560166 - RNA, 19 nt, Artificial Sequence
  Description of Artificial Sequence: Synthetic oligonucleotide
cagugugugucuugcccca

SEQ ID NO: 1560167 - RNA, 19 nt, Artificial Sequence
  Description of Artificial Sequence: Synthetic oligonucleotide
gucgccaugcuggugaacu

SEQ ID NO: 1560168 - RNA, 19 nt, Artificial Sequence
  Description of Artificial Sequence: Synthetic oligonucleotide
aggcagucggagaaagccu

SEQ ID NO: 1560169 - RNA, 19 nt, Artificial Sequence
  Description of Artificial Sequence: Synthetic oligonucleotide
ggaguugugacaggggucu

SEQ ID NO: 1560170 - RNA, 19 nt, Artificial Sequence
  Description of Artificial Sequence: Synthetic oligonucleotide
cccaaacguugaaaugccc

SEQ ID NO: 1560171 - RNA, 19 nt, Artificial Sequence
  Description of Artificial Sequence: Synthetic oligonucleotide
acggcgagcgggcuggguu

SEQ ID NO: 1560172 - RNA, 19 nt, Artificial Sequence
  Description of Artificial Sequence: Synthetic oligonucleotide
auaugucgccaugcuggug

SEQ ID NO: 1560173 - RNA, 19 nt, Artificial Sequence
  Description of Artificial Sequence: Synthetic oligonucleotide
ggccauucaccauucacgu

SEQ ID NO: 1560174 - RNA, 19 nt, Artificial Sequence
  Description of Artificial Sequence: Synthetic oligonucleotide
guguaaucagaagguaacu

SEQ ID NO: 1560175 - RNA, 19 nt, Artificial Sequence
  Description of Artificial Sequence: Synthetic oligonucleotide
uggccuggauucgcucggg

SEQ ID NO: 1560176 - RNA, 19 nt, Artificial Sequence
  Description of Artificial Sequence: Synthetic oligonucleotide
cggagaaagccucuacccc

SEQ ID NO: 1560177 - RNA, 19 nt, Artificial Sequence
  Description of Artificial Sequence: Synthetic oligonucleotide
gccgcuagccucauuugcc

SEQ ID NO: 1560178 - RNA, 19 nt, Artificial Sequence
  Description of Artificial Sequence: Synthetic oligonucleotide
ggccauucggcccagcaua

SEQ ID NO: 1560179 - RNA, 19 nt, Artificial Sequence
  Description of Artificial Sequence: Synthetic oligonucleotide
ugggaugguagcggguaua

SEQ ID NO: 1560180 - RNA, 19 nt, Artificial Sequence
  Description of Artificial Sequence: Synthetic oligonucleotide
uggucacggggaccucugu

SEQ ID NO: 1560181 - RNA, 19 nt, Artificial Sequence
  Description of Artificial Sequence: Synthetic oligonucleotide
caugggaugguagcgggua

SEQ ID NO: 1560182 - RNA, 19 nt, Artificial Sequence
  Description of Artificial Sequence: Synthetic oligonucleotide
cuggauggaugcggugaag

SEQ ID NO: 1560183 - RNA, 19 nt, Artificial Sequence
  Description of Artificial Sequence: Synthetic oligonucleotide
guguagauguuuagccaaa

SEQ ID NO: 1560184 - RNA, 19 nt, Artificial Sequence
  Description of Artificial Sequence: Synthetic oligonucleotide
ucacguagacaagguuaau

SEQ ID NO: 1560185 - RNA, 19 nt, Artificial Sequence
  Description of Artificial Sequence: Synthetic oligonucleotide
gcgaucuucucaucaaagu

SEQ ID NO: 1560186 - RNA, 19 nt, Artificial Sequence
  Description of Artificial Sequence: Synthetic oligonucleotide
ggaaaccuuuugaguguag

SEQ ID NO: 1560187 - RNA, 19 nt, Artificial Sequence
  Description of Artificial Sequence: Synthetic oligonucleotide
gggcgugugugacagcguc

SEQ ID NO: 1560188 - RNA, 19 nt, Artificial Sequence
  Description of Artificial Sequence: Synthetic oligonucleotide
cauuguuaaccaggcccca

SEQ ID NO: 1560189 - RNA, 19 nt, Artificial Sequence
  Description of Artificial Sequence: Synthetic oligonucleotide
ccacuuuguggcuccuaag

SEQ ID NO: 1560190 - RNA, 19 nt, Artificial Sequence
  Description of Artificial Sequence: Synthetic oligonucleotide
ggcgugugugacagcgucg

SEQ ID NO: 1560191 - RNA, 19 nt, Artificial Sequence
  Description of Artificial Sequence: Synthetic oligonucleotide
augucggagauggccccug

SEQ ID NO: 1560192 - RNA, 19 nt, Artificial Sequence
  Description of Artificial Sequence: Synthetic oligonucleotide
cccagagguucacuucugc

SEQ ID NO: 1560193 - RNA, 19 nt, Artificial Sequence
  Description of Artificial Sequence: Synthetic oligonucleotide
cccaucaguaacccugguc

SEQ ID NO: 1560194 - RNA, 19 nt, Artificial Sequence
  Description of Artificial Sequence: Synthetic oligonucleotide
ggcuccacggcaagggcug

SEQ ID NO: 1560195 - RNA, 19 nt, Artificial Sequence
  Description of Artificial Sequence: Synthetic oligonucleotide
uguuaacaacucggccuuu

SEQ ID NO: 1560196 - RNA, 19 nt, Artificial Sequence
  Description of Artificial Sequence: Synthetic oligonucleotide
gcauacugcugauguuaac

SEQ ID NO: 1560197 - RNA, 19 nt, Artificial Sequence
  Description of Artificial Sequence: Synthetic oligonucleotide
gaguugugacaggggucug

SEQ ID NO: 1560198 - RNA, 19 nt, Artificial Sequence
  Description of Artificial Sequence: Synthetic oligonucleotide
gacauugagcuggaugguu

SEQ ID NO: 1560199 - RNA, 19 nt, Artificial Sequence
  Description of Artificial Sequence: Synthetic oligonucleotide
ggccuggauucgcucgggg

SEQ ID NO: 1560200 - RNA, 19 nt, Artificial Sequence
  Description of Artificial Sequence: Synthetic oligonucleotide
guaggaugauccacuuugu

SEQ ID NO: 1560201 - RNA, 19 nt, Artificial Sequence
  Description of Artificial Sequence: Synthetic oligonucleotide
gcuccuaaggcgacccggc

SEQ ID NO: 1560202 - RNA, 19 nt, Artificial Sequence
  Description of Artificial Sequence: Synthetic oligonucleotide
gugaaggaugcuggguaaa

SEQ ID NO: 1560203 - RNA, 19 nt, Artificial Sequence
  Description of Artificial Sequence: Synthetic oligonucleotide
ggaccucuguagcucuuca

SEQ ID NO: 1560204 - RNA, 19 nt, Artificial Sequence
  Description of Artificial Sequence: Synthetic oligonucleotide
gucggagauggccccugga

SEQ ID NO: 1560205 - RNA, 19 nt, Artificial Sequence
  Description of Artificial Sequence: Synthetic oligonucleotide
guugccccugaggcuuagg

SEQ ID NO: 1560206 - RNA, 19 nt, Artificial Sequence
  Description of Artificial Sequence: Synthetic oligonucleotide
cauucacguagacaagguu

SEQ ID NO: 1560207 - RNA, 19 nt, Artificial Sequence
  Description of Artificial Sequence: Synthetic oligonucleotide
gcggacgaccucaggaagc

SEQ ID NO: 1560208 - RNA, 19 nt, Artificial Sequence
  Description of Artificial Sequence: Synthetic oligonucleotide
cccagcauacugcugaugu

SEQ ID NO: 1560209 - RNA, 19 nt, Artificial Sequence
  Description of Artificial Sequence: Synthetic oligonucleotide
cuccuaaggcgacccggca

SEQ ID NO: 1560210 - RNA, 19 nt, Artificial Sequence
  Description of Artificial Sequence: Synthetic oligonucleotide
gugaugcaauacggcgagc

SEQ ID NO: 1560211 - RNA, 19 nt, Artificial Sequence
  Description of Artificial Sequence: Synthetic oligonucleotide
cguugugcgcacugugccc

SEQ ID NO: 1560212 - RNA, 19 nt, Artificial Sequence
  Description of Artificial Sequence: Synthetic oligonucleotide
cguaggcagucggagaaag

SEQ ID NO: 1560213 - RNA, 19 nt, Artificial Sequence
  Description of Artificial Sequence: Synthetic oligonucleotide
ugacagcgucgaugacgga

SEQ ID NO: 1560214 - RNA, 19 nt, Artificial Sequence
  Description of Artificial Sequence: Synthetic oligonucleotide
gcgcacugugccccagagg

SEQ ID NO: 1560215 - RNA, 19 nt, Artificial Sequence
  Description of Artificial Sequence: Synthetic oligonucleotide
gcagcggucagggcgugug

SEQ ID NO: 1560216 - RNA, 19 nt, Artificial Sequence
  Description of Artificial Sequence: Synthetic oligonucleotide
cuaccccaaacuuggugau

SEQ ID NO: 1560217 - RNA, 19 nt, Artificial Sequence
  Description of Artificial Sequence: Synthetic oligonucleotide
gcgugugugacagcgucga

SEQ ID NO: 1560218 - RNA, 19 nt, Artificial Sequence
  Description of Artificial Sequence: Synthetic oligonucleotide
acgaccucaggaagcucau

SEQ ID NO: 1560219 - RNA, 19 nt, Artificial Sequence
  Description of Artificial Sequence: Synthetic oligonucleotide
uggauucgcucggggcuau

SEQ ID NO: 1560220 - RNA, 19 nt, Artificial Sequence
  Description of Artificial Sequence: Synthetic oligonucleotide
ccgcauuguuaaccaggcc

SEQ ID NO: 1560221 - RNA, 19 nt, Artificial Sequence
  Description of Artificial Sequence: Synthetic oligonucleotide
caacucggccuuuggcucu

SEQ ID NO: 1560222 - RNA, 19 nt, Artificial Sequence
  Description of Artificial Sequence: Synthetic oligonucleotide
ccuuauaugucgccaugcu

SEQ ID NO: 1560223 - RNA, 19 nt, Artificial Sequence
  Description of Artificial Sequence: Synthetic oligonucleotide
gcauucgcagccaccagua

SEQ ID NO: 1560224 - RNA, 19 nt, Artificial Sequence
  Description of Artificial Sequence: Synthetic oligonucleotide
ccuggauucgcucggggcu

SEQ ID NO: 1560225 - RNA, 19 nt, Artificial Sequence
  Description of Artificial Sequence: Synthetic oligonucleotide
ggucacggggaccucugua

SEQ ID NO: 1560226 - RNA, 19 nt, Artificial Sequence
  Description of Artificial Sequence: Synthetic oligonucleotide
caggucuuccuaagacagu

SEQ ID NO: 1560227 - RNA, 19 nt, Artificial Sequence
  Description of Artificial Sequence: Synthetic oligonucleotide
cuggaaagugggucaugau

SEQ ID NO: 1560228 - RNA, 19 nt, Artificial Sequence
  Description of Artificial Sequence: Synthetic oligonucleotide
gccauucggcccagcauac

SEQ ID NO: 1560229 - RNA, 19 nt, Artificial Sequence
  Description of Artificial Sequence: Synthetic oligonucleotide
gggucuggagagacgggca

SEQ ID NO: 1560230 - RNA, 19 nt, Artificial Sequence
  Description of Artificial Sequence: Synthetic oligonucleotide
cuggauucgcucggggcua

SEQ ID NO: 1560231 - RNA, 19 nt, Artificial Sequence
  Description of Artificial Sequence: Synthetic oligonucleotide
auacggcgagcgggcuggg

SEQ ID NO: 1560232 - RNA, 19 nt, Artificial Sequence
  Description of Artificial Sequence: Synthetic oligonucleotide
ccauucacguagacaaggu

SEQ ID NO: 1560233 - RNA, 19 nt, Artificial Sequence
  Description of Artificial Sequence: Synthetic oligonucleotide
cagcgucgaugacggagga

SEQ ID NO: 1560234 - RNA, 19 nt, Artificial Sequence
  Description of Artificial Sequence: Synthetic oligonucleotide
ggacagcuuugccgcuagc

SEQ ID NO: 1560235 - RNA, 19 nt, Artificial Sequence
  Description of Artificial Sequence: Synthetic oligonucleotide
gugcgcacugugccccaga

SEQ ID NO: 1560236 - RNA, 19 nt, Artificial Sequence
  Description of Artificial Sequence: Synthetic oligonucleotide
gggaccucuguagcucuuc

SEQ ID NO: 1560237 - RNA, 19 nt, Artificial Sequence
  Description of Artificial Sequence: Synthetic oligonucleotide
cagucggagaaagccucua

SEQ ID NO: 1560238 - RNA, 19 nt, Artificial Sequence
  Description of Artificial Sequence: Synthetic oligonucleotide
caggacagcuuugccgcua

SEQ ID NO: 1560239 - RNA, 19 nt, Artificial Sequence
  Description of Artificial Sequence: Synthetic oligonucleotide
gauccacuuuguggcuccu

SEQ ID NO: 1560240 - RNA, 19 nt, Artificial Sequence
  Description of Artificial Sequence: Synthetic oligonucleotide
cuguugcaguaggucucca

SEQ ID NO: 1560241 - RNA, 19 nt, Artificial Sequence
  Description of Artificial Sequence: Synthetic oligonucleotide
caccuccccaaacguugaa

SEQ ID NO: 1560242 - RNA, 19 nt, Artificial Sequence
  Description of Artificial Sequence: Synthetic oligonucleotide
cgaugacggaggacguguc

SEQ ID NO: 1560243 - RNA, 19 nt, Artificial Sequence
  Description of Artificial Sequence: Synthetic oligonucleotide
gugugugucuugccccauu

SEQ ID NO: 1560244 - RNA, 19 nt, Artificial Sequence
  Description of Artificial Sequence: Synthetic oligonucleotide
cgcuagccucauuugccuc

SEQ ID NO: 1560245 - RNA, 19 nt, Artificial Sequence
  Description of Artificial Sequence: Synthetic oligonucleotide
caugucggagauggccccu

SEQ ID NO: 1560246 - RNA, 19 nt, Artificial Sequence
  Description of Artificial Sequence: Synthetic oligonucleotide
auguugccccugaggcuua

SEQ ID NO: 1560247 - RNA, 19 nt, Artificial Sequence
  Description of Artificial Sequence: Synthetic oligonucleotide
ggacagucuccaccgcuuu

SEQ ID NO: 1560248 - RNA, 19 nt, Artificial Sequence
  Description of Artificial Sequence: Synthetic oligonucleotide
ccgcuagccucauuugccu

SEQ ID NO: 1560249 - RNA, 19 nt, Artificial Sequence
  Description of Artificial Sequence: Synthetic oligonucleotide
ggacgaccucaggaagcuc

SEQ ID NO: 1560250 - RNA, 19 nt, Artificial Sequence
  Description of Artificial Sequence: Synthetic oligonucleotide
gcggugaaggaugcugggu

SEQ ID NO: 1560251 - RNA, 19 nt, Artificial Sequence
  Description of Artificial Sequence: Synthetic oligonucleotide
ggauuucguugugcgcacu

SEQ ID NO: 1560252 - RNA, 19 nt, Artificial Sequence
  Description of Artificial Sequence: Synthetic oligonucleotide
gcguaggcagucggagaaa

SEQ ID NO: 1560253 - RNA, 19 nt, Artificial Sequence
  Description of Artificial Sequence: Synthetic oligonucleotide
cagcggucagggcgugugu

SEQ ID NO: 1560254 - RNA, 19 nt, Artificial Sequence
  Description of Artificial Sequence: Synthetic oligonucleotide
gcaauacggcgagcgggcu

SEQ ID NO: 1560255 - RNA, 19 nt, Artificial Sequence
  Description of Artificial Sequence: Synthetic oligonucleotide
cgucgaugacggaggacgu

SEQ ID NO: 1560256 - RNA, 19 nt, Artificial Sequence
  Description of Artificial Sequence: Synthetic oligonucleotide
ccucuaccccaaacuuggu

SEQ ID NO: 1560257 - RNA, 19 nt, Artificial Sequence
  Description of Artificial Sequence: Synthetic oligonucleotide
gcucggggcuauagagacu

SEQ ID NO: 1560258 - RNA, 19 nt, Artificial Sequence
  Description of Artificial Sequence: Synthetic oligonucleotide
cuuugccgcuagccucauu

SEQ ID NO: 1560259 - RNA, 19 nt, Artificial Sequence
  Description of Artificial Sequence: Synthetic oligonucleotide
cggacgaccucaggaagcu

SEQ ID NO: 1560260 - RNA, 19 nt, Artificial Sequence
  Description of Artificial Sequence: Synthetic oligonucleotide
ggauucgcucggggcuaua

SEQ ID NO: 1560261 - RNA, 19 nt, Artificial Sequence
  Description of Artificial Sequence: Synthetic oligonucleotide
cggggaccucuguagcucu

SEQ ID NO: 1560262 - RNA, 19 nt, Artificial Sequence
  Description of Artificial Sequence: Synthetic oligonucleotide
ccauucggcccagcauacu

SEQ ID NO: 1560263 - RNA, 19 nt, Artificial Sequence
  Description of Artificial Sequence: Synthetic oligonucleotide
cccuggucacggggaccuc

SEQ ID NO: 1560264 - RNA, 19 nt, Artificial Sequence
  Description of Artificial Sequence: Synthetic oligonucleotide
ggggaccucuguagcucuu

SEQ ID NO: 1560265 - RNA, 19 nt, Artificial Sequence
  Description of Artificial Sequence: Synthetic oligonucleotide
ggcagcggucagggcgugu

SEQ ID NO: 1560266 - RNA, 19 nt, Artificial Sequence
  Description of Artificial Sequence: Synthetic oligonucleotide
gcuuugccgcuagccucau

SEQ ID NO: 1560267 - RNA, 19 nt, Artificial Sequence
  Description of Artificial Sequence: Synthetic oligonucleotide
gaagucaaaagauuaaugc

SEQ ID NO: 1560268 - RNA, 19 nt, Artificial Sequence
  Description of Artificial Sequence: Synthetic oligonucleotide
aagauuaaugcccacuuuc

SEQ ID NO: 1560269 - RNA, 19 nt, Artificial Sequence
  Description of Artificial Sequence: Synthetic oligonucleotide
acucuaaucuucuugacgg

SEQ ID NO: 1560270 - RNA, 19 nt, Artificial Sequence
  Description of Artificial Sequence: Synthetic oligonucleotide
cuugcuacaaagcugagcc

SEQ ID NO: 1560271 - RNA, 19 nt, Artificial Sequence
  Description of Artificial Sequence: Synthetic oligonucleotide
aauucgaugagguugguau

SEQ ID NO: 1560272 - RNA, 19 nt, Artificial Sequence
  Description of Artificial Sequence: Synthetic oligonucleotide
aaugucgucaucuguggcg

SEQ ID NO: 1560273 - RNA, 19 nt, Artificial Sequence
  Description of Artificial Sequence: Synthetic oligonucleotide
uggacguugacauugagug

SEQ ID NO: 1560274 - RNA, 19 nt, Artificial Sequence
  Description of Artificial Sequence: Synthetic oligonucleotide
uauucaaagguuuauuucu

SEQ ID NO: 1560275 - RNA, 19 nt, Artificial Sequence
  Description of Artificial Sequence: Synthetic oligonucleotide
gaaggcacgaaucucaaag

SEQ ID NO: 1560276 - RNA, 19 nt, Artificial Sequence
  Description of Artificial Sequence: Synthetic oligonucleotide
auuaaugcccacuuucaac

SEQ ID NO: 1560277 - RNA, 19 nt, Artificial Sequence
  Description of Artificial Sequence: Synthetic oligonucleotide
uuaaugcccacuuucaaca

SEQ ID NO: 1560278 - RNA, 19 nt, Artificial Sequence
  Description of Artificial Sequence: Synthetic oligonucleotide
uugguaucgaauucgauga

SEQ ID NO: 1560279 - RNA, 19 nt, Artificial Sequence
  Description of Artificial Sequence: Synthetic oligonucleotide
uucuugacggucuuggccg

SEQ ID NO: 1560280 - RNA, 19 nt, Artificial Sequence
  Description of Artificial Sequence: Synthetic oligonucleotide
uucacaauggugcuagaag

SEQ ID NO: 1560281 - RNA, 19 nt, Artificial Sequence
  Description of Artificial Sequence: Synthetic oligonucleotide
ugaagucaaaagauuaaug

SEQ ID NO: 1560282 - RNA, 19 nt, Artificial Sequence
  Description of Artificial Sequence: Synthetic oligonucleotide
ucaaagucgacuccacagg

SEQ ID NO: 1560283 - RNA, 19 nt, Artificial Sequence
  Description of Artificial Sequence: Synthetic oligonucleotide
auaagucgcaccgaguucc

SEQ ID NO: 1560284 - RNA, 19 nt, Artificial Sequence
  Description of Artificial Sequence: Synthetic oligonucleotide
uuuaggugugcccacagca

SEQ ID NO: 1560285 - RNA, 19 nt, Artificial Sequence
  Description of Artificial Sequence: Synthetic oligonucleotide
ucgaauucgaugagguugg

SEQ ID NO: 1560286 - RNA, 19 nt, Artificial Sequence
  Description of Artificial Sequence: Synthetic oligonucleotide
aaaagauuaaugcccacuu

SEQ ID NO: 1560287 - RNA, 19 nt, Artificial Sequence
  Description of Artificial Sequence: Synthetic oligonucleotide
guugguaucgaauucgaug

SEQ ID NO: 1560288 - RNA, 19 nt, Artificial Sequence
  Description of Artificial Sequence: Synthetic oligonucleotide
gaugauaagucgcaccgag

SEQ ID NO: 1560289 - RNA, 19 nt, Artificial Sequence
  Description of Artificial Sequence: Synthetic oligonucleotide
agaauuggucgucacaguc

SEQ ID NO: 1560290 - RNA, 19 nt, Artificial Sequence
  Description of Artificial Sequence: Synthetic oligonucleotide
cugaugauaagucgcaccg

SEQ ID NO: 1560291 - RNA, 19 nt, Artificial Sequence
  Description of Artificial Sequence: Synthetic oligonucleotide
uacaccuugcagaacgugg

SEQ ID NO: 1560292 - RNA, 19 nt, Artificial Sequence
  Description of Artificial Sequence: Synthetic oligonucleotide
gacucuaaucuucuugacg

SEQ ID NO: 1560293 - RNA, 19 nt, Artificial Sequence
  Description of Artificial Sequence: Synthetic oligonucleotide
uguaccuuucugaugauaa

SEQ ID NO: 1560294 - RNA, 19 nt, Artificial Sequence
  Description of Artificial Sequence: Synthetic oligonucleotide
ugguaugaggccaagugug

SEQ ID NO: 1560295 - RNA, 19 nt, Artificial Sequence
  Description of Artificial Sequence: Synthetic oligonucleotide
uuuccuagcagaauugguc

SEQ ID NO: 1560296 - RNA, 19 nt, Artificial Sequence
  Description of Artificial Sequence: Synthetic oligonucleotide
cugaaacaaagaaauggcc

SEQ ID NO: 1560297 - RNA, 19 nt, Artificial Sequence
  Description of Artificial Sequence: Synthetic oligonucleotide
uucccaaaacuuuaggugu

SEQ ID NO: 1560298 - RNA, 19 nt, Artificial Sequence
  Description of Artificial Sequence: Synthetic oligonucleotide
ucuuucacaauggugcuag

SEQ ID NO: 1560299 - RNA, 19 nt, Artificial Sequence
  Description of Artificial Sequence: Synthetic oligonucleotide
aauuggucgucacagucgu

SEQ ID NO: 1560300 - RNA, 19 nt, Artificial Sequence
  Description of Artificial Sequence: Synthetic oligonucleotide
acaaagcugagccacagga

SEQ ID NO: 1560301 - RNA, 19 nt, Artificial Sequence
  Description of Artificial Sequence: Synthetic oligonucleotide
aucgaauucgaugagguug

SEQ ID NO: 1560302 - RNA, 19 nt, Artificial Sequence
  Description of Artificial Sequence: Synthetic oligonucleotide
ggugcuagaagccagguug

SEQ ID NO: 1560303 - RNA, 19 nt, Artificial Sequence
  Description of Artificial Sequence: Synthetic oligonucleotide
uaggauaccaggauuccca

SEQ ID NO: 1560304 - RNA, 19 nt, Artificial Sequence
  Description of Artificial Sequence: Synthetic oligonucleotide
caaagguuuauuucuuccc

SEQ ID NO: 1560305 - RNA, 19 nt, Artificial Sequence
  Description of Artificial Sequence: Synthetic oligonucleotide
ucugaugauaagucgcacc

SEQ ID NO: 1560306 - RNA, 19 nt, Artificial Sequence
  Description of Artificial Sequence: Synthetic oligonucleotide
agcaaggcaaauucugggg

SEQ ID NO: 1560307 - RNA, 19 nt, Artificial Sequence
  Description of Artificial Sequence: Synthetic oligonucleotide
uucaacaagugaugggucc

SEQ ID NO: 1560308 - RNA, 19 nt, Artificial Sequence
  Description of Artificial Sequence: Synthetic oligonucleotide
agagacucuaaucuucuug

SEQ ID NO: 1560309 - RNA, 19 nt, Artificial Sequence
  Description of Artificial Sequence: Synthetic oligonucleotide
agaaguggugacuugggug

SEQ ID NO: 1560310 - RNA, 19 nt, Artificial Sequence
  Description of Artificial Sequence: Synthetic oligonucleotide
gacccuguaggauaccagg

SEQ ID NO: 1560311 - RNA, 19 nt, Artificial Sequence
  Description of Artificial Sequence: Synthetic oligonucleotide
acaaagaaauggccuugcc

SEQ ID NO: 1560312 - RNA, 19 nt, Artificial Sequence
  Description of Artificial Sequence: Synthetic oligonucleotide
cuuggggugcaugagaacg

SEQ ID NO: 1560313 - RNA, 19 nt, Artificial Sequence
  Description of Artificial Sequence: Synthetic oligonucleotide
ugauaagucgcaccgaguu

SEQ ID NO: 1560314 - RNA, 19 nt, Artificial Sequence
  Description of Artificial Sequence: Synthetic oligonucleotide
ucggcauacugucucacag

SEQ ID NO: 1560315 - RNA, 19 nt, Artificial Sequence
  Description of Artificial Sequence: Synthetic oligonucleotide
guaguugguaucgaauucg

SEQ ID NO: 1560316 - RNA, 19 nt, Artificial Sequence
  Description of Artificial Sequence: Synthetic oligonucleotide
gaauuggucgucacagucg

SEQ ID NO: 1560317 - RNA, 19 nt, Artificial Sequence
  Description of Artificial Sequence: Synthetic oligonucleotide
gacauggacguugacauug

SEQ ID NO: 1560318 - RNA, 19 nt, Artificial Sequence
  Description of Artificial Sequence: Synthetic oligonucleotide
cugaagaggcaaaugucgg

SEQ ID NO: 1560319 - RNA, 19 nt, Artificial Sequence
  Description of Artificial Sequence: Synthetic oligonucleotide
gauaccaggauucccagaa

SEQ ID NO: 1560320 - RNA, 19 nt, Artificial Sequence
  Description of Artificial Sequence: Synthetic oligonucleotide
aacugggagauaccugguc

SEQ ID NO: 1560321 - RNA, 19 nt, Artificial Sequence
  Description of Artificial Sequence: Synthetic oligonucleotide
caaaacuuuaggugugccc

SEQ ID NO: 1560322 - RNA, 19 nt, Artificial Sequence
  Description of Artificial Sequence: Synthetic oligonucleotide
uaccuggucaucuugcuac

SEQ ID NO: 1560323 - RNA, 19 nt, Artificial Sequence
  Description of Artificial Sequence: Synthetic oligonucleotide
cagucgucauccuucaucc

SEQ ID NO: 1560324 - RNA, 19 nt, Artificial Sequence
  Description of Artificial Sequence: Synthetic oligonucleotide
gagaacgaacgguagcucc

SEQ ID NO: 1560325 - RNA, 19 nt, Artificial Sequence
  Description of Artificial Sequence: Synthetic oligonucleotide
uuucuucuagagauuuggc

SEQ ID NO: 1560326 - RNA, 19 nt, Artificial Sequence
  Description of Artificial Sequence: Synthetic oligonucleotide
guaauacagcucuuugucc

SEQ ID NO: 1560327 - RNA, 19 nt, Artificial Sequence
  Description of Artificial Sequence: Synthetic oligonucleotide
aaacuguaccuuucugaug

SEQ ID NO: 1560328 - RNA, 19 nt, Artificial Sequence
  Description of Artificial Sequence: Synthetic oligonucleotide
caaaugucggcauacuguc

SEQ ID NO: 1560329 - RNA, 19 nt, Artificial Sequence
  Description of Artificial Sequence: Synthetic oligonucleotide
uucaugcuugagcugcccg

SEQ ID NO: 1560330 - RNA, 19 nt, Artificial Sequence
  Description of Artificial Sequence: Synthetic oligonucleotide
gauauggucaugaggcuug

SEQ ID NO: 1560331 - RNA, 19 nt, Artificial Sequence
  Description of Artificial Sequence: Synthetic oligonucleotide
cuucuugacggucuuggcc

SEQ ID NO: 1560332 - RNA, 19 nt, Artificial Sequence
  Description of Artificial Sequence: Synthetic oligonucleotide
ugcgcggugcugaagaggc

SEQ ID NO: 1560333 - RNA, 19 nt, Artificial Sequence
  Description of Artificial Sequence: Synthetic oligonucleotide
cacaauggugcuagaagcc

SEQ ID NO: 1560334 - RNA, 19 nt, Artificial Sequence
  Description of Artificial Sequence: Synthetic oligonucleotide
aggcacgaaucucaaaguc

SEQ ID NO: 1560335 - RNA, 19 nt, Artificial Sequence
  Description of Artificial Sequence: Synthetic oligonucleotide
cagaacguggaacugggag

SEQ ID NO: 1560336 - RNA, 19 nt, Artificial Sequence
  Description of Artificial Sequence: Synthetic oligonucleotide
ugcaugagaacgaacggua

SEQ ID NO: 1560337 - RNA, 19 nt, Artificial Sequence
  Description of Artificial Sequence: Synthetic oligonucleotide
uucccuaugcucugaaaca

SEQ ID NO: 1560338 - RNA, 19 nt, Artificial Sequence
  Description of Artificial Sequence: Synthetic oligonucleotide
ugaagaggcaaaugucggc

SEQ ID NO: 1560339 - RNA, 19 nt, Artificial Sequence
  Description of Artificial Sequence: Synthetic oligonucleotide
aggacacuuguacugcgcg

SEQ ID NO: 1560340 - RNA, 19 nt, Artificial Sequence
  Description of Artificial Sequence: Synthetic oligonucleotide
ugguaauacagcucuuugu

SEQ ID NO: 1560341 - RNA, 19 nt, Artificial Sequence
  Description of Artificial Sequence: Synthetic oligonucleotide
aaggcacgaaucucaaagu

SEQ ID NO: 1560342 - RNA, 19 nt, Artificial Sequence
  Description of Artificial Sequence: Synthetic oligonucleotide
caagugauggguccagugc

SEQ ID NO: 1560343 - RNA, 19 nt, Artificial Sequence
  Description of Artificial Sequence: Synthetic oligonucleotide
agaacguggaacugggaga

SEQ ID NO: 1560344 - RNA, 19 nt, Artificial Sequence
  Description of Artificial Sequence: Synthetic oligonucleotide
acgaacgguagcuccacgg

SEQ ID NO: 1560345 - RNA, 19 nt, Artificial Sequence
  Description of Artificial Sequence: Synthetic oligonucleotide
ugugguuucugcugagggc

SEQ ID NO: 1560346 - RNA, 19 nt, Artificial Sequence
  Description of Artificial Sequence: Synthetic oligonucleotide
aagggugauauggucauga

SEQ ID NO: 1560347 - RNA, 19 nt, Artificial Sequence
  Description of Artificial Sequence: Synthetic oligonucleotide
gauucccagaaccuccuug

SEQ ID NO: 1560348 - RNA, 19 nt, Artificial Sequence
  Description of Artificial Sequence: Synthetic oligonucleotide
caugagaacgaacgguagc

SEQ ID NO: 1560349 - RNA, 19 nt, Artificial Sequence
  Description of Artificial Sequence: Synthetic oligonucleotide
agauaccuggucaucuugc

SEQ ID NO: 1560350 - RNA, 19 nt, Artificial Sequence
  Description of Artificial Sequence: Synthetic oligonucleotide
gacauugaguggcuccccg

SEQ ID NO: 1560351 - RNA, 19 nt, Artificial Sequence
  Description of Artificial Sequence: Synthetic oligonucleotide
aauucugggguaaugugaa

SEQ ID NO: 1560352 - RNA, 19 nt, Artificial Sequence
  Description of Artificial Sequence: Synthetic oligonucleotide
ucccgguugucacugagca

SEQ ID NO: 1560353 - RNA, 19 nt, Artificial Sequence
  Description of Artificial Sequence: Synthetic oligonucleotide
agacucuaaucuucuugac

SEQ ID NO: 1560354 - RNA, 19 nt, Artificial Sequence
  Description of Artificial Sequence: Synthetic oligonucleotide
acugggagauaccugguca

SEQ ID NO: 1560355 - RNA, 19 nt, Artificial Sequence
  Description of Artificial Sequence: Synthetic oligonucleotide
cagagcaaggcaaauucug

SEQ ID NO: 1560356 - RNA, 19 nt, Artificial Sequence
  Description of Artificial Sequence: Synthetic oligonucleotide
ugcuacaaagcugagccac

SEQ ID NO: 1560357 - RNA, 19 nt, Artificial Sequence
  Description of Artificial Sequence: Synthetic oligonucleotide
cuguaggauaccaggauuc

SEQ ID NO: 1560358 - RNA, 19 nt, Artificial Sequence
  Description of Artificial Sequence: Synthetic oligonucleotide
gacaugaggaaguggcgug

SEQ ID NO: 1560359 - RNA, 19 nt, Artificial Sequence
  Description of Artificial Sequence: Synthetic oligonucleotide
uuuggcucccucuuucaca

SEQ ID NO: 1560360 - RNA, 19 nt, Artificial Sequence
  Description of Artificial Sequence: Synthetic oligonucleotide
ucucacagagacucuaauc

SEQ ID NO: 1560361 - RNA, 19 nt, Artificial Sequence
  Description of Artificial Sequence: Synthetic oligonucleotide
agaaauggccuugcccucc

SEQ ID NO: 1560362 - RNA, 19 nt, Artificial Sequence
  Description of Artificial Sequence: Synthetic oligonucleotide
acguggaacugggagauac

SEQ ID NO: 1560363 - RNA, 19 nt, Artificial Sequence
  Description of Artificial Sequence: Synthetic oligonucleotide
uuucaacaagugauggguc

SEQ ID NO: 1560364 - RNA, 19 nt, Artificial Sequence
  Description of Artificial Sequence: Synthetic oligonucleotide
uuaugguguacaccuugca

SEQ ID NO: 1560365 - RNA, 19 nt, Artificial Sequence
  Description of Artificial Sequence: Synthetic oligonucleotide
auugaguggcuccccgugg

SEQ ID NO: 1560366 - RNA, 19 nt, Artificial Sequence
  Description of Artificial Sequence: Synthetic oligonucleotide
uacugcgcggugcugaaga

SEQ ID NO: 1560367 - RNA, 19 nt, Artificial Sequence
  Description of Artificial Sequence: Synthetic oligonucleotide
cacuuucaacaagugaugg

SEQ ID NO: 1560368 - RNA, 19 nt, Artificial Sequence
  Description of Artificial Sequence: Synthetic oligonucleotide
ucuaggugcagggaccucc

SEQ ID NO: 1560369 - RNA, 19 nt, Artificial Sequence
  Description of Artificial Sequence: Synthetic oligonucleotide
uucaguguccccuucccaa

SEQ ID NO: 1560370 - RNA, 19 nt, Artificial Sequence
  Description of Artificial Sequence: Synthetic oligonucleotide
agaaccuccuuguuuggcu

SEQ ID NO: 1560371 - RNA, 19 nt, Artificial Sequence
  Description of Artificial Sequence: Synthetic oligonucleotide
uaugaggccaaguguggga

SEQ ID NO: 1560372 - RNA, 19 nt, Artificial Sequence
  Description of Artificial Sequence: Synthetic oligonucleotide
cacagagacucuaaucuuc

SEQ ID NO: 1560373 - RNA, 19 nt, Artificial Sequence
  Description of Artificial Sequence: Synthetic oligonucleotide
gaacgguagcuccacggag

SEQ ID NO: 1560374 - RNA, 19 nt, Artificial Sequence
  Description of Artificial Sequence: Synthetic oligonucleotide
aagguuuauuucuucccua

SEQ ID NO: 1560375 - RNA, 19 nt, Artificial Sequence
  Description of Artificial Sequence: Synthetic oligonucleotide
uccagugcguaucuugggu

SEQ ID NO: 1560376 - RNA, 19 nt, Artificial Sequence
  Description of Artificial Sequence: Synthetic oligonucleotide
uaguugguaucgaauucga

SEQ ID NO: 1560377 - RNA, 19 nt, Artificial Sequence
  Description of Artificial Sequence: Synthetic oligonucleotide
cucacagagacucuaaucu

SEQ ID NO: 1560378 - RNA, 19 nt, Artificial Sequence
  Description of Artificial Sequence: Synthetic oligonucleotide
gagauaccuggucaucuug

SEQ ID NO: 1560379 - RNA, 19 nt, Artificial Sequence
  Description of Artificial Sequence: Synthetic oligonucleotide
ugugggaguucuuucuacu

SEQ ID NO: 1560380 - RNA, 19 nt, Artificial Sequence
  Description of Artificial Sequence: Synthetic oligonucleotide
augagaacgaacgguagcu

SEQ ID NO: 1560381 - RNA, 19 nt, Artificial Sequence
  Description of Artificial Sequence: Synthetic oligonucleotide
gggugcaugagaacgaacg

SEQ ID NO: 1560382 - RNA, 19 nt, Artificial Sequence
  Description of Artificial Sequence: Synthetic oligonucleotide
ggcauacugucucacagag

SEQ ID NO: 1560383 - RNA, 19 nt, Artificial Sequence
  Description of Artificial Sequence: Synthetic oligonucleotide
uacuccuuuucucuacagu

SEQ ID NO: 1560384 - RNA, 19 nt, Artificial Sequence
  Description of Artificial Sequence: Synthetic oligonucleotide
uguaggauaccaggauucc

SEQ ID NO: 1560385 - RNA, 19 nt, Artificial Sequence
  Description of Artificial Sequence: Synthetic oligonucleotide
gaaacaaagaaauggccuu

SEQ ID NO: 1560386 - RNA, 19 nt, Artificial Sequence
  Description of Artificial Sequence: Synthetic oligonucleotide
aacgaacgguagcuccacg

SEQ ID NO: 1560387 - RNA, 19 nt, Artificial Sequence
  Description of Artificial Sequence: Synthetic oligonucleotide
ucuugcuacaaagcugagc

SEQ ID NO: 1560388 - RNA, 19 nt, Artificial Sequence
  Description of Artificial Sequence: Synthetic oligonucleotide
gagauuuggcacagaaggc

SEQ ID NO: 1560389 - RNA, 19 nt, Artificial Sequence
  Description of Artificial Sequence: Synthetic oligonucleotide
aguguccccuucccaaaac

SEQ ID NO: 1560390 - RNA, 19 nt, Artificial Sequence
  Description of Artificial Sequence: Synthetic oligonucleotide
cagugcguaucuugggugg

SEQ ID NO: 1560391 - RNA, 19 nt, Artificial Sequence
  Description of Artificial Sequence: Synthetic oligonucleotide
uggaacugggagauaccug

SEQ ID NO: 1560392 - RNA, 19 nt, Artificial Sequence
  Description of Artificial Sequence: Synthetic oligonucleotide
gacauccccgccucgagac

SEQ ID NO: 1560393 - RNA, 19 nt, Artificial Sequence
  Description of Artificial Sequence: Synthetic oligonucleotide
ugguguacaccuugcagaa

SEQ ID NO: 1560394 - RNA, 19 nt, Artificial Sequence
  Description of Artificial Sequence: Synthetic oligonucleotide
ugacccuguaggauaccag

SEQ ID NO: 1560395 - RNA, 19 nt, Artificial Sequence
  Description of Artificial Sequence: Synthetic oligonucleotide
ucuaaucuucuugacgguc

SEQ ID NO: 1560396 - RNA, 19 nt, Artificial Sequence
  Description of Artificial Sequence: Synthetic oligonucleotide
aaauggccuugcccucccc

SEQ ID NO: 1560397 - RNA, 19 nt, Artificial Sequence
  Description of Artificial Sequence: Synthetic oligonucleotide
ugguaucgaauucgaugag

SEQ ID NO: 1560398 - RNA, 19 nt, Artificial Sequence
  Description of Artificial Sequence: Synthetic oligonucleotide
ucaacaagugaugggucca

SEQ ID NO: 1560399 - RNA, 19 nt, Artificial Sequence
  Description of Artificial Sequence: Synthetic oligonucleotide
gauaagucgcaccgaguuc

SEQ ID NO: 1560400 - RNA, 19 nt, Artificial Sequence
  Description of Artificial Sequence: Synthetic oligonucleotide
acgguagcuccacggagac

SEQ ID NO: 1560401 - RNA, 19 nt, Artificial Sequence
  Description of Artificial Sequence: Synthetic oligonucleotide
uucuacuccuuuucucuac

SEQ ID NO: 1560402 - RNA, 19 nt, Artificial Sequence
  Description of Artificial Sequence: Synthetic oligonucleotide
uuuggcacagaaggcacga

SEQ ID NO: 1560403 - RNA, 19 nt, Artificial Sequence
  Description of Artificial Sequence: Synthetic oligonucleotide
uuaggugugcccacagcau

SEQ ID NO: 1560404 - RNA, 19 nt, Artificial Sequence
  Description of Artificial Sequence: Synthetic oligonucleotide
cagucgguccuguagccgg

SEQ ID NO: 1560405 - RNA, 19 nt, Artificial Sequence
  Description of Artificial Sequence: Synthetic oligonucleotide
uuggccgaguuguugguga

SEQ ID NO: 1560406 - RNA, 19 nt, Artificial Sequence
  Description of Artificial Sequence: Synthetic oligonucleotide
ucaugcuugagcugcccgu

SEQ ID NO: 1560407 - RNA, 19 nt, Artificial Sequence
  Description of Artificial Sequence: Synthetic oligonucleotide
ccuuucugaugauaagucg

SEQ ID NO: 1560408 - RNA, 19 nt, Artificial Sequence
  Description of Artificial Sequence: Synthetic oligonucleotide
ucuguggcguaguugguau

SEQ ID NO: 1560409 - RNA, 19 nt, Artificial Sequence
  Description of Artificial Sequence: Synthetic oligonucleotide
agauuaaugcccacuuuca

SEQ ID NO: 1560410 - RNA, 19 nt, Artificial Sequence
  Description of Artificial Sequence: Synthetic oligonucleotide
ucgucauccuucauccccu

SEQ ID NO: 1560411 - RNA, 19 nt, Artificial Sequence
  Description of Artificial Sequence: Synthetic oligonucleotide
cacccgaagugacaguggg

SEQ ID NO: 1560412 - RNA, 19 nt, Artificial Sequence
  Description of Artificial Sequence: Synthetic oligonucleotide
aggauaccaggauucccag

SEQ ID NO: 1560413 - RNA, 19 nt, Artificial Sequence
  Description of Artificial Sequence: Synthetic oligonucleotide
gguaucgaauucgaugagg

SEQ ID NO: 1560414 - RNA, 19 nt, Artificial Sequence
  Description of Artificial Sequence: Synthetic oligonucleotide
gguuaugguguacaccuug

SEQ ID NO: 1560415 - RNA, 19 nt, Artificial Sequence
  Description of Artificial Sequence: Synthetic oligonucleotide
ggcacgaaucucaaagucg

SEQ ID NO: 1560416 - RNA, 19 nt, Artificial Sequence
  Description of Artificial Sequence: Synthetic oligonucleotide
uccccgugguaauacagcu

SEQ ID NO: 1560417 - RNA, 19 nt, Artificial Sequence
  Description of Artificial Sequence: Synthetic oligonucleotide
uuggggugcaugagaacga

SEQ ID NO: 1560418 - RNA, 19 nt, Artificial Sequence
  Description of Artificial Sequence: Synthetic oligonucleotide
augaggaaguggcgugugg

SEQ ID NO: 1560419 - RNA, 19 nt, Artificial Sequence
  Description of Artificial Sequence: Synthetic oligonucleotide
cuuuucucuacagucgcuc

SEQ ID NO: 1560420 - RNA, 19 nt, Artificial Sequence
  Description of Artificial Sequence: Synthetic oligonucleotide
aagaggcaaaugucggcau

SEQ ID NO: 1560421 - RNA, 19 nt, Artificial Sequence
  Description of Artificial Sequence: Synthetic oligonucleotide
ugcguaucuuggguggagg

SEQ ID NO: 1560422 - RNA, 19 nt, Artificial Sequence
  Description of Artificial Sequence: Synthetic oligonucleotide
aacgguagcuccacggaga

SEQ ID NO: 1560423 - RNA, 19 nt, Artificial Sequence
  Description of Artificial Sequence: Synthetic oligonucleotide
agucgcuccucacuuucag

SEQ ID NO: 1560424 - RNA, 19 nt, Artificial Sequence
  Description of Artificial Sequence: Synthetic oligonucleotide
ucgagacaccaccagcuuc

SEQ ID NO: 1560425 - RNA, 19 nt, Artificial Sequence
  Description of Artificial Sequence: Synthetic oligonucleotide
ugaggaaguggcguguggu

SEQ ID NO: 1560426 - RNA, 19 nt, Artificial Sequence
  Description of Artificial Sequence: Synthetic oligonucleotide
agccccuuuuccuagcaga

SEQ ID NO: 1560427 - RNA, 19 nt, Artificial Sequence
  Description of Artificial Sequence: Synthetic oligonucleotide
cuuucaacaagugaugggu

SEQ ID NO: 1560428 - RNA, 19 nt, Artificial Sequence
  Description of Artificial Sequence: Synthetic oligonucleotide
cuaggugcagggaccuccg

SEQ ID NO: 1560429 - RNA, 19 nt, Artificial Sequence
  Description of Artificial Sequence: Synthetic oligonucleotide
agggcuagggcagcagagc

SEQ ID NO: 1560430 - RNA, 19 nt, Artificial Sequence
  Description of Artificial Sequence: Synthetic oligonucleotide
acggagacauccccgccuc

SEQ ID NO: 1560431 - RNA, 19 nt, Artificial Sequence
  Description of Artificial Sequence: Synthetic oligonucleotide
uugaguggcuccccguggu

SEQ ID NO: 1560432 - RNA, 19 nt, Artificial Sequence
  Description of Artificial Sequence: Synthetic oligonucleotide
ucacagucgucauccuuca

SEQ ID NO: 1560433 - RNA, 19 nt, Artificial Sequence
  Description of Artificial Sequence: Synthetic oligonucleotide
gaggcaaaugucggcauac

SEQ ID NO: 1560434 - RNA, 19 nt, Artificial Sequence
  Description of Artificial Sequence: Synthetic oligonucleotide
cauugaguggcuccccgug

SEQ ID NO: 1560435 - RNA, 19 nt, Artificial Sequence
  Description of Artificial Sequence: Synthetic oligonucleotide
caagugugggaguucuuuc

SEQ ID NO: 1560436 - RNA, 19 nt, Artificial Sequence
  Description of Artificial Sequence: Synthetic oligonucleotide
aaggcaaauucugggguaa

SEQ ID NO: 1560437 - RNA, 19 nt, Artificial Sequence
  Description of Artificial Sequence: Synthetic oligonucleotide
ucuugguccugccccuacc

SEQ ID NO: 1560438 - RNA, 19 nt, Artificial Sequence
  Description of Artificial Sequence: Synthetic oligonucleotide
ugggaagggugauaugguc

SEQ ID NO: 1560439 - RNA, 19 nt, Artificial Sequence
  Description of Artificial Sequence: Synthetic oligonucleotide
cuccccgugguaauacagc

SEQ ID NO: 1560440 - RNA, 19 nt, Artificial Sequence
  Description of Artificial Sequence: Synthetic oligonucleotide
augaggccaagugugggag

SEQ ID NO: 1560441 - RNA, 19 nt, Artificial Sequence
  Description of Artificial Sequence: Synthetic oligonucleotide
agggugauauggucaugag

SEQ ID NO: 1560442 - RNA, 19 nt, Artificial Sequence
  Description of Artificial Sequence: Synthetic oligonucleotide
cuaugcucugaaacaaaga

SEQ ID NO: 1560443 - RNA, 19 nt, Artificial Sequence
  Description of Artificial Sequence: Synthetic oligonucleotide
ugauauggucaugaggcuu

SEQ ID NO: 1560444 - RNA, 19 nt, Artificial Sequence
  Description of Artificial Sequence: Synthetic oligonucleotide
gaaauggccuugcccuccc

SEQ ID NO: 1560445 - RNA, 19 nt, Artificial Sequence
  Description of Artificial Sequence: Synthetic oligonucleotide
ugucccgggaagccucuag

SEQ ID NO: 1560446 - RNA, 19 nt, Artificial Sequence
  Description of Artificial Sequence: Synthetic oligonucleotide
aucuugguccugccccuac

SEQ ID NO: 1560447 - RNA, 19 nt, Artificial Sequence
  Description of Artificial Sequence: Synthetic oligonucleotide
cuccggucagacaugagga

SEQ ID NO: 1560448 - RNA, 19 nt, Artificial Sequence
  Description of Artificial Sequence: Synthetic oligonucleotide
cagcagucgguccuguagc

SEQ ID NO: 1560449 - RNA, 19 nt, Artificial Sequence
  Description of Artificial Sequence: Synthetic oligonucleotide
ugggguuaugguguacacc

SEQ ID NO: 1560450 - RNA, 19 nt, Artificial Sequence
  Description of Artificial Sequence: Synthetic oligonucleotide
cuacuccuuuucucuacag

SEQ ID NO: 1560451 - RNA, 19 nt, Artificial Sequence
  Description of Artificial Sequence: Synthetic oligonucleotide
uugacccuguaggauacca

SEQ ID NO: 1560452 - RNA, 19 nt, Artificial Sequence
  Description of Artificial Sequence: Synthetic oligonucleotide
uggagcaaacuguaccuuu

SEQ ID NO: 1560453 - RNA, 19 nt, Artificial Sequence
  Description of Artificial Sequence: Synthetic oligonucleotide
cacaggacacuuguacugc

SEQ ID NO: 1560454 - RNA, 19 nt, Artificial Sequence
  Description of Artificial Sequence: Synthetic oligonucleotide
aacuuuaggugugcccaca

SEQ ID NO: 1560455 - RNA, 19 nt, Artificial Sequence
  Description of Artificial Sequence: Synthetic oligonucleotide
guaucuuggguggagggga

SEQ ID NO: 1560456 - RNA, 19 nt, Artificial Sequence
  Description of Artificial Sequence: Synthetic oligonucleotide
uccuagcagaauuggucgu

SEQ ID NO: 1560457 - RNA, 19 nt, Artificial Sequence
  Description of Artificial Sequence: Synthetic oligonucleotide
cgaguuguuggugacaugg

SEQ ID NO: 1560458 - RNA, 19 nt, Artificial Sequence
  Description of Artificial Sequence: Synthetic oligonucleotide
uuguacugcgcggugcuga

SEQ ID NO: 1560459 - RNA, 19 nt, Artificial Sequence
  Description of Artificial Sequence: Synthetic oligonucleotide
cccagaaccuccuuguuug

SEQ ID NO: 1560460 - RNA, 19 nt, Artificial Sequence
  Description of Artificial Sequence: Synthetic oligonucleotide
ugaugauaagucgcaccga

SEQ ID NO: 1560461 - RNA, 19 nt, Artificial Sequence
  Description of Artificial Sequence: Synthetic oligonucleotide
ucccuaugcucugaaacaa

SEQ ID NO: 1560462 - RNA, 19 nt, Artificial Sequence
  Description of Artificial Sequence: Synthetic oligonucleotide
gggguuaugguguacaccu

SEQ ID NO: 1560463 - RNA, 19 nt, Artificial Sequence
  Description of Artificial Sequence: Synthetic oligonucleotide
uagcuccacggagacaucc

SEQ ID NO: 1560464 - RNA, 19 nt, Artificial Sequence
  Description of Artificial Sequence: Synthetic oligonucleotide
caggacacuuguacugcgc

SEQ ID NO: 1560465 - RNA, 19 nt, Artificial Sequence
  Description of Artificial Sequence: Synthetic oligonucleotide
ccuccggucagacaugagg

SEQ ID NO: 1560466 - RNA, 19 nt, Artificial Sequence
  Description of Artificial Sequence: Synthetic oligonucleotide
gugcuagaagccagguugg

SEQ ID NO: 1560467 - RNA, 19 nt, Artificial Sequence
  Description of Artificial Sequence: Synthetic oligonucleotide
uugcuacaaagcugagcca

SEQ ID NO: 1560468 - RNA, 19 nt, Artificial Sequence
  Description of Artificial Sequence: Synthetic oligonucleotide
guccagugcguaucuuggg

SEQ ID NO: 1560469 - RNA, 19 nt, Artificial Sequence
  Description of Artificial Sequence: Synthetic oligonucleotide
gucccgggaagccucuagg

SEQ ID NO: 1560470 - RNA, 19 nt, Artificial Sequence
  Description of Artificial Sequence: Synthetic oligonucleotide
gguaugaggccaagugugg

SEQ ID NO: 1560471 - RNA, 19 nt, Artificial Sequence
  Description of Artificial Sequence: Synthetic oligonucleotide
uucugaugauaagucgcac

SEQ ID NO: 1560472 - RNA, 19 nt, Artificial Sequence
  Description of Artificial Sequence: Synthetic oligonucleotide
ggacguugacauugagugg

SEQ ID NO: 1560473 - RNA, 19 nt, Artificial Sequence
  Description of Artificial Sequence: Synthetic oligonucleotide
gguuuauuucuucccuaug

SEQ ID NO: 1560474 - RNA, 19 nt, Artificial Sequence
  Description of Artificial Sequence: Synthetic oligonucleotide
ucaguguccccuucccaaa

SEQ ID NO: 1560475 - RNA, 19 nt, Artificial Sequence
  Description of Artificial Sequence: Synthetic oligonucleotide
auacagcucuuugucccgg

SEQ ID NO: 1560476 - RNA, 19 nt, Artificial Sequence
  Description of Artificial Sequence: Synthetic oligonucleotide
ccgggaagccucuaggugc

SEQ ID NO: 1560477 - RNA, 19 nt, Artificial Sequence
  Description of Artificial Sequence: Synthetic oligonucleotide
ggacacuuguacugcgcgg

SEQ ID NO: 1560478 - RNA, 19 nt, Artificial Sequence
  Description of Artificial Sequence: Synthetic oligonucleotide
aacaagugauggguccagu

SEQ ID NO: 1560479 - RNA, 19 nt, Artificial Sequence
  Description of Artificial Sequence: Synthetic oligonucleotide
guaucgaauucgaugaggu

SEQ ID NO: 1560480 - RNA, 19 nt, Artificial Sequence
  Description of Artificial Sequence: Synthetic oligonucleotide
cagggcaaggccacgcuuc

SEQ ID NO: 1560481 - RNA, 19 nt, Artificial Sequence
  Description of Artificial Sequence: Synthetic oligonucleotide
agcuccacggagacauccc

SEQ ID NO: 1560482 - RNA, 19 nt, Artificial Sequence
  Description of Artificial Sequence: Synthetic oligonucleotide
auggacguugacauugagu

SEQ ID NO: 1560483 - RNA, 19 nt, Artificial Sequence
  Description of Artificial Sequence: Synthetic oligonucleotide
agaacgaacgguagcucca

SEQ ID NO: 1560484 - RNA, 19 nt, Artificial Sequence
  Description of Artificial Sequence: Synthetic oligonucleotide
auauggucaugaggcuugg

SEQ ID NO: 1560485 - RNA, 19 nt, Artificial Sequence
  Description of Artificial Sequence: Synthetic oligonucleotide
gugugggaguucuuucuac

SEQ ID NO: 1560486 - RNA, 19 nt, Artificial Sequence
  Description of Artificial Sequence: Synthetic oligonucleotide
uggugacuuggguggcagg

SEQ ID NO: 1560487 - RNA, 19 nt, Artificial Sequence
  Description of Artificial Sequence: Synthetic oligonucleotide
cgaaucucaaagucgacuc

SEQ ID NO: 1560488 - RNA, 19 nt, Artificial Sequence
  Description of Artificial Sequence: Synthetic oligonucleotide
acagagcaaggcaaauucu

SEQ ID NO: 1560489 - RNA, 19 nt, Artificial Sequence
  Description of Artificial Sequence: Synthetic oligonucleotide
ugagaacgaacgguagcuc

SEQ ID NO: 1560490 - RNA, 19 nt, Artificial Sequence
  Description of Artificial Sequence: Synthetic oligonucleotide
aagccagguuggugucuuc

SEQ ID NO: 1560491 - RNA, 19 nt, Artificial Sequence
  Description of Artificial Sequence: Synthetic oligonucleotide
agucgcaccgaguuccuuu

SEQ ID NO: 1560492 - RNA, 19 nt, Artificial Sequence
  Description of Artificial Sequence: Synthetic oligonucleotide
gucaucuguggcguaguug

SEQ ID NO: 1560493 - RNA, 19 nt, Artificial Sequence
  Description of Artificial Sequence: Synthetic oligonucleotide
gauaccuggucaucuugcu

SEQ ID NO: 1560494 - RNA, 19 nt, Artificial Sequence
  Description of Artificial Sequence: Synthetic oligonucleotide
ucuugacggucuuggccga

SEQ ID NO: 1560495 - RNA, 19 nt, Artificial Sequence
  Description of Artificial Sequence: Synthetic oligonucleotide
uaagucgcaccgaguuccu

SEQ ID NO: 1560496 - RNA, 19 nt, Artificial Sequence
  Description of Artificial Sequence: Synthetic oligonucleotide
uguacugcgcggugcugaa

SEQ ID NO: 1560497 - RNA, 19 nt, Artificial Sequence
  Description of Artificial Sequence: Synthetic oligonucleotide
ggcucccucuuucacaaug

SEQ ID NO: 1560498 - RNA, 19 nt, Artificial Sequence
  Description of Artificial Sequence: Synthetic oligonucleotide
uccggucagacaugaggaa

SEQ ID NO: 1560499 - RNA, 19 nt, Artificial Sequence
  Description of Artificial Sequence: Synthetic oligonucleotide
ugacauugaguggcucccc

SEQ ID NO: 1560500 - RNA, 19 nt, Artificial Sequence
  Description of Artificial Sequence: Synthetic oligonucleotide
cucccgguugucacugagc

SEQ ID NO: 1560501 - RNA, 19 nt, Artificial Sequence
  Description of Artificial Sequence: Synthetic oligonucleotide
acugcgcggugcugaagag

SEQ ID NO: 1560502 - RNA, 19 nt, Artificial Sequence
  Description of Artificial Sequence: Synthetic oligonucleotide
caacaagugauggguccag

SEQ ID NO: 1560503 - RNA, 19 nt, Artificial Sequence
  Description of Artificial Sequence: Synthetic oligonucleotide
ccacuuucaacaagugaug

SEQ ID NO: 1560504 - RNA, 19 nt, Artificial Sequence
  Description of Artificial Sequence: Synthetic oligonucleotide
gcguaucuuggguggaggg

SEQ ID NO: 1560505 - RNA, 19 nt, Artificial Sequence
  Description of Artificial Sequence: Synthetic oligonucleotide
uucagccgaagccgggcaa

SEQ ID NO: 1560506 - RNA, 19 nt, Artificial Sequence
  Description of Artificial Sequence: Synthetic oligonucleotide
auaccuggucaucuugcua

SEQ ID NO: 1560507 - RNA, 19 nt, Artificial Sequence
  Description of Artificial Sequence: Synthetic oligonucleotide
cacgaaucucaaagucgac

SEQ ID NO: 1560508 - RNA, 19 nt, Artificial Sequence
  Description of Artificial Sequence: Synthetic oligonucleotide
gaacgaacgguagcuccac

SEQ ID NO: 1560509 - RNA, 19 nt, Artificial Sequence
  Description of Artificial Sequence: Synthetic oligonucleotide
agaggcaaaugucggcaua

SEQ ID NO: 1560510 - RNA, 19 nt, Artificial Sequence
  Description of Artificial Sequence: Synthetic oligonucleotide
auggguccagugcguaucu

SEQ ID NO: 1560511 - RNA, 19 nt, Artificial Sequence
  Description of Artificial Sequence: Synthetic oligonucleotide
cagaaccuccuuguuuggc

SEQ ID NO: 1560512 - RNA, 19 nt, Artificial Sequence
  Description of Artificial Sequence: Synthetic oligonucleotide
augucggcauacugucuca

SEQ ID NO: 1560513 - RNA, 19 nt, Artificial Sequence
  Description of Artificial Sequence: Synthetic oligonucleotide
guauccacagggacaucug

SEQ ID NO: 1560514 - RNA, 19 nt, Artificial Sequence
  Description of Artificial Sequence: Synthetic oligonucleotide
ggguccagugcguaucuug

SEQ ID NO: 1560515 - RNA, 19 nt, Artificial Sequence
  Description of Artificial Sequence: Synthetic oligonucleotide
gugggguuaugguguacac

SEQ ID NO: 1560516 - RNA, 19 nt, Artificial Sequence
  Description of Artificial Sequence: Synthetic oligonucleotide
gcacgaaucucaaagucga

SEQ ID NO: 1560517 - RNA, 19 nt, Artificial Sequence
  Description of Artificial Sequence: Synthetic oligonucleotide
ucccuagggagcagggcua

SEQ ID NO: 1560518 - RNA, 19 nt, Artificial Sequence
  Description of Artificial Sequence: Synthetic oligonucleotide
gacacuuguacugcgcggu

SEQ ID NO: 1560519 - RNA, 19 nt, Artificial Sequence
  Description of Artificial Sequence: Synthetic oligonucleotide
uugguccugccccuaccuc

SEQ ID NO: 1560520 - RNA, 19 nt, Artificial Sequence
  Description of Artificial Sequence: Synthetic oligonucleotide
cauccccuucagccgaagc

SEQ ID NO: 1560521 - RNA, 19 nt, Artificial Sequence
  Description of Artificial Sequence: Synthetic oligonucleotide
cccacuuucaacaagugau

SEQ ID NO: 1560522 - RNA, 19 nt, Artificial Sequence
  Description of Artificial Sequence: Synthetic oligonucleotide
gcagaaguggugacuuggg

SEQ ID NO: 1560523 - RNA, 19 nt, Artificial Sequence
  Description of Artificial Sequence: Synthetic oligonucleotide
ggugcagggaccuccgguc

SEQ ID NO: 1560524 - RNA, 19 nt, Artificial Sequence
  Description of Artificial Sequence: Synthetic oligonucleotide
caugaggaaguggcgugug

SEQ ID NO: 1560525 - RNA, 19 nt, Artificial Sequence
  Description of Artificial Sequence: Synthetic oligonucleotide
accuggucaucuugcuaca

SEQ ID NO: 1560526 - RNA, 19 nt, Artificial Sequence
  Description of Artificial Sequence: Synthetic oligonucleotide
augauaagucgcaccgagu

SEQ ID NO: 1560527 - RNA, 19 nt, Artificial Sequence
  Description of Artificial Sequence: Synthetic oligonucleotide
cuggcccaacuucuucagc

SEQ ID NO: 1560528 - RNA, 19 nt, Artificial Sequence
  Description of Artificial Sequence: Synthetic oligonucleotide
ugucggcauacugucucac

SEQ ID NO: 1560529 - RNA, 19 nt, Artificial Sequence
  Description of Artificial Sequence: Synthetic oligonucleotide
ggaaguggcgugugguuuc

SEQ ID NO: 1560530 - RNA, 19 nt, Artificial Sequence
  Description of Artificial Sequence: Synthetic oligonucleotide
ucgguccuguagccgggug

SEQ ID NO: 1560531 - RNA, 19 nt, Artificial Sequence
  Description of Artificial Sequence: Synthetic oligonucleotide
aggcagaaguggugacuug

SEQ ID NO: 1560532 - RNA, 19 nt, Artificial Sequence
  Description of Artificial Sequence: Synthetic oligonucleotide
agugauggguccagugcgu

SEQ ID NO: 1560533 - RNA, 19 nt, Artificial Sequence
  Description of Artificial Sequence: Synthetic oligonucleotide
auucugggguaaugugaaa

SEQ ID NO: 1560534 - RNA, 19 nt, Artificial Sequence
  Description of Artificial Sequence: Synthetic oligonucleotide
ggcaaauucugggguaaug

SEQ ID NO: 1560535 - RNA, 19 nt, Artificial Sequence
  Description of Artificial Sequence: Synthetic oligonucleotide
gcaugagaacgaacgguag

SEQ ID NO: 1560536 - RNA, 19 nt, Artificial Sequence
  Description of Artificial Sequence: Synthetic oligonucleotide
ccagugcguaucuugggug

SEQ ID NO: 1560537 - RNA, 19 nt, Artificial Sequence
  Description of Artificial Sequence: Synthetic oligonucleotide
uggggugcaugagaacgaa

SEQ ID NO: 1560538 - RNA, 19 nt, Artificial Sequence
  Description of Artificial Sequence: Synthetic oligonucleotide
aggaaguggcgugugguuu

SEQ ID NO: 1560539 - RNA, 19 nt, Artificial Sequence
  Description of Artificial Sequence: Synthetic oligonucleotide
augggcaugcuggcccaac

SEQ ID NO: 1560540 - RNA, 19 nt, Artificial Sequence
  Description of Artificial Sequence: Synthetic oligonucleotide
cauccccgccucgagacac

SEQ ID NO: 1560541 - RNA, 19 nt, Artificial Sequence
  Description of Artificial Sequence: Synthetic oligonucleotide
acccuguaggauaccagga

SEQ ID NO: 1560542 - RNA, 19 nt, Artificial Sequence
  Description of Artificial Sequence: Synthetic oligonucleotide
ugacggucuuggccgaguu

SEQ ID NO: 1560543 - RNA, 19 nt, Artificial Sequence
  Description of Artificial Sequence: Synthetic oligonucleotide
ugcuagaagccagguuggu

SEQ ID NO: 1560544 - RNA, 19 nt, Artificial Sequence
  Description of Artificial Sequence: Synthetic oligonucleotide
cuuggccgaguuguuggug

SEQ ID NO: 1560545 - RNA, 19 nt, Artificial Sequence
  Description of Artificial Sequence: Synthetic oligonucleotide
ugacauggacguugacauu

SEQ ID NO: 1560546 - RNA, 19 nt, Artificial Sequence
  Description of Artificial Sequence: Synthetic oligonucleotide
cugcgcggugcugaagagg

SEQ ID NO: 1560547 - RNA, 19 nt, Artificial Sequence
  Description of Artificial Sequence: Synthetic oligonucleotide
uucauccccuucagccgaa

SEQ ID NO: 1560548 - RNA, 19 nt, Artificial Sequence
  Description of Artificial Sequence: Synthetic oligonucleotide
gucggcauacugucucaca

SEQ ID NO: 1560549 - RNA, 19 nt, Artificial Sequence
  Description of Artificial Sequence: Synthetic oligonucleotide
gaauucgaugagguuggua

SEQ ID NO: 1560550 - RNA, 19 nt, Artificial Sequence
  Description of Artificial Sequence: Synthetic oligonucleotide
gggaccuccggucagacau

SEQ ID NO: 1560551 - RNA, 19 nt, Artificial Sequence
  Description of Artificial Sequence: Synthetic oligonucleotide
cuggucaucuugcuacaaa

SEQ ID NO: 1560552 - RNA, 19 nt, Artificial Sequence
  Description of Artificial Sequence: Synthetic oligonucleotide
ccuugacccuguaggauac

SEQ ID NO: 1560553 - RNA, 19 nt, Artificial Sequence
  Description of Artificial Sequence: Synthetic oligonucleotide
cugaagucaaaagauuaau

SEQ ID NO: 1560554 - RNA, 19 nt, Artificial Sequence
  Description of Artificial Sequence: Synthetic oligonucleotide
cagcaugccucccuaggga

SEQ ID NO: 1560555 - RNA, 19 nt, Artificial Sequence
  Description of Artificial Sequence: Synthetic oligonucleotide
auggugcuagaagccaggu

SEQ ID NO: 1560556 - RNA, 19 nt, Artificial Sequence
  Description of Artificial Sequence: Synthetic oligonucleotide
gcuagaagccagguuggug

SEQ ID NO: 1560557 - RNA, 19 nt, Artificial Sequence
  Description of Artificial Sequence: Synthetic oligonucleotide
agugcguaucuugggugga

SEQ ID NO: 1560558 - RNA, 19 nt, Artificial Sequence
  Description of Artificial Sequence: Synthetic oligonucleotide
uggugucuucaugcuugag

SEQ ID NO: 1560559 - RNA, 19 nt, Artificial Sequence
  Description of Artificial Sequence: Synthetic oligonucleotide
gcugggacccucccacccg

SEQ ID NO: 1560560 - RNA, 19 nt, Artificial Sequence
  Description of Artificial Sequence: Synthetic oligonucleotide
aguugguaucgaauucgau

SEQ ID NO: 1560561 - RNA, 19 nt, Artificial Sequence
  Description of Artificial Sequence: Synthetic oligonucleotide
ccaaaacuuuaggugugcc

SEQ ID NO: 1560562 - RNA, 19 nt, Artificial Sequence
  Description of Artificial Sequence: Synthetic oligonucleotide
gcuccacggagacaucccc

SEQ ID NO: 1560563 - RNA, 19 nt, Artificial Sequence
  Description of Artificial Sequence: Synthetic oligonucleotide
acuguaccuuucugaugau

SEQ ID NO: 1560564 - RNA, 19 nt, Artificial Sequence
  Description of Artificial Sequence: Synthetic oligonucleotide
cguaguugguaucgaauuc

SEQ ID NO: 1560565 - RNA, 19 nt, Artificial Sequence
  Description of Artificial Sequence: Synthetic oligonucleotide
gcaaggcaaauucuggggu

SEQ ID NO: 1560566 - RNA, 19 nt, Artificial Sequence
  Description of Artificial Sequence: Synthetic oligonucleotide
gugcguaucuuggguggag

SEQ ID NO: 1560567 - RNA, 19 nt, Artificial Sequence
  Description of Artificial Sequence: Synthetic oligonucleotide
ggucagacaugaggaagug

SEQ ID NO: 1560568 - RNA, 19 nt, Artificial Sequence
  Description of Artificial Sequence: Synthetic oligonucleotide
agucgguccuguagccggg

SEQ ID NO: 1560569 - RNA, 19 nt, Artificial Sequence
  Description of Artificial Sequence: Synthetic oligonucleotide
ggcgugugguuucugcuga

SEQ ID NO: 1560570 - RNA, 19 nt, Artificial Sequence
  Description of Artificial Sequence: Synthetic oligonucleotide
cuugacccuguaggauacc

SEQ ID NO: 1560571 - RNA, 19 nt, Artificial Sequence
  Description of Artificial Sequence: Synthetic oligonucleotide
gucgacuccacaggccuuc

SEQ ID NO: 1560572 - RNA, 19 nt, Artificial Sequence
  Description of Artificial Sequence: Synthetic oligonucleotide
ucauccccuucagccgaag

SEQ ID NO: 1560573 - RNA, 19 nt, Artificial Sequence
  Description of Artificial Sequence: Synthetic oligonucleotide
uucagcagucgguccugua

SEQ ID NO: 1560574 - RNA, 19 nt, Artificial Sequence
  Description of Artificial Sequence: Synthetic oligonucleotide
ucgucacagucgucauccu

SEQ ID NO: 1560575 - RNA, 19 nt, Artificial Sequence
  Description of Artificial Sequence: Synthetic oligonucleotide
gaccuccggucagacauga

SEQ ID NO: 1560576 - RNA, 19 nt, Artificial Sequence
  Description of Artificial Sequence: Synthetic oligonucleotide
acauccccgccucgagaca

SEQ ID NO: 1560577 - RNA, 19 nt, Artificial Sequence
  Description of Artificial Sequence: Synthetic oligonucleotide
auuggucgucacagucguc

SEQ ID NO: 1560578 - RNA, 19 nt, Artificial Sequence
  Description of Artificial Sequence: Synthetic oligonucleotide
cuguggcguaguugguauc

SEQ ID NO: 1560579 - RNA, 19 nt, Artificial Sequence
  Description of Artificial Sequence: Synthetic oligonucleotide
ucgacuccacaggccuucc

SEQ ID NO: 1560580 - RNA, 19 nt, Artificial Sequence
  Description of Artificial Sequence: Synthetic oligonucleotide
ccacccgaagugacagugg

SEQ ID NO: 1560581 - RNA, 19 nt, Artificial Sequence
  Description of Artificial Sequence: Synthetic oligonucleotide
cccaaaacuuuaggugugc

SEQ ID NO: 1560582 - RNA, 19 nt, Artificial Sequence
  Description of Artificial Sequence: Synthetic oligonucleotide
agguugguaugaggccaag

SEQ ID NO: 1560583 - RNA, 19 nt, Artificial Sequence
  Description of Artificial Sequence: Synthetic oligonucleotide
gcagucgguccuguagccg

SEQ ID NO: 1560584 - RNA, 19 nt, Artificial Sequence
  Description of Artificial Sequence: Synthetic oligonucleotide
cucuaaucuucuugacggu

SEQ ID NO: 1560585 - RNA, 19 nt, Artificial Sequence
  Description of Artificial Sequence: Synthetic oligonucleotide
aaguggcgugugguuucug

SEQ ID NO: 1560586 - RNA, 19 nt, Artificial Sequence
  Description of Artificial Sequence: Synthetic oligonucleotide
ggauaccaggauucccaga

SEQ ID NO: 1560587 - RNA, 19 nt, Artificial Sequence
  Description of Artificial Sequence: Synthetic oligonucleotide
cagguugguaugaggccaa

SEQ ID NO: 1560588 - RNA, 19 nt, Artificial Sequence
  Description of Artificial Sequence: Synthetic oligonucleotide
gaggaaguggcgugugguu

SEQ ID NO: 1560589 - RNA, 19 nt, Artificial Sequence
  Description of Artificial Sequence: Synthetic oligonucleotide
agggaccuccggucagaca

SEQ ID NO: 1560590 - RNA, 19 nt, Artificial Sequence
  Description of Artificial Sequence: Synthetic oligonucleotide
ucccacccgaagugacagu

SEQ ID NO: 1560591 - RNA, 19 nt, Artificial Sequence
  Description of Artificial Sequence: Synthetic oligonucleotide
ccccuucccaaaacuuuag

SEQ ID NO: 1560592 - RNA, 19 nt, Artificial Sequence
  Description of Artificial Sequence: Synthetic oligonucleotide
cccacccgaagugacagug

SEQ ID NO: 1560593 - RNA, 19 nt, Artificial Sequence
  Description of Artificial Sequence: Synthetic oligonucleotide
cccgugguaauacagcucu

SEQ ID NO: 1560594 - RNA, 19 nt, Artificial Sequence
  Description of Artificial Sequence: Synthetic oligonucleotide
cccgggaagccucuaggug

SEQ ID NO: 1560595 - RNA, 19 nt, Artificial Sequence
  Description of Artificial Sequence: Synthetic oligonucleotide
cagaauuggucgucacagu

SEQ ID NO: 1560596 - RNA, 19 nt, Artificial Sequence
  Description of Artificial Sequence: Synthetic oligonucleotide
ccuagcagaauuggucguc

SEQ ID NO: 1560597 - RNA, 19 nt, Artificial Sequence
  Description of Artificial Sequence: Synthetic oligonucleotide
gaagccgggcaaaguccuc

SEQ ID NO: 1560598 - RNA, 19 nt, Artificial Sequence
  Description of Artificial Sequence: Synthetic oligonucleotide
cagccgaagccgggcaaag

SEQ ID NO: 1560599 - RNA, 19 nt, Artificial Sequence
  Description of Artificial Sequence: Synthetic oligonucleotide
gcguaguugguaucgaauu

SEQ ID NO: 1560600 - RNA, 19 nt, Artificial Sequence
  Description of Artificial Sequence: Synthetic oligonucleotide
ugucgucaucuguggcgua

SEQ ID NO: 1560601 - RNA, 19 nt, Artificial Sequence
  Description of Artificial Sequence: Synthetic oligonucleotide
aggcaaauucugggguaau

SEQ ID NO: 1560602 - RNA, 19 nt, Artificial Sequence
  Description of Artificial Sequence: Synthetic oligonucleotide
ggcuuggggugcaugagaa

SEQ ID NO: 1560603 - RNA, 19 nt, Artificial Sequence
  Description of Artificial Sequence: Synthetic oligonucleotide
cagguaucucuggagcaaa

SEQ ID NO: 1560604 - RNA, 19 nt, Artificial Sequence
  Description of Artificial Sequence: Synthetic oligonucleotide
guacugcgcggugcugaag

SEQ ID NO: 1560605 - RNA, 19 nt, Artificial Sequence
  Description of Artificial Sequence: Synthetic oligonucleotide
gaacugggagauaccuggu

SEQ ID NO: 1560606 - RNA, 19 nt, Artificial Sequence
  Description of Artificial Sequence: Synthetic oligonucleotide
acccgaagugacaguggga

SEQ ID NO: 1560607 - RNA, 19 nt, Artificial Sequence
  Description of Artificial Sequence: Synthetic oligonucleotide
ggaugggcaugcuggccca

SEQ ID NO: 1560608 - RNA, 19 nt, Artificial Sequence
  Description of Artificial Sequence: Synthetic oligonucleotide
aagucgcaccgaguuccuu

SEQ ID NO: 1560609 - RNA, 19 nt, Artificial Sequence
  Description of Artificial Sequence: Synthetic oligonucleotide
ugggacccucccacccgaa

SEQ ID NO: 1560610 - RNA, 19 nt, Artificial Sequence
  Description of Artificial Sequence: Synthetic oligonucleotide
gaagccagguuggugucuu

SEQ ID NO: 1560611 - RNA, 19 nt, Artificial Sequence
  Description of Artificial Sequence: Synthetic oligonucleotide
cagggaccuccggucagac

SEQ ID NO: 1560612 - RNA, 19 nt, Artificial Sequence
  Description of Artificial Sequence: Synthetic oligonucleotide
gaaguggcgugugguuucu

SEQ ID NO: 1560613 - RNA, 19 nt, Artificial Sequence
  Description of Artificial Sequence: Synthetic oligonucleotide
gucgcuccucacuuucagu

SEQ ID NO: 1560614 - RNA, 19 nt, Artificial Sequence
  Description of Artificial Sequence: Synthetic oligonucleotide
cuguaccuuucugaugaua

SEQ ID NO: 1560615 - RNA, 19 nt, Artificial Sequence
  Description of Artificial Sequence: Synthetic oligonucleotide
cacgcuucucccgguuguc

SEQ ID NO: 1560616 - RNA, 19 nt, Artificial Sequence
  Description of Artificial Sequence: Synthetic oligonucleotide
ccgguugucacugagcagu

SEQ ID NO: 1560617 - RNA, 19 nt, Artificial Sequence
  Description of Artificial Sequence: Synthetic oligonucleotide
gcgugugguuucugcugag

SEQ ID NO: 1560618 - RNA, 19 nt, Artificial Sequence
  Description of Artificial Sequence: Synthetic oligonucleotide
cccuucagccgaagccggg

SEQ ID NO: 1560619 - RNA, 19 nt, Artificial Sequence
  Description of Artificial Sequence: Synthetic oligonucleotide
ggucugggaagggugauau

SEQ ID NO: 1560620 - RNA, 19 nt, Artificial Sequence
  Description of Artificial Sequence: Synthetic oligonucleotide
cgaagugacagugggaucu

SEQ ID NO: 1560621 - RNA, 19 nt, Artificial Sequence
  Description of Artificial Sequence: Synthetic oligonucleotide
ccgaagugacagugggauc

SEQ ID NO: 1560622 - RNA, 19 nt, Artificial Sequence
  Description of Artificial Sequence: Synthetic oligonucleotide
aggccacgcuucucccggu

SEQ ID NO: 1560623 - RNA, 19 nt, Artificial Sequence
  Description of Artificial Sequence: Synthetic oligonucleotide
cccgguugucacugagcag

SEQ ID NO: 1560624 - RNA, 19 nt, Artificial Sequence
  Description of Artificial Sequence: Synthetic oligonucleotide
cagugggguuaugguguac

SEQ ID NO: 1560625 - RNA, 19 nt, Artificial Sequence
  Description of Artificial Sequence: Synthetic oligonucleotide
gccucccuagggagcaggg

SEQ ID NO: 1560626 - RNA, 19 nt, Artificial Sequence
  Description of Artificial Sequence: Synthetic oligonucleotide
gucgcaccgaguuccuuuu

SEQ ID NO: 1560627 - RNA, 19 nt, Artificial Sequence
  Description of Artificial Sequence: Synthetic oligonucleotide
ccccgugguaauacagcuc

SEQ ID NO: 1560628 - RNA, 19 nt, Artificial Sequence
  Description of Artificial Sequence: Synthetic oligonucleotide
cccucccacccgaagugac

SEQ ID NO: 1560629 - RNA, 19 nt, Artificial Sequence
  Description of Artificial Sequence: Synthetic oligonucleotide
cucuaggugcagggaccuc

SEQ ID NO: 1560630 - RNA, 19 nt, Artificial Sequence
  Description of Artificial Sequence: Synthetic oligonucleotide
ggcguaguugguaucgaau

SEQ ID NO: 1560631 - RNA, 19 nt, Artificial Sequence
  Description of Artificial Sequence: Synthetic oligonucleotide
gguccugccccuaccucuc

SEQ ID NO: 1560632 - RNA, 19 nt, Artificial Sequence
  Description of Artificial Sequence: Synthetic oligonucleotide
ggggugcaugagaacgaac

SEQ ID NO: 1560633 - RNA, 19 nt, Artificial Sequence
  Description of Artificial Sequence: Synthetic oligonucleotide
cgaacgguagcuccacgga

SEQ ID NO: 1560634 - RNA, 19 nt, Artificial Sequence
  Description of Artificial Sequence: Synthetic oligonucleotide
ggcuccccgugguaauaca

SEQ ID NO: 1560635 - RNA, 19 nt, Artificial Sequence
  Description of Artificial Sequence: Synthetic oligonucleotide
agucgacuccacaggccuu

SEQ ID NO: 1560636 - RNA, 19 nt, Artificial Sequence
  Description of Artificial Sequence: Synthetic oligonucleotide
gaugggcaugcuggcccaa

SEQ ID NO: 1560637 - RNA, 19 nt, Artificial Sequence
  Description of Artificial Sequence: Synthetic oligonucleotide
uggguccagugcguaucuu

SEQ ID NO: 1560638 - RNA, 19 nt, Artificial Sequence
  Description of Artificial Sequence: Synthetic oligonucleotide
cccuaugcucugaaacaaa

SEQ ID NO: 1560639 - RNA, 19 nt, Artificial Sequence
  Description of Artificial Sequence: Synthetic oligonucleotide
ccucccuagggagcagggc

SEQ ID NO: 1560640 - RNA, 19 nt, Artificial Sequence
  Description of Artificial Sequence: Synthetic oligonucleotide
ccuguaggauaccaggauu

SEQ ID NO: 1560641 - RNA, 19 nt, Artificial Sequence
  Description of Artificial Sequence: Synthetic oligonucleotide
cccgaagugacagugggau

SEQ ID NO: 1560642 - RNA, 19 nt, Artificial Sequence
  Description of Artificial Sequence: Synthetic oligonucleotide
cucgagacaccaccagcuu

SEQ ID NO: 1560643 - RNA, 19 nt, Artificial Sequence
  Description of Artificial Sequence: Synthetic oligonucleotide
cccuagggagcagggcuag

SEQ ID NO: 1560644 - RNA, 19 nt, Artificial Sequence
  Description of Artificial Sequence: Synthetic oligonucleotide
ccgaguuguuggugacaug

SEQ ID NO: 1560645 - RNA, 19 nt, Artificial Sequence
  Description of Artificial Sequence: Synthetic oligonucleotide
gugugcccacagcaugccu

SEQ ID NO: 1560646 - RNA, 19 nt, Artificial Sequence
  Description of Artificial Sequence: Synthetic oligonucleotide
gguugguaugaggccaagu

SEQ ID NO: 1560647 - RNA, 19 nt, Artificial Sequence
  Description of Artificial Sequence: Synthetic oligonucleotide
gcccaacuucuucagcagu

SEQ ID NO: 1560648 - RNA, 19 nt, Artificial Sequence
  Description of Artificial Sequence: Synthetic oligonucleotide
cggucagacaugaggaagu

SEQ ID NO: 1560649 - RNA, 19 nt, Artificial Sequence
  Description of Artificial Sequence: Synthetic oligonucleotide
cggcauacugucucacaga

SEQ ID NO: 1560650 - RNA, 19 nt, Artificial Sequence
  Description of Artificial Sequence: Synthetic oligonucleotide
cuggagcaaacuguaccuu

SEQ ID NO: 1560651 - RNA, 19 nt, Artificial Sequence
  Description of Artificial Sequence: Synthetic oligonucleotide
guggcuccccgugguaaua

SEQ ID NO: 1560652 - RNA, 19 nt, Artificial Sequence
  Description of Artificial Sequence: Synthetic oligonucleotide
gugacuuggguggcagguu

SEQ ID NO: 1560653 - RNA, 19 nt, Artificial Sequence
  Description of Artificial Sequence: Synthetic oligonucleotide
gcagggaccuccggucaga

SEQ ID NO: 1560654 - RNA, 19 nt, Artificial Sequence
  Description of Artificial Sequence: Synthetic oligonucleotide
cccuguaggauaccaggau

SEQ ID NO: 1560655 - RNA, 19 nt, Artificial Sequence
  Description of Artificial Sequence: Synthetic oligonucleotide
ccaagugugggaguucuuu

SEQ ID NO: 1560656 - RNA, 19 nt, Artificial Sequence
  Description of Artificial Sequence: Synthetic oligonucleotide
cggagacauccccgccucg

SEQ ID NO: 1560657 - RNA, 19 nt, Artificial Sequence
  Description of Artificial Sequence: Synthetic oligonucleotide
cacccacccacaguuucau

SEQ ID NO: 1560658 - RNA, 19 nt, Artificial Sequence
  Description of Artificial Sequence: Synthetic oligonucleotide
gggucugggaagggugaua

SEQ ID NO: 1560659 - RNA, 19 nt, Artificial Sequence
  Description of Artificial Sequence: Synthetic oligonucleotide
cacagucgucauccuucau

SEQ ID NO: 1560660 - RNA, 19 nt, Artificial Sequence
  Description of Artificial Sequence: Synthetic oligonucleotide
ggauucccagaaccuccuu

SEQ ID NO: 1560661 - RNA, 19 nt, Artificial Sequence
  Description of Artificial Sequence: Synthetic oligonucleotide
ggguuaugguguacaccuu

SEQ ID NO: 1560662 - RNA, 19 nt, Artificial Sequence
  Description of Artificial Sequence: Synthetic oligonucleotide
gcgcggugcugaagaggca

SEQ ID NO: 1560663 - RNA, 19 nt, Artificial Sequence
  Description of Artificial Sequence: Synthetic oligonucleotide
ggccacgcuucucccgguu

SEQ ID NO: 1560664 - RNA, 19 nt, Artificial Sequence
  Description of Artificial Sequence: Synthetic oligonucleotide
cgguagcuccacggagaca

SEQ ID NO: 1560665 - RNA, 19 nt, Artificial Sequence
  Description of Artificial Sequence: Synthetic oligonucleotide
cgaauucgaugagguuggu

SEQ ID NO: 1560666 - RNA, 19 nt, Artificial Sequence
  Description of Artificial Sequence: Synthetic oligonucleotide
aaaagaauugcauuggcca

SEQ ID NO: 1560667 - RNA, 19 nt, Artificial Sequence
  Description of Artificial Sequence: Synthetic oligonucleotide
uuacuaaacaugaagaugu

SEQ ID NO: 1560668 - RNA, 19 nt, Artificial Sequence
  Description of Artificial Sequence: Synthetic oligonucleotide
cuaauauuagaguuuauag

SEQ ID NO: 1560669 - RNA, 19 nt, Artificial Sequence
  Description of Artificial Sequence: Synthetic oligonucleotide
aaggauaccauuucuaccu

SEQ ID NO: 1560670 - RNA, 19 nt, Artificial Sequence
  Description of Artificial Sequence: Synthetic oligonucleotide
aaagaauugcauuggccac

SEQ ID NO: 1560671 - RNA, 19 nt, Artificial Sequence
  Description of Artificial Sequence: Synthetic oligonucleotide
caaucauuagaccaguugg

SEQ ID NO: 1560672 - RNA, 19 nt, Artificial Sequence
  Description of Artificial Sequence: Synthetic oligonucleotide
ugugccaacaucaguauag

SEQ ID NO: 1560673 - RNA, 19 nt, Artificial Sequence
  Description of Artificial Sequence: Synthetic oligonucleotide
agaaaucagaagcaggcac

SEQ ID NO: 1560674 - RNA, 19 nt, Artificial Sequence
  Description of Artificial Sequence: Synthetic oligonucleotide
gaauucucgaaucacauuc

SEQ ID NO: 1560675 - RNA, 19 nt, Artificial Sequence
  Description of Artificial Sequence: Synthetic oligonucleotide
uuuaucacugaaauacuug

SEQ ID NO: 1560676 - RNA, 19 nt, Artificial Sequence
  Description of Artificial Sequence: Synthetic oligonucleotide
cauucgaauauccaggcgg

SEQ ID NO: 1560677 - RNA, 19 nt, Artificial Sequence
  Description of Artificial Sequence: Synthetic oligonucleotide
aaugccacagaucaagcca

SEQ ID NO: 1560678 - RNA, 19 nt, Artificial Sequence
  Description of Artificial Sequence: Synthetic oligonucleotide
aaucccuuaaacuuaacua

SEQ ID NO: 1560679 - RNA, 19 nt, Artificial Sequence
  Description of Artificial Sequence: Synthetic oligonucleotide
aaugaaugcuucaugguuc

SEQ ID NO: 1560680 - RNA, 19 nt, Artificial Sequence
  Description of Artificial Sequence: Synthetic oligonucleotide
guacaguuguacuugaggg

SEQ ID NO: 1560681 - RNA, 19 nt, Artificial Sequence
  Description of Artificial Sequence: Synthetic oligonucleotide
cacagaucaagccagaaag

SEQ ID NO: 1560682 - RNA, 19 nt, Artificial Sequence
  Description of Artificial Sequence: Synthetic oligonucleotide
uuuacuaaacaugaagaug

SEQ ID NO: 1560683 - RNA, 19 nt, Artificial Sequence
  Description of Artificial Sequence: Synthetic oligonucleotide
ugacugacaaucauuagac

SEQ ID NO: 1560684 - RNA, 19 nt, Artificial Sequence
  Description of Artificial Sequence: Synthetic oligonucleotide
ugugagguacaguagaccc

SEQ ID NO: 1560685 - RNA, 19 nt, Artificial Sequence
  Description of Artificial Sequence: Synthetic oligonucleotide
aggaacacuaugcagagug

SEQ ID NO: 1560686 - RNA, 19 nt, Artificial Sequence
  Description of Artificial Sequence: Synthetic oligonucleotide
guauagcucauucaaauug

SEQ ID NO: 1560687 - RNA, 19 nt, Artificial Sequence
  Description of Artificial Sequence: Synthetic oligonucleotide
agacuggugauauccaggc

SEQ ID NO: 1560688 - RNA, 19 nt, Artificial Sequence
  Description of Artificial Sequence: Synthetic oligonucleotide
agguccaagagacagcucg

SEQ ID NO: 1560689 - RNA, 19 nt, Artificial Sequence
  Description of Artificial Sequence: Synthetic oligonucleotide
uuaucacugaaauacuuga

SEQ ID NO: 1560690 - RNA, 19 nt, Artificial Sequence
  Description of Artificial Sequence: Synthetic oligonucleotide
cucacuaggagacauaaug

SEQ ID NO: 1560691 - RNA, 19 nt, Artificial Sequence
  Description of Artificial Sequence: Synthetic oligonucleotide
cagacagaaggcaauaagg

SEQ ID NO: 1560692 - RNA, 19 nt, Artificial Sequence
  Description of Artificial Sequence: Synthetic oligonucleotide
aaauugaauucucgaauca

SEQ ID NO: 1560693 - RNA, 19 nt, Artificial Sequence
  Description of Artificial Sequence: Synthetic oligonucleotide
aacggccacagccucaggc

SEQ ID NO: 1560694 - RNA, 19 nt, Artificial Sequence
  Description of Artificial Sequence: Synthetic oligonucleotide
uaugcaugagaucacuccc

SEQ ID NO: 1560695 - RNA, 19 nt, Artificial Sequence
  Description of Artificial Sequence: Synthetic oligonucleotide
uuuauaugcugacccaacc

SEQ ID NO: 1560696 - RNA, 19 nt, Artificial Sequence
  Description of Artificial Sequence: Synthetic oligonucleotide
uauagcucauucaaauuga

SEQ ID NO: 1560697 - RNA, 19 nt, Artificial Sequence
  Description of Artificial Sequence: Synthetic oligonucleotide
ucucgaaucacauucuccu

SEQ ID NO: 1560698 - RNA, 19 nt, Artificial Sequence
  Description of Artificial Sequence: Synthetic oligonucleotide
uccacaauccaagugaccc

SEQ ID NO: 1560699 - RNA, 19 nt, Artificial Sequence
  Description of Artificial Sequence: Synthetic oligonucleotide
aaucacauucuccucagaa

SEQ ID NO: 1560700 - RNA, 19 nt, Artificial Sequence
  Description of Artificial Sequence: Synthetic oligonucleotide
caccagagcaaucagaggc

SEQ ID NO: 1560701 - RNA, 19 nt, Artificial Sequence
  Description of Artificial Sequence: Synthetic oligonucleotide
cacuuuacuaaacaugaag

SEQ ID NO: 1560702 - RNA, 19 nt, Artificial Sequence
  Description of Artificial Sequence: Synthetic oligonucleotide
aaacacuuggcuaggacag

SEQ ID NO: 1560703 - RNA, 19 nt, Artificial Sequence
  Description of Artificial Sequence: Synthetic oligonucleotide
augacugacaaucauuaga

SEQ ID NO: 1560704 - RNA, 19 nt, Artificial Sequence
  Description of Artificial Sequence: Synthetic oligonucleotide
aaugacugacaaucauuag

SEQ ID NO: 1560705 - RNA, 19 nt, Artificial Sequence
  Description of Artificial Sequence: Synthetic oligonucleotide
auagaugggagcaaaugac

SEQ ID NO: 1560706 - RNA, 19 nt, Artificial Sequence
  Description of Artificial Sequence: Synthetic oligonucleotide
auagcguccaacaucuacc

SEQ ID NO: 1560707 - RNA, 19 nt, Artificial Sequence
  Description of Artificial Sequence: Synthetic oligonucleotide
ucacuaggagacauaauga

SEQ ID NO: 1560708 - RNA, 19 nt, Artificial Sequence
  Description of Artificial Sequence: Synthetic oligonucleotide
ugcaggauccuauuugucc

SEQ ID NO: 1560709 - RNA, 19 nt, Artificial Sequence
  Description of Artificial Sequence: Synthetic oligonucleotide
aucaguauagcguccaaca

SEQ ID NO: 1560710 - RNA, 19 nt, Artificial Sequence
  Description of Artificial Sequence: Synthetic oligonucleotide
gaaggauaccauuucuacc

SEQ ID NO: 1560711 - RNA, 19 nt, Artificial Sequence
  Description of Artificial Sequence: Synthetic oligonucleotide
aauugcauuggccacuuua

SEQ ID NO: 1560712 - RNA, 19 nt, Artificial Sequence
  Description of Artificial Sequence: Synthetic oligonucleotide
uuauaugcugacccaaccu

SEQ ID NO: 1560713 - RNA, 19 nt, Artificial Sequence
  Description of Artificial Sequence: Synthetic oligonucleotide
uaugcugacccaaccuugg

SEQ ID NO: 1560714 - RNA, 19 nt, Artificial Sequence
  Description of Artificial Sequence: Synthetic oligonucleotide
uauagcguccaacaucuac

SEQ ID NO: 1560715 - RNA, 19 nt, Artificial Sequence
  Description of Artificial Sequence: Synthetic oligonucleotide
gaaaagaauugcauuggcc

SEQ ID NO: 1560716 - RNA, 19 nt, Artificial Sequence
  Description of Artificial Sequence: Synthetic oligonucleotide
uacauguugcuccacggug

SEQ ID NO: 1560717 - RNA, 19 nt, Artificial Sequence
  Description of Artificial Sequence: Synthetic oligonucleotide
auagaaugaaugcuucaug

SEQ ID NO: 1560718 - RNA, 19 nt, Artificial Sequence
  Description of Artificial Sequence: Synthetic oligonucleotide
gacgugcucacuuuguacc

SEQ ID NO: 1560719 - RNA, 19 nt, Artificial Sequence
  Description of Artificial Sequence: Synthetic oligonucleotide
accucuaugcaugagauca

SEQ ID NO: 1560720 - RNA, 19 nt, Artificial Sequence
  Description of Artificial Sequence: Synthetic oligonucleotide
gauguugccuacauguugc

SEQ ID NO: 1560721 - RNA, 19 nt, Artificial Sequence
  Description of Artificial Sequence: Synthetic oligonucleotide
aauaaggucgagccagcca

SEQ ID NO: 1560722 - RNA, 19 nt, Artificial Sequence
  Description of Artificial Sequence: Synthetic oligonucleotide
acuuuacuaaacaugaaga

SEQ ID NO: 1560723 - RNA, 19 nt, Artificial Sequence
  Description of Artificial Sequence: Synthetic oligonucleotide
ugacaucuaauauuagagu

SEQ ID NO: 1560724 - RNA, 19 nt, Artificial Sequence
  Description of Artificial Sequence: Synthetic oligonucleotide
cuggaauugggccucagag

SEQ ID NO: 1560725 - RNA, 19 nt, Artificial Sequence
  Description of Artificial Sequence: Synthetic oligonucleotide
aacuaucuuaaugccacag

SEQ ID NO: 1560726 - RNA, 19 nt, Artificial Sequence
  Description of Artificial Sequence: Synthetic oligonucleotide
accguugcaaaucggcggc

SEQ ID NO: 1560727 - RNA, 19 nt, Artificial Sequence
  Description of Artificial Sequence: Synthetic oligonucleotide
aucccuuaaacuuaacuau

SEQ ID NO: 1560728 - RNA, 19 nt, Artificial Sequence
  Description of Artificial Sequence: Synthetic oligonucleotide
uccuauuuguccuucuugu

SEQ ID NO: 1560729 - RNA, 19 nt, Artificial Sequence
  Description of Artificial Sequence: Synthetic oligonucleotide
gacauaaugaaaccacaga

SEQ ID NO: 1560730 - RNA, 19 nt, Artificial Sequence
  Description of Artificial Sequence: Synthetic oligonucleotide
aguauagcguccaacaucu

SEQ ID NO: 1560731 - RNA, 19 nt, Artificial Sequence
  Description of Artificial Sequence: Synthetic oligonucleotide
uggccgacgaauuaccucc

SEQ ID NO: 1560732 - RNA, 19 nt, Artificial Sequence
  Description of Artificial Sequence: Synthetic oligonucleotide
caagugacccucuuguccc

SEQ ID NO: 1560733 - RNA, 19 nt, Artificial Sequence
  Description of Artificial Sequence: Synthetic oligonucleotide
uugaauucucgaaucacau

SEQ ID NO: 1560734 - RNA, 19 nt, Artificial Sequence
  Description of Artificial Sequence: Synthetic oligonucleotide
ucuugucuaucuguggccg

SEQ ID NO: 1560735 - RNA, 19 nt, Artificial Sequence
  Description of Artificial Sequence: Synthetic oligonucleotide
uuccucacgaggaggaaag

SEQ ID NO: 1560736 - RNA, 19 nt, Artificial Sequence
  Description of Artificial Sequence: Synthetic oligonucleotide
ugguauagcucauucaaau

SEQ ID NO: 1560737 - RNA, 19 nt, Artificial Sequence
  Description of Artificial Sequence: Synthetic oligonucleotide
agaggugccagaaauugac

SEQ ID NO: 1560738 - RNA, 19 nt, Artificial Sequence
  Description of Artificial Sequence: Synthetic oligonucleotide
ucagaggugccagaaauug

SEQ ID NO: 1560739 - RNA, 19 nt, Artificial Sequence
  Description of Artificial Sequence: Synthetic oligonucleotide
uucucgaaucacauucucc

SEQ ID NO: 1560740 - RNA, 19 nt, Artificial Sequence
  Description of Artificial Sequence: Synthetic oligonucleotide
auugcauuggccacuuuac

SEQ ID NO: 1560741 - RNA, 19 nt, Artificial Sequence
  Description of Artificial Sequence: Synthetic oligonucleotide
gaccguugcaaaucggcgg

SEQ ID NO: 1560742 - RNA, 19 nt, Artificial Sequence
  Description of Artificial Sequence: Synthetic oligonucleotide
auaaggucgagccagccau

SEQ ID NO: 1560743 - RNA, 19 nt, Artificial Sequence
  Description of Artificial Sequence: Synthetic oligonucleotide
auacuugauguacucagga

SEQ ID NO: 1560744 - RNA, 19 nt, Artificial Sequence
  Description of Artificial Sequence: Synthetic oligonucleotide
gcaguuuauaugcugaccc

SEQ ID NO: 1560745 - RNA, 19 nt, Artificial Sequence
  Description of Artificial Sequence: Synthetic oligonucleotide
cuucucuuccgacacauug

SEQ ID NO: 1560746 - RNA, 19 nt, Artificial Sequence
  Description of Artificial Sequence: Synthetic oligonucleotide
guacucaggacccauguac

SEQ ID NO: 1560747 - RNA, 19 nt, Artificial Sequence
  Description of Artificial Sequence: Synthetic oligonucleotide
uauaugcugacccaaccuu

SEQ ID NO: 1560748 - RNA, 19 nt, Artificial Sequence
  Description of Artificial Sequence: Synthetic oligonucleotide
uagaugggagcaaaugacu

SEQ ID NO: 1560749 - RNA, 19 nt, Artificial Sequence
  Description of Artificial Sequence: Synthetic oligonucleotide
uaucuuaaugccacagauc

SEQ ID NO: 1560750 - RNA, 19 nt, Artificial Sequence
  Description of Artificial Sequence: Synthetic oligonucleotide
acagcccuuccauagaaug

SEQ ID NO: 1560751 - RNA, 19 nt, Artificial Sequence
  Description of Artificial Sequence: Synthetic oligonucleotide
uagacccauucgaauaucc

SEQ ID NO: 1560752 - RNA, 19 nt, Artificial Sequence
  Description of Artificial Sequence: Synthetic oligonucleotide
auccaagugacccucuugu

SEQ ID NO: 1560753 - RNA, 19 nt, Artificial Sequence
  Description of Artificial Sequence: Synthetic oligonucleotide
caaugcaggauccuauuug

SEQ ID NO: 1560754 - RNA, 19 nt, Artificial Sequence
  Description of Artificial Sequence: Synthetic oligonucleotide
uuggaaggauaccauuucu

SEQ ID NO: 1560755 - RNA, 19 nt, Artificial Sequence
  Description of Artificial Sequence: Synthetic oligonucleotide
uguuuuccccaucuggcac

SEQ ID NO: 1560756 - RNA, 19 nt, Artificial Sequence
  Description of Artificial Sequence: Synthetic oligonucleotide
ucacgaggaggaaagcagc

SEQ ID NO: 1560757 - RNA, 19 nt, Artificial Sequence
  Description of Artificial Sequence: Synthetic oligonucleotide
uacaguagacccauucgaa

SEQ ID NO: 1560758 - RNA, 19 nt, Artificial Sequence
  Description of Artificial Sequence: Synthetic oligonucleotide
cagaucaagccagaaaggc

SEQ ID NO: 1560759 - RNA, 19 nt, Artificial Sequence
  Description of Artificial Sequence: Synthetic oligonucleotide
gacgaauuaccuccuugcc

SEQ ID NO: 1560760 - RNA, 19 nt, Artificial Sequence
  Description of Artificial Sequence: Synthetic oligonucleotide
cagccaucgagaaagccgc

SEQ ID NO: 1560761 - RNA, 19 nt, Artificial Sequence
  Description of Artificial Sequence: Synthetic oligonucleotide
aaggccuaaggaagaaagg

SEQ ID NO: 1560762 - RNA, 19 nt, Artificial Sequence
  Description of Artificial Sequence: Synthetic oligonucleotide
ucccuuaaacuuaacuauc

SEQ ID NO: 1560763 - RNA, 19 nt, Artificial Sequence
  Description of Artificial Sequence: Synthetic oligonucleotide
ugccaacaucaguauagcg

SEQ ID NO: 1560764 - RNA, 19 nt, Artificial Sequence
  Description of Artificial Sequence: Synthetic oligonucleotide
gacagcucguccuuucuug

SEQ ID NO: 1560765 - RNA, 19 nt, Artificial Sequence
  Description of Artificial Sequence: Synthetic oligonucleotide
uuucuccaaucccuuaaac

SEQ ID NO: 1560766 - RNA, 19 nt, Artificial Sequence
  Description of Artificial Sequence: Synthetic oligonucleotide
ucgaauauccaggcggaag

SEQ ID NO: 1560767 - RNA, 19 nt, Artificial Sequence
  Description of Artificial Sequence: Synthetic oligonucleotide
acggguuaccaucuucgcg

SEQ ID NO: 1560768 - RNA, 19 nt, Artificial Sequence
  Description of Artificial Sequence: Synthetic oligonucleotide
aagaauugcauuggccacu

SEQ ID NO: 1560769 - RNA, 19 nt, Artificial Sequence
  Description of Artificial Sequence: Synthetic oligonucleotide
caucacaauggcacugagg

SEQ ID NO: 1560770 - RNA, 19 nt, Artificial Sequence
  Description of Artificial Sequence: Synthetic oligonucleotide
aaagccgcggcaccgagua

SEQ ID NO: 1560771 - RNA, 19 nt, Artificial Sequence
  Description of Artificial Sequence: Synthetic oligonucleotide
ugcaugagaucacucccug

SEQ ID NO: 1560772 - RNA, 19 nt, Artificial Sequence
  Description of Artificial Sequence: Synthetic oligonucleotide
agaccaguuggcaaagaac

SEQ ID NO: 1560773 - RNA, 19 nt, Artificial Sequence
  Description of Artificial Sequence: Synthetic oligonucleotide
uacuugauguacucaggac

SEQ ID NO: 1560774 - RNA, 19 nt, Artificial Sequence
  Description of Artificial Sequence: Synthetic oligonucleotide
auauuagaguuuauagucu

SEQ ID NO: 1560775 - RNA, 19 nt, Artificial Sequence
  Description of Artificial Sequence: Synthetic oligonucleotide
acccauucgaauauccagg

SEQ ID NO: 1560776 - RNA, 19 nt, Artificial Sequence
  Description of Artificial Sequence: Synthetic oligonucleotide
ugcuuugcaggcucacuag

SEQ ID NO: 1560777 - RNA, 19 nt, Artificial Sequence
  Description of Artificial Sequence: Synthetic oligonucleotide
acuaaacaugaagauguug

SEQ ID NO: 1560778 - RNA, 19 nt, Artificial Sequence
  Description of Artificial Sequence: Synthetic oligonucleotide
ucaguauagcguccaacau

SEQ ID NO: 1560779 - RNA, 19 nt, Artificial Sequence
  Description of Artificial Sequence: Synthetic oligonucleotide
ugugguuacugcuggaauu

SEQ ID NO: 1560780 - RNA, 19 nt, Artificial Sequence
  Description of Artificial Sequence: Synthetic oligonucleotide
ucuaugcaugagaucacuc

SEQ ID NO: 1560781 - RNA, 19 nt, Artificial Sequence
  Description of Artificial Sequence: Synthetic oligonucleotide
uggaaggauaccauuucua

SEQ ID NO: 1560782 - RNA, 19 nt, Artificial Sequence
  Description of Artificial Sequence: Synthetic oligonucleotide
guacaguagacccauucga

SEQ ID NO: 1560783 - RNA, 19 nt, Artificial Sequence
  Description of Artificial Sequence: Synthetic oligonucleotide
ggaaggauaccauuucuac

SEQ ID NO: 1560784 - RNA, 19 nt, Artificial Sequence
  Description of Artificial Sequence: Synthetic oligonucleotide
cuuggaaggauaccauuuc

SEQ ID NO: 1560785 - RNA, 19 nt, Artificial Sequence
  Description of Artificial Sequence: Synthetic oligonucleotide
aucgagaaagccgcggcac

SEQ ID NO: 1560786 - RNA, 19 nt, Artificial Sequence
  Description of Artificial Sequence: Synthetic oligonucleotide
gagaccguugcaaaucggc

SEQ ID NO: 1560787 - RNA, 19 nt, Artificial Sequence
  Description of Artificial Sequence: Synthetic oligonucleotide
aaggucgagccagccaucg

SEQ ID NO: 1560788 - RNA, 19 nt, Artificial Sequence
  Description of Artificial Sequence: Synthetic oligonucleotide
uugguauagcucauucaaa

SEQ ID NO: 1560789 - RNA, 19 nt, Artificial Sequence
  Description of Artificial Sequence: Synthetic oligonucleotide
uuuuggcucguugguauag

SEQ ID NO: 1560790 - RNA, 19 nt, Artificial Sequence
  Description of Artificial Sequence: Synthetic oligonucleotide
caguauagcguccaacauc

SEQ ID NO: 1560791 - RNA, 19 nt, Artificial Sequence
  Description of Artificial Sequence: Synthetic oligonucleotide
caggguagggaguuguuug

SEQ ID NO: 1560792 - RNA, 19 nt, Artificial Sequence
  Description of Artificial Sequence: Synthetic oligonucleotide
ucguugguauagcucauuc

SEQ ID NO: 1560793 - RNA, 19 nt, Artificial Sequence
  Description of Artificial Sequence: Synthetic oligonucleotide
auauccaggcguugacuag

SEQ ID NO: 1560794 - RNA, 19 nt, Artificial Sequence
  Description of Artificial Sequence: Synthetic oligonucleotide
ugggagaaacacuuggcua

SEQ ID NO: 1560795 - RNA, 19 nt, Artificial Sequence
  Description of Artificial Sequence: Synthetic oligonucleotide
acagaucaagccagaaagg

SEQ ID NO: 1560796 - RNA, 19 nt, Artificial Sequence
  Description of Artificial Sequence: Synthetic oligonucleotide
cugacccaaccuuggaagg

SEQ ID NO: 1560797 - RNA, 19 nt, Artificial Sequence
  Description of Artificial Sequence: Synthetic oligonucleotide
acacggguuaccaucuucg

SEQ ID NO: 1560798 - RNA, 19 nt, Artificial Sequence
  Description of Artificial Sequence: Synthetic oligonucleotide
acgugcucacuuuguaccg

SEQ ID NO: 1560799 - RNA, 19 nt, Artificial Sequence
  Description of Artificial Sequence: Synthetic oligonucleotide
ucugcgguucuucaucauc

SEQ ID NO: 1560800 - RNA, 19 nt, Artificial Sequence
  Description of Artificial Sequence: Synthetic oligonucleotide
ugcuccacggugauggauc

SEQ ID NO: 1560801 - RNA, 19 nt, Artificial Sequence
  Description of Artificial Sequence: Synthetic oligonucleotide
uucagcccuguacaguugu

SEQ ID NO: 1560802 - RNA, 19 nt, Artificial Sequence
  Description of Artificial Sequence: Synthetic oligonucleotide
aagugacccucuugucccg

SEQ ID NO: 1560803 - RNA, 19 nt, Artificial Sequence
  Description of Artificial Sequence: Synthetic oligonucleotide
uuggugaguggugacgugc

SEQ ID NO: 1560804 - RNA, 19 nt, Artificial Sequence
  Description of Artificial Sequence: Synthetic oligonucleotide
ugacgugcucacuuuguac

SEQ ID NO: 1560805 - RNA, 19 nt, Artificial Sequence
  Description of Artificial Sequence: Synthetic oligonucleotide
ggagacauaaugaaaccac

SEQ ID NO: 1560806 - RNA, 19 nt, Artificial Sequence
  Description of Artificial Sequence: Synthetic oligonucleotide
acaccagagcaaucagagg

SEQ ID NO: 1560807 - RNA, 19 nt, Artificial Sequence
  Description of Artificial Sequence: Synthetic oligonucleotide
ccaacaucaguauagcguc

SEQ ID NO: 1560808 - RNA, 19 nt, Artificial Sequence
  Description of Artificial Sequence: Synthetic oligonucleotide
aaaucggcggcaguuuccu

SEQ ID NO: 1560809 - RNA, 19 nt, Artificial Sequence
  Description of Artificial Sequence: Synthetic oligonucleotide
gaccaguuggcaaagaacu

SEQ ID NO: 1560810 - RNA, 19 nt, Artificial Sequence
  Description of Artificial Sequence: Synthetic oligonucleotide
gcugacccaaccuuggaag

SEQ ID NO: 1560811 - RNA, 19 nt, Artificial Sequence
  Description of Artificial Sequence: Synthetic oligonucleotide
caaaucggcggcaguuucc

SEQ ID NO: 1560812 - RNA, 19 nt, Artificial Sequence
  Description of Artificial Sequence: Synthetic oligonucleotide
uugcaggcucacuaggaga

SEQ ID NO: 1560813 - RNA, 19 nt, Artificial Sequence
  Description of Artificial Sequence: Synthetic oligonucleotide
uuaccaucuucgcgcugcg

SEQ ID NO: 1560814 - RNA, 19 nt, Artificial Sequence
  Description of Artificial Sequence: Synthetic oligonucleotide
ugucuccacccuuugacau

SEQ ID NO: 1560815 - RNA, 19 nt, Artificial Sequence
  Description of Artificial Sequence: Synthetic oligonucleotide
ucuguggccgacgaauuac

SEQ ID NO: 1560816 - RNA, 19 nt, Artificial Sequence
  Description of Artificial Sequence: Synthetic oligonucleotide
cuccagucaaagucacacg

SEQ ID NO: 1560817 - RNA, 19 nt, Artificial Sequence
  Description of Artificial Sequence: Synthetic oligonucleotide
agcaaucagaggcgcgagg

SEQ ID NO: 1560818 - RNA, 19 nt, Artificial Sequence
  Description of Artificial Sequence: Synthetic oligonucleotide
aguggugacgugcucacuu

SEQ ID NO: 1560819 - RNA, 19 nt, Artificial Sequence
  Description of Artificial Sequence: Synthetic oligonucleotide
cuugccaccuuggaacagg

SEQ ID NO: 1560820 - RNA, 19 nt, Artificial Sequence
  Description of Artificial Sequence: Synthetic oligonucleotide
ucgagaaagccgcggcacc

SEQ ID NO: 1560821 - RNA, 19 nt, Artificial Sequence
  Description of Artificial Sequence: Synthetic oligonucleotide
aucggcggcaguuuccuca

SEQ ID NO: 1560822 - RNA, 19 nt, Artificial Sequence
  Description of Artificial Sequence: Synthetic oligonucleotide
agaccguugcaaaucggcg

SEQ ID NO: 1560823 - RNA, 19 nt, Artificial Sequence
  Description of Artificial Sequence: Synthetic oligonucleotide
uugugguuacugcuggaau

SEQ ID NO: 1560824 - RNA, 19 nt, Artificial Sequence
  Description of Artificial Sequence: Synthetic oligonucleotide
caucuggcacagcaguggg

SEQ ID NO: 1560825 - RNA, 19 nt, Artificial Sequence
  Description of Artificial Sequence: Synthetic oligonucleotide
ugcguggggagaccguugc

SEQ ID NO: 1560826 - RNA, 19 nt, Artificial Sequence
  Description of Artificial Sequence: Synthetic oligonucleotide
ugaauucucgaaucacauu

SEQ ID NO: 1560827 - RNA, 19 nt, Artificial Sequence
  Description of Artificial Sequence: Synthetic oligonucleotide
uagcaguuuauaugcugac

SEQ ID NO: 1560828 - RNA, 19 nt, Artificial Sequence
  Description of Artificial Sequence: Synthetic oligonucleotide
ccuaaggaagaaagggucc

SEQ ID NO: 1560829 - RNA, 19 nt, Artificial Sequence
  Description of Artificial Sequence: Synthetic oligonucleotide
uagcguccaacaucuaccu

SEQ ID NO: 1560830 - RNA, 19 nt, Artificial Sequence
  Description of Artificial Sequence: Synthetic oligonucleotide
ugcugacccaaccuuggaa

SEQ ID NO: 1560831 - RNA, 19 nt, Artificial Sequence
  Description of Artificial Sequence: Synthetic oligonucleotide
gaucugcgguucuucauca

SEQ ID NO: 1560832 - RNA, 19 nt, Artificial Sequence
  Description of Artificial Sequence: Synthetic oligonucleotide
ucuccacccuuugacaucu

SEQ ID NO: 1560833 - RNA, 19 nt, Artificial Sequence
  Description of Artificial Sequence: Synthetic oligonucleotide
agagcaaucagaggcgcga

SEQ ID NO: 1560834 - RNA, 19 nt, Artificial Sequence
  Description of Artificial Sequence: Synthetic oligonucleotide
uaacuaucuuaaugccaca

SEQ ID NO: 1560835 - RNA, 19 nt, Artificial Sequence
  Description of Artificial Sequence: Synthetic oligonucleotide
cacuaggagacauaaugaa

SEQ ID NO: 1560836 - RNA, 19 nt, Artificial Sequence
  Description of Artificial Sequence: Synthetic oligonucleotide
cgaauuaccuccuugccac

SEQ ID NO: 1560837 - RNA, 19 nt, Artificial Sequence
  Description of Artificial Sequence: Synthetic oligonucleotide
ugguuuuaucacugaaaua

SEQ ID NO: 1560838 - RNA, 19 nt, Artificial Sequence
  Description of Artificial Sequence: Synthetic oligonucleotide
uggugacgugcucacuuug

SEQ ID NO: 1560839 - RNA, 19 nt, Artificial Sequence
  Description of Artificial Sequence: Synthetic oligonucleotide
auaugcugacccaaccuug

SEQ ID NO: 1560840 - RNA, 19 nt, Artificial Sequence
  Description of Artificial Sequence: Synthetic oligonucleotide
guuguuuggugagugguga

SEQ ID NO: 1560841 - RNA, 19 nt, Artificial Sequence
  Description of Artificial Sequence: Synthetic oligonucleotide
uuuggugaguggugacgug

SEQ ID NO: 1560842 - RNA, 19 nt, Artificial Sequence
  Description of Artificial Sequence: Synthetic oligonucleotide
ugguuacugcuggaauugg

SEQ ID NO: 1560843 - RNA, 19 nt, Artificial Sequence
  Description of Artificial Sequence: Synthetic oligonucleotide
uuggcucguugguauagcu

SEQ ID NO: 1560844 - RNA, 19 nt, Artificial Sequence
  Description of Artificial Sequence: Synthetic oligonucleotide
gaauuaccuccuugccacc

SEQ ID NO: 1560845 - RNA, 19 nt, Artificial Sequence
  Description of Artificial Sequence: Synthetic oligonucleotide
guaccgugugccaacauca

SEQ ID NO: 1560846 - RNA, 19 nt, Artificial Sequence
  Description of Artificial Sequence: Synthetic oligonucleotide
caaccuuggaaggauacca

SEQ ID NO: 1560847 - RNA, 19 nt, Artificial Sequence
  Description of Artificial Sequence: Synthetic oligonucleotide
ugucuaucuguggccgacg

SEQ ID NO: 1560848 - RNA, 19 nt, Artificial Sequence
  Description of Artificial Sequence: Synthetic oligonucleotide
gggagaccguugcaaaucg

SEQ ID NO: 1560849 - RNA, 19 nt, Artificial Sequence
  Description of Artificial Sequence: Synthetic oligonucleotide
uugccuacauguugcucca

SEQ ID NO: 1560850 - RNA, 19 nt, Artificial Sequence
  Description of Artificial Sequence: Synthetic oligonucleotide
cuguggccgacgaauuacc

SEQ ID NO: 1560851 - RNA, 19 nt, Artificial Sequence
  Description of Artificial Sequence: Synthetic oligonucleotide
augccacagaucaagccag

SEQ ID NO: 1560852 - RNA, 19 nt, Artificial Sequence
  Description of Artificial Sequence: Synthetic oligonucleotide
caucuaauauuagaguuua

SEQ ID NO: 1560853 - RNA, 19 nt, Artificial Sequence
  Description of Artificial Sequence: Synthetic oligonucleotide
agagugugagguacaguag

SEQ ID NO: 1560854 - RNA, 19 nt, Artificial Sequence
  Description of Artificial Sequence: Synthetic oligonucleotide
ggaguuguuuggugagugg

SEQ ID NO: 1560855 - RNA, 19 nt, Artificial Sequence
  Description of Artificial Sequence: Synthetic oligonucleotide
aaucggcggcaguuuccuc

SEQ ID NO: 1560856 - RNA, 19 nt, Artificial Sequence
  Description of Artificial Sequence: Synthetic oligonucleotide
cagagcaaucagaggcgcg

SEQ ID NO: 1560857 - RNA, 19 nt, Artificial Sequence
  Description of Artificial Sequence: Synthetic oligonucleotide
uggccacuuuacuaaacau

SEQ ID NO: 1560858 - RNA, 19 nt, Artificial Sequence
  Description of Artificial Sequence: Synthetic oligonucleotide
uuuguaccgugugccaaca

SEQ ID NO: 1560859 - RNA, 19 nt, Artificial Sequence
  Description of Artificial Sequence: Synthetic oligonucleotide
guugacuagcaguuuauau

SEQ ID NO: 1560860 - RNA, 19 nt, Artificial Sequence
  Description of Artificial Sequence: Synthetic oligonucleotide
ccuacauguugcuccacgg

SEQ ID NO: 1560861 - RNA, 19 nt, Artificial Sequence
  Description of Artificial Sequence: Synthetic oligonucleotide
gaacagcccuuccauagaa

SEQ ID NO: 1560862 - RNA, 19 nt, Artificial Sequence
  Description of Artificial Sequence: Synthetic oligonucleotide
aguuguuuggugaguggug

SEQ ID NO: 1560863 - RNA, 19 nt, Artificial Sequence
  Description of Artificial Sequence: Synthetic oligonucleotide
gcguccaacaucuaccuuc

SEQ ID NO: 1560864 - RNA, 19 nt, Artificial Sequence
  Description of Artificial Sequence: Synthetic oligonucleotide
aagucacacggguuaccau

SEQ ID NO: 1560865 - RNA, 19 nt, Artificial Sequence
  Description of Artificial Sequence: Synthetic oligonucleotide
cucugacaucuaauauuag

SEQ ID NO: 1560866 - RNA, 19 nt, Artificial Sequence
  Description of Artificial Sequence: Synthetic oligonucleotide
caucaguauagcguccaac

SEQ ID NO: 1560867 - RNA, 19 nt, Artificial Sequence
  Description of Artificial Sequence: Synthetic oligonucleotide
aggcggaagaaaagaauug

SEQ ID NO: 1560868 - RNA, 19 nt, Artificial Sequence
  Description of Artificial Sequence: Synthetic oligonucleotide
cacgcuucuucagaaauca

SEQ ID NO: 1560869 - RNA, 19 nt, Artificial Sequence
  Description of Artificial Sequence: Synthetic oligonucleotide
cucgaaucacauucuccuc

SEQ ID NO: 1560870 - RNA, 19 nt, Artificial Sequence
  Description of Artificial Sequence: Synthetic oligonucleotide
cuccacaauccaagugacc

SEQ ID NO: 1560871 - RNA, 19 nt, Artificial Sequence
  Description of Artificial Sequence: Synthetic oligonucleotide
agcaaaugacugacaauca

SEQ ID NO: 1560872 - RNA, 19 nt, Artificial Sequence
  Description of Artificial Sequence: Synthetic oligonucleotide
acagcucguccuuucuugu

SEQ ID NO: 1560873 - RNA, 19 nt, Artificial Sequence
  Description of Artificial Sequence: Synthetic oligonucleotide
ugacccaaccuuggaagga

SEQ ID NO: 1560874 - RNA, 19 nt, Artificial Sequence
  Description of Artificial Sequence: Synthetic oligonucleotide
uugucuaucuguggccgac

SEQ ID NO: 1560875 - RNA, 19 nt, Artificial Sequence
  Description of Artificial Sequence: Synthetic oligonucleotide
aggauccuauuuguccuuc

SEQ ID NO: 1560876 - RNA, 19 nt, Artificial Sequence
  Description of Artificial Sequence: Synthetic oligonucleotide
caaacggccacagccucag

SEQ ID NO: 1560877 - RNA, 19 nt, Artificial Sequence
  Description of Artificial Sequence: Synthetic oligonucleotide
ccacagacuggugauaucc

SEQ ID NO: 1560878 - RNA, 19 nt, Artificial Sequence
  Description of Artificial Sequence: Synthetic oligonucleotide
ccaguuggcaaagaacucc

SEQ ID NO: 1560879 - RNA, 19 nt, Artificial Sequence
  Description of Artificial Sequence: Synthetic oligonucleotide
cacggguuaccaucuucgc

SEQ ID NO: 1560880 - RNA, 19 nt, Artificial Sequence
  Description of Artificial Sequence: Synthetic oligonucleotide
caguuuauaugcugaccca

SEQ ID NO: 1560881 - RNA, 19 nt, Artificial Sequence
  Description of Artificial Sequence: Synthetic oligonucleotide
ccagucaaagucacacggg

SEQ ID NO: 1560882 - RNA, 19 nt, Artificial Sequence
  Description of Artificial Sequence: Synthetic oligonucleotide
caauaaggucgagccagcc

SEQ ID NO: 1560883 - RNA, 19 nt, Artificial Sequence
  Description of Artificial Sequence: Synthetic oligonucleotide
uugagggacaggucagcau

SEQ ID NO: 1560884 - RNA, 19 nt, Artificial Sequence
  Description of Artificial Sequence: Synthetic oligonucleotide
gccuacauguugcuccacg

SEQ ID NO: 1560885 - RNA, 19 nt, Artificial Sequence
  Description of Artificial Sequence: Synthetic oligonucleotide
uaggacagaacagcccuuc

SEQ ID NO: 1560886 - RNA, 19 nt, Artificial Sequence
  Description of Artificial Sequence: Synthetic oligonucleotide
gaguuuauagucugugcuu

SEQ ID NO: 1560887 - RNA, 19 nt, Artificial Sequence
  Description of Artificial Sequence: Synthetic oligonucleotide
cccauucgaauauccaggc

SEQ ID NO: 1560888 - RNA, 19 nt, Artificial Sequence
  Description of Artificial Sequence: Synthetic oligonucleotide
agugacccucuugucccgc

SEQ ID NO: 1560889 - RNA, 19 nt, Artificial Sequence
  Description of Artificial Sequence: Synthetic oligonucleotide
aggcaauaaggucgagcca

SEQ ID NO: 1560890 - RNA, 19 nt, Artificial Sequence
  Description of Artificial Sequence: Synthetic oligonucleotide
gcauagaugggagcaaaug

SEQ ID NO: 1560891 - RNA, 19 nt, Artificial Sequence
  Description of Artificial Sequence: Synthetic oligonucleotide
ggaucugcgguucuucauc

SEQ ID NO: 1560892 - RNA, 19 nt, Artificial Sequence
  Description of Artificial Sequence: Synthetic oligonucleotide
gggagcaaaugacugacaa

SEQ ID NO: 1560893 - RNA, 19 nt, Artificial Sequence
  Description of Artificial Sequence: Synthetic oligonucleotide
ugugcuuugcaggcucacu

SEQ ID NO: 1560894 - RNA, 19 nt, Artificial Sequence
  Description of Artificial Sequence: Synthetic oligonucleotide
accgugugccaacaucagu

SEQ ID NO: 1560895 - RNA, 19 nt, Artificial Sequence
  Description of Artificial Sequence: Synthetic oligonucleotide
gaacaucaggaucuccacu

SEQ ID NO: 1560896 - RNA, 19 nt, Artificial Sequence
  Description of Artificial Sequence: Synthetic oligonucleotide
aaacggccacagccucagg

SEQ ID NO: 1560897 - RNA, 19 nt, Artificial Sequence
  Description of Artificial Sequence: Synthetic oligonucleotide
cgacgaauuaccuccuugc

SEQ ID NO: 1560898 - RNA, 19 nt, Artificial Sequence
  Description of Artificial Sequence: Synthetic oligonucleotide
cgacacauugucuccaccc

SEQ ID NO: 1560899 - RNA, 19 nt, Artificial Sequence
  Description of Artificial Sequence: Synthetic oligonucleotide
gugccaacaucaguauagc

SEQ ID NO: 1560900 - RNA, 19 nt, Artificial Sequence
  Description of Artificial Sequence: Synthetic oligonucleotide
ucaggguagggaguuguuu

SEQ ID NO: 1560901 - RNA, 19 nt, Artificial Sequence
  Description of Artificial Sequence: Synthetic oligonucleotide
gaguuguuuggugaguggu

SEQ ID NO: 1560902 - RNA, 19 nt, Artificial Sequence
  Description of Artificial Sequence: Synthetic oligonucleotide
uaccucuaugcaugagauc

SEQ ID NO: 1560903 - RNA, 19 nt, Artificial Sequence
  Description of Artificial Sequence: Synthetic oligonucleotide
cacacggguuaccaucuuc

SEQ ID NO: 1560904 - RNA, 19 nt, Artificial Sequence
  Description of Artificial Sequence: Synthetic oligonucleotide
gaaucacauucuccucaga

SEQ ID NO: 1560905 - RNA, 19 nt, Artificial Sequence
  Description of Artificial Sequence: Synthetic oligonucleotide
cacucccugggagaaacac

SEQ ID NO: 1560906 - RNA, 19 nt, Artificial Sequence
  Description of Artificial Sequence: Synthetic oligonucleotide
uaaggucgagccagccauc

SEQ ID NO: 1560907 - RNA, 19 nt, Artificial Sequence
  Description of Artificial Sequence: Synthetic oligonucleotide
guggccgacgaauuaccuc

SEQ ID NO: 1560908 - RNA, 19 nt, Artificial Sequence
  Description of Artificial Sequence: Synthetic oligonucleotide
ugccacagaucaagccaga

SEQ ID NO: 1560909 - RNA, 19 nt, Artificial Sequence
  Description of Artificial Sequence: Synthetic oligonucleotide
gcaugagaucacucccugg

SEQ ID NO: 1560910 - RNA, 19 nt, Artificial Sequence
  Description of Artificial Sequence: Synthetic oligonucleotide
cccuuccauagaaugaaug

SEQ ID NO: 1560911 - RNA, 19 nt, Artificial Sequence
  Description of Artificial Sequence: Synthetic oligonucleotide
gaauugggccucagaggug

SEQ ID NO: 1560912 - RNA, 19 nt, Artificial Sequence
  Description of Artificial Sequence: Synthetic oligonucleotide
aucuucgcgcugcgugggg

SEQ ID NO: 1560913 - RNA, 19 nt, Artificial Sequence
  Description of Artificial Sequence: Synthetic oligonucleotide
cacuuggcuaggacagaac

SEQ ID NO: 1560914 - RNA, 19 nt, Artificial Sequence
  Description of Artificial Sequence: Synthetic oligonucleotide
aagcaggcacccugcccca

SEQ ID NO: 1560915 - RNA, 19 nt, Artificial Sequence
  Description of Artificial Sequence: Synthetic oligonucleotide
gugcuuugcaggcucacua

SEQ ID NO: 1560916 - RNA, 19 nt, Artificial Sequence
  Description of Artificial Sequence: Synthetic oligonucleotide
cuaccucuaugcaugagau

SEQ ID NO: 1560917 - RNA, 19 nt, Artificial Sequence
  Description of Artificial Sequence: Synthetic oligonucleotide
cuucgcgcugcguggggag

SEQ ID NO: 1560918 - RNA, 19 nt, Artificial Sequence
  Description of Artificial Sequence: Synthetic oligonucleotide
cauagaaugaaugcuucau

SEQ ID NO: 1560919 - RNA, 19 nt, Artificial Sequence
  Description of Artificial Sequence: Synthetic oligonucleotide
aagccgcggcaccgaguac

SEQ ID NO: 1560920 - RNA, 19 nt, Artificial Sequence
  Description of Artificial Sequence: Synthetic oligonucleotide
ugaaugcuucaugguuccc

SEQ ID NO: 1560921 - RNA, 19 nt, Artificial Sequence
  Description of Artificial Sequence: Synthetic oligonucleotide
caucuucgcgcugcguggg

SEQ ID NO: 1560922 - RNA, 19 nt, Artificial Sequence
  Description of Artificial Sequence: Synthetic oligonucleotide
ccaucuucgcgcugcgugg

SEQ ID NO: 1560923 - RNA, 19 nt, Artificial Sequence
  Description of Artificial Sequence: Synthetic oligonucleotide
ucggcggcaguuuccucac

SEQ ID NO: 1560924 - RNA, 19 nt, Artificial Sequence
  Description of Artificial Sequence: Synthetic oligonucleotide
cacccugccccaacccagg

SEQ ID NO: 1560925 - RNA, 19 nt, Artificial Sequence
  Description of Artificial Sequence: Synthetic oligonucleotide
cagucaaagucacacgggu

SEQ ID NO: 1560926 - RNA, 19 nt, Artificial Sequence
  Description of Artificial Sequence: Synthetic oligonucleotide
ccauucgaauauccaggcg

SEQ ID NO: 1560927 - RNA, 19 nt, Artificial Sequence
  Description of Artificial Sequence: Synthetic oligonucleotide
gggaguuguuuggugagug

SEQ ID NO: 1560928 - RNA, 19 nt, Artificial Sequence
  Description of Artificial Sequence: Synthetic oligonucleotide
ugcaaaucggcggcaguuu

SEQ ID NO: 1560929 - RNA, 19 nt, Artificial Sequence
  Description of Artificial Sequence: Synthetic oligonucleotide
agacagcucguccuuucuu

SEQ ID NO: 1560930 - RNA, 19 nt, Artificial Sequence
  Description of Artificial Sequence: Synthetic oligonucleotide
caucgagaaagccgcggca

SEQ ID NO: 1560931 - RNA, 19 nt, Artificial Sequence
  Description of Artificial Sequence: Synthetic oligonucleotide
ccaucgagaaagccgcggc

SEQ ID NO: 1560932 - RNA, 19 nt, Artificial Sequence
  Description of Artificial Sequence: Synthetic oligonucleotide
gccaacaucaguauagcgu

SEQ ID NO: 1560933 - RNA, 19 nt, Artificial Sequence
  Description of Artificial Sequence: Synthetic oligonucleotide
ucuucgcgcugcgugggga

SEQ ID NO: 1560934 - RNA, 19 nt, Artificial Sequence
  Description of Artificial Sequence: Synthetic oligonucleotide
uggugauauccaggcguug

SEQ ID NO: 1560935 - RNA, 19 nt, Artificial Sequence
  Description of Artificial Sequence: Synthetic oligonucleotide
uucgaauauccaggcggaa

SEQ ID NO: 1560936 - RNA, 19 nt, Artificial Sequence
  Description of Artificial Sequence: Synthetic oligonucleotide
aacagcccuuccauagaau

SEQ ID NO: 1560937 - RNA, 19 nt, Artificial Sequence
  Description of Artificial Sequence: Synthetic oligonucleotide
gaucaggguagggaguugu

SEQ ID NO: 1560938 - RNA, 19 nt, Artificial Sequence
  Description of Artificial Sequence: Synthetic oligonucleotide
guuuggugaguggugacgu

SEQ ID NO: 1560939 - RNA, 19 nt, Artificial Sequence
  Description of Artificial Sequence: Synthetic oligonucleotide
agccgcggcaccgaguaca

SEQ ID NO: 1560940 - RNA, 19 nt, Artificial Sequence
  Description of Artificial Sequence: Synthetic oligonucleotide
cauugucuccacccuuuga

SEQ ID NO: 1560941 - RNA, 19 nt, Artificial Sequence
  Description of Artificial Sequence: Synthetic oligonucleotide
cuugucuaucuguggccga

SEQ ID NO: 1560942 - RNA, 19 nt, Artificial Sequence
  Description of Artificial Sequence: Synthetic oligonucleotide
gcaccgaguacaccagagc

SEQ ID NO: 1560943 - RNA, 19 nt, Artificial Sequence
  Description of Artificial Sequence: Synthetic oligonucleotide
cccaaccuuggaaggauac

SEQ ID NO: 1560944 - RNA, 19 nt, Artificial Sequence
  Description of Artificial Sequence: Synthetic oligonucleotide
ggcuaggacagaacagccc

SEQ ID NO: 1560945 - RNA, 19 nt, Artificial Sequence
  Description of Artificial Sequence: Synthetic oligonucleotide
auugggccucagaggugcc

SEQ ID NO: 1560946 - RNA, 19 nt, Artificial Sequence
  Description of Artificial Sequence: Synthetic oligonucleotide
agucaaagucacacggguu

SEQ ID NO: 1560947 - RNA, 19 nt, Artificial Sequence
  Description of Artificial Sequence: Synthetic oligonucleotide
gcaggauccuauuuguccu

SEQ ID NO: 1560948 - RNA, 19 nt, Artificial Sequence
  Description of Artificial Sequence: Synthetic oligonucleotide
ggugauggaucugcgguuc

SEQ ID NO: 1560949 - RNA, 19 nt, Artificial Sequence
  Description of Artificial Sequence: Synthetic oligonucleotide
gccaucgagaaagccgcgg

SEQ ID NO: 1560950 - RNA, 19 nt, Artificial Sequence
  Description of Artificial Sequence: Synthetic oligonucleotide
guggggagaccguugcaaa

SEQ ID NO: 1560951 - RNA, 19 nt, Artificial Sequence
  Description of Artificial Sequence: Synthetic oligonucleotide
gcaaaucggcggcaguuuc

SEQ ID NO: 1560952 - RNA, 19 nt, Artificial Sequence
  Description of Artificial Sequence: Synthetic oligonucleotide
acaaacggccacagccuca

SEQ ID NO: 1560953 - RNA, 19 nt, Artificial Sequence
  Description of Artificial Sequence: Synthetic oligonucleotide
agggaguuguuuggugagu

SEQ ID NO: 1560954 - RNA, 19 nt, Artificial Sequence
  Description of Artificial Sequence: Synthetic oligonucleotide
cccuguacaguuguacuug

SEQ ID NO: 1560955 - RNA, 19 nt, Artificial Sequence
  Description of Artificial Sequence: Synthetic oligonucleotide
agcauagaugggagcaaau

SEQ ID NO: 1560956 - RNA, 19 nt, Artificial Sequence
  Description of Artificial Sequence: Synthetic oligonucleotide
gugacgugcucacuuugua

SEQ ID NO: 1560957 - RNA, 19 nt, Artificial Sequence
  Description of Artificial Sequence: Synthetic oligonucleotide
cugcguggggagaccguug

SEQ ID NO: 1560958 - RNA, 19 nt, Artificial Sequence
  Description of Artificial Sequence: Synthetic oligonucleotide
ccgacgaauuaccuccuug

SEQ ID NO: 1560959 - RNA, 19 nt, Artificial Sequence
  Description of Artificial Sequence: Synthetic oligonucleotide
ggaucuccacuucucucca

SEQ ID NO: 1560960 - RNA, 19 nt, Artificial Sequence
  Description of Artificial Sequence: Synthetic oligonucleotide
ccauagaaugaaugcuuca

SEQ ID NO: 1560961 - RNA, 19 nt, Artificial Sequence
  Description of Artificial Sequence: Synthetic oligonucleotide
gagaaagccgcggcaccga

SEQ ID NO: 1560962 - RNA, 19 nt, Artificial Sequence
  Description of Artificial Sequence: Synthetic oligonucleotide
caggcguugacuagcaguu

SEQ ID NO: 1560963 - RNA, 19 nt, Artificial Sequence
  Description of Artificial Sequence: Synthetic oligonucleotide
ggcguugacuagcaguuua

SEQ ID NO: 1560964 - RNA, 19 nt, Artificial Sequence
  Description of Artificial Sequence: Synthetic oligonucleotide
ggagaccguugcaaaucgg

SEQ ID NO: 1560965 - RNA, 19 nt, Artificial Sequence
  Description of Artificial Sequence: Synthetic oligonucleotide
gguauagcucauucaaauu

SEQ ID NO: 1560966 - RNA, 19 nt, Artificial Sequence
  Description of Artificial Sequence: Synthetic oligonucleotide
ccaaccuuggaaggauacc

SEQ ID NO: 1560967 - RNA, 19 nt, Artificial Sequence
  Description of Artificial Sequence: Synthetic oligonucleotide
ccgugugccaacaucagua

SEQ ID NO: 1560968 - RNA, 19 nt, Artificial Sequence
  Description of Artificial Sequence: Synthetic oligonucleotide
ggcggcaguuuccucacga

SEQ ID NO: 1560969 - RNA, 19 nt, Artificial Sequence
  Description of Artificial Sequence: Synthetic oligonucleotide
acgcuucuucagaaaucag

SEQ ID NO: 1560970 - RNA, 19 nt, Artificial Sequence
  Description of Artificial Sequence: Synthetic oligonucleotide
ggcucacuaggagacauaa

SEQ ID NO: 1560971 - RNA, 19 nt, Artificial Sequence
  Description of Artificial Sequence: Synthetic oligonucleotide
gcggcaguuuccucacgag

SEQ ID NO: 1560972 - RNA, 19 nt, Artificial Sequence
  Description of Artificial Sequence: Synthetic oligonucleotide
aucugcgguucuucaucau

SEQ ID NO: 1560973 - RNA, 19 nt, Artificial Sequence
  Description of Artificial Sequence: Synthetic oligonucleotide
ggggagaccguugcaaauc

SEQ ID NO: 1560974 - RNA, 19 nt, Artificial Sequence
  Description of Artificial Sequence: Synthetic oligonucleotide
ugccaccuuggaacaggau

SEQ ID NO: 1560975 - RNA, 19 nt, Artificial Sequence
  Description of Artificial Sequence: Synthetic oligonucleotide
gcaauaaggucgagccagc

SEQ ID NO: 1560976 - RNA, 19 nt, Artificial Sequence
  Description of Artificial Sequence: Synthetic oligonucleotide
ccagagcaaucagaggcgc

SEQ ID NO: 1560977 - RNA, 19 nt, Artificial Sequence
  Description of Artificial Sequence: Synthetic oligonucleotide
gucgagccagccaucgaga

SEQ ID NO: 1560978 - RNA, 19 nt, Artificial Sequence
  Description of Artificial Sequence: Synthetic oligonucleotide
guugcaaaucggcggcagu

SEQ ID NO: 1560979 - RNA, 19 nt, Artificial Sequence
  Description of Artificial Sequence: Synthetic oligonucleotide
agccaucgagaaagccgcg

SEQ ID NO: 1560980 - RNA, 19 nt, Artificial Sequence
  Description of Artificial Sequence: Synthetic oligonucleotide
aggucgagccagccaucga

SEQ ID NO: 1560981 - RNA, 19 nt, Artificial Sequence
  Description of Artificial Sequence: Synthetic oligonucleotide
ccauuucuaccucuaugca

SEQ ID NO: 1560982 - RNA, 19 nt, Artificial Sequence
  Description of Artificial Sequence: Synthetic oligonucleotide
gugugccaacaucaguaua

SEQ ID NO: 1560983 - RNA, 19 nt, Artificial Sequence
  Description of Artificial Sequence: Synthetic oligonucleotide
gacuagcaguuuauaugcu

SEQ ID NO: 1560984 - RNA, 19 nt, Artificial Sequence
  Description of Artificial Sequence: Synthetic oligonucleotide
ggauaccauuucuaccucu

SEQ ID NO: 1560985 - RNA, 19 nt, Artificial Sequence
  Description of Artificial Sequence: Synthetic oligonucleotide
cggcaguuuccucacgagg

SEQ ID NO: 1560986 - RNA, 19 nt, Artificial Sequence
  Description of Artificial Sequence: Synthetic oligonucleotide
auccaggcguugacuagca

SEQ ID NO: 1560987 - RNA, 19 nt, Artificial Sequence
  Description of Artificial Sequence: Synthetic oligonucleotide
agcguccaacaucuaccuu

SEQ ID NO: 1560988 - RNA, 19 nt, Artificial Sequence
  Description of Artificial Sequence: Synthetic oligonucleotide
cccuuaaacuuaacuaucu

SEQ ID NO: 1560989 - RNA, 19 nt, Artificial Sequence
  Description of Artificial Sequence: Synthetic oligonucleotide
agggacaggucagcauaga

SEQ ID NO: 1560990 - RNA, 19 nt, Artificial Sequence
  Description of Artificial Sequence: Synthetic oligonucleotide
uucgcgcugcguggggaga

SEQ ID NO: 1560991 - RNA, 19 nt, Artificial Sequence
  Description of Artificial Sequence: Synthetic oligonucleotide
cucuaugcaugagaucacu

SEQ ID NO: 1560992 - RNA, 19 nt, Artificial Sequence
  Description of Artificial Sequence: Synthetic oligonucleotide
cgagaaagccgcggcaccg

SEQ ID NO: 1560993 - RNA, 19 nt, Artificial Sequence
  Description of Artificial Sequence: Synthetic oligonucleotide
ucgcgcugcguggggagac

SEQ ID NO: 1560994 - RNA, 19 nt, Artificial Sequence
  Description of Artificial Sequence: Synthetic oligonucleotide
gacccaaccuuggaaggau

SEQ ID NO: 1560995 - RNA, 19 nt, Artificial Sequence
  Description of Artificial Sequence: Synthetic oligonucleotide
ggcacccugccccaaccca

SEQ ID NO: 1560996 - RNA, 19 nt, Artificial Sequence
  Description of Artificial Sequence: Synthetic oligonucleotide
gcacccugccccaacccag

SEQ ID NO: 1560997 - RNA, 19 nt, Artificial Sequence
  Description of Artificial Sequence: Synthetic oligonucleotide
ccgacacauugucuccacc

SEQ ID NO: 1560998 - RNA, 19 nt, Artificial Sequence
  Description of Artificial Sequence: Synthetic oligonucleotide
cacagccucaggcaaggau

SEQ ID NO: 1560999 - RNA, 19 nt, Artificial Sequence
  Description of Artificial Sequence: Synthetic oligonucleotide
gccagccaucgagaaagcc

SEQ ID NO: 1561000 - RNA, 19 nt, Artificial Sequence
  Description of Artificial Sequence: Synthetic oligonucleotide
ugccuacauguugcuccac

SEQ ID NO: 1561001 - RNA, 19 nt, Artificial Sequence
  Description of Artificial Sequence: Synthetic oligonucleotide
ccaacccaggcacagccaa

SEQ ID NO: 1561002 - RNA, 19 nt, Artificial Sequence
  Description of Artificial Sequence: Synthetic oligonucleotide
gggacaggucagcauagau

SEQ ID NO: 1561003 - RNA, 19 nt, Artificial Sequence
  Description of Artificial Sequence: Synthetic oligonucleotide
ggauccuauuuguccuucu

SEQ ID NO: 1561004 - RNA, 19 nt, Artificial Sequence
  Description of Artificial Sequence: Synthetic oligonucleotide
guggugacgugcucacuuu

SEQ ID NO: 1561005 - RNA, 19 nt, Artificial Sequence
  Description of Artificial Sequence: Synthetic oligonucleotide
cuaggacagaacagcccuu

SEQ ID NO: 1561006 - RNA, 19 nt, Artificial Sequence
  Description of Artificial Sequence: Synthetic oligonucleotide
ggugacgugcucacuuugu

SEQ ID NO: 1561007 - RNA, 19 nt, Artificial Sequence
  Description of Artificial Sequence: Synthetic oligonucleotide
cguugcaaaucggcggcag

SEQ ID NO: 1561008 - RNA, 19 nt, Artificial Sequence
  Description of Artificial Sequence: Synthetic oligonucleotide
ggaacacuaugcagagugu

SEQ ID NO: 1561009 - RNA, 19 nt, Artificial Sequence
  Description of Artificial Sequence: Synthetic oligonucleotide
caggcucacuaggagacau

SEQ ID NO: 1561010 - RNA, 19 nt, Artificial Sequence
  Description of Artificial Sequence: Synthetic oligonucleotide
aggcguugacuagcaguuu

SEQ ID NO: 1561011 - RNA, 19 nt, Artificial Sequence
  Description of Artificial Sequence: Synthetic oligonucleotide
gcgcugcguggggagaccg

SEQ ID NO: 1561012 - RNA, 19 nt, Artificial Sequence
  Description of Artificial Sequence: Synthetic oligonucleotide
ggguuaccaucuucgcgcu

SEQ ID NO: 1561013 - RNA, 19 nt, Artificial Sequence
  Description of Artificial Sequence: Synthetic oligonucleotide
caggauccuauuuguccuu

SEQ ID NO: 1561014 - RNA, 19 nt, Artificial Sequence
  Description of Artificial Sequence: Synthetic oligonucleotide
aggcucacuaggagacaua

SEQ ID NO: 1561015 - RNA, 19 nt, Artificial Sequence
  Description of Artificial Sequence: Synthetic oligonucleotide
ccuugccaccuuggaacag

SEQ ID NO: 1561016 - RNA, 19 nt, Artificial Sequence
  Description of Artificial Sequence: Synthetic oligonucleotide
gcccuguacaguuguacuu

SEQ ID NO: 1561017 - RNA, 19 nt, Artificial Sequence
  Description of Artificial Sequence: Synthetic oligonucleotide
gccacagaucaagccagaa

SEQ ID NO: 1561018 - RNA, 19 nt, Artificial Sequence
  Description of Artificial Sequence: Synthetic oligonucleotide
gcuccacggugauggaucu

SEQ ID NO: 1561019 - RNA, 19 nt, Artificial Sequence
  Description of Artificial Sequence: Synthetic oligonucleotide
gggcagacagaaggcaaua

SEQ ID NO: 1561020 - RNA, 19 nt, Artificial Sequence
  Description of Artificial Sequence: Synthetic oligonucleotide
guauagcguccaacaucua

SEQ ID NO: 1561021 - RNA, 19 nt, Artificial Sequence
  Description of Artificial Sequence: Synthetic oligonucleotide
caggaacacuaugcagagu

SEQ ID NO: 1561022 - RNA, 19 nt, Artificial Sequence
  Description of Artificial Sequence: Synthetic oligonucleotide
gcguggggagaccguugca

SEQ ID NO: 1561023 - RNA, 19 nt, Artificial Sequence
  Description of Artificial Sequence: Synthetic oligonucleotide
ccucuugucccgcuccagu

SEQ ID NO: 1561024 - RNA, 19 nt, Artificial Sequence
  Description of Artificial Sequence: Synthetic oligonucleotide
gccgcggcaccgaguacac

SEQ ID NO: 1561025 - RNA, 19 nt, Artificial Sequence
  Description of Artificial Sequence: Synthetic oligonucleotide
gcguugacuagcaguuuau

SEQ ID NO: 1561026 - RNA, 19 nt, Artificial Sequence
  Description of Artificial Sequence: Synthetic oligonucleotide
ggcaaggauugugguuacu

SEQ ID NO: 1561027 - RNA, 19 nt, Artificial Sequence
  Description of Artificial Sequence: Synthetic oligonucleotide
cguugacuagcaguuuaua

SEQ ID NO: 1561028 - RNA, 19 nt, Artificial Sequence
  Description of Artificial Sequence: Synthetic oligonucleotide
gcucacuaggagacauaau

SEQ ID NO: 1561029 - RNA, 19 nt, Artificial Sequence
  Description of Artificial Sequence: Synthetic oligonucleotide
gcugcguggggagaccguu

SEQ ID NO: 1561030 - RNA, 19 nt, Artificial Sequence
  Description of Artificial Sequence: Synthetic oligonucleotide
ccguugcaaaucggcggca

SEQ ID NO: 1561031 - RNA, 19 nt, Artificial Sequence
  Description of Artificial Sequence: Synthetic oligonucleotide
ggccgacgaauuaccuccu

SEQ ID NO: 1561032 - RNA, 19 nt, Artificial Sequence
  Description of Artificial Sequence: Synthetic oligonucleotide
gccgacgaauuaccuccuu

SEQ ID NO: 1561033 - RNA, 19 nt, Artificial Sequence
  Description of Artificial Sequence: Synthetic oligonucleotide
cgcgcugcguggggagacc

SEQ ID NO: 1561034 - RNA, 19 nt, Artificial Sequence
  Description of Artificial Sequence: Synthetic oligonucleotide
ccgcggcaccgaguacacc

SEQ ID NO: 1561035 - RNA, 19 nt, Artificial Sequence
  Description of Artificial Sequence: Synthetic oligonucleotide
cggcaccgaguacaccaga

SEQ ID NO: 1561036 - RNA, 19 nt, Artificial Sequence
  Description of Artificial Sequence: Synthetic oligonucleotide
cgugcucacuuuguaccgu

SEQ ID NO: 1561037 - RNA, 19 nt, Artificial Sequence
  Description of Artificial Sequence: Synthetic oligonucleotide
cgcugcguggggagaccgu

SEQ ID NO: 1561038 - RNA, 19 nt, Artificial Sequence
  Description of Artificial Sequence: Synthetic oligonucleotide
aaaacaaccacauugagag

SEQ ID NO: 1561039 - RNA, 19 nt, Artificial Sequence
  Description of Artificial Sequence: Synthetic oligonucleotide
uuuucuaaagagaugaagc

SEQ ID NO: 1561040 - RNA, 19 nt, Artificial Sequence
  Description of Artificial Sequence: Synthetic oligonucleotide
uaaccuauagaccaguuag

SEQ ID NO: 1561041 - RNA, 19 nt, Artificial Sequence
  Description of Artificial Sequence: Synthetic oligonucleotide
uuuaauauuaguggcauug

SEQ ID NO: 1561042 - RNA, 19 nt, Artificial Sequence
  Description of Artificial Sequence: Synthetic oligonucleotide
uuuccaauaaauuuugggu

SEQ ID NO: 1561043 - RNA, 19 nt, Artificial Sequence
  Description of Artificial Sequence: Synthetic oligonucleotide
uuaagcaacaagcuggcca

SEQ ID NO: 1561044 - RNA, 19 nt, Artificial Sequence
  Description of Artificial Sequence: Synthetic oligonucleotide
uuccaauaaauuuugggug

SEQ ID NO: 1561045 - RNA, 19 nt, Artificial Sequence
  Description of Artificial Sequence: Synthetic oligonucleotide
acacgaaucacccucaucu

SEQ ID NO: 1561046 - RNA, 19 nt, Artificial Sequence
  Description of Artificial Sequence: Synthetic oligonucleotide
uuacauucgagauuggcac

SEQ ID NO: 1561047 - RNA, 19 nt, Artificial Sequence
  Description of Artificial Sequence: Synthetic oligonucleotide
uuagugcacaucauuaagc

SEQ ID NO: 1561048 - RNA, 19 nt, Artificial Sequence
  Description of Artificial Sequence: Synthetic oligonucleotide
cuguauucgagccagcugg

SEQ ID NO: 1561049 - RNA, 19 nt, Artificial Sequence
  Description of Artificial Sequence: Synthetic oligonucleotide
uugguuacauucgagauug

SEQ ID NO: 1561050 - RNA, 19 nt, Artificial Sequence
  Description of Artificial Sequence: Synthetic oligonucleotide
aggaucaugcaacacacuc

SEQ ID NO: 1561051 - RNA, 19 nt, Artificial Sequence
  Description of Artificial Sequence: Synthetic oligonucleotide
cuugaauuccagauguggg

SEQ ID NO: 1561052 - RNA, 19 nt, Artificial Sequence
  Description of Artificial Sequence: Synthetic oligonucleotide
caaugguaaagccaggagg

SEQ ID NO: 1561053 - RNA, 19 nt, Artificial Sequence
  Description of Artificial Sequence: Synthetic oligonucleotide
agaugugggcacuagaaag

SEQ ID NO: 1561054 - RNA, 19 nt, Artificial Sequence
  Description of Artificial Sequence: Synthetic oligonucleotide
uucagcaucgccaccacag

SEQ ID NO: 1561055 - RNA, 19 nt, Artificial Sequence
  Description of Artificial Sequence: Synthetic oligonucleotide
uaagcaacaagcuggccag

SEQ ID NO: 1561056 - RNA, 19 nt, Artificial Sequence
  Description of Artificial Sequence: Synthetic oligonucleotide
ugugguucaaucuccuggg

SEQ ID NO: 1561057 - RNA, 19 nt, Artificial Sequence
  Description of Artificial Sequence: Synthetic oligonucleotide
ugauucgugucucuggaag

SEQ ID NO: 1561058 - RNA, 19 nt, Artificial Sequence
  Description of Artificial Sequence: Synthetic oligonucleotide
auacauacauuccucuggg

SEQ ID NO: 1561059 - RNA, 19 nt, Artificial Sequence
  Description of Artificial Sequence: Synthetic oligonucleotide
cuauagaccaguuagugca

SEQ ID NO: 1561060 - RNA, 19 nt, Artificial Sequence
  Description of Artificial Sequence: Synthetic oligonucleotide
guucccguaaccuauagac

SEQ ID NO: 1561061 - RNA, 19 nt, Artificial Sequence
  Description of Artificial Sequence: Synthetic oligonucleotide
gacuuuucuaaagagauga

SEQ ID NO: 1561062 - RNA, 19 nt, Artificial Sequence
  Description of Artificial Sequence: Synthetic oligonucleotide
ucaugcaacacacucacua

SEQ ID NO: 1561063 - RNA, 19 nt, Artificial Sequence
  Description of Artificial Sequence: Synthetic oligonucleotide
ugcaagguuuucagcaucg

SEQ ID NO: 1561064 - RNA, 19 nt, Artificial Sequence
  Description of Artificial Sequence: Synthetic oligonucleotide
acauacauuccucugggug

SEQ ID NO: 1561065 - RNA, 19 nt, Artificial Sequence
  Description of Artificial Sequence: Synthetic oligonucleotide
ucccguaaccuauagacca

SEQ ID NO: 1561066 - RNA, 19 nt, Artificial Sequence
  Description of Artificial Sequence: Synthetic oligonucleotide
gaucaugcaacacacucac

SEQ ID NO: 1561067 - RNA, 19 nt, Artificial Sequence
  Description of Artificial Sequence: Synthetic oligonucleotide
aaagccaggagguaguaua

SEQ ID NO: 1561068 - RNA, 19 nt, Artificial Sequence
  Description of Artificial Sequence: Synthetic oligonucleotide
acagcauacauacauuccu

SEQ ID NO: 1561069 - RNA, 19 nt, Artificial Sequence
  Description of Artificial Sequence: Synthetic oligonucleotide
aaacaaccacauugagagc

SEQ ID NO: 1561070 - RNA, 19 nt, Artificial Sequence
  Description of Artificial Sequence: Synthetic oligonucleotide
ucaucaaggccccaaggug

SEQ ID NO: 1561071 - RNA, 19 nt, Artificial Sequence
  Description of Artificial Sequence: Synthetic oligonucleotide
cuacugaggaggaaaggcg

SEQ ID NO: 1561072 - RNA, 19 nt, Artificial Sequence
  Description of Artificial Sequence: Synthetic oligonucleotide
uaauauuaguggcauuggu

SEQ ID NO: 1561073 - RNA, 19 nt, Artificial Sequence
  Description of Artificial Sequence: Synthetic oligonucleotide
uaacuacugaggaggaaag

SEQ ID NO: 1561074 - RNA, 19 nt, Artificial Sequence
  Description of Artificial Sequence: Synthetic oligonucleotide
ugguauguacugcuacugg

SEQ ID NO: 1561075 - RNA, 19 nt, Artificial Sequence
  Description of Artificial Sequence: Synthetic oligonucleotide
gugcacaucauuaagcugc

SEQ ID NO: 1561076 - RNA, 19 nt, Artificial Sequence
  Description of Artificial Sequence: Synthetic oligonucleotide
agcaaugauuucaaacugc

SEQ ID NO: 1561077 - RNA, 19 nt, Artificial Sequence
  Description of Artificial Sequence: Synthetic oligonucleotide
ucgagauuggcacugacuu

SEQ ID NO: 1561078 - RNA, 19 nt, Artificial Sequence
  Description of Artificial Sequence: Synthetic oligonucleotide
gagaugaagcccuaacuac

SEQ ID NO: 1561079 - RNA, 19 nt, Artificial Sequence
  Description of Artificial Sequence: Synthetic oligonucleotide
cacuagauccaagauaucc

SEQ ID NO: 1561080 - RNA, 19 nt, Artificial Sequence
  Description of Artificial Sequence: Synthetic oligonucleotide
ucuuagagagugcaguauc

SEQ ID NO: 1561081 - RNA, 19 nt, Artificial Sequence
  Description of Artificial Sequence: Synthetic oligonucleotide
ugaagcccuaacuacugag

SEQ ID NO: 1561082 - RNA, 19 nt, Artificial Sequence
  Description of Artificial Sequence: Synthetic oligonucleotide
uuuagguuuaaaagggcuu

SEQ ID NO: 1561083 - RNA, 19 nt, Artificial Sequence
  Description of Artificial Sequence: Synthetic oligonucleotide
auuucaaacugcaugccag

SEQ ID NO: 1561084 - RNA, 19 nt, Artificial Sequence
  Description of Artificial Sequence: Synthetic oligonucleotide
agacauagcaaugauuuca

SEQ ID NO: 1561085 - RNA, 19 nt, Artificial Sequence
  Description of Artificial Sequence: Synthetic oligonucleotide
caaacugcaugccagggug

SEQ ID NO: 1561086 - RNA, 19 nt, Artificial Sequence
  Description of Artificial Sequence: Synthetic oligonucleotide
aauauuaguggcauugguu

SEQ ID NO: 1561087 - RNA, 19 nt, Artificial Sequence
  Description of Artificial Sequence: Synthetic oligonucleotide
uugagagcugguuuaauau

SEQ ID NO: 1561088 - RNA, 19 nt, Artificial Sequence
  Description of Artificial Sequence: Synthetic oligonucleotide
uccaaguuagggagcacag

SEQ ID NO: 1561089 - RNA, 19 nt, Artificial Sequence
  Description of Artificial Sequence: Synthetic oligonucleotide
ugaacaaccagguccacuu

SEQ ID NO: 1561090 - RNA, 19 nt, Artificial Sequence
  Description of Artificial Sequence: Synthetic oligonucleotide
ucuagggucuuuccaauaa

SEQ ID NO: 1561091 - RNA, 19 nt, Artificial Sequence
  Description of Artificial Sequence: Synthetic oligonucleotide
gagguaguauaguaggcac

SEQ ID NO: 1561092 - RNA, 19 nt, Artificial Sequence
  Description of Artificial Sequence: Synthetic oligonucleotide
acaucauuaagcugccgug

SEQ ID NO: 1561093 - RNA, 19 nt, Artificial Sequence
  Description of Artificial Sequence: Synthetic oligonucleotide
cuaggcuccacacuccucc

SEQ ID NO: 1561094 - RNA, 19 nt, Artificial Sequence
  Description of Artificial Sequence: Synthetic oligonucleotide
gguauguacugcuacuggg

SEQ ID NO: 1561095 - RNA, 19 nt, Artificial Sequence
  Description of Artificial Sequence: Synthetic oligonucleotide
aaucuuagagagugcagua

SEQ ID NO: 1561096 - RNA, 19 nt, Artificial Sequence
  Description of Artificial Sequence: Synthetic oligonucleotide
aucacaaggguuuucccgu

SEQ ID NO: 1561097 - RNA, 19 nt, Artificial Sequence
  Description of Artificial Sequence: Synthetic oligonucleotide
ucuguauucgagccagcug

SEQ ID NO: 1561098 - RNA, 19 nt, Artificial Sequence
  Description of Artificial Sequence: Synthetic oligonucleotide
uccaaucuuagagagugca

SEQ ID NO: 1561099 - RNA, 19 nt, Artificial Sequence
  Description of Artificial Sequence: Synthetic oligonucleotide
ucaagaaucuuguccccug

SEQ ID NO: 1561100 - RNA, 19 nt, Artificial Sequence
  Description of Artificial Sequence: Synthetic oligonucleotide
gaccaguuagugcacauca

SEQ ID NO: 1561101 - RNA, 19 nt, Artificial Sequence
  Description of Artificial Sequence: Synthetic oligonucleotide
uucagcaaugcagcgaagc

SEQ ID NO: 1561102 - RNA, 19 nt, Artificial Sequence
  Description of Artificial Sequence: Synthetic oligonucleotide
gaagcccuaacuacugagg

SEQ ID NO: 1561103 - RNA, 19 nt, Artificial Sequence
  Description of Artificial Sequence: Synthetic oligonucleotide
agcugguuuaauauuagug

SEQ ID NO: 1561104 - RNA, 19 nt, Artificial Sequence
  Description of Artificial Sequence: Synthetic oligonucleotide
cagggcguauucuagcucc

SEQ ID NO: 1561105 - RNA, 19 nt, Artificial Sequence
  Description of Artificial Sequence: Synthetic oligonucleotide
agcauacauacauuccucu

SEQ ID NO: 1561106 - RNA, 19 nt, Artificial Sequence
  Description of Artificial Sequence: Synthetic oligonucleotide
uucccguaaccuauagacc

SEQ ID NO: 1561107 - RNA, 19 nt, Artificial Sequence
  Description of Artificial Sequence: Synthetic oligonucleotide
uauuaguggcauugguuac

SEQ ID NO: 1561108 - RNA, 19 nt, Artificial Sequence
  Description of Artificial Sequence: Synthetic oligonucleotide
cuuacggguacccacacga

SEQ ID NO: 1561109 - RNA, 19 nt, Artificial Sequence
  Description of Artificial Sequence: Synthetic oligonucleotide
ucaaacugcaugccagggu

SEQ ID NO: 1561110 - RNA, 19 nt, Artificial Sequence
  Description of Artificial Sequence: Synthetic oligonucleotide
uucgagauuggcacugacu

SEQ ID NO: 1561111 - RNA, 19 nt, Artificial Sequence
  Description of Artificial Sequence: Synthetic oligonucleotide
guuacauucgagauuggca

SEQ ID NO: 1561112 - RNA, 19 nt, Artificial Sequence
  Description of Artificial Sequence: Synthetic oligonucleotide
ugcaacacacucacuagau

SEQ ID NO: 1561113 - RNA, 19 nt, Artificial Sequence
  Description of Artificial Sequence: Synthetic oligonucleotide
acacucacuagauccaaga

SEQ ID NO: 1561114 - RNA, 19 nt, Artificial Sequence
  Description of Artificial Sequence: Synthetic oligonucleotide
cucacuagauccaagauau

SEQ ID NO: 1561115 - RNA, 19 nt, Artificial Sequence
  Description of Artificial Sequence: Synthetic oligonucleotide
aggugauucgugucucugg

SEQ ID NO: 1561116 - RNA, 19 nt, Artificial Sequence
  Description of Artificial Sequence: Synthetic oligonucleotide
gaagcacagucucaggauc

SEQ ID NO: 1561117 - RNA, 19 nt, Artificial Sequence
  Description of Artificial Sequence: Synthetic oligonucleotide
caagaucugccccacccgg

SEQ ID NO: 1561118 - RNA, 19 nt, Artificial Sequence
  Description of Artificial Sequence: Synthetic oligonucleotide
ucuuacggguacccacacg

SEQ ID NO: 1561119 - RNA, 19 nt, Artificial Sequence
  Description of Artificial Sequence: Synthetic oligonucleotide
acucacuagauccaagaua

SEQ ID NO: 1561120 - RNA, 19 nt, Artificial Sequence
  Description of Artificial Sequence: Synthetic oligonucleotide
aaacugcaugccagggugc

SEQ ID NO: 1561121 - RNA, 19 nt, Artificial Sequence
  Description of Artificial Sequence: Synthetic oligonucleotide
agguuuaaaagggcuuugg

SEQ ID NO: 1561122 - RNA, 19 nt, Artificial Sequence
  Description of Artificial Sequence: Synthetic oligonucleotide
auucgagauuggcacugac

SEQ ID NO: 1561123 - RNA, 19 nt, Artificial Sequence
  Description of Artificial Sequence: Synthetic oligonucleotide
accuauagaccaguuagug

SEQ ID NO: 1561124 - RNA, 19 nt, Artificial Sequence
  Description of Artificial Sequence: Synthetic oligonucleotide
ugucggucuguauucgagc

SEQ ID NO: 1561125 - RNA, 19 nt, Artificial Sequence
  Description of Artificial Sequence: Synthetic oligonucleotide
ucugcauggucucuugcau

SEQ ID NO: 1561126 - RNA, 19 nt, Artificial Sequence
  Description of Artificial Sequence: Synthetic oligonucleotide
uguauucgagccagcuggc

SEQ ID NO: 1561127 - RNA, 19 nt, Artificial Sequence
  Description of Artificial Sequence: Synthetic oligonucleotide
uauagaccaguuagugcac

SEQ ID NO: 1561128 - RNA, 19 nt, Artificial Sequence
  Description of Artificial Sequence: Synthetic oligonucleotide
ugcacaucauuaagcugcc

SEQ ID NO: 1561129 - RNA, 19 nt, Artificial Sequence
  Description of Artificial Sequence: Synthetic oligonucleotide
aggcgcagucaucaaggcc

SEQ ID NO: 1561130 - RNA, 19 nt, Artificial Sequence
  Description of Artificial Sequence: Synthetic oligonucleotide
uuuucucuccaaucuuaga

SEQ ID NO: 1561131 - RNA, 19 nt, Artificial Sequence
  Description of Artificial Sequence: Synthetic oligonucleotide
ucuagcuuccguagccgug

SEQ ID NO: 1561132 - RNA, 19 nt, Artificial Sequence
  Description of Artificial Sequence: Synthetic oligonucleotide
auucgagccagcuggcucu

SEQ ID NO: 1561133 - RNA, 19 nt, Artificial Sequence
  Description of Artificial Sequence: Synthetic oligonucleotide
gucggucuguauucgagcc

SEQ ID NO: 1561134 - RNA, 19 nt, Artificial Sequence
  Description of Artificial Sequence: Synthetic oligonucleotide
uccccgaauacucuugaau

SEQ ID NO: 1561135 - RNA, 19 nt, Artificial Sequence
  Description of Artificial Sequence: Synthetic oligonucleotide
cuuagagagugcaguauca

SEQ ID NO: 1561136 - RNA, 19 nt, Artificial Sequence
  Description of Artificial Sequence: Synthetic oligonucleotide
uccccaauuccaccaaaac

SEQ ID NO: 1561137 - RNA, 19 nt, Artificial Sequence
  Description of Artificial Sequence: Synthetic oligonucleotide
ggcacugacuuuucuaaag

SEQ ID NO: 1561138 - RNA, 19 nt, Artificial Sequence
  Description of Artificial Sequence: Synthetic oligonucleotide
aggaaaggcgcagucauca

SEQ ID NO: 1561139 - RNA, 19 nt, Artificial Sequence
  Description of Artificial Sequence: Synthetic oligonucleotide
augcaacacacucacuaga

SEQ ID NO: 1561140 - RNA, 19 nt, Artificial Sequence
  Description of Artificial Sequence: Synthetic oligonucleotide
ggcgcagucaucaaggccc

SEQ ID NO: 1561141 - RNA, 19 nt, Artificial Sequence
  Description of Artificial Sequence: Synthetic oligonucleotide
acaaggguuuucccguuug

SEQ ID NO: 1561142 - RNA, 19 nt, Artificial Sequence
  Description of Artificial Sequence: Synthetic oligonucleotide
uggcauugguuacauucga

SEQ ID NO: 1561143 - RNA, 19 nt, Artificial Sequence
  Description of Artificial Sequence: Synthetic oligonucleotide
ugagagcugguuuaauauu

SEQ ID NO: 1561144 - RNA, 19 nt, Artificial Sequence
  Description of Artificial Sequence: Synthetic oligonucleotide
agugcaguaucaagaaucu

SEQ ID NO: 1561145 - RNA, 19 nt, Artificial Sequence
  Description of Artificial Sequence: Synthetic oligonucleotide
cauuaagcugccgugcaac

SEQ ID NO: 1561146 - RNA, 19 nt, Artificial Sequence
  Description of Artificial Sequence: Synthetic oligonucleotide
agcaaugcagcgaagcaca

SEQ ID NO: 1561147 - RNA, 19 nt, Artificial Sequence
  Description of Artificial Sequence: Synthetic oligonucleotide
aaggugauucgugucucug

SEQ ID NO: 1561148 - RNA, 19 nt, Artificial Sequence
  Description of Artificial Sequence: Synthetic oligonucleotide
ugggugcaagaucugcccc

SEQ ID NO: 1561149 - RNA, 19 nt, Artificial Sequence
  Description of Artificial Sequence: Synthetic oligonucleotide
agcccuaacuacugaggag

SEQ ID NO: 1561150 - RNA, 19 nt, Artificial Sequence
  Description of Artificial Sequence: Synthetic oligonucleotide
agccgucuaggcuccacac

SEQ ID NO: 1561151 - RNA, 19 nt, Artificial Sequence
  Description of Artificial Sequence: Synthetic oligonucleotide
uacauucgagauuggcacu

SEQ ID NO: 1561152 - RNA, 19 nt, Artificial Sequence
  Description of Artificial Sequence: Synthetic oligonucleotide
guacccacacgaaucaccc

SEQ ID NO: 1561153 - RNA, 19 nt, Artificial Sequence
  Description of Artificial Sequence: Synthetic oligonucleotide
augguauguacugcuacug

SEQ ID NO: 1561154 - RNA, 19 nt, Artificial Sequence
  Description of Artificial Sequence: Synthetic oligonucleotide
acggguacccacacgaauc

SEQ ID NO: 1561155 - RNA, 19 nt, Artificial Sequence
  Description of Artificial Sequence: Synthetic oligonucleotide
gagugaacaaccaggucca

SEQ ID NO: 1561156 - RNA, 19 nt, Artificial Sequence
  Description of Artificial Sequence: Synthetic oligonucleotide
ugauuccaacuaguugggg

SEQ ID NO: 1561157 - RNA, 19 nt, Artificial Sequence
  Description of Artificial Sequence: Synthetic oligonucleotide
uagacauagcaaugauuuc

SEQ ID NO: 1561158 - RNA, 19 nt, Artificial Sequence
  Description of Artificial Sequence: Synthetic oligonucleotide
gcccuaacuacugaggagg

SEQ ID NO: 1561159 - RNA, 19 nt, Artificial Sequence
  Description of Artificial Sequence: Synthetic oligonucleotide
ggcacuagaaaguggcagc

SEQ ID NO: 1561160 - RNA, 19 nt, Artificial Sequence
  Description of Artificial Sequence: Synthetic oligonucleotide
auuaguggcauugguuaca

SEQ ID NO: 1561161 - RNA, 19 nt, Artificial Sequence
  Description of Artificial Sequence: Synthetic oligonucleotide
aguauaguaggcacauccu

SEQ ID NO: 1561162 - RNA, 19 nt, Artificial Sequence
  Description of Artificial Sequence: Synthetic oligonucleotide
uuagagagugcaguaucaa

SEQ ID NO: 1561163 - RNA, 19 nt, Artificial Sequence
  Description of Artificial Sequence: Synthetic oligonucleotide
uagguuuaaaagggcuuug

SEQ ID NO: 1561164 - RNA, 19 nt, Artificial Sequence
  Description of Artificial Sequence: Synthetic oligonucleotide
aaccuauagaccaguuagu

SEQ ID NO: 1561165 - RNA, 19 nt, Artificial Sequence
  Description of Artificial Sequence: Synthetic oligonucleotide
ccuauagaccaguuagugc

SEQ ID NO: 1561166 - RNA, 19 nt, Artificial Sequence
  Description of Artificial Sequence: Synthetic oligonucleotide
gcguauucuagcuccuugg

SEQ ID NO: 1561167 - RNA, 19 nt, Artificial Sequence
  Description of Artificial Sequence: Synthetic oligonucleotide
gcacuugaaagccagaugu

SEQ ID NO: 1561168 - RNA, 19 nt, Artificial Sequence
  Description of Artificial Sequence: Synthetic oligonucleotide
uacggguacccacacgaau

SEQ ID NO: 1561169 - RNA, 19 nt, Artificial Sequence
  Description of Artificial Sequence: Synthetic oligonucleotide
cuacugggacacugcagcc

SEQ ID NO: 1561170 - RNA, 19 nt, Artificial Sequence
  Description of Artificial Sequence: Synthetic oligonucleotide
ucagcaucgccaccacagu

SEQ ID NO: 1561171 - RNA, 19 nt, Artificial Sequence
  Description of Artificial Sequence: Synthetic oligonucleotide
ucggucuguauucgagcca

SEQ ID NO: 1561172 - RNA, 19 nt, Artificial Sequence
  Description of Artificial Sequence: Synthetic oligonucleotide
uuccguagccguguguuga

SEQ ID NO: 1561173 - RNA, 19 nt, Artificial Sequence
  Description of Artificial Sequence: Synthetic oligonucleotide
caucuagcuuccguagccg

SEQ ID NO: 1561174 - RNA, 19 nt, Artificial Sequence
  Description of Artificial Sequence: Synthetic oligonucleotide
cacccugugguucaaucuc

SEQ ID NO: 1561175 - RNA, 19 nt, Artificial Sequence
  Description of Artificial Sequence: Synthetic oligonucleotide
uggcuccaaugguaaagcc

SEQ ID NO: 1561176 - RNA, 19 nt, Artificial Sequence
  Description of Artificial Sequence: Synthetic oligonucleotide
uacauacauuccucugggu

SEQ ID NO: 1561177 - RNA, 19 nt, Artificial Sequence
  Description of Artificial Sequence: Synthetic oligonucleotide
guugagguuuccccgaaua

SEQ ID NO: 1561178 - RNA, 19 nt, Artificial Sequence
  Description of Artificial Sequence: Synthetic oligonucleotide
cacauugagagcugguuua

SEQ ID NO: 1561179 - RNA, 19 nt, Artificial Sequence
  Description of Artificial Sequence: Synthetic oligonucleotide
gaaucacccucaucuuuga

SEQ ID NO: 1561180 - RNA, 19 nt, Artificial Sequence
  Description of Artificial Sequence: Synthetic oligonucleotide
uggaauguuccgggcagug

SEQ ID NO: 1561181 - RNA, 19 nt, Artificial Sequence
  Description of Artificial Sequence: Synthetic oligonucleotide
uccguagccguguguugag

SEQ ID NO: 1561182 - RNA, 19 nt, Artificial Sequence
  Description of Artificial Sequence: Synthetic oligonucleotide
agagugcaguaucaagaau

SEQ ID NO: 1561183 - RNA, 19 nt, Artificial Sequence
  Description of Artificial Sequence: Synthetic oligonucleotide
acgaaucacccucaucuuu

SEQ ID NO: 1561184 - RNA, 19 nt, Artificial Sequence
  Description of Artificial Sequence: Synthetic oligonucleotide
cucggacuuccacugcuag

SEQ ID NO: 1561185 - RNA, 19 nt, Artificial Sequence
  Description of Artificial Sequence: Synthetic oligonucleotide
ugguuacauucgagauugg

SEQ ID NO: 1561186 - RNA, 19 nt, Artificial Sequence
  Description of Artificial Sequence: Synthetic oligonucleotide
aucuagcuuccguagccgu

SEQ ID NO: 1561187 - RNA, 19 nt, Artificial Sequence
  Description of Artificial Sequence: Synthetic oligonucleotide
gcucaucuagcuuccguag

SEQ ID NO: 1561188 - RNA, 19 nt, Artificial Sequence
  Description of Artificial Sequence: Synthetic oligonucleotide
ucgugucucuggaagucuc

SEQ ID NO: 1561189 - RNA, 19 nt, Artificial Sequence
  Description of Artificial Sequence: Synthetic oligonucleotide
gauucgugucucuggaagu

SEQ ID NO: 1561190 - RNA, 19 nt, Artificial Sequence
  Description of Artificial Sequence: Synthetic oligonucleotide
ccucuuggaauguuccggg

SEQ ID NO: 1561191 - RNA, 19 nt, Artificial Sequence
  Description of Artificial Sequence: Synthetic oligonucleotide
gucaucaaggccccaaggu

SEQ ID NO: 1561192 - RNA, 19 nt, Artificial Sequence
  Description of Artificial Sequence: Synthetic oligonucleotide
agugucggucuguauucga

SEQ ID NO: 1561193 - RNA, 19 nt, Artificial Sequence
  Description of Artificial Sequence: Synthetic oligonucleotide
gcaagaucugccccacccg

SEQ ID NO: 1561194 - RNA, 19 nt, Artificial Sequence
  Description of Artificial Sequence: Synthetic oligonucleotide
caaccacauugagagcugg

SEQ ID NO: 1561195 - RNA, 19 nt, Artificial Sequence
  Description of Artificial Sequence: Synthetic oligonucleotide
cacaucauuaagcugccgu

SEQ ID NO: 1561196 - RNA, 19 nt, Artificial Sequence
  Description of Artificial Sequence: Synthetic oligonucleotide
ggugauucgugucucugga

SEQ ID NO: 1561197 - RNA, 19 nt, Artificial Sequence
  Description of Artificial Sequence: Synthetic oligonucleotide
cugcaugccagggugcaag

SEQ ID NO: 1561198 - RNA, 19 nt, Artificial Sequence
  Description of Artificial Sequence: Synthetic oligonucleotide
cauugguuacauucgagau

SEQ ID NO: 1561199 - RNA, 19 nt, Artificial Sequence
  Description of Artificial Sequence: Synthetic oligonucleotide
caucgcucaucaugguaug

SEQ ID NO: 1561200 - RNA, 19 nt, Artificial Sequence
  Description of Artificial Sequence: Synthetic oligonucleotide
gguacccacacgaaucacc

SEQ ID NO: 1561201 - RNA, 19 nt, Artificial Sequence
  Description of Artificial Sequence: Synthetic oligonucleotide
cucaacacccugugguuca

SEQ ID NO: 1561202 - RNA, 19 nt, Artificial Sequence
  Description of Artificial Sequence: Synthetic oligonucleotide
ccgaauacucuugaauucc

SEQ ID NO: 1561203 - RNA, 19 nt, Artificial Sequence
  Description of Artificial Sequence: Synthetic oligonucleotide
uuaagcugccgugcaacau

SEQ ID NO: 1561204 - RNA, 19 nt, Artificial Sequence
  Description of Artificial Sequence: Synthetic oligonucleotide
uuacggguacccacacgaa

SEQ ID NO: 1561205 - RNA, 19 nt, Artificial Sequence
  Description of Artificial Sequence: Synthetic oligonucleotide
aucuuagagagugcaguau

SEQ ID NO: 1561206 - RNA, 19 nt, Artificial Sequence
  Description of Artificial Sequence: Synthetic oligonucleotide
agcaucgccaccacagugu

SEQ ID NO: 1561207 - RNA, 19 nt, Artificial Sequence
  Description of Artificial Sequence: Synthetic oligonucleotide
guuuccccgaauacucuug

SEQ ID NO: 1561208 - RNA, 19 nt, Artificial Sequence
  Description of Artificial Sequence: Synthetic oligonucleotide
caaucuuagagagugcagu

SEQ ID NO: 1561209 - RNA, 19 nt, Artificial Sequence
  Description of Artificial Sequence: Synthetic oligonucleotide
gguucaaucuccugggcua

SEQ ID NO: 1561210 - RNA, 19 nt, Artificial Sequence
  Description of Artificial Sequence: Synthetic oligonucleotide
ggcuccuuuguuaagcaac

SEQ ID NO: 1561211 - RNA, 19 nt, Artificial Sequence
  Description of Artificial Sequence: Synthetic oligonucleotide
aaaggcccguucagcaaug

SEQ ID NO: 1561212 - RNA, 19 nt, Artificial Sequence
  Description of Artificial Sequence: Synthetic oligonucleotide
ggcguauucuagcuccuug

SEQ ID NO: 1561213 - RNA, 19 nt, Artificial Sequence
  Description of Artificial Sequence: Synthetic oligonucleotide
uguugagguuuccccgaau

SEQ ID NO: 1561214 - RNA, 19 nt, Artificial Sequence
  Description of Artificial Sequence: Synthetic oligonucleotide
ccaaucuuagagagugcag

SEQ ID NO: 1561215 - RNA, 19 nt, Artificial Sequence
  Description of Artificial Sequence: Synthetic oligonucleotide
agguaguauaguaggcaca

SEQ ID NO: 1561216 - RNA, 19 nt, Artificial Sequence
  Description of Artificial Sequence: Synthetic oligonucleotide
ggguuuucccguuugcaga

SEQ ID NO: 1561217 - RNA, 19 nt, Artificial Sequence
  Description of Artificial Sequence: Synthetic oligonucleotide
auagaccaguuagugcaca

SEQ ID NO: 1561218 - RNA, 19 nt, Artificial Sequence
  Description of Artificial Sequence: Synthetic oligonucleotide
ucacuagauccaagauauc

SEQ ID NO: 1561219 - RNA, 19 nt, Artificial Sequence
  Description of Artificial Sequence: Synthetic oligonucleotide
gcuagucacccucuccaag

SEQ ID NO: 1561220 - RNA, 19 nt, Artificial Sequence
  Description of Artificial Sequence: Synthetic oligonucleotide
ggcucuuacggguacccac

SEQ ID NO: 1561221 - RNA, 19 nt, Artificial Sequence
  Description of Artificial Sequence: Synthetic oligonucleotide
ggugccucagaaaggcccg

SEQ ID NO: 1561222 - RNA, 19 nt, Artificial Sequence
  Description of Artificial Sequence: Synthetic oligonucleotide
agugaacaaccagguccac

SEQ ID NO: 1561223 - RNA, 19 nt, Artificial Sequence
  Description of Artificial Sequence: Synthetic oligonucleotide
guuaagcaacaagcuggcc

SEQ ID NO: 1561224 - RNA, 19 nt, Artificial Sequence
  Description of Artificial Sequence: Synthetic oligonucleotide
uaaagccaggagguaguau

SEQ ID NO: 1561225 - RNA, 19 nt, Artificial Sequence
  Description of Artificial Sequence: Synthetic oligonucleotide
cgaaucacccucaucuuug

SEQ ID NO: 1561226 - RNA, 19 nt, Artificial Sequence
  Description of Artificial Sequence: Synthetic oligonucleotide
cccgaauacucuugaauuc

SEQ ID NO: 1561227 - RNA, 19 nt, Artificial Sequence
  Description of Artificial Sequence: Synthetic oligonucleotide
caucgccaccacagugucg

SEQ ID NO: 1561228 - RNA, 19 nt, Artificial Sequence
  Description of Artificial Sequence: Synthetic oligonucleotide
ggaucaugcaacacacuca

SEQ ID NO: 1561229 - RNA, 19 nt, Artificial Sequence
  Description of Artificial Sequence: Synthetic oligonucleotide
cagugucggucuguauucg

SEQ ID NO: 1561230 - RNA, 19 nt, Artificial Sequence
  Description of Artificial Sequence: Synthetic oligonucleotide
aauguuccgggcagugauu

SEQ ID NO: 1561231 - RNA, 19 nt, Artificial Sequence
  Description of Artificial Sequence: Synthetic oligonucleotide
gggcuagucacccucucca

SEQ ID NO: 1561232 - RNA, 19 nt, Artificial Sequence
  Description of Artificial Sequence: Synthetic oligonucleotide
cacacgaaucacccucauc

SEQ ID NO: 1561233 - RNA, 19 nt, Artificial Sequence
  Description of Artificial Sequence: Synthetic oligonucleotide
uagccguguguugagguuu

SEQ ID NO: 1561234 - RNA, 19 nt, Artificial Sequence
  Description of Artificial Sequence: Synthetic oligonucleotide
gguacagcugcccaucgcu

SEQ ID NO: 1561235 - RNA, 19 nt, Artificial Sequence
  Description of Artificial Sequence: Synthetic oligonucleotide
caaucuccugggcuaguca

SEQ ID NO: 1561236 - RNA, 19 nt, Artificial Sequence
  Description of Artificial Sequence: Synthetic oligonucleotide
ucacaaggguuuucccguu

SEQ ID NO: 1561237 - RNA, 19 nt, Artificial Sequence
  Description of Artificial Sequence: Synthetic oligonucleotide
uuccccgaauacucuugaa

SEQ ID NO: 1561238 - RNA, 19 nt, Artificial Sequence
  Description of Artificial Sequence: Synthetic oligonucleotide
gagccgucuaggcuccaca

SEQ ID NO: 1561239 - RNA, 19 nt, Artificial Sequence
  Description of Artificial Sequence: Synthetic oligonucleotide
uagcuuccguagccgugug

SEQ ID NO: 1561240 - RNA, 19 nt, Artificial Sequence
  Description of Artificial Sequence: Synthetic oligonucleotide
guuagggagcacagagcac

SEQ ID NO: 1561241 - RNA, 19 nt, Artificial Sequence
  Description of Artificial Sequence: Synthetic oligonucleotide
cuaaagagaugaagcccua

SEQ ID NO: 1561242 - RNA, 19 nt, Artificial Sequence
  Description of Artificial Sequence: Synthetic oligonucleotide
gcaacacacucacuagauc

SEQ ID NO: 1561243 - RNA, 19 nt, Artificial Sequence
  Description of Artificial Sequence: Synthetic oligonucleotide
agccguguguugagguuuc

SEQ ID NO: 1561244 - RNA, 19 nt, Artificial Sequence
  Description of Artificial Sequence: Synthetic oligonucleotide
aggcccguucagcaaugca

SEQ ID NO: 1561245 - RNA, 19 nt, Artificial Sequence
  Description of Artificial Sequence: Synthetic oligonucleotide
gguaguauaguaggcacau

SEQ ID NO: 1561246 - RNA, 19 nt, Artificial Sequence
  Description of Artificial Sequence: Synthetic oligonucleotide
ggaggaaaggcgcagucau

SEQ ID NO: 1561247 - RNA, 19 nt, Artificial Sequence
  Description of Artificial Sequence: Synthetic oligonucleotide
cacagugucggucuguauu

SEQ ID NO: 1561248 - RNA, 19 nt, Artificial Sequence
  Description of Artificial Sequence: Synthetic oligonucleotide
aucgcucaucaugguaugu

SEQ ID NO: 1561249 - RNA, 19 nt, Artificial Sequence
  Description of Artificial Sequence: Synthetic oligonucleotide
caucuuugagccguuuucu

SEQ ID NO: 1561250 - RNA, 19 nt, Artificial Sequence
  Description of Artificial Sequence: Synthetic oligonucleotide
guaguauaguaggcacauc

SEQ ID NO: 1561251 - RNA, 19 nt, Artificial Sequence
  Description of Artificial Sequence: Synthetic oligonucleotide
gugauucgugucucuggaa

SEQ ID NO: 1561252 - RNA, 19 nt, Artificial Sequence
  Description of Artificial Sequence: Synthetic oligonucleotide
cccguaaccuauagaccag

SEQ ID NO: 1561253 - RNA, 19 nt, Artificial Sequence
  Description of Artificial Sequence: Synthetic oligonucleotide
agcuuccguagccgugugu

SEQ ID NO: 1561254 - RNA, 19 nt, Artificial Sequence
  Description of Artificial Sequence: Synthetic oligonucleotide
cccguucagcaaugcagcg

SEQ ID NO: 1561255 - RNA, 19 nt, Artificial Sequence
  Description of Artificial Sequence: Synthetic oligonucleotide
gguucccguaaccuauaga

SEQ ID NO: 1561256 - RNA, 19 nt, Artificial Sequence
  Description of Artificial Sequence: Synthetic oligonucleotide
uggcucuuacggguaccca

SEQ ID NO: 1561257 - RNA, 19 nt, Artificial Sequence
  Description of Artificial Sequence: Synthetic oligonucleotide
uuguccccugugguagaca

SEQ ID NO: 1561258 - RNA, 19 nt, Artificial Sequence
  Description of Artificial Sequence: Synthetic oligonucleotide
guucagcaaugcagcgaag

SEQ ID NO: 1561259 - RNA, 19 nt, Artificial Sequence
  Description of Artificial Sequence: Synthetic oligonucleotide
gucuguauucgagccagcu

SEQ ID NO: 1561260 - RNA, 19 nt, Artificial Sequence
  Description of Artificial Sequence: Synthetic oligonucleotide
accaguuagugcacaucau

SEQ ID NO: 1561261 - RNA, 19 nt, Artificial Sequence
  Description of Artificial Sequence: Synthetic oligonucleotide
ccgugcaacauccaggaua

SEQ ID NO: 1561262 - RNA, 19 nt, Artificial Sequence
  Description of Artificial Sequence: Synthetic oligonucleotide
cuggaagucucaacacccu

SEQ ID NO: 1561263 - RNA, 19 nt, Artificial Sequence
  Description of Artificial Sequence: Synthetic oligonucleotide
gggagugaacaaccagguc

SEQ ID NO: 1561264 - RNA, 19 nt, Artificial Sequence
  Description of Artificial Sequence: Synthetic oligonucleotide
cacuagaaaguggcagcca

SEQ ID NO: 1561265 - RNA, 19 nt, Artificial Sequence
  Description of Artificial Sequence: Synthetic oligonucleotide
ggugcaagaucugccccac

SEQ ID NO: 1561266 - RNA, 19 nt, Artificial Sequence
  Description of Artificial Sequence: Synthetic oligonucleotide
cuagcuuccguagccgugu

SEQ ID NO: 1561267 - RNA, 19 nt, Artificial Sequence
  Description of Artificial Sequence: Synthetic oligonucleotide
gucuaggcuccacacuccu

SEQ ID NO: 1561268 - RNA, 19 nt, Artificial Sequence
  Description of Artificial Sequence: Synthetic oligonucleotide
ccucagaaaggcccguuca

SEQ ID NO: 1561269 - RNA, 19 nt, Artificial Sequence
  Description of Artificial Sequence: Synthetic oligonucleotide
aggauauucuuggcuccuu

SEQ ID NO: 1561270 - RNA, 19 nt, Artificial Sequence
  Description of Artificial Sequence: Synthetic oligonucleotide
guaaagccaggagguagua

SEQ ID NO: 1561271 - RNA, 19 nt, Artificial Sequence
  Description of Artificial Sequence: Synthetic oligonucleotide
cggucuguauucgagccag

SEQ ID NO: 1561272 - RNA, 19 nt, Artificial Sequence
  Description of Artificial Sequence: Synthetic oligonucleotide
gugaacaaccagguccacu

SEQ ID NO: 1561273 - RNA, 19 nt, Artificial Sequence
  Description of Artificial Sequence: Synthetic oligonucleotide
cacucacuagauccaagau

SEQ ID NO: 1561274 - RNA, 19 nt, Artificial Sequence
  Description of Artificial Sequence: Synthetic oligonucleotide
ggugcaagguuuucagcau

SEQ ID NO: 1561275 - RNA, 19 nt, Artificial Sequence
  Description of Artificial Sequence: Synthetic oligonucleotide
cauucgagauuggcacuga

SEQ ID NO: 1561276 - RNA, 19 nt, Artificial Sequence
  Description of Artificial Sequence: Synthetic oligonucleotide
uuccacugcuagggcuccc

SEQ ID NO: 1561277 - RNA, 19 nt, Artificial Sequence
  Description of Artificial Sequence: Synthetic oligonucleotide
ggccccaaggugauucgug

SEQ ID NO: 1561278 - RNA, 19 nt, Artificial Sequence
  Description of Artificial Sequence: Synthetic oligonucleotide
cacccgguucugccagccc

SEQ ID NO: 1561279 - RNA, 19 nt, Artificial Sequence
  Description of Artificial Sequence: Synthetic oligonucleotide
ccaucgcucaucaugguau

SEQ ID NO: 1561280 - RNA, 19 nt, Artificial Sequence
  Description of Artificial Sequence: Synthetic oligonucleotide
cgucuaggcuccacacucc

SEQ ID NO: 1561281 - RNA, 19 nt, Artificial Sequence
  Description of Artificial Sequence: Synthetic oligonucleotide
ggucucuugcaugcuaucu

SEQ ID NO: 1561282 - RNA, 19 nt, Artificial Sequence
  Description of Artificial Sequence: Synthetic oligonucleotide
agggcguauucuagcuccu

SEQ ID NO: 1561283 - RNA, 19 nt, Artificial Sequence
  Description of Artificial Sequence: Synthetic oligonucleotide
gcacaucauuaagcugccg

SEQ ID NO: 1561284 - RNA, 19 nt, Artificial Sequence
  Description of Artificial Sequence: Synthetic oligonucleotide
ccguguguugagguuuccc

SEQ ID NO: 1561285 - RNA, 19 nt, Artificial Sequence
  Description of Artificial Sequence: Synthetic oligonucleotide
ccccgaauacucuugaauu

SEQ ID NO: 1561286 - RNA, 19 nt, Artificial Sequence
  Description of Artificial Sequence: Synthetic oligonucleotide
guagucugcauggucucuu

SEQ ID NO: 1561287 - RNA, 19 nt, Artificial Sequence
  Description of Artificial Sequence: Synthetic oligonucleotide
ccagggcguauucuagcuc

SEQ ID NO: 1561288 - RNA, 19 nt, Artificial Sequence
  Description of Artificial Sequence: Synthetic oligonucleotide
guauucgagccagcuggcu

SEQ ID NO: 1561289 - RNA, 19 nt, Artificial Sequence
  Description of Artificial Sequence: Synthetic oligonucleotide
gcuggcucuuacggguacc

SEQ ID NO: 1561290 - RNA, 19 nt, Artificial Sequence
  Description of Artificial Sequence: Synthetic oligonucleotide
ccccaaggugauucguguc

SEQ ID NO: 1561291 - RNA, 19 nt, Artificial Sequence
  Description of Artificial Sequence: Synthetic oligonucleotide
cccuaacuacugaggagga

SEQ ID NO: 1561292 - RNA, 19 nt, Artificial Sequence
  Description of Artificial Sequence: Synthetic oligonucleotide
cccaaggugauucgugucu

SEQ ID NO: 1561293 - RNA, 19 nt, Artificial Sequence
  Description of Artificial Sequence: Synthetic oligonucleotide
cacgaaucacccucaucuu

SEQ ID NO: 1561294 - RNA, 19 nt, Artificial Sequence
  Description of Artificial Sequence: Synthetic oligonucleotide
gguuuccccgaauacucuu

SEQ ID NO: 1561295 - RNA, 19 nt, Artificial Sequence
  Description of Artificial Sequence: Synthetic oligonucleotide
cccacacgaaucacccuca

SEQ ID NO: 1561296 - RNA, 19 nt, Artificial Sequence
  Description of Artificial Sequence: Synthetic oligonucleotide
ggucuguauucgagccagc

SEQ ID NO: 1561297 - RNA, 19 nt, Artificial Sequence
  Description of Artificial Sequence: Synthetic oligonucleotide
gccccaaggugauucgugu

SEQ ID NO: 1561298 - RNA, 19 nt, Artificial Sequence
  Description of Artificial Sequence: Synthetic oligonucleotide
ccaaguuagggagcacaga

SEQ ID NO: 1561299 - RNA, 19 nt, Artificial Sequence
  Description of Artificial Sequence: Synthetic oligonucleotide
cagggagcugguucccacu

SEQ ID NO: 1561300 - RNA, 19 nt, Artificial Sequence
  Description of Artificial Sequence: Synthetic oligonucleotide
ggguacccacacgaaucac

SEQ ID NO: 1561301 - RNA, 19 nt, Artificial Sequence
  Description of Artificial Sequence: Synthetic oligonucleotide
gcagugauuccaacuaguu

SEQ ID NO: 1561302 - RNA, 19 nt, Artificial Sequence
  Description of Artificial Sequence: Synthetic oligonucleotide
gcgcagucaucaaggcccc

SEQ ID NO: 1561303 - RNA, 19 nt, Artificial Sequence
  Description of Artificial Sequence: Synthetic oligonucleotide
gcuuccguagccguguguu

SEQ ID NO: 1561304 - RNA, 19 nt, Artificial Sequence
  Description of Artificial Sequence: Synthetic oligonucleotide
ccguagccguguguugagg

SEQ ID NO: 1561305 - RNA, 19 nt, Artificial Sequence
  Description of Artificial Sequence: Synthetic oligonucleotide
cggguacccacacgaauca

SEQ ID NO: 1561306 - RNA, 19 nt, Artificial Sequence
  Description of Artificial Sequence: Synthetic oligonucleotide
ccacauugagagcugguuu

SEQ ID NO: 1561307 - RNA, 19 nt, Artificial Sequence
  Description of Artificial Sequence: Synthetic oligonucleotide
ccacccgguucugccagcc

SEQ ID NO: 1561308 - RNA, 19 nt, Artificial Sequence
  Description of Artificial Sequence: Synthetic oligonucleotide
cccaucgcucaucauggua

SEQ ID NO: 1561309 - RNA, 19 nt, Artificial Sequence
  Description of Artificial Sequence: Synthetic oligonucleotide
cacaaggguuuucccguuu

SEQ ID NO: 1561310 - RNA, 19 nt, Artificial Sequence
  Description of Artificial Sequence: Synthetic oligonucleotide
gccgucuaggcuccacacu

SEQ ID NO: 1561311 - RNA, 19 nt, Artificial Sequence
  Description of Artificial Sequence: Synthetic oligonucleotide
ccccugugguagacauagc

SEQ ID NO: 1561312 - RNA, 19 nt, Artificial Sequence
  Description of Artificial Sequence: Synthetic oligonucleotide
caagguuucuagggucuuu

SEQ ID NO: 1561313 - RNA, 19 nt, Artificial Sequence
  Description of Artificial Sequence: Synthetic oligonucleotide
ccuaacuacugaggaggaa

SEQ ID NO: 1561314 - RNA, 19 nt, Artificial Sequence
  Description of Artificial Sequence: Synthetic oligonucleotide
cgaagcacagucucaggau

SEQ ID NO: 1561315 - RNA, 19 nt, Artificial Sequence
  Description of Artificial Sequence: Synthetic oligonucleotide
ccgggcagugauuccaacu

SEQ ID NO: 1561316 - RNA, 19 nt, Artificial Sequence
  Description of Artificial Sequence: Synthetic oligonucleotide
cagggaccuggaugguagu

SEQ ID NO: 1561317 - RNA, 19 nt, Artificial Sequence
  Description of Artificial Sequence: Synthetic oligonucleotide
gugcaguaucaagaaucuu

SEQ ID NO: 1561318 - RNA, 19 nt, Artificial Sequence
  Description of Artificial Sequence: Synthetic oligonucleotide
cguagccguguguugaggu

SEQ ID NO: 1561319 - RNA, 19 nt, Artificial Sequence
  Description of Artificial Sequence: Synthetic oligonucleotide
cccacccgguucugccagc

SEQ ID NO: 1561320 - RNA, 19 nt, Artificial Sequence
  Description of Artificial Sequence: Synthetic oligonucleotide
gccagggugcaagguuuuc

SEQ ID NO: 1561321 - RNA, 19 nt, Artificial Sequence
  Description of Artificial Sequence: Synthetic oligonucleotide
guccccugugguagacaua

SEQ ID NO: 1561322 - RNA, 19 nt, Artificial Sequence
  Description of Artificial Sequence: Synthetic oligonucleotide
ccguuugcagauggcucca

SEQ ID NO: 1561323 - RNA, 19 nt, Artificial Sequence
  Description of Artificial Sequence: Synthetic oligonucleotide
ccugggcuagucacccucu

SEQ ID NO: 1561324 - RNA, 19 nt, Artificial Sequence
  Description of Artificial Sequence: Synthetic oligonucleotide
ccguaaccuauagaccagu

SEQ ID NO: 1561325 - RNA, 19 nt, Artificial Sequence
  Description of Artificial Sequence: Synthetic oligonucleotide
gcaagguuucuagggucuu

SEQ ID NO: 1561326 - RNA, 19 nt, Artificial Sequence
  Description of Artificial Sequence: Synthetic oligonucleotide
gcccaucgcucaucauggu

SEQ ID NO: 1561327 - RNA, 19 nt, Artificial Sequence
  Description of Artificial Sequence: Synthetic oligonucleotide
cccgguucugccagcccau

SEQ ID NO: 1561328 - RNA, 19 nt, Artificial Sequence
  Description of Artificial Sequence: Synthetic oligonucleotide
gggcguauucuagcuccuu

SEQ ID NO: 1561329 - RNA, 19 nt, Artificial Sequence
  Description of Artificial Sequence: Synthetic oligonucleotide
ccacacgaaucacccucau

SEQ ID NO: 1561330 - RNA, 19 nt, Artificial Sequence
  Description of Artificial Sequence: Synthetic oligonucleotide
aaaauaaucaaugagguuc

SEQ ID NO: 1561331 - RNA, 19 nt, Artificial Sequence
  Description of Artificial Sequence: Synthetic oligonucleotide
aaaacuuacuuauucugcc

SEQ ID NO: 1561332 - RNA, 19 nt, Artificial Sequence
  Description of Artificial Sequence: Synthetic oligonucleotide
uuuaagaugacuuucuuug

SEQ ID NO: 1561333 - RNA, 19 nt, Artificial Sequence
  Description of Artificial Sequence: Synthetic oligonucleotide
ucugcgaugaucuugcugg

SEQ ID NO: 1561334 - RNA, 19 nt, Artificial Sequence
  Description of Artificial Sequence: Synthetic oligonucleotide
uguuauugaagacagacac

SEQ ID NO: 1561335 - RNA, 19 nt, Artificial Sequence
  Description of Artificial Sequence: Synthetic oligonucleotide
aaacaccugaaauuaaaac

SEQ ID NO: 1561336 - RNA, 19 nt, Artificial Sequence
  Description of Artificial Sequence: Synthetic oligonucleotide
uuauugaagacagacaccg

SEQ ID NO: 1561337 - RNA, 19 nt, Artificial Sequence
  Description of Artificial Sequence: Synthetic oligonucleotide
aaagccacgucuguaaucc

SEQ ID NO: 1561338 - RNA, 19 nt, Artificial Sequence
  Description of Artificial Sequence: Synthetic oligonucleotide
uaggaaaccagacacggcg

SEQ ID NO: 1561339 - RNA, 19 nt, Artificial Sequence
  Description of Artificial Sequence: Synthetic oligonucleotide
aacucugauacacauuuuc

SEQ ID NO: 1561340 - RNA, 19 nt, Artificial Sequence
  Description of Artificial Sequence: Synthetic oligonucleotide
uaaaaguuaucacauuugc

SEQ ID NO: 1561341 - RNA, 19 nt, Artificial Sequence
  Description of Artificial Sequence: Synthetic oligonucleotide
gagcuuguuauccagaucc

SEQ ID NO: 1561342 - RNA, 19 nt, Artificial Sequence
  Description of Artificial Sequence: Synthetic oligonucleotide
aaccacguaaaauaaaagu

SEQ ID NO: 1561343 - RNA, 19 nt, Artificial Sequence
  Description of Artificial Sequence: Synthetic oligonucleotide
uaaaacuuacuuauucugc

SEQ ID NO: 1561344 - RNA, 19 nt, Artificial Sequence
  Description of Artificial Sequence: Synthetic oligonucleotide
gaagauggccuucugauag

SEQ ID NO: 1561345 - RNA, 19 nt, Artificial Sequence
  Description of Artificial Sequence: Synthetic oligonucleotide
aaacaguaaucucaucagg

SEQ ID NO: 1561346 - RNA, 19 nt, Artificial Sequence
  Description of Artificial Sequence: Synthetic oligonucleotide
uucuuguuauugaagacag

SEQ ID NO: 1561347 - RNA, 19 nt, Artificial Sequence
  Description of Artificial Sequence: Synthetic oligonucleotide
uuuucaagugcuuauacuc

SEQ ID NO: 1561348 - RNA, 19 nt, Artificial Sequence
  Description of Artificial Sequence: Synthetic oligonucleotide
uuauuucucauaauaauua

SEQ ID NO: 1561349 - RNA, 19 nt, Artificial Sequence
  Description of Artificial Sequence: Synthetic oligonucleotide
gaaacaguaaucucaucag

SEQ ID NO: 1561350 - RNA, 19 nt, Artificial Sequence
  Description of Artificial Sequence: Synthetic oligonucleotide
aacuuacuuauucugccuc

SEQ ID NO: 1561351 - RNA, 19 nt, Artificial Sequence
  Description of Artificial Sequence: Synthetic oligonucleotide
ucaggaaguguccugagcc

SEQ ID NO: 1561352 - RNA, 19 nt, Artificial Sequence
  Description of Artificial Sequence: Synthetic oligonucleotide
uuugcaguaaaacuuacuu

SEQ ID NO: 1561353 - RNA, 19 nt, Artificial Sequence
  Description of Artificial Sequence: Synthetic oligonucleotide
uauaauguccucaucuacu

SEQ ID NO: 1561354 - RNA, 19 nt, Artificial Sequence
  Description of Artificial Sequence: Synthetic oligonucleotide
uuuuauuucucauaauaau

SEQ ID NO: 1561355 - RNA, 19 nt, Artificial Sequence
  Description of Artificial Sequence: Synthetic oligonucleotide
agaaugucaucucuucagc

SEQ ID NO: 1561356 - RNA, 19 nt, Artificial Sequence
  Description of Artificial Sequence: Synthetic oligonucleotide
aagugcuuauacuccaggg

SEQ ID NO: 1561357 - RNA, 19 nt, Artificial Sequence
  Description of Artificial Sequence: Synthetic oligonucleotide
cuuguuauugaagacagac

SEQ ID NO: 1561358 - RNA, 19 nt, Artificial Sequence
  Description of Artificial Sequence: Synthetic oligonucleotide
acauagucacuguugaguc

SEQ ID NO: 1561359 - RNA, 19 nt, Artificial Sequence
  Description of Artificial Sequence: Synthetic oligonucleotide
cucguaaauauucucugcg

SEQ ID NO: 1561360 - RNA, 19 nt, Artificial Sequence
  Description of Artificial Sequence: Synthetic oligonucleotide
ugagguuccggucaaugag

SEQ ID NO: 1561361 - RNA, 19 nt, Artificial Sequence
  Description of Artificial Sequence: Synthetic oligonucleotide
ucacauuugcaguaaaacu

SEQ ID NO: 1561362 - RNA, 19 nt, Artificial Sequence
  Description of Artificial Sequence: Synthetic oligonucleotide
aaaaccacguaaaauaaaa

SEQ ID NO: 1561363 - RNA, 19 nt, Artificial Sequence
  Description of Artificial Sequence: Synthetic oligonucleotide
ucuguaauccuuucugccc

SEQ ID NO: 1561364 - RNA, 19 nt, Artificial Sequence
  Description of Artificial Sequence: Synthetic oligonucleotide
uauagggccaccugcaggc

SEQ ID NO: 1561365 - RNA, 19 nt, Artificial Sequence
  Description of Artificial Sequence: Synthetic oligonucleotide
gauguagccggugaguacg

SEQ ID NO: 1561366 - RNA, 19 nt, Artificial Sequence
  Description of Artificial Sequence: Synthetic oligonucleotide
uuauaauguccucaucuac

SEQ ID NO: 1561367 - RNA, 19 nt, Artificial Sequence
  Description of Artificial Sequence: Synthetic oligonucleotide
ucuaccacaucauaauagu

SEQ ID NO: 1561368 - RNA, 19 nt, Artificial Sequence
  Description of Artificial Sequence: Synthetic oligonucleotide
uuauacagggugacguuag

SEQ ID NO: 1561369 - RNA, 19 nt, Artificial Sequence
  Description of Artificial Sequence: Synthetic oligonucleotide
uauucugccucaaaacaga

SEQ ID NO: 1561370 - RNA, 19 nt, Artificial Sequence
  Description of Artificial Sequence: Synthetic oligonucleotide
gauacacauuuucaagugc

SEQ ID NO: 1561371 - RNA, 19 nt, Artificial Sequence
  Description of Artificial Sequence: Synthetic oligonucleotide
aaggggacaaaauaaucaa

SEQ ID NO: 1561372 - RNA, 19 nt, Artificial Sequence
  Description of Artificial Sequence: Synthetic oligonucleotide
ucugcggucccuacuauag

SEQ ID NO: 1561373 - RNA, 19 nt, Artificial Sequence
  Description of Artificial Sequence: Synthetic oligonucleotide
cacaucauaauagucgagg

SEQ ID NO: 1561374 - RNA, 19 nt, Artificial Sequence
  Description of Artificial Sequence: Synthetic oligonucleotide
aaacuuacuuauucugccu

SEQ ID NO: 1561375 - RNA, 19 nt, Artificial Sequence
  Description of Artificial Sequence: Synthetic oligonucleotide
ucuucagccaccuugcuua

SEQ ID NO: 1561376 - RNA, 19 nt, Artificial Sequence
  Description of Artificial Sequence: Synthetic oligonucleotide
gugaacacagucuugcagc

SEQ ID NO: 1561377 - RNA, 19 nt, Artificial Sequence
  Description of Artificial Sequence: Synthetic oligonucleotide
aacaguaaucucaucagga

SEQ ID NO: 1561378 - RNA, 19 nt, Artificial Sequence
  Description of Artificial Sequence: Synthetic oligonucleotide
uucucugcgaugaucuugc

SEQ ID NO: 1561379 - RNA, 19 nt, Artificial Sequence
  Description of Artificial Sequence: Synthetic oligonucleotide
ugggcuucggguuacuuag

SEQ ID NO: 1561380 - RNA, 19 nt, Artificial Sequence
  Description of Artificial Sequence: Synthetic oligonucleotide
uauuucucauaauaauuaa

SEQ ID NO: 1561381 - RNA, 19 nt, Artificial Sequence
  Description of Artificial Sequence: Synthetic oligonucleotide
uuaagaugacuuucuuugc

SEQ ID NO: 1561382 - RNA, 19 nt, Artificial Sequence
  Description of Artificial Sequence: Synthetic oligonucleotide
ucuacuucauagccacggg

SEQ ID NO: 1561383 - RNA, 19 nt, Artificial Sequence
  Description of Artificial Sequence: Synthetic oligonucleotide
uguaacugguccuuauaca

SEQ ID NO: 1561384 - RNA, 19 nt, Artificial Sequence
  Description of Artificial Sequence: Synthetic oligonucleotide
auuuucaagugcuuauacu

SEQ ID NO: 1561385 - RNA, 19 nt, Artificial Sequence
  Description of Artificial Sequence: Synthetic oligonucleotide
aggguaaggggcuucuugg

SEQ ID NO: 1561386 - RNA, 19 nt, Artificial Sequence
  Description of Artificial Sequence: Synthetic oligonucleotide
ucaaugaggcugcugugcc

SEQ ID NO: 1561387 - RNA, 19 nt, Artificial Sequence
  Description of Artificial Sequence: Synthetic oligonucleotide
cagcacucggcaaagaggc

SEQ ID NO: 1561388 - RNA, 19 nt, Artificial Sequence
  Description of Artificial Sequence: Synthetic oligonucleotide
gaaggggacaaaauaauca

SEQ ID NO: 1561389 - RNA, 19 nt, Artificial Sequence
  Description of Artificial Sequence: Synthetic oligonucleotide
ugcggucccuacuauaggg

SEQ ID NO: 1561390 - RNA, 19 nt, Artificial Sequence
  Description of Artificial Sequence: Synthetic oligonucleotide
cuuguuauccagauccuuc

SEQ ID NO: 1561391 - RNA, 19 nt, Artificial Sequence
  Description of Artificial Sequence: Synthetic oligonucleotide
augucucugagcuugauuu

SEQ ID NO: 1561392 - RNA, 19 nt, Artificial Sequence
  Description of Artificial Sequence: Synthetic oligonucleotide
caguaaaacuuacuuauuc

SEQ ID NO: 1561393 - RNA, 19 nt, Artificial Sequence
  Description of Artificial Sequence: Synthetic oligonucleotide
uguccacccgugcagagag

SEQ ID NO: 1561394 - RNA, 19 nt, Artificial Sequence
  Description of Artificial Sequence: Synthetic oligonucleotide
aucuacuucauagccacgg

SEQ ID NO: 1561395 - RNA, 19 nt, Artificial Sequence
  Description of Artificial Sequence: Synthetic oligonucleotide
auaaaaguuaucacauuug

SEQ ID NO: 1561396 - RNA, 19 nt, Artificial Sequence
  Description of Artificial Sequence: Synthetic oligonucleotide
aagaugacuuucuuugcaa

SEQ ID NO: 1561397 - RNA, 19 nt, Artificial Sequence
  Description of Artificial Sequence: Synthetic oligonucleotide
aguaaucucaucaggaagu

SEQ ID NO: 1561398 - RNA, 19 nt, Artificial Sequence
  Description of Artificial Sequence: Synthetic oligonucleotide
ugaagacagacaccgccag

SEQ ID NO: 1561399 - RNA, 19 nt, Artificial Sequence
  Description of Artificial Sequence: Synthetic oligonucleotide
aaaccacguaaaauaaaag

SEQ ID NO: 1561400 - RNA, 19 nt, Artificial Sequence
  Description of Artificial Sequence: Synthetic oligonucleotide
uccacccucguaaauauuc

SEQ ID NO: 1561401 - RNA, 19 nt, Artificial Sequence
  Description of Artificial Sequence: Synthetic oligonucleotide
uucaagugcuuauacucca

SEQ ID NO: 1561402 - RNA, 19 nt, Artificial Sequence
  Description of Artificial Sequence: Synthetic oligonucleotide
aagauggccuucugauagg

SEQ ID NO: 1561403 - RNA, 19 nt, Artificial Sequence
  Description of Artificial Sequence: Synthetic oligonucleotide
aagagcuuguuauccagau

SEQ ID NO: 1561404 - RNA, 19 nt, Artificial Sequence
  Description of Artificial Sequence: Synthetic oligonucleotide
acaucauaauagucgagga

SEQ ID NO: 1561405 - RNA, 19 nt, Artificial Sequence
  Description of Artificial Sequence: Synthetic oligonucleotide
agaugacuuucuuugcaag

SEQ ID NO: 1561406 - RNA, 19 nt, Artificial Sequence
  Description of Artificial Sequence: Synthetic oligonucleotide
guuacuuaggaaaccagac

SEQ ID NO: 1561407 - RNA, 19 nt, Artificial Sequence
  Description of Artificial Sequence: Synthetic oligonucleotide
cuacuauagggccaccugc

SEQ ID NO: 1561408 - RNA, 19 nt, Artificial Sequence
  Description of Artificial Sequence: Synthetic oligonucleotide
ucuggaggugccaggaagc

SEQ ID NO: 1561409 - RNA, 19 nt, Artificial Sequence
  Description of Artificial Sequence: Synthetic oligonucleotide
ucguaaauauucucugcga

SEQ ID NO: 1561410 - RNA, 19 nt, Artificial Sequence
  Description of Artificial Sequence: Synthetic oligonucleotide
gacagacaccgccagggcg

SEQ ID NO: 1561411 - RNA, 19 nt, Artificial Sequence
  Description of Artificial Sequence: Synthetic oligonucleotide
auaaucaaugagguuccgg

SEQ ID NO: 1561412 - RNA, 19 nt, Artificial Sequence
  Description of Artificial Sequence: Synthetic oligonucleotide
gacagugcgagccucugug

SEQ ID NO: 1561413 - RNA, 19 nt, Artificial Sequence
  Description of Artificial Sequence: Synthetic oligonucleotide
uacuauagggccaccugca

SEQ ID NO: 1561414 - RNA, 19 nt, Artificial Sequence
  Description of Artificial Sequence: Synthetic oligonucleotide
cuguaauccuuucugcccc

SEQ ID NO: 1561415 - RNA, 19 nt, Artificial Sequence
  Description of Artificial Sequence: Synthetic oligonucleotide
cagguaguaguccagcuug

SEQ ID NO: 1561416 - RNA, 19 nt, Artificial Sequence
  Description of Artificial Sequence: Synthetic oligonucleotide
uccuuauacagggugacgu

SEQ ID NO: 1561417 - RNA, 19 nt, Artificial Sequence
  Description of Artificial Sequence: Synthetic oligonucleotide
uucggguuacuuaggaaac

SEQ ID NO: 1561418 - RNA, 19 nt, Artificial Sequence
  Description of Artificial Sequence: Synthetic oligonucleotide
uuuaaaccuuuuauuucuc

SEQ ID NO: 1561419 - RNA, 19 nt, Artificial Sequence
  Description of Artificial Sequence: Synthetic oligonucleotide
cuguaacugguccuuauac

SEQ ID NO: 1561420 - RNA, 19 nt, Artificial Sequence
  Description of Artificial Sequence: Synthetic oligonucleotide
ugacguuagaggcgugggg

SEQ ID NO: 1561421 - RNA, 19 nt, Artificial Sequence
  Description of Artificial Sequence: Synthetic oligonucleotide
uaucacauuugcaguaaaa

SEQ ID NO: 1561422 - RNA, 19 nt, Artificial Sequence
  Description of Artificial Sequence: Synthetic oligonucleotide
gacacggcguuuaagauga

SEQ ID NO: 1561423 - RNA, 19 nt, Artificial Sequence
  Description of Artificial Sequence: Synthetic oligonucleotide
gaguacgccggccagggcc

SEQ ID NO: 1561424 - RNA, 19 nt, Artificial Sequence
  Description of Artificial Sequence: Synthetic oligonucleotide
gucuaccacaucauaauag

SEQ ID NO: 1561425 - RNA, 19 nt, Artificial Sequence
  Description of Artificial Sequence: Synthetic oligonucleotide
aguuaucacauuugcagua

SEQ ID NO: 1561426 - RNA, 19 nt, Artificial Sequence
  Description of Artificial Sequence: Synthetic oligonucleotide
agacacggcguuuaagaug

SEQ ID NO: 1561427 - RNA, 19 nt, Artificial Sequence
  Description of Artificial Sequence: Synthetic oligonucleotide
agauguagccggugaguac

SEQ ID NO: 1561428 - RNA, 19 nt, Artificial Sequence
  Description of Artificial Sequence: Synthetic oligonucleotide
gucacuguugaguccaccc

SEQ ID NO: 1561429 - RNA, 19 nt, Artificial Sequence
  Description of Artificial Sequence: Synthetic oligonucleotide
ugauggguuccaccgcacg

SEQ ID NO: 1561430 - RNA, 19 nt, Artificial Sequence
  Description of Artificial Sequence: Synthetic oligonucleotide
caccuugcuuauaaugucc

SEQ ID NO: 1561431 - RNA, 19 nt, Artificial Sequence
  Description of Artificial Sequence: Synthetic oligonucleotide
auaggagaccucgucuacc

SEQ ID NO: 1561432 - RNA, 19 nt, Artificial Sequence
  Description of Artificial Sequence: Synthetic oligonucleotide
gaagaaugucaucucuuca

SEQ ID NO: 1561433 - RNA, 19 nt, Artificial Sequence
  Description of Artificial Sequence: Synthetic oligonucleotide
acaguaaucucaucaggaa

SEQ ID NO: 1561434 - RNA, 19 nt, Artificial Sequence
  Description of Artificial Sequence: Synthetic oligonucleotide
auagucacuguugagucca

SEQ ID NO: 1561435 - RNA, 19 nt, Artificial Sequence
  Description of Artificial Sequence: Synthetic oligonucleotide
ucucaacucugauacacau

SEQ ID NO: 1561436 - RNA, 19 nt, Artificial Sequence
  Description of Artificial Sequence: Synthetic oligonucleotide
ggcucagucguccagguag

SEQ ID NO: 1561437 - RNA, 19 nt, Artificial Sequence
  Description of Artificial Sequence: Synthetic oligonucleotide
cuagcuucaugcccggacc

SEQ ID NO: 1561438 - RNA, 19 nt, Artificial Sequence
  Description of Artificial Sequence: Synthetic oligonucleotide
aagcuuugggucccuguug

SEQ ID NO: 1561439 - RNA, 19 nt, Artificial Sequence
  Description of Artificial Sequence: Synthetic oligonucleotide
auacacauuuucaagugcu

SEQ ID NO: 1561440 - RNA, 19 nt, Artificial Sequence
  Description of Artificial Sequence: Synthetic oligonucleotide
guugaguccacccucguaa

SEQ ID NO: 1561441 - RNA, 19 nt, Artificial Sequence
  Description of Artificial Sequence: Synthetic oligonucleotide
cuauagggccaccugcagg

SEQ ID NO: 1561442 - RNA, 19 nt, Artificial Sequence
  Description of Artificial Sequence: Synthetic oligonucleotide
aagaaggggacaaaauaau

SEQ ID NO: 1561443 - RNA, 19 nt, Artificial Sequence
  Description of Artificial Sequence: Synthetic oligonucleotide
uauugaagacagacaccgc

SEQ ID NO: 1561444 - RNA, 19 nt, Artificial Sequence
  Description of Artificial Sequence: Synthetic oligonucleotide
accacguaaaauaaaaguu

SEQ ID NO: 1561445 - RNA, 19 nt, Artificial Sequence
  Description of Artificial Sequence: Synthetic oligonucleotide
ugauaggagaccucgucua

SEQ ID NO: 1561446 - RNA, 19 nt, Artificial Sequence
  Description of Artificial Sequence: Synthetic oligonucleotide
ucgucuaccacaucauaau

SEQ ID NO: 1561447 - RNA, 19 nt, Artificial Sequence
  Description of Artificial Sequence: Synthetic oligonucleotide
cuucggguuacuuaggaaa

SEQ ID NO: 1561448 - RNA, 19 nt, Artificial Sequence
  Description of Artificial Sequence: Synthetic oligonucleotide
acuuacuuauucugccuca

SEQ ID NO: 1561449 - RNA, 19 nt, Artificial Sequence
  Description of Artificial Sequence: Synthetic oligonucleotide
ugguccuuauacaggguga

SEQ ID NO: 1561450 - RNA, 19 nt, Artificial Sequence
  Description of Artificial Sequence: Synthetic oligonucleotide
cauagucacuguugagucc

SEQ ID NO: 1561451 - RNA, 19 nt, Artificial Sequence
  Description of Artificial Sequence: Synthetic oligonucleotide
uggccuucugauaggagac

SEQ ID NO: 1561452 - RNA, 19 nt, Artificial Sequence
  Description of Artificial Sequence: Synthetic oligonucleotide
ggggacaaaauaaucaaug

SEQ ID NO: 1561453 - RNA, 19 nt, Artificial Sequence
  Description of Artificial Sequence: Synthetic oligonucleotide
gguuccaccgcacgaaccg

SEQ ID NO: 1561454 - RNA, 19 nt, Artificial Sequence
  Description of Artificial Sequence: Synthetic oligonucleotide
ggguaggagauguagccgg

SEQ ID NO: 1561455 - RNA, 19 nt, Artificial Sequence
  Description of Artificial Sequence: Synthetic oligonucleotide
guaguaguccagcuuggug

SEQ ID NO: 1561456 - RNA, 19 nt, Artificial Sequence
  Description of Artificial Sequence: Synthetic oligonucleotide
guagccggugaguacgccg

SEQ ID NO: 1561457 - RNA, 19 nt, Artificial Sequence
  Description of Artificial Sequence: Synthetic oligonucleotide
uugcuuauaauguccucau

SEQ ID NO: 1561458 - RNA, 19 nt, Artificial Sequence
  Description of Artificial Sequence: Synthetic oligonucleotide
uuauacuccaggggcaaga

SEQ ID NO: 1561459 - RNA, 19 nt, Artificial Sequence
  Description of Artificial Sequence: Synthetic oligonucleotide
cacccgugcagagagaggg

SEQ ID NO: 1561460 - RNA, 19 nt, Artificial Sequence
  Description of Artificial Sequence: Synthetic oligonucleotide
ggugaacacagucuugcag

SEQ ID NO: 1561461 - RNA, 19 nt, Artificial Sequence
  Description of Artificial Sequence: Synthetic oligonucleotide
gauaggagaccucgucuac

SEQ ID NO: 1561462 - RNA, 19 nt, Artificial Sequence
  Description of Artificial Sequence: Synthetic oligonucleotide
cauuugcaguaaaacuuac

SEQ ID NO: 1561463 - RNA, 19 nt, Artificial Sequence
  Description of Artificial Sequence: Synthetic oligonucleotide
uggccugacagugcgagcc

SEQ ID NO: 1561464 - RNA, 19 nt, Artificial Sequence
  Description of Artificial Sequence: Synthetic oligonucleotide
ugcagcccuuaucagagaa

SEQ ID NO: 1561465 - RNA, 19 nt, Artificial Sequence
  Description of Artificial Sequence: Synthetic oligonucleotide
acuauagggccaccugcag

SEQ ID NO: 1561466 - RNA, 19 nt, Artificial Sequence
  Description of Artificial Sequence: Synthetic oligonucleotide
acguaaaauaaaaguuauc

SEQ ID NO: 1561467 - RNA, 19 nt, Artificial Sequence
  Description of Artificial Sequence: Synthetic oligonucleotide
cuaccacaucauaauaguc

SEQ ID NO: 1561468 - RNA, 19 nt, Artificial Sequence
  Description of Artificial Sequence: Synthetic oligonucleotide
aggagauguagccggugag

SEQ ID NO: 1561469 - RNA, 19 nt, Artificial Sequence
  Description of Artificial Sequence: Synthetic oligonucleotide
ucuguaacugguccuuaua

SEQ ID NO: 1561470 - RNA, 19 nt, Artificial Sequence
  Description of Artificial Sequence: Synthetic oligonucleotide
ugccaggaagcuuuggguc

SEQ ID NO: 1561471 - RNA, 19 nt, Artificial Sequence
  Description of Artificial Sequence: Synthetic oligonucleotide
cuuauaauguccucaucua

SEQ ID NO: 1561472 - RNA, 19 nt, Artificial Sequence
  Description of Artificial Sequence: Synthetic oligonucleotide
ucuuguuauugaagacaga

SEQ ID NO: 1561473 - RNA, 19 nt, Artificial Sequence
  Description of Artificial Sequence: Synthetic oligonucleotide
agcuuugggucccuguugu

SEQ ID NO: 1561474 - RNA, 19 nt, Artificial Sequence
  Description of Artificial Sequence: Synthetic oligonucleotide
uauacagggugacguuaga

SEQ ID NO: 1561475 - RNA, 19 nt, Artificial Sequence
  Description of Artificial Sequence: Synthetic oligonucleotide
gaaacaccugaaauuaaaa

SEQ ID NO: 1561476 - RNA, 19 nt, Artificial Sequence
  Description of Artificial Sequence: Synthetic oligonucleotide
cagggugacguuagaggcg

SEQ ID NO: 1561477 - RNA, 19 nt, Artificial Sequence
  Description of Artificial Sequence: Synthetic oligonucleotide
ucagucguccagguaguag

SEQ ID NO: 1561478 - RNA, 19 nt, Artificial Sequence
  Description of Artificial Sequence: Synthetic oligonucleotide
gcuuauaauguccucaucu

SEQ ID NO: 1561479 - RNA, 19 nt, Artificial Sequence
  Description of Artificial Sequence: Synthetic oligonucleotide
ucaugagccugggaauggg

SEQ ID NO: 1561480 - RNA, 19 nt, Artificial Sequence
  Description of Artificial Sequence: Synthetic oligonucleotide
cacauuugcaguaaaacuu

SEQ ID NO: 1561481 - RNA, 19 nt, Artificial Sequence
  Description of Artificial Sequence: Synthetic oligonucleotide
auacagggugacguuagag

SEQ ID NO: 1561482 - RNA, 19 nt, Artificial Sequence
  Description of Artificial Sequence: Synthetic oligonucleotide
uuacuuauucugccucaaa

SEQ ID NO: 1561483 - RNA, 19 nt, Artificial Sequence
  Description of Artificial Sequence: Synthetic oligonucleotide
gggacaaaauaaucaauga

SEQ ID NO: 1561484 - RNA, 19 nt, Artificial Sequence
  Description of Artificial Sequence: Synthetic oligonucleotide
uccacccgugcagagagag

SEQ ID NO: 1561485 - RNA, 19 nt, Artificial Sequence
  Description of Artificial Sequence: Synthetic oligonucleotide
ugucaucucuucagccacc

SEQ ID NO: 1561486 - RNA, 19 nt, Artificial Sequence
  Description of Artificial Sequence: Synthetic oligonucleotide
gaugaucuugcuggcgaag

SEQ ID NO: 1561487 - RNA, 19 nt, Artificial Sequence
  Description of Artificial Sequence: Synthetic oligonucleotide
agguuccggucaaugaggc

SEQ ID NO: 1561488 - RNA, 19 nt, Artificial Sequence
  Description of Artificial Sequence: Synthetic oligonucleotide
uuuugcccgugccugucca

SEQ ID NO: 1561489 - RNA, 19 nt, Artificial Sequence
  Description of Artificial Sequence: Synthetic oligonucleotide
aguggccugacagugcgag

SEQ ID NO: 1561490 - RNA, 19 nt, Artificial Sequence
  Description of Artificial Sequence: Synthetic oligonucleotide
guaaucucaucaggaagug

SEQ ID NO: 1561491 - RNA, 19 nt, Artificial Sequence
  Description of Artificial Sequence: Synthetic oligonucleotide
gauggguuccaccgcacga

SEQ ID NO: 1561492 - RNA, 19 nt, Artificial Sequence
  Description of Artificial Sequence: Synthetic oligonucleotide
ucccuguugugucugcggu

SEQ ID NO: 1561493 - RNA, 19 nt, Artificial Sequence
  Description of Artificial Sequence: Synthetic oligonucleotide
aguccacccucguaaauau

SEQ ID NO: 1561494 - RNA, 19 nt, Artificial Sequence
  Description of Artificial Sequence: Synthetic oligonucleotide
ugaggcccggccuagcuuc

SEQ ID NO: 1561495 - RNA, 19 nt, Artificial Sequence
  Description of Artificial Sequence: Synthetic oligonucleotide
ccucaucuacuucauagcc

SEQ ID NO: 1561496 - RNA, 19 nt, Artificial Sequence
  Description of Artificial Sequence: Synthetic oligonucleotide
aggaaguguccugagccuc

SEQ ID NO: 1561497 - RNA, 19 nt, Artificial Sequence
  Description of Artificial Sequence: Synthetic oligonucleotide
uguaauccuuucugcccca

SEQ ID NO: 1561498 - RNA, 19 nt, Artificial Sequence
  Description of Artificial Sequence: Synthetic oligonucleotide
ugggaaguuucauccucug

SEQ ID NO: 1561499 - RNA, 19 nt, Artificial Sequence
  Description of Artificial Sequence: Synthetic oligonucleotide
cccacuuuuccagaaaucc

SEQ ID NO: 1561500 - RNA, 19 nt, Artificial Sequence
  Description of Artificial Sequence: Synthetic oligonucleotide
ugcgaugaucuugcuggcg

SEQ ID NO: 1561501 - RNA, 19 nt, Artificial Sequence
  Description of Artificial Sequence: Synthetic oligonucleotide
cucgucuaccacaucauaa

SEQ ID NO: 1561502 - RNA, 19 nt, Artificial Sequence
  Description of Artificial Sequence: Synthetic oligonucleotide
uucugauaggagaccucgu

SEQ ID NO: 1561503 - RNA, 19 nt, Artificial Sequence
  Description of Artificial Sequence: Synthetic oligonucleotide
acauuugcaguaaaacuua

SEQ ID NO: 1561504 - RNA, 19 nt, Artificial Sequence
  Description of Artificial Sequence: Synthetic oligonucleotide
ugcuuauaauguccucauc

SEQ ID NO: 1561505 - RNA, 19 nt, Artificial Sequence
  Description of Artificial Sequence: Synthetic oligonucleotide
ucggguuacuuaggaaacc

SEQ ID NO: 1561506 - RNA, 19 nt, Artificial Sequence
  Description of Artificial Sequence: Synthetic oligonucleotide
cccuuaucagagaagacuc

SEQ ID NO: 1561507 - RNA, 19 nt, Artificial Sequence
  Description of Artificial Sequence: Synthetic oligonucleotide
ucccacuuuuccagaaauc

SEQ ID NO: 1561508 - RNA, 19 nt, Artificial Sequence
  Description of Artificial Sequence: Synthetic oligonucleotide
gugaguacgccggccaggg

SEQ ID NO: 1561509 - RNA, 19 nt, Artificial Sequence
  Description of Artificial Sequence: Synthetic oligonucleotide
caucauaauagucgaggaa

SEQ ID NO: 1561510 - RNA, 19 nt, Artificial Sequence
  Description of Artificial Sequence: Synthetic oligonucleotide
gguaaggggcuucuugggc

SEQ ID NO: 1561511 - RNA, 19 nt, Artificial Sequence
  Description of Artificial Sequence: Synthetic oligonucleotide
cagcuuggugaacacaguc

SEQ ID NO: 1561512 - RNA, 19 nt, Artificial Sequence
  Description of Artificial Sequence: Synthetic oligonucleotide
gcacgaaccgcgcacggcg

SEQ ID NO: 1561513 - RNA, 19 nt, Artificial Sequence
  Description of Artificial Sequence: Synthetic oligonucleotide
aaaccagacacggcguuua

SEQ ID NO: 1561514 - RNA, 19 nt, Artificial Sequence
  Description of Artificial Sequence: Synthetic oligonucleotide
acgggacugcaucucaacu

SEQ ID NO: 1561515 - RNA, 19 nt, Artificial Sequence
  Description of Artificial Sequence: Synthetic oligonucleotide
gaggcaguagaggcgcggg

SEQ ID NO: 1561516 - RNA, 19 nt, Artificial Sequence
  Description of Artificial Sequence: Synthetic oligonucleotide
gugacguuagaggcguggg

SEQ ID NO: 1561517 - RNA, 19 nt, Artificial Sequence
  Description of Artificial Sequence: Synthetic oligonucleotide
uguugaguccacccucgua

SEQ ID NO: 1561518 - RNA, 19 nt, Artificial Sequence
  Description of Artificial Sequence: Synthetic oligonucleotide
uugggcuucggguuacuua

SEQ ID NO: 1561519 - RNA, 19 nt, Artificial Sequence
  Description of Artificial Sequence: Synthetic oligonucleotide
gucccuguugugucugcgg

SEQ ID NO: 1561520 - RNA, 19 nt, Artificial Sequence
  Description of Artificial Sequence: Synthetic oligonucleotide
agugcgagccucuguggca

SEQ ID NO: 1561521 - RNA, 19 nt, Artificial Sequence
  Description of Artificial Sequence: Synthetic oligonucleotide
acccucguaaauauucucu

SEQ ID NO: 1561522 - RNA, 19 nt, Artificial Sequence
  Description of Artificial Sequence: Synthetic oligonucleotide
uagaggcgcggguaggaga

SEQ ID NO: 1561523 - RNA, 19 nt, Artificial Sequence
  Description of Artificial Sequence: Synthetic oligonucleotide
uaaucucaucaggaagugu

SEQ ID NO: 1561524 - RNA, 19 nt, Artificial Sequence
  Description of Artificial Sequence: Synthetic oligonucleotide
cuucaugcccggacccgcg

SEQ ID NO: 1561525 - RNA, 19 nt, Artificial Sequence
  Description of Artificial Sequence: Synthetic oligonucleotide
caucuacuucauagccacg

SEQ ID NO: 1561526 - RNA, 19 nt, Artificial Sequence
  Description of Artificial Sequence: Synthetic oligonucleotide
augaucuugcuggcgaagu

SEQ ID NO: 1561527 - RNA, 19 nt, Artificial Sequence
  Description of Artificial Sequence: Synthetic oligonucleotide
ugaucuugcuggcgaaguu

SEQ ID NO: 1561528 - RNA, 19 nt, Artificial Sequence
  Description of Artificial Sequence: Synthetic oligonucleotide
uauacuccaggggcaagaa

SEQ ID NO: 1561529 - RNA, 19 nt, Artificial Sequence
  Description of Artificial Sequence: Synthetic oligonucleotide
gguuacuuaggaaaccaga

SEQ ID NO: 1561530 - RNA, 19 nt, Artificial Sequence
  Description of Artificial Sequence: Synthetic oligonucleotide
aucuguaacugguccuuau

SEQ ID NO: 1561531 - RNA, 19 nt, Artificial Sequence
  Description of Artificial Sequence: Synthetic oligonucleotide
uucuggccgcagcacucgg

SEQ ID NO: 1561532 - RNA, 19 nt, Artificial Sequence
  Description of Artificial Sequence: Synthetic oligonucleotide
ucaugcccggacccgcgcc

SEQ ID NO: 1561533 - RNA, 19 nt, Artificial Sequence
  Description of Artificial Sequence: Synthetic oligonucleotide
acggcguuuaagaugacuu

SEQ ID NO: 1561534 - RNA, 19 nt, Artificial Sequence
  Description of Artificial Sequence: Synthetic oligonucleotide
ggguaaggggcuucuuggg

SEQ ID NO: 1561535 - RNA, 19 nt, Artificial Sequence
  Description of Artificial Sequence: Synthetic oligonucleotide
agaggcaguagaggcgcgg

SEQ ID NO: 1561536 - RNA, 19 nt, Artificial Sequence
  Description of Artificial Sequence: Synthetic oligonucleotide
uucaugcccggacccgcgc

SEQ ID NO: 1561537 - RNA, 19 nt, Artificial Sequence
  Description of Artificial Sequence: Synthetic oligonucleotide
accuuuuauuucucauaau

SEQ ID NO: 1561538 - RNA, 19 nt, Artificial Sequence
  Description of Artificial Sequence: Synthetic oligonucleotide
guaaggggcuucuugggcu

SEQ ID NO: 1561539 - RNA, 19 nt, Artificial Sequence
  Description of Artificial Sequence: Synthetic oligonucleotide
uggguuccaccgcacgaac

SEQ ID NO: 1561540 - RNA, 19 nt, Artificial Sequence
  Description of Artificial Sequence: Synthetic oligonucleotide
ugaguccacccucguaaau

SEQ ID NO: 1561541 - RNA, 19 nt, Artificial Sequence
  Description of Artificial Sequence: Synthetic oligonucleotide
ggugacguuagaggcgugg

SEQ ID NO: 1561542 - RNA, 19 nt, Artificial Sequence
  Description of Artificial Sequence: Synthetic oligonucleotide
guccuuauacagggugacg

SEQ ID NO: 1561543 - RNA, 19 nt, Artificial Sequence
  Description of Artificial Sequence: Synthetic oligonucleotide
ccacguaaaauaaaaguua

SEQ ID NO: 1561544 - RNA, 19 nt, Artificial Sequence
  Description of Artificial Sequence: Synthetic oligonucleotide
gacugcaucucaacucuga

SEQ ID NO: 1561545 - RNA, 19 nt, Artificial Sequence
  Description of Artificial Sequence: Synthetic oligonucleotide
agucguccagguaguaguc

SEQ ID NO: 1561546 - RNA, 19 nt, Artificial Sequence
  Description of Artificial Sequence: Synthetic oligonucleotide
agguaguaguccagcuugg

SEQ ID NO: 1561547 - RNA, 19 nt, Artificial Sequence
  Description of Artificial Sequence: Synthetic oligonucleotide
cuguggcagggcucagucg

SEQ ID NO: 1561548 - RNA, 19 nt, Artificial Sequence
  Description of Artificial Sequence: Synthetic oligonucleotide
cacccucguaaauauucuc

SEQ ID NO: 1561549 - RNA, 19 nt, Artificial Sequence
  Description of Artificial Sequence: Synthetic oligonucleotide
gagauguagccggugagua

SEQ ID NO: 1561550 - RNA, 19 nt, Artificial Sequence
  Description of Artificial Sequence: Synthetic oligonucleotide
accuugcuuauaauguccu

SEQ ID NO: 1561551 - RNA, 19 nt, Artificial Sequence
  Description of Artificial Sequence: Synthetic oligonucleotide
cugccucaaaacagaaaca

SEQ ID NO: 1561552 - RNA, 19 nt, Artificial Sequence
  Description of Artificial Sequence: Synthetic oligonucleotide
agcuucaugcccggacccg

SEQ ID NO: 1561553 - RNA, 19 nt, Artificial Sequence
  Description of Artificial Sequence: Synthetic oligonucleotide
agggcgugcuccaugucuc

SEQ ID NO: 1561554 - RNA, 19 nt, Artificial Sequence
  Description of Artificial Sequence: Synthetic oligonucleotide
cugcggucccuacuauagg

SEQ ID NO: 1561555 - RNA, 19 nt, Artificial Sequence
  Description of Artificial Sequence: Synthetic oligonucleotide
cuucuggccgcagcacucg

SEQ ID NO: 1561556 - RNA, 19 nt, Artificial Sequence
  Description of Artificial Sequence: Synthetic oligonucleotide
ggagaccucgucuaccaca

SEQ ID NO: 1561557 - RNA, 19 nt, Artificial Sequence
  Description of Artificial Sequence: Synthetic oligonucleotide
cacgggacugcaucucaac

SEQ ID NO: 1561558 - RNA, 19 nt, Artificial Sequence
  Description of Artificial Sequence: Synthetic oligonucleotide
ggcguuuaagaugacuuuc

SEQ ID NO: 1561559 - RNA, 19 nt, Artificial Sequence
  Description of Artificial Sequence: Synthetic oligonucleotide
agcccuuaucagagaagac

SEQ ID NO: 1561560 - RNA, 19 nt, Artificial Sequence
  Description of Artificial Sequence: Synthetic oligonucleotide
aagccacgucuguaauccu

SEQ ID NO: 1561561 - RNA, 19 nt, Artificial Sequence
  Description of Artificial Sequence: Synthetic oligonucleotide
uagccacgggacugcaucu

SEQ ID NO: 1561562 - RNA, 19 nt, Artificial Sequence
  Description of Artificial Sequence: Synthetic oligonucleotide
cuuauacagggugacguua

SEQ ID NO: 1561563 - RNA, 19 nt, Artificial Sequence
  Description of Artificial Sequence: Synthetic oligonucleotide
aguagaggcgcggguagga

SEQ ID NO: 1561564 - RNA, 19 nt, Artificial Sequence
  Description of Artificial Sequence: Synthetic oligonucleotide
caugcccggacccgcgccg

SEQ ID NO: 1561565 - RNA, 19 nt, Artificial Sequence
  Description of Artificial Sequence: Synthetic oligonucleotide
uugggucccuguugugucu

SEQ ID NO: 1561566 - RNA, 19 nt, Artificial Sequence
  Description of Artificial Sequence: Synthetic oligonucleotide
cacauuuucaagugcuuau

SEQ ID NO: 1561567 - RNA, 19 nt, Artificial Sequence
  Description of Artificial Sequence: Synthetic oligonucleotide
uguugugucugcggucccu

SEQ ID NO: 1561568 - RNA, 19 nt, Artificial Sequence
  Description of Artificial Sequence: Synthetic oligonucleotide
gacccgcgccgcuugcgcg

SEQ ID NO: 1561569 - RNA, 19 nt, Artificial Sequence
  Description of Artificial Sequence: Synthetic oligonucleotide
uaaggggcuucuugggcuu

SEQ ID NO: 1561570 - RNA, 19 nt, Artificial Sequence
  Description of Artificial Sequence: Synthetic oligonucleotide
cugcgaugaucuugcuggc

SEQ ID NO: 1561571 - RNA, 19 nt, Artificial Sequence
  Description of Artificial Sequence: Synthetic oligonucleotide
gaguccacccucguaaaua

SEQ ID NO: 1561572 - RNA, 19 nt, Artificial Sequence
  Description of Artificial Sequence: Synthetic oligonucleotide
ggaagugcagcguggccac

SEQ ID NO: 1561573 - RNA, 19 nt, Artificial Sequence
  Description of Artificial Sequence: Synthetic oligonucleotide
ggaaugggcaggcugggaa

SEQ ID NO: 1561574 - RNA, 19 nt, Artificial Sequence
  Description of Artificial Sequence: Synthetic oligonucleotide
accagacacggcguuuaag

SEQ ID NO: 1561575 - RNA, 19 nt, Artificial Sequence
  Description of Artificial Sequence: Synthetic oligonucleotide
aggggacaaaauaaucaau

SEQ ID NO: 1561576 - RNA, 19 nt, Artificial Sequence
  Description of Artificial Sequence: Synthetic oligonucleotide
uugcccgugccuguccacc

SEQ ID NO: 1561577 - RNA, 19 nt, Artificial Sequence
  Description of Artificial Sequence: Synthetic oligonucleotide
caaaauaaucaaugagguu

SEQ ID NO: 1561578 - RNA, 19 nt, Artificial Sequence
  Description of Artificial Sequence: Synthetic oligonucleotide
accgcacgaaccgcgcacg

SEQ ID NO: 1561579 - RNA, 19 nt, Artificial Sequence
  Description of Artificial Sequence: Synthetic oligonucleotide
gcgaugaucuugcuggcga

SEQ ID NO: 1561580 - RNA, 19 nt, Artificial Sequence
  Description of Artificial Sequence: Synthetic oligonucleotide
cugauggguuccaccgcac

SEQ ID NO: 1561581 - RNA, 19 nt, Artificial Sequence
  Description of Artificial Sequence: Synthetic oligonucleotide
cacgaaccgcgcacggcgc

SEQ ID NO: 1561582 - RNA, 19 nt, Artificial Sequence
  Description of Artificial Sequence: Synthetic oligonucleotide
ccuagcuucaugcccggac

SEQ ID NO: 1561583 - RNA, 19 nt, Artificial Sequence
  Description of Artificial Sequence: Synthetic oligonucleotide
uguagccggugaguacgcc

SEQ ID NO: 1561584 - RNA, 19 nt, Artificial Sequence
  Description of Artificial Sequence: Synthetic oligonucleotide
ugcccgugccuguccaccc

SEQ ID NO: 1561585 - RNA, 19 nt, Artificial Sequence
  Description of Artificial Sequence: Synthetic oligonucleotide
gucguccagguaguagucc

SEQ ID NO: 1561586 - RNA, 19 nt, Artificial Sequence
  Description of Artificial Sequence: Synthetic oligonucleotide
aggaaaccagacacggcgu

SEQ ID NO: 1561587 - RNA, 19 nt, Artificial Sequence
  Description of Artificial Sequence: Synthetic oligonucleotide
gucccuacuauagggccac

SEQ ID NO: 1561588 - RNA, 19 nt, Artificial Sequence
  Description of Artificial Sequence: Synthetic oligonucleotide
ugaguacgccggccagggc

SEQ ID NO: 1561589 - RNA, 19 nt, Artificial Sequence
  Description of Artificial Sequence: Synthetic oligonucleotide
guagaggcgcggguaggag

SEQ ID NO: 1561590 - RNA, 19 nt, Artificial Sequence
  Description of Artificial Sequence: Synthetic oligonucleotide
cgucuguaauccuuucugc

SEQ ID NO: 1561591 - RNA, 19 nt, Artificial Sequence
  Description of Artificial Sequence: Synthetic oligonucleotide
ugucugcggucccuacuau

SEQ ID NO: 1561592 - RNA, 19 nt, Artificial Sequence
  Description of Artificial Sequence: Synthetic oligonucleotide
ggguuacuuaggaaaccag

SEQ ID NO: 1561593 - RNA, 19 nt, Artificial Sequence
  Description of Artificial Sequence: Synthetic oligonucleotide
uuugcccgugccuguccac

SEQ ID NO: 1561594 - RNA, 19 nt, Artificial Sequence
  Description of Artificial Sequence: Synthetic oligonucleotide
cuuacuuauucugccucaa

SEQ ID NO: 1561595 - RNA, 19 nt, Artificial Sequence
  Description of Artificial Sequence: Synthetic oligonucleotide
auggguuccaccgcacgaa

SEQ ID NO: 1561596 - RNA, 19 nt, Artificial Sequence
  Description of Artificial Sequence: Synthetic oligonucleotide
uagucacuguugaguccac

SEQ ID NO: 1561597 - RNA, 19 nt, Artificial Sequence
  Description of Artificial Sequence: Synthetic oligonucleotide
gguccuuauacagggugac

SEQ ID NO: 1561598 - RNA, 19 nt, Artificial Sequence
  Description of Artificial Sequence: Synthetic oligonucleotide
ggugaguacgccggccagg

SEQ ID NO: 1561599 - RNA, 19 nt, Artificial Sequence
  Description of Artificial Sequence: Synthetic oligonucleotide
gggaagugcagcguggcca

SEQ ID NO: 1561600 - RNA, 19 nt, Artificial Sequence
  Description of Artificial Sequence: Synthetic oligonucleotide
gugucugcggucccuacua

SEQ ID NO: 1561601 - RNA, 19 nt, Artificial Sequence
  Description of Artificial Sequence: Synthetic oligonucleotide
caccgcacgaaccgcgcac

SEQ ID NO: 1561602 - RNA, 19 nt, Artificial Sequence
  Description of Artificial Sequence: Synthetic oligonucleotide
agaggcgcggguaggagau

SEQ ID NO: 1561603 - RNA, 19 nt, Artificial Sequence
  Description of Artificial Sequence: Synthetic oligonucleotide
uucuugggcuucggguuac

SEQ ID NO: 1561604 - RNA, 19 nt, Artificial Sequence
  Description of Artificial Sequence: Synthetic oligonucleotide
gugcagcguggccacaaac

SEQ ID NO: 1561605 - RNA, 19 nt, Artificial Sequence
  Description of Artificial Sequence: Synthetic oligonucleotide
aucuugcuggcgaaguuuu

SEQ ID NO: 1561606 - RNA, 19 nt, Artificial Sequence
  Description of Artificial Sequence: Synthetic oligonucleotide
gggacugcaucucaacucu

SEQ ID NO: 1561607 - RNA, 19 nt, Artificial Sequence
  Description of Artificial Sequence: Synthetic oligonucleotide
agccacgggacugcaucuc

SEQ ID NO: 1561608 - RNA, 19 nt, Artificial Sequence
  Description of Artificial Sequence: Synthetic oligonucleotide
aggcaguagaggcgcgggu

SEQ ID NO: 1561609 - RNA, 19 nt, Artificial Sequence
  Description of Artificial Sequence: Synthetic oligonucleotide
ccacaucauaauagucgag

SEQ ID NO: 1561610 - RNA, 19 nt, Artificial Sequence
  Description of Artificial Sequence: Synthetic oligonucleotide
aguacgccggccagggcca

SEQ ID NO: 1561611 - RNA, 19 nt, Artificial Sequence
  Description of Artificial Sequence: Synthetic oligonucleotide
ggcuucggguuacuuagga

SEQ ID NO: 1561612 - RNA, 19 nt, Artificial Sequence
  Description of Artificial Sequence: Synthetic oligonucleotide
gaucuugcuggcgaaguuu

SEQ ID NO: 1561613 - RNA, 19 nt, Artificial Sequence
  Description of Artificial Sequence: Synthetic oligonucleotide
guuccaccgcacgaaccgc

SEQ ID NO: 1561614 - RNA, 19 nt, Artificial Sequence
  Description of Artificial Sequence: Synthetic oligonucleotide
cggccuagcuucaugcccg

SEQ ID NO: 1561615 - RNA, 19 nt, Artificial Sequence
  Description of Artificial Sequence: Synthetic oligonucleotide
gcucugaggagcagaaaca

SEQ ID NO: 1561616 - RNA, 19 nt, Artificial Sequence
  Description of Artificial Sequence: Synthetic oligonucleotide
accgccagggcgugcucca

SEQ ID NO: 1561617 - RNA, 19 nt, Artificial Sequence
  Description of Artificial Sequence: Synthetic oligonucleotide
aggcgcggguaggagaugu

SEQ ID NO: 1561618 - RNA, 19 nt, Artificial Sequence
  Description of Artificial Sequence: Synthetic oligonucleotide
gcccggccuagcuucaugc

SEQ ID NO: 1561619 - RNA, 19 nt, Artificial Sequence
  Description of Artificial Sequence: Synthetic oligonucleotide
gagaccucgucuaccacau

SEQ ID NO: 1561620 - RNA, 19 nt, Artificial Sequence
  Description of Artificial Sequence: Synthetic oligonucleotide
guggccugacagugcgagc

SEQ ID NO: 1561621 - RNA, 19 nt, Artificial Sequence
  Description of Artificial Sequence: Synthetic oligonucleotide
ggucccuguugugucugcg

SEQ ID NO: 1561622 - RNA, 19 nt, Artificial Sequence
  Description of Artificial Sequence: Synthetic oligonucleotide
gaaccgcgcacggcgccag

SEQ ID NO: 1561623 - RNA, 19 nt, Artificial Sequence
  Description of Artificial Sequence: Synthetic oligonucleotide
cggucccuacuauagggcc

SEQ ID NO: 1561624 - RNA, 19 nt, Artificial Sequence
  Description of Artificial Sequence: Synthetic oligonucleotide
agccucuguggcagggcuc

SEQ ID NO: 1561625 - RNA, 19 nt, Artificial Sequence
  Description of Artificial Sequence: Synthetic oligonucleotide
ccuugcuuauaauguccuc

SEQ ID NO: 1561626 - RNA, 19 nt, Artificial Sequence
  Description of Artificial Sequence: Synthetic oligonucleotide
caggaaguguccugagccu

SEQ ID NO: 1561627 - RNA, 19 nt, Artificial Sequence
  Description of Artificial Sequence: Synthetic oligonucleotide
gcagggcucagucguccag

SEQ ID NO: 1561628 - RNA, 19 nt, Artificial Sequence
  Description of Artificial Sequence: Synthetic oligonucleotide
cgggacugcaucucaacuc

SEQ ID NO: 1561629 - RNA, 19 nt, Artificial Sequence
  Description of Artificial Sequence: Synthetic oligonucleotide
ucccucugcuucccacuuu

SEQ ID NO: 1561630 - RNA, 19 nt, Artificial Sequence
  Description of Artificial Sequence: Synthetic oligonucleotide
cacgucuguaauccuuucu

SEQ ID NO: 1561631 - RNA, 19 nt, Artificial Sequence
  Description of Artificial Sequence: Synthetic oligonucleotide
uggaggugccaggaagcuu

SEQ ID NO: 1561632 - RNA, 19 nt, Artificial Sequence
  Description of Artificial Sequence: Synthetic oligonucleotide
gcuucaugcccggacccgc

SEQ ID NO: 1561633 - RNA, 19 nt, Artificial Sequence
  Description of Artificial Sequence: Synthetic oligonucleotide
acaccgccagggcgugcuc

SEQ ID NO: 1561634 - RNA, 19 nt, Artificial Sequence
  Description of Artificial Sequence: Synthetic oligonucleotide
cagggcgugcuccaugucu

SEQ ID NO: 1561635 - RNA, 19 nt, Artificial Sequence
  Description of Artificial Sequence: Synthetic oligonucleotide
cgcggguaggagauguagc

SEQ ID NO: 1561636 - RNA, 19 nt, Artificial Sequence
  Description of Artificial Sequence: Synthetic oligonucleotide
acccgcgccgcuugcgcgu

SEQ ID NO: 1561637 - RNA, 19 nt, Artificial Sequence
  Description of Artificial Sequence: Synthetic oligonucleotide
gcggucccuacuauagggc

SEQ ID NO: 1561638 - RNA, 19 nt, Artificial Sequence
  Description of Artificial Sequence: Synthetic oligonucleotide
gucugcggucccuacuaua

SEQ ID NO: 1561639 - RNA, 19 nt, Artificial Sequence
  Description of Artificial Sequence: Synthetic oligonucleotide
gcuucggguuacuuaggaa

SEQ ID NO: 1561640 - RNA, 19 nt, Artificial Sequence
  Description of Artificial Sequence: Synthetic oligonucleotide
caccgccagggcgugcucc

SEQ ID NO: 1561641 - RNA, 19 nt, Artificial Sequence
  Description of Artificial Sequence: Synthetic oligonucleotide
gcgcggguaggagauguag

SEQ ID NO: 1561642 - RNA, 19 nt, Artificial Sequence
  Description of Artificial Sequence: Synthetic oligonucleotide
ggucccuacuauagggcca

SEQ ID NO: 1561643 - RNA, 19 nt, Artificial Sequence
  Description of Artificial Sequence: Synthetic oligonucleotide
ggguuccaccgcacgaacc

SEQ ID NO: 1561644 - RNA, 19 nt, Artificial Sequence
  Description of Artificial Sequence: Synthetic oligonucleotide
cucaacucugauacacauu

SEQ ID NO: 1561645 - RNA, 19 nt, Artificial Sequence
  Description of Artificial Sequence: Synthetic oligonucleotide
gcuuugggucccuguugug

SEQ ID NO: 1561646 - RNA, 19 nt, Artificial Sequence
  Description of Artificial Sequence: Synthetic oligonucleotide
gccgcuugcgcgucccagc

SEQ ID NO: 1561647 - RNA, 19 nt, Artificial Sequence
  Description of Artificial Sequence: Synthetic oligonucleotide
ggaggugccaggaagcuuu

SEQ ID NO: 1561648 - RNA, 19 nt, Artificial Sequence
  Description of Artificial Sequence: Synthetic oligonucleotide
guaguccagcuuggugaac

SEQ ID NO: 1561649 - RNA, 19 nt, Artificial Sequence
  Description of Artificial Sequence: Synthetic oligonucleotide
ggugcacauagucacuguu

SEQ ID NO: 1561650 - RNA, 19 nt, Artificial Sequence
  Description of Artificial Sequence: Synthetic oligonucleotide
ccggcugaggcuccgcuuc

SEQ ID NO: 1561651 - RNA, 19 nt, Artificial Sequence
  Description of Artificial Sequence: Synthetic oligonucleotide
agcacucggcaaagaggca

SEQ ID NO: 1561652 - RNA, 19 nt, Artificial Sequence
  Description of Artificial Sequence: Synthetic oligonucleotide
ggagauguagccggugagu

SEQ ID NO: 1561653 - RNA, 19 nt, Artificial Sequence
  Description of Artificial Sequence: Synthetic oligonucleotide
cggguaggagauguagccg

SEQ ID NO: 1561654 - RNA, 19 nt, Artificial Sequence
  Description of Artificial Sequence: Synthetic oligonucleotide
gggcaagaaggggacaaaa

SEQ ID NO: 1561655 - RNA, 19 nt, Artificial Sequence
  Description of Artificial Sequence: Synthetic oligonucleotide
ucccuacuauagggccacc

SEQ ID NO: 1561656 - RNA, 19 nt, Artificial Sequence
  Description of Artificial Sequence: Synthetic oligonucleotide
cccggccuagcuucaugcc

SEQ ID NO: 1561657 - RNA, 19 nt, Artificial Sequence
  Description of Artificial Sequence: Synthetic oligonucleotide
ccacccgugcagagagagg

SEQ ID NO: 1561658 - RNA, 19 nt, Artificial Sequence
  Description of Artificial Sequence: Synthetic oligonucleotide
gccacgggacugcaucuca

SEQ ID NO: 1561659 - RNA, 19 nt, Artificial Sequence
  Description of Artificial Sequence: Synthetic oligonucleotide
gggcuucggguuacuuagg

SEQ ID NO: 1561660 - RNA, 19 nt, Artificial Sequence
  Description of Artificial Sequence: Synthetic oligonucleotide
gcccgugccuguccacccg

SEQ ID NO: 1561661 - RNA, 19 nt, Artificial Sequence
  Description of Artificial Sequence: Synthetic oligonucleotide
gccucuguggcagggcuca

SEQ ID NO: 1561662 - RNA, 19 nt, Artificial Sequence
  Description of Artificial Sequence: Synthetic oligonucleotide
uccggucaaugaggcugcu

SEQ ID NO: 1561663 - RNA, 19 nt, Artificial Sequence
  Description of Artificial Sequence: Synthetic oligonucleotide
gaagugcagcguggccaca

SEQ ID NO: 1561664 - RNA, 19 nt, Artificial Sequence
  Description of Artificial Sequence: Synthetic oligonucleotide
accgcgcacggcgccagca

SEQ ID NO: 1561665 - RNA, 19 nt, Artificial Sequence
  Description of Artificial Sequence: Synthetic oligonucleotide
ggcaagaaggggacaaaau

SEQ ID NO: 1561666 - RNA, 19 nt, Artificial Sequence
  Description of Artificial Sequence: Synthetic oligonucleotide
caucuguaacugguccuua

SEQ ID NO: 1561667 - RNA, 19 nt, Artificial Sequence
  Description of Artificial Sequence: Synthetic oligonucleotide
cagugccucccggcugagg

SEQ ID NO: 1561668 - RNA, 19 nt, Artificial Sequence
  Description of Artificial Sequence: Synthetic oligonucleotide
ccacgucuguaauccuuuc

SEQ ID NO: 1561669 - RNA, 19 nt, Artificial Sequence
  Description of Artificial Sequence: Synthetic oligonucleotide
ccuuaucagagaagacucu

SEQ ID NO: 1561670 - RNA, 19 nt, Artificial Sequence
  Description of Artificial Sequence: Synthetic oligonucleotide
acacggcguuuaagaugac

SEQ ID NO: 1561671 - RNA, 19 nt, Artificial Sequence
  Description of Artificial Sequence: Synthetic oligonucleotide
gaggcgcggguaggagaug

SEQ ID NO: 1561672 - RNA, 19 nt, Artificial Sequence
  Description of Artificial Sequence: Synthetic oligonucleotide
ggaaaccagacacggcguu

SEQ ID NO: 1561673 - RNA, 19 nt, Artificial Sequence
  Description of Artificial Sequence: Synthetic oligonucleotide
cacggcguuuaagaugacu

SEQ ID NO: 1561674 - RNA, 19 nt, Artificial Sequence
  Description of Artificial Sequence: Synthetic oligonucleotide
ggcgugcuccaugucucug

SEQ ID NO: 1561675 - RNA, 19 nt, Artificial Sequence
  Description of Artificial Sequence: Synthetic oligonucleotide
gaguggccugacagugcga

SEQ ID NO: 1561676 - RNA, 19 nt, Artificial Sequence
  Description of Artificial Sequence: Synthetic oligonucleotide
ggcccggccuagcuucaug

SEQ ID NO: 1561677 - RNA, 19 nt, Artificial Sequence
  Description of Artificial Sequence: Synthetic oligonucleotide
gguaguaguccagcuuggu

SEQ ID NO: 1561678 - RNA, 19 nt, Artificial Sequence
  Description of Artificial Sequence: Synthetic oligonucleotide
ggcagggcucagucgucca

SEQ ID NO: 1561679 - RNA, 19 nt, Artificial Sequence
  Description of Artificial Sequence: Synthetic oligonucleotide
ggaaguguccugagccucu

SEQ ID NO: 1561680 - RNA, 19 nt, Artificial Sequence
  Description of Artificial Sequence: Synthetic oligonucleotide
gccagugaggcccggccua

SEQ ID NO: 1561681 - RNA, 19 nt, Artificial Sequence
  Description of Artificial Sequence: Synthetic oligonucleotide
gaggcccggccuagcuuca

SEQ ID NO: 1561682 - RNA, 19 nt, Artificial Sequence
  Description of Artificial Sequence: Synthetic oligonucleotide
gcaguaaaacuuacuuauu

SEQ ID NO: 1561683 - RNA, 19 nt, Artificial Sequence
  Description of Artificial Sequence: Synthetic oligonucleotide
ccggugaguacgccggcca

SEQ ID NO: 1561684 - RNA, 19 nt, Artificial Sequence
  Description of Artificial Sequence: Synthetic oligonucleotide
cauagccacgggacugcau

SEQ ID NO: 1561685 - RNA, 19 nt, Artificial Sequence
  Description of Artificial Sequence: Synthetic oligonucleotide
cuguugaguccacccucgu

SEQ ID NO: 1561686 - RNA, 19 nt, Artificial Sequence
  Description of Artificial Sequence: Synthetic oligonucleotide
ccacccucguaaauauucu

SEQ ID NO: 1561687 - RNA, 19 nt, Artificial Sequence
  Description of Artificial Sequence: Synthetic oligonucleotide
gguuccggucaaugaggcu

SEQ ID NO: 1561688 - RNA, 19 nt, Artificial Sequence
  Description of Artificial Sequence: Synthetic oligonucleotide
caggggcaagaaggggaca

SEQ ID NO: 1561689 - RNA, 19 nt, Artificial Sequence
  Description of Artificial Sequence: Synthetic oligonucleotide
guacgccggccagggccag

SEQ ID NO: 1561690 - RNA, 19 nt, Artificial Sequence
  Description of Artificial Sequence: Synthetic oligonucleotide
cggugaguacgccggccag

SEQ ID NO: 1561691 - RNA, 19 nt, Artificial Sequence
  Description of Artificial Sequence: Synthetic oligonucleotide
ccuuauacagggugacguu

SEQ ID NO: 1561692 - RNA, 19 nt, Artificial Sequence
  Description of Artificial Sequence: Synthetic oligonucleotide
ccgugcagagagaggguaa

SEQ ID NO: 1561693 - RNA, 19 nt, Artificial Sequence
  Description of Artificial Sequence: Synthetic oligonucleotide
ccucgucuaccacaucaua

SEQ ID NO: 1561694 - RNA, 19 nt, Artificial Sequence
  Description of Artificial Sequence: Synthetic oligonucleotide
cucagucguccagguagua

SEQ ID NO: 1561695 - RNA, 19 nt, Artificial Sequence
  Description of Artificial Sequence: Synthetic oligonucleotide
cgcgcacggcgccagcagc

SEQ ID NO: 1561696 - RNA, 19 nt, Artificial Sequence
  Description of Artificial Sequence: Synthetic oligonucleotide
ggccagugaggcccggccu

SEQ ID NO: 1561697 - RNA, 19 nt, Artificial Sequence
  Description of Artificial Sequence: Synthetic oligonucleotide
ccggucaaugaggcugcug

SEQ ID NO: 1561698 - RNA, 19 nt, Artificial Sequence
  Description of Artificial Sequence: Synthetic oligonucleotide
cgaugaucuugcuggcgaa

SEQ ID NO: 1561699 - RNA, 19 nt, Artificial Sequence
  Description of Artificial Sequence: Synthetic oligonucleotide
cagcauugcugaggaagau

SEQ ID NO: 1561700 - RNA, 19 nt, Artificial Sequence
  Description of Artificial Sequence: Synthetic oligonucleotide
ccacgggacugcaucucaa

SEQ ID NO: 1561701 - RNA, 19 nt, Artificial Sequence
  Description of Artificial Sequence: Synthetic oligonucleotide
cgcacgaaccgcgcacggc

SEQ ID NO: 1561702 - RNA, 19 nt, Artificial Sequence
  Description of Artificial Sequence: Synthetic oligonucleotide
gcgcacggcgccagcagca

SEQ ID NO: 1561703 - RNA, 19 nt, Artificial Sequence
  Description of Artificial Sequence: Synthetic oligonucleotide
gcucagucguccagguagu

SEQ ID NO: 1561704 - RNA, 19 nt, Artificial Sequence
  Description of Artificial Sequence: Synthetic oligonucleotide
gccacgucuguaauccuuu

SEQ ID NO: 1561705 - RNA, 19 nt, Artificial Sequence
  Description of Artificial Sequence: Synthetic oligonucleotide
ccgugccuguccacccgug

SEQ ID NO: 1561706 - RNA, 19 nt, Artificial Sequence
  Description of Artificial Sequence: Synthetic oligonucleotide
cagccaccuugcuuauaau

SEQ ID NO: 1561707 - RNA, 19 nt, Artificial Sequence
  Description of Artificial Sequence: Synthetic oligonucleotide
cccggacccgcgccgcuug

SEQ ID NO: 1561708 - RNA, 19 nt, Artificial Sequence
  Description of Artificial Sequence: Synthetic oligonucleotide
cccgugcagagagagggua

SEQ ID NO: 1561709 - RNA, 19 nt, Artificial Sequence
  Description of Artificial Sequence: Synthetic oligonucleotide
gggcgugcuccaugucucu

SEQ ID NO: 1561710 - RNA, 19 nt, Artificial Sequence
  Description of Artificial Sequence: Synthetic oligonucleotide
gggugacguuagaggcgug

SEQ ID NO: 1561711 - RNA, 19 nt, Artificial Sequence
  Description of Artificial Sequence: Synthetic oligonucleotide
ccaccgcacgaaccgcgca

SEQ ID NO: 1561712 - RNA, 19 nt, Artificial Sequence
  Description of Artificial Sequence: Synthetic oligonucleotide
guccacccucguaaauauu

SEQ ID NO: 1561713 - RNA, 19 nt, Artificial Sequence
  Description of Artificial Sequence: Synthetic oligonucleotide
gccuagcuucaugcccgga

SEQ ID NO: 1561714 - RNA, 19 nt, Artificial Sequence
  Description of Artificial Sequence: Synthetic oligonucleotide
cgccgcuugcgcgucccag

SEQ ID NO: 1561715 - RNA, 19 nt, Artificial Sequence
  Description of Artificial Sequence: Synthetic oligonucleotide
cggacccgcgccgcuugcg

SEQ ID NO: 1561716 - RNA, 19 nt, Artificial Sequence
  Description of Artificial Sequence: Synthetic oligonucleotide
cggcguuuaagaugacuuu

SEQ ID NO: 1561717 - RNA, 19 nt, Artificial Sequence
  Description of Artificial Sequence: Synthetic oligonucleotide
cgcgccgcuugcgcguccc

SEQ ID NO: 1561718 - RNA, 19 nt, Artificial Sequence
  Description of Artificial Sequence: Synthetic oligonucleotide
cgaaccgcgcacggcgcca

SEQ ID NO: 1561719 - RNA, 19 nt, Artificial Sequence
  Description of Artificial Sequence: Synthetic oligonucleotide
cccgugccuguccacccgu

SEQ ID NO: 1561720 - RNA, 19 nt, Artificial Sequence
  Description of Artificial Sequence: Synthetic oligonucleotide
gcgccgcuugcgcguccca

SEQ ID NO: 1561721 - RNA, 19 nt, Artificial Sequence
  Description of Artificial Sequence: Synthetic oligonucleotide
ccgcgccgcuugcgcgucc

SEQ ID NO: 1561722 - RNA, 19 nt, Artificial Sequence
  Description of Artificial Sequence: Synthetic oligonucleotide
ccccagcauugcugaggaa

SEQ ID NO: 1561723 - RNA, 19 nt, Artificial Sequence
  Description of Artificial Sequence: Synthetic oligonucleotide
cccgcgccgcuugcgcguc

SEQ ID NO: 1561724 - RNA, 19 nt, Artificial Sequence
  Description of Artificial Sequence: Synthetic oligonucleotide
ccgcagcacucggcaaaga

SEQ ID NO: 1561725 - RNA, 19 nt, Artificial Sequence
  Description of Artificial Sequence: Synthetic oligonucleotide
gcccggacccgcgccgcuu

SEQ ID NO: 1561726 - RNA, 19 nt, Artificial Sequence
  Description of Artificial Sequence: Synthetic oligonucleotide
aacauguuaacacuaauac

SEQ ID NO: 1561727 - RNA, 19 nt, Artificial Sequence
  Description of Artificial Sequence: Synthetic oligonucleotide
aaaguugcaggucaaagcg

SEQ ID NO: 1561728 - RNA, 19 nt, Artificial Sequence
  Description of Artificial Sequence: Synthetic oligonucleotide
ugcaauaacauacaguccc

SEQ ID NO: 1561729 - RNA, 19 nt, Artificial Sequence
  Description of Artificial Sequence: Synthetic oligonucleotide
uucaguacgacccaggaag

SEQ ID NO: 1561730 - RNA, 19 nt, Artificial Sequence
  Description of Artificial Sequence: Synthetic oligonucleotide
ugugcaauaacauacaguc

SEQ ID NO: 1561731 - RNA, 19 nt, Artificial Sequence
  Description of Artificial Sequence: Synthetic oligonucleotide
agugagacacaacacaucc

SEQ ID NO: 1561732 - RNA, 19 nt, Artificial Sequence
  Description of Artificial Sequence: Synthetic oligonucleotide
aauaacauacagucccagc

SEQ ID NO: 1561733 - RNA, 19 nt, Artificial Sequence
  Description of Artificial Sequence: Synthetic oligonucleotide
uguccuuucauuaauguug

SEQ ID NO: 1561734 - RNA, 19 nt, Artificial Sequence
  Description of Artificial Sequence: Synthetic oligonucleotide
agaaggauaaaaucuaauc

SEQ ID NO: 1561735 - RNA, 19 nt, Artificial Sequence
  Description of Artificial Sequence: Synthetic oligonucleotide
ucuuguagaguccuggugg

SEQ ID NO: 1561736 - RNA, 19 nt, Artificial Sequence
  Description of Artificial Sequence: Synthetic oligonucleotide
aucauguuugcauagauug

SEQ ID NO: 1561737 - RNA, 19 nt, Artificial Sequence
  Description of Artificial Sequence: Synthetic oligonucleotide
ugaagagaaacccaugcag

SEQ ID NO: 1561738 - RNA, 19 nt, Artificial Sequence
  Description of Artificial Sequence: Synthetic oligonucleotide
uuauucagugcacaagugg

SEQ ID NO: 1561739 - RNA, 19 nt, Artificial Sequence
  Description of Artificial Sequence: Synthetic oligonucleotide
auugcuagcaauuuagugu

SEQ ID NO: 1561740 - RNA, 19 nt, Artificial Sequence
  Description of Artificial Sequence: Synthetic oligonucleotide
uguuaacacuaauacaagg

SEQ ID NO: 1561741 - RNA, 19 nt, Artificial Sequence
  Description of Artificial Sequence: Synthetic oligonucleotide
cauaauacuuuuauagccc

SEQ ID NO: 1561742 - RNA, 19 nt, Artificial Sequence
  Description of Artificial Sequence: Synthetic oligonucleotide
uagauugcuagcaauuuag

SEQ ID NO: 1561743 - RNA, 19 nt, Artificial Sequence
  Description of Artificial Sequence: Synthetic oligonucleotide
uuuauagcccugacaaugg

SEQ ID NO: 1561744 - RNA, 19 nt, Artificial Sequence
  Description of Artificial Sequence: Synthetic oligonucleotide
caauguacugcucugaggc

SEQ ID NO: 1561745 - RNA, 19 nt, Artificial Sequence
  Description of Artificial Sequence: Synthetic oligonucleotide
gauuuaguguaucuuguag

SEQ ID NO: 1561746 - RNA, 19 nt, Artificial Sequence
  Description of Artificial Sequence: Synthetic oligonucleotide
uuuauaggagagaucaugu

SEQ ID NO: 1561747 - RNA, 19 nt, Artificial Sequence
  Description of Artificial Sequence: Synthetic oligonucleotide
uuuuauagcccugacaaug

SEQ ID NO: 1561748 - RNA, 19 nt, Artificial Sequence
  Description of Artificial Sequence: Synthetic oligonucleotide
uuuaacugagcacuggacu

SEQ ID NO: 1561749 - RNA, 19 nt, Artificial Sequence
  Description of Artificial Sequence: Synthetic oligonucleotide
aucuaaucagaauaaaaca

SEQ ID NO: 1561750 - RNA, 19 nt, Artificial Sequence
  Description of Artificial Sequence: Synthetic oligonucleotide
aauuuagugugcaauaaca

SEQ ID NO: 1561751 - RNA, 19 nt, Artificial Sequence
  Description of Artificial Sequence: Synthetic oligonucleotide
acauguguggaaugguucc

SEQ ID NO: 1561752 - RNA, 19 nt, Artificial Sequence
  Description of Artificial Sequence: Synthetic oligonucleotide
uugaaaauaaguugcucug

SEQ ID NO: 1561753 - RNA, 19 nt, Artificial Sequence
  Description of Artificial Sequence: Synthetic oligonucleotide
aagucuuuugagaacgggc

SEQ ID NO: 1561754 - RNA, 19 nt, Artificial Sequence
  Description of Artificial Sequence: Synthetic oligonucleotide
uauucagugcacaagugga

SEQ ID NO: 1561755 - RNA, 19 nt, Artificial Sequence
  Description of Artificial Sequence: Synthetic oligonucleotide
aaugccugaagucuuuuga

SEQ ID NO: 1561756 - RNA, 19 nt, Artificial Sequence
  Description of Artificial Sequence: Synthetic oligonucleotide
auugucugagcagagaagg

SEQ ID NO: 1561757 - RNA, 19 nt, Artificial Sequence
  Description of Artificial Sequence: Synthetic oligonucleotide
ggugguauagcuuugggag

SEQ ID NO: 1561758 - RNA, 19 nt, Artificial Sequence
  Description of Artificial Sequence: Synthetic oligonucleotide
uaguguaucuuguagaguc

SEQ ID NO: 1561759 - RNA, 19 nt, Artificial Sequence
  Description of Artificial Sequence: Synthetic oligonucleotide
aaugugggaaauguggaag

SEQ ID NO: 1561760 - RNA, 19 nt, Artificial Sequence
  Description of Artificial Sequence: Synthetic oligonucleotide
uauaacuucccgcugugca

SEQ ID NO: 1561761 - RNA, 19 nt, Artificial Sequence
  Description of Artificial Sequence: Synthetic oligonucleotide
uauuucaguaucaggcugc

SEQ ID NO: 1561762 - RNA, 19 nt, Artificial Sequence
  Description of Artificial Sequence: Synthetic oligonucleotide
uggaaugguuccaacauca

SEQ ID NO: 1561763 - RNA, 19 nt, Artificial Sequence
  Description of Artificial Sequence: Synthetic oligonucleotide
uguagcuucgaugacaugu

SEQ ID NO: 1561764 - RNA, 19 nt, Artificial Sequence
  Description of Artificial Sequence: Synthetic oligonucleotide
uugcuagcaauuuagugug

SEQ ID NO: 1561765 - RNA, 19 nt, Artificial Sequence
  Description of Artificial Sequence: Synthetic oligonucleotide
aauacaaggcacugugcug

SEQ ID NO: 1561766 - RNA, 19 nt, Artificial Sequence
  Description of Artificial Sequence: Synthetic oligonucleotide
aacauacagucccagcgag

SEQ ID NO: 1561767 - RNA, 19 nt, Artificial Sequence
  Description of Artificial Sequence: Synthetic oligonucleotide
gaagaugggcguuuuauac

SEQ ID NO: 1561768 - RNA, 19 nt, Artificial Sequence
  Description of Artificial Sequence: Synthetic oligonucleotide
gauugcuagcaauuuagug

SEQ ID NO: 1561769 - RNA, 19 nt, Artificial Sequence
  Description of Artificial Sequence: Synthetic oligonucleotide
augacauguaccaucagac

SEQ ID NO: 1561770 - RNA, 19 nt, Artificial Sequence
  Description of Artificial Sequence: Synthetic oligonucleotide
auuuaguguaucuuguaga

SEQ ID NO: 1561771 - RNA, 19 nt, Artificial Sequence
  Description of Artificial Sequence: Synthetic oligonucleotide
aacacauccugguaaagau

SEQ ID NO: 1561772 - RNA, 19 nt, Artificial Sequence
  Description of Artificial Sequence: Synthetic oligonucleotide
ugggauuuaguguaucuug

SEQ ID NO: 1561773 - RNA, 19 nt, Artificial Sequence
  Description of Artificial Sequence: Synthetic oligonucleotide
uuuuaacucuguagcuucg

SEQ ID NO: 1561774 - RNA, 19 nt, Artificial Sequence
  Description of Artificial Sequence: Synthetic oligonucleotide
cugucaaacauagugagac

SEQ ID NO: 1561775 - RNA, 19 nt, Artificial Sequence
  Description of Artificial Sequence: Synthetic oligonucleotide
uguuugcauagauugcuag

SEQ ID NO: 1561776 - RNA, 19 nt, Artificial Sequence
  Description of Artificial Sequence: Synthetic oligonucleotide
uuuauucagugcacaagug

SEQ ID NO: 1561777 - RNA, 19 nt, Artificial Sequence
  Description of Artificial Sequence: Synthetic oligonucleotide
cugacaauggaaacccugg

SEQ ID NO: 1561778 - RNA, 19 nt, Artificial Sequence
  Description of Artificial Sequence: Synthetic oligonucleotide
ugcugauuucacaguaugg

SEQ ID NO: 1561779 - RNA, 19 nt, Artificial Sequence
  Description of Artificial Sequence: Synthetic oligonucleotide
ugacauguaccaucagacg

SEQ ID NO: 1561780 - RNA, 19 nt, Artificial Sequence
  Description of Artificial Sequence: Synthetic oligonucleotide
ucuaacacagccgaacaug

SEQ ID NO: 1561781 - RNA, 19 nt, Artificial Sequence
  Description of Artificial Sequence: Synthetic oligonucleotide
auaauacuuuuauagcccu

SEQ ID NO: 1561782 - RNA, 19 nt, Artificial Sequence
  Description of Artificial Sequence: Synthetic oligonucleotide
ugcucuuggucuuauauaa

SEQ ID NO: 1561783 - RNA, 19 nt, Artificial Sequence
  Description of Artificial Sequence: Synthetic oligonucleotide
uuuuaacugagcacuggac

SEQ ID NO: 1561784 - RNA, 19 nt, Artificial Sequence
  Description of Artificial Sequence: Synthetic oligonucleotide
uuuagugugcaauaacaua

SEQ ID NO: 1561785 - RNA, 19 nt, Artificial Sequence
  Description of Artificial Sequence: Synthetic oligonucleotide
uauugucugagcagagaag

SEQ ID NO: 1561786 - RNA, 19 nt, Artificial Sequence
  Description of Artificial Sequence: Synthetic oligonucleotide
gaagucguugaagagaaac

SEQ ID NO: 1561787 - RNA, 19 nt, Artificial Sequence
  Description of Artificial Sequence: Synthetic oligonucleotide
aacacagccgaacauguua

SEQ ID NO: 1561788 - RNA, 19 nt, Artificial Sequence
  Description of Artificial Sequence: Synthetic oligonucleotide
uguuuauucagugcacaag

SEQ ID NO: 1561789 - RNA, 19 nt, Artificial Sequence
  Description of Artificial Sequence: Synthetic oligonucleotide
accaucagacgcccaaugc

SEQ ID NO: 1561790 - RNA, 19 nt, Artificial Sequence
  Description of Artificial Sequence: Synthetic oligonucleotide
cuguuuauaggagagauca

SEQ ID NO: 1561791 - RNA, 19 nt, Artificial Sequence
  Description of Artificial Sequence: Synthetic oligonucleotide
gaugcuauuucaguaucag

SEQ ID NO: 1561792 - RNA, 19 nt, Artificial Sequence
  Description of Artificial Sequence: Synthetic oligonucleotide
uauauaacuucccgcugug

SEQ ID NO: 1561793 - RNA, 19 nt, Artificial Sequence
  Description of Artificial Sequence: Synthetic oligonucleotide
guuuauaggagagaucaug

SEQ ID NO: 1561794 - RNA, 19 nt, Artificial Sequence
  Description of Artificial Sequence: Synthetic oligonucleotide
aagaugggcguuuuauaca

SEQ ID NO: 1561795 - RNA, 19 nt, Artificial Sequence
  Description of Artificial Sequence: Synthetic oligonucleotide
acaauggaaacccuggcau

SEQ ID NO: 1561796 - RNA, 19 nt, Artificial Sequence
  Description of Artificial Sequence: Synthetic oligonucleotide
cugguaaagauccuugaug

SEQ ID NO: 1561797 - RNA, 19 nt, Artificial Sequence
  Description of Artificial Sequence: Synthetic oligonucleotide
ucgaugacauguaccauca

SEQ ID NO: 1561798 - RNA, 19 nt, Artificial Sequence
  Description of Artificial Sequence: Synthetic oligonucleotide
acauguuaacacuaauaca

SEQ ID NO: 1561799 - RNA, 19 nt, Artificial Sequence
  Description of Artificial Sequence: Synthetic oligonucleotide
uaacauacagucccagcga

SEQ ID NO: 1561800 - RNA, 19 nt, Artificial Sequence
  Description of Artificial Sequence: Synthetic oligonucleotide
gucuuauauaacuucccgc

SEQ ID NO: 1561801 - RNA, 19 nt, Artificial Sequence
  Description of Artificial Sequence: Synthetic oligonucleotide
caggcuuuuaacucuguag

SEQ ID NO: 1561802 - RNA, 19 nt, Artificial Sequence
  Description of Artificial Sequence: Synthetic oligonucleotide
cuuugugauggaugaagcc

SEQ ID NO: 1561803 - RNA, 19 nt, Artificial Sequence
  Description of Artificial Sequence: Synthetic oligonucleotide
agagaucauguuugcauag

SEQ ID NO: 1561804 - RNA, 19 nt, Artificial Sequence
  Description of Artificial Sequence: Synthetic oligonucleotide
auaggagagaucauguuug

SEQ ID NO: 1561805 - RNA, 19 nt, Artificial Sequence
  Description of Artificial Sequence: Synthetic oligonucleotide
aaguggaugcuauuucagu

SEQ ID NO: 1561806 - RNA, 19 nt, Artificial Sequence
  Description of Artificial Sequence: Synthetic oligonucleotide
ucgccaagugguaacaucu

SEQ ID NO: 1561807 - RNA, 19 nt, Artificial Sequence
  Description of Artificial Sequence: Synthetic oligonucleotide
auguugucuguucggaggg

SEQ ID NO: 1561808 - RNA, 19 nt, Artificial Sequence
  Description of Artificial Sequence: Synthetic oligonucleotide
guugaaaauaaguugcucu

SEQ ID NO: 1561809 - RNA, 19 nt, Artificial Sequence
  Description of Artificial Sequence: Synthetic oligonucleotide
uucgaugacauguaccauc

SEQ ID NO: 1561810 - RNA, 19 nt, Artificial Sequence
  Description of Artificial Sequence: Synthetic oligonucleotide
agugugcaauaacauacag

SEQ ID NO: 1561811 - RNA, 19 nt, Artificial Sequence
  Description of Artificial Sequence: Synthetic oligonucleotide
gggaguugaaaauaaguug

SEQ ID NO: 1561812 - RNA, 19 nt, Artificial Sequence
  Description of Artificial Sequence: Synthetic oligonucleotide
agcggacccaaacuucucc

SEQ ID NO: 1561813 - RNA, 19 nt, Artificial Sequence
  Description of Artificial Sequence: Synthetic oligonucleotide
cauagugagacacaacaca

SEQ ID NO: 1561814 - RNA, 19 nt, Artificial Sequence
  Description of Artificial Sequence: Synthetic oligonucleotide
acaaguggaugcuauuuca

SEQ ID NO: 1561815 - RNA, 19 nt, Artificial Sequence
  Description of Artificial Sequence: Synthetic oligonucleotide
uaacucuguagcuucgaug

SEQ ID NO: 1561816 - RNA, 19 nt, Artificial Sequence
  Description of Artificial Sequence: Synthetic oligonucleotide
acauucgccaagugguaac

SEQ ID NO: 1561817 - RNA, 19 nt, Artificial Sequence
  Description of Artificial Sequence: Synthetic oligonucleotide
ucccugucaaacauaguga

SEQ ID NO: 1561818 - RNA, 19 nt, Artificial Sequence
  Description of Artificial Sequence: Synthetic oligonucleotide
ucaaagcggacccaaacuu

SEQ ID NO: 1561819 - RNA, 19 nt, Artificial Sequence
  Description of Artificial Sequence: Synthetic oligonucleotide
uuaacugagcacuggacuu

SEQ ID NO: 1561820 - RNA, 19 nt, Artificial Sequence
  Description of Artificial Sequence: Synthetic oligonucleotide
guauggauuacucuuccca

SEQ ID NO: 1561821 - RNA, 19 nt, Artificial Sequence
  Description of Artificial Sequence: Synthetic oligonucleotide
guuugcauagauugcuagc

SEQ ID NO: 1561822 - RNA, 19 nt, Artificial Sequence
  Description of Artificial Sequence: Synthetic oligonucleotide
caagugguaacaucuggug

SEQ ID NO: 1561823 - RNA, 19 nt, Artificial Sequence
  Description of Artificial Sequence: Synthetic oligonucleotide
ugagcagagaaggauaaaa

SEQ ID NO: 1561824 - RNA, 19 nt, Artificial Sequence
  Description of Artificial Sequence: Synthetic oligonucleotide
ucuuuugagaacgggcuug

SEQ ID NO: 1561825 - RNA, 19 nt, Artificial Sequence
  Description of Artificial Sequence: Synthetic oligonucleotide
uuugagaacgggcuugaua

SEQ ID NO: 1561826 - RNA, 19 nt, Artificial Sequence
  Description of Artificial Sequence: Synthetic oligonucleotide
uauggauuacucuucccau

SEQ ID NO: 1561827 - RNA, 19 nt, Artificial Sequence
  Description of Artificial Sequence: Synthetic oligonucleotide
uugauaagucuuuucccgu

SEQ ID NO: 1561828 - RNA, 19 nt, Artificial Sequence
  Description of Artificial Sequence: Synthetic oligonucleotide
agaggaagccgcgaacugc

SEQ ID NO: 1561829 - RNA, 19 nt, Artificial Sequence
  Description of Artificial Sequence: Synthetic oligonucleotide
uacacccgaucaauguggg

SEQ ID NO: 1561830 - RNA, 19 nt, Artificial Sequence
  Description of Artificial Sequence: Synthetic oligonucleotide
cuggcaucuaacacagccg

SEQ ID NO: 1561831 - RNA, 19 nt, Artificial Sequence
  Description of Artificial Sequence: Synthetic oligonucleotide
caauuuagugugcaauaac

SEQ ID NO: 1561832 - RNA, 19 nt, Artificial Sequence
  Description of Artificial Sequence: Synthetic oligonucleotide
cuuauauaacuucccgcug

SEQ ID NO: 1561833 - RNA, 19 nt, Artificial Sequence
  Description of Artificial Sequence: Synthetic oligonucleotide
acuguauugucugagcaga

SEQ ID NO: 1561834 - RNA, 19 nt, Artificial Sequence
  Description of Artificial Sequence: Synthetic oligonucleotide
agcccugacaauggaaacc

SEQ ID NO: 1561835 - RNA, 19 nt, Artificial Sequence
  Description of Artificial Sequence: Synthetic oligonucleotide
ugguauagcuuugggagcc

SEQ ID NO: 1561836 - RNA, 19 nt, Artificial Sequence
  Description of Artificial Sequence: Synthetic oligonucleotide
guuuauucagugcacaagu

SEQ ID NO: 1561837 - RNA, 19 nt, Artificial Sequence
  Description of Artificial Sequence: Synthetic oligonucleotide
cagccgaacauguuaacac

SEQ ID NO: 1561838 - RNA, 19 nt, Artificial Sequence
  Description of Artificial Sequence: Synthetic oligonucleotide
acauagugagacacaacac

SEQ ID NO: 1561839 - RNA, 19 nt, Artificial Sequence
  Description of Artificial Sequence: Synthetic oligonucleotide
caaguggaugcuauuucag

SEQ ID NO: 1561840 - RNA, 19 nt, Artificial Sequence
  Description of Artificial Sequence: Synthetic oligonucleotide
agacacaacacauccuggu

SEQ ID NO: 1561841 - RNA, 19 nt, Artificial Sequence
  Description of Artificial Sequence: Synthetic oligonucleotide
agaaaacuggucccuguca

SEQ ID NO: 1561842 - RNA, 19 nt, Artificial Sequence
  Description of Artificial Sequence: Synthetic oligonucleotide
aguggaugcuauuucagua

SEQ ID NO: 1561843 - RNA, 19 nt, Artificial Sequence
  Description of Artificial Sequence: Synthetic oligonucleotide
aguguaucuuguagagucc

SEQ ID NO: 1561844 - RNA, 19 nt, Artificial Sequence
  Description of Artificial Sequence: Synthetic oligonucleotide
agcuucgaugacauguacc

SEQ ID NO: 1561845 - RNA, 19 nt, Artificial Sequence
  Description of Artificial Sequence: Synthetic oligonucleotide
ucuguuuauaggagagauc

SEQ ID NO: 1561846 - RNA, 19 nt, Artificial Sequence
  Description of Artificial Sequence: Synthetic oligonucleotide
guacacccgaucaaugugg

SEQ ID NO: 1561847 - RNA, 19 nt, Artificial Sequence
  Description of Artificial Sequence: Synthetic oligonucleotide
uauagcccugacaauggaa

SEQ ID NO: 1561848 - RNA, 19 nt, Artificial Sequence
  Description of Artificial Sequence: Synthetic oligonucleotide
uguaucuuguagaguccug

SEQ ID NO: 1561849 - RNA, 19 nt, Artificial Sequence
  Description of Artificial Sequence: Synthetic oligonucleotide
ucacaguauggauuacucu

SEQ ID NO: 1561850 - RNA, 19 nt, Artificial Sequence
  Description of Artificial Sequence: Synthetic oligonucleotide
ugcauagauugcuagcaau

SEQ ID NO: 1561851 - RNA, 19 nt, Artificial Sequence
  Description of Artificial Sequence: Synthetic oligonucleotide
aaagcggacccaaacuucu

SEQ ID NO: 1561852 - RNA, 19 nt, Artificial Sequence
  Description of Artificial Sequence: Synthetic oligonucleotide
uacucuucccauuuggcuu

SEQ ID NO: 1561853 - RNA, 19 nt, Artificial Sequence
  Description of Artificial Sequence: Synthetic oligonucleotide
cauacagucccagcgagug

SEQ ID NO: 1561854 - RNA, 19 nt, Artificial Sequence
  Description of Artificial Sequence: Synthetic oligonucleotide
auacaaggcacugugcugu

SEQ ID NO: 1561855 - RNA, 19 nt, Artificial Sequence
  Description of Artificial Sequence: Synthetic oligonucleotide
ggacacauucgccaagugg

SEQ ID NO: 1561856 - RNA, 19 nt, Artificial Sequence
  Description of Artificial Sequence: Synthetic oligonucleotide
agcaauuuagugugcaaua

SEQ ID NO: 1561857 - RNA, 19 nt, Artificial Sequence
  Description of Artificial Sequence: Synthetic oligonucleotide
ccucauuuccacauaauac

SEQ ID NO: 1561858 - RNA, 19 nt, Artificial Sequence
  Description of Artificial Sequence: Synthetic oligonucleotide
uucggagggugguacaccc

SEQ ID NO: 1561859 - RNA, 19 nt, Artificial Sequence
  Description of Artificial Sequence: Synthetic oligonucleotide
aacugagcacuggacuugg

SEQ ID NO: 1561860 - RNA, 19 nt, Artificial Sequence
  Description of Artificial Sequence: Synthetic oligonucleotide
guauugucugagcagagaa

SEQ ID NO: 1561861 - RNA, 19 nt, Artificial Sequence
  Description of Artificial Sequence: Synthetic oligonucleotide
uucagugcacaaguggaug

SEQ ID NO: 1561862 - RNA, 19 nt, Artificial Sequence
  Description of Artificial Sequence: Synthetic oligonucleotide
agucuuuugagaacgggcu

SEQ ID NO: 1561863 - RNA, 19 nt, Artificial Sequence
  Description of Artificial Sequence: Synthetic oligonucleotide
gaaaacuggucccugucaa

SEQ ID NO: 1561864 - RNA, 19 nt, Artificial Sequence
  Description of Artificial Sequence: Synthetic oligonucleotide
auauaacuucccgcugugc

SEQ ID NO: 1561865 - RNA, 19 nt, Artificial Sequence
  Description of Artificial Sequence: Synthetic oligonucleotide
ugguacacccgaucaaugu

SEQ ID NO: 1561866 - RNA, 19 nt, Artificial Sequence
  Description of Artificial Sequence: Synthetic oligonucleotide
ugccugaagucuuuugaga

SEQ ID NO: 1561867 - RNA, 19 nt, Artificial Sequence
  Description of Artificial Sequence: Synthetic oligonucleotide
uuauagcccugacaaugga

SEQ ID NO: 1561868 - RNA, 19 nt, Artificial Sequence
  Description of Artificial Sequence: Synthetic oligonucleotide
gacacauucgccaaguggu

SEQ ID NO: 1561869 - RNA, 19 nt, Artificial Sequence
  Description of Artificial Sequence: Synthetic oligonucleotide
ggaugaagccaugugaugc

SEQ ID NO: 1561870 - RNA, 19 nt, Artificial Sequence
  Description of Artificial Sequence: Synthetic oligonucleotide
uggaugcuauuucaguauc

SEQ ID NO: 1561871 - RNA, 19 nt, Artificial Sequence
  Description of Artificial Sequence: Synthetic oligonucleotide
auagauugcuagcaauuua

SEQ ID NO: 1561872 - RNA, 19 nt, Artificial Sequence
  Description of Artificial Sequence: Synthetic oligonucleotide
uaucuuguagaguccuggu

SEQ ID NO: 1561873 - RNA, 19 nt, Artificial Sequence
  Description of Artificial Sequence: Synthetic oligonucleotide
aacuggucccugucaaaca

SEQ ID NO: 1561874 - RNA, 19 nt, Artificial Sequence
  Description of Artificial Sequence: Synthetic oligonucleotide
cuucccgcugugcaaaagc

SEQ ID NO: 1561875 - RNA, 19 nt, Artificial Sequence
  Description of Artificial Sequence: Synthetic oligonucleotide
guggcuuugugauggauga

SEQ ID NO: 1561876 - RNA, 19 nt, Artificial Sequence
  Description of Artificial Sequence: Synthetic oligonucleotide
auguuaacacuaauacaag

SEQ ID NO: 1561877 - RNA, 19 nt, Artificial Sequence
  Description of Artificial Sequence: Synthetic oligonucleotide
cacaguggacacauucgcc

SEQ ID NO: 1561878 - RNA, 19 nt, Artificial Sequence
  Description of Artificial Sequence: Synthetic oligonucleotide
uaggagagaucauguuugc

SEQ ID NO: 1561879 - RNA, 19 nt, Artificial Sequence
  Description of Artificial Sequence: Synthetic oligonucleotide
uucgugcagcagcagucgg

SEQ ID NO: 1561880 - RNA, 19 nt, Artificial Sequence
  Description of Artificial Sequence: Synthetic oligonucleotide
auagugagacacaacacau

SEQ ID NO: 1561881 - RNA, 19 nt, Artificial Sequence
  Description of Artificial Sequence: Synthetic oligonucleotide
auuuagugugcaauaacau

SEQ ID NO: 1561882 - RNA, 19 nt, Artificial Sequence
  Description of Artificial Sequence: Synthetic oligonucleotide
acaggcucgucgcuggaag

SEQ ID NO: 1561883 - RNA, 19 nt, Artificial Sequence
  Description of Artificial Sequence: Synthetic oligonucleotide
ucaucccagcccuucaccu

SEQ ID NO: 1561884 - RNA, 19 nt, Artificial Sequence
  Description of Artificial Sequence: Synthetic oligonucleotide
uguagaguccuggugguau

SEQ ID NO: 1561885 - RNA, 19 nt, Artificial Sequence
  Description of Artificial Sequence: Synthetic oligonucleotide
agaacgggcuugauaaguc

SEQ ID NO: 1561886 - RNA, 19 nt, Artificial Sequence
  Description of Artificial Sequence: Synthetic oligonucleotide
acuucgugcagcagcaguc

SEQ ID NO: 1561887 - RNA, 19 nt, Artificial Sequence
  Description of Artificial Sequence: Synthetic oligonucleotide
agggugguacacccgauca

SEQ ID NO: 1561888 - RNA, 19 nt, Artificial Sequence
  Description of Artificial Sequence: Synthetic oligonucleotide
acgcccaaugccugaaguc

SEQ ID NO: 1561889 - RNA, 19 nt, Artificial Sequence
  Description of Artificial Sequence: Synthetic oligonucleotide
aguacgacccaggaaguca

SEQ ID NO: 1561890 - RNA, 19 nt, Artificial Sequence
  Description of Artificial Sequence: Synthetic oligonucleotide
augggcguuuuauacauuu

SEQ ID NO: 1561891 - RNA, 19 nt, Artificial Sequence
  Description of Artificial Sequence: Synthetic oligonucleotide
auaacuucccgcugugcaa

SEQ ID NO: 1561892 - RNA, 19 nt, Artificial Sequence
  Description of Artificial Sequence: Synthetic oligonucleotide
caaagcggacccaaacuuc

SEQ ID NO: 1561893 - RNA, 19 nt, Artificial Sequence
  Description of Artificial Sequence: Synthetic oligonucleotide
uucccgcugugcaaaagcu

SEQ ID NO: 1561894 - RNA, 19 nt, Artificial Sequence
  Description of Artificial Sequence: Synthetic oligonucleotide
ucaguacgacccaggaagu

SEQ ID NO: 1561895 - RNA, 19 nt, Artificial Sequence
  Description of Artificial Sequence: Synthetic oligonucleotide
ugauaagucuuuucccguu

SEQ ID NO: 1561896 - RNA, 19 nt, Artificial Sequence
  Description of Artificial Sequence: Synthetic oligonucleotide
uugcauagauugcuagcaa

SEQ ID NO: 1561897 - RNA, 19 nt, Artificial Sequence
  Description of Artificial Sequence: Synthetic oligonucleotide
uaacugagcacuggacuug

SEQ ID NO: 1561898 - RNA, 19 nt, Artificial Sequence
  Description of Artificial Sequence: Synthetic oligonucleotide
cacaaguggaugcuauuuc

SEQ ID NO: 1561899 - RNA, 19 nt, Artificial Sequence
  Description of Artificial Sequence: Synthetic oligonucleotide
uuccuguucuguucgaauu

SEQ ID NO: 1561900 - RNA, 19 nt, Artificial Sequence
  Description of Artificial Sequence: Synthetic oligonucleotide
caauaacauacagucccag

SEQ ID NO: 1561901 - RNA, 19 nt, Artificial Sequence
  Description of Artificial Sequence: Synthetic oligonucleotide
auacagucccagcgagugg

SEQ ID NO: 1561902 - RNA, 19 nt, Artificial Sequence
  Description of Artificial Sequence: Synthetic oligonucleotide
uccuguucuguucgaauuu

SEQ ID NO: 1561903 - RNA, 19 nt, Artificial Sequence
  Description of Artificial Sequence: Synthetic oligonucleotide
ucuguucggagggugguac

SEQ ID NO: 1561904 - RNA, 19 nt, Artificial Sequence
  Description of Artificial Sequence: Synthetic oligonucleotide
uucgccaagugguaacauc

SEQ ID NO: 1561905 - RNA, 19 nt, Artificial Sequence
  Description of Artificial Sequence: Synthetic oligonucleotide
gguacacccgaucaaugug

SEQ ID NO: 1561906 - RNA, 19 nt, Artificial Sequence
  Description of Artificial Sequence: Synthetic oligonucleotide
caucaccaacuccacagug

SEQ ID NO: 1561907 - RNA, 19 nt, Artificial Sequence
  Description of Artificial Sequence: Synthetic oligonucleotide
gaagccgcgaacugccuga

SEQ ID NO: 1561908 - RNA, 19 nt, Artificial Sequence
  Description of Artificial Sequence: Synthetic oligonucleotide
acacuaauacaaggcacug

SEQ ID NO: 1561909 - RNA, 19 nt, Artificial Sequence
  Description of Artificial Sequence: Synthetic oligonucleotide
gaagagaaacccaugcagu

SEQ ID NO: 1561910 - RNA, 19 nt, Artificial Sequence
  Description of Artificial Sequence: Synthetic oligonucleotide
cuguauugucugagcagag

SEQ ID NO: 1561911 - RNA, 19 nt, Artificial Sequence
  Description of Artificial Sequence: Synthetic oligonucleotide
gcaauugaaguuccacuug

SEQ ID NO: 1561912 - RNA, 19 nt, Artificial Sequence
  Description of Artificial Sequence: Synthetic oligonucleotide
acacauccugguaaagauc

SEQ ID NO: 1561913 - RNA, 19 nt, Artificial Sequence
  Description of Artificial Sequence: Synthetic oligonucleotide
acaucaccaacuccacagu

SEQ ID NO: 1561914 - RNA, 19 nt, Artificial Sequence
  Description of Artificial Sequence: Synthetic oligonucleotide
acuugggauuuaguguauc

SEQ ID NO: 1561915 - RNA, 19 nt, Artificial Sequence
  Description of Artificial Sequence: Synthetic oligonucleotide
ugcuagcaauuuagugugc

SEQ ID NO: 1561916 - RNA, 19 nt, Artificial Sequence
  Description of Artificial Sequence: Synthetic oligonucleotide
uagaguccuggugguauag

SEQ ID NO: 1561917 - RNA, 19 nt, Artificial Sequence
  Description of Artificial Sequence: Synthetic oligonucleotide
agcuuccggggacccaggc

SEQ ID NO: 1561918 - RNA, 19 nt, Artificial Sequence
  Description of Artificial Sequence: Synthetic oligonucleotide
cccugucaaacauagugag

SEQ ID NO: 1561919 - RNA, 19 nt, Artificial Sequence
  Description of Artificial Sequence: Synthetic oligonucleotide
gaacuucaguacgacccag

SEQ ID NO: 1561920 - RNA, 19 nt, Artificial Sequence
  Description of Artificial Sequence: Synthetic oligonucleotide
caaugccugaagucuuuug

SEQ ID NO: 1561921 - RNA, 19 nt, Artificial Sequence
  Description of Artificial Sequence: Synthetic oligonucleotide
ucggagggugguacacccg

SEQ ID NO: 1561922 - RNA, 19 nt, Artificial Sequence
  Description of Artificial Sequence: Synthetic oligonucleotide
cucgucgcuggaagggucc

SEQ ID NO: 1561923 - RNA, 19 nt, Artificial Sequence
  Description of Artificial Sequence: Synthetic oligonucleotide
gacacaacacauccuggua

SEQ ID NO: 1561924 - RNA, 19 nt, Artificial Sequence
  Description of Artificial Sequence: Synthetic oligonucleotide
uggacacauucgccaagug

SEQ ID NO: 1561925 - RNA, 19 nt, Artificial Sequence
  Description of Artificial Sequence: Synthetic oligonucleotide
auggauuacucuucccauu

SEQ ID NO: 1561926 - RNA, 19 nt, Artificial Sequence
  Description of Artificial Sequence: Synthetic oligonucleotide
gugcaauaacauacagucc

SEQ ID NO: 1561927 - RNA, 19 nt, Artificial Sequence
  Description of Artificial Sequence: Synthetic oligonucleotide
ggucaaagcggacccaaac

SEQ ID NO: 1561928 - RNA, 19 nt, Artificial Sequence
  Description of Artificial Sequence: Synthetic oligonucleotide
uguucggagggugguacac

SEQ ID NO: 1561929 - RNA, 19 nt, Artificial Sequence
  Description of Artificial Sequence: Synthetic oligonucleotide
cuugcaggcuuuuaacucu

SEQ ID NO: 1561930 - RNA, 19 nt, Artificial Sequence
  Description of Artificial Sequence: Synthetic oligonucleotide
guugucuguucggagggug

SEQ ID NO: 1561931 - RNA, 19 nt, Artificial Sequence
  Description of Artificial Sequence: Synthetic oligonucleotide
ucuccaguggggacuucgu

SEQ ID NO: 1561932 - RNA, 19 nt, Artificial Sequence
  Description of Artificial Sequence: Synthetic oligonucleotide
gcuugcaggcuuuuaacuc

SEQ ID NO: 1561933 - RNA, 19 nt, Artificial Sequence
  Description of Artificial Sequence: Synthetic oligonucleotide
ucuuuagacccagccuugu

SEQ ID NO: 1561934 - RNA, 19 nt, Artificial Sequence
  Description of Artificial Sequence: Synthetic oligonucleotide
cagucggcgggucguaggg

SEQ ID NO: 1561935 - RNA, 19 nt, Artificial Sequence
  Description of Artificial Sequence: Synthetic oligonucleotide
gagaucauguuugcauaga

SEQ ID NO: 1561936 - RNA, 19 nt, Artificial Sequence
  Description of Artificial Sequence: Synthetic oligonucleotide
gucggcgggucguagggcc

SEQ ID NO: 1561937 - RNA, 19 nt, Artificial Sequence
  Description of Artificial Sequence: Synthetic oligonucleotide
uccuggugguauagcuuug

SEQ ID NO: 1561938 - RNA, 19 nt, Artificial Sequence
  Description of Artificial Sequence: Synthetic oligonucleotide
caaugugggaaauguggaa

SEQ ID NO: 1561939 - RNA, 19 nt, Artificial Sequence
  Description of Artificial Sequence: Synthetic oligonucleotide
aggcucgucgcuggaaggg

SEQ ID NO: 1561940 - RNA, 19 nt, Artificial Sequence
  Description of Artificial Sequence: Synthetic oligonucleotide
uggaaggguccgugggcag

SEQ ID NO: 1561941 - RNA, 19 nt, Artificial Sequence
  Description of Artificial Sequence: Synthetic oligonucleotide
gagggugguacacccgauc

SEQ ID NO: 1561942 - RNA, 19 nt, Artificial Sequence
  Description of Artificial Sequence: Synthetic oligonucleotide
agcgaguggcuuugugaug

SEQ ID NO: 1561943 - RNA, 19 nt, Artificial Sequence
  Description of Artificial Sequence: Synthetic oligonucleotide
aagcggacccaaacuucuc

SEQ ID NO: 1561944 - RNA, 19 nt, Artificial Sequence
  Description of Artificial Sequence: Synthetic oligonucleotide
cacccgaucaaugugggaa

SEQ ID NO: 1561945 - RNA, 19 nt, Artificial Sequence
  Description of Artificial Sequence: Synthetic oligonucleotide
ugucuguucggaggguggu

SEQ ID NO: 1561946 - RNA, 19 nt, Artificial Sequence
  Description of Artificial Sequence: Synthetic oligonucleotide
aacgggcuugauaagucuu

SEQ ID NO: 1561947 - RNA, 19 nt, Artificial Sequence
  Description of Artificial Sequence: Synthetic oligonucleotide
gaagccaugugaugcuccu

SEQ ID NO: 1561948 - RNA, 19 nt, Artificial Sequence
  Description of Artificial Sequence: Synthetic oligonucleotide
ugcacaaguggaugcuauu

SEQ ID NO: 1561949 - RNA, 19 nt, Artificial Sequence
  Description of Artificial Sequence: Synthetic oligonucleotide
ugggcguuuuauacauuuu

SEQ ID NO: 1561950 - RNA, 19 nt, Artificial Sequence
  Description of Artificial Sequence: Synthetic oligonucleotide
aagccgcgaacugccugac

SEQ ID NO: 1561951 - RNA, 19 nt, Artificial Sequence
  Description of Artificial Sequence: Synthetic oligonucleotide
cuguggcgucuguuuauag

SEQ ID NO: 1561952 - RNA, 19 nt, Artificial Sequence
  Description of Artificial Sequence: Synthetic oligonucleotide
ggaacuucaguacgaccca

SEQ ID NO: 1561953 - RNA, 19 nt, Artificial Sequence
  Description of Artificial Sequence: Synthetic oligonucleotide
gauaagucuuuucccguuu

SEQ ID NO: 1561954 - RNA, 19 nt, Artificial Sequence
  Description of Artificial Sequence: Synthetic oligonucleotide
gucuguuuauaggagagau

SEQ ID NO: 1561955 - RNA, 19 nt, Artificial Sequence
  Description of Artificial Sequence: Synthetic oligonucleotide
gcgucuguuuauaggagag

SEQ ID NO: 1561956 - RNA, 19 nt, Artificial Sequence
  Description of Artificial Sequence: Synthetic oligonucleotide
gugggaaauguggaagaca

SEQ ID NO: 1561957 - RNA, 19 nt, Artificial Sequence
  Description of Artificial Sequence: Synthetic oligonucleotide
gagcacuggacuuggaguu

SEQ ID NO: 1561958 - RNA, 19 nt, Artificial Sequence
  Description of Artificial Sequence: Synthetic oligonucleotide
guggaugcuauuucaguau

SEQ ID NO: 1561959 - RNA, 19 nt, Artificial Sequence
  Description of Artificial Sequence: Synthetic oligonucleotide
aacuucccgcugugcaaaa

SEQ ID NO: 1561960 - RNA, 19 nt, Artificial Sequence
  Description of Artificial Sequence: Synthetic oligonucleotide
guaacaucugguggucuga

SEQ ID NO: 1561961 - RNA, 19 nt, Artificial Sequence
  Description of Artificial Sequence: Synthetic oligonucleotide
uaacaucugguggucugau

SEQ ID NO: 1561962 - RNA, 19 nt, Artificial Sequence
  Description of Artificial Sequence: Synthetic oligonucleotide
acacagccgaacauguuaa

SEQ ID NO: 1561963 - RNA, 19 nt, Artificial Sequence
  Description of Artificial Sequence: Synthetic oligonucleotide
agccgcgaacugccugacc

SEQ ID NO: 1561964 - RNA, 19 nt, Artificial Sequence
  Description of Artificial Sequence: Synthetic oligonucleotide
aggagagaucauguuugca

SEQ ID NO: 1561965 - RNA, 19 nt, Artificial Sequence
  Description of Artificial Sequence: Synthetic oligonucleotide
gacuucgugcagcagcagu

SEQ ID NO: 1561966 - RNA, 19 nt, Artificial Sequence
  Description of Artificial Sequence: Synthetic oligonucleotide
agucggcgggucguagggc

SEQ ID NO: 1561967 - RNA, 19 nt, Artificial Sequence
  Description of Artificial Sequence: Synthetic oligonucleotide
uuauugcucuuggucuuau

SEQ ID NO: 1561968 - RNA, 19 nt, Artificial Sequence
  Description of Artificial Sequence: Synthetic oligonucleotide
agacgcccaaugccugaag

SEQ ID NO: 1561969 - RNA, 19 nt, Artificial Sequence
  Description of Artificial Sequence: Synthetic oligonucleotide
ugguaacaucugguggucu

SEQ ID NO: 1561970 - RNA, 19 nt, Artificial Sequence
  Description of Artificial Sequence: Synthetic oligonucleotide
gccgcgaacugccugacca

SEQ ID NO: 1561971 - RNA, 19 nt, Artificial Sequence
  Description of Artificial Sequence: Synthetic oligonucleotide
ggcgucuguuuauaggaga

SEQ ID NO: 1561972 - RNA, 19 nt, Artificial Sequence
  Description of Artificial Sequence: Synthetic oligonucleotide
ucccgcugugcaaaagcuu

SEQ ID NO: 1561973 - RNA, 19 nt, Artificial Sequence
  Description of Artificial Sequence: Synthetic oligonucleotide
ucgucgcuggaaggguccg

SEQ ID NO: 1561974 - RNA, 19 nt, Artificial Sequence
  Description of Artificial Sequence: Synthetic oligonucleotide
cuuuugagaacgggcuuga

SEQ ID NO: 1561975 - RNA, 19 nt, Artificial Sequence
  Description of Artificial Sequence: Synthetic oligonucleotide
uauugcucuuggucuuaua

SEQ ID NO: 1561976 - RNA, 19 nt, Artificial Sequence
  Description of Artificial Sequence: Synthetic oligonucleotide
ggcaauugaaguuccacuu

SEQ ID NO: 1561977 - RNA, 19 nt, Artificial Sequence
  Description of Artificial Sequence: Synthetic oligonucleotide
uguugucuguucggagggu

SEQ ID NO: 1561978 - RNA, 19 nt, Artificial Sequence
  Description of Artificial Sequence: Synthetic oligonucleotide
cuuguagaguccugguggu

SEQ ID NO: 1561979 - RNA, 19 nt, Artificial Sequence
  Description of Artificial Sequence: Synthetic oligonucleotide
gguaaagauccuugaugaa

SEQ ID NO: 1561980 - RNA, 19 nt, Artificial Sequence
  Description of Artificial Sequence: Synthetic oligonucleotide
gacgcccaaugccugaagu

SEQ ID NO: 1561981 - RNA, 19 nt, Artificial Sequence
  Description of Artificial Sequence: Synthetic oligonucleotide
cuucaguacgacccaggaa

SEQ ID NO: 1561982 - RNA, 19 nt, Artificial Sequence
  Description of Artificial Sequence: Synthetic oligonucleotide
gccucauuuccacauaaua

SEQ ID NO: 1561983 - RNA, 19 nt, Artificial Sequence
  Description of Artificial Sequence: Synthetic oligonucleotide
gcaauuuagugugcaauaa

SEQ ID NO: 1561984 - RNA, 19 nt, Artificial Sequence
  Description of Artificial Sequence: Synthetic oligonucleotide
ggauuuaguguaucuugua

SEQ ID NO: 1561985 - RNA, 19 nt, Artificial Sequence
  Description of Artificial Sequence: Synthetic oligonucleotide
gucgcuggaaggguccgug

SEQ ID NO: 1561986 - RNA, 19 nt, Artificial Sequence
  Description of Artificial Sequence: Synthetic oligonucleotide
gugugcaauaacauacagu

SEQ ID NO: 1561987 - RNA, 19 nt, Artificial Sequence
  Description of Artificial Sequence: Synthetic oligonucleotide
gaucauguuugcauagauu

SEQ ID NO: 1561988 - RNA, 19 nt, Artificial Sequence
  Description of Artificial Sequence: Synthetic oligonucleotide
ucguagggccuuugcuuuc

SEQ ID NO: 1561989 - RNA, 19 nt, Artificial Sequence
  Description of Artificial Sequence: Synthetic oligonucleotide
acuucccgcugugcaaaag

SEQ ID NO: 1561990 - RNA, 19 nt, Artificial Sequence
  Description of Artificial Sequence: Synthetic oligonucleotide
caguaucaggcugcacaag

SEQ ID NO: 1561991 - RNA, 19 nt, Artificial Sequence
  Description of Artificial Sequence: Synthetic oligonucleotide
acacccgaucaauguggga

SEQ ID NO: 1561992 - RNA, 19 nt, Artificial Sequence
  Description of Artificial Sequence: Synthetic oligonucleotide
cauucgccaagugguaaca

SEQ ID NO: 1561993 - RNA, 19 nt, Artificial Sequence
  Description of Artificial Sequence: Synthetic oligonucleotide
gccaugugaugcuccucgg

SEQ ID NO: 1561994 - RNA, 19 nt, Artificial Sequence
  Description of Artificial Sequence: Synthetic oligonucleotide
acauacagucccagcgagu

SEQ ID NO: 1561995 - RNA, 19 nt, Artificial Sequence
  Description of Artificial Sequence: Synthetic oligonucleotide
gcagucggcgggucguagg

SEQ ID NO: 1561996 - RNA, 19 nt, Artificial Sequence
  Description of Artificial Sequence: Synthetic oligonucleotide
auguuugcauagauugcua

SEQ ID NO: 1561997 - RNA, 19 nt, Artificial Sequence
  Description of Artificial Sequence: Synthetic oligonucleotide
uuuugagaacgggcuugau

SEQ ID NO: 1561998 - RNA, 19 nt, Artificial Sequence
  Description of Artificial Sequence: Synthetic oligonucleotide
ccaugugaugcuccucggc

SEQ ID NO: 1561999 - RNA, 19 nt, Artificial Sequence
  Description of Artificial Sequence: Synthetic oligonucleotide
guguaucuuguagaguccu

SEQ ID NO: 1562000 - RNA, 19 nt, Artificial Sequence
  Description of Artificial Sequence: Synthetic oligonucleotide
ggaugcuauuucaguauca

SEQ ID NO: 1562001 - RNA, 19 nt, Artificial Sequence
  Description of Artificial Sequence: Synthetic oligonucleotide
guauagcuuugggagccca

SEQ ID NO: 1562002 - RNA, 19 nt, Artificial Sequence
  Description of Artificial Sequence: Synthetic oligonucleotide
guagaguccuggugguaua

SEQ ID NO: 1562003 - RNA, 19 nt, Artificial Sequence
  Description of Artificial Sequence: Synthetic oligonucleotide
cauagauugcuagcaauuu

SEQ ID NO: 1562004 - RNA, 19 nt, Artificial Sequence
  Description of Artificial Sequence: Synthetic oligonucleotide
auucgccaagugguaacau

SEQ ID NO: 1562005 - RNA, 19 nt, Artificial Sequence
  Description of Artificial Sequence: Synthetic oligonucleotide
acuggcaauugaaguucca

SEQ ID NO: 1562006 - RNA, 19 nt, Artificial Sequence
  Description of Artificial Sequence: Synthetic oligonucleotide
guugcaggucaaagcggac

SEQ ID NO: 1562007 - RNA, 19 nt, Artificial Sequence
  Description of Artificial Sequence: Synthetic oligonucleotide
ucggcgggucguagggccu

SEQ ID NO: 1562008 - RNA, 19 nt, Artificial Sequence
  Description of Artificial Sequence: Synthetic oligonucleotide
caugcugauuucacaguau

SEQ ID NO: 1562009 - RNA, 19 nt, Artificial Sequence
  Description of Artificial Sequence: Synthetic oligonucleotide
ccagcgaguggcuuuguga

SEQ ID NO: 1562010 - RNA, 19 nt, Artificial Sequence
  Description of Artificial Sequence: Synthetic oligonucleotide
cagcgaguggcuuugugau

SEQ ID NO: 1562011 - RNA, 19 nt, Artificial Sequence
  Description of Artificial Sequence: Synthetic oligonucleotide
caguacgacccaggaaguc

SEQ ID NO: 1562012 - RNA, 19 nt, Artificial Sequence
  Description of Artificial Sequence: Synthetic oligonucleotide
gggcuugauaagucuuuuc

SEQ ID NO: 1562013 - RNA, 19 nt, Artificial Sequence
  Description of Artificial Sequence: Synthetic oligonucleotide
cuguccuuucauuaauguu

SEQ ID NO: 1562014 - RNA, 19 nt, Artificial Sequence
  Description of Artificial Sequence: Synthetic oligonucleotide
gggauuuaguguaucuugu

SEQ ID NO: 1562015 - RNA, 19 nt, Artificial Sequence
  Description of Artificial Sequence: Synthetic oligonucleotide
gggacuucgugcagcagca

SEQ ID NO: 1562016 - RNA, 19 nt, Artificial Sequence
  Description of Artificial Sequence: Synthetic oligonucleotide
agcagucggcgggucguag

SEQ ID NO: 1562017 - RNA, 19 nt, Artificial Sequence
  Description of Artificial Sequence: Synthetic oligonucleotide
cacauucgccaagugguaa

SEQ ID NO: 1562018 - RNA, 19 nt, Artificial Sequence
  Description of Artificial Sequence: Synthetic oligonucleotide
caguggggacuucgugcag

SEQ ID NO: 1562019 - RNA, 19 nt, Artificial Sequence
  Description of Artificial Sequence: Synthetic oligonucleotide
cagcagaggucacaugugu

SEQ ID NO: 1562020 - RNA, 19 nt, Artificial Sequence
  Description of Artificial Sequence: Synthetic oligonucleotide
ccugucaaacauagugaga

SEQ ID NO: 1562021 - RNA, 19 nt, Artificial Sequence
  Description of Artificial Sequence: Synthetic oligonucleotide
uggggacuucgugcagcag

SEQ ID NO: 1562022 - RNA, 19 nt, Artificial Sequence
  Description of Artificial Sequence: Synthetic oligonucleotide
gguauagcuuugggagccc

SEQ ID NO: 1562023 - RNA, 19 nt, Artificial Sequence
  Description of Artificial Sequence: Synthetic oligonucleotide
acgggcuugauaagucuuu

SEQ ID NO: 1562024 - RNA, 19 nt, Artificial Sequence
  Description of Artificial Sequence: Synthetic oligonucleotide
acacauucgccaaguggua

SEQ ID NO: 1562025 - RNA, 19 nt, Artificial Sequence
  Description of Artificial Sequence: Synthetic oligonucleotide
cuguucggagggugguaca

SEQ ID NO: 1562026 - RNA, 19 nt, Artificial Sequence
  Description of Artificial Sequence: Synthetic oligonucleotide
ccaagugguaacaucuggu

SEQ ID NO: 1562027 - RNA, 19 nt, Artificial Sequence
  Description of Artificial Sequence: Synthetic oligonucleotide
gucacauguguggaauggu

SEQ ID NO: 1562028 - RNA, 19 nt, Artificial Sequence
  Description of Artificial Sequence: Synthetic oligonucleotide
gcucuuggucuuauauaac

SEQ ID NO: 1562029 - RNA, 19 nt, Artificial Sequence
  Description of Artificial Sequence: Synthetic oligonucleotide
cccagcagaggucacaugu

SEQ ID NO: 1562030 - RNA, 19 nt, Artificial Sequence
  Description of Artificial Sequence: Synthetic oligonucleotide
ggagcccaugcugauuuca

SEQ ID NO: 1562031 - RNA, 19 nt, Artificial Sequence
  Description of Artificial Sequence: Synthetic oligonucleotide
ccaugcugauuucacagua

SEQ ID NO: 1562032 - RNA, 19 nt, Artificial Sequence
  Description of Artificial Sequence: Synthetic oligonucleotide
cuccucggccccaggagaa

SEQ ID NO: 1562033 - RNA, 19 nt, Artificial Sequence
  Description of Artificial Sequence: Synthetic oligonucleotide
ggacccaaacuucuccagu

SEQ ID NO: 1562034 - RNA, 19 nt, Artificial Sequence
  Description of Artificial Sequence: Synthetic oligonucleotide
ucggccccaggagaagaua

SEQ ID NO: 1562035 - RNA, 19 nt, Artificial Sequence
  Description of Artificial Sequence: Synthetic oligonucleotide
gcuuuuaacucuguagcuu

SEQ ID NO: 1562036 - RNA, 19 nt, Artificial Sequence
  Description of Artificial Sequence: Synthetic oligonucleotide
cuggucccugucaaacaua

SEQ ID NO: 1562037 - RNA, 19 nt, Artificial Sequence
  Description of Artificial Sequence: Synthetic oligonucleotide
ggugguacacccgaucaau

SEQ ID NO: 1562038 - RNA, 19 nt, Artificial Sequence
  Description of Artificial Sequence: Synthetic oligonucleotide
gcauagauugcuagcaauu

SEQ ID NO: 1562039 - RNA, 19 nt, Artificial Sequence
  Description of Artificial Sequence: Synthetic oligonucleotide
aggucaaagcggacccaaa

SEQ ID NO: 1562040 - RNA, 19 nt, Artificial Sequence
  Description of Artificial Sequence: Synthetic oligonucleotide
gggugguacacccgaucaa

SEQ ID NO: 1562041 - RNA, 19 nt, Artificial Sequence
  Description of Artificial Sequence: Synthetic oligonucleotide
gcuuccggggacccaggca

SEQ ID NO: 1562042 - RNA, 19 nt, Artificial Sequence
  Description of Artificial Sequence: Synthetic oligonucleotide
cauccugguaaagauccuu

SEQ ID NO: 1562043 - RNA, 19 nt, Artificial Sequence
  Description of Artificial Sequence: Synthetic oligonucleotide
cgccaagugguaacaucug

SEQ ID NO: 1562044 - RNA, 19 nt, Artificial Sequence
  Description of Artificial Sequence: Synthetic oligonucleotide
ggacuucgugcagcagcag

SEQ ID NO: 1562045 - RNA, 19 nt, Artificial Sequence
  Description of Artificial Sequence: Synthetic oligonucleotide
cguagggccuuugcuuucc

SEQ ID NO: 1562046 - RNA, 19 nt, Artificial Sequence
  Description of Artificial Sequence: Synthetic oligonucleotide
caggaagaugggcguuuua

SEQ ID NO: 1562047 - RNA, 19 nt, Artificial Sequence
  Description of Artificial Sequence: Synthetic oligonucleotide
cacuugggauuuaguguau

SEQ ID NO: 1562048 - RNA, 19 nt, Artificial Sequence
  Description of Artificial Sequence: Synthetic oligonucleotide
gcacaaguggaugcuauuu

SEQ ID NO: 1562049 - RNA, 19 nt, Artificial Sequence
  Description of Artificial Sequence: Synthetic oligonucleotide
cuucgaugacauguaccau

SEQ ID NO: 1562050 - RNA, 19 nt, Artificial Sequence
  Description of Artificial Sequence: Synthetic oligonucleotide
gucuguucggaggguggua

SEQ ID NO: 1562051 - RNA, 19 nt, Artificial Sequence
  Description of Artificial Sequence: Synthetic oligonucleotide
cccagcgaguggcuuugug

SEQ ID NO: 1562052 - RNA, 19 nt, Artificial Sequence
  Description of Artificial Sequence: Synthetic oligonucleotide
ggcaucuaacacagccgaa

SEQ ID NO: 1562053 - RNA, 19 nt, Artificial Sequence
  Description of Artificial Sequence: Synthetic oligonucleotide
ccagaggaagccgcgaacu

SEQ ID NO: 1562054 - RNA, 19 nt, Artificial Sequence
  Description of Artificial Sequence: Synthetic oligonucleotide
ucccagcgaguggcuuugu

SEQ ID NO: 1562055 - RNA, 19 nt, Artificial Sequence
  Description of Artificial Sequence: Synthetic oligonucleotide
gcucgucgcuggaaggguc

SEQ ID NO: 1562056 - RNA, 19 nt, Artificial Sequence
  Description of Artificial Sequence: Synthetic oligonucleotide
cggagggugguacacccga

SEQ ID NO: 1562057 - RNA, 19 nt, Artificial Sequence
  Description of Artificial Sequence: Synthetic oligonucleotide
cgggucguagggccuuugc

SEQ ID NO: 1562058 - RNA, 19 nt, Artificial Sequence
  Description of Artificial Sequence: Synthetic oligonucleotide
cucggccccaggagaagau

SEQ ID NO: 1562059 - RNA, 19 nt, Artificial Sequence
  Description of Artificial Sequence: Synthetic oligonucleotide
cgcgaacugccugaccaug

SEQ ID NO: 1562060 - RNA, 19 nt, Artificial Sequence
  Description of Artificial Sequence: Synthetic oligonucleotide
ggcucgucgcuggaagggu

SEQ ID NO: 1562061 - RNA, 19 nt, Artificial Sequence
  Description of Artificial Sequence: Synthetic oligonucleotide
ccuguucuguucgaauuuu

SEQ ID NO: 1562062 - RNA, 19 nt, Artificial Sequence
  Description of Artificial Sequence: Synthetic oligonucleotide
gcgggucguagggccuuug

SEQ ID NO: 1562063 - RNA, 19 nt, Artificial Sequence
  Description of Artificial Sequence: Synthetic oligonucleotide
ggucccugucaaacauagu

SEQ ID NO: 1562064 - RNA, 19 nt, Artificial Sequence
  Description of Artificial Sequence: Synthetic oligonucleotide
gcccaaugccugaagucuu

SEQ ID NO: 1562065 - RNA, 19 nt, Artificial Sequence
  Description of Artificial Sequence: Synthetic oligonucleotide
ggagggugguacacccgau

SEQ ID NO: 1562066 - RNA, 19 nt, Artificial Sequence
  Description of Artificial Sequence: Synthetic oligonucleotide
cagcagucggcgggucgua

SEQ ID NO: 1562067 - RNA, 19 nt, Artificial Sequence
  Description of Artificial Sequence: Synthetic oligonucleotide
ggcccucagaggagaguuu

SEQ ID NO: 1562068 - RNA, 19 nt, Artificial Sequence
  Description of Artificial Sequence: Synthetic oligonucleotide
ggcgggucguagggccuuu

SEQ ID NO: 1562069 - RNA, 19 nt, Artificial Sequence
  Description of Artificial Sequence: Synthetic oligonucleotide
cgucgcuggaaggguccgu

SEQ ID NO: 1562070 - RNA, 19 nt, Artificial Sequence
  Description of Artificial Sequence: Synthetic oligonucleotide
cggcgggucguagggccuu

SEQ ID NO: 1562071 - RNA, 19 nt, Artificial Sequence
  Description of Artificial Sequence: Synthetic oligonucleotide
aaaagaaggaauuagugcc

SEQ ID NO: 1562072 - RNA, 19 nt, Artificial Sequence
  Description of Artificial Sequence: Synthetic oligonucleotide
aauuccauuugcuagugcc

SEQ ID NO: 1562073 - RNA, 19 nt, Artificial Sequence
  Description of Artificial Sequence: Synthetic oligonucleotide
aauaucuuacuucuuauuc

SEQ ID NO: 1562074 - RNA, 19 nt, Artificial Sequence
  Description of Artificial Sequence: Synthetic oligonucleotide
acuacuauacuucaucucc

SEQ ID NO: 1562075 - RNA, 19 nt, Artificial Sequence
  Description of Artificial Sequence: Synthetic oligonucleotide
gauguugacguacagaucc

SEQ ID NO: 1562076 - RNA, 19 nt, Artificial Sequence
  Description of Artificial Sequence: Synthetic oligonucleotide
aacaugaugaagcacuguc

SEQ ID NO: 1562077 - RNA, 19 nt, Artificial Sequence
  Description of Artificial Sequence: Synthetic oligonucleotide
auguauagcagucugagug

SEQ ID NO: 1562078 - RNA, 19 nt, Artificial Sequence
  Description of Artificial Sequence: Synthetic oligonucleotide
gaaaccugcaucaagaggc

SEQ ID NO: 1562079 - RNA, 19 nt, Artificial Sequence
  Description of Artificial Sequence: Synthetic oligonucleotide
aaagcucucccauaaaucu

SEQ ID NO: 1562080 - RNA, 19 nt, Artificial Sequence
  Description of Artificial Sequence: Synthetic oligonucleotide
aacgauuggcuugaaaacc

SEQ ID NO: 1562081 - RNA, 19 nt, Artificial Sequence
  Description of Artificial Sequence: Synthetic oligonucleotide
auaaaucuuggucacagag

SEQ ID NO: 1562082 - RNA, 19 nt, Artificial Sequence
  Description of Artificial Sequence: Synthetic oligonucleotide
uccagauaaaugcugaggc

SEQ ID NO: 1562083 - RNA, 19 nt, Artificial Sequence
  Description of Artificial Sequence: Synthetic oligonucleotide
uggaaauuccauuugcuag

SEQ ID NO: 1562084 - RNA, 19 nt, Artificial Sequence
  Description of Artificial Sequence: Synthetic oligonucleotide
gauguaagcgucuuuggag

SEQ ID NO: 1562085 - RNA, 19 nt, Artificial Sequence
  Description of Artificial Sequence: Synthetic oligonucleotide
uuuaauggcaaaacuccag

SEQ ID NO: 1562086 - RNA, 19 nt, Artificial Sequence
  Description of Artificial Sequence: Synthetic oligonucleotide
ucaacgauuggcuugaaaa

SEQ ID NO: 1562087 - RNA, 19 nt, Artificial Sequence
  Description of Artificial Sequence: Synthetic oligonucleotide
aaauguauagcagucugag

SEQ ID NO: 1562088 - RNA, 19 nt, Artificial Sequence
  Description of Artificial Sequence: Synthetic oligonucleotide
guuagugcaacauggaggc

SEQ ID NO: 1562089 - RNA, 19 nt, Artificial Sequence
  Description of Artificial Sequence: Synthetic oligonucleotide
ucuuacuucuuauucacug

SEQ ID NO: 1562090 - RNA, 19 nt, Artificial Sequence
  Description of Artificial Sequence: Synthetic oligonucleotide
uuagguaaacacccuagag

SEQ ID NO: 1562091 - RNA, 19 nt, Artificial Sequence
  Description of Artificial Sequence: Synthetic oligonucleotide
agucagauuuauugggucc

SEQ ID NO: 1562092 - RNA, 19 nt, Artificial Sequence
  Description of Artificial Sequence: Synthetic oligonucleotide
aacuacuauacuucaucuc

SEQ ID NO: 1562093 - RNA, 19 nt, Artificial Sequence
  Description of Artificial Sequence: Synthetic oligonucleotide
gaugauuccacucccguug

SEQ ID NO: 1562094 - RNA, 19 nt, Artificial Sequence
  Description of Artificial Sequence: Synthetic oligonucleotide
uagguaaacacccuagaga

SEQ ID NO: 1562095 - RNA, 19 nt, Artificial Sequence
  Description of Artificial Sequence: Synthetic oligonucleotide
ugaaauaucuuacuucuua

SEQ ID NO: 1562096 - RNA, 19 nt, Artificial Sequence
  Description of Artificial Sequence: Synthetic oligonucleotide
ugaagguuaucucuguuga

SEQ ID NO: 1562097 - RNA, 19 nt, Artificial Sequence
  Description of Artificial Sequence: Synthetic oligonucleotide
uguggaguguaacuggucc

SEQ ID NO: 1562098 - RNA, 19 nt, Artificial Sequence
  Description of Artificial Sequence: Synthetic oligonucleotide
ugaaaccugcaucaagagg

SEQ ID NO: 1562099 - RNA, 19 nt, Artificial Sequence
  Description of Artificial Sequence: Synthetic oligonucleotide
guaaacacccuagagaugc

SEQ ID NO: 1562100 - RNA, 19 nt, Artificial Sequence
  Description of Artificial Sequence: Synthetic oligonucleotide
ugacauucggacaaucacc

SEQ ID NO: 1562101 - RNA, 19 nt, Artificial Sequence
  Description of Artificial Sequence: Synthetic oligonucleotide
acaaggagccgguaagucc

SEQ ID NO: 1562102 - RNA, 19 nt, Artificial Sequence
  Description of Artificial Sequence: Synthetic oligonucleotide
auguaagcgucuuuggagg

SEQ ID NO: 1562103 - RNA, 19 nt, Artificial Sequence
  Description of Artificial Sequence: Synthetic oligonucleotide
uuuugcuacuuuuaauggc

SEQ ID NO: 1562104 - RNA, 19 nt, Artificial Sequence
  Description of Artificial Sequence: Synthetic oligonucleotide
ugaugaagcacugucagca

SEQ ID NO: 1562105 - RNA, 19 nt, Artificial Sequence
  Description of Artificial Sequence: Synthetic oligonucleotide
uuuuaauggcaaaacucca

SEQ ID NO: 1562106 - RNA, 19 nt, Artificial Sequence
  Description of Artificial Sequence: Synthetic oligonucleotide
ugagauuugcuaauagcac

SEQ ID NO: 1562107 - RNA, 19 nt, Artificial Sequence
  Description of Artificial Sequence: Synthetic oligonucleotide
cuugaaaaccaucauggug

SEQ ID NO: 1562108 - RNA, 19 nt, Artificial Sequence
  Description of Artificial Sequence: Synthetic oligonucleotide
aucaguuagugcaacaugg

SEQ ID NO: 1562109 - RNA, 19 nt, Artificial Sequence
  Description of Artificial Sequence: Synthetic oligonucleotide
aauaaucagcuggucuugc

SEQ ID NO: 1562110 - RNA, 19 nt, Artificial Sequence
  Description of Artificial Sequence: Synthetic oligonucleotide
uuaguuccaccuuucaagc

SEQ ID NO: 1562111 - RNA, 19 nt, Artificial Sequence
  Description of Artificial Sequence: Synthetic oligonucleotide
cuaauagcacuucagcagc

SEQ ID NO: 1562112 - RNA, 19 nt, Artificial Sequence
  Description of Artificial Sequence: Synthetic oligonucleotide
ucggacaaucaccucaccg

SEQ ID NO: 1562113 - RNA, 19 nt, Artificial Sequence
  Description of Artificial Sequence: Synthetic oligonucleotide
acaaucaccucaccgcccc

SEQ ID NO: 1562114 - RNA, 19 nt, Artificial Sequence
  Description of Artificial Sequence: Synthetic oligonucleotide
accgcuuagguaaacaccc

SEQ ID NO: 1562115 - RNA, 19 nt, Artificial Sequence
  Description of Artificial Sequence: Synthetic oligonucleotide
uaucuuacuucuuauucac

SEQ ID NO: 1562116 - RNA, 19 nt, Artificial Sequence
  Description of Artificial Sequence: Synthetic oligonucleotide
uugcuaauagcacuucagc

SEQ ID NO: 1562117 - RNA, 19 nt, Artificial Sequence
  Description of Artificial Sequence: Synthetic oligonucleotide
ugcuaauagcacuucagca

SEQ ID NO: 1562118 - RNA, 19 nt, Artificial Sequence
  Description of Artificial Sequence: Synthetic oligonucleotide
caaggagccgguaaguccg

SEQ ID NO: 1562119 - RNA, 19 nt, Artificial Sequence
  Description of Artificial Sequence: Synthetic oligonucleotide
cuuucugaugcaucguacg

SEQ ID NO: 1562120 - RNA, 19 nt, Artificial Sequence
  Description of Artificial Sequence: Synthetic oligonucleotide
caugaugaagcacugucag

SEQ ID NO: 1562121 - RNA, 19 nt, Artificial Sequence
  Description of Artificial Sequence: Synthetic oligonucleotide
aaggaauuagugccuccgg

SEQ ID NO: 1562122 - RNA, 19 nt, Artificial Sequence
  Description of Artificial Sequence: Synthetic oligonucleotide
ugccauuucagcauuaguu

SEQ ID NO: 1562123 - RNA, 19 nt, Artificial Sequence
  Description of Artificial Sequence: Synthetic oligonucleotide
aauuucucaacgauuggcu

SEQ ID NO: 1562124 - RNA, 19 nt, Artificial Sequence
  Description of Artificial Sequence: Synthetic oligonucleotide
agauuuauuggguccaacu

SEQ ID NO: 1562125 - RNA, 19 nt, Artificial Sequence
  Description of Artificial Sequence: Synthetic oligonucleotide
uguugagccgauuucugcc

SEQ ID NO: 1562126 - RNA, 19 nt, Artificial Sequence
  Description of Artificial Sequence: Synthetic oligonucleotide
uuucucaacgauuggcuug

SEQ ID NO: 1562127 - RNA, 19 nt, Artificial Sequence
  Description of Artificial Sequence: Synthetic oligonucleotide
aaccaaauuucucaacgau

SEQ ID NO: 1562128 - RNA, 19 nt, Artificial Sequence
  Description of Artificial Sequence: Synthetic oligonucleotide
ucucgaaccauuuccaguc

SEQ ID NO: 1562129 - RNA, 19 nt, Artificial Sequence
  Description of Artificial Sequence: Synthetic oligonucleotide
ggcuugaaaaccaucaugg

SEQ ID NO: 1562130 - RNA, 19 nt, Artificial Sequence
  Description of Artificial Sequence: Synthetic oligonucleotide
ugauguaagcgucuuugga

SEQ ID NO: 1562131 - RNA, 19 nt, Artificial Sequence
  Description of Artificial Sequence: Synthetic oligonucleotide
gaaggaauuagugccuccg

SEQ ID NO: 1562132 - RNA, 19 nt, Artificial Sequence
  Description of Artificial Sequence: Synthetic oligonucleotide
ugaugcaucguacggcugc

SEQ ID NO: 1562133 - RNA, 19 nt, Artificial Sequence
  Description of Artificial Sequence: Synthetic oligonucleotide
augaagguuaucucuguug

SEQ ID NO: 1562134 - RNA, 19 nt, Artificial Sequence
  Description of Artificial Sequence: Synthetic oligonucleotide
aggaauuagugccuccggg

SEQ ID NO: 1562135 - RNA, 19 nt, Artificial Sequence
  Description of Artificial Sequence: Synthetic oligonucleotide
gaagcuccgauggagaagc

SEQ ID NO: 1562136 - RNA, 19 nt, Artificial Sequence
  Description of Artificial Sequence: Synthetic oligonucleotide
aaggcuuggucccuggacu

SEQ ID NO: 1562137 - RNA, 19 nt, Artificial Sequence
  Description of Artificial Sequence: Synthetic oligonucleotide
agcaaaauguauagcaguc

SEQ ID NO: 1562138 - RNA, 19 nt, Artificial Sequence
  Description of Artificial Sequence: Synthetic oligonucleotide
agaggcuggauguugacgu

SEQ ID NO: 1562139 - RNA, 19 nt, Artificial Sequence
  Description of Artificial Sequence: Synthetic oligonucleotide
acguacagaucccugaucu

SEQ ID NO: 1562140 - RNA, 19 nt, Artificial Sequence
  Description of Artificial Sequence: Synthetic oligonucleotide
aauguauagcagucugagu

SEQ ID NO: 1562141 - RNA, 19 nt, Artificial Sequence
  Description of Artificial Sequence: Synthetic oligonucleotide
cuucguaucugcagugugg

SEQ ID NO: 1562142 - RNA, 19 nt, Artificial Sequence
  Description of Artificial Sequence: Synthetic oligonucleotide
aaauaaucagcuggucuug

SEQ ID NO: 1562143 - RNA, 19 nt, Artificial Sequence
  Description of Artificial Sequence: Synthetic oligonucleotide
uguauagcagucugagugu

SEQ ID NO: 1562144 - RNA, 19 nt, Artificial Sequence
  Description of Artificial Sequence: Synthetic oligonucleotide
gauacucguccacagugcc

SEQ ID NO: 1562145 - RNA, 19 nt, Artificial Sequence
  Description of Artificial Sequence: Synthetic oligonucleotide
uauagcagucugagugugg

SEQ ID NO: 1562146 - RNA, 19 nt, Artificial Sequence
  Description of Artificial Sequence: Synthetic oligonucleotide
aguuccaccuuucaagcga

SEQ ID NO: 1562147 - RNA, 19 nt, Artificial Sequence
  Description of Artificial Sequence: Synthetic oligonucleotide
agagaugcggauuugccau

SEQ ID NO: 1562148 - RNA, 19 nt, Artificial Sequence
  Description of Artificial Sequence: Synthetic oligonucleotide
uucugcacgcgcaagggga

SEQ ID NO: 1562149 - RNA, 19 nt, Artificial Sequence
  Description of Artificial Sequence: Synthetic oligonucleotide
ucaguuagugcaacaugga

SEQ ID NO: 1562150 - RNA, 19 nt, Artificial Sequence
  Description of Artificial Sequence: Synthetic oligonucleotide
aaagaaggaauuagugccu

SEQ ID NO: 1562151 - RNA, 19 nt, Artificial Sequence
  Description of Artificial Sequence: Synthetic oligonucleotide
caacgauuggcuugaaaac

SEQ ID NO: 1562152 - RNA, 19 nt, Artificial Sequence
  Description of Artificial Sequence: Synthetic oligonucleotide
ugguguaaucaaucugcgg

SEQ ID NO: 1562153 - RNA, 19 nt, Artificial Sequence
  Description of Artificial Sequence: Synthetic oligonucleotide
aggacaaggagccgguaag

SEQ ID NO: 1562154 - RNA, 19 nt, Artificial Sequence
  Description of Artificial Sequence: Synthetic oligonucleotide
aaaucucgaaccauuucca

SEQ ID NO: 1562155 - RNA, 19 nt, Artificial Sequence
  Description of Artificial Sequence: Synthetic oligonucleotide
uguaaucaaucugcggugc

SEQ ID NO: 1562156 - RNA, 19 nt, Artificial Sequence
  Description of Artificial Sequence: Synthetic oligonucleotide
agaucccugaucuccuuuc

SEQ ID NO: 1562157 - RNA, 19 nt, Artificial Sequence
  Description of Artificial Sequence: Synthetic oligonucleotide
ucuucucugguaugaaggu

SEQ ID NO: 1562158 - RNA, 19 nt, Artificial Sequence
  Description of Artificial Sequence: Synthetic oligonucleotide
gugacauucggacaaucac

SEQ ID NO: 1562159 - RNA, 19 nt, Artificial Sequence
  Description of Artificial Sequence: Synthetic oligonucleotide
uauuggguccaacuguuua

SEQ ID NO: 1562160 - RNA, 19 nt, Artificial Sequence
  Description of Artificial Sequence: Synthetic oligonucleotide
caaugaugauuccacuccc

SEQ ID NO: 1562161 - RNA, 19 nt, Artificial Sequence
  Description of Artificial Sequence: Synthetic oligonucleotide
caucaugguguaaucaauc

SEQ ID NO: 1562162 - RNA, 19 nt, Artificial Sequence
  Description of Artificial Sequence: Synthetic oligonucleotide
ucugcggugccauuucagc

SEQ ID NO: 1562163 - RNA, 19 nt, Artificial Sequence
  Description of Artificial Sequence: Synthetic oligonucleotide
uggcaaaacuccagcaaca

SEQ ID NO: 1562164 - RNA, 19 nt, Artificial Sequence
  Description of Artificial Sequence: Synthetic oligonucleotide
aguccugaaauaucuuacu

SEQ ID NO: 1562165 - RNA, 19 nt, Artificial Sequence
  Description of Artificial Sequence: Synthetic oligonucleotide
caguccugaaauaucuuac

SEQ ID NO: 1562166 - RNA, 19 nt, Artificial Sequence
  Description of Artificial Sequence: Synthetic oligonucleotide
gaagguuaucucuguugag

SEQ ID NO: 1562167 - RNA, 19 nt, Artificial Sequence
  Description of Artificial Sequence: Synthetic oligonucleotide
gaugaagcacugucagcag

SEQ ID NO: 1562168 - RNA, 19 nt, Artificial Sequence
  Description of Artificial Sequence: Synthetic oligonucleotide
uaguuccaccuuucaagcg

SEQ ID NO: 1562169 - RNA, 19 nt, Artificial Sequence
  Description of Artificial Sequence: Synthetic oligonucleotide
ucccgauuccuucacacuc

SEQ ID NO: 1562170 - RNA, 19 nt, Artificial Sequence
  Description of Artificial Sequence: Synthetic oligonucleotide
ggauuugccaucccgauuc

SEQ ID NO: 1562171 - RNA, 19 nt, Artificial Sequence
  Description of Artificial Sequence: Synthetic oligonucleotide
acccugaggaucuggccgc

SEQ ID NO: 1562172 - RNA, 19 nt, Artificial Sequence
  Description of Artificial Sequence: Synthetic oligonucleotide
uuucaagcgaagcuccgau

SEQ ID NO: 1562173 - RNA, 19 nt, Artificial Sequence
  Description of Artificial Sequence: Synthetic oligonucleotide
uguaagcgucuuuggaggc

SEQ ID NO: 1562174 - RNA, 19 nt, Artificial Sequence
  Description of Artificial Sequence: Synthetic oligonucleotide
agccaguagaugucucagc

SEQ ID NO: 1562175 - RNA, 19 nt, Artificial Sequence
  Description of Artificial Sequence: Synthetic oligonucleotide
aucgcuggcacgcgugagc

SEQ ID NO: 1562176 - RNA, 19 nt, Artificial Sequence
  Description of Artificial Sequence: Synthetic oligonucleotide
acuguguugcagcagguau

SEQ ID NO: 1562177 - RNA, 19 nt, Artificial Sequence
  Description of Artificial Sequence: Synthetic oligonucleotide
aauagccccucauuuuaau

SEQ ID NO: 1562178 - RNA, 19 nt, Artificial Sequence
  Description of Artificial Sequence: Synthetic oligonucleotide
cauucggacaaucaccuca

SEQ ID NO: 1562179 - RNA, 19 nt, Artificial Sequence
  Description of Artificial Sequence: Synthetic oligonucleotide
gagauuugcuaauagcacu

SEQ ID NO: 1562180 - RNA, 19 nt, Artificial Sequence
  Description of Artificial Sequence: Synthetic oligonucleotide
ugcggauuugccaucccga

SEQ ID NO: 1562181 - RNA, 19 nt, Artificial Sequence
  Description of Artificial Sequence: Synthetic oligonucleotide
gaucccgccguccaccucc

SEQ ID NO: 1562182 - RNA, 19 nt, Artificial Sequence
  Description of Artificial Sequence: Synthetic oligonucleotide
aauuagugccuccgggaaa

SEQ ID NO: 1562183 - RNA, 19 nt, Artificial Sequence
  Description of Artificial Sequence: Synthetic oligonucleotide
uaaacacccuagagaugcg

SEQ ID NO: 1562184 - RNA, 19 nt, Artificial Sequence
  Description of Artificial Sequence: Synthetic oligonucleotide
ucuugcagauacucgucca

SEQ ID NO: 1562185 - RNA, 19 nt, Artificial Sequence
  Description of Artificial Sequence: Synthetic oligonucleotide
uacucguccacagugccgc

SEQ ID NO: 1562186 - RNA, 19 nt, Artificial Sequence
  Description of Artificial Sequence: Synthetic oligonucleotide
ugucacaaucaaauuugaa

SEQ ID NO: 1562187 - RNA, 19 nt, Artificial Sequence
  Description of Artificial Sequence: Synthetic oligonucleotide
auagccccucauuuuaaug

SEQ ID NO: 1562188 - RNA, 19 nt, Artificial Sequence
  Description of Artificial Sequence: Synthetic oligonucleotide
uucugaugcaucguacggc

SEQ ID NO: 1562189 - RNA, 19 nt, Artificial Sequence
  Description of Artificial Sequence: Synthetic oligonucleotide
gauuccaccucugaucuuc

SEQ ID NO: 1562190 - RNA, 19 nt, Artificial Sequence
  Description of Artificial Sequence: Synthetic oligonucleotide
guccagauaaaugcugagg

SEQ ID NO: 1562191 - RNA, 19 nt, Artificial Sequence
  Description of Artificial Sequence: Synthetic oligonucleotide
ucuuauucacuguguugca

SEQ ID NO: 1562192 - RNA, 19 nt, Artificial Sequence
  Description of Artificial Sequence: Synthetic oligonucleotide
agccccucauuuuaauguc

SEQ ID NO: 1562193 - RNA, 19 nt, Artificial Sequence
  Description of Artificial Sequence: Synthetic oligonucleotide
augcggauuugccaucccg

SEQ ID NO: 1562194 - RNA, 19 nt, Artificial Sequence
  Description of Artificial Sequence: Synthetic oligonucleotide
ugucuucguaucugcagug

SEQ ID NO: 1562195 - RNA, 19 nt, Artificial Sequence
  Description of Artificial Sequence: Synthetic oligonucleotide
caccgcuuagguaaacacc

SEQ ID NO: 1562196 - RNA, 19 nt, Artificial Sequence
  Description of Artificial Sequence: Synthetic oligonucleotide
uuugcuaguugcucagcaa

SEQ ID NO: 1562197 - RNA, 19 nt, Artificial Sequence
  Description of Artificial Sequence: Synthetic oligonucleotide
auucggacaaucaccucac

SEQ ID NO: 1562198 - RNA, 19 nt, Artificial Sequence
  Description of Artificial Sequence: Synthetic oligonucleotide
uaauagcacuucagcagcu

SEQ ID NO: 1562199 - RNA, 19 nt, Artificial Sequence
  Description of Artificial Sequence: Synthetic oligonucleotide
uucucaacgauuggcuuga

SEQ ID NO: 1562200 - RNA, 19 nt, Artificial Sequence
  Description of Artificial Sequence: Synthetic oligonucleotide
gaauuagugccuccgggaa

SEQ ID NO: 1562201 - RNA, 19 nt, Artificial Sequence
  Description of Artificial Sequence: Synthetic oligonucleotide
cuguugagccgauuucugc

SEQ ID NO: 1562202 - RNA, 19 nt, Artificial Sequence
  Description of Artificial Sequence: Synthetic oligonucleotide
aacauggaggcaccgcuua

SEQ ID NO: 1562203 - RNA, 19 nt, Artificial Sequence
  Description of Artificial Sequence: Synthetic oligonucleotide
uaaucaaucugcggugcca

SEQ ID NO: 1562204 - RNA, 19 nt, Artificial Sequence
  Description of Artificial Sequence: Synthetic oligonucleotide
uacagaucccugaucuccu

SEQ ID NO: 1562205 - RNA, 19 nt, Artificial Sequence
  Description of Artificial Sequence: Synthetic oligonucleotide
aaacaagcagccaguagau

SEQ ID NO: 1562206 - RNA, 19 nt, Artificial Sequence
  Description of Artificial Sequence: Synthetic oligonucleotide
ucugcacgcgcaaggggag

SEQ ID NO: 1562207 - RNA, 19 nt, Artificial Sequence
  Description of Artificial Sequence: Synthetic oligonucleotide
caucccgauuccuucacac

SEQ ID NO: 1562208 - RNA, 19 nt, Artificial Sequence
  Description of Artificial Sequence: Synthetic oligonucleotide
uccaccuuucaagcgaagc

SEQ ID NO: 1562209 - RNA, 19 nt, Artificial Sequence
  Description of Artificial Sequence: Synthetic oligonucleotide
uagugccaugaaaauaauc

SEQ ID NO: 1562210 - RNA, 19 nt, Artificial Sequence
  Description of Artificial Sequence: Synthetic oligonucleotide
aucguacggcugcugcugc

SEQ ID NO: 1562211 - RNA, 19 nt, Artificial Sequence
  Description of Artificial Sequence: Synthetic oligonucleotide
gguaugaagguuaucucug

SEQ ID NO: 1562212 - RNA, 19 nt, Artificial Sequence
  Description of Artificial Sequence: Synthetic oligonucleotide
uaugaagguuaucucuguu

SEQ ID NO: 1562213 - RNA, 19 nt, Artificial Sequence
  Description of Artificial Sequence: Synthetic oligonucleotide
guaaucaaucugcggugcc

SEQ ID NO: 1562214 - RNA, 19 nt, Artificial Sequence
  Description of Artificial Sequence: Synthetic oligonucleotide
guuaucucuguugagccga

SEQ ID NO: 1562215 - RNA, 19 nt, Artificial Sequence
  Description of Artificial Sequence: Synthetic oligonucleotide
cuugcagauacucguccac

SEQ ID NO: 1562216 - RNA, 19 nt, Artificial Sequence
  Description of Artificial Sequence: Synthetic oligonucleotide
uucaagcgaagcuccgaug

SEQ ID NO: 1562217 - RNA, 19 nt, Artificial Sequence
  Description of Artificial Sequence: Synthetic oligonucleotide
uuggguaauagccccucau

SEQ ID NO: 1562218 - RNA, 19 nt, Artificial Sequence
  Description of Artificial Sequence: Synthetic oligonucleotide
uuuggguaauagccccuca

SEQ ID NO: 1562219 - RNA, 19 nt, Artificial Sequence
  Description of Artificial Sequence: Synthetic oligonucleotide
auuucucaacgauuggcuu

SEQ ID NO: 1562220 - RNA, 19 nt, Artificial Sequence
  Description of Artificial Sequence: Synthetic oligonucleotide
uccuucacacucgaugaug

SEQ ID NO: 1562221 - RNA, 19 nt, Artificial Sequence
  Description of Artificial Sequence: Synthetic oligonucleotide
aaucaaucugcggugccau

SEQ ID NO: 1562222 - RNA, 19 nt, Artificial Sequence
  Description of Artificial Sequence: Synthetic oligonucleotide
ggaggcaccgcuuagguaa

SEQ ID NO: 1562223 - RNA, 19 nt, Artificial Sequence
  Description of Artificial Sequence: Synthetic oligonucleotide
uggucacagagccacgauc

SEQ ID NO: 1562224 - RNA, 19 nt, Artificial Sequence
  Description of Artificial Sequence: Synthetic oligonucleotide
uccaacuguuuaacuggug

SEQ ID NO: 1562225 - RNA, 19 nt, Artificial Sequence
  Description of Artificial Sequence: Synthetic oligonucleotide
ugacguacagaucccugau

SEQ ID NO: 1562226 - RNA, 19 nt, Artificial Sequence
  Description of Artificial Sequence: Synthetic oligonucleotide
auagcagucugagugugga

SEQ ID NO: 1562227 - RNA, 19 nt, Artificial Sequence
  Description of Artificial Sequence: Synthetic oligonucleotide
ccuuuuggguaauagcccc

SEQ ID NO: 1562228 - RNA, 19 nt, Artificial Sequence
  Description of Artificial Sequence: Synthetic oligonucleotide
uugagccgauuucugcccc

SEQ ID NO: 1562229 - RNA, 19 nt, Artificial Sequence
  Description of Artificial Sequence: Synthetic oligonucleotide
cuuagguaaacacccuaga

SEQ ID NO: 1562230 - RNA, 19 nt, Artificial Sequence
  Description of Artificial Sequence: Synthetic oligonucleotide
gguuaucucuguugagccg

SEQ ID NO: 1562231 - RNA, 19 nt, Artificial Sequence
  Description of Artificial Sequence: Synthetic oligonucleotide
gagccgguaaguccgcagc

SEQ ID NO: 1562232 - RNA, 19 nt, Artificial Sequence
  Description of Artificial Sequence: Synthetic oligonucleotide
uggguaauagccccucauu

SEQ ID NO: 1562233 - RNA, 19 nt, Artificial Sequence
  Description of Artificial Sequence: Synthetic oligonucleotide
gcagcugaaacuacuauac

SEQ ID NO: 1562234 - RNA, 19 nt, Artificial Sequence
  Description of Artificial Sequence: Synthetic oligonucleotide
uuccgggccgagcuugccg

SEQ ID NO: 1562235 - RNA, 19 nt, Artificial Sequence
  Description of Artificial Sequence: Synthetic oligonucleotide
caguaaauuuggccuuugc

SEQ ID NO: 1562236 - RNA, 19 nt, Artificial Sequence
  Description of Artificial Sequence: Synthetic oligonucleotide
uccaaccuugucugcauuc

SEQ ID NO: 1562237 - RNA, 19 nt, Artificial Sequence
  Description of Artificial Sequence: Synthetic oligonucleotide
acuauacuucaucuccaaa

SEQ ID NO: 1562238 - RNA, 19 nt, Artificial Sequence
  Description of Artificial Sequence: Synthetic oligonucleotide
gcauucacaccucuuuugc

SEQ ID NO: 1562239 - RNA, 19 nt, Artificial Sequence
  Description of Artificial Sequence: Synthetic oligonucleotide
uucacaccucuuuugccaa

SEQ ID NO: 1562240 - RNA, 19 nt, Artificial Sequence
  Description of Artificial Sequence: Synthetic oligonucleotide
auguugacguacagauccc

SEQ ID NO: 1562241 - RNA, 19 nt, Artificial Sequence
  Description of Artificial Sequence: Synthetic oligonucleotide
agcucucccauaaaucuug

SEQ ID NO: 1562242 - RNA, 19 nt, Artificial Sequence
  Description of Artificial Sequence: Synthetic oligonucleotide
aacaagcagccaguagaug

SEQ ID NO: 1562243 - RNA, 19 nt, Artificial Sequence
  Description of Artificial Sequence: Synthetic oligonucleotide
cuucugcacgcgcaagggg

SEQ ID NO: 1562244 - RNA, 19 nt, Artificial Sequence
  Description of Artificial Sequence: Synthetic oligonucleotide
agcuucaauuccaaccuug

SEQ ID NO: 1562245 - RNA, 19 nt, Artificial Sequence
  Description of Artificial Sequence: Synthetic oligonucleotide
uccaucgcuggcacgcgug

SEQ ID NO: 1562246 - RNA, 19 nt, Artificial Sequence
  Description of Artificial Sequence: Synthetic oligonucleotide
cuuugcuaguugcucagca

SEQ ID NO: 1562247 - RNA, 19 nt, Artificial Sequence
  Description of Artificial Sequence: Synthetic oligonucleotide
acaugaugaagcacuguca

SEQ ID NO: 1562248 - RNA, 19 nt, Artificial Sequence
  Description of Artificial Sequence: Synthetic oligonucleotide
acauucggacaaucaccuc

SEQ ID NO: 1562249 - RNA, 19 nt, Artificial Sequence
  Description of Artificial Sequence: Synthetic oligonucleotide
agcagguauaaaaucaguu

SEQ ID NO: 1562250 - RNA, 19 nt, Artificial Sequence
  Description of Artificial Sequence: Synthetic oligonucleotide
acgauuggcuugaaaacca

SEQ ID NO: 1562251 - RNA, 19 nt, Artificial Sequence
  Description of Artificial Sequence: Synthetic oligonucleotide
gcagguauaaaaucaguua

SEQ ID NO: 1562252 - RNA, 19 nt, Artificial Sequence
  Description of Artificial Sequence: Synthetic oligonucleotide
gccacgaucagucagauuu

SEQ ID NO: 1562253 - RNA, 19 nt, Artificial Sequence
  Description of Artificial Sequence: Synthetic oligonucleotide
ggaauuagugccuccggga

SEQ ID NO: 1562254 - RNA, 19 nt, Artificial Sequence
  Description of Artificial Sequence: Synthetic oligonucleotide
uugcagauacucguccaca

SEQ ID NO: 1562255 - RNA, 19 nt, Artificial Sequence
  Description of Artificial Sequence: Synthetic oligonucleotide
uccauuugcuagugccaug

SEQ ID NO: 1562256 - RNA, 19 nt, Artificial Sequence
  Description of Artificial Sequence: Synthetic oligonucleotide
ugaugauuccacucccguu

SEQ ID NO: 1562257 - RNA, 19 nt, Artificial Sequence
  Description of Artificial Sequence: Synthetic oligonucleotide
uuuuggguaauagccccuc

SEQ ID NO: 1562258 - RNA, 19 nt, Artificial Sequence
  Description of Artificial Sequence: Synthetic oligonucleotide
aggcuggauguugacguac

SEQ ID NO: 1562259 - RNA, 19 nt, Artificial Sequence
  Description of Artificial Sequence: Synthetic oligonucleotide
guauagcagucugagugug

SEQ ID NO: 1562260 - RNA, 19 nt, Artificial Sequence
  Description of Artificial Sequence: Synthetic oligonucleotide
uguugacguacagaucccu

SEQ ID NO: 1562261 - RNA, 19 nt, Artificial Sequence
  Description of Artificial Sequence: Synthetic oligonucleotide
ugcaacauggaggcaccgc

SEQ ID NO: 1562262 - RNA, 19 nt, Artificial Sequence
  Description of Artificial Sequence: Synthetic oligonucleotide
aaaccugcaucaagaggca

SEQ ID NO: 1562263 - RNA, 19 nt, Artificial Sequence
  Description of Artificial Sequence: Synthetic oligonucleotide
gugaugagccagcaaacaa

SEQ ID NO: 1562264 - RNA, 19 nt, Artificial Sequence
  Description of Artificial Sequence: Synthetic oligonucleotide
ucaaucugcggugccauuu

SEQ ID NO: 1562265 - RNA, 19 nt, Artificial Sequence
  Description of Artificial Sequence: Synthetic oligonucleotide
caguccagauaaaugcuga

SEQ ID NO: 1562266 - RNA, 19 nt, Artificial Sequence
  Description of Artificial Sequence: Synthetic oligonucleotide
gcuuagguaaacacccuag

SEQ ID NO: 1562267 - RNA, 19 nt, Artificial Sequence
  Description of Artificial Sequence: Synthetic oligonucleotide
caccuuucaagcgaagcuc

SEQ ID NO: 1562268 - RNA, 19 nt, Artificial Sequence
  Description of Artificial Sequence: Synthetic oligonucleotide
auuccaaccuugucugcau

SEQ ID NO: 1562269 - RNA, 19 nt, Artificial Sequence
  Description of Artificial Sequence: Synthetic oligonucleotide
gucagauuuauugggucca

SEQ ID NO: 1562270 - RNA, 19 nt, Artificial Sequence
  Description of Artificial Sequence: Synthetic oligonucleotide
aauagcacuucagcagcuu

SEQ ID NO: 1562271 - RNA, 19 nt, Artificial Sequence
  Description of Artificial Sequence: Synthetic oligonucleotide
uugccaucccgauuccuuc

SEQ ID NO: 1562272 - RNA, 19 nt, Artificial Sequence
  Description of Artificial Sequence: Synthetic oligonucleotide
caccucugaucuucucugg

SEQ ID NO: 1562273 - RNA, 19 nt, Artificial Sequence
  Description of Artificial Sequence: Synthetic oligonucleotide
accucugaucuucucuggu

SEQ ID NO: 1562274 - RNA, 19 nt, Artificial Sequence
  Description of Artificial Sequence: Synthetic oligonucleotide
gauuggcuugaaaaccauc

SEQ ID NO: 1562275 - RNA, 19 nt, Artificial Sequence
  Description of Artificial Sequence: Synthetic oligonucleotide
gacguacagaucccugauc

SEQ ID NO: 1562276 - RNA, 19 nt, Artificial Sequence
  Description of Artificial Sequence: Synthetic oligonucleotide
gacaaucaccucaccgccc

SEQ ID NO: 1562277 - RNA, 19 nt, Artificial Sequence
  Description of Artificial Sequence: Synthetic oligonucleotide
guugacguacagaucccug

SEQ ID NO: 1562278 - RNA, 19 nt, Artificial Sequence
  Description of Artificial Sequence: Synthetic oligonucleotide
acaaaagcucucccauaaa

SEQ ID NO: 1562279 - RNA, 19 nt, Artificial Sequence
  Description of Artificial Sequence: Synthetic oligonucleotide
aaggagccgguaaguccgc

SEQ ID NO: 1562280 - RNA, 19 nt, Artificial Sequence
  Description of Artificial Sequence: Synthetic oligonucleotide
gccaguagaugucucagca

SEQ ID NO: 1562281 - RNA, 19 nt, Artificial Sequence
  Description of Artificial Sequence: Synthetic oligonucleotide
cagcaaaauguauagcagu

SEQ ID NO: 1562282 - RNA, 19 nt, Artificial Sequence
  Description of Artificial Sequence: Synthetic oligonucleotide
aucccgauuccuucacacu

SEQ ID NO: 1562283 - RNA, 19 nt, Artificial Sequence
  Description of Artificial Sequence: Synthetic oligonucleotide
auacucguccacagugccg

SEQ ID NO: 1562284 - RNA, 19 nt, Artificial Sequence
  Description of Artificial Sequence: Synthetic oligonucleotide
gaugcggauuugccauccc

SEQ ID NO: 1562285 - RNA, 19 nt, Artificial Sequence
  Description of Artificial Sequence: Synthetic oligonucleotide
acccuagagaugcggauuu

SEQ ID NO: 1562286 - RNA, 19 nt, Artificial Sequence
  Description of Artificial Sequence: Synthetic oligonucleotide
agagccacgaucagucaga

SEQ ID NO: 1562287 - RNA, 19 nt, Artificial Sequence
  Description of Artificial Sequence: Synthetic oligonucleotide
ucgcuggcacgcgugagcc

SEQ ID NO: 1562288 - RNA, 19 nt, Artificial Sequence
  Description of Artificial Sequence: Synthetic oligonucleotide
acacccuagagaugcggau

SEQ ID NO: 1562289 - RNA, 19 nt, Artificial Sequence
  Description of Artificial Sequence: Synthetic oligonucleotide
acacaaaucucgaaccauu

SEQ ID NO: 1562290 - RNA, 19 nt, Artificial Sequence
  Description of Artificial Sequence: Synthetic oligonucleotide
caaccuugucugcauucac

SEQ ID NO: 1562291 - RNA, 19 nt, Artificial Sequence
  Description of Artificial Sequence: Synthetic oligonucleotide
caucguacggcugcugcug

SEQ ID NO: 1562292 - RNA, 19 nt, Artificial Sequence
  Description of Artificial Sequence: Synthetic oligonucleotide
uuccaccuuucaagcgaag

SEQ ID NO: 1562293 - RNA, 19 nt, Artificial Sequence
  Description of Artificial Sequence: Synthetic oligonucleotide
caaucugcggugccauuuc

SEQ ID NO: 1562294 - RNA, 19 nt, Artificial Sequence
  Description of Artificial Sequence: Synthetic oligonucleotide
acucccguugccgaaggcu

SEQ ID NO: 1562295 - RNA, 19 nt, Artificial Sequence
  Description of Artificial Sequence: Synthetic oligonucleotide
gccaugaaaauaaucagcu

SEQ ID NO: 1562296 - RNA, 19 nt, Artificial Sequence
  Description of Artificial Sequence: Synthetic oligonucleotide
uuaucucuguugagccgau

SEQ ID NO: 1562297 - RNA, 19 nt, Artificial Sequence
  Description of Artificial Sequence: Synthetic oligonucleotide
uccacucccguugccgaag

SEQ ID NO: 1562298 - RNA, 19 nt, Artificial Sequence
  Description of Artificial Sequence: Synthetic oligonucleotide
augucacaaucaaauuuga

SEQ ID NO: 1562299 - RNA, 19 nt, Artificial Sequence
  Description of Artificial Sequence: Synthetic oligonucleotide
agccccgacacugcgcuuc

SEQ ID NO: 1562300 - RNA, 19 nt, Artificial Sequence
  Description of Artificial Sequence: Synthetic oligonucleotide
agcuccgauggagaagcag

SEQ ID NO: 1562301 - RNA, 19 nt, Artificial Sequence
  Description of Artificial Sequence: Synthetic oligonucleotide
ucccguugccgaaggcuug

SEQ ID NO: 1562302 - RNA, 19 nt, Artificial Sequence
  Description of Artificial Sequence: Synthetic oligonucleotide
cacgcgugagcccggcccg

SEQ ID NO: 1562303 - RNA, 19 nt, Artificial Sequence
  Description of Artificial Sequence: Synthetic oligonucleotide
gagaugcggauuugccauc

SEQ ID NO: 1562304 - RNA, 19 nt, Artificial Sequence
  Description of Artificial Sequence: Synthetic oligonucleotide
guaugaagguuaucucugu

SEQ ID NO: 1562305 - RNA, 19 nt, Artificial Sequence
  Description of Artificial Sequence: Synthetic oligonucleotide
gcuggcacgcgugagcccg

SEQ ID NO: 1562306 - RNA, 19 nt, Artificial Sequence
  Description of Artificial Sequence: Synthetic oligonucleotide
ugcacgcgcaaggggaggc

SEQ ID NO: 1562307 - RNA, 19 nt, Artificial Sequence
  Description of Artificial Sequence: Synthetic oligonucleotide
ugaggcccggcgugcugcg

SEQ ID NO: 1562308 - RNA, 19 nt, Artificial Sequence
  Description of Artificial Sequence: Synthetic oligonucleotide
caucuccaaauucaguccu

SEQ ID NO: 1562309 - RNA, 19 nt, Artificial Sequence
  Description of Artificial Sequence: Synthetic oligonucleotide
ggugccauuucagcauuag

SEQ ID NO: 1562310 - RNA, 19 nt, Artificial Sequence
  Description of Artificial Sequence: Synthetic oligonucleotide
gcaccgcuuagguaaacac

SEQ ID NO: 1562311 - RNA, 19 nt, Artificial Sequence
  Description of Artificial Sequence: Synthetic oligonucleotide
cacgccccgacugccaccg

SEQ ID NO: 1562312 - RNA, 19 nt, Artificial Sequence
  Description of Artificial Sequence: Synthetic oligonucleotide
gcgugcugcggccagcgcg

SEQ ID NO: 1562313 - RNA, 19 nt, Artificial Sequence
  Description of Artificial Sequence: Synthetic oligonucleotide
augaucccgccguccaccu

SEQ ID NO: 1562314 - RNA, 19 nt, Artificial Sequence
  Description of Artificial Sequence: Synthetic oligonucleotide
aucugcggugccauuucag

SEQ ID NO: 1562315 - RNA, 19 nt, Artificial Sequence
  Description of Artificial Sequence: Synthetic oligonucleotide
ucguacggcugcugcugcc

SEQ ID NO: 1562316 - RNA, 19 nt, Artificial Sequence
  Description of Artificial Sequence: Synthetic oligonucleotide
ggugacauucggacaauca

SEQ ID NO: 1562317 - RNA, 19 nt, Artificial Sequence
  Description of Artificial Sequence: Synthetic oligonucleotide
ccuagagaugcggauuugc

SEQ ID NO: 1562318 - RNA, 19 nt, Artificial Sequence
  Description of Artificial Sequence: Synthetic oligonucleotide
uagugccuccgggaaaacu

SEQ ID NO: 1562319 - RNA, 19 nt, Artificial Sequence
  Description of Artificial Sequence: Synthetic oligonucleotide
aucuccaaauucaguccug

SEQ ID NO: 1562320 - RNA, 19 nt, Artificial Sequence
  Description of Artificial Sequence: Synthetic oligonucleotide
cuuggucacagagccacga

SEQ ID NO: 1562321 - RNA, 19 nt, Artificial Sequence
  Description of Artificial Sequence: Synthetic oligonucleotide
uuagugcaacauggaggca

SEQ ID NO: 1562322 - RNA, 19 nt, Artificial Sequence
  Description of Artificial Sequence: Synthetic oligonucleotide
cuuucaagcgaagcuccga

SEQ ID NO: 1562323 - RNA, 19 nt, Artificial Sequence
  Description of Artificial Sequence: Synthetic oligonucleotide
cugucuucguaucugcagu

SEQ ID NO: 1562324 - RNA, 19 nt, Artificial Sequence
  Description of Artificial Sequence: Synthetic oligonucleotide
agcgaagcuccgauggaga

SEQ ID NO: 1562325 - RNA, 19 nt, Artificial Sequence
  Description of Artificial Sequence: Synthetic oligonucleotide
guaagcgucuuuggaggca

SEQ ID NO: 1562326 - RNA, 19 nt, Artificial Sequence
  Description of Artificial Sequence: Synthetic oligonucleotide
gccagcgcggaucuucugc

SEQ ID NO: 1562327 - RNA, 19 nt, Artificial Sequence
  Description of Artificial Sequence: Synthetic oligonucleotide
ggagccgguaaguccgcag

SEQ ID NO: 1562328 - RNA, 19 nt, Artificial Sequence
  Description of Artificial Sequence: Synthetic oligonucleotide
auuugccaucccgauuccu

SEQ ID NO: 1562329 - RNA, 19 nt, Artificial Sequence
  Description of Artificial Sequence: Synthetic oligonucleotide
cugaggcccggcgugcugc

SEQ ID NO: 1562330 - RNA, 19 nt, Artificial Sequence
  Description of Artificial Sequence: Synthetic oligonucleotide
ccucuuuugccaagugaug

SEQ ID NO: 1562331 - RNA, 19 nt, Artificial Sequence
  Description of Artificial Sequence: Synthetic oligonucleotide
ccccucauuuuaaugucac

SEQ ID NO: 1562332 - RNA, 19 nt, Artificial Sequence
  Description of Artificial Sequence: Synthetic oligonucleotide
cuuccaugaucccgccguc

SEQ ID NO: 1562333 - RNA, 19 nt, Artificial Sequence
  Description of Artificial Sequence: Synthetic oligonucleotide
uggaggcaccgcuuaggua

SEQ ID NO: 1562334 - RNA, 19 nt, Artificial Sequence
  Description of Artificial Sequence: Synthetic oligonucleotide
ucguaucugcaguguggau

SEQ ID NO: 1562335 - RNA, 19 nt, Artificial Sequence
  Description of Artificial Sequence: Synthetic oligonucleotide
gcacgcgugagcccggccc

SEQ ID NO: 1562336 - RNA, 19 nt, Artificial Sequence
  Description of Artificial Sequence: Synthetic oligonucleotide
ucccugcugucuucguauc

SEQ ID NO: 1562337 - RNA, 19 nt, Artificial Sequence
  Description of Artificial Sequence: Synthetic oligonucleotide
ugccaccggggaaggacaa

SEQ ID NO: 1562338 - RNA, 19 nt, Artificial Sequence
  Description of Artificial Sequence: Synthetic oligonucleotide
acagugccgccaugucuga

SEQ ID NO: 1562339 - RNA, 19 nt, Artificial Sequence
  Description of Artificial Sequence: Synthetic oligonucleotide
gugcaacauggaggcaccg

SEQ ID NO: 1562340 - RNA, 19 nt, Artificial Sequence
  Description of Artificial Sequence: Synthetic oligonucleotide
cuuuuggguaauagccccu

SEQ ID NO: 1562341 - RNA, 19 nt, Artificial Sequence
  Description of Artificial Sequence: Synthetic oligonucleotide
cucuguugagccgauuucu

SEQ ID NO: 1562342 - RNA, 19 nt, Artificial Sequence
  Description of Artificial Sequence: Synthetic oligonucleotide
cacgcgcaaggggaggccc

SEQ ID NO: 1562343 - RNA, 19 nt, Artificial Sequence
  Description of Artificial Sequence: Synthetic oligonucleotide
guugcucagcaaaauguau

SEQ ID NO: 1562344 - RNA, 19 nt, Artificial Sequence
  Description of Artificial Sequence: Synthetic oligonucleotide
cuccaaauucaguccugaa

SEQ ID NO: 1562345 - RNA, 19 nt, Artificial Sequence
  Description of Artificial Sequence: Synthetic oligonucleotide
ccgacacugcgcuuccggg

SEQ ID NO: 1562346 - RNA, 19 nt, Artificial Sequence
  Description of Artificial Sequence: Synthetic oligonucleotide
aucaaucugcggugccauu

SEQ ID NO: 1562347 - RNA, 19 nt, Artificial Sequence
  Description of Artificial Sequence: Synthetic oligonucleotide
cacaaaucucgaaccauuu

SEQ ID NO: 1562348 - RNA, 19 nt, Artificial Sequence
  Description of Artificial Sequence: Synthetic oligonucleotide
cucaacgauuggcuugaaa

SEQ ID NO: 1562349 - RNA, 19 nt, Artificial Sequence
  Description of Artificial Sequence: Synthetic oligonucleotide
ccgguaaguccgcagcccc

SEQ ID NO: 1562350 - RNA, 19 nt, Artificial Sequence
  Description of Artificial Sequence: Synthetic oligonucleotide
ggguaauagccccucauuu

SEQ ID NO: 1562351 - RNA, 19 nt, Artificial Sequence
  Description of Artificial Sequence: Synthetic oligonucleotide
cagcagguauaaaaucagu

SEQ ID NO: 1562352 - RNA, 19 nt, Artificial Sequence
  Description of Artificial Sequence: Synthetic oligonucleotide
gcagcgaccacgccccgac

SEQ ID NO: 1562353 - RNA, 19 nt, Artificial Sequence
  Description of Artificial Sequence: Synthetic oligonucleotide
caucgcuggcacgcgugag

SEQ ID NO: 1562354 - RNA, 19 nt, Artificial Sequence
  Description of Artificial Sequence: Synthetic oligonucleotide
guguggaguguaacugguc

SEQ ID NO: 1562355 - RNA, 19 nt, Artificial Sequence
  Description of Artificial Sequence: Synthetic oligonucleotide
gaugcaucguacggcugcu

SEQ ID NO: 1562356 - RNA, 19 nt, Artificial Sequence
  Description of Artificial Sequence: Synthetic oligonucleotide
cugcacgcgcaaggggagg

SEQ ID NO: 1562357 - RNA, 19 nt, Artificial Sequence
  Description of Artificial Sequence: Synthetic oligonucleotide
cuggcacgcgugagcccgg

SEQ ID NO: 1562358 - RNA, 19 nt, Artificial Sequence
  Description of Artificial Sequence: Synthetic oligonucleotide
aggcaccgcuuagguaaac

SEQ ID NO: 1562359 - RNA, 19 nt, Artificial Sequence
  Description of Artificial Sequence: Synthetic oligonucleotide
ugaucccgccguccaccuc

SEQ ID NO: 1562360 - RNA, 19 nt, Artificial Sequence
  Description of Artificial Sequence: Synthetic oligonucleotide
cucccugcugucuucguau

SEQ ID NO: 1562361 - RNA, 19 nt, Artificial Sequence
  Description of Artificial Sequence: Synthetic oligonucleotide
cacucccguugccgaaggc

SEQ ID NO: 1562362 - RNA, 19 nt, Artificial Sequence
  Description of Artificial Sequence: Synthetic oligonucleotide
gguaaguccgcagccccga

SEQ ID NO: 1562363 - RNA, 19 nt, Artificial Sequence
  Description of Artificial Sequence: Synthetic oligonucleotide
cauuuccaguccagauaaa

SEQ ID NO: 1562364 - RNA, 19 nt, Artificial Sequence
  Description of Artificial Sequence: Synthetic oligonucleotide
acgcgugagcccggcccgc

SEQ ID NO: 1562365 - RNA, 19 nt, Artificial Sequence
  Description of Artificial Sequence: Synthetic oligonucleotide
cagcugaaacuacuauacu

SEQ ID NO: 1562366 - RNA, 19 nt, Artificial Sequence
  Description of Artificial Sequence: Synthetic oligonucleotide
cacacaaaucucgaaccau

SEQ ID NO: 1562367 - RNA, 19 nt, Artificial Sequence
  Description of Artificial Sequence: Synthetic oligonucleotide
acgaucagucagauuuauu

SEQ ID NO: 1562368 - RNA, 19 nt, Artificial Sequence
  Description of Artificial Sequence: Synthetic oligonucleotide
gccgccaugucugagauuu

SEQ ID NO: 1562369 - RNA, 19 nt, Artificial Sequence
  Description of Artificial Sequence: Synthetic oligonucleotide
gccaucccgauuccuucac

SEQ ID NO: 1562370 - RNA, 19 nt, Artificial Sequence
  Description of Artificial Sequence: Synthetic oligonucleotide
gccgguaaguccgcagccc

SEQ ID NO: 1562371 - RNA, 19 nt, Artificial Sequence
  Description of Artificial Sequence: Synthetic oligonucleotide
ugccgaaggcuuggucccu

SEQ ID NO: 1562372 - RNA, 19 nt, Artificial Sequence
  Description of Artificial Sequence: Synthetic oligonucleotide
cuuccgggccgagcuugcc

SEQ ID NO: 1562373 - RNA, 19 nt, Artificial Sequence
  Description of Artificial Sequence: Synthetic oligonucleotide
ggcaccgcuuagguaaaca

SEQ ID NO: 1562374 - RNA, 19 nt, Artificial Sequence
  Description of Artificial Sequence: Synthetic oligonucleotide
gcgaagcuccgauggagaa

SEQ ID NO: 1562375 - RNA, 19 nt, Artificial Sequence
  Description of Artificial Sequence: Synthetic oligonucleotide
cugccccuccaucgcuggc

SEQ ID NO: 1562376 - RNA, 19 nt, Artificial Sequence
  Description of Artificial Sequence: Synthetic oligonucleotide
ccaccuuucaagcgaagcu

SEQ ID NO: 1562377 - RNA, 19 nt, Artificial Sequence
  Description of Artificial Sequence: Synthetic oligonucleotide
ccuuugcuaguugcucagc

SEQ ID NO: 1562378 - RNA, 19 nt, Artificial Sequence
  Description of Artificial Sequence: Synthetic oligonucleotide
cucucccauaaaucuuggu

SEQ ID NO: 1562379 - RNA, 19 nt, Artificial Sequence
  Description of Artificial Sequence: Synthetic oligonucleotide
cgguaaguccgcagccccg

SEQ ID NO: 1562380 - RNA, 19 nt, Artificial Sequence
  Description of Artificial Sequence: Synthetic oligonucleotide
ccacucccguugccgaagg

SEQ ID NO: 1562381 - RNA, 19 nt, Artificial Sequence
  Description of Artificial Sequence: Synthetic oligonucleotide
agccacgaucagucagauu

SEQ ID NO: 1562382 - RNA, 19 nt, Artificial Sequence
  Description of Artificial Sequence: Synthetic oligonucleotide
gaggcaccgcuuagguaaa

SEQ ID NO: 1562383 - RNA, 19 nt, Artificial Sequence
  Description of Artificial Sequence: Synthetic oligonucleotide
cccguugccgaaggcuugg

SEQ ID NO: 1562384 - RNA, 19 nt, Artificial Sequence
  Description of Artificial Sequence: Synthetic oligonucleotide
aggagccgguaaguccgca

SEQ ID NO: 1562385 - RNA, 19 nt, Artificial Sequence
  Description of Artificial Sequence: Synthetic oligonucleotide
cgaagcuccgauggagaag

SEQ ID NO: 1562386 - RNA, 19 nt, Artificial Sequence
  Description of Artificial Sequence: Synthetic oligonucleotide
cuguuuaacuggugacauu

SEQ ID NO: 1562387 - RNA, 19 nt, Artificial Sequence
  Description of Artificial Sequence: Synthetic oligonucleotide
cccuuccaugaucccgccg

SEQ ID NO: 1562388 - RNA, 19 nt, Artificial Sequence
  Description of Artificial Sequence: Synthetic oligonucleotide
caacauggaggcaccgcuu

SEQ ID NO: 1562389 - RNA, 19 nt, Artificial Sequence
  Description of Artificial Sequence: Synthetic oligonucleotide
gccccucauuuuaauguca

SEQ ID NO: 1562390 - RNA, 19 nt, Artificial Sequence
  Description of Artificial Sequence: Synthetic oligonucleotide
ccaugaucccgccguccac

SEQ ID NO: 1562391 - RNA, 19 nt, Artificial Sequence
  Description of Artificial Sequence: Synthetic oligonucleotide
gcaucguacggcugcugcu

SEQ ID NO: 1562392 - RNA, 19 nt, Artificial Sequence
  Description of Artificial Sequence: Synthetic oligonucleotide
ccaucaugguguaaucaau

SEQ ID NO: 1562393 - RNA, 19 nt, Artificial Sequence
  Description of Artificial Sequence: Synthetic oligonucleotide
cacgaucagucagauuuau

SEQ ID NO: 1562394 - RNA, 19 nt, Artificial Sequence
  Description of Artificial Sequence: Synthetic oligonucleotide
cacaguaaauuuggccuuu

SEQ ID NO: 1562395 - RNA, 19 nt, Artificial Sequence
  Description of Artificial Sequence: Synthetic oligonucleotide
ugccgccaugucugagauu

SEQ ID NO: 1562396 - RNA, 19 nt, Artificial Sequence
  Description of Artificial Sequence: Synthetic oligonucleotide
acgcgcaaggggaggccca

SEQ ID NO: 1562397 - RNA, 19 nt, Artificial Sequence
  Description of Artificial Sequence: Synthetic oligonucleotide
ccgauuccuucacacucga

SEQ ID NO: 1562398 - RNA, 19 nt, Artificial Sequence
  Description of Artificial Sequence: Synthetic oligonucleotide
gagccacgaucagucagau

SEQ ID NO: 1562399 - RNA, 19 nt, Artificial Sequence
  Description of Artificial Sequence: Synthetic oligonucleotide
gcggccagcgcggaucuuc

SEQ ID NO: 1562400 - RNA, 19 nt, Artificial Sequence
  Description of Artificial Sequence: Synthetic oligonucleotide
ccaagugaugagccagcaa

SEQ ID NO: 1562401 - RNA, 19 nt, Artificial Sequence
  Description of Artificial Sequence: Synthetic oligonucleotide
ggaguguaacugguccugu

SEQ ID NO: 1562402 - RNA, 19 nt, Artificial Sequence
  Description of Artificial Sequence: Synthetic oligonucleotide
ggccgagcuugccggaaaa

SEQ ID NO: 1562403 - RNA, 19 nt, Artificial Sequence
  Description of Artificial Sequence: Synthetic oligonucleotide
cagaucccugaucuccuuu

SEQ ID NO: 1562404 - RNA, 19 nt, Artificial Sequence
  Description of Artificial Sequence: Synthetic oligonucleotide
ccuccaucgcuggcacgcg

SEQ ID NO: 1562405 - RNA, 19 nt, Artificial Sequence
  Description of Artificial Sequence: Synthetic oligonucleotide
ggcacgcgugagcccggcc

SEQ ID NO: 1562406 - RNA, 19 nt, Artificial Sequence
  Description of Artificial Sequence: Synthetic oligonucleotide
gccgaaggcuuggucccug

SEQ ID NO: 1562407 - RNA, 19 nt, Artificial Sequence
  Description of Artificial Sequence: Synthetic oligonucleotide
cacccuagagaugcggauu

SEQ ID NO: 1562408 - RNA, 19 nt, Artificial Sequence
  Description of Artificial Sequence: Synthetic oligonucleotide
ccacgaucagucagauuua

SEQ ID NO: 1562409 - RNA, 19 nt, Artificial Sequence
  Description of Artificial Sequence: Synthetic oligonucleotide
cccauaaaucuuggucaca

SEQ ID NO: 1562410 - RNA, 19 nt, Artificial Sequence
  Description of Artificial Sequence: Synthetic oligonucleotide
ggccagcgcggaucuucug

SEQ ID NO: 1562411 - RNA, 19 nt, Artificial Sequence
  Description of Artificial Sequence: Synthetic oligonucleotide
gcgugagcccggcccgcag

SEQ ID NO: 1562412 - RNA, 19 nt, Artificial Sequence
  Description of Artificial Sequence: Synthetic oligonucleotide
cccuagagaugcggauuug

SEQ ID NO: 1562413 - RNA, 19 nt, Artificial Sequence
  Description of Artificial Sequence: Synthetic oligonucleotide
gcuuccgggccgagcuugc

SEQ ID NO: 1562414 - RNA, 19 nt, Artificial Sequence
  Description of Artificial Sequence: Synthetic oligonucleotide
cguugccgaaggcuugguc

SEQ ID NO: 1562415 - RNA, 19 nt, Artificial Sequence
  Description of Artificial Sequence: Synthetic oligonucleotide
gcacgcgcaaggggaggcc

SEQ ID NO: 1562416 - RNA, 19 nt, Artificial Sequence
  Description of Artificial Sequence: Synthetic oligonucleotide
ccaucgcuggcacgcguga

SEQ ID NO: 1562417 - RNA, 19 nt, Artificial Sequence
  Description of Artificial Sequence: Synthetic oligonucleotide
cgcuuagguaaacacccua

SEQ ID NO: 1562418 - RNA, 19 nt, Artificial Sequence
  Description of Artificial Sequence: Synthetic oligonucleotide
ccaucccgauuccuucaca

SEQ ID NO: 1562419 - RNA, 19 nt, Artificial Sequence
  Description of Artificial Sequence: Synthetic oligonucleotide
cgcaaggggaggcccagga

SEQ ID NO: 1562420 - RNA, 19 nt, Artificial Sequence
  Description of Artificial Sequence: Synthetic oligonucleotide
gggccgagcuugccggaaa

SEQ ID NO: 1562421 - RNA, 19 nt, Artificial Sequence
  Description of Artificial Sequence: Synthetic oligonucleotide
cugcggccagcgcggaucu

SEQ ID NO: 1562422 - RNA, 19 nt, Artificial Sequence
  Description of Artificial Sequence: Synthetic oligonucleotide
ccgccaugucugagauuug

SEQ ID NO: 1562423 - RNA, 19 nt, Artificial Sequence
  Description of Artificial Sequence: Synthetic oligonucleotide
cccggcgugcugcggccag

SEQ ID NO: 1562424 - RNA, 19 nt, Artificial Sequence
  Description of Artificial Sequence: Synthetic oligonucleotide
cgaccacgccccgacugcc

SEQ ID NO: 1562425 - RNA, 19 nt, Artificial Sequence
  Description of Artificial Sequence: Synthetic oligonucleotide
ccgcuuagguaaacacccu

SEQ ID NO: 1562426 - RNA, 19 nt, Artificial Sequence
  Description of Artificial Sequence: Synthetic oligonucleotide
cccgacugccaccggggaa

SEQ ID NO: 1562427 - RNA, 19 nt, Artificial Sequence
  Description of Artificial Sequence: Synthetic oligonucleotide
ugcggccagcgcggaucuu

SEQ ID NO: 1562428 - RNA, 19 nt, Artificial Sequence
  Description of Artificial Sequence: Synthetic oligonucleotide
gcccggcccgcagcgacca

SEQ ID NO: 1562429 - RNA, 19 nt, Artificial Sequence
  Description of Artificial Sequence: Synthetic oligonucleotide
ccgcagcgaccacgccccg

SEQ ID NO: 1562430 - RNA, 19 nt, Artificial Sequence
  Description of Artificial Sequence: Synthetic oligonucleotide
ccggcgugcugcggccagc

SEQ ID NO: 1562431 - RNA, 19 nt, Artificial Sequence
  Description of Artificial Sequence: Synthetic oligonucleotide
gcgucuuuggaggcaucuu

SEQ ID NO: 1562432 - RNA, 19 nt, Artificial Sequence
  Description of Artificial Sequence: Synthetic oligonucleotide
ccgggccgagcuugccgga

SEQ ID NO: 1562433 - RNA, 19 nt, Artificial Sequence
  Description of Artificial Sequence: Synthetic oligonucleotide
cgauuccuucacacucgau

SEQ ID NO: 1562434 - RNA, 19 nt, Artificial Sequence
  Description of Artificial Sequence: Synthetic oligonucleotide
gcccggcgugcugcggcca

SEQ ID NO: 1562435 - RNA, 19 nt, Artificial Sequence
  Description of Artificial Sequence: Synthetic oligonucleotide
cgcagcgaccacgccccga

SEQ ID NO: 1562436 - RNA, 19 nt, Artificial Sequence
  Description of Artificial Sequence: Synthetic oligonucleotide
cgggccgagcuugccggaa

SEQ ID NO: 1562437 - RNA, 19 nt, Artificial Sequence
  Description of Artificial Sequence: Synthetic oligonucleotide
ccguugccgaaggcuuggu

SEQ ID NO: 1562438 - RNA, 19 nt, Artificial Sequence
  Description of Artificial Sequence: Synthetic oligonucleotide
aauaauuuagucuagacuc

SEQ ID NO: 1562439 - RNA, 19 nt, Artificial Sequence
  Description of Artificial Sequence: Synthetic oligonucleotide
uuagucuagacucauaucc

SEQ ID NO: 1562440 - RNA, 19 nt, Artificial Sequence
  Description of Artificial Sequence: Synthetic oligonucleotide
ucugcauuagcgaggaugg

SEQ ID NO: 1562441 - RNA, 19 nt, Artificial Sequence
  Description of Artificial Sequence: Synthetic oligonucleotide
uacagaaucacacagcuau

SEQ ID NO: 1562442 - RNA, 19 nt, Artificial Sequence
  Description of Artificial Sequence: Synthetic oligonucleotide
agauaaucaagucauccuc

SEQ ID NO: 1562443 - RNA, 19 nt, Artificial Sequence
  Description of Artificial Sequence: Synthetic oligonucleotide
agaagagccucuuggaccc

SEQ ID NO: 1562444 - RNA, 19 nt, Artificial Sequence
  Description of Artificial Sequence: Synthetic oligonucleotide
ucuggugucagaacgcugg

SEQ ID NO: 1562445 - RNA, 19 nt, Artificial Sequence
  Description of Artificial Sequence: Synthetic oligonucleotide
uuaaacuugagcacguaga

SEQ ID NO: 1562446 - RNA, 19 nt, Artificial Sequence
  Description of Artificial Sequence: Synthetic oligonucleotide
aagauaaucaagucauccu

SEQ ID NO: 1562447 - RNA, 19 nt, Artificial Sequence
  Description of Artificial Sequence: Synthetic oligonucleotide
gaucucuggugucagaacg

SEQ ID NO: 1562448 - RNA, 19 nt, Artificial Sequence
  Description of Artificial Sequence: Synthetic oligonucleotide
caacagaagugaaugaggg

SEQ ID NO: 1562449 - RNA, 19 nt, Artificial Sequence
  Description of Artificial Sequence: Synthetic oligonucleotide
gaagucgucauccuggcug

SEQ ID NO: 1562450 - RNA, 19 nt, Artificial Sequence
  Description of Artificial Sequence: Synthetic oligonucleotide
aaaagaagagccucuugga

SEQ ID NO: 1562451 - RNA, 19 nt, Artificial Sequence
  Description of Artificial Sequence: Synthetic oligonucleotide
uuucuugucuuuugcgucg

SEQ ID NO: 1562452 - RNA, 19 nt, Artificial Sequence
  Description of Artificial Sequence: Synthetic oligonucleotide
acuacagaaucacacagcu

SEQ ID NO: 1562453 - RNA, 19 nt, Artificial Sequence
  Description of Artificial Sequence: Synthetic oligonucleotide
acagcgaauaauuuagucu

SEQ ID NO: 1562454 - RNA, 19 nt, Artificial Sequence
  Description of Artificial Sequence: Synthetic oligonucleotide
cugaacgucugcauuagcg

SEQ ID NO: 1562455 - RNA, 19 nt, Artificial Sequence
  Description of Artificial Sequence: Synthetic oligonucleotide
auguacacgagcccuuucc

SEQ ID NO: 1562456 - RNA, 19 nt, Artificial Sequence
  Description of Artificial Sequence: Synthetic oligonucleotide
aaacuugagcacguagacc

SEQ ID NO: 1562457 - RNA, 19 nt, Artificial Sequence
  Description of Artificial Sequence: Synthetic oligonucleotide
uaaacuugagcacguagac

SEQ ID NO: 1562458 - RNA, 19 nt, Artificial Sequence
  Description of Artificial Sequence: Synthetic oligonucleotide
auuuagucuagacucauau

SEQ ID NO: 1562459 - RNA, 19 nt, Artificial Sequence
  Description of Artificial Sequence: Synthetic oligonucleotide
agcacguagacccucccgc

SEQ ID NO: 1562460 - RNA, 19 nt, Artificial Sequence
  Description of Artificial Sequence: Synthetic oligonucleotide
auuagcgaggaugggagcc

SEQ ID NO: 1562461 - RNA, 19 nt, Artificial Sequence
  Description of Artificial Sequence: Synthetic oligonucleotide
aacagagcgccugaagucg

SEQ ID NO: 1562462 - RNA, 19 nt, Artificial Sequence
  Description of Artificial Sequence: Synthetic oligonucleotide
ugaaugagggagucguccg

SEQ ID NO: 1562463 - RNA, 19 nt, Artificial Sequence
  Description of Artificial Sequence: Synthetic oligonucleotide
gauaaucaagucauccucc

SEQ ID NO: 1562464 - RNA, 19 nt, Artificial Sequence
  Description of Artificial Sequence: Synthetic oligonucleotide
ugcuggauguacacgagcc

SEQ ID NO: 1562465 - RNA, 19 nt, Artificial Sequence
  Description of Artificial Sequence: Synthetic oligonucleotide
uggaggauccccgagagcc

SEQ ID NO: 1562466 - RNA, 19 nt, Artificial Sequence
  Description of Artificial Sequence: Synthetic oligonucleotide
cagaacgcuggccagaucc

SEQ ID NO: 1562467 - RNA, 19 nt, Artificial Sequence
  Description of Artificial Sequence: Synthetic oligonucleotide
ucuuucuugucuuuugcgu

SEQ ID NO: 1562468 - RNA, 19 nt, Artificial Sequence
  Description of Artificial Sequence: Synthetic oligonucleotide
aaugcuuccacaucaccuu

SEQ ID NO: 1562469 - RNA, 19 nt, Artificial Sequence
  Description of Artificial Sequence: Synthetic oligonucleotide
gaauaauuuagucuagacu

SEQ ID NO: 1562470 - RNA, 19 nt, Artificial Sequence
  Description of Artificial Sequence: Synthetic oligonucleotide
aucacaaucgccacuacag

SEQ ID NO: 1562471 - RNA, 19 nt, Artificial Sequence
  Description of Artificial Sequence: Synthetic oligonucleotide
cuuaaacuugagcacguag

SEQ ID NO: 1562472 - RNA, 19 nt, Artificial Sequence
  Description of Artificial Sequence: Synthetic oligonucleotide
guuccauuaccugagcugg

SEQ ID NO: 1562473 - RNA, 19 nt, Artificial Sequence
  Description of Artificial Sequence: Synthetic oligonucleotide
uuaucuggggugaccgugg

SEQ ID NO: 1562474 - RNA, 19 nt, Artificial Sequence
  Description of Artificial Sequence: Synthetic oligonucleotide
agucuagacucauauccuc

SEQ ID NO: 1562475 - RNA, 19 nt, Artificial Sequence
  Description of Artificial Sequence: Synthetic oligonucleotide
agauccacuugcuggcugc

SEQ ID NO: 1562476 - RNA, 19 nt, Artificial Sequence
  Description of Artificial Sequence: Synthetic oligonucleotide
aaggacagcgaauaauuua

SEQ ID NO: 1562477 - RNA, 19 nt, Artificial Sequence
  Description of Artificial Sequence: Synthetic oligonucleotide
ugaacgucugcauuagcga

SEQ ID NO: 1562478 - RNA, 19 nt, Artificial Sequence
  Description of Artificial Sequence: Synthetic oligonucleotide
gaacgucugcauuagcgag

SEQ ID NO: 1562479 - RNA, 19 nt, Artificial Sequence
  Description of Artificial Sequence: Synthetic oligonucleotide
cugcaguccacccucaccg

SEQ ID NO: 1562480 - RNA, 19 nt, Artificial Sequence
  Description of Artificial Sequence: Synthetic oligonucleotide
aggacagcgaauaauuuag

SEQ ID NO: 1562481 - RNA, 19 nt, Artificial Sequence
  Description of Artificial Sequence: Synthetic oligonucleotide
uuugcgucgcccuccuucg

SEQ ID NO: 1562482 - RNA, 19 nt, Artificial Sequence
  Description of Artificial Sequence: Synthetic oligonucleotide
uguucagacacucguugac

SEQ ID NO: 1562483 - RNA, 19 nt, Artificial Sequence
  Description of Artificial Sequence: Synthetic oligonucleotide
cauuaccugagcugggugc

SEQ ID NO: 1562484 - RNA, 19 nt, Artificial Sequence
  Description of Artificial Sequence: Synthetic oligonucleotide
augacauuuucccggcccg

SEQ ID NO: 1562485 - RNA, 19 nt, Artificial Sequence
  Description of Artificial Sequence: Synthetic oligonucleotide
aucaggaaagauaaucaag

SEQ ID NO: 1562486 - RNA, 19 nt, Artificial Sequence
  Description of Artificial Sequence: Synthetic oligonucleotide
uuuugcgucgcccuccuuc

SEQ ID NO: 1562487 - RNA, 19 nt, Artificial Sequence
  Description of Artificial Sequence: Synthetic oligonucleotide
caacaggcgcuccugaacg

SEQ ID NO: 1562488 - RNA, 19 nt, Artificial Sequence
  Description of Artificial Sequence: Synthetic oligonucleotide
auaaucaagucauccucca

SEQ ID NO: 1562489 - RNA, 19 nt, Artificial Sequence
  Description of Artificial Sequence: Synthetic oligonucleotide
uggggugaggucaaugugu

SEQ ID NO: 1562490 - RNA, 19 nt, Artificial Sequence
  Description of Artificial Sequence: Synthetic oligonucleotide
aaugagggagucguccguc

SEQ ID NO: 1562491 - RNA, 19 nt, Artificial Sequence
  Description of Artificial Sequence: Synthetic oligonucleotide
gacagcgaauaauuuaguc

SEQ ID NO: 1562492 - RNA, 19 nt, Artificial Sequence
  Description of Artificial Sequence: Synthetic oligonucleotide
uuuaucuggggugaccgug

SEQ ID NO: 1562493 - RNA, 19 nt, Artificial Sequence
  Description of Artificial Sequence: Synthetic oligonucleotide
aucgccacuacagaaucac

SEQ ID NO: 1562494 - RNA, 19 nt, Artificial Sequence
  Description of Artificial Sequence: Synthetic oligonucleotide
uuuccggcaaugcucuuca

SEQ ID NO: 1562495 - RNA, 19 nt, Artificial Sequence
  Description of Artificial Sequence: Synthetic oligonucleotide
ucuagacucauauccuccu

SEQ ID NO: 1562496 - RNA, 19 nt, Artificial Sequence
  Description of Artificial Sequence: Synthetic oligonucleotide
uggcuaugacucauguucc

SEQ ID NO: 1562497 - RNA, 19 nt, Artificial Sequence
  Description of Artificial Sequence: Synthetic oligonucleotide
uuauucugcauggcuuugg

SEQ ID NO: 1562498 - RNA, 19 nt, Artificial Sequence
  Description of Artificial Sequence: Synthetic oligonucleotide
uuuagucuagacucauauc

SEQ ID NO: 1562499 - RNA, 19 nt, Artificial Sequence
  Description of Artificial Sequence: Synthetic oligonucleotide
ugcggcacccgcuugaacu

SEQ ID NO: 1562500 - RNA, 19 nt, Artificial Sequence
  Description of Artificial Sequence: Synthetic oligonucleotide
aacgucugcauuagcgagg

SEQ ID NO: 1562501 - RNA, 19 nt, Artificial Sequence
  Description of Artificial Sequence: Synthetic oligonucleotide
aucacacagcuaugaauuc

SEQ ID NO: 1562502 - RNA, 19 nt, Artificial Sequence
  Description of Artificial Sequence: Synthetic oligonucleotide
uccuccacggucccagagg

SEQ ID NO: 1562503 - RNA, 19 nt, Artificial Sequence
  Description of Artificial Sequence: Synthetic oligonucleotide
uccgaugagcugcaugagc

SEQ ID NO: 1562504 - RNA, 19 nt, Artificial Sequence
  Description of Artificial Sequence: Synthetic oligonucleotide
auuaccugagcugggugcg

SEQ ID NO: 1562505 - RNA, 19 nt, Artificial Sequence
  Description of Artificial Sequence: Synthetic oligonucleotide
ucuggggugaccgugguuc

SEQ ID NO: 1562506 - RNA, 19 nt, Artificial Sequence
  Description of Artificial Sequence: Synthetic oligonucleotide
gucugcauuagcgaggaug

SEQ ID NO: 1562507 - RNA, 19 nt, Artificial Sequence
  Description of Artificial Sequence: Synthetic oligonucleotide
ugcauuagcgaggauggga

SEQ ID NO: 1562508 - RNA, 19 nt, Artificial Sequence
  Description of Artificial Sequence: Synthetic oligonucleotide
cacaucaccuuuguuggcg

SEQ ID NO: 1562509 - RNA, 19 nt, Artificial Sequence
  Description of Artificial Sequence: Synthetic oligonucleotide
gaacagagcgccugaaguc

SEQ ID NO: 1562510 - RNA, 19 nt, Artificial Sequence
  Description of Artificial Sequence: Synthetic oligonucleotide
uuggaccccgccuuaaacu

SEQ ID NO: 1562511 - RNA, 19 nt, Artificial Sequence
  Description of Artificial Sequence: Synthetic oligonucleotide
ucauguuccccaacaggcu

SEQ ID NO: 1562512 - RNA, 19 nt, Artificial Sequence
  Description of Artificial Sequence: Synthetic oligonucleotide
acaucaccuuuguuggcgg

SEQ ID NO: 1562513 - RNA, 19 nt, Artificial Sequence
  Description of Artificial Sequence: Synthetic oligonucleotide
aucaccuuuguuggcggcc

SEQ ID NO: 1562514 - RNA, 19 nt, Artificial Sequence
  Description of Artificial Sequence: Synthetic oligonucleotide
uaaucaagucauccuccac

SEQ ID NO: 1562515 - RNA, 19 nt, Artificial Sequence
  Description of Artificial Sequence: Synthetic oligonucleotide
cagcgaauaauuuagucua

SEQ ID NO: 1562516 - RNA, 19 nt, Artificial Sequence
  Description of Artificial Sequence: Synthetic oligonucleotide
acguagacccucccgcugg

SEQ ID NO: 1562517 - RNA, 19 nt, Artificial Sequence
  Description of Artificial Sequence: Synthetic oligonucleotide
uuccauuaccugagcuggg

SEQ ID NO: 1562518 - RNA, 19 nt, Artificial Sequence
  Description of Artificial Sequence: Synthetic oligonucleotide
cagugcuccaggcaugggg

SEQ ID NO: 1562519 - RNA, 19 nt, Artificial Sequence
  Description of Artificial Sequence: Synthetic oligonucleotide
ggagucguccgucugcugg

SEQ ID NO: 1562520 - RNA, 19 nt, Artificial Sequence
  Description of Artificial Sequence: Synthetic oligonucleotide
aucucuggugucagaacgc

SEQ ID NO: 1562521 - RNA, 19 nt, Artificial Sequence
  Description of Artificial Sequence: Synthetic oligonucleotide
agcugcuugccggaggccc

SEQ ID NO: 1562522 - RNA, 19 nt, Artificial Sequence
  Description of Artificial Sequence: Synthetic oligonucleotide
acucacagucaucaggaaa

SEQ ID NO: 1562523 - RNA, 19 nt, Artificial Sequence
  Description of Artificial Sequence: Synthetic oligonucleotide
augacucauguuccccaac

SEQ ID NO: 1562524 - RNA, 19 nt, Artificial Sequence
  Description of Artificial Sequence: Synthetic oligonucleotide
ugguuccauuaccugagcu

SEQ ID NO: 1562525 - RNA, 19 nt, Artificial Sequence
  Description of Artificial Sequence: Synthetic oligonucleotide
ggccagaauguucuggagg

SEQ ID NO: 1562526 - RNA, 19 nt, Artificial Sequence
  Description of Artificial Sequence: Synthetic oligonucleotide
uugagcacguagacccucc

SEQ ID NO: 1562527 - RNA, 19 nt, Artificial Sequence
  Description of Artificial Sequence: Synthetic oligonucleotide
agaaucacacagcuaugaa

SEQ ID NO: 1562528 - RNA, 19 nt, Artificial Sequence
  Description of Artificial Sequence: Synthetic oligonucleotide
auuuucccggcccggaacu

SEQ ID NO: 1562529 - RNA, 19 nt, Artificial Sequence
  Description of Artificial Sequence: Synthetic oligonucleotide
gacacucguugacuuuccg

SEQ ID NO: 1562530 - RNA, 19 nt, Artificial Sequence
  Description of Artificial Sequence: Synthetic oligonucleotide
ugguuccuuucaaugacau

SEQ ID NO: 1562531 - RNA, 19 nt, Artificial Sequence
  Description of Artificial Sequence: Synthetic oligonucleotide
cagucuggggcagagauuc

SEQ ID NO: 1562532 - RNA, 19 nt, Artificial Sequence
  Description of Artificial Sequence: Synthetic oligonucleotide
gaaucacacagcuaugaau

SEQ ID NO: 1562533 - RNA, 19 nt, Artificial Sequence
  Description of Artificial Sequence: Synthetic oligonucleotide
agaauguucuggaggucac

SEQ ID NO: 1562534 - RNA, 19 nt, Artificial Sequence
  Description of Artificial Sequence: Synthetic oligonucleotide
caaucgccacuacagaauc

SEQ ID NO: 1562535 - RNA, 19 nt, Artificial Sequence
  Description of Artificial Sequence: Synthetic oligonucleotide
cuugucuuuugcgucgccc

SEQ ID NO: 1562536 - RNA, 19 nt, Artificial Sequence
  Description of Artificial Sequence: Synthetic oligonucleotide
caggcacauucauaguggc

SEQ ID NO: 1562537 - RNA, 19 nt, Artificial Sequence
  Description of Artificial Sequence: Synthetic oligonucleotide
uagacccucccgcuggggc

SEQ ID NO: 1562538 - RNA, 19 nt, Artificial Sequence
  Description of Artificial Sequence: Synthetic oligonucleotide
uucggcucugguuuggcau

SEQ ID NO: 1562539 - RNA, 19 nt, Artificial Sequence
  Description of Artificial Sequence: Synthetic oligonucleotide
ugaacauacccagggccug

SEQ ID NO: 1562540 - RNA, 19 nt, Artificial Sequence
  Description of Artificial Sequence: Synthetic oligonucleotide
uaugacucauguuccccaa

SEQ ID NO: 1562541 - RNA, 19 nt, Artificial Sequence
  Description of Artificial Sequence: Synthetic oligonucleotide
cauguuccccaacaggcuc

SEQ ID NO: 1562542 - RNA, 19 nt, Artificial Sequence
  Description of Artificial Sequence: Synthetic oligonucleotide
uccggcaaugcucuucauc

SEQ ID NO: 1562543 - RNA, 19 nt, Artificial Sequence
  Description of Artificial Sequence: Synthetic oligonucleotide
cacccaguccuccaaggcc

SEQ ID NO: 1562544 - RNA, 19 nt, Artificial Sequence
  Description of Artificial Sequence: Synthetic oligonucleotide
ugaucucuggugucagaac

SEQ ID NO: 1562545 - RNA, 19 nt, Artificial Sequence
  Description of Artificial Sequence: Synthetic oligonucleotide
gucuagacucauauccucc

SEQ ID NO: 1562546 - RNA, 19 nt, Artificial Sequence
  Description of Artificial Sequence: Synthetic oligonucleotide
auccccgagagccgggcac

SEQ ID NO: 1562547 - RNA, 19 nt, Artificial Sequence
  Description of Artificial Sequence: Synthetic oligonucleotide
caucaggaaagauaaucaa

SEQ ID NO: 1562548 - RNA, 19 nt, Artificial Sequence
  Description of Artificial Sequence: Synthetic oligonucleotide
aauguguucuggaucucau

SEQ ID NO: 1562549 - RNA, 19 nt, Artificial Sequence
  Description of Artificial Sequence: Synthetic oligonucleotide
aggucaauguguucuggau

SEQ ID NO: 1562550 - RNA, 19 nt, Artificial Sequence
  Description of Artificial Sequence: Synthetic oligonucleotide
gguccgaugagcugcauga

SEQ ID NO: 1562551 - RNA, 19 nt, Artificial Sequence
  Description of Artificial Sequence: Synthetic oligonucleotide
aagagccucuuggaccccg

SEQ ID NO: 1562552 - RNA, 19 nt, Artificial Sequence
  Description of Artificial Sequence: Synthetic oligonucleotide
cuuggaccccgccuuaaac

SEQ ID NO: 1562553 - RNA, 19 nt, Artificial Sequence
  Description of Artificial Sequence: Synthetic oligonucleotide
ugguccgaugagcugcaug

SEQ ID NO: 1562554 - RNA, 19 nt, Artificial Sequence
  Description of Artificial Sequence: Synthetic oligonucleotide
cccgccuuaaacuugagca

SEQ ID NO: 1562555 - RNA, 19 nt, Artificial Sequence
  Description of Artificial Sequence: Synthetic oligonucleotide
uugggaacagagcgccuga

SEQ ID NO: 1562556 - RNA, 19 nt, Artificial Sequence
  Description of Artificial Sequence: Synthetic oligonucleotide
uacacgagcccuuuccguu

SEQ ID NO: 1562557 - RNA, 19 nt, Artificial Sequence
  Description of Artificial Sequence: Synthetic oligonucleotide
ugacauuuucccggcccgg

SEQ ID NO: 1562558 - RNA, 19 nt, Artificial Sequence
  Description of Artificial Sequence: Synthetic oligonucleotide
uuccguuuaucugggguga

SEQ ID NO: 1562559 - RNA, 19 nt, Artificial Sequence
  Description of Artificial Sequence: Synthetic oligonucleotide
gagcuggacgaagagcugc

SEQ ID NO: 1562560 - RNA, 19 nt, Artificial Sequence
  Description of Artificial Sequence: Synthetic oligonucleotide
uccugaacgucugcauuag

SEQ ID NO: 1562561 - RNA, 19 nt, Artificial Sequence
  Description of Artificial Sequence: Synthetic oligonucleotide
acuugguggaggauccccg

SEQ ID NO: 1562562 - RNA, 19 nt, Artificial Sequence
  Description of Artificial Sequence: Synthetic oligonucleotide
agccaugaucucugguguc

SEQ ID NO: 1562563 - RNA, 19 nt, Artificial Sequence
  Description of Artificial Sequence: Synthetic oligonucleotide
cuugggaacagagcgccug

SEQ ID NO: 1562564 - RNA, 19 nt, Artificial Sequence
  Description of Artificial Sequence: Synthetic oligonucleotide
cauuagcgaggaugggagc

SEQ ID NO: 1562565 - RNA, 19 nt, Artificial Sequence
  Description of Artificial Sequence: Synthetic oligonucleotide
accuuuguuggcggccucc

SEQ ID NO: 1562566 - RNA, 19 nt, Artificial Sequence
  Description of Artificial Sequence: Synthetic oligonucleotide
ugagggagucguccgucug

SEQ ID NO: 1562567 - RNA, 19 nt, Artificial Sequence
  Description of Artificial Sequence: Synthetic oligonucleotide
ucuuuugcgucgcccuccu

SEQ ID NO: 1562568 - RNA, 19 nt, Artificial Sequence
  Description of Artificial Sequence: Synthetic oligonucleotide
ggcuccugcauccaaaaga

SEQ ID NO: 1562569 - RNA, 19 nt, Artificial Sequence
  Description of Artificial Sequence: Synthetic oligonucleotide
aacaggcgcuccugaacgu

SEQ ID NO: 1562570 - RNA, 19 nt, Artificial Sequence
  Description of Artificial Sequence: Synthetic oligonucleotide
cuuggacuggugguagagg

SEQ ID NO: 1562571 - RNA, 19 nt, Artificial Sequence
  Description of Artificial Sequence: Synthetic oligonucleotide
uggcaaaugcuuccacauc

SEQ ID NO: 1562572 - RNA, 19 nt, Artificial Sequence
  Description of Artificial Sequence: Synthetic oligonucleotide
agcgccugaagucgucauc

SEQ ID NO: 1562573 - RNA, 19 nt, Artificial Sequence
  Description of Artificial Sequence: Synthetic oligonucleotide
gguggaggauccccgagag

SEQ ID NO: 1562574 - RNA, 19 nt, Artificial Sequence
  Description of Artificial Sequence: Synthetic oligonucleotide
auuauucugcauggcuuug

SEQ ID NO: 1562575 - RNA, 19 nt, Artificial Sequence
  Description of Artificial Sequence: Synthetic oligonucleotide
gcauuagcgaggaugggag

SEQ ID NO: 1562576 - RNA, 19 nt, Artificial Sequence
  Description of Artificial Sequence: Synthetic oligonucleotide
gguacuugguggaggaucc

SEQ ID NO: 1562577 - RNA, 19 nt, Artificial Sequence
  Description of Artificial Sequence: Synthetic oligonucleotide
cauuuucccggcccggaac

SEQ ID NO: 1562578 - RNA, 19 nt, Artificial Sequence
  Description of Artificial Sequence: Synthetic oligonucleotide
cccgcuugaacucacaguc

SEQ ID NO: 1562579 - RNA, 19 nt, Artificial Sequence
  Description of Artificial Sequence: Synthetic oligonucleotide
gaggauccccgagagccgg

SEQ ID NO: 1562580 - RNA, 19 nt, Artificial Sequence
  Description of Artificial Sequence: Synthetic oligonucleotide
ugagcacguagacccuccc

SEQ ID NO: 1562581 - RNA, 19 nt, Artificial Sequence
  Description of Artificial Sequence: Synthetic oligonucleotide
gcaggcacauucauagugg

SEQ ID NO: 1562582 - RNA, 19 nt, Artificial Sequence
  Description of Artificial Sequence: Synthetic oligonucleotide
gccgaacuggcacaugagg

SEQ ID NO: 1562583 - RNA, 19 nt, Artificial Sequence
  Description of Artificial Sequence: Synthetic oligonucleotide
agacacucguugacuuucc

SEQ ID NO: 1562584 - RNA, 19 nt, Artificial Sequence
  Description of Artificial Sequence: Synthetic oligonucleotide
uccauuaccugagcugggu

SEQ ID NO: 1562585 - RNA, 19 nt, Artificial Sequence
  Description of Artificial Sequence: Synthetic oligonucleotide
agcgaauaauuuagucuag

SEQ ID NO: 1562586 - RNA, 19 nt, Artificial Sequence
  Description of Artificial Sequence: Synthetic oligonucleotide
ugcgucgcccuccuucggc

SEQ ID NO: 1562587 - RNA, 19 nt, Artificial Sequence
  Description of Artificial Sequence: Synthetic oligonucleotide
gaagcccgcgcucggcccg

SEQ ID NO: 1562588 - RNA, 19 nt, Artificial Sequence
  Description of Artificial Sequence: Synthetic oligonucleotide
uuagcgaggaugggagcca

SEQ ID NO: 1562589 - RNA, 19 nt, Artificial Sequence
  Description of Artificial Sequence: Synthetic oligonucleotide
ggucaauguguucuggauc

SEQ ID NO: 1562590 - RNA, 19 nt, Artificial Sequence
  Description of Artificial Sequence: Synthetic oligonucleotide
cgaauaauuuagucuagac

SEQ ID NO: 1562591 - RNA, 19 nt, Artificial Sequence
  Description of Artificial Sequence: Synthetic oligonucleotide
cagaauguucuggagguca

SEQ ID NO: 1562592 - RNA, 19 nt, Artificial Sequence
  Description of Artificial Sequence: Synthetic oligonucleotide
ugaagucgucauccuggcu

SEQ ID NO: 1562593 - RNA, 19 nt, Artificial Sequence
  Description of Artificial Sequence: Synthetic oligonucleotide
uggaccccgccuuaaacuu

SEQ ID NO: 1562594 - RNA, 19 nt, Artificial Sequence
  Description of Artificial Sequence: Synthetic oligonucleotide
ucuugucuuuugcgucgcc

SEQ ID NO: 1562595 - RNA, 19 nt, Artificial Sequence
  Description of Artificial Sequence: Synthetic oligonucleotide
cugggugcgggacuuggac

SEQ ID NO: 1562596 - RNA, 19 nt, Artificial Sequence
  Description of Artificial Sequence: Synthetic oligonucleotide
cuggggugaggucaaugug

SEQ ID NO: 1562597 - RNA, 19 nt, Artificial Sequence
  Description of Artificial Sequence: Synthetic oligonucleotide
uggaucucaucugcagucu

SEQ ID NO: 1562598 - RNA, 19 nt, Artificial Sequence
  Description of Artificial Sequence: Synthetic oligonucleotide
agguccugucuuuccaaca

SEQ ID NO: 1562599 - RNA, 19 nt, Artificial Sequence
  Description of Artificial Sequence: Synthetic oligonucleotide
ugucagaacgcuggccaga

SEQ ID NO: 1562600 - RNA, 19 nt, Artificial Sequence
  Description of Artificial Sequence: Synthetic oligonucleotide
uaccugagcugggugcggg

SEQ ID NO: 1562601 - RNA, 19 nt, Artificial Sequence
  Description of Artificial Sequence: Synthetic oligonucleotide
acccgcuugaacucacagu

SEQ ID NO: 1562602 - RNA, 19 nt, Artificial Sequence
  Description of Artificial Sequence: Synthetic oligonucleotide
ugaccgugguuccuuucaa

SEQ ID NO: 1562603 - RNA, 19 nt, Artificial Sequence
  Description of Artificial Sequence: Synthetic oligonucleotide
gaacauacccagggccugc

SEQ ID NO: 1562604 - RNA, 19 nt, Artificial Sequence
  Description of Artificial Sequence: Synthetic oligonucleotide
acuuguucccagugcucca

SEQ ID NO: 1562605 - RNA, 19 nt, Artificial Sequence
  Description of Artificial Sequence: Synthetic oligonucleotide
agugaaugagggagucguc

SEQ ID NO: 1562606 - RNA, 19 nt, Artificial Sequence
  Description of Artificial Sequence: Synthetic oligonucleotide
gauguacacgagcccuuuc

SEQ ID NO: 1562607 - RNA, 19 nt, Artificial Sequence
  Description of Artificial Sequence: Synthetic oligonucleotide
gugaccgugguuccuuuca

SEQ ID NO: 1562608 - RNA, 19 nt, Artificial Sequence
  Description of Artificial Sequence: Synthetic oligonucleotide
aaucgccacuacagaauca

SEQ ID NO: 1562609 - RNA, 19 nt, Artificial Sequence
  Description of Artificial Sequence: Synthetic oligonucleotide
ggacuggugguagaggcag

SEQ ID NO: 1562610 - RNA, 19 nt, Artificial Sequence
  Description of Artificial Sequence: Synthetic oligonucleotide
agagguccugucuuuccaa

SEQ ID NO: 1562611 - RNA, 19 nt, Artificial Sequence
  Description of Artificial Sequence: Synthetic oligonucleotide
ucuuggaccccgccuuaaa

SEQ ID NO: 1562612 - RNA, 19 nt, Artificial Sequence
  Description of Artificial Sequence: Synthetic oligonucleotide
ucaccuuuguuggcggccu

SEQ ID NO: 1562613 - RNA, 19 nt, Artificial Sequence
  Description of Artificial Sequence: Synthetic oligonucleotide
ggaacagagcgccugaagu

SEQ ID NO: 1562614 - RNA, 19 nt, Artificial Sequence
  Description of Artificial Sequence: Synthetic oligonucleotide
caucaccuuuguuggcggc

SEQ ID NO: 1562615 - RNA, 19 nt, Artificial Sequence
  Description of Artificial Sequence: Synthetic oligonucleotide
uuaccugagcugggugcgg

SEQ ID NO: 1562616 - RNA, 19 nt, Artificial Sequence
  Description of Artificial Sequence: Synthetic oligonucleotide
acuggugguagaggcagcu

SEQ ID NO: 1562617 - RNA, 19 nt, Artificial Sequence
  Description of Artificial Sequence: Synthetic oligonucleotide
ugggcuccugcauccaaaa

SEQ ID NO: 1562618 - RNA, 19 nt, Artificial Sequence
  Description of Artificial Sequence: Synthetic oligonucleotide
cacccgcuugaacucacag

SEQ ID NO: 1562619 - RNA, 19 nt, Artificial Sequence
  Description of Artificial Sequence: Synthetic oligonucleotide
augagggagucguccgucu

SEQ ID NO: 1562620 - RNA, 19 nt, Artificial Sequence
  Description of Artificial Sequence: Synthetic oligonucleotide
ugcaguccacccucaccgc

SEQ ID NO: 1562621 - RNA, 19 nt, Artificial Sequence
  Description of Artificial Sequence: Synthetic oligonucleotide
gaagagcugcuugccggag

SEQ ID NO: 1562622 - RNA, 19 nt, Artificial Sequence
  Description of Artificial Sequence: Synthetic oligonucleotide
gggugcgggacuuggacug

SEQ ID NO: 1562623 - RNA, 19 nt, Artificial Sequence
  Description of Artificial Sequence: Synthetic oligonucleotide
cuuuccggcaaugcucuuc

SEQ ID NO: 1562624 - RNA, 19 nt, Artificial Sequence
  Description of Artificial Sequence: Synthetic oligonucleotide
gucuuuugcgucgcccucc

SEQ ID NO: 1562625 - RNA, 19 nt, Artificial Sequence
  Description of Artificial Sequence: Synthetic oligonucleotide
ucauaguggccagaauguu

SEQ ID NO: 1562626 - RNA, 19 nt, Artificial Sequence
  Description of Artificial Sequence: Synthetic oligonucleotide
aacgcuggccagauccacu

SEQ ID NO: 1562627 - RNA, 19 nt, Artificial Sequence
  Description of Artificial Sequence: Synthetic oligonucleotide
ugccgagccucgccggaag

SEQ ID NO: 1562628 - RNA, 19 nt, Artificial Sequence
  Description of Artificial Sequence: Synthetic oligonucleotide
acgucugcauuagcgagga

SEQ ID NO: 1562629 - RNA, 19 nt, Artificial Sequence
  Description of Artificial Sequence: Synthetic oligonucleotide
ucguugacuuuccggcaau

SEQ ID NO: 1562630 - RNA, 19 nt, Artificial Sequence
  Description of Artificial Sequence: Synthetic oligonucleotide
ggcuugggaacagagcgcc

SEQ ID NO: 1562631 - RNA, 19 nt, Artificial Sequence
  Description of Artificial Sequence: Synthetic oligonucleotide
ggcuaugacucauguuccc

SEQ ID NO: 1562632 - RNA, 19 nt, Artificial Sequence
  Description of Artificial Sequence: Synthetic oligonucleotide
cguuuaucuggggugaccg

SEQ ID NO: 1562633 - RNA, 19 nt, Artificial Sequence
  Description of Artificial Sequence: Synthetic oligonucleotide
agacccucccgcuggggca

SEQ ID NO: 1562634 - RNA, 19 nt, Artificial Sequence
  Description of Artificial Sequence: Synthetic oligonucleotide
gcuaugacucauguucccc

SEQ ID NO: 1562635 - RNA, 19 nt, Artificial Sequence
  Description of Artificial Sequence: Synthetic oligonucleotide
acauuuucccggcccggaa

SEQ ID NO: 1562636 - RNA, 19 nt, Artificial Sequence
  Description of Artificial Sequence: Synthetic oligonucleotide
gggaacagagcgccugaag

SEQ ID NO: 1562637 - RNA, 19 nt, Artificial Sequence
  Description of Artificial Sequence: Synthetic oligonucleotide
uccuucggcucugguuugg

SEQ ID NO: 1562638 - RNA, 19 nt, Artificial Sequence
  Description of Artificial Sequence: Synthetic oligonucleotide
ugcgggacuuggacuggug

SEQ ID NO: 1562639 - RNA, 19 nt, Artificial Sequence
  Description of Artificial Sequence: Synthetic oligonucleotide
gugacggcugccgacuggc

SEQ ID NO: 1562640 - RNA, 19 nt, Artificial Sequence
  Description of Artificial Sequence: Synthetic oligonucleotide
aggggcgccguccgggcuc

SEQ ID NO: 1562641 - RNA, 19 nt, Artificial Sequence
  Description of Artificial Sequence: Synthetic oligonucleotide
gcgggacuuggacuggugg

SEQ ID NO: 1562642 - RNA, 19 nt, Artificial Sequence
  Description of Artificial Sequence: Synthetic oligonucleotide
cagauccacuugcuggcug

SEQ ID NO: 1562643 - RNA, 19 nt, Artificial Sequence
  Description of Artificial Sequence: Synthetic oligonucleotide
agcugggugcgggacuugg

SEQ ID NO: 1562644 - RNA, 19 nt, Artificial Sequence
  Description of Artificial Sequence: Synthetic oligonucleotide
uugcgucgcccuccuucgg

SEQ ID NO: 1562645 - RNA, 19 nt, Artificial Sequence
  Description of Artificial Sequence: Synthetic oligonucleotide
ucgggcuggcugcugugcu

SEQ ID NO: 1562646 - RNA, 19 nt, Artificial Sequence
  Description of Artificial Sequence: Synthetic oligonucleotide
cuccugaacgucugcauua

SEQ ID NO: 1562647 - RNA, 19 nt, Artificial Sequence
  Description of Artificial Sequence: Synthetic oligonucleotide
cuugagcacguagacccuc

SEQ ID NO: 1562648 - RNA, 19 nt, Artificial Sequence
  Description of Artificial Sequence: Synthetic oligonucleotide
ggaucucaucugcagucug

SEQ ID NO: 1562649 - RNA, 19 nt, Artificial Sequence
  Description of Artificial Sequence: Synthetic oligonucleotide
cacguagacccucccgcug

SEQ ID NO: 1562650 - RNA, 19 nt, Artificial Sequence
  Description of Artificial Sequence: Synthetic oligonucleotide
gacauuuucccggcccgga

SEQ ID NO: 1562651 - RNA, 19 nt, Artificial Sequence
  Description of Artificial Sequence: Synthetic oligonucleotide
cauuauucugcauggcuuu

SEQ ID NO: 1562652 - RNA, 19 nt, Artificial Sequence
  Description of Artificial Sequence: Synthetic oligonucleotide
gcauggcuuuggcaaaugc

SEQ ID NO: 1562653 - RNA, 19 nt, Artificial Sequence
  Description of Artificial Sequence: Synthetic oligonucleotide
caccgcccagugcugagag

SEQ ID NO: 1562654 - RNA, 19 nt, Artificial Sequence
  Description of Artificial Sequence: Synthetic oligonucleotide
gccagaauguucuggaggu

SEQ ID NO: 1562655 - RNA, 19 nt, Artificial Sequence
  Description of Artificial Sequence: Synthetic oligonucleotide
uguuggcggccuccacagc

SEQ ID NO: 1562656 - RNA, 19 nt, Artificial Sequence
  Description of Artificial Sequence: Synthetic oligonucleotide
gcaacaggcgcuccugaac

SEQ ID NO: 1562657 - RNA, 19 nt, Artificial Sequence
  Description of Artificial Sequence: Synthetic oligonucleotide
gucgucauccuggcugugc

SEQ ID NO: 1562658 - RNA, 19 nt, Artificial Sequence
  Description of Artificial Sequence: Synthetic oligonucleotide
gagccgggcaccaggcuug

SEQ ID NO: 1562659 - RNA, 19 nt, Artificial Sequence
  Description of Artificial Sequence: Synthetic oligonucleotide
gacuuggacuggugguaga

SEQ ID NO: 1562660 - RNA, 19 nt, Artificial Sequence
  Description of Artificial Sequence: Synthetic oligonucleotide
agagccucuuggaccccgc

SEQ ID NO: 1562661 - RNA, 19 nt, Artificial Sequence
  Description of Artificial Sequence: Synthetic oligonucleotide
gaacgcuggccagauccac

SEQ ID NO: 1562662 - RNA, 19 nt, Artificial Sequence
  Description of Artificial Sequence: Synthetic oligonucleotide
gagccucgccggaagcccg

SEQ ID NO: 1562663 - RNA, 19 nt, Artificial Sequence
  Description of Artificial Sequence: Synthetic oligonucleotide
cgugguuccuuucaaugac

SEQ ID NO: 1562664 - RNA, 19 nt, Artificial Sequence
  Description of Artificial Sequence: Synthetic oligonucleotide
gcgccugaagucgucaucc

SEQ ID NO: 1562665 - RNA, 19 nt, Artificial Sequence
  Description of Artificial Sequence: Synthetic oligonucleotide
gaccccgccuuaaacuuga

SEQ ID NO: 1562666 - RNA, 19 nt, Artificial Sequence
  Description of Artificial Sequence: Synthetic oligonucleotide
acacgagcccuuuccguuu

SEQ ID NO: 1562667 - RNA, 19 nt, Artificial Sequence
  Description of Artificial Sequence: Synthetic oligonucleotide
aguccacccucaccgccca

SEQ ID NO: 1562668 - RNA, 19 nt, Artificial Sequence
  Description of Artificial Sequence: Synthetic oligonucleotide
cugcauuagcgaggauggg

SEQ ID NO: 1562669 - RNA, 19 nt, Artificial Sequence
  Description of Artificial Sequence: Synthetic oligonucleotide
ggugacggcugccgacugg

SEQ ID NO: 1562670 - RNA, 19 nt, Artificial Sequence
  Description of Artificial Sequence: Synthetic oligonucleotide
ccgccuuaaacuugagcac

SEQ ID NO: 1562671 - RNA, 19 nt, Artificial Sequence
  Description of Artificial Sequence: Synthetic oligonucleotide
cccuuuccguuuaucuggg

SEQ ID NO: 1562672 - RNA, 19 nt, Artificial Sequence
  Description of Artificial Sequence: Synthetic oligonucleotide
gguggcgcgagcggaagag

SEQ ID NO: 1562673 - RNA, 19 nt, Artificial Sequence
  Description of Artificial Sequence: Synthetic oligonucleotide
cagaagugaaugagggagu

SEQ ID NO: 1562674 - RNA, 19 nt, Artificial Sequence
  Description of Artificial Sequence: Synthetic oligonucleotide
gcugggucgggcuggcugc

SEQ ID NO: 1562675 - RNA, 19 nt, Artificial Sequence
  Description of Artificial Sequence: Synthetic oligonucleotide
uggggcacugcggcacccg

SEQ ID NO: 1562676 - RNA, 19 nt, Artificial Sequence
  Description of Artificial Sequence: Synthetic oligonucleotide
agggagucguccgucugcu

SEQ ID NO: 1562677 - RNA, 19 nt, Artificial Sequence
  Description of Artificial Sequence: Synthetic oligonucleotide
gcgcgagcggaagaggugg

SEQ ID NO: 1562678 - RNA, 19 nt, Artificial Sequence
  Description of Artificial Sequence: Synthetic oligonucleotide
agaacgcuggccagaucca

SEQ ID NO: 1562679 - RNA, 19 nt, Artificial Sequence
  Description of Artificial Sequence: Synthetic oligonucleotide
uccguuuaucuggggugac

SEQ ID NO: 1562680 - RNA, 19 nt, Artificial Sequence
  Description of Artificial Sequence: Synthetic oligonucleotide
cuacagaaucacacagcua

SEQ ID NO: 1562681 - RNA, 19 nt, Artificial Sequence
  Description of Artificial Sequence: Synthetic oligonucleotide
aaggcccgcugguccgaug

SEQ ID NO: 1562682 - RNA, 19 nt, Artificial Sequence
  Description of Artificial Sequence: Synthetic oligonucleotide
gggccaagcugucccgagg

SEQ ID NO: 1562683 - RNA, 19 nt, Artificial Sequence
  Description of Artificial Sequence: Synthetic oligonucleotide
gcgaauaauuuagucuaga

SEQ ID NO: 1562684 - RNA, 19 nt, Artificial Sequence
  Description of Artificial Sequence: Synthetic oligonucleotide
guacacgagcccuuuccgu

SEQ ID NO: 1562685 - RNA, 19 nt, Artificial Sequence
  Description of Artificial Sequence: Synthetic oligonucleotide
ggacgaagagcugcuugcc

SEQ ID NO: 1562686 - RNA, 19 nt, Artificial Sequence
  Description of Artificial Sequence: Synthetic oligonucleotide
ccggcaaugcucuucaucu

SEQ ID NO: 1562687 - RNA, 19 nt, Artificial Sequence
  Description of Artificial Sequence: Synthetic oligonucleotide
ggaggauccccgagagccg

SEQ ID NO: 1562688 - RNA, 19 nt, Artificial Sequence
  Description of Artificial Sequence: Synthetic oligonucleotide
guagacccucccgcugggg

SEQ ID NO: 1562689 - RNA, 19 nt, Artificial Sequence
  Description of Artificial Sequence: Synthetic oligonucleotide
gcugucccgaggccaaggc

SEQ ID NO: 1562690 - RNA, 19 nt, Artificial Sequence
  Description of Artificial Sequence: Synthetic oligonucleotide
cucugcaguccacccucac

SEQ ID NO: 1562691 - RNA, 19 nt, Artificial Sequence
  Description of Artificial Sequence: Synthetic oligonucleotide
acuugagcacguagacccu

SEQ ID NO: 1562692 - RNA, 19 nt, Artificial Sequence
  Description of Artificial Sequence: Synthetic oligonucleotide
guggcgcgagcggaagagg

SEQ ID NO: 1562693 - RNA, 19 nt, Artificial Sequence
  Description of Artificial Sequence: Synthetic oligonucleotide
ugggaacagagcgccugaa

SEQ ID NO: 1562694 - RNA, 19 nt, Artificial Sequence
  Description of Artificial Sequence: Synthetic oligonucleotide
cccaacaggcucugcaguc

SEQ ID NO: 1562695 - RNA, 19 nt, Artificial Sequence
  Description of Artificial Sequence: Synthetic oligonucleotide
ccaacaggcucugcagucc

SEQ ID NO: 1562696 - RNA, 19 nt, Artificial Sequence
  Description of Artificial Sequence: Synthetic oligonucleotide
gauccccgagagccgggca

SEQ ID NO: 1562697 - RNA, 19 nt, Artificial Sequence
  Description of Artificial Sequence: Synthetic oligonucleotide
guuuaucuggggugaccgu

SEQ ID NO: 1562698 - RNA, 19 nt, Artificial Sequence
  Description of Artificial Sequence: Synthetic oligonucleotide
cccgcuggggcacugcggc

SEQ ID NO: 1562699 - RNA, 19 nt, Artificial Sequence
  Description of Artificial Sequence: Synthetic oligonucleotide
uuuucccggcccggaacuc

SEQ ID NO: 1562700 - RNA, 19 nt, Artificial Sequence
  Description of Artificial Sequence: Synthetic oligonucleotide
gaagagccucuuggacccc

SEQ ID NO: 1562701 - RNA, 19 nt, Artificial Sequence
  Description of Artificial Sequence: Synthetic oligonucleotide
acagagcgccugaagucgu

SEQ ID NO: 1562702 - RNA, 19 nt, Artificial Sequence
  Description of Artificial Sequence: Synthetic oligonucleotide
cacccucaccgcccagugc

SEQ ID NO: 1562703 - RNA, 19 nt, Artificial Sequence
  Description of Artificial Sequence: Synthetic oligonucleotide
cagagcgccugaagucguc

SEQ ID NO: 1562704 - RNA, 19 nt, Artificial Sequence
  Description of Artificial Sequence: Synthetic oligonucleotide
ucgccggaagcccgcgcuc

SEQ ID NO: 1562705 - RNA, 19 nt, Artificial Sequence
  Description of Artificial Sequence: Synthetic oligonucleotide
cucaggaaggacagcgaau

SEQ ID NO: 1562706 - RNA, 19 nt, Artificial Sequence
  Description of Artificial Sequence: Synthetic oligonucleotide
ggcaccaggcuugggaaca

SEQ ID NO: 1562707 - RNA, 19 nt, Artificial Sequence
  Description of Artificial Sequence: Synthetic oligonucleotide
ccgugguuccuuucaauga

SEQ ID NO: 1562708 - RNA, 19 nt, Artificial Sequence
  Description of Artificial Sequence: Synthetic oligonucleotide
gacccucccgcuggggcac

SEQ ID NO: 1562709 - RNA, 19 nt, Artificial Sequence
  Description of Artificial Sequence: Synthetic oligonucleotide
cacugcggcacccgcuuga

SEQ ID NO: 1562710 - RNA, 19 nt, Artificial Sequence
  Description of Artificial Sequence: Synthetic oligonucleotide
gcugcaugagcuggcuaug

SEQ ID NO: 1562711 - RNA, 19 nt, Artificial Sequence
  Description of Artificial Sequence: Synthetic oligonucleotide
ccugaacgucugcauuagc

SEQ ID NO: 1562712 - RNA, 19 nt, Artificial Sequence
  Description of Artificial Sequence: Synthetic oligonucleotide
cugcaugagcuggcuauga

SEQ ID NO: 1562713 - RNA, 19 nt, Artificial Sequence
  Description of Artificial Sequence: Synthetic oligonucleotide
ggugcgggacuuggacugg

SEQ ID NO: 1562714 - RNA, 19 nt, Artificial Sequence
  Description of Artificial Sequence: Synthetic oligonucleotide
gaccgugguuccuuucaau

SEQ ID NO: 1562715 - RNA, 19 nt, Artificial Sequence
  Description of Artificial Sequence: Synthetic oligonucleotide
cgcugguccgaugagcugc

SEQ ID NO: 1562716 - RNA, 19 nt, Artificial Sequence
  Description of Artificial Sequence: Synthetic oligonucleotide
ucggcgccugccgagccuc

SEQ ID NO: 1562717 - RNA, 19 nt, Artificial Sequence
  Description of Artificial Sequence: Synthetic oligonucleotide
aggauccccgagagccggg

SEQ ID NO: 1562718 - RNA, 19 nt, Artificial Sequence
  Description of Artificial Sequence: Synthetic oligonucleotide
ggccgaacuggcacaugag

SEQ ID NO: 1562719 - RNA, 19 nt, Artificial Sequence
  Description of Artificial Sequence: Synthetic oligonucleotide
cugcuugccggaggcccgc

SEQ ID NO: 1562720 - RNA, 19 nt, Artificial Sequence
  Description of Artificial Sequence: Synthetic oligonucleotide
ccccgccuuaaacuugagc

SEQ ID NO: 1562721 - RNA, 19 nt, Artificial Sequence
  Description of Artificial Sequence: Synthetic oligonucleotide
ggugaccgugguuccuuuc

SEQ ID NO: 1562722 - RNA, 19 nt, Artificial Sequence
  Description of Artificial Sequence: Synthetic oligonucleotide
ucggccucaggggcgccgu

SEQ ID NO: 1562723 - RNA, 19 nt, Artificial Sequence
  Description of Artificial Sequence: Synthetic oligonucleotide
ccguuuaucuggggugacc

SEQ ID NO: 1562724 - RNA, 19 nt, Artificial Sequence
  Description of Artificial Sequence: Synthetic oligonucleotide
cauucauaguggccagaau

SEQ ID NO: 1562725 - RNA, 19 nt, Artificial Sequence
  Description of Artificial Sequence: Synthetic oligonucleotide
gaaggccgaacuggcacau

SEQ ID NO: 1562726 - RNA, 19 nt, Artificial Sequence
  Description of Artificial Sequence: Synthetic oligonucleotide
acugcggcacccgcuugaa

SEQ ID NO: 1562727 - RNA, 19 nt, Artificial Sequence
  Description of Artificial Sequence: Synthetic oligonucleotide
uuccggcaaugcucuucau

SEQ ID NO: 1562728 - RNA, 19 nt, Artificial Sequence
  Description of Artificial Sequence: Synthetic oligonucleotide
gcggcacccgcuugaacuc

SEQ ID NO: 1562729 - RNA, 19 nt, Artificial Sequence
  Description of Artificial Sequence: Synthetic oligonucleotide
aggcgcuccugaacgucug

SEQ ID NO: 1562730 - RNA, 19 nt, Artificial Sequence
  Description of Artificial Sequence: Synthetic oligonucleotide
gccugccgagccucgccgg

SEQ ID NO: 1562731 - RNA, 19 nt, Artificial Sequence
  Description of Artificial Sequence: Synthetic oligonucleotide
caccuuuguuggcggccuc

SEQ ID NO: 1562732 - RNA, 19 nt, Artificial Sequence
  Description of Artificial Sequence: Synthetic oligonucleotide
ucccggcccggaacuccac

SEQ ID NO: 1562733 - RNA, 19 nt, Artificial Sequence
  Description of Artificial Sequence: Synthetic oligonucleotide
ggauccccgagagccgggc

SEQ ID NO: 1562734 - RNA, 19 nt, Artificial Sequence
  Description of Artificial Sequence: Synthetic oligonucleotide
ucgcccuccuucggcucug

SEQ ID NO: 1562735 - RNA, 19 nt, Artificial Sequence
  Description of Artificial Sequence: Synthetic oligonucleotide
gucagaacgcuggccagau

SEQ ID NO: 1562736 - RNA, 19 nt, Artificial Sequence
  Description of Artificial Sequence: Synthetic oligonucleotide
cugggguggcgcgagcgga

SEQ ID NO: 1562737 - RNA, 19 nt, Artificial Sequence
  Description of Artificial Sequence: Synthetic oligonucleotide
cagucuugggcuccugcau

SEQ ID NO: 1562738 - RNA, 19 nt, Artificial Sequence
  Description of Artificial Sequence: Synthetic oligonucleotide
gccggaagcccgcgcucgg

SEQ ID NO: 1562739 - RNA, 19 nt, Artificial Sequence
  Description of Artificial Sequence: Synthetic oligonucleotide
cucgccggaagcccgcgcu

SEQ ID NO: 1562740 - RNA, 19 nt, Artificial Sequence
  Description of Artificial Sequence: Synthetic oligonucleotide
gggugacggcugccgacug

SEQ ID NO: 1562741 - RNA, 19 nt, Artificial Sequence
  Description of Artificial Sequence: Synthetic oligonucleotide
cauccuccacggucccaga

SEQ ID NO: 1562742 - RNA, 19 nt, Artificial Sequence
  Description of Artificial Sequence: Synthetic oligonucleotide
ccacccucaccgcccagug

SEQ ID NO: 1562743 - RNA, 19 nt, Artificial Sequence
  Description of Artificial Sequence: Synthetic oligonucleotide
cguagacccucccgcuggg

SEQ ID NO: 1562744 - RNA, 19 nt, Artificial Sequence
  Description of Artificial Sequence: Synthetic oligonucleotide
cugagcugggugcgggacu

SEQ ID NO: 1562745 - RNA, 19 nt, Artificial Sequence
  Description of Artificial Sequence: Synthetic oligonucleotide
gagcugggugcgggacuug

SEQ ID NO: 1562746 - RNA, 19 nt, Artificial Sequence
  Description of Artificial Sequence: Synthetic oligonucleotide
gggagucguccgucugcug

SEQ ID NO: 1562747 - RNA, 19 nt, Artificial Sequence
  Description of Artificial Sequence: Synthetic oligonucleotide
guccacccucaccgcccag

SEQ ID NO: 1562748 - RNA, 19 nt, Artificial Sequence
  Description of Artificial Sequence: Synthetic oligonucleotide
ugccggaggcccgcugcuc

SEQ ID NO: 1562749 - RNA, 19 nt, Artificial Sequence
  Description of Artificial Sequence: Synthetic oligonucleotide
ccgcuugaacucacaguca

SEQ ID NO: 1562750 - RNA, 19 nt, Artificial Sequence
  Description of Artificial Sequence: Synthetic oligonucleotide
ccuucggcucugguuuggc

SEQ ID NO: 1562751 - RNA, 19 nt, Artificial Sequence
  Description of Artificial Sequence: Synthetic oligonucleotide
cucuuggaccccgccuuaa

SEQ ID NO: 1562752 - RNA, 19 nt, Artificial Sequence
  Description of Artificial Sequence: Synthetic oligonucleotide
ggcccgcugguccgaugag

SEQ ID NO: 1562753 - RNA, 19 nt, Artificial Sequence
  Description of Artificial Sequence: Synthetic oligonucleotide
gggguggcgcgagcggaag

SEQ ID NO: 1562754 - RNA, 19 nt, Artificial Sequence
  Description of Artificial Sequence: Synthetic oligonucleotide
gcgagcggaagagguggug

SEQ ID NO: 1562755 - RNA, 19 nt, Artificial Sequence
  Description of Artificial Sequence: Synthetic oligonucleotide
gccuuaaacuugagcacgu

SEQ ID NO: 1562756 - RNA, 19 nt, Artificial Sequence
  Description of Artificial Sequence: Synthetic oligonucleotide
gcacguagacccucccgcu

SEQ ID NO: 1562757 - RNA, 19 nt, Artificial Sequence
  Description of Artificial Sequence: Synthetic oligonucleotide
gcccgcugguccgaugagc

SEQ ID NO: 1562758 - RNA, 19 nt, Artificial Sequence
  Description of Artificial Sequence: Synthetic oligonucleotide
ggcacccgcuugaacucac

SEQ ID NO: 1562759 - RNA, 19 nt, Artificial Sequence
  Description of Artificial Sequence: Synthetic oligonucleotide
cguccgggcucgcucuucc

SEQ ID NO: 1562760 - RNA, 19 nt, Artificial Sequence
  Description of Artificial Sequence: Synthetic oligonucleotide
cccggcccggaacuccacc

SEQ ID NO: 1562761 - RNA, 19 nt, Artificial Sequence
  Description of Artificial Sequence: Synthetic oligonucleotide
gcugguccgaugagcugca

SEQ ID NO: 1562762 - RNA, 19 nt, Artificial Sequence
  Description of Artificial Sequence: Synthetic oligonucleotide
cccgcugguccgaugagcu

SEQ ID NO: 1562763 - RNA, 19 nt, Artificial Sequence
  Description of Artificial Sequence: Synthetic oligonucleotide
cguugacuuuccggcaaug

SEQ ID NO: 1562764 - RNA, 19 nt, Artificial Sequence
  Description of Artificial Sequence: Synthetic oligonucleotide
ccggcccggaacuccacca

SEQ ID NO: 1562765 - RNA, 19 nt, Artificial Sequence
  Description of Artificial Sequence: Synthetic oligonucleotide
ggucagucuugggcuccug

SEQ ID NO: 1562766 - RNA, 19 nt, Artificial Sequence
  Description of Artificial Sequence: Synthetic oligonucleotide
ggguggcgcgagcggaaga

SEQ ID NO: 1562767 - RNA, 19 nt, Artificial Sequence
  Description of Artificial Sequence: Synthetic oligonucleotide
ggggcgccguccgggcucg

SEQ ID NO: 1562768 - RNA, 19 nt, Artificial Sequence
  Description of Artificial Sequence: Synthetic oligonucleotide
ccucaggggcgccguccgg

SEQ ID NO: 1562769 - RNA, 19 nt, Artificial Sequence
  Description of Artificial Sequence: Synthetic oligonucleotide
ccgcugguccgaugagcug

SEQ ID NO: 1562770 - RNA, 19 nt, Artificial Sequence
  Description of Artificial Sequence: Synthetic oligonucleotide
ccgcccagugcugagagcu

SEQ ID NO: 1562771 - RNA, 19 nt, Artificial Sequence
  Description of Artificial Sequence: Synthetic oligonucleotide
cccucaccgcccagugcug

SEQ ID NO: 1562772 - RNA, 19 nt, Artificial Sequence
  Description of Artificial Sequence: Synthetic oligonucleotide
cccugcaggcacauucaua

SEQ ID NO: 1562773 - RNA, 19 nt, Artificial Sequence
  Description of Artificial Sequence: Synthetic oligonucleotide
gcgccguccgggcucgcuc

SEQ ID NO: 1562774 - RNA, 19 nt, Artificial Sequence
  Description of Artificial Sequence: Synthetic oligonucleotide
ccuuaaacuugagcacgua

SEQ ID NO: 1562775 - RNA, 19 nt, Artificial Sequence
  Description of Artificial Sequence: Synthetic oligonucleotide
gcugggugcgggacuugga

SEQ ID NO: 1562776 - RNA, 19 nt, Artificial Sequence
  Description of Artificial Sequence: Synthetic oligonucleotide
gccucgccggaagcccgcg

SEQ ID NO: 1562777 - RNA, 19 nt, Artificial Sequence
  Description of Artificial Sequence: Synthetic oligonucleotide
cggcccggaacuccaccag

SEQ ID NO: 1562778 - RNA, 19 nt, Artificial Sequence
  Description of Artificial Sequence: Synthetic oligonucleotide
cgccggaagcccgcgcucg

SEQ ID NO: 1562779 - RNA, 19 nt, Artificial Sequence
  Description of Artificial Sequence: Synthetic oligonucleotide
ccucgccggaagcccgcgc

SEQ ID NO: 1562780 - RNA, 19 nt, Artificial Sequence
  Description of Artificial Sequence: Synthetic oligonucleotide
ccggaagcccgcgcucggc

SEQ ID NO: 1562781 - RNA, 19 nt, Artificial Sequence
  Description of Artificial Sequence: Synthetic oligonucleotide
cugccgagccucgccggaa

SEQ ID NO: 1562782 - RNA, 19 nt, Artificial Sequence
  Description of Artificial Sequence: Synthetic oligonucleotide
gcgucgcccuccuucggcu

SEQ ID NO: 1562783 - RNA, 19 nt, Artificial Sequence
  Description of Artificial Sequence: Synthetic oligonucleotide
ggcgccugccgagccucgc

SEQ ID NO: 1562784 - RNA, 19 nt, Artificial Sequence
  Description of Artificial Sequence: Synthetic oligonucleotide
gugcgggacuuggacuggu

SEQ ID NO: 1562785 - RNA, 19 nt, Artificial Sequence
  Description of Artificial Sequence: Synthetic oligonucleotide
guccgggcucgcucuuccu

SEQ ID NO: 1562786 - RNA, 19 nt, Artificial Sequence
  Description of Artificial Sequence: Synthetic oligonucleotide
caagcuggccaggccuggu

SEQ ID NO: 1562787 - RNA, 19 nt, Artificial Sequence
  Description of Artificial Sequence: Synthetic oligonucleotide
ccugccgagccucgccgga

SEQ ID NO: 1562788 - RNA, 19 nt, Artificial Sequence
  Description of Artificial Sequence: Synthetic oligonucleotide
cucggcgccugccgagccu

SEQ ID NO: 1562789 - RNA, 19 nt, Artificial Sequence
  Description of Artificial Sequence: Synthetic oligonucleotide
gcacccgcuugaacucaca

SEQ ID NO: 1562790 - RNA, 19 nt, Artificial Sequence
  Description of Artificial Sequence: Synthetic oligonucleotide
ccucaccgcccagugcuga

SEQ ID NO: 1562791 - RNA, 19 nt, Artificial Sequence
  Description of Artificial Sequence: Synthetic oligonucleotide
cgucgcccuccuucggcuc

SEQ ID NO: 1562792 - RNA, 19 nt, Artificial Sequence
  Description of Artificial Sequence: Synthetic oligonucleotide
ccucuuggaccccgccuua

SEQ ID NO: 1562793 - RNA, 19 nt, Artificial Sequence
  Description of Artificial Sequence: Synthetic oligonucleotide
gcccugcaggcacauucau

SEQ ID NO: 1562794 - RNA, 19 nt, Artificial Sequence
  Description of Artificial Sequence: Synthetic oligonucleotide
gcccgcugcuccccagcaa

SEQ ID NO: 1562795 - RNA, 19 nt, Artificial Sequence
  Description of Artificial Sequence: Synthetic oligonucleotide
gccgggcaccaggcuuggg

SEQ ID NO: 1562796 - RNA, 19 nt, Artificial Sequence
  Description of Artificial Sequence: Synthetic oligonucleotide
gggugaccgugguuccuuu

SEQ ID NO: 1562797 - RNA, 19 nt, Artificial Sequence
  Description of Artificial Sequence: Synthetic oligonucleotide
caggggcgccguccgggcu

SEQ ID NO: 1562798 - RNA, 19 nt, Artificial Sequence
  Description of Artificial Sequence: Synthetic oligonucleotide
cugggucgggcuggcugcu

SEQ ID NO: 1562799 - RNA, 19 nt, Artificial Sequence
  Description of Artificial Sequence: Synthetic oligonucleotide
cuuuugcgucgcccuccuu

SEQ ID NO: 1562800 - RNA, 19 nt, Artificial Sequence
  Description of Artificial Sequence: Synthetic oligonucleotide
ccagauccacuugcuggcu

SEQ ID NO: 1562801 - RNA, 19 nt, Artificial Sequence
  Description of Artificial Sequence: Synthetic oligonucleotide
ccgcuggggcacugcggca

SEQ ID NO: 1562802 - RNA, 19 nt, Artificial Sequence
  Description of Artificial Sequence: Synthetic oligonucleotide
ccguccgggcucgcucuuc

SEQ ID NO: 1562803 - RNA, 19 nt, Artificial Sequence
  Description of Artificial Sequence: Synthetic oligonucleotide
caaggcccgcugguccgau

SEQ ID NO: 1562804 - RNA, 19 nt, Artificial Sequence
  Description of Artificial Sequence: Synthetic oligonucleotide
cugguccgaugagcugcau

SEQ ID NO: 1562805 - RNA, 19 nt, Artificial Sequence
  Description of Artificial Sequence: Synthetic oligonucleotide
gcccuccuucggcucuggu

SEQ ID NO: 1562806 - RNA, 19 nt, Artificial Sequence
  Description of Artificial Sequence: Synthetic oligonucleotide
cggcacccgcuugaacuca

SEQ ID NO: 1562807 - RNA, 19 nt, Artificial Sequence
  Description of Artificial Sequence: Synthetic oligonucleotide
ccucugcaggaaggccgaa

SEQ ID NO: 1562808 - RNA, 19 nt, Artificial Sequence
  Description of Artificial Sequence: Synthetic oligonucleotide
cgcgagcggaagagguggu

SEQ ID NO: 1562809 - RNA, 19 nt, Artificial Sequence
  Description of Artificial Sequence: Synthetic oligonucleotide
cgccguccgggcucgcucu

SEQ ID NO: 1562810 - RNA, 19 nt, Artificial Sequence
  Description of Artificial Sequence: Synthetic oligonucleotide
gccguccgggcucgcucuu

SEQ ID NO: 1562811 - RNA, 19 nt, Artificial Sequence
  Description of Artificial Sequence: Synthetic oligonucleotide
gggcgccguccgggcucgc

SEQ ID NO: 1562812 - RNA, 19 nt, Artificial Sequence
  Description of Artificial Sequence: Synthetic oligonucleotide
cgucugcauuagcgaggau

SEQ ID NO: 1562813 - RNA, 19 nt, Artificial Sequence
  Description of Artificial Sequence: Synthetic oligonucleotide
gauggaauaagcuagcugc

SEQ ID NO: 1562814 - RNA, 19 nt, Artificial Sequence
  Description of Artificial Sequence: Synthetic oligonucleotide
auaaccugcauuuuguacc

SEQ ID NO: 1562815 - RNA, 19 nt, Artificial Sequence
  Description of Artificial Sequence: Synthetic oligonucleotide
aauguaaugacaaaggacu

SEQ ID NO: 1562816 - RNA, 19 nt, Artificial Sequence
  Description of Artificial Sequence: Synthetic oligonucleotide
aauaauguaaugacaaagg

SEQ ID NO: 1562817 - RNA, 19 nt, Artificial Sequence
  Description of Artificial Sequence: Synthetic oligonucleotide
uaaugauggaauaagcuag

SEQ ID NO: 1562818 - RNA, 19 nt, Artificial Sequence
  Description of Artificial Sequence: Synthetic oligonucleotide
aauaaccugcauuuuguac

SEQ ID NO: 1562819 - RNA, 19 nt, Artificial Sequence
  Description of Artificial Sequence: Synthetic oligonucleotide
ucaaguaucagccuuuggc

SEQ ID NO: 1562820 - RNA, 19 nt, Artificial Sequence
  Description of Artificial Sequence: Synthetic oligonucleotide
ugauaaaugaaacuucucu

SEQ ID NO: 1562821 - RNA, 19 nt, Artificial Sequence
  Description of Artificial Sequence: Synthetic oligonucleotide
ucuucaaucaaguaucagc

SEQ ID NO: 1562822 - RNA, 19 nt, Artificial Sequence
  Description of Artificial Sequence: Synthetic oligonucleotide
cuucaaucaaguaucagcc

SEQ ID NO: 1562823 - RNA, 19 nt, Artificial Sequence
  Description of Artificial Sequence: Synthetic oligonucleotide
aaguaucagccuuuggccc

SEQ ID NO: 1562824 - RNA, 19 nt, Artificial Sequence
  Description of Artificial Sequence: Synthetic oligonucleotide
aaagccauugauuuucuga

SEQ ID NO: 1562825 - RNA, 19 nt, Artificial Sequence
  Description of Artificial Sequence: Synthetic oligonucleotide
uaauguaaugacaaaggac

SEQ ID NO: 1562826 - RNA, 19 nt, Artificial Sequence
  Description of Artificial Sequence: Synthetic oligonucleotide
uuuauugcuguguguaccg

SEQ ID NO: 1562827 - RNA, 19 nt, Artificial Sequence
  Description of Artificial Sequence: Synthetic oligonucleotide
ucgggugucaaguugacag

SEQ ID NO: 1562828 - RNA, 19 nt, Artificial Sequence
  Description of Artificial Sequence: Synthetic oligonucleotide
aauauaagcgacccuacuu

SEQ ID NO: 1562829 - RNA, 19 nt, Artificial Sequence
  Description of Artificial Sequence: Synthetic oligonucleotide
auaauguaaugacaaagga

SEQ ID NO: 1562830 - RNA, 19 nt, Artificial Sequence
  Description of Artificial Sequence: Synthetic oligonucleotide
gaaacuggacuucuccucg

SEQ ID NO: 1562831 - RNA, 19 nt, Artificial Sequence
  Description of Artificial Sequence: Synthetic oligonucleotide
gagugaauaauguaaugac

SEQ ID NO: 1562832 - RNA, 19 nt, Artificial Sequence
  Description of Artificial Sequence: Synthetic oligonucleotide
agaacgcagagcuccaacc

SEQ ID NO: 1562833 - RNA, 19 nt, Artificial Sequence
  Description of Artificial Sequence: Synthetic oligonucleotide
uaccguaagacaaaggcaa

SEQ ID NO: 1562834 - RNA, 19 nt, Artificial Sequence
  Description of Artificial Sequence: Synthetic oligonucleotide
ucugcuacuguccucugag

SEQ ID NO: 1562835 - RNA, 19 nt, Artificial Sequence
  Description of Artificial Sequence: Synthetic oligonucleotide
uguguguaccguaagacaa

SEQ ID NO: 1562836 - RNA, 19 nt, Artificial Sequence
  Description of Artificial Sequence: Synthetic oligonucleotide
aaaccaacaagaggagggc

SEQ ID NO: 1562837 - RNA, 19 nt, Artificial Sequence
  Description of Artificial Sequence: Synthetic oligonucleotide
caucuuuagauuucagugc

SEQ ID NO: 1562838 - RNA, 19 nt, Artificial Sequence
  Description of Artificial Sequence: Synthetic oligonucleotide
caaaagaauauaagcgacc

SEQ ID NO: 1562839 - RNA, 19 nt, Artificial Sequence
  Description of Artificial Sequence: Synthetic oligonucleotide
ugcuacuguccucugaggg

SEQ ID NO: 1562840 - RNA, 19 nt, Artificial Sequence
  Description of Artificial Sequence: Synthetic oligonucleotide
ugugagaacgcagagcucc

SEQ ID NO: 1562841 - RNA, 19 nt, Artificial Sequence
  Description of Artificial Sequence: Synthetic oligonucleotide
aagaauauaagcgacccua

SEQ ID NO: 1562842 - RNA, 19 nt, Artificial Sequence
  Description of Artificial Sequence: Synthetic oligonucleotide
acuaagacaagugauaaau

SEQ ID NO: 1562843 - RNA, 19 nt, Artificial Sequence
  Description of Artificial Sequence: Synthetic oligonucleotide
aacacaugagugaauaaug

SEQ ID NO: 1562844 - RNA, 19 nt, Artificial Sequence
  Description of Artificial Sequence: Synthetic oligonucleotide
cuguaaaaccaacaagagg

SEQ ID NO: 1562845 - RNA, 19 nt, Artificial Sequence
  Description of Artificial Sequence: Synthetic oligonucleotide
uguuugcaaaaguaguuca

SEQ ID NO: 1562846 - RNA, 19 nt, Artificial Sequence
  Description of Artificial Sequence: Synthetic oligonucleotide
caaagcaguacccuguggc

SEQ ID NO: 1562847 - RNA, 19 nt, Artificial Sequence
  Description of Artificial Sequence: Synthetic oligonucleotide
acaagugauaaaugaaacu

SEQ ID NO: 1562848 - RNA, 19 nt, Artificial Sequence
  Description of Artificial Sequence: Synthetic oligonucleotide
aacgcagagcuccaaccgg

SEQ ID NO: 1562849 - RNA, 19 nt, Artificial Sequence
  Description of Artificial Sequence: Synthetic oligonucleotide
aagugugagaacgcagagc

SEQ ID NO: 1562850 - RNA, 19 nt, Artificial Sequence
  Description of Artificial Sequence: Synthetic oligonucleotide
ugauggaauaagcuagcug

SEQ ID NO: 1562851 - RNA, 19 nt, Artificial Sequence
  Description of Artificial Sequence: Synthetic oligonucleotide
aaacacaugagugaauaau

SEQ ID NO: 1562852 - RNA, 19 nt, Artificial Sequence
  Description of Artificial Sequence: Synthetic oligonucleotide
acaaaggcaagucaacgca

SEQ ID NO: 1562853 - RNA, 19 nt, Artificial Sequence
  Description of Artificial Sequence: Synthetic oligonucleotide
ucucauacgagcgggaagc

SEQ ID NO: 1562854 - RNA, 19 nt, Artificial Sequence
  Description of Artificial Sequence: Synthetic oligonucleotide
ucaaucaaguaucagccuu

SEQ ID NO: 1562855 - RNA, 19 nt, Artificial Sequence
  Description of Artificial Sequence: Synthetic oligonucleotide
uaagcgacccuacuuugag

SEQ ID NO: 1562856 - RNA, 19 nt, Artificial Sequence
  Description of Artificial Sequence: Synthetic oligonucleotide
aauggacuuguauuuuccu

SEQ ID NO: 1562857 - RNA, 19 nt, Artificial Sequence
  Description of Artificial Sequence: Synthetic oligonucleotide
gaacgcagagcuccaaccg

SEQ ID NO: 1562858 - RNA, 19 nt, Artificial Sequence
  Description of Artificial Sequence: Synthetic oligonucleotide
uuuuguacccuguuccaca

SEQ ID NO: 1562859 - RNA, 19 nt, Artificial Sequence
  Description of Artificial Sequence: Synthetic oligonucleotide
aagagcguaccuuccaaga

SEQ ID NO: 1562860 - RNA, 19 nt, Artificial Sequence
  Description of Artificial Sequence: Synthetic oligonucleotide
acuggggaccaacacaauc

SEQ ID NO: 1562861 - RNA, 19 nt, Artificial Sequence
  Description of Artificial Sequence: Synthetic oligonucleotide
guaaugauggaauaagcua

SEQ ID NO: 1562862 - RNA, 19 nt, Artificial Sequence
  Description of Artificial Sequence: Synthetic oligonucleotide
gacaagugauaaaugaaac

SEQ ID NO: 1562863 - RNA, 19 nt, Artificial Sequence
  Description of Artificial Sequence: Synthetic oligonucleotide
aguacucagucaccugagc

SEQ ID NO: 1562864 - RNA, 19 nt, Artificial Sequence
  Description of Artificial Sequence: Synthetic oligonucleotide
uguauuuuccugugucccc

SEQ ID NO: 1562865 - RNA, 19 nt, Artificial Sequence
  Description of Artificial Sequence: Synthetic oligonucleotide
aagcgacccuacuuugagc

SEQ ID NO: 1562866 - RNA, 19 nt, Artificial Sequence
  Description of Artificial Sequence: Synthetic oligonucleotide
auccccagcacuguaaaac

SEQ ID NO: 1562867 - RNA, 19 nt, Artificial Sequence
  Description of Artificial Sequence: Synthetic oligonucleotide
uauaagcgacccuacuuug

SEQ ID NO: 1562868 - RNA, 19 nt, Artificial Sequence
  Description of Artificial Sequence: Synthetic oligonucleotide
agcacuguaaaaccaacaa

SEQ ID NO: 1562869 - RNA, 19 nt, Artificial Sequence
  Description of Artificial Sequence: Synthetic oligonucleotide
cuaagacaagugauaaaug

SEQ ID NO: 1562870 - RNA, 19 nt, Artificial Sequence
  Description of Artificial Sequence: Synthetic oligonucleotide
auauaagcgacccuacuuu

SEQ ID NO: 1562871 - RNA, 19 nt, Artificial Sequence
  Description of Artificial Sequence: Synthetic oligonucleotide
caaaggaccaugacucugc

SEQ ID NO: 1562872 - RNA, 19 nt, Artificial Sequence
  Description of Artificial Sequence: Synthetic oligonucleotide
agugcaaacagaugacgca

SEQ ID NO: 1562873 - RNA, 19 nt, Artificial Sequence
  Description of Artificial Sequence: Synthetic oligonucleotide
uugccuagcacgccaaggc

SEQ ID NO: 1562874 - RNA, 19 nt, Artificial Sequence
  Description of Artificial Sequence: Synthetic oligonucleotide
agacaaaggcaagucaacg

SEQ ID NO: 1562875 - RNA, 19 nt, Artificial Sequence
  Description of Artificial Sequence: Synthetic oligonucleotide
ucguaugugauguuugcaa

SEQ ID NO: 1562876 - RNA, 19 nt, Artificial Sequence
  Description of Artificial Sequence: Synthetic oligonucleotide
aauaagcuagcugcguuca

SEQ ID NO: 1562877 - RNA, 19 nt, Artificial Sequence
  Description of Artificial Sequence: Synthetic oligonucleotide
acaaaaguaaugauggaau

SEQ ID NO: 1562878 - RNA, 19 nt, Artificial Sequence
  Description of Artificial Sequence: Synthetic oligonucleotide
gugaauaauguaaugacaa

SEQ ID NO: 1562879 - RNA, 19 nt, Artificial Sequence
  Description of Artificial Sequence: Synthetic oligonucleotide
uuuuauacaaggcgucgua

SEQ ID NO: 1562880 - RNA, 19 nt, Artificial Sequence
  Description of Artificial Sequence: Synthetic oligonucleotide
uacucagucaccugagcca

SEQ ID NO: 1562881 - RNA, 19 nt, Artificial Sequence
  Description of Artificial Sequence: Synthetic oligonucleotide
agcuagcugcguucaaugc

SEQ ID NO: 1562882 - RNA, 19 nt, Artificial Sequence
  Description of Artificial Sequence: Synthetic oligonucleotide
uguacccuguuccacagau

SEQ ID NO: 1562883 - RNA, 19 nt, Artificial Sequence
  Description of Artificial Sequence: Synthetic oligonucleotide
uguugaggccaucuagccc

SEQ ID NO: 1562884 - RNA, 19 nt, Artificial Sequence
  Description of Artificial Sequence: Synthetic oligonucleotide
guacucagucaccugagcc

SEQ ID NO: 1562885 - RNA, 19 nt, Artificial Sequence
  Description of Artificial Sequence: Synthetic oligonucleotide
aaggcgucguaugugaugu

SEQ ID NO: 1562886 - RNA, 19 nt, Artificial Sequence
  Description of Artificial Sequence: Synthetic oligonucleotide
gaauaagcuagcugcguuc

SEQ ID NO: 1562887 - RNA, 19 nt, Artificial Sequence
  Description of Artificial Sequence: Synthetic oligonucleotide
aagacaagugauaaaugaa

SEQ ID NO: 1562888 - RNA, 19 nt, Artificial Sequence
  Description of Artificial Sequence: Synthetic oligonucleotide
aguggcagagcauuugccu

SEQ ID NO: 1562889 - RNA, 19 nt, Artificial Sequence
  Description of Artificial Sequence: Synthetic oligonucleotide
auggacuuguauuuuccug

SEQ ID NO: 1562890 - RNA, 19 nt, Artificial Sequence
  Description of Artificial Sequence: Synthetic oligonucleotide
agaauauaagcgacccuac

SEQ ID NO: 1562891 - RNA, 19 nt, Artificial Sequence
  Description of Artificial Sequence: Synthetic oligonucleotide
gaagagcguaccuuccaag

SEQ ID NO: 1562892 - RNA, 19 nt, Artificial Sequence
  Description of Artificial Sequence: Synthetic oligonucleotide
auuuuguacccuguuccac

SEQ ID NO: 1562893 - RNA, 19 nt, Artificial Sequence
  Description of Artificial Sequence: Synthetic oligonucleotide
agugaauaauguaaugaca

SEQ ID NO: 1562894 - RNA, 19 nt, Artificial Sequence
  Description of Artificial Sequence: Synthetic oligonucleotide
ucagaagagcguaccuucc

SEQ ID NO: 1562895 - RNA, 19 nt, Artificial Sequence
  Description of Artificial Sequence: Synthetic oligonucleotide
agaaugaggggagcaaggg

SEQ ID NO: 1562896 - RNA, 19 nt, Artificial Sequence
  Description of Artificial Sequence: Synthetic oligonucleotide
aggacuuucucugugaaaa

SEQ ID NO: 1562897 - RNA, 19 nt, Artificial Sequence
  Description of Artificial Sequence: Synthetic oligonucleotide
aaggcauuaggaaagccau

SEQ ID NO: 1562898 - RNA, 19 nt, Artificial Sequence
  Description of Artificial Sequence: Synthetic oligonucleotide
uguguaccguaagacaaag

SEQ ID NO: 1562899 - RNA, 19 nt, Artificial Sequence
  Description of Artificial Sequence: Synthetic oligonucleotide
ugcguucaaugccucauca

SEQ ID NO: 1562900 - RNA, 19 nt, Artificial Sequence
  Description of Artificial Sequence: Synthetic oligonucleotide
aacuaagacaagugauaaa

SEQ ID NO: 1562901 - RNA, 19 nt, Artificial Sequence
  Description of Artificial Sequence: Synthetic oligonucleotide
caagcugaaaacaaacaaa

SEQ ID NO: 1562902 - RNA, 19 nt, Artificial Sequence
  Description of Artificial Sequence: Synthetic oligonucleotide
ugaguuucauccccagcac

SEQ ID NO: 1562903 - RNA, 19 nt, Artificial Sequence
  Description of Artificial Sequence: Synthetic oligonucleotide
caaaggcaagucaacgcag

SEQ ID NO: 1562904 - RNA, 19 nt, Artificial Sequence
  Description of Artificial Sequence: Synthetic oligonucleotide
ugucaaguugacaguuaug

SEQ ID NO: 1562905 - RNA, 19 nt, Artificial Sequence
  Description of Artificial Sequence: Synthetic oligonucleotide
cacaucucaguacucaguc

SEQ ID NO: 1562906 - RNA, 19 nt, Artificial Sequence
  Description of Artificial Sequence: Synthetic oligonucleotide
aaucaaguaucagccuuug

SEQ ID NO: 1562907 - RNA, 19 nt, Artificial Sequence
  Description of Artificial Sequence: Synthetic oligonucleotide
ucaguacaugcuccgcugc

SEQ ID NO: 1562908 - RNA, 19 nt, Artificial Sequence
  Description of Artificial Sequence: Synthetic oligonucleotide
uucaaucaaguaucagccu

SEQ ID NO: 1562909 - RNA, 19 nt, Artificial Sequence
  Description of Artificial Sequence: Synthetic oligonucleotide
ugcaaaaguaguucagguu

SEQ ID NO: 1562910 - RNA, 19 nt, Artificial Sequence
  Description of Artificial Sequence: Synthetic oligonucleotide
ucaaugccucaucaguggu

SEQ ID NO: 1562911 - RNA, 19 nt, Artificial Sequence
  Description of Artificial Sequence: Synthetic oligonucleotide
agacaagugauaaaugaaa

SEQ ID NO: 1562912 - RNA, 19 nt, Artificial Sequence
  Description of Artificial Sequence: Synthetic oligonucleotide
guuugcaaaaguaguucag

SEQ ID NO: 1562913 - RNA, 19 nt, Artificial Sequence
  Description of Artificial Sequence: Synthetic oligonucleotide
uguucccuagauaccacuc

SEQ ID NO: 1562914 - RNA, 19 nt, Artificial Sequence
  Description of Artificial Sequence: Synthetic oligonucleotide
ugcuguguguaccguaaga

SEQ ID NO: 1562915 - RNA, 19 nt, Artificial Sequence
  Description of Artificial Sequence: Synthetic oligonucleotide
cugcaaugccaucuguucc

SEQ ID NO: 1562916 - RNA, 19 nt, Artificial Sequence
  Description of Artificial Sequence: Synthetic oligonucleotide
aggccaucuagcccuugcc

SEQ ID NO: 1562917 - RNA, 19 nt, Artificial Sequence
  Description of Artificial Sequence: Synthetic oligonucleotide
guugaggccaucuagcccu

SEQ ID NO: 1562918 - RNA, 19 nt, Artificial Sequence
  Description of Artificial Sequence: Synthetic oligonucleotide
accgucaguacaugcuccg

SEQ ID NO: 1562919 - RNA, 19 nt, Artificial Sequence
  Description of Artificial Sequence: Synthetic oligonucleotide
agagggucaggacugggga

SEQ ID NO: 1562920 - RNA, 19 nt, Artificial Sequence
  Description of Artificial Sequence: Synthetic oligonucleotide
cugcucucucauacgagcg

SEQ ID NO: 1562921 - RNA, 19 nt, Artificial Sequence
  Description of Artificial Sequence: Synthetic oligonucleotide
ucggccgacucacagaaua

SEQ ID NO: 1562922 - RNA, 19 nt, Artificial Sequence
  Description of Artificial Sequence: Synthetic oligonucleotide
aucaaguaucagccuuugg

SEQ ID NO: 1562923 - RNA, 19 nt, Artificial Sequence
  Description of Artificial Sequence: Synthetic oligonucleotide
gguggacaaugauugacag

SEQ ID NO: 1562924 - RNA, 19 nt, Artificial Sequence
  Description of Artificial Sequence: Synthetic oligonucleotide
gucaaguugacaguuaugu

SEQ ID NO: 1562925 - RNA, 19 nt, Artificial Sequence
  Description of Artificial Sequence: Synthetic oligonucleotide
uuuauacaaggcgucguau

SEQ ID NO: 1562926 - RNA, 19 nt, Artificial Sequence
  Description of Artificial Sequence: Synthetic oligonucleotide
auggaauaagcuagcugcg

SEQ ID NO: 1562927 - RNA, 19 nt, Artificial Sequence
  Description of Artificial Sequence: Synthetic oligonucleotide
accgcugucccgccaaagg

SEQ ID NO: 1562928 - RNA, 19 nt, Artificial Sequence
  Description of Artificial Sequence: Synthetic oligonucleotide
caagugugagaacgcagag

SEQ ID NO: 1562929 - RNA, 19 nt, Artificial Sequence
  Description of Artificial Sequence: Synthetic oligonucleotide
uacccuguggcaaguguga

SEQ ID NO: 1562930 - RNA, 19 nt, Artificial Sequence
  Description of Artificial Sequence: Synthetic oligonucleotide
agcaguacccuguggcaag

SEQ ID NO: 1562931 - RNA, 19 nt, Artificial Sequence
  Description of Artificial Sequence: Synthetic oligonucleotide
uguaaugacaaaggacuuu

SEQ ID NO: 1562932 - RNA, 19 nt, Artificial Sequence
  Description of Artificial Sequence: Synthetic oligonucleotide
ugccuagcacgccaaggcc

SEQ ID NO: 1562933 - RNA, 19 nt, Artificial Sequence
  Description of Artificial Sequence: Synthetic oligonucleotide
ugauugacagugcccacuu

SEQ ID NO: 1562934 - RNA, 19 nt, Artificial Sequence
  Description of Artificial Sequence: Synthetic oligonucleotide
aaacuggacuucuccucga

SEQ ID NO: 1562935 - RNA, 19 nt, Artificial Sequence
  Description of Artificial Sequence: Synthetic oligonucleotide
caagucaacgcagcagugc

SEQ ID NO: 1562936 - RNA, 19 nt, Artificial Sequence
  Description of Artificial Sequence: Synthetic oligonucleotide
gcaaaagaauauaagcgac

SEQ ID NO: 1562937 - RNA, 19 nt, Artificial Sequence
  Description of Artificial Sequence: Synthetic oligonucleotide
aacaagaggagggcagaga

SEQ ID NO: 1562938 - RNA, 19 nt, Artificial Sequence
  Description of Artificial Sequence: Synthetic oligonucleotide
uucccuagauaccacucua

SEQ ID NO: 1562939 - RNA, 19 nt, Artificial Sequence
  Description of Artificial Sequence: Synthetic oligonucleotide
ucaaguugacaguuauguu

SEQ ID NO: 1562940 - RNA, 19 nt, Artificial Sequence
  Description of Artificial Sequence: Synthetic oligonucleotide
acgagcgggaagcagucug

SEQ ID NO: 1562941 - RNA, 19 nt, Artificial Sequence
  Description of Artificial Sequence: Synthetic oligonucleotide
aguacccuguggcaagugu

SEQ ID NO: 1562942 - RNA, 19 nt, Artificial Sequence
  Description of Artificial Sequence: Synthetic oligonucleotide
agcauuugccuagcacgcc

SEQ ID NO: 1562943 - RNA, 19 nt, Artificial Sequence
  Description of Artificial Sequence: Synthetic oligonucleotide
caaccgggacacaugcugc

SEQ ID NO: 1562944 - RNA, 19 nt, Artificial Sequence
  Description of Artificial Sequence: Synthetic oligonucleotide
guaugugauguuugcaaaa

SEQ ID NO: 1562945 - RNA, 19 nt, Artificial Sequence
  Description of Artificial Sequence: Synthetic oligonucleotide
aaccgggacacaugcugca

SEQ ID NO: 1562946 - RNA, 19 nt, Artificial Sequence
  Description of Artificial Sequence: Synthetic oligonucleotide
uguguggguaccgucagua

SEQ ID NO: 1562947 - RNA, 19 nt, Artificial Sequence
  Description of Artificial Sequence: Synthetic oligonucleotide
accaacaagaggagggcag

SEQ ID NO: 1562948 - RNA, 19 nt, Artificial Sequence
  Description of Artificial Sequence: Synthetic oligonucleotide
agaagagcguaccuuccaa

SEQ ID NO: 1562949 - RNA, 19 nt, Artificial Sequence
  Description of Artificial Sequence: Synthetic oligonucleotide
aaccaacaagaggagggca

SEQ ID NO: 1562950 - RNA, 19 nt, Artificial Sequence
  Description of Artificial Sequence: Synthetic oligonucleotide
cacagaauaaccugcauuu

SEQ ID NO: 1562951 - RNA, 19 nt, Artificial Sequence
  Description of Artificial Sequence: Synthetic oligonucleotide
gcuagcugcguucaaugcc

SEQ ID NO: 1562952 - RNA, 19 nt, Artificial Sequence
  Description of Artificial Sequence: Synthetic oligonucleotide
agagcguaccuuccaagaa

SEQ ID NO: 1562953 - RNA, 19 nt, Artificial Sequence
  Description of Artificial Sequence: Synthetic oligonucleotide
caagugauaaaugaaacuu

SEQ ID NO: 1562954 - RNA, 19 nt, Artificial Sequence
  Description of Artificial Sequence: Synthetic oligonucleotide
cucucauacgagcgggaag

SEQ ID NO: 1562955 - RNA, 19 nt, Artificial Sequence
  Description of Artificial Sequence: Synthetic oligonucleotide
ucauacgagcgggaagcag

SEQ ID NO: 1562956 - RNA, 19 nt, Artificial Sequence
  Description of Artificial Sequence: Synthetic oligonucleotide
uggaauaagcuagcugcgu

SEQ ID NO: 1562957 - RNA, 19 nt, Artificial Sequence
  Description of Artificial Sequence: Synthetic oligonucleotide
guaccgucaguacaugcuc

SEQ ID NO: 1562958 - RNA, 19 nt, Artificial Sequence
  Description of Artificial Sequence: Synthetic oligonucleotide
caaggcgucguaugugaug

SEQ ID NO: 1562959 - RNA, 19 nt, Artificial Sequence
  Description of Artificial Sequence: Synthetic oligonucleotide
gaauauaagcgacccuacu

SEQ ID NO: 1562960 - RNA, 19 nt, Artificial Sequence
  Description of Artificial Sequence: Synthetic oligonucleotide
gagcguaccuuccaagaaa

SEQ ID NO: 1562961 - RNA, 19 nt, Artificial Sequence
  Description of Artificial Sequence: Synthetic oligonucleotide
acuggacuucuccucgaug

SEQ ID NO: 1562962 - RNA, 19 nt, Artificial Sequence
  Description of Artificial Sequence: Synthetic oligonucleotide
ccaacacaaucuuuauugc

SEQ ID NO: 1562963 - RNA, 19 nt, Artificial Sequence
  Description of Artificial Sequence: Synthetic oligonucleotide
auuugccuagcacgccaag

SEQ ID NO: 1562964 - RNA, 19 nt, Artificial Sequence
  Description of Artificial Sequence: Synthetic oligonucleotide
ccuagauaccacucuauuc

SEQ ID NO: 1562965 - RNA, 19 nt, Artificial Sequence
  Description of Artificial Sequence: Synthetic oligonucleotide
ucccuagauaccacucuau

SEQ ID NO: 1562966 - RNA, 19 nt, Artificial Sequence
  Description of Artificial Sequence: Synthetic oligonucleotide
cuuccucagaagagcguac

SEQ ID NO: 1562967 - RNA, 19 nt, Artificial Sequence
  Description of Artificial Sequence: Synthetic oligonucleotide
cagcagugcagcuccuugc

SEQ ID NO: 1562968 - RNA, 19 nt, Artificial Sequence
  Description of Artificial Sequence: Synthetic oligonucleotide
uaggaaagccauugauuuu

SEQ ID NO: 1562969 - RNA, 19 nt, Artificial Sequence
  Description of Artificial Sequence: Synthetic oligonucleotide
ucagugguguguggguacc

SEQ ID NO: 1562970 - RNA, 19 nt, Artificial Sequence
  Description of Artificial Sequence: Synthetic oligonucleotide
auacgagcgggaagcaguc

SEQ ID NO: 1562971 - RNA, 19 nt, Artificial Sequence
  Description of Artificial Sequence: Synthetic oligonucleotide
guacccuguggcaagugug

SEQ ID NO: 1562972 - RNA, 19 nt, Artificial Sequence
  Description of Artificial Sequence: Synthetic oligonucleotide
agagcaagcugaaaacaaa

SEQ ID NO: 1562973 - RNA, 19 nt, Artificial Sequence
  Description of Artificial Sequence: Synthetic oligonucleotide
uggggaccaacacaaucuu

SEQ ID NO: 1562974 - RNA, 19 nt, Artificial Sequence
  Description of Artificial Sequence: Synthetic oligonucleotide
augauggaauaagcuagcu

SEQ ID NO: 1562975 - RNA, 19 nt, Artificial Sequence
  Description of Artificial Sequence: Synthetic oligonucleotide
acuuccucagaagagcgua

SEQ ID NO: 1562976 - RNA, 19 nt, Artificial Sequence
  Description of Artificial Sequence: Synthetic oligonucleotide
cauacgagcgggaagcagu

SEQ ID NO: 1562977 - RNA, 19 nt, Artificial Sequence
  Description of Artificial Sequence: Synthetic oligonucleotide
auugcuguguguaccguaa

SEQ ID NO: 1562978 - RNA, 19 nt, Artificial Sequence
  Description of Artificial Sequence: Synthetic oligonucleotide
gugauaaaugaaacuucuc

SEQ ID NO: 1562979 - RNA, 19 nt, Artificial Sequence
  Description of Artificial Sequence: Synthetic oligonucleotide
ggacuuguauuuuccugug

SEQ ID NO: 1562980 - RNA, 19 nt, Artificial Sequence
  Description of Artificial Sequence: Synthetic oligonucleotide
aaacagagagcaagcugaa

SEQ ID NO: 1562981 - RNA, 19 nt, Artificial Sequence
  Description of Artificial Sequence: Synthetic oligonucleotide
cuagcugcguucaaugccu

SEQ ID NO: 1562982 - RNA, 19 nt, Artificial Sequence
  Description of Artificial Sequence: Synthetic oligonucleotide
ucaacgcagcagugcagcu

SEQ ID NO: 1562983 - RNA, 19 nt, Artificial Sequence
  Description of Artificial Sequence: Synthetic oligonucleotide
uggcaagugugagaacgca

SEQ ID NO: 1562984 - RNA, 19 nt, Artificial Sequence
  Description of Artificial Sequence: Synthetic oligonucleotide
gaccaugacucugccacac

SEQ ID NO: 1562985 - RNA, 19 nt, Artificial Sequence
  Description of Artificial Sequence: Synthetic oligonucleotide
ucucucauacgagcgggaa

SEQ ID NO: 1562986 - RNA, 19 nt, Artificial Sequence
  Description of Artificial Sequence: Synthetic oligonucleotide
cgccaaaggaccaugacuc

SEQ ID NO: 1562987 - RNA, 19 nt, Artificial Sequence
  Description of Artificial Sequence: Synthetic oligonucleotide
gccaucuagcccuugccgc

SEQ ID NO: 1562988 - RNA, 19 nt, Artificial Sequence
  Description of Artificial Sequence: Synthetic oligonucleotide
uuauugcuguguguaccgu

SEQ ID NO: 1562989 - RNA, 19 nt, Artificial Sequence
  Description of Artificial Sequence: Synthetic oligonucleotide
acgcagagcuccaaccggg

SEQ ID NO: 1562990 - RNA, 19 nt, Artificial Sequence
  Description of Artificial Sequence: Synthetic oligonucleotide
cuucggccgacucacagaa

SEQ ID NO: 1562991 - RNA, 19 nt, Artificial Sequence
  Description of Artificial Sequence: Synthetic oligonucleotide
caacacaaucuuuauugcu

SEQ ID NO: 1562992 - RNA, 19 nt, Artificial Sequence
  Description of Artificial Sequence: Synthetic oligonucleotide
uagcacgccaaggccauga

SEQ ID NO: 1562993 - RNA, 19 nt, Artificial Sequence
  Description of Artificial Sequence: Synthetic oligonucleotide
gcuguguguaccguaagac

SEQ ID NO: 1562994 - RNA, 19 nt, Artificial Sequence
  Description of Artificial Sequence: Synthetic oligonucleotide
uccccuucggccgacucac

SEQ ID NO: 1562995 - RNA, 19 nt, Artificial Sequence
  Description of Artificial Sequence: Synthetic oligonucleotide
aaacaaacuuggacaugau

SEQ ID NO: 1562996 - RNA, 19 nt, Artificial Sequence
  Description of Artificial Sequence: Synthetic oligonucleotide
cucuccacaucucaguacu

SEQ ID NO: 1562997 - RNA, 19 nt, Artificial Sequence
  Description of Artificial Sequence: Synthetic oligonucleotide
gucaccugagccagcucgg

SEQ ID NO: 1562998 - RNA, 19 nt, Artificial Sequence
  Description of Artificial Sequence: Synthetic oligonucleotide
accguaagacaaaggcaag

SEQ ID NO: 1562999 - RNA, 19 nt, Artificial Sequence
  Description of Artificial Sequence: Synthetic oligonucleotide
ucccgccaaaggaccauga

SEQ ID NO: 1563000 - RNA, 19 nt, Artificial Sequence
  Description of Artificial Sequence: Synthetic oligonucleotide
ugcaccgcugucccgccaa

SEQ ID NO: 1563001 - RNA, 19 nt, Artificial Sequence
  Description of Artificial Sequence: Synthetic oligonucleotide
cacgccaaggccaugaguu

SEQ ID NO: 1563002 - RNA, 19 nt, Artificial Sequence
  Description of Artificial Sequence: Synthetic oligonucleotide
gcucucucauacgagcggg

SEQ ID NO: 1563003 - RNA, 19 nt, Artificial Sequence
  Description of Artificial Sequence: Synthetic oligonucleotide
agcucgggugucaaguuga

SEQ ID NO: 1563004 - RNA, 19 nt, Artificial Sequence
  Description of Artificial Sequence: Synthetic oligonucleotide
agcacgccaaggccaugag

SEQ ID NO: 1563005 - RNA, 19 nt, Artificial Sequence
  Description of Artificial Sequence: Synthetic oligonucleotide
auguaaugacaaaggacuu

SEQ ID NO: 1563006 - RNA, 19 nt, Artificial Sequence
  Description of Artificial Sequence: Synthetic oligonucleotide
ggcaagucaacgcagcagu

SEQ ID NO: 1563007 - RNA, 19 nt, Artificial Sequence
  Description of Artificial Sequence: Synthetic oligonucleotide
ggcaagugugagaacgcag

SEQ ID NO: 1563008 - RNA, 19 nt, Artificial Sequence
  Description of Artificial Sequence: Synthetic oligonucleotide
accagcgcucucaagggca

SEQ ID NO: 1563009 - RNA, 19 nt, Artificial Sequence
  Description of Artificial Sequence: Synthetic oligonucleotide
aggagaaugaggggagcaa

SEQ ID NO: 1563010 - RNA, 19 nt, Artificial Sequence
  Description of Artificial Sequence: Synthetic oligonucleotide
auaagcuagcugcguucaa

SEQ ID NO: 1563011 - RNA, 19 nt, Artificial Sequence
  Description of Artificial Sequence: Synthetic oligonucleotide
cagaagagcguaccuucca

SEQ ID NO: 1563012 - RNA, 19 nt, Artificial Sequence
  Description of Artificial Sequence: Synthetic oligonucleotide
gucguaugugauguuugca

SEQ ID NO: 1563013 - RNA, 19 nt, Artificial Sequence
  Description of Artificial Sequence: Synthetic oligonucleotide
guucccuagauaccacucu

SEQ ID NO: 1563014 - RNA, 19 nt, Artificial Sequence
  Description of Artificial Sequence: Synthetic oligonucleotide
cagcucgggugucaaguug

SEQ ID NO: 1563015 - RNA, 19 nt, Artificial Sequence
  Description of Artificial Sequence: Synthetic oligonucleotide
gcguucaaugccucaucag

SEQ ID NO: 1563016 - RNA, 19 nt, Artificial Sequence
  Description of Artificial Sequence: Synthetic oligonucleotide
gugucaaguugacaguuau

SEQ ID NO: 1563017 - RNA, 19 nt, Artificial Sequence
  Description of Artificial Sequence: Synthetic oligonucleotide
caccugcucucucauacga

SEQ ID NO: 1563018 - RNA, 19 nt, Artificial Sequence
  Description of Artificial Sequence: Synthetic oligonucleotide
gggaccaacacaaucuuua

SEQ ID NO: 1563019 - RNA, 19 nt, Artificial Sequence
  Description of Artificial Sequence: Synthetic oligonucleotide
ugcccacuuagaguccaca

SEQ ID NO: 1563020 - RNA, 19 nt, Artificial Sequence
  Description of Artificial Sequence: Synthetic oligonucleotide
accaugacucugccacacu

SEQ ID NO: 1563021 - RNA, 19 nt, Artificial Sequence
  Description of Artificial Sequence: Synthetic oligonucleotide
cuugccgcuccuuugacuu

SEQ ID NO: 1563022 - RNA, 19 nt, Artificial Sequence
  Description of Artificial Sequence: Synthetic oligonucleotide
caccagcgcucucaagggc

SEQ ID NO: 1563023 - RNA, 19 nt, Artificial Sequence
  Description of Artificial Sequence: Synthetic oligonucleotide
agcugcguucaaugccuca

SEQ ID NO: 1563024 - RNA, 19 nt, Artificial Sequence
  Description of Artificial Sequence: Synthetic oligonucleotide
caugcaccgcugucccgcc

SEQ ID NO: 1563025 - RNA, 19 nt, Artificial Sequence
  Description of Artificial Sequence: Synthetic oligonucleotide
ggacuggggaccaacacaa

SEQ ID NO: 1563026 - RNA, 19 nt, Artificial Sequence
  Description of Artificial Sequence: Synthetic oligonucleotide
ggguaccgucaguacaugc

SEQ ID NO: 1563027 - RNA, 19 nt, Artificial Sequence
  Description of Artificial Sequence: Synthetic oligonucleotide
guacaugcuccgcugcucu

SEQ ID NO: 1563028 - RNA, 19 nt, Artificial Sequence
  Description of Artificial Sequence: Synthetic oligonucleotide
gcaccugcucucucauacg

SEQ ID NO: 1563029 - RNA, 19 nt, Artificial Sequence
  Description of Artificial Sequence: Synthetic oligonucleotide
gugguguguggguaccguc

SEQ ID NO: 1563030 - RNA, 19 nt, Artificial Sequence
  Description of Artificial Sequence: Synthetic oligonucleotide
cguaagacaaaggcaaguc

SEQ ID NO: 1563031 - RNA, 19 nt, Artificial Sequence
  Description of Artificial Sequence: Synthetic oligonucleotide
gaccaacacaaucuuuauu

SEQ ID NO: 1563032 - RNA, 19 nt, Artificial Sequence
  Description of Artificial Sequence: Synthetic oligonucleotide
ccacuuagaguccacacua

SEQ ID NO: 1563033 - RNA, 19 nt, Artificial Sequence
  Description of Artificial Sequence: Synthetic oligonucleotide
cgucguaugugauguuugc

SEQ ID NO: 1563034 - RNA, 19 nt, Artificial Sequence
  Description of Artificial Sequence: Synthetic oligonucleotide
cauuugccuagcacgccaa

SEQ ID NO: 1563035 - RNA, 19 nt, Artificial Sequence
  Description of Artificial Sequence: Synthetic oligonucleotide
ccaugaguuucauccccag

SEQ ID NO: 1563036 - RNA, 19 nt, Artificial Sequence
  Description of Artificial Sequence: Synthetic oligonucleotide
gcccacuuagaguccacac

SEQ ID NO: 1563037 - RNA, 19 nt, Artificial Sequence
  Description of Artificial Sequence: Synthetic oligonucleotide
uagcugcguucaaugccuc

SEQ ID NO: 1563038 - RNA, 19 nt, Artificial Sequence
  Description of Artificial Sequence: Synthetic oligonucleotide
uuccacagaucgucaucuu

SEQ ID NO: 1563039 - RNA, 19 nt, Artificial Sequence
  Description of Artificial Sequence: Synthetic oligonucleotide
cagugguguguggguaccg

SEQ ID NO: 1563040 - RNA, 19 nt, Artificial Sequence
  Description of Artificial Sequence: Synthetic oligonucleotide
ccaaaggaccaugacucug

SEQ ID NO: 1563041 - RNA, 19 nt, Artificial Sequence
  Description of Artificial Sequence: Synthetic oligonucleotide
guguguaccguaagacaaa

SEQ ID NO: 1563042 - RNA, 19 nt, Artificial Sequence
  Description of Artificial Sequence: Synthetic oligonucleotide
acgcagcucaccagcgcuc

SEQ ID NO: 1563043 - RNA, 19 nt, Artificial Sequence
  Description of Artificial Sequence: Synthetic oligonucleotide
gguaccgucaguacaugcu

SEQ ID NO: 1563044 - RNA, 19 nt, Artificial Sequence
  Description of Artificial Sequence: Synthetic oligonucleotide
ggaauaagcuagcugcguu

SEQ ID NO: 1563045 - RNA, 19 nt, Artificial Sequence
  Description of Artificial Sequence: Synthetic oligonucleotide
gcucucaagggcaggcacc

SEQ ID NO: 1563046 - RNA, 19 nt, Artificial Sequence
  Description of Artificial Sequence: Synthetic oligonucleotide
gguggugaggaauggacuu

SEQ ID NO: 1563047 - RNA, 19 nt, Artificial Sequence
  Description of Artificial Sequence: Synthetic oligonucleotide
agccagcucgggugucaag

SEQ ID NO: 1563048 - RNA, 19 nt, Artificial Sequence
  Description of Artificial Sequence: Synthetic oligonucleotide
guccccuucggccgacuca

SEQ ID NO: 1563049 - RNA, 19 nt, Artificial Sequence
  Description of Artificial Sequence: Synthetic oligonucleotide
ugucccgccaaaggaccau

SEQ ID NO: 1563050 - RNA, 19 nt, Artificial Sequence
  Description of Artificial Sequence: Synthetic oligonucleotide
gcgucguaugugauguuug

SEQ ID NO: 1563051 - RNA, 19 nt, Artificial Sequence
  Description of Artificial Sequence: Synthetic oligonucleotide
cuguggcaagugugagaac

SEQ ID NO: 1563052 - RNA, 19 nt, Artificial Sequence
  Description of Artificial Sequence: Synthetic oligonucleotide
uacgagcgggaagcagucu

SEQ ID NO: 1563053 - RNA, 19 nt, Artificial Sequence
  Description of Artificial Sequence: Synthetic oligonucleotide
cuguucccuagauaccacu

SEQ ID NO: 1563054 - RNA, 19 nt, Artificial Sequence
  Description of Artificial Sequence: Synthetic oligonucleotide
caucuagcccuugccgcuc

SEQ ID NO: 1563055 - RNA, 19 nt, Artificial Sequence
  Description of Artificial Sequence: Synthetic oligonucleotide
gcaagucaacgcagcagug

SEQ ID NO: 1563056 - RNA, 19 nt, Artificial Sequence
  Description of Artificial Sequence: Synthetic oligonucleotide
gaccugguggacaaugauu

SEQ ID NO: 1563057 - RNA, 19 nt, Artificial Sequence
  Description of Artificial Sequence: Synthetic oligonucleotide
cccaaagcaguacccugug

SEQ ID NO: 1563058 - RNA, 19 nt, Artificial Sequence
  Description of Artificial Sequence: Synthetic oligonucleotide
uucggccgacucacagaau

SEQ ID NO: 1563059 - RNA, 19 nt, Artificial Sequence
  Description of Artificial Sequence: Synthetic oligonucleotide
gcaugugaccugguggaca

SEQ ID NO: 1563060 - RNA, 19 nt, Artificial Sequence
  Description of Artificial Sequence: Synthetic oligonucleotide
acaaggcgucguaugugau

SEQ ID NO: 1563061 - RNA, 19 nt, Artificial Sequence
  Description of Artificial Sequence: Synthetic oligonucleotide
cccuucggccgacucacag

SEQ ID NO: 1563062 - RNA, 19 nt, Artificial Sequence
  Description of Artificial Sequence: Synthetic oligonucleotide
ccagcgcucucaagggcag

SEQ ID NO: 1563063 - RNA, 19 nt, Artificial Sequence
  Description of Artificial Sequence: Synthetic oligonucleotide
guacccuguuccacagauc

SEQ ID NO: 1563064 - RNA, 19 nt, Artificial Sequence
  Description of Artificial Sequence: Synthetic oligonucleotide
gccuagcacgccaaggcca

SEQ ID NO: 1563065 - RNA, 19 nt, Artificial Sequence
  Description of Artificial Sequence: Synthetic oligonucleotide
cucauacgagcgggaagca

SEQ ID NO: 1563066 - RNA, 19 nt, Artificial Sequence
  Description of Artificial Sequence: Synthetic oligonucleotide
ggaccaugacucugccaca

SEQ ID NO: 1563067 - RNA, 19 nt, Artificial Sequence
  Description of Artificial Sequence: Synthetic oligonucleotide
cgcugucccgccaaaggac

SEQ ID NO: 1563068 - RNA, 19 nt, Artificial Sequence
  Description of Artificial Sequence: Synthetic oligonucleotide
uguguccccuucggccgac

SEQ ID NO: 1563069 - RNA, 19 nt, Artificial Sequence
  Description of Artificial Sequence: Synthetic oligonucleotide
guaccccuggcaccuuuua

SEQ ID NO: 1563070 - RNA, 19 nt, Artificial Sequence
  Description of Artificial Sequence: Synthetic oligonucleotide
ggaccaacacaaucuuuau

SEQ ID NO: 1563071 - RNA, 19 nt, Artificial Sequence
  Description of Artificial Sequence: Synthetic oligonucleotide
caguacccuguggcaagug

SEQ ID NO: 1563072 - RNA, 19 nt, Artificial Sequence
  Description of Artificial Sequence: Synthetic oligonucleotide
caguacaugcuccgcugcu

SEQ ID NO: 1563073 - RNA, 19 nt, Artificial Sequence
  Description of Artificial Sequence: Synthetic oligonucleotide
caccgcugucccgccaaag

SEQ ID NO: 1563074 - RNA, 19 nt, Artificial Sequence
  Description of Artificial Sequence: Synthetic oligonucleotide
gccaugaguuucaucccca

SEQ ID NO: 1563075 - RNA, 19 nt, Artificial Sequence
  Description of Artificial Sequence: Synthetic oligonucleotide
cucgggugucaaguugaca

SEQ ID NO: 1563076 - RNA, 19 nt, Artificial Sequence
  Description of Artificial Sequence: Synthetic oligonucleotide
augcaccgcugucccgcca

SEQ ID NO: 1563077 - RNA, 19 nt, Artificial Sequence
  Description of Artificial Sequence: Synthetic oligonucleotide
gcccuugccgcuccuuuga

SEQ ID NO: 1563078 - RNA, 19 nt, Artificial Sequence
  Description of Artificial Sequence: Synthetic oligonucleotide
gcucaccagcgcucucaag

SEQ ID NO: 1563079 - RNA, 19 nt, Artificial Sequence
  Description of Artificial Sequence: Synthetic oligonucleotide
cuagcacgccaaggccaug

SEQ ID NO: 1563080 - RNA, 19 nt, Artificial Sequence
  Description of Artificial Sequence: Synthetic oligonucleotide
cuguguccccuucggccga

SEQ ID NO: 1563081 - RNA, 19 nt, Artificial Sequence
  Description of Artificial Sequence: Synthetic oligonucleotide
ccuucggccgacucacaga

SEQ ID NO: 1563082 - RNA, 19 nt, Artificial Sequence
  Description of Artificial Sequence: Synthetic oligonucleotide
cccacuuagaguccacacu

SEQ ID NO: 1563083 - RNA, 19 nt, Artificial Sequence
  Description of Artificial Sequence: Synthetic oligonucleotide
ccgucaguacaugcuccgc

SEQ ID NO: 1563084 - RNA, 19 nt, Artificial Sequence
  Description of Artificial Sequence: Synthetic oligonucleotide
gagccagcucgggugucaa

SEQ ID NO: 1563085 - RNA, 19 nt, Artificial Sequence
  Description of Artificial Sequence: Synthetic oligonucleotide
ccgccaaaggaccaugacu

SEQ ID NO: 1563086 - RNA, 19 nt, Artificial Sequence
  Description of Artificial Sequence: Synthetic oligonucleotide
ccgcugucccgccaaagga

SEQ ID NO: 1563087 - RNA, 19 nt, Artificial Sequence
  Description of Artificial Sequence: Synthetic oligonucleotide
gccagcucgggugucaagu

SEQ ID NO: 1563088 - RNA, 19 nt, Artificial Sequence
  Description of Artificial Sequence: Synthetic oligonucleotide
aggcgucguaugugauguu

SEQ ID NO: 1563089 - RNA, 19 nt, Artificial Sequence
  Description of Artificial Sequence: Synthetic oligonucleotide
ggcuggguccauggcucag

SEQ ID NO: 1563090 - RNA, 19 nt, Artificial Sequence
  Description of Artificial Sequence: Synthetic oligonucleotide
gugcccacuuagaguccac

SEQ ID NO: 1563091 - RNA, 19 nt, Artificial Sequence
  Description of Artificial Sequence: Synthetic oligonucleotide
gcugcguucaaugccucau

SEQ ID NO: 1563092 - RNA, 19 nt, Artificial Sequence
  Description of Artificial Sequence: Synthetic oligonucleotide
gggugucaaguugacaguu

SEQ ID NO: 1563093 - RNA, 19 nt, Artificial Sequence
  Description of Artificial Sequence: Synthetic oligonucleotide
augugaccugguggacaau

SEQ ID NO: 1563094 - RNA, 19 nt, Artificial Sequence
  Description of Artificial Sequence: Synthetic oligonucleotide
ggcgucguaugugauguuu

SEQ ID NO: 1563095 - RNA, 19 nt, Artificial Sequence
  Description of Artificial Sequence: Synthetic oligonucleotide
cccuugccgcuccuuugac

SEQ ID NO: 1563096 - RNA, 19 nt, Artificial Sequence
  Description of Artificial Sequence: Synthetic oligonucleotide
ccguaagacaaaggcaagu

SEQ ID NO: 1563097 - RNA, 19 nt, Artificial Sequence
  Description of Artificial Sequence: Synthetic oligonucleotide
gcacgccaaggccaugagu

SEQ ID NO: 1563098 - RNA, 19 nt, Artificial Sequence
  Description of Artificial Sequence: Synthetic oligonucleotide
cgucaguacaugcuccgcu

SEQ ID NO: 1563099 - RNA, 19 nt, Artificial Sequence
  Description of Artificial Sequence: Synthetic oligonucleotide
ccuagcacgccaaggccau

SEQ ID NO: 1563100 - RNA, 19 nt, Artificial Sequence
  Description of Artificial Sequence: Synthetic oligonucleotide
cccuagauaccacucuauu

SEQ ID NO: 1563101 - RNA, 19 nt, Artificial Sequence
  Description of Artificial Sequence: Synthetic oligonucleotide
gcgcucucaagggcaggca

SEQ ID NO: 1563102 - RNA, 19 nt, Artificial Sequence
  Description of Artificial Sequence: Synthetic oligonucleotide
gcaguacccuguggcaagu

SEQ ID NO: 1563103 - RNA, 19 nt, Artificial Sequence
  Description of Artificial Sequence: Synthetic oligonucleotide
ccccaaucagcguuuucuu

SEQ ID NO: 1563104 - RNA, 19 nt, Artificial Sequence
  Description of Artificial Sequence: Synthetic oligonucleotide
ggggaccaacacaaucuuu

SEQ ID NO: 1563105 - RNA, 19 nt, Artificial Sequence
  Description of Artificial Sequence: Synthetic oligonucleotide
gcguaccuuccaagaaacu

SEQ ID NO: 1563106 - RNA, 19 nt, Artificial Sequence
  Description of Artificial Sequence: Synthetic oligonucleotide
ccgcuccuuugacuuccuc

SEQ ID NO: 1563107 - RNA, 19 nt, Artificial Sequence
  Description of Artificial Sequence: Synthetic oligonucleotide
cgggugucaaguugacagu

SEQ ID NO: 1563108 - RNA, 19 nt, Artificial Sequence
  Description of Artificial Sequence: Synthetic oligonucleotide
guguccccuucggccgacu

SEQ ID NO: 1563109 - RNA, 19 nt, Artificial Sequence
  Description of Artificial Sequence: Synthetic oligonucleotide
uugacuuuagcaaagguca

SEQ ID NO: 1563110 - RNA, 19 nt, Artificial Sequence
  Description of Artificial Sequence: Synthetic oligonucleotide
agggcuacuagacucagcc

SEQ ID NO: 1563111 - RNA, 19 nt, Artificial Sequence
  Description of Artificial Sequence: Synthetic oligonucleotide
ucagauaggagcaacacau

SEQ ID NO: 1563112 - RNA, 19 nt, Artificial Sequence
  Description of Artificial Sequence: Synthetic oligonucleotide
aaagacaccacgcaauaca

SEQ ID NO: 1563113 - RNA, 19 nt, Artificial Sequence
  Description of Artificial Sequence: Synthetic oligonucleotide
aguauuaauuuuauuaguc

SEQ ID NO: 1563114 - RNA, 19 nt, Artificial Sequence
  Description of Artificial Sequence: Synthetic oligonucleotide
uaggaugugggguacacgg

SEQ ID NO: 1563115 - RNA, 19 nt, Artificial Sequence
  Description of Artificial Sequence: Synthetic oligonucleotide
uuugacuuuagcaaagguc

SEQ ID NO: 1563116 - RNA, 19 nt, Artificial Sequence
  Description of Artificial Sequence: Synthetic oligonucleotide
caugcuacggaacaucucg

SEQ ID NO: 1563117 - RNA, 19 nt, Artificial Sequence
  Description of Artificial Sequence: Synthetic oligonucleotide
uuugacucgcucuaccagg

SEQ ID NO: 1563118 - RNA, 19 nt, Artificial Sequence
  Description of Artificial Sequence: Synthetic oligonucleotide
agcugguucaauaucaggc

SEQ ID NO: 1563119 - RNA, 19 nt, Artificial Sequence
  Description of Artificial Sequence: Synthetic oligonucleotide
uaaucuggcccacauugcg

SEQ ID NO: 1563120 - RNA, 19 nt, Artificial Sequence
  Description of Artificial Sequence: Synthetic oligonucleotide
gacauugcauuccuggcgg

SEQ ID NO: 1563121 - RNA, 19 nt, Artificial Sequence
  Description of Artificial Sequence: Synthetic oligonucleotide
uuuugucucaguauuaauu

SEQ ID NO: 1563122 - RNA, 19 nt, Artificial Sequence
  Description of Artificial Sequence: Synthetic oligonucleotide
ucuucaaagcguuugcgca

SEQ ID NO: 1563123 - RNA, 19 nt, Artificial Sequence
  Description of Artificial Sequence: Synthetic oligonucleotide
cucagaucgauugugaagc

SEQ ID NO: 1563124 - RNA, 19 nt, Artificial Sequence
  Description of Artificial Sequence: Synthetic oligonucleotide
aaugguguccaugcuacgg

SEQ ID NO: 1563125 - RNA, 19 nt, Artificial Sequence
  Description of Artificial Sequence: Synthetic oligonucleotide
aaagcguuugcgcaucaug

SEQ ID NO: 1563126 - RNA, 19 nt, Artificial Sequence
  Description of Artificial Sequence: Synthetic oligonucleotide
uuugucucaguauuaauuu

SEQ ID NO: 1563127 - RNA, 19 nt, Artificial Sequence
  Description of Artificial Sequence: Synthetic oligonucleotide
gaacugaggggucacaagc

SEQ ID NO: 1563128 - RNA, 19 nt, Artificial Sequence
  Description of Artificial Sequence: Synthetic oligonucleotide
gacaggccgacuuagcccg

SEQ ID NO: 1563129 - RNA, 19 nt, Artificial Sequence
  Description of Artificial Sequence: Synthetic oligonucleotide
agacaggccgacuuagccc

SEQ ID NO: 1563130 - RNA, 19 nt, Artificial Sequence
  Description of Artificial Sequence: Synthetic oligonucleotide
ugaaaguggggacauugca

SEQ ID NO: 1563131 - RNA, 19 nt, Artificial Sequence
  Description of Artificial Sequence: Synthetic oligonucleotide
ucucagaucgauugugaag

SEQ ID NO: 1563132 - RNA, 19 nt, Artificial Sequence
  Description of Artificial Sequence: Synthetic oligonucleotide
uuauuagucacaaccccuc

SEQ ID NO: 1563133 - RNA, 19 nt, Artificial Sequence
  Description of Artificial Sequence: Synthetic oligonucleotide
caaggcuugggacacaccc

SEQ ID NO: 1563134 - RNA, 19 nt, Artificial Sequence
  Description of Artificial Sequence: Synthetic oligonucleotide
aaaguggggacauugcauu

SEQ ID NO: 1563135 - RNA, 19 nt, Artificial Sequence
  Description of Artificial Sequence: Synthetic oligonucleotide
ugcgcucagacacaaagac

SEQ ID NO: 1563136 - RNA, 19 nt, Artificial Sequence
  Description of Artificial Sequence: Synthetic oligonucleotide
ucgguaacacgacuuugcg

SEQ ID NO: 1563137 - RNA, 19 nt, Artificial Sequence
  Description of Artificial Sequence: Synthetic oligonucleotide
cacauugcgcucuucaaag

SEQ ID NO: 1563138 - RNA, 19 nt, Artificial Sequence
  Description of Artificial Sequence: Synthetic oligonucleotide
uuagucacaaccccucagu

SEQ ID NO: 1563139 - RNA, 19 nt, Artificial Sequence
  Description of Artificial Sequence: Synthetic oligonucleotide
aacugaggggucacaagcc

SEQ ID NO: 1563140 - RNA, 19 nt, Artificial Sequence
  Description of Artificial Sequence: Synthetic oligonucleotide
agauaggagcaacacaugu

SEQ ID NO: 1563141 - RNA, 19 nt, Artificial Sequence
  Description of Artificial Sequence: Synthetic oligonucleotide
cuggcuugcgcucagacac

SEQ ID NO: 1563142 - RNA, 19 nt, Artificial Sequence
  Description of Artificial Sequence: Synthetic oligonucleotide
auacuuguagggcaggaca

SEQ ID NO: 1563143 - RNA, 19 nt, Artificial Sequence
  Description of Artificial Sequence: Synthetic oligonucleotide
augcgaauccgaugcaggc

SEQ ID NO: 1563144 - RNA, 19 nt, Artificial Sequence
  Description of Artificial Sequence: Synthetic oligonucleotide
uugugaugcucuuugacuc

SEQ ID NO: 1563145 - RNA, 19 nt, Artificial Sequence
  Description of Artificial Sequence: Synthetic oligonucleotide
agacacaaagacaccacgc

SEQ ID NO: 1563146 - RNA, 19 nt, Artificial Sequence
  Description of Artificial Sequence: Synthetic oligonucleotide
guccaugcgaauccgaugc

SEQ ID NO: 1563147 - RNA, 19 nt, Artificial Sequence
  Description of Artificial Sequence: Synthetic oligonucleotide
cauugcgcucuucaaagcg

SEQ ID NO: 1563148 - RNA, 19 nt, Artificial Sequence
  Description of Artificial Sequence: Synthetic oligonucleotide
aacuguccaccauccuugc

SEQ ID NO: 1563149 - RNA, 19 nt, Artificial Sequence
  Description of Artificial Sequence: Synthetic oligonucleotide
cagcaacucagauaggagc

SEQ ID NO: 1563150 - RNA, 19 nt, Artificial Sequence
  Description of Artificial Sequence: Synthetic oligonucleotide
aucgguaacacgacuuugc

SEQ ID NO: 1563151 - RNA, 19 nt, Artificial Sequence
  Description of Artificial Sequence: Synthetic oligonucleotide
auuagucacaaccccucag

SEQ ID NO: 1563152 - RNA, 19 nt, Artificial Sequence
  Description of Artificial Sequence: Synthetic oligonucleotide
uugaaaguggggacauugc

SEQ ID NO: 1563153 - RNA, 19 nt, Artificial Sequence
  Description of Artificial Sequence: Synthetic oligonucleotide
aaguggggacauugcauuc

SEQ ID NO: 1563154 - RNA, 19 nt, Artificial Sequence
  Description of Artificial Sequence: Synthetic oligonucleotide
caugcgaauccgaugcagg

SEQ ID NO: 1563155 - RNA, 19 nt, Artificial Sequence
  Description of Artificial Sequence: Synthetic oligonucleotide
acauugcgcucuucaaagc

SEQ ID NO: 1563156 - RNA, 19 nt, Artificial Sequence
  Description of Artificial Sequence: Synthetic oligonucleotide
acgguuuuaaucuggccca

SEQ ID NO: 1563157 - RNA, 19 nt, Artificial Sequence
  Description of Artificial Sequence: Synthetic oligonucleotide
aaaucgguaacacgacuuu

SEQ ID NO: 1563158 - RNA, 19 nt, Artificial Sequence
  Description of Artificial Sequence: Synthetic oligonucleotide
uacacgguuuuaaucuggc

SEQ ID NO: 1563159 - RNA, 19 nt, Artificial Sequence
  Description of Artificial Sequence: Synthetic oligonucleotide
gagacaggccgacuuagcc

SEQ ID NO: 1563160 - RNA, 19 nt, Artificial Sequence
  Description of Artificial Sequence: Synthetic oligonucleotide
gucacaagcccacuggggc

SEQ ID NO: 1563161 - RNA, 19 nt, Artificial Sequence
  Description of Artificial Sequence: Synthetic oligonucleotide
uggugggucagccuuucag

SEQ ID NO: 1563162 - RNA, 19 nt, Artificial Sequence
  Description of Artificial Sequence: Synthetic oligonucleotide
cuuuuggacuuccuuggcc

SEQ ID NO: 1563163 - RNA, 19 nt, Artificial Sequence
  Description of Artificial Sequence: Synthetic oligonucleotide
uagaaaucgguaacacgac

SEQ ID NO: 1563164 - RNA, 19 nt, Artificial Sequence
  Description of Artificial Sequence: Synthetic oligonucleotide
acacgguuuuaaucuggcc

SEQ ID NO: 1563165 - RNA, 19 nt, Artificial Sequence
  Description of Artificial Sequence: Synthetic oligonucleotide
uccuguucugggcaccgcg

SEQ ID NO: 1563166 - RNA, 19 nt, Artificial Sequence
  Description of Artificial Sequence: Synthetic oligonucleotide
ugaacugaggggucacaag

SEQ ID NO: 1563167 - RNA, 19 nt, Artificial Sequence
  Description of Artificial Sequence: Synthetic oligonucleotide
uauuagucacaaccccuca

SEQ ID NO: 1563168 - RNA, 19 nt, Artificial Sequence
  Description of Artificial Sequence: Synthetic oligonucleotide
aaccccucaguguggaucu

SEQ ID NO: 1563169 - RNA, 19 nt, Artificial Sequence
  Description of Artificial Sequence: Synthetic oligonucleotide
agcaacacauguuucucca

SEQ ID NO: 1563170 - RNA, 19 nt, Artificial Sequence
  Description of Artificial Sequence: Synthetic oligonucleotide
ugguucaauaucaggcacu

SEQ ID NO: 1563171 - RNA, 19 nt, Artificial Sequence
  Description of Artificial Sequence: Synthetic oligonucleotide
guaggcagggacuuucuug

SEQ ID NO: 1563172 - RNA, 19 nt, Artificial Sequence
  Description of Artificial Sequence: Synthetic oligonucleotide
aggagcaacacauguuucu

SEQ ID NO: 1563173 - RNA, 19 nt, Artificial Sequence
  Description of Artificial Sequence: Synthetic oligonucleotide
agaaaucgguaacacgacu

SEQ ID NO: 1563174 - RNA, 19 nt, Artificial Sequence
  Description of Artificial Sequence: Synthetic oligonucleotide
uugugaagcaugcccacaa

SEQ ID NO: 1563175 - RNA, 19 nt, Artificial Sequence
  Description of Artificial Sequence: Synthetic oligonucleotide
aauccgaugcaggcucagc

SEQ ID NO: 1563176 - RNA, 19 nt, Artificial Sequence
  Description of Artificial Sequence: Synthetic oligonucleotide
ggaagcaauaggauguggg

SEQ ID NO: 1563177 - RNA, 19 nt, Artificial Sequence
  Description of Artificial Sequence: Synthetic oligonucleotide
aagcguuugcgcaucaugu

SEQ ID NO: 1563178 - RNA, 19 nt, Artificial Sequence
  Description of Artificial Sequence: Synthetic oligonucleotide
agaucgauugugaagcaug

SEQ ID NO: 1563179 - RNA, 19 nt, Artificial Sequence
  Description of Artificial Sequence: Synthetic oligonucleotide
aaggguucuauggugaguu

SEQ ID NO: 1563180 - RNA, 19 nt, Artificial Sequence
  Description of Artificial Sequence: Synthetic oligonucleotide
aaucgguaacacgacuuug

SEQ ID NO: 1563181 - RNA, 19 nt, Artificial Sequence
  Description of Artificial Sequence: Synthetic oligonucleotide
caagcugcgggcucgggcc

SEQ ID NO: 1563182 - RNA, 19 nt, Artificial Sequence
  Description of Artificial Sequence: Synthetic oligonucleotide
gaucgauugugaagcaugc

SEQ ID NO: 1563183 - RNA, 19 nt, Artificial Sequence
  Description of Artificial Sequence: Synthetic oligonucleotide
uggcggaagcaauaggaug

SEQ ID NO: 1563184 - RNA, 19 nt, Artificial Sequence
  Description of Artificial Sequence: Synthetic oligonucleotide
agcucggcaacuguccacc

SEQ ID NO: 1563185 - RNA, 19 nt, Artificial Sequence
  Description of Artificial Sequence: Synthetic oligonucleotide
cauagugagugcuggcuug

SEQ ID NO: 1563186 - RNA, 19 nt, Artificial Sequence
  Description of Artificial Sequence: Synthetic oligonucleotide
gauugugaagcaugcccac

SEQ ID NO: 1563187 - RNA, 19 nt, Artificial Sequence
  Description of Artificial Sequence: Synthetic oligonucleotide
agcguuugcgcaucauguc

SEQ ID NO: 1563188 - RNA, 19 nt, Artificial Sequence
  Description of Artificial Sequence: Synthetic oligonucleotide
auagugagugcuggcuugc

SEQ ID NO: 1563189 - RNA, 19 nt, Artificial Sequence
  Description of Artificial Sequence: Synthetic oligonucleotide
uuccuuggcccuuauccgc

SEQ ID NO: 1563190 - RNA, 19 nt, Artificial Sequence
  Description of Artificial Sequence: Synthetic oligonucleotide
cacgcaauacacgagccag

SEQ ID NO: 1563191 - RNA, 19 nt, Artificial Sequence
  Description of Artificial Sequence: Synthetic oligonucleotide
gugaagcaugcccacaaug

SEQ ID NO: 1563192 - RNA, 19 nt, Artificial Sequence
  Description of Artificial Sequence: Synthetic oligonucleotide
caauacacgagccagcucu

SEQ ID NO: 1563193 - RNA, 19 nt, Artificial Sequence
  Description of Artificial Sequence: Synthetic oligonucleotide
aagcaugcccacaauggug

SEQ ID NO: 1563194 - RNA, 19 nt, Artificial Sequence
  Description of Artificial Sequence: Synthetic oligonucleotide
ugacuuuagcaaaggucac

SEQ ID NO: 1563195 - RNA, 19 nt, Artificial Sequence
  Description of Artificial Sequence: Synthetic oligonucleotide
caccacgcaauacacgagc

SEQ ID NO: 1563196 - RNA, 19 nt, Artificial Sequence
  Description of Artificial Sequence: Synthetic oligonucleotide
agaggcacguggcugugag

SEQ ID NO: 1563197 - RNA, 19 nt, Artificial Sequence
  Description of Artificial Sequence: Synthetic oligonucleotide
uguccaugcgaauccgaug

SEQ ID NO: 1563198 - RNA, 19 nt, Artificial Sequence
  Description of Artificial Sequence: Synthetic oligonucleotide
ucggcaacuguccaccauc

SEQ ID NO: 1563199 - RNA, 19 nt, Artificial Sequence
  Description of Artificial Sequence: Synthetic oligonucleotide
uacacgagccagcucuggc

SEQ ID NO: 1563200 - RNA, 19 nt, Artificial Sequence
  Description of Artificial Sequence: Synthetic oligonucleotide
cauggaagcgcugguaggc

SEQ ID NO: 1563201 - RNA, 19 nt, Artificial Sequence
  Description of Artificial Sequence: Synthetic oligonucleotide
aucgauugugaagcaugcc

SEQ ID NO: 1563202 - RNA, 19 nt, Artificial Sequence
  Description of Artificial Sequence: Synthetic oligonucleotide
ugcuacggaacaucucggc

SEQ ID NO: 1563203 - RNA, 19 nt, Artificial Sequence
  Description of Artificial Sequence: Synthetic oligonucleotide
agcaacucagauaggagca

SEQ ID NO: 1563204 - RNA, 19 nt, Artificial Sequence
  Description of Artificial Sequence: Synthetic oligonucleotide
cuugggugacaucaagcug

SEQ ID NO: 1563205 - RNA, 19 nt, Artificial Sequence
  Description of Artificial Sequence: Synthetic oligonucleotide
cuacggaacaucucggcca

SEQ ID NO: 1563206 - RNA, 19 nt, Artificial Sequence
  Description of Artificial Sequence: Synthetic oligonucleotide
acuuagcccgcggagcagc

SEQ ID NO: 1563207 - RNA, 19 nt, Artificial Sequence
  Description of Artificial Sequence: Synthetic oligonucleotide
uugcgcucagacacaaaga

SEQ ID NO: 1563208 - RNA, 19 nt, Artificial Sequence
  Description of Artificial Sequence: Synthetic oligonucleotide
ggagugcuggacuagagga

SEQ ID NO: 1563209 - RNA, 19 nt, Artificial Sequence
  Description of Artificial Sequence: Synthetic oligonucleotide
ucuaccagguuccgucgga

SEQ ID NO: 1563210 - RNA, 19 nt, Artificial Sequence
  Description of Artificial Sequence: Synthetic oligonucleotide
auggugaguugguaaucag

SEQ ID NO: 1563211 - RNA, 19 nt, Artificial Sequence
  Description of Artificial Sequence: Synthetic oligonucleotide
accacgcaauacacgagcc

SEQ ID NO: 1563212 - RNA, 19 nt, Artificial Sequence
  Description of Artificial Sequence: Synthetic oligonucleotide
uccuggcggaagcaauagg

SEQ ID NO: 1563213 - RNA, 19 nt, Artificial Sequence
  Description of Artificial Sequence: Synthetic oligonucleotide
uugauacuuguagggcagg

SEQ ID NO: 1563214 - RNA, 19 nt, Artificial Sequence
  Description of Artificial Sequence: Synthetic oligonucleotide
guacacgguuuuaaucugg

SEQ ID NO: 1563215 - RNA, 19 nt, Artificial Sequence
  Description of Artificial Sequence: Synthetic oligonucleotide
gauacuuguagggcaggac

SEQ ID NO: 1563216 - RNA, 19 nt, Artificial Sequence
  Description of Artificial Sequence: Synthetic oligonucleotide
uguucugggcaccgcguca

SEQ ID NO: 1563217 - RNA, 19 nt, Artificial Sequence
  Description of Artificial Sequence: Synthetic oligonucleotide
acggcgcggauagaaaucg

SEQ ID NO: 1563218 - RNA, 19 nt, Artificial Sequence
  Description of Artificial Sequence: Synthetic oligonucleotide
cuggacuagaggacccagg

SEQ ID NO: 1563219 - RNA, 19 nt, Artificial Sequence
  Description of Artificial Sequence: Synthetic oligonucleotide
cucggccagcacuugauac

SEQ ID NO: 1563220 - RNA, 19 nt, Artificial Sequence
  Description of Artificial Sequence: Synthetic oligonucleotide
auccacauugaagcguggg

SEQ ID NO: 1563221 - RNA, 19 nt, Artificial Sequence
  Description of Artificial Sequence: Synthetic oligonucleotide
uggcaagcgcucuaaccgc

SEQ ID NO: 1563222 - RNA, 19 nt, Artificial Sequence
  Description of Artificial Sequence: Synthetic oligonucleotide
aguugguaaucagaucucu

SEQ ID NO: 1563223 - RNA, 19 nt, Artificial Sequence
  Description of Artificial Sequence: Synthetic oligonucleotide
ucggccagcacuugauacu

SEQ ID NO: 1563224 - RNA, 19 nt, Artificial Sequence
  Description of Artificial Sequence: Synthetic oligonucleotide
ugggagugcuggacuagag

SEQ ID NO: 1563225 - RNA, 19 nt, Artificial Sequence
  Description of Artificial Sequence: Synthetic oligonucleotide
cagaccaccuccauaguga

SEQ ID NO: 1563226 - RNA, 19 nt, Artificial Sequence
  Description of Artificial Sequence: Synthetic oligonucleotide
ucagaucgauugugaagca

SEQ ID NO: 1563227 - RNA, 19 nt, Artificial Sequence
  Description of Artificial Sequence: Synthetic oligonucleotide
uugucucaguauuaauuuu

SEQ ID NO: 1563228 - RNA, 19 nt, Artificial Sequence
  Description of Artificial Sequence: Synthetic oligonucleotide
accagguuacucaaggccu

SEQ ID NO: 1563229 - RNA, 19 nt, Artificial Sequence
  Description of Artificial Sequence: Synthetic oligonucleotide
auugaagcgugggugccag

SEQ ID NO: 1563230 - RNA, 19 nt, Artificial Sequence
  Description of Artificial Sequence: Synthetic oligonucleotide
ugauacuuguagggcagga

SEQ ID NO: 1563231 - RNA, 19 nt, Artificial Sequence
  Description of Artificial Sequence: Synthetic oligonucleotide
auaggaugugggguacacg

SEQ ID NO: 1563232 - RNA, 19 nt, Artificial Sequence
  Description of Artificial Sequence: Synthetic oligonucleotide
aggcacguggcugugagcu

SEQ ID NO: 1563233 - RNA, 19 nt, Artificial Sequence
  Description of Artificial Sequence: Synthetic oligonucleotide
aauacacgagccagcucug

SEQ ID NO: 1563234 - RNA, 19 nt, Artificial Sequence
  Description of Artificial Sequence: Synthetic oligonucleotide
cuagacucagccgagcgca

SEQ ID NO: 1563235 - RNA, 19 nt, Artificial Sequence
  Description of Artificial Sequence: Synthetic oligonucleotide
guagguguccaugcgaauc

SEQ ID NO: 1563236 - RNA, 19 nt, Artificial Sequence
  Description of Artificial Sequence: Synthetic oligonucleotide
ccuugcacagaccaccucc

SEQ ID NO: 1563237 - RNA, 19 nt, Artificial Sequence
  Description of Artificial Sequence: Synthetic oligonucleotide
uuauccgcuccagcaaggc

SEQ ID NO: 1563238 - RNA, 19 nt, Artificial Sequence
  Description of Artificial Sequence: Synthetic oligonucleotide
agcuaagucagcagcuuug

SEQ ID NO: 1563239 - RNA, 19 nt, Artificial Sequence
  Description of Artificial Sequence: Synthetic oligonucleotide
cagcaaggguucuauggug

SEQ ID NO: 1563240 - RNA, 19 nt, Artificial Sequence
  Description of Artificial Sequence: Synthetic oligonucleotide
ugcgcaucauguccuggac

SEQ ID NO: 1563241 - RNA, 19 nt, Artificial Sequence
  Description of Artificial Sequence: Synthetic oligonucleotide
cucagauaggagcaacaca

SEQ ID NO: 1563242 - RNA, 19 nt, Artificial Sequence
  Description of Artificial Sequence: Synthetic oligonucleotide
caccuuguuugacuuuagc

SEQ ID NO: 1563243 - RNA, 19 nt, Artificial Sequence
  Description of Artificial Sequence: Synthetic oligonucleotide
ggguucuauggugaguugg

SEQ ID NO: 1563244 - RNA, 19 nt, Artificial Sequence
  Description of Artificial Sequence: Synthetic oligonucleotide
uuccuggcggaagcaauag

SEQ ID NO: 1563245 - RNA, 19 nt, Artificial Sequence
  Description of Artificial Sequence: Synthetic oligonucleotide
ucaaagcguuugcgcauca

SEQ ID NO: 1563246 - RNA, 19 nt, Artificial Sequence
  Description of Artificial Sequence: Synthetic oligonucleotide
acgcaauacacgagccagc

SEQ ID NO: 1563247 - RNA, 19 nt, Artificial Sequence
  Description of Artificial Sequence: Synthetic oligonucleotide
aguguggaucugguggguc

SEQ ID NO: 1563248 - RNA, 19 nt, Artificial Sequence
  Description of Artificial Sequence: Synthetic oligonucleotide
guuccgucggaagaccugc

SEQ ID NO: 1563249 - RNA, 19 nt, Artificial Sequence
  Description of Artificial Sequence: Synthetic oligonucleotide
ucgggccaacaccuccugg

SEQ ID NO: 1563250 - RNA, 19 nt, Artificial Sequence
  Description of Artificial Sequence: Synthetic oligonucleotide
caaugguguccaugcuacg

SEQ ID NO: 1563251 - RNA, 19 nt, Artificial Sequence
  Description of Artificial Sequence: Synthetic oligonucleotide
ggauagaaaucgguaacac

SEQ ID NO: 1563252 - RNA, 19 nt, Artificial Sequence
  Description of Artificial Sequence: Synthetic oligonucleotide
cucagccgagcgcaggacc

SEQ ID NO: 1563253 - RNA, 19 nt, Artificial Sequence
  Description of Artificial Sequence: Synthetic oligonucleotide
uucaaagcguuugcgcauc

SEQ ID NO: 1563254 - RNA, 19 nt, Artificial Sequence
  Description of Artificial Sequence: Synthetic oligonucleotide
ugggguacacgguuuuaau

SEQ ID NO: 1563255 - RNA, 19 nt, Artificial Sequence
  Description of Artificial Sequence: Synthetic oligonucleotide
gcguuugcgcaucaugucc

SEQ ID NO: 1563256 - RNA, 19 nt, Artificial Sequence
  Description of Artificial Sequence: Synthetic oligonucleotide
gugagacaggccgacuuag

SEQ ID NO: 1563257 - RNA, 19 nt, Artificial Sequence
  Description of Artificial Sequence: Synthetic oligonucleotide
gggacauugcauuccuggc

SEQ ID NO: 1563258 - RNA, 19 nt, Artificial Sequence
  Description of Artificial Sequence: Synthetic oligonucleotide
agggacuuucuugacacau

SEQ ID NO: 1563259 - RNA, 19 nt, Artificial Sequence
  Description of Artificial Sequence: Synthetic oligonucleotide
cuggguucgguggagggac

SEQ ID NO: 1563260 - RNA, 19 nt, Artificial Sequence
  Description of Artificial Sequence: Synthetic oligonucleotide
ggaaaccuuggcaucuggg

SEQ ID NO: 1563261 - RNA, 19 nt, Artificial Sequence
  Description of Artificial Sequence: Synthetic oligonucleotide
uccgucggaagaccugccu

SEQ ID NO: 1563262 - RNA, 19 nt, Artificial Sequence
  Description of Artificial Sequence: Synthetic oligonucleotide
uccaugcgaauccgaugca

SEQ ID NO: 1563263 - RNA, 19 nt, Artificial Sequence
  Description of Artificial Sequence: Synthetic oligonucleotide
cagucucagaucgauugug

SEQ ID NO: 1563264 - RNA, 19 nt, Artificial Sequence
  Description of Artificial Sequence: Synthetic oligonucleotide
gcggauagaaaucgguaac

SEQ ID NO: 1563265 - RNA, 19 nt, Artificial Sequence
  Description of Artificial Sequence: Synthetic oligonucleotide
auugcgcucuucaaagcgu

SEQ ID NO: 1563266 - RNA, 19 nt, Artificial Sequence
  Description of Artificial Sequence: Synthetic oligonucleotide
gaguugguaaucagaucuc

SEQ ID NO: 1563267 - RNA, 19 nt, Artificial Sequence
  Description of Artificial Sequence: Synthetic oligonucleotide
cuugcacagaccaccucca

SEQ ID NO: 1563268 - RNA, 19 nt, Artificial Sequence
  Description of Artificial Sequence: Synthetic oligonucleotide
gguggcaccaccacuaguc

SEQ ID NO: 1563269 - RNA, 19 nt, Artificial Sequence
  Description of Artificial Sequence: Synthetic oligonucleotide
gggcaauucagcugguuca

SEQ ID NO: 1563270 - RNA, 19 nt, Artificial Sequence
  Description of Artificial Sequence: Synthetic oligonucleotide
ucuggguucgguggaggga

SEQ ID NO: 1563271 - RNA, 19 nt, Artificial Sequence
  Description of Artificial Sequence: Synthetic oligonucleotide
ggccagcuaagucagcagc

SEQ ID NO: 1563272 - RNA, 19 nt, Artificial Sequence
  Description of Artificial Sequence: Synthetic oligonucleotide
auugugaagcaugcccaca

SEQ ID NO: 1563273 - RNA, 19 nt, Artificial Sequence
  Description of Artificial Sequence: Synthetic oligonucleotide
gaaaucgguaacacgacuu

SEQ ID NO: 1563274 - RNA, 19 nt, Artificial Sequence
  Description of Artificial Sequence: Synthetic oligonucleotide
augcuacggaacaucucgg

SEQ ID NO: 1563275 - RNA, 19 nt, Artificial Sequence
  Description of Artificial Sequence: Synthetic oligonucleotide
uggguucgguggagggacg

SEQ ID NO: 1563276 - RNA, 19 nt, Artificial Sequence
  Description of Artificial Sequence: Synthetic oligonucleotide
cugcgcugcaagaggcacg

SEQ ID NO: 1563277 - RNA, 19 nt, Artificial Sequence
  Description of Artificial Sequence: Synthetic oligonucleotide
uugcgcucuucaaagcguu

SEQ ID NO: 1563278 - RNA, 19 nt, Artificial Sequence
  Description of Artificial Sequence: Synthetic oligonucleotide
agcgcucuaaccgcugcag

SEQ ID NO: 1563279 - RNA, 19 nt, Artificial Sequence
  Description of Artificial Sequence: Synthetic oligonucleotide
uccuugaaaguggggacau

SEQ ID NO: 1563280 - RNA, 19 nt, Artificial Sequence
  Description of Artificial Sequence: Synthetic oligonucleotide
ugaugcucuuugacucgcu

SEQ ID NO: 1563281 - RNA, 19 nt, Artificial Sequence
  Description of Artificial Sequence: Synthetic oligonucleotide
uagugagugcuggcuugcg

SEQ ID NO: 1563282 - RNA, 19 nt, Artificial Sequence
  Description of Artificial Sequence: Synthetic oligonucleotide
guuugcgcaucauguccug

SEQ ID NO: 1563283 - RNA, 19 nt, Artificial Sequence
  Description of Artificial Sequence: Synthetic oligonucleotide
auacacgagccagcucugg

SEQ ID NO: 1563284 - RNA, 19 nt, Artificial Sequence
  Description of Artificial Sequence: Synthetic oligonucleotide
agucucagaucgauuguga

SEQ ID NO: 1563285 - RNA, 19 nt, Artificial Sequence
  Description of Artificial Sequence: Synthetic oligonucleotide
guuugacuuuagcaaaggu

SEQ ID NO: 1563286 - RNA, 19 nt, Artificial Sequence
  Description of Artificial Sequence: Synthetic oligonucleotide
gaaaguggggacauugcau

SEQ ID NO: 1563287 - RNA, 19 nt, Artificial Sequence
  Description of Artificial Sequence: Synthetic oligonucleotide
caaccccucaguguggauc

SEQ ID NO: 1563288 - RNA, 19 nt, Artificial Sequence
  Description of Artificial Sequence: Synthetic oligonucleotide
gggguacacgguuuuaauc

SEQ ID NO: 1563289 - RNA, 19 nt, Artificial Sequence
  Description of Artificial Sequence: Synthetic oligonucleotide
cuacuagacucagccgagc

SEQ ID NO: 1563290 - RNA, 19 nt, Artificial Sequence
  Description of Artificial Sequence: Synthetic oligonucleotide
ggggcaauucagcugguuc

SEQ ID NO: 1563291 - RNA, 19 nt, Artificial Sequence
  Description of Artificial Sequence: Synthetic oligonucleotide
ucacagucucagaucgauu

SEQ ID NO: 1563292 - RNA, 19 nt, Artificial Sequence
  Description of Artificial Sequence: Synthetic oligonucleotide
uuccgucggaagaccugcc

SEQ ID NO: 1563293 - RNA, 19 nt, Artificial Sequence
  Description of Artificial Sequence: Synthetic oligonucleotide
aggguucuauggugaguug

SEQ ID NO: 1563294 - RNA, 19 nt, Artificial Sequence
  Description of Artificial Sequence: Synthetic oligonucleotide
ccuugugaugcucuuugac

SEQ ID NO: 1563295 - RNA, 19 nt, Artificial Sequence
  Description of Artificial Sequence: Synthetic oligonucleotide
guucgguggagggacgggc

SEQ ID NO: 1563296 - RNA, 19 nt, Artificial Sequence
  Description of Artificial Sequence: Synthetic oligonucleotide
gucggaagaccugccugcg

SEQ ID NO: 1563297 - RNA, 19 nt, Artificial Sequence
  Description of Artificial Sequence: Synthetic oligonucleotide
ccuggcggaagcaauagga

SEQ ID NO: 1563298 - RNA, 19 nt, Artificial Sequence
  Description of Artificial Sequence: Synthetic oligonucleotide
ggaccagguuacucaaggc

SEQ ID NO: 1563299 - RNA, 19 nt, Artificial Sequence
  Description of Artificial Sequence: Synthetic oligonucleotide
gcaaggguucuauggugag

SEQ ID NO: 1563300 - RNA, 19 nt, Artificial Sequence
  Description of Artificial Sequence: Synthetic oligonucleotide
agccgaagcuccuguucug

SEQ ID NO: 1563301 - RNA, 19 nt, Artificial Sequence
  Description of Artificial Sequence: Synthetic oligonucleotide
gcgaauccgaugcaggcuc

SEQ ID NO: 1563302 - RNA, 19 nt, Artificial Sequence
  Description of Artificial Sequence: Synthetic oligonucleotide
cuuucagugaggccagcua

SEQ ID NO: 1563303 - RNA, 19 nt, Artificial Sequence
  Description of Artificial Sequence: Synthetic oligonucleotide
gauaggagcaacacauguu

SEQ ID NO: 1563304 - RNA, 19 nt, Artificial Sequence
  Description of Artificial Sequence: Synthetic oligonucleotide
gaaagccuugugaugcucu

SEQ ID NO: 1563305 - RNA, 19 nt, Artificial Sequence
  Description of Artificial Sequence: Synthetic oligonucleotide
gggcuacuagacucagccg

SEQ ID NO: 1563306 - RNA, 19 nt, Artificial Sequence
  Description of Artificial Sequence: Synthetic oligonucleotide
gacggcgcggauagaaauc

SEQ ID NO: 1563307 - RNA, 19 nt, Artificial Sequence
  Description of Artificial Sequence: Synthetic oligonucleotide
cgcugcaagaggcacgugg

SEQ ID NO: 1563308 - RNA, 19 nt, Artificial Sequence
  Description of Artificial Sequence: Synthetic oligonucleotide
ggugaguugguaaucagau

SEQ ID NO: 1563309 - RNA, 19 nt, Artificial Sequence
  Description of Artificial Sequence: Synthetic oligonucleotide
cagggcuacuagacucagc

SEQ ID NO: 1563310 - RNA, 19 nt, Artificial Sequence
  Description of Artificial Sequence: Synthetic oligonucleotide
accuccauagugagugcug

SEQ ID NO: 1563311 - RNA, 19 nt, Artificial Sequence
  Description of Artificial Sequence: Synthetic oligonucleotide
uugcacagaccaccuccau

SEQ ID NO: 1563312 - RNA, 19 nt, Artificial Sequence
  Description of Artificial Sequence: Synthetic oligonucleotide
ugcuggacuagaggaccca

SEQ ID NO: 1563313 - RNA, 19 nt, Artificial Sequence
  Description of Artificial Sequence: Synthetic oligonucleotide
gcacguggcugugagcugg

SEQ ID NO: 1563314 - RNA, 19 nt, Artificial Sequence
  Description of Artificial Sequence: Synthetic oligonucleotide
ggagcaacacauguuucuc

SEQ ID NO: 1563315 - RNA, 19 nt, Artificial Sequence
  Description of Artificial Sequence: Synthetic oligonucleotide
gacuuagcccgcggagcag

SEQ ID NO: 1563316 - RNA, 19 nt, Artificial Sequence
  Description of Artificial Sequence: Synthetic oligonucleotide
ggcaccgcgucaucugugc

SEQ ID NO: 1563317 - RNA, 19 nt, Artificial Sequence
  Description of Artificial Sequence: Synthetic oligonucleotide
gcccuuauccgcuccagca

SEQ ID NO: 1563318 - RNA, 19 nt, Artificial Sequence
  Description of Artificial Sequence: Synthetic oligonucleotide
cagguuccgucggaagacc

SEQ ID NO: 1563319 - RNA, 19 nt, Artificial Sequence
  Description of Artificial Sequence: Synthetic oligonucleotide
aggccgacuuagcccgcgg

SEQ ID NO: 1563320 - RNA, 19 nt, Artificial Sequence
  Description of Artificial Sequence: Synthetic oligonucleotide
ugcgggcucgggccaacac

SEQ ID NO: 1563321 - RNA, 19 nt, Artificial Sequence
  Description of Artificial Sequence: Synthetic oligonucleotide
ggcggaagcaauaggaugu

SEQ ID NO: 1563322 - RNA, 19 nt, Artificial Sequence
  Description of Artificial Sequence: Synthetic oligonucleotide
gguaaucagaucucuugau

SEQ ID NO: 1563323 - RNA, 19 nt, Artificial Sequence
  Description of Artificial Sequence: Synthetic oligonucleotide
caccacuagucuccugguc

SEQ ID NO: 1563324 - RNA, 19 nt, Artificial Sequence
  Description of Artificial Sequence: Synthetic oligonucleotide
uggcccuuauccgcuccag

SEQ ID NO: 1563325 - RNA, 19 nt, Artificial Sequence
  Description of Artificial Sequence: Synthetic oligonucleotide
cagcucggcaacuguccac

SEQ ID NO: 1563326 - RNA, 19 nt, Artificial Sequence
  Description of Artificial Sequence: Synthetic oligonucleotide
cuucaaagcguuugcgcau

SEQ ID NO: 1563327 - RNA, 19 nt, Artificial Sequence
  Description of Artificial Sequence: Synthetic oligonucleotide
uggcugugagcuggguggc

SEQ ID NO: 1563328 - RNA, 19 nt, Artificial Sequence
  Description of Artificial Sequence: Synthetic oligonucleotide
ggcagcucggcaacugucc

SEQ ID NO: 1563329 - RNA, 19 nt, Artificial Sequence
  Description of Artificial Sequence: Synthetic oligonucleotide
caccgcgucaucugugcca

SEQ ID NO: 1563330 - RNA, 19 nt, Artificial Sequence
  Description of Artificial Sequence: Synthetic oligonucleotide
gacuuccuuggcccuuauc

SEQ ID NO: 1563331 - RNA, 19 nt, Artificial Sequence
  Description of Artificial Sequence: Synthetic oligonucleotide
ugcgcucuucaaagcguuu

SEQ ID NO: 1563332 - RNA, 19 nt, Artificial Sequence
  Description of Artificial Sequence: Synthetic oligonucleotide
caucaagcugcgggcucgg

SEQ ID NO: 1563333 - RNA, 19 nt, Artificial Sequence
  Description of Artificial Sequence: Synthetic oligonucleotide
ggaagaccugccugcgcug

SEQ ID NO: 1563334 - RNA, 19 nt, Artificial Sequence
  Description of Artificial Sequence: Synthetic oligonucleotide
cucuggcaagcgcucuaac

SEQ ID NO: 1563335 - RNA, 19 nt, Artificial Sequence
  Description of Artificial Sequence: Synthetic oligonucleotide
cgauugugaagcaugccca

SEQ ID NO: 1563336 - RNA, 19 nt, Artificial Sequence
  Description of Artificial Sequence: Synthetic oligonucleotide
gugggguacacgguuuuaa

SEQ ID NO: 1563337 - RNA, 19 nt, Artificial Sequence
  Description of Artificial Sequence: Synthetic oligonucleotide
cucuaaccgcugcagccga

SEQ ID NO: 1563338 - RNA, 19 nt, Artificial Sequence
  Description of Artificial Sequence: Synthetic oligonucleotide
ugugggguacacgguuuua

SEQ ID NO: 1563339 - RNA, 19 nt, Artificial Sequence
  Description of Artificial Sequence: Synthetic oligonucleotide
gucucaguauuaauuuuau

SEQ ID NO: 1563340 - RNA, 19 nt, Artificial Sequence
  Description of Artificial Sequence: Synthetic oligonucleotide
ggacgggcgcgcuugcggc

SEQ ID NO: 1563341 - RNA, 19 nt, Artificial Sequence
  Description of Artificial Sequence: Synthetic oligonucleotide
agccgagcgcaggaccagg

SEQ ID NO: 1563342 - RNA, 19 nt, Artificial Sequence
  Description of Artificial Sequence: Synthetic oligonucleotide
acuagaggacccagggcua

SEQ ID NO: 1563343 - RNA, 19 nt, Artificial Sequence
  Description of Artificial Sequence: Synthetic oligonucleotide
gcaauaggaugugggguac

SEQ ID NO: 1563344 - RNA, 19 nt, Artificial Sequence
  Description of Artificial Sequence: Synthetic oligonucleotide
gucacagucucagaucgau

SEQ ID NO: 1563345 - RNA, 19 nt, Artificial Sequence
  Description of Artificial Sequence: Synthetic oligonucleotide
ugggugccagcgugucagc

SEQ ID NO: 1563346 - RNA, 19 nt, Artificial Sequence
  Description of Artificial Sequence: Synthetic oligonucleotide
ccgaagcuccuguucuggg

SEQ ID NO: 1563347 - RNA, 19 nt, Artificial Sequence
  Description of Artificial Sequence: Synthetic oligonucleotide
cucgggccaacaccuccug

SEQ ID NO: 1563348 - RNA, 19 nt, Artificial Sequence
  Description of Artificial Sequence: Synthetic oligonucleotide
agccagucuggcagcaacu

SEQ ID NO: 1563349 - RNA, 19 nt, Artificial Sequence
  Description of Artificial Sequence: Synthetic oligonucleotide
cauugaagcgugggugcca

SEQ ID NO: 1563350 - RNA, 19 nt, Artificial Sequence
  Description of Artificial Sequence: Synthetic oligonucleotide
cagguuacucaaggccuuc

SEQ ID NO: 1563351 - RNA, 19 nt, Artificial Sequence
  Description of Artificial Sequence: Synthetic oligonucleotide
ccaugcgaauccgaugcag

SEQ ID NO: 1563352 - RNA, 19 nt, Artificial Sequence
  Description of Artificial Sequence: Synthetic oligonucleotide
ggguucaaugaagcaagga

SEQ ID NO: 1563353 - RNA, 19 nt, Artificial Sequence
  Description of Artificial Sequence: Synthetic oligonucleotide
ggagggacgggcgcgcuug

SEQ ID NO: 1563354 - RNA, 19 nt, Artificial Sequence
  Description of Artificial Sequence: Synthetic oligonucleotide
ccagguuccgucggaagac

SEQ ID NO: 1563355 - RNA, 19 nt, Artificial Sequence
  Description of Artificial Sequence: Synthetic oligonucleotide
guucuauggugaguuggua

SEQ ID NO: 1563356 - RNA, 19 nt, Artificial Sequence
  Description of Artificial Sequence: Synthetic oligonucleotide
cuuagcccgcggagcagca

SEQ ID NO: 1563357 - RNA, 19 nt, Artificial Sequence
  Description of Artificial Sequence: Synthetic oligonucleotide
gguuccgucggaagaccug

SEQ ID NO: 1563358 - RNA, 19 nt, Artificial Sequence
  Description of Artificial Sequence: Synthetic oligonucleotide
agcccgcggagcagcaagg

SEQ ID NO: 1563359 - RNA, 19 nt, Artificial Sequence
  Description of Artificial Sequence: Synthetic oligonucleotide
gguucgguggagggacggg

SEQ ID NO: 1563360 - RNA, 19 nt, Artificial Sequence
  Description of Artificial Sequence: Synthetic oligonucleotide
gcuggcuugcgcucagaca

SEQ ID NO: 1563361 - RNA, 19 nt, Artificial Sequence
  Description of Artificial Sequence: Synthetic oligonucleotide
ggcucggggugagacaggc

SEQ ID NO: 1563362 - RNA, 19 nt, Artificial Sequence
  Description of Artificial Sequence: Synthetic oligonucleotide
uucugggcaccgcgucauc

SEQ ID NO: 1563363 - RNA, 19 nt, Artificial Sequence
  Description of Artificial Sequence: Synthetic oligonucleotide
caggccgacuuagcccgcg

SEQ ID NO: 1563364 - RNA, 19 nt, Artificial Sequence
  Description of Artificial Sequence: Synthetic oligonucleotide
acaggccgacuuagcccgc

SEQ ID NO: 1563365 - RNA, 19 nt, Artificial Sequence
  Description of Artificial Sequence: Synthetic oligonucleotide
ggcccuuauccgcuccagc

SEQ ID NO: 1563366 - RNA, 19 nt, Artificial Sequence
  Description of Artificial Sequence: Synthetic oligonucleotide
ggguucgguggagggacgg

SEQ ID NO: 1563367 - RNA, 19 nt, Artificial Sequence
  Description of Artificial Sequence: Synthetic oligonucleotide
cagccgaagcuccuguucu

SEQ ID NO: 1563368 - RNA, 19 nt, Artificial Sequence
  Description of Artificial Sequence: Synthetic oligonucleotide
gguucuauggugaguuggu

SEQ ID NO: 1563369 - RNA, 19 nt, Artificial Sequence
  Description of Artificial Sequence: Synthetic oligonucleotide
ggccaacaccuccugggca

SEQ ID NO: 1563370 - RNA, 19 nt, Artificial Sequence
  Description of Artificial Sequence: Synthetic oligonucleotide
ccaugcuacggaacaucuc

SEQ ID NO: 1563371 - RNA, 19 nt, Artificial Sequence
  Description of Artificial Sequence: Synthetic oligonucleotide
gcaauacacgagccagcuc

SEQ ID NO: 1563372 - RNA, 19 nt, Artificial Sequence
  Description of Artificial Sequence: Synthetic oligonucleotide
uuagcccgcggagcagcaa

SEQ ID NO: 1563373 - RNA, 19 nt, Artificial Sequence
  Description of Artificial Sequence: Synthetic oligonucleotide
gcggaagcaauaggaugug

SEQ ID NO: 1563374 - RNA, 19 nt, Artificial Sequence
  Description of Artificial Sequence: Synthetic oligonucleotide
uggggcaauucagcugguu

SEQ ID NO: 1563375 - RNA, 19 nt, Artificial Sequence
  Description of Artificial Sequence: Synthetic oligonucleotide
cgcggauagaaaucgguaa

SEQ ID NO: 1563376 - RNA, 19 nt, Artificial Sequence
  Description of Artificial Sequence: Synthetic oligonucleotide
agaccugccugcgcugcaa

SEQ ID NO: 1563377 - RNA, 19 nt, Artificial Sequence
  Description of Artificial Sequence: Synthetic oligonucleotide
guguccaugcgaauccgau

SEQ ID NO: 1563378 - RNA, 19 nt, Artificial Sequence
  Description of Artificial Sequence: Synthetic oligonucleotide
agcgugggugccagcgugu

SEQ ID NO: 1563379 - RNA, 19 nt, Artificial Sequence
  Description of Artificial Sequence: Synthetic oligonucleotide
cuaccagguuccgucggaa

SEQ ID NO: 1563380 - RNA, 19 nt, Artificial Sequence
  Description of Artificial Sequence: Synthetic oligonucleotide
gguggagggacgggcgcgc

SEQ ID NO: 1563381 - RNA, 19 nt, Artificial Sequence
  Description of Artificial Sequence: Synthetic oligonucleotide
ggugagcuucuccgugaca

SEQ ID NO: 1563382 - RNA, 19 nt, Artificial Sequence
  Description of Artificial Sequence: Synthetic oligonucleotide
gcaccgcgucaucugugcc

SEQ ID NO: 1563383 - RNA, 19 nt, Artificial Sequence
  Description of Artificial Sequence: Synthetic oligonucleotide
gcgcucagacacaaagaca

SEQ ID NO: 1563384 - RNA, 19 nt, Artificial Sequence
  Description of Artificial Sequence: Synthetic oligonucleotide
gguguccaugcgaauccga

SEQ ID NO: 1563385 - RNA, 19 nt, Artificial Sequence
  Description of Artificial Sequence: Synthetic oligonucleotide
cggauagaaaucgguaaca

SEQ ID NO: 1563386 - RNA, 19 nt, Artificial Sequence
  Description of Artificial Sequence: Synthetic oligonucleotide
cagcgugucagcuggucuu

SEQ ID NO: 1563387 - RNA, 19 nt, Artificial Sequence
  Description of Artificial Sequence: Synthetic oligonucleotide
ccacgcaauacacgagcca

SEQ ID NO: 1563388 - RNA, 19 nt, Artificial Sequence
  Description of Artificial Sequence: Synthetic oligonucleotide
gcaagcgcucuaaccgcug

SEQ ID NO: 1563389 - RNA, 19 nt, Artificial Sequence
  Description of Artificial Sequence: Synthetic oligonucleotide
caaggguucuauggugagu

SEQ ID NO: 1563390 - RNA, 19 nt, Artificial Sequence
  Description of Artificial Sequence: Synthetic oligonucleotide
cggaagcaauaggaugugg

SEQ ID NO: 1563391 - RNA, 19 nt, Artificial Sequence
  Description of Artificial Sequence: Synthetic oligonucleotide
ggcugggagugcuggacua

SEQ ID NO: 1563392 - RNA, 19 nt, Artificial Sequence
  Description of Artificial Sequence: Synthetic oligonucleotide
ccagggcuacuagacucag

SEQ ID NO: 1563393 - RNA, 19 nt, Artificial Sequence
  Description of Artificial Sequence: Synthetic oligonucleotide
ggcgcggauagaaaucggu

SEQ ID NO: 1563394 - RNA, 19 nt, Artificial Sequence
  Description of Artificial Sequence: Synthetic oligonucleotide
cagcuaagucagcagcuuu

SEQ ID NO: 1563395 - RNA, 19 nt, Artificial Sequence
  Description of Artificial Sequence: Synthetic oligonucleotide
gggugagacaggccgacuu

SEQ ID NO: 1563396 - RNA, 19 nt, Artificial Sequence
  Description of Artificial Sequence: Synthetic oligonucleotide
ggccgacuuagcccgcgga

SEQ ID NO: 1563397 - RNA, 19 nt, Artificial Sequence
  Description of Artificial Sequence: Synthetic oligonucleotide
cagaucgauugugaagcau

SEQ ID NO: 1563398 - RNA, 19 nt, Artificial Sequence
  Description of Artificial Sequence: Synthetic oligonucleotide
cggccgacggcgcggauag

SEQ ID NO: 1563399 - RNA, 19 nt, Artificial Sequence
  Description of Artificial Sequence: Synthetic oligonucleotide
caccuccauagugagugcu

SEQ ID NO: 1563400 - RNA, 19 nt, Artificial Sequence
  Description of Artificial Sequence: Synthetic oligonucleotide
ugcccacaaugguguccau

SEQ ID NO: 1563401 - RNA, 19 nt, Artificial Sequence
  Description of Artificial Sequence: Synthetic oligonucleotide
gccagcuaagucagcagcu

SEQ ID NO: 1563402 - RNA, 19 nt, Artificial Sequence
  Description of Artificial Sequence: Synthetic oligonucleotide
gacgggcgcgcuugcggcu

SEQ ID NO: 1563403 - RNA, 19 nt, Artificial Sequence
  Description of Artificial Sequence: Synthetic oligonucleotide
gcgcggauagaaaucggua

SEQ ID NO: 1563404 - RNA, 19 nt, Artificial Sequence
  Description of Artificial Sequence: Synthetic oligonucleotide
cccuuauccgcuccagcaa

SEQ ID NO: 1563405 - RNA, 19 nt, Artificial Sequence
  Description of Artificial Sequence: Synthetic oligonucleotide
cgacuuagcccgcggagca

SEQ ID NO: 1563406 - RNA, 19 nt, Artificial Sequence
  Description of Artificial Sequence: Synthetic oligonucleotide
gccgacggcgcggauagaa

SEQ ID NO: 1563407 - RNA, 19 nt, Artificial Sequence
  Description of Artificial Sequence: Synthetic oligonucleotide
ggcuugcgcucagacacaa

SEQ ID NO: 1563408 - RNA, 19 nt, Artificial Sequence
  Description of Artificial Sequence: Synthetic oligonucleotide
cacagaccaccuccauagu

SEQ ID NO: 1563409 - RNA, 19 nt, Artificial Sequence
  Description of Artificial Sequence: Synthetic oligonucleotide
cucggcaacuguccaccau

SEQ ID NO: 1563410 - RNA, 19 nt, Artificial Sequence
  Description of Artificial Sequence: Synthetic oligonucleotide
gggcaccgcgucaucugug

SEQ ID NO: 1563411 - RNA, 19 nt, Artificial Sequence
  Description of Artificial Sequence: Synthetic oligonucleotide
gaggggucacaagcccacu

SEQ ID NO: 1563412 - RNA, 19 nt, Artificial Sequence
  Description of Artificial Sequence: Synthetic oligonucleotide
ccagcacuugauacuugua

SEQ ID NO: 1563413 - RNA, 19 nt, Artificial Sequence
  Description of Artificial Sequence: Synthetic oligonucleotide
gcucggcaacuguccacca

SEQ ID NO: 1563414 - RNA, 19 nt, Artificial Sequence
  Description of Artificial Sequence: Synthetic oligonucleotide
cggcgcggauagaaaucgg

SEQ ID NO: 1563415 - RNA, 19 nt, Artificial Sequence
  Description of Artificial Sequence: Synthetic oligonucleotide
ggcaagcgcucuaaccgcu

SEQ ID NO: 1563416 - RNA, 19 nt, Artificial Sequence
  Description of Artificial Sequence: Synthetic oligonucleotide
gcgcaggaccagguuacuc

SEQ ID NO: 1563417 - RNA, 19 nt, Artificial Sequence
  Description of Artificial Sequence: Synthetic oligonucleotide
cgguuuuaaucuggcccac

SEQ ID NO: 1563418 - RNA, 19 nt, Artificial Sequence
  Description of Artificial Sequence: Synthetic oligonucleotide
caaagcguuugcgcaucau

SEQ ID NO: 1563419 - RNA, 19 nt, Artificial Sequence
  Description of Artificial Sequence: Synthetic oligonucleotide
cgaauccgaugcaggcuca

SEQ ID NO: 1563420 - RNA, 19 nt, Artificial Sequence
  Description of Artificial Sequence: Synthetic oligonucleotide
cgcaauacacgagccagcu

SEQ ID NO: 1563421 - RNA, 19 nt, Artificial Sequence
  Description of Artificial Sequence: Synthetic oligonucleotide
ccgacggcgcggauagaaa

SEQ ID NO: 1563422 - RNA, 19 nt, Artificial Sequence
  Description of Artificial Sequence: Synthetic oligonucleotide
gcgugggugccagcguguc

SEQ ID NO: 1563423 - RNA, 19 nt, Artificial Sequence
  Description of Artificial Sequence: Synthetic oligonucleotide
cggggugagacaggccgac

SEQ ID NO: 1563424 - RNA, 19 nt, Artificial Sequence
  Description of Artificial Sequence: Synthetic oligonucleotide
cgacggcgcggauagaaau

SEQ ID NO: 1563425 - RNA, 19 nt, Artificial Sequence
  Description of Artificial Sequence: Synthetic oligonucleotide
gcuugcgcucagacacaaa

SEQ ID NO: 1563426 - RNA, 19 nt, Artificial Sequence
  Description of Artificial Sequence: Synthetic oligonucleotide
ccgcgucaucugugccagc

SEQ ID NO: 1563427 - RNA, 19 nt, Artificial Sequence
  Description of Artificial Sequence: Synthetic oligonucleotide
cgugggugccagcguguca

SEQ ID NO: 1563428 - RNA, 19 nt, Artificial Sequence
  Description of Artificial Sequence: Synthetic oligonucleotide
gggcucgggccaacaccuc

SEQ ID NO: 1563429 - RNA, 19 nt, Artificial Sequence
  Description of Artificial Sequence: Synthetic oligonucleotide
ggggugagacaggccgacu

SEQ ID NO: 1563430 - RNA, 19 nt, Artificial Sequence
  Description of Artificial Sequence: Synthetic oligonucleotide
ggcccacauugcgcucuuc

SEQ ID NO: 1563431 - RNA, 19 nt, Artificial Sequence
  Description of Artificial Sequence: Synthetic oligonucleotide
ggacuuccuuggcccuuau

SEQ ID NO: 1563432 - RNA, 19 nt, Artificial Sequence
  Description of Artificial Sequence: Synthetic oligonucleotide
ccaacaccuccugggcagu

SEQ ID NO: 1563433 - RNA, 19 nt, Artificial Sequence
  Description of Artificial Sequence: Synthetic oligonucleotide
ccggccgacggcgcggaua

SEQ ID NO: 1563434 - RNA, 19 nt, Artificial Sequence
  Description of Artificial Sequence: Synthetic oligonucleotide
ccgagcgcaggaccagguu

SEQ ID NO: 1563435 - RNA, 19 nt, Artificial Sequence
  Description of Artificial Sequence: Synthetic oligonucleotide
ggccgacggcgcggauaga

SEQ ID NO: 1563436 - RNA, 19 nt, Artificial Sequence
  Description of Artificial Sequence: Synthetic oligonucleotide
cccggccgacggcgcggau

SEQ ID NO: 1563437 - RNA, 19 nt, Artificial Sequence
  Description of Artificial Sequence: Synthetic oligonucleotide
aauagcucaauuuaggaca

SEQ ID NO: 1563438 - RNA, 19 nt, Artificial Sequence
  Description of Artificial Sequence: Synthetic oligonucleotide
aauaauugccccugcaugg

SEQ ID NO: 1563439 - RNA, 19 nt, Artificial Sequence
  Description of Artificial Sequence: Synthetic oligonucleotide
aaugcacaaagauugcccc

SEQ ID NO: 1563440 - RNA, 19 nt, Artificial Sequence
  Description of Artificial Sequence: Synthetic oligonucleotide
aaauagcucaauuuaggac

SEQ ID NO: 1563441 - RNA, 19 nt, Artificial Sequence
  Description of Artificial Sequence: Synthetic oligonucleotide
aaauuugucccauuaaaug

SEQ ID NO: 1563442 - RNA, 19 nt, Artificial Sequence
  Description of Artificial Sequence: Synthetic oligonucleotide
auuaccaccaauuucacca

SEQ ID NO: 1563443 - RNA, 19 nt, Artificial Sequence
  Description of Artificial Sequence: Synthetic oligonucleotide
ugaaaauagcucaauuuag

SEQ ID NO: 1563444 - RNA, 19 nt, Artificial Sequence
  Description of Artificial Sequence: Synthetic oligonucleotide
agaauuauguuccuucagg

SEQ ID NO: 1563445 - RNA, 19 nt, Artificial Sequence
  Description of Artificial Sequence: Synthetic oligonucleotide
aaugaacgacacuacgggc

SEQ ID NO: 1563446 - RNA, 19 nt, Artificial Sequence
  Description of Artificial Sequence: Synthetic oligonucleotide
accaaugacacucccaggc

SEQ ID NO: 1563447 - RNA, 19 nt, Artificial Sequence
  Description of Artificial Sequence: Synthetic oligonucleotide
aaugauagauuuauuaucu

SEQ ID NO: 1563448 - RNA, 19 nt, Artificial Sequence
  Description of Artificial Sequence: Synthetic oligonucleotide
agcgucauaagaugcaugc

SEQ ID NO: 1563449 - RNA, 19 nt, Artificial Sequence
  Description of Artificial Sequence: Synthetic oligonucleotide
ucuaaaauuugccugggcu

SEQ ID NO: 1563450 - RNA, 19 nt, Artificial Sequence
  Description of Artificial Sequence: Synthetic oligonucleotide
cauuaaaugggucaccucc

SEQ ID NO: 1563451 - RNA, 19 nt, Artificial Sequence
  Description of Artificial Sequence: Synthetic oligonucleotide
uggaccagaauuauguucc

SEQ ID NO: 1563452 - RNA, 19 nt, Artificial Sequence
  Description of Artificial Sequence: Synthetic oligonucleotide
cauucuaaaauuugccugg

SEQ ID NO: 1563453 - RNA, 19 nt, Artificial Sequence
  Description of Artificial Sequence: Synthetic oligonucleotide
uuuaucaauguagauaugu

SEQ ID NO: 1563454 - RNA, 19 nt, Artificial Sequence
  Description of Artificial Sequence: Synthetic oligonucleotide
ugugccauauuccaaggcc

SEQ ID NO: 1563455 - RNA, 19 nt, Artificial Sequence
  Description of Artificial Sequence: Synthetic oligonucleotide
aacuccuuauauauggugg

SEQ ID NO: 1563456 - RNA, 19 nt, Artificial Sequence
  Description of Artificial Sequence: Synthetic oligonucleotide
aguacgaugccuucugugg

SEQ ID NO: 1563457 - RNA, 19 nt, Artificial Sequence
  Description of Artificial Sequence: Synthetic oligonucleotide
aguuacaccagcaaugaac

SEQ ID NO: 1563458 - RNA, 19 nt, Artificial Sequence
  Description of Artificial Sequence: Synthetic oligonucleotide
gauaccuucaguaaugcac

SEQ ID NO: 1563459 - RNA, 19 nt, Artificial Sequence
  Description of Artificial Sequence: Synthetic oligonucleotide
aaugcacacaaccaaggga

SEQ ID NO: 1563460 - RNA, 19 nt, Artificial Sequence
  Description of Artificial Sequence: Synthetic oligonucleotide
uucaaaucaaaugauagau

SEQ ID NO: 1563461 - RNA, 19 nt, Artificial Sequence
  Description of Artificial Sequence: Synthetic oligonucleotide
aaccaagggaaucucugcg

SEQ ID NO: 1563462 - RNA, 19 nt, Artificial Sequence
  Description of Artificial Sequence: Synthetic oligonucleotide
ucaauuuaggacauucuaa

SEQ ID NO: 1563463 - RNA, 19 nt, Artificial Sequence
  Description of Artificial Sequence: Synthetic oligonucleotide
ugauagauuuauuaucugu

SEQ ID NO: 1563464 - RNA, 19 nt, Artificial Sequence
  Description of Artificial Sequence: Synthetic oligonucleotide
auuuaggacauucuaaaau

SEQ ID NO: 1563465 - RNA, 19 nt, Artificial Sequence
  Description of Artificial Sequence: Synthetic oligonucleotide
aaacuccuuauauauggug

SEQ ID NO: 1563466 - RNA, 19 nt, Artificial Sequence
  Description of Artificial Sequence: Synthetic oligonucleotide
caaugaacgacacuacggg

SEQ ID NO: 1563467 - RNA, 19 nt, Artificial Sequence
  Description of Artificial Sequence: Synthetic oligonucleotide
uauaugguggaucccagcu

SEQ ID NO: 1563468 - RNA, 19 nt, Artificial Sequence
  Description of Artificial Sequence: Synthetic oligonucleotide
ugaauugcucugcucagag

SEQ ID NO: 1563469 - RNA, 19 nt, Artificial Sequence
  Description of Artificial Sequence: Synthetic oligonucleotide
uacauaaaugacagaagcu

SEQ ID NO: 1563470 - RNA, 19 nt, Artificial Sequence
  Description of Artificial Sequence: Synthetic oligonucleotide
aggauugaugauuccaggg

SEQ ID NO: 1563471 - RNA, 19 nt, Artificial Sequence
  Description of Artificial Sequence: Synthetic oligonucleotide
aggacauucuaaaauuugc

SEQ ID NO: 1563472 - RNA, 19 nt, Artificial Sequence
  Description of Artificial Sequence: Synthetic oligonucleotide
uuauauaugguggauccca

SEQ ID NO: 1563473 - RNA, 19 nt, Artificial Sequence
  Description of Artificial Sequence: Synthetic oligonucleotide
aggaggagcaguuacacca

SEQ ID NO: 1563474 - RNA, 19 nt, Artificial Sequence
  Description of Artificial Sequence: Synthetic oligonucleotide
uaagaugcaugccguaucc

SEQ ID NO: 1563475 - RNA, 19 nt, Artificial Sequence
  Description of Artificial Sequence: Synthetic oligonucleotide
agugaaaauagcucaauuu

SEQ ID NO: 1563476 - RNA, 19 nt, Artificial Sequence
  Description of Artificial Sequence: Synthetic oligonucleotide
uaggacauucuaaaauuug

SEQ ID NO: 1563477 - RNA, 19 nt, Artificial Sequence
  Description of Artificial Sequence: Synthetic oligonucleotide
ugucccauuaaauggguca

SEQ ID NO: 1563478 - RNA, 19 nt, Artificial Sequence
  Description of Artificial Sequence: Synthetic oligonucleotide
aauuuaggacauucuaaaa

SEQ ID NO: 1563479 - RNA, 19 nt, Artificial Sequence
  Description of Artificial Sequence: Synthetic oligonucleotide
agcaaugaacgacacuacg

SEQ ID NO: 1563480 - RNA, 19 nt, Artificial Sequence
  Description of Artificial Sequence: Synthetic oligonucleotide
agcauuaccaccaauuuca

SEQ ID NO: 1563481 - RNA, 19 nt, Artificial Sequence
  Description of Artificial Sequence: Synthetic oligonucleotide
ucuggacugacucucaguc

SEQ ID NO: 1563482 - RNA, 19 nt, Artificial Sequence
  Description of Artificial Sequence: Synthetic oligonucleotide
uauguuuccgggaagcguc

SEQ ID NO: 1563483 - RNA, 19 nt, Artificial Sequence
  Description of Artificial Sequence: Synthetic oligonucleotide
cuucauaagucaacgugcc

SEQ ID NO: 1563484 - RNA, 19 nt, Artificial Sequence
  Description of Artificial Sequence: Synthetic oligonucleotide
uauauaugguggaucccag

SEQ ID NO: 1563485 - RNA, 19 nt, Artificial Sequence
  Description of Artificial Sequence: Synthetic oligonucleotide
auauaugguggaucccagc

SEQ ID NO: 1563486 - RNA, 19 nt, Artificial Sequence
  Description of Artificial Sequence: Synthetic oligonucleotide
ucagacagcgauagucacg

SEQ ID NO: 1563487 - RNA, 19 nt, Artificial Sequence
  Description of Artificial Sequence: Synthetic oligonucleotide
aaaauuugccugggcuucc

SEQ ID NO: 1563488 - RNA, 19 nt, Artificial Sequence
  Description of Artificial Sequence: Synthetic oligonucleotide
gaaggugcgcgacagcagg

SEQ ID NO: 1563489 - RNA, 19 nt, Artificial Sequence
  Description of Artificial Sequence: Synthetic oligonucleotide
cuagcauggaucuacgcuc

SEQ ID NO: 1563490 - RNA, 19 nt, Artificial Sequence
  Description of Artificial Sequence: Synthetic oligonucleotide
ugaaccgcuucauaaguca

SEQ ID NO: 1563491 - RNA, 19 nt, Artificial Sequence
  Description of Artificial Sequence: Synthetic oligonucleotide
auauuccaaggccugcugg

SEQ ID NO: 1563492 - RNA, 19 nt, Artificial Sequence
  Description of Artificial Sequence: Synthetic oligonucleotide
uuccgaugaacugagagac

SEQ ID NO: 1563493 - RNA, 19 nt, Artificial Sequence
  Description of Artificial Sequence: Synthetic oligonucleotide
ugggauaccuucaguaaug

SEQ ID NO: 1563494 - RNA, 19 nt, Artificial Sequence
  Description of Artificial Sequence: Synthetic oligonucleotide
ugcgucaacugcuucagug

SEQ ID NO: 1563495 - RNA, 19 nt, Artificial Sequence
  Description of Artificial Sequence: Synthetic oligonucleotide
uguagauauguuuccggga

SEQ ID NO: 1563496 - RNA, 19 nt, Artificial Sequence
  Description of Artificial Sequence: Synthetic oligonucleotide
uuagccucgucuuuccuug

SEQ ID NO: 1563497 - RNA, 19 nt, Artificial Sequence
  Description of Artificial Sequence: Synthetic oligonucleotide
agagaucuucucuuuagca

SEQ ID NO: 1563498 - RNA, 19 nt, Artificial Sequence
  Description of Artificial Sequence: Synthetic oligonucleotide
cugccggagaccauggucg

SEQ ID NO: 1563499 - RNA, 19 nt, Artificial Sequence
  Description of Artificial Sequence: Synthetic oligonucleotide
auaaaugacagaagcuguc

SEQ ID NO: 1563500 - RNA, 19 nt, Artificial Sequence
  Description of Artificial Sequence: Synthetic oligonucleotide
agcucaauuuaggacauuc

SEQ ID NO: 1563501 - RNA, 19 nt, Artificial Sequence
  Description of Artificial Sequence: Synthetic oligonucleotide
cagaucuggacacaauacc

SEQ ID NO: 1563502 - RNA, 19 nt, Artificial Sequence
  Description of Artificial Sequence: Synthetic oligonucleotide
uucaccaaucaguacgaug

SEQ ID NO: 1563503 - RNA, 19 nt, Artificial Sequence
  Description of Artificial Sequence: Synthetic oligonucleotide
ucaaaucaaaugauagauu

SEQ ID NO: 1563504 - RNA, 19 nt, Artificial Sequence
  Description of Artificial Sequence: Synthetic oligonucleotide
aguaaugcacacaaccaag

SEQ ID NO: 1563505 - RNA, 19 nt, Artificial Sequence
  Description of Artificial Sequence: Synthetic oligonucleotide
cauggaucuacgcucgcgg

SEQ ID NO: 1563506 - RNA, 19 nt, Artificial Sequence
  Description of Artificial Sequence: Synthetic oligonucleotide
uucucagacagcgauaguc

SEQ ID NO: 1563507 - RNA, 19 nt, Artificial Sequence
  Description of Artificial Sequence: Synthetic oligonucleotide
ccuuauauaugguggaucc

SEQ ID NO: 1563508 - RNA, 19 nt, Artificial Sequence
  Description of Artificial Sequence: Synthetic oligonucleotide
agaggcgucuucuucagca

SEQ ID NO: 1563509 - RNA, 19 nt, Artificial Sequence
  Description of Artificial Sequence: Synthetic oligonucleotide
uccgggaagcgucauaaga

SEQ ID NO: 1563510 - RNA, 19 nt, Artificial Sequence
  Description of Artificial Sequence: Synthetic oligonucleotide
auaauugccccugcauggc

SEQ ID NO: 1563511 - RNA, 19 nt, Artificial Sequence
  Description of Artificial Sequence: Synthetic oligonucleotide
uggaucuacgcucgcgggg

SEQ ID NO: 1563512 - RNA, 19 nt, Artificial Sequence
  Description of Artificial Sequence: Synthetic oligonucleotide
gauauguuuccgggaagcg

SEQ ID NO: 1563513 - RNA, 19 nt, Artificial Sequence
  Description of Artificial Sequence: Synthetic oligonucleotide
caauuuaggacauucuaaa

SEQ ID NO: 1563514 - RNA, 19 nt, Artificial Sequence
  Description of Artificial Sequence: Synthetic oligonucleotide
ggcaguuuggcccaauuag

SEQ ID NO: 1563515 - RNA, 19 nt, Artificial Sequence
  Description of Artificial Sequence: Synthetic oligonucleotide
uggugaaccgcuucauaag

SEQ ID NO: 1563516 - RNA, 19 nt, Artificial Sequence
  Description of Artificial Sequence: Synthetic oligonucleotide
uguuacacaguaagugaaa

SEQ ID NO: 1563517 - RNA, 19 nt, Artificial Sequence
  Description of Artificial Sequence: Synthetic oligonucleotide
aacgugccagaucuggaca

SEQ ID NO: 1563518 - RNA, 19 nt, Artificial Sequence
  Description of Artificial Sequence: Synthetic oligonucleotide
auagucacgggugggaaag

SEQ ID NO: 1563519 - RNA, 19 nt, Artificial Sequence
  Description of Artificial Sequence: Synthetic oligonucleotide
ugugggauaccuucaguaa

SEQ ID NO: 1563520 - RNA, 19 nt, Artificial Sequence
  Description of Artificial Sequence: Synthetic oligonucleotide
accgcuucauaagucaacg

SEQ ID NO: 1563521 - RNA, 19 nt, Artificial Sequence
  Description of Artificial Sequence: Synthetic oligonucleotide
guagauauguuuccgggaa

SEQ ID NO: 1563522 - RNA, 19 nt, Artificial Sequence
  Description of Artificial Sequence: Synthetic oligonucleotide
uuugucccauuaaaugggu

SEQ ID NO: 1563523 - RNA, 19 nt, Artificial Sequence
  Description of Artificial Sequence: Synthetic oligonucleotide
aucaguacgaugccuucug

SEQ ID NO: 1563524 - RNA, 19 nt, Artificial Sequence
  Description of Artificial Sequence: Synthetic oligonucleotide
uccacgagaguucuuccac

SEQ ID NO: 1563525 - RNA, 19 nt, Artificial Sequence
  Description of Artificial Sequence: Synthetic oligonucleotide
uuugccugggcuuccgaug

SEQ ID NO: 1563526 - RNA, 19 nt, Artificial Sequence
  Description of Artificial Sequence: Synthetic oligonucleotide
ucaauaaaauuugucccau

SEQ ID NO: 1563527 - RNA, 19 nt, Artificial Sequence
  Description of Artificial Sequence: Synthetic oligonucleotide
agaugcaugccguauccca

SEQ ID NO: 1563528 - RNA, 19 nt, Artificial Sequence
  Description of Artificial Sequence: Synthetic oligonucleotide
ugugugccugacccgaacc

SEQ ID NO: 1563529 - RNA, 19 nt, Artificial Sequence
  Description of Artificial Sequence: Synthetic oligonucleotide
agcaguuacaccagcaaug

SEQ ID NO: 1563530 - RNA, 19 nt, Artificial Sequence
  Description of Artificial Sequence: Synthetic oligonucleotide
ugucuugccgcccuucccu

SEQ ID NO: 1563531 - RNA, 19 nt, Artificial Sequence
  Description of Artificial Sequence: Synthetic oligonucleotide
gugaaaggugcccugcuug

SEQ ID NO: 1563532 - RNA, 19 nt, Artificial Sequence
  Description of Artificial Sequence: Synthetic oligonucleotide
aacgacacuacgggcuugg

SEQ ID NO: 1563533 - RNA, 19 nt, Artificial Sequence
  Description of Artificial Sequence: Synthetic oligonucleotide
augccguaucccauuaugc

SEQ ID NO: 1563534 - RNA, 19 nt, Artificial Sequence
  Description of Artificial Sequence: Synthetic oligonucleotide
ugccguaucccauuaugcu

SEQ ID NO: 1563535 - RNA, 19 nt, Artificial Sequence
  Description of Artificial Sequence: Synthetic oligonucleotide
acgugccagaucuggacac

SEQ ID NO: 1563536 - RNA, 19 nt, Artificial Sequence
  Description of Artificial Sequence: Synthetic oligonucleotide
aaccgcuucauaagucaac

SEQ ID NO: 1563537 - RNA, 19 nt, Artificial Sequence
  Description of Artificial Sequence: Synthetic oligonucleotide
gcaaugaacgacacuacgg

SEQ ID NO: 1563538 - RNA, 19 nt, Artificial Sequence
  Description of Artificial Sequence: Synthetic oligonucleotide
uucauaagucaacgugcca

SEQ ID NO: 1563539 - RNA, 19 nt, Artificial Sequence
  Description of Artificial Sequence: Synthetic oligonucleotide
caugccguaucccauuaug

SEQ ID NO: 1563540 - RNA, 19 nt, Artificial Sequence
  Description of Artificial Sequence: Synthetic oligonucleotide
agaucuggacacaauaccu

SEQ ID NO: 1563541 - RNA, 19 nt, Artificial Sequence
  Description of Artificial Sequence: Synthetic oligonucleotide
accuagcauggaucuacgc

SEQ ID NO: 1563542 - RNA, 19 nt, Artificial Sequence
  Description of Artificial Sequence: Synthetic oligonucleotide
aaauuugccugggcuuccg

SEQ ID NO: 1563543 - RNA, 19 nt, Artificial Sequence
  Description of Artificial Sequence: Synthetic oligonucleotide
auguuguguccuucacagc

SEQ ID NO: 1563544 - RNA, 19 nt, Artificial Sequence
  Description of Artificial Sequence: Synthetic oligonucleotide
uugugaauauggccaggca

SEQ ID NO: 1563545 - RNA, 19 nt, Artificial Sequence
  Description of Artificial Sequence: Synthetic oligonucleotide
ugugaaagugugugccuga

SEQ ID NO: 1563546 - RNA, 19 nt, Artificial Sequence
  Description of Artificial Sequence: Synthetic oligonucleotide
auggaucuacgcucgcggg

SEQ ID NO: 1563547 - RNA, 19 nt, Artificial Sequence
  Description of Artificial Sequence: Synthetic oligonucleotide
aauuagccucgucuuuccu

SEQ ID NO: 1563548 - RNA, 19 nt, Artificial Sequence
  Description of Artificial Sequence: Synthetic oligonucleotide
uaagucaacgugccagauc

SEQ ID NO: 1563549 - RNA, 19 nt, Artificial Sequence
  Description of Artificial Sequence: Synthetic oligonucleotide
aggagguacauaaaugaca

SEQ ID NO: 1563550 - RNA, 19 nt, Artificial Sequence
  Description of Artificial Sequence: Synthetic oligonucleotide
ugugucuugccgcccuucc

SEQ ID NO: 1563551 - RNA, 19 nt, Artificial Sequence
  Description of Artificial Sequence: Synthetic oligonucleotide
caauuagccucgucuuucc

SEQ ID NO: 1563552 - RNA, 19 nt, Artificial Sequence
  Description of Artificial Sequence: Synthetic oligonucleotide
gccaauuuuacauucucca

SEQ ID NO: 1563553 - RNA, 19 nt, Artificial Sequence
  Description of Artificial Sequence: Synthetic oligonucleotide
auaccuucaguaaugcaca

SEQ ID NO: 1563554 - RNA, 19 nt, Artificial Sequence
  Description of Artificial Sequence: Synthetic oligonucleotide
auuaugcugcaggaggaag

SEQ ID NO: 1563555 - RNA, 19 nt, Artificial Sequence
  Description of Artificial Sequence: Synthetic oligonucleotide
aaucaguacgaugccuucu

SEQ ID NO: 1563556 - RNA, 19 nt, Artificial Sequence
  Description of Artificial Sequence: Synthetic oligonucleotide
ucagaggcgucuucuucag

SEQ ID NO: 1563557 - RNA, 19 nt, Artificial Sequence
  Description of Artificial Sequence: Synthetic oligonucleotide
ucaacgugccagaucugga

SEQ ID NO: 1563558 - RNA, 19 nt, Artificial Sequence
  Description of Artificial Sequence: Synthetic oligonucleotide
cuuauauaugguggauccc

SEQ ID NO: 1563559 - RNA, 19 nt, Artificial Sequence
  Description of Artificial Sequence: Synthetic oligonucleotide
uugccugggcuuccgauga

SEQ ID NO: 1563560 - RNA, 19 nt, Artificial Sequence
  Description of Artificial Sequence: Synthetic oligonucleotide
aagauugccccaggccaac

SEQ ID NO: 1563561 - RNA, 19 nt, Artificial Sequence
  Description of Artificial Sequence: Synthetic oligonucleotide
acagcgauagucacgggug

SEQ ID NO: 1563562 - RNA, 19 nt, Artificial Sequence
  Description of Artificial Sequence: Synthetic oligonucleotide
agcgcugcggucauccacc

SEQ ID NO: 1563563 - RNA, 19 nt, Artificial Sequence
  Description of Artificial Sequence: Synthetic oligonucleotide
cuuccgaugaacugagaga

SEQ ID NO: 1563564 - RNA, 19 nt, Artificial Sequence
  Description of Artificial Sequence: Synthetic oligonucleotide
cgucauaagaugcaugccg

SEQ ID NO: 1563565 - RNA, 19 nt, Artificial Sequence
  Description of Artificial Sequence: Synthetic oligonucleotide
ccugacccgaaccauaucc

SEQ ID NO: 1563566 - RNA, 19 nt, Artificial Sequence
  Description of Artificial Sequence: Synthetic oligonucleotide
aagugugugccugacccga

SEQ ID NO: 1563567 - RNA, 19 nt, Artificial Sequence
  Description of Artificial Sequence: Synthetic oligonucleotide
ggacauucuaaaauuugcc

SEQ ID NO: 1563568 - RNA, 19 nt, Artificial Sequence
  Description of Artificial Sequence: Synthetic oligonucleotide
uaagugaaaauagcucaau

SEQ ID NO: 1563569 - RNA, 19 nt, Artificial Sequence
  Description of Artificial Sequence: Synthetic oligonucleotide
ucucaguccacgagaguuc

SEQ ID NO: 1563570 - RNA, 19 nt, Artificial Sequence
  Description of Artificial Sequence: Synthetic oligonucleotide
gaggagguacauaaaugac

SEQ ID NO: 1563571 - RNA, 19 nt, Artificial Sequence
  Description of Artificial Sequence: Synthetic oligonucleotide
ccucccacgaguuuugugc

SEQ ID NO: 1563572 - RNA, 19 nt, Artificial Sequence
  Description of Artificial Sequence: Synthetic oligonucleotide
cugacucucaguccacgag

SEQ ID NO: 1563573 - RNA, 19 nt, Artificial Sequence
  Description of Artificial Sequence: Synthetic oligonucleotide
cauaaaugacagaagcugu

SEQ ID NO: 1563574 - RNA, 19 nt, Artificial Sequence
  Description of Artificial Sequence: Synthetic oligonucleotide
auuaaaugggucaccucca

SEQ ID NO: 1563575 - RNA, 19 nt, Artificial Sequence
  Description of Artificial Sequence: Synthetic oligonucleotide
caauuucaccaaucaguac

SEQ ID NO: 1563576 - RNA, 19 nt, Artificial Sequence
  Description of Artificial Sequence: Synthetic oligonucleotide
accaagggaaucucugcgu

SEQ ID NO: 1563577 - RNA, 19 nt, Artificial Sequence
  Description of Artificial Sequence: Synthetic oligonucleotide
uggaucauucaggaagacu

SEQ ID NO: 1563578 - RNA, 19 nt, Artificial Sequence
  Description of Artificial Sequence: Synthetic oligonucleotide
cucagacagcgauagucac

SEQ ID NO: 1563579 - RNA, 19 nt, Artificial Sequence
  Description of Artificial Sequence: Synthetic oligonucleotide
ugaacgacacuacgggcuu

SEQ ID NO: 1563580 - RNA, 19 nt, Artificial Sequence
  Description of Artificial Sequence: Synthetic oligonucleotide
auauguuuccgggaagcgu

SEQ ID NO: 1563581 - RNA, 19 nt, Artificial Sequence
  Description of Artificial Sequence: Synthetic oligonucleotide
aaggugcgcgacagcaggc

SEQ ID NO: 1563582 - RNA, 19 nt, Artificial Sequence
  Description of Artificial Sequence: Synthetic oligonucleotide
ucuacgcucgcggggacag

SEQ ID NO: 1563583 - RNA, 19 nt, Artificial Sequence
  Description of Artificial Sequence: Synthetic oligonucleotide
aagggaaucucugcgucaa

SEQ ID NO: 1563584 - RNA, 19 nt, Artificial Sequence
  Description of Artificial Sequence: Synthetic oligonucleotide
uuuggaccagaauuauguu

SEQ ID NO: 1563585 - RNA, 19 nt, Artificial Sequence
  Description of Artificial Sequence: Synthetic oligonucleotide
cucccacgaguuuugugcc

SEQ ID NO: 1563586 - RNA, 19 nt, Artificial Sequence
  Description of Artificial Sequence: Synthetic oligonucleotide
caguacgaugccuucugug

SEQ ID NO: 1563587 - RNA, 19 nt, Artificial Sequence
  Description of Artificial Sequence: Synthetic oligonucleotide
aauuugccugggcuuccga

SEQ ID NO: 1563588 - RNA, 19 nt, Artificial Sequence
  Description of Artificial Sequence: Synthetic oligonucleotide
aaagauugccccaggccaa

SEQ ID NO: 1563589 - RNA, 19 nt, Artificial Sequence
  Description of Artificial Sequence: Synthetic oligonucleotide
gacccgaaccauauccugc

SEQ ID NO: 1563590 - RNA, 19 nt, Artificial Sequence
  Description of Artificial Sequence: Synthetic oligonucleotide
ucaguacgaugccuucugu

SEQ ID NO: 1563591 - RNA, 19 nt, Artificial Sequence
  Description of Artificial Sequence: Synthetic oligonucleotide
acccgaaccauauccugcu

SEQ ID NO: 1563592 - RNA, 19 nt, Artificial Sequence
  Description of Artificial Sequence: Synthetic oligonucleotide
agaccagugucagaugugu

SEQ ID NO: 1563593 - RNA, 19 nt, Artificial Sequence
  Description of Artificial Sequence: Synthetic oligonucleotide
ugugaaaggugcccugcuu

SEQ ID NO: 1563594 - RNA, 19 nt, Artificial Sequence
  Description of Artificial Sequence: Synthetic oligonucleotide
ccguaucccauuaugcugc

SEQ ID NO: 1563595 - RNA, 19 nt, Artificial Sequence
  Description of Artificial Sequence: Synthetic oligonucleotide
ucccuggcgagguuccucc

SEQ ID NO: 1563596 - RNA, 19 nt, Artificial Sequence
  Description of Artificial Sequence: Synthetic oligonucleotide
ucauaagaugcaugccgua

SEQ ID NO: 1563597 - RNA, 19 nt, Artificial Sequence
  Description of Artificial Sequence: Synthetic oligonucleotide
uacgaggccgcugcugccg

SEQ ID NO: 1563598 - RNA, 19 nt, Artificial Sequence
  Description of Artificial Sequence: Synthetic oligonucleotide
cauggcccauccuucugcc

SEQ ID NO: 1563599 - RNA, 19 nt, Artificial Sequence
  Description of Artificial Sequence: Synthetic oligonucleotide
uuacaccagcaaugaacga

SEQ ID NO: 1563600 - RNA, 19 nt, Artificial Sequence
  Description of Artificial Sequence: Synthetic oligonucleotide
ccaaugccaaugcacaaag

SEQ ID NO: 1563601 - RNA, 19 nt, Artificial Sequence
  Description of Artificial Sequence: Synthetic oligonucleotide
caaucaguacgaugccuuc

SEQ ID NO: 1563602 - RNA, 19 nt, Artificial Sequence
  Description of Artificial Sequence: Synthetic oligonucleotide
cuccagcaauaauugcccc

SEQ ID NO: 1563603 - RNA, 19 nt, Artificial Sequence
  Description of Artificial Sequence: Synthetic oligonucleotide
aagcgucauaagaugcaug

SEQ ID NO: 1563604 - RNA, 19 nt, Artificial Sequence
  Description of Artificial Sequence: Synthetic oligonucleotide
uugucccauuaaauggguc

SEQ ID NO: 1563605 - RNA, 19 nt, Artificial Sequence
  Description of Artificial Sequence: Synthetic oligonucleotide
agcaaaaggaggagguaca

SEQ ID NO: 1563606 - RNA, 19 nt, Artificial Sequence
  Description of Artificial Sequence: Synthetic oligonucleotide
cagcaaugaacgacacuac

SEQ ID NO: 1563607 - RNA, 19 nt, Artificial Sequence
  Description of Artificial Sequence: Synthetic oligonucleotide
gugugaaagugugugccug

SEQ ID NO: 1563608 - RNA, 19 nt, Artificial Sequence
  Description of Artificial Sequence: Synthetic oligonucleotide
gaccuagcauggaucuacg

SEQ ID NO: 1563609 - RNA, 19 nt, Artificial Sequence
  Description of Artificial Sequence: Synthetic oligonucleotide
ccagaucuggacacaauac

SEQ ID NO: 1563610 - RNA, 19 nt, Artificial Sequence
  Description of Artificial Sequence: Synthetic oligonucleotide
acacaaccaagggaaucuc

SEQ ID NO: 1563611 - RNA, 19 nt, Artificial Sequence
  Description of Artificial Sequence: Synthetic oligonucleotide
ugcggucauccaccaauga

SEQ ID NO: 1563612 - RNA, 19 nt, Artificial Sequence
  Description of Artificial Sequence: Synthetic oligonucleotide
ucgucuuuccuugguguga

SEQ ID NO: 1563613 - RNA, 19 nt, Artificial Sequence
  Description of Artificial Sequence: Synthetic oligonucleotide
uggacacaauaccuauuuu

SEQ ID NO: 1563614 - RNA, 19 nt, Artificial Sequence
  Description of Artificial Sequence: Synthetic oligonucleotide
gccguaucccauuaugcug

SEQ ID NO: 1563615 - RNA, 19 nt, Artificial Sequence
  Description of Artificial Sequence: Synthetic oligonucleotide
ucccauuaaaugggucacc

SEQ ID NO: 1563616 - RNA, 19 nt, Artificial Sequence
  Description of Artificial Sequence: Synthetic oligonucleotide
uuacauucuccaggauuga

SEQ ID NO: 1563617 - RNA, 19 nt, Artificial Sequence
  Description of Artificial Sequence: Synthetic oligonucleotide
gagagaccagugucagaug

SEQ ID NO: 1563618 - RNA, 19 nt, Artificial Sequence
  Description of Artificial Sequence: Synthetic oligonucleotide
ggcaugaugccaauuuuac

SEQ ID NO: 1563619 - RNA, 19 nt, Artificial Sequence
  Description of Artificial Sequence: Synthetic oligonucleotide
cuacgggcuuggcauuugg

SEQ ID NO: 1563620 - RNA, 19 nt, Artificial Sequence
  Description of Artificial Sequence: Synthetic oligonucleotide
uaccuucaguaaugcacac

SEQ ID NO: 1563621 - RNA, 19 nt, Artificial Sequence
  Description of Artificial Sequence: Synthetic oligonucleotide
gaucuggacacaauaccua

SEQ ID NO: 1563622 - RNA, 19 nt, Artificial Sequence
  Description of Artificial Sequence: Synthetic oligonucleotide
agggaaucucugcgucaac

SEQ ID NO: 1563623 - RNA, 19 nt, Artificial Sequence
  Description of Artificial Sequence: Synthetic oligonucleotide
gucccauuaaaugggucac

SEQ ID NO: 1563624 - RNA, 19 nt, Artificial Sequence
  Description of Artificial Sequence: Synthetic oligonucleotide
caguccacgagaguucuuc

SEQ ID NO: 1563625 - RNA, 19 nt, Artificial Sequence
  Description of Artificial Sequence: Synthetic oligonucleotide
auagcucaauuuaggacau

SEQ ID NO: 1563626 - RNA, 19 nt, Artificial Sequence
  Description of Artificial Sequence: Synthetic oligonucleotide
gagaccagugucagaugug

SEQ ID NO: 1563627 - RNA, 19 nt, Artificial Sequence
  Description of Artificial Sequence: Synthetic oligonucleotide
ugcaugccguaucccauua

SEQ ID NO: 1563628 - RNA, 19 nt, Artificial Sequence
  Description of Artificial Sequence: Synthetic oligonucleotide
gggaagcgucauaagaugc

SEQ ID NO: 1563629 - RNA, 19 nt, Artificial Sequence
  Description of Artificial Sequence: Synthetic oligonucleotide
gagguacauaaaugacaga

SEQ ID NO: 1563630 - RNA, 19 nt, Artificial Sequence
  Description of Artificial Sequence: Synthetic oligonucleotide
ggaccuagcauggaucuac

SEQ ID NO: 1563631 - RNA, 19 nt, Artificial Sequence
  Description of Artificial Sequence: Synthetic oligonucleotide
uacauucuccaggauugau

SEQ ID NO: 1563632 - RNA, 19 nt, Artificial Sequence
  Description of Artificial Sequence: Synthetic oligonucleotide
cuugccgcccuucccuggc

SEQ ID NO: 1563633 - RNA, 19 nt, Artificial Sequence
  Description of Artificial Sequence: Synthetic oligonucleotide
gcaguuuggcccaauuagc

SEQ ID NO: 1563634 - RNA, 19 nt, Artificial Sequence
  Description of Artificial Sequence: Synthetic oligonucleotide
uagccucgucuuuccuugg

SEQ ID NO: 1563635 - RNA, 19 nt, Artificial Sequence
  Description of Artificial Sequence: Synthetic oligonucleotide
aggugcgcgacagcaggcg

SEQ ID NO: 1563636 - RNA, 19 nt, Artificial Sequence
  Description of Artificial Sequence: Synthetic oligonucleotide
auugccccugcauggccca

SEQ ID NO: 1563637 - RNA, 19 nt, Artificial Sequence
  Description of Artificial Sequence: Synthetic oligonucleotide
auaagucaacgugccagau

SEQ ID NO: 1563638 - RNA, 19 nt, Artificial Sequence
  Description of Artificial Sequence: Synthetic oligonucleotide
ccagcaaugaacgacacua

SEQ ID NO: 1563639 - RNA, 19 nt, Artificial Sequence
  Description of Artificial Sequence: Synthetic oligonucleotide
cugucucuguuacacagua

SEQ ID NO: 1563640 - RNA, 19 nt, Artificial Sequence
  Description of Artificial Sequence: Synthetic oligonucleotide
ugugccugacccgaaccau

SEQ ID NO: 1563641 - RNA, 19 nt, Artificial Sequence
  Description of Artificial Sequence: Synthetic oligonucleotide
uggcgagguuccucccacg

SEQ ID NO: 1563642 - RNA, 19 nt, Artificial Sequence
  Description of Artificial Sequence: Synthetic oligonucleotide
ugccggagaccauggucgc

SEQ ID NO: 1563643 - RNA, 19 nt, Artificial Sequence
  Description of Artificial Sequence: Synthetic oligonucleotide
ccugcuugccagugaaacc

SEQ ID NO: 1563644 - RNA, 19 nt, Artificial Sequence
  Description of Artificial Sequence: Synthetic oligonucleotide
gucauaagaugcaugccgu

SEQ ID NO: 1563645 - RNA, 19 nt, Artificial Sequence
  Description of Artificial Sequence: Synthetic oligonucleotide
uacgcucgcggggacaggu

SEQ ID NO: 1563646 - RNA, 19 nt, Artificial Sequence
  Description of Artificial Sequence: Synthetic oligonucleotide
gcggucauccaccaaugac

SEQ ID NO: 1563647 - RNA, 19 nt, Artificial Sequence
  Description of Artificial Sequence: Synthetic oligonucleotide
uugccgcccuucccuggcg

SEQ ID NO: 1563648 - RNA, 19 nt, Artificial Sequence
  Description of Artificial Sequence: Synthetic oligonucleotide
gugucuugccgcccuuccc

SEQ ID NO: 1563649 - RNA, 19 nt, Artificial Sequence
  Description of Artificial Sequence: Synthetic oligonucleotide
gugugccugacccgaacca

SEQ ID NO: 1563650 - RNA, 19 nt, Artificial Sequence
  Description of Artificial Sequence: Synthetic oligonucleotide
gugaaccgcuucauaaguc

SEQ ID NO: 1563651 - RNA, 19 nt, Artificial Sequence
  Description of Artificial Sequence: Synthetic oligonucleotide
ugcgcgacagcaggcgggc

SEQ ID NO: 1563652 - RNA, 19 nt, Artificial Sequence
  Description of Artificial Sequence: Synthetic oligonucleotide
ggcauuuggaccagaauua

SEQ ID NO: 1563653 - RNA, 19 nt, Artificial Sequence
  Description of Artificial Sequence: Synthetic oligonucleotide
cuggacacaauaccuauuu

SEQ ID NO: 1563654 - RNA, 19 nt, Artificial Sequence
  Description of Artificial Sequence: Synthetic oligonucleotide
gaccagugucagaugugug

SEQ ID NO: 1563655 - RNA, 19 nt, Artificial Sequence
  Description of Artificial Sequence: Synthetic oligonucleotide
ugccagaucuggacacaau

SEQ ID NO: 1563656 - RNA, 19 nt, Artificial Sequence
  Description of Artificial Sequence: Synthetic oligonucleotide
acucucaguccacgagagu

SEQ ID NO: 1563657 - RNA, 19 nt, Artificial Sequence
  Description of Artificial Sequence: Synthetic oligonucleotide
cacacaaccaagggaaucu

SEQ ID NO: 1563658 - RNA, 19 nt, Artificial Sequence
  Description of Artificial Sequence: Synthetic oligonucleotide
cuacgaggccgcugcugcc

SEQ ID NO: 1563659 - RNA, 19 nt, Artificial Sequence
  Description of Artificial Sequence: Synthetic oligonucleotide
gaaccgcuucauaagucaa

SEQ ID NO: 1563660 - RNA, 19 nt, Artificial Sequence
  Description of Artificial Sequence: Synthetic oligonucleotide
caaacuccuuauauauggu

SEQ ID NO: 1563661 - RNA, 19 nt, Artificial Sequence
  Description of Artificial Sequence: Synthetic oligonucleotide
ggugcgcgacagcaggcgg

SEQ ID NO: 1563662 - RNA, 19 nt, Artificial Sequence
  Description of Artificial Sequence: Synthetic oligonucleotide
augcaugccguaucccauu

SEQ ID NO: 1563663 - RNA, 19 nt, Artificial Sequence
  Description of Artificial Sequence: Synthetic oligonucleotide
cugcuucagugauggcggc

SEQ ID NO: 1563664 - RNA, 19 nt, Artificial Sequence
  Description of Artificial Sequence: Synthetic oligonucleotide
ggugaaccgcuucauaagu

SEQ ID NO: 1563665 - RNA, 19 nt, Artificial Sequence
  Description of Artificial Sequence: Synthetic oligonucleotide
ggaagcgucauaagaugca

SEQ ID NO: 1563666 - RNA, 19 nt, Artificial Sequence
  Description of Artificial Sequence: Synthetic oligonucleotide
gcauggaucuacgcucgcg

SEQ ID NO: 1563667 - RNA, 19 nt, Artificial Sequence
  Description of Artificial Sequence: Synthetic oligonucleotide
gaugauuccagggcaguuu

SEQ ID NO: 1563668 - RNA, 19 nt, Artificial Sequence
  Description of Artificial Sequence: Synthetic oligonucleotide
ggguuguuuggugaaccgc

SEQ ID NO: 1563669 - RNA, 19 nt, Artificial Sequence
  Description of Artificial Sequence: Synthetic oligonucleotide
gcgucaacugcuucaguga

SEQ ID NO: 1563670 - RNA, 19 nt, Artificial Sequence
  Description of Artificial Sequence: Synthetic oligonucleotide
ccaauuagccucgucuuuc

SEQ ID NO: 1563671 - RNA, 19 nt, Artificial Sequence
  Description of Artificial Sequence: Synthetic oligonucleotide
agccucgucuuuccuuggu

SEQ ID NO: 1563672 - RNA, 19 nt, Artificial Sequence
  Description of Artificial Sequence: Synthetic oligonucleotide
caggaccuagcauggaucu

SEQ ID NO: 1563673 - RNA, 19 nt, Artificial Sequence
  Description of Artificial Sequence: Synthetic oligonucleotide
agcggcgagcgcugcgguc

SEQ ID NO: 1563674 - RNA, 19 nt, Artificial Sequence
  Description of Artificial Sequence: Synthetic oligonucleotide
gaucuacgcucgcggggac

SEQ ID NO: 1563675 - RNA, 19 nt, Artificial Sequence
  Description of Artificial Sequence: Synthetic oligonucleotide
acgacacuacgggcuuggc

SEQ ID NO: 1563676 - RNA, 19 nt, Artificial Sequence
  Description of Artificial Sequence: Synthetic oligonucleotide
gaagcgucauaagaugcau

SEQ ID NO: 1563677 - RNA, 19 nt, Artificial Sequence
  Description of Artificial Sequence: Synthetic oligonucleotide
gccagaucuggacacaaua

SEQ ID NO: 1563678 - RNA, 19 nt, Artificial Sequence
  Description of Artificial Sequence: Synthetic oligonucleotide
ccaggaccuagcauggauc

SEQ ID NO: 1563679 - RNA, 19 nt, Artificial Sequence
  Description of Artificial Sequence: Synthetic oligonucleotide
gucuugccgcccuucccug

SEQ ID NO: 1563680 - RNA, 19 nt, Artificial Sequence
  Description of Artificial Sequence: Synthetic oligonucleotide
ggauaccuucaguaaugca

SEQ ID NO: 1563681 - RNA, 19 nt, Artificial Sequence
  Description of Artificial Sequence: Synthetic oligonucleotide
cgaaccauauccugcugug

SEQ ID NO: 1563682 - RNA, 19 nt, Artificial Sequence
  Description of Artificial Sequence: Synthetic oligonucleotide
gugugugccugacccgaac

SEQ ID NO: 1563683 - RNA, 19 nt, Artificial Sequence
  Description of Artificial Sequence: Synthetic oligonucleotide
gaacgacacuacgggcuug

SEQ ID NO: 1563684 - RNA, 19 nt, Artificial Sequence
  Description of Artificial Sequence: Synthetic oligonucleotide
agucacgggugggaaagaa

SEQ ID NO: 1563685 - RNA, 19 nt, Artificial Sequence
  Description of Artificial Sequence: Synthetic oligonucleotide
gcugugaaaggugcccugc

SEQ ID NO: 1563686 - RNA, 19 nt, Artificial Sequence
  Description of Artificial Sequence: Synthetic oligonucleotide
gguuguuuggugaaccgcu

SEQ ID NO: 1563687 - RNA, 19 nt, Artificial Sequence
  Description of Artificial Sequence: Synthetic oligonucleotide
ggagaccauggucgcagug

SEQ ID NO: 1563688 - RNA, 19 nt, Artificial Sequence
  Description of Artificial Sequence: Synthetic oligonucleotide
ccgaugaacugagagacca

SEQ ID NO: 1563689 - RNA, 19 nt, Artificial Sequence
  Description of Artificial Sequence: Synthetic oligonucleotide
gaugcaugccguaucccau

SEQ ID NO: 1563690 - RNA, 19 nt, Artificial Sequence
  Description of Artificial Sequence: Synthetic oligonucleotide
cagaggcgucuucuucagc

SEQ ID NO: 1563691 - RNA, 19 nt, Artificial Sequence
  Description of Artificial Sequence: Synthetic oligonucleotide
gugccauauuccaaggccu

SEQ ID NO: 1563692 - RNA, 19 nt, Artificial Sequence
  Description of Artificial Sequence: Synthetic oligonucleotide
acuacgggcuuggcauuug

SEQ ID NO: 1563693 - RNA, 19 nt, Artificial Sequence
  Description of Artificial Sequence: Synthetic oligonucleotide
ggaucuacgcucgcgggga

SEQ ID NO: 1563694 - RNA, 19 nt, Artificial Sequence
  Description of Artificial Sequence: Synthetic oligonucleotide
cucucaguccacgagaguu

SEQ ID NO: 1563695 - RNA, 19 nt, Artificial Sequence
  Description of Artificial Sequence: Synthetic oligonucleotide
ccauuaaaugggucaccuc

SEQ ID NO: 1563696 - RNA, 19 nt, Artificial Sequence
  Description of Artificial Sequence: Synthetic oligonucleotide
cccugcuugccagugaaac

SEQ ID NO: 1563697 - RNA, 19 nt, Artificial Sequence
  Description of Artificial Sequence: Synthetic oligonucleotide
cugacccgaaccauauccu

SEQ ID NO: 1563698 - RNA, 19 nt, Artificial Sequence
  Description of Artificial Sequence: Synthetic oligonucleotide
cgggaagcgucauaagaug

SEQ ID NO: 1563699 - RNA, 19 nt, Artificial Sequence
  Description of Artificial Sequence: Synthetic oligonucleotide
acacuacgggcuuggcauu

SEQ ID NO: 1563700 - RNA, 19 nt, Artificial Sequence
  Description of Artificial Sequence: Synthetic oligonucleotide
auguuuccgggaagcguca

SEQ ID NO: 1563701 - RNA, 19 nt, Artificial Sequence
  Description of Artificial Sequence: Synthetic oligonucleotide
ccuagcauggaucuacgcu

SEQ ID NO: 1563702 - RNA, 19 nt, Artificial Sequence
  Description of Artificial Sequence: Synthetic oligonucleotide
cccuggcaaauaaccuugg

SEQ ID NO: 1563703 - RNA, 19 nt, Artificial Sequence
  Description of Artificial Sequence: Synthetic oligonucleotide
ucaguccacgagaguucuu

SEQ ID NO: 1563704 - RNA, 19 nt, Artificial Sequence
  Description of Artificial Sequence: Synthetic oligonucleotide
cugagagaccagugucaga

SEQ ID NO: 1563705 - RNA, 19 nt, Artificial Sequence
  Description of Artificial Sequence: Synthetic oligonucleotide
uucccuggcgagguuccuc

SEQ ID NO: 1563706 - RNA, 19 nt, Artificial Sequence
  Description of Artificial Sequence: Synthetic oligonucleotide
gcugcggucauccaccaau

SEQ ID NO: 1563707 - RNA, 19 nt, Artificial Sequence
  Description of Artificial Sequence: Synthetic oligonucleotide
caaauaaccuugguauuuu

SEQ ID NO: 1563708 - RNA, 19 nt, Artificial Sequence
  Description of Artificial Sequence: Synthetic oligonucleotide
gcgagguuccucccacgag

SEQ ID NO: 1563709 - RNA, 19 nt, Artificial Sequence
  Description of Artificial Sequence: Synthetic oligonucleotide
gcgucauaagaugcaugcc

SEQ ID NO: 1563710 - RNA, 19 nt, Artificial Sequence
  Description of Artificial Sequence: Synthetic oligonucleotide
uggcccaauuagccucguc

SEQ ID NO: 1563711 - RNA, 19 nt, Artificial Sequence
  Description of Artificial Sequence: Synthetic oligonucleotide
uguuuccgggaagcgucau

SEQ ID NO: 1563712 - RNA, 19 nt, Artificial Sequence
  Description of Artificial Sequence: Synthetic oligonucleotide
ggugugaaagugugugccu

SEQ ID NO: 1563713 - RNA, 19 nt, Artificial Sequence
  Description of Artificial Sequence: Synthetic oligonucleotide
gucagaugugugagcugac

SEQ ID NO: 1563714 - RNA, 19 nt, Artificial Sequence
  Description of Artificial Sequence: Synthetic oligonucleotide
ggcgagguuccucccacga

SEQ ID NO: 1563715 - RNA, 19 nt, Artificial Sequence
  Description of Artificial Sequence: Synthetic oligonucleotide
ccggagaccauggucgcag

SEQ ID NO: 1563716 - RNA, 19 nt, Artificial Sequence
  Description of Artificial Sequence: Synthetic oligonucleotide
gcacacaaccaagggaauc

SEQ ID NO: 1563717 - RNA, 19 nt, Artificial Sequence
  Description of Artificial Sequence: Synthetic oligonucleotide
ggcaaucaauaaaauuugu

SEQ ID NO: 1563718 - RNA, 19 nt, Artificial Sequence
  Description of Artificial Sequence: Synthetic oligonucleotide
aggaacucagaggcgucuu

SEQ ID NO: 1563719 - RNA, 19 nt, Artificial Sequence
  Description of Artificial Sequence: Synthetic oligonucleotide
auggucgcaguggcagcug

SEQ ID NO: 1563720 - RNA, 19 nt, Artificial Sequence
  Description of Artificial Sequence: Synthetic oligonucleotide
guuuccgggaagcgucaua

SEQ ID NO: 1563721 - RNA, 19 nt, Artificial Sequence
  Description of Artificial Sequence: Synthetic oligonucleotide
aucucugcgucaacugcuu

SEQ ID NO: 1563722 - RNA, 19 nt, Artificial Sequence
  Description of Artificial Sequence: Synthetic oligonucleotide
aucuacgcucgcggggaca

SEQ ID NO: 1563723 - RNA, 19 nt, Artificial Sequence
  Description of Artificial Sequence: Synthetic oligonucleotide
gcgagcgcugcggucaucc

SEQ ID NO: 1563724 - RNA, 19 nt, Artificial Sequence
  Description of Artificial Sequence: Synthetic oligonucleotide
agauugccccaggccaacu

SEQ ID NO: 1563725 - RNA, 19 nt, Artificial Sequence
  Description of Artificial Sequence: Synthetic oligonucleotide
ggaucccagcugugcgggg

SEQ ID NO: 1563726 - RNA, 19 nt, Artificial Sequence
  Description of Artificial Sequence: Synthetic oligonucleotide
gauugccccaggccaacuu

SEQ ID NO: 1563727 - RNA, 19 nt, Artificial Sequence
  Description of Artificial Sequence: Synthetic oligonucleotide
agucaacgugccagaucug

SEQ ID NO: 1563728 - RNA, 19 nt, Artificial Sequence
  Description of Artificial Sequence: Synthetic oligonucleotide
cucuggacugacucucagu

SEQ ID NO: 1563729 - RNA, 19 nt, Artificial Sequence
  Description of Artificial Sequence: Synthetic oligonucleotide
ugccugggcuuccgaugaa

SEQ ID NO: 1563730 - RNA, 19 nt, Artificial Sequence
  Description of Artificial Sequence: Synthetic oligonucleotide
ccauggucgcaguggcagc

SEQ ID NO: 1563731 - RNA, 19 nt, Artificial Sequence
  Description of Artificial Sequence: Synthetic oligonucleotide
cucaguccacgagaguucu

SEQ ID NO: 1563732 - RNA, 19 nt, Artificial Sequence
  Description of Artificial Sequence: Synthetic oligonucleotide
gugccagaucuggacacaa

SEQ ID NO: 1563733 - RNA, 19 nt, Artificial Sequence
  Description of Artificial Sequence: Synthetic oligonucleotide
cugugaaaggugcccugcu

SEQ ID NO: 1563734 - RNA, 19 nt, Artificial Sequence
  Description of Artificial Sequence: Synthetic oligonucleotide
aggccaacuuggguuguuu

SEQ ID NO: 1563735 - RNA, 19 nt, Artificial Sequence
  Description of Artificial Sequence: Synthetic oligonucleotide
gcgauagucacggguggga

SEQ ID NO: 1563736 - RNA, 19 nt, Artificial Sequence
  Description of Artificial Sequence: Synthetic oligonucleotide
ggcgucuucuucagcauua

SEQ ID NO: 1563737 - RNA, 19 nt, Artificial Sequence
  Description of Artificial Sequence: Synthetic oligonucleotide
gcucaauuuaggacauucu

SEQ ID NO: 1563738 - RNA, 19 nt, Artificial Sequence
  Description of Artificial Sequence: Synthetic oligonucleotide
ccacgagaguucuuccaca

SEQ ID NO: 1563739 - RNA, 19 nt, Artificial Sequence
  Description of Artificial Sequence: Synthetic oligonucleotide
cauggucgcaguggcagcu

SEQ ID NO: 1563740 - RNA, 19 nt, Artificial Sequence
  Description of Artificial Sequence: Synthetic oligonucleotide
uuggcccaauuagccucgu

SEQ ID NO: 1563741 - RNA, 19 nt, Artificial Sequence
  Description of Artificial Sequence: Synthetic oligonucleotide
ucgcggggacaggugucca

SEQ ID NO: 1563742 - RNA, 19 nt, Artificial Sequence
  Description of Artificial Sequence: Synthetic oligonucleotide
cuacgcucgcggggacagg

SEQ ID NO: 1563743 - RNA, 19 nt, Artificial Sequence
  Description of Artificial Sequence: Synthetic oligonucleotide
agugugugccugacccgaa

SEQ ID NO: 1563744 - RNA, 19 nt, Artificial Sequence
  Description of Artificial Sequence: Synthetic oligonucleotide
cccgcacucugaagggcag

SEQ ID NO: 1563745 - RNA, 19 nt, Artificial Sequence
  Description of Artificial Sequence: Synthetic oligonucleotide
gaauauggccaggcaugau

SEQ ID NO: 1563746 - RNA, 19 nt, Artificial Sequence
  Description of Artificial Sequence: Synthetic oligonucleotide
cugacacucuggacugacu

SEQ ID NO: 1563747 - RNA, 19 nt, Artificial Sequence
  Description of Artificial Sequence: Synthetic oligonucleotide
aggaccuagcauggaucua

SEQ ID NO: 1563748 - RNA, 19 nt, Artificial Sequence
  Description of Artificial Sequence: Synthetic oligonucleotide
ccgggaagcgucauaagau

SEQ ID NO: 1563749 - RNA, 19 nt, Artificial Sequence
  Description of Artificial Sequence: Synthetic oligonucleotide
gguuccucccacgaguuuu

SEQ ID NO: 1563750 - RNA, 19 nt, Artificial Sequence
  Description of Artificial Sequence: Synthetic oligonucleotide
cacgaguuuugugccauau

SEQ ID NO: 1563751 - RNA, 19 nt, Artificial Sequence
  Description of Artificial Sequence: Synthetic oligonucleotide
gugccugacccgaaccaua

SEQ ID NO: 1563752 - RNA, 19 nt, Artificial Sequence
  Description of Artificial Sequence: Synthetic oligonucleotide
cagugaaacccuggcaaau

SEQ ID NO: 1563753 - RNA, 19 nt, Artificial Sequence
  Description of Artificial Sequence: Synthetic oligonucleotide
ccucgucuuuccuuggugu

SEQ ID NO: 1563754 - RNA, 19 nt, Artificial Sequence
  Description of Artificial Sequence: Synthetic oligonucleotide
gcagcaaaaggaggaggua

SEQ ID NO: 1563755 - RNA, 19 nt, Artificial Sequence
  Description of Artificial Sequence: Synthetic oligonucleotide
gcccaauuagccucgucuu

SEQ ID NO: 1563756 - RNA, 19 nt, Artificial Sequence
  Description of Artificial Sequence: Synthetic oligonucleotide
gccgcccuucccuggcgag

SEQ ID NO: 1563757 - RNA, 19 nt, Artificial Sequence
  Description of Artificial Sequence: Synthetic oligonucleotide
cccgaaccauauccugcug

SEQ ID NO: 1563758 - RNA, 19 nt, Artificial Sequence
  Description of Artificial Sequence: Synthetic oligonucleotide
ccgaaccauauccugcugu

SEQ ID NO: 1563759 - RNA, 19 nt, Artificial Sequence
  Description of Artificial Sequence: Synthetic oligonucleotide
ggcggcuacgaggccgcug

SEQ ID NO: 1563760 - RNA, 19 nt, Artificial Sequence
  Description of Artificial Sequence: Synthetic oligonucleotide
gccugacccgaaccauauc

SEQ ID NO: 1563761 - RNA, 19 nt, Artificial Sequence
  Description of Artificial Sequence: Synthetic oligonucleotide
cgcggggacagguguccag

SEQ ID NO: 1563762 - RNA, 19 nt, Artificial Sequence
  Description of Artificial Sequence: Synthetic oligonucleotide
gcucgcggggacagguguc

SEQ ID NO: 1563763 - RNA, 19 nt, Artificial Sequence
  Description of Artificial Sequence: Synthetic oligonucleotide
cugcgucaacugcuucagu

SEQ ID NO: 1563764 - RNA, 19 nt, Artificial Sequence
  Description of Artificial Sequence: Synthetic oligonucleotide
cccaggaccuagcauggau

SEQ ID NO: 1563765 - RNA, 19 nt, Artificial Sequence
  Description of Artificial Sequence: Synthetic oligonucleotide
gcgcugcggucauccacca

SEQ ID NO: 1563766 - RNA, 19 nt, Artificial Sequence
  Description of Artificial Sequence: Synthetic oligonucleotide
cccaauuagccucgucuuu

SEQ ID NO: 1563767 - RNA, 19 nt, Artificial Sequence
  Description of Artificial Sequence: Synthetic oligonucleotide
cgauagucacgggugggaa

SEQ ID NO: 1563768 - RNA, 19 nt, Artificial Sequence
  Description of Artificial Sequence: Synthetic oligonucleotide
ccgcuucauaagucaacgu

SEQ ID NO: 1563769 - RNA, 19 nt, Artificial Sequence
  Description of Artificial Sequence: Synthetic oligonucleotide
cacuacgggcuuggcauuu

SEQ ID NO: 1563770 - RNA, 19 nt, Artificial Sequence
  Description of Artificial Sequence: Synthetic oligonucleotide
gccggagaccauggucgca

SEQ ID NO: 1563771 - RNA, 19 nt, Artificial Sequence
  Description of Artificial Sequence: Synthetic oligonucleotide
gcgcgacagcaggcgggcg

SEQ ID NO: 1563772 - RNA, 19 nt, Artificial Sequence
  Description of Artificial Sequence: Synthetic oligonucleotide
ggugugucuugccgcccuu

SEQ ID NO: 1563773 - RNA, 19 nt, Artificial Sequence
  Description of Artificial Sequence: Synthetic oligonucleotide
cagcggcgagcgcugcggu

SEQ ID NO: 1563774 - RNA, 19 nt, Artificial Sequence
  Description of Artificial Sequence: Synthetic oligonucleotide
ccacgaguuuugugccaua

SEQ ID NO: 1563775 - RNA, 19 nt, Artificial Sequence
  Description of Artificial Sequence: Synthetic oligonucleotide
cccacgaguuuugugccau

SEQ ID NO: 1563776 - RNA, 19 nt, Artificial Sequence
  Description of Artificial Sequence: Synthetic oligonucleotide
ccgcacucugaagggcaga

SEQ ID NO: 1563777 - RNA, 19 nt, Artificial Sequence
  Description of Artificial Sequence: Synthetic oligonucleotide
cgcucgcggggacaggugu

SEQ ID NO: 1563778 - RNA, 19 nt, Artificial Sequence
  Description of Artificial Sequence: Synthetic oligonucleotide
ggcgagcgcugcggucauc

SEQ ID NO: 1563779 - RNA, 19 nt, Artificial Sequence
  Description of Artificial Sequence: Synthetic oligonucleotide
cgcccuucccuggcgaggu

SEQ ID NO: 1563780 - RNA, 19 nt, Artificial Sequence
  Description of Artificial Sequence: Synthetic oligonucleotide
gggcggcuacgaggccgcu

SEQ ID NO: 1563781 - RNA, 19 nt, Artificial Sequence
  Description of Artificial Sequence: Synthetic oligonucleotide
cggcuacgaggccgcugcu

SEQ ID NO: 1563782 - RNA, 19 nt, Artificial Sequence
  Description of Artificial Sequence: Synthetic oligonucleotide
cggcgagcgcugcggucau

SEQ ID NO: 1563783 - RNA, 19 nt, Artificial Sequence
  Description of Artificial Sequence: Synthetic oligonucleotide
aacuuaacgauacaauugc

SEQ ID NO: 1563784 - RNA, 19 nt, Artificial Sequence
  Description of Artificial Sequence: Synthetic oligonucleotide
uuagcauuugccaaaaugg

SEQ ID NO: 1563785 - RNA, 19 nt, Artificial Sequence
  Description of Artificial Sequence: Synthetic oligonucleotide
aaccuguaaaucuacagcc

SEQ ID NO: 1563786 - RNA, 19 nt, Artificial Sequence
  Description of Artificial Sequence: Synthetic oligonucleotide
uuaaacauauauaaggaug

SEQ ID NO: 1563787 - RNA, 19 nt, Artificial Sequence
  Description of Artificial Sequence: Synthetic oligonucleotide
auguaaacuacuuuggggc

SEQ ID NO: 1563788 - RNA, 19 nt, Artificial Sequence
  Description of Artificial Sequence: Synthetic oligonucleotide
aauaugaccaucuggaccu

SEQ ID NO: 1563789 - RNA, 19 nt, Artificial Sequence
  Description of Artificial Sequence: Synthetic oligonucleotide
agaauuacaagccucauug

SEQ ID NO: 1563790 - RNA, 19 nt, Artificial Sequence
  Description of Artificial Sequence: Synthetic oligonucleotide
uauacuucuuuauuaaggg

SEQ ID NO: 1563791 - RNA, 19 nt, Artificial Sequence
  Description of Artificial Sequence: Synthetic oligonucleotide
aacgauguaaacuacuuug

SEQ ID NO: 1563792 - RNA, 19 nt, Artificial Sequence
  Description of Artificial Sequence: Synthetic oligonucleotide
uuuacagcuaaguauaaag

SEQ ID NO: 1563793 - RNA, 19 nt, Artificial Sequence
  Description of Artificial Sequence: Synthetic oligonucleotide
uuaaucuuguucuugauac

SEQ ID NO: 1563794 - RNA, 19 nt, Artificial Sequence
  Description of Artificial Sequence: Synthetic oligonucleotide
gaguuuauuguucacaugc

SEQ ID NO: 1563795 - RNA, 19 nt, Artificial Sequence
  Description of Artificial Sequence: Synthetic oligonucleotide
uaaacauauauaaggauga

SEQ ID NO: 1563796 - RNA, 19 nt, Artificial Sequence
  Description of Artificial Sequence: Synthetic oligonucleotide
uauaacauccuaauggugu

SEQ ID NO: 1563797 - RNA, 19 nt, Artificial Sequence
  Description of Artificial Sequence: Synthetic oligonucleotide
gauguaaacuacuuugggg

SEQ ID NO: 1563798 - RNA, 19 nt, Artificial Sequence
  Description of Artificial Sequence: Synthetic oligonucleotide
aaaugcaugugggugaugc

SEQ ID NO: 1563799 - RNA, 19 nt, Artificial Sequence
  Description of Artificial Sequence: Synthetic oligonucleotide
uuaauaaucagaaaauguu

SEQ ID NO: 1563800 - RNA, 19 nt, Artificial Sequence
  Description of Artificial Sequence: Synthetic oligonucleotide
aaaguacuacauaagaagg

SEQ ID NO: 1563801 - RNA, 19 nt, Artificial Sequence
  Description of Artificial Sequence: Synthetic oligonucleotide
agaauauacauuccaaaag

SEQ ID NO: 1563802 - RNA, 19 nt, Artificial Sequence
  Description of Artificial Sequence: Synthetic oligonucleotide
cuugguaaugaauagcagg

SEQ ID NO: 1563803 - RNA, 19 nt, Artificial Sequence
  Description of Artificial Sequence: Synthetic oligonucleotide
uuuauaacauccuaauggu

SEQ ID NO: 1563804 - RNA, 19 nt, Artificial Sequence
  Description of Artificial Sequence: Synthetic oligonucleotide
aagaauauacauuccaaaa

SEQ ID NO: 1563805 - RNA, 19 nt, Artificial Sequence
  Description of Artificial Sequence: Synthetic oligonucleotide
aaucagaaaauguucuuca

SEQ ID NO: 1563806 - RNA, 19 nt, Artificial Sequence
  Description of Artificial Sequence: Synthetic oligonucleotide
agcacaagagguucaaacc

SEQ ID NO: 1563807 - RNA, 19 nt, Artificial Sequence
  Description of Artificial Sequence: Synthetic oligonucleotide
aggaucuauaucaacaugc

SEQ ID NO: 1563808 - RNA, 19 nt, Artificial Sequence
  Description of Artificial Sequence: Synthetic oligonucleotide
aaagaauauacauuccaaa

SEQ ID NO: 1563809 - RNA, 19 nt, Artificial Sequence
  Description of Artificial Sequence: Synthetic oligonucleotide
aauuguucggggaugcugc

SEQ ID NO: 1563810 - RNA, 19 nt, Artificial Sequence
  Description of Artificial Sequence: Synthetic oligonucleotide
uuaacgauacaauugcaga

SEQ ID NO: 1563811 - RNA, 19 nt, Artificial Sequence
  Description of Artificial Sequence: Synthetic oligonucleotide
ucuuucauacuguacagug

SEQ ID NO: 1563812 - RNA, 19 nt, Artificial Sequence
  Description of Artificial Sequence: Synthetic oligonucleotide
aauaccugucuuuuccagg

SEQ ID NO: 1563813 - RNA, 19 nt, Artificial Sequence
  Description of Artificial Sequence: Synthetic oligonucleotide
ucugaaacgauguaaacua

SEQ ID NO: 1563814 - RNA, 19 nt, Artificial Sequence
  Description of Artificial Sequence: Synthetic oligonucleotide
aagcaauaugaccaucugg

SEQ ID NO: 1563815 - RNA, 19 nt, Artificial Sequence
  Description of Artificial Sequence: Synthetic oligonucleotide
aaaggucuauuccuccagc

SEQ ID NO: 1563816 - RNA, 19 nt, Artificial Sequence
  Description of Artificial Sequence: Synthetic oligonucleotide
uuacaagccucauuguugg

SEQ ID NO: 1563817 - RNA, 19 nt, Artificial Sequence
  Description of Artificial Sequence: Synthetic oligonucleotide
uuuugauaagucuccauca

SEQ ID NO: 1563818 - RNA, 19 nt, Artificial Sequence
  Description of Artificial Sequence: Synthetic oligonucleotide
uuacagcuaaguauaaagc

SEQ ID NO: 1563819 - RNA, 19 nt, Artificial Sequence
  Description of Artificial Sequence: Synthetic oligonucleotide
uaucccuuuaaacauauau

SEQ ID NO: 1563820 - RNA, 19 nt, Artificial Sequence
  Description of Artificial Sequence: Synthetic oligonucleotide
aaaguagcaucuucaucac

SEQ ID NO: 1563821 - RNA, 19 nt, Artificial Sequence
  Description of Artificial Sequence: Synthetic oligonucleotide
ucuuggaaguccuacauac

SEQ ID NO: 1563822 - RNA, 19 nt, Artificial Sequence
  Description of Artificial Sequence: Synthetic oligonucleotide
ugaugcacagcucuuagca

SEQ ID NO: 1563823 - RNA, 19 nt, Artificial Sequence
  Description of Artificial Sequence: Synthetic oligonucleotide
cuuaacgauacaauugcag

SEQ ID NO: 1563824 - RNA, 19 nt, Artificial Sequence
  Description of Artificial Sequence: Synthetic oligonucleotide
ucaagaauuacaagccuca

SEQ ID NO: 1563825 - RNA, 19 nt, Artificial Sequence
  Description of Artificial Sequence: Synthetic oligonucleotide
ucauccauguuaaaagucu

SEQ ID NO: 1563826 - RNA, 19 nt, Artificial Sequence
  Description of Artificial Sequence: Synthetic oligonucleotide
ugauaagucuccaucaaaa

SEQ ID NO: 1563827 - RNA, 19 nt, Artificial Sequence
  Description of Artificial Sequence: Synthetic oligonucleotide
uacagcuaaguauaaagcu

SEQ ID NO: 1563828 - RNA, 19 nt, Artificial Sequence
  Description of Artificial Sequence: Synthetic oligonucleotide
caugugauuaauuccuucc

SEQ ID NO: 1563829 - RNA, 19 nt, Artificial Sequence
  Description of Artificial Sequence: Synthetic oligonucleotide
aacaguuagagccaugguu

SEQ ID NO: 1563830 - RNA, 19 nt, Artificial Sequence
  Description of Artificial Sequence: Synthetic oligonucleotide
aaauaccugucuuuuccag

SEQ ID NO: 1563831 - RNA, 19 nt, Artificial Sequence
  Description of Artificial Sequence: Synthetic oligonucleotide
uauauaaggaugauuuaua

SEQ ID NO: 1563832 - RNA, 19 nt, Artificial Sequence
  Description of Artificial Sequence: Synthetic oligonucleotide
uuaucauugccaauauacu

SEQ ID NO: 1563833 - RNA, 19 nt, Artificial Sequence
  Description of Artificial Sequence: Synthetic oligonucleotide
uacuacauaagaaggugca

SEQ ID NO: 1563834 - RNA, 19 nt, Artificial Sequence
  Description of Artificial Sequence: Synthetic oligonucleotide
gaacuuaacgauacaauug

SEQ ID NO: 1563835 - RNA, 19 nt, Artificial Sequence
  Description of Artificial Sequence: Synthetic oligonucleotide
auaguuaucaagaauuaca

SEQ ID NO: 1563836 - RNA, 19 nt, Artificial Sequence
  Description of Artificial Sequence: Synthetic oligonucleotide
aaagcaauaugaccaucug

SEQ ID NO: 1563837 - RNA, 19 nt, Artificial Sequence
  Description of Artificial Sequence: Synthetic oligonucleotide
ugaacuuaacgauacaauu

SEQ ID NO: 1563838 - RNA, 19 nt, Artificial Sequence
  Description of Artificial Sequence: Synthetic oligonucleotide
ugaauagcaggaccucugg

SEQ ID NO: 1563839 - RNA, 19 nt, Artificial Sequence
  Description of Artificial Sequence: Synthetic oligonucleotide
uccaacuacaccagaacga

SEQ ID NO: 1563840 - RNA, 19 nt, Artificial Sequence
  Description of Artificial Sequence: Synthetic oligonucleotide
uuuauuguucacaugcauu

SEQ ID NO: 1563841 - RNA, 19 nt, Artificial Sequence
  Description of Artificial Sequence: Synthetic oligonucleotide
uaaacuuuauuuaucccuu

SEQ ID NO: 1563842 - RNA, 19 nt, Artificial Sequence
  Description of Artificial Sequence: Synthetic oligonucleotide
uuauaacauccuaauggug

SEQ ID NO: 1563843 - RNA, 19 nt, Artificial Sequence
  Description of Artificial Sequence: Synthetic oligonucleotide
cuuuugauaagucuccauc

SEQ ID NO: 1563844 - RNA, 19 nt, Artificial Sequence
  Description of Artificial Sequence: Synthetic oligonucleotide
aacgauacaauugcagaug

SEQ ID NO: 1563845 - RNA, 19 nt, Artificial Sequence
  Description of Artificial Sequence: Synthetic oligonucleotide
ucuauaucaacaugcuuaa

SEQ ID NO: 1563846 - RNA, 19 nt, Artificial Sequence
  Description of Artificial Sequence: Synthetic oligonucleotide
ccacauauaagaaugguag

SEQ ID NO: 1563847 - RNA, 19 nt, Artificial Sequence
  Description of Artificial Sequence: Synthetic oligonucleotide
ugugcaccuguuaugagga

SEQ ID NO: 1563848 - RNA, 19 nt, Artificial Sequence
  Description of Artificial Sequence: Synthetic oligonucleotide
uaaagcuuaucauugccaa

SEQ ID NO: 1563849 - RNA, 19 nt, Artificial Sequence
  Description of Artificial Sequence: Synthetic oligonucleotide
ugaaacgauguaaacuacu

SEQ ID NO: 1563850 - RNA, 19 nt, Artificial Sequence
  Description of Artificial Sequence: Synthetic oligonucleotide
gaugcacaaaagaauauac

SEQ ID NO: 1563851 - RNA, 19 nt, Artificial Sequence
  Description of Artificial Sequence: Synthetic oligonucleotide
uuugaacuuaacgauacaa

SEQ ID NO: 1563852 - RNA, 19 nt, Artificial Sequence
  Description of Artificial Sequence: Synthetic oligonucleotide
aguuaucaagaauuacaag

SEQ ID NO: 1563853 - RNA, 19 nt, Artificial Sequence
  Description of Artificial Sequence: Synthetic oligonucleotide
aucuacagccuccaacuac

SEQ ID NO: 1563854 - RNA, 19 nt, Artificial Sequence
  Description of Artificial Sequence: Synthetic oligonucleotide
uaucaagaauuacaagccu

SEQ ID NO: 1563855 - RNA, 19 nt, Artificial Sequence
  Description of Artificial Sequence: Synthetic oligonucleotide
cuaaacuggauccuggcuc

SEQ ID NO: 1563856 - RNA, 19 nt, Artificial Sequence
  Description of Artificial Sequence: Synthetic oligonucleotide
uauaaggaugauuuauaaa

SEQ ID NO: 1563857 - RNA, 19 nt, Artificial Sequence
  Description of Artificial Sequence: Synthetic oligonucleotide
aaugcaucgcauucugccu

SEQ ID NO: 1563858 - RNA, 19 nt, Artificial Sequence
  Description of Artificial Sequence: Synthetic oligonucleotide
agcaauaugaccaucugga

SEQ ID NO: 1563859 - RNA, 19 nt, Artificial Sequence
  Description of Artificial Sequence: Synthetic oligonucleotide
auauaaggaugauuuauaa

SEQ ID NO: 1563860 - RNA, 19 nt, Artificial Sequence
  Description of Artificial Sequence: Synthetic oligonucleotide
uguugguaagcccagugaa

SEQ ID NO: 1563861 - RNA, 19 nt, Artificial Sequence
  Description of Artificial Sequence: Synthetic oligonucleotide
uucacaugcauuaaaccuu

SEQ ID NO: 1563862 - RNA, 19 nt, Artificial Sequence
  Description of Artificial Sequence: Synthetic oligonucleotide
agcgugcacuuacagauac

SEQ ID NO: 1563863 - RNA, 19 nt, Artificial Sequence
  Description of Artificial Sequence: Synthetic oligonucleotide
uuugauaagucuccaucaa

SEQ ID NO: 1563864 - RNA, 19 nt, Artificial Sequence
  Description of Artificial Sequence: Synthetic oligonucleotide
cugcugaaaagcugaaacg

SEQ ID NO: 1563865 - RNA, 19 nt, Artificial Sequence
  Description of Artificial Sequence: Synthetic oligonucleotide
ugugguacucuauuaauuu

SEQ ID NO: 1563866 - RNA, 19 nt, Artificial Sequence
  Description of Artificial Sequence: Synthetic oligonucleotide
uuuaucccuuuaaacauau

SEQ ID NO: 1563867 - RNA, 19 nt, Artificial Sequence
  Description of Artificial Sequence: Synthetic oligonucleotide
acaguuagagccaugguug

SEQ ID NO: 1563868 - RNA, 19 nt, Artificial Sequence
  Description of Artificial Sequence: Synthetic oligonucleotide
auaacauccuaauggugug

SEQ ID NO: 1563869 - RNA, 19 nt, Artificial Sequence
  Description of Artificial Sequence: Synthetic oligonucleotide
ugugauuaauuccuuccuc

SEQ ID NO: 1563870 - RNA, 19 nt, Artificial Sequence
  Description of Artificial Sequence: Synthetic oligonucleotide
aaaagcugaaacgguccac

SEQ ID NO: 1563871 - RNA, 19 nt, Artificial Sequence
  Description of Artificial Sequence: Synthetic oligonucleotide
cuccaacuacaccagaacg

SEQ ID NO: 1563872 - RNA, 19 nt, Artificial Sequence
  Description of Artificial Sequence: Synthetic oligonucleotide
aacgaggguagcuaacgca

SEQ ID NO: 1563873 - RNA, 19 nt, Artificial Sequence
  Description of Artificial Sequence: Synthetic oligonucleotide
uaucauugccaauauacuu

SEQ ID NO: 1563874 - RNA, 19 nt, Artificial Sequence
  Description of Artificial Sequence: Synthetic oligonucleotide
aaauuguucggggaugcug

SEQ ID NO: 1563875 - RNA, 19 nt, Artificial Sequence
  Description of Artificial Sequence: Synthetic oligonucleotide
acaugugauuaauuccuuc

SEQ ID NO: 1563876 - RNA, 19 nt, Artificial Sequence
  Description of Artificial Sequence: Synthetic oligonucleotide
uguaaacuacuuuggggca

SEQ ID NO: 1563877 - RNA, 19 nt, Artificial Sequence
  Description of Artificial Sequence: Synthetic oligonucleotide
gguaaugaauagcaggacc

SEQ ID NO: 1563878 - RNA, 19 nt, Artificial Sequence
  Description of Artificial Sequence: Synthetic oligonucleotide
aggaugauuucuuggaagu

SEQ ID NO: 1563879 - RNA, 19 nt, Artificial Sequence
  Description of Artificial Sequence: Synthetic oligonucleotide
gauacuaaacuggauccug

SEQ ID NO: 1563880 - RNA, 19 nt, Artificial Sequence
  Description of Artificial Sequence: Synthetic oligonucleotide
cacauauaagaaugguagc

SEQ ID NO: 1563881 - RNA, 19 nt, Artificial Sequence
  Description of Artificial Sequence: Synthetic oligonucleotide
aucaagaauuacaagccuc

SEQ ID NO: 1563882 - RNA, 19 nt, Artificial Sequence
  Description of Artificial Sequence: Synthetic oligonucleotide
uccacauauaagaauggua

SEQ ID NO: 1563883 - RNA, 19 nt, Artificial Sequence
  Description of Artificial Sequence: Synthetic oligonucleotide
auuacaagccucauuguug

SEQ ID NO: 1563884 - RNA, 19 nt, Artificial Sequence
  Description of Artificial Sequence: Synthetic oligonucleotide
auauuuagcauuugccaaa

SEQ ID NO: 1563885 - RNA, 19 nt, Artificial Sequence
  Description of Artificial Sequence: Synthetic oligonucleotide
ucuaaaguagcaucuucau

SEQ ID NO: 1563886 - RNA, 19 nt, Artificial Sequence
  Description of Artificial Sequence: Synthetic oligonucleotide
cauagaagcgugcacuuac

SEQ ID NO: 1563887 - RNA, 19 nt, Artificial Sequence
  Description of Artificial Sequence: Synthetic oligonucleotide
ucugguguccugaugcuac

SEQ ID NO: 1563888 - RNA, 19 nt, Artificial Sequence
  Description of Artificial Sequence: Synthetic oligonucleotide
uagcauuugccaaaauggu

SEQ ID NO: 1563889 - RNA, 19 nt, Artificial Sequence
  Description of Artificial Sequence: Synthetic oligonucleotide
acuuacagauacuuucuga

SEQ ID NO: 1563890 - RNA, 19 nt, Artificial Sequence
  Description of Artificial Sequence: Synthetic oligonucleotide
aaagcugaaacgguccaca

SEQ ID NO: 1563891 - RNA, 19 nt, Artificial Sequence
  Description of Artificial Sequence: Synthetic oligonucleotide
auauacauuccaaaaguga

SEQ ID NO: 1563892 - RNA, 19 nt, Artificial Sequence
  Description of Artificial Sequence: Synthetic oligonucleotide
auccuaauggugugcuccc

SEQ ID NO: 1563893 - RNA, 19 nt, Artificial Sequence
  Description of Artificial Sequence: Synthetic oligonucleotide
aaguacuacauaagaaggu

SEQ ID NO: 1563894 - RNA, 19 nt, Artificial Sequence
  Description of Artificial Sequence: Synthetic oligonucleotide
uccacgaguuuauuguuca

SEQ ID NO: 1563895 - RNA, 19 nt, Artificial Sequence
  Description of Artificial Sequence: Synthetic oligonucleotide
aaggucuauuccuccagcu

SEQ ID NO: 1563896 - RNA, 19 nt, Artificial Sequence
  Description of Artificial Sequence: Synthetic oligonucleotide
auaccugucuuuuccaggu

SEQ ID NO: 1563897 - RNA, 19 nt, Artificial Sequence
  Description of Artificial Sequence: Synthetic oligonucleotide
auugccaauauacuucuuu

SEQ ID NO: 1563898 - RNA, 19 nt, Artificial Sequence
  Description of Artificial Sequence: Synthetic oligonucleotide
uguucggggaugcugcuga

SEQ ID NO: 1563899 - RNA, 19 nt, Artificial Sequence
  Description of Artificial Sequence: Synthetic oligonucleotide
agaacgaggguagcuaacg

SEQ ID NO: 1563900 - RNA, 19 nt, Artificial Sequence
  Description of Artificial Sequence: Synthetic oligonucleotide
gaagcgugcacuuacagau

SEQ ID NO: 1563901 - RNA, 19 nt, Artificial Sequence
  Description of Artificial Sequence: Synthetic oligonucleotide
uagaagcgugcacuuacag

SEQ ID NO: 1563902 - RNA, 19 nt, Artificial Sequence
  Description of Artificial Sequence: Synthetic oligonucleotide
aaacgauguaaacuacuuu

SEQ ID NO: 1563903 - RNA, 19 nt, Artificial Sequence
  Description of Artificial Sequence: Synthetic oligonucleotide
uugauaagucuccaucaaa

SEQ ID NO: 1563904 - RNA, 19 nt, Artificial Sequence
  Description of Artificial Sequence: Synthetic oligonucleotide
aagcuuaucauugccaaua

SEQ ID NO: 1563905 - RNA, 19 nt, Artificial Sequence
  Description of Artificial Sequence: Synthetic oligonucleotide
auaagaaggugcauagaag

SEQ ID NO: 1563906 - RNA, 19 nt, Artificial Sequence
  Description of Artificial Sequence: Synthetic oligonucleotide
auauaagaaugguagcuuu

SEQ ID NO: 1563907 - RNA, 19 nt, Artificial Sequence
  Description of Artificial Sequence: Synthetic oligonucleotide
cauccuaauggugugcucc

SEQ ID NO: 1563908 - RNA, 19 nt, Artificial Sequence
  Description of Artificial Sequence: Synthetic oligonucleotide
uguccugaugcuacugcag

SEQ ID NO: 1563909 - RNA, 19 nt, Artificial Sequence
  Description of Artificial Sequence: Synthetic oligonucleotide
uguuaggaucuauaucaac

SEQ ID NO: 1563910 - RNA, 19 nt, Artificial Sequence
  Description of Artificial Sequence: Synthetic oligonucleotide
augugauuaauuccuuccu

SEQ ID NO: 1563911 - RNA, 19 nt, Artificial Sequence
  Description of Artificial Sequence: Synthetic oligonucleotide
agguucaaaccuguaaauc

SEQ ID NO: 1563912 - RNA, 19 nt, Artificial Sequence
  Description of Artificial Sequence: Synthetic oligonucleotide
acgauacaauugcagaugu

SEQ ID NO: 1563913 - RNA, 19 nt, Artificial Sequence
  Description of Artificial Sequence: Synthetic oligonucleotide
acgauguaaacuacuuugg

SEQ ID NO: 1563914 - RNA, 19 nt, Artificial Sequence
  Description of Artificial Sequence: Synthetic oligonucleotide
acgaguuuauuguucacau

SEQ ID NO: 1563915 - RNA, 19 nt, Artificial Sequence
  Description of Artificial Sequence: Synthetic oligonucleotide
ucccuagcauccaucacug

SEQ ID NO: 1563916 - RNA, 19 nt, Artificial Sequence
  Description of Artificial Sequence: Synthetic oligonucleotide
uaacgcacccggcaacccg

SEQ ID NO: 1563917 - RNA, 19 nt, Artificial Sequence
  Description of Artificial Sequence: Synthetic oligonucleotide
agcucuuagcacaagaggu

SEQ ID NO: 1563918 - RNA, 19 nt, Artificial Sequence
  Description of Artificial Sequence: Synthetic oligonucleotide
cucauccauguuaaaaguc

SEQ ID NO: 1563919 - RNA, 19 nt, Artificial Sequence
  Description of Artificial Sequence: Synthetic oligonucleotide
aacauccuaauggugugcu

SEQ ID NO: 1563920 - RNA, 19 nt, Artificial Sequence
  Description of Artificial Sequence: Synthetic oligonucleotide
ucuuagcacaagagguuca

SEQ ID NO: 1563921 - RNA, 19 nt, Artificial Sequence
  Description of Artificial Sequence: Synthetic oligonucleotide
ugaugcuacugcagaaaga

SEQ ID NO: 1563922 - RNA, 19 nt, Artificial Sequence
  Description of Artificial Sequence: Synthetic oligonucleotide
gaaaagcugaaacggucca

SEQ ID NO: 1563923 - RNA, 19 nt, Artificial Sequence
  Description of Artificial Sequence: Synthetic oligonucleotide
uugugugcaccuguuauga

SEQ ID NO: 1563924 - RNA, 19 nt, Artificial Sequence
  Description of Artificial Sequence: Synthetic oligonucleotide
acgaggguagcuaacgcac

SEQ ID NO: 1563925 - RNA, 19 nt, Artificial Sequence
  Description of Artificial Sequence: Synthetic oligonucleotide
cacaagagguucaaaccug

SEQ ID NO: 1563926 - RNA, 19 nt, Artificial Sequence
  Description of Artificial Sequence: Synthetic oligonucleotide
auaaagcuuaucauugcca

SEQ ID NO: 1563927 - RNA, 19 nt, Artificial Sequence
  Description of Artificial Sequence: Synthetic oligonucleotide
agaagcgugcacuuacaga

SEQ ID NO: 1563928 - RNA, 19 nt, Artificial Sequence
  Description of Artificial Sequence: Synthetic oligonucleotide
aacgcacccggcaacccgc

SEQ ID NO: 1563929 - RNA, 19 nt, Artificial Sequence
  Description of Artificial Sequence: Synthetic oligonucleotide
uggaccuauuccuccaaca

SEQ ID NO: 1563930 - RNA, 19 nt, Artificial Sequence
  Description of Artificial Sequence: Synthetic oligonucleotide
cuugugugcaccuguuaug

SEQ ID NO: 1563931 - RNA, 19 nt, Artificial Sequence
  Description of Artificial Sequence: Synthetic oligonucleotide
aauucuaaaguagcaucuu

SEQ ID NO: 1563932 - RNA, 19 nt, Artificial Sequence
  Description of Artificial Sequence: Synthetic oligonucleotide
guacuacauaagaaggugc

SEQ ID NO: 1563933 - RNA, 19 nt, Artificial Sequence
  Description of Artificial Sequence: Synthetic oligonucleotide
auccuggcucauugaaagc

SEQ ID NO: 1563934 - RNA, 19 nt, Artificial Sequence
  Description of Artificial Sequence: Synthetic oligonucleotide
uggcacuuuugauaagucu

SEQ ID NO: 1563935 - RNA, 19 nt, Artificial Sequence
  Description of Artificial Sequence: Synthetic oligonucleotide
aaugcaugugggugaugca

SEQ ID NO: 1563936 - RNA, 19 nt, Artificial Sequence
  Description of Artificial Sequence: Synthetic oligonucleotide
aaggcaacuacaggcaaaa

SEQ ID NO: 1563937 - RNA, 19 nt, Artificial Sequence
  Description of Artificial Sequence: Synthetic oligonucleotide
caguuagagccaugguugg

SEQ ID NO: 1563938 - RNA, 19 nt, Artificial Sequence
  Description of Artificial Sequence: Synthetic oligonucleotide
aaacauauauaaggaugau

SEQ ID NO: 1563939 - RNA, 19 nt, Artificial Sequence
  Description of Artificial Sequence: Synthetic oligonucleotide
ccagguuugaacuuaacga

SEQ ID NO: 1563940 - RNA, 19 nt, Artificial Sequence
  Description of Artificial Sequence: Synthetic oligonucleotide
aaacgguccacaugugauu

SEQ ID NO: 1563941 - RNA, 19 nt, Artificial Sequence
  Description of Artificial Sequence: Synthetic oligonucleotide
aguccuacauacucaucca

SEQ ID NO: 1563942 - RNA, 19 nt, Artificial Sequence
  Description of Artificial Sequence: Synthetic oligonucleotide
ugauacuaaacuggauccu

SEQ ID NO: 1563943 - RNA, 19 nt, Artificial Sequence
  Description of Artificial Sequence: Synthetic oligonucleotide
auuaagggcccugacccag

SEQ ID NO: 1563944 - RNA, 19 nt, Artificial Sequence
  Description of Artificial Sequence: Synthetic oligonucleotide
gaacgaggguagcuaacgc

SEQ ID NO: 1563945 - RNA, 19 nt, Artificial Sequence
  Description of Artificial Sequence: Synthetic oligonucleotide
ugcaaaucuucagcguucc

SEQ ID NO: 1563946 - RNA, 19 nt, Artificial Sequence
  Description of Artificial Sequence: Synthetic oligonucleotide
guagcuaacgcacccggca

SEQ ID NO: 1563947 - RNA, 19 nt, Artificial Sequence
  Description of Artificial Sequence: Synthetic oligonucleotide
aguuagagccaugguuggc

SEQ ID NO: 1563948 - RNA, 19 nt, Artificial Sequence
  Description of Artificial Sequence: Synthetic oligonucleotide
gugggugaugcacaaaaga

SEQ ID NO: 1563949 - RNA, 19 nt, Artificial Sequence
  Description of Artificial Sequence: Synthetic oligonucleotide
agcuaacgcacccggcaac

SEQ ID NO: 1563950 - RNA, 19 nt, Artificial Sequence
  Description of Artificial Sequence: Synthetic oligonucleotide
aaguagcaucuucaucaca

SEQ ID NO: 1563951 - RNA, 19 nt, Artificial Sequence
  Description of Artificial Sequence: Synthetic oligonucleotide
aaggugcauagaagcgugc

SEQ ID NO: 1563952 - RNA, 19 nt, Artificial Sequence
  Description of Artificial Sequence: Synthetic oligonucleotide
augcaucgcauucugccug

SEQ ID NO: 1563953 - RNA, 19 nt, Artificial Sequence
  Description of Artificial Sequence: Synthetic oligonucleotide
aucgcauucugccugcaaa

SEQ ID NO: 1563954 - RNA, 19 nt, Artificial Sequence
  Description of Artificial Sequence: Synthetic oligonucleotide
agcguucccaucaaggaug

SEQ ID NO: 1563955 - RNA, 19 nt, Artificial Sequence
  Description of Artificial Sequence: Synthetic oligonucleotide
uuccacauauaagaauggu

SEQ ID NO: 1563956 - RNA, 19 nt, Artificial Sequence
  Description of Artificial Sequence: Synthetic oligonucleotide
ugugcucccuguugguaag

SEQ ID NO: 1563957 - RNA, 19 nt, Artificial Sequence
  Description of Artificial Sequence: Synthetic oligonucleotide
guaaugaauagcaggaccu

SEQ ID NO: 1563958 - RNA, 19 nt, Artificial Sequence
  Description of Artificial Sequence: Synthetic oligonucleotide
gguucaaaccuguaaaucu

SEQ ID NO: 1563959 - RNA, 19 nt, Artificial Sequence
  Description of Artificial Sequence: Synthetic oligonucleotide
aacuacaggcaaaaugcau

SEQ ID NO: 1563960 - RNA, 19 nt, Artificial Sequence
  Description of Artificial Sequence: Synthetic oligonucleotide
caaaugcaucgcauucugc

SEQ ID NO: 1563961 - RNA, 19 nt, Artificial Sequence
  Description of Artificial Sequence: Synthetic oligonucleotide
gguuugaacuuaacgauac

SEQ ID NO: 1563962 - RNA, 19 nt, Artificial Sequence
  Description of Artificial Sequence: Synthetic oligonucleotide
caacuacaccagaacgagg

SEQ ID NO: 1563963 - RNA, 19 nt, Artificial Sequence
  Description of Artificial Sequence: Synthetic oligonucleotide
auacaauugcagauguacu

SEQ ID NO: 1563964 - RNA, 19 nt, Artificial Sequence
  Description of Artificial Sequence: Synthetic oligonucleotide
aagaugacuaaggcaacua

SEQ ID NO: 1563965 - RNA, 19 nt, Artificial Sequence
  Description of Artificial Sequence: Synthetic oligonucleotide
aaugccuugugugcaccug

SEQ ID NO: 1563966 - RNA, 19 nt, Artificial Sequence
  Description of Artificial Sequence: Synthetic oligonucleotide
uaaugaauagcaggaccuc

SEQ ID NO: 1563967 - RNA, 19 nt, Artificial Sequence
  Description of Artificial Sequence: Synthetic oligonucleotide
agcugaaacgguccacaug

SEQ ID NO: 1563968 - RNA, 19 nt, Artificial Sequence
  Description of Artificial Sequence: Synthetic oligonucleotide
acagcuaaguauaaagcuu

SEQ ID NO: 1563969 - RNA, 19 nt, Artificial Sequence
  Description of Artificial Sequence: Synthetic oligonucleotide
ggucuauuccuccagcuuc

SEQ ID NO: 1563970 - RNA, 19 nt, Artificial Sequence
  Description of Artificial Sequence: Synthetic oligonucleotide
gcuagagucuuuaaucuug

SEQ ID NO: 1563971 - RNA, 19 nt, Artificial Sequence
  Description of Artificial Sequence: Synthetic oligonucleotide
ugugugcaccuguuaugag

SEQ ID NO: 1563972 - RNA, 19 nt, Artificial Sequence
  Description of Artificial Sequence: Synthetic oligonucleotide
augcacaaaagaauauaca

SEQ ID NO: 1563973 - RNA, 19 nt, Artificial Sequence
  Description of Artificial Sequence: Synthetic oligonucleotide
gcugaaacgguccacaugu

SEQ ID NO: 1563974 - RNA, 19 nt, Artificial Sequence
  Description of Artificial Sequence: Synthetic oligonucleotide
uaacauccuaauggugugc

SEQ ID NO: 1563975 - RNA, 19 nt, Artificial Sequence
  Description of Artificial Sequence: Synthetic oligonucleotide
caagccucauuguugguga

SEQ ID NO: 1563976 - RNA, 19 nt, Artificial Sequence
  Description of Artificial Sequence: Synthetic oligonucleotide
guuagagccaugguuggca

SEQ ID NO: 1563977 - RNA, 19 nt, Artificial Sequence
  Description of Artificial Sequence: Synthetic oligonucleotide
cugcaaaucuucagcguuc

SEQ ID NO: 1563978 - RNA, 19 nt, Artificial Sequence
  Description of Artificial Sequence: Synthetic oligonucleotide
augaauagcaggaccucug

SEQ ID NO: 1563979 - RNA, 19 nt, Artificial Sequence
  Description of Artificial Sequence: Synthetic oligonucleotide
acauccuaauggugugcuc

SEQ ID NO: 1563980 - RNA, 19 nt, Artificial Sequence
  Description of Artificial Sequence: Synthetic oligonucleotide
cacuuacagauacuuucug

SEQ ID NO: 1563981 - RNA, 19 nt, Artificial Sequence
  Description of Artificial Sequence: Synthetic oligonucleotide
aaaauuguucggggaugcu

SEQ ID NO: 1563982 - RNA, 19 nt, Artificial Sequence
  Description of Artificial Sequence: Synthetic oligonucleotide
ugguaaugaauagcaggac

SEQ ID NO: 1563983 - RNA, 19 nt, Artificial Sequence
  Description of Artificial Sequence: Synthetic oligonucleotide
uggcuccacgaguuuauug

SEQ ID NO: 1563984 - RNA, 19 nt, Artificial Sequence
  Description of Artificial Sequence: Synthetic oligonucleotide
aacgguccacaugugauua

SEQ ID NO: 1563985 - RNA, 19 nt, Artificial Sequence
  Description of Artificial Sequence: Synthetic oligonucleotide
aagcugaaacgguccacau

SEQ ID NO: 1563986 - RNA, 19 nt, Artificial Sequence
  Description of Artificial Sequence: Synthetic oligonucleotide
cagcuaaguauaaagcuua

SEQ ID NO: 1563987 - RNA, 19 nt, Artificial Sequence
  Description of Artificial Sequence: Synthetic oligonucleotide
gaccuauuccuccaacaaa

SEQ ID NO: 1563988 - RNA, 19 nt, Artificial Sequence
  Description of Artificial Sequence: Synthetic oligonucleotide
ugcaucgcauucugccugc

SEQ ID NO: 1563989 - RNA, 19 nt, Artificial Sequence
  Description of Artificial Sequence: Synthetic oligonucleotide
guaaacuacuuuggggcac

SEQ ID NO: 1563990 - RNA, 19 nt, Artificial Sequence
  Description of Artificial Sequence: Synthetic oligonucleotide
ugucaucucuucagauuuc

SEQ ID NO: 1563991 - RNA, 19 nt, Artificial Sequence
  Description of Artificial Sequence: Synthetic oligonucleotide
uagcuaacgcacccggcaa

SEQ ID NO: 1563992 - RNA, 19 nt, Artificial Sequence
  Description of Artificial Sequence: Synthetic oligonucleotide
ucgcauucugccugcaaau

SEQ ID NO: 1563993 - RNA, 19 nt, Artificial Sequence
  Description of Artificial Sequence: Synthetic oligonucleotide
ucuucagcguucccaucaa

SEQ ID NO: 1563994 - RNA, 19 nt, Artificial Sequence
  Description of Artificial Sequence: Synthetic oligonucleotide
uccugaugcuacugcagaa

SEQ ID NO: 1563995 - RNA, 19 nt, Artificial Sequence
  Description of Artificial Sequence: Synthetic oligonucleotide
uccauagcuagagucuuua

SEQ ID NO: 1563996 - RNA, 19 nt, Artificial Sequence
  Description of Artificial Sequence: Synthetic oligonucleotide
ggugaugcacaaaagaaua

SEQ ID NO: 1563997 - RNA, 19 nt, Artificial Sequence
  Description of Artificial Sequence: Synthetic oligonucleotide
agcuagagucuuuaaucuu

SEQ ID NO: 1563998 - RNA, 19 nt, Artificial Sequence
  Description of Artificial Sequence: Synthetic oligonucleotide
cuuuugugguacucuauua

SEQ ID NO: 1563999 - RNA, 19 nt, Artificial Sequence
  Description of Artificial Sequence: Synthetic oligonucleotide
cuacauaagaaggugcaua

SEQ ID NO: 1564000 - RNA, 19 nt, Artificial Sequence
  Description of Artificial Sequence: Synthetic oligonucleotide
cuacuuuggggcacuguca

SEQ ID NO: 1564001 - RNA, 19 nt, Artificial Sequence
  Description of Artificial Sequence: Synthetic oligonucleotide
ucuggaccuauuccuccaa

SEQ ID NO: 1564002 - RNA, 19 nt, Artificial Sequence
  Description of Artificial Sequence: Synthetic oligonucleotide
gaauuacaagccucauugu

SEQ ID NO: 1564003 - RNA, 19 nt, Artificial Sequence
  Description of Artificial Sequence: Synthetic oligonucleotide
ggguagcuaacgcacccgg

SEQ ID NO: 1564004 - RNA, 19 nt, Artificial Sequence
  Description of Artificial Sequence: Synthetic oligonucleotide
gaaacgauguaaacuacuu

SEQ ID NO: 1564005 - RNA, 19 nt, Artificial Sequence
  Description of Artificial Sequence: Synthetic oligonucleotide
acuuaacgauacaauugca

SEQ ID NO: 1564006 - RNA, 19 nt, Artificial Sequence
  Description of Artificial Sequence: Synthetic oligonucleotide
ccaacuacaccagaacgag

SEQ ID NO: 1564007 - RNA, 19 nt, Artificial Sequence
  Description of Artificial Sequence: Synthetic oligonucleotide
cgauguaaacuacuuuggg

SEQ ID NO: 1564008 - RNA, 19 nt, Artificial Sequence
  Description of Artificial Sequence: Synthetic oligonucleotide
acuacauaagaaggugcau

SEQ ID NO: 1564009 - RNA, 19 nt, Artificial Sequence
  Description of Artificial Sequence: Synthetic oligonucleotide
aacuacuuuggggcacugu

SEQ ID NO: 1564010 - RNA, 19 nt, Artificial Sequence
  Description of Artificial Sequence: Synthetic oligonucleotide
cagaacgaggguagcuaac

SEQ ID NO: 1564011 - RNA, 19 nt, Artificial Sequence
  Description of Artificial Sequence: Synthetic oligonucleotide
caaaugccuugugugcacc

SEQ ID NO: 1564012 - RNA, 19 nt, Artificial Sequence
  Description of Artificial Sequence: Synthetic oligonucleotide
gcuuuauacagggcaaaug

SEQ ID NO: 1564013 - RNA, 19 nt, Artificial Sequence
  Description of Artificial Sequence: Synthetic oligonucleotide
auuguucggggaugcugcu

SEQ ID NO: 1564014 - RNA, 19 nt, Artificial Sequence
  Description of Artificial Sequence: Synthetic oligonucleotide
cuguugguaagcccaguga

SEQ ID NO: 1564015 - RNA, 19 nt, Artificial Sequence
  Description of Artificial Sequence: Synthetic oligonucleotide
gaaacgguccacaugugau

SEQ ID NO: 1564016 - RNA, 19 nt, Artificial Sequence
  Description of Artificial Sequence: Synthetic oligonucleotide
accuguaaaucuacagccu

SEQ ID NO: 1564017 - RNA, 19 nt, Artificial Sequence
  Description of Artificial Sequence: Synthetic oligonucleotide
gcaauaugaccaucuggac

SEQ ID NO: 1564018 - RNA, 19 nt, Artificial Sequence
  Description of Artificial Sequence: Synthetic oligonucleotide
uccccuuuugugguacucu

SEQ ID NO: 1564019 - RNA, 19 nt, Artificial Sequence
  Description of Artificial Sequence: Synthetic oligonucleotide
uaagggcccugacccaggu

SEQ ID NO: 1564020 - RNA, 19 nt, Artificial Sequence
  Description of Artificial Sequence: Synthetic oligonucleotide
agcauuguuaggaucuaua

SEQ ID NO: 1564021 - RNA, 19 nt, Artificial Sequence
  Description of Artificial Sequence: Synthetic oligonucleotide
guguccugaugcuacugca

SEQ ID NO: 1564022 - RNA, 19 nt, Artificial Sequence
  Description of Artificial Sequence: Synthetic oligonucleotide
cauagcuagagucuuuaau

SEQ ID NO: 1564023 - RNA, 19 nt, Artificial Sequence
  Description of Artificial Sequence: Synthetic oligonucleotide
uaauggugugcucccuguu

SEQ ID NO: 1564024 - RNA, 19 nt, Artificial Sequence
  Description of Artificial Sequence: Synthetic oligonucleotide
aggugcauagaagcgugca

SEQ ID NO: 1564025 - RNA, 19 nt, Artificial Sequence
  Description of Artificial Sequence: Synthetic oligonucleotide
cauucacuggccaagucau

SEQ ID NO: 1564026 - RNA, 19 nt, Artificial Sequence
  Description of Artificial Sequence: Synthetic oligonucleotide
ugguguccauagcuagagu

SEQ ID NO: 1564027 - RNA, 19 nt, Artificial Sequence
  Description of Artificial Sequence: Synthetic oligonucleotide
uuagcacaagagguucaaa

SEQ ID NO: 1564028 - RNA, 19 nt, Artificial Sequence
  Description of Artificial Sequence: Synthetic oligonucleotide
cuucagcguucccaucaag

SEQ ID NO: 1564029 - RNA, 19 nt, Artificial Sequence
  Description of Artificial Sequence: Synthetic oligonucleotide
cccgccaacgacuccagcc

SEQ ID NO: 1564030 - RNA, 19 nt, Artificial Sequence
  Description of Artificial Sequence: Synthetic oligonucleotide
aaacuacuuuggggcacug

SEQ ID NO: 1564031 - RNA, 19 nt, Artificial Sequence
  Description of Artificial Sequence: Synthetic oligonucleotide
cuaaggcaacuacaggcaa

SEQ ID NO: 1564032 - RNA, 19 nt, Artificial Sequence
  Description of Artificial Sequence: Synthetic oligonucleotide
auagaagcgugcacuuaca

SEQ ID NO: 1564033 - RNA, 19 nt, Artificial Sequence
  Description of Artificial Sequence: Synthetic oligonucleotide
uggcuuuauacagggcaaa

SEQ ID NO: 1564034 - RNA, 19 nt, Artificial Sequence
  Description of Artificial Sequence: Synthetic oligonucleotide
gaauagcaggaccucuggu

SEQ ID NO: 1564035 - RNA, 19 nt, Artificial Sequence
  Description of Artificial Sequence: Synthetic oligonucleotide
ggaccuauuccuccaacaa

SEQ ID NO: 1564036 - RNA, 19 nt, Artificial Sequence
  Description of Artificial Sequence: Synthetic oligonucleotide
cuggaccuauuccuccaac

SEQ ID NO: 1564037 - RNA, 19 nt, Artificial Sequence
  Description of Artificial Sequence: Synthetic oligonucleotide
accagaacgaggguagcua

SEQ ID NO: 1564038 - RNA, 19 nt, Artificial Sequence
  Description of Artificial Sequence: Synthetic oligonucleotide
cccaucaaggaugugagca

SEQ ID NO: 1564039 - RNA, 19 nt, Artificial Sequence
  Description of Artificial Sequence: Synthetic oligonucleotide
ggcuccacgaguuuauugu

SEQ ID NO: 1564040 - RNA, 19 nt, Artificial Sequence
  Description of Artificial Sequence: Synthetic oligonucleotide
ugagcauuguuaggaucua

SEQ ID NO: 1564041 - RNA, 19 nt, Artificial Sequence
  Description of Artificial Sequence: Synthetic oligonucleotide
cuaacgcacccggcaaccc

SEQ ID NO: 1564042 - RNA, 19 nt, Artificial Sequence
  Description of Artificial Sequence: Synthetic oligonucleotide
gugcauagaagcgugcacu

SEQ ID NO: 1564043 - RNA, 19 nt, Artificial Sequence
  Description of Artificial Sequence: Synthetic oligonucleotide
gcaccuguuaugaggauca

SEQ ID NO: 1564044 - RNA, 19 nt, Artificial Sequence
  Description of Artificial Sequence: Synthetic oligonucleotide
ccuccaacuacaccagaac

SEQ ID NO: 1564045 - RNA, 19 nt, Artificial Sequence
  Description of Artificial Sequence: Synthetic oligonucleotide
uggugugcucccuguuggu

SEQ ID NO: 1564046 - RNA, 19 nt, Artificial Sequence
  Description of Artificial Sequence: Synthetic oligonucleotide
gcaaaugccuugugugcac

SEQ ID NO: 1564047 - RNA, 19 nt, Artificial Sequence
  Description of Artificial Sequence: Synthetic oligonucleotide
uagcaggaccucugguguc

SEQ ID NO: 1564048 - RNA, 19 nt, Artificial Sequence
  Description of Artificial Sequence: Synthetic oligonucleotide
acccgccaacgacuccagc

SEQ ID NO: 1564049 - RNA, 19 nt, Artificial Sequence
  Description of Artificial Sequence: Synthetic oligonucleotide
cuaauggugugcucccugu

SEQ ID NO: 1564050 - RNA, 19 nt, Artificial Sequence
  Description of Artificial Sequence: Synthetic oligonucleotide
agcuaaguauaaagcuuau

SEQ ID NO: 1564051 - RNA, 19 nt, Artificial Sequence
  Description of Artificial Sequence: Synthetic oligonucleotide
uccuaauggugugcucccu

SEQ ID NO: 1564052 - RNA, 19 nt, Artificial Sequence
  Description of Artificial Sequence: Synthetic oligonucleotide
gcuaaguauaaagcuuauc

SEQ ID NO: 1564053 - RNA, 19 nt, Artificial Sequence
  Description of Artificial Sequence: Synthetic oligonucleotide
uaugaccaucuggaccuau

SEQ ID NO: 1564054 - RNA, 19 nt, Artificial Sequence
  Description of Artificial Sequence: Synthetic oligonucleotide
cacuuuugauaagucucca

SEQ ID NO: 1564055 - RNA, 19 nt, Artificial Sequence
  Description of Artificial Sequence: Synthetic oligonucleotide
uaccugucuuuuccagguu

SEQ ID NO: 1564056 - RNA, 19 nt, Artificial Sequence
  Description of Artificial Sequence: Synthetic oligonucleotide
gcuaacgcacccggcaacc

SEQ ID NO: 1564057 - RNA, 19 nt, Artificial Sequence
  Description of Artificial Sequence: Synthetic oligonucleotide
guacaguggcuccacgagu

SEQ ID NO: 1564058 - RNA, 19 nt, Artificial Sequence
  Description of Artificial Sequence: Synthetic oligonucleotide
gugguacucuauuaauuuu

SEQ ID NO: 1564059 - RNA, 19 nt, Artificial Sequence
  Description of Artificial Sequence: Synthetic oligonucleotide
ggaucuauaucaacaugcu

SEQ ID NO: 1564060 - RNA, 19 nt, Artificial Sequence
  Description of Artificial Sequence: Synthetic oligonucleotide
gguuggcacuuuugauaag

SEQ ID NO: 1564061 - RNA, 19 nt, Artificial Sequence
  Description of Artificial Sequence: Synthetic oligonucleotide
cugacccaggucauuaaau

SEQ ID NO: 1564062 - RNA, 19 nt, Artificial Sequence
  Description of Artificial Sequence: Synthetic oligonucleotide
acuggccaagucauaguua

SEQ ID NO: 1564063 - RNA, 19 nt, Artificial Sequence
  Description of Artificial Sequence: Synthetic oligonucleotide
aagcgugcacuuacagaua

SEQ ID NO: 1564064 - RNA, 19 nt, Artificial Sequence
  Description of Artificial Sequence: Synthetic oligonucleotide
agccaugguuggcacuuuu

SEQ ID NO: 1564065 - RNA, 19 nt, Artificial Sequence
  Description of Artificial Sequence: Synthetic oligonucleotide
acgguccacaugugauuaa

SEQ ID NO: 1564066 - RNA, 19 nt, Artificial Sequence
  Description of Artificial Sequence: Synthetic oligonucleotide
caagagguucaaaccugua

SEQ ID NO: 1564067 - RNA, 19 nt, Artificial Sequence
  Description of Artificial Sequence: Synthetic oligonucleotide
cacccggcaacccgccaac

SEQ ID NO: 1564068 - RNA, 19 nt, Artificial Sequence
  Description of Artificial Sequence: Synthetic oligonucleotide
ccggcaacccgccaacgac

SEQ ID NO: 1564069 - RNA, 19 nt, Artificial Sequence
  Description of Artificial Sequence: Synthetic oligonucleotide
acgcacccggcaacccgcc

SEQ ID NO: 1564070 - RNA, 19 nt, Artificial Sequence
  Description of Artificial Sequence: Synthetic oligonucleotide
cgaggguagcuaacgcacc

SEQ ID NO: 1564071 - RNA, 19 nt, Artificial Sequence
  Description of Artificial Sequence: Synthetic oligonucleotide
gcuuaucauugccaauaua

SEQ ID NO: 1564072 - RNA, 19 nt, Artificial Sequence
  Description of Artificial Sequence: Synthetic oligonucleotide
gggugaugcacaaaagaau

SEQ ID NO: 1564073 - RNA, 19 nt, Artificial Sequence
  Description of Artificial Sequence: Synthetic oligonucleotide
caacaguuagagccauggu

SEQ ID NO: 1564074 - RNA, 19 nt, Artificial Sequence
  Description of Artificial Sequence: Synthetic oligonucleotide
ccacgaguuuauuguucac

SEQ ID NO: 1564075 - RNA, 19 nt, Artificial Sequence
  Description of Artificial Sequence: Synthetic oligonucleotide
ggauccuggcucauugaaa

SEQ ID NO: 1564076 - RNA, 19 nt, Artificial Sequence
  Description of Artificial Sequence: Synthetic oligonucleotide
acccggcaacccgccaacg

SEQ ID NO: 1564077 - RNA, 19 nt, Artificial Sequence
  Description of Artificial Sequence: Synthetic oligonucleotide
cacaugugauuaauuccuu

SEQ ID NO: 1564078 - RNA, 19 nt, Artificial Sequence
  Description of Artificial Sequence: Synthetic oligonucleotide
caucgcauucugccugcaa

SEQ ID NO: 1564079 - RNA, 19 nt, Artificial Sequence
  Description of Artificial Sequence: Synthetic oligonucleotide
ccagaacgaggguagcuaa

SEQ ID NO: 1564080 - RNA, 19 nt, Artificial Sequence
  Description of Artificial Sequence: Synthetic oligonucleotide
cagcguucccaucaaggau

SEQ ID NO: 1564081 - RNA, 19 nt, Artificial Sequence
  Description of Artificial Sequence: Synthetic oligonucleotide
ggcaacccgccaacgacuc

SEQ ID NO: 1564082 - RNA, 19 nt, Artificial Sequence
  Description of Artificial Sequence: Synthetic oligonucleotide
ccuugugugcaccuguuau

SEQ ID NO: 1564083 - RNA, 19 nt, Artificial Sequence
  Description of Artificial Sequence: Synthetic oligonucleotide
auaugaccaucuggaccua

SEQ ID NO: 1564084 - RNA, 19 nt, Artificial Sequence
  Description of Artificial Sequence: Synthetic oligonucleotide
gcaacccgccaacgacucc

SEQ ID NO: 1564085 - RNA, 19 nt, Artificial Sequence
  Description of Artificial Sequence: Synthetic oligonucleotide
guucggggaugcugcugaa

SEQ ID NO: 1564086 - RNA, 19 nt, Artificial Sequence
  Description of Artificial Sequence: Synthetic oligonucleotide
ccuucaaaugcaucgcauu

SEQ ID NO: 1564087 - RNA, 19 nt, Artificial Sequence
  Description of Artificial Sequence: Synthetic oligonucleotide
gcacccggcaacccgccaa

SEQ ID NO: 1564088 - RNA, 19 nt, Artificial Sequence
  Description of Artificial Sequence: Synthetic oligonucleotide
ccaucaaggaugugagcau

SEQ ID NO: 1564089 - RNA, 19 nt, Artificial Sequence
  Description of Artificial Sequence: Synthetic oligonucleotide
ccccuuuugugguacucua

SEQ ID NO: 1564090 - RNA, 19 nt, Artificial Sequence
  Description of Artificial Sequence: Synthetic oligonucleotide
gccuugugugcaccuguua

SEQ ID NO: 1564091 - RNA, 19 nt, Artificial Sequence
  Description of Artificial Sequence: Synthetic oligonucleotide
gcccugacccaggucauua

SEQ ID NO: 1564092 - RNA, 19 nt, Artificial Sequence
  Description of Artificial Sequence: Synthetic oligonucleotide
cccggcaacccgccaacga

SEQ ID NO: 1564093 - RNA, 19 nt, Artificial Sequence
  Description of Artificial Sequence: Synthetic oligonucleotide
cgugcacuuacagauacuu

SEQ ID NO: 1564094 - RNA, 19 nt, Artificial Sequence
  Description of Artificial Sequence: Synthetic oligonucleotide
gcaucgcauucugccugca

SEQ ID NO: 1564095 - RNA, 19 nt, Artificial Sequence
  Description of Artificial Sequence: Synthetic oligonucleotide
gagccaugguuggcacuuu

SEQ ID NO: 1564096 - RNA, 19 nt, Artificial Sequence
  Description of Artificial Sequence: Synthetic oligonucleotide
cggcaacccgccaacgacu

SEQ ID NO: 1564097 - RNA, 19 nt, Artificial Sequence
  Description of Artificial Sequence: Synthetic oligonucleotide
gcgugcacuuacagauacu

SEQ ID NO: 1564098 - RNA, 19 nt, Artificial Sequence
  Description of Artificial Sequence: Synthetic oligonucleotide
cccuguugguaagcccagu

SEQ ID NO: 1564099 - RNA, 19 nt, Artificial Sequence
  Description of Artificial Sequence: Synthetic oligonucleotide
ggcccugacccaggucauu

SEQ ID NO: 1564100 - RNA, 19 nt, Artificial Sequence
  Description of Artificial Sequence: Synthetic oligonucleotide
aaugguaauggccaaaccc

SEQ ID NO: 1564101 - RNA, 19 nt, Artificial Sequence
  Description of Artificial Sequence: Synthetic oligonucleotide
uuaguuacuacccacguac

SEQ ID NO: 1564102 - RNA, 19 nt, Artificial Sequence
  Description of Artificial Sequence: Synthetic oligonucleotide
aaaaugguaugccucgugg

SEQ ID NO: 1564103 - RNA, 19 nt, Artificial Sequence
  Description of Artificial Sequence: Synthetic oligonucleotide
aggagcugaaucuucaucc

SEQ ID NO: 1564104 - RNA, 19 nt, Artificial Sequence
  Description of Artificial Sequence: Synthetic oligonucleotide
aucauguguagucaggccc

SEQ ID NO: 1564105 - RNA, 19 nt, Artificial Sequence
  Description of Artificial Sequence: Synthetic oligonucleotide
acuagcgugaaguagaugu

SEQ ID NO: 1564106 - RNA, 19 nt, Artificial Sequence
  Description of Artificial Sequence: Synthetic oligonucleotide
aaacccuuaccccaucccc

SEQ ID NO: 1564107 - RNA, 19 nt, Artificial Sequence
  Description of Artificial Sequence: Synthetic oligonucleotide
ucuggaauaggcaugaaau

SEQ ID NO: 1564108 - RNA, 19 nt, Artificial Sequence
  Description of Artificial Sequence: Synthetic oligonucleotide
aaugcugauaguuucugcu

SEQ ID NO: 1564109 - RNA, 19 nt, Artificial Sequence
  Description of Artificial Sequence: Synthetic oligonucleotide
aaaugguaauggccaaacc

SEQ ID NO: 1564110 - RNA, 19 nt, Artificial Sequence
  Description of Artificial Sequence: Synthetic oligonucleotide
auaugcuucuuccgaaugc

SEQ ID NO: 1564111 - RNA, 19 nt, Artificial Sequence
  Description of Artificial Sequence: Synthetic oligonucleotide
cuuugggcaagucucaagg

SEQ ID NO: 1564112 - RNA, 19 nt, Artificial Sequence
  Description of Artificial Sequence: Synthetic oligonucleotide
gauaguuucugcugcauca

SEQ ID NO: 1564113 - RNA, 19 nt, Artificial Sequence
  Description of Artificial Sequence: Synthetic oligonucleotide
uucuuccgaaugcugauag

SEQ ID NO: 1564114 - RNA, 19 nt, Artificial Sequence
  Description of Artificial Sequence: Synthetic oligonucleotide
aaccaggguggacagagag

SEQ ID NO: 1564115 - RNA, 19 nt, Artificial Sequence
  Description of Artificial Sequence: Synthetic oligonucleotide
agucccaaggcucugucgg

SEQ ID NO: 1564116 - RNA, 19 nt, Artificial Sequence
  Description of Artificial Sequence: Synthetic oligonucleotide
gagaccuuggcuuagcaca

SEQ ID NO: 1564117 - RNA, 19 nt, Artificial Sequence
  Description of Artificial Sequence: Synthetic oligonucleotide
uuacuacccacguacuggg

SEQ ID NO: 1564118 - RNA, 19 nt, Artificial Sequence
  Description of Artificial Sequence: Synthetic oligonucleotide
caaagagaggguauggaug

SEQ ID NO: 1564119 - RNA, 19 nt, Artificial Sequence
  Description of Artificial Sequence: Synthetic oligonucleotide
guuacuacccacguacugg

SEQ ID NO: 1564120 - RNA, 19 nt, Artificial Sequence
  Description of Artificial Sequence: Synthetic oligonucleotide
aguucugagaccuuggcuu

SEQ ID NO: 1564121 - RNA, 19 nt, Artificial Sequence
  Description of Artificial Sequence: Synthetic oligonucleotide
uucauucuggaauaggcau

SEQ ID NO: 1564122 - RNA, 19 nt, Artificial Sequence
  Description of Artificial Sequence: Synthetic oligonucleotide
augucgauaaaaugguaug

SEQ ID NO: 1564123 - RNA, 19 nt, Artificial Sequence
  Description of Artificial Sequence: Synthetic oligonucleotide
uuacauguuccgccgcucg

SEQ ID NO: 1564124 - RNA, 19 nt, Artificial Sequence
  Description of Artificial Sequence: Synthetic oligonucleotide
aaaugguaugccucguggu

SEQ ID NO: 1564125 - RNA, 19 nt, Artificial Sequence
  Description of Artificial Sequence: Synthetic oligonucleotide
ucgauaaaaugguaugccu

SEQ ID NO: 1564126 - RNA, 19 nt, Artificial Sequence
  Description of Artificial Sequence: Synthetic oligonucleotide
uaaaaugguaugccucgug

SEQ ID NO: 1564127 - RNA, 19 nt, Artificial Sequence
  Description of Artificial Sequence: Synthetic oligonucleotide
ugucgauaaaaugguaugc

SEQ ID NO: 1564128 - RNA, 19 nt, Artificial Sequence
  Description of Artificial Sequence: Synthetic oligonucleotide
uuggcuuagcacaccauga

SEQ ID NO: 1564129 - RNA, 19 nt, Artificial Sequence
  Description of Artificial Sequence: Synthetic oligonucleotide
ggaagaagugugcaaagag

SEQ ID NO: 1564130 - RNA, 19 nt, Artificial Sequence
  Description of Artificial Sequence: Synthetic oligonucleotide
auaggcaugaaaugguaau

SEQ ID NO: 1564131 - RNA, 19 nt, Artificial Sequence
  Description of Artificial Sequence: Synthetic oligonucleotide
uaugccucgugguuuagga

SEQ ID NO: 1564132 - RNA, 19 nt, Artificial Sequence
  Description of Artificial Sequence: Synthetic oligonucleotide
aaugguaugccucgugguu

SEQ ID NO: 1564133 - RNA, 19 nt, Artificial Sequence
  Description of Artificial Sequence: Synthetic oligonucleotide
acacgagggucccaguccc

SEQ ID NO: 1564134 - RNA, 19 nt, Artificial Sequence
  Description of Artificial Sequence: Synthetic oligonucleotide
gaucugagcguuccagccg

SEQ ID NO: 1564135 - RNA, 19 nt, Artificial Sequence
  Description of Artificial Sequence: Synthetic oligonucleotide
ugccucgugguuuaggaca

SEQ ID NO: 1564136 - RNA, 19 nt, Artificial Sequence
  Description of Artificial Sequence: Synthetic oligonucleotide
gggcaugucgauaaaaugg

SEQ ID NO: 1564137 - RNA, 19 nt, Artificial Sequence
  Description of Artificial Sequence: Synthetic oligonucleotide
acaguagucugcagaaccc

SEQ ID NO: 1564138 - RNA, 19 nt, Artificial Sequence
  Description of Artificial Sequence: Synthetic oligonucleotide
gaaaugguaauggccaaac

SEQ ID NO: 1564139 - RNA, 19 nt, Artificial Sequence
  Description of Artificial Sequence: Synthetic oligonucleotide
aaacaguagucugcagaac

SEQ ID NO: 1564140 - RNA, 19 nt, Artificial Sequence
  Description of Artificial Sequence: Synthetic oligonucleotide
cuuggcuuagcacaccaug

SEQ ID NO: 1564141 - RNA, 19 nt, Artificial Sequence
  Description of Artificial Sequence: Synthetic oligonucleotide
uggcuuagcacaccaugag

SEQ ID NO: 1564142 - RNA, 19 nt, Artificial Sequence
  Description of Artificial Sequence: Synthetic oligonucleotide
ugugcaaagagaggguaug

SEQ ID NO: 1564143 - RNA, 19 nt, Artificial Sequence
  Description of Artificial Sequence: Synthetic oligonucleotide
ugcccuuacauguuccgcc

SEQ ID NO: 1564144 - RNA, 19 nt, Artificial Sequence
  Description of Artificial Sequence: Synthetic oligonucleotide
uucuggaauaggcaugaaa

SEQ ID NO: 1564145 - RNA, 19 nt, Artificial Sequence
  Description of Artificial Sequence: Synthetic oligonucleotide
uccgugugcgcgcugggcg

SEQ ID NO: 1564146 - RNA, 19 nt, Artificial Sequence
  Description of Artificial Sequence: Synthetic oligonucleotide
uagcgugaaguagaugugg

SEQ ID NO: 1564147 - RNA, 19 nt, Artificial Sequence
  Description of Artificial Sequence: Synthetic oligonucleotide
gucgauaaaaugguaugcc

SEQ ID NO: 1564148 - RNA, 19 nt, Artificial Sequence
  Description of Artificial Sequence: Synthetic oligonucleotide
ugugcccuuacauguuccg

SEQ ID NO: 1564149 - RNA, 19 nt, Artificial Sequence
  Description of Artificial Sequence: Synthetic oligonucleotide
uccgaaugcugauaguuuc

SEQ ID NO: 1564150 - RNA, 19 nt, Artificial Sequence
  Description of Artificial Sequence: Synthetic oligonucleotide
gaagaagugugcaaagaga

SEQ ID NO: 1564151 - RNA, 19 nt, Artificial Sequence
  Description of Artificial Sequence: Synthetic oligonucleotide
aaguagauguggcgcccgg

SEQ ID NO: 1564152 - RNA, 19 nt, Artificial Sequence
  Description of Artificial Sequence: Synthetic oligonucleotide
uuuaguuacuacccacgua

SEQ ID NO: 1564153 - RNA, 19 nt, Artificial Sequence
  Description of Artificial Sequence: Synthetic oligonucleotide
cuaagcagcaagagacccc

SEQ ID NO: 1564154 - RNA, 19 nt, Artificial Sequence
  Description of Artificial Sequence: Synthetic oligonucleotide
gcaauagagguaaaggaag

SEQ ID NO: 1564155 - RNA, 19 nt, Artificial Sequence
  Description of Artificial Sequence: Synthetic oligonucleotide
ugcugcaucauguguaguc

SEQ ID NO: 1564156 - RNA, 19 nt, Artificial Sequence
  Description of Artificial Sequence: Synthetic oligonucleotide
uguguagucaggccccaac

SEQ ID NO: 1564157 - RNA, 19 nt, Artificial Sequence
  Description of Artificial Sequence: Synthetic oligonucleotide
ugauaguuucugcugcauc

SEQ ID NO: 1564158 - RNA, 19 nt, Artificial Sequence
  Description of Artificial Sequence: Synthetic oligonucleotide
agcuaaguccagcagcugu

SEQ ID NO: 1564159 - RNA, 19 nt, Artificial Sequence
  Description of Artificial Sequence: Synthetic oligonucleotide
aaccaaccaggguggacag

SEQ ID NO: 1564160 - RNA, 19 nt, Artificial Sequence
  Description of Artificial Sequence: Synthetic oligonucleotide
cuguccuaaggcagggugg

SEQ ID NO: 1564161 - RNA, 19 nt, Artificial Sequence
  Description of Artificial Sequence: Synthetic oligonucleotide
uaggcaugaaaugguaaug

SEQ ID NO: 1564162 - RNA, 19 nt, Artificial Sequence
  Description of Artificial Sequence: Synthetic oligonucleotide
guuuaggacacgagggucc

SEQ ID NO: 1564163 - RNA, 19 nt, Artificial Sequence
  Description of Artificial Sequence: Synthetic oligonucleotide
guaauggccaaacccuuac

SEQ ID NO: 1564164 - RNA, 19 nt, Artificial Sequence
  Description of Artificial Sequence: Synthetic oligonucleotide
acuacccacguacugggca

SEQ ID NO: 1564165 - RNA, 19 nt, Artificial Sequence
  Description of Artificial Sequence: Synthetic oligonucleotide
caucauguguagucaggcc

SEQ ID NO: 1564166 - RNA, 19 nt, Artificial Sequence
  Description of Artificial Sequence: Synthetic oligonucleotide
cucgcugucuagccgagcc

SEQ ID NO: 1564167 - RNA, 19 nt, Artificial Sequence
  Description of Artificial Sequence: Synthetic oligonucleotide
caaacaguagucugcagaa

SEQ ID NO: 1564168 - RNA, 19 nt, Artificial Sequence
  Description of Artificial Sequence: Synthetic oligonucleotide
acauguuccgccgcucgcc

SEQ ID NO: 1564169 - RNA, 19 nt, Artificial Sequence
  Description of Artificial Sequence: Synthetic oligonucleotide
agggugaucugagcguucc

SEQ ID NO: 1564170 - RNA, 19 nt, Artificial Sequence
  Description of Artificial Sequence: Synthetic oligonucleotide
ucugcaagcuaaguccagc

SEQ ID NO: 1564171 - RNA, 19 nt, Artificial Sequence
  Description of Artificial Sequence: Synthetic oligonucleotide
agugaggagagggcaauag

SEQ ID NO: 1564172 - RNA, 19 nt, Artificial Sequence
  Description of Artificial Sequence: Synthetic oligonucleotide
gcaagcuaaguccagcagc

SEQ ID NO: 1564173 - RNA, 19 nt, Artificial Sequence
  Description of Artificial Sequence: Synthetic oligonucleotide
uguccuaaggcaggguggc

SEQ ID NO: 1564174 - RNA, 19 nt, Artificial Sequence
  Description of Artificial Sequence: Synthetic oligonucleotide
uagucaggccccaaccaac

SEQ ID NO: 1564175 - RNA, 19 nt, Artificial Sequence
  Description of Artificial Sequence: Synthetic oligonucleotide
uuuaggacacgaggguccc

SEQ ID NO: 1564176 - RNA, 19 nt, Artificial Sequence
  Description of Artificial Sequence: Synthetic oligonucleotide
gcggaagucgaucucaccc

SEQ ID NO: 1564177 - RNA, 19 nt, Artificial Sequence
  Description of Artificial Sequence: Synthetic oligonucleotide
cuagcgugaaguagaugug

SEQ ID NO: 1564178 - RNA, 19 nt, Artificial Sequence
  Description of Artificial Sequence: Synthetic oligonucleotide
guagauguggcgcccggug

SEQ ID NO: 1564179 - RNA, 19 nt, Artificial Sequence
  Description of Artificial Sequence: Synthetic oligonucleotide
caaacccuuaccccauccc

SEQ ID NO: 1564180 - RNA, 19 nt, Artificial Sequence
  Description of Artificial Sequence: Synthetic oligonucleotide
aggagcagaacagucucag

SEQ ID NO: 1564181 - RNA, 19 nt, Artificial Sequence
  Description of Artificial Sequence: Synthetic oligonucleotide
gaaguagauguggcgcccg

SEQ ID NO: 1564182 - RNA, 19 nt, Artificial Sequence
  Description of Artificial Sequence: Synthetic oligonucleotide
guguagucaggccccaacc

SEQ ID NO: 1564183 - RNA, 19 nt, Artificial Sequence
  Description of Artificial Sequence: Synthetic oligonucleotide
gucacuagcgugaaguaga

SEQ ID NO: 1564184 - RNA, 19 nt, Artificial Sequence
  Description of Artificial Sequence: Synthetic oligonucleotide
gaugugcccuuacauguuc

SEQ ID NO: 1564185 - RNA, 19 nt, Artificial Sequence
  Description of Artificial Sequence: Synthetic oligonucleotide
uugcucgcugucuagccga

SEQ ID NO: 1564186 - RNA, 19 nt, Artificial Sequence
  Description of Artificial Sequence: Synthetic oligonucleotide
ucgugguuuaggacacgag

SEQ ID NO: 1564187 - RNA, 19 nt, Artificial Sequence
  Description of Artificial Sequence: Synthetic oligonucleotide
uacauguuccgccgcucgc

SEQ ID NO: 1564188 - RNA, 19 nt, Artificial Sequence
  Description of Artificial Sequence: Synthetic oligonucleotide
gcaugaaaugguaauggcc

SEQ ID NO: 1564189 - RNA, 19 nt, Artificial Sequence
  Description of Artificial Sequence: Synthetic oligonucleotide
uaguuacuacccacguacu

SEQ ID NO: 1564190 - RNA, 19 nt, Artificial Sequence
  Description of Artificial Sequence: Synthetic oligonucleotide
agugcccuuggccucgaag

SEQ ID NO: 1564191 - RNA, 19 nt, Artificial Sequence
  Description of Artificial Sequence: Synthetic oligonucleotide
augccucgugguuuaggac

SEQ ID NO: 1564192 - RNA, 19 nt, Artificial Sequence
  Description of Artificial Sequence: Synthetic oligonucleotide
ggcuuagcacaccaugagg

SEQ ID NO: 1564193 - RNA, 19 nt, Artificial Sequence
  Description of Artificial Sequence: Synthetic oligonucleotide
uuccgaaugcugauaguuu

SEQ ID NO: 1564194 - RNA, 19 nt, Artificial Sequence
  Description of Artificial Sequence: Synthetic oligonucleotide
gccccaaccaaccagggug

SEQ ID NO: 1564195 - RNA, 19 nt, Artificial Sequence
  Description of Artificial Sequence: Synthetic oligonucleotide
ugagcgccggcuucucgcg

SEQ ID NO: 1564196 - RNA, 19 nt, Artificial Sequence
  Description of Artificial Sequence: Synthetic oligonucleotide
acggcuuugaugcgggcga

SEQ ID NO: 1564197 - RNA, 19 nt, Artificial Sequence
  Description of Artificial Sequence: Synthetic oligonucleotide
ggcaugaaaugguaauggc

SEQ ID NO: 1564198 - RNA, 19 nt, Artificial Sequence
  Description of Artificial Sequence: Synthetic oligonucleotide
ugagcguuccagccggggu

SEQ ID NO: 1564199 - RNA, 19 nt, Artificial Sequence
  Description of Artificial Sequence: Synthetic oligonucleotide
ugaaaugguaauggccaaa

SEQ ID NO: 1564200 - RNA, 19 nt, Artificial Sequence
  Description of Artificial Sequence: Synthetic oligonucleotide
gagaggguauggaugggug

SEQ ID NO: 1564201 - RNA, 19 nt, Artificial Sequence
  Description of Artificial Sequence: Synthetic oligonucleotide
ggggacgccucgcagaccg

SEQ ID NO: 1564202 - RNA, 19 nt, Artificial Sequence
  Description of Artificial Sequence: Synthetic oligonucleotide
agaccuuggcuuagcacac

SEQ ID NO: 1564203 - RNA, 19 nt, Artificial Sequence
  Description of Artificial Sequence: Synthetic oligonucleotide
caugucgauaaaaugguau

SEQ ID NO: 1564204 - RNA, 19 nt, Artificial Sequence
  Description of Artificial Sequence: Synthetic oligonucleotide
ugguaauggccaaacccuu

SEQ ID NO: 1564205 - RNA, 19 nt, Artificial Sequence
  Description of Artificial Sequence: Synthetic oligonucleotide
agaugcugcucgcucgucu

SEQ ID NO: 1564206 - RNA, 19 nt, Artificial Sequence
  Description of Artificial Sequence: Synthetic oligonucleotide
caucugcaagcuaagucca

SEQ ID NO: 1564207 - RNA, 19 nt, Artificial Sequence
  Description of Artificial Sequence: Synthetic oligonucleotide
augugcccuuacauguucc

SEQ ID NO: 1564208 - RNA, 19 nt, Artificial Sequence
  Description of Artificial Sequence: Synthetic oligonucleotide
aggaagaagugugcaaaga

SEQ ID NO: 1564209 - RNA, 19 nt, Artificial Sequence
  Description of Artificial Sequence: Synthetic oligonucleotide
aacccagaaccaagggcag

SEQ ID NO: 1564210 - RNA, 19 nt, Artificial Sequence
  Description of Artificial Sequence: Synthetic oligonucleotide
gucaugggcguccccgggg

SEQ ID NO: 1564211 - RNA, 19 nt, Artificial Sequence
  Description of Artificial Sequence: Synthetic oligonucleotide
cagccggggucuucgaggg

SEQ ID NO: 1564212 - RNA, 19 nt, Artificial Sequence
  Description of Artificial Sequence: Synthetic oligonucleotide
ggggcaugucgauaaaaug

SEQ ID NO: 1564213 - RNA, 19 nt, Artificial Sequence
  Description of Artificial Sequence: Synthetic oligonucleotide
ucaugggcguccccggggu

SEQ ID NO: 1564214 - RNA, 19 nt, Artificial Sequence
  Description of Artificial Sequence: Synthetic oligonucleotide
ggccuguugauucuugaac

SEQ ID NO: 1564215 - RNA, 19 nt, Artificial Sequence
  Description of Artificial Sequence: Synthetic oligonucleotide
aggcugacguguccucugg

SEQ ID NO: 1564216 - RNA, 19 nt, Artificial Sequence
  Description of Artificial Sequence: Synthetic oligonucleotide
gcccgcacagucuggaugg

SEQ ID NO: 1564217 - RNA, 19 nt, Artificial Sequence
  Description of Artificial Sequence: Synthetic oligonucleotide
ugagcacgcagcgcuuccg

SEQ ID NO: 1564218 - RNA, 19 nt, Artificial Sequence
  Description of Artificial Sequence: Synthetic oligonucleotide
gcuuagcacaccaugagga

SEQ ID NO: 1564219 - RNA, 19 nt, Artificial Sequence
  Description of Artificial Sequence: Synthetic oligonucleotide
caaccaaccaggguggaca

SEQ ID NO: 1564220 - RNA, 19 nt, Artificial Sequence
  Description of Artificial Sequence: Synthetic oligonucleotide
gaauaggcaugaaauggua

SEQ ID NO: 1564221 - RNA, 19 nt, Artificial Sequence
  Description of Artificial Sequence: Synthetic oligonucleotide
ggcaauagagguaaaggaa

SEQ ID NO: 1564222 - RNA, 19 nt, Artificial Sequence
  Description of Artificial Sequence: Synthetic oligonucleotide
uccagccggggucuucgag

SEQ ID NO: 1564223 - RNA, 19 nt, Artificial Sequence
  Description of Artificial Sequence: Synthetic oligonucleotide
agagaggguauggaugggu

SEQ ID NO: 1564224 - RNA, 19 nt, Artificial Sequence
  Description of Artificial Sequence: Synthetic oligonucleotide
gcccagggugaucugagcg

SEQ ID NO: 1564225 - RNA, 19 nt, Artificial Sequence
  Description of Artificial Sequence: Synthetic oligonucleotide
cgauaaaaugguaugccuc

SEQ ID NO: 1564226 - RNA, 19 nt, Artificial Sequence
  Description of Artificial Sequence: Synthetic oligonucleotide
uacuacccacguacugggc

SEQ ID NO: 1564227 - RNA, 19 nt, Artificial Sequence
  Description of Artificial Sequence: Synthetic oligonucleotide
ugggacgcuaggcuccuuc

SEQ ID NO: 1564228 - RNA, 19 nt, Artificial Sequence
  Description of Artificial Sequence: Synthetic oligonucleotide
gcgugaaguagauguggcg

SEQ ID NO: 1564229 - RNA, 19 nt, Artificial Sequence
  Description of Artificial Sequence: Synthetic oligonucleotide
ucugagcguuccagccggg

SEQ ID NO: 1564230 - RNA, 19 nt, Artificial Sequence
  Description of Artificial Sequence: Synthetic oligonucleotide
ucgcugucuagccgagccc

SEQ ID NO: 1564231 - RNA, 19 nt, Artificial Sequence
  Description of Artificial Sequence: Synthetic oligonucleotide
cuuagcacaccaugaggaa

SEQ ID NO: 1564232 - RNA, 19 nt, Artificial Sequence
  Description of Artificial Sequence: Synthetic oligonucleotide
guagucaggccccaaccaa

SEQ ID NO: 1564233 - RNA, 19 nt, Artificial Sequence
  Description of Artificial Sequence: Synthetic oligonucleotide
agcacggucgccgccgccg

SEQ ID NO: 1564234 - RNA, 19 nt, Artificial Sequence
  Description of Artificial Sequence: Synthetic oligonucleotide
gcaucauguguagucaggc

SEQ ID NO: 1564235 - RNA, 19 nt, Artificial Sequence
  Description of Artificial Sequence: Synthetic oligonucleotide
ccaaacaguagucugcaga

SEQ ID NO: 1564236 - RNA, 19 nt, Artificial Sequence
  Description of Artificial Sequence: Synthetic oligonucleotide
cuugagcgccggcuucucg

SEQ ID NO: 1564237 - RNA, 19 nt, Artificial Sequence
  Description of Artificial Sequence: Synthetic oligonucleotide
ugguaugccucgugguuua

SEQ ID NO: 1564238 - RNA, 19 nt, Artificial Sequence
  Description of Artificial Sequence: Synthetic oligonucleotide
ucugccgggugcccugcgc

SEQ ID NO: 1564239 - RNA, 19 nt, Artificial Sequence
  Description of Artificial Sequence: Synthetic oligonucleotide
ugaugcgggcgaagcugag

SEQ ID NO: 1564240 - RNA, 19 nt, Artificial Sequence
  Description of Artificial Sequence: Synthetic oligonucleotide
acgcuaggcuccuuccaug

SEQ ID NO: 1564241 - RNA, 19 nt, Artificial Sequence
  Description of Artificial Sequence: Synthetic oligonucleotide
cacguacugggcaucuuca

SEQ ID NO: 1564242 - RNA, 19 nt, Artificial Sequence
  Description of Artificial Sequence: Synthetic oligonucleotide
gaugcgggcgaagcugagc

SEQ ID NO: 1564243 - RNA, 19 nt, Artificial Sequence
  Description of Artificial Sequence: Synthetic oligonucleotide
gcccuuacauguuccgccg

SEQ ID NO: 1564244 - RNA, 19 nt, Artificial Sequence
  Description of Artificial Sequence: Synthetic oligonucleotide
cugacguguccucugggca

SEQ ID NO: 1564245 - RNA, 19 nt, Artificial Sequence
  Description of Artificial Sequence: Synthetic oligonucleotide
cuagccgagcccgcggccg

SEQ ID NO: 1564246 - RNA, 19 nt, Artificial Sequence
  Description of Artificial Sequence: Synthetic oligonucleotide
cagagaggcugacgugucc

SEQ ID NO: 1564247 - RNA, 19 nt, Artificial Sequence
  Description of Artificial Sequence: Synthetic oligonucleotide
gcugacguguccucugggc

SEQ ID NO: 1564248 - RNA, 19 nt, Artificial Sequence
  Description of Artificial Sequence: Synthetic oligonucleotide
auguggcuucugcucuccg

SEQ ID NO: 1564249 - RNA, 19 nt, Artificial Sequence
  Description of Artificial Sequence: Synthetic oligonucleotide
ugucgggcccgcacagucu

SEQ ID NO: 1564250 - RNA, 19 nt, Artificial Sequence
  Description of Artificial Sequence: Synthetic oligonucleotide
ugcucgcucgucuccggcu

SEQ ID NO: 1564251 - RNA, 19 nt, Artificial Sequence
  Description of Artificial Sequence: Synthetic oligonucleotide
gaccgcggcgcccgggagg

SEQ ID NO: 1564252 - RNA, 19 nt, Artificial Sequence
  Description of Artificial Sequence: Synthetic oligonucleotide
cuuacauguuccgccgcuc

SEQ ID NO: 1564253 - RNA, 19 nt, Artificial Sequence
  Description of Artificial Sequence: Synthetic oligonucleotide
gucuagccgagcccgcggc

SEQ ID NO: 1564254 - RNA, 19 nt, Artificial Sequence
  Description of Artificial Sequence: Synthetic oligonucleotide
augguaugccucgugguuu

SEQ ID NO: 1564255 - RNA, 19 nt, Artificial Sequence
  Description of Artificial Sequence: Synthetic oligonucleotide
uggccuugcucgcugucua

SEQ ID NO: 1564256 - RNA, 19 nt, Artificial Sequence
  Description of Artificial Sequence: Synthetic oligonucleotide
cugucgggcccgcacaguc

SEQ ID NO: 1564257 - RNA, 19 nt, Artificial Sequence
  Description of Artificial Sequence: Synthetic oligonucleotide
cucugucgggcccgcacag

SEQ ID NO: 1564258 - RNA, 19 nt, Artificial Sequence
  Description of Artificial Sequence: Synthetic oligonucleotide
acguacugggcaucuucau

SEQ ID NO: 1564259 - RNA, 19 nt, Artificial Sequence
  Description of Artificial Sequence: Synthetic oligonucleotide
aggggccaaacaguagucu

SEQ ID NO: 1564260 - RNA, 19 nt, Artificial Sequence
  Description of Artificial Sequence: Synthetic oligonucleotide
ugcagcccgcgcucgguga

SEQ ID NO: 1564261 - RNA, 19 nt, Artificial Sequence
  Description of Artificial Sequence: Synthetic oligonucleotide
ucgucuccggcuggggacc

SEQ ID NO: 1564262 - RNA, 19 nt, Artificial Sequence
  Description of Artificial Sequence: Synthetic oligonucleotide
auguuccgccgcucgccuc

SEQ ID NO: 1564263 - RNA, 19 nt, Artificial Sequence
  Description of Artificial Sequence: Synthetic oligonucleotide
ugcgcuucuccagcacgcc

SEQ ID NO: 1564264 - RNA, 19 nt, Artificial Sequence
  Description of Artificial Sequence: Synthetic oligonucleotide
gggccaaacaguagucugc

SEQ ID NO: 1564265 - RNA, 19 nt, Artificial Sequence
  Description of Artificial Sequence: Synthetic oligonucleotide
ggugcccugcgccucuccg

SEQ ID NO: 1564266 - RNA, 19 nt, Artificial Sequence
  Description of Artificial Sequence: Synthetic oligonucleotide
gacgccucgcagaccgcgg

SEQ ID NO: 1564267 - RNA, 19 nt, Artificial Sequence
  Description of Artificial Sequence: Synthetic oligonucleotide
gugcccuuacauguuccgc

SEQ ID NO: 1564268 - RNA, 19 nt, Artificial Sequence
  Description of Artificial Sequence: Synthetic oligonucleotide
ggaauaggcaugaaauggu

SEQ ID NO: 1564269 - RNA, 19 nt, Artificial Sequence
  Description of Artificial Sequence: Synthetic oligonucleotide
cuucagcacggucgccgcc

SEQ ID NO: 1564270 - RNA, 19 nt, Artificial Sequence
  Description of Artificial Sequence: Synthetic oligonucleotide
cugcuggcgggaugugccc

SEQ ID NO: 1564271 - RNA, 19 nt, Artificial Sequence
  Description of Artificial Sequence: Synthetic oligonucleotide
ccccaaccaaccagggugg

SEQ ID NO: 1564272 - RNA, 19 nt, Artificial Sequence
  Description of Artificial Sequence: Synthetic oligonucleotide
cugagcguuccagccgggg

SEQ ID NO: 1564273 - RNA, 19 nt, Artificial Sequence
  Description of Artificial Sequence: Synthetic oligonucleotide
uccuuugggcaagucucaa

SEQ ID NO: 1564274 - RNA, 19 nt, Artificial Sequence
  Description of Artificial Sequence: Synthetic oligonucleotide
ccaaacccuuaccccaucc

SEQ ID NO: 1564275 - RNA, 19 nt, Artificial Sequence
  Description of Artificial Sequence: Synthetic oligonucleotide
gccgucaugggcguccccg

SEQ ID NO: 1564276 - RNA, 19 nt, Artificial Sequence
  Description of Artificial Sequence: Synthetic oligonucleotide
uccacgcacuccacggcuu

SEQ ID NO: 1564277 - RNA, 19 nt, Artificial Sequence
  Description of Artificial Sequence: Synthetic oligonucleotide
gacgcuaggcuccuuccau

SEQ ID NO: 1564278 - RNA, 19 nt, Artificial Sequence
  Description of Artificial Sequence: Synthetic oligonucleotide
cuucucgcgccgcccuggg

SEQ ID NO: 1564279 - RNA, 19 nt, Artificial Sequence
  Description of Artificial Sequence: Synthetic oligonucleotide
cucgcucgucuccggcugg

SEQ ID NO: 1564280 - RNA, 19 nt, Artificial Sequence
  Description of Artificial Sequence: Synthetic oligonucleotide
cucgugguuuaggacacga

SEQ ID NO: 1564281 - RNA, 19 nt, Artificial Sequence
  Description of Artificial Sequence: Synthetic oligonucleotide
cuuccgaaugcugauaguu

SEQ ID NO: 1564282 - RNA, 19 nt, Artificial Sequence
  Description of Artificial Sequence: Synthetic oligonucleotide
gcaaagagaggguauggau

SEQ ID NO: 1564283 - RNA, 19 nt, Artificial Sequence
  Description of Artificial Sequence: Synthetic oligonucleotide
ggcaugucgauaaaauggu

SEQ ID NO: 1564284 - RNA, 19 nt, Artificial Sequence
  Description of Artificial Sequence: Synthetic oligonucleotide
cucggugagcacgcagcgc

SEQ ID NO: 1564285 - RNA, 19 nt, Artificial Sequence
  Description of Artificial Sequence: Synthetic oligonucleotide
cauccucagccccucaugu

SEQ ID NO: 1564286 - RNA, 19 nt, Artificial Sequence
  Description of Artificial Sequence: Synthetic oligonucleotide
uucucgcgccgcccugggc

SEQ ID NO: 1564287 - RNA, 19 nt, Artificial Sequence
  Description of Artificial Sequence: Synthetic oligonucleotide
uuaggacacgaggguccca

SEQ ID NO: 1564288 - RNA, 19 nt, Artificial Sequence
  Description of Artificial Sequence: Synthetic oligonucleotide
ggcugacguguccucuggg

SEQ ID NO: 1564289 - RNA, 19 nt, Artificial Sequence
  Description of Artificial Sequence: Synthetic oligonucleotide
cuuugaugcgggcgaagcu

SEQ ID NO: 1564290 - RNA, 19 nt, Artificial Sequence
  Description of Artificial Sequence: Synthetic oligonucleotide
cuugggccggccgccagug

SEQ ID NO: 1564291 - RNA, 19 nt, Artificial Sequence
  Description of Artificial Sequence: Synthetic oligonucleotide
ggacgccucgcagaccgcg

SEQ ID NO: 1564292 - RNA, 19 nt, Artificial Sequence
  Description of Artificial Sequence: Synthetic oligonucleotide
cucggucacuagcgugaag

SEQ ID NO: 1564293 - RNA, 19 nt, Artificial Sequence
  Description of Artificial Sequence: Synthetic oligonucleotide
ggagcugaaucuucauccu

SEQ ID NO: 1564294 - RNA, 19 nt, Artificial Sequence
  Description of Artificial Sequence: Synthetic oligonucleotide
ugcgccucuccgcccgcac

SEQ ID NO: 1564295 - RNA, 19 nt, Artificial Sequence
  Description of Artificial Sequence: Synthetic oligonucleotide
gauguggcgcccggugcuc

SEQ ID NO: 1564296 - RNA, 19 nt, Artificial Sequence
  Description of Artificial Sequence: Synthetic oligonucleotide
gguggccaucuucuggauc

SEQ ID NO: 1564297 - RNA, 19 nt, Artificial Sequence
  Description of Artificial Sequence: Synthetic oligonucleotide
gcagcggaagucgaucuca

SEQ ID NO: 1564298 - RNA, 19 nt, Artificial Sequence
  Description of Artificial Sequence: Synthetic oligonucleotide
agcacgcagcgcuuccguu

SEQ ID NO: 1564299 - RNA, 19 nt, Artificial Sequence
  Description of Artificial Sequence: Synthetic oligonucleotide
aggccccaaccaaccaggg

SEQ ID NO: 1564300 - RNA, 19 nt, Artificial Sequence
  Description of Artificial Sequence: Synthetic oligonucleotide
acgcacuccacggcuuuga

SEQ ID NO: 1564301 - RNA, 19 nt, Artificial Sequence
  Description of Artificial Sequence: Synthetic oligonucleotide
uggcgggaugugcccuuac

SEQ ID NO: 1564302 - RNA, 19 nt, Artificial Sequence
  Description of Artificial Sequence: Synthetic oligonucleotide
gagcgccggcuucucgcgc

SEQ ID NO: 1564303 - RNA, 19 nt, Artificial Sequence
  Description of Artificial Sequence: Synthetic oligonucleotide
gcucgcucgucuccggcug

SEQ ID NO: 1564304 - RNA, 19 nt, Artificial Sequence
  Description of Artificial Sequence: Synthetic oligonucleotide
uugggccggccgccagugc

SEQ ID NO: 1564305 - RNA, 19 nt, Artificial Sequence
  Description of Artificial Sequence: Synthetic oligonucleotide
uuccagccggggucuucga

SEQ ID NO: 1564306 - RNA, 19 nt, Artificial Sequence
  Description of Artificial Sequence: Synthetic oligonucleotide
acccacguacugggcaucu

SEQ ID NO: 1564307 - RNA, 19 nt, Artificial Sequence
  Description of Artificial Sequence: Synthetic oligonucleotide
cugcagcccgcgcucggug

SEQ ID NO: 1564308 - RNA, 19 nt, Artificial Sequence
  Description of Artificial Sequence: Synthetic oligonucleotide
ggcggucccggcucuugag

SEQ ID NO: 1564309 - RNA, 19 nt, Artificial Sequence
  Description of Artificial Sequence: Synthetic oligonucleotide
ggccuugcucgcugucuag

SEQ ID NO: 1564310 - RNA, 19 nt, Artificial Sequence
  Description of Artificial Sequence: Synthetic oligonucleotide
ggacgcuaggcuccuucca

SEQ ID NO: 1564311 - RNA, 19 nt, Artificial Sequence
  Description of Artificial Sequence: Synthetic oligonucleotide
cccucggucacuagcguga

SEQ ID NO: 1564312 - RNA, 19 nt, Artificial Sequence
  Description of Artificial Sequence: Synthetic oligonucleotide
cuacccacguacugggcau

SEQ ID NO: 1564313 - RNA, 19 nt, Artificial Sequence
  Description of Artificial Sequence: Synthetic oligonucleotide
uacccacguacugggcauc

SEQ ID NO: 1564314 - RNA, 19 nt, Artificial Sequence
  Description of Artificial Sequence: Synthetic oligonucleotide
cuucuuccgaaugcugaua

SEQ ID NO: 1564315 - RNA, 19 nt, Artificial Sequence
  Description of Artificial Sequence: Synthetic oligonucleotide
uggcgcccggugcucucca

SEQ ID NO: 1564316 - RNA, 19 nt, Artificial Sequence
  Description of Artificial Sequence: Synthetic oligonucleotide
uccgaccgccccgagccuc

SEQ ID NO: 1564317 - RNA, 19 nt, Artificial Sequence
  Description of Artificial Sequence: Synthetic oligonucleotide
gguaauggccaaacccuua

SEQ ID NO: 1564318 - RNA, 19 nt, Artificial Sequence
  Description of Artificial Sequence: Synthetic oligonucleotide
gcggucccggcucuugagc

SEQ ID NO: 1564319 - RNA, 19 nt, Artificial Sequence
  Description of Artificial Sequence: Synthetic oligonucleotide
cauguguagucaggcccca

SEQ ID NO: 1564320 - RNA, 19 nt, Artificial Sequence
  Description of Artificial Sequence: Synthetic oligonucleotide
gagcacgcagcgcuuccgu

SEQ ID NO: 1564321 - RNA, 19 nt, Artificial Sequence
  Description of Artificial Sequence: Synthetic oligonucleotide
ugggcuccgugugcgcgcu

SEQ ID NO: 1564322 - RNA, 19 nt, Artificial Sequence
  Description of Artificial Sequence: Synthetic oligonucleotide
gcuucucgcgccgcccugg

SEQ ID NO: 1564323 - RNA, 19 nt, Artificial Sequence
  Description of Artificial Sequence: Synthetic oligonucleotide
ccgugugcgcgcugggcgg

SEQ ID NO: 1564324 - RNA, 19 nt, Artificial Sequence
  Description of Artificial Sequence: Synthetic oligonucleotide
gggguucccacggcgccgg

SEQ ID NO: 1564325 - RNA, 19 nt, Artificial Sequence
  Description of Artificial Sequence: Synthetic oligonucleotide
cccgcccucggucacuagc

SEQ ID NO: 1564326 - RNA, 19 nt, Artificial Sequence
  Description of Artificial Sequence: Synthetic oligonucleotide
cucugccgggugcccugcg

SEQ ID NO: 1564327 - RNA, 19 nt, Artificial Sequence
  Description of Artificial Sequence: Synthetic oligonucleotide
ggcagcggaagucgaucuc

SEQ ID NO: 1564328 - RNA, 19 nt, Artificial Sequence
  Description of Artificial Sequence: Synthetic oligonucleotide
cccgcgcucggugagcacg

SEQ ID NO: 1564329 - RNA, 19 nt, Artificial Sequence
  Description of Artificial Sequence: Synthetic oligonucleotide
gcucuugagcgccggcuuc

SEQ ID NO: 1564330 - RNA, 19 nt, Artificial Sequence
  Description of Artificial Sequence: Synthetic oligonucleotide
agcgcuccgaccgccccga

SEQ ID NO: 1564331 - RNA, 19 nt, Artificial Sequence
  Description of Artificial Sequence: Synthetic oligonucleotide
ccgucaugggcguccccgg

SEQ ID NO: 1564332 - RNA, 19 nt, Artificial Sequence
  Description of Artificial Sequence: Synthetic oligonucleotide
ggcuuugaugcgggcgaag

SEQ ID NO: 1564333 - RNA, 19 nt, Artificial Sequence
  Description of Artificial Sequence: Synthetic oligonucleotide
cccuuacauguuccgccgc

SEQ ID NO: 1564334 - RNA, 19 nt, Artificial Sequence
  Description of Artificial Sequence: Synthetic oligonucleotide
gccuugcucgcugucuagc

SEQ ID NO: 1564335 - RNA, 19 nt, Artificial Sequence
  Description of Artificial Sequence: Synthetic oligonucleotide
cuccgcccugggacgcuag

SEQ ID NO: 1564336 - RNA, 19 nt, Artificial Sequence
  Description of Artificial Sequence: Synthetic oligonucleotide
gcagcccgcgcucggugag

SEQ ID NO: 1564337 - RNA, 19 nt, Artificial Sequence
  Description of Artificial Sequence: Synthetic oligonucleotide
ugugcgcgcugggcggcug

SEQ ID NO: 1564338 - RNA, 19 nt, Artificial Sequence
  Description of Artificial Sequence: Synthetic oligonucleotide
cuccacgcacuccacggcu

SEQ ID NO: 1564339 - RNA, 19 nt, Artificial Sequence
  Description of Artificial Sequence: Synthetic oligonucleotide
cccggugcucuccacgcac

SEQ ID NO: 1564340 - RNA, 19 nt, Artificial Sequence
  Description of Artificial Sequence: Synthetic oligonucleotide
accaaccaggguggacaga

SEQ ID NO: 1564341 - RNA, 19 nt, Artificial Sequence
  Description of Artificial Sequence: Synthetic oligonucleotide
cauguuccgccgcucgccu

SEQ ID NO: 1564342 - RNA, 19 nt, Artificial Sequence
  Description of Artificial Sequence: Synthetic oligonucleotide
gguaugccucgugguuuag

SEQ ID NO: 1564343 - RNA, 19 nt, Artificial Sequence
  Description of Artificial Sequence: Synthetic oligonucleotide
cccagaaccaagggcagga

SEQ ID NO: 1564344 - RNA, 19 nt, Artificial Sequence
  Description of Artificial Sequence: Synthetic oligonucleotide
ggugagcacgcagcgcuuc

SEQ ID NO: 1564345 - RNA, 19 nt, Artificial Sequence
  Description of Artificial Sequence: Synthetic oligonucleotide
agcccgcgcucggugagca

SEQ ID NO: 1564346 - RNA, 19 nt, Artificial Sequence
  Description of Artificial Sequence: Synthetic oligonucleotide
gcacgcccgcuccucuggg

SEQ ID NO: 1564347 - RNA, 19 nt, Artificial Sequence
  Description of Artificial Sequence: Synthetic oligonucleotide
gguucccacggcgccggag

SEQ ID NO: 1564348 - RNA, 19 nt, Artificial Sequence
  Description of Artificial Sequence: Synthetic oligonucleotide
guggcgcccggugcucucc

SEQ ID NO: 1564349 - RNA, 19 nt, Artificial Sequence
  Description of Artificial Sequence: Synthetic oligonucleotide
ccaaccaaccaggguggac

SEQ ID NO: 1564350 - RNA, 19 nt, Artificial Sequence
  Description of Artificial Sequence: Synthetic oligonucleotide
ccggggacgccucgcagac

SEQ ID NO: 1564351 - RNA, 19 nt, Artificial Sequence
  Description of Artificial Sequence: Synthetic oligonucleotide
gcaugucgauaaaauggua

SEQ ID NO: 1564352 - RNA, 19 nt, Artificial Sequence
  Description of Artificial Sequence: Synthetic oligonucleotide
ugcgcgcugggcggcugcu

SEQ ID NO: 1564353 - RNA, 19 nt, Artificial Sequence
  Description of Artificial Sequence: Synthetic oligonucleotide
gggcagcggaagucgaucu

SEQ ID NO: 1564354 - RNA, 19 nt, Artificial Sequence
  Description of Artificial Sequence: Synthetic oligonucleotide
agagggcaauagagguaaa

SEQ ID NO: 1564355 - RNA, 19 nt, Artificial Sequence
  Description of Artificial Sequence: Synthetic oligonucleotide
gccaaacccuuaccccauc

SEQ ID NO: 1564356 - RNA, 19 nt, Artificial Sequence
  Description of Artificial Sequence: Synthetic oligonucleotide
ccgaaugcugauaguuucu

SEQ ID NO: 1564357 - RNA, 19 nt, Artificial Sequence
  Description of Artificial Sequence: Synthetic oligonucleotide
cgucaugggcguccccggg

SEQ ID NO: 1564358 - RNA, 19 nt, Artificial Sequence
  Description of Artificial Sequence: Synthetic oligonucleotide
gcacggaggugguagcggu

SEQ ID NO: 1564359 - RNA, 19 nt, Artificial Sequence
  Description of Artificial Sequence: Synthetic oligonucleotide
ccgcgcucggugagcacgc

SEQ ID NO: 1564360 - RNA, 19 nt, Artificial Sequence
  Description of Artificial Sequence: Synthetic oligonucleotide
cccuuaccccauccccacc

SEQ ID NO: 1564361 - RNA, 19 nt, Artificial Sequence
  Description of Artificial Sequence: Synthetic oligonucleotide
ccucgcagaccgcggcgcc

SEQ ID NO: 1564362 - RNA, 19 nt, Artificial Sequence
  Description of Artificial Sequence: Synthetic oligonucleotide
ccgccgcucgccuccugcg

SEQ ID NO: 1564363 - RNA, 19 nt, Artificial Sequence
  Description of Artificial Sequence: Synthetic oligonucleotide
ccuuacauguuccgccgcu

SEQ ID NO: 1564364 - RNA, 19 nt, Artificial Sequence
  Description of Artificial Sequence: Synthetic oligonucleotide
cgcacgcccgcuccucugg

SEQ ID NO: 1564365 - RNA, 19 nt, Artificial Sequence
  Description of Artificial Sequence: Synthetic oligonucleotide
gcucuccgcccugggacgc

SEQ ID NO: 1564366 - RNA, 19 nt, Artificial Sequence
  Description of Artificial Sequence: Synthetic oligonucleotide
ggcgcgggaagaugcugcu

SEQ ID NO: 1564367 - RNA, 19 nt, Artificial Sequence
  Description of Artificial Sequence: Synthetic oligonucleotide
ccgcccugggacgcuaggc

SEQ ID NO: 1564368 - RNA, 19 nt, Artificial Sequence
  Description of Artificial Sequence: Synthetic oligonucleotide
agcccgccgcugcgcuucu

SEQ ID NO: 1564369 - RNA, 19 nt, Artificial Sequence
  Description of Artificial Sequence: Synthetic oligonucleotide
gcguccccgggguucccac

SEQ ID NO: 1564370 - RNA, 19 nt, Artificial Sequence
  Description of Artificial Sequence: Synthetic oligonucleotide
ccggccgccagugcccuug

SEQ ID NO: 1564371 - RNA, 19 nt, Artificial Sequence
  Description of Artificial Sequence: Synthetic oligonucleotide
ggaugugcccuuacauguu

SEQ ID NO: 1564372 - RNA, 19 nt, Artificial Sequence
  Description of Artificial Sequence: Synthetic oligonucleotide
cgcagcgcuccgaccgccc

SEQ ID NO: 1564373 - RNA, 19 nt, Artificial Sequence
  Description of Artificial Sequence: Synthetic oligonucleotide
ggcgcccggugcucuccac

SEQ ID NO: 1564374 - RNA, 19 nt, Artificial Sequence
  Description of Artificial Sequence: Synthetic oligonucleotide
ccgcacgcccgcuccucug

SEQ ID NO: 1564375 - RNA, 19 nt, Artificial Sequence
  Description of Artificial Sequence: Synthetic oligonucleotide
ggccaaacccuuaccccau

SEQ ID NO: 1564376 - RNA, 19 nt, Artificial Sequence
  Description of Artificial Sequence: Synthetic oligonucleotide
gcggcggucccggcucuug

SEQ ID NO: 1564377 - RNA, 19 nt, Artificial Sequence
  Description of Artificial Sequence: Synthetic oligonucleotide
gcgcagcgcuccgaccgcc

SEQ ID NO: 1564378 - RNA, 19 nt, Artificial Sequence
  Description of Artificial Sequence: Synthetic oligonucleotide
ggaggcgcgggaagaugcu

SEQ ID NO: 1564379 - RNA, 19 nt, Artificial Sequence
  Description of Artificial Sequence: Synthetic oligonucleotide
ggucgccgccgccgucaug

SEQ ID NO: 1564380 - RNA, 19 nt, Artificial Sequence
  Description of Artificial Sequence: Synthetic oligonucleotide
cgugugcgcgcugggcggc

SEQ ID NO: 1564381 - RNA, 19 nt, Artificial Sequence
  Description of Artificial Sequence: Synthetic oligonucleotide
gggacgccucgcagaccgc

SEQ ID NO: 1564382 - RNA, 19 nt, Artificial Sequence
  Description of Artificial Sequence: Synthetic oligonucleotide
ugcggcggucccggcucuu

SEQ ID NO: 1564383 - RNA, 19 nt, Artificial Sequence
  Description of Artificial Sequence: Synthetic oligonucleotide
gcgcgggaagaugcugcuc

SEQ ID NO: 1564384 - RNA, 19 nt, Artificial Sequence
  Description of Artificial Sequence: Synthetic oligonucleotide
cccaaccaaccagggugga

SEQ ID NO: 1564385 - RNA, 19 nt, Artificial Sequence
  Description of Artificial Sequence: Synthetic oligonucleotide
ccucggucacuagcgugaa

SEQ ID NO: 1564386 - RNA, 19 nt, Artificial Sequence
  Description of Artificial Sequence: Synthetic oligonucleotide
cuccgaccgccccgagccu

SEQ ID NO: 1564387 - RNA, 19 nt, Artificial Sequence
  Description of Artificial Sequence: Synthetic oligonucleotide
ccggugcucuccacgcacu

SEQ ID NO: 1564388 - RNA, 19 nt, Artificial Sequence
  Description of Artificial Sequence: Synthetic oligonucleotide
gcccgcgcucggugagcac

SEQ ID NO: 1564389 - RNA, 19 nt, Artificial Sequence
  Description of Artificial Sequence: Synthetic oligonucleotide
gcgcgcugggcggcugcug

SEQ ID NO: 1564390 - RNA, 19 nt, Artificial Sequence
  Description of Artificial Sequence: Synthetic oligonucleotide
gcgcuccgaccgccccgag

SEQ ID NO: 1564391 - RNA, 19 nt, Artificial Sequence
  Description of Artificial Sequence: Synthetic oligonucleotide
ggguucccacggcgccgga

SEQ ID NO: 1564392 - RNA, 19 nt, Artificial Sequence
  Description of Artificial Sequence: Synthetic oligonucleotide
gugugcgcgcugggcggcu

SEQ ID NO: 1564393 - RNA, 19 nt, Artificial Sequence
  Description of Artificial Sequence: Synthetic oligonucleotide
ccuugggccggccgccagu

SEQ ID NO: 1564394 - RNA, 19 nt, Artificial Sequence
  Description of Artificial Sequence: Synthetic oligonucleotide
cggggacgccucgcagacc

SEQ ID NO: 1564395 - RNA, 19 nt, Artificial Sequence
  Description of Artificial Sequence: Synthetic oligonucleotide
ccgaccgccccgagccucu

SEQ ID NO: 1564396 - RNA, 19 nt, Artificial Sequence
  Description of Artificial Sequence: Synthetic oligonucleotide
ccugggacgcuaggcuccu

SEQ ID NO: 1564397 - RNA, 19 nt, Artificial Sequence
  Description of Artificial Sequence: Synthetic oligonucleotide
cggcggucccggcucuuga

SEQ ID NO: 1564398 - RNA, 19 nt, Artificial Sequence
  Description of Artificial Sequence: Synthetic oligonucleotide
ccgggaggcgcgggaagau

SEQ ID NO: 1564399 - RNA, 19 nt, Artificial Sequence
  Description of Artificial Sequence: Synthetic oligonucleotide
cugggacgcuaggcuccuu

SEQ ID NO: 1564400 - RNA, 19 nt, Artificial Sequence
  Description of Artificial Sequence: Synthetic oligonucleotide
cgcgcucggugagcacgca

SEQ ID NO: 1564401 - RNA, 19 nt, Artificial Sequence
  Description of Artificial Sequence: Synthetic oligonucleotide
cccacguacugggcaucuu

SEQ ID NO: 1564402 - RNA, 19 nt, Artificial Sequence
  Description of Artificial Sequence: Synthetic oligonucleotide
auuaaaaggacgcccagcc

SEQ ID NO: 1564403 - RNA, 19 nt, Artificial Sequence
  Description of Artificial Sequence: Synthetic oligonucleotide
uggauuuaggcccaaagcc

SEQ ID NO: 1564404 - RNA, 19 nt, Artificial Sequence
  Description of Artificial Sequence: Synthetic oligonucleotide
aauucauagauuggcauuc

SEQ ID NO: 1564405 - RNA, 19 nt, Artificial Sequence
  Description of Artificial Sequence: Synthetic oligonucleotide
uauggcauauucuugaggu

SEQ ID NO: 1564406 - RNA, 19 nt, Artificial Sequence
  Description of Artificial Sequence: Synthetic oligonucleotide
cauagauuggcauucgagg

SEQ ID NO: 1564407 - RNA, 19 nt, Artificial Sequence
  Description of Artificial Sequence: Synthetic oligonucleotide
auucuugagguccacuugc

SEQ ID NO: 1564408 - RNA, 19 nt, Artificial Sequence
  Description of Artificial Sequence: Synthetic oligonucleotide
uccaccaguaacaugaaga

SEQ ID NO: 1564409 - RNA, 19 nt, Artificial Sequence
  Description of Artificial Sequence: Synthetic oligonucleotide
ugaacacaucaccaaagcg

SEQ ID NO: 1564410 - RNA, 19 nt, Artificial Sequence
  Description of Artificial Sequence: Synthetic oligonucleotide
aaagcccaggaauucauag

SEQ ID NO: 1564411 - RNA, 19 nt, Artificial Sequence
  Description of Artificial Sequence: Synthetic oligonucleotide
augaagaugacugugagca

SEQ ID NO: 1564412 - RNA, 19 nt, Artificial Sequence
  Description of Artificial Sequence: Synthetic oligonucleotide
uaaaaggacgcccagccug

SEQ ID NO: 1564413 - RNA, 19 nt, Artificial Sequence
  Description of Artificial Sequence: Synthetic oligonucleotide
aacacaucaccaaagcgac

SEQ ID NO: 1564414 - RNA, 19 nt, Artificial Sequence
  Description of Artificial Sequence: Synthetic oligonucleotide
ucauagauuggcauucgag

SEQ ID NO: 1564415 - RNA, 19 nt, Artificial Sequence
  Description of Artificial Sequence: Synthetic oligonucleotide
uguucaaaaccucaggaau

SEQ ID NO: 1564416 - RNA, 19 nt, Artificial Sequence
  Description of Artificial Sequence: Synthetic oligonucleotide
acagcuguauggcauauuc

SEQ ID NO: 1564417 - RNA, 19 nt, Artificial Sequence
  Description of Artificial Sequence: Synthetic oligonucleotide
aaaaugagggacgcgauca

SEQ ID NO: 1564418 - RNA, 19 nt, Artificial Sequence
  Description of Artificial Sequence: Synthetic oligonucleotide
gaagaugacugugagcacg

SEQ ID NO: 1564419 - RNA, 19 nt, Artificial Sequence
  Description of Artificial Sequence: Synthetic oligonucleotide
ucuggauuuaggcccaaag

SEQ ID NO: 1564420 - RNA, 19 nt, Artificial Sequence
  Description of Artificial Sequence: Synthetic oligonucleotide
agcuuguacagcuguaugg

SEQ ID NO: 1564421 - RNA, 19 nt, Artificial Sequence
  Description of Artificial Sequence: Synthetic oligonucleotide
acaccucuggauuuaggcc

SEQ ID NO: 1564422 - RNA, 19 nt, Artificial Sequence
  Description of Artificial Sequence: Synthetic oligonucleotide
uuuaccagcaccucacgca

SEQ ID NO: 1564423 - RNA, 19 nt, Artificial Sequence
  Description of Artificial Sequence: Synthetic oligonucleotide
acggccacagaccacagac

SEQ ID NO: 1564424 - RNA, 19 nt, Artificial Sequence
  Description of Artificial Sequence: Synthetic oligonucleotide
uugcacauagcuuugucca

SEQ ID NO: 1564425 - RNA, 19 nt, Artificial Sequence
  Description of Artificial Sequence: Synthetic oligonucleotide
auagauuggcauucgagga

SEQ ID NO: 1564426 - RNA, 19 nt, Artificial Sequence
  Description of Artificial Sequence: Synthetic oligonucleotide
gauacaucagauccaccag

SEQ ID NO: 1564427 - RNA, 19 nt, Artificial Sequence
  Description of Artificial Sequence: Synthetic oligonucleotide
ucacauugcacauagcuuu

SEQ ID NO: 1564428 - RNA, 19 nt, Artificial Sequence
  Description of Artificial Sequence: Synthetic oligonucleotide
acgaugacuggcuuguagg

SEQ ID NO: 1564429 - RNA, 19 nt, Artificial Sequence
  Description of Artificial Sequence: Synthetic oligonucleotide
ucgucugucacccacugcu

SEQ ID NO: 1564430 - RNA, 19 nt, Artificial Sequence
  Description of Artificial Sequence: Synthetic oligonucleotide
gaacacaucaccaaagcga

SEQ ID NO: 1564431 - RNA, 19 nt, Artificial Sequence
  Description of Artificial Sequence: Synthetic oligonucleotide
uucgccacaguuuaccagc

SEQ ID NO: 1564432 - RNA, 19 nt, Artificial Sequence
  Description of Artificial Sequence: Synthetic oligonucleotide
aaaugagggacgcgaucac

SEQ ID NO: 1564433 - RNA, 19 nt, Artificial Sequence
  Description of Artificial Sequence: Synthetic oligonucleotide
gaggcaauggcauggggcc

SEQ ID NO: 1564434 - RNA, 19 nt, Artificial Sequence
  Description of Artificial Sequence: Synthetic oligonucleotide
aguagaggcaauggcaugg

SEQ ID NO: 1564435 - RNA, 19 nt, Artificial Sequence
  Description of Artificial Sequence: Synthetic oligonucleotide
uauucuugagguccacuug

SEQ ID NO: 1564436 - RNA, 19 nt, Artificial Sequence
  Description of Artificial Sequence: Synthetic oligonucleotide
acacagagaaucuucgcug

SEQ ID NO: 1564437 - RNA, 19 nt, Artificial Sequence
  Description of Artificial Sequence: Synthetic oligonucleotide
aggguggacacagagaauc

SEQ ID NO: 1564438 - RNA, 19 nt, Artificial Sequence
  Description of Artificial Sequence: Synthetic oligonucleotide
gaucacauugcacauagcu

SEQ ID NO: 1564439 - RNA, 19 nt, Artificial Sequence
  Description of Artificial Sequence: Synthetic oligonucleotide
agaggcaauggcauggggc

SEQ ID NO: 1564440 - RNA, 19 nt, Artificial Sequence
  Description of Artificial Sequence: Synthetic oligonucleotide
aaagcgacacugaagcuug

SEQ ID NO: 1564441 - RNA, 19 nt, Artificial Sequence
  Description of Artificial Sequence: Synthetic oligonucleotide
caccucuggauuuaggccc

SEQ ID NO: 1564442 - RNA, 19 nt, Artificial Sequence
  Description of Artificial Sequence: Synthetic oligonucleotide
cacaccucuggauuuaggc

SEQ ID NO: 1564443 - RNA, 19 nt, Artificial Sequence
  Description of Artificial Sequence: Synthetic oligonucleotide
cagguugcccaguagaggc

SEQ ID NO: 1564444 - RNA, 19 nt, Artificial Sequence
  Description of Artificial Sequence: Synthetic oligonucleotide
aguccauugaccacgauga

SEQ ID NO: 1564445 - RNA, 19 nt, Artificial Sequence
  Description of Artificial Sequence: Synthetic oligonucleotide
caggaauucauagauuggc

SEQ ID NO: 1564446 - RNA, 19 nt, Artificial Sequence
  Description of Artificial Sequence: Synthetic oligonucleotide
caucagauccaccaguaac

SEQ ID NO: 1564447 - RNA, 19 nt, Artificial Sequence
  Description of Artificial Sequence: Synthetic oligonucleotide
aauggcauggggccaggug

SEQ ID NO: 1564448 - RNA, 19 nt, Artificial Sequence
  Description of Artificial Sequence: Synthetic oligonucleotide
uguauggcauauucuugag

SEQ ID NO: 1564449 - RNA, 19 nt, Artificial Sequence
  Description of Artificial Sequence: Synthetic oligonucleotide
ugggauuaaaaggacgccc

SEQ ID NO: 1564450 - RNA, 19 nt, Artificial Sequence
  Description of Artificial Sequence: Synthetic oligonucleotide
uaacaugaagaugacugug

SEQ ID NO: 1564451 - RNA, 19 nt, Artificial Sequence
  Description of Artificial Sequence: Synthetic oligonucleotide
uggcuuguaggccaucugc

SEQ ID NO: 1564452 - RNA, 19 nt, Artificial Sequence
  Description of Artificial Sequence: Synthetic oligonucleotide
aagcuuguacagcuguaug

SEQ ID NO: 1564453 - RNA, 19 nt, Artificial Sequence
  Description of Artificial Sequence: Synthetic oligonucleotide
gaugacugugagcacggcc

SEQ ID NO: 1564454 - RNA, 19 nt, Artificial Sequence
  Description of Artificial Sequence: Synthetic oligonucleotide
aucuccagucagcagcccc

SEQ ID NO: 1564455 - RNA, 19 nt, Artificial Sequence
  Description of Artificial Sequence: Synthetic oligonucleotide
cugaacacaucaccaaagc

SEQ ID NO: 1564456 - RNA, 19 nt, Artificial Sequence
  Description of Artificial Sequence: Synthetic oligonucleotide
auugaccacgaugacuggc

SEQ ID NO: 1564457 - RNA, 19 nt, Artificial Sequence
  Description of Artificial Sequence: Synthetic oligonucleotide
aggacgcccagccuggucg

SEQ ID NO: 1564458 - RNA, 19 nt, Artificial Sequence
  Description of Artificial Sequence: Synthetic oligonucleotide
uagauuggcauucgaggac

SEQ ID NO: 1564459 - RNA, 19 nt, Artificial Sequence
  Description of Artificial Sequence: Synthetic oligonucleotide
aggugcaaggaccacaccu

SEQ ID NO: 1564460 - RNA, 19 nt, Artificial Sequence
  Description of Artificial Sequence: Synthetic oligonucleotide
uucgaggacggucagcagu

SEQ ID NO: 1564461 - RNA, 19 nt, Artificial Sequence
  Description of Artificial Sequence: Synthetic oligonucleotide
agauuggcauucgaggacg

SEQ ID NO: 1564462 - RNA, 19 nt, Artificial Sequence
  Description of Artificial Sequence: Synthetic oligonucleotide
aagaugacugugagcacgg

SEQ ID NO: 1564463 - RNA, 19 nt, Artificial Sequence
  Description of Artificial Sequence: Synthetic oligonucleotide
aacaugaagaugacuguga

SEQ ID NO: 1564464 - RNA, 19 nt, Artificial Sequence
  Description of Artificial Sequence: Synthetic oligonucleotide
guauggcauauucuugagg

SEQ ID NO: 1564465 - RNA, 19 nt, Artificial Sequence
  Description of Artificial Sequence: Synthetic oligonucleotide
aaaaggacgcccagccugg

SEQ ID NO: 1564466 - RNA, 19 nt, Artificial Sequence
  Description of Artificial Sequence: Synthetic oligonucleotide
aguugcgcaggguggacac

SEQ ID NO: 1564467 - RNA, 19 nt, Artificial Sequence
  Description of Artificial Sequence: Synthetic oligonucleotide
acucaggcccguaaggugc

SEQ ID NO: 1564468 - RNA, 19 nt, Artificial Sequence
  Description of Artificial Sequence: Synthetic oligonucleotide
uugaccacgaugacuggcu

SEQ ID NO: 1564469 - RNA, 19 nt, Artificial Sequence
  Description of Artificial Sequence: Synthetic oligonucleotide
uuaccagcaccucacgcac

SEQ ID NO: 1564470 - RNA, 19 nt, Artificial Sequence
  Description of Artificial Sequence: Synthetic oligonucleotide
cauguucaaaaccucagga

SEQ ID NO: 1564471 - RNA, 19 nt, Artificial Sequence
  Description of Artificial Sequence: Synthetic oligonucleotide
uccagugauuucuugccca

SEQ ID NO: 1564472 - RNA, 19 nt, Artificial Sequence
  Description of Artificial Sequence: Synthetic oligonucleotide
agcuguauggcauauucuu

SEQ ID NO: 1564473 - RNA, 19 nt, Artificial Sequence
  Description of Artificial Sequence: Synthetic oligonucleotide
ucacgcacggccuucaguc

SEQ ID NO: 1564474 - RNA, 19 nt, Artificial Sequence
  Description of Artificial Sequence: Synthetic oligonucleotide
auauucuugagguccacuu

SEQ ID NO: 1564475 - RNA, 19 nt, Artificial Sequence
  Description of Artificial Sequence: Synthetic oligonucleotide
acaguuuaccagcaccuca

SEQ ID NO: 1564476 - RNA, 19 nt, Artificial Sequence
  Description of Artificial Sequence: Synthetic oligonucleotide
cacagagaaucuucgcugc

SEQ ID NO: 1564477 - RNA, 19 nt, Artificial Sequence
  Description of Artificial Sequence: Synthetic oligonucleotide
augacuggcuuguaggcca

SEQ ID NO: 1564478 - RNA, 19 nt, Artificial Sequence
  Description of Artificial Sequence: Synthetic oligonucleotide
auguucaaaaccucaggaa

SEQ ID NO: 1564479 - RNA, 19 nt, Artificial Sequence
  Description of Artificial Sequence: Synthetic oligonucleotide
ucgaggacggucagcagug

SEQ ID NO: 1564480 - RNA, 19 nt, Artificial Sequence
  Description of Artificial Sequence: Synthetic oligonucleotide
ccauugaccacgaugacug

SEQ ID NO: 1564481 - RNA, 19 nt, Artificial Sequence
  Description of Artificial Sequence: Synthetic oligonucleotide
uaucgggcaguccagcgcu

SEQ ID NO: 1564482 - RNA, 19 nt, Artificial Sequence
  Description of Artificial Sequence: Synthetic oligonucleotide
uuaaaaggacgcccagccu

SEQ ID NO: 1564483 - RNA, 19 nt, Artificial Sequence
  Description of Artificial Sequence: Synthetic oligonucleotide
aagcccaggaauucauaga

SEQ ID NO: 1564484 - RNA, 19 nt, Artificial Sequence
  Description of Artificial Sequence: Synthetic oligonucleotide
uggcauucgaggacgguca

SEQ ID NO: 1564485 - RNA, 19 nt, Artificial Sequence
  Description of Artificial Sequence: Synthetic oligonucleotide
aaggugcaaggaccacacc

SEQ ID NO: 1564486 - RNA, 19 nt, Artificial Sequence
  Description of Artificial Sequence: Synthetic oligonucleotide
uucauagauuggcauucga

SEQ ID NO: 1564487 - RNA, 19 nt, Artificial Sequence
  Description of Artificial Sequence: Synthetic oligonucleotide
agcccaggaauucauagau

SEQ ID NO: 1564488 - RNA, 19 nt, Artificial Sequence
  Description of Artificial Sequence: Synthetic oligonucleotide
caguuuaccagcaccucac

SEQ ID NO: 1564489 - RNA, 19 nt, Artificial Sequence
  Description of Artificial Sequence: Synthetic oligonucleotide
aguuuaccagcaccucacg

SEQ ID NO: 1564490 - RNA, 19 nt, Artificial Sequence
  Description of Artificial Sequence: Synthetic oligonucleotide
aucagauccaccaguaaca

SEQ ID NO: 1564491 - RNA, 19 nt, Artificial Sequence
  Description of Artificial Sequence: Synthetic oligonucleotide
ucaccaaagcgacacugaa

SEQ ID NO: 1564492 - RNA, 19 nt, Artificial Sequence
  Description of Artificial Sequence: Synthetic oligonucleotide
caguccauugaccacgaug

SEQ ID NO: 1564493 - RNA, 19 nt, Artificial Sequence
  Description of Artificial Sequence: Synthetic oligonucleotide
auggcauauucuugagguc

SEQ ID NO: 1564494 - RNA, 19 nt, Artificial Sequence
  Description of Artificial Sequence: Synthetic oligonucleotide
ugcacauagcuuuguccag

SEQ ID NO: 1564495 - RNA, 19 nt, Artificial Sequence
  Description of Artificial Sequence: Synthetic oligonucleotide
cuguauggcauauucuuga

SEQ ID NO: 1564496 - RNA, 19 nt, Artificial Sequence
  Description of Artificial Sequence: Synthetic oligonucleotide
acacugaagcuuguacagc

SEQ ID NO: 1564497 - RNA, 19 nt, Artificial Sequence
  Description of Artificial Sequence: Synthetic oligonucleotide
aaggcaucacagagguggc

SEQ ID NO: 1564498 - RNA, 19 nt, Artificial Sequence
  Description of Artificial Sequence: Synthetic oligonucleotide
gauuuaggcccaaagccca

SEQ ID NO: 1564499 - RNA, 19 nt, Artificial Sequence
  Description of Artificial Sequence: Synthetic oligonucleotide
acggucagcagugucuucg

SEQ ID NO: 1564500 - RNA, 19 nt, Artificial Sequence
  Description of Artificial Sequence: Synthetic oligonucleotide
guuuaccagcaccucacgc

SEQ ID NO: 1564501 - RNA, 19 nt, Artificial Sequence
  Description of Artificial Sequence: Synthetic oligonucleotide
gaugacuggcuuguaggcc

SEQ ID NO: 1564502 - RNA, 19 nt, Artificial Sequence
  Description of Artificial Sequence: Synthetic oligonucleotide
uaggccaucugcaggcuga

SEQ ID NO: 1564503 - RNA, 19 nt, Artificial Sequence
  Description of Artificial Sequence: Synthetic oligonucleotide
gcgccgauacaucagaucc

SEQ ID NO: 1564504 - RNA, 19 nt, Artificial Sequence
  Description of Artificial Sequence: Synthetic oligonucleotide
uccauugaccacgaugacu

SEQ ID NO: 1564505 - RNA, 19 nt, Artificial Sequence
  Description of Artificial Sequence: Synthetic oligonucleotide
augacugugagcacggcca

SEQ ID NO: 1564506 - RNA, 19 nt, Artificial Sequence
  Description of Artificial Sequence: Synthetic oligonucleotide
auucauagauuggcauucg

SEQ ID NO: 1564507 - RNA, 19 nt, Artificial Sequence
  Description of Artificial Sequence: Synthetic oligonucleotide
guggguaucgggcagucca

SEQ ID NO: 1564508 - RNA, 19 nt, Artificial Sequence
  Description of Artificial Sequence: Synthetic oligonucleotide
cagaccaucuccagucagc

SEQ ID NO: 1564509 - RNA, 19 nt, Artificial Sequence
  Description of Artificial Sequence: Synthetic oligonucleotide
aggcccguaaggugcaagg

SEQ ID NO: 1564510 - RNA, 19 nt, Artificial Sequence
  Description of Artificial Sequence: Synthetic oligonucleotide
ucuucgccacaguuuacca

SEQ ID NO: 1564511 - RNA, 19 nt, Artificial Sequence
  Description of Artificial Sequence: Synthetic oligonucleotide
acagaccaucuccagucag

SEQ ID NO: 1564512 - RNA, 19 nt, Artificial Sequence
  Description of Artificial Sequence: Synthetic oligonucleotide
ggauuuaggcccaaagccc

SEQ ID NO: 1564513 - RNA, 19 nt, Artificial Sequence
  Description of Artificial Sequence: Synthetic oligonucleotide
aaggaccacaccucuggau

SEQ ID NO: 1564514 - RNA, 19 nt, Artificial Sequence
  Description of Artificial Sequence: Synthetic oligonucleotide
agaaucuucgcugcucucu

SEQ ID NO: 1564515 - RNA, 19 nt, Artificial Sequence
  Description of Artificial Sequence: Synthetic oligonucleotide
agccucgucugucacccac

SEQ ID NO: 1564516 - RNA, 19 nt, Artificial Sequence
  Description of Artificial Sequence: Synthetic oligonucleotide
aaugagggacgcgaucaca

SEQ ID NO: 1564517 - RNA, 19 nt, Artificial Sequence
  Description of Artificial Sequence: Synthetic oligonucleotide
uguacagcuguauggcaua

SEQ ID NO: 1564518 - RNA, 19 nt, Artificial Sequence
  Description of Artificial Sequence: Synthetic oligonucleotide
cuucgccacaguuuaccag

SEQ ID NO: 1564519 - RNA, 19 nt, Artificial Sequence
  Description of Artificial Sequence: Synthetic oligonucleotide
aggaccacaccucuggauu

SEQ ID NO: 1564520 - RNA, 19 nt, Artificial Sequence
  Description of Artificial Sequence: Synthetic oligonucleotide
cacgaugacuggcuuguag

SEQ ID NO: 1564521 - RNA, 19 nt, Artificial Sequence
  Description of Artificial Sequence: Synthetic oligonucleotide
ggaaacauguucaaaaccu

SEQ ID NO: 1564522 - RNA, 19 nt, Artificial Sequence
  Description of Artificial Sequence: Synthetic oligonucleotide
uggguaucgggcaguccag

SEQ ID NO: 1564523 - RNA, 19 nt, Artificial Sequence
  Description of Artificial Sequence: Synthetic oligonucleotide
aaggacgcccagccugguc

SEQ ID NO: 1564524 - RNA, 19 nt, Artificial Sequence
  Description of Artificial Sequence: Synthetic oligonucleotide
gaauucauagauuggcauu

SEQ ID NO: 1564525 - RNA, 19 nt, Artificial Sequence
  Description of Artificial Sequence: Synthetic oligonucleotide
cacauugcacauagcuuug

SEQ ID NO: 1564526 - RNA, 19 nt, Artificial Sequence
  Description of Artificial Sequence: Synthetic oligonucleotide
agcagugucuucgccacag

SEQ ID NO: 1564527 - RNA, 19 nt, Artificial Sequence
  Description of Artificial Sequence: Synthetic oligonucleotide
aacaggucccaggaaggca

SEQ ID NO: 1564528 - RNA, 19 nt, Artificial Sequence
  Description of Artificial Sequence: Synthetic oligonucleotide
caggcugaacacaucacca

SEQ ID NO: 1564529 - RNA, 19 nt, Artificial Sequence
  Description of Artificial Sequence: Synthetic oligonucleotide
cauucgaggacggucagca

SEQ ID NO: 1564530 - RNA, 19 nt, Artificial Sequence
  Description of Artificial Sequence: Synthetic oligonucleotide
guaucgggcaguccagcgc

SEQ ID NO: 1564531 - RNA, 19 nt, Artificial Sequence
  Description of Artificial Sequence: Synthetic oligonucleotide
ugaagaugacugugagcac

SEQ ID NO: 1564532 - RNA, 19 nt, Artificial Sequence
  Description of Artificial Sequence: Synthetic oligonucleotide
acagagguggccagccucg

SEQ ID NO: 1564533 - RNA, 19 nt, Artificial Sequence
  Description of Artificial Sequence: Synthetic oligonucleotide
gccacaguuuaccagcacc

SEQ ID NO: 1564534 - RNA, 19 nt, Artificial Sequence
  Description of Artificial Sequence: Synthetic oligonucleotide
uugcgcaggguggacacag

SEQ ID NO: 1564535 - RNA, 19 nt, Artificial Sequence
  Description of Artificial Sequence: Synthetic oligonucleotide
cugggauuaaaaggacgcc

SEQ ID NO: 1564536 - RNA, 19 nt, Artificial Sequence
  Description of Artificial Sequence: Synthetic oligonucleotide
gucagcagugucuucgcca

SEQ ID NO: 1564537 - RNA, 19 nt, Artificial Sequence
  Description of Artificial Sequence: Synthetic oligonucleotide
guaacaugaagaugacugu

SEQ ID NO: 1564538 - RNA, 19 nt, Artificial Sequence
  Description of Artificial Sequence: Synthetic oligonucleotide
gguaucgggcaguccagcg

SEQ ID NO: 1564539 - RNA, 19 nt, Artificial Sequence
  Description of Artificial Sequence: Synthetic oligonucleotide
ucggcgaaggcaucacaga

SEQ ID NO: 1564540 - RNA, 19 nt, Artificial Sequence
  Description of Artificial Sequence: Synthetic oligonucleotide
gucuucgccacaguuuacc

SEQ ID NO: 1564541 - RNA, 19 nt, Artificial Sequence
  Description of Artificial Sequence: Synthetic oligonucleotide
accacgaugacuggcuugu

SEQ ID NO: 1564542 - RNA, 19 nt, Artificial Sequence
  Description of Artificial Sequence: Synthetic oligonucleotide
gauuggcauucgaggacgg

SEQ ID NO: 1564543 - RNA, 19 nt, Artificial Sequence
  Description of Artificial Sequence: Synthetic oligonucleotide
gauuucuugcccaggccca

SEQ ID NO: 1564544 - RNA, 19 nt, Artificial Sequence
  Description of Artificial Sequence: Synthetic oligonucleotide
gaacaggucccaggaaggc

SEQ ID NO: 1564545 - RNA, 19 nt, Artificial Sequence
  Description of Artificial Sequence: Synthetic oligonucleotide
ucagauccaccaguaacau

SEQ ID NO: 1564546 - RNA, 19 nt, Artificial Sequence
  Description of Artificial Sequence: Synthetic oligonucleotide
guagaggcaauggcauggg

SEQ ID NO: 1564547 - RNA, 19 nt, Artificial Sequence
  Description of Artificial Sequence: Synthetic oligonucleotide
uaccagcaccucacgcacg

SEQ ID NO: 1564548 - RNA, 19 nt, Artificial Sequence
  Description of Artificial Sequence: Synthetic oligonucleotide
cccguaaggugcaaggacc

SEQ ID NO: 1564549 - RNA, 19 nt, Artificial Sequence
  Description of Artificial Sequence: Synthetic oligonucleotide
agcagguugcccaguagag

SEQ ID NO: 1564550 - RNA, 19 nt, Artificial Sequence
  Description of Artificial Sequence: Synthetic oligonucleotide
ccaggaauucauagauugg

SEQ ID NO: 1564551 - RNA, 19 nt, Artificial Sequence
  Description of Artificial Sequence: Synthetic oligonucleotide
gccaugaacaggucccagg

SEQ ID NO: 1564552 - RNA, 19 nt, Artificial Sequence
  Description of Artificial Sequence: Synthetic oligonucleotide
cauugaccacgaugacugg

SEQ ID NO: 1564553 - RNA, 19 nt, Artificial Sequence
  Description of Artificial Sequence: Synthetic oligonucleotide
uucuugcccaggcccaagu

SEQ ID NO: 1564554 - RNA, 19 nt, Artificial Sequence
  Description of Artificial Sequence: Synthetic oligonucleotide
agaccaucuccagucagca

SEQ ID NO: 1564555 - RNA, 19 nt, Artificial Sequence
  Description of Artificial Sequence: Synthetic oligonucleotide
cagcaccucacgcacggcc

SEQ ID NO: 1564556 - RNA, 19 nt, Artificial Sequence
  Description of Artificial Sequence: Synthetic oligonucleotide
cacucaggcccguaaggug

SEQ ID NO: 1564557 - RNA, 19 nt, Artificial Sequence
  Description of Artificial Sequence: Synthetic oligonucleotide
gugucuucgccacaguuua

SEQ ID NO: 1564558 - RNA, 19 nt, Artificial Sequence
  Description of Artificial Sequence: Synthetic oligonucleotide
aucacauugcacauagcuu

SEQ ID NO: 1564559 - RNA, 19 nt, Artificial Sequence
  Description of Artificial Sequence: Synthetic oligonucleotide
guaaggugcaaggaccaca

SEQ ID NO: 1564560 - RNA, 19 nt, Artificial Sequence
  Description of Artificial Sequence: Synthetic oligonucleotide
ucuccacucaggcccguaa

SEQ ID NO: 1564561 - RNA, 19 nt, Artificial Sequence
  Description of Artificial Sequence: Synthetic oligonucleotide
aggcccaaguugcgcaggg

SEQ ID NO: 1564562 - RNA, 19 nt, Artificial Sequence
  Description of Artificial Sequence: Synthetic oligonucleotide
aggcugaacacaucaccaa

SEQ ID NO: 1564563 - RNA, 19 nt, Artificial Sequence
  Description of Artificial Sequence: Synthetic oligonucleotide
gucagcagccccauagcug

SEQ ID NO: 1564564 - RNA, 19 nt, Artificial Sequence
  Description of Artificial Sequence: Synthetic oligonucleotide
aaguugcgcaggguggaca

SEQ ID NO: 1564565 - RNA, 19 nt, Artificial Sequence
  Description of Artificial Sequence: Synthetic oligonucleotide
cagucagcagccccauagc

SEQ ID NO: 1564566 - RNA, 19 nt, Artificial Sequence
  Description of Artificial Sequence: Synthetic oligonucleotide
acaucagauccaccaguaa

SEQ ID NO: 1564567 - RNA, 19 nt, Artificial Sequence
  Description of Artificial Sequence: Synthetic oligonucleotide
caguagaggcaauggcaug

SEQ ID NO: 1564568 - RNA, 19 nt, Artificial Sequence
  Description of Artificial Sequence: Synthetic oligonucleotide
aggcaucacagagguggcc

SEQ ID NO: 1564569 - RNA, 19 nt, Artificial Sequence
  Description of Artificial Sequence: Synthetic oligonucleotide
ucgccacaguuuaccagca

SEQ ID NO: 1564570 - RNA, 19 nt, Artificial Sequence
  Description of Artificial Sequence: Synthetic oligonucleotide
ugcccaggcccaaguugcg

SEQ ID NO: 1564571 - RNA, 19 nt, Artificial Sequence
  Description of Artificial Sequence: Synthetic oligonucleotide
uugcccaguagaggcaaug

SEQ ID NO: 1564572 - RNA, 19 nt, Artificial Sequence
  Description of Artificial Sequence: Synthetic oligonucleotide
agcgcuggcgccgauacau

SEQ ID NO: 1564573 - RNA, 19 nt, Artificial Sequence
  Description of Artificial Sequence: Synthetic oligonucleotide
cgauacaucagauccacca

SEQ ID NO: 1564574 - RNA, 19 nt, Artificial Sequence
  Description of Artificial Sequence: Synthetic oligonucleotide
ggccacagaccacagacca

SEQ ID NO: 1564575 - RNA, 19 nt, Artificial Sequence
  Description of Artificial Sequence: Synthetic oligonucleotide
cuccacucaggcccguaag

SEQ ID NO: 1564576 - RNA, 19 nt, Artificial Sequence
  Description of Artificial Sequence: Synthetic oligonucleotide
cacugaagcuuguacagcu

SEQ ID NO: 1564577 - RNA, 19 nt, Artificial Sequence
  Description of Artificial Sequence: Synthetic oligonucleotide
auucgaggacggucagcag

SEQ ID NO: 1564578 - RNA, 19 nt, Artificial Sequence
  Description of Artificial Sequence: Synthetic oligonucleotide
gagguggccagccucgucu

SEQ ID NO: 1564579 - RNA, 19 nt, Artificial Sequence
  Description of Artificial Sequence: Synthetic oligonucleotide
aucaccaaagcgacacuga

SEQ ID NO: 1564580 - RNA, 19 nt, Artificial Sequence
  Description of Artificial Sequence: Synthetic oligonucleotide
agugucuucgccacaguuu

SEQ ID NO: 1564581 - RNA, 19 nt, Artificial Sequence
  Description of Artificial Sequence: Synthetic oligonucleotide
ggcgaaggcaucacagagg

SEQ ID NO: 1564582 - RNA, 19 nt, Artificial Sequence
  Description of Artificial Sequence: Synthetic oligonucleotide
cccaaguugcgcagggugg

SEQ ID NO: 1564583 - RNA, 19 nt, Artificial Sequence
  Description of Artificial Sequence: Synthetic oligonucleotide
cacauagcuuuguccagca

SEQ ID NO: 1564584 - RNA, 19 nt, Artificial Sequence
  Description of Artificial Sequence: Synthetic oligonucleotide
acuggcuuguaggccaucu

SEQ ID NO: 1564585 - RNA, 19 nt, Artificial Sequence
  Description of Artificial Sequence: Synthetic oligonucleotide
caccaguaacaugaagaug

SEQ ID NO: 1564586 - RNA, 19 nt, Artificial Sequence
  Description of Artificial Sequence: Synthetic oligonucleotide
agaccacagaccaucucca

SEQ ID NO: 1564587 - RNA, 19 nt, Artificial Sequence
  Description of Artificial Sequence: Synthetic oligonucleotide
cagagaaucuucgcugcuc

SEQ ID NO: 1564588 - RNA, 19 nt, Artificial Sequence
  Description of Artificial Sequence: Synthetic oligonucleotide
ggaauucauagauuggcau

SEQ ID NO: 1564589 - RNA, 19 nt, Artificial Sequence
  Description of Artificial Sequence: Synthetic oligonucleotide
ugucuucgccacaguuuac

SEQ ID NO: 1564590 - RNA, 19 nt, Artificial Sequence
  Description of Artificial Sequence: Synthetic oligonucleotide
acgcacggccuucagucca

SEQ ID NO: 1564591 - RNA, 19 nt, Artificial Sequence
  Description of Artificial Sequence: Synthetic oligonucleotide
gagaaucuucgcugcucuc

SEQ ID NO: 1564592 - RNA, 19 nt, Artificial Sequence
  Description of Artificial Sequence: Synthetic oligonucleotide
gcuguauggcauauucuug

SEQ ID NO: 1564593 - RNA, 19 nt, Artificial Sequence
  Description of Artificial Sequence: Synthetic oligonucleotide
augagggacgcgaucacau

SEQ ID NO: 1564594 - RNA, 19 nt, Artificial Sequence
  Description of Artificial Sequence: Synthetic oligonucleotide
gcgacacugaagcuuguac

SEQ ID NO: 1564595 - RNA, 19 nt, Artificial Sequence
  Description of Artificial Sequence: Synthetic oligonucleotide
cacgcacggccuucagucc

SEQ ID NO: 1564596 - RNA, 19 nt, Artificial Sequence
  Description of Artificial Sequence: Synthetic oligonucleotide
ucgggcaguccagcgcugg

SEQ ID NO: 1564597 - RNA, 19 nt, Artificial Sequence
  Description of Artificial Sequence: Synthetic oligonucleotide
gcccaaguugcgcagggug

SEQ ID NO: 1564598 - RNA, 19 nt, Artificial Sequence
  Description of Artificial Sequence: Synthetic oligonucleotide
gcagguugcccaguagagg

SEQ ID NO: 1564599 - RNA, 19 nt, Artificial Sequence
  Description of Artificial Sequence: Synthetic oligonucleotide
aucugcaggcugaacacau

SEQ ID NO: 1564600 - RNA, 19 nt, Artificial Sequence
  Description of Artificial Sequence: Synthetic oligonucleotide
uggccagccucgucuguca

SEQ ID NO: 1564601 - RNA, 19 nt, Artificial Sequence
  Description of Artificial Sequence: Synthetic oligonucleotide
cuggcuuguaggccaucug

SEQ ID NO: 1564602 - RNA, 19 nt, Artificial Sequence
  Description of Artificial Sequence: Synthetic oligonucleotide
ugaccacgaugacuggcuu

SEQ ID NO: 1564603 - RNA, 19 nt, Artificial Sequence
  Description of Artificial Sequence: Synthetic oligonucleotide
gaagcuuguacagcuguau

SEQ ID NO: 1564604 - RNA, 19 nt, Artificial Sequence
  Description of Artificial Sequence: Synthetic oligonucleotide
caucacagagguggccagc

SEQ ID NO: 1564605 - RNA, 19 nt, Artificial Sequence
  Description of Artificial Sequence: Synthetic oligonucleotide
cucgucugucacccacugc

SEQ ID NO: 1564606 - RNA, 19 nt, Artificial Sequence
  Description of Artificial Sequence: Synthetic oligonucleotide
ggugcaaggaccacaccuc

SEQ ID NO: 1564607 - RNA, 19 nt, Artificial Sequence
  Description of Artificial Sequence: Synthetic oligonucleotide
ggcaguccagcgcuggcgc

SEQ ID NO: 1564608 - RNA, 19 nt, Artificial Sequence
  Description of Artificial Sequence: Synthetic oligonucleotide
caguccagcgcuggcgccg

SEQ ID NO: 1564609 - RNA, 19 nt, Artificial Sequence
  Description of Artificial Sequence: Synthetic oligonucleotide
agccuggucggcgaaggca

SEQ ID NO: 1564610 - RNA, 19 nt, Artificial Sequence
  Description of Artificial Sequence: Synthetic oligonucleotide
gcccaguagaggcaauggc

SEQ ID NO: 1564611 - RNA, 19 nt, Artificial Sequence
  Description of Artificial Sequence: Synthetic oligonucleotide
cgaugacuggcuuguaggc

SEQ ID NO: 1564612 - RNA, 19 nt, Artificial Sequence
  Description of Artificial Sequence: Synthetic oligonucleotide
ugacuggcuuguaggccau

SEQ ID NO: 1564613 - RNA, 19 nt, Artificial Sequence
  Description of Artificial Sequence: Synthetic oligonucleotide
ccagccucgucugucaccc

SEQ ID NO: 1564614 - RNA, 19 nt, Artificial Sequence
  Description of Artificial Sequence: Synthetic oligonucleotide
acauagcuuuguccagcau

SEQ ID NO: 1564615 - RNA, 19 nt, Artificial Sequence
  Description of Artificial Sequence: Synthetic oligonucleotide
gcgaaggcaucacagaggu

SEQ ID NO: 1564616 - RNA, 19 nt, Artificial Sequence
  Description of Artificial Sequence: Synthetic oligonucleotide
gccgauacaucagauccac

SEQ ID NO: 1564617 - RNA, 19 nt, Artificial Sequence
  Description of Artificial Sequence: Synthetic oligonucleotide
agguggguaucgggcaguc

SEQ ID NO: 1564618 - RNA, 19 nt, Artificial Sequence
  Description of Artificial Sequence: Synthetic oligonucleotide
auuggcauucgaggacggu

SEQ ID NO: 1564619 - RNA, 19 nt, Artificial Sequence
  Description of Artificial Sequence: Synthetic oligonucleotide
gcccguaaggugcaaggac

SEQ ID NO: 1564620 - RNA, 19 nt, Artificial Sequence
  Description of Artificial Sequence: Synthetic oligonucleotide
guccauugaccacgaugac

SEQ ID NO: 1564621 - RNA, 19 nt, Artificial Sequence
  Description of Artificial Sequence: Synthetic oligonucleotide
augcgggccaggggcgucc

SEQ ID NO: 1564622 - RNA, 19 nt, Artificial Sequence
  Description of Artificial Sequence: Synthetic oligonucleotide
ccaugaacaggucccagga

SEQ ID NO: 1564623 - RNA, 19 nt, Artificial Sequence
  Description of Artificial Sequence: Synthetic oligonucleotide
uggcgccgauacaucagau

SEQ ID NO: 1564624 - RNA, 19 nt, Artificial Sequence
  Description of Artificial Sequence: Synthetic oligonucleotide
cuggcgccgauacaucaga

SEQ ID NO: 1564625 - RNA, 19 nt, Artificial Sequence
  Description of Artificial Sequence: Synthetic oligonucleotide
caugaacaggucccaggaa

SEQ ID NO: 1564626 - RNA, 19 nt, Artificial Sequence
  Description of Artificial Sequence: Synthetic oligonucleotide
cacggccuucaguccauug

SEQ ID NO: 1564627 - RNA, 19 nt, Artificial Sequence
  Description of Artificial Sequence: Synthetic oligonucleotide
ugcgcaggguggacacaga

SEQ ID NO: 1564628 - RNA, 19 nt, Artificial Sequence
  Description of Artificial Sequence: Synthetic oligonucleotide
cuuuguccagcauggugcu

SEQ ID NO: 1564629 - RNA, 19 nt, Artificial Sequence
  Description of Artificial Sequence: Synthetic oligonucleotide
caaagcgacacugaagcuu

SEQ ID NO: 1564630 - RNA, 19 nt, Artificial Sequence
  Description of Artificial Sequence: Synthetic oligonucleotide
ccacagaccacagaccauc

SEQ ID NO: 1564631 - RNA, 19 nt, Artificial Sequence
  Description of Artificial Sequence: Synthetic oligonucleotide
aaaggacgcccagccuggu

SEQ ID NO: 1564632 - RNA, 19 nt, Artificial Sequence
  Description of Artificial Sequence: Synthetic oligonucleotide
ggcauucgaggacggucag

SEQ ID NO: 1564633 - RNA, 19 nt, Artificial Sequence
  Description of Artificial Sequence: Synthetic oligonucleotide
auuucuugcccaggcccaa

SEQ ID NO: 1564634 - RNA, 19 nt, Artificial Sequence
  Description of Artificial Sequence: Synthetic oligonucleotide
ggucagcagugucuucgcc

SEQ ID NO: 1564635 - RNA, 19 nt, Artificial Sequence
  Description of Artificial Sequence: Synthetic oligonucleotide
cacagaccaucuccaguca

SEQ ID NO: 1564636 - RNA, 19 nt, Artificial Sequence
  Description of Artificial Sequence: Synthetic oligonucleotide
ggcgccgauacaucagauc

SEQ ID NO: 1564637 - RNA, 19 nt, Artificial Sequence
  Description of Artificial Sequence: Synthetic oligonucleotide
caggcccaaguugcgcagg

SEQ ID NO: 1564638 - RNA, 19 nt, Artificial Sequence
  Description of Artificial Sequence: Synthetic oligonucleotide
caaguugcgcaggguggac

SEQ ID NO: 1564639 - RNA, 19 nt, Artificial Sequence
  Description of Artificial Sequence: Synthetic oligonucleotide
cgacacugaagcuuguaca

SEQ ID NO: 1564640 - RNA, 19 nt, Artificial Sequence
  Description of Artificial Sequence: Synthetic oligonucleotide
acgcccagccuggucggcg

SEQ ID NO: 1564641 - RNA, 19 nt, Artificial Sequence
  Description of Artificial Sequence: Synthetic oligonucleotide
gugcaaggaccacaccucu

SEQ ID NO: 1564642 - RNA, 19 nt, Artificial Sequence
  Description of Artificial Sequence: Synthetic oligonucleotide
caucugcaggcugaacaca

SEQ ID NO: 1564643 - RNA, 19 nt, Artificial Sequence
  Description of Artificial Sequence: Synthetic oligonucleotide
cggcgaaggcaucacagag

SEQ ID NO: 1564644 - RNA, 19 nt, Artificial Sequence
  Description of Artificial Sequence: Synthetic oligonucleotide
uggucggcgaaggcaucac

SEQ ID NO: 1564645 - RNA, 19 nt, Artificial Sequence
  Description of Artificial Sequence: Synthetic oligonucleotide
gacggucagcagugucuuc

SEQ ID NO: 1564646 - RNA, 19 nt, Artificial Sequence
  Description of Artificial Sequence: Synthetic oligonucleotide
cucaggcccguaaggugca

SEQ ID NO: 1564647 - RNA, 19 nt, Artificial Sequence
  Description of Artificial Sequence: Synthetic oligonucleotide
ggacgcccagccuggucgg

SEQ ID NO: 1564648 - RNA, 19 nt, Artificial Sequence
  Description of Artificial Sequence: Synthetic oligonucleotide
uacagcuguauggcauauu

SEQ ID NO: 1564649 - RNA, 19 nt, Artificial Sequence
  Description of Artificial Sequence: Synthetic oligonucleotide
ccacaccucuggauuuagg

SEQ ID NO: 1564650 - RNA, 19 nt, Artificial Sequence
  Description of Artificial Sequence: Synthetic oligonucleotide
aggucccaggaaggcauca

SEQ ID NO: 1564651 - RNA, 19 nt, Artificial Sequence
  Description of Artificial Sequence: Synthetic oligonucleotide
cauauucuugagguccacu

SEQ ID NO: 1564652 - RNA, 19 nt, Artificial Sequence
  Description of Artificial Sequence: Synthetic oligonucleotide
cagcuguauggcauauucu

SEQ ID NO: 1564653 - RNA, 19 nt, Artificial Sequence
  Description of Artificial Sequence: Synthetic oligonucleotide
ggccuucaguccauugacc

SEQ ID NO: 1564654 - RNA, 19 nt, Artificial Sequence
  Description of Artificial Sequence: Synthetic oligonucleotide
aggcaauggcauggggcca

SEQ ID NO: 1564655 - RNA, 19 nt, Artificial Sequence
  Description of Artificial Sequence: Synthetic oligonucleotide
caggcccguaaggugcaag

SEQ ID NO: 1564656 - RNA, 19 nt, Artificial Sequence
  Description of Artificial Sequence: Synthetic oligonucleotide
ccagcgcuggcgccgauac

SEQ ID NO: 1564657 - RNA, 19 nt, Artificial Sequence
  Description of Artificial Sequence: Synthetic oligonucleotide
caucuccagucagcagccc

SEQ ID NO: 1564658 - RNA, 19 nt, Artificial Sequence
  Description of Artificial Sequence: Synthetic oligonucleotide
ccagguggguaucgggcag

SEQ ID NO: 1564659 - RNA, 19 nt, Artificial Sequence
  Description of Artificial Sequence: Synthetic oligonucleotide
cacuugcagcagguugccc

SEQ ID NO: 1564660 - RNA, 19 nt, Artificial Sequence
  Description of Artificial Sequence: Synthetic oligonucleotide
agguugcccaguagaggca

SEQ ID NO: 1564661 - RNA, 19 nt, Artificial Sequence
  Description of Artificial Sequence: Synthetic oligonucleotide
auggggccagguggguauc

SEQ ID NO: 1564662 - RNA, 19 nt, Artificial Sequence
  Description of Artificial Sequence: Synthetic oligonucleotide
cagccuggucggcgaaggc

SEQ ID NO: 1564663 - RNA, 19 nt, Artificial Sequence
  Description of Artificial Sequence: Synthetic oligonucleotide
gacugugagcacggccaca

SEQ ID NO: 1564664 - RNA, 19 nt, Artificial Sequence
  Description of Artificial Sequence: Synthetic oligonucleotide
uccagucagcagccccaua

SEQ ID NO: 1564665 - RNA, 19 nt, Artificial Sequence
  Description of Artificial Sequence: Synthetic oligonucleotide
cauggggccagguggguau

SEQ ID NO: 1564666 - RNA, 19 nt, Artificial Sequence
  Description of Artificial Sequence: Synthetic oligonucleotide
ccgauacaucagauccacc

SEQ ID NO: 1564667 - RNA, 19 nt, Artificial Sequence
  Description of Artificial Sequence: Synthetic oligonucleotide
ccguaaggugcaaggacca

SEQ ID NO: 1564668 - RNA, 19 nt, Artificial Sequence
  Description of Artificial Sequence: Synthetic oligonucleotide
agcgacacugaagcuugua

SEQ ID NO: 1564669 - RNA, 19 nt, Artificial Sequence
  Description of Artificial Sequence: Synthetic oligonucleotide
guggccagccucgucuguc

SEQ ID NO: 1564670 - RNA, 19 nt, Artificial Sequence
  Description of Artificial Sequence: Synthetic oligonucleotide
aagcgacacugaagcuugu

SEQ ID NO: 1564671 - RNA, 19 nt, Artificial Sequence
  Description of Artificial Sequence: Synthetic oligonucleotide
ccagccuggucggcgaagg

SEQ ID NO: 1564672 - RNA, 19 nt, Artificial Sequence
  Description of Artificial Sequence: Synthetic oligonucleotide
cuucgcugcucucuccacu

SEQ ID NO: 1564673 - RNA, 19 nt, Artificial Sequence
  Description of Artificial Sequence: Synthetic oligonucleotide
ccaggcccaaguugcgcag

SEQ ID NO: 1564674 - RNA, 19 nt, Artificial Sequence
  Description of Artificial Sequence: Synthetic oligonucleotide
ccaguagaggcaauggcau

SEQ ID NO: 1564675 - RNA, 19 nt, Artificial Sequence
  Description of Artificial Sequence: Synthetic oligonucleotide
gaccacaccucuggauuua

SEQ ID NO: 1564676 - RNA, 19 nt, Artificial Sequence
  Description of Artificial Sequence: Synthetic oligonucleotide
ccaccaguaacaugaagau

SEQ ID NO: 1564677 - RNA, 19 nt, Artificial Sequence
  Description of Artificial Sequence: Synthetic oligonucleotide
ggguaucgggcaguccagc

SEQ ID NO: 1564678 - RNA, 19 nt, Artificial Sequence
  Description of Artificial Sequence: Synthetic oligonucleotide
gguugcccaguagaggcaa

SEQ ID NO: 1564679 - RNA, 19 nt, Artificial Sequence
  Description of Artificial Sequence: Synthetic oligonucleotide
aguccagcgcuggcgccga

SEQ ID NO: 1564680 - RNA, 19 nt, Artificial Sequence
  Description of Artificial Sequence: Synthetic oligonucleotide
gcauucgaggacggucagc

SEQ ID NO: 1564681 - RNA, 19 nt, Artificial Sequence
  Description of Artificial Sequence: Synthetic oligonucleotide
gcaguccagcgcuggcgcc

SEQ ID NO: 1564682 - RNA, 19 nt, Artificial Sequence
  Description of Artificial Sequence: Synthetic oligonucleotide
gcauauucuugagguccac

SEQ ID NO: 1564683 - RNA, 19 nt, Artificial Sequence
  Description of Artificial Sequence: Synthetic oligonucleotide
ggucggcgaaggcaucaca

SEQ ID NO: 1564684 - RNA, 19 nt, Artificial Sequence
  Description of Artificial Sequence: Synthetic oligonucleotide
uccagcgcuggcgccgaua

SEQ ID NO: 1564685 - RNA, 19 nt, Artificial Sequence
  Description of Artificial Sequence: Synthetic oligonucleotide
gguggguaucgggcagucc

SEQ ID NO: 1564686 - RNA, 19 nt, Artificial Sequence
  Description of Artificial Sequence: Synthetic oligonucleotide
cagugucuucgccacaguu

SEQ ID NO: 1564687 - RNA, 19 nt, Artificial Sequence
  Description of Artificial Sequence: Synthetic oligonucleotide
gacgcccagccuggucggc

SEQ ID NO: 1564688 - RNA, 19 nt, Artificial Sequence
  Description of Artificial Sequence: Synthetic oligonucleotide
cucacgcacggccuucagu

SEQ ID NO: 1564689 - RNA, 19 nt, Artificial Sequence
  Description of Artificial Sequence: Synthetic oligonucleotide
gcaauggcauggggccagg

SEQ ID NO: 1564690 - RNA, 19 nt, Artificial Sequence
  Description of Artificial Sequence: Synthetic oligonucleotide
gcccaaagcccaggaauuc

SEQ ID NO: 1564691 - RNA, 19 nt, Artificial Sequence
  Description of Artificial Sequence: Synthetic oligonucleotide
guugcgcaggguggacaca

SEQ ID NO: 1564692 - RNA, 19 nt, Artificial Sequence
  Description of Artificial Sequence: Synthetic oligonucleotide
ucaggcccguaaggugcaa

SEQ ID NO: 1564693 - RNA, 19 nt, Artificial Sequence
  Description of Artificial Sequence: Synthetic oligonucleotide
ggcccguaaggugcaagga

SEQ ID NO: 1564694 - RNA, 19 nt, Artificial Sequence
  Description of Artificial Sequence: Synthetic oligonucleotide
ccaaguugcgcagggugga

SEQ ID NO: 1564695 - RNA, 19 nt, Artificial Sequence
  Description of Artificial Sequence: Synthetic oligonucleotide
caccucacgcacggccuuc

SEQ ID NO: 1564696 - RNA, 19 nt, Artificial Sequence
  Description of Artificial Sequence: Synthetic oligonucleotide
gacuggcuuguaggccauc

SEQ ID NO: 1564697 - RNA, 19 nt, Artificial Sequence
  Description of Artificial Sequence: Synthetic oligonucleotide
cugugagcacggccacaga

SEQ ID NO: 1564698 - RNA, 19 nt, Artificial Sequence
  Description of Artificial Sequence: Synthetic oligonucleotide
cggucagcagugucuucgc

SEQ ID NO: 1564699 - RNA, 19 nt, Artificial Sequence
  Description of Artificial Sequence: Synthetic oligonucleotide
aucgggcaguccagcgcug

SEQ ID NO: 1564700 - RNA, 19 nt, Artificial Sequence
  Description of Artificial Sequence: Synthetic oligonucleotide
guacagcuguauggcauau

SEQ ID NO: 1564701 - RNA, 19 nt, Artificial Sequence
  Description of Artificial Sequence: Synthetic oligonucleotide
cacccacugcuccagugau

SEQ ID NO: 1564702 - RNA, 19 nt, Artificial Sequence
  Description of Artificial Sequence: Synthetic oligonucleotide
ggccagccucgucugucac

SEQ ID NO: 1564703 - RNA, 19 nt, Artificial Sequence
  Description of Artificial Sequence: Synthetic oligonucleotide
ggaccacaccucuggauuu

SEQ ID NO: 1564704 - RNA, 19 nt, Artificial Sequence
  Description of Artificial Sequence: Synthetic oligonucleotide
cgucugucacccacugcuc

SEQ ID NO: 1564705 - RNA, 19 nt, Artificial Sequence
  Description of Artificial Sequence: Synthetic oligonucleotide
cagcagugucuucgccaca

SEQ ID NO: 1564706 - RNA, 19 nt, Artificial Sequence
  Description of Artificial Sequence: Synthetic oligonucleotide
gguggacacagagaaucuu

SEQ ID NO: 1564707 - RNA, 19 nt, Artificial Sequence
  Description of Artificial Sequence: Synthetic oligonucleotide
cguaaggugcaaggaccac

SEQ ID NO: 1564708 - RNA, 19 nt, Artificial Sequence
  Description of Artificial Sequence: Synthetic oligonucleotide
cgcaggguggacacagaga

SEQ ID NO: 1564709 - RNA, 19 nt, Artificial Sequence
  Description of Artificial Sequence: Synthetic oligonucleotide
ggguggacacagagaaucu

SEQ ID NO: 1564710 - RNA, 19 nt, Artificial Sequence
  Description of Artificial Sequence: Synthetic oligonucleotide
caggguggacacagagaau

SEQ ID NO: 1564711 - RNA, 19 nt, Artificial Sequence
  Description of Artificial Sequence: Synthetic oligonucleotide
cgccgauacaucagaucca

SEQ ID NO: 1564712 - RNA, 19 nt, Artificial Sequence
  Description of Artificial Sequence: Synthetic oligonucleotide
ccaaagcgacacugaagcu

SEQ ID NO: 1564713 - RNA, 19 nt, Artificial Sequence
  Description of Artificial Sequence: Synthetic oligonucleotide
ccucacgcacggccuucag

SEQ ID NO: 1564714 - RNA, 19 nt, Artificial Sequence
  Description of Artificial Sequence: Synthetic oligonucleotide
ggcccaaagcccaggaauu

SEQ ID NO: 1564715 - RNA, 19 nt, Artificial Sequence
  Description of Artificial Sequence: Synthetic oligonucleotide
cgcuggcgccgauacauca

SEQ ID NO: 1564716 - RNA, 19 nt, Artificial Sequence
  Description of Artificial Sequence: Synthetic oligonucleotide
gccuggucggcgaaggcau

SEQ ID NO: 1564717 - RNA, 19 nt, Artificial Sequence
  Description of Artificial Sequence: Synthetic oligonucleotide
ggacggucagcagugucuu

SEQ ID NO: 1564718 - RNA, 19 nt, Artificial Sequence
  Description of Artificial Sequence: Synthetic oligonucleotide
cagcgcuggcgccgauaca

SEQ ID NO: 1564719 - RNA, 19 nt, Artificial Sequence
  Description of Artificial Sequence: Synthetic oligonucleotide
ggccaucugcaggcugaac

SEQ ID NO: 1564720 - RNA, 19 nt, Artificial Sequence
  Description of Artificial Sequence: Synthetic oligonucleotide
ccacucaggcccguaaggu

SEQ ID NO: 1564721 - RNA, 19 nt, Artificial Sequence
  Description of Artificial Sequence: Synthetic oligonucleotide
cagccucgucugucaccca

SEQ ID NO: 1564722 - RNA, 19 nt, Artificial Sequence
  Description of Artificial Sequence: Synthetic oligonucleotide
ccagcaccucacgcacggc

SEQ ID NO: 1564723 - RNA, 19 nt, Artificial Sequence
  Description of Artificial Sequence: Synthetic oligonucleotide
guugcccaguagaggcaau

SEQ ID NO: 1564724 - RNA, 19 nt, Artificial Sequence
  Description of Artificial Sequence: Synthetic oligonucleotide
caauggcauggggccaggu

SEQ ID NO: 1564725 - RNA, 19 nt, Artificial Sequence
  Description of Artificial Sequence: Synthetic oligonucleotide
cucuccacucaggcccgua

SEQ ID NO: 1564726 - RNA, 19 nt, Artificial Sequence
  Description of Artificial Sequence: Synthetic oligonucleotide
gcgcuggcgccgauacauc

SEQ ID NO: 1564727 - RNA, 19 nt, Artificial Sequence
  Description of Artificial Sequence: Synthetic oligonucleotide
gcccaggaauucauagauu

SEQ ID NO: 1564728 - RNA, 19 nt, Artificial Sequence
  Description of Artificial Sequence: Synthetic oligonucleotide
gcaccucacgcacggccuu

SEQ ID NO: 1564729 - RNA, 19 nt, Artificial Sequence
  Description of Artificial Sequence: Synthetic oligonucleotide
ggcccaaguugcgcagggu

SEQ ID NO: 1564730 - RNA, 19 nt, Artificial Sequence
  Description of Artificial Sequence: Synthetic oligonucleotide
ggcauggggccaggugggu

SEQ ID NO: 1564731 - RNA, 19 nt, Artificial Sequence
  Description of Artificial Sequence: Synthetic oligonucleotide
cgcccagccuggucggcga

SEQ ID NO: 1564732 - RNA, 19 nt, Artificial Sequence
  Description of Artificial Sequence: Synthetic oligonucleotide
cgcgaucacauugcacaua

SEQ ID NO: 1564733 - RNA, 19 nt, Artificial Sequence
  Description of Artificial Sequence: Synthetic oligonucleotide
ccucuggauuuaggcccaa

SEQ ID NO: 1564734 - RNA, 19 nt, Artificial Sequence
  Description of Artificial Sequence: Synthetic oligonucleotide
guccagcgcuggcgccgau

SEQ ID NO: 1564735 - RNA, 19 nt, Artificial Sequence
  Description of Artificial Sequence: Synthetic oligonucleotide
cgcacggccuucaguccau

SEQ ID NO: 1564736 - RNA, 19 nt, Artificial Sequence
  Description of Artificial Sequence: Synthetic oligonucleotide
cgaggacggucagcagugu

SEQ ID NO: 1564737 - RNA, 19 nt, Artificial Sequence
  Description of Artificial Sequence: Synthetic oligonucleotide
gcacggccuucaguccauu

SEQ ID NO: 1564738 - RNA, 19 nt, Artificial Sequence
  Description of Artificial Sequence: Synthetic oligonucleotide
uaaaauuugaccaagcacc

SEQ ID NO: 1564739 - RNA, 19 nt, Artificial Sequence
  Description of Artificial Sequence: Synthetic oligonucleotide
aagacaaagaccugagugc

SEQ ID NO: 1564740 - RNA, 19 nt, Artificial Sequence
  Description of Artificial Sequence: Synthetic oligonucleotide
aaucgauggaaauauaguc

SEQ ID NO: 1564741 - RNA, 19 nt, Artificial Sequence
  Description of Artificial Sequence: Synthetic oligonucleotide
aacucuaugaacaagcuuc

SEQ ID NO: 1564742 - RNA, 19 nt, Artificial Sequence
  Description of Artificial Sequence: Synthetic oligonucleotide
aauauagucaaacagggua

SEQ ID NO: 1564743 - RNA, 19 nt, Artificial Sequence
  Description of Artificial Sequence: Synthetic oligonucleotide
uggaaauauagucaaacag

SEQ ID NO: 1564744 - RNA, 19 nt, Artificial Sequence
  Description of Artificial Sequence: Synthetic oligonucleotide
uuucacaacauucaaaagu

SEQ ID NO: 1564745 - RNA, 19 nt, Artificial Sequence
  Description of Artificial Sequence: Synthetic oligonucleotide
aaucuuaaucuauaaagca

SEQ ID NO: 1564746 - RNA, 19 nt, Artificial Sequence
  Description of Artificial Sequence: Synthetic oligonucleotide
gaaauauagucaaacaggg

SEQ ID NO: 1564747 - RNA, 19 nt, Artificial Sequence
  Description of Artificial Sequence: Synthetic oligonucleotide
uaaucuauaaagcacauuu

SEQ ID NO: 1564748 - RNA, 19 nt, Artificial Sequence
  Description of Artificial Sequence: Synthetic oligonucleotide
agauaucuccucuacaagc

SEQ ID NO: 1564749 - RNA, 19 nt, Artificial Sequence
  Description of Artificial Sequence: Synthetic oligonucleotide
uugaccaagcaccagauag

SEQ ID NO: 1564750 - RNA, 19 nt, Artificial Sequence
  Description of Artificial Sequence: Synthetic oligonucleotide
ucuuaaucuauaaagcaca

SEQ ID NO: 1564751 - RNA, 19 nt, Artificial Sequence
  Description of Artificial Sequence: Synthetic oligonucleotide
gaagacaaagaccugagug

SEQ ID NO: 1564752 - RNA, 19 nt, Artificial Sequence
  Description of Artificial Sequence: Synthetic oligonucleotide
uaucagaacucuaugaaca

SEQ ID NO: 1564753 - RNA, 19 nt, Artificial Sequence
  Description of Artificial Sequence: Synthetic oligonucleotide
uuuaaaauuugaccaagca

SEQ ID NO: 1564754 - RNA, 19 nt, Artificial Sequence
  Description of Artificial Sequence: Synthetic oligonucleotide
auagaacccaaaucgaugg

SEQ ID NO: 1564755 - RNA, 19 nt, Artificial Sequence
  Description of Artificial Sequence: Synthetic oligonucleotide
uauccaaacugccugaacc

SEQ ID NO: 1564756 - RNA, 19 nt, Artificial Sequence
  Description of Artificial Sequence: Synthetic oligonucleotide
aacuugguaaucccugagc

SEQ ID NO: 1564757 - RNA, 19 nt, Artificial Sequence
  Description of Artificial Sequence: Synthetic oligonucleotide
uacauuauagcauuacuac

SEQ ID NO: 1564758 - RNA, 19 nt, Artificial Sequence
  Description of Artificial Sequence: Synthetic oligonucleotide
agagaaaagacccaaacaa

SEQ ID NO: 1564759 - RNA, 19 nt, Artificial Sequence
  Description of Artificial Sequence: Synthetic oligonucleotide
gaguuuagagcuuuauugg

SEQ ID NO: 1564760 - RNA, 19 nt, Artificial Sequence
  Description of Artificial Sequence: Synthetic oligonucleotide
uuuccucucagccacagag

SEQ ID NO: 1564761 - RNA, 19 nt, Artificial Sequence
  Description of Artificial Sequence: Synthetic oligonucleotide
uguaggauuuuccacacug

SEQ ID NO: 1564762 - RNA, 19 nt, Artificial Sequence
  Description of Artificial Sequence: Synthetic oligonucleotide
aaaugcuugacccucuuca

SEQ ID NO: 1564763 - RNA, 19 nt, Artificial Sequence
  Description of Artificial Sequence: Synthetic oligonucleotide
cuaugaacaagcuucauuc

SEQ ID NO: 1564764 - RNA, 19 nt, Artificial Sequence
  Description of Artificial Sequence: Synthetic oligonucleotide
uuuauuggacauuaacuug

SEQ ID NO: 1564765 - RNA, 19 nt, Artificial Sequence
  Description of Artificial Sequence: Synthetic oligonucleotide
aaacuucugggucagggag

SEQ ID NO: 1564766 - RNA, 19 nt, Artificial Sequence
  Description of Artificial Sequence: Synthetic oligonucleotide
aauuugaccaagcaccaga

SEQ ID NO: 1564767 - RNA, 19 nt, Artificial Sequence
  Description of Artificial Sequence: Synthetic oligonucleotide
uuauuggacauuaacuugu

SEQ ID NO: 1564768 - RNA, 19 nt, Artificial Sequence
  Description of Artificial Sequence: Synthetic oligonucleotide
aacccaagucuguagcucc

SEQ ID NO: 1564769 - RNA, 19 nt, Artificial Sequence
  Description of Artificial Sequence: Synthetic oligonucleotide
uaaagcacauuucuuauaa

SEQ ID NO: 1564770 - RNA, 19 nt, Artificial Sequence
  Description of Artificial Sequence: Synthetic oligonucleotide
cagaauucuggcuaaaggc

SEQ ID NO: 1564771 - RNA, 19 nt, Artificial Sequence
  Description of Artificial Sequence: Synthetic oligonucleotide
agcuuuauuggacauuaac

SEQ ID NO: 1564772 - RNA, 19 nt, Artificial Sequence
  Description of Artificial Sequence: Synthetic oligonucleotide
caaaucgauggaaauauag

SEQ ID NO: 1564773 - RNA, 19 nt, Artificial Sequence
  Description of Artificial Sequence: Synthetic oligonucleotide
uuuuaaaauuugaccaagc

SEQ ID NO: 1564774 - RNA, 19 nt, Artificial Sequence
  Description of Artificial Sequence: Synthetic oligonucleotide
auucucuacagcaucaagc

SEQ ID NO: 1564775 - RNA, 19 nt, Artificial Sequence
  Description of Artificial Sequence: Synthetic oligonucleotide
ccagauagaacccaaaucg

SEQ ID NO: 1564776 - RNA, 19 nt, Artificial Sequence
  Description of Artificial Sequence: Synthetic oligonucleotide
ucuuauaauuguuaucaga

SEQ ID NO: 1564777 - RNA, 19 nt, Artificial Sequence
  Description of Artificial Sequence: Synthetic oligonucleotide
auuucuuauaauuguuauc

SEQ ID NO: 1564778 - RNA, 19 nt, Artificial Sequence
  Description of Artificial Sequence: Synthetic oligonucleotide
ggaaauauagucaaacagg

SEQ ID NO: 1564779 - RNA, 19 nt, Artificial Sequence
  Description of Artificial Sequence: Synthetic oligonucleotide
agaauaaggggcugagccc

SEQ ID NO: 1564780 - RNA, 19 nt, Artificial Sequence
  Description of Artificial Sequence: Synthetic oligonucleotide
aaugcuugacccucuucac

SEQ ID NO: 1564781 - RNA, 19 nt, Artificial Sequence
  Description of Artificial Sequence: Synthetic oligonucleotide
uggacauuaacuuguuucc

SEQ ID NO: 1564782 - RNA, 19 nt, Artificial Sequence
  Description of Artificial Sequence: Synthetic oligonucleotide
uguuaucagaacucuauga

SEQ ID NO: 1564783 - RNA, 19 nt, Artificial Sequence
  Description of Artificial Sequence: Synthetic oligonucleotide
auaauuguuaucagaacuc

SEQ ID NO: 1564784 - RNA, 19 nt, Artificial Sequence
  Description of Artificial Sequence: Synthetic oligonucleotide
uuugaacuuugacuguagg

SEQ ID NO: 1564785 - RNA, 19 nt, Artificial Sequence
  Description of Artificial Sequence: Synthetic oligonucleotide
agcauuacuacauauuuau

SEQ ID NO: 1564786 - RNA, 19 nt, Artificial Sequence
  Description of Artificial Sequence: Synthetic oligonucleotide
aagucuguagcuccuuggg

SEQ ID NO: 1564787 - RNA, 19 nt, Artificial Sequence
  Description of Artificial Sequence: Synthetic oligonucleotide
acgaggauggaacuucugc

SEQ ID NO: 1564788 - RNA, 19 nt, Artificial Sequence
  Description of Artificial Sequence: Synthetic oligonucleotide
ucaauaaaucuuaaucuau

SEQ ID NO: 1564789 - RNA, 19 nt, Artificial Sequence
  Description of Artificial Sequence: Synthetic oligonucleotide
uucacaacauucaaaaguu

SEQ ID NO: 1564790 - RNA, 19 nt, Artificial Sequence
  Description of Artificial Sequence: Synthetic oligonucleotide
augaacaagcuucauucgg

SEQ ID NO: 1564791 - RNA, 19 nt, Artificial Sequence
  Description of Artificial Sequence: Synthetic oligonucleotide
uauuuuagagcagaggagu

SEQ ID NO: 1564792 - RNA, 19 nt, Artificial Sequence
  Description of Artificial Sequence: Synthetic oligonucleotide
ugagauaucuccucuacaa

SEQ ID NO: 1564793 - RNA, 19 nt, Artificial Sequence
  Description of Artificial Sequence: Synthetic oligonucleotide
ugaacaagcuucauucggc

SEQ ID NO: 1564794 - RNA, 19 nt, Artificial Sequence
  Description of Artificial Sequence: Synthetic oligonucleotide
aucuuaaucuauaaagcac

SEQ ID NO: 1564795 - RNA, 19 nt, Artificial Sequence
  Description of Artificial Sequence: Synthetic oligonucleotide
acucaacgcauccauaagg

SEQ ID NO: 1564796 - RNA, 19 nt, Artificial Sequence
  Description of Artificial Sequence: Synthetic oligonucleotide
uuuagagcuuuauuggaca

SEQ ID NO: 1564797 - RNA, 19 nt, Artificial Sequence
  Description of Artificial Sequence: Synthetic oligonucleotide
ucuuauuuuagagcagagg

SEQ ID NO: 1564798 - RNA, 19 nt, Artificial Sequence
  Description of Artificial Sequence: Synthetic oligonucleotide
uaugaacaagcuucauucg

SEQ ID NO: 1564799 - RNA, 19 nt, Artificial Sequence
  Description of Artificial Sequence: Synthetic oligonucleotide
uuaauuuugucuucauuuc

SEQ ID NO: 1564800 - RNA, 19 nt, Artificial Sequence
  Description of Artificial Sequence: Synthetic oligonucleotide
uuuucaauaggcucacgca

SEQ ID NO: 1564801 - RNA, 19 nt, Artificial Sequence
  Description of Artificial Sequence: Synthetic oligonucleotide
uuugacuguaggauuuucc

SEQ ID NO: 1564802 - RNA, 19 nt, Artificial Sequence
  Description of Artificial Sequence: Synthetic oligonucleotide
agcuccuuggguaagaugg

SEQ ID NO: 1564803 - RNA, 19 nt, Artificial Sequence
  Description of Artificial Sequence: Synthetic oligonucleotide
accagauagaacccaaauc

SEQ ID NO: 1564804 - RNA, 19 nt, Artificial Sequence
  Description of Artificial Sequence: Synthetic oligonucleotide
agcacuucccguuuucggc

SEQ ID NO: 1564805 - RNA, 19 nt, Artificial Sequence
  Description of Artificial Sequence: Synthetic oligonucleotide
aaucuauaaagcacauuuc

SEQ ID NO: 1564806 - RNA, 19 nt, Artificial Sequence
  Description of Artificial Sequence: Synthetic oligonucleotide
ugaagugcuuuccacauuc

SEQ ID NO: 1564807 - RNA, 19 nt, Artificial Sequence
  Description of Artificial Sequence: Synthetic oligonucleotide
uuucaauaggcucacgcaa

SEQ ID NO: 1564808 - RNA, 19 nt, Artificial Sequence
  Description of Artificial Sequence: Synthetic oligonucleotide
aagcacauuucuuauaauu

SEQ ID NO: 1564809 - RNA, 19 nt, Artificial Sequence
  Description of Artificial Sequence: Synthetic oligonucleotide
uggguaaacagguuucucc

SEQ ID NO: 1564810 - RNA, 19 nt, Artificial Sequence
  Description of Artificial Sequence: Synthetic oligonucleotide
acuacauauuuauacuuca

SEQ ID NO: 1564811 - RNA, 19 nt, Artificial Sequence
  Description of Artificial Sequence: Synthetic oligonucleotide
uuaucagaacucuaugaac

SEQ ID NO: 1564812 - RNA, 19 nt, Artificial Sequence
  Description of Artificial Sequence: Synthetic oligonucleotide
uguucucgaacccaagucu

SEQ ID NO: 1564813 - RNA, 19 nt, Artificial Sequence
  Description of Artificial Sequence: Synthetic oligonucleotide
caagcggcaaaguucacgg

SEQ ID NO: 1564814 - RNA, 19 nt, Artificial Sequence
  Description of Artificial Sequence: Synthetic oligonucleotide
uuuucuuauuuuagagcag

SEQ ID NO: 1564815 - RNA, 19 nt, Artificial Sequence
  Description of Artificial Sequence: Synthetic oligonucleotide
uuauaauuguuaucagaac

SEQ ID NO: 1564816 - RNA, 19 nt, Artificial Sequence
  Description of Artificial Sequence: Synthetic oligonucleotide
ugauuaaugagcccagaau

SEQ ID NO: 1564817 - RNA, 19 nt, Artificial Sequence
  Description of Artificial Sequence: Synthetic oligonucleotide
ggauuuuccacacugaaca

SEQ ID NO: 1564818 - RNA, 19 nt, Artificial Sequence
  Description of Artificial Sequence: Synthetic oligonucleotide
uucgagaaggauuuucucu

SEQ ID NO: 1564819 - RNA, 19 nt, Artificial Sequence
  Description of Artificial Sequence: Synthetic oligonucleotide
ugggugauguucucgaacc

SEQ ID NO: 1564820 - RNA, 19 nt, Artificial Sequence
  Description of Artificial Sequence: Synthetic oligonucleotide
auuaaugagcccagaauuc

SEQ ID NO: 1564821 - RNA, 19 nt, Artificial Sequence
  Description of Artificial Sequence: Synthetic oligonucleotide
aaugagcccagaauucugg

SEQ ID NO: 1564822 - RNA, 19 nt, Artificial Sequence
  Description of Artificial Sequence: Synthetic oligonucleotide
guaagauggcaacaaacug

SEQ ID NO: 1564823 - RNA, 19 nt, Artificial Sequence
  Description of Artificial Sequence: Synthetic oligonucleotide
aaaucgauggaaauauagu

SEQ ID NO: 1564824 - RNA, 19 nt, Artificial Sequence
  Description of Artificial Sequence: Synthetic oligonucleotide
uuucuuauuuuagagcaga

SEQ ID NO: 1564825 - RNA, 19 nt, Artificial Sequence
  Description of Artificial Sequence: Synthetic oligonucleotide
ucugcauugugucuucucu

SEQ ID NO: 1564826 - RNA, 19 nt, Artificial Sequence
  Description of Artificial Sequence: Synthetic oligonucleotide
agaaggauuuucucuuuuc

SEQ ID NO: 1564827 - RNA, 19 nt, Artificial Sequence
  Description of Artificial Sequence: Synthetic oligonucleotide
uugaacuuugacuguagga

SEQ ID NO: 1564828 - RNA, 19 nt, Artificial Sequence
  Description of Artificial Sequence: Synthetic oligonucleotide
cucaacgcauccauaaggc

SEQ ID NO: 1564829 - RNA, 19 nt, Artificial Sequence
  Description of Artificial Sequence: Synthetic oligonucleotide
uggcauaguauuuauuacu

SEQ ID NO: 1564830 - RNA, 19 nt, Artificial Sequence
  Description of Artificial Sequence: Synthetic oligonucleotide
auguucucgaacccaaguc

SEQ ID NO: 1564831 - RNA, 19 nt, Artificial Sequence
  Description of Artificial Sequence: Synthetic oligonucleotide
ucgauggaaauauagucaa

SEQ ID NO: 1564832 - RNA, 19 nt, Artificial Sequence
  Description of Artificial Sequence: Synthetic oligonucleotide
acuugguaaucccugagca

SEQ ID NO: 1564833 - RNA, 19 nt, Artificial Sequence
  Description of Artificial Sequence: Synthetic oligonucleotide
aaaacuucugggucaggga

SEQ ID NO: 1564834 - RNA, 19 nt, Artificial Sequence
  Description of Artificial Sequence: Synthetic oligonucleotide
gauagaacccaaaucgaug

SEQ ID NO: 1564835 - RNA, 19 nt, Artificial Sequence
  Description of Artificial Sequence: Synthetic oligonucleotide
ugaugauuaaugagcccag

SEQ ID NO: 1564836 - RNA, 19 nt, Artificial Sequence
  Description of Artificial Sequence: Synthetic oligonucleotide
acauuauagcauuacuaca

SEQ ID NO: 1564837 - RNA, 19 nt, Artificial Sequence
  Description of Artificial Sequence: Synthetic oligonucleotide
uuguuaucagaacucuaug

SEQ ID NO: 1564838 - RNA, 19 nt, Artificial Sequence
  Description of Artificial Sequence: Synthetic oligonucleotide
ucuagaacggucacugccu

SEQ ID NO: 1564839 - RNA, 19 nt, Artificial Sequence
  Description of Artificial Sequence: Synthetic oligonucleotide
aagcacuucccguuuucgg

SEQ ID NO: 1564840 - RNA, 19 nt, Artificial Sequence
  Description of Artificial Sequence: Synthetic oligonucleotide
uggucugagccacaagcgg

SEQ ID NO: 1564841 - RNA, 19 nt, Artificial Sequence
  Description of Artificial Sequence: Synthetic oligonucleotide
uucuuauuuuagagcagag

SEQ ID NO: 1564842 - RNA, 19 nt, Artificial Sequence
  Description of Artificial Sequence: Synthetic oligonucleotide
ucuaugaacaagcuucauu

SEQ ID NO: 1564843 - RNA, 19 nt, Artificial Sequence
  Description of Artificial Sequence: Synthetic oligonucleotide
gacuguaggauuuuccaca

SEQ ID NO: 1564844 - RNA, 19 nt, Artificial Sequence
  Description of Artificial Sequence: Synthetic oligonucleotide
aacgcauccauaaggcuuc

SEQ ID NO: 1564845 - RNA, 19 nt, Artificial Sequence
  Description of Artificial Sequence: Synthetic oligonucleotide
uucuuauaauuguuaucag

SEQ ID NO: 1564846 - RNA, 19 nt, Artificial Sequence
  Description of Artificial Sequence: Synthetic oligonucleotide
aguuuagagcuuuauugga

SEQ ID NO: 1564847 - RNA, 19 nt, Artificial Sequence
  Description of Artificial Sequence: Synthetic oligonucleotide
agucccuacauuuucuugu

SEQ ID NO: 1564848 - RNA, 19 nt, Artificial Sequence
  Description of Artificial Sequence: Synthetic oligonucleotide
ugcaaaucugcccuugggu

SEQ ID NO: 1564849 - RNA, 19 nt, Artificial Sequence
  Description of Artificial Sequence: Synthetic oligonucleotide
ucgugugugucucuggucu

SEQ ID NO: 1564850 - RNA, 19 nt, Artificial Sequence
  Description of Artificial Sequence: Synthetic oligonucleotide
acauuaacuuguuuccucu

SEQ ID NO: 1564851 - RNA, 19 nt, Artificial Sequence
  Description of Artificial Sequence: Synthetic oligonucleotide
cugucggaaaacuucuggg

SEQ ID NO: 1564852 - RNA, 19 nt, Artificial Sequence
  Description of Artificial Sequence: Synthetic oligonucleotide
uuuucggcgacggagagaa

SEQ ID NO: 1564853 - RNA, 19 nt, Artificial Sequence
  Description of Artificial Sequence: Synthetic oligonucleotide
uugcaaaucugcccuuggg

SEQ ID NO: 1564854 - RNA, 19 nt, Artificial Sequence
  Description of Artificial Sequence: Synthetic oligonucleotide
aggaacaccacagugccuc

SEQ ID NO: 1564855 - RNA, 19 nt, Artificial Sequence
  Description of Artificial Sequence: Synthetic oligonucleotide
aaaaucucauuuucauuuu

SEQ ID NO: 1564856 - RNA, 19 nt, Artificial Sequence
  Description of Artificial Sequence: Synthetic oligonucleotide
ugagcugauucucuacagc

SEQ ID NO: 1564857 - RNA, 19 nt, Artificial Sequence
  Description of Artificial Sequence: Synthetic oligonucleotide
gauuaaugagcccagaauu

SEQ ID NO: 1564858 - RNA, 19 nt, Artificial Sequence
  Description of Artificial Sequence: Synthetic oligonucleotide
cucuagaacggucacugcc

SEQ ID NO: 1564859 - RNA, 19 nt, Artificial Sequence
  Description of Artificial Sequence: Synthetic oligonucleotide
augcuugacccucuucacc

SEQ ID NO: 1564860 - RNA, 19 nt, Artificial Sequence
  Description of Artificial Sequence: Synthetic oligonucleotide
gagauaucuccucuacaag

SEQ ID NO: 1564861 - RNA, 19 nt, Artificial Sequence
  Description of Artificial Sequence: Synthetic oligonucleotide
guuaucagaacucuaugaa

SEQ ID NO: 1564862 - RNA, 19 nt, Artificial Sequence
  Description of Artificial Sequence: Synthetic oligonucleotide
auaucuccucuacaagcac

SEQ ID NO: 1564863 - RNA, 19 nt, Artificial Sequence
  Description of Artificial Sequence: Synthetic oligonucleotide
gaacaagcuucauucggcc

SEQ ID NO: 1564864 - RNA, 19 nt, Artificial Sequence
  Description of Artificial Sequence: Synthetic oligonucleotide
agcggcaaaguucacggag

SEQ ID NO: 1564865 - RNA, 19 nt, Artificial Sequence
  Description of Artificial Sequence: Synthetic oligonucleotide
acccaaacaaagucccuac

SEQ ID NO: 1564866 - RNA, 19 nt, Artificial Sequence
  Description of Artificial Sequence: Synthetic oligonucleotide
ucuacaagcacuucccguu

SEQ ID NO: 1564867 - RNA, 19 nt, Artificial Sequence
  Description of Artificial Sequence: Synthetic oligonucleotide
ucugcccuuggguaaacag

SEQ ID NO: 1564868 - RNA, 19 nt, Artificial Sequence
  Description of Artificial Sequence: Synthetic oligonucleotide
uccucuagaacggucacug

SEQ ID NO: 1564869 - RNA, 19 nt, Artificial Sequence
  Description of Artificial Sequence: Synthetic oligonucleotide
ugggucagggagaugauuc

SEQ ID NO: 1564870 - RNA, 19 nt, Artificial Sequence
  Description of Artificial Sequence: Synthetic oligonucleotide
ugucggaaaacuucugggu

SEQ ID NO: 1564871 - RNA, 19 nt, Artificial Sequence
  Description of Artificial Sequence: Synthetic oligonucleotide
aguaucuguuccuucgugu

SEQ ID NO: 1564872 - RNA, 19 nt, Artificial Sequence
  Description of Artificial Sequence: Synthetic oligonucleotide
ugaagaauaaggggcugag

SEQ ID NO: 1564873 - RNA, 19 nt, Artificial Sequence
  Description of Artificial Sequence: Synthetic oligonucleotide
ucuucucugaugucuaaaa

SEQ ID NO: 1564874 - RNA, 19 nt, Artificial Sequence
  Description of Artificial Sequence: Synthetic oligonucleotide
uuuaaacuuucacaacauu

SEQ ID NO: 1564875 - RNA, 19 nt, Artificial Sequence
  Description of Artificial Sequence: Synthetic oligonucleotide
uucuugagauaucuccucu

SEQ ID NO: 1564876 - RNA, 19 nt, Artificial Sequence
  Description of Artificial Sequence: Synthetic oligonucleotide
ucuacagcaucaagcucag

SEQ ID NO: 1564877 - RNA, 19 nt, Artificial Sequence
  Description of Artificial Sequence: Synthetic oligonucleotide
gagcugauucucuacagca

SEQ ID NO: 1564878 - RNA, 19 nt, Artificial Sequence
  Description of Artificial Sequence: Synthetic oligonucleotide
aagucccuacauuuucuug

SEQ ID NO: 1564879 - RNA, 19 nt, Artificial Sequence
  Description of Artificial Sequence: Synthetic oligonucleotide
agugcuuuccacauucguc

SEQ ID NO: 1564880 - RNA, 19 nt, Artificial Sequence
  Description of Artificial Sequence: Synthetic oligonucleotide
aaaucucauuuucauuuua

SEQ ID NO: 1564881 - RNA, 19 nt, Artificial Sequence
  Description of Artificial Sequence: Synthetic oligonucleotide
auuguuaucagaacucuau

SEQ ID NO: 1564882 - RNA, 19 nt, Artificial Sequence
  Description of Artificial Sequence: Synthetic oligonucleotide
uccaacacuaccagcucca

SEQ ID NO: 1564883 - RNA, 19 nt, Artificial Sequence
  Description of Artificial Sequence: Synthetic oligonucleotide
uugagauaucuccucuaca

SEQ ID NO: 1564884 - RNA, 19 nt, Artificial Sequence
  Description of Artificial Sequence: Synthetic oligonucleotide
uugguaaucccugagcauc

SEQ ID NO: 1564885 - RNA, 19 nt, Artificial Sequence
  Description of Artificial Sequence: Synthetic oligonucleotide
gauaucuccucuacaagca

SEQ ID NO: 1564886 - RNA, 19 nt, Artificial Sequence
  Description of Artificial Sequence: Synthetic oligonucleotide
uucauucggccucacuuca

SEQ ID NO: 1564887 - RNA, 19 nt, Artificial Sequence
  Description of Artificial Sequence: Synthetic oligonucleotide
aagugcuuuccacauucgu

SEQ ID NO: 1564888 - RNA, 19 nt, Artificial Sequence
  Description of Artificial Sequence: Synthetic oligonucleotide
ugaccaagcaccagauaga

SEQ ID NO: 1564889 - RNA, 19 nt, Artificial Sequence
  Description of Artificial Sequence: Synthetic oligonucleotide
aucgauggaaauauaguca

SEQ ID NO: 1564890 - RNA, 19 nt, Artificial Sequence
  Description of Artificial Sequence: Synthetic oligonucleotide
aagcucagaacuugguaau

SEQ ID NO: 1564891 - RNA, 19 nt, Artificial Sequence
  Description of Artificial Sequence: Synthetic oligonucleotide
gaacuugguaaucccugag

SEQ ID NO: 1564892 - RNA, 19 nt, Artificial Sequence
  Description of Artificial Sequence: Synthetic oligonucleotide
cuggcauaguauuuauuac

SEQ ID NO: 1564893 - RNA, 19 nt, Artificial Sequence
  Description of Artificial Sequence: Synthetic oligonucleotide
aaauauagucaaacagggu

SEQ ID NO: 1564894 - RNA, 19 nt, Artificial Sequence
  Description of Artificial Sequence: Synthetic oligonucleotide
caucaagcucagaacuugg

SEQ ID NO: 1564895 - RNA, 19 nt, Artificial Sequence
  Description of Artificial Sequence: Synthetic oligonucleotide
aacccaaaucgauggaaau

SEQ ID NO: 1564896 - RNA, 19 nt, Artificial Sequence
  Description of Artificial Sequence: Synthetic oligonucleotide
uccaguucacucuccaagu

SEQ ID NO: 1564897 - RNA, 19 nt, Artificial Sequence
  Description of Artificial Sequence: Synthetic oligonucleotide
cugaugauuaaugagccca

SEQ ID NO: 1564898 - RNA, 19 nt, Artificial Sequence
  Description of Artificial Sequence: Synthetic oligonucleotide
augauuaaugagcccagaa

SEQ ID NO: 1564899 - RNA, 19 nt, Artificial Sequence
  Description of Artificial Sequence: Synthetic oligonucleotide
uuuagagcagaggaguuua

SEQ ID NO: 1564900 - RNA, 19 nt, Artificial Sequence
  Description of Artificial Sequence: Synthetic oligonucleotide
aaauuugaccaagcaccag

SEQ ID NO: 1564901 - RNA, 19 nt, Artificial Sequence
  Description of Artificial Sequence: Synthetic oligonucleotide
uucaccagcuggcauagua

SEQ ID NO: 1564902 - RNA, 19 nt, Artificial Sequence
  Description of Artificial Sequence: Synthetic oligonucleotide
cauugugucuucucugaug

SEQ ID NO: 1564903 - RNA, 19 nt, Artificial Sequence
  Description of Artificial Sequence: Synthetic oligonucleotide
auggcaacaaacugcucca

SEQ ID NO: 1564904 - RNA, 19 nt, Artificial Sequence
  Description of Artificial Sequence: Synthetic oligonucleotide
cuuuauuggacauuaacuu

SEQ ID NO: 1564905 - RNA, 19 nt, Artificial Sequence
  Description of Artificial Sequence: Synthetic oligonucleotide
acacucaacgcauccauaa

SEQ ID NO: 1564906 - RNA, 19 nt, Artificial Sequence
  Description of Artificial Sequence: Synthetic oligonucleotide
uguuccuucgugugugucu

SEQ ID NO: 1564907 - RNA, 19 nt, Artificial Sequence
  Description of Artificial Sequence: Synthetic oligonucleotide
acaagcggcaaaguucacg

SEQ ID NO: 1564908 - RNA, 19 nt, Artificial Sequence
  Description of Artificial Sequence: Synthetic oligonucleotide
auuauagcauuacuacaua

SEQ ID NO: 1564909 - RNA, 19 nt, Artificial Sequence
  Description of Artificial Sequence: Synthetic oligonucleotide
caagcucagaacuugguaa

SEQ ID NO: 1564910 - RNA, 19 nt, Artificial Sequence
  Description of Artificial Sequence: Synthetic oligonucleotide
aguccucuagaacggucac

SEQ ID NO: 1564911 - RNA, 19 nt, Artificial Sequence
  Description of Artificial Sequence: Synthetic oligonucleotide
cauuauagcauuacuacau

SEQ ID NO: 1564912 - RNA, 19 nt, Artificial Sequence
  Description of Artificial Sequence: Synthetic oligonucleotide
uuucgagaaggauuuucuc

SEQ ID NO: 1564913 - RNA, 19 nt, Artificial Sequence
  Description of Artificial Sequence: Synthetic oligonucleotide
guuuagagcuuuauuggac

SEQ ID NO: 1564914 - RNA, 19 nt, Artificial Sequence
  Description of Artificial Sequence: Synthetic oligonucleotide
uagcauuacuacauauuua

SEQ ID NO: 1564915 - RNA, 19 nt, Artificial Sequence
  Description of Artificial Sequence: Synthetic oligonucleotide
gagugcuuauuguuucccc

SEQ ID NO: 1564916 - RNA, 19 nt, Artificial Sequence
  Description of Artificial Sequence: Synthetic oligonucleotide
ugauguucucgaacccaag

SEQ ID NO: 1564917 - RNA, 19 nt, Artificial Sequence
  Description of Artificial Sequence: Synthetic oligonucleotide
ucacggagcuggcucacag

SEQ ID NO: 1564918 - RNA, 19 nt, Artificial Sequence
  Description of Artificial Sequence: Synthetic oligonucleotide
cuugcaaaucugcccuugg

SEQ ID NO: 1564919 - RNA, 19 nt, Artificial Sequence
  Description of Artificial Sequence: Synthetic oligonucleotide
uuagagcuuuauuggacau

SEQ ID NO: 1564920 - RNA, 19 nt, Artificial Sequence
  Description of Artificial Sequence: Synthetic oligonucleotide
accgcugucggaaaacuuc

SEQ ID NO: 1564921 - RNA, 19 nt, Artificial Sequence
  Description of Artificial Sequence: Synthetic oligonucleotide
agggagaugauuccaggaa

SEQ ID NO: 1564922 - RNA, 19 nt, Artificial Sequence
  Description of Artificial Sequence: Synthetic oligonucleotide
ucaacgcauccauaaggcu

SEQ ID NO: 1564923 - RNA, 19 nt, Artificial Sequence
  Description of Artificial Sequence: Synthetic oligonucleotide
auauagucaaacaggguaa

SEQ ID NO: 1564924 - RNA, 19 nt, Artificial Sequence
  Description of Artificial Sequence: Synthetic oligonucleotide
gauggaacuucugcugaag

SEQ ID NO: 1564925 - RNA, 19 nt, Artificial Sequence
  Description of Artificial Sequence: Synthetic oligonucleotide
agacaaagaccugagugcu

SEQ ID NO: 1564926 - RNA, 19 nt, Artificial Sequence
  Description of Artificial Sequence: Synthetic oligonucleotide
ucuuucgagaaggauuuuc

SEQ ID NO: 1564927 - RNA, 19 nt, Artificial Sequence
  Description of Artificial Sequence: Synthetic oligonucleotide
aaguccucuagaacgguca

SEQ ID NO: 1564928 - RNA, 19 nt, Artificial Sequence
  Description of Artificial Sequence: Synthetic oligonucleotide
ugagugcuuauuguuuccc

SEQ ID NO: 1564929 - RNA, 19 nt, Artificial Sequence
  Description of Artificial Sequence: Synthetic oligonucleotide
uucggcgacggagagaaac

SEQ ID NO: 1564930 - RNA, 19 nt, Artificial Sequence
  Description of Artificial Sequence: Synthetic oligonucleotide
ggcauaguauuuauuacug

SEQ ID NO: 1564931 - RNA, 19 nt, Artificial Sequence
  Description of Artificial Sequence: Synthetic oligonucleotide
agagcuuuauuggacauua

SEQ ID NO: 1564932 - RNA, 19 nt, Artificial Sequence
  Description of Artificial Sequence: Synthetic oligonucleotide
ugguaaucccugagcaucu

SEQ ID NO: 1564933 - RNA, 19 nt, Artificial Sequence
  Description of Artificial Sequence: Synthetic oligonucleotide
ucggcgacggagagaaacc

SEQ ID NO: 1564934 - RNA, 19 nt, Artificial Sequence
  Description of Artificial Sequence: Synthetic oligonucleotide
accuggugaauccugguau

SEQ ID NO: 1564935 - RNA, 19 nt, Artificial Sequence
  Description of Artificial Sequence: Synthetic oligonucleotide
gagaaaccggcuguccagg

SEQ ID NO: 1564936 - RNA, 19 nt, Artificial Sequence
  Description of Artificial Sequence: Synthetic oligonucleotide
acauaugugcuguuucuuu

SEQ ID NO: 1564937 - RNA, 19 nt, Artificial Sequence
  Description of Artificial Sequence: Synthetic oligonucleotide
gagagaaaccggcugucca

SEQ ID NO: 1564938 - RNA, 19 nt, Artificial Sequence
  Description of Artificial Sequence: Synthetic oligonucleotide
ucggccucacuucaccagc

SEQ ID NO: 1564939 - RNA, 19 nt, Artificial Sequence
  Description of Artificial Sequence: Synthetic oligonucleotide
auucgucacauaugugcug

SEQ ID NO: 1564940 - RNA, 19 nt, Artificial Sequence
  Description of Artificial Sequence: Synthetic oligonucleotide
gagaugauuccaggaaaug

SEQ ID NO: 1564941 - RNA, 19 nt, Artificial Sequence
  Description of Artificial Sequence: Synthetic oligonucleotide
uucggccucacuucaccag

SEQ ID NO: 1564942 - RNA, 19 nt, Artificial Sequence
  Description of Artificial Sequence: Synthetic oligonucleotide
gagaguggaguucccagga

SEQ ID NO: 1564943 - RNA, 19 nt, Artificial Sequence
  Description of Artificial Sequence: Synthetic oligonucleotide
cugagugcuuauuguuucc

SEQ ID NO: 1564944 - RNA, 19 nt, Artificial Sequence
  Description of Artificial Sequence: Synthetic oligonucleotide
cauucggccucacuucacc

SEQ ID NO: 1564945 - RNA, 19 nt, Artificial Sequence
  Description of Artificial Sequence: Synthetic oligonucleotide
ucucugggugauguucucg

SEQ ID NO: 1564946 - RNA, 19 nt, Artificial Sequence
  Description of Artificial Sequence: Synthetic oligonucleotide
uuggguaagauggcaacaa

SEQ ID NO: 1564947 - RNA, 19 nt, Artificial Sequence
  Description of Artificial Sequence: Synthetic oligonucleotide
uauagucaaacaggguaaa

SEQ ID NO: 1564948 - RNA, 19 nt, Artificial Sequence
  Description of Artificial Sequence: Synthetic oligonucleotide
gaagaauaaggggcugagc

SEQ ID NO: 1564949 - RNA, 19 nt, Artificial Sequence
  Description of Artificial Sequence: Synthetic oligonucleotide
acccucuucaccaucagga

SEQ ID NO: 1564950 - RNA, 19 nt, Artificial Sequence
  Description of Artificial Sequence: Synthetic oligonucleotide
uagaacccaaaucgaugga

SEQ ID NO: 1564951 - RNA, 19 nt, Artificial Sequence
  Description of Artificial Sequence: Synthetic oligonucleotide
ugguauccaaacugccuga

SEQ ID NO: 1564952 - RNA, 19 nt, Artificial Sequence
  Description of Artificial Sequence: Synthetic oligonucleotide
acggagagaaaccggcugu

SEQ ID NO: 1564953 - RNA, 19 nt, Artificial Sequence
  Description of Artificial Sequence: Synthetic oligonucleotide
ucccaggaugcccacuuga

SEQ ID NO: 1564954 - RNA, 19 nt, Artificial Sequence
  Description of Artificial Sequence: Synthetic oligonucleotide
aguucacggagcuggcuca

SEQ ID NO: 1564955 - RNA, 19 nt, Artificial Sequence
  Description of Artificial Sequence: Synthetic oligonucleotide
gaagugcuuuccacauucg

SEQ ID NO: 1564956 - RNA, 19 nt, Artificial Sequence
  Description of Artificial Sequence: Synthetic oligonucleotide
ugcccacuugagcugauuc

SEQ ID NO: 1564957 - RNA, 19 nt, Artificial Sequence
  Description of Artificial Sequence: Synthetic oligonucleotide
gcuggcauaguauuuauua

SEQ ID NO: 1564958 - RNA, 19 nt, Artificial Sequence
  Description of Artificial Sequence: Synthetic oligonucleotide
ucucuacagcaucaagcuc

SEQ ID NO: 1564959 - RNA, 19 nt, Artificial Sequence
  Description of Artificial Sequence: Synthetic oligonucleotide
uauuggacauuaacuuguu

SEQ ID NO: 1564960 - RNA, 19 nt, Artificial Sequence
  Description of Artificial Sequence: Synthetic oligonucleotide
uuccucucagccacagaga

SEQ ID NO: 1564961 - RNA, 19 nt, Artificial Sequence
  Description of Artificial Sequence: Synthetic oligonucleotide
uggaguucccaggaugccc

SEQ ID NO: 1564962 - RNA, 19 nt, Artificial Sequence
  Description of Artificial Sequence: Synthetic oligonucleotide
cagauagaacccaaaucga

SEQ ID NO: 1564963 - RNA, 19 nt, Artificial Sequence
  Description of Artificial Sequence: Synthetic oligonucleotide
agucuguagcuccuugggu

SEQ ID NO: 1564964 - RNA, 19 nt, Artificial Sequence
  Description of Artificial Sequence: Synthetic oligonucleotide
agauagaacccaaaucgau

SEQ ID NO: 1564965 - RNA, 19 nt, Artificial Sequence
  Description of Artificial Sequence: Synthetic oligonucleotide
uuuuagagcagaggaguuu

SEQ ID NO: 1564966 - RNA, 19 nt, Artificial Sequence
  Description of Artificial Sequence: Synthetic oligonucleotide
gauuugaacuuugacugua

SEQ ID NO: 1564967 - RNA, 19 nt, Artificial Sequence
  Description of Artificial Sequence: Synthetic oligonucleotide
cauuaacuuguuuccucuc

SEQ ID NO: 1564968 - RNA, 19 nt, Artificial Sequence
  Description of Artificial Sequence: Synthetic oligonucleotide
ugcacgaggauggaacuuc

SEQ ID NO: 1564969 - RNA, 19 nt, Artificial Sequence
  Description of Artificial Sequence: Synthetic oligonucleotide
gauguucucgaacccaagu

SEQ ID NO: 1564970 - RNA, 19 nt, Artificial Sequence
  Description of Artificial Sequence: Synthetic oligonucleotide
agaacucuaugaacaagcu

SEQ ID NO: 1564971 - RNA, 19 nt, Artificial Sequence
  Description of Artificial Sequence: Synthetic oligonucleotide
cugggugauguucucgaac

SEQ ID NO: 1564972 - RNA, 19 nt, Artificial Sequence
  Description of Artificial Sequence: Synthetic oligonucleotide
uuaaucuauaaagcacauu

SEQ ID NO: 1564973 - RNA, 19 nt, Artificial Sequence
  Description of Artificial Sequence: Synthetic oligonucleotide
guucucgaacccaagucug

SEQ ID NO: 1564974 - RNA, 19 nt, Artificial Sequence
  Description of Artificial Sequence: Synthetic oligonucleotide
agaacggucacugccuccu

SEQ ID NO: 1564975 - RNA, 19 nt, Artificial Sequence
  Description of Artificial Sequence: Synthetic oligonucleotide
ucaagacacuuguaagguu

SEQ ID NO: 1564976 - RNA, 19 nt, Artificial Sequence
  Description of Artificial Sequence: Synthetic oligonucleotide
uucccguuuucggcgacgg

SEQ ID NO: 1564977 - RNA, 19 nt, Artificial Sequence
  Description of Artificial Sequence: Synthetic oligonucleotide
uagagcagaggaguuuaga

SEQ ID NO: 1564978 - RNA, 19 nt, Artificial Sequence
  Description of Artificial Sequence: Synthetic oligonucleotide
augaagaauaaggggcuga

SEQ ID NO: 1564979 - RNA, 19 nt, Artificial Sequence
  Description of Artificial Sequence: Synthetic oligonucleotide
agaacccaaaucgauggaa

SEQ ID NO: 1564980 - RNA, 19 nt, Artificial Sequence
  Description of Artificial Sequence: Synthetic oligonucleotide
aaaucugcccuuggguaaa

SEQ ID NO: 1564981 - RNA, 19 nt, Artificial Sequence
  Description of Artificial Sequence: Synthetic oligonucleotide
gucuguagcuccuugggua

SEQ ID NO: 1564982 - RNA, 19 nt, Artificial Sequence
  Description of Artificial Sequence: Synthetic oligonucleotide
cacucaacgcauccauaag

SEQ ID NO: 1564983 - RNA, 19 nt, Artificial Sequence
  Description of Artificial Sequence: Synthetic oligonucleotide
gaauaaggggcugagcccu

SEQ ID NO: 1564984 - RNA, 19 nt, Artificial Sequence
  Description of Artificial Sequence: Synthetic oligonucleotide
ggguaaacagguuucucca

SEQ ID NO: 1564985 - RNA, 19 nt, Artificial Sequence
  Description of Artificial Sequence: Synthetic oligonucleotide
uuugaccaagcaccagaua

SEQ ID NO: 1564986 - RNA, 19 nt, Artificial Sequence
  Description of Artificial Sequence: Synthetic oligonucleotide
ugagcaucuucuugagaua

SEQ ID NO: 1564987 - RNA, 19 nt, Artificial Sequence
  Description of Artificial Sequence: Synthetic oligonucleotide
gcacuucccguuuucggcg

SEQ ID NO: 1564988 - RNA, 19 nt, Artificial Sequence
  Description of Artificial Sequence: Synthetic oligonucleotide
agcucagaacuugguaauc

SEQ ID NO: 1564989 - RNA, 19 nt, Artificial Sequence
  Description of Artificial Sequence: Synthetic oligonucleotide
aacuucugggucagggaga

SEQ ID NO: 1564990 - RNA, 19 nt, Artificial Sequence
  Description of Artificial Sequence: Synthetic oligonucleotide
uagaacggucacugccucc

SEQ ID NO: 1564991 - RNA, 19 nt, Artificial Sequence
  Description of Artificial Sequence: Synthetic oligonucleotide
gaacccaagucuguagcuc

SEQ ID NO: 1564992 - RNA, 19 nt, Artificial Sequence
  Description of Artificial Sequence: Synthetic oligonucleotide
guuucuuucgagaaggauu

SEQ ID NO: 1564993 - RNA, 19 nt, Artificial Sequence
  Description of Artificial Sequence: Synthetic oligonucleotide
uggugaauccugguaucca

SEQ ID NO: 1564994 - RNA, 19 nt, Artificial Sequence
  Description of Artificial Sequence: Synthetic oligonucleotide
gaugauuaaugagcccaga

SEQ ID NO: 1564995 - RNA, 19 nt, Artificial Sequence
  Description of Artificial Sequence: Synthetic oligonucleotide
gaauccugguauccaaacu

SEQ ID NO: 1564996 - RNA, 19 nt, Artificial Sequence
  Description of Artificial Sequence: Synthetic oligonucleotide
cagguuucuccauauuuaa

SEQ ID NO: 1564997 - RNA, 19 nt, Artificial Sequence
  Description of Artificial Sequence: Synthetic oligonucleotide
uguccaggaucauccaguu

SEQ ID NO: 1564998 - RNA, 19 nt, Artificial Sequence
  Description of Artificial Sequence: Synthetic oligonucleotide
acucuaugaacaagcuuca

SEQ ID NO: 1564999 - RNA, 19 nt, Artificial Sequence
  Description of Artificial Sequence: Synthetic oligonucleotide
ucauucggccucacuucac

SEQ ID NO: 1565000 - RNA, 19 nt, Artificial Sequence
  Description of Artificial Sequence: Synthetic oligonucleotide
gcuuuauuggacauuaacu

SEQ ID NO: 1565001 - RNA, 19 nt, Artificial Sequence
  Description of Artificial Sequence: Synthetic oligonucleotide
cuagaacggucacugccuc

SEQ ID NO: 1565002 - RNA, 19 nt, Artificial Sequence
  Description of Artificial Sequence: Synthetic oligonucleotide
aagcggcaaaguucacgga

SEQ ID NO: 1565003 - RNA, 19 nt, Artificial Sequence
  Description of Artificial Sequence: Synthetic oligonucleotide
cgcugaugauuaaugagcc

SEQ ID NO: 1565004 - RNA, 19 nt, Artificial Sequence
  Description of Artificial Sequence: Synthetic oligonucleotide
gaccaagcaccagauagaa

SEQ ID NO: 1565005 - RNA, 19 nt, Artificial Sequence
  Description of Artificial Sequence: Synthetic oligonucleotide
agccacaagcggcaaaguu

SEQ ID NO: 1565006 - RNA, 19 nt, Artificial Sequence
  Description of Artificial Sequence: Synthetic oligonucleotide
gcucagaacuugguaaucc

SEQ ID NO: 1565007 - RNA, 19 nt, Artificial Sequence
  Description of Artificial Sequence: Synthetic oligonucleotide
gcuuuuccacacucaacgc

SEQ ID NO: 1565008 - RNA, 19 nt, Artificial Sequence
  Description of Artificial Sequence: Synthetic oligonucleotide
acuucccguuuucggcgac

SEQ ID NO: 1565009 - RNA, 19 nt, Artificial Sequence
  Description of Artificial Sequence: Synthetic oligonucleotide
gccucacuucaccagcugg

SEQ ID NO: 1565010 - RNA, 19 nt, Artificial Sequence
  Description of Artificial Sequence: Synthetic oligonucleotide
agaaaccggcuguccagga

SEQ ID NO: 1565011 - RNA, 19 nt, Artificial Sequence
  Description of Artificial Sequence: Synthetic oligonucleotide
uccuucgugugugucucug

SEQ ID NO: 1565012 - RNA, 19 nt, Artificial Sequence
  Description of Artificial Sequence: Synthetic oligonucleotide
ucuccauucucugggugau

SEQ ID NO: 1565013 - RNA, 19 nt, Artificial Sequence
  Description of Artificial Sequence: Synthetic oligonucleotide
auuuuagagcagaggaguu

SEQ ID NO: 1565014 - RNA, 19 nt, Artificial Sequence
  Description of Artificial Sequence: Synthetic oligonucleotide
guuccuucgugugugucuc

SEQ ID NO: 1565015 - RNA, 19 nt, Artificial Sequence
  Description of Artificial Sequence: Synthetic oligonucleotide
guaggauuuuccacacuga

SEQ ID NO: 1565016 - RNA, 19 nt, Artificial Sequence
  Description of Artificial Sequence: Synthetic oligonucleotide
ggucugagccacaagcggc

SEQ ID NO: 1565017 - RNA, 19 nt, Artificial Sequence
  Description of Artificial Sequence: Synthetic oligonucleotide
auagucaaacaggguaaaa

SEQ ID NO: 1565018 - RNA, 19 nt, Artificial Sequence
  Description of Artificial Sequence: Synthetic oligonucleotide
accaagcaccagauagaac

SEQ ID NO: 1565019 - RNA, 19 nt, Artificial Sequence
  Description of Artificial Sequence: Synthetic oligonucleotide
cuuggguaagauggcaaca

SEQ ID NO: 1565020 - RNA, 19 nt, Artificial Sequence
  Description of Artificial Sequence: Synthetic oligonucleotide
gaacaccacagugccucag

SEQ ID NO: 1565021 - RNA, 19 nt, Artificial Sequence
  Description of Artificial Sequence: Synthetic oligonucleotide
gacccaaacaaagucccua

SEQ ID NO: 1565022 - RNA, 19 nt, Artificial Sequence
  Description of Artificial Sequence: Synthetic oligonucleotide
ucccuacauuuucuuguau

SEQ ID NO: 1565023 - RNA, 19 nt, Artificial Sequence
  Description of Artificial Sequence: Synthetic oligonucleotide
aucaagcucagaacuuggu

SEQ ID NO: 1565024 - RNA, 19 nt, Artificial Sequence
  Description of Artificial Sequence: Synthetic oligonucleotide
agaguggaguucccaggau

SEQ ID NO: 1565025 - RNA, 19 nt, Artificial Sequence
  Description of Artificial Sequence: Synthetic oligonucleotide
ccacaagcggcaaaguuca

SEQ ID NO: 1565026 - RNA, 19 nt, Artificial Sequence
  Description of Artificial Sequence: Synthetic oligonucleotide
cacuaccagcuccaguauc

SEQ ID NO: 1565027 - RNA, 19 nt, Artificial Sequence
  Description of Artificial Sequence: Synthetic oligonucleotide
ccuuggguaagauggcaac

SEQ ID NO: 1565028 - RNA, 19 nt, Artificial Sequence
  Description of Artificial Sequence: Synthetic oligonucleotide
gaccuggugaauccuggua

SEQ ID NO: 1565029 - RNA, 19 nt, Artificial Sequence
  Description of Artificial Sequence: Synthetic oligonucleotide
ggugaauccugguauccaa

SEQ ID NO: 1565030 - RNA, 19 nt, Artificial Sequence
  Description of Artificial Sequence: Synthetic oligonucleotide
uagagcuuuauuggacauu

SEQ ID NO: 1565031 - RNA, 19 nt, Artificial Sequence
  Description of Artificial Sequence: Synthetic oligonucleotide
gggucagggagaugauucc

SEQ ID NO: 1565032 - RNA, 19 nt, Artificial Sequence
  Description of Artificial Sequence: Synthetic oligonucleotide
caaacaaagucccuacauu

SEQ ID NO: 1565033 - RNA, 19 nt, Artificial Sequence
  Description of Artificial Sequence: Synthetic oligonucleotide
auacuucaauaaaucuuaa

SEQ ID NO: 1565034 - RNA, 19 nt, Artificial Sequence
  Description of Artificial Sequence: Synthetic oligonucleotide
caacgcauccauaaggcuu

SEQ ID NO: 1565035 - RNA, 19 nt, Artificial Sequence
  Description of Artificial Sequence: Synthetic oligonucleotide
acucgcuggugcugcacga

SEQ ID NO: 1565036 - RNA, 19 nt, Artificial Sequence
  Description of Artificial Sequence: Synthetic oligonucleotide
ggcucacagccucucgggg

SEQ ID NO: 1565037 - RNA, 19 nt, Artificial Sequence
  Description of Artificial Sequence: Synthetic oligonucleotide
cacgaggauggaacuucug

SEQ ID NO: 1565038 - RNA, 19 nt, Artificial Sequence
  Description of Artificial Sequence: Synthetic oligonucleotide
ggugauguucucgaaccca

SEQ ID NO: 1565039 - RNA, 19 nt, Artificial Sequence
  Description of Artificial Sequence: Synthetic oligonucleotide
agcuucauucggccucacu

SEQ ID NO: 1565040 - RNA, 19 nt, Artificial Sequence
  Description of Artificial Sequence: Synthetic oligonucleotide
ccucagagaguggaguucc

SEQ ID NO: 1565041 - RNA, 19 nt, Artificial Sequence
  Description of Artificial Sequence: Synthetic oligonucleotide
cugagcccuggcugaagug

SEQ ID NO: 1565042 - RNA, 19 nt, Artificial Sequence
  Description of Artificial Sequence: Synthetic oligonucleotide
cuucccguuuucggcgacg

SEQ ID NO: 1565043 - RNA, 19 nt, Artificial Sequence
  Description of Artificial Sequence: Synthetic oligonucleotide
gugugucucuggucugagc

SEQ ID NO: 1565044 - RNA, 19 nt, Artificial Sequence
  Description of Artificial Sequence: Synthetic oligonucleotide
gggaccuggugaauccugg

SEQ ID NO: 1565045 - RNA, 19 nt, Artificial Sequence
  Description of Artificial Sequence: Synthetic oligonucleotide
cucuacaagcacuucccgu

SEQ ID NO: 1565046 - RNA, 19 nt, Artificial Sequence
  Description of Artificial Sequence: Synthetic oligonucleotide
gcgacggagagaaaccggc

SEQ ID NO: 1565047 - RNA, 19 nt, Artificial Sequence
  Description of Artificial Sequence: Synthetic oligonucleotide
gggugauguucucgaaccc

SEQ ID NO: 1565048 - RNA, 19 nt, Artificial Sequence
  Description of Artificial Sequence: Synthetic oligonucleotide
ggagagaaaccggcugucc

SEQ ID NO: 1565049 - RNA, 19 nt, Artificial Sequence
  Description of Artificial Sequence: Synthetic oligonucleotide
gucccuacauuuucuugua

SEQ ID NO: 1565050 - RNA, 19 nt, Artificial Sequence
  Description of Artificial Sequence: Synthetic oligonucleotide
agguuucuccauauuuaaa

SEQ ID NO: 1565051 - RNA, 19 nt, Artificial Sequence
  Description of Artificial Sequence: Synthetic oligonucleotide
agcaccagauagaacccaa

SEQ ID NO: 1565052 - RNA, 19 nt, Artificial Sequence
  Description of Artificial Sequence: Synthetic oligonucleotide
ggcgacggagagaaaccgg

SEQ ID NO: 1565053 - RNA, 19 nt, Artificial Sequence
  Description of Artificial Sequence: Synthetic oligonucleotide
acuuugacuguaggauuuu

SEQ ID NO: 1565054 - RNA, 19 nt, Artificial Sequence
  Description of Artificial Sequence: Synthetic oligonucleotide
cucucggggaccuggugaa

SEQ ID NO: 1565055 - RNA, 19 nt, Artificial Sequence
  Description of Artificial Sequence: Synthetic oligonucleotide
ccuucgugugugucucugg

SEQ ID NO: 1565056 - RNA, 19 nt, Artificial Sequence
  Description of Artificial Sequence: Synthetic oligonucleotide
cuugguaaucccugagcau

SEQ ID NO: 1565057 - RNA, 19 nt, Artificial Sequence
  Description of Artificial Sequence: Synthetic oligonucleotide
ucuucaccaucaggauccu

SEQ ID NO: 1565058 - RNA, 19 nt, Artificial Sequence
  Description of Artificial Sequence: Synthetic oligonucleotide
cuguaucacuucuauguuu

SEQ ID NO: 1565059 - RNA, 19 nt, Artificial Sequence
  Description of Artificial Sequence: Synthetic oligonucleotide
cuucgugugugucucuggu

SEQ ID NO: 1565060 - RNA, 19 nt, Artificial Sequence
  Description of Artificial Sequence: Synthetic oligonucleotide
ccuggugaauccugguauc

SEQ ID NO: 1565061 - RNA, 19 nt, Artificial Sequence
  Description of Artificial Sequence: Synthetic oligonucleotide
cucgcuggugcugcacgag

SEQ ID NO: 1565062 - RNA, 19 nt, Artificial Sequence
  Description of Artificial Sequence: Synthetic oligonucleotide
ucccguuuucggcgacgga

SEQ ID NO: 1565063 - RNA, 19 nt, Artificial Sequence
  Description of Artificial Sequence: Synthetic oligonucleotide
agacccaaacaaagucccu

SEQ ID NO: 1565064 - RNA, 19 nt, Artificial Sequence
  Description of Artificial Sequence: Synthetic oligonucleotide
aaccgcugucggaaaacuu

SEQ ID NO: 1565065 - RNA, 19 nt, Artificial Sequence
  Description of Artificial Sequence: Synthetic oligonucleotide
caccagauagaacccaaau

SEQ ID NO: 1565066 - RNA, 19 nt, Artificial Sequence
  Description of Artificial Sequence: Synthetic oligonucleotide
gaaaccggcuguccaggau

SEQ ID NO: 1565067 - RNA, 19 nt, Artificial Sequence
  Description of Artificial Sequence: Synthetic oligonucleotide
ccaguucacucuccaaguc

SEQ ID NO: 1565068 - RNA, 19 nt, Artificial Sequence
  Description of Artificial Sequence: Synthetic oligonucleotide
cuuggguaaacagguuucu

SEQ ID NO: 1565069 - RNA, 19 nt, Artificial Sequence
  Description of Artificial Sequence: Synthetic oligonucleotide
gcucacagccucucgggga

SEQ ID NO: 1565070 - RNA, 19 nt, Artificial Sequence
  Description of Artificial Sequence: Synthetic oligonucleotide
guuuucggcgacggagaga

SEQ ID NO: 1565071 - RNA, 19 nt, Artificial Sequence
  Description of Artificial Sequence: Synthetic oligonucleotide
gaacggucacugccuccuc

SEQ ID NO: 1565072 - RNA, 19 nt, Artificial Sequence
  Description of Artificial Sequence: Synthetic oligonucleotide
ggauggaacuucugcugaa

SEQ ID NO: 1565073 - RNA, 19 nt, Artificial Sequence
  Description of Artificial Sequence: Synthetic oligonucleotide
cacaagcggcaaaguucac

SEQ ID NO: 1565074 - RNA, 19 nt, Artificial Sequence
  Description of Artificial Sequence: Synthetic oligonucleotide
ucgucacauaugugcuguu

SEQ ID NO: 1565075 - RNA, 19 nt, Artificial Sequence
  Description of Artificial Sequence: Synthetic oligonucleotide
gaacuucugcugaaggcuu

SEQ ID NO: 1565076 - RNA, 19 nt, Artificial Sequence
  Description of Artificial Sequence: Synthetic oligonucleotide
cccuacauuuucuuguaua

SEQ ID NO: 1565077 - RNA, 19 nt, Artificial Sequence
  Description of Artificial Sequence: Synthetic oligonucleotide
cacuucccguuuucggcga

SEQ ID NO: 1565078 - RNA, 19 nt, Artificial Sequence
  Description of Artificial Sequence: Synthetic oligonucleotide
ucacagccucucggggacc

SEQ ID NO: 1565079 - RNA, 19 nt, Artificial Sequence
  Description of Artificial Sequence: Synthetic oligonucleotide
ccucuagaacggucacugc

SEQ ID NO: 1565080 - RNA, 19 nt, Artificial Sequence
  Description of Artificial Sequence: Synthetic oligonucleotide
acagugccucagagagugg

SEQ ID NO: 1565081 - RNA, 19 nt, Artificial Sequence
  Description of Artificial Sequence: Synthetic oligonucleotide
ccaaacaaagucccuacau

SEQ ID NO: 1565082 - RNA, 19 nt, Artificial Sequence
  Description of Artificial Sequence: Synthetic oligonucleotide
guucacggagcuggcucac

SEQ ID NO: 1565083 - RNA, 19 nt, Artificial Sequence
  Description of Artificial Sequence: Synthetic oligonucleotide
acccaagucuguagcuccu

SEQ ID NO: 1565084 - RNA, 19 nt, Artificial Sequence
  Description of Artificial Sequence: Synthetic oligonucleotide
gguaaacagguuucuccau

SEQ ID NO: 1565085 - RNA, 19 nt, Artificial Sequence
  Description of Artificial Sequence: Synthetic oligonucleotide
aucugcccuuggguaaaca

SEQ ID NO: 1565086 - RNA, 19 nt, Artificial Sequence
  Description of Artificial Sequence: Synthetic oligonucleotide
cccaaaucgauggaaauau

SEQ ID NO: 1565087 - RNA, 19 nt, Artificial Sequence
  Description of Artificial Sequence: Synthetic oligonucleotide
ggacauuaacuuguuuccu

SEQ ID NO: 1565088 - RNA, 19 nt, Artificial Sequence
  Description of Artificial Sequence: Synthetic oligonucleotide
gccacagagaaaagaccca

SEQ ID NO: 1565089 - RNA, 19 nt, Artificial Sequence
  Description of Artificial Sequence: Synthetic oligonucleotide
gguauccaaacugccugaa

SEQ ID NO: 1565090 - RNA, 19 nt, Artificial Sequence
  Description of Artificial Sequence: Synthetic oligonucleotide
ggaacaccacagugccuca

SEQ ID NO: 1565091 - RNA, 19 nt, Artificial Sequence
  Description of Artificial Sequence: Synthetic oligonucleotide
ccugguauccaaacugccu

SEQ ID NO: 1565092 - RNA, 19 nt, Artificial Sequence
  Description of Artificial Sequence: Synthetic oligonucleotide
agaggaguuuagagcuuua

SEQ ID NO: 1565093 - RNA, 19 nt, Artificial Sequence
  Description of Artificial Sequence: Synthetic oligonucleotide
uuucggcgacggagagaaa

SEQ ID NO: 1565094 - RNA, 19 nt, Artificial Sequence
  Description of Artificial Sequence: Synthetic oligonucleotide
cguuuucggcgacggagag

SEQ ID NO: 1565095 - RNA, 19 nt, Artificial Sequence
  Description of Artificial Sequence: Synthetic oligonucleotide
caacacuaccagcuccagu

SEQ ID NO: 1565096 - RNA, 19 nt, Artificial Sequence
  Description of Artificial Sequence: Synthetic oligonucleotide
gcugcacgaggauggaacu

SEQ ID NO: 1565097 - RNA, 19 nt, Artificial Sequence
  Description of Artificial Sequence: Synthetic oligonucleotide
gcauuacuacauauuuaua

SEQ ID NO: 1565098 - RNA, 19 nt, Artificial Sequence
  Description of Artificial Sequence: Synthetic oligonucleotide
cugagccacaagcggcaaa

SEQ ID NO: 1565099 - RNA, 19 nt, Artificial Sequence
  Description of Artificial Sequence: Synthetic oligonucleotide
cuguaggauuuuccacacu

SEQ ID NO: 1565100 - RNA, 19 nt, Artificial Sequence
  Description of Artificial Sequence: Synthetic oligonucleotide
ccaaaucgauggaaauaua

SEQ ID NO: 1565101 - RNA, 19 nt, Artificial Sequence
  Description of Artificial Sequence: Synthetic oligonucleotide
acgcauccauaaggcuucu

SEQ ID NO: 1565102 - RNA, 19 nt, Artificial Sequence
  Description of Artificial Sequence: Synthetic oligonucleotide
guagcuccuuggguaagau

SEQ ID NO: 1565103 - RNA, 19 nt, Artificial Sequence
  Description of Artificial Sequence: Synthetic oligonucleotide
ccaggaaaugcuugacccu

SEQ ID NO: 1565104 - RNA, 19 nt, Artificial Sequence
  Description of Artificial Sequence: Synthetic oligonucleotide
cggcgacggagagaaaccg

SEQ ID NO: 1565105 - RNA, 19 nt, Artificial Sequence
  Description of Artificial Sequence: Synthetic oligonucleotide
guccucuagaacggucacu

SEQ ID NO: 1565106 - RNA, 19 nt, Artificial Sequence
  Description of Artificial Sequence: Synthetic oligonucleotide
caaagaccugagugcuuau

SEQ ID NO: 1565107 - RNA, 19 nt, Artificial Sequence
  Description of Artificial Sequence: Synthetic oligonucleotide
ggaccuggugaauccuggu

SEQ ID NO: 1565108 - RNA, 19 nt, Artificial Sequence
  Description of Artificial Sequence: Synthetic oligonucleotide
gccucucggggaccuggug

SEQ ID NO: 1565109 - RNA, 19 nt, Artificial Sequence
  Description of Artificial Sequence: Synthetic oligonucleotide
agccucucggggaccuggu

SEQ ID NO: 1565110 - RNA, 19 nt, Artificial Sequence
  Description of Artificial Sequence: Synthetic oligonucleotide
gagccacaagcggcaaagu

SEQ ID NO: 1565111 - RNA, 19 nt, Artificial Sequence
  Description of Artificial Sequence: Synthetic oligonucleotide
augcccacuugagcugauu

SEQ ID NO: 1565112 - RNA, 19 nt, Artificial Sequence
  Description of Artificial Sequence: Synthetic oligonucleotide
gcaccagauagaacccaaa

SEQ ID NO: 1565113 - RNA, 19 nt, Artificial Sequence
  Description of Artificial Sequence: Synthetic oligonucleotide
gcauugugucuucucugau

SEQ ID NO: 1565114 - RNA, 19 nt, Artificial Sequence
  Description of Artificial Sequence: Synthetic oligonucleotide
ccggcuguccaggaucauc

SEQ ID NO: 1565115 - RNA, 19 nt, Artificial Sequence
  Description of Artificial Sequence: Synthetic oligonucleotide
cgcugucggaaaacuucug

SEQ ID NO: 1565116 - RNA, 19 nt, Artificial Sequence
  Description of Artificial Sequence: Synthetic oligonucleotide
cgauggaaauauagucaaa

SEQ ID NO: 1565117 - RNA, 19 nt, Artificial Sequence
  Description of Artificial Sequence: Synthetic oligonucleotide
ccgcugucggaaaacuucu

SEQ ID NO: 1565118 - RNA, 19 nt, Artificial Sequence
  Description of Artificial Sequence: Synthetic oligonucleotide
cccuuggguaaacagguuu

SEQ ID NO: 1565119 - RNA, 19 nt, Artificial Sequence
  Description of Artificial Sequence: Synthetic oligonucleotide
cgaacccaagucuguagcu

SEQ ID NO: 1565120 - RNA, 19 nt, Artificial Sequence
  Description of Artificial Sequence: Synthetic oligonucleotide
gcacgaggauggaacuucu

SEQ ID NO: 1565121 - RNA, 19 nt, Artificial Sequence
  Description of Artificial Sequence: Synthetic oligonucleotide
cugcacgaggauggaacuu

SEQ ID NO: 1565122 - RNA, 19 nt, Artificial Sequence
  Description of Artificial Sequence: Synthetic oligonucleotide
gguaaucccugagcaucuu

SEQ ID NO: 1565123 - RNA, 19 nt, Artificial Sequence
  Description of Artificial Sequence: Synthetic oligonucleotide
cggcaaaguucacggagcu

SEQ ID NO: 1565124 - RNA, 19 nt, Artificial Sequence
  Description of Artificial Sequence: Synthetic oligonucleotide
gcccagaauucuggcuaaa

SEQ ID NO: 1565125 - RNA, 19 nt, Artificial Sequence
  Description of Artificial Sequence: Synthetic oligonucleotide
gcccuuggguaaacagguu

SEQ ID NO: 1565126 - RNA, 19 nt, Artificial Sequence
  Description of Artificial Sequence: Synthetic oligonucleotide
cccaagucuguagcuccuu

SEQ ID NO: 1565127 - RNA, 19 nt, Artificial Sequence
  Description of Artificial Sequence: Synthetic oligonucleotide
cggggaccuggugaauccu

SEQ ID NO: 1565128 - RNA, 19 nt, Artificial Sequence
  Description of Artificial Sequence: Synthetic oligonucleotide
uuuauagcuuuaaagaugg

SEQ ID NO: 1565129 - RNA, 19 nt, Artificial Sequence
  Description of Artificial Sequence: Synthetic oligonucleotide
aaagucuacaauaaaacac

SEQ ID NO: 1565130 - RNA, 19 nt, Artificial Sequence
  Description of Artificial Sequence: Synthetic oligonucleotide
ucuuaugauauccauagcc

SEQ ID NO: 1565131 - RNA, 19 nt, Artificial Sequence
  Description of Artificial Sequence: Synthetic oligonucleotide
ucuacaauaaaacacugcu

SEQ ID NO: 1565132 - RNA, 19 nt, Artificial Sequence
  Description of Artificial Sequence: Synthetic oligonucleotide
uaugcuugauacuacaagg

SEQ ID NO: 1565133 - RNA, 19 nt, Artificial Sequence
  Description of Artificial Sequence: Synthetic oligonucleotide
ugauauaauaacauccacc

SEQ ID NO: 1565134 - RNA, 19 nt, Artificial Sequence
  Description of Artificial Sequence: Synthetic oligonucleotide
aaaaucggaagaaaacucc

SEQ ID NO: 1565135 - RNA, 19 nt, Artificial Sequence
  Description of Artificial Sequence: Synthetic oligonucleotide
uauaauaacauccaccuuu

SEQ ID NO: 1565136 - RNA, 19 nt, Artificial Sequence
  Description of Artificial Sequence: Synthetic oligonucleotide
aauuuauagcuuuaaagau

SEQ ID NO: 1565137 - RNA, 19 nt, Artificial Sequence
  Description of Artificial Sequence: Synthetic oligonucleotide
caaucuauaugcuugauac

SEQ ID NO: 1565138 - RNA, 19 nt, Artificial Sequence
  Description of Artificial Sequence: Synthetic oligonucleotide
agaaauaagagucuuguga

SEQ ID NO: 1565139 - RNA, 19 nt, Artificial Sequence
  Description of Artificial Sequence: Synthetic oligonucleotide
uauaaugguaucuucaagu

SEQ ID NO: 1565140 - RNA, 19 nt, Artificial Sequence
  Description of Artificial Sequence: Synthetic oligonucleotide
ugauauuacagcaaagagu

SEQ ID NO: 1565141 - RNA, 19 nt, Artificial Sequence
  Description of Artificial Sequence: Synthetic oligonucleotide
ccuuuaauuaauauaaugg

SEQ ID NO: 1565142 - RNA, 19 nt, Artificial Sequence
  Description of Artificial Sequence: Synthetic oligonucleotide
aacacgacccuguuguggc

SEQ ID NO: 1565143 - RNA, 19 nt, Artificial Sequence
  Description of Artificial Sequence: Synthetic oligonucleotide
aaggacagaauccaacauc

SEQ ID NO: 1565144 - RNA, 19 nt, Artificial Sequence
  Description of Artificial Sequence: Synthetic oligonucleotide
agucuugugaucuacaacu

SEQ ID NO: 1565145 - RNA, 19 nt, Artificial Sequence
  Description of Artificial Sequence: Synthetic oligonucleotide
auuuagucuuaugauaucc

SEQ ID NO: 1565146 - RNA, 19 nt, Artificial Sequence
  Description of Artificial Sequence: Synthetic oligonucleotide
ugugcuucaggcuuugugg

SEQ ID NO: 1565147 - RNA, 19 nt, Artificial Sequence
  Description of Artificial Sequence: Synthetic oligonucleotide
uuugguauaugaaaucucu

SEQ ID NO: 1565148 - RNA, 19 nt, Artificial Sequence
  Description of Artificial Sequence: Synthetic oligonucleotide
acacccaacaucuagaaca

SEQ ID NO: 1565149 - RNA, 19 nt, Artificial Sequence
  Description of Artificial Sequence: Synthetic oligonucleotide
gauauaauaacauccaccu

SEQ ID NO: 1565150 - RNA, 19 nt, Artificial Sequence
  Description of Artificial Sequence: Synthetic oligonucleotide
acaaccuuaucuuugaaga

SEQ ID NO: 1565151 - RNA, 19 nt, Artificial Sequence
  Description of Artificial Sequence: Synthetic oligonucleotide
ucuacguucaucacaaagu

SEQ ID NO: 1565152 - RNA, 19 nt, Artificial Sequence
  Description of Artificial Sequence: Synthetic oligonucleotide
ugggguaugagaaaggagu

SEQ ID NO: 1565153 - RNA, 19 nt, Artificial Sequence
  Description of Artificial Sequence: Synthetic oligonucleotide
aaagauggagaguugugug

SEQ ID NO: 1565154 - RNA, 19 nt, Artificial Sequence
  Description of Artificial Sequence: Synthetic oligonucleotide
ucuugagauacccugauau

SEQ ID NO: 1565155 - RNA, 19 nt, Artificial Sequence
  Description of Artificial Sequence: Synthetic oligonucleotide
uuuauuuagucuuaugaua

SEQ ID NO: 1565156 - RNA, 19 nt, Artificial Sequence
  Description of Artificial Sequence: Synthetic oligonucleotide
uauagcuuuaaagauggag

SEQ ID NO: 1565157 - RNA, 19 nt, Artificial Sequence
  Description of Artificial Sequence: Synthetic oligonucleotide
uuugucaaguauuugcucu

SEQ ID NO: 1565158 - RNA, 19 nt, Artificial Sequence
  Description of Artificial Sequence: Synthetic oligonucleotide
uucauguaucccauaaugc

SEQ ID NO: 1565159 - RNA, 19 nt, Artificial Sequence
  Description of Artificial Sequence: Synthetic oligonucleotide
gaagaaaacuccaagucug

SEQ ID NO: 1565160 - RNA, 19 nt, Artificial Sequence
  Description of Artificial Sequence: Synthetic oligonucleotide
uagcuuuaaagauggagag

SEQ ID NO: 1565161 - RNA, 19 nt, Artificial Sequence
  Description of Artificial Sequence: Synthetic oligonucleotide
gauauccauagccugguag

SEQ ID NO: 1565162 - RNA, 19 nt, Artificial Sequence
  Description of Artificial Sequence: Synthetic oligonucleotide
aagccauagacgucauccc

SEQ ID NO: 1565163 - RNA, 19 nt, Artificial Sequence
  Description of Artificial Sequence: Synthetic oligonucleotide
aagucuacaauaaaacacu

SEQ ID NO: 1565164 - RNA, 19 nt, Artificial Sequence
  Description of Artificial Sequence: Synthetic oligonucleotide
gauacccugauauuacagc

SEQ ID NO: 1565165 - RNA, 19 nt, Artificial Sequence
  Description of Artificial Sequence: Synthetic oligonucleotide
uggauuuugguauaugaaa

SEQ ID NO: 1565166 - RNA, 19 nt, Artificial Sequence
  Description of Artificial Sequence: Synthetic oligonucleotide
cuucauguaucccauaaug

SEQ ID NO: 1565167 - RNA, 19 nt, Artificial Sequence
  Description of Artificial Sequence: Synthetic oligonucleotide
cauguaucccauaaugccc

SEQ ID NO: 1565168 - RNA, 19 nt, Artificial Sequence
  Description of Artificial Sequence: Synthetic oligonucleotide
aaauagcccauccacucug

SEQ ID NO: 1565169 - RNA, 19 nt, Artificial Sequence
  Description of Artificial Sequence: Synthetic oligonucleotide
acaacgguuguauuuucac

SEQ ID NO: 1565170 - RNA, 19 nt, Artificial Sequence
  Description of Artificial Sequence: Synthetic oligonucleotide
auguugaagccauagacgu

SEQ ID NO: 1565171 - RNA, 19 nt, Artificial Sequence
  Description of Artificial Sequence: Synthetic oligonucleotide
gaaaauagcccauccacuc

SEQ ID NO: 1565172 - RNA, 19 nt, Artificial Sequence
  Description of Artificial Sequence: Synthetic oligonucleotide
cugauauuacagcaaagag

SEQ ID NO: 1565173 - RNA, 19 nt, Artificial Sequence
  Description of Artificial Sequence: Synthetic oligonucleotide
uaucccauaaugcccguag

SEQ ID NO: 1565174 - RNA, 19 nt, Artificial Sequence
  Description of Artificial Sequence: Synthetic oligonucleotide
aagaaagucuacaauaaaa

SEQ ID NO: 1565175 - RNA, 19 nt, Artificial Sequence
  Description of Artificial Sequence: Synthetic oligonucleotide
aguucucaggguaaaaucg

SEQ ID NO: 1565176 - RNA, 19 nt, Artificial Sequence
  Description of Artificial Sequence: Synthetic oligonucleotide
uucuugugaacugugaucu

SEQ ID NO: 1565177 - RNA, 19 nt, Artificial Sequence
  Description of Artificial Sequence: Synthetic oligonucleotide
ucgagagaauuccaguucc

SEQ ID NO: 1565178 - RNA, 19 nt, Artificial Sequence
  Description of Artificial Sequence: Synthetic oligonucleotide
aucuacguucaucacaaag

SEQ ID NO: 1565179 - RNA, 19 nt, Artificial Sequence
  Description of Artificial Sequence: Synthetic oligonucleotide
aggacagaauccaacaucg

SEQ ID NO: 1565180 - RNA, 19 nt, Artificial Sequence
  Description of Artificial Sequence: Synthetic oligonucleotide
aaggagucgccacuggcuc

SEQ ID NO: 1565181 - RNA, 19 nt, Artificial Sequence
  Description of Artificial Sequence: Synthetic oligonucleotide
gaagucaauucuaucagug

SEQ ID NO: 1565182 - RNA, 19 nt, Artificial Sequence
  Description of Artificial Sequence: Synthetic oligonucleotide
acagcaaagaguauaacca

SEQ ID NO: 1565183 - RNA, 19 nt, Artificial Sequence
  Description of Artificial Sequence: Synthetic oligonucleotide
uaauuaauauaaugguauc

SEQ ID NO: 1565184 - RNA, 19 nt, Artificial Sequence
  Description of Artificial Sequence: Synthetic oligonucleotide
auagacgucaucccagaag

SEQ ID NO: 1565185 - RNA, 19 nt, Artificial Sequence
  Description of Artificial Sequence: Synthetic oligonucleotide
auccucacgugcucgagcc

SEQ ID NO: 1565186 - RNA, 19 nt, Artificial Sequence
  Description of Artificial Sequence: Synthetic oligonucleotide
aaaauagcccauccacucu

SEQ ID NO: 1565187 - RNA, 19 nt, Artificial Sequence
  Description of Artificial Sequence: Synthetic oligonucleotide
ugagauacccugauauuac

SEQ ID NO: 1565188 - RNA, 19 nt, Artificial Sequence
  Description of Artificial Sequence: Synthetic oligonucleotide
auagcuuuaaagauggaga

SEQ ID NO: 1565189 - RNA, 19 nt, Artificial Sequence
  Description of Artificial Sequence: Synthetic oligonucleotide
ugaugguacaaaugucagg

SEQ ID NO: 1565190 - RNA, 19 nt, Artificial Sequence
  Description of Artificial Sequence: Synthetic oligonucleotide
aucgagagaauuccaguuc

SEQ ID NO: 1565191 - RNA, 19 nt, Artificial Sequence
  Description of Artificial Sequence: Synthetic oligonucleotide
agaauuccaguuccacacc

SEQ ID NO: 1565192 - RNA, 19 nt, Artificial Sequence
  Description of Artificial Sequence: Synthetic oligonucleotide
uccacucugauauaauaac

SEQ ID NO: 1565193 - RNA, 19 nt, Artificial Sequence
  Description of Artificial Sequence: Synthetic oligonucleotide
gauuuugguauaugaaauc

SEQ ID NO: 1565194 - RNA, 19 nt, Artificial Sequence
  Description of Artificial Sequence: Synthetic oligonucleotide
uuggcagcaaacaucgaga

SEQ ID NO: 1565195 - RNA, 19 nt, Artificial Sequence
  Description of Artificial Sequence: Synthetic oligonucleotide
gauacuacaagggucagaa

SEQ ID NO: 1565196 - RNA, 19 nt, Artificial Sequence
  Description of Artificial Sequence: Synthetic oligonucleotide
aaucuauaugcuugauacu

SEQ ID NO: 1565197 - RNA, 19 nt, Artificial Sequence
  Description of Artificial Sequence: Synthetic oligonucleotide
ugcuuuaacuggaaacggc

SEQ ID NO: 1565198 - RNA, 19 nt, Artificial Sequence
  Description of Artificial Sequence: Synthetic oligonucleotide
cuggaaacggcuuuuccag

SEQ ID NO: 1565199 - RNA, 19 nt, Artificial Sequence
  Description of Artificial Sequence: Synthetic oligonucleotide
agcccauccacucugauau

SEQ ID NO: 1565200 - RNA, 19 nt, Artificial Sequence
  Description of Artificial Sequence: Synthetic oligonucleotide
auauccauagccugguaga

SEQ ID NO: 1565201 - RNA, 19 nt, Artificial Sequence
  Description of Artificial Sequence: Synthetic oligonucleotide
ugauggucacuggagaccg

SEQ ID NO: 1565202 - RNA, 19 nt, Artificial Sequence
  Description of Artificial Sequence: Synthetic oligonucleotide
ucuccagaaagaaagucua

SEQ ID NO: 1565203 - RNA, 19 nt, Artificial Sequence
  Description of Artificial Sequence: Synthetic oligonucleotide
uuccacaacagcuucugga

SEQ ID NO: 1565204 - RNA, 19 nt, Artificial Sequence
  Description of Artificial Sequence: Synthetic oligonucleotide
auaugaaaucucuguagcu

SEQ ID NO: 1565205 - RNA, 19 nt, Artificial Sequence
  Description of Artificial Sequence: Synthetic oligonucleotide
cugacaucuacguucauca

SEQ ID NO: 1565206 - RNA, 19 nt, Artificial Sequence
  Description of Artificial Sequence: Synthetic oligonucleotide
acuggaaacggcuuuucca

SEQ ID NO: 1565207 - RNA, 19 nt, Artificial Sequence
  Description of Artificial Sequence: Synthetic oligonucleotide
ucgccacuggcucauaaag

SEQ ID NO: 1565208 - RNA, 19 nt, Artificial Sequence
  Description of Artificial Sequence: Synthetic oligonucleotide
gaagaaaauagcccaucca

SEQ ID NO: 1565209 - RNA, 19 nt, Artificial Sequence
  Description of Artificial Sequence: Synthetic oligonucleotide
uauaugcuugauacuacaa

SEQ ID NO: 1565210 - RNA, 19 nt, Artificial Sequence
  Description of Artificial Sequence: Synthetic oligonucleotide
aacagcuucuggaauaacu

SEQ ID NO: 1565211 - RNA, 19 nt, Artificial Sequence
  Description of Artificial Sequence: Synthetic oligonucleotide
gguucugacaucuacguuc

SEQ ID NO: 1565212 - RNA, 19 nt, Artificial Sequence
  Description of Artificial Sequence: Synthetic oligonucleotide
aacaucuagaacaaccuua

SEQ ID NO: 1565213 - RNA, 19 nt, Artificial Sequence
  Description of Artificial Sequence: Synthetic oligonucleotide
uacguucaucacaaagucc

SEQ ID NO: 1565214 - RNA, 19 nt, Artificial Sequence
  Description of Artificial Sequence: Synthetic oligonucleotide
agucaauucuaucagugua

SEQ ID NO: 1565215 - RNA, 19 nt, Artificial Sequence
  Description of Artificial Sequence: Synthetic oligonucleotide
auaaugguaucuucaaguu

SEQ ID NO: 1565216 - RNA, 19 nt, Artificial Sequence
  Description of Artificial Sequence: Synthetic oligonucleotide
uaugagaaaggagucgcca

SEQ ID NO: 1565217 - RNA, 19 nt, Artificial Sequence
  Description of Artificial Sequence: Synthetic oligonucleotide
cuaucaguguacuugcuca

SEQ ID NO: 1565218 - RNA, 19 nt, Artificial Sequence
  Description of Artificial Sequence: Synthetic oligonucleotide
gucaacugcaaucacuuuc

SEQ ID NO: 1565219 - RNA, 19 nt, Artificial Sequence
  Description of Artificial Sequence: Synthetic oligonucleotide
aaaucggaagaaaacucca

SEQ ID NO: 1565220 - RNA, 19 nt, Artificial Sequence
  Description of Artificial Sequence: Synthetic oligonucleotide
uaugaaaucucuguagcuu

SEQ ID NO: 1565221 - RNA, 19 nt, Artificial Sequence
  Description of Artificial Sequence: Synthetic oligonucleotide
cuacguucaucacaaaguc

SEQ ID NO: 1565222 - RNA, 19 nt, Artificial Sequence
  Description of Artificial Sequence: Synthetic oligonucleotide
uugggguaugagaaaggag

SEQ ID NO: 1565223 - RNA, 19 nt, Artificial Sequence
  Description of Artificial Sequence: Synthetic oligonucleotide
uaguucucaggguaaaauc

SEQ ID NO: 1565224 - RNA, 19 nt, Artificial Sequence
  Description of Artificial Sequence: Synthetic oligonucleotide
agauguguggauuuuggua

SEQ ID NO: 1565225 - RNA, 19 nt, Artificial Sequence
  Description of Artificial Sequence: Synthetic oligonucleotide
ugcugcuuguuaauuaaaa

SEQ ID NO: 1565226 - RNA, 19 nt, Artificial Sequence
  Description of Artificial Sequence: Synthetic oligonucleotide
auguaucccauaaugcccg

SEQ ID NO: 1565227 - RNA, 19 nt, Artificial Sequence
  Description of Artificial Sequence: Synthetic oligonucleotide
uugagauacccugauauua

SEQ ID NO: 1565228 - RNA, 19 nt, Artificial Sequence
  Description of Artificial Sequence: Synthetic oligonucleotide
aguuucucaacaacgguug

SEQ ID NO: 1565229 - RNA, 19 nt, Artificial Sequence
  Description of Artificial Sequence: Synthetic oligonucleotide
gaaaggagucgccacuggc

SEQ ID NO: 1565230 - RNA, 19 nt, Artificial Sequence
  Description of Artificial Sequence: Synthetic oligonucleotide
ucccauaaugcccguagga

SEQ ID NO: 1565231 - RNA, 19 nt, Artificial Sequence
  Description of Artificial Sequence: Synthetic oligonucleotide
aucuauaugcuugauacua

SEQ ID NO: 1565232 - RNA, 19 nt, Artificial Sequence
  Description of Artificial Sequence: Synthetic oligonucleotide
uccuuucaaggcuucaccu

SEQ ID NO: 1565233 - RNA, 19 nt, Artificial Sequence
  Description of Artificial Sequence: Synthetic oligonucleotide
uguucaaggucagagccac

SEQ ID NO: 1565234 - RNA, 19 nt, Artificial Sequence
  Description of Artificial Sequence: Synthetic oligonucleotide
ugcacuggcucccuagucu

SEQ ID NO: 1565235 - RNA, 19 nt, Artificial Sequence
  Description of Artificial Sequence: Synthetic oligonucleotide
uggaauaacugcucucuuc

SEQ ID NO: 1565236 - RNA, 19 nt, Artificial Sequence
  Description of Artificial Sequence: Synthetic oligonucleotide
ucugaguugagcuguucaa

SEQ ID NO: 1565237 - RNA, 19 nt, Artificial Sequence
  Description of Artificial Sequence: Synthetic oligonucleotide
acaucgagagaauuccagu

SEQ ID NO: 1565238 - RNA, 19 nt, Artificial Sequence
  Description of Artificial Sequence: Synthetic oligonucleotide
gaacacgacccuguugugg

SEQ ID NO: 1565239 - RNA, 19 nt, Artificial Sequence
  Description of Artificial Sequence: Synthetic oligonucleotide
ucuucccuuuaauuaauau

SEQ ID NO: 1565240 - RNA, 19 nt, Artificial Sequence
  Description of Artificial Sequence: Synthetic oligonucleotide
ucaacaacgguuguauuuu

SEQ ID NO: 1565241 - RNA, 19 nt, Artificial Sequence
  Description of Artificial Sequence: Synthetic oligonucleotide
cuuaugauauccauagccu

SEQ ID NO: 1565242 - RNA, 19 nt, Artificial Sequence
  Description of Artificial Sequence: Synthetic oligonucleotide
uucucaacaacgguuguau

SEQ ID NO: 1565243 - RNA, 19 nt, Artificial Sequence
  Description of Artificial Sequence: Synthetic oligonucleotide
uagucuuaugauauccaua

SEQ ID NO: 1565244 - RNA, 19 nt, Artificial Sequence
  Description of Artificial Sequence: Synthetic oligonucleotide
cauugggguaugagaaagg

SEQ ID NO: 1565245 - RNA, 19 nt, Artificial Sequence
  Description of Artificial Sequence: Synthetic oligonucleotide
agaaaggagucgccacugg

SEQ ID NO: 1565246 - RNA, 19 nt, Artificial Sequence
  Description of Artificial Sequence: Synthetic oligonucleotide
cacaaugagggaacgagga

SEQ ID NO: 1565247 - RNA, 19 nt, Artificial Sequence
  Description of Artificial Sequence: Synthetic oligonucleotide
uucuacaggaagacucacu

SEQ ID NO: 1565248 - RNA, 19 nt, Artificial Sequence
  Description of Artificial Sequence: Synthetic oligonucleotide
cuuuaaagauggagaguug

SEQ ID NO: 1565249 - RNA, 19 nt, Artificial Sequence
  Description of Artificial Sequence: Synthetic oligonucleotide
gguacaaaugucaggguag

SEQ ID NO: 1565250 - RNA, 19 nt, Artificial Sequence
  Description of Artificial Sequence: Synthetic oligonucleotide
ucucaggguaaaaucggaa

SEQ ID NO: 1565251 - RNA, 19 nt, Artificial Sequence
  Description of Artificial Sequence: Synthetic oligonucleotide
uccaguguguuuuggugcu

SEQ ID NO: 1565252 - RNA, 19 nt, Artificial Sequence
  Description of Artificial Sequence: Synthetic oligonucleotide
gagaccguaagucugaguu

SEQ ID NO: 1565253 - RNA, 19 nt, Artificial Sequence
  Description of Artificial Sequence: Synthetic oligonucleotide
guuguggaggagcagguuc

SEQ ID NO: 1565254 - RNA, 19 nt, Artificial Sequence
  Description of Artificial Sequence: Synthetic oligonucleotide
gaaacggcuuuuccagcag

SEQ ID NO: 1565255 - RNA, 19 nt, Artificial Sequence
  Description of Artificial Sequence: Synthetic oligonucleotide
ucuucauguaucccauaau

SEQ ID NO: 1565256 - RNA, 19 nt, Artificial Sequence
  Description of Artificial Sequence: Synthetic oligonucleotide
cucccuagucuugagauac

SEQ ID NO: 1565257 - RNA, 19 nt, Artificial Sequence
  Description of Artificial Sequence: Synthetic oligonucleotide
aaacggcuuuuccagcaga

SEQ ID NO: 1565258 - RNA, 19 nt, Artificial Sequence
  Description of Artificial Sequence: Synthetic oligonucleotide
cuauaugcuugauacuaca

SEQ ID NO: 1565259 - RNA, 19 nt, Artificial Sequence
  Description of Artificial Sequence: Synthetic oligonucleotide
auugggguaugagaaagga

SEQ ID NO: 1565260 - RNA, 19 nt, Artificial Sequence
  Description of Artificial Sequence: Synthetic oligonucleotide
acaucuacguucaucacaa

SEQ ID NO: 1565261 - RNA, 19 nt, Artificial Sequence
  Description of Artificial Sequence: Synthetic oligonucleotide
ucugacaucuacguucauc

SEQ ID NO: 1565262 - RNA, 19 nt, Artificial Sequence
  Description of Artificial Sequence: Synthetic oligonucleotide
caaugagggaacgaggauc

SEQ ID NO: 1565263 - RNA, 19 nt, Artificial Sequence
  Description of Artificial Sequence: Synthetic oligonucleotide
agagucuugugaucuacaa

SEQ ID NO: 1565264 - RNA, 19 nt, Artificial Sequence
  Description of Artificial Sequence: Synthetic oligonucleotide
cagaaauaagagucuugug

SEQ ID NO: 1565265 - RNA, 19 nt, Artificial Sequence
  Description of Artificial Sequence: Synthetic oligonucleotide
uuuggugcucugagggccc

SEQ ID NO: 1565266 - RNA, 19 nt, Artificial Sequence
  Description of Artificial Sequence: Synthetic oligonucleotide
gucuacaauaaaacacugc

SEQ ID NO: 1565267 - RNA, 19 nt, Artificial Sequence
  Description of Artificial Sequence: Synthetic oligonucleotide
agauacccugauauuacag

SEQ ID NO: 1565268 - RNA, 19 nt, Artificial Sequence
  Description of Artificial Sequence: Synthetic oligonucleotide
gacauguugaagccauaga

SEQ ID NO: 1565269 - RNA, 19 nt, Artificial Sequence
  Description of Artificial Sequence: Synthetic oligonucleotide
gacgucaucccagaaguca

SEQ ID NO: 1565270 - RNA, 19 nt, Artificial Sequence
  Description of Artificial Sequence: Synthetic oligonucleotide
ugagggcccguagagaaca

SEQ ID NO: 1565271 - RNA, 19 nt, Artificial Sequence
  Description of Artificial Sequence: Synthetic oligonucleotide
agaccguaagucugaguug

SEQ ID NO: 1565272 - RNA, 19 nt, Artificial Sequence
  Description of Artificial Sequence: Synthetic oligonucleotide
uacccugauauuacagcaa

SEQ ID NO: 1565273 - RNA, 19 nt, Artificial Sequence
  Description of Artificial Sequence: Synthetic oligonucleotide
gguaucuucaaguuuauuu

SEQ ID NO: 1565274 - RNA, 19 nt, Artificial Sequence
  Description of Artificial Sequence: Synthetic oligonucleotide
aacaacgguuguauuuuca

SEQ ID NO: 1565275 - RNA, 19 nt, Artificial Sequence
  Description of Artificial Sequence: Synthetic oligonucleotide
gagauacccugauauuaca

SEQ ID NO: 1565276 - RNA, 19 nt, Artificial Sequence
  Description of Artificial Sequence: Synthetic oligonucleotide
gagagaauuccaguuccac

SEQ ID NO: 1565277 - RNA, 19 nt, Artificial Sequence
  Description of Artificial Sequence: Synthetic oligonucleotide
acgugcucgagccaaugca

SEQ ID NO: 1565278 - RNA, 19 nt, Artificial Sequence
  Description of Artificial Sequence: Synthetic oligonucleotide
acgguuguauuuucacuga

SEQ ID NO: 1565279 - RNA, 19 nt, Artificial Sequence
  Description of Artificial Sequence: Synthetic oligonucleotide
agucuacaauaaaacacug

SEQ ID NO: 1565280 - RNA, 19 nt, Artificial Sequence
  Description of Artificial Sequence: Synthetic oligonucleotide
ugcuuugugcugcuuguua

SEQ ID NO: 1565281 - RNA, 19 nt, Artificial Sequence
  Description of Artificial Sequence: Synthetic oligonucleotide
uggaaacggcuuuuccagc

SEQ ID NO: 1565282 - RNA, 19 nt, Artificial Sequence
  Description of Artificial Sequence: Synthetic oligonucleotide
auauaauaacauccaccuu

SEQ ID NO: 1565283 - RNA, 19 nt, Artificial Sequence
  Description of Artificial Sequence: Synthetic oligonucleotide
cccguagagaacacgaccc

SEQ ID NO: 1565284 - RNA, 19 nt, Artificial Sequence
  Description of Artificial Sequence: Synthetic oligonucleotide
acuggagaccguaagucug

SEQ ID NO: 1565285 - RNA, 19 nt, Artificial Sequence
  Description of Artificial Sequence: Synthetic oligonucleotide
uguggcaauucuucucaaa

SEQ ID NO: 1565286 - RNA, 19 nt, Artificial Sequence
  Description of Artificial Sequence: Synthetic oligonucleotide
aacugccgugcacauggcu

SEQ ID NO: 1565287 - RNA, 19 nt, Artificial Sequence
  Description of Artificial Sequence: Synthetic oligonucleotide
cauaaugcccguaggagcu

SEQ ID NO: 1565288 - RNA, 19 nt, Artificial Sequence
  Description of Artificial Sequence: Synthetic oligonucleotide
uaucaguguacuugcucau

SEQ ID NO: 1565289 - RNA, 19 nt, Artificial Sequence
  Description of Artificial Sequence: Synthetic oligonucleotide
uugucaaguauuugcucuu

SEQ ID NO: 1565290 - RNA, 19 nt, Artificial Sequence
  Description of Artificial Sequence: Synthetic oligonucleotide
uguagcuuucugugcggac

SEQ ID NO: 1565291 - RNA, 19 nt, Artificial Sequence
  Description of Artificial Sequence: Synthetic oligonucleotide
agauguaguguggcaaucu

SEQ ID NO: 1565292 - RNA, 19 nt, Artificial Sequence
  Description of Artificial Sequence: Synthetic oligonucleotide
auccauagccugguagagg

SEQ ID NO: 1565293 - RNA, 19 nt, Artificial Sequence
  Description of Artificial Sequence: Synthetic oligonucleotide
gauguaguguggcaaucua

SEQ ID NO: 1565294 - RNA, 19 nt, Artificial Sequence
  Description of Artificial Sequence: Synthetic oligonucleotide
acaaugagggaacgaggau

SEQ ID NO: 1565295 - RNA, 19 nt, Artificial Sequence
  Description of Artificial Sequence: Synthetic oligonucleotide
gagggaacgaggauccuuc

SEQ ID NO: 1565296 - RNA, 19 nt, Artificial Sequence
  Description of Artificial Sequence: Synthetic oligonucleotide
gcucucuucaugcaggaca

SEQ ID NO: 1565297 - RNA, 19 nt, Artificial Sequence
  Description of Artificial Sequence: Synthetic oligonucleotide
ugauacuacaagggucaga

SEQ ID NO: 1565298 - RNA, 19 nt, Artificial Sequence
  Description of Artificial Sequence: Synthetic oligonucleotide
cuacaggaagacucacuuc

SEQ ID NO: 1565299 - RNA, 19 nt, Artificial Sequence
  Description of Artificial Sequence: Synthetic oligonucleotide
uuucuacaggaagacucac

SEQ ID NO: 1565300 - RNA, 19 nt, Artificial Sequence
  Description of Artificial Sequence: Synthetic oligonucleotide
acuacaagggucagaaaua

SEQ ID NO: 1565301 - RNA, 19 nt, Artificial Sequence
  Description of Artificial Sequence: Synthetic oligonucleotide
gccacaaugagggaacgag

SEQ ID NO: 1565302 - RNA, 19 nt, Artificial Sequence
  Description of Artificial Sequence: Synthetic oligonucleotide
uuacagcaaagaguauaac

SEQ ID NO: 1565303 - RNA, 19 nt, Artificial Sequence
  Description of Artificial Sequence: Synthetic oligonucleotide
ggguaugagaaaggagucg

SEQ ID NO: 1565304 - RNA, 19 nt, Artificial Sequence
  Description of Artificial Sequence: Synthetic oligonucleotide
agcaaagaguauaaccaaa

SEQ ID NO: 1565305 - RNA, 19 nt, Artificial Sequence
  Description of Artificial Sequence: Synthetic oligonucleotide
gcagguucugacaucuacg

SEQ ID NO: 1565306 - RNA, 19 nt, Artificial Sequence
  Description of Artificial Sequence: Synthetic oligonucleotide
guaugagaaaggagucgcc

SEQ ID NO: 1565307 - RNA, 19 nt, Artificial Sequence
  Description of Artificial Sequence: Synthetic oligonucleotide
cacucugauauaauaacau

SEQ ID NO: 1565308 - RNA, 19 nt, Artificial Sequence
  Description of Artificial Sequence: Synthetic oligonucleotide
ugcagauccucacgugcuc

SEQ ID NO: 1565309 - RNA, 19 nt, Artificial Sequence
  Description of Artificial Sequence: Synthetic oligonucleotide
uguaguucucaggguaaaa

SEQ ID NO: 1565310 - RNA, 19 nt, Artificial Sequence
  Description of Artificial Sequence: Synthetic oligonucleotide
auaagagucuugugaucua

SEQ ID NO: 1565311 - RNA, 19 nt, Artificial Sequence
  Description of Artificial Sequence: Synthetic oligonucleotide
ugcggacuuuguccuuuag

SEQ ID NO: 1565312 - RNA, 19 nt, Artificial Sequence
  Description of Artificial Sequence: Synthetic oligonucleotide
ccacaaugagggaacgagg

SEQ ID NO: 1565313 - RNA, 19 nt, Artificial Sequence
  Description of Artificial Sequence: Synthetic oligonucleotide
gcaaacaucgagagaauuc

SEQ ID NO: 1565314 - RNA, 19 nt, Artificial Sequence
  Description of Artificial Sequence: Synthetic oligonucleotide
ggaacgaggauccuucuua

SEQ ID NO: 1565315 - RNA, 19 nt, Artificial Sequence
  Description of Artificial Sequence: Synthetic oligonucleotide
ucccuagucuugagauacc

SEQ ID NO: 1565316 - RNA, 19 nt, Artificial Sequence
  Description of Artificial Sequence: Synthetic oligonucleotide
agaacacgacccuguugug

SEQ ID NO: 1565317 - RNA, 19 nt, Artificial Sequence
  Description of Artificial Sequence: Synthetic oligonucleotide
ggucacuggagaccguaag

SEQ ID NO: 1565318 - RNA, 19 nt, Artificial Sequence
  Description of Artificial Sequence: Synthetic oligonucleotide
gcuugauacuacaaggguc

SEQ ID NO: 1565319 - RNA, 19 nt, Artificial Sequence
  Description of Artificial Sequence: Synthetic oligonucleotide
ucuuugccccggcuuuggc

SEQ ID NO: 1565320 - RNA, 19 nt, Artificial Sequence
  Description of Artificial Sequence: Synthetic oligonucleotide
aaggcuucaccugcuuuaa

SEQ ID NO: 1565321 - RNA, 19 nt, Artificial Sequence
  Description of Artificial Sequence: Synthetic oligonucleotide
agaauccaacaucgacuca

SEQ ID NO: 1565322 - RNA, 19 nt, Artificial Sequence
  Description of Artificial Sequence: Synthetic oligonucleotide
cacgugcucgagccaaugc

SEQ ID NO: 1565323 - RNA, 19 nt, Artificial Sequence
  Description of Artificial Sequence: Synthetic oligonucleotide
uggcucccuagucuugaga

SEQ ID NO: 1565324 - RNA, 19 nt, Artificial Sequence
  Description of Artificial Sequence: Synthetic oligonucleotide
guacaaaugucaggguaga

SEQ ID NO: 1565325 - RNA, 19 nt, Artificial Sequence
  Description of Artificial Sequence: Synthetic oligonucleotide
aggguaaaaucggaagaaa

SEQ ID NO: 1565326 - RNA, 19 nt, Artificial Sequence
  Description of Artificial Sequence: Synthetic oligonucleotide
cuacaagggucagaaauaa

SEQ ID NO: 1565327 - RNA, 19 nt, Artificial Sequence
  Description of Artificial Sequence: Synthetic oligonucleotide
guacuugcucaugucacuc

SEQ ID NO: 1565328 - RNA, 19 nt, Artificial Sequence
  Description of Artificial Sequence: Synthetic oligonucleotide
uguaucccauaaugcccgu

SEQ ID NO: 1565329 - RNA, 19 nt, Artificial Sequence
  Description of Artificial Sequence: Synthetic oligonucleotide
cacacccaacaucuagaac

SEQ ID NO: 1565330 - RNA, 19 nt, Artificial Sequence
  Description of Artificial Sequence: Synthetic oligonucleotide
caacaacgguuguauuuuc

SEQ ID NO: 1565331 - RNA, 19 nt, Artificial Sequence
  Description of Artificial Sequence: Synthetic oligonucleotide
uaaugcccguaggagcuga

SEQ ID NO: 1565332 - RNA, 19 nt, Artificial Sequence
  Description of Artificial Sequence: Synthetic oligonucleotide
gcccguagagaacacgacc

SEQ ID NO: 1565333 - RNA, 19 nt, Artificial Sequence
  Description of Artificial Sequence: Synthetic oligonucleotide
gcuuuaaagauggagaguu

SEQ ID NO: 1565334 - RNA, 19 nt, Artificial Sequence
  Description of Artificial Sequence: Synthetic oligonucleotide
aggguagacugauccuccu

SEQ ID NO: 1565335 - RNA, 19 nt, Artificial Sequence
  Description of Artificial Sequence: Synthetic oligonucleotide
uggucacuggagaccguaa

SEQ ID NO: 1565336 - RNA, 19 nt, Artificial Sequence
  Description of Artificial Sequence: Synthetic oligonucleotide
cuuugccccggcuuuggca

SEQ ID NO: 1565337 - RNA, 19 nt, Artificial Sequence
  Description of Artificial Sequence: Synthetic oligonucleotide
uggagaccguaagucugag

SEQ ID NO: 1565338 - RNA, 19 nt, Artificial Sequence
  Description of Artificial Sequence: Synthetic oligonucleotide
agucugagacagauguagu

SEQ ID NO: 1565339 - RNA, 19 nt, Artificial Sequence
  Description of Artificial Sequence: Synthetic oligonucleotide
caucuagaacaaccuuauc

SEQ ID NO: 1565340 - RNA, 19 nt, Artificial Sequence
  Description of Artificial Sequence: Synthetic oligonucleotide
ugucaaguauuugcucuuu

SEQ ID NO: 1565341 - RNA, 19 nt, Artificial Sequence
  Description of Artificial Sequence: Synthetic oligonucleotide
auccaacaucgacucaaaa

SEQ ID NO: 1565342 - RNA, 19 nt, Artificial Sequence
  Description of Artificial Sequence: Synthetic oligonucleotide
gcucugagggcccguagag

SEQ ID NO: 1565343 - RNA, 19 nt, Artificial Sequence
  Description of Artificial Sequence: Synthetic oligonucleotide
ggagaguugugugugcuuc

SEQ ID NO: 1565344 - RNA, 19 nt, Artificial Sequence
  Description of Artificial Sequence: Synthetic oligonucleotide
cagguucugacaucuacgu

SEQ ID NO: 1565345 - RNA, 19 nt, Artificial Sequence
  Description of Artificial Sequence: Synthetic oligonucleotide
gccauagacgucaucccag

SEQ ID NO: 1565346 - RNA, 19 nt, Artificial Sequence
  Description of Artificial Sequence: Synthetic oligonucleotide
ggauuuugguauaugaaau

SEQ ID NO: 1565347 - RNA, 19 nt, Artificial Sequence
  Description of Artificial Sequence: Synthetic oligonucleotide
cacccaacaucuagaacaa

SEQ ID NO: 1565348 - RNA, 19 nt, Artificial Sequence
  Description of Artificial Sequence: Synthetic oligonucleotide
ugugcggacuuuguccuuu

SEQ ID NO: 1565349 - RNA, 19 nt, Artificial Sequence
  Description of Artificial Sequence: Synthetic oligonucleotide
agauccucacgugcucgag

SEQ ID NO: 1565350 - RNA, 19 nt, Artificial Sequence
  Description of Artificial Sequence: Synthetic oligonucleotide
ucuugugaacugugaucuu

SEQ ID NO: 1565351 - RNA, 19 nt, Artificial Sequence
  Description of Artificial Sequence: Synthetic oligonucleotide
ucacgugcucgagccaaug

SEQ ID NO: 1565352 - RNA, 19 nt, Artificial Sequence
  Description of Artificial Sequence: Synthetic oligonucleotide
cugcaauggcaguugugga

SEQ ID NO: 1565353 - RNA, 19 nt, Artificial Sequence
  Description of Artificial Sequence: Synthetic oligonucleotide
agggaacgaggauccuucu

SEQ ID NO: 1565354 - RNA, 19 nt, Artificial Sequence
  Description of Artificial Sequence: Synthetic oligonucleotide
aggagucgccacuggcuca

SEQ ID NO: 1565355 - RNA, 19 nt, Artificial Sequence
  Description of Artificial Sequence: Synthetic oligonucleotide
gaacgaggauccuucuuau

SEQ ID NO: 1565356 - RNA, 19 nt, Artificial Sequence
  Description of Artificial Sequence: Synthetic oligonucleotide
gcaaucuauaugcuugaua

SEQ ID NO: 1565357 - RNA, 19 nt, Artificial Sequence
  Description of Artificial Sequence: Synthetic oligonucleotide
guagcuuucugugcggacu

SEQ ID NO: 1565358 - RNA, 19 nt, Artificial Sequence
  Description of Artificial Sequence: Synthetic oligonucleotide
agguucugacaucuacguu

SEQ ID NO: 1565359 - RNA, 19 nt, Artificial Sequence
  Description of Artificial Sequence: Synthetic oligonucleotide
caucgagagaauuccaguu

SEQ ID NO: 1565360 - RNA, 19 nt, Artificial Sequence
  Description of Artificial Sequence: Synthetic oligonucleotide
agggcccguagagaacacg

SEQ ID NO: 1565361 - RNA, 19 nt, Artificial Sequence
  Description of Artificial Sequence: Synthetic oligonucleotide
uuggugcucugagggcccg

SEQ ID NO: 1565362 - RNA, 19 nt, Artificial Sequence
  Description of Artificial Sequence: Synthetic oligonucleotide
guguggauuuugguauaug

SEQ ID NO: 1565363 - RNA, 19 nt, Artificial Sequence
  Description of Artificial Sequence: Synthetic oligonucleotide
auaaugcccguaggagcug

SEQ ID NO: 1565364 - RNA, 19 nt, Artificial Sequence
  Description of Artificial Sequence: Synthetic oligonucleotide
cagauguaguguggcaauc

SEQ ID NO: 1565365 - RNA, 19 nt, Artificial Sequence
  Description of Artificial Sequence: Synthetic oligonucleotide
uccucacgugcucgagcca

SEQ ID NO: 1565366 - RNA, 19 nt, Artificial Sequence
  Description of Artificial Sequence: Synthetic oligonucleotide
cuagaacaaccuuaucuuu

SEQ ID NO: 1565367 - RNA, 19 nt, Artificial Sequence
  Description of Artificial Sequence: Synthetic oligonucleotide
agucgccacuggcucauaa

SEQ ID NO: 1565368 - RNA, 19 nt, Artificial Sequence
  Description of Artificial Sequence: Synthetic oligonucleotide
ucgagccaaugcagccuca

SEQ ID NO: 1565369 - RNA, 19 nt, Artificial Sequence
  Description of Artificial Sequence: Synthetic oligonucleotide
acgucaucccagaagucaa

SEQ ID NO: 1565370 - RNA, 19 nt, Artificial Sequence
  Description of Artificial Sequence: Synthetic oligonucleotide
gggguaugagaaaggaguc

SEQ ID NO: 1565371 - RNA, 19 nt, Artificial Sequence
  Description of Artificial Sequence: Synthetic oligonucleotide
guguguuuuggugcucuga

SEQ ID NO: 1565372 - RNA, 19 nt, Artificial Sequence
  Description of Artificial Sequence: Synthetic oligonucleotide
cgugcucgagccaaugcag

SEQ ID NO: 1565373 - RNA, 19 nt, Artificial Sequence
  Description of Artificial Sequence: Synthetic oligonucleotide
ccaacaucuagaacaaccu

SEQ ID NO: 1565374 - RNA, 19 nt, Artificial Sequence
  Description of Artificial Sequence: Synthetic oligonucleotide
cuugagauacccugauauu

SEQ ID NO: 1565375 - RNA, 19 nt, Artificial Sequence
  Description of Artificial Sequence: Synthetic oligonucleotide
auauuacagcaaagaguau

SEQ ID NO: 1565376 - RNA, 19 nt, Artificial Sequence
  Description of Artificial Sequence: Synthetic oligonucleotide
auggucacuggagaccgua

SEQ ID NO: 1565377 - RNA, 19 nt, Artificial Sequence
  Description of Artificial Sequence: Synthetic oligonucleotide
cccuagucuugagauaccc

SEQ ID NO: 1565378 - RNA, 19 nt, Artificial Sequence
  Description of Artificial Sequence: Synthetic oligonucleotide
ggcucauaaagaucuucua

SEQ ID NO: 1565379 - RNA, 19 nt, Artificial Sequence
  Description of Artificial Sequence: Synthetic oligonucleotide
acacgacccuguuguggca

SEQ ID NO: 1565380 - RNA, 19 nt, Artificial Sequence
  Description of Artificial Sequence: Synthetic oligonucleotide
gucgccacuggcucauaaa

SEQ ID NO: 1565381 - RNA, 19 nt, Artificial Sequence
  Description of Artificial Sequence: Synthetic oligonucleotide
cauagacgucaucccagaa

SEQ ID NO: 1565382 - RNA, 19 nt, Artificial Sequence
  Description of Artificial Sequence: Synthetic oligonucleotide
ugguaucuucaaguuuauu

SEQ ID NO: 1565383 - RNA, 19 nt, Artificial Sequence
  Description of Artificial Sequence: Synthetic oligonucleotide
cagauccucacgugcucga

SEQ ID NO: 1565384 - RNA, 19 nt, Artificial Sequence
  Description of Artificial Sequence: Synthetic oligonucleotide
cguaagucugaguugagcu

SEQ ID NO: 1565385 - RNA, 19 nt, Artificial Sequence
  Description of Artificial Sequence: Synthetic oligonucleotide
gucuugagauacccugaua

SEQ ID NO: 1565386 - RNA, 19 nt, Artificial Sequence
  Description of Artificial Sequence: Synthetic oligonucleotide
augguaucuucaaguuuau

SEQ ID NO: 1565387 - RNA, 19 nt, Artificial Sequence
  Description of Artificial Sequence: Synthetic oligonucleotide
ccguaagucugaguugagc

SEQ ID NO: 1565388 - RNA, 19 nt, Artificial Sequence
  Description of Artificial Sequence: Synthetic oligonucleotide
ggcucccuagucuugagau

SEQ ID NO: 1565389 - RNA, 19 nt, Artificial Sequence
  Description of Artificial Sequence: Synthetic oligonucleotide
aguuguggaggagcagguu

SEQ ID NO: 1565390 - RNA, 19 nt, Artificial Sequence
  Description of Artificial Sequence: Synthetic oligonucleotide
accguaagucugaguugag

SEQ ID NO: 1565391 - RNA, 19 nt, Artificial Sequence
  Description of Artificial Sequence: Synthetic oligonucleotide
cuuuggcagcaaacaucga

SEQ ID NO: 1565392 - RNA, 19 nt, Artificial Sequence
  Description of Artificial Sequence: Synthetic oligonucleotide
ugugugcuucaggcuuugu

SEQ ID NO: 1565393 - RNA, 19 nt, Artificial Sequence
  Description of Artificial Sequence: Synthetic oligonucleotide
aaugcccguaggagcugaa

SEQ ID NO: 1565394 - RNA, 19 nt, Artificial Sequence
  Description of Artificial Sequence: Synthetic oligonucleotide
acgacccuguuguggcaau

SEQ ID NO: 1565395 - RNA, 19 nt, Artificial Sequence
  Description of Artificial Sequence: Synthetic oligonucleotide
cccggcuuuggcagcaaac

SEQ ID NO: 1565396 - RNA, 19 nt, Artificial Sequence
  Description of Artificial Sequence: Synthetic oligonucleotide
gugugugcuucaggcuuug

SEQ ID NO: 1565397 - RNA, 19 nt, Artificial Sequence
  Description of Artificial Sequence: Synthetic oligonucleotide
gggcccguagagaacacga

SEQ ID NO: 1565398 - RNA, 19 nt, Artificial Sequence
  Description of Artificial Sequence: Synthetic oligonucleotide
caguuguggaggagcaggu

SEQ ID NO: 1565399 - RNA, 19 nt, Artificial Sequence
  Description of Artificial Sequence: Synthetic oligonucleotide
gcccguaggagcugaagua

SEQ ID NO: 1565400 - RNA, 19 nt, Artificial Sequence
  Description of Artificial Sequence: Synthetic oligonucleotide
gugcugcuuguuaauuaaa

SEQ ID NO: 1565401 - RNA, 19 nt, Artificial Sequence
  Description of Artificial Sequence: Synthetic oligonucleotide
ccuccuuuugucaaguauu

SEQ ID NO: 1565402 - RNA, 19 nt, Artificial Sequence
  Description of Artificial Sequence: Synthetic oligonucleotide
cugaguccauugggguaug

SEQ ID NO: 1565403 - RNA, 19 nt, Artificial Sequence
  Description of Artificial Sequence: Synthetic oligonucleotide
caauucuaucaguguacuu

SEQ ID NO: 1565404 - RNA, 19 nt, Artificial Sequence
  Description of Artificial Sequence: Synthetic oligonucleotide
gcacauggcugucuuugua

SEQ ID NO: 1565405 - RNA, 19 nt, Artificial Sequence
  Description of Artificial Sequence: Synthetic oligonucleotide
gagggcccguagagaacac

SEQ ID NO: 1565406 - RNA, 19 nt, Artificial Sequence
  Description of Artificial Sequence: Synthetic oligonucleotide
ccguaggagcugaaguaga

SEQ ID NO: 1565407 - RNA, 19 nt, Artificial Sequence
  Description of Artificial Sequence: Synthetic oligonucleotide
caucuacguucaucacaaa

SEQ ID NO: 1565408 - RNA, 19 nt, Artificial Sequence
  Description of Artificial Sequence: Synthetic oligonucleotide
ggcccguagagaacacgac

SEQ ID NO: 1565409 - RNA, 19 nt, Artificial Sequence
  Description of Artificial Sequence: Synthetic oligonucleotide
cacgacccuguuguggcaa

SEQ ID NO: 1565410 - RNA, 19 nt, Artificial Sequence
  Description of Artificial Sequence: Synthetic oligonucleotide
aggacauguugaagccaua

SEQ ID NO: 1565411 - RNA, 19 nt, Artificial Sequence
  Description of Artificial Sequence: Synthetic oligonucleotide
guguggcaaucuauaugcu

SEQ ID NO: 1565412 - RNA, 19 nt, Artificial Sequence
  Description of Artificial Sequence: Synthetic oligonucleotide
cgaggauccuucuuauucu

SEQ ID NO: 1565413 - RNA, 19 nt, Artificial Sequence
  Description of Artificial Sequence: Synthetic oligonucleotide
gcucccuagucuugagaua

SEQ ID NO: 1565414 - RNA, 19 nt, Artificial Sequence
  Description of Artificial Sequence: Synthetic oligonucleotide
ccuagucuugagauacccu

SEQ ID NO: 1565415 - RNA, 19 nt, Artificial Sequence
  Description of Artificial Sequence: Synthetic oligonucleotide
cgagagaauuccaguucca

SEQ ID NO: 1565416 - RNA, 19 nt, Artificial Sequence
  Description of Artificial Sequence: Synthetic oligonucleotide
gugcggacuuuguccuuua

SEQ ID NO: 1565417 - RNA, 19 nt, Artificial Sequence
  Description of Artificial Sequence: Synthetic oligonucleotide
caccaggcugaugguacaa

SEQ ID NO: 1565418 - RNA, 19 nt, Artificial Sequence
  Description of Artificial Sequence: Synthetic oligonucleotide
ggagaccguaagucugagu

SEQ ID NO: 1565419 - RNA, 19 nt, Artificial Sequence
  Description of Artificial Sequence: Synthetic oligonucleotide
gagcagguucugacaucua

SEQ ID NO: 1565420 - RNA, 19 nt, Artificial Sequence
  Description of Artificial Sequence: Synthetic oligonucleotide
ccucacgugcucgagccaa

SEQ ID NO: 1565421 - RNA, 19 nt, Artificial Sequence
  Description of Artificial Sequence: Synthetic oligonucleotide
gggaacgaggauccuucuu

SEQ ID NO: 1565422 - RNA, 19 nt, Artificial Sequence
  Description of Artificial Sequence: Synthetic oligonucleotide
cucacgugcucgagccaau

SEQ ID NO: 1565423 - RNA, 19 nt, Artificial Sequence
  Description of Artificial Sequence: Synthetic oligonucleotide
ggcaaucuauaugcuugau

SEQ ID NO: 1565424 - RNA, 19 nt, Artificial Sequence
  Description of Artificial Sequence: Synthetic oligonucleotide
ggagucgccacuggcucau

SEQ ID NO: 1565425 - RNA, 19 nt, Artificial Sequence
  Description of Artificial Sequence: Synthetic oligonucleotide
gcgcccgcgccuccaugug

SEQ ID NO: 1565426 - RNA, 19 nt, Artificial Sequence
  Description of Artificial Sequence: Synthetic oligonucleotide
ccgcgccuccaugugcuuc

SEQ ID NO: 1565427 - RNA, 19 nt, Artificial Sequence
  Description of Artificial Sequence: Synthetic oligonucleotide
gcccgcgccuccaugugcu

SEQ ID NO: 1565428 - RNA, 19 nt, Artificial Sequence
  Description of Artificial Sequence: Synthetic oligonucleotide
ccauagccugguagaggau

SEQ ID NO: 1565429 - RNA, 19 nt, Artificial Sequence
  Description of Artificial Sequence: Synthetic oligonucleotide
ccgugcacauggcugucuu

SEQ ID NO: 1565430 - RNA, 19 nt, Artificial Sequence
  Description of Artificial Sequence: Synthetic oligonucleotide
ccccggcuuuggcagcaaa

SEQ ID NO: 1565431 - RNA, 19 nt, Artificial Sequence
  Description of Artificial Sequence: Synthetic oligonucleotide
cccgcgccuccaugugcuu

SEQ ID NO: 1565432 - RNA, 19 nt, Artificial Sequence
  Description of Artificial Sequence: Synthetic oligonucleotide
aguccaaauauuuauaucc

SEQ ID NO: 1565433 - RNA, 19 nt, Artificial Sequence
  Description of Artificial Sequence: Synthetic oligonucleotide
uuuaucaaauuccagggcg

SEQ ID NO: 1565434 - RNA, 19 nt, Artificial Sequence
  Description of Artificial Sequence: Synthetic oligonucleotide
aauauaauucgccuugguc

SEQ ID NO: 1565435 - RNA, 19 nt, Artificial Sequence
  Description of Artificial Sequence: Synthetic oligonucleotide
uuacauaugauagagacga

SEQ ID NO: 1565436 - RNA, 19 nt, Artificial Sequence
  Description of Artificial Sequence: Synthetic oligonucleotide
ucuacagaaacuccgauca

SEQ ID NO: 1565437 - RNA, 19 nt, Artificial Sequence
  Description of Artificial Sequence: Synthetic oligonucleotide
ugggaaaucaauaaucuug

SEQ ID NO: 1565438 - RNA, 19 nt, Artificial Sequence
  Description of Artificial Sequence: Synthetic oligonucleotide
ucaaauauaauucgccuug

SEQ ID NO: 1565439 - RNA, 19 nt, Artificial Sequence
  Description of Artificial Sequence: Synthetic oligonucleotide
auauaauucgccuugguca

SEQ ID NO: 1565440 - RNA, 19 nt, Artificial Sequence
  Description of Artificial Sequence: Synthetic oligonucleotide
uuuauaggaguuauccacg

SEQ ID NO: 1565441 - RNA, 19 nt, Artificial Sequence
  Description of Artificial Sequence: Synthetic oligonucleotide
aaucuuagggauucaauug

SEQ ID NO: 1565442 - RNA, 19 nt, Artificial Sequence
  Description of Artificial Sequence: Synthetic oligonucleotide
uccaucuacagaaacuccg

SEQ ID NO: 1565443 - RNA, 19 nt, Artificial Sequence
  Description of Artificial Sequence: Synthetic oligonucleotide
aacgucaacauuucaaaga

SEQ ID NO: 1565444 - RNA, 19 nt, Artificial Sequence
  Description of Artificial Sequence: Synthetic oligonucleotide
ucaaagaacaaaaggcuca

SEQ ID NO: 1565445 - RNA, 19 nt, Artificial Sequence
  Description of Artificial Sequence: Synthetic oligonucleotide
ugaauucuuaaacagccca

SEQ ID NO: 1565446 - RNA, 19 nt, Artificial Sequence
  Description of Artificial Sequence: Synthetic oligonucleotide
gacagaaaccuuuucaccc

SEQ ID NO: 1565447 - RNA, 19 nt, Artificial Sequence
  Description of Artificial Sequence: Synthetic oligonucleotide
aaguuugcuucuuuucuac

SEQ ID NO: 1565448 - RNA, 19 nt, Artificial Sequence
  Description of Artificial Sequence: Synthetic oligonucleotide
auagccuagaccuucugac

SEQ ID NO: 1565449 - RNA, 19 nt, Artificial Sequence
  Description of Artificial Sequence: Synthetic oligonucleotide
cugacuaccagguuuaaag

SEQ ID NO: 1565450 - RNA, 19 nt, Artificial Sequence
  Description of Artificial Sequence: Synthetic oligonucleotide
uguaaacauaaaaucuugc

SEQ ID NO: 1565451 - RNA, 19 nt, Artificial Sequence
  Description of Artificial Sequence: Synthetic oligonucleotide
auauuuauauccugaagcu

SEQ ID NO: 1565452 - RNA, 19 nt, Artificial Sequence
  Description of Artificial Sequence: Synthetic oligonucleotide
uuuucuacaacaccccaug

SEQ ID NO: 1565453 - RNA, 19 nt, Artificial Sequence
  Description of Artificial Sequence: Synthetic oligonucleotide
auagccaaauguugaauac

SEQ ID NO: 1565454 - RNA, 19 nt, Artificial Sequence
  Description of Artificial Sequence: Synthetic oligonucleotide
ucuacaacaccccaugcca

SEQ ID NO: 1565455 - RNA, 19 nt, Artificial Sequence
  Description of Artificial Sequence: Synthetic oligonucleotide
uuuaucccaggacauuucg

SEQ ID NO: 1565456 - RNA, 19 nt, Artificial Sequence
  Description of Artificial Sequence: Synthetic oligonucleotide
uuauuuauggccucugggu

SEQ ID NO: 1565457 - RNA, 19 nt, Artificial Sequence
  Description of Artificial Sequence: Synthetic oligonucleotide
ucggcuuuugcuuuagggg

SEQ ID NO: 1565458 - RNA, 19 nt, Artificial Sequence
  Description of Artificial Sequence: Synthetic oligonucleotide
aaccuuuucacccucguau

SEQ ID NO: 1565459 - RNA, 19 nt, Artificial Sequence
  Description of Artificial Sequence: Synthetic oligonucleotide
ugagauauccagguaagag

SEQ ID NO: 1565460 - RNA, 19 nt, Artificial Sequence
  Description of Artificial Sequence: Synthetic oligonucleotide
uauguauuuuggaacguca

SEQ ID NO: 1565461 - RNA, 19 nt, Artificial Sequence
  Description of Artificial Sequence: Synthetic oligonucleotide
auauaguccaaauauuuau

SEQ ID NO: 1565462 - RNA, 19 nt, Artificial Sequence
  Description of Artificial Sequence: Synthetic oligonucleotide
ucuacuauggcugccagca

SEQ ID NO: 1565463 - RNA, 19 nt, Artificial Sequence
  Description of Artificial Sequence: Synthetic oligonucleotide
cuugcgauucucaugacug

SEQ ID NO: 1565464 - RNA, 19 nt, Artificial Sequence
  Description of Artificial Sequence: Synthetic oligonucleotide
accaugguaaggcuuuugc

SEQ ID NO: 1565465 - RNA, 19 nt, Artificial Sequence
  Description of Artificial Sequence: Synthetic oligonucleotide
uguuguaaaucacuggcuc

SEQ ID NO: 1565466 - RNA, 19 nt, Artificial Sequence
  Description of Artificial Sequence: Synthetic oligonucleotide
aacuccgaucacuaugccg

SEQ ID NO: 1565467 - RNA, 19 nt, Artificial Sequence
  Description of Artificial Sequence: Synthetic oligonucleotide
uucaaagaacaaaaggcuc

SEQ ID NO: 1565468 - RNA, 19 nt, Artificial Sequence
  Description of Artificial Sequence: Synthetic oligonucleotide
caugguaaggcuuuugcug

SEQ ID NO: 1565469 - RNA, 19 nt, Artificial Sequence
  Description of Artificial Sequence: Synthetic oligonucleotide
aagagauucucauuugaau

SEQ ID NO: 1565470 - RNA, 19 nt, Artificial Sequence
  Description of Artificial Sequence: Synthetic oligonucleotide
auaaugacgaauuccacuu

SEQ ID NO: 1565471 - RNA, 19 nt, Artificial Sequence
  Description of Artificial Sequence: Synthetic oligonucleotide
uggaccuguaccauuuagg

SEQ ID NO: 1565472 - RNA, 19 nt, Artificial Sequence
  Description of Artificial Sequence: Synthetic oligonucleotide
agaaacuccgaucacuaug

SEQ ID NO: 1565473 - RNA, 19 nt, Artificial Sequence
  Description of Artificial Sequence: Synthetic oligonucleotide
uaaaugggaaaucaauaau

SEQ ID NO: 1565474 - RNA, 19 nt, Artificial Sequence
  Description of Artificial Sequence: Synthetic oligonucleotide
ugcaggaaccguaaguuug

SEQ ID NO: 1565475 - RNA, 19 nt, Artificial Sequence
  Description of Artificial Sequence: Synthetic oligonucleotide
aaucaauaaucuuguugug

SEQ ID NO: 1565476 - RNA, 19 nt, Artificial Sequence
  Description of Artificial Sequence: Synthetic oligonucleotide
guuguaaaucacuggcucg

SEQ ID NO: 1565477 - RNA, 19 nt, Artificial Sequence
  Description of Artificial Sequence: Synthetic oligonucleotide
uaaucuuagggauucaauu

SEQ ID NO: 1565478 - RNA, 19 nt, Artificial Sequence
  Description of Artificial Sequence: Synthetic oligonucleotide
uugguaaccauacagcauu

SEQ ID NO: 1565479 - RNA, 19 nt, Artificial Sequence
  Description of Artificial Sequence: Synthetic oligonucleotide
agacgauuauuccucgugg

SEQ ID NO: 1565480 - RNA, 19 nt, Artificial Sequence
  Description of Artificial Sequence: Synthetic oligonucleotide
acauuucgguguuagggac

SEQ ID NO: 1565481 - RNA, 19 nt, Artificial Sequence
  Description of Artificial Sequence: Synthetic oligonucleotide
aaccauacagcauugcauu

SEQ ID NO: 1565482 - RNA, 19 nt, Artificial Sequence
  Description of Artificial Sequence: Synthetic oligonucleotide
gagauucucauuugaauuc

SEQ ID NO: 1565483 - RNA, 19 nt, Artificial Sequence
  Description of Artificial Sequence: Synthetic oligonucleotide
uguauuuuggaacgucaac

SEQ ID NO: 1565484 - RNA, 19 nt, Artificial Sequence
  Description of Artificial Sequence: Synthetic oligonucleotide
uuagggauucaauugaauu

SEQ ID NO: 1565485 - RNA, 19 nt, Artificial Sequence
  Description of Artificial Sequence: Synthetic oligonucleotide
acuccgaucacuaugccgg

SEQ ID NO: 1565486 - RNA, 19 nt, Artificial Sequence
  Description of Artificial Sequence: Synthetic oligonucleotide
uuaaauaaucuuagggauu

SEQ ID NO: 1565487 - RNA, 19 nt, Artificial Sequence
  Description of Artificial Sequence: Synthetic oligonucleotide
ugauagagacgauuauucc

SEQ ID NO: 1565488 - RNA, 19 nt, Artificial Sequence
  Description of Artificial Sequence: Synthetic oligonucleotide
aucuacagaaacuccgauc

SEQ ID NO: 1565489 - RNA, 19 nt, Artificial Sequence
  Description of Artificial Sequence: Synthetic oligonucleotide
gaaacuccgaucacuaugc

SEQ ID NO: 1565490 - RNA, 19 nt, Artificial Sequence
  Description of Artificial Sequence: Synthetic oligonucleotide
aaacagcccaacuugguaa

SEQ ID NO: 1565491 - RNA, 19 nt, Artificial Sequence
  Description of Artificial Sequence: Synthetic oligonucleotide
cucacuguggaccuguacc

SEQ ID NO: 1565492 - RNA, 19 nt, Artificial Sequence
  Description of Artificial Sequence: Synthetic oligonucleotide
uauuuauggccucuggguc

SEQ ID NO: 1565493 - RNA, 19 nt, Artificial Sequence
  Description of Artificial Sequence: Synthetic oligonucleotide
gacgauuauuccucguggg

SEQ ID NO: 1565494 - RNA, 19 nt, Artificial Sequence
  Description of Artificial Sequence: Synthetic oligonucleotide
aagguguguugacaagacg

SEQ ID NO: 1565495 - RNA, 19 nt, Artificial Sequence
  Description of Artificial Sequence: Synthetic oligonucleotide
uauagccaaauguugaaua

SEQ ID NO: 1565496 - RNA, 19 nt, Artificial Sequence
  Description of Artificial Sequence: Synthetic oligonucleotide
uauaguccaaauauuuaua

SEQ ID NO: 1565497 - RNA, 19 nt, Artificial Sequence
  Description of Artificial Sequence: Synthetic oligonucleotide
uuugcuucuuuucuacaac

SEQ ID NO: 1565498 - RNA, 19 nt, Artificial Sequence
  Description of Artificial Sequence: Synthetic oligonucleotide
uuaucccaggacauuucgg

SEQ ID NO: 1565499 - RNA, 19 nt, Artificial Sequence
  Description of Artificial Sequence: Synthetic oligonucleotide
augcuugcgauucucauga

SEQ ID NO: 1565500 - RNA, 19 nt, Artificial Sequence
  Description of Artificial Sequence: Synthetic oligonucleotide
uauaauucgccuuggucaa

SEQ ID NO: 1565501 - RNA, 19 nt, Artificial Sequence
  Description of Artificial Sequence: Synthetic oligonucleotide
gucauggaaaaucuucugc

SEQ ID NO: 1565502 - RNA, 19 nt, Artificial Sequence
  Description of Artificial Sequence: Synthetic oligonucleotide
uucuuaaacagcccaacuu

SEQ ID NO: 1565503 - RNA, 19 nt, Artificial Sequence
  Description of Artificial Sequence: Synthetic oligonucleotide
uggaacgucaacauuucaa

SEQ ID NO: 1565504 - RNA, 19 nt, Artificial Sequence
  Description of Artificial Sequence: Synthetic oligonucleotide
uauuuuggaacgucaacau

SEQ ID NO: 1565505 - RNA, 19 nt, Artificial Sequence
  Description of Artificial Sequence: Synthetic oligonucleotide
aaacuccgaucacuaugcc

SEQ ID NO: 1565506 - RNA, 19 nt, Artificial Sequence
  Description of Artificial Sequence: Synthetic oligonucleotide
aucuuagggauucaauuga

SEQ ID NO: 1565507 - RNA, 19 nt, Artificial Sequence
  Description of Artificial Sequence: Synthetic oligonucleotide
agaaauccaccaccagccc

SEQ ID NO: 1565508 - RNA, 19 nt, Artificial Sequence
  Description of Artificial Sequence: Synthetic oligonucleotide
acgauuauuccucgugggg

SEQ ID NO: 1565509 - RNA, 19 nt, Artificial Sequence
  Description of Artificial Sequence: Synthetic oligonucleotide
uucucaugacuguuucugg

SEQ ID NO: 1565510 - RNA, 19 nt, Artificial Sequence
  Description of Artificial Sequence: Synthetic oligonucleotide
gagacgauuauuccucgug

SEQ ID NO: 1565511 - RNA, 19 nt, Artificial Sequence
  Description of Artificial Sequence: Synthetic oligonucleotide
cucggcuuuugcuuuaggg

SEQ ID NO: 1565512 - RNA, 19 nt, Artificial Sequence
  Description of Artificial Sequence: Synthetic oligonucleotide
gaugcuugcgauucucaug

SEQ ID NO: 1565513 - RNA, 19 nt, Artificial Sequence
  Description of Artificial Sequence: Synthetic oligonucleotide
gauagagacgauuauuccu

SEQ ID NO: 1565514 - RNA, 19 nt, Artificial Sequence
  Description of Artificial Sequence: Synthetic oligonucleotide
ugcuauugaggccaacgga

SEQ ID NO: 1565515 - RNA, 19 nt, Artificial Sequence
  Description of Artificial Sequence: Synthetic oligonucleotide
aauaaucuuagggauucaa

SEQ ID NO: 1565516 - RNA, 19 nt, Artificial Sequence
  Description of Artificial Sequence: Synthetic oligonucleotide
aaaggcucacuguggaccu

SEQ ID NO: 1565517 - RNA, 19 nt, Artificial Sequence
  Description of Artificial Sequence: Synthetic oligonucleotide
acgucaacauuucaaagaa

SEQ ID NO: 1565518 - RNA, 19 nt, Artificial Sequence
  Description of Artificial Sequence: Synthetic oligonucleotide
uuaaacagcccaacuuggu

SEQ ID NO: 1565519 - RNA, 19 nt, Artificial Sequence
  Description of Artificial Sequence: Synthetic oligonucleotide
agugccgacaccugacuuc

SEQ ID NO: 1565520 - RNA, 19 nt, Artificial Sequence
  Description of Artificial Sequence: Synthetic oligonucleotide
uauugaggccaacggacug

SEQ ID NO: 1565521 - RNA, 19 nt, Artificial Sequence
  Description of Artificial Sequence: Synthetic oligonucleotide
ugguuugcaggguacccgg

SEQ ID NO: 1565522 - RNA, 19 nt, Artificial Sequence
  Description of Artificial Sequence: Synthetic oligonucleotide
cauaugauagagacgauua

SEQ ID NO: 1565523 - RNA, 19 nt, Artificial Sequence
  Description of Artificial Sequence: Synthetic oligonucleotide
uuauaggaguuauccacgu

SEQ ID NO: 1565524 - RNA, 19 nt, Artificial Sequence
  Description of Artificial Sequence: Synthetic oligonucleotide
gacauuucgguguuaggga

SEQ ID NO: 1565525 - RNA, 19 nt, Artificial Sequence
  Description of Artificial Sequence: Synthetic oligonucleotide
aggaguuauccacguaagg

SEQ ID NO: 1565526 - RNA, 19 nt, Artificial Sequence
  Description of Artificial Sequence: Synthetic oligonucleotide
ggaaccguaaguuugcuuc

SEQ ID NO: 1565527 - RNA, 19 nt, Artificial Sequence
  Description of Artificial Sequence: Synthetic oligonucleotide
ugacuaccagguuuaaaga

SEQ ID NO: 1565528 - RNA, 19 nt, Artificial Sequence
  Description of Artificial Sequence: Synthetic oligonucleotide
ggcauuaccccuuucauca

SEQ ID NO: 1565529 - RNA, 19 nt, Artificial Sequence
  Description of Artificial Sequence: Synthetic oligonucleotide
uuuggaacgucaacauuuc

SEQ ID NO: 1565530 - RNA, 19 nt, Artificial Sequence
  Description of Artificial Sequence: Synthetic oligonucleotide
ucguuuucuuccuguacag

SEQ ID NO: 1565531 - RNA, 19 nt, Artificial Sequence
  Description of Artificial Sequence: Synthetic oligonucleotide
uagagacgauuauuccucg

SEQ ID NO: 1565532 - RNA, 19 nt, Artificial Sequence
  Description of Artificial Sequence: Synthetic oligonucleotide
uuucuacaacaccccaugc

SEQ ID NO: 1565533 - RNA, 19 nt, Artificial Sequence
  Description of Artificial Sequence: Synthetic oligonucleotide
uucgguguuagggacuggg

SEQ ID NO: 1565534 - RNA, 19 nt, Artificial Sequence
  Description of Artificial Sequence: Synthetic oligonucleotide
uaaaucacuggcucguuuu

SEQ ID NO: 1565535 - RNA, 19 nt, Artificial Sequence
  Description of Artificial Sequence: Synthetic oligonucleotide
uauuugcccucuuuauccc

SEQ ID NO: 1565536 - RNA, 19 nt, Artificial Sequence
  Description of Artificial Sequence: Synthetic oligonucleotide
uaaucuuguugugacagaa

SEQ ID NO: 1565537 - RNA, 19 nt, Artificial Sequence
  Description of Artificial Sequence: Synthetic oligonucleotide
uuucuacuauggcugccag

SEQ ID NO: 1565538 - RNA, 19 nt, Artificial Sequence
  Description of Artificial Sequence: Synthetic oligonucleotide
uuucugggaacucgggaac

SEQ ID NO: 1565539 - RNA, 19 nt, Artificial Sequence
  Description of Artificial Sequence: Synthetic oligonucleotide
ucuuccuguacaguuguca

SEQ ID NO: 1565540 - RNA, 19 nt, Artificial Sequence
  Description of Artificial Sequence: Synthetic oligonucleotide
ucucaugacuguuucuggu

SEQ ID NO: 1565541 - RNA, 19 nt, Artificial Sequence
  Description of Artificial Sequence: Synthetic oligonucleotide
uuccaucuacagaaacucc

SEQ ID NO: 1565542 - RNA, 19 nt, Artificial Sequence
  Description of Artificial Sequence: Synthetic oligonucleotide
augccauugcauauuugcc

SEQ ID NO: 1565543 - RNA, 19 nt, Artificial Sequence
  Description of Artificial Sequence: Synthetic oligonucleotide
ucuuagggauucaauugaa

SEQ ID NO: 1565544 - RNA, 19 nt, Artificial Sequence
  Description of Artificial Sequence: Synthetic oligonucleotide
uuguaaaucacuggcucgu

SEQ ID NO: 1565545 - RNA, 19 nt, Artificial Sequence
  Description of Artificial Sequence: Synthetic oligonucleotide
aggacuagcaggacacugc

SEQ ID NO: 1565546 - RNA, 19 nt, Artificial Sequence
  Description of Artificial Sequence: Synthetic oligonucleotide
uucccaaacuucagaaggu

SEQ ID NO: 1565547 - RNA, 19 nt, Artificial Sequence
  Description of Artificial Sequence: Synthetic oligonucleotide
uggcuugagauauccaggu

SEQ ID NO: 1565548 - RNA, 19 nt, Artificial Sequence
  Description of Artificial Sequence: Synthetic oligonucleotide
uuaggggagucacucuucu

SEQ ID NO: 1565549 - RNA, 19 nt, Artificial Sequence
  Description of Artificial Sequence: Synthetic oligonucleotide
uacccgguucuccacaucu

SEQ ID NO: 1565550 - RNA, 19 nt, Artificial Sequence
  Description of Artificial Sequence: Synthetic oligonucleotide
uuggucagauggcauuacc

SEQ ID NO: 1565551 - RNA, 19 nt, Artificial Sequence
  Description of Artificial Sequence: Synthetic oligonucleotide
uuauguauuuuggaacguc

SEQ ID NO: 1565552 - RNA, 19 nt, Artificial Sequence
  Description of Artificial Sequence: Synthetic oligonucleotide
ggucagauggcauuacccc

SEQ ID NO: 1565553 - RNA, 19 nt, Artificial Sequence
  Description of Artificial Sequence: Synthetic oligonucleotide
agccuagaccuucugacca

SEQ ID NO: 1565554 - RNA, 19 nt, Artificial Sequence
  Description of Artificial Sequence: Synthetic oligonucleotide
uuuauguauuuuggaacgu

SEQ ID NO: 1565555 - RNA, 19 nt, Artificial Sequence
  Description of Artificial Sequence: Synthetic oligonucleotide
ugaccagacuucuuuucca

SEQ ID NO: 1565556 - RNA, 19 nt, Artificial Sequence
  Description of Artificial Sequence: Synthetic oligonucleotide
auaugauagagacgauuau

SEQ ID NO: 1565557 - RNA, 19 nt, Artificial Sequence
  Description of Artificial Sequence: Synthetic oligonucleotide
ucaugacuguuucugguuu

SEQ ID NO: 1565558 - RNA, 19 nt, Artificial Sequence
  Description of Artificial Sequence: Synthetic oligonucleotide
uuugcaggguacccgguuc

SEQ ID NO: 1565559 - RNA, 19 nt, Artificial Sequence
  Description of Artificial Sequence: Synthetic oligonucleotide
uugcauucccaaacuucag

SEQ ID NO: 1565560 - RNA, 19 nt, Artificial Sequence
  Description of Artificial Sequence: Synthetic oligonucleotide
uagccuagaccuucugacc

SEQ ID NO: 1565561 - RNA, 19 nt, Artificial Sequence
  Description of Artificial Sequence: Synthetic oligonucleotide
aguuauccacguaaggugu

SEQ ID NO: 1565562 - RNA, 19 nt, Artificial Sequence
  Description of Artificial Sequence: Synthetic oligonucleotide
ucugaccagacuucuuuuc

SEQ ID NO: 1565563 - RNA, 19 nt, Artificial Sequence
  Description of Artificial Sequence: Synthetic oligonucleotide
cauauaguccaaauauuua

SEQ ID NO: 1565564 - RNA, 19 nt, Artificial Sequence
  Description of Artificial Sequence: Synthetic oligonucleotide
cauaaugacgaauuccacu

SEQ ID NO: 1565565 - RNA, 19 nt, Artificial Sequence
  Description of Artificial Sequence: Synthetic oligonucleotide
cucguuuucuuccuguaca

SEQ ID NO: 1565566 - RNA, 19 nt, Artificial Sequence
  Description of Artificial Sequence: Synthetic oligonucleotide
uagccaaauguugaauaca

SEQ ID NO: 1565567 - RNA, 19 nt, Artificial Sequence
  Description of Artificial Sequence: Synthetic oligonucleotide
ugguaaccauacagcauug

SEQ ID NO: 1565568 - RNA, 19 nt, Artificial Sequence
  Description of Artificial Sequence: Synthetic oligonucleotide
ucaccaucguuucuggcuu

SEQ ID NO: 1565569 - RNA, 19 nt, Artificial Sequence
  Description of Artificial Sequence: Synthetic oligonucleotide
ugggagauccagauccagu

SEQ ID NO: 1565570 - RNA, 19 nt, Artificial Sequence
  Description of Artificial Sequence: Synthetic oligonucleotide
acguaagguguguugacaa

SEQ ID NO: 1565571 - RNA, 19 nt, Artificial Sequence
  Description of Artificial Sequence: Synthetic oligonucleotide
agggauucaauugaauuuu

SEQ ID NO: 1565572 - RNA, 19 nt, Artificial Sequence
  Description of Artificial Sequence: Synthetic oligonucleotide
ggaacauagugcugcacug

SEQ ID NO: 1565573 - RNA, 19 nt, Artificial Sequence
  Description of Artificial Sequence: Synthetic oligonucleotide
aaacugacuaccagguuua

SEQ ID NO: 1565574 - RNA, 19 nt, Artificial Sequence
  Description of Artificial Sequence: Synthetic oligonucleotide
aggacauuucgguguuagg

SEQ ID NO: 1565575 - RNA, 19 nt, Artificial Sequence
  Description of Artificial Sequence: Synthetic oligonucleotide
uuuugcuuuaggggaguca

SEQ ID NO: 1565576 - RNA, 19 nt, Artificial Sequence
  Description of Artificial Sequence: Synthetic oligonucleotide
aggguauagccaaauguug

SEQ ID NO: 1565577 - RNA, 19 nt, Artificial Sequence
  Description of Artificial Sequence: Synthetic oligonucleotide
guaagguguguugacaaga

SEQ ID NO: 1565578 - RNA, 19 nt, Artificial Sequence
  Description of Artificial Sequence: Synthetic oligonucleotide
uaccccuuucaucaucuuc

SEQ ID NO: 1565579 - RNA, 19 nt, Artificial Sequence
  Description of Artificial Sequence: Synthetic oligonucleotide
uucuacuauggcugccagc

SEQ ID NO: 1565580 - RNA, 19 nt, Artificial Sequence
  Description of Artificial Sequence: Synthetic oligonucleotide
acauaugauagagacgauu

SEQ ID NO: 1565581 - RNA, 19 nt, Artificial Sequence
  Description of Artificial Sequence: Synthetic oligonucleotide
ugaugcuugcgauucucau

SEQ ID NO: 1565582 - RNA, 19 nt, Artificial Sequence
  Description of Artificial Sequence: Synthetic oligonucleotide
agggcgauuuucaaagcag

SEQ ID NO: 1565583 - RNA, 19 nt, Artificial Sequence
  Description of Artificial Sequence: Synthetic oligonucleotide
auggcauuaccccuuucau

SEQ ID NO: 1565584 - RNA, 19 nt, Artificial Sequence
  Description of Artificial Sequence: Synthetic oligonucleotide
acuaccagguuuaaagaau

SEQ ID NO: 1565585 - RNA, 19 nt, Artificial Sequence
  Description of Artificial Sequence: Synthetic oligonucleotide
auccacguaagguguguug

SEQ ID NO: 1565586 - RNA, 19 nt, Artificial Sequence
  Description of Artificial Sequence: Synthetic oligonucleotide
uggcauuaccccuuucauc

SEQ ID NO: 1565587 - RNA, 19 nt, Artificial Sequence
  Description of Artificial Sequence: Synthetic oligonucleotide
ggaccuguaccauuuagga

SEQ ID NO: 1565588 - RNA, 19 nt, Artificial Sequence
  Description of Artificial Sequence: Synthetic oligonucleotide
auuaccccuuucaucaucu

SEQ ID NO: 1565589 - RNA, 19 nt, Artificial Sequence
  Description of Artificial Sequence: Synthetic oligonucleotide
guggaccuguaccauuuag

SEQ ID NO: 1565590 - RNA, 19 nt, Artificial Sequence
  Description of Artificial Sequence: Synthetic oligonucleotide
uugcugaugcuugcgauuc

SEQ ID NO: 1565591 - RNA, 19 nt, Artificial Sequence
  Description of Artificial Sequence: Synthetic oligonucleotide
uaaugacgaauuccacuua

SEQ ID NO: 1565592 - RNA, 19 nt, Artificial Sequence
  Description of Artificial Sequence: Synthetic oligonucleotide
augggaaaucaauaaucuu

SEQ ID NO: 1565593 - RNA, 19 nt, Artificial Sequence
  Description of Artificial Sequence: Synthetic oligonucleotide
auaaucuuagggauucaau

SEQ ID NO: 1565594 - RNA, 19 nt, Artificial Sequence
  Description of Artificial Sequence: Synthetic oligonucleotide
gcuauugaggccaacggac

SEQ ID NO: 1565595 - RNA, 19 nt, Artificial Sequence
  Description of Artificial Sequence: Synthetic oligonucleotide
gcuugagauauccagguaa

SEQ ID NO: 1565596 - RNA, 19 nt, Artificial Sequence
  Description of Artificial Sequence: Synthetic oligonucleotide
cugguuugcaggguacccg

SEQ ID NO: 1565597 - RNA, 19 nt, Artificial Sequence
  Description of Artificial Sequence: Synthetic oligonucleotide
ugcauagccuagaccuucu

SEQ ID NO: 1565598 - RNA, 19 nt, Artificial Sequence
  Description of Artificial Sequence: Synthetic oligonucleotide
guugucagcauguccaagu

SEQ ID NO: 1565599 - RNA, 19 nt, Artificial Sequence
  Description of Artificial Sequence: Synthetic oligonucleotide
caggacauuucgguguuag

SEQ ID NO: 1565600 - RNA, 19 nt, Artificial Sequence
  Description of Artificial Sequence: Synthetic oligonucleotide
agucacucuucucaugauu

SEQ ID NO: 1565601 - RNA, 19 nt, Artificial Sequence
  Description of Artificial Sequence: Synthetic oligonucleotide
ucuuucuacuauggcugcc

SEQ ID NO: 1565602 - RNA, 19 nt, Artificial Sequence
  Description of Artificial Sequence: Synthetic oligonucleotide
auuugcccucuuuauccca

SEQ ID NO: 1565603 - RNA, 19 nt, Artificial Sequence
  Description of Artificial Sequence: Synthetic oligonucleotide
ucucuuggucagauggcau

SEQ ID NO: 1565604 - RNA, 19 nt, Artificial Sequence
  Description of Artificial Sequence: Synthetic oligonucleotide
agaaaccuuuucacccucg

SEQ ID NO: 1565605 - RNA, 19 nt, Artificial Sequence
  Description of Artificial Sequence: Synthetic oligonucleotide
agacagaaauccaccacca

SEQ ID NO: 1565606 - RNA, 19 nt, Artificial Sequence
  Description of Artificial Sequence: Synthetic oligonucleotide
aacggacugcauguuacau

SEQ ID NO: 1565607 - RNA, 19 nt, Artificial Sequence
  Description of Artificial Sequence: Synthetic oligonucleotide
cccaacuugguaaccauac

SEQ ID NO: 1565608 - RNA, 19 nt, Artificial Sequence
  Description of Artificial Sequence: Synthetic oligonucleotide
uugcgauucucaugacugu

SEQ ID NO: 1565609 - RNA, 19 nt, Artificial Sequence
  Description of Artificial Sequence: Synthetic oligonucleotide
aaucuuguugugacagaaa

SEQ ID NO: 1565610 - RNA, 19 nt, Artificial Sequence
  Description of Artificial Sequence: Synthetic oligonucleotide
gcgauuuucaaagcagugc

SEQ ID NO: 1565611 - RNA, 19 nt, Artificial Sequence
  Description of Artificial Sequence: Synthetic oligonucleotide
uuuucacccucguauucuu

SEQ ID NO: 1565612 - RNA, 19 nt, Artificial Sequence
  Description of Artificial Sequence: Synthetic oligonucleotide
uugcaggguacccgguucu

SEQ ID NO: 1565613 - RNA, 19 nt, Artificial Sequence
  Description of Artificial Sequence: Synthetic oligonucleotide
uaucaaauuccagggcgau

SEQ ID NO: 1565614 - RNA, 19 nt, Artificial Sequence
  Description of Artificial Sequence: Synthetic oligonucleotide
ggucacccacuguagacag

SEQ ID NO: 1565615 - RNA, 19 nt, Artificial Sequence
  Description of Artificial Sequence: Synthetic oligonucleotide
agagacgauuauuccucgu

SEQ ID NO: 1565616 - RNA, 19 nt, Artificial Sequence
  Description of Artificial Sequence: Synthetic oligonucleotide
ucuuggucagauggcauua

SEQ ID NO: 1565617 - RNA, 19 nt, Artificial Sequence
  Description of Artificial Sequence: Synthetic oligonucleotide
uacauaugauagagacgau

SEQ ID NO: 1565618 - RNA, 19 nt, Artificial Sequence
  Description of Artificial Sequence: Synthetic oligonucleotide
cuagaccuucugaccagac

SEQ ID NO: 1565619 - RNA, 19 nt, Artificial Sequence
  Description of Artificial Sequence: Synthetic oligonucleotide
cgaauuccacuuaaauggg

SEQ ID NO: 1565620 - RNA, 19 nt, Artificial Sequence
  Description of Artificial Sequence: Synthetic oligonucleotide
cuuucuacuauggcugcca

SEQ ID NO: 1565621 - RNA, 19 nt, Artificial Sequence
  Description of Artificial Sequence: Synthetic oligonucleotide
uacaacaccccaugccauu

SEQ ID NO: 1565622 - RNA, 19 nt, Artificial Sequence
  Description of Artificial Sequence: Synthetic oligonucleotide
guuauccacguaaggugug

SEQ ID NO: 1565623 - RNA, 19 nt, Artificial Sequence
  Description of Artificial Sequence: Synthetic oligonucleotide
uccgaucacuaugccgggg

SEQ ID NO: 1565624 - RNA, 19 nt, Artificial Sequence
  Description of Artificial Sequence: Synthetic oligonucleotide
ccaacggacugcauguuac

SEQ ID NO: 1565625 - RNA, 19 nt, Artificial Sequence
  Description of Artificial Sequence: Synthetic oligonucleotide
auuccagggcgauuuucaa

SEQ ID NO: 1565626 - RNA, 19 nt, Artificial Sequence
  Description of Artificial Sequence: Synthetic oligonucleotide
uuguugugacagaaaccuu

SEQ ID NO: 1565627 - RNA, 19 nt, Artificial Sequence
  Description of Artificial Sequence: Synthetic oligonucleotide
gcauguuacauaugauaga

SEQ ID NO: 1565628 - RNA, 19 nt, Artificial Sequence
  Description of Artificial Sequence: Synthetic oligonucleotide
acggacugcauguuacaua

SEQ ID NO: 1565629 - RNA, 19 nt, Artificial Sequence
  Description of Artificial Sequence: Synthetic oligonucleotide
caucguuucuggcuugaga

SEQ ID NO: 1565630 - RNA, 19 nt, Artificial Sequence
  Description of Artificial Sequence: Synthetic oligonucleotide
agauggcauuaccccuuuc

SEQ ID NO: 1565631 - RNA, 19 nt, Artificial Sequence
  Description of Artificial Sequence: Synthetic oligonucleotide
cagggcgauuuucaaagca

SEQ ID NO: 1565632 - RNA, 19 nt, Artificial Sequence
  Description of Artificial Sequence: Synthetic oligonucleotide
uguuucugguuugcagggu

SEQ ID NO: 1565633 - RNA, 19 nt, Artificial Sequence
  Description of Artificial Sequence: Synthetic oligonucleotide
cuccgaucacuaugccggg

SEQ ID NO: 1565634 - RNA, 19 nt, Artificial Sequence
  Description of Artificial Sequence: Synthetic oligonucleotide
gcaggguauagccaaaugu

SEQ ID NO: 1565635 - RNA, 19 nt, Artificial Sequence
  Description of Artificial Sequence: Synthetic oligonucleotide
ggguauagccaaauguuga

SEQ ID NO: 1565636 - RNA, 19 nt, Artificial Sequence
  Description of Artificial Sequence: Synthetic oligonucleotide
ugcgauucucaugacuguu

SEQ ID NO: 1565637 - RNA, 19 nt, Artificial Sequence
  Description of Artificial Sequence: Synthetic oligonucleotide
gucagauggcauuaccccu

SEQ ID NO: 1565638 - RNA, 19 nt, Artificial Sequence
  Description of Artificial Sequence: Synthetic oligonucleotide
uguccaagucauggaaaau

SEQ ID NO: 1565639 - RNA, 19 nt, Artificial Sequence
  Description of Artificial Sequence: Synthetic oligonucleotide
caacaccccaugccauugc

SEQ ID NO: 1565640 - RNA, 19 nt, Artificial Sequence
  Description of Artificial Sequence: Synthetic oligonucleotide
cuacuauggcugccagcag

SEQ ID NO: 1565641 - RNA, 19 nt, Artificial Sequence
  Description of Artificial Sequence: Synthetic oligonucleotide
cuguuguaaaucacuggcu

SEQ ID NO: 1565642 - RNA, 19 nt, Artificial Sequence
  Description of Artificial Sequence: Synthetic oligonucleotide
gggaaaucaauaaucuugu

SEQ ID NO: 1565643 - RNA, 19 nt, Artificial Sequence
  Description of Artificial Sequence: Synthetic oligonucleotide
agcccaacuugguaaccau

SEQ ID NO: 1565644 - RNA, 19 nt, Artificial Sequence
  Description of Artificial Sequence: Synthetic oligonucleotide
uguggaccuguaccauuua

SEQ ID NO: 1565645 - RNA, 19 nt, Artificial Sequence
  Description of Artificial Sequence: Synthetic oligonucleotide
cuugguaaccauacagcau

SEQ ID NO: 1565646 - RNA, 19 nt, Artificial Sequence
  Description of Artificial Sequence: Synthetic oligonucleotide
aggaaccguaaguuugcuu

SEQ ID NO: 1565647 - RNA, 19 nt, Artificial Sequence
  Description of Artificial Sequence: Synthetic oligonucleotide
uguugacaagacguuucuu

SEQ ID NO: 1565648 - RNA, 19 nt, Artificial Sequence
  Description of Artificial Sequence: Synthetic oligonucleotide
gguaaccauacagcauugc

SEQ ID NO: 1565649 - RNA, 19 nt, Artificial Sequence
  Description of Artificial Sequence: Synthetic oligonucleotide
ggcuuuugcugaugcuugc

SEQ ID NO: 1565650 - RNA, 19 nt, Artificial Sequence
  Description of Artificial Sequence: Synthetic oligonucleotide
uuucgguguuagggacugg

SEQ ID NO: 1565651 - RNA, 19 nt, Artificial Sequence
  Description of Artificial Sequence: Synthetic oligonucleotide
caguuuggccagagccacc

SEQ ID NO: 1565652 - RNA, 19 nt, Artificial Sequence
  Description of Artificial Sequence: Synthetic oligonucleotide
caggguacccgguucucca

SEQ ID NO: 1565653 - RNA, 19 nt, Artificial Sequence
  Description of Artificial Sequence: Synthetic oligonucleotide
cuuagggauucaauugaau

SEQ ID NO: 1565654 - RNA, 19 nt, Artificial Sequence
  Description of Artificial Sequence: Synthetic oligonucleotide
cacguaagguguguugaca

SEQ ID NO: 1565655 - RNA, 19 nt, Artificial Sequence
  Description of Artificial Sequence: Synthetic oligonucleotide
acugacuaccagguuuaaa

SEQ ID NO: 1565656 - RNA, 19 nt, Artificial Sequence
  Description of Artificial Sequence: Synthetic oligonucleotide
ccgacaccugacuucauuc

SEQ ID NO: 1565657 - RNA, 19 nt, Artificial Sequence
  Description of Artificial Sequence: Synthetic oligonucleotide
caacggacugcauguuaca

SEQ ID NO: 1565658 - RNA, 19 nt, Artificial Sequence
  Description of Artificial Sequence: Synthetic oligonucleotide
cuuuucacccucguauucu

SEQ ID NO: 1565659 - RNA, 19 nt, Artificial Sequence
  Description of Artificial Sequence: Synthetic oligonucleotide
gccauugcauauuugcccu

SEQ ID NO: 1565660 - RNA, 19 nt, Artificial Sequence
  Description of Artificial Sequence: Synthetic oligonucleotide
cuuuaggggagucacucuu

SEQ ID NO: 1565661 - RNA, 19 nt, Artificial Sequence
  Description of Artificial Sequence: Synthetic oligonucleotide
uauccacguaagguguguu

SEQ ID NO: 1565662 - RNA, 19 nt, Artificial Sequence
  Description of Artificial Sequence: Synthetic oligonucleotide
aacugacuaccagguuuaa

SEQ ID NO: 1565663 - RNA, 19 nt, Artificial Sequence
  Description of Artificial Sequence: Synthetic oligonucleotide
ccaucuacagaaacuccga

SEQ ID NO: 1565664 - RNA, 19 nt, Artificial Sequence
  Description of Artificial Sequence: Synthetic oligonucleotide
gugccgacaccugacuuca

SEQ ID NO: 1565665 - RNA, 19 nt, Artificial Sequence
  Description of Artificial Sequence: Synthetic oligonucleotide
gccuagaccuucugaccag

SEQ ID NO: 1565666 - RNA, 19 nt, Artificial Sequence
  Description of Artificial Sequence: Synthetic oligonucleotide
cccgguucuccacaucugc

SEQ ID NO: 1565667 - RNA, 19 nt, Artificial Sequence
  Description of Artificial Sequence: Synthetic oligonucleotide
aucaaauuccagggcgauu

SEQ ID NO: 1565668 - RNA, 19 nt, Artificial Sequence
  Description of Artificial Sequence: Synthetic oligonucleotide
ccuuguuauuuauggccuc

SEQ ID NO: 1565669 - RNA, 19 nt, Artificial Sequence
  Description of Artificial Sequence: Synthetic oligonucleotide
cguaagguguguugacaag

SEQ ID NO: 1565670 - RNA, 19 nt, Artificial Sequence
  Description of Artificial Sequence: Synthetic oligonucleotide
ugcuugcgauucucaugac

SEQ ID NO: 1565671 - RNA, 19 nt, Artificial Sequence
  Description of Artificial Sequence: Synthetic oligonucleotide
cauuucgguguuagggacu

SEQ ID NO: 1565672 - RNA, 19 nt, Artificial Sequence
  Description of Artificial Sequence: Synthetic oligonucleotide
guacaguugucagcauguc

SEQ ID NO: 1565673 - RNA, 19 nt, Artificial Sequence
  Description of Artificial Sequence: Synthetic oligonucleotide
agcccauuuauaggaguua

SEQ ID NO: 1565674 - RNA, 19 nt, Artificial Sequence
  Description of Artificial Sequence: Synthetic oligonucleotide
guaaaucacuggcucguuu

SEQ ID NO: 1565675 - RNA, 19 nt, Artificial Sequence
  Description of Artificial Sequence: Synthetic oligonucleotide
caccaucguuucuggcuug

SEQ ID NO: 1565676 - RNA, 19 nt, Artificial Sequence
  Description of Artificial Sequence: Synthetic oligonucleotide
accaucguuucuggcuuga

SEQ ID NO: 1565677 - RNA, 19 nt, Artificial Sequence
  Description of Artificial Sequence: Synthetic oligonucleotide
cccauuuauaggaguuauc

SEQ ID NO: 1565678 - RNA, 19 nt, Artificial Sequence
  Description of Artificial Sequence: Synthetic oligonucleotide
ggcuuugagugccgacacc

SEQ ID NO: 1565679 - RNA, 19 nt, Artificial Sequence
  Description of Artificial Sequence: Synthetic oligonucleotide
uuaccccuuucaucaucuu

SEQ ID NO: 1565680 - RNA, 19 nt, Artificial Sequence
  Description of Artificial Sequence: Synthetic oligonucleotide
cauuuaggacaggucagcu

SEQ ID NO: 1565681 - RNA, 19 nt, Artificial Sequence
  Description of Artificial Sequence: Synthetic oligonucleotide
auaauucgccuuggucaaa

SEQ ID NO: 1565682 - RNA, 19 nt, Artificial Sequence
  Description of Artificial Sequence: Synthetic oligonucleotide
cggcuuuugcuuuagggga

SEQ ID NO: 1565683 - RNA, 19 nt, Artificial Sequence
  Description of Artificial Sequence: Synthetic oligonucleotide
ccacguaagguguguugac

SEQ ID NO: 1565684 - RNA, 19 nt, Artificial Sequence
  Description of Artificial Sequence: Synthetic oligonucleotide
caucuacagaaacuccgau

SEQ ID NO: 1565685 - RNA, 19 nt, Artificial Sequence
  Description of Artificial Sequence: Synthetic oligonucleotide
cuacaacaccccaugccau

SEQ ID NO: 1565686 - RNA, 19 nt, Artificial Sequence
  Description of Artificial Sequence: Synthetic oligonucleotide
ugaggccaacggacugcau

SEQ ID NO: 1565687 - RNA, 19 nt, Artificial Sequence
  Description of Artificial Sequence: Synthetic oligonucleotide
gcuugcgauucucaugacu

SEQ ID NO: 1565688 - RNA, 19 nt, Artificial Sequence
  Description of Artificial Sequence: Synthetic oligonucleotide
cuguggaccuguaccauuu

SEQ ID NO: 1565689 - RNA, 19 nt, Artificial Sequence
  Description of Artificial Sequence: Synthetic oligonucleotide
caccugacuucauucuccu

SEQ ID NO: 1565690 - RNA, 19 nt, Artificial Sequence
  Description of Artificial Sequence: Synthetic oligonucleotide
gugaggcauagugccucug

SEQ ID NO: 1565691 - RNA, 19 nt, Artificial Sequence
  Description of Artificial Sequence: Synthetic oligonucleotide
gcucggcuuuugcuuuagg

SEQ ID NO: 1565692 - RNA, 19 nt, Artificial Sequence
  Description of Artificial Sequence: Synthetic oligonucleotide
cuguaccauuuaggacagg

SEQ ID NO: 1565693 - RNA, 19 nt, Artificial Sequence
  Description of Artificial Sequence: Synthetic oligonucleotide
cagcccauuuauaggaguu

SEQ ID NO: 1565694 - RNA, 19 nt, Artificial Sequence
  Description of Artificial Sequence: Synthetic oligonucleotide
guuugcaggguacccgguu

SEQ ID NO: 1565695 - RNA, 19 nt, Artificial Sequence
  Description of Artificial Sequence: Synthetic oligonucleotide
guacccgguucuccacauc

SEQ ID NO: 1565696 - RNA, 19 nt, Artificial Sequence
  Description of Artificial Sequence: Synthetic oligonucleotide
ccaacuugguaaccauaca

SEQ ID NO: 1565697 - RNA, 19 nt, Artificial Sequence
  Description of Artificial Sequence: Synthetic oligonucleotide
acaccccaugccauugcau

SEQ ID NO: 1565698 - RNA, 19 nt, Artificial Sequence
  Description of Artificial Sequence: Synthetic oligonucleotide
gagugccgacaccugacuu

SEQ ID NO: 1565699 - RNA, 19 nt, Artificial Sequence
  Description of Artificial Sequence: Synthetic oligonucleotide
ccauugcauauuugcccuc

SEQ ID NO: 1565700 - RNA, 19 nt, Artificial Sequence
  Description of Artificial Sequence: Synthetic oligonucleotide
ggguacccgguucuccaca

SEQ ID NO: 1565701 - RNA, 19 nt, Artificial Sequence
  Description of Artificial Sequence: Synthetic oligonucleotide
guguguugacaagacguuu

SEQ ID NO: 1565702 - RNA, 19 nt, Artificial Sequence
  Description of Artificial Sequence: Synthetic oligonucleotide
cagaaacuccgaucacuau

SEQ ID NO: 1565703 - RNA, 19 nt, Artificial Sequence
  Description of Artificial Sequence: Synthetic oligonucleotide
ccaugguaaggcuuuugcu

SEQ ID NO: 1565704 - RNA, 19 nt, Artificial Sequence
  Description of Artificial Sequence: Synthetic oligonucleotide
ggcuugagauauccaggua

SEQ ID NO: 1565705 - RNA, 19 nt, Artificial Sequence
  Description of Artificial Sequence: Synthetic oligonucleotide
cggacugcauguuacauau

SEQ ID NO: 1565706 - RNA, 19 nt, Artificial Sequence
  Description of Artificial Sequence: Synthetic oligonucleotide
gggcgauuuucaaagcagu

SEQ ID NO: 1565707 - RNA, 19 nt, Artificial Sequence
  Description of Artificial Sequence: Synthetic oligonucleotide
gccaacggacugcauguua

SEQ ID NO: 1565708 - RNA, 19 nt, Artificial Sequence
  Description of Artificial Sequence: Synthetic oligonucleotide
ugccgacaccugacuucau

SEQ ID NO: 1565709 - RNA, 19 nt, Artificial Sequence
  Description of Artificial Sequence: Synthetic oligonucleotide
gguguguugacaagacguu

SEQ ID NO: 1565710 - RNA, 19 nt, Artificial Sequence
  Description of Artificial Sequence: Synthetic oligonucleotide
ggacugcauguuacauaug

SEQ ID NO: 1565711 - RNA, 19 nt, Artificial Sequence
  Description of Artificial Sequence: Synthetic oligonucleotide
gcccauuuauaggaguuau

SEQ ID NO: 1565712 - RNA, 19 nt, Artificial Sequence
  Description of Artificial Sequence: Synthetic oligonucleotide
gguacccgguucuccacau

SEQ ID NO: 1565713 - RNA, 19 nt, Artificial Sequence
  Description of Artificial Sequence: Synthetic oligonucleotide
ccaucguuucuggcuugag

SEQ ID NO: 1565714 - RNA, 19 nt, Artificial Sequence
  Description of Artificial Sequence: Synthetic oligonucleotide
ccuagaccuucugaccaga

SEQ ID NO: 1565715 - RNA, 19 nt, Artificial Sequence
  Description of Artificial Sequence: Synthetic oligonucleotide
caggaaccguaaguuugcu

SEQ ID NO: 1565716 - RNA, 19 nt, Artificial Sequence
  Description of Artificial Sequence: Synthetic oligonucleotide
cagauggcauuaccccuuu

SEQ ID NO: 1565717 - RNA, 19 nt, Artificial Sequence
  Description of Artificial Sequence: Synthetic oligonucleotide
ccagcaggguauagccaaa

SEQ ID NO: 1565718 - RNA, 19 nt, Artificial Sequence
  Description of Artificial Sequence: Synthetic oligonucleotide
gcccaacuugguaaccaua

SEQ ID NO: 1565719 - RNA, 19 nt, Artificial Sequence
  Description of Artificial Sequence: Synthetic oligonucleotide
gccgacaccugacuucauu

SEQ ID NO: 1565720 - RNA, 19 nt, Artificial Sequence
  Description of Artificial Sequence: Synthetic oligonucleotide
gcgauucucaugacuguuu

SEQ ID NO: 1565721 - RNA, 19 nt, Artificial Sequence
  Description of Artificial Sequence: Synthetic oligonucleotide
gcauuaccccuuucaucau

SEQ ID NO: 1565722 - RNA, 19 nt, Artificial Sequence
  Description of Artificial Sequence: Synthetic oligonucleotide
gguuugcaggguacccggu

SEQ ID NO: 1565723 - RNA, 19 nt, Artificial Sequence
  Description of Artificial Sequence: Synthetic oligonucleotide
ccaccaccagcccauuuau

SEQ ID NO: 1565724 - RNA, 19 nt, Artificial Sequence
  Description of Artificial Sequence: Synthetic oligonucleotide
ccccaugccauugcauauu

SEQ ID NO: 1565725 - RNA, 19 nt, Artificial Sequence
  Description of Artificial Sequence: Synthetic oligonucleotide
ccaggacauuucgguguua

SEQ ID NO: 1565726 - RNA, 19 nt, Artificial Sequence
  Description of Artificial Sequence: Synthetic oligonucleotide
ccaccaugguaaggcuuuu

SEQ ID NO: 1565727 - RNA, 19 nt, Artificial Sequence
  Description of Artificial Sequence: Synthetic oligonucleotide
augaguacaacauacaaag

SEQ ID NO: 1565728 - RNA, 19 nt, Artificial Sequence
  Description of Artificial Sequence: Synthetic oligonucleotide
uaaugguuaaauaaggcac

SEQ ID NO: 1565729 - RNA, 19 nt, Artificial Sequence
  Description of Artificial Sequence: Synthetic oligonucleotide
uuauaugaguacaacauac

SEQ ID NO: 1565730 - RNA, 19 nt, Artificial Sequence
  Description of Artificial Sequence: Synthetic oligonucleotide
uuaaugguuaaauaaggca

SEQ ID NO: 1565731 - RNA, 19 nt, Artificial Sequence
  Description of Artificial Sequence: Synthetic oligonucleotide
agaacauauaaucaaugag

SEQ ID NO: 1565732 - RNA, 19 nt, Artificial Sequence
  Description of Artificial Sequence: Synthetic oligonucleotide
cacacuucgagauucaucc

SEQ ID NO: 1565733 - RNA, 19 nt, Artificial Sequence
  Description of Artificial Sequence: Synthetic oligonucleotide
aguugcaaaguuuauauga

SEQ ID NO: 1565734 - RNA, 19 nt, Artificial Sequence
  Description of Artificial Sequence: Synthetic oligonucleotide
cuuaggaaggaaaggaugc

SEQ ID NO: 1565735 - RNA, 19 nt, Artificial Sequence
  Description of Artificial Sequence: Synthetic oligonucleotide
aacauauaaucaaugagga

SEQ ID NO: 1565736 - RNA, 19 nt, Artificial Sequence
  Description of Artificial Sequence: Synthetic oligonucleotide
ucauccuuaguuuucaccu

SEQ ID NO: 1565737 - RNA, 19 nt, Artificial Sequence
  Description of Artificial Sequence: Synthetic oligonucleotide
gacacaaagacggacaggc

SEQ ID NO: 1565738 - RNA, 19 nt, Artificial Sequence
  Description of Artificial Sequence: Synthetic oligonucleotide
aaguuuauaugaguacaac

SEQ ID NO: 1565739 - RNA, 19 nt, Artificial Sequence
  Description of Artificial Sequence: Synthetic oligonucleotide
gaguuaaugguuaaauaag

SEQ ID NO: 1565740 - RNA, 19 nt, Artificial Sequence
  Description of Artificial Sequence: Synthetic oligonucleotide
aguuaaugguuaaauaagg

SEQ ID NO: 1565741 - RNA, 19 nt, Artificial Sequence
  Description of Artificial Sequence: Synthetic oligonucleotide
uaugaguacaacauacaaa

SEQ ID NO: 1565742 - RNA, 19 nt, Artificial Sequence
  Description of Artificial Sequence: Synthetic oligonucleotide
aguucauaccuauuacagg

SEQ ID NO: 1565743 - RNA, 19 nt, Artificial Sequence
  Description of Artificial Sequence: Synthetic oligonucleotide
ugcaaaguuuauaugagua

SEQ ID NO: 1565744 - RNA, 19 nt, Artificial Sequence
  Description of Artificial Sequence: Synthetic oligonucleotide
aacguuuccacucguucag

SEQ ID NO: 1565745 - RNA, 19 nt, Artificial Sequence
  Description of Artificial Sequence: Synthetic oligonucleotide
uucuaacuggugauggccg

SEQ ID NO: 1565746 - RNA, 19 nt, Artificial Sequence
  Description of Artificial Sequence: Synthetic oligonucleotide
ucgaagaacauauaaucaa

SEQ ID NO: 1565747 - RNA, 19 nt, Artificial Sequence
  Description of Artificial Sequence: Synthetic oligonucleotide
gaaagcugcagaaagcacc

SEQ ID NO: 1565748 - RNA, 19 nt, Artificial Sequence
  Description of Artificial Sequence: Synthetic oligonucleotide
uuuauaugaguacaacaua

SEQ ID NO: 1565749 - RNA, 19 nt, Artificial Sequence
  Description of Artificial Sequence: Synthetic oligonucleotide
gauaaguagccugccaugg

SEQ ID NO: 1565750 - RNA, 19 nt, Artificial Sequence
  Description of Artificial Sequence: Synthetic oligonucleotide
caguguauaccaaggaagg

SEQ ID NO: 1565751 - RNA, 19 nt, Artificial Sequence
  Description of Artificial Sequence: Synthetic oligonucleotide
gaacuguaggccaaagucg

SEQ ID NO: 1565752 - RNA, 19 nt, Artificial Sequence
  Description of Artificial Sequence: Synthetic oligonucleotide
ugguaucuguaccacagcc

SEQ ID NO: 1565753 - RNA, 19 nt, Artificial Sequence
  Description of Artificial Sequence: Synthetic oligonucleotide
ucguucagccuucugauga

SEQ ID NO: 1565754 - RNA, 19 nt, Artificial Sequence
  Description of Artificial Sequence: Synthetic oligonucleotide
agaacggagcaggagaccc

SEQ ID NO: 1565755 - RNA, 19 nt, Artificial Sequence
  Description of Artificial Sequence: Synthetic oligonucleotide
ucauaccuauuacaggucu

SEQ ID NO: 1565756 - RNA, 19 nt, Artificial Sequence
  Description of Artificial Sequence: Synthetic oligonucleotide
aaugguuaaauaaggcaca

SEQ ID NO: 1565757 - RNA, 19 nt, Artificial Sequence
  Description of Artificial Sequence: Synthetic oligonucleotide
aaagucgucagcaucugug

SEQ ID NO: 1565758 - RNA, 19 nt, Artificial Sequence
  Description of Artificial Sequence: Synthetic oligonucleotide
gaaguucauaccuauuaca

SEQ ID NO: 1565759 - RNA, 19 nt, Artificial Sequence
  Description of Artificial Sequence: Synthetic oligonucleotide
guuaaugguuaaauaaggc

SEQ ID NO: 1565760 - RNA, 19 nt, Artificial Sequence
  Description of Artificial Sequence: Synthetic oligonucleotide
uggaggauaaguagccugc

SEQ ID NO: 1565761 - RNA, 19 nt, Artificial Sequence
  Description of Artificial Sequence: Synthetic oligonucleotide
uaguuuucaccucaaaguu

SEQ ID NO: 1565762 - RNA, 19 nt, Artificial Sequence
  Description of Artificial Sequence: Synthetic oligonucleotide
ucacgucuaggucuauugg

SEQ ID NO: 1565763 - RNA, 19 nt, Artificial Sequence
  Description of Artificial Sequence: Synthetic oligonucleotide
aaucaagaucugaucaauc

SEQ ID NO: 1565764 - RNA, 19 nt, Artificial Sequence
  Description of Artificial Sequence: Synthetic oligonucleotide
uaggcggacacgaaguggc

SEQ ID NO: 1565765 - RNA, 19 nt, Artificial Sequence
  Description of Artificial Sequence: Synthetic oligonucleotide
aggggcauagccuuuggag

SEQ ID NO: 1565766 - RNA, 19 nt, Artificial Sequence
  Description of Artificial Sequence: Synthetic oligonucleotide
uuggaggauaaguagccug

SEQ ID NO: 1565767 - RNA, 19 nt, Artificial Sequence
  Description of Artificial Sequence: Synthetic oligonucleotide
agacgggcacaacaguugc

SEQ ID NO: 1565768 - RNA, 19 nt, Artificial Sequence
  Description of Artificial Sequence: Synthetic oligonucleotide
gaucugaucaaucugcacu

SEQ ID NO: 1565769 - RNA, 19 nt, Artificial Sequence
  Description of Artificial Sequence: Synthetic oligonucleotide
uucacucucacgucuaggu

SEQ ID NO: 1565770 - RNA, 19 nt, Artificial Sequence
  Description of Artificial Sequence: Synthetic oligonucleotide
ugaccaucucgaauucugg

SEQ ID NO: 1565771 - RNA, 19 nt, Artificial Sequence
  Description of Artificial Sequence: Synthetic oligonucleotide
ggaguuaaugguuaaauaa

SEQ ID NO: 1565772 - RNA, 19 nt, Artificial Sequence
  Description of Artificial Sequence: Synthetic oligonucleotide
aaggaguuaaugguuaaau

SEQ ID NO: 1565773 - RNA, 19 nt, Artificial Sequence
  Description of Artificial Sequence: Synthetic oligonucleotide
guaucuguaccacagccac

SEQ ID NO: 1565774 - RNA, 19 nt, Artificial Sequence
  Description of Artificial Sequence: Synthetic oligonucleotide
cacgucuaggucuauuggg

SEQ ID NO: 1565775 - RNA, 19 nt, Artificial Sequence
  Description of Artificial Sequence: Synthetic oligonucleotide
auacccagcugucacgggg

SEQ ID NO: 1565776 - RNA, 19 nt, Artificial Sequence
  Description of Artificial Sequence: Synthetic oligonucleotide
uaaguagccugccauggaa

SEQ ID NO: 1565777 - RNA, 19 nt, Artificial Sequence
  Description of Artificial Sequence: Synthetic oligonucleotide
aaaguuuauaugaguacaa

SEQ ID NO: 1565778 - RNA, 19 nt, Artificial Sequence
  Description of Artificial Sequence: Synthetic oligonucleotide
gcucggaacagccagacag

SEQ ID NO: 1565779 - RNA, 19 nt, Artificial Sequence
  Description of Artificial Sequence: Synthetic oligonucleotide
agucuggcgaucagcaucc

SEQ ID NO: 1565780 - RNA, 19 nt, Artificial Sequence
  Description of Artificial Sequence: Synthetic oligonucleotide
cuaggaacguuuccacucg

SEQ ID NO: 1565781 - RNA, 19 nt, Artificial Sequence
  Description of Artificial Sequence: Synthetic oligonucleotide
aagaacggagcaggagacc

SEQ ID NO: 1565782 - RNA, 19 nt, Artificial Sequence
  Description of Artificial Sequence: Synthetic oligonucleotide
aaagcugcagaaagcacca

SEQ ID NO: 1565783 - RNA, 19 nt, Artificial Sequence
  Description of Artificial Sequence: Synthetic oligonucleotide
aacuguaggccaaagucgu

SEQ ID NO: 1565784 - RNA, 19 nt, Artificial Sequence
  Description of Artificial Sequence: Synthetic oligonucleotide
aaugaggaacguggcuccc

SEQ ID NO: 1565785 - RNA, 19 nt, Artificial Sequence
  Description of Artificial Sequence: Synthetic oligonucleotide
cuauugggaacuguaggcc

SEQ ID NO: 1565786 - RNA, 19 nt, Artificial Sequence
  Description of Artificial Sequence: Synthetic oligonucleotide
caaugaggaacguggcucc

SEQ ID NO: 1565787 - RNA, 19 nt, Artificial Sequence
  Description of Artificial Sequence: Synthetic oligonucleotide
ucgaauucugguugaggug

SEQ ID NO: 1565788 - RNA, 19 nt, Artificial Sequence
  Description of Artificial Sequence: Synthetic oligonucleotide
aguguauaccaaggaaggg

SEQ ID NO: 1565789 - RNA, 19 nt, Artificial Sequence
  Description of Artificial Sequence: Synthetic oligonucleotide
gaacguuuccacucguuca

SEQ ID NO: 1565790 - RNA, 19 nt, Artificial Sequence
  Description of Artificial Sequence: Synthetic oligonucleotide
agacaagcucggaacagcc

SEQ ID NO: 1565791 - RNA, 19 nt, Artificial Sequence
  Description of Artificial Sequence: Synthetic oligonucleotide
uggagacaagcucggaaca

SEQ ID NO: 1565792 - RNA, 19 nt, Artificial Sequence
  Description of Artificial Sequence: Synthetic oligonucleotide
ugaggaacguggcucccag

SEQ ID NO: 1565793 - RNA, 19 nt, Artificial Sequence
  Description of Artificial Sequence: Synthetic oligonucleotide
uggcgaggggaagagagcg

SEQ ID NO: 1565794 - RNA, 19 nt, Artificial Sequence
  Description of Artificial Sequence: Synthetic oligonucleotide
uggauacccagcugucacg

SEQ ID NO: 1565795 - RNA, 19 nt, Artificial Sequence
  Description of Artificial Sequence: Synthetic oligonucleotide
guuuauaugaguacaacau

SEQ ID NO: 1565796 - RNA, 19 nt, Artificial Sequence
  Description of Artificial Sequence: Synthetic oligonucleotide
cugaucaaucugcacuagg

SEQ ID NO: 1565797 - RNA, 19 nt, Artificial Sequence
  Description of Artificial Sequence: Synthetic oligonucleotide
guggagacaagcucggaac

SEQ ID NO: 1565798 - RNA, 19 nt, Artificial Sequence
  Description of Artificial Sequence: Synthetic oligonucleotide
auacaaagacacagccucc

SEQ ID NO: 1565799 - RNA, 19 nt, Artificial Sequence
  Description of Artificial Sequence: Synthetic oligonucleotide
aggaacguggcucccagca

SEQ ID NO: 1565800 - RNA, 19 nt, Artificial Sequence
  Description of Artificial Sequence: Synthetic oligonucleotide
agagagcgaagccgggcgc

SEQ ID NO: 1565801 - RNA, 19 nt, Artificial Sequence
  Description of Artificial Sequence: Synthetic oligonucleotide
aaagacggacaggcaaagg

SEQ ID NO: 1565802 - RNA, 19 nt, Artificial Sequence
  Description of Artificial Sequence: Synthetic oligonucleotide
ucucgaauucugguugagg

SEQ ID NO: 1565803 - RNA, 19 nt, Artificial Sequence
  Description of Artificial Sequence: Synthetic oligonucleotide
gacggacaggcaaaggcgg

SEQ ID NO: 1565804 - RNA, 19 nt, Artificial Sequence
  Description of Artificial Sequence: Synthetic oligonucleotide
agacggacaggcaaaggcg

SEQ ID NO: 1565805 - RNA, 19 nt, Artificial Sequence
  Description of Artificial Sequence: Synthetic oligonucleotide
uucauaccuauuacagguc

SEQ ID NO: 1565806 - RNA, 19 nt, Artificial Sequence
  Description of Artificial Sequence: Synthetic oligonucleotide
cacaacucgaaggacaguc

SEQ ID NO: 1565807 - RNA, 19 nt, Artificial Sequence
  Description of Artificial Sequence: Synthetic oligonucleotide
ucacgggguauggaggugg

SEQ ID NO: 1565808 - RNA, 19 nt, Artificial Sequence
  Description of Artificial Sequence: Synthetic oligonucleotide
aguggagacaagcucggaa

SEQ ID NO: 1565809 - RNA, 19 nt, Artificial Sequence
  Description of Artificial Sequence: Synthetic oligonucleotide
augguuaaauaaggcacag

SEQ ID NO: 1565810 - RNA, 19 nt, Artificial Sequence
  Description of Artificial Sequence: Synthetic oligonucleotide
aaucugcacuaggaacucg

SEQ ID NO: 1565811 - RNA, 19 nt, Artificial Sequence
  Description of Artificial Sequence: Synthetic oligonucleotide
cugucacgggguauggagg

SEQ ID NO: 1565812 - RNA, 19 nt, Artificial Sequence
  Description of Artificial Sequence: Synthetic oligonucleotide
aggaguuaaugguuaaaua

SEQ ID NO: 1565813 - RNA, 19 nt, Artificial Sequence
  Description of Artificial Sequence: Synthetic oligonucleotide
ugucacgggguauggaggu

SEQ ID NO: 1565814 - RNA, 19 nt, Artificial Sequence
  Description of Artificial Sequence: Synthetic oligonucleotide
aggaacucgaggccagaag

SEQ ID NO: 1565815 - RNA, 19 nt, Artificial Sequence
  Description of Artificial Sequence: Synthetic oligonucleotide
cuggauacccagcugucac

SEQ ID NO: 1565816 - RNA, 19 nt, Artificial Sequence
  Description of Artificial Sequence: Synthetic oligonucleotide
accuauuacaggucuccca

SEQ ID NO: 1565817 - RNA, 19 nt, Artificial Sequence
  Description of Artificial Sequence: Synthetic oligonucleotide
cuauuacaggucucccagc

SEQ ID NO: 1565818 - RNA, 19 nt, Artificial Sequence
  Description of Artificial Sequence: Synthetic oligonucleotide
uauaaucaaugaggaacgu

SEQ ID NO: 1565819 - RNA, 19 nt, Artificial Sequence
  Description of Artificial Sequence: Synthetic oligonucleotide
aacucgaggccagaaggca

SEQ ID NO: 1565820 - RNA, 19 nt, Artificial Sequence
  Description of Artificial Sequence: Synthetic oligonucleotide
caacucgaaggacagucug

SEQ ID NO: 1565821 - RNA, 19 nt, Artificial Sequence
  Description of Artificial Sequence: Synthetic oligonucleotide
gagacaagcucggaacagc

SEQ ID NO: 1565822 - RNA, 19 nt, Artificial Sequence
  Description of Artificial Sequence: Synthetic oligonucleotide
cucgaggccagaaggcacc

SEQ ID NO: 1565823 - RNA, 19 nt, Artificial Sequence
  Description of Artificial Sequence: Synthetic oligonucleotide
gugaccaucucgaauucug

SEQ ID NO: 1565824 - RNA, 19 nt, Artificial Sequence
  Description of Artificial Sequence: Synthetic oligonucleotide
cuucucgcagcaacccucc

SEQ ID NO: 1565825 - RNA, 19 nt, Artificial Sequence
  Description of Artificial Sequence: Synthetic oligonucleotide
gaacucgaggccagaaggc

SEQ ID NO: 1565826 - RNA, 19 nt, Artificial Sequence
  Description of Artificial Sequence: Synthetic oligonucleotide
cuuaguucuggaguggaga

SEQ ID NO: 1565827 - RNA, 19 nt, Artificial Sequence
  Description of Artificial Sequence: Synthetic oligonucleotide
cauaccuauuacaggucuc

SEQ ID NO: 1565828 - RNA, 19 nt, Artificial Sequence
  Description of Artificial Sequence: Synthetic oligonucleotide
gccuuuggaggauaaguag

SEQ ID NO: 1565829 - RNA, 19 nt, Artificial Sequence
  Description of Artificial Sequence: Synthetic oligonucleotide
gaagagagcgaagccgggc

SEQ ID NO: 1565830 - RNA, 19 nt, Artificial Sequence
  Description of Artificial Sequence: Synthetic oligonucleotide
gcugucacgggguauggag

SEQ ID NO: 1565831 - RNA, 19 nt, Artificial Sequence
  Description of Artificial Sequence: Synthetic oligonucleotide
aacggagcaggagacccug

SEQ ID NO: 1565832 - RNA, 19 nt, Artificial Sequence
  Description of Artificial Sequence: Synthetic oligonucleotide
accaucucgaauucugguu

SEQ ID NO: 1565833 - RNA, 19 nt, Artificial Sequence
  Description of Artificial Sequence: Synthetic oligonucleotide
uuuggaggauaaguagccu

SEQ ID NO: 1565834 - RNA, 19 nt, Artificial Sequence
  Description of Artificial Sequence: Synthetic oligonucleotide
cagacgggcacaacaguug

SEQ ID NO: 1565835 - RNA, 19 nt, Artificial Sequence
  Description of Artificial Sequence: Synthetic oligonucleotide
uaucuguaccacagccaca

SEQ ID NO: 1565836 - RNA, 19 nt, Artificial Sequence
  Description of Artificial Sequence: Synthetic oligonucleotide
auuacaggucucccagccu

SEQ ID NO: 1565837 - RNA, 19 nt, Artificial Sequence
  Description of Artificial Sequence: Synthetic oligonucleotide
cucgaauucugguugaggu

SEQ ID NO: 1565838 - RNA, 19 nt, Artificial Sequence
  Description of Artificial Sequence: Synthetic oligonucleotide
aaggacagucuggcgauca

SEQ ID NO: 1565839 - RNA, 19 nt, Artificial Sequence
  Description of Artificial Sequence: Synthetic oligonucleotide
acacgaaguggccggcggg

SEQ ID NO: 1565840 - RNA, 19 nt, Artificial Sequence
  Description of Artificial Sequence: Synthetic oligonucleotide
ggauaaguagccugccaug

SEQ ID NO: 1565841 - RNA, 19 nt, Artificial Sequence
  Description of Artificial Sequence: Synthetic oligonucleotide
ucuggcgaucagcauccug

SEQ ID NO: 1565842 - RNA, 19 nt, Artificial Sequence
  Description of Artificial Sequence: Synthetic oligonucleotide
aaccacucagccacccauc

SEQ ID NO: 1565843 - RNA, 19 nt, Artificial Sequence
  Description of Artificial Sequence: Synthetic oligonucleotide
cacucguucagccuucuga

SEQ ID NO: 1565844 - RNA, 19 nt, Artificial Sequence
  Description of Artificial Sequence: Synthetic oligonucleotide
gaggauaaguagccugcca

SEQ ID NO: 1565845 - RNA, 19 nt, Artificial Sequence
  Description of Artificial Sequence: Synthetic oligonucleotide
cuugggaugucggcguccg

SEQ ID NO: 1565846 - RNA, 19 nt, Artificial Sequence
  Description of Artificial Sequence: Synthetic oligonucleotide
uccggucccggaacgaagu

SEQ ID NO: 1565847 - RNA, 19 nt, Artificial Sequence
  Description of Artificial Sequence: Synthetic oligonucleotide
ggcuucuaacuggugaugg

SEQ ID NO: 1565848 - RNA, 19 nt, Artificial Sequence
  Description of Artificial Sequence: Synthetic oligonucleotide
cauccuuaguuuucaccuc

SEQ ID NO: 1565849 - RNA, 19 nt, Artificial Sequence
  Description of Artificial Sequence: Synthetic oligonucleotide
ccuaggaacguuuccacuc

SEQ ID NO: 1565850 - RNA, 19 nt, Artificial Sequence
  Description of Artificial Sequence: Synthetic oligonucleotide
ugguuaaauaaggcacaga

SEQ ID NO: 1565851 - RNA, 19 nt, Artificial Sequence
  Description of Artificial Sequence: Synthetic oligonucleotide
acucgaggccagaaggcac

SEQ ID NO: 1565852 - RNA, 19 nt, Artificial Sequence
  Description of Artificial Sequence: Synthetic oligonucleotide
uaccuauuacaggucuccc

SEQ ID NO: 1565853 - RNA, 19 nt, Artificial Sequence
  Description of Artificial Sequence: Synthetic oligonucleotide
acagugaagugggcggagg

SEQ ID NO: 1565854 - RNA, 19 nt, Artificial Sequence
  Description of Artificial Sequence: Synthetic oligonucleotide
ggauacccagcugucacgg

SEQ ID NO: 1565855 - RNA, 19 nt, Artificial Sequence
  Description of Artificial Sequence: Synthetic oligonucleotide
ggaacguuuccacucguuc

SEQ ID NO: 1565856 - RNA, 19 nt, Artificial Sequence
  Description of Artificial Sequence: Synthetic oligonucleotide
ccuggcgaggggaagagag

SEQ ID NO: 1565857 - RNA, 19 nt, Artificial Sequence
  Description of Artificial Sequence: Synthetic oligonucleotide
cuucacucucacgucuagg

SEQ ID NO: 1565858 - RNA, 19 nt, Artificial Sequence
  Description of Artificial Sequence: Synthetic oligonucleotide
uaggggcauagccuuugga

SEQ ID NO: 1565859 - RNA, 19 nt, Artificial Sequence
  Description of Artificial Sequence: Synthetic oligonucleotide
ugccaagucugcagcacau

SEQ ID NO: 1565860 - RNA, 19 nt, Artificial Sequence
  Description of Artificial Sequence: Synthetic oligonucleotide
gggguuaggaggaggagag

SEQ ID NO: 1565861 - RNA, 19 nt, Artificial Sequence
  Description of Artificial Sequence: Synthetic oligonucleotide
acgucuaggucuauuggga

SEQ ID NO: 1565862 - RNA, 19 nt, Artificial Sequence
  Description of Artificial Sequence: Synthetic oligonucleotide
acuaggaacucgaggccag

SEQ ID NO: 1565863 - RNA, 19 nt, Artificial Sequence
  Description of Artificial Sequence: Synthetic oligonucleotide
guaggggcauagccuuugg

SEQ ID NO: 1565864 - RNA, 19 nt, Artificial Sequence
  Description of Artificial Sequence: Synthetic oligonucleotide
acguuuccacucguucagc

SEQ ID NO: 1565865 - RNA, 19 nt, Artificial Sequence
  Description of Artificial Sequence: Synthetic oligonucleotide
gaacgaaguucauaccuau

SEQ ID NO: 1565866 - RNA, 19 nt, Artificial Sequence
  Description of Artificial Sequence: Synthetic oligonucleotide
cuccucaugcugagguggc

SEQ ID NO: 1565867 - RNA, 19 nt, Artificial Sequence
  Description of Artificial Sequence: Synthetic oligonucleotide
cucgcagcaacccucccca

SEQ ID NO: 1565868 - RNA, 19 nt, Artificial Sequence
  Description of Artificial Sequence: Synthetic oligonucleotide
ggggcguaggggcauagcc

SEQ ID NO: 1565869 - RNA, 19 nt, Artificial Sequence
  Description of Artificial Sequence: Synthetic oligonucleotide
acaauggcucccaaccacu

SEQ ID NO: 1565870 - RNA, 19 nt, Artificial Sequence
  Description of Artificial Sequence: Synthetic oligonucleotide
ugcuugcugaugcggccca

SEQ ID NO: 1565871 - RNA, 19 nt, Artificial Sequence
  Description of Artificial Sequence: Synthetic oligonucleotide
aggacagucuggcgaucag

SEQ ID NO: 1565872 - RNA, 19 nt, Artificial Sequence
  Description of Artificial Sequence: Synthetic oligonucleotide
ugcuguccggucccggaac

SEQ ID NO: 1565873 - RNA, 19 nt, Artificial Sequence
  Description of Artificial Sequence: Synthetic oligonucleotide
uggcgaucagcauccugga

SEQ ID NO: 1565874 - RNA, 19 nt, Artificial Sequence
  Description of Artificial Sequence: Synthetic oligonucleotide
cuagcgcgggcccaggguc

SEQ ID NO: 1565875 - RNA, 19 nt, Artificial Sequence
  Description of Artificial Sequence: Synthetic oligonucleotide
ucuugggaugucggcgucc

SEQ ID NO: 1565876 - RNA, 19 nt, Artificial Sequence
  Description of Artificial Sequence: Synthetic oligonucleotide
acccaguugcuguccgguc

SEQ ID NO: 1565877 - RNA, 19 nt, Artificial Sequence
  Description of Artificial Sequence: Synthetic oligonucleotide
caauggcucccaaccacuc

SEQ ID NO: 1565878 - RNA, 19 nt, Artificial Sequence
  Description of Artificial Sequence: Synthetic oligonucleotide
aggcuuaguucuggagugg

SEQ ID NO: 1565879 - RNA, 19 nt, Artificial Sequence
  Description of Artificial Sequence: Synthetic oligonucleotide
cuguaggccaaagucguca

SEQ ID NO: 1565880 - RNA, 19 nt, Artificial Sequence
  Description of Artificial Sequence: Synthetic oligonucleotide
acacuucgagauucauccu

SEQ ID NO: 1565881 - RNA, 19 nt, Artificial Sequence
  Description of Artificial Sequence: Synthetic oligonucleotide
uccgggaggcuuaguucug

SEQ ID NO: 1565882 - RNA, 19 nt, Artificial Sequence
  Description of Artificial Sequence: Synthetic oligonucleotide
ggaguggagacaagcucgg

SEQ ID NO: 1565883 - RNA, 19 nt, Artificial Sequence
  Description of Artificial Sequence: Synthetic oligonucleotide
ggagacaagcucggaacag

SEQ ID NO: 1565884 - RNA, 19 nt, Artificial Sequence
  Description of Artificial Sequence: Synthetic oligonucleotide
caaucugcacuaggaacuc

SEQ ID NO: 1565885 - RNA, 19 nt, Artificial Sequence
  Description of Artificial Sequence: Synthetic oligonucleotide
acaacucgaaggacagucu

SEQ ID NO: 1565886 - RNA, 19 nt, Artificial Sequence
  Description of Artificial Sequence: Synthetic oligonucleotide
gagagcgaagccgggcgcc

SEQ ID NO: 1565887 - RNA, 19 nt, Artificial Sequence
  Description of Artificial Sequence: Synthetic oligonucleotide
cacucagccacccaucugu

SEQ ID NO: 1565888 - RNA, 19 nt, Artificial Sequence
  Description of Artificial Sequence: Synthetic oligonucleotide
aucucgaauucugguugag

SEQ ID NO: 1565889 - RNA, 19 nt, Artificial Sequence
  Description of Artificial Sequence: Synthetic oligonucleotide
agaaggcaccccuggcagu

SEQ ID NO: 1565890 - RNA, 19 nt, Artificial Sequence
  Description of Artificial Sequence: Synthetic oligonucleotide
cacgggguauggagguggg

SEQ ID NO: 1565891 - RNA, 19 nt, Artificial Sequence
  Description of Artificial Sequence: Synthetic oligonucleotide
caggugaccaucucgaauu

SEQ ID NO: 1565892 - RNA, 19 nt, Artificial Sequence
  Description of Artificial Sequence: Synthetic oligonucleotide
aggucuauugggaacugua

SEQ ID NO: 1565893 - RNA, 19 nt, Artificial Sequence
  Description of Artificial Sequence: Synthetic oligonucleotide
agcgaagccgggcgccggg

SEQ ID NO: 1565894 - RNA, 19 nt, Artificial Sequence
  Description of Artificial Sequence: Synthetic oligonucleotide
acagacgggcacaacaguu

SEQ ID NO: 1565895 - RNA, 19 nt, Artificial Sequence
  Description of Artificial Sequence: Synthetic oligonucleotide
uugggaugucggcguccgg

SEQ ID NO: 1565896 - RNA, 19 nt, Artificial Sequence
  Description of Artificial Sequence: Synthetic oligonucleotide
agcugcgccuagcgcgggc

SEQ ID NO: 1565897 - RNA, 19 nt, Artificial Sequence
  Description of Artificial Sequence: Synthetic oligonucleotide
cacgaaguggccggcgggc

SEQ ID NO: 1565898 - RNA, 19 nt, Artificial Sequence
  Description of Artificial Sequence: Synthetic oligonucleotide
acuucgagauucauccuua

SEQ ID NO: 1565899 - RNA, 19 nt, Artificial Sequence
  Description of Artificial Sequence: Synthetic oligonucleotide
acuguaggccaaagucguc

SEQ ID NO: 1565900 - RNA, 19 nt, Artificial Sequence
  Description of Artificial Sequence: Synthetic oligonucleotide
guccgggaggcuuaguucu

SEQ ID NO: 1565901 - RNA, 19 nt, Artificial Sequence
  Description of Artificial Sequence: Synthetic oligonucleotide
gaggaacguggcucccagc

SEQ ID NO: 1565902 - RNA, 19 nt, Artificial Sequence
  Description of Artificial Sequence: Synthetic oligonucleotide
ggaggcggagcaccucucg

SEQ ID NO: 1565903 - RNA, 19 nt, Artificial Sequence
  Description of Artificial Sequence: Synthetic oligonucleotide
gguaucuguaccacagcca

SEQ ID NO: 1565904 - RNA, 19 nt, Artificial Sequence
  Description of Artificial Sequence: Synthetic oligonucleotide
uaggaacucgaggccagaa

SEQ ID NO: 1565905 - RNA, 19 nt, Artificial Sequence
  Description of Artificial Sequence: Synthetic oligonucleotide
guccgcugcaguguauacc

SEQ ID NO: 1565906 - RNA, 19 nt, Artificial Sequence
  Description of Artificial Sequence: Synthetic oligonucleotide
ucucccagccuaggaacgu

SEQ ID NO: 1565907 - RNA, 19 nt, Artificial Sequence
  Description of Artificial Sequence: Synthetic oligonucleotide
ugcggcccacacuucgaga

SEQ ID NO: 1565908 - RNA, 19 nt, Artificial Sequence
  Description of Artificial Sequence: Synthetic oligonucleotide
gcaguggcaagaacggagc

SEQ ID NO: 1565909 - RNA, 19 nt, Artificial Sequence
  Description of Artificial Sequence: Synthetic oligonucleotide
aguugcuguccggucccgg

SEQ ID NO: 1565910 - RNA, 19 nt, Artificial Sequence
  Description of Artificial Sequence: Synthetic oligonucleotide
cacuaggaacucgaggcca

SEQ ID NO: 1565911 - RNA, 19 nt, Artificial Sequence
  Description of Artificial Sequence: Synthetic oligonucleotide
cauagccuuuggaggauaa

SEQ ID NO: 1565912 - RNA, 19 nt, Artificial Sequence
  Description of Artificial Sequence: Synthetic oligonucleotide
uaccaaggaagggguugcc

SEQ ID NO: 1565913 - RNA, 19 nt, Artificial Sequence
  Description of Artificial Sequence: Synthetic oligonucleotide
uccgcuaggcggacacgaa

SEQ ID NO: 1565914 - RNA, 19 nt, Artificial Sequence
  Description of Artificial Sequence: Synthetic oligonucleotide
ggucccggaacgaaguuca

SEQ ID NO: 1565915 - RNA, 19 nt, Artificial Sequence
  Description of Artificial Sequence: Synthetic oligonucleotide
ucccagccuaggaacguuu

SEQ ID NO: 1565916 - RNA, 19 nt, Artificial Sequence
  Description of Artificial Sequence: Synthetic oligonucleotide
gcuguccggucccggaacg

SEQ ID NO: 1565917 - RNA, 19 nt, Artificial Sequence
  Description of Artificial Sequence: Synthetic oligonucleotide
gcuaggcggacacgaagug

SEQ ID NO: 1565918 - RNA, 19 nt, Artificial Sequence
  Description of Artificial Sequence: Synthetic oligonucleotide
cacagugaagugggcggag

SEQ ID NO: 1565919 - RNA, 19 nt, Artificial Sequence
  Description of Artificial Sequence: Synthetic oligonucleotide
ggaagggguugccucagga

SEQ ID NO: 1565920 - RNA, 19 nt, Artificial Sequence
  Description of Artificial Sequence: Synthetic oligonucleotide
ggccaaagucgucagcauc

SEQ ID NO: 1565921 - RNA, 19 nt, Artificial Sequence
  Description of Artificial Sequence: Synthetic oligonucleotide
uugaggugauggucuccuc

SEQ ID NO: 1565922 - RNA, 19 nt, Artificial Sequence
  Description of Artificial Sequence: Synthetic oligonucleotide
ggaaggaguuaaugguuaa

SEQ ID NO: 1565923 - RNA, 19 nt, Artificial Sequence
  Description of Artificial Sequence: Synthetic oligonucleotide
ucuguccgcugcaguguau

SEQ ID NO: 1565924 - RNA, 19 nt, Artificial Sequence
  Description of Artificial Sequence: Synthetic oligonucleotide
ggcggacacgaaguggccg

SEQ ID NO: 1565925 - RNA, 19 nt, Artificial Sequence
  Description of Artificial Sequence: Synthetic oligonucleotide
uggcaguggcaagaacgga

SEQ ID NO: 1565926 - RNA, 19 nt, Artificial Sequence
  Description of Artificial Sequence: Synthetic oligonucleotide
ggaagagagcgaagccggg

SEQ ID NO: 1565927 - RNA, 19 nt, Artificial Sequence
  Description of Artificial Sequence: Synthetic oligonucleotide
ccaguugcuguccgguccc

SEQ ID NO: 1565928 - RNA, 19 nt, Artificial Sequence
  Description of Artificial Sequence: Synthetic oligonucleotide
gcucuggauacccagcugu

SEQ ID NO: 1565929 - RNA, 19 nt, Artificial Sequence
  Description of Artificial Sequence: Synthetic oligonucleotide
ccagccuaggaacguuucc

SEQ ID NO: 1565930 - RNA, 19 nt, Artificial Sequence
  Description of Artificial Sequence: Synthetic oligonucleotide
ggacagucuggcgaucagc

SEQ ID NO: 1565931 - RNA, 19 nt, Artificial Sequence
  Description of Artificial Sequence: Synthetic oligonucleotide
acacaaagacggacaggca

SEQ ID NO: 1565932 - RNA, 19 nt, Artificial Sequence
  Description of Artificial Sequence: Synthetic oligonucleotide
ucccggaacgaaguucaua

SEQ ID NO: 1565933 - RNA, 19 nt, Artificial Sequence
  Description of Artificial Sequence: Synthetic oligonucleotide
ccugucccgguccaggaug

SEQ ID NO: 1565934 - RNA, 19 nt, Artificial Sequence
  Description of Artificial Sequence: Synthetic oligonucleotide
gccgccucgcuucucgaag

SEQ ID NO: 1565935 - RNA, 19 nt, Artificial Sequence
  Description of Artificial Sequence: Synthetic oligonucleotide
gcuuaguucuggaguggag

SEQ ID NO: 1565936 - RNA, 19 nt, Artificial Sequence
  Description of Artificial Sequence: Synthetic oligonucleotide
ggaacgaaguucauaccua

SEQ ID NO: 1565937 - RNA, 19 nt, Artificial Sequence
  Description of Artificial Sequence: Synthetic oligonucleotide
augcagcgcaggcucugga

SEQ ID NO: 1565938 - RNA, 19 nt, Artificial Sequence
  Description of Artificial Sequence: Synthetic oligonucleotide
ggaugucggcguccgggag

SEQ ID NO: 1565939 - RNA, 19 nt, Artificial Sequence
  Description of Artificial Sequence: Synthetic oligonucleotide
guccggucccggaacgaag

SEQ ID NO: 1565940 - RNA, 19 nt, Artificial Sequence
  Description of Artificial Sequence: Synthetic oligonucleotide
acgggguauggaggugggg

SEQ ID NO: 1565941 - RNA, 19 nt, Artificial Sequence
  Description of Artificial Sequence: Synthetic oligonucleotide
ccggaacgaaguucauacc

SEQ ID NO: 1565942 - RNA, 19 nt, Artificial Sequence
  Description of Artificial Sequence: Synthetic oligonucleotide
gagcgaagccgggcgccgg

SEQ ID NO: 1565943 - RNA, 19 nt, Artificial Sequence
  Description of Artificial Sequence: Synthetic oligonucleotide
ggggcgucuugggaugucg

SEQ ID NO: 1565944 - RNA, 19 nt, Artificial Sequence
  Description of Artificial Sequence: Synthetic oligonucleotide
cacuucgagauucauccuu

SEQ ID NO: 1565945 - RNA, 19 nt, Artificial Sequence
  Description of Artificial Sequence: Synthetic oligonucleotide
cauccuggauggaaaacuu

SEQ ID NO: 1565946 - RNA, 19 nt, Artificial Sequence
  Description of Artificial Sequence: Synthetic oligonucleotide
gguugaggugauggucucc

SEQ ID NO: 1565947 - RNA, 19 nt, Artificial Sequence
  Description of Artificial Sequence: Synthetic oligonucleotide
gcuucucgcagcaacccuc

SEQ ID NO: 1565948 - RNA, 19 nt, Artificial Sequence
  Description of Artificial Sequence: Synthetic oligonucleotide
cgcugcaguguauaccaag

SEQ ID NO: 1565949 - RNA, 19 nt, Artificial Sequence
  Description of Artificial Sequence: Synthetic oligonucleotide
acucucacgucuaggucua

SEQ ID NO: 1565950 - RNA, 19 nt, Artificial Sequence
  Description of Artificial Sequence: Synthetic oligonucleotide
ggguccgcuaggcggacac

SEQ ID NO: 1565951 - RNA, 19 nt, Artificial Sequence
  Description of Artificial Sequence: Synthetic oligonucleotide
ccuucacucucacgucuag

SEQ ID NO: 1565952 - RNA, 19 nt, Artificial Sequence
  Description of Artificial Sequence: Synthetic oligonucleotide
ggacacgaaguggccggcg

SEQ ID NO: 1565953 - RNA, 19 nt, Artificial Sequence
  Description of Artificial Sequence: Synthetic oligonucleotide
aggaggcggagcaccucuc

SEQ ID NO: 1565954 - RNA, 19 nt, Artificial Sequence
  Description of Artificial Sequence: Synthetic oligonucleotide
aaguggccggcgggcacca

SEQ ID NO: 1565955 - RNA, 19 nt, Artificial Sequence
  Description of Artificial Sequence: Synthetic oligonucleotide
gacccaguugcuguccggu

SEQ ID NO: 1565956 - RNA, 19 nt, Artificial Sequence
  Description of Artificial Sequence: Synthetic oligonucleotide
cuugcugaugcggcccaca

SEQ ID NO: 1565957 - RNA, 19 nt, Artificial Sequence
  Description of Artificial Sequence: Synthetic oligonucleotide
ggcuuaguucuggagugga

SEQ ID NO: 1565958 - RNA, 19 nt, Artificial Sequence
  Description of Artificial Sequence: Synthetic oligonucleotide
acgaaguggccggcgggca

SEQ ID NO: 1565959 - RNA, 19 nt, Artificial Sequence
  Description of Artificial Sequence: Synthetic oligonucleotide
ggguuaggaggaggagagg

SEQ ID NO: 1565960 - RNA, 19 nt, Artificial Sequence
  Description of Artificial Sequence: Synthetic oligonucleotide
gucacgggguauggaggug

SEQ ID NO: 1565961 - RNA, 19 nt, Artificial Sequence
  Description of Artificial Sequence: Synthetic oligonucleotide
gccuucugaugaaucaaga

SEQ ID NO: 1565962 - RNA, 19 nt, Artificial Sequence
  Description of Artificial Sequence: Synthetic oligonucleotide
ugcgccuagcgcgggccca

SEQ ID NO: 1565963 - RNA, 19 nt, Artificial Sequence
  Description of Artificial Sequence: Synthetic oligonucleotide
gggaugucggcguccggga

SEQ ID NO: 1565964 - RNA, 19 nt, Artificial Sequence
  Description of Artificial Sequence: Synthetic oligonucleotide
gggcaccacagcacagacg

SEQ ID NO: 1565965 - RNA, 19 nt, Artificial Sequence
  Description of Artificial Sequence: Synthetic oligonucleotide
gaguggagacaagcucgga

SEQ ID NO: 1565966 - RNA, 19 nt, Artificial Sequence
  Description of Artificial Sequence: Synthetic oligonucleotide
agcugucacgggguaugga

SEQ ID NO: 1565967 - RNA, 19 nt, Artificial Sequence
  Description of Artificial Sequence: Synthetic oligonucleotide
aggaacguuuccacucguu

SEQ ID NO: 1565968 - RNA, 19 nt, Artificial Sequence
  Description of Artificial Sequence: Synthetic oligonucleotide
cugcgccuagcgcgggccc

SEQ ID NO: 1565969 - RNA, 19 nt, Artificial Sequence
  Description of Artificial Sequence: Synthetic oligonucleotide
caguugcuguccggucccg

SEQ ID NO: 1565970 - RNA, 19 nt, Artificial Sequence
  Description of Artificial Sequence: Synthetic oligonucleotide
gggcgucuugggaugucgg

SEQ ID NO: 1565971 - RNA, 19 nt, Artificial Sequence
  Description of Artificial Sequence: Synthetic oligonucleotide
ccgcuaggcggacacgaag

SEQ ID NO: 1565972 - RNA, 19 nt, Artificial Sequence
  Description of Artificial Sequence: Synthetic oligonucleotide
ggccacggggccuggcgag

SEQ ID NO: 1565973 - RNA, 19 nt, Artificial Sequence
  Description of Artificial Sequence: Synthetic oligonucleotide
gggaacuguaggccaaagu

SEQ ID NO: 1565974 - RNA, 19 nt, Artificial Sequence
  Description of Artificial Sequence: Synthetic oligonucleotide
aggggcgucuugggauguc

SEQ ID NO: 1565975 - RNA, 19 nt, Artificial Sequence
  Description of Artificial Sequence: Synthetic oligonucleotide
ggaacguggcucccagcaa

SEQ ID NO: 1565976 - RNA, 19 nt, Artificial Sequence
  Description of Artificial Sequence: Synthetic oligonucleotide
cuaggaacucgaggccaga

SEQ ID NO: 1565977 - RNA, 19 nt, Artificial Sequence
  Description of Artificial Sequence: Synthetic oligonucleotide
gaauucugguugaggugau

SEQ ID NO: 1565978 - RNA, 19 nt, Artificial Sequence
  Description of Artificial Sequence: Synthetic oligonucleotide
cggaacgaaguucauaccu

SEQ ID NO: 1565979 - RNA, 19 nt, Artificial Sequence
  Description of Artificial Sequence: Synthetic oligonucleotide
gaacggagcaggagacccu

SEQ ID NO: 1565980 - RNA, 19 nt, Artificial Sequence
  Description of Artificial Sequence: Synthetic oligonucleotide
cccagccuaggaacguuuc

SEQ ID NO: 1565981 - RNA, 19 nt, Artificial Sequence
  Description of Artificial Sequence: Synthetic oligonucleotide
gggucucuugggcggcgcc

SEQ ID NO: 1565982 - RNA, 19 nt, Artificial Sequence
  Description of Artificial Sequence: Synthetic oligonucleotide
gcaggugaccaucucgaau

SEQ ID NO: 1565983 - RNA, 19 nt, Artificial Sequence
  Description of Artificial Sequence: Synthetic oligonucleotide
cuguccgcugcaguguaua

SEQ ID NO: 1565984 - RNA, 19 nt, Artificial Sequence
  Description of Artificial Sequence: Synthetic oligonucleotide
gcgaggggaagagagcgaa

SEQ ID NO: 1565985 - RNA, 19 nt, Artificial Sequence
  Description of Artificial Sequence: Synthetic oligonucleotide
ccgggaggcuuaguucugg

SEQ ID NO: 1565986 - RNA, 19 nt, Artificial Sequence
  Description of Artificial Sequence: Synthetic oligonucleotide
gguccgcuaggcggacacg

SEQ ID NO: 1565987 - RNA, 19 nt, Artificial Sequence
  Description of Artificial Sequence: Synthetic oligonucleotide
gcugcgccuagcgcgggcc

SEQ ID NO: 1565988 - RNA, 19 nt, Artificial Sequence
  Description of Artificial Sequence: Synthetic oligonucleotide
cccaaccacucagccaccc

SEQ ID NO: 1565989 - RNA, 19 nt, Artificial Sequence
  Description of Artificial Sequence: Synthetic oligonucleotide
ggcaggugaccaucucgaa

SEQ ID NO: 1565990 - RNA, 19 nt, Artificial Sequence
  Description of Artificial Sequence: Synthetic oligonucleotide
gcggcccacacuucgagau

SEQ ID NO: 1565991 - RNA, 19 nt, Artificial Sequence
  Description of Artificial Sequence: Synthetic oligonucleotide
cguaggggcauagccuuug

SEQ ID NO: 1565992 - RNA, 19 nt, Artificial Sequence
  Description of Artificial Sequence: Synthetic oligonucleotide
cgucuaggucuauugggaa

SEQ ID NO: 1565993 - RNA, 19 nt, Artificial Sequence
  Description of Artificial Sequence: Synthetic oligonucleotide
ggcgggcaccacagcacag

SEQ ID NO: 1565994 - RNA, 19 nt, Artificial Sequence
  Description of Artificial Sequence: Synthetic oligonucleotide
ggugaccaucucgaauucu

SEQ ID NO: 1565995 - RNA, 19 nt, Artificial Sequence
  Description of Artificial Sequence: Synthetic oligonucleotide
gggcguaggggcauagccu

SEQ ID NO: 1565996 - RNA, 19 nt, Artificial Sequence
  Description of Artificial Sequence: Synthetic oligonucleotide
cuguccggucccggaacga

SEQ ID NO: 1565997 - RNA, 19 nt, Artificial Sequence
  Description of Artificial Sequence: Synthetic oligonucleotide
caggguccgcuaggcggac

SEQ ID NO: 1565998 - RNA, 19 nt, Artificial Sequence
  Description of Artificial Sequence: Synthetic oligonucleotide
ggcgaggggaagagagcga

SEQ ID NO: 1565999 - RNA, 19 nt, Artificial Sequence
  Description of Artificial Sequence: Synthetic oligonucleotide
ggccgagggcccagcgccg

SEQ ID NO: 1566000 - RNA, 19 nt, Artificial Sequence
  Description of Artificial Sequence: Synthetic oligonucleotide
aggguccgcuaggcggaca

SEQ ID NO: 1566001 - RNA, 19 nt, Artificial Sequence
  Description of Artificial Sequence: Synthetic oligonucleotide
gccccacaacucgaaggac

SEQ ID NO: 1566002 - RNA, 19 nt, Artificial Sequence
  Description of Artificial Sequence: Synthetic oligonucleotide
ccacagugaagugggcgga

SEQ ID NO: 1566003 - RNA, 19 nt, Artificial Sequence
  Description of Artificial Sequence: Synthetic oligonucleotide
gccacccaucuguccgcug

SEQ ID NO: 1566004 - RNA, 19 nt, Artificial Sequence
  Description of Artificial Sequence: Synthetic oligonucleotide
ccacucguucagccuucug

SEQ ID NO: 1566005 - RNA, 19 nt, Artificial Sequence
  Description of Artificial Sequence: Synthetic oligonucleotide
cguucagccuucugaugaa

SEQ ID NO: 1566006 - RNA, 19 nt, Artificial Sequence
  Description of Artificial Sequence: Synthetic oligonucleotide
cgcuaggcggacacgaagu

SEQ ID NO: 1566007 - RNA, 19 nt, Artificial Sequence
  Description of Artificial Sequence: Synthetic oligonucleotide
gcguccgggaggcuuaguu

SEQ ID NO: 1566008 - RNA, 19 nt, Artificial Sequence
  Description of Artificial Sequence: Synthetic oligonucleotide
cggucccggaacgaaguuc

SEQ ID NO: 1566009 - RNA, 19 nt, Artificial Sequence
  Description of Artificial Sequence: Synthetic oligonucleotide
ggcgaucagcauccuggau

SEQ ID NO: 1566010 - RNA, 19 nt, Artificial Sequence
  Description of Artificial Sequence: Synthetic oligonucleotide
gcgccuagcgcgggcccag

SEQ ID NO: 1566011 - RNA, 19 nt, Artificial Sequence
  Description of Artificial Sequence: Synthetic oligonucleotide
cggacacgaaguggccggc

SEQ ID NO: 1566012 - RNA, 19 nt, Artificial Sequence
  Description of Artificial Sequence: Synthetic oligonucleotide
gcugccugacccaguugcu

SEQ ID NO: 1566013 - RNA, 19 nt, Artificial Sequence
  Description of Artificial Sequence: Synthetic oligonucleotide
ccuagcgcgggcccagggu

SEQ ID NO: 1566014 - RNA, 19 nt, Artificial Sequence
  Description of Artificial Sequence: Synthetic oligonucleotide
cccaucuguccgcugcagu

SEQ ID NO: 1566015 - RNA, 19 nt, Artificial Sequence
  Description of Artificial Sequence: Synthetic oligonucleotide
cucccagccuaggaacguu

SEQ ID NO: 1566016 - RNA, 19 nt, Artificial Sequence
  Description of Artificial Sequence: Synthetic oligonucleotide
ggcgccggggcuggcaccu

SEQ ID NO: 1566017 - RNA, 19 nt, Artificial Sequence
  Description of Artificial Sequence: Synthetic oligonucleotide
gccugucccgguccaggau

SEQ ID NO: 1566018 - RNA, 19 nt, Artificial Sequence
  Description of Artificial Sequence: Synthetic oligonucleotide
gucccggaacgaaguucau

SEQ ID NO: 1566019 - RNA, 19 nt, Artificial Sequence
  Description of Artificial Sequence: Synthetic oligonucleotide
ggaaggggugggacacaau

SEQ ID NO: 1566020 - RNA, 19 nt, Artificial Sequence
  Description of Artificial Sequence: Synthetic oligonucleotide
ggcccagcgccgccucgcu

SEQ ID NO: 1566021 - RNA, 19 nt, Artificial Sequence
  Description of Artificial Sequence: Synthetic oligonucleotide
ccacaacucgaaggacagu

SEQ ID NO: 1566022 - RNA, 19 nt, Artificial Sequence
  Description of Artificial Sequence: Synthetic oligonucleotide
cucucacgucuaggucuau

SEQ ID NO: 1566023 - RNA, 19 nt, Artificial Sequence
  Description of Artificial Sequence: Synthetic oligonucleotide
cggggccuggcgaggggaa

SEQ ID NO: 1566024 - RNA, 19 nt, Artificial Sequence
  Description of Artificial Sequence: Synthetic oligonucleotide
gcguaggggcauagccuuu

SEQ ID NO: 1566025 - RNA, 19 nt, Artificial Sequence
  Description of Artificial Sequence: Synthetic oligonucleotide
gcgccggggcuggcaccug

SEQ ID NO: 1566026 - RNA, 19 nt, Artificial Sequence
  Description of Artificial Sequence: Synthetic oligonucleotide
ccggucccggaacgaaguu

SEQ ID NO: 1566027 - RNA, 19 nt, Artificial Sequence
  Description of Artificial Sequence: Synthetic oligonucleotide
ggcguccgggaggcuuagu

SEQ ID NO: 1566028 - RNA, 19 nt, Artificial Sequence
  Description of Artificial Sequence: Synthetic oligonucleotide
cggcccacacuucgagauu

SEQ ID NO: 1566029 - RNA, 19 nt, Artificial Sequence
  Description of Artificial Sequence: Synthetic oligonucleotide
gcgcgggcccagggucucu

SEQ ID NO: 1566030 - RNA, 19 nt, Artificial Sequence
  Description of Artificial Sequence: Synthetic oligonucleotide
uuuaauaauaacuagguga

SEQ ID NO: 1566031 - RNA, 19 nt, Artificial Sequence
  Description of Artificial Sequence: Synthetic oligonucleotide
aagaauccaacucaaaccc

SEQ ID NO: 1566032 - RNA, 19 nt, Artificial Sequence
  Description of Artificial Sequence: Synthetic oligonucleotide
uuaauaauaacuaggugag

SEQ ID NO: 1566033 - RNA, 19 nt, Artificial Sequence
  Description of Artificial Sequence: Synthetic oligonucleotide
agauuuauauucuaaauag

SEQ ID NO: 1566034 - RNA, 19 nt, Artificial Sequence
  Description of Artificial Sequence: Synthetic oligonucleotide
auaagaauccaacucaaac

SEQ ID NO: 1566035 - RNA, 19 nt, Artificial Sequence
  Description of Artificial Sequence: Synthetic oligonucleotide
uucauaaaggucuuggacc

SEQ ID NO: 1566036 - RNA, 19 nt, Artificial Sequence
  Description of Artificial Sequence: Synthetic oligonucleotide
auagauauccaccacagcu

SEQ ID NO: 1566037 - RNA, 19 nt, Artificial Sequence
  Description of Artificial Sequence: Synthetic oligonucleotide
ucuuuucacaauaagaauc

SEQ ID NO: 1566038 - RNA, 19 nt, Artificial Sequence
  Description of Artificial Sequence: Synthetic oligonucleotide
uuuacagcaaggcagagaa

SEQ ID NO: 1566039 - RNA, 19 nt, Artificial Sequence
  Description of Artificial Sequence: Synthetic oligonucleotide
ucucuuuuaaccuggaaug

SEQ ID NO: 1566040 - RNA, 19 nt, Artificial Sequence
  Description of Artificial Sequence: Synthetic oligonucleotide
uuuuaaccuggaaugauag

SEQ ID NO: 1566041 - RNA, 19 nt, Artificial Sequence
  Description of Artificial Sequence: Synthetic oligonucleotide
uucacgucuaucuugauga

SEQ ID NO: 1566042 - RNA, 19 nt, Artificial Sequence
  Description of Artificial Sequence: Synthetic oligonucleotide
aaugauagauauccaccac

SEQ ID NO: 1566043 - RNA, 19 nt, Artificial Sequence
  Description of Artificial Sequence: Synthetic oligonucleotide
aagccgucagaacagaagg

SEQ ID NO: 1566044 - RNA, 19 nt, Artificial Sequence
  Description of Artificial Sequence: Synthetic oligonucleotide
agcauggugcguuugaggc

SEQ ID NO: 1566045 - RNA, 19 nt, Artificial Sequence
  Description of Artificial Sequence: Synthetic oligonucleotide
uuaaucggaacuuucuaag

SEQ ID NO: 1566046 - RNA, 19 nt, Artificial Sequence
  Description of Artificial Sequence: Synthetic oligonucleotide
ucaaagguggugcacuucg

SEQ ID NO: 1566047 - RNA, 19 nt, Artificial Sequence
  Description of Artificial Sequence: Synthetic oligonucleotide
uguccuauauucuuggagc

SEQ ID NO: 1566048 - RNA, 19 nt, Artificial Sequence
  Description of Artificial Sequence: Synthetic oligonucleotide
ugauagauauccaccacag

SEQ ID NO: 1566049 - RNA, 19 nt, Artificial Sequence
  Description of Artificial Sequence: Synthetic oligonucleotide
uguacuggagaacuuacug

SEQ ID NO: 1566050 - RNA, 19 nt, Artificial Sequence
  Description of Artificial Sequence: Synthetic oligonucleotide
aggacugcaaaguacaaag

SEQ ID NO: 1566051 - RNA, 19 nt, Artificial Sequence
  Description of Artificial Sequence: Synthetic oligonucleotide
cuaaauaggcuccagguac

SEQ ID NO: 1566052 - RNA, 19 nt, Artificial Sequence
  Description of Artificial Sequence: Synthetic oligonucleotide
ucauaaacuaagacgucag

SEQ ID NO: 1566053 - RNA, 19 nt, Artificial Sequence
  Description of Artificial Sequence: Synthetic oligonucleotide
aaucggaacuuucuaaggu

SEQ ID NO: 1566054 - RNA, 19 nt, Artificial Sequence
  Description of Artificial Sequence: Synthetic oligonucleotide
guacauugaccuuugaccc

SEQ ID NO: 1566055 - RNA, 19 nt, Artificial Sequence
  Description of Artificial Sequence: Synthetic oligonucleotide
ucuaagguugacuaaucca

SEQ ID NO: 1566056 - RNA, 19 nt, Artificial Sequence
  Description of Artificial Sequence: Synthetic oligonucleotide
agaucagacagccaggacu

SEQ ID NO: 1566057 - RNA, 19 nt, Artificial Sequence
  Description of Artificial Sequence: Synthetic oligonucleotide
auucuaaauaggcuccagg

SEQ ID NO: 1566058 - RNA, 19 nt, Artificial Sequence
  Description of Artificial Sequence: Synthetic oligonucleotide
aacuuucuaagguugacua

SEQ ID NO: 1566059 - RNA, 19 nt, Artificial Sequence
  Description of Artificial Sequence: Synthetic oligonucleotide
auaggcuccagguaccaac

SEQ ID NO: 1566060 - RNA, 19 nt, Artificial Sequence
  Description of Artificial Sequence: Synthetic oligonucleotide
agcucauaaacuaagacgu

SEQ ID NO: 1566061 - RNA, 19 nt, Artificial Sequence
  Description of Artificial Sequence: Synthetic oligonucleotide
aaauugguaaugccugcug

SEQ ID NO: 1566062 - RNA, 19 nt, Artificial Sequence
  Description of Artificial Sequence: Synthetic oligonucleotide
uuaaccuggaaugauagau

SEQ ID NO: 1566063 - RNA, 19 nt, Artificial Sequence
  Description of Artificial Sequence: Synthetic oligonucleotide
gagacagaccaucacgggg

SEQ ID NO: 1566064 - RNA, 19 nt, Artificial Sequence
  Description of Artificial Sequence: Synthetic oligonucleotide
ugagaaggcauagagucag

SEQ ID NO: 1566065 - RNA, 19 nt, Artificial Sequence
  Description of Artificial Sequence: Synthetic oligonucleotide
uucuaagguugacuaaucc

SEQ ID NO: 1566066 - RNA, 19 nt, Artificial Sequence
  Description of Artificial Sequence: Synthetic oligonucleotide
acacucauucaacagagca

SEQ ID NO: 1566067 - RNA, 19 nt, Artificial Sequence
  Description of Artificial Sequence: Synthetic oligonucleotide
cauguaagaugucugaguc

SEQ ID NO: 1566068 - RNA, 19 nt, Artificial Sequence
  Description of Artificial Sequence: Synthetic oligonucleotide
aaccuggaaugauagauau

SEQ ID NO: 1566069 - RNA, 19 nt, Artificial Sequence
  Description of Artificial Sequence: Synthetic oligonucleotide
uuacugagagcauggugcg

SEQ ID NO: 1566070 - RNA, 19 nt, Artificial Sequence
  Description of Artificial Sequence: Synthetic oligonucleotide
aguuacaagaggugcuagg

SEQ ID NO: 1566071 - RNA, 19 nt, Artificial Sequence
  Description of Artificial Sequence: Synthetic oligonucleotide
caacauguguacauugacc

SEQ ID NO: 1566072 - RNA, 19 nt, Artificial Sequence
  Description of Artificial Sequence: Synthetic oligonucleotide
auuaaucggaacuuucuaa

SEQ ID NO: 1566073 - RNA, 19 nt, Artificial Sequence
  Description of Artificial Sequence: Synthetic oligonucleotide
ucacaauaagaauccaacu

SEQ ID NO: 1566074 - RNA, 19 nt, Artificial Sequence
  Description of Artificial Sequence: Synthetic oligonucleotide
agcaaggcagagaagaaac

SEQ ID NO: 1566075 - RNA, 19 nt, Artificial Sequence
  Description of Artificial Sequence: Synthetic oligonucleotide
uaaauaggcuccagguacc

SEQ ID NO: 1566076 - RNA, 19 nt, Artificial Sequence
  Description of Artificial Sequence: Synthetic oligonucleotide
augauagauauccaccaca

SEQ ID NO: 1566077 - RNA, 19 nt, Artificial Sequence
  Description of Artificial Sequence: Synthetic oligonucleotide
ucggaacuuucuaagguug

SEQ ID NO: 1566078 - RNA, 19 nt, Artificial Sequence
  Description of Artificial Sequence: Synthetic oligonucleotide
ugcuaggaaagaaugccca

SEQ ID NO: 1566079 - RNA, 19 nt, Artificial Sequence
  Description of Artificial Sequence: Synthetic oligonucleotide
accgccguuccauuaaucg

SEQ ID NO: 1566080 - RNA, 19 nt, Artificial Sequence
  Description of Artificial Sequence: Synthetic oligonucleotide
uccucaagagucuacugca

SEQ ID NO: 1566081 - RNA, 19 nt, Artificial Sequence
  Description of Artificial Sequence: Synthetic oligonucleotide
ucuaaauaggcuccaggua

SEQ ID NO: 1566082 - RNA, 19 nt, Artificial Sequence
  Description of Artificial Sequence: Synthetic oligonucleotide
aauuccaaugcauggcuuu

SEQ ID NO: 1566083 - RNA, 19 nt, Artificial Sequence
  Description of Artificial Sequence: Synthetic oligonucleotide
ugaucguauguccuggcac

SEQ ID NO: 1566084 - RNA, 19 nt, Artificial Sequence
  Description of Artificial Sequence: Synthetic oligonucleotide
uuuauauccggugccaccu

SEQ ID NO: 1566085 - RNA, 19 nt, Artificial Sequence
  Description of Artificial Sequence: Synthetic oligonucleotide
uaauaacuaggugagcaca

SEQ ID NO: 1566086 - RNA, 19 nt, Artificial Sequence
  Description of Artificial Sequence: Synthetic oligonucleotide
cuucagcucauaaacuaag

SEQ ID NO: 1566087 - RNA, 19 nt, Artificial Sequence
  Description of Artificial Sequence: Synthetic oligonucleotide
ucuugauucccuccggagu

SEQ ID NO: 1566088 - RNA, 19 nt, Artificial Sequence
  Description of Artificial Sequence: Synthetic oligonucleotide
acauugaccuuugacccgc

SEQ ID NO: 1566089 - RNA, 19 nt, Artificial Sequence
  Description of Artificial Sequence: Synthetic oligonucleotide
uucaggugaucguaugucc

SEQ ID NO: 1566090 - RNA, 19 nt, Artificial Sequence
  Description of Artificial Sequence: Synthetic oligonucleotide
ugugucguggcuuggcuug

SEQ ID NO: 1566091 - RNA, 19 nt, Artificial Sequence
  Description of Artificial Sequence: Synthetic oligonucleotide
aaaauugguaaugccugcu

SEQ ID NO: 1566092 - RNA, 19 nt, Artificial Sequence
  Description of Artificial Sequence: Synthetic oligonucleotide
auauccaccacagcuaucu

SEQ ID NO: 1566093 - RNA, 19 nt, Artificial Sequence
  Description of Artificial Sequence: Synthetic oligonucleotide
gauuuuccggguuuuguuc

SEQ ID NO: 1566094 - RNA, 19 nt, Artificial Sequence
  Description of Artificial Sequence: Synthetic oligonucleotide
ugaugugagguacuauggu

SEQ ID NO: 1566095 - RNA, 19 nt, Artificial Sequence
  Description of Artificial Sequence: Synthetic oligonucleotide
ugauguaccccucucggau

SEQ ID NO: 1566096 - RNA, 19 nt, Artificial Sequence
  Description of Artificial Sequence: Synthetic oligonucleotide
ugcacuuggaguccccgag

SEQ ID NO: 1566097 - RNA, 19 nt, Artificial Sequence
  Description of Artificial Sequence: Synthetic oligonucleotide
agaacuuacugagagcaug

SEQ ID NO: 1566098 - RNA, 19 nt, Artificial Sequence
  Description of Artificial Sequence: Synthetic oligonucleotide
gaucagacagccaggacug

SEQ ID NO: 1566099 - RNA, 19 nt, Artificial Sequence
  Description of Artificial Sequence: Synthetic oligonucleotide
cacucauucaacagagcag

SEQ ID NO: 1566100 - RNA, 19 nt, Artificial Sequence
  Description of Artificial Sequence: Synthetic oligonucleotide
uaggaaagaaugcccacuc

SEQ ID NO: 1566101 - RNA, 19 nt, Artificial Sequence
  Description of Artificial Sequence: Synthetic oligonucleotide
ucuuggaccuccuugggau

SEQ ID NO: 1566102 - RNA, 19 nt, Artificial Sequence
  Description of Artificial Sequence: Synthetic oligonucleotide
uaacuaggugagcacacac

SEQ ID NO: 1566103 - RNA, 19 nt, Artificial Sequence
  Description of Artificial Sequence: Synthetic oligonucleotide
augugagguacuaugguuc

SEQ ID NO: 1566104 - RNA, 19 nt, Artificial Sequence
  Description of Artificial Sequence: Synthetic oligonucleotide
ugagguacuaugguucuug

SEQ ID NO: 1566105 - RNA, 19 nt, Artificial Sequence
  Description of Artificial Sequence: Synthetic oligonucleotide
acuuacugagagcauggug

SEQ ID NO: 1566106 - RNA, 19 nt, Artificial Sequence
  Description of Artificial Sequence: Synthetic oligonucleotide
gagucuuuccuucuuuuca

SEQ ID NO: 1566107 - RNA, 19 nt, Artificial Sequence
  Description of Artificial Sequence: Synthetic oligonucleotide
ugaccuuugacccgccgca

SEQ ID NO: 1566108 - RNA, 19 nt, Artificial Sequence
  Description of Artificial Sequence: Synthetic oligonucleotide
cauaaacuaagacgucagc

SEQ ID NO: 1566109 - RNA, 19 nt, Artificial Sequence
  Description of Artificial Sequence: Synthetic oligonucleotide
cauugcuaagcagagacuc

SEQ ID NO: 1566110 - RNA, 19 nt, Artificial Sequence
  Description of Artificial Sequence: Synthetic oligonucleotide
acgucuaucuugaugagug

SEQ ID NO: 1566111 - RNA, 19 nt, Artificial Sequence
  Description of Artificial Sequence: Synthetic oligonucleotide
ugaucucuuauaaucuuuu

SEQ ID NO: 1566112 - RNA, 19 nt, Artificial Sequence
  Description of Artificial Sequence: Synthetic oligonucleotide
ggaaugauagauauccacc

SEQ ID NO: 1566113 - RNA, 19 nt, Artificial Sequence
  Description of Artificial Sequence: Synthetic oligonucleotide
ucaagagucuacugcagau

SEQ ID NO: 1566114 - RNA, 19 nt, Artificial Sequence
  Description of Artificial Sequence: Synthetic oligonucleotide
uauauccggugccaccucc

SEQ ID NO: 1566115 - RNA, 19 nt, Artificial Sequence
  Description of Artificial Sequence: Synthetic oligonucleotide
guuugcauugcuaagcaga

SEQ ID NO: 1566116 - RNA, 19 nt, Artificial Sequence
  Description of Artificial Sequence: Synthetic oligonucleotide
cacacugcaucacuauucc

SEQ ID NO: 1566117 - RNA, 19 nt, Artificial Sequence
  Description of Artificial Sequence: Synthetic oligonucleotide
gaagccgucagaacagaag

SEQ ID NO: 1566118 - RNA, 19 nt, Artificial Sequence
  Description of Artificial Sequence: Synthetic oligonucleotide
caacucaaacccaagucuc

SEQ ID NO: 1566119 - RNA, 19 nt, Artificial Sequence
  Description of Artificial Sequence: Synthetic oligonucleotide
gaggugcuaggaaagaaug

SEQ ID NO: 1566120 - RNA, 19 nt, Artificial Sequence
  Description of Artificial Sequence: Synthetic oligonucleotide
uuuaaccuggaaugauaga

SEQ ID NO: 1566121 - RNA, 19 nt, Artificial Sequence
  Description of Artificial Sequence: Synthetic oligonucleotide
ggugauguaccccucucgg

SEQ ID NO: 1566122 - RNA, 19 nt, Artificial Sequence
  Description of Artificial Sequence: Synthetic oligonucleotide
ugcuaagcagagacucagg

SEQ ID NO: 1566123 - RNA, 19 nt, Artificial Sequence
  Description of Artificial Sequence: Synthetic oligonucleotide
agguaccaaccucaccacc

SEQ ID NO: 1566124 - RNA, 19 nt, Artificial Sequence
  Description of Artificial Sequence: Synthetic oligonucleotide
ugcaaaucgccucauuguu

SEQ ID NO: 1566125 - RNA, 19 nt, Artificial Sequence
  Description of Artificial Sequence: Synthetic oligonucleotide
guccuauauucuuggagcc

SEQ ID NO: 1566126 - RNA, 19 nt, Artificial Sequence
  Description of Artificial Sequence: Synthetic oligonucleotide
cugguuugcauugcuaagc

SEQ ID NO: 1566127 - RNA, 19 nt, Artificial Sequence
  Description of Artificial Sequence: Synthetic oligonucleotide
ucauagauuuuccggguuu

SEQ ID NO: 1566128 - RNA, 19 nt, Artificial Sequence
  Description of Artificial Sequence: Synthetic oligonucleotide
ucagcccagaaucaauguc

SEQ ID NO: 1566129 - RNA, 19 nt, Artificial Sequence
  Description of Artificial Sequence: Synthetic oligonucleotide
uaaccuggaaugauagaua

SEQ ID NO: 1566130 - RNA, 19 nt, Artificial Sequence
  Description of Artificial Sequence: Synthetic oligonucleotide
guucacgucuaucuugaug

SEQ ID NO: 1566131 - RNA, 19 nt, Artificial Sequence
  Description of Artificial Sequence: Synthetic oligonucleotide
uauucuaaauaggcuccag

SEQ ID NO: 1566132 - RNA, 19 nt, Artificial Sequence
  Description of Artificial Sequence: Synthetic oligonucleotide
cuugggauaccgccguucc

SEQ ID NO: 1566133 - RNA, 19 nt, Artificial Sequence
  Description of Artificial Sequence: Synthetic oligonucleotide
gguucuauuuucaccaaag

SEQ ID NO: 1566134 - RNA, 19 nt, Artificial Sequence
  Description of Artificial Sequence: Synthetic oligonucleotide
gaguuucucuguaccaggg

SEQ ID NO: 1566135 - RNA, 19 nt, Artificial Sequence
  Description of Artificial Sequence: Synthetic oligonucleotide
cuauucccacaacaggagc

SEQ ID NO: 1566136 - RNA, 19 nt, Artificial Sequence
  Description of Artificial Sequence: Synthetic oligonucleotide
ggugcuaggaaagaaugcc

SEQ ID NO: 1566137 - RNA, 19 nt, Artificial Sequence
  Description of Artificial Sequence: Synthetic oligonucleotide
uaauaauaacuaggugagc

SEQ ID NO: 1566138 - RNA, 19 nt, Artificial Sequence
  Description of Artificial Sequence: Synthetic oligonucleotide
gauguacuggagaacuuac

SEQ ID NO: 1566139 - RNA, 19 nt, Artificial Sequence
  Description of Artificial Sequence: Synthetic oligonucleotide
guugacuaauccaugaucu

SEQ ID NO: 1566140 - RNA, 19 nt, Artificial Sequence
  Description of Artificial Sequence: Synthetic oligonucleotide
ucauugaguuucucuguac

SEQ ID NO: 1566141 - RNA, 19 nt, Artificial Sequence
  Description of Artificial Sequence: Synthetic oligonucleotide
aggugcuaggaaagaaugc

SEQ ID NO: 1566142 - RNA, 19 nt, Artificial Sequence
  Description of Artificial Sequence: Synthetic oligonucleotide
acaagaggugcuaggaaag

SEQ ID NO: 1566143 - RNA, 19 nt, Artificial Sequence
  Description of Artificial Sequence: Synthetic oligonucleotide
gaacuugucauguuccacu

SEQ ID NO: 1566144 - RNA, 19 nt, Artificial Sequence
  Description of Artificial Sequence: Synthetic oligonucleotide
gaaggcauagagucagcga

SEQ ID NO: 1566145 - RNA, 19 nt, Artificial Sequence
  Description of Artificial Sequence: Synthetic oligonucleotide
ucuuuuaaccuggaaugau

SEQ ID NO: 1566146 - RNA, 19 nt, Artificial Sequence
  Description of Artificial Sequence: Synthetic oligonucleotide
cucauaaacuaagacguca

SEQ ID NO: 1566147 - RNA, 19 nt, Artificial Sequence
  Description of Artificial Sequence: Synthetic oligonucleotide
cuaucuucagagcauguaa

SEQ ID NO: 1566148 - RNA, 19 nt, Artificial Sequence
  Description of Artificial Sequence: Synthetic oligonucleotide
aauccaacucaaacccaag

SEQ ID NO: 1566149 - RNA, 19 nt, Artificial Sequence
  Description of Artificial Sequence: Synthetic oligonucleotide
cuaagguugacuaauccau

SEQ ID NO: 1566150 - RNA, 19 nt, Artificial Sequence
  Description of Artificial Sequence: Synthetic oligonucleotide
ggugccaccuccucaagag

SEQ ID NO: 1566151 - RNA, 19 nt, Artificial Sequence
  Description of Artificial Sequence: Synthetic oligonucleotide
ucaacagagcagauuuaua

SEQ ID NO: 1566152 - RNA, 19 nt, Artificial Sequence
  Description of Artificial Sequence: Synthetic oligonucleotide
auguccuggcacuacaaaa

SEQ ID NO: 1566153 - RNA, 19 nt, Artificial Sequence
  Description of Artificial Sequence: Synthetic oligonucleotide
cucuugauucccuccggag

SEQ ID NO: 1566154 - RNA, 19 nt, Artificial Sequence
  Description of Artificial Sequence: Synthetic oligonucleotide
auuccaaugcauggcuuuc

SEQ ID NO: 1566155 - RNA, 19 nt, Artificial Sequence
  Description of Artificial Sequence: Synthetic oligonucleotide
caagucuccaacaugugua

SEQ ID NO: 1566156 - RNA, 19 nt, Artificial Sequence
  Description of Artificial Sequence: Synthetic oligonucleotide
uugacuaauccaugaucuc

SEQ ID NO: 1566157 - RNA, 19 nt, Artificial Sequence
  Description of Artificial Sequence: Synthetic oligonucleotide
ccacaauccuugcaaaucg

SEQ ID NO: 1566158 - RNA, 19 nt, Artificial Sequence
  Description of Artificial Sequence: Synthetic oligonucleotide
aacuaggugagcacacaca

SEQ ID NO: 1566159 - RNA, 19 nt, Artificial Sequence
  Description of Artificial Sequence: Synthetic oligonucleotide
acuaugguucuugucugag

SEQ ID NO: 1566160 - RNA, 19 nt, Artificial Sequence
  Description of Artificial Sequence: Synthetic oligonucleotide
gggaugaaaugcugugucg

SEQ ID NO: 1566161 - RNA, 19 nt, Artificial Sequence
  Description of Artificial Sequence: Synthetic oligonucleotide
ugguucuauuuucaccaaa

SEQ ID NO: 1566162 - RNA, 19 nt, Artificial Sequence
  Description of Artificial Sequence: Synthetic oligonucleotide
cuuuuaaccuggaaugaua

SEQ ID NO: 1566163 - RNA, 19 nt, Artificial Sequence
  Description of Artificial Sequence: Synthetic oligonucleotide
gcuugguucuauuuucacc

SEQ ID NO: 1566164 - RNA, 19 nt, Artificial Sequence
  Description of Artificial Sequence: Synthetic oligonucleotide
ugcccacucauguuuaaua

SEQ ID NO: 1566165 - RNA, 19 nt, Artificial Sequence
  Description of Artificial Sequence: Synthetic oligonucleotide
uuugacccgccgcauucca

SEQ ID NO: 1566166 - RNA, 19 nt, Artificial Sequence
  Description of Artificial Sequence: Synthetic oligonucleotide
agagcagauuuauauucua

SEQ ID NO: 1566167 - RNA, 19 nt, Artificial Sequence
  Description of Artificial Sequence: Synthetic oligonucleotide
aaauaggcuccagguacca

SEQ ID NO: 1566168 - RNA, 19 nt, Artificial Sequence
  Description of Artificial Sequence: Synthetic oligonucleotide
aagaggugcuaggaaagaa

SEQ ID NO: 1566169 - RNA, 19 nt, Artificial Sequence
  Description of Artificial Sequence: Synthetic oligonucleotide
aggcauagagucagcgagc

SEQ ID NO: 1566170 - RNA, 19 nt, Artificial Sequence
  Description of Artificial Sequence: Synthetic oligonucleotide
acuucugguuugcauugcu

SEQ ID NO: 1566171 - RNA, 19 nt, Artificial Sequence
  Description of Artificial Sequence: Synthetic oligonucleotide
ucacgucuaucuugaugag

SEQ ID NO: 1566172 - RNA, 19 nt, Artificial Sequence
  Description of Artificial Sequence: Synthetic oligonucleotide
gauaccgccguuccauuaa

SEQ ID NO: 1566173 - RNA, 19 nt, Artificial Sequence
  Description of Artificial Sequence: Synthetic oligonucleotide
aggugaucguauguccugg

SEQ ID NO: 1566174 - RNA, 19 nt, Artificial Sequence
  Description of Artificial Sequence: Synthetic oligonucleotide
gaucguauguccuggcacu

SEQ ID NO: 1566175 - RNA, 19 nt, Artificial Sequence
  Description of Artificial Sequence: Synthetic oligonucleotide
uuuccggguuuuguucacg

SEQ ID NO: 1566176 - RNA, 19 nt, Artificial Sequence
  Description of Artificial Sequence: Synthetic oligonucleotide
ucaaugaacuugucauguu

SEQ ID NO: 1566177 - RNA, 19 nt, Artificial Sequence
  Description of Artificial Sequence: Synthetic oligonucleotide
auauucuaaauaggcucca

SEQ ID NO: 1566178 - RNA, 19 nt, Artificial Sequence
  Description of Artificial Sequence: Synthetic oligonucleotide
ugaagccgucagaacagaa

SEQ ID NO: 1566179 - RNA, 19 nt, Artificial Sequence
  Description of Artificial Sequence: Synthetic oligonucleotide
aaucgccucauuguuucau

SEQ ID NO: 1566180 - RNA, 19 nt, Artificial Sequence
  Description of Artificial Sequence: Synthetic oligonucleotide
caggugaucguauguccug

SEQ ID NO: 1566181 - RNA, 19 nt, Artificial Sequence
  Description of Artificial Sequence: Synthetic oligonucleotide
gaugugagguacuaugguu

SEQ ID NO: 1566182 - RNA, 19 nt, Artificial Sequence
  Description of Artificial Sequence: Synthetic oligonucleotide
uccuauauucuuggagccu

SEQ ID NO: 1566183 - RNA, 19 nt, Artificial Sequence
  Description of Artificial Sequence: Synthetic oligonucleotide
uuuuccggguuuuguucac

SEQ ID NO: 1566184 - RNA, 19 nt, Artificial Sequence
  Description of Artificial Sequence: Synthetic oligonucleotide
gugcuaggaaagaaugccc

SEQ ID NO: 1566185 - RNA, 19 nt, Artificial Sequence
  Description of Artificial Sequence: Synthetic oligonucleotide
agucucaagccuccuugcu

SEQ ID NO: 1566186 - RNA, 19 nt, Artificial Sequence
  Description of Artificial Sequence: Synthetic oligonucleotide
agguucaaagguggugcac

SEQ ID NO: 1566187 - RNA, 19 nt, Artificial Sequence
  Description of Artificial Sequence: Synthetic oligonucleotide
cagucucaagccuccuugc

SEQ ID NO: 1566188 - RNA, 19 nt, Artificial Sequence
  Description of Artificial Sequence: Synthetic oligonucleotide
ugggauaccgccguuccau

SEQ ID NO: 1566189 - RNA, 19 nt, Artificial Sequence
  Description of Artificial Sequence: Synthetic oligonucleotide
ggauauauuccaccucuuc

SEQ ID NO: 1566190 - RNA, 19 nt, Artificial Sequence
  Description of Artificial Sequence: Synthetic oligonucleotide
uuccggguuuuguucacgu

SEQ ID NO: 1566191 - RNA, 19 nt, Artificial Sequence
  Description of Artificial Sequence: Synthetic oligonucleotide
uucgucuuugccucucuuu

SEQ ID NO: 1566192 - RNA, 19 nt, Artificial Sequence
  Description of Artificial Sequence: Synthetic oligonucleotide
aacuaagacgucagcuuaa

SEQ ID NO: 1566193 - RNA, 19 nt, Artificial Sequence
  Description of Artificial Sequence: Synthetic oligonucleotide
auguaccccucucggauga

SEQ ID NO: 1566194 - RNA, 19 nt, Artificial Sequence
  Description of Artificial Sequence: Synthetic oligonucleotide
cauuaaucggaacuuucua

SEQ ID NO: 1566195 - RNA, 19 nt, Artificial Sequence
  Description of Artificial Sequence: Synthetic oligonucleotide
ccgcauuccaaacuucugg

SEQ ID NO: 1566196 - RNA, 19 nt, Artificial Sequence
  Description of Artificial Sequence: Synthetic oligonucleotide
cauuuuauauccggugcca

SEQ ID NO: 1566197 - RNA, 19 nt, Artificial Sequence
  Description of Artificial Sequence: Synthetic oligonucleotide
uugucauguuccacugguc

SEQ ID NO: 1566198 - RNA, 19 nt, Artificial Sequence
  Description of Artificial Sequence: Synthetic oligonucleotide
agagcauggugcguuugag

SEQ ID NO: 1566199 - RNA, 19 nt, Artificial Sequence
  Description of Artificial Sequence: Synthetic oligonucleotide
uuccaaacuucugguuugc

SEQ ID NO: 1566200 - RNA, 19 nt, Artificial Sequence
  Description of Artificial Sequence: Synthetic oligonucleotide
aaauuccaaugcauggcuu

SEQ ID NO: 1566201 - RNA, 19 nt, Artificial Sequence
  Description of Artificial Sequence: Synthetic oligonucleotide
ugacccgccgcauuccaaa

SEQ ID NO: 1566202 - RNA, 19 nt, Artificial Sequence
  Description of Artificial Sequence: Synthetic oligonucleotide
uuauauccggugccaccuc

SEQ ID NO: 1566203 - RNA, 19 nt, Artificial Sequence
  Description of Artificial Sequence: Synthetic oligonucleotide
cucaagagucuacugcaga

SEQ ID NO: 1566204 - RNA, 19 nt, Artificial Sequence
  Description of Artificial Sequence: Synthetic oligonucleotide
auugcuaagcagagacuca

SEQ ID NO: 1566205 - RNA, 19 nt, Artificial Sequence
  Description of Artificial Sequence: Synthetic oligonucleotide
uucccuccggaguucaaau

SEQ ID NO: 1566206 - RNA, 19 nt, Artificial Sequence
  Description of Artificial Sequence: Synthetic oligonucleotide
uuccaaugcauggcuuuca

SEQ ID NO: 1566207 - RNA, 19 nt, Artificial Sequence
  Description of Artificial Sequence: Synthetic oligonucleotide
acuaauccaugaucucuua

SEQ ID NO: 1566208 - RNA, 19 nt, Artificial Sequence
  Description of Artificial Sequence: Synthetic oligonucleotide
uugggauaccgccguucca

SEQ ID NO: 1566209 - RNA, 19 nt, Artificial Sequence
  Description of Artificial Sequence: Synthetic oligonucleotide
gagacauuuuauauccggu

SEQ ID NO: 1566210 - RNA, 19 nt, Artificial Sequence
  Description of Artificial Sequence: Synthetic oligonucleotide
uuggaccuccuugggauac

SEQ ID NO: 1566211 - RNA, 19 nt, Artificial Sequence
  Description of Artificial Sequence: Synthetic oligonucleotide
ugcuggcacgcacuacugu

SEQ ID NO: 1566212 - RNA, 19 nt, Artificial Sequence
  Description of Artificial Sequence: Synthetic oligonucleotide
ggggauauauuccaccucu

SEQ ID NO: 1566213 - RNA, 19 nt, Artificial Sequence
  Description of Artificial Sequence: Synthetic oligonucleotide
agguggugcacuucgucuu

SEQ ID NO: 1566214 - RNA, 19 nt, Artificial Sequence
  Description of Artificial Sequence: Synthetic oligonucleotide
augaucucuuauaaucuuu

SEQ ID NO: 1566215 - RNA, 19 nt, Artificial Sequence
  Description of Artificial Sequence: Synthetic oligonucleotide
gcacgcacuacuguccugg

SEQ ID NO: 1566216 - RNA, 19 nt, Artificial Sequence
  Description of Artificial Sequence: Synthetic oligonucleotide
gugaucguauguccuggca

SEQ ID NO: 1566217 - RNA, 19 nt, Artificial Sequence
  Description of Artificial Sequence: Synthetic oligonucleotide
ucucaagugcaaggaucug

SEQ ID NO: 1566218 - RNA, 19 nt, Artificial Sequence
  Description of Artificial Sequence: Synthetic oligonucleotide
ugauucccuccggaguuca

SEQ ID NO: 1566219 - RNA, 19 nt, Artificial Sequence
  Description of Artificial Sequence: Synthetic oligonucleotide
acuaagacgucagcuuaaa

SEQ ID NO: 1566220 - RNA, 19 nt, Artificial Sequence
  Description of Artificial Sequence: Synthetic oligonucleotide
cuuugacccgccgcauucc

SEQ ID NO: 1566221 - RNA, 19 nt, Artificial Sequence
  Description of Artificial Sequence: Synthetic oligonucleotide
auguguacauugaccuuug

SEQ ID NO: 1566222 - RNA, 19 nt, Artificial Sequence
  Description of Artificial Sequence: Synthetic oligonucleotide
gugauguaccccucucgga

SEQ ID NO: 1566223 - RNA, 19 nt, Artificial Sequence
  Description of Artificial Sequence: Synthetic oligonucleotide
ccuccggaguucaaauucc

SEQ ID NO: 1566224 - RNA, 19 nt, Artificial Sequence
  Description of Artificial Sequence: Synthetic oligonucleotide
auguacuggagaacuuacu

SEQ ID NO: 1566225 - RNA, 19 nt, Artificial Sequence
  Description of Artificial Sequence: Synthetic oligonucleotide
ccuauauucuuggagccuc

SEQ ID NO: 1566226 - RNA, 19 nt, Artificial Sequence
  Description of Artificial Sequence: Synthetic oligonucleotide
uugcauugcuaagcagaga

SEQ ID NO: 1566227 - RNA, 19 nt, Artificial Sequence
  Description of Artificial Sequence: Synthetic oligonucleotide
guaccccucucggaugagg

SEQ ID NO: 1566228 - RNA, 19 nt, Artificial Sequence
  Description of Artificial Sequence: Synthetic oligonucleotide
uaucuugaugagugcucuu

SEQ ID NO: 1566229 - RNA, 19 nt, Artificial Sequence
  Description of Artificial Sequence: Synthetic oligonucleotide
agcgagcuucacucucaag

SEQ ID NO: 1566230 - RNA, 19 nt, Artificial Sequence
  Description of Artificial Sequence: Synthetic oligonucleotide
cagaucagacagccaggac

SEQ ID NO: 1566231 - RNA, 19 nt, Artificial Sequence
  Description of Artificial Sequence: Synthetic oligonucleotide
cagagcagauuuauauucu

SEQ ID NO: 1566232 - RNA, 19 nt, Artificial Sequence
  Description of Artificial Sequence: Synthetic oligonucleotide
ggugaucguauguccuggc

SEQ ID NO: 1566233 - RNA, 19 nt, Artificial Sequence
  Description of Artificial Sequence: Synthetic oligonucleotide
ccgccguuccauuaaucgg

SEQ ID NO: 1566234 - RNA, 19 nt, Artificial Sequence
  Description of Artificial Sequence: Synthetic oligonucleotide
gcuggcacgcacuacuguc

SEQ ID NO: 1566235 - RNA, 19 nt, Artificial Sequence
  Description of Artificial Sequence: Synthetic oligonucleotide
ggacugcaaaguacaaagc

SEQ ID NO: 1566236 - RNA, 19 nt, Artificial Sequence
  Description of Artificial Sequence: Synthetic oligonucleotide
ucguauguccuggcacuac

SEQ ID NO: 1566237 - RNA, 19 nt, Artificial Sequence
  Description of Artificial Sequence: Synthetic oligonucleotide
cauugaccuuugacccgcc

SEQ ID NO: 1566238 - RNA, 19 nt, Artificial Sequence
  Description of Artificial Sequence: Synthetic oligonucleotide
gcguuugaggcgcuccucc

SEQ ID NO: 1566239 - RNA, 19 nt, Artificial Sequence
  Description of Artificial Sequence: Synthetic oligonucleotide
uaccgccguuccauuaauc

SEQ ID NO: 1566240 - RNA, 19 nt, Artificial Sequence
  Description of Artificial Sequence: Synthetic oligonucleotide
augccugcuguccuauauu

SEQ ID NO: 1566241 - RNA, 19 nt, Artificial Sequence
  Description of Artificial Sequence: Synthetic oligonucleotide
cuugauucccuccggaguu

SEQ ID NO: 1566242 - RNA, 19 nt, Artificial Sequence
  Description of Artificial Sequence: Synthetic oligonucleotide
uccccgagucuuuccuucu

SEQ ID NO: 1566243 - RNA, 19 nt, Artificial Sequence
  Description of Artificial Sequence: Synthetic oligonucleotide
uggugcacuucgucuuccu

SEQ ID NO: 1566244 - RNA, 19 nt, Artificial Sequence
  Description of Artificial Sequence: Synthetic oligonucleotide
gccgucagaacagaaggac

SEQ ID NO: 1566245 - RNA, 19 nt, Artificial Sequence
  Description of Artificial Sequence: Synthetic oligonucleotide
cugcuggcacgcacuacug

SEQ ID NO: 1566246 - RNA, 19 nt, Artificial Sequence
  Description of Artificial Sequence: Synthetic oligonucleotide
uugacccgccgcauuccaa

SEQ ID NO: 1566247 - RNA, 19 nt, Artificial Sequence
  Description of Artificial Sequence: Synthetic oligonucleotide
auaccgccguuccauuaau

SEQ ID NO: 1566248 - RNA, 19 nt, Artificial Sequence
  Description of Artificial Sequence: Synthetic oligonucleotide
gacuaauccaugaucucuu

SEQ ID NO: 1566249 - RNA, 19 nt, Artificial Sequence
  Description of Artificial Sequence: Synthetic oligonucleotide
ccucaagagucuacugcag

SEQ ID NO: 1566250 - RNA, 19 nt, Artificial Sequence
  Description of Artificial Sequence: Synthetic oligonucleotide
cuaggaaagaaugcccacu

SEQ ID NO: 1566251 - RNA, 19 nt, Artificial Sequence
  Description of Artificial Sequence: Synthetic oligonucleotide
cuccggaguucaaauucca

SEQ ID NO: 1566252 - RNA, 19 nt, Artificial Sequence
  Description of Artificial Sequence: Synthetic oligonucleotide
auucccuccggaguucaaa

SEQ ID NO: 1566253 - RNA, 19 nt, Artificial Sequence
  Description of Artificial Sequence: Synthetic oligonucleotide
gguuuuguucacgucuauc

SEQ ID NO: 1566254 - RNA, 19 nt, Artificial Sequence
  Description of Artificial Sequence: Synthetic oligonucleotide
gauauccaccacagcuauc

SEQ ID NO: 1566255 - RNA, 19 nt, Artificial Sequence
  Description of Artificial Sequence: Synthetic oligonucleotide
uugauucccuccggaguuc

SEQ ID NO: 1566256 - RNA, 19 nt, Artificial Sequence
  Description of Artificial Sequence: Synthetic oligonucleotide
uguucacgucuaucuugau

SEQ ID NO: 1566257 - RNA, 19 nt, Artificial Sequence
  Description of Artificial Sequence: Synthetic oligonucleotide
gagguacuaugguucuugu

SEQ ID NO: 1566258 - RNA, 19 nt, Artificial Sequence
  Description of Artificial Sequence: Synthetic oligonucleotide
gacccgccgcauuccaaac

SEQ ID NO: 1566259 - RNA, 19 nt, Artificial Sequence
  Description of Artificial Sequence: Synthetic oligonucleotide
ccaacucaaacccaagucu

SEQ ID NO: 1566260 - RNA, 19 nt, Artificial Sequence
  Description of Artificial Sequence: Synthetic oligonucleotide
acccgccgcauuccaaacu

SEQ ID NO: 1566261 - RNA, 19 nt, Artificial Sequence
  Description of Artificial Sequence: Synthetic oligonucleotide
gaaugcccacucauguuua

SEQ ID NO: 1566262 - RNA, 19 nt, Artificial Sequence
  Description of Artificial Sequence: Synthetic oligonucleotide
uacugagagcauggugcgu

SEQ ID NO: 1566263 - RNA, 19 nt, Artificial Sequence
  Description of Artificial Sequence: Synthetic oligonucleotide
cacuucgucuuccugaguu

SEQ ID NO: 1566264 - RNA, 19 nt, Artificial Sequence
  Description of Artificial Sequence: Synthetic oligonucleotide
uguaccccucucggaugag

SEQ ID NO: 1566265 - RNA, 19 nt, Artificial Sequence
  Description of Artificial Sequence: Synthetic oligonucleotide
agcuaucuucagagcaugu

SEQ ID NO: 1566266 - RNA, 19 nt, Artificial Sequence
  Description of Artificial Sequence: Synthetic oligonucleotide
ccaugaucucuuauaaucu

SEQ ID NO: 1566267 - RNA, 19 nt, Artificial Sequence
  Description of Artificial Sequence: Synthetic oligonucleotide
ugcguuugaggcgcuccuc

SEQ ID NO: 1566268 - RNA, 19 nt, Artificial Sequence
  Description of Artificial Sequence: Synthetic oligonucleotide
agccuccuugcuuguuaca

SEQ ID NO: 1566269 - RNA, 19 nt, Artificial Sequence
  Description of Artificial Sequence: Synthetic oligonucleotide
cucucggaugaggaaguca

SEQ ID NO: 1566270 - RNA, 19 nt, Artificial Sequence
  Description of Artificial Sequence: Synthetic oligonucleotide
gguaccaaccucaccaccu

SEQ ID NO: 1566271 - RNA, 19 nt, Artificial Sequence
  Description of Artificial Sequence: Synthetic oligonucleotide
cuauauucuuggagccucu

SEQ ID NO: 1566272 - RNA, 19 nt, Artificial Sequence
  Description of Artificial Sequence: Synthetic oligonucleotide
gcagaucagacagccagga

SEQ ID NO: 1566273 - RNA, 19 nt, Artificial Sequence
  Description of Artificial Sequence: Synthetic oligonucleotide
cuaauccaugaucucuuau

SEQ ID NO: 1566274 - RNA, 19 nt, Artificial Sequence
  Description of Artificial Sequence: Synthetic oligonucleotide
gugucguggcuuggcuugg

SEQ ID NO: 1566275 - RNA, 19 nt, Artificial Sequence
  Description of Artificial Sequence: Synthetic oligonucleotide
ccauuaaucggaacuuucu

SEQ ID NO: 1566276 - RNA, 19 nt, Artificial Sequence
  Description of Artificial Sequence: Synthetic oligonucleotide
cguuccauuaaucggaacu

SEQ ID NO: 1566277 - RNA, 19 nt, Artificial Sequence
  Description of Artificial Sequence: Synthetic oligonucleotide
gguggugcacuucgucuuc

SEQ ID NO: 1566278 - RNA, 19 nt, Artificial Sequence
  Description of Artificial Sequence: Synthetic oligonucleotide
cugcaucacuauucccaca

SEQ ID NO: 1566279 - RNA, 19 nt, Artificial Sequence
  Description of Artificial Sequence: Synthetic oligonucleotide
aucguauguccuggcacua

SEQ ID NO: 1566280 - RNA, 19 nt, Artificial Sequence
  Description of Artificial Sequence: Synthetic oligonucleotide
guucaaagguggugcacuu

SEQ ID NO: 1566281 - RNA, 19 nt, Artificial Sequence
  Description of Artificial Sequence: Synthetic oligonucleotide
gcuaucuucagagcaugua

SEQ ID NO: 1566282 - RNA, 19 nt, Artificial Sequence
  Description of Artificial Sequence: Synthetic oligonucleotide
cuuggaccuccuugggaua

SEQ ID NO: 1566283 - RNA, 19 nt, Artificial Sequence
  Description of Artificial Sequence: Synthetic oligonucleotide
augcugugucguggcuugg

SEQ ID NO: 1566284 - RNA, 19 nt, Artificial Sequence
  Description of Artificial Sequence: Synthetic oligonucleotide
gcuguccuauauucuugga

SEQ ID NO: 1566285 - RNA, 19 nt, Artificial Sequence
  Description of Artificial Sequence: Synthetic oligonucleotide
cgagucuuuccuucuuuuc

SEQ ID NO: 1566286 - RNA, 19 nt, Artificial Sequence
  Description of Artificial Sequence: Synthetic oligonucleotide
ugcaaggaucugggcugga

SEQ ID NO: 1566287 - RNA, 19 nt, Artificial Sequence
  Description of Artificial Sequence: Synthetic oligonucleotide
cgccguuccauuaaucgga

SEQ ID NO: 1566288 - RNA, 19 nt, Artificial Sequence
  Description of Artificial Sequence: Synthetic oligonucleotide
ugucguggcuuggcuuggu

SEQ ID NO: 1566289 - RNA, 19 nt, Artificial Sequence
  Description of Artificial Sequence: Synthetic oligonucleotide
agccugccggccggaggcc

SEQ ID NO: 1566290 - RNA, 19 nt, Artificial Sequence
  Description of Artificial Sequence: Synthetic oligonucleotide
gccgcauuccaaacuucug

SEQ ID NO: 1566291 - RNA, 19 nt, Artificial Sequence
  Description of Artificial Sequence: Synthetic oligonucleotide
caaagguggugcacuucgu

SEQ ID NO: 1566292 - RNA, 19 nt, Artificial Sequence
  Description of Artificial Sequence: Synthetic oligonucleotide
cuccuugggauaccgccgu

SEQ ID NO: 1566293 - RNA, 19 nt, Artificial Sequence
  Description of Artificial Sequence: Synthetic oligonucleotide
cucauucaacagagcagau

SEQ ID NO: 1566294 - RNA, 19 nt, Artificial Sequence
  Description of Artificial Sequence: Synthetic oligonucleotide
ggauaccgccguuccauua

SEQ ID NO: 1566295 - RNA, 19 nt, Artificial Sequence
  Description of Artificial Sequence: Synthetic oligonucleotide
cacgcacuacuguccugga

SEQ ID NO: 1566296 - RNA, 19 nt, Artificial Sequence
  Description of Artificial Sequence: Synthetic oligonucleotide
cacgucuaucuugaugagu

SEQ ID NO: 1566297 - RNA, 19 nt, Artificial Sequence
  Description of Artificial Sequence: Synthetic oligonucleotide
ggcacgcacuacuguccug

SEQ ID NO: 1566298 - RNA, 19 nt, Artificial Sequence
  Description of Artificial Sequence: Synthetic oligonucleotide
ccggaguucaaauuccaau

SEQ ID NO: 1566299 - RNA, 19 nt, Artificial Sequence
  Description of Artificial Sequence: Synthetic oligonucleotide
ccuugggauaccgccguuc

SEQ ID NO: 1566300 - RNA, 19 nt, Artificial Sequence
  Description of Artificial Sequence: Synthetic oligonucleotide
cguauguccuggcacuaca

SEQ ID NO: 1566301 - RNA, 19 nt, Artificial Sequence
  Description of Artificial Sequence: Synthetic oligonucleotide
uggugcguuugaggcgcuc

SEQ ID NO: 1566302 - RNA, 19 nt, Artificial Sequence
  Description of Artificial Sequence: Synthetic oligonucleotide
cagcgagcuucacucucaa

SEQ ID NO: 1566303 - RNA, 19 nt, Artificial Sequence
  Description of Artificial Sequence: Synthetic oligonucleotide
gcugugucguggcuuggcu

SEQ ID NO: 1566304 - RNA, 19 nt, Artificial Sequence
  Description of Artificial Sequence: Synthetic oligonucleotide
gcauuccaaacuucugguu

SEQ ID NO: 1566305 - RNA, 19 nt, Artificial Sequence
  Description of Artificial Sequence: Synthetic oligonucleotide
cgcauuccaaacuucuggu

SEQ ID NO: 1566306 - RNA, 19 nt, Artificial Sequence
  Description of Artificial Sequence: Synthetic oligonucleotide
gcauugcuaagcagagacu

SEQ ID NO: 1566307 - RNA, 19 nt, Artificial Sequence
  Description of Artificial Sequence: Synthetic oligonucleotide
ccuugcuuguuacacucau

SEQ ID NO: 1566308 - RNA, 19 nt, Artificial Sequence
  Description of Artificial Sequence: Synthetic oligonucleotide
gccguuccauuaaucggaa

SEQ ID NO: 1566309 - RNA, 19 nt, Artificial Sequence
  Description of Artificial Sequence: Synthetic oligonucleotide
gaccuuugacccgccgcau

SEQ ID NO: 1566310 - RNA, 19 nt, Artificial Sequence
  Description of Artificial Sequence: Synthetic oligonucleotide
cggguuuuguucacgucua

SEQ ID NO: 1566311 - RNA, 19 nt, Artificial Sequence
  Description of Artificial Sequence: Synthetic oligonucleotide
ccgccgcauuccaaacuuc

SEQ ID NO: 1566312 - RNA, 19 nt, Artificial Sequence
  Description of Artificial Sequence: Synthetic oligonucleotide
auggugcguuugaggcgcu

SEQ ID NO: 1566313 - RNA, 19 nt, Artificial Sequence
  Description of Artificial Sequence: Synthetic oligonucleotide
ggguuuuguucacgucuau

SEQ ID NO: 1566314 - RNA, 19 nt, Artificial Sequence
  Description of Artificial Sequence: Synthetic oligonucleotide
ccugccggccggaggccac

SEQ ID NO: 1566315 - RNA, 19 nt, Artificial Sequence
  Description of Artificial Sequence: Synthetic oligonucleotide
gccugcuguccuauauucu

SEQ ID NO: 1566316 - RNA, 19 nt, Artificial Sequence
  Description of Artificial Sequence: Synthetic oligonucleotide
gccggccggaggccacugc

SEQ ID NO: 1566317 - RNA, 19 nt, Artificial Sequence
  Description of Artificial Sequence: Synthetic oligonucleotide
cgccgcauuccaaacuucu

SEQ ID NO: 1566318 - RNA, 19 nt, Artificial Sequence
  Description of Artificial Sequence: Synthetic oligonucleotide
gggauaccgccguuccauu

SEQ ID NO: 1566319 - RNA, 19 nt, Artificial Sequence
  Description of Artificial Sequence: Synthetic oligonucleotide
cccgccgcauuccaaacuu

SEQ ID NO: 1566320 - RNA, 19 nt, Artificial Sequence
  Description of Artificial Sequence: Synthetic oligonucleotide
cggugccaccuccucaaga

SEQ ID NO: 1566321 - RNA, 19 nt, Artificial Sequence
  Description of Artificial Sequence: Synthetic oligonucleotide
ccggccggaggccacugcu

SEQ ID NO: 1566322 - RNA, 19 nt, Artificial Sequence
  Description of Artificial Sequence: Synthetic oligonucleotide
gcuggacuccugggaugaa

SEQ ID NO: 1566323 - RNA, 19 nt, Artificial Sequence
  Description of Artificial Sequence: Synthetic oligonucleotide
cugccggccggaggccacu

SEQ ID NO: 1566324 - RNA, 19 nt, Artificial Sequence
  Description of Artificial Sequence: Synthetic oligonucleotide
ucagaagcgucacagauag

SEQ ID NO: 1566325 - RNA, 19 nt, Artificial Sequence
  Description of Artificial Sequence: Synthetic oligonucleotide
agaagcgucacagauagcc

SEQ ID NO: 1566326 - RNA, 19 nt, Artificial Sequence
  Description of Artificial Sequence: Synthetic oligonucleotide
aaagcuacaagaugaguug

SEQ ID NO: 1566327 - RNA, 19 nt, Artificial Sequence
  Description of Artificial Sequence: Synthetic oligonucleotide
uuuacacagagacuguggg

SEQ ID NO: 1566328 - RNA, 19 nt, Artificial Sequence
  Description of Artificial Sequence: Synthetic oligonucleotide
augaccaccguucugaagg

SEQ ID NO: 1566329 - RNA, 19 nt, Artificial Sequence
  Description of Artificial Sequence: Synthetic oligonucleotide
gauuguacccuccaagagg

SEQ ID NO: 1566330 - RNA, 19 nt, Artificial Sequence
  Description of Artificial Sequence: Synthetic oligonucleotide
aaacgcugaaggcagcgcc

SEQ ID NO: 1566331 - RNA, 19 nt, Artificial Sequence
  Description of Artificial Sequence: Synthetic oligonucleotide
aauguuaagcaccaguuuu

SEQ ID NO: 1566332 - RNA, 19 nt, Artificial Sequence
  Description of Artificial Sequence: Synthetic oligonucleotide
uugacauugaaacccacgc

SEQ ID NO: 1566333 - RNA, 19 nt, Artificial Sequence
  Description of Artificial Sequence: Synthetic oligonucleotide
cauguugacauugaaaccc

SEQ ID NO: 1566334 - RNA, 19 nt, Artificial Sequence
  Description of Artificial Sequence: Synthetic oligonucleotide
aaguacccaaaacauuugg

SEQ ID NO: 1566335 - RNA, 19 nt, Artificial Sequence
  Description of Artificial Sequence: Synthetic oligonucleotide
ucgucaaguacccaaaaca

SEQ ID NO: 1566336 - RNA, 19 nt, Artificial Sequence
  Description of Artificial Sequence: Synthetic oligonucleotide
uauuauuagaucuuugauu

SEQ ID NO: 1566337 - RNA, 19 nt, Artificial Sequence
  Description of Artificial Sequence: Synthetic oligonucleotide
gaaguugccgucaucauag

SEQ ID NO: 1566338 - RNA, 19 nt, Artificial Sequence
  Description of Artificial Sequence: Synthetic oligonucleotide
agcuaagcccaucagcugc

SEQ ID NO: 1566339 - RNA, 19 nt, Artificial Sequence
  Description of Artificial Sequence: Synthetic oligonucleotide
uuugcacucagagagagca

SEQ ID NO: 1566340 - RNA, 19 nt, Artificial Sequence
  Description of Artificial Sequence: Synthetic oligonucleotide
agcuucaagacagacaaac

SEQ ID NO: 1566341 - RNA, 19 nt, Artificial Sequence
  Description of Artificial Sequence: Synthetic oligonucleotide
cuaagguucacaaggcagg

SEQ ID NO: 1566342 - RNA, 19 nt, Artificial Sequence
  Description of Artificial Sequence: Synthetic oligonucleotide
auuugcaauuggcaugacc

SEQ ID NO: 1566343 - RNA, 19 nt, Artificial Sequence
  Description of Artificial Sequence: Synthetic oligonucleotide
aaaggccucccguugcugc

SEQ ID NO: 1566344 - RNA, 19 nt, Artificial Sequence
  Description of Artificial Sequence: Synthetic oligonucleotide
ugugaucugccacaccugg

SEQ ID NO: 1566345 - RNA, 19 nt, Artificial Sequence
  Description of Artificial Sequence: Synthetic oligonucleotide
uucucagcaggcuugacgc

SEQ ID NO: 1566346 - RNA, 19 nt, Artificial Sequence
  Description of Artificial Sequence: Synthetic oligonucleotide
auguagagaacauuggggu

SEQ ID NO: 1566347 - RNA, 19 nt, Artificial Sequence
  Description of Artificial Sequence: Synthetic oligonucleotide
uugagugguuuacacagag

SEQ ID NO: 1566348 - RNA, 19 nt, Artificial Sequence
  Description of Artificial Sequence: Synthetic oligonucleotide
uuggcagagagauuguacc

SEQ ID NO: 1566349 - RNA, 19 nt, Artificial Sequence
  Description of Artificial Sequence: Synthetic oligonucleotide
acagauagccgucagguca

SEQ ID NO: 1566350 - RNA, 19 nt, Artificial Sequence
  Description of Artificial Sequence: Synthetic oligonucleotide
aaaagcuacaagaugaguu

SEQ ID NO: 1566351 - RNA, 19 nt, Artificial Sequence
  Description of Artificial Sequence: Synthetic oligonucleotide
agagauuguacccuccaag

SEQ ID NO: 1566352 - RNA, 19 nt, Artificial Sequence
  Description of Artificial Sequence: Synthetic oligonucleotide
gugguuuacacagagacug

SEQ ID NO: 1566353 - RNA, 19 nt, Artificial Sequence
  Description of Artificial Sequence: Synthetic oligonucleotide
accagcuaagcccaucagc

SEQ ID NO: 1566354 - RNA, 19 nt, Artificial Sequence
  Description of Artificial Sequence: Synthetic oligonucleotide
gacgccuacagacagugag

SEQ ID NO: 1566355 - RNA, 19 nt, Artificial Sequence
  Description of Artificial Sequence: Synthetic oligonucleotide
ugcaguaaccuuuucuggc

SEQ ID NO: 1566356 - RNA, 19 nt, Artificial Sequence
  Description of Artificial Sequence: Synthetic oligonucleotide
uggcugagcuucaagacag

SEQ ID NO: 1566357 - RNA, 19 nt, Artificial Sequence
  Description of Artificial Sequence: Synthetic oligonucleotide
agugacacgggaaaguuuc

SEQ ID NO: 1566358 - RNA, 19 nt, Artificial Sequence
  Description of Artificial Sequence: Synthetic oligonucleotide
auagccgucaggucauggc

SEQ ID NO: 1566359 - RNA, 19 nt, Artificial Sequence
  Description of Artificial Sequence: Synthetic oligonucleotide
uguccuguguuccauguga

SEQ ID NO: 1566360 - RNA, 19 nt, Artificial Sequence
  Description of Artificial Sequence: Synthetic oligonucleotide
cuacaagaugaguugagug

SEQ ID NO: 1566361 - RNA, 19 nt, Artificial Sequence
  Description of Artificial Sequence: Synthetic oligonucleotide
uauuagaucuuugauuuuc

SEQ ID NO: 1566362 - RNA, 19 nt, Artificial Sequence
  Description of Artificial Sequence: Synthetic oligonucleotide
uauccucauugucaacucg

SEQ ID NO: 1566363 - RNA, 19 nt, Artificial Sequence
  Description of Artificial Sequence: Synthetic oligonucleotide
aacacaugcuucagaagcg

SEQ ID NO: 1566364 - RNA, 19 nt, Artificial Sequence
  Description of Artificial Sequence: Synthetic oligonucleotide
acacgggaaaguuucuugg

SEQ ID NO: 1566365 - RNA, 19 nt, Artificial Sequence
  Description of Artificial Sequence: Synthetic oligonucleotide
aaucaaauguuaagcacca

SEQ ID NO: 1566366 - RNA, 19 nt, Artificial Sequence
  Description of Artificial Sequence: Synthetic oligonucleotide
auuauccucauugucaacu

SEQ ID NO: 1566367 - RNA, 19 nt, Artificial Sequence
  Description of Artificial Sequence: Synthetic oligonucleotide
agcaucaaagccugaugac

SEQ ID NO: 1566368 - RNA, 19 nt, Artificial Sequence
  Description of Artificial Sequence: Synthetic oligonucleotide
agccugaugacaccaguac

SEQ ID NO: 1566369 - RNA, 19 nt, Artificial Sequence
  Description of Artificial Sequence: Synthetic oligonucleotide
aaauguuaagcaccaguuu

SEQ ID NO: 1566370 - RNA, 19 nt, Artificial Sequence
  Description of Artificial Sequence: Synthetic oligonucleotide
uuguggguaagaaucaaau

SEQ ID NO: 1566371 - RNA, 19 nt, Artificial Sequence
  Description of Artificial Sequence: Synthetic oligonucleotide
auuggcaugaccaccguuc

SEQ ID NO: 1566372 - RNA, 19 nt, Artificial Sequence
  Description of Artificial Sequence: Synthetic oligonucleotide
ucccucaagagccagcaca

SEQ ID NO: 1566373 - RNA, 19 nt, Artificial Sequence
  Description of Artificial Sequence: Synthetic oligonucleotide
ucauuugcaauuggcauga

SEQ ID NO: 1566374 - RNA, 19 nt, Artificial Sequence
  Description of Artificial Sequence: Synthetic oligonucleotide
gaggaucuugcucacauuc

SEQ ID NO: 1566375 - RNA, 19 nt, Artificial Sequence
  Description of Artificial Sequence: Synthetic oligonucleotide
ugugccuguguguugcgcg

SEQ ID NO: 1566376 - RNA, 19 nt, Artificial Sequence
  Description of Artificial Sequence: Synthetic oligonucleotide
gacauguagagaacauugg

SEQ ID NO: 1566377 - RNA, 19 nt, Artificial Sequence
  Description of Artificial Sequence: Synthetic oligonucleotide
agauuguacccuccaagag

SEQ ID NO: 1566378 - RNA, 19 nt, Artificial Sequence
  Description of Artificial Sequence: Synthetic oligonucleotide
agcaacucugcccaaguug

SEQ ID NO: 1566379 - RNA, 19 nt, Artificial Sequence
  Description of Artificial Sequence: Synthetic oligonucleotide
ugcuucagaagcgucacag

SEQ ID NO: 1566380 - RNA, 19 nt, Artificial Sequence
  Description of Artificial Sequence: Synthetic oligonucleotide
agcagaaacacaugcuuca

SEQ ID NO: 1566381 - RNA, 19 nt, Artificial Sequence
  Description of Artificial Sequence: Synthetic oligonucleotide
cacaguggaggacaaacgc

SEQ ID NO: 1566382 - RNA, 19 nt, Artificial Sequence
  Description of Artificial Sequence: Synthetic oligonucleotide
acuaagguucacaaggcag

SEQ ID NO: 1566383 - RNA, 19 nt, Artificial Sequence
  Description of Artificial Sequence: Synthetic oligonucleotide
ucaaguccacccgugaaag

SEQ ID NO: 1566384 - RNA, 19 nt, Artificial Sequence
  Description of Artificial Sequence: Synthetic oligonucleotide
cucacuaagcugugaaccc

SEQ ID NO: 1566385 - RNA, 19 nt, Artificial Sequence
  Description of Artificial Sequence: Synthetic oligonucleotide
auugucaacucgguucagc

SEQ ID NO: 1566386 - RNA, 19 nt, Artificial Sequence
  Description of Artificial Sequence: Synthetic oligonucleotide
aagaggugugggauggccc

SEQ ID NO: 1566387 - RNA, 19 nt, Artificial Sequence
  Description of Artificial Sequence: Synthetic oligonucleotide
cuucucagcaggcuugacg

SEQ ID NO: 1566388 - RNA, 19 nt, Artificial Sequence
  Description of Artificial Sequence: Synthetic oligonucleotide
aagcgucacagauagccgu

SEQ ID NO: 1566389 - RNA, 19 nt, Artificial Sequence
  Description of Artificial Sequence: Synthetic oligonucleotide
ggacacaagagugacacgg

SEQ ID NO: 1566390 - RNA, 19 nt, Artificial Sequence
  Description of Artificial Sequence: Synthetic oligonucleotide
cauggaguggacagcauug

SEQ ID NO: 1566391 - RNA, 19 nt, Artificial Sequence
  Description of Artificial Sequence: Synthetic oligonucleotide
gacauugaaacccacgccu

SEQ ID NO: 1566392 - RNA, 19 nt, Artificial Sequence
  Description of Artificial Sequence: Synthetic oligonucleotide
uugucaacucgguucagca

SEQ ID NO: 1566393 - RNA, 19 nt, Artificial Sequence
  Description of Artificial Sequence: Synthetic oligonucleotide
uucgugugcaucuccagac

SEQ ID NO: 1566394 - RNA, 19 nt, Artificial Sequence
  Description of Artificial Sequence: Synthetic oligonucleotide
ggaggacaaacgcugaagg

SEQ ID NO: 1566395 - RNA, 19 nt, Artificial Sequence
  Description of Artificial Sequence: Synthetic oligonucleotide
gucaacucgguucagcaac

SEQ ID NO: 1566396 - RNA, 19 nt, Artificial Sequence
  Description of Artificial Sequence: Synthetic oligonucleotide
gacacgggaaaguuucuug

SEQ ID NO: 1566397 - RNA, 19 nt, Artificial Sequence
  Description of Artificial Sequence: Synthetic oligonucleotide
uucggggcuacaguggugg

SEQ ID NO: 1566398 - RNA, 19 nt, Artificial Sequence
  Description of Artificial Sequence: Synthetic oligonucleotide
uucgucaaguacccaaaac

SEQ ID NO: 1566399 - RNA, 19 nt, Artificial Sequence
  Description of Artificial Sequence: Synthetic oligonucleotide
agagccauagaaaacuucu

SEQ ID NO: 1566400 - RNA, 19 nt, Artificial Sequence
  Description of Artificial Sequence: Synthetic oligonucleotide
guugacauugaaacccacg

SEQ ID NO: 1566401 - RNA, 19 nt, Artificial Sequence
  Description of Artificial Sequence: Synthetic oligonucleotide
gaggacaaacgcugaaggc

SEQ ID NO: 1566402 - RNA, 19 nt, Artificial Sequence
  Description of Artificial Sequence: Synthetic oligonucleotide
ucuggggcaaacucauuug

SEQ ID NO: 1566403 - RNA, 19 nt, Artificial Sequence
  Description of Artificial Sequence: Synthetic oligonucleotide
ugguuccuccuccauaggc

SEQ ID NO: 1566404 - RNA, 19 nt, Artificial Sequence
  Description of Artificial Sequence: Synthetic oligonucleotide
aggacaaacgcugaaggca

SEQ ID NO: 1566405 - RNA, 19 nt, Artificial Sequence
  Description of Artificial Sequence: Synthetic oligonucleotide
aaguugccgucaucauagc

SEQ ID NO: 1566406 - RNA, 19 nt, Artificial Sequence
  Description of Artificial Sequence: Synthetic oligonucleotide
ugacaccaguaccacaucu

SEQ ID NO: 1566407 - RNA, 19 nt, Artificial Sequence
  Description of Artificial Sequence: Synthetic oligonucleotide
acccgugaaagccauguug

SEQ ID NO: 1566408 - RNA, 19 nt, Artificial Sequence
  Description of Artificial Sequence: Synthetic oligonucleotide
ugcacucagagagagcacc

SEQ ID NO: 1566409 - RNA, 19 nt, Artificial Sequence
  Description of Artificial Sequence: Synthetic oligonucleotide
acaggccucuucuuucucg

SEQ ID NO: 1566410 - RNA, 19 nt, Artificial Sequence
  Description of Artificial Sequence: Synthetic oligonucleotide
acaagaugaguugaguggu

SEQ ID NO: 1566411 - RNA, 19 nt, Artificial Sequence
  Description of Artificial Sequence: Synthetic oligonucleotide
uagccgucaggucauggcc

SEQ ID NO: 1566412 - RNA, 19 nt, Artificial Sequence
  Description of Artificial Sequence: Synthetic oligonucleotide
caguggaggacaaacgcug

SEQ ID NO: 1566413 - RNA, 19 nt, Artificial Sequence
  Description of Artificial Sequence: Synthetic oligonucleotide
aagagugacacgggaaagu

SEQ ID NO: 1566414 - RNA, 19 nt, Artificial Sequence
  Description of Artificial Sequence: Synthetic oligonucleotide
gaugaguugagugguuuac

SEQ ID NO: 1566415 - RNA, 19 nt, Artificial Sequence
  Description of Artificial Sequence: Synthetic oligonucleotide
gaagcgucacagauagccg

SEQ ID NO: 1566416 - RNA, 19 nt, Artificial Sequence
  Description of Artificial Sequence: Synthetic oligonucleotide
acaccugguguucgugugc

SEQ ID NO: 1566417 - RNA, 19 nt, Artificial Sequence
  Description of Artificial Sequence: Synthetic oligonucleotide
uaggcucuuccuccgaucu

SEQ ID NO: 1566418 - RNA, 19 nt, Artificial Sequence
  Description of Artificial Sequence: Synthetic oligonucleotide
ggacauguagagaacauug

SEQ ID NO: 1566419 - RNA, 19 nt, Artificial Sequence
  Description of Artificial Sequence: Synthetic oligonucleotide
uugacgccuacagacagug

SEQ ID NO: 1566420 - RNA, 19 nt, Artificial Sequence
  Description of Artificial Sequence: Synthetic oligonucleotide
ugcuucgucaaguacccaa

SEQ ID NO: 1566421 - RNA, 19 nt, Artificial Sequence
  Description of Artificial Sequence: Synthetic oligonucleotide
uucuggcagaggcucaagc

SEQ ID NO: 1566422 - RNA, 19 nt, Artificial Sequence
  Description of Artificial Sequence: Synthetic oligonucleotide
caagagccagcacaauccg

SEQ ID NO: 1566423 - RNA, 19 nt, Artificial Sequence
  Description of Artificial Sequence: Synthetic oligonucleotide
cuguauuauuagaucuuug

SEQ ID NO: 1566424 - RNA, 19 nt, Artificial Sequence
  Description of Artificial Sequence: Synthetic oligonucleotide
gggauuguggguaagaauc

SEQ ID NO: 1566425 - RNA, 19 nt, Artificial Sequence
  Description of Artificial Sequence: Synthetic oligonucleotide
gaaaguuucuuggcugagc

SEQ ID NO: 1566426 - RNA, 19 nt, Artificial Sequence
  Description of Artificial Sequence: Synthetic oligonucleotide
cucaagagccagcacaauc

SEQ ID NO: 1566427 - RNA, 19 nt, Artificial Sequence
  Description of Artificial Sequence: Synthetic oligonucleotide
cuucaaucagagagugccc

SEQ ID NO: 1566428 - RNA, 19 nt, Artificial Sequence
  Description of Artificial Sequence: Synthetic oligonucleotide
uguacccuccaagaggugu

SEQ ID NO: 1566429 - RNA, 19 nt, Artificial Sequence
  Description of Artificial Sequence: Synthetic oligonucleotide
acuuucuccauggagugga

SEQ ID NO: 1566430 - RNA, 19 nt, Artificial Sequence
  Description of Artificial Sequence: Synthetic oligonucleotide
uuagaucuuugauuuucau

SEQ ID NO: 1566431 - RNA, 19 nt, Artificial Sequence
  Description of Artificial Sequence: Synthetic oligonucleotide
ucacuaagcugugaacccc

SEQ ID NO: 1566432 - RNA, 19 nt, Artificial Sequence
  Description of Artificial Sequence: Synthetic oligonucleotide
ugagugguuuacacagaga

SEQ ID NO: 1566433 - RNA, 19 nt, Artificial Sequence
  Description of Artificial Sequence: Synthetic oligonucleotide
cuggggcaaacucauuugc

SEQ ID NO: 1566434 - RNA, 19 nt, Artificial Sequence
  Description of Artificial Sequence: Synthetic oligonucleotide
aagcuacaagaugaguuga

SEQ ID NO: 1566435 - RNA, 19 nt, Artificial Sequence
  Description of Artificial Sequence: Synthetic oligonucleotide
ucaacucgguucagcaacu

SEQ ID NO: 1566436 - RNA, 19 nt, Artificial Sequence
  Description of Artificial Sequence: Synthetic oligonucleotide
ucaaucagagagugcccca

SEQ ID NO: 1566437 - RNA, 19 nt, Artificial Sequence
  Description of Artificial Sequence: Synthetic oligonucleotide
uguguuccaugugaucugc

SEQ ID NO: 1566438 - RNA, 19 nt, Artificial Sequence
  Description of Artificial Sequence: Synthetic oligonucleotide
uugccgucaucauagcggu

SEQ ID NO: 1566439 - RNA, 19 nt, Artificial Sequence
  Description of Artificial Sequence: Synthetic oligonucleotide
ggaucuugcucacauucag

SEQ ID NO: 1566440 - RNA, 19 nt, Artificial Sequence
  Description of Artificial Sequence: Synthetic oligonucleotide
cacgggaaaguuucuuggc

SEQ ID NO: 1566441 - RNA, 19 nt, Artificial Sequence
  Description of Artificial Sequence: Synthetic oligonucleotide
aucuggggcaaacucauuu

SEQ ID NO: 1566442 - RNA, 19 nt, Artificial Sequence
  Description of Artificial Sequence: Synthetic oligonucleotide
uccgaucucuucucagcag

SEQ ID NO: 1566443 - RNA, 19 nt, Artificial Sequence
  Description of Artificial Sequence: Synthetic oligonucleotide
uguuaagcaccaguuuuaa

SEQ ID NO: 1566444 - RNA, 19 nt, Artificial Sequence
  Description of Artificial Sequence: Synthetic oligonucleotide
aguacuugcuguggaaugu

SEQ ID NO: 1566445 - RNA, 19 nt, Artificial Sequence
  Description of Artificial Sequence: Synthetic oligonucleotide
gcaauuggcaugaccaccg

SEQ ID NO: 1566446 - RNA, 19 nt, Artificial Sequence
  Description of Artificial Sequence: Synthetic oligonucleotide
uccucauugucaacucggu

SEQ ID NO: 1566447 - RNA, 19 nt, Artificial Sequence
  Description of Artificial Sequence: Synthetic oligonucleotide
cagcaccccacuaagguuc

SEQ ID NO: 1566448 - RNA, 19 nt, Artificial Sequence
  Description of Artificial Sequence: Synthetic oligonucleotide
aauccggccaccagcuaag

SEQ ID NO: 1566449 - RNA, 19 nt, Artificial Sequence
  Description of Artificial Sequence: Synthetic oligonucleotide
auuagaucuuugauuuuca

SEQ ID NO: 1566450 - RNA, 19 nt, Artificial Sequence
  Description of Artificial Sequence: Synthetic oligonucleotide
guauuauuagaucuuugau

SEQ ID NO: 1566451 - RNA, 19 nt, Artificial Sequence
  Description of Artificial Sequence: Synthetic oligonucleotide
ucccaugguguacauccca

SEQ ID NO: 1566452 - RNA, 19 nt, Artificial Sequence
  Description of Artificial Sequence: Synthetic oligonucleotide
caugugaucugccacaccu

SEQ ID NO: 1566453 - RNA, 19 nt, Artificial Sequence
  Description of Artificial Sequence: Synthetic oligonucleotide
aacucugcccaaguugcca

SEQ ID NO: 1566454 - RNA, 19 nt, Artificial Sequence
  Description of Artificial Sequence: Synthetic oligonucleotide
aauuggcaugaccaccguu

SEQ ID NO: 1566455 - RNA, 19 nt, Artificial Sequence
  Description of Artificial Sequence: Synthetic oligonucleotide
ugggauuguggguaagaau

SEQ ID NO: 1566456 - RNA, 19 nt, Artificial Sequence
  Description of Artificial Sequence: Synthetic oligonucleotide
aagaugaguugagugguuu

SEQ ID NO: 1566457 - RNA, 19 nt, Artificial Sequence
  Description of Artificial Sequence: Synthetic oligonucleotide
gauagccgucaggucaugg

SEQ ID NO: 1566458 - RNA, 19 nt, Artificial Sequence
  Description of Artificial Sequence: Synthetic oligonucleotide
ugguuuacacagagacugu

SEQ ID NO: 1566459 - RNA, 19 nt, Artificial Sequence
  Description of Artificial Sequence: Synthetic oligonucleotide
guacucugcaucucccaug

SEQ ID NO: 1566460 - RNA, 19 nt, Artificial Sequence
  Description of Artificial Sequence: Synthetic oligonucleotide
caaagccugaugacaccag

SEQ ID NO: 1566461 - RNA, 19 nt, Artificial Sequence
  Description of Artificial Sequence: Synthetic oligonucleotide
aaggcagcgccaguacuug

SEQ ID NO: 1566462 - RNA, 19 nt, Artificial Sequence
  Description of Artificial Sequence: Synthetic oligonucleotide
agcgccaguacuugcugug

SEQ ID NO: 1566463 - RNA, 19 nt, Artificial Sequence
  Description of Artificial Sequence: Synthetic oligonucleotide
ccucacuaagcugugaacc

SEQ ID NO: 1566464 - RNA, 19 nt, Artificial Sequence
  Description of Artificial Sequence: Synthetic oligonucleotide
uguguugcgcgcuguccug

SEQ ID NO: 1566465 - RNA, 19 nt, Artificial Sequence
  Description of Artificial Sequence: Synthetic oligonucleotide
caggggaaccaccagcgug

SEQ ID NO: 1566466 - RNA, 19 nt, Artificial Sequence
  Description of Artificial Sequence: Synthetic oligonucleotide
caaauguuaagcaccaguu

SEQ ID NO: 1566467 - RNA, 19 nt, Artificial Sequence
  Description of Artificial Sequence: Synthetic oligonucleotide
cagagagauuguacccucc

SEQ ID NO: 1566468 - RNA, 19 nt, Artificial Sequence
  Description of Artificial Sequence: Synthetic oligonucleotide
ugucaacucgguucagcaa

SEQ ID NO: 1566469 - RNA, 19 nt, Artificial Sequence
  Description of Artificial Sequence: Synthetic oligonucleotide
cuguguuccaugugaucug

SEQ ID NO: 1566470 - RNA, 19 nt, Artificial Sequence
  Description of Artificial Sequence: Synthetic oligonucleotide
ucuuucucgggcgucccca

SEQ ID NO: 1566471 - RNA, 19 nt, Artificial Sequence
  Description of Artificial Sequence: Synthetic oligonucleotide
ggacaaacgcugaaggcag

SEQ ID NO: 1566472 - RNA, 19 nt, Artificial Sequence
  Description of Artificial Sequence: Synthetic oligonucleotide
cuuugcacucagagagagc

SEQ ID NO: 1566473 - RNA, 19 nt, Artificial Sequence
  Description of Artificial Sequence: Synthetic oligonucleotide
gucauuguagaaggccugc

SEQ ID NO: 1566474 - RNA, 19 nt, Artificial Sequence
  Description of Artificial Sequence: Synthetic oligonucleotide
ugaccaccguucugaaggc

SEQ ID NO: 1566475 - RNA, 19 nt, Artificial Sequence
  Description of Artificial Sequence: Synthetic oligonucleotide
ucugugugccuguguguug

SEQ ID NO: 1566476 - RNA, 19 nt, Artificial Sequence
  Description of Artificial Sequence: Synthetic oligonucleotide
ucugcccaaguugccacag

SEQ ID NO: 1566477 - RNA, 19 nt, Artificial Sequence
  Description of Artificial Sequence: Synthetic oligonucleotide
ugcccaccucaucuggugc

SEQ ID NO: 1566478 - RNA, 19 nt, Artificial Sequence
  Description of Artificial Sequence: Synthetic oligonucleotide
ucucgggcguccccagggg

SEQ ID NO: 1566479 - RNA, 19 nt, Artificial Sequence
  Description of Artificial Sequence: Synthetic oligonucleotide
agaaaggccucccguugcu

SEQ ID NO: 1566480 - RNA, 19 nt, Artificial Sequence
  Description of Artificial Sequence: Synthetic oligonucleotide
aaugaggaucuugcucaca

SEQ ID NO: 1566481 - RNA, 19 nt, Artificial Sequence
  Description of Artificial Sequence: Synthetic oligonucleotide
guagaaggccugcuggguc

SEQ ID NO: 1566482 - RNA, 19 nt, Artificial Sequence
  Description of Artificial Sequence: Synthetic oligonucleotide
acauugaaacccacgccug

SEQ ID NO: 1566483 - RNA, 19 nt, Artificial Sequence
  Description of Artificial Sequence: Synthetic oligonucleotide
cucccguugcugcugcacg

SEQ ID NO: 1566484 - RNA, 19 nt, Artificial Sequence
  Description of Artificial Sequence: Synthetic oligonucleotide
acaguggaggacaaacgcu

SEQ ID NO: 1566485 - RNA, 19 nt, Artificial Sequence
  Description of Artificial Sequence: Synthetic oligonucleotide
gcuugacgccuacagacag

SEQ ID NO: 1566486 - RNA, 19 nt, Artificial Sequence
  Description of Artificial Sequence: Synthetic oligonucleotide
agcuacaagaugaguugag

SEQ ID NO: 1566487 - RNA, 19 nt, Artificial Sequence
  Description of Artificial Sequence: Synthetic oligonucleotide
aaggccucccguugcugcu

SEQ ID NO: 1566488 - RNA, 19 nt, Artificial Sequence
  Description of Artificial Sequence: Synthetic oligonucleotide
ugugcccaccucaucuggu

SEQ ID NO: 1566489 - RNA, 19 nt, Artificial Sequence
  Description of Artificial Sequence: Synthetic oligonucleotide
cacagagacugugggauug

SEQ ID NO: 1566490 - RNA, 19 nt, Artificial Sequence
  Description of Artificial Sequence: Synthetic oligonucleotide
agugguuuacacagagacu

SEQ ID NO: 1566491 - RNA, 19 nt, Artificial Sequence
  Description of Artificial Sequence: Synthetic oligonucleotide
agaugaguugagugguuua

SEQ ID NO: 1566492 - RNA, 19 nt, Artificial Sequence
  Description of Artificial Sequence: Synthetic oligonucleotide
uuccgcgugucugugugcc

SEQ ID NO: 1566493 - RNA, 19 nt, Artificial Sequence
  Description of Artificial Sequence: Synthetic oligonucleotide
guucgugugcaucuccaga

SEQ ID NO: 1566494 - RNA, 19 nt, Artificial Sequence
  Description of Artificial Sequence: Synthetic oligonucleotide
ugugugccuguguguugcg

SEQ ID NO: 1566495 - RNA, 19 nt, Artificial Sequence
  Description of Artificial Sequence: Synthetic oligonucleotide
caugaccaccguucugaag

SEQ ID NO: 1566496 - RNA, 19 nt, Artificial Sequence
  Description of Artificial Sequence: Synthetic oligonucleotide
ugucccucacuaagcugug

SEQ ID NO: 1566497 - RNA, 19 nt, Artificial Sequence
  Description of Artificial Sequence: Synthetic oligonucleotide
aggcagcgccaguacuugc

SEQ ID NO: 1566498 - RNA, 19 nt, Artificial Sequence
  Description of Artificial Sequence: Synthetic oligonucleotide
cacaccugguguucgugug

SEQ ID NO: 1566499 - RNA, 19 nt, Artificial Sequence
  Description of Artificial Sequence: Synthetic oligonucleotide
accagcgugugcuuggcuu

SEQ ID NO: 1566500 - RNA, 19 nt, Artificial Sequence
  Description of Artificial Sequence: Synthetic oligonucleotide
aacgcugaaggcagcgcca

SEQ ID NO: 1566501 - RNA, 19 nt, Artificial Sequence
  Description of Artificial Sequence: Synthetic oligonucleotide
cagcauuggcaguuggguc

SEQ ID NO: 1566502 - RNA, 19 nt, Artificial Sequence
  Description of Artificial Sequence: Synthetic oligonucleotide
uccggccaccagcuaagcc

SEQ ID NO: 1566503 - RNA, 19 nt, Artificial Sequence
  Description of Artificial Sequence: Synthetic oligonucleotide
ucccguugcugcugcacgc

SEQ ID NO: 1566504 - RNA, 19 nt, Artificial Sequence
  Description of Artificial Sequence: Synthetic oligonucleotide
gacugugggauugugggua

SEQ ID NO: 1566505 - RNA, 19 nt, Artificial Sequence
  Description of Artificial Sequence: Synthetic oligonucleotide
acgccuacagacagugagg

SEQ ID NO: 1566506 - RNA, 19 nt, Artificial Sequence
  Description of Artificial Sequence: Synthetic oligonucleotide
cugucccucacuaagcugu

SEQ ID NO: 1566507 - RNA, 19 nt, Artificial Sequence
  Description of Artificial Sequence: Synthetic oligonucleotide
gagagauuguacccuccaa

SEQ ID NO: 1566508 - RNA, 19 nt, Artificial Sequence
  Description of Artificial Sequence: Synthetic oligonucleotide
aucaaauguuaagcaccag

SEQ ID NO: 1566509 - RNA, 19 nt, Artificial Sequence
  Description of Artificial Sequence: Synthetic oligonucleotide
uaagcccaucagcugcuuc

SEQ ID NO: 1566510 - RNA, 19 nt, Artificial Sequence
  Description of Artificial Sequence: Synthetic oligonucleotide
ccgaucucuucucagcagg

SEQ ID NO: 1566511 - RNA, 19 nt, Artificial Sequence
  Description of Artificial Sequence: Synthetic oligonucleotide
ggggucauuguagaaggcc

SEQ ID NO: 1566512 - RNA, 19 nt, Artificial Sequence
  Description of Artificial Sequence: Synthetic oligonucleotide
gguuuacacagagacugug

SEQ ID NO: 1566513 - RNA, 19 nt, Artificial Sequence
  Description of Artificial Sequence: Synthetic oligonucleotide
auuguggguaagaaucaaa

SEQ ID NO: 1566514 - RNA, 19 nt, Artificial Sequence
  Description of Artificial Sequence: Synthetic oligonucleotide
cagacaaacaaaggagaga

SEQ ID NO: 1566515 - RNA, 19 nt, Artificial Sequence
  Description of Artificial Sequence: Synthetic oligonucleotide
agagugacacgggaaaguu

SEQ ID NO: 1566516 - RNA, 19 nt, Artificial Sequence
  Description of Artificial Sequence: Synthetic oligonucleotide
cacaagagugacacgggaa

SEQ ID NO: 1566517 - RNA, 19 nt, Artificial Sequence
  Description of Artificial Sequence: Synthetic oligonucleotide
gauuguggguaagaaucaa

SEQ ID NO: 1566518 - RNA, 19 nt, Artificial Sequence
  Description of Artificial Sequence: Synthetic oligonucleotide
cacaugcuucagaagcguc

SEQ ID NO: 1566519 - RNA, 19 nt, Artificial Sequence
  Description of Artificial Sequence: Synthetic oligonucleotide
aggggaaccaccagcgugu

SEQ ID NO: 1566520 - RNA, 19 nt, Artificial Sequence
  Description of Artificial Sequence: Synthetic oligonucleotide
uugcacucagagagagcac

SEQ ID NO: 1566521 - RNA, 19 nt, Artificial Sequence
  Description of Artificial Sequence: Synthetic oligonucleotide
agcgucacagauagccguc

SEQ ID NO: 1566522 - RNA, 19 nt, Artificial Sequence
  Description of Artificial Sequence: Synthetic oligonucleotide
uccacuuccugggaacgaa

SEQ ID NO: 1566523 - RNA, 19 nt, Artificial Sequence
  Description of Artificial Sequence: Synthetic oligonucleotide
accaccguucugaaggcug

SEQ ID NO: 1566524 - RNA, 19 nt, Artificial Sequence
  Description of Artificial Sequence: Synthetic oligonucleotide
gcaguaaccuuuucuggca

SEQ ID NO: 1566525 - RNA, 19 nt, Artificial Sequence
  Description of Artificial Sequence: Synthetic oligonucleotide
caacucugcccaaguugcc

SEQ ID NO: 1566526 - RNA, 19 nt, Artificial Sequence
  Description of Artificial Sequence: Synthetic oligonucleotide
cugggaacgaaguugccgu

SEQ ID NO: 1566527 - RNA, 19 nt, Artificial Sequence
  Description of Artificial Sequence: Synthetic oligonucleotide
ccuacagacagugaggcca

SEQ ID NO: 1566528 - RNA, 19 nt, Artificial Sequence
  Description of Artificial Sequence: Synthetic oligonucleotide
gccgucaucauagcggugc

SEQ ID NO: 1566529 - RNA, 19 nt, Artificial Sequence
  Description of Artificial Sequence: Synthetic oligonucleotide
uggcaugaccaccguucug

SEQ ID NO: 1566530 - RNA, 19 nt, Artificial Sequence
  Description of Artificial Sequence: Synthetic oligonucleotide
auguuaagcaccaguuuua

SEQ ID NO: 1566531 - RNA, 19 nt, Artificial Sequence
  Description of Artificial Sequence: Synthetic oligonucleotide
gggaaaguuucuuggcuga

SEQ ID NO: 1566532 - RNA, 19 nt, Artificial Sequence
  Description of Artificial Sequence: Synthetic oligonucleotide
gccugaugacaccaguacc

SEQ ID NO: 1566533 - RNA, 19 nt, Artificial Sequence
  Description of Artificial Sequence: Synthetic oligonucleotide
caaacgcugaaggcagcgc

SEQ ID NO: 1566534 - RNA, 19 nt, Artificial Sequence
  Description of Artificial Sequence: Synthetic oligonucleotide
cuuucucgggcguccccag

SEQ ID NO: 1566535 - RNA, 19 nt, Artificial Sequence
  Description of Artificial Sequence: Synthetic oligonucleotide
gguguucgugugcaucucc

SEQ ID NO: 1566536 - RNA, 19 nt, Artificial Sequence
  Description of Artificial Sequence: Synthetic oligonucleotide
aaacccacgccuggcccug

SEQ ID NO: 1566537 - RNA, 19 nt, Artificial Sequence
  Description of Artificial Sequence: Synthetic oligonucleotide
cacuuucuccauggagugg

SEQ ID NO: 1566538 - RNA, 19 nt, Artificial Sequence
  Description of Artificial Sequence: Synthetic oligonucleotide
guacccuccaagaggugug

SEQ ID NO: 1566539 - RNA, 19 nt, Artificial Sequence
  Description of Artificial Sequence: Synthetic oligonucleotide
uguugcgcgcuguccugug

SEQ ID NO: 1566540 - RNA, 19 nt, Artificial Sequence
  Description of Artificial Sequence: Synthetic oligonucleotide
gcugcuucgucaaguaccc

SEQ ID NO: 1566541 - RNA, 19 nt, Artificial Sequence
  Description of Artificial Sequence: Synthetic oligonucleotide
uccccaggggaaccaccag

SEQ ID NO: 1566542 - RNA, 19 nt, Artificial Sequence
  Description of Artificial Sequence: Synthetic oligonucleotide
ccugggaacgaaguugccg

SEQ ID NO: 1566543 - RNA, 19 nt, Artificial Sequence
  Description of Artificial Sequence: Synthetic oligonucleotide
acugugggauuguggguaa

SEQ ID NO: 1566544 - RNA, 19 nt, Artificial Sequence
  Description of Artificial Sequence: Synthetic oligonucleotide
ugcugcacgccuggugucc

SEQ ID NO: 1566545 - RNA, 19 nt, Artificial Sequence
  Description of Artificial Sequence: Synthetic oligonucleotide
gugccuguguguugcgcgc

SEQ ID NO: 1566546 - RNA, 19 nt, Artificial Sequence
  Description of Artificial Sequence: Synthetic oligonucleotide
gacaaacgcugaaggcagc

SEQ ID NO: 1566547 - RNA, 19 nt, Artificial Sequence
  Description of Artificial Sequence: Synthetic oligonucleotide
ugaggaucuugcucacauu

SEQ ID NO: 1566548 - RNA, 19 nt, Artificial Sequence
  Description of Artificial Sequence: Synthetic oligonucleotide
caauccggccaccagcuaa

SEQ ID NO: 1566549 - RNA, 19 nt, Artificial Sequence
  Description of Artificial Sequence: Synthetic oligonucleotide
uuguacccuccaagaggug

SEQ ID NO: 1566550 - RNA, 19 nt, Artificial Sequence
  Description of Artificial Sequence: Synthetic oligonucleotide
gugguuccuccuccauagg

SEQ ID NO: 1566551 - RNA, 19 nt, Artificial Sequence
  Description of Artificial Sequence: Synthetic oligonucleotide
ggggcaaacucauuugcaa

SEQ ID NO: 1566552 - RNA, 19 nt, Artificial Sequence
  Description of Artificial Sequence: Synthetic oligonucleotide
ccuuugcacucagagagag

SEQ ID NO: 1566553 - RNA, 19 nt, Artificial Sequence
  Description of Artificial Sequence: Synthetic oligonucleotide
ccuccgaucucuucucagc

SEQ ID NO: 1566554 - RNA, 19 nt, Artificial Sequence
  Description of Artificial Sequence: Synthetic oligonucleotide
ugggaacgaaguugccguc

SEQ ID NO: 1566555 - RNA, 19 nt, Artificial Sequence
  Description of Artificial Sequence: Synthetic oligonucleotide
auuuggcagagagauugua

SEQ ID NO: 1566556 - RNA, 19 nt, Artificial Sequence
  Description of Artificial Sequence: Synthetic oligonucleotide
cccaaaacauuuggcagag

SEQ ID NO: 1566557 - RNA, 19 nt, Artificial Sequence
  Description of Artificial Sequence: Synthetic oligonucleotide
gcuuccgcgugucugugug

SEQ ID NO: 1566558 - RNA, 19 nt, Artificial Sequence
  Description of Artificial Sequence: Synthetic oligonucleotide
ugacacgggaaaguuucuu

SEQ ID NO: 1566559 - RNA, 19 nt, Artificial Sequence
  Description of Artificial Sequence: Synthetic oligonucleotide
ccaguaccacaucuggggc

SEQ ID NO: 1566560 - RNA, 19 nt, Artificial Sequence
  Description of Artificial Sequence: Synthetic oligonucleotide
ugacgccuacagacaguga

SEQ ID NO: 1566561 - RNA, 19 nt, Artificial Sequence
  Description of Artificial Sequence: Synthetic oligonucleotide
ggaaaguuucuuggcugag

SEQ ID NO: 1566562 - RNA, 19 nt, Artificial Sequence
  Description of Artificial Sequence: Synthetic oligonucleotide
cccgugaaagccauguuga

SEQ ID NO: 1566563 - RNA, 19 nt, Artificial Sequence
  Description of Artificial Sequence: Synthetic oligonucleotide
ggaaccaccagcgugugcu

SEQ ID NO: 1566564 - RNA, 19 nt, Artificial Sequence
  Description of Artificial Sequence: Synthetic oligonucleotide
gagagcaccgaggcaggac

SEQ ID NO: 1566565 - RNA, 19 nt, Artificial Sequence
  Description of Artificial Sequence: Synthetic oligonucleotide
cuuccgcgugucugugugc

SEQ ID NO: 1566566 - RNA, 19 nt, Artificial Sequence
  Description of Artificial Sequence: Synthetic oligonucleotide
gaacgaaguugccgucauc

SEQ ID NO: 1566567 - RNA, 19 nt, Artificial Sequence
  Description of Artificial Sequence: Synthetic oligonucleotide
uugcgcgcuguccuguguu

SEQ ID NO: 1566568 - RNA, 19 nt, Artificial Sequence
  Description of Artificial Sequence: Synthetic oligonucleotide
ggcaggacacaagagugac

SEQ ID NO: 1566569 - RNA, 19 nt, Artificial Sequence
  Description of Artificial Sequence: Synthetic oligonucleotide
caccagcuaagcccaucag

SEQ ID NO: 1566570 - RNA, 19 nt, Artificial Sequence
  Description of Artificial Sequence: Synthetic oligonucleotide
caucauagcggugcaggga

SEQ ID NO: 1566571 - RNA, 19 nt, Artificial Sequence
  Description of Artificial Sequence: Synthetic oligonucleotide
ggauuguggguaagaauca

SEQ ID NO: 1566572 - RNA, 19 nt, Artificial Sequence
  Description of Artificial Sequence: Synthetic oligonucleotide
gcagagagauuguacccuc

SEQ ID NO: 1566573 - RNA, 19 nt, Artificial Sequence
  Description of Artificial Sequence: Synthetic oligonucleotide
cuguccuguguuccaugug

SEQ ID NO: 1566574 - RNA, 19 nt, Artificial Sequence
  Description of Artificial Sequence: Synthetic oligonucleotide
cugcccaaguugccacagg

SEQ ID NO: 1566575 - RNA, 19 nt, Artificial Sequence
  Description of Artificial Sequence: Synthetic oligonucleotide
ccagcuaagcccaucagcu

SEQ ID NO: 1566576 - RNA, 19 nt, Artificial Sequence
  Description of Artificial Sequence: Synthetic oligonucleotide
cugguguucgugugcaucu

SEQ ID NO: 1566577 - RNA, 19 nt, Artificial Sequence
  Description of Artificial Sequence: Synthetic oligonucleotide
cacaauccggccaccagcu

SEQ ID NO: 1566578 - RNA, 19 nt, Artificial Sequence
  Description of Artificial Sequence: Synthetic oligonucleotide
aguccacccgugaaagcca

SEQ ID NO: 1566579 - RNA, 19 nt, Artificial Sequence
  Description of Artificial Sequence: Synthetic oligonucleotide
gaucuugcucacauucagu

SEQ ID NO: 1566580 - RNA, 19 nt, Artificial Sequence
  Description of Artificial Sequence: Synthetic oligonucleotide
gcacucagagagagcaccg

SEQ ID NO: 1566581 - RNA, 19 nt, Artificial Sequence
  Description of Artificial Sequence: Synthetic oligonucleotide
caccgaggcaggacacaag

SEQ ID NO: 1566582 - RNA, 19 nt, Artificial Sequence
  Description of Artificial Sequence: Synthetic oligonucleotide
cuucgucaaguacccaaaa

SEQ ID NO: 1566583 - RNA, 19 nt, Artificial Sequence
  Description of Artificial Sequence: Synthetic oligonucleotide
uccacccgugaaagccaug

SEQ ID NO: 1566584 - RNA, 19 nt, Artificial Sequence
  Description of Artificial Sequence: Synthetic oligonucleotide
cuguggaauguccaucacu

SEQ ID NO: 1566585 - RNA, 19 nt, Artificial Sequence
  Description of Artificial Sequence: Synthetic oligonucleotide
auccggccaccagcuaagc

SEQ ID NO: 1566586 - RNA, 19 nt, Artificial Sequence
  Description of Artificial Sequence: Synthetic oligonucleotide
cgggaaaguuucuuggcug

SEQ ID NO: 1566587 - RNA, 19 nt, Artificial Sequence
  Description of Artificial Sequence: Synthetic oligonucleotide
guggaggacaaacgcugaa

SEQ ID NO: 1566588 - RNA, 19 nt, Artificial Sequence
  Description of Artificial Sequence: Synthetic oligonucleotide
ugcgcgcuguccuguguuc

SEQ ID NO: 1566589 - RNA, 19 nt, Artificial Sequence
  Description of Artificial Sequence: Synthetic oligonucleotide
caggcuugacgccuacaga

SEQ ID NO: 1566590 - RNA, 19 nt, Artificial Sequence
  Description of Artificial Sequence: Synthetic oligonucleotide
ugccacaccugguguucgu

SEQ ID NO: 1566591 - RNA, 19 nt, Artificial Sequence
  Description of Artificial Sequence: Synthetic oligonucleotide
acccuccaagagguguggg

SEQ ID NO: 1566592 - RNA, 19 nt, Artificial Sequence
  Description of Artificial Sequence: Synthetic oligonucleotide
gcuucaagacagacaaaca

SEQ ID NO: 1566593 - RNA, 19 nt, Artificial Sequence
  Description of Artificial Sequence: Synthetic oligonucleotide
cauugucaacucgguucag

SEQ ID NO: 1566594 - RNA, 19 nt, Artificial Sequence
  Description of Artificial Sequence: Synthetic oligonucleotide
cagaagcgucacagauagc

SEQ ID NO: 1566595 - RNA, 19 nt, Artificial Sequence
  Description of Artificial Sequence: Synthetic oligonucleotide
gguucacaaggcaggccag

SEQ ID NO: 1566596 - RNA, 19 nt, Artificial Sequence
  Description of Artificial Sequence: Synthetic oligonucleotide
gugugcuuggcuuccgcgu

SEQ ID NO: 1566597 - RNA, 19 nt, Artificial Sequence
  Description of Artificial Sequence: Synthetic oligonucleotide
gucccauucccauggugua

SEQ ID NO: 1566598 - RNA, 19 nt, Artificial Sequence
  Description of Artificial Sequence: Synthetic oligonucleotide
cagagacugugggauugug

SEQ ID NO: 1566599 - RNA, 19 nt, Artificial Sequence
  Description of Artificial Sequence: Synthetic oligonucleotide
gaucucuucucagcaggcu

SEQ ID NO: 1566600 - RNA, 19 nt, Artificial Sequence
  Description of Artificial Sequence: Synthetic oligonucleotide
cuguguguugcgcgcuguc

SEQ ID NO: 1566601 - RNA, 19 nt, Artificial Sequence
  Description of Artificial Sequence: Synthetic oligonucleotide
guuaagcaccaguuuuaau

SEQ ID NO: 1566602 - RNA, 19 nt, Artificial Sequence
  Description of Artificial Sequence: Synthetic oligonucleotide
guguuccaugugaucugcc

SEQ ID NO: 1566603 - RNA, 19 nt, Artificial Sequence
  Description of Artificial Sequence: Synthetic oligonucleotide
cacgccuggugucccuuug

SEQ ID NO: 1566604 - RNA, 19 nt, Artificial Sequence
  Description of Artificial Sequence: Synthetic oligonucleotide
cgugugcuuggcuuccgcg

SEQ ID NO: 1566605 - RNA, 19 nt, Artificial Sequence
  Description of Artificial Sequence: Synthetic oligonucleotide
ugguguucgugugcaucuc

SEQ ID NO: 1566606 - RNA, 19 nt, Artificial Sequence
  Description of Artificial Sequence: Synthetic oligonucleotide
ggucccauucccauggugu

SEQ ID NO: 1566607 - RNA, 19 nt, Artificial Sequence
  Description of Artificial Sequence: Synthetic oligonucleotide
cagcgugugcuuggcuucc

SEQ ID NO: 1566608 - RNA, 19 nt, Artificial Sequence
  Description of Artificial Sequence: Synthetic oligonucleotide
agcgugugcuuggcuuccg

SEQ ID NO: 1566609 - RNA, 19 nt, Artificial Sequence
  Description of Artificial Sequence: Synthetic oligonucleotide
cccucacuaagcugugaac

SEQ ID NO: 1566610 - RNA, 19 nt, Artificial Sequence
  Description of Artificial Sequence: Synthetic oligonucleotide
ggcggugacugucucagcu

SEQ ID NO: 1566611 - RNA, 19 nt, Artificial Sequence
  Description of Artificial Sequence: Synthetic oligonucleotide
ugccuguguguugcgcgcu

SEQ ID NO: 1566612 - RNA, 19 nt, Artificial Sequence
  Description of Artificial Sequence: Synthetic oligonucleotide
uggcccuccacagcaucaa

SEQ ID NO: 1566613 - RNA, 19 nt, Artificial Sequence
  Description of Artificial Sequence: Synthetic oligonucleotide
ccacuuccugggaacgaag

SEQ ID NO: 1566614 - RNA, 19 nt, Artificial Sequence
  Description of Artificial Sequence: Synthetic oligonucleotide
caccguucugaaggcugcc

SEQ ID NO: 1566615 - RNA, 19 nt, Artificial Sequence
  Description of Artificial Sequence: Synthetic oligonucleotide
gccuacagacagugaggcc

SEQ ID NO: 1566616 - RNA, 19 nt, Artificial Sequence
  Description of Artificial Sequence: Synthetic oligonucleotide
uccgcgugucugugugccu

SEQ ID NO: 1566617 - RNA, 19 nt, Artificial Sequence
  Description of Artificial Sequence: Synthetic oligonucleotide
cugcugcacgccugguguc

SEQ ID NO: 1566618 - RNA, 19 nt, Artificial Sequence
  Description of Artificial Sequence: Synthetic oligonucleotide
cucccucaagagccagcac

SEQ ID NO: 1566619 - RNA, 19 nt, Artificial Sequence
  Description of Artificial Sequence: Synthetic oligonucleotide
ccgaggcaggacacaagag

SEQ ID NO: 1566620 - RNA, 19 nt, Artificial Sequence
  Description of Artificial Sequence: Synthetic oligonucleotide
cauuuggcagagagauugu

SEQ ID NO: 1566621 - RNA, 19 nt, Artificial Sequence
  Description of Artificial Sequence: Synthetic oligonucleotide
cucugcccaaguugccaca

SEQ ID NO: 1566622 - RNA, 19 nt, Artificial Sequence
  Description of Artificial Sequence: Synthetic oligonucleotide
ccaacucugucccucacua

SEQ ID NO: 1566623 - RNA, 19 nt, Artificial Sequence
  Description of Artificial Sequence: Synthetic oligonucleotide
gcuguggaauguccaucac

SEQ ID NO: 1566624 - RNA, 19 nt, Artificial Sequence
  Description of Artificial Sequence: Synthetic oligonucleotide
cugugggauuguggguaag

SEQ ID NO: 1566625 - RNA, 19 nt, Artificial Sequence
  Description of Artificial Sequence: Synthetic oligonucleotide
ccagcgugugcuuggcuuc

SEQ ID NO: 1566626 - RNA, 19 nt, Artificial Sequence
  Description of Artificial Sequence: Synthetic oligonucleotide
ugcuuggcuuccgcguguc

SEQ ID NO: 1566627 - RNA, 19 nt, Artificial Sequence
  Description of Artificial Sequence: Synthetic oligonucleotide
ccccacuaagguucacaag

SEQ ID NO: 1566628 - RNA, 19 nt, Artificial Sequence
  Description of Artificial Sequence: Synthetic oligonucleotide
caccugguguucgugugca

SEQ ID NO: 1566629 - RNA, 19 nt, Artificial Sequence
  Description of Artificial Sequence: Synthetic oligonucleotide
ucggggcuacagugguggu

SEQ ID NO: 1566630 - RNA, 19 nt, Artificial Sequence
  Description of Artificial Sequence: Synthetic oligonucleotide
cagauagccgucaggucau

SEQ ID NO: 1566631 - RNA, 19 nt, Artificial Sequence
  Description of Artificial Sequence: Synthetic oligonucleotide
gggaacgaaguugccguca

SEQ ID NO: 1566632 - RNA, 19 nt, Artificial Sequence
  Description of Artificial Sequence: Synthetic oligonucleotide
ggguucaaguccacccgug

SEQ ID NO: 1566633 - RNA, 19 nt, Artificial Sequence
  Description of Artificial Sequence: Synthetic oligonucleotide
caacucugucccucacuaa

SEQ ID NO: 1566634 - RNA, 19 nt, Artificial Sequence
  Description of Artificial Sequence: Synthetic oligonucleotide
acaauccggccaccagcua

SEQ ID NO: 1566635 - RNA, 19 nt, Artificial Sequence
  Description of Artificial Sequence: Synthetic oligonucleotide
gcuacaagaugaguugagu

SEQ ID NO: 1566636 - RNA, 19 nt, Artificial Sequence
  Description of Artificial Sequence: Synthetic oligonucleotide
agauagccgucaggucaug

SEQ ID NO: 1566637 - RNA, 19 nt, Artificial Sequence
  Description of Artificial Sequence: Synthetic oligonucleotide
gggcaaacucauuugcaau

SEQ ID NO: 1566638 - RNA, 19 nt, Artificial Sequence
  Description of Artificial Sequence: Synthetic oligonucleotide
agcaccccacuaagguuca

SEQ ID NO: 1566639 - RNA, 19 nt, Artificial Sequence
  Description of Artificial Sequence: Synthetic oligonucleotide
ccugguguucgugugcauc

SEQ ID NO: 1566640 - RNA, 19 nt, Artificial Sequence
  Description of Artificial Sequence: Synthetic oligonucleotide
cuacagacagugaggccau

SEQ ID NO: 1566641 - RNA, 19 nt, Artificial Sequence
  Description of Artificial Sequence: Synthetic oligonucleotide
gcgccaguacuugcugugg

SEQ ID NO: 1566642 - RNA, 19 nt, Artificial Sequence
  Description of Artificial Sequence: Synthetic oligonucleotide
cacagcaucaaagccugau

SEQ ID NO: 1566643 - RNA, 19 nt, Artificial Sequence
  Description of Artificial Sequence: Synthetic oligonucleotide
gcuucgucaaguacccaaa

SEQ ID NO: 1566644 - RNA, 19 nt, Artificial Sequence
  Description of Artificial Sequence: Synthetic oligonucleotide
ggcuugacgccuacagaca

SEQ ID NO: 1566645 - RNA, 19 nt, Artificial Sequence
  Description of Artificial Sequence: Synthetic oligonucleotide
ccaugugaucugccacacc

SEQ ID NO: 1566646 - RNA, 19 nt, Artificial Sequence
  Description of Artificial Sequence: Synthetic oligonucleotide
cauaggcucuuccuccgau

SEQ ID NO: 1566647 - RNA, 19 nt, Artificial Sequence
  Description of Artificial Sequence: Synthetic oligonucleotide
cgucaaguacccaaaacau

SEQ ID NO: 1566648 - RNA, 19 nt, Artificial Sequence
  Description of Artificial Sequence: Synthetic oligonucleotide
gagcuucaagacagacaaa

SEQ ID NO: 1566649 - RNA, 19 nt, Artificial Sequence
  Description of Artificial Sequence: Synthetic oligonucleotide
accugguguucgugugcau

SEQ ID NO: 1566650 - RNA, 19 nt, Artificial Sequence
  Description of Artificial Sequence: Synthetic oligonucleotide
caagaugaguugagugguu

SEQ ID NO: 1566651 - RNA, 19 nt, Artificial Sequence
  Description of Artificial Sequence: Synthetic oligonucleotide
ggaacgaaguugccgucau

SEQ ID NO: 1566652 - RNA, 19 nt, Artificial Sequence
  Description of Artificial Sequence: Synthetic oligonucleotide
gggaaccaccagcgugugc

SEQ ID NO: 1566653 - RNA, 19 nt, Artificial Sequence
  Description of Artificial Sequence: Synthetic oligonucleotide
gagugacacgggaaaguuu

SEQ ID NO: 1566654 - RNA, 19 nt, Artificial Sequence
  Description of Artificial Sequence: Synthetic oligonucleotide
cagcaggcuugacgccuac

SEQ ID NO: 1566655 - RNA, 19 nt, Artificial Sequence
  Description of Artificial Sequence: Synthetic oligonucleotide
gcgugugcuuggcuuccgc

SEQ ID NO: 1566656 - RNA, 19 nt, Artificial Sequence
  Description of Artificial Sequence: Synthetic oligonucleotide
gccgucaggucauggccuc

SEQ ID NO: 1566657 - RNA, 19 nt, Artificial Sequence
  Description of Artificial Sequence: Synthetic oligonucleotide
ugcacgccuggugucccuu

SEQ ID NO: 1566658 - RNA, 19 nt, Artificial Sequence
  Description of Artificial Sequence: Synthetic oligonucleotide
gccuguguguugcgcgcug

SEQ ID NO: 1566659 - RNA, 19 nt, Artificial Sequence
  Description of Artificial Sequence: Synthetic oligonucleotide
gggguucaaguccacccgu

SEQ ID NO: 1566660 - RNA, 19 nt, Artificial Sequence
  Description of Artificial Sequence: Synthetic oligonucleotide
gugaggccauggcggugac

SEQ ID NO: 1566661 - RNA, 19 nt, Artificial Sequence
  Description of Artificial Sequence: Synthetic oligonucleotide
aaggcaggccagagccaua

SEQ ID NO: 1566662 - RNA, 19 nt, Artificial Sequence
  Description of Artificial Sequence: Synthetic oligonucleotide
caauuggcaugaccaccgu

SEQ ID NO: 1566663 - RNA, 19 nt, Artificial Sequence
  Description of Artificial Sequence: Synthetic oligonucleotide
guugcgcgcuguccugugu

SEQ ID NO: 1566664 - RNA, 19 nt, Artificial Sequence
  Description of Artificial Sequence: Synthetic oligonucleotide
gucccucacuaagcuguga

SEQ ID NO: 1566665 - RNA, 19 nt, Artificial Sequence
  Description of Artificial Sequence: Synthetic oligonucleotide
gcaugaccaccguucugaa

SEQ ID NO: 1566666 - RNA, 19 nt, Artificial Sequence
  Description of Artificial Sequence: Synthetic oligonucleotide
gcugcacgccugguguccc

SEQ ID NO: 1566667 - RNA, 19 nt, Artificial Sequence
  Description of Artificial Sequence: Synthetic oligonucleotide
aacccacgccuggcccugu

SEQ ID NO: 1566668 - RNA, 19 nt, Artificial Sequence
  Description of Artificial Sequence: Synthetic oligonucleotide
gggacauguagagaacauu

SEQ ID NO: 1566669 - RNA, 19 nt, Artificial Sequence
  Description of Artificial Sequence: Synthetic oligonucleotide
gugacacgggaaaguuucu

SEQ ID NO: 1566670 - RNA, 19 nt, Artificial Sequence
  Description of Artificial Sequence: Synthetic oligonucleotide
gaccaccguucugaaggcu

SEQ ID NO: 1566671 - RNA, 19 nt, Artificial Sequence
  Description of Artificial Sequence: Synthetic oligonucleotide
gcgcgcuguccuguguucc

SEQ ID NO: 1566672 - RNA, 19 nt, Artificial Sequence
  Description of Artificial Sequence: Synthetic oligonucleotide
ccgcgugucugugugccug

SEQ ID NO: 1566673 - RNA, 19 nt, Artificial Sequence
  Description of Artificial Sequence: Synthetic oligonucleotide
ggggaaccaccagcgugug

SEQ ID NO: 1566674 - RNA, 19 nt, Artificial Sequence
  Description of Artificial Sequence: Synthetic oligonucleotide
gcgucacagauagccguca

SEQ ID NO: 1566675 - RNA, 19 nt, Artificial Sequence
  Description of Artificial Sequence: Synthetic oligonucleotide
guggugguuccuccuccau

SEQ ID NO: 1566676 - RNA, 19 nt, Artificial Sequence
  Description of Artificial Sequence: Synthetic oligonucleotide
ggcagcgccaguacuugcu

SEQ ID NO: 1566677 - RNA, 19 nt, Artificial Sequence
  Description of Artificial Sequence: Synthetic oligonucleotide
gcuaagcccaucagcugcu

SEQ ID NO: 1566678 - RNA, 19 nt, Artificial Sequence
  Description of Artificial Sequence: Synthetic oligonucleotide
gccagguacucugcaucuc

SEQ ID NO: 1566679 - RNA, 19 nt, Artificial Sequence
  Description of Artificial Sequence: Synthetic oligonucleotide
guguugcgcgcuguccugu

SEQ ID NO: 1566680 - RNA, 19 nt, Artificial Sequence
  Description of Artificial Sequence: Synthetic oligonucleotide
ccgucaucauagcggugca

SEQ ID NO: 1566681 - RNA, 19 nt, Artificial Sequence
  Description of Artificial Sequence: Synthetic oligonucleotide
ccauaggcucuuccuccga

SEQ ID NO: 1566682 - RNA, 19 nt, Artificial Sequence
  Description of Artificial Sequence: Synthetic oligonucleotide
ccacccgugaaagccaugu

SEQ ID NO: 1566683 - RNA, 19 nt, Artificial Sequence
  Description of Artificial Sequence: Synthetic oligonucleotide
ccauggaguggacagcauu

SEQ ID NO: 1566684 - RNA, 19 nt, Artificial Sequence
  Description of Artificial Sequence: Synthetic oligonucleotide
gggcguccccaggggaacc

SEQ ID NO: 1566685 - RNA, 19 nt, Artificial Sequence
  Description of Artificial Sequence: Synthetic oligonucleotide
guccacccgugaaagccau

SEQ ID NO: 1566686 - RNA, 19 nt, Artificial Sequence
  Description of Artificial Sequence: Synthetic oligonucleotide
ccagagccauagaaaacuu

SEQ ID NO: 1566687 - RNA, 19 nt, Artificial Sequence
  Description of Artificial Sequence: Synthetic oligonucleotide
ggcguccccaggggaacca

SEQ ID NO: 1566688 - RNA, 19 nt, Artificial Sequence
  Description of Artificial Sequence: Synthetic oligonucleotide
ccgucaggucauggccucc

SEQ ID NO: 1566689 - RNA, 19 nt, Artificial Sequence
  Description of Artificial Sequence: Synthetic oligonucleotide
guaccacaucuggggcaaa

SEQ ID NO: 1566690 - RNA, 19 nt, Artificial Sequence
  Description of Artificial Sequence: Synthetic oligonucleotide
cacccgugaaagccauguu

SEQ ID NO: 1566691 - RNA, 19 nt, Artificial Sequence
  Description of Artificial Sequence: Synthetic oligonucleotide
cgcgcuguccuguguucca

SEQ ID NO: 1566692 - RNA, 19 nt, Artificial Sequence
  Description of Artificial Sequence: Synthetic oligonucleotide
gcguccccaggggaaccac

SEQ ID NO: 1566693 - RNA, 19 nt, Artificial Sequence
  Description of Artificial Sequence: Synthetic oligonucleotide
ccugugguccaggguggca

SEQ ID NO: 1566694 - RNA, 19 nt, Artificial Sequence
  Description of Artificial Sequence: Synthetic oligonucleotide
cuaagcccaucagcugcuu

SEQ ID NO: 1566695 - RNA, 19 nt, Artificial Sequence
  Description of Artificial Sequence: Synthetic oligonucleotide
gcuuggcuuccgcgugucu

SEQ ID NO: 1566696 - RNA, 19 nt, Artificial Sequence
  Description of Artificial Sequence: Synthetic oligonucleotide
cgggcguccccaggggaac

SEQ ID NO: 1566697 - RNA, 19 nt, Artificial Sequence
  Description of Artificial Sequence: Synthetic oligonucleotide
ccaggggaaccaccagcgu

SEQ ID NO: 1566698 - RNA, 19 nt, Artificial Sequence
  Description of Artificial Sequence: Synthetic oligonucleotide
ccuguguguugcgcgcugu

SEQ ID NO: 1566699 - RNA, 19 nt, Artificial Sequence
  Description of Artificial Sequence: Synthetic oligonucleotide
gcgcuguccuguguuccau

SEQ ID NO: 1566700 - RNA, 19 nt, Artificial Sequence
  Description of Artificial Sequence: Synthetic oligonucleotide
gcacgccuggugucccuuu

SEQ ID NO: 1566701 - RNA, 19 nt, Artificial Sequence
  Description of Artificial Sequence: Synthetic oligonucleotide
uuaucaauaaaauugaucc

SEQ ID NO: 1566702 - RNA, 19 nt, Artificial Sequence
  Description of Artificial Sequence: Synthetic oligonucleotide
ucaauuuauacauugaccg

SEQ ID NO: 1566703 - RNA, 19 nt, Artificial Sequence
  Description of Artificial Sequence: Synthetic oligonucleotide
ugugaaaacaugaagagag

SEQ ID NO: 1566704 - RNA, 19 nt, Artificial Sequence
  Description of Artificial Sequence: Synthetic oligonucleotide
auaaacaacagucagcuac

SEQ ID NO: 1566705 - RNA, 19 nt, Artificial Sequence
  Description of Artificial Sequence: Synthetic oligonucleotide
uaaaauugauccaaggugg

SEQ ID NO: 1566706 - RNA, 19 nt, Artificial Sequence
  Description of Artificial Sequence: Synthetic oligonucleotide
aauuuauacauugaccggc

SEQ ID NO: 1566707 - RNA, 19 nt, Artificial Sequence
  Description of Artificial Sequence: Synthetic oligonucleotide
aaaucaagcaggcaucagc

SEQ ID NO: 1566708 - RNA, 19 nt, Artificial Sequence
  Description of Artificial Sequence: Synthetic oligonucleotide
uucuaaaucgcucugcugg

SEQ ID NO: 1566709 - RNA, 19 nt, Artificial Sequence
  Description of Artificial Sequence: Synthetic oligonucleotide
aauaaaauugauccaaggu

SEQ ID NO: 1566710 - RNA, 19 nt, Artificial Sequence
  Description of Artificial Sequence: Synthetic oligonucleotide
agaaccacuacacacaaac

SEQ ID NO: 1566711 - RNA, 19 nt, Artificial Sequence
  Description of Artificial Sequence: Synthetic oligonucleotide
auaaaauugauccaaggug

SEQ ID NO: 1566712 - RNA, 19 nt, Artificial Sequence
  Description of Artificial Sequence: Synthetic oligonucleotide
aaccacuacacacaaaccg

SEQ ID NO: 1566713 - RNA, 19 nt, Artificial Sequence
  Description of Artificial Sequence: Synthetic oligonucleotide
aagaguuaaguucuuagag

SEQ ID NO: 1566714 - RNA, 19 nt, Artificial Sequence
  Description of Artificial Sequence: Synthetic oligonucleotide
aauauaaacaacagucagc

SEQ ID NO: 1566715 - RNA, 19 nt, Artificial Sequence
  Description of Artificial Sequence: Synthetic oligonucleotide
agaaaaucaccacaucugc

SEQ ID NO: 1566716 - RNA, 19 nt, Artificial Sequence
  Description of Artificial Sequence: Synthetic oligonucleotide
agaguuaaguucuuagagc

SEQ ID NO: 1566717 - RNA, 19 nt, Artificial Sequence
  Description of Artificial Sequence: Synthetic oligonucleotide
aaggaaguaggcuagcauc

SEQ ID NO: 1566718 - RNA, 19 nt, Artificial Sequence
  Description of Artificial Sequence: Synthetic oligonucleotide
acaacagucagcuacuuuc

SEQ ID NO: 1566719 - RNA, 19 nt, Artificial Sequence
  Description of Artificial Sequence: Synthetic oligonucleotide
aaucaagcaggcaucagcc

SEQ ID NO: 1566720 - RNA, 19 nt, Artificial Sequence
  Description of Artificial Sequence: Synthetic oligonucleotide
ucuuagagcagccagacaa

SEQ ID NO: 1566721 - RNA, 19 nt, Artificial Sequence
  Description of Artificial Sequence: Synthetic oligonucleotide
uguguaacaaccugugagg

SEQ ID NO: 1566722 - RNA, 19 nt, Artificial Sequence
  Description of Artificial Sequence: Synthetic oligonucleotide
ugaucgaucaauuuauaca

SEQ ID NO: 1566723 - RNA, 19 nt, Artificial Sequence
  Description of Artificial Sequence: Synthetic oligonucleotide
aggacaucuuugcagaacc

SEQ ID NO: 1566724 - RNA, 19 nt, Artificial Sequence
  Description of Artificial Sequence: Synthetic oligonucleotide
aucaauuuauacauugacc

SEQ ID NO: 1566725 - RNA, 19 nt, Artificial Sequence
  Description of Artificial Sequence: Synthetic oligonucleotide
cuaaccgaaaggaaguagg

SEQ ID NO: 1566726 - RNA, 19 nt, Artificial Sequence
  Description of Artificial Sequence: Synthetic oligonucleotide
uguaaaaccuugaaggcuc

SEQ ID NO: 1566727 - RNA, 19 nt, Artificial Sequence
  Description of Artificial Sequence: Synthetic oligonucleotide
cugagguaaaucaagcagg

SEQ ID NO: 1566728 - RNA, 19 nt, Artificial Sequence
  Description of Artificial Sequence: Synthetic oligonucleotide
cuuaucugaugcuaagugg

SEQ ID NO: 1566729 - RNA, 19 nt, Artificial Sequence
  Description of Artificial Sequence: Synthetic oligonucleotide
caaccugugaggcagaggg

SEQ ID NO: 1566730 - RNA, 19 nt, Artificial Sequence
  Description of Artificial Sequence: Synthetic oligonucleotide
caugugaaaacaugaagag

SEQ ID NO: 1566731 - RNA, 19 nt, Artificial Sequence
  Description of Artificial Sequence: Synthetic oligonucleotide
caguagagcaugcagaacg

SEQ ID NO: 1566732 - RNA, 19 nt, Artificial Sequence
  Description of Artificial Sequence: Synthetic oligonucleotide
ucgaucaauuuauacauug

SEQ ID NO: 1566733 - RNA, 19 nt, Artificial Sequence
  Description of Artificial Sequence: Synthetic oligonucleotide
agcuacuuuccuucaaucc

SEQ ID NO: 1566734 - RNA, 19 nt, Artificial Sequence
  Description of Artificial Sequence: Synthetic oligonucleotide
cagauagugggcuaaagag

SEQ ID NO: 1566735 - RNA, 19 nt, Artificial Sequence
  Description of Artificial Sequence: Synthetic oligonucleotide
aaaucaccacaucugcuuc

SEQ ID NO: 1566736 - RNA, 19 nt, Artificial Sequence
  Description of Artificial Sequence: Synthetic oligonucleotide
ugucuguaaaaccuugaag

SEQ ID NO: 1566737 - RNA, 19 nt, Artificial Sequence
  Description of Artificial Sequence: Synthetic oligonucleotide
ucuguaaaaccuugaaggc

SEQ ID NO: 1566738 - RNA, 19 nt, Artificial Sequence
  Description of Artificial Sequence: Synthetic oligonucleotide
agcaucugaguuccgaagc

SEQ ID NO: 1566739 - RNA, 19 nt, Artificial Sequence
  Description of Artificial Sequence: Synthetic oligonucleotide
aaaauugauccaagguggc

SEQ ID NO: 1566740 - RNA, 19 nt, Artificial Sequence
  Description of Artificial Sequence: Synthetic oligonucleotide
aaaaucaccacaucugcuu

SEQ ID NO: 1566741 - RNA, 19 nt, Artificial Sequence
  Description of Artificial Sequence: Synthetic oligonucleotide
ugcagaacgcugaacaaag

SEQ ID NO: 1566742 - RNA, 19 nt, Artificial Sequence
  Description of Artificial Sequence: Synthetic oligonucleotide
agugugugagaauaaacug

SEQ ID NO: 1566743 - RNA, 19 nt, Artificial Sequence
  Description of Artificial Sequence: Synthetic oligonucleotide
aaauugauccaagguggcc

SEQ ID NO: 1566744 - RNA, 19 nt, Artificial Sequence
  Description of Artificial Sequence: Synthetic oligonucleotide
guguguaacaaccugugag

SEQ ID NO: 1566745 - RNA, 19 nt, Artificial Sequence
  Description of Artificial Sequence: Synthetic oligonucleotide
auuucuacacaguugugug

SEQ ID NO: 1566746 - RNA, 19 nt, Artificial Sequence
  Description of Artificial Sequence: Synthetic oligonucleotide
aaaccuugaaggcucugag

SEQ ID NO: 1566747 - RNA, 19 nt, Artificial Sequence
  Description of Artificial Sequence: Synthetic oligonucleotide
ugugugaucgaucaauuua

SEQ ID NO: 1566748 - RNA, 19 nt, Artificial Sequence
  Description of Artificial Sequence: Synthetic oligonucleotide
ugagguaaaucaagcaggc

SEQ ID NO: 1566749 - RNA, 19 nt, Artificial Sequence
  Description of Artificial Sequence: Synthetic oligonucleotide
aucacuugugagucggugc

SEQ ID NO: 1566750 - RNA, 19 nt, Artificial Sequence
  Description of Artificial Sequence: Synthetic oligonucleotide
aacugcagaaccacuacac

SEQ ID NO: 1566751 - RNA, 19 nt, Artificial Sequence
  Description of Artificial Sequence: Synthetic oligonucleotide
aacgcugaacaaaggaagc

SEQ ID NO: 1566752 - RNA, 19 nt, Artificial Sequence
  Description of Artificial Sequence: Synthetic oligonucleotide
agguaaaucaagcaggcau

SEQ ID NO: 1566753 - RNA, 19 nt, Artificial Sequence
  Description of Artificial Sequence: Synthetic oligonucleotide
aauugauccaagguggcca

SEQ ID NO: 1566754 - RNA, 19 nt, Artificial Sequence
  Description of Artificial Sequence: Synthetic oligonucleotide
uuauacauugaccggcugu

SEQ ID NO: 1566755 - RNA, 19 nt, Artificial Sequence
  Description of Artificial Sequence: Synthetic oligonucleotide
uguguguguaacaaccugu

SEQ ID NO: 1566756 - RNA, 19 nt, Artificial Sequence
  Description of Artificial Sequence: Synthetic oligonucleotide
accuugaaggcucugagca

SEQ ID NO: 1566757 - RNA, 19 nt, Artificial Sequence
  Description of Artificial Sequence: Synthetic oligonucleotide
gucaugugaaaacaugaag

SEQ ID NO: 1566758 - RNA, 19 nt, Artificial Sequence
  Description of Artificial Sequence: Synthetic oligonucleotide
aguccagacucucacacag

SEQ ID NO: 1566759 - RNA, 19 nt, Artificial Sequence
  Description of Artificial Sequence: Synthetic oligonucleotide
uguggugcuagccucgcag

SEQ ID NO: 1566760 - RNA, 19 nt, Artificial Sequence
  Description of Artificial Sequence: Synthetic oligonucleotide
acaguugugugaucgauca

SEQ ID NO: 1566761 - RNA, 19 nt, Artificial Sequence
  Description of Artificial Sequence: Synthetic oligonucleotide
guaacaaccugugaggcag

SEQ ID NO: 1566762 - RNA, 19 nt, Artificial Sequence
  Description of Artificial Sequence: Synthetic oligonucleotide
acuacacacaaaccgagca

SEQ ID NO: 1566763 - RNA, 19 nt, Artificial Sequence
  Description of Artificial Sequence: Synthetic oligonucleotide
uuggcuaucuggaugugca

SEQ ID NO: 1566764 - RNA, 19 nt, Artificial Sequence
  Description of Artificial Sequence: Synthetic oligonucleotide
gaacgcugaacaaaggaag

SEQ ID NO: 1566765 - RNA, 19 nt, Artificial Sequence
  Description of Artificial Sequence: Synthetic oligonucleotide
gucacccucaccuaagucc

SEQ ID NO: 1566766 - RNA, 19 nt, Artificial Sequence
  Description of Artificial Sequence: Synthetic oligonucleotide
gugugugagaauaaacugg

SEQ ID NO: 1566767 - RNA, 19 nt, Artificial Sequence
  Description of Artificial Sequence: Synthetic oligonucleotide
uugaccggcugucuaaucc

SEQ ID NO: 1566768 - RNA, 19 nt, Artificial Sequence
  Description of Artificial Sequence: Synthetic oligonucleotide
ucuucuaaaucgcucugcu

SEQ ID NO: 1566769 - RNA, 19 nt, Artificial Sequence
  Description of Artificial Sequence: Synthetic oligonucleotide
cucaccuaaguccagacuc

SEQ ID NO: 1566770 - RNA, 19 nt, Artificial Sequence
  Description of Artificial Sequence: Synthetic oligonucleotide
uaaccgaaaggaaguaggc

SEQ ID NO: 1566771 - RNA, 19 nt, Artificial Sequence
  Description of Artificial Sequence: Synthetic oligonucleotide
uccggagaaaaucaccaca

SEQ ID NO: 1566772 - RNA, 19 nt, Artificial Sequence
  Description of Artificial Sequence: Synthetic oligonucleotide
aaaggaaguaggcuagcau

SEQ ID NO: 1566773 - RNA, 19 nt, Artificial Sequence
  Description of Artificial Sequence: Synthetic oligonucleotide
uaauuucacgggcuguuug

SEQ ID NO: 1566774 - RNA, 19 nt, Artificial Sequence
  Description of Artificial Sequence: Synthetic oligonucleotide
ucaagcaggcaucagccac

SEQ ID NO: 1566775 - RNA, 19 nt, Artificial Sequence
  Description of Artificial Sequence: Synthetic oligonucleotide
gaucgaucaauuuauacau

SEQ ID NO: 1566776 - RNA, 19 nt, Artificial Sequence
  Description of Artificial Sequence: Synthetic oligonucleotide
uucagauucuuaucugaug

SEQ ID NO: 1566777 - RNA, 19 nt, Artificial Sequence
  Description of Artificial Sequence: Synthetic oligonucleotide
gacaucuuugcagaaccgg

SEQ ID NO: 1566778 - RNA, 19 nt, Artificial Sequence
  Description of Artificial Sequence: Synthetic oligonucleotide
ggccaagacaucuugaacc

SEQ ID NO: 1566779 - RNA, 19 nt, Artificial Sequence
  Description of Artificial Sequence: Synthetic oligonucleotide
ucacuugugagucggugca

SEQ ID NO: 1566780 - RNA, 19 nt, Artificial Sequence
  Description of Artificial Sequence: Synthetic oligonucleotide
uagagcaugcagaacgcug

SEQ ID NO: 1566781 - RNA, 19 nt, Artificial Sequence
  Description of Artificial Sequence: Synthetic oligonucleotide
uaauccaccuucaccacgu

SEQ ID NO: 1566782 - RNA, 19 nt, Artificial Sequence
  Description of Artificial Sequence: Synthetic oligonucleotide
cuacacaguugugugaucg

SEQ ID NO: 1566783 - RNA, 19 nt, Artificial Sequence
  Description of Artificial Sequence: Synthetic oligonucleotide
aaaucgcucugcuggagcu

SEQ ID NO: 1566784 - RNA, 19 nt, Artificial Sequence
  Description of Artificial Sequence: Synthetic oligonucleotide
acagauagugggcuaaaga

SEQ ID NO: 1566785 - RNA, 19 nt, Artificial Sequence
  Description of Artificial Sequence: Synthetic oligonucleotide
ugaaccacaucugcuaacc

SEQ ID NO: 1566786 - RNA, 19 nt, Artificial Sequence
  Description of Artificial Sequence: Synthetic oligonucleotide
gaugcuaaguggaugcagc

SEQ ID NO: 1566787 - RNA, 19 nt, Artificial Sequence
  Description of Artificial Sequence: Synthetic oligonucleotide
cugcaagacagccagcugc

SEQ ID NO: 1566788 - RNA, 19 nt, Artificial Sequence
  Description of Artificial Sequence: Synthetic oligonucleotide
auguccucggcuguggugc

SEQ ID NO: 1566789 - RNA, 19 nt, Artificial Sequence
  Description of Artificial Sequence: Synthetic oligonucleotide
ugucaugugaaaacaugaa

SEQ ID NO: 1566790 - RNA, 19 nt, Artificial Sequence
  Description of Artificial Sequence: Synthetic oligonucleotide
uaaaucgcucugcuggagc

SEQ ID NO: 1566791 - RNA, 19 nt, Artificial Sequence
  Description of Artificial Sequence: Synthetic oligonucleotide
aguggacuaaagcugccag

SEQ ID NO: 1566792 - RNA, 19 nt, Artificial Sequence
  Description of Artificial Sequence: Synthetic oligonucleotide
aaacugguccagcccgggc

SEQ ID NO: 1566793 - RNA, 19 nt, Artificial Sequence
  Description of Artificial Sequence: Synthetic oligonucleotide
uuuugagauagcucagcac

SEQ ID NO: 1566794 - RNA, 19 nt, Artificial Sequence
  Description of Artificial Sequence: Synthetic oligonucleotide
ucuugaaccacaucugcua

SEQ ID NO: 1566795 - RNA, 19 nt, Artificial Sequence
  Description of Artificial Sequence: Synthetic oligonucleotide
uucaccacgucucugugau

SEQ ID NO: 1566796 - RNA, 19 nt, Artificial Sequence
  Description of Artificial Sequence: Synthetic oligonucleotide
ucugugaugcugcaaccac

SEQ ID NO: 1566797 - RNA, 19 nt, Artificial Sequence
  Description of Artificial Sequence: Synthetic oligonucleotide
aaccaguggacuaaagcug

SEQ ID NO: 1566798 - RNA, 19 nt, Artificial Sequence
  Description of Artificial Sequence: Synthetic oligonucleotide
ugggcuaaagaguuaaguu

SEQ ID NO: 1566799 - RNA, 19 nt, Artificial Sequence
  Description of Artificial Sequence: Synthetic oligonucleotide
cuuguaauuucacgggcug

SEQ ID NO: 1566800 - RNA, 19 nt, Artificial Sequence
  Description of Artificial Sequence: Synthetic oligonucleotide
ugugagucggugcacgagu

SEQ ID NO: 1566801 - RNA, 19 nt, Artificial Sequence
  Description of Artificial Sequence: Synthetic oligonucleotide
uuuauacauugaccggcug

SEQ ID NO: 1566802 - RNA, 19 nt, Artificial Sequence
  Description of Artificial Sequence: Synthetic oligonucleotide
uguaacaaccugugaggca

SEQ ID NO: 1566803 - RNA, 19 nt, Artificial Sequence
  Description of Artificial Sequence: Synthetic oligonucleotide
accgaaaggaaguaggcua

SEQ ID NO: 1566804 - RNA, 19 nt, Artificial Sequence
  Description of Artificial Sequence: Synthetic oligonucleotide
guguguguguguaacaacc

SEQ ID NO: 1566805 - RNA, 19 nt, Artificial Sequence
  Description of Artificial Sequence: Synthetic oligonucleotide
ucuaaaucgcucugcugga

SEQ ID NO: 1566806 - RNA, 19 nt, Artificial Sequence
  Description of Artificial Sequence: Synthetic oligonucleotide
cuaauccaccuucaccacg

SEQ ID NO: 1566807 - RNA, 19 nt, Artificial Sequence
  Description of Artificial Sequence: Synthetic oligonucleotide
uauacauugaccggcuguc

SEQ ID NO: 1566808 - RNA, 19 nt, Artificial Sequence
  Description of Artificial Sequence: Synthetic oligonucleotide
aggcuagcaucugaguucc

SEQ ID NO: 1566809 - RNA, 19 nt, Artificial Sequence
  Description of Artificial Sequence: Synthetic oligonucleotide
uaggcuagcaucugaguuc

SEQ ID NO: 1566810 - RNA, 19 nt, Artificial Sequence
  Description of Artificial Sequence: Synthetic oligonucleotide
gugaucgaucaauuuauac

SEQ ID NO: 1566811 - RNA, 19 nt, Artificial Sequence
  Description of Artificial Sequence: Synthetic oligonucleotide
accgagcacauccaagauc

SEQ ID NO: 1566812 - RNA, 19 nt, Artificial Sequence
  Description of Artificial Sequence: Synthetic oligonucleotide
ugcacugggugaaggcugg

SEQ ID NO: 1566813 - RNA, 19 nt, Artificial Sequence
  Description of Artificial Sequence: Synthetic oligonucleotide
aaguaggcuagcaucugag

SEQ ID NO: 1566814 - RNA, 19 nt, Artificial Sequence
  Description of Artificial Sequence: Synthetic oligonucleotide
uguguguaacaaccuguga

SEQ ID NO: 1566815 - RNA, 19 nt, Artificial Sequence
  Description of Artificial Sequence: Synthetic oligonucleotide
ucagcuacuuuccuucaau

SEQ ID NO: 1566816 - RNA, 19 nt, Artificial Sequence
  Description of Artificial Sequence: Synthetic oligonucleotide
uagcaucugaguuccgaag

SEQ ID NO: 1566817 - RNA, 19 nt, Artificial Sequence
  Description of Artificial Sequence: Synthetic oligonucleotide
caacagucagcuacuuucc

SEQ ID NO: 1566818 - RNA, 19 nt, Artificial Sequence
  Description of Artificial Sequence: Synthetic oligonucleotide
cuucccucuucuaaaucgc

SEQ ID NO: 1566819 - RNA, 19 nt, Artificial Sequence
  Description of Artificial Sequence: Synthetic oligonucleotide
gucaucacuugugagucgg

SEQ ID NO: 1566820 - RNA, 19 nt, Artificial Sequence
  Description of Artificial Sequence: Synthetic oligonucleotide
cacuuuauucaggucaccc

SEQ ID NO: 1566821 - RNA, 19 nt, Artificial Sequence
  Description of Artificial Sequence: Synthetic oligonucleotide
guucuuguggaacugcaga

SEQ ID NO: 1566822 - RNA, 19 nt, Artificial Sequence
  Description of Artificial Sequence: Synthetic oligonucleotide
gggcuguacagauaguggg

SEQ ID NO: 1566823 - RNA, 19 nt, Artificial Sequence
  Description of Artificial Sequence: Synthetic oligonucleotide
ggcccgaugagccaguggg

SEQ ID NO: 1566824 - RNA, 19 nt, Artificial Sequence
  Description of Artificial Sequence: Synthetic oligonucleotide
aguugugugaucgaucaau

SEQ ID NO: 1566825 - RNA, 19 nt, Artificial Sequence
  Description of Artificial Sequence: Synthetic oligonucleotide
uguguguguguguaacaac

SEQ ID NO: 1566826 - RNA, 19 nt, Artificial Sequence
  Description of Artificial Sequence: Synthetic oligonucleotide
uuagagcagccagacaaug

SEQ ID NO: 1566827 - RNA, 19 nt, Artificial Sequence
  Description of Artificial Sequence: Synthetic oligonucleotide
caguagaaucugcaucugg

SEQ ID NO: 1566828 - RNA, 19 nt, Artificial Sequence
  Description of Artificial Sequence: Synthetic oligonucleotide
cagucagcuacuuuccuuc

SEQ ID NO: 1566829 - RNA, 19 nt, Artificial Sequence
  Description of Artificial Sequence: Synthetic oligonucleotide
aaccgaaaggaaguaggcu

SEQ ID NO: 1566830 - RNA, 19 nt, Artificial Sequence
  Description of Artificial Sequence: Synthetic oligonucleotide
uucuacacaguugugugau

SEQ ID NO: 1566831 - RNA, 19 nt, Artificial Sequence
  Description of Artificial Sequence: Synthetic oligonucleotide
uuauucaggucacccucac

SEQ ID NO: 1566832 - RNA, 19 nt, Artificial Sequence
  Description of Artificial Sequence: Synthetic oligonucleotide
uguacagauagugggcuaa

SEQ ID NO: 1566833 - RNA, 19 nt, Artificial Sequence
  Description of Artificial Sequence: Synthetic oligonucleotide
uggacuaaagcugccagua

SEQ ID NO: 1566834 - RNA, 19 nt, Artificial Sequence
  Description of Artificial Sequence: Synthetic oligonucleotide
uguguguguguguguaaca

SEQ ID NO: 1566835 - RNA, 19 nt, Artificial Sequence
  Description of Artificial Sequence: Synthetic oligonucleotide
ucuaauccaccuucaccac

SEQ ID NO: 1566836 - RNA, 19 nt, Artificial Sequence
  Description of Artificial Sequence: Synthetic oligonucleotide
ugaacaaaggaagcagcuc

SEQ ID NO: 1566837 - RNA, 19 nt, Artificial Sequence
  Description of Artificial Sequence: Synthetic oligonucleotide
auuuuggcaggacaucuuu

SEQ ID NO: 1566838 - RNA, 19 nt, Artificial Sequence
  Description of Artificial Sequence: Synthetic oligonucleotide
agauagugggcuaaagagu

SEQ ID NO: 1566839 - RNA, 19 nt, Artificial Sequence
  Description of Artificial Sequence: Synthetic oligonucleotide
acuugugagucggugcacg

SEQ ID NO: 1566840 - RNA, 19 nt, Artificial Sequence
  Description of Artificial Sequence: Synthetic oligonucleotide
uucuuaucugaugcuaagu

SEQ ID NO: 1566841 - RNA, 19 nt, Artificial Sequence
  Description of Artificial Sequence: Synthetic oligonucleotide
uggaugugcacuggcagug

SEQ ID NO: 1566842 - RNA, 19 nt, Artificial Sequence
  Description of Artificial Sequence: Synthetic oligonucleotide
ucguucucguccacguuug

SEQ ID NO: 1566843 - RNA, 19 nt, Artificial Sequence
  Description of Artificial Sequence: Synthetic oligonucleotide
cucuuuugagauagcucag

SEQ ID NO: 1566844 - RNA, 19 nt, Artificial Sequence
  Description of Artificial Sequence: Synthetic oligonucleotide
uauucaggucacccucacc

SEQ ID NO: 1566845 - RNA, 19 nt, Artificial Sequence
  Description of Artificial Sequence: Synthetic oligonucleotide
uuuggugcugagguaaauc

SEQ ID NO: 1566846 - RNA, 19 nt, Artificial Sequence
  Description of Artificial Sequence: Synthetic oligonucleotide
gucggugcacgagugaagg

SEQ ID NO: 1566847 - RNA, 19 nt, Artificial Sequence
  Description of Artificial Sequence: Synthetic oligonucleotide
uuaaggagcuggccaauuu

SEQ ID NO: 1566848 - RNA, 19 nt, Artificial Sequence
  Description of Artificial Sequence: Synthetic oligonucleotide
gaaguaggcuagcaucuga

SEQ ID NO: 1566849 - RNA, 19 nt, Artificial Sequence
  Description of Artificial Sequence: Synthetic oligonucleotide
uguaauuucacgggcuguu

SEQ ID NO: 1566850 - RNA, 19 nt, Artificial Sequence
  Description of Artificial Sequence: Synthetic oligonucleotide
ucggcuguggugcuagccu

SEQ ID NO: 1566851 - RNA, 19 nt, Artificial Sequence
  Description of Artificial Sequence: Synthetic oligonucleotide
ugaccggcugucuaaucca

SEQ ID NO: 1566852 - RNA, 19 nt, Artificial Sequence
  Description of Artificial Sequence: Synthetic oligonucleotide
uggccaagacaucuugaac

SEQ ID NO: 1566853 - RNA, 19 nt, Artificial Sequence
  Description of Artificial Sequence: Synthetic oligonucleotide
acaagccagguagagucgg

SEQ ID NO: 1566854 - RNA, 19 nt, Artificial Sequence
  Description of Artificial Sequence: Synthetic oligonucleotide
uaucugaugcuaaguggau

SEQ ID NO: 1566855 - RNA, 19 nt, Artificial Sequence
  Description of Artificial Sequence: Synthetic oligonucleotide
agguggaggaagacgcucc

SEQ ID NO: 1566856 - RNA, 19 nt, Artificial Sequence
  Description of Artificial Sequence: Synthetic oligonucleotide
gaugcugcaaccaccucca

SEQ ID NO: 1566857 - RNA, 19 nt, Artificial Sequence
  Description of Artificial Sequence: Synthetic oligonucleotide
aagcagcucucuuaucaau

SEQ ID NO: 1566858 - RNA, 19 nt, Artificial Sequence
  Description of Artificial Sequence: Synthetic oligonucleotide
auuuauacauugaccggcu

SEQ ID NO: 1566859 - RNA, 19 nt, Artificial Sequence
  Description of Artificial Sequence: Synthetic oligonucleotide
gaacugcagaaccacuaca

SEQ ID NO: 1566860 - RNA, 19 nt, Artificial Sequence
  Description of Artificial Sequence: Synthetic oligonucleotide
uacagauagugggcuaaag

SEQ ID NO: 1566861 - RNA, 19 nt, Artificial Sequence
  Description of Artificial Sequence: Synthetic oligonucleotide
guguaacaaccugugaggc

SEQ ID NO: 1566862 - RNA, 19 nt, Artificial Sequence
  Description of Artificial Sequence: Synthetic oligonucleotide
gauucuuaucugaugcuaa

SEQ ID NO: 1566863 - RNA, 19 nt, Artificial Sequence
  Description of Artificial Sequence: Synthetic oligonucleotide
agaacgcugaacaaaggaa

SEQ ID NO: 1566864 - RNA, 19 nt, Artificial Sequence
  Description of Artificial Sequence: Synthetic oligonucleotide
aguaggcuagcaucugagu

SEQ ID NO: 1566865 - RNA, 19 nt, Artificial Sequence
  Description of Artificial Sequence: Synthetic oligonucleotide
ugugaucgaucaauuuaua

SEQ ID NO: 1566866 - RNA, 19 nt, Artificial Sequence
  Description of Artificial Sequence: Synthetic oligonucleotide
aacaaccugugaggcagag

SEQ ID NO: 1566867 - RNA, 19 nt, Artificial Sequence
  Description of Artificial Sequence: Synthetic oligonucleotide
auugaccggcugucuaauc

SEQ ID NO: 1566868 - RNA, 19 nt, Artificial Sequence
  Description of Artificial Sequence: Synthetic oligonucleotide
guucuuagagcagccagac

SEQ ID NO: 1566869 - RNA, 19 nt, Artificial Sequence
  Description of Artificial Sequence: Synthetic oligonucleotide
ugcuaaguggaugcagcgc

SEQ ID NO: 1566870 - RNA, 19 nt, Artificial Sequence
  Description of Artificial Sequence: Synthetic oligonucleotide
cagguagagcacauuggug

SEQ ID NO: 1566871 - RNA, 19 nt, Artificial Sequence
  Description of Artificial Sequence: Synthetic oligonucleotide
uacacaguugugugaucga

SEQ ID NO: 1566872 - RNA, 19 nt, Artificial Sequence
  Description of Artificial Sequence: Synthetic oligonucleotide
aggaaguaggcuagcaucu

SEQ ID NO: 1566873 - RNA, 19 nt, Artificial Sequence
  Description of Artificial Sequence: Synthetic oligonucleotide
uagugggcuaaagaguuaa

SEQ ID NO: 1566874 - RNA, 19 nt, Artificial Sequence
  Description of Artificial Sequence: Synthetic oligonucleotide
agguuaaggagcuggccaa

SEQ ID NO: 1566875 - RNA, 19 nt, Artificial Sequence
  Description of Artificial Sequence: Synthetic oligonucleotide
gacaagccagguagagucg

SEQ ID NO: 1566876 - RNA, 19 nt, Artificial Sequence
  Description of Artificial Sequence: Synthetic oligonucleotide
uggugcuagccucgcaggc

SEQ ID NO: 1566877 - RNA, 19 nt, Artificial Sequence
  Description of Artificial Sequence: Synthetic oligonucleotide
cucuucuaaaucgcucugc

SEQ ID NO: 1566878 - RNA, 19 nt, Artificial Sequence
  Description of Artificial Sequence: Synthetic oligonucleotide
cucaguggccgccugcagc

SEQ ID NO: 1566879 - RNA, 19 nt, Artificial Sequence
  Description of Artificial Sequence: Synthetic oligonucleotide
uguuugccuucccucuucu

SEQ ID NO: 1566880 - RNA, 19 nt, Artificial Sequence
  Description of Artificial Sequence: Synthetic oligonucleotide
cugguguuugccuucccuc

SEQ ID NO: 1566881 - RNA, 19 nt, Artificial Sequence
  Description of Artificial Sequence: Synthetic oligonucleotide
ucccucuucuaaaucgcuc

SEQ ID NO: 1566882 - RNA, 19 nt, Artificial Sequence
  Description of Artificial Sequence: Synthetic oligonucleotide
guggcuccacaucuggaag

SEQ ID NO: 1566883 - RNA, 19 nt, Artificial Sequence
  Description of Artificial Sequence: Synthetic oligonucleotide
uucugucuggcagggacug

SEQ ID NO: 1566884 - RNA, 19 nt, Artificial Sequence
  Description of Artificial Sequence: Synthetic oligonucleotide
agagcaugcagaacgcuga

SEQ ID NO: 1566885 - RNA, 19 nt, Artificial Sequence
  Description of Artificial Sequence: Synthetic oligonucleotide
uccuucaauccaauuucua

SEQ ID NO: 1566886 - RNA, 19 nt, Artificial Sequence
  Description of Artificial Sequence: Synthetic oligonucleotide
uucuuagagcagccagaca

SEQ ID NO: 1566887 - RNA, 19 nt, Artificial Sequence
  Description of Artificial Sequence: Synthetic oligonucleotide
auaaacugguccagcccgg

SEQ ID NO: 1566888 - RNA, 19 nt, Artificial Sequence
  Description of Artificial Sequence: Synthetic oligonucleotide
ggggucuacuuucaucagg

SEQ ID NO: 1566889 - RNA, 19 nt, Artificial Sequence
  Description of Artificial Sequence: Synthetic oligonucleotide
aggguucugcugcucagug

SEQ ID NO: 1566890 - RNA, 19 nt, Artificial Sequence
  Description of Artificial Sequence: Synthetic oligonucleotide
agacaaugucaugugaaaa

SEQ ID NO: 1566891 - RNA, 19 nt, Artificial Sequence
  Description of Artificial Sequence: Synthetic oligonucleotide
guguguguaacaaccugug

SEQ ID NO: 1566892 - RNA, 19 nt, Artificial Sequence
  Description of Artificial Sequence: Synthetic oligonucleotide
guggugcuagccucgcagg

SEQ ID NO: 1566893 - RNA, 19 nt, Artificial Sequence
  Description of Artificial Sequence: Synthetic oligonucleotide
acauugaccggcugucuaa

SEQ ID NO: 1566894 - RNA, 19 nt, Artificial Sequence
  Description of Artificial Sequence: Synthetic oligonucleotide
cacaguugugugaucgauc

SEQ ID NO: 1566895 - RNA, 19 nt, Artificial Sequence
  Description of Artificial Sequence: Synthetic oligonucleotide
gacucucacacaggggacc

SEQ ID NO: 1566896 - RNA, 19 nt, Artificial Sequence
  Description of Artificial Sequence: Synthetic oligonucleotide
cuacuuuccuucaauccaa

SEQ ID NO: 1566897 - RNA, 19 nt, Artificial Sequence
  Description of Artificial Sequence: Synthetic oligonucleotide
aucugaugcuaaguggaug

SEQ ID NO: 1566898 - RNA, 19 nt, Artificial Sequence
  Description of Artificial Sequence: Synthetic oligonucleotide
guucucguccacguuuggg

SEQ ID NO: 1566899 - RNA, 19 nt, Artificial Sequence
  Description of Artificial Sequence: Synthetic oligonucleotide
aguucuuagagcagccaga

SEQ ID NO: 1566900 - RNA, 19 nt, Artificial Sequence
  Description of Artificial Sequence: Synthetic oligonucleotide
uauaaacaacagucagcua

SEQ ID NO: 1566901 - RNA, 19 nt, Artificial Sequence
  Description of Artificial Sequence: Synthetic oligonucleotide
uguuuggugcugagguaaa

SEQ ID NO: 1566902 - RNA, 19 nt, Artificial Sequence
  Description of Artificial Sequence: Synthetic oligonucleotide
gguaaaucaagcaggcauc

SEQ ID NO: 1566903 - RNA, 19 nt, Artificial Sequence
  Description of Artificial Sequence: Synthetic oligonucleotide
ugagucggugcacgaguga

SEQ ID NO: 1566904 - RNA, 19 nt, Artificial Sequence
  Description of Artificial Sequence: Synthetic oligonucleotide
caucugggaaccaguggac

SEQ ID NO: 1566905 - RNA, 19 nt, Artificial Sequence
  Description of Artificial Sequence: Synthetic oligonucleotide
agguggccaagacaucuug

SEQ ID NO: 1566906 - RNA, 19 nt, Artificial Sequence
  Description of Artificial Sequence: Synthetic oligonucleotide
augaagagagaaauauaaa

SEQ ID NO: 1566907 - RNA, 19 nt, Artificial Sequence
  Description of Artificial Sequence: Synthetic oligonucleotide
ucagguggaggaagacgcu

SEQ ID NO: 1566908 - RNA, 19 nt, Artificial Sequence
  Description of Artificial Sequence: Synthetic oligonucleotide
uugugagucggugcacgag

SEQ ID NO: 1566909 - RNA, 19 nt, Artificial Sequence
  Description of Artificial Sequence: Synthetic oligonucleotide
gcagcgcuccaucacaucc

SEQ ID NO: 1566910 - RNA, 19 nt, Artificial Sequence
  Description of Artificial Sequence: Synthetic oligonucleotide
cuaucuggaugugcacugg

SEQ ID NO: 1566911 - RNA, 19 nt, Artificial Sequence
  Description of Artificial Sequence: Synthetic oligonucleotide
uugugugaucgaucaauuu

SEQ ID NO: 1566912 - RNA, 19 nt, Artificial Sequence
  Description of Artificial Sequence: Synthetic oligonucleotide
ccuaaguccagacucucac

SEQ ID NO: 1566913 - RNA, 19 nt, Artificial Sequence
  Description of Artificial Sequence: Synthetic oligonucleotide
cagcuacuuuccuucaauc

SEQ ID NO: 1566914 - RNA, 19 nt, Artificial Sequence
  Description of Artificial Sequence: Synthetic oligonucleotide
agacucucacacaggggac

SEQ ID NO: 1566915 - RNA, 19 nt, Artificial Sequence
  Description of Artificial Sequence: Synthetic oligonucleotide
aaccugugaggcagagggg

SEQ ID NO: 1566916 - RNA, 19 nt, Artificial Sequence
  Description of Artificial Sequence: Synthetic oligonucleotide
cagacaaugucaugugaaa

SEQ ID NO: 1566917 - RNA, 19 nt, Artificial Sequence
  Description of Artificial Sequence: Synthetic oligonucleotide
cuaaaucgcucugcuggag

SEQ ID NO: 1566918 - RNA, 19 nt, Artificial Sequence
  Description of Artificial Sequence: Synthetic oligonucleotide
uguguguguguguguguaa

SEQ ID NO: 1566919 - RNA, 19 nt, Artificial Sequence
  Description of Artificial Sequence: Synthetic oligonucleotide
cuccggagaaaaucaccac

SEQ ID NO: 1566920 - RNA, 19 nt, Artificial Sequence
  Description of Artificial Sequence: Synthetic oligonucleotide
caucacuugugagucggug

SEQ ID NO: 1566921 - RNA, 19 nt, Artificial Sequence
  Description of Artificial Sequence: Synthetic oligonucleotide
aaggguucugcugcucagu

SEQ ID NO: 1566922 - RNA, 19 nt, Artificial Sequence
  Description of Artificial Sequence: Synthetic oligonucleotide
aaggccagugugugagaau

SEQ ID NO: 1566923 - RNA, 19 nt, Artificial Sequence
  Description of Artificial Sequence: Synthetic oligonucleotide
agucagcuacuuuccuuca

SEQ ID NO: 1566924 - RNA, 19 nt, Artificial Sequence
  Description of Artificial Sequence: Synthetic oligonucleotide
gaaaaucaccacaucugcu

SEQ ID NO: 1566925 - RNA, 19 nt, Artificial Sequence
  Description of Artificial Sequence: Synthetic oligonucleotide
gguggcaaaaggguucugc

SEQ ID NO: 1566926 - RNA, 19 nt, Artificial Sequence
  Description of Artificial Sequence: Synthetic oligonucleotide
ccgaaaggaaguaggcuag

SEQ ID NO: 1566927 - RNA, 19 nt, Artificial Sequence
  Description of Artificial Sequence: Synthetic oligonucleotide
guggccaagacaucuugaa

SEQ ID NO: 1566928 - RNA, 19 nt, Artificial Sequence
  Description of Artificial Sequence: Synthetic oligonucleotide
uaacaaccugugaggcaga

SEQ ID NO: 1566929 - RNA, 19 nt, Artificial Sequence
  Description of Artificial Sequence: Synthetic oligonucleotide
guguguguguguguguaac

SEQ ID NO: 1566930 - RNA, 19 nt, Artificial Sequence
  Description of Artificial Sequence: Synthetic oligonucleotide
uagagucggggucuacuuu

SEQ ID NO: 1566931 - RNA, 19 nt, Artificial Sequence
  Description of Artificial Sequence: Synthetic oligonucleotide
acgcugaacaaaggaagca

SEQ ID NO: 1566932 - RNA, 19 nt, Artificial Sequence
  Description of Artificial Sequence: Synthetic oligonucleotide
agccagguagagucggggu

SEQ ID NO: 1566933 - RNA, 19 nt, Artificial Sequence
  Description of Artificial Sequence: Synthetic oligonucleotide
ucaucacuugugagucggu

SEQ ID NO: 1566934 - RNA, 19 nt, Artificial Sequence
  Description of Artificial Sequence: Synthetic oligonucleotide
agggugucguucucgucca

SEQ ID NO: 1566935 - RNA, 19 nt, Artificial Sequence
  Description of Artificial Sequence: Synthetic oligonucleotide
ucuacacaguugugugauc

SEQ ID NO: 1566936 - RNA, 19 nt, Artificial Sequence
  Description of Artificial Sequence: Synthetic oligonucleotide
caggacaagccagguagag

SEQ ID NO: 1566937 - RNA, 19 nt, Artificial Sequence
  Description of Artificial Sequence: Synthetic oligonucleotide
uccucggcuguggugcuag

SEQ ID NO: 1566938 - RNA, 19 nt, Artificial Sequence
  Description of Artificial Sequence: Synthetic oligonucleotide
ggacuaaagcugccaguag

SEQ ID NO: 1566939 - RNA, 19 nt, Artificial Sequence
  Description of Artificial Sequence: Synthetic oligonucleotide
gcaggcaucagccacuuua

SEQ ID NO: 1566940 - RNA, 19 nt, Artificial Sequence
  Description of Artificial Sequence: Synthetic oligonucleotide
ggcuaaagaguuaaguucu

SEQ ID NO: 1566941 - RNA, 19 nt, Artificial Sequence
  Description of Artificial Sequence: Synthetic oligonucleotide
gcuaaccgaaaggaaguag

SEQ ID NO: 1566942 - RNA, 19 nt, Artificial Sequence
  Description of Artificial Sequence: Synthetic oligonucleotide
ucacgggcuguuuggugcu

SEQ ID NO: 1566943 - RNA, 19 nt, Artificial Sequence
  Description of Artificial Sequence: Synthetic oligonucleotide
cucucuuaucaauaaaauu

SEQ ID NO: 1566944 - RNA, 19 nt, Artificial Sequence
  Description of Artificial Sequence: Synthetic oligonucleotide
ucggugcacgagugaaggc

SEQ ID NO: 1566945 - RNA, 19 nt, Artificial Sequence
  Description of Artificial Sequence: Synthetic oligonucleotide
caugcagaacgcugaacaa

SEQ ID NO: 1566946 - RNA, 19 nt, Artificial Sequence
  Description of Artificial Sequence: Synthetic oligonucleotide
guaggcuagcaucugaguu

SEQ ID NO: 1566947 - RNA, 19 nt, Artificial Sequence
  Description of Artificial Sequence: Synthetic oligonucleotide
gucggggucuacuuucauc

SEQ ID NO: 1566948 - RNA, 19 nt, Artificial Sequence
  Description of Artificial Sequence: Synthetic oligonucleotide
ggucaucacuugugagucg

SEQ ID NO: 1566949 - RNA, 19 nt, Artificial Sequence
  Description of Artificial Sequence: Synthetic oligonucleotide
cuguuuggugcugagguaa

SEQ ID NO: 1566950 - RNA, 19 nt, Artificial Sequence
  Description of Artificial Sequence: Synthetic oligonucleotide
aucugggaaccaguggacu

SEQ ID NO: 1566951 - RNA, 19 nt, Artificial Sequence
  Description of Artificial Sequence: Synthetic oligonucleotide
cugcuaaccgaaaggaagu

SEQ ID NO: 1566952 - RNA, 19 nt, Artificial Sequence
  Description of Artificial Sequence: Synthetic oligonucleotide
aggucacccucaccuaagu

SEQ ID NO: 1566953 - RNA, 19 nt, Artificial Sequence
  Description of Artificial Sequence: Synthetic oligonucleotide
gaaggccagugugugagaa

SEQ ID NO: 1566954 - RNA, 19 nt, Artificial Sequence
  Description of Artificial Sequence: Synthetic oligonucleotide
cacugggugaaggcugggg

SEQ ID NO: 1566955 - RNA, 19 nt, Artificial Sequence
  Description of Artificial Sequence: Synthetic oligonucleotide
guguguguguguguaacaa

SEQ ID NO: 1566956 - RNA, 19 nt, Artificial Sequence
  Description of Artificial Sequence: Synthetic oligonucleotide
ugcuaaccgaaaggaagua

SEQ ID NO: 1566957 - RNA, 19 nt, Artificial Sequence
  Description of Artificial Sequence: Synthetic oligonucleotide
caauuuuggcaggacaucu

SEQ ID NO: 1566958 - RNA, 19 nt, Artificial Sequence
  Description of Artificial Sequence: Synthetic oligonucleotide
gugugaucgaucaauuuau

SEQ ID NO: 1566959 - RNA, 19 nt, Artificial Sequence
  Description of Artificial Sequence: Synthetic oligonucleotide
auacauugaccggcugucu

SEQ ID NO: 1566960 - RNA, 19 nt, Artificial Sequence
  Description of Artificial Sequence: Synthetic oligonucleotide
gaagggugucguucucguc

SEQ ID NO: 1566961 - RNA, 19 nt, Artificial Sequence
  Description of Artificial Sequence: Synthetic oligonucleotide
caucuuugcagaaccggcu

SEQ ID NO: 1566962 - RNA, 19 nt, Artificial Sequence
  Description of Artificial Sequence: Synthetic oligonucleotide
ggacaucuuugcagaaccg

SEQ ID NO: 1566963 - RNA, 19 nt, Artificial Sequence
  Description of Artificial Sequence: Synthetic oligonucleotide
guguuugccuucccucuuc

SEQ ID NO: 1566964 - RNA, 19 nt, Artificial Sequence
  Description of Artificial Sequence: Synthetic oligonucleotide
gcccaguagaaucugcauc

SEQ ID NO: 1566965 - RNA, 19 nt, Artificial Sequence
  Description of Artificial Sequence: Synthetic oligonucleotide
gagucggugcacgagugaa

SEQ ID NO: 1566966 - RNA, 19 nt, Artificial Sequence
  Description of Artificial Sequence: Synthetic oligonucleotide
cuugugagucggugcacga

SEQ ID NO: 1566967 - RNA, 19 nt, Artificial Sequence
  Description of Artificial Sequence: Synthetic oligonucleotide
cuucaccacgucucuguga

SEQ ID NO: 1566968 - RNA, 19 nt, Artificial Sequence
  Description of Artificial Sequence: Synthetic oligonucleotide
ugaggcagaggggcuguac

SEQ ID NO: 1566969 - RNA, 19 nt, Artificial Sequence
  Description of Artificial Sequence: Synthetic oligonucleotide
ggccaauuuuggcaggaca

SEQ ID NO: 1566970 - RNA, 19 nt, Artificial Sequence
  Description of Artificial Sequence: Synthetic oligonucleotide
ggagguuaaggagcuggcc

SEQ ID NO: 1566971 - RNA, 19 nt, Artificial Sequence
  Description of Artificial Sequence: Synthetic oligonucleotide
gugagucggugcacgagug

SEQ ID NO: 1566972 - RNA, 19 nt, Artificial Sequence
  Description of Artificial Sequence: Synthetic oligonucleotide
agcagcucucuuaucaaua

SEQ ID NO: 1566973 - RNA, 19 nt, Artificial Sequence
  Description of Artificial Sequence: Synthetic oligonucleotide
cucggcuguggugcuagcc

SEQ ID NO: 1566974 - RNA, 19 nt, Artificial Sequence
  Description of Artificial Sequence: Synthetic oligonucleotide
ugcuagccucgcaggcugc

SEQ ID NO: 1566975 - RNA, 19 nt, Artificial Sequence
  Description of Artificial Sequence: Synthetic oligonucleotide
gaaccggcuccggagaaaa

SEQ ID NO: 1566976 - RNA, 19 nt, Artificial Sequence
  Description of Artificial Sequence: Synthetic oligonucleotide
ccagacaaugucaugugaa

SEQ ID NO: 1566977 - RNA, 19 nt, Artificial Sequence
  Description of Artificial Sequence: Synthetic oligonucleotide
ugcuuccaagugucuguaa

SEQ ID NO: 1566978 - RNA, 19 nt, Artificial Sequence
  Description of Artificial Sequence: Synthetic oligonucleotide
gugggcuaaagaguuaagu

SEQ ID NO: 1566979 - RNA, 19 nt, Artificial Sequence
  Description of Artificial Sequence: Synthetic oligonucleotide
agucggugcacgagugaag

SEQ ID NO: 1566980 - RNA, 19 nt, Artificial Sequence
  Description of Artificial Sequence: Synthetic oligonucleotide
gaugagccagugggaggag

SEQ ID NO: 1566981 - RNA, 19 nt, Artificial Sequence
  Description of Artificial Sequence: Synthetic oligonucleotide
agcugccaguagagcaugc

SEQ ID NO: 1566982 - RNA, 19 nt, Artificial Sequence
  Description of Artificial Sequence: Synthetic oligonucleotide
agugguggcuccacaucug

SEQ ID NO: 1566983 - RNA, 19 nt, Artificial Sequence
  Description of Artificial Sequence: Synthetic oligonucleotide
cacacaaaccgagcacauc

SEQ ID NO: 1566984 - RNA, 19 nt, Artificial Sequence
  Description of Artificial Sequence: Synthetic oligonucleotide
caagguggccaagacaucu

SEQ ID NO: 1566985 - RNA, 19 nt, Artificial Sequence
  Description of Artificial Sequence: Synthetic oligonucleotide
ggucuacuuucaucaggug

SEQ ID NO: 1566986 - RNA, 19 nt, Artificial Sequence
  Description of Artificial Sequence: Synthetic oligonucleotide
acgucucugugaugcugca

SEQ ID NO: 1566987 - RNA, 19 nt, Artificial Sequence
  Description of Artificial Sequence: Synthetic oligonucleotide
ucaccacgucucugugaug

SEQ ID NO: 1566988 - RNA, 19 nt, Artificial Sequence
  Description of Artificial Sequence: Synthetic oligonucleotide
caaaaggguucugcugcuc

SEQ ID NO: 1566989 - RNA, 19 nt, Artificial Sequence
  Description of Artificial Sequence: Synthetic oligonucleotide
ggcuccggagaaaaucacc

SEQ ID NO: 1566990 - RNA, 19 nt, Artificial Sequence
  Description of Artificial Sequence: Synthetic oligonucleotide
gaccggcugucuaauccac

SEQ ID NO: 1566991 - RNA, 19 nt, Artificial Sequence
  Description of Artificial Sequence: Synthetic oligonucleotide
guggacuaaagcugccagu

SEQ ID NO: 1566992 - RNA, 19 nt, Artificial Sequence
  Description of Artificial Sequence: Synthetic oligonucleotide
aucgaucaauuuauacauu

SEQ ID NO: 1566993 - RNA, 19 nt, Artificial Sequence
  Description of Artificial Sequence: Synthetic oligonucleotide
gucguucucguccacguuu

SEQ ID NO: 1566994 - RNA, 19 nt, Artificial Sequence
  Description of Artificial Sequence: Synthetic oligonucleotide
accacgucucugugaugcu

SEQ ID NO: 1566995 - RNA, 19 nt, Artificial Sequence
  Description of Artificial Sequence: Synthetic oligonucleotide
ugggaaccaguggacuaaa

SEQ ID NO: 1566996 - RNA, 19 nt, Artificial Sequence
  Description of Artificial Sequence: Synthetic oligonucleotide
cauugguggcaaaaggguu

SEQ ID NO: 1566997 - RNA, 19 nt, Artificial Sequence
  Description of Artificial Sequence: Synthetic oligonucleotide
uggccaauuuuggcaggac

SEQ ID NO: 1566998 - RNA, 19 nt, Artificial Sequence
  Description of Artificial Sequence: Synthetic oligonucleotide
acacacaaaccgagcacau

SEQ ID NO: 1566999 - RNA, 19 nt, Artificial Sequence
  Description of Artificial Sequence: Synthetic oligonucleotide
aagcaggcaucagccacuu

SEQ ID NO: 1567000 - RNA, 19 nt, Artificial Sequence
  Description of Artificial Sequence: Synthetic oligonucleotide
aacuucugucuggcaggga

SEQ ID NO: 1567001 - RNA, 19 nt, Artificial Sequence
  Description of Artificial Sequence: Synthetic oligonucleotide
cuuagagcagccagacaau

SEQ ID NO: 1567002 - RNA, 19 nt, Artificial Sequence
  Description of Artificial Sequence: Synthetic oligonucleotide
caccuaaguccagacucuc

SEQ ID NO: 1567003 - RNA, 19 nt, Artificial Sequence
  Description of Artificial Sequence: Synthetic oligonucleotide
gugucguucucguccacgu

SEQ ID NO: 1567004 - RNA, 19 nt, Artificial Sequence
  Description of Artificial Sequence: Synthetic oligonucleotide
ccgaugagccagugggagg

SEQ ID NO: 1567005 - RNA, 19 nt, Artificial Sequence
  Description of Artificial Sequence: Synthetic oligonucleotide
gcacgagugaaggccaggc

SEQ ID NO: 1567006 - RNA, 19 nt, Artificial Sequence
  Description of Artificial Sequence: Synthetic oligonucleotide
gugugagaauaaacugguc

SEQ ID NO: 1567007 - RNA, 19 nt, Artificial Sequence
  Description of Artificial Sequence: Synthetic oligonucleotide
gccagguagagucgggguc

SEQ ID NO: 1567008 - RNA, 19 nt, Artificial Sequence
  Description of Artificial Sequence: Synthetic oligonucleotide
caagugucuguaaaaccuu

SEQ ID NO: 1567009 - RNA, 19 nt, Artificial Sequence
  Description of Artificial Sequence: Synthetic oligonucleotide
gcuagcaucugaguuccga

SEQ ID NO: 1567010 - RNA, 19 nt, Artificial Sequence
  Description of Artificial Sequence: Synthetic oligonucleotide
aagacgcuccuggcagccu

SEQ ID NO: 1567011 - RNA, 19 nt, Artificial Sequence
  Description of Artificial Sequence: Synthetic oligonucleotide
gacuggcagggucacugua

SEQ ID NO: 1567012 - RNA, 19 nt, Artificial Sequence
  Description of Artificial Sequence: Synthetic oligonucleotide
ccaauuuuggcaggacauc

SEQ ID NO: 1567013 - RNA, 19 nt, Artificial Sequence
  Description of Artificial Sequence: Synthetic oligonucleotide
guagagucggggucuacuu

SEQ ID NO: 1567014 - RNA, 19 nt, Artificial Sequence
  Description of Artificial Sequence: Synthetic oligonucleotide
acccucaccuaaguccaga

SEQ ID NO: 1567015 - RNA, 19 nt, Artificial Sequence
  Description of Artificial Sequence: Synthetic oligonucleotide
gggucuacuuucaucaggu

SEQ ID NO: 1567016 - RNA, 19 nt, Artificial Sequence
  Description of Artificial Sequence: Synthetic oligonucleotide
agguagagucggggucuac

SEQ ID NO: 1567017 - RNA, 19 nt, Artificial Sequence
  Description of Artificial Sequence: Synthetic oligonucleotide
cgaucaauuuauacauuga

SEQ ID NO: 1567018 - RNA, 19 nt, Artificial Sequence
  Description of Artificial Sequence: Synthetic oligonucleotide
gggagguuaaggagcuggc

SEQ ID NO: 1567019 - RNA, 19 nt, Artificial Sequence
  Description of Artificial Sequence: Synthetic oligonucleotide
ggcuguggugcuagccucg

SEQ ID NO: 1567020 - RNA, 19 nt, Artificial Sequence
  Description of Artificial Sequence: Synthetic oligonucleotide
ggugcacgagugaaggcca

SEQ ID NO: 1567021 - RNA, 19 nt, Artificial Sequence
  Description of Artificial Sequence: Synthetic oligonucleotide
cccgaugagccagugggag

SEQ ID NO: 1567022 - RNA, 19 nt, Artificial Sequence
  Description of Artificial Sequence: Synthetic oligonucleotide
ccaguggacuaaagcugcc

SEQ ID NO: 1567023 - RNA, 19 nt, Artificial Sequence
  Description of Artificial Sequence: Synthetic oligonucleotide
ggugaaggcuggggugugg

SEQ ID NO: 1567024 - RNA, 19 nt, Artificial Sequence
  Description of Artificial Sequence: Synthetic oligonucleotide
cuguacagauagugggcua

SEQ ID NO: 1567025 - RNA, 19 nt, Artificial Sequence
  Description of Artificial Sequence: Synthetic oligonucleotide
ggacccaggcccugcaaga

SEQ ID NO: 1567026 - RNA, 19 nt, Artificial Sequence
  Description of Artificial Sequence: Synthetic oligonucleotide
cuggccaauuuuggcagga

SEQ ID NO: 1567027 - RNA, 19 nt, Artificial Sequence
  Description of Artificial Sequence: Synthetic oligonucleotide
ggaugacugcucuucuucu

SEQ ID NO: 1567028 - RNA, 19 nt, Artificial Sequence
  Description of Artificial Sequence: Synthetic oligonucleotide
auagugggcuaaagaguua

SEQ ID NO: 1567029 - RNA, 19 nt, Artificial Sequence
  Description of Artificial Sequence: Synthetic oligonucleotide
gugcacgagugaaggccag

SEQ ID NO: 1567030 - RNA, 19 nt, Artificial Sequence
  Description of Artificial Sequence: Synthetic oligonucleotide
agaaccggcuccggagaaa

SEQ ID NO: 1567031 - RNA, 19 nt, Artificial Sequence
  Description of Artificial Sequence: Synthetic oligonucleotide
gcugucuaauccaccuuca

SEQ ID NO: 1567032 - RNA, 19 nt, Artificial Sequence
  Description of Artificial Sequence: Synthetic oligonucleotide
cccucaccuaaguccagac

SEQ ID NO: 1567033 - RNA, 19 nt, Artificial Sequence
  Description of Artificial Sequence: Synthetic oligonucleotide
gcuguacagauagugggcu

SEQ ID NO: 1567034 - RNA, 19 nt, Artificial Sequence
  Description of Artificial Sequence: Synthetic oligonucleotide
gccaauuuuggcaggacau

SEQ ID NO: 1567035 - RNA, 19 nt, Artificial Sequence
  Description of Artificial Sequence: Synthetic oligonucleotide
gcucucuuaucaauaaaau

SEQ ID NO: 1567036 - RNA, 19 nt, Artificial Sequence
  Description of Artificial Sequence: Synthetic oligonucleotide
ccugcaagacagccagcug

SEQ ID NO: 1567037 - RNA, 19 nt, Artificial Sequence
  Description of Artificial Sequence: Synthetic oligonucleotide
gguggaugacugcucuucu

SEQ ID NO: 1567038 - RNA, 19 nt, Artificial Sequence
  Description of Artificial Sequence: Synthetic oligonucleotide
acgggcuguuuggugcuga

SEQ ID NO: 1567039 - RNA, 19 nt, Artificial Sequence
  Description of Artificial Sequence: Synthetic oligonucleotide
gguagagucggggucuacu

SEQ ID NO: 1567040 - RNA, 19 nt, Artificial Sequence
  Description of Artificial Sequence: Synthetic oligonucleotide
ggcuaucuggaugugcacu

SEQ ID NO: 1567041 - RNA, 19 nt, Artificial Sequence
  Description of Artificial Sequence: Synthetic oligonucleotide
cagaaccggcuccggagaa

SEQ ID NO: 1567042 - RNA, 19 nt, Artificial Sequence
  Description of Artificial Sequence: Synthetic oligonucleotide
cugcacggggcagcacagc

SEQ ID NO: 1567043 - RNA, 19 nt, Artificial Sequence
  Description of Artificial Sequence: Synthetic oligonucleotide
gcugguguuugccuucccu

SEQ ID NO: 1567044 - RNA, 19 nt, Artificial Sequence
  Description of Artificial Sequence: Synthetic oligonucleotide
guaauuucacgggcuguuu

SEQ ID NO: 1567045 - RNA, 19 nt, Artificial Sequence
  Description of Artificial Sequence: Synthetic oligonucleotide
gccagugugugagaauaaa

SEQ ID NO: 1567046 - RNA, 19 nt, Artificial Sequence
  Description of Artificial Sequence: Synthetic oligonucleotide
ccaagacaucuugaaccac

SEQ ID NO: 1567047 - RNA, 19 nt, Artificial Sequence
  Description of Artificial Sequence: Synthetic oligonucleotide
ccggagaaaaucaccacau

SEQ ID NO: 1567048 - RNA, 19 nt, Artificial Sequence
  Description of Artificial Sequence: Synthetic oligonucleotide
guggaugacugcucuucuu

SEQ ID NO: 1567049 - RNA, 19 nt, Artificial Sequence
  Description of Artificial Sequence: Synthetic oligonucleotide
caguugugugaucgaucaa

SEQ ID NO: 1567050 - RNA, 19 nt, Artificial Sequence
  Description of Artificial Sequence: Synthetic oligonucleotide
caucugaguuccgaagcau

SEQ ID NO: 1567051 - RNA, 19 nt, Artificial Sequence
  Description of Artificial Sequence: Synthetic oligonucleotide
ccugggagguuaaggagcu

SEQ ID NO: 1567052 - RNA, 19 nt, Artificial Sequence
  Description of Artificial Sequence: Synthetic oligonucleotide
gcggauuuucagauucuua

SEQ ID NO: 1567053 - RNA, 19 nt, Artificial Sequence
  Description of Artificial Sequence: Synthetic oligonucleotide
guuuggugcugagguaaau

SEQ ID NO: 1567054 - RNA, 19 nt, Artificial Sequence
  Description of Artificial Sequence: Synthetic oligonucleotide
cuguggugcuagccucgca

SEQ ID NO: 1567055 - RNA, 19 nt, Artificial Sequence
  Description of Artificial Sequence: Synthetic oligonucleotide
gcaggacaagccagguaga

SEQ ID NO: 1567056 - RNA, 19 nt, Artificial Sequence
  Description of Artificial Sequence: Synthetic oligonucleotide
cacgggcuguuuggugcug

SEQ ID NO: 1567057 - RNA, 19 nt, Artificial Sequence
  Description of Artificial Sequence: Synthetic oligonucleotide
cauugaccggcugucuaau

SEQ ID NO: 1567058 - RNA, 19 nt, Artificial Sequence
  Description of Artificial Sequence: Synthetic oligonucleotide
cguucucguccacguuugg

SEQ ID NO: 1567059 - RNA, 19 nt, Artificial Sequence
  Description of Artificial Sequence: Synthetic oligonucleotide
cggggucuacuuucaucag

SEQ ID NO: 1567060 - RNA, 19 nt, Artificial Sequence
  Description of Artificial Sequence: Synthetic oligonucleotide
gacgcuccuggcagccucu

SEQ ID NO: 1567061 - RNA, 19 nt, Artificial Sequence
  Description of Artificial Sequence: Synthetic oligonucleotide
cagggguggcucagcucaa

SEQ ID NO: 1567062 - RNA, 19 nt, Artificial Sequence
  Description of Artificial Sequence: Synthetic oligonucleotide
ccacaucugcuaaccgaaa

SEQ ID NO: 1567063 - RNA, 19 nt, Artificial Sequence
  Description of Artificial Sequence: Synthetic oligonucleotide
ggccagugugugagaauaa

SEQ ID NO: 1567064 - RNA, 19 nt, Artificial Sequence
  Description of Artificial Sequence: Synthetic oligonucleotide
cucgcaggcugcugguguu

SEQ ID NO: 1567065 - RNA, 19 nt, Artificial Sequence
  Description of Artificial Sequence: Synthetic oligonucleotide
caccuccaccagggguggc

SEQ ID NO: 1567066 - RNA, 19 nt, Artificial Sequence
  Description of Artificial Sequence: Synthetic oligonucleotide
gguuaaggagcuggccaau

SEQ ID NO: 1567067 - RNA, 19 nt, Artificial Sequence
  Description of Artificial Sequence: Synthetic oligonucleotide
cgggcuguuuggugcugag

SEQ ID NO: 1567068 - RNA, 19 nt, Artificial Sequence
  Description of Artificial Sequence: Synthetic oligonucleotide
gcuaaagaguuaaguucuu

SEQ ID NO: 1567069 - RNA, 19 nt, Artificial Sequence
  Description of Artificial Sequence: Synthetic oligonucleotide
ggcggauuuucagauucuu

SEQ ID NO: 1567070 - RNA, 19 nt, Artificial Sequence
  Description of Artificial Sequence: Synthetic oligonucleotide
gggugucguucucguccac

SEQ ID NO: 1567071 - RNA, 19 nt, Artificial Sequence
  Description of Artificial Sequence: Synthetic oligonucleotide
ccucaccuaaguccagacu

SEQ ID NO: 1567072 - RNA, 19 nt, Artificial Sequence
  Description of Artificial Sequence: Synthetic oligonucleotide
cugcugcacggggcagcac

SEQ ID NO: 1567073 - RNA, 19 nt, Artificial Sequence
  Description of Artificial Sequence: Synthetic oligonucleotide
caagaucuucaggcggauu

SEQ ID NO: 1567074 - RNA, 19 nt, Artificial Sequence
  Description of Artificial Sequence: Synthetic oligonucleotide
gcccgaugagccaguggga

SEQ ID NO: 1567075 - RNA, 19 nt, Artificial Sequence
  Description of Artificial Sequence: Synthetic oligonucleotide
acgcuccuggcagccucuu

SEQ ID NO: 1567076 - RNA, 19 nt, Artificial Sequence
  Description of Artificial Sequence: Synthetic oligonucleotide
gugaggcagaggggcugua

SEQ ID NO: 1567077 - RNA, 19 nt, Artificial Sequence
  Description of Artificial Sequence: Synthetic oligonucleotide
ccaucacauccuuggcuau

SEQ ID NO: 1567078 - RNA, 19 nt, Artificial Sequence
  Description of Artificial Sequence: Synthetic oligonucleotide
gggguggaugacugcucuu

SEQ ID NO: 1567079 - RNA, 19 nt, Artificial Sequence
  Description of Artificial Sequence: Synthetic oligonucleotide
guccucggcuguggugcua

SEQ ID NO: 1567080 - RNA, 19 nt, Artificial Sequence
  Description of Artificial Sequence: Synthetic oligonucleotide
ccaagaucuucaggcggau

SEQ ID NO: 1567081 - RNA, 19 nt, Artificial Sequence
  Description of Artificial Sequence: Synthetic oligonucleotide
aaaaccacguagcagugcc

SEQ ID NO: 1567082 - RNA, 19 nt, Artificial Sequence
  Description of Artificial Sequence: Synthetic oligonucleotide
  modified_base (18)..(18): a, c, u, g, unknown or other
uuuauugcuacccauucng

SEQ ID NO: 1567083 - RNA, 19 nt, Artificial Sequence
  Description of Artificial Sequence: Synthetic oligonucleotide
auaaaagucgaacaggaca

SEQ ID NO: 1567084 - RNA, 19 nt, Artificial Sequence
  Description of Artificial Sequence: Synthetic oligonucleotide
gagacuaucccuuuggagc

SEQ ID NO: 1567085 - RNA, 19 nt, Artificial Sequence
  Description of Artificial Sequence: Synthetic oligonucleotide
uaaaagucgaacaggacac

SEQ ID NO: 1567086 - RNA, 19 nt, Artificial Sequence
  Description of Artificial Sequence: Synthetic oligonucleotide
uggcucauauuaaaggugg

SEQ ID NO: 1567087 - RNA, 19 nt, Artificial Sequence
  Description of Artificial Sequence: Synthetic oligonucleotide
uccuaugugaaguaccagg

SEQ ID NO: 1567088 - RNA, 19 nt, Artificial Sequence
  Description of Artificial Sequence: Synthetic oligonucleotide
agucgaacaguguagcccc

SEQ ID NO: 1567089 - RNA, 19 nt, Artificial Sequence
  Description of Artificial Sequence: Synthetic oligonucleotide
ucaucgaacaccacaaucu

SEQ ID NO: 1567090 - RNA, 19 nt, Artificial Sequence
  Description of Artificial Sequence: Synthetic oligonucleotide
  modified_base (10)..(10): a, c, u, g, unknown or other
uacccauucnggcugaacc

SEQ ID NO: 1567091 - RNA, 19 nt, Artificial Sequence
  Description of Artificial Sequence: Synthetic oligonucleotide
uggucuauccucaggacgg

SEQ ID NO: 1567092 - RNA, 19 nt, Artificial Sequence
  Description of Artificial Sequence: Synthetic oligonucleotide
uuggagacaagucuugacc

SEQ ID NO: 1567093 - RNA, 19 nt, Artificial Sequence
  Description of Artificial Sequence: Synthetic oligonucleotide
gaugagacuaucccuuugg

SEQ ID NO: 1567094 - RNA, 19 nt, Artificial Sequence
  Description of Artificial Sequence: Synthetic oligonucleotide
cacaguugaccaaagagcc

SEQ ID NO: 1567095 - RNA, 19 nt, Artificial Sequence
  Description of Artificial Sequence: Synthetic oligonucleotide
  modified_base (16)..(16): a, c, u, g, unknown or other
uauugcuacccauucnggc

SEQ ID NO: 1567096 - RNA, 19 nt, Artificial Sequence
  Description of Artificial Sequence: Synthetic oligonucleotide
aagguugggaucagcaucc

SEQ ID NO: 1567097 - RNA, 19 nt, Artificial Sequence
  Description of Artificial Sequence: Synthetic oligonucleotide
gacauaaaagucgaacagg

SEQ ID NO: 1567098 - RNA, 19 nt, Artificial Sequence
  Description of Artificial Sequence: Synthetic oligonucleotide
uuguagggcagccagggag

SEQ ID NO: 1567099 - RNA, 19 nt, Artificial Sequence
  Description of Artificial Sequence: Synthetic oligonucleotide
ucuagguacugcaggaugc

SEQ ID NO: 1567100 - RNA, 19 nt, Artificial Sequence
  Description of Artificial Sequence: Synthetic oligonucleotide
ugggcguugucuaggaugg

SEQ ID NO: 1567101 - RNA, 19 nt, Artificial Sequence
  Description of Artificial Sequence: Synthetic oligonucleotide
aaguccuaugugaaguacc

SEQ ID NO: 1567102 - RNA, 19 nt, Artificial Sequence
  Description of Artificial Sequence: Synthetic oligonucleotide
aagucuugaccaucucuac

SEQ ID NO: 1567103 - RNA, 19 nt, Artificial Sequence
  Description of Artificial Sequence: Synthetic oligonucleotide
cuucucggaacucagauuc

SEQ ID NO: 1567104 - RNA, 19 nt, Artificial Sequence
  Description of Artificial Sequence: Synthetic oligonucleotide
ugcgaugacacaacugucc

SEQ ID NO: 1567105 - RNA, 19 nt, Artificial Sequence
  Description of Artificial Sequence: Synthetic oligonucleotide
  modified_base (17)..(17): a, c, u, g, unknown or other
uuauugcuacccauucngg

SEQ ID NO: 1567106 - RNA, 19 nt, Artificial Sequence
  Description of Artificial Sequence: Synthetic oligonucleotide
  modified_base (3)..(3): a, c, u, g, unknown or other
ucnggcugaaccaguauug

SEQ ID NO: 1567107 - RNA, 19 nt, Artificial Sequence
  Description of Artificial Sequence: Synthetic oligonucleotide
ucgaacaccacaaucucgu

SEQ ID NO: 1567108 - RNA, 19 nt, Artificial Sequence
  Description of Artificial Sequence: Synthetic oligonucleotide
agucgaacaggacacuggg

SEQ ID NO: 1567109 - RNA, 19 nt, Artificial Sequence
  Description of Artificial Sequence: Synthetic oligonucleotide
uccuaugugaugcccaaug

SEQ ID NO: 1567110 - RNA, 19 nt, Artificial Sequence
  Description of Artificial Sequence: Synthetic oligonucleotide
gaauucuccuuccacaguc

SEQ ID NO: 1567111 - RNA, 19 nt, Artificial Sequence
  Description of Artificial Sequence: Synthetic oligonucleotide
ucuggguugcucuuugugc

SEQ ID NO: 1567112 - RNA, 19 nt, Artificial Sequence
  Description of Artificial Sequence: Synthetic oligonucleotide
agagcauugagcgugccuc

SEQ ID NO: 1567113 - RNA, 19 nt, Artificial Sequence
  Description of Artificial Sequence: Synthetic oligonucleotide
uggagacaagucuugacca

SEQ ID NO: 1567114 - RNA, 19 nt, Artificial Sequence
  Description of Artificial Sequence: Synthetic oligonucleotide
cacucagaguguaaggccg

SEQ ID NO: 1567115 - RNA, 19 nt, Artificial Sequence
  Description of Artificial Sequence: Synthetic oligonucleotide
aguguaaggccguccuugc

SEQ ID NO: 1567116 - RNA, 19 nt, Artificial Sequence
  Description of Artificial Sequence: Synthetic oligonucleotide
agcagcauuuauugcuacc

SEQ ID NO: 1567117 - RNA, 19 nt, Artificial Sequence
  Description of Artificial Sequence: Synthetic oligonucleotide
  modified_base (14)..(14): a, c, u, g, unknown or other
uugcuacccauucnggcug

SEQ ID NO: 1567118 - RNA, 19 nt, Artificial Sequence
  Description of Artificial Sequence: Synthetic oligonucleotide
  modified_base (15)..(15): a, c, u, g, unknown or other
auugcuacccauucnggcu

SEQ ID NO: 1567119 - RNA, 19 nt, Artificial Sequence
  Description of Artificial Sequence: Synthetic oligonucleotide
cuaggauggagccuggcag

SEQ ID NO: 1567120 - RNA, 19 nt, Artificial Sequence
  Description of Artificial Sequence: Synthetic oligonucleotide
augugugccuggucuaucc

SEQ ID NO: 1567121 - RNA, 19 nt, Artificial Sequence
  Description of Artificial Sequence: Synthetic oligonucleotide
ucauauuaaaggugguuau

SEQ ID NO: 1567122 - RNA, 19 nt, Artificial Sequence
  Description of Artificial Sequence: Synthetic oligonucleotide
uguggaugagacuaucccu

SEQ ID NO: 1567123 - RNA, 19 nt, Artificial Sequence
  Description of Artificial Sequence: Synthetic oligonucleotide
uggagccucgcucugaugu

SEQ ID NO: 1567124 - RNA, 19 nt, Artificial Sequence
  Description of Artificial Sequence: Synthetic oligonucleotide
guaugucuugcauucuggg

SEQ ID NO: 1567125 - RNA, 19 nt, Artificial Sequence
  Description of Artificial Sequence: Synthetic oligonucleotide
ucgaacaggacacuggguu

SEQ ID NO: 1567126 - RNA, 19 nt, Artificial Sequence
  Description of Artificial Sequence: Synthetic oligonucleotide
aauugagcugcguuccuau

SEQ ID NO: 1567127 - RNA, 19 nt, Artificial Sequence
  Description of Artificial Sequence: Synthetic oligonucleotide
gaugaguauggcuuccuca

SEQ ID NO: 1567128 - RNA, 19 nt, Artificial Sequence
  Description of Artificial Sequence: Synthetic oligonucleotide
uguaaggccguccuugcuc

SEQ ID NO: 1567129 - RNA, 19 nt, Artificial Sequence
  Description of Artificial Sequence: Synthetic oligonucleotide
uccgacacuucaagguugg

SEQ ID NO: 1567130 - RNA, 19 nt, Artificial Sequence
  Description of Artificial Sequence: Synthetic oligonucleotide
cuguggaugagacuauccc

SEQ ID NO: 1567131 - RNA, 19 nt, Artificial Sequence
  Description of Artificial Sequence: Synthetic oligonucleotide
aaagucgaacaggacacug

SEQ ID NO: 1567132 - RNA, 19 nt, Artificial Sequence
  Description of Artificial Sequence: Synthetic oligonucleotide
cuggucuauccucaggacg

SEQ ID NO: 1567133 - RNA, 19 nt, Artificial Sequence
  Description of Artificial Sequence: Synthetic oligonucleotide
  modified_base (19)..(19): a, c, u, g, unknown or other
auuuauugcuacccauucn

SEQ ID NO: 1567134 - RNA, 19 nt, Artificial Sequence
  Description of Artificial Sequence: Synthetic oligonucleotide
cuggguugcucuuugugcc

SEQ ID NO: 1567135 - RNA, 19 nt, Artificial Sequence
  Description of Artificial Sequence: Synthetic oligonucleotide
ugagcugcguuccuaugug

SEQ ID NO: 1567136 - RNA, 19 nt, Artificial Sequence
  Description of Artificial Sequence: Synthetic oligonucleotide
ucggaacucagauuccuca

SEQ ID NO: 1567137 - RNA, 19 nt, Artificial Sequence
  Description of Artificial Sequence: Synthetic oligonucleotide
aucgagagcauugagcgug

SEQ ID NO: 1567138 - RNA, 19 nt, Artificial Sequence
  Description of Artificial Sequence: Synthetic oligonucleotide
uuuggagacaagucuugac

SEQ ID NO: 1567139 - RNA, 19 nt, Artificial Sequence
  Description of Artificial Sequence: Synthetic oligonucleotide
aagucgaacaggacacugg

SEQ ID NO: 1567140 - RNA, 19 nt, Artificial Sequence
  Description of Artificial Sequence: Synthetic oligonucleotide
uugagcugcguuccuaugu

SEQ ID NO: 1567141 - RNA, 19 nt, Artificial Sequence
  Description of Artificial Sequence: Synthetic oligonucleotide
cuauccucaggacggaggc

SEQ ID NO: 1567142 - RNA, 19 nt, Artificial Sequence
  Description of Artificial Sequence: Synthetic oligonucleotide
  modified_base (4)..(4): a, c, u, g, unknown or other
uucnggcugaaccaguauu

SEQ ID NO: 1567143 - RNA, 19 nt, Artificial Sequence
  Description of Artificial Sequence: Synthetic oligonucleotide
cauaaaagucgaacaggac

SEQ ID NO: 1567144 - RNA, 19 nt, Artificial Sequence
  Description of Artificial Sequence: Synthetic oligonucleotide
caagguugggaucagcauc

SEQ ID NO: 1567145 - RNA, 19 nt, Artificial Sequence
  Description of Artificial Sequence: Synthetic oligonucleotide
auauuaaaggugguuauuu

SEQ ID NO: 1567146 - RNA, 19 nt, Artificial Sequence
  Description of Artificial Sequence: Synthetic oligonucleotide
cuggcucauauuaaaggug

SEQ ID NO: 1567147 - RNA, 19 nt, Artificial Sequence
  Description of Artificial Sequence: Synthetic oligonucleotide
caccacaagagcaugccug

SEQ ID NO: 1567148 - RNA, 19 nt, Artificial Sequence
  Description of Artificial Sequence: Synthetic oligonucleotide
gaaguaccagguuauugga

SEQ ID NO: 1567149 - RNA, 19 nt, Artificial Sequence
  Description of Artificial Sequence: Synthetic oligonucleotide
caugccugaagcugggcag

SEQ ID NO: 1567150 - RNA, 19 nt, Artificial Sequence
  Description of Artificial Sequence: Synthetic oligonucleotide
agggguugaggaucccugc

SEQ ID NO: 1567151 - RNA, 19 nt, Artificial Sequence
  Description of Artificial Sequence: Synthetic oligonucleotide
agaugaguauggcuuccuc

SEQ ID NO: 1567152 - RNA, 19 nt, Artificial Sequence
  Description of Artificial Sequence: Synthetic oligonucleotide
ggcuggcucauauuaaagg

SEQ ID NO: 1567153 - RNA, 19 nt, Artificial Sequence
  Description of Artificial Sequence: Synthetic oligonucleotide
ucuaccacgaugccuucuc

SEQ ID NO: 1567154 - RNA, 19 nt, Artificial Sequence
  Description of Artificial Sequence: Synthetic oligonucleotide
aggugcgaagcucagguga

SEQ ID NO: 1567155 - RNA, 19 nt, Artificial Sequence
  Description of Artificial Sequence: Synthetic oligonucleotide
uccaagggguugaggaucc

SEQ ID NO: 1567156 - RNA, 19 nt, Artificial Sequence
  Description of Artificial Sequence: Synthetic oligonucleotide
cgaucgagagcauugagcg

SEQ ID NO: 1567157 - RNA, 19 nt, Artificial Sequence
  Description of Artificial Sequence: Synthetic oligonucleotide
cucaucgaacaccacaauc

SEQ ID NO: 1567158 - RNA, 19 nt, Artificial Sequence
  Description of Artificial Sequence: Synthetic oligonucleotide
ucgaaguccagguuccagu

SEQ ID NO: 1567159 - RNA, 19 nt, Artificial Sequence
  Description of Artificial Sequence: Synthetic oligonucleotide
cugggcguugucuaggaug

SEQ ID NO: 1567160 - RNA, 19 nt, Artificial Sequence
  Description of Artificial Sequence: Synthetic oligonucleotide
uuuggagcgcuuccuggug

SEQ ID NO: 1567161 - RNA, 19 nt, Artificial Sequence
  Description of Artificial Sequence: Synthetic oligonucleotide
cugcguuccuaugugaugc

SEQ ID NO: 1567162 - RNA, 19 nt, Artificial Sequence
  Description of Artificial Sequence: Synthetic oligonucleotide
gaguguaaggccguccuug

SEQ ID NO: 1567163 - RNA, 19 nt, Artificial Sequence
  Description of Artificial Sequence: Synthetic oligonucleotide
acuggguuccgacacuuca

SEQ ID NO: 1567164 - RNA, 19 nt, Artificial Sequence
  Description of Artificial Sequence: Synthetic oligonucleotide
gaaaccucaaggccaucac

SEQ ID NO: 1567165 - RNA, 19 nt, Artificial Sequence
  Description of Artificial Sequence: Synthetic oligonucleotide
uugggaucagcauccacuc

SEQ ID NO: 1567166 - RNA, 19 nt, Artificial Sequence
  Description of Artificial Sequence: Synthetic oligonucleotide
ugacacaacuguccccuug

SEQ ID NO: 1567167 - RNA, 19 nt, Artificial Sequence
  Description of Artificial Sequence: Synthetic oligonucleotide
cagucgaacaguguagccc

SEQ ID NO: 1567168 - RNA, 19 nt, Artificial Sequence
  Description of Artificial Sequence: Synthetic oligonucleotide
acacuucaagguugggauc

SEQ ID NO: 1567169 - RNA, 19 nt, Artificial Sequence
  Description of Artificial Sequence: Synthetic oligonucleotide
cauugagcgugccucuggg

SEQ ID NO: 1567170 - RNA, 19 nt, Artificial Sequence
  Description of Artificial Sequence: Synthetic oligonucleotide
ucuucaaggugcucauccu

SEQ ID NO: 1567171 - RNA, 19 nt, Artificial Sequence
  Description of Artificial Sequence: Synthetic oligonucleotide
gcauguguugacauaaaag

SEQ ID NO: 1567172 - RNA, 19 nt, Artificial Sequence
  Description of Artificial Sequence: Synthetic oligonucleotide
aaaccacguagcagugccc

SEQ ID NO: 1567173 - RNA, 19 nt, Artificial Sequence
  Description of Artificial Sequence: Synthetic oligonucleotide
cuucaaggugcucauccug

SEQ ID NO: 1567174 - RNA, 19 nt, Artificial Sequence
  Description of Artificial Sequence: Synthetic oligonucleotide
ucaagguugggaucagcau

SEQ ID NO: 1567175 - RNA, 19 nt, Artificial Sequence
  Description of Artificial Sequence: Synthetic oligonucleotide
aagccuuucucagguacug

SEQ ID NO: 1567176 - RNA, 19 nt, Artificial Sequence
  Description of Artificial Sequence: Synthetic oligonucleotide
accagugggcaaauugagc

SEQ ID NO: 1567177 - RNA, 19 nt, Artificial Sequence
  Description of Artificial Sequence: Synthetic oligonucleotide
aguagagaccagcuuuggu

SEQ ID NO: 1567178 - RNA, 19 nt, Artificial Sequence
  Description of Artificial Sequence: Synthetic oligonucleotide
caggcucuagcaaucuggc

SEQ ID NO: 1567179 - RNA, 19 nt, Artificial Sequence
  Description of Artificial Sequence: Synthetic oligonucleotide
cucuagguacugcaggaug

SEQ ID NO: 1567180 - RNA, 19 nt, Artificial Sequence
  Description of Artificial Sequence: Synthetic oligonucleotide
uugagcgugccucuggguu

SEQ ID NO: 1567181 - RNA, 19 nt, Artificial Sequence
  Description of Artificial Sequence: Synthetic oligonucleotide
aucgaacaccacaaucucg

SEQ ID NO: 1567182 - RNA, 19 nt, Artificial Sequence
  Description of Artificial Sequence: Synthetic oligonucleotide
uuggagcgcuuccuggugc

SEQ ID NO: 1567183 - RNA, 19 nt, Artificial Sequence
  Description of Artificial Sequence: Synthetic oligonucleotide
  modified_base (9)..(9): a, c, u, g, unknown or other
acccauucnggcugaacca

SEQ ID NO: 1567184 - RNA, 19 nt, Artificial Sequence
  Description of Artificial Sequence: Synthetic oligonucleotide
ugagcgugccucuggguug

SEQ ID NO: 1567185 - RNA, 19 nt, Artificial Sequence
  Description of Artificial Sequence: Synthetic oligonucleotide
gggaagaaagccuuucuca

SEQ ID NO: 1567186 - RNA, 19 nt, Artificial Sequence
  Description of Artificial Sequence: Synthetic oligonucleotide
uccugcgaugacacaacug

SEQ ID NO: 1567187 - RNA, 19 nt, Artificial Sequence
  Description of Artificial Sequence: Synthetic oligonucleotide
gaugcgagccagcuguaca

SEQ ID NO: 1567188 - RNA, 19 nt, Artificial Sequence
  Description of Artificial Sequence: Synthetic oligonucleotide
gaugacacaacuguccccu

SEQ ID NO: 1567189 - RNA, 19 nt, Artificial Sequence
  Description of Artificial Sequence: Synthetic oligonucleotide
aucccugcaaacugcagau

SEQ ID NO: 1567190 - RNA, 19 nt, Artificial Sequence
  Description of Artificial Sequence: Synthetic oligonucleotide
caagucuugaccaucucua

SEQ ID NO: 1567191 - RNA, 19 nt, Artificial Sequence
  Description of Artificial Sequence: Synthetic oligonucleotide
aaaagucgaacaggacacu

SEQ ID NO: 1567192 - RNA, 19 nt, Artificial Sequence
  Description of Artificial Sequence: Synthetic oligonucleotide
cucauauuaaaggugguua

SEQ ID NO: 1567193 - RNA, 19 nt, Artificial Sequence
  Description of Artificial Sequence: Synthetic oligonucleotide
caucgaacaccacaaucuc

SEQ ID NO: 1567194 - RNA, 19 nt, Artificial Sequence
  Description of Artificial Sequence: Synthetic oligonucleotide
caccagugggcaaauugag

SEQ ID NO: 1567195 - RNA, 19 nt, Artificial Sequence
  Description of Artificial Sequence: Synthetic oligonucleotide
ggugaggacuguccaaggg

SEQ ID NO: 1567196 - RNA, 19 nt, Artificial Sequence
  Description of Artificial Sequence: Synthetic oligonucleotide
cucagugcggaugguacgg

SEQ ID NO: 1567197 - RNA, 19 nt, Artificial Sequence
  Description of Artificial Sequence: Synthetic oligonucleotide
ucagucgcacggucacucg

SEQ ID NO: 1567198 - RNA, 19 nt, Artificial Sequence
  Description of Artificial Sequence: Synthetic oligonucleotide
uucucggaacucagauucc

SEQ ID NO: 1567199 - RNA, 19 nt, Artificial Sequence
  Description of Artificial Sequence: Synthetic oligonucleotide
cacgaugccuucucggaac

SEQ ID NO: 1567200 - RNA, 19 nt, Artificial Sequence
  Description of Artificial Sequence: Synthetic oligonucleotide
gguacuguggacacucuag

SEQ ID NO: 1567201 - RNA, 19 nt, Artificial Sequence
  Description of Artificial Sequence: Synthetic oligonucleotide
cuagguacugcaggaugcg

SEQ ID NO: 1567202 - RNA, 19 nt, Artificial Sequence
  Description of Artificial Sequence: Synthetic oligonucleotide
agccccaguagagaccagc

SEQ ID NO: 1567203 - RNA, 19 nt, Artificial Sequence
  Description of Artificial Sequence: Synthetic oligonucleotide
cgagcuggaaaccucaagg

SEQ ID NO: 1567204 - RNA, 19 nt, Artificial Sequence
  Description of Artificial Sequence: Synthetic oligonucleotide
cuucugguucagucgcacg

SEQ ID NO: 1567205 - RNA, 19 nt, Artificial Sequence
  Description of Artificial Sequence: Synthetic oligonucleotide
augagacuaucccuuugga

SEQ ID NO: 1567206 - RNA, 19 nt, Artificial Sequence
  Description of Artificial Sequence: Synthetic oligonucleotide
cugaugucccaauggucag

SEQ ID NO: 1567207 - RNA, 19 nt, Artificial Sequence
  Description of Artificial Sequence: Synthetic oligonucleotide
gcagcauuuauugcuaccc

SEQ ID NO: 1567208 - RNA, 19 nt, Artificial Sequence
  Description of Artificial Sequence: Synthetic oligonucleotide
aguccuaugugaaguacca

SEQ ID NO: 1567209 - RNA, 19 nt, Artificial Sequence
  Description of Artificial Sequence: Synthetic oligonucleotide
  modified_base (2)..(2): a, c, u, g, unknown or other
cnggcugaaccaguauugg

SEQ ID NO: 1567210 - RNA, 19 nt, Artificial Sequence
  Description of Artificial Sequence: Synthetic oligonucleotide
ugcgaagcucaggugacug

SEQ ID NO: 1567211 - RNA, 19 nt, Artificial Sequence
  Description of Artificial Sequence: Synthetic oligonucleotide
uacugcaggaugcgagcca

SEQ ID NO: 1567212 - RNA, 19 nt, Artificial Sequence
  Description of Artificial Sequence: Synthetic oligonucleotide
ucagaguguaaggccgucc

SEQ ID NO: 1567213 - RNA, 19 nt, Artificial Sequence
  Description of Artificial Sequence: Synthetic oligonucleotide
guaggugcgaagcucaggu

SEQ ID NO: 1567214 - RNA, 19 nt, Artificial Sequence
  Description of Artificial Sequence: Synthetic oligonucleotide
gcaaauugagcugcguucc

SEQ ID NO: 1567215 - RNA, 19 nt, Artificial Sequence
  Description of Artificial Sequence: Synthetic oligonucleotide
ucucggaacucagauuccu

SEQ ID NO: 1567216 - RNA, 19 nt, Artificial Sequence
  Description of Artificial Sequence: Synthetic oligonucleotide
gacggaggcugaugggaag

SEQ ID NO: 1567217 - RNA, 19 nt, Artificial Sequence
  Description of Artificial Sequence: Synthetic oligonucleotide
gguacggcugcccuggcug

SEQ ID NO: 1567218 - RNA, 19 nt, Artificial Sequence
  Description of Artificial Sequence: Synthetic oligonucleotide
ucgagagcauugagcgugc

SEQ ID NO: 1567219 - RNA, 19 nt, Artificial Sequence
  Description of Artificial Sequence: Synthetic oligonucleotide
cauccugccgcauguggug

SEQ ID NO: 1567220 - RNA, 19 nt, Artificial Sequence
  Description of Artificial Sequence: Synthetic oligonucleotide
acucccuugaauucuccuu

SEQ ID NO: 1567221 - RNA, 19 nt, Artificial Sequence
  Description of Artificial Sequence: Synthetic oligonucleotide
cugaaccaguauugggcag

SEQ ID NO: 1567222 - RNA, 19 nt, Artificial Sequence
  Description of Artificial Sequence: Synthetic oligonucleotide
ccuuucucagguacugugg

SEQ ID NO: 1567223 - RNA, 19 nt, Artificial Sequence
  Description of Artificial Sequence: Synthetic oligonucleotide
uuccuggugccgaucgaga

SEQ ID NO: 1567224 - RNA, 19 nt, Artificial Sequence
  Description of Artificial Sequence: Synthetic oligonucleotide
aaauugagcugcguuccua

SEQ ID NO: 1567225 - RNA, 19 nt, Artificial Sequence
  Description of Artificial Sequence: Synthetic oligonucleotide
uucagucgcacggucacuc

SEQ ID NO: 1567226 - RNA, 19 nt, Artificial Sequence
  Description of Artificial Sequence: Synthetic oligonucleotide
cuaccacgaugccuucucg

SEQ ID NO: 1567227 - RNA, 19 nt, Artificial Sequence
  Description of Artificial Sequence: Synthetic oligonucleotide
acaugccugccccuucuug

SEQ ID NO: 1567228 - RNA, 19 nt, Artificial Sequence
  Description of Artificial Sequence: Synthetic oligonucleotide
guugggaucagcauccacu

SEQ ID NO: 1567229 - RNA, 19 nt, Artificial Sequence
  Description of Artificial Sequence: Synthetic oligonucleotide
auacccauccuggaaggga

SEQ ID NO: 1567230 - RNA, 19 nt, Artificial Sequence
  Description of Artificial Sequence: Synthetic oligonucleotide
gugacugggcguugucuag

SEQ ID NO: 1567231 - RNA, 19 nt, Artificial Sequence
  Description of Artificial Sequence: Synthetic oligonucleotide
ucgcucugaugucccaaug

SEQ ID NO: 1567232 - RNA, 19 nt, Artificial Sequence
  Description of Artificial Sequence: Synthetic oligonucleotide
ccgaucgagagcauugagc

SEQ ID NO: 1567233 - RNA, 19 nt, Artificial Sequence
  Description of Artificial Sequence: Synthetic oligonucleotide
gcgaugacacaacuguccc

SEQ ID NO: 1567234 - RNA, 19 nt, Artificial Sequence
  Description of Artificial Sequence: Synthetic oligonucleotide
gaacaguguagccccagua

SEQ ID NO: 1567235 - RNA, 19 nt, Artificial Sequence
  Description of Artificial Sequence: Synthetic oligonucleotide
acaccacaagagcaugccu

SEQ ID NO: 1567236 - RNA, 19 nt, Artificial Sequence
  Description of Artificial Sequence: Synthetic oligonucleotide
uccccuuguaugucuugca

SEQ ID NO: 1567237 - RNA, 19 nt, Artificial Sequence
  Description of Artificial Sequence: Synthetic oligonucleotide
ccaauggucaggucauacc

SEQ ID NO: 1567238 - RNA, 19 nt, Artificial Sequence
  Description of Artificial Sequence: Synthetic oligonucleotide
  modified_base (5)..(5): a, c, u, g, unknown or other
auucnggcugaaccaguau

SEQ ID NO: 1567239 - RNA, 19 nt, Artificial Sequence
  Description of Artificial Sequence: Synthetic oligonucleotide
ccagcuguacacaugccug

SEQ ID NO: 1567240 - RNA, 19 nt, Artificial Sequence
  Description of Artificial Sequence: Synthetic oligonucleotide
ugcguuccuaugugaugcc

SEQ ID NO: 1567241 - RNA, 19 nt, Artificial Sequence
  Description of Artificial Sequence: Synthetic oligonucleotide
aggacggaggcugauggga

SEQ ID NO: 1567242 - RNA, 19 nt, Artificial Sequence
  Description of Artificial Sequence: Synthetic oligonucleotide
ggugggccggucuaccacg

SEQ ID NO: 1567243 - RNA, 19 nt, Artificial Sequence
  Description of Artificial Sequence: Synthetic oligonucleotide
gguucagucgcacggucac

SEQ ID NO: 1567244 - RNA, 19 nt, Artificial Sequence
  Description of Artificial Sequence: Synthetic oligonucleotide
  modified_base (13)..(13): a, c, u, g, unknown or other
ugcuacccauucnggcuga

SEQ ID NO: 1567245 - RNA, 19 nt, Artificial Sequence
  Description of Artificial Sequence: Synthetic oligonucleotide
caggaugcgagccagcugu

SEQ ID NO: 1567246 - RNA, 19 nt, Artificial Sequence
  Description of Artificial Sequence: Synthetic oligonucleotide
cacguagcagugcccacac

SEQ ID NO: 1567247 - RNA, 19 nt, Artificial Sequence
  Description of Artificial Sequence: Synthetic oligonucleotide
uccuggcucgagcuggaaa

SEQ ID NO: 1567248 - RNA, 19 nt, Artificial Sequence
  Description of Artificial Sequence: Synthetic oligonucleotide
gacaggaggccagucgaac

SEQ ID NO: 1567249 - RNA, 19 nt, Artificial Sequence
  Description of Artificial Sequence: Synthetic oligonucleotide
gguuccgacacuucaaggu

SEQ ID NO: 1567250 - RNA, 19 nt, Artificial Sequence
  Description of Artificial Sequence: Synthetic oligonucleotide
ggacacuggguuccgacac

SEQ ID NO: 1567251 - RNA, 19 nt, Artificial Sequence
  Description of Artificial Sequence: Synthetic oligonucleotide
uaucccuuuggagcgcuuc

SEQ ID NO: 1567252 - RNA, 19 nt, Artificial Sequence
  Description of Artificial Sequence: Synthetic oligonucleotide
ggguuccgacacuucaagg

SEQ ID NO: 1567253 - RNA, 19 nt, Artificial Sequence
  Description of Artificial Sequence: Synthetic oligonucleotide
cugcgaugacacaacuguc

SEQ ID NO: 1567254 - RNA, 19 nt, Artificial Sequence
  Description of Artificial Sequence: Synthetic oligonucleotide
cuggugccgaucgagagca

SEQ ID NO: 1567255 - RNA, 19 nt, Artificial Sequence
  Description of Artificial Sequence: Synthetic oligonucleotide
ccaauauccuggcucgagc

SEQ ID NO: 1567256 - RNA, 19 nt, Artificial Sequence
  Description of Artificial Sequence: Synthetic oligonucleotide
uggaugagacuaucccuuu

SEQ ID NO: 1567257 - RNA, 19 nt, Artificial Sequence
  Description of Artificial Sequence: Synthetic oligonucleotide
uuccacagucuugguaucu

SEQ ID NO: 1567258 - RNA, 19 nt, Artificial Sequence
  Description of Artificial Sequence: Synthetic oligonucleotide
guuccuaugugaugcccaa

SEQ ID NO: 1567259 - RNA, 19 nt, Artificial Sequence
  Description of Artificial Sequence: Synthetic oligonucleotide
gacaagucuugaccaucuc

SEQ ID NO: 1567260 - RNA, 19 nt, Artificial Sequence
  Description of Artificial Sequence: Synthetic oligonucleotide
acgaugccuucucggaacu

SEQ ID NO: 1567261 - RNA, 19 nt, Artificial Sequence
  Description of Artificial Sequence: Synthetic oligonucleotide
ggaugagacuaucccuuug

SEQ ID NO: 1567262 - RNA, 19 nt, Artificial Sequence
  Description of Artificial Sequence: Synthetic oligonucleotide
ucgcacggucacucgaagu

SEQ ID NO: 1567263 - RNA, 19 nt, Artificial Sequence
  Description of Artificial Sequence: Synthetic oligonucleotide
gagccucgcucugaugucc

SEQ ID NO: 1567264 - RNA, 19 nt, Artificial Sequence
  Description of Artificial Sequence: Synthetic oligonucleotide
cuuccacagucuugguauc

SEQ ID NO: 1567265 - RNA, 19 nt, Artificial Sequence
  Description of Artificial Sequence: Synthetic oligonucleotide
agugcggaugguacggcug

SEQ ID NO: 1567266 - RNA, 19 nt, Artificial Sequence
  Description of Artificial Sequence: Synthetic oligonucleotide
cuugcucacucugggcagc

SEQ ID NO: 1567267 - RNA, 19 nt, Artificial Sequence
  Description of Artificial Sequence: Synthetic oligonucleotide
gccacacucagaguguaag

SEQ ID NO: 1567268 - RNA, 19 nt, Artificial Sequence
  Description of Artificial Sequence: Synthetic oligonucleotide
ucagugcggaugguacggc

SEQ ID NO: 1567269 - RNA, 19 nt, Artificial Sequence
  Description of Artificial Sequence: Synthetic oligonucleotide
caaucucguccacacagaa

SEQ ID NO: 1567270 - RNA, 19 nt, Artificial Sequence
  Description of Artificial Sequence: Synthetic oligonucleotide
cuuggugggccggucuacc

SEQ ID NO: 1567271 - RNA, 19 nt, Artificial Sequence
  Description of Artificial Sequence: Synthetic oligonucleotide
gacugggcguugucuagga

SEQ ID NO: 1567272 - RNA, 19 nt, Artificial Sequence
  Description of Artificial Sequence: Synthetic oligonucleotide
ggcguugucuaggauggag

SEQ ID NO: 1567273 - RNA, 19 nt, Artificial Sequence
  Description of Artificial Sequence: Synthetic oligonucleotide
cagcauuuauugcuaccca

SEQ ID NO: 1567274 - RNA, 19 nt, Artificial Sequence
  Description of Artificial Sequence: Synthetic oligonucleotide
ucucuaccugggugaggcc

SEQ ID NO: 1567275 - RNA, 19 nt, Artificial Sequence
  Description of Artificial Sequence: Synthetic oligonucleotide
  modified_base (6)..(6): a, c, u, g, unknown or other
cauucnggcugaaccagua

SEQ ID NO: 1567276 - RNA, 19 nt, Artificial Sequence
  Description of Artificial Sequence: Synthetic oligonucleotide
guccuaugugaaguaccag

SEQ ID NO: 1567277 - RNA, 19 nt, Artificial Sequence
  Description of Artificial Sequence: Synthetic oligonucleotide
agguacuguggacacucua

SEQ ID NO: 1567278 - RNA, 19 nt, Artificial Sequence
  Description of Artificial Sequence: Synthetic oligonucleotide
ggccggucuaccacgaugc

SEQ ID NO: 1567279 - RNA, 19 nt, Artificial Sequence
  Description of Artificial Sequence: Synthetic oligonucleotide
gaggccacguuggagccuc

SEQ ID NO: 1567280 - RNA, 19 nt, Artificial Sequence
  Description of Artificial Sequence: Synthetic oligonucleotide
acuaucccuuuggagcgcu

SEQ ID NO: 1567281 - RNA, 19 nt, Artificial Sequence
  Description of Artificial Sequence: Synthetic oligonucleotide
gacuaucccuuuggagcgc

SEQ ID NO: 1567282 - RNA, 19 nt, Artificial Sequence
  Description of Artificial Sequence: Synthetic oligonucleotide
gguaggugcgaagcucagg

SEQ ID NO: 1567283 - RNA, 19 nt, Artificial Sequence
  Description of Artificial Sequence: Synthetic oligonucleotide
gugggcaaauugagcugcg

SEQ ID NO: 1567284 - RNA, 19 nt, Artificial Sequence
  Description of Artificial Sequence: Synthetic oligonucleotide
uggcucgagcuggaaaccu

SEQ ID NO: 1567285 - RNA, 19 nt, Artificial Sequence
  Description of Artificial Sequence: Synthetic oligonucleotide
gagcugcguuccuauguga

SEQ ID NO: 1567286 - RNA, 19 nt, Artificial Sequence
  Description of Artificial Sequence: Synthetic oligonucleotide
ugggcaaauugagcugcgu

SEQ ID NO: 1567287 - RNA, 19 nt, Artificial Sequence
  Description of Artificial Sequence: Synthetic oligonucleotide
ccucagugcggaugguacg

SEQ ID NO: 1567288 - RNA, 19 nt, Artificial Sequence
  Description of Artificial Sequence: Synthetic oligonucleotide
ccugcgaugacacaacugu

SEQ ID NO: 1567289 - RNA, 19 nt, Artificial Sequence
  Description of Artificial Sequence: Synthetic oligonucleotide
uggucaggucauacccauc

SEQ ID NO: 1567290 - RNA, 19 nt, Artificial Sequence
  Description of Artificial Sequence: Synthetic oligonucleotide
ggucauacccauccuggaa

SEQ ID NO: 1567291 - RNA, 19 nt, Artificial Sequence
  Description of Artificial Sequence: Synthetic oligonucleotide
ccagucgaacaguguagcc

SEQ ID NO: 1567292 - RNA, 19 nt, Artificial Sequence
  Description of Artificial Sequence: Synthetic oligonucleotide
gagagcauugagcgugccu

SEQ ID NO: 1567293 - RNA, 19 nt, Artificial Sequence
  Description of Artificial Sequence: Synthetic oligonucleotide
gaucgagagcauugagcgu

SEQ ID NO: 1567294 - RNA, 19 nt, Artificial Sequence
  Description of Artificial Sequence: Synthetic oligonucleotide
cccgaacaccacaagagca

SEQ ID NO: 1567295 - RNA, 19 nt, Artificial Sequence
  Description of Artificial Sequence: Synthetic oligonucleotide
  modified_base (11)..(11): a, c, u, g, unknown or other
cuacccauucnggcugaac

SEQ ID NO: 1567296 - RNA, 19 nt, Artificial Sequence
  Description of Artificial Sequence: Synthetic oligonucleotide
cucaggacggaggcugaug

SEQ ID NO: 1567297 - RNA, 19 nt, Artificial Sequence
  Description of Artificial Sequence: Synthetic oligonucleotide
caucucuaccugggugagg

SEQ ID NO: 1567298 - RNA, 19 nt, Artificial Sequence
  Description of Artificial Sequence: Synthetic oligonucleotide
ccccgaacaccacaagagc

SEQ ID NO: 1567299 - RNA, 19 nt, Artificial Sequence
  Description of Artificial Sequence: Synthetic oligonucleotide
ccaccagugggcaaauuga

SEQ ID NO: 1567300 - RNA, 19 nt, Artificial Sequence
  Description of Artificial Sequence: Synthetic oligonucleotide
ggaugguacggcugcccug

SEQ ID NO: 1567301 - RNA, 19 nt, Artificial Sequence
  Description of Artificial Sequence: Synthetic oligonucleotide
cagaguguaaggccguccu

SEQ ID NO: 1567302 - RNA, 19 nt, Artificial Sequence
  Description of Artificial Sequence: Synthetic oligonucleotide
acguuggagccucgcucug

SEQ ID NO: 1567303 - RNA, 19 nt, Artificial Sequence
  Description of Artificial Sequence: Synthetic oligonucleotide
ggucacucgaaguccaggu

SEQ ID NO: 1567304 - RNA, 19 nt, Artificial Sequence
  Description of Artificial Sequence: Synthetic oligonucleotide
cacguuggagccucgcucu

SEQ ID NO: 1567305 - RNA, 19 nt, Artificial Sequence
  Description of Artificial Sequence: Synthetic oligonucleotide
ccuaugugaaguaccaggu

SEQ ID NO: 1567306 - RNA, 19 nt, Artificial Sequence
  Description of Artificial Sequence: Synthetic oligonucleotide
ggggcauguguugacauaa

SEQ ID NO: 1567307 - RNA, 19 nt, Artificial Sequence
  Description of Artificial Sequence: Synthetic oligonucleotide
gggcuggcucauauuaaag

SEQ ID NO: 1567308 - RNA, 19 nt, Artificial Sequence
  Description of Artificial Sequence: Synthetic oligonucleotide
ccgcauguggugaggacug

SEQ ID NO: 1567309 - RNA, 19 nt, Artificial Sequence
  Description of Artificial Sequence: Synthetic oligonucleotide
ccguccuugcucacucugg

SEQ ID NO: 1567310 - RNA, 19 nt, Artificial Sequence
  Description of Artificial Sequence: Synthetic oligonucleotide
ggugcgaagcucaggugac

SEQ ID NO: 1567311 - RNA, 19 nt, Artificial Sequence
  Description of Artificial Sequence: Synthetic oligonucleotide
acacaacuguccccuugua

SEQ ID NO: 1567312 - RNA, 19 nt, Artificial Sequence
  Description of Artificial Sequence: Synthetic oligonucleotide
caugugugccuggucuauc

SEQ ID NO: 1567313 - RNA, 19 nt, Artificial Sequence
  Description of Artificial Sequence: Synthetic oligonucleotide
gagcauugagcgugccucu

SEQ ID NO: 1567314 - RNA, 19 nt, Artificial Sequence
  Description of Artificial Sequence: Synthetic oligonucleotide
  modified_base (8)..(8): a, c, u, g, unknown or other
cccauucnggcugaaccag

SEQ ID NO: 1567315 - RNA, 19 nt, Artificial Sequence
  Description of Artificial Sequence: Synthetic oligonucleotide
ccaacucccuugaauucuc

SEQ ID NO: 1567316 - RNA, 19 nt, Artificial Sequence
  Description of Artificial Sequence: Synthetic oligonucleotide
ggggcuggcucauauuaaa

SEQ ID NO: 1567317 - RNA, 19 nt, Artificial Sequence
  Description of Artificial Sequence: Synthetic oligonucleotide
cucagaguguaaggccguc

SEQ ID NO: 1567318 - RNA, 19 nt, Artificial Sequence
  Description of Artificial Sequence: Synthetic oligonucleotide
agggccacacucagagugu

SEQ ID NO: 1567319 - RNA, 19 nt, Artificial Sequence
  Description of Artificial Sequence: Synthetic oligonucleotide
acugggcguugucuaggau

SEQ ID NO: 1567320 - RNA, 19 nt, Artificial Sequence
  Description of Artificial Sequence: Synthetic oligonucleotide
gacacuggguuccgacacu

SEQ ID NO: 1567321 - RNA, 19 nt, Artificial Sequence
  Description of Artificial Sequence: Synthetic oligonucleotide
ccacguuggagccucgcuc

SEQ ID NO: 1567322 - RNA, 19 nt, Artificial Sequence
  Description of Artificial Sequence: Synthetic oligonucleotide
uuccuaugugaugcccaau

SEQ ID NO: 1567323 - RNA, 19 nt, Artificial Sequence
  Description of Artificial Sequence: Synthetic oligonucleotide
guaucuuggcccuccucau

SEQ ID NO: 1567324 - RNA, 19 nt, Artificial Sequence
  Description of Artificial Sequence: Synthetic oligonucleotide
agucgcacggucacucgaa

SEQ ID NO: 1567325 - RNA, 19 nt, Artificial Sequence
  Description of Artificial Sequence: Synthetic oligonucleotide
aguccagguuccaguuucu

SEQ ID NO: 1567326 - RNA, 19 nt, Artificial Sequence
  Description of Artificial Sequence: Synthetic oligonucleotide
gaagauggugcaggcucua

SEQ ID NO: 1567327 - RNA, 19 nt, Artificial Sequence
  Description of Artificial Sequence: Synthetic oligonucleotide
guugucuaggauggagccu

SEQ ID NO: 1567328 - RNA, 19 nt, Artificial Sequence
  Description of Artificial Sequence: Synthetic oligonucleotide
cgaacaggacacuggguuc

SEQ ID NO: 1567329 - RNA, 19 nt, Artificial Sequence
  Description of Artificial Sequence: Synthetic oligonucleotide
cccaauauccuggcucgag

SEQ ID NO: 1567330 - RNA, 19 nt, Artificial Sequence
  Description of Artificial Sequence: Synthetic oligonucleotide
ucccugcaaacugcagauc

SEQ ID NO: 1567331 - RNA, 19 nt, Artificial Sequence
  Description of Artificial Sequence: Synthetic oligonucleotide
gcaggaugcgagccagcug

SEQ ID NO: 1567332 - RNA, 19 nt, Artificial Sequence
  Description of Artificial Sequence: Synthetic oligonucleotide
cagucgcacggucacucga

SEQ ID NO: 1567333 - RNA, 19 nt, Artificial Sequence
  Description of Artificial Sequence: Synthetic oligonucleotide
ggguccugcgaugacacaa

SEQ ID NO: 1567334 - RNA, 19 nt, Artificial Sequence
  Description of Artificial Sequence: Synthetic oligonucleotide
uagccccaguagagaccag

SEQ ID NO: 1567335 - RNA, 19 nt, Artificial Sequence
  Description of Artificial Sequence: Synthetic oligonucleotide
cucuagcaaucuggccagc

SEQ ID NO: 1567336 - RNA, 19 nt, Artificial Sequence
  Description of Artificial Sequence: Synthetic oligonucleotide
cacaacuguccccuuguau

SEQ ID NO: 1567337 - RNA, 19 nt, Artificial Sequence
  Description of Artificial Sequence: Synthetic oligonucleotide
acggucacucgaaguccag

SEQ ID NO: 1567338 - RNA, 19 nt, Artificial Sequence
  Description of Artificial Sequence: Synthetic oligonucleotide
caggugacugggcguuguc

SEQ ID NO: 1567339 - RNA, 19 nt, Artificial Sequence
  Description of Artificial Sequence: Synthetic oligonucleotide
aggggcuggcucauauuaa

SEQ ID NO: 1567340 - RNA, 19 nt, Artificial Sequence
  Description of Artificial Sequence: Synthetic oligonucleotide
cucgagcuggaaaccucaa

SEQ ID NO: 1567341 - RNA, 19 nt, Artificial Sequence
  Description of Artificial Sequence: Synthetic oligonucleotide
gcucgagcuggaaaccuca

SEQ ID NO: 1567342 - RNA, 19 nt, Artificial Sequence
  Description of Artificial Sequence: Synthetic oligonucleotide
gcguuccuaugugaugccc

SEQ ID NO: 1567343 - RNA, 19 nt, Artificial Sequence
  Description of Artificial Sequence: Synthetic oligonucleotide
ggagacaagucuugaccau

SEQ ID NO: 1567344 - RNA, 19 nt, Artificial Sequence
  Description of Artificial Sequence: Synthetic oligonucleotide
cguuccuaugugaugccca

SEQ ID NO: 1567345 - RNA, 19 nt, Artificial Sequence
  Description of Artificial Sequence: Synthetic oligonucleotide
gucacucgaaguccagguu

SEQ ID NO: 1567346 - RNA, 19 nt, Artificial Sequence
  Description of Artificial Sequence: Synthetic oligonucleotide
guguaaggccguccuugcu

SEQ ID NO: 1567347 - RNA, 19 nt, Artificial Sequence
  Description of Artificial Sequence: Synthetic oligonucleotide
cgaacaccacaagagcaug

SEQ ID NO: 1567348 - RNA, 19 nt, Artificial Sequence
  Description of Artificial Sequence: Synthetic oligonucleotide
ggaugcgagccagcuguac

SEQ ID NO: 1567349 - RNA, 19 nt, Artificial Sequence
  Description of Artificial Sequence: Synthetic oligonucleotide
cucgcucugaugucccaau

SEQ ID NO: 1567350 - RNA, 19 nt, Artificial Sequence
  Description of Artificial Sequence: Synthetic oligonucleotide
ggcucgagcuggaaaccuc

SEQ ID NO: 1567351 - RNA, 19 nt, Artificial Sequence
  Description of Artificial Sequence: Synthetic oligonucleotide
gucgaacaguguagcccca

SEQ ID NO: 1567352 - RNA, 19 nt, Artificial Sequence
  Description of Artificial Sequence: Synthetic oligonucleotide
gccggucuaccacgaugcc

SEQ ID NO: 1567353 - RNA, 19 nt, Artificial Sequence
  Description of Artificial Sequence: Synthetic oligonucleotide
gucgaacaggacacugggu

SEQ ID NO: 1567354 - RNA, 19 nt, Artificial Sequence
  Description of Artificial Sequence: Synthetic oligonucleotide
cugccgcauguggugagga

SEQ ID NO: 1567355 - RNA, 19 nt, Artificial Sequence
  Description of Artificial Sequence: Synthetic oligonucleotide
gcucauauuaaaggugguu

SEQ ID NO: 1567356 - RNA, 19 nt, Artificial Sequence
  Description of Artificial Sequence: Synthetic oligonucleotide
cagugcggaugguacggcu

SEQ ID NO: 1567357 - RNA, 19 nt, Artificial Sequence
  Description of Artificial Sequence: Synthetic oligonucleotide
ggucuaccacgaugccuuc

SEQ ID NO: 1567358 - RNA, 19 nt, Artificial Sequence
  Description of Artificial Sequence: Synthetic oligonucleotide
ccugccgcauguggugagg

SEQ ID NO: 1567359 - RNA, 19 nt, Artificial Sequence
  Description of Artificial Sequence: Synthetic oligonucleotide
ggucuauccucaggacgga

SEQ ID NO: 1567360 - RNA, 19 nt, Artificial Sequence
  Description of Artificial Sequence: Synthetic oligonucleotide
uggugccgaucgagagcau

SEQ ID NO: 1567361 - RNA, 19 nt, Artificial Sequence
  Description of Artificial Sequence: Synthetic oligonucleotide
ccgaacaccacaagagcau

SEQ ID NO: 1567362 - RNA, 19 nt, Artificial Sequence
  Description of Artificial Sequence: Synthetic oligonucleotide
cggucacucgaaguccagg

SEQ ID NO: 1567363 - RNA, 19 nt, Artificial Sequence
  Description of Artificial Sequence: Synthetic oligonucleotide
  modified_base (7)..(7): a, c, u, g, unknown or other
ccauucnggcugaaccagu

SEQ ID NO: 1567364 - RNA, 19 nt, Artificial Sequence
  Description of Artificial Sequence: Synthetic oligonucleotide
gugggccggucuaccacga

SEQ ID NO: 1567365 - RNA, 19 nt, Artificial Sequence
  Description of Artificial Sequence: Synthetic oligonucleotide
ggccugccuuggugggccg

SEQ ID NO: 1567366 - RNA, 19 nt, Artificial Sequence
  Description of Artificial Sequence: Synthetic oligonucleotide
ggcucauauuaaagguggu

SEQ ID NO: 1567367 - RNA, 19 nt, Artificial Sequence
  Description of Artificial Sequence: Synthetic oligonucleotide
ccuuggugggccggucuac

SEQ ID NO: 1567368 - RNA, 19 nt, Artificial Sequence
  Description of Artificial Sequence: Synthetic oligonucleotide
cccuguggaugagacuauc

SEQ ID NO: 1567369 - RNA, 19 nt, Artificial Sequence
  Description of Artificial Sequence: Synthetic oligonucleotide
ggccacguuggagccucgc

SEQ ID NO: 1567370 - RNA, 19 nt, Artificial Sequence
  Description of Artificial Sequence: Synthetic oligonucleotide
ccgacacuucaagguuggg

SEQ ID NO: 1567371 - RNA, 19 nt, Artificial Sequence
  Description of Artificial Sequence: Synthetic oligonucleotide
gccacguuggagccucgcu

SEQ ID NO: 1567372 - RNA, 19 nt, Artificial Sequence
  Description of Artificial Sequence: Synthetic oligonucleotide
aggaugcgagccagcugua

SEQ ID NO: 1567373 - RNA, 19 nt, Artificial Sequence
  Description of Artificial Sequence: Synthetic oligonucleotide
aggccacguuggagccucg

SEQ ID NO: 1567374 - RNA, 19 nt, Artificial Sequence
  Description of Artificial Sequence: Synthetic oligonucleotide
gccugccuuggugggccgg

SEQ ID NO: 1567375 - RNA, 19 nt, Artificial Sequence
  Description of Artificial Sequence: Synthetic oligonucleotide
gugcgaagcucaggugacu

SEQ ID NO: 1567376 - RNA, 19 nt, Artificial Sequence
  Description of Artificial Sequence: Synthetic oligonucleotide
ccaagggguugaggauccc

SEQ ID NO: 1567377 - RNA, 19 nt, Artificial Sequence
  Description of Artificial Sequence: Synthetic oligonucleotide
ggugccgaucgagagcauu

SEQ ID NO: 1567378 - RNA, 19 nt, Artificial Sequence
  Description of Artificial Sequence: Synthetic oligonucleotide
gggccacacucagagugua

SEQ ID NO: 1567379 - RNA, 19 nt, Artificial Sequence
  Description of Artificial Sequence: Synthetic oligonucleotide
gcucaggugacugggcguu

SEQ ID NO: 1567380 - RNA, 19 nt, Artificial Sequence
  Description of Artificial Sequence: Synthetic oligonucleotide
cgagagcauugagcgugcc

SEQ ID NO: 1567381 - RNA, 19 nt, Artificial Sequence
  Description of Artificial Sequence: Synthetic oligonucleotide
ggccacacucagaguguaa

SEQ ID NO: 1567382 - RNA, 19 nt, Artificial Sequence
  Description of Artificial Sequence: Synthetic oligonucleotide
agcgugccucuggguugcu

SEQ ID NO: 1567383 - RNA, 19 nt, Artificial Sequence
  Description of Artificial Sequence: Synthetic oligonucleotide
ccucgcucugaugucccaa

SEQ ID NO: 1567384 - RNA, 19 nt, Artificial Sequence
  Description of Artificial Sequence: Synthetic oligonucleotide
ccggucuaccacgaugccu

SEQ ID NO: 1567385 - RNA, 19 nt, Artificial Sequence
  Description of Artificial Sequence: Synthetic oligonucleotide
cguuggagccucgcucuga

SEQ ID NO: 1567386 - RNA, 19 nt, Artificial Sequence
  Description of Artificial Sequence: Synthetic oligonucleotide
gggcguugucuaggaugga

SEQ ID NO: 1567387 - RNA, 19 nt, Artificial Sequence
  Description of Artificial Sequence: Synthetic oligonucleotide
gcgugccucuggguugcuc

SEQ ID NO: 1567388 - RNA, 19 nt, Artificial Sequence
  Description of Artificial Sequence: Synthetic oligonucleotide
cggaugguacggcugcccu

SEQ ID NO: 1567389 - RNA, 19 nt, Artificial Sequence
  Description of Artificial Sequence: Synthetic oligonucleotide
gcgcuuccuggugccgauc

SEQ ID NO: 1567390 - RNA, 19 nt, Artificial Sequence
  Description of Artificial Sequence: Synthetic oligonucleotide
cgcauguggugaggacugu

SEQ ID NO: 1567391 - RNA, 19 nt, Artificial Sequence
  Description of Artificial Sequence: Synthetic oligonucleotide
uuagcaaccacaaugauag

SEQ ID NO: 1567392 - RNA, 19 nt, Artificial Sequence
  Description of Artificial Sequence: Synthetic oligonucleotide
uucguuaucaaaauaaaga

SEQ ID NO: 1567393 - RNA, 19 nt, Artificial Sequence
  Description of Artificial Sequence: Synthetic oligonucleotide
agauucauuccccacaucc

SEQ ID NO: 1567394 - RNA, 19 nt, Artificial Sequence
  Description of Artificial Sequence: Synthetic oligonucleotide
uuccauaacacauuugucg

SEQ ID NO: 1567395 - RNA, 19 nt, Artificial Sequence
  Description of Artificial Sequence: Synthetic oligonucleotide
aaaauauguagguguaacg

SEQ ID NO: 1567396 - RNA, 19 nt, Artificial Sequence
  Description of Artificial Sequence: Synthetic oligonucleotide
uaacguauaaauucuaaag

SEQ ID NO: 1567397 - RNA, 19 nt, Artificial Sequence
  Description of Artificial Sequence: Synthetic oligonucleotide
aacguauaaauucuaaagu

SEQ ID NO: 1567398 - RNA, 19 nt, Artificial Sequence
  Description of Artificial Sequence: Synthetic oligonucleotide
agguguaacguauaaauuc

SEQ ID NO: 1567399 - RNA, 19 nt, Artificial Sequence
  Description of Artificial Sequence: Synthetic oligonucleotide
gauuguaagaucuggaaac

SEQ ID NO: 1567400 - RNA, 19 nt, Artificial Sequence
  Description of Artificial Sequence: Synthetic oligonucleotide
acguauaaauucuaaaguc

SEQ ID NO: 1567401 - RNA, 19 nt, Artificial Sequence
  Description of Artificial Sequence: Synthetic oligonucleotide
aacacuagaugucacacca

SEQ ID NO: 1567402 - RNA, 19 nt, Artificial Sequence
  Description of Artificial Sequence: Synthetic oligonucleotide
ucauucauguacaaggaug

SEQ ID NO: 1567403 - RNA, 19 nt, Artificial Sequence
  Description of Artificial Sequence: Synthetic oligonucleotide
ucauugauuacucagugaa

SEQ ID NO: 1567404 - RNA, 19 nt, Artificial Sequence
  Description of Artificial Sequence: Synthetic oligonucleotide
gacaucucauacuauaugc

SEQ ID NO: 1567405 - RNA, 19 nt, Artificial Sequence
  Description of Artificial Sequence: Synthetic oligonucleotide
aucauucguuuccagaugc

SEQ ID NO: 1567406 - RNA, 19 nt, Artificial Sequence
  Description of Artificial Sequence: Synthetic oligonucleotide
aaucuauuaagauguuuug

SEQ ID NO: 1567407 - RNA, 19 nt, Artificial Sequence
  Description of Artificial Sequence: Synthetic oligonucleotide
uuuauuaucuugaucuuuc

SEQ ID NO: 1567408 - RNA, 19 nt, Artificial Sequence
  Description of Artificial Sequence: Synthetic oligonucleotide
aaaacaggcacugaaugag

SEQ ID NO: 1567409 - RNA, 19 nt, Artificial Sequence
  Description of Artificial Sequence: Synthetic oligonucleotide
uuuagugucuuguagacau

SEQ ID NO: 1567410 - RNA, 19 nt, Artificial Sequence
  Description of Artificial Sequence: Synthetic oligonucleotide
aauauuucuagccuugguu

SEQ ID NO: 1567411 - RNA, 19 nt, Artificial Sequence
  Description of Artificial Sequence: Synthetic oligonucleotide
uggaaagaacacuagaugu

SEQ ID NO: 1567412 - RNA, 19 nt, Artificial Sequence
  Description of Artificial Sequence: Synthetic oligonucleotide
ugauugaaacuucuggaag

SEQ ID NO: 1567413 - RNA, 19 nt, Artificial Sequence
  Description of Artificial Sequence: Synthetic oligonucleotide
ugaaacuucuggaaggccc

SEQ ID NO: 1567414 - RNA, 19 nt, Artificial Sequence
  Description of Artificial Sequence: Synthetic oligonucleotide
cuuagauuuccacugauug

SEQ ID NO: 1567415 - RNA, 19 nt, Artificial Sequence
  Description of Artificial Sequence: Synthetic oligonucleotide
aaauauguagguguaacgu

SEQ ID NO: 1567416 - RNA, 19 nt, Artificial Sequence
  Description of Artificial Sequence: Synthetic oligonucleotide
aauguccauucacacaggg

SEQ ID NO: 1567417 - RNA, 19 nt, Artificial Sequence
  Description of Artificial Sequence: Synthetic oligonucleotide
uuaagauauccuuuaauuc

SEQ ID NO: 1567418 - RNA, 19 nt, Artificial Sequence
  Description of Artificial Sequence: Synthetic oligonucleotide
  modified_base (2)..(2): a, c, u, g, unknown or other
cngacaauagcacauugcg

SEQ ID NO: 1567419 - RNA, 19 nt, Artificial Sequence
  Description of Artificial Sequence: Synthetic oligonucleotide
uuaggaaagacguuaagau

SEQ ID NO: 1567420 - RNA, 19 nt, Artificial Sequence
  Description of Artificial Sequence: Synthetic oligonucleotide
aaaauaacgagaagggucu

SEQ ID NO: 1567421 - RNA, 19 nt, Artificial Sequence
  Description of Artificial Sequence: Synthetic oligonucleotide
aaugauagguggaaagaac

SEQ ID NO: 1567422 - RNA, 19 nt, Artificial Sequence
  Description of Artificial Sequence: Synthetic oligonucleotide
uaaauucuaaaguccauac

SEQ ID NO: 1567423 - RNA, 19 nt, Artificial Sequence
  Description of Artificial Sequence: Synthetic oligonucleotide
auuucuaggucuauugggc

SEQ ID NO: 1567424 - RNA, 19 nt, Artificial Sequence
  Description of Artificial Sequence: Synthetic oligonucleotide
aaguguaguguuugaacag

SEQ ID NO: 1567425 - RNA, 19 nt, Artificial Sequence
  Description of Artificial Sequence: Synthetic oligonucleotide
gauccugauggguauaucc

SEQ ID NO: 1567426 - RNA, 19 nt, Artificial Sequence
  Description of Artificial Sequence: Synthetic oligonucleotide
uuuaggaaagacguuaaga

SEQ ID NO: 1567427 - RNA, 19 nt, Artificial Sequence
  Description of Artificial Sequence: Synthetic oligonucleotide
uguagacauagauuguaag

SEQ ID NO: 1567428 - RNA, 19 nt, Artificial Sequence
  Description of Artificial Sequence: Synthetic oligonucleotide
aaauucuaaaguccauaca

SEQ ID NO: 1567429 - RNA, 19 nt, Artificial Sequence
  Description of Artificial Sequence: Synthetic oligonucleotide
uuuaccacauagaggacca

SEQ ID NO: 1567430 - RNA, 19 nt, Artificial Sequence
  Description of Artificial Sequence: Synthetic oligonucleotide
acgagaagggucuccaagc

SEQ ID NO: 1567431 - RNA, 19 nt, Artificial Sequence
  Description of Artificial Sequence: Synthetic oligonucleotide
aacgagaagggucuccaag

SEQ ID NO: 1567432 - RNA, 19 nt, Artificial Sequence
  Description of Artificial Sequence: Synthetic oligonucleotide
aagacguuaagauauccuu

SEQ ID NO: 1567433 - RNA, 19 nt, Artificial Sequence
  Description of Artificial Sequence: Synthetic oligonucleotide
ucauacuauaugcccagag

SEQ ID NO: 1567434 - RNA, 19 nt, Artificial Sequence
  Description of Artificial Sequence: Synthetic oligonucleotide
auugcgagcaaauguaucu

SEQ ID NO: 1567435 - RNA, 19 nt, Artificial Sequence
  Description of Artificial Sequence: Synthetic oligonucleotide
  modified_base (4)..(4): a, c, u, g, unknown or other
aacngacaauagcacauug

SEQ ID NO: 1567436 - RNA, 19 nt, Artificial Sequence
  Description of Artificial Sequence: Synthetic oligonucleotide
uccauaacacauuugucga

SEQ ID NO: 1567437 - RNA, 19 nt, Artificial Sequence
  Description of Artificial Sequence: Synthetic oligonucleotide
ugugcucuccuauauuccg

SEQ ID NO: 1567438 - RNA, 19 nt, Artificial Sequence
  Description of Artificial Sequence: Synthetic oligonucleotide
acauuugucgaucuuagau

SEQ ID NO: 1567439 - RNA, 19 nt, Artificial Sequence
  Description of Artificial Sequence: Synthetic oligonucleotide
cuucguuaucaaaauaaag

SEQ ID NO: 1567440 - RNA, 19 nt, Artificial Sequence
  Description of Artificial Sequence: Synthetic oligonucleotide
uuccgaaugaacuucagua

SEQ ID NO: 1567441 - RNA, 19 nt, Artificial Sequence
  Description of Artificial Sequence: Synthetic oligonucleotide
ucuccuauauuccgaauga

SEQ ID NO: 1567442 - RNA, 19 nt, Artificial Sequence
  Description of Artificial Sequence: Synthetic oligonucleotide
agacauagauuguaagauc

SEQ ID NO: 1567443 - RNA, 19 nt, Artificial Sequence
  Description of Artificial Sequence: Synthetic oligonucleotide
caucucauacuauaugccc

SEQ ID NO: 1567444 - RNA, 19 nt, Artificial Sequence
  Description of Artificial Sequence: Synthetic oligonucleotide
auaaagaucacaaugcuua

SEQ ID NO: 1567445 - RNA, 19 nt, Artificial Sequence
  Description of Artificial Sequence: Synthetic oligonucleotide
uccgaaugaacuucaguag

SEQ ID NO: 1567446 - RNA, 19 nt, Artificial Sequence
  Description of Artificial Sequence: Synthetic oligonucleotide
cacugauugaaacuucugg

SEQ ID NO: 1567447 - RNA, 19 nt, Artificial Sequence
  Description of Artificial Sequence: Synthetic oligonucleotide
auuccccacaucccgaagc

SEQ ID NO: 1567448 - RNA, 19 nt, Artificial Sequence
  Description of Artificial Sequence: Synthetic oligonucleotide
auuaagauguuuuguggcu

SEQ ID NO: 1567449 - RNA, 19 nt, Artificial Sequence
  Description of Artificial Sequence: Synthetic oligonucleotide
auugauuacucagugaagu

SEQ ID NO: 1567450 - RNA, 19 nt, Artificial Sequence
  Description of Artificial Sequence: Synthetic oligonucleotide
uguaacguauaaauucuaa

SEQ ID NO: 1567451 - RNA, 19 nt, Artificial Sequence
  Description of Artificial Sequence: Synthetic oligonucleotide
  modified_base (6)..(6): a, c, u, g, unknown or other
aaaacngacaauagcacau

SEQ ID NO: 1567452 - RNA, 19 nt, Artificial Sequence
  Description of Artificial Sequence: Synthetic oligonucleotide
aaggaugguucauugauua

SEQ ID NO: 1567453 - RNA, 19 nt, Artificial Sequence
  Description of Artificial Sequence: Synthetic oligonucleotide
auggguauauccuuccaag

SEQ ID NO: 1567454 - RNA, 19 nt, Artificial Sequence
  Description of Artificial Sequence: Synthetic oligonucleotide
aguccaaaagaaaggaugg

SEQ ID NO: 1567455 - RNA, 19 nt, Artificial Sequence
  Description of Artificial Sequence: Synthetic oligonucleotide
uuuuaggaaagacguuaag

SEQ ID NO: 1567456 - RNA, 19 nt, Artificial Sequence
  Description of Artificial Sequence: Synthetic oligonucleotide
ugaaugagguccuuagugu

SEQ ID NO: 1567457 - RNA, 19 nt, Artificial Sequence
  Description of Artificial Sequence: Synthetic oligonucleotide
guccauacaauuuaucuuc

SEQ ID NO: 1567458 - RNA, 19 nt, Artificial Sequence
  Description of Artificial Sequence: Synthetic oligonucleotide
uuagauuuccacugauuga

SEQ ID NO: 1567459 - RNA, 19 nt, Artificial Sequence
  Description of Artificial Sequence: Synthetic oligonucleotide
cacaaugauagguggaaag

SEQ ID NO: 1567460 - RNA, 19 nt, Artificial Sequence
  Description of Artificial Sequence: Synthetic oligonucleotide
aaaagaaaggauggccaag

SEQ ID NO: 1567461 - RNA, 19 nt, Artificial Sequence
  Description of Artificial Sequence: Synthetic oligonucleotide
ucucauacuauaugcccag

SEQ ID NO: 1567462 - RNA, 19 nt, Artificial Sequence
  Description of Artificial Sequence: Synthetic oligonucleotide
ucuuuuaagcuauaagcuu

SEQ ID NO: 1567463 - RNA, 19 nt, Artificial Sequence
  Description of Artificial Sequence: Synthetic oligonucleotide
uagacauagauuguaagau

SEQ ID NO: 1567464 - RNA, 19 nt, Artificial Sequence
  Description of Artificial Sequence: Synthetic oligonucleotide
uacuauaugcccagaguac

SEQ ID NO: 1567465 - RNA, 19 nt, Artificial Sequence
  Description of Artificial Sequence: Synthetic oligonucleotide
ucuucguuaucaaaauaaa

SEQ ID NO: 1567466 - RNA, 19 nt, Artificial Sequence
  Description of Artificial Sequence: Synthetic oligonucleotide
auuuccacugauugaaacu

SEQ ID NO: 1567467 - RNA, 19 nt, Artificial Sequence
  Description of Artificial Sequence: Synthetic oligonucleotide
  modified_base (3)..(3): a, c, u, g, unknown or other
acngacaauagcacauugc

SEQ ID NO: 1567468 - RNA, 19 nt, Artificial Sequence
  Description of Artificial Sequence: Synthetic oligonucleotide
guagacauagauuguaaga

SEQ ID NO: 1567469 - RNA, 19 nt, Artificial Sequence
  Description of Artificial Sequence: Synthetic oligonucleotide
auauuucuagccuugguuu

SEQ ID NO: 1567470 - RNA, 19 nt, Artificial Sequence
  Description of Artificial Sequence: Synthetic oligonucleotide
uagauuguaagaucuggaa

SEQ ID NO: 1567471 - RNA, 19 nt, Artificial Sequence
  Description of Artificial Sequence: Synthetic oligonucleotide
acaucucauacuauaugcc

SEQ ID NO: 1567472 - RNA, 19 nt, Artificial Sequence
  Description of Artificial Sequence: Synthetic oligonucleotide
uucaguagaucgcccacag

SEQ ID NO: 1567473 - RNA, 19 nt, Artificial Sequence
  Description of Artificial Sequence: Synthetic oligonucleotide
gauuacucagugaagugug

SEQ ID NO: 1567474 - RNA, 19 nt, Artificial Sequence
  Description of Artificial Sequence: Synthetic oligonucleotide
uagauuuccacugauugaa

SEQ ID NO: 1567475 - RNA, 19 nt, Artificial Sequence
  Description of Artificial Sequence: Synthetic oligonucleotide
uguaccguugcucccaagu

SEQ ID NO: 1567476 - RNA, 19 nt, Artificial Sequence
  Description of Artificial Sequence: Synthetic oligonucleotide
auuugucgaucuuagauuu

SEQ ID NO: 1567477 - RNA, 19 nt, Artificial Sequence
  Description of Artificial Sequence: Synthetic oligonucleotide
aggaaagacguuaagauau

SEQ ID NO: 1567478 - RNA, 19 nt, Artificial Sequence
  Description of Artificial Sequence: Synthetic oligonucleotide
uuacauucuuuuccaggag

SEQ ID NO: 1567479 - RNA, 19 nt, Artificial Sequence
  Description of Artificial Sequence: Synthetic oligonucleotide
gauaaggauuucuaggucu

SEQ ID NO: 1567480 - RNA, 19 nt, Artificial Sequence
  Description of Artificial Sequence: Synthetic oligonucleotide
uccuuggaaucuauuaaga

SEQ ID NO: 1567481 - RNA, 19 nt, Artificial Sequence
  Description of Artificial Sequence: Synthetic oligonucleotide
guucauugauuacucagug

SEQ ID NO: 1567482 - RNA, 19 nt, Artificial Sequence
  Description of Artificial Sequence: Synthetic oligonucleotide
augaacuucaguagaucgc

SEQ ID NO: 1567483 - RNA, 19 nt, Artificial Sequence
  Description of Artificial Sequence: Synthetic oligonucleotide
uauauuccgaaugaacuuc

SEQ ID NO: 1567484 - RNA, 19 nt, Artificial Sequence
  Description of Artificial Sequence: Synthetic oligonucleotide
aaacguuuccugaaaauaa

SEQ ID NO: 1567485 - RNA, 19 nt, Artificial Sequence
  Description of Artificial Sequence: Synthetic oligonucleotide
ccugauaaggauuucuagg

SEQ ID NO: 1567486 - RNA, 19 nt, Artificial Sequence
  Description of Artificial Sequence: Synthetic oligonucleotide
uugauuacucagugaagug

SEQ ID NO: 1567487 - RNA, 19 nt, Artificial Sequence
  Description of Artificial Sequence: Synthetic oligonucleotide
gaaagaacacuagauguca

SEQ ID NO: 1567488 - RNA, 19 nt, Artificial Sequence
  Description of Artificial Sequence: Synthetic oligonucleotide
aauguuugcuguauucugu

SEQ ID NO: 1567489 - RNA, 19 nt, Artificial Sequence
  Description of Artificial Sequence: Synthetic oligonucleotide
ugaaaauaacgagaagggu

SEQ ID NO: 1567490 - RNA, 19 nt, Artificial Sequence
  Description of Artificial Sequence: Synthetic oligonucleotide
uguaguaguuugagaagcu

SEQ ID NO: 1567491 - RNA, 19 nt, Artificial Sequence
  Description of Artificial Sequence: Synthetic oligonucleotide
acuucaguagaucgcccac

SEQ ID NO: 1567492 - RNA, 19 nt, Artificial Sequence
  Description of Artificial Sequence: Synthetic oligonucleotide
uuaagauguuuuguggcug

SEQ ID NO: 1567493 - RNA, 19 nt, Artificial Sequence
  Description of Artificial Sequence: Synthetic oligonucleotide
gaugccuccuuuuaggaaa

SEQ ID NO: 1567494 - RNA, 19 nt, Artificial Sequence
  Description of Artificial Sequence: Synthetic oligonucleotide
agugacaucucauacuaua

SEQ ID NO: 1567495 - RNA, 19 nt, Artificial Sequence
  Description of Artificial Sequence: Synthetic oligonucleotide
ugaagugugugugugugug

SEQ ID NO: 1567496 - RNA, 19 nt, Artificial Sequence
  Description of Artificial Sequence: Synthetic oligonucleotide
aaagacguuaagauauccu

SEQ ID NO: 1567497 - RNA, 19 nt, Artificial Sequence
  Description of Artificial Sequence: Synthetic oligonucleotide
caaguguaguguuugaaca

SEQ ID NO: 1567498 - RNA, 19 nt, Artificial Sequence
  Description of Artificial Sequence: Synthetic oligonucleotide
uugucgaucuuagauuucc

SEQ ID NO: 1567499 - RNA, 19 nt, Artificial Sequence
  Description of Artificial Sequence: Synthetic oligonucleotide
gcuugguugagucuguagg

SEQ ID NO: 1567500 - RNA, 19 nt, Artificial Sequence
  Description of Artificial Sequence: Synthetic oligonucleotide
aauaaagaucacaaugcuu

SEQ ID NO: 1567501 - RNA, 19 nt, Artificial Sequence
  Description of Artificial Sequence: Synthetic oligonucleotide
guuaacuccuugcagugac

SEQ ID NO: 1567502 - RNA, 19 nt, Artificial Sequence
  Description of Artificial Sequence: Synthetic oligonucleotide
gauguuuuguggcugcaga

SEQ ID NO: 1567503 - RNA, 19 nt, Artificial Sequence
  Description of Artificial Sequence: Synthetic oligonucleotide
acagugacaucucauacua

SEQ ID NO: 1567504 - RNA, 19 nt, Artificial Sequence
  Description of Artificial Sequence: Synthetic oligonucleotide
uuauuaucuugaucuuuca

SEQ ID NO: 1567505 - RNA, 19 nt, Artificial Sequence
  Description of Artificial Sequence: Synthetic oligonucleotide
cguauaaauucuaaagucc

SEQ ID NO: 1567506 - RNA, 19 nt, Artificial Sequence
  Description of Artificial Sequence: Synthetic oligonucleotide
uucauugauuacucaguga

SEQ ID NO: 1567507 - RNA, 19 nt, Artificial Sequence
  Description of Artificial Sequence: Synthetic oligonucleotide
augcuuaccuuacagugcu

SEQ ID NO: 1567508 - RNA, 19 nt, Artificial Sequence
  Description of Artificial Sequence: Synthetic oligonucleotide
guuaagauauccuuuaauu

SEQ ID NO: 1567509 - RNA, 19 nt, Artificial Sequence
  Description of Artificial Sequence: Synthetic oligonucleotide
ucaggcacgcugcagcuug

SEQ ID NO: 1567510 - RNA, 19 nt, Artificial Sequence
  Description of Artificial Sequence: Synthetic oligonucleotide
cucuccuauauuccgaaug

SEQ ID NO: 1567511 - RNA, 19 nt, Artificial Sequence
  Description of Artificial Sequence: Synthetic oligonucleotide
auaacacauuugucgaucu

SEQ ID NO: 1567512 - RNA, 19 nt, Artificial Sequence
  Description of Artificial Sequence: Synthetic oligonucleotide
gaacacuagaugucacacc

SEQ ID NO: 1567513 - RNA, 19 nt, Artificial Sequence
  Description of Artificial Sequence: Synthetic oligonucleotide
uccaauguccauucacaca

SEQ ID NO: 1567514 - RNA, 19 nt, Artificial Sequence
  Description of Artificial Sequence: Synthetic oligonucleotide
guagguguaacguauaaau

SEQ ID NO: 1567515 - RNA, 19 nt, Artificial Sequence
  Description of Artificial Sequence: Synthetic oligonucleotide
uuguagacauagauuguaa

SEQ ID NO: 1567516 - RNA, 19 nt, Artificial Sequence
  Description of Artificial Sequence: Synthetic oligonucleotide
gaugucagauucauucccc

SEQ ID NO: 1567517 - RNA, 19 nt, Artificial Sequence
  Description of Artificial Sequence: Synthetic oligonucleotide
cauugauuacucagugaag

SEQ ID NO: 1567518 - RNA, 19 nt, Artificial Sequence
  Description of Artificial Sequence: Synthetic oligonucleotide
ggauuucuaggucuauugg

SEQ ID NO: 1567519 - RNA, 19 nt, Artificial Sequence
  Description of Artificial Sequence: Synthetic oligonucleotide
uauuucuagccuugguuuc

SEQ ID NO: 1567520 - RNA, 19 nt, Artificial Sequence
  Description of Artificial Sequence: Synthetic oligonucleotide
augauagguggaaagaaca

SEQ ID NO: 1567521 - RNA, 19 nt, Artificial Sequence
  Description of Artificial Sequence: Synthetic oligonucleotide
uuugagaagcuugcuauuc

SEQ ID NO: 1567522 - RNA, 19 nt, Artificial Sequence
  Description of Artificial Sequence: Synthetic oligonucleotide
guaacguauaaauucuaaa

SEQ ID NO: 1567523 - RNA, 19 nt, Artificial Sequence
  Description of Artificial Sequence: Synthetic oligonucleotide
uaggaaagacguuaagaua

SEQ ID NO: 1567524 - RNA, 19 nt, Artificial Sequence
  Description of Artificial Sequence: Synthetic oligonucleotide
aagugugugugugugugug

SEQ ID NO: 1567525 - RNA, 19 nt, Artificial Sequence
  Description of Artificial Sequence: Synthetic oligonucleotide
aguguccucaucuggagau

SEQ ID NO: 1567526 - RNA, 19 nt, Artificial Sequence
  Description of Artificial Sequence: Synthetic oligonucleotide
uuuccugauaaggauuucu

SEQ ID NO: 1567527 - RNA, 19 nt, Artificial Sequence
  Description of Artificial Sequence: Synthetic oligonucleotide
cuauaugcccagaguacag

SEQ ID NO: 1567528 - RNA, 19 nt, Artificial Sequence
  Description of Artificial Sequence: Synthetic oligonucleotide
gacauagauuguaagaucu

SEQ ID NO: 1567529 - RNA, 19 nt, Artificial Sequence
  Description of Artificial Sequence: Synthetic oligonucleotide
uauuccgaaugaacuucag

SEQ ID NO: 1567530 - RNA, 19 nt, Artificial Sequence
  Description of Artificial Sequence: Synthetic oligonucleotide
uccuucauaugcuuguuuu

SEQ ID NO: 1567531 - RNA, 19 nt, Artificial Sequence
  Description of Artificial Sequence: Synthetic oligonucleotide
ugcucccaaguccaaaaga

SEQ ID NO: 1567532 - RNA, 19 nt, Artificial Sequence
  Description of Artificial Sequence: Synthetic oligonucleotide
ugugugugugugugugugg

SEQ ID NO: 1567533 - RNA, 19 nt, Artificial Sequence
  Description of Artificial Sequence: Synthetic oligonucleotide
guacaaggaugguucauug

SEQ ID NO: 1567534 - RNA, 19 nt, Artificial Sequence
  Description of Artificial Sequence: Synthetic oligonucleotide
aggaccagccguccaaggg

SEQ ID NO: 1567535 - RNA, 19 nt, Artificial Sequence
  Description of Artificial Sequence: Synthetic oligonucleotide
gacguuaagauauccuuua

SEQ ID NO: 1567536 - RNA, 19 nt, Artificial Sequence
  Description of Artificial Sequence: Synthetic oligonucleotide
auaaauucuaaaguccaua

SEQ ID NO: 1567537 - RNA, 19 nt, Artificial Sequence
  Description of Artificial Sequence: Synthetic oligonucleotide
uaguguuugaacagccuua

SEQ ID NO: 1567538 - RNA, 19 nt, Artificial Sequence
  Description of Artificial Sequence: Synthetic oligonucleotide
acuauaugcccagaguaca

SEQ ID NO: 1567539 - RNA, 19 nt, Artificial Sequence
  Description of Artificial Sequence: Synthetic oligonucleotide
cauggguuccucucugugc

SEQ ID NO: 1567540 - RNA, 19 nt, Artificial Sequence
  Description of Artificial Sequence: Synthetic oligonucleotide
agugaagugugugugugug

SEQ ID NO: 1567541 - RNA, 19 nt, Artificial Sequence
  Description of Artificial Sequence: Synthetic oligonucleotide
ucuuccaggguaccguuaa

SEQ ID NO: 1567542 - RNA, 19 nt, Artificial Sequence
  Description of Artificial Sequence: Synthetic oligonucleotide
ccuccuuuuaggaaagacg

SEQ ID NO: 1567543 - RNA, 19 nt, Artificial Sequence
  Description of Artificial Sequence: Synthetic oligonucleotide
ugugugguccuacugccuc

SEQ ID NO: 1567544 - RNA, 19 nt, Artificial Sequence
  Description of Artificial Sequence: Synthetic oligonucleotide
uggaaacguuuccugaaaa

SEQ ID NO: 1567545 - RNA, 19 nt, Artificial Sequence
  Description of Artificial Sequence: Synthetic oligonucleotide
cauaacacauuugucgauc

SEQ ID NO: 1567546 - RNA, 19 nt, Artificial Sequence
  Description of Artificial Sequence: Synthetic oligonucleotide
uaccuuacagugcuguuuu

SEQ ID NO: 1567547 - RNA, 19 nt, Artificial Sequence
  Description of Artificial Sequence: Synthetic oligonucleotide
uuccugauaaggauuucua

SEQ ID NO: 1567548 - RNA, 19 nt, Artificial Sequence
  Description of Artificial Sequence: Synthetic oligonucleotide
uagguguaacguauaaauu

SEQ ID NO: 1567549 - RNA, 19 nt, Artificial Sequence
  Description of Artificial Sequence: Synthetic oligonucleotide
aauagcacauugcgagcaa

SEQ ID NO: 1567550 - RNA, 19 nt, Artificial Sequence
  Description of Artificial Sequence: Synthetic oligonucleotide
uacaaggaugguucauuga

SEQ ID NO: 1567551 - RNA, 19 nt, Artificial Sequence
  Description of Artificial Sequence: Synthetic oligonucleotide
gguaccguuaacuccuugc

SEQ ID NO: 1567552 - RNA, 19 nt, Artificial Sequence
  Description of Artificial Sequence: Synthetic oligonucleotide
auucguuuccagaugccuc

SEQ ID NO: 1567553 - RNA, 19 nt, Artificial Sequence
  Description of Artificial Sequence: Synthetic oligonucleotide
ccaaguagguccuucagac

SEQ ID NO: 1567554 - RNA, 19 nt, Artificial Sequence
  Description of Artificial Sequence: Synthetic oligonucleotide
cuuccauaacacauuuguc

SEQ ID NO: 1567555 - RNA, 19 nt, Artificial Sequence
  Description of Artificial Sequence: Synthetic oligonucleotide
agaagcuugcuauucuuuu

SEQ ID NO: 1567556 - RNA, 19 nt, Artificial Sequence
  Description of Artificial Sequence: Synthetic oligonucleotide
ggguauauccuuccaagug

SEQ ID NO: 1567557 - RNA, 19 nt, Artificial Sequence
  Description of Artificial Sequence: Synthetic oligonucleotide
cacccuguaccguugcucc

SEQ ID NO: 1567558 - RNA, 19 nt, Artificial Sequence
  Description of Artificial Sequence: Synthetic oligonucleotide
auagauuguaagaucugga

SEQ ID NO: 1567559 - RNA, 19 nt, Artificial Sequence
  Description of Artificial Sequence: Synthetic oligonucleotide
ugcccaaaucaagacagug

SEQ ID NO: 1567560 - RNA, 19 nt, Artificial Sequence
  Description of Artificial Sequence: Synthetic oligonucleotide
gaucuuagauuuccacuga

SEQ ID NO: 1567561 - RNA, 19 nt, Artificial Sequence
  Description of Artificial Sequence: Synthetic oligonucleotide
auauguagguguaacguau

SEQ ID NO: 1567562 - RNA, 19 nt, Artificial Sequence
  Description of Artificial Sequence: Synthetic oligonucleotide
gauggguauauccuuccaa

SEQ ID NO: 1567563 - RNA, 19 nt, Artificial Sequence
  Description of Artificial Sequence: Synthetic oligonucleotide
cuuagcaaccacaaugaua

SEQ ID NO: 1567564 - RNA, 19 nt, Artificial Sequence
  Description of Artificial Sequence: Synthetic oligonucleotide
cugauugaaacuucuggaa

SEQ ID NO: 1567565 - RNA, 19 nt, Artificial Sequence
  Description of Artificial Sequence: Synthetic oligonucleotide
agggaucucaccuuucuuu

SEQ ID NO: 1567566 - RNA, 19 nt, Artificial Sequence
  Description of Artificial Sequence: Synthetic oligonucleotide
uguacaaggaugguucauu

SEQ ID NO: 1567567 - RNA, 19 nt, Artificial Sequence
  Description of Artificial Sequence: Synthetic oligonucleotide
cucucaugacguucugggg

SEQ ID NO: 1567568 - RNA, 19 nt, Artificial Sequence
  Description of Artificial Sequence: Synthetic oligonucleotide
aaaggauggccaaguaggu

SEQ ID NO: 1567569 - RNA, 19 nt, Artificial Sequence
  Description of Artificial Sequence: Synthetic oligonucleotide
auauccuuccaaguguagu

SEQ ID NO: 1567570 - RNA, 19 nt, Artificial Sequence
  Description of Artificial Sequence: Synthetic oligonucleotide
uuccccacaucccgaagca

SEQ ID NO: 1567571 - RNA, 19 nt, Artificial Sequence
  Description of Artificial Sequence: Synthetic oligonucleotide
auaacgagaagggucucca

SEQ ID NO: 1567572 - RNA, 19 nt, Artificial Sequence
  Description of Artificial Sequence: Synthetic oligonucleotide
uguagguguaacguauaaa

SEQ ID NO: 1567573 - RNA, 19 nt, Artificial Sequence
  Description of Artificial Sequence: Synthetic oligonucleotide
ugucgaucuuagauuucca

SEQ ID NO: 1567574 - RNA, 19 nt, Artificial Sequence
  Description of Artificial Sequence: Synthetic oligonucleotide
cauugcgagcaaauguauc

SEQ ID NO: 1567575 - RNA, 19 nt, Artificial Sequence
  Description of Artificial Sequence: Synthetic oligonucleotide
guguguguguguguggucc

SEQ ID NO: 1567576 - RNA, 19 nt, Artificial Sequence
  Description of Artificial Sequence: Synthetic oligonucleotide
acauagaggaccagccguc

SEQ ID NO: 1567577 - RNA, 19 nt, Artificial Sequence
  Description of Artificial Sequence: Synthetic oligonucleotide
ucuuagcaaccacaaugau

SEQ ID NO: 1567578 - RNA, 19 nt, Artificial Sequence
  Description of Artificial Sequence: Synthetic oligonucleotide
ugcgagcaaauguaucuuc

SEQ ID NO: 1567579 - RNA, 19 nt, Artificial Sequence
  Description of Artificial Sequence: Synthetic oligonucleotide
guagaucgcccacaguuuc

SEQ ID NO: 1567580 - RNA, 19 nt, Artificial Sequence
  Description of Artificial Sequence: Synthetic oligonucleotide
gaaacuucuggaaggccca

SEQ ID NO: 1567581 - RNA, 19 nt, Artificial Sequence
  Description of Artificial Sequence: Synthetic oligonucleotide
caucauucguuuccagaug

SEQ ID NO: 1567582 - RNA, 19 nt, Artificial Sequence
  Description of Artificial Sequence: Synthetic oligonucleotide
augucagauucauucccca

SEQ ID NO: 1567583 - RNA, 19 nt, Artificial Sequence
  Description of Artificial Sequence: Synthetic oligonucleotide
  modified_base (5)..(5): a, c, u, g, unknown or other
aaacngacaauagcacauu

SEQ ID NO: 1567584 - RNA, 19 nt, Artificial Sequence
  Description of Artificial Sequence: Synthetic oligonucleotide
guaccguuaacuccuugca

SEQ ID NO: 1567585 - RNA, 19 nt, Artificial Sequence
  Description of Artificial Sequence: Synthetic oligonucleotide
ugguugagucuguaggaaa

SEQ ID NO: 1567586 - RNA, 19 nt, Artificial Sequence
  Description of Artificial Sequence: Synthetic oligonucleotide
cuuuuaggaaagacguuaa

SEQ ID NO: 1567587 - RNA, 19 nt, Artificial Sequence
  Description of Artificial Sequence: Synthetic oligonucleotide
uuugucgaucuuagauuuc

SEQ ID NO: 1567588 - RNA, 19 nt, Artificial Sequence
  Description of Artificial Sequence: Synthetic oligonucleotide
aucgcccacaguuuccuga

SEQ ID NO: 1567589 - RNA, 19 nt, Artificial Sequence
  Description of Artificial Sequence: Synthetic oligonucleotide
uuaccuuacagugcuguuu

SEQ ID NO: 1567590 - RNA, 19 nt, Artificial Sequence
  Description of Artificial Sequence: Synthetic oligonucleotide
aucuuagauuuccacugau

SEQ ID NO: 1567591 - RNA, 19 nt, Artificial Sequence
  Description of Artificial Sequence: Synthetic oligonucleotide
uagaggaccagccguccaa

SEQ ID NO: 1567592 - RNA, 19 nt, Artificial Sequence
  Description of Artificial Sequence: Synthetic oligonucleotide
cgaucuuagauuuccacug

SEQ ID NO: 1567593 - RNA, 19 nt, Artificial Sequence
  Description of Artificial Sequence: Synthetic oligonucleotide
uguccuuuagugucuugua

SEQ ID NO: 1567594 - RNA, 19 nt, Artificial Sequence
  Description of Artificial Sequence: Synthetic oligonucleotide
auguaucuucacuguucuc

SEQ ID NO: 1567595 - RNA, 19 nt, Artificial Sequence
  Description of Artificial Sequence: Synthetic oligonucleotide
auguagguguaacguauaa

SEQ ID NO: 1567596 - RNA, 19 nt, Artificial Sequence
  Description of Artificial Sequence: Synthetic oligonucleotide
cucacccaggaacucuucc

SEQ ID NO: 1567597 - RNA, 19 nt, Artificial Sequence
  Description of Artificial Sequence: Synthetic oligonucleotide
caaaaucugccagguaaac

SEQ ID NO: 1567598 - RNA, 19 nt, Artificial Sequence
  Description of Artificial Sequence: Synthetic oligonucleotide
cuuacagugcuguuuucaa

SEQ ID NO: 1567599 - RNA, 19 nt, Artificial Sequence
  Description of Artificial Sequence: Synthetic oligonucleotide
ugacguucuggggaucucc

SEQ ID NO: 1567600 - RNA, 19 nt, Artificial Sequence
  Description of Artificial Sequence: Synthetic oligonucleotide
ucucaccuuucuuuaccac

SEQ ID NO: 1567601 - RNA, 19 nt, Artificial Sequence
  Description of Artificial Sequence: Synthetic oligonucleotide
caggcuguaguaguuugag

SEQ ID NO: 1567602 - RNA, 19 nt, Artificial Sequence
  Description of Artificial Sequence: Synthetic oligonucleotide
cacuagaugucacaccaga

SEQ ID NO: 1567603 - RNA, 19 nt, Artificial Sequence
  Description of Artificial Sequence: Synthetic oligonucleotide
aguguuugaacagccuuaa

SEQ ID NO: 1567604 - RNA, 19 nt, Artificial Sequence
  Description of Artificial Sequence: Synthetic oligonucleotide
aagggaucucaccuuucuu

SEQ ID NO: 1567605 - RNA, 19 nt, Artificial Sequence
  Description of Artificial Sequence: Synthetic oligonucleotide
gguauauccuuccaagugu

SEQ ID NO: 1567606 - RNA, 19 nt, Artificial Sequence
  Description of Artificial Sequence: Synthetic oligonucleotide
gugucuuguagacauagau

SEQ ID NO: 1567607 - RNA, 19 nt, Artificial Sequence
  Description of Artificial Sequence: Synthetic oligonucleotide
ugugugugugugugugugu

SEQ ID NO: 1567608 - RNA, 19 nt, Artificial Sequence
  Description of Artificial Sequence: Synthetic oligonucleotide
auauuccgaaugaacuuca

SEQ ID NO: 1567609 - RNA, 19 nt, Artificial Sequence
  Description of Artificial Sequence: Synthetic oligonucleotide
cuuguagacauagauugua

SEQ ID NO: 1567610 - RNA, 19 nt, Artificial Sequence
  Description of Artificial Sequence: Synthetic oligonucleotide
ugugugugugugugguccu

SEQ ID NO: 1567611 - RNA, 19 nt, Artificial Sequence
  Description of Artificial Sequence: Synthetic oligonucleotide
caauagcacauugcgagca

SEQ ID NO: 1567612 - RNA, 19 nt, Artificial Sequence
  Description of Artificial Sequence: Synthetic oligonucleotide
cauacuauaugcccagagu

SEQ ID NO: 1567613 - RNA, 19 nt, Artificial Sequence
  Description of Artificial Sequence: Synthetic oligonucleotide
caaugauagguggaaagaa

SEQ ID NO: 1567614 - RNA, 19 nt, Artificial Sequence
  Description of Artificial Sequence: Synthetic oligonucleotide
uggccaaguagguccuuca

SEQ ID NO: 1567615 - RNA, 19 nt, Artificial Sequence
  Description of Artificial Sequence: Synthetic oligonucleotide
aagauguuuuguggcugca

SEQ ID NO: 1567616 - RNA, 19 nt, Artificial Sequence
  Description of Artificial Sequence: Synthetic oligonucleotide
auagaggaccagccgucca

SEQ ID NO: 1567617 - RNA, 19 nt, Artificial Sequence
  Description of Artificial Sequence: Synthetic oligonucleotide
gugugugugugugugugug

SEQ ID NO: 1567618 - RNA, 19 nt, Artificial Sequence
  Description of Artificial Sequence: Synthetic oligonucleotide
cauagaggaccagccgucc

SEQ ID NO: 1567619 - RNA, 19 nt, Artificial Sequence
  Description of Artificial Sequence: Synthetic oligonucleotide
acguuaagauauccuuuaa

SEQ ID NO: 1567620 - RNA, 19 nt, Artificial Sequence
  Description of Artificial Sequence: Synthetic oligonucleotide
agugugugugugugugugu

SEQ ID NO: 1567621 - RNA, 19 nt, Artificial Sequence
  Description of Artificial Sequence: Synthetic oligonucleotide
caagccucuccuucauaug

SEQ ID NO: 1567622 - RNA, 19 nt, Artificial Sequence
  Description of Artificial Sequence: Synthetic oligonucleotide
uaacacauuugucgaucuu

SEQ ID NO: 1567623 - RNA, 19 nt, Artificial Sequence
  Description of Artificial Sequence: Synthetic oligonucleotide
guaccguugcucccaaguc

SEQ ID NO: 1567624 - RNA, 19 nt, Artificial Sequence
  Description of Artificial Sequence: Synthetic oligonucleotide
uuagugucuuguagacaua

SEQ ID NO: 1567625 - RNA, 19 nt, Artificial Sequence
  Description of Artificial Sequence: Synthetic oligonucleotide
cagugacagccaucauucg

SEQ ID NO: 1567626 - RNA, 19 nt, Artificial Sequence
  Description of Artificial Sequence: Synthetic oligonucleotide
cauuugucgaucuuagauu

SEQ ID NO: 1567627 - RNA, 19 nt, Artificial Sequence
  Description of Artificial Sequence: Synthetic oligonucleotide
agacguuaagauauccuuu

SEQ ID NO: 1567628 - RNA, 19 nt, Artificial Sequence
  Description of Artificial Sequence: Synthetic oligonucleotide
aucucccgucccuuggaug

SEQ ID NO: 1567629 - RNA, 19 nt, Artificial Sequence
  Description of Artificial Sequence: Synthetic oligonucleotide
caguagaucgcccacaguu

SEQ ID NO: 1567630 - RNA, 19 nt, Artificial Sequence
  Description of Artificial Sequence: Synthetic oligonucleotide
uggaaucuauuaagauguu

SEQ ID NO: 1567631 - RNA, 19 nt, Artificial Sequence
  Description of Artificial Sequence: Synthetic oligonucleotide
ugugugugugugguccuac

SEQ ID NO: 1567632 - RNA, 19 nt, Artificial Sequence
  Description of Artificial Sequence: Synthetic oligonucleotide
caggguaccguuaacuccu

SEQ ID NO: 1567633 - RNA, 19 nt, Artificial Sequence
  Description of Artificial Sequence: Synthetic oligonucleotide
gucuauugggcagauggaa

SEQ ID NO: 1567634 - RNA, 19 nt, Artificial Sequence
  Description of Artificial Sequence: Synthetic oligonucleotide
agauccugauggguauauc

SEQ ID NO: 1567635 - RNA, 19 nt, Artificial Sequence
  Description of Artificial Sequence: Synthetic oligonucleotide
ugugugugugugugugguc

SEQ ID NO: 1567636 - RNA, 19 nt, Artificial Sequence
  Description of Artificial Sequence: Synthetic oligonucleotide
cacauagaggaccagccgu

SEQ ID NO: 1567637 - RNA, 19 nt, Artificial Sequence
  Description of Artificial Sequence: Synthetic oligonucleotide
gguguaacguauaaauucu

SEQ ID NO: 1567638 - RNA, 19 nt, Artificial Sequence
  Description of Artificial Sequence: Synthetic oligonucleotide
auuacucagugaagugugu

SEQ ID NO: 1567639 - RNA, 19 nt, Artificial Sequence
  Description of Artificial Sequence: Synthetic oligonucleotide
auucauguacaaggauggu

SEQ ID NO: 1567640 - RNA, 19 nt, Artificial Sequence
  Description of Artificial Sequence: Synthetic oligonucleotide
agcuauaagcuugucucuu

SEQ ID NO: 1567641 - RNA, 19 nt, Artificial Sequence
  Description of Artificial Sequence: Synthetic oligonucleotide
uaacgagaagggucuccaa

SEQ ID NO: 1567642 - RNA, 19 nt, Artificial Sequence
  Description of Artificial Sequence: Synthetic oligonucleotide
ugcuuaccuuacagugcug

SEQ ID NO: 1567643 - RNA, 19 nt, Artificial Sequence
  Description of Artificial Sequence: Synthetic oligonucleotide
agaucgcccacaguuuccu

SEQ ID NO: 1567644 - RNA, 19 nt, Artificial Sequence
  Description of Artificial Sequence: Synthetic oligonucleotide
uaaggauuucuaggucuau

SEQ ID NO: 1567645 - RNA, 19 nt, Artificial Sequence
  Description of Artificial Sequence: Synthetic oligonucleotide
uuaccacauagaggaccag

SEQ ID NO: 1567646 - RNA, 19 nt, Artificial Sequence
  Description of Artificial Sequence: Synthetic oligonucleotide
guauauccuuccaagugua

SEQ ID NO: 1567647 - RNA, 19 nt, Artificial Sequence
  Description of Artificial Sequence: Synthetic oligonucleotide
gcuauaagcuugucucuuc

SEQ ID NO: 1567648 - RNA, 19 nt, Artificial Sequence
  Description of Artificial Sequence: Synthetic oligonucleotide
aguagaucgcccacaguuu

SEQ ID NO: 1567649 - RNA, 19 nt, Artificial Sequence
  Description of Artificial Sequence: Synthetic oligonucleotide
acacuagaugucacaccag

SEQ ID NO: 1567650 - RNA, 19 nt, Artificial Sequence
  Description of Artificial Sequence: Synthetic oligonucleotide
acauugcgagcaaauguau

SEQ ID NO: 1567651 - RNA, 19 nt, Artificial Sequence
  Description of Artificial Sequence: Synthetic oligonucleotide
ucgcccacaguuuccugau

SEQ ID NO: 1567652 - RNA, 19 nt, Artificial Sequence
  Description of Artificial Sequence: Synthetic oligonucleotide
gaucgcccacaguuuccug

SEQ ID NO: 1567653 - RNA, 19 nt, Artificial Sequence
  Description of Artificial Sequence: Synthetic oligonucleotide
gccaucauucguuuccaga

SEQ ID NO: 1567654 - RNA, 19 nt, Artificial Sequence
  Description of Artificial Sequence: Synthetic oligonucleotide
ggaacucuuccaaugucca

SEQ ID NO: 1567655 - RNA, 19 nt, Artificial Sequence
  Description of Artificial Sequence: Synthetic oligonucleotide
ugugcucacccaggaacuc

SEQ ID NO: 1567656 - RNA, 19 nt, Artificial Sequence
  Description of Artificial Sequence: Synthetic oligonucleotide
ggccaaguagguccuucag

SEQ ID NO: 1567657 - RNA, 19 nt, Artificial Sequence
  Description of Artificial Sequence: Synthetic oligonucleotide
ccgaaugaacuucaguaga

SEQ ID NO: 1567658 - RNA, 19 nt, Artificial Sequence
  Description of Artificial Sequence: Synthetic oligonucleotide
augacguucuggggaucuc

SEQ ID NO: 1567659 - RNA, 19 nt, Artificial Sequence
  Description of Artificial Sequence: Synthetic oligonucleotide
ucccuuggaugcucugauc

SEQ ID NO: 1567660 - RNA, 19 nt, Artificial Sequence
  Description of Artificial Sequence: Synthetic oligonucleotide
gaagugugugugugugugu

SEQ ID NO: 1567661 - RNA, 19 nt, Artificial Sequence
  Description of Artificial Sequence: Synthetic oligonucleotide
gccaaguagguccuucaga

SEQ ID NO: 1567662 - RNA, 19 nt, Artificial Sequence
  Description of Artificial Sequence: Synthetic oligonucleotide
auguacaaggaugguucau

SEQ ID NO: 1567663 - RNA, 19 nt, Artificial Sequence
  Description of Artificial Sequence: Synthetic oligonucleotide
ggaaagacguuaagauauc

SEQ ID NO: 1567664 - RNA, 19 nt, Artificial Sequence
  Description of Artificial Sequence: Synthetic oligonucleotide
caaauguaucuucacuguu

SEQ ID NO: 1567665 - RNA, 19 nt, Artificial Sequence
  Description of Artificial Sequence: Synthetic oligonucleotide
guuccucucugugcucacc

SEQ ID NO: 1567666 - RNA, 19 nt, Artificial Sequence
  Description of Artificial Sequence: Synthetic oligonucleotide
cagauucauuccccacauc

SEQ ID NO: 1567667 - RNA, 19 nt, Artificial Sequence
  Description of Artificial Sequence: Synthetic oligonucleotide
gugugguccuacugccuca

SEQ ID NO: 1567668 - RNA, 19 nt, Artificial Sequence
  Description of Artificial Sequence: Synthetic oligonucleotide
cauucguuuccagaugccu

SEQ ID NO: 1567669 - RNA, 19 nt, Artificial Sequence
  Description of Artificial Sequence: Synthetic oligonucleotide
ucguuuccagaugccuccu

SEQ ID NO: 1567670 - RNA, 19 nt, Artificial Sequence
  Description of Artificial Sequence: Synthetic oligonucleotide
gcccacaguuuccugauaa

SEQ ID NO: 1567671 - RNA, 19 nt, Artificial Sequence
  Description of Artificial Sequence: Synthetic oligonucleotide
gugacaucucauacuauau

SEQ ID NO: 1567672 - RNA, 19 nt, Artificial Sequence
  Description of Artificial Sequence: Synthetic oligonucleotide
guguaacguauaaauucua

SEQ ID NO: 1567673 - RNA, 19 nt, Artificial Sequence
  Description of Artificial Sequence: Synthetic oligonucleotide
guuuccugauaaggauuuc

SEQ ID NO: 1567674 - RNA, 19 nt, Artificial Sequence
  Description of Artificial Sequence: Synthetic oligonucleotide
ccguccaagggccuccaag

SEQ ID NO: 1567675 - RNA, 19 nt, Artificial Sequence
  Description of Artificial Sequence: Synthetic oligonucleotide
gagaagcuugcuauucuuu

SEQ ID NO: 1567676 - RNA, 19 nt, Artificial Sequence
  Description of Artificial Sequence: Synthetic oligonucleotide
guguguguguguguguggu

SEQ ID NO: 1567677 - RNA, 19 nt, Artificial Sequence
  Description of Artificial Sequence: Synthetic oligonucleotide
cuccuauauuccgaaugaa

SEQ ID NO: 1567678 - RNA, 19 nt, Artificial Sequence
  Description of Artificial Sequence: Synthetic oligonucleotide
agggacacacacacauaaa

SEQ ID NO: 1567679 - RNA, 19 nt, Artificial Sequence
  Description of Artificial Sequence: Synthetic oligonucleotide
ccauggguuccucucugug

SEQ ID NO: 1567680 - RNA, 19 nt, Artificial Sequence
  Description of Artificial Sequence: Synthetic oligonucleotide
cuguaccguugcucccaag

SEQ ID NO: 1567681 - RNA, 19 nt, Artificial Sequence
  Description of Artificial Sequence: Synthetic oligonucleotide
ucaugacguucuggggauc

SEQ ID NO: 1567682 - RNA, 19 nt, Artificial Sequence
  Description of Artificial Sequence: Synthetic oligonucleotide
gugaagugugugugugugu

SEQ ID NO: 1567683 - RNA, 19 nt, Artificial Sequence
  Description of Artificial Sequence: Synthetic oligonucleotide
uccccacaucccgaagcac

SEQ ID NO: 1567684 - RNA, 19 nt, Artificial Sequence
  Description of Artificial Sequence: Synthetic oligonucleotide
gguugagucuguaggaaau

SEQ ID NO: 1567685 - RNA, 19 nt, Artificial Sequence
  Description of Artificial Sequence: Synthetic oligonucleotide
ggaucucccgucccuugga

SEQ ID NO: 1567686 - RNA, 19 nt, Artificial Sequence
  Description of Artificial Sequence: Synthetic oligonucleotide
gaucucccgucccuuggau

SEQ ID NO: 1567687 - RNA, 19 nt, Artificial Sequence
  Description of Artificial Sequence: Synthetic oligonucleotide
caugacguucuggggaucu

SEQ ID NO: 1567688 - RNA, 19 nt, Artificial Sequence
  Description of Artificial Sequence: Synthetic oligonucleotide
cuuaccuuacagugcuguu

SEQ ID NO: 1567689 - RNA, 19 nt, Artificial Sequence
  Description of Artificial Sequence: Synthetic oligonucleotide
gcuuaccuuacagugcugu

SEQ ID NO: 1567690 - RNA, 19 nt, Artificial Sequence
  Description of Artificial Sequence: Synthetic oligonucleotide
ccuuggaaucuauuaagau

SEQ ID NO: 1567691 - RNA, 19 nt, Artificial Sequence
  Description of Artificial Sequence: Synthetic oligonucleotide
cagugaagugugugugugu

SEQ ID NO: 1567692 - RNA, 19 nt, Artificial Sequence
  Description of Artificial Sequence: Synthetic oligonucleotide
ggguaccguuaacuccuug

SEQ ID NO: 1567693 - RNA, 19 nt, Artificial Sequence
  Description of Artificial Sequence: Synthetic oligonucleotide
cagugacaucucauacuau

SEQ ID NO: 1567694 - RNA, 19 nt, Artificial Sequence
  Description of Artificial Sequence: Synthetic oligonucleotide
gugugugugugugguccua

SEQ ID NO: 1567695 - RNA, 19 nt, Artificial Sequence
  Description of Artificial Sequence: Synthetic oligonucleotide
ccauaacacauuugucgau

SEQ ID NO: 1567696 - RNA, 19 nt, Artificial Sequence
  Description of Artificial Sequence: Synthetic oligonucleotide
agccguccaagggccucca

SEQ ID NO: 1567697 - RNA, 19 nt, Artificial Sequence
  Description of Artificial Sequence: Synthetic oligonucleotide
gcacugaaugagguccuua

SEQ ID NO: 1567698 - RNA, 19 nt, Artificial Sequence
  Description of Artificial Sequence: Synthetic oligonucleotide
cuaggucuauugggcagau

SEQ ID NO: 1567699 - RNA, 19 nt, Artificial Sequence
  Description of Artificial Sequence: Synthetic oligonucleotide
cccuguaccguugcuccca

SEQ ID NO: 1567700 - RNA, 19 nt, Artificial Sequence
  Description of Artificial Sequence: Synthetic oligonucleotide
aggguaccguuaacuccuu

SEQ ID NO: 1567701 - RNA, 19 nt, Artificial Sequence
  Description of Artificial Sequence: Synthetic oligonucleotide
gcucuccuauauuccgaau

SEQ ID NO: 1567702 - RNA, 19 nt, Artificial Sequence
  Description of Artificial Sequence: Synthetic oligonucleotide
ccgucccuuggaugcucug

SEQ ID NO: 1567703 - RNA, 19 nt, Artificial Sequence
  Description of Artificial Sequence: Synthetic oligonucleotide
cgaagcacccuguaccguu

SEQ ID NO: 1567704 - RNA, 19 nt, Artificial Sequence
  Description of Artificial Sequence: Synthetic oligonucleotide
ccaagucucucaugacguu

SEQ ID NO: 1567705 - RNA, 19 nt, Artificial Sequence
  Description of Artificial Sequence: Synthetic oligonucleotide
cguugcucccaaguccaaa

SEQ ID NO: 1567706 - RNA, 19 nt, Artificial Sequence
  Description of Artificial Sequence: Synthetic oligonucleotide
ggcacugaaugagguccuu

SEQ ID NO: 1567707 - RNA, 19 nt, Artificial Sequence
  Description of Artificial Sequence: Synthetic oligonucleotide
gccguccaagggccuccaa

SEQ ID NO: 1567708 - RNA, 19 nt, Artificial Sequence
  Description of Artificial Sequence: Synthetic oligonucleotide
  modified_base (1)..(1): a, c, u, g, unknown or other
ngacaauagcacauugcga

SEQ ID NO: 1567709 - RNA, 19 nt, Artificial Sequence
  Description of Artificial Sequence: Synthetic oligonucleotide
uuuauugaaacuuacauug

SEQ ID NO: 1567710 - RNA, 19 nt, Artificial Sequence
  Description of Artificial Sequence: Synthetic oligonucleotide
aaaugaaaacgucucuugg

SEQ ID NO: 1567711 - RNA, 19 nt, Artificial Sequence
  Description of Artificial Sequence: Synthetic oligonucleotide
aaugacagaaccugguauc

SEQ ID NO: 1567712 - RNA, 19 nt, Artificial Sequence
  Description of Artificial Sequence: Synthetic oligonucleotide
aguccaauauguuccaucc

SEQ ID NO: 1567713 - RNA, 19 nt, Artificial Sequence
  Description of Artificial Sequence: Synthetic oligonucleotide
uagcaaagcuucaagaggg

SEQ ID NO: 1567714 - RNA, 19 nt, Artificial Sequence
  Description of Artificial Sequence: Synthetic oligonucleotide
aaauaauggcaccaaaacu

SEQ ID NO: 1567715 - RNA, 19 nt, Artificial Sequence
  Description of Artificial Sequence: Synthetic oligonucleotide
ugugaauaguccaauaugu

SEQ ID NO: 1567716 - RNA, 19 nt, Artificial Sequence
  Description of Artificial Sequence: Synthetic oligonucleotide
gaauaguccaauauguucc

SEQ ID NO: 1567717 - RNA, 19 nt, Artificial Sequence
  Description of Artificial Sequence: Synthetic oligonucleotide
aauaauggcaccaaaacuu

SEQ ID NO: 1567718 - RNA, 19 nt, Artificial Sequence
  Description of Artificial Sequence: Synthetic oligonucleotide
aaugaaaacgucucuugga

SEQ ID NO: 1567719 - RNA, 19 nt, Artificial Sequence
  Description of Artificial Sequence: Synthetic oligonucleotide
cauaagagaauucugguuc

SEQ ID NO: 1567720 - RNA, 19 nt, Artificial Sequence
  Description of Artificial Sequence: Synthetic oligonucleotide
uauugaaacuuacauugug

SEQ ID NO: 1567721 - RNA, 19 nt, Artificial Sequence
  Description of Artificial Sequence: Synthetic oligonucleotide
aaaggugcugugcauauca

SEQ ID NO: 1567722 - RNA, 19 nt, Artificial Sequence
  Description of Artificial Sequence: Synthetic oligonucleotide
aagaggguggaccacaugu

SEQ ID NO: 1567723 - RNA, 19 nt, Artificial Sequence
  Description of Artificial Sequence: Synthetic oligonucleotide
aaugaagcaaacuuuuauu

SEQ ID NO: 1567724 - RNA, 19 nt, Artificial Sequence
  Description of Artificial Sequence: Synthetic oligonucleotide
aauggcaccaaaacuuccc

SEQ ID NO: 1567725 - RNA, 19 nt, Artificial Sequence
  Description of Artificial Sequence: Synthetic oligonucleotide
uccaauauguuccauccga

SEQ ID NO: 1567726 - RNA, 19 nt, Artificial Sequence
  Description of Artificial Sequence: Synthetic oligonucleotide
gaaaacgucucuuggagac

SEQ ID NO: 1567727 - RNA, 19 nt, Artificial Sequence
  Description of Artificial Sequence: Synthetic oligonucleotide
ugaauaguccaauauguuc

SEQ ID NO: 1567728 - RNA, 19 nt, Artificial Sequence
  Description of Artificial Sequence: Synthetic oligonucleotide
cuagcaaagcuucaagagg

SEQ ID NO: 1567729 - RNA, 19 nt, Artificial Sequence
  Description of Artificial Sequence: Synthetic oligonucleotide
augaaaacgucucuuggag

SEQ ID NO: 1567730 - RNA, 19 nt, Artificial Sequence
  Description of Artificial Sequence: Synthetic oligonucleotide
aacuuuuauugaaacuuac

SEQ ID NO: 1567731 - RNA, 19 nt, Artificial Sequence
  Description of Artificial Sequence: Synthetic oligonucleotide
uuuuauugaaacuuacauu

SEQ ID NO: 1567732 - RNA, 19 nt, Artificial Sequence
  Description of Artificial Sequence: Synthetic oligonucleotide
aaaucccuagcaaagcuuc

SEQ ID NO: 1567733 - RNA, 19 nt, Artificial Sequence
  Description of Artificial Sequence: Synthetic oligonucleotide
ugaagcaaacuuuuauuga

SEQ ID NO: 1567734 - RNA, 19 nt, Artificial Sequence
  Description of Artificial Sequence: Synthetic oligonucleotide
aaaagucccaaacaccaaa

SEQ ID NO: 1567735 - RNA, 19 nt, Artificial Sequence
  Description of Artificial Sequence: Synthetic oligonucleotide
aaaacccacuguaaauccc

SEQ ID NO: 1567736 - RNA, 19 nt, Artificial Sequence
  Description of Artificial Sequence: Synthetic oligonucleotide
uucaguaagaggguggacc

SEQ ID NO: 1567737 - RNA, 19 nt, Artificial Sequence
  Description of Artificial Sequence: Synthetic oligonucleotide
gacagaaccugguaucagg

SEQ ID NO: 1567738 - RNA, 19 nt, Artificial Sequence
  Description of Artificial Sequence: Synthetic oligonucleotide
augugaauaguccaauaug

SEQ ID NO: 1567739 - RNA, 19 nt, Artificial Sequence
  Description of Artificial Sequence: Synthetic oligonucleotide
aauaguccaauauguucca

SEQ ID NO: 1567740 - RNA, 19 nt, Artificial Sequence
  Description of Artificial Sequence: Synthetic oligonucleotide
cuguaaaucccuagcaaag

SEQ ID NO: 1567741 - RNA, 19 nt, Artificial Sequence
  Description of Artificial Sequence: Synthetic oligonucleotide
caaaacccacuguaaaucc

SEQ ID NO: 1567742 - RNA, 19 nt, Artificial Sequence
  Description of Artificial Sequence: Synthetic oligonucleotide
gagaauucugguucuggag

SEQ ID NO: 1567743 - RNA, 19 nt, Artificial Sequence
  Description of Artificial Sequence: Synthetic oligonucleotide
gaagcaaacuuuuauugaa

SEQ ID NO: 1567744 - RNA, 19 nt, Artificial Sequence
  Description of Artificial Sequence: Synthetic oligonucleotide
ugaaucgagucaaaaccca

SEQ ID NO: 1567745 - RNA, 19 nt, Artificial Sequence
  Description of Artificial Sequence: Synthetic oligonucleotide
aagagaauucugguucugg

SEQ ID NO: 1567746 - RNA, 19 nt, Artificial Sequence
  Description of Artificial Sequence: Synthetic oligonucleotide
uuauugaaacuuacauugu

SEQ ID NO: 1567747 - RNA, 19 nt, Artificial Sequence
  Description of Artificial Sequence: Synthetic oligonucleotide
acuguaaaucccuagcaaa

SEQ ID NO: 1567748 - RNA, 19 nt, Artificial Sequence
  Description of Artificial Sequence: Synthetic oligonucleotide
ucaaaacccacuguaaauc

SEQ ID NO: 1567749 - RNA, 19 nt, Artificial Sequence
  Description of Artificial Sequence: Synthetic oligonucleotide
ucaguaagaggguggacca

SEQ ID NO: 1567750 - RNA, 19 nt, Artificial Sequence
  Description of Artificial Sequence: Synthetic oligonucleotide
gaauucugguucuggagug

SEQ ID NO: 1567751 - RNA, 19 nt, Artificial Sequence
  Description of Artificial Sequence: Synthetic oligonucleotide
aguccaagaaacuaaccaa

SEQ ID NO: 1567752 - RNA, 19 nt, Artificial Sequence
  Description of Artificial Sequence: Synthetic oligonucleotide
uguaaaucccuagcaaagc

SEQ ID NO: 1567753 - RNA, 19 nt, Artificial Sequence
  Description of Artificial Sequence: Synthetic oligonucleotide
ucugguucuggagugaugu

SEQ ID NO: 1567754 - RNA, 19 nt, Artificial Sequence
  Description of Artificial Sequence: Synthetic oligonucleotide
auaagagaauucugguucu

SEQ ID NO: 1567755 - RNA, 19 nt, Artificial Sequence
  Description of Artificial Sequence: Synthetic oligonucleotide
aucgagucaaaacccacug

SEQ ID NO: 1567756 - RNA, 19 nt, Artificial Sequence
  Description of Artificial Sequence: Synthetic oligonucleotide
auaauggcaccaaaacuuc

SEQ ID NO: 1567757 - RNA, 19 nt, Artificial Sequence
  Description of Artificial Sequence: Synthetic oligonucleotide
ucaguccaagaaacuaacc

SEQ ID NO: 1567758 - RNA, 19 nt, Artificial Sequence
  Description of Artificial Sequence: Synthetic oligonucleotide
uaauggcaccaaaacuucc

SEQ ID NO: 1567759 - RNA, 19 nt, Artificial Sequence
  Description of Artificial Sequence: Synthetic oligonucleotide
acugcaucaguccaagaaa

SEQ ID NO: 1567760 - RNA, 19 nt, Artificial Sequence
  Description of Artificial Sequence: Synthetic oligonucleotide
agucccaaacaccaaagaa

SEQ ID NO: 1567761 - RNA, 19 nt, Artificial Sequence
  Description of Artificial Sequence: Synthetic oligonucleotide
agagaauucugguucugga

SEQ ID NO: 1567762 - RNA, 19 nt, Artificial Sequence
  Description of Artificial Sequence: Synthetic oligonucleotide
agucaaaacccacuguaaa

SEQ ID NO: 1567763 - RNA, 19 nt, Artificial Sequence
  Description of Artificial Sequence: Synthetic oligonucleotide
cuuuuauugaaacuuacau

SEQ ID NO: 1567764 - RNA, 19 nt, Artificial Sequence
  Description of Artificial Sequence: Synthetic oligonucleotide
aucaguccaagaaacuaac

SEQ ID NO: 1567765 - RNA, 19 nt, Artificial Sequence
  Description of Artificial Sequence: Synthetic oligonucleotide
cugcaucaguccaagaaac

SEQ ID NO: 1567766 - RNA, 19 nt, Artificial Sequence
  Description of Artificial Sequence: Synthetic oligonucleotide
ucaaugacagaaccuggua

SEQ ID NO: 1567767 - RNA, 19 nt, Artificial Sequence
  Description of Artificial Sequence: Synthetic oligonucleotide
uaaaucccuagcaaagcuu

SEQ ID NO: 1567768 - RNA, 19 nt, Artificial Sequence
  Description of Artificial Sequence: Synthetic oligonucleotide
ucccuagcaaagcuucaag

SEQ ID NO: 1567769 - RNA, 19 nt, Artificial Sequence
  Description of Artificial Sequence: Synthetic oligonucleotide
caguccaagaaacuaacca

SEQ ID NO: 1567770 - RNA, 19 nt, Artificial Sequence
  Description of Artificial Sequence: Synthetic oligonucleotide
gaugugaauaguccaauau

SEQ ID NO: 1567771 - RNA, 19 nt, Artificial Sequence
  Description of Artificial Sequence: Synthetic oligonucleotide
aaacccacuguaaaucccu

SEQ ID NO: 1567772 - RNA, 19 nt, Artificial Sequence
  Description of Artificial Sequence: Synthetic oligonucleotide
ccuagcaaagcuucaagag

SEQ ID NO: 1567773 - RNA, 19 nt, Artificial Sequence
  Description of Artificial Sequence: Synthetic oligonucleotide
aaucgagucaaaacccacu

SEQ ID NO: 1567774 - RNA, 19 nt, Artificial Sequence
  Description of Artificial Sequence: Synthetic oligonucleotide
aaacuuuuauugaaacuua

SEQ ID NO: 1567775 - RNA, 19 nt, Artificial Sequence
  Description of Artificial Sequence: Synthetic oligonucleotide
uaguccaauauguuccauc

SEQ ID NO: 1567776 - RNA, 19 nt, Artificial Sequence
  Description of Artificial Sequence: Synthetic oligonucleotide
ugcaucaguccaagaaacu

SEQ ID NO: 1567777 - RNA, 19 nt, Artificial Sequence
  Description of Artificial Sequence: Synthetic oligonucleotide
aaaaggugcugugcauauc

SEQ ID NO: 1567778 - RNA, 19 nt, Artificial Sequence
  Description of Artificial Sequence: Synthetic oligonucleotide
acuuuuauugaaacuuaca

SEQ ID NO: 1567779 - RNA, 19 nt, Artificial Sequence
  Description of Artificial Sequence: Synthetic oligonucleotide
uggaccacaugucuucaaa

SEQ ID NO: 1567780 - RNA, 19 nt, Artificial Sequence
  Description of Artificial Sequence: Synthetic oligonucleotide
uaguacaaugaagcaaacu

SEQ ID NO: 1567781 - RNA, 19 nt, Artificial Sequence
  Description of Artificial Sequence: Synthetic oligonucleotide
accaaaacuuccccuucug

SEQ ID NO: 1567782 - RNA, 19 nt, Artificial Sequence
  Description of Artificial Sequence: Synthetic oligonucleotide
guccaauauguuccauccg

SEQ ID NO: 1567783 - RNA, 19 nt, Artificial Sequence
  Description of Artificial Sequence: Synthetic oligonucleotide
ucgagucaaaacccacugu

SEQ ID NO: 1567784 - RNA, 19 nt, Artificial Sequence
  Description of Artificial Sequence: Synthetic oligonucleotide
caaacuuuuauugaaacuu

SEQ ID NO: 1567785 - RNA, 19 nt, Artificial Sequence
  Description of Artificial Sequence: Synthetic oligonucleotide
aguaagaggguggaccaca

SEQ ID NO: 1567786 - RNA, 19 nt, Artificial Sequence
  Description of Artificial Sequence: Synthetic oligonucleotide
gaaucgagucaaaacccac

SEQ ID NO: 1567787 - RNA, 19 nt, Artificial Sequence
  Description of Artificial Sequence: Synthetic oligonucleotide
aauucugguucuggaguga

SEQ ID NO: 1567788 - RNA, 19 nt, Artificial Sequence
  Description of Artificial Sequence: Synthetic oligonucleotide
caucaguccaagaaacuaa

SEQ ID NO: 1567789 - RNA, 19 nt, Artificial Sequence
  Description of Artificial Sequence: Synthetic oligonucleotide
caaagcuucaagaggggaa

SEQ ID NO: 1567790 - RNA, 19 nt, Artificial Sequence
  Description of Artificial Sequence: Synthetic oligonucleotide
gucccaaacaccaaagaaa

SEQ ID NO: 1567791 - RNA, 19 nt, Artificial Sequence
  Description of Artificial Sequence: Synthetic oligonucleotide
guaaaucccuagcaaagcu

SEQ ID NO: 1567792 - RNA, 19 nt, Artificial Sequence
  Description of Artificial Sequence: Synthetic oligonucleotide
uaagagaauucugguucug

SEQ ID NO: 1567793 - RNA, 19 nt, Artificial Sequence
  Description of Artificial Sequence: Synthetic oligonucleotide
uaagaggguggaccacaug

SEQ ID NO: 1567794 - RNA, 19 nt, Artificial Sequence
  Description of Artificial Sequence: Synthetic oligonucleotide
ugacagaaccugguaucag

SEQ ID NO: 1567795 - RNA, 19 nt, Artificial Sequence
  Description of Artificial Sequence: Synthetic oligonucleotide
acccacuguaaaucccuag

SEQ ID NO: 1567796 - RNA, 19 nt, Artificial Sequence
  Description of Artificial Sequence: Synthetic oligonucleotide
augacagaaccugguauca

SEQ ID NO: 1567797 - RNA, 19 nt, Artificial Sequence
  Description of Artificial Sequence: Synthetic oligonucleotide
cacugcaucaguccaagaa

SEQ ID NO: 1567798 - RNA, 19 nt, Artificial Sequence
  Description of Artificial Sequence: Synthetic oligonucleotide
ccaaacaccaaagaaauaa

SEQ ID NO: 1567799 - RNA, 19 nt, Artificial Sequence
  Description of Artificial Sequence: Synthetic oligonucleotide
uucugguucuggagugaug

SEQ ID NO: 1567800 - RNA, 19 nt, Artificial Sequence
  Description of Artificial Sequence: Synthetic oligonucleotide
acagaaccugguaucaggu

SEQ ID NO: 1567801 - RNA, 19 nt, Artificial Sequence
  Description of Artificial Sequence: Synthetic oligonucleotide
agaggguggaccacauguc

SEQ ID NO: 1567802 - RNA, 19 nt, Artificial Sequence
  Description of Artificial Sequence: Synthetic oligonucleotide
uggcaccaaaacuuccccu

SEQ ID NO: 1567803 - RNA, 19 nt, Artificial Sequence
  Description of Artificial Sequence: Synthetic oligonucleotide
guccaagaaacuaaccaaa

SEQ ID NO: 1567804 - RNA, 19 nt, Artificial Sequence
  Description of Artificial Sequence: Synthetic oligonucleotide
caaugaagcaaacuuuuau

SEQ ID NO: 1567805 - RNA, 19 nt, Artificial Sequence
  Description of Artificial Sequence: Synthetic oligonucleotide
cccacuguaaaucccuagc

SEQ ID NO: 1567806 - RNA, 19 nt, Artificial Sequence
  Description of Artificial Sequence: Synthetic oligonucleotide
gucaaaacccacuguaaau

SEQ ID NO: 1567807 - RNA, 19 nt, Artificial Sequence
  Description of Artificial Sequence: Synthetic oligonucleotide
cacuguaaaucccuagcaa

SEQ ID NO: 1567808 - RNA, 19 nt, Artificial Sequence
  Description of Artificial Sequence: Synthetic oligonucleotide
gagucaaaacccacuguaa

SEQ ID NO: 1567809 - RNA, 19 nt, Artificial Sequence
  Description of Artificial Sequence: Synthetic oligonucleotide
cagaaccugguaucagguc

SEQ ID NO: 1567810 - RNA, 19 nt, Artificial Sequence
  Description of Artificial Sequence: Synthetic oligonucleotide
gaggguggaccacaugucu

SEQ ID NO: 1567811 - RNA, 19 nt, Artificial Sequence
  Description of Artificial Sequence: Synthetic oligonucleotide
caaacaccaaagaaauaau

SEQ ID NO: 1567812 - RNA, 19 nt, Artificial Sequence
  Description of Artificial Sequence: Synthetic oligonucleotide
caaugacagaaccugguau

SEQ ID NO: 1567813 - RNA, 19 nt, Artificial Sequence
  Description of Artificial Sequence: Synthetic oligonucleotide
gcaaacuuuuauugaaacu

SEQ ID NO: 1567814 - RNA, 19 nt, Artificial Sequence
  Description of Artificial Sequence: Synthetic oligonucleotide
acaaugaagcaaacuuuua

SEQ ID NO: 1567815 - RNA, 19 nt, Artificial Sequence
  Description of Artificial Sequence: Synthetic oligonucleotide
guacaaugaagcaaacuuu

SEQ ID NO: 1567816 - RNA, 19 nt, Artificial Sequence
  Description of Artificial Sequence: Synthetic oligonucleotide
cugguucuggagugaugug

SEQ ID NO: 1567817 - RNA, 19 nt, Artificial Sequence
  Description of Artificial Sequence: Synthetic oligonucleotide
ucacugcaucaguccaaga

SEQ ID NO: 1567818 - RNA, 19 nt, Artificial Sequence
  Description of Artificial Sequence: Synthetic oligonucleotide
auucugguucuggagugau

SEQ ID NO: 1567819 - RNA, 19 nt, Artificial Sequence
  Description of Artificial Sequence: Synthetic oligonucleotide
aucccuagcaaagcuucaa

SEQ ID NO: 1567820 - RNA, 19 nt, Artificial Sequence
  Description of Artificial Sequence: Synthetic oligonucleotide
ggguggaccacaugucuuc

SEQ ID NO: 1567821 - RNA, 19 nt, Artificial Sequence
  Description of Artificial Sequence: Synthetic oligonucleotide
ggaccacaugucuucaaaa

SEQ ID NO: 1567822 - RNA, 19 nt, Artificial Sequence
  Description of Artificial Sequence: Synthetic oligonucleotide
auaguccaauauguuccau

SEQ ID NO: 1567823 - RNA, 19 nt, Artificial Sequence
  Description of Artificial Sequence: Synthetic oligonucleotide
ccacuguaaaucccuagca

SEQ ID NO: 1567824 - RNA, 19 nt, Artificial Sequence
  Description of Artificial Sequence: Synthetic oligonucleotide
gcaucaguccaagaaacua

SEQ ID NO: 1567825 - RNA, 19 nt, Artificial Sequence
  Description of Artificial Sequence: Synthetic oligonucleotide
cccuagcaaagcuucaaga

SEQ ID NO: 1567826 - RNA, 19 nt, Artificial Sequence
  Description of Artificial Sequence: Synthetic oligonucleotide
caguaagaggguggaccac

SEQ ID NO: 1567827 - RNA, 19 nt, Artificial Sequence
  Description of Artificial Sequence: Synthetic oligonucleotide
aacccacuguaaaucccua

SEQ ID NO: 1567828 - RNA, 19 nt, Artificial Sequence
  Description of Artificial Sequence: Synthetic oligonucleotide
gcaccaaaacuuccccuuc

SEQ ID NO: 1567829 - RNA, 19 nt, Artificial Sequence
  Description of Artificial Sequence: Synthetic oligonucleotide
gcaaagcuucaagagggga

SEQ ID NO: 1567830 - RNA, 19 nt, Artificial Sequence
  Description of Artificial Sequence: Synthetic oligonucleotide
gugaauaguccaauauguu

SEQ ID NO: 1567831 - RNA, 19 nt, Artificial Sequence
  Description of Artificial Sequence: Synthetic oligonucleotide
cgagucaaaacccacugua

SEQ ID NO: 1567832 - RNA, 19 nt, Artificial Sequence
  Description of Artificial Sequence: Synthetic oligonucleotide
aggguggaccacaugucuu

SEQ ID NO: 1567833 - RNA, 19 nt, Artificial Sequence
  Description of Artificial Sequence: Synthetic oligonucleotide
caccaaaacuuccccuucu

SEQ ID NO: 1567834 - RNA, 19 nt, Artificial Sequence
  Description of Artificial Sequence: Synthetic oligonucleotide
ggcaccaaaacuuccccuu

SEQ ID NO: 1567835 - RNA, 19 nt, Artificial Sequence
  Description of Artificial Sequence: Synthetic oligonucleotide
guggaccacaugucuucaa

SEQ ID NO: 1567836 - RNA, 19 nt, Artificial Sequence
  Description of Artificial Sequence: Synthetic oligonucleotide
gguggaccacaugucuuca

SEQ ID NO: 1567837 - RNA, 19 nt, Artificial Sequence
  Description of Artificial Sequence: Synthetic oligonucleotide
guaagaggguggaccacau

SEQ ID NO: 1567838 - RNA, 19 nt, Artificial Sequence
  Description of Artificial Sequence: Synthetic oligonucleotide
ccaauauguuccauccgau

SEQ ID NO: 1567839 - RNA, 19 nt, Artificial Sequence
  Description of Artificial Sequence: Synthetic oligonucleotide
cccaaacaccaaagaaaua

SEQ ID NO: 1567840 - RNA, 19 nt, Artificial Sequence
  Description of Artificial Sequence: Synthetic oligonucleotide
gaaauaacagaugugaugg

SEQ ID NO: 1567841 - RNA, 19 nt, Artificial Sequence
  Description of Artificial Sequence: Synthetic oligonucleotide
aacauagagaaccaguagg

SEQ ID NO: 1567842 - RNA, 19 nt, Artificial Sequence
  Description of Artificial Sequence: Synthetic oligonucleotide
uuuaccagggcucauaggg

SEQ ID NO: 1567843 - RNA, 19 nt, Artificial Sequence
  Description of Artificial Sequence: Synthetic oligonucleotide
aaagauaagcuucucauug

SEQ ID NO: 1567844 - RNA, 19 nt, Artificial Sequence
  Description of Artificial Sequence: Synthetic oligonucleotide
uucaaaacaaagauaagcu

SEQ ID NO: 1567845 - RNA, 19 nt, Artificial Sequence
  Description of Artificial Sequence: Synthetic oligonucleotide
ucuguuacucaucacuugg

SEQ ID NO: 1567846 - RNA, 19 nt, Artificial Sequence
  Description of Artificial Sequence: Synthetic oligonucleotide
auuaagaccucccagcauc

SEQ ID NO: 1567847 - RNA, 19 nt, Artificial Sequence
  Description of Artificial Sequence: Synthetic oligonucleotide
uacugcauccaauaggugg

SEQ ID NO: 1567848 - RNA, 19 nt, Artificial Sequence
  Description of Artificial Sequence: Synthetic oligonucleotide
aggcauguaagucacaggg

SEQ ID NO: 1567849 - RNA, 19 nt, Artificial Sequence
  Description of Artificial Sequence: Synthetic oligonucleotide
aaagccgccacgccaauac

SEQ ID NO: 1567850 - RNA, 19 nt, Artificial Sequence
  Description of Artificial Sequence: Synthetic oligonucleotide
gguaaaaccguccugaagc

SEQ ID NO: 1567851 - RNA, 19 nt, Artificial Sequence
  Description of Artificial Sequence: Synthetic oligonucleotide
acagaagcgcuucugaggg

SEQ ID NO: 1567852 - RNA, 19 nt, Artificial Sequence
  Description of Artificial Sequence: Synthetic oligonucleotide
cuucagacccaacagaagg

SEQ ID NO: 1567853 - RNA, 19 nt, Artificial Sequence
  Description of Artificial Sequence: Synthetic oligonucleotide
agucacaauacacacaaca

SEQ ID NO: 1567854 - RNA, 19 nt, Artificial Sequence
  Description of Artificial Sequence: Synthetic oligonucleotide
auagucacaauacacacaa

SEQ ID NO: 1567855 - RNA, 19 nt, Artificial Sequence
  Description of Artificial Sequence: Synthetic oligonucleotide
aaagcagauugacagcaag

SEQ ID NO: 1567856 - RNA, 19 nt, Artificial Sequence
  Description of Artificial Sequence: Synthetic oligonucleotide
ugacaggcgaagaagauga

SEQ ID NO: 1567857 - RNA, 19 nt, Artificial Sequence
  Description of Artificial Sequence: Synthetic oligonucleotide
acagaugugauggacaggg

SEQ ID NO: 1567858 - RNA, 19 nt, Artificial Sequence
  Description of Artificial Sequence: Synthetic oligonucleotide
cagauugacagcaagcagc

SEQ ID NO: 1567859 - RNA, 19 nt, Artificial Sequence
  Description of Artificial Sequence: Synthetic oligonucleotide
agcaaauuucgucauaaug

SEQ ID NO: 1567860 - RNA, 19 nt, Artificial Sequence
  Description of Artificial Sequence: Synthetic oligonucleotide
ugaucaagaacuccuucag

SEQ ID NO: 1567861 - RNA, 19 nt, Artificial Sequence
  Description of Artificial Sequence: Synthetic oligonucleotide
aucacuugggacucuaggg

SEQ ID NO: 1567862 - RNA, 19 nt, Artificial Sequence
  Description of Artificial Sequence: Synthetic oligonucleotide
aaggaugcaggcuccaaag

SEQ ID NO: 1567863 - RNA, 19 nt, Artificial Sequence
  Description of Artificial Sequence: Synthetic oligonucleotide
accaccaagaucccagugc

SEQ ID NO: 1567864 - RNA, 19 nt, Artificial Sequence
  Description of Artificial Sequence: Synthetic oligonucleotide
uuacucaucacuugggacu

SEQ ID NO: 1567865 - RNA, 19 nt, Artificial Sequence
  Description of Artificial Sequence: Synthetic oligonucleotide
gcugguuucaaucucauag

SEQ ID NO: 1567866 - RNA, 19 nt, Artificial Sequence
  Description of Artificial Sequence: Synthetic oligonucleotide
cauaaugcugguuucaauc

SEQ ID NO: 1567867 - RNA, 19 nt, Artificial Sequence
  Description of Artificial Sequence: Synthetic oligonucleotide
acaaagauaagcuucucau

SEQ ID NO: 1567868 - RNA, 19 nt, Artificial Sequence
  Description of Artificial Sequence: Synthetic oligonucleotide
ugaacaugugcacacugcc

SEQ ID NO: 1567869 - RNA, 19 nt, Artificial Sequence
  Description of Artificial Sequence: Synthetic oligonucleotide
uaacagaugugauggacag

SEQ ID NO: 1567870 - RNA, 19 nt, Artificial Sequence
  Description of Artificial Sequence: Synthetic oligonucleotide
uccuauuaagaccucccag

SEQ ID NO: 1567871 - RNA, 19 nt, Artificial Sequence
  Description of Artificial Sequence: Synthetic oligonucleotide
acaaggaucccaaggaccc

SEQ ID NO: 1567872 - RNA, 19 nt, Artificial Sequence
  Description of Artificial Sequence: Synthetic oligonucleotide
uggaguagcaaguuugucu

SEQ ID NO: 1567873 - RNA, 19 nt, Artificial Sequence
  Description of Artificial Sequence: Synthetic oligonucleotide
gcaaauuucgucauaaugc

SEQ ID NO: 1567874 - RNA, 19 nt, Artificial Sequence
  Description of Artificial Sequence: Synthetic oligonucleotide
auagagaaccaguaggcca

SEQ ID NO: 1567875 - RNA, 19 nt, Artificial Sequence
  Description of Artificial Sequence: Synthetic oligonucleotide
caaggggacagaaaggaag

SEQ ID NO: 1567876 - RNA, 19 nt, Artificial Sequence
  Description of Artificial Sequence: Synthetic oligonucleotide
aagggcgggauccaggcag

SEQ ID NO: 1567877 - RNA, 19 nt, Artificial Sequence
  Description of Artificial Sequence: Synthetic oligonucleotide
gacguuuccauggugaagc

SEQ ID NO: 1567878 - RNA, 19 nt, Artificial Sequence
  Description of Artificial Sequence: Synthetic oligonucleotide
gaacauagagaaccaguag

SEQ ID NO: 1567879 - RNA, 19 nt, Artificial Sequence
  Description of Artificial Sequence: Synthetic oligonucleotide
aagcagauugacagcaagc

SEQ ID NO: 1567880 - RNA, 19 nt, Artificial Sequence
  Description of Artificial Sequence: Synthetic oligonucleotide
ugccaguugaacaugugca

SEQ ID NO: 1567881 - RNA, 19 nt, Artificial Sequence
  Description of Artificial Sequence: Synthetic oligonucleotide
uucgcagccacugaggugc

SEQ ID NO: 1567882 - RNA, 19 nt, Artificial Sequence
  Description of Artificial Sequence: Synthetic oligonucleotide
ugcauggagaacuuuccag

SEQ ID NO: 1567883 - RNA, 19 nt, Artificial Sequence
  Description of Artificial Sequence: Synthetic oligonucleotide
uucgucauaaugcugguuu

SEQ ID NO: 1567884 - RNA, 19 nt, Artificial Sequence
  Description of Artificial Sequence: Synthetic oligonucleotide
agagcaaaggaagucaaag

SEQ ID NO: 1567885 - RNA, 19 nt, Artificial Sequence
  Description of Artificial Sequence: Synthetic oligonucleotide
aagucaaagccauggagaa

SEQ ID NO: 1567886 - RNA, 19 nt, Artificial Sequence
  Description of Artificial Sequence: Synthetic oligonucleotide
ucacagaaaccucuguuac

SEQ ID NO: 1567887 - RNA, 19 nt, Artificial Sequence
  Description of Artificial Sequence: Synthetic oligonucleotide
uguccuauuaagaccuccc

SEQ ID NO: 1567888 - RNA, 19 nt, Artificial Sequence
  Description of Artificial Sequence: Synthetic oligonucleotide
aaguugguugcugaaauga

SEQ ID NO: 1567889 - RNA, 19 nt, Artificial Sequence
  Description of Artificial Sequence: Synthetic oligonucleotide
aagacugccucacuaggca

SEQ ID NO: 1567890 - RNA, 19 nt, Artificial Sequence
  Description of Artificial Sequence: Synthetic oligonucleotide
uguuacucaucacuuggga

SEQ ID NO: 1567891 - RNA, 19 nt, Artificial Sequence
  Description of Artificial Sequence: Synthetic oligonucleotide
aacuggaguagcaaguuug

SEQ ID NO: 1567892 - RNA, 19 nt, Artificial Sequence
  Description of Artificial Sequence: Synthetic oligonucleotide
guagggaacaccucugaag

SEQ ID NO: 1567893 - RNA, 19 nt, Artificial Sequence
  Description of Artificial Sequence: Synthetic oligonucleotide
ggaaauaacagaugugaug

SEQ ID NO: 1567894 - RNA, 19 nt, Artificial Sequence
  Description of Artificial Sequence: Synthetic oligonucleotide
uaugcagggaauagaggug

SEQ ID NO: 1567895 - RNA, 19 nt, Artificial Sequence
  Description of Artificial Sequence: Synthetic oligonucleotide
auguaagucacagggaaag

SEQ ID NO: 1567896 - RNA, 19 nt, Artificial Sequence
  Description of Artificial Sequence: Synthetic oligonucleotide
aagaacauagagaaccagu

SEQ ID NO: 1567897 - RNA, 19 nt, Artificial Sequence
  Description of Artificial Sequence: Synthetic oligonucleotide
agaaccaguaggccaaaag

SEQ ID NO: 1567898 - RNA, 19 nt, Artificial Sequence
  Description of Artificial Sequence: Synthetic oligonucleotide
aauagagguguggcagugc

SEQ ID NO: 1567899 - RNA, 19 nt, Artificial Sequence
  Description of Artificial Sequence: Synthetic oligonucleotide
caauagguggugaagagga

SEQ ID NO: 1567900 - RNA, 19 nt, Artificial Sequence
  Description of Artificial Sequence: Synthetic oligonucleotide
gaagucaaagccauggaga

SEQ ID NO: 1567901 - RNA, 19 nt, Artificial Sequence
  Description of Artificial Sequence: Synthetic oligonucleotide
accucuguuacucaucacu

SEQ ID NO: 1567902 - RNA, 19 nt, Artificial Sequence
  Description of Artificial Sequence: Synthetic oligonucleotide
aggaaggucacagaaaccu

SEQ ID NO: 1567903 - RNA, 19 nt, Artificial Sequence
  Description of Artificial Sequence: Synthetic oligonucleotide
agugaccagcaccugacuc

SEQ ID NO: 1567904 - RNA, 19 nt, Artificial Sequence
  Description of Artificial Sequence: Synthetic oligonucleotide
cacaaggaucccaaggacc

SEQ ID NO: 1567905 - RNA, 19 nt, Artificial Sequence
  Description of Artificial Sequence: Synthetic oligonucleotide
uccaauagguggugaagag

SEQ ID NO: 1567906 - RNA, 19 nt, Artificial Sequence
  Description of Artificial Sequence: Synthetic oligonucleotide
aguuuaccagggcucauag

SEQ ID NO: 1567907 - RNA, 19 nt, Artificial Sequence
  Description of Artificial Sequence: Synthetic oligonucleotide
uucucauugaugccggaaa

SEQ ID NO: 1567908 - RNA, 19 nt, Artificial Sequence
  Description of Artificial Sequence: Synthetic oligonucleotide
gaagagcaucacuagagga

SEQ ID NO: 1567909 - RNA, 19 nt, Artificial Sequence
  Description of Artificial Sequence: Synthetic oligonucleotide
agaaguugguugcugaaau

SEQ ID NO: 1567910 - RNA, 19 nt, Artificial Sequence
  Description of Artificial Sequence: Synthetic oligonucleotide
gaacagagcagagugacca

SEQ ID NO: 1567911 - RNA, 19 nt, Artificial Sequence
  Description of Artificial Sequence: Synthetic oligonucleotide
aaagugaacagagcagagu

SEQ ID NO: 1567912 - RNA, 19 nt, Artificial Sequence
  Description of Artificial Sequence: Synthetic oligonucleotide
gaaagggcgggauccaggc

SEQ ID NO: 1567913 - RNA, 19 nt, Artificial Sequence
  Description of Artificial Sequence: Synthetic oligonucleotide
aggaugcaggcuccaaagc

SEQ ID NO: 1567914 - RNA, 19 nt, Artificial Sequence
  Description of Artificial Sequence: Synthetic oligonucleotide
aagcccauacccacaaggg

SEQ ID NO: 1567915 - RNA, 19 nt, Artificial Sequence
  Description of Artificial Sequence: Synthetic oligonucleotide
uucaugggagaacaguuua

SEQ ID NO: 1567916 - RNA, 19 nt, Artificial Sequence
  Description of Artificial Sequence: Synthetic oligonucleotide
caucacuugggacucuagg

SEQ ID NO: 1567917 - RNA, 19 nt, Artificial Sequence
  Description of Artificial Sequence: Synthetic oligonucleotide
ccuauuaagaccucccagc

SEQ ID NO: 1567918 - RNA, 19 nt, Artificial Sequence
  Description of Artificial Sequence: Synthetic oligonucleotide
ucaguagggaacaccucug

SEQ ID NO: 1567919 - RNA, 19 nt, Artificial Sequence
  Description of Artificial Sequence: Synthetic oligonucleotide
ggagaaagauggcaaagcc

SEQ ID NO: 1567920 - RNA, 19 nt, Artificial Sequence
  Description of Artificial Sequence: Synthetic oligonucleotide
cauaggguugccugagggg

SEQ ID NO: 1567921 - RNA, 19 nt, Artificial Sequence
  Description of Artificial Sequence: Synthetic oligonucleotide
guaaaaccguccugaagcc

SEQ ID NO: 1567922 - RNA, 19 nt, Artificial Sequence
  Description of Artificial Sequence: Synthetic oligonucleotide
aauacacacaacacaguau

SEQ ID NO: 1567923 - RNA, 19 nt, Artificial Sequence
  Description of Artificial Sequence: Synthetic oligonucleotide
guuacucaucacuugggac

SEQ ID NO: 1567924 - RNA, 19 nt, Artificial Sequence
  Description of Artificial Sequence: Synthetic oligonucleotide
gcauggagaacuuuccagg

SEQ ID NO: 1567925 - RNA, 19 nt, Artificial Sequence
  Description of Artificial Sequence: Synthetic oligonucleotide
acgugcacagguuucagga

SEQ ID NO: 1567926 - RNA, 19 nt, Artificial Sequence
  Description of Artificial Sequence: Synthetic oligonucleotide
agcccauacccacaagggg

SEQ ID NO: 1567927 - RNA, 19 nt, Artificial Sequence
  Description of Artificial Sequence: Synthetic oligonucleotide
gaagaacauagagaaccag

SEQ ID NO: 1567928 - RNA, 19 nt, Artificial Sequence
  Description of Artificial Sequence: Synthetic oligonucleotide
guugaacaugugcacacug

SEQ ID NO: 1567929 - RNA, 19 nt, Artificial Sequence
  Description of Artificial Sequence: Synthetic oligonucleotide
auagagguguggcagugcu

SEQ ID NO: 1567930 - RNA, 19 nt, Artificial Sequence
  Description of Artificial Sequence: Synthetic oligonucleotide
cuguuacucaucacuuggg

SEQ ID NO: 1567931 - RNA, 19 nt, Artificial Sequence
  Description of Artificial Sequence: Synthetic oligonucleotide
ucaaucucauagugggcug

SEQ ID NO: 1567932 - RNA, 19 nt, Artificial Sequence
  Description of Artificial Sequence: Synthetic oligonucleotide
caugggagaacaguuuacc

SEQ ID NO: 1567933 - RNA, 19 nt, Artificial Sequence
  Description of Artificial Sequence: Synthetic oligonucleotide
agcagauugacagcaagca

SEQ ID NO: 1567934 - RNA, 19 nt, Artificial Sequence
  Description of Artificial Sequence: Synthetic oligonucleotide
aacaguuuaccagggcuca

SEQ ID NO: 1567935 - RNA, 19 nt, Artificial Sequence
  Description of Artificial Sequence: Synthetic oligonucleotide
cugcaaagccuuuuccugc

SEQ ID NO: 1567936 - RNA, 19 nt, Artificial Sequence
  Description of Artificial Sequence: Synthetic oligonucleotide
guacagaagcgcuucugag

SEQ ID NO: 1567937 - RNA, 19 nt, Artificial Sequence
  Description of Artificial Sequence: Synthetic oligonucleotide
auggugaagccagaagaac

SEQ ID NO: 1567938 - RNA, 19 nt, Artificial Sequence
  Description of Artificial Sequence: Synthetic oligonucleotide
agguaaaaccguccugaag

SEQ ID NO: 1567939 - RNA, 19 nt, Artificial Sequence
  Description of Artificial Sequence: Synthetic oligonucleotide
ucaugggagaacaguuuac

SEQ ID NO: 1567940 - RNA, 19 nt, Artificial Sequence
  Description of Artificial Sequence: Synthetic oligonucleotide
cuaugcagggaauagaggu

SEQ ID NO: 1567941 - RNA, 19 nt, Artificial Sequence
  Description of Artificial Sequence: Synthetic oligonucleotide
gugaccagcaccugacucc

SEQ ID NO: 1567942 - RNA, 19 nt, Artificial Sequence
  Description of Artificial Sequence: Synthetic oligonucleotide
gucacaauacacacaacac

SEQ ID NO: 1567943 - RNA, 19 nt, Artificial Sequence
  Description of Artificial Sequence: Synthetic oligonucleotide
uuaagaccucccagcaucu

SEQ ID NO: 1567944 - RNA, 19 nt, Artificial Sequence
  Description of Artificial Sequence: Synthetic oligonucleotide
agagugaccagcaccugac

SEQ ID NO: 1567945 - RNA, 19 nt, Artificial Sequence
  Description of Artificial Sequence: Synthetic oligonucleotide
agccaggagcuccaaguac

SEQ ID NO: 1567946 - RNA, 19 nt, Artificial Sequence
  Description of Artificial Sequence: Synthetic oligonucleotide
gucaaagccauggagaaaa

SEQ ID NO: 1567947 - RNA, 19 nt, Artificial Sequence
  Description of Artificial Sequence: Synthetic oligonucleotide
acagggugccaguugaaca

SEQ ID NO: 1567948 - RNA, 19 nt, Artificial Sequence
  Description of Artificial Sequence: Synthetic oligonucleotide
aggcaggaaagcccauacc

SEQ ID NO: 1567949 - RNA, 19 nt, Artificial Sequence
  Description of Artificial Sequence: Synthetic oligonucleotide
gacgugcacagguuucagg

SEQ ID NO: 1567950 - RNA, 19 nt, Artificial Sequence
  Description of Artificial Sequence: Synthetic oligonucleotide
aaccucuguuacucaucac

SEQ ID NO: 1567951 - RNA, 19 nt, Artificial Sequence
  Description of Artificial Sequence: Synthetic oligonucleotide
ugaugccggaaauaacaga

SEQ ID NO: 1567952 - RNA, 19 nt, Artificial Sequence
  Description of Artificial Sequence: Synthetic oligonucleotide
agugcuguuggcaaagacu

SEQ ID NO: 1567953 - RNA, 19 nt, Artificial Sequence
  Description of Artificial Sequence: Synthetic oligonucleotide
gguuucaaucucauagugg

SEQ ID NO: 1567954 - RNA, 19 nt, Artificial Sequence
  Description of Artificial Sequence: Synthetic oligonucleotide
ggaguagcaaguuugucuc

SEQ ID NO: 1567955 - RNA, 19 nt, Artificial Sequence
  Description of Artificial Sequence: Synthetic oligonucleotide
caggaaagcccauacccac

SEQ ID NO: 1567956 - RNA, 19 nt, Artificial Sequence
  Description of Artificial Sequence: Synthetic oligonucleotide
gugccaguugaacaugugc

SEQ ID NO: 1567957 - RNA, 19 nt, Artificial Sequence
  Description of Artificial Sequence: Synthetic oligonucleotide
accgacuguuccugggagc

SEQ ID NO: 1567958 - RNA, 19 nt, Artificial Sequence
  Description of Artificial Sequence: Synthetic oligonucleotide
cuauuaagaccucccagca

SEQ ID NO: 1567959 - RNA, 19 nt, Artificial Sequence
  Description of Artificial Sequence: Synthetic oligonucleotide
augggagaacaguuuacca

SEQ ID NO: 1567960 - RNA, 19 nt, Artificial Sequence
  Description of Artificial Sequence: Synthetic oligonucleotide
gcugcuguccuauuaagac

SEQ ID NO: 1567961 - RNA, 19 nt, Artificial Sequence
  Description of Artificial Sequence: Synthetic oligonucleotide
gaugcacaaggaucccaag

SEQ ID NO: 1567962 - RNA, 19 nt, Artificial Sequence
  Description of Artificial Sequence: Synthetic oligonucleotide
uucacucccugucaugcaa

SEQ ID NO: 1567963 - RNA, 19 nt, Artificial Sequence
  Description of Artificial Sequence: Synthetic oligonucleotide
ucacuaggcaggcuggaau

SEQ ID NO: 1567964 - RNA, 19 nt, Artificial Sequence
  Description of Artificial Sequence: Synthetic oligonucleotide
caaauuucgucauaaugcu

SEQ ID NO: 1567965 - RNA, 19 nt, Artificial Sequence
  Description of Artificial Sequence: Synthetic oligonucleotide
cagaacagguaaaaccguc

SEQ ID NO: 1567966 - RNA, 19 nt, Artificial Sequence
  Description of Artificial Sequence: Synthetic oligonucleotide
agaacauagagaaccagua

SEQ ID NO: 1567967 - RNA, 19 nt, Artificial Sequence
  Description of Artificial Sequence: Synthetic oligonucleotide
agguucucuguucauggga

SEQ ID NO: 1567968 - RNA, 19 nt, Artificial Sequence
  Description of Artificial Sequence: Synthetic oligonucleotide
aguagcaaguuugucucug

SEQ ID NO: 1567969 - RNA, 19 nt, Artificial Sequence
  Description of Artificial Sequence: Synthetic oligonucleotide
acguuuccauggugaagcc

SEQ ID NO: 1567970 - RNA, 19 nt, Artificial Sequence
  Description of Artificial Sequence: Synthetic oligonucleotide
ggcaguuuaggcccuaccc

SEQ ID NO: 1567971 - RNA, 19 nt, Artificial Sequence
  Description of Artificial Sequence: Synthetic oligonucleotide
accaagaucccagugcugu

SEQ ID NO: 1567972 - RNA, 19 nt, Artificial Sequence
  Description of Artificial Sequence: Synthetic oligonucleotide
ucagacccaacagaaggcu

SEQ ID NO: 1567973 - RNA, 19 nt, Artificial Sequence
  Description of Artificial Sequence: Synthetic oligonucleotide
ccugucaugcaacaggggc

SEQ ID NO: 1567974 - RNA, 19 nt, Artificial Sequence
  Description of Artificial Sequence: Synthetic oligonucleotide
gaacaguuuaccagggcuc

SEQ ID NO: 1567975 - RNA, 19 nt, Artificial Sequence
  Description of Artificial Sequence: Synthetic oligonucleotide
agggucagguucucuguuc

SEQ ID NO: 1567976 - RNA, 19 nt, Artificial Sequence
  Description of Artificial Sequence: Synthetic oligonucleotide
gacccugucagggaagagc

SEQ ID NO: 1567977 - RNA, 19 nt, Artificial Sequence
  Description of Artificial Sequence: Synthetic oligonucleotide
gaugugauggacagggaaa

SEQ ID NO: 1567978 - RNA, 19 nt, Artificial Sequence
  Description of Artificial Sequence: Synthetic oligonucleotide
cauugaugccggaaauaac

SEQ ID NO: 1567979 - RNA, 19 nt, Artificial Sequence
  Description of Artificial Sequence: Synthetic oligonucleotide
uaggcccuacccaugacau

SEQ ID NO: 1567980 - RNA, 19 nt, Artificial Sequence
  Description of Artificial Sequence: Synthetic oligonucleotide
cauagagcaccaccaugcc

SEQ ID NO: 1567981 - RNA, 19 nt, Artificial Sequence
  Description of Artificial Sequence: Synthetic oligonucleotide
gggaagagcaucacuagag

SEQ ID NO: 1567982 - RNA, 19 nt, Artificial Sequence
  Description of Artificial Sequence: Synthetic oligonucleotide
auagagcaccaccaugcca

SEQ ID NO: 1567983 - RNA, 19 nt, Artificial Sequence
  Description of Artificial Sequence: Synthetic oligonucleotide
agauugacagcaagcagcu

SEQ ID NO: 1567984 - RNA, 19 nt, Artificial Sequence
  Description of Artificial Sequence: Synthetic oligonucleotide
gaauagagguguggcagug

SEQ ID NO: 1567985 - RNA, 19 nt, Artificial Sequence
  Description of Artificial Sequence: Synthetic oligonucleotide
acugccucacuaggcaggc

SEQ ID NO: 1567986 - RNA, 19 nt, Artificial Sequence
  Description of Artificial Sequence: Synthetic oligonucleotide
acaccucugaagucagcag

SEQ ID NO: 1567987 - RNA, 19 nt, Artificial Sequence
  Description of Artificial Sequence: Synthetic oligonucleotide
ucauaaugcugguuucaau

SEQ ID NO: 1567988 - RNA, 19 nt, Artificial Sequence
  Description of Artificial Sequence: Synthetic oligonucleotide
guauaucaaagugaacaga

SEQ ID NO: 1567989 - RNA, 19 nt, Artificial Sequence
  Description of Artificial Sequence: Synthetic oligonucleotide
gguugcugaaaugagccag

SEQ ID NO: 1567990 - RNA, 19 nt, Artificial Sequence
  Description of Artificial Sequence: Synthetic oligonucleotide
cucuguuacucaucacuug

SEQ ID NO: 1567991 - RNA, 19 nt, Artificial Sequence
  Description of Artificial Sequence: Synthetic oligonucleotide
uacacacaacacaguauau

SEQ ID NO: 1567992 - RNA, 19 nt, Artificial Sequence
  Description of Artificial Sequence: Synthetic oligonucleotide
ggcccuacccaugacaugg

SEQ ID NO: 1567993 - RNA, 19 nt, Artificial Sequence
  Description of Artificial Sequence: Synthetic oligonucleotide
gacugccucacuaggcagg

SEQ ID NO: 1567994 - RNA, 19 nt, Artificial Sequence
  Description of Artificial Sequence: Synthetic oligonucleotide
aguugguugcugaaaugag

SEQ ID NO: 1567995 - RNA, 19 nt, Artificial Sequence
  Description of Artificial Sequence: Synthetic oligonucleotide
caagccaggaacuggagua

SEQ ID NO: 1567996 - RNA, 19 nt, Artificial Sequence
  Description of Artificial Sequence: Synthetic oligonucleotide
agacugccucacuaggcag

SEQ ID NO: 1567997 - RNA, 19 nt, Artificial Sequence
  Description of Artificial Sequence: Synthetic oligonucleotide
aaggaucccaaggacccca

SEQ ID NO: 1567998 - RNA, 19 nt, Artificial Sequence
  Description of Artificial Sequence: Synthetic oligonucleotide
aaggucacagaaaccucug

SEQ ID NO: 1567999 - RNA, 19 nt, Artificial Sequence
  Description of Artificial Sequence: Synthetic oligonucleotide
ccacauagucacaauacac

SEQ ID NO: 1568000 - RNA, 19 nt, Artificial Sequence
  Description of Artificial Sequence: Synthetic oligonucleotide
caaucucauagugggcugg

SEQ ID NO: 1568001 - RNA, 19 nt, Artificial Sequence
  Description of Artificial Sequence: Synthetic oligonucleotide
caggcauguaagucacagg

SEQ ID NO: 1568002 - RNA, 19 nt, Artificial Sequence
  Description of Artificial Sequence: Synthetic oligonucleotide
guuggcaaagacugccuca

SEQ ID NO: 1568003 - RNA, 19 nt, Artificial Sequence
  Description of Artificial Sequence: Synthetic oligonucleotide
caggcgguacaccagcgag

SEQ ID NO: 1568004 - RNA, 19 nt, Artificial Sequence
  Description of Artificial Sequence: Synthetic oligonucleotide
cuggacguuuccaugguga

SEQ ID NO: 1568005 - RNA, 19 nt, Artificial Sequence
  Description of Artificial Sequence: Synthetic oligonucleotide
gaacagguaaaaccguccu

SEQ ID NO: 1568006 - RNA, 19 nt, Artificial Sequence
  Description of Artificial Sequence: Synthetic oligonucleotide
cacuugggacucuaggguc

SEQ ID NO: 1568007 - RNA, 19 nt, Artificial Sequence
  Description of Artificial Sequence: Synthetic oligonucleotide
aguagggaacaccucugaa

SEQ ID NO: 1568008 - RNA, 19 nt, Artificial Sequence
  Description of Artificial Sequence: Synthetic oligonucleotide
guuuaggcccuacccauga

SEQ ID NO: 1568009 - RNA, 19 nt, Artificial Sequence
  Description of Artificial Sequence: Synthetic oligonucleotide
aaagcccagggaccacuga

SEQ ID NO: 1568010 - RNA, 19 nt, Artificial Sequence
  Description of Artificial Sequence: Synthetic oligonucleotide
cagguucucuguucauggg

SEQ ID NO: 1568011 - RNA, 19 nt, Artificial Sequence
  Description of Artificial Sequence: Synthetic oligonucleotide
cacccaaauccacacccag

SEQ ID NO: 1568012 - RNA, 19 nt, Artificial Sequence
  Description of Artificial Sequence: Synthetic oligonucleotide
aagcacccaguacucagua

SEQ ID NO: 1568013 - RNA, 19 nt, Artificial Sequence
  Description of Artificial Sequence: Synthetic oligonucleotide
cugacaggcgaagaagaug

SEQ ID NO: 1568014 - RNA, 19 nt, Artificial Sequence
  Description of Artificial Sequence: Synthetic oligonucleotide
gcauguaagucacagggaa

SEQ ID NO: 1568015 - RNA, 19 nt, Artificial Sequence
  Description of Artificial Sequence: Synthetic oligonucleotide
ugggacucuagggucaggu

SEQ ID NO: 1568016 - RNA, 19 nt, Artificial Sequence
  Description of Artificial Sequence: Synthetic oligonucleotide
gcagauugacagcaagcag

SEQ ID NO: 1568017 - RNA, 19 nt, Artificial Sequence
  Description of Artificial Sequence: Synthetic oligonucleotide
ggacucuagggucagguuc

SEQ ID NO: 1568018 - RNA, 19 nt, Artificial Sequence
  Description of Artificial Sequence: Synthetic oligonucleotide
aaagggcgggauccaggca

SEQ ID NO: 1568019 - RNA, 19 nt, Artificial Sequence
  Description of Artificial Sequence: Synthetic oligonucleotide
acuaggcaggcuggaauag

SEQ ID NO: 1568020 - RNA, 19 nt, Artificial Sequence
  Description of Artificial Sequence: Synthetic oligonucleotide
uccugaagccauucugauc

SEQ ID NO: 1568021 - RNA, 19 nt, Artificial Sequence
  Description of Artificial Sequence: Synthetic oligonucleotide
aggcaaagccgccacgcca

SEQ ID NO: 1568022 - RNA, 19 nt, Artificial Sequence
  Description of Artificial Sequence: Synthetic oligonucleotide
ggaugcaggcuccaaagca

SEQ ID NO: 1568023 - RNA, 19 nt, Artificial Sequence
  Description of Artificial Sequence: Synthetic oligonucleotide
ugaugaugcccagccagcu

SEQ ID NO: 1568024 - RNA, 19 nt, Artificial Sequence
  Description of Artificial Sequence: Synthetic oligonucleotide
cuccaaagcagacgugcac

SEQ ID NO: 1568025 - RNA, 19 nt, Artificial Sequence
  Description of Artificial Sequence: Synthetic oligonucleotide
uggacguuuccauggugaa

SEQ ID NO: 1568026 - RNA, 19 nt, Artificial Sequence
  Description of Artificial Sequence: Synthetic oligonucleotide
cuguccuauuaagaccucc

SEQ ID NO: 1568027 - RNA, 19 nt, Artificial Sequence
  Description of Artificial Sequence: Synthetic oligonucleotide
caagagaaguugguugcug

SEQ ID NO: 1568028 - RNA, 19 nt, Artificial Sequence
  Description of Artificial Sequence: Synthetic oligonucleotide
uuuaggcccuacccaugac

SEQ ID NO: 1568029 - RNA, 19 nt, Artificial Sequence
  Description of Artificial Sequence: Synthetic oligonucleotide
acaggcgaagaagaugaca

SEQ ID NO: 1568030 - RNA, 19 nt, Artificial Sequence
  Description of Artificial Sequence: Synthetic oligonucleotide
gcuguuggcaaagacugcc

SEQ ID NO: 1568031 - RNA, 19 nt, Artificial Sequence
  Description of Artificial Sequence: Synthetic oligonucleotide
gaacaugugcacacugcca

SEQ ID NO: 1568032 - RNA, 19 nt, Artificial Sequence
  Description of Artificial Sequence: Synthetic oligonucleotide
aaaagcagauugacagcaa

SEQ ID NO: 1568033 - RNA, 19 nt, Artificial Sequence
  Description of Artificial Sequence: Synthetic oligonucleotide
acaauacacacaacacagu

SEQ ID NO: 1568034 - RNA, 19 nt, Artificial Sequence
  Description of Artificial Sequence: Synthetic oligonucleotide
aauaggguuuggugccauu

SEQ ID NO: 1568035 - RNA, 19 nt, Artificial Sequence
  Description of Artificial Sequence: Synthetic oligonucleotide
gaucccagugcuguuggca

SEQ ID NO: 1568036 - RNA, 19 nt, Artificial Sequence
  Description of Artificial Sequence: Synthetic oligonucleotide
cugcugcuguccuauuaag

SEQ ID NO: 1568037 - RNA, 19 nt, Artificial Sequence
  Description of Artificial Sequence: Synthetic oligonucleotide
uaccagggcucauaggguu

SEQ ID NO: 1568038 - RNA, 19 nt, Artificial Sequence
  Description of Artificial Sequence: Synthetic oligonucleotide
cagcugaagcagcaacuag

SEQ ID NO: 1568039 - RNA, 19 nt, Artificial Sequence
  Description of Artificial Sequence: Synthetic oligonucleotide
guccuauuaagaccuccca

SEQ ID NO: 1568040 - RNA, 19 nt, Artificial Sequence
  Description of Artificial Sequence: Synthetic oligonucleotide
agcaccugacuccugcaaa

SEQ ID NO: 1568041 - RNA, 19 nt, Artificial Sequence
  Description of Artificial Sequence: Synthetic oligonucleotide
ccaauacugcauccaauag

SEQ ID NO: 1568042 - RNA, 19 nt, Artificial Sequence
  Description of Artificial Sequence: Synthetic oligonucleotide
cugucagggaagagcauca

SEQ ID NO: 1568043 - RNA, 19 nt, Artificial Sequence
  Description of Artificial Sequence: Synthetic oligonucleotide
ggcuccaaagcagacgugc

SEQ ID NO: 1568044 - RNA, 19 nt, Artificial Sequence
  Description of Artificial Sequence: Synthetic oligonucleotide
agagagcaagccaggaacu

SEQ ID NO: 1568045 - RNA, 19 nt, Artificial Sequence
  Description of Artificial Sequence: Synthetic oligonucleotide
agcagacgugcacagguuu

SEQ ID NO: 1568046 - RNA, 19 nt, Artificial Sequence
  Description of Artificial Sequence: Synthetic oligonucleotide
uugcugaaaugagccagga

SEQ ID NO: 1568047 - RNA, 19 nt, Artificial Sequence
  Description of Artificial Sequence: Synthetic oligonucleotide
acccugucagggaagagca

SEQ ID NO: 1568048 - RNA, 19 nt, Artificial Sequence
  Description of Artificial Sequence: Synthetic oligonucleotide
uagucacaauacacacaac

SEQ ID NO: 1568049 - RNA, 19 nt, Artificial Sequence
  Description of Artificial Sequence: Synthetic oligonucleotide
cagguuucaggaggcuucg

SEQ ID NO: 1568050 - RNA, 19 nt, Artificial Sequence
  Description of Artificial Sequence: Synthetic oligonucleotide
acuggaguagcaaguuugu

SEQ ID NO: 1568051 - RNA, 19 nt, Artificial Sequence
  Description of Artificial Sequence: Synthetic oligonucleotide
cauguaagucacagggaaa

SEQ ID NO: 1568052 - RNA, 19 nt, Artificial Sequence
  Description of Artificial Sequence: Synthetic oligonucleotide
gagcaagccaggaacugga

SEQ ID NO: 1568053 - RNA, 19 nt, Artificial Sequence
  Description of Artificial Sequence: Synthetic oligonucleotide
gcaguuuaggcccuaccca

SEQ ID NO: 1568054 - RNA, 19 nt, Artificial Sequence
  Description of Artificial Sequence: Synthetic oligonucleotide
gugaugaugcccagccagc

SEQ ID NO: 1568055 - RNA, 19 nt, Artificial Sequence
  Description of Artificial Sequence: Synthetic oligonucleotide
acgccaauacugcauccaa

SEQ ID NO: 1568056 - RNA, 19 nt, Artificial Sequence
  Description of Artificial Sequence: Synthetic oligonucleotide
ccggaaauaacagauguga

SEQ ID NO: 1568057 - RNA, 19 nt, Artificial Sequence
  Description of Artificial Sequence: Synthetic oligonucleotide
aaguuugucucuggcccaa

SEQ ID NO: 1568058 - RNA, 19 nt, Artificial Sequence
  Description of Artificial Sequence: Synthetic oligonucleotide
ucugucagucagagcuccu

SEQ ID NO: 1568059 - RNA, 19 nt, Artificial Sequence
  Description of Artificial Sequence: Synthetic oligonucleotide
uagggucagguucucuguu

SEQ ID NO: 1568060 - RNA, 19 nt, Artificial Sequence
  Description of Artificial Sequence: Synthetic oligonucleotide
augagcacagggugccagu

SEQ ID NO: 1568061 - RNA, 19 nt, Artificial Sequence
  Description of Artificial Sequence: Synthetic oligonucleotide
ccacaaggggacagaaagg

SEQ ID NO: 1568062 - RNA, 19 nt, Artificial Sequence
  Description of Artificial Sequence: Synthetic oligonucleotide
acucaguagggaacaccuc

SEQ ID NO: 1568063 - RNA, 19 nt, Artificial Sequence
  Description of Artificial Sequence: Synthetic oligonucleotide
gggcucauaggguugccug

SEQ ID NO: 1568064 - RNA, 19 nt, Artificial Sequence
  Description of Artificial Sequence: Synthetic oligonucleotide
aagccgccacgccaauacu

SEQ ID NO: 1568065 - RNA, 19 nt, Artificial Sequence
  Description of Artificial Sequence: Synthetic oligonucleotide
guuugucucuggcccaaga

SEQ ID NO: 1568066 - RNA, 19 nt, Artificial Sequence
  Description of Artificial Sequence: Synthetic oligonucleotide
cugucagucagagcuccug

SEQ ID NO: 1568067 - RNA, 19 nt, Artificial Sequence
  Description of Artificial Sequence: Synthetic oligonucleotide
aguuuaggcccuacccaug

SEQ ID NO: 1568068 - RNA, 19 nt, Artificial Sequence
  Description of Artificial Sequence: Synthetic oligonucleotide
acacccagggcagagcaaa

SEQ ID NO: 1568069 - RNA, 19 nt, Artificial Sequence
  Description of Artificial Sequence: Synthetic oligonucleotide
gaccucccagcaucucugc

SEQ ID NO: 1568070 - RNA, 19 nt, Artificial Sequence
  Description of Artificial Sequence: Synthetic oligonucleotide
uuccauggugaagccagaa

SEQ ID NO: 1568071 - RNA, 19 nt, Artificial Sequence
  Description of Artificial Sequence: Synthetic oligonucleotide
gucauaaugcugguuucaa

SEQ ID NO: 1568072 - RNA, 19 nt, Artificial Sequence
  Description of Artificial Sequence: Synthetic oligonucleotide
ggauccaggcagcagcuga

SEQ ID NO: 1568073 - RNA, 19 nt, Artificial Sequence
  Description of Artificial Sequence: Synthetic oligonucleotide
uggcaaagacugccucacu

SEQ ID NO: 1568074 - RNA, 19 nt, Artificial Sequence
  Description of Artificial Sequence: Synthetic oligonucleotide
gaggaugcacaaggauccc

SEQ ID NO: 1568075 - RNA, 19 nt, Artificial Sequence
  Description of Artificial Sequence: Synthetic oligonucleotide
gcucccugaacucugccca

SEQ ID NO: 1568076 - RNA, 19 nt, Artificial Sequence
  Description of Artificial Sequence: Synthetic oligonucleotide
cuggacccugucagggaag

SEQ ID NO: 1568077 - RNA, 19 nt, Artificial Sequence
  Description of Artificial Sequence: Synthetic oligonucleotide
aggcgguacaccagcgagg

SEQ ID NO: 1568078 - RNA, 19 nt, Artificial Sequence
  Description of Artificial Sequence: Synthetic oligonucleotide
cugucaugcaacaggggcu

SEQ ID NO: 1568079 - RNA, 19 nt, Artificial Sequence
  Description of Artificial Sequence: Synthetic oligonucleotide
gaugaugcccagccagcua

SEQ ID NO: 1568080 - RNA, 19 nt, Artificial Sequence
  Description of Artificial Sequence: Synthetic oligonucleotide
cuugggacucuagggucag

SEQ ID NO: 1568081 - RNA, 19 nt, Artificial Sequence
  Description of Artificial Sequence: Synthetic oligonucleotide
caggcuccaaagcagacgu

SEQ ID NO: 1568082 - RNA, 19 nt, Artificial Sequence
  Description of Artificial Sequence: Synthetic oligonucleotide
aagucagcaguggcucccu

SEQ ID NO: 1568083 - RNA, 19 nt, Artificial Sequence
  Description of Artificial Sequence: Synthetic oligonucleotide
ugucagggaagagcaucac

SEQ ID NO: 1568084 - RNA, 19 nt, Artificial Sequence
  Description of Artificial Sequence: Synthetic oligonucleotide
ggcgguacaccagcgaggc

SEQ ID NO: 1568085 - RNA, 19 nt, Artificial Sequence
  Description of Artificial Sequence: Synthetic oligonucleotide
agguuucaggaggcuucgc

SEQ ID NO: 1568086 - RNA, 19 nt, Artificial Sequence
  Description of Artificial Sequence: Synthetic oligonucleotide
caguacucaguagggaaca

SEQ ID NO: 1568087 - RNA, 19 nt, Artificial Sequence
  Description of Artificial Sequence: Synthetic oligonucleotide
ggcaaagacugccucacua

SEQ ID NO: 1568088 - RNA, 19 nt, Artificial Sequence
  Description of Artificial Sequence: Synthetic oligonucleotide
ggaaagcccauacccacaa

SEQ ID NO: 1568089 - RNA, 19 nt, Artificial Sequence
  Description of Artificial Sequence: Synthetic oligonucleotide
agacgugcacagguuucag

SEQ ID NO: 1568090 - RNA, 19 nt, Artificial Sequence
  Description of Artificial Sequence: Synthetic oligonucleotide
caaagauaagcuucucauu

SEQ ID NO: 1568091 - RNA, 19 nt, Artificial Sequence
  Description of Artificial Sequence: Synthetic oligonucleotide
uacccacaaggggacagaa

SEQ ID NO: 1568092 - RNA, 19 nt, Artificial Sequence
  Description of Artificial Sequence: Synthetic oligonucleotide
cacuaggcaggcuggaaua

SEQ ID NO: 1568093 - RNA, 19 nt, Artificial Sequence
  Description of Artificial Sequence: Synthetic oligonucleotide
ggcugucugucagucagag

SEQ ID NO: 1568094 - RNA, 19 nt, Artificial Sequence
  Description of Artificial Sequence: Synthetic oligonucleotide
cuccaaguacagaagcgcu

SEQ ID NO: 1568095 - RNA, 19 nt, Artificial Sequence
  Description of Artificial Sequence: Synthetic oligonucleotide
ccagcuaugcagggaauag

SEQ ID NO: 1568096 - RNA, 19 nt, Artificial Sequence
  Description of Artificial Sequence: Synthetic oligonucleotide
uuucgucauaaugcugguu

SEQ ID NO: 1568097 - RNA, 19 nt, Artificial Sequence
  Description of Artificial Sequence: Synthetic oligonucleotide
gaggcuucgcagccacuga

SEQ ID NO: 1568098 - RNA, 19 nt, Artificial Sequence
  Description of Artificial Sequence: Synthetic oligonucleotide
aggaaagcccauacccaca

SEQ ID NO: 1568099 - RNA, 19 nt, Artificial Sequence
  Description of Artificial Sequence: Synthetic oligonucleotide
agggcaguuuaggcccuac

SEQ ID NO: 1568100 - RNA, 19 nt, Artificial Sequence
  Description of Artificial Sequence: Synthetic oligonucleotide
cuggaguagcaaguuuguc

SEQ ID NO: 1568101 - RNA, 19 nt, Artificial Sequence
  Description of Artificial Sequence: Synthetic oligonucleotide
gaagcgcuucugagggagc

SEQ ID NO: 1568102 - RNA, 19 nt, Artificial Sequence
  Description of Artificial Sequence: Synthetic oligonucleotide
auacugcauccaauaggug

SEQ ID NO: 1568103 - RNA, 19 nt, Artificial Sequence
  Description of Artificial Sequence: Synthetic oligonucleotide
ccaugacaugggcaggcgg

SEQ ID NO: 1568104 - RNA, 19 nt, Artificial Sequence
  Description of Artificial Sequence: Synthetic oligonucleotide
agcaagccaggaacuggag

SEQ ID NO: 1568105 - RNA, 19 nt, Artificial Sequence
  Description of Artificial Sequence: Synthetic oligonucleotide
gcccauacccacaagggga

SEQ ID NO: 1568106 - RNA, 19 nt, Artificial Sequence
  Description of Artificial Sequence: Synthetic oligonucleotide
auacccacaaggggacaga

SEQ ID NO: 1568107 - RNA, 19 nt, Artificial Sequence
  Description of Artificial Sequence: Synthetic oligonucleotide
cccauacccacaaggggac

SEQ ID NO: 1568108 - RNA, 19 nt, Artificial Sequence
  Description of Artificial Sequence: Synthetic oligonucleotide
cuucacucccugucaugca

SEQ ID NO: 1568109 - RNA, 19 nt, Artificial Sequence
  Description of Artificial Sequence: Synthetic oligonucleotide
cacccagggcagagcaaag

SEQ ID NO: 1568110 - RNA, 19 nt, Artificial Sequence
  Description of Artificial Sequence: Synthetic oligonucleotide
gcucauaggguugccugag

SEQ ID NO: 1568111 - RNA, 19 nt, Artificial Sequence
  Description of Artificial Sequence: Synthetic oligonucleotide
ucacuagaggaggcaggaa

SEQ ID NO: 1568112 - RNA, 19 nt, Artificial Sequence
  Description of Artificial Sequence: Synthetic oligonucleotide
aggcccuacccaugacaug

SEQ ID NO: 1568113 - RNA, 19 nt, Artificial Sequence
  Description of Artificial Sequence: Synthetic oligonucleotide
gacugcaccaccgacuguu

SEQ ID NO: 1568114 - RNA, 19 nt, Artificial Sequence
  Description of Artificial Sequence: Synthetic oligonucleotide
ggcuucgcagccacugagg

SEQ ID NO: 1568115 - RNA, 19 nt, Artificial Sequence
  Description of Artificial Sequence: Synthetic oligonucleotide
caguuuaggcccuacccau

SEQ ID NO: 1568116 - RNA, 19 nt, Artificial Sequence
  Description of Artificial Sequence: Synthetic oligonucleotide
ccgacuguuccugggagcc

SEQ ID NO: 1568117 - RNA, 19 nt, Artificial Sequence
  Description of Artificial Sequence: Synthetic oligonucleotide
gcugaagcagcaacuagaa

SEQ ID NO: 1568118 - RNA, 19 nt, Artificial Sequence
  Description of Artificial Sequence: Synthetic oligonucleotide
cuucucauugaugccggaa

SEQ ID NO: 1568119 - RNA, 19 nt, Artificial Sequence
  Description of Artificial Sequence: Synthetic oligonucleotide
cacucccugucaugcaaca

SEQ ID NO: 1568120 - RNA, 19 nt, Artificial Sequence
  Description of Artificial Sequence: Synthetic oligonucleotide
cuagggucagguucucugu

SEQ ID NO: 1568121 - RNA, 19 nt, Artificial Sequence
  Description of Artificial Sequence: Synthetic oligonucleotide
gaguagcaaguuugucucu

SEQ ID NO: 1568122 - RNA, 19 nt, Artificial Sequence
  Description of Artificial Sequence: Synthetic oligonucleotide
cagguaaaaccguccugaa

SEQ ID NO: 1568123 - RNA, 19 nt, Artificial Sequence
  Description of Artificial Sequence: Synthetic oligonucleotide
cacgccaauacugcaucca

SEQ ID NO: 1568124 - RNA, 19 nt, Artificial Sequence
  Description of Artificial Sequence: Synthetic oligonucleotide
aagcagacgugcacagguu

SEQ ID NO: 1568125 - RNA, 19 nt, Artificial Sequence
  Description of Artificial Sequence: Synthetic oligonucleotide
gacaggcgaagaagaugac

SEQ ID NO: 1568126 - RNA, 19 nt, Artificial Sequence
  Description of Artificial Sequence: Synthetic oligonucleotide
gccggaaauaacagaugug

SEQ ID NO: 1568127 - RNA, 19 nt, Artificial Sequence
  Description of Artificial Sequence: Synthetic oligonucleotide
ccguccugaagccauucug

SEQ ID NO: 1568128 - RNA, 19 nt, Artificial Sequence
  Description of Artificial Sequence: Synthetic oligonucleotide
agggcucauaggguugccu

SEQ ID NO: 1568129 - RNA, 19 nt, Artificial Sequence
  Description of Artificial Sequence: Synthetic oligonucleotide
aggaccccaggaccaugca

SEQ ID NO: 1568130 - RNA, 19 nt, Artificial Sequence
  Description of Artificial Sequence: Synthetic oligonucleotide
cagggugccaguugaacau

SEQ ID NO: 1568131 - RNA, 19 nt, Artificial Sequence
  Description of Artificial Sequence: Synthetic oligonucleotide
gaccacugacaggcgaaga

SEQ ID NO: 1568132 - RNA, 19 nt, Artificial Sequence
  Description of Artificial Sequence: Synthetic oligonucleotide
ggaauagagguguggcagu

SEQ ID NO: 1568133 - RNA, 19 nt, Artificial Sequence
  Description of Artificial Sequence: Synthetic oligonucleotide
cagacgugcacagguuuca

SEQ ID NO: 1568134 - RNA, 19 nt, Artificial Sequence
  Description of Artificial Sequence: Synthetic oligonucleotide
accaugcagaacagguaaa

SEQ ID NO: 1568135 - RNA, 19 nt, Artificial Sequence
  Description of Artificial Sequence: Synthetic oligonucleotide
gggcaguuuaggcccuacc

SEQ ID NO: 1568136 - RNA, 19 nt, Artificial Sequence
  Description of Artificial Sequence: Synthetic oligonucleotide
ccagcaaauuucgucauaa

SEQ ID NO: 1568137 - RNA, 19 nt, Artificial Sequence
  Description of Artificial Sequence: Synthetic oligonucleotide
agguguggcagugcugcau

SEQ ID NO: 1568138 - RNA, 19 nt, Artificial Sequence
  Description of Artificial Sequence: Synthetic oligonucleotide
gccucacuaggcaggcugg

SEQ ID NO: 1568139 - RNA, 19 nt, Artificial Sequence
  Description of Artificial Sequence: Synthetic oligonucleotide
ggaccacugacaggcgaag

SEQ ID NO: 1568140 - RNA, 19 nt, Artificial Sequence
  Description of Artificial Sequence: Synthetic oligonucleotide
ucgcagccacugaggugcc

SEQ ID NO: 1568141 - RNA, 19 nt, Artificial Sequence
  Description of Artificial Sequence: Synthetic oligonucleotide
agacugcaccaccgacugu

SEQ ID NO: 1568142 - RNA, 19 nt, Artificial Sequence
  Description of Artificial Sequence: Synthetic oligonucleotide
guccugaagccauucugau

SEQ ID NO: 1568143 - RNA, 19 nt, Artificial Sequence
  Description of Artificial Sequence: Synthetic oligonucleotide
ggugaagccagaagaacau

SEQ ID NO: 1568144 - RNA, 19 nt, Artificial Sequence
  Description of Artificial Sequence: Synthetic oligonucleotide
cuguuggcaaagacugccu

SEQ ID NO: 1568145 - RNA, 19 nt, Artificial Sequence
  Description of Artificial Sequence: Synthetic oligonucleotide
acaguuuaccagggcucau

SEQ ID NO: 1568146 - RNA, 19 nt, Artificial Sequence
  Description of Artificial Sequence: Synthetic oligonucleotide
cccugucaugcaacagggg

SEQ ID NO: 1568147 - RNA, 19 nt, Artificial Sequence
  Description of Artificial Sequence: Synthetic oligonucleotide
gagugaccagcaccugacu

SEQ ID NO: 1568148 - RNA, 19 nt, Artificial Sequence
  Description of Artificial Sequence: Synthetic oligonucleotide
ccacgccaauacugcaucc

SEQ ID NO: 1568149 - RNA, 19 nt, Artificial Sequence
  Description of Artificial Sequence: Synthetic oligonucleotide
caugcaacaggggcugucu

SEQ ID NO: 1568150 - RNA, 19 nt, Artificial Sequence
  Description of Artificial Sequence: Synthetic oligonucleotide
ggcaggcgguacaccagcg

SEQ ID NO: 1568151 - RNA, 19 nt, Artificial Sequence
  Description of Artificial Sequence: Synthetic oligonucleotide
gugaagccagaagaacaua

SEQ ID NO: 1568152 - RNA, 19 nt, Artificial Sequence
  Description of Artificial Sequence: Synthetic oligonucleotide
caaguacagaagcgcuucu

SEQ ID NO: 1568153 - RNA, 19 nt, Artificial Sequence
  Description of Artificial Sequence: Synthetic oligonucleotide
ggcaaagccgccacgccaa

SEQ ID NO: 1568154 - RNA, 19 nt, Artificial Sequence
  Description of Artificial Sequence: Synthetic oligonucleotide
cccuacccaugacaugggc

SEQ ID NO: 1568155 - RNA, 19 nt, Artificial Sequence
  Description of Artificial Sequence: Synthetic oligonucleotide
caguuuaccagggcucaua

SEQ ID NO: 1568156 - RNA, 19 nt, Artificial Sequence
  Description of Artificial Sequence: Synthetic oligonucleotide
gggagccacauagucacaa

SEQ ID NO: 1568157 - RNA, 19 nt, Artificial Sequence
  Description of Artificial Sequence: Synthetic oligonucleotide
aagcagcuggagagagcaa

SEQ ID NO: 1568158 - RNA, 19 nt, Artificial Sequence
  Description of Artificial Sequence: Synthetic oligonucleotide
cucacuaggcaggcuggaa

SEQ ID NO: 1568159 - RNA, 19 nt, Artificial Sequence
  Description of Artificial Sequence: Synthetic oligonucleotide
cucaucacuugggacucua

SEQ ID NO: 1568160 - RNA, 19 nt, Artificial Sequence
  Description of Artificial Sequence: Synthetic oligonucleotide
ggaaaggaugcaggcucca

SEQ ID NO: 1568161 - RNA, 19 nt, Artificial Sequence
  Description of Artificial Sequence: Synthetic oligonucleotide
gcuccaaagcagacgugca

SEQ ID NO: 1568162 - RNA, 19 nt, Artificial Sequence
  Description of Artificial Sequence: Synthetic oligonucleotide
ccaccaagaucccagugcu

SEQ ID NO: 1568163 - RNA, 19 nt, Artificial Sequence
  Description of Artificial Sequence: Synthetic oligonucleotide
cagcaaauuucgucauaau

SEQ ID NO: 1568164 - RNA, 19 nt, Artificial Sequence
  Description of Artificial Sequence: Synthetic oligonucleotide
accagcgaggcagcuccau

SEQ ID NO: 1568165 - RNA, 19 nt, Artificial Sequence
  Description of Artificial Sequence: Synthetic oligonucleotide
aggcuccaaagcagacgug

SEQ ID NO: 1568166 - RNA, 19 nt, Artificial Sequence
  Description of Artificial Sequence: Synthetic oligonucleotide
ggaccaugcagaacaggua

SEQ ID NO: 1568167 - RNA, 19 nt, Artificial Sequence
  Description of Artificial Sequence: Synthetic oligonucleotide
ccaugcagaacagguaaaa

SEQ ID NO: 1568168 - RNA, 19 nt, Artificial Sequence
  Description of Artificial Sequence: Synthetic oligonucleotide
caucucugcccacccaaau

SEQ ID NO: 1568169 - RNA, 19 nt, Artificial Sequence
  Description of Artificial Sequence: Synthetic oligonucleotide
gaacucugcccagcaaauu

SEQ ID NO: 1568170 - RNA, 19 nt, Artificial Sequence
  Description of Artificial Sequence: Synthetic oligonucleotide
gggaccacugacaggcgaa

SEQ ID NO: 1568171 - RNA, 19 nt, Artificial Sequence
  Description of Artificial Sequence: Synthetic oligonucleotide
gcagaacagguaaaaccgu

SEQ ID NO: 1568172 - RNA, 19 nt, Artificial Sequence
  Description of Artificial Sequence: Synthetic oligonucleotide
ccacccaaauccacaccca

SEQ ID NO: 1568173 - RNA, 19 nt, Artificial Sequence
  Description of Artificial Sequence: Synthetic oligonucleotide
gcccuacccaugacauggg

SEQ ID NO: 1568174 - RNA, 19 nt, Artificial Sequence
  Description of Artificial Sequence: Synthetic oligonucleotide
ggacccugucagggaagag

SEQ ID NO: 1568175 - RNA, 19 nt, Artificial Sequence
  Description of Artificial Sequence: Synthetic oligonucleotide
cccgcuucacucccuguca

SEQ ID NO: 1568176 - RNA, 19 nt, Artificial Sequence
  Description of Artificial Sequence: Synthetic oligonucleotide
gggauccaggcagcagcug

SEQ ID NO: 1568177 - RNA, 19 nt, Artificial Sequence
  Description of Artificial Sequence: Synthetic oligonucleotide
ggagccacauagucacaau

SEQ ID NO: 1568178 - RNA, 19 nt, Artificial Sequence
  Description of Artificial Sequence: Synthetic oligonucleotide
cgucauaaugcugguuuca

SEQ ID NO: 1568179 - RNA, 19 nt, Artificial Sequence
  Description of Artificial Sequence: Synthetic oligonucleotide
ccccugcccgcuucacucc

SEQ ID NO: 1568180 - RNA, 19 nt, Artificial Sequence
  Description of Artificial Sequence: Synthetic oligonucleotide
ccaccgacuguuccuggga

SEQ ID NO: 1568181 - RNA, 19 nt, Artificial Sequence
  Description of Artificial Sequence: Synthetic oligonucleotide
caaagccgccacgccaaua

SEQ ID NO: 1568182 - RNA, 19 nt, Artificial Sequence
  Description of Artificial Sequence: Synthetic oligonucleotide
ggcaaagcccagggaccac

SEQ ID NO: 1568183 - RNA, 19 nt, Artificial Sequence
  Description of Artificial Sequence: Synthetic oligonucleotide
cacagggaaagggcgggau

SEQ ID NO: 1568184 - RNA, 19 nt, Artificial Sequence
  Description of Artificial Sequence: Synthetic oligonucleotide
cggaaauaacagaugugau

SEQ ID NO: 1568185 - RNA, 19 nt, Artificial Sequence
  Description of Artificial Sequence: Synthetic oligonucleotide
gcuguccuauuaagaccuc

SEQ ID NO: 1568186 - RNA, 19 nt, Artificial Sequence
  Description of Artificial Sequence: Synthetic oligonucleotide
caccagcgaggcagcucca

SEQ ID NO: 1568187 - RNA, 19 nt, Artificial Sequence
  Description of Artificial Sequence: Synthetic oligonucleotide
guacaccagcgaggcagcu

SEQ ID NO: 1568188 - RNA, 19 nt, Artificial Sequence
  Description of Artificial Sequence: Synthetic oligonucleotide
gggacucuagggucagguu

SEQ ID NO: 1568189 - RNA, 19 nt, Artificial Sequence
  Description of Artificial Sequence: Synthetic oligonucleotide
cccagcaaauuucgucaua

SEQ ID NO: 1568190 - RNA, 19 nt, Artificial Sequence
  Description of Artificial Sequence: Synthetic oligonucleotide
ccaagagaaguugguugcu

SEQ ID NO: 1568191 - RNA, 19 nt, Artificial Sequence
  Description of Artificial Sequence: Synthetic oligonucleotide
gggcugucugucagucaga

SEQ ID NO: 1568192 - RNA, 19 nt, Artificial Sequence
  Description of Artificial Sequence: Synthetic oligonucleotide
ccgccacgccaauacugca

SEQ ID NO: 1568193 - RNA, 19 nt, Artificial Sequence
  Description of Artificial Sequence: Synthetic oligonucleotide
cgacuguuccugggagccc

SEQ ID NO: 1568194 - RNA, 19 nt, Artificial Sequence
  Description of Artificial Sequence: Synthetic oligonucleotide
ccucacuaggcaggcugga

SEQ ID NO: 1568195 - RNA, 19 nt, Artificial Sequence
  Description of Artificial Sequence: Synthetic oligonucleotide
gcgguacaccagcgaggca

SEQ ID NO: 1568196 - RNA, 19 nt, Artificial Sequence
  Description of Artificial Sequence: Synthetic oligonucleotide
ggggagccacauagucaca

SEQ ID NO: 1568197 - RNA, 19 nt, Artificial Sequence
  Description of Artificial Sequence: Synthetic oligonucleotide
ccauacccacaaggggaca

SEQ ID NO: 1568198 - RNA, 19 nt, Artificial Sequence
  Description of Artificial Sequence: Synthetic oligonucleotide
ccaugagcacagggugcca

SEQ ID NO: 1568199 - RNA, 19 nt, Artificial Sequence
  Description of Artificial Sequence: Synthetic oligonucleotide
cagggcaguuuaggcccua

SEQ ID NO: 1568200 - RNA, 19 nt, Artificial Sequence
  Description of Artificial Sequence: Synthetic oligonucleotide
cgccaauacugcauccaau

SEQ ID NO: 1568201 - RNA, 19 nt, Artificial Sequence
  Description of Artificial Sequence: Synthetic oligonucleotide
gcaaagccgccacgccaau

SEQ ID NO: 1568202 - RNA, 19 nt, Artificial Sequence
  Description of Artificial Sequence: Synthetic oligonucleotide
cugccucacuaggcaggcu

SEQ ID NO: 1568203 - RNA, 19 nt, Artificial Sequence
  Description of Artificial Sequence: Synthetic oligonucleotide
cgccacgccaauacugcau

SEQ ID NO: 1568204 - RNA, 19 nt, Artificial Sequence
  Description of Artificial Sequence: Synthetic oligonucleotide
ccgcuucacucccugucau

SEQ ID NO: 1568205 - RNA, 19 nt, Artificial Sequence
  Description of Artificial Sequence: Synthetic oligonucleotide
cccugucagggaagagcau

SEQ ID NO: 1568206 - RNA, 19 nt, Artificial Sequence
  Description of Artificial Sequence: Synthetic oligonucleotide
aaucaguugguuuaguacc

SEQ ID NO: 1568207 - RNA, 19 nt, Artificial Sequence
  Description of Artificial Sequence: Synthetic oligonucleotide
aauagauccaauccauugc

SEQ ID NO: 1568208 - RNA, 19 nt, Artificial Sequence
  Description of Artificial Sequence: Synthetic oligonucleotide
agaauuagaaauuuuaucu

SEQ ID NO: 1568209 - RNA, 19 nt, Artificial Sequence
  Description of Artificial Sequence: Synthetic oligonucleotide
acuucaauagauccaaucc

SEQ ID NO: 1568210 - RNA, 19 nt, Artificial Sequence
  Description of Artificial Sequence: Synthetic oligonucleotide
cauauagugaugauaagcg

SEQ ID NO: 1568211 - RNA, 19 nt, Artificial Sequence
  Description of Artificial Sequence: Synthetic oligonucleotide
aauguugcugguuugucac

SEQ ID NO: 1568212 - RNA, 19 nt, Artificial Sequence
  Description of Artificial Sequence: Synthetic oligonucleotide
aaguuuucggacuuuuccc

SEQ ID NO: 1568213 - RNA, 19 nt, Artificial Sequence
  Description of Artificial Sequence: Synthetic oligonucleotide
uuuaaacagcauuuggucg

SEQ ID NO: 1568214 - RNA, 19 nt, Artificial Sequence
  Description of Artificial Sequence: Synthetic oligonucleotide
ugaugauaagcguagaugc

SEQ ID NO: 1568215 - RNA, 19 nt, Artificial Sequence
  Description of Artificial Sequence: Synthetic oligonucleotide
uugguuaugaacugcaucc

SEQ ID NO: 1568216 - RNA, 19 nt, Artificial Sequence
  Description of Artificial Sequence: Synthetic oligonucleotide
auagauccaauccauugcc

SEQ ID NO: 1568217 - RNA, 19 nt, Artificial Sequence
  Description of Artificial Sequence: Synthetic oligonucleotide
uucauauuaauguaguggu

SEQ ID NO: 1568218 - RNA, 19 nt, Artificial Sequence
  Description of Artificial Sequence: Synthetic oligonucleotide
uuuguugcaugucugauga

SEQ ID NO: 1568219 - RNA, 19 nt, Artificial Sequence
  Description of Artificial Sequence: Synthetic oligonucleotide
ugaaguuacaccaaucagu

SEQ ID NO: 1568220 - RNA, 19 nt, Artificial Sequence
  Description of Artificial Sequence: Synthetic oligonucleotide
aagugguacgcauuagccc

SEQ ID NO: 1568221 - RNA, 19 nt, Artificial Sequence
  Description of Artificial Sequence: Synthetic oligonucleotide
aacaagagccugcugaauc

SEQ ID NO: 1568222 - RNA, 19 nt, Artificial Sequence
  Description of Artificial Sequence: Synthetic oligonucleotide
uuugaaauaaggucuguca

SEQ ID NO: 1568223 - RNA, 19 nt, Artificial Sequence
  Description of Artificial Sequence: Synthetic oligonucleotide
acuguugggccacagauac

SEQ ID NO: 1568224 - RNA, 19 nt, Artificial Sequence
  Description of Artificial Sequence: Synthetic oligonucleotide
auaguaugcauccuuguuc

SEQ ID NO: 1568225 - RNA, 19 nt, Artificial Sequence
  Description of Artificial Sequence: Synthetic oligonucleotide
aauacaagagcgucugaag

SEQ ID NO: 1568226 - RNA, 19 nt, Artificial Sequence
  Description of Artificial Sequence: Synthetic oligonucleotide
gcuacaacuacaucgaucg

SEQ ID NO: 1568227 - RNA, 19 nt, Artificial Sequence
  Description of Artificial Sequence: Synthetic oligonucleotide
ugcacuauguucuuacagg

SEQ ID NO: 1568228 - RNA, 19 nt, Artificial Sequence
  Description of Artificial Sequence: Synthetic oligonucleotide
guucauauuaauguagugg

SEQ ID NO: 1568229 - RNA, 19 nt, Artificial Sequence
  Description of Artificial Sequence: Synthetic oligonucleotide
uguaguuucauuccaugug

SEQ ID NO: 1568230 - RNA, 19 nt, Artificial Sequence
  Description of Artificial Sequence: Synthetic oligonucleotide
uauccgauccugcauauag

SEQ ID NO: 1568231 - RNA, 19 nt, Artificial Sequence
  Description of Artificial Sequence: Synthetic oligonucleotide
uuuaggagaggcuagcuga

SEQ ID NO: 1568232 - RNA, 19 nt, Artificial Sequence
  Description of Artificial Sequence: Synthetic oligonucleotide
cuuucuauaggccugcagc

SEQ ID NO: 1568233 - RNA, 19 nt, Artificial Sequence
  Description of Artificial Sequence: Synthetic oligonucleotide
aauguagugguguucuuca

SEQ ID NO: 1568234 - RNA, 19 nt, Artificial Sequence
  Description of Artificial Sequence: Synthetic oligonucleotide
caauccauugccgagaucc

SEQ ID NO: 1568235 - RNA, 19 nt, Artificial Sequence
  Description of Artificial Sequence: Synthetic oligonucleotide
uauaaugugggucuagaau

SEQ ID NO: 1568236 - RNA, 19 nt, Artificial Sequence
  Description of Artificial Sequence: Synthetic oligonucleotide
auaaguuauaguaugcauc

SEQ ID NO: 1568237 - RNA, 19 nt, Artificial Sequence
  Description of Artificial Sequence: Synthetic oligonucleotide
aacuaguugguuaugaacu

SEQ ID NO: 1568238 - RNA, 19 nt, Artificial Sequence
  Description of Artificial Sequence: Synthetic oligonucleotide
aacuacaucgaucggcaag

SEQ ID NO: 1568239 - RNA, 19 nt, Artificial Sequence
  Description of Artificial Sequence: Synthetic oligonucleotide
uugaaguuacaccaaucag

SEQ ID NO: 1568240 - RNA, 19 nt, Artificial Sequence
  Description of Artificial Sequence: Synthetic oligonucleotide
ugggucuagaauuagaaau

SEQ ID NO: 1568241 - RNA, 19 nt, Artificial Sequence
  Description of Artificial Sequence: Synthetic oligonucleotide
aaucauuacaggagugccc

SEQ ID NO: 1568242 - RNA, 19 nt, Artificial Sequence
  Description of Artificial Sequence: Synthetic oligonucleotide
gacucagauaagcaugugg

SEQ ID NO: 1568243 - RNA, 19 nt, Artificial Sequence
  Description of Artificial Sequence: Synthetic oligonucleotide
uuccugauggauauaaaac

SEQ ID NO: 1568244 - RNA, 19 nt, Artificial Sequence
  Description of Artificial Sequence: Synthetic oligonucleotide
uauagugaugauaagcgua

SEQ ID NO: 1568245 - RNA, 19 nt, Artificial Sequence
  Description of Artificial Sequence: Synthetic oligonucleotide
augauaagcguagaugccc

SEQ ID NO: 1568246 - RNA, 19 nt, Artificial Sequence
  Description of Artificial Sequence: Synthetic oligonucleotide
auaaugugggucuagaauu

SEQ ID NO: 1568247 - RNA, 19 nt, Artificial Sequence
  Description of Artificial Sequence: Synthetic oligonucleotide
uuuaguaccagcuguacuu

SEQ ID NO: 1568248 - RNA, 19 nt, Artificial Sequence
  Description of Artificial Sequence: Synthetic oligonucleotide
uccacuagaaguuuucgga

SEQ ID NO: 1568249 - RNA, 19 nt, Artificial Sequence
  Description of Artificial Sequence: Synthetic oligonucleotide
uuuauaugguucaucugga

SEQ ID NO: 1568250 - RNA, 19 nt, Artificial Sequence
  Description of Artificial Sequence: Synthetic oligonucleotide
uaguaugcauccuuguucc

SEQ ID NO: 1568251 - RNA, 19 nt, Artificial Sequence
  Description of Artificial Sequence: Synthetic oligonucleotide
uagaaauuuuaucugcccu

SEQ ID NO: 1568252 - RNA, 19 nt, Artificial Sequence
  Description of Artificial Sequence: Synthetic oligonucleotide
agcguagaugcccuggacc

SEQ ID NO: 1568253 - RNA, 19 nt, Artificial Sequence
  Description of Artificial Sequence: Synthetic oligonucleotide
uaucccugaugucugaacc

SEQ ID NO: 1568254 - RNA, 19 nt, Artificial Sequence
  Description of Artificial Sequence: Synthetic oligonucleotide
uacccucuauguuaggugg

SEQ ID NO: 1568255 - RNA, 19 nt, Artificial Sequence
  Description of Artificial Sequence: Synthetic oligonucleotide
caauagauccaauccauug

SEQ ID NO: 1568256 - RNA, 19 nt, Artificial Sequence
  Description of Artificial Sequence: Synthetic oligonucleotide
agugguacgcauuagcccu

SEQ ID NO: 1568257 - RNA, 19 nt, Artificial Sequence
  Description of Artificial Sequence: Synthetic oligonucleotide
ugucuuagagcauucuuga

SEQ ID NO: 1568258 - RNA, 19 nt, Artificial Sequence
  Description of Artificial Sequence: Synthetic oligonucleotide
uucaauagauccaauccau

SEQ ID NO: 1568259 - RNA, 19 nt, Artificial Sequence
  Description of Artificial Sequence: Synthetic oligonucleotide
uacgcauuagcccuuuuga

SEQ ID NO: 1568260 - RNA, 19 nt, Artificial Sequence
  Description of Artificial Sequence: Synthetic oligonucleotide
gauauuuccagcaugagau

SEQ ID NO: 1568261 - RNA, 19 nt, Artificial Sequence
  Description of Artificial Sequence: Synthetic oligonucleotide
guaacuccuuucuauaggc

SEQ ID NO: 1568262 - RNA, 19 nt, Artificial Sequence
  Description of Artificial Sequence: Synthetic oligonucleotide
gauaagcacagccccagcc

SEQ ID NO: 1568263 - RNA, 19 nt, Artificial Sequence
  Description of Artificial Sequence: Synthetic oligonucleotide
auuaauguagugguguucu

SEQ ID NO: 1568264 - RNA, 19 nt, Artificial Sequence
  Description of Artificial Sequence: Synthetic oligonucleotide
aaaugguuggccaguuccc

SEQ ID NO: 1568265 - RNA, 19 nt, Artificial Sequence
  Description of Artificial Sequence: Synthetic oligonucleotide
ugugggucuagaauuagaa

SEQ ID NO: 1568266 - RNA, 19 nt, Artificial Sequence
  Description of Artificial Sequence: Synthetic oligonucleotide
gguuacagcucccagagag

SEQ ID NO: 1568267 - RNA, 19 nt, Artificial Sequence
  Description of Artificial Sequence: Synthetic oligonucleotide
uacaacuacaucgaucggc

SEQ ID NO: 1568268 - RNA, 19 nt, Artificial Sequence
  Description of Artificial Sequence: Synthetic oligonucleotide
ucugaauacaagagcgucu

SEQ ID NO: 1568269 - RNA, 19 nt, Artificial Sequence
  Description of Artificial Sequence: Synthetic oligonucleotide
aggcauaaguuauaguaug

SEQ ID NO: 1568270 - RNA, 19 nt, Artificial Sequence
  Description of Artificial Sequence: Synthetic oligonucleotide
gagacucugaauacaagag

SEQ ID NO: 1568271 - RNA, 19 nt, Artificial Sequence
  Description of Artificial Sequence: Synthetic oligonucleotide
ucuauaggccugcagcuga

SEQ ID NO: 1568272 - RNA, 19 nt, Artificial Sequence
  Description of Artificial Sequence: Synthetic oligonucleotide
cuuagagcauucuugauaa

SEQ ID NO: 1568273 - RNA, 19 nt, Artificial Sequence
  Description of Artificial Sequence: Synthetic oligonucleotide
uggauauaaaacuguuaca

SEQ ID NO: 1568274 - RNA, 19 nt, Artificial Sequence
  Description of Artificial Sequence: Synthetic oligonucleotide
agauguuccuuuuauguau

SEQ ID NO: 1568275 - RNA, 19 nt, Artificial Sequence
  Description of Artificial Sequence: Synthetic oligonucleotide
cugaaccaugagcagaucg

SEQ ID NO: 1568276 - RNA, 19 nt, Artificial Sequence
  Description of Artificial Sequence: Synthetic oligonucleotide
ugagccaauacuccucccc

SEQ ID NO: 1568277 - RNA, 19 nt, Artificial Sequence
  Description of Artificial Sequence: Synthetic oligonucleotide
cuugaaguuacaccaauca

SEQ ID NO: 1568278 - RNA, 19 nt, Artificial Sequence
  Description of Artificial Sequence: Synthetic oligonucleotide
uguguaucccugaugucug

SEQ ID NO: 1568279 - RNA, 19 nt, Artificial Sequence
  Description of Artificial Sequence: Synthetic oligonucleotide
accuguauaaugugggucu

SEQ ID NO: 1568280 - RNA, 19 nt, Artificial Sequence
  Description of Artificial Sequence: Synthetic oligonucleotide
auccacuagaaguuuucgg

SEQ ID NO: 1568281 - RNA, 19 nt, Artificial Sequence
  Description of Artificial Sequence: Synthetic oligonucleotide
uccgauccugcauauagug

SEQ ID NO: 1568282 - RNA, 19 nt, Artificial Sequence
  Description of Artificial Sequence: Synthetic oligonucleotide
uacaagagcgucugaagac

SEQ ID NO: 1568283 - RNA, 19 nt, Artificial Sequence
  Description of Artificial Sequence: Synthetic oligonucleotide
auagugaugauaagcguag

SEQ ID NO: 1568284 - RNA, 19 nt, Artificial Sequence
  Description of Artificial Sequence: Synthetic oligonucleotide
cauuuggucguugaggaag

SEQ ID NO: 1568285 - RNA, 19 nt, Artificial Sequence
  Description of Artificial Sequence: Synthetic oligonucleotide
gagguugauauuuccagca

SEQ ID NO: 1568286 - RNA, 19 nt, Artificial Sequence
  Description of Artificial Sequence: Synthetic oligonucleotide
uuccccacguuucuucugg

SEQ ID NO: 1568287 - RNA, 19 nt, Artificial Sequence
  Description of Artificial Sequence: Synthetic oligonucleotide
ugggagauugaagagguca

SEQ ID NO: 1568288 - RNA, 19 nt, Artificial Sequence
  Description of Artificial Sequence: Synthetic oligonucleotide
caacuaguugguuaugaac

SEQ ID NO: 1568289 - RNA, 19 nt, Artificial Sequence
  Description of Artificial Sequence: Synthetic oligonucleotide
uuaugaacugcauccacua

SEQ ID NO: 1568290 - RNA, 19 nt, Artificial Sequence
  Description of Artificial Sequence: Synthetic oligonucleotide
auauagugaugauaagcgu

SEQ ID NO: 1568291 - RNA, 19 nt, Artificial Sequence
  Description of Artificial Sequence: Synthetic oligonucleotide
uauaguaugcauccuuguu

SEQ ID NO: 1568292 - RNA, 19 nt, Artificial Sequence
  Description of Artificial Sequence: Synthetic oligonucleotide
ucaucuauccgauccugca

SEQ ID NO: 1568293 - RNA, 19 nt, Artificial Sequence
  Description of Artificial Sequence: Synthetic oligonucleotide
ugcagccgucuuuauaugg

SEQ ID NO: 1568294 - RNA, 19 nt, Artificial Sequence
  Description of Artificial Sequence: Synthetic oligonucleotide
ucaacaccugucuuagagc

SEQ ID NO: 1568295 - RNA, 19 nt, Artificial Sequence
  Description of Artificial Sequence: Synthetic oligonucleotide
acuaguugguuaugaacug

SEQ ID NO: 1568296 - RNA, 19 nt, Artificial Sequence
  Description of Artificial Sequence: Synthetic oligonucleotide
guuucauuccaugugacuc

SEQ ID NO: 1568297 - RNA, 19 nt, Artificial Sequence
  Description of Artificial Sequence: Synthetic oligonucleotide
acuccuaguauugugugag

SEQ ID NO: 1568298 - RNA, 19 nt, Artificial Sequence
  Description of Artificial Sequence: Synthetic oligonucleotide
acaucaacuaguugguuau

SEQ ID NO: 1568299 - RNA, 19 nt, Artificial Sequence
  Description of Artificial Sequence: Synthetic oligonucleotide
acaucgaucggcaaguuca

SEQ ID NO: 1568300 - RNA, 19 nt, Artificial Sequence
  Description of Artificial Sequence: Synthetic oligonucleotide
guuauaguaugcauccuug

SEQ ID NO: 1568301 - RNA, 19 nt, Artificial Sequence
  Description of Artificial Sequence: Synthetic oligonucleotide
cauuccaugugacuccuag

SEQ ID NO: 1568302 - RNA, 19 nt, Artificial Sequence
  Description of Artificial Sequence: Synthetic oligonucleotide
uguugcaugucugaugacu

SEQ ID NO: 1568303 - RNA, 19 nt, Artificial Sequence
  Description of Artificial Sequence: Synthetic oligonucleotide
ugauggauauaaaacuguu

SEQ ID NO: 1568304 - RNA, 19 nt, Artificial Sequence
  Description of Artificial Sequence: Synthetic oligonucleotide
uuauaguaugcauccuugu

SEQ ID NO: 1568305 - RNA, 19 nt, Artificial Sequence
  Description of Artificial Sequence: Synthetic oligonucleotide
aaagucugggcucuuccau

SEQ ID NO: 1568306 - RNA, 19 nt, Artificial Sequence
  Description of Artificial Sequence: Synthetic oligonucleotide
ugauaagcguagaugcccu

SEQ ID NO: 1568307 - RNA, 19 nt, Artificial Sequence
  Description of Artificial Sequence: Synthetic oligonucleotide
aguuauaguaugcauccuu

SEQ ID NO: 1568308 - RNA, 19 nt, Artificial Sequence
  Description of Artificial Sequence: Synthetic oligonucleotide
ugugugagccaauacuccu

SEQ ID NO: 1568309 - RNA, 19 nt, Artificial Sequence
  Description of Artificial Sequence: Synthetic oligonucleotide
cuucaauagauccaaucca

SEQ ID NO: 1568310 - RNA, 19 nt, Artificial Sequence
  Description of Artificial Sequence: Synthetic oligonucleotide
caagauaacuugcagaucu

SEQ ID NO: 1568311 - RNA, 19 nt, Artificial Sequence
  Description of Artificial Sequence: Synthetic oligonucleotide
uggacucagauaagcaugu

SEQ ID NO: 1568312 - RNA, 19 nt, Artificial Sequence
  Description of Artificial Sequence: Synthetic oligonucleotide
gugaugauaagcguagaug

SEQ ID NO: 1568313 - RNA, 19 nt, Artificial Sequence
  Description of Artificial Sequence: Synthetic oligonucleotide
aagcguagaugcccuggac

SEQ ID NO: 1568314 - RNA, 19 nt, Artificial Sequence
  Description of Artificial Sequence: Synthetic oligonucleotide
cucuauguuagguggacuc

SEQ ID NO: 1568315 - RNA, 19 nt, Artificial Sequence
  Description of Artificial Sequence: Synthetic oligonucleotide
caaucauuacaggagugcc

SEQ ID NO: 1568316 - RNA, 19 nt, Artificial Sequence
  Description of Artificial Sequence: Synthetic oligonucleotide
uucugaagaguauauccau

SEQ ID NO: 1568317 - RNA, 19 nt, Artificial Sequence
  Description of Artificial Sequence: Synthetic oligonucleotide
aauccauugccgagauccc

SEQ ID NO: 1568318 - RNA, 19 nt, Artificial Sequence
  Description of Artificial Sequence: Synthetic oligonucleotide
uccuaguauugugugagcc

SEQ ID NO: 1568319 - RNA, 19 nt, Artificial Sequence
  Description of Artificial Sequence: Synthetic oligonucleotide
caugugacuccuaguauug

SEQ ID NO: 1568320 - RNA, 19 nt, Artificial Sequence
  Description of Artificial Sequence: Synthetic oligonucleotide
ucgaucggcaaguucauau

SEQ ID NO: 1568321 - RNA, 19 nt, Artificial Sequence
  Description of Artificial Sequence: Synthetic oligonucleotide
ugguucagggaccacaaua

SEQ ID NO: 1568322 - RNA, 19 nt, Artificial Sequence
  Description of Artificial Sequence: Synthetic oligonucleotide
ucuuauucugaagaguaua

SEQ ID NO: 1568323 - RNA, 19 nt, Artificial Sequence
  Description of Artificial Sequence: Synthetic oligonucleotide
caugugggagauugaagag

SEQ ID NO: 1568324 - RNA, 19 nt, Artificial Sequence
  Description of Artificial Sequence: Synthetic oligonucleotide
agcaccuguauaauguggg

SEQ ID NO: 1568325 - RNA, 19 nt, Artificial Sequence
  Description of Artificial Sequence: Synthetic oligonucleotide
augugggagauugaagagg

SEQ ID NO: 1568326 - RNA, 19 nt, Artificial Sequence
  Description of Artificial Sequence: Synthetic oligonucleotide
caucacacuacccucuaug

SEQ ID NO: 1568327 - RNA, 19 nt, Artificial Sequence
  Description of Artificial Sequence: Synthetic oligonucleotide
aaacaguauucuugaaguu

SEQ ID NO: 1568328 - RNA, 19 nt, Artificial Sequence
  Description of Artificial Sequence: Synthetic oligonucleotide
ucugaagaguauauccaua

SEQ ID NO: 1568329 - RNA, 19 nt, Artificial Sequence
  Description of Artificial Sequence: Synthetic oligonucleotide
ugacuccuaguauugugug

SEQ ID NO: 1568330 - RNA, 19 nt, Artificial Sequence
  Description of Artificial Sequence: Synthetic oligonucleotide
guugguuaugaacugcauc

SEQ ID NO: 1568331 - RNA, 19 nt, Artificial Sequence
  Description of Artificial Sequence: Synthetic oligonucleotide
uguguuggaauggaccucu

SEQ ID NO: 1568332 - RNA, 19 nt, Artificial Sequence
  Description of Artificial Sequence: Synthetic oligonucleotide
uguugggccacagauacau

SEQ ID NO: 1568333 - RNA, 19 nt, Artificial Sequence
  Description of Artificial Sequence: Synthetic oligonucleotide
gugcacuauguucuuacag

SEQ ID NO: 1568334 - RNA, 19 nt, Artificial Sequence
  Description of Artificial Sequence: Synthetic oligonucleotide
ucagauaagcauguggguu

SEQ ID NO: 1568335 - RNA, 19 nt, Artificial Sequence
  Description of Artificial Sequence: Synthetic oligonucleotide
ucaacuaguugguuaugaa

SEQ ID NO: 1568336 - RNA, 19 nt, Artificial Sequence
  Description of Artificial Sequence: Synthetic oligonucleotide
agugaugauaagcguagau

SEQ ID NO: 1568337 - RNA, 19 nt, Artificial Sequence
  Description of Artificial Sequence: Synthetic oligonucleotide
aucacacuacccucuaugu

SEQ ID NO: 1568338 - RNA, 19 nt, Artificial Sequence
  Description of Artificial Sequence: Synthetic oligonucleotide
auaagcguagaugcccugg

SEQ ID NO: 1568339 - RNA, 19 nt, Artificial Sequence
  Description of Artificial Sequence: Synthetic oligonucleotide
cugaauacaagagcgucug

SEQ ID NO: 1568340 - RNA, 19 nt, Artificial Sequence
  Description of Artificial Sequence: Synthetic oligonucleotide
cuuuaggagaggcuagcug

SEQ ID NO: 1568341 - RNA, 19 nt, Artificial Sequence
  Description of Artificial Sequence: Synthetic oligonucleotide
aaguuacaccaaucaguug

SEQ ID NO: 1568342 - RNA, 19 nt, Artificial Sequence
  Description of Artificial Sequence: Synthetic oligonucleotide
acuacaucgaucggcaagu

SEQ ID NO: 1568343 - RNA, 19 nt, Artificial Sequence
  Description of Artificial Sequence: Synthetic oligonucleotide
caacaccugucuuagagca

SEQ ID NO: 1568344 - RNA, 19 nt, Artificial Sequence
  Description of Artificial Sequence: Synthetic oligonucleotide
uauguuagguggacucaga

SEQ ID NO: 1568345 - RNA, 19 nt, Artificial Sequence
  Description of Artificial Sequence: Synthetic oligonucleotide
uggagacucugaauacaag

SEQ ID NO: 1568346 - RNA, 19 nt, Artificial Sequence
  Description of Artificial Sequence: Synthetic oligonucleotide
uaagcguagaugcccugga

SEQ ID NO: 1568347 - RNA, 19 nt, Artificial Sequence
  Description of Artificial Sequence: Synthetic oligonucleotide
uaguuucauuccaugugac

SEQ ID NO: 1568348 - RNA, 19 nt, Artificial Sequence
  Description of Artificial Sequence: Synthetic oligonucleotide
auauuaauguagugguguu

SEQ ID NO: 1568349 - RNA, 19 nt, Artificial Sequence
  Description of Artificial Sequence: Synthetic oligonucleotide
ucuauguuagguggacuca

SEQ ID NO: 1568350 - RNA, 19 nt, Artificial Sequence
  Description of Artificial Sequence: Synthetic oligonucleotide
agaucuauguuuacuauuu

SEQ ID NO: 1568351 - RNA, 19 nt, Artificial Sequence
  Description of Artificial Sequence: Synthetic oligonucleotide
agccauugucaucuauccg

SEQ ID NO: 1568352 - RNA, 19 nt, Artificial Sequence
  Description of Artificial Sequence: Synthetic oligonucleotide
acuauuuguugcaugucug

SEQ ID NO: 1568353 - RNA, 19 nt, Artificial Sequence
  Description of Artificial Sequence: Synthetic oligonucleotide
uuauaugguucaucuggaa

SEQ ID NO: 1568354 - RNA, 19 nt, Artificial Sequence
  Description of Artificial Sequence: Synthetic oligonucleotide
ucaauagauccaauccauu

SEQ ID NO: 1568355 - RNA, 19 nt, Artificial Sequence
  Description of Artificial Sequence: Synthetic oligonucleotide
agaucgucugcagggaccg

SEQ ID NO: 1568356 - RNA, 19 nt, Artificial Sequence
  Description of Artificial Sequence: Synthetic oligonucleotide
gaauacaagagcgucugaa

SEQ ID NO: 1568357 - RNA, 19 nt, Artificial Sequence
  Description of Artificial Sequence: Synthetic oligonucleotide
agcuacaacuacaucgauc

SEQ ID NO: 1568358 - RNA, 19 nt, Artificial Sequence
  Description of Artificial Sequence: Synthetic oligonucleotide
cuacccucuauguuaggug

SEQ ID NO: 1568359 - RNA, 19 nt, Artificial Sequence
  Description of Artificial Sequence: Synthetic oligonucleotide
uugccgagaucccacaaau

SEQ ID NO: 1568360 - RNA, 19 nt, Artificial Sequence
  Description of Artificial Sequence: Synthetic oligonucleotide
uauuaauguagugguguuc

SEQ ID NO: 1568361 - RNA, 19 nt, Artificial Sequence
  Description of Artificial Sequence: Synthetic oligonucleotide
cagcauuuggucguugagg

SEQ ID NO: 1568362 - RNA, 19 nt, Artificial Sequence
  Description of Artificial Sequence: Synthetic oligonucleotide
ccugauggauauaaaacug

SEQ ID NO: 1568363 - RNA, 19 nt, Artificial Sequence
  Description of Artificial Sequence: Synthetic oligonucleotide
acaacuacaucgaucggca

SEQ ID NO: 1568364 - RNA, 19 nt, Artificial Sequence
  Description of Artificial Sequence: Synthetic oligonucleotide
acuagaaguuuucggacuu

SEQ ID NO: 1568365 - RNA, 19 nt, Artificial Sequence
  Description of Artificial Sequence: Synthetic oligonucleotide
aagagcgucugaagacagc

SEQ ID NO: 1568366 - RNA, 19 nt, Artificial Sequence
  Description of Artificial Sequence: Synthetic oligonucleotide
guggacucagauaagcaug

SEQ ID NO: 1568367 - RNA, 19 nt, Artificial Sequence
  Description of Artificial Sequence: Synthetic oligonucleotide
acagcuacaacuacaucga

SEQ ID NO: 1568368 - RNA, 19 nt, Artificial Sequence
  Description of Artificial Sequence: Synthetic oligonucleotide
cuccucuuauucugaagag

SEQ ID NO: 1568369 - RNA, 19 nt, Artificial Sequence
  Description of Artificial Sequence: Synthetic oligonucleotide
cuauguuagguggacucag

SEQ ID NO: 1568370 - RNA, 19 nt, Artificial Sequence
  Description of Artificial Sequence: Synthetic oligonucleotide
gguugauauuuccagcaug

SEQ ID NO: 1568371 - RNA, 19 nt, Artificial Sequence
  Description of Artificial Sequence: Synthetic oligonucleotide
gguucagggaccacaauag

SEQ ID NO: 1568372 - RNA, 19 nt, Artificial Sequence
  Description of Artificial Sequence: Synthetic oligonucleotide
gggguuacagcucccagag

SEQ ID NO: 1568373 - RNA, 19 nt, Artificial Sequence
  Description of Artificial Sequence: Synthetic oligonucleotide
caguucccguccuugagag

SEQ ID NO: 1568374 - RNA, 19 nt, Artificial Sequence
  Description of Artificial Sequence: Synthetic oligonucleotide
auuuggucguugaggaagg

SEQ ID NO: 1568375 - RNA, 19 nt, Artificial Sequence
  Description of Artificial Sequence: Synthetic oligonucleotide
guacgcauuagcccuuuug

SEQ ID NO: 1568376 - RNA, 19 nt, Artificial Sequence
  Description of Artificial Sequence: Synthetic oligonucleotide
gaauggaccucucugugua

SEQ ID NO: 1568377 - RNA, 19 nt, Artificial Sequence
  Description of Artificial Sequence: Synthetic oligonucleotide
auuacaggagugcccacau

SEQ ID NO: 1568378 - RNA, 19 nt, Artificial Sequence
  Description of Artificial Sequence: Synthetic oligonucleotide
uuaggagaggcuagcugaa

SEQ ID NO: 1568379 - RNA, 19 nt, Artificial Sequence
  Description of Artificial Sequence: Synthetic oligonucleotide
ugucaugugggagauugaa

SEQ ID NO: 1568380 - RNA, 19 nt, Artificial Sequence
  Description of Artificial Sequence: Synthetic oligonucleotide
gccauugucaucuauccga

SEQ ID NO: 1568381 - RNA, 19 nt, Artificial Sequence
  Description of Artificial Sequence: Synthetic oligonucleotide
aucaacuaguugguuauga

SEQ ID NO: 1568382 - RNA, 19 nt, Artificial Sequence
  Description of Artificial Sequence: Synthetic oligonucleotide
ugaaucucucuguguguug

SEQ ID NO: 1568383 - RNA, 19 nt, Artificial Sequence
  Description of Artificial Sequence: Synthetic oligonucleotide
cacacuacccucuauguua

SEQ ID NO: 1568384 - RNA, 19 nt, Artificial Sequence
  Description of Artificial Sequence: Synthetic oligonucleotide
agagcgucugaagacagcu

SEQ ID NO: 1568385 - RNA, 19 nt, Artificial Sequence
  Description of Artificial Sequence: Synthetic oligonucleotide
cauauuaauguaguggugu

SEQ ID NO: 1568386 - RNA, 19 nt, Artificial Sequence
  Description of Artificial Sequence: Synthetic oligonucleotide
gggaccgauaagcacagcc

SEQ ID NO: 1568387 - RNA, 19 nt, Artificial Sequence
  Description of Artificial Sequence: Synthetic oligonucleotide
uccucuuauucugaagagu

SEQ ID NO: 1568388 - RNA, 19 nt, Artificial Sequence
  Description of Artificial Sequence: Synthetic oligonucleotide
cagaucgucugcagggacc

SEQ ID NO: 1568389 - RNA, 19 nt, Artificial Sequence
  Description of Artificial Sequence: Synthetic oligonucleotide
cauccacuagaaguuuucg

SEQ ID NO: 1568390 - RNA, 19 nt, Artificial Sequence
  Description of Artificial Sequence: Synthetic oligonucleotide
ugaauacaagagcgucuga

SEQ ID NO: 1568391 - RNA, 19 nt, Artificial Sequence
  Description of Artificial Sequence: Synthetic oligonucleotide
ggagaggcuagcugaaaag

SEQ ID NO: 1568392 - RNA, 19 nt, Artificial Sequence
  Description of Artificial Sequence: Synthetic oligonucleotide
acaagagcgucugaagaca

SEQ ID NO: 1568393 - RNA, 19 nt, Artificial Sequence
  Description of Artificial Sequence: Synthetic oligonucleotide
agcccuuuugaaauaaggu

SEQ ID NO: 1568394 - RNA, 19 nt, Artificial Sequence
  Description of Artificial Sequence: Synthetic oligonucleotide
ucggcaaguucauauuaau

SEQ ID NO: 1568395 - RNA, 19 nt, Artificial Sequence
  Description of Artificial Sequence: Synthetic oligonucleotide
uuugugaauuuucgcuuuu

SEQ ID NO: 1568396 - RNA, 19 nt, Artificial Sequence
  Description of Artificial Sequence: Synthetic oligonucleotide
ugguuuaguaccagcugua

SEQ ID NO: 1568397 - RNA, 19 nt, Artificial Sequence
  Description of Artificial Sequence: Synthetic oligonucleotide
cacaaauguugcugguuug

SEQ ID NO: 1568398 - RNA, 19 nt, Artificial Sequence
  Description of Artificial Sequence: Synthetic oligonucleotide
auguuagguggacucagau

SEQ ID NO: 1568399 - RNA, 19 nt, Artificial Sequence
  Description of Artificial Sequence: Synthetic oligonucleotide
gauaagcguagaugcccug

SEQ ID NO: 1568400 - RNA, 19 nt, Artificial Sequence
  Description of Artificial Sequence: Synthetic oligonucleotide
acuacccucuauguuaggu

SEQ ID NO: 1568401 - RNA, 19 nt, Artificial Sequence
  Description of Artificial Sequence: Synthetic oligonucleotide
gcccuuuugaaauaagguc

SEQ ID NO: 1568402 - RNA, 19 nt, Artificial Sequence
  Description of Artificial Sequence: Synthetic oligonucleotide
guuacagcucccagagagg

SEQ ID NO: 1568403 - RNA, 19 nt, Artificial Sequence
  Description of Artificial Sequence: Synthetic oligonucleotide
caguugguuuaguaccagc

SEQ ID NO: 1568404 - RNA, 19 nt, Artificial Sequence
  Description of Artificial Sequence: Synthetic oligonucleotide
agaaguuuucggacuuuuc

SEQ ID NO: 1568405 - RNA, 19 nt, Artificial Sequence
  Description of Artificial Sequence: Synthetic oligonucleotide
acaauagauguuccuuuua

SEQ ID NO: 1568406 - RNA, 19 nt, Artificial Sequence
  Description of Artificial Sequence: Synthetic oligonucleotide
gauggauauaaaacuguua

SEQ ID NO: 1568407 - RNA, 19 nt, Artificial Sequence
  Description of Artificial Sequence: Synthetic oligonucleotide
gaucggcaaguucauauua

SEQ ID NO: 1568408 - RNA, 19 nt, Artificial Sequence
  Description of Artificial Sequence: Synthetic oligonucleotide
agauugaagaggucaugua

SEQ ID NO: 1568409 - RNA, 19 nt, Artificial Sequence
  Description of Artificial Sequence: Synthetic oligonucleotide
aaguuauaguaugcauccu

SEQ ID NO: 1568410 - RNA, 19 nt, Artificial Sequence
  Description of Artificial Sequence: Synthetic oligonucleotide
gaggcuagcugaaaagcca

SEQ ID NO: 1568411 - RNA, 19 nt, Artificial Sequence
  Description of Artificial Sequence: Synthetic oligonucleotide
aucccugaugucugaacca

SEQ ID NO: 1568412 - RNA, 19 nt, Artificial Sequence
  Description of Artificial Sequence: Synthetic oligonucleotide
uuaguaccagcuguacuuc

SEQ ID NO: 1568413 - RNA, 19 nt, Artificial Sequence
  Description of Artificial Sequence: Synthetic oligonucleotide
agaucaaagccuccucuua

SEQ ID NO: 1568414 - RNA, 19 nt, Artificial Sequence
  Description of Artificial Sequence: Synthetic oligonucleotide
aagccagaucaaagccucc

SEQ ID NO: 1568415 - RNA, 19 nt, Artificial Sequence
  Description of Artificial Sequence: Synthetic oligonucleotide
ugguuaugaacugcaucca

SEQ ID NO: 1568416 - RNA, 19 nt, Artificial Sequence
  Description of Artificial Sequence: Synthetic oligonucleotide
auugccgagaucccacaaa

SEQ ID NO: 1568417 - RNA, 19 nt, Artificial Sequence
  Description of Artificial Sequence: Synthetic oligonucleotide
ugcccuggaccacacacau

SEQ ID NO: 1568418 - RNA, 19 nt, Artificial Sequence
  Description of Artificial Sequence: Synthetic oligonucleotide
ucacacuacccucuauguu

SEQ ID NO: 1568419 - RNA, 19 nt, Artificial Sequence
  Description of Artificial Sequence: Synthetic oligonucleotide
cacaucaacuaguugguua

SEQ ID NO: 1568420 - RNA, 19 nt, Artificial Sequence
  Description of Artificial Sequence: Synthetic oligonucleotide
gcaauaggaagugcagugg

SEQ ID NO: 1568421 - RNA, 19 nt, Artificial Sequence
  Description of Artificial Sequence: Synthetic oligonucleotide
auccuuguuccaaaagucu

SEQ ID NO: 1568422 - RNA, 19 nt, Artificial Sequence
  Description of Artificial Sequence: Synthetic oligonucleotide
uguuuacuauuuguugcau

SEQ ID NO: 1568423 - RNA, 19 nt, Artificial Sequence
  Description of Artificial Sequence: Synthetic oligonucleotide
auguaucucaaaaugcauu

SEQ ID NO: 1568424 - RNA, 19 nt, Artificial Sequence
  Description of Artificial Sequence: Synthetic oligonucleotide
uggguuccuaaugcagccg

SEQ ID NO: 1568425 - RNA, 19 nt, Artificial Sequence
  Description of Artificial Sequence: Synthetic oligonucleotide
cauguaacuccuuucuaua

SEQ ID NO: 1568426 - RNA, 19 nt, Artificial Sequence
  Description of Artificial Sequence: Synthetic oligonucleotide
cauaaguuauaguaugcau

SEQ ID NO: 1568427 - RNA, 19 nt, Artificial Sequence
  Description of Artificial Sequence: Synthetic oligonucleotide
uggcaauaggaagugcagu

SEQ ID NO: 1568428 - RNA, 19 nt, Artificial Sequence
  Description of Artificial Sequence: Synthetic oligonucleotide
ugccgagaucccacaaaug

SEQ ID NO: 1568429 - RNA, 19 nt, Artificial Sequence
  Description of Artificial Sequence: Synthetic oligonucleotide
gauccugcauauagugaug

SEQ ID NO: 1568430 - RNA, 19 nt, Artificial Sequence
  Description of Artificial Sequence: Synthetic oligonucleotide
gacuccuaguauuguguga

SEQ ID NO: 1568431 - RNA, 19 nt, Artificial Sequence
  Description of Artificial Sequence: Synthetic oligonucleotide
gaaccaugagcagaucguc

SEQ ID NO: 1568432 - RNA, 19 nt, Artificial Sequence
  Description of Artificial Sequence: Synthetic oligonucleotide
aauggaccucucuguguau

SEQ ID NO: 1568433 - RNA, 19 nt, Artificial Sequence
  Description of Artificial Sequence: Synthetic oligonucleotide
agaggucauuucugaaccu

SEQ ID NO: 1568434 - RNA, 19 nt, Artificial Sequence
  Description of Artificial Sequence: Synthetic oligonucleotide
cuaguauugugugagccaa

SEQ ID NO: 1568435 - RNA, 19 nt, Artificial Sequence
  Description of Artificial Sequence: Synthetic oligonucleotide
aguauugugugagccaaua

SEQ ID NO: 1568436 - RNA, 19 nt, Artificial Sequence
  Description of Artificial Sequence: Synthetic oligonucleotide
cuacaacuacaucgaucgg

SEQ ID NO: 1568437 - RNA, 19 nt, Artificial Sequence
  Description of Artificial Sequence: Synthetic oligonucleotide
ggcauaaguuauaguaugc

SEQ ID NO: 1568438 - RNA, 19 nt, Artificial Sequence
  Description of Artificial Sequence: Synthetic oligonucleotide
acacuacccucuauguuag

SEQ ID NO: 1568439 - RNA, 19 nt, Artificial Sequence
  Description of Artificial Sequence: Synthetic oligonucleotide
agguugauauuuccagcau

SEQ ID NO: 1568440 - RNA, 19 nt, Artificial Sequence
  Description of Artificial Sequence: Synthetic oligonucleotide
guaucccugaugucugaac

SEQ ID NO: 1568441 - RNA, 19 nt, Artificial Sequence
  Description of Artificial Sequence: Synthetic oligonucleotide
gguuaugaacugcauccac

SEQ ID NO: 1568442 - RNA, 19 nt, Artificial Sequence
  Description of Artificial Sequence: Synthetic oligonucleotide
cugauggauauaaaacugu

SEQ ID NO: 1568443 - RNA, 19 nt, Artificial Sequence
  Description of Artificial Sequence: Synthetic oligonucleotide
aucaguugguuuaguacca

SEQ ID NO: 1568444 - RNA, 19 nt, Artificial Sequence
  Description of Artificial Sequence: Synthetic oligonucleotide
acgcauuagcccuuuugaa

SEQ ID NO: 1568445 - RNA, 19 nt, Artificial Sequence
  Description of Artificial Sequence: Synthetic oligonucleotide
uucggacuuuuccccacgu

SEQ ID NO: 1568446 - RNA, 19 nt, Artificial Sequence
  Description of Artificial Sequence: Synthetic oligonucleotide
gggaccacaauagauguuc

SEQ ID NO: 1568447 - RNA, 19 nt, Artificial Sequence
  Description of Artificial Sequence: Synthetic oligonucleotide
ccaaucauuacaggagugc

SEQ ID NO: 1568448 - RNA, 19 nt, Artificial Sequence
  Description of Artificial Sequence: Synthetic oligonucleotide
aauuccugauggauauaaa

SEQ ID NO: 1568449 - RNA, 19 nt, Artificial Sequence
  Description of Artificial Sequence: Synthetic oligonucleotide
guagugguguucuucauuu

SEQ ID NO: 1568450 - RNA, 19 nt, Artificial Sequence
  Description of Artificial Sequence: Synthetic oligonucleotide
agccgucuuuauaugguuc

SEQ ID NO: 1568451 - RNA, 19 nt, Artificial Sequence
  Description of Artificial Sequence: Synthetic oligonucleotide
aggcuagcugaaaagccag

SEQ ID NO: 1568452 - RNA, 19 nt, Artificial Sequence
  Description of Artificial Sequence: Synthetic oligonucleotide
caccuguauaauguggguc

SEQ ID NO: 1568453 - RNA, 19 nt, Artificial Sequence
  Description of Artificial Sequence: Synthetic oligonucleotide
aggucauuucugaaccuug

SEQ ID NO: 1568454 - RNA, 19 nt, Artificial Sequence
  Description of Artificial Sequence: Synthetic oligonucleotide
uagaaguuuucggacuuuu

SEQ ID NO: 1568455 - RNA, 19 nt, Artificial Sequence
  Description of Artificial Sequence: Synthetic oligonucleotide
cuguauaaugugggucuag

SEQ ID NO: 1568456 - RNA, 19 nt, Artificial Sequence
  Description of Artificial Sequence: Synthetic oligonucleotide
aguucccguccuugagagg

SEQ ID NO: 1568457 - RNA, 19 nt, Artificial Sequence
  Description of Artificial Sequence: Synthetic oligonucleotide
uuaauguagugguguucuu

SEQ ID NO: 1568458 - RNA, 19 nt, Artificial Sequence
  Description of Artificial Sequence: Synthetic oligonucleotide
gucaucuauccgauccugc

SEQ ID NO: 1568459 - RNA, 19 nt, Artificial Sequence
  Description of Artificial Sequence: Synthetic oligonucleotide
ggaccgauaagcacagccc

SEQ ID NO: 1568460 - RNA, 19 nt, Artificial Sequence
  Description of Artificial Sequence: Synthetic oligonucleotide
ccacuagaaguuuucggac

SEQ ID NO: 1568461 - RNA, 19 nt, Artificial Sequence
  Description of Artificial Sequence: Synthetic oligonucleotide
gugggucuagaauuagaaa

SEQ ID NO: 1568462 - RNA, 19 nt, Artificial Sequence
  Description of Artificial Sequence: Synthetic oligonucleotide
cccuggaccacacacauca

SEQ ID NO: 1568463 - RNA, 19 nt, Artificial Sequence
  Description of Artificial Sequence: Synthetic oligonucleotide
ucccacaaauguugcuggu

SEQ ID NO: 1568464 - RNA, 19 nt, Artificial Sequence
  Description of Artificial Sequence: Synthetic oligonucleotide
uuagagcauucuugauaaa

SEQ ID NO: 1568465 - RNA, 19 nt, Artificial Sequence
  Description of Artificial Sequence: Synthetic oligonucleotide
acacaucacacuacccucu

SEQ ID NO: 1568466 - RNA, 19 nt, Artificial Sequence
  Description of Artificial Sequence: Synthetic oligonucleotide
uguaucccugaugucugaa

SEQ ID NO: 1568467 - RNA, 19 nt, Artificial Sequence
  Description of Artificial Sequence: Synthetic oligonucleotide
guucagggaccacaauaga

SEQ ID NO: 1568468 - RNA, 19 nt, Artificial Sequence
  Description of Artificial Sequence: Synthetic oligonucleotide
ggucauguaacuccuuucu

SEQ ID NO: 1568469 - RNA, 19 nt, Artificial Sequence
  Description of Artificial Sequence: Synthetic oligonucleotide
uaguauugugugagccaau

SEQ ID NO: 1568470 - RNA, 19 nt, Artificial Sequence
  Description of Artificial Sequence: Synthetic oligonucleotide
ucccugaugucugaaccau

SEQ ID NO: 1568471 - RNA, 19 nt, Artificial Sequence
  Description of Artificial Sequence: Synthetic oligonucleotide
cucccagagagguugauau

SEQ ID NO: 1568472 - RNA, 19 nt, Artificial Sequence
  Description of Artificial Sequence: Synthetic oligonucleotide
cuguguaucccugaugucu

SEQ ID NO: 1568473 - RNA, 19 nt, Artificial Sequence
  Description of Artificial Sequence: Synthetic oligonucleotide
aagauaacuugcagaucuu

SEQ ID NO: 1568474 - RNA, 19 nt, Artificial Sequence
  Description of Artificial Sequence: Synthetic oligonucleotide
uagaugcccuggaccacac

SEQ ID NO: 1568475 - RNA, 19 nt, Artificial Sequence
  Description of Artificial Sequence: Synthetic oligonucleotide
auucuugaaguuacaccaa

SEQ ID NO: 1568476 - RNA, 19 nt, Artificial Sequence
  Description of Artificial Sequence: Synthetic oligonucleotide
guucccguccuugagaggu

SEQ ID NO: 1568477 - RNA, 19 nt, Artificial Sequence
  Description of Artificial Sequence: Synthetic oligonucleotide
cagcaugagaucuauguuu

SEQ ID NO: 1568478 - RNA, 19 nt, Artificial Sequence
  Description of Artificial Sequence: Synthetic oligonucleotide
agugguucagggaccacaa

SEQ ID NO: 1568479 - RNA, 19 nt, Artificial Sequence
  Description of Artificial Sequence: Synthetic oligonucleotide
cauugucaucuauccgauc

SEQ ID NO: 1568480 - RNA, 19 nt, Artificial Sequence
  Description of Artificial Sequence: Synthetic oligonucleotide
aucggcaaguucauauuaa

SEQ ID NO: 1568481 - RNA, 19 nt, Artificial Sequence
  Description of Artificial Sequence: Synthetic oligonucleotide
caugagaucuauguuuacu

SEQ ID NO: 1568482 - RNA, 19 nt, Artificial Sequence
  Description of Artificial Sequence: Synthetic oligonucleotide
auaagcauguggguuccua

SEQ ID NO: 1568483 - RNA, 19 nt, Artificial Sequence
  Description of Artificial Sequence: Synthetic oligonucleotide
gccgagaucccacaaaugu

SEQ ID NO: 1568484 - RNA, 19 nt, Artificial Sequence
  Description of Artificial Sequence: Synthetic oligonucleotide
cacuagaaguuuucggacu

SEQ ID NO: 1568485 - RNA, 19 nt, Artificial Sequence
  Description of Artificial Sequence: Synthetic oligonucleotide
gcauuagcccuuuugaaau

SEQ ID NO: 1568486 - RNA, 19 nt, Artificial Sequence
  Description of Artificial Sequence: Synthetic oligonucleotide
gucauguaacuccuuucua

SEQ ID NO: 1568487 - RNA, 19 nt, Artificial Sequence
  Description of Artificial Sequence: Synthetic oligonucleotide
gguagucaggucauucaac

SEQ ID NO: 1568488 - RNA, 19 nt, Artificial Sequence
  Description of Artificial Sequence: Synthetic oligonucleotide
cagggaccacaauagaugu

SEQ ID NO: 1568489 - RNA, 19 nt, Artificial Sequence
  Description of Artificial Sequence: Synthetic oligonucleotide
auguagugguguucuucau

SEQ ID NO: 1568490 - RNA, 19 nt, Artificial Sequence
  Description of Artificial Sequence: Synthetic oligonucleotide
ggagauugaagaggucaug

SEQ ID NO: 1568491 - RNA, 19 nt, Artificial Sequence
  Description of Artificial Sequence: Synthetic oligonucleotide
gccacagauacauggagcu

SEQ ID NO: 1568492 - RNA, 19 nt, Artificial Sequence
  Description of Artificial Sequence: Synthetic oligonucleotide
gguuuaguaccagcuguac

SEQ ID NO: 1568493 - RNA, 19 nt, Artificial Sequence
  Description of Artificial Sequence: Synthetic oligonucleotide
ggccacagauacauggagc

SEQ ID NO: 1568494 - RNA, 19 nt, Artificial Sequence
  Description of Artificial Sequence: Synthetic oligonucleotide
cucagauaagcaugugggu

SEQ ID NO: 1568495 - RNA, 19 nt, Artificial Sequence
  Description of Artificial Sequence: Synthetic oligonucleotide
augcauccuuguuccaaaa

SEQ ID NO: 1568496 - RNA, 19 nt, Artificial Sequence
  Description of Artificial Sequence: Synthetic oligonucleotide
aguaccagcuguacuucaa

SEQ ID NO: 1568497 - RNA, 19 nt, Artificial Sequence
  Description of Artificial Sequence: Synthetic oligonucleotide
caucaacuaguugguuaug

SEQ ID NO: 1568498 - RNA, 19 nt, Artificial Sequence
  Description of Artificial Sequence: Synthetic oligonucleotide
cuuacagguggagcuguca

SEQ ID NO: 1568499 - RNA, 19 nt, Artificial Sequence
  Description of Artificial Sequence: Synthetic oligonucleotide
caguauucuugaaguuaca

SEQ ID NO: 1568500 - RNA, 19 nt, Artificial Sequence
  Description of Artificial Sequence: Synthetic oligonucleotide
ccuaguauugugugagcca

SEQ ID NO: 1568501 - RNA, 19 nt, Artificial Sequence
  Description of Artificial Sequence: Synthetic oligonucleotide
cccaaucauuacaggagug

SEQ ID NO: 1568502 - RNA, 19 nt, Artificial Sequence
  Description of Artificial Sequence: Synthetic oligonucleotide
aacaccugucuuagagcau

SEQ ID NO: 1568503 - RNA, 19 nt, Artificial Sequence
  Description of Artificial Sequence: Synthetic oligonucleotide
augugacuccuaguauugu

SEQ ID NO: 1568504 - RNA, 19 nt, Artificial Sequence
  Description of Artificial Sequence: Synthetic oligonucleotide
cacuacccucuauguuagg

SEQ ID NO: 1568505 - RNA, 19 nt, Artificial Sequence
  Description of Artificial Sequence: Synthetic oligonucleotide
ucccguccuugagagguca

SEQ ID NO: 1568506 - RNA, 19 nt, Artificial Sequence
  Description of Artificial Sequence: Synthetic oligonucleotide
accgauaagcacagcccca

SEQ ID NO: 1568507 - RNA, 19 nt, Artificial Sequence
  Description of Artificial Sequence: Synthetic oligonucleotide
ccagcuguacuucaauaga

SEQ ID NO: 1568508 - RNA, 19 nt, Artificial Sequence
  Description of Artificial Sequence: Synthetic oligonucleotide
cagcucgccaguguuugug

SEQ ID NO: 1568509 - RNA, 19 nt, Artificial Sequence
  Description of Artificial Sequence: Synthetic oligonucleotide
auccgauccugcauauagu

SEQ ID NO: 1568510 - RNA, 19 nt, Artificial Sequence
  Description of Artificial Sequence: Synthetic oligonucleotide
ucccagagagguugauauu

SEQ ID NO: 1568511 - RNA, 19 nt, Artificial Sequence
  Description of Artificial Sequence: Synthetic oligonucleotide
uuacaccaaucaguugguu

SEQ ID NO: 1568512 - RNA, 19 nt, Artificial Sequence
  Description of Artificial Sequence: Synthetic oligonucleotide
gucugaagacagcuuggua

SEQ ID NO: 1568513 - RNA, 19 nt, Artificial Sequence
  Description of Artificial Sequence: Synthetic oligonucleotide
ggaccacaauagauguucc

SEQ ID NO: 1568514 - RNA, 19 nt, Artificial Sequence
  Description of Artificial Sequence: Synthetic oligonucleotide
gcgucugaagacagcuugg

SEQ ID NO: 1568515 - RNA, 19 nt, Artificial Sequence
  Description of Artificial Sequence: Synthetic oligonucleotide
ucugaaccaugagcagauc

SEQ ID NO: 1568516 - RNA, 19 nt, Artificial Sequence
  Description of Artificial Sequence: Synthetic oligonucleotide
accaaucaguugguuuagu

SEQ ID NO: 1568517 - RNA, 19 nt, Artificial Sequence
  Description of Artificial Sequence: Synthetic oligonucleotide
accugucuuagagcauucu

SEQ ID NO: 1568518 - RNA, 19 nt, Artificial Sequence
  Description of Artificial Sequence: Synthetic oligonucleotide
cacaauagauguuccuuuu

SEQ ID NO: 1568519 - RNA, 19 nt, Artificial Sequence
  Description of Artificial Sequence: Synthetic oligonucleotide
uucccguccuugagagguc

SEQ ID NO: 1568520 - RNA, 19 nt, Artificial Sequence
  Description of Artificial Sequence: Synthetic oligonucleotide
agcuugguagucaggucau

SEQ ID NO: 1568521 - RNA, 19 nt, Artificial Sequence
  Description of Artificial Sequence: Synthetic oligonucleotide
guguaucccugaugucuga

SEQ ID NO: 1568522 - RNA, 19 nt, Artificial Sequence
  Description of Artificial Sequence: Synthetic oligonucleotide
gcagaucgucugcagggac

SEQ ID NO: 1568523 - RNA, 19 nt, Artificial Sequence
  Description of Artificial Sequence: Synthetic oligonucleotide
ccgauaagcacagccccag

SEQ ID NO: 1568524 - RNA, 19 nt, Artificial Sequence
  Description of Artificial Sequence: Synthetic oligonucleotide
agggaccgauaagcacagc

SEQ ID NO: 1568525 - RNA, 19 nt, Artificial Sequence
  Description of Artificial Sequence: Synthetic oligonucleotide
gaggucauuucugaaccuu

SEQ ID NO: 1568526 - RNA, 19 nt, Artificial Sequence
  Description of Artificial Sequence: Synthetic oligonucleotide
ggaccucucuguguauccc

SEQ ID NO: 1568527 - RNA, 19 nt, Artificial Sequence
  Description of Artificial Sequence: Synthetic oligonucleotide
acccucuauguuaggugga

SEQ ID NO: 1568528 - RNA, 19 nt, Artificial Sequence
  Description of Artificial Sequence: Synthetic oligonucleotide
cgcauuagcccuuuugaaa

SEQ ID NO: 1568529 - RNA, 19 nt, Artificial Sequence
  Description of Artificial Sequence: Synthetic oligonucleotide
cagaucaaagccuccucuu

SEQ ID NO: 1568530 - RNA, 19 nt, Artificial Sequence
  Description of Artificial Sequence: Synthetic oligonucleotide
caucuauccgauccugcau

SEQ ID NO: 1568531 - RNA, 19 nt, Artificial Sequence
  Description of Artificial Sequence: Synthetic oligonucleotide
caacuacaucgaucggcaa

SEQ ID NO: 1568532 - RNA, 19 nt, Artificial Sequence
  Description of Artificial Sequence: Synthetic oligonucleotide
cuguugggccacagauaca

SEQ ID NO: 1568533 - RNA, 19 nt, Artificial Sequence
  Description of Artificial Sequence: Synthetic oligonucleotide
ggguuccuaaugcagccgu

SEQ ID NO: 1568534 - RNA, 19 nt, Artificial Sequence
  Description of Artificial Sequence: Synthetic oligonucleotide
agucagcucgccaguguuu

SEQ ID NO: 1568535 - RNA, 19 nt, Artificial Sequence
  Description of Artificial Sequence: Synthetic oligonucleotide
ccgauccugcauauaguga

SEQ ID NO: 1568536 - RNA, 19 nt, Artificial Sequence
  Description of Artificial Sequence: Synthetic oligonucleotide
ugguacgcauuagcccuuu

SEQ ID NO: 1568537 - RNA, 19 nt, Artificial Sequence
  Description of Artificial Sequence: Synthetic oligonucleotide
cccugaugucugaaccaug

SEQ ID NO: 1568538 - RNA, 19 nt, Artificial Sequence
  Description of Artificial Sequence: Synthetic oligonucleotide
aucgaucggcaaguucaua

SEQ ID NO: 1568539 - RNA, 19 nt, Artificial Sequence
  Description of Artificial Sequence: Synthetic oligonucleotide
cgauccugcauauagugau

SEQ ID NO: 1568540 - RNA, 19 nt, Artificial Sequence
  Description of Artificial Sequence: Synthetic oligonucleotide
ggaccacacacaucacacu

SEQ ID NO: 1568541 - RNA, 19 nt, Artificial Sequence
  Description of Artificial Sequence: Synthetic oligonucleotide
ccaugugacuccuaguauu

SEQ ID NO: 1568542 - RNA, 19 nt, Artificial Sequence
  Description of Artificial Sequence: Synthetic oligonucleotide
gguuccuaaugcagccguc

SEQ ID NO: 1568543 - RNA, 19 nt, Artificial Sequence
  Description of Artificial Sequence: Synthetic oligonucleotide
agggaccacaauagauguu

SEQ ID NO: 1568544 - RNA, 19 nt, Artificial Sequence
  Description of Artificial Sequence: Synthetic oligonucleotide
caucgaucggcaaguucau

SEQ ID NO: 1568545 - RNA, 19 nt, Artificial Sequence
  Description of Artificial Sequence: Synthetic oligonucleotide
cgucuuuauaugguucauc

SEQ ID NO: 1568546 - RNA, 19 nt, Artificial Sequence
  Description of Artificial Sequence: Synthetic oligonucleotide
gcauuuggucguugaggaa

SEQ ID NO: 1568547 - RNA, 19 nt, Artificial Sequence
  Description of Artificial Sequence: Synthetic oligonucleotide
agaggucauguaacuccuu

SEQ ID NO: 1568548 - RNA, 19 nt, Artificial Sequence
  Description of Artificial Sequence: Synthetic oligonucleotide
gcaccuguauaaugugggu

SEQ ID NO: 1568549 - RNA, 19 nt, Artificial Sequence
  Description of Artificial Sequence: Synthetic oligonucleotide
aucugcccuguaguuucau

SEQ ID NO: 1568550 - RNA, 19 nt, Artificial Sequence
  Description of Artificial Sequence: Synthetic oligonucleotide
guuggccaguucccguccu

SEQ ID NO: 1568551 - RNA, 19 nt, Artificial Sequence
  Description of Artificial Sequence: Synthetic oligonucleotide
ccacaaauguugcugguuu

SEQ ID NO: 1568552 - RNA, 19 nt, Artificial Sequence
  Description of Artificial Sequence: Synthetic oligonucleotide
gcagccgucuuuauauggu

SEQ ID NO: 1568553 - RNA, 19 nt, Artificial Sequence
  Description of Artificial Sequence: Synthetic oligonucleotide
ccccaaucauuacaggagu

SEQ ID NO: 1568554 - RNA, 19 nt, Artificial Sequence
  Description of Artificial Sequence: Synthetic oligonucleotide
gaucgucugcagggaccga

SEQ ID NO: 1568555 - RNA, 19 nt, Artificial Sequence
  Description of Artificial Sequence: Synthetic oligonucleotide
cagucagcucgccaguguu

SEQ ID NO: 1568556 - RNA, 19 nt, Artificial Sequence
  Description of Artificial Sequence: Synthetic oligonucleotide
ggaugaggugcacuauguu

SEQ ID NO: 1568557 - RNA, 19 nt, Artificial Sequence
  Description of Artificial Sequence: Synthetic oligonucleotide
cuauccgauccugcauaua

SEQ ID NO: 1568558 - RNA, 19 nt, Artificial Sequence
  Description of Artificial Sequence: Synthetic oligonucleotide
ccauugccgagaucccaca

SEQ ID NO: 1568559 - RNA, 19 nt, Artificial Sequence
  Description of Artificial Sequence: Synthetic oligonucleotide
ccauugucaucuauccgau

SEQ ID NO: 1568560 - RNA, 19 nt, Artificial Sequence
  Description of Artificial Sequence: Synthetic oligonucleotide
cuagaaguuuucggacuuu

SEQ ID NO: 1568561 - RNA, 19 nt, Artificial Sequence
  Description of Artificial Sequence: Synthetic oligonucleotide
ccugucuuagagcauucuu

SEQ ID NO: 1568562 - RNA, 19 nt, Artificial Sequence
  Description of Artificial Sequence: Synthetic oligonucleotide
gcucccagagagguugaua

SEQ ID NO: 1568563 - RNA, 19 nt, Artificial Sequence
  Description of Artificial Sequence: Synthetic oligonucleotide
ccgagaucccacaaauguu

SEQ ID NO: 1568564 - RNA, 19 nt, Artificial Sequence
  Description of Artificial Sequence: Synthetic oligonucleotide
ccagcccuuuuccaagaua

SEQ ID NO: 1568565 - RNA, 19 nt, Artificial Sequence
  Description of Artificial Sequence: Synthetic oligonucleotide
ccuguauaaugugggucua

SEQ ID NO: 1568566 - RNA, 19 nt, Artificial Sequence
  Description of Artificial Sequence: Synthetic oligonucleotide
cccuguaguuucauuccau

SEQ ID NO: 1568567 - RNA, 19 nt, Artificial Sequence
  Description of Artificial Sequence: Synthetic oligonucleotide
gugguacgcauuagcccuu

SEQ ID NO: 1568568 - RNA, 19 nt, Artificial Sequence
  Description of Artificial Sequence: Synthetic oligonucleotide
ccucuauguuagguggacu

SEQ ID NO: 1568569 - RNA, 19 nt, Artificial Sequence
  Description of Artificial Sequence: Synthetic oligonucleotide
gguacgcauuagcccuuuu

SEQ ID NO: 1568570 - RNA, 19 nt, Artificial Sequence
  Description of Artificial Sequence: Synthetic oligonucleotide
ccgucuuuauaugguucau

SEQ ID NO: 1568571 - RNA, 19 nt, Artificial Sequence
  Description of Artificial Sequence: Synthetic oligonucleotide
cccguccuugagaggucau

SEQ ID NO: 1568572 - RNA, 19 nt, Artificial Sequence
  Description of Artificial Sequence: Synthetic oligonucleotide
agaaucuacauuuugaguc

SEQ ID NO: 1568573 - RNA, 19 nt, Artificial Sequence
  Description of Artificial Sequence: Synthetic oligonucleotide
aaagagauaggcaugugac

SEQ ID NO: 1568574 - RNA, 19 nt, Artificial Sequence
  Description of Artificial Sequence: Synthetic oligonucleotide
aagagauaggcaugugacc

SEQ ID NO: 1568575 - RNA, 19 nt, Artificial Sequence
  Description of Artificial Sequence: Synthetic oligonucleotide
agaccauucuauuaguuuc

SEQ ID NO: 1568576 - RNA, 19 nt, Artificial Sequence
  Description of Artificial Sequence: Synthetic oligonucleotide
auccggguuaacuucaggc

SEQ ID NO: 1568577 - RNA, 19 nt, Artificial Sequence
  Description of Artificial Sequence: Synthetic oligonucleotide
gauccgauuucuucaaggg

SEQ ID NO: 1568578 - RNA, 19 nt, Artificial Sequence
  Description of Artificial Sequence: Synthetic oligonucleotide
aaccagaaagcaagaaucc

SEQ ID NO: 1568579 - RNA, 19 nt, Artificial Sequence
  Description of Artificial Sequence: Synthetic oligonucleotide
aaggguuccccugugagac

SEQ ID NO: 1568580 - RNA, 19 nt, Artificial Sequence
  Description of Artificial Sequence: Synthetic oligonucleotide
ggaggaacuaggcagaacg

SEQ ID NO: 1568581 - RNA, 19 nt, Artificial Sequence
  Description of Artificial Sequence: Synthetic oligonucleotide
uggagaaucuacauuuuga

SEQ ID NO: 1568582 - RNA, 19 nt, Artificial Sequence
  Description of Artificial Sequence: Synthetic oligonucleotide
gauccuuuaagccaucaca

SEQ ID NO: 1568583 - RNA, 19 nt, Artificial Sequence
  Description of Artificial Sequence: Synthetic oligonucleotide
aaagucgaggcccaagccu

SEQ ID NO: 1568584 - RNA, 19 nt, Artificial Sequence
  Description of Artificial Sequence: Synthetic oligonucleotide
gaaccagaaagcaagaauc

SEQ ID NO: 1568585 - RNA, 19 nt, Artificial Sequence
  Description of Artificial Sequence: Synthetic oligonucleotide
uuaagccaucacaaacucg

SEQ ID NO: 1568586 - RNA, 19 nt, Artificial Sequence
  Description of Artificial Sequence: Synthetic oligonucleotide
cuagauuccucucgggucg

SEQ ID NO: 1568587 - RNA, 19 nt, Artificial Sequence
  Description of Artificial Sequence: Synthetic oligonucleotide
agcuuuucauggcaagagc

SEQ ID NO: 1568588 - RNA, 19 nt, Artificial Sequence
  Description of Artificial Sequence: Synthetic oligonucleotide
uuuaagccaucacaaacuc

SEQ ID NO: 1568589 - RNA, 19 nt, Artificial Sequence
  Description of Artificial Sequence: Synthetic oligonucleotide
augugacagacccaagggg

SEQ ID NO: 1568590 - RNA, 19 nt, Artificial Sequence
  Description of Artificial Sequence: Synthetic oligonucleotide
gaaucuacauuuugaguca

SEQ ID NO: 1568591 - RNA, 19 nt, Artificial Sequence
  Description of Artificial Sequence: Synthetic oligonucleotide
ugaauauccggguuaacuu

SEQ ID NO: 1568592 - RNA, 19 nt, Artificial Sequence
  Description of Artificial Sequence: Synthetic oligonucleotide
agacaaucgggagaagagc

SEQ ID NO: 1568593 - RNA, 19 nt, Artificial Sequence
  Description of Artificial Sequence: Synthetic oligonucleotide
cauauuuggagcuggagaa

SEQ ID NO: 1568594 - RNA, 19 nt, Artificial Sequence
  Description of Artificial Sequence: Synthetic oligonucleotide
aguuucucagggugggugg

SEQ ID NO: 1568595 - RNA, 19 nt, Artificial Sequence
  Description of Artificial Sequence: Synthetic oligonucleotide
acucggacugaauauccgg

SEQ ID NO: 1568596 - RNA, 19 nt, Artificial Sequence
  Description of Artificial Sequence: Synthetic oligonucleotide
gaauauccggguuaacuuc

SEQ ID NO: 1568597 - RNA, 19 nt, Artificial Sequence
  Description of Artificial Sequence: Synthetic oligonucleotide
ucggguuaugggaauuggg

SEQ ID NO: 1568598 - RNA, 19 nt, Artificial Sequence
  Description of Artificial Sequence: Synthetic oligonucleotide
aggauggcgaccugggcac

SEQ ID NO: 1568599 - RNA, 19 nt, Artificial Sequence
  Description of Artificial Sequence: Synthetic oligonucleotide
uagugcuucuucuuggaga

SEQ ID NO: 1568600 - RNA, 19 nt, Artificial Sequence
  Description of Artificial Sequence: Synthetic oligonucleotide
ucaguguucuccauccaac

SEQ ID NO: 1568601 - RNA, 19 nt, Artificial Sequence
  Description of Artificial Sequence: Synthetic oligonucleotide
cagacaaucgggagaagag

SEQ ID NO: 1568602 - RNA, 19 nt, Artificial Sequence
  Description of Artificial Sequence: Synthetic oligonucleotide
uuagcaaccgaaccagaaa

SEQ ID NO: 1568603 - RNA, 19 nt, Artificial Sequence
  Description of Artificial Sequence: Synthetic oligonucleotide
guuaugggaauuggggugg

SEQ ID NO: 1568604 - RNA, 19 nt, Artificial Sequence
  Description of Artificial Sequence: Synthetic oligonucleotide
uugccuuagcaacagccgc

SEQ ID NO: 1568605 - RNA, 19 nt, Artificial Sequence
  Description of Artificial Sequence: Synthetic oligonucleotide
acaaacucggacugaauau

SEQ ID NO: 1568606 - RNA, 19 nt, Artificial Sequence
  Description of Artificial Sequence: Synthetic oligonucleotide
agcguuagcaaccgaacca

SEQ ID NO: 1568607 - RNA, 19 nt, Artificial Sequence
  Description of Artificial Sequence: Synthetic oligonucleotide
augggaauuguggacaaag

SEQ ID NO: 1568608 - RNA, 19 nt, Artificial Sequence
  Description of Artificial Sequence: Synthetic oligonucleotide
ucugcgauccgauuucuuc

SEQ ID NO: 1568609 - RNA, 19 nt, Artificial Sequence
  Description of Artificial Sequence: Synthetic oligonucleotide
uggaacaguucuuccuccg

SEQ ID NO: 1568610 - RNA, 19 nt, Artificial Sequence
  Description of Artificial Sequence: Synthetic oligonucleotide
aauauccggguuaacuuca

SEQ ID NO: 1568611 - RNA, 19 nt, Artificial Sequence
  Description of Artificial Sequence: Synthetic oligonucleotide
uggguugcgccccagggug

SEQ ID NO: 1568612 - RNA, 19 nt, Artificial Sequence
  Description of Artificial Sequence: Synthetic oligonucleotide
aaccugaaucggguuaugg

SEQ ID NO: 1568613 - RNA, 19 nt, Artificial Sequence
  Description of Artificial Sequence: Synthetic oligonucleotide
aaaaccugaaucggguuau

SEQ ID NO: 1568614 - RNA, 19 nt, Artificial Sequence
  Description of Artificial Sequence: Synthetic oligonucleotide
uccggguuaacuucaggcu

SEQ ID NO: 1568615 - RNA, 19 nt, Artificial Sequence
  Description of Artificial Sequence: Synthetic oligonucleotide
gguuaugggaauuggggug

SEQ ID NO: 1568616 - RNA, 19 nt, Artificial Sequence
  Description of Artificial Sequence: Synthetic oligonucleotide
uacauauuuggagcuggag

SEQ ID NO: 1568617 - RNA, 19 nt, Artificial Sequence
  Description of Artificial Sequence: Synthetic oligonucleotide
acccucaucauguguagug

SEQ ID NO: 1568618 - RNA, 19 nt, Artificial Sequence
  Description of Artificial Sequence: Synthetic oligonucleotide
uuagggaaggucccagcgu

SEQ ID NO: 1568619 - RNA, 19 nt, Artificial Sequence
  Description of Artificial Sequence: Synthetic oligonucleotide
uguggugucccacccgccc

SEQ ID NO: 1568620 - RNA, 19 nt, Artificial Sequence
  Description of Artificial Sequence: Synthetic oligonucleotide
uaggcagaacggaagggcu

SEQ ID NO: 1568621 - RNA, 19 nt, Artificial Sequence
  Description of Artificial Sequence: Synthetic oligonucleotide
cuaggcagaacggaagggc

SEQ ID NO: 1568622 - RNA, 19 nt, Artificial Sequence
  Description of Artificial Sequence: Synthetic oligonucleotide
uauccggguuaacuucagg

SEQ ID NO: 1568623 - RNA, 19 nt, Artificial Sequence
  Description of Artificial Sequence: Synthetic oligonucleotide
aacucggacugaauauccg

SEQ ID NO: 1568624 - RNA, 19 nt, Artificial Sequence
  Description of Artificial Sequence: Synthetic oligonucleotide
gugggauacacucauccca

SEQ ID NO: 1568625 - RNA, 19 nt, Artificial Sequence
  Description of Artificial Sequence: Synthetic oligonucleotide
aagggcggaggauggcgac

SEQ ID NO: 1568626 - RNA, 19 nt, Artificial Sequence
  Description of Artificial Sequence: Synthetic oligonucleotide
gauucuuggguugcgcccc

SEQ ID NO: 1568627 - RNA, 19 nt, Artificial Sequence
  Description of Artificial Sequence: Synthetic oligonucleotide
aaucggguuaugggaauug

SEQ ID NO: 1568628 - RNA, 19 nt, Artificial Sequence
  Description of Artificial Sequence: Synthetic oligonucleotide
cuuuaagccaucacaaacu

SEQ ID NO: 1568629 - RNA, 19 nt, Artificial Sequence
  Description of Artificial Sequence: Synthetic oligonucleotide
aagaauccgaguggcgcuc

SEQ ID NO: 1568630 - RNA, 19 nt, Artificial Sequence
  Description of Artificial Sequence: Synthetic oligonucleotide
uguagcgcugcagacugag

SEQ ID NO: 1568631 - RNA, 19 nt, Artificial Sequence
  Description of Artificial Sequence: Synthetic oligonucleotide
ggauacacucaucccaggg

SEQ ID NO: 1568632 - RNA, 19 nt, Artificial Sequence
  Description of Artificial Sequence: Synthetic oligonucleotide
aggcaugugaccagggacg

SEQ ID NO: 1568633 - RNA, 19 nt, Artificial Sequence
  Description of Artificial Sequence: Synthetic oligonucleotide
gcuaucccgguucacacgg

SEQ ID NO: 1568634 - RNA, 19 nt, Artificial Sequence
  Description of Artificial Sequence: Synthetic oligonucleotide
agcaaccgaaccagaaagc

SEQ ID NO: 1568635 - RNA, 19 nt, Artificial Sequence
  Description of Artificial Sequence: Synthetic oligonucleotide
agcugggcugcucagcguc

SEQ ID NO: 1568636 - RNA, 19 nt, Artificial Sequence
  Description of Artificial Sequence: Synthetic oligonucleotide
ugccuuagcaacagccgca

SEQ ID NO: 1568637 - RNA, 19 nt, Artificial Sequence
  Description of Artificial Sequence: Synthetic oligonucleotide
agauaggcaugugaccagg

SEQ ID NO: 1568638 - RNA, 19 nt, Artificial Sequence
  Description of Artificial Sequence: Synthetic oligonucleotide
ggagguaaccuccugcccc

SEQ ID NO: 1568639 - RNA, 19 nt, Artificial Sequence
  Description of Artificial Sequence: Synthetic oligonucleotide
agugcgugcgccccuuagg

SEQ ID NO: 1568640 - RNA, 19 nt, Artificial Sequence
  Description of Artificial Sequence: Synthetic oligonucleotide
ucccgguucacacggugcc

SEQ ID NO: 1568641 - RNA, 19 nt, Artificial Sequence
  Description of Artificial Sequence: Synthetic oligonucleotide
uccagugguagggaccgcg

SEQ ID NO: 1568642 - RNA, 19 nt, Artificial Sequence
  Description of Artificial Sequence: Synthetic oligonucleotide
uaucccgguucacacggug

SEQ ID NO: 1568643 - RNA, 19 nt, Artificial Sequence
  Description of Artificial Sequence: Synthetic oligonucleotide
agcuaucccgguucacacg

SEQ ID NO: 1568644 - RNA, 19 nt, Artificial Sequence
  Description of Artificial Sequence: Synthetic oligonucleotide
gguguagcgcugcagacug

SEQ ID NO: 1568645 - RNA, 19 nt, Artificial Sequence
  Description of Artificial Sequence: Synthetic oligonucleotide
gugccuagauuccucucgg

SEQ ID NO: 1568646 - RNA, 19 nt, Artificial Sequence
  Description of Artificial Sequence: Synthetic oligonucleotide
ucaucauguguagugcuuc

SEQ ID NO: 1568647 - RNA, 19 nt, Artificial Sequence
  Description of Artificial Sequence: Synthetic oligonucleotide
gugcgugcgccccuuaggg

SEQ ID NO: 1568648 - RNA, 19 nt, Artificial Sequence
  Description of Artificial Sequence: Synthetic oligonucleotide
ucgcgugggauucuugggu

SEQ ID NO: 1568649 - RNA, 19 nt, Artificial Sequence
  Description of Artificial Sequence: Synthetic oligonucleotide
ucggacugaauauccgggu

SEQ ID NO: 1568650 - RNA, 19 nt, Artificial Sequence
  Description of Artificial Sequence: Synthetic oligonucleotide
cauggcaagagcagggcca

SEQ ID NO: 1568651 - RNA, 19 nt, Artificial Sequence
  Description of Artificial Sequence: Synthetic oligonucleotide
gggugggauacacucaucc

SEQ ID NO: 1568652 - RNA, 19 nt, Artificial Sequence
  Description of Artificial Sequence: Synthetic oligonucleotide
ccuugccuuagcaacagcc

SEQ ID NO: 1568653 - RNA, 19 nt, Artificial Sequence
  Description of Artificial Sequence: Synthetic oligonucleotide
ucucgggucgugcuacccc

SEQ ID NO: 1568654 - RNA, 19 nt, Artificial Sequence
  Description of Artificial Sequence: Synthetic oligonucleotide
gagcuaucccgguucacac

SEQ ID NO: 1568655 - RNA, 19 nt, Artificial Sequence
  Description of Artificial Sequence: Synthetic oligonucleotide
gcuacauauuuggagcugg

SEQ ID NO: 1568656 - RNA, 19 nt, Artificial Sequence
  Description of Artificial Sequence: Synthetic oligonucleotide
gauacacucaucccagggu

SEQ ID NO: 1568657 - RNA, 19 nt, Artificial Sequence
  Description of Artificial Sequence: Synthetic oligonucleotide
caaacucggacugaauauc

SEQ ID NO: 1568658 - RNA, 19 nt, Artificial Sequence
  Description of Artificial Sequence: Synthetic oligonucleotide
cucgggucgugcuaccccg

SEQ ID NO: 1568659 - RNA, 19 nt, Artificial Sequence
  Description of Artificial Sequence: Synthetic oligonucleotide
cagcguuagcaaccgaacc

SEQ ID NO: 1568660 - RNA, 19 nt, Artificial Sequence
  Description of Artificial Sequence: Synthetic oligonucleotide
auccgaguggcgcuccggg

SEQ ID NO: 1568661 - RNA, 19 nt, Artificial Sequence
  Description of Artificial Sequence: Synthetic oligonucleotide
cacacggugccuagauucc

SEQ ID NO: 1568662 - RNA, 19 nt, Artificial Sequence
  Description of Artificial Sequence: Synthetic oligonucleotide
aucggguuaugggaauugg

SEQ ID NO: 1568663 - RNA, 19 nt, Artificial Sequence
  Description of Artificial Sequence: Synthetic oligonucleotide
agagcuaucccgguucaca

SEQ ID NO: 1568664 - RNA, 19 nt, Artificial Sequence
  Description of Artificial Sequence: Synthetic oligonucleotide
gaauuguggacaaaggguu

SEQ ID NO: 1568665 - RNA, 19 nt, Artificial Sequence
  Description of Artificial Sequence: Synthetic oligonucleotide
ggucgcgugggauucuugg

SEQ ID NO: 1568666 - RNA, 19 nt, Artificial Sequence
  Description of Artificial Sequence: Synthetic oligonucleotide
uuggguugcgccccagggu

SEQ ID NO: 1568667 - RNA, 19 nt, Artificial Sequence
  Description of Artificial Sequence: Synthetic oligonucleotide
aauccgaguggcgcuccgg

SEQ ID NO: 1568668 - RNA, 19 nt, Artificial Sequence
  Description of Artificial Sequence: Synthetic oligonucleotide
ugcuacauauuuggagcug

SEQ ID NO: 1568669 - RNA, 19 nt, Artificial Sequence
  Description of Artificial Sequence: Synthetic oligonucleotide
accauucuauuaguuucuc

SEQ ID NO: 1568670 - RNA, 19 nt, Artificial Sequence
  Description of Artificial Sequence: Synthetic oligonucleotide
gucgcgugggauucuuggg

SEQ ID NO: 1568671 - RNA, 19 nt, Artificial Sequence
  Description of Artificial Sequence: Synthetic oligonucleotide
ugaaucggguuaugggaau

SEQ ID NO: 1568672 - RNA, 19 nt, Artificial Sequence
  Description of Artificial Sequence: Synthetic oligonucleotide
cacaaacucggacugaaua

SEQ ID NO: 1568673 - RNA, 19 nt, Artificial Sequence
  Description of Artificial Sequence: Synthetic oligonucleotide
acagacugcuacauauuug

SEQ ID NO: 1568674 - RNA, 19 nt, Artificial Sequence
  Description of Artificial Sequence: Synthetic oligonucleotide
ccaacuagcuuuucauggc

SEQ ID NO: 1568675 - RNA, 19 nt, Artificial Sequence
  Description of Artificial Sequence: Synthetic oligonucleotide
gaaugggaauuguggacaa

SEQ ID NO: 1568676 - RNA, 19 nt, Artificial Sequence
  Description of Artificial Sequence: Synthetic oligonucleotide
ggauucuuggguugcgccc

SEQ ID NO: 1568677 - RNA, 19 nt, Artificial Sequence
  Description of Artificial Sequence: Synthetic oligonucleotide
agcgcaggaggccuggggu

SEQ ID NO: 1568678 - RNA, 19 nt, Artificial Sequence
  Description of Artificial Sequence: Synthetic oligonucleotide
gacaaucgggagaagagcu

SEQ ID NO: 1568679 - RNA, 19 nt, Artificial Sequence
  Description of Artificial Sequence: Synthetic oligonucleotide
ggugcggccgacucugugg

SEQ ID NO: 1568680 - RNA, 19 nt, Artificial Sequence
  Description of Artificial Sequence: Synthetic oligonucleotide
ugcgauccgauuucuucaa

SEQ ID NO: 1568681 - RNA, 19 nt, Artificial Sequence
  Description of Artificial Sequence: Synthetic oligonucleotide
cggguuaugggaauugggg

SEQ ID NO: 1568682 - RNA, 19 nt, Artificial Sequence
  Description of Artificial Sequence: Synthetic oligonucleotide
agaauccgaguggcgcucc

SEQ ID NO: 1568683 - RNA, 19 nt, Artificial Sequence
  Description of Artificial Sequence: Synthetic oligonucleotide
ggucgugcuaccccgcgcg

SEQ ID NO: 1568684 - RNA, 19 nt, Artificial Sequence
  Description of Artificial Sequence: Synthetic oligonucleotide
cugaaucggguuaugggaa

SEQ ID NO: 1568685 - RNA, 19 nt, Artificial Sequence
  Description of Artificial Sequence: Synthetic oligonucleotide
uccgaguggcgcuccgggg

SEQ ID NO: 1568686 - RNA, 19 nt, Artificial Sequence
  Description of Artificial Sequence: Synthetic oligonucleotide
ggaacagacugcuacauau

SEQ ID NO: 1568687 - RNA, 19 nt, Artificial Sequence
  Description of Artificial Sequence: Synthetic oligonucleotide
  modified_base (9)..(9): a, c, u, g, unknown or other
ugcucagcncgccggcgcc

SEQ ID NO: 1568688 - RNA, 19 nt, Artificial Sequence
  Description of Artificial Sequence: Synthetic oligonucleotide
uccaauccucucugggacu

SEQ ID NO: 1568689 - RNA, 19 nt, Artificial Sequence
  Description of Artificial Sequence: Synthetic oligonucleotide
gagaccauucuauuaguuu

SEQ ID NO: 1568690 - RNA, 19 nt, Artificial Sequence
  Description of Artificial Sequence: Synthetic oligonucleotide
gaauccgaguggcgcuccg

SEQ ID NO: 1568691 - RNA, 19 nt, Artificial Sequence
  Description of Artificial Sequence: Synthetic oligonucleotide
gaauggaggccaagucugc

SEQ ID NO: 1568692 - RNA, 19 nt, Artificial Sequence
  Description of Artificial Sequence: Synthetic oligonucleotide
gauuccucucgggucgugc

SEQ ID NO: 1568693 - RNA, 19 nt, Artificial Sequence
  Description of Artificial Sequence: Synthetic oligonucleotide
ggucccaaagaaaagggga

SEQ ID NO: 1568694 - RNA, 19 nt, Artificial Sequence
  Description of Artificial Sequence: Synthetic oligonucleotide
aggguuccccugugagacc

SEQ ID NO: 1568695 - RNA, 19 nt, Artificial Sequence
  Description of Artificial Sequence: Synthetic oligonucleotide
acugaauauccggguuaac

SEQ ID NO: 1568696 - RNA, 19 nt, Artificial Sequence
  Description of Artificial Sequence: Synthetic oligonucleotide
ggaauuguggacaaagggu

SEQ ID NO: 1568697 - RNA, 19 nt, Artificial Sequence
  Description of Artificial Sequence: Synthetic oligonucleotide
gggauucuuggguugcgcc

SEQ ID NO: 1568698 - RNA, 19 nt, Artificial Sequence
  Description of Artificial Sequence: Synthetic oligonucleotide
ccugaaucggguuauggga

SEQ ID NO: 1568699 - RNA, 19 nt, Artificial Sequence
  Description of Artificial Sequence: Synthetic oligonucleotide
guuagcaaccgaaccagaa

SEQ ID NO: 1568700 - RNA, 19 nt, Artificial Sequence
  Description of Artificial Sequence: Synthetic oligonucleotide
ccuagauuccucucggguc

SEQ ID NO: 1568701 - RNA, 19 nt, Artificial Sequence
  Description of Artificial Sequence: Synthetic oligonucleotide
ugguguagcgcugcagacu

SEQ ID NO: 1568702 - RNA, 19 nt, Artificial Sequence
  Description of Artificial Sequence: Synthetic oligonucleotide
ucacaaacucggacugaau

SEQ ID NO: 1568703 - RNA, 19 nt, Artificial Sequence
  Description of Artificial Sequence: Synthetic oligonucleotide
aggaucagaaaggcuggug

SEQ ID NO: 1568704 - RNA, 19 nt, Artificial Sequence
  Description of Artificial Sequence: Synthetic oligonucleotide
uggccuuccuucgcagacg

SEQ ID NO: 1568705 - RNA, 19 nt, Artificial Sequence
  Description of Artificial Sequence: Synthetic oligonucleotide
gacugaauauccggguuaa

SEQ ID NO: 1568706 - RNA, 19 nt, Artificial Sequence
  Description of Artificial Sequence: Synthetic oligonucleotide
ugggauucuuggguugcgc

SEQ ID NO: 1568707 - RNA, 19 nt, Artificial Sequence
  Description of Artificial Sequence: Synthetic oligonucleotide
cuagcuuuucauggcaaga

SEQ ID NO: 1568708 - RNA, 19 nt, Artificial Sequence
  Description of Artificial Sequence: Synthetic oligonucleotide
cugaauauccggguuaacu

SEQ ID NO: 1568709 - RNA, 19 nt, Artificial Sequence
  Description of Artificial Sequence: Synthetic oligonucleotide
acggugccuagauuccucu

SEQ ID NO: 1568710 - RNA, 19 nt, Artificial Sequence
  Description of Artificial Sequence: Synthetic oligonucleotide
gggucccaaagaaaagggg

SEQ ID NO: 1568711 - RNA, 19 nt, Artificial Sequence
  Description of Artificial Sequence: Synthetic oligonucleotide
guagggaccgcgagcgucc

SEQ ID NO: 1568712 - RNA, 19 nt, Artificial Sequence
  Description of Artificial Sequence: Synthetic oligonucleotide
cuacauauuuggagcugga

SEQ ID NO: 1568713 - RNA, 19 nt, Artificial Sequence
  Description of Artificial Sequence: Synthetic oligonucleotide
cauccaacuagcuuuucau

SEQ ID NO: 1568714 - RNA, 19 nt, Artificial Sequence
  Description of Artificial Sequence: Synthetic oligonucleotide
cucaguguucuccauccaa

SEQ ID NO: 1568715 - RNA, 19 nt, Artificial Sequence
  Description of Artificial Sequence: Synthetic oligonucleotide
accgcgagcgucccgccug

SEQ ID NO: 1568716 - RNA, 19 nt, Artificial Sequence
  Description of Artificial Sequence: Synthetic oligonucleotide
uucacacggugccuagauu

SEQ ID NO: 1568717 - RNA, 19 nt, Artificial Sequence
  Description of Artificial Sequence: Synthetic oligonucleotide
ucccacccgccccaugucu

SEQ ID NO: 1568718 - RNA, 19 nt, Artificial Sequence
  Description of Artificial Sequence: Synthetic oligonucleotide
agucgaggcccaagccucc

SEQ ID NO: 1568719 - RNA, 19 nt, Artificial Sequence
  Description of Artificial Sequence: Synthetic oligonucleotide
caaccgaaccagaaagcaa

SEQ ID NO: 1568720 - RNA, 19 nt, Artificial Sequence
  Description of Artificial Sequence: Synthetic oligonucleotide
gcguuagcaaccgaaccag

SEQ ID NO: 1568721 - RNA, 19 nt, Artificial Sequence
  Description of Artificial Sequence: Synthetic oligonucleotide
gugcggccgacucuguggc

SEQ ID NO: 1568722 - RNA, 19 nt, Artificial Sequence
  Description of Artificial Sequence: Synthetic oligonucleotide
ggauccuuuaagccaucac

SEQ ID NO: 1568723 - RNA, 19 nt, Artificial Sequence
  Description of Artificial Sequence: Synthetic oligonucleotide
gaggcguuccgggugcggc

SEQ ID NO: 1568724 - RNA, 19 nt, Artificial Sequence
  Description of Artificial Sequence: Synthetic oligonucleotide
gucccagcguuagcaaccg

SEQ ID NO: 1568725 - RNA, 19 nt, Artificial Sequence
  Description of Artificial Sequence: Synthetic oligonucleotide
  modified_base (4)..(4): a, c, u, g, unknown or other
agcncgccggcgccgcggg

SEQ ID NO: 1568726 - RNA, 19 nt, Artificial Sequence
  Description of Artificial Sequence: Synthetic oligonucleotide
gggauacacucaucccagg

SEQ ID NO: 1568727 - RNA, 19 nt, Artificial Sequence
  Description of Artificial Sequence: Synthetic oligonucleotide
ggucccagcguuagcaacc

SEQ ID NO: 1568728 - RNA, 19 nt, Artificial Sequence
  Description of Artificial Sequence: Synthetic oligonucleotide
gcaaccgaaccagaaagca

SEQ ID NO: 1568729 - RNA, 19 nt, Artificial Sequence
  Description of Artificial Sequence: Synthetic oligonucleotide
auauccggguuaacuucag

SEQ ID NO: 1568730 - RNA, 19 nt, Artificial Sequence
  Description of Artificial Sequence: Synthetic oligonucleotide
ugcgggcucccauccccgg

SEQ ID NO: 1568731 - RNA, 19 nt, Artificial Sequence
  Description of Artificial Sequence: Synthetic oligonucleotide
ccagcguuagcaaccgaac

SEQ ID NO: 1568732 - RNA, 19 nt, Artificial Sequence
  Description of Artificial Sequence: Synthetic oligonucleotide
caaucgggagaagagcuaa

SEQ ID NO: 1568733 - RNA, 19 nt, Artificial Sequence
  Description of Artificial Sequence: Synthetic oligonucleotide
auggcgaccugggcacggc

SEQ ID NO: 1568734 - RNA, 19 nt, Artificial Sequence
  Description of Artificial Sequence: Synthetic oligonucleotide
  modified_base (6)..(6): a, c, u, g, unknown or other
ucagcncgccggcgccgcg

SEQ ID NO: 1568735 - RNA, 19 nt, Artificial Sequence
  Description of Artificial Sequence: Synthetic oligonucleotide
agcuggaggcguuccgggu

SEQ ID NO: 1568736 - RNA, 19 nt, Artificial Sequence
  Description of Artificial Sequence: Synthetic oligonucleotide
cgucccuugccuuagcaac

SEQ ID NO: 1568737 - RNA, 19 nt, Artificial Sequence
  Description of Artificial Sequence: Synthetic oligonucleotide
caagaauccgaguggcgcu

SEQ ID NO: 1568738 - RNA, 19 nt, Artificial Sequence
  Description of Artificial Sequence: Synthetic oligonucleotide
  modified_base (16)..(16): a, c, u, g, unknown or other
guggccgugcucagcncgc

SEQ ID NO: 1568739 - RNA, 19 nt, Artificial Sequence
  Description of Artificial Sequence: Synthetic oligonucleotide
gcagacaaucgggagaaga

SEQ ID NO: 1568740 - RNA, 19 nt, Artificial Sequence
  Description of Artificial Sequence: Synthetic oligonucleotide
cugcgggcucccauccccg

SEQ ID NO: 1568741 - RNA, 19 nt, Artificial Sequence
  Description of Artificial Sequence: Synthetic oligonucleotide
ggguuaugggaauuggggu

SEQ ID NO: 1568742 - RNA, 19 nt, Artificial Sequence
  Description of Artificial Sequence: Synthetic oligonucleotide
ggacugaauauccggguua

SEQ ID NO: 1568743 - RNA, 19 nt, Artificial Sequence
  Description of Artificial Sequence: Synthetic oligonucleotide
uccuucgcagacgcuucug

SEQ ID NO: 1568744 - RNA, 19 nt, Artificial Sequence
  Description of Artificial Sequence: Synthetic oligonucleotide
ucgggucgugcuaccccgc

SEQ ID NO: 1568745 - RNA, 19 nt, Artificial Sequence
  Description of Artificial Sequence: Synthetic oligonucleotide
ggaaggagcugaaugggaa

SEQ ID NO: 1568746 - RNA, 19 nt, Artificial Sequence
  Description of Artificial Sequence: Synthetic oligonucleotide
aggggagagcuaucccggu

SEQ ID NO: 1568747 - RNA, 19 nt, Artificial Sequence
  Description of Artificial Sequence: Synthetic oligonucleotide
caagggcggaggauggcga

SEQ ID NO: 1568748 - RNA, 19 nt, Artificial Sequence
  Description of Artificial Sequence: Synthetic oligonucleotide
acccgccccaugucugggg

SEQ ID NO: 1568749 - RNA, 19 nt, Artificial Sequence
  Description of Artificial Sequence: Synthetic oligonucleotide
agacugcuacauauuugga

SEQ ID NO: 1568750 - RNA, 19 nt, Artificial Sequence
  Description of Artificial Sequence: Synthetic oligonucleotide
uuccuccgcucugcgggcg

SEQ ID NO: 1568751 - RNA, 19 nt, Artificial Sequence
  Description of Artificial Sequence: Synthetic oligonucleotide
gggaaggucccagcguuag

SEQ ID NO: 1568752 - RNA, 19 nt, Artificial Sequence
  Description of Artificial Sequence: Synthetic oligonucleotide
cgccccuuagggaaggucc

SEQ ID NO: 1568753 - RNA, 19 nt, Artificial Sequence
  Description of Artificial Sequence: Synthetic oligonucleotide
guucacacggugccuagau

SEQ ID NO: 1568754 - RNA, 19 nt, Artificial Sequence
  Description of Artificial Sequence: Synthetic oligonucleotide
ccuucgcagacgcuucugc

SEQ ID NO: 1568755 - RNA, 19 nt, Artificial Sequence
  Description of Artificial Sequence: Synthetic oligonucleotide
gcugcgggcucccaucccc

SEQ ID NO: 1568756 - RNA, 19 nt, Artificial Sequence
  Description of Artificial Sequence: Synthetic oligonucleotide
cagugcgugcgccccuuag

SEQ ID NO: 1568757 - RNA, 19 nt, Artificial Sequence
  Description of Artificial Sequence: Synthetic oligonucleotide
  modified_base (7)..(7): a, c, u, g, unknown or other
cucagcncgccggcgccgc

SEQ ID NO: 1568758 - RNA, 19 nt, Artificial Sequence
  Description of Artificial Sequence: Synthetic oligonucleotide
gggucugcgauccgauuuc

SEQ ID NO: 1568759 - RNA, 19 nt, Artificial Sequence
  Description of Artificial Sequence: Synthetic oligonucleotide
uccccggcgagcgcaggag

SEQ ID NO: 1568760 - RNA, 19 nt, Artificial Sequence
  Description of Artificial Sequence: Synthetic oligonucleotide
caguguucuccauccaacu

SEQ ID NO: 1568761 - RNA, 19 nt, Artificial Sequence
  Description of Artificial Sequence: Synthetic oligonucleotide
ggcaugugaccagggacgc

SEQ ID NO: 1568762 - RNA, 19 nt, Artificial Sequence
  Description of Artificial Sequence: Synthetic oligonucleotide
acaaucgggagaagagcua

SEQ ID NO: 1568763 - RNA, 19 nt, Artificial Sequence
  Description of Artificial Sequence: Synthetic oligonucleotide
gcucugcgggcgcucaggg

SEQ ID NO: 1568764 - RNA, 19 nt, Artificial Sequence
  Description of Artificial Sequence: Synthetic oligonucleotide
aucauguguagugcuucuu

SEQ ID NO: 1568765 - RNA, 19 nt, Artificial Sequence
  Description of Artificial Sequence: Synthetic oligonucleotide
cccucaucauguguagugc

SEQ ID NO: 1568766 - RNA, 19 nt, Artificial Sequence
  Description of Artificial Sequence: Synthetic oligonucleotide
acacggugccuagauuccu

SEQ ID NO: 1568767 - RNA, 19 nt, Artificial Sequence
  Description of Artificial Sequence: Synthetic oligonucleotide
caucauguguagugcuucu

SEQ ID NO: 1568768 - RNA, 19 nt, Artificial Sequence
  Description of Artificial Sequence: Synthetic oligonucleotide
cucucgggucgugcuaccc

SEQ ID NO: 1568769 - RNA, 19 nt, Artificial Sequence
  Description of Artificial Sequence: Synthetic oligonucleotide
gccuuagcaacagccgcag

SEQ ID NO: 1568770 - RNA, 19 nt, Artificial Sequence
  Description of Artificial Sequence: Synthetic oligonucleotide
gcggccgacucuguggccg

SEQ ID NO: 1568771 - RNA, 19 nt, Artificial Sequence
  Description of Artificial Sequence: Synthetic oligonucleotide
gguagggaccgcgagcguc

SEQ ID NO: 1568772 - RNA, 19 nt, Artificial Sequence
  Description of Artificial Sequence: Synthetic oligonucleotide
ugguagggaccgcgagcgu

SEQ ID NO: 1568773 - RNA, 19 nt, Artificial Sequence
  Description of Artificial Sequence: Synthetic oligonucleotide
cuucgcagacgcuucugcu

SEQ ID NO: 1568774 - RNA, 19 nt, Artificial Sequence
  Description of Artificial Sequence: Synthetic oligonucleotide
gagagcuaucccgguucac

SEQ ID NO: 1568775 - RNA, 19 nt, Artificial Sequence
  Description of Artificial Sequence: Synthetic oligonucleotide
gggacagcagugcgugcgc

SEQ ID NO: 1568776 - RNA, 19 nt, Artificial Sequence
  Description of Artificial Sequence: Synthetic oligonucleotide
  modified_base (2)..(2): a, c, u, g, unknown or other
cncgccggcgccgcggggc

SEQ ID NO: 1568777 - RNA, 19 nt, Artificial Sequence
  Description of Artificial Sequence: Synthetic oligonucleotide
  modified_base (13)..(13): a, c, u, g, unknown or other
gccgugcucagcncgccgg

SEQ ID NO: 1568778 - RNA, 19 nt, Artificial Sequence
  Description of Artificial Sequence: Synthetic oligonucleotide
ugcggccgacucuguggcc

SEQ ID NO: 1568779 - RNA, 19 nt, Artificial Sequence
  Description of Artificial Sequence: Synthetic oligonucleotide
gcgauccgauuucuucaag

SEQ ID NO: 1568780 - RNA, 19 nt, Artificial Sequence
  Description of Artificial Sequence: Synthetic oligonucleotide
accagggacgcagggcaga

SEQ ID NO: 1568781 - RNA, 19 nt, Artificial Sequence
  Description of Artificial Sequence: Synthetic oligonucleotide
agggaccgcgagcgucccg

SEQ ID NO: 1568782 - RNA, 19 nt, Artificial Sequence
  Description of Artificial Sequence: Synthetic oligonucleotide
cucaucauguguagugcuu

SEQ ID NO: 1568783 - RNA, 19 nt, Artificial Sequence
  Description of Artificial Sequence: Synthetic oligonucleotide
gggaccgcgagcgucccgc

SEQ ID NO: 1568784 - RNA, 19 nt, Artificial Sequence
  Description of Artificial Sequence: Synthetic oligonucleotide
ugcuaccccgcgcgucccu

SEQ ID NO: 1568785 - RNA, 19 nt, Artificial Sequence
  Description of Artificial Sequence: Synthetic oligonucleotide
gguugcgccccaggguggg

SEQ ID NO: 1568786 - RNA, 19 nt, Artificial Sequence
  Description of Artificial Sequence: Synthetic oligonucleotide
ucgugcuaccccgcgcguc

SEQ ID NO: 1568787 - RNA, 19 nt, Artificial Sequence
  Description of Artificial Sequence: Synthetic oligonucleotide
cuaccccgcgcgucccuug

SEQ ID NO: 1568788 - RNA, 19 nt, Artificial Sequence
  Description of Artificial Sequence: Synthetic oligonucleotide
uccgcucugcgggcgcuca

SEQ ID NO: 1568789 - RNA, 19 nt, Artificial Sequence
  Description of Artificial Sequence: Synthetic oligonucleotide
gccuagauuccucucgggu

SEQ ID NO: 1568790 - RNA, 19 nt, Artificial Sequence
  Description of Artificial Sequence: Synthetic oligonucleotide
cccagcguuagcaaccgaa

SEQ ID NO: 1568791 - RNA, 19 nt, Artificial Sequence
  Description of Artificial Sequence: Synthetic oligonucleotide
ucccauccccggcgagcgc

SEQ ID NO: 1568792 - RNA, 19 nt, Artificial Sequence
  Description of Artificial Sequence: Synthetic oligonucleotide
uagggaccgcgagcguccc

SEQ ID NO: 1568793 - RNA, 19 nt, Artificial Sequence
  Description of Artificial Sequence: Synthetic oligonucleotide
  modified_base (15)..(15): a, c, u, g, unknown or other
uggccgugcucagcncgcc

SEQ ID NO: 1568794 - RNA, 19 nt, Artificial Sequence
  Description of Artificial Sequence: Synthetic oligonucleotide
gugcgccccuuagggaagg

SEQ ID NO: 1568795 - RNA, 19 nt, Artificial Sequence
  Description of Artificial Sequence: Synthetic oligonucleotide
cgugcuaccccgcgcgucc

SEQ ID NO: 1568796 - RNA, 19 nt, Artificial Sequence
  Description of Artificial Sequence: Synthetic oligonucleotide
  modified_base (5)..(5): a, c, u, g, unknown or other
cagcncgccggcgccgcgg

SEQ ID NO: 1568797 - RNA, 19 nt, Artificial Sequence
  Description of Artificial Sequence: Synthetic oligonucleotide
cccacccucaucaugugua

SEQ ID NO: 1568798 - RNA, 19 nt, Artificial Sequence
  Description of Artificial Sequence: Synthetic oligonucleotide
gaaucggguuaugggaauu

SEQ ID NO: 1568799 - RNA, 19 nt, Artificial Sequence
  Description of Artificial Sequence: Synthetic oligonucleotide
gggaacagacugcuacaua

SEQ ID NO: 1568800 - RNA, 19 nt, Artificial Sequence
  Description of Artificial Sequence: Synthetic oligonucleotide
gggucgugcuaccccgcgc

SEQ ID NO: 1568801 - RNA, 19 nt, Artificial Sequence
  Description of Artificial Sequence: Synthetic oligonucleotide
gccccuuagggaagguccc

SEQ ID NO: 1568802 - RNA, 19 nt, Artificial Sequence
  Description of Artificial Sequence: Synthetic oligonucleotide
cgugggauucuuggguugc

SEQ ID NO: 1568803 - RNA, 19 nt, Artificial Sequence
  Description of Artificial Sequence: Synthetic oligonucleotide
ggacagcagugcgugcgcc

SEQ ID NO: 1568804 - RNA, 19 nt, Artificial Sequence
  Description of Artificial Sequence: Synthetic oligonucleotide
uggcgcuccggggucgcgu

SEQ ID NO: 1568805 - RNA, 19 nt, Artificial Sequence
  Description of Artificial Sequence: Synthetic oligonucleotide
ggguccgcgggucgccucc

SEQ ID NO: 1568806 - RNA, 19 nt, Artificial Sequence
  Description of Artificial Sequence: Synthetic oligonucleotide
gcgaccugggcacggcuca

SEQ ID NO: 1568807 - RNA, 19 nt, Artificial Sequence
  Description of Artificial Sequence: Synthetic oligonucleotide
cugggguccgcgggucgcc

SEQ ID NO: 1568808 - RNA, 19 nt, Artificial Sequence
  Description of Artificial Sequence: Synthetic oligonucleotide
aggccaagggaaagagaua

SEQ ID NO: 1568809 - RNA, 19 nt, Artificial Sequence
  Description of Artificial Sequence: Synthetic oligonucleotide
gggaugugacagacccaag

SEQ ID NO: 1568810 - RNA, 19 nt, Artificial Sequence
  Description of Artificial Sequence: Synthetic oligonucleotide
cgcgggucgccuccaaucc

SEQ ID NO: 1568811 - RNA, 19 nt, Artificial Sequence
  Description of Artificial Sequence: Synthetic oligonucleotide
cucugcgggcgcucaggga

SEQ ID NO: 1568812 - RNA, 19 nt, Artificial Sequence
  Description of Artificial Sequence: Synthetic oligonucleotide
ggggucugcgauccgauuu

SEQ ID NO: 1568813 - RNA, 19 nt, Artificial Sequence
  Description of Artificial Sequence: Synthetic oligonucleotide
gucccacccgccccauguc

SEQ ID NO: 1568814 - RNA, 19 nt, Artificial Sequence
  Description of Artificial Sequence: Synthetic oligonucleotide
gggaggaacuaggcagaac

SEQ ID NO: 1568815 - RNA, 19 nt, Artificial Sequence
  Description of Artificial Sequence: Synthetic oligonucleotide
cugcgggcgcucagggaca

SEQ ID NO: 1568816 - RNA, 19 nt, Artificial Sequence
  Description of Artificial Sequence: Synthetic oligonucleotide
ccgcgggucgccuccaauc

SEQ ID NO: 1568817 - RNA, 19 nt, Artificial Sequence
  Description of Artificial Sequence: Synthetic oligonucleotide
ggguugcgccccagggugg

SEQ ID NO: 1568818 - RNA, 19 nt, Artificial Sequence
  Description of Artificial Sequence: Synthetic oligonucleotide
ggauggcgaccugggcacg

SEQ ID NO: 1568819 - RNA, 19 nt, Artificial Sequence
  Description of Artificial Sequence: Synthetic oligonucleotide
ggaggcguuccgggugcgg

SEQ ID NO: 1568820 - RNA, 19 nt, Artificial Sequence
  Description of Artificial Sequence: Synthetic oligonucleotide
ugggguccgcgggucgccu

SEQ ID NO: 1568821 - RNA, 19 nt, Artificial Sequence
  Description of Artificial Sequence: Synthetic oligonucleotide
ccucaucauguguagugcu

SEQ ID NO: 1568822 - RNA, 19 nt, Artificial Sequence
  Description of Artificial Sequence: Synthetic oligonucleotide
  modified_base (8)..(8): a, c, u, g, unknown or other
gcucagcncgccggcgccg

SEQ ID NO: 1568823 - RNA, 19 nt, Artificial Sequence
  Description of Artificial Sequence: Synthetic oligonucleotide
  modified_base (12)..(12): a, c, u, g, unknown or other
ccgugcucagcncgccggc

SEQ ID NO: 1568824 - RNA, 19 nt, Artificial Sequence
  Description of Artificial Sequence: Synthetic oligonucleotide
gguucacacggugccuaga

SEQ ID NO: 1568825 - RNA, 19 nt, Artificial Sequence
  Description of Artificial Sequence: Synthetic oligonucleotide
gucgaggcccaagccucca

SEQ ID NO: 1568826 - RNA, 19 nt, Artificial Sequence
  Description of Artificial Sequence: Synthetic oligonucleotide
ccagugguagggaccgcga

SEQ ID NO: 1568827 - RNA, 19 nt, Artificial Sequence
  Description of Artificial Sequence: Synthetic oligonucleotide
ugcgccccuuagggaaggu

SEQ ID NO: 1568828 - RNA, 19 nt, Artificial Sequence
  Description of Artificial Sequence: Synthetic oligonucleotide
agcagugcgugcgccccuu

SEQ ID NO: 1568829 - RNA, 19 nt, Artificial Sequence
  Description of Artificial Sequence: Synthetic oligonucleotide
gcgagcgcaggaggccugg

SEQ ID NO: 1568830 - RNA, 19 nt, Artificial Sequence
  Description of Artificial Sequence: Synthetic oligonucleotide
gugcuaccccgcgcguccc

SEQ ID NO: 1568831 - RNA, 19 nt, Artificial Sequence
  Description of Artificial Sequence: Synthetic oligonucleotide
ggcugcgggcucccauccc

SEQ ID NO: 1568832 - RNA, 19 nt, Artificial Sequence
  Description of Artificial Sequence: Synthetic oligonucleotide
ggcagacaaucgggagaag

SEQ ID NO: 1568833 - RNA, 19 nt, Artificial Sequence
  Description of Artificial Sequence: Synthetic oligonucleotide
cgugcgccccuuagggaag

SEQ ID NO: 1568834 - RNA, 19 nt, Artificial Sequence
  Description of Artificial Sequence: Synthetic oligonucleotide
cgggucgccuccaauccuc

SEQ ID NO: 1568835 - RNA, 19 nt, Artificial Sequence
  Description of Artificial Sequence: Synthetic oligonucleotide
gccgacucuguggccgugc

SEQ ID NO: 1568836 - RNA, 19 nt, Artificial Sequence
  Description of Artificial Sequence: Synthetic oligonucleotide
ccccggcgagcgcaggagg

SEQ ID NO: 1568837 - RNA, 19 nt, Artificial Sequence
  Description of Artificial Sequence: Synthetic oligonucleotide
cuaucccgguucacacggu

SEQ ID NO: 1568838 - RNA, 19 nt, Artificial Sequence
  Description of Artificial Sequence: Synthetic oligonucleotide
cgguucacacggugccuag

SEQ ID NO: 1568839 - RNA, 19 nt, Artificial Sequence
  Description of Artificial Sequence: Synthetic oligonucleotide
guggcgcuccggggucgcg

SEQ ID NO: 1568840 - RNA, 19 nt, Artificial Sequence
  Description of Artificial Sequence: Synthetic oligonucleotide
cguuagcaaccgaaccaga

SEQ ID NO: 1568841 - RNA, 19 nt, Artificial Sequence
  Description of Artificial Sequence: Synthetic oligonucleotide
cgggucgugcuaccccgcg

SEQ ID NO: 1568842 - RNA, 19 nt, Artificial Sequence
  Description of Artificial Sequence: Synthetic oligonucleotide
cccaugucuggggugggga

SEQ ID NO: 1568843 - RNA, 19 nt, Artificial Sequence
  Description of Artificial Sequence: Synthetic oligonucleotide
ccgaaccagaaagcaagaa

SEQ ID NO: 1568844 - RNA, 19 nt, Artificial Sequence
  Description of Artificial Sequence: Synthetic oligonucleotide
ccggguuaacuucaggcuu

SEQ ID NO: 1568845 - RNA, 19 nt, Artificial Sequence
  Description of Artificial Sequence: Synthetic oligonucleotide
gucgugcuaccccgcgcgu

SEQ ID NO: 1568846 - RNA, 19 nt, Artificial Sequence
  Description of Artificial Sequence: Synthetic oligonucleotide
ccgccuggccuuccuucgc

SEQ ID NO: 1568847 - RNA, 19 nt, Artificial Sequence
  Description of Artificial Sequence: Synthetic oligonucleotide
ggcggaggauggcgaccug

SEQ ID NO: 1568848 - RNA, 19 nt, Artificial Sequence
  Description of Artificial Sequence: Synthetic oligonucleotide
ccgcgagcgucccgccugg

SEQ ID NO: 1568849 - RNA, 19 nt, Artificial Sequence
  Description of Artificial Sequence: Synthetic oligonucleotide
gcgcuccggggucgcgugg

SEQ ID NO: 1568850 - RNA, 19 nt, Artificial Sequence
  Description of Artificial Sequence: Synthetic oligonucleotide
gggucgcgugggauucuug

SEQ ID NO: 1568851 - RNA, 19 nt, Artificial Sequence
  Description of Artificial Sequence: Synthetic oligonucleotide
ccgaggccugguguagcgc

SEQ ID NO: 1568852 - RNA, 19 nt, Artificial Sequence
  Description of Artificial Sequence: Synthetic oligonucleotide
ggggugggauacacucauc

SEQ ID NO: 1568853 - RNA, 19 nt, Artificial Sequence
  Description of Artificial Sequence: Synthetic oligonucleotide
gcaugugaccagggacgca

SEQ ID NO: 1568854 - RNA, 19 nt, Artificial Sequence
  Description of Artificial Sequence: Synthetic oligonucleotide
cgcucugcgggcgcucagg

SEQ ID NO: 1568855 - RNA, 19 nt, Artificial Sequence
  Description of Artificial Sequence: Synthetic oligonucleotide
ggucugcgauccgauuucu

SEQ ID NO: 1568856 - RNA, 19 nt, Artificial Sequence
  Description of Artificial Sequence: Synthetic oligonucleotide
gccccaugucugggguggg

SEQ ID NO: 1568857 - RNA, 19 nt, Artificial Sequence
  Description of Artificial Sequence: Synthetic oligonucleotide
ccccugugagaccauucua

SEQ ID NO: 1568858 - RNA, 19 nt, Artificial Sequence
  Description of Artificial Sequence: Synthetic oligonucleotide
ccgaguggcgcuccggggu

SEQ ID NO: 1568859 - RNA, 19 nt, Artificial Sequence
  Description of Artificial Sequence: Synthetic oligonucleotide
ccgccccaugucuggggug

SEQ ID NO: 1568860 - RNA, 19 nt, Artificial Sequence
  Description of Artificial Sequence: Synthetic oligonucleotide
gcgccccuuagggaagguc

SEQ ID NO: 1568861 - RNA, 19 nt, Artificial Sequence
  Description of Artificial Sequence: Synthetic oligonucleotide
gggguccgcgggucgccuc

SEQ ID NO: 1568862 - RNA, 19 nt, Artificial Sequence
  Description of Artificial Sequence: Synthetic oligonucleotide
gucugcgauccgauuucuu

SEQ ID NO: 1568863 - RNA, 19 nt, Artificial Sequence
  Description of Artificial Sequence: Synthetic oligonucleotide
gcgcgucccuugccuuagc

SEQ ID NO: 1568864 - RNA, 19 nt, Artificial Sequence
  Description of Artificial Sequence: Synthetic oligonucleotide
guuccgggugcggccgacu

SEQ ID NO: 1568865 - RNA, 19 nt, Artificial Sequence
  Description of Artificial Sequence: Synthetic oligonucleotide
gcgggucgccuccaauccu

SEQ ID NO: 1568866 - RNA, 19 nt, Artificial Sequence
  Description of Artificial Sequence: Synthetic oligonucleotide
cgcgcgucccuugccuuag

SEQ ID NO: 1568867 - RNA, 19 nt, Artificial Sequence
  Description of Artificial Sequence: Synthetic oligonucleotide
ccgguucacacggugccua

SEQ ID NO: 1568868 - RNA, 19 nt, Artificial Sequence
  Description of Artificial Sequence: Synthetic oligonucleotide
cgcgucccuugccuuagca

SEQ ID NO: 1568869 - RNA, 19 nt, Artificial Sequence
  Description of Artificial Sequence: Synthetic oligonucleotide
gcuccggggucgcguggga

SEQ ID NO: 1568870 - RNA, 19 nt, Artificial Sequence
  Description of Artificial Sequence: Synthetic oligonucleotide
cgacucuguggccgugcuc

SEQ ID NO: 1568871 - RNA, 19 nt, Artificial Sequence
  Description of Artificial Sequence: Synthetic oligonucleotide
cuccgggcgccgccgggcu

SEQ ID NO: 1568872 - RNA, 19 nt, Artificial Sequence
  Description of Artificial Sequence: Synthetic oligonucleotide
cggacugaauauccggguu

SEQ ID NO: 1568873 - RNA, 19 nt, Artificial Sequence
  Description of Artificial Sequence: Synthetic oligonucleotide
gggucgccuccaauccucu

SEQ ID NO: 1568874 - RNA, 19 nt, Artificial Sequence
  Description of Artificial Sequence: Synthetic oligonucleotide
gguccgcgggucgccucca

SEQ ID NO: 1568875 - RNA, 19 nt, Artificial Sequence
  Description of Artificial Sequence: Synthetic oligonucleotide
gcguuccgggugcggccga

SEQ ID NO: 1568876 - RNA, 19 nt, Artificial Sequence
  Description of Artificial Sequence: Synthetic oligonucleotide
gcagugcgugcgccccuua

SEQ ID NO: 1568877 - RNA, 19 nt, Artificial Sequence
  Description of Artificial Sequence: Synthetic oligonucleotide
gcucagcguccaggcugug

SEQ ID NO: 1568878 - RNA, 19 nt, Artificial Sequence
  Description of Artificial Sequence: Synthetic oligonucleotide
ccgacucuguggccgugcu

SEQ ID NO: 1568879 - RNA, 19 nt, Artificial Sequence
  Description of Artificial Sequence: Synthetic oligonucleotide
cgcgugggauucuuggguu

SEQ ID NO: 1568880 - RNA, 19 nt, Artificial Sequence
  Description of Artificial Sequence: Synthetic oligonucleotide
cccgccccaugucuggggu

SEQ ID NO: 1568881 - RNA, 19 nt, Artificial Sequence
  Description of Artificial Sequence: Synthetic oligonucleotide
cuccggggucgcgugggau

SEQ ID NO: 1568882 - RNA, 19 nt, Artificial Sequence
  Description of Artificial Sequence: Synthetic oligonucleotide
ccgcgccggcagcuccggg

SEQ ID NO: 1568883 - RNA, 19 nt, Artificial Sequence
  Description of Artificial Sequence: Synthetic oligonucleotide
ccgcgcgucccuugccuua

SEQ ID NO: 1568884 - RNA, 19 nt, Artificial Sequence
  Description of Artificial Sequence: Synthetic oligonucleotide
cguuccgggugcggccgac

SEQ ID NO: 1568885 - RNA, 19 nt, Artificial Sequence
  Description of Artificial Sequence: Synthetic oligonucleotide
gcgucccgccuggccuucc

SEQ ID NO: 1568886 - RNA, 19 nt, Artificial Sequence
  Description of Artificial Sequence: Synthetic oligonucleotide
ggggucgcgugggauucuu

SEQ ID NO: 1568887 - RNA, 19 nt, Artificial Sequence
  Description of Artificial Sequence: Synthetic oligonucleotide
cgccccaggguggggucug

SEQ ID NO: 1568888 - RNA, 19 nt, Artificial Sequence
  Description of Artificial Sequence: Synthetic oligonucleotide
gcuaccccgcgcgucccuu

SEQ ID NO: 1568889 - RNA, 19 nt, Artificial Sequence
  Description of Artificial Sequence: Synthetic oligonucleotide
ccccggagcugggcugcuc

SEQ ID NO: 1568890 - RNA, 19 nt, Artificial Sequence
  Description of Artificial Sequence: Synthetic oligonucleotide
gcgccccaggguggggucu

SEQ ID NO: 1568891 - RNA, 19 nt, Artificial Sequence
  Description of Artificial Sequence: Synthetic oligonucleotide
cgcgagcgucccgccuggc

SEQ ID NO: 1568892 - RNA, 19 nt, Artificial Sequence
  Description of Artificial Sequence: Synthetic oligonucleotide
ccuccgcucugcgggcgcu

SEQ ID NO: 1568893 - RNA, 19 nt, Artificial Sequence
  Description of Artificial Sequence: Synthetic oligonucleotide
cggccgacucuguggccgu

SEQ ID NO: 1568894 - RNA, 19 nt, Artificial Sequence
  Description of Artificial Sequence: Synthetic oligonucleotide
cggggucgcgugggauucu

SEQ ID NO: 1568895 - RNA, 19 nt, Artificial Sequence
  Description of Artificial Sequence: Synthetic oligonucleotide
aaagucaaauucuguaggc

SEQ ID NO: 1568896 - RNA, 19 nt, Artificial Sequence
  Description of Artificial Sequence: Synthetic oligonucleotide
aaagucugcaccuguaggc

SEQ ID NO: 1568897 - RNA, 19 nt, Artificial Sequence
  Description of Artificial Sequence: Synthetic oligonucleotide
aguucgucaacucagcggc

SEQ ID NO: 1568898 - RNA, 19 nt, Artificial Sequence
  Description of Artificial Sequence: Synthetic oligonucleotide
agugcgaaggaucuguucc

SEQ ID NO: 1568899 - RNA, 19 nt, Artificial Sequence
  Description of Artificial Sequence: Synthetic oligonucleotide
aauucuguaggcaugugcg

SEQ ID NO: 1568900 - RNA, 19 nt, Artificial Sequence
  Description of Artificial Sequence: Synthetic oligonucleotide
uuuuauuaggcucagcaaa

SEQ ID NO: 1568901 - RNA, 19 nt, Artificial Sequence
  Description of Artificial Sequence: Synthetic oligonucleotide
aaauccacuggagauuucc

SEQ ID NO: 1568902 - RNA, 19 nt, Artificial Sequence
  Description of Artificial Sequence: Synthetic oligonucleotide
uacuagccgagacagaggg

SEQ ID NO: 1568903 - RNA, 19 nt, Artificial Sequence
  Description of Artificial Sequence: Synthetic oligonucleotide
uuuauuaggcucagcaaac

SEQ ID NO: 1568904 - RNA, 19 nt, Artificial Sequence
  Description of Artificial Sequence: Synthetic oligonucleotide
aaagagacugcucccggag

SEQ ID NO: 1568905 - RNA, 19 nt, Artificial Sequence
  Description of Artificial Sequence: Synthetic oligonucleotide
cuuaugucgcuucaugucc

SEQ ID NO: 1568906 - RNA, 19 nt, Artificial Sequence
  Description of Artificial Sequence: Synthetic oligonucleotide
uacaaccggagcuaaagcc

SEQ ID NO: 1568907 - RNA, 19 nt, Artificial Sequence
  Description of Artificial Sequence: Synthetic oligonucleotide
cuuucucgcuuucacaucg

SEQ ID NO: 1568908 - RNA, 19 nt, Artificial Sequence
  Description of Artificial Sequence: Synthetic oligonucleotide
ugagucuaagcugaagagg

SEQ ID NO: 1568909 - RNA, 19 nt, Artificial Sequence
  Description of Artificial Sequence: Synthetic oligonucleotide
uuucuuaugucgcuucaug

SEQ ID NO: 1568910 - RNA, 19 nt, Artificial Sequence
  Description of Artificial Sequence: Synthetic oligonucleotide
auguaagagauucuggagu

SEQ ID NO: 1568911 - RNA, 19 nt, Artificial Sequence
  Description of Artificial Sequence: Synthetic oligonucleotide
uauuaggcucagcaaaccc

SEQ ID NO: 1568912 - RNA, 19 nt, Artificial Sequence
  Description of Artificial Sequence: Synthetic oligonucleotide
uuaugucgcuucauguccg

SEQ ID NO: 1568913 - RNA, 19 nt, Artificial Sequence
  Description of Artificial Sequence: Synthetic oligonucleotide
ucuuccucggccuuacuag

SEQ ID NO: 1568914 - RNA, 19 nt, Artificial Sequence
  Description of Artificial Sequence: Synthetic oligonucleotide
gacauagagcacuagagaa

SEQ ID NO: 1568915 - RNA, 19 nt, Artificial Sequence
  Description of Artificial Sequence: Synthetic oligonucleotide
uaguucgucaacucagcgg

SEQ ID NO: 1568916 - RNA, 19 nt, Artificial Sequence
  Description of Artificial Sequence: Synthetic oligonucleotide
agcucgcagaccuaguucg

SEQ ID NO: 1568917 - RNA, 19 nt, Artificial Sequence
  Description of Artificial Sequence: Synthetic oligonucleotide
cuuacuagccgagacagag

SEQ ID NO: 1568918 - RNA, 19 nt, Artificial Sequence
  Description of Artificial Sequence: Synthetic oligonucleotide
auagucaguacuuccguug

SEQ ID NO: 1568919 - RNA, 19 nt, Artificial Sequence
  Description of Artificial Sequence: Synthetic oligonucleotide
ucaaucagugaguccuucg

SEQ ID NO: 1568920 - RNA, 19 nt, Artificial Sequence
  Description of Artificial Sequence: Synthetic oligonucleotide
uggaguaccagaccagggc

SEQ ID NO: 1568921 - RNA, 19 nt, Artificial Sequence
  Description of Artificial Sequence: Synthetic oligonucleotide
acaaccggagcuaaagccc

SEQ ID NO: 1568922 - RNA, 19 nt, Artificial Sequence
  Description of Artificial Sequence: Synthetic oligonucleotide
ucagcggccguacaaccgg

SEQ ID NO: 1568923 - RNA, 19 nt, Artificial Sequence
  Description of Artificial Sequence: Synthetic oligonucleotide
caauguaagagauucugga

SEQ ID NO: 1568924 - RNA, 19 nt, Artificial Sequence
  Description of Artificial Sequence: Synthetic oligonucleotide
caaucagugaguccuucgg

SEQ ID NO: 1568925 - RNA, 19 nt, Artificial Sequence
  Description of Artificial Sequence: Synthetic oligonucleotide
cucuaguuucuuaugucgc

SEQ ID NO: 1568926 - RNA, 19 nt, Artificial Sequence
  Description of Artificial Sequence: Synthetic oligonucleotide
caggaucuccgcuugaagc

SEQ ID NO: 1568927 - RNA, 19 nt, Artificial Sequence
  Description of Artificial Sequence: Synthetic oligonucleotide
uuuccgaaaucuccaguca

SEQ ID NO: 1568928 - RNA, 19 nt, Artificial Sequence
  Description of Artificial Sequence: Synthetic oligonucleotide
cugagucuaagcugaagag

SEQ ID NO: 1568929 - RNA, 19 nt, Artificial Sequence
  Description of Artificial Sequence: Synthetic oligonucleotide
agcaaacccagcucagaac

SEQ ID NO: 1568930 - RNA, 19 nt, Artificial Sequence
  Description of Artificial Sequence: Synthetic oligonucleotide
uuacuagccgagacagagg

SEQ ID NO: 1568931 - RNA, 19 nt, Artificial Sequence
  Description of Artificial Sequence: Synthetic oligonucleotide
uagucaguacuuccguugc

SEQ ID NO: 1568932 - RNA, 19 nt, Artificial Sequence
  Description of Artificial Sequence: Synthetic oligonucleotide
uucauguccgagaggaccu

SEQ ID NO: 1568933 - RNA, 19 nt, Artificial Sequence
  Description of Artificial Sequence: Synthetic oligonucleotide
aacucagcggccguacaac

SEQ ID NO: 1568934 - RNA, 19 nt, Artificial Sequence
  Description of Artificial Sequence: Synthetic oligonucleotide
ucaguacuuccguugccgg

SEQ ID NO: 1568935 - RNA, 19 nt, Artificial Sequence
  Description of Artificial Sequence: Synthetic oligonucleotide
gagacgcuggauuucggag

SEQ ID NO: 1568936 - RNA, 19 nt, Artificial Sequence
  Description of Artificial Sequence: Synthetic oligonucleotide
auagagacgcuggauuucg

SEQ ID NO: 1568937 - RNA, 19 nt, Artificial Sequence
  Description of Artificial Sequence: Synthetic oligonucleotide
aauagucaguacuuccguu

SEQ ID NO: 1568938 - RNA, 19 nt, Artificial Sequence
  Description of Artificial Sequence: Synthetic oligonucleotide
acgggagucauuuccuuag

SEQ ID NO: 1568939 - RNA, 19 nt, Artificial Sequence
  Description of Artificial Sequence: Synthetic oligonucleotide
gaguccuucggugucauug

SEQ ID NO: 1568940 - RNA, 19 nt, Artificial Sequence
  Description of Artificial Sequence: Synthetic oligonucleotide
cuagagaagcccagcaaug

SEQ ID NO: 1568941 - RNA, 19 nt, Artificial Sequence
  Description of Artificial Sequence: Synthetic oligonucleotide
uuagagcucgcagaccuag

SEQ ID NO: 1568942 - RNA, 19 nt, Artificial Sequence
  Description of Artificial Sequence: Synthetic oligonucleotide
agauuuccgaaaucuccag

SEQ ID NO: 1568943 - RNA, 19 nt, Artificial Sequence
  Description of Artificial Sequence: Synthetic oligonucleotide
aguccuucggugucauugg

SEQ ID NO: 1568944 - RNA, 19 nt, Artificial Sequence
  Description of Artificial Sequence: Synthetic oligonucleotide
gucgcuucauguccgagag

SEQ ID NO: 1568945 - RNA, 19 nt, Artificial Sequence
  Description of Artificial Sequence: Synthetic oligonucleotide
acucagcggccguacaacc

SEQ ID NO: 1568946 - RNA, 19 nt, Artificial Sequence
  Description of Artificial Sequence: Synthetic oligonucleotide
agucaguacuuccguugcc

SEQ ID NO: 1568947 - RNA, 19 nt, Artificial Sequence
  Description of Artificial Sequence: Synthetic oligonucleotide
cuaguucgucaacucagcg

SEQ ID NO: 1568948 - RNA, 19 nt, Artificial Sequence
  Description of Artificial Sequence: Synthetic oligonucleotide
agaccuaguucgucaacuc

SEQ ID NO: 1568949 - RNA, 19 nt, Artificial Sequence
  Description of Artificial Sequence: Synthetic oligonucleotide
cuggacgggagucauuucc

SEQ ID NO: 1568950 - RNA, 19 nt, Artificial Sequence
  Description of Artificial Sequence: Synthetic oligonucleotide
ucuucagacagaggcgccg

SEQ ID NO: 1568951 - RNA, 19 nt, Artificial Sequence
  Description of Artificial Sequence: Synthetic oligonucleotide
uuauuaggcucagcaaacc

SEQ ID NO: 1568952 - RNA, 19 nt, Artificial Sequence
  Description of Artificial Sequence: Synthetic oligonucleotide
cuagccgagacagagggac

SEQ ID NO: 1568953 - RNA, 19 nt, Artificial Sequence
  Description of Artificial Sequence: Synthetic oligonucleotide
ucucgcuuucacaucgccc

SEQ ID NO: 1568954 - RNA, 19 nt, Artificial Sequence
  Description of Artificial Sequence: Synthetic oligonucleotide
agucuucggauucucccuc

SEQ ID NO: 1568955 - RNA, 19 nt, Artificial Sequence
  Description of Artificial Sequence: Synthetic oligonucleotide
ggaguaccagaccagggcg

SEQ ID NO: 1568956 - RNA, 19 nt, Artificial Sequence
  Description of Artificial Sequence: Synthetic oligonucleotide
caagcagacauucaacaga

SEQ ID NO: 1568957 - RNA, 19 nt, Artificial Sequence
  Description of Artificial Sequence: Synthetic oligonucleotide
uccucggccuuacuagccg

SEQ ID NO: 1568958 - RNA, 19 nt, Artificial Sequence
  Description of Artificial Sequence: Synthetic oligonucleotide
caaccggagcuaaagcccg

SEQ ID NO: 1568959 - RNA, 19 nt, Artificial Sequence
  Description of Artificial Sequence: Synthetic oligonucleotide
acauagagcacuagagaag

SEQ ID NO: 1568960 - RNA, 19 nt, Artificial Sequence
  Description of Artificial Sequence: Synthetic oligonucleotide
ccucuaguuucuuaugucg

SEQ ID NO: 1568961 - RNA, 19 nt, Artificial Sequence
  Description of Artificial Sequence: Synthetic oligonucleotide
ggagauuuccgaaaucucc

SEQ ID NO: 1568962 - RNA, 19 nt, Artificial Sequence
  Description of Artificial Sequence: Synthetic oligonucleotide
aguucauagagacgcugga

SEQ ID NO: 1568963 - RNA, 19 nt, Artificial Sequence
  Description of Artificial Sequence: Synthetic oligonucleotide
ucucccagugcgaaggauc

SEQ ID NO: 1568964 - RNA, 19 nt, Artificial Sequence
  Description of Artificial Sequence: Synthetic oligonucleotide
uccguugccggggaaagag

SEQ ID NO: 1568965 - RNA, 19 nt, Artificial Sequence
  Description of Artificial Sequence: Synthetic oligonucleotide
uugccggggaaagagacug

SEQ ID NO: 1568966 - RNA, 19 nt, Artificial Sequence
  Description of Artificial Sequence: Synthetic oligonucleotide
gcaauagucaguacuuccg

SEQ ID NO: 1568967 - RNA, 19 nt, Artificial Sequence
  Description of Artificial Sequence: Synthetic oligonucleotide
ugaaauccacuggagauuu

SEQ ID NO: 1568968 - RNA, 19 nt, Artificial Sequence
  Description of Artificial Sequence: Synthetic oligonucleotide
agcguugggagcuucuagu

SEQ ID NO: 1568969 - RNA, 19 nt, Artificial Sequence
  Description of Artificial Sequence: Synthetic oligonucleotide
ugucgcuucauguccgaga

SEQ ID NO: 1568970 - RNA, 19 nt, Artificial Sequence
  Description of Artificial Sequence: Synthetic oligonucleotide
accuaguucgucaacucag

SEQ ID NO: 1568971 - RNA, 19 nt, Artificial Sequence
  Description of Artificial Sequence: Synthetic oligonucleotide
cugacugcggccagagacc

SEQ ID NO: 1568972 - RNA, 19 nt, Artificial Sequence
  Description of Artificial Sequence: Synthetic oligonucleotide
auuaggcucagcaaaccca

SEQ ID NO: 1568973 - RNA, 19 nt, Artificial Sequence
  Description of Artificial Sequence: Synthetic oligonucleotide
uccucuaguuucuuauguc

SEQ ID NO: 1568974 - RNA, 19 nt, Artificial Sequence
  Description of Artificial Sequence: Synthetic oligonucleotide
ucccggcaaggacagaccc

SEQ ID NO: 1568975 - RNA, 19 nt, Artificial Sequence
  Description of Artificial Sequence: Synthetic oligonucleotide
agagccuggaggccggaag

SEQ ID NO: 1568976 - RNA, 19 nt, Artificial Sequence
  Description of Artificial Sequence: Synthetic oligonucleotide
guacaaccggagcuaaagc

SEQ ID NO: 1568977 - RNA, 19 nt, Artificial Sequence
  Description of Artificial Sequence: Synthetic oligonucleotide
gacagaggcgccguugugc

SEQ ID NO: 1568978 - RNA, 19 nt, Artificial Sequence
  Description of Artificial Sequence: Synthetic oligonucleotide
gagucuaagcugaagaggu

SEQ ID NO: 1568979 - RNA, 19 nt, Artificial Sequence
  Description of Artificial Sequence: Synthetic oligonucleotide
uggacgggagucauuuccu

SEQ ID NO: 1568980 - RNA, 19 nt, Artificial Sequence
  Description of Artificial Sequence: Synthetic oligonucleotide
uggcguacgucuucuguca

SEQ ID NO: 1568981 - RNA, 19 nt, Artificial Sequence
  Description of Artificial Sequence: Synthetic oligonucleotide
gaucccggcaaggacagac

SEQ ID NO: 1568982 - RNA, 19 nt, Artificial Sequence
  Description of Artificial Sequence: Synthetic oligonucleotide
cuuccucggccuuacuagc

SEQ ID NO: 1568983 - RNA, 19 nt, Artificial Sequence
  Description of Artificial Sequence: Synthetic oligonucleotide
ucgcagaccuaguucguca

SEQ ID NO: 1568984 - RNA, 19 nt, Artificial Sequence
  Description of Artificial Sequence: Synthetic oligonucleotide
auagagcacuagagaagcc

SEQ ID NO: 1568985 - RNA, 19 nt, Artificial Sequence
  Description of Artificial Sequence: Synthetic oligonucleotide
cugcaagcagacauucaac

SEQ ID NO: 1568986 - RNA, 19 nt, Artificial Sequence
  Description of Artificial Sequence: Synthetic oligonucleotide
gaaagagacugcucccgga

SEQ ID NO: 1568987 - RNA, 19 nt, Artificial Sequence
  Description of Artificial Sequence: Synthetic oligonucleotide
uggauuucggagggugggg

SEQ ID NO: 1568988 - RNA, 19 nt, Artificial Sequence
  Description of Artificial Sequence: Synthetic oligonucleotide
cagucaguccaacacugac

SEQ ID NO: 1568989 - RNA, 19 nt, Artificial Sequence
  Description of Artificial Sequence: Synthetic oligonucleotide
uccuucggugucauuggcu

SEQ ID NO: 1568990 - RNA, 19 nt, Artificial Sequence
  Description of Artificial Sequence: Synthetic oligonucleotide
cucccgguguccuccaccg

SEQ ID NO: 1568991 - RNA, 19 nt, Artificial Sequence
  Description of Artificial Sequence: Synthetic oligonucleotide
gaccuaguucgucaacuca

SEQ ID NO: 1568992 - RNA, 19 nt, Artificial Sequence
  Description of Artificial Sequence: Synthetic oligonucleotide
acagaggcgccguugugcu

SEQ ID NO: 1568993 - RNA, 19 nt, Artificial Sequence
  Description of Artificial Sequence: Synthetic oligonucleotide
caguacuuccguugccggg

SEQ ID NO: 1568994 - RNA, 19 nt, Artificial Sequence
  Description of Artificial Sequence: Synthetic oligonucleotide
gaacugcaagcagacauuc

SEQ ID NO: 1568995 - RNA, 19 nt, Artificial Sequence
  Description of Artificial Sequence: Synthetic oligonucleotide
uucacaucgcccucuccaa

SEQ ID NO: 1568996 - RNA, 19 nt, Artificial Sequence
  Description of Artificial Sequence: Synthetic oligonucleotide
ucagacagaggcgccguug

SEQ ID NO: 1568997 - RNA, 19 nt, Artificial Sequence
  Description of Artificial Sequence: Synthetic oligonucleotide
agacccguccccaggaggg

SEQ ID NO: 1568998 - RNA, 19 nt, Artificial Sequence
  Description of Artificial Sequence: Synthetic oligonucleotide
ggacauagagcacuagaga

SEQ ID NO: 1568999 - RNA, 19 nt, Artificial Sequence
  Description of Artificial Sequence: Synthetic oligonucleotide
ucaacucagcggccguaca

SEQ ID NO: 1569000 - RNA, 19 nt, Artificial Sequence
  Description of Artificial Sequence: Synthetic oligonucleotide
uaugucgcuucauguccga

SEQ ID NO: 1569001 - RNA, 19 nt, Artificial Sequence
  Description of Artificial Sequence: Synthetic oligonucleotide
cucgcuuucacaucgcccu

SEQ ID NO: 1569002 - RNA, 19 nt, Artificial Sequence
  Description of Artificial Sequence: Synthetic oligonucleotide
ucacaucgcccucuccaac

SEQ ID NO: 1569003 - RNA, 19 nt, Artificial Sequence
  Description of Artificial Sequence: Synthetic oligonucleotide
cucggagcuggaaagggga

SEQ ID NO: 1569004 - RNA, 19 nt, Artificial Sequence
  Description of Artificial Sequence: Synthetic oligonucleotide
gccuuacuagccgagacag

SEQ ID NO: 1569005 - RNA, 19 nt, Artificial Sequence
  Description of Artificial Sequence: Synthetic oligonucleotide
aggaaccgcgcucggagcu

SEQ ID NO: 1569006 - RNA, 19 nt, Artificial Sequence
  Description of Artificial Sequence: Synthetic oligonucleotide
gagcucgcagaccuaguuc

SEQ ID NO: 1569007 - RNA, 19 nt, Artificial Sequence
  Description of Artificial Sequence: Synthetic oligonucleotide
gaagggcuggccacgacca

SEQ ID NO: 1569008 - RNA, 19 nt, Artificial Sequence
  Description of Artificial Sequence: Synthetic oligonucleotide
uucucccucggcgcgcucg

SEQ ID NO: 1569009 - RNA, 19 nt, Artificial Sequence
  Description of Artificial Sequence: Synthetic oligonucleotide
cagaacugcaagcagacau

SEQ ID NO: 1569010 - RNA, 19 nt, Artificial Sequence
  Description of Artificial Sequence: Synthetic oligonucleotide
aaccggagcuaaagcccgc

SEQ ID NO: 1569011 - RNA, 19 nt, Artificial Sequence
  Description of Artificial Sequence: Synthetic oligonucleotide
uguaggccccagcagcaau

SEQ ID NO: 1569012 - RNA, 19 nt, Artificial Sequence
  Description of Artificial Sequence: Synthetic oligonucleotide
accggagcuaaagcccgcc

SEQ ID NO: 1569013 - RNA, 19 nt, Artificial Sequence
  Description of Artificial Sequence: Synthetic oligonucleotide
gauuuccgaaaucuccagu

SEQ ID NO: 1569014 - RNA, 19 nt, Artificial Sequence
  Description of Artificial Sequence: Synthetic oligonucleotide
ucaggaguagguggccggc

SEQ ID NO: 1569015 - RNA, 19 nt, Artificial Sequence
  Description of Artificial Sequence: Synthetic oligonucleotide
gggagggccugcuuucucg

SEQ ID NO: 1569016 - RNA, 19 nt, Artificial Sequence
  Description of Artificial Sequence: Synthetic oligonucleotide
uagccgagacagagggacc

SEQ ID NO: 1569017 - RNA, 19 nt, Artificial Sequence
  Description of Artificial Sequence: Synthetic oligonucleotide
ugcggccagagacccgucc

SEQ ID NO: 1569018 - RNA, 19 nt, Artificial Sequence
  Description of Artificial Sequence: Synthetic oligonucleotide
aggaucuguuccucuaguu

SEQ ID NO: 1569019 - RNA, 19 nt, Artificial Sequence
  Description of Artificial Sequence: Synthetic oligonucleotide
cuuucacaucgcccucucc

SEQ ID NO: 1569020 - RNA, 19 nt, Artificial Sequence
  Description of Artificial Sequence: Synthetic oligonucleotide
ucauuuccuuagagcucgc

SEQ ID NO: 1569021 - RNA, 19 nt, Artificial Sequence
  Description of Artificial Sequence: Synthetic oligonucleotide
ggcagucucugccaaaaga

SEQ ID NO: 1569022 - RNA, 19 nt, Artificial Sequence
  Description of Artificial Sequence: Synthetic oligonucleotide
ccuaguucgucaacucagc

SEQ ID NO: 1569023 - RNA, 19 nt, Artificial Sequence
  Description of Artificial Sequence: Synthetic oligonucleotide
guaagagauucuggaguac

SEQ ID NO: 1569024 - RNA, 19 nt, Artificial Sequence
  Description of Artificial Sequence: Synthetic oligonucleotide
gcgggcuucgcguuucugg

SEQ ID NO: 1569025 - RNA, 19 nt, Artificial Sequence
  Description of Artificial Sequence: Synthetic oligonucleotide
cucacgcccggccuccucc

SEQ ID NO: 1569026 - RNA, 19 nt, Artificial Sequence
  Description of Artificial Sequence: Synthetic oligonucleotide
aucccggcaaggacagacc

SEQ ID NO: 1569027 - RNA, 19 nt, Artificial Sequence
  Description of Artificial Sequence: Synthetic oligonucleotide
acccgcaggaaccgcgcuc

SEQ ID NO: 1569028 - RNA, 19 nt, Artificial Sequence
  Description of Artificial Sequence: Synthetic oligonucleotide
cacaucgcccucuccaaca

SEQ ID NO: 1569029 - RNA, 19 nt, Artificial Sequence
  Description of Artificial Sequence: Synthetic oligonucleotide
uccuuagagcucgcagacc

SEQ ID NO: 1569030 - RNA, 19 nt, Artificial Sequence
  Description of Artificial Sequence: Synthetic oligonucleotide
aggaucggagcggagggcu

SEQ ID NO: 1569031 - RNA, 19 nt, Artificial Sequence
  Description of Artificial Sequence: Synthetic oligonucleotide
ucucucccagugcgaagga

SEQ ID NO: 1569032 - RNA, 19 nt, Artificial Sequence
  Description of Artificial Sequence: Synthetic oligonucleotide
cagcguugggagcuucuag

SEQ ID NO: 1569033 - RNA, 19 nt, Artificial Sequence
  Description of Artificial Sequence: Synthetic oligonucleotide
cucaucgcugcagggcacg

SEQ ID NO: 1569034 - RNA, 19 nt, Artificial Sequence
  Description of Artificial Sequence: Synthetic oligonucleotide
agaacugcaagcagacauu

SEQ ID NO: 1569035 - RNA, 19 nt, Artificial Sequence
  Description of Artificial Sequence: Synthetic oligonucleotide
gaaccgcgcucggagcugg

SEQ ID NO: 1569036 - RNA, 19 nt, Artificial Sequence
  Description of Artificial Sequence: Synthetic oligonucleotide
uagagcucgcagaccuagu

SEQ ID NO: 1569037 - RNA, 19 nt, Artificial Sequence
  Description of Artificial Sequence: Synthetic oligonucleotide
gcaugugcggcuuuuccuc

SEQ ID NO: 1569038 - RNA, 19 nt, Artificial Sequence
  Description of Artificial Sequence: Synthetic oligonucleotide
ucgucaacucagcggccgu

SEQ ID NO: 1569039 - RNA, 19 nt, Artificial Sequence
  Description of Artificial Sequence: Synthetic oligonucleotide
ucccggaggaucggagcgg

SEQ ID NO: 1569040 - RNA, 19 nt, Artificial Sequence
  Description of Artificial Sequence: Synthetic oligonucleotide
guacgucuucugucaauca

SEQ ID NO: 1569041 - RNA, 19 nt, Artificial Sequence
  Description of Artificial Sequence: Synthetic oligonucleotide
cagugcgaaggaucuguuc

SEQ ID NO: 1569042 - RNA, 19 nt, Artificial Sequence
  Description of Artificial Sequence: Synthetic oligonucleotide
ucucugccaaaagacucau

SEQ ID NO: 1569043 - RNA, 19 nt, Artificial Sequence
  Description of Artificial Sequence: Synthetic oligonucleotide
ccuggaucccucacgcccg

SEQ ID NO: 1569044 - RNA, 19 nt, Artificial Sequence
  Description of Artificial Sequence: Synthetic oligonucleotide
cagaccagggcgccucccc

SEQ ID NO: 1569045 - RNA, 19 nt, Artificial Sequence
  Description of Artificial Sequence: Synthetic oligonucleotide
caccuguaggccccagcag

SEQ ID NO: 1569046 - RNA, 19 nt, Artificial Sequence
  Description of Artificial Sequence: Synthetic oligonucleotide
guccuucggugucauuggc

SEQ ID NO: 1569047 - RNA, 19 nt, Artificial Sequence
  Description of Artificial Sequence: Synthetic oligonucleotide
ugccggggaaagagacugc

SEQ ID NO: 1569048 - RNA, 19 nt, Artificial Sequence
  Description of Artificial Sequence: Synthetic oligonucleotide
caauagucaguacuuccgu

SEQ ID NO: 1569049 - RNA, 19 nt, Artificial Sequence
  Description of Artificial Sequence: Synthetic oligonucleotide
accuggacgggagucauuu

SEQ ID NO: 1569050 - RNA, 19 nt, Artificial Sequence
  Description of Artificial Sequence: Synthetic oligonucleotide
aggccggaagucacuuccc

SEQ ID NO: 1569051 - RNA, 19 nt, Artificial Sequence
  Description of Artificial Sequence: Synthetic oligonucleotide
cagugaguccuucgguguc

SEQ ID NO: 1569052 - RNA, 19 nt, Artificial Sequence
  Description of Artificial Sequence: Synthetic oligonucleotide
cagcaaacccagcucagaa

SEQ ID NO: 1569053 - RNA, 19 nt, Artificial Sequence
  Description of Artificial Sequence: Synthetic oligonucleotide
cguacaaccggagcuaaag

SEQ ID NO: 1569054 - RNA, 19 nt, Artificial Sequence
  Description of Artificial Sequence: Synthetic oligonucleotide
ucgucgcccgcagcguugg

SEQ ID NO: 1569055 - RNA, 19 nt, Artificial Sequence
  Description of Artificial Sequence: Synthetic oligonucleotide
acggauccagauccagaau

SEQ ID NO: 1569056 - RNA, 19 nt, Artificial Sequence
  Description of Artificial Sequence: Synthetic oligonucleotide
gcguugggagcuucuagug

SEQ ID NO: 1569057 - RNA, 19 nt, Artificial Sequence
  Description of Artificial Sequence: Synthetic oligonucleotide
aucggagcggagggcuggc

SEQ ID NO: 1569058 - RNA, 19 nt, Artificial Sequence
  Description of Artificial Sequence: Synthetic oligonucleotide
cggauccagauccagaauc

SEQ ID NO: 1569059 - RNA, 19 nt, Artificial Sequence
  Description of Artificial Sequence: Synthetic oligonucleotide
gcaguucauagagacgcug

SEQ ID NO: 1569060 - RNA, 19 nt, Artificial Sequence
  Description of Artificial Sequence: Synthetic oligonucleotide
caggaguagguggccggcg

SEQ ID NO: 1569061 - RNA, 19 nt, Artificial Sequence
  Description of Artificial Sequence: Synthetic oligonucleotide
cuccgcuugaagcuccaga

SEQ ID NO: 1569062 - RNA, 19 nt, Artificial Sequence
  Description of Artificial Sequence: Synthetic oligonucleotide
cuggaucccucacgcccgg

SEQ ID NO: 1569063 - RNA, 19 nt, Artificial Sequence
  Description of Artificial Sequence: Synthetic oligonucleotide
acuuccguugccggggaaa

SEQ ID NO: 1569064 - RNA, 19 nt, Artificial Sequence
  Description of Artificial Sequence: Synthetic oligonucleotide
uguaggcaugugcggcuuu

SEQ ID NO: 1569065 - RNA, 19 nt, Artificial Sequence
  Description of Artificial Sequence: Synthetic oligonucleotide
gcacgcaccagucuucgga

SEQ ID NO: 1569066 - RNA, 19 nt, Artificial Sequence
  Description of Artificial Sequence: Synthetic oligonucleotide
caccccacggauccagauc

SEQ ID NO: 1569067 - RNA, 19 nt, Artificial Sequence
  Description of Artificial Sequence: Synthetic oligonucleotide
ggaucccucacgcccggcc

SEQ ID NO: 1569068 - RNA, 19 nt, Artificial Sequence
  Description of Artificial Sequence: Synthetic oligonucleotide
ucggccuuacuagccgaga

SEQ ID NO: 1569069 - RNA, 19 nt, Artificial Sequence
  Description of Artificial Sequence: Synthetic oligonucleotide
ucucccucggcgcgcucgu

SEQ ID NO: 1569070 - RNA, 19 nt, Artificial Sequence
  Description of Artificial Sequence: Synthetic oligonucleotide
cuucgcguuucuggcuccg

SEQ ID NO: 1569071 - RNA, 19 nt, Artificial Sequence
  Description of Artificial Sequence: Synthetic oligonucleotide
cuucggugucauuggcuca

SEQ ID NO: 1569072 - RNA, 19 nt, Artificial Sequence
  Description of Artificial Sequence: Synthetic oligonucleotide
agggcacgcaccagucuuc

SEQ ID NO: 1569073 - RNA, 19 nt, Artificial Sequence
  Description of Artificial Sequence: Synthetic oligonucleotide
ucacgcccggccuccuccc

SEQ ID NO: 1569074 - RNA, 19 nt, Artificial Sequence
  Description of Artificial Sequence: Synthetic oligonucleotide
augucgcuucauguccgag

SEQ ID NO: 1569075 - RNA, 19 nt, Artificial Sequence
  Description of Artificial Sequence: Synthetic oligonucleotide
cucgucgcccgcagcguug

SEQ ID NO: 1569076 - RNA, 19 nt, Artificial Sequence
  Description of Artificial Sequence: Synthetic oligonucleotide
ggagggccugcuuucucgc

SEQ ID NO: 1569077 - RNA, 19 nt, Artificial Sequence
  Description of Artificial Sequence: Synthetic oligonucleotide
uucagacagaggcgccguu

SEQ ID NO: 1569078 - RNA, 19 nt, Artificial Sequence
  Description of Artificial Sequence: Synthetic oligonucleotide
ucaucgcugcagggcacgc

SEQ ID NO: 1569079 - RNA, 19 nt, Artificial Sequence
  Description of Artificial Sequence: Synthetic oligonucleotide
ccaaaaggacugaaaucca

SEQ ID NO: 1569080 - RNA, 19 nt, Artificial Sequence
  Description of Artificial Sequence: Synthetic oligonucleotide
cucgcagaccuaguucguc

SEQ ID NO: 1569081 - RNA, 19 nt, Artificial Sequence
  Description of Artificial Sequence: Synthetic oligonucleotide
gcgcucgucgcccgcagcg

SEQ ID NO: 1569082 - RNA, 19 nt, Artificial Sequence
  Description of Artificial Sequence: Synthetic oligonucleotide
cugccguucccggggaccc

SEQ ID NO: 1569083 - RNA, 19 nt, Artificial Sequence
  Description of Artificial Sequence: Synthetic oligonucleotide
ggcuucgcguuucuggcuc

SEQ ID NO: 1569084 - RNA, 19 nt, Artificial Sequence
  Description of Artificial Sequence: Synthetic oligonucleotide
gagccuggaggccggaagu

SEQ ID NO: 1569085 - RNA, 19 nt, Artificial Sequence
  Description of Artificial Sequence: Synthetic oligonucleotide
ggccuuacuagccgagaca
